United States Patent Application Publication US 2026/0062450 A1 - sequence listing, part 2

SEQ ID NO: 24587 - protein, 7 aa, synthetic construct
RGDDITR

SEQ ID NO: 24588 - protein, 7 aa, synthetic construct
RGDVNHS

SEQ ID NO: 24589 - protein, 7 aa, synthetic construct
RGDVNIH

SEQ ID NO: 24590 - protein, 7 aa, synthetic construct
RGDVNTN

SEQ ID NO: 24591 - protein, 7 aa, synthetic construct
RGDVQDV

SEQ ID NO: 24592 - protein, 7 aa, synthetic construct
RGDVQGQ

SEQ ID NO: 24593 - protein, 7 aa, synthetic construct
RGDDKFI

SEQ ID NO: 24594 - protein, 7 aa, synthetic construct
RGDVSRD

SEQ ID NO: 24595 - protein, 7 aa, synthetic construct
RGDVTEN

SEQ ID NO: 24596 - protein, 7 aa, synthetic construct
RGDVTKA

SEQ ID NO: 24597 - protein, 7 aa, synthetic construct
RGDDKHF

SEQ ID NO: 24598 - protein, 7 aa, synthetic construct
RGDVTLH

SEQ ID NO: 24599 - protein, 7 aa, synthetic construct
RGDDKHR

SEQ ID NO: 24600 - protein, 7 aa, synthetic construct
RGDAEFN

SEQ ID NO: 24601 - protein, 7 aa, synthetic construct
RGDVVQF

SEQ ID NO: 24602 - protein, 7 aa, synthetic construct
RGDDLTL

SEQ ID NO: 24603 - protein, 7 aa, synthetic construct
RGDDNQD

SEQ ID NO: 24604 - protein, 7 aa, synthetic construct
RGDDNTE

SEQ ID NO: 24605 - protein, 7 aa, synthetic construct
RGDDQAK

SEQ ID NO: 24606 - protein, 7 aa, synthetic construct
RGDDRFH

SEQ ID NO: 24607 - protein, 7 aa, synthetic construct
RGDDSEI

SEQ ID NO: 24608 - protein, 7 aa, synthetic construct
RGDDSRT

SEQ ID NO: 24609 - protein, 7 aa, synthetic construct
RGDDSTF

SEQ ID NO: 24610 - protein, 7 aa, synthetic construct
RGDDSTK

SEQ ID NO: 24611 - protein, 7 aa, synthetic construct
RGDDTRF

SEQ ID NO: 24612 - protein, 7 aa, synthetic construct
RGDDVKI

SEQ ID NO: 24613 - protein, 7 aa, synthetic construct
RGDDVLR

SEQ ID NO: 24614 - protein, 7 aa, synthetic construct
RGDEAIR

SEQ ID NO: 24615 - protein, 7 aa, synthetic construct
RGDEAQH

SEQ ID NO: 24616 - protein, 7 aa, synthetic construct
RGDEAVK

SEQ ID NO: 24617 - protein, 7 aa, synthetic construct
RGDEEKQ

SEQ ID NO: 24618 - protein, 7 aa, synthetic construct
RGDEFFE

SEQ ID NO: 24619 - protein, 7 aa, synthetic construct
RGDEFHS

SEQ ID NO: 24620 - protein, 7 aa, synthetic construct
RGDAFHG

SEQ ID NO: 24621 - protein, 7 aa, synthetic construct
RGDAFHI

SEQ ID NO: 24622 - protein, 7 aa, synthetic construct
RGDEFRQ

SEQ ID NO: 24623 - protein, 7 aa, synthetic construct
RGDEGQL

SEQ ID NO: 24624 - protein, 7 aa, synthetic construct
RGDEHTK

SEQ ID NO: 24625 - protein, 7 aa, synthetic construct
RGDEKIR

SEQ ID NO: 24626 - protein, 7 aa, synthetic construct
RGDAFRH

SEQ ID NO: 24627 - protein, 7 aa, synthetic construct
RGDEKQL

SEQ ID NO: 24628 - protein, 7 aa, synthetic construct
RGDEKTV

SEQ ID NO: 24629 - protein, 7 aa, synthetic construct
RGDELFQ

SEQ ID NO: 24630 - protein, 7 aa, synthetic construct
RGDELVT

SEQ ID NO: 24631 - protein, 7 aa, synthetic construct
RGDENFR

SEQ ID NO: 24632 - protein, 7 aa, synthetic construct
RGDENRE

SEQ ID NO: 24633 - protein, 7 aa, synthetic construct
RGDESTK

SEQ ID NO: 24634 - protein, 7 aa, synthetic construct
RGDAGHK

SEQ ID NO: 24635 - protein, 7 aa, synthetic construct
RGDEVLK

SEQ ID NO: 24636 - protein, 7 aa, synthetic construct
RGDFAQA

SEQ ID NO: 24637 - protein, 7 aa, synthetic construct
RGDFDDN

SEQ ID NO: 24638 - protein, 7 aa, synthetic construct
RGDFDHA

SEQ ID NO: 24639 - protein, 7 aa, synthetic construct
RGDFEAQ

SEQ ID NO: 24640 - protein, 7 aa, synthetic construct
RGDFEDT

SEQ ID NO: 24641 - protein, 7 aa, synthetic construct
RGDFEGF

SEQ ID NO: 24642 - protein, 7 aa, synthetic construct
RGDFETH

SEQ ID NO: 24643 - protein, 7 aa, synthetic construct
RGDFFEI

SEQ ID NO: 24644 - protein, 7 aa, synthetic construct
RGDFFQF

SEQ ID NO: 24645 - protein, 7 aa, synthetic construct
RGDAGTL

SEQ ID NO: 24646 - protein, 7 aa, synthetic construct
RGDFHVN

SEQ ID NO: 24647 - protein, 7 aa, synthetic construct
RGDFIEK

SEQ ID NO: 24648 - protein, 7 aa, synthetic construct
RGDFIKA

SEQ ID NO: 24649 - protein, 7 aa, synthetic construct
RGDFITF

SEQ ID NO: 24650 - protein, 7 aa, synthetic construct
RGDAHHD

SEQ ID NO: 24651 - protein, 7 aa, synthetic construct
RGDFQEF

SEQ ID NO: 24652 - protein, 7 aa, synthetic construct
RGDFRIG

SEQ ID NO: 24653 - protein, 7 aa, synthetic construct
RGDFRSS

SEQ ID NO: 24654 - protein, 7 aa, synthetic construct
RGDAHQN

SEQ ID NO: 24655 - protein, 7 aa, synthetic construct
RGDFSIR

SEQ ID NO: 24656 - protein, 7 aa, synthetic construct
RGDAAAS

SEQ ID NO: 24657 - protein, 7 aa, synthetic construct
RGDFTEV

SEQ ID NO: 24658 - protein, 7 aa, synthetic construct
RGDFTFD

SEQ ID NO: 24659 - protein, 7 aa, synthetic construct
RGDFTIF

SEQ ID NO: 24660 - protein, 7 aa, synthetic construct
RGDFTQI

SEQ ID NO: 24661 - protein, 7 aa, synthetic construct
RGDFVRS

SEQ ID NO: 24662 - protein, 7 aa, synthetic construct
RGDGATF

SEQ ID NO: 24663 - protein, 7 aa, synthetic construct
RGDGDLK

SEQ ID NO: 24664 - protein, 7 aa, synthetic construct
RGDGDQV

SEQ ID NO: 24665 - protein, 7 aa, synthetic construct
RGDGEEE

SEQ ID NO: 24666 - protein, 7 aa, synthetic construct
RGDGEHS

SEQ ID NO: 24667 - protein, 7 aa, synthetic construct
RGDGEKV

SEQ ID NO: 24668 - protein, 7 aa, synthetic construct
RGDGFQF

SEQ ID NO: 24669 - protein, 7 aa, synthetic construct
RGDGHHH

SEQ ID NO: 24670 - protein, 7 aa, synthetic construct
RGDGHTE

SEQ ID NO: 24671 - protein, 7 aa, synthetic construct
RGDGIFE

SEQ ID NO: 24672 - protein, 7 aa, synthetic construct
RGDGLSR

SEQ ID NO: 24673 - protein, 7 aa, synthetic construct
RGDGNED

SEQ ID NO: 24674 - protein, 7 aa, synthetic construct
RGDGNSD

SEQ ID NO: 24675 - protein, 7 aa, synthetic construct
RGDGQDR

SEQ ID NO: 24676 - protein, 7 aa, synthetic construct
RGDGRIN

SEQ ID NO: 24677 - protein, 7 aa, synthetic construct
RGDGRQS

SEQ ID NO: 24678 - protein, 7 aa, synthetic construct
RGDGSLR

SEQ ID NO: 24679 - protein, 7 aa, synthetic construct
RGDGSNQ

SEQ ID NO: 24680 - protein, 7 aa, synthetic construct
RGDGSTH

SEQ ID NO: 24681 - protein, 7 aa, synthetic construct
RGDGTII

SEQ ID NO: 24682 - protein, 7 aa, synthetic construct
RGDGVDG

SEQ ID NO: 24683 - protein, 7 aa, synthetic construct
RGDGVEN

SEQ ID NO: 24684 - protein, 7 aa, synthetic construct
RGDGVGH

SEQ ID NO: 24685 - protein, 7 aa, synthetic construct
RGDGVQI

SEQ ID NO: 24686 - protein, 7 aa, synthetic construct
RGDGVQV

SEQ ID NO: 24687 - protein, 7 aa, synthetic construct
RGDHAEI

SEQ ID NO: 24688 - protein, 7 aa, synthetic construct
RGDHAEQ

SEQ ID NO: 24689 - protein, 7 aa, synthetic construct
RGDHARA

SEQ ID NO: 24690 - protein, 7 aa, synthetic construct
RGDHDAA

SEQ ID NO: 24691 - protein, 7 aa, synthetic construct
RGDHDFG

SEQ ID NO: 24692 - protein, 7 aa, synthetic construct
RGDHDSG

SEQ ID NO: 24693 - protein, 7 aa, synthetic construct
RGDHEAT

SEQ ID NO: 24694 - protein, 7 aa, synthetic construct
RGDHEES

SEQ ID NO: 24695 - protein, 7 aa, synthetic construct
RGDHGQQ

SEQ ID NO: 24696 - protein, 7 aa, synthetic construct
RGDHHFR

SEQ ID NO: 24697 - protein, 7 aa, synthetic construct
RGDHIHV

SEQ ID NO: 24698 - protein, 7 aa, synthetic construct
RGDHIND

SEQ ID NO: 24699 - protein, 7 aa, synthetic construct
RGDHKIS

SEQ ID NO: 24700 - protein, 7 aa, synthetic construct
RGDHLKT

SEQ ID NO: 24701 - protein, 7 aa, synthetic construct
RGDHNFI

SEQ ID NO: 24702 - protein, 7 aa, synthetic construct
RGDHNFN

SEQ ID NO: 24703 - protein, 7 aa, synthetic construct
RGDHNHA

SEQ ID NO: 24704 - protein, 7 aa, synthetic construct
RGDHNHT

SEQ ID NO: 24705 - protein, 7 aa, synthetic construct
RGDHQSQ

SEQ ID NO: 24706 - protein, 7 aa, synthetic construct
RGDHRHR

SEQ ID NO: 24707 - protein, 7 aa, synthetic construct
RGDHRIV

SEQ ID NO: 24708 - protein, 7 aa, synthetic construct
RGDHSDS

SEQ ID NO: 24709 - protein, 7 aa, synthetic construct
RGDHTAG

SEQ ID NO: 24710 - protein, 7 aa, synthetic construct
RGDHTAL

SEQ ID NO: 24711 - protein, 7 aa, synthetic construct
RGDALSQ

SEQ ID NO: 24712 - protein, 7 aa, synthetic construct
RGDHVDK

SEQ ID NO: 24713 - protein, 7 aa, synthetic construct
RGDHVQQ

SEQ ID NO: 24714 - protein, 7 aa, synthetic construct
RGDIALI

SEQ ID NO: 24715 - protein, 7 aa, synthetic construct
RGDIDSI

SEQ ID NO: 24716 - protein, 7 aa, synthetic construct
RGDIESA

SEQ ID NO: 24717 - protein, 7 aa, synthetic construct
RGDIEVS

SEQ ID NO: 24718 - protein, 7 aa, synthetic construct
RGDAAVA

SEQ ID NO: 24719 - protein, 7 aa, synthetic construct
RGDIFSE

SEQ ID NO: 24720 - protein, 7 aa, synthetic construct
RGDIHLQ

SEQ ID NO: 24721 - protein, 7 aa, synthetic construct
RGDIIKV

SEQ ID NO: 24722 - protein, 7 aa, synthetic construct
RGDIITH

SEQ ID NO: 24723 - protein, 7 aa, synthetic construct
RGDIKHD

SEQ ID NO: 24724 - protein, 7 aa, synthetic construct
RGDILLS

SEQ ID NO: 24725 - protein, 7 aa, synthetic construct
RGDANTQ

SEQ ID NO: 24726 - protein, 7 aa, synthetic construct
RGDINFH

SEQ ID NO: 24727 - protein, 7 aa, synthetic construct
RGDINFN

SEQ ID NO: 24728 - protein, 7 aa, synthetic construct
RGDINLR

SEQ ID NO: 24729 - protein, 7 aa, synthetic construct
RGDAQEQ

SEQ ID NO: 24730 - protein, 7 aa, synthetic construct
RGDADAL

SEQ ID NO: 24731 - protein, 7 aa, synthetic construct
RGDIVLH

SEQ ID NO: 24732 - protein, 7 aa, synthetic construct
RGDIVST

SEQ ID NO: 24733 - protein, 7 aa, synthetic construct
RGDKAIS

SEQ ID NO: 24734 - protein, 7 aa, synthetic construct
RGDKENH

SEQ ID NO: 24735 - protein, 7 aa, synthetic construct
RGDKFGE

SEQ ID NO: 24736 - protein, 7 aa, synthetic construct
RGDKGND

SEQ ID NO: 24737 - protein, 7 aa, synthetic construct
RGDKIEV

SEQ ID NO: 24738 - protein, 7 aa, synthetic construct
RGDKIRG

SEQ ID NO: 24739 - protein, 7 aa, synthetic construct
RGDAREN

SEQ ID NO: 24740 - protein, 7 aa, synthetic construct
RGDKKIA

SEQ ID NO: 24741 - protein, 7 aa, synthetic construct
RGDKLDA

SEQ ID NO: 24742 - protein, 7 aa, synthetic construct
RGDKLGG

SEQ ID NO: 24743 - protein, 7 aa, synthetic construct
RGDKQHD

SEQ ID NO: 24744 - protein, 7 aa, synthetic construct
RGDKRDE

SEQ ID NO: 24745 - protein, 7 aa, synthetic construct
RGDKSGE

SEQ ID NO: 24746 - protein, 7 aa, synthetic construct
RGDKSGL

SEQ ID NO: 24747 - protein, 7 aa, synthetic construct
RGDKVHQ

SEQ ID NO: 24748 - protein, 7 aa, synthetic construct
RGDKVRR

SEQ ID NO: 24749 - protein, 7 aa, synthetic construct
RGDKVSS

SEQ ID NO: 24750 - protein, 7 aa, synthetic construct
RGDKVTN

SEQ ID NO: 24751 - protein, 7 aa, synthetic construct
RGDLDAS

SEQ ID NO: 24752 - protein, 7 aa, synthetic construct
RGDLEDN

SEQ ID NO: 24753 - protein, 7 aa, synthetic construct
RGDLEFS

SEQ ID NO: 24754 - protein, 7 aa, synthetic construct
RGDLENN

SEQ ID NO: 24755 - protein, 7 aa, synthetic construct
RGDLFGK

SEQ ID NO: 24756 - protein, 7 aa, synthetic construct
RGDLGEL

SEQ ID NO: 24757 - protein, 7 aa, synthetic construct
RGDLHEK

SEQ ID NO: 24758 - protein, 7 aa, synthetic construct
RGDLHGD

SEQ ID NO: 24759 - protein, 7 aa, synthetic construct
RGDASND

SEQ ID NO: 24760 - protein, 7 aa, synthetic construct
RGDLIIT

SEQ ID NO: 24761 - protein, 7 aa, synthetic construct
RGDLILK

SEQ ID NO: 24762 - protein, 7 aa, synthetic construct
RGDLIQI

SEQ ID NO: 24763 - protein, 7 aa, synthetic construct
RGDLKIH

SEQ ID NO: 24764 - protein, 7 aa, synthetic construct
RGDLKRS

SEQ ID NO: 24765 - protein, 7 aa, synthetic construct
RGDLLSI

SEQ ID NO: 24766 - protein, 7 aa, synthetic construct
RGDLLTG

SEQ ID NO: 24767 - protein, 7 aa, synthetic construct
RGDLNLL

SEQ ID NO: 24768 - protein, 7 aa, synthetic construct
RGDLQLE

SEQ ID NO: 24769 - protein, 7 aa, synthetic construct
RGDLQQG

SEQ ID NO: 24770 - protein, 7 aa, synthetic construct
RGDLTQL

SEQ ID NO: 24771 - protein, 7 aa, synthetic construct
RGDLTTI

SEQ ID NO: 24772 - protein, 7 aa, synthetic construct
RGDNAAN

SEQ ID NO: 24773 - protein, 7 aa, synthetic construct
RGDNARG

SEQ ID NO: 24774 - protein, 7 aa, synthetic construct
RGDNDRL

SEQ ID NO: 24775 - protein, 7 aa, synthetic construct
RGDNDSR

SEQ ID NO: 24776 - protein, 7 aa, synthetic construct
RGDNEGH

SEQ ID NO: 24777 - protein, 7 aa, synthetic construct
RGDNEKH

SEQ ID NO: 24778 - protein, 7 aa, synthetic construct
RGDNGRD

SEQ ID NO: 24779 - protein, 7 aa, synthetic construct
RGDNHGR

SEQ ID NO: 24780 - protein, 7 aa, synthetic construct
RGDNHLK

SEQ ID NO: 24781 - protein, 7 aa, synthetic construct
RGDNHRN

SEQ ID NO: 24782 - protein, 7 aa, synthetic construct
RGDNIDN

SEQ ID NO: 24783 - protein, 7 aa, synthetic construct
RGDNITF

SEQ ID NO: 24784 - protein, 7 aa, synthetic construct
RGDNLEN

SEQ ID NO: 24785 - protein, 7 aa, synthetic construct
RGDNLGQ

SEQ ID NO: 24786 - protein, 7 aa, synthetic construct
RGDNQHR

SEQ ID NO: 24787 - protein, 7 aa, synthetic construct
RGDNQVS

SEQ ID NO: 24788 - protein, 7 aa, synthetic construct
RGDNREN

SEQ ID NO: 24789 - protein, 7 aa, synthetic construct
RGDNTDS

SEQ ID NO: 24790 - protein, 7 aa, synthetic construct
RGDAVTA

SEQ ID NO: 24791 - protein, 7 aa, synthetic construct
RGDNTRH

SEQ ID NO: 24792 - protein, 7 aa, synthetic construct
RGDNTVG

SEQ ID NO: 24793 - protein, 7 aa, synthetic construct
RGDNVDK

SEQ ID NO: 24794 - protein, 7 aa, synthetic construct
RGDQATG

SEQ ID NO: 24795 - protein, 7 aa, synthetic construct
RGDQDGV

SEQ ID NO: 24796 - protein, 7 aa, synthetic construct
RGDQEVH

SEQ ID NO: 24797 - protein, 7 aa, synthetic construct
RGDQFIR

SEQ ID NO: 24798 - protein, 7 aa, synthetic construct
RGDQGEI

SEQ ID NO: 24799 - protein, 7 aa, synthetic construct
RGDQGHD

SEQ ID NO: 24800 - protein, 7 aa, synthetic construct
RGDQGQH

SEQ ID NO: 24801 - protein, 7 aa, synthetic construct
RGDDAKV

SEQ ID NO: 24802 - protein, 7 aa, synthetic construct
RGDQIFS

SEQ ID NO: 24803 - protein, 7 aa, synthetic construct
RGDQIKG

SEQ ID NO: 24804 - protein, 7 aa, synthetic construct
RGDQINI

SEQ ID NO: 24805 - protein, 7 aa, synthetic construct
RGDQKST

SEQ ID NO: 24806 - protein, 7 aa, synthetic construct
RGDQNIV

SEQ ID NO: 24807 - protein, 7 aa, synthetic construct
RGDQQAQ

SEQ ID NO: 24808 - protein, 7 aa, synthetic construct
RGDQQLI

SEQ ID NO: 24809 - protein, 7 aa, synthetic construct
RGDDDAV

SEQ ID NO: 24810 - protein, 7 aa, synthetic construct
RGDDDDS

SEQ ID NO: 24811 - protein, 7 aa, synthetic construct
RGDQRSD

SEQ ID NO: 24812 - protein, 7 aa, synthetic construct
RGDQSLR

SEQ ID NO: 24813 - protein, 7 aa, synthetic construct
RGDQTFN

SEQ ID NO: 24814 - protein, 7 aa, synthetic construct
RGDQVID

SEQ ID NO: 24815 - protein, 7 aa, synthetic construct
RGDQVNT

SEQ ID NO: 24816 - protein, 7 aa, synthetic construct
RGDRDAV

SEQ ID NO: 24817 - protein, 7 aa, synthetic construct
RGDREEE

SEQ ID NO: 24818 - protein, 7 aa, synthetic construct
RGDREKS

SEQ ID NO: 24819 - protein, 7 aa, synthetic construct
RGDREQT

SEQ ID NO: 24820 - protein, 7 aa, synthetic construct
RGDRFAN

SEQ ID NO: 24821 - protein, 7 aa, synthetic construct
RGDRFEN

SEQ ID NO: 24822 - protein, 7 aa, synthetic construct
RGDRHKL

SEQ ID NO: 24823 - protein, 7 aa, synthetic construct
RGDRILH

SEQ ID NO: 24824 - protein, 7 aa, synthetic construct
RGDDEKT

SEQ ID NO: 24825 - protein, 7 aa, synthetic construct
RGDRRIL

SEQ ID NO: 24826 - protein, 7 aa, synthetic construct
RGDRSIS

SEQ ID NO: 24827 - protein, 7 aa, synthetic construct
RGDRSLD

SEQ ID NO: 24828 - protein, 7 aa, synthetic construct
RGDRTVD

SEQ ID NO: 24829 - protein, 7 aa, synthetic construct
RGDSAFQ

SEQ ID NO: 24830 - protein, 7 aa, synthetic construct
RGDSALV

SEQ ID NO: 24831 - protein, 7 aa, synthetic construct
RGDSEIF

SEQ ID NO: 24832 - protein, 7 aa, synthetic construct
RGDSGFG

SEQ ID NO: 24833 - protein, 7 aa, synthetic construct
RGDADSN

SEQ ID NO: 24834 - protein, 7 aa, synthetic construct
RGDSHES

SEQ ID NO: 24835 - protein, 7 aa, synthetic construct
RGDSKDN

SEQ ID NO: 24836 - protein, 7 aa, synthetic construct
RGDSKSH

SEQ ID NO: 24837 - protein, 7 aa, synthetic construct
RGDSLER

SEQ ID NO: 24838 - protein, 7 aa, synthetic construct
RGDSLRE

SEQ ID NO: 24839 - protein, 7 aa, synthetic construct
RGDSLSK

SEQ ID NO: 24840 - protein, 7 aa, synthetic construct
RGDSNAD

SEQ ID NO: 24841 - protein, 7 aa, synthetic construct
RGDSNDK

SEQ ID NO: 24842 - protein, 7 aa, synthetic construct
RGDSNGI

SEQ ID NO: 24843 - protein, 7 aa, synthetic construct
RGDSNKD

SEQ ID NO: 24844 - protein, 7 aa, synthetic construct
RGDSQNA

SEQ ID NO: 24845 - protein, 7 aa, synthetic construct
RGDSQVT

SEQ ID NO: 24846 - protein, 7 aa, synthetic construct
RGDDGDK

SEQ ID NO: 24847 - protein, 7 aa, synthetic construct
RGDSRIS

SEQ ID NO: 24848 - protein, 7 aa, synthetic construct
RGDSRNG

SEQ ID NO: 24849 - protein, 7 aa, synthetic construct
RGDDGEI

SEQ ID NO: 24850 - protein, 7 aa, synthetic construct
RGDSRNR

SEQ ID NO: 24851 - protein, 7 aa, synthetic construct
RGDSSQH

SEQ ID NO: 24852 - protein, 7 aa, synthetic construct
RGDSTFQ

SEQ ID NO: 24853 - protein, 7 aa, synthetic construct
RGDSTQT

SEQ ID NO: 24854 - protein, 7 aa, synthetic construct
RGDSVKR

SEQ ID NO: 24855 - protein, 7 aa, synthetic construct
RGDSVTD

SEQ ID NO: 24856 - protein, 7 aa, synthetic construct
RGDTASK

SEQ ID NO: 24857 - protein, 7 aa, synthetic construct
RGDTEFQ

SEQ ID NO: 24858 - protein, 7 aa, synthetic construct
RGDTEFR

SEQ ID NO: 24859 - protein, 7 aa, synthetic construct
RGDTGFE

SEQ ID NO: 24860 - protein, 7 aa, synthetic construct
RGDTHER

SEQ ID NO: 24861 - protein, 7 aa, synthetic construct
RGDTHFG

SEQ ID NO: 24862 - protein, 7 aa, synthetic construct
RGDTSNF

SEQ ID NO: 24863 - protein, 7 aa, synthetic construct
RGDTTLR

SEQ ID NO: 24864 - protein, 7 aa, synthetic construct
RGDDIAF

SEQ ID NO: 24865 - protein, 7 aa, synthetic construct
RGDVAVQ

SEQ ID NO: 24866 - protein, 7 aa, synthetic construct
RGDVDTF

SEQ ID NO: 24867 - protein, 7 aa, synthetic construct
RGDVFFQ

SEQ ID NO: 24868 - protein, 7 aa, synthetic construct
RGDVFTA

SEQ ID NO: 24869 - protein, 7 aa, synthetic construct
RGDVGFF

SEQ ID NO: 24870 - protein, 7 aa, synthetic construct
RGDVINF

SEQ ID NO: 24871 - protein, 7 aa, synthetic construct
RGDVITN

SEQ ID NO: 24872 - protein, 7 aa, synthetic construct
RGDVKTE

SEQ ID NO: 24873 - protein, 7 aa, synthetic construct
RGDVLAN

SEQ ID NO: 24874 - protein, 7 aa, synthetic construct
RGDVLSE

SEQ ID NO: 24875 - protein, 7 aa, synthetic construct
RGDVNFH

SEQ ID NO: 24876 - protein, 7 aa, synthetic construct
RGDVNLR

SEQ ID NO: 24877 - protein, 7 aa, synthetic construct
RGDDKDF

SEQ ID NO: 24878 - protein, 7 aa, synthetic construct
RGDDKEG

SEQ ID NO: 24879 - protein, 7 aa, synthetic construct
RGDDKET

SEQ ID NO: 24880 - protein, 7 aa, synthetic construct
RGDVSFF

SEQ ID NO: 24881 - protein, 7 aa, synthetic construct
RGDVSVE

SEQ ID NO: 24882 - protein, 7 aa, synthetic construct
RGDVVGN

SEQ ID NO: 24883 - protein, 7 aa, synthetic construct
RGDVVHE

SEQ ID NO: 24884 - protein, 7 aa, synthetic construct
RGDVVTG

SEQ ID NO: 24885 - protein, 7 aa, synthetic construct
RGDDLHH

SEQ ID NO: 24886 - protein, 7 aa, synthetic construct
RGDDLKD

SEQ ID NO: 24887 - protein, 7 aa, synthetic construct
RGDDLKH

SEQ ID NO: 24888 - protein, 7 aa, synthetic construct
RGDDLKL

SEQ ID NO: 24889 - protein, 7 aa, synthetic construct
RGDDLQL

SEQ ID NO: 24890 - protein, 7 aa, synthetic construct
RGDDNSA

SEQ ID NO: 24891 - protein, 7 aa, synthetic construct
RGDAAFQ

SEQ ID NO: 24892 - protein, 7 aa, synthetic construct
RGDDQGI

SEQ ID NO: 24893 - protein, 7 aa, synthetic construct
RGDDQKT

SEQ ID NO: 24894 - protein, 7 aa, synthetic construct
RGDDRFV

SEQ ID NO: 24895 - protein, 7 aa, synthetic construct
RGDDRKA

SEQ ID NO: 24896 - protein, 7 aa, synthetic construct
RGDDRQH

SEQ ID NO: 24897 - protein, 7 aa, synthetic construct
RGDDSHT

SEQ ID NO: 24898 - protein, 7 aa, synthetic construct
RGDEAKN

SEQ ID NO: 24899 - protein, 7 aa, synthetic construct
RGDEERF

SEQ ID NO: 24900 - protein, 7 aa, synthetic construct
RGDEFKS

SEQ ID NO: 24901 - protein, 7 aa, synthetic construct
RGDEFNI

SEQ ID NO: 24902 - protein, 7 aa, synthetic construct
RGDEFNN

SEQ ID NO: 24903 - protein, 7 aa, synthetic construct
RGDEGIQ

SEQ ID NO: 24904 - protein, 7 aa, synthetic construct
RGDEGTL

SEQ ID NO: 24905 - protein, 7 aa, synthetic construct
RGDEHSD

SEQ ID NO: 24906 - protein, 7 aa, synthetic construct
RGDAFQI

SEQ ID NO: 24907 - protein, 7 aa, synthetic construct
RGDEKIL

SEQ ID NO: 24908 - protein, 7 aa, synthetic construct
RGDEKKD

SEQ ID NO: 24909 - protein, 7 aa, synthetic construct
RGDEKNF

SEQ ID NO: 24910 - protein, 7 aa, synthetic construct
RGDEKTR

SEQ ID NO: 24911 - protein, 7 aa, synthetic construct
RGDELGF

SEQ ID NO: 24912 - protein, 7 aa, synthetic construct
RGDENGR

SEQ ID NO: 24913 - protein, 7 aa, synthetic construct
RGDENKQ

SEQ ID NO: 24914 - protein, 7 aa, synthetic construct
RGDENLI

SEQ ID NO: 24915 - protein, 7 aa, synthetic construct
RGDEQDG

SEQ ID NO: 24916 - protein, 7 aa, synthetic construct
RGDEQHE

SEQ ID NO: 24917 - protein, 7 aa, synthetic construct
RGDEQRG

SEQ ID NO: 24918 - protein, 7 aa, synthetic construct
RGDERKQ

SEQ ID NO: 24919 - protein, 7 aa, synthetic construct
RGDERQN

SEQ ID NO: 24920 - protein, 7 aa, synthetic construct
RGDERSQ

SEQ ID NO: 24921 - protein, 7 aa, synthetic construct
RGDESGI

SEQ ID NO: 24922 - protein, 7 aa, synthetic construct
RGDESKK

SEQ ID NO: 24923 - protein, 7 aa, synthetic construct
RGDESSG

SEQ ID NO: 24924 - protein, 7 aa, synthetic construct
RGDEVFQ

SEQ ID NO: 24925 - protein, 7 aa, synthetic construct
RGDEVFR

SEQ ID NO: 24926 - protein, 7 aa, synthetic construct
RGDEVGV

SEQ ID NO: 24927 - protein, 7 aa, synthetic construct
RGDAGLS

SEQ ID NO: 24928 - protein, 7 aa, synthetic construct
RGDFAVG

SEQ ID NO: 24929 - protein, 7 aa, synthetic construct
RGDFDAT

SEQ ID NO: 24930 - protein, 7 aa, synthetic construct
RGDFDTD

SEQ ID NO: 24931 - protein, 7 aa, synthetic construct
RGDFDTT

SEQ ID NO: 24932 - protein, 7 aa, synthetic construct
RGDFEEF

SEQ ID NO: 24933 - protein, 7 aa, synthetic construct
RGDAGQV

SEQ ID NO: 24934 - protein, 7 aa, synthetic construct
RGDFEIH

SEQ ID NO: 24935 - protein, 7 aa, synthetic construct
RGDAGRE

SEQ ID NO: 24936 - protein, 7 aa, synthetic construct
RGDFESD

SEQ ID NO: 24937 - protein, 7 aa, synthetic construct
RGDFGID

SEQ ID NO: 24938 - protein, 7 aa, synthetic construct
RGDFGLV

SEQ ID NO: 24939 - protein, 7 aa, synthetic construct
RGDFGSG

SEQ ID NO: 24940 - protein, 7 aa, synthetic construct
RGDFHRN

SEQ ID NO: 24941 - protein, 7 aa, synthetic construct
RGDAHFL

SEQ ID NO: 24942 - protein, 7 aa, synthetic construct
RGDFKIR

SEQ ID NO: 24943 - protein, 7 aa, synthetic construct
RGDFKRE

SEQ ID NO: 24944 - protein, 7 aa, synthetic construct
RGDFKRT

SEQ ID NO: 24945 - protein, 7 aa, synthetic construct
RGDFLAK

SEQ ID NO: 24946 - protein, 7 aa, synthetic construct
RGDFLRG

SEQ ID NO: 24947 - protein, 7 aa, synthetic construct
RGDFLVG

SEQ ID NO: 24948 - protein, 7 aa, synthetic construct
RGDFQAN

SEQ ID NO: 24949 - protein, 7 aa, synthetic construct
RGDFQNL

SEQ ID NO: 24950 - protein, 7 aa, synthetic construct
RGDFQQE

SEQ ID NO: 24951 - protein, 7 aa, synthetic construct
RGDFRAE

SEQ ID NO: 24952 - protein, 7 aa, synthetic construct
RGDFRSA

SEQ ID NO: 24953 - protein, 7 aa, synthetic construct
RGDFSND

SEQ ID NO: 24954 - protein, 7 aa, synthetic construct
RGDFTET

SEQ ID NO: 24955 - protein, 7 aa, synthetic construct
RGDFTGI

SEQ ID NO: 24956 - protein, 7 aa, synthetic construct
RGDFTLF

SEQ ID NO: 24957 - protein, 7 aa, synthetic construct
RGDFTVR

SEQ ID NO: 24958 - protein, 7 aa, synthetic construct
RGDFVDT

SEQ ID NO: 24959 - protein, 7 aa, synthetic construct
RGDFVEG

SEQ ID NO: 24960 - protein, 7 aa, synthetic construct
RGDFVEH

SEQ ID NO: 24961 - protein, 7 aa, synthetic construct
RGDGAEN

SEQ ID NO: 24962 - protein, 7 aa, synthetic construct
RGDGDGE

SEQ ID NO: 24963 - protein, 7 aa, synthetic construct
RGDGDGT

SEQ ID NO: 24964 - protein, 7 aa, synthetic construct
RGDGEEG

SEQ ID NO: 24965 - protein, 7 aa, synthetic construct
RGDGEGS

SEQ ID NO: 24966 - protein, 7 aa, synthetic construct
RGDGERF

SEQ ID NO: 24967 - protein, 7 aa, synthetic construct
RGDGFGK

SEQ ID NO: 24968 - protein, 7 aa, synthetic construct
RGDGGGD

SEQ ID NO: 24969 - protein, 7 aa, synthetic construct
RGDAIKK

SEQ ID NO: 24970 - protein, 7 aa, synthetic construct
RGDGHLN

SEQ ID NO: 24971 - protein, 7 aa, synthetic construct
RGDGIFT

SEQ ID NO: 24972 - protein, 7 aa, synthetic construct
RGDGKFT

SEQ ID NO: 24973 - protein, 7 aa, synthetic construct
RGDGKLE

SEQ ID NO: 24974 - protein, 7 aa, synthetic construct
RGDGNQR

SEQ ID NO: 24975 - protein, 7 aa, synthetic construct
RGDGQTQ

SEQ ID NO: 24976 - protein, 7 aa, synthetic construct
RGDAAQN

SEQ ID NO: 24977 - protein, 7 aa, synthetic construct
RGDGSQE

SEQ ID NO: 24978 - protein, 7 aa, synthetic construct
RGDAAQT

SEQ ID NO: 24979 - protein, 7 aa, synthetic construct
RGDGTQF

SEQ ID NO: 24980 - protein, 7 aa, synthetic construct
RGDHATG

SEQ ID NO: 24981 - protein, 7 aa, synthetic construct
RGDHDAE

SEQ ID NO: 24982 - protein, 7 aa, synthetic construct
RGDHDFT

SEQ ID NO: 24983 - protein, 7 aa, synthetic construct
RGDHDSI

SEQ ID NO: 24984 - protein, 7 aa, synthetic construct
RGDHERT

SEQ ID NO: 24985 - protein, 7 aa, synthetic construct
RGDHFGS

SEQ ID NO: 24986 - protein, 7 aa, synthetic construct
RGDHFKS

SEQ ID NO: 24987 - protein, 7 aa, synthetic construct
RGDHHRH

SEQ ID NO: 24988 - protein, 7 aa, synthetic construct
RGDHIKS

SEQ ID NO: 24989 - protein, 7 aa, synthetic construct
RGDHIST

SEQ ID NO: 24990 - protein, 7 aa, synthetic construct
RGDHKHK

SEQ ID NO: 24991 - protein, 7 aa, synthetic construct
RGDHKQE

SEQ ID NO: 24992 - protein, 7 aa, synthetic construct
RGDHKVT

SEQ ID NO: 24993 - protein, 7 aa, synthetic construct
RGDHLTK

SEQ ID NO: 24994 - protein, 7 aa, synthetic construct
RGDHNHH

SEQ ID NO: 24995 - protein, 7 aa, synthetic construct
RGDHRHG

SEQ ID NO: 24996 - protein, 7 aa, synthetic construct
RGDHVDS

SEQ ID NO: 24997 - protein, 7 aa, synthetic construct
RGDIAAG

SEQ ID NO: 24998 - protein, 7 aa, synthetic construct
RGDANAH

SEQ ID NO: 24999 - protein, 7 aa, synthetic construct
RGDIDFV

SEQ ID NO: 25000 - protein, 7 aa, synthetic construct
RGDIDHQ

SEQ ID NO: 25001 - protein, 7 aa, synthetic construct
RGDIDVV

SEQ ID NO: 25002 - protein, 7 aa, synthetic construct
RGDIFFI

SEQ ID NO: 25003 - protein, 7 aa, synthetic construct
RGDIKIF

SEQ ID NO: 25004 - protein, 7 aa, synthetic construct
RGDILTT

SEQ ID NO: 25005 - protein, 7 aa, synthetic construct
RGDINSH

SEQ ID NO: 25006 - protein, 7 aa, synthetic construct
RGDIRDF

SEQ ID NO: 25007 - protein, 7 aa, synthetic construct
RGDIRLN

SEQ ID NO: 25008 - protein, 7 aa, synthetic construct
RGDAQGQ

SEQ ID NO: 25009 - protein, 7 aa, synthetic construct
RGDITSS

SEQ ID NO: 25010 - protein, 7 aa, synthetic construct
RGDKDDR

SEQ ID NO: 25011 - protein, 7 aa, synthetic construct
RGDKDSR

SEQ ID NO: 25012 - protein, 7 aa, synthetic construct
RGDKIIQ

SEQ ID NO: 25013 - protein, 7 aa, synthetic construct
RGDKIQR

SEQ ID NO: 25014 - protein, 7 aa, synthetic construct
RGDKISE

SEQ ID NO: 25015 - protein, 7 aa, synthetic construct
RGDKITL

SEQ ID NO: 25016 - protein, 7 aa, synthetic construct
RGDKKLL

SEQ ID NO: 25017 - protein, 7 aa, synthetic construct
RGDKNAN

SEQ ID NO: 25018 - protein, 7 aa, synthetic construct
RGDKNQA

SEQ ID NO: 25019 - protein, 7 aa, synthetic construct
RGDKQNA

SEQ ID NO: 25020 - protein, 7 aa, synthetic construct
RGDKQSE

SEQ ID NO: 25021 - protein, 7 aa, synthetic construct
RGDKRSL

SEQ ID NO: 25022 - protein, 7 aa, synthetic construct
RGDKRVN

SEQ ID NO: 25023 - protein, 7 aa, synthetic construct
RGDKSQL

SEQ ID NO: 25024 - protein, 7 aa, synthetic construct
RGDKSVE

SEQ ID NO: 25025 - protein, 7 aa, synthetic construct
RGDKTKS

SEQ ID NO: 25026 - protein, 7 aa, synthetic construct
RGDKVES

SEQ ID NO: 25027 - protein, 7 aa, synthetic construct
RGDKVRH

SEQ ID NO: 25028 - protein, 7 aa, synthetic construct
RGDLAES

SEQ ID NO: 25029 - protein, 7 aa, synthetic construct
RGDASEI

SEQ ID NO: 25030 - protein, 7 aa, synthetic construct
RGDLEHF

SEQ ID NO: 25031 - protein, 7 aa, synthetic construct
RGDLFNL

SEQ ID NO: 25032 - protein, 7 aa, synthetic construct
RGDLGRF

SEQ ID NO: 25033 - protein, 7 aa, synthetic construct
RGDLGTG

SEQ ID NO: 25034 - protein, 7 aa, synthetic construct
RGDLIAN

SEQ ID NO: 25035 - protein, 7 aa, synthetic construct
RGDLIFA

SEQ ID NO: 25036 - protein, 7 aa, synthetic construct
RGDLIVL

SEQ ID NO: 25037 - protein, 7 aa, synthetic construct
RGDLKFI

SEQ ID NO: 25038 - protein, 7 aa, synthetic construct
RGDLLAQ

SEQ ID NO: 25039 - protein, 7 aa, synthetic construct
RGDLLEA

SEQ ID NO: 25040 - protein, 7 aa, synthetic construct
RGDLLVA

SEQ ID NO: 25041 - protein, 7 aa, synthetic construct
RGDLNEN

SEQ ID NO: 25042 - protein, 7 aa, synthetic construct
RGDLNFH

SEQ ID NO: 25043 - protein, 7 aa, synthetic construct
RGDLRED

SEQ ID NO: 25044 - protein, 7 aa, synthetic construct
RGDATDS

SEQ ID NO: 25045 - protein, 7 aa, synthetic construct
RGDLTFL

SEQ ID NO: 25046 - protein, 7 aa, synthetic construct
RGDATHQ

SEQ ID NO: 25047 - protein, 7 aa, synthetic construct
RGDATLS

SEQ ID NO: 25048 - protein, 7 aa, synthetic construct
RGDNEDG

SEQ ID NO: 25049 - protein, 7 aa, synthetic construct
RGDNGHQ

SEQ ID NO: 25050 - protein, 7 aa, synthetic construct
RGDATVI

SEQ ID NO: 25051 - protein, 7 aa, synthetic construct
RGDNGTN

SEQ ID NO: 25052 - protein, 7 aa, synthetic construct
RGDNHGE

SEQ ID NO: 25053 - protein, 7 aa, synthetic construct
RGDAVAI

SEQ ID NO: 25054 - protein, 7 aa, synthetic construct
RGDAVDQ

SEQ ID NO: 25055 - protein, 7 aa, synthetic construct
RGDNIGK

SEQ ID NO: 25056 - protein, 7 aa, synthetic construct
RGDNIGR

SEQ ID NO: 25057 - protein, 7 aa, synthetic construct
RGDNING

SEQ ID NO: 25058 - protein, 7 aa, synthetic construct
RGDAVES

SEQ ID NO: 25059 - protein, 7 aa, synthetic construct
RGDNKNS

SEQ ID NO: 25060 - protein, 7 aa, synthetic construct
RGDAVGE

SEQ ID NO: 25061 - protein, 7 aa, synthetic construct
RGDNLHG

SEQ ID NO: 25062 - protein, 7 aa, synthetic construct
RGDNNEF

SEQ ID NO: 25063 - protein, 7 aa, synthetic construct
RGDNNEI

SEQ ID NO: 25064 - protein, 7 aa, synthetic construct
RGDNQDI

SEQ ID NO: 25065 - protein, 7 aa, synthetic construct
RGDNQEN

SEQ ID NO: 25066 - protein, 7 aa, synthetic construct
RGDNRQE

SEQ ID NO: 25067 - protein, 7 aa, synthetic construct
RGDNSQH

SEQ ID NO: 25068 - protein, 7 aa, synthetic construct
RGDNTVV

SEQ ID NO: 25069 - protein, 7 aa, synthetic construct
RGDNVHS

SEQ ID NO: 25070 - protein, 7 aa, synthetic construct
RGDQEDT

SEQ ID NO: 25071 - protein, 7 aa, synthetic construct
RGDQESQ

SEQ ID NO: 25072 - protein, 7 aa, synthetic construct
RGDQEST

SEQ ID NO: 25073 - protein, 7 aa, synthetic construct
RGDQFFS

SEQ ID NO: 25074 - protein, 7 aa, synthetic construct
RGDADLK

SEQ ID NO: 25075 - protein, 7 aa, synthetic construct
RGDQITS

SEQ ID NO: 25076 - protein, 7 aa, synthetic construct
RGDDAQK

SEQ ID NO: 25077 - protein, 7 aa, synthetic construct
RGDQKLI

SEQ ID NO: 25078 - protein, 7 aa, synthetic construct
RGDQKTT

SEQ ID NO: 25079 - protein, 7 aa, synthetic construct
RGDDASE

SEQ ID NO: 25080 - protein, 7 aa, synthetic construct
RGDQLST

SEQ ID NO: 25081 - protein, 7 aa, synthetic construct
RGDDAVF

SEQ ID NO: 25082 - protein, 7 aa, synthetic construct
RGDQTLQ

SEQ ID NO: 25083 - protein, 7 aa, synthetic construct
RGDQTQT

SEQ ID NO: 25084 - protein, 7 aa, synthetic construct
RGDQVGE

SEQ ID NO: 25085 - protein, 7 aa, synthetic construct
RGDQVSN

SEQ ID NO: 25086 - protein, 7 aa, synthetic construct
RGDRDQV

SEQ ID NO: 25087 - protein, 7 aa, synthetic construct
RGDADQD

SEQ ID NO: 25088 - protein, 7 aa, synthetic construct
RGDDDTN

SEQ ID NO: 25089 - protein, 7 aa, synthetic construct
RGDRGHD

SEQ ID NO: 25090 - protein, 7 aa, synthetic construct
RGDDDVF

SEQ ID NO: 25091 - protein, 7 aa, synthetic construct
RGDRGSE

SEQ ID NO: 25092 - protein, 7 aa, synthetic construct
RGDRKTH

SEQ ID NO: 25093 - protein, 7 aa, synthetic construct
RGDRSDG

SEQ ID NO: 25094 - protein, 7 aa, synthetic construct
RGDSAVV

SEQ ID NO: 25095 - protein, 7 aa, synthetic construct
RGDSDFA

SEQ ID NO: 25096 - protein, 7 aa, synthetic construct
RGDSDGI

SEQ ID NO: 25097 - protein, 7 aa, synthetic construct
RGDSDLH

SEQ ID NO: 25098 - protein, 7 aa, synthetic construct
RGDSDQD

SEQ ID NO: 25099 - protein, 7 aa, synthetic construct
RGDDFHF

SEQ ID NO: 25100 - protein, 7 aa, synthetic construct
RGDDFHN

SEQ ID NO: 25101 - protein, 7 aa, synthetic construct
RGDSFTH

SEQ ID NO: 25102 - protein, 7 aa, synthetic construct
RGDSGET

SEQ ID NO: 25103 - protein, 7 aa, synthetic construct
RGDSGTF

SEQ ID NO: 25104 - protein, 7 aa, synthetic construct
RGDDFKN

SEQ ID NO: 25105 - protein, 7 aa, synthetic construct
RGDSHFA

SEQ ID NO: 25106 - protein, 7 aa, synthetic construct
RGDSHVQ

SEQ ID NO: 25107 - protein, 7 aa, synthetic construct
RGDSIHD

SEQ ID NO: 25108 - protein, 7 aa, synthetic construct
RGDSKAQ

SEQ ID NO: 25109 - protein, 7 aa, synthetic construct
RGDSKDQ

SEQ ID NO: 25110 - protein, 7 aa, synthetic construct
RGDSKEV

SEQ ID NO: 25111 - protein, 7 aa, synthetic construct
RGDSLHL

SEQ ID NO: 25112 - protein, 7 aa, synthetic construct
RGDSNVQ

SEQ ID NO: 25113 - protein, 7 aa, synthetic construct
RGDDGFV

SEQ ID NO: 25114 - protein, 7 aa, synthetic construct
RGDSSVG

SEQ ID NO: 25115 - protein, 7 aa, synthetic construct
RGDSTEQ

SEQ ID NO: 25116 - protein, 7 aa, synthetic construct
RGDSVAK

SEQ ID NO: 25117 - protein, 7 aa, synthetic construct
RGDDGIK

SEQ ID NO: 25118 - protein, 7 aa, synthetic construct
RGDSVNR

SEQ ID NO: 25119 - protein, 7 aa, synthetic construct
RGDTATN

SEQ ID NO: 25120 - protein, 7 aa, synthetic construct
RGDTEVS

SEQ ID NO: 25121 - protein, 7 aa, synthetic construct
RGDDGSV

SEQ ID NO: 25122 - protein, 7 aa, synthetic construct
RGDTGGG

SEQ ID NO: 25123 - protein, 7 aa, synthetic construct
RGDTIFN

SEQ ID NO: 25124 - protein, 7 aa, synthetic construct
RGDTIHT

SEQ ID NO: 25125 - protein, 7 aa, synthetic construct
RGDTISS

SEQ ID NO: 25126 - protein, 7 aa, synthetic construct
RGDTITQ

SEQ ID NO: 25127 - protein, 7 aa, synthetic construct
RGDTIVF

SEQ ID NO: 25128 - protein, 7 aa, synthetic construct
RGDTKAA

SEQ ID NO: 25129 - protein, 7 aa, synthetic construct
RGDTKDQ

SEQ ID NO: 25130 - protein, 7 aa, synthetic construct
RGDTKKR

SEQ ID NO: 25131 - protein, 7 aa, synthetic construct
RGDDHHG

SEQ ID NO: 25132 - protein, 7 aa, synthetic construct
RGDTLSF

SEQ ID NO: 25133 - protein, 7 aa, synthetic construct
RGDTNFD

SEQ ID NO: 25134 - protein, 7 aa, synthetic construct
RGDTNGI

SEQ ID NO: 25135 - protein, 7 aa, synthetic construct
RGDTNVN

SEQ ID NO: 25136 - protein, 7 aa, synthetic construct
RGDTQRF

SEQ ID NO: 25137 - protein, 7 aa, synthetic construct
RGDTQSH

SEQ ID NO: 25138 - protein, 7 aa, synthetic construct
RGDAEAT

SEQ ID NO: 25139 - protein, 7 aa, synthetic construct
RGDTRQD

SEQ ID NO: 25140 - protein, 7 aa, synthetic construct
RGDTSLR

SEQ ID NO: 25141 - protein, 7 aa, synthetic construct
RGDTSNL

SEQ ID NO: 25142 - protein, 7 aa, synthetic construct
RGDTSSA

SEQ ID NO: 25143 - protein, 7 aa, synthetic construct
RGDTSVT

SEQ ID NO: 25144 - protein, 7 aa, synthetic construct
RGDDHSS

SEQ ID NO: 25145 - protein, 7 aa, synthetic construct
RGDTVLN

SEQ ID NO: 25146 - protein, 7 aa, synthetic construct
RGDVAAS

SEQ ID NO: 25147 - protein, 7 aa, synthetic construct
RGDVAGL

SEQ ID NO: 25148 - protein, 7 aa, synthetic construct
RGDVAVN

SEQ ID NO: 25149 - protein, 7 aa, synthetic construct
RGDVDHS

SEQ ID NO: 25150 - protein, 7 aa, synthetic construct
RGDVDTE

SEQ ID NO: 25151 - protein, 7 aa, synthetic construct
RGDVEKV

SEQ ID NO: 25152 - protein, 7 aa, synthetic construct
RGDVETG

SEQ ID NO: 25153 - protein, 7 aa, synthetic construct
RGDVHET

SEQ ID NO: 25154 - protein, 7 aa, synthetic construct
RGDVHVH

SEQ ID NO: 25155 - protein, 7 aa, synthetic construct
RGDVIIT

SEQ ID NO: 25156 - protein, 7 aa, synthetic construct
RGDVKID

SEQ ID NO: 25157 - protein, 7 aa, synthetic construct
RGDVLGT

SEQ ID NO: 25158 - protein, 7 aa, synthetic construct
RGDVLIA

SEQ ID NO: 25159 - protein, 7 aa, synthetic construct
RGDVLVL

SEQ ID NO: 25160 - protein, 7 aa, synthetic construct
RGDVNNF

SEQ ID NO: 25161 - protein, 7 aa, synthetic construct
RGDVREV

SEQ ID NO: 25162 - protein, 7 aa, synthetic construct
RGDVSEN

SEQ ID NO: 25163 - protein, 7 aa, synthetic construct
RGDVSIQ

SEQ ID NO: 25164 - protein, 7 aa, synthetic construct
RGDVTFD

SEQ ID NO: 25165 - protein, 7 aa, synthetic construct
RGDVVAF

SEQ ID NO: 25166 - protein, 7 aa, synthetic construct
RGDAEFQ

SEQ ID NO: 25167 - protein, 7 aa, synthetic construct
RGDAEII

SEQ ID NO: 25168 - protein, 7 aa, synthetic construct
RGDDNRD

SEQ ID NO: 25169 - protein, 7 aa, synthetic construct
RGDDQFL

SEQ ID NO: 25170 - protein, 7 aa, synthetic construct
RGDAENF

SEQ ID NO: 25171 - protein, 7 aa, synthetic construct
RGDDRGF

SEQ ID NO: 25172 - protein, 7 aa, synthetic construct
RGDDRHG

SEQ ID NO: 25173 - protein, 7 aa, synthetic construct
RGDDSIT

SEQ ID NO: 25174 - protein, 7 aa, synthetic construct
RGDDTEH

SEQ ID NO: 25175 - protein, 7 aa, synthetic construct
RGDDVAL

SEQ ID NO: 25176 - protein, 7 aa, synthetic construct
RGDEARR

SEQ ID NO: 25177 - protein, 7 aa, synthetic construct
RGDEATN

SEQ ID NO: 25178 - protein, 7 aa, synthetic construct
RGDAFDL

SEQ ID NO: 25179 - protein, 7 aa, synthetic construct
RGDEDEF

SEQ ID NO: 25180 - protein, 7 aa, synthetic construct
RGDEESV

SEQ ID NO: 25181 - protein, 7 aa, synthetic construct
RGDEGHG

SEQ ID NO: 25182 - protein, 7 aa, synthetic construct
RGDEIKF

SEQ ID NO: 25183 - protein, 7 aa, synthetic construct
RGDEKKI

SEQ ID NO: 25184 - protein, 7 aa, synthetic construct
RGDEKSE

SEQ ID NO: 25185 - protein, 7 aa, synthetic construct
RGDAFSQ

SEQ ID NO: 25186 - protein, 7 aa, synthetic construct
RGDELTE

SEQ ID NO: 25187 - protein, 7 aa, synthetic construct
RGDENFS

SEQ ID NO: 25188 - protein, 7 aa, synthetic construct
RGDEQED

SEQ ID NO: 25189 - protein, 7 aa, synthetic construct
RGDEQSF

SEQ ID NO: 25190 - protein, 7 aa, synthetic construct
RGDESII

SEQ ID NO: 25191 - protein, 7 aa, synthetic construct
RGDEVFI

SEQ ID NO: 25192 - protein, 7 aa, synthetic construct
RGDEVHV

SEQ ID NO: 25193 - protein, 7 aa, synthetic construct
RGDAVGV

SEQ ID NO: 25194 - protein, 7 aa, synthetic construct
RGDEVRI

SEQ ID NO: 25195 - protein, 7 aa, synthetic construct
RGDFADS

SEQ ID NO: 25196 - protein, 7 aa, synthetic construct
RGDFAVF

SEQ ID NO: 25197 - protein, 7 aa, synthetic construct
RGDFAVQ

SEQ ID NO: 25198 - protein, 7 aa, synthetic construct
RGDFDDH

SEQ ID NO: 25199 - protein, 7 aa, synthetic construct
RGDFDGT

SEQ ID NO: 25200 - protein, 7 aa, synthetic construct
RGDFDRQ

SEQ ID NO: 25201 - protein, 7 aa, synthetic construct
RGDFETR

SEQ ID NO: 25202 - protein, 7 aa, synthetic construct
RGDAGSD

SEQ ID NO: 25203 - protein, 7 aa, synthetic construct
RGDAGVQ

SEQ ID NO: 25204 - protein, 7 aa, synthetic construct
RGDFHRS

SEQ ID NO: 25205 - protein, 7 aa, synthetic construct
RGDFIFI

SEQ ID NO: 25206 - protein, 7 aa, synthetic construct
RGDFLAQ

SEQ ID NO: 25207 - protein, 7 aa, synthetic construct
RGDFNEE

SEQ ID NO: 25208 - protein, 7 aa, synthetic construct
RGDFNLI

SEQ ID NO: 25209 - protein, 7 aa, synthetic construct
RGDFNSK

SEQ ID NO: 25210 - protein, 7 aa, synthetic construct
RGDFQDF

SEQ ID NO: 25211 - protein, 7 aa, synthetic construct
RGDFQEE

SEQ ID NO: 25212 - protein, 7 aa, synthetic construct
RGDFQIS

SEQ ID NO: 25213 - protein, 7 aa, synthetic construct
RGDAALG

SEQ ID NO: 25214 - protein, 7 aa, synthetic construct
RGDFQRG

SEQ ID NO: 25215 - protein, 7 aa, synthetic construct
RGDFRDH

SEQ ID NO: 25216 - protein, 7 aa, synthetic construct
RGDFRQF

SEQ ID NO: 25217 - protein, 7 aa, synthetic construct
RGDFSDA

SEQ ID NO: 25218 - protein, 7 aa, synthetic construct
RGDFSDV

SEQ ID NO: 25219 - protein, 7 aa, synthetic construct
RGDFSLN

SEQ ID NO: 25220 - protein, 7 aa, synthetic construct
RGDFTKL

SEQ ID NO: 25221 - protein, 7 aa, synthetic construct
RGDFTLI

SEQ ID NO: 25222 - protein, 7 aa, synthetic construct
RGDFVNF

SEQ ID NO: 25223 - protein, 7 aa, synthetic construct
RGDFVRD

SEQ ID NO: 25224 - protein, 7 aa, synthetic construct
RGDGAAF

SEQ ID NO: 25225 - protein, 7 aa, synthetic construct
RGDGANF

SEQ ID NO: 25226 - protein, 7 aa, synthetic construct
RGDGDHF

SEQ ID NO: 25227 - protein, 7 aa, synthetic construct
RGDGEHR

SEQ ID NO: 25228 - protein, 7 aa, synthetic construct
RGDGEKQ

SEQ ID NO: 25229 - protein, 7 aa, synthetic construct
RGDGELF

SEQ ID NO: 25230 - protein, 7 aa, synthetic construct
RGDGFAA

SEQ ID NO: 25231 - protein, 7 aa, synthetic construct
RGDGFLV

SEQ ID NO: 25232 - protein, 7 aa, synthetic construct
RGDGFSR

SEQ ID NO: 25233 - protein, 7 aa, synthetic construct
RGDGGES

SEQ ID NO: 25234 - protein, 7 aa, synthetic construct
RGDGGKA

SEQ ID NO: 25235 - protein, 7 aa, synthetic construct
RGDGHGQ

SEQ ID NO: 25236 - protein, 7 aa, synthetic construct
RGDGHNS

SEQ ID NO: 25237 - protein, 7 aa, synthetic construct
RGDGITF

SEQ ID NO: 25238 - protein, 7 aa, synthetic construct
RGDGKGA

SEQ ID NO: 25239 - protein, 7 aa, synthetic construct
RGDGNGE

SEQ ID NO: 25240 - protein, 7 aa, synthetic construct
RGDGQES

SEQ ID NO: 25241 - protein, 7 aa, synthetic construct
RGDGRDH

SEQ ID NO: 25242 - protein, 7 aa, synthetic construct
RGDAKDQ

SEQ ID NO: 25243 - protein, 7 aa, synthetic construct
RGDGRSE

SEQ ID NO: 25244 - protein, 7 aa, synthetic construct
RGDGRVH

SEQ ID NO: 25245 - protein, 7 aa, synthetic construct
RGDGSAE

SEQ ID NO: 25246 - protein, 7 aa, synthetic construct
RGDGTDI

SEQ ID NO: 25247 - protein, 7 aa, synthetic construct
RGDGTFG

SEQ ID NO: 25248 - protein, 7 aa, synthetic construct
RGDAARA

SEQ ID NO: 25249 - protein, 7 aa, synthetic construct
RGDGVAT

SEQ ID NO: 25250 - protein, 7 aa, synthetic construct
RGDAARD

SEQ ID NO: 25251 - protein, 7 aa, synthetic construct
RGDHALH

SEQ ID NO: 25252 - protein, 7 aa, synthetic construct
RGDAKLV

SEQ ID NO: 25253 - protein, 7 aa, synthetic construct
RGDHDER

SEQ ID NO: 25254 - protein, 7 aa, synthetic construct
RGDAKQF

SEQ ID NO: 25255 - protein, 7 aa, synthetic construct
RGDHDTT

SEQ ID NO: 25256 - protein, 7 aa, synthetic construct
RGDHETS

SEQ ID NO: 25257 - protein, 7 aa, synthetic construct
RGDHFNF

SEQ ID NO: 25258 - protein, 7 aa, synthetic construct
RGDHFNK

SEQ ID NO: 25259 - protein, 7 aa, synthetic construct
RGDHFTI

SEQ ID NO: 25260 - protein, 7 aa, synthetic construct
RGDHGIE

SEQ ID NO: 25261 - protein, 7 aa, synthetic construct
RGDHGKQ

SEQ ID NO: 25262 - protein, 7 aa, synthetic construct
RGDHGLD

SEQ ID NO: 25263 - protein, 7 aa, synthetic construct
RGDHHGV

SEQ ID NO: 25264 - protein, 7 aa, synthetic construct
RGDHHHE

SEQ ID NO: 25265 - protein, 7 aa, synthetic construct
RGDHIQG

SEQ ID NO: 25266 - protein, 7 aa, synthetic construct
RGDHIRS

SEQ ID NO: 25267 - protein, 7 aa, synthetic construct
RGDHITN

SEQ ID NO: 25268 - protein, 7 aa, synthetic construct
RGDHKQN

SEQ ID NO: 25269 - protein, 7 aa, synthetic construct
RGDHKVF

SEQ ID NO: 25270 - protein, 7 aa, synthetic construct
RGDHNAV

SEQ ID NO: 25271 - protein, 7 aa, synthetic construct
RGDHQFQ

SEQ ID NO: 25272 - protein, 7 aa, synthetic construct
RGDHTAF

SEQ ID NO: 25273 - protein, 7 aa, synthetic construct
RGDHTQD

SEQ ID NO: 25274 - protein, 7 aa, synthetic construct
RGDHVVH

SEQ ID NO: 25275 - protein, 7 aa, synthetic construct
RGDHVVQ

SEQ ID NO: 25276 - protein, 7 aa, synthetic construct
RGDIESV

SEQ ID NO: 25277 - protein, 7 aa, synthetic construct
RGDIEVT

SEQ ID NO: 25278 - protein, 7 aa, synthetic construct
RGDIFLI

SEQ ID NO: 25279 - protein, 7 aa, synthetic construct
RGDIHRT

SEQ ID NO: 25280 - protein, 7 aa, synthetic construct
RGDAAVH

SEQ ID NO: 25281 - protein, 7 aa, synthetic construct
RGDINIE

SEQ ID NO: 25282 - protein, 7 aa, synthetic construct
RGDINQT

SEQ ID NO: 25283 - protein, 7 aa, synthetic construct
RGDIQRA

SEQ ID NO: 25284 - protein, 7 aa, synthetic construct
RGDIRKE

SEQ ID NO: 25285 - protein, 7 aa, synthetic construct
RGDISLL

SEQ ID NO: 25286 - protein, 7 aa, synthetic construct
RGDITNS

SEQ ID NO: 25287 - protein, 7 aa, synthetic construct
RGDITRD

SEQ ID NO: 25288 - protein, 7 aa, synthetic construct
RGDITVT

SEQ ID NO: 25289 - protein, 7 aa, synthetic construct
RGDKDST

SEQ ID NO: 25290 - protein, 7 aa, synthetic construct
RGDKELV

SEQ ID NO: 25291 - protein, 7 aa, synthetic construct
RGDKFND

SEQ ID NO: 25292 - protein, 7 aa, synthetic construct
RGDKHNE

SEQ ID NO: 25293 - protein, 7 aa, synthetic construct
RGDKIKA

SEQ ID NO: 25294 - protein, 7 aa, synthetic construct
RGDKILF

SEQ ID NO: 25295 - protein, 7 aa, synthetic construct
RGDKINA

SEQ ID NO: 25296 - protein, 7 aa, synthetic construct
RGDKLLQ

SEQ ID NO: 25297 - protein, 7 aa, synthetic construct
RGDKNKA

SEQ ID NO: 25298 - protein, 7 aa, synthetic construct
RGDKQNR

SEQ ID NO: 25299 - protein, 7 aa, synthetic construct
RGDKSQE

SEQ ID NO: 25300 - protein, 7 aa, synthetic construct
RGDARSD

SEQ ID NO: 25301 - protein, 7 aa, synthetic construct
RGDKTDS

SEQ ID NO: 25302 - protein, 7 aa, synthetic construct
RGDLDST

SEQ ID NO: 25303 - protein, 7 aa, synthetic construct
RGDLEKK

SEQ ID NO: 25304 - protein, 7 aa, synthetic construct
RGDLESK

SEQ ID NO: 25305 - protein, 7 aa, synthetic construct
RGDLFLD

SEQ ID NO: 25306 - protein, 7 aa, synthetic construct
RGDLGEF

SEQ ID NO: 25307 - protein, 7 aa, synthetic construct
RGDLGES

SEQ ID NO: 25308 - protein, 7 aa, synthetic construct
RGDLGFL

SEQ ID NO: 25309 - protein, 7 aa, synthetic construct
RGDLGLK

SEQ ID NO: 25310 - protein, 7 aa, synthetic construct
RGDLHFK

SEQ ID NO: 25311 - protein, 7 aa, synthetic construct
RGDLIDI

SEQ ID NO: 25312 - protein, 7 aa, synthetic construct
RGDLKSK

SEQ ID NO: 25313 - protein, 7 aa, synthetic construct
RGDLLLV

SEQ ID NO: 25314 - protein, 7 aa, synthetic construct
RGDLNAI

SEQ ID NO: 25315 - protein, 7 aa, synthetic construct
RGDLNDQ

SEQ ID NO: 25316 - protein, 7 aa, synthetic construct
RGDASTT

SEQ ID NO: 25317 - protein, 7 aa, synthetic construct
RGDLNHF

SEQ ID NO: 25318 - protein, 7 aa, synthetic construct
RGDLNTR

SEQ ID NO: 25319 - protein, 7 aa, synthetic construct
RGDLQVF

SEQ ID NO: 25320 - protein, 7 aa, synthetic construct
RGDLRDR

SEQ ID NO: 25321 - protein, 7 aa, synthetic construct
RGDLREI

SEQ ID NO: 25322 - protein, 7 aa, synthetic construct
RGDLSEH

SEQ ID NO: 25323 - protein, 7 aa, synthetic construct
RGDLSER

SEQ ID NO: 25324 - protein, 7 aa, synthetic construct
RGDLTQA

SEQ ID NO: 25325 - protein, 7 aa, synthetic construct
RGDNADE

SEQ ID NO: 25326 - protein, 7 aa, synthetic construct
RGDNEKS

SEQ ID NO: 25327 - protein, 7 aa, synthetic construct
RGDNETQ

SEQ ID NO: 25328 - protein, 7 aa, synthetic construct
RGDNFNV

SEQ ID NO: 25329 - protein, 7 aa, synthetic construct
RGDNHGQ

SEQ ID NO: 25330 - protein, 7 aa, synthetic construct
RGDNNEL

SEQ ID NO: 25331 - protein, 7 aa, synthetic construct
RGDNNFS

SEQ ID NO: 25332 - protein, 7 aa, synthetic construct
RGDNNKD

SEQ ID NO: 25333 - protein, 7 aa, synthetic construct
RGDAVIQ

SEQ ID NO: 25334 - protein, 7 aa, synthetic construct
RGDNNLL

SEQ ID NO: 25335 - protein, 7 aa, synthetic construct
RGDNRDE

SEQ ID NO: 25336 - protein, 7 aa, synthetic construct
RGDNRHE

SEQ ID NO: 25337 - protein, 7 aa, synthetic construct
RGDNSAQ

SEQ ID NO: 25338 - protein, 7 aa, synthetic construct
RGDNSNI

SEQ ID NO: 25339 - protein, 7 aa, synthetic construct
RGDNTTA

SEQ ID NO: 25340 - protein, 7 aa, synthetic construct
RGDNVFE

SEQ ID NO: 25341 - protein, 7 aa, synthetic construct
RGDQEHD

SEQ ID NO: 25342 - protein, 7 aa, synthetic construct
RGDQGGD

SEQ ID NO: 25343 - protein, 7 aa, synthetic construct
RGDQGNG

SEQ ID NO: 25344 - protein, 7 aa, synthetic construct
RGDQGSL

SEQ ID NO: 25345 - protein, 7 aa, synthetic construct
RGDQHSG

SEQ ID NO: 25346 - protein, 7 aa, synthetic construct
RGDQHVN

SEQ ID NO: 25347 - protein, 7 aa, synthetic construct
RGDQIFL

SEQ ID NO: 25348 - protein, 7 aa, synthetic construct
RGDQILT

SEQ ID NO: 25349 - protein, 7 aa, synthetic construct
RGDQIQN

SEQ ID NO: 25350 - protein, 7 aa, synthetic construct
RGDQIRK

SEQ ID NO: 25351 - protein, 7 aa, synthetic construct
RGDQKDF

SEQ ID NO: 25352 - protein, 7 aa, synthetic construct
RGDQLEE

SEQ ID NO: 25353 - protein, 7 aa, synthetic construct
RGDQLGN

SEQ ID NO: 25354 - protein, 7 aa, synthetic construct
RGDQLGV

SEQ ID NO: 25355 - protein, 7 aa, synthetic construct
RGDQNEI

SEQ ID NO: 25356 - protein, 7 aa, synthetic construct
RGDQNHR

SEQ ID NO: 25357 - protein, 7 aa, synthetic construct
RGDQNLT

SEQ ID NO: 25358 - protein, 7 aa, synthetic construct
RGDQQLK

SEQ ID NO: 25359 - protein, 7 aa, synthetic construct
RGDQQSQ

SEQ ID NO: 25360 - protein, 7 aa, synthetic construct
RGDQQTH

SEQ ID NO: 25361 - protein, 7 aa, synthetic construct
RGDQRTH

SEQ ID NO: 25362 - protein, 7 aa, synthetic construct
RGDQSIK

SEQ ID NO: 25363 - protein, 7 aa, synthetic construct
RGDQSVQ

SEQ ID NO: 25364 - protein, 7 aa, synthetic construct
RGDQVFF

SEQ ID NO: 25365 - protein, 7 aa, synthetic construct
RGDQVIT

SEQ ID NO: 25366 - protein, 7 aa, synthetic construct
RGDQVLT

SEQ ID NO: 25367 - protein, 7 aa, synthetic construct
RGDRDAQ

SEQ ID NO: 25368 - protein, 7 aa, synthetic construct
RGDRDEA

SEQ ID NO: 25369 - protein, 7 aa, synthetic construct
RGDRDVQ

SEQ ID NO: 25370 - protein, 7 aa, synthetic construct
RGDDDQT

SEQ ID NO: 25371 - protein, 7 aa, synthetic construct
RGDRESE

SEQ ID NO: 25372 - protein, 7 aa, synthetic construct
RGDRFQE

SEQ ID NO: 25373 - protein, 7 aa, synthetic construct
RGDRFTS

SEQ ID NO: 25374 - protein, 7 aa, synthetic construct
RGDRINA

SEQ ID NO: 25375 - protein, 7 aa, synthetic construct
RGDRIVK

SEQ ID NO: 25376 - protein, 7 aa, synthetic construct
RGDRKSG

SEQ ID NO: 25377 - protein, 7 aa, synthetic construct
RGDRQTD

SEQ ID NO: 25378 - protein, 7 aa, synthetic construct
RGDRRSR

SEQ ID NO: 25379 - protein, 7 aa, synthetic construct
RGDRTLE

SEQ ID NO: 25380 - protein, 7 aa, synthetic construct
RGDSAAT

SEQ ID NO: 25381 - protein, 7 aa, synthetic construct
RGDSDEL

SEQ ID NO: 25382 - protein, 7 aa, synthetic construct
RGDSDNF

SEQ ID NO: 25383 - protein, 7 aa, synthetic construct
RGDSDRH

SEQ ID NO: 25384 - protein, 7 aa, synthetic construct
RGDSETS

SEQ ID NO: 25385 - protein, 7 aa, synthetic construct
RGDSFSR

SEQ ID NO: 25386 - protein, 7 aa, synthetic construct
RGDSGLK

SEQ ID NO: 25387 - protein, 7 aa, synthetic construct
RGDSGVD

SEQ ID NO: 25388 - protein, 7 aa, synthetic construct
RGDSHDF

SEQ ID NO: 25389 - protein, 7 aa, synthetic construct
RGDSIEE

SEQ ID NO: 25390 - protein, 7 aa, synthetic construct
RGDSKSA

SEQ ID NO: 25391 - protein, 7 aa, synthetic construct
RGDSNIG

SEQ ID NO: 25392 - protein, 7 aa, synthetic construct
RGDSSIK

SEQ ID NO: 25393 - protein, 7 aa, synthetic construct
RGDSSLQ

SEQ ID NO: 25394 - protein, 7 aa, synthetic construct
RGDSTIA

SEQ ID NO: 25395 - protein, 7 aa, synthetic construct
RGDADVD

SEQ ID NO: 25396 - protein, 7 aa, synthetic construct
RGDSVTK

SEQ ID NO: 25397 - protein, 7 aa, synthetic construct
RGDTAHG

SEQ ID NO: 25398 - protein, 7 aa, synthetic construct
RGDTAII

SEQ ID NO: 25399 - protein, 7 aa, synthetic construct
RGDTDED

SEQ ID NO: 25400 - protein, 7 aa, synthetic construct
RGDTDHL

SEQ ID NO: 25401 - protein, 7 aa, synthetic construct
RGDTDLQ

SEQ ID NO: 25402 - protein, 7 aa, synthetic construct
RGDTDVH

SEQ ID NO: 25403 - protein, 7 aa, synthetic construct
RGDTFFR

SEQ ID NO: 25404 - protein, 7 aa, synthetic construct
RGDDGSH

SEQ ID NO: 25405 - protein, 7 aa, synthetic construct
RGDTFHF

SEQ ID NO: 25406 - protein, 7 aa, synthetic construct
RGDDGST

SEQ ID NO: 25407 - protein, 7 aa, synthetic construct
RGDTFNR

SEQ ID NO: 25408 - protein, 7 aa, synthetic construct
RGDTGFL

SEQ ID NO: 25409 - protein, 7 aa, synthetic construct
RGDTHDA

SEQ ID NO: 25410 - protein, 7 aa, synthetic construct
RGDTHDG

SEQ ID NO: 25411 - protein, 7 aa, synthetic construct
RGDTHKS

SEQ ID NO: 25412 - protein, 7 aa, synthetic construct
RGDTILT

SEQ ID NO: 25413 - protein, 7 aa, synthetic construct
RGDTKDT

SEQ ID NO: 25414 - protein, 7 aa, synthetic construct
RGDTKGE

SEQ ID NO: 25415 - protein, 7 aa, synthetic construct
RGDDHFQ

SEQ ID NO: 25416 - protein, 7 aa, synthetic construct
RGDTNLL

SEQ ID NO: 25417 - protein, 7 aa, synthetic construct
RGDTNSF

SEQ ID NO: 25418 - protein, 7 aa, synthetic construct
RGDTQGL

SEQ ID NO: 25419 - protein, 7 aa, synthetic construct
RGDTSAG

SEQ ID NO: 25420 - protein, 7 aa, synthetic construct
RGDTSDG

SEQ ID NO: 25421 - protein, 7 aa, synthetic construct
RGDTSQN

SEQ ID NO: 25422 - protein, 7 aa, synthetic construct
RGDDHTL

SEQ ID NO: 25423 - protein, 7 aa, synthetic construct
RGDTVFR

SEQ ID NO: 25424 - protein, 7 aa, synthetic construct
RGDTVRL

SEQ ID NO: 25425 - protein, 7 aa, synthetic construct
RGDTVTT

SEQ ID NO: 25426 - protein, 7 aa, synthetic construct
RGDVADF

SEQ ID NO: 25427 - protein, 7 aa, synthetic construct
RGDVAIH

SEQ ID NO: 25428 - protein, 7 aa, synthetic construct
RGDVDFN

SEQ ID NO: 25429 - protein, 7 aa, synthetic construct
RGDVESS

SEQ ID NO: 25430 - protein, 7 aa, synthetic construct
RGDVFTQ

SEQ ID NO: 25431 - protein, 7 aa, synthetic construct
RGDVIFA

SEQ ID NO: 25432 - protein, 7 aa, synthetic construct
RGDVIRH

SEQ ID NO: 25433 - protein, 7 aa, synthetic construct
RGDVKGA

SEQ ID NO: 25434 - protein, 7 aa, synthetic construct
RGDVNQV

SEQ ID NO: 25435 - protein, 7 aa, synthetic construct
RGDVNRQ

SEQ ID NO: 25436 - protein, 7 aa, synthetic construct
RGDVQFE

SEQ ID NO: 25437 - protein, 7 aa, synthetic construct
RGDDKFD

SEQ ID NO: 25438 - protein, 7 aa, synthetic construct
RGDVSIF

SEQ ID NO: 25439 - protein, 7 aa, synthetic construct
RGDDKTK

SEQ ID NO: 25440 - protein, 7 aa, synthetic construct
RGDDNDV

SEQ ID NO: 25441 - protein, 7 aa, synthetic construct
RGDAEIH

SEQ ID NO: 25442 - protein, 7 aa, synthetic construct
RGDDNKR

SEQ ID NO: 25443 - protein, 7 aa, synthetic construct
RGDDNRK

SEQ ID NO: 25444 - protein, 7 aa, synthetic construct
RGDDQFR

SEQ ID NO: 25445 - protein, 7 aa, synthetic construct
RGDAENS

SEQ ID NO: 25446 - protein, 7 aa, synthetic construct
RGDDRRH

SEQ ID NO: 25447 - protein, 7 aa, synthetic construct
RGDDRTF

SEQ ID NO: 25448 - protein, 7 aa, synthetic construct
RGDDRTI

SEQ ID NO: 25449 - protein, 7 aa, synthetic construct
RGDDSTT

SEQ ID NO: 25450 - protein, 7 aa, synthetic construct
RGDDTDR

SEQ ID NO: 25451 - protein, 7 aa, synthetic construct
RGDAESL

SEQ ID NO: 25452 - protein, 7 aa, synthetic construct
RGDDVGF

SEQ ID NO: 25453 - protein, 7 aa, synthetic construct
RGDDVLK

SEQ ID NO: 25454 - protein, 7 aa, synthetic construct
RGDEAIT

SEQ ID NO: 25455 - protein, 7 aa, synthetic construct
RGDEDTS

SEQ ID NO: 25456 - protein, 7 aa, synthetic construct
RGDEEEK

SEQ ID NO: 25457 - protein, 7 aa, synthetic construct
RGDEGFE

SEQ ID NO: 25458 - protein, 7 aa, synthetic construct
RGDEGHQ

SEQ ID NO: 25459 - protein, 7 aa, synthetic construct
RGDEGRG

SEQ ID NO: 25460 - protein, 7 aa, synthetic construct
RGDEGSE

SEQ ID NO: 25461 - protein, 7 aa, synthetic construct
RGDEGTQ

SEQ ID NO: 25462 - protein, 7 aa, synthetic construct
RGDEISL

SEQ ID NO: 25463 - protein, 7 aa, synthetic construct
RGDAFQR

SEQ ID NO: 25464 - protein, 7 aa, synthetic construct
RGDAFRE

SEQ ID NO: 25465 - protein, 7 aa, synthetic construct
RGDEKLS

SEQ ID NO: 25466 - protein, 7 aa, synthetic construct
RGDEKSN

SEQ ID NO: 25467 - protein, 7 aa, synthetic construct
RGDELLH

SEQ ID NO: 25468 - protein, 7 aa, synthetic construct
RGDERKG

SEQ ID NO: 25469 - protein, 7 aa, synthetic construct
RGDERSF

SEQ ID NO: 25470 - protein, 7 aa, synthetic construct
RGDESFT

SEQ ID NO: 25471 - protein, 7 aa, synthetic construct
RGDESLR

SEQ ID NO: 25472 - protein, 7 aa, synthetic construct
RGDAAIL

SEQ ID NO: 25473 - protein, 7 aa, synthetic construct
RGDEVTS

SEQ ID NO: 25474 - protein, 7 aa, synthetic construct
RGDAGLH

SEQ ID NO: 25475 - protein, 7 aa, synthetic construct
RGDFATF

SEQ ID NO: 25476 - protein, 7 aa, synthetic construct
RGDFDNR

SEQ ID NO: 25477 - protein, 7 aa, synthetic construct
RGDFDQN

SEQ ID NO: 25478 - protein, 7 aa, synthetic construct
RGDFDRN

SEQ ID NO: 25479 - protein, 7 aa, synthetic construct
RGDFFEA

SEQ ID NO: 25480 - protein, 7 aa, synthetic construct
RGDFFFT

SEQ ID NO: 25481 - protein, 7 aa, synthetic construct
RGDFFGA

SEQ ID NO: 25482 - protein, 7 aa, synthetic construct
RGDFFIQ

SEQ ID NO: 25483 - protein, 7 aa, synthetic construct
RGDAGVT

SEQ ID NO: 25484 - protein, 7 aa, synthetic construct
RGDFHAG

SEQ ID NO: 25485 - protein, 7 aa, synthetic construct
RGDFHDF

SEQ ID NO: 25486 - protein, 7 aa, synthetic construct
RGDAHDA

SEQ ID NO: 25487 - protein, 7 aa, synthetic construct
RGDFIDV

SEQ ID NO: 25488 - protein, 7 aa, synthetic construct
RGDFKIN

SEQ ID NO: 25489 - protein, 7 aa, synthetic construct
RGDFNIV

SEQ ID NO: 25490 - protein, 7 aa, synthetic construct
RGDFNNS

SEQ ID NO: 25491 - protein, 7 aa, synthetic construct
RGDFQHN

SEQ ID NO: 25492 - protein, 7 aa, synthetic construct
RGDFQSS

SEQ ID NO: 25493 - protein, 7 aa, synthetic construct
RGDAHQE

SEQ ID NO: 25494 - protein, 7 aa, synthetic construct
RGDFSEN

SEQ ID NO: 25495 - protein, 7 aa, synthetic construct
RGDFSQA

SEQ ID NO: 25496 - protein, 7 aa, synthetic construct
RGDFTEH

SEQ ID NO: 25497 - protein, 7 aa, synthetic construct
RGDFTGV

SEQ ID NO: 25498 - protein, 7 aa, synthetic construct
RGDFVDK

SEQ ID NO: 25499 - protein, 7 aa, synthetic construct
RGDFVKS

SEQ ID NO: 25500 - protein, 7 aa, synthetic construct
RGDGADR

SEQ ID NO: 25501 - protein, 7 aa, synthetic construct
RGDGEAV

SEQ ID NO: 25502 - protein, 7 aa, synthetic construct
RGDGEEK

SEQ ID NO: 25503 - protein, 7 aa, synthetic construct
RGDGESH

SEQ ID NO: 25504 - protein, 7 aa, synthetic construct
RGDGFDI

SEQ ID NO: 25505 - protein, 7 aa, synthetic construct
RGDGFIL

SEQ ID NO: 25506 - protein, 7 aa, synthetic construct
RGDGGTN

SEQ ID NO: 25507 - protein, 7 aa, synthetic construct
RGDGHFN

SEQ ID NO: 25508 - protein, 7 aa, synthetic construct
RGDGHKD

SEQ ID NO: 25509 - protein, 7 aa, synthetic construct
RGDGIAR

SEQ ID NO: 25510 - protein, 7 aa, synthetic construct
RGDAIQL

SEQ ID NO: 25511 - protein, 7 aa, synthetic construct
RGDAIRQ

SEQ ID NO: 25512 - protein, 7 aa, synthetic construct
RGDGLSQ

SEQ ID NO: 25513 - protein, 7 aa, synthetic construct
RGDGNAI

SEQ ID NO: 25514 - protein, 7 aa, synthetic construct
RGDGRDQ

SEQ ID NO: 25515 - protein, 7 aa, synthetic construct
RGDAKED

SEQ ID NO: 25516 - protein, 7 aa, synthetic construct
RGDGTSA

SEQ ID NO: 25517 - protein, 7 aa, synthetic construct
RGDGTVV

SEQ ID NO: 25518 - protein, 7 aa, synthetic construct
RGDGVAQ

SEQ ID NO: 25519 - protein, 7 aa, synthetic construct
RGDGVHS

SEQ ID NO: 25520 - protein, 7 aa, synthetic construct
RGDHAES

SEQ ID NO: 25521 - protein, 7 aa, synthetic construct
RGDHAEV

SEQ ID NO: 25522 - protein, 7 aa, synthetic construct
RGDHAVT

SEQ ID NO: 25523 - protein, 7 aa, synthetic construct
RGDHDEG

SEQ ID NO: 25524 - protein, 7 aa, synthetic construct
RGDHDHF

SEQ ID NO: 25525 - protein, 7 aa, synthetic construct
RGDHDTV

SEQ ID NO: 25526 - protein, 7 aa, synthetic construct
RGDHFKI

SEQ ID NO: 25527 - protein, 7 aa, synthetic construct
RGDHFTE

SEQ ID NO: 25528 - protein, 7 aa, synthetic construct
RGDHGIG

SEQ ID NO: 25529 - protein, 7 aa, synthetic construct
RGDHGTT

SEQ ID NO: 25530 - protein, 7 aa, synthetic construct
RGDHHFI

SEQ ID NO: 25531 - protein, 7 aa, synthetic construct
RGDHIFV

SEQ ID NO: 25532 - protein, 7 aa, synthetic construct
RGDHKAT

SEQ ID NO: 25533 - protein, 7 aa, synthetic construct
RGDHKHE

SEQ ID NO: 25534 - protein, 7 aa, synthetic construct
RGDHNDE

SEQ ID NO: 25535 - protein, 7 aa, synthetic construct
RGDHNHQ

SEQ ID NO: 25536 - protein, 7 aa, synthetic construct
RGDHNQN

SEQ ID NO: 25537 - protein, 7 aa, synthetic construct
RGDHQKE

SEQ ID NO: 25538 - protein, 7 aa, synthetic construct
RGDHQNG

SEQ ID NO: 25539 - protein, 7 aa, synthetic construct
RGDHSDN

SEQ ID NO: 25540 - protein, 7 aa, synthetic construct
RGDHSLF

SEQ ID NO: 25541 - protein, 7 aa, synthetic construct
RGDHTTN

SEQ ID NO: 25542 - protein, 7 aa, synthetic construct
RGDHVKA

SEQ ID NO: 25543 - protein, 7 aa, synthetic construct
RGDHVLD

SEQ ID NO: 25544 - protein, 7 aa, synthetic construct
RGDALVS

SEQ ID NO: 25545 - protein, 7 aa, synthetic construct
RGDIAQQ

SEQ ID NO: 25546 - protein, 7 aa, synthetic construct
RGDIDDS

SEQ ID NO: 25547 - protein, 7 aa, synthetic construct
RGDIDKN

SEQ ID NO: 25548 - protein, 7 aa, synthetic construct
RGDIELG

SEQ ID NO: 25549 - protein, 7 aa, synthetic construct
RGDIFGS

SEQ ID NO: 25550 - protein, 7 aa, synthetic construct
RGDIFHN

SEQ ID NO: 25551 - protein, 7 aa, synthetic construct
RGDIFIL

SEQ ID NO: 25552 - protein, 7 aa, synthetic construct
RGDIFQL

SEQ ID NO: 25553 - protein, 7 aa, synthetic construct
RGDIFQV

SEQ ID NO: 25554 - protein, 7 aa, synthetic construct
RGDANHS

SEQ ID NO: 25555 - protein, 7 aa, synthetic construct
RGDIGDK

SEQ ID NO: 25556 - protein, 7 aa, synthetic construct
RGDIHDT

SEQ ID NO: 25557 - protein, 7 aa, synthetic construct
RGDILEF

SEQ ID NO: 25558 - protein, 7 aa, synthetic construct
RGDILNQ

SEQ ID NO: 25559 - protein, 7 aa, synthetic construct
RGDIQDR

SEQ ID NO: 25560 - protein, 7 aa, synthetic construct
RGDIRQL

SEQ ID NO: 25561 - protein, 7 aa, synthetic construct
RGDITQQ

SEQ ID NO: 25562 - protein, 7 aa, synthetic construct
RGDIVAI

SEQ ID NO: 25563 - protein, 7 aa, synthetic construct
RGDIVHF

SEQ ID NO: 25564 - protein, 7 aa, synthetic construct
RGDKDNS

SEQ ID NO: 25565 - protein, 7 aa, synthetic construct
RGDKDQG

SEQ ID NO: 25566 - protein, 7 aa, synthetic construct
RGDKDVA

SEQ ID NO: 25567 - protein, 7 aa, synthetic construct
RGDKEFS

SEQ ID NO: 25568 - protein, 7 aa, synthetic construct
RGDKFQT

SEQ ID NO: 25569 - protein, 7 aa, synthetic construct
RGDKFVN

SEQ ID NO: 25570 - protein, 7 aa, synthetic construct
RGDAQVV

SEQ ID NO: 25571 - protein, 7 aa, synthetic construct
RGDKHKH

SEQ ID NO: 25572 - protein, 7 aa, synthetic construct
RGDKIFA

SEQ ID NO: 25573 - protein, 7 aa, synthetic construct
RGDKIHA

SEQ ID NO: 25574 - protein, 7 aa, synthetic construct
RGDKIIH

SEQ ID NO: 25575 - protein, 7 aa, synthetic construct
RGDKINT

SEQ ID NO: 25576 - protein, 7 aa, synthetic construct
RGDKKAE

SEQ ID NO: 25577 - protein, 7 aa, synthetic construct
RGDKLIQ

SEQ ID NO: 25578 - protein, 7 aa, synthetic construct
RGDKLTH

SEQ ID NO: 25579 - protein, 7 aa, synthetic construct
RGDKNHH

SEQ ID NO: 25580 - protein, 7 aa, synthetic construct
RGDARND

SEQ ID NO: 25581 - protein, 7 aa, synthetic construct
RGDKSIQ

SEQ ID NO: 25582 - protein, 7 aa, synthetic construct
RGDKTQG

SEQ ID NO: 25583 - protein, 7 aa, synthetic construct
RGDKTSA

SEQ ID NO: 25584 - protein, 7 aa, synthetic construct
RGDKVDR

SEQ ID NO: 25585 - protein, 7 aa, synthetic construct
RGDKVSD

SEQ ID NO: 25586 - protein, 7 aa, synthetic construct
RGDLDHD

SEQ ID NO: 25587 - protein, 7 aa, synthetic construct
RGDLEKS

SEQ ID NO: 25588 - protein, 7 aa, synthetic construct
RGDLFHE

SEQ ID NO: 25589 - protein, 7 aa, synthetic construct
RGDLGFS

SEQ ID NO: 25590 - protein, 7 aa, synthetic construct
RGDLGVL

SEQ ID NO: 25591 - protein, 7 aa, synthetic construct
RGDLHKA

SEQ ID NO: 25592 - protein, 7 aa, synthetic construct
RGDLHQL

SEQ ID NO: 25593 - protein, 7 aa, synthetic construct
RGDLHVD

SEQ ID NO: 25594 - protein, 7 aa, synthetic construct
RGDLIDN

SEQ ID NO: 25595 - protein, 7 aa, synthetic construct
RGDLIDT

SEQ ID NO: 25596 - protein, 7 aa, synthetic construct
RGDLIKA

SEQ ID NO: 25597 - protein, 7 aa, synthetic construct
RGDLIQQ

SEQ ID NO: 25598 - protein, 7 aa, synthetic construct
RGDLKDS

SEQ ID NO: 25599 - protein, 7 aa, synthetic construct
RGDLKFF

SEQ ID NO: 25600 - protein, 7 aa, synthetic construct
RGDLNGT

SEQ ID NO: 25601 - protein, 7 aa, synthetic construct
RGDASVS

SEQ ID NO: 25602 - protein, 7 aa, synthetic construct
RGDLQLN

SEQ ID NO: 25603 - protein, 7 aa, synthetic construct
RGDLQQN

SEQ ID NO: 25604 - protein, 7 aa, synthetic construct
RGDLQSG

SEQ ID NO: 25605 - protein, 7 aa, synthetic construct
RGDLQVL

SEQ ID NO: 25606 - protein, 7 aa, synthetic construct
RGDATFG

SEQ ID NO: 25607 - protein, 7 aa, synthetic construct
RGDATFV

SEQ ID NO: 25608 - protein, 7 aa, synthetic construct
RGDLSTR

SEQ ID NO: 25609 - protein, 7 aa, synthetic construct
RGDLTIN

SEQ ID NO: 25610 - protein, 7 aa, synthetic construct
RGDLTNN

SEQ ID NO: 25611 - protein, 7 aa, synthetic construct
RGDLTQD

SEQ ID NO: 25612 - protein, 7 aa, synthetic construct
RGDLTVR

SEQ ID NO: 25613 - protein, 7 aa, synthetic construct
RGDLVFL

SEQ ID NO: 25614 - protein, 7 aa, synthetic construct
RGDLVQF

SEQ ID NO: 25615 - protein, 7 aa, synthetic construct
RGDNADV

SEQ ID NO: 25616 - protein, 7 aa, synthetic construct
RGDNAKG

SEQ ID NO: 25617 - protein, 7 aa, synthetic construct
RGDATNH

SEQ ID NO: 25618 - protein, 7 aa, synthetic construct
RGDNDHE

SEQ ID NO: 25619 - protein, 7 aa, synthetic construct
RGDNEEK

SEQ ID NO: 25620 - protein, 7 aa, synthetic construct
RGDNEKQ

SEQ ID NO: 25621 - protein, 7 aa, synthetic construct
RGDNFAL

SEQ ID NO: 25622 - protein, 7 aa, synthetic construct
RGDNFNK

SEQ ID NO: 25623 - protein, 7 aa, synthetic construct
RGDNFQD

SEQ ID NO: 25624 - protein, 7 aa, synthetic construct
RGDNFTK

SEQ ID NO: 25625 - protein, 7 aa, synthetic construct
RGDNGFE

SEQ ID NO: 25626 - protein, 7 aa, synthetic construct
RGDNGLT

SEQ ID NO: 25627 - protein, 7 aa, synthetic construct
RGDNKEI

SEQ ID NO: 25628 - protein, 7 aa, synthetic construct
RGDNLER

SEQ ID NO: 25629 - protein, 7 aa, synthetic construct
RGDNNER

SEQ ID NO: 25630 - protein, 7 aa, synthetic construct
RGDNRGD

SEQ ID NO: 25631 - protein, 7 aa, synthetic construct
RGDNSAS

SEQ ID NO: 25632 - protein, 7 aa, synthetic construct
RGDNSHQ

SEQ ID NO: 25633 - protein, 7 aa, synthetic construct
RGDNSIV

SEQ ID NO: 25634 - protein, 7 aa, synthetic construct
RGDNSSQ

SEQ ID NO: 25635 - protein, 7 aa, synthetic construct
RGDNVAH

SEQ ID NO: 25636 - protein, 7 aa, synthetic construct
RGDNVGT

SEQ ID NO: 25637 - protein, 7 aa, synthetic construct
RGDNVHE

SEQ ID NO: 25638 - protein, 7 aa, synthetic construct
RGDQEGK

SEQ ID NO: 25639 - protein, 7 aa, synthetic construct
RGDDAFR

SEQ ID NO: 25640 - protein, 7 aa, synthetic construct
RGDQEQI

SEQ ID NO: 25641 - protein, 7 aa, synthetic construct
RGDQFSF

SEQ ID NO: 25642 - protein, 7 aa, synthetic construct
RGDQFTA

SEQ ID NO: 25643 - protein, 7 aa, synthetic construct
RGDQGIL

SEQ ID NO: 25644 - protein, 7 aa, synthetic construct
RGDQHGT

SEQ ID NO: 25645 - protein, 7 aa, synthetic construct
RGDQHTE

SEQ ID NO: 25646 - protein, 7 aa, synthetic construct
RGDQIDT

SEQ ID NO: 25647 - protein, 7 aa, synthetic construct
RGDQIEI

SEQ ID NO: 25648 - protein, 7 aa, synthetic construct
RGDQKHG

SEQ ID NO: 25649 - protein, 7 aa, synthetic construct
RGDQKLQ

SEQ ID NO: 25650 - protein, 7 aa, synthetic construct
RGDQLGK

SEQ ID NO: 25651 - protein, 7 aa, synthetic construct
RGDQNEQ

SEQ ID NO: 25652 - protein, 7 aa, synthetic construct
RGDQNIK

SEQ ID NO: 25653 - protein, 7 aa, synthetic construct
RGDQNIQ

SEQ ID NO: 25654 - protein, 7 aa, synthetic construct
RGDQNSS

SEQ ID NO: 25655 - protein, 7 aa, synthetic construct
RGDQQDT

SEQ ID NO: 25656 - protein, 7 aa, synthetic construct
RGDQQVN

SEQ ID NO: 25657 - protein, 7 aa, synthetic construct
RGDQREQ

SEQ ID NO: 25658 - protein, 7 aa, synthetic construct
RGDDDHI

SEQ ID NO: 25659 - protein, 7 aa, synthetic construct
RGDADNR

SEQ ID NO: 25660 - protein, 7 aa, synthetic construct
RGDDDLI

SEQ ID NO: 25661 - protein, 7 aa, synthetic construct
RGDRDSS

SEQ ID NO: 25662 - protein, 7 aa, synthetic construct
RGDDDQG

SEQ ID NO: 25663 - protein, 7 aa, synthetic construct
RGDDDVQ

SEQ ID NO: 25664 - protein, 7 aa, synthetic construct
RGDRHFF

SEQ ID NO: 25665 - protein, 7 aa, synthetic construct
RGDRKAE

SEQ ID NO: 25666 - protein, 7 aa, synthetic construct
RGDRKSS

SEQ ID NO: 25667 - protein, 7 aa, synthetic construct
RGDRNDV

SEQ ID NO: 25668 - protein, 7 aa, synthetic construct
RGDRNGD

SEQ ID NO: 25669 - protein, 7 aa, synthetic construct
RGDRNGE

SEQ ID NO: 25670 - protein, 7 aa, synthetic construct
RGDADRE

SEQ ID NO: 25671 - protein, 7 aa, synthetic construct
RGDRRLS

SEQ ID NO: 25672 - protein, 7 aa, synthetic construct
RGDDERI

SEQ ID NO: 25673 - protein, 7 aa, synthetic construct
RGDRVSN

SEQ ID NO: 25674 - protein, 7 aa, synthetic construct
RGDSATL

SEQ ID NO: 25675 - protein, 7 aa, synthetic construct
RGDSDHF

SEQ ID NO: 25676 - protein, 7 aa, synthetic construct
RGDSDNG

SEQ ID NO: 25677 - protein, 7 aa, synthetic construct
RGDSDVT

SEQ ID NO: 25678 - protein, 7 aa, synthetic construct
RGDSEFN

SEQ ID NO: 25679 - protein, 7 aa, synthetic construct
RGDDFFL

SEQ ID NO: 25680 - protein, 7 aa, synthetic construct
RGDDFFQ

SEQ ID NO: 25681 - protein, 7 aa, synthetic construct
RGDSETF

SEQ ID NO: 25682 - protein, 7 aa, synthetic construct
RGDSFFV

SEQ ID NO: 25683 - protein, 7 aa, synthetic construct
RGDSGKE

SEQ ID NO: 25684 - protein, 7 aa, synthetic construct
RGDSIVH

SEQ ID NO: 25685 - protein, 7 aa, synthetic construct
RGDSKKS

SEQ ID NO: 25686 - protein, 7 aa, synthetic construct
RGDSNRD

SEQ ID NO: 25687 - protein, 7 aa, synthetic construct
RGDSNTQ

SEQ ID NO: 25688 - protein, 7 aa, synthetic construct
RGDSQIV

SEQ ID NO: 25689 - protein, 7 aa, synthetic construct
RGDDGAS

SEQ ID NO: 25690 - protein, 7 aa, synthetic construct
RGDSRHD

SEQ ID NO: 25691 - protein, 7 aa, synthetic construct
RGDSSAH

SEQ ID NO: 25692 - protein, 7 aa, synthetic construct
RGDSSHN

SEQ ID NO: 25693 - protein, 7 aa, synthetic construct
RGDSSII

SEQ ID NO: 25694 - protein, 7 aa, synthetic construct
RGDDGFN

SEQ ID NO: 25695 - protein, 7 aa, synthetic construct
RGDSTNR

SEQ ID NO: 25696 - protein, 7 aa, synthetic construct
RGDSTTL

SEQ ID NO: 25697 - protein, 7 aa, synthetic construct
RGDSVFE

SEQ ID NO: 25698 - protein, 7 aa, synthetic construct
RGDDGIV

SEQ ID NO: 25699 - protein, 7 aa, synthetic construct
RGDSVVS

SEQ ID NO: 25700 - protein, 7 aa, synthetic construct
RGDTAEA

SEQ ID NO: 25701 - protein, 7 aa, synthetic construct
RGDTAEE

SEQ ID NO: 25702 - protein, 7 aa, synthetic construct
RGDTETT

SEQ ID NO: 25703 - protein, 7 aa, synthetic construct
RGDTGKN

SEQ ID NO: 25704 - protein, 7 aa, synthetic construct
RGDTHVS

SEQ ID NO: 25705 - protein, 7 aa, synthetic construct
RGDTISF

SEQ ID NO: 25706 - protein, 7 aa, synthetic construct
RGDTIVH

SEQ ID NO: 25707 - protein, 7 aa, synthetic construct
RGDTKQH

SEQ ID NO: 25708 - protein, 7 aa, synthetic construct
RGDTLAF

SEQ ID NO: 25709 - protein, 7 aa, synthetic construct
RGDTLES

SEQ ID NO: 25710 - protein, 7 aa, synthetic construct
RGDTLHH

SEQ ID NO: 25711 - protein, 7 aa, synthetic construct
RGDTNKF

SEQ ID NO: 25712 - protein, 7 aa, synthetic construct
RGDDHNE

SEQ ID NO: 25713 - protein, 7 aa, synthetic construct
RGDTSKR

SEQ ID NO: 25714 - protein, 7 aa, synthetic construct
RGDTTHK

SEQ ID NO: 25715 - protein, 7 aa, synthetic construct
RGDTVSE

SEQ ID NO: 25716 - protein, 7 aa, synthetic construct
RGDVAFQ

SEQ ID NO: 25717 - protein, 7 aa, synthetic construct
RGDVALE

SEQ ID NO: 25718 - protein, 7 aa, synthetic construct
RGDVDVL

SEQ ID NO: 25719 - protein, 7 aa, synthetic construct
RGDVEFD

SEQ ID NO: 25720 - protein, 7 aa, synthetic construct
RGDVGKE

SEQ ID NO: 25721 - protein, 7 aa, synthetic construct
RGDVGLI

SEQ ID NO: 25722 - protein, 7 aa, synthetic construct
RGDVGNF

SEQ ID NO: 25723 - protein, 7 aa, synthetic construct
RGDVGRR

SEQ ID NO: 25724 - protein, 7 aa, synthetic construct
RGDVGVT

SEQ ID NO: 25725 - protein, 7 aa, synthetic construct
RGDVKQA

SEQ ID NO: 25726 - protein, 7 aa, synthetic construct
RGDVNDN

SEQ ID NO: 25727 - protein, 7 aa, synthetic construct
RGDVNFV

SEQ ID NO: 25728 - protein, 7 aa, synthetic construct
RGDVNHD

SEQ ID NO: 25729 - protein, 7 aa, synthetic construct
RGDVNKR

SEQ ID NO: 25730 - protein, 7 aa, synthetic construct
RGDVNQD

SEQ ID NO: 25731 - protein, 7 aa, synthetic construct
RGDVNRL

SEQ ID NO: 25732 - protein, 7 aa, synthetic construct
RGDVQFD

SEQ ID NO: 25733 - protein, 7 aa, synthetic construct
RGDVQHS

SEQ ID NO: 25734 - protein, 7 aa, synthetic construct
RGDVSLA

SEQ ID NO: 25735 - protein, 7 aa, synthetic construct
RGDVSNL

SEQ ID NO: 25736 - protein, 7 aa, synthetic construct
RGDVTER

SEQ ID NO: 25737 - protein, 7 aa, synthetic construct
RGDDLGI

SEQ ID NO: 25738 - protein, 7 aa, synthetic construct
RGDDNSS

SEQ ID NO: 25739 - protein, 7 aa, synthetic construct
RGDDQKS

SEQ ID NO: 25740 - protein, 7 aa, synthetic construct
RGDDRQN

SEQ ID NO: 25741 - protein, 7 aa, synthetic construct
RGDDRRQ

SEQ ID NO: 25742 - protein, 7 aa, synthetic construct
RGDDTVN

SEQ ID NO: 25743 - protein, 7 aa, synthetic construct
RGDDVTN

SEQ ID NO: 25744 - protein, 7 aa, synthetic construct
RGDDVVV

SEQ ID NO: 25745 - protein, 7 aa, synthetic construct
RGDEAGS

SEQ ID NO: 25746 - protein, 7 aa, synthetic construct
RGDEDNH

SEQ ID NO: 25747 - protein, 7 aa, synthetic construct
RGDEGQD

SEQ ID NO: 25748 - protein, 7 aa, synthetic construct
RGDEGQE

SEQ ID NO: 25749 - protein, 7 aa, synthetic construct
RGDAAHF

SEQ ID NO: 25750 - protein, 7 aa, synthetic construct
RGDEHDR

SEQ ID NO: 25751 - protein, 7 aa, synthetic construct
RGDEHFG

SEQ ID NO: 25752 - protein, 7 aa, synthetic construct
RGDEHRS

SEQ ID NO: 25753 - protein, 7 aa, synthetic construct
RGDEIDN

SEQ ID NO: 25754 - protein, 7 aa, synthetic construct
RGDEILQ

SEQ ID NO: 25755 - protein, 7 aa, synthetic construct
RGDEKAQ

SEQ ID NO: 25756 - protein, 7 aa, synthetic construct
RGDAFQT

SEQ ID NO: 25757 - protein, 7 aa, synthetic construct
RGDEKVE

SEQ ID NO: 25758 - protein, 7 aa, synthetic construct
RGDENAQ

SEQ ID NO: 25759 - protein, 7 aa, synthetic construct
RGDEQDV

SEQ ID NO: 25760 - protein, 7 aa, synthetic construct
RGDEQLK

SEQ ID NO: 25761 - protein, 7 aa, synthetic construct
RGDERHT

SEQ ID NO: 25762 - protein, 7 aa, synthetic construct
RGDAGES

SEQ ID NO: 25763 - protein, 7 aa, synthetic construct
RGDESFG

SEQ ID NO: 25764 - protein, 7 aa, synthetic construct
RGDESTG

SEQ ID NO: 25765 - protein, 7 aa, synthetic construct
RGDETVL

SEQ ID NO: 25766 - protein, 7 aa, synthetic construct
RGDAGID

SEQ ID NO: 25767 - protein, 7 aa, synthetic construct
RGDEVHT

SEQ ID NO: 25768 - protein, 7 aa, synthetic construct
RGDEVRN

SEQ ID NO: 25769 - protein, 7 aa, synthetic construct
RGDFATG

SEQ ID NO: 25770 - protein, 7 aa, synthetic construct
RGDFDNQ

SEQ ID NO: 25771 - protein, 7 aa, synthetic construct
RGDFDST

SEQ ID NO: 25772 - protein, 7 aa, synthetic construct
RGDFEKN

SEQ ID NO: 25773 - protein, 7 aa, synthetic construct
RGDFFNH

SEQ ID NO: 25774 - protein, 7 aa, synthetic construct
RGDAGVE

SEQ ID NO: 25775 - protein, 7 aa, synthetic construct
RGDFHIA

SEQ ID NO: 25776 - protein, 7 aa, synthetic construct
RGDFIEQ

SEQ ID NO: 25777 - protein, 7 aa, synthetic construct
RGDFIFS

SEQ ID NO: 25778 - protein, 7 aa, synthetic construct
RGDFKSL

SEQ ID NO: 25779 - protein, 7 aa, synthetic construct
RGDFNDG

SEQ ID NO: 25780 - protein, 7 aa, synthetic construct
RGDFNIT

SEQ ID NO: 25781 - protein, 7 aa, synthetic construct
RGDFQQQ

SEQ ID NO: 25782 - protein, 7 aa, synthetic construct
RGDAALN

SEQ ID NO: 25783 - protein, 7 aa, synthetic construct
RGDFVAA

SEQ ID NO: 25784 - protein, 7 aa, synthetic construct
RGDFVFI

SEQ ID NO: 25785 - protein, 7 aa, synthetic construct
RGDGAFF

SEQ ID NO: 25786 - protein, 7 aa, synthetic construct
RGDGAFH

SEQ ID NO: 25787 - protein, 7 aa, synthetic construct
RGDGAGT

SEQ ID NO: 25788 - protein, 7 aa, synthetic construct
RGDGDLR

SEQ ID NO: 25789 - protein, 7 aa, synthetic construct
RGDGEGT

SEQ ID NO: 25790 - protein, 7 aa, synthetic construct
RGDGFAK

SEQ ID NO: 25791 - protein, 7 aa, synthetic construct
RGDAIGQ

SEQ ID NO: 25792 - protein, 7 aa, synthetic construct
RGDGFGA

SEQ ID NO: 25793 - protein, 7 aa, synthetic construct
RGDGFGD

SEQ ID NO: 25794 - protein, 7 aa, synthetic construct
RGDGFNH

SEQ ID NO: 25795 - protein, 7 aa, synthetic construct
RGDGFQI

SEQ ID NO: 25796 - protein, 7 aa, synthetic construct
RGDGGDL

SEQ ID NO: 25797 - protein, 7 aa, synthetic construct
RGDGGVG

SEQ ID NO: 25798 - protein, 7 aa, synthetic construct
RGDGHAH

SEQ ID NO: 25799 - protein, 7 aa, synthetic construct
RGDGHHF

SEQ ID NO: 25800 - protein, 7 aa, synthetic construct
RGDGHVK

SEQ ID NO: 25801 - protein, 7 aa, synthetic construct
RGDGIDK

SEQ ID NO: 25802 - protein, 7 aa, synthetic construct
RGDGISK

SEQ ID NO: 25803 - protein, 7 aa, synthetic construct
RGDAISF

SEQ ID NO: 25804 - protein, 7 aa, synthetic construct
RGDGQDT

SEQ ID NO: 25805 - protein, 7 aa, synthetic construct
RGDGQFN

SEQ ID NO: 25806 - protein, 7 aa, synthetic construct
RGDGRDS

SEQ ID NO: 25807 - protein, 7 aa, synthetic construct
RGDGRHG

SEQ ID NO: 25808 - protein, 7 aa, synthetic construct
RGDGTAV

SEQ ID NO: 25809 - protein, 7 aa, synthetic construct
RGDGTQN

SEQ ID NO: 25810 - protein, 7 aa, synthetic construct
RGDGTRE

SEQ ID NO: 25811 - protein, 7 aa, synthetic construct
RGDGVFG

SEQ ID NO: 25812 - protein, 7 aa, synthetic construct
RGDGVHV

SEQ ID NO: 25813 - protein, 7 aa, synthetic construct
RGDGVTH

SEQ ID NO: 25814 - protein, 7 aa, synthetic construct
RGDHADQ

SEQ ID NO: 25815 - protein, 7 aa, synthetic construct
RGDHDKG

SEQ ID NO: 25816 - protein, 7 aa, synthetic construct
RGDAKQH

SEQ ID NO: 25817 - protein, 7 aa, synthetic construct
RGDHFKK

SEQ ID NO: 25818 - protein, 7 aa, synthetic construct
RGDAKTD

SEQ ID NO: 25819 - protein, 7 aa, synthetic construct
RGDHGNG

SEQ ID NO: 25820 - protein, 7 aa, synthetic construct
RGDHHFV

SEQ ID NO: 25821 - protein, 7 aa, synthetic construct
RGDHHRS

SEQ ID NO: 25822 - protein, 7 aa, synthetic construct
RGDHIAK

SEQ ID NO: 25823 - protein, 7 aa, synthetic construct
RGDHIKE

SEQ ID NO: 25824 - protein, 7 aa, synthetic construct
RGDHIRN

SEQ ID NO: 25825 - protein, 7 aa, synthetic construct
RGDALFI

SEQ ID NO: 25826 - protein, 7 aa, synthetic construct
RGDHKHF

SEQ ID NO: 25827 - protein, 7 aa, synthetic construct
RGDAASH

SEQ ID NO: 25828 - protein, 7 aa, synthetic construct
RGDHLHV

SEQ ID NO: 25829 - protein, 7 aa, synthetic construct
RGDHLIK

SEQ ID NO: 25830 - protein, 7 aa, synthetic construct
RGDHNEF

SEQ ID NO: 25831 - protein, 7 aa, synthetic construct
RGDHNFV

SEQ ID NO: 25832 - protein, 7 aa, synthetic construct
RGDALKQ

SEQ ID NO: 25833 - protein, 7 aa, synthetic construct
RGDHQRD

SEQ ID NO: 25834 - protein, 7 aa, synthetic construct
RGDHTDL

SEQ ID NO: 25835 - protein, 7 aa, synthetic construct
RGDHVEG

SEQ ID NO: 25836 - protein, 7 aa, synthetic construct
RGDHVRA

SEQ ID NO: 25837 - protein, 7 aa, synthetic construct
RGDHVVG

SEQ ID NO: 25838 - protein, 7 aa, synthetic construct
RGDIAFQ

SEQ ID NO: 25839 - protein, 7 aa, synthetic construct
RGDIALK

SEQ ID NO: 25840 - protein, 7 aa, synthetic construct
RGDIAND

SEQ ID NO: 25841 - protein, 7 aa, synthetic construct
RGDIDTL

SEQ ID NO: 25842 - protein, 7 aa, synthetic construct
RGDANES

SEQ ID NO: 25843 - protein, 7 aa, synthetic construct
RGDIELT

SEQ ID NO: 25844 - protein, 7 aa, synthetic construct
RGDIETR

SEQ ID NO: 25845 - protein, 7 aa, synthetic construct
RGDIFDV

SEQ ID NO: 25846 - protein, 7 aa, synthetic construct
RGDIFQQ

SEQ ID NO: 25847 - protein, 7 aa, synthetic construct
RGDIFVI

SEQ ID NO: 25848 - protein, 7 aa, synthetic construct
RGDANII

SEQ ID NO: 25849 - protein, 7 aa, synthetic construct
RGDIGHV

SEQ ID NO: 25850 - protein, 7 aa, synthetic construct
RGDANLI

SEQ ID NO: 25851 - protein, 7 aa, synthetic construct
RGDIIEK

SEQ ID NO: 25852 - protein, 7 aa, synthetic construct
RGDILQV

SEQ ID NO: 25853 - protein, 7 aa, synthetic construct
RGDINFT

SEQ ID NO: 25854 - protein, 7 aa, synthetic construct
RGDINNH

SEQ ID NO: 25855 - protein, 7 aa, synthetic construct
RGDINTG

SEQ ID NO: 25856 - protein, 7 aa, synthetic construct
RGDAQAE

SEQ ID NO: 25857 - protein, 7 aa, synthetic construct
RGDAQAT

SEQ ID NO: 25858 - protein, 7 aa, synthetic construct
RGDADAH

SEQ ID NO: 25859 - protein, 7 aa, synthetic construct
RGDIVHV

SEQ ID NO: 25860 - protein, 7 aa, synthetic construct
RGDIVRQ

SEQ ID NO: 25861 - protein, 7 aa, synthetic construct
RGDIVTS

SEQ ID NO: 25862 - protein, 7 aa, synthetic construct
RGDKDNA

SEQ ID NO: 25863 - protein, 7 aa, synthetic construct
RGDAQNT

SEQ ID NO: 25864 - protein, 7 aa, synthetic construct
RGDKFDI

SEQ ID NO: 25865 - protein, 7 aa, synthetic construct
RGDKFQH

SEQ ID NO: 25866 - protein, 7 aa, synthetic construct
RGDKGNF

SEQ ID NO: 25867 - protein, 7 aa, synthetic construct
RGDKIRS

SEQ ID NO: 25868 - protein, 7 aa, synthetic construct
RGDKKVD

SEQ ID NO: 25869 - protein, 7 aa, synthetic construct
RGDKLKA

SEQ ID NO: 25870 - protein, 7 aa, synthetic construct
RGDKLLN

SEQ ID NO: 25871 - protein, 7 aa, synthetic construct
RGDKNAS

SEQ ID NO: 25872 - protein, 7 aa, synthetic construct
RGDKNNG

SEQ ID NO: 25873 - protein, 7 aa, synthetic construct
RGDARLF

SEQ ID NO: 25874 - protein, 7 aa, synthetic construct
RGDKSDT

SEQ ID NO: 25875 - protein, 7 aa, synthetic construct
RGDKSHD

SEQ ID NO: 25876 - protein, 7 aa, synthetic construct
RGDKSLL

SEQ ID NO: 25877 - protein, 7 aa, synthetic construct
RGDKTDA

SEQ ID NO: 25878 - protein, 7 aa, synthetic construct
RGDKTED

SEQ ID NO: 25879 - protein, 7 aa, synthetic construct
RGDKTRF

SEQ ID NO: 25880 - protein, 7 aa, synthetic construct
RGDLAGV

SEQ ID NO: 25881 - protein, 7 aa, synthetic construct
RGDLAVQ

SEQ ID NO: 25882 - protein, 7 aa, synthetic construct
RGDLDKF

SEQ ID NO: 25883 - protein, 7 aa, synthetic construct
RGDLEDS

SEQ ID NO: 25884 - protein, 7 aa, synthetic construct
RGDLENA

SEQ ID NO: 25885 - protein, 7 aa, synthetic construct
RGDLFQN

SEQ ID NO: 25886 - protein, 7 aa, synthetic construct
RGDLFTE

SEQ ID NO: 25887 - protein, 7 aa, synthetic construct
RGDLGQH

SEQ ID NO: 25888 - protein, 7 aa, synthetic construct
RGDLGTE

SEQ ID NO: 25889 - protein, 7 aa, synthetic construct
RGDLHDL

SEQ ID NO: 25890 - protein, 7 aa, synthetic construct
RGDLHEN

SEQ ID NO: 25891 - protein, 7 aa, synthetic construct
RGDLHVA

SEQ ID NO: 25892 - protein, 7 aa, synthetic construct
RGDLIKH

SEQ ID NO: 25893 - protein, 7 aa, synthetic construct
RGDLILD

SEQ ID NO: 25894 - protein, 7 aa, synthetic construct
RGDASQL

SEQ ID NO: 25895 - protein, 7 aa, synthetic construct
RGDLKHG

SEQ ID NO: 25896 - protein, 7 aa, synthetic construct
RGDLKVV

SEQ ID NO: 25897 - protein, 7 aa, synthetic construct
RGDASTS

SEQ ID NO: 25898 - protein, 7 aa, synthetic construct
RGDASVA

SEQ ID NO: 25899 - protein, 7 aa, synthetic construct
RGDLNRF

SEQ ID NO: 25900 - protein, 7 aa, synthetic construct
RGDLQLT

SEQ ID NO: 25901 - protein, 7 aa, synthetic construct
RGDLRIE

SEQ ID NO: 25902 - protein, 7 aa, synthetic construct
RGDLSDE

SEQ ID NO: 25903 - protein, 7 aa, synthetic construct
RGDLSKH

SEQ ID NO: 25904 - protein, 7 aa, synthetic construct
RGDLSLK

SEQ ID NO: 25905 - protein, 7 aa, synthetic construct
RGDLSQS

SEQ ID NO: 25906 - protein, 7 aa, synthetic construct
RGDLTHF

SEQ ID NO: 25907 - protein, 7 aa, synthetic construct
RGDLTIT

SEQ ID NO: 25908 - protein, 7 aa, synthetic construct
RGDLTKH

SEQ ID NO: 25909 - protein, 7 aa, synthetic construct
RGDLVDR

SEQ ID NO: 25910 - protein, 7 aa, synthetic construct
RGDATIR

SEQ ID NO: 25911 - protein, 7 aa, synthetic construct
RGDLVVL

SEQ ID NO: 25912 - protein, 7 aa, synthetic construct
RGDNANF

SEQ ID NO: 25913 - protein, 7 aa, synthetic construct
RGDATLL

SEQ ID NO: 25914 - protein, 7 aa, synthetic construct
RGDNATL

SEQ ID NO: 25915 - protein, 7 aa, synthetic construct
RGDNAVA

SEQ ID NO: 25916 - protein, 7 aa, synthetic construct
RGDNDRS

SEQ ID NO: 25917 - protein, 7 aa, synthetic construct
RGDNDVF

SEQ ID NO: 25918 - protein, 7 aa, synthetic construct
RGDNDVQ

SEQ ID NO: 25919 - protein, 7 aa, synthetic construct
RGDNEHS

SEQ ID NO: 25920 - protein, 7 aa, synthetic construct
RGDNFER

SEQ ID NO: 25921 - protein, 7 aa, synthetic construct
RGDNFRK

SEQ ID NO: 25922 - protein, 7 aa, synthetic construct
RGDNFTF

SEQ ID NO: 25923 - protein, 7 aa, synthetic construct
RGDNGNG

SEQ ID NO: 25924 - protein, 7 aa, synthetic construct
RGDNGQE

SEQ ID NO: 25925 - protein, 7 aa, synthetic construct
RGDNIQV

SEQ ID NO: 25926 - protein, 7 aa, synthetic construct
RGDNISR

SEQ ID NO: 25927 - protein, 7 aa, synthetic construct
RGDNKEG

SEQ ID NO: 25928 - protein, 7 aa, synthetic construct
RGDAVFV

SEQ ID NO: 25929 - protein, 7 aa, synthetic construct
RGDNLFE

SEQ ID NO: 25930 - protein, 7 aa, synthetic construct
RGDNLHS

SEQ ID NO: 25931 - protein, 7 aa, synthetic construct
RGDNNGD

SEQ ID NO: 25932 - protein, 7 aa, synthetic construct
RGDNQGN

SEQ ID NO: 25933 - protein, 7 aa, synthetic construct
RGDNSKE

SEQ ID NO: 25934 - protein, 7 aa, synthetic construct
RGDNTDT

SEQ ID NO: 25935 - protein, 7 aa, synthetic construct
RGDNTEH

SEQ ID NO: 25936 - protein, 7 aa, synthetic construct
RGDNTRE

SEQ ID NO: 25937 - protein, 7 aa, synthetic construct
RGDQDGK

SEQ ID NO: 25938 - protein, 7 aa, synthetic construct
RGDQERD

SEQ ID NO: 25939 - protein, 7 aa, synthetic construct
RGDADKV

SEQ ID NO: 25940 - protein, 7 aa, synthetic construct
RGDQGAG

SEQ ID NO: 25941 - protein, 7 aa, synthetic construct
RGDQHAQ

SEQ ID NO: 25942 - protein, 7 aa, synthetic construct
RGDQIFG

SEQ ID NO: 25943 - protein, 7 aa, synthetic construct
RGDQIHQ

SEQ ID NO: 25944 - protein, 7 aa, synthetic construct
RGDQIRH

SEQ ID NO: 25945 - protein, 7 aa, synthetic construct
RGDDAQF

SEQ ID NO: 25946 - protein, 7 aa, synthetic construct
RGDQKDR

SEQ ID NO: 25947 - protein, 7 aa, synthetic construct
RGDQLII

SEQ ID NO: 25948 - protein, 7 aa, synthetic construct
RGDQLTD

SEQ ID NO: 25949 - protein, 7 aa, synthetic construct
RGDQNVR

SEQ ID NO: 25950 - protein, 7 aa, synthetic construct
RGDQSDK

SEQ ID NO: 25951 - protein, 7 aa, synthetic construct
RGDRFLN

SEQ ID NO: 25952 - protein, 7 aa, synthetic construct
RGDRGQH

SEQ ID NO: 25953 - protein, 7 aa, synthetic construct
RGDRHRQ

SEQ ID NO: 25954 - protein, 7 aa, synthetic construct
RGDDEHV

SEQ ID NO: 25955 - protein, 7 aa, synthetic construct
RGDRQSE

SEQ ID NO: 25956 - protein, 7 aa, synthetic construct
RGDRSLL

SEQ ID NO: 25957 - protein, 7 aa, synthetic construct
RGDRVTG

SEQ ID NO: 25958 - protein, 7 aa, synthetic construct
RGDSALI

SEQ ID NO: 25959 - protein, 7 aa, synthetic construct
RGDSAVA

SEQ ID NO: 25960 - protein, 7 aa, synthetic construct
RGDSEGV

SEQ ID NO: 25961 - protein, 7 aa, synthetic construct
RGDADSK

SEQ ID NO: 25962 - protein, 7 aa, synthetic construct
RGDSFSV

SEQ ID NO: 25963 - protein, 7 aa, synthetic construct
RGDSGFF

SEQ ID NO: 25964 - protein, 7 aa, synthetic construct
RGDDFLL

SEQ ID NO: 25965 - protein, 7 aa, synthetic construct
RGDSIFF

SEQ ID NO: 25966 - protein, 7 aa, synthetic construct
RGDSIIT

SEQ ID NO: 25967 - protein, 7 aa, synthetic construct
RGDSKEI

SEQ ID NO: 25968 - protein, 7 aa, synthetic construct
RGDSKFD

SEQ ID NO: 25969 - protein, 7 aa, synthetic construct
RGDSLET

SEQ ID NO: 25970 - protein, 7 aa, synthetic construct
RGDSLEV

SEQ ID NO: 25971 - protein, 7 aa, synthetic construct
RGDSLVL

SEQ ID NO: 25972 - protein, 7 aa, synthetic construct
RGDSNDA

SEQ ID NO: 25973 - protein, 7 aa, synthetic construct
RGDDGAQ

SEQ ID NO: 25974 - protein, 7 aa, synthetic construct
RGDSRLE

SEQ ID NO: 25975 - protein, 7 aa, synthetic construct
RGDSVHD

SEQ ID NO: 25976 - protein, 7 aa, synthetic construct
RGDSVNI

SEQ ID NO: 25977 - protein, 7 aa, synthetic construct
RGDTDLR

SEQ ID NO: 25978 - protein, 7 aa, synthetic construct
RGDTEKR

SEQ ID NO: 25979 - protein, 7 aa, synthetic construct
RGDTELG

SEQ ID NO: 25980 - protein, 7 aa, synthetic construct
RGDTFFL

SEQ ID NO: 25981 - protein, 7 aa, synthetic construct
RGDTGET

SEQ ID NO: 25982 - protein, 7 aa, synthetic construct
RGDTGID

SEQ ID NO: 25983 - protein, 7 aa, synthetic construct
RGDTHDH

SEQ ID NO: 25984 - protein, 7 aa, synthetic construct
RGDTIQV

SEQ ID NO: 25985 - protein, 7 aa, synthetic construct
RGDTISV

SEQ ID NO: 25986 - protein, 7 aa, synthetic construct
RGDTKTH

SEQ ID NO: 25987 - protein, 7 aa, synthetic construct
RGDDHHE

SEQ ID NO: 25988 - protein, 7 aa, synthetic construct
RGDTNAN

SEQ ID NO: 25989 - protein, 7 aa, synthetic construct
RGDTNRA

SEQ ID NO: 25990 - protein, 7 aa, synthetic construct
RGDTQNN

SEQ ID NO: 25991 - protein, 7 aa, synthetic construct
RGDDHST

SEQ ID NO: 25992 - protein, 7 aa, synthetic construct
RGDTVFE

SEQ ID NO: 25993 - protein, 7 aa, synthetic construct
RGDTVGN

SEQ ID NO: 25994 - protein, 7 aa, synthetic construct
RGDTVHN

SEQ ID NO: 25995 - protein, 7 aa, synthetic construct
RGDVAVT

SEQ ID NO: 25996 - protein, 7 aa, synthetic construct
RGDVDKK

SEQ ID NO: 25997 - protein, 7 aa, synthetic construct
RGDVEHH

SEQ ID NO: 25998 - protein, 7 aa, synthetic construct
RGDVETQ

SEQ ID NO: 25999 - protein, 7 aa, synthetic construct
RGDDIGT

SEQ ID NO: 26000 - protein, 7 aa, synthetic construct
RGDVFKA

SEQ ID NO: 26001 - protein, 7 aa, synthetic construct
RGDVFNI

SEQ ID NO: 26002 - protein, 7 aa, synthetic construct
RGDVFSV

SEQ ID NO: 26003 - protein, 7 aa, synthetic construct
RGDVFTI

SEQ ID NO: 26004 - protein, 7 aa, synthetic construct
RGDVGIQ

SEQ ID NO: 26005 - protein, 7 aa, synthetic construct
RGDVGIR

SEQ ID NO: 26006 - protein, 7 aa, synthetic construct
RGDVGRT

SEQ ID NO: 26007 - protein, 7 aa, synthetic construct
RGDVILH

SEQ ID NO: 26008 - protein, 7 aa, synthetic construct
RGDVLLN

SEQ ID NO: 26009 - protein, 7 aa, synthetic construct
RGDVNDT

SEQ ID NO: 26010 - protein, 7 aa, synthetic construct
RGDVNEQ

SEQ ID NO: 26011 - protein, 7 aa, synthetic construct
RGDVRFG

SEQ ID NO: 26012 - protein, 7 aa, synthetic construct
RGDVRQD

SEQ ID NO: 26013 - protein, 7 aa, synthetic construct
RGDVTAN

SEQ ID NO: 26014 - protein, 7 aa, synthetic construct
RGDVTDR

SEQ ID NO: 26015 - protein, 7 aa, synthetic construct
RGDVTNL

SEQ ID NO: 26016 - protein, 7 aa, synthetic construct
RGDVTQL

SEQ ID NO: 26017 - protein, 7 aa, synthetic construct
RGDVVQI

SEQ ID NO: 26018 - protein, 7 aa, synthetic construct
RGDDLHK

SEQ ID NO: 26019 - protein, 7 aa, synthetic construct
RGDDNFE

SEQ ID NO: 26020 - protein, 7 aa, synthetic construct
RGDDNKL

SEQ ID NO: 26021 - protein, 7 aa, synthetic construct
RGDDQAV

SEQ ID NO: 26022 - protein, 7 aa, synthetic construct
RGDDQNN

SEQ ID NO: 26023 - protein, 7 aa, synthetic construct
RGDDQQF

SEQ ID NO: 26024 - protein, 7 aa, synthetic construct
RGDDRFF

SEQ ID NO: 26025 - protein, 7 aa, synthetic construct
RGDDRSL

SEQ ID NO: 26026 - protein, 7 aa, synthetic construct
RGDDSNT

SEQ ID NO: 26027 - protein, 7 aa, synthetic construct
RGDDTGR

SEQ ID NO: 26028 - protein, 7 aa, synthetic construct
RGDDTRS

SEQ ID NO: 26029 - protein, 7 aa, synthetic construct
RGDDVGS

SEQ ID NO: 26030 - protein, 7 aa, synthetic construct
RGDDVHG

SEQ ID NO: 26031 - protein, 7 aa, synthetic construct
RGDDVHQ

SEQ ID NO: 26032 - protein, 7 aa, synthetic construct
RGDDVIL

SEQ ID NO: 26033 - protein, 7 aa, synthetic construct
RGDEARL

SEQ ID NO: 26034 - protein, 7 aa, synthetic construct
RGDEAVF

SEQ ID NO: 26035 - protein, 7 aa, synthetic construct
RGDEDKH

SEQ ID NO: 26036 - protein, 7 aa, synthetic construct
RGDEDTK

SEQ ID NO: 26037 - protein, 7 aa, synthetic construct
RGDEEIR

SEQ ID NO: 26038 - protein, 7 aa, synthetic construct
RGDEEKT

SEQ ID NO: 26039 - protein, 7 aa, synthetic construct
RGDEEQL

SEQ ID NO: 26040 - protein, 7 aa, synthetic construct
RGDEEQV

SEQ ID NO: 26041 - protein, 7 aa, synthetic construct
RGDEEVR

SEQ ID NO: 26042 - protein, 7 aa, synthetic construct
RGDEFRR

SEQ ID NO: 26043 - protein, 7 aa, synthetic construct
RGDEGDR

SEQ ID NO: 26044 - protein, 7 aa, synthetic construct
RGDEGVI

SEQ ID NO: 26045 - protein, 7 aa, synthetic construct
RGDEHEQ

SEQ ID NO: 26046 - protein, 7 aa, synthetic construct
RGDEHFE

SEQ ID NO: 26047 - protein, 7 aa, synthetic construct
RGDEHNT

SEQ ID NO: 26048 - protein, 7 aa, synthetic construct
RGDEISV

SEQ ID NO: 26049 - protein, 7 aa, synthetic construct
RGDEITT

SEQ ID NO: 26050 - protein, 7 aa, synthetic construct
RGDEKLI

SEQ ID NO: 26051 - protein, 7 aa, synthetic construct
RGDEKTT

SEQ ID NO: 26052 - protein, 7 aa, synthetic construct
RGDELHQ

SEQ ID NO: 26053 - protein, 7 aa, synthetic construct
RGDAFST

SEQ ID NO: 26054 - protein, 7 aa, synthetic construct
RGDENFI

SEQ ID NO: 26055 - protein, 7 aa, synthetic construct
RGDEQVF

SEQ ID NO: 26056 - protein, 7 aa, synthetic construct
RGDEREE

SEQ ID NO: 26057 - protein, 7 aa, synthetic construct
RGDERGV

SEQ ID NO: 26058 - protein, 7 aa, synthetic construct
RGDERKT

SEQ ID NO: 26059 - protein, 7 aa, synthetic construct
RGDERNA

SEQ ID NO: 26060 - protein, 7 aa, synthetic construct
RGDESFQ

SEQ ID NO: 26061 - protein, 7 aa, synthetic construct
RGDESHG

SEQ ID NO: 26062 - protein, 7 aa, synthetic construct
RGDESHS

SEQ ID NO: 26063 - protein, 7 aa, synthetic construct
RGDESQQ

SEQ ID NO: 26064 - protein, 7 aa, synthetic construct
RGDEVDF

SEQ ID NO: 26065 - protein, 7 aa, synthetic construct
RGDEVFV

SEQ ID NO: 26066 - protein, 7 aa, synthetic construct
RGDEVNN

SEQ ID NO: 26067 - protein, 7 aa, synthetic construct
RGDAGKA

SEQ ID NO: 26068 - protein, 7 aa, synthetic construct
RGDFASI

SEQ ID NO: 26069 - protein, 7 aa, synthetic construct
RGDFDAF

SEQ ID NO: 26070 - protein, 7 aa, synthetic construct
RGDFDHK

SEQ ID NO: 26071 - protein, 7 aa, synthetic construct
RGDFEQS

SEQ ID NO: 26072 - protein, 7 aa, synthetic construct
RGDFFIE

SEQ ID NO: 26073 - protein, 7 aa, synthetic construct
RGDFFLH

SEQ ID NO: 26074 - protein, 7 aa, synthetic construct
RGDFHLH

SEQ ID NO: 26075 - protein, 7 aa, synthetic construct
RGDAHDL

SEQ ID NO: 26076 - protein, 7 aa, synthetic construct
RGDFIDA

SEQ ID NO: 26077 - protein, 7 aa, synthetic construct
RGDFIVH

SEQ ID NO: 26078 - protein, 7 aa, synthetic construct
RGDFKDI

SEQ ID NO: 26079 - protein, 7 aa, synthetic construct
RGDFKQL

SEQ ID NO: 26080 - protein, 7 aa, synthetic construct
RGDFKSQ

SEQ ID NO: 26081 - protein, 7 aa, synthetic construct
RGDFNAL

SEQ ID NO: 26082 - protein, 7 aa, synthetic construct
RGDFNGS

SEQ ID NO: 26083 - protein, 7 aa, synthetic construct
RGDFQDR

SEQ ID NO: 26084 - protein, 7 aa, synthetic construct
RGDFQET

SEQ ID NO: 26085 - protein, 7 aa, synthetic construct
RGDFRRI

SEQ ID NO: 26086 - protein, 7 aa, synthetic construct
RGDFRVE

SEQ ID NO: 26087 - protein, 7 aa, synthetic construct
RGDFTNL

SEQ ID NO: 26088 - protein, 7 aa, synthetic construct
RGDGAQS

SEQ ID NO: 26089 - protein, 7 aa, synthetic construct
RGDGDKT

SEQ ID NO: 26090 - protein, 7 aa, synthetic construct
RGDGDSK

SEQ ID NO: 26091 - protein, 7 aa, synthetic construct
RGDGENS

SEQ ID NO: 26092 - protein, 7 aa, synthetic construct
RGDGERI

SEQ ID NO: 26093 - protein, 7 aa, synthetic construct
RGDGFDR

SEQ ID NO: 26094 - protein, 7 aa, synthetic construct
RGDGGDG

SEQ ID NO: 26095 - protein, 7 aa, synthetic construct
RGDGGDV

SEQ ID NO: 26096 - protein, 7 aa, synthetic construct
RGDGGVE

SEQ ID NO: 26097 - protein, 7 aa, synthetic construct
RGDGIFN

SEQ ID NO: 26098 - protein, 7 aa, synthetic construct
RGDGKES

SEQ ID NO: 26099 - protein, 7 aa, synthetic construct
RGDGKFH

SEQ ID NO: 26100 - protein, 7 aa, synthetic construct
RGDGNAH

SEQ ID NO: 26101 - protein, 7 aa, synthetic construct
RGDGNSQ

SEQ ID NO: 26102 - protein, 7 aa, synthetic construct
RGDGQQE

SEQ ID NO: 26103 - protein, 7 aa, synthetic construct
RGDAKET

SEQ ID NO: 26104 - protein, 7 aa, synthetic construct
RGDAKFG

SEQ ID NO: 26105 - protein, 7 aa, synthetic construct
RGDGSHD

SEQ ID NO: 26106 - protein, 7 aa, synthetic construct
RGDGSLK

SEQ ID NO: 26107 - protein, 7 aa, synthetic construct
RGDGTHH

SEQ ID NO: 26108 - protein, 7 aa, synthetic construct
RGDGTNQ

SEQ ID NO: 26109 - protein, 7 aa, synthetic construct
RGDGVFE

SEQ ID NO: 26110 - protein, 7 aa, synthetic construct
RGDGVRA

SEQ ID NO: 26111 - protein, 7 aa, synthetic construct
RGDGVRH

SEQ ID NO: 26112 - protein, 7 aa, synthetic construct
RGDHAFE

SEQ ID NO: 26113 - protein, 7 aa, synthetic construct
RGDHDDG

SEQ ID NO: 26114 - protein, 7 aa, synthetic construct
RGDHDFE

SEQ ID NO: 26115 - protein, 7 aa, synthetic construct
RGDHDHL

SEQ ID NO: 26116 - protein, 7 aa, synthetic construct
RGDHDKE

SEQ ID NO: 26117 - protein, 7 aa, synthetic construct
RGDHDRL

SEQ ID NO: 26118 - protein, 7 aa, synthetic construct
RGDHDVF

SEQ ID NO: 26119 - protein, 7 aa, synthetic construct
RGDHFFH

SEQ ID NO: 26120 - protein, 7 aa, synthetic construct
RGDHFQH

SEQ ID NO: 26121 - protein, 7 aa, synthetic construct
RGDHFTG

SEQ ID NO: 26122 - protein, 7 aa, synthetic construct
RGDHFVI

SEQ ID NO: 26123 - protein, 7 aa, synthetic construct
RGDHGEG

SEQ ID NO: 26124 - protein, 7 aa, synthetic construct
RGDHGNH

SEQ ID NO: 26125 - protein, 7 aa, synthetic construct
RGDHHGA

SEQ ID NO: 26126 - protein, 7 aa, synthetic construct
RGDHHGH

SEQ ID NO: 26127 - protein, 7 aa, synthetic construct
RGDHHLL

SEQ ID NO: 26128 - protein, 7 aa, synthetic construct
RGDHHVG

SEQ ID NO: 26129 - protein, 7 aa, synthetic construct
RGDHKAQ

SEQ ID NO: 26130 - protein, 7 aa, synthetic construct
RGDHLKS

SEQ ID NO: 26131 - protein, 7 aa, synthetic construct
RGDHNVT

SEQ ID NO: 26132 - protein, 7 aa, synthetic construct
RGDHQKS

SEQ ID NO: 26133 - protein, 7 aa, synthetic construct
RGDHQLV

SEQ ID NO: 26134 - protein, 7 aa, synthetic construct
RGDHRTH

SEQ ID NO: 26135 - protein, 7 aa, synthetic construct
RGDHSAS

SEQ ID NO: 26136 - protein, 7 aa, synthetic construct
RGDAATA

SEQ ID NO: 26137 - protein, 7 aa, synthetic construct
RGDHSEH

SEQ ID NO: 26138 - protein, 7 aa, synthetic construct
RGDHSEN

SEQ ID NO: 26139 - protein, 7 aa, synthetic construct
RGDHSHN

SEQ ID NO: 26140 - protein, 7 aa, synthetic construct
RGDHTKG

SEQ ID NO: 26141 - protein, 7 aa, synthetic construct
RGDHTVA

SEQ ID NO: 26142 - protein, 7 aa, synthetic construct
RGDHVQS

SEQ ID NO: 26143 - protein, 7 aa, synthetic construct
RGDIADN

SEQ ID NO: 26144 - protein, 7 aa, synthetic construct
RGDIAGN

SEQ ID NO: 26145 - protein, 7 aa, synthetic construct
RGDIDHS

SEQ ID NO: 26146 - protein, 7 aa, synthetic construct
RGDIDIG

SEQ ID NO: 26147 - protein, 7 aa, synthetic construct
RGDIDSR

SEQ ID NO: 26148 - protein, 7 aa, synthetic construct
RGDIEFE

SEQ ID NO: 26149 - protein, 7 aa, synthetic construct
RGDIEGN

SEQ ID NO: 26150 - protein, 7 aa, synthetic construct
RGDANGI

SEQ ID NO: 26151 - protein, 7 aa, synthetic construct
RGDIGFN

SEQ ID NO: 26152 - protein, 7 aa, synthetic construct
RGDANIV

SEQ ID NO: 26153 - protein, 7 aa, synthetic construct
RGDIHLE

SEQ ID NO: 26154 - protein, 7 aa, synthetic construct
RGDIHTQ

SEQ ID NO: 26155 - protein, 7 aa, synthetic construct
RGDIHVG

SEQ ID NO: 26156 - protein, 7 aa, synthetic construct
RGDIIRT

SEQ ID NO: 26157 - protein, 7 aa, synthetic construct
RGDIIVD

SEQ ID NO: 26158 - protein, 7 aa, synthetic construct
RGDIKEQ

SEQ ID NO: 26159 - protein, 7 aa, synthetic construct
RGDIKGA

SEQ ID NO: 26160 - protein, 7 aa, synthetic construct
RGDILGA

SEQ ID NO: 26161 - protein, 7 aa, synthetic construct
RGDILHG

SEQ ID NO: 26162 - protein, 7 aa, synthetic construct
RGDINHS

SEQ ID NO: 26163 - protein, 7 aa, synthetic construct
RGDIQIT

SEQ ID NO: 26164 - protein, 7 aa, synthetic construct
RGDAQAQ

SEQ ID NO: 26165 - protein, 7 aa, synthetic construct
RGDIQLN

SEQ ID NO: 26166 - protein, 7 aa, synthetic construct
RGDISAS

SEQ ID NO: 26167 - protein, 7 aa, synthetic construct
RGDISFD

SEQ ID NO: 26168 - protein, 7 aa, synthetic construct
RGDITKE

SEQ ID NO: 26169 - protein, 7 aa, synthetic construct
RGDIVEK

SEQ ID NO: 26170 - protein, 7 aa, synthetic construct
RGDIVNL

SEQ ID NO: 26171 - protein, 7 aa, synthetic construct
RGDIVTG

SEQ ID NO: 26172 - protein, 7 aa, synthetic construct
RGDKAGE

SEQ ID NO: 26173 - protein, 7 aa, synthetic construct
RGDKAQQ

SEQ ID NO: 26174 - protein, 7 aa, synthetic construct
RGDKAVA

SEQ ID NO: 26175 - protein, 7 aa, synthetic construct
RGDAQQV

SEQ ID NO: 26176 - protein, 7 aa, synthetic construct
RGDKENT

SEQ ID NO: 26177 - protein, 7 aa, synthetic construct
RGDKESQ

SEQ ID NO: 26178 - protein, 7 aa, synthetic construct
RGDKFKN

SEQ ID NO: 26179 - protein, 7 aa, synthetic construct
RGDKIHN

SEQ ID NO: 26180 - protein, 7 aa, synthetic construct
RGDKIIF

SEQ ID NO: 26181 - protein, 7 aa, synthetic construct
RGDARKH

SEQ ID NO: 26182 - protein, 7 aa, synthetic construct
RGDKQET

SEQ ID NO: 26183 - protein, 7 aa, synthetic construct
RGDKQTF

SEQ ID NO: 26184 - protein, 7 aa, synthetic construct
RGDKRDH

SEQ ID NO: 26185 - protein, 7 aa, synthetic construct
RGDKSDD

SEQ ID NO: 26186 - protein, 7 aa, synthetic construct
RGDKTDF

SEQ ID NO: 26187 - protein, 7 aa, synthetic construct
RGDKTNE

SEQ ID NO: 26188 - protein, 7 aa, synthetic construct
RGDARTG

SEQ ID NO: 26189 - protein, 7 aa, synthetic construct
RGDKVEL

SEQ ID NO: 26190 - protein, 7 aa, synthetic construct
RGDLAGI

SEQ ID NO: 26191 - protein, 7 aa, synthetic construct
RGDLANA

SEQ ID NO: 26192 - protein, 7 aa, synthetic construct
RGDLAVD

SEQ ID NO: 26193 - protein, 7 aa, synthetic construct
RGDLDAV

SEQ ID NO: 26194 - protein, 7 aa, synthetic construct
RGDLDRN

SEQ ID NO: 26195 - protein, 7 aa, synthetic construct
RGDLDVR

SEQ ID NO: 26196 - protein, 7 aa, synthetic construct
RGDLETQ

SEQ ID NO: 26197 - protein, 7 aa, synthetic construct
RGDLGQT

SEQ ID NO: 26198 - protein, 7 aa, synthetic construct
RGDLIEF

SEQ ID NO: 26199 - protein, 7 aa, synthetic construct
RGDLIHR

SEQ ID NO: 26200 - protein, 7 aa, synthetic construct
RGDLKIG

SEQ ID NO: 26201 - protein, 7 aa, synthetic construct
RGDLKSG

SEQ ID NO: 26202 - protein, 7 aa, synthetic construct
RGDLNIV

SEQ ID NO: 26203 - protein, 7 aa, synthetic construct
RGDLQHH

SEQ ID NO: 26204 - protein, 7 aa, synthetic construct
RGDLQIV

SEQ ID NO: 26205 - protein, 7 aa, synthetic construct
RGDLQNF

SEQ ID NO: 26206 - protein, 7 aa, synthetic construct
RGDLQTS

SEQ ID NO: 26207 - protein, 7 aa, synthetic construct
RGDLSKE

SEQ ID NO: 26208 - protein, 7 aa, synthetic construct
RGDLSQE

SEQ ID NO: 26209 - protein, 7 aa, synthetic construct
RGDLTLH

SEQ ID NO: 26210 - protein, 7 aa, synthetic construct
RGDATHR

SEQ ID NO: 26211 - protein, 7 aa, synthetic construct
RGDLTVF

SEQ ID NO: 26212 - protein, 7 aa, synthetic construct
RGDLVNH

SEQ ID NO: 26213 - protein, 7 aa, synthetic construct
RGDLVTD

SEQ ID NO: 26214 - protein, 7 aa, synthetic construct
RGDNAEL

SEQ ID NO: 26215 - protein, 7 aa, synthetic construct
RGDNATN

SEQ ID NO: 26216 - protein, 7 aa, synthetic construct
RGDATLV

SEQ ID NO: 26217 - protein, 7 aa, synthetic construct
RGDNDGI

SEQ ID NO: 26218 - protein, 7 aa, synthetic construct
RGDNEFN

SEQ ID NO: 26219 - protein, 7 aa, synthetic construct
RGDATQV

SEQ ID NO: 26220 - protein, 7 aa, synthetic construct
RGDNEKA

SEQ ID NO: 26221 - protein, 7 aa, synthetic construct
RGDNFAD

SEQ ID NO: 26222 - protein, 7 aa, synthetic construct
RGDNFAR

SEQ ID NO: 26223 - protein, 7 aa, synthetic construct
RGDNFIL

SEQ ID NO: 26224 - protein, 7 aa, synthetic construct
RGDNGAH

SEQ ID NO: 26225 - protein, 7 aa, synthetic construct
RGDNGQV

SEQ ID NO: 26226 - protein, 7 aa, synthetic construct
RGDNHAV

SEQ ID NO: 26227 - protein, 7 aa, synthetic construct
RGDNKSS

SEQ ID NO: 26228 - protein, 7 aa, synthetic construct
RGDNKVQ

SEQ ID NO: 26229 - protein, 7 aa, synthetic construct
RGDNNDI

SEQ ID NO: 26230 - protein, 7 aa, synthetic construct
RGDNNGA

SEQ ID NO: 26231 - protein, 7 aa, synthetic construct
RGDNNVI

SEQ ID NO: 26232 - protein, 7 aa, synthetic construct
RGDNQAS

SEQ ID NO: 26233 - protein, 7 aa, synthetic construct
RGDNQKA

SEQ ID NO: 26234 - protein, 7 aa, synthetic construct
RGDAVLN

SEQ ID NO: 26235 - protein, 7 aa, synthetic construct
RGDAVQQ

SEQ ID NO: 26236 - protein, 7 aa, synthetic construct
RGDNSVG

SEQ ID NO: 26237 - protein, 7 aa, synthetic construct
RGDNTAF

SEQ ID NO: 26238 - protein, 7 aa, synthetic construct
RGDNVAR

SEQ ID NO: 26239 - protein, 7 aa, synthetic construct
RGDQAIT

SEQ ID NO: 26240 - protein, 7 aa, synthetic construct
RGDQDKE

SEQ ID NO: 26241 - protein, 7 aa, synthetic construct
RGDQEGH

SEQ ID NO: 26242 - protein, 7 aa, synthetic construct
RGDQEHQ

SEQ ID NO: 26243 - protein, 7 aa, synthetic construct
RGDQENQ

SEQ ID NO: 26244 - protein, 7 aa, synthetic construct
RGDQEVL

SEQ ID NO: 26245 - protein, 7 aa, synthetic construct
RGDQFGQ

SEQ ID NO: 26246 - protein, 7 aa, synthetic construct
RGDDAHS

SEQ ID NO: 26247 - protein, 7 aa, synthetic construct
RGDQFVN

SEQ ID NO: 26248 - protein, 7 aa, synthetic construct
RGDQGNL

SEQ ID NO: 26249 - protein, 7 aa, synthetic construct
RGDDAKA

SEQ ID NO: 26250 - protein, 7 aa, synthetic construct
RGDQHQL

SEQ ID NO: 26251 - protein, 7 aa, synthetic construct
RGDDAQA

SEQ ID NO: 26252 - protein, 7 aa, synthetic construct
RGDQIQQ

SEQ ID NO: 26253 - protein, 7 aa, synthetic construct
RGDDAQV

SEQ ID NO: 26254 - protein, 7 aa, synthetic construct
RGDQKNE

SEQ ID NO: 26255 - protein, 7 aa, synthetic construct
RGDQLIS

SEQ ID NO: 26256 - protein, 7 aa, synthetic construct
RGDQLSF

SEQ ID NO: 26257 - protein, 7 aa, synthetic construct
RGDQNDI

SEQ ID NO: 26258 - protein, 7 aa, synthetic construct
RGDQNKT

SEQ ID NO: 26259 - protein, 7 aa, synthetic construct
RGDQNQE

SEQ ID NO: 26260 - protein, 7 aa, synthetic construct
RGDDAVV

SEQ ID NO: 26261 - protein, 7 aa, synthetic construct
RGDQRKG

SEQ ID NO: 26262 - protein, 7 aa, synthetic construct
RGDQSEE

SEQ ID NO: 26263 - protein, 7 aa, synthetic construct
RGDQSNE

SEQ ID NO: 26264 - protein, 7 aa, synthetic construct
RGDQTVK

SEQ ID NO: 26265 - protein, 7 aa, synthetic construct
RGDQVDE

SEQ ID NO: 26266 - protein, 7 aa, synthetic construct
RGDQVLA

SEQ ID NO: 26267 - protein, 7 aa, synthetic construct
RGDRDLA

SEQ ID NO: 26268 - protein, 7 aa, synthetic construct
RGDRDNH

SEQ ID NO: 26269 - protein, 7 aa, synthetic construct
RGDREIA

SEQ ID NO: 26270 - protein, 7 aa, synthetic construct
RGDRGRE

SEQ ID NO: 26271 - protein, 7 aa, synthetic construct
RGDRIKH

SEQ ID NO: 26272 - protein, 7 aa, synthetic construct
RGDRIRG

SEQ ID NO: 26273 - protein, 7 aa, synthetic construct
RGDDEGN

SEQ ID NO: 26274 - protein, 7 aa, synthetic construct
RGDRQNE

SEQ ID NO: 26275 - protein, 7 aa, synthetic construct
RGDDEVK

SEQ ID NO: 26276 - protein, 7 aa, synthetic construct
RGDSDAI

SEQ ID NO: 26277 - protein, 7 aa, synthetic construct
RGDSDSA

SEQ ID NO: 26278 - protein, 7 aa, synthetic construct
RGDSDVK

SEQ ID NO: 26279 - protein, 7 aa, synthetic construct
RGDSFFN

SEQ ID NO: 26280 - protein, 7 aa, synthetic construct
RGDSFND

SEQ ID NO: 26281 - protein, 7 aa, synthetic construct
RGDSFQV

SEQ ID NO: 26282 - protein, 7 aa, synthetic construct
RGDSFVH

SEQ ID NO: 26283 - protein, 7 aa, synthetic construct
RGDSGDV

SEQ ID NO: 26284 - protein, 7 aa, synthetic construct
RGDSHQE

SEQ ID NO: 26285 - protein, 7 aa, synthetic construct
RGDSITH

SEQ ID NO: 26286 - protein, 7 aa, synthetic construct
RGDSKTQ

SEQ ID NO: 26287 - protein, 7 aa, synthetic construct
RGDSNIS

SEQ ID NO: 26288 - protein, 7 aa, synthetic construct
RGDSNNI

SEQ ID NO: 26289 - protein, 7 aa, synthetic construct
RGDSNTK

SEQ ID NO: 26290 - protein, 7 aa, synthetic construct
RGDSNVS

SEQ ID NO: 26291 - protein, 7 aa, synthetic construct
RGDSQKA

SEQ ID NO: 26292 - protein, 7 aa, synthetic construct
RGDSQNG

SEQ ID NO: 26293 - protein, 7 aa, synthetic construct
RGDSQVH

SEQ ID NO: 26294 - protein, 7 aa, synthetic construct
RGDDGDI

SEQ ID NO: 26295 - protein, 7 aa, synthetic construct
RGDSSEA

SEQ ID NO: 26296 - protein, 7 aa, synthetic construct
RGDSSET

SEQ ID NO: 26297 - protein, 7 aa, synthetic construct
RGDSVNN

SEQ ID NO: 26298 - protein, 7 aa, synthetic construct
RGDSVVG

SEQ ID NO: 26299 - protein, 7 aa, synthetic construct
RGDTAKS

SEQ ID NO: 26300 - protein, 7 aa, synthetic construct
RGDTDQA

SEQ ID NO: 26301 - protein, 7 aa, synthetic construct
RGDTDVT

SEQ ID NO: 26302 - protein, 7 aa, synthetic construct
RGDTELA

SEQ ID NO: 26303 - protein, 7 aa, synthetic construct
RGDTEVN

SEQ ID NO: 26304 - protein, 7 aa, synthetic construct
RGDTFFV

SEQ ID NO: 26305 - protein, 7 aa, synthetic construct
RGDDGSK

SEQ ID NO: 26306 - protein, 7 aa, synthetic construct
RGDDHAG

SEQ ID NO: 26307 - protein, 7 aa, synthetic construct
RGDDHES

SEQ ID NO: 26308 - protein, 7 aa, synthetic construct
RGDDHFI

SEQ ID NO: 26309 - protein, 7 aa, synthetic construct
RGDDHFR

SEQ ID NO: 26310 - protein, 7 aa, synthetic construct
RGDTKRF

SEQ ID NO: 26311 - protein, 7 aa, synthetic construct
RGDTKTE

SEQ ID NO: 26312 - protein, 7 aa, synthetic construct
RGDTLHA

SEQ ID NO: 26313 - protein, 7 aa, synthetic construct
RGDTNIG

SEQ ID NO: 26314 - protein, 7 aa, synthetic construct
RGDTNIL

SEQ ID NO: 26315 - protein, 7 aa, synthetic construct
RGDTNNR

SEQ ID NO: 26316 - protein, 7 aa, synthetic construct
RGDDHKF

SEQ ID NO: 26317 - protein, 7 aa, synthetic construct
RGDDHLK

SEQ ID NO: 26318 - protein, 7 aa, synthetic construct
RGDDHQN

SEQ ID NO: 26319 - protein, 7 aa, synthetic construct
RGDTSHS

SEQ ID NO: 26320 - protein, 7 aa, synthetic construct
RGDTSNA

SEQ ID NO: 26321 - protein, 7 aa, synthetic construct
RGDTSRR

SEQ ID NO: 26322 - protein, 7 aa, synthetic construct
RGDTSTT

SEQ ID NO: 26323 - protein, 7 aa, synthetic construct
RGDTTLK

SEQ ID NO: 26324 - protein, 7 aa, synthetic construct
RGDAAFD

SEQ ID NO: 26325 - protein, 7 aa, synthetic construct
RGDTVIS

SEQ ID NO: 26326 - protein, 7 aa, synthetic construct
RGDTVRA

SEQ ID NO: 26327 - protein, 7 aa, synthetic construct
RGDVAFF

SEQ ID NO: 26328 - protein, 7 aa, synthetic construct
RGDVAIE

SEQ ID NO: 26329 - protein, 7 aa, synthetic construct
RGDVANT

SEQ ID NO: 26330 - protein, 7 aa, synthetic construct
RGDVDRA

SEQ ID NO: 26331 - protein, 7 aa, synthetic construct
RGDVELQ

SEQ ID NO: 26332 - protein, 7 aa, synthetic construct
RGDVFLQ

SEQ ID NO: 26333 - protein, 7 aa, synthetic construct
RGDVFQE

SEQ ID NO: 26334 - protein, 7 aa, synthetic construct
RGDVGSL

SEQ ID NO: 26335 - protein, 7 aa, synthetic construct
RGDVHEN

SEQ ID NO: 26336 - protein, 7 aa, synthetic construct
RGDVIKA

SEQ ID NO: 26337 - protein, 7 aa, synthetic construct
RGDVINA

SEQ ID NO: 26338 - protein, 7 aa, synthetic construct
RGDVQGE

SEQ ID NO: 26339 - protein, 7 aa, synthetic construct
RGDVQGS

SEQ ID NO: 26340 - protein, 7 aa, synthetic construct
RGDDKER

SEQ ID NO: 26341 - protein, 7 aa, synthetic construct
RGDVSGE

SEQ ID NO: 26342 - protein, 7 aa, synthetic construct
RGDVTSV

SEQ ID NO: 26343 - protein, 7 aa, synthetic construct
RGDVVRG

SEQ ID NO: 26344 - protein, 7 aa, synthetic construct
RGDDLAQ

SEQ ID NO: 26345 - protein, 7 aa, synthetic construct
RGDDNAS

SEQ ID NO: 26346 - protein, 7 aa, synthetic construct
RGDAEIK

SEQ ID NO: 26347 - protein, 7 aa, synthetic construct
RGDDNTF

SEQ ID NO: 26348 - protein, 7 aa, synthetic construct
RGDAENH

SEQ ID NO: 26349 - protein, 7 aa, synthetic construct
RGDDRRG

SEQ ID NO: 26350 - protein, 7 aa, synthetic construct
RGDDSDH

SEQ ID NO: 26351 - protein, 7 aa, synthetic construct
RGDDSIR

SEQ ID NO: 26352 - protein, 7 aa, synthetic construct
RGDDSST

SEQ ID NO: 26353 - protein, 7 aa, synthetic construct
RGDDSVE

SEQ ID NO: 26354 - protein, 7 aa, synthetic construct
RGDDTGV

SEQ ID NO: 26355 - protein, 7 aa, synthetic construct
RGDDTSR

SEQ ID NO: 26356 - protein, 7 aa, synthetic construct
RGDDVEQ

SEQ ID NO: 26357 - protein, 7 aa, synthetic construct
RGDEDSI

SEQ ID NO: 26358 - protein, 7 aa, synthetic construct
RGDEEVS

SEQ ID NO: 26359 - protein, 7 aa, synthetic construct
RGDEFAV

SEQ ID NO: 26360 - protein, 7 aa, synthetic construct
RGDEFGK

SEQ ID NO: 26361 - protein, 7 aa, synthetic construct
RGDEFKR

SEQ ID NO: 26362 - protein, 7 aa, synthetic construct
RGDEFNS

SEQ ID NO: 26363 - protein, 7 aa, synthetic construct
RGDEFTE

SEQ ID NO: 26364 - protein, 7 aa, synthetic construct
RGDEHGH

SEQ ID NO: 26365 - protein, 7 aa, synthetic construct
RGDEHHN

SEQ ID NO: 26366 - protein, 7 aa, synthetic construct
RGDEHNN

SEQ ID NO: 26367 - protein, 7 aa, synthetic construct
RGDEITF

SEQ ID NO: 26368 - protein, 7 aa, synthetic construct
RGDEKGR

SEQ ID NO: 26369 - protein, 7 aa, synthetic construct
RGDEKRL

SEQ ID NO: 26370 - protein, 7 aa, synthetic construct
RGDEKTL

SEQ ID NO: 26371 - protein, 7 aa, synthetic construct
RGDELHS

SEQ ID NO: 26372 - protein, 7 aa, synthetic construct
RGDENSF

SEQ ID NO: 26373 - protein, 7 aa, synthetic construct
RGDEQHI

SEQ ID NO: 26374 - protein, 7 aa, synthetic construct
RGDERKD

SEQ ID NO: 26375 - protein, 7 aa, synthetic construct
RGDERLT

SEQ ID NO: 26376 - protein, 7 aa, synthetic construct
RGDERTL

SEQ ID NO: 26377 - protein, 7 aa, synthetic construct
RGDERVF

SEQ ID NO: 26378 - protein, 7 aa, synthetic construct
RGDESRA

SEQ ID NO: 26379 - protein, 7 aa, synthetic construct
RGDETHQ

SEQ ID NO: 26380 - protein, 7 aa, synthetic construct
RGDETSN

SEQ ID NO: 26381 - protein, 7 aa, synthetic construct
RGDEVHE

SEQ ID NO: 26382 - protein, 7 aa, synthetic construct
RGDFAAV

SEQ ID NO: 26383 - protein, 7 aa, synthetic construct
RGDFDIQ

SEQ ID NO: 26384 - protein, 7 aa, synthetic construct
RGDFESE

SEQ ID NO: 26385 - protein, 7 aa, synthetic construct
RGDFFFI

SEQ ID NO: 26386 - protein, 7 aa, synthetic construct
RGDAGSH

SEQ ID NO: 26387 - protein, 7 aa, synthetic construct
RGDFFGF

SEQ ID NO: 26388 - protein, 7 aa, synthetic construct
RGDFFGI

SEQ ID NO: 26389 - protein, 7 aa, synthetic construct
RGDFFIS

SEQ ID NO: 26390 - protein, 7 aa, synthetic construct
RGDFFQT

SEQ ID NO: 26391 - protein, 7 aa, synthetic construct
RGDAGTT

SEQ ID NO: 26392 - protein, 7 aa, synthetic construct
RGDFIGA

SEQ ID NO: 26393 - protein, 7 aa, synthetic construct
RGDFIGS

SEQ ID NO: 26394 - protein, 7 aa, synthetic construct
RGDFIIS

SEQ ID NO: 26395 - protein, 7 aa, synthetic construct
RGDFKIL

SEQ ID NO: 26396 - protein, 7 aa, synthetic construct
RGDFLNL

SEQ ID NO: 26397 - protein, 7 aa, synthetic construct
RGDFNGI

SEQ ID NO: 26398 - protein, 7 aa, synthetic construct
RGDAHIS

SEQ ID NO: 26399 - protein, 7 aa, synthetic construct
RGDFRID

SEQ ID NO: 26400 - protein, 7 aa, synthetic construct
RGDAHSN

SEQ ID NO: 26401 - protein, 7 aa, synthetic construct
RGDFVLQ

SEQ ID NO: 26402 - protein, 7 aa, synthetic construct
RGDGAVT

SEQ ID NO: 26403 - protein, 7 aa, synthetic construct
RGDGDGF

SEQ ID NO: 26404 - protein, 7 aa, synthetic construct
RGDGDLA

SEQ ID NO: 26405 - protein, 7 aa, synthetic construct
RGDGDNE

SEQ ID NO: 26406 - protein, 7 aa, synthetic construct
RGDGDNK

SEQ ID NO: 26407 - protein, 7 aa, synthetic construct
RGDAIEI

SEQ ID NO: 26408 - protein, 7 aa, synthetic construct
RGDAIFI

SEQ ID NO: 26409 - protein, 7 aa, synthetic construct
RGDGERR

SEQ ID NO: 26410 - protein, 7 aa, synthetic construct
RGDAIHF

SEQ ID NO: 26411 - protein, 7 aa, synthetic construct
RGDAIHH

SEQ ID NO: 26412 - protein, 7 aa, synthetic construct
RGDGFVG

SEQ ID NO: 26413 - protein, 7 aa, synthetic construct
RGDGGHD

SEQ ID NO: 26414 - protein, 7 aa, synthetic construct
RGDGHHN

SEQ ID NO: 26415 - protein, 7 aa, synthetic construct
RGDGISF

SEQ ID NO: 26416 - protein, 7 aa, synthetic construct
RGDAIRE

SEQ ID NO: 26417 - protein, 7 aa, synthetic construct
RGDGNDL

SEQ ID NO: 26418 - protein, 7 aa, synthetic construct
RGDAITQ

SEQ ID NO: 26419 - protein, 7 aa, synthetic construct
RGDGNTA

SEQ ID NO: 26420 - protein, 7 aa, synthetic construct
RGDGSDA

SEQ ID NO: 26421 - protein, 7 aa, synthetic construct
RGDGTSN

SEQ ID NO: 26422 - protein, 7 aa, synthetic construct
RGDGVGA

SEQ ID NO: 26423 - protein, 7 aa, synthetic construct
RGDGVQR

SEQ ID NO: 26424 - protein, 7 aa, synthetic construct
RGDHDLA

SEQ ID NO: 26425 - protein, 7 aa, synthetic construct
RGDHDSH

SEQ ID NO: 26426 - protein, 7 aa, synthetic construct
RGDHEFH

SEQ ID NO: 26427 - protein, 7 aa, synthetic construct
RGDHELT

SEQ ID NO: 26428 - protein, 7 aa, synthetic construct
RGDHGQK

SEQ ID NO: 26429 - protein, 7 aa, synthetic construct
RGDHHDA

SEQ ID NO: 26430 - protein, 7 aa, synthetic construct
RGDHHDI

SEQ ID NO: 26431 - protein, 7 aa, synthetic construct
RGDHINH

SEQ ID NO: 26432 - protein, 7 aa, synthetic construct
RGDHINR

SEQ ID NO: 26433 - protein, 7 aa, synthetic construct
RGDHIRF

SEQ ID NO: 26434 - protein, 7 aa, synthetic construct
RGDHKFA

SEQ ID NO: 26435 - protein, 7 aa, synthetic construct
RGDALGQ

SEQ ID NO: 26436 - protein, 7 aa, synthetic construct
RGDHLHK

SEQ ID NO: 26437 - protein, 7 aa, synthetic construct
RGDHLQK

SEQ ID NO: 26438 - protein, 7 aa, synthetic construct
RGDHQDH

SEQ ID NO: 26439 - protein, 7 aa, synthetic construct
RGDHQFS

SEQ ID NO: 26440 - protein, 7 aa, synthetic construct
RGDHRSE

SEQ ID NO: 26441 - protein, 7 aa, synthetic construct
RGDHTEF

SEQ ID NO: 26442 - protein, 7 aa, synthetic construct
RGDHVED

SEQ ID NO: 26443 - protein, 7 aa, synthetic construct
RGDHVLT

SEQ ID NO: 26444 - protein, 7 aa, synthetic construct
RGDIAAL

SEQ ID NO: 26445 - protein, 7 aa, synthetic construct
RGDIATQ

SEQ ID NO: 26446 - protein, 7 aa, synthetic construct
RGDIDGG

SEQ ID NO: 26447 - protein, 7 aa, synthetic construct
RGDIDIL

SEQ ID NO: 26448 - protein, 7 aa, synthetic construct
RGDIEGS

SEQ ID NO: 26449 - protein, 7 aa, synthetic construct
RGDIEHV

SEQ ID NO: 26450 - protein, 7 aa, synthetic construct
RGDIGIE

SEQ ID NO: 26451 - protein, 7 aa, synthetic construct
RGDIIGE

SEQ ID NO: 26452 - protein, 7 aa, synthetic construct
RGDIIHL

SEQ ID NO: 26453 - protein, 7 aa, synthetic construct
RGDIIQR

SEQ ID NO: 26454 - protein, 7 aa, synthetic construct
RGDIKDV

SEQ ID NO: 26455 - protein, 7 aa, synthetic construct
RGDIKLD

SEQ ID NO: 26456 - protein, 7 aa, synthetic construct
RGDILAL

SEQ ID NO: 26457 - protein, 7 aa, synthetic construct
RGDILDR

SEQ ID NO: 26458 - protein, 7 aa, synthetic construct
RGDINAS

SEQ ID NO: 26459 - protein, 7 aa, synthetic construct
RGDINGS

SEQ ID NO: 26460 - protein, 7 aa, synthetic construct
RGDINHN

SEQ ID NO: 26461 - protein, 7 aa, synthetic construct
RGDIQRD

SEQ ID NO: 26462 - protein, 7 aa, synthetic construct
RGDIQVN

SEQ ID NO: 26463 - protein, 7 aa, synthetic construct
RGDITFR

SEQ ID NO: 26464 - protein, 7 aa, synthetic construct
RGDIVAN

SEQ ID NO: 26465 - protein, 7 aa, synthetic construct
RGDIVEL

SEQ ID NO: 26466 - protein, 7 aa, synthetic construct
RGDIVFD

SEQ ID NO: 26467 - protein, 7 aa, synthetic construct
RGDIVVF

SEQ ID NO: 26468 - protein, 7 aa, synthetic construct
RGDAQLF

SEQ ID NO: 26469 - protein, 7 aa, synthetic construct
RGDKDGI

SEQ ID NO: 26470 - protein, 7 aa, synthetic construct
RGDKDNI

SEQ ID NO: 26471 - protein, 7 aa, synthetic construct
RGDKEEV

SEQ ID NO: 26472 - protein, 7 aa, synthetic construct
RGDKFHF

SEQ ID NO: 26473 - protein, 7 aa, synthetic construct
RGDKFIT

SEQ ID NO: 26474 - protein, 7 aa, synthetic construct
RGDKHEH

SEQ ID NO: 26475 - protein, 7 aa, synthetic construct
RGDKHLK

SEQ ID NO: 26476 - protein, 7 aa, synthetic construct
RGDKKVL

SEQ ID NO: 26477 - protein, 7 aa, synthetic construct
RGDKNVS

SEQ ID NO: 26478 - protein, 7 aa, synthetic construct
RGDKSIL

SEQ ID NO: 26479 - protein, 7 aa, synthetic construct
RGDKTKT

SEQ ID NO: 26480 - protein, 7 aa, synthetic construct
RGDKVDT

SEQ ID NO: 26481 - protein, 7 aa, synthetic construct
RGDKVNV

SEQ ID NO: 26482 - protein, 7 aa, synthetic construct
RGDLAKA

SEQ ID NO: 26483 - protein, 7 aa, synthetic construct
RGDLAKS

SEQ ID NO: 26484 - protein, 7 aa, synthetic construct
RGDLDFA

SEQ ID NO: 26485 - protein, 7 aa, synthetic construct
RGDLDLR

SEQ ID NO: 26486 - protein, 7 aa, synthetic construct
RGDLEAK

SEQ ID NO: 26487 - protein, 7 aa, synthetic construct
RGDLEDR

SEQ ID NO: 26488 - protein, 7 aa, synthetic construct
RGDLERK

SEQ ID NO: 26489 - protein, 7 aa, synthetic construct
RGDLEVG

SEQ ID NO: 26490 - protein, 7 aa, synthetic construct
RGDLFHF

SEQ ID NO: 26491 - protein, 7 aa, synthetic construct
RGDLFQS

SEQ ID NO: 26492 - protein, 7 aa, synthetic construct
RGDLFVT

SEQ ID NO: 26493 - protein, 7 aa, synthetic construct
RGDLGRG

SEQ ID NO: 26494 - protein, 7 aa, synthetic construct
RGDLHVR

SEQ ID NO: 26495 - protein, 7 aa, synthetic construct
RGDLIIG

SEQ ID NO: 26496 - protein, 7 aa, synthetic construct
RGDLKLF

SEQ ID NO: 26497 - protein, 7 aa, synthetic construct
RGDLNQR

SEQ ID NO: 26498 - protein, 7 aa, synthetic construct
RGDLQDD

SEQ ID NO: 26499 - protein, 7 aa, synthetic construct
RGDLQHG

SEQ ID NO: 26500 - protein, 7 aa, synthetic construct
RGDLRDQ

SEQ ID NO: 26501 - protein, 7 aa, synthetic construct
RGDLRRV

SEQ ID NO: 26502 - protein, 7 aa, synthetic construct
RGDLTND

SEQ ID NO: 26503 - protein, 7 aa, synthetic construct
RGDLVAG

SEQ ID NO: 26504 - protein, 7 aa, synthetic construct
RGDLVES

SEQ ID NO: 26505 - protein, 7 aa, synthetic construct
RGDNDFD

SEQ ID NO: 26506 - protein, 7 aa, synthetic construct
RGDNDLN

SEQ ID NO: 26507 - protein, 7 aa, synthetic construct
RGDNDQI

SEQ ID NO: 26508 - protein, 7 aa, synthetic construct
RGDNDTS

SEQ ID NO: 26509 - protein, 7 aa, synthetic construct
RGDNEFE

SEQ ID NO: 26510 - protein, 7 aa, synthetic construct
RGDNESS

SEQ ID NO: 26511 - protein, 7 aa, synthetic construct
RGDNETH

SEQ ID NO: 26512 - protein, 7 aa, synthetic construct
RGDNFDR

SEQ ID NO: 26513 - protein, 7 aa, synthetic construct
RGDNFKT

SEQ ID NO: 26514 - protein, 7 aa, synthetic construct
RGDATVH

SEQ ID NO: 26515 - protein, 7 aa, synthetic construct
RGDATVK

SEQ ID NO: 26516 - protein, 7 aa, synthetic construct
RGDNHFH

SEQ ID NO: 26517 - protein, 7 aa, synthetic construct
RGDNIHT

SEQ ID NO: 26518 - protein, 7 aa, synthetic construct
RGDNIQL

SEQ ID NO: 26519 - protein, 7 aa, synthetic construct
RGDNKHD

SEQ ID NO: 26520 - protein, 7 aa, synthetic construct
RGDNKIL

SEQ ID NO: 26521 - protein, 7 aa, synthetic construct
RGDAVHS

SEQ ID NO: 26522 - protein, 7 aa, synthetic construct
RGDNNGI

SEQ ID NO: 26523 - protein, 7 aa, synthetic construct
RGDNQHQ

SEQ ID NO: 26524 - protein, 7 aa, synthetic construct
RGDNTFT

SEQ ID NO: 26525 - protein, 7 aa, synthetic construct
RGDQDHN

SEQ ID NO: 26526 - protein, 7 aa, synthetic construct
RGDQDKT

SEQ ID NO: 26527 - protein, 7 aa, synthetic construct
RGDQEFN

SEQ ID NO: 26528 - protein, 7 aa, synthetic construct
RGDQETS

SEQ ID NO: 26529 - protein, 7 aa, synthetic construct
RGDQFTK

SEQ ID NO: 26530 - protein, 7 aa, synthetic construct
RGDQGFE

SEQ ID NO: 26531 - protein, 7 aa, synthetic construct
RGDQIFF

SEQ ID NO: 26532 - protein, 7 aa, synthetic construct
RGDQILV

SEQ ID NO: 26533 - protein, 7 aa, synthetic construct
RGDQIRE

SEQ ID NO: 26534 - protein, 7 aa, synthetic construct
RGDQKEG

SEQ ID NO: 26535 - protein, 7 aa, synthetic construct
RGDQKLA

SEQ ID NO: 26536 - protein, 7 aa, synthetic construct
RGDQKLF

SEQ ID NO: 26537 - protein, 7 aa, synthetic construct
RGDQLIT

SEQ ID NO: 26538 - protein, 7 aa, synthetic construct
RGDQNEK

SEQ ID NO: 26539 - protein, 7 aa, synthetic construct
RGDQNQD

SEQ ID NO: 26540 - protein, 7 aa, synthetic construct
RGDQQLF

SEQ ID NO: 26541 - protein, 7 aa, synthetic construct
RGDQSIE

SEQ ID NO: 26542 - protein, 7 aa, synthetic construct
RGDQTAA

SEQ ID NO: 26543 - protein, 7 aa, synthetic construct
RGDQTDG

SEQ ID NO: 26544 - protein, 7 aa, synthetic construct
RGDQTSS

SEQ ID NO: 26545 - protein, 7 aa, synthetic construct
RGDRAAD

SEQ ID NO: 26546 - protein, 7 aa, synthetic construct
RGDRASL

SEQ ID NO: 26547 - protein, 7 aa, synthetic construct
RGDRDGT

SEQ ID NO: 26548 - protein, 7 aa, synthetic construct
RGDADNV

SEQ ID NO: 26549 - protein, 7 aa, synthetic construct
RGDREDV

SEQ ID NO: 26550 - protein, 7 aa, synthetic construct
RGDDDSE

SEQ ID NO: 26551 - protein, 7 aa, synthetic construct
RGDRFED

SEQ ID NO: 26552 - protein, 7 aa, synthetic construct
RGDRGTD

SEQ ID NO: 26553 - protein, 7 aa, synthetic construct
RGDDEFH

SEQ ID NO: 26554 - protein, 7 aa, synthetic construct
RGDRQDS

SEQ ID NO: 26555 - protein, 7 aa, synthetic construct
RGDRQLG

SEQ ID NO: 26556 - protein, 7 aa, synthetic construct
RGDRTVG

SEQ ID NO: 26557 - protein, 7 aa, synthetic construct
RGDRVDK

SEQ ID NO: 26558 - protein, 7 aa, synthetic construct
RGDRVFD

SEQ ID NO: 26559 - protein, 7 aa, synthetic construct
RGDDETS

SEQ ID NO: 26560 - protein, 7 aa, synthetic construct
RGDSAHF

SEQ ID NO: 26561 - protein, 7 aa, synthetic construct
RGDSDHE

SEQ ID NO: 26562 - protein, 7 aa, synthetic construct
RGDSDTF

SEQ ID NO: 26563 - protein, 7 aa, synthetic construct
RGDDFHV

SEQ ID NO: 26564 - protein, 7 aa, synthetic construct
RGDSHQH

SEQ ID NO: 26565 - protein, 7 aa, synthetic construct
RGDSIDR

SEQ ID NO: 26566 - protein, 7 aa, synthetic construct
RGDSLDV

SEQ ID NO: 26567 - protein, 7 aa, synthetic construct
RGDSLQN

SEQ ID NO: 26568 - protein, 7 aa, synthetic construct
RGDSQLH

SEQ ID NO: 26569 - protein, 7 aa, synthetic construct
RGDSREF

SEQ ID NO: 26570 - protein, 7 aa, synthetic construct
RGDSSEF

SEQ ID NO: 26571 - protein, 7 aa, synthetic construct
RGDSSVA

SEQ ID NO: 26572 - protein, 7 aa, synthetic construct
RGDSTSG

SEQ ID NO: 26573 - protein, 7 aa, synthetic construct
RGDSTTN

SEQ ID NO: 26574 - protein, 7 aa, synthetic construct
RGDSVGN

SEQ ID NO: 26575 - protein, 7 aa, synthetic construct
RGDTDRK

SEQ ID NO: 26576 - protein, 7 aa, synthetic construct
RGDTEAK

SEQ ID NO: 26577 - protein, 7 aa, synthetic construct
RGDTETL

SEQ ID NO: 26578 - protein, 7 aa, synthetic construct
RGDTFNK

SEQ ID NO: 26579 - protein, 7 aa, synthetic construct
RGDDGTK

SEQ ID NO: 26580 - protein, 7 aa, synthetic construct
RGDTGKH

SEQ ID NO: 26581 - protein, 7 aa, synthetic construct
RGDTGKQ

SEQ ID NO: 26582 - protein, 7 aa, synthetic construct
RGDTHLS

SEQ ID NO: 26583 - protein, 7 aa, synthetic construct
RGDTHVT

SEQ ID NO: 26584 - protein, 7 aa, synthetic construct
RGDTIIK

SEQ ID NO: 26585 - protein, 7 aa, synthetic construct
RGDTLAQ

SEQ ID NO: 26586 - protein, 7 aa, synthetic construct
RGDTLTH

SEQ ID NO: 26587 - protein, 7 aa, synthetic construct
RGDTNLE

SEQ ID NO: 26588 - protein, 7 aa, synthetic construct
RGDTQGR

SEQ ID NO: 26589 - protein, 7 aa, synthetic construct
RGDTQGS

SEQ ID NO: 26590 - protein, 7 aa, synthetic construct
RGDTQKH

SEQ ID NO: 26591 - protein, 7 aa, synthetic construct
RGDTSAS

SEQ ID NO: 26592 - protein, 7 aa, synthetic construct
RGDTSEN

SEQ ID NO: 26593 - protein, 7 aa, synthetic construct
RGDTSNN

SEQ ID NO: 26594 - protein, 7 aa, synthetic construct
RGDTSQQ

SEQ ID NO: 26595 - protein, 7 aa, synthetic construct
RGDTSST

SEQ ID NO: 26596 - protein, 7 aa, synthetic construct
RGDTTTR

SEQ ID NO: 26597 - protein, 7 aa, synthetic construct
RGDTTVS

SEQ ID NO: 26598 - protein, 7 aa, synthetic construct
RGDTVEN

SEQ ID NO: 26599 - protein, 7 aa, synthetic construct
RGDTVSG

SEQ ID NO: 26600 - protein, 7 aa, synthetic construct
RGDVALH

SEQ ID NO: 26601 - protein, 7 aa, synthetic construct
RGDVATQ

SEQ ID NO: 26602 - protein, 7 aa, synthetic construct
RGDVDRV

SEQ ID NO: 26603 - protein, 7 aa, synthetic construct
RGDVDTA

SEQ ID NO: 26604 - protein, 7 aa, synthetic construct
RGDVENV

SEQ ID NO: 26605 - protein, 7 aa, synthetic construct
RGDVEQN

SEQ ID NO: 26606 - protein, 7 aa, synthetic construct
RGDDIGK

SEQ ID NO: 26607 - protein, 7 aa, synthetic construct
RGDVFIN

SEQ ID NO: 26608 - protein, 7 aa, synthetic construct
RGDVGHH

SEQ ID NO: 26609 - protein, 7 aa, synthetic construct
RGDDINT

SEQ ID NO: 26610 - protein, 7 aa, synthetic construct
RGDVKAD

SEQ ID NO: 26611 - protein, 7 aa, synthetic construct
RGDVLLQ

SEQ ID NO: 26612 - protein, 7 aa, synthetic construct
RGDVNDR

SEQ ID NO: 26613 - protein, 7 aa, synthetic construct
RGDVNGS

SEQ ID NO: 26614 - protein, 7 aa, synthetic construct
RGDVQDN

SEQ ID NO: 26615 - protein, 7 aa, synthetic construct
RGDVQND

SEQ ID NO: 26616 - protein, 7 aa, synthetic construct
RGDVQVN

SEQ ID NO: 26617 - protein, 7 aa, synthetic construct
RGDDKDK

SEQ ID NO: 26618 - protein, 7 aa, synthetic construct
RGDVSDT

SEQ ID NO: 26619 - protein, 7 aa, synthetic construct
RGDVSEF

SEQ ID NO: 26620 - protein, 7 aa, synthetic construct
RGDVSFH

SEQ ID NO: 26621 - protein, 7 aa, synthetic construct
RGDDKFT

SEQ ID NO: 26622 - protein, 7 aa, synthetic construct
RGDVTRE

SEQ ID NO: 26623 - protein, 7 aa, synthetic construct
RGDDKQI

SEQ ID NO: 26624 - protein, 7 aa, synthetic construct
RGDDLQH

SEQ ID NO: 26625 - protein, 7 aa, synthetic construct
RGDAEIA

SEQ ID NO: 26626 - protein, 7 aa, synthetic construct
RGDDNSR

SEQ ID NO: 26627 - protein, 7 aa, synthetic construct
RGDAEKT

SEQ ID NO: 26628 - protein, 7 aa, synthetic construct
RGDDRDT

SEQ ID NO: 26629 - protein, 7 aa, synthetic construct
RGDDSQQ

SEQ ID NO: 26630 - protein, 7 aa, synthetic construct
RGDAESV

SEQ ID NO: 26631 - protein, 7 aa, synthetic construct
RGDDTQI

SEQ ID NO: 26632 - protein, 7 aa, synthetic construct
RGDDVRF

SEQ ID NO: 26633 - protein, 7 aa, synthetic construct
RGDDVSE

SEQ ID NO: 26634 - protein, 7 aa, synthetic construct
RGDEEGD

SEQ ID NO: 26635 - protein, 7 aa, synthetic construct
RGDEENN

SEQ ID NO: 26636 - protein, 7 aa, synthetic construct
RGDEERK

SEQ ID NO: 26637 - protein, 7 aa, synthetic construct
RGDEGID

SEQ ID NO: 26638 - protein, 7 aa, synthetic construct
RGDEGKE

SEQ ID NO: 26639 - protein, 7 aa, synthetic construct
RGDEGQI

SEQ ID NO: 26640 - protein, 7 aa, synthetic construct
RGDEGTN

SEQ ID NO: 26641 - protein, 7 aa, synthetic construct
RGDEGVD

SEQ ID NO: 26642 - protein, 7 aa, synthetic construct
RGDAFNG

SEQ ID NO: 26643 - protein, 7 aa, synthetic construct
RGDEKDH

SEQ ID NO: 26644 - protein, 7 aa, synthetic construct
RGDEKFH

SEQ ID NO: 26645 - protein, 7 aa, synthetic construct
RGDELDK

SEQ ID NO: 26646 - protein, 7 aa, synthetic construct
RGDENDV

SEQ ID NO: 26647 - protein, 7 aa, synthetic construct
RGDENEA

SEQ ID NO: 26648 - protein, 7 aa, synthetic construct
RGDENRQ

SEQ ID NO: 26649 - protein, 7 aa, synthetic construct
RGDAFVR

SEQ ID NO: 26650 - protein, 7 aa, synthetic construct
RGDEQGN

SEQ ID NO: 26651 - protein, 7 aa, synthetic construct
RGDERTK

SEQ ID NO: 26652 - protein, 7 aa, synthetic construct
RGDESAF

SEQ ID NO: 26653 - protein, 7 aa, synthetic construct
RGDESHQ

SEQ ID NO: 26654 - protein, 7 aa, synthetic construct
RGDESKD

SEQ ID NO: 26655 - protein, 7 aa, synthetic construct
RGDESNR

SEQ ID NO: 26656 - protein, 7 aa, synthetic construct
RGDESRL

SEQ ID NO: 26657 - protein, 7 aa, synthetic construct
RGDETRA

SEQ ID NO: 26658 - protein, 7 aa, synthetic construct
RGDEVSD

SEQ ID NO: 26659 - protein, 7 aa, synthetic construct
RGDEVSI

SEQ ID NO: 26660 - protein, 7 aa, synthetic construct
RGDFADT

SEQ ID NO: 26661 - protein, 7 aa, synthetic construct
RGDFAFE

SEQ ID NO: 26662 - protein, 7 aa, synthetic construct
RGDFAIV

SEQ ID NO: 26663 - protein, 7 aa, synthetic construct
RGDAGLF

SEQ ID NO: 26664 - protein, 7 aa, synthetic construct
RGDFGES

SEQ ID NO: 26665 - protein, 7 aa, synthetic construct
RGDFHDH

SEQ ID NO: 26666 - protein, 7 aa, synthetic construct
RGDFHLS

SEQ ID NO: 26667 - protein, 7 aa, synthetic construct
RGDFIFV

SEQ ID NO: 26668 - protein, 7 aa, synthetic construct
RGDFIKS

SEQ ID NO: 26669 - protein, 7 aa, synthetic construct
RGDFKIS

SEQ ID NO: 26670 - protein, 7 aa, synthetic construct
RGDFLDS

SEQ ID NO: 26671 - protein, 7 aa, synthetic construct
RGDFLLQ

SEQ ID NO: 26672 - protein, 7 aa, synthetic construct
RGDFQAE

SEQ ID NO: 26673 - protein, 7 aa, synthetic construct
RGDAHQF

SEQ ID NO: 26674 - protein, 7 aa, synthetic construct
RGDFTEK

SEQ ID NO: 26675 - protein, 7 aa, synthetic construct
RGDAANA

SEQ ID NO: 26676 - protein, 7 aa, synthetic construct
RGDGAIT

SEQ ID NO: 26677 - protein, 7 aa, synthetic construct
RGDGDAQ

SEQ ID NO: 26678 - protein, 7 aa, synthetic construct
RGDGDHR

SEQ ID NO: 26679 - protein, 7 aa, synthetic construct
RGDGDKV

SEQ ID NO: 26680 - protein, 7 aa, synthetic construct
RGDGDQI

SEQ ID NO: 26681 - protein, 7 aa, synthetic construct
RGDGDRF

SEQ ID NO: 26682 - protein, 7 aa, synthetic construct
RGDGEDN

SEQ ID NO: 26683 - protein, 7 aa, synthetic construct
RGDAIGR

SEQ ID NO: 26684 - protein, 7 aa, synthetic construct
RGDAINE

SEQ ID NO: 26685 - protein, 7 aa, synthetic construct
RGDGKER

SEQ ID NO: 26686 - protein, 7 aa, synthetic construct
RGDGLNT

SEQ ID NO: 26687 - protein, 7 aa, synthetic construct
RGDGNTH

SEQ ID NO: 26688 - protein, 7 aa, synthetic construct
RGDGQIT

SEQ ID NO: 26689 - protein, 7 aa, synthetic construct
RGDGQNG

SEQ ID NO: 26690 - protein, 7 aa, synthetic construct
RGDGQTR

SEQ ID NO: 26691 - protein, 7 aa, synthetic construct
RGDGSFG

SEQ ID NO: 26692 - protein, 7 aa, synthetic construct
RGDGTTN

SEQ ID NO: 26693 - protein, 7 aa, synthetic construct
RGDGVNS

SEQ ID NO: 26694 - protein, 7 aa, synthetic construct
RGDHAIH

SEQ ID NO: 26695 - protein, 7 aa, synthetic construct
RGDHANH

SEQ ID NO: 26696 - protein, 7 aa, synthetic construct
RGDHDKQ

SEQ ID NO: 26697 - protein, 7 aa, synthetic construct
RGDHDLN

SEQ ID NO: 26698 - protein, 7 aa, synthetic construct
RGDAKQE

SEQ ID NO: 26699 - protein, 7 aa, synthetic construct
RGDHEIK

SEQ ID NO: 26700 - protein, 7 aa, synthetic construct
RGDHFNV

SEQ ID NO: 26701 - protein, 7 aa, synthetic construct
RGDAKVQ

SEQ ID NO: 26702 - protein, 7 aa, synthetic construct
RGDHHIL

SEQ ID NO: 26703 - protein, 7 aa, synthetic construct
RGDHINI

SEQ ID NO: 26704 - protein, 7 aa, synthetic construct
RGDHKVV

SEQ ID NO: 26705 - protein, 7 aa, synthetic construct
RGDHLDG

SEQ ID NO: 26706 - protein, 7 aa, synthetic construct
RGDHLEE

SEQ ID NO: 26707 - protein, 7 aa, synthetic construct
RGDHLHT

SEQ ID NO: 26708 - protein, 7 aa, synthetic construct
RGDHLVI

SEQ ID NO: 26709 - protein, 7 aa, synthetic construct
RGDHNGV

SEQ ID NO: 26710 - protein, 7 aa, synthetic construct
RGDHNVQ

SEQ ID NO: 26711 - protein, 7 aa, synthetic construct
RGDHQSA

SEQ ID NO: 26712 - protein, 7 aa, synthetic construct
RGDHRFA

SEQ ID NO: 26713 - protein, 7 aa, synthetic construct
RGDHRRH

SEQ ID NO: 26714 - protein, 7 aa, synthetic construct
RGDHSNE

SEQ ID NO: 26715 - protein, 7 aa, synthetic construct
RGDHTDI

SEQ ID NO: 26716 - protein, 7 aa, synthetic construct
RGDHTNA

SEQ ID NO: 26717 - protein, 7 aa, synthetic construct
RGDHTNN

SEQ ID NO: 26718 - protein, 7 aa, synthetic construct
RGDHVAT

SEQ ID NO: 26719 - protein, 7 aa, synthetic construct
RGDALTQ

SEQ ID NO: 26720 - protein, 7 aa, synthetic construct
RGDHVFR

SEQ ID NO: 26721 - protein, 7 aa, synthetic construct
RGDHVHN

SEQ ID NO: 26722 - protein, 7 aa, synthetic construct
RGDIAFH

SEQ ID NO: 26723 - protein, 7 aa, synthetic construct
RGDIAGA

SEQ ID NO: 26724 - protein, 7 aa, synthetic construct
RGDIAIE

SEQ ID NO: 26725 - protein, 7 aa, synthetic construct
RGDIATL

SEQ ID NO: 26726 - protein, 7 aa, synthetic construct
RGDIDQQ

SEQ ID NO: 26727 - protein, 7 aa, synthetic construct
RGDIEFN

SEQ ID NO: 26728 - protein, 7 aa, synthetic construct
RGDIEQI

SEQ ID NO: 26729 - protein, 7 aa, synthetic construct
RGDIETV

SEQ ID NO: 26730 - protein, 7 aa, synthetic construct
RGDIIGH

SEQ ID NO: 26731 - protein, 7 aa, synthetic construct
RGDIIGN

SEQ ID NO: 26732 - protein, 7 aa, synthetic construct
RGDIIND

SEQ ID NO: 26733 - protein, 7 aa, synthetic construct
RGDIISV

SEQ ID NO: 26734 - protein, 7 aa, synthetic construct
RGDIKQE

SEQ ID NO: 26735 - protein, 7 aa, synthetic construct
RGDILEK

SEQ ID NO: 26736 - protein, 7 aa, synthetic construct
RGDANSV

SEQ ID NO: 26737 - protein, 7 aa, synthetic construct
RGDILSH

SEQ ID NO: 26738 - protein, 7 aa, synthetic construct
RGDIQVG

SEQ ID NO: 26739 - protein, 7 aa, synthetic construct
RGDIRER

SEQ ID NO: 26740 - protein, 7 aa, synthetic construct
RGDAQDV

SEQ ID NO: 26741 - protein, 7 aa, synthetic construct
RGDIRHG

SEQ ID NO: 26742 - protein, 7 aa, synthetic construct
RGDIRVE

SEQ ID NO: 26743 - protein, 7 aa, synthetic construct
RGDAQGI

SEQ ID NO: 26744 - protein, 7 aa, synthetic construct
RGDKAIH

SEQ ID NO: 26745 - protein, 7 aa, synthetic construct
RGDKALN

SEQ ID NO: 26746 - protein, 7 aa, synthetic construct
RGDKEAL

SEQ ID NO: 26747 - protein, 7 aa, synthetic construct
RGDKEGT

SEQ ID NO: 26748 - protein, 7 aa, synthetic construct
RGDKEGV

SEQ ID NO: 26749 - protein, 7 aa, synthetic construct
RGDKEHF

SEQ ID NO: 26750 - protein, 7 aa, synthetic construct
RGDKEKQ

SEQ ID NO: 26751 - protein, 7 aa, synthetic construct
RGDKFIL

SEQ ID NO: 26752 - protein, 7 aa, synthetic construct
RGDKGLS

SEQ ID NO: 26753 - protein, 7 aa, synthetic construct
RGDAQVK

SEQ ID NO: 26754 - protein, 7 aa, synthetic construct
RGDKHDV

SEQ ID NO: 26755 - protein, 7 aa, synthetic construct
RGDKKKQ

SEQ ID NO: 26756 - protein, 7 aa, synthetic construct
RGDKNNQ

SEQ ID NO: 26757 - protein, 7 aa, synthetic construct
RGDKVER

SEQ ID NO: 26758 - protein, 7 aa, synthetic construct
RGDKVFE

SEQ ID NO: 26759 - protein, 7 aa, synthetic construct
RGDKVFG

SEQ ID NO: 26760 - protein, 7 aa, synthetic construct
RGDLATH

SEQ ID NO: 26761 - protein, 7 aa, synthetic construct
RGDLDDH

SEQ ID NO: 26762 - protein, 7 aa, synthetic construct
RGDLDQN

SEQ ID NO: 26763 - protein, 7 aa, synthetic construct
RGDLDTA

SEQ ID NO: 26764 - protein, 7 aa, synthetic construct
RGDLEAI

SEQ ID NO: 26765 - protein, 7 aa, synthetic construct
RGDLERL

SEQ ID NO: 26766 - protein, 7 aa, synthetic construct
RGDLFID

SEQ ID NO: 26767 - protein, 7 aa, synthetic construct
RGDLGIE

SEQ ID NO: 26768 - protein, 7 aa, synthetic construct
RGDLGQE

SEQ ID NO: 26769 - protein, 7 aa, synthetic construct
RGDLHFD

SEQ ID NO: 26770 - protein, 7 aa, synthetic construct
RGDLISL

SEQ ID NO: 26771 - protein, 7 aa, synthetic construct
RGDLITV

SEQ ID NO: 26772 - protein, 7 aa, synthetic construct
RGDLKGG

SEQ ID NO: 26773 - protein, 7 aa, synthetic construct
RGDLLLK

SEQ ID NO: 26774 - protein, 7 aa, synthetic construct
RGDLNFQ

SEQ ID NO: 26775 - protein, 7 aa, synthetic construct
RGDLNGI

SEQ ID NO: 26776 - protein, 7 aa, synthetic construct
RGDLNSF

SEQ ID NO: 26777 - protein, 7 aa, synthetic construct
RGDLQHA

SEQ ID NO: 26778 - protein, 7 aa, synthetic construct
RGDLSFR

SEQ ID NO: 26779 - protein, 7 aa, synthetic construct
RGDLSGE

SEQ ID NO: 26780 - protein, 7 aa, synthetic construct
RGDLSKL

SEQ ID NO: 26781 - protein, 7 aa, synthetic construct
RGDLTAK

SEQ ID NO: 26782 - protein, 7 aa, synthetic construct
RGDATGS

SEQ ID NO: 26783 - protein, 7 aa, synthetic construct
RGDLTIK

SEQ ID NO: 26784 - protein, 7 aa, synthetic construct
RGDNADS

SEQ ID NO: 26785 - protein, 7 aa, synthetic construct
RGDNAFH

SEQ ID NO: 26786 - protein, 7 aa, synthetic construct
RGDNALE

SEQ ID NO: 26787 - protein, 7 aa, synthetic construct
RGDNASQ

SEQ ID NO: 26788 - protein, 7 aa, synthetic construct
RGDNDHS

SEQ ID NO: 26789 - protein, 7 aa, synthetic construct
RGDNDRR

SEQ ID NO: 26790 - protein, 7 aa, synthetic construct
RGDNEHH

SEQ ID NO: 26791 - protein, 7 aa, synthetic construct
RGDNEII

SEQ ID NO: 26792 - protein, 7 aa, synthetic construct
RGDNESF

SEQ ID NO: 26793 - protein, 7 aa, synthetic construct
RGDNGHI

SEQ ID NO: 26794 - protein, 7 aa, synthetic construct
RGDNGVE

SEQ ID NO: 26795 - protein, 7 aa, synthetic construct
RGDNHES

SEQ ID NO: 26796 - protein, 7 aa, synthetic construct
RGDNHSA

SEQ ID NO: 26797 - protein, 7 aa, synthetic construct
RGDNIQF

SEQ ID NO: 26798 - protein, 7 aa, synthetic construct
RGDNIST

SEQ ID NO: 26799 - protein, 7 aa, synthetic construct
RGDNITS

SEQ ID NO: 26800 - protein, 7 aa, synthetic construct
RGDNKAA

SEQ ID NO: 26801 - protein, 7 aa, synthetic construct
RGDNLEQ

SEQ ID NO: 26802 - protein, 7 aa, synthetic construct
RGDNLQQ

SEQ ID NO: 26803 - protein, 7 aa, synthetic construct
RGDNNHS

SEQ ID NO: 26804 - protein, 7 aa, synthetic construct
RGDNNKG

SEQ ID NO: 26805 - protein, 7 aa, synthetic construct
RGDNQET

SEQ ID NO: 26806 - protein, 7 aa, synthetic construct
RGDNQTT

SEQ ID NO: 26807 - protein, 7 aa, synthetic construct
RGDNSIQ

SEQ ID NO: 26808 - protein, 7 aa, synthetic construct
RGDNSLK

SEQ ID NO: 26809 - protein, 7 aa, synthetic construct
RGDNSSE

SEQ ID NO: 26810 - protein, 7 aa, synthetic construct
RGDNTIA

SEQ ID NO: 26811 - protein, 7 aa, synthetic construct
RGDNVED

SEQ ID NO: 26812 - protein, 7 aa, synthetic construct
RGDNVQF

SEQ ID NO: 26813 - protein, 7 aa, synthetic construct
RGDAVVQ

SEQ ID NO: 26814 - protein, 7 aa, synthetic construct
RGDNVSV

SEQ ID NO: 26815 - protein, 7 aa, synthetic construct
RGDQAAT

SEQ ID NO: 26816 - protein, 7 aa, synthetic construct
RGDQALN

SEQ ID NO: 26817 - protein, 7 aa, synthetic construct
RGDQDSG

SEQ ID NO: 26818 - protein, 7 aa, synthetic construct
RGDQDVT

SEQ ID NO: 26819 - protein, 7 aa, synthetic construct
RGDQEHH

SEQ ID NO: 26820 - protein, 7 aa, synthetic construct
RGDQESG

SEQ ID NO: 26821 - protein, 7 aa, synthetic construct
RGDQEVK

SEQ ID NO: 26822 - protein, 7 aa, synthetic construct
RGDQFKE

SEQ ID NO: 26823 - protein, 7 aa, synthetic construct
RGDQGRD

SEQ ID NO: 26824 - protein, 7 aa, synthetic construct
RGDQGSS

SEQ ID NO: 26825 - protein, 7 aa, synthetic construct
RGDQHFE

SEQ ID NO: 26826 - protein, 7 aa, synthetic construct
RGDQHSE

SEQ ID NO: 26827 - protein, 7 aa, synthetic construct
RGDQHVF

SEQ ID NO: 26828 - protein, 7 aa, synthetic construct
RGDQIAN

SEQ ID NO: 26829 - protein, 7 aa, synthetic construct
RGDQIDA

SEQ ID NO: 26830 - protein, 7 aa, synthetic construct
RGDADLI

SEQ ID NO: 26831 - protein, 7 aa, synthetic construct
RGDQIIT

SEQ ID NO: 26832 - protein, 7 aa, synthetic construct
RGDQLSH

SEQ ID NO: 26833 - protein, 7 aa, synthetic construct
RGDQRHS

SEQ ID NO: 26834 - protein, 7 aa, synthetic construct
RGDQTNE

SEQ ID NO: 26835 - protein, 7 aa, synthetic construct
RGDRARH

SEQ ID NO: 26836 - protein, 7 aa, synthetic construct
RGDREVS

SEQ ID NO: 26837 - protein, 7 aa, synthetic construct
RGDRFKQ

SEQ ID NO: 26838 - protein, 7 aa, synthetic construct
RGDRFTN

SEQ ID NO: 26839 - protein, 7 aa, synthetic construct
RGDDEDT

SEQ ID NO: 26840 - protein, 7 aa, synthetic construct
RGDRLDV

SEQ ID NO: 26841 - protein, 7 aa, synthetic construct
RGDDEIR

SEQ ID NO: 26842 - protein, 7 aa, synthetic construct
RGDRSRN

SEQ ID NO: 26843 - protein, 7 aa, synthetic construct
RGDRVFE

SEQ ID NO: 26844 - protein, 7 aa, synthetic construct
RGDRVNR

SEQ ID NO: 26845 - protein, 7 aa, synthetic construct
RGDSAHD

SEQ ID NO: 26846 - protein, 7 aa, synthetic construct
RGDSANQ

SEQ ID NO: 26847 - protein, 7 aa, synthetic construct
RGDSASA

SEQ ID NO: 26848 - protein, 7 aa, synthetic construct
RGDSASN

SEQ ID NO: 26849 - protein, 7 aa, synthetic construct
RGDSAVE

SEQ ID NO: 26850 - protein, 7 aa, synthetic construct
RGDSDGK

SEQ ID NO: 26851 - protein, 7 aa, synthetic construct
RGDSDQE

SEQ ID NO: 26852 - protein, 7 aa, synthetic construct
RGDSDVS

SEQ ID NO: 26853 - protein, 7 aa, synthetic construct
RGDSEIA

SEQ ID NO: 26854 - protein, 7 aa, synthetic construct
RGDSESI

SEQ ID NO: 26855 - protein, 7 aa, synthetic construct
RGDSFED

SEQ ID NO: 26856 - protein, 7 aa, synthetic construct
RGDSFTF

SEQ ID NO: 26857 - protein, 7 aa, synthetic construct
RGDSGDR

SEQ ID NO: 26858 - protein, 7 aa, synthetic construct
RGDSGHN

SEQ ID NO: 26859 - protein, 7 aa, synthetic construct
RGDSGTD

SEQ ID NO: 26860 - protein, 7 aa, synthetic construct
RGDSHVT

SEQ ID NO: 26861 - protein, 7 aa, synthetic construct
RGDSIQE

SEQ ID NO: 26862 - protein, 7 aa, synthetic construct
RGDDFQH

SEQ ID NO: 26863 - protein, 7 aa, synthetic construct
RGDSLTD

SEQ ID NO: 26864 - protein, 7 aa, synthetic construct
RGDSNDN

SEQ ID NO: 26865 - protein, 7 aa, synthetic construct
RGDSNTA

SEQ ID NO: 26866 - protein, 7 aa, synthetic construct
RGDSNTT

SEQ ID NO: 26867 - protein, 7 aa, synthetic construct
RGDSSEG

SEQ ID NO: 26868 - protein, 7 aa, synthetic construct
RGDDGGG

SEQ ID NO: 26869 - protein, 7 aa, synthetic construct
RGDSTAV

SEQ ID NO: 26870 - protein, 7 aa, synthetic construct
RGDSTHF

SEQ ID NO: 26871 - protein, 7 aa, synthetic construct
RGDDGIN

SEQ ID NO: 26872 - protein, 7 aa, synthetic construct
RGDSVRA

SEQ ID NO: 26873 - protein, 7 aa, synthetic construct
RGDDGKN

SEQ ID NO: 26874 - protein, 7 aa, synthetic construct
RGDTARS

SEQ ID NO: 26875 - protein, 7 aa, synthetic construct
RGDTDVA

SEQ ID NO: 26876 - protein, 7 aa, synthetic construct
RGDTERH

SEQ ID NO: 26877 - protein, 7 aa, synthetic construct
RGDTGTL

SEQ ID NO: 26878 - protein, 7 aa, synthetic construct
RGDTHKE

SEQ ID NO: 26879 - protein, 7 aa, synthetic construct
RGDTIHR

SEQ ID NO: 26880 - protein, 7 aa, synthetic construct
RGDTLHN

SEQ ID NO: 26881 - protein, 7 aa, synthetic construct
RGDTNSI

SEQ ID NO: 26882 - protein, 7 aa, synthetic construct
RGDTNVV

SEQ ID NO: 26883 - protein, 7 aa, synthetic construct
RGDTQEV

SEQ ID NO: 26884 - protein, 7 aa, synthetic construct
RGDTQFA

SEQ ID NO: 26885 - protein, 7 aa, synthetic construct
RGDTSGA

SEQ ID NO: 26886 - protein, 7 aa, synthetic construct
RGDTSIN

SEQ ID NO: 26887 - protein, 7 aa, synthetic construct
RGDTSIQ

SEQ ID NO: 26888 - protein, 7 aa, synthetic construct
RGDTSQS

SEQ ID NO: 26889 - protein, 7 aa, synthetic construct
RGDTSRN

SEQ ID NO: 26890 - protein, 7 aa, synthetic construct
RGDDHRR

SEQ ID NO: 26891 - protein, 7 aa, synthetic construct
RGDTVRG

SEQ ID NO: 26892 - protein, 7 aa, synthetic construct
RGDVAII

SEQ ID NO: 26893 - protein, 7 aa, synthetic construct
RGDVDGN

SEQ ID NO: 26894 - protein, 7 aa, synthetic construct
RGDVDVE

SEQ ID NO: 26895 - protein, 7 aa, synthetic construct
RGDDIFF

SEQ ID NO: 26896 - protein, 7 aa, synthetic construct
RGDVEEQ

SEQ ID NO: 26897 - protein, 7 aa, synthetic construct
RGDVEII

SEQ ID NO: 26898 - protein, 7 aa, synthetic construct
RGDVEQH

SEQ ID NO: 26899 - protein, 7 aa, synthetic construct
RGDDIGI

SEQ ID NO: 26900 - protein, 7 aa, synthetic construct
RGDVFFI

SEQ ID NO: 26901 - protein, 7 aa, synthetic construct
RGDVFIH

SEQ ID NO: 26902 - protein, 7 aa, synthetic construct
RGDVFIQ

SEQ ID NO: 26903 - protein, 7 aa, synthetic construct
RGDVGAS

SEQ ID NO: 26904 - protein, 7 aa, synthetic construct
RGDVGHT

SEQ ID NO: 26905 - protein, 7 aa, synthetic construct
RGDVGSI

SEQ ID NO: 26906 - protein, 7 aa, synthetic construct
RGDVGTV

SEQ ID NO: 26907 - protein, 7 aa, synthetic construct
RGDVGVI

SEQ ID NO: 26908 - protein, 7 aa, synthetic construct
RGDVHEI

SEQ ID NO: 26909 - protein, 7 aa, synthetic construct
RGDVIKG

SEQ ID NO: 26910 - protein, 7 aa, synthetic construct
RGDVKES

SEQ ID NO: 26911 - protein, 7 aa, synthetic construct
RGDVLDK

SEQ ID NO: 26912 - protein, 7 aa, synthetic construct
RGDDISE

SEQ ID NO: 26913 - protein, 7 aa, synthetic construct
RGDVLQE

SEQ ID NO: 26914 - protein, 7 aa, synthetic construct
RGDVNDH

SEQ ID NO: 26915 - protein, 7 aa, synthetic construct
RGDDITS

SEQ ID NO: 26916 - protein, 7 aa, synthetic construct
RGDVNQQ

SEQ ID NO: 26917 - protein, 7 aa, synthetic construct
RGDDKDH

SEQ ID NO: 26918 - protein, 7 aa, synthetic construct
RGDVRLD

SEQ ID NO: 26919 - protein, 7 aa, synthetic construct
RGDVRLR

SEQ ID NO: 26920 - protein, 7 aa, synthetic construct
RGDVRTD

SEQ ID NO: 26921 - protein, 7 aa, synthetic construct
RGDVSAN

SEQ ID NO: 26922 - protein, 7 aa, synthetic construct
RGDVTDS

SEQ ID NO: 26923 - protein, 7 aa, synthetic construct
RGDVVAT

SEQ ID NO: 26924 - protein, 7 aa, synthetic construct
RGDVVFD

SEQ ID NO: 26925 - protein, 7 aa, synthetic construct
RGDDKTH

SEQ ID NO: 26926 - protein, 7 aa, synthetic construct
RGDDLHQ

SEQ ID NO: 26927 - protein, 7 aa, synthetic construct
RGDDLNH

SEQ ID NO: 26928 - protein, 7 aa, synthetic construct
RGDDLTI

SEQ ID NO: 26929 - protein, 7 aa, synthetic construct
RGDDLVT

SEQ ID NO: 26930 - protein, 7 aa, synthetic construct
RGDAELH

SEQ ID NO: 26931 - protein, 7 aa, synthetic construct
RGDDQSE

SEQ ID NO: 26932 - protein, 7 aa, synthetic construct
RGDDQTS

SEQ ID NO: 26933 - protein, 7 aa, synthetic construct
RGDDRRE

SEQ ID NO: 26934 - protein, 7 aa, synthetic construct
RGDDSHR

SEQ ID NO: 26935 - protein, 7 aa, synthetic construct
RGDDSNS

SEQ ID NO: 26936 - protein, 7 aa, synthetic construct
RGDDSTG

SEQ ID NO: 26937 - protein, 7 aa, synthetic construct
RGDDTSF

SEQ ID NO: 26938 - protein, 7 aa, synthetic construct
RGDAETT

SEQ ID NO: 26939 - protein, 7 aa, synthetic construct
RGDDVVF

SEQ ID NO: 26940 - protein, 7 aa, synthetic construct
RGDEDRR

SEQ ID NO: 26941 - protein, 7 aa, synthetic construct
RGDEEGR

SEQ ID NO: 26942 - protein, 7 aa, synthetic construct
RGDEGFH

SEQ ID NO: 26943 - protein, 7 aa, synthetic construct
RGDEHDT

SEQ ID NO: 26944 - protein, 7 aa, synthetic construct
RGDEHTR

SEQ ID NO: 26945 - protein, 7 aa, synthetic construct
RGDEHVL

SEQ ID NO: 26946 - protein, 7 aa, synthetic construct
RGDEITH

SEQ ID NO: 26947 - protein, 7 aa, synthetic construct
RGDELDQ

SEQ ID NO: 26948 - protein, 7 aa, synthetic construct
RGDAFSR

SEQ ID NO: 26949 - protein, 7 aa, synthetic construct
RGDENQR

SEQ ID NO: 26950 - protein, 7 aa, synthetic construct
RGDEQKN

SEQ ID NO: 26951 - protein, 7 aa, synthetic construct
RGDERLI

SEQ ID NO: 26952 - protein, 7 aa, synthetic construct
RGDESES

SEQ ID NO: 26953 - protein, 7 aa, synthetic construct
RGDESIL

SEQ ID NO: 26954 - protein, 7 aa, synthetic construct
RGDESSQ

SEQ ID NO: 26955 - protein, 7 aa, synthetic construct
RGDETLH

SEQ ID NO: 26956 - protein, 7 aa, synthetic construct
RGDEVER

SEQ ID NO: 26957 - protein, 7 aa, synthetic construct
RGDEVKS

SEQ ID NO: 26958 - protein, 7 aa, synthetic construct
RGDEVKT

SEQ ID NO: 26959 - protein, 7 aa, synthetic construct
RGDFAHH

SEQ ID NO: 26960 - protein, 7 aa, synthetic construct
RGDFALH

SEQ ID NO: 26961 - protein, 7 aa, synthetic construct
RGDFANI

SEQ ID NO: 26962 - protein, 7 aa, synthetic construct
RGDFDLH

SEQ ID NO: 26963 - protein, 7 aa, synthetic construct
RGDAGTF

SEQ ID NO: 26964 - protein, 7 aa, synthetic construct
RGDFHDI

SEQ ID NO: 26965 - protein, 7 aa, synthetic construct
RGDFHLT

SEQ ID NO: 26966 - protein, 7 aa, synthetic construct
RGDFHRF

SEQ ID NO: 26967 - protein, 7 aa, synthetic construct
RGDAHDH

SEQ ID NO: 26968 - protein, 7 aa, synthetic construct
RGDFIVA

SEQ ID NO: 26969 - protein, 7 aa, synthetic construct
RGDFKVL

SEQ ID NO: 26970 - protein, 7 aa, synthetic construct
RGDFLHL

SEQ ID NO: 26971 - protein, 7 aa, synthetic construct
RGDFLHR

SEQ ID NO: 26972 - protein, 7 aa, synthetic construct
RGDFNDH

SEQ ID NO: 26973 - protein, 7 aa, synthetic construct
RGDFNEH

SEQ ID NO: 26974 - protein, 7 aa, synthetic construct
RGDFNIL

SEQ ID NO: 26975 - protein, 7 aa, synthetic construct
RGDFNNE

SEQ ID NO: 26976 - protein, 7 aa, synthetic construct
RGDFNVK

SEQ ID NO: 26977 - protein, 7 aa, synthetic construct
RGDFNVN

SEQ ID NO: 26978 - protein, 7 aa, synthetic construct
RGDFQAF

SEQ ID NO: 26979 - protein, 7 aa, synthetic construct
RGDAHKS

SEQ ID NO: 26980 - protein, 7 aa, synthetic construct
RGDFQID

SEQ ID NO: 26981 - protein, 7 aa, synthetic construct
RGDFQNS

SEQ ID NO: 26982 - protein, 7 aa, synthetic construct
RGDFQTD

SEQ ID NO: 26983 - protein, 7 aa, synthetic construct
RGDFTAQ

SEQ ID NO: 26984 - protein, 7 aa, synthetic construct
RGDGAHH

SEQ ID NO: 26985 - protein, 7 aa, synthetic construct
RGDGDAS

SEQ ID NO: 26986 - protein, 7 aa, synthetic construct
RGDGEGK

SEQ ID NO: 26987 - protein, 7 aa, synthetic construct
RGDGEIL

SEQ ID NO: 26988 - protein, 7 aa, synthetic construct
RGDGEVL

SEQ ID NO: 26989 - protein, 7 aa, synthetic construct
RGDGFTV

SEQ ID NO: 26990 - protein, 7 aa, synthetic construct
RGDGGAQ

SEQ ID NO: 26991 - protein, 7 aa, synthetic construct
RGDGGED

SEQ ID NO: 26992 - protein, 7 aa, synthetic construct
RGDGHIF

SEQ ID NO: 26993 - protein, 7 aa, synthetic construct
RGDGIHG

SEQ ID NO: 26994 - protein, 7 aa, synthetic construct
RGDGLFT

SEQ ID NO: 26995 - protein, 7 aa, synthetic construct
RGDGQGR

SEQ ID NO: 26996 - protein, 7 aa, synthetic construct
RGDGQGS

SEQ ID NO: 26997 - protein, 7 aa, synthetic construct
RGDGRAH

SEQ ID NO: 26998 - protein, 7 aa, synthetic construct
RGDAKEL

SEQ ID NO: 26999 - protein, 7 aa, synthetic construct
RGDGSIL

SEQ ID NO: 27000 - protein, 7 aa, synthetic construct
RGDGSVS

SEQ ID NO: 27001 - protein, 7 aa, synthetic construct
RGDGVEF

SEQ ID NO: 27002 - protein, 7 aa, synthetic construct
RGDGVLR

SEQ ID NO: 27003 - protein, 7 aa, synthetic construct
RGDGVVS

SEQ ID NO: 27004 - protein, 7 aa, synthetic construct
RGDHEDR

SEQ ID NO: 27005 - protein, 7 aa, synthetic construct
RGDHEKA

SEQ ID NO: 27006 - protein, 7 aa, synthetic construct
RGDHENE

SEQ ID NO: 27007 - protein, 7 aa, synthetic construct
RGDHEVN

SEQ ID NO: 27008 - protein, 7 aa, synthetic construct
RGDAKSA

SEQ ID NO: 27009 - protein, 7 aa, synthetic construct
RGDHFEH

SEQ ID NO: 27010 - protein, 7 aa, synthetic construct
RGDHFKH

SEQ ID NO: 27011 - protein, 7 aa, synthetic construct
RGDAKVA

SEQ ID NO: 27012 - protein, 7 aa, synthetic construct
RGDHIHE

SEQ ID NO: 27013 - protein, 7 aa, synthetic construct
RGDHINA

SEQ ID NO: 27014 - protein, 7 aa, synthetic construct
RGDHQIL

SEQ ID NO: 27015 - protein, 7 aa, synthetic construct
RGDHRIT

SEQ ID NO: 27016 - protein, 7 aa, synthetic construct
RGDHRSD

SEQ ID NO: 27017 - protein, 7 aa, synthetic construct
RGDHTAN

SEQ ID NO: 27018 - protein, 7 aa, synthetic construct
RGDHTDG

SEQ ID NO: 27019 - protein, 7 aa, synthetic construct
RGDHTNG

SEQ ID NO: 27020 - protein, 7 aa, synthetic construct
RGDIANF

SEQ ID NO: 27021 - protein, 7 aa, synthetic construct
RGDANAT

SEQ ID NO: 27022 - protein, 7 aa, synthetic construct
RGDIATH

SEQ ID NO: 27023 - protein, 7 aa, synthetic construct
RGDIDAN

SEQ ID NO: 27024 - protein, 7 aa, synthetic construct
RGDIENG

SEQ ID NO: 27025 - protein, 7 aa, synthetic construct
RGDIFHR

SEQ ID NO: 27026 - protein, 7 aa, synthetic construct
RGDIFTF

SEQ ID NO: 27027 - protein, 7 aa, synthetic construct
RGDIGVG

SEQ ID NO: 27028 - protein, 7 aa, synthetic construct
RGDIISF

SEQ ID NO: 27029 - protein, 7 aa, synthetic construct
RGDIKQS

SEQ ID NO: 27030 - protein, 7 aa, synthetic construct
RGDILHD

SEQ ID NO: 27031 - protein, 7 aa, synthetic construct
RGDILLT

SEQ ID NO: 27032 - protein, 7 aa, synthetic construct
RGDILQL

SEQ ID NO: 27033 - protein, 7 aa, synthetic construct
RGDINEF

SEQ ID NO: 27034 - protein, 7 aa, synthetic construct
RGDINLT

SEQ ID NO: 27035 - protein, 7 aa, synthetic construct
RGDIQDL

SEQ ID NO: 27036 - protein, 7 aa, synthetic construct
RGDIQQF

SEQ ID NO: 27037 - protein, 7 aa, synthetic construct
RGDITER

SEQ ID NO: 27038 - protein, 7 aa, synthetic construct
RGDITIV

SEQ ID NO: 27039 - protein, 7 aa, synthetic construct
RGDIVVD

SEQ ID NO: 27040 - protein, 7 aa, synthetic construct
RGDKDAN

SEQ ID NO: 27041 - protein, 7 aa, synthetic construct
RGDKDLK

SEQ ID NO: 27042 - protein, 7 aa, synthetic construct
RGDKDRV

SEQ ID NO: 27043 - protein, 7 aa, synthetic construct
RGDKEGS

SEQ ID NO: 27044 - protein, 7 aa, synthetic construct
RGDKEIL

SEQ ID NO: 27045 - protein, 7 aa, synthetic construct
RGDKELL

SEQ ID NO: 27046 - protein, 7 aa, synthetic construct
RGDKERI

SEQ ID NO: 27047 - protein, 7 aa, synthetic construct
RGDKFHG

SEQ ID NO: 27048 - protein, 7 aa, synthetic construct
RGDKFHN

SEQ ID NO: 27049 - protein, 7 aa, synthetic construct
RGDKFTS

SEQ ID NO: 27050 - protein, 7 aa, synthetic construct
RGDKGAG

SEQ ID NO: 27051 - protein, 7 aa, synthetic construct
RGDKLDL

SEQ ID NO: 27052 - protein, 7 aa, synthetic construct
RGDKLEL

SEQ ID NO: 27053 - protein, 7 aa, synthetic construct
RGDKLNE

SEQ ID NO: 27054 - protein, 7 aa, synthetic construct
RGDKLTG

SEQ ID NO: 27055 - protein, 7 aa, synthetic construct
RGDKTFA

SEQ ID NO: 27056 - protein, 7 aa, synthetic construct
RGDKTNG

SEQ ID NO: 27057 - protein, 7 aa, synthetic construct
RGDKVED

SEQ ID NO: 27058 - protein, 7 aa, synthetic construct
RGDKVIQ

SEQ ID NO: 27059 - protein, 7 aa, synthetic construct
RGDKVKG

SEQ ID NO: 27060 - protein, 7 aa, synthetic construct
RGDKVNS

SEQ ID NO: 27061 - protein, 7 aa, synthetic construct
RGDLAAS

SEQ ID NO: 27062 - protein, 7 aa, synthetic construct
RGDLARD

SEQ ID NO: 27063 - protein, 7 aa, synthetic construct
RGDLFLF

SEQ ID NO: 27064 - protein, 7 aa, synthetic construct
RGDASIL

SEQ ID NO: 27065 - protein, 7 aa, synthetic construct
RGDLGLV

SEQ ID NO: 27066 - protein, 7 aa, synthetic construct
RGDLIGL

SEQ ID NO: 27067 - protein, 7 aa, synthetic construct
RGDLILT

SEQ ID NO: 27068 - protein, 7 aa, synthetic construct
RGDLKHD

SEQ ID NO: 27069 - protein, 7 aa, synthetic construct
RGDLLQS

SEQ ID NO: 27070 - protein, 7 aa, synthetic construct
RGDLLTE

SEQ ID NO: 27071 - protein, 7 aa, synthetic construct
RGDLLVI

SEQ ID NO: 27072 - protein, 7 aa, synthetic construct
RGDLNAV

SEQ ID NO: 27073 - protein, 7 aa, synthetic construct
RGDLNQT

SEQ ID NO: 27074 - protein, 7 aa, synthetic construct
RGDLNVK

SEQ ID NO: 27075 - protein, 7 aa, synthetic construct
RGDLQGG

SEQ ID NO: 27076 - protein, 7 aa, synthetic construct
RGDLQTD

SEQ ID NO: 27077 - protein, 7 aa, synthetic construct
RGDLTFE

SEQ ID NO: 27078 - protein, 7 aa, synthetic construct
RGDLTFT

SEQ ID NO: 27079 - protein, 7 aa, synthetic construct
RGDNAFK

SEQ ID NO: 27080 - protein, 7 aa, synthetic construct
RGDNDFQ

SEQ ID NO: 27081 - protein, 7 aa, synthetic construct
RGDNDLK

SEQ ID NO: 27082 - protein, 7 aa, synthetic construct
RGDNDLT

SEQ ID NO: 27083 - protein, 7 aa, synthetic construct
RGDNEHQ

SEQ ID NO: 27084 - protein, 7 aa, synthetic construct
RGDATRN

SEQ ID NO: 27085 - protein, 7 aa, synthetic construct
RGDNESG

SEQ ID NO: 27086 - protein, 7 aa, synthetic construct
RGDNEVN

SEQ ID NO: 27087 - protein, 7 aa, synthetic construct
RGDNFQS

SEQ ID NO: 27088 - protein, 7 aa, synthetic construct
RGDNFVL

SEQ ID NO: 27089 - protein, 7 aa, synthetic construct
RGDNGHT

SEQ ID NO: 27090 - protein, 7 aa, synthetic construct
RGDNHGH

SEQ ID NO: 27091 - protein, 7 aa, synthetic construct
RGDNLAQ

SEQ ID NO: 27092 - protein, 7 aa, synthetic construct
RGDNLLF

SEQ ID NO: 27093 - protein, 7 aa, synthetic construct
RGDNRLN

SEQ ID NO: 27094 - protein, 7 aa, synthetic construct
RGDNRQN

SEQ ID NO: 27095 - protein, 7 aa, synthetic construct
RGDAVQF

SEQ ID NO: 27096 - protein, 7 aa, synthetic construct
RGDNRTN

SEQ ID NO: 27097 - protein, 7 aa, synthetic construct
RGDNRVQ

SEQ ID NO: 27098 - protein, 7 aa, synthetic construct
RGDNSHE

SEQ ID NO: 27099 - protein, 7 aa, synthetic construct
RGDNSIH

SEQ ID NO: 27100 - protein, 7 aa, synthetic construct
RGDNSNN

SEQ ID NO: 27101 - protein, 7 aa, synthetic construct
RGDNTAL

SEQ ID NO: 27102 - protein, 7 aa, synthetic construct
RGDNTDH

SEQ ID NO: 27103 - protein, 7 aa, synthetic construct
RGDNTLK

SEQ ID NO: 27104 - protein, 7 aa, synthetic construct
RGDNTTT

SEQ ID NO: 27105 - protein, 7 aa, synthetic construct
RGDQALS

SEQ ID NO: 27106 - protein, 7 aa, synthetic construct
RGDQDNQ

SEQ ID NO: 27107 - protein, 7 aa, synthetic construct
RGDDAFI

SEQ ID NO: 27108 - protein, 7 aa, synthetic construct
RGDQFEV

SEQ ID NO: 27109 - protein, 7 aa, synthetic construct
RGDQFHF

SEQ ID NO: 27110 - protein, 7 aa, synthetic construct
RGDQGEL

SEQ ID NO: 27111 - protein, 7 aa, synthetic construct
RGDQGTG

SEQ ID NO: 27112 - protein, 7 aa, synthetic construct
RGDDALD

SEQ ID NO: 27113 - protein, 7 aa, synthetic construct
RGDQHNA

SEQ ID NO: 27114 - protein, 7 aa, synthetic construct
RGDQHQK

SEQ ID NO: 27115 - protein, 7 aa, synthetic construct
RGDQHSD

SEQ ID NO: 27116 - protein, 7 aa, synthetic construct
RGDQHSH

SEQ ID NO: 27117 - protein, 7 aa, synthetic construct
RGDQIGH

SEQ ID NO: 27118 - protein, 7 aa, synthetic construct
RGDQLFE

SEQ ID NO: 27119 - protein, 7 aa, synthetic construct
RGDQLNL

SEQ ID NO: 27120 - protein, 7 aa, synthetic construct
RGDQNVG

SEQ ID NO: 27121 - protein, 7 aa, synthetic construct
RGDQQFI

SEQ ID NO: 27122 - protein, 7 aa, synthetic construct
RGDQQGF

SEQ ID NO: 27123 - protein, 7 aa, synthetic construct
RGDQTNT

SEQ ID NO: 27124 - protein, 7 aa, synthetic construct
RGDQVTF

SEQ ID NO: 27125 - protein, 7 aa, synthetic construct
RGDRAED

SEQ ID NO: 27126 - protein, 7 aa, synthetic construct
RGDRANE

SEQ ID NO: 27127 - protein, 7 aa, synthetic construct
RGDRDRR

SEQ ID NO: 27128 - protein, 7 aa, synthetic construct
RGDDDRN

SEQ ID NO: 27129 - protein, 7 aa, synthetic construct
RGDDDTH

SEQ ID NO: 27130 - protein, 7 aa, synthetic construct
RGDRIEE

SEQ ID NO: 27131 - protein, 7 aa, synthetic construct
RGDRIVG

SEQ ID NO: 27132 - protein, 7 aa, synthetic construct
RGDRKKF

SEQ ID NO: 27133 - protein, 7 aa, synthetic construct
RGDAAEL

SEQ ID NO: 27134 - protein, 7 aa, synthetic construct
RGDRTIA

SEQ ID NO: 27135 - protein, 7 aa, synthetic construct
RGDRTRS

SEQ ID NO: 27136 - protein, 7 aa, synthetic construct
RGDRVDE

SEQ ID NO: 27137 - protein, 7 aa, synthetic construct
RGDRVQR

SEQ ID NO: 27138 - protein, 7 aa, synthetic construct
RGDSDQI

SEQ ID NO: 27139 - protein, 7 aa, synthetic construct
RGDSFFA

SEQ ID NO: 27140 - protein, 7 aa, synthetic construct
RGDDFGT

SEQ ID NO: 27141 - protein, 7 aa, synthetic construct
RGDSFHV

SEQ ID NO: 27142 - protein, 7 aa, synthetic construct
RGDDFIF

SEQ ID NO: 27143 - protein, 7 aa, synthetic construct
RGDSGRA

SEQ ID NO: 27144 - protein, 7 aa, synthetic construct
RGDSHHQ

SEQ ID NO: 27145 - protein, 7 aa, synthetic construct
RGDSINT

SEQ ID NO: 27146 - protein, 7 aa, synthetic construct
RGDSLHQ

SEQ ID NO: 27147 - protein, 7 aa, synthetic construct
RGDSNDL

SEQ ID NO: 27148 - protein, 7 aa, synthetic construct
RGDSQES

SEQ ID NO: 27149 - protein, 7 aa, synthetic construct
RGDSQNT

SEQ ID NO: 27150 - protein, 7 aa, synthetic construct
RGDSRDG

SEQ ID NO: 27151 - protein, 7 aa, synthetic construct
RGDSSEE

SEQ ID NO: 27152 - protein, 7 aa, synthetic construct
RGDDGFR

SEQ ID NO: 27153 - protein, 7 aa, synthetic construct
RGDSTDR

SEQ ID NO: 27154 - protein, 7 aa, synthetic construct
RGDSTQA

SEQ ID NO: 27155 - protein, 7 aa, synthetic construct
RGDSVDK

SEQ ID NO: 27156 - protein, 7 aa, synthetic construct
RGDSVRG

SEQ ID NO: 27157 - protein, 7 aa, synthetic construct
RGDTAHF

SEQ ID NO: 27158 - protein, 7 aa, synthetic construct
RGDTDKE

SEQ ID NO: 27159 - protein, 7 aa, synthetic construct
RGDTEFE

SEQ ID NO: 27160 - protein, 7 aa, synthetic construct
RGDTEIK

SEQ ID NO: 27161 - protein, 7 aa, synthetic construct
RGDTERK

SEQ ID NO: 27162 - protein, 7 aa, synthetic construct
RGDTESV

SEQ ID NO: 27163 - protein, 7 aa, synthetic construct
RGDTETK

SEQ ID NO: 27164 - protein, 7 aa, synthetic construct
RGDTFRR

SEQ ID NO: 27165 - protein, 7 aa, synthetic construct
RGDTGHR

SEQ ID NO: 27166 - protein, 7 aa, synthetic construct
RGDTGNT

SEQ ID NO: 27167 - protein, 7 aa, synthetic construct
RGDTGSD

SEQ ID NO: 27168 - protein, 7 aa, synthetic construct
RGDTIAH

SEQ ID NO: 27169 - protein, 7 aa, synthetic construct
RGDTIHE

SEQ ID NO: 27170 - protein, 7 aa, synthetic construct
RGDTIIA

SEQ ID NO: 27171 - protein, 7 aa, synthetic construct
RGDTINF

SEQ ID NO: 27172 - protein, 7 aa, synthetic construct
RGDTNHG

SEQ ID NO: 27173 - protein, 7 aa, synthetic construct
RGDTSGQ

SEQ ID NO: 27174 - protein, 7 aa, synthetic construct
RGDDHSA

SEQ ID NO: 27175 - protein, 7 aa, synthetic construct
RGDTVEF

SEQ ID NO: 27176 - protein, 7 aa, synthetic construct
RGDTVKH

SEQ ID NO: 27177 - protein, 7 aa, synthetic construct
RGDVAFE

SEQ ID NO: 27178 - protein, 7 aa, synthetic construct
RGDVAFS

SEQ ID NO: 27179 - protein, 7 aa, synthetic construct
RGDVAVL

SEQ ID NO: 27180 - protein, 7 aa, synthetic construct
RGDVDAN

SEQ ID NO: 27181 - protein, 7 aa, synthetic construct
RGDVDHR

SEQ ID NO: 27182 - protein, 7 aa, synthetic construct
RGDVDLG

SEQ ID NO: 27183 - protein, 7 aa, synthetic construct
RGDVDQN

SEQ ID NO: 27184 - protein, 7 aa, synthetic construct
RGDVEEK

SEQ ID NO: 27185 - protein, 7 aa, synthetic construct
RGDVEHL

SEQ ID NO: 27186 - protein, 7 aa, synthetic construct
RGDVEHN

SEQ ID NO: 27187 - protein, 7 aa, synthetic construct
RGDVEKS

SEQ ID NO: 27188 - protein, 7 aa, synthetic construct
RGDVEST

SEQ ID NO: 27189 - protein, 7 aa, synthetic construct
RGDVETT

SEQ ID NO: 27190 - protein, 7 aa, synthetic construct
RGDVFNF

SEQ ID NO: 27191 - protein, 7 aa, synthetic construct
RGDVFNK

SEQ ID NO: 27192 - protein, 7 aa, synthetic construct
RGDVGII

SEQ ID NO: 27193 - protein, 7 aa, synthetic construct
RGDVHEV

SEQ ID NO: 27194 - protein, 7 aa, synthetic construct
RGDVHLG

SEQ ID NO: 27195 - protein, 7 aa, synthetic construct
RGDVIAL

SEQ ID NO: 27196 - protein, 7 aa, synthetic construct
RGDDINQ

SEQ ID NO: 27197 - protein, 7 aa, synthetic construct
RGDDIRG

SEQ ID NO: 27198 - protein, 7 aa, synthetic construct
RGDVLFH

SEQ ID NO: 27199 - protein, 7 aa, synthetic construct
RGDVLKD

SEQ ID NO: 27200 - protein, 7 aa, synthetic construct
RGDVLTA

SEQ ID NO: 27201 - protein, 7 aa, synthetic construct
RGDVLVD

SEQ ID NO: 27202 - protein, 7 aa, synthetic construct
RGDVNIG

SEQ ID NO: 27203 - protein, 7 aa, synthetic construct
RGDVQKS

SEQ ID NO: 27204 - protein, 7 aa, synthetic construct
RGDVQTG

SEQ ID NO: 27205 - protein, 7 aa, synthetic construct
RGDVSNA

SEQ ID NO: 27206 - protein, 7 aa, synthetic construct
RGDVTGQ

SEQ ID NO: 27207 - protein, 7 aa, synthetic construct
RGDVTQT

SEQ ID NO: 27208 - protein, 7 aa, synthetic construct
RGDVVEL

SEQ ID NO: 27209 - protein, 7 aa, synthetic construct
RGDVVNE

SEQ ID NO: 27210 - protein, 7 aa, synthetic construct
RGDDLQF

SEQ ID NO: 27211 - protein, 7 aa, synthetic construct
RGDAEKE

SEQ ID NO: 27212 - protein, 7 aa, synthetic construct
RGDDRSA

SEQ ID NO: 27213 - protein, 7 aa, synthetic construct
RGDDSDS

SEQ ID NO: 27214 - protein, 7 aa, synthetic construct
RGDDSGL

SEQ ID NO: 27215 - protein, 7 aa, synthetic construct
RGDDSLL

SEQ ID NO: 27216 - protein, 7 aa, synthetic construct
RGDDVKQ

SEQ ID NO: 27217 - protein, 7 aa, synthetic construct
RGDEATS

SEQ ID NO: 27218 - protein, 7 aa, synthetic construct
RGDEDEK

SEQ ID NO: 27219 - protein, 7 aa, synthetic construct
RGDEDKA

SEQ ID NO: 27220 - protein, 7 aa, synthetic construct
RGDEDTL

SEQ ID NO: 27221 - protein, 7 aa, synthetic construct
RGDEEFF

SEQ ID NO: 27222 - protein, 7 aa, synthetic construct
RGDEELL

SEQ ID NO: 27223 - protein, 7 aa, synthetic construct
RGDEHQS

SEQ ID NO: 27224 - protein, 7 aa, synthetic construct
RGDEIIQ

SEQ ID NO: 27225 - protein, 7 aa, synthetic construct
RGDAFNS

SEQ ID NO: 27226 - protein, 7 aa, synthetic construct
RGDEKTS

SEQ ID NO: 27227 - protein, 7 aa, synthetic construct
RGDELAL

SEQ ID NO: 27228 - protein, 7 aa, synthetic construct
RGDELDV

SEQ ID NO: 27229 - protein, 7 aa, synthetic construct
RGDELEH

SEQ ID NO: 27230 - protein, 7 aa, synthetic construct
RGDELTG

SEQ ID NO: 27231 - protein, 7 aa, synthetic construct
RGDENIL

SEQ ID NO: 27232 - protein, 7 aa, synthetic construct
RGDAGDI

SEQ ID NO: 27233 - protein, 7 aa, synthetic construct
RGDERKA

SEQ ID NO: 27234 - protein, 7 aa, synthetic construct
RGDAAIG

SEQ ID NO: 27235 - protein, 7 aa, synthetic construct
RGDESHK

SEQ ID NO: 27236 - protein, 7 aa, synthetic construct
RGDESHT

SEQ ID NO: 27237 - protein, 7 aa, synthetic construct
RGDESNT

SEQ ID NO: 27238 - protein, 7 aa, synthetic construct
RGDESRI

SEQ ID NO: 27239 - protein, 7 aa, synthetic construct
RGDETLK

SEQ ID NO: 27240 - protein, 7 aa, synthetic construct
RGDEVNS

SEQ ID NO: 27241 - protein, 7 aa, synthetic construct
RGDEVQF

SEQ ID NO: 27242 - protein, 7 aa, synthetic construct
RGDFAES

SEQ ID NO: 27243 - protein, 7 aa, synthetic construct
RGDFDIK

SEQ ID NO: 27244 - protein, 7 aa, synthetic construct
RGDFEDR

SEQ ID NO: 27245 - protein, 7 aa, synthetic construct
RGDFEIV

SEQ ID NO: 27246 - protein, 7 aa, synthetic construct
RGDFFAI

SEQ ID NO: 27247 - protein, 7 aa, synthetic construct
RGDAGSV

SEQ ID NO: 27248 - protein, 7 aa, synthetic construct
RGDFGDV

SEQ ID NO: 27249 - protein, 7 aa, synthetic construct
RGDFHSG

SEQ ID NO: 27250 - protein, 7 aa, synthetic construct
RGDFIFD

SEQ ID NO: 27251 - protein, 7 aa, synthetic construct
RGDFIKI

SEQ ID NO: 27252 - protein, 7 aa, synthetic construct
RGDFKLL

SEQ ID NO: 27253 - protein, 7 aa, synthetic construct
RGDFLDK

SEQ ID NO: 27254 - protein, 7 aa, synthetic construct
RGDFLGE

SEQ ID NO: 27255 - protein, 7 aa, synthetic construct
RGDFLTL

SEQ ID NO: 27256 - protein, 7 aa, synthetic construct
RGDFNDA

SEQ ID NO: 27257 - protein, 7 aa, synthetic construct
RGDFNGQ

SEQ ID NO: 27258 - protein, 7 aa, synthetic construct
RGDFNNN

SEQ ID NO: 27259 - protein, 7 aa, synthetic construct
RGDFNQG

SEQ ID NO: 27260 - protein, 7 aa, synthetic construct
RGDFSIN

SEQ ID NO: 27261 - protein, 7 aa, synthetic construct
RGDFSKD

SEQ ID NO: 27262 - protein, 7 aa, synthetic construct
RGDFSLG

SEQ ID NO: 27263 - protein, 7 aa, synthetic construct
RGDFTAK

SEQ ID NO: 27264 - protein, 7 aa, synthetic construct
RGDAALQ

SEQ ID NO: 27265 - protein, 7 aa, synthetic construct
RGDFTIH

SEQ ID NO: 27266 - protein, 7 aa, synthetic construct
RGDAHVL

SEQ ID NO: 27267 - protein, 7 aa, synthetic construct
RGDFVVF

SEQ ID NO: 27268 - protein, 7 aa, synthetic construct
RGDGDHL

SEQ ID NO: 27269 - protein, 7 aa, synthetic construct
RGDGDHS

SEQ ID NO: 27270 - protein, 7 aa, synthetic construct
RGDGDNQ

SEQ ID NO: 27271 - protein, 7 aa, synthetic construct
RGDGDQK

SEQ ID NO: 27272 - protein, 7 aa, synthetic construct
RGDGHRS

SEQ ID NO: 27273 - protein, 7 aa, synthetic construct
RGDGIHR

SEQ ID NO: 27274 - protein, 7 aa, synthetic construct
RGDGITH

SEQ ID NO: 27275 - protein, 7 aa, synthetic construct
RGDGKDQ

SEQ ID NO: 27276 - protein, 7 aa, synthetic construct
RGDGKSE

SEQ ID NO: 27277 - protein, 7 aa, synthetic construct
RGDGLVH

SEQ ID NO: 27278 - protein, 7 aa, synthetic construct
RGDGNGD

SEQ ID NO: 27279 - protein, 7 aa, synthetic construct
RGDGNGS

SEQ ID NO: 27280 - protein, 7 aa, synthetic construct
RGDGQDQ

SEQ ID NO: 27281 - protein, 7 aa, synthetic construct
RGDGQGN

SEQ ID NO: 27282 - protein, 7 aa, synthetic construct
RGDGQGT

SEQ ID NO: 27283 - protein, 7 aa, synthetic construct
RGDGQQA

SEQ ID NO: 27284 - protein, 7 aa, synthetic construct
RGDGQRK

SEQ ID NO: 27285 - protein, 7 aa, synthetic construct
RGDGQTE

SEQ ID NO: 27286 - protein, 7 aa, synthetic construct
RGDGRGG

SEQ ID NO: 27287 - protein, 7 aa, synthetic construct
RGDGSKD

SEQ ID NO: 27288 - protein, 7 aa, synthetic construct
RGDGTLL

SEQ ID NO: 27289 - protein, 7 aa, synthetic construct
RGDGVED

SEQ ID NO: 27290 - protein, 7 aa, synthetic construct
RGDGVEI

SEQ ID NO: 27291 - protein, 7 aa, synthetic construct
RGDGVEQ

SEQ ID NO: 27292 - protein, 7 aa, synthetic construct
RGDGVHA

SEQ ID NO: 27293 - protein, 7 aa, synthetic construct
RGDGVIQ

SEQ ID NO: 27294 - protein, 7 aa, synthetic construct
RGDGVRQ

SEQ ID NO: 27295 - protein, 7 aa, synthetic construct
RGDAKLF

SEQ ID NO: 27296 - protein, 7 aa, synthetic construct
RGDHASS

SEQ ID NO: 27297 - protein, 7 aa, synthetic construct
RGDHDRG

SEQ ID NO: 27298 - protein, 7 aa, synthetic construct
RGDHEEL

SEQ ID NO: 27299 - protein, 7 aa, synthetic construct
RGDHENH

SEQ ID NO: 27300 - protein, 7 aa, synthetic construct
RGDHEVT

SEQ ID NO: 27301 - protein, 7 aa, synthetic construct
RGDHFVF

SEQ ID NO: 27302 - protein, 7 aa, synthetic construct
RGDHKAS

SEQ ID NO: 27303 - protein, 7 aa, synthetic construct
RGDHKEN

SEQ ID NO: 27304 - protein, 7 aa, synthetic construct
RGDHNHR

SEQ ID NO: 27305 - protein, 7 aa, synthetic construct
RGDHNRK

SEQ ID NO: 27306 - protein, 7 aa, synthetic construct
RGDHRHK

SEQ ID NO: 27307 - protein, 7 aa, synthetic construct
RGDHRKV

SEQ ID NO: 27308 - protein, 7 aa, synthetic construct
RGDHRSA

SEQ ID NO: 27309 - protein, 7 aa, synthetic construct
RGDHSHH

SEQ ID NO: 27310 - protein, 7 aa, synthetic construct
RGDHTRH

SEQ ID NO: 27311 - protein, 7 aa, synthetic construct
RGDHVEV

SEQ ID NO: 27312 - protein, 7 aa, synthetic construct
RGDHVQN

SEQ ID NO: 27313 - protein, 7 aa, synthetic construct
RGDIAQL

SEQ ID NO: 27314 - protein, 7 aa, synthetic construct
RGDIATN

SEQ ID NO: 27315 - protein, 7 aa, synthetic construct
RGDIEEL

SEQ ID NO: 27316 - protein, 7 aa, synthetic construct
RGDIEIF

SEQ ID NO: 27317 - protein, 7 aa, synthetic construct
RGDIFLN

SEQ ID NO: 27318 - protein, 7 aa, synthetic construct
RGDIIEQ

SEQ ID NO: 27319 - protein, 7 aa, synthetic construct
RGDIIKE

SEQ ID NO: 27320 - protein, 7 aa, synthetic construct
RGDIKEG

SEQ ID NO: 27321 - protein, 7 aa, synthetic construct
RGDIKRE

SEQ ID NO: 27322 - protein, 7 aa, synthetic construct
RGDIKTK

SEQ ID NO: 27323 - protein, 7 aa, synthetic construct
RGDILQE

SEQ ID NO: 27324 - protein, 7 aa, synthetic construct
RGDILSS

SEQ ID NO: 27325 - protein, 7 aa, synthetic construct
RGDINFI

SEQ ID NO: 27326 - protein, 7 aa, synthetic construct
RGDANVE

SEQ ID NO: 27327 - protein, 7 aa, synthetic construct
RGDINQL

SEQ ID NO: 27328 - protein, 7 aa, synthetic construct
RGDINVV

SEQ ID NO: 27329 - protein, 7 aa, synthetic construct
RGDIQKE

SEQ ID NO: 27330 - protein, 7 aa, synthetic construct
RGDISLS

SEQ ID NO: 27331 - protein, 7 aa, synthetic construct
RGDISVE

SEQ ID NO: 27332 - protein, 7 aa, synthetic construct
RGDITTT

SEQ ID NO: 27333 - protein, 7 aa, synthetic construct
RGDIVAQ

SEQ ID NO: 27334 - protein, 7 aa, synthetic construct
RGDIVET

SEQ ID NO: 27335 - protein, 7 aa, synthetic construct
RGDIVLT

SEQ ID NO: 27336 - protein, 7 aa, synthetic construct
RGDKAHL

SEQ ID NO: 27337 - protein, 7 aa, synthetic construct
RGDKDIL

SEQ ID NO: 27338 - protein, 7 aa, synthetic construct
RGDKDLN

SEQ ID NO: 27339 - protein, 7 aa, synthetic construct
RGDKDSG

SEQ ID NO: 27340 - protein, 7 aa, synthetic construct
RGDKEAR

SEQ ID NO: 27341 - protein, 7 aa, synthetic construct
RGDKEGE

SEQ ID NO: 27342 - protein, 7 aa, synthetic construct
RGDKFNL

SEQ ID NO: 27343 - protein, 7 aa, synthetic construct
RGDKFNN

SEQ ID NO: 27344 - protein, 7 aa, synthetic construct
RGDKIGS

SEQ ID NO: 27345 - protein, 7 aa, synthetic construct
RGDKLIN

SEQ ID NO: 27346 - protein, 7 aa, synthetic construct
RGDKQLN

SEQ ID NO: 27347 - protein, 7 aa, synthetic construct
RGDKVGN

SEQ ID NO: 27348 - protein, 7 aa, synthetic construct
RGDLAHF

SEQ ID NO: 27349 - protein, 7 aa, synthetic construct
RGDLARR

SEQ ID NO: 27350 - protein, 7 aa, synthetic construct
RGDLDHA

SEQ ID NO: 27351 - protein, 7 aa, synthetic construct
RGDLDLN

SEQ ID NO: 27352 - protein, 7 aa, synthetic construct
RGDLDNG

SEQ ID NO: 27353 - protein, 7 aa, synthetic construct
RGDLDNK

SEQ ID NO: 27354 - protein, 7 aa, synthetic construct
RGDLDSE

SEQ ID NO: 27355 - protein, 7 aa, synthetic construct
RGDLEGE

SEQ ID NO: 27356 - protein, 7 aa, synthetic construct
RGDLERN

SEQ ID NO: 27357 - protein, 7 aa, synthetic construct
RGDLFEG

SEQ ID NO: 27358 - protein, 7 aa, synthetic construct
RGDLFEI

SEQ ID NO: 27359 - protein, 7 aa, synthetic construct
RGDLHNA

SEQ ID NO: 27360 - protein, 7 aa, synthetic construct
RGDLIRQ

SEQ ID NO: 27361 - protein, 7 aa, synthetic construct
RGDLKFH

SEQ ID NO: 27362 - protein, 7 aa, synthetic construct
RGDLKSD

SEQ ID NO: 27363 - protein, 7 aa, synthetic construct
RGDLLIA

SEQ ID NO: 27364 - protein, 7 aa, synthetic construct
RGDLLTF

SEQ ID NO: 27365 - protein, 7 aa, synthetic construct
RGDLNNT

SEQ ID NO: 27366 - protein, 7 aa, synthetic construct
RGDLNSI

SEQ ID NO: 27367 - protein, 7 aa, synthetic construct
RGDLNVI

SEQ ID NO: 27368 - protein, 7 aa, synthetic construct
RGDLSVR

SEQ ID NO: 27369 - protein, 7 aa, synthetic construct
RGDLTDG

SEQ ID NO: 27370 - protein, 7 aa, synthetic construct
RGDLTDH

SEQ ID NO: 27371 - protein, 7 aa, synthetic construct
RGDLVVD

SEQ ID NO: 27372 - protein, 7 aa, synthetic construct
RGDNAAV

SEQ ID NO: 27373 - protein, 7 aa, synthetic construct
RGDNAGI

SEQ ID NO: 27374 - protein, 7 aa, synthetic construct
RGDNDAE

SEQ ID NO: 27375 - protein, 7 aa, synthetic construct
RGDNDGS

SEQ ID NO: 27376 - protein, 7 aa, synthetic construct
RGDNDNK

SEQ ID NO: 27377 - protein, 7 aa, synthetic construct
RGDNEGI

SEQ ID NO: 27378 - protein, 7 aa, synthetic construct
RGDNELH

SEQ ID NO: 27379 - protein, 7 aa, synthetic construct
RGDNFGA

SEQ ID NO: 27380 - protein, 7 aa, synthetic construct
RGDNGLG

SEQ ID NO: 27381 - protein, 7 aa, synthetic construct
RGDNGQS

SEQ ID NO: 27382 - protein, 7 aa, synthetic construct
RGDNHAT

SEQ ID NO: 27383 - protein, 7 aa, synthetic construct
RGDNHDD

SEQ ID NO: 27384 - protein, 7 aa, synthetic construct
RGDNKDA

SEQ ID NO: 27385 - protein, 7 aa, synthetic construct
RGDNLEH

SEQ ID NO: 27386 - protein, 7 aa, synthetic construct
RGDNLFN

SEQ ID NO: 27387 - protein, 7 aa, synthetic construct
RGDNLIF

SEQ ID NO: 27388 - protein, 7 aa, synthetic construct
RGDNNKH

SEQ ID NO: 27389 - protein, 7 aa, synthetic construct
RGDNNTF

SEQ ID NO: 27390 - protein, 7 aa, synthetic construct
RGDNQAI

SEQ ID NO: 27391 - protein, 7 aa, synthetic construct
RGDAVRK

SEQ ID NO: 27392 - protein, 7 aa, synthetic construct
RGDNSTS

SEQ ID NO: 27393 - protein, 7 aa, synthetic construct
RGDNTAT

SEQ ID NO: 27394 - protein, 7 aa, synthetic construct
RGDNTRA

SEQ ID NO: 27395 - protein, 7 aa, synthetic construct
RGDNTSH

SEQ ID NO: 27396 - protein, 7 aa, synthetic construct
RGDQALL

SEQ ID NO: 27397 - protein, 7 aa, synthetic construct
RGDQAVE

SEQ ID NO: 27398 - protein, 7 aa, synthetic construct
RGDQDAL

SEQ ID NO: 27399 - protein, 7 aa, synthetic construct
RGDDAFN

SEQ ID NO: 27400 - protein, 7 aa, synthetic construct
RGDQERA

SEQ ID NO: 27401 - protein, 7 aa, synthetic construct
RGDQFQN

SEQ ID NO: 27402 - protein, 7 aa, synthetic construct
RGDQHIG

SEQ ID NO: 27403 - protein, 7 aa, synthetic construct
RGDQIFQ

SEQ ID NO: 27404 - protein, 7 aa, synthetic construct
RGDDAQR

SEQ ID NO: 27405 - protein, 7 aa, synthetic construct
RGDQLEF

SEQ ID NO: 27406 - protein, 7 aa, synthetic construct
RGDQLFD

SEQ ID NO: 27407 - protein, 7 aa, synthetic construct
RGDQLIG

SEQ ID NO: 27408 - protein, 7 aa, synthetic construct
RGDQLNF

SEQ ID NO: 27409 - protein, 7 aa, synthetic construct
RGDQLVN

SEQ ID NO: 27410 - protein, 7 aa, synthetic construct
RGDQNAH

SEQ ID NO: 27411 - protein, 7 aa, synthetic construct
RGDQQHR

SEQ ID NO: 27412 - protein, 7 aa, synthetic construct
RGDQRKD

SEQ ID NO: 27413 - protein, 7 aa, synthetic construct
RGDQSEQ

SEQ ID NO: 27414 - protein, 7 aa, synthetic construct
RGDQTEI

SEQ ID NO: 27415 - protein, 7 aa, synthetic construct
RGDQTKG

SEQ ID NO: 27416 - protein, 7 aa, synthetic construct
RGDQTNV

SEQ ID NO: 27417 - protein, 7 aa, synthetic construct
RGDQVEG

SEQ ID NO: 27418 - protein, 7 aa, synthetic construct
RGDQVGG

SEQ ID NO: 27419 - protein, 7 aa, synthetic construct
RGDRDRE

SEQ ID NO: 27420 - protein, 7 aa, synthetic construct
RGDRHNV

SEQ ID NO: 27421 - protein, 7 aa, synthetic construct
RGDRIIN

SEQ ID NO: 27422 - protein, 7 aa, synthetic construct
RGDRNQD

SEQ ID NO: 27423 - protein, 7 aa, synthetic construct
RGDRVLL

SEQ ID NO: 27424 - protein, 7 aa, synthetic construct
RGDSAAI

SEQ ID NO: 27425 - protein, 7 aa, synthetic construct
RGDSAFL

SEQ ID NO: 27426 - protein, 7 aa, synthetic construct
RGDSARG

SEQ ID NO: 27427 - protein, 7 aa, synthetic construct
RGDSDEV

SEQ ID NO: 27428 - protein, 7 aa, synthetic construct
RGDSDIF

SEQ ID NO: 27429 - protein, 7 aa, synthetic construct
RGDSDQQ

SEQ ID NO: 27430 - protein, 7 aa, synthetic construct
RGDSELG

SEQ ID NO: 27431 - protein, 7 aa, synthetic construct
RGDDFGI

SEQ ID NO: 27432 - protein, 7 aa, synthetic construct
RGDSEVS

SEQ ID NO: 27433 - protein, 7 aa, synthetic construct
RGDSFLN

SEQ ID NO: 27434 - protein, 7 aa, synthetic construct
RGDSFQE

SEQ ID NO: 27435 - protein, 7 aa, synthetic construct
RGDSGGL

SEQ ID NO: 27436 - protein, 7 aa, synthetic construct
RGDSHDH

SEQ ID NO: 27437 - protein, 7 aa, synthetic construct
RGDDFLH

SEQ ID NO: 27438 - protein, 7 aa, synthetic construct
RGDSIQN

SEQ ID NO: 27439 - protein, 7 aa, synthetic construct
RGDDFRE

SEQ ID NO: 27440 - protein, 7 aa, synthetic construct
RGDDFRN

SEQ ID NO: 27441 - protein, 7 aa, synthetic construct
RGDSLEN

SEQ ID NO: 27442 - protein, 7 aa, synthetic construct
RGDSLGQ

SEQ ID NO: 27443 - protein, 7 aa, synthetic construct
RGDSNFN

SEQ ID NO: 27444 - protein, 7 aa, synthetic construct
RGDSNGF

SEQ ID NO: 27445 - protein, 7 aa, synthetic construct
RGDDGLG

SEQ ID NO: 27446 - protein, 7 aa, synthetic construct
RGDTDEH

SEQ ID NO: 27447 - protein, 7 aa, synthetic construct
RGDTDSK

SEQ ID NO: 27448 - protein, 7 aa, synthetic construct
RGDTDSS

SEQ ID NO: 27449 - protein, 7 aa, synthetic construct
RGDTEDF

SEQ ID NO: 27450 - protein, 7 aa, synthetic construct
RGDTEEI

SEQ ID NO: 27451 - protein, 7 aa, synthetic construct
RGDTEGK

SEQ ID NO: 27452 - protein, 7 aa, synthetic construct
RGDTERN

SEQ ID NO: 27453 - protein, 7 aa, synthetic construct
RGDTFVR

SEQ ID NO: 27454 - protein, 7 aa, synthetic construct
RGDDGVH

SEQ ID NO: 27455 - protein, 7 aa, synthetic construct
RGDDHDG

SEQ ID NO: 27456 - protein, 7 aa, synthetic construct
RGDDHDT

SEQ ID NO: 27457 - protein, 7 aa, synthetic construct
RGDTLLH

SEQ ID NO: 27458 - protein, 7 aa, synthetic construct
RGDTNFK

SEQ ID NO: 27459 - protein, 7 aa, synthetic construct
RGDTNHI

SEQ ID NO: 27460 - protein, 7 aa, synthetic construct
RGDTNKI

SEQ ID NO: 27461 - protein, 7 aa, synthetic construct
RGDTNQF

SEQ ID NO: 27462 - protein, 7 aa, synthetic construct
RGDTSEV

SEQ ID NO: 27463 - protein, 7 aa, synthetic construct
RGDTSKQ

SEQ ID NO: 27464 - protein, 7 aa, synthetic construct
RGDTSQL

SEQ ID NO: 27465 - protein, 7 aa, synthetic construct
RGDTTFA

SEQ ID NO: 27466 - protein, 7 aa, synthetic construct
RGDTTQG

SEQ ID NO: 27467 - protein, 7 aa, synthetic construct
RGDTVQL

SEQ ID NO: 27468 - protein, 7 aa, synthetic construct
RGDVARA

SEQ ID NO: 27469 - protein, 7 aa, synthetic construct
RGDVDRG

SEQ ID NO: 27470 - protein, 7 aa, synthetic construct
RGDVEND

SEQ ID NO: 27471 - protein, 7 aa, synthetic construct
RGDDIHK

SEQ ID NO: 27472 - protein, 7 aa, synthetic construct
RGDVGLS

SEQ ID NO: 27473 - protein, 7 aa, synthetic construct
RGDVGQT

SEQ ID NO: 27474 - protein, 7 aa, synthetic construct
RGDDIKK

SEQ ID NO: 27475 - protein, 7 aa, synthetic construct
RGDVISE

SEQ ID NO: 27476 - protein, 7 aa, synthetic construct
RGDVNFF

SEQ ID NO: 27477 - protein, 7 aa, synthetic construct
RGDVNSL

SEQ ID NO: 27478 - protein, 7 aa, synthetic construct
RGDVNSS

SEQ ID NO: 27479 - protein, 7 aa, synthetic construct
RGDVQRH

SEQ ID NO: 27480 - protein, 7 aa, synthetic construct
RGDVRDG

SEQ ID NO: 27481 - protein, 7 aa, synthetic construct
RGDVRFE

SEQ ID NO: 27482 - protein, 7 aa, synthetic construct
RGDVSDK

SEQ ID NO: 27483 - protein, 7 aa, synthetic construct
RGDVSRR

SEQ ID NO: 27484 - protein, 7 aa, synthetic construct
RGDVTLA

SEQ ID NO: 27485 - protein, 7 aa, synthetic construct
RGDVVGA

SEQ ID NO: 27486 - protein, 7 aa, synthetic construct
RGDDKNN

SEQ ID NO: 27487 - protein, 7 aa, synthetic construct
RGDDKRG

SEQ ID NO: 27488 - protein, 7 aa, synthetic construct
RGDDKRK

SEQ ID NO: 27489 - protein, 7 aa, synthetic construct
RGDDKRV

SEQ ID NO: 27490 - protein, 7 aa, synthetic construct
RGDDNGT

SEQ ID NO: 27491 - protein, 7 aa, synthetic construct
RGDDNGV

SEQ ID NO: 27492 - protein, 7 aa, synthetic construct
RGDDRGQ

SEQ ID NO: 27493 - protein, 7 aa, synthetic construct
RGDAEQA

SEQ ID NO: 27494 - protein, 7 aa, synthetic construct
RGDDRQV

SEQ ID NO: 27495 - protein, 7 aa, synthetic construct
RGDDSKG

SEQ ID NO: 27496 - protein, 7 aa, synthetic construct
RGDDSNK

SEQ ID NO: 27497 - protein, 7 aa, synthetic construct
RGDAERQ

SEQ ID NO: 27498 - protein, 7 aa, synthetic construct
RGDAETF

SEQ ID NO: 27499 - protein, 7 aa, synthetic construct
RGDEAGH

SEQ ID NO: 27500 - protein, 7 aa, synthetic construct
RGDEFHI

SEQ ID NO: 27501 - protein, 7 aa, synthetic construct
RGDEGIL

SEQ ID NO: 27502 - protein, 7 aa, synthetic construct
RGDEGQG

SEQ ID NO: 27503 - protein, 7 aa, synthetic construct
RGDEHIQ

SEQ ID NO: 27504 - protein, 7 aa, synthetic construct
RGDEHKD

SEQ ID NO: 27505 - protein, 7 aa, synthetic construct
RGDEHLS

SEQ ID NO: 27506 - protein, 7 aa, synthetic construct
RGDEHVT

SEQ ID NO: 27507 - protein, 7 aa, synthetic construct
RGDEIGV

SEQ ID NO: 27508 - protein, 7 aa, synthetic construct
RGDEIHV

SEQ ID NO: 27509 - protein, 7 aa, synthetic construct
RGDEISS

SEQ ID NO: 27510 - protein, 7 aa, synthetic construct
RGDEIVE

SEQ ID NO: 27511 - protein, 7 aa, synthetic construct
RGDEKFS

SEQ ID NO: 27512 - protein, 7 aa, synthetic construct
RGDELFD

SEQ ID NO: 27513 - protein, 7 aa, synthetic construct
RGDENKK

SEQ ID NO: 27514 - protein, 7 aa, synthetic construct
RGDEQSI

SEQ ID NO: 27515 - protein, 7 aa, synthetic construct
RGDERAV

SEQ ID NO: 27516 - protein, 7 aa, synthetic construct
RGDERQR

SEQ ID NO: 27517 - protein, 7 aa, synthetic construct
RGDERTE

SEQ ID NO: 27518 - protein, 7 aa, synthetic construct
RGDERVA

SEQ ID NO: 27519 - protein, 7 aa, synthetic construct
RGDESTS

SEQ ID NO: 27520 - protein, 7 aa, synthetic construct
RGDFAEG

SEQ ID NO: 27521 - protein, 7 aa, synthetic construct
RGDFDLT

SEQ ID NO: 27522 - protein, 7 aa, synthetic construct
RGDFEED

SEQ ID NO: 27523 - protein, 7 aa, synthetic construct
RGDFESA

SEQ ID NO: 27524 - protein, 7 aa, synthetic construct
RGDFIIE

SEQ ID NO: 27525 - protein, 7 aa, synthetic construct
RGDFITD

SEQ ID NO: 27526 - protein, 7 aa, synthetic construct
RGDFIVG

SEQ ID NO: 27527 - protein, 7 aa, synthetic construct
RGDAHGQ

SEQ ID NO: 27528 - protein, 7 aa, synthetic construct
RGDFLKD

SEQ ID NO: 27529 - protein, 7 aa, synthetic construct
RGDFNDL

SEQ ID NO: 27530 - protein, 7 aa, synthetic construct
RGDAHSA

SEQ ID NO: 27531 - protein, 7 aa, synthetic construct
RGDFTNF

SEQ ID NO: 27532 - protein, 7 aa, synthetic construct
RGDFTNS

SEQ ID NO: 27533 - protein, 7 aa, synthetic construct
RGDGDDL

SEQ ID NO: 27534 - protein, 7 aa, synthetic construct
RGDGDNR

SEQ ID NO: 27535 - protein, 7 aa, synthetic construct
RGDGDVH

SEQ ID NO: 27536 - protein, 7 aa, synthetic construct
RGDGEGV

SEQ ID NO: 27537 - protein, 7 aa, synthetic construct
RGDGEQI

SEQ ID NO: 27538 - protein, 7 aa, synthetic construct
RGDGETL

SEQ ID NO: 27539 - protein, 7 aa, synthetic construct
RGDGHHQ

SEQ ID NO: 27540 - protein, 7 aa, synthetic construct
RGDGIHF

SEQ ID NO: 27541 - protein, 7 aa, synthetic construct
RGDGIIV

SEQ ID NO: 27542 - protein, 7 aa, synthetic construct
RGDGIKG

SEQ ID NO: 27543 - protein, 7 aa, synthetic construct
RGDAINS

SEQ ID NO: 27544 - protein, 7 aa, synthetic construct
RGDGNAQ

SEQ ID NO: 27545 - protein, 7 aa, synthetic construct
RGDGNET

SEQ ID NO: 27546 - protein, 7 aa, synthetic construct
RGDGNFG

SEQ ID NO: 27547 - protein, 7 aa, synthetic construct
RGDGNGI

SEQ ID NO: 27548 - protein, 7 aa, synthetic construct
RGDGSDN

SEQ ID NO: 27549 - protein, 7 aa, synthetic construct
RGDGSDT

SEQ ID NO: 27550 - protein, 7 aa, synthetic construct
RGDGVFV

SEQ ID NO: 27551 - protein, 7 aa, synthetic construct
RGDHDGA

SEQ ID NO: 27552 - protein, 7 aa, synthetic construct
RGDHDRD

SEQ ID NO: 27553 - protein, 7 aa, synthetic construct
RGDHEEV

SEQ ID NO: 27554 - protein, 7 aa, synthetic construct
RGDHEQT

SEQ ID NO: 27555 - protein, 7 aa, synthetic construct
RGDHFGF

SEQ ID NO: 27556 - protein, 7 aa, synthetic construct
RGDHGDV

SEQ ID NO: 27557 - protein, 7 aa, synthetic construct
RGDHGIA

SEQ ID NO: 27558 - protein, 7 aa, synthetic construct
RGDHING

SEQ ID NO: 27559 - protein, 7 aa, synthetic construct
RGDHINS

SEQ ID NO: 27560 - protein, 7 aa, synthetic construct
RGDHKFR

SEQ ID NO: 27561 - protein, 7 aa, synthetic construct
RGDHNFS

SEQ ID NO: 27562 - protein, 7 aa, synthetic construct
RGDHNHI

SEQ ID NO: 27563 - protein, 7 aa, synthetic construct
RGDHNRT

SEQ ID NO: 27564 - protein, 7 aa, synthetic construct
RGDHQFN

SEQ ID NO: 27565 - protein, 7 aa, synthetic construct
RGDHQHQ

SEQ ID NO: 27566 - protein, 7 aa, synthetic construct
RGDHRIR

SEQ ID NO: 27567 - protein, 7 aa, synthetic construct
RGDHRRT

SEQ ID NO: 27568 - protein, 7 aa, synthetic construct
RGDALQN

SEQ ID NO: 27569 - protein, 7 aa, synthetic construct
RGDALRD

SEQ ID NO: 27570 - protein, 7 aa, synthetic construct
RGDHVEI

SEQ ID NO: 27571 - protein, 7 aa, synthetic construct
RGDHVRE

SEQ ID NO: 27572 - protein, 7 aa, synthetic construct
RGDIDHI

SEQ ID NO: 27573 - protein, 7 aa, synthetic construct
RGDIDIN

SEQ ID NO: 27574 - protein, 7 aa, synthetic construct
RGDIDNL

SEQ ID NO: 27575 - protein, 7 aa, synthetic construct
RGDANEL

SEQ ID NO: 27576 - protein, 7 aa, synthetic construct
RGDIDRE

SEQ ID NO: 27577 - protein, 7 aa, synthetic construct
RGDANFG

SEQ ID NO: 27578 - protein, 7 aa, synthetic construct
RGDIELN

SEQ ID NO: 27579 - protein, 7 aa, synthetic construct
RGDIFNI

SEQ ID NO: 27580 - protein, 7 aa, synthetic construct
RGDIHQS

SEQ ID NO: 27581 - protein, 7 aa, synthetic construct
RGDIIHR

SEQ ID NO: 27582 - protein, 7 aa, synthetic construct
RGDIIHV

SEQ ID NO: 27583 - protein, 7 aa, synthetic construct
RGDIIQI

SEQ ID NO: 27584 - protein, 7 aa, synthetic construct
RGDIITT

SEQ ID NO: 27585 - protein, 7 aa, synthetic construct
RGDIKIL

SEQ ID NO: 27586 - protein, 7 aa, synthetic construct
RGDILQA

SEQ ID NO: 27587 - protein, 7 aa, synthetic construct
RGDINDI

SEQ ID NO: 27588 - protein, 7 aa, synthetic construct
RGDAAVS

SEQ ID NO: 27589 - protein, 7 aa, synthetic construct
RGDINVT

SEQ ID NO: 27590 - protein, 7 aa, synthetic construct
RGDIQEG

SEQ ID NO: 27591 - protein, 7 aa, synthetic construct
RGDIQIN

SEQ ID NO: 27592 - protein, 7 aa, synthetic construct
RGDIQVL

SEQ ID NO: 27593 - protein, 7 aa, synthetic construct
RGDIRRA

SEQ ID NO: 27594 - protein, 7 aa, synthetic construct
RGDISKD

SEQ ID NO: 27595 - protein, 7 aa, synthetic construct
RGDISLG

SEQ ID NO: 27596 - protein, 7 aa, synthetic construct
RGDITIF

SEQ ID NO: 27597 - protein, 7 aa, synthetic construct
RGDAQHD

SEQ ID NO: 27598 - protein, 7 aa, synthetic construct
RGDITQT

SEQ ID NO: 27599 - protein, 7 aa, synthetic construct
RGDITSV

SEQ ID NO: 27600 - protein, 7 aa, synthetic construct
RGDITTN

SEQ ID NO: 27601 - protein, 7 aa, synthetic construct
RGDIVAF

SEQ ID NO: 27602 - protein, 7 aa, synthetic construct
RGDIVDR

SEQ ID NO: 27603 - protein, 7 aa, synthetic construct
RGDIVEG

SEQ ID NO: 27604 - protein, 7 aa, synthetic construct
RGDKATF

SEQ ID NO: 27605 - protein, 7 aa, synthetic construct
RGDKDGR

SEQ ID NO: 27606 - protein, 7 aa, synthetic construct
RGDKDNT

SEQ ID NO: 27607 - protein, 7 aa, synthetic construct
RGDKELF

SEQ ID NO: 27608 - protein, 7 aa, synthetic construct
RGDKENF

SEQ ID NO: 27609 - protein, 7 aa, synthetic construct
RGDKFAI

SEQ ID NO: 27610 - protein, 7 aa, synthetic construct
RGDAQSE

SEQ ID NO: 27611 - protein, 7 aa, synthetic construct
RGDKFLT

SEQ ID NO: 27612 - protein, 7 aa, synthetic construct
RGDKFRG

SEQ ID NO: 27613 - protein, 7 aa, synthetic construct
RGDKGGD

SEQ ID NO: 27614 - protein, 7 aa, synthetic construct
RGDKGSA

SEQ ID NO: 27615 - protein, 7 aa, synthetic construct
RGDKHQE

SEQ ID NO: 27616 - protein, 7 aa, synthetic construct
RGDKIFD

SEQ ID NO: 27617 - protein, 7 aa, synthetic construct
RGDKIFS

SEQ ID NO: 27618 - protein, 7 aa, synthetic construct
RGDAREF

SEQ ID NO: 27619 - protein, 7 aa, synthetic construct
RGDKIKQ

SEQ ID NO: 27620 - protein, 7 aa, synthetic construct
RGDKILH

SEQ ID NO: 27621 - protein, 7 aa, synthetic construct
RGDKITA

SEQ ID NO: 27622 - protein, 7 aa, synthetic construct
RGDKLVA

SEQ ID NO: 27623 - protein, 7 aa, synthetic construct
RGDKLVS

SEQ ID NO: 27624 - protein, 7 aa, synthetic construct
RGDKQDG

SEQ ID NO: 27625 - protein, 7 aa, synthetic construct
RGDARQE

SEQ ID NO: 27626 - protein, 7 aa, synthetic construct
RGDKRTD

SEQ ID NO: 27627 - protein, 7 aa, synthetic construct
RGDKTDK

SEQ ID NO: 27628 - protein, 7 aa, synthetic construct
RGDKVAV

SEQ ID NO: 27629 - protein, 7 aa, synthetic construct
RGDKVGS

SEQ ID NO: 27630 - protein, 7 aa, synthetic construct
RGDKVLS

SEQ ID NO: 27631 - protein, 7 aa, synthetic construct
RGDLDEQ

SEQ ID NO: 27632 - protein, 7 aa, synthetic construct
RGDLDKG

SEQ ID NO: 27633 - protein, 7 aa, synthetic construct
RGDLDSA

SEQ ID NO: 27634 - protein, 7 aa, synthetic construct
RGDLFAQ

SEQ ID NO: 27635 - protein, 7 aa, synthetic construct
RGDLGID

SEQ ID NO: 27636 - protein, 7 aa, synthetic construct
RGDASKD

SEQ ID NO: 27637 - protein, 7 aa, synthetic construct
RGDLGRN

SEQ ID NO: 27638 - protein, 7 aa, synthetic construct
RGDLHEF

SEQ ID NO: 27639 - protein, 7 aa, synthetic construct
RGDLIAH

SEQ ID NO: 27640 - protein, 7 aa, synthetic construct
RGDLLHL

SEQ ID NO: 27641 - protein, 7 aa, synthetic construct
RGDLLTH

SEQ ID NO: 27642 - protein, 7 aa, synthetic construct
RGDLNNV

SEQ ID NO: 27643 - protein, 7 aa, synthetic construct
RGDLNSG

SEQ ID NO: 27644 - protein, 7 aa, synthetic construct
RGDLQLH

SEQ ID NO: 27645 - protein, 7 aa, synthetic construct
RGDLRQQ

SEQ ID NO: 27646 - protein, 7 aa, synthetic construct
RGDLSLA

SEQ ID NO: 27647 - protein, 7 aa, synthetic construct
RGDLSLE

SEQ ID NO: 27648 - protein, 7 aa, synthetic construct
RGDLSRH

SEQ ID NO: 27649 - protein, 7 aa, synthetic construct
RGDLVQS

SEQ ID NO: 27650 - protein, 7 aa, synthetic construct
RGDNASV

SEQ ID NO: 27651 - protein, 7 aa, synthetic construct
RGDNATQ

SEQ ID NO: 27652 - protein, 7 aa, synthetic construct
RGDADHI

SEQ ID NO: 27653 - protein, 7 aa, synthetic construct
RGDATQF

SEQ ID NO: 27654 - protein, 7 aa, synthetic construct
RGDNETN

SEQ ID NO: 27655 - protein, 7 aa, synthetic construct
RGDNFHE

SEQ ID NO: 27656 - protein, 7 aa, synthetic construct
RGDNFIT

SEQ ID NO: 27657 - protein, 7 aa, synthetic construct
RGDNGAL

SEQ ID NO: 27658 - protein, 7 aa, synthetic construct
RGDNHEA

SEQ ID NO: 27659 - protein, 7 aa, synthetic construct
RGDNHFN

SEQ ID NO: 27660 - protein, 7 aa, synthetic construct
RGDNIFK

SEQ ID NO: 27661 - protein, 7 aa, synthetic construct
RGDNKKF

SEQ ID NO: 27662 - protein, 7 aa, synthetic construct
RGDNKSD

SEQ ID NO: 27663 - protein, 7 aa, synthetic construct
RGDNNSA

SEQ ID NO: 27664 - protein, 7 aa, synthetic construct
RGDNQEK

SEQ ID NO: 27665 - protein, 7 aa, synthetic construct
RGDNQIK

SEQ ID NO: 27666 - protein, 7 aa, synthetic construct
RGDNRED

SEQ ID NO: 27667 - protein, 7 aa, synthetic construct
RGDNSIG

SEQ ID NO: 27668 - protein, 7 aa, synthetic construct
RGDNTEF

SEQ ID NO: 27669 - protein, 7 aa, synthetic construct
RGDNTKG

SEQ ID NO: 27670 - protein, 7 aa, synthetic construct
RGDAVSV

SEQ ID NO: 27671 - protein, 7 aa, synthetic construct
RGDQDLL

SEQ ID NO: 27672 - protein, 7 aa, synthetic construct
RGDQDLQ

SEQ ID NO: 27673 - protein, 7 aa, synthetic construct
RGDQGID

SEQ ID NO: 27674 - protein, 7 aa, synthetic construct
RGDQGIG

SEQ ID NO: 27675 - protein, 7 aa, synthetic construct
RGDQLDT

SEQ ID NO: 27676 - protein, 7 aa, synthetic construct
RGDQQKA

SEQ ID NO: 27677 - protein, 7 aa, synthetic construct
RGDQRGL

SEQ ID NO: 27678 - protein, 7 aa, synthetic construct
RGDQRNE

SEQ ID NO: 27679 - protein, 7 aa, synthetic construct
RGDQSEL

SEQ ID NO: 27680 - protein, 7 aa, synthetic construct
RGDQTLS

SEQ ID NO: 27681 - protein, 7 aa, synthetic construct
RGDQVEI

SEQ ID NO: 27682 - protein, 7 aa, synthetic construct
RGDQVFR

SEQ ID NO: 27683 - protein, 7 aa, synthetic construct
RGDRDFA

SEQ ID NO: 27684 - protein, 7 aa, synthetic construct
RGDRDQH

SEQ ID NO: 27685 - protein, 7 aa, synthetic construct
RGDREQN

SEQ ID NO: 27686 - protein, 7 aa, synthetic construct
RGDRFGE

SEQ ID NO: 27687 - protein, 7 aa, synthetic construct
RGDDDTI

SEQ ID NO: 27688 - protein, 7 aa, synthetic construct
RGDRHFG

SEQ ID NO: 27689 - protein, 7 aa, synthetic construct
RGDRHSF

SEQ ID NO: 27690 - protein, 7 aa, synthetic construct
RGDRLIF

SEQ ID NO: 27691 - protein, 7 aa, synthetic construct
RGDDENA

SEQ ID NO: 27692 - protein, 7 aa, synthetic construct
RGDRSRK

SEQ ID NO: 27693 - protein, 7 aa, synthetic construct
RGDRSRS

SEQ ID NO: 27694 - protein, 7 aa, synthetic construct
RGDRTND

SEQ ID NO: 27695 - protein, 7 aa, synthetic construct
RGDRTRE

SEQ ID NO: 27696 - protein, 7 aa, synthetic construct
RGDDEVA

SEQ ID NO: 27697 - protein, 7 aa, synthetic construct
RGDRVKE

SEQ ID NO: 27698 - protein, 7 aa, synthetic construct
RGDSAIQ

SEQ ID NO: 27699 - protein, 7 aa, synthetic construct
RGDSDAK

SEQ ID NO: 27700 - protein, 7 aa, synthetic construct
RGDSDAN

SEQ ID NO: 27701 - protein, 7 aa, synthetic construct
RGDSEGR

SEQ ID NO: 27702 - protein, 7 aa, synthetic construct
RGDSEIV

SEQ ID NO: 27703 - protein, 7 aa, synthetic construct
RGDSFSN

SEQ ID NO: 27704 - protein, 7 aa, synthetic construct
RGDDFIA

SEQ ID NO: 27705 - protein, 7 aa, synthetic construct
RGDSHEN

SEQ ID NO: 27706 - protein, 7 aa, synthetic construct
RGDSIGK

SEQ ID NO: 27707 - protein, 7 aa, synthetic construct
RGDSIGQ

SEQ ID NO: 27708 - protein, 7 aa, synthetic construct
RGDSKAH

SEQ ID NO: 27709 - protein, 7 aa, synthetic construct
RGDSLHE

SEQ ID NO: 27710 - protein, 7 aa, synthetic construct
RGDSLIH

SEQ ID NO: 27711 - protein, 7 aa, synthetic construct
RGDADTF

SEQ ID NO: 27712 - protein, 7 aa, synthetic construct
RGDDFTR

SEQ ID NO: 27713 - protein, 7 aa, synthetic construct
RGDSQAN

SEQ ID NO: 27714 - protein, 7 aa, synthetic construct
RGDSQDE

SEQ ID NO: 27715 - protein, 7 aa, synthetic construct
RGDSQVF

SEQ ID NO: 27716 - protein, 7 aa, synthetic construct
RGDSQVS

SEQ ID NO: 27717 - protein, 7 aa, synthetic construct
RGDDGEK

SEQ ID NO: 27718 - protein, 7 aa, synthetic construct
RGDSRVA

SEQ ID NO: 27719 - protein, 7 aa, synthetic construct
RGDSSDE

SEQ ID NO: 27720 - protein, 7 aa, synthetic construct
RGDSTEL

SEQ ID NO: 27721 - protein, 7 aa, synthetic construct
RGDSTKD

SEQ ID NO: 27722 - protein, 7 aa, synthetic construct
RGDADVA

SEQ ID NO: 27723 - protein, 7 aa, synthetic construct
RGDSVNF

SEQ ID NO: 27724 - protein, 7 aa, synthetic construct
RGDTAAH

SEQ ID NO: 27725 - protein, 7 aa, synthetic construct
RGDTAKA

SEQ ID NO: 27726 - protein, 7 aa, synthetic construct
RGDTDEA

SEQ ID NO: 27727 - protein, 7 aa, synthetic construct
RGDTDGH

SEQ ID NO: 27728 - protein, 7 aa, synthetic construct
RGDTDNH

SEQ ID NO: 27729 - protein, 7 aa, synthetic construct
RGDTEGA

SEQ ID NO: 27730 - protein, 7 aa, synthetic construct
RGDADVL

SEQ ID NO: 27731 - protein, 7 aa, synthetic construct
RGDTEQG

SEQ ID NO: 27732 - protein, 7 aa, synthetic construct
RGDTESI

SEQ ID NO: 27733 - protein, 7 aa, synthetic construct
RGDTEVH

SEQ ID NO: 27734 - protein, 7 aa, synthetic construct
RGDTFAF

SEQ ID NO: 27735 - protein, 7 aa, synthetic construct
RGDTFRH

SEQ ID NO: 27736 - protein, 7 aa, synthetic construct
RGDTGNF

SEQ ID NO: 27737 - protein, 7 aa, synthetic construct
RGDTGQK

SEQ ID NO: 27738 - protein, 7 aa, synthetic construct
RGDTIRS

SEQ ID NO: 27739 - protein, 7 aa, synthetic construct
RGDTIRT

SEQ ID NO: 27740 - protein, 7 aa, synthetic construct
RGDTITI

SEQ ID NO: 27741 - protein, 7 aa, synthetic construct
RGDTKQD

SEQ ID NO: 27742 - protein, 7 aa, synthetic construct
RGDTNFA

SEQ ID NO: 27743 - protein, 7 aa, synthetic construct
RGDTQAF

SEQ ID NO: 27744 - protein, 7 aa, synthetic construct
RGDTQSI

SEQ ID NO: 27745 - protein, 7 aa, synthetic construct
RGDTRDT

SEQ ID NO: 27746 - protein, 7 aa, synthetic construct
RGDTRED

SEQ ID NO: 27747 - protein, 7 aa, synthetic construct
RGDTSAK

SEQ ID NO: 27748 - protein, 7 aa, synthetic construct
RGDTSHQ

SEQ ID NO: 27749 - protein, 7 aa, synthetic construct
RGDTTNT

SEQ ID NO: 27750 - protein, 7 aa, synthetic construct
RGDTVLH

SEQ ID NO: 27751 - protein, 7 aa, synthetic construct
RGDTVRD

SEQ ID NO: 27752 - protein, 7 aa, synthetic construct
RGDDIAH

SEQ ID NO: 27753 - protein, 7 aa, synthetic construct
RGDVASF

SEQ ID NO: 27754 - protein, 7 aa, synthetic construct
RGDDIDG

SEQ ID NO: 27755 - protein, 7 aa, synthetic construct
RGDVDGH

SEQ ID NO: 27756 - protein, 7 aa, synthetic construct
RGDVDHA

SEQ ID NO: 27757 - protein, 7 aa, synthetic construct
RGDVDKR

SEQ ID NO: 27758 - protein, 7 aa, synthetic construct
RGDVEKH

SEQ ID NO: 27759 - protein, 7 aa, synthetic construct
RGDVERN

SEQ ID NO: 27760 - protein, 7 aa, synthetic construct
RGDVFDG

SEQ ID NO: 27761 - protein, 7 aa, synthetic construct
RGDVFHR

SEQ ID NO: 27762 - protein, 7 aa, synthetic construct
RGDVFTT

SEQ ID NO: 27763 - protein, 7 aa, synthetic construct
RGDDIKL

SEQ ID NO: 27764 - protein, 7 aa, synthetic construct
RGDVHER

SEQ ID NO: 27765 - protein, 7 aa, synthetic construct
RGDVHGA

SEQ ID NO: 27766 - protein, 7 aa, synthetic construct
RGDVHTF

SEQ ID NO: 27767 - protein, 7 aa, synthetic construct
RGDAEEK

SEQ ID NO: 27768 - protein, 7 aa, synthetic construct
RGDVKKE

SEQ ID NO: 27769 - protein, 7 aa, synthetic construct
RGDVKQR

SEQ ID NO: 27770 - protein, 7 aa, synthetic construct
RGDVKVD

SEQ ID NO: 27771 - protein, 7 aa, synthetic construct
RGDVLDN

SEQ ID NO: 27772 - protein, 7 aa, synthetic construct
RGDDIST

SEQ ID NO: 27773 - protein, 7 aa, synthetic construct
RGDVQEH

SEQ ID NO: 27774 - protein, 7 aa, synthetic construct
RGDVQRT

SEQ ID NO: 27775 - protein, 7 aa, synthetic construct
RGDVSDH

SEQ ID NO: 27776 - protein, 7 aa, synthetic construct
RGDVSIS

SEQ ID NO: 27777 - protein, 7 aa, synthetic construct
RGDVSRE

SEQ ID NO: 27778 - protein, 7 aa, synthetic construct
RGDVTLE

SEQ ID NO: 27779 - protein, 7 aa, synthetic construct
RGDVVAV

SEQ ID NO: 27780 - protein, 7 aa, synthetic construct
RGDVVVA

SEQ ID NO: 27781 - protein, 7 aa, synthetic construct
RGDVVVF

SEQ ID NO: 27782 - protein, 7 aa, synthetic construct
RGDDKTR

SEQ ID NO: 27783 - protein, 7 aa, synthetic construct
RGDDKVR

SEQ ID NO: 27784 - protein, 7 aa, synthetic construct
RGDDNDE

SEQ ID NO: 27785 - protein, 7 aa, synthetic construct
RGDDNEK

SEQ ID NO: 27786 - protein, 7 aa, synthetic construct
RGDAEIF

SEQ ID NO: 27787 - protein, 7 aa, synthetic construct
RGDDNQV

SEQ ID NO: 27788 - protein, 7 aa, synthetic construct
RGDDNVT

SEQ ID NO: 27789 - protein, 7 aa, synthetic construct
RGDDQRK

SEQ ID NO: 27790 - protein, 7 aa, synthetic construct
RGDDREV

SEQ ID NO: 27791 - protein, 7 aa, synthetic construct
RGDAAFT

SEQ ID NO: 27792 - protein, 7 aa, synthetic construct
RGDDRIK

SEQ ID NO: 27793 - protein, 7 aa, synthetic construct
RGDDSFR

SEQ ID NO: 27794 - protein, 7 aa, synthetic construct
RGDDSHA

SEQ ID NO: 27795 - protein, 7 aa, synthetic construct
RGDDSIV

SEQ ID NO: 27796 - protein, 7 aa, synthetic construct
RGDDSVI

SEQ ID NO: 27797 - protein, 7 aa, synthetic construct
RGDDVDS

SEQ ID NO: 27798 - protein, 7 aa, synthetic construct
RGDDVVS

SEQ ID NO: 27799 - protein, 7 aa, synthetic construct
RGDEAFQ

SEQ ID NO: 27800 - protein, 7 aa, synthetic construct
RGDEAHK

SEQ ID NO: 27801 - protein, 7 aa, synthetic construct
RGDEAIS

SEQ ID NO: 27802 - protein, 7 aa, synthetic construct
RGDEANN

SEQ ID NO: 27803 - protein, 7 aa, synthetic construct
RGDEEKD

SEQ ID NO: 27804 - protein, 7 aa, synthetic construct
RGDEERR

SEQ ID NO: 27805 - protein, 7 aa, synthetic construct
RGDEETI

SEQ ID NO: 27806 - protein, 7 aa, synthetic construct
RGDEHLV

SEQ ID NO: 27807 - protein, 7 aa, synthetic construct
RGDEHVE

SEQ ID NO: 27808 - protein, 7 aa, synthetic construct
RGDEIFQ

SEQ ID NO: 27809 - protein, 7 aa, synthetic construct
RGDAFNV

SEQ ID NO: 27810 - protein, 7 aa, synthetic construct
RGDEIQH

SEQ ID NO: 27811 - protein, 7 aa, synthetic construct
RGDEKGH

SEQ ID NO: 27812 - protein, 7 aa, synthetic construct
RGDELEL

SEQ ID NO: 27813 - protein, 7 aa, synthetic construct
RGDELKR

SEQ ID NO: 27814 - protein, 7 aa, synthetic construct
RGDENDK

SEQ ID NO: 27815 - protein, 7 aa, synthetic construct
RGDEQHH

SEQ ID NO: 27816 - protein, 7 aa, synthetic construct
RGDEREI

SEQ ID NO: 27817 - protein, 7 aa, synthetic construct
RGDERKH

SEQ ID NO: 27818 - protein, 7 aa, synthetic construct
RGDERKN

SEQ ID NO: 27819 - protein, 7 aa, synthetic construct
RGDERSE

SEQ ID NO: 27820 - protein, 7 aa, synthetic construct
RGDERTS

SEQ ID NO: 27821 - protein, 7 aa, synthetic construct
RGDESDR

SEQ ID NO: 27822 - protein, 7 aa, synthetic construct
RGDETQN

SEQ ID NO: 27823 - protein, 7 aa, synthetic construct
RGDETRK

SEQ ID NO: 27824 - protein, 7 aa, synthetic construct
RGDEVQN

SEQ ID NO: 27825 - protein, 7 aa, synthetic construct
RGDFAKG

SEQ ID NO: 27826 - protein, 7 aa, synthetic construct
RGDFDDR

SEQ ID NO: 27827 - protein, 7 aa, synthetic construct
RGDFDKQ

SEQ ID NO: 27828 - protein, 7 aa, synthetic construct
RGDFDTL

SEQ ID NO: 27829 - protein, 7 aa, synthetic construct
RGDFEDE

SEQ ID NO: 27830 - protein, 7 aa, synthetic construct
RGDFEGA

SEQ ID NO: 27831 - protein, 7 aa, synthetic construct
RGDFEHN

SEQ ID NO: 27832 - protein, 7 aa, synthetic construct
RGDFETI

SEQ ID NO: 27833 - protein, 7 aa, synthetic construct
RGDFFEK

SEQ ID NO: 27834 - protein, 7 aa, synthetic construct
RGDFFLA

SEQ ID NO: 27835 - protein, 7 aa, synthetic construct
RGDAGVH

SEQ ID NO: 27836 - protein, 7 aa, synthetic construct
RGDFHSE

SEQ ID NO: 27837 - protein, 7 aa, synthetic construct
RGDAHFQ

SEQ ID NO: 27838 - protein, 7 aa, synthetic construct
RGDFNGN

SEQ ID NO: 27839 - protein, 7 aa, synthetic construct
RGDFQTF

SEQ ID NO: 27840 - protein, 7 aa, synthetic construct
RGDFTAR

SEQ ID NO: 27841 - protein, 7 aa, synthetic construct
RGDFTFA

SEQ ID NO: 27842 - protein, 7 aa, synthetic construct
RGDFTFG

SEQ ID NO: 27843 - protein, 7 aa, synthetic construct
RGDFTTE

SEQ ID NO: 27844 - protein, 7 aa, synthetic construct
RGDGANG

SEQ ID NO: 27845 - protein, 7 aa, synthetic construct
RGDGDNS

SEQ ID NO: 27846 - protein, 7 aa, synthetic construct
RGDGDSN

SEQ ID NO: 27847 - protein, 7 aa, synthetic construct
RGDGDVG

SEQ ID NO: 27848 - protein, 7 aa, synthetic construct
RGDGESI

SEQ ID NO: 27849 - protein, 7 aa, synthetic construct
RGDGEVS

SEQ ID NO: 27850 - protein, 7 aa, synthetic construct
RGDGGDH

SEQ ID NO: 27851 - protein, 7 aa, synthetic construct
RGDGGLV

SEQ ID NO: 27852 - protein, 7 aa, synthetic construct
RGDAILL

SEQ ID NO: 27853 - protein, 7 aa, synthetic construct
RGDGIFR

SEQ ID NO: 27854 - protein, 7 aa, synthetic construct
RGDGIIF

SEQ ID NO: 27855 - protein, 7 aa, synthetic construct
RGDGKDH

SEQ ID NO: 27856 - protein, 7 aa, synthetic construct
RGDAAQD

SEQ ID NO: 27857 - protein, 7 aa, synthetic construct
RGDGLFR

SEQ ID NO: 27858 - protein, 7 aa, synthetic construct
RGDGNIL

SEQ ID NO: 27859 - protein, 7 aa, synthetic construct
RGDGQGD

SEQ ID NO: 27860 - protein, 7 aa, synthetic construct
RGDGRHL

SEQ ID NO: 27861 - protein, 7 aa, synthetic construct
RGDGSDS

SEQ ID NO: 27862 - protein, 7 aa, synthetic construct
RGDGSRR

SEQ ID NO: 27863 - protein, 7 aa, synthetic construct
RGDGTVK

SEQ ID NO: 27864 - protein, 7 aa, synthetic construct
RGDGVGN

SEQ ID NO: 27865 - protein, 7 aa, synthetic construct
RGDHANI

SEQ ID NO: 27866 - protein, 7 aa, synthetic construct
RGDHDEN

SEQ ID NO: 27867 - protein, 7 aa, synthetic construct
RGDHDRT

SEQ ID NO: 27868 - protein, 7 aa, synthetic construct
RGDHDTQ

SEQ ID NO: 27869 - protein, 7 aa, synthetic construct
RGDAKSE

SEQ ID NO: 27870 - protein, 7 aa, synthetic construct
RGDHGAA

SEQ ID NO: 27871 - protein, 7 aa, synthetic construct
RGDHGGD

SEQ ID NO: 27872 - protein, 7 aa, synthetic construct
RGDHKDT

SEQ ID NO: 27873 - protein, 7 aa, synthetic construct
RGDALFS

SEQ ID NO: 27874 - protein, 7 aa, synthetic construct
RGDHLAK

SEQ ID NO: 27875 - protein, 7 aa, synthetic construct
RGDHLGK

SEQ ID NO: 27876 - protein, 7 aa, synthetic construct
RGDHLRH

SEQ ID NO: 27877 - protein, 7 aa, synthetic construct
RGDHQNE

SEQ ID NO: 27878 - protein, 7 aa, synthetic construct
RGDHRHD

SEQ ID NO: 27879 - protein, 7 aa, synthetic construct
RGDHRIS

SEQ ID NO: 27880 - protein, 7 aa, synthetic construct
RGDHRTG

SEQ ID NO: 27881 - protein, 7 aa, synthetic construct
RGDHRVR

SEQ ID NO: 27882 - protein, 7 aa, synthetic construct
RGDALVR

SEQ ID NO: 27883 - protein, 7 aa, synthetic construct
RGDIADK

SEQ ID NO: 27884 - protein, 7 aa, synthetic construct
RGDIAIQ

SEQ ID NO: 27885 - protein, 7 aa, synthetic construct
RGDIDIQ

SEQ ID NO: 27886 - protein, 7 aa, synthetic construct
RGDIENA

SEQ ID NO: 27887 - protein, 7 aa, synthetic construct
RGDIFER

SEQ ID NO: 27888 - protein, 7 aa, synthetic construct
RGDANGT

SEQ ID NO: 27889 - protein, 7 aa, synthetic construct
RGDIFKA

SEQ ID NO: 27890 - protein, 7 aa, synthetic construct
RGDANKE

SEQ ID NO: 27891 - protein, 7 aa, synthetic construct
RGDIITK

SEQ ID NO: 27892 - protein, 7 aa, synthetic construct
RGDIIVT

SEQ ID NO: 27893 - protein, 7 aa, synthetic construct
RGDIKDA

SEQ ID NO: 27894 - protein, 7 aa, synthetic construct
RGDIKET

SEQ ID NO: 27895 - protein, 7 aa, synthetic construct
RGDIKFE

SEQ ID NO: 27896 - protein, 7 aa, synthetic construct
RGDINEN

SEQ ID NO: 27897 - protein, 7 aa, synthetic construct
RGDIREK

SEQ ID NO: 27898 - protein, 7 aa, synthetic construct
RGDISGG

SEQ ID NO: 27899 - protein, 7 aa, synthetic construct
RGDISQE

SEQ ID NO: 27900 - protein, 7 aa, synthetic construct
RGDITHD

SEQ ID NO: 27901 - protein, 7 aa, synthetic construct
RGDIVVQ

SEQ ID NO: 27902 - protein, 7 aa, synthetic construct
RGDKDAQ

SEQ ID NO: 27903 - protein, 7 aa, synthetic construct
RGDKDKN

SEQ ID NO: 27904 - protein, 7 aa, synthetic construct
RGDKDTG

SEQ ID NO: 27905 - protein, 7 aa, synthetic construct
RGDKEGN

SEQ ID NO: 27906 - protein, 7 aa, synthetic construct
RGDKEKN

SEQ ID NO: 27907 - protein, 7 aa, synthetic construct
RGDKFEV

SEQ ID NO: 27908 - protein, 7 aa, synthetic construct
RGDKHLL

SEQ ID NO: 27909 - protein, 7 aa, synthetic construct
RGDARDS

SEQ ID NO: 27910 - protein, 7 aa, synthetic construct
RGDKITQ

SEQ ID NO: 27911 - protein, 7 aa, synthetic construct
RGDKIVA

SEQ ID NO: 27912 - protein, 7 aa, synthetic construct
RGDKQNH

SEQ ID NO: 27913 - protein, 7 aa, synthetic construct
RGDKREA

SEQ ID NO: 27914 - protein, 7 aa, synthetic construct
RGDKVNT

SEQ ID NO: 27915 - protein, 7 aa, synthetic construct
RGDKVRE

SEQ ID NO: 27916 - protein, 7 aa, synthetic construct
RGDARVN

SEQ ID NO: 27917 - protein, 7 aa, synthetic construct
RGDKVTG

SEQ ID NO: 27918 - protein, 7 aa, synthetic construct
RGDLAFK

SEQ ID NO: 27919 - protein, 7 aa, synthetic construct
RGDLAHI

SEQ ID NO: 27920 - protein, 7 aa, synthetic construct
RGDLDAT

SEQ ID NO: 27921 - protein, 7 aa, synthetic construct
RGDLDFV

SEQ ID NO: 27922 - protein, 7 aa, synthetic construct
RGDLDRH

SEQ ID NO: 27923 - protein, 7 aa, synthetic construct
RGDLGDV

SEQ ID NO: 27924 - protein, 7 aa, synthetic construct
RGDLINN

SEQ ID NO: 27925 - protein, 7 aa, synthetic construct
RGDLLSQ

SEQ ID NO: 27926 - protein, 7 aa, synthetic construct
RGDLNKL

SEQ ID NO: 27927 - protein, 7 aa, synthetic construct
RGDLNQG

SEQ ID NO: 27928 - protein, 7 aa, synthetic construct
RGDASVN

SEQ ID NO: 27929 - protein, 7 aa, synthetic construct
RGDLSFK

SEQ ID NO: 27930 - protein, 7 aa, synthetic construct
RGDLSRF

SEQ ID NO: 27931 - protein, 7 aa, synthetic construct
RGDLTDQ

SEQ ID NO: 27932 - protein, 7 aa, synthetic construct
RGDLTVH

SEQ ID NO: 27933 - protein, 7 aa, synthetic construct
RGDNDHH

SEQ ID NO: 27934 - protein, 7 aa, synthetic construct
RGDATNS

SEQ ID NO: 27935 - protein, 7 aa, synthetic construct
RGDNDLV

SEQ ID NO: 27936 - protein, 7 aa, synthetic construct
RGDNEAK

SEQ ID NO: 27937 - protein, 7 aa, synthetic construct
RGDNEAV

SEQ ID NO: 27938 - protein, 7 aa, synthetic construct
RGDNGDQ

SEQ ID NO: 27939 - protein, 7 aa, synthetic construct
RGDNGIF

SEQ ID NO: 27940 - protein, 7 aa, synthetic construct
RGDNGIH

SEQ ID NO: 27941 - protein, 7 aa, synthetic construct
RGDNGSI

SEQ ID NO: 27942 - protein, 7 aa, synthetic construct
RGDNHVS

SEQ ID NO: 27943 - protein, 7 aa, synthetic construct
RGDNIKQ

SEQ ID NO: 27944 - protein, 7 aa, synthetic construct
RGDNKIT

SEQ ID NO: 27945 - protein, 7 aa, synthetic construct
RGDAVGF

SEQ ID NO: 27946 - protein, 7 aa, synthetic construct
RGDNKVN

SEQ ID NO: 27947 - protein, 7 aa, synthetic construct
RGDNNIF

SEQ ID NO: 27948 - protein, 7 aa, synthetic construct
RGDNNIT

SEQ ID NO: 27949 - protein, 7 aa, synthetic construct
RGDNNNN

SEQ ID NO: 27950 - protein, 7 aa, synthetic construct
RGDNQKF

SEQ ID NO: 27951 - protein, 7 aa, synthetic construct
RGDNRAT

SEQ ID NO: 27952 - protein, 7 aa, synthetic construct
RGDAVNS

SEQ ID NO: 27953 - protein, 7 aa, synthetic construct
RGDNSDQ

SEQ ID NO: 27954 - protein, 7 aa, synthetic construct
RGDNSLQ

SEQ ID NO: 27955 - protein, 7 aa, synthetic construct
RGDQDAQ

SEQ ID NO: 27956 - protein, 7 aa, synthetic construct
RGDQDLE

SEQ ID NO: 27957 - protein, 7 aa, synthetic construct
RGDDAES

SEQ ID NO: 27958 - protein, 7 aa, synthetic construct
RGDQDVD

SEQ ID NO: 27959 - protein, 7 aa, synthetic construct
RGDQEFH

SEQ ID NO: 27960 - protein, 7 aa, synthetic construct
RGDQFFN

SEQ ID NO: 27961 - protein, 7 aa, synthetic construct
RGDQGES

SEQ ID NO: 27962 - protein, 7 aa, synthetic construct
RGDQHAS

SEQ ID NO: 27963 - protein, 7 aa, synthetic construct
RGDQHFD

SEQ ID NO: 27964 - protein, 7 aa, synthetic construct
RGDQHHH

SEQ ID NO: 27965 - protein, 7 aa, synthetic construct
RGDQHIT

SEQ ID NO: 27966 - protein, 7 aa, synthetic construct
RGDQHQI

SEQ ID NO: 27967 - protein, 7 aa, synthetic construct
RGDQIVQ

SEQ ID NO: 27968 - protein, 7 aa, synthetic construct
RGDQKRA

SEQ ID NO: 27969 - protein, 7 aa, synthetic construct
RGDQLSL

SEQ ID NO: 27970 - protein, 7 aa, synthetic construct
RGDQNHN

SEQ ID NO: 27971 - protein, 7 aa, synthetic construct
RGDQQGT

SEQ ID NO: 27972 - protein, 7 aa, synthetic construct
RGDQSEH

SEQ ID NO: 27973 - protein, 7 aa, synthetic construct
RGDQSQN

SEQ ID NO: 27974 - protein, 7 aa, synthetic construct
RGDQVQH

SEQ ID NO: 27975 - protein, 7 aa, synthetic construct
RGDQVRH

SEQ ID NO: 27976 - protein, 7 aa, synthetic construct
RGDQVVE

SEQ ID NO: 27977 - protein, 7 aa, synthetic construct
RGDDEDD

SEQ ID NO: 27978 - protein, 7 aa, synthetic construct
RGDRITE

SEQ ID NO: 27979 - protein, 7 aa, synthetic construct
RGDRNLA

SEQ ID NO: 27980 - protein, 7 aa, synthetic construct
RGDRQDN

SEQ ID NO: 27981 - protein, 7 aa, synthetic construct
RGDRQHT

SEQ ID NO: 27982 - protein, 7 aa, synthetic construct
RGDRRAE

SEQ ID NO: 27983 - protein, 7 aa, synthetic construct
RGDRRIN

SEQ ID NO: 27984 - protein, 7 aa, synthetic construct
RGDRTDH

SEQ ID NO: 27985 - protein, 7 aa, synthetic construct
RGDRTEA

SEQ ID NO: 27986 - protein, 7 aa, synthetic construct
RGDRVDS

SEQ ID NO: 27987 - protein, 7 aa, synthetic construct
RGDRVRG

SEQ ID NO: 27988 - protein, 7 aa, synthetic construct
RGDADRV

SEQ ID NO: 27989 - protein, 7 aa, synthetic construct
RGDSALL

SEQ ID NO: 27990 - protein, 7 aa, synthetic construct
RGDSAQT

SEQ ID NO: 27991 - protein, 7 aa, synthetic construct
RGDSDNK

SEQ ID NO: 27992 - protein, 7 aa, synthetic construct
RGDSDNT

SEQ ID NO: 27993 - protein, 7 aa, synthetic construct
RGDSDSH

SEQ ID NO: 27994 - protein, 7 aa, synthetic construct
RGDSEAQ

SEQ ID NO: 27995 - protein, 7 aa, synthetic construct
RGDSEFF

SEQ ID NO: 27996 - protein, 7 aa, synthetic construct
RGDDFFS

SEQ ID NO: 27997 - protein, 7 aa, synthetic construct
RGDSEQR

SEQ ID NO: 27998 - protein, 7 aa, synthetic construct
RGDSFLH

SEQ ID NO: 27999 - protein, 7 aa, synthetic construct
RGDSFTS

SEQ ID NO: 28000 - protein, 7 aa, synthetic construct
RGDSHLL

SEQ ID NO: 28001 - protein, 7 aa, synthetic construct
RGDSIAL

SEQ ID NO: 28002 - protein, 7 aa, synthetic construct
RGDSIAN

SEQ ID NO: 28003 - protein, 7 aa, synthetic construct
RGDDFQL

SEQ ID NO: 28004 - protein, 7 aa, synthetic construct
RGDSKEQ

SEQ ID NO: 28005 - protein, 7 aa, synthetic construct
RGDSLIT

SEQ ID NO: 28006 - protein, 7 aa, synthetic construct
RGDSLQQ

SEQ ID NO: 28007 - protein, 7 aa, synthetic construct
RGDDFTN

SEQ ID NO: 28008 - protein, 7 aa, synthetic construct
RGDSNLL

SEQ ID NO: 28009 - protein, 7 aa, synthetic construct
RGDDGAA

SEQ ID NO: 28010 - protein, 7 aa, synthetic construct
RGDSQLF

SEQ ID NO: 28011 - protein, 7 aa, synthetic construct
RGDSSVN

SEQ ID NO: 28012 - protein, 7 aa, synthetic construct
RGDSTFI

SEQ ID NO: 28013 - protein, 7 aa, synthetic construct
RGDSTQN

SEQ ID NO: 28014 - protein, 7 aa, synthetic construct
RGDSVIA

SEQ ID NO: 28015 - protein, 7 aa, synthetic construct
RGDSVIR

SEQ ID NO: 28016 - protein, 7 aa, synthetic construct
RGDSVTF

SEQ ID NO: 28017 - protein, 7 aa, synthetic construct
RGDSVTG

SEQ ID NO: 28018 - protein, 7 aa, synthetic construct
RGDTAFH

SEQ ID NO: 28019 - protein, 7 aa, synthetic construct
RGDTAVG

SEQ ID NO: 28020 - protein, 7 aa, synthetic construct
RGDDGQA

SEQ ID NO: 28021 - protein, 7 aa, synthetic construct
RGDTDVN

SEQ ID NO: 28022 - protein, 7 aa, synthetic construct
RGDTEAR

SEQ ID NO: 28023 - protein, 7 aa, synthetic construct
RGDTEIF

SEQ ID NO: 28024 - protein, 7 aa, synthetic construct
RGDTFRF

SEQ ID NO: 28025 - protein, 7 aa, synthetic construct
RGDTGTN

SEQ ID NO: 28026 - protein, 7 aa, synthetic construct
RGDTHEF

SEQ ID NO: 28027 - protein, 7 aa, synthetic construct
RGDTHTT

SEQ ID NO: 28028 - protein, 7 aa, synthetic construct
RGDTIIH

SEQ ID NO: 28029 - protein, 7 aa, synthetic construct
RGDTITH

SEQ ID NO: 28030 - protein, 7 aa, synthetic construct
RGDTKSE

SEQ ID NO: 28031 - protein, 7 aa, synthetic construct
RGDTLEF

SEQ ID NO: 28032 - protein, 7 aa, synthetic construct
RGDTNQK

SEQ ID NO: 28033 - protein, 7 aa, synthetic construct
RGDTNVA

SEQ ID NO: 28034 - protein, 7 aa, synthetic construct
RGDTNVL

SEQ ID NO: 28035 - protein, 7 aa, synthetic construct
RGDTQAI

SEQ ID NO: 28036 - protein, 7 aa, synthetic construct
RGDTQDS

SEQ ID NO: 28037 - protein, 7 aa, synthetic construct
RGDTRDQ

SEQ ID NO: 28038 - protein, 7 aa, synthetic construct
RGDTTFS

SEQ ID NO: 28039 - protein, 7 aa, synthetic construct
RGDDHSI

SEQ ID NO: 28040 - protein, 7 aa, synthetic construct
RGDTTHH

SEQ ID NO: 28041 - protein, 7 aa, synthetic construct
RGDTTKH

SEQ ID NO: 28042 - protein, 7 aa, synthetic construct
RGDTTTL

SEQ ID NO: 28043 - protein, 7 aa, synthetic construct
RGDTVAR

SEQ ID NO: 28044 - protein, 7 aa, synthetic construct
RGDTVSK

SEQ ID NO: 28045 - protein, 7 aa, synthetic construct
RGDTVTG

SEQ ID NO: 28046 - protein, 7 aa, synthetic construct
RGDVAQQ

SEQ ID NO: 28047 - protein, 7 aa, synthetic construct
RGDVDHN

SEQ ID NO: 28048 - protein, 7 aa, synthetic construct
RGDVEQT

SEQ ID NO: 28049 - protein, 7 aa, synthetic construct
RGDDIGN

SEQ ID NO: 28050 - protein, 7 aa, synthetic construct
RGDVFFR

SEQ ID NO: 28051 - protein, 7 aa, synthetic construct
RGDVGRF

SEQ ID NO: 28052 - protein, 7 aa, synthetic construct
RGDVGSF

SEQ ID NO: 28053 - protein, 7 aa, synthetic construct
RGDVHTH

SEQ ID NO: 28054 - protein, 7 aa, synthetic construct
RGDVIAF

SEQ ID NO: 28055 - protein, 7 aa, synthetic construct
RGDVIHD

SEQ ID NO: 28056 - protein, 7 aa, synthetic construct
RGDVISG

SEQ ID NO: 28057 - protein, 7 aa, synthetic construct
RGDVKDL

SEQ ID NO: 28058 - protein, 7 aa, synthetic construct
RGDVKTG

SEQ ID NO: 28059 - protein, 7 aa, synthetic construct
RGDDISV

SEQ ID NO: 28060 - protein, 7 aa, synthetic construct
RGDVNFD

SEQ ID NO: 28061 - protein, 7 aa, synthetic construct
RGDVNSG

SEQ ID NO: 28062 - protein, 7 aa, synthetic construct
RGDVQIS

SEQ ID NO: 28063 - protein, 7 aa, synthetic construct
RGDVQTT

SEQ ID NO: 28064 - protein, 7 aa, synthetic construct
RGDVTDK

SEQ ID NO: 28065 - protein, 7 aa, synthetic construct
RGDVTET

SEQ ID NO: 28066 - protein, 7 aa, synthetic construct
RGDVTFN

SEQ ID NO: 28067 - protein, 7 aa, synthetic construct
RGDVTIL

SEQ ID NO: 28068 - protein, 7 aa, synthetic construct
RGDVVDT

SEQ ID NO: 28069 - protein, 7 aa, synthetic construct
RGDAEGN

SEQ ID NO: 28070 - protein, 7 aa, synthetic construct
RGDDLVI

SEQ ID NO: 28071 - protein, 7 aa, synthetic construct
RGDDNNI

SEQ ID NO: 28072 - protein, 7 aa, synthetic construct
RGDDNQE

SEQ ID NO: 28073 - protein, 7 aa, synthetic construct
RGDDNTD

SEQ ID NO: 28074 - protein, 7 aa, synthetic construct
RGDDNTI

SEQ ID NO: 28075 - protein, 7 aa, synthetic construct
RGDDQEL

SEQ ID NO: 28076 - protein, 7 aa, synthetic construct
RGDDQHR

SEQ ID NO: 28077 - protein, 7 aa, synthetic construct
RGDDQSF

SEQ ID NO: 28078 - protein, 7 aa, synthetic construct
RGDDRNE

SEQ ID NO: 28079 - protein, 7 aa, synthetic construct
RGDDRNK

SEQ ID NO: 28080 - protein, 7 aa, synthetic construct
RGDDRSN

SEQ ID NO: 28081 - protein, 7 aa, synthetic construct
RGDDSDF

SEQ ID NO: 28082 - protein, 7 aa, synthetic construct
RGDDSGT

SEQ ID NO: 28083 - protein, 7 aa, synthetic construct
RGDDTRI

SEQ ID NO: 28084 - protein, 7 aa, synthetic construct
RGDDTRN

SEQ ID NO: 28085 - protein, 7 aa, synthetic construct
RGDDVFN

SEQ ID NO: 28086 - protein, 7 aa, synthetic construct
RGDDVFR

SEQ ID NO: 28087 - protein, 7 aa, synthetic construct
RGDDVQN

SEQ ID NO: 28088 - protein, 7 aa, synthetic construct
RGDDVSH

SEQ ID NO: 28089 - protein, 7 aa, synthetic construct
RGDDVVG

SEQ ID NO: 28090 - protein, 7 aa, synthetic construct
RGDEAKI

SEQ ID NO: 28091 - protein, 7 aa, synthetic construct
RGDEARD

SEQ ID NO: 28092 - protein, 7 aa, synthetic construct
RGDEAVV

SEQ ID NO: 28093 - protein, 7 aa, synthetic construct
RGDAAGN

SEQ ID NO: 28094 - protein, 7 aa, synthetic construct
RGDEDSQ

SEQ ID NO: 28095 - protein, 7 aa, synthetic construct
RGDEEFI

SEQ ID NO: 28096 - protein, 7 aa, synthetic construct
RGDEGGS

SEQ ID NO: 28097 - protein, 7 aa, synthetic construct
RGDEGKD

SEQ ID NO: 28098 - protein, 7 aa, synthetic construct
RGDEGLK

SEQ ID NO: 28099 - protein, 7 aa, synthetic construct
RGDEGNI

SEQ ID NO: 28100 - protein, 7 aa, synthetic construct
RGDAFSI

SEQ ID NO: 28101 - protein, 7 aa, synthetic construct
RGDELRG

SEQ ID NO: 28102 - protein, 7 aa, synthetic construct
RGDENDE

SEQ ID NO: 28103 - protein, 7 aa, synthetic construct
RGDEQAL

SEQ ID NO: 28104 - protein, 7 aa, synthetic construct
RGDEQHG

SEQ ID NO: 28105 - protein, 7 aa, synthetic construct
RGDEQNG

SEQ ID NO: 28106 - protein, 7 aa, synthetic construct
RGDEQNN

SEQ ID NO: 28107 - protein, 7 aa, synthetic construct
RGDEREV

SEQ ID NO: 28108 - protein, 7 aa, synthetic construct
RGDERTR

SEQ ID NO: 28109 - protein, 7 aa, synthetic construct
RGDAGFA

SEQ ID NO: 28110 - protein, 7 aa, synthetic construct
RGDAGGA

SEQ ID NO: 28111 - protein, 7 aa, synthetic construct
RGDETSS

SEQ ID NO: 28112 - protein, 7 aa, synthetic construct
RGDEVIG

SEQ ID NO: 28113 - protein, 7 aa, synthetic construct
RGDEVLV

SEQ ID NO: 28114 - protein, 7 aa, synthetic construct
RGDEVQR

SEQ ID NO: 28115 - protein, 7 aa, synthetic construct
RGDFASL

SEQ ID NO: 28116 - protein, 7 aa, synthetic construct
RGDFDAS

SEQ ID NO: 28117 - protein, 7 aa, synthetic construct
RGDFDDT

SEQ ID NO: 28118 - protein, 7 aa, synthetic construct
RGDFDLQ

SEQ ID NO: 28119 - protein, 7 aa, synthetic construct
RGDFDTG

SEQ ID NO: 28120 - protein, 7 aa, synthetic construct
RGDFGGE

SEQ ID NO: 28121 - protein, 7 aa, synthetic construct
RGDFGII

SEQ ID NO: 28122 - protein, 7 aa, synthetic construct
RGDFHDL

SEQ ID NO: 28123 - protein, 7 aa, synthetic construct
RGDFIAL

SEQ ID NO: 28124 - protein, 7 aa, synthetic construct
RGDFIDE

SEQ ID NO: 28125 - protein, 7 aa, synthetic construct
RGDFIGK

SEQ ID NO: 28126 - protein, 7 aa, synthetic construct
RGDFKAH

SEQ ID NO: 28127 - protein, 7 aa, synthetic construct
RGDFKEF

SEQ ID NO: 28128 - protein, 7 aa, synthetic construct
RGDFNER

SEQ ID NO: 28129 - protein, 7 aa, synthetic construct
RGDFQHG

SEQ ID NO: 28130 - protein, 7 aa, synthetic construct
RGDFRFA

SEQ ID NO: 28131 - protein, 7 aa, synthetic construct
RGDFRIN

SEQ ID NO: 28132 - protein, 7 aa, synthetic construct
RGDFSDE

SEQ ID NO: 28133 - protein, 7 aa, synthetic construct
RGDFSLT

SEQ ID NO: 28134 - protein, 7 aa, synthetic construct
RGDFVIT

SEQ ID NO: 28135 - protein, 7 aa, synthetic construct
RGDAHVT

SEQ ID NO: 28136 - protein, 7 aa, synthetic construct
RGDGDII

SEQ ID NO: 28137 - protein, 7 aa, synthetic construct
RGDGENH

SEQ ID NO: 28138 - protein, 7 aa, synthetic construct
RGDGEST

SEQ ID NO: 28139 - protein, 7 aa, synthetic construct
RGDGGFG

SEQ ID NO: 28140 - protein, 7 aa, synthetic construct
RGDGGFS

SEQ ID NO: 28141 - protein, 7 aa, synthetic construct
RGDGGVH

SEQ ID NO: 28142 - protein, 7 aa, synthetic construct
RGDGHIH

SEQ ID NO: 28143 - protein, 7 aa, synthetic construct
RGDGIDL

SEQ ID NO: 28144 - protein, 7 aa, synthetic construct
RGDAING

SEQ ID NO: 28145 - protein, 7 aa, synthetic construct
RGDGILL

SEQ ID NO: 28146 - protein, 7 aa, synthetic construct
RGDGIRS

SEQ ID NO: 28147 - protein, 7 aa, synthetic construct
RGDGKIG

SEQ ID NO: 28148 - protein, 7 aa, synthetic construct
RGDGKVH

SEQ ID NO: 28149 - protein, 7 aa, synthetic construct
RGDGLSK

SEQ ID NO: 28150 - protein, 7 aa, synthetic construct
RGDGLTS

SEQ ID NO: 28151 - protein, 7 aa, synthetic construct
RGDGNAV

SEQ ID NO: 28152 - protein, 7 aa, synthetic construct
RGDGNNH

SEQ ID NO: 28153 - protein, 7 aa, synthetic construct
RGDGNNR

SEQ ID NO: 28154 - protein, 7 aa, synthetic construct
RGDGNRH

SEQ ID NO: 28155 - protein, 7 aa, synthetic construct
RGDGRLQ

SEQ ID NO: 28156 - protein, 7 aa, synthetic construct
RGDGRQG

SEQ ID NO: 28157 - protein, 7 aa, synthetic construct
RGDHAEL

SEQ ID NO: 28158 - protein, 7 aa, synthetic construct
RGDAKLH

SEQ ID NO: 28159 - protein, 7 aa, synthetic construct
RGDAKNN

SEQ ID NO: 28160 - protein, 7 aa, synthetic construct
RGDHDTH

SEQ ID NO: 28161 - protein, 7 aa, synthetic construct
RGDHEGG

SEQ ID NO: 28162 - protein, 7 aa, synthetic construct
RGDHEGH

SEQ ID NO: 28163 - protein, 7 aa, synthetic construct
RGDHFNI

SEQ ID NO: 28164 - protein, 7 aa, synthetic construct
RGDHFRS

SEQ ID NO: 28165 - protein, 7 aa, synthetic construct
RGDHFSH

SEQ ID NO: 28166 - protein, 7 aa, synthetic construct
RGDHGAG

SEQ ID NO: 28167 - protein, 7 aa, synthetic construct
RGDHGRD

SEQ ID NO: 28168 - protein, 7 aa, synthetic construct
RGDHHAV

SEQ ID NO: 28169 - protein, 7 aa, synthetic construct
RGDHHHS

SEQ ID NO: 28170 - protein, 7 aa, synthetic construct
RGDHHQQ

SEQ ID NO: 28171 - protein, 7 aa, synthetic construct
RGDAASD

SEQ ID NO: 28172 - protein, 7 aa, synthetic construct
RGDALFH

SEQ ID NO: 28173 - protein, 7 aa, synthetic construct
RGDHKLL

SEQ ID NO: 28174 - protein, 7 aa, synthetic construct
RGDHLSR

SEQ ID NO: 28175 - protein, 7 aa, synthetic construct
RGDHQDS

SEQ ID NO: 28176 - protein, 7 aa, synthetic construct
RGDHTFD

SEQ ID NO: 28177 - protein, 7 aa, synthetic construct
RGDHTFG

SEQ ID NO: 28178 - protein, 7 aa, synthetic construct
RGDHVHG

SEQ ID NO: 28179 - protein, 7 aa, synthetic construct
RGDIDFF

SEQ ID NO: 28180 - protein, 7 aa, synthetic construct
RGDIDGT

SEQ ID NO: 28181 - protein, 7 aa, synthetic construct
RGDIDKI

SEQ ID NO: 28182 - protein, 7 aa, synthetic construct
RGDIDSV

SEQ ID NO: 28183 - protein, 7 aa, synthetic construct
RGDIERI

SEQ ID NO: 28184 - protein, 7 aa, synthetic construct
RGDIFFF

SEQ ID NO: 28185 - protein, 7 aa, synthetic construct
RGDIFKS

SEQ ID NO: 28186 - protein, 7 aa, synthetic construct
RGDIFQR

SEQ ID NO: 28187 - protein, 7 aa, synthetic construct
RGDIGRH

SEQ ID NO: 28188 - protein, 7 aa, synthetic construct
RGDIHEL

SEQ ID NO: 28189 - protein, 7 aa, synthetic construct
RGDIHIS

SEQ ID NO: 28190 - protein, 7 aa, synthetic construct
RGDIIDG

SEQ ID NO: 28191 - protein, 7 aa, synthetic construct
RGDIIHG

SEQ ID NO: 28192 - protein, 7 aa, synthetic construct
RGDIIIN

SEQ ID NO: 28193 - protein, 7 aa, synthetic construct
RGDIKVL

SEQ ID NO: 28194 - protein, 7 aa, synthetic construct
RGDILIK

SEQ ID NO: 28195 - protein, 7 aa, synthetic construct
RGDIQDK

SEQ ID NO: 28196 - protein, 7 aa, synthetic construct
RGDISES

SEQ ID NO: 28197 - protein, 7 aa, synthetic construct
RGDAQGS

SEQ ID NO: 28198 - protein, 7 aa, synthetic construct
RGDKAEQ

SEQ ID NO: 28199 - protein, 7 aa, synthetic construct
RGDKAER

SEQ ID NO: 28200 - protein, 7 aa, synthetic construct
RGDKAND

SEQ ID NO: 28201 - protein, 7 aa, synthetic construct
RGDKDFL

SEQ ID NO: 28202 - protein, 7 aa, synthetic construct
RGDKEDS

SEQ ID NO: 28203 - protein, 7 aa, synthetic construct
RGDKFLH

SEQ ID NO: 28204 - protein, 7 aa, synthetic construct
RGDKFSE

SEQ ID NO: 28205 - protein, 7 aa, synthetic construct
RGDAQTT

SEQ ID NO: 28206 - protein, 7 aa, synthetic construct
RGDKIGV

SEQ ID NO: 28207 - protein, 7 aa, synthetic construct
RGDKLQG

SEQ ID NO: 28208 - protein, 7 aa, synthetic construct
RGDKNGS

SEQ ID NO: 28209 - protein, 7 aa, synthetic construct
RGDKQHH

SEQ ID NO: 28210 - protein, 7 aa, synthetic construct
RGDKRFG

SEQ ID NO: 28211 - protein, 7 aa, synthetic construct
RGDKTSN

SEQ ID NO: 28212 - protein, 7 aa, synthetic construct
RGDKTVL

SEQ ID NO: 28213 - protein, 7 aa, synthetic construct
RGDKVAH

SEQ ID NO: 28214 - protein, 7 aa, synthetic construct
RGDKVGE

SEQ ID NO: 28215 - protein, 7 aa, synthetic construct
RGDLAQH

SEQ ID NO: 28216 - protein, 7 aa, synthetic construct
RGDLDEK

SEQ ID NO: 28217 - protein, 7 aa, synthetic construct
RGDLDER

SEQ ID NO: 28218 - protein, 7 aa, synthetic construct
RGDLDQT

SEQ ID NO: 28219 - protein, 7 aa, synthetic construct
RGDLEKE

SEQ ID NO: 28220 - protein, 7 aa, synthetic construct
RGDLELS

SEQ ID NO: 28221 - protein, 7 aa, synthetic construct
RGDLENF

SEQ ID NO: 28222 - protein, 7 aa, synthetic construct
RGDLFEV

SEQ ID NO: 28223 - protein, 7 aa, synthetic construct
RGDLGLT

SEQ ID NO: 28224 - protein, 7 aa, synthetic construct
RGDLIAI

SEQ ID NO: 28225 - protein, 7 aa, synthetic construct
RGDLKGI

SEQ ID NO: 28226 - protein, 7 aa, synthetic construct
RGDLLDS

SEQ ID NO: 28227 - protein, 7 aa, synthetic construct
RGDLLHK

SEQ ID NO: 28228 - protein, 7 aa, synthetic construct
RGDLNQH

SEQ ID NO: 28229 - protein, 7 aa, synthetic construct
RGDLQHR

SEQ ID NO: 28230 - protein, 7 aa, synthetic construct
RGDLQVI

SEQ ID NO: 28231 - protein, 7 aa, synthetic construct
RGDLRVG

SEQ ID NO: 28232 - protein, 7 aa, synthetic construct
RGDLTFA

SEQ ID NO: 28233 - protein, 7 aa, synthetic construct
RGDLTKE

SEQ ID NO: 28234 - protein, 7 aa, synthetic construct
RGDLVLQ

SEQ ID NO: 28235 - protein, 7 aa, synthetic construct
RGDNADQ

SEQ ID NO: 28236 - protein, 7 aa, synthetic construct
RGDNAIL

SEQ ID NO: 28237 - protein, 7 aa, synthetic construct
RGDNAKA

SEQ ID NO: 28238 - protein, 7 aa, synthetic construct
RGDNDLS

SEQ ID NO: 28239 - protein, 7 aa, synthetic construct
RGDNDSH

SEQ ID NO: 28240 - protein, 7 aa, synthetic construct
RGDNEHE

SEQ ID NO: 28241 - protein, 7 aa, synthetic construct
RGDNENL

SEQ ID NO: 28242 - protein, 7 aa, synthetic construct
RGDNEVL

SEQ ID NO: 28243 - protein, 7 aa, synthetic construct
RGDNEVR

SEQ ID NO: 28244 - protein, 7 aa, synthetic construct
RGDNFFE

SEQ ID NO: 28245 - protein, 7 aa, synthetic construct
RGDATSI

SEQ ID NO: 28246 - protein, 7 aa, synthetic construct
RGDNGDH

SEQ ID NO: 28247 - protein, 7 aa, synthetic construct
RGDNHDR

SEQ ID NO: 28248 - protein, 7 aa, synthetic construct
RGDAVFH

SEQ ID NO: 28249 - protein, 7 aa, synthetic construct
RGDNLNQ

SEQ ID NO: 28250 - protein, 7 aa, synthetic construct
RGDNNTN

SEQ ID NO: 28251 - protein, 7 aa, synthetic construct
RGDNRIF

SEQ ID NO: 28252 - protein, 7 aa, synthetic construct
RGDNRNE

SEQ ID NO: 28253 - protein, 7 aa, synthetic construct
RGDNSAN

SEQ ID NO: 28254 - protein, 7 aa, synthetic construct
RGDNSKA

SEQ ID NO: 28255 - protein, 7 aa, synthetic construct
RGDAVRG

SEQ ID NO: 28256 - protein, 7 aa, synthetic construct
RGDNTFG

SEQ ID NO: 28257 - protein, 7 aa, synthetic construct
RGDNVGS

SEQ ID NO: 28258 - protein, 7 aa, synthetic construct
RGDQAHD

SEQ ID NO: 28259 - protein, 7 aa, synthetic construct
RGDDADH

SEQ ID NO: 28260 - protein, 7 aa, synthetic construct
RGDQEHI

SEQ ID NO: 28261 - protein, 7 aa, synthetic construct
RGDQESH

SEQ ID NO: 28262 - protein, 7 aa, synthetic construct
RGDQESS

SEQ ID NO: 28263 - protein, 7 aa, synthetic construct
RGDQFFL

SEQ ID NO: 28264 - protein, 7 aa, synthetic construct
RGDQFQD

SEQ ID NO: 28265 - protein, 7 aa, synthetic construct
RGDQFTQ

SEQ ID NO: 28266 - protein, 7 aa, synthetic construct
RGDQGDG

SEQ ID NO: 28267 - protein, 7 aa, synthetic construct
RGDQGTD

SEQ ID NO: 28268 - protein, 7 aa, synthetic construct
RGDQHIH

SEQ ID NO: 28269 - protein, 7 aa, synthetic construct
RGDQLHE

SEQ ID NO: 28270 - protein, 7 aa, synthetic construct
RGDQNAF

SEQ ID NO: 28271 - protein, 7 aa, synthetic construct
RGDQQTQ

SEQ ID NO: 28272 - protein, 7 aa, synthetic construct
RGDDDDH

SEQ ID NO: 28273 - protein, 7 aa, synthetic construct
RGDQRGD

SEQ ID NO: 28274 - protein, 7 aa, synthetic construct
RGDQSFD

SEQ ID NO: 28275 - protein, 7 aa, synthetic construct
RGDREEV

SEQ ID NO: 28276 - protein, 7 aa, synthetic construct
RGDREGE

SEQ ID NO: 28277 - protein, 7 aa, synthetic construct
RGDRFEL

SEQ ID NO: 28278 - protein, 7 aa, synthetic construct
RGDRFVK

SEQ ID NO: 28279 - protein, 7 aa, synthetic construct
RGDRKHS

SEQ ID NO: 28280 - protein, 7 aa, synthetic construct
RGDRNHH

SEQ ID NO: 28281 - protein, 7 aa, synthetic construct
RGDRNND

SEQ ID NO: 28282 - protein, 7 aa, synthetic construct
RGDRQES

SEQ ID NO: 28283 - protein, 7 aa, synthetic construct
RGDRQHF

SEQ ID NO: 28284 - protein, 7 aa, synthetic construct
RGDRQND

SEQ ID NO: 28285 - protein, 7 aa, synthetic construct
RGDRSED

SEQ ID NO: 28286 - protein, 7 aa, synthetic construct
RGDRTEF

SEQ ID NO: 28287 - protein, 7 aa, synthetic construct
RGDRVVE

SEQ ID NO: 28288 - protein, 7 aa, synthetic construct
RGDSDII

SEQ ID NO: 28289 - protein, 7 aa, synthetic construct
RGDSEVH

SEQ ID NO: 28290 - protein, 7 aa, synthetic construct
RGDSFDI

SEQ ID NO: 28291 - protein, 7 aa, synthetic construct
RGDSFTL

SEQ ID NO: 28292 - protein, 7 aa, synthetic construct
RGDSGSQ

SEQ ID NO: 28293 - protein, 7 aa, synthetic construct
RGDSHHA

SEQ ID NO: 28294 - protein, 7 aa, synthetic construct
RGDSHVN

SEQ ID NO: 28295 - protein, 7 aa, synthetic construct
RGDSKIF

SEQ ID NO: 28296 - protein, 7 aa, synthetic construct
RGDDFRG

SEQ ID NO: 28297 - protein, 7 aa, synthetic construct
RGDSKRQ

SEQ ID NO: 28298 - protein, 7 aa, synthetic construct
RGDSLDE

SEQ ID NO: 28299 - protein, 7 aa, synthetic construct
RGDSLIL

SEQ ID NO: 28300 - protein, 7 aa, synthetic construct
RGDSLQK

SEQ ID NO: 28301 - protein, 7 aa, synthetic construct
RGDDFTK

SEQ ID NO: 28302 - protein, 7 aa, synthetic construct
RGDSNEL

SEQ ID NO: 28303 - protein, 7 aa, synthetic construct
RGDSNTF

SEQ ID NO: 28304 - protein, 7 aa, synthetic construct
RGDDFVT

SEQ ID NO: 28305 - protein, 7 aa, synthetic construct
RGDSQDS

SEQ ID NO: 28306 - protein, 7 aa, synthetic construct
RGDSQFA

SEQ ID NO: 28307 - protein, 7 aa, synthetic construct
RGDSQNV

SEQ ID NO: 28308 - protein, 7 aa, synthetic construct
RGDSQRD

SEQ ID NO: 28309 - protein, 7 aa, synthetic construct
RGDSQVI

SEQ ID NO: 28310 - protein, 7 aa, synthetic construct
RGDSRLN

SEQ ID NO: 28311 - protein, 7 aa, synthetic construct
RGDDGGH

SEQ ID NO: 28312 - protein, 7 aa, synthetic construct
RGDSVFG

SEQ ID NO: 28313 - protein, 7 aa, synthetic construct
RGDSVGG

SEQ ID NO: 28314 - protein, 7 aa, synthetic construct
RGDSVGV

SEQ ID NO: 28315 - protein, 7 aa, synthetic construct
RGDDGIS

SEQ ID NO: 28316 - protein, 7 aa, synthetic construct
RGDTAAE

SEQ ID NO: 28317 - protein, 7 aa, synthetic construct
RGDTAFE

SEQ ID NO: 28318 - protein, 7 aa, synthetic construct
RGDTAFK

SEQ ID NO: 28319 - protein, 7 aa, synthetic construct
RGDDGKS

SEQ ID NO: 28320 - protein, 7 aa, synthetic construct
RGDTEFL

SEQ ID NO: 28321 - protein, 7 aa, synthetic construct
RGDDGRR

SEQ ID NO: 28322 - protein, 7 aa, synthetic construct
RGDTFNL

SEQ ID NO: 28323 - protein, 7 aa, synthetic construct
RGDTFRL

SEQ ID NO: 28324 - protein, 7 aa, synthetic construct
RGDTFSL

SEQ ID NO: 28325 - protein, 7 aa, synthetic construct
RGDTGIE

SEQ ID NO: 28326 - protein, 7 aa, synthetic construct
RGDTGIT

SEQ ID NO: 28327 - protein, 7 aa, synthetic construct
RGDTGQE

SEQ ID NO: 28328 - protein, 7 aa, synthetic construct
RGDTGVH

SEQ ID NO: 28329 - protein, 7 aa, synthetic construct
RGDTLFE

SEQ ID NO: 28330 - protein, 7 aa, synthetic construct
RGDDHHF

SEQ ID NO: 28331 - protein, 7 aa, synthetic construct
RGDDHHR

SEQ ID NO: 28332 - protein, 7 aa, synthetic construct
RGDAAFA

SEQ ID NO: 28333 - protein, 7 aa, synthetic construct
RGDTNTL

SEQ ID NO: 28334 - protein, 7 aa, synthetic construct
RGDTQIN

SEQ ID NO: 28335 - protein, 7 aa, synthetic construct
RGDTQNG

SEQ ID NO: 28336 - protein, 7 aa, synthetic construct
RGDTQVR

SEQ ID NO: 28337 - protein, 7 aa, synthetic construct
RGDTRIE

SEQ ID NO: 28338 - protein, 7 aa, synthetic construct
RGDDHNS

SEQ ID NO: 28339 - protein, 7 aa, synthetic construct
RGDTTKT

SEQ ID NO: 28340 - protein, 7 aa, synthetic construct
RGDTVAK

SEQ ID NO: 28341 - protein, 7 aa, synthetic construct
RGDTVFK

SEQ ID NO: 28342 - protein, 7 aa, synthetic construct
RGDTVVD

SEQ ID NO: 28343 - protein, 7 aa, synthetic construct
RGDVADK

SEQ ID NO: 28344 - protein, 7 aa, synthetic construct
RGDVAIV

SEQ ID NO: 28345 - protein, 7 aa, synthetic construct
RGDVAQL

SEQ ID NO: 28346 - protein, 7 aa, synthetic construct
RGDVDLH

SEQ ID NO: 28347 - protein, 7 aa, synthetic construct
RGDVEFF

SEQ ID NO: 28348 - protein, 7 aa, synthetic construct
RGDVFHN

SEQ ID NO: 28349 - protein, 7 aa, synthetic construct
RGDVGAE

SEQ ID NO: 28350 - protein, 7 aa, synthetic construct
RGDVGKD

SEQ ID NO: 28351 - protein, 7 aa, synthetic construct
RGDVGQE

SEQ ID NO: 28352 - protein, 7 aa, synthetic construct
RGDVHNN

SEQ ID NO: 28353 - protein, 7 aa, synthetic construct
RGDVIIE

SEQ ID NO: 28354 - protein, 7 aa, synthetic construct
RGDVIRS

SEQ ID NO: 28355 - protein, 7 aa, synthetic construct
RGDVLVE

SEQ ID NO: 28356 - protein, 7 aa, synthetic construct
RGDVNIA

SEQ ID NO: 28357 - protein, 7 aa, synthetic construct
RGDVNSR

SEQ ID NO: 28358 - protein, 7 aa, synthetic construct
RGDVSEG

SEQ ID NO: 28359 - protein, 7 aa, synthetic construct
RGDVTGT

SEQ ID NO: 28360 - protein, 7 aa, synthetic construct
RGDVVEQ

SEQ ID NO: 28361 - protein, 7 aa, synthetic construct
RGDDKSK

SEQ ID NO: 28362 - protein, 7 aa, synthetic construct
RGDDLFE

SEQ ID NO: 28363 - protein, 7 aa, synthetic construct
RGDDRHI

SEQ ID NO: 28364 - protein, 7 aa, synthetic construct
RGDDSEN

SEQ ID NO: 28365 - protein, 7 aa, synthetic construct
RGDDSGQ

SEQ ID NO: 28366 - protein, 7 aa, synthetic construct
RGDDSQF

SEQ ID NO: 28367 - protein, 7 aa, synthetic construct
RGDDTLN

SEQ ID NO: 28368 - protein, 7 aa, synthetic construct
RGDDVRE

SEQ ID NO: 28369 - protein, 7 aa, synthetic construct
RGDEALI

SEQ ID NO: 28370 - protein, 7 aa, synthetic construct
RGDEDAL

SEQ ID NO: 28371 - protein, 7 aa, synthetic construct
RGDEDFT

SEQ ID NO: 28372 - protein, 7 aa, synthetic construct
RGDEDTV

SEQ ID NO: 28373 - protein, 7 aa, synthetic construct
RGDEEFS

SEQ ID NO: 28374 - protein, 7 aa, synthetic construct
RGDAAGS

SEQ ID NO: 28375 - protein, 7 aa, synthetic construct
RGDEEKL

SEQ ID NO: 28376 - protein, 7 aa, synthetic construct
RGDEFAE

SEQ ID NO: 28377 - protein, 7 aa, synthetic construct
RGDEFEN

SEQ ID NO: 28378 - protein, 7 aa, synthetic construct
RGDEFRE

SEQ ID NO: 28379 - protein, 7 aa, synthetic construct
RGDEFTN

SEQ ID NO: 28380 - protein, 7 aa, synthetic construct
RGDEGRQ

SEQ ID NO: 28381 - protein, 7 aa, synthetic construct
RGDEHAE

SEQ ID NO: 28382 - protein, 7 aa, synthetic construct
RGDEHAQ

SEQ ID NO: 28383 - protein, 7 aa, synthetic construct
RGDEHGG

SEQ ID NO: 28384 - protein, 7 aa, synthetic construct
RGDEIKG

SEQ ID NO: 28385 - protein, 7 aa, synthetic construct
RGDEIKL

SEQ ID NO: 28386 - protein, 7 aa, synthetic construct
RGDEIKN

SEQ ID NO: 28387 - protein, 7 aa, synthetic construct
RGDEKFI

SEQ ID NO: 28388 - protein, 7 aa, synthetic construct
RGDAFQV

SEQ ID NO: 28389 - protein, 7 aa, synthetic construct
RGDEKTA

SEQ ID NO: 28390 - protein, 7 aa, synthetic construct
RGDELQD

SEQ ID NO: 28391 - protein, 7 aa, synthetic construct
RGDELTI

SEQ ID NO: 28392 - protein, 7 aa, synthetic construct
RGDERFG

SEQ ID NO: 28393 - protein, 7 aa, synthetic construct
RGDERNF

SEQ ID NO: 28394 - protein, 7 aa, synthetic construct
RGDEVDI

SEQ ID NO: 28395 - protein, 7 aa, synthetic construct
RGDEVIH

SEQ ID NO: 28396 - protein, 7 aa, synthetic construct
RGDEVIV

SEQ ID NO: 28397 - protein, 7 aa, synthetic construct
RGDEVRD

SEQ ID NO: 28398 - protein, 7 aa, synthetic construct
RGDFAEA

SEQ ID NO: 28399 - protein, 7 aa, synthetic construct
RGDFAGL

SEQ ID NO: 28400 - protein, 7 aa, synthetic construct
RGDFALG

SEQ ID NO: 28401 - protein, 7 aa, synthetic construct
RGDFANG

SEQ ID NO: 28402 - protein, 7 aa, synthetic construct
RGDFDET

SEQ ID NO: 28403 - protein, 7 aa, synthetic construct
RGDFDRI

SEQ ID NO: 28404 - protein, 7 aa, synthetic construct
RGDFEHG

SEQ ID NO: 28405 - protein, 7 aa, synthetic construct
RGDFELR

SEQ ID NO: 28406 - protein, 7 aa, synthetic construct
RGDFFDE

SEQ ID NO: 28407 - protein, 7 aa, synthetic construct
RGDFFGS

SEQ ID NO: 28408 - protein, 7 aa, synthetic construct
RGDFHFQ

SEQ ID NO: 28409 - protein, 7 aa, synthetic construct
RGDAHFV

SEQ ID NO: 28410 - protein, 7 aa, synthetic construct
RGDFKQE

SEQ ID NO: 28411 - protein, 7 aa, synthetic construct
RGDFLHA

SEQ ID NO: 28412 - protein, 7 aa, synthetic construct
RGDFLNR

SEQ ID NO: 28413 - protein, 7 aa, synthetic construct
RGDFLTH

SEQ ID NO: 28414 - protein, 7 aa, synthetic construct
RGDFNDN

SEQ ID NO: 28415 - protein, 7 aa, synthetic construct
RGDFQEQ

SEQ ID NO: 28416 - protein, 7 aa, synthetic construct
RGDFQKA

SEQ ID NO: 28417 - protein, 7 aa, synthetic construct
RGDFQSN

SEQ ID NO: 28418 - protein, 7 aa, synthetic construct
RGDAHLR

SEQ ID NO: 28419 - protein, 7 aa, synthetic construct
RGDFTDG

SEQ ID NO: 28420 - protein, 7 aa, synthetic construct
RGDFTQT

SEQ ID NO: 28421 - protein, 7 aa, synthetic construct
RGDAHTF

SEQ ID NO: 28422 - protein, 7 aa, synthetic construct
RGDGDNF

SEQ ID NO: 28423 - protein, 7 aa, synthetic construct
RGDGGII

SEQ ID NO: 28424 - protein, 7 aa, synthetic construct
RGDGGIS

SEQ ID NO: 28425 - protein, 7 aa, synthetic construct
RGDAANQ

SEQ ID NO: 28426 - protein, 7 aa, synthetic construct
RGDGHNG

SEQ ID NO: 28427 - protein, 7 aa, synthetic construct
RGDGHVH

SEQ ID NO: 28428 - protein, 7 aa, synthetic construct
RGDGKVQ

SEQ ID NO: 28429 - protein, 7 aa, synthetic construct
RGDGNTF

SEQ ID NO: 28430 - protein, 7 aa, synthetic construct
RGDGNTG

SEQ ID NO: 28431 - protein, 7 aa, synthetic construct
RGDAKDK

SEQ ID NO: 28432 - protein, 7 aa, synthetic construct
RGDGREE

SEQ ID NO: 28433 - protein, 7 aa, synthetic construct
RGDGSIE

SEQ ID NO: 28434 - protein, 7 aa, synthetic construct
RGDGSII

SEQ ID NO: 28435 - protein, 7 aa, synthetic construct
RGDGTSE

SEQ ID NO: 28436 - protein, 7 aa, synthetic construct
RGDHDGS

SEQ ID NO: 28437 - protein, 7 aa, synthetic construct
RGDHDHI

SEQ ID NO: 28438 - protein, 7 aa, synthetic construct
RGDHDLH

SEQ ID NO: 28439 - protein, 7 aa, synthetic construct
RGDHEVH

SEQ ID NO: 28440 - protein, 7 aa, synthetic construct
RGDHFDG

SEQ ID NO: 28441 - protein, 7 aa, synthetic construct
RGDHFGT

SEQ ID NO: 28442 - protein, 7 aa, synthetic construct
RGDHGAD

SEQ ID NO: 28443 - protein, 7 aa, synthetic construct
RGDHGHT

SEQ ID NO: 28444 - protein, 7 aa, synthetic construct
RGDHGTD

SEQ ID NO: 28445 - protein, 7 aa, synthetic construct
RGDHIGG

SEQ ID NO: 28446 - protein, 7 aa, synthetic construct
RGDHKII

SEQ ID NO: 28447 - protein, 7 aa, synthetic construct
RGDHLFT

SEQ ID NO: 28448 - protein, 7 aa, synthetic construct
RGDHNFH

SEQ ID NO: 28449 - protein, 7 aa, synthetic construct
RGDHQHS

SEQ ID NO: 28450 - protein, 7 aa, synthetic construct
RGDALLF

SEQ ID NO: 28451 - protein, 7 aa, synthetic construct
RGDALQV

SEQ ID NO: 28452 - protein, 7 aa, synthetic construct
RGDHSNG

SEQ ID NO: 28453 - protein, 7 aa, synthetic construct
RGDALSG

SEQ ID NO: 28454 - protein, 7 aa, synthetic construct
RGDHTFI

SEQ ID NO: 28455 - protein, 7 aa, synthetic construct
RGDHTFL

SEQ ID NO: 28456 - protein, 7 aa, synthetic construct
RGDHTHG

SEQ ID NO: 28457 - protein, 7 aa, synthetic construct
RGDHTRE

SEQ ID NO: 28458 - protein, 7 aa, synthetic construct
RGDHVFN

SEQ ID NO: 28459 - protein, 7 aa, synthetic construct
RGDHVLV

SEQ ID NO: 28460 - protein, 7 aa, synthetic construct
RGDIARD

SEQ ID NO: 28461 - protein, 7 aa, synthetic construct
RGDIDFQ

SEQ ID NO: 28462 - protein, 7 aa, synthetic construct
RGDIEEQ

SEQ ID NO: 28463 - protein, 7 aa, synthetic construct
RGDIEER

SEQ ID NO: 28464 - protein, 7 aa, synthetic construct
RGDIEGF

SEQ ID NO: 28465 - protein, 7 aa, synthetic construct
RGDIEIK

SEQ ID NO: 28466 - protein, 7 aa, synthetic construct
RGDIESQ

SEQ ID NO: 28467 - protein, 7 aa, synthetic construct
RGDIHDV

SEQ ID NO: 28468 - protein, 7 aa, synthetic construct
RGDIHND

SEQ ID NO: 28469 - protein, 7 aa, synthetic construct
RGDIIGT

SEQ ID NO: 28470 - protein, 7 aa, synthetic construct
RGDIILS

SEQ ID NO: 28471 - protein, 7 aa, synthetic construct
RGDIISI

SEQ ID NO: 28472 - protein, 7 aa, synthetic construct
RGDIKDQ

SEQ ID NO: 28473 - protein, 7 aa, synthetic construct
RGDIKRF

SEQ ID NO: 28474 - protein, 7 aa, synthetic construct
RGDIKTG

SEQ ID NO: 28475 - protein, 7 aa, synthetic construct
RGDILTK

SEQ ID NO: 28476 - protein, 7 aa, synthetic construct
RGDINAT

SEQ ID NO: 28477 - protein, 7 aa, synthetic construct
RGDINET

SEQ ID NO: 28478 - protein, 7 aa, synthetic construct
RGDINII

SEQ ID NO: 28479 - protein, 7 aa, synthetic construct
RGDIRTG

SEQ ID NO: 28480 - protein, 7 aa, synthetic construct
RGDISAN

SEQ ID NO: 28481 - protein, 7 aa, synthetic construct
RGDISIL

SEQ ID NO: 28482 - protein, 7 aa, synthetic construct
RGDITFS

SEQ ID NO: 28483 - protein, 7 aa, synthetic construct
RGDIVTE

SEQ ID NO: 28484 - protein, 7 aa, synthetic construct
RGDKEAA

SEQ ID NO: 28485 - protein, 7 aa, synthetic construct
RGDKEFE

SEQ ID NO: 28486 - protein, 7 aa, synthetic construct
RGDKEIR

SEQ ID NO: 28487 - protein, 7 aa, synthetic construct
RGDKHVS

SEQ ID NO: 28488 - protein, 7 aa, synthetic construct
RGDKIVS

SEQ ID NO: 28489 - protein, 7 aa, synthetic construct
RGDARFE

SEQ ID NO: 28490 - protein, 7 aa, synthetic construct
RGDKKEE

SEQ ID NO: 28491 - protein, 7 aa, synthetic construct
RGDKQVF

SEQ ID NO: 28492 - protein, 7 aa, synthetic construct
RGDKRIH

SEQ ID NO: 28493 - protein, 7 aa, synthetic construct
RGDKTEV

SEQ ID NO: 28494 - protein, 7 aa, synthetic construct
RGDKTTA

SEQ ID NO: 28495 - protein, 7 aa, synthetic construct
RGDKVHA

SEQ ID NO: 28496 - protein, 7 aa, synthetic construct
RGDKVLF

SEQ ID NO: 28497 - protein, 7 aa, synthetic construct
RGDLAQQ

SEQ ID NO: 28498 - protein, 7 aa, synthetic construct
RGDLASF

SEQ ID NO: 28499 - protein, 7 aa, synthetic construct
RGDLDET

SEQ ID NO: 28500 - protein, 7 aa, synthetic construct
RGDLDKI

SEQ ID NO: 28501 - protein, 7 aa, synthetic construct
RGDLDTI

SEQ ID NO: 28502 - protein, 7 aa, synthetic construct
RGDLEGD

SEQ ID NO: 28503 - protein, 7 aa, synthetic construct
RGDLFNN

SEQ ID NO: 28504 - protein, 7 aa, synthetic construct
RGDLFVQ

SEQ ID NO: 28505 - protein, 7 aa, synthetic construct
RGDLGKG

SEQ ID NO: 28506 - protein, 7 aa, synthetic construct
RGDLHDK

SEQ ID NO: 28507 - protein, 7 aa, synthetic construct
RGDLHLI

SEQ ID NO: 28508 - protein, 7 aa, synthetic construct
RGDLIFH

SEQ ID NO: 28509 - protein, 7 aa, synthetic construct
RGDLKHH

SEQ ID NO: 28510 - protein, 7 aa, synthetic construct
RGDLNIQ

SEQ ID NO: 28511 - protein, 7 aa, synthetic construct
RGDLNQK

SEQ ID NO: 28512 - protein, 7 aa, synthetic construct
RGDLNVG

SEQ ID NO: 28513 - protein, 7 aa, synthetic construct
RGDLQDH

SEQ ID NO: 28514 - protein, 7 aa, synthetic construct
RGDLQEH

SEQ ID NO: 28515 - protein, 7 aa, synthetic construct
RGDLQKL

SEQ ID NO: 28516 - protein, 7 aa, synthetic construct
RGDLRES

SEQ ID NO: 28517 - protein, 7 aa, synthetic construct
RGDLSGF

SEQ ID NO: 28518 - protein, 7 aa, synthetic construct
RGDLSIG

SEQ ID NO: 28519 - protein, 7 aa, synthetic construct
RGDLSRS

SEQ ID NO: 28520 - protein, 7 aa, synthetic construct
RGDLTDV

SEQ ID NO: 28521 - protein, 7 aa, synthetic construct
RGDLTHH

SEQ ID NO: 28522 - protein, 7 aa, synthetic construct
RGDLTKA

SEQ ID NO: 28523 - protein, 7 aa, synthetic construct
RGDLVHD

SEQ ID NO: 28524 - protein, 7 aa, synthetic construct
RGDLVNF

SEQ ID NO: 28525 - protein, 7 aa, synthetic construct
RGDNAVQ

SEQ ID NO: 28526 - protein, 7 aa, synthetic construct
RGDNEHF

SEQ ID NO: 28527 - protein, 7 aa, synthetic construct
RGDNEHI

SEQ ID NO: 28528 - protein, 7 aa, synthetic construct
RGDNENQ

SEQ ID NO: 28529 - protein, 7 aa, synthetic construct
RGDNFFS

SEQ ID NO: 28530 - protein, 7 aa, synthetic construct
RGDNFSH

SEQ ID NO: 28531 - protein, 7 aa, synthetic construct
RGDNGNH

SEQ ID NO: 28532 - protein, 7 aa, synthetic construct
RGDNHQF

SEQ ID NO: 28533 - protein, 7 aa, synthetic construct
RGDNIGT

SEQ ID NO: 28534 - protein, 7 aa, synthetic construct
RGDAVEL

SEQ ID NO: 28535 - protein, 7 aa, synthetic construct
RGDAVEN

SEQ ID NO: 28536 - protein, 7 aa, synthetic construct
RGDNIRR

SEQ ID NO: 28537 - protein, 7 aa, synthetic construct
RGDNISQ

SEQ ID NO: 28538 - protein, 7 aa, synthetic construct
RGDNITR

SEQ ID NO: 28539 - protein, 7 aa, synthetic construct
RGDNKKD

SEQ ID NO: 28540 - protein, 7 aa, synthetic construct
RGDNLGD

SEQ ID NO: 28541 - protein, 7 aa, synthetic construct
RGDNLIH

SEQ ID NO: 28542 - protein, 7 aa, synthetic construct
RGDAVHN

SEQ ID NO: 28543 - protein, 7 aa, synthetic construct
RGDNQVV

SEQ ID NO: 28544 - protein, 7 aa, synthetic construct
RGDNTAV

SEQ ID NO: 28545 - protein, 7 aa, synthetic construct
RGDNTGV

SEQ ID NO: 28546 - protein, 7 aa, synthetic construct
RGDNVEE

SEQ ID NO: 28547 - protein, 7 aa, synthetic construct
RGDNVGH

SEQ ID NO: 28548 - protein, 7 aa, synthetic construct
RGDNVLK

SEQ ID NO: 28549 - protein, 7 aa, synthetic construct
RGDQAAE

SEQ ID NO: 28550 - protein, 7 aa, synthetic construct
RGDQDKD

SEQ ID NO: 28551 - protein, 7 aa, synthetic construct
RGDQEAI

SEQ ID NO: 28552 - protein, 7 aa, synthetic construct
RGDQEEV

SEQ ID NO: 28553 - protein, 7 aa, synthetic construct
RGDQEGG

SEQ ID NO: 28554 - protein, 7 aa, synthetic construct
RGDQFFV

SEQ ID NO: 28555 - protein, 7 aa, synthetic construct
RGDQFNS

SEQ ID NO: 28556 - protein, 7 aa, synthetic construct
RGDQHNE

SEQ ID NO: 28557 - protein, 7 aa, synthetic construct
RGDDANN

SEQ ID NO: 28558 - protein, 7 aa, synthetic construct
RGDQINH

SEQ ID NO: 28559 - protein, 7 aa, synthetic construct
RGDQIQV

SEQ ID NO: 28560 - protein, 7 aa, synthetic construct
RGDDARN

SEQ ID NO: 28561 - protein, 7 aa, synthetic construct
RGDQLQD

SEQ ID NO: 28562 - protein, 7 aa, synthetic construct
RGDQNGS

SEQ ID NO: 28563 - protein, 7 aa, synthetic construct
RGDQQGL

SEQ ID NO: 28564 - protein, 7 aa, synthetic construct
RGDQRAE

SEQ ID NO: 28565 - protein, 7 aa, synthetic construct
RGDQSFL

SEQ ID NO: 28566 - protein, 7 aa, synthetic construct
RGDQTIR

SEQ ID NO: 28567 - protein, 7 aa, synthetic construct
RGDQTKD

SEQ ID NO: 28568 - protein, 7 aa, synthetic construct
RGDDDHK

SEQ ID NO: 28569 - protein, 7 aa, synthetic construct
RGDADNL

SEQ ID NO: 28570 - protein, 7 aa, synthetic construct
RGDQVES

SEQ ID NO: 28571 - protein, 7 aa, synthetic construct
RGDRDSE

SEQ ID NO: 28572 - protein, 7 aa, synthetic construct
RGDDDRV

SEQ ID NO: 28573 - protein, 7 aa, synthetic construct
RGDRFDI

SEQ ID NO: 28574 - protein, 7 aa, synthetic construct
RGDDDTG

SEQ ID NO: 28575 - protein, 7 aa, synthetic construct
RGDRIDG

SEQ ID NO: 28576 - protein, 7 aa, synthetic construct
RGDRLLD

SEQ ID NO: 28577 - protein, 7 aa, synthetic construct
RGDRLQF

SEQ ID NO: 28578 - protein, 7 aa, synthetic construct
RGDRTAG

SEQ ID NO: 28579 - protein, 7 aa, synthetic construct
RGDSAHK

SEQ ID NO: 28580 - protein, 7 aa, synthetic construct
RGDSDAQ

SEQ ID NO: 28581 - protein, 7 aa, synthetic construct
RGDSDFL

SEQ ID NO: 28582 - protein, 7 aa, synthetic construct
RGDSEDS

SEQ ID NO: 28583 - protein, 7 aa, synthetic construct
RGDDFGK

SEQ ID NO: 28584 - protein, 7 aa, synthetic construct
RGDSFEQ

SEQ ID NO: 28585 - protein, 7 aa, synthetic construct
RGDSGQT

SEQ ID NO: 28586 - protein, 7 aa, synthetic construct
RGDSHIK

SEQ ID NO: 28587 - protein, 7 aa, synthetic construct
RGDSILF

SEQ ID NO: 28588 - protein, 7 aa, synthetic construct
RGDDFNS

SEQ ID NO: 28589 - protein, 7 aa, synthetic construct
RGDSITK

SEQ ID NO: 28590 - protein, 7 aa, synthetic construct
RGDDFRH

SEQ ID NO: 28591 - protein, 7 aa, synthetic construct
RGDSNVK

SEQ ID NO: 28592 - protein, 7 aa, synthetic construct
RGDSQGN

SEQ ID NO: 28593 - protein, 7 aa, synthetic construct
RGDSQRQ

SEQ ID NO: 28594 - protein, 7 aa, synthetic construct
RGDSTDS

SEQ ID NO: 28595 - protein, 7 aa, synthetic construct
RGDSTFH

SEQ ID NO: 28596 - protein, 7 aa, synthetic construct
RGDDGHI

SEQ ID NO: 28597 - protein, 7 aa, synthetic construct
RGDSTQS

SEQ ID NO: 28598 - protein, 7 aa, synthetic construct
RGDTAAS

SEQ ID NO: 28599 - protein, 7 aa, synthetic construct
RGDTAEH

SEQ ID NO: 28600 - protein, 7 aa, synthetic construct
RGDTAFD

SEQ ID NO: 28601 - protein, 7 aa, synthetic construct
RGDDGKT

SEQ ID NO: 28602 - protein, 7 aa, synthetic construct
RGDTASH

SEQ ID NO: 28603 - protein, 7 aa, synthetic construct
RGDTDNF

SEQ ID NO: 28604 - protein, 7 aa, synthetic construct
RGDTDTL

SEQ ID NO: 28605 - protein, 7 aa, synthetic construct
RGDDGQH

SEQ ID NO: 28606 - protein, 7 aa, synthetic construct
RGDDGRG

SEQ ID NO: 28607 - protein, 7 aa, synthetic construct
RGDTFGR

SEQ ID NO: 28608 - protein, 7 aa, synthetic construct
RGDTFLH

SEQ ID NO: 28609 - protein, 7 aa, synthetic construct
RGDTFQR

SEQ ID NO: 28610 - protein, 7 aa, synthetic construct
RGDTGGS

SEQ ID NO: 28611 - protein, 7 aa, synthetic construct
RGDTGVT

SEQ ID NO: 28612 - protein, 7 aa, synthetic construct
RGDDHAQ

SEQ ID NO: 28613 - protein, 7 aa, synthetic construct
RGDDHAS

SEQ ID NO: 28614 - protein, 7 aa, synthetic construct
RGDTHVF

SEQ ID NO: 28615 - protein, 7 aa, synthetic construct
RGDTKDS

SEQ ID NO: 28616 - protein, 7 aa, synthetic construct
RGDTLAH

SEQ ID NO: 28617 - protein, 7 aa, synthetic construct
RGDTLKH

SEQ ID NO: 28618 - protein, 7 aa, synthetic construct
RGDTNLT

SEQ ID NO: 28619 - protein, 7 aa, synthetic construct
RGDDHQE

SEQ ID NO: 28620 - protein, 7 aa, synthetic construct
RGDTSNH

SEQ ID NO: 28621 - protein, 7 aa, synthetic construct
RGDTTAK

SEQ ID NO: 28622 - protein, 7 aa, synthetic construct
RGDTTLN

SEQ ID NO: 28623 - protein, 7 aa, synthetic construct
RGDTVAN

SEQ ID NO: 28624 - protein, 7 aa, synthetic construct
RGDTVFA

SEQ ID NO: 28625 - protein, 7 aa, synthetic construct
RGDTVFN

SEQ ID NO: 28626 - protein, 7 aa, synthetic construct
RGDVAGF

SEQ ID NO: 28627 - protein, 7 aa, synthetic construct
RGDVEKG

SEQ ID NO: 28628 - protein, 7 aa, synthetic construct
RGDVEQD

SEQ ID NO: 28629 - protein, 7 aa, synthetic construct
RGDVFHA

SEQ ID NO: 28630 - protein, 7 aa, synthetic construct
RGDVFNQ

SEQ ID NO: 28631 - protein, 7 aa, synthetic construct
RGDDIHT

SEQ ID NO: 28632 - protein, 7 aa, synthetic construct
RGDVGFL

SEQ ID NO: 28633 - protein, 7 aa, synthetic construct
RGDVGHN

SEQ ID NO: 28634 - protein, 7 aa, synthetic construct
RGDVGKQ

SEQ ID NO: 28635 - protein, 7 aa, synthetic construct
RGDVIEL

SEQ ID NO: 28636 - protein, 7 aa, synthetic construct
RGDVLEN

SEQ ID NO: 28637 - protein, 7 aa, synthetic construct
RGDVLHR

SEQ ID NO: 28638 - protein, 7 aa, synthetic construct
RGDVLLS

SEQ ID NO: 28639 - protein, 7 aa, synthetic construct
RGDVNNI

SEQ ID NO: 28640 - protein, 7 aa, synthetic construct
RGDVQLG

SEQ ID NO: 28641 - protein, 7 aa, synthetic construct
RGDDKAT

SEQ ID NO: 28642 - protein, 7 aa, synthetic construct
RGDDKDV

SEQ ID NO: 28643 - protein, 7 aa, synthetic construct
RGDDKFK

SEQ ID NO: 28644 - protein, 7 aa, synthetic construct
RGDVTSA

SEQ ID NO: 28645 - protein, 7 aa, synthetic construct
RGDDKKV

SEQ ID NO: 28646 - protein, 7 aa, synthetic construct
RGDDNIV

SEQ ID NO: 28647 - protein, 7 aa, synthetic construct
RGDAEKD

SEQ ID NO: 28648 - protein, 7 aa, synthetic construct
RGDDQAQ

SEQ ID NO: 28649 - protein, 7 aa, synthetic construct
RGDDQDR

SEQ ID NO: 28650 - protein, 7 aa, synthetic construct
RGDDQQV

SEQ ID NO: 28651 - protein, 7 aa, synthetic construct
RGDDRHH

SEQ ID NO: 28652 - protein, 7 aa, synthetic construct
RGDDRRK

SEQ ID NO: 28653 - protein, 7 aa, synthetic construct
RGDDRSS

SEQ ID NO: 28654 - protein, 7 aa, synthetic construct
RGDDSDV

SEQ ID NO: 28655 - protein, 7 aa, synthetic construct
RGDDSFS

SEQ ID NO: 28656 - protein, 7 aa, synthetic construct
RGDDSKK

SEQ ID NO: 28657 - protein, 7 aa, synthetic construct
RGDDTHI

SEQ ID NO: 28658 - protein, 7 aa, synthetic construct
RGDDTSS

SEQ ID NO: 28659 - protein, 7 aa, synthetic construct
RGDDVSQ

SEQ ID NO: 28660 - protein, 7 aa, synthetic construct
RGDDVTE

SEQ ID NO: 28661 - protein, 7 aa, synthetic construct
RGDEDRG

SEQ ID NO: 28662 - protein, 7 aa, synthetic construct
RGDEFGT

SEQ ID NO: 28663 - protein, 7 aa, synthetic construct
RGDEFRH

SEQ ID NO: 28664 - protein, 7 aa, synthetic construct
RGDEGEN

SEQ ID NO: 28665 - protein, 7 aa, synthetic construct
RGDAAHD

SEQ ID NO: 28666 - protein, 7 aa, synthetic construct
RGDEHDI

SEQ ID NO: 28667 - protein, 7 aa, synthetic construct
RGDEHEN

SEQ ID NO: 28668 - protein, 7 aa, synthetic construct
RGDEIDG

SEQ ID NO: 28669 - protein, 7 aa, synthetic construct
RGDEIEE

SEQ ID NO: 28670 - protein, 7 aa, synthetic construct
RGDEIGR

SEQ ID NO: 28671 - protein, 7 aa, synthetic construct
RGDEKSQ

SEQ ID NO: 28672 - protein, 7 aa, synthetic construct
RGDELLK

SEQ ID NO: 28673 - protein, 7 aa, synthetic construct
RGDENKF

SEQ ID NO: 28674 - protein, 7 aa, synthetic construct
RGDENSN

SEQ ID NO: 28675 - protein, 7 aa, synthetic construct
RGDERIG

SEQ ID NO: 28676 - protein, 7 aa, synthetic construct
RGDERLG

SEQ ID NO: 28677 - protein, 7 aa, synthetic construct
RGDERLH

SEQ ID NO: 28678 - protein, 7 aa, synthetic construct
RGDESGV

SEQ ID NO: 28679 - protein, 7 aa, synthetic construct
RGDESQK

SEQ ID NO: 28680 - protein, 7 aa, synthetic construct
RGDESVE

SEQ ID NO: 28681 - protein, 7 aa, synthetic construct
RGDETKL

SEQ ID NO: 28682 - protein, 7 aa, synthetic construct
RGDEVGK

SEQ ID NO: 28683 - protein, 7 aa, synthetic construct
RGDEVTH

SEQ ID NO: 28684 - protein, 7 aa, synthetic construct
RGDFDSN

SEQ ID NO: 28685 - protein, 7 aa, synthetic construct
RGDFEVN

SEQ ID NO: 28686 - protein, 7 aa, synthetic construct
RGDFFDS

SEQ ID NO: 28687 - protein, 7 aa, synthetic construct
RGDAHDS

SEQ ID NO: 28688 - protein, 7 aa, synthetic construct
RGDFIIA

SEQ ID NO: 28689 - protein, 7 aa, synthetic construct
RGDFIQV

SEQ ID NO: 28690 - protein, 7 aa, synthetic construct
RGDFLIK

SEQ ID NO: 28691 - protein, 7 aa, synthetic construct
RGDFLTT

SEQ ID NO: 28692 - protein, 7 aa, synthetic construct
RGDFNAN

SEQ ID NO: 28693 - protein, 7 aa, synthetic construct
RGDFNDE

SEQ ID NO: 28694 - protein, 7 aa, synthetic construct
RGDFNNA

SEQ ID NO: 28695 - protein, 7 aa, synthetic construct
RGDFQGQ

SEQ ID NO: 28696 - protein, 7 aa, synthetic construct
RGDFQIR

SEQ ID NO: 28697 - protein, 7 aa, synthetic construct
RGDFQVV

SEQ ID NO: 28698 - protein, 7 aa, synthetic construct
RGDFSDS

SEQ ID NO: 28699 - protein, 7 aa, synthetic construct
RGDFSED

SEQ ID NO: 28700 - protein, 7 aa, synthetic construct
RGDFSEF

SEQ ID NO: 28701 - protein, 7 aa, synthetic construct
RGDFTEI

SEQ ID NO: 28702 - protein, 7 aa, synthetic construct
RGDFVLE

SEQ ID NO: 28703 - protein, 7 aa, synthetic construct
RGDFVQE

SEQ ID NO: 28704 - protein, 7 aa, synthetic construct
RGDFVVG

SEQ ID NO: 28705 - protein, 7 aa, synthetic construct
RGDGAAE

SEQ ID NO: 28706 - protein, 7 aa, synthetic construct
RGDGAVA

SEQ ID NO: 28707 - protein, 7 aa, synthetic construct
RGDGFSA

SEQ ID NO: 28708 - protein, 7 aa, synthetic construct
RGDGGEF

SEQ ID NO: 28709 - protein, 7 aa, synthetic construct
RGDGGND

SEQ ID NO: 28710 - protein, 7 aa, synthetic construct
RGDGGNT

SEQ ID NO: 28711 - protein, 7 aa, synthetic construct
RGDGGQA

SEQ ID NO: 28712 - protein, 7 aa, synthetic construct
RGDGHGG

SEQ ID NO: 28713 - protein, 7 aa, synthetic construct
RGDGHQD

SEQ ID NO: 28714 - protein, 7 aa, synthetic construct
RGDGHRE

SEQ ID NO: 28715 - protein, 7 aa, synthetic construct
RGDGIDT

SEQ ID NO: 28716 - protein, 7 aa, synthetic construct
RGDGLDT

SEQ ID NO: 28717 - protein, 7 aa, synthetic construct
RGDGNDH

SEQ ID NO: 28718 - protein, 7 aa, synthetic construct
RGDGNEG

SEQ ID NO: 28719 - protein, 7 aa, synthetic construct
RGDGNIH

SEQ ID NO: 28720 - protein, 7 aa, synthetic construct
RGDGNQT

SEQ ID NO: 28721 - protein, 7 aa, synthetic construct
RGDGQEQ

SEQ ID NO: 28722 - protein, 7 aa, synthetic construct
RGDGQFT

SEQ ID NO: 28723 - protein, 7 aa, synthetic construct
RGDGQSK

SEQ ID NO: 28724 - protein, 7 aa, synthetic construct
RGDGQTN

SEQ ID NO: 28725 - protein, 7 aa, synthetic construct
RGDGRSD

SEQ ID NO: 28726 - protein, 7 aa, synthetic construct
RGDAKGG

SEQ ID NO: 28727 - protein, 7 aa, synthetic construct
RGDGTGA

SEQ ID NO: 28728 - protein, 7 aa, synthetic construct
RGDGTGD

SEQ ID NO: 28729 - protein, 7 aa, synthetic construct
RGDGTIK

SEQ ID NO: 28730 - protein, 7 aa, synthetic construct
RGDGTLT

SEQ ID NO: 28731 - protein, 7 aa, synthetic construct
RGDGVGE

SEQ ID NO: 28732 - protein, 7 aa, synthetic construct
RGDGVIS

SEQ ID NO: 28733 - protein, 7 aa, synthetic construct
RGDHDTR

SEQ ID NO: 28734 - protein, 7 aa, synthetic construct
RGDHEHG

SEQ ID NO: 28735 - protein, 7 aa, synthetic construct
RGDHEQK

SEQ ID NO: 28736 - protein, 7 aa, synthetic construct
RGDHFHL

SEQ ID NO: 28737 - protein, 7 aa, synthetic construct
RGDHFVQ

SEQ ID NO: 28738 - protein, 7 aa, synthetic construct
RGDHIGQ

SEQ ID NO: 28739 - protein, 7 aa, synthetic construct
RGDHIRE

SEQ ID NO: 28740 - protein, 7 aa, synthetic construct
RGDHIRQ

SEQ ID NO: 28741 - protein, 7 aa, synthetic construct
RGDHISH

SEQ ID NO: 28742 - protein, 7 aa, synthetic construct
RGDHLNH

SEQ ID NO: 28743 - protein, 7 aa, synthetic construct
RGDHLTA

SEQ ID NO: 28744 - protein, 7 aa, synthetic construct
RGDHNVI

SEQ ID NO: 28745 - protein, 7 aa, synthetic construct
RGDHQVE

SEQ ID NO: 28746 - protein, 7 aa, synthetic construct
RGDALQR

SEQ ID NO: 28747 - protein, 7 aa, synthetic construct
RGDHSGD

SEQ ID NO: 28748 - protein, 7 aa, synthetic construct
RGDHSHD

SEQ ID NO: 28749 - protein, 7 aa, synthetic construct
RGDHTFN

SEQ ID NO: 28750 - protein, 7 aa, synthetic construct
RGDIADR

SEQ ID NO: 28751 - protein, 7 aa, synthetic construct
RGDIARG

SEQ ID NO: 28752 - protein, 7 aa, synthetic construct
RGDIDEN

SEQ ID NO: 28753 - protein, 7 aa, synthetic construct
RGDIDSG

SEQ ID NO: 28754 - protein, 7 aa, synthetic construct
RGDIELQ

SEQ ID NO: 28755 - protein, 7 aa, synthetic construct
RGDIEQE

SEQ ID NO: 28756 - protein, 7 aa, synthetic construct
RGDIFAE

SEQ ID NO: 28757 - protein, 7 aa, synthetic construct
RGDIGSG

SEQ ID NO: 28758 - protein, 7 aa, synthetic construct
RGDIHVF

SEQ ID NO: 28759 - protein, 7 aa, synthetic construct
RGDIIDT

SEQ ID NO: 28760 - protein, 7 aa, synthetic construct
RGDIIVG

SEQ ID NO: 28761 - protein, 7 aa, synthetic construct
RGDINDT

SEQ ID NO: 28762 - protein, 7 aa, synthetic construct
RGDAAVT

SEQ ID NO: 28763 - protein, 7 aa, synthetic construct
RGDANVT

SEQ ID NO: 28764 - protein, 7 aa, synthetic construct
RGDIQAQ

SEQ ID NO: 28765 - protein, 7 aa, synthetic construct
RGDIQHL

SEQ ID NO: 28766 - protein, 7 aa, synthetic construct
RGDIQNS

SEQ ID NO: 28767 - protein, 7 aa, synthetic construct
RGDIRES

SEQ ID NO: 28768 - protein, 7 aa, synthetic construct
RGDIVLK

SEQ ID NO: 28769 - protein, 7 aa, synthetic construct
RGDKAFG

SEQ ID NO: 28770 - protein, 7 aa, synthetic construct
RGDKATN

SEQ ID NO: 28771 - protein, 7 aa, synthetic construct
RGDKEQF

SEQ ID NO: 28772 - protein, 7 aa, synthetic construct
RGDKFQA

SEQ ID NO: 28773 - protein, 7 aa, synthetic construct
RGDKFRR

SEQ ID NO: 28774 - protein, 7 aa, synthetic construct
RGDKFVS

SEQ ID NO: 28775 - protein, 7 aa, synthetic construct
RGDKGIH

SEQ ID NO: 28776 - protein, 7 aa, synthetic construct
RGDKGTD

SEQ ID NO: 28777 - protein, 7 aa, synthetic construct
RGDKHAQ

SEQ ID NO: 28778 - protein, 7 aa, synthetic construct
RGDKHDF

SEQ ID NO: 28779 - protein, 7 aa, synthetic construct
RGDKHDL

SEQ ID NO: 28780 - protein, 7 aa, synthetic construct
RGDKHHH

SEQ ID NO: 28781 - protein, 7 aa, synthetic construct
RGDKIFH

SEQ ID NO: 28782 - protein, 7 aa, synthetic construct
RGDKILT

SEQ ID NO: 28783 - protein, 7 aa, synthetic construct
RGDARFG

SEQ ID NO: 28784 - protein, 7 aa, synthetic construct
RGDKTDT

SEQ ID NO: 28785 - protein, 7 aa, synthetic construct
RGDKTHE

SEQ ID NO: 28786 - protein, 7 aa, synthetic construct
RGDKTHG

SEQ ID NO: 28787 - protein, 7 aa, synthetic construct
RGDLAIG

SEQ ID NO: 28788 - protein, 7 aa, synthetic construct
RGDLATS

SEQ ID NO: 28789 - protein, 7 aa, synthetic construct
RGDLDDA

SEQ ID NO: 28790 - protein, 7 aa, synthetic construct
RGDLDFL

SEQ ID NO: 28791 - protein, 7 aa, synthetic construct
RGDLDSH

SEQ ID NO: 28792 - protein, 7 aa, synthetic construct
RGDLHQG

SEQ ID NO: 28793 - protein, 7 aa, synthetic construct
RGDLIDQ

SEQ ID NO: 28794 - protein, 7 aa, synthetic construct
RGDLIEI

SEQ ID NO: 28795 - protein, 7 aa, synthetic construct
RGDLIIH

SEQ ID NO: 28796 - protein, 7 aa, synthetic construct
RGDLLAK

SEQ ID NO: 28797 - protein, 7 aa, synthetic construct
RGDLLQL

SEQ ID NO: 28798 - protein, 7 aa, synthetic construct
RGDLSHH

SEQ ID NO: 28799 - protein, 7 aa, synthetic construct
RGDLSKD

SEQ ID NO: 28800 - protein, 7 aa, synthetic construct
RGDLSVI

SEQ ID NO: 28801 - protein, 7 aa, synthetic construct
RGDLVDV

SEQ ID NO: 28802 - protein, 7 aa, synthetic construct
RGDNAHG

SEQ ID NO: 28803 - protein, 7 aa, synthetic construct
RGDNDGA

SEQ ID NO: 28804 - protein, 7 aa, synthetic construct
RGDNEHK

SEQ ID NO: 28805 - protein, 7 aa, synthetic construct
RGDNEKV

SEQ ID NO: 28806 - protein, 7 aa, synthetic construct
RGDNFNG

SEQ ID NO: 28807 - protein, 7 aa, synthetic construct
RGDATSV

SEQ ID NO: 28808 - protein, 7 aa, synthetic construct
RGDNFTV

SEQ ID NO: 28809 - protein, 7 aa, synthetic construct
RGDNGEH

SEQ ID NO: 28810 - protein, 7 aa, synthetic construct
RGDNHII

SEQ ID NO: 28811 - protein, 7 aa, synthetic construct
RGDNHTG

SEQ ID NO: 28812 - protein, 7 aa, synthetic construct
RGDNIDV

SEQ ID NO: 28813 - protein, 7 aa, synthetic construct
RGDNKFH

SEQ ID NO: 28814 - protein, 7 aa, synthetic construct
RGDNKLT

SEQ ID NO: 28815 - protein, 7 aa, synthetic construct
RGDNLHA

SEQ ID NO: 28816 - protein, 7 aa, synthetic construct
RGDNLHH

SEQ ID NO: 28817 - protein, 7 aa, synthetic construct
RGDNLNH

SEQ ID NO: 28818 - protein, 7 aa, synthetic construct
RGDNLVL

SEQ ID NO: 28819 - protein, 7 aa, synthetic construct
RGDNNHT

SEQ ID NO: 28820 - protein, 7 aa, synthetic construct
RGDNQGE

SEQ ID NO: 28821 - protein, 7 aa, synthetic construct
RGDNQIL

SEQ ID NO: 28822 - protein, 7 aa, synthetic construct
RGDNQQA

SEQ ID NO: 28823 - protein, 7 aa, synthetic construct
RGDNQRT

SEQ ID NO: 28824 - protein, 7 aa, synthetic construct
RGDNRDK

SEQ ID NO: 28825 - protein, 7 aa, synthetic construct
RGDNRLQ

SEQ ID NO: 28826 - protein, 7 aa, synthetic construct
RGDNSNT

SEQ ID NO: 28827 - protein, 7 aa, synthetic construct
RGDNVDV

SEQ ID NO: 28828 - protein, 7 aa, synthetic construct
RGDNVGQ

SEQ ID NO: 28829 - protein, 7 aa, synthetic construct
RGDNVTS

SEQ ID NO: 28830 - protein, 7 aa, synthetic construct
RGDQDHE

SEQ ID NO: 28831 - protein, 7 aa, synthetic construct
RGDQDIL

SEQ ID NO: 28832 - protein, 7 aa, synthetic construct
RGDQEAH

SEQ ID NO: 28833 - protein, 7 aa, synthetic construct
RGDQEFS

SEQ ID NO: 28834 - protein, 7 aa, synthetic construct
RGDDAGD

SEQ ID NO: 28835 - protein, 7 aa, synthetic construct
RGDQFEK

SEQ ID NO: 28836 - protein, 7 aa, synthetic construct
RGDQFFT

SEQ ID NO: 28837 - protein, 7 aa, synthetic construct
RGDQFVQ

SEQ ID NO: 28838 - protein, 7 aa, synthetic construct
RGDQGLA

SEQ ID NO: 28839 - protein, 7 aa, synthetic construct
RGDQGQA

SEQ ID NO: 28840 - protein, 7 aa, synthetic construct
RGDQLDF

SEQ ID NO: 28841 - protein, 7 aa, synthetic construct
RGDQRIG

SEQ ID NO: 28842 - protein, 7 aa, synthetic construct
RGDQSIA

SEQ ID NO: 28843 - protein, 7 aa, synthetic construct
RGDDDGK

SEQ ID NO: 28844 - protein, 7 aa, synthetic construct
RGDQTFI

SEQ ID NO: 28845 - protein, 7 aa, synthetic construct
RGDQVFT

SEQ ID NO: 28846 - protein, 7 aa, synthetic construct
RGDQVVA

SEQ ID NO: 28847 - protein, 7 aa, synthetic construct
RGDRAVL

SEQ ID NO: 28848 - protein, 7 aa, synthetic construct
RGDDDSN

SEQ ID NO: 28849 - protein, 7 aa, synthetic construct
RGDRGRF

SEQ ID NO: 28850 - protein, 7 aa, synthetic construct
RGDDEAI

SEQ ID NO: 28851 - protein, 7 aa, synthetic construct
RGDRKAH

SEQ ID NO: 28852 - protein, 7 aa, synthetic construct
RGDRLNA

SEQ ID NO: 28853 - protein, 7 aa, synthetic construct
RGDRNLD

SEQ ID NO: 28854 - protein, 7 aa, synthetic construct
RGDRQIA

SEQ ID NO: 28855 - protein, 7 aa, synthetic construct
RGDRQVA

SEQ ID NO: 28856 - protein, 7 aa, synthetic construct
RGDRQVG

SEQ ID NO: 28857 - protein, 7 aa, synthetic construct
RGDRSFL

SEQ ID NO: 28858 - protein, 7 aa, synthetic construct
RGDSAGG

SEQ ID NO: 28859 - protein, 7 aa, synthetic construct
RGDSDHA

SEQ ID NO: 28860 - protein, 7 aa, synthetic construct
RGDSDKT

SEQ ID NO: 28861 - protein, 7 aa, synthetic construct
RGDSDLF

SEQ ID NO: 28862 - protein, 7 aa, synthetic construct
RGDSDQA

SEQ ID NO: 28863 - protein, 7 aa, synthetic construct
RGDSDSV

SEQ ID NO: 28864 - protein, 7 aa, synthetic construct
RGDSEAH

SEQ ID NO: 28865 - protein, 7 aa, synthetic construct
RGDSESQ

SEQ ID NO: 28866 - protein, 7 aa, synthetic construct
RGDDFIH

SEQ ID NO: 28867 - protein, 7 aa, synthetic construct
RGDSHRD

SEQ ID NO: 28868 - protein, 7 aa, synthetic construct
RGDSKSG

SEQ ID NO: 28869 - protein, 7 aa, synthetic construct
RGDSKVE

SEQ ID NO: 28870 - protein, 7 aa, synthetic construct
RGDSLAS

SEQ ID NO: 28871 - protein, 7 aa, synthetic construct
RGDSLDI

SEQ ID NO: 28872 - protein, 7 aa, synthetic construct
RGDSNII

SEQ ID NO: 28873 - protein, 7 aa, synthetic construct
RGDSNSS

SEQ ID NO: 28874 - protein, 7 aa, synthetic construct
RGDSNTV

SEQ ID NO: 28875 - protein, 7 aa, synthetic construct
RGDDGAV

SEQ ID NO: 28876 - protein, 7 aa, synthetic construct
RGDSQTE

SEQ ID NO: 28877 - protein, 7 aa, synthetic construct
RGDSQVQ

SEQ ID NO: 28878 - protein, 7 aa, synthetic construct
RGDSRVS

SEQ ID NO: 28879 - protein, 7 aa, synthetic construct
RGDSSND

SEQ ID NO: 28880 - protein, 7 aa, synthetic construct
RGDSSNG

SEQ ID NO: 28881 - protein, 7 aa, synthetic construct
RGDSSQN

SEQ ID NO: 28882 - protein, 7 aa, synthetic construct
RGDDGGQ

SEQ ID NO: 28883 - protein, 7 aa, synthetic construct
RGDTAEK

SEQ ID NO: 28884 - protein, 7 aa, synthetic construct
RGDTANV

SEQ ID NO: 28885 - protein, 7 aa, synthetic construct
RGDTEAG

SEQ ID NO: 28886 - protein, 7 aa, synthetic construct
RGDTGQL

SEQ ID NO: 28887 - protein, 7 aa, synthetic construct
RGDTGQQ

SEQ ID NO: 28888 - protein, 7 aa, synthetic construct
RGDTGTQ

SEQ ID NO: 28889 - protein, 7 aa, synthetic construct
RGDTHAD

SEQ ID NO: 28890 - protein, 7 aa, synthetic construct
RGDDHDA

SEQ ID NO: 28891 - protein, 7 aa, synthetic construct
RGDTHTF

SEQ ID NO: 28892 - protein, 7 aa, synthetic construct
RGDDHHK

SEQ ID NO: 28893 - protein, 7 aa, synthetic construct
RGDTNSS

SEQ ID NO: 28894 - protein, 7 aa, synthetic construct
RGDTQGA

SEQ ID NO: 28895 - protein, 7 aa, synthetic construct
RGDTRHD

SEQ ID NO: 28896 - protein, 7 aa, synthetic construct
RGDTRLH

SEQ ID NO: 28897 - protein, 7 aa, synthetic construct
RGDTRQG

SEQ ID NO: 28898 - protein, 7 aa, synthetic construct
RGDTSTD

SEQ ID NO: 28899 - protein, 7 aa, synthetic construct
RGDTTVR

SEQ ID NO: 28900 - protein, 7 aa, synthetic construct
RGDTVGQ

SEQ ID NO: 28901 - protein, 7 aa, synthetic construct
RGDDIAE

SEQ ID NO: 28902 - protein, 7 aa, synthetic construct
RGDVAQS

SEQ ID NO: 28903 - protein, 7 aa, synthetic construct
RGDVAVA

SEQ ID NO: 28904 - protein, 7 aa, synthetic construct
RGDDIED

SEQ ID NO: 28905 - protein, 7 aa, synthetic construct
RGDDIEH

SEQ ID NO: 28906 - protein, 7 aa, synthetic construct
RGDVDVS

SEQ ID NO: 28907 - protein, 7 aa, synthetic construct
RGDVEGG

SEQ ID NO: 28908 - protein, 7 aa, synthetic construct
RGDDIFK

SEQ ID NO: 28909 - protein, 7 aa, synthetic construct
RGDVEIT

SEQ ID NO: 28910 - protein, 7 aa, synthetic construct
RGDVERA

SEQ ID NO: 28911 - protein, 7 aa, synthetic construct
RGDVESH

SEQ ID NO: 28912 - protein, 7 aa, synthetic construct
RGDVEVD

SEQ ID NO: 28913 - protein, 7 aa, synthetic construct
RGDVEVN

SEQ ID NO: 28914 - protein, 7 aa, synthetic construct
RGDVFLH

SEQ ID NO: 28915 - protein, 7 aa, synthetic construct
RGDVGGI

SEQ ID NO: 28916 - protein, 7 aa, synthetic construct
RGDVGNI

SEQ ID NO: 28917 - protein, 7 aa, synthetic construct
RGDVHIS

SEQ ID NO: 28918 - protein, 7 aa, synthetic construct
RGDVHVS

SEQ ID NO: 28919 - protein, 7 aa, synthetic construct
RGDVLET

SEQ ID NO: 28920 - protein, 7 aa, synthetic construct
RGDVNHT

SEQ ID NO: 28921 - protein, 7 aa, synthetic construct
RGDVQEL

SEQ ID NO: 28922 - protein, 7 aa, synthetic construct
RGDVQHE

SEQ ID NO: 28923 - protein, 7 aa, synthetic construct
RGDVQRS

SEQ ID NO: 28924 - protein, 7 aa, synthetic construct
RGDVRDL

SEQ ID NO: 28925 - protein, 7 aa, synthetic construct
RGDVSKD

SEQ ID NO: 28926 - protein, 7 aa, synthetic construct
RGDVTFG

SEQ ID NO: 28927 - protein, 7 aa, synthetic construct
RGDVTFH

SEQ ID NO: 28928 - protein, 7 aa, synthetic construct
RGDVTLS

SEQ ID NO: 28929 - protein, 7 aa, synthetic construct
RGDVVTV

SEQ ID NO: 28930 - protein, 7 aa, synthetic construct
RGDDKVL

SEQ ID NO: 28931 - protein, 7 aa, synthetic construct
RGDDLHG

SEQ ID NO: 28932 - protein, 7 aa, synthetic construct
RGDDQRT

SEQ ID NO: 28933 - protein, 7 aa, synthetic construct
RGDDRHF

SEQ ID NO: 28934 - protein, 7 aa, synthetic construct
RGDDRQR

SEQ ID NO: 28935 - protein, 7 aa, synthetic construct
RGDDRSE

SEQ ID NO: 28936 - protein, 7 aa, synthetic construct
RGDDRSG

SEQ ID NO: 28937 - protein, 7 aa, synthetic construct
RGDDSFT

SEQ ID NO: 28938 - protein, 7 aa, synthetic construct
RGDDTKE

SEQ ID NO: 28939 - protein, 7 aa, synthetic construct
RGDDTKG

SEQ ID NO: 28940 - protein, 7 aa, synthetic construct
RGDDVGA

SEQ ID NO: 28941 - protein, 7 aa, synthetic construct
RGDDVRK

SEQ ID NO: 28942 - protein, 7 aa, synthetic construct
RGDAEVV

SEQ ID NO: 28943 - protein, 7 aa, synthetic construct
RGDEAQK

SEQ ID NO: 28944 - protein, 7 aa, synthetic construct
RGDEFKD

SEQ ID NO: 28945 - protein, 7 aa, synthetic construct
RGDEGDT

SEQ ID NO: 28946 - protein, 7 aa, synthetic construct
RGDEGLL

SEQ ID NO: 28947 - protein, 7 aa, synthetic construct
RGDEHEH

SEQ ID NO: 28948 - protein, 7 aa, synthetic construct
RGDEHGK

SEQ ID NO: 28949 - protein, 7 aa, synthetic construct
RGDEITA

SEQ ID NO: 28950 - protein, 7 aa, synthetic construct
RGDEKGN

SEQ ID NO: 28951 - protein, 7 aa, synthetic construct
RGDEKNE

SEQ ID NO: 28952 - protein, 7 aa, synthetic construct
RGDELDT

SEQ ID NO: 28953 - protein, 7 aa, synthetic construct
RGDELGH

SEQ ID NO: 28954 - protein, 7 aa, synthetic construct
RGDELHD

SEQ ID NO: 28955 - protein, 7 aa, synthetic construct
RGDELNS

SEQ ID NO: 28956 - protein, 7 aa, synthetic construct
RGDELVV

SEQ ID NO: 28957 - protein, 7 aa, synthetic construct
RGDENLH

SEQ ID NO: 28958 - protein, 7 aa, synthetic construct
RGDENTT

SEQ ID NO: 28959 - protein, 7 aa, synthetic construct
RGDEQEA

SEQ ID NO: 28960 - protein, 7 aa, synthetic construct
RGDEQNF

SEQ ID NO: 28961 - protein, 7 aa, synthetic construct
RGDEQRL

SEQ ID NO: 28962 - protein, 7 aa, synthetic construct
RGDEQSL

SEQ ID NO: 28963 - protein, 7 aa, synthetic construct
RGDERSD

SEQ ID NO: 28964 - protein, 7 aa, synthetic construct
RGDESDF

SEQ ID NO: 28965 - protein, 7 aa, synthetic construct
RGDESIG

SEQ ID NO: 28966 - protein, 7 aa, synthetic construct
RGDESRD

SEQ ID NO: 28967 - protein, 7 aa, synthetic construct
RGDETKE

SEQ ID NO: 28968 - protein, 7 aa, synthetic construct
RGDETRN

SEQ ID NO: 28969 - protein, 7 aa, synthetic construct
RGDEVGF

SEQ ID NO: 28970 - protein, 7 aa, synthetic construct
RGDEVNK

SEQ ID NO: 28971 - protein, 7 aa, synthetic construct
RGDEVQV

SEQ ID NO: 28972 - protein, 7 aa, synthetic construct
RGDFAAG

SEQ ID NO: 28973 - protein, 7 aa, synthetic construct
RGDFADN

SEQ ID NO: 28974 - protein, 7 aa, synthetic construct
RGDFAVH

SEQ ID NO: 28975 - protein, 7 aa, synthetic construct
RGDFDHN

SEQ ID NO: 28976 - protein, 7 aa, synthetic construct
RGDFDTS

SEQ ID NO: 28977 - protein, 7 aa, synthetic construct
RGDFDTV

SEQ ID NO: 28978 - protein, 7 aa, synthetic construct
RGDFEAL

SEQ ID NO: 28979 - protein, 7 aa, synthetic construct
RGDFEFI

SEQ ID NO: 28980 - protein, 7 aa, synthetic construct
RGDFEFN

SEQ ID NO: 28981 - protein, 7 aa, synthetic construct
RGDFFAH

SEQ ID NO: 28982 - protein, 7 aa, synthetic construct
RGDFHVF

SEQ ID NO: 28983 - protein, 7 aa, synthetic construct
RGDFKID

SEQ ID NO: 28984 - protein, 7 aa, synthetic construct
RGDFLEK

SEQ ID NO: 28985 - protein, 7 aa, synthetic construct
RGDFLVH

SEQ ID NO: 28986 - protein, 7 aa, synthetic construct
RGDFNDI

SEQ ID NO: 28987 - protein, 7 aa, synthetic construct
RGDFNKR

SEQ ID NO: 28988 - protein, 7 aa, synthetic construct
RGDFQSH

SEQ ID NO: 28989 - protein, 7 aa, synthetic construct
RGDFQVL

SEQ ID NO: 28990 - protein, 7 aa, synthetic construct
RGDFREG

SEQ ID NO: 28991 - protein, 7 aa, synthetic construct
RGDAHVR

SEQ ID NO: 28992 - protein, 7 aa, synthetic construct
RGDGAQV

SEQ ID NO: 28993 - protein, 7 aa, synthetic construct
RGDGEAI

SEQ ID NO: 28994 - protein, 7 aa, synthetic construct
RGDGFDV

SEQ ID NO: 28995 - protein, 7 aa, synthetic construct
RGDGFRG

SEQ ID NO: 28996 - protein, 7 aa, synthetic construct
RGDGFSE

SEQ ID NO: 28997 - protein, 7 aa, synthetic construct
RGDGGQQ

SEQ ID NO: 28998 - protein, 7 aa, synthetic construct
RGDGGTH

SEQ ID NO: 28999 - protein, 7 aa, synthetic construct
RGDGHAN

SEQ ID NO: 29000 - protein, 7 aa, synthetic construct
RGDGHIE

SEQ ID NO: 29001 - protein, 7 aa, synthetic construct
RGDGIQN

SEQ ID NO: 29002 - protein, 7 aa, synthetic construct
RGDGKHT

SEQ ID NO: 29003 - protein, 7 aa, synthetic construct
RGDGKLI

SEQ ID NO: 29004 - protein, 7 aa, synthetic construct
RGDGLKA

SEQ ID NO: 29005 - protein, 7 aa, synthetic construct
RGDGNAA

SEQ ID NO: 29006 - protein, 7 aa, synthetic construct
RGDGNDQ

SEQ ID NO: 29007 - protein, 7 aa, synthetic construct
RGDGNQE

SEQ ID NO: 29008 - protein, 7 aa, synthetic construct
RGDGQGF

SEQ ID NO: 29009 - protein, 7 aa, synthetic construct
RGDAKDT

SEQ ID NO: 29010 - protein, 7 aa, synthetic construct
RGDGSFA

SEQ ID NO: 29011 - protein, 7 aa, synthetic construct
RGDGTVQ

SEQ ID NO: 29012 - protein, 7 aa, synthetic construct
RGDGVDV

SEQ ID NO: 29013 - protein, 7 aa, synthetic construct
RGDHAHN

SEQ ID NO: 29014 - protein, 7 aa, synthetic construct
RGDHANS

SEQ ID NO: 29015 - protein, 7 aa, synthetic construct
RGDAKNG

SEQ ID NO: 29016 - protein, 7 aa, synthetic construct
RGDHETK

SEQ ID NO: 29017 - protein, 7 aa, synthetic construct
RGDHFKE

SEQ ID NO: 29018 - protein, 7 aa, synthetic construct
RGDHGIH

SEQ ID NO: 29019 - protein, 7 aa, synthetic construct
RGDHHKN

SEQ ID NO: 29020 - protein, 7 aa, synthetic construct
RGDHHSN

SEQ ID NO: 29021 - protein, 7 aa, synthetic construct
RGDHHSQ

SEQ ID NO: 29022 - protein, 7 aa, synthetic construct
RGDHIQD

SEQ ID NO: 29023 - protein, 7 aa, synthetic construct
RGDHKTA

SEQ ID NO: 29024 - protein, 7 aa, synthetic construct
RGDALLT

SEQ ID NO: 29025 - protein, 7 aa, synthetic construct
RGDHQVL

SEQ ID NO: 29026 - protein, 7 aa, synthetic construct
RGDAATE

SEQ ID NO: 29027 - protein, 7 aa, synthetic construct
RGDHTAA

SEQ ID NO: 29028 - protein, 7 aa, synthetic construct
RGDHVDG

SEQ ID NO: 29029 - protein, 7 aa, synthetic construct
RGDHVLK

SEQ ID NO: 29030 - protein, 7 aa, synthetic construct
RGDIALG

SEQ ID NO: 29031 - protein, 7 aa, synthetic construct
RGDIASE

SEQ ID NO: 29032 - protein, 7 aa, synthetic construct
RGDIDHH

SEQ ID NO: 29033 - protein, 7 aa, synthetic construct
RGDIEIT

SEQ ID NO: 29034 - protein, 7 aa, synthetic construct
RGDIFQA

SEQ ID NO: 29035 - protein, 7 aa, synthetic construct
RGDIFVH

SEQ ID NO: 29036 - protein, 7 aa, synthetic construct
RGDIGEG

SEQ ID NO: 29037 - protein, 7 aa, synthetic construct
RGDIGFV

SEQ ID NO: 29038 - protein, 7 aa, synthetic construct
RGDIGSE

SEQ ID NO: 29039 - protein, 7 aa, synthetic construct
RGDIHGD

SEQ ID NO: 29040 - protein, 7 aa, synthetic construct
RGDANLL

SEQ ID NO: 29041 - protein, 7 aa, synthetic construct
RGDIIRS

SEQ ID NO: 29042 - protein, 7 aa, synthetic construct
RGDIITN

SEQ ID NO: 29043 - protein, 7 aa, synthetic construct
RGDILIH

SEQ ID NO: 29044 - protein, 7 aa, synthetic construct
RGDANTT

SEQ ID NO: 29045 - protein, 7 aa, synthetic construct
RGDINIR

SEQ ID NO: 29046 - protein, 7 aa, synthetic construct
RGDINNS

SEQ ID NO: 29047 - protein, 7 aa, synthetic construct
RGDINSV

SEQ ID NO: 29048 - protein, 7 aa, synthetic construct
RGDIQFS

SEQ ID NO: 29049 - protein, 7 aa, synthetic construct
RGDITDR

SEQ ID NO: 29050 - protein, 7 aa, synthetic construct
RGDIVAH

SEQ ID NO: 29051 - protein, 7 aa, synthetic construct
RGDIVNG

SEQ ID NO: 29052 - protein, 7 aa, synthetic construct
RGDKAEH

SEQ ID NO: 29053 - protein, 7 aa, synthetic construct
RGDKALL

SEQ ID NO: 29054 - protein, 7 aa, synthetic construct
RGDKALR

SEQ ID NO: 29055 - protein, 7 aa, synthetic construct
RGDKFQS

SEQ ID NO: 29056 - protein, 7 aa, synthetic construct
RGDKFRS

SEQ ID NO: 29057 - protein, 7 aa, synthetic construct
RGDKISG

SEQ ID NO: 29058 - protein, 7 aa, synthetic construct
RGDKKDQ

SEQ ID NO: 29059 - protein, 7 aa, synthetic construct
RGDARGH

SEQ ID NO: 29060 - protein, 7 aa, synthetic construct
RGDKLEQ

SEQ ID NO: 29061 - protein, 7 aa, synthetic construct
RGDKNNA

SEQ ID NO: 29062 - protein, 7 aa, synthetic construct
RGDKQEH

SEQ ID NO: 29063 - protein, 7 aa, synthetic construct
RGDKQLR

SEQ ID NO: 29064 - protein, 7 aa, synthetic construct
RGDKQTD

SEQ ID NO: 29065 - protein, 7 aa, synthetic construct
RGDKTNF

SEQ ID NO: 29066 - protein, 7 aa, synthetic construct
RGDKVVS

SEQ ID NO: 29067 - protein, 7 aa, synthetic construct
RGDASEK

SEQ ID NO: 29068 - protein, 7 aa, synthetic construct
RGDLENG

SEQ ID NO: 29069 - protein, 7 aa, synthetic construct
RGDLFEN

SEQ ID NO: 29070 - protein, 7 aa, synthetic construct
RGDLFLR

SEQ ID NO: 29071 - protein, 7 aa, synthetic construct
RGDLGAH

SEQ ID NO: 29072 - protein, 7 aa, synthetic construct
RGDLHLS

SEQ ID NO: 29073 - protein, 7 aa, synthetic construct
RGDLIGA

SEQ ID NO: 29074 - protein, 7 aa, synthetic construct
RGDLILQ

SEQ ID NO: 29075 - protein, 7 aa, synthetic construct
RGDLIRG

SEQ ID NO: 29076 - protein, 7 aa, synthetic construct
RGDLIVG

SEQ ID NO: 29077 - protein, 7 aa, synthetic construct
RGDLKEL

SEQ ID NO: 29078 - protein, 7 aa, synthetic construct
RGDLLFN

SEQ ID NO: 29079 - protein, 7 aa, synthetic construct
RGDLLIH

SEQ ID NO: 29080 - protein, 7 aa, synthetic construct
RGDLNES

SEQ ID NO: 29081 - protein, 7 aa, synthetic construct
RGDLNHH

SEQ ID NO: 29082 - protein, 7 aa, synthetic construct
RGDLNNL

SEQ ID NO: 29083 - protein, 7 aa, synthetic construct
RGDLQSR

SEQ ID NO: 29084 - protein, 7 aa, synthetic construct
RGDLRDF

SEQ ID NO: 29085 - protein, 7 aa, synthetic construct
RGDLSLS

SEQ ID NO: 29086 - protein, 7 aa, synthetic construct
RGDLSQN

SEQ ID NO: 29087 - protein, 7 aa, synthetic construct
RGDLTFQ

SEQ ID NO: 29088 - protein, 7 aa, synthetic construct
RGDLVDT

SEQ ID NO: 29089 - protein, 7 aa, synthetic construct
RGDLVTE

SEQ ID NO: 29090 - protein, 7 aa, synthetic construct
RGDNANE

SEQ ID NO: 29091 - protein, 7 aa, synthetic construct
RGDNEFQ

SEQ ID NO: 29092 - protein, 7 aa, synthetic construct
RGDNERQ

SEQ ID NO: 29093 - protein, 7 aa, synthetic construct
RGDNFLT

SEQ ID NO: 29094 - protein, 7 aa, synthetic construct
RGDNGFH

SEQ ID NO: 29095 - protein, 7 aa, synthetic construct
RGDNGTA

SEQ ID NO: 29096 - protein, 7 aa, synthetic construct
RGDAVAQ

SEQ ID NO: 29097 - protein, 7 aa, synthetic construct
RGDNIFD

SEQ ID NO: 29098 - protein, 7 aa, synthetic construct
RGDNNHE

SEQ ID NO: 29099 - protein, 7 aa, synthetic construct
RGDNNNE

SEQ ID NO: 29100 - protein, 7 aa, synthetic construct
RGDNQHA

SEQ ID NO: 29101 - protein, 7 aa, synthetic construct
RGDNRSD

SEQ ID NO: 29102 - protein, 7 aa, synthetic construct
RGDNVAT

SEQ ID NO: 29103 - protein, 7 aa, synthetic construct
RGDQDSS

SEQ ID NO: 29104 - protein, 7 aa, synthetic construct
RGDQEII

SEQ ID NO: 29105 - protein, 7 aa, synthetic construct
RGDQESN

SEQ ID NO: 29106 - protein, 7 aa, synthetic construct
RGDQGNH

SEQ ID NO: 29107 - protein, 7 aa, synthetic construct
RGDQHLF

SEQ ID NO: 29108 - protein, 7 aa, synthetic construct
RGDQHND

SEQ ID NO: 29109 - protein, 7 aa, synthetic construct
RGDQNEV

SEQ ID NO: 29110 - protein, 7 aa, synthetic construct
RGDQQGK

SEQ ID NO: 29111 - protein, 7 aa, synthetic construct
RGDQQLA

SEQ ID NO: 29112 - protein, 7 aa, synthetic construct
RGDDDDL

SEQ ID NO: 29113 - protein, 7 aa, synthetic construct
RGDQSDF

SEQ ID NO: 29114 - protein, 7 aa, synthetic construct
RGDQSLN

SEQ ID NO: 29115 - protein, 7 aa, synthetic construct
RGDDDGF

SEQ ID NO: 29116 - protein, 7 aa, synthetic construct
RGDQVAT

SEQ ID NO: 29117 - protein, 7 aa, synthetic construct
RGDQVDH

SEQ ID NO: 29118 - protein, 7 aa, synthetic construct
RGDQVHT

SEQ ID NO: 29119 - protein, 7 aa, synthetic construct
RGDQVSG

SEQ ID NO: 29120 - protein, 7 aa, synthetic construct
RGDRDDS

SEQ ID NO: 29121 - protein, 7 aa, synthetic construct
RGDRDSG

SEQ ID NO: 29122 - protein, 7 aa, synthetic construct
RGDREFD

SEQ ID NO: 29123 - protein, 7 aa, synthetic construct
RGDRFRD

SEQ ID NO: 29124 - protein, 7 aa, synthetic construct
RGDRHSA

SEQ ID NO: 29125 - protein, 7 aa, synthetic construct
RGDDEDF

SEQ ID NO: 29126 - protein, 7 aa, synthetic construct
RGDRKED

SEQ ID NO: 29127 - protein, 7 aa, synthetic construct
RGDDERT

SEQ ID NO: 29128 - protein, 7 aa, synthetic construct
RGDRTNH

SEQ ID NO: 29129 - protein, 7 aa, synthetic construct
RGDSDTK

SEQ ID NO: 29130 - protein, 7 aa, synthetic construct
RGDSEAI

SEQ ID NO: 29131 - protein, 7 aa, synthetic construct
RGDSEDL

SEQ ID NO: 29132 - protein, 7 aa, synthetic construct
RGDSFGQ

SEQ ID NO: 29133 - protein, 7 aa, synthetic construct
RGDSFTE

SEQ ID NO: 29134 - protein, 7 aa, synthetic construct
RGDSHIR

SEQ ID NO: 29135 - protein, 7 aa, synthetic construct
RGDSLAE

SEQ ID NO: 29136 - protein, 7 aa, synthetic construct
RGDDFSR

SEQ ID NO: 29137 - protein, 7 aa, synthetic construct
RGDSLLI

SEQ ID NO: 29138 - protein, 7 aa, synthetic construct
RGDDFTQ

SEQ ID NO: 29139 - protein, 7 aa, synthetic construct
RGDSNES

SEQ ID NO: 29140 - protein, 7 aa, synthetic construct
RGDDFVV

SEQ ID NO: 29141 - protein, 7 aa, synthetic construct
RGDSQIK

SEQ ID NO: 29142 - protein, 7 aa, synthetic construct
RGDSQKG

SEQ ID NO: 29143 - protein, 7 aa, synthetic construct
RGDSQSQ

SEQ ID NO: 29144 - protein, 7 aa, synthetic construct
RGDSRAS

SEQ ID NO: 29145 - protein, 7 aa, synthetic construct
RGDSSEN

SEQ ID NO: 29146 - protein, 7 aa, synthetic construct
RGDSSNT

SEQ ID NO: 29147 - protein, 7 aa, synthetic construct
RGDTAKE

SEQ ID NO: 29148 - protein, 7 aa, synthetic construct
RGDDGLT

SEQ ID NO: 29149 - protein, 7 aa, synthetic construct
RGDTDHS

SEQ ID NO: 29150 - protein, 7 aa, synthetic construct
RGDTDKT

SEQ ID NO: 29151 - protein, 7 aa, synthetic construct
RGDTEGI

SEQ ID NO: 29152 - protein, 7 aa, synthetic construct
RGDTFSI

SEQ ID NO: 29153 - protein, 7 aa, synthetic construct
RGDTGEL

SEQ ID NO: 29154 - protein, 7 aa, synthetic construct
RGDTGFG

SEQ ID NO: 29155 - protein, 7 aa, synthetic construct
RGDDGTS

SEQ ID NO: 29156 - protein, 7 aa, synthetic construct
RGDTISK

SEQ ID NO: 29157 - protein, 7 aa, synthetic construct
RGDDHFH

SEQ ID NO: 29158 - protein, 7 aa, synthetic construct
RGDTLGT

SEQ ID NO: 29159 - protein, 7 aa, synthetic construct
RGDTLQV

SEQ ID NO: 29160 - protein, 7 aa, synthetic construct
RGDTLTL

SEQ ID NO: 29161 - protein, 7 aa, synthetic construct
RGDTNHE

SEQ ID NO: 29162 - protein, 7 aa, synthetic construct
RGDTNVG

SEQ ID NO: 29163 - protein, 7 aa, synthetic construct
RGDTQNV

SEQ ID NO: 29164 - protein, 7 aa, synthetic construct
RGDDHLT

SEQ ID NO: 29165 - protein, 7 aa, synthetic construct
RGDTSAA

SEQ ID NO: 29166 - protein, 7 aa, synthetic construct
RGDTVID

SEQ ID NO: 29167 - protein, 7 aa, synthetic construct
RGDTVVN

SEQ ID NO: 29168 - protein, 7 aa, synthetic construct
RGDVADS

SEQ ID NO: 29169 - protein, 7 aa, synthetic construct
RGDVAEF

SEQ ID NO: 29170 - protein, 7 aa, synthetic construct
RGDVDQR

SEQ ID NO: 29171 - protein, 7 aa, synthetic construct
RGDVEGT

SEQ ID NO: 29172 - protein, 7 aa, synthetic construct
RGDVFLI

SEQ ID NO: 29173 - protein, 7 aa, synthetic construct
RGDVFQL

SEQ ID NO: 29174 - protein, 7 aa, synthetic construct
RGDDIHN

SEQ ID NO: 29175 - protein, 7 aa, synthetic construct
RGDVFSQ

SEQ ID NO: 29176 - protein, 7 aa, synthetic construct
RGDVFVV

SEQ ID NO: 29177 - protein, 7 aa, synthetic construct
RGDVGKF

SEQ ID NO: 29178 - protein, 7 aa, synthetic construct
RGDVGKI

SEQ ID NO: 29179 - protein, 7 aa, synthetic construct
RGDDILT

SEQ ID NO: 29180 - protein, 7 aa, synthetic construct
RGDDINE

SEQ ID NO: 29181 - protein, 7 aa, synthetic construct
RGDVKDQ

SEQ ID NO: 29182 - protein, 7 aa, synthetic construct
RGDVKEH

SEQ ID NO: 29183 - protein, 7 aa, synthetic construct
RGDDIRD

SEQ ID NO: 29184 - protein, 7 aa, synthetic construct
RGDVLAS

SEQ ID NO: 29185 - protein, 7 aa, synthetic construct
RGDVQAN

SEQ ID NO: 29186 - protein, 7 aa, synthetic construct
RGDVSHD

SEQ ID NO: 29187 - protein, 7 aa, synthetic construct
RGDVTEQ

SEQ ID NO: 29188 - protein, 7 aa, synthetic construct
RGDVTIG

SEQ ID NO: 29189 - protein, 7 aa, synthetic construct
RGDVTVQ

SEQ ID NO: 29190 - protein, 7 aa, synthetic construct
RGDDKNL

SEQ ID NO: 29191 - protein, 7 aa, synthetic construct
RGDDLHS

SEQ ID NO: 29192 - protein, 7 aa, synthetic construct
RGDDNFK

SEQ ID NO: 29193 - protein, 7 aa, synthetic construct
RGDDNKH

SEQ ID NO: 29194 - protein, 7 aa, synthetic construct
RGDDNQL

SEQ ID NO: 29195 - protein, 7 aa, synthetic construct
RGDDNQQ

SEQ ID NO: 29196 - protein, 7 aa, synthetic construct
RGDDRAH

SEQ ID NO: 29197 - protein, 7 aa, synthetic construct
RGDDSDI

SEQ ID NO: 29198 - protein, 7 aa, synthetic construct
RGDAEVA

SEQ ID NO: 29199 - protein, 7 aa, synthetic construct
RGDDVRD

SEQ ID NO: 29200 - protein, 7 aa, synthetic construct
RGDEASH

SEQ ID NO: 29201 - protein, 7 aa, synthetic construct
RGDEDDV

SEQ ID NO: 29202 - protein, 7 aa, synthetic construct
RGDEEFQ

SEQ ID NO: 29203 - protein, 7 aa, synthetic construct
RGDEETA

SEQ ID NO: 29204 - protein, 7 aa, synthetic construct
RGDEEVE

SEQ ID NO: 29205 - protein, 7 aa, synthetic construct
RGDEEVH

SEQ ID NO: 29206 - protein, 7 aa, synthetic construct
RGDEFFS

SEQ ID NO: 29207 - protein, 7 aa, synthetic construct
RGDEFHK

SEQ ID NO: 29208 - protein, 7 aa, synthetic construct
RGDEFLK

SEQ ID NO: 29209 - protein, 7 aa, synthetic construct
RGDEGIN

SEQ ID NO: 29210 - protein, 7 aa, synthetic construct
RGDEHDG

SEQ ID NO: 29211 - protein, 7 aa, synthetic construct
RGDEHDS

SEQ ID NO: 29212 - protein, 7 aa, synthetic construct
RGDEHFH

SEQ ID NO: 29213 - protein, 7 aa, synthetic construct
RGDEIGF

SEQ ID NO: 29214 - protein, 7 aa, synthetic construct
RGDEKHQ

SEQ ID NO: 29215 - protein, 7 aa, synthetic construct
RGDEKKA

SEQ ID NO: 29216 - protein, 7 aa, synthetic construct
RGDELEV

SEQ ID NO: 29217 - protein, 7 aa, synthetic construct
RGDELLS

SEQ ID NO: 29218 - protein, 7 aa, synthetic construct
RGDELLV

SEQ ID NO: 29219 - protein, 7 aa, synthetic construct
RGDENAE

SEQ ID NO: 29220 - protein, 7 aa, synthetic construct
RGDENGI

SEQ ID NO: 29221 - protein, 7 aa, synthetic construct
RGDENHT

SEQ ID NO: 29222 - protein, 7 aa, synthetic construct
RGDENTI

SEQ ID NO: 29223 - protein, 7 aa, synthetic construct
RGDEQHK

SEQ ID NO: 29224 - protein, 7 aa, synthetic construct
RGDEQHN

SEQ ID NO: 29225 - protein, 7 aa, synthetic construct
RGDEQTI

SEQ ID NO: 29226 - protein, 7 aa, synthetic construct
RGDAGDH

SEQ ID NO: 29227 - protein, 7 aa, synthetic construct
RGDERES

SEQ ID NO: 29228 - protein, 7 aa, synthetic construct
RGDERKF

SEQ ID NO: 29229 - protein, 7 aa, synthetic construct
RGDERQD

SEQ ID NO: 29230 - protein, 7 aa, synthetic construct
RGDESEK

SEQ ID NO: 29231 - protein, 7 aa, synthetic construct
RGDAGGH

SEQ ID NO: 29232 - protein, 7 aa, synthetic construct
RGDESVH

SEQ ID NO: 29233 - protein, 7 aa, synthetic construct
RGDETSI

SEQ ID NO: 29234 - protein, 7 aa, synthetic construct
RGDEVSL

SEQ ID NO: 29235 - protein, 7 aa, synthetic construct
RGDFDHQ

SEQ ID NO: 29236 - protein, 7 aa, synthetic construct
RGDFEAI

SEQ ID NO: 29237 - protein, 7 aa, synthetic construct
RGDFGNH

SEQ ID NO: 29238 - protein, 7 aa, synthetic construct
RGDFHTH

SEQ ID NO: 29239 - protein, 7 aa, synthetic construct
RGDFKAG

SEQ ID NO: 29240 - protein, 7 aa, synthetic construct
RGDFKFF

SEQ ID NO: 29241 - protein, 7 aa, synthetic construct
RGDFLSF

SEQ ID NO: 29242 - protein, 7 aa, synthetic construct
RGDFQDH

SEQ ID NO: 29243 - protein, 7 aa, synthetic construct
RGDFQKS

SEQ ID NO: 29244 - protein, 7 aa, synthetic construct
RGDFSQE

SEQ ID NO: 29245 - protein, 7 aa, synthetic construct
RGDAHRS

SEQ ID NO: 29246 - protein, 7 aa, synthetic construct
RGDFSVD

SEQ ID NO: 29247 - protein, 7 aa, synthetic construct
RGDFVTN

SEQ ID NO: 29248 - protein, 7 aa, synthetic construct
RGDAHVV

SEQ ID NO: 29249 - protein, 7 aa, synthetic construct
RGDGDGS

SEQ ID NO: 29250 - protein, 7 aa, synthetic construct
RGDGDIK

SEQ ID NO: 29251 - protein, 7 aa, synthetic construct
RGDGDND

SEQ ID NO: 29252 - protein, 7 aa, synthetic construct
RGDGERG

SEQ ID NO: 29253 - protein, 7 aa, synthetic construct
RGDGETV

SEQ ID NO: 29254 - protein, 7 aa, synthetic construct
RGDGEVK

SEQ ID NO: 29255 - protein, 7 aa, synthetic construct
RGDGFFS

SEQ ID NO: 29256 - protein, 7 aa, synthetic construct
RGDGFGE

SEQ ID NO: 29257 - protein, 7 aa, synthetic construct
RGDAIHA

SEQ ID NO: 29258 - protein, 7 aa, synthetic construct
RGDGFTS

SEQ ID NO: 29259 - protein, 7 aa, synthetic construct
RGDGGLT

SEQ ID NO: 29260 - protein, 7 aa, synthetic construct
RGDGGRA

SEQ ID NO: 29261 - protein, 7 aa, synthetic construct
RGDAIKD

SEQ ID NO: 29262 - protein, 7 aa, synthetic construct
RGDGITE

SEQ ID NO: 29263 - protein, 7 aa, synthetic construct
RGDGLVR

SEQ ID NO: 29264 - protein, 7 aa, synthetic construct
RGDGNDI

SEQ ID NO: 29265 - protein, 7 aa, synthetic construct
RGDGNIV

SEQ ID NO: 29266 - protein, 7 aa, synthetic construct
RGDGQIV

SEQ ID NO: 29267 - protein, 7 aa, synthetic construct
RGDGRQA

SEQ ID NO: 29268 - protein, 7 aa, synthetic construct
RGDGSGG

SEQ ID NO: 29269 - protein, 7 aa, synthetic construct
RGDGTND

SEQ ID NO: 29270 - protein, 7 aa, synthetic construct
RGDGTTV

SEQ ID NO: 29271 - protein, 7 aa, synthetic construct
RGDHDFN

SEQ ID NO: 29272 - protein, 7 aa, synthetic construct
RGDHEDV

SEQ ID NO: 29273 - protein, 7 aa, synthetic construct
RGDHFEE

SEQ ID NO: 29274 - protein, 7 aa, synthetic construct
RGDHFEI

SEQ ID NO: 29275 - protein, 7 aa, synthetic construct
RGDHHAT

SEQ ID NO: 29276 - protein, 7 aa, synthetic construct
RGDALDQ

SEQ ID NO: 29277 - protein, 7 aa, synthetic construct
RGDHITF

SEQ ID NO: 29278 - protein, 7 aa, synthetic construct
RGDHKNE

SEQ ID NO: 29279 - protein, 7 aa, synthetic construct
RGDHKTD

SEQ ID NO: 29280 - protein, 7 aa, synthetic construct
RGDHLHQ

SEQ ID NO: 29281 - protein, 7 aa, synthetic construct
RGDHNHS

SEQ ID NO: 29282 - protein, 7 aa, synthetic construct
RGDHQEQ

SEQ ID NO: 29283 - protein, 7 aa, synthetic construct
RGDHQHE

SEQ ID NO: 29284 - protein, 7 aa, synthetic construct
RGDALNN

SEQ ID NO: 29285 - protein, 7 aa, synthetic construct
RGDHTET

SEQ ID NO: 29286 - protein, 7 aa, synthetic construct
RGDHVTN

SEQ ID NO: 29287 - protein, 7 aa, synthetic construct
RGDIDDR

SEQ ID NO: 29288 - protein, 7 aa, synthetic construct
RGDIDKS

SEQ ID NO: 29289 - protein, 7 aa, synthetic construct
RGDIELI

SEQ ID NO: 29290 - protein, 7 aa, synthetic construct
RGDIETF

SEQ ID NO: 29291 - protein, 7 aa, synthetic construct
RGDIEVL

SEQ ID NO: 29292 - protein, 7 aa, synthetic construct
RGDIFAH

SEQ ID NO: 29293 - protein, 7 aa, synthetic construct
RGDIFNA

SEQ ID NO: 29294 - protein, 7 aa, synthetic construct
RGDIFQT

SEQ ID NO: 29295 - protein, 7 aa, synthetic construct
RGDIGDV

SEQ ID NO: 29296 - protein, 7 aa, synthetic construct
RGDIGFL

SEQ ID NO: 29297 - protein, 7 aa, synthetic construct
RGDIGVE

SEQ ID NO: 29298 - protein, 7 aa, synthetic construct
RGDIHHA

SEQ ID NO: 29299 - protein, 7 aa, synthetic construct
RGDIIAV

SEQ ID NO: 29300 - protein, 7 aa, synthetic construct
RGDIIIL

SEQ ID NO: 29301 - protein, 7 aa, synthetic construct
RGDANRD

SEQ ID NO: 29302 - protein, 7 aa, synthetic construct
RGDINDF

SEQ ID NO: 29303 - protein, 7 aa, synthetic construct
RGDINTS

SEQ ID NO: 29304 - protein, 7 aa, synthetic construct
RGDISED

SEQ ID NO: 29305 - protein, 7 aa, synthetic construct
RGDISKA

SEQ ID NO: 29306 - protein, 7 aa, synthetic construct
RGDITFT

SEQ ID NO: 29307 - protein, 7 aa, synthetic construct
RGDIVDK

SEQ ID NO: 29308 - protein, 7 aa, synthetic construct
RGDKAEK

SEQ ID NO: 29309 - protein, 7 aa, synthetic construct
RGDAQLD

SEQ ID NO: 29310 - protein, 7 aa, synthetic construct
RGDKFDK

SEQ ID NO: 29311 - protein, 7 aa, synthetic construct
RGDKFFE

SEQ ID NO: 29312 - protein, 7 aa, synthetic construct
RGDKIQL

SEQ ID NO: 29313 - protein, 7 aa, synthetic construct
RGDKLEK

SEQ ID NO: 29314 - protein, 7 aa, synthetic construct
RGDKNSG

SEQ ID NO: 29315 - protein, 7 aa, synthetic construct
RGDKNTD

SEQ ID NO: 29316 - protein, 7 aa, synthetic construct
RGDARQK

SEQ ID NO: 29317 - protein, 7 aa, synthetic construct
RGDKSQD

SEQ ID NO: 29318 - protein, 7 aa, synthetic construct
RGDKTVS

SEQ ID NO: 29319 - protein, 7 aa, synthetic construct
RGDKVIG

SEQ ID NO: 29320 - protein, 7 aa, synthetic construct
RGDKVRA

SEQ ID NO: 29321 - protein, 7 aa, synthetic construct
RGDLASA

SEQ ID NO: 29322 - protein, 7 aa, synthetic construct
RGDLASD

SEQ ID NO: 29323 - protein, 7 aa, synthetic construct
RGDLDGN

SEQ ID NO: 29324 - protein, 7 aa, synthetic construct
RGDLFKL

SEQ ID NO: 29325 - protein, 7 aa, synthetic construct
RGDLFQI

SEQ ID NO: 29326 - protein, 7 aa, synthetic construct
RGDLGDA

SEQ ID NO: 29327 - protein, 7 aa, synthetic construct
RGDLHFL

SEQ ID NO: 29328 - protein, 7 aa, synthetic construct
RGDLIDG

SEQ ID NO: 29329 - protein, 7 aa, synthetic construct
RGDLKFL

SEQ ID NO: 29330 - protein, 7 aa, synthetic construct
RGDATDI

SEQ ID NO: 29331 - protein, 7 aa, synthetic construct
RGDLSKT

SEQ ID NO: 29332 - protein, 7 aa, synthetic construct
RGDLTET

SEQ ID NO: 29333 - protein, 7 aa, synthetic construct
RGDLTGD

SEQ ID NO: 29334 - protein, 7 aa, synthetic construct
RGDLTNI

SEQ ID NO: 29335 - protein, 7 aa, synthetic construct
RGDLTSD

SEQ ID NO: 29336 - protein, 7 aa, synthetic construct
RGDLTTG

SEQ ID NO: 29337 - protein, 7 aa, synthetic construct
RGDNADF

SEQ ID NO: 29338 - protein, 7 aa, synthetic construct
RGDNAVF

SEQ ID NO: 29339 - protein, 7 aa, synthetic construct
RGDNEKK

SEQ ID NO: 29340 - protein, 7 aa, synthetic construct
RGDNEQQ

SEQ ID NO: 29341 - protein, 7 aa, synthetic construct
RGDNFGK

SEQ ID NO: 29342 - protein, 7 aa, synthetic construct
RGDNFHN

SEQ ID NO: 29343 - protein, 7 aa, synthetic construct
RGDNFKG

SEQ ID NO: 29344 - protein, 7 aa, synthetic construct
RGDNFLE

SEQ ID NO: 29345 - protein, 7 aa, synthetic construct
RGDNGFG

SEQ ID NO: 29346 - protein, 7 aa, synthetic construct
RGDADHT

SEQ ID NO: 29347 - protein, 7 aa, synthetic construct
RGDATVV

SEQ ID NO: 29348 - protein, 7 aa, synthetic construct
RGDAVAV

SEQ ID NO: 29349 - protein, 7 aa, synthetic construct
RGDAVDA

SEQ ID NO: 29350 - protein, 7 aa, synthetic construct
RGDNIGH

SEQ ID NO: 29351 - protein, 7 aa, synthetic construct
RGDNLNE

SEQ ID NO: 29352 - protein, 7 aa, synthetic construct
RGDNNHF

SEQ ID NO: 29353 - protein, 7 aa, synthetic construct
RGDNNHL

SEQ ID NO: 29354 - protein, 7 aa, synthetic construct
RGDNNQI

SEQ ID NO: 29355 - protein, 7 aa, synthetic construct
RGDNQFN

SEQ ID NO: 29356 - protein, 7 aa, synthetic construct
RGDNQFS

SEQ ID NO: 29357 - protein, 7 aa, synthetic construct
RGDNSDN

SEQ ID NO: 29358 - protein, 7 aa, synthetic construct
RGDAVTN

SEQ ID NO: 29359 - protein, 7 aa, synthetic construct
RGDQATQ

SEQ ID NO: 29360 - protein, 7 aa, synthetic construct
RGDDADN

SEQ ID NO: 29361 - protein, 7 aa, synthetic construct
RGDQEAS

SEQ ID NO: 29362 - protein, 7 aa, synthetic construct
RGDQENF

SEQ ID NO: 29363 - protein, 7 aa, synthetic construct
RGDQFHG

SEQ ID NO: 29364 - protein, 7 aa, synthetic construct
RGDDAII

SEQ ID NO: 29365 - protein, 7 aa, synthetic construct
RGDQGLT

SEQ ID NO: 29366 - protein, 7 aa, synthetic construct
RGDQHFL

SEQ ID NO: 29367 - protein, 7 aa, synthetic construct
RGDQHVK

SEQ ID NO: 29368 - protein, 7 aa, synthetic construct
RGDDAQG

SEQ ID NO: 29369 - protein, 7 aa, synthetic construct
RGDQIVS

SEQ ID NO: 29370 - protein, 7 aa, synthetic construct
RGDQKAF

SEQ ID NO: 29371 - protein, 7 aa, synthetic construct
RGDQLTA

SEQ ID NO: 29372 - protein, 7 aa, synthetic construct
RGDQQDS

SEQ ID NO: 29373 - protein, 7 aa, synthetic construct
RGDQQKS

SEQ ID NO: 29374 - protein, 7 aa, synthetic construct
RGDQQTG

SEQ ID NO: 29375 - protein, 7 aa, synthetic construct
RGDQSIS

SEQ ID NO: 29376 - protein, 7 aa, synthetic construct
RGDDDFV

SEQ ID NO: 29377 - protein, 7 aa, synthetic construct
RGDQSQR

SEQ ID NO: 29378 - protein, 7 aa, synthetic construct
RGDQTGK

SEQ ID NO: 29379 - protein, 7 aa, synthetic construct
RGDQTRL

SEQ ID NO: 29380 - protein, 7 aa, synthetic construct
RGDQVEF

SEQ ID NO: 29381 - protein, 7 aa, synthetic construct
RGDQVIQ

SEQ ID NO: 29382 - protein, 7 aa, synthetic construct
RGDQVLL

SEQ ID NO: 29383 - protein, 7 aa, synthetic construct
RGDRFEA

SEQ ID NO: 29384 - protein, 7 aa, synthetic construct
RGDRIFG

SEQ ID NO: 29385 - protein, 7 aa, synthetic construct
RGDRITD

SEQ ID NO: 29386 - protein, 7 aa, synthetic construct
RGDRLEE

SEQ ID NO: 29387 - protein, 7 aa, synthetic construct
RGDDEHI

SEQ ID NO: 29388 - protein, 7 aa, synthetic construct
RGDRNDG

SEQ ID NO: 29389 - protein, 7 aa, synthetic construct
RGDRQLE

SEQ ID NO: 29390 - protein, 7 aa, synthetic construct
RGDDEQI

SEQ ID NO: 29391 - protein, 7 aa, synthetic construct
RGDDERL

SEQ ID NO: 29392 - protein, 7 aa, synthetic construct
RGDRTEG

SEQ ID NO: 29393 - protein, 7 aa, synthetic construct
RGDRTEQ

SEQ ID NO: 29394 - protein, 7 aa, synthetic construct
RGDDESV

SEQ ID NO: 29395 - protein, 7 aa, synthetic construct
RGDSDFG

SEQ ID NO: 29396 - protein, 7 aa, synthetic construct
RGDDFDV

SEQ ID NO: 29397 - protein, 7 aa, synthetic construct
RGDSDKQ

SEQ ID NO: 29398 - protein, 7 aa, synthetic construct
RGDSEGE

SEQ ID NO: 29399 - protein, 7 aa, synthetic construct
RGDSFFS

SEQ ID NO: 29400 - protein, 7 aa, synthetic construct
RGDDFGV

SEQ ID NO: 29401 - protein, 7 aa, synthetic construct
RGDSGQQ

SEQ ID NO: 29402 - protein, 7 aa, synthetic construct
RGDSKLQ

SEQ ID NO: 29403 - protein, 7 aa, synthetic construct
RGDSKVN

SEQ ID NO: 29404 - protein, 7 aa, synthetic construct
RGDSLAH

SEQ ID NO: 29405 - protein, 7 aa, synthetic construct
RGDSLIQ

SEQ ID NO: 29406 - protein, 7 aa, synthetic construct
RGDSNGK

SEQ ID NO: 29407 - protein, 7 aa, synthetic construct
RGDSQAI

SEQ ID NO: 29408 - protein, 7 aa, synthetic construct
RGDSQEG

SEQ ID NO: 29409 - protein, 7 aa, synthetic construct
RGDSQHS

SEQ ID NO: 29410 - protein, 7 aa, synthetic construct
RGDSQLR

SEQ ID NO: 29411 - protein, 7 aa, synthetic construct
RGDDGEG

SEQ ID NO: 29412 - protein, 7 aa, synthetic construct
RGDSSDN

SEQ ID NO: 29413 - protein, 7 aa, synthetic construct
RGDDGFQ

SEQ ID NO: 29414 - protein, 7 aa, synthetic construct
RGDSSNE

SEQ ID NO: 29415 - protein, 7 aa, synthetic construct
RGDSSQA

SEQ ID NO: 29416 - protein, 7 aa, synthetic construct
RGDSSRR

SEQ ID NO: 29417 - protein, 7 aa, synthetic construct
RGDSTER

SEQ ID NO: 29418 - protein, 7 aa, synthetic construct
RGDSTHE

SEQ ID NO: 29419 - protein, 7 aa, synthetic construct
RGDSTVL

SEQ ID NO: 29420 - protein, 7 aa, synthetic construct
RGDDGKF

SEQ ID NO: 29421 - protein, 7 aa, synthetic construct
RGDTDFR

SEQ ID NO: 29422 - protein, 7 aa, synthetic construct
RGDTDRI

SEQ ID NO: 29423 - protein, 7 aa, synthetic construct
RGDTDVI

SEQ ID NO: 29424 - protein, 7 aa, synthetic construct
RGDTEDR

SEQ ID NO: 29425 - protein, 7 aa, synthetic construct
RGDTELT

SEQ ID NO: 29426 - protein, 7 aa, synthetic construct
RGDTETH

SEQ ID NO: 29427 - protein, 7 aa, synthetic construct
RGDTFVF

SEQ ID NO: 29428 - protein, 7 aa, synthetic construct
RGDTGND

SEQ ID NO: 29429 - protein, 7 aa, synthetic construct
RGDTHEA

SEQ ID NO: 29430 - protein, 7 aa, synthetic construct
RGDDHEQ

SEQ ID NO: 29431 - protein, 7 aa, synthetic construct
RGDTNLQ

SEQ ID NO: 29432 - protein, 7 aa, synthetic construct
RGDTNRD

SEQ ID NO: 29433 - protein, 7 aa, synthetic construct
RGDTNSH

SEQ ID NO: 29434 - protein, 7 aa, synthetic construct
RGDTQEI

SEQ ID NO: 29435 - protein, 7 aa, synthetic construct
RGDTRAG

SEQ ID NO: 29436 - protein, 7 aa, synthetic construct
RGDDHQF

SEQ ID NO: 29437 - protein, 7 aa, synthetic construct
RGDTSRA

SEQ ID NO: 29438 - protein, 7 aa, synthetic construct
RGDTSVD

SEQ ID NO: 29439 - protein, 7 aa, synthetic construct
RGDTTRT

SEQ ID NO: 29440 - protein, 7 aa, synthetic construct
RGDTVRH

SEQ ID NO: 29441 - protein, 7 aa, synthetic construct
RGDVAAR

SEQ ID NO: 29442 - protein, 7 aa, synthetic construct
RGDVDKH

SEQ ID NO: 29443 - protein, 7 aa, synthetic construct
RGDVDRR

SEQ ID NO: 29444 - protein, 7 aa, synthetic construct
RGDVDVQ

SEQ ID NO: 29445 - protein, 7 aa, synthetic construct
RGDVERS

SEQ ID NO: 29446 - protein, 7 aa, synthetic construct
RGDVFLA

SEQ ID NO: 29447 - protein, 7 aa, synthetic construct
RGDDIHQ

SEQ ID NO: 29448 - protein, 7 aa, synthetic construct
RGDVIEK

SEQ ID NO: 29449 - protein, 7 aa, synthetic construct
RGDDITG

SEQ ID NO: 29450 - protein, 7 aa, synthetic construct
RGDVNER

SEQ ID NO: 29451 - protein, 7 aa, synthetic construct
RGDVNIQ

SEQ ID NO: 29452 - protein, 7 aa, synthetic construct
RGDVQGG

SEQ ID NO: 29453 - protein, 7 aa, synthetic construct
RGDVQLE

SEQ ID NO: 29454 - protein, 7 aa, synthetic construct
RGDVQNN

SEQ ID NO: 29455 - protein, 7 aa, synthetic construct
RGDVQVL

SEQ ID NO: 29456 - protein, 7 aa, synthetic construct
RGDVTVA

SEQ ID NO: 29457 - protein, 7 aa, synthetic construct
RGDDKSV

SEQ ID NO: 29458 - protein, 7 aa, synthetic construct
RGDDKTG

SEQ ID NO: 29459 - protein, 7 aa, synthetic construct
RGDAEGH

SEQ ID NO: 29460 - protein, 7 aa, synthetic construct
RGDDLRH

SEQ ID NO: 29461 - protein, 7 aa, synthetic construct
RGDDNRT

SEQ ID NO: 29462 - protein, 7 aa, synthetic construct
RGDDQHD

SEQ ID NO: 29463 - protein, 7 aa, synthetic construct
RGDDRKS

SEQ ID NO: 29464 - protein, 7 aa, synthetic construct
RGDAEQD

SEQ ID NO: 29465 - protein, 7 aa, synthetic construct
RGDDSQT

SEQ ID NO: 29466 - protein, 7 aa, synthetic construct
RGDDSRS

SEQ ID NO: 29467 - protein, 7 aa, synthetic construct
RGDDSVH

SEQ ID NO: 29468 - protein, 7 aa, synthetic construct
RGDDTES

SEQ ID NO: 29469 - protein, 7 aa, synthetic construct
RGDEDFE

SEQ ID NO: 29470 - protein, 7 aa, synthetic construct
RGDEEDH

SEQ ID NO: 29471 - protein, 7 aa, synthetic construct
RGDEEDI

SEQ ID NO: 29472 - protein, 7 aa, synthetic construct
RGDEENS

SEQ ID NO: 29473 - protein, 7 aa, synthetic construct
RGDEESN

SEQ ID NO: 29474 - protein, 7 aa, synthetic construct
RGDEFGS

SEQ ID NO: 29475 - protein, 7 aa, synthetic construct
RGDEFRV

SEQ ID NO: 29476 - protein, 7 aa, synthetic construct
RGDEGGE

SEQ ID NO: 29477 - protein, 7 aa, synthetic construct
RGDEGKH

SEQ ID NO: 29478 - protein, 7 aa, synthetic construct
RGDEGSF

SEQ ID NO: 29479 - protein, 7 aa, synthetic construct
RGDEGSL

SEQ ID NO: 29480 - protein, 7 aa, synthetic construct
RGDEHTF

SEQ ID NO: 29481 - protein, 7 aa, synthetic construct
RGDEHTV

SEQ ID NO: 29482 - protein, 7 aa, synthetic construct
RGDEIRI

SEQ ID NO: 29483 - protein, 7 aa, synthetic construct
RGDEKEK

SEQ ID NO: 29484 - protein, 7 aa, synthetic construct
RGDEKGL

SEQ ID NO: 29485 - protein, 7 aa, synthetic construct
RGDEKGS

SEQ ID NO: 29486 - protein, 7 aa, synthetic construct
RGDEKKQ

SEQ ID NO: 29487 - protein, 7 aa, synthetic construct
RGDEKRT

SEQ ID NO: 29488 - protein, 7 aa, synthetic construct
RGDELIT

SEQ ID NO: 29489 - protein, 7 aa, synthetic construct
RGDELKV

SEQ ID NO: 29490 - protein, 7 aa, synthetic construct
RGDENHV

SEQ ID NO: 29491 - protein, 7 aa, synthetic construct
RGDEQEG

SEQ ID NO: 29492 - protein, 7 aa, synthetic construct
RGDEQKI

SEQ ID NO: 29493 - protein, 7 aa, synthetic construct
RGDEQLV

SEQ ID NO: 29494 - protein, 7 aa, synthetic construct
RGDERVI

SEQ ID NO: 29495 - protein, 7 aa, synthetic construct
RGDETVR

SEQ ID NO: 29496 - protein, 7 aa, synthetic construct
RGDEVKV

SEQ ID NO: 29497 - protein, 7 aa, synthetic construct
RGDEVQI

SEQ ID NO: 29498 - protein, 7 aa, synthetic construct
RGDFDDL

SEQ ID NO: 29499 - protein, 7 aa, synthetic construct
RGDFDFQ

SEQ ID NO: 29500 - protein, 7 aa, synthetic construct
RGDFDVI

SEQ ID NO: 29501 - protein, 7 aa, synthetic construct
RGDFETA

SEQ ID NO: 29502 - protein, 7 aa, synthetic construct
RGDFETS

SEQ ID NO: 29503 - protein, 7 aa, synthetic construct
RGDFFQH

SEQ ID NO: 29504 - protein, 7 aa, synthetic construct
RGDFGDA

SEQ ID NO: 29505 - protein, 7 aa, synthetic construct
RGDFGKE

SEQ ID NO: 29506 - protein, 7 aa, synthetic construct
RGDFITA

SEQ ID NO: 29507 - protein, 7 aa, synthetic construct
RGDFLSH

SEQ ID NO: 29508 - protein, 7 aa, synthetic construct
RGDFRLL

SEQ ID NO: 29509 - protein, 7 aa, synthetic construct
RGDFVDR

SEQ ID NO: 29510 - protein, 7 aa, synthetic construct
RGDFVTD

SEQ ID NO: 29511 - protein, 7 aa, synthetic construct
RGDGAKA

SEQ ID NO: 29512 - protein, 7 aa, synthetic construct
RGDGAKG

SEQ ID NO: 29513 - protein, 7 aa, synthetic construct
RGDAIDH

SEQ ID NO: 29514 - protein, 7 aa, synthetic construct
RGDGEAQ

SEQ ID NO: 29515 - protein, 7 aa, synthetic construct
RGDGEQQ

SEQ ID NO: 29516 - protein, 7 aa, synthetic construct
RGDGFAQ

SEQ ID NO: 29517 - protein, 7 aa, synthetic construct
RGDGFDQ

SEQ ID NO: 29518 - protein, 7 aa, synthetic construct
RGDGGAH

SEQ ID NO: 29519 - protein, 7 aa, synthetic construct
RGDGHTT

SEQ ID NO: 29520 - protein, 7 aa, synthetic construct
RGDGIEN

SEQ ID NO: 29521 - protein, 7 aa, synthetic construct
RGDGINN

SEQ ID NO: 29522 - protein, 7 aa, synthetic construct
RGDGKAD

SEQ ID NO: 29523 - protein, 7 aa, synthetic construct
RGDGNFH

SEQ ID NO: 29524 - protein, 7 aa, synthetic construct
RGDGNTD

SEQ ID NO: 29525 - protein, 7 aa, synthetic construct
RGDAKDI

SEQ ID NO: 29526 - protein, 7 aa, synthetic construct
RGDGREH

SEQ ID NO: 29527 - protein, 7 aa, synthetic construct
RGDGRHE

SEQ ID NO: 29528 - protein, 7 aa, synthetic construct
RGDGSEG

SEQ ID NO: 29529 - protein, 7 aa, synthetic construct
RGDGTGL

SEQ ID NO: 29530 - protein, 7 aa, synthetic construct
RGDGTLF

SEQ ID NO: 29531 - protein, 7 aa, synthetic construct
RGDGTLV

SEQ ID NO: 29532 - protein, 7 aa, synthetic construct
RGDHADN

SEQ ID NO: 29533 - protein, 7 aa, synthetic construct
RGDHAGD

SEQ ID NO: 29534 - protein, 7 aa, synthetic construct
RGDHAQE

SEQ ID NO: 29535 - protein, 7 aa, synthetic construct
RGDHATA

SEQ ID NO: 29536 - protein, 7 aa, synthetic construct
RGDHDEL

SEQ ID NO: 29537 - protein, 7 aa, synthetic construct
RGDHDLI

SEQ ID NO: 29538 - protein, 7 aa, synthetic construct
RGDHEAS

SEQ ID NO: 29539 - protein, 7 aa, synthetic construct
RGDHEGA

SEQ ID NO: 29540 - protein, 7 aa, synthetic construct
RGDHFAI

SEQ ID NO: 29541 - protein, 7 aa, synthetic construct
RGDAKSF

SEQ ID NO: 29542 - protein, 7 aa, synthetic construct
RGDHFNN

SEQ ID NO: 29543 - protein, 7 aa, synthetic construct
RGDHISQ

SEQ ID NO: 29544 - protein, 7 aa, synthetic construct
RGDHLFN

SEQ ID NO: 29545 - protein, 7 aa, synthetic construct
RGDHNLV

SEQ ID NO: 29546 - protein, 7 aa, synthetic construct
RGDHNVF

SEQ ID NO: 29547 - protein, 7 aa, synthetic construct
RGDHQEI

SEQ ID NO: 29548 - protein, 7 aa, synthetic construct
RGDHSVS

SEQ ID NO: 29549 - protein, 7 aa, synthetic construct
RGDHTAR

SEQ ID NO: 29550 - protein, 7 aa, synthetic construct
RGDHTHD

SEQ ID NO: 29551 - protein, 7 aa, synthetic construct
RGDHVEN

SEQ ID NO: 29552 - protein, 7 aa, synthetic construct
RGDIALA

SEQ ID NO: 29553 - protein, 7 aa, synthetic construct
RGDIDAF

SEQ ID NO: 29554 - protein, 7 aa, synthetic construct
RGDIDEV

SEQ ID NO: 29555 - protein, 7 aa, synthetic construct
RGDIDFG

SEQ ID NO: 29556 - protein, 7 aa, synthetic construct
RGDIDHT

SEQ ID NO: 29557 - protein, 7 aa, synthetic construct
RGDIDTT

SEQ ID NO: 29558 - protein, 7 aa, synthetic construct
RGDIEAN

SEQ ID NO: 29559 - protein, 7 aa, synthetic construct
RGDIEDH

SEQ ID NO: 29560 - protein, 7 aa, synthetic construct
RGDIEDK

SEQ ID NO: 29561 - protein, 7 aa, synthetic construct
RGDIGHQ

SEQ ID NO: 29562 - protein, 7 aa, synthetic construct
RGDIHTH

SEQ ID NO: 29563 - protein, 7 aa, synthetic construct
RGDIIRF

SEQ ID NO: 29564 - protein, 7 aa, synthetic construct
RGDIKEA

SEQ ID NO: 29565 - protein, 7 aa, synthetic construct
RGDANTS

SEQ ID NO: 29566 - protein, 7 aa, synthetic construct
RGDIQDI

SEQ ID NO: 29567 - protein, 7 aa, synthetic construct
RGDAQAS

SEQ ID NO: 29568 - protein, 7 aa, synthetic construct
RGDAQDQ

SEQ ID NO: 29569 - protein, 7 aa, synthetic construct
RGDIREH

SEQ ID NO: 29570 - protein, 7 aa, synthetic construct
RGDIRKR

SEQ ID NO: 29571 - protein, 7 aa, synthetic construct
RGDAQEI

SEQ ID NO: 29572 - protein, 7 aa, synthetic construct
RGDISIE

SEQ ID NO: 29573 - protein, 7 aa, synthetic construct
RGDITST

SEQ ID NO: 29574 - protein, 7 aa, synthetic construct
RGDIVAT

SEQ ID NO: 29575 - protein, 7 aa, synthetic construct
RGDIVLV

SEQ ID NO: 29576 - protein, 7 aa, synthetic construct
RGDAQLL

SEQ ID NO: 29577 - protein, 7 aa, synthetic construct
RGDKDEH

SEQ ID NO: 29578 - protein, 7 aa, synthetic construct
RGDKDGG

SEQ ID NO: 29579 - protein, 7 aa, synthetic construct
RGDKDGS

SEQ ID NO: 29580 - protein, 7 aa, synthetic construct
RGDKETN

SEQ ID NO: 29581 - protein, 7 aa, synthetic construct
RGDKFNG

SEQ ID NO: 29582 - protein, 7 aa, synthetic construct
RGDKGFE

SEQ ID NO: 29583 - protein, 7 aa, synthetic construct
RGDKIFG

SEQ ID NO: 29584 - protein, 7 aa, synthetic construct
RGDKIKN

SEQ ID NO: 29585 - protein, 7 aa, synthetic construct
RGDKKLE

SEQ ID NO: 29586 - protein, 7 aa, synthetic construct
RGDKNHR

SEQ ID NO: 29587 - protein, 7 aa, synthetic construct
RGDKQLH

SEQ ID NO: 29588 - protein, 7 aa, synthetic construct
RGDKQRV

SEQ ID NO: 29589 - protein, 7 aa, synthetic construct
RGDKRLN

SEQ ID NO: 29590 - protein, 7 aa, synthetic construct
RGDKVHG

SEQ ID NO: 29591 - protein, 7 aa, synthetic construct
RGDLDGV

SEQ ID NO: 29592 - protein, 7 aa, synthetic construct
RGDLDIS

SEQ ID NO: 29593 - protein, 7 aa, synthetic construct
RGDASFH

SEQ ID NO: 29594 - protein, 7 aa, synthetic construct
RGDLEID

SEQ ID NO: 29595 - protein, 7 aa, synthetic construct
RGDLEKL

SEQ ID NO: 29596 - protein, 7 aa, synthetic construct
RGDLEQI

SEQ ID NO: 29597 - protein, 7 aa, synthetic construct
RGDLFSR

SEQ ID NO: 29598 - protein, 7 aa, synthetic construct
RGDLFTI

SEQ ID NO: 29599 - protein, 7 aa, synthetic construct
RGDLILE

SEQ ID NO: 29600 - protein, 7 aa, synthetic construct
RGDLKGL

SEQ ID NO: 29601 - protein, 7 aa, synthetic construct
RGDLLES

SEQ ID NO: 29602 - protein, 7 aa, synthetic construct
RGDLNSS

SEQ ID NO: 29603 - protein, 7 aa, synthetic construct
RGDLNTN

SEQ ID NO: 29604 - protein, 7 aa, synthetic construct
RGDLQVQ

SEQ ID NO: 29605 - protein, 7 aa, synthetic construct
RGDLRLN

SEQ ID NO: 29606 - protein, 7 aa, synthetic construct
RGDLSHD

SEQ ID NO: 29607 - protein, 7 aa, synthetic construct
RGDLSIS

SEQ ID NO: 29608 - protein, 7 aa, synthetic construct
RGDLTES

SEQ ID NO: 29609 - protein, 7 aa, synthetic construct
RGDNAKD

SEQ ID NO: 29610 - protein, 7 aa, synthetic construct
RGDNDFN

SEQ ID NO: 29611 - protein, 7 aa, synthetic construct
RGDNDQK

SEQ ID NO: 29612 - protein, 7 aa, synthetic construct
RGDNFFL

SEQ ID NO: 29613 - protein, 7 aa, synthetic construct
RGDNGAG

SEQ ID NO: 29614 - protein, 7 aa, synthetic construct
RGDNGDN

SEQ ID NO: 29615 - protein, 7 aa, synthetic construct
RGDNGTL

SEQ ID NO: 29616 - protein, 7 aa, synthetic construct
RGDNGTT

SEQ ID NO: 29617 - protein, 7 aa, synthetic construct
RGDNHRG

SEQ ID NO: 29618 - protein, 7 aa, synthetic construct
RGDNHSD

SEQ ID NO: 29619 - protein, 7 aa, synthetic construct
RGDNHSE

SEQ ID NO: 29620 - protein, 7 aa, synthetic construct
RGDNIDR

SEQ ID NO: 29621 - protein, 7 aa, synthetic construct
RGDNQAF

SEQ ID NO: 29622 - protein, 7 aa, synthetic construct
RGDNVAQ

SEQ ID NO: 29623 - protein, 7 aa, synthetic construct
RGDNVDN

SEQ ID NO: 29624 - protein, 7 aa, synthetic construct
RGDNVLG

SEQ ID NO: 29625 - protein, 7 aa, synthetic construct
RGDQEIK

SEQ ID NO: 29626 - protein, 7 aa, synthetic construct
RGDDAFS

SEQ ID NO: 29627 - protein, 7 aa, synthetic construct
RGDQEVE

SEQ ID NO: 29628 - protein, 7 aa, synthetic construct
RGDQFER

SEQ ID NO: 29629 - protein, 7 aa, synthetic construct
RGDQGKD

SEQ ID NO: 29630 - protein, 7 aa, synthetic construct
RGDQHEA

SEQ ID NO: 29631 - protein, 7 aa, synthetic construct
RGDQHHS

SEQ ID NO: 29632 - protein, 7 aa, synthetic construct
RGDDASL

SEQ ID NO: 29633 - protein, 7 aa, synthetic construct
RGDQLLV

SEQ ID NO: 29634 - protein, 7 aa, synthetic construct
RGDQNFA

SEQ ID NO: 29635 - protein, 7 aa, synthetic construct
RGDQNGA

SEQ ID NO: 29636 - protein, 7 aa, synthetic construct
RGDQNSL

SEQ ID NO: 29637 - protein, 7 aa, synthetic construct
RGDQNVN

SEQ ID NO: 29638 - protein, 7 aa, synthetic construct
RGDQRDG

SEQ ID NO: 29639 - protein, 7 aa, synthetic construct
RGDQSLQ

SEQ ID NO: 29640 - protein, 7 aa, synthetic construct
RGDQTDA

SEQ ID NO: 29641 - protein, 7 aa, synthetic construct
RGDQTLA

SEQ ID NO: 29642 - protein, 7 aa, synthetic construct
RGDQTTG

SEQ ID NO: 29643 - protein, 7 aa, synthetic construct
RGDQVNH

SEQ ID NO: 29644 - protein, 7 aa, synthetic construct
RGDQVNQ

SEQ ID NO: 29645 - protein, 7 aa, synthetic construct
RGDDDNI

SEQ ID NO: 29646 - protein, 7 aa, synthetic construct
RGDRDLD

SEQ ID NO: 29647 - protein, 7 aa, synthetic construct
RGDRELG

SEQ ID NO: 29648 - protein, 7 aa, synthetic construct
RGDRFDT

SEQ ID NO: 29649 - protein, 7 aa, synthetic construct
RGDDDSL

SEQ ID NO: 29650 - protein, 7 aa, synthetic construct
RGDDDTA

SEQ ID NO: 29651 - protein, 7 aa, synthetic construct
RGDRLKE

SEQ ID NO: 29652 - protein, 7 aa, synthetic construct
RGDRQHE

SEQ ID NO: 29653 - protein, 7 aa, synthetic construct
RGDRREA

SEQ ID NO: 29654 - protein, 7 aa, synthetic construct
RGDDESH

SEQ ID NO: 29655 - protein, 7 aa, synthetic construct
RGDSDFV

SEQ ID NO: 29656 - protein, 7 aa, synthetic construct
RGDSDHR

SEQ ID NO: 29657 - protein, 7 aa, synthetic construct
RGDDFEN

SEQ ID NO: 29658 - protein, 7 aa, synthetic construct
RGDSDVR

SEQ ID NO: 29659 - protein, 7 aa, synthetic construct
RGDSEAF

SEQ ID NO: 29660 - protein, 7 aa, synthetic construct
RGDSEIL

SEQ ID NO: 29661 - protein, 7 aa, synthetic construct
RGDSEKD

SEQ ID NO: 29662 - protein, 7 aa, synthetic construct
RGDSFER

SEQ ID NO: 29663 - protein, 7 aa, synthetic construct
RGDSGSH

SEQ ID NO: 29664 - protein, 7 aa, synthetic construct
RGDDFKG

SEQ ID NO: 29665 - protein, 7 aa, synthetic construct
RGDSHFQ

SEQ ID NO: 29666 - protein, 7 aa, synthetic construct
RGDSHGS

SEQ ID NO: 29667 - protein, 7 aa, synthetic construct
RGDSHRT

SEQ ID NO: 29668 - protein, 7 aa, synthetic construct
RGDSIAT

SEQ ID NO: 29669 - protein, 7 aa, synthetic construct
RGDSIGS

SEQ ID NO: 29670 - protein, 7 aa, synthetic construct
RGDSIIH

SEQ ID NO: 29671 - protein, 7 aa, synthetic construct
RGDSINN

SEQ ID NO: 29672 - protein, 7 aa, synthetic construct
RGDSIRD

SEQ ID NO: 29673 - protein, 7 aa, synthetic construct
RGDSITD

SEQ ID NO: 29674 - protein, 7 aa, synthetic construct
RGDSKAN

SEQ ID NO: 29675 - protein, 7 aa, synthetic construct
RGDSKGE

SEQ ID NO: 29676 - protein, 7 aa, synthetic construct
RGDSLQH

SEQ ID NO: 29677 - protein, 7 aa, synthetic construct
RGDSNLG

SEQ ID NO: 29678 - protein, 7 aa, synthetic construct
RGDSQFQ

SEQ ID NO: 29679 - protein, 7 aa, synthetic construct
RGDSQTD

SEQ ID NO: 29680 - protein, 7 aa, synthetic construct
RGDDGHF

SEQ ID NO: 29681 - protein, 7 aa, synthetic construct
RGDSVFK

SEQ ID NO: 29682 - protein, 7 aa, synthetic construct
RGDDGIQ

SEQ ID NO: 29683 - protein, 7 aa, synthetic construct
RGDTAGA

SEQ ID NO: 29684 - protein, 7 aa, synthetic construct
RGDTANQ

SEQ ID NO: 29685 - protein, 7 aa, synthetic construct
RGDDGNT

SEQ ID NO: 29686 - protein, 7 aa, synthetic construct
RGDTDSF

SEQ ID NO: 29687 - protein, 7 aa, synthetic construct
RGDTDSQ

SEQ ID NO: 29688 - protein, 7 aa, synthetic construct
RGDTDVV

SEQ ID NO: 29689 - protein, 7 aa, synthetic construct
RGDDGTE

SEQ ID NO: 29690 - protein, 7 aa, synthetic construct
RGDTHFA

SEQ ID NO: 29691 - protein, 7 aa, synthetic construct
RGDTINH

SEQ ID NO: 29692 - protein, 7 aa, synthetic construct
RGDTKLA

SEQ ID NO: 29693 - protein, 7 aa, synthetic construct
RGDTNDQ

SEQ ID NO: 29694 - protein, 7 aa, synthetic construct
RGDTQFN

SEQ ID NO: 29695 - protein, 7 aa, synthetic construct
RGDTQHH

SEQ ID NO: 29696 - protein, 7 aa, synthetic construct
RGDTSSH

SEQ ID NO: 29697 - protein, 7 aa, synthetic construct
RGDTTSE

SEQ ID NO: 29698 - protein, 7 aa, synthetic construct
RGDTTTG

SEQ ID NO: 29699 - protein, 7 aa, synthetic construct
RGDTTVE

SEQ ID NO: 29700 - protein, 7 aa, synthetic construct
RGDTTVT

SEQ ID NO: 29701 - protein, 7 aa, synthetic construct
RGDTVLR

SEQ ID NO: 29702 - protein, 7 aa, synthetic construct
RGDTVQG

SEQ ID NO: 29703 - protein, 7 aa, synthetic construct
RGDVASN

SEQ ID NO: 29704 - protein, 7 aa, synthetic construct
RGDVATL

SEQ ID NO: 29705 - protein, 7 aa, synthetic construct
RGDDIDL

SEQ ID NO: 29706 - protein, 7 aa, synthetic construct
RGDVDFD

SEQ ID NO: 29707 - protein, 7 aa, synthetic construct
RGDVEAK

SEQ ID NO: 29708 - protein, 7 aa, synthetic construct
RGDVEAQ

SEQ ID NO: 29709 - protein, 7 aa, synthetic construct
RGDVFQQ

SEQ ID NO: 29710 - protein, 7 aa, synthetic construct
RGDVFSG

SEQ ID NO: 29711 - protein, 7 aa, synthetic construct
RGDDIIL

SEQ ID NO: 29712 - protein, 7 aa, synthetic construct
RGDVGTN

SEQ ID NO: 29713 - protein, 7 aa, synthetic construct
RGDVKHA

SEQ ID NO: 29714 - protein, 7 aa, synthetic construct
RGDVNDI

SEQ ID NO: 29715 - protein, 7 aa, synthetic construct
RGDVSNE

SEQ ID NO: 29716 - protein, 7 aa, synthetic construct
RGDVTLK

SEQ ID NO: 29717 - protein, 7 aa, synthetic construct
RGDVTNF

SEQ ID NO: 29718 - protein, 7 aa, synthetic construct
RGDDKHQ

SEQ ID NO: 29719 - protein, 7 aa, synthetic construct
RGDDKNE

SEQ ID NO: 29720 - protein, 7 aa, synthetic construct
RGDDLIT

SEQ ID NO: 29721 - protein, 7 aa, synthetic construct
RGDDLLK

SEQ ID NO: 29722 - protein, 7 aa, synthetic construct
RGDDNFL

SEQ ID NO: 29723 - protein, 7 aa, synthetic construct
RGDDQDV

SEQ ID NO: 29724 - protein, 7 aa, synthetic construct
RGDDQLV

SEQ ID NO: 29725 - protein, 7 aa, synthetic construct
RGDDRGE

SEQ ID NO: 29726 - protein, 7 aa, synthetic construct
RGDDRIQ

SEQ ID NO: 29727 - protein, 7 aa, synthetic construct
RGDDRQT

SEQ ID NO: 29728 - protein, 7 aa, synthetic construct
RGDAESI

SEQ ID NO: 29729 - protein, 7 aa, synthetic construct
RGDDVGL

SEQ ID NO: 29730 - protein, 7 aa, synthetic construct
RGDDVHN

SEQ ID NO: 29731 - protein, 7 aa, synthetic construct
RGDDVLI

SEQ ID NO: 29732 - protein, 7 aa, synthetic construct
RGDAEVS

SEQ ID NO: 29733 - protein, 7 aa, synthetic construct
RGDEAHR

SEQ ID NO: 29734 - protein, 7 aa, synthetic construct
RGDEDSK

SEQ ID NO: 29735 - protein, 7 aa, synthetic construct
RGDEELR

SEQ ID NO: 29736 - protein, 7 aa, synthetic construct
RGDAAGV

SEQ ID NO: 29737 - protein, 7 aa, synthetic construct
RGDEFHR

SEQ ID NO: 29738 - protein, 7 aa, synthetic construct
RGDAFHN

SEQ ID NO: 29739 - protein, 7 aa, synthetic construct
RGDEFRS

SEQ ID NO: 29740 - protein, 7 aa, synthetic construct
RGDEGTI

SEQ ID NO: 29741 - protein, 7 aa, synthetic construct
RGDEHEE

SEQ ID NO: 29742 - protein, 7 aa, synthetic construct
RGDEHNS

SEQ ID NO: 29743 - protein, 7 aa, synthetic construct
RGDEHQL

SEQ ID NO: 29744 - protein, 7 aa, synthetic construct
RGDEHRH

SEQ ID NO: 29745 - protein, 7 aa, synthetic construct
RGDENHQ

SEQ ID NO: 29746 - protein, 7 aa, synthetic construct
RGDAFVI

SEQ ID NO: 29747 - protein, 7 aa, synthetic construct
RGDENSV

SEQ ID NO: 29748 - protein, 7 aa, synthetic construct
RGDEQDF

SEQ ID NO: 29749 - protein, 7 aa, synthetic construct
RGDEQFR

SEQ ID NO: 29750 - protein, 7 aa, synthetic construct
RGDEQTT

SEQ ID NO: 29751 - protein, 7 aa, synthetic construct
RGDERDQ

SEQ ID NO: 29752 - protein, 7 aa, synthetic construct
RGDERHA

SEQ ID NO: 29753 - protein, 7 aa, synthetic construct
RGDETHR

SEQ ID NO: 29754 - protein, 7 aa, synthetic construct
RGDEVNL

SEQ ID NO: 29755 - protein, 7 aa, synthetic construct
RGDEVSS

SEQ ID NO: 29756 - protein, 7 aa, synthetic construct
RGDFDIA

SEQ ID NO: 29757 - protein, 7 aa, synthetic construct
RGDFEAE

SEQ ID NO: 29758 - protein, 7 aa, synthetic construct
RGDFEAG

SEQ ID NO: 29759 - protein, 7 aa, synthetic construct
RGDFFGR

SEQ ID NO: 29760 - protein, 7 aa, synthetic construct
RGDFFHE

SEQ ID NO: 29761 - protein, 7 aa, synthetic construct
RGDFGAL

SEQ ID NO: 29762 - protein, 7 aa, synthetic construct
RGDAHAF

SEQ ID NO: 29763 - protein, 7 aa, synthetic construct
RGDFHNF

SEQ ID NO: 29764 - protein, 7 aa, synthetic construct
RGDFIQH

SEQ ID NO: 29765 - protein, 7 aa, synthetic construct
RGDAHES

SEQ ID NO: 29766 - protein, 7 aa, synthetic construct
RGDFLGD

SEQ ID NO: 29767 - protein, 7 aa, synthetic construct
RGDFLGG

SEQ ID NO: 29768 - protein, 7 aa, synthetic construct
RGDFLLV

SEQ ID NO: 29769 - protein, 7 aa, synthetic construct
RGDFNGK

SEQ ID NO: 29770 - protein, 7 aa, synthetic construct
RGDAHKH

SEQ ID NO: 29771 - protein, 7 aa, synthetic construct
RGDFQHI

SEQ ID NO: 29772 - protein, 7 aa, synthetic construct
RGDFQLA

SEQ ID NO: 29773 - protein, 7 aa, synthetic construct
RGDFVNA

SEQ ID NO: 29774 - protein, 7 aa, synthetic construct
RGDAALV

SEQ ID NO: 29775 - protein, 7 aa, synthetic construct
RGDGAAS

SEQ ID NO: 29776 - protein, 7 aa, synthetic construct
RGDGDEH

SEQ ID NO: 29777 - protein, 7 aa, synthetic construct
RGDGDFG

SEQ ID NO: 29778 - protein, 7 aa, synthetic construct
RGDGDKF

SEQ ID NO: 29779 - protein, 7 aa, synthetic construct
RGDGEDS

SEQ ID NO: 29780 - protein, 7 aa, synthetic construct
RGDGHEF

SEQ ID NO: 29781 - protein, 7 aa, synthetic construct
RGDGKIQ

SEQ ID NO: 29782 - protein, 7 aa, synthetic construct
RGDGLER

SEQ ID NO: 29783 - protein, 7 aa, synthetic construct
RGDGNLT

SEQ ID NO: 29784 - protein, 7 aa, synthetic construct
RGDGNNA

SEQ ID NO: 29785 - protein, 7 aa, synthetic construct
RGDGTFI

SEQ ID NO: 29786 - protein, 7 aa, synthetic construct
RGDGTLH

SEQ ID NO: 29787 - protein, 7 aa, synthetic construct
RGDGVFS

SEQ ID NO: 29788 - protein, 7 aa, synthetic construct
RGDGVSD

SEQ ID NO: 29789 - protein, 7 aa, synthetic construct
RGDGVVE

SEQ ID NO: 29790 - protein, 7 aa, synthetic construct
RGDHAKA

SEQ ID NO: 29791 - protein, 7 aa, synthetic construct
RGDHDST

SEQ ID NO: 29792 - protein, 7 aa, synthetic construct
RGDHEDK

SEQ ID NO: 29793 - protein, 7 aa, synthetic construct
RGDHEFK

SEQ ID NO: 29794 - protein, 7 aa, synthetic construct
RGDHELV

SEQ ID NO: 29795 - protein, 7 aa, synthetic construct
RGDHFDS

SEQ ID NO: 29796 - protein, 7 aa, synthetic construct
RGDHGTA

SEQ ID NO: 29797 - protein, 7 aa, synthetic construct
RGDHIDI

SEQ ID NO: 29798 - protein, 7 aa, synthetic construct
RGDHLDF

SEQ ID NO: 29799 - protein, 7 aa, synthetic construct
RGDHNEV

SEQ ID NO: 29800 - protein, 7 aa, synthetic construct
RGDHNLS

SEQ ID NO: 29801 - protein, 7 aa, synthetic construct
RGDHNTN

SEQ ID NO: 29802 - protein, 7 aa, synthetic construct
RGDHQDT

SEQ ID NO: 29803 - protein, 7 aa, synthetic construct
RGDHSFD

SEQ ID NO: 29804 - protein, 7 aa, synthetic construct
RGDHVEA

SEQ ID NO: 29805 - protein, 7 aa, synthetic construct
RGDIADT

SEQ ID NO: 29806 - protein, 7 aa, synthetic construct
RGDIAER

SEQ ID NO: 29807 - protein, 7 aa, synthetic construct
RGDIAIH

SEQ ID NO: 29808 - protein, 7 aa, synthetic construct
RGDIFLS

SEQ ID NO: 29809 - protein, 7 aa, synthetic construct
RGDIFLT

SEQ ID NO: 29810 - protein, 7 aa, synthetic construct
RGDIFNG

SEQ ID NO: 29811 - protein, 7 aa, synthetic construct
RGDIGQQ

SEQ ID NO: 29812 - protein, 7 aa, synthetic construct
RGDIHTG

SEQ ID NO: 29813 - protein, 7 aa, synthetic construct
RGDIIFQ

SEQ ID NO: 29814 - protein, 7 aa, synthetic construct
RGDIIGI

SEQ ID NO: 29815 - protein, 7 aa, synthetic construct
RGDIKAS

SEQ ID NO: 29816 - protein, 7 aa, synthetic construct
RGDIKFG

SEQ ID NO: 29817 - protein, 7 aa, synthetic construct
RGDIKLL

SEQ ID NO: 29818 - protein, 7 aa, synthetic construct
RGDIKRT

SEQ ID NO: 29819 - protein, 7 aa, synthetic construct
RGDIKVA

SEQ ID NO: 29820 - protein, 7 aa, synthetic construct
RGDILIQ

SEQ ID NO: 29821 - protein, 7 aa, synthetic construct
RGDANTI

SEQ ID NO: 29822 - protein, 7 aa, synthetic construct
RGDINEH

SEQ ID NO: 29823 - protein, 7 aa, synthetic construct
RGDINGF

SEQ ID NO: 29824 - protein, 7 aa, synthetic construct
RGDINGI

SEQ ID NO: 29825 - protein, 7 aa, synthetic construct
RGDIQFF

SEQ ID NO: 29826 - protein, 7 aa, synthetic construct
RGDIQRG

SEQ ID NO: 29827 - protein, 7 aa, synthetic construct
RGDISTD

SEQ ID NO: 29828 - protein, 7 aa, synthetic construct
RGDITDI

SEQ ID NO: 29829 - protein, 7 aa, synthetic construct
RGDITDV

SEQ ID NO: 29830 - protein, 7 aa, synthetic construct
RGDITGL

SEQ ID NO: 29831 - protein, 7 aa, synthetic construct
RGDAQIN

SEQ ID NO: 29832 - protein, 7 aa, synthetic construct
RGDIVNQ

SEQ ID NO: 29833 - protein, 7 aa, synthetic construct
RGDKASG

SEQ ID NO: 29834 - protein, 7 aa, synthetic construct
RGDKDAS

SEQ ID NO: 29835 - protein, 7 aa, synthetic construct
RGDKEFN

SEQ ID NO: 29836 - protein, 7 aa, synthetic construct
RGDKFAL

SEQ ID NO: 29837 - protein, 7 aa, synthetic construct
RGDKHHD

SEQ ID NO: 29838 - protein, 7 aa, synthetic construct
RGDKIHE

SEQ ID NO: 29839 - protein, 7 aa, synthetic construct
RGDKIKE

SEQ ID NO: 29840 - protein, 7 aa, synthetic construct
RGDKKED

SEQ ID NO: 29841 - protein, 7 aa, synthetic construct
RGDARIH

SEQ ID NO: 29842 - protein, 7 aa, synthetic construct
RGDKNIH

SEQ ID NO: 29843 - protein, 7 aa, synthetic construct
RGDKNTA

SEQ ID NO: 29844 - protein, 7 aa, synthetic construct
RGDKRRS

SEQ ID NO: 29845 - protein, 7 aa, synthetic construct
RGDKTIS

SEQ ID NO: 29846 - protein, 7 aa, synthetic construct
RGDKVAT

SEQ ID NO: 29847 - protein, 7 aa, synthetic construct
RGDKVDS

SEQ ID NO: 29848 - protein, 7 aa, synthetic construct
RGDKVSG

SEQ ID NO: 29849 - protein, 7 aa, synthetic construct
RGDLAVV

SEQ ID NO: 29850 - protein, 7 aa, synthetic construct
RGDLDKE

SEQ ID NO: 29851 - protein, 7 aa, synthetic construct
RGDLEKF

SEQ ID NO: 29852 - protein, 7 aa, synthetic construct
RGDLFET

SEQ ID NO: 29853 - protein, 7 aa, synthetic construct
RGDASHF

SEQ ID NO: 29854 - protein, 7 aa, synthetic construct
RGDLGET

SEQ ID NO: 29855 - protein, 7 aa, synthetic construct
RGDLGND

SEQ ID NO: 29856 - protein, 7 aa, synthetic construct
RGDLGNH

SEQ ID NO: 29857 - protein, 7 aa, synthetic construct
RGDASKE

SEQ ID NO: 29858 - protein, 7 aa, synthetic construct
RGDLIEG

SEQ ID NO: 29859 - protein, 7 aa, synthetic construct
RGDLIRH

SEQ ID NO: 29860 - protein, 7 aa, synthetic construct
RGDLKQF

SEQ ID NO: 29861 - protein, 7 aa, synthetic construct
RGDLNEI

SEQ ID NO: 29862 - protein, 7 aa, synthetic construct
RGDLNKQ

SEQ ID NO: 29863 - protein, 7 aa, synthetic construct
RGDLNLH

SEQ ID NO: 29864 - protein, 7 aa, synthetic construct
RGDLNQD

SEQ ID NO: 29865 - protein, 7 aa, synthetic construct
RGDLQVS

SEQ ID NO: 29866 - protein, 7 aa, synthetic construct
RGDLREL

SEQ ID NO: 29867 - protein, 7 aa, synthetic construct
RGDNEQV

SEQ ID NO: 29868 - protein, 7 aa, synthetic construct
RGDNESI

SEQ ID NO: 29869 - protein, 7 aa, synthetic construct
RGDNFLK

SEQ ID NO: 29870 - protein, 7 aa, synthetic construct
RGDNGKD

SEQ ID NO: 29871 - protein, 7 aa, synthetic construct
RGDNIRA

SEQ ID NO: 29872 - protein, 7 aa, synthetic construct
RGDNLGA

SEQ ID NO: 29873 - protein, 7 aa, synthetic construct
RGDNNFA

SEQ ID NO: 29874 - protein, 7 aa, synthetic construct
RGDNNGN

SEQ ID NO: 29875 - protein, 7 aa, synthetic construct
RGDAVKE

SEQ ID NO: 29876 - protein, 7 aa, synthetic construct
RGDNREH

SEQ ID NO: 29877 - protein, 7 aa, synthetic construct
RGDNTDV

SEQ ID NO: 29878 - protein, 7 aa, synthetic construct
RGDNTKA

SEQ ID NO: 29879 - protein, 7 aa, synthetic construct
RGDNVQS

SEQ ID NO: 29880 - protein, 7 aa, synthetic construct
RGDQAAN

SEQ ID NO: 29881 - protein, 7 aa, synthetic construct
RGDQAFG

SEQ ID NO: 29882 - protein, 7 aa, synthetic construct
RGDQAFI

SEQ ID NO: 29883 - protein, 7 aa, synthetic construct
RGDQASG

SEQ ID NO: 29884 - protein, 7 aa, synthetic construct
RGDQDRF

SEQ ID NO: 29885 - protein, 7 aa, synthetic construct
RGDQFLQ

SEQ ID NO: 29886 - protein, 7 aa, synthetic construct
RGDQGFD

SEQ ID NO: 29887 - protein, 7 aa, synthetic construct
RGDQGGG

SEQ ID NO: 29888 - protein, 7 aa, synthetic construct
RGDQGRH

SEQ ID NO: 29889 - protein, 7 aa, synthetic construct
RGDQHGR

SEQ ID NO: 29890 - protein, 7 aa, synthetic construct
RGDQHLL

SEQ ID NO: 29891 - protein, 7 aa, synthetic construct
RGDQIDI

SEQ ID NO: 29892 - protein, 7 aa, synthetic construct
RGDQKTG

SEQ ID NO: 29893 - protein, 7 aa, synthetic construct
RGDQLAN

SEQ ID NO: 29894 - protein, 7 aa, synthetic construct
RGDQLEG

SEQ ID NO: 29895 - protein, 7 aa, synthetic construct
RGDDASH

SEQ ID NO: 29896 - protein, 7 aa, synthetic construct
RGDQLSK

SEQ ID NO: 29897 - protein, 7 aa, synthetic construct
RGDQQDD

SEQ ID NO: 29898 - protein, 7 aa, synthetic construct
RGDQQHE

SEQ ID NO: 29899 - protein, 7 aa, synthetic construct
RGDQRDL

SEQ ID NO: 29900 - protein, 7 aa, synthetic construct
RGDQTEE

SEQ ID NO: 29901 - protein, 7 aa, synthetic construct
RGDQTLR

SEQ ID NO: 29902 - protein, 7 aa, synthetic construct
RGDQTVI

SEQ ID NO: 29903 - protein, 7 aa, synthetic construct
RGDQVDF

SEQ ID NO: 29904 - protein, 7 aa, synthetic construct
RGDQVLH

SEQ ID NO: 29905 - protein, 7 aa, synthetic construct
RGDQVQF

SEQ ID NO: 29906 - protein, 7 aa, synthetic construct
RGDRAEG

SEQ ID NO: 29907 - protein, 7 aa, synthetic construct
RGDDDKT

SEQ ID NO: 29908 - protein, 7 aa, synthetic construct
RGDDDLF

SEQ ID NO: 29909 - protein, 7 aa, synthetic construct
RGDRDKD

SEQ ID NO: 29910 - protein, 7 aa, synthetic construct
RGDRDVH

SEQ ID NO: 29911 - protein, 7 aa, synthetic construct
RGDRHTN

SEQ ID NO: 29912 - protein, 7 aa, synthetic construct
RGDRIIE

SEQ ID NO: 29913 - protein, 7 aa, synthetic construct
RGDRIKA

SEQ ID NO: 29914 - protein, 7 aa, synthetic construct
RGDRIVD

SEQ ID NO: 29915 - protein, 7 aa, synthetic construct
RGDRLAD

SEQ ID NO: 29916 - protein, 7 aa, synthetic construct
RGDRQLD

SEQ ID NO: 29917 - protein, 7 aa, synthetic construct
RGDRVHD

SEQ ID NO: 29918 - protein, 7 aa, synthetic construct
RGDDFAR

SEQ ID NO: 29919 - protein, 7 aa, synthetic construct
RGDSDFS

SEQ ID NO: 29920 - protein, 7 aa, synthetic construct
RGDSEHN

SEQ ID NO: 29921 - protein, 7 aa, synthetic construct
RGDSEKV

SEQ ID NO: 29922 - protein, 7 aa, synthetic construct
RGDSGAF

SEQ ID NO: 29923 - protein, 7 aa, synthetic construct
RGDSGLA

SEQ ID NO: 29924 - protein, 7 aa, synthetic construct
RGDSGLT

SEQ ID NO: 29925 - protein, 7 aa, synthetic construct
RGDSGNG

SEQ ID NO: 29926 - protein, 7 aa, synthetic construct
RGDSILL

SEQ ID NO: 29927 - protein, 7 aa, synthetic construct
RGDSISE

SEQ ID NO: 29928 - protein, 7 aa, synthetic construct
RGDSKFG

SEQ ID NO: 29929 - protein, 7 aa, synthetic construct
RGDSNDH

SEQ ID NO: 29930 - protein, 7 aa, synthetic construct
RGDDFVL

SEQ ID NO: 29931 - protein, 7 aa, synthetic construct
RGDSQGV

SEQ ID NO: 29932 - protein, 7 aa, synthetic construct
RGDSQQT

SEQ ID NO: 29933 - protein, 7 aa, synthetic construct
RGDSRRH

SEQ ID NO: 29934 - protein, 7 aa, synthetic construct
RGDSSIQ

SEQ ID NO: 29935 - protein, 7 aa, synthetic construct
RGDSTLT

SEQ ID NO: 29936 - protein, 7 aa, synthetic construct
RGDSTTH

SEQ ID NO: 29937 - protein, 7 aa, synthetic construct
RGDDGID

SEQ ID NO: 29938 - protein, 7 aa, synthetic construct
RGDSVDH

SEQ ID NO: 29939 - protein, 7 aa, synthetic construct
RGDSVHA

SEQ ID NO: 29940 - protein, 7 aa, synthetic construct
RGDTALH

SEQ ID NO: 29941 - protein, 7 aa, synthetic construct
RGDTANA

SEQ ID NO: 29942 - protein, 7 aa, synthetic construct
RGDTAQG

SEQ ID NO: 29943 - protein, 7 aa, synthetic construct
RGDTASD

SEQ ID NO: 29944 - protein, 7 aa, synthetic construct
RGDTDKR

SEQ ID NO: 29945 - protein, 7 aa, synthetic construct
RGDTDVK

SEQ ID NO: 29946 - protein, 7 aa, synthetic construct
RGDDGQI

SEQ ID NO: 29947 - protein, 7 aa, synthetic construct
RGDTEDV

SEQ ID NO: 29948 - protein, 7 aa, synthetic construct
RGDTEFT

SEQ ID NO: 29949 - protein, 7 aa, synthetic construct
RGDTEHL

SEQ ID NO: 29950 - protein, 7 aa, synthetic construct
RGDTESK

SEQ ID NO: 29951 - protein, 7 aa, synthetic construct
RGDDGSG

SEQ ID NO: 29952 - protein, 7 aa, synthetic construct
RGDTGQS

SEQ ID NO: 29953 - protein, 7 aa, synthetic construct
RGDTIEL

SEQ ID NO: 29954 - protein, 7 aa, synthetic construct
RGDDHFV

SEQ ID NO: 29955 - protein, 7 aa, synthetic construct
RGDTLEK

SEQ ID NO: 29956 - protein, 7 aa, synthetic construct
RGDDHHH

SEQ ID NO: 29957 - protein, 7 aa, synthetic construct
RGDTQAA

SEQ ID NO: 29958 - protein, 7 aa, synthetic construct
RGDDHKT

SEQ ID NO: 29959 - protein, 7 aa, synthetic construct
RGDTRTE

SEQ ID NO: 29960 - protein, 7 aa, synthetic construct
RGDTSES

SEQ ID NO: 29961 - protein, 7 aa, synthetic construct
RGDTSSF

SEQ ID NO: 29962 - protein, 7 aa, synthetic construct
RGDTSTG

SEQ ID NO: 29963 - protein, 7 aa, synthetic construct
RGDTVSR

SEQ ID NO: 29964 - protein, 7 aa, synthetic construct
RGDVASL

SEQ ID NO: 29965 - protein, 7 aa, synthetic construct
RGDVAVV

SEQ ID NO: 29966 - protein, 7 aa, synthetic construct
RGDVDGL

SEQ ID NO: 29967 - protein, 7 aa, synthetic construct
RGDVDQD

SEQ ID NO: 29968 - protein, 7 aa, synthetic construct
RGDVDSL

SEQ ID NO: 29969 - protein, 7 aa, synthetic construct
RGDVFTK

SEQ ID NO: 29970 - protein, 7 aa, synthetic construct
RGDVGEE

SEQ ID NO: 29971 - protein, 7 aa, synthetic construct
RGDVGEL

SEQ ID NO: 29972 - protein, 7 aa, synthetic construct
RGDVGLT

SEQ ID NO: 29973 - protein, 7 aa, synthetic construct
RGDDIQR

SEQ ID NO: 29974 - protein, 7 aa, synthetic construct
RGDVLFG

SEQ ID NO: 29975 - protein, 7 aa, synthetic construct
RGDVNHG

SEQ ID NO: 29976 - protein, 7 aa, synthetic construct
RGDVNTG

SEQ ID NO: 29977 - protein, 7 aa, synthetic construct
RGDDKEF

SEQ ID NO: 29978 - protein, 7 aa, synthetic construct
RGDVVAH

SEQ ID NO: 29979 - protein, 7 aa, synthetic construct
RGDVVDS

SEQ ID NO: 29980 - protein, 7 aa, synthetic construct
RGDVVIN

SEQ ID NO: 29981 - protein, 7 aa, synthetic construct
RGDDKNG

SEQ ID NO: 29982 - protein, 7 aa, synthetic construct
RGDDLKF

SEQ ID NO: 29983 - protein, 7 aa, synthetic construct
RGDAAFN

SEQ ID NO: 29984 - protein, 7 aa, synthetic construct
RGDDNIR

SEQ ID NO: 29985 - protein, 7 aa, synthetic construct
RGDDNLQ

SEQ ID NO: 29986 - protein, 7 aa, synthetic construct
RGDDNTN

SEQ ID NO: 29987 - protein, 7 aa, synthetic construct
RGDDQGE

SEQ ID NO: 29988 - protein, 7 aa, synthetic construct
RGDDRAL

SEQ ID NO: 29989 - protein, 7 aa, synthetic construct
RGDAENA

SEQ ID NO: 29990 - protein, 7 aa, synthetic construct
RGDDREL

SEQ ID NO: 29991 - protein, 7 aa, synthetic construct
RGDDRKE

SEQ ID NO: 29992 - protein, 7 aa, synthetic construct
RGDDRQI

SEQ ID NO: 29993 - protein, 7 aa, synthetic construct
RGDDRST

SEQ ID NO: 29994 - protein, 7 aa, synthetic construct
RGDDRTQ

SEQ ID NO: 29995 - protein, 7 aa, synthetic construct
RGDDSFH

SEQ ID NO: 29996 - protein, 7 aa, synthetic construct
RGDDSNA

SEQ ID NO: 29997 - protein, 7 aa, synthetic construct
RGDDSSV

SEQ ID NO: 29998 - protein, 7 aa, synthetic construct
RGDAESQ

SEQ ID NO: 29999 - protein, 7 aa, synthetic construct
RGDDVEH

SEQ ID NO: 30000 - protein, 7 aa, synthetic construct
RGDEDNQ

SEQ ID NO: 30001 - protein, 7 aa, synthetic construct
RGDEEGN

SEQ ID NO: 30002 - protein, 7 aa, synthetic construct
RGDEFFQ

SEQ ID NO: 30003 - protein, 7 aa, synthetic construct
RGDEGEL

SEQ ID NO: 30004 - protein, 7 aa, synthetic construct
RGDEGGH

SEQ ID NO: 30005 - protein, 7 aa, synthetic construct
RGDEHHE

SEQ ID NO: 30006 - protein, 7 aa, synthetic construct
RGDEHIV

SEQ ID NO: 30007 - protein, 7 aa, synthetic construct
RGDEHSI

SEQ ID NO: 30008 - protein, 7 aa, synthetic construct
RGDEIER

SEQ ID NO: 30009 - protein, 7 aa, synthetic construct
RGDEINA

SEQ ID NO: 30010 - protein, 7 aa, synthetic construct
RGDEISA

SEQ ID NO: 30011 - protein, 7 aa, synthetic construct
RGDEKAV

SEQ ID NO: 30012 - protein, 7 aa, synthetic construct
RGDEKGG

SEQ ID NO: 30013 - protein, 7 aa, synthetic construct
RGDELVI

SEQ ID NO: 30014 - protein, 7 aa, synthetic construct
RGDENKS

SEQ ID NO: 30015 - protein, 7 aa, synthetic construct
RGDEQFH

SEQ ID NO: 30016 - protein, 7 aa, synthetic construct
RGDAGAL

SEQ ID NO: 30017 - protein, 7 aa, synthetic construct
RGDEQSK

SEQ ID NO: 30018 - protein, 7 aa, synthetic construct
RGDEQTS

SEQ ID NO: 30019 - protein, 7 aa, synthetic construct
RGDERFA

SEQ ID NO: 30020 - protein, 7 aa, synthetic construct
RGDERFT

SEQ ID NO: 30021 - protein, 7 aa, synthetic construct
RGDESFL

SEQ ID NO: 30022 - protein, 7 aa, synthetic construct
RGDESRQ

SEQ ID NO: 30023 - protein, 7 aa, synthetic construct
RGDESVG

SEQ ID NO: 30024 - protein, 7 aa, synthetic construct
RGDEVGD

SEQ ID NO: 30025 - protein, 7 aa, synthetic construct
RGDEVKD

SEQ ID NO: 30026 - protein, 7 aa, synthetic construct
RGDFAGG

SEQ ID NO: 30027 - protein, 7 aa, synthetic construct
RGDAGNQ

SEQ ID NO: 30028 - protein, 7 aa, synthetic construct
RGDFEFE

SEQ ID NO: 30029 - protein, 7 aa, synthetic construct
RGDFESQ

SEQ ID NO: 30030 - protein, 7 aa, synthetic construct
RGDFGFD

SEQ ID NO: 30031 - protein, 7 aa, synthetic construct
RGDFHEG

SEQ ID NO: 30032 - protein, 7 aa, synthetic construct
RGDFHEQ

SEQ ID NO: 30033 - protein, 7 aa, synthetic construct
RGDFHFE

SEQ ID NO: 30034 - protein, 7 aa, synthetic construct
RGDFILV

SEQ ID NO: 30035 - protein, 7 aa, synthetic construct
RGDFLHG

SEQ ID NO: 30036 - protein, 7 aa, synthetic construct
RGDFLLI

SEQ ID NO: 30037 - protein, 7 aa, synthetic construct
RGDFNSE

SEQ ID NO: 30038 - protein, 7 aa, synthetic construct
RGDFQHH

SEQ ID NO: 30039 - protein, 7 aa, synthetic construct
RGDFSNE

SEQ ID NO: 30040 - protein, 7 aa, synthetic construct
RGDFTHF

SEQ ID NO: 30041 - protein, 7 aa, synthetic construct
RGDFTTS

SEQ ID NO: 30042 - protein, 7 aa, synthetic construct
RGDFVIE

SEQ ID NO: 30043 - protein, 7 aa, synthetic construct
RGDFVKE

SEQ ID NO: 30044 - protein, 7 aa, synthetic construct
RGDFVLG

SEQ ID NO: 30045 - protein, 7 aa, synthetic construct
RGDGAQN

SEQ ID NO: 30046 - protein, 7 aa, synthetic construct
RGDGDHK

SEQ ID NO: 30047 - protein, 7 aa, synthetic construct
RGDAIEA

SEQ ID NO: 30048 - protein, 7 aa, synthetic construct
RGDGDKS

SEQ ID NO: 30049 - protein, 7 aa, synthetic construct
RGDGERA

SEQ ID NO: 30050 - protein, 7 aa, synthetic construct
RGDGFTD

SEQ ID NO: 30051 - protein, 7 aa, synthetic construct
RGDGHEV

SEQ ID NO: 30052 - protein, 7 aa, synthetic construct
RGDGIET

SEQ ID NO: 30053 - protein, 7 aa, synthetic construct
RGDGNGN

SEQ ID NO: 30054 - protein, 7 aa, synthetic construct
RGDGNLE

SEQ ID NO: 30055 - protein, 7 aa, synthetic construct
RGDGNLF

SEQ ID NO: 30056 - protein, 7 aa, synthetic construct
RGDGRFD

SEQ ID NO: 30057 - protein, 7 aa, synthetic construct
RGDGRQD

SEQ ID NO: 30058 - protein, 7 aa, synthetic construct
RGDHAET

SEQ ID NO: 30059 - protein, 7 aa, synthetic construct
RGDHAGA

SEQ ID NO: 30060 - protein, 7 aa, synthetic construct
RGDHEAF

SEQ ID NO: 30061 - protein, 7 aa, synthetic construct
RGDHFEG

SEQ ID NO: 30062 - protein, 7 aa, synthetic construct
RGDHFHG

SEQ ID NO: 30063 - protein, 7 aa, synthetic construct
RGDHFNT

SEQ ID NO: 30064 - protein, 7 aa, synthetic construct
RGDHFQT

SEQ ID NO: 30065 - protein, 7 aa, synthetic construct
RGDHGDA

SEQ ID NO: 30066 - protein, 7 aa, synthetic construct
RGDHHFA

SEQ ID NO: 30067 - protein, 7 aa, synthetic construct
RGDHHTE

SEQ ID NO: 30068 - protein, 7 aa, synthetic construct
RGDHIKF

SEQ ID NO: 30069 - protein, 7 aa, synthetic construct
RGDHIVF

SEQ ID NO: 30070 - protein, 7 aa, synthetic construct
RGDHKVK

SEQ ID NO: 30071 - protein, 7 aa, synthetic construct
RGDHNLD

SEQ ID NO: 30072 - protein, 7 aa, synthetic construct
RGDHNLL

SEQ ID NO: 30073 - protein, 7 aa, synthetic construct
RGDHNSE

SEQ ID NO: 30074 - protein, 7 aa, synthetic construct
RGDHQEH

SEQ ID NO: 30075 - protein, 7 aa, synthetic construct
RGDHQFE

SEQ ID NO: 30076 - protein, 7 aa, synthetic construct
RGDHQVT

SEQ ID NO: 30077 - protein, 7 aa, synthetic construct
RGDHSAA

SEQ ID NO: 30078 - protein, 7 aa, synthetic construct
RGDHSAD

SEQ ID NO: 30079 - protein, 7 aa, synthetic construct
RGDHTVG

SEQ ID NO: 30080 - protein, 7 aa, synthetic construct
RGDIDDT

SEQ ID NO: 30081 - protein, 7 aa, synthetic construct
RGDIDEI

SEQ ID NO: 30082 - protein, 7 aa, synthetic construct
RGDIDER

SEQ ID NO: 30083 - protein, 7 aa, synthetic construct
RGDIDKF

SEQ ID NO: 30084 - protein, 7 aa, synthetic construct
RGDIDTE

SEQ ID NO: 30085 - protein, 7 aa, synthetic construct
RGDANET

SEQ ID NO: 30086 - protein, 7 aa, synthetic construct
RGDANFF

SEQ ID NO: 30087 - protein, 7 aa, synthetic construct
RGDIERG

SEQ ID NO: 30088 - protein, 7 aa, synthetic construct
RGDIERQ

SEQ ID NO: 30089 - protein, 7 aa, synthetic construct
RGDIFIS

SEQ ID NO: 30090 - protein, 7 aa, synthetic construct
RGDIFSG

SEQ ID NO: 30091 - protein, 7 aa, synthetic construct
RGDIGKH

SEQ ID NO: 30092 - protein, 7 aa, synthetic construct
RGDIHNF

SEQ ID NO: 30093 - protein, 7 aa, synthetic construct
RGDIIEG

SEQ ID NO: 30094 - protein, 7 aa, synthetic construct
RGDIIGR

SEQ ID NO: 30095 - protein, 7 aa, synthetic construct
RGDIIVS

SEQ ID NO: 30096 - protein, 7 aa, synthetic construct
RGDIKKE

SEQ ID NO: 30097 - protein, 7 aa, synthetic construct
RGDIKKG

SEQ ID NO: 30098 - protein, 7 aa, synthetic construct
RGDAADI

SEQ ID NO: 30099 - protein, 7 aa, synthetic construct
RGDILEV

SEQ ID NO: 30100 - protein, 7 aa, synthetic construct
RGDILTF

SEQ ID NO: 30101 - protein, 7 aa, synthetic construct
RGDILVS

SEQ ID NO: 30102 - protein, 7 aa, synthetic construct
RGDIQHG

SEQ ID NO: 30103 - protein, 7 aa, synthetic construct
RGDIQLG

SEQ ID NO: 30104 - protein, 7 aa, synthetic construct
RGDIQQA

SEQ ID NO: 30105 - protein, 7 aa, synthetic construct
RGDIRDG

SEQ ID NO: 30106 - protein, 7 aa, synthetic construct
RGDITAI

SEQ ID NO: 30107 - protein, 7 aa, synthetic construct
RGDITIS

SEQ ID NO: 30108 - protein, 7 aa, synthetic construct
RGDIVDL

SEQ ID NO: 30109 - protein, 7 aa, synthetic construct
RGDAQIV

SEQ ID NO: 30110 - protein, 7 aa, synthetic construct
RGDKDEL

SEQ ID NO: 30111 - protein, 7 aa, synthetic construct
RGDKDQN

SEQ ID NO: 30112 - protein, 7 aa, synthetic construct
RGDKDVE

SEQ ID NO: 30113 - protein, 7 aa, synthetic construct
RGDKEAQ

SEQ ID NO: 30114 - protein, 7 aa, synthetic construct
RGDKEKF

SEQ ID NO: 30115 - protein, 7 aa, synthetic construct
RGDKELH

SEQ ID NO: 30116 - protein, 7 aa, synthetic construct
RGDKFDV

SEQ ID NO: 30117 - protein, 7 aa, synthetic construct
RGDKGEL

SEQ ID NO: 30118 - protein, 7 aa, synthetic construct
RGDKHEN

SEQ ID NO: 30119 - protein, 7 aa, synthetic construct
RGDKLIR

SEQ ID NO: 30120 - protein, 7 aa, synthetic construct
RGDKNGT

SEQ ID NO: 30121 - protein, 7 aa, synthetic construct
RGDKRRN

SEQ ID NO: 30122 - protein, 7 aa, synthetic construct
RGDKSDF

SEQ ID NO: 30123 - protein, 7 aa, synthetic construct
RGDKSHG

SEQ ID NO: 30124 - protein, 7 aa, synthetic construct
RGDKTFH

SEQ ID NO: 30125 - protein, 7 aa, synthetic construct
RGDKVET

SEQ ID NO: 30126 - protein, 7 aa, synthetic construct
RGDKVGT

SEQ ID NO: 30127 - protein, 7 aa, synthetic construct
RGDKVIS

SEQ ID NO: 30128 - protein, 7 aa, synthetic construct
RGDLEFD

SEQ ID NO: 30129 - protein, 7 aa, synthetic construct
RGDLEGI

SEQ ID NO: 30130 - protein, 7 aa, synthetic construct
RGDLEIA

SEQ ID NO: 30131 - protein, 7 aa, synthetic construct
RGDLGDG

SEQ ID NO: 30132 - protein, 7 aa, synthetic construct
RGDLHAN

SEQ ID NO: 30133 - protein, 7 aa, synthetic construct
RGDLHVE

SEQ ID NO: 30134 - protein, 7 aa, synthetic construct
RGDLIQK

SEQ ID NO: 30135 - protein, 7 aa, synthetic construct
RGDLKRG

SEQ ID NO: 30136 - protein, 7 aa, synthetic construct
RGDLLGL

SEQ ID NO: 30137 - protein, 7 aa, synthetic construct
RGDLNAH

SEQ ID NO: 30138 - protein, 7 aa, synthetic construct
RGDLNHN

SEQ ID NO: 30139 - protein, 7 aa, synthetic construct
RGDLNNE

SEQ ID NO: 30140 - protein, 7 aa, synthetic construct
RGDLQSD

SEQ ID NO: 30141 - protein, 7 aa, synthetic construct
RGDLSFG

SEQ ID NO: 30142 - protein, 7 aa, synthetic construct
RGDLTLN

SEQ ID NO: 30143 - protein, 7 aa, synthetic construct
RGDLTVK

SEQ ID NO: 30144 - protein, 7 aa, synthetic construct
RGDLVAA

SEQ ID NO: 30145 - protein, 7 aa, synthetic construct
RGDATKS

SEQ ID NO: 30146 - protein, 7 aa, synthetic construct
RGDNDDS

SEQ ID NO: 30147 - protein, 7 aa, synthetic construct
RGDNDLL

SEQ ID NO: 30148 - protein, 7 aa, synthetic construct
RGDNDRN

SEQ ID NO: 30149 - protein, 7 aa, synthetic construct
RGDNELI

SEQ ID NO: 30150 - protein, 7 aa, synthetic construct
RGDNESN

SEQ ID NO: 30151 - protein, 7 aa, synthetic construct
RGDNESQ

SEQ ID NO: 30152 - protein, 7 aa, synthetic construct
RGDNHDI

SEQ ID NO: 30153 - protein, 7 aa, synthetic construct
RGDNIET

SEQ ID NO: 30154 - protein, 7 aa, synthetic construct
RGDNIQN

SEQ ID NO: 30155 - protein, 7 aa, synthetic construct
RGDNITI

SEQ ID NO: 30156 - protein, 7 aa, synthetic construct
RGDNIVF

SEQ ID NO: 30157 - protein, 7 aa, synthetic construct
RGDAVHD

SEQ ID NO: 30158 - protein, 7 aa, synthetic construct
RGDNLRH

SEQ ID NO: 30159 - protein, 7 aa, synthetic construct
RGDNNVR

SEQ ID NO: 30160 - protein, 7 aa, synthetic construct
RGDNQDN

SEQ ID NO: 30161 - protein, 7 aa, synthetic construct
RGDNQEQ

SEQ ID NO: 30162 - protein, 7 aa, synthetic construct
RGDNRQA

SEQ ID NO: 30163 - protein, 7 aa, synthetic construct
RGDNTDI

SEQ ID NO: 30164 - protein, 7 aa, synthetic construct
RGDNTGQ

SEQ ID NO: 30165 - protein, 7 aa, synthetic construct
RGDADKF

SEQ ID NO: 30166 - protein, 7 aa, synthetic construct
RGDQATE

SEQ ID NO: 30167 - protein, 7 aa, synthetic construct
RGDQDTE

SEQ ID NO: 30168 - protein, 7 aa, synthetic construct
RGDQELH

SEQ ID NO: 30169 - protein, 7 aa, synthetic construct
RGDQFEE

SEQ ID NO: 30170 - protein, 7 aa, synthetic construct
RGDDAIV

SEQ ID NO: 30171 - protein, 7 aa, synthetic construct
RGDQGVG

SEQ ID NO: 30172 - protein, 7 aa, synthetic construct
RGDQIHF

SEQ ID NO: 30173 - protein, 7 aa, synthetic construct
RGDQIIF

SEQ ID NO: 30174 - protein, 7 aa, synthetic construct
RGDQKEN

SEQ ID NO: 30175 - protein, 7 aa, synthetic construct
RGDDARS

SEQ ID NO: 30176 - protein, 7 aa, synthetic construct
RGDQNEN

SEQ ID NO: 30177 - protein, 7 aa, synthetic construct
RGDQRQD

SEQ ID NO: 30178 - protein, 7 aa, synthetic construct
RGDDDEL

SEQ ID NO: 30179 - protein, 7 aa, synthetic construct
RGDQSLK

SEQ ID NO: 30180 - protein, 7 aa, synthetic construct
RGDDDGI

SEQ ID NO: 30181 - protein, 7 aa, synthetic construct
RGDQTNN

SEQ ID NO: 30182 - protein, 7 aa, synthetic construct
RGDRAAG

SEQ ID NO: 30183 - protein, 7 aa, synthetic construct
RGDDDLK

SEQ ID NO: 30184 - protein, 7 aa, synthetic construct
RGDDDNR

SEQ ID NO: 30185 - protein, 7 aa, synthetic construct
RGDRDVA

SEQ ID NO: 30186 - protein, 7 aa, synthetic construct
RGDREET

SEQ ID NO: 30187 - protein, 7 aa, synthetic construct
RGDRHHD

SEQ ID NO: 30188 - protein, 7 aa, synthetic construct
RGDRHLA

SEQ ID NO: 30189 - protein, 7 aa, synthetic construct
RGDRISA

SEQ ID NO: 30190 - protein, 7 aa, synthetic construct
RGDDEFR

SEQ ID NO: 30191 - protein, 7 aa, synthetic construct
RGDDEHA

SEQ ID NO: 30192 - protein, 7 aa, synthetic construct
RGDDELH

SEQ ID NO: 30193 - protein, 7 aa, synthetic construct
RGDDEVL

SEQ ID NO: 30194 - protein, 7 aa, synthetic construct
RGDRVSE

SEQ ID NO: 30195 - protein, 7 aa, synthetic construct
RGDSAAL

SEQ ID NO: 30196 - protein, 7 aa, synthetic construct
RGDSADF

SEQ ID NO: 30197 - protein, 7 aa, synthetic construct
RGDSDRS

SEQ ID NO: 30198 - protein, 7 aa, synthetic construct
RGDSEAS

SEQ ID NO: 30199 - protein, 7 aa, synthetic construct
RGDSEFG

SEQ ID NO: 30200 - protein, 7 aa, synthetic construct
RGDSETL

SEQ ID NO: 30201 - protein, 7 aa, synthetic construct
RGDSFKN

SEQ ID NO: 30202 - protein, 7 aa, synthetic construct
RGDSGLH

SEQ ID NO: 30203 - protein, 7 aa, synthetic construct
RGDDFIS

SEQ ID NO: 30204 - protein, 7 aa, synthetic construct
RGDSHVK

SEQ ID NO: 30205 - protein, 7 aa, synthetic construct
RGDDFRK

SEQ ID NO: 30206 - protein, 7 aa, synthetic construct
RGDDFST

SEQ ID NO: 30207 - protein, 7 aa, synthetic construct
RGDDFTD

SEQ ID NO: 30208 - protein, 7 aa, synthetic construct
RGDSNEV

SEQ ID NO: 30209 - protein, 7 aa, synthetic construct
RGDSNLH

SEQ ID NO: 30210 - protein, 7 aa, synthetic construct
RGDSSIT

SEQ ID NO: 30211 - protein, 7 aa, synthetic construct
RGDSSQR

SEQ ID NO: 30212 - protein, 7 aa, synthetic construct
RGDSTHN

SEQ ID NO: 30213 - protein, 7 aa, synthetic construct
RGDSTRR

SEQ ID NO: 30214 - protein, 7 aa, synthetic construct
RGDSTTV

SEQ ID NO: 30215 - protein, 7 aa, synthetic construct
RGDSVLK

SEQ ID NO: 30216 - protein, 7 aa, synthetic construct
RGDTAEF

SEQ ID NO: 30217 - protein, 7 aa, synthetic construct
RGDTAFF

SEQ ID NO: 30218 - protein, 7 aa, synthetic construct
RGDTANN

SEQ ID NO: 30219 - protein, 7 aa, synthetic construct
RGDTDDL

SEQ ID NO: 30220 - protein, 7 aa, synthetic construct
RGDTEVL

SEQ ID NO: 30221 - protein, 7 aa, synthetic construct
RGDTFKN

SEQ ID NO: 30222 - protein, 7 aa, synthetic construct
RGDTFVL

SEQ ID NO: 30223 - protein, 7 aa, synthetic construct
RGDTGFH

SEQ ID NO: 30224 - protein, 7 aa, synthetic construct
RGDTGIH

SEQ ID NO: 30225 - protein, 7 aa, synthetic construct
RGDTHRG

SEQ ID NO: 30226 - protein, 7 aa, synthetic construct
RGDTKHG

SEQ ID NO: 30227 - protein, 7 aa, synthetic construct
RGDTLAI

SEQ ID NO: 30228 - protein, 7 aa, synthetic construct
RGDTLNN

SEQ ID NO: 30229 - protein, 7 aa, synthetic construct
RGDTLQI

SEQ ID NO: 30230 - protein, 7 aa, synthetic construct
RGDTNAI

SEQ ID NO: 30231 - protein, 7 aa, synthetic construct
RGDTNRN

SEQ ID NO: 30232 - protein, 7 aa, synthetic construct
RGDTNVQ

SEQ ID NO: 30233 - protein, 7 aa, synthetic construct
RGDTQAT

SEQ ID NO: 30234 - protein, 7 aa, synthetic construct
RGDTRGE

SEQ ID NO: 30235 - protein, 7 aa, synthetic construct
RGDTRVE

SEQ ID NO: 30236 - protein, 7 aa, synthetic construct
RGDTSHT

SEQ ID NO: 30237 - protein, 7 aa, synthetic construct
RGDTSSE

SEQ ID NO: 30238 - protein, 7 aa, synthetic construct
RGDTTKE

SEQ ID NO: 30239 - protein, 7 aa, synthetic construct
RGDTVDR

SEQ ID NO: 30240 - protein, 7 aa, synthetic construct
RGDTVNG

SEQ ID NO: 30241 - protein, 7 aa, synthetic construct
RGDVALA

SEQ ID NO: 30242 - protein, 7 aa, synthetic construct
RGDVDLF

SEQ ID NO: 30243 - protein, 7 aa, synthetic construct
RGDVEFT

SEQ ID NO: 30244 - protein, 7 aa, synthetic construct
RGDVEIH

SEQ ID NO: 30245 - protein, 7 aa, synthetic construct
RGDVFSE

SEQ ID NO: 30246 - protein, 7 aa, synthetic construct
RGDVFTG

SEQ ID NO: 30247 - protein, 7 aa, synthetic construct
RGDVGES

SEQ ID NO: 30248 - protein, 7 aa, synthetic construct
RGDDIKS

SEQ ID NO: 30249 - protein, 7 aa, synthetic construct
RGDVING

SEQ ID NO: 30250 - protein, 7 aa, synthetic construct
RGDVKDD

SEQ ID NO: 30251 - protein, 7 aa, synthetic construct
RGDVKSD

SEQ ID NO: 30252 - protein, 7 aa, synthetic construct
RGDVLDF

SEQ ID NO: 30253 - protein, 7 aa, synthetic construct
RGDDITF

SEQ ID NO: 30254 - protein, 7 aa, synthetic construct
RGDVQVE

SEQ ID NO: 30255 - protein, 7 aa, synthetic construct
RGDDKDR

SEQ ID NO: 30256 - protein, 7 aa, synthetic construct
RGDVTKD

SEQ ID NO: 30257 - protein, 7 aa, synthetic construct
RGDAEFK

SEQ ID NO: 30258 - protein, 7 aa, synthetic construct
RGDVTLN

SEQ ID NO: 30259 - protein, 7 aa, synthetic construct
RGDVVFS

SEQ ID NO: 30260 - protein, 7 aa, synthetic construct
RGDVVKD

SEQ ID NO: 30261 - protein, 7 aa, synthetic construct
RGDVVLN

SEQ ID NO: 30262 - protein, 7 aa, synthetic construct
RGDVVSD

SEQ ID NO: 30263 - protein, 7 aa, synthetic construct
RGDVVTS

SEQ ID NO: 30264 - protein, 7 aa, synthetic construct
RGDDLSI

SEQ ID NO: 30265 - protein, 7 aa, synthetic construct
RGDDNAF

SEQ ID NO: 30266 - protein, 7 aa, synthetic construct
RGDDNKI

SEQ ID NO: 30267 - protein, 7 aa, synthetic construct
RGDDSSD

SEQ ID NO: 30268 - protein, 7 aa, synthetic construct
RGDAEST

SEQ ID NO: 30269 - protein, 7 aa, synthetic construct
RGDDTNI

SEQ ID NO: 30270 - protein, 7 aa, synthetic construct
RGDAEVF

SEQ ID NO: 30271 - protein, 7 aa, synthetic construct
RGDDVST

SEQ ID NO: 30272 - protein, 7 aa, synthetic construct
RGDEALG

SEQ ID NO: 30273 - protein, 7 aa, synthetic construct
RGDEEAH

SEQ ID NO: 30274 - protein, 7 aa, synthetic construct
RGDEEKH

SEQ ID NO: 30275 - protein, 7 aa, synthetic construct
RGDEERI

SEQ ID NO: 30276 - protein, 7 aa, synthetic construct
RGDEERN

SEQ ID NO: 30277 - protein, 7 aa, synthetic construct
RGDAFHQ

SEQ ID NO: 30278 - protein, 7 aa, synthetic construct
RGDEFSI

SEQ ID NO: 30279 - protein, 7 aa, synthetic construct
RGDEFVR

SEQ ID NO: 30280 - protein, 7 aa, synthetic construct
RGDEGHI

SEQ ID NO: 30281 - protein, 7 aa, synthetic construct
RGDEGIT

SEQ ID NO: 30282 - protein, 7 aa, synthetic construct
RGDEGVF

SEQ ID NO: 30283 - protein, 7 aa, synthetic construct
RGDEHHQ

SEQ ID NO: 30284 - protein, 7 aa, synthetic construct
RGDEHNV

SEQ ID NO: 30285 - protein, 7 aa, synthetic construct
RGDEHQR

SEQ ID NO: 30286 - protein, 7 aa, synthetic construct
RGDEIRL

SEQ ID NO: 30287 - protein, 7 aa, synthetic construct
RGDEIVI

SEQ ID NO: 30288 - protein, 7 aa, synthetic construct
RGDEKFQ

SEQ ID NO: 30289 - protein, 7 aa, synthetic construct
RGDEKLE

SEQ ID NO: 30290 - protein, 7 aa, synthetic construct
RGDEKQR

SEQ ID NO: 30291 - protein, 7 aa, synthetic construct
RGDELAF

SEQ ID NO: 30292 - protein, 7 aa, synthetic construct
RGDENAD

SEQ ID NO: 30293 - protein, 7 aa, synthetic construct
RGDENQT

SEQ ID NO: 30294 - protein, 7 aa, synthetic construct
RGDENQV

SEQ ID NO: 30295 - protein, 7 aa, synthetic construct
RGDENRF

SEQ ID NO: 30296 - protein, 7 aa, synthetic construct
RGDEQRH

SEQ ID NO: 30297 - protein, 7 aa, synthetic construct
RGDERIE

SEQ ID NO: 30298 - protein, 7 aa, synthetic construct
RGDERKS

SEQ ID NO: 30299 - protein, 7 aa, synthetic construct
RGDESFN

SEQ ID NO: 30300 - protein, 7 aa, synthetic construct
RGDESKG

SEQ ID NO: 30301 - protein, 7 aa, synthetic construct
RGDESLV

SEQ ID NO: 30302 - protein, 7 aa, synthetic construct
RGDETFI

SEQ ID NO: 30303 - protein, 7 aa, synthetic construct
RGDAGIN

SEQ ID NO: 30304 - protein, 7 aa, synthetic construct
RGDFDGE

SEQ ID NO: 30305 - protein, 7 aa, synthetic construct
RGDFETD

SEQ ID NO: 30306 - protein, 7 aa, synthetic construct
RGDFEVG

SEQ ID NO: 30307 - protein, 7 aa, synthetic construct
RGDAHAS

SEQ ID NO: 30308 - protein, 7 aa, synthetic construct
RGDFIKL

SEQ ID NO: 30309 - protein, 7 aa, synthetic construct
RGDFIQT

SEQ ID NO: 30310 - protein, 7 aa, synthetic construct
RGDFKIE

SEQ ID NO: 30311 - protein, 7 aa, synthetic construct
RGDFLHH

SEQ ID NO: 30312 - protein, 7 aa, synthetic construct
RGDFLQF

SEQ ID NO: 30313 - protein, 7 aa, synthetic construct
RGDFNGT

SEQ ID NO: 30314 - protein, 7 aa, synthetic construct
RGDFNIS

SEQ ID NO: 30315 - protein, 7 aa, synthetic construct
RGDAALF

SEQ ID NO: 30316 - protein, 7 aa, synthetic construct
RGDFQFE

SEQ ID NO: 30317 - protein, 7 aa, synthetic construct
RGDFSGE

SEQ ID NO: 30318 - protein, 7 aa, synthetic construct
RGDFTFF

SEQ ID NO: 30319 - protein, 7 aa, synthetic construct
RGDFTQL

SEQ ID NO: 30320 - protein, 7 aa, synthetic construct
RGDGAEF

SEQ ID NO: 30321 - protein, 7 aa, synthetic construct
RGDGDFL

SEQ ID NO: 30322 - protein, 7 aa, synthetic construct
RGDGDHD

SEQ ID NO: 30323 - protein, 7 aa, synthetic construct
RGDGEKS

SEQ ID NO: 30324 - protein, 7 aa, synthetic construct
RGDGFKD

SEQ ID NO: 30325 - protein, 7 aa, synthetic construct
RGDGHGA

SEQ ID NO: 30326 - protein, 7 aa, synthetic construct
RGDGIRR

SEQ ID NO: 30327 - protein, 7 aa, synthetic construct
RGDGNLG

SEQ ID NO: 30328 - protein, 7 aa, synthetic construct
RGDGNVA

SEQ ID NO: 30329 - protein, 7 aa, synthetic construct
RGDGSAA

SEQ ID NO: 30330 - protein, 7 aa, synthetic construct
RGDGSDE

SEQ ID NO: 30331 - protein, 7 aa, synthetic construct
RGDGSDI

SEQ ID NO: 30332 - protein, 7 aa, synthetic construct
RGDGSIN

SEQ ID NO: 30333 - protein, 7 aa, synthetic construct
RGDGVTD

SEQ ID NO: 30334 - protein, 7 aa, synthetic construct
RGDHAVS

SEQ ID NO: 30335 - protein, 7 aa, synthetic construct
RGDHDAK

SEQ ID NO: 30336 - protein, 7 aa, synthetic construct
RGDAKNA

SEQ ID NO: 30337 - protein, 7 aa, synthetic construct
RGDHDSR

SEQ ID NO: 30338 - protein, 7 aa, synthetic construct
RGDHEQD

SEQ ID NO: 30339 - protein, 7 aa, synthetic construct
RGDHGKH

SEQ ID NO: 30340 - protein, 7 aa, synthetic construct
RGDHGRQ

SEQ ID NO: 30341 - protein, 7 aa, synthetic construct
RGDHIFK

SEQ ID NO: 30342 - protein, 7 aa, synthetic construct
RGDHIGK

SEQ ID NO: 30343 - protein, 7 aa, synthetic construct
RGDHIII

SEQ ID NO: 30344 - protein, 7 aa, synthetic construct
RGDHKSG

SEQ ID NO: 30345 - protein, 7 aa, synthetic construct
RGDHNDV

SEQ ID NO: 30346 - protein, 7 aa, synthetic construct
RGDAADF

SEQ ID NO: 30347 - protein, 7 aa, synthetic construct
RGDALKA

SEQ ID NO: 30348 - protein, 7 aa, synthetic construct
RGDHNQT

SEQ ID NO: 30349 - protein, 7 aa, synthetic construct
RGDHRVF

SEQ ID NO: 30350 - protein, 7 aa, synthetic construct
RGDHVSE

SEQ ID NO: 30351 - protein, 7 aa, synthetic construct
RGDIAFG

SEQ ID NO: 30352 - protein, 7 aa, synthetic construct
RGDIAFS

SEQ ID NO: 30353 - protein, 7 aa, synthetic construct
RGDIALD

SEQ ID NO: 30354 - protein, 7 aa, synthetic construct
RGDIAVE

SEQ ID NO: 30355 - protein, 7 aa, synthetic construct
RGDIDFA

SEQ ID NO: 30356 - protein, 7 aa, synthetic construct
RGDANDT

SEQ ID NO: 30357 - protein, 7 aa, synthetic construct
RGDIDVH

SEQ ID NO: 30358 - protein, 7 aa, synthetic construct
RGDIETG

SEQ ID NO: 30359 - protein, 7 aa, synthetic construct
RGDIFFG

SEQ ID NO: 30360 - protein, 7 aa, synthetic construct
RGDIGVA

SEQ ID NO: 30361 - protein, 7 aa, synthetic construct
RGDIIAG

SEQ ID NO: 30362 - protein, 7 aa, synthetic construct
RGDANQK

SEQ ID NO: 30363 - protein, 7 aa, synthetic construct
RGDILEL

SEQ ID NO: 30364 - protein, 7 aa, synthetic construct
RGDILET

SEQ ID NO: 30365 - protein, 7 aa, synthetic construct
RGDILFR

SEQ ID NO: 30366 - protein, 7 aa, synthetic construct
RGDANTH

SEQ ID NO: 30367 - protein, 7 aa, synthetic construct
RGDINDN

SEQ ID NO: 30368 - protein, 7 aa, synthetic construct
RGDIQHE

SEQ ID NO: 30369 - protein, 7 aa, synthetic construct
RGDITAN

SEQ ID NO: 30370 - protein, 7 aa, synthetic construct
RGDITDS

SEQ ID NO: 30371 - protein, 7 aa, synthetic construct
RGDITVL

SEQ ID NO: 30372 - protein, 7 aa, synthetic construct
RGDIVNT

SEQ ID NO: 30373 - protein, 7 aa, synthetic construct
RGDIVRH

SEQ ID NO: 30374 - protein, 7 aa, synthetic construct
RGDKAEI

SEQ ID NO: 30375 - protein, 7 aa, synthetic construct
RGDKAVL

SEQ ID NO: 30376 - protein, 7 aa, synthetic construct
RGDKDFS

SEQ ID NO: 30377 - protein, 7 aa, synthetic construct
RGDKDIT

SEQ ID NO: 30378 - protein, 7 aa, synthetic construct
RGDKDKE

SEQ ID NO: 30379 - protein, 7 aa, synthetic construct
RGDKEGG

SEQ ID NO: 30380 - protein, 7 aa, synthetic construct
RGDKERS

SEQ ID NO: 30381 - protein, 7 aa, synthetic construct
RGDAQSF

SEQ ID NO: 30382 - protein, 7 aa, synthetic construct
RGDAQTS

SEQ ID NO: 30383 - protein, 7 aa, synthetic construct
RGDKHAE

SEQ ID NO: 30384 - protein, 7 aa, synthetic construct
RGDKHRG

SEQ ID NO: 30385 - protein, 7 aa, synthetic construct
RGDKIFE

SEQ ID NO: 30386 - protein, 7 aa, synthetic construct
RGDKIRD

SEQ ID NO: 30387 - protein, 7 aa, synthetic construct
RGDKLDG

SEQ ID NO: 30388 - protein, 7 aa, synthetic construct
RGDKQDH

SEQ ID NO: 30389 - protein, 7 aa, synthetic construct
RGDARSH

SEQ ID NO: 30390 - protein, 7 aa, synthetic construct
RGDLALI

SEQ ID NO: 30391 - protein, 7 aa, synthetic construct
RGDLFAN

SEQ ID NO: 30392 - protein, 7 aa, synthetic construct
RGDLGED

SEQ ID NO: 30393 - protein, 7 aa, synthetic construct
RGDLGTR

SEQ ID NO: 30394 - protein, 7 aa, synthetic construct
RGDLHGE

SEQ ID NO: 30395 - protein, 7 aa, synthetic construct
RGDLHII

SEQ ID NO: 30396 - protein, 7 aa, synthetic construct
RGDLIFD

SEQ ID NO: 30397 - protein, 7 aa, synthetic construct
RGDLLLG

SEQ ID NO: 30398 - protein, 7 aa, synthetic construct
RGDLLQI

SEQ ID NO: 30399 - protein, 7 aa, synthetic construct
RGDLNEQ

SEQ ID NO: 30400 - protein, 7 aa, synthetic construct
RGDLNLT

SEQ ID NO: 30401 - protein, 7 aa, synthetic construct
RGDLQAA

SEQ ID NO: 30402 - protein, 7 aa, synthetic construct
RGDLQAL

SEQ ID NO: 30403 - protein, 7 aa, synthetic construct
RGDLQDE

SEQ ID NO: 30404 - protein, 7 aa, synthetic construct
RGDLQSK

SEQ ID NO: 30405 - protein, 7 aa, synthetic construct
RGDLRER

SEQ ID NO: 30406 - protein, 7 aa, synthetic construct
RGDLSAD

SEQ ID NO: 30407 - protein, 7 aa, synthetic construct
RGDLTHE

SEQ ID NO: 30408 - protein, 7 aa, synthetic construct
RGDLTIA

SEQ ID NO: 30409 - protein, 7 aa, synthetic construct
RGDNAGT

SEQ ID NO: 30410 - protein, 7 aa, synthetic construct
RGDATLF

SEQ ID NO: 30411 - protein, 7 aa, synthetic construct
RGDNANT

SEQ ID NO: 30412 - protein, 7 aa, synthetic construct
RGDATQQ

SEQ ID NO: 30413 - protein, 7 aa, synthetic construct
RGDNENI

SEQ ID NO: 30414 - protein, 7 aa, synthetic construct
RGDNFEF

SEQ ID NO: 30415 - protein, 7 aa, synthetic construct
RGDNFVA

SEQ ID NO: 30416 - protein, 7 aa, synthetic construct
RGDNGTS

SEQ ID NO: 30417 - protein, 7 aa, synthetic construct
RGDAVAE

SEQ ID NO: 30418 - protein, 7 aa, synthetic construct
RGDNHFE

SEQ ID NO: 30419 - protein, 7 aa, synthetic construct
RGDNHLE

SEQ ID NO: 30420 - protein, 7 aa, synthetic construct
RGDAVEA

SEQ ID NO: 30421 - protein, 7 aa, synthetic construct
RGDNKDH

SEQ ID NO: 30422 - protein, 7 aa, synthetic construct
RGDNKFF

SEQ ID NO: 30423 - protein, 7 aa, synthetic construct
RGDNLDT

SEQ ID NO: 30424 - protein, 7 aa, synthetic construct
RGDNNLA

SEQ ID NO: 30425 - protein, 7 aa, synthetic construct
RGDNQQG

SEQ ID NO: 30426 - protein, 7 aa, synthetic construct
RGDNRHD

SEQ ID NO: 30427 - protein, 7 aa, synthetic construct
RGDAVRA

SEQ ID NO: 30428 - protein, 7 aa, synthetic construct
RGDAVSE

SEQ ID NO: 30429 - protein, 7 aa, synthetic construct
RGDAVTQ

SEQ ID NO: 30430 - protein, 7 aa, synthetic construct
RGDAVVS

SEQ ID NO: 30431 - protein, 7 aa, synthetic construct
RGDQANF

SEQ ID NO: 30432 - protein, 7 aa, synthetic construct
RGDQDTT

SEQ ID NO: 30433 - protein, 7 aa, synthetic construct
RGDQETL

SEQ ID NO: 30434 - protein, 7 aa, synthetic construct
RGDQGEE

SEQ ID NO: 30435 - protein, 7 aa, synthetic construct
RGDQGNF

SEQ ID NO: 30436 - protein, 7 aa, synthetic construct
RGDQGQD

SEQ ID NO: 30437 - protein, 7 aa, synthetic construct
RGDQGVH

SEQ ID NO: 30438 - protein, 7 aa, synthetic construct
RGDQHQH

SEQ ID NO: 30439 - protein, 7 aa, synthetic construct
RGDQIRG

SEQ ID NO: 30440 - protein, 7 aa, synthetic construct
RGDQISQ

SEQ ID NO: 30441 - protein, 7 aa, synthetic construct
RGDQKHR

SEQ ID NO: 30442 - protein, 7 aa, synthetic construct
RGDDARG

SEQ ID NO: 30443 - protein, 7 aa, synthetic construct
RGDQKTF

SEQ ID NO: 30444 - protein, 7 aa, synthetic construct
RGDQLDL

SEQ ID NO: 30445 - protein, 7 aa, synthetic construct
RGDQLNA

SEQ ID NO: 30446 - protein, 7 aa, synthetic construct
RGDQLVA

SEQ ID NO: 30447 - protein, 7 aa, synthetic construct
RGDDAVH

SEQ ID NO: 30448 - protein, 7 aa, synthetic construct
RGDQQEI

SEQ ID NO: 30449 - protein, 7 aa, synthetic construct
RGDQQLE

SEQ ID NO: 30450 - protein, 7 aa, synthetic construct
RGDQRHH

SEQ ID NO: 30451 - protein, 7 aa, synthetic construct
RGDQTDH

SEQ ID NO: 30452 - protein, 7 aa, synthetic construct
RGDQVGN

SEQ ID NO: 30453 - protein, 7 aa, synthetic construct
RGDDDNF

SEQ ID NO: 30454 - protein, 7 aa, synthetic construct
RGDREGS

SEQ ID NO: 30455 - protein, 7 aa, synthetic construct
RGDRFES

SEQ ID NO: 30456 - protein, 7 aa, synthetic construct
RGDRFGA

SEQ ID NO: 30457 - protein, 7 aa, synthetic construct
RGDDDVE

SEQ ID NO: 30458 - protein, 7 aa, synthetic construct
RGDRIDD

SEQ ID NO: 30459 - protein, 7 aa, synthetic construct
RGDRKRS

SEQ ID NO: 30460 - protein, 7 aa, synthetic construct
RGDDESK

SEQ ID NO: 30461 - protein, 7 aa, synthetic construct
RGDSALS

SEQ ID NO: 30462 - protein, 7 aa, synthetic construct
RGDSEEI

SEQ ID NO: 30463 - protein, 7 aa, synthetic construct
RGDDFFI

SEQ ID NO: 30464 - protein, 7 aa, synthetic construct
RGDSENN

SEQ ID NO: 30465 - protein, 7 aa, synthetic construct
RGDSEQG

SEQ ID NO: 30466 - protein, 7 aa, synthetic construct
RGDSFAF

SEQ ID NO: 30467 - protein, 7 aa, synthetic construct
RGDSFNN

SEQ ID NO: 30468 - protein, 7 aa, synthetic construct
RGDDFHI

SEQ ID NO: 30469 - protein, 7 aa, synthetic construct
RGDSGDA

SEQ ID NO: 30470 - protein, 7 aa, synthetic construct
RGDSGEN

SEQ ID NO: 30471 - protein, 7 aa, synthetic construct
RGDDFKF

SEQ ID NO: 30472 - protein, 7 aa, synthetic construct
RGDSHDD

SEQ ID NO: 30473 - protein, 7 aa, synthetic construct
RGDSHIQ

SEQ ID NO: 30474 - protein, 7 aa, synthetic construct
RGDSIFT

SEQ ID NO: 30475 - protein, 7 aa, synthetic construct
RGDSLSH

SEQ ID NO: 30476 - protein, 7 aa, synthetic construct
RGDSNGN

SEQ ID NO: 30477 - protein, 7 aa, synthetic construct
RGDSNLE

SEQ ID NO: 30478 - protein, 7 aa, synthetic construct
RGDSNNK

SEQ ID NO: 30479 - protein, 7 aa, synthetic construct
RGDSNSG

SEQ ID NO: 30480 - protein, 7 aa, synthetic construct
RGDSNTE

SEQ ID NO: 30481 - protein, 7 aa, synthetic construct
RGDSNTN

SEQ ID NO: 30482 - protein, 7 aa, synthetic construct
RGDSSAA

SEQ ID NO: 30483 - protein, 7 aa, synthetic construct
RGDSSIE

SEQ ID NO: 30484 - protein, 7 aa, synthetic construct
RGDSSIN

SEQ ID NO: 30485 - protein, 7 aa, synthetic construct
RGDDGHH

SEQ ID NO: 30486 - protein, 7 aa, synthetic construct
RGDSVFA

SEQ ID NO: 30487 - protein, 7 aa, synthetic construct
RGDSVHG

SEQ ID NO: 30488 - protein, 7 aa, synthetic construct
RGDSVTN

SEQ ID NO: 30489 - protein, 7 aa, synthetic construct
RGDDGKI

SEQ ID NO: 30490 - protein, 7 aa, synthetic construct
RGDTDLV

SEQ ID NO: 30491 - protein, 7 aa, synthetic construct
RGDTEHF

SEQ ID NO: 30492 - protein, 7 aa, synthetic construct
RGDTEVE

SEQ ID NO: 30493 - protein, 7 aa, synthetic construct
RGDTFGK

SEQ ID NO: 30494 - protein, 7 aa, synthetic construct
RGDTGSG

SEQ ID NO: 30495 - protein, 7 aa, synthetic construct
RGDTGVL

SEQ ID NO: 30496 - protein, 7 aa, synthetic construct
RGDTIHS

SEQ ID NO: 30497 - protein, 7 aa, synthetic construct
RGDTIKS

SEQ ID NO: 30498 - protein, 7 aa, synthetic construct
RGDTINL

SEQ ID NO: 30499 - protein, 7 aa, synthetic construct
RGDTIRH

SEQ ID NO: 30500 - protein, 7 aa, synthetic construct
RGDDHKQ

SEQ ID NO: 30501 - protein, 7 aa, synthetic construct
RGDTQGT

SEQ ID NO: 30502 - protein, 7 aa, synthetic construct
RGDTRET

SEQ ID NO: 30503 - protein, 7 aa, synthetic construct
RGDDHQR

SEQ ID NO: 30504 - protein, 7 aa, synthetic construct
RGDTSFS

SEQ ID NO: 30505 - protein, 7 aa, synthetic construct
RGDTTSS

SEQ ID NO: 30506 - protein, 7 aa, synthetic construct
RGDTTTS

SEQ ID NO: 30507 - protein, 7 aa, synthetic construct
RGDDHTV

SEQ ID NO: 30508 - protein, 7 aa, synthetic construct
RGDVAFD

SEQ ID NO: 30509 - protein, 7 aa, synthetic construct
RGDVASH

SEQ ID NO: 30510 - protein, 7 aa, synthetic construct
RGDVDHT

SEQ ID NO: 30511 - protein, 7 aa, synthetic construct
RGDVDST

SEQ ID NO: 30512 - protein, 7 aa, synthetic construct
RGDVESG

SEQ ID NO: 30513 - protein, 7 aa, synthetic construct
RGDVETV

SEQ ID NO: 30514 - protein, 7 aa, synthetic construct
RGDVFES

SEQ ID NO: 30515 - protein, 7 aa, synthetic construct
RGDVFKD

SEQ ID NO: 30516 - protein, 7 aa, synthetic construct
RGDVGEN

SEQ ID NO: 30517 - protein, 7 aa, synthetic construct
RGDVGTT

SEQ ID NO: 30518 - protein, 7 aa, synthetic construct
RGDVHFD

SEQ ID NO: 30519 - protein, 7 aa, synthetic construct
RGDVHKA

SEQ ID NO: 30520 - protein, 7 aa, synthetic construct
RGDVHRH

SEQ ID NO: 30521 - protein, 7 aa, synthetic construct
RGDDIRR

SEQ ID NO: 30522 - protein, 7 aa, synthetic construct
RGDVLSS

SEQ ID NO: 30523 - protein, 7 aa, synthetic construct
RGDVLTE

SEQ ID NO: 30524 - protein, 7 aa, synthetic construct
RGDVNDF

SEQ ID NO: 30525 - protein, 7 aa, synthetic construct
RGDVSES

SEQ ID NO: 30526 - protein, 7 aa, synthetic construct
RGDVSRG

SEQ ID NO: 30527 - protein, 7 aa, synthetic construct
RGDDKHH

SEQ ID NO: 30528 - protein, 7 aa, synthetic construct
RGDVTTG

SEQ ID NO: 30529 - protein, 7 aa, synthetic construct
RGDVVHA

SEQ ID NO: 30530 - protein, 7 aa, synthetic construct
RGDVVTN

SEQ ID NO: 30531 - protein, 7 aa, synthetic construct
RGDDLDG

SEQ ID NO: 30532 - protein, 7 aa, synthetic construct
RGDDLFD

SEQ ID NO: 30533 - protein, 7 aa, synthetic construct
RGDDQGH

SEQ ID NO: 30534 - protein, 7 aa, synthetic construct
RGDDRRV

SEQ ID NO: 30535 - protein, 7 aa, synthetic construct
RGDDRVQ

SEQ ID NO: 30536 - protein, 7 aa, synthetic construct
RGDDSGD

SEQ ID NO: 30537 - protein, 7 aa, synthetic construct
RGDDSLD

SEQ ID NO: 30538 - protein, 7 aa, synthetic construct
RGDDTHN

SEQ ID NO: 30539 - protein, 7 aa, synthetic construct
RGDDVEI

SEQ ID NO: 30540 - protein, 7 aa, synthetic construct
RGDDVFH

SEQ ID NO: 30541 - protein, 7 aa, synthetic construct
RGDDVGQ

SEQ ID NO: 30542 - protein, 7 aa, synthetic construct
RGDEASS

SEQ ID NO: 30543 - protein, 7 aa, synthetic construct
RGDEDHV

SEQ ID NO: 30544 - protein, 7 aa, synthetic construct
RGDEDIK

SEQ ID NO: 30545 - protein, 7 aa, synthetic construct
RGDEDRA

SEQ ID NO: 30546 - protein, 7 aa, synthetic construct
RGDEDRH

SEQ ID NO: 30547 - protein, 7 aa, synthetic construct
RGDEDSV

SEQ ID NO: 30548 - protein, 7 aa, synthetic construct
RGDEEFH

SEQ ID NO: 30549 - protein, 7 aa, synthetic construct
RGDEESE

SEQ ID NO: 30550 - protein, 7 aa, synthetic construct
RGDEFRN

SEQ ID NO: 30551 - protein, 7 aa, synthetic construct
RGDEFVE

SEQ ID NO: 30552 - protein, 7 aa, synthetic construct
RGDEGKA

SEQ ID NO: 30553 - protein, 7 aa, synthetic construct
RGDEHHA

SEQ ID NO: 30554 - protein, 7 aa, synthetic construct
RGDEHNH

SEQ ID NO: 30555 - protein, 7 aa, synthetic construct
RGDEKAK

SEQ ID NO: 30556 - protein, 7 aa, synthetic construct
RGDEKKE

SEQ ID NO: 30557 - protein, 7 aa, synthetic construct
RGDEKQQ

SEQ ID NO: 30558 - protein, 7 aa, synthetic construct
RGDEKSK

SEQ ID NO: 30559 - protein, 7 aa, synthetic construct
RGDAFTF

SEQ ID NO: 30560 - protein, 7 aa, synthetic construct
RGDELVQ

SEQ ID NO: 30561 - protein, 7 aa, synthetic construct
RGDENRI

SEQ ID NO: 30562 - protein, 7 aa, synthetic construct
RGDENVL

SEQ ID NO: 30563 - protein, 7 aa, synthetic construct
RGDEQIS

SEQ ID NO: 30564 - protein, 7 aa, synthetic construct
RGDEQQQ

SEQ ID NO: 30565 - protein, 7 aa, synthetic construct
RGDERRI

SEQ ID NO: 30566 - protein, 7 aa, synthetic construct
RGDERSA

SEQ ID NO: 30567 - protein, 7 aa, synthetic construct
RGDERTH

SEQ ID NO: 30568 - protein, 7 aa, synthetic construct
RGDESKT

SEQ ID NO: 30569 - protein, 7 aa, synthetic construct
RGDESLT

SEQ ID NO: 30570 - protein, 7 aa, synthetic construct
RGDESRH

SEQ ID NO: 30571 - protein, 7 aa, synthetic construct
RGDETSD

SEQ ID NO: 30572 - protein, 7 aa, synthetic construct
RGDETVK

SEQ ID NO: 30573 - protein, 7 aa, synthetic construct
RGDAGIT

SEQ ID NO: 30574 - protein, 7 aa, synthetic construct
RGDEVQT

SEQ ID NO: 30575 - protein, 7 aa, synthetic construct
RGDEVVN

SEQ ID NO: 30576 - protein, 7 aa, synthetic construct
RGDFAAL

SEQ ID NO: 30577 - protein, 7 aa, synthetic construct
RGDFAFG

SEQ ID NO: 30578 - protein, 7 aa, synthetic construct
RGDFAIE

SEQ ID NO: 30579 - protein, 7 aa, synthetic construct
RGDFDIE

SEQ ID NO: 30580 - protein, 7 aa, synthetic construct
RGDFDIL

SEQ ID NO: 30581 - protein, 7 aa, synthetic construct
RGDFEKA

SEQ ID NO: 30582 - protein, 7 aa, synthetic construct
RGDFELF

SEQ ID NO: 30583 - protein, 7 aa, synthetic construct
RGDFFAF

SEQ ID NO: 30584 - protein, 7 aa, synthetic construct
RGDFFKA

SEQ ID NO: 30585 - protein, 7 aa, synthetic construct
RGDAGTS

SEQ ID NO: 30586 - protein, 7 aa, synthetic construct
RGDFGHF

SEQ ID NO: 30587 - protein, 7 aa, synthetic construct
RGDFHDD

SEQ ID NO: 30588 - protein, 7 aa, synthetic construct
RGDFHIH

SEQ ID NO: 30589 - protein, 7 aa, synthetic construct
RGDAHEF

SEQ ID NO: 30590 - protein, 7 aa, synthetic construct
RGDAHFG

SEQ ID NO: 30591 - protein, 7 aa, synthetic construct
RGDAHFH

SEQ ID NO: 30592 - protein, 7 aa, synthetic construct
RGDFLDI

SEQ ID NO: 30593 - protein, 7 aa, synthetic construct
RGDFLQE

SEQ ID NO: 30594 - protein, 7 aa, synthetic construct
RGDFLVL

SEQ ID NO: 30595 - protein, 7 aa, synthetic construct
RGDAHLI

SEQ ID NO: 30596 - protein, 7 aa, synthetic construct
RGDFRAF

SEQ ID NO: 30597 - protein, 7 aa, synthetic construct
RGDFSDF

SEQ ID NO: 30598 - protein, 7 aa, synthetic construct
RGDAALT

SEQ ID NO: 30599 - protein, 7 aa, synthetic construct
RGDGDAL

SEQ ID NO: 30600 - protein, 7 aa, synthetic construct
RGDGDSS

SEQ ID NO: 30601 - protein, 7 aa, synthetic construct
RGDGDVI

SEQ ID NO: 30602 - protein, 7 aa, synthetic construct
RGDGEDE

SEQ ID NO: 30603 - protein, 7 aa, synthetic construct
RGDGGEV

SEQ ID NO: 30604 - protein, 7 aa, synthetic construct
RGDGHTD

SEQ ID NO: 30605 - protein, 7 aa, synthetic construct
RGDGHVR

SEQ ID NO: 30606 - protein, 7 aa, synthetic construct
RGDGIQT

SEQ ID NO: 30607 - protein, 7 aa, synthetic construct
RGDGKAV

SEQ ID NO: 30608 - protein, 7 aa, synthetic construct
RGDGKLG

SEQ ID NO: 30609 - protein, 7 aa, synthetic construct
RGDGLAH

SEQ ID NO: 30610 - protein, 7 aa, synthetic construct
RGDGLFE

SEQ ID NO: 30611 - protein, 7 aa, synthetic construct
RGDGLFQ

SEQ ID NO: 30612 - protein, 7 aa, synthetic construct
RGDGNFF

SEQ ID NO: 30613 - protein, 7 aa, synthetic construct
RGDGNQN

SEQ ID NO: 30614 - protein, 7 aa, synthetic construct
RGDAIVQ

SEQ ID NO: 30615 - protein, 7 aa, synthetic construct
RGDGSIV

SEQ ID NO: 30616 - protein, 7 aa, synthetic construct
RGDGTFL

SEQ ID NO: 30617 - protein, 7 aa, synthetic construct
RGDGTFT

SEQ ID NO: 30618 - protein, 7 aa, synthetic construct
RGDGTNI

SEQ ID NO: 30619 - protein, 7 aa, synthetic construct
RGDGVAN

SEQ ID NO: 30620 - protein, 7 aa, synthetic construct
RGDHDKS

SEQ ID NO: 30621 - protein, 7 aa, synthetic construct
RGDHFDN

SEQ ID NO: 30622 - protein, 7 aa, synthetic construct
RGDHFDT

SEQ ID NO: 30623 - protein, 7 aa, synthetic construct
RGDHFRD

SEQ ID NO: 30624 - protein, 7 aa, synthetic construct
RGDHHFE

SEQ ID NO: 30625 - protein, 7 aa, synthetic construct
RGDHIDV

SEQ ID NO: 30626 - protein, 7 aa, synthetic construct
RGDALFD

SEQ ID NO: 30627 - protein, 7 aa, synthetic construct
RGDHKGE

SEQ ID NO: 30628 - protein, 7 aa, synthetic construct
RGDALFT

SEQ ID NO: 30629 - protein, 7 aa, synthetic construct
RGDALGS

SEQ ID NO: 30630 - protein, 7 aa, synthetic construct
RGDHLQE

SEQ ID NO: 30631 - protein, 7 aa, synthetic construct
RGDHQLK

SEQ ID NO: 30632 - protein, 7 aa, synthetic construct
RGDHSLA

SEQ ID NO: 30633 - protein, 7 aa, synthetic construct
RGDHSLG

SEQ ID NO: 30634 - protein, 7 aa, synthetic construct
RGDHSND

SEQ ID NO: 30635 - protein, 7 aa, synthetic construct
RGDHTQE

SEQ ID NO: 30636 - protein, 7 aa, synthetic construct
RGDIAEQ

SEQ ID NO: 30637 - protein, 7 aa, synthetic construct
RGDIAHF

SEQ ID NO: 30638 - protein, 7 aa, synthetic construct
RGDIAIL

SEQ ID NO: 30639 - protein, 7 aa, synthetic construct
RGDIASG

SEQ ID NO: 30640 - protein, 7 aa, synthetic construct
RGDIDIV

SEQ ID NO: 30641 - protein, 7 aa, synthetic construct
RGDIEQD

SEQ ID NO: 30642 - protein, 7 aa, synthetic construct
RGDIFSS

SEQ ID NO: 30643 - protein, 7 aa, synthetic construct
RGDIFTL

SEQ ID NO: 30644 - protein, 7 aa, synthetic construct
RGDIGHG

SEQ ID NO: 30645 - protein, 7 aa, synthetic construct
RGDIHFG

SEQ ID NO: 30646 - protein, 7 aa, synthetic construct
RGDIHLA

SEQ ID NO: 30647 - protein, 7 aa, synthetic construct
RGDIIFT

SEQ ID NO: 30648 - protein, 7 aa, synthetic construct
RGDIITD

SEQ ID NO: 30649 - protein, 7 aa, synthetic construct
RGDIIVE

SEQ ID NO: 30650 - protein, 7 aa, synthetic construct
RGDIKEL

SEQ ID NO: 30651 - protein, 7 aa, synthetic construct
RGDIKIA

SEQ ID NO: 30652 - protein, 7 aa, synthetic construct
RGDILFQ

SEQ ID NO: 30653 - protein, 7 aa, synthetic construct
RGDANTV

SEQ ID NO: 30654 - protein, 7 aa, synthetic construct
RGDINLI

SEQ ID NO: 30655 - protein, 7 aa, synthetic construct
RGDIQES

SEQ ID NO: 30656 - protein, 7 aa, synthetic construct
RGDISNA

SEQ ID NO: 30657 - protein, 7 aa, synthetic construct
RGDIVFS

SEQ ID NO: 30658 - protein, 7 aa, synthetic construct
RGDIVKT

SEQ ID NO: 30659 - protein, 7 aa, synthetic construct
RGDKAIG

SEQ ID NO: 30660 - protein, 7 aa, synthetic construct
RGDKDFH

SEQ ID NO: 30661 - protein, 7 aa, synthetic construct
RGDKDIE

SEQ ID NO: 30662 - protein, 7 aa, synthetic construct
RGDKEAS

SEQ ID NO: 30663 - protein, 7 aa, synthetic construct
RGDKEDQ

SEQ ID NO: 30664 - protein, 7 aa, synthetic construct
RGDKETE

SEQ ID NO: 30665 - protein, 7 aa, synthetic construct
RGDKGEI

SEQ ID NO: 30666 - protein, 7 aa, synthetic construct
RGDKKDG

SEQ ID NO: 30667 - protein, 7 aa, synthetic construct
RGDKLHA

SEQ ID NO: 30668 - protein, 7 aa, synthetic construct
RGDKNVG

SEQ ID NO: 30669 - protein, 7 aa, synthetic construct
RGDKQEI

SEQ ID NO: 30670 - protein, 7 aa, synthetic construct
RGDADER

SEQ ID NO: 30671 - protein, 7 aa, synthetic construct
RGDLDRT

SEQ ID NO: 30672 - protein, 7 aa, synthetic construct
RGDLDSG

SEQ ID NO: 30673 - protein, 7 aa, synthetic construct
RGDLEEV

SEQ ID NO: 30674 - protein, 7 aa, synthetic construct
RGDLESE

SEQ ID NO: 30675 - protein, 7 aa, synthetic construct
RGDLFAK

SEQ ID NO: 30676 - protein, 7 aa, synthetic construct
RGDLFGT

SEQ ID NO: 30677 - protein, 7 aa, synthetic construct
RGDLHVH

SEQ ID NO: 30678 - protein, 7 aa, synthetic construct
RGDLKLA

SEQ ID NO: 30679 - protein, 7 aa, synthetic construct
RGDLLGD

SEQ ID NO: 30680 - protein, 7 aa, synthetic construct
RGDLLIG

SEQ ID NO: 30681 - protein, 7 aa, synthetic construct
RGDLLTQ

SEQ ID NO: 30682 - protein, 7 aa, synthetic construct
RGDLQAH

SEQ ID NO: 30683 - protein, 7 aa, synthetic construct
RGDLQIT

SEQ ID NO: 30684 - protein, 7 aa, synthetic construct
RGDLTNQ

SEQ ID NO: 30685 - protein, 7 aa, synthetic construct
RGDLVEG

SEQ ID NO: 30686 - protein, 7 aa, synthetic construct
RGDNAQI

SEQ ID NO: 30687 - protein, 7 aa, synthetic construct
RGDNARD

SEQ ID NO: 30688 - protein, 7 aa, synthetic construct
RGDNAVS

SEQ ID NO: 30689 - protein, 7 aa, synthetic construct
RGDNAVT

SEQ ID NO: 30690 - protein, 7 aa, synthetic construct
RGDNDNG

SEQ ID NO: 30691 - protein, 7 aa, synthetic construct
RGDNDVD

SEQ ID NO: 30692 - protein, 7 aa, synthetic construct
RGDNEGF

SEQ ID NO: 30693 - protein, 7 aa, synthetic construct
RGDNEQE

SEQ ID NO: 30694 - protein, 7 aa, synthetic construct
RGDADHN

SEQ ID NO: 30695 - protein, 7 aa, synthetic construct
RGDNFHF

SEQ ID NO: 30696 - protein, 7 aa, synthetic construct
RGDNGAA

SEQ ID NO: 30697 - protein, 7 aa, synthetic construct
RGDNGAF

SEQ ID NO: 30698 - protein, 7 aa, synthetic construct
RGDNGFD

SEQ ID NO: 30699 - protein, 7 aa, synthetic construct
RGDNGFF

SEQ ID NO: 30700 - protein, 7 aa, synthetic construct
RGDNGHF

SEQ ID NO: 30701 - protein, 7 aa, synthetic construct
RGDNGQH

SEQ ID NO: 30702 - protein, 7 aa, synthetic construct
RGDNIAT

SEQ ID NO: 30703 - protein, 7 aa, synthetic construct
RGDAVET

SEQ ID NO: 30704 - protein, 7 aa, synthetic construct
RGDNKSE

SEQ ID NO: 30705 - protein, 7 aa, synthetic construct
RGDNLAI

SEQ ID NO: 30706 - protein, 7 aa, synthetic construct
RGDNLEA

SEQ ID NO: 30707 - protein, 7 aa, synthetic construct
RGDAVIR

SEQ ID NO: 30708 - protein, 7 aa, synthetic construct
RGDNQDT

SEQ ID NO: 30709 - protein, 7 aa, synthetic construct
RGDADIS

SEQ ID NO: 30710 - protein, 7 aa, synthetic construct
RGDNQSG

SEQ ID NO: 30711 - protein, 7 aa, synthetic construct
RGDNRKE

SEQ ID NO: 30712 - protein, 7 aa, synthetic construct
RGDNSNA

SEQ ID NO: 30713 - protein, 7 aa, synthetic construct
RGDNTHD

SEQ ID NO: 30714 - protein, 7 aa, synthetic construct
RGDNTHH

SEQ ID NO: 30715 - protein, 7 aa, synthetic construct
RGDNTSV

SEQ ID NO: 30716 - protein, 7 aa, synthetic construct
RGDNVAI

SEQ ID NO: 30717 - protein, 7 aa, synthetic construct
RGDQASL

SEQ ID NO: 30718 - protein, 7 aa, synthetic construct
RGDQATL

SEQ ID NO: 30719 - protein, 7 aa, synthetic construct
RGDQAVS

SEQ ID NO: 30720 - protein, 7 aa, synthetic construct
RGDQEEN

SEQ ID NO: 30721 - protein, 7 aa, synthetic construct
RGDQEIV

SEQ ID NO: 30722 - protein, 7 aa, synthetic construct
RGDQFHE

SEQ ID NO: 30723 - protein, 7 aa, synthetic construct
RGDQGED

SEQ ID NO: 30724 - protein, 7 aa, synthetic construct
RGDQHSA

SEQ ID NO: 30725 - protein, 7 aa, synthetic construct
RGDQIDD

SEQ ID NO: 30726 - protein, 7 aa, synthetic construct
RGDQIDK

SEQ ID NO: 30727 - protein, 7 aa, synthetic construct
RGDQIDL

SEQ ID NO: 30728 - protein, 7 aa, synthetic construct
RGDQILL

SEQ ID NO: 30729 - protein, 7 aa, synthetic construct
RGDQINV

SEQ ID NO: 30730 - protein, 7 aa, synthetic construct
RGDQITF

SEQ ID NO: 30731 - protein, 7 aa, synthetic construct
RGDQKID

SEQ ID NO: 30732 - protein, 7 aa, synthetic construct
RGDDARF

SEQ ID NO: 30733 - protein, 7 aa, synthetic construct
RGDQNAV

SEQ ID NO: 30734 - protein, 7 aa, synthetic construct
RGDQNET

SEQ ID NO: 30735 - protein, 7 aa, synthetic construct
RGDQQEF

SEQ ID NO: 30736 - protein, 7 aa, synthetic construct
RGDDDFL

SEQ ID NO: 30737 - protein, 7 aa, synthetic construct
RGDQTHK

SEQ ID NO: 30738 - protein, 7 aa, synthetic construct
RGDQTIK

SEQ ID NO: 30739 - protein, 7 aa, synthetic construct
RGDQTQE

SEQ ID NO: 30740 - protein, 7 aa, synthetic construct
RGDQVIG

SEQ ID NO: 30741 - protein, 7 aa, synthetic construct
RGDDDKG

SEQ ID NO: 30742 - protein, 7 aa, synthetic construct
RGDRDDH

SEQ ID NO: 30743 - protein, 7 aa, synthetic construct
RGDRDLN

SEQ ID NO: 30744 - protein, 7 aa, synthetic construct
RGDREDE

SEQ ID NO: 30745 - protein, 7 aa, synthetic construct
RGDDDRF

SEQ ID NO: 30746 - protein, 7 aa, synthetic construct
RGDRFDS

SEQ ID NO: 30747 - protein, 7 aa, synthetic construct
RGDRIDS

SEQ ID NO: 30748 - protein, 7 aa, synthetic construct
RGDRVGD

SEQ ID NO: 30749 - protein, 7 aa, synthetic construct
RGDDEVF

SEQ ID NO: 30750 - protein, 7 aa, synthetic construct
RGDSDER

SEQ ID NO: 30751 - protein, 7 aa, synthetic construct
RGDSDFE

SEQ ID NO: 30752 - protein, 7 aa, synthetic construct
RGDSDGQ

SEQ ID NO: 30753 - protein, 7 aa, synthetic construct
RGDDFFR

SEQ ID NO: 30754 - protein, 7 aa, synthetic construct
RGDSHIL

SEQ ID NO: 30755 - protein, 7 aa, synthetic construct
RGDSIAF

SEQ ID NO: 30756 - protein, 7 aa, synthetic construct
RGDSIIL

SEQ ID NO: 30757 - protein, 7 aa, synthetic construct
RGDSILQ

SEQ ID NO: 30758 - protein, 7 aa, synthetic construct
RGDSINQ

SEQ ID NO: 30759 - protein, 7 aa, synthetic construct
RGDDFQD

SEQ ID NO: 30760 - protein, 7 aa, synthetic construct
RGDSIVS

SEQ ID NO: 30761 - protein, 7 aa, synthetic construct
RGDSKSD

SEQ ID NO: 30762 - protein, 7 aa, synthetic construct
RGDSLEL

SEQ ID NO: 30763 - protein, 7 aa, synthetic construct
RGDDFVN

SEQ ID NO: 30764 - protein, 7 aa, synthetic construct
RGDSQQS

SEQ ID NO: 30765 - protein, 7 aa, synthetic construct
RGDSSDG

SEQ ID NO: 30766 - protein, 7 aa, synthetic construct
RGDSSHH

SEQ ID NO: 30767 - protein, 7 aa, synthetic construct
RGDSTSI

SEQ ID NO: 30768 - protein, 7 aa, synthetic construct
RGDSVEH

SEQ ID NO: 30769 - protein, 7 aa, synthetic construct
RGDDGIH

SEQ ID NO: 30770 - protein, 7 aa, synthetic construct
RGDSVGA

SEQ ID NO: 30771 - protein, 7 aa, synthetic construct
RGDSVTT

SEQ ID NO: 30772 - protein, 7 aa, synthetic construct
RGDDGNF

SEQ ID NO: 30773 - protein, 7 aa, synthetic construct
RGDTDFI

SEQ ID NO: 30774 - protein, 7 aa, synthetic construct
RGDTELV

SEQ ID NO: 30775 - protein, 7 aa, synthetic construct
RGDTENF

SEQ ID NO: 30776 - protein, 7 aa, synthetic construct
RGDDGTG

SEQ ID NO: 30777 - protein, 7 aa, synthetic construct
RGDDGVQ

SEQ ID NO: 30778 - protein, 7 aa, synthetic construct
RGDTHDF

SEQ ID NO: 30779 - protein, 7 aa, synthetic construct
RGDTIAK

SEQ ID NO: 30780 - protein, 7 aa, synthetic construct
RGDDHET

SEQ ID NO: 30781 - protein, 7 aa, synthetic construct
RGDTLFL

SEQ ID NO: 30782 - protein, 7 aa, synthetic construct
RGDDHGV

SEQ ID NO: 30783 - protein, 7 aa, synthetic construct
RGDTNEH

SEQ ID NO: 30784 - protein, 7 aa, synthetic construct
RGDTNTE

SEQ ID NO: 30785 - protein, 7 aa, synthetic construct
RGDTQST

SEQ ID NO: 30786 - protein, 7 aa, synthetic construct
RGDTRRE

SEQ ID NO: 30787 - protein, 7 aa, synthetic construct
RGDDHRS

SEQ ID NO: 30788 - protein, 7 aa, synthetic construct
RGDTTAR

SEQ ID NO: 30789 - protein, 7 aa, synthetic construct
RGDVAEN

SEQ ID NO: 30790 - protein, 7 aa, synthetic construct
RGDDIDH

SEQ ID NO: 30791 - protein, 7 aa, synthetic construct
RGDVDGE

SEQ ID NO: 30792 - protein, 7 aa, synthetic construct
RGDVDIF

SEQ ID NO: 30793 - protein, 7 aa, synthetic construct
RGDVEFS

SEQ ID NO: 30794 - protein, 7 aa, synthetic construct
RGDVEIF

SEQ ID NO: 30795 - protein, 7 aa, synthetic construct
RGDVFHG

SEQ ID NO: 30796 - protein, 7 aa, synthetic construct
RGDVFLG

SEQ ID NO: 30797 - protein, 7 aa, synthetic construct
RGDVFVK

SEQ ID NO: 30798 - protein, 7 aa, synthetic construct
RGDVGFH

SEQ ID NO: 30799 - protein, 7 aa, synthetic construct
RGDVGLD

SEQ ID NO: 30800 - protein, 7 aa, synthetic construct
RGDVIAT

SEQ ID NO: 30801 - protein, 7 aa, synthetic construct
RGDVIIH

SEQ ID NO: 30802 - protein, 7 aa, synthetic construct
RGDVIQV

SEQ ID NO: 30803 - protein, 7 aa, synthetic construct
RGDVISS

SEQ ID NO: 30804 - protein, 7 aa, synthetic construct
RGDVLID

SEQ ID NO: 30805 - protein, 7 aa, synthetic construct
RGDVNLV

SEQ ID NO: 30806 - protein, 7 aa, synthetic construct
RGDVQSQ

SEQ ID NO: 30807 - protein, 7 aa, synthetic construct
RGDVRHA

SEQ ID NO: 30808 - protein, 7 aa, synthetic construct
RGDVSDV

SEQ ID NO: 30809 - protein, 7 aa, synthetic construct
RGDVTVE

SEQ ID NO: 30810 - protein, 7 aa, synthetic construct
RGDVTVS

SEQ ID NO: 30811 - protein, 7 aa, synthetic construct
RGDVVDV

SEQ ID NO: 30812 - protein, 7 aa, synthetic construct
RGDVVET

SEQ ID NO: 30813 - protein, 7 aa, synthetic construct
RGDVVRK

SEQ ID NO: 30814 - protein, 7 aa, synthetic construct
RGDVVTA

SEQ ID NO: 30815 - protein, 7 aa, synthetic construct
RGDDKRL

SEQ ID NO: 30816 - protein, 7 aa, synthetic construct
RGDDKRN

SEQ ID NO: 30817 - protein, 7 aa, synthetic construct
RGDDLKS

SEQ ID NO: 30818 - protein, 7 aa, synthetic construct
RGDDLQT

SEQ ID NO: 30819 - protein, 7 aa, synthetic construct
RGDDNEL

SEQ ID NO: 30820 - protein, 7 aa, synthetic construct
RGDDQRS

SEQ ID NO: 30821 - protein, 7 aa, synthetic construct
RGDDTIG

SEQ ID NO: 30822 - protein, 7 aa, synthetic construct
RGDDVGV

SEQ ID NO: 30823 - protein, 7 aa, synthetic construct
RGDEANT

SEQ ID NO: 30824 - protein, 7 aa, synthetic construct
RGDEAVQ

SEQ ID NO: 30825 - protein, 7 aa, synthetic construct
RGDEDDG

SEQ ID NO: 30826 - protein, 7 aa, synthetic construct
RGDAFEL

SEQ ID NO: 30827 - protein, 7 aa, synthetic construct
RGDEDSR

SEQ ID NO: 30828 - protein, 7 aa, synthetic construct
RGDEEHR

SEQ ID NO: 30829 - protein, 7 aa, synthetic construct
RGDEEKN

SEQ ID NO: 30830 - protein, 7 aa, synthetic construct
RGDEENG

SEQ ID NO: 30831 - protein, 7 aa, synthetic construct
RGDEESG

SEQ ID NO: 30832 - protein, 7 aa, synthetic construct
RGDEFQG

SEQ ID NO: 30833 - protein, 7 aa, synthetic construct
RGDEFTD

SEQ ID NO: 30834 - protein, 7 aa, synthetic construct
RGDEFTQ

SEQ ID NO: 30835 - protein, 7 aa, synthetic construct
RGDEGER

SEQ ID NO: 30836 - protein, 7 aa, synthetic construct
RGDEGNE

SEQ ID NO: 30837 - protein, 7 aa, synthetic construct
RGDEGNL

SEQ ID NO: 30838 - protein, 7 aa, synthetic construct
RGDEITV

SEQ ID NO: 30839 - protein, 7 aa, synthetic construct
RGDEKGK

SEQ ID NO: 30840 - protein, 7 aa, synthetic construct
RGDELAQ

SEQ ID NO: 30841 - protein, 7 aa, synthetic construct
RGDAFSE

SEQ ID NO: 30842 - protein, 7 aa, synthetic construct
RGDELRV

SEQ ID NO: 30843 - protein, 7 aa, synthetic construct
RGDENEL

SEQ ID NO: 30844 - protein, 7 aa, synthetic construct
RGDENIV

SEQ ID NO: 30845 - protein, 7 aa, synthetic construct
RGDENQN

SEQ ID NO: 30846 - protein, 7 aa, synthetic construct
RGDENSH

SEQ ID NO: 30847 - protein, 7 aa, synthetic construct
RGDEQEN

SEQ ID NO: 30848 - protein, 7 aa, synthetic construct
RGDEQIQ

SEQ ID NO: 30849 - protein, 7 aa, synthetic construct
RGDERDE

SEQ ID NO: 30850 - protein, 7 aa, synthetic construct
RGDERED

SEQ ID NO: 30851 - protein, 7 aa, synthetic construct
RGDEREQ

SEQ ID NO: 30852 - protein, 7 aa, synthetic construct
RGDERHE

SEQ ID NO: 30853 - protein, 7 aa, synthetic construct
RGDERSL

SEQ ID NO: 30854 - protein, 7 aa, synthetic construct
RGDESRE

SEQ ID NO: 30855 - protein, 7 aa, synthetic construct
RGDETNF

SEQ ID NO: 30856 - protein, 7 aa, synthetic construct
RGDETTH

SEQ ID NO: 30857 - protein, 7 aa, synthetic construct
RGDEVFF

SEQ ID NO: 30858 - protein, 7 aa, synthetic construct
RGDAGIH

SEQ ID NO: 30859 - protein, 7 aa, synthetic construct
RGDEVKN

SEQ ID NO: 30860 - protein, 7 aa, synthetic construct
RGDEVRE

SEQ ID NO: 30861 - protein, 7 aa, synthetic construct
RGDFDDS

SEQ ID NO: 30862 - protein, 7 aa, synthetic construct
RGDFDEQ

SEQ ID NO: 30863 - protein, 7 aa, synthetic construct
RGDFDVD

SEQ ID NO: 30864 - protein, 7 aa, synthetic construct
RGDFKVH

SEQ ID NO: 30865 - protein, 7 aa, synthetic construct
RGDFLEE

SEQ ID NO: 30866 - protein, 7 aa, synthetic construct
RGDFNFF

SEQ ID NO: 30867 - protein, 7 aa, synthetic construct
RGDFNLF

SEQ ID NO: 30868 - protein, 7 aa, synthetic construct
RGDAHKD

SEQ ID NO: 30869 - protein, 7 aa, synthetic construct
RGDFQVK

SEQ ID NO: 30870 - protein, 7 aa, synthetic construct
RGDFTFH

SEQ ID NO: 30871 - protein, 7 aa, synthetic construct
RGDGAIV

SEQ ID NO: 30872 - protein, 7 aa, synthetic construct
RGDGAQA

SEQ ID NO: 30873 - protein, 7 aa, synthetic construct
RGDGDKK

SEQ ID NO: 30874 - protein, 7 aa, synthetic construct
RGDGDSL

SEQ ID NO: 30875 - protein, 7 aa, synthetic construct
RGDGEII

SEQ ID NO: 30876 - protein, 7 aa, synthetic construct
RGDGEVI

SEQ ID NO: 30877 - protein, 7 aa, synthetic construct
RGDGFLI

SEQ ID NO: 30878 - protein, 7 aa, synthetic construct
RGDAIHL

SEQ ID NO: 30879 - protein, 7 aa, synthetic construct
RGDAANL

SEQ ID NO: 30880 - protein, 7 aa, synthetic construct
RGDGGRH

SEQ ID NO: 30881 - protein, 7 aa, synthetic construct
RGDGHHT

SEQ ID NO: 30882 - protein, 7 aa, synthetic construct
RGDGHLF

SEQ ID NO: 30883 - protein, 7 aa, synthetic construct
RGDAILI

SEQ ID NO: 30884 - protein, 7 aa, synthetic construct
RGDGHQA

SEQ ID NO: 30885 - protein, 7 aa, synthetic construct
RGDGIAE

SEQ ID NO: 30886 - protein, 7 aa, synthetic construct
RGDGIAI

SEQ ID NO: 30887 - protein, 7 aa, synthetic construct
RGDGIIG

SEQ ID NO: 30888 - protein, 7 aa, synthetic construct
RGDGIRG

SEQ ID NO: 30889 - protein, 7 aa, synthetic construct
RGDGKQG

SEQ ID NO: 30890 - protein, 7 aa, synthetic construct
RGDGKTD

SEQ ID NO: 30891 - protein, 7 aa, synthetic construct
RGDGNAD

SEQ ID NO: 30892 - protein, 7 aa, synthetic construct
RGDGTEQ

SEQ ID NO: 30893 - protein, 7 aa, synthetic construct
RGDGVSG

SEQ ID NO: 30894 - protein, 7 aa, synthetic construct
RGDHDIQ

SEQ ID NO: 30895 - protein, 7 aa, synthetic construct
RGDHDTS

SEQ ID NO: 30896 - protein, 7 aa, synthetic construct
RGDHEEQ

SEQ ID NO: 30897 - protein, 7 aa, synthetic construct
RGDHEQS

SEQ ID NO: 30898 - protein, 7 aa, synthetic construct
RGDHFFI

SEQ ID NO: 30899 - protein, 7 aa, synthetic construct
RGDHFHR

SEQ ID NO: 30900 - protein, 7 aa, synthetic construct
RGDHGKD

SEQ ID NO: 30901 - protein, 7 aa, synthetic construct
RGDHHFS

SEQ ID NO: 30902 - protein, 7 aa, synthetic construct
RGDHHSS

SEQ ID NO: 30903 - protein, 7 aa, synthetic construct
RGDHIDA

SEQ ID NO: 30904 - protein, 7 aa, synthetic construct
RGDHIEI

SEQ ID NO: 30905 - protein, 7 aa, synthetic construct
RGDHIEV

SEQ ID NO: 30906 - protein, 7 aa, synthetic construct
RGDHLEQ

SEQ ID NO: 30907 - protein, 7 aa, synthetic construct
RGDHLIL

SEQ ID NO: 30908 - protein, 7 aa, synthetic construct
RGDHNDF

SEQ ID NO: 30909 - protein, 7 aa, synthetic construct
RGDHNFA

SEQ ID NO: 30910 - protein, 7 aa, synthetic construct
RGDHNFG

SEQ ID NO: 30911 - protein, 7 aa, synthetic construct
RGDHQLH

SEQ ID NO: 30912 - protein, 7 aa, synthetic construct
RGDHRDD

SEQ ID NO: 30913 - protein, 7 aa, synthetic construct
RGDHSDG

SEQ ID NO: 30914 - protein, 7 aa, synthetic construct
RGDHTKE

SEQ ID NO: 30915 - protein, 7 aa, synthetic construct
RGDIEAE

SEQ ID NO: 30916 - protein, 7 aa, synthetic construct
RGDIEEI

SEQ ID NO: 30917 - protein, 7 aa, synthetic construct
RGDIEIR

SEQ ID NO: 30918 - protein, 7 aa, synthetic construct
RGDIEKA

SEQ ID NO: 30919 - protein, 7 aa, synthetic construct
RGDIERT

SEQ ID NO: 30920 - protein, 7 aa, synthetic construct
RGDIEVE

SEQ ID NO: 30921 - protein, 7 aa, synthetic construct
RGDIFGN

SEQ ID NO: 30922 - protein, 7 aa, synthetic construct
RGDIFHS

SEQ ID NO: 30923 - protein, 7 aa, synthetic construct
RGDIFKN

SEQ ID NO: 30924 - protein, 7 aa, synthetic construct
RGDANKG

SEQ ID NO: 30925 - protein, 7 aa, synthetic construct
RGDIHER

SEQ ID NO: 30926 - protein, 7 aa, synthetic construct
RGDIIIV

SEQ ID NO: 30927 - protein, 7 aa, synthetic construct
RGDANNV

SEQ ID NO: 30928 - protein, 7 aa, synthetic construct
RGDIITA

SEQ ID NO: 30929 - protein, 7 aa, synthetic construct
RGDIKGD

SEQ ID NO: 30930 - protein, 7 aa, synthetic construct
RGDILNE

SEQ ID NO: 30931 - protein, 7 aa, synthetic construct
RGDILVD

SEQ ID NO: 30932 - protein, 7 aa, synthetic construct
RGDINAH

SEQ ID NO: 30933 - protein, 7 aa, synthetic construct
RGDINLE

SEQ ID NO: 30934 - protein, 7 aa, synthetic construct
RGDIQTN

SEQ ID NO: 30935 - protein, 7 aa, synthetic construct
RGDISDE

SEQ ID NO: 30936 - protein, 7 aa, synthetic construct
RGDISKG

SEQ ID NO: 30937 - protein, 7 aa, synthetic construct
RGDITAL

SEQ ID NO: 30938 - protein, 7 aa, synthetic construct
RGDAQGT

SEQ ID NO: 30939 - protein, 7 aa, synthetic construct
RGDITSE

SEQ ID NO: 30940 - protein, 7 aa, synthetic construct
RGDIVSS

SEQ ID NO: 30941 - protein, 7 aa, synthetic construct
RGDKDTS

SEQ ID NO: 30942 - protein, 7 aa, synthetic construct
RGDKDVH

SEQ ID NO: 30943 - protein, 7 aa, synthetic construct
RGDKDVS

SEQ ID NO: 30944 - protein, 7 aa, synthetic construct
RGDKEFA

SEQ ID NO: 30945 - protein, 7 aa, synthetic construct
RGDKGLE

SEQ ID NO: 30946 - protein, 7 aa, synthetic construct
RGDKIQF

SEQ ID NO: 30947 - protein, 7 aa, synthetic construct
RGDKIVF

SEQ ID NO: 30948 - protein, 7 aa, synthetic construct
RGDKKVA

SEQ ID NO: 30949 - protein, 7 aa, synthetic construct
RGDKLKD

SEQ ID NO: 30950 - protein, 7 aa, synthetic construct
RGDKLLV

SEQ ID NO: 30951 - protein, 7 aa, synthetic construct
RGDKQLL

SEQ ID NO: 30952 - protein, 7 aa, synthetic construct
RGDARLQ

SEQ ID NO: 30953 - protein, 7 aa, synthetic construct
RGDKSAE

SEQ ID NO: 30954 - protein, 7 aa, synthetic construct
RGDKSDE

SEQ ID NO: 30955 - protein, 7 aa, synthetic construct
RGDKTDH

SEQ ID NO: 30956 - protein, 7 aa, synthetic construct
RGDLAAN

SEQ ID NO: 30957 - protein, 7 aa, synthetic construct
RGDLADV

SEQ ID NO: 30958 - protein, 7 aa, synthetic construct
RGDASDN

SEQ ID NO: 30959 - protein, 7 aa, synthetic construct
RGDLDLH

SEQ ID NO: 30960 - protein, 7 aa, synthetic construct
RGDLDLS

SEQ ID NO: 30961 - protein, 7 aa, synthetic construct
RGDASFS

SEQ ID NO: 30962 - protein, 7 aa, synthetic construct
RGDLESN

SEQ ID NO: 30963 - protein, 7 aa, synthetic construct
RGDLGDQ

SEQ ID NO: 30964 - protein, 7 aa, synthetic construct
RGDLHSL

SEQ ID NO: 30965 - protein, 7 aa, synthetic construct
RGDLIDV

SEQ ID NO: 30966 - protein, 7 aa, synthetic construct
RGDLINV

SEQ ID NO: 30967 - protein, 7 aa, synthetic construct
RGDLKVI

SEQ ID NO: 30968 - protein, 7 aa, synthetic construct
RGDLLEQ

SEQ ID NO: 30969 - protein, 7 aa, synthetic construct
RGDLNDT

SEQ ID NO: 30970 - protein, 7 aa, synthetic construct
RGDLRDG

SEQ ID NO: 30971 - protein, 7 aa, synthetic construct
RGDLSND

SEQ ID NO: 30972 - protein, 7 aa, synthetic construct
RGDLTAS

SEQ ID NO: 30973 - protein, 7 aa, synthetic construct
RGDLTFF

SEQ ID NO: 30974 - protein, 7 aa, synthetic construct
RGDLTNE

SEQ ID NO: 30975 - protein, 7 aa, synthetic construct
RGDLTTF

SEQ ID NO: 30976 - protein, 7 aa, synthetic construct
RGDNAEK

SEQ ID NO: 30977 - protein, 7 aa, synthetic construct
RGDNAIN

SEQ ID NO: 30978 - protein, 7 aa, synthetic construct
RGDNDGV

SEQ ID NO: 30979 - protein, 7 aa, synthetic construct
RGDNDTN

SEQ ID NO: 30980 - protein, 7 aa, synthetic construct
RGDNERR

SEQ ID NO: 30981 - protein, 7 aa, synthetic construct
RGDNGHE

SEQ ID NO: 30982 - protein, 7 aa, synthetic construct
RGDNGTD

SEQ ID NO: 30983 - protein, 7 aa, synthetic construct
RGDNIRG

SEQ ID NO: 30984 - protein, 7 aa, synthetic construct
RGDAVFL

SEQ ID NO: 30985 - protein, 7 aa, synthetic construct
RGDAVFT

SEQ ID NO: 30986 - protein, 7 aa, synthetic construct
RGDNKQE

SEQ ID NO: 30987 - protein, 7 aa, synthetic construct
RGDNLHN

SEQ ID NO: 30988 - protein, 7 aa, synthetic construct
RGDNNIK

SEQ ID NO: 30989 - protein, 7 aa, synthetic construct
RGDNQRE

SEQ ID NO: 30990 - protein, 7 aa, synthetic construct
RGDNQVK

SEQ ID NO: 30991 - protein, 7 aa, synthetic construct
RGDAVQG

SEQ ID NO: 30992 - protein, 7 aa, synthetic construct
RGDNRVH

SEQ ID NO: 30993 - protein, 7 aa, synthetic construct
RGDNSDT

SEQ ID NO: 30994 - protein, 7 aa, synthetic construct
RGDNSEA

SEQ ID NO: 30995 - protein, 7 aa, synthetic construct
RGDNSTD

SEQ ID NO: 30996 - protein, 7 aa, synthetic construct
RGDNVDE

SEQ ID NO: 30997 - protein, 7 aa, synthetic construct
RGDNVHA

SEQ ID NO: 30998 - protein, 7 aa, synthetic construct
RGDNVLF

SEQ ID NO: 30999 - protein, 7 aa, synthetic construct
RGDQATN

SEQ ID NO: 31000 - protein, 7 aa, synthetic construct
RGDDADR

SEQ ID NO: 31001 - protein, 7 aa, synthetic construct
RGDQDIH

SEQ ID NO: 31002 - protein, 7 aa, synthetic construct
RGDQDTV

SEQ ID NO: 31003 - protein, 7 aa, synthetic construct
RGDQFDI

SEQ ID NO: 31004 - protein, 7 aa, synthetic construct
RGDQFLH

SEQ ID NO: 31005 - protein, 7 aa, synthetic construct
RGDQFSS

SEQ ID NO: 31006 - protein, 7 aa, synthetic construct
RGDQGAE

SEQ ID NO: 31007 - protein, 7 aa, synthetic construct
RGDQGDE

SEQ ID NO: 31008 - protein, 7 aa, synthetic construct
RGDQHIK

SEQ ID NO: 31009 - protein, 7 aa, synthetic construct
RGDQKVN

SEQ ID NO: 31010 - protein, 7 aa, synthetic construct
RGDQQNH

SEQ ID NO: 31011 - protein, 7 aa, synthetic construct
RGDQSHG

SEQ ID NO: 31012 - protein, 7 aa, synthetic construct
RGDRDET

SEQ ID NO: 31013 - protein, 7 aa, synthetic construct
RGDDDRG

SEQ ID NO: 31014 - protein, 7 aa, synthetic construct
RGDRFLL

SEQ ID NO: 31015 - protein, 7 aa, synthetic construct
RGDDDTD

SEQ ID NO: 31016 - protein, 7 aa, synthetic construct
RGDRIID

SEQ ID NO: 31017 - protein, 7 aa, synthetic construct
RGDRINE

SEQ ID NO: 31018 - protein, 7 aa, synthetic construct
RGDDEGL

SEQ ID NO: 31019 - protein, 7 aa, synthetic construct
RGDRLID

SEQ ID NO: 31020 - protein, 7 aa, synthetic construct
RGDRQSA

SEQ ID NO: 31021 - protein, 7 aa, synthetic construct
RGDRVDV

SEQ ID NO: 31022 - protein, 7 aa, synthetic construct
RGDDFAK

SEQ ID NO: 31023 - protein, 7 aa, synthetic construct
RGDDFDL

SEQ ID NO: 31024 - protein, 7 aa, synthetic construct
RGDSEGQ

SEQ ID NO: 31025 - protein, 7 aa, synthetic construct
RGDSFIV

SEQ ID NO: 31026 - protein, 7 aa, synthetic construct
RGDSFST

SEQ ID NO: 31027 - protein, 7 aa, synthetic construct
RGDSGEV

SEQ ID NO: 31028 - protein, 7 aa, synthetic construct
RGDSGSD

SEQ ID NO: 31029 - protein, 7 aa, synthetic construct
RGDSGTS

SEQ ID NO: 31030 - protein, 7 aa, synthetic construct
RGDSHAT

SEQ ID NO: 31031 - protein, 7 aa, synthetic construct
RGDDFLI

SEQ ID NO: 31032 - protein, 7 aa, synthetic construct
RGDSHSS

SEQ ID NO: 31033 - protein, 7 aa, synthetic construct
RGDSIAI

SEQ ID NO: 31034 - protein, 7 aa, synthetic construct
RGDSIKG

SEQ ID NO: 31035 - protein, 7 aa, synthetic construct
RGDSLKD

SEQ ID NO: 31036 - protein, 7 aa, synthetic construct
RGDDFVH

SEQ ID NO: 31037 - protein, 7 aa, synthetic construct
RGDSSDS

SEQ ID NO: 31038 - protein, 7 aa, synthetic construct
RGDDGFG

SEQ ID NO: 31039 - protein, 7 aa, synthetic construct
RGDSSSE

SEQ ID NO: 31040 - protein, 7 aa, synthetic construct
RGDSTDV

SEQ ID NO: 31041 - protein, 7 aa, synthetic construct
RGDDGGS

SEQ ID NO: 31042 - protein, 7 aa, synthetic construct
RGDTAAN

SEQ ID NO: 31043 - protein, 7 aa, synthetic construct
RGDTDGE

SEQ ID NO: 31044 - protein, 7 aa, synthetic construct
RGDTDSL

SEQ ID NO: 31045 - protein, 7 aa, synthetic construct
RGDTDTR

SEQ ID NO: 31046 - protein, 7 aa, synthetic construct
RGDTDVL

SEQ ID NO: 31047 - protein, 7 aa, synthetic construct
RGDDGQN

SEQ ID NO: 31048 - protein, 7 aa, synthetic construct
RGDTELR

SEQ ID NO: 31049 - protein, 7 aa, synthetic construct
RGDTENE

SEQ ID NO: 31050 - protein, 7 aa, synthetic construct
RGDTESE

SEQ ID NO: 31051 - protein, 7 aa, synthetic construct
RGDTFLN

SEQ ID NO: 31052 - protein, 7 aa, synthetic construct
RGDTFTD

SEQ ID NO: 31053 - protein, 7 aa, synthetic construct
RGDTFTS

SEQ ID NO: 31054 - protein, 7 aa, synthetic construct
RGDTGIS

SEQ ID NO: 31055 - protein, 7 aa, synthetic construct
RGDTHLT

SEQ ID NO: 31056 - protein, 7 aa, synthetic construct
RGDTIET

SEQ ID NO: 31057 - protein, 7 aa, synthetic construct
RGDTNHF

SEQ ID NO: 31058 - protein, 7 aa, synthetic construct
RGDTNID

SEQ ID NO: 31059 - protein, 7 aa, synthetic construct
RGDTNKE

SEQ ID NO: 31060 - protein, 7 aa, synthetic construct
RGDDHKE

SEQ ID NO: 31061 - protein, 7 aa, synthetic construct
RGDTNSG

SEQ ID NO: 31062 - protein, 7 aa, synthetic construct
RGDDHKG

SEQ ID NO: 31063 - protein, 7 aa, synthetic construct
RGDDHNT

SEQ ID NO: 31064 - protein, 7 aa, synthetic construct
RGDTTST

SEQ ID NO: 31065 - protein, 7 aa, synthetic construct
RGDTVKT

SEQ ID NO: 31066 - protein, 7 aa, synthetic construct
RGDDHVL

SEQ ID NO: 31067 - protein, 7 aa, synthetic construct
RGDTVRQ

SEQ ID NO: 31068 - protein, 7 aa, synthetic construct
RGDVADH

SEQ ID NO: 31069 - protein, 7 aa, synthetic construct
RGDVAFT

SEQ ID NO: 31070 - protein, 7 aa, synthetic construct
RGDVAIA

SEQ ID NO: 31071 - protein, 7 aa, synthetic construct
RGDVDDK

SEQ ID NO: 31072 - protein, 7 aa, synthetic construct
RGDVEEH

SEQ ID NO: 31073 - protein, 7 aa, synthetic construct
RGDVEIE

SEQ ID NO: 31074 - protein, 7 aa, synthetic construct
RGDVESE

SEQ ID NO: 31075 - protein, 7 aa, synthetic construct
RGDVGDS

SEQ ID NO: 31076 - protein, 7 aa, synthetic construct
RGDVGFT

SEQ ID NO: 31077 - protein, 7 aa, synthetic construct
RGDVGSA

SEQ ID NO: 31078 - protein, 7 aa, synthetic construct
RGDVHEF

SEQ ID NO: 31079 - protein, 7 aa, synthetic construct
RGDVIDV

SEQ ID NO: 31080 - protein, 7 aa, synthetic construct
RGDVKGE

SEQ ID NO: 31081 - protein, 7 aa, synthetic construct
RGDVKRN

SEQ ID NO: 31082 - protein, 7 aa, synthetic construct
RGDVNES

SEQ ID NO: 31083 - protein, 7 aa, synthetic construct
RGDVNNL

SEQ ID NO: 31084 - protein, 7 aa, synthetic construct
RGDVQSG

SEQ ID NO: 31085 - protein, 7 aa, synthetic construct
RGDVQTE

SEQ ID NO: 31086 - protein, 7 aa, synthetic construct
RGDVRRD

SEQ ID NO: 31087 - protein, 7 aa, synthetic construct
RGDDKES

SEQ ID NO: 31088 - protein, 7 aa, synthetic construct
RGDVTES

SEQ ID NO: 31089 - protein, 7 aa, synthetic construct
RGDVTGH

SEQ ID NO: 31090 - protein, 7 aa, synthetic construct
RGDVVIE

SEQ ID NO: 31091 - protein, 7 aa, synthetic construct
RGDVVRE

SEQ ID NO: 31092 - protein, 7 aa, synthetic construct
RGDDKRI

SEQ ID NO: 31093 - protein, 7 aa, synthetic construct
RGDDKSL

SEQ ID NO: 31094 - protein, 7 aa, synthetic construct
RGDDLNA

SEQ ID NO: 31095 - protein, 7 aa, synthetic construct
RGDDLQS

SEQ ID NO: 31096 - protein, 7 aa, synthetic construct
RGDDLSF

SEQ ID NO: 31097 - protein, 7 aa, synthetic construct
RGDDNSN

SEQ ID NO: 31098 - protein, 7 aa, synthetic construct
RGDDQFI

SEQ ID NO: 31099 - protein, 7 aa, synthetic construct
RGDDRQG

SEQ ID NO: 31100 - protein, 7 aa, synthetic construct
RGDDSAR

SEQ ID NO: 31101 - protein, 7 aa, synthetic construct
RGDDSNH

SEQ ID NO: 31102 - protein, 7 aa, synthetic construct
RGDDSQG

SEQ ID NO: 31103 - protein, 7 aa, synthetic construct
RGDDTGG

SEQ ID NO: 31104 - protein, 7 aa, synthetic construct
RGDDTNR

SEQ ID NO: 31105 - protein, 7 aa, synthetic construct
RGDDVAE

SEQ ID NO: 31106 - protein, 7 aa, synthetic construct
RGDEAGI

SEQ ID NO: 31107 - protein, 7 aa, synthetic construct
RGDEDLE

SEQ ID NO: 31108 - protein, 7 aa, synthetic construct
RGDEEGH

SEQ ID NO: 31109 - protein, 7 aa, synthetic construct
RGDEEHK

SEQ ID NO: 31110 - protein, 7 aa, synthetic construct
RGDEENF

SEQ ID NO: 31111 - protein, 7 aa, synthetic construct
RGDEETD

SEQ ID NO: 31112 - protein, 7 aa, synthetic construct
RGDEGLS

SEQ ID NO: 31113 - protein, 7 aa, synthetic construct
RGDELAS

SEQ ID NO: 31114 - protein, 7 aa, synthetic construct
RGDELGI

SEQ ID NO: 31115 - protein, 7 aa, synthetic construct
RGDELHH

SEQ ID NO: 31116 - protein, 7 aa, synthetic construct
RGDELIK

SEQ ID NO: 31117 - protein, 7 aa, synthetic construct
RGDELNV

SEQ ID NO: 31118 - protein, 7 aa, synthetic construct
RGDENVH

SEQ ID NO: 31119 - protein, 7 aa, synthetic construct
RGDEQGL

SEQ ID NO: 31120 - protein, 7 aa, synthetic construct
RGDEQSQ

SEQ ID NO: 31121 - protein, 7 aa, synthetic construct
RGDERAN

SEQ ID NO: 31122 - protein, 7 aa, synthetic construct
RGDERHH

SEQ ID NO: 31123 - protein, 7 aa, synthetic construct
RGDAGFF

SEQ ID NO: 31124 - protein, 7 aa, synthetic construct
RGDESGH

SEQ ID NO: 31125 - protein, 7 aa, synthetic construct
RGDETEI

SEQ ID NO: 31126 - protein, 7 aa, synthetic construct
RGDETHE

SEQ ID NO: 31127 - protein, 7 aa, synthetic construct
RGDEVEE

SEQ ID NO: 31128 - protein, 7 aa, synthetic construct
RGDEVFT

SEQ ID NO: 31129 - protein, 7 aa, synthetic construct
RGDATEL

SEQ ID NO: 31130 - protein, 7 aa, synthetic construct
RGDEVKE

SEQ ID NO: 31131 - protein, 7 aa, synthetic construct
RGDEVKR

SEQ ID NO: 31132 - protein, 7 aa, synthetic construct
RGDFASF

SEQ ID NO: 31133 - protein, 7 aa, synthetic construct
RGDFEIF

SEQ ID NO: 31134 - protein, 7 aa, synthetic construct
RGDFETQ

SEQ ID NO: 31135 - protein, 7 aa, synthetic construct
RGDFEVF

SEQ ID NO: 31136 - protein, 7 aa, synthetic construct
RGDFFAE

SEQ ID NO: 31137 - protein, 7 aa, synthetic construct
RGDFGGF

SEQ ID NO: 31138 - protein, 7 aa, synthetic construct
RGDFGNE

SEQ ID NO: 31139 - protein, 7 aa, synthetic construct
RGDAHDD

SEQ ID NO: 31140 - protein, 7 aa, synthetic construct
RGDFIED

SEQ ID NO: 31141 - protein, 7 aa, synthetic construct
RGDFQNV

SEQ ID NO: 31142 - protein, 7 aa, synthetic construct
RGDFQRD

SEQ ID NO: 31143 - protein, 7 aa, synthetic construct
RGDAHLV

SEQ ID NO: 31144 - protein, 7 aa, synthetic construct
RGDFVVA

SEQ ID NO: 31145 - protein, 7 aa, synthetic construct
RGDGALL

SEQ ID NO: 31146 - protein, 7 aa, synthetic construct
RGDGAND

SEQ ID NO: 31147 - protein, 7 aa, synthetic construct
RGDGDAD

SEQ ID NO: 31148 - protein, 7 aa, synthetic construct
RGDGDTL

SEQ ID NO: 31149 - protein, 7 aa, synthetic construct
RGDGEKH

SEQ ID NO: 31150 - protein, 7 aa, synthetic construct
RGDGENR

SEQ ID NO: 31151 - protein, 7 aa, synthetic construct
RGDGEQE

SEQ ID NO: 31152 - protein, 7 aa, synthetic construct
RGDGFAV

SEQ ID NO: 31153 - protein, 7 aa, synthetic construct
RGDGFII

SEQ ID NO: 31154 - protein, 7 aa, synthetic construct
RGDGGEK

SEQ ID NO: 31155 - protein, 7 aa, synthetic construct
RGDAIKS

SEQ ID NO: 31156 - protein, 7 aa, synthetic construct
RGDGHIV

SEQ ID NO: 31157 - protein, 7 aa, synthetic construct
RGDGIAF

SEQ ID NO: 31158 - protein, 7 aa, synthetic construct
RGDGIQH

SEQ ID NO: 31159 - protein, 7 aa, synthetic construct
RGDGKIT

SEQ ID NO: 31160 - protein, 7 aa, synthetic construct
RGDGKLF

SEQ ID NO: 31161 - protein, 7 aa, synthetic construct
RGDGQHD

SEQ ID NO: 31162 - protein, 7 aa, synthetic construct
RGDGSET

SEQ ID NO: 31163 - protein, 7 aa, synthetic construct
RGDAKHQ

SEQ ID NO: 31164 - protein, 7 aa, synthetic construct
RGDGTVT

SEQ ID NO: 31165 - protein, 7 aa, synthetic construct
RGDAKIQ

SEQ ID NO: 31166 - protein, 7 aa, synthetic construct
RGDGVNE

SEQ ID NO: 31167 - protein, 7 aa, synthetic construct
RGDHAIT

SEQ ID NO: 31168 - protein, 7 aa, synthetic construct
RGDHEFS

SEQ ID NO: 31169 - protein, 7 aa, synthetic construct
RGDHGDE

SEQ ID NO: 31170 - protein, 7 aa, synthetic construct
RGDHGGE

SEQ ID NO: 31171 - protein, 7 aa, synthetic construct
RGDHHFQ

SEQ ID NO: 31172 - protein, 7 aa, synthetic construct
RGDHLAE

SEQ ID NO: 31173 - protein, 7 aa, synthetic construct
RGDHLHN

SEQ ID NO: 31174 - protein, 7 aa, synthetic construct
RGDHQDG

SEQ ID NO: 31175 - protein, 7 aa, synthetic construct
RGDHQTT

SEQ ID NO: 31176 - protein, 7 aa, synthetic construct
RGDHRLK

SEQ ID NO: 31177 - protein, 7 aa, synthetic construct
RGDHVFE

SEQ ID NO: 31178 - protein, 7 aa, synthetic construct
RGDHVHT

SEQ ID NO: 31179 - protein, 7 aa, synthetic construct
RGDHVNH

SEQ ID NO: 31180 - protein, 7 aa, synthetic construct
RGDHVQE

SEQ ID NO: 31181 - protein, 7 aa, synthetic construct
RGDIADH

SEQ ID NO: 31182 - protein, 7 aa, synthetic construct
RGDIAFA

SEQ ID NO: 31183 - protein, 7 aa, synthetic construct
RGDIDGI

SEQ ID NO: 31184 - protein, 7 aa, synthetic construct
RGDIDLV

SEQ ID NO: 31185 - protein, 7 aa, synthetic construct
RGDIDVT

SEQ ID NO: 31186 - protein, 7 aa, synthetic construct
RGDIEGL

SEQ ID NO: 31187 - protein, 7 aa, synthetic construct
RGDIFFL

SEQ ID NO: 31188 - protein, 7 aa, synthetic construct
RGDIGFA

SEQ ID NO: 31189 - protein, 7 aa, synthetic construct
RGDIILT

SEQ ID NO: 31190 - protein, 7 aa, synthetic construct
RGDIKQG

SEQ ID NO: 31191 - protein, 7 aa, synthetic construct
RGDANSF

SEQ ID NO: 31192 - protein, 7 aa, synthetic construct
RGDINER

SEQ ID NO: 31193 - protein, 7 aa, synthetic construct
RGDINLD

SEQ ID NO: 31194 - protein, 7 aa, synthetic construct
RGDINTQ

SEQ ID NO: 31195 - protein, 7 aa, synthetic construct
RGDINVQ

SEQ ID NO: 31196 - protein, 7 aa, synthetic construct
RGDIQIQ

SEQ ID NO: 31197 - protein, 7 aa, synthetic construct
RGDIRLG

SEQ ID NO: 31198 - protein, 7 aa, synthetic construct
RGDISLE

SEQ ID NO: 31199 - protein, 7 aa, synthetic construct
RGDITEK

SEQ ID NO: 31200 - protein, 7 aa, synthetic construct
RGDIVKD

SEQ ID NO: 31201 - protein, 7 aa, synthetic construct
RGDIVRS

SEQ ID NO: 31202 - protein, 7 aa, synthetic construct
RGDIVTT

SEQ ID NO: 31203 - protein, 7 aa, synthetic construct
RGDKDQA

SEQ ID NO: 31204 - protein, 7 aa, synthetic construct
RGDKLFE

SEQ ID NO: 31205 - protein, 7 aa, synthetic construct
RGDKLLT

SEQ ID NO: 31206 - protein, 7 aa, synthetic construct
RGDKNIN

SEQ ID NO: 31207 - protein, 7 aa, synthetic construct
RGDKNLG

SEQ ID NO: 31208 - protein, 7 aa, synthetic construct
RGDKRSR

SEQ ID NO: 31209 - protein, 7 aa, synthetic construct
RGDLDQE

SEQ ID NO: 31210 - protein, 7 aa, synthetic construct
RGDLDRF

SEQ ID NO: 31211 - protein, 7 aa, synthetic construct
RGDLDTV

SEQ ID NO: 31212 - protein, 7 aa, synthetic construct
RGDLEAQ

SEQ ID NO: 31213 - protein, 7 aa, synthetic construct
RGDLEED

SEQ ID NO: 31214 - protein, 7 aa, synthetic construct
RGDLENH

SEQ ID NO: 31215 - protein, 7 aa, synthetic construct
RGDLFDK

SEQ ID NO: 31216 - protein, 7 aa, synthetic construct
RGDLFSL

SEQ ID NO: 31217 - protein, 7 aa, synthetic construct
RGDLFVL

SEQ ID NO: 31218 - protein, 7 aa, synthetic construct
RGDLGIH

SEQ ID NO: 31219 - protein, 7 aa, synthetic construct
RGDASNE

SEQ ID NO: 31220 - protein, 7 aa, synthetic construct
RGDLIHK

SEQ ID NO: 31221 - protein, 7 aa, synthetic construct
RGDLKKG

SEQ ID NO: 31222 - protein, 7 aa, synthetic construct
RGDLLEV

SEQ ID NO: 31223 - protein, 7 aa, synthetic construct
RGDLLQR

SEQ ID NO: 31224 - protein, 7 aa, synthetic construct
RGDLNIE

SEQ ID NO: 31225 - protein, 7 aa, synthetic construct
RGDLSEG

SEQ ID NO: 31226 - protein, 7 aa, synthetic construct
RGDLSFT

SEQ ID NO: 31227 - protein, 7 aa, synthetic construct
RGDLSIR

SEQ ID NO: 31228 - protein, 7 aa, synthetic construct
RGDATFQ

SEQ ID NO: 31229 - protein, 7 aa, synthetic construct
RGDLTAG

SEQ ID NO: 31230 - protein, 7 aa, synthetic construct
RGDLTIR

SEQ ID NO: 31231 - protein, 7 aa, synthetic construct
RGDLTLA

SEQ ID NO: 31232 - protein, 7 aa, synthetic construct
RGDNATE

SEQ ID NO: 31233 - protein, 7 aa, synthetic construct
RGDNEFL

SEQ ID NO: 31234 - protein, 7 aa, synthetic construct
RGDNEGL

SEQ ID NO: 31235 - protein, 7 aa, synthetic construct
RGDNEIH

SEQ ID NO: 31236 - protein, 7 aa, synthetic construct
RGDNFFT

SEQ ID NO: 31237 - protein, 7 aa, synthetic construct
RGDNGET

SEQ ID NO: 31238 - protein, 7 aa, synthetic construct
RGDAVAH

SEQ ID NO: 31239 - protein, 7 aa, synthetic construct
RGDNHLL

SEQ ID NO: 31240 - protein, 7 aa, synthetic construct
RGDNIFA

SEQ ID NO: 31241 - protein, 7 aa, synthetic construct
RGDNLIK

SEQ ID NO: 31242 - protein, 7 aa, synthetic construct
RGDNLTH

SEQ ID NO: 31243 - protein, 7 aa, synthetic construct
RGDNNGH

SEQ ID NO: 31244 - protein, 7 aa, synthetic construct
RGDNNIR

SEQ ID NO: 31245 - protein, 7 aa, synthetic construct
RGDNNTK

SEQ ID NO: 31246 - protein, 7 aa, synthetic construct
RGDNQKG

SEQ ID NO: 31247 - protein, 7 aa, synthetic construct
RGDNSRR

SEQ ID NO: 31248 - protein, 7 aa, synthetic construct
RGDNTGD

SEQ ID NO: 31249 - protein, 7 aa, synthetic construct
RGDNVIF

SEQ ID NO: 31250 - protein, 7 aa, synthetic construct
RGDQDDR

SEQ ID NO: 31251 - protein, 7 aa, synthetic construct
RGDQDFD

SEQ ID NO: 31252 - protein, 7 aa, synthetic construct
RGDQDNH

SEQ ID NO: 31253 - protein, 7 aa, synthetic construct
RGDQDNS

SEQ ID NO: 31254 - protein, 7 aa, synthetic construct
RGDQFAH

SEQ ID NO: 31255 - protein, 7 aa, synthetic construct
RGDQFAN

SEQ ID NO: 31256 - protein, 7 aa, synthetic construct
RGDQHFF

SEQ ID NO: 31257 - protein, 7 aa, synthetic construct
RGDQIAD

SEQ ID NO: 31258 - protein, 7 aa, synthetic construct
RGDQNGF

SEQ ID NO: 31259 - protein, 7 aa, synthetic construct
RGDQNSK

SEQ ID NO: 31260 - protein, 7 aa, synthetic construct
RGDQQAH

SEQ ID NO: 31261 - protein, 7 aa, synthetic construct
RGDDDAK

SEQ ID NO: 31262 - protein, 7 aa, synthetic construct
RGDQSIL

SEQ ID NO: 31263 - protein, 7 aa, synthetic construct
RGDQSIQ

SEQ ID NO: 31264 - protein, 7 aa, synthetic construct
RGDQTFE

SEQ ID NO: 31265 - protein, 7 aa, synthetic construct
RGDQTLH

SEQ ID NO: 31266 - protein, 7 aa, synthetic construct
RGDRALL

SEQ ID NO: 31267 - protein, 7 aa, synthetic construct
RGDRDVD

SEQ ID NO: 31268 - protein, 7 aa, synthetic construct
RGDRELA

SEQ ID NO: 31269 - protein, 7 aa, synthetic construct
RGDRFFS

SEQ ID NO: 31270 - protein, 7 aa, synthetic construct
RGDRFHE

SEQ ID NO: 31271 - protein, 7 aa, synthetic construct
RGDRFKE

SEQ ID NO: 31272 - protein, 7 aa, synthetic construct
RGDRGEE

SEQ ID NO: 31273 - protein, 7 aa, synthetic construct
RGDRHSD

SEQ ID NO: 31274 - protein, 7 aa, synthetic construct
RGDRIAA

SEQ ID NO: 31275 - protein, 7 aa, synthetic construct
RGDRIES

SEQ ID NO: 31276 - protein, 7 aa, synthetic construct
RGDDEFN

SEQ ID NO: 31277 - protein, 7 aa, synthetic construct
RGDRLEA

SEQ ID NO: 31278 - protein, 7 aa, synthetic construct
RGDRLSA

SEQ ID NO: 31279 - protein, 7 aa, synthetic construct
RGDRLSE

SEQ ID NO: 31280 - protein, 7 aa, synthetic construct
RGDRQLL

SEQ ID NO: 31281 - protein, 7 aa, synthetic construct
RGDRTSG

SEQ ID NO: 31282 - protein, 7 aa, synthetic construct
RGDDETT

SEQ ID NO: 31283 - protein, 7 aa, synthetic construct
RGDRVIA

SEQ ID NO: 31284 - protein, 7 aa, synthetic construct
RGDRVQS

SEQ ID NO: 31285 - protein, 7 aa, synthetic construct
RGDSANF

SEQ ID NO: 31286 - protein, 7 aa, synthetic construct
RGDSDHL

SEQ ID NO: 31287 - protein, 7 aa, synthetic construct
RGDADSG

SEQ ID NO: 31288 - protein, 7 aa, synthetic construct
RGDDFGR

SEQ ID NO: 31289 - protein, 7 aa, synthetic construct
RGDSFQR

SEQ ID NO: 31290 - protein, 7 aa, synthetic construct
RGDSHAH

SEQ ID NO: 31291 - protein, 7 aa, synthetic construct
RGDSIST

SEQ ID NO: 31292 - protein, 7 aa, synthetic construct
RGDSLQG

SEQ ID NO: 31293 - protein, 7 aa, synthetic construct
RGDSLSS

SEQ ID NO: 31294 - protein, 7 aa, synthetic construct
RGDADTI

SEQ ID NO: 31295 - protein, 7 aa, synthetic construct
RGDSQGL

SEQ ID NO: 31296 - protein, 7 aa, synthetic construct
RGDDGDV

SEQ ID NO: 31297 - protein, 7 aa, synthetic construct
RGDDGHE

SEQ ID NO: 31298 - protein, 7 aa, synthetic construct
RGDSTLG

SEQ ID NO: 31299 - protein, 7 aa, synthetic construct
RGDSTQD

SEQ ID NO: 31300 - protein, 7 aa, synthetic construct
RGDSVNK

SEQ ID NO: 31301 - protein, 7 aa, synthetic construct
RGDSVSQ

SEQ ID NO: 31302 - protein, 7 aa, synthetic construct
RGDTAQK

SEQ ID NO: 31303 - protein, 7 aa, synthetic construct
RGDTAVF

SEQ ID NO: 31304 - protein, 7 aa, synthetic construct
RGDTAVS

SEQ ID NO: 31305 - protein, 7 aa, synthetic construct
RGDTDGG

SEQ ID NO: 31306 - protein, 7 aa, synthetic construct
RGDDGNI

SEQ ID NO: 31307 - protein, 7 aa, synthetic construct
RGDDGNN

SEQ ID NO: 31308 - protein, 7 aa, synthetic construct
RGDTDLG

SEQ ID NO: 31309 - protein, 7 aa, synthetic construct
RGDADVK

SEQ ID NO: 31310 - protein, 7 aa, synthetic construct
RGDTDTI

SEQ ID NO: 31311 - protein, 7 aa, synthetic construct
RGDTDVS

SEQ ID NO: 31312 - protein, 7 aa, synthetic construct
RGDTEFK

SEQ ID NO: 31313 - protein, 7 aa, synthetic construct
RGDTEGD

SEQ ID NO: 31314 - protein, 7 aa, synthetic construct
RGDTELQ

SEQ ID NO: 31315 - protein, 7 aa, synthetic construct
RGDTEST

SEQ ID NO: 31316 - protein, 7 aa, synthetic construct
RGDTETQ

SEQ ID NO: 31317 - protein, 7 aa, synthetic construct
RGDTFHH

SEQ ID NO: 31318 - protein, 7 aa, synthetic construct
RGDTFHR

SEQ ID NO: 31319 - protein, 7 aa, synthetic construct
RGDTFNS

SEQ ID NO: 31320 - protein, 7 aa, synthetic construct
RGDADVS

SEQ ID NO: 31321 - protein, 7 aa, synthetic construct
RGDTHGH

SEQ ID NO: 31322 - protein, 7 aa, synthetic construct
RGDTHRN

SEQ ID NO: 31323 - protein, 7 aa, synthetic construct
RGDTIAL

SEQ ID NO: 31324 - protein, 7 aa, synthetic construct
RGDTLDI

SEQ ID NO: 31325 - protein, 7 aa, synthetic construct
RGDTLGF

SEQ ID NO: 31326 - protein, 7 aa, synthetic construct
RGDTNFF

SEQ ID NO: 31327 - protein, 7 aa, synthetic construct
RGDTNTV

SEQ ID NO: 31328 - protein, 7 aa, synthetic construct
RGDDHKN

SEQ ID NO: 31329 - protein, 7 aa, synthetic construct
RGDTQKS

SEQ ID NO: 31330 - protein, 7 aa, synthetic construct
RGDTQVQ

SEQ ID NO: 31331 - protein, 7 aa, synthetic construct
RGDTRGH

SEQ ID NO: 31332 - protein, 7 aa, synthetic construct
RGDTSLG

SEQ ID NO: 31333 - protein, 7 aa, synthetic construct
RGDTTLL

SEQ ID NO: 31334 - protein, 7 aa, synthetic construct
RGDTTQI

SEQ ID NO: 31335 - protein, 7 aa, synthetic construct
RGDTVGG

SEQ ID NO: 31336 - protein, 7 aa, synthetic construct
RGDTVGL

SEQ ID NO: 31337 - protein, 7 aa, synthetic construct
RGDVAGN

SEQ ID NO: 31338 - protein, 7 aa, synthetic construct
RGDVAGT

SEQ ID NO: 31339 - protein, 7 aa, synthetic construct
RGDVDAV

SEQ ID NO: 31340 - protein, 7 aa, synthetic construct
RGDVDGF

SEQ ID NO: 31341 - protein, 7 aa, synthetic construct
RGDVDVN

SEQ ID NO: 31342 - protein, 7 aa, synthetic construct
RGDVEIN

SEQ ID NO: 31343 - protein, 7 aa, synthetic construct
RGDVFGH

SEQ ID NO: 31344 - protein, 7 aa, synthetic construct
RGDVFVT

SEQ ID NO: 31345 - protein, 7 aa, synthetic construct
RGDVGDA

SEQ ID NO: 31346 - protein, 7 aa, synthetic construct
RGDVGGA

SEQ ID NO: 31347 - protein, 7 aa, synthetic construct
RGDVIQD

SEQ ID NO: 31348 - protein, 7 aa, synthetic construct
RGDVIRD

SEQ ID NO: 31349 - protein, 7 aa, synthetic construct
RGDVITE

SEQ ID NO: 31350 - protein, 7 aa, synthetic construct
RGDVLQF

SEQ ID NO: 31351 - protein, 7 aa, synthetic construct
RGDDITN

SEQ ID NO: 31352 - protein, 7 aa, synthetic construct
RGDVNTA

SEQ ID NO: 31353 - protein, 7 aa, synthetic construct
RGDVSLH

SEQ ID NO: 31354 - protein, 7 aa, synthetic construct
RGDDKHL

SEQ ID NO: 31355 - protein, 7 aa, synthetic construct
RGDVTVI

SEQ ID NO: 31356 - protein, 7 aa, synthetic construct
RGDVVDF

SEQ ID NO: 31357 - protein, 7 aa, synthetic construct
RGDDKQA

SEQ ID NO: 31358 - protein, 7 aa, synthetic construct
RGDDKVV

SEQ ID NO: 31359 - protein, 7 aa, synthetic construct
RGDDLII

SEQ ID NO: 31360 - protein, 7 aa, synthetic construct
RGDDLLA

SEQ ID NO: 31361 - protein, 7 aa, synthetic construct
RGDDLLL

SEQ ID NO: 31362 - protein, 7 aa, synthetic construct
RGDDNDD

SEQ ID NO: 31363 - protein, 7 aa, synthetic construct
RGDDNFS

SEQ ID NO: 31364 - protein, 7 aa, synthetic construct
RGDDQGN

SEQ ID NO: 31365 - protein, 7 aa, synthetic construct
RGDDRKF

SEQ ID NO: 31366 - protein, 7 aa, synthetic construct
RGDAAAH

SEQ ID NO: 31367 - protein, 7 aa, synthetic construct
RGDDRTT

SEQ ID NO: 31368 - protein, 7 aa, synthetic construct
RGDDSII

SEQ ID NO: 31369 - protein, 7 aa, synthetic construct
RGDDTDS

SEQ ID NO: 31370 - protein, 7 aa, synthetic construct
RGDDTHR

SEQ ID NO: 31371 - protein, 7 aa, synthetic construct
RGDDTKT

SEQ ID NO: 31372 - protein, 7 aa, synthetic construct
RGDDTLH

SEQ ID NO: 31373 - protein, 7 aa, synthetic construct
RGDDTRD

SEQ ID NO: 31374 - protein, 7 aa, synthetic construct
RGDDVSI

SEQ ID NO: 31375 - protein, 7 aa, synthetic construct
RGDEAEV

SEQ ID NO: 31376 - protein, 7 aa, synthetic construct
RGDEAFV

SEQ ID NO: 31377 - protein, 7 aa, synthetic construct
RGDEEHE

SEQ ID NO: 31378 - protein, 7 aa, synthetic construct
RGDEELV

SEQ ID NO: 31379 - protein, 7 aa, synthetic construct
RGDEEQG

SEQ ID NO: 31380 - protein, 7 aa, synthetic construct
RGDEESI

SEQ ID NO: 31381 - protein, 7 aa, synthetic construct
RGDEFTL

SEQ ID NO: 31382 - protein, 7 aa, synthetic construct
RGDEFVL

SEQ ID NO: 31383 - protein, 7 aa, synthetic construct
RGDEIDF

SEQ ID NO: 31384 - protein, 7 aa, synthetic construct
RGDEKFA

SEQ ID NO: 31385 - protein, 7 aa, synthetic construct
RGDEKVH

SEQ ID NO: 31386 - protein, 7 aa, synthetic construct
RGDELFL

SEQ ID NO: 31387 - protein, 7 aa, synthetic construct
RGDELKE

SEQ ID NO: 31388 - protein, 7 aa, synthetic construct
RGDELNT

SEQ ID NO: 31389 - protein, 7 aa, synthetic construct
RGDELRK

SEQ ID NO: 31390 - protein, 7 aa, synthetic construct
RGDENEE

SEQ ID NO: 31391 - protein, 7 aa, synthetic construct
RGDENRN

SEQ ID NO: 31392 - protein, 7 aa, synthetic construct
RGDEQAR

SEQ ID NO: 31393 - protein, 7 aa, synthetic construct
RGDAGAF

SEQ ID NO: 31394 - protein, 7 aa, synthetic construct
RGDEQEV

SEQ ID NO: 31395 - protein, 7 aa, synthetic construct
RGDEQKV

SEQ ID NO: 31396 - protein, 7 aa, synthetic construct
RGDEQNT

SEQ ID NO: 31397 - protein, 7 aa, synthetic construct
RGDERGS

SEQ ID NO: 31398 - protein, 7 aa, synthetic construct
RGDESGD

SEQ ID NO: 31399 - protein, 7 aa, synthetic construct
RGDESIN

SEQ ID NO: 31400 - protein, 7 aa, synthetic construct
RGDESIV

SEQ ID NO: 31401 - protein, 7 aa, synthetic construct
RGDESSF

SEQ ID NO: 31402 - protein, 7 aa, synthetic construct
RGDETFL

SEQ ID NO: 31403 - protein, 7 aa, synthetic construct
RGDETKS

SEQ ID NO: 31404 - protein, 7 aa, synthetic construct
RGDFAGI

SEQ ID NO: 31405 - protein, 7 aa, synthetic construct
RGDFDRS

SEQ ID NO: 31406 - protein, 7 aa, synthetic construct
RGDFELA

SEQ ID NO: 31407 - protein, 7 aa, synthetic construct
RGDAGTN

SEQ ID NO: 31408 - protein, 7 aa, synthetic construct
RGDFHAL

SEQ ID NO: 31409 - protein, 7 aa, synthetic construct
RGDFINI

SEQ ID NO: 31410 - protein, 7 aa, synthetic construct
RGDFKLD

SEQ ID NO: 31411 - protein, 7 aa, synthetic construct
RGDFKQG

SEQ ID NO: 31412 - protein, 7 aa, synthetic construct
RGDFNGG

SEQ ID NO: 31413 - protein, 7 aa, synthetic construct
RGDFNQE

SEQ ID NO: 31414 - protein, 7 aa, synthetic construct
RGDFNQN

SEQ ID NO: 31415 - protein, 7 aa, synthetic construct
RGDFQSG

SEQ ID NO: 31416 - protein, 7 aa, synthetic construct
RGDFQVQ

SEQ ID NO: 31417 - protein, 7 aa, synthetic construct
RGDFTTV

SEQ ID NO: 31418 - protein, 7 aa, synthetic construct
RGDGADQ

SEQ ID NO: 31419 - protein, 7 aa, synthetic construct
RGDAIAH

SEQ ID NO: 31420 - protein, 7 aa, synthetic construct
RGDAIAI

SEQ ID NO: 31421 - protein, 7 aa, synthetic construct
RGDGANT

SEQ ID NO: 31422 - protein, 7 aa, synthetic construct
RGDGDHE

SEQ ID NO: 31423 - protein, 7 aa, synthetic construct
RGDGEAR

SEQ ID NO: 31424 - protein, 7 aa, synthetic construct
RGDGEFR

SEQ ID NO: 31425 - protein, 7 aa, synthetic construct
RGDGFES

SEQ ID NO: 31426 - protein, 7 aa, synthetic construct
RGDGFIF

SEQ ID NO: 31427 - protein, 7 aa, synthetic construct
RGDGFVN

SEQ ID NO: 31428 - protein, 7 aa, synthetic construct
RGDAIIL

SEQ ID NO: 31429 - protein, 7 aa, synthetic construct
RGDGGVF

SEQ ID NO: 31430 - protein, 7 aa, synthetic construct
RGDGGVQ

SEQ ID NO: 31431 - protein, 7 aa, synthetic construct
RGDGIDI

SEQ ID NO: 31432 - protein, 7 aa, synthetic construct
RGDGKVN

SEQ ID NO: 31433 - protein, 7 aa, synthetic construct
RGDGLFK

SEQ ID NO: 31434 - protein, 7 aa, synthetic construct
RGDGLIK

SEQ ID NO: 31435 - protein, 7 aa, synthetic construct
RGDAIVH

SEQ ID NO: 31436 - protein, 7 aa, synthetic construct
RGDGNTI

SEQ ID NO: 31437 - protein, 7 aa, synthetic construct
RGDGNTQ

SEQ ID NO: 31438 - protein, 7 aa, synthetic construct
RGDGNVE

SEQ ID NO: 31439 - protein, 7 aa, synthetic construct
RGDGRAA

SEQ ID NO: 31440 - protein, 7 aa, synthetic construct
RGDGRAT

SEQ ID NO: 31441 - protein, 7 aa, synthetic construct
RGDGSAG

SEQ ID NO: 31442 - protein, 7 aa, synthetic construct
RGDGTAE

SEQ ID NO: 31443 - protein, 7 aa, synthetic construct
RGDGVNT

SEQ ID NO: 31444 - protein, 7 aa, synthetic construct
RGDHAED

SEQ ID NO: 31445 - protein, 7 aa, synthetic construct
RGDHDAH

SEQ ID NO: 31446 - protein, 7 aa, synthetic construct
RGDHEHD

SEQ ID NO: 31447 - protein, 7 aa, synthetic construct
RGDHETH

SEQ ID NO: 31448 - protein, 7 aa, synthetic construct
RGDHFTA

SEQ ID NO: 31449 - protein, 7 aa, synthetic construct
RGDHHQD

SEQ ID NO: 31450 - protein, 7 aa, synthetic construct
RGDHIET

SEQ ID NO: 31451 - protein, 7 aa, synthetic construct
RGDHIIF

SEQ ID NO: 31452 - protein, 7 aa, synthetic construct
RGDHITD

SEQ ID NO: 31453 - protein, 7 aa, synthetic construct
RGDHKAA

SEQ ID NO: 31454 - protein, 7 aa, synthetic construct
RGDHKLF

SEQ ID NO: 31455 - protein, 7 aa, synthetic construct
RGDHLEV

SEQ ID NO: 31456 - protein, 7 aa, synthetic construct
RGDALHG

SEQ ID NO: 31457 - protein, 7 aa, synthetic construct
RGDHLRN

SEQ ID NO: 31458 - protein, 7 aa, synthetic construct
RGDHNIG

SEQ ID NO: 31459 - protein, 7 aa, synthetic construct
RGDHNLK

SEQ ID NO: 31460 - protein, 7 aa, synthetic construct
RGDHTTG

SEQ ID NO: 31461 - protein, 7 aa, synthetic construct
RGDHVTS

SEQ ID NO: 31462 - protein, 7 aa, synthetic construct
RGDHVVR

SEQ ID NO: 31463 - protein, 7 aa, synthetic construct
RGDIADF

SEQ ID NO: 31464 - protein, 7 aa, synthetic construct
RGDIANG

SEQ ID NO: 31465 - protein, 7 aa, synthetic construct
RGDIANQ

SEQ ID NO: 31466 - protein, 7 aa, synthetic construct
RGDIASQ

SEQ ID NO: 31467 - protein, 7 aa, synthetic construct
RGDIDQN

SEQ ID NO: 31468 - protein, 7 aa, synthetic construct
RGDIEEE

SEQ ID NO: 31469 - protein, 7 aa, synthetic construct
RGDIEQV

SEQ ID NO: 31470 - protein, 7 aa, synthetic construct
RGDIGEN

SEQ ID NO: 31471 - protein, 7 aa, synthetic construct
RGDIHKA

SEQ ID NO: 31472 - protein, 7 aa, synthetic construct
RGDIHNE

SEQ ID NO: 31473 - protein, 7 aa, synthetic construct
RGDIISH

SEQ ID NO: 31474 - protein, 7 aa, synthetic construct
RGDILDE

SEQ ID NO: 31475 - protein, 7 aa, synthetic construct
RGDILFA

SEQ ID NO: 31476 - protein, 7 aa, synthetic construct
RGDINHT

SEQ ID NO: 31477 - protein, 7 aa, synthetic construct
RGDIRFG

SEQ ID NO: 31478 - protein, 7 aa, synthetic construct
RGDIRGE

SEQ ID NO: 31479 - protein, 7 aa, synthetic construct
RGDISER

SEQ ID NO: 31480 - protein, 7 aa, synthetic construct
RGDISIA

SEQ ID NO: 31481 - protein, 7 aa, synthetic construct
RGDISRL

SEQ ID NO: 31482 - protein, 7 aa, synthetic construct
RGDITHA

SEQ ID NO: 31483 - protein, 7 aa, synthetic construct
RGDKEFF

SEQ ID NO: 31484 - protein, 7 aa, synthetic construct
RGDKFEE

SEQ ID NO: 31485 - protein, 7 aa, synthetic construct
RGDKGIE

SEQ ID NO: 31486 - protein, 7 aa, synthetic construct
RGDKGSD

SEQ ID NO: 31487 - protein, 7 aa, synthetic construct
RGDKHGE

SEQ ID NO: 31488 - protein, 7 aa, synthetic construct
RGDKHIH

SEQ ID NO: 31489 - protein, 7 aa, synthetic construct
RGDKINQ

SEQ ID NO: 31490 - protein, 7 aa, synthetic construct
RGDARHF

SEQ ID NO: 31491 - protein, 7 aa, synthetic construct
RGDKNID

SEQ ID NO: 31492 - protein, 7 aa, synthetic construct
RGDKNLN

SEQ ID NO: 31493 - protein, 7 aa, synthetic construct
RGDKTFN

SEQ ID NO: 31494 - protein, 7 aa, synthetic construct
RGDKTLF

SEQ ID NO: 31495 - protein, 7 aa, synthetic construct
RGDKVSE

SEQ ID NO: 31496 - protein, 7 aa, synthetic construct
RGDLAFR

SEQ ID NO: 31497 - protein, 7 aa, synthetic construct
RGDASET

SEQ ID NO: 31498 - protein, 7 aa, synthetic construct
RGDLEEF

SEQ ID NO: 31499 - protein, 7 aa, synthetic construct
RGDLEQH

SEQ ID NO: 31500 - protein, 7 aa, synthetic construct
RGDLERE

SEQ ID NO: 31501 - protein, 7 aa, synthetic construct
RGDLETK

SEQ ID NO: 31502 - protein, 7 aa, synthetic construct
RGDLEVD

SEQ ID NO: 31503 - protein, 7 aa, synthetic construct
RGDLFFQ

SEQ ID NO: 31504 - protein, 7 aa, synthetic construct
RGDLFKH

SEQ ID NO: 31505 - protein, 7 aa, synthetic construct
RGDASHN

SEQ ID NO: 31506 - protein, 7 aa, synthetic construct
RGDLGNL

SEQ ID NO: 31507 - protein, 7 aa, synthetic construct
RGDLGRD

SEQ ID NO: 31508 - protein, 7 aa, synthetic construct
RGDASLN

SEQ ID NO: 31509 - protein, 7 aa, synthetic construct
RGDLIAE

SEQ ID NO: 31510 - protein, 7 aa, synthetic construct
RGDLIHF

SEQ ID NO: 31511 - protein, 7 aa, synthetic construct
RGDADFV

SEQ ID NO: 31512 - protein, 7 aa, synthetic construct
RGDLLFD

SEQ ID NO: 31513 - protein, 7 aa, synthetic construct
RGDLLKG

SEQ ID NO: 31514 - protein, 7 aa, synthetic construct
RGDLQSH

SEQ ID NO: 31515 - protein, 7 aa, synthetic construct
RGDLSID

SEQ ID NO: 31516 - protein, 7 aa, synthetic construct
RGDLTIS

SEQ ID NO: 31517 - protein, 7 aa, synthetic construct
RGDLVHF

SEQ ID NO: 31518 - protein, 7 aa, synthetic construct
RGDLVRD

SEQ ID NO: 31519 - protein, 7 aa, synthetic construct
RGDLVTG

SEQ ID NO: 31520 - protein, 7 aa, synthetic construct
RGDNAIQ

SEQ ID NO: 31521 - protein, 7 aa, synthetic construct
RGDNDAT

SEQ ID NO: 31522 - protein, 7 aa, synthetic construct
RGDNDFA

SEQ ID NO: 31523 - protein, 7 aa, synthetic construct
RGDNDGE

SEQ ID NO: 31524 - protein, 7 aa, synthetic construct
RGDNDKI

SEQ ID NO: 31525 - protein, 7 aa, synthetic construct
RGDNDNS

SEQ ID NO: 31526 - protein, 7 aa, synthetic construct
RGDNDVE

SEQ ID NO: 31527 - protein, 7 aa, synthetic construct
RGDNFEA

SEQ ID NO: 31528 - protein, 7 aa, synthetic construct
RGDNFEK

SEQ ID NO: 31529 - protein, 7 aa, synthetic construct
RGDNFGS

SEQ ID NO: 31530 - protein, 7 aa, synthetic construct
RGDNFRA

SEQ ID NO: 31531 - protein, 7 aa, synthetic construct
RGDNGNI

SEQ ID NO: 31532 - protein, 7 aa, synthetic construct
RGDNGTF

SEQ ID NO: 31533 - protein, 7 aa, synthetic construct
RGDNHNH

SEQ ID NO: 31534 - protein, 7 aa, synthetic construct
RGDNHVK

SEQ ID NO: 31535 - protein, 7 aa, synthetic construct
RGDNIDA

SEQ ID NO: 31536 - protein, 7 aa, synthetic construct
RGDAVHE

SEQ ID NO: 31537 - protein, 7 aa, synthetic construct
RGDNLLK

SEQ ID NO: 31538 - protein, 7 aa, synthetic construct
RGDNNVF

SEQ ID NO: 31539 - protein, 7 aa, synthetic construct
RGDNQQN

SEQ ID NO: 31540 - protein, 7 aa, synthetic construct
RGDNRND

SEQ ID NO: 31541 - protein, 7 aa, synthetic construct
RGDNSDE

SEQ ID NO: 31542 - protein, 7 aa, synthetic construct
RGDNSHG

SEQ ID NO: 31543 - protein, 7 aa, synthetic construct
RGDNTIQ

SEQ ID NO: 31544 - protein, 7 aa, synthetic construct
RGDNTVL

SEQ ID NO: 31545 - protein, 7 aa, synthetic construct
RGDNVIV

SEQ ID NO: 31546 - protein, 7 aa, synthetic construct
RGDNVTT

SEQ ID NO: 31547 - protein, 7 aa, synthetic construct
RGDQAFV

SEQ ID NO: 31548 - protein, 7 aa, synthetic construct
RGDQAQD

SEQ ID NO: 31549 - protein, 7 aa, synthetic construct
RGDQDAS

SEQ ID NO: 31550 - protein, 7 aa, synthetic construct
RGDQDGE

SEQ ID NO: 31551 - protein, 7 aa, synthetic construct
RGDQDTF

SEQ ID NO: 31552 - protein, 7 aa, synthetic construct
RGDQDVG

SEQ ID NO: 31553 - protein, 7 aa, synthetic construct
RGDQFAL

SEQ ID NO: 31554 - protein, 7 aa, synthetic construct
RGDQFSG

SEQ ID NO: 31555 - protein, 7 aa, synthetic construct
RGDDAIF

SEQ ID NO: 31556 - protein, 7 aa, synthetic construct
RGDQGHH

SEQ ID NO: 31557 - protein, 7 aa, synthetic construct
RGDQGSH

SEQ ID NO: 31558 - protein, 7 aa, synthetic construct
RGDQIAH

SEQ ID NO: 31559 - protein, 7 aa, synthetic construct
RGDQIAK

SEQ ID NO: 31560 - protein, 7 aa, synthetic construct
RGDQITD

SEQ ID NO: 31561 - protein, 7 aa, synthetic construct
RGDQKIH

SEQ ID NO: 31562 - protein, 7 aa, synthetic construct
RGDQKSG

SEQ ID NO: 31563 - protein, 7 aa, synthetic construct
RGDQLEI

SEQ ID NO: 31564 - protein, 7 aa, synthetic construct
RGDQQAV

SEQ ID NO: 31565 - protein, 7 aa, synthetic construct
RGDQQKE

SEQ ID NO: 31566 - protein, 7 aa, synthetic construct
RGDQRLQ

SEQ ID NO: 31567 - protein, 7 aa, synthetic construct
RGDQSAF

SEQ ID NO: 31568 - protein, 7 aa, synthetic construct
RGDQSEA

SEQ ID NO: 31569 - protein, 7 aa, synthetic construct
RGDQTHR

SEQ ID NO: 31570 - protein, 7 aa, synthetic construct
RGDQVKG

SEQ ID NO: 31571 - protein, 7 aa, synthetic construct
RGDDDST

SEQ ID NO: 31572 - protein, 7 aa, synthetic construct
RGDDDVH

SEQ ID NO: 31573 - protein, 7 aa, synthetic construct
RGDRIRE

SEQ ID NO: 31574 - protein, 7 aa, synthetic construct
RGDRLDD

SEQ ID NO: 31575 - protein, 7 aa, synthetic construct
RGDDEKL

SEQ ID NO: 31576 - protein, 7 aa, synthetic construct
RGDRQIG

SEQ ID NO: 31577 - protein, 7 aa, synthetic construct
RGDDESD

SEQ ID NO: 31578 - protein, 7 aa, synthetic construct
RGDSAKD

SEQ ID NO: 31579 - protein, 7 aa, synthetic construct
RGDDFEH

SEQ ID NO: 31580 - protein, 7 aa, synthetic construct
RGDDFFV

SEQ ID NO: 31581 - protein, 7 aa, synthetic construct
RGDSERH

SEQ ID NO: 31582 - protein, 7 aa, synthetic construct
RGDSFRA

SEQ ID NO: 31583 - protein, 7 aa, synthetic construct
RGDSGQS

SEQ ID NO: 31584 - protein, 7 aa, synthetic construct
RGDSGRV

SEQ ID NO: 31585 - protein, 7 aa, synthetic construct
RGDSHGN

SEQ ID NO: 31586 - protein, 7 aa, synthetic construct
RGDSITV

SEQ ID NO: 31587 - protein, 7 aa, synthetic construct
RGDSLLL

SEQ ID NO: 31588 - protein, 7 aa, synthetic construct
RGDDGEH

SEQ ID NO: 31589 - protein, 7 aa, synthetic construct
RGDDGHR

SEQ ID NO: 31590 - protein, 7 aa, synthetic construct
RGDSTVA

SEQ ID NO: 31591 - protein, 7 aa, synthetic construct
RGDDGNR

SEQ ID NO: 31592 - protein, 7 aa, synthetic construct
RGDTDQN

SEQ ID NO: 31593 - protein, 7 aa, synthetic construct
RGDDGQL

SEQ ID NO: 31594 - protein, 7 aa, synthetic construct
RGDTEEK

SEQ ID NO: 31595 - protein, 7 aa, synthetic construct
RGDTENG

SEQ ID NO: 31596 - protein, 7 aa, synthetic construct
RGDTETV

SEQ ID NO: 31597 - protein, 7 aa, synthetic construct
RGDTFHK

SEQ ID NO: 31598 - protein, 7 aa, synthetic construct
RGDTFKK

SEQ ID NO: 31599 - protein, 7 aa, synthetic construct
RGDTGFA

SEQ ID NO: 31600 - protein, 7 aa, synthetic construct
RGDTHEI

SEQ ID NO: 31601 - protein, 7 aa, synthetic construct
RGDDHDF

SEQ ID NO: 31602 - protein, 7 aa, synthetic construct
RGDTIKH

SEQ ID NO: 31603 - protein, 7 aa, synthetic construct
RGDTITG

SEQ ID NO: 31604 - protein, 7 aa, synthetic construct
RGDTKRE

SEQ ID NO: 31605 - protein, 7 aa, synthetic construct
RGDTLGH

SEQ ID NO: 31606 - protein, 7 aa, synthetic construct
RGDTNDH

SEQ ID NO: 31607 - protein, 7 aa, synthetic construct
RGDTQEN

SEQ ID NO: 31608 - protein, 7 aa, synthetic construct
RGDTSEH

SEQ ID NO: 31609 - protein, 7 aa, synthetic construct
RGDTTKA

SEQ ID NO: 31610 - protein, 7 aa, synthetic construct
RGDTVAT

SEQ ID NO: 31611 - protein, 7 aa, synthetic construct
RGDTVGS

SEQ ID NO: 31612 - protein, 7 aa, synthetic construct
RGDTVII

SEQ ID NO: 31613 - protein, 7 aa, synthetic construct
RGDTVKI

SEQ ID NO: 31614 - protein, 7 aa, synthetic construct
RGDVEEN

SEQ ID NO: 31615 - protein, 7 aa, synthetic construct
RGDVEIA

SEQ ID NO: 31616 - protein, 7 aa, synthetic construct
RGDVEIK

SEQ ID NO: 31617 - protein, 7 aa, synthetic construct
RGDVEKA

SEQ ID NO: 31618 - protein, 7 aa, synthetic construct
RGDVERH

SEQ ID NO: 31619 - protein, 7 aa, synthetic construct
RGDVERQ

SEQ ID NO: 31620 - protein, 7 aa, synthetic construct
RGDVFFD

SEQ ID NO: 31621 - protein, 7 aa, synthetic construct
RGDDIHF

SEQ ID NO: 31622 - protein, 7 aa, synthetic construct
RGDVFTV

SEQ ID NO: 31623 - protein, 7 aa, synthetic construct
RGDVGIT

SEQ ID NO: 31624 - protein, 7 aa, synthetic construct
RGDVGTQ

SEQ ID NO: 31625 - protein, 7 aa, synthetic construct
RGDVHIG

SEQ ID NO: 31626 - protein, 7 aa, synthetic construct
RGDVIAK

SEQ ID NO: 31627 - protein, 7 aa, synthetic construct
RGDDINK

SEQ ID NO: 31628 - protein, 7 aa, synthetic construct
RGDVIRG

SEQ ID NO: 31629 - protein, 7 aa, synthetic construct
RGDVLDR

SEQ ID NO: 31630 - protein, 7 aa, synthetic construct
RGDVLIS

SEQ ID NO: 31631 - protein, 7 aa, synthetic construct
RGDVRGD

SEQ ID NO: 31632 - protein, 7 aa, synthetic construct
RGDDKEA

SEQ ID NO: 31633 - protein, 7 aa, synthetic construct
RGDVSHG

SEQ ID NO: 31634 - protein, 7 aa, synthetic construct
RGDVSIN

SEQ ID NO: 31635 - protein, 7 aa, synthetic construct
RGDVTNN

SEQ ID NO: 31636 - protein, 7 aa, synthetic construct
RGDAEFS

SEQ ID NO: 31637 - protein, 7 aa, synthetic construct
RGDDKRA

SEQ ID NO: 31638 - protein, 7 aa, synthetic construct
RGDDLKR

SEQ ID NO: 31639 - protein, 7 aa, synthetic construct
RGDDLTQ

SEQ ID NO: 31640 - protein, 7 aa, synthetic construct
RGDDNAH

SEQ ID NO: 31641 - protein, 7 aa, synthetic construct
RGDDNEN

SEQ ID NO: 31642 - protein, 7 aa, synthetic construct
RGDDNKG

SEQ ID NO: 31643 - protein, 7 aa, synthetic construct
RGDDQIV

SEQ ID NO: 31644 - protein, 7 aa, synthetic construct
RGDDQSV

SEQ ID NO: 31645 - protein, 7 aa, synthetic construct
RGDDRVV

SEQ ID NO: 31646 - protein, 7 aa, synthetic construct
RGDDSNN

SEQ ID NO: 31647 - protein, 7 aa, synthetic construct
RGDDTEI

SEQ ID NO: 31648 - protein, 7 aa, synthetic construct
RGDDTFQ

SEQ ID NO: 31649 - protein, 7 aa, synthetic construct
RGDDTGQ

SEQ ID NO: 31650 - protein, 7 aa, synthetic construct
RGDDVDV

SEQ ID NO: 31651 - protein, 7 aa, synthetic construct
RGDDVLT

SEQ ID NO: 31652 - protein, 7 aa, synthetic construct
RGDDVND

SEQ ID NO: 31653 - protein, 7 aa, synthetic construct
RGDEDHI

SEQ ID NO: 31654 - protein, 7 aa, synthetic construct
RGDAFEH

SEQ ID NO: 31655 - protein, 7 aa, synthetic construct
RGDEEEV

SEQ ID NO: 31656 - protein, 7 aa, synthetic construct
RGDEEQH

SEQ ID NO: 31657 - protein, 7 aa, synthetic construct
RGDEFGV

SEQ ID NO: 31658 - protein, 7 aa, synthetic construct
RGDEFQH

SEQ ID NO: 31659 - protein, 7 aa, synthetic construct
RGDEHSF

SEQ ID NO: 31660 - protein, 7 aa, synthetic construct
RGDEHVK

SEQ ID NO: 31661 - protein, 7 aa, synthetic construct
RGDEIQS

SEQ ID NO: 31662 - protein, 7 aa, synthetic construct
RGDEKFT

SEQ ID NO: 31663 - protein, 7 aa, synthetic construct
RGDEKGI

SEQ ID NO: 31664 - protein, 7 aa, synthetic construct
RGDEKHI

SEQ ID NO: 31665 - protein, 7 aa, synthetic construct
RGDAFRD

SEQ ID NO: 31666 - protein, 7 aa, synthetic construct
RGDELAD

SEQ ID NO: 31667 - protein, 7 aa, synthetic construct
RGDELEK

SEQ ID NO: 31668 - protein, 7 aa, synthetic construct
RGDEQGQ

SEQ ID NO: 31669 - protein, 7 aa, synthetic construct
RGDEQIV

SEQ ID NO: 31670 - protein, 7 aa, synthetic construct
RGDEQRE

SEQ ID NO: 31671 - protein, 7 aa, synthetic construct
RGDERDS

SEQ ID NO: 31672 - protein, 7 aa, synthetic construct
RGDEREH

SEQ ID NO: 31673 - protein, 7 aa, synthetic construct
RGDAGDR

SEQ ID NO: 31674 - protein, 7 aa, synthetic construct
RGDERTT

SEQ ID NO: 31675 - protein, 7 aa, synthetic construct
RGDERVH

SEQ ID NO: 31676 - protein, 7 aa, synthetic construct
RGDETGF

SEQ ID NO: 31677 - protein, 7 aa, synthetic construct
RGDETHD

SEQ ID NO: 31678 - protein, 7 aa, synthetic construct
RGDEVAI

SEQ ID NO: 31679 - protein, 7 aa, synthetic construct
RGDEVFD

SEQ ID NO: 31680 - protein, 7 aa, synthetic construct
RGDAGIL

SEQ ID NO: 31681 - protein, 7 aa, synthetic construct
RGDEVNH

SEQ ID NO: 31682 - protein, 7 aa, synthetic construct
RGDEVRA

SEQ ID NO: 31683 - protein, 7 aa, synthetic construct
RGDEVRS

SEQ ID NO: 31684 - protein, 7 aa, synthetic construct
RGDEVRT

SEQ ID NO: 31685 - protein, 7 aa, synthetic construct
RGDEVSV

SEQ ID NO: 31686 - protein, 7 aa, synthetic construct
RGDAGNA

SEQ ID NO: 31687 - protein, 7 aa, synthetic construct
RGDFDKA

SEQ ID NO: 31688 - protein, 7 aa, synthetic construct
RGDFDRG

SEQ ID NO: 31689 - protein, 7 aa, synthetic construct
RGDFEDH

SEQ ID NO: 31690 - protein, 7 aa, synthetic construct
RGDFEEQ

SEQ ID NO: 31691 - protein, 7 aa, synthetic construct
RGDFEHV

SEQ ID NO: 31692 - protein, 7 aa, synthetic construct
RGDFFEE

SEQ ID NO: 31693 - protein, 7 aa, synthetic construct
RGDFGDG

SEQ ID NO: 31694 - protein, 7 aa, synthetic construct
RGDFGRI

SEQ ID NO: 31695 - protein, 7 aa, synthetic construct
RGDFIAH

SEQ ID NO: 31696 - protein, 7 aa, synthetic construct
RGDFIFA

SEQ ID NO: 31697 - protein, 7 aa, synthetic construct
RGDFINF

SEQ ID NO: 31698 - protein, 7 aa, synthetic construct
RGDAHFE

SEQ ID NO: 31699 - protein, 7 aa, synthetic construct
RGDFQRA

SEQ ID NO: 31700 - protein, 7 aa, synthetic construct
RGDFTKG

SEQ ID NO: 31701 - protein, 7 aa, synthetic construct
RGDFTSL

SEQ ID NO: 31702 - protein, 7 aa, synthetic construct
RGDFVDV

SEQ ID NO: 31703 - protein, 7 aa, synthetic construct
RGDFVID

SEQ ID NO: 31704 - protein, 7 aa, synthetic construct
RGDGAFV

SEQ ID NO: 31705 - protein, 7 aa, synthetic construct
RGDGALF

SEQ ID NO: 31706 - protein, 7 aa, synthetic construct
RGDGDEN

SEQ ID NO: 31707 - protein, 7 aa, synthetic construct
RGDGDFS

SEQ ID NO: 31708 - protein, 7 aa, synthetic construct
RGDGEET

SEQ ID NO: 31709 - protein, 7 aa, synthetic construct
RGDGESQ

SEQ ID NO: 31710 - protein, 7 aa, synthetic construct
RGDGFFN

SEQ ID NO: 31711 - protein, 7 aa, synthetic construct
RGDAIGV

SEQ ID NO: 31712 - protein, 7 aa, synthetic construct
RGDGGLS

SEQ ID NO: 31713 - protein, 7 aa, synthetic construct
RGDGHFL

SEQ ID NO: 31714 - protein, 7 aa, synthetic construct
RGDGIQQ

SEQ ID NO: 31715 - protein, 7 aa, synthetic construct
RGDGKLS

SEQ ID NO: 31716 - protein, 7 aa, synthetic construct
RGDGNDD

SEQ ID NO: 31717 - protein, 7 aa, synthetic construct
RGDGNEQ

SEQ ID NO: 31718 - protein, 7 aa, synthetic construct
RGDGQFG

SEQ ID NO: 31719 - protein, 7 aa, synthetic construct
RGDGRLE

SEQ ID NO: 31720 - protein, 7 aa, synthetic construct
RGDGTDT

SEQ ID NO: 31721 - protein, 7 aa, synthetic construct
RGDGVKG

SEQ ID NO: 31722 - protein, 7 aa, synthetic construct
RGDHARE

SEQ ID NO: 31723 - protein, 7 aa, synthetic construct
RGDHHVR

SEQ ID NO: 31724 - protein, 7 aa, synthetic construct
RGDALDR

SEQ ID NO: 31725 - protein, 7 aa, synthetic construct
RGDALGL

SEQ ID NO: 31726 - protein, 7 aa, synthetic construct
RGDHLDD

SEQ ID NO: 31727 - protein, 7 aa, synthetic construct
RGDHNDT

SEQ ID NO: 31728 - protein, 7 aa, synthetic construct
RGDHQVK

SEQ ID NO: 31729 - protein, 7 aa, synthetic construct
RGDALQI

SEQ ID NO: 31730 - protein, 7 aa, synthetic construct
RGDALVT

SEQ ID NO: 31731 - protein, 7 aa, synthetic construct
RGDIDED

SEQ ID NO: 31732 - protein, 7 aa, synthetic construct
RGDIDLI

SEQ ID NO: 31733 - protein, 7 aa, synthetic construct
RGDIDTF

SEQ ID NO: 31734 - protein, 7 aa, synthetic construct
RGDIEDV

SEQ ID NO: 31735 - protein, 7 aa, synthetic construct
RGDIEVH

SEQ ID NO: 31736 - protein, 7 aa, synthetic construct
RGDIFTI

SEQ ID NO: 31737 - protein, 7 aa, synthetic construct
RGDIGSS

SEQ ID NO: 31738 - protein, 7 aa, synthetic construct
RGDIHDH

SEQ ID NO: 31739 - protein, 7 aa, synthetic construct
RGDIHGE

SEQ ID NO: 31740 - protein, 7 aa, synthetic construct
RGDIIDR

SEQ ID NO: 31741 - protein, 7 aa, synthetic construct
RGDILLF

SEQ ID NO: 31742 - protein, 7 aa, synthetic construct
RGDILLR

SEQ ID NO: 31743 - protein, 7 aa, synthetic construct
RGDILQG

SEQ ID NO: 31744 - protein, 7 aa, synthetic construct
RGDINTE

SEQ ID NO: 31745 - protein, 7 aa, synthetic construct
RGDIQAN

SEQ ID NO: 31746 - protein, 7 aa, synthetic construct
RGDIQTD

SEQ ID NO: 31747 - protein, 7 aa, synthetic construct
RGDIRFF

SEQ ID NO: 31748 - protein, 7 aa, synthetic construct
RGDIVEF

SEQ ID NO: 31749 - protein, 7 aa, synthetic construct
RGDIVGS

SEQ ID NO: 31750 - protein, 7 aa, synthetic construct
RGDIVKE

SEQ ID NO: 31751 - protein, 7 aa, synthetic construct
RGDKDLH

SEQ ID NO: 31752 - protein, 7 aa, synthetic construct
RGDKFDH

SEQ ID NO: 31753 - protein, 7 aa, synthetic construct
RGDKFQL

SEQ ID NO: 31754 - protein, 7 aa, synthetic construct
RGDKGDD

SEQ ID NO: 31755 - protein, 7 aa, synthetic construct
RGDKGTE

SEQ ID NO: 31756 - protein, 7 aa, synthetic construct
RGDKHNA

SEQ ID NO: 31757 - protein, 7 aa, synthetic construct
RGDKIER

SEQ ID NO: 31758 - protein, 7 aa, synthetic construct
RGDKINN

SEQ ID NO: 31759 - protein, 7 aa, synthetic construct
RGDKLEG

SEQ ID NO: 31760 - protein, 7 aa, synthetic construct
RGDARSE

SEQ ID NO: 31761 - protein, 7 aa, synthetic construct
RGDKTGS

SEQ ID NO: 31762 - protein, 7 aa, synthetic construct
RGDLDGT

SEQ ID NO: 31763 - protein, 7 aa, synthetic construct
RGDASDV

SEQ ID NO: 31764 - protein, 7 aa, synthetic construct
RGDLDIN

SEQ ID NO: 31765 - protein, 7 aa, synthetic construct
RGDASES

SEQ ID NO: 31766 - protein, 7 aa, synthetic construct
RGDLEHV

SEQ ID NO: 31767 - protein, 7 aa, synthetic construct
RGDLFVH

SEQ ID NO: 31768 - protein, 7 aa, synthetic construct
RGDLHAA

SEQ ID NO: 31769 - protein, 7 aa, synthetic construct
RGDLHHF

SEQ ID NO: 31770 - protein, 7 aa, synthetic construct
RGDASRG

SEQ ID NO: 31771 - protein, 7 aa, synthetic construct
RGDLKLL

SEQ ID NO: 31772 - protein, 7 aa, synthetic construct
RGDLKND

SEQ ID NO: 31773 - protein, 7 aa, synthetic construct
RGDLLIQ

SEQ ID NO: 31774 - protein, 7 aa, synthetic construct
RGDLLTD

SEQ ID NO: 31775 - protein, 7 aa, synthetic construct
RGDLLVF

SEQ ID NO: 31776 - protein, 7 aa, synthetic construct
RGDLNGD

SEQ ID NO: 31777 - protein, 7 aa, synthetic construct
RGDLQQL

SEQ ID NO: 31778 - protein, 7 aa, synthetic construct
RGDLSEK

SEQ ID NO: 31779 - protein, 7 aa, synthetic construct
RGDLTQK

SEQ ID NO: 31780 - protein, 7 aa, synthetic construct
RGDNDHD

SEQ ID NO: 31781 - protein, 7 aa, synthetic construct
RGDNEDR

SEQ ID NO: 31782 - protein, 7 aa, synthetic construct
RGDNEVS

SEQ ID NO: 31783 - protein, 7 aa, synthetic construct
RGDATSG

SEQ ID NO: 31784 - protein, 7 aa, synthetic construct
RGDNGNQ

SEQ ID NO: 31785 - protein, 7 aa, synthetic construct
RGDNGQQ

SEQ ID NO: 31786 - protein, 7 aa, synthetic construct
RGDNHLT

SEQ ID NO: 31787 - protein, 7 aa, synthetic construct
RGDNIIF

SEQ ID NO: 31788 - protein, 7 aa, synthetic construct
RGDNISN

SEQ ID NO: 31789 - protein, 7 aa, synthetic construct
RGDAVGH

SEQ ID NO: 31790 - protein, 7 aa, synthetic construct
RGDNLGE

SEQ ID NO: 31791 - protein, 7 aa, synthetic construct
RGDNNIQ

SEQ ID NO: 31792 - protein, 7 aa, synthetic construct
RGDNNKF

SEQ ID NO: 31793 - protein, 7 aa, synthetic construct
RGDNQSS

SEQ ID NO: 31794 - protein, 7 aa, synthetic construct
RGDNQVI

SEQ ID NO: 31795 - protein, 7 aa, synthetic construct
RGDNSID

SEQ ID NO: 31796 - protein, 7 aa, synthetic construct
RGDNTLQ

SEQ ID NO: 31797 - protein, 7 aa, synthetic construct
RGDNTVA

SEQ ID NO: 31798 - protein, 7 aa, synthetic construct
RGDNTVH

SEQ ID NO: 31799 - protein, 7 aa, synthetic construct
RGDQAEF

SEQ ID NO: 31800 - protein, 7 aa, synthetic construct
RGDDAAT

SEQ ID NO: 31801 - protein, 7 aa, synthetic construct
RGDQEHS

SEQ ID NO: 31802 - protein, 7 aa, synthetic construct
RGDQFIL

SEQ ID NO: 31803 - protein, 7 aa, synthetic construct
RGDQGTH

SEQ ID NO: 31804 - protein, 7 aa, synthetic construct
RGDDARI

SEQ ID NO: 31805 - protein, 7 aa, synthetic construct
RGDQLVG

SEQ ID NO: 31806 - protein, 7 aa, synthetic construct
RGDQNEA

SEQ ID NO: 31807 - protein, 7 aa, synthetic construct
RGDQNGL

SEQ ID NO: 31808 - protein, 7 aa, synthetic construct
RGDQQGI

SEQ ID NO: 31809 - protein, 7 aa, synthetic construct
RGDQQLG

SEQ ID NO: 31810 - protein, 7 aa, synthetic construct
RGDQSLS

SEQ ID NO: 31811 - protein, 7 aa, synthetic construct
RGDRELH

SEQ ID NO: 31812 - protein, 7 aa, synthetic construct
RGDRFEG

SEQ ID NO: 31813 - protein, 7 aa, synthetic construct
RGDRFLS

SEQ ID NO: 31814 - protein, 7 aa, synthetic construct
RGDRFVN

SEQ ID NO: 31815 - protein, 7 aa, synthetic construct
RGDRHAL

SEQ ID NO: 31816 - protein, 7 aa, synthetic construct
RGDDEKS

SEQ ID NO: 31817 - protein, 7 aa, synthetic construct
RGDRTDG

SEQ ID NO: 31818 - protein, 7 aa, synthetic construct
RGDRTDN

SEQ ID NO: 31819 - protein, 7 aa, synthetic construct
RGDRTIS

SEQ ID NO: 31820 - protein, 7 aa, synthetic construct
RGDSAID

SEQ ID NO: 31821 - protein, 7 aa, synthetic construct
RGDSASK

SEQ ID NO: 31822 - protein, 7 aa, synthetic construct
RGDDFFN

SEQ ID NO: 31823 - protein, 7 aa, synthetic construct
RGDSHTD

SEQ ID NO: 31824 - protein, 7 aa, synthetic construct
RGDSKEF

SEQ ID NO: 31825 - protein, 7 aa, synthetic construct
RGDSKHD

SEQ ID NO: 31826 - protein, 7 aa, synthetic construct
RGDSKVD

SEQ ID NO: 31827 - protein, 7 aa, synthetic construct
RGDDFTL

SEQ ID NO: 31828 - protein, 7 aa, synthetic construct
RGDSQTH

SEQ ID NO: 31829 - protein, 7 aa, synthetic construct
RGDSSQG

SEQ ID NO: 31830 - protein, 7 aa, synthetic construct
RGDSSVL

SEQ ID NO: 31831 - protein, 7 aa, synthetic construct
RGDSTGS

SEQ ID NO: 31832 - protein, 7 aa, synthetic construct
RGDSTKG

SEQ ID NO: 31833 - protein, 7 aa, synthetic construct
RGDDGKG

SEQ ID NO: 31834 - protein, 7 aa, synthetic construct
RGDSVVN

SEQ ID NO: 31835 - protein, 7 aa, synthetic construct
RGDDGKK

SEQ ID NO: 31836 - protein, 7 aa, synthetic construct
RGDTAGE

SEQ ID NO: 31837 - protein, 7 aa, synthetic construct
RGDTAHR

SEQ ID NO: 31838 - protein, 7 aa, synthetic construct
RGDTAKF

SEQ ID NO: 31839 - protein, 7 aa, synthetic construct
RGDTASR

SEQ ID NO: 31840 - protein, 7 aa, synthetic construct
RGDTAVT

SEQ ID NO: 31841 - protein, 7 aa, synthetic construct
RGDDGNG

SEQ ID NO: 31842 - protein, 7 aa, synthetic construct
RGDTDFS

SEQ ID NO: 31843 - protein, 7 aa, synthetic construct
RGDTDIQ

SEQ ID NO: 31844 - protein, 7 aa, synthetic construct
RGDTDQT

SEQ ID NO: 31845 - protein, 7 aa, synthetic construct
RGDTDTV

SEQ ID NO: 31846 - protein, 7 aa, synthetic construct
RGDTEAF

SEQ ID NO: 31847 - protein, 7 aa, synthetic construct
RGDTEAH

SEQ ID NO: 31848 - protein, 7 aa, synthetic construct
RGDTEDG

SEQ ID NO: 31849 - protein, 7 aa, synthetic construct
RGDTFIH

SEQ ID NO: 31850 - protein, 7 aa, synthetic construct
RGDTFLV

SEQ ID NO: 31851 - protein, 7 aa, synthetic construct
RGDTGNQ

SEQ ID NO: 31852 - protein, 7 aa, synthetic construct
RGDTHLH

SEQ ID NO: 31853 - protein, 7 aa, synthetic construct
RGDTIIQ

SEQ ID NO: 31854 - protein, 7 aa, synthetic construct
RGDTISE

SEQ ID NO: 31855 - protein, 7 aa, synthetic construct
RGDDHGK

SEQ ID NO: 31856 - protein, 7 aa, synthetic construct
RGDTLIG

SEQ ID NO: 31857 - protein, 7 aa, synthetic construct
RGDTNER

SEQ ID NO: 31858 - protein, 7 aa, synthetic construct
RGDTNHS

SEQ ID NO: 31859 - protein, 7 aa, synthetic construct
RGDTNSV

SEQ ID NO: 31860 - protein, 7 aa, synthetic construct
RGDTREQ

SEQ ID NO: 31861 - protein, 7 aa, synthetic construct
RGDDHQI

SEQ ID NO: 31862 - protein, 7 aa, synthetic construct
RGDTSDD

SEQ ID NO: 31863 - protein, 7 aa, synthetic construct
RGDTSIV

SEQ ID NO: 31864 - protein, 7 aa, synthetic construct
RGDTVSA

SEQ ID NO: 31865 - protein, 7 aa, synthetic construct
RGDTVTQ

SEQ ID NO: 31866 - protein, 7 aa, synthetic construct
RGDVAIF

SEQ ID NO: 31867 - protein, 7 aa, synthetic construct
RGDVDHH

SEQ ID NO: 31868 - protein, 7 aa, synthetic construct
RGDVDRF

SEQ ID NO: 31869 - protein, 7 aa, synthetic construct
RGDDIEV

SEQ ID NO: 31870 - protein, 7 aa, synthetic construct
RGDVFAR

SEQ ID NO: 31871 - protein, 7 aa, synthetic construct
RGDVFSS

SEQ ID NO: 31872 - protein, 7 aa, synthetic construct
RGDVGVA

SEQ ID NO: 31873 - protein, 7 aa, synthetic construct
RGDVHVE

SEQ ID NO: 31874 - protein, 7 aa, synthetic construct
RGDVKDS

SEQ ID NO: 31875 - protein, 7 aa, synthetic construct
RGDDISD

SEQ ID NO: 31876 - protein, 7 aa, synthetic construct
RGDVNHV

SEQ ID NO: 31877 - protein, 7 aa, synthetic construct
RGDVNLA

SEQ ID NO: 31878 - protein, 7 aa, synthetic construct
RGDVQAD

SEQ ID NO: 31879 - protein, 7 aa, synthetic construct
RGDVQID

SEQ ID NO: 31880 - protein, 7 aa, synthetic construct
RGDVQQF

SEQ ID NO: 31881 - protein, 7 aa, synthetic construct
RGDVRDD

SEQ ID NO: 31882 - protein, 7 aa, synthetic construct
RGDDKFH

SEQ ID NO: 31883 - protein, 7 aa, synthetic construct
RGDVSVG

SEQ ID NO: 31884 - protein, 7 aa, synthetic construct
RGDVTEA

SEQ ID NO: 31885 - protein, 7 aa, synthetic construct
RGDVVLA

SEQ ID NO: 31886 - protein, 7 aa, synthetic construct
RGDVVSE

SEQ ID NO: 31887 - protein, 7 aa, synthetic construct
RGDDKTT

SEQ ID NO: 31888 - protein, 7 aa, synthetic construct
RGDDNTQ

SEQ ID NO: 31889 - protein, 7 aa, synthetic construct
RGDDRTR

SEQ ID NO: 31890 - protein, 7 aa, synthetic construct
RGDDSKR

SEQ ID NO: 31891 - protein, 7 aa, synthetic construct
RGDDSRE

SEQ ID NO: 31892 - protein, 7 aa, synthetic construct
RGDAESG

SEQ ID NO: 31893 - protein, 7 aa, synthetic construct
RGDDTRQ

SEQ ID NO: 31894 - protein, 7 aa, synthetic construct
RGDDTSL

SEQ ID NO: 31895 - protein, 7 aa, synthetic construct
RGDDVII

SEQ ID NO: 31896 - protein, 7 aa, synthetic construct
RGDDVNR

SEQ ID NO: 31897 - protein, 7 aa, synthetic construct
RGDDVQD

SEQ ID NO: 31898 - protein, 7 aa, synthetic construct
RGDEAEA

SEQ ID NO: 31899 - protein, 7 aa, synthetic construct
RGDEAEH

SEQ ID NO: 31900 - protein, 7 aa, synthetic construct
RGDEAHD

SEQ ID NO: 31901 - protein, 7 aa, synthetic construct
RGDEANA

SEQ ID NO: 31902 - protein, 7 aa, synthetic construct
RGDEATQ

SEQ ID NO: 31903 - protein, 7 aa, synthetic construct
RGDEDDD

SEQ ID NO: 31904 - protein, 7 aa, synthetic construct
RGDEDHR

SEQ ID NO: 31905 - protein, 7 aa, synthetic construct
RGDEDQL

SEQ ID NO: 31906 - protein, 7 aa, synthetic construct
RGDEESF

SEQ ID NO: 31907 - protein, 7 aa, synthetic construct
RGDEFAH

SEQ ID NO: 31908 - protein, 7 aa, synthetic construct
RGDEGAT

SEQ ID NO: 31909 - protein, 7 aa, synthetic construct
RGDEGEE

SEQ ID NO: 31910 - protein, 7 aa, synthetic construct
RGDEGGF

SEQ ID NO: 31911 - protein, 7 aa, synthetic construct
RGDEGIG

SEQ ID NO: 31912 - protein, 7 aa, synthetic construct
RGDEGQF

SEQ ID NO: 31913 - protein, 7 aa, synthetic construct
RGDEHAV

SEQ ID NO: 31914 - protein, 7 aa, synthetic construct
RGDEHSS

SEQ ID NO: 31915 - protein, 7 aa, synthetic construct
RGDEIAI

SEQ ID NO: 31916 - protein, 7 aa, synthetic construct
RGDEIGI

SEQ ID NO: 31917 - protein, 7 aa, synthetic construct
RGDEIKH

SEQ ID NO: 31918 - protein, 7 aa, synthetic construct
RGDEISF

SEQ ID NO: 31919 - protein, 7 aa, synthetic construct
RGDEITN

SEQ ID NO: 31920 - protein, 7 aa, synthetic construct
RGDEKLL

SEQ ID NO: 31921 - protein, 7 aa, synthetic construct
RGDELIS

SEQ ID NO: 31922 - protein, 7 aa, synthetic construct
RGDELNL

SEQ ID NO: 31923 - protein, 7 aa, synthetic construct
RGDENED

SEQ ID NO: 31924 - protein, 7 aa, synthetic construct
RGDENFA

SEQ ID NO: 31925 - protein, 7 aa, synthetic construct
RGDEQDK

SEQ ID NO: 31926 - protein, 7 aa, synthetic construct
RGDEQSR

SEQ ID NO: 31927 - protein, 7 aa, synthetic construct
RGDESHH

SEQ ID NO: 31928 - protein, 7 aa, synthetic construct
RGDESQF

SEQ ID NO: 31929 - protein, 7 aa, synthetic construct
RGDEVST

SEQ ID NO: 31930 - protein, 7 aa, synthetic construct
RGDFADA

SEQ ID NO: 31931 - protein, 7 aa, synthetic construct
RGDFAHE

SEQ ID NO: 31932 - protein, 7 aa, synthetic construct
RGDFAQD

SEQ ID NO: 31933 - protein, 7 aa, synthetic construct
RGDAGNN

SEQ ID NO: 31934 - protein, 7 aa, synthetic construct
RGDFEER

SEQ ID NO: 31935 - protein, 7 aa, synthetic construct
RGDFENI

SEQ ID NO: 31936 - protein, 7 aa, synthetic construct
RGDFFDG

SEQ ID NO: 31937 - protein, 7 aa, synthetic construct
RGDFHFA

SEQ ID NO: 31938 - protein, 7 aa, synthetic construct
RGDFIRD

SEQ ID NO: 31939 - protein, 7 aa, synthetic construct
RGDFKVG

SEQ ID NO: 31940 - protein, 7 aa, synthetic construct
RGDFTLQ

SEQ ID NO: 31941 - protein, 7 aa, synthetic construct
RGDFVEN

SEQ ID NO: 31942 - protein, 7 aa, synthetic construct
RGDGAGN

SEQ ID NO: 31943 - protein, 7 aa, synthetic construct
RGDGEEH

SEQ ID NO: 31944 - protein, 7 aa, synthetic construct
RGDGEHG

SEQ ID NO: 31945 - protein, 7 aa, synthetic construct
RGDGEQL

SEQ ID NO: 31946 - protein, 7 aa, synthetic construct
RGDGFED

SEQ ID NO: 31947 - protein, 7 aa, synthetic construct
RGDGFIK

SEQ ID NO: 31948 - protein, 7 aa, synthetic construct
RGDAIHG

SEQ ID NO: 31949 - protein, 7 aa, synthetic construct
RGDGFRH

SEQ ID NO: 31950 - protein, 7 aa, synthetic construct
RGDAIRR

SEQ ID NO: 31951 - protein, 7 aa, synthetic construct
RGDAISS

SEQ ID NO: 31952 - protein, 7 aa, synthetic construct
RGDGNGG

SEQ ID NO: 31953 - protein, 7 aa, synthetic construct
RGDGNNQ

SEQ ID NO: 31954 - protein, 7 aa, synthetic construct
RGDGQIK

SEQ ID NO: 31955 - protein, 7 aa, synthetic construct
RGDGSDV

SEQ ID NO: 31956 - protein, 7 aa, synthetic construct
RGDGSVN

SEQ ID NO: 31957 - protein, 7 aa, synthetic construct
RGDGTSG

SEQ ID NO: 31958 - protein, 7 aa, synthetic construct
RGDGTSH

SEQ ID NO: 31959 - protein, 7 aa, synthetic construct
RGDGTTS

SEQ ID NO: 31960 - protein, 7 aa, synthetic construct
RGDGVEK

SEQ ID NO: 31961 - protein, 7 aa, synthetic construct
RGDGVRE

SEQ ID NO: 31962 - protein, 7 aa, synthetic construct
RGDHATN

SEQ ID NO: 31963 - protein, 7 aa, synthetic construct
RGDHEEG

SEQ ID NO: 31964 - protein, 7 aa, synthetic construct
RGDHEFL

SEQ ID NO: 31965 - protein, 7 aa, synthetic construct
RGDHELF

SEQ ID NO: 31966 - protein, 7 aa, synthetic construct
RGDHFAL

SEQ ID NO: 31967 - protein, 7 aa, synthetic construct
RGDHFLL

SEQ ID NO: 31968 - protein, 7 aa, synthetic construct
RGDHFSN

SEQ ID NO: 31969 - protein, 7 aa, synthetic construct
RGDHGEL

SEQ ID NO: 31970 - protein, 7 aa, synthetic construct
RGDHHFF

SEQ ID NO: 31971 - protein, 7 aa, synthetic construct
RGDHHGE

SEQ ID NO: 31972 - protein, 7 aa, synthetic construct
RGDHHHG

SEQ ID NO: 31973 - protein, 7 aa, synthetic construct
RGDHHVK

SEQ ID NO: 31974 - protein, 7 aa, synthetic construct
RGDHIDF

SEQ ID NO: 31975 - protein, 7 aa, synthetic construct
RGDALHD

SEQ ID NO: 31976 - protein, 7 aa, synthetic construct
RGDHLKG

SEQ ID NO: 31977 - protein, 7 aa, synthetic construct
RGDHNDH

SEQ ID NO: 31978 - protein, 7 aa, synthetic construct
RGDALNV

SEQ ID NO: 31979 - protein, 7 aa, synthetic construct
RGDHVFS

SEQ ID NO: 31980 - protein, 7 aa, synthetic construct
RGDANDL

SEQ ID NO: 31981 - protein, 7 aa, synthetic construct
RGDIDLL

SEQ ID NO: 31982 - protein, 7 aa, synthetic construct
RGDANEI

SEQ ID NO: 31983 - protein, 7 aa, synthetic construct
RGDIDNT

SEQ ID NO: 31984 - protein, 7 aa, synthetic construct
RGDIDSA

SEQ ID NO: 31985 - protein, 7 aa, synthetic construct
RGDIEHD

SEQ ID NO: 31986 - protein, 7 aa, synthetic construct
RGDIFAI

SEQ ID NO: 31987 - protein, 7 aa, synthetic construct
RGDIFFN

SEQ ID NO: 31988 - protein, 7 aa, synthetic construct
RGDIFHD

SEQ ID NO: 31989 - protein, 7 aa, synthetic construct
RGDIFRG

SEQ ID NO: 31990 - protein, 7 aa, synthetic construct
RGDIGFS

SEQ ID NO: 31991 - protein, 7 aa, synthetic construct
RGDIGIH

SEQ ID NO: 31992 - protein, 7 aa, synthetic construct
RGDIHDL

SEQ ID NO: 31993 - protein, 7 aa, synthetic construct
RGDIHEF

SEQ ID NO: 31994 - protein, 7 aa, synthetic construct
RGDIHSA

SEQ ID NO: 31995 - protein, 7 aa, synthetic construct
RGDINDG

SEQ ID NO: 31996 - protein, 7 aa, synthetic construct
RGDINSQ

SEQ ID NO: 31997 - protein, 7 aa, synthetic construct
RGDINVF

SEQ ID NO: 31998 - protein, 7 aa, synthetic construct
RGDIQAS

SEQ ID NO: 31999 - protein, 7 aa, synthetic construct
RGDIQQT

SEQ ID NO: 32000 - protein, 7 aa, synthetic construct
RGDIREE

SEQ ID NO: 32001 - protein, 7 aa, synthetic construct
RGDIREN

SEQ ID NO: 32002 - protein, 7 aa, synthetic construct
RGDITAF

SEQ ID NO: 32003 - protein, 7 aa, synthetic construct
RGDITQR

SEQ ID NO: 32004 - protein, 7 aa, synthetic construct
RGDIVFG

SEQ ID NO: 32005 - protein, 7 aa, synthetic construct
RGDIVRE

SEQ ID NO: 32006 - protein, 7 aa, synthetic construct
RGDKAES

SEQ ID NO: 32007 - protein, 7 aa, synthetic construct
RGDAQQL

SEQ ID NO: 32008 - protein, 7 aa, synthetic construct
RGDKESA

SEQ ID NO: 32009 - protein, 7 aa, synthetic construct
RGDKFLA

SEQ ID NO: 32010 - protein, 7 aa, synthetic construct
RGDKFSS

SEQ ID NO: 32011 - protein, 7 aa, synthetic construct
RGDKGGG

SEQ ID NO: 32012 - protein, 7 aa, synthetic construct
RGDKHIQ

SEQ ID NO: 32013 - protein, 7 aa, synthetic construct
RGDKHSA

SEQ ID NO: 32014 - protein, 7 aa, synthetic construct
RGDKHTA

SEQ ID NO: 32015 - protein, 7 aa, synthetic construct
RGDKKTF

SEQ ID NO: 32016 - protein, 7 aa, synthetic construct
RGDKLTD

SEQ ID NO: 32017 - protein, 7 aa, synthetic construct
RGDKNTG

SEQ ID NO: 32018 - protein, 7 aa, synthetic construct
RGDKQDQ

SEQ ID NO: 32019 - protein, 7 aa, synthetic construct
RGDKQGN

SEQ ID NO: 32020 - protein, 7 aa, synthetic construct
RGDKRDD

SEQ ID NO: 32021 - protein, 7 aa, synthetic construct
RGDKSIE

SEQ ID NO: 32022 - protein, 7 aa, synthetic construct
RGDKSLE

SEQ ID NO: 32023 - protein, 7 aa, synthetic construct
RGDKSQG

SEQ ID NO: 32024 - protein, 7 aa, synthetic construct
RGDKTGV

SEQ ID NO: 32025 - protein, 7 aa, synthetic construct
RGDKTNN

SEQ ID NO: 32026 - protein, 7 aa, synthetic construct
RGDARTD

SEQ ID NO: 32027 - protein, 7 aa, synthetic construct
RGDKVFS

SEQ ID NO: 32028 - protein, 7 aa, synthetic construct
RGDKVLD

SEQ ID NO: 32029 - protein, 7 aa, synthetic construct
RGDASDK

SEQ ID NO: 32030 - protein, 7 aa, synthetic construct
RGDLEAN

SEQ ID NO: 32031 - protein, 7 aa, synthetic construct
RGDLELA

SEQ ID NO: 32032 - protein, 7 aa, synthetic construct
RGDLEVE

SEQ ID NO: 32033 - protein, 7 aa, synthetic construct
RGDLFAS

SEQ ID NO: 32034 - protein, 7 aa, synthetic construct
RGDLGLL

SEQ ID NO: 32035 - protein, 7 aa, synthetic construct
RGDLHFQ

SEQ ID NO: 32036 - protein, 7 aa, synthetic construct
RGDLHVF

SEQ ID NO: 32037 - protein, 7 aa, synthetic construct
RGDASNF

SEQ ID NO: 32038 - protein, 7 aa, synthetic construct
RGDASQN

SEQ ID NO: 32039 - protein, 7 aa, synthetic construct
RGDLKIF

SEQ ID NO: 32040 - protein, 7 aa, synthetic construct
RGDLLDN

SEQ ID NO: 32041 - protein, 7 aa, synthetic construct
RGDLLQF

SEQ ID NO: 32042 - protein, 7 aa, synthetic construct
RGDLQVE

SEQ ID NO: 32043 - protein, 7 aa, synthetic construct
RGDATDL

SEQ ID NO: 32044 - protein, 7 aa, synthetic construct
RGDLRDH

SEQ ID NO: 32045 - protein, 7 aa, synthetic construct
RGDLSTF

SEQ ID NO: 32046 - protein, 7 aa, synthetic construct
RGDLTHL

SEQ ID NO: 32047 - protein, 7 aa, synthetic construct
RGDLVKL

SEQ ID NO: 32048 - protein, 7 aa, synthetic construct
RGDLVQD

SEQ ID NO: 32049 - protein, 7 aa, synthetic construct
RGDNAFG

SEQ ID NO: 32050 - protein, 7 aa, synthetic construct
RGDNASE

SEQ ID NO: 32051 - protein, 7 aa, synthetic construct
RGDNDDL

SEQ ID NO: 32052 - protein, 7 aa, synthetic construct
RGDNDNL

SEQ ID NO: 32053 - protein, 7 aa, synthetic construct
RGDNDVT

SEQ ID NO: 32054 - protein, 7 aa, synthetic construct
RGDNENF

SEQ ID NO: 32055 - protein, 7 aa, synthetic construct
RGDNERG

SEQ ID NO: 32056 - protein, 7 aa, synthetic construct
RGDNFRR

SEQ ID NO: 32057 - protein, 7 aa, synthetic construct
RGDNGAT

SEQ ID NO: 32058 - protein, 7 aa, synthetic construct
RGDAVAF

SEQ ID NO: 32059 - protein, 7 aa, synthetic construct
RGDAVEI

SEQ ID NO: 32060 - protein, 7 aa, synthetic construct
RGDNKHK

SEQ ID NO: 32061 - protein, 7 aa, synthetic construct
RGDNLFH

SEQ ID NO: 32062 - protein, 7 aa, synthetic construct
RGDNNFH

SEQ ID NO: 32063 - protein, 7 aa, synthetic construct
RGDNNQF

SEQ ID NO: 32064 - protein, 7 aa, synthetic construct
RGDNQSK

SEQ ID NO: 32065 - protein, 7 aa, synthetic construct
RGDNSAF

SEQ ID NO: 32066 - protein, 7 aa, synthetic construct
RGDAVQV

SEQ ID NO: 32067 - protein, 7 aa, synthetic construct
RGDNSNH

SEQ ID NO: 32068 - protein, 7 aa, synthetic construct
RGDNVNA

SEQ ID NO: 32069 - protein, 7 aa, synthetic construct
RGDQDFI

SEQ ID NO: 32070 - protein, 7 aa, synthetic construct
RGDQDGF

SEQ ID NO: 32071 - protein, 7 aa, synthetic construct
RGDQDSQ

SEQ ID NO: 32072 - protein, 7 aa, synthetic construct
RGDQDTI

SEQ ID NO: 32073 - protein, 7 aa, synthetic construct
RGDQFAQ

SEQ ID NO: 32074 - protein, 7 aa, synthetic construct
RGDQFGH

SEQ ID NO: 32075 - protein, 7 aa, synthetic construct
RGDQFQH

SEQ ID NO: 32076 - protein, 7 aa, synthetic construct
RGDQGGF

SEQ ID NO: 32077 - protein, 7 aa, synthetic construct
RGDDAIL

SEQ ID NO: 32078 - protein, 7 aa, synthetic construct
RGDDAIN

SEQ ID NO: 32079 - protein, 7 aa, synthetic construct
RGDDAKE

SEQ ID NO: 32080 - protein, 7 aa, synthetic construct
RGDQGSF

SEQ ID NO: 32081 - protein, 7 aa, synthetic construct
RGDQHIE

SEQ ID NO: 32082 - protein, 7 aa, synthetic construct
RGDQHLT

SEQ ID NO: 32083 - protein, 7 aa, synthetic construct
RGDQHQF

SEQ ID NO: 32084 - protein, 7 aa, synthetic construct
RGDQHTT

SEQ ID NO: 32085 - protein, 7 aa, synthetic construct
RGDQISG

SEQ ID NO: 32086 - protein, 7 aa, synthetic construct
RGDQLAA

SEQ ID NO: 32087 - protein, 7 aa, synthetic construct
RGDQLFS

SEQ ID NO: 32088 - protein, 7 aa, synthetic construct
RGDQNAQ

SEQ ID NO: 32089 - protein, 7 aa, synthetic construct
RGDQNGT

SEQ ID NO: 32090 - protein, 7 aa, synthetic construct
RGDQNHE

SEQ ID NO: 32091 - protein, 7 aa, synthetic construct
RGDQQDE

SEQ ID NO: 32092 - protein, 7 aa, synthetic construct
RGDQQFS

SEQ ID NO: 32093 - protein, 7 aa, synthetic construct
RGDQQSL

SEQ ID NO: 32094 - protein, 7 aa, synthetic construct
RGDQQVS

SEQ ID NO: 32095 - protein, 7 aa, synthetic construct
RGDQRIF

SEQ ID NO: 32096 - protein, 7 aa, synthetic construct
RGDQVGF

SEQ ID NO: 32097 - protein, 7 aa, synthetic construct
RGDQVVF

SEQ ID NO: 32098 - protein, 7 aa, synthetic construct
RGDDDKQ

SEQ ID NO: 32099 - protein, 7 aa, synthetic construct
RGDRAID

SEQ ID NO: 32100 - protein, 7 aa, synthetic construct
RGDRDDR

SEQ ID NO: 32101 - protein, 7 aa, synthetic construct
RGDRDRL

SEQ ID NO: 32102 - protein, 7 aa, synthetic construct
RGDRFDV

SEQ ID NO: 32103 - protein, 7 aa, synthetic construct
RGDRFSS

SEQ ID NO: 32104 - protein, 7 aa, synthetic construct
RGDRHQD

SEQ ID NO: 32105 - protein, 7 aa, synthetic construct
RGDRTDS

SEQ ID NO: 32106 - protein, 7 aa, synthetic construct
RGDRVRE

SEQ ID NO: 32107 - protein, 7 aa, synthetic construct
RGDSAAF

SEQ ID NO: 32108 - protein, 7 aa, synthetic construct
RGDSAVN

SEQ ID NO: 32109 - protein, 7 aa, synthetic construct
RGDSDDG

SEQ ID NO: 32110 - protein, 7 aa, synthetic construct
RGDSDIQ

SEQ ID NO: 32111 - protein, 7 aa, synthetic construct
RGDDFEE

SEQ ID NO: 32112 - protein, 7 aa, synthetic construct
RGDDFEL

SEQ ID NO: 32113 - protein, 7 aa, synthetic construct
RGDSELA

SEQ ID NO: 32114 - protein, 7 aa, synthetic construct
RGDSFSQ

SEQ ID NO: 32115 - protein, 7 aa, synthetic construct
RGDSGQK

SEQ ID NO: 32116 - protein, 7 aa, synthetic construct
RGDSHAL

SEQ ID NO: 32117 - protein, 7 aa, synthetic construct
RGDSHHD

SEQ ID NO: 32118 - protein, 7 aa, synthetic construct
RGDDFLE

SEQ ID NO: 32119 - protein, 7 aa, synthetic construct
RGDADST

SEQ ID NO: 32120 - protein, 7 aa, synthetic construct
RGDSIRH

SEQ ID NO: 32121 - protein, 7 aa, synthetic construct
RGDSKNA

SEQ ID NO: 32122 - protein, 7 aa, synthetic construct
RGDSKTD

SEQ ID NO: 32123 - protein, 7 aa, synthetic construct
RGDSKVG

SEQ ID NO: 32124 - protein, 7 aa, synthetic construct
RGDSNLT

SEQ ID NO: 32125 - protein, 7 aa, synthetic construct
RGDSNSK

SEQ ID NO: 32126 - protein, 7 aa, synthetic construct
RGDSQGR

SEQ ID NO: 32127 - protein, 7 aa, synthetic construct
RGDSQLV

SEQ ID NO: 32128 - protein, 7 aa, synthetic construct
RGDSQTG

SEQ ID NO: 32129 - protein, 7 aa, synthetic construct
RGDSSHE

SEQ ID NO: 32130 - protein, 7 aa, synthetic construct
RGDSVQF

SEQ ID NO: 32131 - protein, 7 aa, synthetic construct
RGDTAHA

SEQ ID NO: 32132 - protein, 7 aa, synthetic construct
RGDTAQT

SEQ ID NO: 32133 - protein, 7 aa, synthetic construct
RGDTAVL

SEQ ID NO: 32134 - protein, 7 aa, synthetic construct
RGDTEDE

SEQ ID NO: 32135 - protein, 7 aa, synthetic construct
RGDDGQS

SEQ ID NO: 32136 - protein, 7 aa, synthetic construct
RGDDGRF

SEQ ID NO: 32137 - protein, 7 aa, synthetic construct
RGDTFLE

SEQ ID NO: 32138 - protein, 7 aa, synthetic construct
RGDTFVK

SEQ ID NO: 32139 - protein, 7 aa, synthetic construct
RGDDGTN

SEQ ID NO: 32140 - protein, 7 aa, synthetic construct
RGDDGVI

SEQ ID NO: 32141 - protein, 7 aa, synthetic construct
RGDTHEN

SEQ ID NO: 32142 - protein, 7 aa, synthetic construct
RGDDHAF

SEQ ID NO: 32143 - protein, 7 aa, synthetic construct
RGDTKFG

SEQ ID NO: 32144 - protein, 7 aa, synthetic construct
RGDTKQG

SEQ ID NO: 32145 - protein, 7 aa, synthetic construct
RGDTLHQ

SEQ ID NO: 32146 - protein, 7 aa, synthetic construct
RGDTNFL

SEQ ID NO: 32147 - protein, 7 aa, synthetic construct
RGDTNFR

SEQ ID NO: 32148 - protein, 7 aa, synthetic construct
RGDDHNQ

SEQ ID NO: 32149 - protein, 7 aa, synthetic construct
RGDTRSE

SEQ ID NO: 32150 - protein, 7 aa, synthetic construct
RGDTSDK

SEQ ID NO: 32151 - protein, 7 aa, synthetic construct
RGDTSDS

SEQ ID NO: 32152 - protein, 7 aa, synthetic construct
RGDTSGH

SEQ ID NO: 32153 - protein, 7 aa, synthetic construct
RGDDHRF

SEQ ID NO: 32154 - protein, 7 aa, synthetic construct
RGDTSTH

SEQ ID NO: 32155 - protein, 7 aa, synthetic construct
RGDTVES

SEQ ID NO: 32156 - protein, 7 aa, synthetic construct
RGDVAGH

SEQ ID NO: 32157 - protein, 7 aa, synthetic construct
RGDDIAT

SEQ ID NO: 32158 - protein, 7 aa, synthetic construct
RGDVDAE

SEQ ID NO: 32159 - protein, 7 aa, synthetic construct
RGDVDHV

SEQ ID NO: 32160 - protein, 7 aa, synthetic construct
RGDVDKE

SEQ ID NO: 32161 - protein, 7 aa, synthetic construct
RGDVENE

SEQ ID NO: 32162 - protein, 7 aa, synthetic construct
RGDVFLD

SEQ ID NO: 32163 - protein, 7 aa, synthetic construct
RGDVIDN

SEQ ID NO: 32164 - protein, 7 aa, synthetic construct
RGDVITS

SEQ ID NO: 32165 - protein, 7 aa, synthetic construct
RGDDISF

SEQ ID NO: 32166 - protein, 7 aa, synthetic construct
RGDVLEV

SEQ ID NO: 32167 - protein, 7 aa, synthetic construct
RGDVNTT

SEQ ID NO: 32168 - protein, 7 aa, synthetic construct
RGDVQRA

SEQ ID NO: 32169 - protein, 7 aa, synthetic construct
RGDVSAE

SEQ ID NO: 32170 - protein, 7 aa, synthetic construct
RGDDKGT

SEQ ID NO: 32171 - protein, 7 aa, synthetic construct
RGDVTLL

SEQ ID NO: 32172 - protein, 7 aa, synthetic construct
RGDAEGF

SEQ ID NO: 32173 - protein, 7 aa, synthetic construct
RGDDLHN

SEQ ID NO: 32174 - protein, 7 aa, synthetic construct
RGDAEHS

SEQ ID NO: 32175 - protein, 7 aa, synthetic construct
RGDDNGA

SEQ ID NO: 32176 - protein, 7 aa, synthetic construct
RGDDNNV

SEQ ID NO: 32177 - protein, 7 aa, synthetic construct
RGDDQHE

SEQ ID NO: 32178 - protein, 7 aa, synthetic construct
RGDDRAN

SEQ ID NO: 32179 - protein, 7 aa, synthetic construct
RGDDRSQ

SEQ ID NO: 32180 - protein, 7 aa, synthetic construct
RGDDSTV

SEQ ID NO: 32181 - protein, 7 aa, synthetic construct
RGDDTAL

SEQ ID NO: 32182 - protein, 7 aa, synthetic construct
RGDDTVK

SEQ ID NO: 32183 - protein, 7 aa, synthetic construct
RGDDVDQ

SEQ ID NO: 32184 - protein, 7 aa, synthetic construct
RGDDVFI

SEQ ID NO: 32185 - protein, 7 aa, synthetic construct
RGDDVQE

SEQ ID NO: 32186 - protein, 7 aa, synthetic construct
RGDEALN

SEQ ID NO: 32187 - protein, 7 aa, synthetic construct
RGDEDHF

SEQ ID NO: 32188 - protein, 7 aa, synthetic construct
RGDEDKI

SEQ ID NO: 32189 - protein, 7 aa, synthetic construct
RGDEDLR

SEQ ID NO: 32190 - protein, 7 aa, synthetic construct
RGDAFEQ

SEQ ID NO: 32191 - protein, 7 aa, synthetic construct
RGDEENL

SEQ ID NO: 32192 - protein, 7 aa, synthetic construct
RGDEEVQ

SEQ ID NO: 32193 - protein, 7 aa, synthetic construct
RGDEFAS

SEQ ID NO: 32194 - protein, 7 aa, synthetic construct
RGDEFEH

SEQ ID NO: 32195 - protein, 7 aa, synthetic construct
RGDEFGE

SEQ ID NO: 32196 - protein, 7 aa, synthetic construct
RGDEFRI

SEQ ID NO: 32197 - protein, 7 aa, synthetic construct
RGDEFVV

SEQ ID NO: 32198 - protein, 7 aa, synthetic construct
RGDEIHT

SEQ ID NO: 32199 - protein, 7 aa, synthetic construct
RGDEILI

SEQ ID NO: 32200 - protein, 7 aa, synthetic construct
RGDEIVK

SEQ ID NO: 32201 - protein, 7 aa, synthetic construct
RGDEIVN

SEQ ID NO: 32202 - protein, 7 aa, synthetic construct
RGDEKAE

SEQ ID NO: 32203 - protein, 7 aa, synthetic construct
RGDEKRF

SEQ ID NO: 32204 - protein, 7 aa, synthetic construct
RGDELER

SEQ ID NO: 32205 - protein, 7 aa, synthetic construct
RGDAFTR

SEQ ID NO: 32206 - protein, 7 aa, synthetic construct
RGDENNI

SEQ ID NO: 32207 - protein, 7 aa, synthetic construct
RGDEQFK

SEQ ID NO: 32208 - protein, 7 aa, synthetic construct
RGDERLE

SEQ ID NO: 32209 - protein, 7 aa, synthetic construct
RGDETDH

SEQ ID NO: 32210 - protein, 7 aa, synthetic construct
RGDEVFE

SEQ ID NO: 32211 - protein, 7 aa, synthetic construct
RGDEVND

SEQ ID NO: 32212 - protein, 7 aa, synthetic construct
RGDAGKD

SEQ ID NO: 32213 - protein, 7 aa, synthetic construct
RGDEVRR

SEQ ID NO: 32214 - protein, 7 aa, synthetic construct
RGDAGNS

SEQ ID NO: 32215 - protein, 7 aa, synthetic construct
RGDFDVF

SEQ ID NO: 32216 - protein, 7 aa, synthetic construct
RGDFEHD

SEQ ID NO: 32217 - protein, 7 aa, synthetic construct
RGDFFFF

SEQ ID NO: 32218 - protein, 7 aa, synthetic construct
RGDFHLQ

SEQ ID NO: 32219 - protein, 7 aa, synthetic construct
RGDFITK

SEQ ID NO: 32220 - protein, 7 aa, synthetic construct
RGDAHFS

SEQ ID NO: 32221 - protein, 7 aa, synthetic construct
RGDFKLN

SEQ ID NO: 32222 - protein, 7 aa, synthetic construct
RGDAHHQ

SEQ ID NO: 32223 - protein, 7 aa, synthetic construct
RGDFLVS

SEQ ID NO: 32224 - protein, 7 aa, synthetic construct
RGDFQAD

SEQ ID NO: 32225 - protein, 7 aa, synthetic construct
RGDFQIH

SEQ ID NO: 32226 - protein, 7 aa, synthetic construct
RGDAHLT

SEQ ID NO: 32227 - protein, 7 aa, synthetic construct
RGDAHQT

SEQ ID NO: 32228 - protein, 7 aa, synthetic construct
RGDFTAD

SEQ ID NO: 32229 - protein, 7 aa, synthetic construct
RGDFTFS

SEQ ID NO: 32230 - protein, 7 aa, synthetic construct
RGDAHVF

SEQ ID NO: 32231 - protein, 7 aa, synthetic construct
RGDGAFD

SEQ ID NO: 32232 - protein, 7 aa, synthetic construct
RGDGAHG

SEQ ID NO: 32233 - protein, 7 aa, synthetic construct
RGDGATG

SEQ ID NO: 32234 - protein, 7 aa, synthetic construct
RGDGDAV

SEQ ID NO: 32235 - protein, 7 aa, synthetic construct
RGDGDDG

SEQ ID NO: 32236 - protein, 7 aa, synthetic construct
RGDGDLI

SEQ ID NO: 32237 - protein, 7 aa, synthetic construct
RGDGDRT

SEQ ID NO: 32238 - protein, 7 aa, synthetic construct
RGDGEIK

SEQ ID NO: 32239 - protein, 7 aa, synthetic construct
RGDGFAS

SEQ ID NO: 32240 - protein, 7 aa, synthetic construct
RGDGFDA

SEQ ID NO: 32241 - protein, 7 aa, synthetic construct
RGDGGLA

SEQ ID NO: 32242 - protein, 7 aa, synthetic construct
RGDGGTD

SEQ ID NO: 32243 - protein, 7 aa, synthetic construct
RGDGHFF

SEQ ID NO: 32244 - protein, 7 aa, synthetic construct
RGDGIGR

SEQ ID NO: 32245 - protein, 7 aa, synthetic construct
RGDGILI

SEQ ID NO: 32246 - protein, 7 aa, synthetic construct
RGDGLFD

SEQ ID NO: 32247 - protein, 7 aa, synthetic construct
RGDGLHS

SEQ ID NO: 32248 - protein, 7 aa, synthetic construct
RGDAIVF

SEQ ID NO: 32249 - protein, 7 aa, synthetic construct
RGDAKAF

SEQ ID NO: 32250 - protein, 7 aa, synthetic construct
RGDGQET

SEQ ID NO: 32251 - protein, 7 aa, synthetic construct
RGDGSAH

SEQ ID NO: 32252 - protein, 7 aa, synthetic construct
RGDGTDQ

SEQ ID NO: 32253 - protein, 7 aa, synthetic construct
RGDGTGH

SEQ ID NO: 32254 - protein, 7 aa, synthetic construct
RGDGTQQ

SEQ ID NO: 32255 - protein, 7 aa, synthetic construct
RGDGTVI

SEQ ID NO: 32256 - protein, 7 aa, synthetic construct
RGDGVQH

SEQ ID NO: 32257 - protein, 7 aa, synthetic construct
RGDHDET

SEQ ID NO: 32258 - protein, 7 aa, synthetic construct
RGDHDSA

SEQ ID NO: 32259 - protein, 7 aa, synthetic construct
RGDHEGT

SEQ ID NO: 32260 - protein, 7 aa, synthetic construct
RGDHEQI

SEQ ID NO: 32261 - protein, 7 aa, synthetic construct
RGDHFLG

SEQ ID NO: 32262 - protein, 7 aa, synthetic construct
RGDHHHA

SEQ ID NO: 32263 - protein, 7 aa, synthetic construct
RGDHIDT

SEQ ID NO: 32264 - protein, 7 aa, synthetic construct
RGDHIFF

SEQ ID NO: 32265 - protein, 7 aa, synthetic construct
RGDALEV

SEQ ID NO: 32266 - protein, 7 aa, synthetic construct
RGDHLSS

SEQ ID NO: 32267 - protein, 7 aa, synthetic construct
RGDHLVL

SEQ ID NO: 32268 - protein, 7 aa, synthetic construct
RGDHNFD

SEQ ID NO: 32269 - protein, 7 aa, synthetic construct
RGDHQNS

SEQ ID NO: 32270 - protein, 7 aa, synthetic construct
RGDHSVA

SEQ ID NO: 32271 - protein, 7 aa, synthetic construct
RGDHSVN

SEQ ID NO: 32272 - protein, 7 aa, synthetic construct
RGDHTLV

SEQ ID NO: 32273 - protein, 7 aa, synthetic construct
RGDHTRS

SEQ ID NO: 32274 - protein, 7 aa, synthetic construct
RGDHVGE

SEQ ID NO: 32275 - protein, 7 aa, synthetic construct
RGDHVHD

SEQ ID NO: 32276 - protein, 7 aa, synthetic construct
RGDHVSS

SEQ ID NO: 32277 - protein, 7 aa, synthetic construct
RGDHVVF

SEQ ID NO: 32278 - protein, 7 aa, synthetic construct
RGDIAFL

SEQ ID NO: 32279 - protein, 7 aa, synthetic construct
RGDIDHE

SEQ ID NO: 32280 - protein, 7 aa, synthetic construct
RGDIEEV

SEQ ID NO: 32281 - protein, 7 aa, synthetic construct
RGDIETA

SEQ ID NO: 32282 - protein, 7 aa, synthetic construct
RGDIGKA

SEQ ID NO: 32283 - protein, 7 aa, synthetic construct
RGDIGKF

SEQ ID NO: 32284 - protein, 7 aa, synthetic construct
RGDIKAH

SEQ ID NO: 32285 - protein, 7 aa, synthetic construct
RGDILKD

SEQ ID NO: 32286 - protein, 7 aa, synthetic construct
RGDILLL

SEQ ID NO: 32287 - protein, 7 aa, synthetic construct
RGDILND

SEQ ID NO: 32288 - protein, 7 aa, synthetic construct
RGDINTA

SEQ ID NO: 32289 - protein, 7 aa, synthetic construct
RGDIRQD

SEQ ID NO: 32290 - protein, 7 aa, synthetic construct
RGDAQFF

SEQ ID NO: 32291 - protein, 7 aa, synthetic construct
RGDAQLE

SEQ ID NO: 32292 - protein, 7 aa, synthetic construct
RGDKFHA

SEQ ID NO: 32293 - protein, 7 aa, synthetic construct
RGDKGNA

SEQ ID NO: 32294 - protein, 7 aa, synthetic construct
RGDKHSH

SEQ ID NO: 32295 - protein, 7 aa, synthetic construct
RGDKHTE

SEQ ID NO: 32296 - protein, 7 aa, synthetic construct
RGDKQTG

SEQ ID NO: 32297 - protein, 7 aa, synthetic construct
RGDKRDG

SEQ ID NO: 32298 - protein, 7 aa, synthetic construct
RGDKTRR

SEQ ID NO: 32299 - protein, 7 aa, synthetic construct
RGDLAAE

SEQ ID NO: 32300 - protein, 7 aa, synthetic construct
RGDLAGD

SEQ ID NO: 32301 - protein, 7 aa, synthetic construct
RGDLDIL

SEQ ID NO: 32302 - protein, 7 aa, synthetic construct
RGDLDRD

SEQ ID NO: 32303 - protein, 7 aa, synthetic construct
RGDLEFI

SEQ ID NO: 32304 - protein, 7 aa, synthetic construct
RGDLEVI

SEQ ID NO: 32305 - protein, 7 aa, synthetic construct
RGDLFED

SEQ ID NO: 32306 - protein, 7 aa, synthetic construct
RGDLGNI

SEQ ID NO: 32307 - protein, 7 aa, synthetic construct
RGDLGQL

SEQ ID NO: 32308 - protein, 7 aa, synthetic construct
RGDLGSE

SEQ ID NO: 32309 - protein, 7 aa, synthetic construct
RGDLHVN

SEQ ID NO: 32310 - protein, 7 aa, synthetic construct
RGDLITF

SEQ ID NO: 32311 - protein, 7 aa, synthetic construct
RGDLNVE

SEQ ID NO: 32312 - protein, 7 aa, synthetic construct
RGDLQDF

SEQ ID NO: 32313 - protein, 7 aa, synthetic construct
RGDLTDE

SEQ ID NO: 32314 - protein, 7 aa, synthetic construct
RGDLTKD

SEQ ID NO: 32315 - protein, 7 aa, synthetic construct
RGDLTLG

SEQ ID NO: 32316 - protein, 7 aa, synthetic construct
RGDLTLQ

SEQ ID NO: 32317 - protein, 7 aa, synthetic construct
RGDNAAF

SEQ ID NO: 32318 - protein, 7 aa, synthetic construct
RGDNAFV

SEQ ID NO: 32319 - protein, 7 aa, synthetic construct
RGDNDHA

SEQ ID NO: 32320 - protein, 7 aa, synthetic construct
RGDNDKS

SEQ ID NO: 32321 - protein, 7 aa, synthetic construct
RGDNDTQ

SEQ ID NO: 32322 - protein, 7 aa, synthetic construct
RGDNETL

SEQ ID NO: 32323 - protein, 7 aa, synthetic construct
RGDNFAH

SEQ ID NO: 32324 - protein, 7 aa, synthetic construct
RGDNFFD

SEQ ID NO: 32325 - protein, 7 aa, synthetic construct
RGDATTH

SEQ ID NO: 32326 - protein, 7 aa, synthetic construct
RGDNFVV

SEQ ID NO: 32327 - protein, 7 aa, synthetic construct
RGDNGAE

SEQ ID NO: 32328 - protein, 7 aa, synthetic construct
RGDAVER

SEQ ID NO: 32329 - protein, 7 aa, synthetic construct
RGDNKDQ

SEQ ID NO: 32330 - protein, 7 aa, synthetic construct
RGDNKHE

SEQ ID NO: 32331 - protein, 7 aa, synthetic construct
RGDNKHG

SEQ ID NO: 32332 - protein, 7 aa, synthetic construct
RGDNNQE

SEQ ID NO: 32333 - protein, 7 aa, synthetic construct
RGDNNSS

SEQ ID NO: 32334 - protein, 7 aa, synthetic construct
RGDNTIF

SEQ ID NO: 32335 - protein, 7 aa, synthetic construct
RGDDAAS

SEQ ID NO: 32336 - protein, 7 aa, synthetic construct
RGDQDFS

SEQ ID NO: 32337 - protein, 7 aa, synthetic construct
RGDQDFT

SEQ ID NO: 32338 - protein, 7 aa, synthetic construct
RGDQFAE

SEQ ID NO: 32339 - protein, 7 aa, synthetic construct
RGDQFGS

SEQ ID NO: 32340 - protein, 7 aa, synthetic construct
RGDQFNN

SEQ ID NO: 32341 - protein, 7 aa, synthetic construct
RGDDAIA

SEQ ID NO: 32342 - protein, 7 aa, synthetic construct
RGDQGHE

SEQ ID NO: 32343 - protein, 7 aa, synthetic construct
RGDQIQL

SEQ ID NO: 32344 - protein, 7 aa, synthetic construct
RGDQNSE

SEQ ID NO: 32345 - protein, 7 aa, synthetic construct
RGDQQDN

SEQ ID NO: 32346 - protein, 7 aa, synthetic construct
RGDQQQI

SEQ ID NO: 32347 - protein, 7 aa, synthetic construct
RGDQSVA

SEQ ID NO: 32348 - protein, 7 aa, synthetic construct
RGDQTFH

SEQ ID NO: 32349 - protein, 7 aa, synthetic construct
RGDQVEN

SEQ ID NO: 32350 - protein, 7 aa, synthetic construct
RGDQVEQ

SEQ ID NO: 32351 - protein, 7 aa, synthetic construct
RGDQVFD

SEQ ID NO: 32352 - protein, 7 aa, synthetic construct
RGDQVIF

SEQ ID NO: 32353 - protein, 7 aa, synthetic construct
RGDQVSQ

SEQ ID NO: 32354 - protein, 7 aa, synthetic construct
RGDRAQD

SEQ ID NO: 32355 - protein, 7 aa, synthetic construct
RGDDDLR

SEQ ID NO: 32356 - protein, 7 aa, synthetic construct
RGDRGAD

SEQ ID NO: 32357 - protein, 7 aa, synthetic construct
RGDRGHH

SEQ ID NO: 32358 - protein, 7 aa, synthetic construct
RGDDDVK

SEQ ID NO: 32359 - protein, 7 aa, synthetic construct
RGDDEAT

SEQ ID NO: 32360 - protein, 7 aa, synthetic construct
RGDRLHG

SEQ ID NO: 32361 - protein, 7 aa, synthetic construct
RGDRNIN

SEQ ID NO: 32362 - protein, 7 aa, synthetic construct
RGDDEKV

SEQ ID NO: 32363 - protein, 7 aa, synthetic construct
RGDRRGR

SEQ ID NO: 32364 - protein, 7 aa, synthetic construct
RGDDEQG

SEQ ID NO: 32365 - protein, 7 aa, synthetic construct
RGDDEQL

SEQ ID NO: 32366 - protein, 7 aa, synthetic construct
RGDRSIN

SEQ ID NO: 32367 - protein, 7 aa, synthetic construct
RGDSAGE

SEQ ID NO: 32368 - protein, 7 aa, synthetic construct
RGDSDGG

SEQ ID NO: 32369 - protein, 7 aa, synthetic construct
RGDSDKR

SEQ ID NO: 32370 - protein, 7 aa, synthetic construct
RGDSDVG

SEQ ID NO: 32371 - protein, 7 aa, synthetic construct
RGDSFEL

SEQ ID NO: 32372 - protein, 7 aa, synthetic construct
RGDSFIH

SEQ ID NO: 32373 - protein, 7 aa, synthetic construct
RGDSGAE

SEQ ID NO: 32374 - protein, 7 aa, synthetic construct
RGDDFIQ

SEQ ID NO: 32375 - protein, 7 aa, synthetic construct
RGDSGVH

SEQ ID NO: 32376 - protein, 7 aa, synthetic construct
RGDSLLK

SEQ ID NO: 32377 - protein, 7 aa, synthetic construct
RGDDFTG

SEQ ID NO: 32378 - protein, 7 aa, synthetic construct
RGDSNHE

SEQ ID NO: 32379 - protein, 7 aa, synthetic construct
RGDSNQG

SEQ ID NO: 32380 - protein, 7 aa, synthetic construct
RGDSRIG

SEQ ID NO: 32381 - protein, 7 aa, synthetic construct
RGDSRVG

SEQ ID NO: 32382 - protein, 7 aa, synthetic construct
RGDSSDQ

SEQ ID NO: 32383 - protein, 7 aa, synthetic construct
RGDDGHD

SEQ ID NO: 32384 - protein, 7 aa, synthetic construct
RGDSTSD

SEQ ID NO: 32385 - protein, 7 aa, synthetic construct
RGDSVLS

SEQ ID NO: 32386 - protein, 7 aa, synthetic construct
RGDTADG

SEQ ID NO: 32387 - protein, 7 aa, synthetic construct
RGDTDHI

SEQ ID NO: 32388 - protein, 7 aa, synthetic construct
RGDTDNG

SEQ ID NO: 32389 - protein, 7 aa, synthetic construct
RGDTEHR

SEQ ID NO: 32390 - protein, 7 aa, synthetic construct
RGDTEQR

SEQ ID NO: 32391 - protein, 7 aa, synthetic construct
RGDTERV

SEQ ID NO: 32392 - protein, 7 aa, synthetic construct
RGDTFSV

SEQ ID NO: 32393 - protein, 7 aa, synthetic construct
RGDTGDG

SEQ ID NO: 32394 - protein, 7 aa, synthetic construct
RGDDGVS

SEQ ID NO: 32395 - protein, 7 aa, synthetic construct
RGDTIER

SEQ ID NO: 32396 - protein, 7 aa, synthetic construct
RGDTIEV

SEQ ID NO: 32397 - protein, 7 aa, synthetic construct
RGDTIFI

SEQ ID NO: 32398 - protein, 7 aa, synthetic construct
RGDTIGN

SEQ ID NO: 32399 - protein, 7 aa, synthetic construct
RGDTIGV

SEQ ID NO: 32400 - protein, 7 aa, synthetic construct
RGDTKDF

SEQ ID NO: 32401 - protein, 7 aa, synthetic construct
RGDTLAT

SEQ ID NO: 32402 - protein, 7 aa, synthetic construct
RGDTLEN

SEQ ID NO: 32403 - protein, 7 aa, synthetic construct
RGDDHIG

SEQ ID NO: 32404 - protein, 7 aa, synthetic construct
RGDTNLV

SEQ ID NO: 32405 - protein, 7 aa, synthetic construct
RGDTNQI

SEQ ID NO: 32406 - protein, 7 aa, synthetic construct
RGDTRES

SEQ ID NO: 32407 - protein, 7 aa, synthetic construct
RGDTSGF

SEQ ID NO: 32408 - protein, 7 aa, synthetic construct
RGDDHRG

SEQ ID NO: 32409 - protein, 7 aa, synthetic construct
RGDTTIL

SEQ ID NO: 32410 - protein, 7 aa, synthetic construct
RGDTTKD

SEQ ID NO: 32411 - protein, 7 aa, synthetic construct
RGDTTLA

SEQ ID NO: 32412 - protein, 7 aa, synthetic construct
RGDTTNE

SEQ ID NO: 32413 - protein, 7 aa, synthetic construct
RGDTVIA

SEQ ID NO: 32414 - protein, 7 aa, synthetic construct
RGDTVTK

SEQ ID NO: 32415 - protein, 7 aa, synthetic construct
RGDVAVF

SEQ ID NO: 32416 - protein, 7 aa, synthetic construct
RGDVDIG

SEQ ID NO: 32417 - protein, 7 aa, synthetic construct
RGDVDLN

SEQ ID NO: 32418 - protein, 7 aa, synthetic construct
RGDVESI

SEQ ID NO: 32419 - protein, 7 aa, synthetic construct
RGDVGHG

SEQ ID NO: 32420 - protein, 7 aa, synthetic construct
RGDVHHS

SEQ ID NO: 32421 - protein, 7 aa, synthetic construct
RGDDILI

SEQ ID NO: 32422 - protein, 7 aa, synthetic construct
RGDVIEI

SEQ ID NO: 32423 - protein, 7 aa, synthetic construct
RGDVIGD

SEQ ID NO: 32424 - protein, 7 aa, synthetic construct
RGDVITK

SEQ ID NO: 32425 - protein, 7 aa, synthetic construct
RGDVLQS

SEQ ID NO: 32426 - protein, 7 aa, synthetic construct
RGDVNVF

SEQ ID NO: 32427 - protein, 7 aa, synthetic construct
RGDVQDI

SEQ ID NO: 32428 - protein, 7 aa, synthetic construct
RGDVQIN

SEQ ID NO: 32429 - protein, 7 aa, synthetic construct
RGDVQQA

SEQ ID NO: 32430 - protein, 7 aa, synthetic construct
RGDDKFF

SEQ ID NO: 32431 - protein, 7 aa, synthetic construct
RGDVVNG

SEQ ID NO: 32432 - protein, 7 aa, synthetic construct
RGDDKKS

SEQ ID NO: 32433 - protein, 7 aa, synthetic construct
RGDDLGF

SEQ ID NO: 32434 - protein, 7 aa, synthetic construct
RGDDLQQ

SEQ ID NO: 32435 - protein, 7 aa, synthetic construct
RGDDLSD

SEQ ID NO: 32436 - protein, 7 aa, synthetic construct
RGDDQEG

SEQ ID NO: 32437 - protein, 7 aa, synthetic construct
RGDDQKI

SEQ ID NO: 32438 - protein, 7 aa, synthetic construct
RGDDRES

SEQ ID NO: 32439 - protein, 7 aa, synthetic construct
RGDDRGL

SEQ ID NO: 32440 - protein, 7 aa, synthetic construct
RGDDRNA

SEQ ID NO: 32441 - protein, 7 aa, synthetic construct
RGDDSLE

SEQ ID NO: 32442 - protein, 7 aa, synthetic construct
RGDDSVT

SEQ ID NO: 32443 - protein, 7 aa, synthetic construct
RGDDVIH

SEQ ID NO: 32444 - protein, 7 aa, synthetic construct
RGDDVKE

SEQ ID NO: 32445 - protein, 7 aa, synthetic construct
RGDDVNQ

SEQ ID NO: 32446 - protein, 7 aa, synthetic construct
RGDDVQK

SEQ ID NO: 32447 - protein, 7 aa, synthetic construct
RGDEAAN

SEQ ID NO: 32448 - protein, 7 aa, synthetic construct
RGDEAEK

SEQ ID NO: 32449 - protein, 7 aa, synthetic construct
RGDEALH

SEQ ID NO: 32450 - protein, 7 aa, synthetic construct
RGDEAVA

SEQ ID NO: 32451 - protein, 7 aa, synthetic construct
RGDEEAI

SEQ ID NO: 32452 - protein, 7 aa, synthetic construct
RGDEEGK

SEQ ID NO: 32453 - protein, 7 aa, synthetic construct
RGDEGGD

SEQ ID NO: 32454 - protein, 7 aa, synthetic construct
RGDEGNV

SEQ ID NO: 32455 - protein, 7 aa, synthetic construct
RGDEHFL

SEQ ID NO: 32456 - protein, 7 aa, synthetic construct
RGDEHHF

SEQ ID NO: 32457 - protein, 7 aa, synthetic construct
RGDEHQD

SEQ ID NO: 32458 - protein, 7 aa, synthetic construct
RGDEHTT

SEQ ID NO: 32459 - protein, 7 aa, synthetic construct
RGDEIIV

SEQ ID NO: 32460 - protein, 7 aa, synthetic construct
RGDEIQD

SEQ ID NO: 32461 - protein, 7 aa, synthetic construct
RGDEIQQ

SEQ ID NO: 32462 - protein, 7 aa, synthetic construct
RGDEITQ

SEQ ID NO: 32463 - protein, 7 aa, synthetic construct
RGDEIVH

SEQ ID NO: 32464 - protein, 7 aa, synthetic construct
RGDEKFV

SEQ ID NO: 32465 - protein, 7 aa, synthetic construct
RGDELKQ

SEQ ID NO: 32466 - protein, 7 aa, synthetic construct
RGDELQQ

SEQ ID NO: 32467 - protein, 7 aa, synthetic construct
RGDELRT

SEQ ID NO: 32468 - protein, 7 aa, synthetic construct
RGDELSN

SEQ ID NO: 32469 - protein, 7 aa, synthetic construct
RGDAFVF

SEQ ID NO: 32470 - protein, 7 aa, synthetic construct
RGDENLN

SEQ ID NO: 32471 - protein, 7 aa, synthetic construct
RGDENVR

SEQ ID NO: 32472 - protein, 7 aa, synthetic construct
RGDEREF

SEQ ID NO: 32473 - protein, 7 aa, synthetic construct
RGDESKI

SEQ ID NO: 32474 - protein, 7 aa, synthetic construct
RGDESTH

SEQ ID NO: 32475 - protein, 7 aa, synthetic construct
RGDESVF

SEQ ID NO: 32476 - protein, 7 aa, synthetic construct
RGDETFE

SEQ ID NO: 32477 - protein, 7 aa, synthetic construct
RGDETGK

SEQ ID NO: 32478 - protein, 7 aa, synthetic construct
RGDETHH

SEQ ID NO: 32479 - protein, 7 aa, synthetic construct
RGDETKF

SEQ ID NO: 32480 - protein, 7 aa, synthetic construct
RGDFAIN

SEQ ID NO: 32481 - protein, 7 aa, synthetic construct
RGDFANA

SEQ ID NO: 32482 - protein, 7 aa, synthetic construct
RGDFDFD

SEQ ID NO: 32483 - protein, 7 aa, synthetic construct
RGDFGDH

SEQ ID NO: 32484 - protein, 7 aa, synthetic construct
RGDAHDR

SEQ ID NO: 32485 - protein, 7 aa, synthetic construct
RGDFIFE

SEQ ID NO: 32486 - protein, 7 aa, synthetic construct
RGDFLIQ

SEQ ID NO: 32487 - protein, 7 aa, synthetic construct
RGDFNLS

SEQ ID NO: 32488 - protein, 7 aa, synthetic construct
RGDFNSN

SEQ ID NO: 32489 - protein, 7 aa, synthetic construct
RGDFNVL

SEQ ID NO: 32490 - protein, 7 aa, synthetic construct
RGDFQVS

SEQ ID NO: 32491 - protein, 7 aa, synthetic construct
RGDFSAF

SEQ ID NO: 32492 - protein, 7 aa, synthetic construct
RGDFTDV

SEQ ID NO: 32493 - protein, 7 aa, synthetic construct
RGDFTED

SEQ ID NO: 32494 - protein, 7 aa, synthetic construct
RGDFTLS

SEQ ID NO: 32495 - protein, 7 aa, synthetic construct
RGDFVEI

SEQ ID NO: 32496 - protein, 7 aa, synthetic construct
RGDFVVD

SEQ ID NO: 32497 - protein, 7 aa, synthetic construct
RGDGAFG

SEQ ID NO: 32498 - protein, 7 aa, synthetic construct
RGDGAFS

SEQ ID NO: 32499 - protein, 7 aa, synthetic construct
RGDAAAT

SEQ ID NO: 32500 - protein, 7 aa, synthetic construct
RGDGEFK

SEQ ID NO: 32501 - protein, 7 aa, synthetic construct
RGDGFET

SEQ ID NO: 32502 - protein, 7 aa, synthetic construct
RGDGFIN

SEQ ID NO: 32503 - protein, 7 aa, synthetic construct
RGDGFQH

SEQ ID NO: 32504 - protein, 7 aa, synthetic construct
RGDGHEA

SEQ ID NO: 32505 - protein, 7 aa, synthetic construct
RGDGHEE

SEQ ID NO: 32506 - protein, 7 aa, synthetic construct
RGDGHNH

SEQ ID NO: 32507 - protein, 7 aa, synthetic construct
RGDGILV

SEQ ID NO: 32508 - protein, 7 aa, synthetic construct
RGDGKSG

SEQ ID NO: 32509 - protein, 7 aa, synthetic construct
RGDGLEI

SEQ ID NO: 32510 - protein, 7 aa, synthetic construct
RGDGLTK

SEQ ID NO: 32511 - protein, 7 aa, synthetic construct
RGDGQIQ

SEQ ID NO: 32512 - protein, 7 aa, synthetic construct
RGDGQSH

SEQ ID NO: 32513 - protein, 7 aa, synthetic construct
RGDGQTD

SEQ ID NO: 32514 - protein, 7 aa, synthetic construct
RGDGRLT

SEQ ID NO: 32515 - protein, 7 aa, synthetic construct
RGDGSND

SEQ ID NO: 32516 - protein, 7 aa, synthetic construct
RGDGSTS

SEQ ID NO: 32517 - protein, 7 aa, synthetic construct
RGDGTAI

SEQ ID NO: 32518 - protein, 7 aa, synthetic construct
RGDGTEV

SEQ ID NO: 32519 - protein, 7 aa, synthetic construct
RGDGTLK

SEQ ID NO: 32520 - protein, 7 aa, synthetic construct
RGDGTNN

SEQ ID NO: 32521 - protein, 7 aa, synthetic construct
RGDGTVN

SEQ ID NO: 32522 - protein, 7 aa, synthetic construct
RGDGVIT

SEQ ID NO: 32523 - protein, 7 aa, synthetic construct
RGDHASE

SEQ ID NO: 32524 - protein, 7 aa, synthetic construct
RGDHAVH

SEQ ID NO: 32525 - protein, 7 aa, synthetic construct
RGDHEDF

SEQ ID NO: 32526 - protein, 7 aa, synthetic construct
RGDHFAG

SEQ ID NO: 32527 - protein, 7 aa, synthetic construct
RGDHGTE

SEQ ID NO: 32528 - protein, 7 aa, synthetic construct
RGDHIGA

SEQ ID NO: 32529 - protein, 7 aa, synthetic construct
RGDHKEH

SEQ ID NO: 32530 - protein, 7 aa, synthetic construct
RGDALFK

SEQ ID NO: 32531 - protein, 7 aa, synthetic construct
RGDHLDV

SEQ ID NO: 32532 - protein, 7 aa, synthetic construct
RGDHQGA

SEQ ID NO: 32533 - protein, 7 aa, synthetic construct
RGDHSDT

SEQ ID NO: 32534 - protein, 7 aa, synthetic construct
RGDHVIV

SEQ ID NO: 32535 - protein, 7 aa, synthetic construct
RGDIAIT

SEQ ID NO: 32536 - protein, 7 aa, synthetic construct
RGDIDAL

SEQ ID NO: 32537 - protein, 7 aa, synthetic construct
RGDIDFN

SEQ ID NO: 32538 - protein, 7 aa, synthetic construct
RGDIDLN

SEQ ID NO: 32539 - protein, 7 aa, synthetic construct
RGDIEIL

SEQ ID NO: 32540 - protein, 7 aa, synthetic construct
RGDIFTG

SEQ ID NO: 32541 - protein, 7 aa, synthetic construct
RGDIGFE

SEQ ID NO: 32542 - protein, 7 aa, synthetic construct
RGDIGLS

SEQ ID NO: 32543 - protein, 7 aa, synthetic construct
RGDANNH

SEQ ID NO: 32544 - protein, 7 aa, synthetic construct
RGDIIHA

SEQ ID NO: 32545 - protein, 7 aa, synthetic construct
RGDILAF

SEQ ID NO: 32546 - protein, 7 aa, synthetic construct
RGDINFA

SEQ ID NO: 32547 - protein, 7 aa, synthetic construct
RGDINNG

SEQ ID NO: 32548 - protein, 7 aa, synthetic construct
RGDINRA

SEQ ID NO: 32549 - protein, 7 aa, synthetic construct
RGDIQIF

SEQ ID NO: 32550 - protein, 7 aa, synthetic construct
RGDIRSE

SEQ ID NO: 32551 - protein, 7 aa, synthetic construct
RGDISAT

SEQ ID NO: 32552 - protein, 7 aa, synthetic construct
RGDISDH

SEQ ID NO: 32553 - protein, 7 aa, synthetic construct
RGDIVNA

SEQ ID NO: 32554 - protein, 7 aa, synthetic construct
RGDKAHF

SEQ ID NO: 32555 - protein, 7 aa, synthetic construct
RGDKDLI

SEQ ID NO: 32556 - protein, 7 aa, synthetic construct
RGDKDQH

SEQ ID NO: 32557 - protein, 7 aa, synthetic construct
RGDKEDR

SEQ ID NO: 32558 - protein, 7 aa, synthetic construct
RGDKFAN

SEQ ID NO: 32559 - protein, 7 aa, synthetic construct
RGDKHQD

SEQ ID NO: 32560 - protein, 7 aa, synthetic construct
RGDARDN

SEQ ID NO: 32561 - protein, 7 aa, synthetic construct
RGDKITN

SEQ ID NO: 32562 - protein, 7 aa, synthetic construct
RGDKLND

SEQ ID NO: 32563 - protein, 7 aa, synthetic construct
RGDKQGE

SEQ ID NO: 32564 - protein, 7 aa, synthetic construct
RGDKQHQ

SEQ ID NO: 32565 - protein, 7 aa, synthetic construct
RGDKQLF

SEQ ID NO: 32566 - protein, 7 aa, synthetic construct
RGDKSAF

SEQ ID NO: 32567 - protein, 7 aa, synthetic construct
RGDKVEK

SEQ ID NO: 32568 - protein, 7 aa, synthetic construct
RGDLAVS

SEQ ID NO: 32569 - protein, 7 aa, synthetic construct
RGDLDAH

SEQ ID NO: 32570 - protein, 7 aa, synthetic construct
RGDLDDS

SEQ ID NO: 32571 - protein, 7 aa, synthetic construct
RGDLDLQ

SEQ ID NO: 32572 - protein, 7 aa, synthetic construct
RGDLDVF

SEQ ID NO: 32573 - protein, 7 aa, synthetic construct
RGDLHDE

SEQ ID NO: 32574 - protein, 7 aa, synthetic construct
RGDLHEL

SEQ ID NO: 32575 - protein, 7 aa, synthetic construct
RGDLIQD

SEQ ID NO: 32576 - protein, 7 aa, synthetic construct
RGDLLLN

SEQ ID NO: 32577 - protein, 7 aa, synthetic construct
RGDASTE

SEQ ID NO: 32578 - protein, 7 aa, synthetic construct
RGDATFK

SEQ ID NO: 32579 - protein, 7 aa, synthetic construct
RGDLTDD

SEQ ID NO: 32580 - protein, 7 aa, synthetic construct
RGDLTEL

SEQ ID NO: 32581 - protein, 7 aa, synthetic construct
RGDLTSE

SEQ ID NO: 32582 - protein, 7 aa, synthetic construct
RGDLVLR

SEQ ID NO: 32583 - protein, 7 aa, synthetic construct
RGDLVVE

SEQ ID NO: 32584 - protein, 7 aa, synthetic construct
RGDNDAG

SEQ ID NO: 32585 - protein, 7 aa, synthetic construct
RGDNDFH

SEQ ID NO: 32586 - protein, 7 aa, synthetic construct
RGDNDHF

SEQ ID NO: 32587 - protein, 7 aa, synthetic construct
RGDATTS

SEQ ID NO: 32588 - protein, 7 aa, synthetic construct
RGDNHSH

SEQ ID NO: 32589 - protein, 7 aa, synthetic construct
RGDNINI

SEQ ID NO: 32590 - protein, 7 aa, synthetic construct
RGDNIQG

SEQ ID NO: 32591 - protein, 7 aa, synthetic construct
RGDNITE

SEQ ID NO: 32592 - protein, 7 aa, synthetic construct
RGDAVFK

SEQ ID NO: 32593 - protein, 7 aa, synthetic construct
RGDNLFS

SEQ ID NO: 32594 - protein, 7 aa, synthetic construct
RGDNLIS

SEQ ID NO: 32595 - protein, 7 aa, synthetic construct
RGDNNFF

SEQ ID NO: 32596 - protein, 7 aa, synthetic construct
RGDAVII

SEQ ID NO: 32597 - protein, 7 aa, synthetic construct
RGDNNLE

SEQ ID NO: 32598 - protein, 7 aa, synthetic construct
RGDNNLQ

SEQ ID NO: 32599 - protein, 7 aa, synthetic construct
RGDAVLF

SEQ ID NO: 32600 - protein, 7 aa, synthetic construct
RGDNSIS

SEQ ID NO: 32601 - protein, 7 aa, synthetic construct
RGDNTIL

SEQ ID NO: 32602 - protein, 7 aa, synthetic construct
RGDAVTE

SEQ ID NO: 32603 - protein, 7 aa, synthetic construct
RGDNTSE

SEQ ID NO: 32604 - protein, 7 aa, synthetic construct
RGDAVTG

SEQ ID NO: 32605 - protein, 7 aa, synthetic construct
RGDNVAV

SEQ ID NO: 32606 - protein, 7 aa, synthetic construct
RGDNVEL

SEQ ID NO: 32607 - protein, 7 aa, synthetic construct
RGDAVVH

SEQ ID NO: 32608 - protein, 7 aa, synthetic construct
RGDDADA

SEQ ID NO: 32609 - protein, 7 aa, synthetic construct
RGDQEAA

SEQ ID NO: 32610 - protein, 7 aa, synthetic construct
RGDDAGS

SEQ ID NO: 32611 - protein, 7 aa, synthetic construct
RGDQGST

SEQ ID NO: 32612 - protein, 7 aa, synthetic construct
RGDQHQD

SEQ ID NO: 32613 - protein, 7 aa, synthetic construct
RGDQIEL

SEQ ID NO: 32614 - protein, 7 aa, synthetic construct
RGDQIQG

SEQ ID NO: 32615 - protein, 7 aa, synthetic construct
RGDQIQT

SEQ ID NO: 32616 - protein, 7 aa, synthetic construct
RGDQKQG

SEQ ID NO: 32617 - protein, 7 aa, synthetic construct
RGDQQEG

SEQ ID NO: 32618 - protein, 7 aa, synthetic construct
RGDDDAR

SEQ ID NO: 32619 - protein, 7 aa, synthetic construct
RGDQVET

SEQ ID NO: 32620 - protein, 7 aa, synthetic construct
RGDRAQA

SEQ ID NO: 32621 - protein, 7 aa, synthetic construct
RGDREAE

SEQ ID NO: 32622 - protein, 7 aa, synthetic construct
RGDREND

SEQ ID NO: 32623 - protein, 7 aa, synthetic construct
RGDDEFI

SEQ ID NO: 32624 - protein, 7 aa, synthetic construct
RGDDEQK

SEQ ID NO: 32625 - protein, 7 aa, synthetic construct
RGDRSDE

SEQ ID NO: 32626 - protein, 7 aa, synthetic construct
RGDRVKD

SEQ ID NO: 32627 - protein, 7 aa, synthetic construct
RGDRVRS

SEQ ID NO: 32628 - protein, 7 aa, synthetic construct
RGDSDHG

SEQ ID NO: 32629 - protein, 7 aa, synthetic construct
RGDDFFK

SEQ ID NO: 32630 - protein, 7 aa, synthetic construct
RGDSFLV

SEQ ID NO: 32631 - protein, 7 aa, synthetic construct
RGDSGGE

SEQ ID NO: 32632 - protein, 7 aa, synthetic construct
RGDSHGD

SEQ ID NO: 32633 - protein, 7 aa, synthetic construct
RGDSIAK

SEQ ID NO: 32634 - protein, 7 aa, synthetic construct
RGDADTA

SEQ ID NO: 32635 - protein, 7 aa, synthetic construct
RGDSKLE

SEQ ID NO: 32636 - protein, 7 aa, synthetic construct
RGDSNEQ

SEQ ID NO: 32637 - protein, 7 aa, synthetic construct
RGDSNNH

SEQ ID NO: 32638 - protein, 7 aa, synthetic construct
RGDSSQE

SEQ ID NO: 32639 - protein, 7 aa, synthetic construct
RGDSTAL

SEQ ID NO: 32640 - protein, 7 aa, synthetic construct
RGDSTEA

SEQ ID NO: 32641 - protein, 7 aa, synthetic construct
RGDSTNL

SEQ ID NO: 32642 - protein, 7 aa, synthetic construct
RGDTAFG

SEQ ID NO: 32643 - protein, 7 aa, synthetic construct
RGDTATL

SEQ ID NO: 32644 - protein, 7 aa, synthetic construct
RGDTDKK

SEQ ID NO: 32645 - protein, 7 aa, synthetic construct
RGDTEEE

SEQ ID NO: 32646 - protein, 7 aa, synthetic construct
RGDTEHK

SEQ ID NO: 32647 - protein, 7 aa, synthetic construct
RGDTEIQ

SEQ ID NO: 32648 - protein, 7 aa, synthetic construct
RGDTEKK

SEQ ID NO: 32649 - protein, 7 aa, synthetic construct
RGDTESN

SEQ ID NO: 32650 - protein, 7 aa, synthetic construct
RGDDGSQ

SEQ ID NO: 32651 - protein, 7 aa, synthetic construct
RGDTGFD

SEQ ID NO: 32652 - protein, 7 aa, synthetic construct
RGDTIFF

SEQ ID NO: 32653 - protein, 7 aa, synthetic construct
RGDTIRF

SEQ ID NO: 32654 - protein, 7 aa, synthetic construct
RGDTLAN

SEQ ID NO: 32655 - protein, 7 aa, synthetic construct
RGDTLSG

SEQ ID NO: 32656 - protein, 7 aa, synthetic construct
RGDTQHD

SEQ ID NO: 32657 - protein, 7 aa, synthetic construct
RGDTQKE

SEQ ID NO: 32658 - protein, 7 aa, synthetic construct
RGDTSHH

SEQ ID NO: 32659 - protein, 7 aa, synthetic construct
RGDTSLF

SEQ ID NO: 32660 - protein, 7 aa, synthetic construct
RGDTSTF

SEQ ID NO: 32661 - protein, 7 aa, synthetic construct
RGDTTDS

SEQ ID NO: 32662 - protein, 7 aa, synthetic construct
RGDTTSQ

SEQ ID NO: 32663 - protein, 7 aa, synthetic construct
RGDTVFS

SEQ ID NO: 32664 - protein, 7 aa, synthetic construct
RGDVAFH

SEQ ID NO: 32665 - protein, 7 aa, synthetic construct
RGDVDFE

SEQ ID NO: 32666 - protein, 7 aa, synthetic construct
RGDVDVG

SEQ ID NO: 32667 - protein, 7 aa, synthetic construct
RGDVEQS

SEQ ID NO: 32668 - protein, 7 aa, synthetic construct
RGDVEVE

SEQ ID NO: 32669 - protein, 7 aa, synthetic construct
RGDAEED

SEQ ID NO: 32670 - protein, 7 aa, synthetic construct
RGDVGHD

SEQ ID NO: 32671 - protein, 7 aa, synthetic construct
RGDVIQS

SEQ ID NO: 32672 - protein, 7 aa, synthetic construct
RGDVISD

SEQ ID NO: 32673 - protein, 7 aa, synthetic construct
RGDVLAE

SEQ ID NO: 32674 - protein, 7 aa, synthetic construct
RGDVLVA

SEQ ID NO: 32675 - protein, 7 aa, synthetic construct
RGDVTQQ

SEQ ID NO: 32676 - protein, 7 aa, synthetic construct
RGDVVDK

SEQ ID NO: 32677 - protein, 7 aa, synthetic construct
RGDDKIR

SEQ ID NO: 32678 - protein, 7 aa, synthetic construct
RGDDKIV

SEQ ID NO: 32679 - protein, 7 aa, synthetic construct
RGDDLLE

SEQ ID NO: 32680 - protein, 7 aa, synthetic construct
RGDDNFQ

SEQ ID NO: 32681 - protein, 7 aa, synthetic construct
RGDDNSL

SEQ ID NO: 32682 - protein, 7 aa, synthetic construct
RGDDRAR

SEQ ID NO: 32683 - protein, 7 aa, synthetic construct
RGDDTQQ

SEQ ID NO: 32684 - protein, 7 aa, synthetic construct
RGDDVVT

SEQ ID NO: 32685 - protein, 7 aa, synthetic construct
RGDEDKL

SEQ ID NO: 32686 - protein, 7 aa, synthetic construct
RGDEESD

SEQ ID NO: 32687 - protein, 7 aa, synthetic construct
RGDEESL

SEQ ID NO: 32688 - protein, 7 aa, synthetic construct
RGDEFFT

SEQ ID NO: 32689 - protein, 7 aa, synthetic construct
RGDAFHE

SEQ ID NO: 32690 - protein, 7 aa, synthetic construct
RGDAAHE

SEQ ID NO: 32691 - protein, 7 aa, synthetic construct
RGDEHAD

SEQ ID NO: 32692 - protein, 7 aa, synthetic construct
RGDEKAR

SEQ ID NO: 32693 - protein, 7 aa, synthetic construct
RGDEKDF

SEQ ID NO: 32694 - protein, 7 aa, synthetic construct
RGDEKEG

SEQ ID NO: 32695 - protein, 7 aa, synthetic construct
RGDEKTK

SEQ ID NO: 32696 - protein, 7 aa, synthetic construct
RGDEKVV

SEQ ID NO: 32697 - protein, 7 aa, synthetic construct
RGDELGV

SEQ ID NO: 32698 - protein, 7 aa, synthetic construct
RGDELQR

SEQ ID NO: 32699 - protein, 7 aa, synthetic construct
RGDENRK

SEQ ID NO: 32700 - protein, 7 aa, synthetic construct
RGDENSS

SEQ ID NO: 32701 - protein, 7 aa, synthetic construct
RGDENTQ

SEQ ID NO: 32702 - protein, 7 aa, synthetic construct
RGDEQNE

SEQ ID NO: 32703 - protein, 7 aa, synthetic construct
RGDERIS

SEQ ID NO: 32704 - protein, 7 aa, synthetic construct
RGDESAR

SEQ ID NO: 32705 - protein, 7 aa, synthetic construct
RGDESHR

SEQ ID NO: 32706 - protein, 7 aa, synthetic construct
RGDETGL

SEQ ID NO: 32707 - protein, 7 aa, synthetic construct
RGDETRF

SEQ ID NO: 32708 - protein, 7 aa, synthetic construct
RGDEVEN

SEQ ID NO: 32709 - protein, 7 aa, synthetic construct
RGDEVFA

SEQ ID NO: 32710 - protein, 7 aa, synthetic construct
RGDEVQD

SEQ ID NO: 32711 - protein, 7 aa, synthetic construct
RGDFAAQ

SEQ ID NO: 32712 - protein, 7 aa, synthetic construct
RGDFAQS

SEQ ID NO: 32713 - protein, 7 aa, synthetic construct
RGDFDIV

SEQ ID NO: 32714 - protein, 7 aa, synthetic construct
RGDFDLL

SEQ ID NO: 32715 - protein, 7 aa, synthetic construct
RGDFDLN

SEQ ID NO: 32716 - protein, 7 aa, synthetic construct
RGDFDQG

SEQ ID NO: 32717 - protein, 7 aa, synthetic construct
RGDFDRD

SEQ ID NO: 32718 - protein, 7 aa, synthetic construct
RGDFEAA

SEQ ID NO: 32719 - protein, 7 aa, synthetic construct
RGDFEFL

SEQ ID NO: 32720 - protein, 7 aa, synthetic construct
RGDAHAE

SEQ ID NO: 32721 - protein, 7 aa, synthetic construct
RGDFHLA

SEQ ID NO: 32722 - protein, 7 aa, synthetic construct
RGDFIES

SEQ ID NO: 32723 - protein, 7 aa, synthetic construct
RGDFIRG

SEQ ID NO: 32724 - protein, 7 aa, synthetic construct
RGDFKEG

SEQ ID NO: 32725 - protein, 7 aa, synthetic construct
RGDAHHE

SEQ ID NO: 32726 - protein, 7 aa, synthetic construct
RGDFNFE

SEQ ID NO: 32727 - protein, 7 aa, synthetic construct
RGDFQAA

SEQ ID NO: 32728 - protein, 7 aa, synthetic construct
RGDFQHF

SEQ ID NO: 32729 - protein, 7 aa, synthetic construct
RGDFTVS

SEQ ID NO: 32730 - protein, 7 aa, synthetic construct
RGDFVRE

SEQ ID NO: 32731 - protein, 7 aa, synthetic construct
RGDGANS

SEQ ID NO: 32732 - protein, 7 aa, synthetic construct
RGDGDDH

SEQ ID NO: 32733 - protein, 7 aa, synthetic construct
RGDGDEI

SEQ ID NO: 32734 - protein, 7 aa, synthetic construct
RGDGDIH

SEQ ID NO: 32735 - protein, 7 aa, synthetic construct
RGDGEKE

SEQ ID NO: 32736 - protein, 7 aa, synthetic construct
RGDGENT

SEQ ID NO: 32737 - protein, 7 aa, synthetic construct
RGDGESD

SEQ ID NO: 32738 - protein, 7 aa, synthetic construct
RGDGEVR

SEQ ID NO: 32739 - protein, 7 aa, synthetic construct
RGDGFEV

SEQ ID NO: 32740 - protein, 7 aa, synthetic construct
RGDGHFA

SEQ ID NO: 32741 - protein, 7 aa, synthetic construct
RGDGIAH

SEQ ID NO: 32742 - protein, 7 aa, synthetic construct
RGDGIGN

SEQ ID NO: 32743 - protein, 7 aa, synthetic construct
RGDGIII

SEQ ID NO: 32744 - protein, 7 aa, synthetic construct
RGDAIRK

SEQ ID NO: 32745 - protein, 7 aa, synthetic construct
RGDGNAS

SEQ ID NO: 32746 - protein, 7 aa, synthetic construct
RGDGQLV

SEQ ID NO: 32747 - protein, 7 aa, synthetic construct
RGDGQVN

SEQ ID NO: 32748 - protein, 7 aa, synthetic construct
RGDGRVA

SEQ ID NO: 32749 - protein, 7 aa, synthetic construct
RGDGSVT

SEQ ID NO: 32750 - protein, 7 aa, synthetic construct
RGDGTVH

SEQ ID NO: 32751 - protein, 7 aa, synthetic construct
RGDAKIA

SEQ ID NO: 32752 - protein, 7 aa, synthetic construct
RGDGVER

SEQ ID NO: 32753 - protein, 7 aa, synthetic construct
RGDGVLF

SEQ ID NO: 32754 - protein, 7 aa, synthetic construct
RGDAKIT

SEQ ID NO: 32755 - protein, 7 aa, synthetic construct
RGDGVQN

SEQ ID NO: 32756 - protein, 7 aa, synthetic construct
RGDHFGD

SEQ ID NO: 32757 - protein, 7 aa, synthetic construct
RGDHFTQ

SEQ ID NO: 32758 - protein, 7 aa, synthetic construct
RGDHHQS

SEQ ID NO: 32759 - protein, 7 aa, synthetic construct
RGDHIGT

SEQ ID NO: 32760 - protein, 7 aa, synthetic construct
RGDHLVT

SEQ ID NO: 32761 - protein, 7 aa, synthetic construct
RGDHNTE

SEQ ID NO: 32762 - protein, 7 aa, synthetic construct
RGDHRAN

SEQ ID NO: 32763 - protein, 7 aa, synthetic construct
RGDHSAG

SEQ ID NO: 32764 - protein, 7 aa, synthetic construct
RGDHTGD

SEQ ID NO: 32765 - protein, 7 aa, synthetic construct
RGDHTIV

SEQ ID NO: 32766 - protein, 7 aa, synthetic construct
RGDHTNE

SEQ ID NO: 32767 - protein, 7 aa, synthetic construct
RGDHTTA

SEQ ID NO: 32768 - protein, 7 aa, synthetic construct
RGDIAAE

SEQ ID NO: 32769 - protein, 7 aa, synthetic construct
RGDIAEV

SEQ ID NO: 32770 - protein, 7 aa, synthetic construct
RGDANAQ

SEQ ID NO: 32771 - protein, 7 aa, synthetic construct
RGDIAQK

SEQ ID NO: 32772 - protein, 7 aa, synthetic construct
RGDIEDR

SEQ ID NO: 32773 - protein, 7 aa, synthetic construct
RGDIEES

SEQ ID NO: 32774 - protein, 7 aa, synthetic construct
RGDIEIQ

SEQ ID NO: 32775 - protein, 7 aa, synthetic construct
RGDIEIV

SEQ ID NO: 32776 - protein, 7 aa, synthetic construct
RGDIEQF

SEQ ID NO: 32777 - protein, 7 aa, synthetic construct
RGDIFGK

SEQ ID NO: 32778 - protein, 7 aa, synthetic construct
RGDIFLL

SEQ ID NO: 32779 - protein, 7 aa, synthetic construct
RGDIGAE

SEQ ID NO: 32780 - protein, 7 aa, synthetic construct
RGDIGIS

SEQ ID NO: 32781 - protein, 7 aa, synthetic construct
RGDIGLL

SEQ ID NO: 32782 - protein, 7 aa, synthetic construct
RGDIHTE

SEQ ID NO: 32783 - protein, 7 aa, synthetic construct
RGDIIAH

SEQ ID NO: 32784 - protein, 7 aa, synthetic construct
RGDIILV

SEQ ID NO: 32785 - protein, 7 aa, synthetic construct
RGDIIQE

SEQ ID NO: 32786 - protein, 7 aa, synthetic construct
RGDIIRG

SEQ ID NO: 32787 - protein, 7 aa, synthetic construct
RGDANSE

SEQ ID NO: 32788 - protein, 7 aa, synthetic construct
RGDILST

SEQ ID NO: 32789 - protein, 7 aa, synthetic construct
RGDINLH

SEQ ID NO: 32790 - protein, 7 aa, synthetic construct
RGDINRD

SEQ ID NO: 32791 - protein, 7 aa, synthetic construct
RGDIQNE

SEQ ID NO: 32792 - protein, 7 aa, synthetic construct
RGDIQTH

SEQ ID NO: 32793 - protein, 7 aa, synthetic construct
RGDIRDQ

SEQ ID NO: 32794 - protein, 7 aa, synthetic construct
RGDIRDT

SEQ ID NO: 32795 - protein, 7 aa, synthetic construct
RGDIREL

SEQ ID NO: 32796 - protein, 7 aa, synthetic construct
RGDIRKD

SEQ ID NO: 32797 - protein, 7 aa, synthetic construct
RGDIRRF

SEQ ID NO: 32798 - protein, 7 aa, synthetic construct
RGDAQFN

SEQ ID NO: 32799 - protein, 7 aa, synthetic construct
RGDISLA

SEQ ID NO: 32800 - protein, 7 aa, synthetic construct
RGDISLD

SEQ ID NO: 32801 - protein, 7 aa, synthetic construct
RGDISRG

SEQ ID NO: 32802 - protein, 7 aa, synthetic construct
RGDAQHH

SEQ ID NO: 32803 - protein, 7 aa, synthetic construct
RGDIVQL

SEQ ID NO: 32804 - protein, 7 aa, synthetic construct
RGDKDVK

SEQ ID NO: 32805 - protein, 7 aa, synthetic construct
RGDAQRA

SEQ ID NO: 32806 - protein, 7 aa, synthetic construct
RGDKFER

SEQ ID NO: 32807 - protein, 7 aa, synthetic construct
RGDKFFG

SEQ ID NO: 32808 - protein, 7 aa, synthetic construct
RGDKGFD

SEQ ID NO: 32809 - protein, 7 aa, synthetic construct
RGDKIDQ

SEQ ID NO: 32810 - protein, 7 aa, synthetic construct
RGDKINL

SEQ ID NO: 32811 - protein, 7 aa, synthetic construct
RGDKISS

SEQ ID NO: 32812 - protein, 7 aa, synthetic construct
RGDKKFG

SEQ ID NO: 32813 - protein, 7 aa, synthetic construct
RGDKQVN

SEQ ID NO: 32814 - protein, 7 aa, synthetic construct
RGDARRS

SEQ ID NO: 32815 - protein, 7 aa, synthetic construct
RGDKVFD

SEQ ID NO: 32816 - protein, 7 aa, synthetic construct
RGDLAVI

SEQ ID NO: 32817 - protein, 7 aa, synthetic construct
RGDADFE

SEQ ID NO: 32818 - protein, 7 aa, synthetic construct
RGDLDII

SEQ ID NO: 32819 - protein, 7 aa, synthetic construct
RGDLEAD

SEQ ID NO: 32820 - protein, 7 aa, synthetic construct
RGDLEAR

SEQ ID NO: 32821 - protein, 7 aa, synthetic construct
RGDLEDK

SEQ ID NO: 32822 - protein, 7 aa, synthetic construct
RGDASHA

SEQ ID NO: 32823 - protein, 7 aa, synthetic construct
RGDLGSI

SEQ ID NO: 32824 - protein, 7 aa, synthetic construct
RGDLHDA

SEQ ID NO: 32825 - protein, 7 aa, synthetic construct
RGDLHTF

SEQ ID NO: 32826 - protein, 7 aa, synthetic construct
RGDLNFE

SEQ ID NO: 32827 - protein, 7 aa, synthetic construct
RGDLQET

SEQ ID NO: 32828 - protein, 7 aa, synthetic construct
RGDLSDT

SEQ ID NO: 32829 - protein, 7 aa, synthetic construct
RGDLTDA

SEQ ID NO: 32830 - protein, 7 aa, synthetic construct
RGDATIK

SEQ ID NO: 32831 - protein, 7 aa, synthetic construct
RGDNEFA

SEQ ID NO: 32832 - protein, 7 aa, synthetic construct
RGDNEIL

SEQ ID NO: 32833 - protein, 7 aa, synthetic construct
RGDATSA

SEQ ID NO: 32834 - protein, 7 aa, synthetic construct
RGDNFHG

SEQ ID NO: 32835 - protein, 7 aa, synthetic construct
RGDNGQD

SEQ ID NO: 32836 - protein, 7 aa, synthetic construct
RGDNHER

SEQ ID NO: 32837 - protein, 7 aa, synthetic construct
RGDADIA

SEQ ID NO: 32838 - protein, 7 aa, synthetic construct
RGDNIII

SEQ ID NO: 32839 - protein, 7 aa, synthetic construct
RGDAVGI

SEQ ID NO: 32840 - protein, 7 aa, synthetic construct
RGDNLEK

SEQ ID NO: 32841 - protein, 7 aa, synthetic construct
RGDNLFT

SEQ ID NO: 32842 - protein, 7 aa, synthetic construct
RGDAVHK

SEQ ID NO: 32843 - protein, 7 aa, synthetic construct
RGDNLQS

SEQ ID NO: 32844 - protein, 7 aa, synthetic construct
RGDADIL

SEQ ID NO: 32845 - protein, 7 aa, synthetic construct
RGDNNQT

SEQ ID NO: 32846 - protein, 7 aa, synthetic construct
RGDADIR

SEQ ID NO: 32847 - protein, 7 aa, synthetic construct
RGDNQSV

SEQ ID NO: 32848 - protein, 7 aa, synthetic construct
RGDAVQH

SEQ ID NO: 32849 - protein, 7 aa, synthetic construct
RGDNSHH

SEQ ID NO: 32850 - protein, 7 aa, synthetic construct
RGDNSLS

SEQ ID NO: 32851 - protein, 7 aa, synthetic construct
RGDNTGE

SEQ ID NO: 32852 - protein, 7 aa, synthetic construct
RGDNTVK

SEQ ID NO: 32853 - protein, 7 aa, synthetic construct
RGDNVVT

SEQ ID NO: 32854 - protein, 7 aa, synthetic construct
RGDQAEL

SEQ ID NO: 32855 - protein, 7 aa, synthetic construct
RGDQANL

SEQ ID NO: 32856 - protein, 7 aa, synthetic construct
RGDQDEH

SEQ ID NO: 32857 - protein, 7 aa, synthetic construct
RGDQDGG

SEQ ID NO: 32858 - protein, 7 aa, synthetic construct
RGDQDHF

SEQ ID NO: 32859 - protein, 7 aa, synthetic construct
RGDQDHT

SEQ ID NO: 32860 - protein, 7 aa, synthetic construct
RGDQDTL

SEQ ID NO: 32861 - protein, 7 aa, synthetic construct
RGDQEAT

SEQ ID NO: 32862 - protein, 7 aa, synthetic construct
RGDQFDR

SEQ ID NO: 32863 - protein, 7 aa, synthetic construct
RGDDAKG

SEQ ID NO: 32864 - protein, 7 aa, synthetic construct
RGDQHGD

SEQ ID NO: 32865 - protein, 7 aa, synthetic construct
RGDQIND

SEQ ID NO: 32866 - protein, 7 aa, synthetic construct
RGDQKHL

SEQ ID NO: 32867 - protein, 7 aa, synthetic construct
RGDDARR

SEQ ID NO: 32868 - protein, 7 aa, synthetic construct
RGDDATH

SEQ ID NO: 32869 - protein, 7 aa, synthetic construct
RGDDATN

SEQ ID NO: 32870 - protein, 7 aa, synthetic construct
RGDQNHG

SEQ ID NO: 32871 - protein, 7 aa, synthetic construct
RGDQNKG

SEQ ID NO: 32872 - protein, 7 aa, synthetic construct
RGDQQVE

SEQ ID NO: 32873 - protein, 7 aa, synthetic construct
RGDQQVQ

SEQ ID NO: 32874 - protein, 7 aa, synthetic construct
RGDQRLG

SEQ ID NO: 32875 - protein, 7 aa, synthetic construct
RGDQSVG

SEQ ID NO: 32876 - protein, 7 aa, synthetic construct
RGDQTSI

SEQ ID NO: 32877 - protein, 7 aa, synthetic construct
RGDQVLG

SEQ ID NO: 32878 - protein, 7 aa, synthetic construct
RGDDDLL

SEQ ID NO: 32879 - protein, 7 aa, synthetic construct
RGDRDVT

SEQ ID NO: 32880 - protein, 7 aa, synthetic construct
RGDRFDN

SEQ ID NO: 32881 - protein, 7 aa, synthetic construct
RGDRFSG

SEQ ID NO: 32882 - protein, 7 aa, synthetic construct
RGDDEFV

SEQ ID NO: 32883 - protein, 7 aa, synthetic construct
RGDRNAE

SEQ ID NO: 32884 - protein, 7 aa, synthetic construct
RGDDFDF

SEQ ID NO: 32885 - protein, 7 aa, synthetic construct
RGDSDDK

SEQ ID NO: 32886 - protein, 7 aa, synthetic construct
RGDADSE

SEQ ID NO: 32887 - protein, 7 aa, synthetic construct
RGDSDRA

SEQ ID NO: 32888 - protein, 7 aa, synthetic construct
RGDSESA

SEQ ID NO: 32889 - protein, 7 aa, synthetic construct
RGDSFGH

SEQ ID NO: 32890 - protein, 7 aa, synthetic construct
RGDSGRE

SEQ ID NO: 32891 - protein, 7 aa, synthetic construct
RGDSISH

SEQ ID NO: 32892 - protein, 7 aa, synthetic construct
RGDSLIS

SEQ ID NO: 32893 - protein, 7 aa, synthetic construct
RGDSLLD

SEQ ID NO: 32894 - protein, 7 aa, synthetic construct
RGDSNHD

SEQ ID NO: 32895 - protein, 7 aa, synthetic construct
RGDSNIL

SEQ ID NO: 32896 - protein, 7 aa, synthetic construct
RGDSSDL

SEQ ID NO: 32897 - protein, 7 aa, synthetic construct
RGDDGHA

SEQ ID NO: 32898 - protein, 7 aa, synthetic construct
RGDSVDN

SEQ ID NO: 32899 - protein, 7 aa, synthetic construct
RGDSVDV

SEQ ID NO: 32900 - protein, 7 aa, synthetic construct
RGDSVIG

SEQ ID NO: 32901 - protein, 7 aa, synthetic construct
RGDTADN

SEQ ID NO: 32902 - protein, 7 aa, synthetic construct
RGDTAFQ

SEQ ID NO: 32903 - protein, 7 aa, synthetic construct
RGDTAIN

SEQ ID NO: 32904 - protein, 7 aa, synthetic construct
RGDTAVH

SEQ ID NO: 32905 - protein, 7 aa, synthetic construct
RGDTDET

SEQ ID NO: 32906 - protein, 7 aa, synthetic construct
RGDDGRD

SEQ ID NO: 32907 - protein, 7 aa, synthetic construct
RGDDGTI

SEQ ID NO: 32908 - protein, 7 aa, synthetic construct
RGDTKAE

SEQ ID NO: 32909 - protein, 7 aa, synthetic construct
RGDTNAF

SEQ ID NO: 32910 - protein, 7 aa, synthetic construct
RGDTNFI

SEQ ID NO: 32911 - protein, 7 aa, synthetic construct
RGDTNGH

SEQ ID NO: 32912 - protein, 7 aa, synthetic construct
RGDTNHN

SEQ ID NO: 32913 - protein, 7 aa, synthetic construct
RGDTNLA

SEQ ID NO: 32914 - protein, 7 aa, synthetic construct
RGDTNTK

SEQ ID NO: 32915 - protein, 7 aa, synthetic construct
RGDTSDR

SEQ ID NO: 32916 - protein, 7 aa, synthetic construct
RGDTSKT

SEQ ID NO: 32917 - protein, 7 aa, synthetic construct
RGDTSTN

SEQ ID NO: 32918 - protein, 7 aa, synthetic construct
RGDTTIR

SEQ ID NO: 32919 - protein, 7 aa, synthetic construct
RGDTTQN

SEQ ID NO: 32920 - protein, 7 aa, synthetic construct
RGDTVGI

SEQ ID NO: 32921 - protein, 7 aa, synthetic construct
RGDTVSH

SEQ ID NO: 32922 - protein, 7 aa, synthetic construct
RGDTVTA

SEQ ID NO: 32923 - protein, 7 aa, synthetic construct
RGDVAVS

SEQ ID NO: 32924 - protein, 7 aa, synthetic construct
RGDVDDR

SEQ ID NO: 32925 - protein, 7 aa, synthetic construct
RGDVDEI

SEQ ID NO: 32926 - protein, 7 aa, synthetic construct
RGDVDER

SEQ ID NO: 32927 - protein, 7 aa, synthetic construct
RGDVDFS

SEQ ID NO: 32928 - protein, 7 aa, synthetic construct
RGDDIDV

SEQ ID NO: 32929 - protein, 7 aa, synthetic construct
RGDVDQS

SEQ ID NO: 32930 - protein, 7 aa, synthetic construct
RGDVDQV

SEQ ID NO: 32931 - protein, 7 aa, synthetic construct
RGDVEDI

SEQ ID NO: 32932 - protein, 7 aa, synthetic construct
RGDVFDI

SEQ ID NO: 32933 - protein, 7 aa, synthetic construct
RGDVFHS

SEQ ID NO: 32934 - protein, 7 aa, synthetic construct
RGDVFIL

SEQ ID NO: 32935 - protein, 7 aa, synthetic construct
RGDVFSL

SEQ ID NO: 32936 - protein, 7 aa, synthetic construct
RGDVGQN

SEQ ID NO: 32937 - protein, 7 aa, synthetic construct
RGDAAFF

SEQ ID NO: 32938 - protein, 7 aa, synthetic construct
RGDVLND

SEQ ID NO: 32939 - protein, 7 aa, synthetic construct
RGDVLQI

SEQ ID NO: 32940 - protein, 7 aa, synthetic construct
RGDVNAV

SEQ ID NO: 32941 - protein, 7 aa, synthetic construct
RGDVNQN

SEQ ID NO: 32942 - protein, 7 aa, synthetic construct
RGDVQDS

SEQ ID NO: 32943 - protein, 7 aa, synthetic construct
RGDVQLS

SEQ ID NO: 32944 - protein, 7 aa, synthetic construct
RGDVVQV

SEQ ID NO: 32945 - protein, 7 aa, synthetic construct
RGDDKLR

SEQ ID NO: 32946 - protein, 7 aa, synthetic construct
RGDDLFV

SEQ ID NO: 32947 - protein, 7 aa, synthetic construct
RGDDLRF

SEQ ID NO: 32948 - protein, 7 aa, synthetic construct
RGDDLTR

SEQ ID NO: 32949 - protein, 7 aa, synthetic construct
RGDDLTT

SEQ ID NO: 32950 - protein, 7 aa, synthetic construct
RGDDLVN

SEQ ID NO: 32951 - protein, 7 aa, synthetic construct
RGDDNHR

SEQ ID NO: 32952 - protein, 7 aa, synthetic construct
RGDDNVE

SEQ ID NO: 32953 - protein, 7 aa, synthetic construct
RGDDQFE

SEQ ID NO: 32954 - protein, 7 aa, synthetic construct
RGDDQHT

SEQ ID NO: 32955 - protein, 7 aa, synthetic construct
RGDDRDV

SEQ ID NO: 32956 - protein, 7 aa, synthetic construct
RGDDRVR

SEQ ID NO: 32957 - protein, 7 aa, synthetic construct
RGDDSHL

SEQ ID NO: 32958 - protein, 7 aa, synthetic construct
RGDAERH

SEQ ID NO: 32959 - protein, 7 aa, synthetic construct
RGDAAGE

SEQ ID NO: 32960 - protein, 7 aa, synthetic construct
RGDAAGF

SEQ ID NO: 32961 - protein, 7 aa, synthetic construct
RGDDVSN

SEQ ID NO: 32962 - protein, 7 aa, synthetic construct
RGDEAHF

SEQ ID NO: 32963 - protein, 7 aa, synthetic construct
RGDAFDT

SEQ ID NO: 32964 - protein, 7 aa, synthetic construct
RGDEDNV

SEQ ID NO: 32965 - protein, 7 aa, synthetic construct
RGDEDRN

SEQ ID NO: 32966 - protein, 7 aa, synthetic construct
RGDEDRV

SEQ ID NO: 32967 - protein, 7 aa, synthetic construct
RGDAFFF

SEQ ID NO: 32968 - protein, 7 aa, synthetic construct
RGDEEFT

SEQ ID NO: 32969 - protein, 7 aa, synthetic construct
RGDEFDV

SEQ ID NO: 32970 - protein, 7 aa, synthetic construct
RGDEFFH

SEQ ID NO: 32971 - protein, 7 aa, synthetic construct
RGDEFFK

SEQ ID NO: 32972 - protein, 7 aa, synthetic construct
RGDEFIH

SEQ ID NO: 32973 - protein, 7 aa, synthetic construct
RGDEFNL

SEQ ID NO: 32974 - protein, 7 aa, synthetic construct
RGDEFTH

SEQ ID NO: 32975 - protein, 7 aa, synthetic construct
RGDEGES

SEQ ID NO: 32976 - protein, 7 aa, synthetic construct
RGDEGQT

SEQ ID NO: 32977 - protein, 7 aa, synthetic construct
RGDEHGV

SEQ ID NO: 32978 - protein, 7 aa, synthetic construct
RGDEHIL

SEQ ID NO: 32979 - protein, 7 aa, synthetic construct
RGDEIDK

SEQ ID NO: 32980 - protein, 7 aa, synthetic construct
RGDAFQN

SEQ ID NO: 32981 - protein, 7 aa, synthetic construct
RGDEKRQ

SEQ ID NO: 32982 - protein, 7 aa, synthetic construct
RGDELDI

SEQ ID NO: 32983 - protein, 7 aa, synthetic construct
RGDELNF

SEQ ID NO: 32984 - protein, 7 aa, synthetic construct
RGDELTD

SEQ ID NO: 32985 - protein, 7 aa, synthetic construct
RGDENNA

SEQ ID NO: 32986 - protein, 7 aa, synthetic construct
RGDEQRI

SEQ ID NO: 32987 - protein, 7 aa, synthetic construct
RGDESIH

SEQ ID NO: 32988 - protein, 7 aa, synthetic construct
RGDESLF

SEQ ID NO: 32989 - protein, 7 aa, synthetic construct
RGDESQN

SEQ ID NO: 32990 - protein, 7 aa, synthetic construct
RGDETHF

SEQ ID NO: 32991 - protein, 7 aa, synthetic construct
RGDETRR

SEQ ID NO: 32992 - protein, 7 aa, synthetic construct
RGDEVHQ

SEQ ID NO: 32993 - protein, 7 aa, synthetic construct
RGDEVIT

SEQ ID NO: 32994 - protein, 7 aa, synthetic construct
RGDEVNV

SEQ ID NO: 32995 - protein, 7 aa, synthetic construct
RGDEVSR

SEQ ID NO: 32996 - protein, 7 aa, synthetic construct
RGDEVTT

SEQ ID NO: 32997 - protein, 7 aa, synthetic construct
RGDFAER

SEQ ID NO: 32998 - protein, 7 aa, synthetic construct
RGDFAGE

SEQ ID NO: 32999 - protein, 7 aa, synthetic construct
RGDAGNV

SEQ ID NO: 33000 - protein, 7 aa, synthetic construct
RGDFDVE

SEQ ID NO: 33001 - protein, 7 aa, synthetic construct
RGDFFTD

SEQ ID NO: 33002 - protein, 7 aa, synthetic construct
RGDFGEV

SEQ ID NO: 33003 - protein, 7 aa, synthetic construct
RGDFHRL

SEQ ID NO: 33004 - protein, 7 aa, synthetic construct
RGDFINH

SEQ ID NO: 33005 - protein, 7 aa, synthetic construct
RGDFLIA

SEQ ID NO: 33006 - protein, 7 aa, synthetic construct
RGDFLVE

SEQ ID NO: 33007 - protein, 7 aa, synthetic construct
RGDFNAE

SEQ ID NO: 33008 - protein, 7 aa, synthetic construct
RGDFNFV

SEQ ID NO: 33009 - protein, 7 aa, synthetic construct
RGDFQDN

SEQ ID NO: 33010 - protein, 7 aa, synthetic construct
RGDFQNE

SEQ ID NO: 33011 - protein, 7 aa, synthetic construct
RGDFQRH

SEQ ID NO: 33012 - protein, 7 aa, synthetic construct
RGDFSAD

SEQ ID NO: 33013 - protein, 7 aa, synthetic construct
RGDAHSH

SEQ ID NO: 33014 - protein, 7 aa, synthetic construct
RGDFVAE

SEQ ID NO: 33015 - protein, 7 aa, synthetic construct
RGDFVSA

SEQ ID NO: 33016 - protein, 7 aa, synthetic construct
RGDFVVE

SEQ ID NO: 33017 - protein, 7 aa, synthetic construct
RGDGAAI

SEQ ID NO: 33018 - protein, 7 aa, synthetic construct
RGDGDET

SEQ ID NO: 33019 - protein, 7 aa, synthetic construct
RGDGFLK

SEQ ID NO: 33020 - protein, 7 aa, synthetic construct
RGDGFNA

SEQ ID NO: 33021 - protein, 7 aa, synthetic construct
RGDGFVS

SEQ ID NO: 33022 - protein, 7 aa, synthetic construct
RGDGGLG

SEQ ID NO: 33023 - protein, 7 aa, synthetic construct
RGDGIGE

SEQ ID NO: 33024 - protein, 7 aa, synthetic construct
RGDGIGI

SEQ ID NO: 33025 - protein, 7 aa, synthetic construct
RGDGIRD

SEQ ID NO: 33026 - protein, 7 aa, synthetic construct
RGDGKAG

SEQ ID NO: 33027 - protein, 7 aa, synthetic construct
RGDGKLH

SEQ ID NO: 33028 - protein, 7 aa, synthetic construct
RGDGLSS

SEQ ID NO: 33029 - protein, 7 aa, synthetic construct
RGDAAQH

SEQ ID NO: 33030 - protein, 7 aa, synthetic construct
RGDGQEH

SEQ ID NO: 33031 - protein, 7 aa, synthetic construct
RGDGQFA

SEQ ID NO: 33032 - protein, 7 aa, synthetic construct
RGDGQLE

SEQ ID NO: 33033 - protein, 7 aa, synthetic construct
RGDGQVT

SEQ ID NO: 33034 - protein, 7 aa, synthetic construct
RGDGSIT

SEQ ID NO: 33035 - protein, 7 aa, synthetic construct
RGDGSVG

SEQ ID NO: 33036 - protein, 7 aa, synthetic construct
RGDGVSQ

SEQ ID NO: 33037 - protein, 7 aa, synthetic construct
RGDHADH

SEQ ID NO: 33038 - protein, 7 aa, synthetic construct
RGDHDNS

SEQ ID NO: 33039 - protein, 7 aa, synthetic construct
RGDHEFE

SEQ ID NO: 33040 - protein, 7 aa, synthetic construct
RGDHFES

SEQ ID NO: 33041 - protein, 7 aa, synthetic construct
RGDALFE

SEQ ID NO: 33042 - protein, 7 aa, synthetic construct
RGDHKTG

SEQ ID NO: 33043 - protein, 7 aa, synthetic construct
RGDHLSE

SEQ ID NO: 33044 - protein, 7 aa, synthetic construct
RGDHNDQ

SEQ ID NO: 33045 - protein, 7 aa, synthetic construct
RGDHNGQ

SEQ ID NO: 33046 - protein, 7 aa, synthetic construct
RGDHQGQ

SEQ ID NO: 33047 - protein, 7 aa, synthetic construct
RGDHTDR

SEQ ID NO: 33048 - protein, 7 aa, synthetic construct
RGDHVNN

SEQ ID NO: 33049 - protein, 7 aa, synthetic construct
RGDIEDF

SEQ ID NO: 33050 - protein, 7 aa, synthetic construct
RGDIEFA

SEQ ID NO: 33051 - protein, 7 aa, synthetic construct
RGDIEFG

SEQ ID NO: 33052 - protein, 7 aa, synthetic construct
RGDIEHG

SEQ ID NO: 33053 - protein, 7 aa, synthetic construct
RGDANFR

SEQ ID NO: 33054 - protein, 7 aa, synthetic construct
RGDIESD

SEQ ID NO: 33055 - protein, 7 aa, synthetic construct
RGDIETL

SEQ ID NO: 33056 - protein, 7 aa, synthetic construct
RGDIFEE

SEQ ID NO: 33057 - protein, 7 aa, synthetic construct
RGDIHDK

SEQ ID NO: 33058 - protein, 7 aa, synthetic construct
RGDIIGD

SEQ ID NO: 33059 - protein, 7 aa, synthetic construct
RGDIISD

SEQ ID NO: 33060 - protein, 7 aa, synthetic construct
RGDILDF

SEQ ID NO: 33061 - protein, 7 aa, synthetic construct
RGDANVK

SEQ ID NO: 33062 - protein, 7 aa, synthetic construct
RGDINQV

SEQ ID NO: 33063 - protein, 7 aa, synthetic construct
RGDINVS

SEQ ID NO: 33064 - protein, 7 aa, synthetic construct
RGDIQDS

SEQ ID NO: 33065 - protein, 7 aa, synthetic construct
RGDIRDD

SEQ ID NO: 33066 - protein, 7 aa, synthetic construct
RGDAQEF

SEQ ID NO: 33067 - protein, 7 aa, synthetic construct
RGDIRVA

SEQ ID NO: 33068 - protein, 7 aa, synthetic construct
RGDISLN

SEQ ID NO: 33069 - protein, 7 aa, synthetic construct
RGDAQGA

SEQ ID NO: 33070 - protein, 7 aa, synthetic construct
RGDAQHS

SEQ ID NO: 33071 - protein, 7 aa, synthetic construct
RGDIVDV

SEQ ID NO: 33072 - protein, 7 aa, synthetic construct
RGDAQKE

SEQ ID NO: 33073 - protein, 7 aa, synthetic construct
RGDKDED

SEQ ID NO: 33074 - protein, 7 aa, synthetic construct
RGDKDLF

SEQ ID NO: 33075 - protein, 7 aa, synthetic construct
RGDKHLF

SEQ ID NO: 33076 - protein, 7 aa, synthetic construct
RGDARED

SEQ ID NO: 33077 - protein, 7 aa, synthetic construct
RGDKLRG

SEQ ID NO: 33078 - protein, 7 aa, synthetic construct
RGDKNEV

SEQ ID NO: 33079 - protein, 7 aa, synthetic construct
RGDARIS

SEQ ID NO: 33080 - protein, 7 aa, synthetic construct
RGDKQTN

SEQ ID NO: 33081 - protein, 7 aa, synthetic construct
RGDKVTF

SEQ ID NO: 33082 - protein, 7 aa, synthetic construct
RGDASAI

SEQ ID NO: 33083 - protein, 7 aa, synthetic construct
RGDASFG

SEQ ID NO: 33084 - protein, 7 aa, synthetic construct
RGDLHGA

SEQ ID NO: 33085 - protein, 7 aa, synthetic construct
RGDLHLL

SEQ ID NO: 33086 - protein, 7 aa, synthetic construct
RGDLKDA

SEQ ID NO: 33087 - protein, 7 aa, synthetic construct
RGDLNAF

SEQ ID NO: 33088 - protein, 7 aa, synthetic construct
RGDLQSI

SEQ ID NO: 33089 - protein, 7 aa, synthetic construct
RGDATEH

SEQ ID NO: 33090 - protein, 7 aa, synthetic construct
RGDLSHF

SEQ ID NO: 33091 - protein, 7 aa, synthetic construct
RGDLSIA

SEQ ID NO: 33092 - protein, 7 aa, synthetic construct
RGDLVDN

SEQ ID NO: 33093 - protein, 7 aa, synthetic construct
RGDLVLE

SEQ ID NO: 33094 - protein, 7 aa, synthetic construct
RGDNAEQ

SEQ ID NO: 33095 - protein, 7 aa, synthetic construct
RGDNAQA

SEQ ID NO: 33096 - protein, 7 aa, synthetic construct
RGDNDQF

SEQ ID NO: 33097 - protein, 7 aa, synthetic construct
RGDATQN

SEQ ID NO: 33098 - protein, 7 aa, synthetic construct
RGDNELN

SEQ ID NO: 33099 - protein, 7 aa, synthetic construct
RGDNESA

SEQ ID NO: 33100 - protein, 7 aa, synthetic construct
RGDNFES

SEQ ID NO: 33101 - protein, 7 aa, synthetic construct
RGDNFNF

SEQ ID NO: 33102 - protein, 7 aa, synthetic construct
RGDNFSE

SEQ ID NO: 33103 - protein, 7 aa, synthetic construct
RGDNFSQ

SEQ ID NO: 33104 - protein, 7 aa, synthetic construct
RGDNGHR

SEQ ID NO: 33105 - protein, 7 aa, synthetic construct
RGDNGLS

SEQ ID NO: 33106 - protein, 7 aa, synthetic construct
RGDNHIF

SEQ ID NO: 33107 - protein, 7 aa, synthetic construct
RGDNIGE

SEQ ID NO: 33108 - protein, 7 aa, synthetic construct
RGDNIHH

SEQ ID NO: 33109 - protein, 7 aa, synthetic construct
RGDNITT

SEQ ID NO: 33110 - protein, 7 aa, synthetic construct
RGDNIVS

SEQ ID NO: 33111 - protein, 7 aa, synthetic construct
RGDAVFG

SEQ ID NO: 33112 - protein, 7 aa, synthetic construct
RGDNLIT

SEQ ID NO: 33113 - protein, 7 aa, synthetic construct
RGDNNAT

SEQ ID NO: 33114 - protein, 7 aa, synthetic construct
RGDNSDI

SEQ ID NO: 33115 - protein, 7 aa, synthetic construct
RGDNTLV

SEQ ID NO: 33116 - protein, 7 aa, synthetic construct
RGDNTQA

SEQ ID NO: 33117 - protein, 7 aa, synthetic construct
RGDNVIH

SEQ ID NO: 33118 - protein, 7 aa, synthetic construct
RGDNVLR

SEQ ID NO: 33119 - protein, 7 aa, synthetic construct
RGDQAGD

SEQ ID NO: 33120 - protein, 7 aa, synthetic construct
RGDDADF

SEQ ID NO: 33121 - protein, 7 aa, synthetic construct
RGDDAED

SEQ ID NO: 33122 - protein, 7 aa, synthetic construct
RGDQDQN

SEQ ID NO: 33123 - protein, 7 aa, synthetic construct
RGDQEKE

SEQ ID NO: 33124 - protein, 7 aa, synthetic construct
RGDDAHE

SEQ ID NO: 33125 - protein, 7 aa, synthetic construct
RGDQHLE

SEQ ID NO: 33126 - protein, 7 aa, synthetic construct
RGDQIED

SEQ ID NO: 33127 - protein, 7 aa, synthetic construct
RGDQLFH

SEQ ID NO: 33128 - protein, 7 aa, synthetic construct
RGDQNDH

SEQ ID NO: 33129 - protein, 7 aa, synthetic construct
RGDADLT

SEQ ID NO: 33130 - protein, 7 aa, synthetic construct
RGDDDAL

SEQ ID NO: 33131 - protein, 7 aa, synthetic construct
RGDQQLS

SEQ ID NO: 33132 - protein, 7 aa, synthetic construct
RGDQQTN

SEQ ID NO: 33133 - protein, 7 aa, synthetic construct
RGDQSHE

SEQ ID NO: 33134 - protein, 7 aa, synthetic construct
RGDQSLG

SEQ ID NO: 33135 - protein, 7 aa, synthetic construct
RGDQSLH

SEQ ID NO: 33136 - protein, 7 aa, synthetic construct
RGDDDIF

SEQ ID NO: 33137 - protein, 7 aa, synthetic construct
RGDDDIL

SEQ ID NO: 33138 - protein, 7 aa, synthetic construct
RGDDDKV

SEQ ID NO: 33139 - protein, 7 aa, synthetic construct
RGDRHDA

SEQ ID NO: 33140 - protein, 7 aa, synthetic construct
RGDRKFR

SEQ ID NO: 33141 - protein, 7 aa, synthetic construct
RGDADQT

SEQ ID NO: 33142 - protein, 7 aa, synthetic construct
RGDADQV

SEQ ID NO: 33143 - protein, 7 aa, synthetic construct
RGDRLVA

SEQ ID NO: 33144 - protein, 7 aa, synthetic construct
RGDRRDG

SEQ ID NO: 33145 - protein, 7 aa, synthetic construct
RGDSDHD

SEQ ID NO: 33146 - protein, 7 aa, synthetic construct
RGDSDQF

SEQ ID NO: 33147 - protein, 7 aa, synthetic construct
RGDSEFK

SEQ ID NO: 33148 - protein, 7 aa, synthetic construct
RGDSELQ

SEQ ID NO: 33149 - protein, 7 aa, synthetic construct
RGDSFEV

SEQ ID NO: 33150 - protein, 7 aa, synthetic construct
RGDSFQH

SEQ ID NO: 33151 - protein, 7 aa, synthetic construct
RGDSFRG

SEQ ID NO: 33152 - protein, 7 aa, synthetic construct
RGDSFTQ

SEQ ID NO: 33153 - protein, 7 aa, synthetic construct
RGDSHNA

SEQ ID NO: 33154 - protein, 7 aa, synthetic construct
RGDSIDL

SEQ ID NO: 33155 - protein, 7 aa, synthetic construct
RGDSIGR

SEQ ID NO: 33156 - protein, 7 aa, synthetic construct
RGDSITI

SEQ ID NO: 33157 - protein, 7 aa, synthetic construct
RGDSKTG

SEQ ID NO: 33158 - protein, 7 aa, synthetic construct
RGDSLFG

SEQ ID NO: 33159 - protein, 7 aa, synthetic construct
RGDSQSH

SEQ ID NO: 33160 - protein, 7 aa, synthetic construct
RGDDGEL

SEQ ID NO: 33161 - protein, 7 aa, synthetic construct
RGDDGFE

SEQ ID NO: 33162 - protein, 7 aa, synthetic construct
RGDSVEF

SEQ ID NO: 33163 - protein, 7 aa, synthetic construct
RGDTDQH

SEQ ID NO: 33164 - protein, 7 aa, synthetic construct
RGDTEKE

SEQ ID NO: 33165 - protein, 7 aa, synthetic construct
RGDDGSS

SEQ ID NO: 33166 - protein, 7 aa, synthetic construct
RGDDGVD

SEQ ID NO: 33167 - protein, 7 aa, synthetic construct
RGDTGLE

SEQ ID NO: 33168 - protein, 7 aa, synthetic construct
RGDDGVN

SEQ ID NO: 33169 - protein, 7 aa, synthetic construct
RGDADVV

SEQ ID NO: 33170 - protein, 7 aa, synthetic construct
RGDDHAI

SEQ ID NO: 33171 - protein, 7 aa, synthetic construct
RGDTIAT

SEQ ID NO: 33172 - protein, 7 aa, synthetic construct
RGDTIKE

SEQ ID NO: 33173 - protein, 7 aa, synthetic construct
RGDDHEG

SEQ ID NO: 33174 - protein, 7 aa, synthetic construct
RGDTISN

SEQ ID NO: 33175 - protein, 7 aa, synthetic construct
RGDTKLD

SEQ ID NO: 33176 - protein, 7 aa, synthetic construct
RGDTKSD

SEQ ID NO: 33177 - protein, 7 aa, synthetic construct
RGDTLQD

SEQ ID NO: 33178 - protein, 7 aa, synthetic construct
RGDTNLN

SEQ ID NO: 33179 - protein, 7 aa, synthetic construct
RGDTQLQ

SEQ ID NO: 33180 - protein, 7 aa, synthetic construct
RGDTQQG

SEQ ID NO: 33181 - protein, 7 aa, synthetic construct
RGDTRGD

SEQ ID NO: 33182 - protein, 7 aa, synthetic construct
RGDTSHE

SEQ ID NO: 33183 - protein, 7 aa, synthetic construct
RGDTSIH

SEQ ID NO: 33184 - protein, 7 aa, synthetic construct
RGDDHTA

SEQ ID NO: 33185 - protein, 7 aa, synthetic construct
RGDVADR

SEQ ID NO: 33186 - protein, 7 aa, synthetic construct
RGDVAEQ

SEQ ID NO: 33187 - protein, 7 aa, synthetic construct
RGDVAES

SEQ ID NO: 33188 - protein, 7 aa, synthetic construct
RGDVAHL

SEQ ID NO: 33189 - protein, 7 aa, synthetic construct
RGDVEFE

SEQ ID NO: 33190 - protein, 7 aa, synthetic construct
RGDVEHE

SEQ ID NO: 33191 - protein, 7 aa, synthetic construct
RGDVENL

SEQ ID NO: 33192 - protein, 7 aa, synthetic construct
RGDAAFE

SEQ ID NO: 33193 - protein, 7 aa, synthetic construct
RGDVFSH

SEQ ID NO: 33194 - protein, 7 aa, synthetic construct
RGDVHAG

SEQ ID NO: 33195 - protein, 7 aa, synthetic construct
RGDVHDS

SEQ ID NO: 33196 - protein, 7 aa, synthetic construct
RGDDIRF

SEQ ID NO: 33197 - protein, 7 aa, synthetic construct
RGDVKQG

SEQ ID NO: 33198 - protein, 7 aa, synthetic construct
RGDVNKG

SEQ ID NO: 33199 - protein, 7 aa, synthetic construct
RGDVNQS

SEQ ID NO: 33200 - protein, 7 aa, synthetic construct
RGDVQKA

SEQ ID NO: 33201 - protein, 7 aa, synthetic construct
RGDVRQA

SEQ ID NO: 33202 - protein, 7 aa, synthetic construct
RGDVSLG

SEQ ID NO: 33203 - protein, 7 aa, synthetic construct
RGDDKGK

SEQ ID NO: 33204 - protein, 7 aa, synthetic construct
RGDDKHN

SEQ ID NO: 33205 - protein, 7 aa, synthetic construct
RGDVTVR

SEQ ID NO: 33206 - protein, 7 aa, synthetic construct
RGDAEGK

SEQ ID NO: 33207 - protein, 7 aa, synthetic construct
RGDDLDF

SEQ ID NO: 33208 - protein, 7 aa, synthetic construct
RGDDLNV

SEQ ID NO: 33209 - protein, 7 aa, synthetic construct
RGDDLSL

SEQ ID NO: 33210 - protein, 7 aa, synthetic construct
RGDDLTS

SEQ ID NO: 33211 - protein, 7 aa, synthetic construct
RGDDNEE

SEQ ID NO: 33212 - protein, 7 aa, synthetic construct
RGDDNNG

SEQ ID NO: 33213 - protein, 7 aa, synthetic construct
RGDDNVR

SEQ ID NO: 33214 - protein, 7 aa, synthetic construct
RGDDQFN

SEQ ID NO: 33215 - protein, 7 aa, synthetic construct
RGDDQHI

SEQ ID NO: 33216 - protein, 7 aa, synthetic construct
RGDDRGN

SEQ ID NO: 33217 - protein, 7 aa, synthetic construct
RGDDRQA

SEQ ID NO: 33218 - protein, 7 aa, synthetic construct
RGDDRSI

SEQ ID NO: 33219 - protein, 7 aa, synthetic construct
RGDDTSQ

SEQ ID NO: 33220 - protein, 7 aa, synthetic construct
RGDDVFG

SEQ ID NO: 33221 - protein, 7 aa, synthetic construct
RGDEALR

SEQ ID NO: 33222 - protein, 7 aa, synthetic construct
RGDEDIQ

SEQ ID NO: 33223 - protein, 7 aa, synthetic construct
RGDEDQH

SEQ ID NO: 33224 - protein, 7 aa, synthetic construct
RGDEDQT

SEQ ID NO: 33225 - protein, 7 aa, synthetic construct
RGDEEFR

SEQ ID NO: 33226 - protein, 7 aa, synthetic construct
RGDEFKN

SEQ ID NO: 33227 - protein, 7 aa, synthetic construct
RGDAFHL

SEQ ID NO: 33228 - protein, 7 aa, synthetic construct
RGDEGEA

SEQ ID NO: 33229 - protein, 7 aa, synthetic construct
RGDEGNH

SEQ ID NO: 33230 - protein, 7 aa, synthetic construct
RGDEHAI

SEQ ID NO: 33231 - protein, 7 aa, synthetic construct
RGDEIEK

SEQ ID NO: 33232 - protein, 7 aa, synthetic construct
RGDEIFT

SEQ ID NO: 33233 - protein, 7 aa, synthetic construct
RGDEKNI

SEQ ID NO: 33234 - protein, 7 aa, synthetic construct
RGDELKG

SEQ ID NO: 33235 - protein, 7 aa, synthetic construct
RGDELLN

SEQ ID NO: 33236 - protein, 7 aa, synthetic construct
RGDENVI

SEQ ID NO: 33237 - protein, 7 aa, synthetic construct
RGDEQQH

SEQ ID NO: 33238 - protein, 7 aa, synthetic construct
RGDEQQR

SEQ ID NO: 33239 - protein, 7 aa, synthetic construct
RGDESNI

SEQ ID NO: 33240 - protein, 7 aa, synthetic construct
RGDEVNG

SEQ ID NO: 33241 - protein, 7 aa, synthetic construct
RGDEVVV

SEQ ID NO: 33242 - protein, 7 aa, synthetic construct
RGDAGQG

SEQ ID NO: 33243 - protein, 7 aa, synthetic construct
RGDFEIT

SEQ ID NO: 33244 - protein, 7 aa, synthetic construct
RGDFEKE

SEQ ID NO: 33245 - protein, 7 aa, synthetic construct
RGDFEKH

SEQ ID NO: 33246 - protein, 7 aa, synthetic construct
RGDFELT

SEQ ID NO: 33247 - protein, 7 aa, synthetic construct
RGDAGSI

SEQ ID NO: 33248 - protein, 7 aa, synthetic construct
RGDFFTH

SEQ ID NO: 33249 - protein, 7 aa, synthetic construct
RGDFGNA

SEQ ID NO: 33250 - protein, 7 aa, synthetic construct
RGDFHDE

SEQ ID NO: 33251 - protein, 7 aa, synthetic construct
RGDFIDQ

SEQ ID NO: 33252 - protein, 7 aa, synthetic construct
RGDFIIR

SEQ ID NO: 33253 - protein, 7 aa, synthetic construct
RGDFQAG

SEQ ID NO: 33254 - protein, 7 aa, synthetic construct
RGDAHRD

SEQ ID NO: 33255 - protein, 7 aa, synthetic construct
RGDAHVE

SEQ ID NO: 33256 - protein, 7 aa, synthetic construct
RGDGAIA

SEQ ID NO: 33257 - protein, 7 aa, synthetic construct
RGDGEAT

SEQ ID NO: 33258 - protein, 7 aa, synthetic construct
RGDGEFH

SEQ ID NO: 33259 - protein, 7 aa, synthetic construct
RGDGEFL

SEQ ID NO: 33260 - protein, 7 aa, synthetic construct
RGDGFDH

SEQ ID NO: 33261 - protein, 7 aa, synthetic construct
RGDGGEQ

SEQ ID NO: 33262 - protein, 7 aa, synthetic construct
RGDGGRS

SEQ ID NO: 33263 - protein, 7 aa, synthetic construct
RGDGHES

SEQ ID NO: 33264 - protein, 7 aa, synthetic construct
RGDGHTH

SEQ ID NO: 33265 - protein, 7 aa, synthetic construct
RGDGIEQ

SEQ ID NO: 33266 - protein, 7 aa, synthetic construct
RGDGINQ

SEQ ID NO: 33267 - protein, 7 aa, synthetic construct
RGDAIQI

SEQ ID NO: 33268 - protein, 7 aa, synthetic construct
RGDAISE

SEQ ID NO: 33269 - protein, 7 aa, synthetic construct
RGDAIVL

SEQ ID NO: 33270 - protein, 7 aa, synthetic construct
RGDGQFS

SEQ ID NO: 33271 - protein, 7 aa, synthetic construct
RGDGQNS

SEQ ID NO: 33272 - protein, 7 aa, synthetic construct
RGDGSLG

SEQ ID NO: 33273 - protein, 7 aa, synthetic construct
RGDGTLQ

SEQ ID NO: 33274 - protein, 7 aa, synthetic construct
RGDGTSD

SEQ ID NO: 33275 - protein, 7 aa, synthetic construct
RGDHAQG

SEQ ID NO: 33276 - protein, 7 aa, synthetic construct
RGDHEED

SEQ ID NO: 33277 - protein, 7 aa, synthetic construct
RGDHETI

SEQ ID NO: 33278 - protein, 7 aa, synthetic construct
RGDHFGQ

SEQ ID NO: 33279 - protein, 7 aa, synthetic construct
RGDHGEV

SEQ ID NO: 33280 - protein, 7 aa, synthetic construct
RGDHHIR

SEQ ID NO: 33281 - protein, 7 aa, synthetic construct
RGDHIQE

SEQ ID NO: 33282 - protein, 7 aa, synthetic construct
RGDHITQ

SEQ ID NO: 33283 - protein, 7 aa, synthetic construct
RGDALFN

SEQ ID NO: 33284 - protein, 7 aa, synthetic construct
RGDHKLI

SEQ ID NO: 33285 - protein, 7 aa, synthetic construct
RGDHKVH

SEQ ID NO: 33286 - protein, 7 aa, synthetic construct
RGDHLII

SEQ ID NO: 33287 - protein, 7 aa, synthetic construct
RGDHNAA

SEQ ID NO: 33288 - protein, 7 aa, synthetic construct
RGDHNDK

SEQ ID NO: 33289 - protein, 7 aa, synthetic construct
RGDAASN

SEQ ID NO: 33290 - protein, 7 aa, synthetic construct
RGDHQHG

SEQ ID NO: 33291 - protein, 7 aa, synthetic construct
RGDHSNH

SEQ ID NO: 33292 - protein, 7 aa, synthetic construct
RGDHTEQ

SEQ ID NO: 33293 - protein, 7 aa, synthetic construct
RGDHVFA

SEQ ID NO: 33294 - protein, 7 aa, synthetic construct
RGDIADE

SEQ ID NO: 33295 - protein, 7 aa, synthetic construct
RGDIDKQ

SEQ ID NO: 33296 - protein, 7 aa, synthetic construct
RGDIFAG

SEQ ID NO: 33297 - protein, 7 aa, synthetic construct
RGDIFTN

SEQ ID NO: 33298 - protein, 7 aa, synthetic construct
RGDIIDD

SEQ ID NO: 33299 - protein, 7 aa, synthetic construct
RGDANNQ

SEQ ID NO: 33300 - protein, 7 aa, synthetic construct
RGDIKLF

SEQ ID NO: 33301 - protein, 7 aa, synthetic construct
RGDILFG

SEQ ID NO: 33302 - protein, 7 aa, synthetic construct
RGDINTL

SEQ ID NO: 33303 - protein, 7 aa, synthetic construct
RGDIQNQ

SEQ ID NO: 33304 - protein, 7 aa, synthetic construct
RGDAQDE

SEQ ID NO: 33305 - protein, 7 aa, synthetic construct
RGDAQDG

SEQ ID NO: 33306 - protein, 7 aa, synthetic construct
RGDIQVF

SEQ ID NO: 33307 - protein, 7 aa, synthetic construct
RGDIRQA

SEQ ID NO: 33308 - protein, 7 aa, synthetic construct
RGDITDH

SEQ ID NO: 33309 - protein, 7 aa, synthetic construct
RGDITFA

SEQ ID NO: 33310 - protein, 7 aa, synthetic construct
RGDIVKS

SEQ ID NO: 33311 - protein, 7 aa, synthetic construct
RGDARDD

SEQ ID NO: 33312 - protein, 7 aa, synthetic construct
RGDKHTN

SEQ ID NO: 33313 - protein, 7 aa, synthetic construct
RGDKITS

SEQ ID NO: 33314 - protein, 7 aa, synthetic construct
RGDKQFE

SEQ ID NO: 33315 - protein, 7 aa, synthetic construct
RGDKSVL

SEQ ID NO: 33316 - protein, 7 aa, synthetic construct
RGDKTVF

SEQ ID NO: 33317 - protein, 7 aa, synthetic construct
RGDARVD

SEQ ID NO: 33318 - protein, 7 aa, synthetic construct
RGDKVNH

SEQ ID NO: 33319 - protein, 7 aa, synthetic construct
RGDKVQF

SEQ ID NO: 33320 - protein, 7 aa, synthetic construct
RGDLANQ

SEQ ID NO: 33321 - protein, 7 aa, synthetic construct
RGDLDGI

SEQ ID NO: 33322 - protein, 7 aa, synthetic construct
RGDLDIQ

SEQ ID NO: 33323 - protein, 7 aa, synthetic construct
RGDASFN

SEQ ID NO: 33324 - protein, 7 aa, synthetic construct
RGDLEQQ

SEQ ID NO: 33325 - protein, 7 aa, synthetic construct
RGDLFLS

SEQ ID NO: 33326 - protein, 7 aa, synthetic construct
RGDLFQH

SEQ ID NO: 33327 - protein, 7 aa, synthetic construct
RGDLHIS

SEQ ID NO: 33328 - protein, 7 aa, synthetic construct
RGDLHSI

SEQ ID NO: 33329 - protein, 7 aa, synthetic construct
RGDLHTG

SEQ ID NO: 33330 - protein, 7 aa, synthetic construct
RGDLIVD

SEQ ID NO: 33331 - protein, 7 aa, synthetic construct
RGDASVD

SEQ ID NO: 33332 - protein, 7 aa, synthetic construct
RGDLQEE

SEQ ID NO: 33333 - protein, 7 aa, synthetic construct
RGDLQQI

SEQ ID NO: 33334 - protein, 7 aa, synthetic construct
RGDLQQQ

SEQ ID NO: 33335 - protein, 7 aa, synthetic construct
RGDLQTH

SEQ ID NO: 33336 - protein, 7 aa, synthetic construct
RGDLRIA

SEQ ID NO: 33337 - protein, 7 aa, synthetic construct
RGDLVDF

SEQ ID NO: 33338 - protein, 7 aa, synthetic construct
RGDNAVN

SEQ ID NO: 33339 - protein, 7 aa, synthetic construct
RGDNEAQ

SEQ ID NO: 33340 - protein, 7 aa, synthetic construct
RGDATSS

SEQ ID NO: 33341 - protein, 7 aa, synthetic construct
RGDNFSG

SEQ ID NO: 33342 - protein, 7 aa, synthetic construct
RGDNFTN

SEQ ID NO: 33343 - protein, 7 aa, synthetic construct
RGDNHDK

SEQ ID NO: 33344 - protein, 7 aa, synthetic construct
RGDNHFG

SEQ ID NO: 33345 - protein, 7 aa, synthetic construct
RGDNIAV

SEQ ID NO: 33346 - protein, 7 aa, synthetic construct
RGDNIHG

SEQ ID NO: 33347 - protein, 7 aa, synthetic construct
RGDNINH

SEQ ID NO: 33348 - protein, 7 aa, synthetic construct
RGDNKVH

SEQ ID NO: 33349 - protein, 7 aa, synthetic construct
RGDNLDF

SEQ ID NO: 33350 - protein, 7 aa, synthetic construct
RGDNLLS

SEQ ID NO: 33351 - protein, 7 aa, synthetic construct
RGDNLLV

SEQ ID NO: 33352 - protein, 7 aa, synthetic construct
RGDNLTQ

SEQ ID NO: 33353 - protein, 7 aa, synthetic construct
RGDNNIL

SEQ ID NO: 33354 - protein, 7 aa, synthetic construct
RGDNNNL

SEQ ID NO: 33355 - protein, 7 aa, synthetic construct
RGDNQTG

SEQ ID NO: 33356 - protein, 7 aa, synthetic construct
RGDNSTH

SEQ ID NO: 33357 - protein, 7 aa, synthetic construct
RGDNVGD

SEQ ID NO: 33358 - protein, 7 aa, synthetic construct
RGDNVHG

SEQ ID NO: 33359 - protein, 7 aa, synthetic construct
RGDQAIF

SEQ ID NO: 33360 - protein, 7 aa, synthetic construct
RGDQAVL

SEQ ID NO: 33361 - protein, 7 aa, synthetic construct
RGDQDTA

SEQ ID NO: 33362 - protein, 7 aa, synthetic construct
RGDQEAD

SEQ ID NO: 33363 - protein, 7 aa, synthetic construct
RGDQEAV

SEQ ID NO: 33364 - protein, 7 aa, synthetic construct
RGDQEFQ

SEQ ID NO: 33365 - protein, 7 aa, synthetic construct
RGDQFAF

SEQ ID NO: 33366 - protein, 7 aa, synthetic construct
RGDDAGT

SEQ ID NO: 33367 - protein, 7 aa, synthetic construct
RGDQGQQ

SEQ ID NO: 33368 - protein, 7 aa, synthetic construct
RGDQHEF

SEQ ID NO: 33369 - protein, 7 aa, synthetic construct
RGDQIEV

SEQ ID NO: 33370 - protein, 7 aa, synthetic construct
RGDQITN

SEQ ID NO: 33371 - protein, 7 aa, synthetic construct
RGDQLIQ

SEQ ID NO: 33372 - protein, 7 aa, synthetic construct
RGDQNHQ

SEQ ID NO: 33373 - protein, 7 aa, synthetic construct
RGDQQEN

SEQ ID NO: 33374 - protein, 7 aa, synthetic construct
RGDQQFQ

SEQ ID NO: 33375 - protein, 7 aa, synthetic construct
RGDQQNE

SEQ ID NO: 33376 - protein, 7 aa, synthetic construct
RGDQVHD

SEQ ID NO: 33377 - protein, 7 aa, synthetic construct
RGDDDTE

SEQ ID NO: 33378 - protein, 7 aa, synthetic construct
RGDDDVS

SEQ ID NO: 33379 - protein, 7 aa, synthetic construct
RGDDEDI

SEQ ID NO: 33380 - protein, 7 aa, synthetic construct
RGDRILL

SEQ ID NO: 33381 - protein, 7 aa, synthetic construct
RGDRLLL

SEQ ID NO: 33382 - protein, 7 aa, synthetic construct
RGDRLTG

SEQ ID NO: 33383 - protein, 7 aa, synthetic construct
RGDDELV

SEQ ID NO: 33384 - protein, 7 aa, synthetic construct
RGDRVVN

SEQ ID NO: 33385 - protein, 7 aa, synthetic construct
RGDSAIG

SEQ ID NO: 33386 - protein, 7 aa, synthetic construct
RGDSAIS

SEQ ID NO: 33387 - protein, 7 aa, synthetic construct
RGDSASG

SEQ ID NO: 33388 - protein, 7 aa, synthetic construct
RGDSDRE

SEQ ID NO: 33389 - protein, 7 aa, synthetic construct
RGDSDSF

SEQ ID NO: 33390 - protein, 7 aa, synthetic construct
RGDSEDV

SEQ ID NO: 33391 - protein, 7 aa, synthetic construct
RGDSFDT

SEQ ID NO: 33392 - protein, 7 aa, synthetic construct
RGDDFHK

SEQ ID NO: 33393 - protein, 7 aa, synthetic construct
RGDSHAA

SEQ ID NO: 33394 - protein, 7 aa, synthetic construct
RGDSHGG

SEQ ID NO: 33395 - protein, 7 aa, synthetic construct
RGDDFQS

SEQ ID NO: 33396 - protein, 7 aa, synthetic construct
RGDDFSE

SEQ ID NO: 33397 - protein, 7 aa, synthetic construct
RGDSNEF

SEQ ID NO: 33398 - protein, 7 aa, synthetic construct
RGDSNSD

SEQ ID NO: 33399 - protein, 7 aa, synthetic construct
RGDSNSQ

SEQ ID NO: 33400 - protein, 7 aa, synthetic construct
RGDSQHV

SEQ ID NO: 33401 - protein, 7 aa, synthetic construct
RGDSQNQ

SEQ ID NO: 33402 - protein, 7 aa, synthetic construct
RGDSQTN

SEQ ID NO: 33403 - protein, 7 aa, synthetic construct
RGDSSHF

SEQ ID NO: 33404 - protein, 7 aa, synthetic construct
RGDSTVF

SEQ ID NO: 33405 - protein, 7 aa, synthetic construct
RGDTAIG

SEQ ID NO: 33406 - protein, 7 aa, synthetic construct
RGDTDGI

SEQ ID NO: 33407 - protein, 7 aa, synthetic construct
RGDTDKF

SEQ ID NO: 33408 - protein, 7 aa, synthetic construct
RGDTDLK

SEQ ID NO: 33409 - protein, 7 aa, synthetic construct
RGDTEDT

SEQ ID NO: 33410 - protein, 7 aa, synthetic construct
RGDTEFF

SEQ ID NO: 33411 - protein, 7 aa, synthetic construct
RGDTELS

SEQ ID NO: 33412 - protein, 7 aa, synthetic construct
RGDTFFA

SEQ ID NO: 33413 - protein, 7 aa, synthetic construct
RGDTFRE

SEQ ID NO: 33414 - protein, 7 aa, synthetic construct
RGDTGTG

SEQ ID NO: 33415 - protein, 7 aa, synthetic construct
RGDTHQF

SEQ ID NO: 33416 - protein, 7 aa, synthetic construct
RGDTHTN

SEQ ID NO: 33417 - protein, 7 aa, synthetic construct
RGDTIDT

SEQ ID NO: 33418 - protein, 7 aa, synthetic construct
RGDTIQI

SEQ ID NO: 33419 - protein, 7 aa, synthetic construct
RGDTIRD

SEQ ID NO: 33420 - protein, 7 aa, synthetic construct
RGDTNGD

SEQ ID NO: 33421 - protein, 7 aa, synthetic construct
RGDTNVH

SEQ ID NO: 33422 - protein, 7 aa, synthetic construct
RGDTRTD

SEQ ID NO: 33423 - protein, 7 aa, synthetic construct
RGDTTAF

SEQ ID NO: 33424 - protein, 7 aa, synthetic construct
RGDTVDD

SEQ ID NO: 33425 - protein, 7 aa, synthetic construct
RGDVAHD

SEQ ID NO: 33426 - protein, 7 aa, synthetic construct
RGDVDRT

SEQ ID NO: 33427 - protein, 7 aa, synthetic construct
RGDVDSG

SEQ ID NO: 33428 - protein, 7 aa, synthetic construct
RGDVDSI

SEQ ID NO: 33429 - protein, 7 aa, synthetic construct
RGDVELR

SEQ ID NO: 33430 - protein, 7 aa, synthetic construct
RGDVERE

SEQ ID NO: 33431 - protein, 7 aa, synthetic construct
RGDVERK

SEQ ID NO: 33432 - protein, 7 aa, synthetic construct
RGDVGDN

SEQ ID NO: 33433 - protein, 7 aa, synthetic construct
RGDVHAA

SEQ ID NO: 33434 - protein, 7 aa, synthetic construct
RGDVIQF

SEQ ID NO: 33435 - protein, 7 aa, synthetic construct
RGDVLNN

SEQ ID NO: 33436 - protein, 7 aa, synthetic construct
RGDDKAR

SEQ ID NO: 33437 - protein, 7 aa, synthetic construct
RGDDKFS

SEQ ID NO: 33438 - protein, 7 aa, synthetic construct
RGDVSTE

SEQ ID NO: 33439 - protein, 7 aa, synthetic construct
RGDVVLG

SEQ ID NO: 33440 - protein, 7 aa, synthetic construct
RGDVVNN

SEQ ID NO: 33441 - protein, 7 aa, synthetic construct
RGDDKNI

SEQ ID NO: 33442 - protein, 7 aa, synthetic construct
RGDAEFV

SEQ ID NO: 33443 - protein, 7 aa, synthetic construct
RGDDLDV

SEQ ID NO: 33444 - protein, 7 aa, synthetic construct
RGDDLKE

SEQ ID NO: 33445 - protein, 7 aa, synthetic construct
RGDDLVE

SEQ ID NO: 33446 - protein, 7 aa, synthetic construct
RGDDNAV

SEQ ID NO: 33447 - protein, 7 aa, synthetic construct
RGDDNES

SEQ ID NO: 33448 - protein, 7 aa, synthetic construct
RGDDQFD

SEQ ID NO: 33449 - protein, 7 aa, synthetic construct
RGDDQGV

SEQ ID NO: 33450 - protein, 7 aa, synthetic construct
RGDDQKF

SEQ ID NO: 33451 - protein, 7 aa, synthetic construct
RGDDRNS

SEQ ID NO: 33452 - protein, 7 aa, synthetic construct
RGDDSNE

SEQ ID NO: 33453 - protein, 7 aa, synthetic construct
RGDDTTH

SEQ ID NO: 33454 - protein, 7 aa, synthetic construct
RGDDVFE

SEQ ID NO: 33455 - protein, 7 aa, synthetic construct
RGDEDGN

SEQ ID NO: 33456 - protein, 7 aa, synthetic construct
RGDEEHG

SEQ ID NO: 33457 - protein, 7 aa, synthetic construct
RGDEFDF

SEQ ID NO: 33458 - protein, 7 aa, synthetic construct
RGDEFFR

SEQ ID NO: 33459 - protein, 7 aa, synthetic construct
RGDEFHQ

SEQ ID NO: 33460 - protein, 7 aa, synthetic construct
RGDEFST

SEQ ID NO: 33461 - protein, 7 aa, synthetic construct
RGDEHAL

SEQ ID NO: 33462 - protein, 7 aa, synthetic construct
RGDEHHD

SEQ ID NO: 33463 - protein, 7 aa, synthetic construct
RGDAFNN

SEQ ID NO: 33464 - protein, 7 aa, synthetic construct
RGDEIRV

SEQ ID NO: 33465 - protein, 7 aa, synthetic construct
RGDEKNV

SEQ ID NO: 33466 - protein, 7 aa, synthetic construct
RGDEKQH

SEQ ID NO: 33467 - protein, 7 aa, synthetic construct
RGDELFS

SEQ ID NO: 33468 - protein, 7 aa, synthetic construct
RGDELKK

SEQ ID NO: 33469 - protein, 7 aa, synthetic construct
RGDELTA

SEQ ID NO: 33470 - protein, 7 aa, synthetic construct
RGDENRG

SEQ ID NO: 33471 - protein, 7 aa, synthetic construct
RGDERGE

SEQ ID NO: 33472 - protein, 7 aa, synthetic construct
RGDEVNF

SEQ ID NO: 33473 - protein, 7 aa, synthetic construct
RGDEVSF

SEQ ID NO: 33474 - protein, 7 aa, synthetic construct
RGDFAFQ

SEQ ID NO: 33475 - protein, 7 aa, synthetic construct
RGDFAHL

SEQ ID NO: 33476 - protein, 7 aa, synthetic construct
RGDFAIA

SEQ ID NO: 33477 - protein, 7 aa, synthetic construct
RGDFAIR

SEQ ID NO: 33478 - protein, 7 aa, synthetic construct
RGDFDAE

SEQ ID NO: 33479 - protein, 7 aa, synthetic construct
RGDFEDD

SEQ ID NO: 33480 - protein, 7 aa, synthetic construct
RGDFELV

SEQ ID NO: 33481 - protein, 7 aa, synthetic construct
RGDFIEA

SEQ ID NO: 33482 - protein, 7 aa, synthetic construct
RGDFILA

SEQ ID NO: 33483 - protein, 7 aa, synthetic construct
RGDFIND

SEQ ID NO: 33484 - protein, 7 aa, synthetic construct
RGDFNED

SEQ ID NO: 33485 - protein, 7 aa, synthetic construct
RGDFQVD

SEQ ID NO: 33486 - protein, 7 aa, synthetic construct
RGDFRIS

SEQ ID NO: 33487 - protein, 7 aa, synthetic construct
RGDFVAG

SEQ ID NO: 33488 - protein, 7 aa, synthetic construct
RGDGDGG

SEQ ID NO: 33489 - protein, 7 aa, synthetic construct
RGDAIEQ

SEQ ID NO: 33490 - protein, 7 aa, synthetic construct
RGDGEDI

SEQ ID NO: 33491 - protein, 7 aa, synthetic construct
RGDGGLE

SEQ ID NO: 33492 - protein, 7 aa, synthetic construct
RGDGILE

SEQ ID NO: 33493 - protein, 7 aa, synthetic construct
RGDGKQR

SEQ ID NO: 33494 - protein, 7 aa, synthetic construct
RGDGNIQ

SEQ ID NO: 33495 - protein, 7 aa, synthetic construct
RGDGQIN

SEQ ID NO: 33496 - protein, 7 aa, synthetic construct
RGDGRHA

SEQ ID NO: 33497 - protein, 7 aa, synthetic construct
RGDGRIT

SEQ ID NO: 33498 - protein, 7 aa, synthetic construct
RGDGTEG

SEQ ID NO: 33499 - protein, 7 aa, synthetic construct
RGDAKIE

SEQ ID NO: 33500 - protein, 7 aa, synthetic construct
RGDGVHE

SEQ ID NO: 33501 - protein, 7 aa, synthetic construct
RGDHADI

SEQ ID NO: 33502 - protein, 7 aa, synthetic construct
RGDHAIL

SEQ ID NO: 33503 - protein, 7 aa, synthetic construct
RGDHDTG

SEQ ID NO: 33504 - protein, 7 aa, synthetic construct
RGDHHAD

SEQ ID NO: 33505 - protein, 7 aa, synthetic construct
RGDHHHD

SEQ ID NO: 33506 - protein, 7 aa, synthetic construct
RGDHHLK

SEQ ID NO: 33507 - protein, 7 aa, synthetic construct
RGDHIEF

SEQ ID NO: 33508 - protein, 7 aa, synthetic construct
RGDHIIV

SEQ ID NO: 33509 - protein, 7 aa, synthetic construct
RGDHISD

SEQ ID NO: 33510 - protein, 7 aa, synthetic construct
RGDHLAT

SEQ ID NO: 33511 - protein, 7 aa, synthetic construct
RGDHLDH

SEQ ID NO: 33512 - protein, 7 aa, synthetic construct
RGDHLEG

SEQ ID NO: 33513 - protein, 7 aa, synthetic construct
RGDHNIK

SEQ ID NO: 33514 - protein, 7 aa, synthetic construct
RGDHNSN

SEQ ID NO: 33515 - protein, 7 aa, synthetic construct
RGDHQDD

SEQ ID NO: 33516 - protein, 7 aa, synthetic construct
RGDHQLN

SEQ ID NO: 33517 - protein, 7 aa, synthetic construct
RGDHSDE

SEQ ID NO: 33518 - protein, 7 aa, synthetic construct
RGDHSDV

SEQ ID NO: 33519 - protein, 7 aa, synthetic construct
RGDALQQ

SEQ ID NO: 33520 - protein, 7 aa, synthetic construct
RGDHSVH

SEQ ID NO: 33521 - protein, 7 aa, synthetic construct
RGDHTLI

SEQ ID NO: 33522 - protein, 7 aa, synthetic construct
RGDHVKG

SEQ ID NO: 33523 - protein, 7 aa, synthetic construct
RGDIALE

SEQ ID NO: 33524 - protein, 7 aa, synthetic construct
RGDIAQG

SEQ ID NO: 33525 - protein, 7 aa, synthetic construct
RGDIDNV

SEQ ID NO: 33526 - protein, 7 aa, synthetic construct
RGDIFFD

SEQ ID NO: 33527 - protein, 7 aa, synthetic construct
RGDIFQI

SEQ ID NO: 33528 - protein, 7 aa, synthetic construct
RGDIGLE

SEQ ID NO: 33529 - protein, 7 aa, synthetic construct
RGDIGLI

SEQ ID NO: 33530 - protein, 7 aa, synthetic construct
RGDIHDN

SEQ ID NO: 33531 - protein, 7 aa, synthetic construct
RGDIIFH

SEQ ID NO: 33532 - protein, 7 aa, synthetic construct
RGDIIFI

SEQ ID NO: 33533 - protein, 7 aa, synthetic construct
RGDIIRE

SEQ ID NO: 33534 - protein, 7 aa, synthetic construct
RGDIKVE

SEQ ID NO: 33535 - protein, 7 aa, synthetic construct
RGDILAT

SEQ ID NO: 33536 - protein, 7 aa, synthetic construct
RGDILDG

SEQ ID NO: 33537 - protein, 7 aa, synthetic construct
RGDINFS

SEQ ID NO: 33538 - protein, 7 aa, synthetic construct
RGDININ

SEQ ID NO: 33539 - protein, 7 aa, synthetic construct
RGDIRGA

SEQ ID NO: 33540 - protein, 7 aa, synthetic construct
RGDISQD

SEQ ID NO: 33541 - protein, 7 aa, synthetic construct
RGDITEG

SEQ ID NO: 33542 - protein, 7 aa, synthetic construct
RGDITFE

SEQ ID NO: 33543 - protein, 7 aa, synthetic construct
RGDIVIG

SEQ ID NO: 33544 - protein, 7 aa, synthetic construct
RGDIVLL

SEQ ID NO: 33545 - protein, 7 aa, synthetic construct
RGDIVSK

SEQ ID NO: 33546 - protein, 7 aa, synthetic construct
RGDIVTF

SEQ ID NO: 33547 - protein, 7 aa, synthetic construct
RGDKEHT

SEQ ID NO: 33548 - protein, 7 aa, synthetic construct
RGDKFLQ

SEQ ID NO: 33549 - protein, 7 aa, synthetic construct
RGDKNSD

SEQ ID NO: 33550 - protein, 7 aa, synthetic construct
RGDKQTE

SEQ ID NO: 33551 - protein, 7 aa, synthetic construct
RGDKQVG

SEQ ID NO: 33552 - protein, 7 aa, synthetic construct
RGDKVQD

SEQ ID NO: 33553 - protein, 7 aa, synthetic construct
RGDKVQL

SEQ ID NO: 33554 - protein, 7 aa, synthetic construct
RGDLDDN

SEQ ID NO: 33555 - protein, 7 aa, synthetic construct
RGDLDFI

SEQ ID NO: 33556 - protein, 7 aa, synthetic construct
RGDLIID

SEQ ID NO: 33557 - protein, 7 aa, synthetic construct
RGDLLSD

SEQ ID NO: 33558 - protein, 7 aa, synthetic construct
RGDLNFK

SEQ ID NO: 33559 - protein, 7 aa, synthetic construct
RGDASVE

SEQ ID NO: 33560 - protein, 7 aa, synthetic construct
RGDATAI

SEQ ID NO: 33561 - protein, 7 aa, synthetic construct
RGDLRKL

SEQ ID NO: 33562 - protein, 7 aa, synthetic construct
RGDLSLD

SEQ ID NO: 33563 - protein, 7 aa, synthetic construct
RGDLVAS

SEQ ID NO: 33564 - protein, 7 aa, synthetic construct
RGDLVDD

SEQ ID NO: 33565 - protein, 7 aa, synthetic construct
RGDNAGE

SEQ ID NO: 33566 - protein, 7 aa, synthetic construct
RGDNALH

SEQ ID NO: 33567 - protein, 7 aa, synthetic construct
RGDNDAL

SEQ ID NO: 33568 - protein, 7 aa, synthetic construct
RGDNDNV

SEQ ID NO: 33569 - protein, 7 aa, synthetic construct
RGDNFSI

SEQ ID NO: 33570 - protein, 7 aa, synthetic construct
RGDNGTV

SEQ ID NO: 33571 - protein, 7 aa, synthetic construct
RGDNKTQ

SEQ ID NO: 33572 - protein, 7 aa, synthetic construct
RGDNLDH

SEQ ID NO: 33573 - protein, 7 aa, synthetic construct
RGDNNFT

SEQ ID NO: 33574 - protein, 7 aa, synthetic construct
RGDNNSQ

SEQ ID NO: 33575 - protein, 7 aa, synthetic construct
RGDNNVK

SEQ ID NO: 33576 - protein, 7 aa, synthetic construct
RGDNQQT

SEQ ID NO: 33577 - protein, 7 aa, synthetic construct
RGDNSDH

SEQ ID NO: 33578 - protein, 7 aa, synthetic construct
RGDNSTG

SEQ ID NO: 33579 - protein, 7 aa, synthetic construct
RGDNSVN

SEQ ID NO: 33580 - protein, 7 aa, synthetic construct
RGDNTEN

SEQ ID NO: 33581 - protein, 7 aa, synthetic construct
RGDNTFS

SEQ ID NO: 33582 - protein, 7 aa, synthetic construct
RGDNTNN

SEQ ID NO: 33583 - protein, 7 aa, synthetic construct
RGDNVAS

SEQ ID NO: 33584 - protein, 7 aa, synthetic construct
RGDNVFN

SEQ ID NO: 33585 - protein, 7 aa, synthetic construct
RGDADKK

SEQ ID NO: 33586 - protein, 7 aa, synthetic construct
RGDDAFD

SEQ ID NO: 33587 - protein, 7 aa, synthetic construct
RGDQEDK

SEQ ID NO: 33588 - protein, 7 aa, synthetic construct
RGDQEHT

SEQ ID NO: 33589 - protein, 7 aa, synthetic construct
RGDQENE

SEQ ID NO: 33590 - protein, 7 aa, synthetic construct
RGDQFDT

SEQ ID NO: 33591 - protein, 7 aa, synthetic construct
RGDQFEI

SEQ ID NO: 33592 - protein, 7 aa, synthetic construct
RGDQGDF

SEQ ID NO: 33593 - protein, 7 aa, synthetic construct
RGDQHEG

SEQ ID NO: 33594 - protein, 7 aa, synthetic construct
RGDQHVA

SEQ ID NO: 33595 - protein, 7 aa, synthetic construct
RGDQHVS

SEQ ID NO: 33596 - protein, 7 aa, synthetic construct
RGDQIIE

SEQ ID NO: 33597 - protein, 7 aa, synthetic construct
RGDQKDI

SEQ ID NO: 33598 - protein, 7 aa, synthetic construct
RGDQNTE

SEQ ID NO: 33599 - protein, 7 aa, synthetic construct
RGDQQHH

SEQ ID NO: 33600 - protein, 7 aa, synthetic construct
RGDDDEK

SEQ ID NO: 33601 - protein, 7 aa, synthetic construct
RGDDDFS

SEQ ID NO: 33602 - protein, 7 aa, synthetic construct
RGDQVFG

SEQ ID NO: 33603 - protein, 7 aa, synthetic construct
RGDQVLQ

SEQ ID NO: 33604 - protein, 7 aa, synthetic construct
RGDDDIV

SEQ ID NO: 33605 - protein, 7 aa, synthetic construct
RGDRDGG

SEQ ID NO: 33606 - protein, 7 aa, synthetic construct
RGDRGHF

SEQ ID NO: 33607 - protein, 7 aa, synthetic construct
RGDDDVR

SEQ ID NO: 33608 - protein, 7 aa, synthetic construct
RGDRHNA

SEQ ID NO: 33609 - protein, 7 aa, synthetic construct
RGDDEDQ

SEQ ID NO: 33610 - protein, 7 aa, synthetic construct
RGDDEEH

SEQ ID NO: 33611 - protein, 7 aa, synthetic construct
RGDRQIH

SEQ ID NO: 33612 - protein, 7 aa, synthetic construct
RGDRTEE

SEQ ID NO: 33613 - protein, 7 aa, synthetic construct
RGDRVEE

SEQ ID NO: 33614 - protein, 7 aa, synthetic construct
RGDSAEN

SEQ ID NO: 33615 - protein, 7 aa, synthetic construct
RGDSDLV

SEQ ID NO: 33616 - protein, 7 aa, synthetic construct
RGDSFIF

SEQ ID NO: 33617 - protein, 7 aa, synthetic construct
RGDSFQS

SEQ ID NO: 33618 - protein, 7 aa, synthetic construct
RGDSFSG

SEQ ID NO: 33619 - protein, 7 aa, synthetic construct
RGDSGDI

SEQ ID NO: 33620 - protein, 7 aa, synthetic construct
RGDSHLI

SEQ ID NO: 33621 - protein, 7 aa, synthetic construct
RGDDFNQ

SEQ ID NO: 33622 - protein, 7 aa, synthetic construct
RGDDFVD

SEQ ID NO: 33623 - protein, 7 aa, synthetic construct
RGDSQHH

SEQ ID NO: 33624 - protein, 7 aa, synthetic construct
RGDSVIF

SEQ ID NO: 33625 - protein, 7 aa, synthetic construct
RGDDGKH

SEQ ID NO: 33626 - protein, 7 aa, synthetic construct
RGDTALA

SEQ ID NO: 33627 - protein, 7 aa, synthetic construct
RGDTDGK

SEQ ID NO: 33628 - protein, 7 aa, synthetic construct
RGDTFKF

SEQ ID NO: 33629 - protein, 7 aa, synthetic construct
RGDTGHT

SEQ ID NO: 33630 - protein, 7 aa, synthetic construct
RGDTHDT

SEQ ID NO: 33631 - protein, 7 aa, synthetic construct
RGDTHEV

SEQ ID NO: 33632 - protein, 7 aa, synthetic construct
RGDTIFG

SEQ ID NO: 33633 - protein, 7 aa, synthetic construct
RGDTIKF

SEQ ID NO: 33634 - protein, 7 aa, synthetic construct
RGDTING

SEQ ID NO: 33635 - protein, 7 aa, synthetic construct
RGDTKDV

SEQ ID NO: 33636 - protein, 7 aa, synthetic construct
RGDTKSG

SEQ ID NO: 33637 - protein, 7 aa, synthetic construct
RGDTNEL

SEQ ID NO: 33638 - protein, 7 aa, synthetic construct
RGDTNKG

SEQ ID NO: 33639 - protein, 7 aa, synthetic construct
RGDTNVK

SEQ ID NO: 33640 - protein, 7 aa, synthetic construct
RGDTQTV

SEQ ID NO: 33641 - protein, 7 aa, synthetic construct
RGDTRRV

SEQ ID NO: 33642 - protein, 7 aa, synthetic construct
RGDTRVH

SEQ ID NO: 33643 - protein, 7 aa, synthetic construct
RGDTTGT

SEQ ID NO: 33644 - protein, 7 aa, synthetic construct
RGDTTSK

SEQ ID NO: 33645 - protein, 7 aa, synthetic construct
RGDVAHG

SEQ ID NO: 33646 - protein, 7 aa, synthetic construct
RGDVGDQ

SEQ ID NO: 33647 - protein, 7 aa, synthetic construct
RGDVGKA

SEQ ID NO: 33648 - protein, 7 aa, synthetic construct
RGDVGVH

SEQ ID NO: 33649 - protein, 7 aa, synthetic construct
RGDVHFG

SEQ ID NO: 33650 - protein, 7 aa, synthetic construct
RGDVLDH

SEQ ID NO: 33651 - protein, 7 aa, synthetic construct
RGDVNDV

SEQ ID NO: 33652 - protein, 7 aa, synthetic construct
RGDVNGE

SEQ ID NO: 33653 - protein, 7 aa, synthetic construct
RGDVNHL

SEQ ID NO: 33654 - protein, 7 aa, synthetic construct
RGDVNQF

SEQ ID NO: 33655 - protein, 7 aa, synthetic construct
RGDDKGN

SEQ ID NO: 33656 - protein, 7 aa, synthetic construct
RGDVTTL

SEQ ID NO: 33657 - protein, 7 aa, synthetic construct
RGDDKLL

SEQ ID NO: 33658 - protein, 7 aa, synthetic construct
RGDDKNS

SEQ ID NO: 33659 - protein, 7 aa, synthetic construct
RGDDLEV

SEQ ID NO: 33660 - protein, 7 aa, synthetic construct
RGDAEHE

SEQ ID NO: 33661 - protein, 7 aa, synthetic construct
RGDDLLV

SEQ ID NO: 33662 - protein, 7 aa, synthetic construct
RGDDLTN

SEQ ID NO: 33663 - protein, 7 aa, synthetic construct
RGDDNND

SEQ ID NO: 33664 - protein, 7 aa, synthetic construct
RGDDQEK

SEQ ID NO: 33665 - protein, 7 aa, synthetic construct
RGDDQKR

SEQ ID NO: 33666 - protein, 7 aa, synthetic construct
RGDDQQN

SEQ ID NO: 33667 - protein, 7 aa, synthetic construct
RGDDQVT

SEQ ID NO: 33668 - protein, 7 aa, synthetic construct
RGDDSDT

SEQ ID NO: 33669 - protein, 7 aa, synthetic construct
RGDDTSE

SEQ ID NO: 33670 - protein, 7 aa, synthetic construct
RGDDTVT

SEQ ID NO: 33671 - protein, 7 aa, synthetic construct
RGDEALQ

SEQ ID NO: 33672 - protein, 7 aa, synthetic construct
RGDEAQS

SEQ ID NO: 33673 - protein, 7 aa, synthetic construct
RGDEEID

SEQ ID NO: 33674 - protein, 7 aa, synthetic construct
RGDEFEG

SEQ ID NO: 33675 - protein, 7 aa, synthetic construct
RGDEGAA

SEQ ID NO: 33676 - protein, 7 aa, synthetic construct
RGDAFIL

SEQ ID NO: 33677 - protein, 7 aa, synthetic construct
RGDEGKV

SEQ ID NO: 33678 - protein, 7 aa, synthetic construct
RGDEHES

SEQ ID NO: 33679 - protein, 7 aa, synthetic construct
RGDEIAV

SEQ ID NO: 33680 - protein, 7 aa, synthetic construct
RGDEISG

SEQ ID NO: 33681 - protein, 7 aa, synthetic construct
RGDEKDE

SEQ ID NO: 33682 - protein, 7 aa, synthetic construct
RGDEKFF

SEQ ID NO: 33683 - protein, 7 aa, synthetic construct
RGDEKHG

SEQ ID NO: 33684 - protein, 7 aa, synthetic construct
RGDEKTH

SEQ ID NO: 33685 - protein, 7 aa, synthetic construct
RGDEKVS

SEQ ID NO: 33686 - protein, 7 aa, synthetic construct
RGDAFSA

SEQ ID NO: 33687 - protein, 7 aa, synthetic construct
RGDELEN

SEQ ID NO: 33688 - protein, 7 aa, synthetic construct
RGDELSG

SEQ ID NO: 33689 - protein, 7 aa, synthetic construct
RGDENFN

SEQ ID NO: 33690 - protein, 7 aa, synthetic construct
RGDENLL

SEQ ID NO: 33691 - protein, 7 aa, synthetic construct
RGDENSG

SEQ ID NO: 33692 - protein, 7 aa, synthetic construct
RGDEQFI

SEQ ID NO: 33693 - protein, 7 aa, synthetic construct
RGDERAQ

SEQ ID NO: 33694 - protein, 7 aa, synthetic construct
RGDETTA

SEQ ID NO: 33695 - protein, 7 aa, synthetic construct
RGDEVHA

SEQ ID NO: 33696 - protein, 7 aa, synthetic construct
RGDFADI

SEQ ID NO: 33697 - protein, 7 aa, synthetic construct
RGDFDVG

SEQ ID NO: 33698 - protein, 7 aa, synthetic construct
RGDFFFE

SEQ ID NO: 33699 - protein, 7 aa, synthetic construct
RGDFFQE

SEQ ID NO: 33700 - protein, 7 aa, synthetic construct
RGDFLED

SEQ ID NO: 33701 - protein, 7 aa, synthetic construct
RGDFNLV

SEQ ID NO: 33702 - protein, 7 aa, synthetic construct
RGDAHQD

SEQ ID NO: 33703 - protein, 7 aa, synthetic construct
RGDFTAV

SEQ ID NO: 33704 - protein, 7 aa, synthetic construct
RGDAIDK

SEQ ID NO: 33705 - protein, 7 aa, synthetic construct
RGDGDFN

SEQ ID NO: 33706 - protein, 7 aa, synthetic construct
RGDGDNV

SEQ ID NO: 33707 - protein, 7 aa, synthetic construct
RGDAIFF

SEQ ID NO: 33708 - protein, 7 aa, synthetic construct
RGDGELN

SEQ ID NO: 33709 - protein, 7 aa, synthetic construct
RGDGELV

SEQ ID NO: 33710 - protein, 7 aa, synthetic construct
RGDGEQF

SEQ ID NO: 33711 - protein, 7 aa, synthetic construct
RGDGETF

SEQ ID NO: 33712 - protein, 7 aa, synthetic construct
RGDGFTH

SEQ ID NO: 33713 - protein, 7 aa, synthetic construct
RGDGHVQ

SEQ ID NO: 33714 - protein, 7 aa, synthetic construct
RGDGKDS

SEQ ID NO: 33715 - protein, 7 aa, synthetic construct
RGDGKHE

SEQ ID NO: 33716 - protein, 7 aa, synthetic construct
RGDGKIF

SEQ ID NO: 33717 - protein, 7 aa, synthetic construct
RGDGNSI

SEQ ID NO: 33718 - protein, 7 aa, synthetic construct
RGDGQLA

SEQ ID NO: 33719 - protein, 7 aa, synthetic construct
RGDGQQF

SEQ ID NO: 33720 - protein, 7 aa, synthetic construct
RGDGTQH

SEQ ID NO: 33721 - protein, 7 aa, synthetic construct
RGDGVAA

SEQ ID NO: 33722 - protein, 7 aa, synthetic construct
RGDAKLN

SEQ ID NO: 33723 - protein, 7 aa, synthetic construct
RGDHEKG

SEQ ID NO: 33724 - protein, 7 aa, synthetic construct
RGDHETE

SEQ ID NO: 33725 - protein, 7 aa, synthetic construct
RGDHETN

SEQ ID NO: 33726 - protein, 7 aa, synthetic construct
RGDHEVS

SEQ ID NO: 33727 - protein, 7 aa, synthetic construct
RGDHFND

SEQ ID NO: 33728 - protein, 7 aa, synthetic construct
RGDHGDT

SEQ ID NO: 33729 - protein, 7 aa, synthetic construct
RGDHGSD

SEQ ID NO: 33730 - protein, 7 aa, synthetic construct
RGDHHQN

SEQ ID NO: 33731 - protein, 7 aa, synthetic construct
RGDHIIL

SEQ ID NO: 33732 - protein, 7 aa, synthetic construct
RGDHISG

SEQ ID NO: 33733 - protein, 7 aa, synthetic construct
RGDHIVQ

SEQ ID NO: 33734 - protein, 7 aa, synthetic construct
RGDHLEK

SEQ ID NO: 33735 - protein, 7 aa, synthetic construct
RGDHNEE

SEQ ID NO: 33736 - protein, 7 aa, synthetic construct
RGDHQAF

SEQ ID NO: 33737 - protein, 7 aa, synthetic construct
RGDHQAS

SEQ ID NO: 33738 - protein, 7 aa, synthetic construct
RGDHQKD

SEQ ID NO: 33739 - protein, 7 aa, synthetic construct
RGDHRDE

SEQ ID NO: 33740 - protein, 7 aa, synthetic construct
RGDIDIF

SEQ ID NO: 33741 - protein, 7 aa, synthetic construct
RGDIFEL

SEQ ID NO: 33742 - protein, 7 aa, synthetic construct
RGDIFII

SEQ ID NO: 33743 - protein, 7 aa, synthetic construct
RGDIFIT

SEQ ID NO: 33744 - protein, 7 aa, synthetic construct
RGDIGDQ

SEQ ID NO: 33745 - protein, 7 aa, synthetic construct
RGDIGQL

SEQ ID NO: 33746 - protein, 7 aa, synthetic construct
RGDIHHG

SEQ ID NO: 33747 - protein, 7 aa, synthetic construct
RGDIIEV

SEQ ID NO: 33748 - protein, 7 aa, synthetic construct
RGDIIKA

SEQ ID NO: 33749 - protein, 7 aa, synthetic construct
RGDIKQD

SEQ ID NO: 33750 - protein, 7 aa, synthetic construct
RGDIKQT

SEQ ID NO: 33751 - protein, 7 aa, synthetic construct
RGDANTA

SEQ ID NO: 33752 - protein, 7 aa, synthetic construct
RGDILQQ

SEQ ID NO: 33753 - protein, 7 aa, synthetic construct
RGDINDQ

SEQ ID NO: 33754 - protein, 7 aa, synthetic construct
RGDINNF

SEQ ID NO: 33755 - protein, 7 aa, synthetic construct
RGDINSE

SEQ ID NO: 33756 - protein, 7 aa, synthetic construct
RGDANVV

SEQ ID NO: 33757 - protein, 7 aa, synthetic construct
RGDIQGA

SEQ ID NO: 33758 - protein, 7 aa, synthetic construct
RGDIQHS

SEQ ID NO: 33759 - protein, 7 aa, synthetic construct
RGDADAA

SEQ ID NO: 33760 - protein, 7 aa, synthetic construct
RGDAQES

SEQ ID NO: 33761 - protein, 7 aa, synthetic construct
RGDAQET

SEQ ID NO: 33762 - protein, 7 aa, synthetic construct
RGDAADK

SEQ ID NO: 33763 - protein, 7 aa, synthetic construct
RGDKAEF

SEQ ID NO: 33764 - protein, 7 aa, synthetic construct
RGDAQSH

SEQ ID NO: 33765 - protein, 7 aa, synthetic construct
RGDKFQN

SEQ ID NO: 33766 - protein, 7 aa, synthetic construct
RGDKHFD

SEQ ID NO: 33767 - protein, 7 aa, synthetic construct
RGDKHFE

SEQ ID NO: 33768 - protein, 7 aa, synthetic construct
RGDKHIE

SEQ ID NO: 33769 - protein, 7 aa, synthetic construct
RGDKHLT

SEQ ID NO: 33770 - protein, 7 aa, synthetic construct
RGDKILQ

SEQ ID NO: 33771 - protein, 7 aa, synthetic construct
RGDKQSS

SEQ ID NO: 33772 - protein, 7 aa, synthetic construct
RGDARRH

SEQ ID NO: 33773 - protein, 7 aa, synthetic construct
RGDKTAQ

SEQ ID NO: 33774 - protein, 7 aa, synthetic construct
RGDLAEI

SEQ ID NO: 33775 - protein, 7 aa, synthetic construct
RGDLARI

SEQ ID NO: 33776 - protein, 7 aa, synthetic construct
RGDLDIG

SEQ ID NO: 33777 - protein, 7 aa, synthetic construct
RGDASEG

SEQ ID NO: 33778 - protein, 7 aa, synthetic construct
RGDLDLI

SEQ ID NO: 33779 - protein, 7 aa, synthetic construct
RGDLDTF

SEQ ID NO: 33780 - protein, 7 aa, synthetic construct
RGDLEFE

SEQ ID NO: 33781 - protein, 7 aa, synthetic construct
RGDLELG

SEQ ID NO: 33782 - protein, 7 aa, synthetic construct
RGDLFKD

SEQ ID NO: 33783 - protein, 7 aa, synthetic construct
RGDLFKE

SEQ ID NO: 33784 - protein, 7 aa, synthetic construct
RGDLGGQ

SEQ ID NO: 33785 - protein, 7 aa, synthetic construct
RGDLGLA

SEQ ID NO: 33786 - protein, 7 aa, synthetic construct
RGDLHIA

SEQ ID NO: 33787 - protein, 7 aa, synthetic construct
RGDLHIN

SEQ ID NO: 33788 - protein, 7 aa, synthetic construct
RGDLIFQ

SEQ ID NO: 33789 - protein, 7 aa, synthetic construct
RGDASNT

SEQ ID NO: 33790 - protein, 7 aa, synthetic construct
RGDLLEK

SEQ ID NO: 33791 - protein, 7 aa, synthetic construct
RGDLLKL

SEQ ID NO: 33792 - protein, 7 aa, synthetic construct
RGDLNHE

SEQ ID NO: 33793 - protein, 7 aa, synthetic construct
RGDLNLF

SEQ ID NO: 33794 - protein, 7 aa, synthetic construct
RGDLQIR

SEQ ID NO: 33795 - protein, 7 aa, synthetic construct
RGDADGN

SEQ ID NO: 33796 - protein, 7 aa, synthetic construct
RGDLRNF

SEQ ID NO: 33797 - protein, 7 aa, synthetic construct
RGDLVDH

SEQ ID NO: 33798 - protein, 7 aa, synthetic construct
RGDLVER

SEQ ID NO: 33799 - protein, 7 aa, synthetic construct
RGDNALQ

SEQ ID NO: 33800 - protein, 7 aa, synthetic construct
RGDNDGN

SEQ ID NO: 33801 - protein, 7 aa, synthetic construct
RGDNDKV

SEQ ID NO: 33802 - protein, 7 aa, synthetic construct
RGDADHK

SEQ ID NO: 33803 - protein, 7 aa, synthetic construct
RGDNEEV

SEQ ID NO: 33804 - protein, 7 aa, synthetic construct
RGDNEVE

SEQ ID NO: 33805 - protein, 7 aa, synthetic construct
RGDNFAK

SEQ ID NO: 33806 - protein, 7 aa, synthetic construct
RGDNFLD

SEQ ID NO: 33807 - protein, 7 aa, synthetic construct
RGDNFQE

SEQ ID NO: 33808 - protein, 7 aa, synthetic construct
RGDNGKG

SEQ ID NO: 33809 - protein, 7 aa, synthetic construct
RGDNGNA

SEQ ID NO: 33810 - protein, 7 aa, synthetic construct
RGDNGNL

SEQ ID NO: 33811 - protein, 7 aa, synthetic construct
RGDNIVI

SEQ ID NO: 33812 - protein, 7 aa, synthetic construct
RGDNKII

SEQ ID NO: 33813 - protein, 7 aa, synthetic construct
RGDNLET

SEQ ID NO: 33814 - protein, 7 aa, synthetic construct
RGDNNAV

SEQ ID NO: 33815 - protein, 7 aa, synthetic construct
RGDNQLV

SEQ ID NO: 33816 - protein, 7 aa, synthetic construct
RGDNQVF

SEQ ID NO: 33817 - protein, 7 aa, synthetic construct
RGDNSEF

SEQ ID NO: 33818 - protein, 7 aa, synthetic construct
RGDNSFF

SEQ ID NO: 33819 - protein, 7 aa, synthetic construct
RGDNSGE

SEQ ID NO: 33820 - protein, 7 aa, synthetic construct
RGDNTIK

SEQ ID NO: 33821 - protein, 7 aa, synthetic construct
RGDQADH

SEQ ID NO: 33822 - protein, 7 aa, synthetic construct
RGDQAEE

SEQ ID NO: 33823 - protein, 7 aa, synthetic construct
RGDQDFN

SEQ ID NO: 33824 - protein, 7 aa, synthetic construct
RGDQDVN

SEQ ID NO: 33825 - protein, 7 aa, synthetic construct
RGDQEGD

SEQ ID NO: 33826 - protein, 7 aa, synthetic construct
RGDQENA

SEQ ID NO: 33827 - protein, 7 aa, synthetic construct
RGDQETG

SEQ ID NO: 33828 - protein, 7 aa, synthetic construct
RGDQFLN

SEQ ID NO: 33829 - protein, 7 aa, synthetic construct
RGDQHDH

SEQ ID NO: 33830 - protein, 7 aa, synthetic construct
RGDDALE

SEQ ID NO: 33831 - protein, 7 aa, synthetic construct
RGDQHVH

SEQ ID NO: 33832 - protein, 7 aa, synthetic construct
RGDQIEH

SEQ ID NO: 33833 - protein, 7 aa, synthetic construct
RGDQIVV

SEQ ID NO: 33834 - protein, 7 aa, synthetic construct
RGDDASA

SEQ ID NO: 33835 - protein, 7 aa, synthetic construct
RGDQLAS

SEQ ID NO: 33836 - protein, 7 aa, synthetic construct
RGDQQEQ

SEQ ID NO: 33837 - protein, 7 aa, synthetic construct
RGDQQVD

SEQ ID NO: 33838 - protein, 7 aa, synthetic construct
RGDQTII

SEQ ID NO: 33839 - protein, 7 aa, synthetic construct
RGDADNN

SEQ ID NO: 33840 - protein, 7 aa, synthetic construct
RGDQVRD

SEQ ID NO: 33841 - protein, 7 aa, synthetic construct
RGDRDNE

SEQ ID NO: 33842 - protein, 7 aa, synthetic construct
RGDREDT

SEQ ID NO: 33843 - protein, 7 aa, synthetic construct
RGDREQA

SEQ ID NO: 33844 - protein, 7 aa, synthetic construct
RGDREQD

SEQ ID NO: 33845 - protein, 7 aa, synthetic construct
RGDRERA

SEQ ID NO: 33846 - protein, 7 aa, synthetic construct
RGDRESG

SEQ ID NO: 33847 - protein, 7 aa, synthetic construct
RGDDDVL

SEQ ID NO: 33848 - protein, 7 aa, synthetic construct
RGDRHLQ

SEQ ID NO: 33849 - protein, 7 aa, synthetic construct
RGDRQQD

SEQ ID NO: 33850 - protein, 7 aa, synthetic construct
RGDRTIG

SEQ ID NO: 33851 - protein, 7 aa, synthetic construct
RGDRVVD

SEQ ID NO: 33852 - protein, 7 aa, synthetic construct
RGDSDAS

SEQ ID NO: 33853 - protein, 7 aa, synthetic construct
RGDSEFV

SEQ ID NO: 33854 - protein, 7 aa, synthetic construct
RGDSEQD

SEQ ID NO: 33855 - protein, 7 aa, synthetic construct
RGDSERT

SEQ ID NO: 33856 - protein, 7 aa, synthetic construct
RGDSFHD

SEQ ID NO: 33857 - protein, 7 aa, synthetic construct
RGDSFKS

SEQ ID NO: 33858 - protein, 7 aa, synthetic construct
RGDSFQQ

SEQ ID NO: 33859 - protein, 7 aa, synthetic construct
RGDSHFH

SEQ ID NO: 33860 - protein, 7 aa, synthetic construct
RGDSIEH

SEQ ID NO: 33861 - protein, 7 aa, synthetic construct
RGDSIIN

SEQ ID NO: 33862 - protein, 7 aa, synthetic construct
RGDSLID

SEQ ID NO: 33863 - protein, 7 aa, synthetic construct
RGDSVAH

SEQ ID NO: 33864 - protein, 7 aa, synthetic construct
RGDDGKV

SEQ ID NO: 33865 - protein, 7 aa, synthetic construct
RGDADVH

SEQ ID NO: 33866 - protein, 7 aa, synthetic construct
RGDTDKI

SEQ ID NO: 33867 - protein, 7 aa, synthetic construct
RGDTDKL

SEQ ID NO: 33868 - protein, 7 aa, synthetic construct
RGDTDNS

SEQ ID NO: 33869 - protein, 7 aa, synthetic construct
RGDDGQD

SEQ ID NO: 33870 - protein, 7 aa, synthetic construct
RGDTEFN

SEQ ID NO: 33871 - protein, 7 aa, synthetic construct
RGDDGRA

SEQ ID NO: 33872 - protein, 7 aa, synthetic construct
RGDTEQK

SEQ ID NO: 33873 - protein, 7 aa, synthetic construct
RGDDGSF

SEQ ID NO: 33874 - protein, 7 aa, synthetic construct
RGDTFGN

SEQ ID NO: 33875 - protein, 7 aa, synthetic construct
RGDDGTQ

SEQ ID NO: 33876 - protein, 7 aa, synthetic construct
RGDTHFD

SEQ ID NO: 33877 - protein, 7 aa, synthetic construct
RGDTIGF

SEQ ID NO: 33878 - protein, 7 aa, synthetic construct
RGDTIGK

SEQ ID NO: 33879 - protein, 7 aa, synthetic construct
RGDDHFK

SEQ ID NO: 33880 - protein, 7 aa, synthetic construct
RGDDHGI

SEQ ID NO: 33881 - protein, 7 aa, synthetic construct
RGDAEAK

SEQ ID NO: 33882 - protein, 7 aa, synthetic construct
RGDTLRE

SEQ ID NO: 33883 - protein, 7 aa, synthetic construct
RGDTNLR

SEQ ID NO: 33884 - protein, 7 aa, synthetic construct
RGDTNTH

SEQ ID NO: 33885 - protein, 7 aa, synthetic construct
RGDTSKF

SEQ ID NO: 33886 - protein, 7 aa, synthetic construct
RGDTTFK

SEQ ID NO: 33887 - protein, 7 aa, synthetic construct
RGDDHTF

SEQ ID NO: 33888 - protein, 7 aa, synthetic construct
RGDTVHD

SEQ ID NO: 33889 - protein, 7 aa, synthetic construct
RGDTVHG

SEQ ID NO: 33890 - protein, 7 aa, synthetic construct
RGDVATG

SEQ ID NO: 33891 - protein, 7 aa, synthetic construct
RGDVDFI

SEQ ID NO: 33892 - protein, 7 aa, synthetic construct
RGDVDSD

SEQ ID NO: 33893 - protein, 7 aa, synthetic construct
RGDVEDH

SEQ ID NO: 33894 - protein, 7 aa, synthetic construct
RGDVEFG

SEQ ID NO: 33895 - protein, 7 aa, synthetic construct
RGDAEDS

SEQ ID NO: 33896 - protein, 7 aa, synthetic construct
RGDVFNA

SEQ ID NO: 33897 - protein, 7 aa, synthetic construct
RGDVGFE

SEQ ID NO: 33898 - protein, 7 aa, synthetic construct
RGDVGKH

SEQ ID NO: 33899 - protein, 7 aa, synthetic construct
RGDVHRE

SEQ ID NO: 33900 - protein, 7 aa, synthetic construct
RGDVKAG

SEQ ID NO: 33901 - protein, 7 aa, synthetic construct
RGDDIQT

SEQ ID NO: 33902 - protein, 7 aa, synthetic construct
RGDVNIS

SEQ ID NO: 33903 - protein, 7 aa, synthetic construct
RGDVQDF

SEQ ID NO: 33904 - protein, 7 aa, synthetic construct
RGDVQIF

SEQ ID NO: 33905 - protein, 7 aa, synthetic construct
RGDVSFE

SEQ ID NO: 33906 - protein, 7 aa, synthetic construct
RGDVSIA

SEQ ID NO: 33907 - protein, 7 aa, synthetic construct
RGDDKGE

SEQ ID NO: 33908 - protein, 7 aa, synthetic construct
RGDVTAV

SEQ ID NO: 33909 - protein, 7 aa, synthetic construct
RGDAEFI

SEQ ID NO: 33910 - protein, 7 aa, synthetic construct
RGDVTIF

SEQ ID NO: 33911 - protein, 7 aa, synthetic construct
RGDDLTG

SEQ ID NO: 33912 - protein, 7 aa, synthetic construct
RGDDLVA

SEQ ID NO: 33913 - protein, 7 aa, synthetic construct
RGDDNAN

SEQ ID NO: 33914 - protein, 7 aa, synthetic construct
RGDDNHE

SEQ ID NO: 33915 - protein, 7 aa, synthetic construct
RGDDNKQ

SEQ ID NO: 33916 - protein, 7 aa, synthetic construct
RGDDNLR

SEQ ID NO: 33917 - protein, 7 aa, synthetic construct
RGDDNVA

SEQ ID NO: 33918 - protein, 7 aa, synthetic construct
RGDDQAE

SEQ ID NO: 33919 - protein, 7 aa, synthetic construct
RGDDRLQ

SEQ ID NO: 33920 - protein, 7 aa, synthetic construct
RGDDSDR

SEQ ID NO: 33921 - protein, 7 aa, synthetic construct
RGDDSRH

SEQ ID NO: 33922 - protein, 7 aa, synthetic construct
RGDDVQG

SEQ ID NO: 33923 - protein, 7 aa, synthetic construct
RGDEASN

SEQ ID NO: 33924 - protein, 7 aa, synthetic construct
RGDEDVE

SEQ ID NO: 33925 - protein, 7 aa, synthetic construct
RGDEETG

SEQ ID NO: 33926 - protein, 7 aa, synthetic construct
RGDEFIK

SEQ ID NO: 33927 - protein, 7 aa, synthetic construct
RGDEFQE

SEQ ID NO: 33928 - protein, 7 aa, synthetic construct
RGDEGEK

SEQ ID NO: 33929 - protein, 7 aa, synthetic construct
RGDEHLE

SEQ ID NO: 33930 - protein, 7 aa, synthetic construct
RGDEIVV

SEQ ID NO: 33931 - protein, 7 aa, synthetic construct
RGDELET

SEQ ID NO: 33932 - protein, 7 aa, synthetic construct
RGDELFG

SEQ ID NO: 33933 - protein, 7 aa, synthetic construct
RGDAFSN

SEQ ID NO: 33934 - protein, 7 aa, synthetic construct
RGDENND

SEQ ID NO: 33935 - protein, 7 aa, synthetic construct
RGDAAIA

SEQ ID NO: 33936 - protein, 7 aa, synthetic construct
RGDEQVL

SEQ ID NO: 33937 - protein, 7 aa, synthetic construct
RGDERHD

SEQ ID NO: 33938 - protein, 7 aa, synthetic construct
RGDERNH

SEQ ID NO: 33939 - protein, 7 aa, synthetic construct
RGDESAE

SEQ ID NO: 33940 - protein, 7 aa, synthetic construct
RGDESGQ

SEQ ID NO: 33941 - protein, 7 aa, synthetic construct
RGDETAH

SEQ ID NO: 33942 - protein, 7 aa, synthetic construct
RGDETFR

SEQ ID NO: 33943 - protein, 7 aa, synthetic construct
RGDETQH

SEQ ID NO: 33944 - protein, 7 aa, synthetic construct
RGDETRT

SEQ ID NO: 33945 - protein, 7 aa, synthetic construct
RGDEVDV

SEQ ID NO: 33946 - protein, 7 aa, synthetic construct
RGDEVTG

SEQ ID NO: 33947 - protein, 7 aa, synthetic construct
RGDFAAE

SEQ ID NO: 33948 - protein, 7 aa, synthetic construct
RGDFDKS

SEQ ID NO: 33949 - protein, 7 aa, synthetic construct
RGDFDSF

SEQ ID NO: 33950 - protein, 7 aa, synthetic construct
RGDFEDQ

SEQ ID NO: 33951 - protein, 7 aa, synthetic construct
RGDFELG

SEQ ID NO: 33952 - protein, 7 aa, synthetic construct
RGDFEQQ

SEQ ID NO: 33953 - protein, 7 aa, synthetic construct
RGDFGIF

SEQ ID NO: 33954 - protein, 7 aa, synthetic construct
RGDFLDG

SEQ ID NO: 33955 - protein, 7 aa, synthetic construct
RGDFSIF

SEQ ID NO: 33956 - protein, 7 aa, synthetic construct
RGDFTII

SEQ ID NO: 33957 - protein, 7 aa, synthetic construct
RGDGDTD

SEQ ID NO: 33958 - protein, 7 aa, synthetic construct
RGDAIFT

SEQ ID NO: 33959 - protein, 7 aa, synthetic construct
RGDGENV

SEQ ID NO: 33960 - protein, 7 aa, synthetic construct
RGDAIGK

SEQ ID NO: 33961 - protein, 7 aa, synthetic construct
RGDGFEF

SEQ ID NO: 33962 - protein, 7 aa, synthetic construct
RGDGFSN

SEQ ID NO: 33963 - protein, 7 aa, synthetic construct
RGDGGDE

SEQ ID NO: 33964 - protein, 7 aa, synthetic construct
RGDGHGL

SEQ ID NO: 33965 - protein, 7 aa, synthetic construct
RGDGIER

SEQ ID NO: 33966 - protein, 7 aa, synthetic construct
RGDAAQA

SEQ ID NO: 33967 - protein, 7 aa, synthetic construct
RGDGSTQ

SEQ ID NO: 33968 - protein, 7 aa, synthetic construct
RGDGTQA

SEQ ID NO: 33969 - protein, 7 aa, synthetic construct
RGDGVEL

SEQ ID NO: 33970 - protein, 7 aa, synthetic construct
RGDGVTA

SEQ ID NO: 33971 - protein, 7 aa, synthetic construct
RGDHDRS

SEQ ID NO: 33972 - protein, 7 aa, synthetic construct
RGDHGDH

SEQ ID NO: 33973 - protein, 7 aa, synthetic construct
RGDHGRR

SEQ ID NO: 33974 - protein, 7 aa, synthetic construct
RGDALFQ

SEQ ID NO: 33975 - protein, 7 aa, synthetic construct
RGDHNLN

SEQ ID NO: 33976 - protein, 7 aa, synthetic construct
RGDHNVS

SEQ ID NO: 33977 - protein, 7 aa, synthetic construct
RGDHSEE

SEQ ID NO: 33978 - protein, 7 aa, synthetic construct
RGDHSLE

SEQ ID NO: 33979 - protein, 7 aa, synthetic construct
RGDHSVG

SEQ ID NO: 33980 - protein, 7 aa, synthetic construct
RGDHTEV

SEQ ID NO: 33981 - protein, 7 aa, synthetic construct
RGDALTD

SEQ ID NO: 33982 - protein, 7 aa, synthetic construct
RGDALTV

SEQ ID NO: 33983 - protein, 7 aa, synthetic construct
RGDIAEL

SEQ ID NO: 33984 - protein, 7 aa, synthetic construct
RGDANAF

SEQ ID NO: 33985 - protein, 7 aa, synthetic construct
RGDIAFE

SEQ ID NO: 33986 - protein, 7 aa, synthetic construct
RGDIANL

SEQ ID NO: 33987 - protein, 7 aa, synthetic construct
RGDIEKG

SEQ ID NO: 33988 - protein, 7 aa, synthetic construct
RGDIEQS

SEQ ID NO: 33989 - protein, 7 aa, synthetic construct
RGDIFEK

SEQ ID NO: 33990 - protein, 7 aa, synthetic construct
RGDANHG

SEQ ID NO: 33991 - protein, 7 aa, synthetic construct
RGDIHIN

SEQ ID NO: 33992 - protein, 7 aa, synthetic construct
RGDIIAQ

SEQ ID NO: 33993 - protein, 7 aa, synthetic construct
RGDANNL

SEQ ID NO: 33994 - protein, 7 aa, synthetic construct
RGDIKDG

SEQ ID NO: 33995 - protein, 7 aa, synthetic construct
RGDILHA

SEQ ID NO: 33996 - protein, 7 aa, synthetic construct
RGDILIE

SEQ ID NO: 33997 - protein, 7 aa, synthetic construct
RGDINVN

SEQ ID NO: 33998 - protein, 7 aa, synthetic construct
RGDAQDD

SEQ ID NO: 33999 - protein, 7 aa, synthetic construct
RGDISDI

SEQ ID NO: 34000 - protein, 7 aa, synthetic construct
RGDISSE

SEQ ID NO: 34001 - protein, 7 aa, synthetic construct
RGDITID

SEQ ID NO: 34002 - protein, 7 aa, synthetic construct
RGDITQL

SEQ ID NO: 34003 - protein, 7 aa, synthetic construct
RGDKDAH

SEQ ID NO: 34004 - protein, 7 aa, synthetic construct
RGDKDHN

SEQ ID NO: 34005 - protein, 7 aa, synthetic construct
RGDKEQS

SEQ ID NO: 34006 - protein, 7 aa, synthetic construct
RGDKETS

SEQ ID NO: 34007 - protein, 7 aa, synthetic construct
RGDKFEF

SEQ ID NO: 34008 - protein, 7 aa, synthetic construct
RGDKFHH

SEQ ID NO: 34009 - protein, 7 aa, synthetic construct
RGDKFIE

SEQ ID NO: 34010 - protein, 7 aa, synthetic construct
RGDKGAD

SEQ ID NO: 34011 - protein, 7 aa, synthetic construct
RGDKHQA

SEQ ID NO: 34012 - protein, 7 aa, synthetic construct
RGDKIDN

SEQ ID NO: 34013 - protein, 7 aa, synthetic construct
RGDKILV

SEQ ID NO: 34014 - protein, 7 aa, synthetic construct
RGDKKLD

SEQ ID NO: 34015 - protein, 7 aa, synthetic construct
RGDKLDE

SEQ ID NO: 34016 - protein, 7 aa, synthetic construct
RGDARIE

SEQ ID NO: 34017 - protein, 7 aa, synthetic construct
RGDKQDF

SEQ ID NO: 34018 - protein, 7 aa, synthetic construct
RGDLAKH

SEQ ID NO: 34019 - protein, 7 aa, synthetic construct
RGDLDAR

SEQ ID NO: 34020 - protein, 7 aa, synthetic construct
RGDLDND

SEQ ID NO: 34021 - protein, 7 aa, synthetic construct
RGDLDVE

SEQ ID NO: 34022 - protein, 7 aa, synthetic construct
RGDLFND

SEQ ID NO: 34023 - protein, 7 aa, synthetic construct
RGDLGDN

SEQ ID NO: 34024 - protein, 7 aa, synthetic construct
RGDASIV

SEQ ID NO: 34025 - protein, 7 aa, synthetic construct
RGDLIDL

SEQ ID NO: 34026 - protein, 7 aa, synthetic construct
RGDLKSL

SEQ ID NO: 34027 - protein, 7 aa, synthetic construct
RGDLKVF

SEQ ID NO: 34028 - protein, 7 aa, synthetic construct
RGDLLIN

SEQ ID NO: 34029 - protein, 7 aa, synthetic construct
RGDLQAE

SEQ ID NO: 34030 - protein, 7 aa, synthetic construct
RGDLQHL

SEQ ID NO: 34031 - protein, 7 aa, synthetic construct
RGDLQKE

SEQ ID NO: 34032 - protein, 7 aa, synthetic construct
RGDLSES

SEQ ID NO: 34033 - protein, 7 aa, synthetic construct
RGDLSLF

SEQ ID NO: 34034 - protein, 7 aa, synthetic construct
RGDLSSL

SEQ ID NO: 34035 - protein, 7 aa, synthetic construct
RGDLTLI

SEQ ID NO: 34036 - protein, 7 aa, synthetic construct
RGDLTQS

SEQ ID NO: 34037 - protein, 7 aa, synthetic construct
RGDLTRL

SEQ ID NO: 34038 - protein, 7 aa, synthetic construct
RGDLVGE

SEQ ID NO: 34039 - protein, 7 aa, synthetic construct
RGDNALG

SEQ ID NO: 34040 - protein, 7 aa, synthetic construct
RGDNASA

SEQ ID NO: 34041 - protein, 7 aa, synthetic construct
RGDNDRQ

SEQ ID NO: 34042 - protein, 7 aa, synthetic construct
RGDNEAN

SEQ ID NO: 34043 - protein, 7 aa, synthetic construct
RGDNEFS

SEQ ID NO: 34044 - protein, 7 aa, synthetic construct
RGDATTN

SEQ ID NO: 34045 - protein, 7 aa, synthetic construct
RGDNGDR

SEQ ID NO: 34046 - protein, 7 aa, synthetic construct
RGDNHAG

SEQ ID NO: 34047 - protein, 7 aa, synthetic construct
RGDNHDS

SEQ ID NO: 34048 - protein, 7 aa, synthetic construct
RGDNHTS

SEQ ID NO: 34049 - protein, 7 aa, synthetic construct
RGDAVFF

SEQ ID NO: 34050 - protein, 7 aa, synthetic construct
RGDNLAR

SEQ ID NO: 34051 - protein, 7 aa, synthetic construct
RGDNLNL

SEQ ID NO: 34052 - protein, 7 aa, synthetic construct
RGDNLQG

SEQ ID NO: 34053 - protein, 7 aa, synthetic construct
RGDNNQV

SEQ ID NO: 34054 - protein, 7 aa, synthetic construct
RGDAVLL

SEQ ID NO: 34055 - protein, 7 aa, synthetic construct
RGDNQVQ

SEQ ID NO: 34056 - protein, 7 aa, synthetic construct
RGDNRIQ

SEQ ID NO: 34057 - protein, 7 aa, synthetic construct
RGDNSEI

SEQ ID NO: 34058 - protein, 7 aa, synthetic construct
RGDNTDK

SEQ ID NO: 34059 - protein, 7 aa, synthetic construct
RGDQAQI

SEQ ID NO: 34060 - protein, 7 aa, synthetic construct
RGDQDFG

SEQ ID NO: 34061 - protein, 7 aa, synthetic construct
RGDQDNK

SEQ ID NO: 34062 - protein, 7 aa, synthetic construct
RGDDAEK

SEQ ID NO: 34063 - protein, 7 aa, synthetic construct
RGDDAFA

SEQ ID NO: 34064 - protein, 7 aa, synthetic construct
RGDQEGS

SEQ ID NO: 34065 - protein, 7 aa, synthetic construct
RGDQEHG

SEQ ID NO: 34066 - protein, 7 aa, synthetic construct
RGDQENG

SEQ ID NO: 34067 - protein, 7 aa, synthetic construct
RGDQFDS

SEQ ID NO: 34068 - protein, 7 aa, synthetic construct
RGDQGQE

SEQ ID NO: 34069 - protein, 7 aa, synthetic construct
RGDDALH

SEQ ID NO: 34070 - protein, 7 aa, synthetic construct
RGDQHTH

SEQ ID NO: 34071 - protein, 7 aa, synthetic construct
RGDQITE

SEQ ID NO: 34072 - protein, 7 aa, synthetic construct
RGDQKDA

SEQ ID NO: 34073 - protein, 7 aa, synthetic construct
RGDQKEQ

SEQ ID NO: 34074 - protein, 7 aa, synthetic construct
RGDQQHA

SEQ ID NO: 34075 - protein, 7 aa, synthetic construct
RGDQQTF

SEQ ID NO: 34076 - protein, 7 aa, synthetic construct
RGDQRDE

SEQ ID NO: 34077 - protein, 7 aa, synthetic construct
RGDQTED

SEQ ID NO: 34078 - protein, 7 aa, synthetic construct
RGDQVHH

SEQ ID NO: 34079 - protein, 7 aa, synthetic construct
RGDQVIS

SEQ ID NO: 34080 - protein, 7 aa, synthetic construct
RGDDDKN

SEQ ID NO: 34081 - protein, 7 aa, synthetic construct
RGDDDNE

SEQ ID NO: 34082 - protein, 7 aa, synthetic construct
RGDREVN

SEQ ID NO: 34083 - protein, 7 aa, synthetic construct
RGDRFVA

SEQ ID NO: 34084 - protein, 7 aa, synthetic construct
RGDRHEG

SEQ ID NO: 34085 - protein, 7 aa, synthetic construct
RGDDEKH

SEQ ID NO: 34086 - protein, 7 aa, synthetic construct
RGDDERE

SEQ ID NO: 34087 - protein, 7 aa, synthetic construct
RGDSAFN

SEQ ID NO: 34088 - protein, 7 aa, synthetic construct
RGDSEHT

SEQ ID NO: 34089 - protein, 7 aa, synthetic construct
RGDSEKG

SEQ ID NO: 34090 - protein, 7 aa, synthetic construct
RGDSEVL

SEQ ID NO: 34091 - protein, 7 aa, synthetic construct
RGDSFAG

SEQ ID NO: 34092 - protein, 7 aa, synthetic construct
RGDSFAN

SEQ ID NO: 34093 - protein, 7 aa, synthetic construct
RGDSFLF

SEQ ID NO: 34094 - protein, 7 aa, synthetic construct
RGDSHLK

SEQ ID NO: 34095 - protein, 7 aa, synthetic construct
RGDSKFE

SEQ ID NO: 34096 - protein, 7 aa, synthetic construct
RGDSLIE

SEQ ID NO: 34097 - protein, 7 aa, synthetic construct
RGDSLLQ

SEQ ID NO: 34098 - protein, 7 aa, synthetic construct
RGDSQDH

SEQ ID NO: 34099 - protein, 7 aa, synthetic construct
RGDSQFN

SEQ ID NO: 34100 - protein, 7 aa, synthetic construct
RGDSQVG

SEQ ID NO: 34101 - protein, 7 aa, synthetic construct
RGDADTT

SEQ ID NO: 34102 - protein, 7 aa, synthetic construct
RGDSTHG

SEQ ID NO: 34103 - protein, 7 aa, synthetic construct
RGDSTIF

SEQ ID NO: 34104 - protein, 7 aa, synthetic construct
RGDSTVI

SEQ ID NO: 34105 - protein, 7 aa, synthetic construct
RGDSVGH

SEQ ID NO: 34106 - protein, 7 aa, synthetic construct
RGDSVHS

SEQ ID NO: 34107 - protein, 7 aa, synthetic construct
RGDTDLT

SEQ ID NO: 34108 - protein, 7 aa, synthetic construct
RGDTEGT

SEQ ID NO: 34109 - protein, 7 aa, synthetic construct
RGDTEVI

SEQ ID NO: 34110 - protein, 7 aa, synthetic construct
RGDTFDS

SEQ ID NO: 34111 - protein, 7 aa, synthetic construct
RGDTFHA

SEQ ID NO: 34112 - protein, 7 aa, synthetic construct
RGDTHSA

SEQ ID NO: 34113 - protein, 7 aa, synthetic construct
RGDTHTG

SEQ ID NO: 34114 - protein, 7 aa, synthetic construct
RGDTIAF

SEQ ID NO: 34115 - protein, 7 aa, synthetic construct
RGDTINS

SEQ ID NO: 34116 - protein, 7 aa, synthetic construct
RGDTISA

SEQ ID NO: 34117 - protein, 7 aa, synthetic construct
RGDTLQG

SEQ ID NO: 34118 - protein, 7 aa, synthetic construct
RGDTLRH

SEQ ID NO: 34119 - protein, 7 aa, synthetic construct
RGDTQGQ

SEQ ID NO: 34120 - protein, 7 aa, synthetic construct
RGDTQLA

SEQ ID NO: 34121 - protein, 7 aa, synthetic construct
RGDTSER

SEQ ID NO: 34122 - protein, 7 aa, synthetic construct
RGDTSIG

SEQ ID NO: 34123 - protein, 7 aa, synthetic construct
RGDDHRE

SEQ ID NO: 34124 - protein, 7 aa, synthetic construct
RGDVAIS

SEQ ID NO: 34125 - protein, 7 aa, synthetic construct
RGDVAIT

SEQ ID NO: 34126 - protein, 7 aa, synthetic construct
RGDVDIV

SEQ ID NO: 34127 - protein, 7 aa, synthetic construct
RGDVDKS

SEQ ID NO: 34128 - protein, 7 aa, synthetic construct
RGDVEEI

SEQ ID NO: 34129 - protein, 7 aa, synthetic construct
RGDVGIV

SEQ ID NO: 34130 - protein, 7 aa, synthetic construct
RGDDIKH

SEQ ID NO: 34131 - protein, 7 aa, synthetic construct
RGDVGVL

SEQ ID NO: 34132 - protein, 7 aa, synthetic construct
RGDDIKR

SEQ ID NO: 34133 - protein, 7 aa, synthetic construct
RGDVHLN

SEQ ID NO: 34134 - protein, 7 aa, synthetic construct
RGDVNAD

SEQ ID NO: 34135 - protein, 7 aa, synthetic construct
RGDVQTA

SEQ ID NO: 34136 - protein, 7 aa, synthetic construct
RGDAEFG

SEQ ID NO: 34137 - protein, 7 aa, synthetic construct
RGDDKFR

SEQ ID NO: 34138 - protein, 7 aa, synthetic construct
RGDVSQG

SEQ ID NO: 34139 - protein, 7 aa, synthetic construct
RGDDKGF

SEQ ID NO: 34140 - protein, 7 aa, synthetic construct
RGDVTFQ

SEQ ID NO: 34141 - protein, 7 aa, synthetic construct
RGDVVEH

SEQ ID NO: 34142 - protein, 7 aa, synthetic construct
RGDDKKL

SEQ ID NO: 34143 - protein, 7 aa, synthetic construct
RGDDKSQ

SEQ ID NO: 34144 - protein, 7 aa, synthetic construct
RGDDLFF

SEQ ID NO: 34145 - protein, 7 aa, synthetic construct
RGDDLFI

SEQ ID NO: 34146 - protein, 7 aa, synthetic construct
RGDDLKV

SEQ ID NO: 34147 - protein, 7 aa, synthetic construct
RGDDNGI

SEQ ID NO: 34148 - protein, 7 aa, synthetic construct
RGDDNTT

SEQ ID NO: 34149 - protein, 7 aa, synthetic construct
RGDDQQD

SEQ ID NO: 34150 - protein, 7 aa, synthetic construct
RGDDRQE

SEQ ID NO: 34151 - protein, 7 aa, synthetic construct
RGDDRVF

SEQ ID NO: 34152 - protein, 7 aa, synthetic construct
RGDDSAV

SEQ ID NO: 34153 - protein, 7 aa, synthetic construct
RGDDSFI

SEQ ID NO: 34154 - protein, 7 aa, synthetic construct
RGDDSTH

SEQ ID NO: 34155 - protein, 7 aa, synthetic construct
RGDDTTL

SEQ ID NO: 34156 - protein, 7 aa, synthetic construct
RGDDVTF

SEQ ID NO: 34157 - protein, 7 aa, synthetic construct
RGDEDAV

SEQ ID NO: 34158 - protein, 7 aa, synthetic construct
RGDEDHN

SEQ ID NO: 34159 - protein, 7 aa, synthetic construct
RGDEDVV

SEQ ID NO: 34160 - protein, 7 aa, synthetic construct
RGDEEIA

SEQ ID NO: 34161 - protein, 7 aa, synthetic construct
RGDEEKR

SEQ ID NO: 34162 - protein, 7 aa, synthetic construct
RGDEENH

SEQ ID NO: 34163 - protein, 7 aa, synthetic construct
RGDEFAQ

SEQ ID NO: 34164 - protein, 7 aa, synthetic construct
RGDEFQI

SEQ ID NO: 34165 - protein, 7 aa, synthetic construct
RGDEFQV

SEQ ID NO: 34166 - protein, 7 aa, synthetic construct
RGDEFSV

SEQ ID NO: 34167 - protein, 7 aa, synthetic construct
RGDAFHT

SEQ ID NO: 34168 - protein, 7 aa, synthetic construct
RGDEGIF

SEQ ID NO: 34169 - protein, 7 aa, synthetic construct
RGDEHAS

SEQ ID NO: 34170 - protein, 7 aa, synthetic construct
RGDEHHT

SEQ ID NO: 34171 - protein, 7 aa, synthetic construct
RGDEKRI

SEQ ID NO: 34172 - protein, 7 aa, synthetic construct
RGDENIF

SEQ ID NO: 34173 - protein, 7 aa, synthetic construct
RGDERRQ

SEQ ID NO: 34174 - protein, 7 aa, synthetic construct
RGDESDG

SEQ ID NO: 34175 - protein, 7 aa, synthetic construct
RGDESRK

SEQ ID NO: 34176 - protein, 7 aa, synthetic construct
RGDESSL

SEQ ID NO: 34177 - protein, 7 aa, synthetic construct
RGDETIG

SEQ ID NO: 34178 - protein, 7 aa, synthetic construct
RGDETQQ

SEQ ID NO: 34179 - protein, 7 aa, synthetic construct
RGDEVKK

SEQ ID NO: 34180 - protein, 7 aa, synthetic construct
RGDFDEF

SEQ ID NO: 34181 - protein, 7 aa, synthetic construct
RGDFDLI

SEQ ID NO: 34182 - protein, 7 aa, synthetic construct
RGDFDQA

SEQ ID NO: 34183 - protein, 7 aa, synthetic construct
RGDFFED

SEQ ID NO: 34184 - protein, 7 aa, synthetic construct
RGDFFQQ

SEQ ID NO: 34185 - protein, 7 aa, synthetic construct
RGDFGLF

SEQ ID NO: 34186 - protein, 7 aa, synthetic construct
RGDFHFF

SEQ ID NO: 34187 - protein, 7 aa, synthetic construct
RGDFHVA

SEQ ID NO: 34188 - protein, 7 aa, synthetic construct
RGDFILE

SEQ ID NO: 34189 - protein, 7 aa, synthetic construct
RGDFKFG

SEQ ID NO: 34190 - protein, 7 aa, synthetic construct
RGDFLDL

SEQ ID NO: 34191 - protein, 7 aa, synthetic construct
RGDFNDF

SEQ ID NO: 34192 - protein, 7 aa, synthetic construct
RGDAHIV

SEQ ID NO: 34193 - protein, 7 aa, synthetic construct
RGDFNVS

SEQ ID NO: 34194 - protein, 7 aa, synthetic construct
RGDFQES

SEQ ID NO: 34195 - protein, 7 aa, synthetic construct
RGDFQQF

SEQ ID NO: 34196 - protein, 7 aa, synthetic construct
RGDAHSG

SEQ ID NO: 34197 - protein, 7 aa, synthetic construct
RGDFVLD

SEQ ID NO: 34198 - protein, 7 aa, synthetic construct
RGDFVRA

SEQ ID NO: 34199 - protein, 7 aa, synthetic construct
RGDGDVL

SEQ ID NO: 34200 - protein, 7 aa, synthetic construct
RGDGEDF

SEQ ID NO: 34201 - protein, 7 aa, synthetic construct
RGDGEFA

SEQ ID NO: 34202 - protein, 7 aa, synthetic construct
RGDGEKN

SEQ ID NO: 34203 - protein, 7 aa, synthetic construct
RGDGFQE

SEQ ID NO: 34204 - protein, 7 aa, synthetic construct
RGDAIIR

SEQ ID NO: 34205 - protein, 7 aa, synthetic construct
RGDGGLD

SEQ ID NO: 34206 - protein, 7 aa, synthetic construct
RGDGIEG

SEQ ID NO: 34207 - protein, 7 aa, synthetic construct
RGDAIQF

SEQ ID NO: 34208 - protein, 7 aa, synthetic construct
RGDGIVR

SEQ ID NO: 34209 - protein, 7 aa, synthetic construct
RGDGLSA

SEQ ID NO: 34210 - protein, 7 aa, synthetic construct
RGDGNEN

SEQ ID NO: 34211 - protein, 7 aa, synthetic construct
RGDGNEV

SEQ ID NO: 34212 - protein, 7 aa, synthetic construct
RGDGNSG

SEQ ID NO: 34213 - protein, 7 aa, synthetic construct
RGDGQNQ

SEQ ID NO: 34214 - protein, 7 aa, synthetic construct
RGDAKDD

SEQ ID NO: 34215 - protein, 7 aa, synthetic construct
RGDGRFA

SEQ ID NO: 34216 - protein, 7 aa, synthetic construct
RGDGSLS

SEQ ID NO: 34217 - protein, 7 aa, synthetic construct
RGDGSTG

SEQ ID NO: 34218 - protein, 7 aa, synthetic construct
RGDGTDR

SEQ ID NO: 34219 - protein, 7 aa, synthetic construct
RGDGTSV

SEQ ID NO: 34220 - protein, 7 aa, synthetic construct
RGDGVAE

SEQ ID NO: 34221 - protein, 7 aa, synthetic construct
RGDGVII

SEQ ID NO: 34222 - protein, 7 aa, synthetic construct
RGDGVQE

SEQ ID NO: 34223 - protein, 7 aa, synthetic construct
RGDGVRG

SEQ ID NO: 34224 - protein, 7 aa, synthetic construct
RGDHDHH

SEQ ID NO: 34225 - protein, 7 aa, synthetic construct
RGDHEEA

SEQ ID NO: 34226 - protein, 7 aa, synthetic construct
RGDHETV

SEQ ID NO: 34227 - protein, 7 aa, synthetic construct
RGDHFNA

SEQ ID NO: 34228 - protein, 7 aa, synthetic construct
RGDHGEI

SEQ ID NO: 34229 - protein, 7 aa, synthetic construct
RGDHHEN

SEQ ID NO: 34230 - protein, 7 aa, synthetic construct
RGDHIFD

SEQ ID NO: 34231 - protein, 7 aa, synthetic construct
RGDHKTE

SEQ ID NO: 34232 - protein, 7 aa, synthetic construct
RGDHLFI

SEQ ID NO: 34233 - protein, 7 aa, synthetic construct
RGDHLFQ

SEQ ID NO: 34234 - protein, 7 aa, synthetic construct
RGDHRFG

SEQ ID NO: 34235 - protein, 7 aa, synthetic construct
RGDHSQA

SEQ ID NO: 34236 - protein, 7 aa, synthetic construct
RGDHTEG

SEQ ID NO: 34237 - protein, 7 aa, synthetic construct
RGDHVFF

SEQ ID NO: 34238 - protein, 7 aa, synthetic construct
RGDHVND

SEQ ID NO: 34239 - protein, 7 aa, synthetic construct
RGDHVQH

SEQ ID NO: 34240 - protein, 7 aa, synthetic construct
RGDIADQ

SEQ ID NO: 34241 - protein, 7 aa, synthetic construct
RGDIAVD

SEQ ID NO: 34242 - protein, 7 aa, synthetic construct
RGDIDDE

SEQ ID NO: 34243 - protein, 7 aa, synthetic construct
RGDIDII

SEQ ID NO: 34244 - protein, 7 aa, synthetic construct
RGDANEE

SEQ ID NO: 34245 - protein, 7 aa, synthetic construct
RGDIDTI

SEQ ID NO: 34246 - protein, 7 aa, synthetic construct
RGDIEEN

SEQ ID NO: 34247 - protein, 7 aa, synthetic construct
RGDANFK

SEQ ID NO: 34248 - protein, 7 aa, synthetic construct
RGDIELS

SEQ ID NO: 34249 - protein, 7 aa, synthetic construct
RGDIERF

SEQ ID NO: 34250 - protein, 7 aa, synthetic construct
RGDIESG

SEQ ID NO: 34251 - protein, 7 aa, synthetic construct
RGDIFGD

SEQ ID NO: 34252 - protein, 7 aa, synthetic construct
RGDIFSQ

SEQ ID NO: 34253 - protein, 7 aa, synthetic construct
RGDIGEI

SEQ ID NO: 34254 - protein, 7 aa, synthetic construct
RGDIGNL

SEQ ID NO: 34255 - protein, 7 aa, synthetic construct
RGDANQS

SEQ ID NO: 34256 - protein, 7 aa, synthetic construct
RGDILTE

SEQ ID NO: 34257 - protein, 7 aa, synthetic construct
RGDINND

SEQ ID NO: 34258 - protein, 7 aa, synthetic construct
RGDIQNF

SEQ ID NO: 34259 - protein, 7 aa, synthetic construct
RGDISGE

SEQ ID NO: 34260 - protein, 7 aa, synthetic construct
RGDITGE

SEQ ID NO: 34261 - protein, 7 aa, synthetic construct
RGDIVDN

SEQ ID NO: 34262 - protein, 7 aa, synthetic construct
RGDKDKS

SEQ ID NO: 34263 - protein, 7 aa, synthetic construct
RGDAQRG

SEQ ID NO: 34264 - protein, 7 aa, synthetic construct
RGDKGQD

SEQ ID NO: 34265 - protein, 7 aa, synthetic construct
RGDKHVF

SEQ ID NO: 34266 - protein, 7 aa, synthetic construct
RGDKKDA

SEQ ID NO: 34267 - protein, 7 aa, synthetic construct
RGDKQID

SEQ ID NO: 34268 - protein, 7 aa, synthetic construct
RGDKSLA

SEQ ID NO: 34269 - protein, 7 aa, synthetic construct
RGDKTGE

SEQ ID NO: 34270 - protein, 7 aa, synthetic construct
RGDKTNT

SEQ ID NO: 34271 - protein, 7 aa, synthetic construct
RGDKVGA

SEQ ID NO: 34272 - protein, 7 aa, synthetic construct
RGDLAIS

SEQ ID NO: 34273 - protein, 7 aa, synthetic construct
RGDLGHH

SEQ ID NO: 34274 - protein, 7 aa, synthetic construct
RGDLGSD

SEQ ID NO: 34275 - protein, 7 aa, synthetic construct
RGDLHAK

SEQ ID NO: 34276 - protein, 7 aa, synthetic construct
RGDLIKE

SEQ ID NO: 34277 - protein, 7 aa, synthetic construct
RGDLKAD

SEQ ID NO: 34278 - protein, 7 aa, synthetic construct
RGDLKEF

SEQ ID NO: 34279 - protein, 7 aa, synthetic construct
RGDLLRK

SEQ ID NO: 34280 - protein, 7 aa, synthetic construct
RGDLNFV

SEQ ID NO: 34281 - protein, 7 aa, synthetic construct
RGDLQKF

SEQ ID NO: 34282 - protein, 7 aa, synthetic construct
RGDADGV

SEQ ID NO: 34283 - protein, 7 aa, synthetic construct
RGDLTLS

SEQ ID NO: 34284 - protein, 7 aa, synthetic construct
RGDLTTL

SEQ ID NO: 34285 - protein, 7 aa, synthetic construct
RGDNAER

SEQ ID NO: 34286 - protein, 7 aa, synthetic construct
RGDNAFD

SEQ ID NO: 34287 - protein, 7 aa, synthetic construct
RGDNAKS

SEQ ID NO: 34288 - protein, 7 aa, synthetic construct
RGDNDLF

SEQ ID NO: 34289 - protein, 7 aa, synthetic construct
RGDNDNE

SEQ ID NO: 34290 - protein, 7 aa, synthetic construct
RGDNDQG

SEQ ID NO: 34291 - protein, 7 aa, synthetic construct
RGDNDTH

SEQ ID NO: 34292 - protein, 7 aa, synthetic construct
RGDNEDF

SEQ ID NO: 34293 - protein, 7 aa, synthetic construct
RGDNEHG

SEQ ID NO: 34294 - protein, 7 aa, synthetic construct
RGDNERV

SEQ ID NO: 34295 - protein, 7 aa, synthetic construct
RGDNFTA

SEQ ID NO: 34296 - protein, 7 aa, synthetic construct
RGDNGSQ

SEQ ID NO: 34297 - protein, 7 aa, synthetic construct
RGDNGTH

SEQ ID NO: 34298 - protein, 7 aa, synthetic construct
RGDNHTA

SEQ ID NO: 34299 - protein, 7 aa, synthetic construct
RGDNIAF

SEQ ID NO: 34300 - protein, 7 aa, synthetic construct
RGDNKKE

SEQ ID NO: 34301 - protein, 7 aa, synthetic construct
RGDNLEE

SEQ ID NO: 34302 - protein, 7 aa, synthetic construct
RGDNLEL

SEQ ID NO: 34303 - protein, 7 aa, synthetic construct
RGDNLTE

SEQ ID NO: 34304 - protein, 7 aa, synthetic construct
RGDNLVS

SEQ ID NO: 34305 - protein, 7 aa, synthetic construct
RGDNQSI

SEQ ID NO: 34306 - protein, 7 aa, synthetic construct
RGDNTVR

SEQ ID NO: 34307 - protein, 7 aa, synthetic construct
RGDNVAG

SEQ ID NO: 34308 - protein, 7 aa, synthetic construct
RGDNVDD

SEQ ID NO: 34309 - protein, 7 aa, synthetic construct
RGDNVLD

SEQ ID NO: 34310 - protein, 7 aa, synthetic construct
RGDNVNE

SEQ ID NO: 34311 - protein, 7 aa, synthetic construct
RGDNVNR

SEQ ID NO: 34312 - protein, 7 aa, synthetic construct
RGDNVRA

SEQ ID NO: 34313 - protein, 7 aa, synthetic construct
RGDQAAF

SEQ ID NO: 34314 - protein, 7 aa, synthetic construct
RGDQAVA

SEQ ID NO: 34315 - protein, 7 aa, synthetic construct
RGDQFIA

SEQ ID NO: 34316 - protein, 7 aa, synthetic construct
RGDDAHR

SEQ ID NO: 34317 - protein, 7 aa, synthetic construct
RGDQGNE

SEQ ID NO: 34318 - protein, 7 aa, synthetic construct
RGDDALR

SEQ ID NO: 34319 - protein, 7 aa, synthetic construct
RGDDANV

SEQ ID NO: 34320 - protein, 7 aa, synthetic construct
RGDQITT

SEQ ID NO: 34321 - protein, 7 aa, synthetic construct
RGDQQIH

SEQ ID NO: 34322 - protein, 7 aa, synthetic construct
RGDQQSG

SEQ ID NO: 34323 - protein, 7 aa, synthetic construct
RGDQQTE

SEQ ID NO: 34324 - protein, 7 aa, synthetic construct
RGDQQTT

SEQ ID NO: 34325 - protein, 7 aa, synthetic construct
RGDQVND

SEQ ID NO: 34326 - protein, 7 aa, synthetic construct
RGDQVSE

SEQ ID NO: 34327 - protein, 7 aa, synthetic construct
RGDREDD

SEQ ID NO: 34328 - protein, 7 aa, synthetic construct
RGDRNDE

SEQ ID NO: 34329 - protein, 7 aa, synthetic construct
RGDDEND

SEQ ID NO: 34330 - protein, 7 aa, synthetic construct
RGDSANG

SEQ ID NO: 34331 - protein, 7 aa, synthetic construct
RGDSDED

SEQ ID NO: 34332 - protein, 7 aa, synthetic construct
RGDSDNV

SEQ ID NO: 34333 - protein, 7 aa, synthetic construct
RGDSFDL

SEQ ID NO: 34334 - protein, 7 aa, synthetic construct
RGDSHFF

SEQ ID NO: 34335 - protein, 7 aa, synthetic construct
RGDSHLT

SEQ ID NO: 34336 - protein, 7 aa, synthetic construct
RGDSIGD

SEQ ID NO: 34337 - protein, 7 aa, synthetic construct
RGDDFNL

SEQ ID NO: 34338 - protein, 7 aa, synthetic construct
RGDSIKN

SEQ ID NO: 34339 - protein, 7 aa, synthetic construct
RGDSIVE

SEQ ID NO: 34340 - protein, 7 aa, synthetic construct
RGDSIVG

SEQ ID NO: 34341 - protein, 7 aa, synthetic construct
RGDSKLT

SEQ ID NO: 34342 - protein, 7 aa, synthetic construct
RGDSLLS

SEQ ID NO: 34343 - protein, 7 aa, synthetic construct
RGDSLVA

SEQ ID NO: 34344 - protein, 7 aa, synthetic construct
RGDSNSN

SEQ ID NO: 34345 - protein, 7 aa, synthetic construct
RGDSRQA

SEQ ID NO: 34346 - protein, 7 aa, synthetic construct
RGDDGFA

SEQ ID NO: 34347 - protein, 7 aa, synthetic construct
RGDDGHS

SEQ ID NO: 34348 - protein, 7 aa, synthetic construct
RGDDGNE

SEQ ID NO: 34349 - protein, 7 aa, synthetic construct
RGDTDID

SEQ ID NO: 34350 - protein, 7 aa, synthetic construct
RGDDGNV

SEQ ID NO: 34351 - protein, 7 aa, synthetic construct
RGDTDQL

SEQ ID NO: 34352 - protein, 7 aa, synthetic construct
RGDTEAI

SEQ ID NO: 34353 - protein, 7 aa, synthetic construct
RGDTEKQ

SEQ ID NO: 34354 - protein, 7 aa, synthetic construct
RGDTFSE

SEQ ID NO: 34355 - protein, 7 aa, synthetic construct
RGDDGTT

SEQ ID NO: 34356 - protein, 7 aa, synthetic construct
RGDTHHG

SEQ ID NO: 34357 - protein, 7 aa, synthetic construct
RGDTINN

SEQ ID NO: 34358 - protein, 7 aa, synthetic construct
RGDDHFN

SEQ ID NO: 34359 - protein, 7 aa, synthetic construct
RGDDHGN

SEQ ID NO: 34360 - protein, 7 aa, synthetic construct
RGDTNLK

SEQ ID NO: 34361 - protein, 7 aa, synthetic construct
RGDDHLI

SEQ ID NO: 34362 - protein, 7 aa, synthetic construct
RGDTQRE

SEQ ID NO: 34363 - protein, 7 aa, synthetic construct
RGDTRHG

SEQ ID NO: 34364 - protein, 7 aa, synthetic construct
RGDTSVN

SEQ ID NO: 34365 - protein, 7 aa, synthetic construct
RGDTTER

SEQ ID NO: 34366 - protein, 7 aa, synthetic construct
RGDTTFV

SEQ ID NO: 34367 - protein, 7 aa, synthetic construct
RGDTTGR

SEQ ID NO: 34368 - protein, 7 aa, synthetic construct
RGDTTLF

SEQ ID NO: 34369 - protein, 7 aa, synthetic construct
RGDTVSQ

SEQ ID NO: 34370 - protein, 7 aa, synthetic construct
RGDVAHF

SEQ ID NO: 34371 - protein, 7 aa, synthetic construct
RGDDIDK

SEQ ID NO: 34372 - protein, 7 aa, synthetic construct
RGDVDIR

SEQ ID NO: 34373 - protein, 7 aa, synthetic construct
RGDVDLA

SEQ ID NO: 34374 - protein, 7 aa, synthetic construct
RGDDIFH

SEQ ID NO: 34375 - protein, 7 aa, synthetic construct
RGDVEVT

SEQ ID NO: 34376 - protein, 7 aa, synthetic construct
RGDVFQI

SEQ ID NO: 34377 - protein, 7 aa, synthetic construct
RGDVGTL

SEQ ID NO: 34378 - protein, 7 aa, synthetic construct
RGDVIAQ

SEQ ID NO: 34379 - protein, 7 aa, synthetic construct
RGDVIDF

SEQ ID NO: 34380 - protein, 7 aa, synthetic construct
RGDVIEN

SEQ ID NO: 34381 - protein, 7 aa, synthetic construct
RGDVIVD

SEQ ID NO: 34382 - protein, 7 aa, synthetic construct
RGDVNAK

SEQ ID NO: 34383 - protein, 7 aa, synthetic construct
RGDVNFS

SEQ ID NO: 34384 - protein, 7 aa, synthetic construct
RGDVNHQ

SEQ ID NO: 34385 - protein, 7 aa, synthetic construct
RGDVNVA

SEQ ID NO: 34386 - protein, 7 aa, synthetic construct
RGDVQKD

SEQ ID NO: 34387 - protein, 7 aa, synthetic construct
RGDVQQH

SEQ ID NO: 34388 - protein, 7 aa, synthetic construct
RGDVRED

SEQ ID NO: 34389 - protein, 7 aa, synthetic construct
RGDVSKA

SEQ ID NO: 34390 - protein, 7 aa, synthetic construct
RGDVVDH

SEQ ID NO: 34391 - protein, 7 aa, synthetic construct
RGDVVLD

SEQ ID NO: 34392 - protein, 7 aa, synthetic construct
RGDDKKE

SEQ ID NO: 34393 - protein, 7 aa, synthetic construct
RGDDNAT

SEQ ID NO: 34394 - protein, 7 aa, synthetic construct
RGDDNLT

SEQ ID NO: 34395 - protein, 7 aa, synthetic construct
RGDDNSH

SEQ ID NO: 34396 - protein, 7 aa, synthetic construct
RGDDQIH

SEQ ID NO: 34397 - protein, 7 aa, synthetic construct
RGDDRDK

SEQ ID NO: 34398 - protein, 7 aa, synthetic construct
RGDDRGD

SEQ ID NO: 34399 - protein, 7 aa, synthetic construct
RGDDRGH

SEQ ID NO: 34400 - protein, 7 aa, synthetic construct
RGDDSED

SEQ ID NO: 34401 - protein, 7 aa, synthetic construct
RGDDSTD

SEQ ID NO: 34402 - protein, 7 aa, synthetic construct
RGDDSTS

SEQ ID NO: 34403 - protein, 7 aa, synthetic construct
RGDDTHK

SEQ ID NO: 34404 - protein, 7 aa, synthetic construct
RGDDTTI

SEQ ID NO: 34405 - protein, 7 aa, synthetic construct
RGDDVFT

SEQ ID NO: 34406 - protein, 7 aa, synthetic construct
RGDAEVG

SEQ ID NO: 34407 - protein, 7 aa, synthetic construct
RGDDVRS

SEQ ID NO: 34408 - protein, 7 aa, synthetic construct
RGDDVTQ

SEQ ID NO: 34409 - protein, 7 aa, synthetic construct
RGDEAIE

SEQ ID NO: 34410 - protein, 7 aa, synthetic construct
RGDEAKT

SEQ ID NO: 34411 - protein, 7 aa, synthetic construct
RGDEANV

SEQ ID NO: 34412 - protein, 7 aa, synthetic construct
RGDEAVS

SEQ ID NO: 34413 - protein, 7 aa, synthetic construct
RGDEDAR

SEQ ID NO: 34414 - protein, 7 aa, synthetic construct
RGDEDTQ

SEQ ID NO: 34415 - protein, 7 aa, synthetic construct
RGDEEET

SEQ ID NO: 34416 - protein, 7 aa, synthetic construct
RGDEFLF

SEQ ID NO: 34417 - protein, 7 aa, synthetic construct
RGDEGHF

SEQ ID NO: 34418 - protein, 7 aa, synthetic construct
RGDEGTD

SEQ ID NO: 34419 - protein, 7 aa, synthetic construct
RGDEIEF

SEQ ID NO: 34420 - protein, 7 aa, synthetic construct
RGDEIIK

SEQ ID NO: 34421 - protein, 7 aa, synthetic construct
RGDEIKQ

SEQ ID NO: 34422 - protein, 7 aa, synthetic construct
RGDEIRF

SEQ ID NO: 34423 - protein, 7 aa, synthetic construct
RGDEISI

SEQ ID NO: 34424 - protein, 7 aa, synthetic construct
RGDEKDQ

SEQ ID NO: 34425 - protein, 7 aa, synthetic construct
RGDEKEV

SEQ ID NO: 34426 - protein, 7 aa, synthetic construct
RGDEKLT

SEQ ID NO: 34427 - protein, 7 aa, synthetic construct
RGDEKNS

SEQ ID NO: 34428 - protein, 7 aa, synthetic construct
RGDELTF

SEQ ID NO: 34429 - protein, 7 aa, synthetic construct
RGDENAH

SEQ ID NO: 34430 - protein, 7 aa, synthetic construct
RGDAFTQ

SEQ ID NO: 34431 - protein, 7 aa, synthetic construct
RGDENKE

SEQ ID NO: 34432 - protein, 7 aa, synthetic construct
RGDENTS

SEQ ID NO: 34433 - protein, 7 aa, synthetic construct
RGDEQDI

SEQ ID NO: 34434 - protein, 7 aa, synthetic construct
RGDEQKG

SEQ ID NO: 34435 - protein, 7 aa, synthetic construct
RGDAGEF

SEQ ID NO: 34436 - protein, 7 aa, synthetic construct
RGDESHD

SEQ ID NO: 34437 - protein, 7 aa, synthetic construct
RGDESIQ

SEQ ID NO: 34438 - protein, 7 aa, synthetic construct
RGDESQA

SEQ ID NO: 34439 - protein, 7 aa, synthetic construct
RGDETGG

SEQ ID NO: 34440 - protein, 7 aa, synthetic construct
RGDETNV

SEQ ID NO: 34441 - protein, 7 aa, synthetic construct
RGDEVES

SEQ ID NO: 34442 - protein, 7 aa, synthetic construct
RGDEVGQ

SEQ ID NO: 34443 - protein, 7 aa, synthetic construct
RGDAGND

SEQ ID NO: 34444 - protein, 7 aa, synthetic construct
RGDFELL

SEQ ID NO: 34445 - protein, 7 aa, synthetic construct
RGDFFEV

SEQ ID NO: 34446 - protein, 7 aa, synthetic construct
RGDFGTL

SEQ ID NO: 34447 - protein, 7 aa, synthetic construct
RGDFIIT

SEQ ID NO: 34448 - protein, 7 aa, synthetic construct
RGDFNVH

SEQ ID NO: 34449 - protein, 7 aa, synthetic construct
RGDFQIG

SEQ ID NO: 34450 - protein, 7 aa, synthetic construct
RGDFQVG

SEQ ID NO: 34451 - protein, 7 aa, synthetic construct
RGDFTHL

SEQ ID NO: 34452 - protein, 7 aa, synthetic construct
RGDFTLD

SEQ ID NO: 34453 - protein, 7 aa, synthetic construct
RGDFVKD

SEQ ID NO: 34454 - protein, 7 aa, synthetic construct
RGDGDAE

SEQ ID NO: 34455 - protein, 7 aa, synthetic construct
RGDGDQE

SEQ ID NO: 34456 - protein, 7 aa, synthetic construct
RGDGEDT

SEQ ID NO: 34457 - protein, 7 aa, synthetic construct
RGDGESE

SEQ ID NO: 34458 - protein, 7 aa, synthetic construct
RGDGFEE

SEQ ID NO: 34459 - protein, 7 aa, synthetic construct
RGDGHFQ

SEQ ID NO: 34460 - protein, 7 aa, synthetic construct
RGDGIIK

SEQ ID NO: 34461 - protein, 7 aa, synthetic construct
RGDGIVL

SEQ ID NO: 34462 - protein, 7 aa, synthetic construct
RGDGKTE

SEQ ID NO: 34463 - protein, 7 aa, synthetic construct
RGDGKVE

SEQ ID NO: 34464 - protein, 7 aa, synthetic construct
RGDAISK

SEQ ID NO: 34465 - protein, 7 aa, synthetic construct
RGDGNFD

SEQ ID NO: 34466 - protein, 7 aa, synthetic construct
RGDGQQG

SEQ ID NO: 34467 - protein, 7 aa, synthetic construct
RGDGQSG

SEQ ID NO: 34468 - protein, 7 aa, synthetic construct
RGDAADA

SEQ ID NO: 34469 - protein, 7 aa, synthetic construct
RGDAKFD

SEQ ID NO: 34470 - protein, 7 aa, synthetic construct
RGDGVIH

SEQ ID NO: 34471 - protein, 7 aa, synthetic construct
RGDGVQQ

SEQ ID NO: 34472 - protein, 7 aa, synthetic construct
RGDHADG

SEQ ID NO: 34473 - protein, 7 aa, synthetic construct
RGDHALN

SEQ ID NO: 34474 - protein, 7 aa, synthetic construct
RGDHELH

SEQ ID NO: 34475 - protein, 7 aa, synthetic construct
RGDHEVA

SEQ ID NO: 34476 - protein, 7 aa, synthetic construct
RGDHFDL

SEQ ID NO: 34477 - protein, 7 aa, synthetic construct
RGDHHFD

SEQ ID NO: 34478 - protein, 7 aa, synthetic construct
RGDHHKD

SEQ ID NO: 34479 - protein, 7 aa, synthetic construct
RGDHHTH

SEQ ID NO: 34480 - protein, 7 aa, synthetic construct
RGDHKLD

SEQ ID NO: 34481 - protein, 7 aa, synthetic construct
RGDHKLQ

SEQ ID NO: 34482 - protein, 7 aa, synthetic construct
RGDHKLV

SEQ ID NO: 34483 - protein, 7 aa, synthetic construct
RGDHLQI

SEQ ID NO: 34484 - protein, 7 aa, synthetic construct
RGDHNLR

SEQ ID NO: 34485 - protein, 7 aa, synthetic construct
RGDALNG

SEQ ID NO: 34486 - protein, 7 aa, synthetic construct
RGDHRFH

SEQ ID NO: 34487 - protein, 7 aa, synthetic construct
RGDHSRE

SEQ ID NO: 34488 - protein, 7 aa, synthetic construct
RGDHTLQ

SEQ ID NO: 34489 - protein, 7 aa, synthetic construct
RGDHVSG

SEQ ID NO: 34490 - protein, 7 aa, synthetic construct
RGDANEF

SEQ ID NO: 34491 - protein, 7 aa, synthetic construct
RGDANEK

SEQ ID NO: 34492 - protein, 7 aa, synthetic construct
RGDIDVS

SEQ ID NO: 34493 - protein, 7 aa, synthetic construct
RGDANFE

SEQ ID NO: 34494 - protein, 7 aa, synthetic construct
RGDIFGE

SEQ ID NO: 34495 - protein, 7 aa, synthetic construct
RGDIFRD

SEQ ID NO: 34496 - protein, 7 aa, synthetic construct
RGDIFSH

SEQ ID NO: 34497 - protein, 7 aa, synthetic construct
RGDIHEH

SEQ ID NO: 34498 - protein, 7 aa, synthetic construct
RGDIHVE

SEQ ID NO: 34499 - protein, 7 aa, synthetic construct
RGDILAK

SEQ ID NO: 34500 - protein, 7 aa, synthetic construct
RGDANTG

SEQ ID NO: 34501 - protein, 7 aa, synthetic construct
RGDIRDE

SEQ ID NO: 34502 - protein, 7 aa, synthetic construct
RGDITIG

SEQ ID NO: 34503 - protein, 7 aa, synthetic construct
RGDITRG

SEQ ID NO: 34504 - protein, 7 aa, synthetic construct
RGDITTA

SEQ ID NO: 34505 - protein, 7 aa, synthetic construct
RGDIVQG

SEQ ID NO: 34506 - protein, 7 aa, synthetic construct
RGDKDDF

SEQ ID NO: 34507 - protein, 7 aa, synthetic construct
RGDKDLS

SEQ ID NO: 34508 - protein, 7 aa, synthetic construct
RGDKEDK

SEQ ID NO: 34509 - protein, 7 aa, synthetic construct
RGDKFGG

SEQ ID NO: 34510 - protein, 7 aa, synthetic construct
RGDKHFG

SEQ ID NO: 34511 - protein, 7 aa, synthetic construct
RGDKHSG

SEQ ID NO: 34512 - protein, 7 aa, synthetic construct
RGDKNGD

SEQ ID NO: 34513 - protein, 7 aa, synthetic construct
RGDKQAN

SEQ ID NO: 34514 - protein, 7 aa, synthetic construct
RGDKQAS

SEQ ID NO: 34515 - protein, 7 aa, synthetic construct
RGDKTQQ

SEQ ID NO: 34516 - protein, 7 aa, synthetic construct
RGDKVAL

SEQ ID NO: 34517 - protein, 7 aa, synthetic construct
RGDKVKE

SEQ ID NO: 34518 - protein, 7 aa, synthetic construct
RGDKVSA

SEQ ID NO: 34519 - protein, 7 aa, synthetic construct
RGDLAEN

SEQ ID NO: 34520 - protein, 7 aa, synthetic construct
RGDLAKF

SEQ ID NO: 34521 - protein, 7 aa, synthetic construct
RGDLDSD

SEQ ID NO: 34522 - protein, 7 aa, synthetic construct
RGDLETN

SEQ ID NO: 34523 - protein, 7 aa, synthetic construct
RGDLFAF

SEQ ID NO: 34524 - protein, 7 aa, synthetic construct
RGDLFKA

SEQ ID NO: 34525 - protein, 7 aa, synthetic construct
RGDLFTN

SEQ ID NO: 34526 - protein, 7 aa, synthetic construct
RGDLGKA

SEQ ID NO: 34527 - protein, 7 aa, synthetic construct
RGDASIQ

SEQ ID NO: 34528 - protein, 7 aa, synthetic construct
RGDLHFV

SEQ ID NO: 34529 - protein, 7 aa, synthetic construct
RGDLHLQ

SEQ ID NO: 34530 - protein, 7 aa, synthetic construct
RGDLNGE

SEQ ID NO: 34531 - protein, 7 aa, synthetic construct
RGDLQQD

SEQ ID NO: 34532 - protein, 7 aa, synthetic construct
RGDLVED

SEQ ID NO: 34533 - protein, 7 aa, synthetic construct
RGDLVFH

SEQ ID NO: 34534 - protein, 7 aa, synthetic construct
RGDATLN

SEQ ID NO: 34535 - protein, 7 aa, synthetic construct
RGDNDAQ

SEQ ID NO: 34536 - protein, 7 aa, synthetic construct
RGDNDEL

SEQ ID NO: 34537 - protein, 7 aa, synthetic construct
RGDNFDD

SEQ ID NO: 34538 - protein, 7 aa, synthetic construct
RGDNFGG

SEQ ID NO: 34539 - protein, 7 aa, synthetic construct
RGDNFLV

SEQ ID NO: 34540 - protein, 7 aa, synthetic construct
RGDNGHH

SEQ ID NO: 34541 - protein, 7 aa, synthetic construct
RGDNHQS

SEQ ID NO: 34542 - protein, 7 aa, synthetic construct
RGDNHTE

SEQ ID NO: 34543 - protein, 7 aa, synthetic construct
RGDAVEK

SEQ ID NO: 34544 - protein, 7 aa, synthetic construct
RGDNKDN

SEQ ID NO: 34545 - protein, 7 aa, synthetic construct
RGDNKLV

SEQ ID NO: 34546 - protein, 7 aa, synthetic construct
RGDNNTR

SEQ ID NO: 34547 - protein, 7 aa, synthetic construct
RGDNQEF

SEQ ID NO: 34548 - protein, 7 aa, synthetic construct
RGDNQLQ

SEQ ID NO: 34549 - protein, 7 aa, synthetic construct
RGDNTNG

SEQ ID NO: 34550 - protein, 7 aa, synthetic construct
RGDAVVN

SEQ ID NO: 34551 - protein, 7 aa, synthetic construct
RGDQALF

SEQ ID NO: 34552 - protein, 7 aa, synthetic construct
RGDQDIN

SEQ ID NO: 34553 - protein, 7 aa, synthetic construct
RGDQEKH

SEQ ID NO: 34554 - protein, 7 aa, synthetic construct
RGDQERG

SEQ ID NO: 34555 - protein, 7 aa, synthetic construct
RGDQFSE

SEQ ID NO: 34556 - protein, 7 aa, synthetic construct
RGDQFVK

SEQ ID NO: 34557 - protein, 7 aa, synthetic construct
RGDQGIF

SEQ ID NO: 34558 - protein, 7 aa, synthetic construct
RGDQGTE

SEQ ID NO: 34559 - protein, 7 aa, synthetic construct
RGDQHDA

SEQ ID NO: 34560 - protein, 7 aa, synthetic construct
RGDQIFE

SEQ ID NO: 34561 - protein, 7 aa, synthetic construct
RGDQQQG

SEQ ID NO: 34562 - protein, 7 aa, synthetic construct
RGDQVED

SEQ ID NO: 34563 - protein, 7 aa, synthetic construct
RGDDDLV

SEQ ID NO: 34564 - protein, 7 aa, synthetic construct
RGDRDEF

SEQ ID NO: 34565 - protein, 7 aa, synthetic construct
RGDRDGA

SEQ ID NO: 34566 - protein, 7 aa, synthetic construct
RGDRDRG

SEQ ID NO: 34567 - protein, 7 aa, synthetic construct
RGDDDQL

SEQ ID NO: 34568 - protein, 7 aa, synthetic construct
RGDDDRR

SEQ ID NO: 34569 - protein, 7 aa, synthetic construct
RGDRETG

SEQ ID NO: 34570 - protein, 7 aa, synthetic construct
RGDRIIA

SEQ ID NO: 34571 - protein, 7 aa, synthetic construct
RGDDEED

SEQ ID NO: 34572 - protein, 7 aa, synthetic construct
RGDRILQ

SEQ ID NO: 34573 - protein, 7 aa, synthetic construct
RGDRLIG

SEQ ID NO: 34574 - protein, 7 aa, synthetic construct
RGDRQQG

SEQ ID NO: 34575 - protein, 7 aa, synthetic construct
RGDRQVE

SEQ ID NO: 34576 - protein, 7 aa, synthetic construct
RGDDENL

SEQ ID NO: 34577 - protein, 7 aa, synthetic construct
RGDRVTE

SEQ ID NO: 34578 - protein, 7 aa, synthetic construct
RGDDFDA

SEQ ID NO: 34579 - protein, 7 aa, synthetic construct
RGDSATE

SEQ ID NO: 34580 - protein, 7 aa, synthetic construct
RGDSEVA

SEQ ID NO: 34581 - protein, 7 aa, synthetic construct
RGDSFHI

SEQ ID NO: 34582 - protein, 7 aa, synthetic construct
RGDSIGE

SEQ ID NO: 34583 - protein, 7 aa, synthetic construct
RGDSKLA

SEQ ID NO: 34584 - protein, 7 aa, synthetic construct
RGDSKRT

SEQ ID NO: 34585 - protein, 7 aa, synthetic construct
RGDSLEH

SEQ ID NO: 34586 - protein, 7 aa, synthetic construct
RGDSLHD

SEQ ID NO: 34587 - protein, 7 aa, synthetic construct
RGDSLNE

SEQ ID NO: 34588 - protein, 7 aa, synthetic construct
RGDSQAL

SEQ ID NO: 34589 - protein, 7 aa, synthetic construct
RGDSQQE

SEQ ID NO: 34590 - protein, 7 aa, synthetic construct
RGDDGFS

SEQ ID NO: 34591 - protein, 7 aa, synthetic construct
RGDDGGI

SEQ ID NO: 34592 - protein, 7 aa, synthetic construct
RGDSTAQ

SEQ ID NO: 34593 - protein, 7 aa, synthetic construct
RGDSTQQ

SEQ ID NO: 34594 - protein, 7 aa, synthetic construct
RGDTEIG

SEQ ID NO: 34595 - protein, 7 aa, synthetic construct
RGDTFFN

SEQ ID NO: 34596 - protein, 7 aa, synthetic construct
RGDTFHD

SEQ ID NO: 34597 - protein, 7 aa, synthetic construct
RGDTFIK

SEQ ID NO: 34598 - protein, 7 aa, synthetic construct
RGDTGHH

SEQ ID NO: 34599 - protein, 7 aa, synthetic construct
RGDTHDL

SEQ ID NO: 34600 - protein, 7 aa, synthetic construct
RGDTIDV

SEQ ID NO: 34601 - protein, 7 aa, synthetic construct
RGDTIQE

SEQ ID NO: 34602 - protein, 7 aa, synthetic construct
RGDTKEG

SEQ ID NO: 34603 - protein, 7 aa, synthetic construct
RGDTKIG

SEQ ID NO: 34604 - protein, 7 aa, synthetic construct
RGDDHGF

SEQ ID NO: 34605 - protein, 7 aa, synthetic construct
RGDTLGS

SEQ ID NO: 34606 - protein, 7 aa, synthetic construct
RGDTLKN

SEQ ID NO: 34607 - protein, 7 aa, synthetic construct
RGDTNEI

SEQ ID NO: 34608 - protein, 7 aa, synthetic construct
RGDTNII

SEQ ID NO: 34609 - protein, 7 aa, synthetic construct
RGDTNLS

SEQ ID NO: 34610 - protein, 7 aa, synthetic construct
RGDTQIG

SEQ ID NO: 34611 - protein, 7 aa, synthetic construct
RGDTQRR

SEQ ID NO: 34612 - protein, 7 aa, synthetic construct
RGDTVFI

SEQ ID NO: 34613 - protein, 7 aa, synthetic construct
RGDTVGT

SEQ ID NO: 34614 - protein, 7 aa, synthetic construct
RGDTVLG

SEQ ID NO: 34615 - protein, 7 aa, synthetic construct
RGDVAVD

SEQ ID NO: 34616 - protein, 7 aa, synthetic construct
RGDVEES

SEQ ID NO: 34617 - protein, 7 aa, synthetic construct
RGDVFIF

SEQ ID NO: 34618 - protein, 7 aa, synthetic construct
RGDVFQT

SEQ ID NO: 34619 - protein, 7 aa, synthetic construct
RGDVGEV

SEQ ID NO: 34620 - protein, 7 aa, synthetic construct
RGDDIIK

SEQ ID NO: 34621 - protein, 7 aa, synthetic construct
RGDVGTD

SEQ ID NO: 34622 - protein, 7 aa, synthetic construct
RGDVHAT

SEQ ID NO: 34623 - protein, 7 aa, synthetic construct
RGDVHDL

SEQ ID NO: 34624 - protein, 7 aa, synthetic construct
RGDVHKD

SEQ ID NO: 34625 - protein, 7 aa, synthetic construct
RGDVIEF

SEQ ID NO: 34626 - protein, 7 aa, synthetic construct
RGDVIEV

SEQ ID NO: 34627 - protein, 7 aa, synthetic construct
RGDVIFH

SEQ ID NO: 34628 - protein, 7 aa, synthetic construct
RGDDIQK

SEQ ID NO: 34629 - protein, 7 aa, synthetic construct
RGDVNGN

SEQ ID NO: 34630 - protein, 7 aa, synthetic construct
RGDDKAV

SEQ ID NO: 34631 - protein, 7 aa, synthetic construct
RGDVQVS

SEQ ID NO: 34632 - protein, 7 aa, synthetic construct
RGDVSLE

SEQ ID NO: 34633 - protein, 7 aa, synthetic construct
RGDDKGI

SEQ ID NO: 34634 - protein, 7 aa, synthetic construct
RGDVTEH

SEQ ID NO: 34635 - protein, 7 aa, synthetic construct
RGDVTGD

SEQ ID NO: 34636 - protein, 7 aa, synthetic construct
RGDDKSG

SEQ ID NO: 34637 - protein, 7 aa, synthetic construct
RGDDLGV

SEQ ID NO: 34638 - protein, 7 aa, synthetic construct
RGDDLLR

SEQ ID NO: 34639 - protein, 7 aa, synthetic construct
RGDDLLS

SEQ ID NO: 34640 - protein, 7 aa, synthetic construct
RGDDLNR

SEQ ID NO: 34641 - protein, 7 aa, synthetic construct
RGDAEHN

SEQ ID NO: 34642 - protein, 7 aa, synthetic construct
RGDDNIQ

SEQ ID NO: 34643 - protein, 7 aa, synthetic construct
RGDDNSQ

SEQ ID NO: 34644 - protein, 7 aa, synthetic construct
RGDDQAI

SEQ ID NO: 34645 - protein, 7 aa, synthetic construct
RGDDQND

SEQ ID NO: 34646 - protein, 7 aa, synthetic construct
RGDDQRI

SEQ ID NO: 34647 - protein, 7 aa, synthetic construct
RGDDQTF

SEQ ID NO: 34648 - protein, 7 aa, synthetic construct
RGDDRDI

SEQ ID NO: 34649 - protein, 7 aa, synthetic construct
RGDDRND

SEQ ID NO: 34650 - protein, 7 aa, synthetic construct
RGDDRQS

SEQ ID NO: 34651 - protein, 7 aa, synthetic construct
RGDDRVE

SEQ ID NO: 34652 - protein, 7 aa, synthetic construct
RGDDRVL

SEQ ID NO: 34653 - protein, 7 aa, synthetic construct
RGDDSRI

SEQ ID NO: 34654 - protein, 7 aa, synthetic construct
RGDAESE

SEQ ID NO: 34655 - protein, 7 aa, synthetic construct
RGDDVAF

SEQ ID NO: 34656 - protein, 7 aa, synthetic construct
RGDDVAI

SEQ ID NO: 34657 - protein, 7 aa, synthetic construct
RGDDVAK

SEQ ID NO: 34658 - protein, 7 aa, synthetic construct
RGDDVGG

SEQ ID NO: 34659 - protein, 7 aa, synthetic construct
RGDDVHK

SEQ ID NO: 34660 - protein, 7 aa, synthetic construct
RGDDVVH

SEQ ID NO: 34661 - protein, 7 aa, synthetic construct
RGDAFDR

SEQ ID NO: 34662 - protein, 7 aa, synthetic construct
RGDEDTF

SEQ ID NO: 34663 - protein, 7 aa, synthetic construct
RGDEFQT

SEQ ID NO: 34664 - protein, 7 aa, synthetic construct
RGDEFRT

SEQ ID NO: 34665 - protein, 7 aa, synthetic construct
RGDEFSH

SEQ ID NO: 34666 - protein, 7 aa, synthetic construct
RGDEGHK

SEQ ID NO: 34667 - protein, 7 aa, synthetic construct
RGDAFIR

SEQ ID NO: 34668 - protein, 7 aa, synthetic construct
RGDEGQK

SEQ ID NO: 34669 - protein, 7 aa, synthetic construct
RGDAFLH

SEQ ID NO: 34670 - protein, 7 aa, synthetic construct
RGDEINL

SEQ ID NO: 34671 - protein, 7 aa, synthetic construct
RGDEIVF

SEQ ID NO: 34672 - protein, 7 aa, synthetic construct
RGDEKDA

SEQ ID NO: 34673 - protein, 7 aa, synthetic construct
RGDEKIE

SEQ ID NO: 34674 - protein, 7 aa, synthetic construct
RGDEKQS

SEQ ID NO: 34675 - protein, 7 aa, synthetic construct
RGDELGG

SEQ ID NO: 34676 - protein, 7 aa, synthetic construct
RGDELIH

SEQ ID NO: 34677 - protein, 7 aa, synthetic construct
RGDELNH

SEQ ID NO: 34678 - protein, 7 aa, synthetic construct
RGDENAK

SEQ ID NO: 34679 - protein, 7 aa, synthetic construct
RGDAFVT

SEQ ID NO: 34680 - protein, 7 aa, synthetic construct
RGDEQAH

SEQ ID NO: 34681 - protein, 7 aa, synthetic construct
RGDEQER

SEQ ID NO: 34682 - protein, 7 aa, synthetic construct
RGDEQVK

SEQ ID NO: 34683 - protein, 7 aa, synthetic construct
RGDERVS

SEQ ID NO: 34684 - protein, 7 aa, synthetic construct
RGDESET

SEQ ID NO: 34685 - protein, 7 aa, synthetic construct
RGDESVK

SEQ ID NO: 34686 - protein, 7 aa, synthetic construct
RGDETHV

SEQ ID NO: 34687 - protein, 7 aa, synthetic construct
RGDETIR

SEQ ID NO: 34688 - protein, 7 aa, synthetic construct
RGDETSL

SEQ ID NO: 34689 - protein, 7 aa, synthetic construct
RGDEVEL

SEQ ID NO: 34690 - protein, 7 aa, synthetic construct
RGDEVIE

SEQ ID NO: 34691 - protein, 7 aa, synthetic construct
RGDEVIL

SEQ ID NO: 34692 - protein, 7 aa, synthetic construct
RGDEVQE

SEQ ID NO: 34693 - protein, 7 aa, synthetic construct
RGDFDII

SEQ ID NO: 34694 - protein, 7 aa, synthetic construct
RGDFEDA

SEQ ID NO: 34695 - protein, 7 aa, synthetic construct
RGDFGEG

SEQ ID NO: 34696 - protein, 7 aa, synthetic construct
RGDFGQL

SEQ ID NO: 34697 - protein, 7 aa, synthetic construct
RGDFHLL

SEQ ID NO: 34698 - protein, 7 aa, synthetic construct
RGDFKIA

SEQ ID NO: 34699 - protein, 7 aa, synthetic construct
RGDFKLG

SEQ ID NO: 34700 - protein, 7 aa, synthetic construct
RGDFLVA

SEQ ID NO: 34701 - protein, 7 aa, synthetic construct
RGDFNLG

SEQ ID NO: 34702 - protein, 7 aa, synthetic construct
RGDFVFE

SEQ ID NO: 34703 - protein, 7 aa, synthetic construct
RGDFVQA

SEQ ID NO: 34704 - protein, 7 aa, synthetic construct
RGDGDEF

SEQ ID NO: 34705 - protein, 7 aa, synthetic construct
RGDGDER

SEQ ID NO: 34706 - protein, 7 aa, synthetic construct
RGDGDGA

SEQ ID NO: 34707 - protein, 7 aa, synthetic construct
RGDGDKA

SEQ ID NO: 34708 - protein, 7 aa, synthetic construct
RGDGDTG

SEQ ID NO: 34709 - protein, 7 aa, synthetic construct
RGDAIFS

SEQ ID NO: 34710 - protein, 7 aa, synthetic construct
RGDGESN

SEQ ID NO: 34711 - protein, 7 aa, synthetic construct
RGDGEVF

SEQ ID NO: 34712 - protein, 7 aa, synthetic construct
RGDGFSD

SEQ ID NO: 34713 - protein, 7 aa, synthetic construct
RGDGGAE

SEQ ID NO: 34714 - protein, 7 aa, synthetic construct
RGDGGDA

SEQ ID NO: 34715 - protein, 7 aa, synthetic construct
RGDGGDT

SEQ ID NO: 34716 - protein, 7 aa, synthetic construct
RGDGGIT

SEQ ID NO: 34717 - protein, 7 aa, synthetic construct
RGDGIFV

SEQ ID NO: 34718 - protein, 7 aa, synthetic construct
RGDGNLH

SEQ ID NO: 34719 - protein, 7 aa, synthetic construct
RGDGRAE

SEQ ID NO: 34720 - protein, 7 aa, synthetic construct
RGDAKDV

SEQ ID NO: 34721 - protein, 7 aa, synthetic construct
RGDGTTA

SEQ ID NO: 34722 - protein, 7 aa, synthetic construct
RGDGVDN

SEQ ID NO: 34723 - protein, 7 aa, synthetic construct
RGDAKIF

SEQ ID NO: 34724 - protein, 7 aa, synthetic construct
RGDHASA

SEQ ID NO: 34725 - protein, 7 aa, synthetic construct
RGDHDLF

SEQ ID NO: 34726 - protein, 7 aa, synthetic construct
RGDHDSV

SEQ ID NO: 34727 - protein, 7 aa, synthetic construct
RGDHEIH

SEQ ID NO: 34728 - protein, 7 aa, synthetic construct
RGDHENA

SEQ ID NO: 34729 - protein, 7 aa, synthetic construct
RGDHFFA

SEQ ID NO: 34730 - protein, 7 aa, synthetic construct
RGDHIFA

SEQ ID NO: 34731 - protein, 7 aa, synthetic construct
RGDHIKD

SEQ ID NO: 34732 - protein, 7 aa, synthetic construct
RGDHKSD

SEQ ID NO: 34733 - protein, 7 aa, synthetic construct
RGDHLHS

SEQ ID NO: 34734 - protein, 7 aa, synthetic construct
RGDHLVE

SEQ ID NO: 34735 - protein, 7 aa, synthetic construct
RGDHNNA

SEQ ID NO: 34736 - protein, 7 aa, synthetic construct
RGDIFTR

SEQ ID NO: 34737 - protein, 7 aa, synthetic construct
RGDIGGD

SEQ ID NO: 34738 - protein, 7 aa, synthetic construct
RGDIGNQ

SEQ ID NO: 34739 - protein, 7 aa, synthetic construct
RGDIGQH

SEQ ID NO: 34740 - protein, 7 aa, synthetic construct
RGDIIGV

SEQ ID NO: 34741 - protein, 7 aa, synthetic construct
RGDILAG

SEQ ID NO: 34742 - protein, 7 aa, synthetic construct
RGDILDL

SEQ ID NO: 34743 - protein, 7 aa, synthetic construct
RGDILSA

SEQ ID NO: 34744 - protein, 7 aa, synthetic construct
RGDINGV

SEQ ID NO: 34745 - protein, 7 aa, synthetic construct
RGDINHA

SEQ ID NO: 34746 - protein, 7 aa, synthetic construct
RGDIQKD

SEQ ID NO: 34747 - protein, 7 aa, synthetic construct
RGDIVDT

SEQ ID NO: 34748 - protein, 7 aa, synthetic construct
RGDKDEA

SEQ ID NO: 34749 - protein, 7 aa, synthetic construct
RGDKEEN

SEQ ID NO: 34750 - protein, 7 aa, synthetic construct
RGDKERD

SEQ ID NO: 34751 - protein, 7 aa, synthetic construct
RGDKERN

SEQ ID NO: 34752 - protein, 7 aa, synthetic construct
RGDKESE

SEQ ID NO: 34753 - protein, 7 aa, synthetic construct
RGDKFTD

SEQ ID NO: 34754 - protein, 7 aa, synthetic construct
RGDKGID

SEQ ID NO: 34755 - protein, 7 aa, synthetic construct
RGDKSRE

SEQ ID NO: 34756 - protein, 7 aa, synthetic construct
RGDKTLT

SEQ ID NO: 34757 - protein, 7 aa, synthetic construct
RGDKVIH

SEQ ID NO: 34758 - protein, 7 aa, synthetic construct
RGDKVLN

SEQ ID NO: 34759 - protein, 7 aa, synthetic construct
RGDKVTE

SEQ ID NO: 34760 - protein, 7 aa, synthetic construct
RGDLDNS

SEQ ID NO: 34761 - protein, 7 aa, synthetic construct
RGDLFVS

SEQ ID NO: 34762 - protein, 7 aa, synthetic construct
RGDLGAD

SEQ ID NO: 34763 - protein, 7 aa, synthetic construct
RGDLGSF

SEQ ID NO: 34764 - protein, 7 aa, synthetic construct
RGDLHND

SEQ ID NO: 34765 - protein, 7 aa, synthetic construct
RGDLNDN

SEQ ID NO: 34766 - protein, 7 aa, synthetic construct
RGDLNQA

SEQ ID NO: 34767 - protein, 7 aa, synthetic construct
RGDLNSE

SEQ ID NO: 34768 - protein, 7 aa, synthetic construct
RGDATET

SEQ ID NO: 34769 - protein, 7 aa, synthetic construct
RGDLSAG

SEQ ID NO: 34770 - protein, 7 aa, synthetic construct
RGDLVAE

SEQ ID NO: 34771 - protein, 7 aa, synthetic construct
RGDLVHL

SEQ ID NO: 34772 - protein, 7 aa, synthetic construct
RGDNAIH

SEQ ID NO: 34773 - protein, 7 aa, synthetic construct
RGDNAVI

SEQ ID NO: 34774 - protein, 7 aa, synthetic construct
RGDNEAS

SEQ ID NO: 34775 - protein, 7 aa, synthetic construct
RGDNEQD

SEQ ID NO: 34776 - protein, 7 aa, synthetic construct
RGDNFEI

SEQ ID NO: 34777 - protein, 7 aa, synthetic construct
RGDNFHL

SEQ ID NO: 34778 - protein, 7 aa, synthetic construct
RGDNFIF

SEQ ID NO: 34779 - protein, 7 aa, synthetic construct
RGDNFTS

SEQ ID NO: 34780 - protein, 7 aa, synthetic construct
RGDNGTG

SEQ ID NO: 34781 - protein, 7 aa, synthetic construct
RGDNHFA

SEQ ID NO: 34782 - protein, 7 aa, synthetic construct
RGDNIKI

SEQ ID NO: 34783 - protein, 7 aa, synthetic construct
RGDNIVK

SEQ ID NO: 34784 - protein, 7 aa, synthetic construct
RGDNKIS

SEQ ID NO: 34785 - protein, 7 aa, synthetic construct
RGDNLGL

SEQ ID NO: 34786 - protein, 7 aa, synthetic construct
RGDNLIE

SEQ ID NO: 34787 - protein, 7 aa, synthetic construct
RGDNNHD

SEQ ID NO: 34788 - protein, 7 aa, synthetic construct
RGDNNII

SEQ ID NO: 34789 - protein, 7 aa, synthetic construct
RGDNNSD

SEQ ID NO: 34790 - protein, 7 aa, synthetic construct
RGDNQIH

SEQ ID NO: 34791 - protein, 7 aa, synthetic construct
RGDNQLH

SEQ ID NO: 34792 - protein, 7 aa, synthetic construct
RGDNRFA

SEQ ID NO: 34793 - protein, 7 aa, synthetic construct
RGDNRQD

SEQ ID NO: 34794 - protein, 7 aa, synthetic construct
RGDNRRA

SEQ ID NO: 34795 - protein, 7 aa, synthetic construct
RGDNSIE

SEQ ID NO: 34796 - protein, 7 aa, synthetic construct
RGDNSNG

SEQ ID NO: 34797 - protein, 7 aa, synthetic construct
RGDNVFS

SEQ ID NO: 34798 - protein, 7 aa, synthetic construct
RGDNVFT

SEQ ID NO: 34799 - protein, 7 aa, synthetic construct
RGDNVLH

SEQ ID NO: 34800 - protein, 7 aa, synthetic construct
RGDNVTA

SEQ ID NO: 34801 - protein, 7 aa, synthetic construct
RGDQADT

SEQ ID NO: 34802 - protein, 7 aa, synthetic construct
RGDQAIN

SEQ ID NO: 34803 - protein, 7 aa, synthetic construct
RGDQDAI

SEQ ID NO: 34804 - protein, 7 aa, synthetic construct
RGDQDET

SEQ ID NO: 34805 - protein, 7 aa, synthetic construct
RGDQDIA

SEQ ID NO: 34806 - protein, 7 aa, synthetic construct
RGDQEED

SEQ ID NO: 34807 - protein, 7 aa, synthetic construct
RGDQELR

SEQ ID NO: 34808 - protein, 7 aa, synthetic construct
RGDQETH

SEQ ID NO: 34809 - protein, 7 aa, synthetic construct
RGDQGDH

SEQ ID NO: 34810 - protein, 7 aa, synthetic construct
RGDQIEN

SEQ ID NO: 34811 - protein, 7 aa, synthetic construct
RGDQIFT

SEQ ID NO: 34812 - protein, 7 aa, synthetic construct
RGDQIHA

SEQ ID NO: 34813 - protein, 7 aa, synthetic construct
RGDQLEV

SEQ ID NO: 34814 - protein, 7 aa, synthetic construct
RGDQNQT

SEQ ID NO: 34815 - protein, 7 aa, synthetic construct
RGDQQGA

SEQ ID NO: 34816 - protein, 7 aa, synthetic construct
RGDQQQN

SEQ ID NO: 34817 - protein, 7 aa, synthetic construct
RGDQTAL

SEQ ID NO: 34818 - protein, 7 aa, synthetic construct
RGDDDHF

SEQ ID NO: 34819 - protein, 7 aa, synthetic construct
RGDRATD

SEQ ID NO: 34820 - protein, 7 aa, synthetic construct
RGDRDDN

SEQ ID NO: 34821 - protein, 7 aa, synthetic construct
RGDREIN

SEQ ID NO: 34822 - protein, 7 aa, synthetic construct
RGDRELQ

SEQ ID NO: 34823 - protein, 7 aa, synthetic construct
RGDREVA

SEQ ID NO: 34824 - protein, 7 aa, synthetic construct
RGDRIAE

SEQ ID NO: 34825 - protein, 7 aa, synthetic construct
RGDDEGH

SEQ ID NO: 34826 - protein, 7 aa, synthetic construct
RGDDERD

SEQ ID NO: 34827 - protein, 7 aa, synthetic construct
RGDDETR

SEQ ID NO: 34828 - protein, 7 aa, synthetic construct
RGDSAAV

SEQ ID NO: 34829 - protein, 7 aa, synthetic construct
RGDSAEL

SEQ ID NO: 34830 - protein, 7 aa, synthetic construct
RGDSAIH

SEQ ID NO: 34831 - protein, 7 aa, synthetic construct
RGDSEES

SEQ ID NO: 34832 - protein, 7 aa, synthetic construct
RGDSFQG

SEQ ID NO: 34833 - protein, 7 aa, synthetic construct
RGDSFRD

SEQ ID NO: 34834 - protein, 7 aa, synthetic construct
RGDDFHS

SEQ ID NO: 34835 - protein, 7 aa, synthetic construct
RGDSFVG

SEQ ID NO: 34836 - protein, 7 aa, synthetic construct
RGDSGDT

SEQ ID NO: 34837 - protein, 7 aa, synthetic construct
RGDDFIN

SEQ ID NO: 34838 - protein, 7 aa, synthetic construct
RGDSGSF

SEQ ID NO: 34839 - protein, 7 aa, synthetic construct
RGDDFKH

SEQ ID NO: 34840 - protein, 7 aa, synthetic construct
RGDSHAE

SEQ ID NO: 34841 - protein, 7 aa, synthetic construct
RGDDFKS

SEQ ID NO: 34842 - protein, 7 aa, synthetic construct
RGDSHIA

SEQ ID NO: 34843 - protein, 7 aa, synthetic construct
RGDSHVS

SEQ ID NO: 34844 - protein, 7 aa, synthetic construct
RGDDFSV

SEQ ID NO: 34845 - protein, 7 aa, synthetic construct
RGDSNGE

SEQ ID NO: 34846 - protein, 7 aa, synthetic construct
RGDSQLT

SEQ ID NO: 34847 - protein, 7 aa, synthetic construct
RGDSVSD

SEQ ID NO: 34848 - protein, 7 aa, synthetic construct
RGDSVSE

SEQ ID NO: 34849 - protein, 7 aa, synthetic construct
RGDTAGT

SEQ ID NO: 34850 - protein, 7 aa, synthetic construct
RGDTAIA

SEQ ID NO: 34851 - protein, 7 aa, synthetic construct
RGDTAQA

SEQ ID NO: 34852 - protein, 7 aa, synthetic construct
RGDTDAL

SEQ ID NO: 34853 - protein, 7 aa, synthetic construct
RGDTDEG

SEQ ID NO: 34854 - protein, 7 aa, synthetic construct
RGDTDIL

SEQ ID NO: 34855 - protein, 7 aa, synthetic construct
RGDTDRE

SEQ ID NO: 34856 - protein, 7 aa, synthetic construct
RGDTDTQ

SEQ ID NO: 34857 - protein, 7 aa, synthetic construct
RGDTDVQ

SEQ ID NO: 34858 - protein, 7 aa, synthetic construct
RGDTFNH

SEQ ID NO: 34859 - protein, 7 aa, synthetic construct
RGDDGTV

SEQ ID NO: 34860 - protein, 7 aa, synthetic construct
RGDDGVG

SEQ ID NO: 34861 - protein, 7 aa, synthetic construct
RGDDHAT

SEQ ID NO: 34862 - protein, 7 aa, synthetic construct
RGDTIEF

SEQ ID NO: 34863 - protein, 7 aa, synthetic construct
RGDTIEQ

SEQ ID NO: 34864 - protein, 7 aa, synthetic construct
RGDDHEF

SEQ ID NO: 34865 - protein, 7 aa, synthetic construct
RGDTLIA

SEQ ID NO: 34866 - protein, 7 aa, synthetic construct
RGDTNDF

SEQ ID NO: 34867 - protein, 7 aa, synthetic construct
RGDTNHT

SEQ ID NO: 34868 - protein, 7 aa, synthetic construct
RGDTNLH

SEQ ID NO: 34869 - protein, 7 aa, synthetic construct
RGDTNNH

SEQ ID NO: 34870 - protein, 7 aa, synthetic construct
RGDTQIS

SEQ ID NO: 34871 - protein, 7 aa, synthetic construct
RGDTRAE

SEQ ID NO: 34872 - protein, 7 aa, synthetic construct
RGDTRSD

SEQ ID NO: 34873 - protein, 7 aa, synthetic construct
RGDTSAN

SEQ ID NO: 34874 - protein, 7 aa, synthetic construct
RGDTTSD

SEQ ID NO: 34875 - protein, 7 aa, synthetic construct
RGDTTVL

SEQ ID NO: 34876 - protein, 7 aa, synthetic construct
RGDTVAS

SEQ ID NO: 34877 - protein, 7 aa, synthetic construct
RGDTVGV

SEQ ID NO: 34878 - protein, 7 aa, synthetic construct
RGDDHVA

SEQ ID NO: 34879 - protein, 7 aa, synthetic construct
RGDDIAG

SEQ ID NO: 34880 - protein, 7 aa, synthetic construct
RGDVDQQ

SEQ ID NO: 34881 - protein, 7 aa, synthetic construct
RGDVEDK

SEQ ID NO: 34882 - protein, 7 aa, synthetic construct
RGDVEVK

SEQ ID NO: 34883 - protein, 7 aa, synthetic construct
RGDVFFN

SEQ ID NO: 34884 - protein, 7 aa, synthetic construct
RGDVFQH

SEQ ID NO: 34885 - protein, 7 aa, synthetic construct
RGDVGAT

SEQ ID NO: 34886 - protein, 7 aa, synthetic construct
RGDVGIS

SEQ ID NO: 34887 - protein, 7 aa, synthetic construct
RGDDIKN

SEQ ID NO: 34888 - protein, 7 aa, synthetic construct
RGDVIQQ

SEQ ID NO: 34889 - protein, 7 aa, synthetic construct
RGDVLAF

SEQ ID NO: 34890 - protein, 7 aa, synthetic construct
RGDVNAT

SEQ ID NO: 34891 - protein, 7 aa, synthetic construct
RGDDKAD

SEQ ID NO: 34892 - protein, 7 aa, synthetic construct
RGDVQIA

SEQ ID NO: 34893 - protein, 7 aa, synthetic construct
RGDVVVD

SEQ ID NO: 34894 - protein, 7 aa, synthetic construct
RGDAEHA

SEQ ID NO: 34895 - protein, 7 aa, synthetic construct
RGDDLHV

SEQ ID NO: 34896 - protein, 7 aa, synthetic construct
RGDDLIV

SEQ ID NO: 34897 - protein, 7 aa, synthetic construct
RGDDNKE

SEQ ID NO: 34898 - protein, 7 aa, synthetic construct
RGDDQKA

SEQ ID NO: 34899 - protein, 7 aa, synthetic construct
RGDDRFL

SEQ ID NO: 34900 - protein, 7 aa, synthetic construct
RGDDSHD

SEQ ID NO: 34901 - protein, 7 aa, synthetic construct
RGDDSQL

SEQ ID NO: 34902 - protein, 7 aa, synthetic construct
RGDDTFH

SEQ ID NO: 34903 - protein, 7 aa, synthetic construct
RGDDTKR

SEQ ID NO: 34904 - protein, 7 aa, synthetic construct
RGDDTLK

SEQ ID NO: 34905 - protein, 7 aa, synthetic construct
RGDDVKD

SEQ ID NO: 34906 - protein, 7 aa, synthetic construct
RGDDVQL

SEQ ID NO: 34907 - protein, 7 aa, synthetic construct
RGDEDHD

SEQ ID NO: 34908 - protein, 7 aa, synthetic construct
RGDEDIH

SEQ ID NO: 34909 - protein, 7 aa, synthetic construct
RGDAFEF

SEQ ID NO: 34910 - protein, 7 aa, synthetic construct
RGDEDKQ

SEQ ID NO: 34911 - protein, 7 aa, synthetic construct
RGDEEAR

SEQ ID NO: 34912 - protein, 7 aa, synthetic construct
RGDEEES

SEQ ID NO: 34913 - protein, 7 aa, synthetic construct
RGDAFGF

SEQ ID NO: 34914 - protein, 7 aa, synthetic construct
RGDEFFI

SEQ ID NO: 34915 - protein, 7 aa, synthetic construct
RGDEFTK

SEQ ID NO: 34916 - protein, 7 aa, synthetic construct
RGDEGSQ

SEQ ID NO: 34917 - protein, 7 aa, synthetic construct
RGDEGTV

SEQ ID NO: 34918 - protein, 7 aa, synthetic construct
RGDEHEV

SEQ ID NO: 34919 - protein, 7 aa, synthetic construct
RGDEHLL

SEQ ID NO: 34920 - protein, 7 aa, synthetic construct
RGDAFNQ

SEQ ID NO: 34921 - protein, 7 aa, synthetic construct
RGDEIKK

SEQ ID NO: 34922 - protein, 7 aa, synthetic construct
RGDEKES

SEQ ID NO: 34923 - protein, 7 aa, synthetic construct
RGDELFH

SEQ ID NO: 34924 - protein, 7 aa, synthetic construct
RGDAFTT

SEQ ID NO: 34925 - protein, 7 aa, synthetic construct
RGDAFTV

SEQ ID NO: 34926 - protein, 7 aa, synthetic construct
RGDAFVH

SEQ ID NO: 34927 - protein, 7 aa, synthetic construct
RGDEQID

SEQ ID NO: 34928 - protein, 7 aa, synthetic construct
RGDEQKH

SEQ ID NO: 34929 - protein, 7 aa, synthetic construct
RGDESAK

SEQ ID NO: 34930 - protein, 7 aa, synthetic construct
RGDESFA

SEQ ID NO: 34931 - protein, 7 aa, synthetic construct
RGDFDAV

SEQ ID NO: 34932 - protein, 7 aa, synthetic construct
RGDFDFE

SEQ ID NO: 34933 - protein, 7 aa, synthetic construct
RGDFEAD

SEQ ID NO: 34934 - protein, 7 aa, synthetic construct
RGDFGED

SEQ ID NO: 34935 - protein, 7 aa, synthetic construct
RGDFGTE

SEQ ID NO: 34936 - protein, 7 aa, synthetic construct
RGDFHFD

SEQ ID NO: 34937 - protein, 7 aa, synthetic construct
RGDAHDF

SEQ ID NO: 34938 - protein, 7 aa, synthetic construct
RGDFIAF

SEQ ID NO: 34939 - protein, 7 aa, synthetic construct
RGDFKDG

SEQ ID NO: 34940 - protein, 7 aa, synthetic construct
RGDFLSE

SEQ ID NO: 34941 - protein, 7 aa, synthetic construct
RGDFTEL

SEQ ID NO: 34942 - protein, 7 aa, synthetic construct
RGDFTLN

SEQ ID NO: 34943 - protein, 7 aa, synthetic construct
RGDFTNA

SEQ ID NO: 34944 - protein, 7 aa, synthetic construct
RGDFVKG

SEQ ID NO: 34945 - protein, 7 aa, synthetic construct
RGDGDEG

SEQ ID NO: 34946 - protein, 7 aa, synthetic construct
RGDGDLL

SEQ ID NO: 34947 - protein, 7 aa, synthetic construct
RGDGDNL

SEQ ID NO: 34948 - protein, 7 aa, synthetic construct
RGDGEDL

SEQ ID NO: 34949 - protein, 7 aa, synthetic construct
RGDGEDV

SEQ ID NO: 34950 - protein, 7 aa, synthetic construct
RGDGEER

SEQ ID NO: 34951 - protein, 7 aa, synthetic construct
RGDGEHA

SEQ ID NO: 34952 - protein, 7 aa, synthetic construct
RGDGEQN

SEQ ID NO: 34953 - protein, 7 aa, synthetic construct
RGDGESA

SEQ ID NO: 34954 - protein, 7 aa, synthetic construct
RGDGEVG

SEQ ID NO: 34955 - protein, 7 aa, synthetic construct
RGDAANN

SEQ ID NO: 34956 - protein, 7 aa, synthetic construct
RGDGGQE

SEQ ID NO: 34957 - protein, 7 aa, synthetic construct
RGDAIKE

SEQ ID NO: 34958 - protein, 7 aa, synthetic construct
RGDGHFI

SEQ ID NO: 34959 - protein, 7 aa, synthetic construct
RGDGKHG

SEQ ID NO: 34960 - protein, 7 aa, synthetic construct
RGDGKVA

SEQ ID NO: 34961 - protein, 7 aa, synthetic construct
RGDGLSV

SEQ ID NO: 34962 - protein, 7 aa, synthetic construct
RGDGNDA

SEQ ID NO: 34963 - protein, 7 aa, synthetic construct
RGDGNGF

SEQ ID NO: 34964 - protein, 7 aa, synthetic construct
RGDGQAA

SEQ ID NO: 34965 - protein, 7 aa, synthetic construct
RGDAKDN

SEQ ID NO: 34966 - protein, 7 aa, synthetic construct
RGDGTVS

SEQ ID NO: 34967 - protein, 7 aa, synthetic construct
RGDHDEF

SEQ ID NO: 34968 - protein, 7 aa, synthetic construct
RGDHDVS

SEQ ID NO: 34969 - protein, 7 aa, synthetic construct
RGDHEGI

SEQ ID NO: 34970 - protein, 7 aa, synthetic construct
RGDHETD

SEQ ID NO: 34971 - protein, 7 aa, synthetic construct
RGDHFEQ

SEQ ID NO: 34972 - protein, 7 aa, synthetic construct
RGDHFGG

SEQ ID NO: 34973 - protein, 7 aa, synthetic construct
RGDHNHN

SEQ ID NO: 34974 - protein, 7 aa, synthetic construct
RGDHQQH

SEQ ID NO: 34975 - protein, 7 aa, synthetic construct
RGDHQVN

SEQ ID NO: 34976 - protein, 7 aa, synthetic construct
RGDHRAS

SEQ ID NO: 34977 - protein, 7 aa, synthetic construct
RGDHTVN

SEQ ID NO: 34978 - protein, 7 aa, synthetic construct
RGDHVIG

SEQ ID NO: 34979 - protein, 7 aa, synthetic construct
RGDIDNE

SEQ ID NO: 34980 - protein, 7 aa, synthetic construct
RGDIENT

SEQ ID NO: 34981 - protein, 7 aa, synthetic construct
RGDIFIA

SEQ ID NO: 34982 - protein, 7 aa, synthetic construct
RGDIGDN

SEQ ID NO: 34983 - protein, 7 aa, synthetic construct
RGDIHDQ

SEQ ID NO: 34984 - protein, 7 aa, synthetic construct
RGDIHVH

SEQ ID NO: 34985 - protein, 7 aa, synthetic construct
RGDIIAS

SEQ ID NO: 34986 - protein, 7 aa, synthetic construct
RGDIIIQ

SEQ ID NO: 34987 - protein, 7 aa, synthetic construct
RGDIKQH

SEQ ID NO: 34988 - protein, 7 aa, synthetic construct
RGDILQD

SEQ ID NO: 34989 - protein, 7 aa, synthetic construct
RGDINAV

SEQ ID NO: 34990 - protein, 7 aa, synthetic construct
RGDINRF

SEQ ID NO: 34991 - protein, 7 aa, synthetic construct
RGDITAS

SEQ ID NO: 34992 - protein, 7 aa, synthetic construct
RGDITFN

SEQ ID NO: 34993 - protein, 7 aa, synthetic construct
RGDITLN

SEQ ID NO: 34994 - protein, 7 aa, synthetic construct
RGDITQH

SEQ ID NO: 34995 - protein, 7 aa, synthetic construct
RGDIVFF

SEQ ID NO: 34996 - protein, 7 aa, synthetic construct
RGDKAGG

SEQ ID NO: 34997 - protein, 7 aa, synthetic construct
RGDKDFA

SEQ ID NO: 34998 - protein, 7 aa, synthetic construct
RGDKDKT

SEQ ID NO: 34999 - protein, 7 aa, synthetic construct
RGDKDQT

SEQ ID NO: 35000 - protein, 7 aa, synthetic construct
RGDKFIF

SEQ ID NO: 35001 - protein, 7 aa, synthetic construct
RGDKHDG

SEQ ID NO: 35002 - protein, 7 aa, synthetic construct
RGDKHTD

SEQ ID NO: 35003 - protein, 7 aa, synthetic construct
RGDKITG

SEQ ID NO: 35004 - protein, 7 aa, synthetic construct
RGDKKAD

SEQ ID NO: 35005 - protein, 7 aa, synthetic construct
RGDKLQD

SEQ ID NO: 35006 - protein, 7 aa, synthetic construct
RGDKNAG

SEQ ID NO: 35007 - protein, 7 aa, synthetic construct
RGDKQIE

SEQ ID NO: 35008 - protein, 7 aa, synthetic construct
RGDKQIG

SEQ ID NO: 35009 - protein, 7 aa, synthetic construct
RGDKRID

SEQ ID NO: 35010 - protein, 7 aa, synthetic construct
RGDADEL

SEQ ID NO: 35011 - protein, 7 aa, synthetic construct
RGDKVEG

SEQ ID NO: 35012 - protein, 7 aa, synthetic construct
RGDASAF

SEQ ID NO: 35013 - protein, 7 aa, synthetic construct
RGDADFG

SEQ ID NO: 35014 - protein, 7 aa, synthetic construct
RGDLERQ

SEQ ID NO: 35015 - protein, 7 aa, synthetic construct
RGDLFFG

SEQ ID NO: 35016 - protein, 7 aa, synthetic construct
RGDLFTG

SEQ ID NO: 35017 - protein, 7 aa, synthetic construct
RGDLGGH

SEQ ID NO: 35018 - protein, 7 aa, synthetic construct
RGDLHDQ

SEQ ID NO: 35019 - protein, 7 aa, synthetic construct
RGDLHIH

SEQ ID NO: 35020 - protein, 7 aa, synthetic construct
RGDASLS

SEQ ID NO: 35021 - protein, 7 aa, synthetic construct
RGDLIAL

SEQ ID NO: 35022 - protein, 7 aa, synthetic construct
RGDLLIR

SEQ ID NO: 35023 - protein, 7 aa, synthetic construct
RGDLNNH

SEQ ID NO: 35024 - protein, 7 aa, synthetic construct
RGDLQVR

SEQ ID NO: 35025 - protein, 7 aa, synthetic construct
RGDATEQ

SEQ ID NO: 35026 - protein, 7 aa, synthetic construct
RGDLSFI

SEQ ID NO: 35027 - protein, 7 aa, synthetic construct
RGDLSIE

SEQ ID NO: 35028 - protein, 7 aa, synthetic construct
RGDATHH

SEQ ID NO: 35029 - protein, 7 aa, synthetic construct
RGDLVDK

SEQ ID NO: 35030 - protein, 7 aa, synthetic construct
RGDLVEF

SEQ ID NO: 35031 - protein, 7 aa, synthetic construct
RGDNAEE

SEQ ID NO: 35032 - protein, 7 aa, synthetic construct
RGDATLK

SEQ ID NO: 35033 - protein, 7 aa, synthetic construct
RGDNDAF

SEQ ID NO: 35034 - protein, 7 aa, synthetic construct
RGDNDDT

SEQ ID NO: 35035 - protein, 7 aa, synthetic construct
RGDNDSF

SEQ ID NO: 35036 - protein, 7 aa, synthetic construct
RGDNFGV

SEQ ID NO: 35037 - protein, 7 aa, synthetic construct
RGDNFTE

SEQ ID NO: 35038 - protein, 7 aa, synthetic construct
RGDNFTH

SEQ ID NO: 35039 - protein, 7 aa, synthetic construct
RGDNGDV

SEQ ID NO: 35040 - protein, 7 aa, synthetic construct
RGDNHHA

SEQ ID NO: 35041 - protein, 7 aa, synthetic construct
RGDAVDE

SEQ ID NO: 35042 - protein, 7 aa, synthetic construct
RGDNHTD

SEQ ID NO: 35043 - protein, 7 aa, synthetic construct
RGDNISV

SEQ ID NO: 35044 - protein, 7 aa, synthetic construct
RGDNLIL

SEQ ID NO: 35045 - protein, 7 aa, synthetic construct
RGDNNHA

SEQ ID NO: 35046 - protein, 7 aa, synthetic construct
RGDNNLT

SEQ ID NO: 35047 - protein, 7 aa, synthetic construct
RGDNNQD

SEQ ID NO: 35048 - protein, 7 aa, synthetic construct
RGDNQAH

SEQ ID NO: 35049 - protein, 7 aa, synthetic construct
RGDNQSE

SEQ ID NO: 35050 - protein, 7 aa, synthetic construct
RGDNSGD

SEQ ID NO: 35051 - protein, 7 aa, synthetic construct
RGDNTEE

SEQ ID NO: 35052 - protein, 7 aa, synthetic construct
RGDNVDQ

SEQ ID NO: 35053 - protein, 7 aa, synthetic construct
RGDNVIG

SEQ ID NO: 35054 - protein, 7 aa, synthetic construct
RGDQAIH

SEQ ID NO: 35055 - protein, 7 aa, synthetic construct
RGDQFED

SEQ ID NO: 35056 - protein, 7 aa, synthetic construct
RGDQFIH

SEQ ID NO: 35057 - protein, 7 aa, synthetic construct
RGDQFLL

SEQ ID NO: 35058 - protein, 7 aa, synthetic construct
RGDQIDH

SEQ ID NO: 35059 - protein, 7 aa, synthetic construct
RGDQKIE

SEQ ID NO: 35060 - protein, 7 aa, synthetic construct
RGDQLAT

SEQ ID NO: 35061 - protein, 7 aa, synthetic construct
RGDQLFN

SEQ ID NO: 35062 - protein, 7 aa, synthetic construct
RGDQNDG

SEQ ID NO: 35063 - protein, 7 aa, synthetic construct
RGDDAVL

SEQ ID NO: 35064 - protein, 7 aa, synthetic construct
RGDQTFG

SEQ ID NO: 35065 - protein, 7 aa, synthetic construct
RGDQTST

SEQ ID NO: 35066 - protein, 7 aa, synthetic construct
RGDQVDI

SEQ ID NO: 35067 - protein, 7 aa, synthetic construct
RGDDDIQ

SEQ ID NO: 35068 - protein, 7 aa, synthetic construct
RGDQVTA

SEQ ID NO: 35069 - protein, 7 aa, synthetic construct
RGDDDKL

SEQ ID NO: 35070 - protein, 7 aa, synthetic construct
RGDDDKR

SEQ ID NO: 35071 - protein, 7 aa, synthetic construct
RGDDDLE

SEQ ID NO: 35072 - protein, 7 aa, synthetic construct
RGDDDSD

SEQ ID NO: 35073 - protein, 7 aa, synthetic construct
RGDDEAR

SEQ ID NO: 35074 - protein, 7 aa, synthetic construct
RGDDEKQ

SEQ ID NO: 35075 - protein, 7 aa, synthetic construct
RGDRVLG

SEQ ID NO: 35076 - protein, 7 aa, synthetic construct
RGDSAQD

SEQ ID NO: 35077 - protein, 7 aa, synthetic construct
RGDSATD

SEQ ID NO: 35078 - protein, 7 aa, synthetic construct
RGDSDFK

SEQ ID NO: 35079 - protein, 7 aa, synthetic construct
RGDSDKA

SEQ ID NO: 35080 - protein, 7 aa, synthetic construct
RGDSDKD

SEQ ID NO: 35081 - protein, 7 aa, synthetic construct
RGDSEEH

SEQ ID NO: 35082 - protein, 7 aa, synthetic construct
RGDADSV

SEQ ID NO: 35083 - protein, 7 aa, synthetic construct
RGDSISA

SEQ ID NO: 35084 - protein, 7 aa, synthetic construct
RGDSKHG

SEQ ID NO: 35085 - protein, 7 aa, synthetic construct
RGDSKIA

SEQ ID NO: 35086 - protein, 7 aa, synthetic construct
RGDDFSI

SEQ ID NO: 35087 - protein, 7 aa, synthetic construct
RGDSLNS

SEQ ID NO: 35088 - protein, 7 aa, synthetic construct
RGDSLQA

SEQ ID NO: 35089 - protein, 7 aa, synthetic construct
RGDSLSE

SEQ ID NO: 35090 - protein, 7 aa, synthetic construct
RGDSQNH

SEQ ID NO: 35091 - protein, 7 aa, synthetic construct
RGDDGDS

SEQ ID NO: 35092 - protein, 7 aa, synthetic construct
RGDSRLG

SEQ ID NO: 35093 - protein, 7 aa, synthetic construct
RGDDGHK

SEQ ID NO: 35094 - protein, 7 aa, synthetic construct
RGDTAFV

SEQ ID NO: 35095 - protein, 7 aa, synthetic construct
RGDTEFS

SEQ ID NO: 35096 - protein, 7 aa, synthetic construct
RGDTEKA

SEQ ID NO: 35097 - protein, 7 aa, synthetic construct
RGDTERF

SEQ ID NO: 35098 - protein, 7 aa, synthetic construct
RGDTFFG

SEQ ID NO: 35099 - protein, 7 aa, synthetic construct
RGDTFFQ

SEQ ID NO: 35100 - protein, 7 aa, synthetic construct
RGDTHHV

SEQ ID NO: 35101 - protein, 7 aa, synthetic construct
RGDTHIS

SEQ ID NO: 35102 - protein, 7 aa, synthetic construct
RGDTILN

SEQ ID NO: 35103 - protein, 7 aa, synthetic construct
RGDTKRH

SEQ ID NO: 35104 - protein, 7 aa, synthetic construct
RGDTLDF

SEQ ID NO: 35105 - protein, 7 aa, synthetic construct
RGDTNEG

SEQ ID NO: 35106 - protein, 7 aa, synthetic construct
RGDTNIQ

SEQ ID NO: 35107 - protein, 7 aa, synthetic construct
RGDTNNI

SEQ ID NO: 35108 - protein, 7 aa, synthetic construct
RGDTNNV

SEQ ID NO: 35109 - protein, 7 aa, synthetic construct
RGDTQIA

SEQ ID NO: 35110 - protein, 7 aa, synthetic construct
RGDTSHN

SEQ ID NO: 35111 - protein, 7 aa, synthetic construct
RGDDHRD

SEQ ID NO: 35112 - protein, 7 aa, synthetic construct
RGDTSQE

SEQ ID NO: 35113 - protein, 7 aa, synthetic construct
RGDTTII

SEQ ID NO: 35114 - protein, 7 aa, synthetic construct
RGDTTRH

SEQ ID NO: 35115 - protein, 7 aa, synthetic construct
RGDTVLA

SEQ ID NO: 35116 - protein, 7 aa, synthetic construct
RGDDIAL

SEQ ID NO: 35117 - protein, 7 aa, synthetic construct
RGDVEIS

SEQ ID NO: 35118 - protein, 7 aa, synthetic construct
RGDVEIV

SEQ ID NO: 35119 - protein, 7 aa, synthetic construct
RGDVENN

SEQ ID NO: 35120 - protein, 7 aa, synthetic construct
RGDVENQ

SEQ ID NO: 35121 - protein, 7 aa, synthetic construct
RGDVERV

SEQ ID NO: 35122 - protein, 7 aa, synthetic construct
RGDVETK

SEQ ID NO: 35123 - protein, 7 aa, synthetic construct
RGDVFHQ

SEQ ID NO: 35124 - protein, 7 aa, synthetic construct
RGDVFTR

SEQ ID NO: 35125 - protein, 7 aa, synthetic construct
RGDDIKD

SEQ ID NO: 35126 - protein, 7 aa, synthetic construct
RGDVHAE

SEQ ID NO: 35127 - protein, 7 aa, synthetic construct
RGDVHDH

SEQ ID NO: 35128 - protein, 7 aa, synthetic construct
RGDVIQG

SEQ ID NO: 35129 - protein, 7 aa, synthetic construct
RGDVIRQ

SEQ ID NO: 35130 - protein, 7 aa, synthetic construct
RGDVLNS

SEQ ID NO: 35131 - protein, 7 aa, synthetic construct
RGDVLQA

SEQ ID NO: 35132 - protein, 7 aa, synthetic construct
RGDVNAE

SEQ ID NO: 35133 - protein, 7 aa, synthetic construct
RGDVNDL

SEQ ID NO: 35134 - protein, 7 aa, synthetic construct
RGDVNSH

SEQ ID NO: 35135 - protein, 7 aa, synthetic construct
RGDDIVT

SEQ ID NO: 35136 - protein, 7 aa, synthetic construct
RGDDKAH

SEQ ID NO: 35137 - protein, 7 aa, synthetic construct
RGDDKFN

SEQ ID NO: 35138 - protein, 7 aa, synthetic construct
RGDVVKE

SEQ ID NO: 35139 - protein, 7 aa, synthetic construct
RGDDLGR

SEQ ID NO: 35140 - protein, 7 aa, synthetic construct
RGDDLQG

SEQ ID NO: 35141 - protein, 7 aa, synthetic construct
RGDDNGR

SEQ ID NO: 35142 - protein, 7 aa, synthetic construct
RGDDNQI

SEQ ID NO: 35143 - protein, 7 aa, synthetic construct
RGDDQGT

SEQ ID NO: 35144 - protein, 7 aa, synthetic construct
RGDDQIF

SEQ ID NO: 35145 - protein, 7 aa, synthetic construct
RGDDQIG

SEQ ID NO: 35146 - protein, 7 aa, synthetic construct
RGDDQTK

SEQ ID NO: 35147 - protein, 7 aa, synthetic construct
RGDDRFI

SEQ ID NO: 35148 - protein, 7 aa, synthetic construct
RGDDRHQ

SEQ ID NO: 35149 - protein, 7 aa, synthetic construct
RGDDRQQ

SEQ ID NO: 35150 - protein, 7 aa, synthetic construct
RGDDSFD

SEQ ID NO: 35151 - protein, 7 aa, synthetic construct
RGDAEQS

SEQ ID NO: 35152 - protein, 7 aa, synthetic construct
RGDDSLK

SEQ ID NO: 35153 - protein, 7 aa, synthetic construct
RGDDSNR

SEQ ID NO: 35154 - protein, 7 aa, synthetic construct
RGDDTIL

SEQ ID NO: 35155 - protein, 7 aa, synthetic construct
RGDDTTS

SEQ ID NO: 35156 - protein, 7 aa, synthetic construct
RGDDVDL

SEQ ID NO: 35157 - protein, 7 aa, synthetic construct
RGDEAER

SEQ ID NO: 35158 - protein, 7 aa, synthetic construct
RGDEALE

SEQ ID NO: 35159 - protein, 7 aa, synthetic construct
RGDEASD

SEQ ID NO: 35160 - protein, 7 aa, synthetic construct
RGDEASQ

SEQ ID NO: 35161 - protein, 7 aa, synthetic construct
RGDAFDI

SEQ ID NO: 35162 - protein, 7 aa, synthetic construct
RGDEDAD

SEQ ID NO: 35163 - protein, 7 aa, synthetic construct
RGDEDEQ

SEQ ID NO: 35164 - protein, 7 aa, synthetic construct
RGDEEHV

SEQ ID NO: 35165 - protein, 7 aa, synthetic construct
RGDEEIH

SEQ ID NO: 35166 - protein, 7 aa, synthetic construct
RGDEETK

SEQ ID NO: 35167 - protein, 7 aa, synthetic construct
RGDEFDQ

SEQ ID NO: 35168 - protein, 7 aa, synthetic construct
RGDEFEL

SEQ ID NO: 35169 - protein, 7 aa, synthetic construct
RGDEFGA

SEQ ID NO: 35170 - protein, 7 aa, synthetic construct
RGDEFHV

SEQ ID NO: 35171 - protein, 7 aa, synthetic construct
RGDEGIH

SEQ ID NO: 35172 - protein, 7 aa, synthetic construct
RGDEGKG

SEQ ID NO: 35173 - protein, 7 aa, synthetic construct
RGDEGSA

SEQ ID NO: 35174 - protein, 7 aa, synthetic construct
RGDAFND

SEQ ID NO: 35175 - protein, 7 aa, synthetic construct
RGDEIRS

SEQ ID NO: 35176 - protein, 7 aa, synthetic construct
RGDEKDI

SEQ ID NO: 35177 - protein, 7 aa, synthetic construct
RGDEKQI

SEQ ID NO: 35178 - protein, 7 aa, synthetic construct
RGDELQS

SEQ ID NO: 35179 - protein, 7 aa, synthetic construct
RGDENTL

SEQ ID NO: 35180 - protein, 7 aa, synthetic construct
RGDENTR

SEQ ID NO: 35181 - protein, 7 aa, synthetic construct
RGDERDA

SEQ ID NO: 35182 - protein, 7 aa, synthetic construct
RGDERGL

SEQ ID NO: 35183 - protein, 7 aa, synthetic construct
RGDESNF

SEQ ID NO: 35184 - protein, 7 aa, synthetic construct
RGDETHS

SEQ ID NO: 35185 - protein, 7 aa, synthetic construct
RGDETNE

SEQ ID NO: 35186 - protein, 7 aa, synthetic construct
RGDEVDH

SEQ ID NO: 35187 - protein, 7 aa, synthetic construct
RGDEVHK

SEQ ID NO: 35188 - protein, 7 aa, synthetic construct
RGDFAVE

SEQ ID NO: 35189 - protein, 7 aa, synthetic construct
RGDFDFF

SEQ ID NO: 35190 - protein, 7 aa, synthetic construct
RGDFDQH

SEQ ID NO: 35191 - protein, 7 aa, synthetic construct
RGDFEDN

SEQ ID NO: 35192 - protein, 7 aa, synthetic construct
RGDFFGE

SEQ ID NO: 35193 - protein, 7 aa, synthetic construct
RGDFFLQ

SEQ ID NO: 35194 - protein, 7 aa, synthetic construct
RGDAGTQ

SEQ ID NO: 35195 - protein, 7 aa, synthetic construct
RGDFISG

SEQ ID NO: 35196 - protein, 7 aa, synthetic construct
RGDAHEV

SEQ ID NO: 35197 - protein, 7 aa, synthetic construct
RGDFLIR

SEQ ID NO: 35198 - protein, 7 aa, synthetic construct
RGDFLLH

SEQ ID NO: 35199 - protein, 7 aa, synthetic construct
RGDFNSD

SEQ ID NO: 35200 - protein, 7 aa, synthetic construct
RGDFQVA

SEQ ID NO: 35201 - protein, 7 aa, synthetic construct
RGDFSVE

SEQ ID NO: 35202 - protein, 7 aa, synthetic construct
RGDFTNG

SEQ ID NO: 35203 - protein, 7 aa, synthetic construct
RGDGEHT

SEQ ID NO: 35204 - protein, 7 aa, synthetic construct
RGDGFAH

SEQ ID NO: 35205 - protein, 7 aa, synthetic construct
RGDGFGH

SEQ ID NO: 35206 - protein, 7 aa, synthetic construct
RGDGFIT

SEQ ID NO: 35207 - protein, 7 aa, synthetic construct
RGDGGIA

SEQ ID NO: 35208 - protein, 7 aa, synthetic construct
RGDGHFH

SEQ ID NO: 35209 - protein, 7 aa, synthetic construct
RGDGISN

SEQ ID NO: 35210 - protein, 7 aa, synthetic construct
RGDGSTE

SEQ ID NO: 35211 - protein, 7 aa, synthetic construct
RGDGSTT

SEQ ID NO: 35212 - protein, 7 aa, synthetic construct
RGDHAAG

SEQ ID NO: 35213 - protein, 7 aa, synthetic construct
RGDHDNG

SEQ ID NO: 35214 - protein, 7 aa, synthetic construct
RGDHEQG

SEQ ID NO: 35215 - protein, 7 aa, synthetic construct
RGDHFEL

SEQ ID NO: 35216 - protein, 7 aa, synthetic construct
RGDHFHA

SEQ ID NO: 35217 - protein, 7 aa, synthetic construct
RGDHGRA

SEQ ID NO: 35218 - protein, 7 aa, synthetic construct
RGDHHAA

SEQ ID NO: 35219 - protein, 7 aa, synthetic construct
RGDHHII

SEQ ID NO: 35220 - protein, 7 aa, synthetic construct
RGDHHRL

SEQ ID NO: 35221 - protein, 7 aa, synthetic construct
RGDHIAQ

SEQ ID NO: 35222 - protein, 7 aa, synthetic construct
RGDHIIK

SEQ ID NO: 35223 - protein, 7 aa, synthetic construct
RGDHINN

SEQ ID NO: 35224 - protein, 7 aa, synthetic construct
RGDHKEA

SEQ ID NO: 35225 - protein, 7 aa, synthetic construct
RGDHKVG

SEQ ID NO: 35226 - protein, 7 aa, synthetic construct
RGDHLED

SEQ ID NO: 35227 - protein, 7 aa, synthetic construct
RGDHNGE

SEQ ID NO: 35228 - protein, 7 aa, synthetic construct
RGDHNIS

SEQ ID NO: 35229 - protein, 7 aa, synthetic construct
RGDALIT

SEQ ID NO: 35230 - protein, 7 aa, synthetic construct
RGDHNQA

SEQ ID NO: 35231 - protein, 7 aa, synthetic construct
RGDHQAN

SEQ ID NO: 35232 - protein, 7 aa, synthetic construct
RGDALVQ

SEQ ID NO: 35233 - protein, 7 aa, synthetic construct
RGDIAEK

SEQ ID NO: 35234 - protein, 7 aa, synthetic construct
RGDIAFD

SEQ ID NO: 35235 - protein, 7 aa, synthetic construct
RGDIAVG

SEQ ID NO: 35236 - protein, 7 aa, synthetic construct
RGDIDTG

SEQ ID NO: 35237 - protein, 7 aa, synthetic construct
RGDIEDD

SEQ ID NO: 35238 - protein, 7 aa, synthetic construct
RGDIEKD

SEQ ID NO: 35239 - protein, 7 aa, synthetic construct
RGDIFDR

SEQ ID NO: 35240 - protein, 7 aa, synthetic construct
RGDIFFE

SEQ ID NO: 35241 - protein, 7 aa, synthetic construct
RGDANHD

SEQ ID NO: 35242 - protein, 7 aa, synthetic construct
RGDIFST

SEQ ID NO: 35243 - protein, 7 aa, synthetic construct
RGDIFTD

SEQ ID NO: 35244 - protein, 7 aa, synthetic construct
RGDIFTS

SEQ ID NO: 35245 - protein, 7 aa, synthetic construct
RGDIFVS

SEQ ID NO: 35246 - protein, 7 aa, synthetic construct
RGDIGIA

SEQ ID NO: 35247 - protein, 7 aa, synthetic construct
RGDIGSQ

SEQ ID NO: 35248 - protein, 7 aa, synthetic construct
RGDIHRD

SEQ ID NO: 35249 - protein, 7 aa, synthetic construct
RGDIIQH

SEQ ID NO: 35250 - protein, 7 aa, synthetic construct
RGDILEH

SEQ ID NO: 35251 - protein, 7 aa, synthetic construct
RGDILFD

SEQ ID NO: 35252 - protein, 7 aa, synthetic construct
RGDINDL

SEQ ID NO: 35253 - protein, 7 aa, synthetic construct
RGDINKE

SEQ ID NO: 35254 - protein, 7 aa, synthetic construct
RGDAQEH

SEQ ID NO: 35255 - protein, 7 aa, synthetic construct
RGDISDG

SEQ ID NO: 35256 - protein, 7 aa, synthetic construct
RGDITLG

SEQ ID NO: 35257 - protein, 7 aa, synthetic construct
RGDITNF

SEQ ID NO: 35258 - protein, 7 aa, synthetic construct
RGDITTD

SEQ ID NO: 35259 - protein, 7 aa, synthetic construct
RGDITTS

SEQ ID NO: 35260 - protein, 7 aa, synthetic construct
RGDIVEN

SEQ ID NO: 35261 - protein, 7 aa, synthetic construct
RGDIVHH

SEQ ID NO: 35262 - protein, 7 aa, synthetic construct
RGDIVVE

SEQ ID NO: 35263 - protein, 7 aa, synthetic construct
RGDKAAL

SEQ ID NO: 35264 - protein, 7 aa, synthetic construct
RGDKADA

SEQ ID NO: 35265 - protein, 7 aa, synthetic construct
RGDAQLG

SEQ ID NO: 35266 - protein, 7 aa, synthetic construct
RGDAQLN

SEQ ID NO: 35267 - protein, 7 aa, synthetic construct
RGDKDET

SEQ ID NO: 35268 - protein, 7 aa, synthetic construct
RGDKDIH

SEQ ID NO: 35269 - protein, 7 aa, synthetic construct
RGDAQQS

SEQ ID NO: 35270 - protein, 7 aa, synthetic construct
RGDKEKE

SEQ ID NO: 35271 - protein, 7 aa, synthetic construct
RGDKFET

SEQ ID NO: 35272 - protein, 7 aa, synthetic construct
RGDKFFA

SEQ ID NO: 35273 - protein, 7 aa, synthetic construct
RGDAQVR

SEQ ID NO: 35274 - protein, 7 aa, synthetic construct
RGDKRVD

SEQ ID NO: 35275 - protein, 7 aa, synthetic construct
RGDKSEE

SEQ ID NO: 35276 - protein, 7 aa, synthetic construct
RGDKSND

SEQ ID NO: 35277 - protein, 7 aa, synthetic construct
RGDKTDG

SEQ ID NO: 35278 - protein, 7 aa, synthetic construct
RGDKVDE

SEQ ID NO: 35279 - protein, 7 aa, synthetic construct
RGDLAFL

SEQ ID NO: 35280 - protein, 7 aa, synthetic construct
RGDLASQ

SEQ ID NO: 35281 - protein, 7 aa, synthetic construct
RGDLDAL

SEQ ID NO: 35282 - protein, 7 aa, synthetic construct
RGDLEAL

SEQ ID NO: 35283 - protein, 7 aa, synthetic construct
RGDLEGS

SEQ ID NO: 35284 - protein, 7 aa, synthetic construct
RGDLETH

SEQ ID NO: 35285 - protein, 7 aa, synthetic construct
RGDLFQG

SEQ ID NO: 35286 - protein, 7 aa, synthetic construct
RGDASQA

SEQ ID NO: 35287 - protein, 7 aa, synthetic construct
RGDLITE

SEQ ID NO: 35288 - protein, 7 aa, synthetic construct
RGDLKDI

SEQ ID NO: 35289 - protein, 7 aa, synthetic construct
RGDLLAH

SEQ ID NO: 35290 - protein, 7 aa, synthetic construct
RGDLNNS

SEQ ID NO: 35291 - protein, 7 aa, synthetic construct
RGDLVLG

SEQ ID NO: 35292 - protein, 7 aa, synthetic construct
RGDNAIS

SEQ ID NO: 35293 - protein, 7 aa, synthetic construct
RGDNASD

SEQ ID NO: 35294 - protein, 7 aa, synthetic construct
RGDNDIF

SEQ ID NO: 35295 - protein, 7 aa, synthetic construct
RGDNEDI

SEQ ID NO: 35296 - protein, 7 aa, synthetic construct
RGDNFQA

SEQ ID NO: 35297 - protein, 7 aa, synthetic construct
RGDNFSS

SEQ ID NO: 35298 - protein, 7 aa, synthetic construct
RGDNFVD

SEQ ID NO: 35299 - protein, 7 aa, synthetic construct
RGDNGDL

SEQ ID NO: 35300 - protein, 7 aa, synthetic construct
RGDNIHL

SEQ ID NO: 35301 - protein, 7 aa, synthetic construct
RGDAVEE

SEQ ID NO: 35302 - protein, 7 aa, synthetic construct
RGDNIQQ

SEQ ID NO: 35303 - protein, 7 aa, synthetic construct
RGDNIVH

SEQ ID NO: 35304 - protein, 7 aa, synthetic construct
RGDNIVR

SEQ ID NO: 35305 - protein, 7 aa, synthetic construct
RGDNLDR

SEQ ID NO: 35306 - protein, 7 aa, synthetic construct
RGDNLVH

SEQ ID NO: 35307 - protein, 7 aa, synthetic construct
RGDNNDE

SEQ ID NO: 35308 - protein, 7 aa, synthetic construct
RGDNNST

SEQ ID NO: 35309 - protein, 7 aa, synthetic construct
RGDNRVG

SEQ ID NO: 35310 - protein, 7 aa, synthetic construct
RGDNSLD

SEQ ID NO: 35311 - protein, 7 aa, synthetic construct
RGDNTAQ

SEQ ID NO: 35312 - protein, 7 aa, synthetic construct
RGDNTKD

SEQ ID NO: 35313 - protein, 7 aa, synthetic construct
RGDNVQH

SEQ ID NO: 35314 - protein, 7 aa, synthetic construct
RGDNVVQ

SEQ ID NO: 35315 - protein, 7 aa, synthetic construct
RGDQEAQ

SEQ ID NO: 35316 - protein, 7 aa, synthetic construct
RGDQEQT

SEQ ID NO: 35317 - protein, 7 aa, synthetic construct
RGDQFEA

SEQ ID NO: 35318 - protein, 7 aa, synthetic construct
RGDQGIA

SEQ ID NO: 35319 - protein, 7 aa, synthetic construct
RGDQIAS

SEQ ID NO: 35320 - protein, 7 aa, synthetic construct
RGDQNES

SEQ ID NO: 35321 - protein, 7 aa, synthetic construct
RGDDAVA

SEQ ID NO: 35322 - protein, 7 aa, synthetic construct
RGDQNND

SEQ ID NO: 35323 - protein, 7 aa, synthetic construct
RGDQSND

SEQ ID NO: 35324 - protein, 7 aa, synthetic construct
RGDQSRD

SEQ ID NO: 35325 - protein, 7 aa, synthetic construct
RGDDDGT

SEQ ID NO: 35326 - protein, 7 aa, synthetic construct
RGDRHLG

SEQ ID NO: 35327 - protein, 7 aa, synthetic construct
RGDRKSE

SEQ ID NO: 35328 - protein, 7 aa, synthetic construct
RGDDETG

SEQ ID NO: 35329 - protein, 7 aa, synthetic construct
RGDRVHE

SEQ ID NO: 35330 - protein, 7 aa, synthetic construct
RGDDEVV

SEQ ID NO: 35331 - protein, 7 aa, synthetic construct
RGDSAFE

SEQ ID NO: 35332 - protein, 7 aa, synthetic construct
RGDDFEQ

SEQ ID NO: 35333 - protein, 7 aa, synthetic construct
RGDSEVD

SEQ ID NO: 35334 - protein, 7 aa, synthetic construct
RGDSGLS

SEQ ID NO: 35335 - protein, 7 aa, synthetic construct
RGDSHKA

SEQ ID NO: 35336 - protein, 7 aa, synthetic construct
RGDSIGT

SEQ ID NO: 35337 - protein, 7 aa, synthetic construct
RGDDFNV

SEQ ID NO: 35338 - protein, 7 aa, synthetic construct
RGDSKDH

SEQ ID NO: 35339 - protein, 7 aa, synthetic construct
RGDADTE

SEQ ID NO: 35340 - protein, 7 aa, synthetic construct
RGDSLDQ

SEQ ID NO: 35341 - protein, 7 aa, synthetic construct
RGDSNLN

SEQ ID NO: 35342 - protein, 7 aa, synthetic construct
RGDSQAT

SEQ ID NO: 35343 - protein, 7 aa, synthetic construct
RGDSQEH

SEQ ID NO: 35344 - protein, 7 aa, synthetic construct
RGDSSDA

SEQ ID NO: 35345 - protein, 7 aa, synthetic construct
RGDSSLE

SEQ ID NO: 35346 - protein, 7 aa, synthetic construct
RGDSTIQ

SEQ ID NO: 35347 - protein, 7 aa, synthetic construct
RGDSVEE

SEQ ID NO: 35348 - protein, 7 aa, synthetic construct
RGDTAKD

SEQ ID NO: 35349 - protein, 7 aa, synthetic construct
RGDTDNV

SEQ ID NO: 35350 - protein, 7 aa, synthetic construct
RGDTEVV

SEQ ID NO: 35351 - protein, 7 aa, synthetic construct
RGDTFGS

SEQ ID NO: 35352 - protein, 7 aa, synthetic construct
RGDDGTD

SEQ ID NO: 35353 - protein, 7 aa, synthetic construct
RGDTFSK

SEQ ID NO: 35354 - protein, 7 aa, synthetic construct
RGDTIRQ

SEQ ID NO: 35355 - protein, 7 aa, synthetic construct
RGDTISH

SEQ ID NO: 35356 - protein, 7 aa, synthetic construct
RGDTKTD

SEQ ID NO: 35357 - protein, 7 aa, synthetic construct
RGDTNFE

SEQ ID NO: 35358 - protein, 7 aa, synthetic construct
RGDTNSE

SEQ ID NO: 35359 - protein, 7 aa, synthetic construct
RGDTQDV

SEQ ID NO: 35360 - protein, 7 aa, synthetic construct
RGDTTRF

SEQ ID NO: 35361 - protein, 7 aa, synthetic construct
RGDTVDH

SEQ ID NO: 35362 - protein, 7 aa, synthetic construct
RGDDHTQ

SEQ ID NO: 35363 - protein, 7 aa, synthetic construct
RGDVALT

SEQ ID NO: 35364 - protein, 7 aa, synthetic construct
RGDVASE

SEQ ID NO: 35365 - protein, 7 aa, synthetic construct
RGDVDDG

SEQ ID NO: 35366 - protein, 7 aa, synthetic construct
RGDVDFG

SEQ ID NO: 35367 - protein, 7 aa, synthetic construct
RGDVDLR

SEQ ID NO: 35368 - protein, 7 aa, synthetic construct
RGDVEDA

SEQ ID NO: 35369 - protein, 7 aa, synthetic construct
RGDVEED

SEQ ID NO: 35370 - protein, 7 aa, synthetic construct
RGDVERD

SEQ ID NO: 35371 - protein, 7 aa, synthetic construct
RGDVFIG

SEQ ID NO: 35372 - protein, 7 aa, synthetic construct
RGDVFLF

SEQ ID NO: 35373 - protein, 7 aa, synthetic construct
RGDDIHI

SEQ ID NO: 35374 - protein, 7 aa, synthetic construct
RGDVGLA

SEQ ID NO: 35375 - protein, 7 aa, synthetic construct
RGDVGNL

SEQ ID NO: 35376 - protein, 7 aa, synthetic construct
RGDVGRE

SEQ ID NO: 35377 - protein, 7 aa, synthetic construct
RGDVHHA

SEQ ID NO: 35378 - protein, 7 aa, synthetic construct
RGDVIER

SEQ ID NO: 35379 - protein, 7 aa, synthetic construct
RGDVIGS

SEQ ID NO: 35380 - protein, 7 aa, synthetic construct
RGDDISG

SEQ ID NO: 35381 - protein, 7 aa, synthetic construct
RGDDISR

SEQ ID NO: 35382 - protein, 7 aa, synthetic construct
RGDVNLL

SEQ ID NO: 35383 - protein, 7 aa, synthetic construct
RGDVNVS

SEQ ID NO: 35384 - protein, 7 aa, synthetic construct
RGDVQAG

SEQ ID NO: 35385 - protein, 7 aa, synthetic construct
RGDVRVE

SEQ ID NO: 35386 - protein, 7 aa, synthetic construct
RGDDKFA

SEQ ID NO: 35387 - protein, 7 aa, synthetic construct
RGDVSEL

SEQ ID NO: 35388 - protein, 7 aa, synthetic construct
RGDVTQE

SEQ ID NO: 35389 - protein, 7 aa, synthetic construct
RGDVTTF

SEQ ID NO: 35390 - protein, 7 aa, synthetic construct
RGDVVES

SEQ ID NO: 35391 - protein, 7 aa, synthetic construct
RGDVVGE

SEQ ID NO: 35392 - protein, 7 aa, synthetic construct
RGDVVLE

SEQ ID NO: 35393 - protein, 7 aa, synthetic construct
RGDDLED

SEQ ID NO: 35394 - protein, 7 aa, synthetic construct
RGDDLEK

SEQ ID NO: 35395 - protein, 7 aa, synthetic construct
RGDDNHG

SEQ ID NO: 35396 - protein, 7 aa, synthetic construct
RGDDNLI

SEQ ID NO: 35397 - protein, 7 aa, synthetic construct
RGDDTAF

SEQ ID NO: 35398 - protein, 7 aa, synthetic construct
RGDDTHA

SEQ ID NO: 35399 - protein, 7 aa, synthetic construct
RGDAFAN

SEQ ID NO: 35400 - protein, 7 aa, synthetic construct
RGDAFAQ

SEQ ID NO: 35401 - protein, 7 aa, synthetic construct
RGDEDEI

SEQ ID NO: 35402 - protein, 7 aa, synthetic construct
RGDEDHQ

SEQ ID NO: 35403 - protein, 7 aa, synthetic construct
RGDEDIR

SEQ ID NO: 35404 - protein, 7 aa, synthetic construct
RGDEDTE

SEQ ID NO: 35405 - protein, 7 aa, synthetic construct
RGDEDTN

SEQ ID NO: 35406 - protein, 7 aa, synthetic construct
RGDEETN

SEQ ID NO: 35407 - protein, 7 aa, synthetic construct
RGDEGDI

SEQ ID NO: 35408 - protein, 7 aa, synthetic construct
RGDEKAN

SEQ ID NO: 35409 - protein, 7 aa, synthetic construct
RGDEKDT

SEQ ID NO: 35410 - protein, 7 aa, synthetic construct
RGDEKIT

SEQ ID NO: 35411 - protein, 7 aa, synthetic construct
RGDEKTE

SEQ ID NO: 35412 - protein, 7 aa, synthetic construct
RGDEKVI

SEQ ID NO: 35413 - protein, 7 aa, synthetic construct
RGDELDF

SEQ ID NO: 35414 - protein, 7 aa, synthetic construct
RGDAFSH

SEQ ID NO: 35415 - protein, 7 aa, synthetic construct
RGDELHK

SEQ ID NO: 35416 - protein, 7 aa, synthetic construct
RGDELNA

SEQ ID NO: 35417 - protein, 7 aa, synthetic construct
RGDENFD

SEQ ID NO: 35418 - protein, 7 aa, synthetic construct
RGDENST

SEQ ID NO: 35419 - protein, 7 aa, synthetic construct
RGDENVQ

SEQ ID NO: 35420 - protein, 7 aa, synthetic construct
RGDEQHR

SEQ ID NO: 35421 - protein, 7 aa, synthetic construct
RGDESTQ

SEQ ID NO: 35422 - protein, 7 aa, synthetic construct
RGDETEF

SEQ ID NO: 35423 - protein, 7 aa, synthetic construct
RGDETEQ

SEQ ID NO: 35424 - protein, 7 aa, synthetic construct
RGDETHI

SEQ ID NO: 35425 - protein, 7 aa, synthetic construct
RGDETTV

SEQ ID NO: 35426 - protein, 7 aa, synthetic construct
RGDEVAH

SEQ ID NO: 35427 - protein, 7 aa, synthetic construct
RGDFAQI

SEQ ID NO: 35428 - protein, 7 aa, synthetic construct
RGDFDQE

SEQ ID NO: 35429 - protein, 7 aa, synthetic construct
RGDFDSD

SEQ ID NO: 35430 - protein, 7 aa, synthetic construct
RGDFEGN

SEQ ID NO: 35431 - protein, 7 aa, synthetic construct
RGDAHHA

SEQ ID NO: 35432 - protein, 7 aa, synthetic construct
RGDFTDS

SEQ ID NO: 35433 - protein, 7 aa, synthetic construct
RGDFTGT

SEQ ID NO: 35434 - protein, 7 aa, synthetic construct
RGDFVDS

SEQ ID NO: 35435 - protein, 7 aa, synthetic construct
RGDGDHA

SEQ ID NO: 35436 - protein, 7 aa, synthetic construct
RGDAIET

SEQ ID NO: 35437 - protein, 7 aa, synthetic construct
RGDGEHE

SEQ ID NO: 35438 - protein, 7 aa, synthetic construct
RGDGEHF

SEQ ID NO: 35439 - protein, 7 aa, synthetic construct
RGDGFEA

SEQ ID NO: 35440 - protein, 7 aa, synthetic construct
RGDAIHQ

SEQ ID NO: 35441 - protein, 7 aa, synthetic construct
RGDGFVE

SEQ ID NO: 35442 - protein, 7 aa, synthetic construct
RGDGHIG

SEQ ID NO: 35443 - protein, 7 aa, synthetic construct
RGDAILG

SEQ ID NO: 35444 - protein, 7 aa, synthetic construct
RGDGKIR

SEQ ID NO: 35445 - protein, 7 aa, synthetic construct
RGDGKQD

SEQ ID NO: 35446 - protein, 7 aa, synthetic construct
RGDGKTG

SEQ ID NO: 35447 - protein, 7 aa, synthetic construct
RGDGLDK

SEQ ID NO: 35448 - protein, 7 aa, synthetic construct
RGDGLFS

SEQ ID NO: 35449 - protein, 7 aa, synthetic construct
RGDGNLL

SEQ ID NO: 35450 - protein, 7 aa, synthetic construct
RGDAIVR

SEQ ID NO: 35451 - protein, 7 aa, synthetic construct
RGDGSEA

SEQ ID NO: 35452 - protein, 7 aa, synthetic construct
RGDGSIQ

SEQ ID NO: 35453 - protein, 7 aa, synthetic construct
RGDGSQA

SEQ ID NO: 35454 - protein, 7 aa, synthetic construct
RGDGTGT

SEQ ID NO: 35455 - protein, 7 aa, synthetic construct
RGDHADS

SEQ ID NO: 35456 - protein, 7 aa, synthetic construct
RGDHAKD

SEQ ID NO: 35457 - protein, 7 aa, synthetic construct
RGDHEET

SEQ ID NO: 35458 - protein, 7 aa, synthetic construct
RGDHENG

SEQ ID NO: 35459 - protein, 7 aa, synthetic construct
RGDHESD

SEQ ID NO: 35460 - protein, 7 aa, synthetic construct
RGDHEVI

SEQ ID NO: 35461 - protein, 7 aa, synthetic construct
RGDHFEF

SEQ ID NO: 35462 - protein, 7 aa, synthetic construct
RGDHFLK

SEQ ID NO: 35463 - protein, 7 aa, synthetic construct
RGDHFSQ

SEQ ID NO: 35464 - protein, 7 aa, synthetic construct
RGDHGEH

SEQ ID NO: 35465 - protein, 7 aa, synthetic construct
RGDHHQA

SEQ ID NO: 35466 - protein, 7 aa, synthetic construct
RGDHKIV

SEQ ID NO: 35467 - protein, 7 aa, synthetic construct
RGDHLQS

SEQ ID NO: 35468 - protein, 7 aa, synthetic construct
RGDHLTS

SEQ ID NO: 35469 - protein, 7 aa, synthetic construct
RGDHQRE

SEQ ID NO: 35470 - protein, 7 aa, synthetic construct
RGDHSSD

SEQ ID NO: 35471 - protein, 7 aa, synthetic construct
RGDHTLF

SEQ ID NO: 35472 - protein, 7 aa, synthetic construct
RGDHTQA

SEQ ID NO: 35473 - protein, 7 aa, synthetic construct
RGDHVGD

SEQ ID NO: 35474 - protein, 7 aa, synthetic construct
RGDIASL

SEQ ID NO: 35475 - protein, 7 aa, synthetic construct
RGDIDHF

SEQ ID NO: 35476 - protein, 7 aa, synthetic construct
RGDIDRH

SEQ ID NO: 35477 - protein, 7 aa, synthetic construct
RGDIEDL

SEQ ID NO: 35478 - protein, 7 aa, synthetic construct
RGDIFQS

SEQ ID NO: 35479 - protein, 7 aa, synthetic construct
RGDIFVK

SEQ ID NO: 35480 - protein, 7 aa, synthetic construct
RGDANIT

SEQ ID NO: 35481 - protein, 7 aa, synthetic construct
RGDIHEG

SEQ ID NO: 35482 - protein, 7 aa, synthetic construct
RGDIHKE

SEQ ID NO: 35483 - protein, 7 aa, synthetic construct
RGDIHSE

SEQ ID NO: 35484 - protein, 7 aa, synthetic construct
RGDIISG

SEQ ID NO: 35485 - protein, 7 aa, synthetic construct
RGDILRE

SEQ ID NO: 35486 - protein, 7 aa, synthetic construct
RGDIQEV

SEQ ID NO: 35487 - protein, 7 aa, synthetic construct
RGDISDS

SEQ ID NO: 35488 - protein, 7 aa, synthetic construct
RGDAQFE

SEQ ID NO: 35489 - protein, 7 aa, synthetic construct
RGDADAG

SEQ ID NO: 35490 - protein, 7 aa, synthetic construct
RGDITGT

SEQ ID NO: 35491 - protein, 7 aa, synthetic construct
RGDITLE

SEQ ID NO: 35492 - protein, 7 aa, synthetic construct
RGDITQS

SEQ ID NO: 35493 - protein, 7 aa, synthetic construct
RGDKATH

SEQ ID NO: 35494 - protein, 7 aa, synthetic construct
RGDKDAE

SEQ ID NO: 35495 - protein, 7 aa, synthetic construct
RGDKDQQ

SEQ ID NO: 35496 - protein, 7 aa, synthetic construct
RGDKEEL

SEQ ID NO: 35497 - protein, 7 aa, synthetic construct
RGDKETG

SEQ ID NO: 35498 - protein, 7 aa, synthetic construct
RGDKIGG

SEQ ID NO: 35499 - protein, 7 aa, synthetic construct
RGDKQRD

SEQ ID NO: 35500 - protein, 7 aa, synthetic construct
RGDKRQS

SEQ ID NO: 35501 - protein, 7 aa, synthetic construct
RGDLADE

SEQ ID NO: 35502 - protein, 7 aa, synthetic construct
RGDASDD

SEQ ID NO: 35503 - protein, 7 aa, synthetic construct
RGDLDGE

SEQ ID NO: 35504 - protein, 7 aa, synthetic construct
RGDLFEK

SEQ ID NO: 35505 - protein, 7 aa, synthetic construct
RGDLFIQ

SEQ ID NO: 35506 - protein, 7 aa, synthetic construct
RGDLGSH

SEQ ID NO: 35507 - protein, 7 aa, synthetic construct
RGDLNGF

SEQ ID NO: 35508 - protein, 7 aa, synthetic construct
RGDLNIF

SEQ ID NO: 35509 - protein, 7 aa, synthetic construct
RGDASVG

SEQ ID NO: 35510 - protein, 7 aa, synthetic construct
RGDLVQG

SEQ ID NO: 35511 - protein, 7 aa, synthetic construct
RGDNAAG

SEQ ID NO: 35512 - protein, 7 aa, synthetic construct
RGDNDLD

SEQ ID NO: 35513 - protein, 7 aa, synthetic construct
RGDNFAV

SEQ ID NO: 35514 - protein, 7 aa, synthetic construct
RGDNFIH

SEQ ID NO: 35515 - protein, 7 aa, synthetic construct
RGDNHIH

SEQ ID NO: 35516 - protein, 7 aa, synthetic construct
RGDNHVQ

SEQ ID NO: 35517 - protein, 7 aa, synthetic construct
RGDNIEV

SEQ ID NO: 35518 - protein, 7 aa, synthetic construct
RGDNIHN

SEQ ID NO: 35519 - protein, 7 aa, synthetic construct
RGDNKLL

SEQ ID NO: 35520 - protein, 7 aa, synthetic construct
RGDNNGV

SEQ ID NO: 35521 - protein, 7 aa, synthetic construct
RGDNQEA

SEQ ID NO: 35522 - protein, 7 aa, synthetic construct
RGDNQLI

SEQ ID NO: 35523 - protein, 7 aa, synthetic construct
RGDNVID

SEQ ID NO: 35524 - protein, 7 aa, synthetic construct
RGDQAVG

SEQ ID NO: 35525 - protein, 7 aa, synthetic construct
RGDQDDV

SEQ ID NO: 35526 - protein, 7 aa, synthetic construct
RGDQDLH

SEQ ID NO: 35527 - protein, 7 aa, synthetic construct
RGDQFND

SEQ ID NO: 35528 - protein, 7 aa, synthetic construct
RGDQGDD

SEQ ID NO: 35529 - protein, 7 aa, synthetic construct
RGDDAIR

SEQ ID NO: 35530 - protein, 7 aa, synthetic construct
RGDQHGS

SEQ ID NO: 35531 - protein, 7 aa, synthetic construct
RGDDAQE

SEQ ID NO: 35532 - protein, 7 aa, synthetic construct
RGDQLDN

SEQ ID NO: 35533 - protein, 7 aa, synthetic construct
RGDQLGG

SEQ ID NO: 35534 - protein, 7 aa, synthetic construct
RGDQNDF

SEQ ID NO: 35535 - protein, 7 aa, synthetic construct
RGDQQET

SEQ ID NO: 35536 - protein, 7 aa, synthetic construct
RGDQQFA

SEQ ID NO: 35537 - protein, 7 aa, synthetic construct
RGDQTEF

SEQ ID NO: 35538 - protein, 7 aa, synthetic construct
RGDQTFS

SEQ ID NO: 35539 - protein, 7 aa, synthetic construct
RGDQTQG

SEQ ID NO: 35540 - protein, 7 aa, synthetic construct
RGDQTSG

SEQ ID NO: 35541 - protein, 7 aa, synthetic construct
RGDQVIA

SEQ ID NO: 35542 - protein, 7 aa, synthetic construct
RGDDDNV

SEQ ID NO: 35543 - protein, 7 aa, synthetic construct
RGDRFIS

SEQ ID NO: 35544 - protein, 7 aa, synthetic construct
RGDRIQA

SEQ ID NO: 35545 - protein, 7 aa, synthetic construct
RGDDEGI

SEQ ID NO: 35546 - protein, 7 aa, synthetic construct
RGDRLDG

SEQ ID NO: 35547 - protein, 7 aa, synthetic construct
RGDRNID

SEQ ID NO: 35548 - protein, 7 aa, synthetic construct
RGDDENQ

SEQ ID NO: 35549 - protein, 7 aa, synthetic construct
RGDRTIE

SEQ ID NO: 35550 - protein, 7 aa, synthetic construct
RGDRVED

SEQ ID NO: 35551 - protein, 7 aa, synthetic construct
RGDSDNA

SEQ ID NO: 35552 - protein, 7 aa, synthetic construct
RGDSDTV

SEQ ID NO: 35553 - protein, 7 aa, synthetic construct
RGDSEAT

SEQ ID NO: 35554 - protein, 7 aa, synthetic construct
RGDSEDE

SEQ ID NO: 35555 - protein, 7 aa, synthetic construct
RGDSEGA

SEQ ID NO: 35556 - protein, 7 aa, synthetic construct
RGDSFDN

SEQ ID NO: 35557 - protein, 7 aa, synthetic construct
RGDSFHS

SEQ ID NO: 35558 - protein, 7 aa, synthetic construct
RGDSGEH

SEQ ID NO: 35559 - protein, 7 aa, synthetic construct
RGDSGEL

SEQ ID NO: 35560 - protein, 7 aa, synthetic construct
RGDSGHF

SEQ ID NO: 35561 - protein, 7 aa, synthetic construct
RGDSHFD

SEQ ID NO: 35562 - protein, 7 aa, synthetic construct
RGDDFTH

SEQ ID NO: 35563 - protein, 7 aa, synthetic construct
RGDDGDL

SEQ ID NO: 35564 - protein, 7 aa, synthetic construct
RGDSVDL

SEQ ID NO: 35565 - protein, 7 aa, synthetic construct
RGDSVSA

SEQ ID NO: 35566 - protein, 7 aa, synthetic construct
RGDTAHE

SEQ ID NO: 35567 - protein, 7 aa, synthetic construct
RGDTDAF

SEQ ID NO: 35568 - protein, 7 aa, synthetic construct
RGDTDEL

SEQ ID NO: 35569 - protein, 7 aa, synthetic construct
RGDTDGF

SEQ ID NO: 35570 - protein, 7 aa, synthetic construct
RGDTGRD

SEQ ID NO: 35571 - protein, 7 aa, synthetic construct
RGDTGRV

SEQ ID NO: 35572 - protein, 7 aa, synthetic construct
RGDTHLG

SEQ ID NO: 35573 - protein, 7 aa, synthetic construct
RGDTHVN

SEQ ID NO: 35574 - protein, 7 aa, synthetic construct
RGDTIFE

SEQ ID NO: 35575 - protein, 7 aa, synthetic construct
RGDTKDA

SEQ ID NO: 35576 - protein, 7 aa, synthetic construct
RGDTKDE

SEQ ID NO: 35577 - protein, 7 aa, synthetic construct
RGDTLVG

SEQ ID NO: 35578 - protein, 7 aa, synthetic construct
RGDTNAD

SEQ ID NO: 35579 - protein, 7 aa, synthetic construct
RGDTQFF

SEQ ID NO: 35580 - protein, 7 aa, synthetic construct
RGDTQIT

SEQ ID NO: 35581 - protein, 7 aa, synthetic construct
RGDDHLF

SEQ ID NO: 35582 - protein, 7 aa, synthetic construct
RGDTQVH

SEQ ID NO: 35583 - protein, 7 aa, synthetic construct
RGDTRHA

SEQ ID NO: 35584 - protein, 7 aa, synthetic construct
RGDTSFE

SEQ ID NO: 35585 - protein, 7 aa, synthetic construct
RGDTSKS

SEQ ID NO: 35586 - protein, 7 aa, synthetic construct
RGDDHRH

SEQ ID NO: 35587 - protein, 7 aa, synthetic construct
RGDTTNI

SEQ ID NO: 35588 - protein, 7 aa, synthetic construct
RGDTTVF

SEQ ID NO: 35589 - protein, 7 aa, synthetic construct
RGDTVLE

SEQ ID NO: 35590 - protein, 7 aa, synthetic construct
RGDVANF

SEQ ID NO: 35591 - protein, 7 aa, synthetic construct
RGDVDFT

SEQ ID NO: 35592 - protein, 7 aa, synthetic construct
RGDVDHF

SEQ ID NO: 35593 - protein, 7 aa, synthetic construct
RGDVDTH

SEQ ID NO: 35594 - protein, 7 aa, synthetic construct
RGDVEAT

SEQ ID NO: 35595 - protein, 7 aa, synthetic construct
RGDVEHD

SEQ ID NO: 35596 - protein, 7 aa, synthetic construct
RGDVFAG

SEQ ID NO: 35597 - protein, 7 aa, synthetic construct
RGDVFFG

SEQ ID NO: 35598 - protein, 7 aa, synthetic construct
RGDVFIV

SEQ ID NO: 35599 - protein, 7 aa, synthetic construct
RGDVHIE

SEQ ID NO: 35600 - protein, 7 aa, synthetic construct
RGDVINE

SEQ ID NO: 35601 - protein, 7 aa, synthetic construct
RGDVLLA

SEQ ID NO: 35602 - protein, 7 aa, synthetic construct
RGDVNAA

SEQ ID NO: 35603 - protein, 7 aa, synthetic construct
RGDAEET

SEQ ID NO: 35604 - protein, 7 aa, synthetic construct
RGDVNVN

SEQ ID NO: 35605 - protein, 7 aa, synthetic construct
RGDVQGD

SEQ ID NO: 35606 - protein, 7 aa, synthetic construct
RGDVSDS

SEQ ID NO: 35607 - protein, 7 aa, synthetic construct
RGDDKGR

SEQ ID NO: 35608 - protein, 7 aa, synthetic construct
RGDVTIA

SEQ ID NO: 35609 - protein, 7 aa, synthetic construct
RGDDLSR

SEQ ID NO: 35610 - protein, 7 aa, synthetic construct
RGDDNNH

SEQ ID NO: 35611 - protein, 7 aa, synthetic construct
RGDDNRH

SEQ ID NO: 35612 - protein, 7 aa, synthetic construct
RGDDQEV

SEQ ID NO: 35613 - protein, 7 aa, synthetic construct
RGDDQRD

SEQ ID NO: 35614 - protein, 7 aa, synthetic construct
RGDDRFS

SEQ ID NO: 35615 - protein, 7 aa, synthetic construct
RGDDRHD

SEQ ID NO: 35616 - protein, 7 aa, synthetic construct
RGDDRSV

SEQ ID NO: 35617 - protein, 7 aa, synthetic construct
RGDDSLF

SEQ ID NO: 35618 - protein, 7 aa, synthetic construct
RGDDSRA

SEQ ID NO: 35619 - protein, 7 aa, synthetic construct
RGDDTAD

SEQ ID NO: 35620 - protein, 7 aa, synthetic construct
RGDDTQT

SEQ ID NO: 35621 - protein, 7 aa, synthetic construct
RGDEATA

SEQ ID NO: 35622 - protein, 7 aa, synthetic construct
RGDEDVQ

SEQ ID NO: 35623 - protein, 7 aa, synthetic construct
RGDEEDE

SEQ ID NO: 35624 - protein, 7 aa, synthetic construct
RGDEEDQ

SEQ ID NO: 35625 - protein, 7 aa, synthetic construct
RGDEEHS

SEQ ID NO: 35626 - protein, 7 aa, synthetic construct
RGDEEKK

SEQ ID NO: 35627 - protein, 7 aa, synthetic construct
RGDEFAR

SEQ ID NO: 35628 - protein, 7 aa, synthetic construct
RGDEFGG

SEQ ID NO: 35629 - protein, 7 aa, synthetic construct
RGDEFGH

SEQ ID NO: 35630 - protein, 7 aa, synthetic construct
RGDEFQQ

SEQ ID NO: 35631 - protein, 7 aa, synthetic construct
RGDEGHT

SEQ ID NO: 35632 - protein, 7 aa, synthetic construct
RGDEHIR

SEQ ID NO: 35633 - protein, 7 aa, synthetic construct
RGDEHQH

SEQ ID NO: 35634 - protein, 7 aa, synthetic construct
RGDEHSV

SEQ ID NO: 35635 - protein, 7 aa, synthetic construct
RGDELFA

SEQ ID NO: 35636 - protein, 7 aa, synthetic construct
RGDELNQ

SEQ ID NO: 35637 - protein, 7 aa, synthetic construct
RGDENFF

SEQ ID NO: 35638 - protein, 7 aa, synthetic construct
RGDEQGH

SEQ ID NO: 35639 - protein, 7 aa, synthetic construct
RGDESDV

SEQ ID NO: 35640 - protein, 7 aa, synthetic construct
RGDESEE

SEQ ID NO: 35641 - protein, 7 aa, synthetic construct
RGDAGFT

SEQ ID NO: 35642 - protein, 7 aa, synthetic construct
RGDETIL

SEQ ID NO: 35643 - protein, 7 aa, synthetic construct
RGDEVEI

SEQ ID NO: 35644 - protein, 7 aa, synthetic construct
RGDEVNA

SEQ ID NO: 35645 - protein, 7 aa, synthetic construct
RGDEVVI

SEQ ID NO: 35646 - protein, 7 aa, synthetic construct
RGDFDER

SEQ ID NO: 35647 - protein, 7 aa, synthetic construct
RGDFDNV

SEQ ID NO: 35648 - protein, 7 aa, synthetic construct
RGDAGQA

SEQ ID NO: 35649 - protein, 7 aa, synthetic construct
RGDFEGH

SEQ ID NO: 35650 - protein, 7 aa, synthetic construct
RGDFEGV

SEQ ID NO: 35651 - protein, 7 aa, synthetic construct
RGDFEVE

SEQ ID NO: 35652 - protein, 7 aa, synthetic construct
RGDFGQG

SEQ ID NO: 35653 - protein, 7 aa, synthetic construct
RGDFHFG

SEQ ID NO: 35654 - protein, 7 aa, synthetic construct
RGDFIEF

SEQ ID NO: 35655 - protein, 7 aa, synthetic construct
RGDFIFH

SEQ ID NO: 35656 - protein, 7 aa, synthetic construct
RGDFITI

SEQ ID NO: 35657 - protein, 7 aa, synthetic construct
RGDFLIH

SEQ ID NO: 35658 - protein, 7 aa, synthetic construct
RGDFNGE

SEQ ID NO: 35659 - protein, 7 aa, synthetic construct
RGDFNGV

SEQ ID NO: 35660 - protein, 7 aa, synthetic construct
RGDFQFQ

SEQ ID NO: 35661 - protein, 7 aa, synthetic construct
RGDFQIN

SEQ ID NO: 35662 - protein, 7 aa, synthetic construct
RGDFVQF

SEQ ID NO: 35663 - protein, 7 aa, synthetic construct
RGDGENG

SEQ ID NO: 35664 - protein, 7 aa, synthetic construct
RGDGGQD

SEQ ID NO: 35665 - protein, 7 aa, synthetic construct
RGDGHKR

SEQ ID NO: 35666 - protein, 7 aa, synthetic construct
RGDGIFF

SEQ ID NO: 35667 - protein, 7 aa, synthetic construct
RGDGIQE

SEQ ID NO: 35668 - protein, 7 aa, synthetic construct
RGDAAQE

SEQ ID NO: 35669 - protein, 7 aa, synthetic construct
RGDGQDI

SEQ ID NO: 35670 - protein, 7 aa, synthetic construct
RGDGQIS

SEQ ID NO: 35671 - protein, 7 aa, synthetic construct
RGDGRTA

SEQ ID NO: 35672 - protein, 7 aa, synthetic construct
RGDGSLE

SEQ ID NO: 35673 - protein, 7 aa, synthetic construct
RGDGSVA

SEQ ID NO: 35674 - protein, 7 aa, synthetic construct
RGDGTDS

SEQ ID NO: 35675 - protein, 7 aa, synthetic construct
RGDGVAK

SEQ ID NO: 35676 - protein, 7 aa, synthetic construct
RGDAKLE

SEQ ID NO: 35677 - protein, 7 aa, synthetic construct
RGDHDAG

SEQ ID NO: 35678 - protein, 7 aa, synthetic construct
RGDHEER

SEQ ID NO: 35679 - protein, 7 aa, synthetic construct
RGDHFFS

SEQ ID NO: 35680 - protein, 7 aa, synthetic construct
RGDHFFV

SEQ ID NO: 35681 - protein, 7 aa, synthetic construct
RGDHFIF

SEQ ID NO: 35682 - protein, 7 aa, synthetic construct
RGDHGND

SEQ ID NO: 35683 - protein, 7 aa, synthetic construct
RGDHIVG

SEQ ID NO: 35684 - protein, 7 aa, synthetic construct
RGDHKDG

SEQ ID NO: 35685 - protein, 7 aa, synthetic construct
RGDHKVN

SEQ ID NO: 35686 - protein, 7 aa, synthetic construct
RGDHLFR

SEQ ID NO: 35687 - protein, 7 aa, synthetic construct
RGDHLKD

SEQ ID NO: 35688 - protein, 7 aa, synthetic construct
RGDHLQA

SEQ ID NO: 35689 - protein, 7 aa, synthetic construct
RGDHQAA

SEQ ID NO: 35690 - protein, 7 aa, synthetic construct
RGDHRQD

SEQ ID NO: 35691 - protein, 7 aa, synthetic construct
RGDHTNR

SEQ ID NO: 35692 - protein, 7 aa, synthetic construct
RGDHTVF

SEQ ID NO: 35693 - protein, 7 aa, synthetic construct
RGDHVNA

SEQ ID NO: 35694 - protein, 7 aa, synthetic construct
RGDIDEQ

SEQ ID NO: 35695 - protein, 7 aa, synthetic construct
RGDIDHD

SEQ ID NO: 35696 - protein, 7 aa, synthetic construct
RGDIDQH

SEQ ID NO: 35697 - protein, 7 aa, synthetic construct
RGDIFEN

SEQ ID NO: 35698 - protein, 7 aa, synthetic construct
RGDANHE

SEQ ID NO: 35699 - protein, 7 aa, synthetic construct
RGDIHFE

SEQ ID NO: 35700 - protein, 7 aa, synthetic construct
RGDILDT

SEQ ID NO: 35701 - protein, 7 aa, synthetic construct
RGDINEL

SEQ ID NO: 35702 - protein, 7 aa, synthetic construct
RGDINKG

SEQ ID NO: 35703 - protein, 7 aa, synthetic construct
RGDIQRE

SEQ ID NO: 35704 - protein, 7 aa, synthetic construct
RGDIQTA

SEQ ID NO: 35705 - protein, 7 aa, synthetic construct
RGDAQFD

SEQ ID NO: 35706 - protein, 7 aa, synthetic construct
RGDISNF

SEQ ID NO: 35707 - protein, 7 aa, synthetic construct
RGDIVIN

SEQ ID NO: 35708 - protein, 7 aa, synthetic construct
RGDIVKQ

SEQ ID NO: 35709 - protein, 7 aa, synthetic construct
RGDKAQE

SEQ ID NO: 35710 - protein, 7 aa, synthetic construct
RGDKDIS

SEQ ID NO: 35711 - protein, 7 aa, synthetic construct
RGDKDRN

SEQ ID NO: 35712 - protein, 7 aa, synthetic construct
RGDKFAS

SEQ ID NO: 35713 - protein, 7 aa, synthetic construct
RGDKFLS

SEQ ID NO: 35714 - protein, 7 aa, synthetic construct
RGDKFQQ

SEQ ID NO: 35715 - protein, 7 aa, synthetic construct
RGDKFTA

SEQ ID NO: 35716 - protein, 7 aa, synthetic construct
RGDKGDE

SEQ ID NO: 35717 - protein, 7 aa, synthetic construct
RGDAQVH

SEQ ID NO: 35718 - protein, 7 aa, synthetic construct
RGDKLLL

SEQ ID NO: 35719 - protein, 7 aa, synthetic construct
RGDKNAA

SEQ ID NO: 35720 - protein, 7 aa, synthetic construct
RGDKNGE

SEQ ID NO: 35721 - protein, 7 aa, synthetic construct
RGDKNIS

SEQ ID NO: 35722 - protein, 7 aa, synthetic construct
RGDKSVG

SEQ ID NO: 35723 - protein, 7 aa, synthetic construct
RGDKVEN

SEQ ID NO: 35724 - protein, 7 aa, synthetic construct
RGDKVTA

SEQ ID NO: 35725 - protein, 7 aa, synthetic construct
RGDLEGF

SEQ ID NO: 35726 - protein, 7 aa, synthetic construct
RGDLEIL

SEQ ID NO: 35727 - protein, 7 aa, synthetic construct
RGDLHAF

SEQ ID NO: 35728 - protein, 7 aa, synthetic construct
RGDLHDI

SEQ ID NO: 35729 - protein, 7 aa, synthetic construct
RGDLHFG

SEQ ID NO: 35730 - protein, 7 aa, synthetic construct
RGDLHSG

SEQ ID NO: 35731 - protein, 7 aa, synthetic construct
RGDLITG

SEQ ID NO: 35732 - protein, 7 aa, synthetic construct
RGDLLEG

SEQ ID NO: 35733 - protein, 7 aa, synthetic construct
RGDLNLS

SEQ ID NO: 35734 - protein, 7 aa, synthetic construct
RGDATDT

SEQ ID NO: 35735 - protein, 7 aa, synthetic construct
RGDATER

SEQ ID NO: 35736 - protein, 7 aa, synthetic construct
RGDATFI

SEQ ID NO: 35737 - protein, 7 aa, synthetic construct
RGDLSIF

SEQ ID NO: 35738 - protein, 7 aa, synthetic construct
RGDLSIN

SEQ ID NO: 35739 - protein, 7 aa, synthetic construct
RGDLSQA

SEQ ID NO: 35740 - protein, 7 aa, synthetic construct
RGDLTDT

SEQ ID NO: 35741 - protein, 7 aa, synthetic construct
RGDLTIF

SEQ ID NO: 35742 - protein, 7 aa, synthetic construct
RGDLVEQ

SEQ ID NO: 35743 - protein, 7 aa, synthetic construct
RGDNASG

SEQ ID NO: 35744 - protein, 7 aa, synthetic construct
RGDNEES

SEQ ID NO: 35745 - protein, 7 aa, synthetic construct
RGDNFFA

SEQ ID NO: 35746 - protein, 7 aa, synthetic construct
RGDNFGE

SEQ ID NO: 35747 - protein, 7 aa, synthetic construct
RGDNFVK

SEQ ID NO: 35748 - protein, 7 aa, synthetic construct
RGDNGAN

SEQ ID NO: 35749 - protein, 7 aa, synthetic construct
RGDNGEG

SEQ ID NO: 35750 - protein, 7 aa, synthetic construct
RGDNIAK

SEQ ID NO: 35751 - protein, 7 aa, synthetic construct
RGDNIEG

SEQ ID NO: 35752 - protein, 7 aa, synthetic construct
RGDNILI

SEQ ID NO: 35753 - protein, 7 aa, synthetic construct
RGDNKAH

SEQ ID NO: 35754 - protein, 7 aa, synthetic construct
RGDNKDV

SEQ ID NO: 35755 - protein, 7 aa, synthetic construct
RGDNLSA

SEQ ID NO: 35756 - protein, 7 aa, synthetic construct
RGDNNVQ

SEQ ID NO: 35757 - protein, 7 aa, synthetic construct
RGDNQKD

SEQ ID NO: 35758 - protein, 7 aa, synthetic construct
RGDNSLA

SEQ ID NO: 35759 - protein, 7 aa, synthetic construct
RGDNTQH

SEQ ID NO: 35760 - protein, 7 aa, synthetic construct
RGDNVGN

SEQ ID NO: 35761 - protein, 7 aa, synthetic construct
RGDQDFL

SEQ ID NO: 35762 - protein, 7 aa, synthetic construct
RGDQDKG

SEQ ID NO: 35763 - protein, 7 aa, synthetic construct
RGDQDRH

SEQ ID NO: 35764 - protein, 7 aa, synthetic construct
RGDQETA

SEQ ID NO: 35765 - protein, 7 aa, synthetic construct
RGDQFEL

SEQ ID NO: 35766 - protein, 7 aa, synthetic construct
RGDQFFG

SEQ ID NO: 35767 - protein, 7 aa, synthetic construct
RGDQFIV

SEQ ID NO: 35768 - protein, 7 aa, synthetic construct
RGDQGIN

SEQ ID NO: 35769 - protein, 7 aa, synthetic construct
RGDQHAR

SEQ ID NO: 35770 - protein, 7 aa, synthetic construct
RGDQIFH

SEQ ID NO: 35771 - protein, 7 aa, synthetic construct
RGDQISD

SEQ ID NO: 35772 - protein, 7 aa, synthetic construct
RGDDAQI

SEQ ID NO: 35773 - protein, 7 aa, synthetic construct
RGDQLER

SEQ ID NO: 35774 - protein, 7 aa, synthetic construct
RGDQNLN

SEQ ID NO: 35775 - protein, 7 aa, synthetic construct
RGDQQSH

SEQ ID NO: 35776 - protein, 7 aa, synthetic construct
RGDQRLF

SEQ ID NO: 35777 - protein, 7 aa, synthetic construct
RGDDDKF

SEQ ID NO: 35778 - protein, 7 aa, synthetic construct
RGDRILG

SEQ ID NO: 35779 - protein, 7 aa, synthetic construct
RGDRIRT

SEQ ID NO: 35780 - protein, 7 aa, synthetic construct
RGDRKEG

SEQ ID NO: 35781 - protein, 7 aa, synthetic construct
RGDSDAH

SEQ ID NO: 35782 - protein, 7 aa, synthetic construct
RGDSDET

SEQ ID NO: 35783 - protein, 7 aa, synthetic construct
RGDSDTN

SEQ ID NO: 35784 - protein, 7 aa, synthetic construct
RGDSDVQ

SEQ ID NO: 35785 - protein, 7 aa, synthetic construct
RGDSGES

SEQ ID NO: 35786 - protein, 7 aa, synthetic construct
RGDSHFN

SEQ ID NO: 35787 - protein, 7 aa, synthetic construct
RGDSHSG

SEQ ID NO: 35788 - protein, 7 aa, synthetic construct
RGDSHVH

SEQ ID NO: 35789 - protein, 7 aa, synthetic construct
RGDSLGA

SEQ ID NO: 35790 - protein, 7 aa, synthetic construct
RGDSNNQ

SEQ ID NO: 35791 - protein, 7 aa, synthetic construct
RGDSTED

SEQ ID NO: 35792 - protein, 7 aa, synthetic construct
RGDTEKV

SEQ ID NO: 35793 - protein, 7 aa, synthetic construct
RGDTENV

SEQ ID NO: 35794 - protein, 7 aa, synthetic construct
RGDTESG

SEQ ID NO: 35795 - protein, 7 aa, synthetic construct
RGDTGEN

SEQ ID NO: 35796 - protein, 7 aa, synthetic construct
RGDTIDI

SEQ ID NO: 35797 - protein, 7 aa, synthetic construct
RGDTIHA

SEQ ID NO: 35798 - protein, 7 aa, synthetic construct
RGDDHGG

SEQ ID NO: 35799 - protein, 7 aa, synthetic construct
RGDTLDL

SEQ ID NO: 35800 - protein, 7 aa, synthetic construct
RGDDHGQ

SEQ ID NO: 35801 - protein, 7 aa, synthetic construct
RGDTLLD

SEQ ID NO: 35802 - protein, 7 aa, synthetic construct
RGDTLQE

SEQ ID NO: 35803 - protein, 7 aa, synthetic construct
RGDDHHQ

SEQ ID NO: 35804 - protein, 7 aa, synthetic construct
RGDTNFT

SEQ ID NO: 35805 - protein, 7 aa, synthetic construct
RGDTNGV

SEQ ID NO: 35806 - protein, 7 aa, synthetic construct
RGDTQQN

SEQ ID NO: 35807 - protein, 7 aa, synthetic construct
RGDDHRV

SEQ ID NO: 35808 - protein, 7 aa, synthetic construct
RGDDHSG

SEQ ID NO: 35809 - protein, 7 aa, synthetic construct
RGDTTGF

SEQ ID NO: 35810 - protein, 7 aa, synthetic construct
RGDTTHE

SEQ ID NO: 35811 - protein, 7 aa, synthetic construct
RGDTTHQ

SEQ ID NO: 35812 - protein, 7 aa, synthetic construct
RGDTVDQ

SEQ ID NO: 35813 - protein, 7 aa, synthetic construct
RGDTVFH

SEQ ID NO: 35814 - protein, 7 aa, synthetic construct
RGDTVNN

SEQ ID NO: 35815 - protein, 7 aa, synthetic construct
RGDVADN

SEQ ID NO: 35816 - protein, 7 aa, synthetic construct
RGDVDDH

SEQ ID NO: 35817 - protein, 7 aa, synthetic construct
RGDVDVV

SEQ ID NO: 35818 - protein, 7 aa, synthetic construct
RGDVFGQ

SEQ ID NO: 35819 - protein, 7 aa, synthetic construct
RGDVFNL

SEQ ID NO: 35820 - protein, 7 aa, synthetic construct
RGDVHQS

SEQ ID NO: 35821 - protein, 7 aa, synthetic construct
RGDDIRV

SEQ ID NO: 35822 - protein, 7 aa, synthetic construct
RGDVLDV

SEQ ID NO: 35823 - protein, 7 aa, synthetic construct
RGDVLQD

SEQ ID NO: 35824 - protein, 7 aa, synthetic construct
RGDVQTD

SEQ ID NO: 35825 - protein, 7 aa, synthetic construct
RGDVTAQ

SEQ ID NO: 35826 - protein, 7 aa, synthetic construct
RGDDKHD

SEQ ID NO: 35827 - protein, 7 aa, synthetic construct
RGDDLFT

SEQ ID NO: 35828 - protein, 7 aa, synthetic construct
RGDDNIT

SEQ ID NO: 35829 - protein, 7 aa, synthetic construct
RGDDNLK

SEQ ID NO: 35830 - protein, 7 aa, synthetic construct
RGDDNST

SEQ ID NO: 35831 - protein, 7 aa, synthetic construct
RGDDRDH

SEQ ID NO: 35832 - protein, 7 aa, synthetic construct
RGDDRLH

SEQ ID NO: 35833 - protein, 7 aa, synthetic construct
RGDDTDG

SEQ ID NO: 35834 - protein, 7 aa, synthetic construct
RGDDTDN

SEQ ID NO: 35835 - protein, 7 aa, synthetic construct
RGDAESH

SEQ ID NO: 35836 - protein, 7 aa, synthetic construct
RGDDTKS

SEQ ID NO: 35837 - protein, 7 aa, synthetic construct
RGDDVQQ

SEQ ID NO: 35838 - protein, 7 aa, synthetic construct
RGDEAFS

SEQ ID NO: 35839 - protein, 7 aa, synthetic construct
RGDEDEE

SEQ ID NO: 35840 - protein, 7 aa, synthetic construct
RGDEDVL

SEQ ID NO: 35841 - protein, 7 aa, synthetic construct
RGDEEGQ

SEQ ID NO: 35842 - protein, 7 aa, synthetic construct
RGDEEHN

SEQ ID NO: 35843 - protein, 7 aa, synthetic construct
RGDEFFF

SEQ ID NO: 35844 - protein, 7 aa, synthetic construct
RGDEFFL

SEQ ID NO: 35845 - protein, 7 aa, synthetic construct
RGDAFHD

SEQ ID NO: 35846 - protein, 7 aa, synthetic construct
RGDAFHS

SEQ ID NO: 35847 - protein, 7 aa, synthetic construct
RGDEGAI

SEQ ID NO: 35848 - protein, 7 aa, synthetic construct
RGDEGQH

SEQ ID NO: 35849 - protein, 7 aa, synthetic construct
RGDEIFK

SEQ ID NO: 35850 - protein, 7 aa, synthetic construct
RGDEISE

SEQ ID NO: 35851 - protein, 7 aa, synthetic construct
RGDEITL

SEQ ID NO: 35852 - protein, 7 aa, synthetic construct
RGDELFV

SEQ ID NO: 35853 - protein, 7 aa, synthetic construct
RGDELIV

SEQ ID NO: 35854 - protein, 7 aa, synthetic construct
RGDELQN

SEQ ID NO: 35855 - protein, 7 aa, synthetic construct
RGDAFTE

SEQ ID NO: 35856 - protein, 7 aa, synthetic construct
RGDENEK

SEQ ID NO: 35857 - protein, 7 aa, synthetic construct
RGDENSR

SEQ ID NO: 35858 - protein, 7 aa, synthetic construct
RGDENTK

SEQ ID NO: 35859 - protein, 7 aa, synthetic construct
RGDENTN

SEQ ID NO: 35860 - protein, 7 aa, synthetic construct
RGDEQIF

SEQ ID NO: 35861 - protein, 7 aa, synthetic construct
RGDEQLF

SEQ ID NO: 35862 - protein, 7 aa, synthetic construct
RGDERNS

SEQ ID NO: 35863 - protein, 7 aa, synthetic construct
RGDESTN

SEQ ID NO: 35864 - protein, 7 aa, synthetic construct
RGDETDN

SEQ ID NO: 35865 - protein, 7 aa, synthetic construct
RGDAGIE

SEQ ID NO: 35866 - protein, 7 aa, synthetic construct
RGDFAAI

SEQ ID NO: 35867 - protein, 7 aa, synthetic construct
RGDFEQH

SEQ ID NO: 35868 - protein, 7 aa, synthetic construct
RGDFFVE

SEQ ID NO: 35869 - protein, 7 aa, synthetic construct
RGDFKDE

SEQ ID NO: 35870 - protein, 7 aa, synthetic construct
RGDFKEE

SEQ ID NO: 35871 - protein, 7 aa, synthetic construct
RGDFLLS

SEQ ID NO: 35872 - protein, 7 aa, synthetic construct
RGDFNDK

SEQ ID NO: 35873 - protein, 7 aa, synthetic construct
RGDFQIL

SEQ ID NO: 35874 - protein, 7 aa, synthetic construct
RGDAHNE

SEQ ID NO: 35875 - protein, 7 aa, synthetic construct
RGDFSIE

SEQ ID NO: 35876 - protein, 7 aa, synthetic construct
RGDFSLD

SEQ ID NO: 35877 - protein, 7 aa, synthetic construct
RGDFTSE

SEQ ID NO: 35878 - protein, 7 aa, synthetic construct
RGDGDFH

SEQ ID NO: 35879 - protein, 7 aa, synthetic construct
RGDGFFA

SEQ ID NO: 35880 - protein, 7 aa, synthetic construct
RGDGFQD

SEQ ID NO: 35881 - protein, 7 aa, synthetic construct
RGDGIDN

SEQ ID NO: 35882 - protein, 7 aa, synthetic construct
RGDGIHE

SEQ ID NO: 35883 - protein, 7 aa, synthetic construct
RGDGKDF

SEQ ID NO: 35884 - protein, 7 aa, synthetic construct
RGDAIRS

SEQ ID NO: 35885 - protein, 7 aa, synthetic construct
RGDGNEH

SEQ ID NO: 35886 - protein, 7 aa, synthetic construct
RGDGNNG

SEQ ID NO: 35887 - protein, 7 aa, synthetic construct
RGDGTFN

SEQ ID NO: 35888 - protein, 7 aa, synthetic construct
RGDGVDT

SEQ ID NO: 35889 - protein, 7 aa, synthetic construct
RGDAKLA

SEQ ID NO: 35890 - protein, 7 aa, synthetic construct
RGDHALF

SEQ ID NO: 35891 - protein, 7 aa, synthetic construct
RGDAKLQ

SEQ ID NO: 35892 - protein, 7 aa, synthetic construct
RGDHDLD

SEQ ID NO: 35893 - protein, 7 aa, synthetic construct
RGDHEGE

SEQ ID NO: 35894 - protein, 7 aa, synthetic construct
RGDHEQA

SEQ ID NO: 35895 - protein, 7 aa, synthetic construct
RGDHFAQ

SEQ ID NO: 35896 - protein, 7 aa, synthetic construct
RGDHFER

SEQ ID NO: 35897 - protein, 7 aa, synthetic construct
RGDAKTE

SEQ ID NO: 35898 - protein, 7 aa, synthetic construct
RGDHHDE

SEQ ID NO: 35899 - protein, 7 aa, synthetic construct
RGDALAS

SEQ ID NO: 35900 - protein, 7 aa, synthetic construct
RGDHKFS

SEQ ID NO: 35901 - protein, 7 aa, synthetic construct
RGDHKRH

SEQ ID NO: 35902 - protein, 7 aa, synthetic construct
RGDHLGD

SEQ ID NO: 35903 - protein, 7 aa, synthetic construct
RGDHLGE

SEQ ID NO: 35904 - protein, 7 aa, synthetic construct
RGDHLLI

SEQ ID NO: 35905 - protein, 7 aa, synthetic construct
RGDHNHD

SEQ ID NO: 35906 - protein, 7 aa, synthetic construct
RGDALIV

SEQ ID NO: 35907 - protein, 7 aa, synthetic construct
RGDHQLD

SEQ ID NO: 35908 - protein, 7 aa, synthetic construct
RGDHSED

SEQ ID NO: 35909 - protein, 7 aa, synthetic construct
RGDHSEG

SEQ ID NO: 35910 - protein, 7 aa, synthetic construct
RGDHTDT

SEQ ID NO: 35911 - protein, 7 aa, synthetic construct
RGDALTE

SEQ ID NO: 35912 - protein, 7 aa, synthetic construct
RGDIDDH

SEQ ID NO: 35913 - protein, 7 aa, synthetic construct
RGDIEAF

SEQ ID NO: 35914 - protein, 7 aa, synthetic construct
RGDIGGF

SEQ ID NO: 35915 - protein, 7 aa, synthetic construct
RGDIGTQ

SEQ ID NO: 35916 - protein, 7 aa, synthetic construct
RGDIKVD

SEQ ID NO: 35917 - protein, 7 aa, synthetic construct
RGDILDH

SEQ ID NO: 35918 - protein, 7 aa, synthetic construct
RGDILNG

SEQ ID NO: 35919 - protein, 7 aa, synthetic construct
RGDINHH

SEQ ID NO: 35920 - protein, 7 aa, synthetic construct
RGDINSD

SEQ ID NO: 35921 - protein, 7 aa, synthetic construct
RGDINTN

SEQ ID NO: 35922 - protein, 7 aa, synthetic construct
RGDIRHR

SEQ ID NO: 35923 - protein, 7 aa, synthetic construct
RGDAQTE

SEQ ID NO: 35924 - protein, 7 aa, synthetic construct
RGDKHNG

SEQ ID NO: 35925 - protein, 7 aa, synthetic construct
RGDKLVE

SEQ ID NO: 35926 - protein, 7 aa, synthetic construct
RGDKQEG

SEQ ID NO: 35927 - protein, 7 aa, synthetic construct
RGDKQHA

SEQ ID NO: 35928 - protein, 7 aa, synthetic construct
RGDKVDN

SEQ ID NO: 35929 - protein, 7 aa, synthetic construct
RGDLAEH

SEQ ID NO: 35930 - protein, 7 aa, synthetic construct
RGDLAFI

SEQ ID NO: 35931 - protein, 7 aa, synthetic construct
RGDLAVH

SEQ ID NO: 35932 - protein, 7 aa, synthetic construct
RGDLDNA

SEQ ID NO: 35933 - protein, 7 aa, synthetic construct
RGDLDSF

SEQ ID NO: 35934 - protein, 7 aa, synthetic construct
RGDLDTQ

SEQ ID NO: 35935 - protein, 7 aa, synthetic construct
RGDLEEL

SEQ ID NO: 35936 - protein, 7 aa, synthetic construct
RGDLELF

SEQ ID NO: 35937 - protein, 7 aa, synthetic construct
RGDASHD

SEQ ID NO: 35938 - protein, 7 aa, synthetic construct
RGDLFIG

SEQ ID NO: 35939 - protein, 7 aa, synthetic construct
RGDLFTV

SEQ ID NO: 35940 - protein, 7 aa, synthetic construct
RGDLGVH

SEQ ID NO: 35941 - protein, 7 aa, synthetic construct
RGDLHAT

SEQ ID NO: 35942 - protein, 7 aa, synthetic construct
RGDLLEL

SEQ ID NO: 35943 - protein, 7 aa, synthetic construct
RGDLNLQ

SEQ ID NO: 35944 - protein, 7 aa, synthetic construct
RGDLQEL

SEQ ID NO: 35945 - protein, 7 aa, synthetic construct
RGDLREK

SEQ ID NO: 35946 - protein, 7 aa, synthetic construct
RGDLVLF

SEQ ID NO: 35947 - protein, 7 aa, synthetic construct
RGDLVSD

SEQ ID NO: 35948 - protein, 7 aa, synthetic construct
RGDNDHL

SEQ ID NO: 35949 - protein, 7 aa, synthetic construct
RGDNDKF

SEQ ID NO: 35950 - protein, 7 aa, synthetic construct
RGDNEGE

SEQ ID NO: 35951 - protein, 7 aa, synthetic construct
RGDNEGT

SEQ ID NO: 35952 - protein, 7 aa, synthetic construct
RGDNEIF

SEQ ID NO: 35953 - protein, 7 aa, synthetic construct
RGDATRE

SEQ ID NO: 35954 - protein, 7 aa, synthetic construct
RGDNENS

SEQ ID NO: 35955 - protein, 7 aa, synthetic construct
RGDNEVH

SEQ ID NO: 35956 - protein, 7 aa, synthetic construct
RGDNGEQ

SEQ ID NO: 35957 - protein, 7 aa, synthetic construct
RGDNGKA

SEQ ID NO: 35958 - protein, 7 aa, synthetic construct
RGDNHEI

SEQ ID NO: 35959 - protein, 7 aa, synthetic construct
RGDNHSG

SEQ ID NO: 35960 - protein, 7 aa, synthetic construct
RGDNIQT

SEQ ID NO: 35961 - protein, 7 aa, synthetic construct
RGDAVFS

SEQ ID NO: 35962 - protein, 7 aa, synthetic construct
RGDNKLQ

SEQ ID NO: 35963 - protein, 7 aa, synthetic construct
RGDNLGG

SEQ ID NO: 35964 - protein, 7 aa, synthetic construct
RGDNNFN

SEQ ID NO: 35965 - protein, 7 aa, synthetic construct
RGDAVIT

SEQ ID NO: 35966 - protein, 7 aa, synthetic construct
RGDNQRQ

SEQ ID NO: 35967 - protein, 7 aa, synthetic construct
RGDNRES

SEQ ID NO: 35968 - protein, 7 aa, synthetic construct
RGDNTTN

SEQ ID NO: 35969 - protein, 7 aa, synthetic construct
RGDNVET

SEQ ID NO: 35970 - protein, 7 aa, synthetic construct
RGDNVFG

SEQ ID NO: 35971 - protein, 7 aa, synthetic construct
RGDQEVS

SEQ ID NO: 35972 - protein, 7 aa, synthetic construct
RGDQFNG

SEQ ID NO: 35973 - protein, 7 aa, synthetic construct
RGDQFTG

SEQ ID NO: 35974 - protein, 7 aa, synthetic construct
RGDQGDT

SEQ ID NO: 35975 - protein, 7 aa, synthetic construct
RGDQHIF

SEQ ID NO: 35976 - protein, 7 aa, synthetic construct
RGDQIDE

SEQ ID NO: 35977 - protein, 7 aa, synthetic construct
RGDQIGQ

SEQ ID NO: 35978 - protein, 7 aa, synthetic construct
RGDQITG

SEQ ID NO: 35979 - protein, 7 aa, synthetic construct
RGDQKIG

SEQ ID NO: 35980 - protein, 7 aa, synthetic construct
RGDADLN

SEQ ID NO: 35981 - protein, 7 aa, synthetic construct
RGDQKVD

SEQ ID NO: 35982 - protein, 7 aa, synthetic construct
RGDQLIL

SEQ ID NO: 35983 - protein, 7 aa, synthetic construct
RGDQNFD

SEQ ID NO: 35984 - protein, 7 aa, synthetic construct
RGDDAVT

SEQ ID NO: 35985 - protein, 7 aa, synthetic construct
RGDQQQS

SEQ ID NO: 35986 - protein, 7 aa, synthetic construct
RGDQQVF

SEQ ID NO: 35987 - protein, 7 aa, synthetic construct
RGDQVVT

SEQ ID NO: 35988 - protein, 7 aa, synthetic construct
RGDDDLG

SEQ ID NO: 35989 - protein, 7 aa, synthetic construct
RGDADNS

SEQ ID NO: 35990 - protein, 7 aa, synthetic construct
RGDDDRS

SEQ ID NO: 35991 - protein, 7 aa, synthetic construct
RGDRFLE

SEQ ID NO: 35992 - protein, 7 aa, synthetic construct
RGDSADS

SEQ ID NO: 35993 - protein, 7 aa, synthetic construct
RGDSDAE

SEQ ID NO: 35994 - protein, 7 aa, synthetic construct
RGDSDLI

SEQ ID NO: 35995 - protein, 7 aa, synthetic construct
RGDSDSR

SEQ ID NO: 35996 - protein, 7 aa, synthetic construct
RGDSDTG

SEQ ID NO: 35997 - protein, 7 aa, synthetic construct
RGDSFAA

SEQ ID NO: 35998 - protein, 7 aa, synthetic construct
RGDSFDQ

SEQ ID NO: 35999 - protein, 7 aa, synthetic construct
RGDSFQL

SEQ ID NO: 36000 - protein, 7 aa, synthetic construct
RGDDFIV

SEQ ID NO: 36001 - protein, 7 aa, synthetic construct
RGDDFLV

SEQ ID NO: 36002 - protein, 7 aa, synthetic construct
RGDSIES

SEQ ID NO: 36003 - protein, 7 aa, synthetic construct
RGDSISN

SEQ ID NO: 36004 - protein, 7 aa, synthetic construct
RGDSLVE

SEQ ID NO: 36005 - protein, 7 aa, synthetic construct
RGDSNQS

SEQ ID NO: 36006 - protein, 7 aa, synthetic construct
RGDSQAH

SEQ ID NO: 36007 - protein, 7 aa, synthetic construct
RGDSSSD

SEQ ID NO: 36008 - protein, 7 aa, synthetic construct
RGDSTTR

SEQ ID NO: 36009 - protein, 7 aa, synthetic construct
RGDSTVS

SEQ ID NO: 36010 - protein, 7 aa, synthetic construct
RGDTDHV

SEQ ID NO: 36011 - protein, 7 aa, synthetic construct
RGDTFSN

SEQ ID NO: 36012 - protein, 7 aa, synthetic construct
RGDADVT

SEQ ID NO: 36013 - protein, 7 aa, synthetic construct
RGDTGTF

SEQ ID NO: 36014 - protein, 7 aa, synthetic construct
RGDTKVE

SEQ ID NO: 36015 - protein, 7 aa, synthetic construct
RGDTLAL

SEQ ID NO: 36016 - protein, 7 aa, synthetic construct
RGDAEAN

SEQ ID NO: 36017 - protein, 7 aa, synthetic construct
RGDTNSK

SEQ ID NO: 36018 - protein, 7 aa, synthetic construct
RGDTQDL

SEQ ID NO: 36019 - protein, 7 aa, synthetic construct
RGDTSHG

SEQ ID NO: 36020 - protein, 7 aa, synthetic construct
RGDDHSF

SEQ ID NO: 36021 - protein, 7 aa, synthetic construct
RGDTTFE

SEQ ID NO: 36022 - protein, 7 aa, synthetic construct
RGDTTFI

SEQ ID NO: 36023 - protein, 7 aa, synthetic construct
RGDTVDF

SEQ ID NO: 36024 - protein, 7 aa, synthetic construct
RGDVDAI

SEQ ID NO: 36025 - protein, 7 aa, synthetic construct
RGDDIEL

SEQ ID NO: 36026 - protein, 7 aa, synthetic construct
RGDVDSH

SEQ ID NO: 36027 - protein, 7 aa, synthetic construct
RGDVDVI

SEQ ID NO: 36028 - protein, 7 aa, synthetic construct
RGDVENT

SEQ ID NO: 36029 - protein, 7 aa, synthetic construct
RGDVGAH

SEQ ID NO: 36030 - protein, 7 aa, synthetic construct
RGDVHAD

SEQ ID NO: 36031 - protein, 7 aa, synthetic construct
RGDVHEL

SEQ ID NO: 36032 - protein, 7 aa, synthetic construct
RGDVHVD

SEQ ID NO: 36033 - protein, 7 aa, synthetic construct
RGDAEER

SEQ ID NO: 36034 - protein, 7 aa, synthetic construct
RGDVQDQ

SEQ ID NO: 36035 - protein, 7 aa, synthetic construct
RGDVQQG

SEQ ID NO: 36036 - protein, 7 aa, synthetic construct
RGDDKDA

SEQ ID NO: 36037 - protein, 7 aa, synthetic construct
RGDDKDI

SEQ ID NO: 36038 - protein, 7 aa, synthetic construct
RGDVSIH

SEQ ID NO: 36039 - protein, 7 aa, synthetic construct
RGDDKIE

SEQ ID NO: 36040 - protein, 7 aa, synthetic construct
RGDDKIF

SEQ ID NO: 36041 - protein, 7 aa, synthetic construct
RGDVVIA

SEQ ID NO: 36042 - protein, 7 aa, synthetic construct
RGDDLRG

SEQ ID NO: 36043 - protein, 7 aa, synthetic construct
RGDDNIL

SEQ ID NO: 36044 - protein, 7 aa, synthetic construct
RGDDNLH

SEQ ID NO: 36045 - protein, 7 aa, synthetic construct
RGDDQDK

SEQ ID NO: 36046 - protein, 7 aa, synthetic construct
RGDDQRA

SEQ ID NO: 36047 - protein, 7 aa, synthetic construct
RGDDRIF

SEQ ID NO: 36048 - protein, 7 aa, synthetic construct
RGDDRQD

SEQ ID NO: 36049 - protein, 7 aa, synthetic construct
RGDDRQF

SEQ ID NO: 36050 - protein, 7 aa, synthetic construct
RGDDTFD

SEQ ID NO: 36051 - protein, 7 aa, synthetic construct
RGDDTHQ

SEQ ID NO: 36052 - protein, 7 aa, synthetic construct
RGDDVEN

SEQ ID NO: 36053 - protein, 7 aa, synthetic construct
RGDEADV

SEQ ID NO: 36054 - protein, 7 aa, synthetic construct
RGDEATG

SEQ ID NO: 36055 - protein, 7 aa, synthetic construct
RGDEDAH

SEQ ID NO: 36056 - protein, 7 aa, synthetic construct
RGDEDED

SEQ ID NO: 36057 - protein, 7 aa, synthetic construct
RGDEDHE

SEQ ID NO: 36058 - protein, 7 aa, synthetic construct
RGDEDVF

SEQ ID NO: 36059 - protein, 7 aa, synthetic construct
RGDEEFN

SEQ ID NO: 36060 - protein, 7 aa, synthetic construct
RGDEENT

SEQ ID NO: 36061 - protein, 7 aa, synthetic construct
RGDEFSK

SEQ ID NO: 36062 - protein, 7 aa, synthetic construct
RGDEGEG

SEQ ID NO: 36063 - protein, 7 aa, synthetic construct
RGDEGNF

SEQ ID NO: 36064 - protein, 7 aa, synthetic construct
RGDEHEA

SEQ ID NO: 36065 - protein, 7 aa, synthetic construct
RGDEHEF

SEQ ID NO: 36066 - protein, 7 aa, synthetic construct
RGDEIDH

SEQ ID NO: 36067 - protein, 7 aa, synthetic construct
RGDEILL

SEQ ID NO: 36068 - protein, 7 aa, synthetic construct
RGDEIRH

SEQ ID NO: 36069 - protein, 7 aa, synthetic construct
RGDEISK

SEQ ID NO: 36070 - protein, 7 aa, synthetic construct
RGDEKEA

SEQ ID NO: 36071 - protein, 7 aa, synthetic construct
RGDEKRS

SEQ ID NO: 36072 - protein, 7 aa, synthetic construct
RGDELGE

SEQ ID NO: 36073 - protein, 7 aa, synthetic construct
RGDELRE

SEQ ID NO: 36074 - protein, 7 aa, synthetic construct
RGDENIR

SEQ ID NO: 36075 - protein, 7 aa, synthetic construct
RGDENRV

SEQ ID NO: 36076 - protein, 7 aa, synthetic construct
RGDAFVV

SEQ ID NO: 36077 - protein, 7 aa, synthetic construct
RGDEQRD

SEQ ID NO: 36078 - protein, 7 aa, synthetic construct
RGDEQTG

SEQ ID NO: 36079 - protein, 7 aa, synthetic construct
RGDEQVR

SEQ ID NO: 36080 - protein, 7 aa, synthetic construct
RGDERDV

SEQ ID NO: 36081 - protein, 7 aa, synthetic construct
RGDERQI

SEQ ID NO: 36082 - protein, 7 aa, synthetic construct
RGDERSG

SEQ ID NO: 36083 - protein, 7 aa, synthetic construct
RGDAGFS

SEQ ID NO: 36084 - protein, 7 aa, synthetic construct
RGDEVVD

SEQ ID NO: 36085 - protein, 7 aa, synthetic construct
RGDFDGF

SEQ ID NO: 36086 - protein, 7 aa, synthetic construct
RGDFDRA

SEQ ID NO: 36087 - protein, 7 aa, synthetic construct
RGDFELD

SEQ ID NO: 36088 - protein, 7 aa, synthetic construct
RGDFFNE

SEQ ID NO: 36089 - protein, 7 aa, synthetic construct
RGDAGTG

SEQ ID NO: 36090 - protein, 7 aa, synthetic construct
RGDFIDK

SEQ ID NO: 36091 - protein, 7 aa, synthetic construct
RGDAHGA

SEQ ID NO: 36092 - protein, 7 aa, synthetic construct
RGDFQTS

SEQ ID NO: 36093 - protein, 7 aa, synthetic construct
RGDFRKG

SEQ ID NO: 36094 - protein, 7 aa, synthetic construct
RGDFTDF

SEQ ID NO: 36095 - protein, 7 aa, synthetic construct
RGDFVDE

SEQ ID NO: 36096 - protein, 7 aa, synthetic construct
RGDGAID

SEQ ID NO: 36097 - protein, 7 aa, synthetic construct
RGDGDVR

SEQ ID NO: 36098 - protein, 7 aa, synthetic construct
RGDAIGT

SEQ ID NO: 36099 - protein, 7 aa, synthetic construct
RGDGIDE

SEQ ID NO: 36100 - protein, 7 aa, synthetic construct
RGDGIEE

SEQ ID NO: 36101 - protein, 7 aa, synthetic construct
RGDGINA

SEQ ID NO: 36102 - protein, 7 aa, synthetic construct
RGDAANV

SEQ ID NO: 36103 - protein, 7 aa, synthetic construct
RGDGNIF

SEQ ID NO: 36104 - protein, 7 aa, synthetic construct
RGDGQDS

SEQ ID NO: 36105 - protein, 7 aa, synthetic construct
RGDGQFD

SEQ ID NO: 36106 - protein, 7 aa, synthetic construct
RGDGQIG

SEQ ID NO: 36107 - protein, 7 aa, synthetic construct
RGDGQIH

SEQ ID NO: 36108 - protein, 7 aa, synthetic construct
RGDGSDL

SEQ ID NO: 36109 - protein, 7 aa, synthetic construct
RGDGVEE

SEQ ID NO: 36110 - protein, 7 aa, synthetic construct
RGDHADV

SEQ ID NO: 36111 - protein, 7 aa, synthetic construct
RGDHDFI

SEQ ID NO: 36112 - protein, 7 aa, synthetic construct
RGDHDQQ

SEQ ID NO: 36113 - protein, 7 aa, synthetic construct
RGDHFNR

SEQ ID NO: 36114 - protein, 7 aa, synthetic construct
RGDHGDF

SEQ ID NO: 36115 - protein, 7 aa, synthetic construct
RGDHGVD

SEQ ID NO: 36116 - protein, 7 aa, synthetic construct
RGDHILI

SEQ ID NO: 36117 - protein, 7 aa, synthetic construct
RGDHITT

SEQ ID NO: 36118 - protein, 7 aa, synthetic construct
RGDALGT

SEQ ID NO: 36119 - protein, 7 aa, synthetic construct
RGDHLTQ

SEQ ID NO: 36120 - protein, 7 aa, synthetic construct
RGDHRED

SEQ ID NO: 36121 - protein, 7 aa, synthetic construct
RGDHRHE

SEQ ID NO: 36122 - protein, 7 aa, synthetic construct
RGDHSDQ

SEQ ID NO: 36123 - protein, 7 aa, synthetic construct
RGDHTLT

SEQ ID NO: 36124 - protein, 7 aa, synthetic construct
RGDHTVS

SEQ ID NO: 36125 - protein, 7 aa, synthetic construct
RGDHVDI

SEQ ID NO: 36126 - protein, 7 aa, synthetic construct
RGDHVSD

SEQ ID NO: 36127 - protein, 7 aa, synthetic construct
RGDANAE

SEQ ID NO: 36128 - protein, 7 aa, synthetic construct
RGDIAES

SEQ ID NO: 36129 - protein, 7 aa, synthetic construct
RGDAATN

SEQ ID NO: 36130 - protein, 7 aa, synthetic construct
RGDIDRF

SEQ ID NO: 36131 - protein, 7 aa, synthetic construct
RGDIEVQ

SEQ ID NO: 36132 - protein, 7 aa, synthetic construct
RGDIFTK

SEQ ID NO: 36133 - protein, 7 aa, synthetic construct
RGDIFVE

SEQ ID NO: 36134 - protein, 7 aa, synthetic construct
RGDIGQA

SEQ ID NO: 36135 - protein, 7 aa, synthetic construct
RGDIIEH

SEQ ID NO: 36136 - protein, 7 aa, synthetic construct
RGDISEH

SEQ ID NO: 36137 - protein, 7 aa, synthetic construct
RGDISSD

SEQ ID NO: 36138 - protein, 7 aa, synthetic construct
RGDISVD

SEQ ID NO: 36139 - protein, 7 aa, synthetic construct
RGDITFL

SEQ ID NO: 36140 - protein, 7 aa, synthetic construct
RGDKAKE

SEQ ID NO: 36141 - protein, 7 aa, synthetic construct
RGDKEGA

SEQ ID NO: 36142 - protein, 7 aa, synthetic construct
RGDKEIS

SEQ ID NO: 36143 - protein, 7 aa, synthetic construct
RGDKFRE

SEQ ID NO: 36144 - protein, 7 aa, synthetic construct
RGDKHED

SEQ ID NO: 36145 - protein, 7 aa, synthetic construct
RGDKIEH

SEQ ID NO: 36146 - protein, 7 aa, synthetic construct
RGDKIHR

SEQ ID NO: 36147 - protein, 7 aa, synthetic construct
RGDKQTA

SEQ ID NO: 36148 - protein, 7 aa, synthetic construct
RGDARVE

SEQ ID NO: 36149 - protein, 7 aa, synthetic construct
RGDASEA

SEQ ID NO: 36150 - protein, 7 aa, synthetic construct
RGDLEDG

SEQ ID NO: 36151 - protein, 7 aa, synthetic construct
RGDLGEG

SEQ ID NO: 36152 - protein, 7 aa, synthetic construct
RGDLNDA

SEQ ID NO: 36153 - protein, 7 aa, synthetic construct
RGDLNDD

SEQ ID NO: 36154 - protein, 7 aa, synthetic construct
RGDLNFT

SEQ ID NO: 36155 - protein, 7 aa, synthetic construct
RGDLNIH

SEQ ID NO: 36156 - protein, 7 aa, synthetic construct
RGDLNIL

SEQ ID NO: 36157 - protein, 7 aa, synthetic construct
RGDLNIR

SEQ ID NO: 36158 - protein, 7 aa, synthetic construct
RGDLNTH

SEQ ID NO: 36159 - protein, 7 aa, synthetic construct
RGDLVSA

SEQ ID NO: 36160 - protein, 7 aa, synthetic construct
RGDNADK

SEQ ID NO: 36161 - protein, 7 aa, synthetic construct
RGDNAKI

SEQ ID NO: 36162 - protein, 7 aa, synthetic construct
RGDNDDE

SEQ ID NO: 36163 - protein, 7 aa, synthetic construct
RGDNDDN

SEQ ID NO: 36164 - protein, 7 aa, synthetic construct
RGDNDQA

SEQ ID NO: 36165 - protein, 7 aa, synthetic construct
RGDNEDV

SEQ ID NO: 36166 - protein, 7 aa, synthetic construct
RGDNEIQ

SEQ ID NO: 36167 - protein, 7 aa, synthetic construct
RGDNEVF

SEQ ID NO: 36168 - protein, 7 aa, synthetic construct
RGDNFSN

SEQ ID NO: 36169 - protein, 7 aa, synthetic construct
RGDNGAI

SEQ ID NO: 36170 - protein, 7 aa, synthetic construct
RGDNGDA

SEQ ID NO: 36171 - protein, 7 aa, synthetic construct
RGDNHHD

SEQ ID NO: 36172 - protein, 7 aa, synthetic construct
RGDNHKD

SEQ ID NO: 36173 - protein, 7 aa, synthetic construct
RGDNIDE

SEQ ID NO: 36174 - protein, 7 aa, synthetic construct
RGDNKDE

SEQ ID NO: 36175 - protein, 7 aa, synthetic construct
RGDNQST

SEQ ID NO: 36176 - protein, 7 aa, synthetic construct
RGDAVLR

SEQ ID NO: 36177 - protein, 7 aa, synthetic construct
RGDNRFD

SEQ ID NO: 36178 - protein, 7 aa, synthetic construct
RGDNVRD

SEQ ID NO: 36179 - protein, 7 aa, synthetic construct
RGDNVSQ

SEQ ID NO: 36180 - protein, 7 aa, synthetic construct
RGDQDQA

SEQ ID NO: 36181 - protein, 7 aa, synthetic construct
RGDQEEE

SEQ ID NO: 36182 - protein, 7 aa, synthetic construct
RGDQFDQ

SEQ ID NO: 36183 - protein, 7 aa, synthetic construct
RGDQFTH

SEQ ID NO: 36184 - protein, 7 aa, synthetic construct
RGDQFVL

SEQ ID NO: 36185 - protein, 7 aa, synthetic construct
RGDQGDN

SEQ ID NO: 36186 - protein, 7 aa, synthetic construct
RGDDALN

SEQ ID NO: 36187 - protein, 7 aa, synthetic construct
RGDQIHD

SEQ ID NO: 36188 - protein, 7 aa, synthetic construct
RGDDARK

SEQ ID NO: 36189 - protein, 7 aa, synthetic construct
RGDDASD

SEQ ID NO: 36190 - protein, 7 aa, synthetic construct
RGDQLKG

SEQ ID NO: 36191 - protein, 7 aa, synthetic construct
RGDQNAS

SEQ ID NO: 36192 - protein, 7 aa, synthetic construct
RGDDDAF

SEQ ID NO: 36193 - protein, 7 aa, synthetic construct
RGDDDEV

SEQ ID NO: 36194 - protein, 7 aa, synthetic construct
RGDDDKE

SEQ ID NO: 36195 - protein, 7 aa, synthetic construct
RGDDDTF

SEQ ID NO: 36196 - protein, 7 aa, synthetic construct
RGDRFVD

SEQ ID NO: 36197 - protein, 7 aa, synthetic construct
RGDDDTS

SEQ ID NO: 36198 - protein, 7 aa, synthetic construct
RGDRGRH

SEQ ID NO: 36199 - protein, 7 aa, synthetic construct
RGDDEAL

SEQ ID NO: 36200 - protein, 7 aa, synthetic construct
RGDRISD

SEQ ID NO: 36201 - protein, 7 aa, synthetic construct
RGDRTLA

SEQ ID NO: 36202 - protein, 7 aa, synthetic construct
RGDSAGA

SEQ ID NO: 36203 - protein, 7 aa, synthetic construct
RGDSDIE

SEQ ID NO: 36204 - protein, 7 aa, synthetic construct
RGDSDTE

SEQ ID NO: 36205 - protein, 7 aa, synthetic construct
RGDSEET

SEQ ID NO: 36206 - protein, 7 aa, synthetic construct
RGDSETA

SEQ ID NO: 36207 - protein, 7 aa, synthetic construct
RGDSKAD

SEQ ID NO: 36208 - protein, 7 aa, synthetic construct
RGDSLEF

SEQ ID NO: 36209 - protein, 7 aa, synthetic construct
RGDSLIF

SEQ ID NO: 36210 - protein, 7 aa, synthetic construct
RGDSNDI

SEQ ID NO: 36211 - protein, 7 aa, synthetic construct
RGDSRDS

SEQ ID NO: 36212 - protein, 7 aa, synthetic construct
RGDSSTE

SEQ ID NO: 36213 - protein, 7 aa, synthetic construct
RGDTDRT

SEQ ID NO: 36214 - protein, 7 aa, synthetic construct
RGDTGKF

SEQ ID NO: 36215 - protein, 7 aa, synthetic construct
RGDTGST

SEQ ID NO: 36216 - protein, 7 aa, synthetic construct
RGDTHAS

SEQ ID NO: 36217 - protein, 7 aa, synthetic construct
RGDDHFS

SEQ ID NO: 36218 - protein, 7 aa, synthetic construct
RGDTLTE

SEQ ID NO: 36219 - protein, 7 aa, synthetic construct
RGDTNKQ

SEQ ID NO: 36220 - protein, 7 aa, synthetic construct
RGDTNNQ

SEQ ID NO: 36221 - protein, 7 aa, synthetic construct
RGDTNTQ

SEQ ID NO: 36222 - protein, 7 aa, synthetic construct
RGDTQLG

SEQ ID NO: 36223 - protein, 7 aa, synthetic construct
RGDTQLR

SEQ ID NO: 36224 - protein, 7 aa, synthetic construct
RGDTQSE

SEQ ID NO: 36225 - protein, 7 aa, synthetic construct
RGDTSGD

SEQ ID NO: 36226 - protein, 7 aa, synthetic construct
RGDTTIT

SEQ ID NO: 36227 - protein, 7 aa, synthetic construct
RGDAEDI

SEQ ID NO: 36228 - protein, 7 aa, synthetic construct
RGDTVVE

SEQ ID NO: 36229 - protein, 7 aa, synthetic construct
RGDVARE

SEQ ID NO: 36230 - protein, 7 aa, synthetic construct
RGDVDGA

SEQ ID NO: 36231 - protein, 7 aa, synthetic construct
RGDVDNH

SEQ ID NO: 36232 - protein, 7 aa, synthetic construct
RGDVDNS

SEQ ID NO: 36233 - protein, 7 aa, synthetic construct
RGDVDRI

SEQ ID NO: 36234 - protein, 7 aa, synthetic construct
RGDVEDN

SEQ ID NO: 36235 - protein, 7 aa, synthetic construct
RGDVEEG

SEQ ID NO: 36236 - protein, 7 aa, synthetic construct
RGDVEFA

SEQ ID NO: 36237 - protein, 7 aa, synthetic construct
RGDVFIR

SEQ ID NO: 36238 - protein, 7 aa, synthetic construct
RGDVFSN

SEQ ID NO: 36239 - protein, 7 aa, synthetic construct
RGDVGAL

SEQ ID NO: 36240 - protein, 7 aa, synthetic construct
RGDVGIE

SEQ ID NO: 36241 - protein, 7 aa, synthetic construct
RGDVGTF

SEQ ID NO: 36242 - protein, 7 aa, synthetic construct
RGDDIKI

SEQ ID NO: 36243 - protein, 7 aa, synthetic construct
RGDVHRD

SEQ ID NO: 36244 - protein, 7 aa, synthetic construct
RGDVHSD

SEQ ID NO: 36245 - protein, 7 aa, synthetic construct
RGDVKAE

SEQ ID NO: 36246 - protein, 7 aa, synthetic construct
RGDVKLA

SEQ ID NO: 36247 - protein, 7 aa, synthetic construct
RGDVLDI

SEQ ID NO: 36248 - protein, 7 aa, synthetic construct
RGDVLEG

SEQ ID NO: 36249 - protein, 7 aa, synthetic construct
RGDVNIR

SEQ ID NO: 36250 - protein, 7 aa, synthetic construct
RGDDKAN

SEQ ID NO: 36251 - protein, 7 aa, synthetic construct
RGDVTTS

SEQ ID NO: 36252 - protein, 7 aa, synthetic construct
RGDVVND

SEQ ID NO: 36253 - protein, 7 aa, synthetic construct
RGDVVRS

SEQ ID NO: 36254 - protein, 7 aa, synthetic construct
RGDDQKK

SEQ ID NO: 36255 - protein, 7 aa, synthetic construct
RGDDQRN

SEQ ID NO: 36256 - protein, 7 aa, synthetic construct
RGDDQTH

SEQ ID NO: 36257 - protein, 7 aa, synthetic construct
RGDAEQF

SEQ ID NO: 36258 - protein, 7 aa, synthetic construct
RGDDRTS

SEQ ID NO: 36259 - protein, 7 aa, synthetic construct
RGDDSHG

SEQ ID NO: 36260 - protein, 7 aa, synthetic construct
RGDDSQD

SEQ ID NO: 36261 - protein, 7 aa, synthetic construct
RGDDTFI

SEQ ID NO: 36262 - protein, 7 aa, synthetic construct
RGDDTIQ

SEQ ID NO: 36263 - protein, 7 aa, synthetic construct
RGDDTST

SEQ ID NO: 36264 - protein, 7 aa, synthetic construct
RGDEEGV

SEQ ID NO: 36265 - protein, 7 aa, synthetic construct
RGDEELF

SEQ ID NO: 36266 - protein, 7 aa, synthetic construct
RGDEFRF

SEQ ID NO: 36267 - protein, 7 aa, synthetic construct
RGDEFVQ

SEQ ID NO: 36268 - protein, 7 aa, synthetic construct
RGDEGGQ

SEQ ID NO: 36269 - protein, 7 aa, synthetic construct
RGDEHII

SEQ ID NO: 36270 - protein, 7 aa, synthetic construct
RGDEHRF

SEQ ID NO: 36271 - protein, 7 aa, synthetic construct
RGDEHVQ

SEQ ID NO: 36272 - protein, 7 aa, synthetic construct
RGDEIEN

SEQ ID NO: 36273 - protein, 7 aa, synthetic construct
RGDEIFI

SEQ ID NO: 36274 - protein, 7 aa, synthetic construct
RGDEITE

SEQ ID NO: 36275 - protein, 7 aa, synthetic construct
RGDEKHL

SEQ ID NO: 36276 - protein, 7 aa, synthetic construct
RGDELII

SEQ ID NO: 36277 - protein, 7 aa, synthetic construct
RGDENLE

SEQ ID NO: 36278 - protein, 7 aa, synthetic construct
RGDENQG

SEQ ID NO: 36279 - protein, 7 aa, synthetic construct
RGDENTF

SEQ ID NO: 36280 - protein, 7 aa, synthetic construct
RGDEQLG

SEQ ID NO: 36281 - protein, 7 aa, synthetic construct
RGDEQLL

SEQ ID NO: 36282 - protein, 7 aa, synthetic construct
RGDEQRS

SEQ ID NO: 36283 - protein, 7 aa, synthetic construct
RGDERIQ

SEQ ID NO: 36284 - protein, 7 aa, synthetic construct
RGDAGGD

SEQ ID NO: 36285 - protein, 7 aa, synthetic construct
RGDESVI

SEQ ID NO: 36286 - protein, 7 aa, synthetic construct
RGDETER

SEQ ID NO: 36287 - protein, 7 aa, synthetic construct
RGDETFN

SEQ ID NO: 36288 - protein, 7 aa, synthetic construct
RGDETSQ

SEQ ID NO: 36289 - protein, 7 aa, synthetic construct
RGDETTG

SEQ ID NO: 36290 - protein, 7 aa, synthetic construct
RGDETVV

SEQ ID NO: 36291 - protein, 7 aa, synthetic construct
RGDEVDK

SEQ ID NO: 36292 - protein, 7 aa, synthetic construct
RGDEVIN

SEQ ID NO: 36293 - protein, 7 aa, synthetic construct
RGDEVTE

SEQ ID NO: 36294 - protein, 7 aa, synthetic construct
RGDFAEF

SEQ ID NO: 36295 - protein, 7 aa, synthetic construct
RGDFDLR

SEQ ID NO: 36296 - protein, 7 aa, synthetic construct
RGDFERA

SEQ ID NO: 36297 - protein, 7 aa, synthetic construct
RGDAGSF

SEQ ID NO: 36298 - protein, 7 aa, synthetic construct
RGDFIAS

SEQ ID NO: 36299 - protein, 7 aa, synthetic construct
RGDAHEI

SEQ ID NO: 36300 - protein, 7 aa, synthetic construct
RGDFIQD

SEQ ID NO: 36301 - protein, 7 aa, synthetic construct
RGDAHFF

SEQ ID NO: 36302 - protein, 7 aa, synthetic construct
RGDFLDD

SEQ ID NO: 36303 - protein, 7 aa, synthetic construct
RGDFQLN

SEQ ID NO: 36304 - protein, 7 aa, synthetic construct
RGDFTAF

SEQ ID NO: 36305 - protein, 7 aa, synthetic construct
RGDFVDH

SEQ ID NO: 36306 - protein, 7 aa, synthetic construct
RGDGDAI

SEQ ID NO: 36307 - protein, 7 aa, synthetic construct
RGDGDAN

SEQ ID NO: 36308 - protein, 7 aa, synthetic construct
RGDGELT

SEQ ID NO: 36309 - protein, 7 aa, synthetic construct
RGDGFDF

SEQ ID NO: 36310 - protein, 7 aa, synthetic construct
RGDGFEN

SEQ ID NO: 36311 - protein, 7 aa, synthetic construct
RGDGGDF

SEQ ID NO: 36312 - protein, 7 aa, synthetic construct
RGDGGVD

SEQ ID NO: 36313 - protein, 7 aa, synthetic construct
RGDGGVK

SEQ ID NO: 36314 - protein, 7 aa, synthetic construct
RGDGHEG

SEQ ID NO: 36315 - protein, 7 aa, synthetic construct
RGDGHGH

SEQ ID NO: 36316 - protein, 7 aa, synthetic construct
RGDGHQH

SEQ ID NO: 36317 - protein, 7 aa, synthetic construct
RGDAIRD

SEQ ID NO: 36318 - protein, 7 aa, synthetic construct
RGDGQAH

SEQ ID NO: 36319 - protein, 7 aa, synthetic construct
RGDGQKD

SEQ ID NO: 36320 - protein, 7 aa, synthetic construct
RGDGRVN

SEQ ID NO: 36321 - protein, 7 aa, synthetic construct
RGDGTEE

SEQ ID NO: 36322 - protein, 7 aa, synthetic construct
RGDGTFH

SEQ ID NO: 36323 - protein, 7 aa, synthetic construct
RGDHDED

SEQ ID NO: 36324 - protein, 7 aa, synthetic construct
RGDHDLS

SEQ ID NO: 36325 - protein, 7 aa, synthetic construct
RGDHEHT

SEQ ID NO: 36326 - protein, 7 aa, synthetic construct
RGDHFFN

SEQ ID NO: 36327 - protein, 7 aa, synthetic construct
RGDHGDD

SEQ ID NO: 36328 - protein, 7 aa, synthetic construct
RGDHHLA

SEQ ID NO: 36329 - protein, 7 aa, synthetic construct
RGDHIFL

SEQ ID NO: 36330 - protein, 7 aa, synthetic construct
RGDHKVE

SEQ ID NO: 36331 - protein, 7 aa, synthetic construct
RGDHNAN

SEQ ID NO: 36332 - protein, 7 aa, synthetic construct
RGDHNIT

SEQ ID NO: 36333 - protein, 7 aa, synthetic construct
RGDHNTD

SEQ ID NO: 36334 - protein, 7 aa, synthetic construct
RGDHQHH

SEQ ID NO: 36335 - protein, 7 aa, synthetic construct
RGDHQSE

SEQ ID NO: 36336 - protein, 7 aa, synthetic construct
RGDHSVE

SEQ ID NO: 36337 - protein, 7 aa, synthetic construct
RGDHTDQ

SEQ ID NO: 36338 - protein, 7 aa, synthetic construct
RGDHTES

SEQ ID NO: 36339 - protein, 7 aa, synthetic construct
RGDIDFH

SEQ ID NO: 36340 - protein, 7 aa, synthetic construct
RGDIDIH

SEQ ID NO: 36341 - protein, 7 aa, synthetic construct
RGDIDRA

SEQ ID NO: 36342 - protein, 7 aa, synthetic construct
RGDIEIG

SEQ ID NO: 36343 - protein, 7 aa, synthetic construct
RGDANFN

SEQ ID NO: 36344 - protein, 7 aa, synthetic construct
RGDIEIN

SEQ ID NO: 36345 - protein, 7 aa, synthetic construct
RGDIFEQ

SEQ ID NO: 36346 - protein, 7 aa, synthetic construct
RGDIFGG

SEQ ID NO: 36347 - protein, 7 aa, synthetic construct
RGDIFVF

SEQ ID NO: 36348 - protein, 7 aa, synthetic construct
RGDIIKS

SEQ ID NO: 36349 - protein, 7 aa, synthetic construct
RGDANQN

SEQ ID NO: 36350 - protein, 7 aa, synthetic construct
RGDIKLG

SEQ ID NO: 36351 - protein, 7 aa, synthetic construct
RGDILID

SEQ ID NO: 36352 - protein, 7 aa, synthetic construct
RGDIRIE

SEQ ID NO: 36353 - protein, 7 aa, synthetic construct
RGDITAE

SEQ ID NO: 36354 - protein, 7 aa, synthetic construct
RGDIVDH

SEQ ID NO: 36355 - protein, 7 aa, synthetic construct
RGDKAKD

SEQ ID NO: 36356 - protein, 7 aa, synthetic construct
RGDAQLI

SEQ ID NO: 36357 - protein, 7 aa, synthetic construct
RGDKDKQ

SEQ ID NO: 36358 - protein, 7 aa, synthetic construct
RGDKEEK

SEQ ID NO: 36359 - protein, 7 aa, synthetic construct
RGDKEKS

SEQ ID NO: 36360 - protein, 7 aa, synthetic construct
RGDKFSA

SEQ ID NO: 36361 - protein, 7 aa, synthetic construct
RGDKKVE

SEQ ID NO: 36362 - protein, 7 aa, synthetic construct
RGDKLLE

SEQ ID NO: 36363 - protein, 7 aa, synthetic construct
RGDKNNE

SEQ ID NO: 36364 - protein, 7 aa, synthetic construct
RGDKQQE

SEQ ID NO: 36365 - protein, 7 aa, synthetic construct
RGDARLK

SEQ ID NO: 36366 - protein, 7 aa, synthetic construct
RGDKTEQ

SEQ ID NO: 36367 - protein, 7 aa, synthetic construct
RGDKVFA

SEQ ID NO: 36368 - protein, 7 aa, synthetic construct
RGDLALE

SEQ ID NO: 36369 - protein, 7 aa, synthetic construct
RGDLEAH

SEQ ID NO: 36370 - protein, 7 aa, synthetic construct
RGDLELT

SEQ ID NO: 36371 - protein, 7 aa, synthetic construct
RGDLERD

SEQ ID NO: 36372 - protein, 7 aa, synthetic construct
RGDLFNG

SEQ ID NO: 36373 - protein, 7 aa, synthetic construct
RGDLFSE

SEQ ID NO: 36374 - protein, 7 aa, synthetic construct
RGDLFVD

SEQ ID NO: 36375 - protein, 7 aa, synthetic construct
RGDLFVE

SEQ ID NO: 36376 - protein, 7 aa, synthetic construct
RGDLIKD

SEQ ID NO: 36377 - protein, 7 aa, synthetic construct
RGDLKSF

SEQ ID NO: 36378 - protein, 7 aa, synthetic construct
RGDLNIG

SEQ ID NO: 36379 - protein, 7 aa, synthetic construct
RGDLQEN

SEQ ID NO: 36380 - protein, 7 aa, synthetic construct
RGDLQLL

SEQ ID NO: 36381 - protein, 7 aa, synthetic construct
RGDLQVH

SEQ ID NO: 36382 - protein, 7 aa, synthetic construct
RGDLRGD

SEQ ID NO: 36383 - protein, 7 aa, synthetic construct
RGDLTSH

SEQ ID NO: 36384 - protein, 7 aa, synthetic construct
RGDNAES

SEQ ID NO: 36385 - protein, 7 aa, synthetic construct
RGDATLR

SEQ ID NO: 36386 - protein, 7 aa, synthetic construct
RGDNDNA

SEQ ID NO: 36387 - protein, 7 aa, synthetic construct
RGDNEAF

SEQ ID NO: 36388 - protein, 7 aa, synthetic construct
RGDATQS

SEQ ID NO: 36389 - protein, 7 aa, synthetic construct
RGDNELS

SEQ ID NO: 36390 - protein, 7 aa, synthetic construct
RGDNFAA

SEQ ID NO: 36391 - protein, 7 aa, synthetic construct
RGDNFDS

SEQ ID NO: 36392 - protein, 7 aa, synthetic construct
RGDNFIK

SEQ ID NO: 36393 - protein, 7 aa, synthetic construct
RGDNFLL

SEQ ID NO: 36394 - protein, 7 aa, synthetic construct
RGDNHDE

SEQ ID NO: 36395 - protein, 7 aa, synthetic construct
RGDNHVA

SEQ ID NO: 36396 - protein, 7 aa, synthetic construct
RGDNIGA

SEQ ID NO: 36397 - protein, 7 aa, synthetic construct
RGDAVFD

SEQ ID NO: 36398 - protein, 7 aa, synthetic construct
RGDNKSA

SEQ ID NO: 36399 - protein, 7 aa, synthetic construct
RGDNKTD

SEQ ID NO: 36400 - protein, 7 aa, synthetic construct
RGDNKVE

SEQ ID NO: 36401 - protein, 7 aa, synthetic construct
RGDNLAD

SEQ ID NO: 36402 - protein, 7 aa, synthetic construct
RGDNLDL

SEQ ID NO: 36403 - protein, 7 aa, synthetic construct
RGDNLSE

SEQ ID NO: 36404 - protein, 7 aa, synthetic construct
RGDNLSG

SEQ ID NO: 36405 - protein, 7 aa, synthetic construct
RGDNLVF

SEQ ID NO: 36406 - protein, 7 aa, synthetic construct
RGDAVIG

SEQ ID NO: 36407 - protein, 7 aa, synthetic construct
RGDNSFE

SEQ ID NO: 36408 - protein, 7 aa, synthetic construct
RGDNSLH

SEQ ID NO: 36409 - protein, 7 aa, synthetic construct
RGDNVEQ

SEQ ID NO: 36410 - protein, 7 aa, synthetic construct
RGDQDKK

SEQ ID NO: 36411 - protein, 7 aa, synthetic construct
RGDQEIQ

SEQ ID NO: 36412 - protein, 7 aa, synthetic construct
RGDQFDE

SEQ ID NO: 36413 - protein, 7 aa, synthetic construct
RGDQGSE

SEQ ID NO: 36414 - protein, 7 aa, synthetic construct
RGDQHLA

SEQ ID NO: 36415 - protein, 7 aa, synthetic construct
RGDQIEE

SEQ ID NO: 36416 - protein, 7 aa, synthetic construct
RGDQIEF

SEQ ID NO: 36417 - protein, 7 aa, synthetic construct
RGDQKAA

SEQ ID NO: 36418 - protein, 7 aa, synthetic construct
RGDDARH

SEQ ID NO: 36419 - protein, 7 aa, synthetic construct
RGDADLQ

SEQ ID NO: 36420 - protein, 7 aa, synthetic construct
RGDADND

SEQ ID NO: 36421 - protein, 7 aa, synthetic construct
RGDDDDR

SEQ ID NO: 36422 - protein, 7 aa, synthetic construct
RGDDDEI

SEQ ID NO: 36423 - protein, 7 aa, synthetic construct
RGDRAAF

SEQ ID NO: 36424 - protein, 7 aa, synthetic construct
RGDRDAE

SEQ ID NO: 36425 - protein, 7 aa, synthetic construct
RGDREEG

SEQ ID NO: 36426 - protein, 7 aa, synthetic construct
RGDRIKD

SEQ ID NO: 36427 - protein, 7 aa, synthetic construct
RGDDEGG

SEQ ID NO: 36428 - protein, 7 aa, synthetic construct
RGDRQQE

SEQ ID NO: 36429 - protein, 7 aa, synthetic construct
RGDAAEN

SEQ ID NO: 36430 - protein, 7 aa, synthetic construct
RGDRTLN

SEQ ID NO: 36431 - protein, 7 aa, synthetic construct
RGDSAAA

SEQ ID NO: 36432 - protein, 7 aa, synthetic construct
RGDSADT

SEQ ID NO: 36433 - protein, 7 aa, synthetic construct
RGDSAQG

SEQ ID NO: 36434 - protein, 7 aa, synthetic construct
RGDSDHS

SEQ ID NO: 36435 - protein, 7 aa, synthetic construct
RGDSDSL

SEQ ID NO: 36436 - protein, 7 aa, synthetic construct
RGDSENT

SEQ ID NO: 36437 - protein, 7 aa, synthetic construct
RGDSETR

SEQ ID NO: 36438 - protein, 7 aa, synthetic construct
RGDSFAV

SEQ ID NO: 36439 - protein, 7 aa, synthetic construct
RGDSFGG

SEQ ID NO: 36440 - protein, 7 aa, synthetic construct
RGDDFSQ

SEQ ID NO: 36441 - protein, 7 aa, synthetic construct
RGDSRLA

SEQ ID NO: 36442 - protein, 7 aa, synthetic construct
RGDSSQD

SEQ ID NO: 36443 - protein, 7 aa, synthetic construct
RGDSTLQ

SEQ ID NO: 36444 - protein, 7 aa, synthetic construct
RGDSTTA

SEQ ID NO: 36445 - protein, 7 aa, synthetic construct
RGDSVDS

SEQ ID NO: 36446 - protein, 7 aa, synthetic construct
RGDSVFD

SEQ ID NO: 36447 - protein, 7 aa, synthetic construct
RGDSVLQ

SEQ ID NO: 36448 - protein, 7 aa, synthetic construct
RGDDGKA

SEQ ID NO: 36449 - protein, 7 aa, synthetic construct
RGDDGLF

SEQ ID NO: 36450 - protein, 7 aa, synthetic construct
RGDTDDI

SEQ ID NO: 36451 - protein, 7 aa, synthetic construct
RGDTEEG

SEQ ID NO: 36452 - protein, 7 aa, synthetic construct
RGDTEGQ

SEQ ID NO: 36453 - protein, 7 aa, synthetic construct
RGDTEGS

SEQ ID NO: 36454 - protein, 7 aa, synthetic construct
RGDTEVD

SEQ ID NO: 36455 - protein, 7 aa, synthetic construct
RGDDGSE

SEQ ID NO: 36456 - protein, 7 aa, synthetic construct
RGDTFRK

SEQ ID NO: 36457 - protein, 7 aa, synthetic construct
RGDTGAV

SEQ ID NO: 36458 - protein, 7 aa, synthetic construct
RGDTGQD

SEQ ID NO: 36459 - protein, 7 aa, synthetic construct
RGDTIKD

SEQ ID NO: 36460 - protein, 7 aa, synthetic construct
RGDTIKN

SEQ ID NO: 36461 - protein, 7 aa, synthetic construct
RGDTILV

SEQ ID NO: 36462 - protein, 7 aa, synthetic construct
RGDTIRG

SEQ ID NO: 36463 - protein, 7 aa, synthetic construct
RGDTLDE

SEQ ID NO: 36464 - protein, 7 aa, synthetic construct
RGDTNQH

SEQ ID NO: 36465 - protein, 7 aa, synthetic construct
RGDTNRQ

SEQ ID NO: 36466 - protein, 7 aa, synthetic construct
RGDTRQE

SEQ ID NO: 36467 - protein, 7 aa, synthetic construct
RGDTSAD

SEQ ID NO: 36468 - protein, 7 aa, synthetic construct
RGDTSAH

SEQ ID NO: 36469 - protein, 7 aa, synthetic construct
RGDTSNG

SEQ ID NO: 36470 - protein, 7 aa, synthetic construct
RGDTTIV

SEQ ID NO: 36471 - protein, 7 aa, synthetic construct
RGDTVTD

SEQ ID NO: 36472 - protein, 7 aa, synthetic construct
RGDDIDA

SEQ ID NO: 36473 - protein, 7 aa, synthetic construct
RGDVDFL

SEQ ID NO: 36474 - protein, 7 aa, synthetic construct
RGDVDTL

SEQ ID NO: 36475 - protein, 7 aa, synthetic construct
RGDVELA

SEQ ID NO: 36476 - protein, 7 aa, synthetic construct
RGDVETH

SEQ ID NO: 36477 - protein, 7 aa, synthetic construct
RGDDIGH

SEQ ID NO: 36478 - protein, 7 aa, synthetic construct
RGDVFAQ

SEQ ID NO: 36479 - protein, 7 aa, synthetic construct
RGDVFAS

SEQ ID NO: 36480 - protein, 7 aa, synthetic construct
RGDVFDV

SEQ ID NO: 36481 - protein, 7 aa, synthetic construct
RGDVFFE

SEQ ID NO: 36482 - protein, 7 aa, synthetic construct
RGDVFIE

SEQ ID NO: 36483 - protein, 7 aa, synthetic construct
RGDVFKG

SEQ ID NO: 36484 - protein, 7 aa, synthetic construct
RGDVGEG

SEQ ID NO: 36485 - protein, 7 aa, synthetic construct
RGDDIKG

SEQ ID NO: 36486 - protein, 7 aa, synthetic construct
RGDVGVG

SEQ ID NO: 36487 - protein, 7 aa, synthetic construct
RGDVIGH

SEQ ID NO: 36488 - protein, 7 aa, synthetic construct
RGDVIIG

SEQ ID NO: 36489 - protein, 7 aa, synthetic construct
RGDDINV

SEQ ID NO: 36490 - protein, 7 aa, synthetic construct
RGDVITA

SEQ ID NO: 36491 - protein, 7 aa, synthetic construct
RGDDIQL

SEQ ID NO: 36492 - protein, 7 aa, synthetic construct
RGDDISL

SEQ ID NO: 36493 - protein, 7 aa, synthetic construct
RGDVNIL

SEQ ID NO: 36494 - protein, 7 aa, synthetic construct
RGDVNIT

SEQ ID NO: 36495 - protein, 7 aa, synthetic construct
RGDVTLG

SEQ ID NO: 36496 - protein, 7 aa, synthetic construct
RGDDKNT

SEQ ID NO: 36497 - protein, 7 aa, synthetic construct
RGDDKSA

SEQ ID NO: 36498 - protein, 7 aa, synthetic construct
RGDDLDS

SEQ ID NO: 36499 - protein, 7 aa, synthetic construct
RGDDLIQ

SEQ ID NO: 36500 - protein, 7 aa, synthetic construct
RGDDLLN

SEQ ID NO: 36501 - protein, 7 aa, synthetic construct
RGDDLNS

SEQ ID NO: 36502 - protein, 7 aa, synthetic construct
RGDDNVN

SEQ ID NO: 36503 - protein, 7 aa, synthetic construct
RGDDQGR

SEQ ID NO: 36504 - protein, 7 aa, synthetic construct
RGDDQHK

SEQ ID NO: 36505 - protein, 7 aa, synthetic construct
RGDAELF

SEQ ID NO: 36506 - protein, 7 aa, synthetic construct
RGDDQSN

SEQ ID NO: 36507 - protein, 7 aa, synthetic construct
RGDDSAI

SEQ ID NO: 36508 - protein, 7 aa, synthetic construct
RGDAEQN

SEQ ID NO: 36509 - protein, 7 aa, synthetic construct
RGDDSEQ

SEQ ID NO: 36510 - protein, 7 aa, synthetic construct
RGDDSEV

SEQ ID NO: 36511 - protein, 7 aa, synthetic construct
RGDDSSE

SEQ ID NO: 36512 - protein, 7 aa, synthetic construct
RGDDTGT

SEQ ID NO: 36513 - protein, 7 aa, synthetic construct
RGDDTQH

SEQ ID NO: 36514 - protein, 7 aa, synthetic construct
RGDAETI

SEQ ID NO: 36515 - protein, 7 aa, synthetic construct
RGDDVAH

SEQ ID NO: 36516 - protein, 7 aa, synthetic construct
RGDDVEF

SEQ ID NO: 36517 - protein, 7 aa, synthetic construct
RGDDVIF

SEQ ID NO: 36518 - protein, 7 aa, synthetic construct
RGDDVLV

SEQ ID NO: 36519 - protein, 7 aa, synthetic construct
RGDDVVQ

SEQ ID NO: 36520 - protein, 7 aa, synthetic construct
RGDEAAE

SEQ ID NO: 36521 - protein, 7 aa, synthetic construct
RGDAFAK

SEQ ID NO: 36522 - protein, 7 aa, synthetic construct
RGDEDFF

SEQ ID NO: 36523 - protein, 7 aa, synthetic construct
RGDEDSS

SEQ ID NO: 36524 - protein, 7 aa, synthetic construct
RGDEEIL

SEQ ID NO: 36525 - protein, 7 aa, synthetic construct
RGDEEQA

SEQ ID NO: 36526 - protein, 7 aa, synthetic construct
RGDEERS

SEQ ID NO: 36527 - protein, 7 aa, synthetic construct
RGDEFHE

SEQ ID NO: 36528 - protein, 7 aa, synthetic construct
RGDEFVT

SEQ ID NO: 36529 - protein, 7 aa, synthetic construct
RGDEIVD

SEQ ID NO: 36530 - protein, 7 aa, synthetic construct
RGDEKDD

SEQ ID NO: 36531 - protein, 7 aa, synthetic construct
RGDELQT

SEQ ID NO: 36532 - protein, 7 aa, synthetic construct
RGDENRT

SEQ ID NO: 36533 - protein, 7 aa, synthetic construct
RGDEQLI

SEQ ID NO: 36534 - protein, 7 aa, synthetic construct
RGDERND

SEQ ID NO: 36535 - protein, 7 aa, synthetic construct
RGDESFD

SEQ ID NO: 36536 - protein, 7 aa, synthetic construct
RGDETAI

SEQ ID NO: 36537 - protein, 7 aa, synthetic construct
RGDETGV

SEQ ID NO: 36538 - protein, 7 aa, synthetic construct
RGDEVHF

SEQ ID NO: 36539 - protein, 7 aa, synthetic construct
RGDEVKA

SEQ ID NO: 36540 - protein, 7 aa, synthetic construct
RGDFFGD

SEQ ID NO: 36541 - protein, 7 aa, synthetic construct
RGDFNTD

SEQ ID NO: 36542 - protein, 7 aa, synthetic construct
RGDFQSV

SEQ ID NO: 36543 - protein, 7 aa, synthetic construct
RGDAHRG

SEQ ID NO: 36544 - protein, 7 aa, synthetic construct
RGDFSTE

SEQ ID NO: 36545 - protein, 7 aa, synthetic construct
RGDFVTI

SEQ ID NO: 36546 - protein, 7 aa, synthetic construct
RGDAHVS

SEQ ID NO: 36547 - protein, 7 aa, synthetic construct
RGDAIAT

SEQ ID NO: 36548 - protein, 7 aa, synthetic construct
RGDGEVA

SEQ ID NO: 36549 - protein, 7 aa, synthetic construct
RGDAIKH

SEQ ID NO: 36550 - protein, 7 aa, synthetic construct
RGDGHVA

SEQ ID NO: 36551 - protein, 7 aa, synthetic construct
RGDGISS

SEQ ID NO: 36552 - protein, 7 aa, synthetic construct
RGDGKIS

SEQ ID NO: 36553 - protein, 7 aa, synthetic construct
RGDGLAS

SEQ ID NO: 36554 - protein, 7 aa, synthetic construct
RGDGNEF

SEQ ID NO: 36555 - protein, 7 aa, synthetic construct
RGDGSNF

SEQ ID NO: 36556 - protein, 7 aa, synthetic construct
RGDGVVG

SEQ ID NO: 36557 - protein, 7 aa, synthetic construct
RGDHAKG

SEQ ID NO: 36558 - protein, 7 aa, synthetic construct
RGDHDEH

SEQ ID NO: 36559 - protein, 7 aa, synthetic construct
RGDHEIR

SEQ ID NO: 36560 - protein, 7 aa, synthetic construct
RGDHELQ

SEQ ID NO: 36561 - protein, 7 aa, synthetic construct
RGDHHGG

SEQ ID NO: 36562 - protein, 7 aa, synthetic construct
RGDALEL

SEQ ID NO: 36563 - protein, 7 aa, synthetic construct
RGDHIVS

SEQ ID NO: 36564 - protein, 7 aa, synthetic construct
RGDHKDA

SEQ ID NO: 36565 - protein, 7 aa, synthetic construct
RGDHNDD

SEQ ID NO: 36566 - protein, 7 aa, synthetic construct
RGDALNA

SEQ ID NO: 36567 - protein, 7 aa, synthetic construct
RGDHREG

SEQ ID NO: 36568 - protein, 7 aa, synthetic construct
RGDHRLD

SEQ ID NO: 36569 - protein, 7 aa, synthetic construct
RGDHTTD

SEQ ID NO: 36570 - protein, 7 aa, synthetic construct
RGDALTH

SEQ ID NO: 36571 - protein, 7 aa, synthetic construct
RGDHVTG

SEQ ID NO: 36572 - protein, 7 aa, synthetic construct
RGDIDEH

SEQ ID NO: 36573 - protein, 7 aa, synthetic construct
RGDIDGE

SEQ ID NO: 36574 - protein, 7 aa, synthetic construct
RGDANGD

SEQ ID NO: 36575 - protein, 7 aa, synthetic construct
RGDIETT

SEQ ID NO: 36576 - protein, 7 aa, synthetic construct
RGDIFKG

SEQ ID NO: 36577 - protein, 7 aa, synthetic construct
RGDIFND

SEQ ID NO: 36578 - protein, 7 aa, synthetic construct
RGDIGLF

SEQ ID NO: 36579 - protein, 7 aa, synthetic construct
RGDIGTV

SEQ ID NO: 36580 - protein, 7 aa, synthetic construct
RGDIHIT

SEQ ID NO: 36581 - protein, 7 aa, synthetic construct
RGDILHE

SEQ ID NO: 36582 - protein, 7 aa, synthetic construct
RGDILLA

SEQ ID NO: 36583 - protein, 7 aa, synthetic construct
RGDINQD

SEQ ID NO: 36584 - protein, 7 aa, synthetic construct
RGDINQH

SEQ ID NO: 36585 - protein, 7 aa, synthetic construct
RGDITLD

SEQ ID NO: 36586 - protein, 7 aa, synthetic construct
RGDAQST

SEQ ID NO: 36587 - protein, 7 aa, synthetic construct
RGDKIEN

SEQ ID NO: 36588 - protein, 7 aa, synthetic construct
RGDKLAN

SEQ ID NO: 36589 - protein, 7 aa, synthetic construct
RGDKQDK

SEQ ID NO: 36590 - protein, 7 aa, synthetic construct
RGDKQVS

SEQ ID NO: 36591 - protein, 7 aa, synthetic construct
RGDKTEF

SEQ ID NO: 36592 - protein, 7 aa, synthetic construct
RGDKTKA

SEQ ID NO: 36593 - protein, 7 aa, synthetic construct
RGDKTTE

SEQ ID NO: 36594 - protein, 7 aa, synthetic construct
RGDKVGD

SEQ ID NO: 36595 - protein, 7 aa, synthetic construct
RGDKVLG

SEQ ID NO: 36596 - protein, 7 aa, synthetic construct
RGDLAFG

SEQ ID NO: 36597 - protein, 7 aa, synthetic construct
RGDASAN

SEQ ID NO: 36598 - protein, 7 aa, synthetic construct
RGDLDEV

SEQ ID NO: 36599 - protein, 7 aa, synthetic construct
RGDLEEA

SEQ ID NO: 36600 - protein, 7 aa, synthetic construct
RGDLEES

SEQ ID NO: 36601 - protein, 7 aa, synthetic construct
RGDLEIF

SEQ ID NO: 36602 - protein, 7 aa, synthetic construct
RGDLEKI

SEQ ID NO: 36603 - protein, 7 aa, synthetic construct
RGDLFEH

SEQ ID NO: 36604 - protein, 7 aa, synthetic construct
RGDLHRF

SEQ ID NO: 36605 - protein, 7 aa, synthetic construct
RGDLIFL

SEQ ID NO: 36606 - protein, 7 aa, synthetic construct
RGDATKE

SEQ ID NO: 36607 - protein, 7 aa, synthetic construct
RGDATQA

SEQ ID NO: 36608 - protein, 7 aa, synthetic construct
RGDNDQQ

SEQ ID NO: 36609 - protein, 7 aa, synthetic construct
RGDATQG

SEQ ID NO: 36610 - protein, 7 aa, synthetic construct
RGDNEQA

SEQ ID NO: 36611 - protein, 7 aa, synthetic construct
RGDATSE

SEQ ID NO: 36612 - protein, 7 aa, synthetic construct
RGDNFQH

SEQ ID NO: 36613 - protein, 7 aa, synthetic construct
RGDNFQN

SEQ ID NO: 36614 - protein, 7 aa, synthetic construct
RGDNGNS

SEQ ID NO: 36615 - protein, 7 aa, synthetic construct
RGDNHAA

SEQ ID NO: 36616 - protein, 7 aa, synthetic construct
RGDNHIT

SEQ ID NO: 36617 - protein, 7 aa, synthetic construct
RGDAVAT

SEQ ID NO: 36618 - protein, 7 aa, synthetic construct
RGDAVDK

SEQ ID NO: 36619 - protein, 7 aa, synthetic construct
RGDNIAH

SEQ ID NO: 36620 - protein, 7 aa, synthetic construct
RGDNIAS

SEQ ID NO: 36621 - protein, 7 aa, synthetic construct
RGDNIER

SEQ ID NO: 36622 - protein, 7 aa, synthetic construct
RGDNKFG

SEQ ID NO: 36623 - protein, 7 aa, synthetic construct
RGDNKLF

SEQ ID NO: 36624 - protein, 7 aa, synthetic construct
RGDNLIQ

SEQ ID NO: 36625 - protein, 7 aa, synthetic construct
RGDNNIV

SEQ ID NO: 36626 - protein, 7 aa, synthetic construct
RGDNNTL

SEQ ID NO: 36627 - protein, 7 aa, synthetic construct
RGDNQGG

SEQ ID NO: 36628 - protein, 7 aa, synthetic construct
RGDNSEN

SEQ ID NO: 36629 - protein, 7 aa, synthetic construct
RGDNTES

SEQ ID NO: 36630 - protein, 7 aa, synthetic construct
RGDNVLN

SEQ ID NO: 36631 - protein, 7 aa, synthetic construct
RGDNVVD

SEQ ID NO: 36632 - protein, 7 aa, synthetic construct
RGDQDDN

SEQ ID NO: 36633 - protein, 7 aa, synthetic construct
RGDQDFE

SEQ ID NO: 36634 - protein, 7 aa, synthetic construct
RGDDADS

SEQ ID NO: 36635 - protein, 7 aa, synthetic construct
RGDQDHK

SEQ ID NO: 36636 - protein, 7 aa, synthetic construct
RGDQDLS

SEQ ID NO: 36637 - protein, 7 aa, synthetic construct
RGDQDQL

SEQ ID NO: 36638 - protein, 7 aa, synthetic construct
RGDDAFG

SEQ ID NO: 36639 - protein, 7 aa, synthetic construct
RGDADKS

SEQ ID NO: 36640 - protein, 7 aa, synthetic construct
RGDQFQL

SEQ ID NO: 36641 - protein, 7 aa, synthetic construct
RGDDARD

SEQ ID NO: 36642 - protein, 7 aa, synthetic construct
RGDQNLK

SEQ ID NO: 36643 - protein, 7 aa, synthetic construct
RGDQSLE

SEQ ID NO: 36644 - protein, 7 aa, synthetic construct
RGDDDGS

SEQ ID NO: 36645 - protein, 7 aa, synthetic construct
RGDDDIN

SEQ ID NO: 36646 - protein, 7 aa, synthetic construct
RGDDDLA

SEQ ID NO: 36647 - protein, 7 aa, synthetic construct
RGDDDQV

SEQ ID NO: 36648 - protein, 7 aa, synthetic construct
RGDREIL

SEQ ID NO: 36649 - protein, 7 aa, synthetic construct
RGDRELN

SEQ ID NO: 36650 - protein, 7 aa, synthetic construct
RGDDDSG

SEQ ID NO: 36651 - protein, 7 aa, synthetic construct
RGDRLIE

SEQ ID NO: 36652 - protein, 7 aa, synthetic construct
RGDRLLN

SEQ ID NO: 36653 - protein, 7 aa, synthetic construct
RGDADRI

SEQ ID NO: 36654 - protein, 7 aa, synthetic construct
RGDDEVE

SEQ ID NO: 36655 - protein, 7 aa, synthetic construct
RGDSDGE

SEQ ID NO: 36656 - protein, 7 aa, synthetic construct
RGDSEQH

SEQ ID NO: 36657 - protein, 7 aa, synthetic construct
RGDDFGH

SEQ ID NO: 36658 - protein, 7 aa, synthetic construct
RGDSFEH

SEQ ID NO: 36659 - protein, 7 aa, synthetic construct
RGDSFSE

SEQ ID NO: 36660 - protein, 7 aa, synthetic construct
RGDSHVA

SEQ ID NO: 36661 - protein, 7 aa, synthetic construct
RGDSLLT

SEQ ID NO: 36662 - protein, 7 aa, synthetic construct
RGDSLVK

SEQ ID NO: 36663 - protein, 7 aa, synthetic construct
RGDSNHH

SEQ ID NO: 36664 - protein, 7 aa, synthetic construct
RGDSQDD

SEQ ID NO: 36665 - protein, 7 aa, synthetic construct
RGDSSIF

SEQ ID NO: 36666 - protein, 7 aa, synthetic construct
RGDSTIL

SEQ ID NO: 36667 - protein, 7 aa, synthetic construct
RGDSTLE

SEQ ID NO: 36668 - protein, 7 aa, synthetic construct
RGDSTVN

SEQ ID NO: 36669 - protein, 7 aa, synthetic construct
RGDSVEL

SEQ ID NO: 36670 - protein, 7 aa, synthetic construct
RGDSVQD

SEQ ID NO: 36671 - protein, 7 aa, synthetic construct
RGDTAIS

SEQ ID NO: 36672 - protein, 7 aa, synthetic construct
RGDTDHD

SEQ ID NO: 36673 - protein, 7 aa, synthetic construct
RGDTDHT

SEQ ID NO: 36674 - protein, 7 aa, synthetic construct
RGDTDQQ

SEQ ID NO: 36675 - protein, 7 aa, synthetic construct
RGDTDSE

SEQ ID NO: 36676 - protein, 7 aa, synthetic construct
RGDTDSH

SEQ ID NO: 36677 - protein, 7 aa, synthetic construct
RGDTEHA

SEQ ID NO: 36678 - protein, 7 aa, synthetic construct
RGDTFFS

SEQ ID NO: 36679 - protein, 7 aa, synthetic construct
RGDTFIN

SEQ ID NO: 36680 - protein, 7 aa, synthetic construct
RGDTHLE

SEQ ID NO: 36681 - protein, 7 aa, synthetic construct
RGDTHSE

SEQ ID NO: 36682 - protein, 7 aa, synthetic construct
RGDTILG

SEQ ID NO: 36683 - protein, 7 aa, synthetic construct
RGDTNGK

SEQ ID NO: 36684 - protein, 7 aa, synthetic construct
RGDDHIS

SEQ ID NO: 36685 - protein, 7 aa, synthetic construct
RGDTVGH

SEQ ID NO: 36686 - protein, 7 aa, synthetic construct
RGDTVKN

SEQ ID NO: 36687 - protein, 7 aa, synthetic construct
RGDDIDF

SEQ ID NO: 36688 - protein, 7 aa, synthetic construct
RGDVDDN

SEQ ID NO: 36689 - protein, 7 aa, synthetic construct
RGDVEKT

SEQ ID NO: 36690 - protein, 7 aa, synthetic construct
RGDVEQG

SEQ ID NO: 36691 - protein, 7 aa, synthetic construct
RGDVFER

SEQ ID NO: 36692 - protein, 7 aa, synthetic construct
RGDVFNG

SEQ ID NO: 36693 - protein, 7 aa, synthetic construct
RGDVFVS

SEQ ID NO: 36694 - protein, 7 aa, synthetic construct
RGDVIDI

SEQ ID NO: 36695 - protein, 7 aa, synthetic construct
RGDVNDK

SEQ ID NO: 36696 - protein, 7 aa, synthetic construct
RGDVNVE

SEQ ID NO: 36697 - protein, 7 aa, synthetic construct
RGDVQIG

SEQ ID NO: 36698 - protein, 7 aa, synthetic construct
RGDDKDD

SEQ ID NO: 36699 - protein, 7 aa, synthetic construct
RGDVTDT

SEQ ID NO: 36700 - protein, 7 aa, synthetic construct
RGDVVNA

SEQ ID NO: 36701 - protein, 7 aa, synthetic construct
RGDDKLA

SEQ ID NO: 36702 - protein, 7 aa, synthetic construct
RGDAEHH

SEQ ID NO: 36703 - protein, 7 aa, synthetic construct
RGDDNAL

SEQ ID NO: 36704 - protein, 7 aa, synthetic construct
RGDAEIL

SEQ ID NO: 36705 - protein, 7 aa, synthetic construct
RGDDNNL

SEQ ID NO: 36706 - protein, 7 aa, synthetic construct
RGDDNQN

SEQ ID NO: 36707 - protein, 7 aa, synthetic construct
RGDDQER

SEQ ID NO: 36708 - protein, 7 aa, synthetic construct
RGDDQHV

SEQ ID NO: 36709 - protein, 7 aa, synthetic construct
RGDDRAF

SEQ ID NO: 36710 - protein, 7 aa, synthetic construct
RGDDRIV

SEQ ID NO: 36711 - protein, 7 aa, synthetic construct
RGDDSDA

SEQ ID NO: 36712 - protein, 7 aa, synthetic construct
RGDDSLI

SEQ ID NO: 36713 - protein, 7 aa, synthetic construct
RGDDTFG

SEQ ID NO: 36714 - protein, 7 aa, synthetic construct
RGDDTFK

SEQ ID NO: 36715 - protein, 7 aa, synthetic construct
RGDDTGI

SEQ ID NO: 36716 - protein, 7 aa, synthetic construct
RGDDTQK

SEQ ID NO: 36717 - protein, 7 aa, synthetic construct
RGDDVHS

SEQ ID NO: 36718 - protein, 7 aa, synthetic construct
RGDDVNA

SEQ ID NO: 36719 - protein, 7 aa, synthetic construct
RGDEAKR

SEQ ID NO: 36720 - protein, 7 aa, synthetic construct
RGDEAQQ

SEQ ID NO: 36721 - protein, 7 aa, synthetic construct
RGDEDRQ

SEQ ID NO: 36722 - protein, 7 aa, synthetic construct
RGDEDVT

SEQ ID NO: 36723 - protein, 7 aa, synthetic construct
RGDAFFD

SEQ ID NO: 36724 - protein, 7 aa, synthetic construct
RGDEEQQ

SEQ ID NO: 36725 - protein, 7 aa, synthetic construct
RGDEETQ

SEQ ID NO: 36726 - protein, 7 aa, synthetic construct
RGDEFDE

SEQ ID NO: 36727 - protein, 7 aa, synthetic construct
RGDEFKF

SEQ ID NO: 36728 - protein, 7 aa, synthetic construct
RGDEFLH

SEQ ID NO: 36729 - protein, 7 aa, synthetic construct
RGDEFNQ

SEQ ID NO: 36730 - protein, 7 aa, synthetic construct
RGDEGAN

SEQ ID NO: 36731 - protein, 7 aa, synthetic construct
RGDEGLF

SEQ ID NO: 36732 - protein, 7 aa, synthetic construct
RGDEGNT

SEQ ID NO: 36733 - protein, 7 aa, synthetic construct
RGDEHEI

SEQ ID NO: 36734 - protein, 7 aa, synthetic construct
RGDEHFV

SEQ ID NO: 36735 - protein, 7 aa, synthetic construct
RGDAFLD

SEQ ID NO: 36736 - protein, 7 aa, synthetic construct
RGDEHLG

SEQ ID NO: 36737 - protein, 7 aa, synthetic construct
RGDEHLR

SEQ ID NO: 36738 - protein, 7 aa, synthetic construct
RGDEIKA

SEQ ID NO: 36739 - protein, 7 aa, synthetic construct
RGDEIKR

SEQ ID NO: 36740 - protein, 7 aa, synthetic construct
RGDEKET

SEQ ID NO: 36741 - protein, 7 aa, synthetic construct
RGDEKLF

SEQ ID NO: 36742 - protein, 7 aa, synthetic construct
RGDELTH

SEQ ID NO: 36743 - protein, 7 aa, synthetic construct
RGDELVL

SEQ ID NO: 36744 - protein, 7 aa, synthetic construct
RGDENAR

SEQ ID NO: 36745 - protein, 7 aa, synthetic construct
RGDENSE

SEQ ID NO: 36746 - protein, 7 aa, synthetic construct
RGDEQDL

SEQ ID NO: 36747 - protein, 7 aa, synthetic construct
RGDEQIA

SEQ ID NO: 36748 - protein, 7 aa, synthetic construct
RGDERDT

SEQ ID NO: 36749 - protein, 7 aa, synthetic construct
RGDETAG

SEQ ID NO: 36750 - protein, 7 aa, synthetic construct
RGDETAV

SEQ ID NO: 36751 - protein, 7 aa, synthetic construct
RGDETET

SEQ ID NO: 36752 - protein, 7 aa, synthetic construct
RGDETLT

SEQ ID NO: 36753 - protein, 7 aa, synthetic construct
RGDETNL

SEQ ID NO: 36754 - protein, 7 aa, synthetic construct
RGDEVHD

SEQ ID NO: 36755 - protein, 7 aa, synthetic construct
RGDEVLH

SEQ ID NO: 36756 - protein, 7 aa, synthetic construct
RGDFDDE

SEQ ID NO: 36757 - protein, 7 aa, synthetic construct
RGDFDKE

SEQ ID NO: 36758 - protein, 7 aa, synthetic construct
RGDFEIE

SEQ ID NO: 36759 - protein, 7 aa, synthetic construct
RGDFGQE

SEQ ID NO: 36760 - protein, 7 aa, synthetic construct
RGDFGQF

SEQ ID NO: 36761 - protein, 7 aa, synthetic construct
RGDFIGD

SEQ ID NO: 36762 - protein, 7 aa, synthetic construct
RGDFITE

SEQ ID NO: 36763 - protein, 7 aa, synthetic construct
RGDFKAA

SEQ ID NO: 36764 - protein, 7 aa, synthetic construct
RGDAHGH

SEQ ID NO: 36765 - protein, 7 aa, synthetic construct
RGDAHIN

SEQ ID NO: 36766 - protein, 7 aa, synthetic construct
RGDFSIH

SEQ ID NO: 36767 - protein, 7 aa, synthetic construct
RGDFTEG

SEQ ID NO: 36768 - protein, 7 aa, synthetic construct
RGDAHTA

SEQ ID NO: 36769 - protein, 7 aa, synthetic construct
RGDGFEK

SEQ ID NO: 36770 - protein, 7 aa, synthetic construct
RGDGGEN

SEQ ID NO: 36771 - protein, 7 aa, synthetic construct
RGDAIIN

SEQ ID NO: 36772 - protein, 7 aa, synthetic construct
RGDAIND

SEQ ID NO: 36773 - protein, 7 aa, synthetic construct
RGDGIFG

SEQ ID NO: 36774 - protein, 7 aa, synthetic construct
RGDGNAE

SEQ ID NO: 36775 - protein, 7 aa, synthetic construct
RGDGQVR

SEQ ID NO: 36776 - protein, 7 aa, synthetic construct
RGDGRES

SEQ ID NO: 36777 - protein, 7 aa, synthetic construct
RGDAKGD

SEQ ID NO: 36778 - protein, 7 aa, synthetic construct
RGDGTAS

SEQ ID NO: 36779 - protein, 7 aa, synthetic construct
RGDHAVE

SEQ ID NO: 36780 - protein, 7 aa, synthetic construct
RGDHDDI

SEQ ID NO: 36781 - protein, 7 aa, synthetic construct
RGDHDII

SEQ ID NO: 36782 - protein, 7 aa, synthetic construct
RGDHEGS

SEQ ID NO: 36783 - protein, 7 aa, synthetic construct
RGDHEHH

SEQ ID NO: 36784 - protein, 7 aa, synthetic construct
RGDHEQE

SEQ ID NO: 36785 - protein, 7 aa, synthetic construct
RGDHFAK

SEQ ID NO: 36786 - protein, 7 aa, synthetic construct
RGDHFVN

SEQ ID NO: 36787 - protein, 7 aa, synthetic construct
RGDAKVE

SEQ ID NO: 36788 - protein, 7 aa, synthetic construct
RGDHIFT

SEQ ID NO: 36789 - protein, 7 aa, synthetic construct
RGDHLEN

SEQ ID NO: 36790 - protein, 7 aa, synthetic construct
RGDHLVG

SEQ ID NO: 36791 - protein, 7 aa, synthetic construct
RGDHQEG

SEQ ID NO: 36792 - protein, 7 aa, synthetic construct
RGDHRKG

SEQ ID NO: 36793 - protein, 7 aa, synthetic construct
RGDHRTD

SEQ ID NO: 36794 - protein, 7 aa, synthetic construct
RGDHTSG

SEQ ID NO: 36795 - protein, 7 aa, synthetic construct
RGDIALH

SEQ ID NO: 36796 - protein, 7 aa, synthetic construct
RGDANDK

SEQ ID NO: 36797 - protein, 7 aa, synthetic construct
RGDIDFI

SEQ ID NO: 36798 - protein, 7 aa, synthetic construct
RGDIDVF

SEQ ID NO: 36799 - protein, 7 aa, synthetic construct
RGDIFDT

SEQ ID NO: 36800 - protein, 7 aa, synthetic construct
RGDIGRF

SEQ ID NO: 36801 - protein, 7 aa, synthetic construct
RGDIGTE

SEQ ID NO: 36802 - protein, 7 aa, synthetic construct
RGDIGVL

SEQ ID NO: 36803 - protein, 7 aa, synthetic construct
RGDIHES

SEQ ID NO: 36804 - protein, 7 aa, synthetic construct
RGDIHFD

SEQ ID NO: 36805 - protein, 7 aa, synthetic construct
RGDIIKG

SEQ ID NO: 36806 - protein, 7 aa, synthetic construct
RGDILDA

SEQ ID NO: 36807 - protein, 7 aa, synthetic construct
RGDANTN

SEQ ID NO: 36808 - protein, 7 aa, synthetic construct
RGDINLA

SEQ ID NO: 36809 - protein, 7 aa, synthetic construct
RGDISAG

SEQ ID NO: 36810 - protein, 7 aa, synthetic construct
RGDITDE

SEQ ID NO: 36811 - protein, 7 aa, synthetic construct
RGDAQGN

SEQ ID NO: 36812 - protein, 7 aa, synthetic construct
RGDITIE

SEQ ID NO: 36813 - protein, 7 aa, synthetic construct
RGDAQIL

SEQ ID NO: 36814 - protein, 7 aa, synthetic construct
RGDIVQF

SEQ ID NO: 36815 - protein, 7 aa, synthetic construct
RGDIVQH

SEQ ID NO: 36816 - protein, 7 aa, synthetic construct
RGDKAEE

SEQ ID NO: 36817 - protein, 7 aa, synthetic construct
RGDKAFD

SEQ ID NO: 36818 - protein, 7 aa, synthetic construct
RGDKDDG

SEQ ID NO: 36819 - protein, 7 aa, synthetic construct
RGDKEFD

SEQ ID NO: 36820 - protein, 7 aa, synthetic construct
RGDKENA

SEQ ID NO: 36821 - protein, 7 aa, synthetic construct
RGDKFVG

SEQ ID NO: 36822 - protein, 7 aa, synthetic construct
RGDAQTN

SEQ ID NO: 36823 - protein, 7 aa, synthetic construct
RGDAQVF

SEQ ID NO: 36824 - protein, 7 aa, synthetic construct
RGDKIGA

SEQ ID NO: 36825 - protein, 7 aa, synthetic construct
RGDKNIA

SEQ ID NO: 36826 - protein, 7 aa, synthetic construct
RGDKNQD

SEQ ID NO: 36827 - protein, 7 aa, synthetic construct
RGDKQVH

SEQ ID NO: 36828 - protein, 7 aa, synthetic construct
RGDKSFA

SEQ ID NO: 36829 - protein, 7 aa, synthetic construct
RGDKSVA

SEQ ID NO: 36830 - protein, 7 aa, synthetic construct
RGDKTGA

SEQ ID NO: 36831 - protein, 7 aa, synthetic construct
RGDLAAV

SEQ ID NO: 36832 - protein, 7 aa, synthetic construct
RGDLAIN

SEQ ID NO: 36833 - protein, 7 aa, synthetic construct
RGDLANL

SEQ ID NO: 36834 - protein, 7 aa, synthetic construct
RGDLDRG

SEQ ID NO: 36835 - protein, 7 aa, synthetic construct
RGDLETF

SEQ ID NO: 36836 - protein, 7 aa, synthetic construct
RGDLGDD

SEQ ID NO: 36837 - protein, 7 aa, synthetic construct
RGDLGGI

SEQ ID NO: 36838 - protein, 7 aa, synthetic construct
RGDLIAA

SEQ ID NO: 36839 - protein, 7 aa, synthetic construct
RGDLLRG

SEQ ID NO: 36840 - protein, 7 aa, synthetic construct
RGDLNDE

SEQ ID NO: 36841 - protein, 7 aa, synthetic construct
RGDLNHI

SEQ ID NO: 36842 - protein, 7 aa, synthetic construct
RGDLQAF

SEQ ID NO: 36843 - protein, 7 aa, synthetic construct
RGDLQEQ

SEQ ID NO: 36844 - protein, 7 aa, synthetic construct
RGDLRID

SEQ ID NO: 36845 - protein, 7 aa, synthetic construct
RGDLRTL

SEQ ID NO: 36846 - protein, 7 aa, synthetic construct
RGDLSDI

SEQ ID NO: 36847 - protein, 7 aa, synthetic construct
RGDLTLE

SEQ ID NO: 36848 - protein, 7 aa, synthetic construct
RGDLVEA

SEQ ID NO: 36849 - protein, 7 aa, synthetic construct
RGDNADG

SEQ ID NO: 36850 - protein, 7 aa, synthetic construct
RGDNDVG

SEQ ID NO: 36851 - protein, 7 aa, synthetic construct
RGDNEDK

SEQ ID NO: 36852 - protein, 7 aa, synthetic construct
RGDNFGH

SEQ ID NO: 36853 - protein, 7 aa, synthetic construct
RGDATTE

SEQ ID NO: 36854 - protein, 7 aa, synthetic construct
RGDNGDI

SEQ ID NO: 36855 - protein, 7 aa, synthetic construct
RGDNHEN

SEQ ID NO: 36856 - protein, 7 aa, synthetic construct
RGDNIAL

SEQ ID NO: 36857 - protein, 7 aa, synthetic construct
RGDNIKG

SEQ ID NO: 36858 - protein, 7 aa, synthetic construct
RGDNISG

SEQ ID NO: 36859 - protein, 7 aa, synthetic construct
RGDNIVA

SEQ ID NO: 36860 - protein, 7 aa, synthetic construct
RGDNLQE

SEQ ID NO: 36861 - protein, 7 aa, synthetic construct
RGDNLTI

SEQ ID NO: 36862 - protein, 7 aa, synthetic construct
RGDNNLI

SEQ ID NO: 36863 - protein, 7 aa, synthetic construct
RGDNQFD

SEQ ID NO: 36864 - protein, 7 aa, synthetic construct
RGDNQVR

SEQ ID NO: 36865 - protein, 7 aa, synthetic construct
RGDNRIE

SEQ ID NO: 36866 - protein, 7 aa, synthetic construct
RGDNSHD

SEQ ID NO: 36867 - protein, 7 aa, synthetic construct
RGDNTVS

SEQ ID NO: 36868 - protein, 7 aa, synthetic construct
RGDNVDG

SEQ ID NO: 36869 - protein, 7 aa, synthetic construct
RGDQDEQ

SEQ ID NO: 36870 - protein, 7 aa, synthetic construct
RGDQLEL

SEQ ID NO: 36871 - protein, 7 aa, synthetic construct
RGDQLEQ

SEQ ID NO: 36872 - protein, 7 aa, synthetic construct
RGDQLTK

SEQ ID NO: 36873 - protein, 7 aa, synthetic construct
RGDQQDG

SEQ ID NO: 36874 - protein, 7 aa, synthetic construct
RGDDDAD

SEQ ID NO: 36875 - protein, 7 aa, synthetic construct
RGDDDGG

SEQ ID NO: 36876 - protein, 7 aa, synthetic construct
RGDQTEK

SEQ ID NO: 36877 - protein, 7 aa, synthetic construct
RGDQTHE

SEQ ID NO: 36878 - protein, 7 aa, synthetic construct
RGDDDHL

SEQ ID NO: 36879 - protein, 7 aa, synthetic construct
RGDRFND

SEQ ID NO: 36880 - protein, 7 aa, synthetic construct
RGDDEVS

SEQ ID NO: 36881 - protein, 7 aa, synthetic construct
RGDSADA

SEQ ID NO: 36882 - protein, 7 aa, synthetic construct
RGDSAVT

SEQ ID NO: 36883 - protein, 7 aa, synthetic construct
RGDSDAF

SEQ ID NO: 36884 - protein, 7 aa, synthetic construct
RGDSDDQ

SEQ ID NO: 36885 - protein, 7 aa, synthetic construct
RGDDFED

SEQ ID NO: 36886 - protein, 7 aa, synthetic construct
RGDSDLR

SEQ ID NO: 36887 - protein, 7 aa, synthetic construct
RGDSFAD

SEQ ID NO: 36888 - protein, 7 aa, synthetic construct
RGDSFLE

SEQ ID NO: 36889 - protein, 7 aa, synthetic construct
RGDDFHR

SEQ ID NO: 36890 - protein, 7 aa, synthetic construct
RGDSIFG

SEQ ID NO: 36891 - protein, 7 aa, synthetic construct
RGDSILD

SEQ ID NO: 36892 - protein, 7 aa, synthetic construct
RGDSLDH

SEQ ID NO: 36893 - protein, 7 aa, synthetic construct
RGDSQQN

SEQ ID NO: 36894 - protein, 7 aa, synthetic construct
RGDSQRS

SEQ ID NO: 36895 - protein, 7 aa, synthetic construct
RGDSQSE

SEQ ID NO: 36896 - protein, 7 aa, synthetic construct
RGDSSDF

SEQ ID NO: 36897 - protein, 7 aa, synthetic construct
RGDSTVG

SEQ ID NO: 36898 - protein, 7 aa, synthetic construct
RGDTAEI

SEQ ID NO: 36899 - protein, 7 aa, synthetic construct
RGDTAEQ

SEQ ID NO: 36900 - protein, 7 aa, synthetic construct
RGDTDEI

SEQ ID NO: 36901 - protein, 7 aa, synthetic construct
RGDTDIH

SEQ ID NO: 36902 - protein, 7 aa, synthetic construct
RGDTDST

SEQ ID NO: 36903 - protein, 7 aa, synthetic construct
RGDTDTF

SEQ ID NO: 36904 - protein, 7 aa, synthetic construct
RGDTELF

SEQ ID NO: 36905 - protein, 7 aa, synthetic construct
RGDTGAG

SEQ ID NO: 36906 - protein, 7 aa, synthetic construct
RGDTGAT

SEQ ID NO: 36907 - protein, 7 aa, synthetic construct
RGDTGKS

SEQ ID NO: 36908 - protein, 7 aa, synthetic construct
RGDDHAH

SEQ ID NO: 36909 - protein, 7 aa, synthetic construct
RGDTHVG

SEQ ID NO: 36910 - protein, 7 aa, synthetic construct
RGDTNFG

SEQ ID NO: 36911 - protein, 7 aa, synthetic construct
RGDTNHV

SEQ ID NO: 36912 - protein, 7 aa, synthetic construct
RGDTQQV

SEQ ID NO: 36913 - protein, 7 aa, synthetic construct
RGDTQRD

SEQ ID NO: 36914 - protein, 7 aa, synthetic construct
RGDTSLL

SEQ ID NO: 36915 - protein, 7 aa, synthetic construct
RGDTTAS

SEQ ID NO: 36916 - protein, 7 aa, synthetic construct
RGDTTHG

SEQ ID NO: 36917 - protein, 7 aa, synthetic construct
RGDTTKN

SEQ ID NO: 36918 - protein, 7 aa, synthetic construct
RGDTVVA

SEQ ID NO: 36919 - protein, 7 aa, synthetic construct
RGDVDKQ

SEQ ID NO: 36920 - protein, 7 aa, synthetic construct
RGDVDQF

SEQ ID NO: 36921 - protein, 7 aa, synthetic construct
RGDVDQT

SEQ ID NO: 36922 - protein, 7 aa, synthetic construct
RGDVEAS

SEQ ID NO: 36923 - protein, 7 aa, synthetic construct
RGDVEGV

SEQ ID NO: 36924 - protein, 7 aa, synthetic construct
RGDVEHS

SEQ ID NO: 36925 - protein, 7 aa, synthetic construct
RGDVEID

SEQ ID NO: 36926 - protein, 7 aa, synthetic construct
RGDVGEA

SEQ ID NO: 36927 - protein, 7 aa, synthetic construct
RGDVGHF

SEQ ID NO: 36928 - protein, 7 aa, synthetic construct
RGDVGRD

SEQ ID NO: 36929 - protein, 7 aa, synthetic construct
RGDVHLE

SEQ ID NO: 36930 - protein, 7 aa, synthetic construct
RGDVHQD

SEQ ID NO: 36931 - protein, 7 aa, synthetic construct
RGDVIET

SEQ ID NO: 36932 - protein, 7 aa, synthetic construct
RGDVNDQ

SEQ ID NO: 36933 - protein, 7 aa, synthetic construct
RGDVQDD

SEQ ID NO: 36934 - protein, 7 aa, synthetic construct
RGDDKFE

SEQ ID NO: 36935 - protein, 7 aa, synthetic construct
RGDVTAS

SEQ ID NO: 36936 - protein, 7 aa, synthetic construct
RGDVTIE

SEQ ID NO: 36937 - protein, 7 aa, synthetic construct
RGDVTQH

SEQ ID NO: 36938 - protein, 7 aa, synthetic construct
RGDVVEA

SEQ ID NO: 36939 - protein, 7 aa, synthetic construct
RGDDKVE

SEQ ID NO: 36940 - protein, 7 aa, synthetic construct
RGDDLEN

SEQ ID NO: 36941 - protein, 7 aa, synthetic construct
RGDDNID

SEQ ID NO: 36942 - protein, 7 aa, synthetic construct
RGDDNQT

SEQ ID NO: 36943 - protein, 7 aa, synthetic construct
RGDAELG

SEQ ID NO: 36944 - protein, 7 aa, synthetic construct
RGDDQSI

SEQ ID NO: 36945 - protein, 7 aa, synthetic construct
RGDDSAF

SEQ ID NO: 36946 - protein, 7 aa, synthetic construct
RGDDSEH

SEQ ID NO: 36947 - protein, 7 aa, synthetic construct
RGDDSEL

SEQ ID NO: 36948 - protein, 7 aa, synthetic construct
RGDDSLQ

SEQ ID NO: 36949 - protein, 7 aa, synthetic construct
RGDDSVN

SEQ ID NO: 36950 - protein, 7 aa, synthetic construct
RGDDTFV

SEQ ID NO: 36951 - protein, 7 aa, synthetic construct
RGDDTNL

SEQ ID NO: 36952 - protein, 7 aa, synthetic construct
RGDDTTF

SEQ ID NO: 36953 - protein, 7 aa, synthetic construct
RGDDVIT

SEQ ID NO: 36954 - protein, 7 aa, synthetic construct
RGDEDFV

SEQ ID NO: 36955 - protein, 7 aa, synthetic construct
RGDEDKK

SEQ ID NO: 36956 - protein, 7 aa, synthetic construct
RGDEDKV

SEQ ID NO: 36957 - protein, 7 aa, synthetic construct
RGDEDQF

SEQ ID NO: 36958 - protein, 7 aa, synthetic construct
RGDEERT

SEQ ID NO: 36959 - protein, 7 aa, synthetic construct
RGDEGAG

SEQ ID NO: 36960 - protein, 7 aa, synthetic construct
RGDEGTH

SEQ ID NO: 36961 - protein, 7 aa, synthetic construct
RGDEHAF

SEQ ID NO: 36962 - protein, 7 aa, synthetic construct
RGDEHNE

SEQ ID NO: 36963 - protein, 7 aa, synthetic construct
RGDEKAD

SEQ ID NO: 36964 - protein, 7 aa, synthetic construct
RGDEKDG

SEQ ID NO: 36965 - protein, 7 aa, synthetic construct
RGDEKHF

SEQ ID NO: 36966 - protein, 7 aa, synthetic construct
RGDELDH

SEQ ID NO: 36967 - protein, 7 aa, synthetic construct
RGDELNN

SEQ ID NO: 36968 - protein, 7 aa, synthetic construct
RGDELRA

SEQ ID NO: 36969 - protein, 7 aa, synthetic construct
RGDELSD

SEQ ID NO: 36970 - protein, 7 aa, synthetic construct
RGDAFVN

SEQ ID NO: 36971 - protein, 7 aa, synthetic construct
RGDEQET

SEQ ID NO: 36972 - protein, 7 aa, synthetic construct
RGDERVV

SEQ ID NO: 36973 - protein, 7 aa, synthetic construct
RGDESDT

SEQ ID NO: 36974 - protein, 7 aa, synthetic construct
RGDESEN

SEQ ID NO: 36975 - protein, 7 aa, synthetic construct
RGDESIS

SEQ ID NO: 36976 - protein, 7 aa, synthetic construct
RGDESLG

SEQ ID NO: 36977 - protein, 7 aa, synthetic construct
RGDESQG

SEQ ID NO: 36978 - protein, 7 aa, synthetic construct
RGDAGHA

SEQ ID NO: 36979 - protein, 7 aa, synthetic construct
RGDEVNI

SEQ ID NO: 36980 - protein, 7 aa, synthetic construct
RGDFAIH

SEQ ID NO: 36981 - protein, 7 aa, synthetic construct
RGDFALI

SEQ ID NO: 36982 - protein, 7 aa, synthetic construct
RGDFDFG

SEQ ID NO: 36983 - protein, 7 aa, synthetic construct
RGDAGQD

SEQ ID NO: 36984 - protein, 7 aa, synthetic construct
RGDFELE

SEQ ID NO: 36985 - protein, 7 aa, synthetic construct
RGDAHEH

SEQ ID NO: 36986 - protein, 7 aa, synthetic construct
RGDFQFA

SEQ ID NO: 36987 - protein, 7 aa, synthetic construct
RGDFQLL

SEQ ID NO: 36988 - protein, 7 aa, synthetic construct
RGDFTEQ

SEQ ID NO: 36989 - protein, 7 aa, synthetic construct
RGDFVSL

SEQ ID NO: 36990 - protein, 7 aa, synthetic construct
RGDGDIE

SEQ ID NO: 36991 - protein, 7 aa, synthetic construct
RGDGDTV

SEQ ID NO: 36992 - protein, 7 aa, synthetic construct
RGDGDVT

SEQ ID NO: 36993 - protein, 7 aa, synthetic construct
RGDGERE

SEQ ID NO: 36994 - protein, 7 aa, synthetic construct
RGDGGID

SEQ ID NO: 36995 - protein, 7 aa, synthetic construct
RGDAIIV

SEQ ID NO: 36996 - protein, 7 aa, synthetic construct
RGDAIKA

SEQ ID NO: 36997 - protein, 7 aa, synthetic construct
RGDGILR

SEQ ID NO: 36998 - protein, 7 aa, synthetic construct
RGDGKQE

SEQ ID NO: 36999 - protein, 7 aa, synthetic construct
RGDGLIN

SEQ ID NO: 37000 - protein, 7 aa, synthetic construct
RGDGLVN

SEQ ID NO: 37001 - protein, 7 aa, synthetic construct
RGDGTDE

SEQ ID NO: 37002 - protein, 7 aa, synthetic construct
RGDGVDS

SEQ ID NO: 37003 - protein, 7 aa, synthetic construct
RGDHANV

SEQ ID NO: 37004 - protein, 7 aa, synthetic construct
RGDHFAT

SEQ ID NO: 37005 - protein, 7 aa, synthetic construct
RGDHFFQ

SEQ ID NO: 37006 - protein, 7 aa, synthetic construct
RGDHFHH

SEQ ID NO: 37007 - protein, 7 aa, synthetic construct
RGDHFLV

SEQ ID NO: 37008 - protein, 7 aa, synthetic construct
RGDHFQQ

SEQ ID NO: 37009 - protein, 7 aa, synthetic construct
RGDHFSE

SEQ ID NO: 37010 - protein, 7 aa, synthetic construct
RGDHHVE

SEQ ID NO: 37011 - protein, 7 aa, synthetic construct
RGDHIIR

SEQ ID NO: 37012 - protein, 7 aa, synthetic construct
RGDHISA

SEQ ID NO: 37013 - protein, 7 aa, synthetic construct
RGDHKEG

SEQ ID NO: 37014 - protein, 7 aa, synthetic construct
RGDHQDV

SEQ ID NO: 37015 - protein, 7 aa, synthetic construct
RGDHQND

SEQ ID NO: 37016 - protein, 7 aa, synthetic construct
RGDHREE

SEQ ID NO: 37017 - protein, 7 aa, synthetic construct
RGDHRVD

SEQ ID NO: 37018 - protein, 7 aa, synthetic construct
RGDHSDD

SEQ ID NO: 37019 - protein, 7 aa, synthetic construct
RGDHTIL

SEQ ID NO: 37020 - protein, 7 aa, synthetic construct
RGDHVEE

SEQ ID NO: 37021 - protein, 7 aa, synthetic construct
RGDIDAT

SEQ ID NO: 37022 - protein, 7 aa, synthetic construct
RGDIDFS

SEQ ID NO: 37023 - protein, 7 aa, synthetic construct
RGDIDHL

SEQ ID NO: 37024 - protein, 7 aa, synthetic construct
RGDIDRL

SEQ ID NO: 37025 - protein, 7 aa, synthetic construct
RGDIELD

SEQ ID NO: 37026 - protein, 7 aa, synthetic construct
RGDANGE

SEQ ID NO: 37027 - protein, 7 aa, synthetic construct
RGDIFEF

SEQ ID NO: 37028 - protein, 7 aa, synthetic construct
RGDIFLQ

SEQ ID NO: 37029 - protein, 7 aa, synthetic construct
RGDIHAA

SEQ ID NO: 37030 - protein, 7 aa, synthetic construct
RGDIIIT

SEQ ID NO: 37031 - protein, 7 aa, synthetic construct
RGDINDK

SEQ ID NO: 37032 - protein, 7 aa, synthetic construct
RGDINQK

SEQ ID NO: 37033 - protein, 7 aa, synthetic construct
RGDINVD

SEQ ID NO: 37034 - protein, 7 aa, synthetic construct
RGDIQLD

SEQ ID NO: 37035 - protein, 7 aa, synthetic construct
RGDITII

SEQ ID NO: 37036 - protein, 7 aa, synthetic construct
RGDIVQN

SEQ ID NO: 37037 - protein, 7 aa, synthetic construct
RGDIVVS

SEQ ID NO: 37038 - protein, 7 aa, synthetic construct
RGDKDHR

SEQ ID NO: 37039 - protein, 7 aa, synthetic construct
RGDKDKG

SEQ ID NO: 37040 - protein, 7 aa, synthetic construct
RGDAQSA

SEQ ID NO: 37041 - protein, 7 aa, synthetic construct
RGDKIEK

SEQ ID NO: 37042 - protein, 7 aa, synthetic construct
RGDKTAL

SEQ ID NO: 37043 - protein, 7 aa, synthetic construct
RGDKVNQ

SEQ ID NO: 37044 - protein, 7 aa, synthetic construct
RGDKVVA

SEQ ID NO: 37045 - protein, 7 aa, synthetic construct
RGDLASH

SEQ ID NO: 37046 - protein, 7 aa, synthetic construct
RGDLDLA

SEQ ID NO: 37047 - protein, 7 aa, synthetic construct
RGDLEHL

SEQ ID NO: 37048 - protein, 7 aa, synthetic construct
RGDLETE

SEQ ID NO: 37049 - protein, 7 aa, synthetic construct
RGDLFLG

SEQ ID NO: 37050 - protein, 7 aa, synthetic construct
RGDLFRG

SEQ ID NO: 37051 - protein, 7 aa, synthetic construct
RGDLHLE

SEQ ID NO: 37052 - protein, 7 aa, synthetic construct
RGDLHTH

SEQ ID NO: 37053 - protein, 7 aa, synthetic construct
RGDLILH

SEQ ID NO: 37054 - protein, 7 aa, synthetic construct
RGDASQD

SEQ ID NO: 37055 - protein, 7 aa, synthetic construct
RGDLKTE

SEQ ID NO: 37056 - protein, 7 aa, synthetic construct
RGDLLLA

SEQ ID NO: 37057 - protein, 7 aa, synthetic construct
RGDLLQG

SEQ ID NO: 37058 - protein, 7 aa, synthetic construct
RGDLQVK

SEQ ID NO: 37059 - protein, 7 aa, synthetic construct
RGDLSFL

SEQ ID NO: 37060 - protein, 7 aa, synthetic construct
RGDLTQG

SEQ ID NO: 37061 - protein, 7 aa, synthetic construct
RGDLVLA

SEQ ID NO: 37062 - protein, 7 aa, synthetic construct
RGDATLQ

SEQ ID NO: 37063 - protein, 7 aa, synthetic construct
RGDNDHG

SEQ ID NO: 37064 - protein, 7 aa, synthetic construct
RGDNDLH

SEQ ID NO: 37065 - protein, 7 aa, synthetic construct
RGDATQK

SEQ ID NO: 37066 - protein, 7 aa, synthetic construct
RGDNFAS

SEQ ID NO: 37067 - protein, 7 aa, synthetic construct
RGDNGDK

SEQ ID NO: 37068 - protein, 7 aa, synthetic construct
RGDATVF

SEQ ID NO: 37069 - protein, 7 aa, synthetic construct
RGDAVDH

SEQ ID NO: 37070 - protein, 7 aa, synthetic construct
RGDNILQ

SEQ ID NO: 37071 - protein, 7 aa, synthetic construct
RGDNILT

SEQ ID NO: 37072 - protein, 7 aa, synthetic construct
RGDNLII

SEQ ID NO: 37073 - protein, 7 aa, synthetic construct
RGDNNGE

SEQ ID NO: 37074 - protein, 7 aa, synthetic construct
RGDNNNT

SEQ ID NO: 37075 - protein, 7 aa, synthetic construct
RGDNQDL

SEQ ID NO: 37076 - protein, 7 aa, synthetic construct
RGDNRSE

SEQ ID NO: 37077 - protein, 7 aa, synthetic construct
RGDNSKS

SEQ ID NO: 37078 - protein, 7 aa, synthetic construct
RGDNTLE

SEQ ID NO: 37079 - protein, 7 aa, synthetic construct
RGDNTVQ

SEQ ID NO: 37080 - protein, 7 aa, synthetic construct
RGDAVVA

SEQ ID NO: 37081 - protein, 7 aa, synthetic construct
RGDQAFE

SEQ ID NO: 37082 - protein, 7 aa, synthetic construct
RGDDAAH

SEQ ID NO: 37083 - protein, 7 aa, synthetic construct
RGDQDAR

SEQ ID NO: 37084 - protein, 7 aa, synthetic construct
RGDQDII

SEQ ID NO: 37085 - protein, 7 aa, synthetic construct
RGDDAEN

SEQ ID NO: 37086 - protein, 7 aa, synthetic construct
RGDQEDS

SEQ ID NO: 37087 - protein, 7 aa, synthetic construct
RGDQEHV

SEQ ID NO: 37088 - protein, 7 aa, synthetic construct
RGDQELT

SEQ ID NO: 37089 - protein, 7 aa, synthetic construct
RGDQENI

SEQ ID NO: 37090 - protein, 7 aa, synthetic construct
RGDQFLK

SEQ ID NO: 37091 - protein, 7 aa, synthetic construct
RGDQGEF

SEQ ID NO: 37092 - protein, 7 aa, synthetic construct
RGDQHIL

SEQ ID NO: 37093 - protein, 7 aa, synthetic construct
RGDQILS

SEQ ID NO: 37094 - protein, 7 aa, synthetic construct
RGDQLDG

SEQ ID NO: 37095 - protein, 7 aa, synthetic construct
RGDDAST

SEQ ID NO: 37096 - protein, 7 aa, synthetic construct
RGDQNEG

SEQ ID NO: 37097 - protein, 7 aa, synthetic construct
RGDQQGS

SEQ ID NO: 37098 - protein, 7 aa, synthetic construct
RGDQSIF

SEQ ID NO: 37099 - protein, 7 aa, synthetic construct
RGDDDGV

SEQ ID NO: 37100 - protein, 7 aa, synthetic construct
RGDQTND

SEQ ID NO: 37101 - protein, 7 aa, synthetic construct
RGDQVDG

SEQ ID NO: 37102 - protein, 7 aa, synthetic construct
RGDRDIN

SEQ ID NO: 37103 - protein, 7 aa, synthetic construct
RGDRFSA

SEQ ID NO: 37104 - protein, 7 aa, synthetic construct
RGDRHQG

SEQ ID NO: 37105 - protein, 7 aa, synthetic construct
RGDDEFS

SEQ ID NO: 37106 - protein, 7 aa, synthetic construct
RGDDEGS

SEQ ID NO: 37107 - protein, 7 aa, synthetic construct
RGDDEHG

SEQ ID NO: 37108 - protein, 7 aa, synthetic construct
RGDRLVG

SEQ ID NO: 37109 - protein, 7 aa, synthetic construct
RGDRTDE

SEQ ID NO: 37110 - protein, 7 aa, synthetic construct
RGDSAIF

SEQ ID NO: 37111 - protein, 7 aa, synthetic construct
RGDDFFA

SEQ ID NO: 37112 - protein, 7 aa, synthetic construct
RGDSELF

SEQ ID NO: 37113 - protein, 7 aa, synthetic construct
RGDSFAT

SEQ ID NO: 37114 - protein, 7 aa, synthetic construct
RGDSFHF

SEQ ID NO: 37115 - protein, 7 aa, synthetic construct
RGDSFHN

SEQ ID NO: 37116 - protein, 7 aa, synthetic construct
RGDSFIE

SEQ ID NO: 37117 - protein, 7 aa, synthetic construct
RGDSFNE

SEQ ID NO: 37118 - protein, 7 aa, synthetic construct
RGDSFVE

SEQ ID NO: 37119 - protein, 7 aa, synthetic construct
RGDSHSD

SEQ ID NO: 37120 - protein, 7 aa, synthetic construct
RGDSKAG

SEQ ID NO: 37121 - protein, 7 aa, synthetic construct
RGDADTD

SEQ ID NO: 37122 - protein, 7 aa, synthetic construct
RGDSLAD

SEQ ID NO: 37123 - protein, 7 aa, synthetic construct
RGDSQET

SEQ ID NO: 37124 - protein, 7 aa, synthetic construct
RGDSQFD

SEQ ID NO: 37125 - protein, 7 aa, synthetic construct
RGDSQSA

SEQ ID NO: 37126 - protein, 7 aa, synthetic construct
RGDSTDL

SEQ ID NO: 37127 - protein, 7 aa, synthetic construct
RGDSVIQ

SEQ ID NO: 37128 - protein, 7 aa, synthetic construct
RGDSVKG

SEQ ID NO: 37129 - protein, 7 aa, synthetic construct
RGDTAHH

SEQ ID NO: 37130 - protein, 7 aa, synthetic construct
RGDTDDV

SEQ ID NO: 37131 - protein, 7 aa, synthetic construct
RGDTDHG

SEQ ID NO: 37132 - protein, 7 aa, synthetic construct
RGDTDKG

SEQ ID NO: 37133 - protein, 7 aa, synthetic construct
RGDTEAS

SEQ ID NO: 37134 - protein, 7 aa, synthetic construct
RGDTEEL

SEQ ID NO: 37135 - protein, 7 aa, synthetic construct
RGDTFSF

SEQ ID NO: 37136 - protein, 7 aa, synthetic construct
RGDTFVQ

SEQ ID NO: 37137 - protein, 7 aa, synthetic construct
RGDTGDH

SEQ ID NO: 37138 - protein, 7 aa, synthetic construct
RGDTGIF

SEQ ID NO: 37139 - protein, 7 aa, synthetic construct
RGDTKAD

SEQ ID NO: 37140 - protein, 7 aa, synthetic construct
RGDTNDA

SEQ ID NO: 37141 - protein, 7 aa, synthetic construct
RGDTQLK

SEQ ID NO: 37142 - protein, 7 aa, synthetic construct
RGDTSDF

SEQ ID NO: 37143 - protein, 7 aa, synthetic construct
RGDTTAV

SEQ ID NO: 37144 - protein, 7 aa, synthetic construct
RGDTTIK

SEQ ID NO: 37145 - protein, 7 aa, synthetic construct
RGDTVAE

SEQ ID NO: 37146 - protein, 7 aa, synthetic construct
RGDTVDK

SEQ ID NO: 37147 - protein, 7 aa, synthetic construct
RGDTVKE

SEQ ID NO: 37148 - protein, 7 aa, synthetic construct
RGDVANA

SEQ ID NO: 37149 - protein, 7 aa, synthetic construct
RGDVANL

SEQ ID NO: 37150 - protein, 7 aa, synthetic construct
RGDVDEQ

SEQ ID NO: 37151 - protein, 7 aa, synthetic construct
RGDVDES

SEQ ID NO: 37152 - protein, 7 aa, synthetic construct
RGDVEDV

SEQ ID NO: 37153 - protein, 7 aa, synthetic construct
RGDVFGT

SEQ ID NO: 37154 - protein, 7 aa, synthetic construct
RGDVFIA

SEQ ID NO: 37155 - protein, 7 aa, synthetic construct
RGDVGND

SEQ ID NO: 37156 - protein, 7 aa, synthetic construct
RGDVGQF

SEQ ID NO: 37157 - protein, 7 aa, synthetic construct
RGDVHQA

SEQ ID NO: 37158 - protein, 7 aa, synthetic construct
RGDVIQE

SEQ ID NO: 37159 - protein, 7 aa, synthetic construct
RGDVISA

SEQ ID NO: 37160 - protein, 7 aa, synthetic construct
RGDVKEA

SEQ ID NO: 37161 - protein, 7 aa, synthetic construct
RGDDIRE

SEQ ID NO: 37162 - protein, 7 aa, synthetic construct
RGDVNAN

SEQ ID NO: 37163 - protein, 7 aa, synthetic construct
RGDVNQI

SEQ ID NO: 37164 - protein, 7 aa, synthetic construct
RGDVNVV

SEQ ID NO: 37165 - protein, 7 aa, synthetic construct
RGDVSDG

SEQ ID NO: 37166 - protein, 7 aa, synthetic construct
RGDVTEL

SEQ ID NO: 37167 - protein, 7 aa, synthetic construct
RGDVVEE

SEQ ID NO: 37168 - protein, 7 aa, synthetic construct
RGDVVEG

SEQ ID NO: 37169 - protein, 7 aa, synthetic construct
RGDVVRA

SEQ ID NO: 37170 - protein, 7 aa, synthetic construct
RGDDKQQ

SEQ ID NO: 37171 - protein, 7 aa, synthetic construct
RGDDLEF

SEQ ID NO: 37172 - protein, 7 aa, synthetic construct
RGDDLIG

SEQ ID NO: 37173 - protein, 7 aa, synthetic construct
RGDDLTA

SEQ ID NO: 37174 - protein, 7 aa, synthetic construct
RGDDNAD

SEQ ID NO: 37175 - protein, 7 aa, synthetic construct
RGDDNER

SEQ ID NO: 37176 - protein, 7 aa, synthetic construct
RGDDNNS

SEQ ID NO: 37177 - protein, 7 aa, synthetic construct
RGDDNQS

SEQ ID NO: 37178 - protein, 7 aa, synthetic construct
RGDDQKH

SEQ ID NO: 37179 - protein, 7 aa, synthetic construct
RGDDREF

SEQ ID NO: 37180 - protein, 7 aa, synthetic construct
RGDDRKI

SEQ ID NO: 37181 - protein, 7 aa, synthetic construct
RGDEAFF

SEQ ID NO: 37182 - protein, 7 aa, synthetic construct
RGDEAGK

SEQ ID NO: 37183 - protein, 7 aa, synthetic construct
RGDEAIG

SEQ ID NO: 37184 - protein, 7 aa, synthetic construct
RGDEAQN

SEQ ID NO: 37185 - protein, 7 aa, synthetic construct
RGDEDSG

SEQ ID NO: 37186 - protein, 7 aa, synthetic construct
RGDEEAD

SEQ ID NO: 37187 - protein, 7 aa, synthetic construct
RGDEEIE

SEQ ID NO: 37188 - protein, 7 aa, synthetic construct
RGDEESA

SEQ ID NO: 37189 - protein, 7 aa, synthetic construct
RGDEFFD

SEQ ID NO: 37190 - protein, 7 aa, synthetic construct
RGDAFGT

SEQ ID NO: 37191 - protein, 7 aa, synthetic construct
RGDEFLE

SEQ ID NO: 37192 - protein, 7 aa, synthetic construct
RGDEFNA

SEQ ID NO: 37193 - protein, 7 aa, synthetic construct
RGDEFTT

SEQ ID NO: 37194 - protein, 7 aa, synthetic construct
RGDEHDN

SEQ ID NO: 37195 - protein, 7 aa, synthetic construct
RGDEHLQ

SEQ ID NO: 37196 - protein, 7 aa, synthetic construct
RGDEIND

SEQ ID NO: 37197 - protein, 7 aa, synthetic construct
RGDEIQE

SEQ ID NO: 37198 - protein, 7 aa, synthetic construct
RGDEKED

SEQ ID NO: 37199 - protein, 7 aa, synthetic construct
RGDEKGT

SEQ ID NO: 37200 - protein, 7 aa, synthetic construct
RGDEKQV

SEQ ID NO: 37201 - protein, 7 aa, synthetic construct
RGDELEA

SEQ ID NO: 37202 - protein, 7 aa, synthetic construct
RGDENAG

SEQ ID NO: 37203 - protein, 7 aa, synthetic construct
RGDEQTH

SEQ ID NO: 37204 - protein, 7 aa, synthetic construct
RGDERIN

SEQ ID NO: 37205 - protein, 7 aa, synthetic construct
RGDETEL

SEQ ID NO: 37206 - protein, 7 aa, synthetic construct
RGDFEDV

SEQ ID NO: 37207 - protein, 7 aa, synthetic construct
RGDFEIA

SEQ ID NO: 37208 - protein, 7 aa, synthetic construct
RGDAGRG

SEQ ID NO: 37209 - protein, 7 aa, synthetic construct
RGDFFEG

SEQ ID NO: 37210 - protein, 7 aa, synthetic construct
RGDFHKA

SEQ ID NO: 37211 - protein, 7 aa, synthetic construct
RGDFISE

SEQ ID NO: 37212 - protein, 7 aa, synthetic construct
RGDAHFN

SEQ ID NO: 37213 - protein, 7 aa, synthetic construct
RGDFNFA

SEQ ID NO: 37214 - protein, 7 aa, synthetic construct
RGDFRIE

SEQ ID NO: 37215 - protein, 7 aa, synthetic construct
RGDFRLN

SEQ ID NO: 37216 - protein, 7 aa, synthetic construct
RGDFTLA

SEQ ID NO: 37217 - protein, 7 aa, synthetic construct
RGDFVDF

SEQ ID NO: 37218 - protein, 7 aa, synthetic construct
RGDGAQE

SEQ ID NO: 37219 - protein, 7 aa, synthetic construct
RGDGDQR

SEQ ID NO: 37220 - protein, 7 aa, synthetic construct
RGDGEGQ

SEQ ID NO: 37221 - protein, 7 aa, synthetic construct
RGDAIFK

SEQ ID NO: 37222 - protein, 7 aa, synthetic construct
RGDGGRE

SEQ ID NO: 37223 - protein, 7 aa, synthetic construct
RGDGHDI

SEQ ID NO: 37224 - protein, 7 aa, synthetic construct
RGDGHIS

SEQ ID NO: 37225 - protein, 7 aa, synthetic construct
RGDGHLI

SEQ ID NO: 37226 - protein, 7 aa, synthetic construct
RGDGIEF

SEQ ID NO: 37227 - protein, 7 aa, synthetic construct
RGDGILT

SEQ ID NO: 37228 - protein, 7 aa, synthetic construct
RGDGKVG

SEQ ID NO: 37229 - protein, 7 aa, synthetic construct
RGDGNSS

SEQ ID NO: 37230 - protein, 7 aa, synthetic construct
RGDGQDH

SEQ ID NO: 37231 - protein, 7 aa, synthetic construct
RGDGQQT

SEQ ID NO: 37232 - protein, 7 aa, synthetic construct
RGDGTEF

SEQ ID NO: 37233 - protein, 7 aa, synthetic construct
RGDGVFA

SEQ ID NO: 37234 - protein, 7 aa, synthetic construct
RGDGVSA

SEQ ID NO: 37235 - protein, 7 aa, synthetic construct
RGDHADF

SEQ ID NO: 37236 - protein, 7 aa, synthetic construct
RGDHAHG

SEQ ID NO: 37237 - protein, 7 aa, synthetic construct
RGDHDHG

SEQ ID NO: 37238 - protein, 7 aa, synthetic construct
RGDHFDI

SEQ ID NO: 37239 - protein, 7 aa, synthetic construct
RGDHFVR

SEQ ID NO: 37240 - protein, 7 aa, synthetic construct
RGDHIGD

SEQ ID NO: 37241 - protein, 7 aa, synthetic construct
RGDHLFG

SEQ ID NO: 37242 - protein, 7 aa, synthetic construct
RGDHLHD

SEQ ID NO: 37243 - protein, 7 aa, synthetic construct
RGDHNND

SEQ ID NO: 37244 - protein, 7 aa, synthetic construct
RGDHNTH

SEQ ID NO: 37245 - protein, 7 aa, synthetic construct
RGDHTDD

SEQ ID NO: 37246 - protein, 7 aa, synthetic construct
RGDHVFD

SEQ ID NO: 37247 - protein, 7 aa, synthetic construct
RGDIDLE

SEQ ID NO: 37248 - protein, 7 aa, synthetic construct
RGDANEG

SEQ ID NO: 37249 - protein, 7 aa, synthetic construct
RGDIDSF

SEQ ID NO: 37250 - protein, 7 aa, synthetic construct
RGDIDTQ

SEQ ID NO: 37251 - protein, 7 aa, synthetic construct
RGDIENE

SEQ ID NO: 37252 - protein, 7 aa, synthetic construct
RGDANGN

SEQ ID NO: 37253 - protein, 7 aa, synthetic construct
RGDIFET

SEQ ID NO: 37254 - protein, 7 aa, synthetic construct
RGDANHH

SEQ ID NO: 37255 - protein, 7 aa, synthetic construct
RGDIHDS

SEQ ID NO: 37256 - protein, 7 aa, synthetic construct
RGDIHLL

SEQ ID NO: 37257 - protein, 7 aa, synthetic construct
RGDIIAN

SEQ ID NO: 37258 - protein, 7 aa, synthetic construct
RGDIIIE

SEQ ID NO: 37259 - protein, 7 aa, synthetic construct
RGDINGQ

SEQ ID NO: 37260 - protein, 7 aa, synthetic construct
RGDANVH

SEQ ID NO: 37261 - protein, 7 aa, synthetic construct
RGDINTV

SEQ ID NO: 37262 - protein, 7 aa, synthetic construct
RGDIQDV

SEQ ID NO: 37263 - protein, 7 aa, synthetic construct
RGDAQAG

SEQ ID NO: 37264 - protein, 7 aa, synthetic construct
RGDIQSG

SEQ ID NO: 37265 - protein, 7 aa, synthetic construct
RGDISFE

SEQ ID NO: 37266 - protein, 7 aa, synthetic construct
RGDITAV

SEQ ID NO: 37267 - protein, 7 aa, synthetic construct
RGDKAIN

SEQ ID NO: 37268 - protein, 7 aa, synthetic construct
RGDKAVD

SEQ ID NO: 37269 - protein, 7 aa, synthetic construct
RGDKDDN

SEQ ID NO: 37270 - protein, 7 aa, synthetic construct
RGDKDVD

SEQ ID NO: 37271 - protein, 7 aa, synthetic construct
RGDKEVS

SEQ ID NO: 37272 - protein, 7 aa, synthetic construct
RGDKIDL

SEQ ID NO: 37273 - protein, 7 aa, synthetic construct
RGDKILN

SEQ ID NO: 37274 - protein, 7 aa, synthetic construct
RGDKLQS

SEQ ID NO: 37275 - protein, 7 aa, synthetic construct
RGDASFD

SEQ ID NO: 37276 - protein, 7 aa, synthetic construct
RGDLEQD

SEQ ID NO: 37277 - protein, 7 aa, synthetic construct
RGDLGFE

SEQ ID NO: 37278 - protein, 7 aa, synthetic construct
RGDLGVD

SEQ ID NO: 37279 - protein, 7 aa, synthetic construct
RGDLHER

SEQ ID NO: 37280 - protein, 7 aa, synthetic construct
RGDLHLG

SEQ ID NO: 37281 - protein, 7 aa, synthetic construct
RGDLIDH

SEQ ID NO: 37282 - protein, 7 aa, synthetic construct
RGDLIEN

SEQ ID NO: 37283 - protein, 7 aa, synthetic construct
RGDLKRL

SEQ ID NO: 37284 - protein, 7 aa, synthetic construct
RGDLKTF

SEQ ID NO: 37285 - protein, 7 aa, synthetic construct
RGDLNEA

SEQ ID NO: 37286 - protein, 7 aa, synthetic construct
RGDLSEL

SEQ ID NO: 37287 - protein, 7 aa, synthetic construct
RGDLSQL

SEQ ID NO: 37288 - protein, 7 aa, synthetic construct
RGDLTEE

SEQ ID NO: 37289 - protein, 7 aa, synthetic construct
RGDLTEN

SEQ ID NO: 37290 - protein, 7 aa, synthetic construct
RGDNAFF

SEQ ID NO: 37291 - protein, 7 aa, synthetic construct
RGDNDLI

SEQ ID NO: 37292 - protein, 7 aa, synthetic construct
RGDNEEN

SEQ ID NO: 37293 - protein, 7 aa, synthetic construct
RGDNEFH

SEQ ID NO: 37294 - protein, 7 aa, synthetic construct
RGDNGEN

SEQ ID NO: 37295 - protein, 7 aa, synthetic construct
RGDNHEE

SEQ ID NO: 37296 - protein, 7 aa, synthetic construct
RGDNHLF

SEQ ID NO: 37297 - protein, 7 aa, synthetic construct
RGDNITQ

SEQ ID NO: 37298 - protein, 7 aa, synthetic construct
RGDAVFQ

SEQ ID NO: 37299 - protein, 7 aa, synthetic construct
RGDNNDN

SEQ ID NO: 37300 - protein, 7 aa, synthetic construct
RGDNNGG

SEQ ID NO: 37301 - protein, 7 aa, synthetic construct
RGDNNNV

SEQ ID NO: 37302 - protein, 7 aa, synthetic construct
RGDAVIV

SEQ ID NO: 37303 - protein, 7 aa, synthetic construct
RGDNNTS

SEQ ID NO: 37304 - protein, 7 aa, synthetic construct
RGDNQHS

SEQ ID NO: 37305 - protein, 7 aa, synthetic construct
RGDNRIN

SEQ ID NO: 37306 - protein, 7 aa, synthetic construct
RGDNTTQ

SEQ ID NO: 37307 - protein, 7 aa, synthetic construct
RGDNVEA

SEQ ID NO: 37308 - protein, 7 aa, synthetic construct
RGDQDHD

SEQ ID NO: 37309 - protein, 7 aa, synthetic construct
RGDQDST

SEQ ID NO: 37310 - protein, 7 aa, synthetic construct
RGDQFEH

SEQ ID NO: 37311 - protein, 7 aa, synthetic construct
RGDQHGG

SEQ ID NO: 37312 - protein, 7 aa, synthetic construct
RGDDATT

SEQ ID NO: 37313 - protein, 7 aa, synthetic construct
RGDDDDN

SEQ ID NO: 37314 - protein, 7 aa, synthetic construct
RGDQVDQ

SEQ ID NO: 37315 - protein, 7 aa, synthetic construct
RGDQVEA

SEQ ID NO: 37316 - protein, 7 aa, synthetic construct
RGDQVEE

SEQ ID NO: 37317 - protein, 7 aa, synthetic construct
RGDRALG

SEQ ID NO: 37318 - protein, 7 aa, synthetic construct
RGDRHED

SEQ ID NO: 37319 - protein, 7 aa, synthetic construct
RGDDEFQ

SEQ ID NO: 37320 - protein, 7 aa, synthetic construct
RGDDELQ

SEQ ID NO: 37321 - protein, 7 aa, synthetic construct
RGDRTLL

SEQ ID NO: 37322 - protein, 7 aa, synthetic construct
RGDRVLD

SEQ ID NO: 37323 - protein, 7 aa, synthetic construct
RGDRVQA

SEQ ID NO: 37324 - protein, 7 aa, synthetic construct
RGDSEKQ

SEQ ID NO: 37325 - protein, 7 aa, synthetic construct
RGDSETG

SEQ ID NO: 37326 - protein, 7 aa, synthetic construct
RGDSFSH

SEQ ID NO: 37327 - protein, 7 aa, synthetic construct
RGDSFSS

SEQ ID NO: 37328 - protein, 7 aa, synthetic construct
RGDSGFH

SEQ ID NO: 37329 - protein, 7 aa, synthetic construct
RGDDFLA

SEQ ID NO: 37330 - protein, 7 aa, synthetic construct
RGDSKDG

SEQ ID NO: 37331 - protein, 7 aa, synthetic construct
RGDSKLN

SEQ ID NO: 37332 - protein, 7 aa, synthetic construct
RGDSLLH

SEQ ID NO: 37333 - protein, 7 aa, synthetic construct
RGDDFSS

SEQ ID NO: 37334 - protein, 7 aa, synthetic construct
RGDSQHA

SEQ ID NO: 37335 - protein, 7 aa, synthetic construct
RGDSVEG

SEQ ID NO: 37336 - protein, 7 aa, synthetic construct
RGDAAET

SEQ ID NO: 37337 - protein, 7 aa, synthetic construct
RGDTDFN

SEQ ID NO: 37338 - protein, 7 aa, synthetic construct
RGDTDHN

SEQ ID NO: 37339 - protein, 7 aa, synthetic construct
RGDTDIV

SEQ ID NO: 37340 - protein, 7 aa, synthetic construct
RGDTEFG

SEQ ID NO: 37341 - protein, 7 aa, synthetic construct
RGDTELD

SEQ ID NO: 37342 - protein, 7 aa, synthetic construct
RGDTETR

SEQ ID NO: 37343 - protein, 7 aa, synthetic construct
RGDTGEI

SEQ ID NO: 37344 - protein, 7 aa, synthetic construct
RGDTGGT

SEQ ID NO: 37345 - protein, 7 aa, synthetic construct
RGDTIDK

SEQ ID NO: 37346 - protein, 7 aa, synthetic construct
RGDAEAH

SEQ ID NO: 37347 - protein, 7 aa, synthetic construct
RGDTLDV

SEQ ID NO: 37348 - protein, 7 aa, synthetic construct
RGDTLLQ

SEQ ID NO: 37349 - protein, 7 aa, synthetic construct
RGDTSRH

SEQ ID NO: 37350 - protein, 7 aa, synthetic construct
RGDTTIF

SEQ ID NO: 37351 - protein, 7 aa, synthetic construct
RGDTTLV

SEQ ID NO: 37352 - protein, 7 aa, synthetic construct
RGDTTRI

SEQ ID NO: 37353 - protein, 7 aa, synthetic construct
RGDTTVD

SEQ ID NO: 37354 - protein, 7 aa, synthetic construct
RGDTVAQ

SEQ ID NO: 37355 - protein, 7 aa, synthetic construct
RGDDHVV

SEQ ID NO: 37356 - protein, 7 aa, synthetic construct
RGDVDFA

SEQ ID NO: 37357 - protein, 7 aa, synthetic construct
RGDVDTQ

SEQ ID NO: 37358 - protein, 7 aa, synthetic construct
RGDVFGE

SEQ ID NO: 37359 - protein, 7 aa, synthetic construct
RGDVGEI

SEQ ID NO: 37360 - protein, 7 aa, synthetic construct
RGDVGGD

SEQ ID NO: 37361 - protein, 7 aa, synthetic construct
RGDVGVF

SEQ ID NO: 37362 - protein, 7 aa, synthetic construct
RGDVIGE

SEQ ID NO: 37363 - protein, 7 aa, synthetic construct
RGDVLNA

SEQ ID NO: 37364 - protein, 7 aa, synthetic construct
RGDVRIA

SEQ ID NO: 37365 - protein, 7 aa, synthetic construct
RGDDLEL

SEQ ID NO: 37366 - protein, 7 aa, synthetic construct
RGDDLGN

SEQ ID NO: 37367 - protein, 7 aa, synthetic construct
RGDDNLE

SEQ ID NO: 37368 - protein, 7 aa, synthetic construct
RGDDNLN

SEQ ID NO: 37369 - protein, 7 aa, synthetic construct
RGDDQAS

SEQ ID NO: 37370 - protein, 7 aa, synthetic construct
RGDDQFV

SEQ ID NO: 37371 - protein, 7 aa, synthetic construct
RGDDQIT

SEQ ID NO: 37372 - protein, 7 aa, synthetic construct
RGDDQKN

SEQ ID NO: 37373 - protein, 7 aa, synthetic construct
RGDDQQA

SEQ ID NO: 37374 - protein, 7 aa, synthetic construct
RGDDREK

SEQ ID NO: 37375 - protein, 7 aa, synthetic construct
RGDDRKG

SEQ ID NO: 37376 - protein, 7 aa, synthetic construct
RGDDSAQ

SEQ ID NO: 37377 - protein, 7 aa, synthetic construct
RGDDSFG

SEQ ID NO: 37378 - protein, 7 aa, synthetic construct
RGDDSIS

SEQ ID NO: 37379 - protein, 7 aa, synthetic construct
RGDDTNV

SEQ ID NO: 37380 - protein, 7 aa, synthetic construct
RGDAEVL

SEQ ID NO: 37381 - protein, 7 aa, synthetic construct
RGDEAEF

SEQ ID NO: 37382 - protein, 7 aa, synthetic construct
RGDEAQD

SEQ ID NO: 37383 - protein, 7 aa, synthetic construct
RGDEDDF

SEQ ID NO: 37384 - protein, 7 aa, synthetic construct
RGDEDRE

SEQ ID NO: 37385 - protein, 7 aa, synthetic construct
RGDEEIV

SEQ ID NO: 37386 - protein, 7 aa, synthetic construct
RGDEELG

SEQ ID NO: 37387 - protein, 7 aa, synthetic construct
RGDEEVN

SEQ ID NO: 37388 - protein, 7 aa, synthetic construct
RGDEFGD

SEQ ID NO: 37389 - protein, 7 aa, synthetic construct
RGDEGEQ

SEQ ID NO: 37390 - protein, 7 aa, synthetic construct
RGDAFNH

SEQ ID NO: 37391 - protein, 7 aa, synthetic construct
RGDEKIV

SEQ ID NO: 37392 - protein, 7 aa, synthetic construct
RGDEKQG

SEQ ID NO: 37393 - protein, 7 aa, synthetic construct
RGDEKVN

SEQ ID NO: 37394 - protein, 7 aa, synthetic construct
RGDELFF

SEQ ID NO: 37395 - protein, 7 aa, synthetic construct
RGDELHA

SEQ ID NO: 37396 - protein, 7 aa, synthetic construct
RGDENAL

SEQ ID NO: 37397 - protein, 7 aa, synthetic construct
RGDENFQ

SEQ ID NO: 37398 - protein, 7 aa, synthetic construct
RGDENHH

SEQ ID NO: 37399 - protein, 7 aa, synthetic construct
RGDENII

SEQ ID NO: 37400 - protein, 7 aa, synthetic construct
RGDEQIT

SEQ ID NO: 37401 - protein, 7 aa, synthetic construct
RGDEQSN

SEQ ID NO: 37402 - protein, 7 aa, synthetic construct
RGDEQTL

SEQ ID NO: 37403 - protein, 7 aa, synthetic construct
RGDERGD

SEQ ID NO: 37404 - protein, 7 aa, synthetic construct
RGDERQE

SEQ ID NO: 37405 - protein, 7 aa, synthetic construct
RGDESGF

SEQ ID NO: 37406 - protein, 7 aa, synthetic construct
RGDESLN

SEQ ID NO: 37407 - protein, 7 aa, synthetic construct
RGDESSA

SEQ ID NO: 37408 - protein, 7 aa, synthetic construct
RGDEVAQ

SEQ ID NO: 37409 - protein, 7 aa, synthetic construct
RGDEVNT

SEQ ID NO: 37410 - protein, 7 aa, synthetic construct
RGDFAGF

SEQ ID NO: 37411 - protein, 7 aa, synthetic construct
RGDFALK

SEQ ID NO: 37412 - protein, 7 aa, synthetic construct
RGDFALN

SEQ ID NO: 37413 - protein, 7 aa, synthetic construct
RGDFDDV

SEQ ID NO: 37414 - protein, 7 aa, synthetic construct
RGDFDQQ

SEQ ID NO: 37415 - protein, 7 aa, synthetic construct
RGDFEVD

SEQ ID NO: 37416 - protein, 7 aa, synthetic construct
RGDAHIG

SEQ ID NO: 37417 - protein, 7 aa, synthetic construct
RGDAHLL

SEQ ID NO: 37418 - protein, 7 aa, synthetic construct
RGDFQTE

SEQ ID NO: 37419 - protein, 7 aa, synthetic construct
RGDFTDR

SEQ ID NO: 37420 - protein, 7 aa, synthetic construct
RGDAHVN

SEQ ID NO: 37421 - protein, 7 aa, synthetic construct
RGDGDIQ

SEQ ID NO: 37422 - protein, 7 aa, synthetic construct
RGDAIGD

SEQ ID NO: 37423 - protein, 7 aa, synthetic construct
RGDGEVH

SEQ ID NO: 37424 - protein, 7 aa, synthetic construct
RGDGFAF

SEQ ID NO: 37425 - protein, 7 aa, synthetic construct
RGDAIIS

SEQ ID NO: 37426 - protein, 7 aa, synthetic construct
RGDGHND

SEQ ID NO: 37427 - protein, 7 aa, synthetic construct
RGDGNQA

SEQ ID NO: 37428 - protein, 7 aa, synthetic construct
RGDGQEN

SEQ ID NO: 37429 - protein, 7 aa, synthetic construct
RGDGQLF

SEQ ID NO: 37430 - protein, 7 aa, synthetic construct
RGDGTIL

SEQ ID NO: 37431 - protein, 7 aa, synthetic construct
RGDGTLE

SEQ ID NO: 37432 - protein, 7 aa, synthetic construct
RGDGTTF

SEQ ID NO: 37433 - protein, 7 aa, synthetic construct
RGDHFAE

SEQ ID NO: 37434 - protein, 7 aa, synthetic construct
RGDHIHS

SEQ ID NO: 37435 - protein, 7 aa, synthetic construct
RGDALIL

SEQ ID NO: 37436 - protein, 7 aa, synthetic construct
RGDHNLE

SEQ ID NO: 37437 - protein, 7 aa, synthetic construct
RGDHNQG

SEQ ID NO: 37438 - protein, 7 aa, synthetic construct
RGDHRDA

SEQ ID NO: 37439 - protein, 7 aa, synthetic construct
RGDHSLH

SEQ ID NO: 37440 - protein, 7 aa, synthetic construct
RGDHVLF

SEQ ID NO: 37441 - protein, 7 aa, synthetic construct
RGDIDRQ

SEQ ID NO: 37442 - protein, 7 aa, synthetic construct
RGDIDVN

SEQ ID NO: 37443 - protein, 7 aa, synthetic construct
RGDIEAL

SEQ ID NO: 37444 - protein, 7 aa, synthetic construct
RGDIEDS

SEQ ID NO: 37445 - protein, 7 aa, synthetic construct
RGDIFTQ

SEQ ID NO: 37446 - protein, 7 aa, synthetic construct
RGDIGTF

SEQ ID NO: 37447 - protein, 7 aa, synthetic construct
RGDIGTL

SEQ ID NO: 37448 - protein, 7 aa, synthetic construct
RGDAAVG

SEQ ID NO: 37449 - protein, 7 aa, synthetic construct
RGDANLV

SEQ ID NO: 37450 - protein, 7 aa, synthetic construct
RGDINHE

SEQ ID NO: 37451 - protein, 7 aa, synthetic construct
RGDIQKG

SEQ ID NO: 37452 - protein, 7 aa, synthetic construct
RGDIQKS

SEQ ID NO: 37453 - protein, 7 aa, synthetic construct
RGDIRQE

SEQ ID NO: 37454 - protein, 7 aa, synthetic construct
RGDIVAV

SEQ ID NO: 37455 - protein, 7 aa, synthetic construct
RGDIVNN

SEQ ID NO: 37456 - protein, 7 aa, synthetic construct
RGDIVSD

SEQ ID NO: 37457 - protein, 7 aa, synthetic construct
RGDKDFG

SEQ ID NO: 37458 - protein, 7 aa, synthetic construct
RGDAQQD

SEQ ID NO: 37459 - protein, 7 aa, synthetic construct
RGDKEHG

SEQ ID NO: 37460 - protein, 7 aa, synthetic construct
RGDKFVA

SEQ ID NO: 37461 - protein, 7 aa, synthetic construct
RGDADDR

SEQ ID NO: 37462 - protein, 7 aa, synthetic construct
RGDKLAQ

SEQ ID NO: 37463 - protein, 7 aa, synthetic construct
RGDKLLD

SEQ ID NO: 37464 - protein, 7 aa, synthetic construct
RGDKNEE

SEQ ID NO: 37465 - protein, 7 aa, synthetic construct
RGDKQVE

SEQ ID NO: 37466 - protein, 7 aa, synthetic construct
RGDARST

SEQ ID NO: 37467 - protein, 7 aa, synthetic construct
RGDKVTD

SEQ ID NO: 37468 - protein, 7 aa, synthetic construct
RGDLAGL

SEQ ID NO: 37469 - protein, 7 aa, synthetic construct
RGDLDKH

SEQ ID NO: 37470 - protein, 7 aa, synthetic construct
RGDLFIS

SEQ ID NO: 37471 - protein, 7 aa, synthetic construct
RGDLFQE

SEQ ID NO: 37472 - protein, 7 aa, synthetic construct
RGDLFTH

SEQ ID NO: 37473 - protein, 7 aa, synthetic construct
RGDASQG

SEQ ID NO: 37474 - protein, 7 aa, synthetic construct
RGDLKNG

SEQ ID NO: 37475 - protein, 7 aa, synthetic construct
RGDLLIK

SEQ ID NO: 37476 - protein, 7 aa, synthetic construct
RGDLLIL

SEQ ID NO: 37477 - protein, 7 aa, synthetic construct
RGDADGG

SEQ ID NO: 37478 - protein, 7 aa, synthetic construct
RGDLLVL

SEQ ID NO: 37479 - protein, 7 aa, synthetic construct
RGDLTSL

SEQ ID NO: 37480 - protein, 7 aa, synthetic construct
RGDLVNE

SEQ ID NO: 37481 - protein, 7 aa, synthetic construct
RGDNEHD

SEQ ID NO: 37482 - protein, 7 aa, synthetic construct
RGDNEKG

SEQ ID NO: 37483 - protein, 7 aa, synthetic construct
RGDNETG

SEQ ID NO: 37484 - protein, 7 aa, synthetic construct
RGDNFKN

SEQ ID NO: 37485 - protein, 7 aa, synthetic construct
RGDNIFH

SEQ ID NO: 37486 - protein, 7 aa, synthetic construct
RGDAVED

SEQ ID NO: 37487 - protein, 7 aa, synthetic construct
RGDAVIA

SEQ ID NO: 37488 - protein, 7 aa, synthetic construct
RGDNNGF

SEQ ID NO: 37489 - protein, 7 aa, synthetic construct
RGDNNIN

SEQ ID NO: 37490 - protein, 7 aa, synthetic construct
RGDAVLE

SEQ ID NO: 37491 - protein, 7 aa, synthetic construct
RGDAVNE

SEQ ID NO: 37492 - protein, 7 aa, synthetic construct
RGDNSLG

SEQ ID NO: 37493 - protein, 7 aa, synthetic construct
RGDNTAG

SEQ ID NO: 37494 - protein, 7 aa, synthetic construct
RGDAVSA

SEQ ID NO: 37495 - protein, 7 aa, synthetic construct
RGDAVTT

SEQ ID NO: 37496 - protein, 7 aa, synthetic construct
RGDNVVS

SEQ ID NO: 37497 - protein, 7 aa, synthetic construct
RGDQAND

SEQ ID NO: 37498 - protein, 7 aa, synthetic construct
RGDQDEG

SEQ ID NO: 37499 - protein, 7 aa, synthetic construct
RGDQDHL

SEQ ID NO: 37500 - protein, 7 aa, synthetic construct
RGDDAGH

SEQ ID NO: 37501 - protein, 7 aa, synthetic construct
RGDQEVT

SEQ ID NO: 37502 - protein, 7 aa, synthetic construct
RGDQFIT

SEQ ID NO: 37503 - protein, 7 aa, synthetic construct
RGDQFNQ

SEQ ID NO: 37504 - protein, 7 aa, synthetic construct
RGDQHDD

SEQ ID NO: 37505 - protein, 7 aa, synthetic construct
RGDQKFG

SEQ ID NO: 37506 - protein, 7 aa, synthetic construct
RGDQNLL

SEQ ID NO: 37507 - protein, 7 aa, synthetic construct
RGDQNVA

SEQ ID NO: 37508 - protein, 7 aa, synthetic construct
RGDQQIR

SEQ ID NO: 37509 - protein, 7 aa, synthetic construct
RGDDDEF

SEQ ID NO: 37510 - protein, 7 aa, synthetic construct
RGDQSDL

SEQ ID NO: 37511 - protein, 7 aa, synthetic construct
RGDQTLE

SEQ ID NO: 37512 - protein, 7 aa, synthetic construct
RGDQTTT

SEQ ID NO: 37513 - protein, 7 aa, synthetic construct
RGDREVG

SEQ ID NO: 37514 - protein, 7 aa, synthetic construct
RGDADQE

SEQ ID NO: 37515 - protein, 7 aa, synthetic construct
RGDRHAD

SEQ ID NO: 37516 - protein, 7 aa, synthetic construct
RGDDEEG

SEQ ID NO: 37517 - protein, 7 aa, synthetic construct
RGDRVQD

SEQ ID NO: 37518 - protein, 7 aa, synthetic construct
RGDSDVN

SEQ ID NO: 37519 - protein, 7 aa, synthetic construct
RGDDFEV

SEQ ID NO: 37520 - protein, 7 aa, synthetic construct
RGDSEAV

SEQ ID NO: 37521 - protein, 7 aa, synthetic construct
RGDSESV

SEQ ID NO: 37522 - protein, 7 aa, synthetic construct
RGDSFFH

SEQ ID NO: 37523 - protein, 7 aa, synthetic construct
RGDSGDH

SEQ ID NO: 37524 - protein, 7 aa, synthetic construct
RGDSIAS

SEQ ID NO: 37525 - protein, 7 aa, synthetic construct
RGDSIEN

SEQ ID NO: 37526 - protein, 7 aa, synthetic construct
RGDSIHG

SEQ ID NO: 37527 - protein, 7 aa, synthetic construct
RGDSKDF

SEQ ID NO: 37528 - protein, 7 aa, synthetic construct
RGDDFQQ

SEQ ID NO: 37529 - protein, 7 aa, synthetic construct
RGDSLGG

SEQ ID NO: 37530 - protein, 7 aa, synthetic construct
RGDSREA

SEQ ID NO: 37531 - protein, 7 aa, synthetic construct
RGDSTDN

SEQ ID NO: 37532 - protein, 7 aa, synthetic construct
RGDSTFK

SEQ ID NO: 37533 - protein, 7 aa, synthetic construct
RGDSVLA

SEQ ID NO: 37534 - protein, 7 aa, synthetic construct
RGDTDFE

SEQ ID NO: 37535 - protein, 7 aa, synthetic construct
RGDTDHR

SEQ ID NO: 37536 - protein, 7 aa, synthetic construct
RGDDGSD

SEQ ID NO: 37537 - protein, 7 aa, synthetic construct
RGDTFKI

SEQ ID NO: 37538 - protein, 7 aa, synthetic construct
RGDTFKQ

SEQ ID NO: 37539 - protein, 7 aa, synthetic construct
RGDTFLI

SEQ ID NO: 37540 - protein, 7 aa, synthetic construct
RGDTFVS

SEQ ID NO: 37541 - protein, 7 aa, synthetic construct
RGDTGKA

SEQ ID NO: 37542 - protein, 7 aa, synthetic construct
RGDTGRE

SEQ ID NO: 37543 - protein, 7 aa, synthetic construct
RGDTHIH

SEQ ID NO: 37544 - protein, 7 aa, synthetic construct
RGDTHIK

SEQ ID NO: 37545 - protein, 7 aa, synthetic construct
RGDTKSA

SEQ ID NO: 37546 - protein, 7 aa, synthetic construct
RGDTLFA

SEQ ID NO: 37547 - protein, 7 aa, synthetic construct
RGDTLRD

SEQ ID NO: 37548 - protein, 7 aa, synthetic construct
RGDTNGN

SEQ ID NO: 37549 - protein, 7 aa, synthetic construct
RGDTNHH

SEQ ID NO: 37550 - protein, 7 aa, synthetic construct
RGDDHLG

SEQ ID NO: 37551 - protein, 7 aa, synthetic construct
RGDTQVG

SEQ ID NO: 37552 - protein, 7 aa, synthetic construct
RGDTSEE

SEQ ID NO: 37553 - protein, 7 aa, synthetic construct
RGDTSEL

SEQ ID NO: 37554 - protein, 7 aa, synthetic construct
RGDTTKF

SEQ ID NO: 37555 - protein, 7 aa, synthetic construct
RGDTTLG

SEQ ID NO: 37556 - protein, 7 aa, synthetic construct
RGDDIDR

SEQ ID NO: 37557 - protein, 7 aa, synthetic construct
RGDVDNL

SEQ ID NO: 37558 - protein, 7 aa, synthetic construct
RGDVDTG

SEQ ID NO: 37559 - protein, 7 aa, synthetic construct
RGDVEAA

SEQ ID NO: 37560 - protein, 7 aa, synthetic construct
RGDVERT

SEQ ID NO: 37561 - protein, 7 aa, synthetic construct
RGDAEDT

SEQ ID NO: 37562 - protein, 7 aa, synthetic construct
RGDVFND

SEQ ID NO: 37563 - protein, 7 aa, synthetic construct
RGDVFVN

SEQ ID NO: 37564 - protein, 7 aa, synthetic construct
RGDDIHV

SEQ ID NO: 37565 - protein, 7 aa, synthetic construct
RGDVHEE

SEQ ID NO: 37566 - protein, 7 aa, synthetic construct
RGDVHFH

SEQ ID NO: 37567 - protein, 7 aa, synthetic construct
RGDVIDL

SEQ ID NO: 37568 - protein, 7 aa, synthetic construct
RGDVKAA

SEQ ID NO: 37569 - protein, 7 aa, synthetic construct
RGDVNEV

SEQ ID NO: 37570 - protein, 7 aa, synthetic construct
RGDVQEG

SEQ ID NO: 37571 - protein, 7 aa, synthetic construct
RGDVQIT

SEQ ID NO: 37572 - protein, 7 aa, synthetic construct
RGDVQSA

SEQ ID NO: 37573 - protein, 7 aa, synthetic construct
RGDDKEL

SEQ ID NO: 37574 - protein, 7 aa, synthetic construct
RGDVTIS

SEQ ID NO: 37575 - protein, 7 aa, synthetic construct
RGDVVAS

SEQ ID NO: 37576 - protein, 7 aa, synthetic construct
RGDVVQG

SEQ ID NO: 37577 - protein, 7 aa, synthetic construct
RGDDLGD

SEQ ID NO: 37578 - protein, 7 aa, synthetic construct
RGDDLGL

SEQ ID NO: 37579 - protein, 7 aa, synthetic construct
RGDDQVA

SEQ ID NO: 37580 - protein, 7 aa, synthetic construct
RGDDSDD

SEQ ID NO: 37581 - protein, 7 aa, synthetic construct
RGDDSDK

SEQ ID NO: 37582 - protein, 7 aa, synthetic construct
RGDAAGG

SEQ ID NO: 37583 - protein, 7 aa, synthetic construct
RGDDTTQ

SEQ ID NO: 37584 - protein, 7 aa, synthetic construct
RGDDVNV

SEQ ID NO: 37585 - protein, 7 aa, synthetic construct
RGDDVVI

SEQ ID NO: 37586 - protein, 7 aa, synthetic construct
RGDEADS

SEQ ID NO: 37587 - protein, 7 aa, synthetic construct
RGDEEAG

SEQ ID NO: 37588 - protein, 7 aa, synthetic construct
RGDEEST

SEQ ID NO: 37589 - protein, 7 aa, synthetic construct
RGDEGNN

SEQ ID NO: 37590 - protein, 7 aa, synthetic construct
RGDAFKE

SEQ ID NO: 37591 - protein, 7 aa, synthetic construct
RGDAFKS

SEQ ID NO: 37592 - protein, 7 aa, synthetic construct
RGDEHIH

SEQ ID NO: 37593 - protein, 7 aa, synthetic construct
RGDEKFN

SEQ ID NO: 37594 - protein, 7 aa, synthetic construct
RGDELVH

SEQ ID NO: 37595 - protein, 7 aa, synthetic construct
RGDEQEH

SEQ ID NO: 37596 - protein, 7 aa, synthetic construct
RGDEQSG

SEQ ID NO: 37597 - protein, 7 aa, synthetic construct
RGDEQTQ

SEQ ID NO: 37598 - protein, 7 aa, synthetic construct
RGDEQVG

SEQ ID NO: 37599 - protein, 7 aa, synthetic construct
RGDERDF

SEQ ID NO: 37600 - protein, 7 aa, synthetic construct
RGDERSH

SEQ ID NO: 37601 - protein, 7 aa, synthetic construct
RGDESDH

SEQ ID NO: 37602 - protein, 7 aa, synthetic construct
RGDESNG

SEQ ID NO: 37603 - protein, 7 aa, synthetic construct
RGDETDK

SEQ ID NO: 37604 - protein, 7 aa, synthetic construct
RGDETRI

SEQ ID NO: 37605 - protein, 7 aa, synthetic construct
RGDETVF

SEQ ID NO: 37606 - protein, 7 aa, synthetic construct
RGDFDHE

SEQ ID NO: 37607 - protein, 7 aa, synthetic construct
RGDAGNL

SEQ ID NO: 37608 - protein, 7 aa, synthetic construct
RGDFDQL

SEQ ID NO: 37609 - protein, 7 aa, synthetic construct
RGDFEEN

SEQ ID NO: 37610 - protein, 7 aa, synthetic construct
RGDFFDH

SEQ ID NO: 37611 - protein, 7 aa, synthetic construct
RGDFGKG

SEQ ID NO: 37612 - protein, 7 aa, synthetic construct
RGDFLKA

SEQ ID NO: 37613 - protein, 7 aa, synthetic construct
RGDFQSD

SEQ ID NO: 37614 - protein, 7 aa, synthetic construct
RGDFQVE

SEQ ID NO: 37615 - protein, 7 aa, synthetic construct
RGDFTEE

SEQ ID NO: 37616 - protein, 7 aa, synthetic construct
RGDGDGQ

SEQ ID NO: 37617 - protein, 7 aa, synthetic construct
RGDGDTE

SEQ ID NO: 37618 - protein, 7 aa, synthetic construct
RGDGDTQ

SEQ ID NO: 37619 - protein, 7 aa, synthetic construct
RGDGDVQ

SEQ ID NO: 37620 - protein, 7 aa, synthetic construct
RGDGGQH

SEQ ID NO: 37621 - protein, 7 aa, synthetic construct
RGDGHVE

SEQ ID NO: 37622 - protein, 7 aa, synthetic construct
RGDGKIA

SEQ ID NO: 37623 - protein, 7 aa, synthetic construct
RGDAAQF

SEQ ID NO: 37624 - protein, 7 aa, synthetic construct
RGDGLNH

SEQ ID NO: 37625 - protein, 7 aa, synthetic construct
RGDGQDV

SEQ ID NO: 37626 - protein, 7 aa, synthetic construct
RGDGRHH

SEQ ID NO: 37627 - protein, 7 aa, synthetic construct
RGDGTEN

SEQ ID NO: 37628 - protein, 7 aa, synthetic construct
RGDGTLG

SEQ ID NO: 37629 - protein, 7 aa, synthetic construct
RGDHEDH

SEQ ID NO: 37630 - protein, 7 aa, synthetic construct
RGDHFAN

SEQ ID NO: 37631 - protein, 7 aa, synthetic construct
RGDHFAS

SEQ ID NO: 37632 - protein, 7 aa, synthetic construct
RGDHFDR

SEQ ID NO: 37633 - protein, 7 aa, synthetic construct
RGDHFEK

SEQ ID NO: 37634 - protein, 7 aa, synthetic construct
RGDHFQN

SEQ ID NO: 37635 - protein, 7 aa, synthetic construct
RGDHHAQ

SEQ ID NO: 37636 - protein, 7 aa, synthetic construct
RGDHKSE

SEQ ID NO: 37637 - protein, 7 aa, synthetic construct
RGDHLES

SEQ ID NO: 37638 - protein, 7 aa, synthetic construct
RGDHLIV

SEQ ID NO: 37639 - protein, 7 aa, synthetic construct
RGDHQHA

SEQ ID NO: 37640 - protein, 7 aa, synthetic construct
RGDHVVN

SEQ ID NO: 37641 - protein, 7 aa, synthetic construct
RGDIDAQ

SEQ ID NO: 37642 - protein, 7 aa, synthetic construct
RGDIDKR

SEQ ID NO: 37643 - protein, 7 aa, synthetic construct
RGDIDRT

SEQ ID NO: 37644 - protein, 7 aa, synthetic construct
RGDIDVA

SEQ ID NO: 37645 - protein, 7 aa, synthetic construct
RGDANFS

SEQ ID NO: 37646 - protein, 7 aa, synthetic construct
RGDIGHH

SEQ ID NO: 37647 - protein, 7 aa, synthetic construct
RGDIHRA

SEQ ID NO: 37648 - protein, 7 aa, synthetic construct
RGDIIQV

SEQ ID NO: 37649 - protein, 7 aa, synthetic construct
RGDIIRD

SEQ ID NO: 37650 - protein, 7 aa, synthetic construct
RGDANQT

SEQ ID NO: 37651 - protein, 7 aa, synthetic construct
RGDINHF

SEQ ID NO: 37652 - protein, 7 aa, synthetic construct
RGDINIG

SEQ ID NO: 37653 - protein, 7 aa, synthetic construct
RGDITVA

SEQ ID NO: 37654 - protein, 7 aa, synthetic construct
RGDITVG

SEQ ID NO: 37655 - protein, 7 aa, synthetic construct
RGDKALE

SEQ ID NO: 37656 - protein, 7 aa, synthetic construct
RGDKDHD

SEQ ID NO: 37657 - protein, 7 aa, synthetic construct
RGDKDIF

SEQ ID NO: 37658 - protein, 7 aa, synthetic construct
RGDKGDF

SEQ ID NO: 37659 - protein, 7 aa, synthetic construct
RGDKHIA

SEQ ID NO: 37660 - protein, 7 aa, synthetic construct
RGDKIEG

SEQ ID NO: 37661 - protein, 7 aa, synthetic construct
RGDKITD

SEQ ID NO: 37662 - protein, 7 aa, synthetic construct
RGDADEG

SEQ ID NO: 37663 - protein, 7 aa, synthetic construct
RGDKSLG

SEQ ID NO: 37664 - protein, 7 aa, synthetic construct
RGDKTAN

SEQ ID NO: 37665 - protein, 7 aa, synthetic construct
RGDLADT

SEQ ID NO: 37666 - protein, 7 aa, synthetic construct
RGDLATA

SEQ ID NO: 37667 - protein, 7 aa, synthetic construct
RGDLAVR

SEQ ID NO: 37668 - protein, 7 aa, synthetic construct
RGDLEGV

SEQ ID NO: 37669 - protein, 7 aa, synthetic construct
RGDLFEF

SEQ ID NO: 37670 - protein, 7 aa, synthetic construct
RGDAADS

SEQ ID NO: 37671 - protein, 7 aa, synthetic construct
RGDLGSL

SEQ ID NO: 37672 - protein, 7 aa, synthetic construct
RGDASLA

SEQ ID NO: 37673 - protein, 7 aa, synthetic construct
RGDASLH

SEQ ID NO: 37674 - protein, 7 aa, synthetic construct
RGDLLDV

SEQ ID NO: 37675 - protein, 7 aa, synthetic construct
RGDLLQK

SEQ ID NO: 37676 - protein, 7 aa, synthetic construct
RGDLNGS

SEQ ID NO: 37677 - protein, 7 aa, synthetic construct
RGDLNLK

SEQ ID NO: 37678 - protein, 7 aa, synthetic construct
RGDATAH

SEQ ID NO: 37679 - protein, 7 aa, synthetic construct
RGDLQIA

SEQ ID NO: 37680 - protein, 7 aa, synthetic construct
RGDLQIN

SEQ ID NO: 37681 - protein, 7 aa, synthetic construct
RGDATEV

SEQ ID NO: 37682 - protein, 7 aa, synthetic construct
RGDLTNL

SEQ ID NO: 37683 - protein, 7 aa, synthetic construct
RGDLVDG

SEQ ID NO: 37684 - protein, 7 aa, synthetic construct
RGDNAVG

SEQ ID NO: 37685 - protein, 7 aa, synthetic construct
RGDNDIH

SEQ ID NO: 37686 - protein, 7 aa, synthetic construct
RGDNDKA

SEQ ID NO: 37687 - protein, 7 aa, synthetic construct
RGDNERH

SEQ ID NO: 37688 - protein, 7 aa, synthetic construct
RGDNGNE

SEQ ID NO: 37689 - protein, 7 aa, synthetic construct
RGDNGSD

SEQ ID NO: 37690 - protein, 7 aa, synthetic construct
RGDNGSF

SEQ ID NO: 37691 - protein, 7 aa, synthetic construct
RGDNHEF

SEQ ID NO: 37692 - protein, 7 aa, synthetic construct
RGDNLDG

SEQ ID NO: 37693 - protein, 7 aa, synthetic construct
RGDNLDV

SEQ ID NO: 37694 - protein, 7 aa, synthetic construct
RGDNLFG

SEQ ID NO: 37695 - protein, 7 aa, synthetic construct
RGDNLTR

SEQ ID NO: 37696 - protein, 7 aa, synthetic construct
RGDNLTT

SEQ ID NO: 37697 - protein, 7 aa, synthetic construct
RGDNNLD

SEQ ID NO: 37698 - protein, 7 aa, synthetic construct
RGDNNSK

SEQ ID NO: 37699 - protein, 7 aa, synthetic construct
RGDNQNA

SEQ ID NO: 37700 - protein, 7 aa, synthetic construct
RGDNRID

SEQ ID NO: 37701 - protein, 7 aa, synthetic construct
RGDNVDA

SEQ ID NO: 37702 - protein, 7 aa, synthetic construct
RGDNVIS

SEQ ID NO: 37703 - protein, 7 aa, synthetic construct
RGDQDEK

SEQ ID NO: 37704 - protein, 7 aa, synthetic construct
RGDQDVA

SEQ ID NO: 37705 - protein, 7 aa, synthetic construct
RGDQELN

SEQ ID NO: 37706 - protein, 7 aa, synthetic construct
RGDQEVF

SEQ ID NO: 37707 - protein, 7 aa, synthetic construct
RGDQGDL

SEQ ID NO: 37708 - protein, 7 aa, synthetic construct
RGDQHEE

SEQ ID NO: 37709 - protein, 7 aa, synthetic construct
RGDDALQ

SEQ ID NO: 37710 - protein, 7 aa, synthetic construct
RGDQIIQ

SEQ ID NO: 37711 - protein, 7 aa, synthetic construct
RGDDANS

SEQ ID NO: 37712 - protein, 7 aa, synthetic construct
RGDDATQ

SEQ ID NO: 37713 - protein, 7 aa, synthetic construct
RGDADLV

SEQ ID NO: 37714 - protein, 7 aa, synthetic construct
RGDQTFA

SEQ ID NO: 37715 - protein, 7 aa, synthetic construct
RGDRHDD

SEQ ID NO: 37716 - protein, 7 aa, synthetic construct
RGDRIAD

SEQ ID NO: 37717 - protein, 7 aa, synthetic construct
RGDRKTD

SEQ ID NO: 37718 - protein, 7 aa, synthetic construct
RGDDEIT

SEQ ID NO: 37719 - protein, 7 aa, synthetic construct
RGDDELD

SEQ ID NO: 37720 - protein, 7 aa, synthetic construct
RGDDENE

SEQ ID NO: 37721 - protein, 7 aa, synthetic construct
RGDRVLA

SEQ ID NO: 37722 - protein, 7 aa, synthetic construct
RGDRVQE

SEQ ID NO: 37723 - protein, 7 aa, synthetic construct
RGDDFAI

SEQ ID NO: 37724 - protein, 7 aa, synthetic construct
RGDSAVD

SEQ ID NO: 37725 - protein, 7 aa, synthetic construct
RGDSAVG

SEQ ID NO: 37726 - protein, 7 aa, synthetic construct
RGDSEDI

SEQ ID NO: 37727 - protein, 7 aa, synthetic construct
RGDSFFE

SEQ ID NO: 37728 - protein, 7 aa, synthetic construct
RGDSFVQ

SEQ ID NO: 37729 - protein, 7 aa, synthetic construct
RGDDFLF

SEQ ID NO: 37730 - protein, 7 aa, synthetic construct
RGDDFNF

SEQ ID NO: 37731 - protein, 7 aa, synthetic construct
RGDSKEG

SEQ ID NO: 37732 - protein, 7 aa, synthetic construct
RGDSKID

SEQ ID NO: 37733 - protein, 7 aa, synthetic construct
RGDSKIE

SEQ ID NO: 37734 - protein, 7 aa, synthetic construct
RGDDFSH

SEQ ID NO: 37735 - protein, 7 aa, synthetic construct
RGDSNIQ

SEQ ID NO: 37736 - protein, 7 aa, synthetic construct
RGDSNVN

SEQ ID NO: 37737 - protein, 7 aa, synthetic construct
RGDDGEE

SEQ ID NO: 37738 - protein, 7 aa, synthetic construct
RGDDGET

SEQ ID NO: 37739 - protein, 7 aa, synthetic construct
RGDSTVE

SEQ ID NO: 37740 - protein, 7 aa, synthetic construct
RGDTAIE

SEQ ID NO: 37741 - protein, 7 aa, synthetic construct
RGDTDAE

SEQ ID NO: 37742 - protein, 7 aa, synthetic construct
RGDTEKF

SEQ ID NO: 37743 - protein, 7 aa, synthetic construct
RGDTFAN

SEQ ID NO: 37744 - protein, 7 aa, synthetic construct
RGDDGSI

SEQ ID NO: 37745 - protein, 7 aa, synthetic construct
RGDTHGE

SEQ ID NO: 37746 - protein, 7 aa, synthetic construct
RGDTIDF

SEQ ID NO: 37747 - protein, 7 aa, synthetic construct
RGDTIGQ

SEQ ID NO: 37748 - protein, 7 aa, synthetic construct
RGDTIND

SEQ ID NO: 37749 - protein, 7 aa, synthetic construct
RGDTLLA

SEQ ID NO: 37750 - protein, 7 aa, synthetic construct
RGDDHNG

SEQ ID NO: 37751 - protein, 7 aa, synthetic construct
RGDDHSD

SEQ ID NO: 37752 - protein, 7 aa, synthetic construct
RGDTTEV

SEQ ID NO: 37753 - protein, 7 aa, synthetic construct
RGDTTVI

SEQ ID NO: 37754 - protein, 7 aa, synthetic construct
RGDTVLD

SEQ ID NO: 37755 - protein, 7 aa, synthetic construct
RGDTVND

SEQ ID NO: 37756 - protein, 7 aa, synthetic construct
RGDDIEN

SEQ ID NO: 37757 - protein, 7 aa, synthetic construct
RGDVELL

SEQ ID NO: 37758 - protein, 7 aa, synthetic construct
RGDVFAI

SEQ ID NO: 37759 - protein, 7 aa, synthetic construct
RGDVFEL

SEQ ID NO: 37760 - protein, 7 aa, synthetic construct
RGDVGDH

SEQ ID NO: 37761 - protein, 7 aa, synthetic construct
RGDDILK

SEQ ID NO: 37762 - protein, 7 aa, synthetic construct
RGDVIAN

SEQ ID NO: 37763 - protein, 7 aa, synthetic construct
RGDVIVE

SEQ ID NO: 37764 - protein, 7 aa, synthetic construct
RGDVKDK

SEQ ID NO: 37765 - protein, 7 aa, synthetic construct
RGDDISQ

SEQ ID NO: 37766 - protein, 7 aa, synthetic construct
RGDVQQD

SEQ ID NO: 37767 - protein, 7 aa, synthetic construct
RGDDKDQ

SEQ ID NO: 37768 - protein, 7 aa, synthetic construct
RGDAEFE

SEQ ID NO: 37769 - protein, 7 aa, synthetic construct
RGDVTNE

SEQ ID NO: 37770 - protein, 7 aa, synthetic construct
RGDVVRQ

SEQ ID NO: 37771 - protein, 7 aa, synthetic construct
RGDDLRD

SEQ ID NO: 37772 - protein, 7 aa, synthetic construct
RGDAEID

SEQ ID NO: 37773 - protein, 7 aa, synthetic construct
RGDDNKS

SEQ ID NO: 37774 - protein, 7 aa, synthetic construct
RGDDNRI

SEQ ID NO: 37775 - protein, 7 aa, synthetic construct
RGDAELL

SEQ ID NO: 37776 - protein, 7 aa, synthetic construct
RGDDRDS

SEQ ID NO: 37777 - protein, 7 aa, synthetic construct
RGDDRFD

SEQ ID NO: 37778 - protein, 7 aa, synthetic construct
RGDDRNT

SEQ ID NO: 37779 - protein, 7 aa, synthetic construct
RGDEASG

SEQ ID NO: 37780 - protein, 7 aa, synthetic construct
RGDEDAE

SEQ ID NO: 37781 - protein, 7 aa, synthetic construct
RGDEDNF

SEQ ID NO: 37782 - protein, 7 aa, synthetic construct
RGDEDVI

SEQ ID NO: 37783 - protein, 7 aa, synthetic construct
RGDEEAF

SEQ ID NO: 37784 - protein, 7 aa, synthetic construct
RGDEEDF

SEQ ID NO: 37785 - protein, 7 aa, synthetic construct
RGDEEDN

SEQ ID NO: 37786 - protein, 7 aa, synthetic construct
RGDEEVD

SEQ ID NO: 37787 - protein, 7 aa, synthetic construct
RGDEFGI

SEQ ID NO: 37788 - protein, 7 aa, synthetic construct
RGDEFHD

SEQ ID NO: 37789 - protein, 7 aa, synthetic construct
RGDEFLV

SEQ ID NO: 37790 - protein, 7 aa, synthetic construct
RGDEGAL

SEQ ID NO: 37791 - protein, 7 aa, synthetic construct
RGDEHKG

SEQ ID NO: 37792 - protein, 7 aa, synthetic construct
RGDEHND

SEQ ID NO: 37793 - protein, 7 aa, synthetic construct
RGDEIGN

SEQ ID NO: 37794 - protein, 7 aa, synthetic construct
RGDEIKT

SEQ ID NO: 37795 - protein, 7 aa, synthetic construct
RGDEINS

SEQ ID NO: 37796 - protein, 7 aa, synthetic construct
RGDEIQR

SEQ ID NO: 37797 - protein, 7 aa, synthetic construct
RGDEKDK

SEQ ID NO: 37798 - protein, 7 aa, synthetic construct
RGDELAA

SEQ ID NO: 37799 - protein, 7 aa, synthetic construct
RGDELGS

SEQ ID NO: 37800 - protein, 7 aa, synthetic construct
RGDEQEI

SEQ ID NO: 37801 - protein, 7 aa, synthetic construct
RGDERDL

SEQ ID NO: 37802 - protein, 7 aa, synthetic construct
RGDERGQ

SEQ ID NO: 37803 - protein, 7 aa, synthetic construct
RGDESHE

SEQ ID NO: 37804 - protein, 7 aa, synthetic construct
RGDETEA

SEQ ID NO: 37805 - protein, 7 aa, synthetic construct
RGDETFS

SEQ ID NO: 37806 - protein, 7 aa, synthetic construct
RGDETQE

SEQ ID NO: 37807 - protein, 7 aa, synthetic construct
RGDEVDL

SEQ ID NO: 37808 - protein, 7 aa, synthetic construct
RGDEVGE

SEQ ID NO: 37809 - protein, 7 aa, synthetic construct
RGDFDIG

SEQ ID NO: 37810 - protein, 7 aa, synthetic construct
RGDFDNA

SEQ ID NO: 37811 - protein, 7 aa, synthetic construct
RGDFDND

SEQ ID NO: 37812 - protein, 7 aa, synthetic construct
RGDFIAR

SEQ ID NO: 37813 - protein, 7 aa, synthetic construct
RGDFIDF

SEQ ID NO: 37814 - protein, 7 aa, synthetic construct
RGDFLLE

SEQ ID NO: 37815 - protein, 7 aa, synthetic construct
RGDFNFG

SEQ ID NO: 37816 - protein, 7 aa, synthetic construct
RGDFNLA

SEQ ID NO: 37817 - protein, 7 aa, synthetic construct
RGDFRLE

SEQ ID NO: 37818 - protein, 7 aa, synthetic construct
RGDFTLE

SEQ ID NO: 37819 - protein, 7 aa, synthetic construct
RGDAIFG

SEQ ID NO: 37820 - protein, 7 aa, synthetic construct
RGDGEGE

SEQ ID NO: 37821 - protein, 7 aa, synthetic construct
RGDGEIV

SEQ ID NO: 37822 - protein, 7 aa, synthetic construct
RGDGELR

SEQ ID NO: 37823 - protein, 7 aa, synthetic construct
RGDAIGE

SEQ ID NO: 37824 - protein, 7 aa, synthetic construct
RGDGFGQ

SEQ ID NO: 37825 - protein, 7 aa, synthetic construct
RGDGGHH

SEQ ID NO: 37826 - protein, 7 aa, synthetic construct
RGDGIES

SEQ ID NO: 37827 - protein, 7 aa, synthetic construct
RGDGIGD

SEQ ID NO: 37828 - protein, 7 aa, synthetic construct
RGDGITT

SEQ ID NO: 37829 - protein, 7 aa, synthetic construct
RGDGLEG

SEQ ID NO: 37830 - protein, 7 aa, synthetic construct
RGDAISN

SEQ ID NO: 37831 - protein, 7 aa, synthetic construct
RGDGNVQ

SEQ ID NO: 37832 - protein, 7 aa, synthetic construct
RGDGRFG

SEQ ID NO: 37833 - protein, 7 aa, synthetic construct
RGDGSEE

SEQ ID NO: 37834 - protein, 7 aa, synthetic construct
RGDGSFD

SEQ ID NO: 37835 - protein, 7 aa, synthetic construct
RGDGTHD

SEQ ID NO: 37836 - protein, 7 aa, synthetic construct
RGDGTTT

SEQ ID NO: 37837 - protein, 7 aa, synthetic construct
RGDGVDE

SEQ ID NO: 37838 - protein, 7 aa, synthetic construct
RGDHAEA

SEQ ID NO: 37839 - protein, 7 aa, synthetic construct
RGDHDAD

SEQ ID NO: 37840 - protein, 7 aa, synthetic construct
RGDHDIL

SEQ ID NO: 37841 - protein, 7 aa, synthetic construct
RGDHFEA

SEQ ID NO: 37842 - protein, 7 aa, synthetic construct
RGDHFGH

SEQ ID NO: 37843 - protein, 7 aa, synthetic construct
RGDHFNH

SEQ ID NO: 37844 - protein, 7 aa, synthetic construct
RGDHHTN

SEQ ID NO: 37845 - protein, 7 aa, synthetic construct
RGDHIQK

SEQ ID NO: 37846 - protein, 7 aa, synthetic construct
RGDHLFH

SEQ ID NO: 37847 - protein, 7 aa, synthetic construct
RGDHNVE

SEQ ID NO: 37848 - protein, 7 aa, synthetic construct
RGDHQES

SEQ ID NO: 37849 - protein, 7 aa, synthetic construct
RGDHQIT

SEQ ID NO: 37850 - protein, 7 aa, synthetic construct
RGDHQQA

SEQ ID NO: 37851 - protein, 7 aa, synthetic construct
RGDHRTE

SEQ ID NO: 37852 - protein, 7 aa, synthetic construct
RGDHSIS

SEQ ID NO: 37853 - protein, 7 aa, synthetic construct
RGDHTVH

SEQ ID NO: 37854 - protein, 7 aa, synthetic construct
RGDIAKL

SEQ ID NO: 37855 - protein, 7 aa, synthetic construct
RGDANDH

SEQ ID NO: 37856 - protein, 7 aa, synthetic construct
RGDIDIA

SEQ ID NO: 37857 - protein, 7 aa, synthetic construct
RGDIEID

SEQ ID NO: 37858 - protein, 7 aa, synthetic construct
RGDIGRL

SEQ ID NO: 37859 - protein, 7 aa, synthetic construct
RGDAAVF

SEQ ID NO: 37860 - protein, 7 aa, synthetic construct
RGDILAD

SEQ ID NO: 37861 - protein, 7 aa, synthetic construct
RGDINFD

SEQ ID NO: 37862 - protein, 7 aa, synthetic construct
RGDINID

SEQ ID NO: 37863 - protein, 7 aa, synthetic construct
RGDINQF

SEQ ID NO: 37864 - protein, 7 aa, synthetic construct
RGDITNG

SEQ ID NO: 37865 - protein, 7 aa, synthetic construct
RGDIVDF

SEQ ID NO: 37866 - protein, 7 aa, synthetic construct
RGDIVHA

SEQ ID NO: 37867 - protein, 7 aa, synthetic construct
RGDIVKH

SEQ ID NO: 37868 - protein, 7 aa, synthetic construct
RGDIVLN

SEQ ID NO: 37869 - protein, 7 aa, synthetic construct
RGDKAVE

SEQ ID NO: 37870 - protein, 7 aa, synthetic construct
RGDKHDE

SEQ ID NO: 37871 - protein, 7 aa, synthetic construct
RGDKIIG

SEQ ID NO: 37872 - protein, 7 aa, synthetic construct
RGDKSEA

SEQ ID NO: 37873 - protein, 7 aa, synthetic construct
RGDKTKD

SEQ ID NO: 37874 - protein, 7 aa, synthetic construct
RGDKVAF

SEQ ID NO: 37875 - protein, 7 aa, synthetic construct
RGDADFD

SEQ ID NO: 37876 - protein, 7 aa, synthetic construct
RGDASGD

SEQ ID NO: 37877 - protein, 7 aa, synthetic construct
RGDLHRG

SEQ ID NO: 37878 - protein, 7 aa, synthetic construct
RGDLIEH

SEQ ID NO: 37879 - protein, 7 aa, synthetic construct
RGDLLAE

SEQ ID NO: 37880 - protein, 7 aa, synthetic construct
RGDLLSE

SEQ ID NO: 37881 - protein, 7 aa, synthetic construct
RGDLNSL

SEQ ID NO: 37882 - protein, 7 aa, synthetic construct
RGDLQFD

SEQ ID NO: 37883 - protein, 7 aa, synthetic construct
RGDATAQ

SEQ ID NO: 37884 - protein, 7 aa, synthetic construct
RGDLSII

SEQ ID NO: 37885 - protein, 7 aa, synthetic construct
RGDLSNE

SEQ ID NO: 37886 - protein, 7 aa, synthetic construct
RGDLTEG

SEQ ID NO: 37887 - protein, 7 aa, synthetic construct
RGDLTEV

SEQ ID NO: 37888 - protein, 7 aa, synthetic construct
RGDNDNN

SEQ ID NO: 37889 - protein, 7 aa, synthetic construct
RGDNEDH

SEQ ID NO: 37890 - protein, 7 aa, synthetic construct
RGDNEFI

SEQ ID NO: 37891 - protein, 7 aa, synthetic construct
RGDNENH

SEQ ID NO: 37892 - protein, 7 aa, synthetic construct
RGDNHEG

SEQ ID NO: 37893 - protein, 7 aa, synthetic construct
RGDNISE

SEQ ID NO: 37894 - protein, 7 aa, synthetic construct
RGDNKLA

SEQ ID NO: 37895 - protein, 7 aa, synthetic construct
RGDNLQD

SEQ ID NO: 37896 - protein, 7 aa, synthetic construct
RGDNNAA

SEQ ID NO: 37897 - protein, 7 aa, synthetic construct
RGDAVLI

SEQ ID NO: 37898 - protein, 7 aa, synthetic construct
RGDNSVD

SEQ ID NO: 37899 - protein, 7 aa, synthetic construct
RGDNTEG

SEQ ID NO: 37900 - protein, 7 aa, synthetic construct
RGDADKG

SEQ ID NO: 37901 - protein, 7 aa, synthetic construct
RGDNVIK

SEQ ID NO: 37902 - protein, 7 aa, synthetic construct
RGDNVTN

SEQ ID NO: 37903 - protein, 7 aa, synthetic construct
RGDQAAD

SEQ ID NO: 37904 - protein, 7 aa, synthetic construct
RGDQAED

SEQ ID NO: 37905 - protein, 7 aa, synthetic construct
RGDDAAI

SEQ ID NO: 37906 - protein, 7 aa, synthetic construct
RGDDADQ

SEQ ID NO: 37907 - protein, 7 aa, synthetic construct
RGDQDIR

SEQ ID NO: 37908 - protein, 7 aa, synthetic construct
RGDDAEQ

SEQ ID NO: 37909 - protein, 7 aa, synthetic construct
RGDDAFV

SEQ ID NO: 37910 - protein, 7 aa, synthetic construct
RGDQETD

SEQ ID NO: 37911 - protein, 7 aa, synthetic construct
RGDQEVN

SEQ ID NO: 37912 - protein, 7 aa, synthetic construct
RGDQFNL

SEQ ID NO: 37913 - protein, 7 aa, synthetic construct
RGDQIAT

SEQ ID NO: 37914 - protein, 7 aa, synthetic construct
RGDDAQL

SEQ ID NO: 37915 - protein, 7 aa, synthetic construct
RGDQLIN

SEQ ID NO: 37916 - protein, 7 aa, synthetic construct
RGDQQGQ

SEQ ID NO: 37917 - protein, 7 aa, synthetic construct
RGDQQIV

SEQ ID NO: 37918 - protein, 7 aa, synthetic construct
RGDQREG

SEQ ID NO: 37919 - protein, 7 aa, synthetic construct
RGDDDEE

SEQ ID NO: 37920 - protein, 7 aa, synthetic construct
RGDQTAE

SEQ ID NO: 37921 - protein, 7 aa, synthetic construct
RGDDDNL

SEQ ID NO: 37922 - protein, 7 aa, synthetic construct
RGDDDVD

SEQ ID NO: 37923 - protein, 7 aa, synthetic construct
RGDDEHE

SEQ ID NO: 37924 - protein, 7 aa, synthetic construct
RGDDEHL

SEQ ID NO: 37925 - protein, 7 aa, synthetic construct
RGDSEEA

SEQ ID NO: 37926 - protein, 7 aa, synthetic construct
RGDSFNF

SEQ ID NO: 37927 - protein, 7 aa, synthetic construct
RGDSHEE

SEQ ID NO: 37928 - protein, 7 aa, synthetic construct
RGDDFQE

SEQ ID NO: 37929 - protein, 7 aa, synthetic construct
RGDSISD

SEQ ID NO: 37930 - protein, 7 aa, synthetic construct
RGDSKLH

SEQ ID NO: 37931 - protein, 7 aa, synthetic construct
RGDSLEG

SEQ ID NO: 37932 - protein, 7 aa, synthetic construct
RGDSQHG

SEQ ID NO: 37933 - protein, 7 aa, synthetic construct
RGDSTAH

SEQ ID NO: 37934 - protein, 7 aa, synthetic construct
RGDSTEN

SEQ ID NO: 37935 - protein, 7 aa, synthetic construct
RGDSTIG

SEQ ID NO: 37936 - protein, 7 aa, synthetic construct
RGDDGIE

SEQ ID NO: 37937 - protein, 7 aa, synthetic construct
RGDTDAT

SEQ ID NO: 37938 - protein, 7 aa, synthetic construct
RGDTDLH

SEQ ID NO: 37939 - protein, 7 aa, synthetic construct
RGDTEHG

SEQ ID NO: 37940 - protein, 7 aa, synthetic construct
RGDTFQV

SEQ ID NO: 37941 - protein, 7 aa, synthetic construct
RGDTHAA

SEQ ID NO: 37942 - protein, 7 aa, synthetic construct
RGDTHDN

SEQ ID NO: 37943 - protein, 7 aa, synthetic construct
RGDTHTE

SEQ ID NO: 37944 - protein, 7 aa, synthetic construct
RGDTIFS

SEQ ID NO: 37945 - protein, 7 aa, synthetic construct
RGDTIGT

SEQ ID NO: 37946 - protein, 7 aa, synthetic construct
RGDTLNQ

SEQ ID NO: 37947 - protein, 7 aa, synthetic construct
RGDTNHQ

SEQ ID NO: 37948 - protein, 7 aa, synthetic construct
RGDTSKE

SEQ ID NO: 37949 - protein, 7 aa, synthetic construct
RGDTTGV

SEQ ID NO: 37950 - protein, 7 aa, synthetic construct
RGDTVEL

SEQ ID NO: 37951 - protein, 7 aa, synthetic construct
RGDTVFL

SEQ ID NO: 37952 - protein, 7 aa, synthetic construct
RGDVDDI

SEQ ID NO: 37953 - protein, 7 aa, synthetic construct
RGDVFTD

SEQ ID NO: 37954 - protein, 7 aa, synthetic construct
RGDVIDD

SEQ ID NO: 37955 - protein, 7 aa, synthetic construct
RGDVIDG

SEQ ID NO: 37956 - protein, 7 aa, synthetic construct
RGDVKDE

SEQ ID NO: 37957 - protein, 7 aa, synthetic construct
RGDAEEN

SEQ ID NO: 37958 - protein, 7 aa, synthetic construct
RGDVLDG

SEQ ID NO: 37959 - protein, 7 aa, synthetic construct
RGDVNLE

SEQ ID NO: 37960 - protein, 7 aa, synthetic construct
RGDVQFS

SEQ ID NO: 37961 - protein, 7 aa, synthetic construct
RGDVQLA

SEQ ID NO: 37962 - protein, 7 aa, synthetic construct
RGDVRFA

SEQ ID NO: 37963 - protein, 7 aa, synthetic construct
RGDVSDI

SEQ ID NO: 37964 - protein, 7 aa, synthetic construct
RGDVTDQ

SEQ ID NO: 37965 - protein, 7 aa, synthetic construct
RGDDKHA

SEQ ID NO: 37966 - protein, 7 aa, synthetic construct
RGDDKKG

SEQ ID NO: 37967 - protein, 7 aa, synthetic construct
RGDAELD

SEQ ID NO: 37968 - protein, 7 aa, synthetic construct
RGDDQTA

SEQ ID NO: 37969 - protein, 7 aa, synthetic construct
RGDDRLK

SEQ ID NO: 37970 - protein, 7 aa, synthetic construct
RGDDSVG

SEQ ID NO: 37971 - protein, 7 aa, synthetic construct
RGDDTVR

SEQ ID NO: 37972 - protein, 7 aa, synthetic construct
RGDDVRV

SEQ ID NO: 37973 - protein, 7 aa, synthetic construct
RGDEAAS

SEQ ID NO: 37974 - protein, 7 aa, synthetic construct
RGDEANG

SEQ ID NO: 37975 - protein, 7 aa, synthetic construct
RGDEDDI

SEQ ID NO: 37976 - protein, 7 aa, synthetic construct
RGDEDHK

SEQ ID NO: 37977 - protein, 7 aa, synthetic construct
RGDEFER

SEQ ID NO: 37978 - protein, 7 aa, synthetic construct
RGDEFIN

SEQ ID NO: 37979 - protein, 7 aa, synthetic construct
RGDEFKH

SEQ ID NO: 37980 - protein, 7 aa, synthetic construct
RGDEHDK

SEQ ID NO: 37981 - protein, 7 aa, synthetic construct
RGDEHEG

SEQ ID NO: 37982 - protein, 7 aa, synthetic construct
RGDEHEL

SEQ ID NO: 37983 - protein, 7 aa, synthetic construct
RGDEHIT

SEQ ID NO: 37984 - protein, 7 aa, synthetic construct
RGDEHVG

SEQ ID NO: 37985 - protein, 7 aa, synthetic construct
RGDEIDV

SEQ ID NO: 37986 - protein, 7 aa, synthetic construct
RGDEIIF

SEQ ID NO: 37987 - protein, 7 aa, synthetic construct
RGDELKH

SEQ ID NO: 37988 - protein, 7 aa, synthetic construct
RGDELTR

SEQ ID NO: 37989 - protein, 7 aa, synthetic construct
RGDENET

SEQ ID NO: 37990 - protein, 7 aa, synthetic construct
RGDENEV

SEQ ID NO: 37991 - protein, 7 aa, synthetic construct
RGDENIS

SEQ ID NO: 37992 - protein, 7 aa, synthetic construct
RGDENNK

SEQ ID NO: 37993 - protein, 7 aa, synthetic construct
RGDENQQ

SEQ ID NO: 37994 - protein, 7 aa, synthetic construct
RGDEQIR

SEQ ID NO: 37995 - protein, 7 aa, synthetic construct
RGDEQSS

SEQ ID NO: 37996 - protein, 7 aa, synthetic construct
RGDEQVT

SEQ ID NO: 37997 - protein, 7 aa, synthetic construct
RGDAGEN

SEQ ID NO: 37998 - protein, 7 aa, synthetic construct
RGDFALL

SEQ ID NO: 37999 - protein, 7 aa, synthetic construct
RGDFDLD

SEQ ID NO: 38000 - protein, 7 aa, synthetic construct
RGDFEQD

SEQ ID NO: 38001 - protein, 7 aa, synthetic construct
RGDFFII

SEQ ID NO: 38002 - protein, 7 aa, synthetic construct
RGDFLSD

SEQ ID NO: 38003 - protein, 7 aa, synthetic construct
RGDFQIQ

SEQ ID NO: 38004 - protein, 7 aa, synthetic construct
RGDFQRS

SEQ ID NO: 38005 - protein, 7 aa, synthetic construct
RGDFRDE

SEQ ID NO: 38006 - protein, 7 aa, synthetic construct
RGDFSEE

SEQ ID NO: 38007 - protein, 7 aa, synthetic construct
RGDFTLG

SEQ ID NO: 38008 - protein, 7 aa, synthetic construct
RGDGAEL

SEQ ID NO: 38009 - protein, 7 aa, synthetic construct
RGDGDQN

SEQ ID NO: 38010 - protein, 7 aa, synthetic construct
RGDGEDG

SEQ ID NO: 38011 - protein, 7 aa, synthetic construct
RGDGEIR

SEQ ID NO: 38012 - protein, 7 aa, synthetic construct
RGDGEKD

SEQ ID NO: 38013 - protein, 7 aa, synthetic construct
RGDGELL

SEQ ID NO: 38014 - protein, 7 aa, synthetic construct
RGDGERT

SEQ ID NO: 38015 - protein, 7 aa, synthetic construct
RGDGFFD

SEQ ID NO: 38016 - protein, 7 aa, synthetic construct
RGDAIHE

SEQ ID NO: 38017 - protein, 7 aa, synthetic construct
RGDGFQA

SEQ ID NO: 38018 - protein, 7 aa, synthetic construct
RGDAIIT

SEQ ID NO: 38019 - protein, 7 aa, synthetic construct
RGDAISV

SEQ ID NO: 38020 - protein, 7 aa, synthetic construct
RGDAKIS

SEQ ID NO: 38021 - protein, 7 aa, synthetic construct
RGDGVTT

SEQ ID NO: 38022 - protein, 7 aa, synthetic construct
RGDAKLL

SEQ ID NO: 38023 - protein, 7 aa, synthetic construct
RGDHDGG

SEQ ID NO: 38024 - protein, 7 aa, synthetic construct
RGDHDNH

SEQ ID NO: 38025 - protein, 7 aa, synthetic construct
RGDHDNQ

SEQ ID NO: 38026 - protein, 7 aa, synthetic construct
RGDHFEN

SEQ ID NO: 38027 - protein, 7 aa, synthetic construct
RGDHFFF

SEQ ID NO: 38028 - protein, 7 aa, synthetic construct
RGDHFTN

SEQ ID NO: 38029 - protein, 7 aa, synthetic construct
RGDHIDQ

SEQ ID NO: 38030 - protein, 7 aa, synthetic construct
RGDHIIA

SEQ ID NO: 38031 - protein, 7 aa, synthetic construct
RGDHITS

SEQ ID NO: 38032 - protein, 7 aa, synthetic construct
RGDALGD

SEQ ID NO: 38033 - protein, 7 aa, synthetic construct
RGDHNSA

SEQ ID NO: 38034 - protein, 7 aa, synthetic construct
RGDALQG

SEQ ID NO: 38035 - protein, 7 aa, synthetic construct
RGDAADG

SEQ ID NO: 38036 - protein, 7 aa, synthetic construct
RGDHVDE

SEQ ID NO: 38037 - protein, 7 aa, synthetic construct
RGDHVIS

SEQ ID NO: 38038 - protein, 7 aa, synthetic construct
RGDIDGN

SEQ ID NO: 38039 - protein, 7 aa, synthetic construct
RGDIDNF

SEQ ID NO: 38040 - protein, 7 aa, synthetic construct
RGDIEVF

SEQ ID NO: 38041 - protein, 7 aa, synthetic construct
RGDIFIF

SEQ ID NO: 38042 - protein, 7 aa, synthetic construct
RGDIFSA

SEQ ID NO: 38043 - protein, 7 aa, synthetic construct
RGDANSG

SEQ ID NO: 38044 - protein, 7 aa, synthetic construct
RGDIQKA

SEQ ID NO: 38045 - protein, 7 aa, synthetic construct
RGDIQQG

SEQ ID NO: 38046 - protein, 7 aa, synthetic construct
RGDIRVG

SEQ ID NO: 38047 - protein, 7 aa, synthetic construct
RGDISND

SEQ ID NO: 38048 - protein, 7 aa, synthetic construct
RGDITFH

SEQ ID NO: 38049 - protein, 7 aa, synthetic construct
RGDITHE

SEQ ID NO: 38050 - protein, 7 aa, synthetic construct
RGDIVID

SEQ ID NO: 38051 - protein, 7 aa, synthetic construct
RGDAQLK

SEQ ID NO: 38052 - protein, 7 aa, synthetic construct
RGDKAQG

SEQ ID NO: 38053 - protein, 7 aa, synthetic construct
RGDKEVF

SEQ ID NO: 38054 - protein, 7 aa, synthetic construct
RGDKHDH

SEQ ID NO: 38055 - protein, 7 aa, synthetic construct
RGDADDK

SEQ ID NO: 38056 - protein, 7 aa, synthetic construct
RGDKISD

SEQ ID NO: 38057 - protein, 7 aa, synthetic construct
RGDKKIE

SEQ ID NO: 38058 - protein, 7 aa, synthetic construct
RGDKLDS

SEQ ID NO: 38059 - protein, 7 aa, synthetic construct
RGDKNGG

SEQ ID NO: 38060 - protein, 7 aa, synthetic construct
RGDKNLE

SEQ ID NO: 38061 - protein, 7 aa, synthetic construct
RGDKRLD

SEQ ID NO: 38062 - protein, 7 aa, synthetic construct
RGDKSIA

SEQ ID NO: 38063 - protein, 7 aa, synthetic construct
RGDKTAS

SEQ ID NO: 38064 - protein, 7 aa, synthetic construct
RGDKTDL

SEQ ID NO: 38065 - protein, 7 aa, synthetic construct
RGDKTVA

SEQ ID NO: 38066 - protein, 7 aa, synthetic construct
RGDLDSQ

SEQ ID NO: 38067 - protein, 7 aa, synthetic construct
RGDLEAV

SEQ ID NO: 38068 - protein, 7 aa, synthetic construct
RGDLEDA

SEQ ID NO: 38069 - protein, 7 aa, synthetic construct
RGDLFER

SEQ ID NO: 38070 - protein, 7 aa, synthetic construct
RGDLFLK

SEQ ID NO: 38071 - protein, 7 aa, synthetic construct
RGDLGGF

SEQ ID NO: 38072 - protein, 7 aa, synthetic construct
RGDLQFE

SEQ ID NO: 38073 - protein, 7 aa, synthetic construct
RGDLSVL

SEQ ID NO: 38074 - protein, 7 aa, synthetic construct
RGDLTVN

SEQ ID NO: 38075 - protein, 7 aa, synthetic construct
RGDNAIT

SEQ ID NO: 38076 - protein, 7 aa, synthetic construct
RGDNDIT

SEQ ID NO: 38077 - protein, 7 aa, synthetic construct
RGDATQH

SEQ ID NO: 38078 - protein, 7 aa, synthetic construct
RGDNENK

SEQ ID NO: 38079 - protein, 7 aa, synthetic construct
RGDNFVI

SEQ ID NO: 38080 - protein, 7 aa, synthetic construct
RGDNIDK

SEQ ID NO: 38081 - protein, 7 aa, synthetic construct
RGDNKLN

SEQ ID NO: 38082 - protein, 7 aa, synthetic construct
RGDNLDA

SEQ ID NO: 38083 - protein, 7 aa, synthetic construct
RGDNNLN

SEQ ID NO: 38084 - protein, 7 aa, synthetic construct
RGDQDID

SEQ ID NO: 38085 - protein, 7 aa, synthetic construct
RGDQDQQ

SEQ ID NO: 38086 - protein, 7 aa, synthetic construct
RGDQETE

SEQ ID NO: 38087 - protein, 7 aa, synthetic construct
RGDDAGN

SEQ ID NO: 38088 - protein, 7 aa, synthetic construct
RGDQFEN

SEQ ID NO: 38089 - protein, 7 aa, synthetic construct
RGDAAEG

SEQ ID NO: 38090 - protein, 7 aa, synthetic construct
RGDQIFI

SEQ ID NO: 38091 - protein, 7 aa, synthetic construct
RGDQIVN

SEQ ID NO: 38092 - protein, 7 aa, synthetic construct
RGDQNGE

SEQ ID NO: 38093 - protein, 7 aa, synthetic construct
RGDAAEH

SEQ ID NO: 38094 - protein, 7 aa, synthetic construct
RGDQTDF

SEQ ID NO: 38095 - protein, 7 aa, synthetic construct
RGDDDIS

SEQ ID NO: 38096 - protein, 7 aa, synthetic construct
RGDRFRT

SEQ ID NO: 38097 - protein, 7 aa, synthetic construct
RGDDDTK

SEQ ID NO: 38098 - protein, 7 aa, synthetic construct
RGDRGGE

SEQ ID NO: 38099 - protein, 7 aa, synthetic construct
RGDRIIG

SEQ ID NO: 38100 - protein, 7 aa, synthetic construct
RGDSAGV

SEQ ID NO: 38101 - protein, 7 aa, synthetic construct
RGDSDGH

SEQ ID NO: 38102 - protein, 7 aa, synthetic construct
RGDSEHA

SEQ ID NO: 38103 - protein, 7 aa, synthetic construct
RGDSEIN

SEQ ID NO: 38104 - protein, 7 aa, synthetic construct
RGDSEQE

SEQ ID NO: 38105 - protein, 7 aa, synthetic construct
RGDSFAE

SEQ ID NO: 38106 - protein, 7 aa, synthetic construct
RGDSFDR

SEQ ID NO: 38107 - protein, 7 aa, synthetic construct
RGDSFGN

SEQ ID NO: 38108 - protein, 7 aa, synthetic construct
RGDDFID

SEQ ID NO: 38109 - protein, 7 aa, synthetic construct
RGDSILN

SEQ ID NO: 38110 - protein, 7 aa, synthetic construct
RGDSLDL

SEQ ID NO: 38111 - protein, 7 aa, synthetic construct
RGDDFTT

SEQ ID NO: 38112 - protein, 7 aa, synthetic construct
RGDSNIA

SEQ ID NO: 38113 - protein, 7 aa, synthetic construct
RGDDFVK

SEQ ID NO: 38114 - protein, 7 aa, synthetic construct
RGDSQDG

SEQ ID NO: 38115 - protein, 7 aa, synthetic construct
RGDSQFE

SEQ ID NO: 38116 - protein, 7 aa, synthetic construct
RGDSSLG

SEQ ID NO: 38117 - protein, 7 aa, synthetic construct
RGDSVND

SEQ ID NO: 38118 - protein, 7 aa, synthetic construct
RGDTATE

SEQ ID NO: 38119 - protein, 7 aa, synthetic construct
RGDTEHN

SEQ ID NO: 38120 - protein, 7 aa, synthetic construct
RGDTFIT

SEQ ID NO: 38121 - protein, 7 aa, synthetic construct
RGDTFTG

SEQ ID NO: 38122 - protein, 7 aa, synthetic construct
RGDDGTL

SEQ ID NO: 38123 - protein, 7 aa, synthetic construct
RGDTGKG

SEQ ID NO: 38124 - protein, 7 aa, synthetic construct
RGDTLGE

SEQ ID NO: 38125 - protein, 7 aa, synthetic construct
RGDTLHE

SEQ ID NO: 38126 - protein, 7 aa, synthetic construct
RGDTNDL

SEQ ID NO: 38127 - protein, 7 aa, synthetic construct
RGDTNIK

SEQ ID NO: 38128 - protein, 7 aa, synthetic construct
RGDTQDQ

SEQ ID NO: 38129 - protein, 7 aa, synthetic construct
RGDTQFE

SEQ ID NO: 38130 - protein, 7 aa, synthetic construct
RGDTQSV

SEQ ID NO: 38131 - protein, 7 aa, synthetic construct
RGDTSAF

SEQ ID NO: 38132 - protein, 7 aa, synthetic construct
RGDTSDH

SEQ ID NO: 38133 - protein, 7 aa, synthetic construct
RGDTSRG

SEQ ID NO: 38134 - protein, 7 aa, synthetic construct
RGDTSSD

SEQ ID NO: 38135 - protein, 7 aa, synthetic construct
RGDTSSN

SEQ ID NO: 38136 - protein, 7 aa, synthetic construct
RGDTTTH

SEQ ID NO: 38137 - protein, 7 aa, synthetic construct
RGDTTVG

SEQ ID NO: 38138 - protein, 7 aa, synthetic construct
RGDDHVR

SEQ ID NO: 38139 - protein, 7 aa, synthetic construct
RGDVDEV

SEQ ID NO: 38140 - protein, 7 aa, synthetic construct
RGDVDIT

SEQ ID NO: 38141 - protein, 7 aa, synthetic construct
RGDDIFI

SEQ ID NO: 38142 - protein, 7 aa, synthetic construct
RGDVIAA

SEQ ID NO: 38143 - protein, 7 aa, synthetic construct
RGDVIAE

SEQ ID NO: 38144 - protein, 7 aa, synthetic construct
RGDDINN

SEQ ID NO: 38145 - protein, 7 aa, synthetic construct
RGDDIRS

SEQ ID NO: 38146 - protein, 7 aa, synthetic construct
RGDVLQG

SEQ ID NO: 38147 - protein, 7 aa, synthetic construct
RGDDIVL

SEQ ID NO: 38148 - protein, 7 aa, synthetic construct
RGDDKAE

SEQ ID NO: 38149 - protein, 7 aa, synthetic construct
RGDDKEE

SEQ ID NO: 38150 - protein, 7 aa, synthetic construct
RGDVSDQ

SEQ ID NO: 38151 - protein, 7 aa, synthetic construct
RGDVSTD

SEQ ID NO: 38152 - protein, 7 aa, synthetic construct
RGDVTND

SEQ ID NO: 38153 - protein, 7 aa, synthetic construct
RGDDKID

SEQ ID NO: 38154 - protein, 7 aa, synthetic construct
RGDDKIL

SEQ ID NO: 38155 - protein, 7 aa, synthetic construct
RGDVVLS

SEQ ID NO: 38156 - protein, 7 aa, synthetic construct
RGDDLFA

SEQ ID NO: 38157 - protein, 7 aa, synthetic construct
RGDDLNL

SEQ ID NO: 38158 - protein, 7 aa, synthetic construct
RGDDLSN

SEQ ID NO: 38159 - protein, 7 aa, synthetic construct
RGDDQHS

SEQ ID NO: 38160 - protein, 7 aa, synthetic construct
RGDDQLI

SEQ ID NO: 38161 - protein, 7 aa, synthetic construct
RGDDREG

SEQ ID NO: 38162 - protein, 7 aa, synthetic construct
RGDDSDE

SEQ ID NO: 38163 - protein, 7 aa, synthetic construct
RGDDSEA

SEQ ID NO: 38164 - protein, 7 aa, synthetic construct
RGDDTHH

SEQ ID NO: 38165 - protein, 7 aa, synthetic construct
RGDDTQF

SEQ ID NO: 38166 - protein, 7 aa, synthetic construct
RGDDVAN

SEQ ID NO: 38167 - protein, 7 aa, synthetic construct
RGDEAHE

SEQ ID NO: 38168 - protein, 7 aa, synthetic construct
RGDEARA

SEQ ID NO: 38169 - protein, 7 aa, synthetic construct
RGDEDEN

SEQ ID NO: 38170 - protein, 7 aa, synthetic construct
RGDEDGD

SEQ ID NO: 38171 - protein, 7 aa, synthetic construct
RGDEDGG

SEQ ID NO: 38172 - protein, 7 aa, synthetic construct
RGDAFEV

SEQ ID NO: 38173 - protein, 7 aa, synthetic construct
RGDEEGE

SEQ ID NO: 38174 - protein, 7 aa, synthetic construct
RGDEEHD

SEQ ID NO: 38175 - protein, 7 aa, synthetic construct
RGDEEKA

SEQ ID NO: 38176 - protein, 7 aa, synthetic construct
RGDEETS

SEQ ID NO: 38177 - protein, 7 aa, synthetic construct
RGDEEVI

SEQ ID NO: 38178 - protein, 7 aa, synthetic construct
RGDEFEK

SEQ ID NO: 38179 - protein, 7 aa, synthetic construct
RGDEFSD

SEQ ID NO: 38180 - protein, 7 aa, synthetic construct
RGDAFIE

SEQ ID NO: 38181 - protein, 7 aa, synthetic construct
RGDEGLG

SEQ ID NO: 38182 - protein, 7 aa, synthetic construct
RGDEHAG

SEQ ID NO: 38183 - protein, 7 aa, synthetic construct
RGDEHID

SEQ ID NO: 38184 - protein, 7 aa, synthetic construct
RGDEIAG

SEQ ID NO: 38185 - protein, 7 aa, synthetic construct
RGDEIEI

SEQ ID NO: 38186 - protein, 7 aa, synthetic construct
RGDEIGH

SEQ ID NO: 38187 - protein, 7 aa, synthetic construct
RGDEIIN

SEQ ID NO: 38188 - protein, 7 aa, synthetic construct
RGDEKQA

SEQ ID NO: 38189 - protein, 7 aa, synthetic construct
RGDEKVF

SEQ ID NO: 38190 - protein, 7 aa, synthetic construct
RGDELQI

SEQ ID NO: 38191 - protein, 7 aa, synthetic construct
RGDELSH

SEQ ID NO: 38192 - protein, 7 aa, synthetic construct
RGDENAT

SEQ ID NO: 38193 - protein, 7 aa, synthetic construct
RGDENER

SEQ ID NO: 38194 - protein, 7 aa, synthetic construct
RGDENVV

SEQ ID NO: 38195 - protein, 7 aa, synthetic construct
RGDEQLQ

SEQ ID NO: 38196 - protein, 7 aa, synthetic construct
RGDEQSV

SEQ ID NO: 38197 - protein, 7 aa, synthetic construct
RGDERTG

SEQ ID NO: 38198 - protein, 7 aa, synthetic construct
RGDETFF

SEQ ID NO: 38199 - protein, 7 aa, synthetic construct
RGDETQD

SEQ ID NO: 38200 - protein, 7 aa, synthetic construct
RGDEVDR

SEQ ID NO: 38201 - protein, 7 aa, synthetic construct
RGDEVHH

SEQ ID NO: 38202 - protein, 7 aa, synthetic construct
RGDEVNE

SEQ ID NO: 38203 - protein, 7 aa, synthetic construct
RGDFATL

SEQ ID NO: 38204 - protein, 7 aa, synthetic construct
RGDFDSQ

SEQ ID NO: 38205 - protein, 7 aa, synthetic construct
RGDFDSS

SEQ ID NO: 38206 - protein, 7 aa, synthetic construct
RGDFEEE

SEQ ID NO: 38207 - protein, 7 aa, synthetic construct
RGDFELN

SEQ ID NO: 38208 - protein, 7 aa, synthetic construct
RGDFGDF

SEQ ID NO: 38209 - protein, 7 aa, synthetic construct
RGDFIDD

SEQ ID NO: 38210 - protein, 7 aa, synthetic construct
RGDFINE

SEQ ID NO: 38211 - protein, 7 aa, synthetic construct
RGDFNIK

SEQ ID NO: 38212 - protein, 7 aa, synthetic construct
RGDAHLH

SEQ ID NO: 38213 - protein, 7 aa, synthetic construct
RGDGDTN

SEQ ID NO: 38214 - protein, 7 aa, synthetic construct
RGDGDVA

SEQ ID NO: 38215 - protein, 7 aa, synthetic construct
RGDGFAN

SEQ ID NO: 38216 - protein, 7 aa, synthetic construct
RGDGFDE

SEQ ID NO: 38217 - protein, 7 aa, synthetic construct
RGDGFTG

SEQ ID NO: 38218 - protein, 7 aa, synthetic construct
RGDGHFE

SEQ ID NO: 38219 - protein, 7 aa, synthetic construct
RGDGHIK

SEQ ID NO: 38220 - protein, 7 aa, synthetic construct
RGDGIDG

SEQ ID NO: 38221 - protein, 7 aa, synthetic construct
RGDGITG

SEQ ID NO: 38222 - protein, 7 aa, synthetic construct
RGDGLFG

SEQ ID NO: 38223 - protein, 7 aa, synthetic construct
RGDGLVI

SEQ ID NO: 38224 - protein, 7 aa, synthetic construct
RGDAITT

SEQ ID NO: 38225 - protein, 7 aa, synthetic construct
RGDGQAE

SEQ ID NO: 38226 - protein, 7 aa, synthetic construct
RGDGQAT

SEQ ID NO: 38227 - protein, 7 aa, synthetic construct
RGDAKDE

SEQ ID NO: 38228 - protein, 7 aa, synthetic construct
RGDGTFE

SEQ ID NO: 38229 - protein, 7 aa, synthetic construct
RGDGVLV

SEQ ID NO: 38230 - protein, 7 aa, synthetic construct
RGDHALE

SEQ ID NO: 38231 - protein, 7 aa, synthetic construct
RGDHDFD

SEQ ID NO: 38232 - protein, 7 aa, synthetic construct
RGDHEDN

SEQ ID NO: 38233 - protein, 7 aa, synthetic construct
RGDHELK

SEQ ID NO: 38234 - protein, 7 aa, synthetic construct
RGDHEND

SEQ ID NO: 38235 - protein, 7 aa, synthetic construct
RGDHFII

SEQ ID NO: 38236 - protein, 7 aa, synthetic construct
RGDALEF

SEQ ID NO: 38237 - protein, 7 aa, synthetic construct
RGDHINE

SEQ ID NO: 38238 - protein, 7 aa, synthetic construct
RGDHKLA

SEQ ID NO: 38239 - protein, 7 aa, synthetic construct
RGDALGE

SEQ ID NO: 38240 - protein, 7 aa, synthetic construct
RGDHLAH

SEQ ID NO: 38241 - protein, 7 aa, synthetic construct
RGDHNEH

SEQ ID NO: 38242 - protein, 7 aa, synthetic construct
RGDHQFD

SEQ ID NO: 38243 - protein, 7 aa, synthetic construct
RGDALLV

SEQ ID NO: 38244 - protein, 7 aa, synthetic construct
RGDIAKD

SEQ ID NO: 38245 - protein, 7 aa, synthetic construct
RGDIDAA

SEQ ID NO: 38246 - protein, 7 aa, synthetic construct
RGDIDAV

SEQ ID NO: 38247 - protein, 7 aa, synthetic construct
RGDIDRG

SEQ ID NO: 38248 - protein, 7 aa, synthetic construct
RGDIEEH

SEQ ID NO: 38249 - protein, 7 aa, synthetic construct
RGDIELE

SEQ ID NO: 38250 - protein, 7 aa, synthetic construct
RGDIFQG

SEQ ID NO: 38251 - protein, 7 aa, synthetic construct
RGDIGDS

SEQ ID NO: 38252 - protein, 7 aa, synthetic construct
RGDIGSA

SEQ ID NO: 38253 - protein, 7 aa, synthetic construct
RGDANLF

SEQ ID NO: 38254 - protein, 7 aa, synthetic construct
RGDIIES

SEQ ID NO: 38255 - protein, 7 aa, synthetic construct
RGDIIET

SEQ ID NO: 38256 - protein, 7 aa, synthetic construct
RGDIIFD

SEQ ID NO: 38257 - protein, 7 aa, synthetic construct
RGDIKEN

SEQ ID NO: 38258 - protein, 7 aa, synthetic construct
RGDILAE

SEQ ID NO: 38259 - protein, 7 aa, synthetic construct
RGDILDI

SEQ ID NO: 38260 - protein, 7 aa, synthetic construct
RGDAQFA

SEQ ID NO: 38261 - protein, 7 aa, synthetic construct
RGDISEF

SEQ ID NO: 38262 - protein, 7 aa, synthetic construct
RGDAQGH

SEQ ID NO: 38263 - protein, 7 aa, synthetic construct
RGDITDT

SEQ ID NO: 38264 - protein, 7 aa, synthetic construct
RGDITEI

SEQ ID NO: 38265 - protein, 7 aa, synthetic construct
RGDIVEQ

SEQ ID NO: 38266 - protein, 7 aa, synthetic construct
RGDKALA

SEQ ID NO: 38267 - protein, 7 aa, synthetic construct
RGDKALG

SEQ ID NO: 38268 - protein, 7 aa, synthetic construct
RGDKAVN

SEQ ID NO: 38269 - protein, 7 aa, synthetic construct
RGDKDAT

SEQ ID NO: 38270 - protein, 7 aa, synthetic construct
RGDADAT

SEQ ID NO: 38271 - protein, 7 aa, synthetic construct
RGDKDRD

SEQ ID NO: 38272 - protein, 7 aa, synthetic construct
RGDKEVK

SEQ ID NO: 38273 - protein, 7 aa, synthetic construct
RGDKFDE

SEQ ID NO: 38274 - protein, 7 aa, synthetic construct
RGDKIAT

SEQ ID NO: 38275 - protein, 7 aa, synthetic construct
RGDKLIL

SEQ ID NO: 38276 - protein, 7 aa, synthetic construct
RGDARIG

SEQ ID NO: 38277 - protein, 7 aa, synthetic construct
RGDKSED

SEQ ID NO: 38278 - protein, 7 aa, synthetic construct
RGDKTNS

SEQ ID NO: 38279 - protein, 7 aa, synthetic construct
RGDKTRE

SEQ ID NO: 38280 - protein, 7 aa, synthetic construct
RGDKVAQ

SEQ ID NO: 38281 - protein, 7 aa, synthetic construct
RGDKVQE

SEQ ID NO: 38282 - protein, 7 aa, synthetic construct
RGDKVQG

SEQ ID NO: 38283 - protein, 7 aa, synthetic construct
RGDKVQH

SEQ ID NO: 38284 - protein, 7 aa, synthetic construct
RGDLAII

SEQ ID NO: 38285 - protein, 7 aa, synthetic construct
RGDLGEQ

SEQ ID NO: 38286 - protein, 7 aa, synthetic construct
RGDLHEH

SEQ ID NO: 38287 - protein, 7 aa, synthetic construct
RGDADFT

SEQ ID NO: 38288 - protein, 7 aa, synthetic construct
RGDLKQL

SEQ ID NO: 38289 - protein, 7 aa, synthetic construct
RGDLNIA

SEQ ID NO: 38290 - protein, 7 aa, synthetic construct
RGDLNTF

SEQ ID NO: 38291 - protein, 7 aa, synthetic construct
RGDLQFG

SEQ ID NO: 38292 - protein, 7 aa, synthetic construct
RGDLSLG

SEQ ID NO: 38293 - protein, 7 aa, synthetic construct
RGDLTVE

SEQ ID NO: 38294 - protein, 7 aa, synthetic construct
RGDLVRG

SEQ ID NO: 38295 - protein, 7 aa, synthetic construct
RGDNANA

SEQ ID NO: 38296 - protein, 7 aa, synthetic construct
RGDNDAA

SEQ ID NO: 38297 - protein, 7 aa, synthetic construct
RGDNDIS

SEQ ID NO: 38298 - protein, 7 aa, synthetic construct
RGDNDKR

SEQ ID NO: 38299 - protein, 7 aa, synthetic construct
RGDNFLH

SEQ ID NO: 38300 - protein, 7 aa, synthetic construct
RGDNHLN

SEQ ID NO: 38301 - protein, 7 aa, synthetic construct
RGDNIDF

SEQ ID NO: 38302 - protein, 7 aa, synthetic construct
RGDADIE

SEQ ID NO: 38303 - protein, 7 aa, synthetic construct
RGDNIIQ

SEQ ID NO: 38304 - protein, 7 aa, synthetic construct
RGDNKID

SEQ ID NO: 38305 - protein, 7 aa, synthetic construct
RGDNNDH

SEQ ID NO: 38306 - protein, 7 aa, synthetic construct
RGDNQAE

SEQ ID NO: 38307 - protein, 7 aa, synthetic construct
RGDNQGL

SEQ ID NO: 38308 - protein, 7 aa, synthetic construct
RGDAVSH

SEQ ID NO: 38309 - protein, 7 aa, synthetic construct
RGDNVFA

SEQ ID NO: 38310 - protein, 7 aa, synthetic construct
RGDNVLQ

SEQ ID NO: 38311 - protein, 7 aa, synthetic construct
RGDNVLT

SEQ ID NO: 38312 - protein, 7 aa, synthetic construct
RGDNVVE

SEQ ID NO: 38313 - protein, 7 aa, synthetic construct
RGDQAVF

SEQ ID NO: 38314 - protein, 7 aa, synthetic construct
RGDQDHH

SEQ ID NO: 38315 - protein, 7 aa, synthetic construct
RGDQEDN

SEQ ID NO: 38316 - protein, 7 aa, synthetic construct
RGDQEHE

SEQ ID NO: 38317 - protein, 7 aa, synthetic construct
RGDQISH

SEQ ID NO: 38318 - protein, 7 aa, synthetic construct
RGDQLQA

SEQ ID NO: 38319 - protein, 7 aa, synthetic construct
RGDQLSA

SEQ ID NO: 38320 - protein, 7 aa, synthetic construct
RGDDAVS

SEQ ID NO: 38321 - protein, 7 aa, synthetic construct
RGDQRIA

SEQ ID NO: 38322 - protein, 7 aa, synthetic construct
RGDDDFH

SEQ ID NO: 38323 - protein, 7 aa, synthetic construct
RGDQSSD

SEQ ID NO: 38324 - protein, 7 aa, synthetic construct
RGDQSVE

SEQ ID NO: 38325 - protein, 7 aa, synthetic construct
RGDQVDV

SEQ ID NO: 38326 - protein, 7 aa, synthetic construct
RGDREGA

SEQ ID NO: 38327 - protein, 7 aa, synthetic construct
RGDRFTG

SEQ ID NO: 38328 - protein, 7 aa, synthetic construct
RGDDEEQ

SEQ ID NO: 38329 - protein, 7 aa, synthetic construct
RGDDEHK

SEQ ID NO: 38330 - protein, 7 aa, synthetic construct
RGDDELK

SEQ ID NO: 38331 - protein, 7 aa, synthetic construct
RGDDELN

SEQ ID NO: 38332 - protein, 7 aa, synthetic construct
RGDADRK

SEQ ID NO: 38333 - protein, 7 aa, synthetic construct
RGDRTKE

SEQ ID NO: 38334 - protein, 7 aa, synthetic construct
RGDSDHH

SEQ ID NO: 38335 - protein, 7 aa, synthetic construct
RGDSDLG

SEQ ID NO: 38336 - protein, 7 aa, synthetic construct
RGDSDNS

SEQ ID NO: 38337 - protein, 7 aa, synthetic construct
RGDSEHE

SEQ ID NO: 38338 - protein, 7 aa, synthetic construct
RGDSEIT

SEQ ID NO: 38339 - protein, 7 aa, synthetic construct
RGDSFQF

SEQ ID NO: 38340 - protein, 7 aa, synthetic construct
RGDSGEQ

SEQ ID NO: 38341 - protein, 7 aa, synthetic construct
RGDSHFE

SEQ ID NO: 38342 - protein, 7 aa, synthetic construct
RGDSHLF

SEQ ID NO: 38343 - protein, 7 aa, synthetic construct
RGDSIDT

SEQ ID NO: 38344 - protein, 7 aa, synthetic construct
RGDSNIH

SEQ ID NO: 38345 - protein, 7 aa, synthetic construct
RGDSNLR

SEQ ID NO: 38346 - protein, 7 aa, synthetic construct
RGDSRES

SEQ ID NO: 38347 - protein, 7 aa, synthetic construct
RGDSTDE

SEQ ID NO: 38348 - protein, 7 aa, synthetic construct
RGDSTES

SEQ ID NO: 38349 - protein, 7 aa, synthetic construct
RGDTAAT

SEQ ID NO: 38350 - protein, 7 aa, synthetic construct
RGDTAKG

SEQ ID NO: 38351 - protein, 7 aa, synthetic construct
RGDTDTA

SEQ ID NO: 38352 - protein, 7 aa, synthetic construct
RGDTEET

SEQ ID NO: 38353 - protein, 7 aa, synthetic construct
RGDTEQA

SEQ ID NO: 38354 - protein, 7 aa, synthetic construct
RGDTFFH

SEQ ID NO: 38355 - protein, 7 aa, synthetic construct
RGDTFID

SEQ ID NO: 38356 - protein, 7 aa, synthetic construct
RGDTHHD

SEQ ID NO: 38357 - protein, 7 aa, synthetic construct
RGDTHKA

SEQ ID NO: 38358 - protein, 7 aa, synthetic construct
RGDTIGH

SEQ ID NO: 38359 - protein, 7 aa, synthetic construct
RGDDHDV

SEQ ID NO: 38360 - protein, 7 aa, synthetic construct
RGDDHFE

SEQ ID NO: 38361 - protein, 7 aa, synthetic construct
RGDTKEA

SEQ ID NO: 38362 - protein, 7 aa, synthetic construct
RGDTKVD

SEQ ID NO: 38363 - protein, 7 aa, synthetic construct
RGDTNAT

SEQ ID NO: 38364 - protein, 7 aa, synthetic construct
RGDDHKS

SEQ ID NO: 38365 - protein, 7 aa, synthetic construct
RGDTQHE

SEQ ID NO: 38366 - protein, 7 aa, synthetic construct
RGDTSDN

SEQ ID NO: 38367 - protein, 7 aa, synthetic construct
RGDTSLE

SEQ ID NO: 38368 - protein, 7 aa, synthetic construct
RGDTVNK

SEQ ID NO: 38369 - protein, 7 aa, synthetic construct
RGDVDGS

SEQ ID NO: 38370 - protein, 7 aa, synthetic construct
RGDVDQA

SEQ ID NO: 38371 - protein, 7 aa, synthetic construct
RGDVDTT

SEQ ID NO: 38372 - protein, 7 aa, synthetic construct
RGDVEAI

SEQ ID NO: 38373 - protein, 7 aa, synthetic construct
RGDVEEE

SEQ ID NO: 38374 - protein, 7 aa, synthetic construct
RGDDIFR

SEQ ID NO: 38375 - protein, 7 aa, synthetic construct
RGDVFGA

SEQ ID NO: 38376 - protein, 7 aa, synthetic construct
RGDVFIK

SEQ ID NO: 38377 - protein, 7 aa, synthetic construct
RGDVFSF

SEQ ID NO: 38378 - protein, 7 aa, synthetic construct
RGDVGRS

SEQ ID NO: 38379 - protein, 7 aa, synthetic construct
RGDVNLD

SEQ ID NO: 38380 - protein, 7 aa, synthetic construct
RGDVNSV

SEQ ID NO: 38381 - protein, 7 aa, synthetic construct
RGDVQFA

SEQ ID NO: 38382 - protein, 7 aa, synthetic construct
RGDVQQI

SEQ ID NO: 38383 - protein, 7 aa, synthetic construct
RGDVSED

SEQ ID NO: 38384 - protein, 7 aa, synthetic construct
RGDVTDH

SEQ ID NO: 38385 - protein, 7 aa, synthetic construct
RGDVTVN

SEQ ID NO: 38386 - protein, 7 aa, synthetic construct
RGDVVTD

SEQ ID NO: 38387 - protein, 7 aa, synthetic construct
RGDAEGD

SEQ ID NO: 38388 - protein, 7 aa, synthetic construct
RGDDLDK

SEQ ID NO: 38389 - protein, 7 aa, synthetic construct
RGDDLIL

SEQ ID NO: 38390 - protein, 7 aa, synthetic construct
RGDAEHQ

SEQ ID NO: 38391 - protein, 7 aa, synthetic construct
RGDDLVH

SEQ ID NO: 38392 - protein, 7 aa, synthetic construct
RGDAEKA

SEQ ID NO: 38393 - protein, 7 aa, synthetic construct
RGDDQFS

SEQ ID NO: 38394 - protein, 7 aa, synthetic construct
RGDDRRF

SEQ ID NO: 38395 - protein, 7 aa, synthetic construct
RGDDSIE

SEQ ID NO: 38396 - protein, 7 aa, synthetic construct
RGDDSIH

SEQ ID NO: 38397 - protein, 7 aa, synthetic construct
RGDDSSQ

SEQ ID NO: 38398 - protein, 7 aa, synthetic construct
RGDDTHE

SEQ ID NO: 38399 - protein, 7 aa, synthetic construct
RGDDTVV

SEQ ID NO: 38400 - protein, 7 aa, synthetic construct
RGDDVQF

SEQ ID NO: 38401 - protein, 7 aa, synthetic construct
RGDEDIL

SEQ ID NO: 38402 - protein, 7 aa, synthetic construct
RGDEFSE

SEQ ID NO: 38403 - protein, 7 aa, synthetic construct
RGDEGAF

SEQ ID NO: 38404 - protein, 7 aa, synthetic construct
RGDEGDS

SEQ ID NO: 38405 - protein, 7 aa, synthetic construct
RGDEGQN

SEQ ID NO: 38406 - protein, 7 aa, synthetic construct
RGDEIGG

SEQ ID NO: 38407 - protein, 7 aa, synthetic construct
RGDEIHL

SEQ ID NO: 38408 - protein, 7 aa, synthetic construct
RGDEQKS

SEQ ID NO: 38409 - protein, 7 aa, synthetic construct
RGDESEG

SEQ ID NO: 38410 - protein, 7 aa, synthetic construct
RGDETAD

SEQ ID NO: 38411 - protein, 7 aa, synthetic construct
RGDEVEQ

SEQ ID NO: 38412 - protein, 7 aa, synthetic construct
RGDEVQH

SEQ ID NO: 38413 - protein, 7 aa, synthetic construct
RGDFADQ

SEQ ID NO: 38414 - protein, 7 aa, synthetic construct
RGDFDEE

SEQ ID NO: 38415 - protein, 7 aa, synthetic construct
RGDFFAD

SEQ ID NO: 38416 - protein, 7 aa, synthetic construct
RGDFFSD

SEQ ID NO: 38417 - protein, 7 aa, synthetic construct
RGDFHIT

SEQ ID NO: 38418 - protein, 7 aa, synthetic construct
RGDAHIH

SEQ ID NO: 38419 - protein, 7 aa, synthetic construct
RGDAHKA

SEQ ID NO: 38420 - protein, 7 aa, synthetic construct
RGDFNSA

SEQ ID NO: 38421 - protein, 7 aa, synthetic construct
RGDFQLQ

SEQ ID NO: 38422 - protein, 7 aa, synthetic construct
RGDFSDD

SEQ ID NO: 38423 - protein, 7 aa, synthetic construct
RGDFTDA

SEQ ID NO: 38424 - protein, 7 aa, synthetic construct
RGDGDDV

SEQ ID NO: 38425 - protein, 7 aa, synthetic construct
RGDGDLG

SEQ ID NO: 38426 - protein, 7 aa, synthetic construct
RGDGEGR

SEQ ID NO: 38427 - protein, 7 aa, synthetic construct
RGDGEHK

SEQ ID NO: 38428 - protein, 7 aa, synthetic construct
RGDGETD

SEQ ID NO: 38429 - protein, 7 aa, synthetic construct
RGDGHKG

SEQ ID NO: 38430 - protein, 7 aa, synthetic construct
RGDGHVN

SEQ ID NO: 38431 - protein, 7 aa, synthetic construct
RGDGIGG

SEQ ID NO: 38432 - protein, 7 aa, synthetic construct
RGDGIQA

SEQ ID NO: 38433 - protein, 7 aa, synthetic construct
RGDGKEE

SEQ ID NO: 38434 - protein, 7 aa, synthetic construct
RGDAKDG

SEQ ID NO: 38435 - protein, 7 aa, synthetic construct
RGDGVFL

SEQ ID NO: 38436 - protein, 7 aa, synthetic construct
RGDGVLT

SEQ ID NO: 38437 - protein, 7 aa, synthetic construct
RGDHADL

SEQ ID NO: 38438 - protein, 7 aa, synthetic construct
RGDHDDN

SEQ ID NO: 38439 - protein, 7 aa, synthetic construct
RGDHESV

SEQ ID NO: 38440 - protein, 7 aa, synthetic construct
RGDHFFG

SEQ ID NO: 38441 - protein, 7 aa, synthetic construct
RGDHFVT

SEQ ID NO: 38442 - protein, 7 aa, synthetic construct
RGDHHEG

SEQ ID NO: 38443 - protein, 7 aa, synthetic construct
RGDHHTS

SEQ ID NO: 38444 - protein, 7 aa, synthetic construct
RGDHIEN

SEQ ID NO: 38445 - protein, 7 aa, synthetic construct
RGDALED

SEQ ID NO: 38446 - protein, 7 aa, synthetic construct
RGDHQDA

SEQ ID NO: 38447 - protein, 7 aa, synthetic construct
RGDHQLF

SEQ ID NO: 38448 - protein, 7 aa, synthetic construct
RGDHQVS

SEQ ID NO: 38449 - protein, 7 aa, synthetic construct
RGDHREA

SEQ ID NO: 38450 - protein, 7 aa, synthetic construct
RGDIDFD

SEQ ID NO: 38451 - protein, 7 aa, synthetic construct
RGDIDQG

SEQ ID NO: 38452 - protein, 7 aa, synthetic construct
RGDIEDN

SEQ ID NO: 38453 - protein, 7 aa, synthetic construct
RGDIETE

SEQ ID NO: 38454 - protein, 7 aa, synthetic construct
RGDIIDA

SEQ ID NO: 38455 - protein, 7 aa, synthetic construct
RGDIKNA

SEQ ID NO: 38456 - protein, 7 aa, synthetic construct
RGDILQS

SEQ ID NO: 38457 - protein, 7 aa, synthetic construct
RGDIRIG

SEQ ID NO: 38458 - protein, 7 aa, synthetic construct
RGDISVG

SEQ ID NO: 38459 - protein, 7 aa, synthetic construct
RGDITGD

SEQ ID NO: 38460 - protein, 7 aa, synthetic construct
RGDITNN

SEQ ID NO: 38461 - protein, 7 aa, synthetic construct
RGDITVE

SEQ ID NO: 38462 - protein, 7 aa, synthetic construct
RGDITVN

SEQ ID NO: 38463 - protein, 7 aa, synthetic construct
RGDIVIS

SEQ ID NO: 38464 - protein, 7 aa, synthetic construct
RGDIVSE

SEQ ID NO: 38465 - protein, 7 aa, synthetic construct
RGDKDEQ

SEQ ID NO: 38466 - protein, 7 aa, synthetic construct
RGDKDHG

SEQ ID NO: 38467 - protein, 7 aa, synthetic construct
RGDKDIG

SEQ ID NO: 38468 - protein, 7 aa, synthetic construct
RGDKFEA

SEQ ID NO: 38469 - protein, 7 aa, synthetic construct
RGDKFKE

SEQ ID NO: 38470 - protein, 7 aa, synthetic construct
RGDKHLS

SEQ ID NO: 38471 - protein, 7 aa, synthetic construct
RGDKKEG

SEQ ID NO: 38472 - protein, 7 aa, synthetic construct
RGDKNLD

SEQ ID NO: 38473 - protein, 7 aa, synthetic construct
RGDKTEA

SEQ ID NO: 38474 - protein, 7 aa, synthetic construct
RGDKVAN

SEQ ID NO: 38475 - protein, 7 aa, synthetic construct
RGDLDFH

SEQ ID NO: 38476 - protein, 7 aa, synthetic construct
RGDLDVH

SEQ ID NO: 38477 - protein, 7 aa, synthetic construct
RGDASHG

SEQ ID NO: 38478 - protein, 7 aa, synthetic construct
RGDADFL

SEQ ID NO: 38479 - protein, 7 aa, synthetic construct
RGDASKG

SEQ ID NO: 38480 - protein, 7 aa, synthetic construct
RGDLKDG

SEQ ID NO: 38481 - protein, 7 aa, synthetic construct
RGDLNST

SEQ ID NO: 38482 - protein, 7 aa, synthetic construct
RGDATHG

SEQ ID NO: 38483 - protein, 7 aa, synthetic construct
RGDLVFE

SEQ ID NO: 38484 - protein, 7 aa, synthetic construct
RGDLVIF

SEQ ID NO: 38485 - protein, 7 aa, synthetic construct
RGDNFIA

SEQ ID NO: 38486 - protein, 7 aa, synthetic construct
RGDNFVF

SEQ ID NO: 38487 - protein, 7 aa, synthetic construct
RGDNHIQ

SEQ ID NO: 38488 - protein, 7 aa, synthetic construct
RGDNKAE

SEQ ID NO: 38489 - protein, 7 aa, synthetic construct
RGDNKIQ

SEQ ID NO: 38490 - protein, 7 aa, synthetic construct
RGDNKQD

SEQ ID NO: 38491 - protein, 7 aa, synthetic construct
RGDAVIF

SEQ ID NO: 38492 - protein, 7 aa, synthetic construct
RGDNQGD

SEQ ID NO: 38493 - protein, 7 aa, synthetic construct
RGDNQLA

SEQ ID NO: 38494 - protein, 7 aa, synthetic construct
RGDAVNA

SEQ ID NO: 38495 - protein, 7 aa, synthetic construct
RGDNSKI

SEQ ID NO: 38496 - protein, 7 aa, synthetic construct
RGDNTNE

SEQ ID NO: 38497 - protein, 7 aa, synthetic construct
RGDQADQ

SEQ ID NO: 38498 - protein, 7 aa, synthetic construct
RGDQDNE

SEQ ID NO: 38499 - protein, 7 aa, synthetic construct
RGDQEEH

SEQ ID NO: 38500 - protein, 7 aa, synthetic construct
RGDQEKG

SEQ ID NO: 38501 - protein, 7 aa, synthetic construct
RGDQFVA

SEQ ID NO: 38502 - protein, 7 aa, synthetic construct
RGDQILG

SEQ ID NO: 38503 - protein, 7 aa, synthetic construct
RGDQIVH

SEQ ID NO: 38504 - protein, 7 aa, synthetic construct
RGDQKLN

SEQ ID NO: 38505 - protein, 7 aa, synthetic construct
RGDQLGE

SEQ ID NO: 38506 - protein, 7 aa, synthetic construct
RGDQVDR

SEQ ID NO: 38507 - protein, 7 aa, synthetic construct
RGDRDSD

SEQ ID NO: 38508 - protein, 7 aa, synthetic construct
RGDDEDL

SEQ ID NO: 38509 - protein, 7 aa, synthetic construct
RGDRIRD

SEQ ID NO: 38510 - protein, 7 aa, synthetic construct
RGDDEID

SEQ ID NO: 38511 - protein, 7 aa, synthetic construct
RGDDEST

SEQ ID NO: 38512 - protein, 7 aa, synthetic construct
RGDSDDH

SEQ ID NO: 38513 - protein, 7 aa, synthetic construct
RGDSDES

SEQ ID NO: 38514 - protein, 7 aa, synthetic construct
RGDSDTH

SEQ ID NO: 38515 - protein, 7 aa, synthetic construct
RGDDFGF

SEQ ID NO: 38516 - protein, 7 aa, synthetic construct
RGDSEVG

SEQ ID NO: 38517 - protein, 7 aa, synthetic construct
RGDSFDS

SEQ ID NO: 38518 - protein, 7 aa, synthetic construct
RGDSFIN

SEQ ID NO: 38519 - protein, 7 aa, synthetic construct
RGDSFLQ

SEQ ID NO: 38520 - protein, 7 aa, synthetic construct
RGDSIDH

SEQ ID NO: 38521 - protein, 7 aa, synthetic construct
RGDDFQF

SEQ ID NO: 38522 - protein, 7 aa, synthetic construct
RGDSLDF

SEQ ID NO: 38523 - protein, 7 aa, synthetic construct
RGDSLEQ

SEQ ID NO: 38524 - protein, 7 aa, synthetic construct
RGDDFVA

SEQ ID NO: 38525 - protein, 7 aa, synthetic construct
RGDSNLA

SEQ ID NO: 38526 - protein, 7 aa, synthetic construct
RGDSSLA

SEQ ID NO: 38527 - protein, 7 aa, synthetic construct
RGDSTAK

SEQ ID NO: 38528 - protein, 7 aa, synthetic construct
RGDSTDA

SEQ ID NO: 38529 - protein, 7 aa, synthetic construct
RGDSTHD

SEQ ID NO: 38530 - protein, 7 aa, synthetic construct
RGDDGIF

SEQ ID NO: 38531 - protein, 7 aa, synthetic construct
RGDSVIH

SEQ ID NO: 38532 - protein, 7 aa, synthetic construct
RGDTDSV

SEQ ID NO: 38533 - protein, 7 aa, synthetic construct
RGDTDVF

SEQ ID NO: 38534 - protein, 7 aa, synthetic construct
RGDTEEV

SEQ ID NO: 38535 - protein, 7 aa, synthetic construct
RGDTEHV

SEQ ID NO: 38536 - protein, 7 aa, synthetic construct
RGDTEVA

SEQ ID NO: 38537 - protein, 7 aa, synthetic construct
RGDTFFD

SEQ ID NO: 38538 - protein, 7 aa, synthetic construct
RGDTGFS

SEQ ID NO: 38539 - protein, 7 aa, synthetic construct
RGDTGHG

SEQ ID NO: 38540 - protein, 7 aa, synthetic construct
RGDTGSA

SEQ ID NO: 38541 - protein, 7 aa, synthetic construct
RGDTHDR

SEQ ID NO: 38542 - protein, 7 aa, synthetic construct
RGDTNEV

SEQ ID NO: 38543 - protein, 7 aa, synthetic construct
RGDTNQN

SEQ ID NO: 38544 - protein, 7 aa, synthetic construct
RGDTQFQ

SEQ ID NO: 38545 - protein, 7 aa, synthetic construct
RGDTQKF

SEQ ID NO: 38546 - protein, 7 aa, synthetic construct
RGDTSFN

SEQ ID NO: 38547 - protein, 7 aa, synthetic construct
RGDDHRA

SEQ ID NO: 38548 - protein, 7 aa, synthetic construct
RGDTSLA

SEQ ID NO: 38549 - protein, 7 aa, synthetic construct
RGDVDDT

SEQ ID NO: 38550 - protein, 7 aa, synthetic construct
RGDVDEK

SEQ ID NO: 38551 - protein, 7 aa, synthetic construct
RGDDIEG

SEQ ID NO: 38552 - protein, 7 aa, synthetic construct
RGDDIEI

SEQ ID NO: 38553 - protein, 7 aa, synthetic construct
RGDVEAN

SEQ ID NO: 38554 - protein, 7 aa, synthetic construct
RGDVFAK

SEQ ID NO: 38555 - protein, 7 aa, synthetic construct
RGDVFNH

SEQ ID NO: 38556 - protein, 7 aa, synthetic construct
RGDVFNS

SEQ ID NO: 38557 - protein, 7 aa, synthetic construct
RGDVGDG

SEQ ID NO: 38558 - protein, 7 aa, synthetic construct
RGDDIIE

SEQ ID NO: 38559 - protein, 7 aa, synthetic construct
RGDDKNR

SEQ ID NO: 38560 - protein, 7 aa, synthetic construct
RGDDKQT

SEQ ID NO: 38561 - protein, 7 aa, synthetic construct
RGDDLSQ

SEQ ID NO: 38562 - protein, 7 aa, synthetic construct
RGDDNEG

SEQ ID NO: 38563 - protein, 7 aa, synthetic construct
RGDDNIS

SEQ ID NO: 38564 - protein, 7 aa, synthetic construct
RGDDNKA

SEQ ID NO: 38565 - protein, 7 aa, synthetic construct
RGDDQGA

SEQ ID NO: 38566 - protein, 7 aa, synthetic construct
RGDDQNV

SEQ ID NO: 38567 - protein, 7 aa, synthetic construct
RGDDREH

SEQ ID NO: 38568 - protein, 7 aa, synthetic construct
RGDDRLT

SEQ ID NO: 38569 - protein, 7 aa, synthetic construct
RGDDTAK

SEQ ID NO: 38570 - protein, 7 aa, synthetic construct
RGDDVKA

SEQ ID NO: 38571 - protein, 7 aa, synthetic construct
RGDDVSG

SEQ ID NO: 38572 - protein, 7 aa, synthetic construct
RGDEANR

SEQ ID NO: 38573 - protein, 7 aa, synthetic construct
RGDEAQF

SEQ ID NO: 38574 - protein, 7 aa, synthetic construct
RGDEATL

SEQ ID NO: 38575 - protein, 7 aa, synthetic construct
RGDEDAG

SEQ ID NO: 38576 - protein, 7 aa, synthetic construct
RGDEDFA

SEQ ID NO: 38577 - protein, 7 aa, synthetic construct
RGDEDLI

SEQ ID NO: 38578 - protein, 7 aa, synthetic construct
RGDEDQQ

SEQ ID NO: 38579 - protein, 7 aa, synthetic construct
RGDEDTI

SEQ ID NO: 38580 - protein, 7 aa, synthetic construct
RGDEEIS

SEQ ID NO: 38581 - protein, 7 aa, synthetic construct
RGDEFNG

SEQ ID NO: 38582 - protein, 7 aa, synthetic construct
RGDEGND

SEQ ID NO: 38583 - protein, 7 aa, synthetic construct
RGDEGNG

SEQ ID NO: 38584 - protein, 7 aa, synthetic construct
RGDEHDV

SEQ ID NO: 38585 - protein, 7 aa, synthetic construct
RGDEHQN

SEQ ID NO: 38586 - protein, 7 aa, synthetic construct
RGDEIKE

SEQ ID NO: 38587 - protein, 7 aa, synthetic construct
RGDAFQD

SEQ ID NO: 38588 - protein, 7 aa, synthetic construct
RGDEISD

SEQ ID NO: 38589 - protein, 7 aa, synthetic construct
RGDEKDV

SEQ ID NO: 38590 - protein, 7 aa, synthetic construct
RGDEKIS

SEQ ID NO: 38591 - protein, 7 aa, synthetic construct
RGDELFE

SEQ ID NO: 38592 - protein, 7 aa, synthetic construct
RGDENRH

SEQ ID NO: 38593 - protein, 7 aa, synthetic construct
RGDENTE

SEQ ID NO: 38594 - protein, 7 aa, synthetic construct
RGDERGG

SEQ ID NO: 38595 - protein, 7 aa, synthetic construct
RGDESAH

SEQ ID NO: 38596 - protein, 7 aa, synthetic construct
RGDESDQ

SEQ ID NO: 38597 - protein, 7 aa, synthetic construct
RGDESER

SEQ ID NO: 38598 - protein, 7 aa, synthetic construct
RGDESNQ

SEQ ID NO: 38599 - protein, 7 aa, synthetic construct
RGDETDI

SEQ ID NO: 38600 - protein, 7 aa, synthetic construct
RGDETFK

SEQ ID NO: 38601 - protein, 7 aa, synthetic construct
RGDETIV

SEQ ID NO: 38602 - protein, 7 aa, synthetic construct
RGDEVAT

SEQ ID NO: 38603 - protein, 7 aa, synthetic construct
RGDFAIL

SEQ ID NO: 38604 - protein, 7 aa, synthetic construct
RGDFDEH

SEQ ID NO: 38605 - protein, 7 aa, synthetic construct
RGDFFDT

SEQ ID NO: 38606 - protein, 7 aa, synthetic construct
RGDFNET

SEQ ID NO: 38607 - protein, 7 aa, synthetic construct
RGDAHSE

SEQ ID NO: 38608 - protein, 7 aa, synthetic construct
RGDFVGE

SEQ ID NO: 38609 - protein, 7 aa, synthetic construct
RGDAIGS

SEQ ID NO: 38610 - protein, 7 aa, synthetic construct
RGDGHFG

SEQ ID NO: 38611 - protein, 7 aa, synthetic construct
RGDGIID

SEQ ID NO: 38612 - protein, 7 aa, synthetic construct
RGDGINE

SEQ ID NO: 38613 - protein, 7 aa, synthetic construct
RGDGITD

SEQ ID NO: 38614 - protein, 7 aa, synthetic construct
RGDGIVA

SEQ ID NO: 38615 - protein, 7 aa, synthetic construct
RGDGKLQ

SEQ ID NO: 38616 - protein, 7 aa, synthetic construct
RGDAAQS

SEQ ID NO: 38617 - protein, 7 aa, synthetic construct
RGDGTAH

SEQ ID NO: 38618 - protein, 7 aa, synthetic construct
RGDGTDG

SEQ ID NO: 38619 - protein, 7 aa, synthetic construct
RGDGTFA

SEQ ID NO: 38620 - protein, 7 aa, synthetic construct
RGDGVIK

SEQ ID NO: 38621 - protein, 7 aa, synthetic construct
RGDHAVG

SEQ ID NO: 38622 - protein, 7 aa, synthetic construct
RGDHDDK

SEQ ID NO: 38623 - protein, 7 aa, synthetic construct
RGDHDDS

SEQ ID NO: 38624 - protein, 7 aa, synthetic construct
RGDHDKA

SEQ ID NO: 38625 - protein, 7 aa, synthetic construct
RGDHDQG

SEQ ID NO: 38626 - protein, 7 aa, synthetic construct
RGDAKQA

SEQ ID NO: 38627 - protein, 7 aa, synthetic construct
RGDHFGA

SEQ ID NO: 38628 - protein, 7 aa, synthetic construct
RGDHGEF

SEQ ID NO: 38629 - protein, 7 aa, synthetic construct
RGDHHRD

SEQ ID NO: 38630 - protein, 7 aa, synthetic construct
RGDHIEA

SEQ ID NO: 38631 - protein, 7 aa, synthetic construct
RGDHISN

SEQ ID NO: 38632 - protein, 7 aa, synthetic construct
RGDHKHG

SEQ ID NO: 38633 - protein, 7 aa, synthetic construct
RGDHKIN

SEQ ID NO: 38634 - protein, 7 aa, synthetic construct
RGDALGF

SEQ ID NO: 38635 - protein, 7 aa, synthetic construct
RGDHNET

SEQ ID NO: 38636 - protein, 7 aa, synthetic construct
RGDHNIQ

SEQ ID NO: 38637 - protein, 7 aa, synthetic construct
RGDHNVN

SEQ ID NO: 38638 - protein, 7 aa, synthetic construct
RGDHQEE

SEQ ID NO: 38639 - protein, 7 aa, synthetic construct
RGDALNS

SEQ ID NO: 38640 - protein, 7 aa, synthetic construct
RGDALQF

SEQ ID NO: 38641 - protein, 7 aa, synthetic construct
RGDANAK

SEQ ID NO: 38642 - protein, 7 aa, synthetic construct
RGDIDQF

SEQ ID NO: 38643 - protein, 7 aa, synthetic construct
RGDIFRE

SEQ ID NO: 38644 - protein, 7 aa, synthetic construct
RGDIGHE

SEQ ID NO: 38645 - protein, 7 aa, synthetic construct
RGDIHDA

SEQ ID NO: 38646 - protein, 7 aa, synthetic construct
RGDIHDI

SEQ ID NO: 38647 - protein, 7 aa, synthetic construct
RGDIIDN

SEQ ID NO: 38648 - protein, 7 aa, synthetic construct
RGDILLQ

SEQ ID NO: 38649 - protein, 7 aa, synthetic construct
RGDINIF

SEQ ID NO: 38650 - protein, 7 aa, synthetic construct
RGDIRAE

SEQ ID NO: 38651 - protein, 7 aa, synthetic construct
RGDISEA

SEQ ID NO: 38652 - protein, 7 aa, synthetic construct
RGDKDRS

SEQ ID NO: 38653 - protein, 7 aa, synthetic construct
RGDAQQE

SEQ ID NO: 38654 - protein, 7 aa, synthetic construct
RGDKENG

SEQ ID NO: 38655 - protein, 7 aa, synthetic construct
RGDKGQE

SEQ ID NO: 38656 - protein, 7 aa, synthetic construct
RGDKINE

SEQ ID NO: 38657 - protein, 7 aa, synthetic construct
RGDKQDD

SEQ ID NO: 38658 - protein, 7 aa, synthetic construct
RGDKTFG

SEQ ID NO: 38659 - protein, 7 aa, synthetic construct
RGDKVEA

SEQ ID NO: 38660 - protein, 7 aa, synthetic construct
RGDLDLE

SEQ ID NO: 38661 - protein, 7 aa, synthetic construct
RGDLELE

SEQ ID NO: 38662 - protein, 7 aa, synthetic construct
RGDLGLI

SEQ ID NO: 38663 - protein, 7 aa, synthetic construct
RGDLIQE

SEQ ID NO: 38664 - protein, 7 aa, synthetic construct
RGDLKIL

SEQ ID NO: 38665 - protein, 7 aa, synthetic construct
RGDLLDQ

SEQ ID NO: 38666 - protein, 7 aa, synthetic construct
RGDATDA

SEQ ID NO: 38667 - protein, 7 aa, synthetic construct
RGDLREG

SEQ ID NO: 38668 - protein, 7 aa, synthetic construct
RGDATED

SEQ ID NO: 38669 - protein, 7 aa, synthetic construct
RGDLTQF

SEQ ID NO: 38670 - protein, 7 aa, synthetic construct
RGDNDKQ

SEQ ID NO: 38671 - protein, 7 aa, synthetic construct
RGDNDNH

SEQ ID NO: 38672 - protein, 7 aa, synthetic construct
RGDNEKE

SEQ ID NO: 38673 - protein, 7 aa, synthetic construct
RGDNFTD

SEQ ID NO: 38674 - protein, 7 aa, synthetic construct
RGDNGAD

SEQ ID NO: 38675 - protein, 7 aa, synthetic construct
RGDNHDH

SEQ ID NO: 38676 - protein, 7 aa, synthetic construct
RGDNIAG

SEQ ID NO: 38677 - protein, 7 aa, synthetic construct
RGDNIIV

SEQ ID NO: 38678 - protein, 7 aa, synthetic construct
RGDNITN

SEQ ID NO: 38679 - protein, 7 aa, synthetic construct
RGDNKIF

SEQ ID NO: 38680 - protein, 7 aa, synthetic construct
RGDNQLG

SEQ ID NO: 38681 - protein, 7 aa, synthetic construct
RGDNRIA

SEQ ID NO: 38682 - protein, 7 aa, synthetic construct
RGDNRIT

SEQ ID NO: 38683 - protein, 7 aa, synthetic construct
RGDQDAN

SEQ ID NO: 38684 - protein, 7 aa, synthetic construct
RGDQEEA

SEQ ID NO: 38685 - protein, 7 aa, synthetic construct
RGDQERE

SEQ ID NO: 38686 - protein, 7 aa, synthetic construct
RGDQFLT

SEQ ID NO: 38687 - protein, 7 aa, synthetic construct
RGDQFQF

SEQ ID NO: 38688 - protein, 7 aa, synthetic construct
RGDQHFH

SEQ ID NO: 38689 - protein, 7 aa, synthetic construct
RGDQNLQ

SEQ ID NO: 38690 - protein, 7 aa, synthetic construct
RGDDDAQ

SEQ ID NO: 38691 - protein, 7 aa, synthetic construct
RGDQSED

SEQ ID NO: 38692 - protein, 7 aa, synthetic construct
RGDQTIS

SEQ ID NO: 38693 - protein, 7 aa, synthetic construct
RGDQVDS

SEQ ID NO: 38694 - protein, 7 aa, synthetic construct
RGDRDTD

SEQ ID NO: 38695 - protein, 7 aa, synthetic construct
RGDRELE

SEQ ID NO: 38696 - protein, 7 aa, synthetic construct
RGDRFQG

SEQ ID NO: 38697 - protein, 7 aa, synthetic construct
RGDADQH

SEQ ID NO: 38698 - protein, 7 aa, synthetic construct
RGDDEEF

SEQ ID NO: 38699 - protein, 7 aa, synthetic construct
RGDRILS

SEQ ID NO: 38700 - protein, 7 aa, synthetic construct
RGDDEIN

SEQ ID NO: 38701 - protein, 7 aa, synthetic construct
RGDRVAE

SEQ ID NO: 38702 - protein, 7 aa, synthetic construct
RGDSAVL

SEQ ID NO: 38703 - protein, 7 aa, synthetic construct
RGDSELS

SEQ ID NO: 38704 - protein, 7 aa, synthetic construct
RGDSESG

SEQ ID NO: 38705 - protein, 7 aa, synthetic construct
RGDSFAQ

SEQ ID NO: 38706 - protein, 7 aa, synthetic construct
RGDSFHG

SEQ ID NO: 38707 - protein, 7 aa, synthetic construct
RGDSHEG

SEQ ID NO: 38708 - protein, 7 aa, synthetic construct
RGDDFNK

SEQ ID NO: 38709 - protein, 7 aa, synthetic construct
RGDSIIS

SEQ ID NO: 38710 - protein, 7 aa, synthetic construct
RGDSQAQ

SEQ ID NO: 38711 - protein, 7 aa, synthetic construct
RGDSQLS

SEQ ID NO: 38712 - protein, 7 aa, synthetic construct
RGDSQQI

SEQ ID NO: 38713 - protein, 7 aa, synthetic construct
RGDSQVV

SEQ ID NO: 38714 - protein, 7 aa, synthetic construct
RGDSSDV

SEQ ID NO: 38715 - protein, 7 aa, synthetic construct
RGDDGGE

SEQ ID NO: 38716 - protein, 7 aa, synthetic construct
RGDSTDT

SEQ ID NO: 38717 - protein, 7 aa, synthetic construct
RGDSTEH

SEQ ID NO: 38718 - protein, 7 aa, synthetic construct
RGDTELE

SEQ ID NO: 38719 - protein, 7 aa, synthetic construct
RGDTFQE

SEQ ID NO: 38720 - protein, 7 aa, synthetic construct
RGDTGHF

SEQ ID NO: 38721 - protein, 7 aa, synthetic construct
RGDTHHE

SEQ ID NO: 38722 - protein, 7 aa, synthetic construct
RGDTHNE

SEQ ID NO: 38723 - protein, 7 aa, synthetic construct
RGDTKED

SEQ ID NO: 38724 - protein, 7 aa, synthetic construct
RGDTLNE

SEQ ID NO: 38725 - protein, 7 aa, synthetic construct
RGDTQDF

SEQ ID NO: 38726 - protein, 7 aa, synthetic construct
RGDTQGH

SEQ ID NO: 38727 - protein, 7 aa, synthetic construct
RGDDHNL

SEQ ID NO: 38728 - protein, 7 aa, synthetic construct
RGDTSEI

SEQ ID NO: 38729 - protein, 7 aa, synthetic construct
RGDTSET

SEQ ID NO: 38730 - protein, 7 aa, synthetic construct
RGDTSLN

SEQ ID NO: 38731 - protein, 7 aa, synthetic construct
RGDDHSV

SEQ ID NO: 38732 - protein, 7 aa, synthetic construct
RGDVDEA

SEQ ID NO: 38733 - protein, 7 aa, synthetic construct
RGDVEET

SEQ ID NO: 38734 - protein, 7 aa, synthetic construct
RGDVEGE

SEQ ID NO: 38735 - protein, 7 aa, synthetic construct
RGDVFRD

SEQ ID NO: 38736 - protein, 7 aa, synthetic construct
RGDVGLE

SEQ ID NO: 38737 - protein, 7 aa, synthetic construct
RGDVLAG

SEQ ID NO: 38738 - protein, 7 aa, synthetic construct
RGDVNHE

SEQ ID NO: 38739 - protein, 7 aa, synthetic construct
RGDVNVD

SEQ ID NO: 38740 - protein, 7 aa, synthetic construct
RGDVQDT

SEQ ID NO: 38741 - protein, 7 aa, synthetic construct
RGDAEFD

SEQ ID NO: 38742 - protein, 7 aa, synthetic construct
RGDVSDF

SEQ ID NO: 38743 - protein, 7 aa, synthetic construct
RGDVSID

SEQ ID NO: 38744 - protein, 7 aa, synthetic construct
RGDVVAG

SEQ ID NO: 38745 - protein, 7 aa, synthetic construct
RGDDKIH

SEQ ID NO: 38746 - protein, 7 aa, synthetic construct
RGDVVQA

SEQ ID NO: 38747 - protein, 7 aa, synthetic construct
RGDVVVE

SEQ ID NO: 38748 - protein, 7 aa, synthetic construct
RGDDKLI

SEQ ID NO: 38749 - protein, 7 aa, synthetic construct
RGDDLTE

SEQ ID NO: 38750 - protein, 7 aa, synthetic construct
RGDDNGF

SEQ ID NO: 38751 - protein, 7 aa, synthetic construct
RGDDNIK

SEQ ID NO: 38752 - protein, 7 aa, synthetic construct
RGDDNTS

SEQ ID NO: 38753 - protein, 7 aa, synthetic construct
RGDDNVQ

SEQ ID NO: 38754 - protein, 7 aa, synthetic construct
RGDDQRE

SEQ ID NO: 38755 - protein, 7 aa, synthetic construct
RGDDRDQ

SEQ ID NO: 38756 - protein, 7 aa, synthetic construct
RGDDTFA

SEQ ID NO: 38757 - protein, 7 aa, synthetic construct
RGDDTNF

SEQ ID NO: 38758 - protein, 7 aa, synthetic construct
RGDAETD

SEQ ID NO: 38759 - protein, 7 aa, synthetic construct
RGDDTVE

SEQ ID NO: 38760 - protein, 7 aa, synthetic construct
RGDAETK

SEQ ID NO: 38761 - protein, 7 aa, synthetic construct
RGDDVDT

SEQ ID NO: 38762 - protein, 7 aa, synthetic construct
RGDDVGH

SEQ ID NO: 38763 - protein, 7 aa, synthetic construct
RGDDVLN

SEQ ID NO: 38764 - protein, 7 aa, synthetic construct
RGDEADQ

SEQ ID NO: 38765 - protein, 7 aa, synthetic construct
RGDEAGN

SEQ ID NO: 38766 - protein, 7 aa, synthetic construct
RGDEATI

SEQ ID NO: 38767 - protein, 7 aa, synthetic construct
RGDEDGK

SEQ ID NO: 38768 - protein, 7 aa, synthetic construct
RGDEELA

SEQ ID NO: 38769 - protein, 7 aa, synthetic construct
RGDEFAT

SEQ ID NO: 38770 - protein, 7 aa, synthetic construct
RGDEFDK

SEQ ID NO: 38771 - protein, 7 aa, synthetic construct
RGDEFGN

SEQ ID NO: 38772 - protein, 7 aa, synthetic construct
RGDEFKQ

SEQ ID NO: 38773 - protein, 7 aa, synthetic construct
RGDEFQD

SEQ ID NO: 38774 - protein, 7 aa, synthetic construct
RGDEGDK

SEQ ID NO: 38775 - protein, 7 aa, synthetic construct
RGDEGIR

SEQ ID NO: 38776 - protein, 7 aa, synthetic construct
RGDEIEV

SEQ ID NO: 38777 - protein, 7 aa, synthetic construct
RGDEIFV

SEQ ID NO: 38778 - protein, 7 aa, synthetic construct
RGDEIIE

SEQ ID NO: 38779 - protein, 7 aa, synthetic construct
RGDEIQL

SEQ ID NO: 38780 - protein, 7 aa, synthetic construct
RGDEKTG

SEQ ID NO: 38781 - protein, 7 aa, synthetic construct
RGDELNE

SEQ ID NO: 38782 - protein, 7 aa, synthetic construct
RGDELSQ

SEQ ID NO: 38783 - protein, 7 aa, synthetic construct
RGDENFH

SEQ ID NO: 38784 - protein, 7 aa, synthetic construct
RGDENHE

SEQ ID NO: 38785 - protein, 7 aa, synthetic construct
RGDEQAF

SEQ ID NO: 38786 - protein, 7 aa, synthetic construct
RGDEQVQ

SEQ ID NO: 38787 - protein, 7 aa, synthetic construct
RGDERSV

SEQ ID NO: 38788 - protein, 7 aa, synthetic construct
RGDESEF

SEQ ID NO: 38789 - protein, 7 aa, synthetic construct
RGDESTF

SEQ ID NO: 38790 - protein, 7 aa, synthetic construct
RGDETEK

SEQ ID NO: 38791 - protein, 7 aa, synthetic construct
RGDETFA

SEQ ID NO: 38792 - protein, 7 aa, synthetic construct
RGDETGE

SEQ ID NO: 38793 - protein, 7 aa, synthetic construct
RGDETGR

SEQ ID NO: 38794 - protein, 7 aa, synthetic construct
RGDETGT

SEQ ID NO: 38795 - protein, 7 aa, synthetic construct
RGDETHG

SEQ ID NO: 38796 - protein, 7 aa, synthetic construct
RGDEVIR

SEQ ID NO: 38797 - protein, 7 aa, synthetic construct
RGDEVTA

SEQ ID NO: 38798 - protein, 7 aa, synthetic construct
RGDEVVG

SEQ ID NO: 38799 - protein, 7 aa, synthetic construct
RGDAGQF

SEQ ID NO: 38800 - protein, 7 aa, synthetic construct
RGDFEKG

SEQ ID NO: 38801 - protein, 7 aa, synthetic construct
RGDFENA

SEQ ID NO: 38802 - protein, 7 aa, synthetic construct
RGDAHGG

SEQ ID NO: 38803 - protein, 7 aa, synthetic construct
RGDAHGS

SEQ ID NO: 38804 - protein, 7 aa, synthetic construct
RGDFNRG

SEQ ID NO: 38805 - protein, 7 aa, synthetic construct
RGDFQVF

SEQ ID NO: 38806 - protein, 7 aa, synthetic construct
RGDFRLG

SEQ ID NO: 38807 - protein, 7 aa, synthetic construct
RGDFTEA

SEQ ID NO: 38808 - protein, 7 aa, synthetic construct
RGDFTIK

SEQ ID NO: 38809 - protein, 7 aa, synthetic construct
RGDFVAD

SEQ ID NO: 38810 - protein, 7 aa, synthetic construct
RGDGAFL

SEQ ID NO: 38811 - protein, 7 aa, synthetic construct
RGDGALH

SEQ ID NO: 38812 - protein, 7 aa, synthetic construct
RGDGDFI

SEQ ID NO: 38813 - protein, 7 aa, synthetic construct
RGDGDLQ

SEQ ID NO: 38814 - protein, 7 aa, synthetic construct
RGDGEDQ

SEQ ID NO: 38815 - protein, 7 aa, synthetic construct
RGDGETS

SEQ ID NO: 38816 - protein, 7 aa, synthetic construct
RGDGEVQ

SEQ ID NO: 38817 - protein, 7 aa, synthetic construct
RGDGGET

SEQ ID NO: 38818 - protein, 7 aa, synthetic construct
RGDAIIQ

SEQ ID NO: 38819 - protein, 7 aa, synthetic construct
RGDGIIN

SEQ ID NO: 38820 - protein, 7 aa, synthetic construct
RGDGITS

SEQ ID NO: 38821 - protein, 7 aa, synthetic construct
RGDGKAA

SEQ ID NO: 38822 - protein, 7 aa, synthetic construct
RGDGQIA

SEQ ID NO: 38823 - protein, 7 aa, synthetic construct
RGDGQIR

SEQ ID NO: 38824 - protein, 7 aa, synthetic construct
RGDGQLL

SEQ ID NO: 38825 - protein, 7 aa, synthetic construct
RGDGQVF

SEQ ID NO: 38826 - protein, 7 aa, synthetic construct
RGDGTAD

SEQ ID NO: 38827 - protein, 7 aa, synthetic construct
RGDAKHG

SEQ ID NO: 38828 - protein, 7 aa, synthetic construct
RGDGVFF

SEQ ID NO: 38829 - protein, 7 aa, synthetic construct
RGDGVLK

SEQ ID NO: 38830 - protein, 7 aa, synthetic construct
RGDGVQA

SEQ ID NO: 38831 - protein, 7 aa, synthetic construct
RGDAKLG

SEQ ID NO: 38832 - protein, 7 aa, synthetic construct
RGDHFSG

SEQ ID NO: 38833 - protein, 7 aa, synthetic construct
RGDHHVQ

SEQ ID NO: 38834 - protein, 7 aa, synthetic construct
RGDHIHH

SEQ ID NO: 38835 - protein, 7 aa, synthetic construct
RGDHLFE

SEQ ID NO: 38836 - protein, 7 aa, synthetic construct
RGDALIN

SEQ ID NO: 38837 - protein, 7 aa, synthetic construct
RGDHQFG

SEQ ID NO: 38838 - protein, 7 aa, synthetic construct
RGDIENV

SEQ ID NO: 38839 - protein, 7 aa, synthetic construct
RGDIFVD

SEQ ID NO: 38840 - protein, 7 aa, synthetic construct
RGDIGKE

SEQ ID NO: 38841 - protein, 7 aa, synthetic construct
RGDIHDF

SEQ ID NO: 38842 - protein, 7 aa, synthetic construct
RGDIHNG

SEQ ID NO: 38843 - protein, 7 aa, synthetic construct
RGDIIEA

SEQ ID NO: 38844 - protein, 7 aa, synthetic construct
RGDIIGS

SEQ ID NO: 38845 - protein, 7 aa, synthetic construct
RGDIILH

SEQ ID NO: 38846 - protein, 7 aa, synthetic construct
RGDIINA

SEQ ID NO: 38847 - protein, 7 aa, synthetic construct
RGDIINH

SEQ ID NO: 38848 - protein, 7 aa, synthetic construct
RGDANQA

SEQ ID NO: 38849 - protein, 7 aa, synthetic construct
RGDILEA

SEQ ID NO: 38850 - protein, 7 aa, synthetic construct
RGDILSD

SEQ ID NO: 38851 - protein, 7 aa, synthetic construct
RGDIQGE

SEQ ID NO: 38852 - protein, 7 aa, synthetic construct
RGDIREG

SEQ ID NO: 38853 - protein, 7 aa, synthetic construct
RGDIRID

SEQ ID NO: 38854 - protein, 7 aa, synthetic construct
RGDISAE

SEQ ID NO: 38855 - protein, 7 aa, synthetic construct
RGDISAL

SEQ ID NO: 38856 - protein, 7 aa, synthetic construct
RGDITDN

SEQ ID NO: 38857 - protein, 7 aa, synthetic construct
RGDIVTA

SEQ ID NO: 38858 - protein, 7 aa, synthetic construct
RGDKADF

SEQ ID NO: 38859 - protein, 7 aa, synthetic construct
RGDKDII

SEQ ID NO: 38860 - protein, 7 aa, synthetic construct
RGDKDLD

SEQ ID NO: 38861 - protein, 7 aa, synthetic construct
RGDKDSE

SEQ ID NO: 38862 - protein, 7 aa, synthetic construct
RGDKEHA

SEQ ID NO: 38863 - protein, 7 aa, synthetic construct
RGDKEIG

SEQ ID NO: 38864 - protein, 7 aa, synthetic construct
RGDKFQD

SEQ ID NO: 38865 - protein, 7 aa, synthetic construct
RGDKHLA

SEQ ID NO: 38866 - protein, 7 aa, synthetic construct
RGDKIES

SEQ ID NO: 38867 - protein, 7 aa, synthetic construct
RGDKIVD

SEQ ID NO: 38868 - protein, 7 aa, synthetic construct
RGDKQIN

SEQ ID NO: 38869 - protein, 7 aa, synthetic construct
RGDKSKE

SEQ ID NO: 38870 - protein, 7 aa, synthetic construct
RGDKVEF

SEQ ID NO: 38871 - protein, 7 aa, synthetic construct
RGDLDDT

SEQ ID NO: 38872 - protein, 7 aa, synthetic construct
RGDLFFL

SEQ ID NO: 38873 - protein, 7 aa, synthetic construct
RGDLHED

SEQ ID NO: 38874 - protein, 7 aa, synthetic construct
RGDASQH

SEQ ID NO: 38875 - protein, 7 aa, synthetic construct
RGDLKQI

SEQ ID NO: 38876 - protein, 7 aa, synthetic construct
RGDLLEF

SEQ ID NO: 38877 - protein, 7 aa, synthetic construct
RGDLNSQ

SEQ ID NO: 38878 - protein, 7 aa, synthetic construct
RGDLREH

SEQ ID NO: 38879 - protein, 7 aa, synthetic construct
RGDATGE

SEQ ID NO: 38880 - protein, 7 aa, synthetic construct
RGDADHH

SEQ ID NO: 38881 - protein, 7 aa, synthetic construct
RGDNDEG

SEQ ID NO: 38882 - protein, 7 aa, synthetic construct
RGDNFIQ

SEQ ID NO: 38883 - protein, 7 aa, synthetic construct
RGDNFNE

SEQ ID NO: 38884 - protein, 7 aa, synthetic construct
RGDNFTG

SEQ ID NO: 38885 - protein, 7 aa, synthetic construct
RGDNIQD

SEQ ID NO: 38886 - protein, 7 aa, synthetic construct
RGDNIVD

SEQ ID NO: 38887 - protein, 7 aa, synthetic construct
RGDNKTE

SEQ ID NO: 38888 - protein, 7 aa, synthetic construct
RGDAVHH

SEQ ID NO: 38889 - protein, 7 aa, synthetic construct
RGDNLQK

SEQ ID NO: 38890 - protein, 7 aa, synthetic construct
RGDAVIH

SEQ ID NO: 38891 - protein, 7 aa, synthetic construct
RGDNNRR

SEQ ID NO: 38892 - protein, 7 aa, synthetic construct
RGDNNSN

SEQ ID NO: 38893 - protein, 7 aa, synthetic construct
RGDNQAT

SEQ ID NO: 38894 - protein, 7 aa, synthetic construct
RGDNQEG

SEQ ID NO: 38895 - protein, 7 aa, synthetic construct
RGDNQEV

SEQ ID NO: 38896 - protein, 7 aa, synthetic construct
RGDNQLT

SEQ ID NO: 38897 - protein, 7 aa, synthetic construct
RGDNRAE

SEQ ID NO: 38898 - protein, 7 aa, synthetic construct
RGDNRDF

SEQ ID NO: 38899 - protein, 7 aa, synthetic construct
RGDNRFG

SEQ ID NO: 38900 - protein, 7 aa, synthetic construct
RGDNTTH

SEQ ID NO: 38901 - protein, 7 aa, synthetic construct
RGDNVQG

SEQ ID NO: 38902 - protein, 7 aa, synthetic construct
RGDQDLG

SEQ ID NO: 38903 - protein, 7 aa, synthetic construct
RGDQEDV

SEQ ID NO: 38904 - protein, 7 aa, synthetic construct
RGDQEGI

SEQ ID NO: 38905 - protein, 7 aa, synthetic construct
RGDDAHA

SEQ ID NO: 38906 - protein, 7 aa, synthetic construct
RGDQHAH

SEQ ID NO: 38907 - protein, 7 aa, synthetic construct
RGDQISE

SEQ ID NO: 38908 - protein, 7 aa, synthetic construct
RGDQNTT

SEQ ID NO: 38909 - protein, 7 aa, synthetic construct
RGDQQLQ

SEQ ID NO: 38910 - protein, 7 aa, synthetic construct
RGDQSDA

SEQ ID NO: 38911 - protein, 7 aa, synthetic construct
RGDQTVE

SEQ ID NO: 38912 - protein, 7 aa, synthetic construct
RGDQVLD

SEQ ID NO: 38913 - protein, 7 aa, synthetic construct
RGDQVVN

SEQ ID NO: 38914 - protein, 7 aa, synthetic construct
RGDRDEV

SEQ ID NO: 38915 - protein, 7 aa, synthetic construct
RGDREEA

SEQ ID NO: 38916 - protein, 7 aa, synthetic construct
RGDDEDS

SEQ ID NO: 38917 - protein, 7 aa, synthetic construct
RGDDESE

SEQ ID NO: 38918 - protein, 7 aa, synthetic construct
RGDRTQA

SEQ ID NO: 38919 - protein, 7 aa, synthetic construct
RGDRVRD

SEQ ID NO: 38920 - protein, 7 aa, synthetic construct
RGDSAEF

SEQ ID NO: 38921 - protein, 7 aa, synthetic construct
RGDDFAH

SEQ ID NO: 38922 - protein, 7 aa, synthetic construct
RGDSAIA

SEQ ID NO: 38923 - protein, 7 aa, synthetic construct
RGDSAIT

SEQ ID NO: 38924 - protein, 7 aa, synthetic construct
RGDSAVS

SEQ ID NO: 38925 - protein, 7 aa, synthetic construct
RGDSEAA

SEQ ID NO: 38926 - protein, 7 aa, synthetic construct
RGDSEIQ

SEQ ID NO: 38927 - protein, 7 aa, synthetic construct
RGDSEVT

SEQ ID NO: 38928 - protein, 7 aa, synthetic construct
RGDSFAL

SEQ ID NO: 38929 - protein, 7 aa, synthetic construct
RGDSFKG

SEQ ID NO: 38930 - protein, 7 aa, synthetic construct
RGDSFNG

SEQ ID NO: 38931 - protein, 7 aa, synthetic construct
RGDSFNL

SEQ ID NO: 38932 - protein, 7 aa, synthetic construct
RGDSFQD

SEQ ID NO: 38933 - protein, 7 aa, synthetic construct
RGDSHFG

SEQ ID NO: 38934 - protein, 7 aa, synthetic construct
RGDSIDG

SEQ ID NO: 38935 - protein, 7 aa, synthetic construct
RGDSIHH

SEQ ID NO: 38936 - protein, 7 aa, synthetic construct
RGDDFNN

SEQ ID NO: 38937 - protein, 7 aa, synthetic construct
RGDDFSK

SEQ ID NO: 38938 - protein, 7 aa, synthetic construct
RGDSNAG

SEQ ID NO: 38939 - protein, 7 aa, synthetic construct
RGDSNSA

SEQ ID NO: 38940 - protein, 7 aa, synthetic construct
RGDSQQH

SEQ ID NO: 38941 - protein, 7 aa, synthetic construct
RGDDGFD

SEQ ID NO: 38942 - protein, 7 aa, synthetic construct
RGDSSDH

SEQ ID NO: 38943 - protein, 7 aa, synthetic construct
RGDSVDG

SEQ ID NO: 38944 - protein, 7 aa, synthetic construct
RGDSVDT

SEQ ID NO: 38945 - protein, 7 aa, synthetic construct
RGDTAAF

SEQ ID NO: 38946 - protein, 7 aa, synthetic construct
RGDTAID

SEQ ID NO: 38947 - protein, 7 aa, synthetic construct
RGDTDLE

SEQ ID NO: 38948 - protein, 7 aa, synthetic construct
RGDTEQH

SEQ ID NO: 38949 - protein, 7 aa, synthetic construct
RGDTFGV

SEQ ID NO: 38950 - protein, 7 aa, synthetic construct
RGDTFHE

SEQ ID NO: 38951 - protein, 7 aa, synthetic construct
RGDDGTF

SEQ ID NO: 38952 - protein, 7 aa, synthetic construct
RGDTFTE

SEQ ID NO: 38953 - protein, 7 aa, synthetic construct
RGDTHVA

SEQ ID NO: 38954 - protein, 7 aa, synthetic construct
RGDTKTG

SEQ ID NO: 38955 - protein, 7 aa, synthetic construct
RGDTLSA

SEQ ID NO: 38956 - protein, 7 aa, synthetic construct
RGDTQAH

SEQ ID NO: 38957 - protein, 7 aa, synthetic construct
RGDTQNS

SEQ ID NO: 38958 - protein, 7 aa, synthetic construct
RGDTTAI

SEQ ID NO: 38959 - protein, 7 aa, synthetic construct
RGDTTEG

SEQ ID NO: 38960 - protein, 7 aa, synthetic construct
RGDTTLD

SEQ ID NO: 38961 - protein, 7 aa, synthetic construct
RGDTTNN

SEQ ID NO: 38962 - protein, 7 aa, synthetic construct
RGDTTNQ

SEQ ID NO: 38963 - protein, 7 aa, synthetic construct
RGDDHTD

SEQ ID NO: 38964 - protein, 7 aa, synthetic construct
RGDVDND

SEQ ID NO: 38965 - protein, 7 aa, synthetic construct
RGDVEDD

SEQ ID NO: 38966 - protein, 7 aa, synthetic construct
RGDVEGS

SEQ ID NO: 38967 - protein, 7 aa, synthetic construct
RGDVFQS

SEQ ID NO: 38968 - protein, 7 aa, synthetic construct
RGDVLDE

SEQ ID NO: 38969 - protein, 7 aa, synthetic construct
RGDVLES

SEQ ID NO: 38970 - protein, 7 aa, synthetic construct
RGDDISS

SEQ ID NO: 38971 - protein, 7 aa, synthetic construct
RGDVNTH

SEQ ID NO: 38972 - protein, 7 aa, synthetic construct
RGDDKFQ

SEQ ID NO: 38973 - protein, 7 aa, synthetic construct
RGDVSND

SEQ ID NO: 38974 - protein, 7 aa, synthetic construct
RGDVTFE

SEQ ID NO: 38975 - protein, 7 aa, synthetic construct
RGDVVDN

SEQ ID NO: 38976 - protein, 7 aa, synthetic construct
RGDDKVH

SEQ ID NO: 38977 - protein, 7 aa, synthetic construct
RGDDLDQ

SEQ ID NO: 38978 - protein, 7 aa, synthetic construct
RGDDNVS

SEQ ID NO: 38979 - protein, 7 aa, synthetic construct
RGDDQDL

SEQ ID NO: 38980 - protein, 7 aa, synthetic construct
RGDDQSG

SEQ ID NO: 38981 - protein, 7 aa, synthetic construct
RGDDVDG

SEQ ID NO: 38982 - protein, 7 aa, synthetic construct
RGDAEVE

SEQ ID NO: 38983 - protein, 7 aa, synthetic construct
RGDDVLL

SEQ ID NO: 38984 - protein, 7 aa, synthetic construct
RGDDVQI

SEQ ID NO: 38985 - protein, 7 aa, synthetic construct
RGDEDAI

SEQ ID NO: 38986 - protein, 7 aa, synthetic construct
RGDEDDK

SEQ ID NO: 38987 - protein, 7 aa, synthetic construct
RGDEDRF

SEQ ID NO: 38988 - protein, 7 aa, synthetic construct
RGDEEGS

SEQ ID NO: 38989 - protein, 7 aa, synthetic construct
RGDAFFS

SEQ ID NO: 38990 - protein, 7 aa, synthetic construct
RGDEEQS

SEQ ID NO: 38991 - protein, 7 aa, synthetic construct
RGDAAGT

SEQ ID NO: 38992 - protein, 7 aa, synthetic construct
RGDEFAN

SEQ ID NO: 38993 - protein, 7 aa, synthetic construct
RGDEFDS

SEQ ID NO: 38994 - protein, 7 aa, synthetic construct
RGDAFHF

SEQ ID NO: 38995 - protein, 7 aa, synthetic construct
RGDEFLL

SEQ ID NO: 38996 - protein, 7 aa, synthetic construct
RGDEFRA

SEQ ID NO: 38997 - protein, 7 aa, synthetic construct
RGDEFTI

SEQ ID NO: 38998 - protein, 7 aa, synthetic construct
RGDEFTR

SEQ ID NO: 38999 - protein, 7 aa, synthetic construct
RGDEFVI

SEQ ID NO: 39000 - protein, 7 aa, synthetic construct
RGDEGDG

SEQ ID NO: 39001 - protein, 7 aa, synthetic construct
RGDEGLD

SEQ ID NO: 39002 - protein, 7 aa, synthetic construct
RGDEIDD

SEQ ID NO: 39003 - protein, 7 aa, synthetic construct
RGDEITI

SEQ ID NO: 39004 - protein, 7 aa, synthetic construct
RGDEKAS

SEQ ID NO: 39005 - protein, 7 aa, synthetic construct
RGDEKDN

SEQ ID NO: 39006 - protein, 7 aa, synthetic construct
RGDAFQQ

SEQ ID NO: 39007 - protein, 7 aa, synthetic construct
RGDEKEH

SEQ ID NO: 39008 - protein, 7 aa, synthetic construct
RGDEKTI

SEQ ID NO: 39009 - protein, 7 aa, synthetic construct
RGDELDG

SEQ ID NO: 39010 - protein, 7 aa, synthetic construct
RGDELDN

SEQ ID NO: 39011 - protein, 7 aa, synthetic construct
RGDELLL

SEQ ID NO: 39012 - protein, 7 aa, synthetic construct
RGDENTA

SEQ ID NO: 39013 - protein, 7 aa, synthetic construct
RGDEQAE

SEQ ID NO: 39014 - protein, 7 aa, synthetic construct
RGDEQDH

SEQ ID NO: 39015 - protein, 7 aa, synthetic construct
RGDEQLT

SEQ ID NO: 39016 - protein, 7 aa, synthetic construct
RGDEQTV

SEQ ID NO: 39017 - protein, 7 aa, synthetic construct
RGDESDD

SEQ ID NO: 39018 - protein, 7 aa, synthetic construct
RGDETDD

SEQ ID NO: 39019 - protein, 7 aa, synthetic construct
RGDEVFG

SEQ ID NO: 39020 - protein, 7 aa, synthetic construct
RGDEVLN

SEQ ID NO: 39021 - protein, 7 aa, synthetic construct
RGDEVTN

SEQ ID NO: 39022 - protein, 7 aa, synthetic construct
RGDFANE

SEQ ID NO: 39023 - protein, 7 aa, synthetic construct
RGDFFDD

SEQ ID NO: 39024 - protein, 7 aa, synthetic construct
RGDFFLS

SEQ ID NO: 39025 - protein, 7 aa, synthetic construct
RGDFGTD

SEQ ID NO: 39026 - protein, 7 aa, synthetic construct
RGDFHAE

SEQ ID NO: 39027 - protein, 7 aa, synthetic construct
RGDFIFF

SEQ ID NO: 39028 - protein, 7 aa, synthetic construct
RGDFLEQ

SEQ ID NO: 39029 - protein, 7 aa, synthetic construct
RGDGDVN

SEQ ID NO: 39030 - protein, 7 aa, synthetic construct
RGDGEIT

SEQ ID NO: 39031 - protein, 7 aa, synthetic construct
RGDGETE

SEQ ID NO: 39032 - protein, 7 aa, synthetic construct
RGDAIHD

SEQ ID NO: 39033 - protein, 7 aa, synthetic construct
RGDGKDV

SEQ ID NO: 39034 - protein, 7 aa, synthetic construct
RGDGQIF

SEQ ID NO: 39035 - protein, 7 aa, synthetic construct
RGDGSDF

SEQ ID NO: 39036 - protein, 7 aa, synthetic construct
RGDGTIS

SEQ ID NO: 39037 - protein, 7 aa, synthetic construct
RGDGVLG

SEQ ID NO: 39038 - protein, 7 aa, synthetic construct
RGDHDQA

SEQ ID NO: 39039 - protein, 7 aa, synthetic construct
RGDHFIR

SEQ ID NO: 39040 - protein, 7 aa, synthetic construct
RGDHHLS

SEQ ID NO: 39041 - protein, 7 aa, synthetic construct
RGDHIDG

SEQ ID NO: 39042 - protein, 7 aa, synthetic construct
RGDHLNA

SEQ ID NO: 39043 - protein, 7 aa, synthetic construct
RGDHLQN

SEQ ID NO: 39044 - protein, 7 aa, synthetic construct
RGDHLSD

SEQ ID NO: 39045 - protein, 7 aa, synthetic construct
RGDHQAE

SEQ ID NO: 39046 - protein, 7 aa, synthetic construct
RGDHVDV

SEQ ID NO: 39047 - protein, 7 aa, synthetic construct
RGDIDLD

SEQ ID NO: 39048 - protein, 7 aa, synthetic construct
RGDIDNA

SEQ ID NO: 39049 - protein, 7 aa, synthetic construct
RGDIEEA

SEQ ID NO: 39050 - protein, 7 aa, synthetic construct
RGDIFEV

SEQ ID NO: 39051 - protein, 7 aa, synthetic construct
RGDIFHA

SEQ ID NO: 39052 - protein, 7 aa, synthetic construct
RGDIHQA

SEQ ID NO: 39053 - protein, 7 aa, synthetic construct
RGDIHRG

SEQ ID NO: 39054 - protein, 7 aa, synthetic construct
RGDINFF

SEQ ID NO: 39055 - protein, 7 aa, synthetic construct
RGDIQVE

SEQ ID NO: 39056 - protein, 7 aa, synthetic construct
RGDKDQE

SEQ ID NO: 39057 - protein, 7 aa, synthetic construct
RGDKDRG

SEQ ID NO: 39058 - protein, 7 aa, synthetic construct
RGDKFEL

SEQ ID NO: 39059 - protein, 7 aa, synthetic construct
RGDAQVQ

SEQ ID NO: 39060 - protein, 7 aa, synthetic construct
RGDKIDK

SEQ ID NO: 39061 - protein, 7 aa, synthetic construct
RGDKQEF

SEQ ID NO: 39062 - protein, 7 aa, synthetic construct
RGDKSAG

SEQ ID NO: 39063 - protein, 7 aa, synthetic construct
RGDKTLE

SEQ ID NO: 39064 - protein, 7 aa, synthetic construct
RGDLDKL

SEQ ID NO: 39065 - protein, 7 aa, synthetic construct
RGDASLQ

SEQ ID NO: 39066 - protein, 7 aa, synthetic construct
RGDASQE

SEQ ID NO: 39067 - protein, 7 aa, synthetic construct
RGDLKAH

SEQ ID NO: 39068 - protein, 7 aa, synthetic construct
RGDLKTL

SEQ ID NO: 39069 - protein, 7 aa, synthetic construct
RGDLNGG

SEQ ID NO: 39070 - protein, 7 aa, synthetic construct
RGDLRGL

SEQ ID NO: 39071 - protein, 7 aa, synthetic construct
RGDLRQL

SEQ ID NO: 39072 - protein, 7 aa, synthetic construct
RGDLSDA

SEQ ID NO: 39073 - protein, 7 aa, synthetic construct
RGDNAFS

SEQ ID NO: 39074 - protein, 7 aa, synthetic construct
RGDNDIN

SEQ ID NO: 39075 - protein, 7 aa, synthetic construct
RGDNEDN

SEQ ID NO: 39076 - protein, 7 aa, synthetic construct
RGDNEQG

SEQ ID NO: 39077 - protein, 7 aa, synthetic construct
RGDNFID

SEQ ID NO: 39078 - protein, 7 aa, synthetic construct
RGDNFNH

SEQ ID NO: 39079 - protein, 7 aa, synthetic construct
RGDNFNT

SEQ ID NO: 39080 - protein, 7 aa, synthetic construct
RGDNFVH

SEQ ID NO: 39081 - protein, 7 aa, synthetic construct
RGDNGDS

SEQ ID NO: 39082 - protein, 7 aa, synthetic construct
RGDNNAF

SEQ ID NO: 39083 - protein, 7 aa, synthetic construct
RGDNSLE

SEQ ID NO: 39084 - protein, 7 aa, synthetic construct
RGDNVRG

SEQ ID NO: 39085 - protein, 7 aa, synthetic construct
RGDNVTD

SEQ ID NO: 39086 - protein, 7 aa, synthetic construct
RGDNVVA

SEQ ID NO: 39087 - protein, 7 aa, synthetic construct
RGDQAES

SEQ ID NO: 39088 - protein, 7 aa, synthetic construct
RGDQEFA

SEQ ID NO: 39089 - protein, 7 aa, synthetic construct
RGDDAFL

SEQ ID NO: 39090 - protein, 7 aa, synthetic construct
RGDQELF

SEQ ID NO: 39091 - protein, 7 aa, synthetic construct
RGDQFEF

SEQ ID NO: 39092 - protein, 7 aa, synthetic construct
RGDQFQQ

SEQ ID NO: 39093 - protein, 7 aa, synthetic construct
RGDDAIT

SEQ ID NO: 39094 - protein, 7 aa, synthetic construct
RGDQHDN

SEQ ID NO: 39095 - protein, 7 aa, synthetic construct
RGDQIGG

SEQ ID NO: 39096 - protein, 7 aa, synthetic construct
RGDQLFG

SEQ ID NO: 39097 - protein, 7 aa, synthetic construct
RGDQNGI

SEQ ID NO: 39098 - protein, 7 aa, synthetic construct
RGDQQAR

SEQ ID NO: 39099 - protein, 7 aa, synthetic construct
RGDQQIL

SEQ ID NO: 39100 - protein, 7 aa, synthetic construct
RGDDDDG

SEQ ID NO: 39101 - protein, 7 aa, synthetic construct
RGDQVHE

SEQ ID NO: 39102 - protein, 7 aa, synthetic construct
RGDRAVG

SEQ ID NO: 39103 - protein, 7 aa, synthetic construct
RGDRDDV

SEQ ID NO: 39104 - protein, 7 aa, synthetic construct
RGDRFIL

SEQ ID NO: 39105 - protein, 7 aa, synthetic construct
RGDRHVA

SEQ ID NO: 39106 - protein, 7 aa, synthetic construct
RGDDEET

SEQ ID NO: 39107 - protein, 7 aa, synthetic construct
RGDDETI

SEQ ID NO: 39108 - protein, 7 aa, synthetic construct
RGDRVIE

SEQ ID NO: 39109 - protein, 7 aa, synthetic construct
RGDSELH

SEQ ID NO: 39110 - protein, 7 aa, synthetic construct
RGDSENF

SEQ ID NO: 39111 - protein, 7 aa, synthetic construct
RGDSFNA

SEQ ID NO: 39112 - protein, 7 aa, synthetic construct
RGDSFQN

SEQ ID NO: 39113 - protein, 7 aa, synthetic construct
RGDSGQE

SEQ ID NO: 39114 - protein, 7 aa, synthetic construct
RGDSIID

SEQ ID NO: 39115 - protein, 7 aa, synthetic construct
RGDSLVD

SEQ ID NO: 39116 - protein, 7 aa, synthetic construct
RGDSNTH

SEQ ID NO: 39117 - protein, 7 aa, synthetic construct
RGDSREG

SEQ ID NO: 39118 - protein, 7 aa, synthetic construct
RGDDGES

SEQ ID NO: 39119 - protein, 7 aa, synthetic construct
RGDSTFD

SEQ ID NO: 39120 - protein, 7 aa, synthetic construct
RGDSVIS

SEQ ID NO: 39121 - protein, 7 aa, synthetic construct
RGDSVLH

SEQ ID NO: 39122 - protein, 7 aa, synthetic construct
RGDTATQ

SEQ ID NO: 39123 - protein, 7 aa, synthetic construct
RGDTDFT

SEQ ID NO: 39124 - protein, 7 aa, synthetic construct
RGDTEAQ

SEQ ID NO: 39125 - protein, 7 aa, synthetic construct
RGDTEKD

SEQ ID NO: 39126 - protein, 7 aa, synthetic construct
RGDTFKS

SEQ ID NO: 39127 - protein, 7 aa, synthetic construct
RGDTFNV

SEQ ID NO: 39128 - protein, 7 aa, synthetic construct
RGDDHAL

SEQ ID NO: 39129 - protein, 7 aa, synthetic construct
RGDTIHG

SEQ ID NO: 39130 - protein, 7 aa, synthetic construct
RGDTIRN

SEQ ID NO: 39131 - protein, 7 aa, synthetic construct
RGDTKEN

SEQ ID NO: 39132 - protein, 7 aa, synthetic construct
RGDTKIN

SEQ ID NO: 39133 - protein, 7 aa, synthetic construct
RGDTLSE

SEQ ID NO: 39134 - protein, 7 aa, synthetic construct
RGDTNAG

SEQ ID NO: 39135 - protein, 7 aa, synthetic construct
RGDTNSA

SEQ ID NO: 39136 - protein, 7 aa, synthetic construct
RGDDHLQ

SEQ ID NO: 39137 - protein, 7 aa, synthetic construct
RGDAEDN

SEQ ID NO: 39138 - protein, 7 aa, synthetic construct
RGDVDNN

SEQ ID NO: 39139 - protein, 7 aa, synthetic construct
RGDDIFL

SEQ ID NO: 39140 - protein, 7 aa, synthetic construct
RGDVELS

SEQ ID NO: 39141 - protein, 7 aa, synthetic construct
RGDVENS

SEQ ID NO: 39142 - protein, 7 aa, synthetic construct
RGDAEEA

SEQ ID NO: 39143 - protein, 7 aa, synthetic construct
RGDDIHR

SEQ ID NO: 39144 - protein, 7 aa, synthetic construct
RGDVGQH

SEQ ID NO: 39145 - protein, 7 aa, synthetic construct
RGDVLAD

SEQ ID NO: 39146 - protein, 7 aa, synthetic construct
RGDVLIG

SEQ ID NO: 39147 - protein, 7 aa, synthetic construct
RGDVNGF

SEQ ID NO: 39148 - protein, 7 aa, synthetic construct
RGDVQLD

SEQ ID NO: 39149 - protein, 7 aa, synthetic construct
RGDVSEQ

SEQ ID NO: 39150 - protein, 7 aa, synthetic construct
RGDVSLN

SEQ ID NO: 39151 - protein, 7 aa, synthetic construct
RGDVTSD

SEQ ID NO: 39152 - protein, 7 aa, synthetic construct
RGDVTTE

SEQ ID NO: 39153 - protein, 7 aa, synthetic construct
RGDDKTQ

SEQ ID NO: 39154 - protein, 7 aa, synthetic construct
RGDDLDI

SEQ ID NO: 39155 - protein, 7 aa, synthetic construct
RGDDNFN

SEQ ID NO: 39156 - protein, 7 aa, synthetic construct
RGDDNHK

SEQ ID NO: 39157 - protein, 7 aa, synthetic construct
RGDDQNQ

SEQ ID NO: 39158 - protein, 7 aa, synthetic construct
RGDDRIS

SEQ ID NO: 39159 - protein, 7 aa, synthetic construct
RGDDSIG

SEQ ID NO: 39160 - protein, 7 aa, synthetic construct
RGDDTET

SEQ ID NO: 39161 - protein, 7 aa, synthetic construct
RGDDTIH

SEQ ID NO: 39162 - protein, 7 aa, synthetic construct
RGDDVAG

SEQ ID NO: 39163 - protein, 7 aa, synthetic construct
RGDDVAV

SEQ ID NO: 39164 - protein, 7 aa, synthetic construct
RGDDVES

SEQ ID NO: 39165 - protein, 7 aa, synthetic construct
RGDEAKG

SEQ ID NO: 39166 - protein, 7 aa, synthetic construct
RGDEARK

SEQ ID NO: 39167 - protein, 7 aa, synthetic construct
RGDEDVR

SEQ ID NO: 39168 - protein, 7 aa, synthetic construct
RGDEELQ

SEQ ID NO: 39169 - protein, 7 aa, synthetic construct
RGDEERV

SEQ ID NO: 39170 - protein, 7 aa, synthetic construct
RGDEFAG

SEQ ID NO: 39171 - protein, 7 aa, synthetic construct
RGDEFQR

SEQ ID NO: 39172 - protein, 7 aa, synthetic construct
RGDEHLF

SEQ ID NO: 39173 - protein, 7 aa, synthetic construct
RGDEHQT

SEQ ID NO: 39174 - protein, 7 aa, synthetic construct
RGDEKGV

SEQ ID NO: 39175 - protein, 7 aa, synthetic construct
RGDELKD

SEQ ID NO: 39176 - protein, 7 aa, synthetic construct
RGDELQG

SEQ ID NO: 39177 - protein, 7 aa, synthetic construct
RGDELVG

SEQ ID NO: 39178 - protein, 7 aa, synthetic construct
RGDENEI

SEQ ID NO: 39179 - protein, 7 aa, synthetic construct
RGDENGS

SEQ ID NO: 39180 - protein, 7 aa, synthetic construct
RGDENHN

SEQ ID NO: 39181 - protein, 7 aa, synthetic construct
RGDEQAT

SEQ ID NO: 39182 - protein, 7 aa, synthetic construct
RGDESLL

SEQ ID NO: 39183 - protein, 7 aa, synthetic construct
RGDETEH

SEQ ID NO: 39184 - protein, 7 aa, synthetic construct
RGDETRE

SEQ ID NO: 39185 - protein, 7 aa, synthetic construct
RGDEVAD

SEQ ID NO: 39186 - protein, 7 aa, synthetic construct
RGDEVTL

SEQ ID NO: 39187 - protein, 7 aa, synthetic construct
RGDEVTQ

SEQ ID NO: 39188 - protein, 7 aa, synthetic construct
RGDFADF

SEQ ID NO: 39189 - protein, 7 aa, synthetic construct
RGDFFER

SEQ ID NO: 39190 - protein, 7 aa, synthetic construct
RGDFFQD

SEQ ID NO: 39191 - protein, 7 aa, synthetic construct
RGDFHDA

SEQ ID NO: 39192 - protein, 7 aa, synthetic construct
RGDFHLD

SEQ ID NO: 39193 - protein, 7 aa, synthetic construct
RGDFIAE

SEQ ID NO: 39194 - protein, 7 aa, synthetic construct
RGDAHIL

SEQ ID NO: 39195 - protein, 7 aa, synthetic construct
RGDFQHD

SEQ ID NO: 39196 - protein, 7 aa, synthetic construct
RGDGDRA

SEQ ID NO: 39197 - protein, 7 aa, synthetic construct
RGDGEIQ

SEQ ID NO: 39198 - protein, 7 aa, synthetic construct
RGDGEVN

SEQ ID NO: 39199 - protein, 7 aa, synthetic construct
RGDGHVG

SEQ ID NO: 39200 - protein, 7 aa, synthetic construct
RGDGIDS

SEQ ID NO: 39201 - protein, 7 aa, synthetic construct
RGDGRVE

SEQ ID NO: 39202 - protein, 7 aa, synthetic construct
RGDGSEN

SEQ ID NO: 39203 - protein, 7 aa, synthetic construct
RGDGSSD

SEQ ID NO: 39204 - protein, 7 aa, synthetic construct
RGDGTIR

SEQ ID NO: 39205 - protein, 7 aa, synthetic construct
RGDGVEH

SEQ ID NO: 39206 - protein, 7 aa, synthetic construct
RGDHDDV

SEQ ID NO: 39207 - protein, 7 aa, synthetic construct
RGDHEIN

SEQ ID NO: 39208 - protein, 7 aa, synthetic construct
RGDHEIS

SEQ ID NO: 39209 - protein, 7 aa, synthetic construct
RGDHENI

SEQ ID NO: 39210 - protein, 7 aa, synthetic construct
RGDAKRR

SEQ ID NO: 39211 - protein, 7 aa, synthetic construct
RGDHFGE

SEQ ID NO: 39212 - protein, 7 aa, synthetic construct
RGDHIFG

SEQ ID NO: 39213 - protein, 7 aa, synthetic construct
RGDHIHA

SEQ ID NO: 39214 - protein, 7 aa, synthetic construct
RGDHILL

SEQ ID NO: 39215 - protein, 7 aa, synthetic construct
RGDHLAN

SEQ ID NO: 39216 - protein, 7 aa, synthetic construct
RGDHNVH

SEQ ID NO: 39217 - protein, 7 aa, synthetic construct
RGDHQDF

SEQ ID NO: 39218 - protein, 7 aa, synthetic construct
RGDHRVH

SEQ ID NO: 39219 - protein, 7 aa, synthetic construct
RGDHTEH

SEQ ID NO: 39220 - protein, 7 aa, synthetic construct
RGDIDAR

SEQ ID NO: 39221 - protein, 7 aa, synthetic construct
RGDANDN

SEQ ID NO: 39222 - protein, 7 aa, synthetic construct
RGDIDEF

SEQ ID NO: 39223 - protein, 7 aa, synthetic construct
RGDIDET

SEQ ID NO: 39224 - protein, 7 aa, synthetic construct
RGDANEA

SEQ ID NO: 39225 - protein, 7 aa, synthetic construct
RGDIDNI

SEQ ID NO: 39226 - protein, 7 aa, synthetic construct
RGDIDQI

SEQ ID NO: 39227 - protein, 7 aa, synthetic construct
RGDIFAQ

SEQ ID NO: 39228 - protein, 7 aa, synthetic construct
RGDIFEA

SEQ ID NO: 39229 - protein, 7 aa, synthetic construct
RGDIFSK

SEQ ID NO: 39230 - protein, 7 aa, synthetic construct
RGDIGGE

SEQ ID NO: 39231 - protein, 7 aa, synthetic construct
RGDANLH

SEQ ID NO: 39232 - protein, 7 aa, synthetic construct
RGDIIHE

SEQ ID NO: 39233 - protein, 7 aa, synthetic construct
RGDIIVA

SEQ ID NO: 39234 - protein, 7 aa, synthetic construct
RGDILGD

SEQ ID NO: 39235 - protein, 7 aa, synthetic construct
RGDIQEI

SEQ ID NO: 39236 - protein, 7 aa, synthetic construct
RGDIQLL

SEQ ID NO: 39237 - protein, 7 aa, synthetic construct
RGDIQSE

SEQ ID NO: 39238 - protein, 7 aa, synthetic construct
RGDIQVS

SEQ ID NO: 39239 - protein, 7 aa, synthetic construct
RGDITDL

SEQ ID NO: 39240 - protein, 7 aa, synthetic construct
RGDITGS

SEQ ID NO: 39241 - protein, 7 aa, synthetic construct
RGDIVLA

SEQ ID NO: 39242 - protein, 7 aa, synthetic construct
RGDKEVG

SEQ ID NO: 39243 - protein, 7 aa, synthetic construct
RGDKLFA

SEQ ID NO: 39244 - protein, 7 aa, synthetic construct
RGDADDV

SEQ ID NO: 39245 - protein, 7 aa, synthetic construct
RGDKLRE

SEQ ID NO: 39246 - protein, 7 aa, synthetic construct
RGDKNTE

SEQ ID NO: 39247 - protein, 7 aa, synthetic construct
RGDKQDS

SEQ ID NO: 39248 - protein, 7 aa, synthetic construct
RGDKSLN

SEQ ID NO: 39249 - protein, 7 aa, synthetic construct
RGDLAIA

SEQ ID NO: 39250 - protein, 7 aa, synthetic construct
RGDASDQ

SEQ ID NO: 39251 - protein, 7 aa, synthetic construct
RGDLFFE

SEQ ID NO: 39252 - protein, 7 aa, synthetic construct
RGDLFTD

SEQ ID NO: 39253 - protein, 7 aa, synthetic construct
RGDLGIL

SEQ ID NO: 39254 - protein, 7 aa, synthetic construct
RGDLGQF

SEQ ID NO: 39255 - protein, 7 aa, synthetic construct
RGDLGTH

SEQ ID NO: 39256 - protein, 7 aa, synthetic construct
RGDLHKL

SEQ ID NO: 39257 - protein, 7 aa, synthetic construct
RGDLIHL

SEQ ID NO: 39258 - protein, 7 aa, synthetic construct
RGDLNFI

SEQ ID NO: 39259 - protein, 7 aa, synthetic construct
RGDLTAE

SEQ ID NO: 39260 - protein, 7 aa, synthetic construct
RGDLTIL

SEQ ID NO: 39261 - protein, 7 aa, synthetic construct
RGDLTLK

SEQ ID NO: 39262 - protein, 7 aa, synthetic construct
RGDLTVL

SEQ ID NO: 39263 - protein, 7 aa, synthetic construct
RGDLVDQ

SEQ ID NO: 39264 - protein, 7 aa, synthetic construct
RGDLVEL

SEQ ID NO: 39265 - protein, 7 aa, synthetic construct
RGDLVLD

SEQ ID NO: 39266 - protein, 7 aa, synthetic construct
RGDNDTG

SEQ ID NO: 39267 - protein, 7 aa, synthetic construct
RGDNEED

SEQ ID NO: 39268 - protein, 7 aa, synthetic construct
RGDNELA

SEQ ID NO: 39269 - protein, 7 aa, synthetic construct
RGDNFEV

SEQ ID NO: 39270 - protein, 7 aa, synthetic construct
RGDNFGN

SEQ ID NO: 39271 - protein, 7 aa, synthetic construct
RGDNFVN

SEQ ID NO: 39272 - protein, 7 aa, synthetic construct
RGDAVEH

SEQ ID NO: 39273 - protein, 7 aa, synthetic construct
RGDNITD

SEQ ID NO: 39274 - protein, 7 aa, synthetic construct
RGDNLDK

SEQ ID NO: 39275 - protein, 7 aa, synthetic construct
RGDNNEH

SEQ ID NO: 39276 - protein, 7 aa, synthetic construct
RGDNNSE

SEQ ID NO: 39277 - protein, 7 aa, synthetic construct
RGDNQLL

SEQ ID NO: 39278 - protein, 7 aa, synthetic construct
RGDNQSD

SEQ ID NO: 39279 - protein, 7 aa, synthetic construct
RGDNQTA

SEQ ID NO: 39280 - protein, 7 aa, synthetic construct
RGDNQTE

SEQ ID NO: 39281 - protein, 7 aa, synthetic construct
RGDNRLS

SEQ ID NO: 39282 - protein, 7 aa, synthetic construct
RGDQDAH

SEQ ID NO: 39283 - protein, 7 aa, synthetic construct
RGDDAET

SEQ ID NO: 39284 - protein, 7 aa, synthetic construct
RGDQDVQ

SEQ ID NO: 39285 - protein, 7 aa, synthetic construct
RGDQDVS

SEQ ID NO: 39286 - protein, 7 aa, synthetic construct
RGDQEHL

SEQ ID NO: 39287 - protein, 7 aa, synthetic construct
RGDQFEQ

SEQ ID NO: 39288 - protein, 7 aa, synthetic construct
RGDQFTE

SEQ ID NO: 39289 - protein, 7 aa, synthetic construct
RGDQHHG

SEQ ID NO: 39290 - protein, 7 aa, synthetic construct
RGDQITA

SEQ ID NO: 39291 - protein, 7 aa, synthetic construct
RGDQTDV

SEQ ID NO: 39292 - protein, 7 aa, synthetic construct
RGDQVFA

SEQ ID NO: 39293 - protein, 7 aa, synthetic construct
RGDQVHA

SEQ ID NO: 39294 - protein, 7 aa, synthetic construct
RGDQVNE

SEQ ID NO: 39295 - protein, 7 aa, synthetic construct
RGDQVQQ

SEQ ID NO: 39296 - protein, 7 aa, synthetic construct
RGDDDQE

SEQ ID NO: 39297 - protein, 7 aa, synthetic construct
RGDDEFE

SEQ ID NO: 39298 - protein, 7 aa, synthetic construct
RGDRTDD

SEQ ID NO: 39299 - protein, 7 aa, synthetic construct
RGDDFDI

SEQ ID NO: 39300 - protein, 7 aa, synthetic construct
RGDSERG

SEQ ID NO: 39301 - protein, 7 aa, synthetic construct
RGDSFAS

SEQ ID NO: 39302 - protein, 7 aa, synthetic construct
RGDSGEA

SEQ ID NO: 39303 - protein, 7 aa, synthetic construct
RGDSHIE

SEQ ID NO: 39304 - protein, 7 aa, synthetic construct
RGDSHTG

SEQ ID NO: 39305 - protein, 7 aa, synthetic construct
RGDSIIE

SEQ ID NO: 39306 - protein, 7 aa, synthetic construct
RGDSLHA

SEQ ID NO: 39307 - protein, 7 aa, synthetic construct
RGDSNFA

SEQ ID NO: 39308 - protein, 7 aa, synthetic construct
RGDSNGH

SEQ ID NO: 39309 - protein, 7 aa, synthetic construct
RGDSNGS

SEQ ID NO: 39310 - protein, 7 aa, synthetic construct
RGDSNHN

SEQ ID NO: 39311 - protein, 7 aa, synthetic construct
RGDDGAR

SEQ ID NO: 39312 - protein, 7 aa, synthetic construct
RGDSREE

SEQ ID NO: 39313 - protein, 7 aa, synthetic construct
RGDDGEN

SEQ ID NO: 39314 - protein, 7 aa, synthetic construct
RGDDGFH

SEQ ID NO: 39315 - protein, 7 aa, synthetic construct
RGDSVIN

SEQ ID NO: 39316 - protein, 7 aa, synthetic construct
RGDTADD

SEQ ID NO: 39317 - protein, 7 aa, synthetic construct
RGDTAIV

SEQ ID NO: 39318 - protein, 7 aa, synthetic construct
RGDDGNH

SEQ ID NO: 39319 - protein, 7 aa, synthetic construct
RGDTEDK

SEQ ID NO: 39320 - protein, 7 aa, synthetic construct
RGDTEGG

SEQ ID NO: 39321 - protein, 7 aa, synthetic construct
RGDTELL

SEQ ID NO: 39322 - protein, 7 aa, synthetic construct
RGDTGRG

SEQ ID NO: 39323 - protein, 7 aa, synthetic construct
RGDDHAV

SEQ ID NO: 39324 - protein, 7 aa, synthetic construct
RGDDHHD

SEQ ID NO: 39325 - protein, 7 aa, synthetic construct
RGDTNDD

SEQ ID NO: 39326 - protein, 7 aa, synthetic construct
RGDTNLD

SEQ ID NO: 39327 - protein, 7 aa, synthetic construct
RGDTQDN

SEQ ID NO: 39328 - protein, 7 aa, synthetic construct
RGDTQEF

SEQ ID NO: 39329 - protein, 7 aa, synthetic construct
RGDTQLS

SEQ ID NO: 39330 - protein, 7 aa, synthetic construct
RGDVESN

SEQ ID NO: 39331 - protein, 7 aa, synthetic construct
RGDVFEN

SEQ ID NO: 39332 - protein, 7 aa, synthetic construct
RGDAEDV

SEQ ID NO: 39333 - protein, 7 aa, synthetic construct
RGDDIKA

SEQ ID NO: 39334 - protein, 7 aa, synthetic construct
RGDDILL

SEQ ID NO: 39335 - protein, 7 aa, synthetic construct
RGDDILS

SEQ ID NO: 39336 - protein, 7 aa, synthetic construct
RGDDIQV

SEQ ID NO: 39337 - protein, 7 aa, synthetic construct
RGDVNGV

SEQ ID NO: 39338 - protein, 7 aa, synthetic construct
RGDVNLN

SEQ ID NO: 39339 - protein, 7 aa, synthetic construct
RGDDIVH

SEQ ID NO: 39340 - protein, 7 aa, synthetic construct
RGDDKHG

SEQ ID NO: 39341 - protein, 7 aa, synthetic construct
RGDVTQG

SEQ ID NO: 39342 - protein, 7 aa, synthetic construct
RGDVTQN

SEQ ID NO: 39343 - protein, 7 aa, synthetic construct
RGDVTTD

SEQ ID NO: 39344 - protein, 7 aa, synthetic construct
RGDVVDE

SEQ ID NO: 39345 - protein, 7 aa, synthetic construct
RGDAEGA

SEQ ID NO: 39346 - protein, 7 aa, synthetic construct
RGDDKRE

SEQ ID NO: 39347 - protein, 7 aa, synthetic construct
RGDDLAL

SEQ ID NO: 39348 - protein, 7 aa, synthetic construct
RGDDLES

SEQ ID NO: 39349 - protein, 7 aa, synthetic construct
RGDDLVS

SEQ ID NO: 39350 - protein, 7 aa, synthetic construct
RGDDQQH

SEQ ID NO: 39351 - protein, 7 aa, synthetic construct
RGDDQSL

SEQ ID NO: 39352 - protein, 7 aa, synthetic construct
RGDAELR

SEQ ID NO: 39353 - protein, 7 aa, synthetic construct
RGDAELT

SEQ ID NO: 39354 - protein, 7 aa, synthetic construct
RGDDRAV

SEQ ID NO: 39355 - protein, 7 aa, synthetic construct
RGDDSTN

SEQ ID NO: 39356 - protein, 7 aa, synthetic construct
RGDDTEL

SEQ ID NO: 39357 - protein, 7 aa, synthetic construct
RGDDTGF

SEQ ID NO: 39358 - protein, 7 aa, synthetic construct
RGDDVID

SEQ ID NO: 39359 - protein, 7 aa, synthetic construct
RGDDVIQ

SEQ ID NO: 39360 - protein, 7 aa, synthetic construct
RGDDVIS

SEQ ID NO: 39361 - protein, 7 aa, synthetic construct
RGDEDKT

SEQ ID NO: 39362 - protein, 7 aa, synthetic construct
RGDEDTG

SEQ ID NO: 39363 - protein, 7 aa, synthetic construct
RGDAFFG

SEQ ID NO: 39364 - protein, 7 aa, synthetic construct
RGDEEFL

SEQ ID NO: 39365 - protein, 7 aa, synthetic construct
RGDAFKD

SEQ ID NO: 39366 - protein, 7 aa, synthetic construct
RGDEIGQ

SEQ ID NO: 39367 - protein, 7 aa, synthetic construct
RGDEIHK

SEQ ID NO: 39368 - protein, 7 aa, synthetic construct
RGDEIHR

SEQ ID NO: 39369 - protein, 7 aa, synthetic construct
RGDEILE

SEQ ID NO: 39370 - protein, 7 aa, synthetic construct
RGDEISQ

SEQ ID NO: 39371 - protein, 7 aa, synthetic construct
RGDAFQK

SEQ ID NO: 39372 - protein, 7 aa, synthetic construct
RGDEKLQ

SEQ ID NO: 39373 - protein, 7 aa, synthetic construct
RGDELIN

SEQ ID NO: 39374 - protein, 7 aa, synthetic construct
RGDELVA

SEQ ID NO: 39375 - protein, 7 aa, synthetic construct
RGDAFTS

SEQ ID NO: 39376 - protein, 7 aa, synthetic construct
RGDENVD

SEQ ID NO: 39377 - protein, 7 aa, synthetic construct
RGDEQFG

SEQ ID NO: 39378 - protein, 7 aa, synthetic construct
RGDERTF

SEQ ID NO: 39379 - protein, 7 aa, synthetic construct
RGDESDK

SEQ ID NO: 39380 - protein, 7 aa, synthetic construct
RGDESGE

SEQ ID NO: 39381 - protein, 7 aa, synthetic construct
RGDETLE

SEQ ID NO: 39382 - protein, 7 aa, synthetic construct
RGDETSG

SEQ ID NO: 39383 - protein, 7 aa, synthetic construct
RGDEVAE

SEQ ID NO: 39384 - protein, 7 aa, synthetic construct
RGDEVET

SEQ ID NO: 39385 - protein, 7 aa, synthetic construct
RGDAAIS

SEQ ID NO: 39386 - protein, 7 aa, synthetic construct
RGDAHDE

SEQ ID NO: 39387 - protein, 7 aa, synthetic construct
RGDFIAG

SEQ ID NO: 39388 - protein, 7 aa, synthetic construct
RGDFLFE

SEQ ID NO: 39389 - protein, 7 aa, synthetic construct
RGDFSID

SEQ ID NO: 39390 - protein, 7 aa, synthetic construct
RGDFTAE

SEQ ID NO: 39391 - protein, 7 aa, synthetic construct
RGDFVFD

SEQ ID NO: 39392 - protein, 7 aa, synthetic construct
RGDGEAN

SEQ ID NO: 39393 - protein, 7 aa, synthetic construct
RGDAIGN

SEQ ID NO: 39394 - protein, 7 aa, synthetic construct
RGDAILE

SEQ ID NO: 39395 - protein, 7 aa, synthetic construct
RGDGHRD

SEQ ID NO: 39396 - protein, 7 aa, synthetic construct
RGDGHSG

SEQ ID NO: 39397 - protein, 7 aa, synthetic construct
RGDGIIQ

SEQ ID NO: 39398 - protein, 7 aa, synthetic construct
RGDGNIG

SEQ ID NO: 39399 - protein, 7 aa, synthetic construct
RGDGNLN

SEQ ID NO: 39400 - protein, 7 aa, synthetic construct
RGDGSSE

SEQ ID NO: 39401 - protein, 7 aa, synthetic construct
RGDHDIT

SEQ ID NO: 39402 - protein, 7 aa, synthetic construct
RGDHEFD

SEQ ID NO: 39403 - protein, 7 aa, synthetic construct
RGDHEVE

SEQ ID NO: 39404 - protein, 7 aa, synthetic construct
RGDHFHN

SEQ ID NO: 39405 - protein, 7 aa, synthetic construct
RGDHFIS

SEQ ID NO: 39406 - protein, 7 aa, synthetic construct
RGDHHLT

SEQ ID NO: 39407 - protein, 7 aa, synthetic construct
RGDHHLV

SEQ ID NO: 39408 - protein, 7 aa, synthetic construct
RGDHIAH

SEQ ID NO: 39409 - protein, 7 aa, synthetic construct
RGDHITE

SEQ ID NO: 39410 - protein, 7 aa, synthetic construct
RGDAASG

SEQ ID NO: 39411 - protein, 7 aa, synthetic construct
RGDHKIE

SEQ ID NO: 39412 - protein, 7 aa, synthetic construct
RGDALGG

SEQ ID NO: 39413 - protein, 7 aa, synthetic construct
RGDHKVI

SEQ ID NO: 39414 - protein, 7 aa, synthetic construct
RGDHKVQ

SEQ ID NO: 39415 - protein, 7 aa, synthetic construct
RGDHLIH

SEQ ID NO: 39416 - protein, 7 aa, synthetic construct
RGDHQGE

SEQ ID NO: 39417 - protein, 7 aa, synthetic construct
RGDIALL

SEQ ID NO: 39418 - protein, 7 aa, synthetic construct
RGDIDTD

SEQ ID NO: 39419 - protein, 7 aa, synthetic construct
RGDIEAA

SEQ ID NO: 39420 - protein, 7 aa, synthetic construct
RGDANGH

SEQ ID NO: 39421 - protein, 7 aa, synthetic construct
RGDIGRI

SEQ ID NO: 39422 - protein, 7 aa, synthetic construct
RGDIHVA

SEQ ID NO: 39423 - protein, 7 aa, synthetic construct
RGDIITS

SEQ ID NO: 39424 - protein, 7 aa, synthetic construct
RGDILDS

SEQ ID NO: 39425 - protein, 7 aa, synthetic construct
RGDINGH

SEQ ID NO: 39426 - protein, 7 aa, synthetic construct
RGDAQKG

SEQ ID NO: 39427 - protein, 7 aa, synthetic construct
RGDKDGL

SEQ ID NO: 39428 - protein, 7 aa, synthetic construct
RGDKEQE

SEQ ID NO: 39429 - protein, 7 aa, synthetic construct
RGDKFTG

SEQ ID NO: 39430 - protein, 7 aa, synthetic construct
RGDKHVN

SEQ ID NO: 39431 - protein, 7 aa, synthetic construct
RGDKILA

SEQ ID NO: 39432 - protein, 7 aa, synthetic construct
RGDKIQQ

SEQ ID NO: 39433 - protein, 7 aa, synthetic construct
RGDADEN

SEQ ID NO: 39434 - protein, 7 aa, synthetic construct
RGDLAFD

SEQ ID NO: 39435 - protein, 7 aa, synthetic construct
RGDLAFH

SEQ ID NO: 39436 - protein, 7 aa, synthetic construct
RGDLAQG

SEQ ID NO: 39437 - protein, 7 aa, synthetic construct
RGDASDI

SEQ ID NO: 39438 - protein, 7 aa, synthetic construct
RGDASEN

SEQ ID NO: 39439 - protein, 7 aa, synthetic construct
RGDLDVQ

SEQ ID NO: 39440 - protein, 7 aa, synthetic construct
RGDLFDG

SEQ ID NO: 39441 - protein, 7 aa, synthetic construct
RGDLFQF

SEQ ID NO: 39442 - protein, 7 aa, synthetic construct
RGDLGIF

SEQ ID NO: 39443 - protein, 7 aa, synthetic construct
RGDLHFF

SEQ ID NO: 39444 - protein, 7 aa, synthetic construct
RGDLLER

SEQ ID NO: 39445 - protein, 7 aa, synthetic construct
RGDLLLL

SEQ ID NO: 39446 - protein, 7 aa, synthetic construct
RGDLNFL

SEQ ID NO: 39447 - protein, 7 aa, synthetic construct
RGDLQLI

SEQ ID NO: 39448 - protein, 7 aa, synthetic construct
RGDATFT

SEQ ID NO: 39449 - protein, 7 aa, synthetic construct
RGDLTEI

SEQ ID NO: 39450 - protein, 7 aa, synthetic construct
RGDADHE

SEQ ID NO: 39451 - protein, 7 aa, synthetic construct
RGDNDEF

SEQ ID NO: 39452 - protein, 7 aa, synthetic construct
RGDNDQL

SEQ ID NO: 39453 - protein, 7 aa, synthetic construct
RGDNETD

SEQ ID NO: 39454 - protein, 7 aa, synthetic construct
RGDNEVA

SEQ ID NO: 39455 - protein, 7 aa, synthetic construct
RGDNFHQ

SEQ ID NO: 39456 - protein, 7 aa, synthetic construct
RGDATTA

SEQ ID NO: 39457 - protein, 7 aa, synthetic construct
RGDAVAK

SEQ ID NO: 39458 - protein, 7 aa, synthetic construct
RGDNNVA

SEQ ID NO: 39459 - protein, 7 aa, synthetic construct
RGDNRLG

SEQ ID NO: 39460 - protein, 7 aa, synthetic construct
RGDNSAG

SEQ ID NO: 39461 - protein, 7 aa, synthetic construct
RGDNTLG

SEQ ID NO: 39462 - protein, 7 aa, synthetic construct
RGDNVAF

SEQ ID NO: 39463 - protein, 7 aa, synthetic construct
RGDQDKS

SEQ ID NO: 39464 - protein, 7 aa, synthetic construct
RGDQEVA

SEQ ID NO: 39465 - protein, 7 aa, synthetic construct
RGDQEVG

SEQ ID NO: 39466 - protein, 7 aa, synthetic construct
RGDQFTS

SEQ ID NO: 39467 - protein, 7 aa, synthetic construct
RGDQFVT

SEQ ID NO: 39468 - protein, 7 aa, synthetic construct
RGDDANL

SEQ ID NO: 39469 - protein, 7 aa, synthetic construct
RGDQQDV

SEQ ID NO: 39470 - protein, 7 aa, synthetic construct
RGDQQFG

SEQ ID NO: 39471 - protein, 7 aa, synthetic construct
RGDQQIK

SEQ ID NO: 39472 - protein, 7 aa, synthetic construct
RGDADNH

SEQ ID NO: 39473 - protein, 7 aa, synthetic construct
RGDADNI

SEQ ID NO: 39474 - protein, 7 aa, synthetic construct
RGDDDGN

SEQ ID NO: 39475 - protein, 7 aa, synthetic construct
RGDQTVN

SEQ ID NO: 39476 - protein, 7 aa, synthetic construct
RGDAAEI

SEQ ID NO: 39477 - protein, 7 aa, synthetic construct
RGDQVLS

SEQ ID NO: 39478 - protein, 7 aa, synthetic construct
RGDRDIG

SEQ ID NO: 39479 - protein, 7 aa, synthetic construct
RGDREVD

SEQ ID NO: 39480 - protein, 7 aa, synthetic construct
RGDDDVT

SEQ ID NO: 39481 - protein, 7 aa, synthetic construct
RGDRQAE

SEQ ID NO: 39482 - protein, 7 aa, synthetic construct
RGDRQEG

SEQ ID NO: 39483 - protein, 7 aa, synthetic construct
RGDDESS

SEQ ID NO: 39484 - protein, 7 aa, synthetic construct
RGDRVDD

SEQ ID NO: 39485 - protein, 7 aa, synthetic construct
RGDRVEG

SEQ ID NO: 39486 - protein, 7 aa, synthetic construct
RGDSALE

SEQ ID NO: 39487 - protein, 7 aa, synthetic construct
RGDDFDT

SEQ ID NO: 39488 - protein, 7 aa, synthetic construct
RGDSDTQ

SEQ ID NO: 39489 - protein, 7 aa, synthetic construct
RGDSFEI

SEQ ID NO: 39490 - protein, 7 aa, synthetic construct
RGDSFES

SEQ ID NO: 39491 - protein, 7 aa, synthetic construct
RGDSFSA

SEQ ID NO: 39492 - protein, 7 aa, synthetic construct
RGDSGVE

SEQ ID NO: 39493 - protein, 7 aa, synthetic construct
RGDSHDI

SEQ ID NO: 39494 - protein, 7 aa, synthetic construct
RGDSIGN

SEQ ID NO: 39495 - protein, 7 aa, synthetic construct
RGDSKLD

SEQ ID NO: 39496 - protein, 7 aa, synthetic construct
RGDSNIN

SEQ ID NO: 39497 - protein, 7 aa, synthetic construct
RGDSSAD

SEQ ID NO: 39498 - protein, 7 aa, synthetic construct
RGDSTDF

SEQ ID NO: 39499 - protein, 7 aa, synthetic construct
RGDSTIE

SEQ ID NO: 39500 - protein, 7 aa, synthetic construct
RGDSVAN

SEQ ID NO: 39501 - protein, 7 aa, synthetic construct
RGDTAHN

SEQ ID NO: 39502 - protein, 7 aa, synthetic construct
RGDTDKH

SEQ ID NO: 39503 - protein, 7 aa, synthetic construct
RGDTEHT

SEQ ID NO: 39504 - protein, 7 aa, synthetic construct
RGDTFAG

SEQ ID NO: 39505 - protein, 7 aa, synthetic construct
RGDDGSA

SEQ ID NO: 39506 - protein, 7 aa, synthetic construct
RGDTGSF

SEQ ID NO: 39507 - protein, 7 aa, synthetic construct
RGDTHQD

SEQ ID NO: 39508 - protein, 7 aa, synthetic construct
RGDTIVD

SEQ ID NO: 39509 - protein, 7 aa, synthetic construct
RGDDHGH

SEQ ID NO: 39510 - protein, 7 aa, synthetic construct
RGDTLDG

SEQ ID NO: 39511 - protein, 7 aa, synthetic construct
RGDTNFN

SEQ ID NO: 39512 - protein, 7 aa, synthetic construct
RGDTSAE

SEQ ID NO: 39513 - protein, 7 aa, synthetic construct
RGDTVQA

SEQ ID NO: 39514 - protein, 7 aa, synthetic construct
RGDVAEV

SEQ ID NO: 39515 - protein, 7 aa, synthetic construct
RGDVALL

SEQ ID NO: 39516 - protein, 7 aa, synthetic construct
RGDVALS

SEQ ID NO: 39517 - protein, 7 aa, synthetic construct
RGDVATE

SEQ ID NO: 39518 - protein, 7 aa, synthetic construct
RGDVDSF

SEQ ID NO: 39519 - protein, 7 aa, synthetic construct
RGDDIES

SEQ ID NO: 39520 - protein, 7 aa, synthetic construct
RGDVFET

SEQ ID NO: 39521 - protein, 7 aa, synthetic construct
RGDVFKQ

SEQ ID NO: 39522 - protein, 7 aa, synthetic construct
RGDVGDE

SEQ ID NO: 39523 - protein, 7 aa, synthetic construct
RGDVGEF

SEQ ID NO: 39524 - protein, 7 aa, synthetic construct
RGDVGGL

SEQ ID NO: 39525 - protein, 7 aa, synthetic construct
RGDVGRA

SEQ ID NO: 39526 - protein, 7 aa, synthetic construct
RGDVGVE

SEQ ID NO: 39527 - protein, 7 aa, synthetic construct
RGDVGVQ

SEQ ID NO: 39528 - protein, 7 aa, synthetic construct
RGDVHAN

SEQ ID NO: 39529 - protein, 7 aa, synthetic construct
RGDVIES

SEQ ID NO: 39530 - protein, 7 aa, synthetic construct
RGDVITD

SEQ ID NO: 39531 - protein, 7 aa, synthetic construct
RGDDKAF

SEQ ID NO: 39532 - protein, 7 aa, synthetic construct
RGDVSQA

SEQ ID NO: 39533 - protein, 7 aa, synthetic construct
RGDVTDA

SEQ ID NO: 39534 - protein, 7 aa, synthetic construct
RGDVVDL

SEQ ID NO: 39535 - protein, 7 aa, synthetic construct
RGDDKLV

SEQ ID NO: 39536 - protein, 7 aa, synthetic construct
RGDDNDI

SEQ ID NO: 39537 - protein, 7 aa, synthetic construct
RGDDQIN

SEQ ID NO: 39538 - protein, 7 aa, synthetic construct
RGDDQSK

SEQ ID NO: 39539 - protein, 7 aa, synthetic construct
RGDDQVS

SEQ ID NO: 39540 - protein, 7 aa, synthetic construct
RGDAENI

SEQ ID NO: 39541 - protein, 7 aa, synthetic construct
RGDDRIR

SEQ ID NO: 39542 - protein, 7 aa, synthetic construct
RGDDRTA

SEQ ID NO: 39543 - protein, 7 aa, synthetic construct
RGDDSIL

SEQ ID NO: 39544 - protein, 7 aa, synthetic construct
RGDDVFL

SEQ ID NO: 39545 - protein, 7 aa, synthetic construct
RGDDVGD

SEQ ID NO: 39546 - protein, 7 aa, synthetic construct
RGDDVTS

SEQ ID NO: 39547 - protein, 7 aa, synthetic construct
RGDEDKG

SEQ ID NO: 39548 - protein, 7 aa, synthetic construct
RGDEDKN

SEQ ID NO: 39549 - protein, 7 aa, synthetic construct
RGDEDLV

SEQ ID NO: 39550 - protein, 7 aa, synthetic construct
RGDEEIQ

SEQ ID NO: 39551 - protein, 7 aa, synthetic construct
RGDEEKV

SEQ ID NO: 39552 - protein, 7 aa, synthetic construct
RGDEELS

SEQ ID NO: 39553 - protein, 7 aa, synthetic construct
RGDAFGV

SEQ ID NO: 39554 - protein, 7 aa, synthetic construct
RGDEFQF

SEQ ID NO: 39555 - protein, 7 aa, synthetic construct
RGDEHLD

SEQ ID NO: 39556 - protein, 7 aa, synthetic construct
RGDEIGT

SEQ ID NO: 39557 - protein, 7 aa, synthetic construct
RGDEINN

SEQ ID NO: 39558 - protein, 7 aa, synthetic construct
RGDEKKV

SEQ ID NO: 39559 - protein, 7 aa, synthetic construct
RGDAFRN

SEQ ID NO: 39560 - protein, 7 aa, synthetic construct
RGDENLA

SEQ ID NO: 39561 - protein, 7 aa, synthetic construct
RGDENNH

SEQ ID NO: 39562 - protein, 7 aa, synthetic construct
RGDEQIK

SEQ ID NO: 39563 - protein, 7 aa, synthetic construct
RGDAGDV

SEQ ID NO: 39564 - protein, 7 aa, synthetic construct
RGDAGEH

SEQ ID NO: 39565 - protein, 7 aa, synthetic construct
RGDESEA

SEQ ID NO: 39566 - protein, 7 aa, synthetic construct
RGDESGL

SEQ ID NO: 39567 - protein, 7 aa, synthetic construct
RGDETNH

SEQ ID NO: 39568 - protein, 7 aa, synthetic construct
RGDETSV

SEQ ID NO: 39569 - protein, 7 aa, synthetic construct
RGDEVDG

SEQ ID NO: 39570 - protein, 7 aa, synthetic construct
RGDEVLF

SEQ ID NO: 39571 - protein, 7 aa, synthetic construct
RGDFDHD

SEQ ID NO: 39572 - protein, 7 aa, synthetic construct
RGDFLFT

SEQ ID NO: 39573 - protein, 7 aa, synthetic construct
RGDFTTL

SEQ ID NO: 39574 - protein, 7 aa, synthetic construct
RGDFTVE

SEQ ID NO: 39575 - protein, 7 aa, synthetic construct
RGDGASD

SEQ ID NO: 39576 - protein, 7 aa, synthetic construct
RGDGDDD

SEQ ID NO: 39577 - protein, 7 aa, synthetic construct
RGDGIED

SEQ ID NO: 39578 - protein, 7 aa, synthetic construct
RGDGISG

SEQ ID NO: 39579 - protein, 7 aa, synthetic construct
RGDAITS

SEQ ID NO: 39580 - protein, 7 aa, synthetic construct
RGDGNLD

SEQ ID NO: 39581 - protein, 7 aa, synthetic construct
RGDGQLI

SEQ ID NO: 39582 - protein, 7 aa, synthetic construct
RGDGQVS

SEQ ID NO: 39583 - protein, 7 aa, synthetic construct
RGDGSED

SEQ ID NO: 39584 - protein, 7 aa, synthetic construct
RGDHAIF

SEQ ID NO: 39585 - protein, 7 aa, synthetic construct
RGDHEGD

SEQ ID NO: 39586 - protein, 7 aa, synthetic construct
RGDHELN

SEQ ID NO: 39587 - protein, 7 aa, synthetic construct
RGDHFED

SEQ ID NO: 39588 - protein, 7 aa, synthetic construct
RGDHFEV

SEQ ID NO: 39589 - protein, 7 aa, synthetic construct
RGDHHAS

SEQ ID NO: 39590 - protein, 7 aa, synthetic construct
RGDHIDN

SEQ ID NO: 39591 - protein, 7 aa, synthetic construct
RGDHQDN

SEQ ID NO: 39592 - protein, 7 aa, synthetic construct
RGDALNQ

SEQ ID NO: 39593 - protein, 7 aa, synthetic construct
RGDHVAE

SEQ ID NO: 39594 - protein, 7 aa, synthetic construct
RGDHVVS

SEQ ID NO: 39595 - protein, 7 aa, synthetic construct
RGDANAR

SEQ ID NO: 39596 - protein, 7 aa, synthetic construct
RGDIDIT

SEQ ID NO: 39597 - protein, 7 aa, synthetic construct
RGDIDND

SEQ ID NO: 39598 - protein, 7 aa, synthetic construct
RGDANEV

SEQ ID NO: 39599 - protein, 7 aa, synthetic construct
RGDIHLN

SEQ ID NO: 39600 - protein, 7 aa, synthetic construct
RGDIIIA

SEQ ID NO: 39601 - protein, 7 aa, synthetic construct
RGDIRRE

SEQ ID NO: 39602 - protein, 7 aa, synthetic construct
RGDAQGE

SEQ ID NO: 39603 - protein, 7 aa, synthetic construct
RGDIVQD

SEQ ID NO: 39604 - protein, 7 aa, synthetic construct
RGDKANF

SEQ ID NO: 39605 - protein, 7 aa, synthetic construct
RGDKDDL

SEQ ID NO: 39606 - protein, 7 aa, synthetic construct
RGDKDEN

SEQ ID NO: 39607 - protein, 7 aa, synthetic construct
RGDKESN

SEQ ID NO: 39608 - protein, 7 aa, synthetic construct
RGDARGD

SEQ ID NO: 39609 - protein, 7 aa, synthetic construct
RGDKNVE

SEQ ID NO: 39610 - protein, 7 aa, synthetic construct
RGDKVHE

SEQ ID NO: 39611 - protein, 7 aa, synthetic construct
RGDLEVF

SEQ ID NO: 39612 - protein, 7 aa, synthetic construct
RGDLGEV

SEQ ID NO: 39613 - protein, 7 aa, synthetic construct
RGDLHEG

SEQ ID NO: 39614 - protein, 7 aa, synthetic construct
RGDLIND

SEQ ID NO: 39615 - protein, 7 aa, synthetic construct
RGDLNDK

SEQ ID NO: 39616 - protein, 7 aa, synthetic construct
RGDATAK

SEQ ID NO: 39617 - protein, 7 aa, synthetic construct
RGDATIT

SEQ ID NO: 39618 - protein, 7 aa, synthetic construct
RGDLVQL

SEQ ID NO: 39619 - protein, 7 aa, synthetic construct
RGDLVTF

SEQ ID NO: 39620 - protein, 7 aa, synthetic construct
RGDNDDH

SEQ ID NO: 39621 - protein, 7 aa, synthetic construct
RGDNDIE

SEQ ID NO: 39622 - protein, 7 aa, synthetic construct
RGDNFIR

SEQ ID NO: 39623 - protein, 7 aa, synthetic construct
RGDATVA

SEQ ID NO: 39624 - protein, 7 aa, synthetic construct
RGDATVS

SEQ ID NO: 39625 - protein, 7 aa, synthetic construct
RGDNHFD

SEQ ID NO: 39626 - protein, 7 aa, synthetic construct
RGDAVDG

SEQ ID NO: 39627 - protein, 7 aa, synthetic construct
RGDNIEN

SEQ ID NO: 39628 - protein, 7 aa, synthetic construct
RGDNIFG

SEQ ID NO: 39629 - protein, 7 aa, synthetic construct
RGDNITG

SEQ ID NO: 39630 - protein, 7 aa, synthetic construct
RGDNKLG

SEQ ID NO: 39631 - protein, 7 aa, synthetic construct
RGDNVAN

SEQ ID NO: 39632 - protein, 7 aa, synthetic construct
RGDQDHG

SEQ ID NO: 39633 - protein, 7 aa, synthetic construct
RGDDAEL

SEQ ID NO: 39634 - protein, 7 aa, synthetic construct
RGDQEQE

SEQ ID NO: 39635 - protein, 7 aa, synthetic construct
RGDQFEG

SEQ ID NO: 39636 - protein, 7 aa, synthetic construct
RGDQFHH

SEQ ID NO: 39637 - protein, 7 aa, synthetic construct
RGDDAHL

SEQ ID NO: 39638 - protein, 7 aa, synthetic construct
RGDQHLN

SEQ ID NO: 39639 - protein, 7 aa, synthetic construct
RGDQILE

SEQ ID NO: 39640 - protein, 7 aa, synthetic construct
RGDQNDT

SEQ ID NO: 39641 - protein, 7 aa, synthetic construct
RGDDAVD

SEQ ID NO: 39642 - protein, 7 aa, synthetic construct
RGDQNLA

SEQ ID NO: 39643 - protein, 7 aa, synthetic construct
RGDQQDH

SEQ ID NO: 39644 - protein, 7 aa, synthetic construct
RGDDDHA

SEQ ID NO: 39645 - protein, 7 aa, synthetic construct
RGDRFDH

SEQ ID NO: 39646 - protein, 7 aa, synthetic construct
RGDRFVE

SEQ ID NO: 39647 - protein, 7 aa, synthetic construct
RGDDEES

SEQ ID NO: 39648 - protein, 7 aa, synthetic construct
RGDDEGT

SEQ ID NO: 39649 - protein, 7 aa, synthetic construct
RGDDEIF

SEQ ID NO: 39650 - protein, 7 aa, synthetic construct
RGDDEVH

SEQ ID NO: 39651 - protein, 7 aa, synthetic construct
RGDDEVT

SEQ ID NO: 39652 - protein, 7 aa, synthetic construct
RGDSALH

SEQ ID NO: 39653 - protein, 7 aa, synthetic construct
RGDSDGD

SEQ ID NO: 39654 - protein, 7 aa, synthetic construct
RGDSDID

SEQ ID NO: 39655 - protein, 7 aa, synthetic construct
RGDSEEF

SEQ ID NO: 39656 - protein, 7 aa, synthetic construct
RGDSFDG

SEQ ID NO: 39657 - protein, 7 aa, synthetic construct
RGDSFDK

SEQ ID NO: 39658 - protein, 7 aa, synthetic construct
RGDSFGK

SEQ ID NO: 39659 - protein, 7 aa, synthetic construct
RGDDFHG

SEQ ID NO: 39660 - protein, 7 aa, synthetic construct
RGDSFVS

SEQ ID NO: 39661 - protein, 7 aa, synthetic construct
RGDSGIF

SEQ ID NO: 39662 - protein, 7 aa, synthetic construct
RGDSHIH

SEQ ID NO: 39663 - protein, 7 aa, synthetic construct
RGDDFVE

SEQ ID NO: 39664 - protein, 7 aa, synthetic construct
RGDDGIG

SEQ ID NO: 39665 - protein, 7 aa, synthetic construct
RGDDGNA

SEQ ID NO: 39666 - protein, 7 aa, synthetic construct
RGDTDDH

SEQ ID NO: 39667 - protein, 7 aa, synthetic construct
RGDTHNA

SEQ ID NO: 39668 - protein, 7 aa, synthetic construct
RGDTHSD

SEQ ID NO: 39669 - protein, 7 aa, synthetic construct
RGDTIFD

SEQ ID NO: 39670 - protein, 7 aa, synthetic construct
RGDTKRG

SEQ ID NO: 39671 - protein, 7 aa, synthetic construct
RGDTLVE

SEQ ID NO: 39672 - protein, 7 aa, synthetic construct
RGDTNAE

SEQ ID NO: 39673 - protein, 7 aa, synthetic construct
RGDTNFV

SEQ ID NO: 39674 - protein, 7 aa, synthetic construct
RGDTNIE

SEQ ID NO: 39675 - protein, 7 aa, synthetic construct
RGDDHIV

SEQ ID NO: 39676 - protein, 7 aa, synthetic construct
RGDDHLE

SEQ ID NO: 39677 - protein, 7 aa, synthetic construct
RGDTQLI

SEQ ID NO: 39678 - protein, 7 aa, synthetic construct
RGDTTTN

SEQ ID NO: 39679 - protein, 7 aa, synthetic construct
RGDTVKD

SEQ ID NO: 39680 - protein, 7 aa, synthetic construct
RGDTVVG

SEQ ID NO: 39681 - protein, 7 aa, synthetic construct
RGDVDIE

SEQ ID NO: 39682 - protein, 7 aa, synthetic construct
RGDVGRG

SEQ ID NO: 39683 - protein, 7 aa, synthetic construct
RGDVHDG

SEQ ID NO: 39684 - protein, 7 aa, synthetic construct
RGDVHED

SEQ ID NO: 39685 - protein, 7 aa, synthetic construct
RGDVLTD

SEQ ID NO: 39686 - protein, 7 aa, synthetic construct
RGDVNDG

SEQ ID NO: 39687 - protein, 7 aa, synthetic construct
RGDVNEI

SEQ ID NO: 39688 - protein, 7 aa, synthetic construct
RGDVNQA

SEQ ID NO: 39689 - protein, 7 aa, synthetic construct
RGDAAFG

SEQ ID NO: 39690 - protein, 7 aa, synthetic construct
RGDVTAE

SEQ ID NO: 39691 - protein, 7 aa, synthetic construct
RGDVVKA

SEQ ID NO: 39692 - protein, 7 aa, synthetic construct
RGDDKSN

SEQ ID NO: 39693 - protein, 7 aa, synthetic construct
RGDDLFL

SEQ ID NO: 39694 - protein, 7 aa, synthetic construct
RGDDLKA

SEQ ID NO: 39695 - protein, 7 aa, synthetic construct
RGDDQEN

SEQ ID NO: 39696 - protein, 7 aa, synthetic construct
RGDDQNS

SEQ ID NO: 39697 - protein, 7 aa, synthetic construct
RGDDQQS

SEQ ID NO: 39698 - protein, 7 aa, synthetic construct
RGDDREQ

SEQ ID NO: 39699 - protein, 7 aa, synthetic construct
RGDDTAS

SEQ ID NO: 39700 - protein, 7 aa, synthetic construct
RGDDTDK

SEQ ID NO: 39701 - protein, 7 aa, synthetic construct
RGDDTIA

SEQ ID NO: 39702 - protein, 7 aa, synthetic construct
RGDDVVE

SEQ ID NO: 39703 - protein, 7 aa, synthetic construct
RGDEALD

SEQ ID NO: 39704 - protein, 7 aa, synthetic construct
RGDEASF

SEQ ID NO: 39705 - protein, 7 aa, synthetic construct
RGDEDQN

SEQ ID NO: 39706 - protein, 7 aa, synthetic construct
RGDEDRT

SEQ ID NO: 39707 - protein, 7 aa, synthetic construct
RGDEEHF

SEQ ID NO: 39708 - protein, 7 aa, synthetic construct
RGDEFIQ

SEQ ID NO: 39709 - protein, 7 aa, synthetic construct
RGDEGFD

SEQ ID NO: 39710 - protein, 7 aa, synthetic construct
RGDEGQV

SEQ ID NO: 39711 - protein, 7 aa, synthetic construct
RGDEHAT

SEQ ID NO: 39712 - protein, 7 aa, synthetic construct
RGDEIRK

SEQ ID NO: 39713 - protein, 7 aa, synthetic construct
RGDEKIK

SEQ ID NO: 39714 - protein, 7 aa, synthetic construct
RGDENHD

SEQ ID NO: 39715 - protein, 7 aa, synthetic construct
RGDEQFD

SEQ ID NO: 39716 - protein, 7 aa, synthetic construct
RGDEQGD

SEQ ID NO: 39717 - protein, 7 aa, synthetic construct
RGDESRF

SEQ ID NO: 39718 - protein, 7 aa, synthetic construct
RGDESTE

SEQ ID NO: 39719 - protein, 7 aa, synthetic construct
RGDETNN

SEQ ID NO: 39720 - protein, 7 aa, synthetic construct
RGDETTL

SEQ ID NO: 39721 - protein, 7 aa, synthetic construct
RGDETVH

SEQ ID NO: 39722 - protein, 7 aa, synthetic construct
RGDEVDS

SEQ ID NO: 39723 - protein, 7 aa, synthetic construct
RGDFDED

SEQ ID NO: 39724 - protein, 7 aa, synthetic construct
RGDFEQG

SEQ ID NO: 39725 - protein, 7 aa, synthetic construct
RGDFHDT

SEQ ID NO: 39726 - protein, 7 aa, synthetic construct
RGDAHDV

SEQ ID NO: 39727 - protein, 7 aa, synthetic construct
RGDFLAG

SEQ ID NO: 39728 - protein, 7 aa, synthetic construct
RGDFNKG

SEQ ID NO: 39729 - protein, 7 aa, synthetic construct
RGDFTLK

SEQ ID NO: 39730 - protein, 7 aa, synthetic construct
RGDFVQD

SEQ ID NO: 39731 - protein, 7 aa, synthetic construct
RGDFVRG

SEQ ID NO: 39732 - protein, 7 aa, synthetic construct
RGDGDEQ

SEQ ID NO: 39733 - protein, 7 aa, synthetic construct
RGDGEAF

SEQ ID NO: 39734 - protein, 7 aa, synthetic construct
RGDGEFI

SEQ ID NO: 39735 - protein, 7 aa, synthetic construct
RGDGHHD

SEQ ID NO: 39736 - protein, 7 aa, synthetic construct
RGDGIFA

SEQ ID NO: 39737 - protein, 7 aa, synthetic construct
RGDGILK

SEQ ID NO: 39738 - protein, 7 aa, synthetic construct
RGDGNAT

SEQ ID NO: 39739 - protein, 7 aa, synthetic construct
RGDGQVD

SEQ ID NO: 39740 - protein, 7 aa, synthetic construct
RGDGTLA

SEQ ID NO: 39741 - protein, 7 aa, synthetic construct
RGDGVVN

SEQ ID NO: 39742 - protein, 7 aa, synthetic construct
RGDHAEF

SEQ ID NO: 39743 - protein, 7 aa, synthetic construct
RGDHELE

SEQ ID NO: 39744 - protein, 7 aa, synthetic construct
RGDHFDK

SEQ ID NO: 39745 - protein, 7 aa, synthetic construct
RGDHFET

SEQ ID NO: 39746 - protein, 7 aa, synthetic construct
RGDHGEA

SEQ ID NO: 39747 - protein, 7 aa, synthetic construct
RGDHHED

SEQ ID NO: 39748 - protein, 7 aa, synthetic construct
RGDHHTG

SEQ ID NO: 39749 - protein, 7 aa, synthetic construct
RGDHIKA

SEQ ID NO: 39750 - protein, 7 aa, synthetic construct
RGDHKSA

SEQ ID NO: 39751 - protein, 7 aa, synthetic construct
RGDHLFS

SEQ ID NO: 39752 - protein, 7 aa, synthetic construct
RGDHLLH

SEQ ID NO: 39753 - protein, 7 aa, synthetic construct
RGDALHH

SEQ ID NO: 39754 - protein, 7 aa, synthetic construct
RGDHLSN

SEQ ID NO: 39755 - protein, 7 aa, synthetic construct
RGDHQIV

SEQ ID NO: 39756 - protein, 7 aa, synthetic construct
RGDALLN

SEQ ID NO: 39757 - protein, 7 aa, synthetic construct
RGDHRVN

SEQ ID NO: 39758 - protein, 7 aa, synthetic construct
RGDHTDA

SEQ ID NO: 39759 - protein, 7 aa, synthetic construct
RGDHTIF

SEQ ID NO: 39760 - protein, 7 aa, synthetic construct
RGDHVGH

SEQ ID NO: 39761 - protein, 7 aa, synthetic construct
RGDANDQ

SEQ ID NO: 39762 - protein, 7 aa, synthetic construct
RGDIDSE

SEQ ID NO: 39763 - protein, 7 aa, synthetic construct
RGDIEQG

SEQ ID NO: 39764 - protein, 7 aa, synthetic construct
RGDIFLA

SEQ ID NO: 39765 - protein, 7 aa, synthetic construct
RGDIFTE

SEQ ID NO: 39766 - protein, 7 aa, synthetic construct
RGDIFVA

SEQ ID NO: 39767 - protein, 7 aa, synthetic construct
RGDIFVL

SEQ ID NO: 39768 - protein, 7 aa, synthetic construct
RGDIHKG

SEQ ID NO: 39769 - protein, 7 aa, synthetic construct
RGDIIDK

SEQ ID NO: 39770 - protein, 7 aa, synthetic construct
RGDANNN

SEQ ID NO: 39771 - protein, 7 aa, synthetic construct
RGDANQV

SEQ ID NO: 39772 - protein, 7 aa, synthetic construct
RGDILSE

SEQ ID NO: 39773 - protein, 7 aa, synthetic construct
RGDINQS

SEQ ID NO: 39774 - protein, 7 aa, synthetic construct
RGDINVH

SEQ ID NO: 39775 - protein, 7 aa, synthetic construct
RGDITDK

SEQ ID NO: 39776 - protein, 7 aa, synthetic construct
RGDITHG

SEQ ID NO: 39777 - protein, 7 aa, synthetic construct
RGDITKA

SEQ ID NO: 39778 - protein, 7 aa, synthetic construct
RGDITQN

SEQ ID NO: 39779 - protein, 7 aa, synthetic construct
RGDIVEE

SEQ ID NO: 39780 - protein, 7 aa, synthetic construct
RGDIVEH

SEQ ID NO: 39781 - protein, 7 aa, synthetic construct
RGDAQIQ

SEQ ID NO: 39782 - protein, 7 aa, synthetic construct
RGDIVVG

SEQ ID NO: 39783 - protein, 7 aa, synthetic construct
RGDKAAA

SEQ ID NO: 39784 - protein, 7 aa, synthetic construct
RGDAQNG

SEQ ID NO: 39785 - protein, 7 aa, synthetic construct
RGDKIEE

SEQ ID NO: 39786 - protein, 7 aa, synthetic construct
RGDKLLG

SEQ ID NO: 39787 - protein, 7 aa, synthetic construct
RGDKQAE

SEQ ID NO: 39788 - protein, 7 aa, synthetic construct
RGDKQFD

SEQ ID NO: 39789 - protein, 7 aa, synthetic construct
RGDLAAR

SEQ ID NO: 39790 - protein, 7 aa, synthetic construct
RGDLHSF

SEQ ID NO: 39791 - protein, 7 aa, synthetic construct
RGDLIDD

SEQ ID NO: 39792 - protein, 7 aa, synthetic construct
RGDLIIE

SEQ ID NO: 39793 - protein, 7 aa, synthetic construct
RGDLISE

SEQ ID NO: 39794 - protein, 7 aa, synthetic construct
RGDLLAF

SEQ ID NO: 39795 - protein, 7 aa, synthetic construct
RGDLLDF

SEQ ID NO: 39796 - protein, 7 aa, synthetic construct
RGDLNSD

SEQ ID NO: 39797 - protein, 7 aa, synthetic construct
RGDLQFQ

SEQ ID NO: 39798 - protein, 7 aa, synthetic construct
RGDLQTL

SEQ ID NO: 39799 - protein, 7 aa, synthetic construct
RGDLTAF

SEQ ID NO: 39800 - protein, 7 aa, synthetic construct
RGDNGGG

SEQ ID NO: 39801 - protein, 7 aa, synthetic construct
RGDNHVH

SEQ ID NO: 39802 - protein, 7 aa, synthetic construct
RGDNIDI

SEQ ID NO: 39803 - protein, 7 aa, synthetic construct
RGDNNDF

SEQ ID NO: 39804 - protein, 7 aa, synthetic construct
RGDNNGQ

SEQ ID NO: 39805 - protein, 7 aa, synthetic construct
RGDNTTG

SEQ ID NO: 39806 - protein, 7 aa, synthetic construct
RGDQDGS

SEQ ID NO: 39807 - protein, 7 aa, synthetic construct
RGDQDRD

SEQ ID NO: 39808 - protein, 7 aa, synthetic construct
RGDQEVD

SEQ ID NO: 39809 - protein, 7 aa, synthetic construct
RGDQFDD

SEQ ID NO: 39810 - protein, 7 aa, synthetic construct
RGDQIEG

SEQ ID NO: 39811 - protein, 7 aa, synthetic construct
RGDQLDV

SEQ ID NO: 39812 - protein, 7 aa, synthetic construct
RGDQRIN

SEQ ID NO: 39813 - protein, 7 aa, synthetic construct
RGDQVDT

SEQ ID NO: 39814 - protein, 7 aa, synthetic construct
RGDDDQR

SEQ ID NO: 39815 - protein, 7 aa, synthetic construct
RGDDDRA

SEQ ID NO: 39816 - protein, 7 aa, synthetic construct
RGDDERH

SEQ ID NO: 39817 - protein, 7 aa, synthetic construct
RGDRTQE

SEQ ID NO: 39818 - protein, 7 aa, synthetic construct
RGDRTTD

SEQ ID NO: 39819 - protein, 7 aa, synthetic construct
RGDSDAL

SEQ ID NO: 39820 - protein, 7 aa, synthetic construct
RGDSDEK

SEQ ID NO: 39821 - protein, 7 aa, synthetic construct
RGDSDFT

SEQ ID NO: 39822 - protein, 7 aa, synthetic construct
RGDSDKF

SEQ ID NO: 39823 - protein, 7 aa, synthetic construct
RGDSFNQ

SEQ ID NO: 39824 - protein, 7 aa, synthetic construct
RGDSHHH

SEQ ID NO: 39825 - protein, 7 aa, synthetic construct
RGDSIDN

SEQ ID NO: 39826 - protein, 7 aa, synthetic construct
RGDSINH

SEQ ID NO: 39827 - protein, 7 aa, synthetic construct
RGDADTG

SEQ ID NO: 39828 - protein, 7 aa, synthetic construct
RGDDFVF

SEQ ID NO: 39829 - protein, 7 aa, synthetic construct
RGDSRID

SEQ ID NO: 39830 - protein, 7 aa, synthetic construct
RGDSSFD

SEQ ID NO: 39831 - protein, 7 aa, synthetic construct
RGDTADH

SEQ ID NO: 39832 - protein, 7 aa, synthetic construct
RGDTAGI

SEQ ID NO: 39833 - protein, 7 aa, synthetic construct
RGDTDIS

SEQ ID NO: 39834 - protein, 7 aa, synthetic construct
RGDTGLT

SEQ ID NO: 39835 - protein, 7 aa, synthetic construct
RGDDHAD

SEQ ID NO: 39836 - protein, 7 aa, synthetic construct
RGDTIDL

SEQ ID NO: 39837 - protein, 7 aa, synthetic construct
RGDDHEI

SEQ ID NO: 39838 - protein, 7 aa, synthetic construct
RGDTNES

SEQ ID NO: 39839 - protein, 7 aa, synthetic construct
RGDTQTG

SEQ ID NO: 39840 - protein, 7 aa, synthetic construct
RGDTRDH

SEQ ID NO: 39841 - protein, 7 aa, synthetic construct
RGDTSED

SEQ ID NO: 39842 - protein, 7 aa, synthetic construct
RGDDHTE

SEQ ID NO: 39843 - protein, 7 aa, synthetic construct
RGDDHTN

SEQ ID NO: 39844 - protein, 7 aa, synthetic construct
RGDTVKQ

SEQ ID NO: 39845 - protein, 7 aa, synthetic construct
RGDVADE

SEQ ID NO: 39846 - protein, 7 aa, synthetic construct
RGDVAFG

SEQ ID NO: 39847 - protein, 7 aa, synthetic construct
RGDVAID

SEQ ID NO: 39848 - protein, 7 aa, synthetic construct
RGDVDFF

SEQ ID NO: 39849 - protein, 7 aa, synthetic construct
RGDVDKF

SEQ ID NO: 39850 - protein, 7 aa, synthetic construct
RGDVEKE

SEQ ID NO: 39851 - protein, 7 aa, synthetic construct
RGDVELN

SEQ ID NO: 39852 - protein, 7 aa, synthetic construct
RGDVGKL

SEQ ID NO: 39853 - protein, 7 aa, synthetic construct
RGDVGNH

SEQ ID NO: 39854 - protein, 7 aa, synthetic construct
RGDVGQG

SEQ ID NO: 39855 - protein, 7 aa, synthetic construct
RGDVNEG

SEQ ID NO: 39856 - protein, 7 aa, synthetic construct
RGDVNGG

SEQ ID NO: 39857 - protein, 7 aa, synthetic construct
RGDVQNE

SEQ ID NO: 39858 - protein, 7 aa, synthetic construct
RGDDKFV

SEQ ID NO: 39859 - protein, 7 aa, synthetic construct
RGDDLSE

SEQ ID NO: 39860 - protein, 7 aa, synthetic construct
RGDDNAA

SEQ ID NO: 39861 - protein, 7 aa, synthetic construct
RGDDQFK

SEQ ID NO: 39862 - protein, 7 aa, synthetic construct
RGDDQGQ

SEQ ID NO: 39863 - protein, 7 aa, synthetic construct
RGDDQLH

SEQ ID NO: 39864 - protein, 7 aa, synthetic construct
RGDDQSR

SEQ ID NO: 39865 - protein, 7 aa, synthetic construct
RGDDRDA

SEQ ID NO: 39866 - protein, 7 aa, synthetic construct
RGDDSAL

SEQ ID NO: 39867 - protein, 7 aa, synthetic construct
RGDDVEV

SEQ ID NO: 39868 - protein, 7 aa, synthetic construct
RGDDVHE

SEQ ID NO: 39869 - protein, 7 aa, synthetic construct
RGDDVNH

SEQ ID NO: 39870 - protein, 7 aa, synthetic construct
RGDEAHS

SEQ ID NO: 39871 - protein, 7 aa, synthetic construct
RGDEATH

SEQ ID NO: 39872 - protein, 7 aa, synthetic construct
RGDEFFV

SEQ ID NO: 39873 - protein, 7 aa, synthetic construct
RGDEGAR

SEQ ID NO: 39874 - protein, 7 aa, synthetic construct
RGDAFIS

SEQ ID NO: 39875 - protein, 7 aa, synthetic construct
RGDAFIT

SEQ ID NO: 39876 - protein, 7 aa, synthetic construct
RGDEHER

SEQ ID NO: 39877 - protein, 7 aa, synthetic construct
RGDEHLK

SEQ ID NO: 39878 - protein, 7 aa, synthetic construct
RGDEHNG

SEQ ID NO: 39879 - protein, 7 aa, synthetic construct
RGDEHQE

SEQ ID NO: 39880 - protein, 7 aa, synthetic construct
RGDEILF

SEQ ID NO: 39881 - protein, 7 aa, synthetic construct
RGDEIQF

SEQ ID NO: 39882 - protein, 7 aa, synthetic construct
RGDEKVT

SEQ ID NO: 39883 - protein, 7 aa, synthetic construct
RGDENFG

SEQ ID NO: 39884 - protein, 7 aa, synthetic construct
RGDESHN

SEQ ID NO: 39885 - protein, 7 aa, synthetic construct
RGDETIK

SEQ ID NO: 39886 - protein, 7 aa, synthetic construct
RGDETNS

SEQ ID NO: 39887 - protein, 7 aa, synthetic construct
RGDETSH

SEQ ID NO: 39888 - protein, 7 aa, synthetic construct
RGDFDDF

SEQ ID NO: 39889 - protein, 7 aa, synthetic construct
RGDFEAV

SEQ ID NO: 39890 - protein, 7 aa, synthetic construct
RGDAGTE

SEQ ID NO: 39891 - protein, 7 aa, synthetic construct
RGDFGFE

SEQ ID NO: 39892 - protein, 7 aa, synthetic construct
RGDFGLE

SEQ ID NO: 39893 - protein, 7 aa, synthetic construct
RGDAHEE

SEQ ID NO: 39894 - protein, 7 aa, synthetic construct
RGDFKIF

SEQ ID NO: 39895 - protein, 7 aa, synthetic construct
RGDAHHS

SEQ ID NO: 39896 - protein, 7 aa, synthetic construct
RGDFNGH

SEQ ID NO: 39897 - protein, 7 aa, synthetic construct
RGDFRVD

SEQ ID NO: 39898 - protein, 7 aa, synthetic construct
RGDAHQS

SEQ ID NO: 39899 - protein, 7 aa, synthetic construct
RGDFTDI

SEQ ID NO: 39900 - protein, 7 aa, synthetic construct
RGDFTRL

SEQ ID NO: 39901 - protein, 7 aa, synthetic construct
RGDFVEE

SEQ ID NO: 39902 - protein, 7 aa, synthetic construct
RGDAIDA

SEQ ID NO: 39903 - protein, 7 aa, synthetic construct
RGDGKHA

SEQ ID NO: 39904 - protein, 7 aa, synthetic construct
RGDGQVE

SEQ ID NO: 39905 - protein, 7 aa, synthetic construct
RGDGSEQ

SEQ ID NO: 39906 - protein, 7 aa, synthetic construct
RGDGSIH

SEQ ID NO: 39907 - protein, 7 aa, synthetic construct
RGDGTID

SEQ ID NO: 39908 - protein, 7 aa, synthetic construct
RGDGVEG

SEQ ID NO: 39909 - protein, 7 aa, synthetic construct
RGDHADA

SEQ ID NO: 39910 - protein, 7 aa, synthetic construct
RGDHDEA

SEQ ID NO: 39911 - protein, 7 aa, synthetic construct
RGDHLFD

SEQ ID NO: 39912 - protein, 7 aa, synthetic construct
RGDALKG

SEQ ID NO: 39913 - protein, 7 aa, synthetic construct
RGDHQVD

SEQ ID NO: 39914 - protein, 7 aa, synthetic construct
RGDHSIA

SEQ ID NO: 39915 - protein, 7 aa, synthetic construct
RGDHSLS

SEQ ID NO: 39916 - protein, 7 aa, synthetic construct
RGDHVAA

SEQ ID NO: 39917 - protein, 7 aa, synthetic construct
RGDIAEA

SEQ ID NO: 39918 - protein, 7 aa, synthetic construct
RGDIDQL

SEQ ID NO: 39919 - protein, 7 aa, synthetic construct
RGDIFLK

SEQ ID NO: 39920 - protein, 7 aa, synthetic construct
RGDIFQH

SEQ ID NO: 39921 - protein, 7 aa, synthetic construct
RGDANLD

SEQ ID NO: 39922 - protein, 7 aa, synthetic construct
RGDIHRE

SEQ ID NO: 39923 - protein, 7 aa, synthetic construct
RGDINNA

SEQ ID NO: 39924 - protein, 7 aa, synthetic construct
RGDINQE

SEQ ID NO: 39925 - protein, 7 aa, synthetic construct
RGDIQRS

SEQ ID NO: 39926 - protein, 7 aa, synthetic construct
RGDADAI

SEQ ID NO: 39927 - protein, 7 aa, synthetic construct
RGDKFFD

SEQ ID NO: 39928 - protein, 7 aa, synthetic construct
RGDKGKD

SEQ ID NO: 39929 - protein, 7 aa, synthetic construct
RGDKHIN

SEQ ID NO: 39930 - protein, 7 aa, synthetic construct
RGDKHVD

SEQ ID NO: 39931 - protein, 7 aa, synthetic construct
RGDKIAH

SEQ ID NO: 39932 - protein, 7 aa, synthetic construct
RGDKSIN

SEQ ID NO: 39933 - protein, 7 aa, synthetic construct
RGDLEQE

SEQ ID NO: 39934 - protein, 7 aa, synthetic construct
RGDLHIF

SEQ ID NO: 39935 - protein, 7 aa, synthetic construct
RGDLHIL

SEQ ID NO: 39936 - protein, 7 aa, synthetic construct
RGDLHIQ

SEQ ID NO: 39937 - protein, 7 aa, synthetic construct
RGDLHNE

SEQ ID NO: 39938 - protein, 7 aa, synthetic construct
RGDLHSH

SEQ ID NO: 39939 - protein, 7 aa, synthetic construct
RGDLILF

SEQ ID NO: 39940 - protein, 7 aa, synthetic construct
RGDLIQA

SEQ ID NO: 39941 - protein, 7 aa, synthetic construct
RGDLNAS

SEQ ID NO: 39942 - protein, 7 aa, synthetic construct
RGDATAF

SEQ ID NO: 39943 - protein, 7 aa, synthetic construct
RGDADGQ

SEQ ID NO: 39944 - protein, 7 aa, synthetic construct
RGDATFS

SEQ ID NO: 39945 - protein, 7 aa, synthetic construct
RGDLTEA

SEQ ID NO: 39946 - protein, 7 aa, synthetic construct
RGDLVDA

SEQ ID NO: 39947 - protein, 7 aa, synthetic construct
RGDNEQS

SEQ ID NO: 39948 - protein, 7 aa, synthetic construct
RGDNERD

SEQ ID NO: 39949 - protein, 7 aa, synthetic construct
RGDNFDL

SEQ ID NO: 39950 - protein, 7 aa, synthetic construct
RGDAVAS

SEQ ID NO: 39951 - protein, 7 aa, synthetic construct
RGDNILN

SEQ ID NO: 39952 - protein, 7 aa, synthetic construct
RGDAVEV

SEQ ID NO: 39953 - protein, 7 aa, synthetic construct
RGDNNQN

SEQ ID NO: 39954 - protein, 7 aa, synthetic construct
RGDNNVT

SEQ ID NO: 39955 - protein, 7 aa, synthetic construct
RGDNQDF

SEQ ID NO: 39956 - protein, 7 aa, synthetic construct
RGDNSEE

SEQ ID NO: 39957 - protein, 7 aa, synthetic construct
RGDNSTE

SEQ ID NO: 39958 - protein, 7 aa, synthetic construct
RGDQDQV

SEQ ID NO: 39959 - protein, 7 aa, synthetic construct
RGDQDTD

SEQ ID NO: 39960 - protein, 7 aa, synthetic construct
RGDQFAT

SEQ ID NO: 39961 - protein, 7 aa, synthetic construct
RGDQFNT

SEQ ID NO: 39962 - protein, 7 aa, synthetic construct
RGDQGVL

SEQ ID NO: 39963 - protein, 7 aa, synthetic construct
RGDQHIN

SEQ ID NO: 39964 - protein, 7 aa, synthetic construct
RGDDALV

SEQ ID NO: 39965 - protein, 7 aa, synthetic construct
RGDQIDV

SEQ ID NO: 39966 - protein, 7 aa, synthetic construct
RGDDDID

SEQ ID NO: 39967 - protein, 7 aa, synthetic construct
RGDDDIH

SEQ ID NO: 39968 - protein, 7 aa, synthetic construct
RGDRDQE

SEQ ID NO: 39969 - protein, 7 aa, synthetic construct
RGDRFIG

SEQ ID NO: 39970 - protein, 7 aa, synthetic construct
RGDDDSS

SEQ ID NO: 39971 - protein, 7 aa, synthetic construct
RGDDEAS

SEQ ID NO: 39972 - protein, 7 aa, synthetic construct
RGDRQIE

SEQ ID NO: 39973 - protein, 7 aa, synthetic construct
RGDDENI

SEQ ID NO: 39974 - protein, 7 aa, synthetic construct
RGDSALD

SEQ ID NO: 39975 - protein, 7 aa, synthetic construct
RGDSDSE

SEQ ID NO: 39976 - protein, 7 aa, synthetic construct
RGDSEAR

SEQ ID NO: 39977 - protein, 7 aa, synthetic construct
RGDDFFE

SEQ ID NO: 39978 - protein, 7 aa, synthetic construct
RGDSFNI

SEQ ID NO: 39979 - protein, 7 aa, synthetic construct
RGDSFTG

SEQ ID NO: 39980 - protein, 7 aa, synthetic construct
RGDSIAA

SEQ ID NO: 39981 - protein, 7 aa, synthetic construct
RGDSIRG

SEQ ID NO: 39982 - protein, 7 aa, synthetic construct
RGDSKLG

SEQ ID NO: 39983 - protein, 7 aa, synthetic construct
RGDDGDA

SEQ ID NO: 39984 - protein, 7 aa, synthetic construct
RGDTADT

SEQ ID NO: 39985 - protein, 7 aa, synthetic construct
RGDTDAN

SEQ ID NO: 39986 - protein, 7 aa, synthetic construct
RGDTEIR

SEQ ID NO: 39987 - protein, 7 aa, synthetic construct
RGDTEKT

SEQ ID NO: 39988 - protein, 7 aa, synthetic construct
RGDTFTN

SEQ ID NO: 39989 - protein, 7 aa, synthetic construct
RGDTGEE

SEQ ID NO: 39990 - protein, 7 aa, synthetic construct
RGDTKTA

SEQ ID NO: 39991 - protein, 7 aa, synthetic construct
RGDTLKD

SEQ ID NO: 39992 - protein, 7 aa, synthetic construct
RGDDHNH

SEQ ID NO: 39993 - protein, 7 aa, synthetic construct
RGDTSEF

SEQ ID NO: 39994 - protein, 7 aa, synthetic construct
RGDTTAH

SEQ ID NO: 39995 - protein, 7 aa, synthetic construct
RGDTTGS

SEQ ID NO: 39996 - protein, 7 aa, synthetic construct
RGDTTLI

SEQ ID NO: 39997 - protein, 7 aa, synthetic construct
RGDTVKA

SEQ ID NO: 39998 - protein, 7 aa, synthetic construct
RGDVDLE

SEQ ID NO: 39999 - protein, 7 aa, synthetic construct
RGDVDVA

SEQ ID NO: 40000 - protein, 7 aa, synthetic construct
RGDVEEF

SEQ ID NO: 40001 - protein, 7 aa, synthetic construct
RGDVENA

SEQ ID NO: 40002 - protein, 7 aa, synthetic construct
RGDVGKG

SEQ ID NO: 40003 - protein, 7 aa, synthetic construct
RGDVHDT

SEQ ID NO: 40004 - protein, 7 aa, synthetic construct
RGDVIFS

SEQ ID NO: 40005 - protein, 7 aa, synthetic construct
RGDVLDS

SEQ ID NO: 40006 - protein, 7 aa, synthetic construct
RGDDITI

SEQ ID NO: 40007 - protein, 7 aa, synthetic construct
RGDDIVS

SEQ ID NO: 40008 - protein, 7 aa, synthetic construct
RGDVQVA

SEQ ID NO: 40009 - protein, 7 aa, synthetic construct
RGDDKEI

SEQ ID NO: 40010 - protein, 7 aa, synthetic construct
RGDVTQD

SEQ ID NO: 40011 - protein, 7 aa, synthetic construct
RGDVVFA

SEQ ID NO: 40012 - protein, 7 aa, synthetic construct
RGDDKSE

SEQ ID NO: 40013 - protein, 7 aa, synthetic construct
RGDDKVG

SEQ ID NO: 40014 - protein, 7 aa, synthetic construct
RGDDLIF

SEQ ID NO: 40015 - protein, 7 aa, synthetic construct
RGDDLLI

SEQ ID NO: 40016 - protein, 7 aa, synthetic construct
RGDAEHK

SEQ ID NO: 40017 - protein, 7 aa, synthetic construct
RGDAELQ

SEQ ID NO: 40018 - protein, 7 aa, synthetic construct
RGDAEQQ

SEQ ID NO: 40019 - protein, 7 aa, synthetic construct
RGDAERA

SEQ ID NO: 40020 - protein, 7 aa, synthetic construct
RGDAERG

SEQ ID NO: 40021 - protein, 7 aa, synthetic construct
RGDDVAS

SEQ ID NO: 40022 - protein, 7 aa, synthetic construct
RGDAETR

SEQ ID NO: 40023 - protein, 7 aa, synthetic construct
RGDDVNT

SEQ ID NO: 40024 - protein, 7 aa, synthetic construct
RGDDVTH

SEQ ID NO: 40025 - protein, 7 aa, synthetic construct
RGDEATF

SEQ ID NO: 40026 - protein, 7 aa, synthetic construct
RGDEDIN

SEQ ID NO: 40027 - protein, 7 aa, synthetic construct
RGDEDIS

SEQ ID NO: 40028 - protein, 7 aa, synthetic construct
RGDEDSN

SEQ ID NO: 40029 - protein, 7 aa, synthetic construct
RGDEEEN

SEQ ID NO: 40030 - protein, 7 aa, synthetic construct
RGDEFIE

SEQ ID NO: 40031 - protein, 7 aa, synthetic construct
RGDEFIV

SEQ ID NO: 40032 - protein, 7 aa, synthetic construct
RGDEFTF

SEQ ID NO: 40033 - protein, 7 aa, synthetic construct
RGDEGEF

SEQ ID NO: 40034 - protein, 7 aa, synthetic construct
RGDEGEV

SEQ ID NO: 40035 - protein, 7 aa, synthetic construct
RGDEHSA

SEQ ID NO: 40036 - protein, 7 aa, synthetic construct
RGDEKEL

SEQ ID NO: 40037 - protein, 7 aa, synthetic construct
RGDEKHA

SEQ ID NO: 40038 - protein, 7 aa, synthetic construct
RGDEKHE

SEQ ID NO: 40039 - protein, 7 aa, synthetic construct
RGDEKII

SEQ ID NO: 40040 - protein, 7 aa, synthetic construct
RGDELDS

SEQ ID NO: 40041 - protein, 7 aa, synthetic construct
RGDELNK

SEQ ID NO: 40042 - protein, 7 aa, synthetic construct
RGDENGK

SEQ ID NO: 40043 - protein, 7 aa, synthetic construct
RGDEQGI

SEQ ID NO: 40044 - protein, 7 aa, synthetic construct
RGDEQQK

SEQ ID NO: 40045 - protein, 7 aa, synthetic construct
RGDEREG

SEQ ID NO: 40046 - protein, 7 aa, synthetic construct
RGDERGA

SEQ ID NO: 40047 - protein, 7 aa, synthetic construct
RGDERLN

SEQ ID NO: 40048 - protein, 7 aa, synthetic construct
RGDERQG

SEQ ID NO: 40049 - protein, 7 aa, synthetic construct
RGDESAQ

SEQ ID NO: 40050 - protein, 7 aa, synthetic construct
RGDESDI

SEQ ID NO: 40051 - protein, 7 aa, synthetic construct
RGDESQR

SEQ ID NO: 40052 - protein, 7 aa, synthetic construct
RGDETFT

SEQ ID NO: 40053 - protein, 7 aa, synthetic construct
RGDEVAK

SEQ ID NO: 40054 - protein, 7 aa, synthetic construct
RGDEVKI

SEQ ID NO: 40055 - protein, 7 aa, synthetic construct
RGDEVSE

SEQ ID NO: 40056 - protein, 7 aa, synthetic construct
RGDFDAA

SEQ ID NO: 40057 - protein, 7 aa, synthetic construct
RGDFDGS

SEQ ID NO: 40058 - protein, 7 aa, synthetic construct
RGDFDKG

SEQ ID NO: 40059 - protein, 7 aa, synthetic construct
RGDAGSA

SEQ ID NO: 40060 - protein, 7 aa, synthetic construct
RGDFLDA

SEQ ID NO: 40061 - protein, 7 aa, synthetic construct
RGDFLDH

SEQ ID NO: 40062 - protein, 7 aa, synthetic construct
RGDFLIN

SEQ ID NO: 40063 - protein, 7 aa, synthetic construct
RGDFTIT

SEQ ID NO: 40064 - protein, 7 aa, synthetic construct
RGDFVNG

SEQ ID NO: 40065 - protein, 7 aa, synthetic construct
RGDAIGH

SEQ ID NO: 40066 - protein, 7 aa, synthetic construct
RGDGGEE

SEQ ID NO: 40067 - protein, 7 aa, synthetic construct
RGDGHFD

SEQ ID NO: 40068 - protein, 7 aa, synthetic construct
RGDGIHH

SEQ ID NO: 40069 - protein, 7 aa, synthetic construct
RGDGIQF

SEQ ID NO: 40070 - protein, 7 aa, synthetic construct
RGDGQVH

SEQ ID NO: 40071 - protein, 7 aa, synthetic construct
RGDGRIG

SEQ ID NO: 40072 - protein, 7 aa, synthetic construct
RGDGVDF

SEQ ID NO: 40073 - protein, 7 aa, synthetic construct
RGDHDAS

SEQ ID NO: 40074 - protein, 7 aa, synthetic construct
RGDHEIE

SEQ ID NO: 40075 - protein, 7 aa, synthetic construct
RGDHFLF

SEQ ID NO: 40076 - protein, 7 aa, synthetic construct
RGDHHAG

SEQ ID NO: 40077 - protein, 7 aa, synthetic construct
RGDALAE

SEQ ID NO: 40078 - protein, 7 aa, synthetic construct
RGDHHEA

SEQ ID NO: 40079 - protein, 7 aa, synthetic construct
RGDHIQT

SEQ ID NO: 40080 - protein, 7 aa, synthetic construct
RGDHIVA

SEQ ID NO: 40081 - protein, 7 aa, synthetic construct
RGDHKFD

SEQ ID NO: 40082 - protein, 7 aa, synthetic construct
RGDHKLG

SEQ ID NO: 40083 - protein, 7 aa, synthetic construct
RGDALGH

SEQ ID NO: 40084 - protein, 7 aa, synthetic construct
RGDHLIF

SEQ ID NO: 40085 - protein, 7 aa, synthetic construct
RGDHLLA

SEQ ID NO: 40086 - protein, 7 aa, synthetic construct
RGDHLLS

SEQ ID NO: 40087 - protein, 7 aa, synthetic construct
RGDALIS

SEQ ID NO: 40088 - protein, 7 aa, synthetic construct
RGDHTDS

SEQ ID NO: 40089 - protein, 7 aa, synthetic construct
RGDHTIE

SEQ ID NO: 40090 - protein, 7 aa, synthetic construct
RGDHVVA

SEQ ID NO: 40091 - protein, 7 aa, synthetic construct
RGDIAEF

SEQ ID NO: 40092 - protein, 7 aa, synthetic construct
RGDIEDG

SEQ ID NO: 40093 - protein, 7 aa, synthetic construct
RGDIGHD

SEQ ID NO: 40094 - protein, 7 aa, synthetic construct
RGDIGSL

SEQ ID NO: 40095 - protein, 7 aa, synthetic construct
RGDIHEN

SEQ ID NO: 40096 - protein, 7 aa, synthetic construct
RGDIIRA

SEQ ID NO: 40097 - protein, 7 aa, synthetic construct
RGDILES

SEQ ID NO: 40098 - protein, 7 aa, synthetic construct
RGDANSN

SEQ ID NO: 40099 - protein, 7 aa, synthetic construct
RGDILNA

SEQ ID NO: 40100 - protein, 7 aa, synthetic construct
RGDINLV

SEQ ID NO: 40101 - protein, 7 aa, synthetic construct
RGDIQQN

SEQ ID NO: 40102 - protein, 7 aa, synthetic construct
RGDAQDH

SEQ ID NO: 40103 - protein, 7 aa, synthetic construct
RGDITAD

SEQ ID NO: 40104 - protein, 7 aa, synthetic construct
RGDIVDD

SEQ ID NO: 40105 - protein, 7 aa, synthetic construct
RGDIVDQ

SEQ ID NO: 40106 - protein, 7 aa, synthetic construct
RGDKDLV

SEQ ID NO: 40107 - protein, 7 aa, synthetic construct
RGDKFKA

SEQ ID NO: 40108 - protein, 7 aa, synthetic construct
RGDARID

SEQ ID NO: 40109 - protein, 7 aa, synthetic construct
RGDKQEA

SEQ ID NO: 40110 - protein, 7 aa, synthetic construct
RGDKSFG

SEQ ID NO: 40111 - protein, 7 aa, synthetic construct
RGDLFDN

SEQ ID NO: 40112 - protein, 7 aa, synthetic construct
RGDLFIH

SEQ ID NO: 40113 - protein, 7 aa, synthetic construct
RGDLHLN

SEQ ID NO: 40114 - protein, 7 aa, synthetic construct
RGDLNEE

SEQ ID NO: 40115 - protein, 7 aa, synthetic construct
RGDLRDS

SEQ ID NO: 40116 - protein, 7 aa, synthetic construct
RGDLVLL

SEQ ID NO: 40117 - protein, 7 aa, synthetic construct
RGDNALD

SEQ ID NO: 40118 - protein, 7 aa, synthetic construct
RGDNAVD

SEQ ID NO: 40119 - protein, 7 aa, synthetic construct
RGDNDDR

SEQ ID NO: 40120 - protein, 7 aa, synthetic construct
RGDNEAE

SEQ ID NO: 40121 - protein, 7 aa, synthetic construct
RGDNHRD

SEQ ID NO: 40122 - protein, 7 aa, synthetic construct
RGDNLLQ

SEQ ID NO: 40123 - protein, 7 aa, synthetic construct
RGDAVID

SEQ ID NO: 40124 - protein, 7 aa, synthetic construct
RGDNVHH

SEQ ID NO: 40125 - protein, 7 aa, synthetic construct
RGDQALD

SEQ ID NO: 40126 - protein, 7 aa, synthetic construct
RGDDADI

SEQ ID NO: 40127 - protein, 7 aa, synthetic construct
RGDQDQH

SEQ ID NO: 40128 - protein, 7 aa, synthetic construct
RGDQFVG

SEQ ID NO: 40129 - protein, 7 aa, synthetic construct
RGDQGGE

SEQ ID NO: 40130 - protein, 7 aa, synthetic construct
RGDQIAE

SEQ ID NO: 40131 - protein, 7 aa, synthetic construct
RGDQIAQ

SEQ ID NO: 40132 - protein, 7 aa, synthetic construct
RGDQILF

SEQ ID NO: 40133 - protein, 7 aa, synthetic construct
RGDQLAK

SEQ ID NO: 40134 - protein, 7 aa, synthetic construct
RGDQLIR

SEQ ID NO: 40135 - protein, 7 aa, synthetic construct
RGDQLLD

SEQ ID NO: 40136 - protein, 7 aa, synthetic construct
RGDQLVE

SEQ ID NO: 40137 - protein, 7 aa, synthetic construct
RGDQNIS

SEQ ID NO: 40138 - protein, 7 aa, synthetic construct
RGDDDDD

SEQ ID NO: 40139 - protein, 7 aa, synthetic construct
RGDADNG

SEQ ID NO: 40140 - protein, 7 aa, synthetic construct
RGDQTEG

SEQ ID NO: 40141 - protein, 7 aa, synthetic construct
RGDDDHH

SEQ ID NO: 40142 - protein, 7 aa, synthetic construct
RGDDDHQ

SEQ ID NO: 40143 - protein, 7 aa, synthetic construct
RGDQVIE

SEQ ID NO: 40144 - protein, 7 aa, synthetic construct
RGDDDTT

SEQ ID NO: 40145 - protein, 7 aa, synthetic construct
RGDDEIE

SEQ ID NO: 40146 - protein, 7 aa, synthetic construct
RGDSAIE

SEQ ID NO: 40147 - protein, 7 aa, synthetic construct
RGDSDEF

SEQ ID NO: 40148 - protein, 7 aa, synthetic construct
RGDDFEG

SEQ ID NO: 40149 - protein, 7 aa, synthetic construct
RGDSDNE

SEQ ID NO: 40150 - protein, 7 aa, synthetic construct
RGDSEVQ

SEQ ID NO: 40151 - protein, 7 aa, synthetic construct
RGDSFSF

SEQ ID NO: 40152 - protein, 7 aa, synthetic construct
RGDDFHT

SEQ ID NO: 40153 - protein, 7 aa, synthetic construct
RGDSHIT

SEQ ID NO: 40154 - protein, 7 aa, synthetic construct
RGDSHLE

SEQ ID NO: 40155 - protein, 7 aa, synthetic construct
RGDSIEG

SEQ ID NO: 40156 - protein, 7 aa, synthetic construct
RGDDFTV

SEQ ID NO: 40157 - protein, 7 aa, synthetic construct
RGDSQLK

SEQ ID NO: 40158 - protein, 7 aa, synthetic construct
RGDSVED

SEQ ID NO: 40159 - protein, 7 aa, synthetic construct
RGDTAED

SEQ ID NO: 40160 - protein, 7 aa, synthetic construct
RGDTDAR

SEQ ID NO: 40161 - protein, 7 aa, synthetic construct
RGDTDNA

SEQ ID NO: 40162 - protein, 7 aa, synthetic construct
RGDTEFA

SEQ ID NO: 40163 - protein, 7 aa, synthetic construct
RGDTEHD

SEQ ID NO: 40164 - protein, 7 aa, synthetic construct
RGDTETN

SEQ ID NO: 40165 - protein, 7 aa, synthetic construct
RGDTFES

SEQ ID NO: 40166 - protein, 7 aa, synthetic construct
RGDTFVD

SEQ ID NO: 40167 - protein, 7 aa, synthetic construct
RGDTGQA

SEQ ID NO: 40168 - protein, 7 aa, synthetic construct
RGDTGQT

SEQ ID NO: 40169 - protein, 7 aa, synthetic construct
RGDTIKA

SEQ ID NO: 40170 - protein, 7 aa, synthetic construct
RGDDHGE

SEQ ID NO: 40171 - protein, 7 aa, synthetic construct
RGDTQHS

SEQ ID NO: 40172 - protein, 7 aa, synthetic construct
RGDTQQH

SEQ ID NO: 40173 - protein, 7 aa, synthetic construct
RGDTQTA

SEQ ID NO: 40174 - protein, 7 aa, synthetic construct
RGDDHNR

SEQ ID NO: 40175 - protein, 7 aa, synthetic construct
RGDTTSV

SEQ ID NO: 40176 - protein, 7 aa, synthetic construct
RGDTVKG

SEQ ID NO: 40177 - protein, 7 aa, synthetic construct
RGDVDQE

SEQ ID NO: 40178 - protein, 7 aa, synthetic construct
RGDVEAG

SEQ ID NO: 40179 - protein, 7 aa, synthetic construct
RGDVETE

SEQ ID NO: 40180 - protein, 7 aa, synthetic construct
RGDVFNE

SEQ ID NO: 40181 - protein, 7 aa, synthetic construct
RGDVHLA

SEQ ID NO: 40182 - protein, 7 aa, synthetic construct
RGDVNEH

SEQ ID NO: 40183 - protein, 7 aa, synthetic construct
RGDVNVT

SEQ ID NO: 40184 - protein, 7 aa, synthetic construct
RGDVQIL

SEQ ID NO: 40185 - protein, 7 aa, synthetic construct
RGDDKGV

SEQ ID NO: 40186 - protein, 7 aa, synthetic construct
RGDDLAK

SEQ ID NO: 40187 - protein, 7 aa, synthetic construct
RGDDLRE

SEQ ID NO: 40188 - protein, 7 aa, synthetic construct
RGDDQDE

SEQ ID NO: 40189 - protein, 7 aa, synthetic construct
RGDDQNI

SEQ ID NO: 40190 - protein, 7 aa, synthetic construct
RGDDQSQ

SEQ ID NO: 40191 - protein, 7 aa, synthetic construct
RGDDSHE

SEQ ID NO: 40192 - protein, 7 aa, synthetic construct
RGDDSIN

SEQ ID NO: 40193 - protein, 7 aa, synthetic construct
RGDEAAF

SEQ ID NO: 40194 - protein, 7 aa, synthetic construct
RGDAFDH

SEQ ID NO: 40195 - protein, 7 aa, synthetic construct
RGDEAVG

SEQ ID NO: 40196 - protein, 7 aa, synthetic construct
RGDEDAA

SEQ ID NO: 40197 - protein, 7 aa, synthetic construct
RGDEDVD

SEQ ID NO: 40198 - protein, 7 aa, synthetic construct
RGDEFEV

SEQ ID NO: 40199 - protein, 7 aa, synthetic construct
RGDAFIK

SEQ ID NO: 40200 - protein, 7 aa, synthetic construct
RGDEHHH

SEQ ID NO: 40201 - protein, 7 aa, synthetic construct
RGDEHLH

SEQ ID NO: 40202 - protein, 7 aa, synthetic construct
RGDEIDL

SEQ ID NO: 40203 - protein, 7 aa, synthetic construct
RGDELLT

SEQ ID NO: 40204 - protein, 7 aa, synthetic construct
RGDELVN

SEQ ID NO: 40205 - protein, 7 aa, synthetic construct
RGDENFL

SEQ ID NO: 40206 - protein, 7 aa, synthetic construct
RGDENNQ

SEQ ID NO: 40207 - protein, 7 aa, synthetic construct
RGDESVA

SEQ ID NO: 40208 - protein, 7 aa, synthetic construct
RGDESVD

SEQ ID NO: 40209 - protein, 7 aa, synthetic construct
RGDETHN

SEQ ID NO: 40210 - protein, 7 aa, synthetic construct
RGDFIEI

SEQ ID NO: 40211 - protein, 7 aa, synthetic construct
RGDFLAD

SEQ ID NO: 40212 - protein, 7 aa, synthetic construct
RGDFNLQ

SEQ ID NO: 40213 - protein, 7 aa, synthetic construct
RGDFVND

SEQ ID NO: 40214 - protein, 7 aa, synthetic construct
RGDGAFA

SEQ ID NO: 40215 - protein, 7 aa, synthetic construct
RGDGDQA

SEQ ID NO: 40216 - protein, 7 aa, synthetic construct
RGDGEEL

SEQ ID NO: 40217 - protein, 7 aa, synthetic construct
RGDGEGA

SEQ ID NO: 40218 - protein, 7 aa, synthetic construct
RGDGFLE

SEQ ID NO: 40219 - protein, 7 aa, synthetic construct
RGDAIID

SEQ ID NO: 40220 - protein, 7 aa, synthetic construct
RGDGGSD

SEQ ID NO: 40221 - protein, 7 aa, synthetic construct
RGDGNVK

SEQ ID NO: 40222 - protein, 7 aa, synthetic construct
RGDGQTH

SEQ ID NO: 40223 - protein, 7 aa, synthetic construct
RGDAKEN

SEQ ID NO: 40224 - protein, 7 aa, synthetic construct
RGDGTVE

SEQ ID NO: 40225 - protein, 7 aa, synthetic construct
RGDGVQD

SEQ ID NO: 40226 - protein, 7 aa, synthetic construct
RGDHAEG

SEQ ID NO: 40227 - protein, 7 aa, synthetic construct
RGDHALA

SEQ ID NO: 40228 - protein, 7 aa, synthetic construct
RGDAKQG

SEQ ID NO: 40229 - protein, 7 aa, synthetic construct
RGDHHLI

SEQ ID NO: 40230 - protein, 7 aa, synthetic construct
RGDHHVN

SEQ ID NO: 40231 - protein, 7 aa, synthetic construct
RGDHKVA

SEQ ID NO: 40232 - protein, 7 aa, synthetic construct
RGDHLVS

SEQ ID NO: 40233 - protein, 7 aa, synthetic construct
RGDHQIH

SEQ ID NO: 40234 - protein, 7 aa, synthetic construct
RGDHQQD

SEQ ID NO: 40235 - protein, 7 aa, synthetic construct
RGDIDDF

SEQ ID NO: 40236 - protein, 7 aa, synthetic construct
RGDIEGA

SEQ ID NO: 40237 - protein, 7 aa, synthetic construct
RGDIFHG

SEQ ID NO: 40238 - protein, 7 aa, synthetic construct
RGDIGAI

SEQ ID NO: 40239 - protein, 7 aa, synthetic construct
RGDIGAS

SEQ ID NO: 40240 - protein, 7 aa, synthetic construct
RGDIIHD

SEQ ID NO: 40241 - protein, 7 aa, synthetic construct
RGDIKDK

SEQ ID NO: 40242 - protein, 7 aa, synthetic construct
RGDIVFE

SEQ ID NO: 40243 - protein, 7 aa, synthetic construct
RGDIVRA

SEQ ID NO: 40244 - protein, 7 aa, synthetic construct
RGDIVTN

SEQ ID NO: 40245 - protein, 7 aa, synthetic construct
RGDKAQD

SEQ ID NO: 40246 - protein, 7 aa, synthetic construct
RGDKEDN

SEQ ID NO: 40247 - protein, 7 aa, synthetic construct
RGDKELS

SEQ ID NO: 40248 - protein, 7 aa, synthetic construct
RGDKFDA

SEQ ID NO: 40249 - protein, 7 aa, synthetic construct
RGDKFLE

SEQ ID NO: 40250 - protein, 7 aa, synthetic construct
RGDKFLG

SEQ ID NO: 40251 - protein, 7 aa, synthetic construct
RGDKIQH

SEQ ID NO: 40252 - protein, 7 aa, synthetic construct
RGDKTSD

SEQ ID NO: 40253 - protein, 7 aa, synthetic construct
RGDASDL

SEQ ID NO: 40254 - protein, 7 aa, synthetic construct
RGDLGVF

SEQ ID NO: 40255 - protein, 7 aa, synthetic construct
RGDLLDE

SEQ ID NO: 40256 - protein, 7 aa, synthetic construct
RGDATII

SEQ ID NO: 40257 - protein, 7 aa, synthetic construct
RGDATLE

SEQ ID NO: 40258 - protein, 7 aa, synthetic construct
RGDNDEE

SEQ ID NO: 40259 - protein, 7 aa, synthetic construct
RGDNESE

SEQ ID NO: 40260 - protein, 7 aa, synthetic construct
RGDNEVD

SEQ ID NO: 40261 - protein, 7 aa, synthetic construct
RGDNFSA

SEQ ID NO: 40262 - protein, 7 aa, synthetic construct
RGDNGTE

SEQ ID NO: 40263 - protein, 7 aa, synthetic construct
RGDNIAD

SEQ ID NO: 40264 - protein, 7 aa, synthetic construct
RGDNIFS

SEQ ID NO: 40265 - protein, 7 aa, synthetic construct
RGDNIQE

SEQ ID NO: 40266 - protein, 7 aa, synthetic construct
RGDAVEQ

SEQ ID NO: 40267 - protein, 7 aa, synthetic construct
RGDNLES

SEQ ID NO: 40268 - protein, 7 aa, synthetic construct
RGDNLVG

SEQ ID NO: 40269 - protein, 7 aa, synthetic construct
RGDAVQS

SEQ ID NO: 40270 - protein, 7 aa, synthetic construct
RGDNTDE

SEQ ID NO: 40271 - protein, 7 aa, synthetic construct
RGDNTDF

SEQ ID NO: 40272 - protein, 7 aa, synthetic construct
RGDNTIT

SEQ ID NO: 40273 - protein, 7 aa, synthetic construct
RGDDADK

SEQ ID NO: 40274 - protein, 7 aa, synthetic construct
RGDQHDE

SEQ ID NO: 40275 - protein, 7 aa, synthetic construct
RGDQHDF

SEQ ID NO: 40276 - protein, 7 aa, synthetic construct
RGDQHTG

SEQ ID NO: 40277 - protein, 7 aa, synthetic construct
RGDQIAA

SEQ ID NO: 40278 - protein, 7 aa, synthetic construct
RGDDANH

SEQ ID NO: 40279 - protein, 7 aa, synthetic construct
RGDQLDH

SEQ ID NO: 40280 - protein, 7 aa, synthetic construct
RGDDDET

SEQ ID NO: 40281 - protein, 7 aa, synthetic construct
RGDQTAN

SEQ ID NO: 40282 - protein, 7 aa, synthetic construct
RGDRDDG

SEQ ID NO: 40283 - protein, 7 aa, synthetic construct
RGDDEDN

SEQ ID NO: 40284 - protein, 7 aa, synthetic construct
RGDDEIV

SEQ ID NO: 40285 - protein, 7 aa, synthetic construct
RGDRSND

SEQ ID NO: 40286 - protein, 7 aa, synthetic construct
RGDSADE

SEQ ID NO: 40287 - protein, 7 aa, synthetic construct
RGDSAQE

SEQ ID NO: 40288 - protein, 7 aa, synthetic construct
RGDSDLA

SEQ ID NO: 40289 - protein, 7 aa, synthetic construct
RGDDFES

SEQ ID NO: 40290 - protein, 7 aa, synthetic construct
RGDSEAE

SEQ ID NO: 40291 - protein, 7 aa, synthetic construct
RGDAAEQ

SEQ ID NO: 40292 - protein, 7 aa, synthetic construct
RGDSESE

SEQ ID NO: 40293 - protein, 7 aa, synthetic construct
RGDSGQD

SEQ ID NO: 40294 - protein, 7 aa, synthetic construct
RGDSIFH

SEQ ID NO: 40295 - protein, 7 aa, synthetic construct
RGDSLLE

SEQ ID NO: 40296 - protein, 7 aa, synthetic construct
RGDSNEA

SEQ ID NO: 40297 - protein, 7 aa, synthetic construct
RGDSNVE

SEQ ID NO: 40298 - protein, 7 aa, synthetic construct
RGDSQDN

SEQ ID NO: 40299 - protein, 7 aa, synthetic construct
RGDSQGD

SEQ ID NO: 40300 - protein, 7 aa, synthetic construct
RGDDGAI

SEQ ID NO: 40301 - protein, 7 aa, synthetic construct
RGDSTVK

SEQ ID NO: 40302 - protein, 7 aa, synthetic construct
RGDSVVE

SEQ ID NO: 40303 - protein, 7 aa, synthetic construct
RGDTARA

SEQ ID NO: 40304 - protein, 7 aa, synthetic construct
RGDTARE

SEQ ID NO: 40305 - protein, 7 aa, synthetic construct
RGDTDHQ

SEQ ID NO: 40306 - protein, 7 aa, synthetic construct
RGDTFGQ

SEQ ID NO: 40307 - protein, 7 aa, synthetic construct
RGDTFLD

SEQ ID NO: 40308 - protein, 7 aa, synthetic construct
RGDTFLK

SEQ ID NO: 40309 - protein, 7 aa, synthetic construct
RGDTHIN

SEQ ID NO: 40310 - protein, 7 aa, synthetic construct
RGDTLDK

SEQ ID NO: 40311 - protein, 7 aa, synthetic construct
RGDDHIL

SEQ ID NO: 40312 - protein, 7 aa, synthetic construct
RGDTNQE

SEQ ID NO: 40313 - protein, 7 aa, synthetic construct
RGDDHLL

SEQ ID NO: 40314 - protein, 7 aa, synthetic construct
RGDTQRT

SEQ ID NO: 40315 - protein, 7 aa, synthetic construct
RGDDHQS

SEQ ID NO: 40316 - protein, 7 aa, synthetic construct
RGDTTFH

SEQ ID NO: 40317 - protein, 7 aa, synthetic construct
RGDTTLQ

SEQ ID NO: 40318 - protein, 7 aa, synthetic construct
RGDTVER

SEQ ID NO: 40319 - protein, 7 aa, synthetic construct
RGDAEDL

SEQ ID NO: 40320 - protein, 7 aa, synthetic construct
RGDDIDE

SEQ ID NO: 40321 - protein, 7 aa, synthetic construct
RGDVNGT

SEQ ID NO: 40322 - protein, 7 aa, synthetic construct
RGDVNNQ

SEQ ID NO: 40323 - protein, 7 aa, synthetic construct
RGDVRAA

SEQ ID NO: 40324 - protein, 7 aa, synthetic construct
RGDDKEN

SEQ ID NO: 40325 - protein, 7 aa, synthetic construct
RGDDKGL

SEQ ID NO: 40326 - protein, 7 aa, synthetic construct
RGDDKTD

SEQ ID NO: 40327 - protein, 7 aa, synthetic construct
RGDDLHD

SEQ ID NO: 40328 - protein, 7 aa, synthetic construct
RGDDLQE

SEQ ID NO: 40329 - protein, 7 aa, synthetic construct
RGDDLTD

SEQ ID NO: 40330 - protein, 7 aa, synthetic construct
RGDDQAA

SEQ ID NO: 40331 - protein, 7 aa, synthetic construct
RGDAENE

SEQ ID NO: 40332 - protein, 7 aa, synthetic construct
RGDDSEK

SEQ ID NO: 40333 - protein, 7 aa, synthetic construct
RGDDSFQ

SEQ ID NO: 40334 - protein, 7 aa, synthetic construct
RGDDSQS

SEQ ID NO: 40335 - protein, 7 aa, synthetic construct
RGDDVNG

SEQ ID NO: 40336 - protein, 7 aa, synthetic construct
RGDEAHG

SEQ ID NO: 40337 - protein, 7 aa, synthetic construct
RGDEEEH

SEQ ID NO: 40338 - protein, 7 aa, synthetic construct
RGDAFGH

SEQ ID NO: 40339 - protein, 7 aa, synthetic construct
RGDAFGR

SEQ ID NO: 40340 - protein, 7 aa, synthetic construct
RGDEGEI

SEQ ID NO: 40341 - protein, 7 aa, synthetic construct
RGDEHTD

SEQ ID NO: 40342 - protein, 7 aa, synthetic construct
RGDEIRG

SEQ ID NO: 40343 - protein, 7 aa, synthetic construct
RGDELDA

SEQ ID NO: 40344 - protein, 7 aa, synthetic construct
RGDELHN

SEQ ID NO: 40345 - protein, 7 aa, synthetic construct
RGDENIK

SEQ ID NO: 40346 - protein, 7 aa, synthetic construct
RGDENRL

SEQ ID NO: 40347 - protein, 7 aa, synthetic construct
RGDERLQ

SEQ ID NO: 40348 - protein, 7 aa, synthetic construct
RGDESFF

SEQ ID NO: 40349 - protein, 7 aa, synthetic construct
RGDESIA

SEQ ID NO: 40350 - protein, 7 aa, synthetic construct
RGDAGGE

SEQ ID NO: 40351 - protein, 7 aa, synthetic construct
RGDETLN

SEQ ID NO: 40352 - protein, 7 aa, synthetic construct
RGDETLQ

SEQ ID NO: 40353 - protein, 7 aa, synthetic construct
RGDEVEV

SEQ ID NO: 40354 - protein, 7 aa, synthetic construct
RGDEVSA

SEQ ID NO: 40355 - protein, 7 aa, synthetic construct
RGDEVVE

SEQ ID NO: 40356 - protein, 7 aa, synthetic construct
RGDFAID

SEQ ID NO: 40357 - protein, 7 aa, synthetic construct
RGDFNDD

SEQ ID NO: 40358 - protein, 7 aa, synthetic construct
RGDFNIQ

SEQ ID NO: 40359 - protein, 7 aa, synthetic construct
RGDAHSD

SEQ ID NO: 40360 - protein, 7 aa, synthetic construct
RGDGAES

SEQ ID NO: 40361 - protein, 7 aa, synthetic construct
RGDGDAG

SEQ ID NO: 40362 - protein, 7 aa, synthetic construct
RGDGDIN

SEQ ID NO: 40363 - protein, 7 aa, synthetic construct
RGDGDST

SEQ ID NO: 40364 - protein, 7 aa, synthetic construct
RGDGFIH

SEQ ID NO: 40365 - protein, 7 aa, synthetic construct
RGDGGGE

SEQ ID NO: 40366 - protein, 7 aa, synthetic construct
RGDAIII

SEQ ID NO: 40367 - protein, 7 aa, synthetic construct
RGDGIFS

SEQ ID NO: 40368 - protein, 7 aa, synthetic construct
RGDGKLA

SEQ ID NO: 40369 - protein, 7 aa, synthetic construct
RGDGLNS

SEQ ID NO: 40370 - protein, 7 aa, synthetic construct
RGDAITH

SEQ ID NO: 40371 - protein, 7 aa, synthetic construct
RGDGNIT

SEQ ID NO: 40372 - protein, 7 aa, synthetic construct
RGDGQFH

SEQ ID NO: 40373 - protein, 7 aa, synthetic construct
RGDGQVG

SEQ ID NO: 40374 - protein, 7 aa, synthetic construct
RGDGRIA

SEQ ID NO: 40375 - protein, 7 aa, synthetic construct
RGDGTIG

SEQ ID NO: 40376 - protein, 7 aa, synthetic construct
RGDHDDF

SEQ ID NO: 40377 - protein, 7 aa, synthetic construct
RGDAKVN

SEQ ID NO: 40378 - protein, 7 aa, synthetic construct
RGDHNQS

SEQ ID NO: 40379 - protein, 7 aa, synthetic construct
RGDHQDE

SEQ ID NO: 40380 - protein, 7 aa, synthetic construct
RGDALLK

SEQ ID NO: 40381 - protein, 7 aa, synthetic construct
RGDHRAE

SEQ ID NO: 40382 - protein, 7 aa, synthetic construct
RGDHRVA

SEQ ID NO: 40383 - protein, 7 aa, synthetic construct
RGDHRVE

SEQ ID NO: 40384 - protein, 7 aa, synthetic construct
RGDHTEE

SEQ ID NO: 40385 - protein, 7 aa, synthetic construct
RGDHTFF

SEQ ID NO: 40386 - protein, 7 aa, synthetic construct
RGDHVTD

SEQ ID NO: 40387 - protein, 7 aa, synthetic construct
RGDANDV

SEQ ID NO: 40388 - protein, 7 aa, synthetic construct
RGDIDTS

SEQ ID NO: 40389 - protein, 7 aa, synthetic construct
RGDIFTT

SEQ ID NO: 40390 - protein, 7 aa, synthetic construct
RGDIHSG

SEQ ID NO: 40391 - protein, 7 aa, synthetic construct
RGDIIQQ

SEQ ID NO: 40392 - protein, 7 aa, synthetic construct
RGDIISE

SEQ ID NO: 40393 - protein, 7 aa, synthetic construct
RGDILED

SEQ ID NO: 40394 - protein, 7 aa, synthetic construct
RGDANVF

SEQ ID NO: 40395 - protein, 7 aa, synthetic construct
RGDIQDH

SEQ ID NO: 40396 - protein, 7 aa, synthetic construct
RGDIQFG

SEQ ID NO: 40397 - protein, 7 aa, synthetic construct
RGDIQIA

SEQ ID NO: 40398 - protein, 7 aa, synthetic construct
RGDIRDH

SEQ ID NO: 40399 - protein, 7 aa, synthetic construct
RGDIRRD

SEQ ID NO: 40400 - protein, 7 aa, synthetic construct
RGDKDTD

SEQ ID NO: 40401 - protein, 7 aa, synthetic construct
RGDKHID

SEQ ID NO: 40402 - protein, 7 aa, synthetic construct
RGDKHIS

SEQ ID NO: 40403 - protein, 7 aa, synthetic construct
RGDKIVG

SEQ ID NO: 40404 - protein, 7 aa, synthetic construct
RGDKQRE

SEQ ID NO: 40405 - protein, 7 aa, synthetic construct
RGDKTLG

SEQ ID NO: 40406 - protein, 7 aa, synthetic construct
RGDADFN

SEQ ID NO: 40407 - protein, 7 aa, synthetic construct
RGDLHFE

SEQ ID NO: 40408 - protein, 7 aa, synthetic construct
RGDLNDG

SEQ ID NO: 40409 - protein, 7 aa, synthetic construct
RGDLNLN

SEQ ID NO: 40410 - protein, 7 aa, synthetic construct
RGDLTFD

SEQ ID NO: 40411 - protein, 7 aa, synthetic construct
RGDLTLF

SEQ ID NO: 40412 - protein, 7 aa, synthetic construct
RGDNDKD

SEQ ID NO: 40413 - protein, 7 aa, synthetic construct
RGDNEAG

SEQ ID NO: 40414 - protein, 7 aa, synthetic construct
RGDNEDS

SEQ ID NO: 40415 - protein, 7 aa, synthetic construct
RGDNFDG

SEQ ID NO: 40416 - protein, 7 aa, synthetic construct
RGDNGSG

SEQ ID NO: 40417 - protein, 7 aa, synthetic construct
RGDNKIN

SEQ ID NO: 40418 - protein, 7 aa, synthetic construct
RGDNLDN

SEQ ID NO: 40419 - protein, 7 aa, synthetic construct
RGDNLEG

SEQ ID NO: 40420 - protein, 7 aa, synthetic construct
RGDNLRG

SEQ ID NO: 40421 - protein, 7 aa, synthetic construct
RGDNNNS

SEQ ID NO: 40422 - protein, 7 aa, synthetic construct
RGDNNTE

SEQ ID NO: 40423 - protein, 7 aa, synthetic construct
RGDNQVH

SEQ ID NO: 40424 - protein, 7 aa, synthetic construct
RGDNREA

SEQ ID NO: 40425 - protein, 7 aa, synthetic construct
RGDNREG

SEQ ID NO: 40426 - protein, 7 aa, synthetic construct
RGDNTDA

SEQ ID NO: 40427 - protein, 7 aa, synthetic construct
RGDAVVG

SEQ ID NO: 40428 - protein, 7 aa, synthetic construct
RGDQDKA

SEQ ID NO: 40429 - protein, 7 aa, synthetic construct
RGDDAHG

SEQ ID NO: 40430 - protein, 7 aa, synthetic construct
RGDQIGN

SEQ ID NO: 40431 - protein, 7 aa, synthetic construct
RGDQNIF

SEQ ID NO: 40432 - protein, 7 aa, synthetic construct
RGDQTSE

SEQ ID NO: 40433 - protein, 7 aa, synthetic construct
RGDQVAD

SEQ ID NO: 40434 - protein, 7 aa, synthetic construct
RGDRFIE

SEQ ID NO: 40435 - protein, 7 aa, synthetic construct
RGDRFQA

SEQ ID NO: 40436 - protein, 7 aa, synthetic construct
RGDRHIG

SEQ ID NO: 40437 - protein, 7 aa, synthetic construct
RGDDEDH

SEQ ID NO: 40438 - protein, 7 aa, synthetic construct
RGDDETH

SEQ ID NO: 40439 - protein, 7 aa, synthetic construct
RGDSDFH

SEQ ID NO: 40440 - protein, 7 aa, synthetic construct
RGDSFET

SEQ ID NO: 40441 - protein, 7 aa, synthetic construct
RGDSHDA

SEQ ID NO: 40442 - protein, 7 aa, synthetic construct
RGDSISG

SEQ ID NO: 40443 - protein, 7 aa, synthetic construct
RGDDFQR

SEQ ID NO: 40444 - protein, 7 aa, synthetic construct
RGDSLRG

SEQ ID NO: 40445 - protein, 7 aa, synthetic construct
RGDDFTI

SEQ ID NO: 40446 - protein, 7 aa, synthetic construct
RGDSNDF

SEQ ID NO: 40447 - protein, 7 aa, synthetic construct
RGDSQAG

SEQ ID NO: 40448 - protein, 7 aa, synthetic construct
RGDSTLK

SEQ ID NO: 40449 - protein, 7 aa, synthetic construct
RGDSVAD

SEQ ID NO: 40450 - protein, 7 aa, synthetic construct
RGDADVE

SEQ ID NO: 40451 - protein, 7 aa, synthetic construct
RGDTDKV

SEQ ID NO: 40452 - protein, 7 aa, synthetic construct
RGDTEHQ

SEQ ID NO: 40453 - protein, 7 aa, synthetic construct
RGDTELH

SEQ ID NO: 40454 - protein, 7 aa, synthetic construct
RGDTGKE

SEQ ID NO: 40455 - protein, 7 aa, synthetic construct
RGDTGLN

SEQ ID NO: 40456 - protein, 7 aa, synthetic construct
RGDDHER

SEQ ID NO: 40457 - protein, 7 aa, synthetic construct
RGDTIVG

SEQ ID NO: 40458 - protein, 7 aa, synthetic construct
RGDTNHD

SEQ ID NO: 40459 - protein, 7 aa, synthetic construct
RGDTQNE

SEQ ID NO: 40460 - protein, 7 aa, synthetic construct
RGDTTSG

SEQ ID NO: 40461 - protein, 7 aa, synthetic construct
RGDVAKD

SEQ ID NO: 40462 - protein, 7 aa, synthetic construct
RGDVFDL

SEQ ID NO: 40463 - protein, 7 aa, synthetic construct
RGDVFVD

SEQ ID NO: 40464 - protein, 7 aa, synthetic construct
RGDDIIH

SEQ ID NO: 40465 - protein, 7 aa, synthetic construct
RGDVHDE

SEQ ID NO: 40466 - protein, 7 aa, synthetic construct
RGDDIQA

SEQ ID NO: 40467 - protein, 7 aa, synthetic construct
RGDVLEH

SEQ ID NO: 40468 - protein, 7 aa, synthetic construct
RGDVNTV

SEQ ID NO: 40469 - protein, 7 aa, synthetic construct
RGDVQQE

SEQ ID NO: 40470 - protein, 7 aa, synthetic construct
RGDVSDD

SEQ ID NO: 40471 - protein, 7 aa, synthetic construct
RGDDNFG

SEQ ID NO: 40472 - protein, 7 aa, synthetic construct
RGDDNGG

SEQ ID NO: 40473 - protein, 7 aa, synthetic construct
RGDAEIR

SEQ ID NO: 40474 - protein, 7 aa, synthetic construct
RGDAEIS

SEQ ID NO: 40475 - protein, 7 aa, synthetic construct
RGDDNQH

SEQ ID NO: 40476 - protein, 7 aa, synthetic construct
RGDDNSK

SEQ ID NO: 40477 - protein, 7 aa, synthetic construct
RGDDNTL

SEQ ID NO: 40478 - protein, 7 aa, synthetic construct
RGDDRKD

SEQ ID NO: 40479 - protein, 7 aa, synthetic construct
RGDDRTG

SEQ ID NO: 40480 - protein, 7 aa, synthetic construct
RGDDTAH

SEQ ID NO: 40481 - protein, 7 aa, synthetic construct
RGDDTFN

SEQ ID NO: 40482 - protein, 7 aa, synthetic construct
RGDDTSA

SEQ ID NO: 40483 - protein, 7 aa, synthetic construct
RGDDVEL

SEQ ID NO: 40484 - protein, 7 aa, synthetic construct
RGDDVHD

SEQ ID NO: 40485 - protein, 7 aa, synthetic construct
RGDDVIV

SEQ ID NO: 40486 - protein, 7 aa, synthetic construct
RGDDVTR

SEQ ID NO: 40487 - protein, 7 aa, synthetic construct
RGDAFGG

SEQ ID NO: 40488 - protein, 7 aa, synthetic construct
RGDEFES

SEQ ID NO: 40489 - protein, 7 aa, synthetic construct
RGDEFNK

SEQ ID NO: 40490 - protein, 7 aa, synthetic construct
RGDEGDL

SEQ ID NO: 40491 - protein, 7 aa, synthetic construct
RGDEHDE

SEQ ID NO: 40492 - protein, 7 aa, synthetic construct
RGDEIFD

SEQ ID NO: 40493 - protein, 7 aa, synthetic construct
RGDEIFG

SEQ ID NO: 40494 - protein, 7 aa, synthetic construct
RGDEIFL

SEQ ID NO: 40495 - protein, 7 aa, synthetic construct
RGDENAA

SEQ ID NO: 40496 - protein, 7 aa, synthetic construct
RGDERQQ

SEQ ID NO: 40497 - protein, 7 aa, synthetic construct
RGDETNR

SEQ ID NO: 40498 - protein, 7 aa, synthetic construct
RGDETTQ

SEQ ID NO: 40499 - protein, 7 aa, synthetic construct
RGDETVA

SEQ ID NO: 40500 - protein, 7 aa, synthetic construct
RGDEVAV

SEQ ID NO: 40501 - protein, 7 aa, synthetic construct
RGDEVGA

SEQ ID NO: 40502 - protein, 7 aa, synthetic construct
RGDEVNR

SEQ ID NO: 40503 - protein, 7 aa, synthetic construct
RGDAGSG

SEQ ID NO: 40504 - protein, 7 aa, synthetic construct
RGDFISD

SEQ ID NO: 40505 - protein, 7 aa, synthetic construct
RGDAHFA

SEQ ID NO: 40506 - protein, 7 aa, synthetic construct
RGDGDAH

SEQ ID NO: 40507 - protein, 7 aa, synthetic construct
RGDGEAE

SEQ ID NO: 40508 - protein, 7 aa, synthetic construct
RGDAIFD

SEQ ID NO: 40509 - protein, 7 aa, synthetic construct
RGDGEFE

SEQ ID NO: 40510 - protein, 7 aa, synthetic construct
RGDGFLA

SEQ ID NO: 40511 - protein, 7 aa, synthetic construct
RGDGIGQ

SEQ ID NO: 40512 - protein, 7 aa, synthetic construct
RGDGNDE

SEQ ID NO: 40513 - protein, 7 aa, synthetic construct
RGDGNGH

SEQ ID NO: 40514 - protein, 7 aa, synthetic construct
RGDGNIE

SEQ ID NO: 40515 - protein, 7 aa, synthetic construct
RGDGQIL

SEQ ID NO: 40516 - protein, 7 aa, synthetic construct
RGDAKDA

SEQ ID NO: 40517 - protein, 7 aa, synthetic construct
RGDGSTD

SEQ ID NO: 40518 - protein, 7 aa, synthetic construct
RGDGTED

SEQ ID NO: 40519 - protein, 7 aa, synthetic construct
RGDGTQG

SEQ ID NO: 40520 - protein, 7 aa, synthetic construct
RGDHDAN

SEQ ID NO: 40521 - protein, 7 aa, synthetic construct
RGDHEIA

SEQ ID NO: 40522 - protein, 7 aa, synthetic construct
RGDHFFD

SEQ ID NO: 40523 - protein, 7 aa, synthetic construct
RGDHFLQ

SEQ ID NO: 40524 - protein, 7 aa, synthetic construct
RGDHIHG

SEQ ID NO: 40525 - protein, 7 aa, synthetic construct
RGDHILH

SEQ ID NO: 40526 - protein, 7 aa, synthetic construct
RGDHLDA

SEQ ID NO: 40527 - protein, 7 aa, synthetic construct
RGDANDA

SEQ ID NO: 40528 - protein, 7 aa, synthetic construct
RGDIHAD

SEQ ID NO: 40529 - protein, 7 aa, synthetic construct
RGDIILE

SEQ ID NO: 40530 - protein, 7 aa, synthetic construct
RGDIQHA

SEQ ID NO: 40531 - protein, 7 aa, synthetic construct
RGDAQDN

SEQ ID NO: 40532 - protein, 7 aa, synthetic construct
RGDISAA

SEQ ID NO: 40533 - protein, 7 aa, synthetic construct
RGDITNA

SEQ ID NO: 40534 - protein, 7 aa, synthetic construct
RGDIVEI

SEQ ID NO: 40535 - protein, 7 aa, synthetic construct
RGDKFDL

SEQ ID NO: 40536 - protein, 7 aa, synthetic construct
RGDAQVS

SEQ ID NO: 40537 - protein, 7 aa, synthetic construct
RGDKNQG

SEQ ID NO: 40538 - protein, 7 aa, synthetic construct
RGDKQQG

SEQ ID NO: 40539 - protein, 7 aa, synthetic construct
RGDKSIS

SEQ ID NO: 40540 - protein, 7 aa, synthetic construct
RGDLASE

SEQ ID NO: 40541 - protein, 7 aa, synthetic construct
RGDLEFL

SEQ ID NO: 40542 - protein, 7 aa, synthetic construct
RGDLELR

SEQ ID NO: 40543 - protein, 7 aa, synthetic construct
RGDLFIA

SEQ ID NO: 40544 - protein, 7 aa, synthetic construct
RGDLFIN

SEQ ID NO: 40545 - protein, 7 aa, synthetic construct
RGDLFRI

SEQ ID NO: 40546 - protein, 7 aa, synthetic construct
RGDLINE

SEQ ID NO: 40547 - protein, 7 aa, synthetic construct
RGDLNET

SEQ ID NO: 40548 - protein, 7 aa, synthetic construct
RGDADGH

SEQ ID NO: 40549 - protein, 7 aa, synthetic construct
RGDLNIS

SEQ ID NO: 40550 - protein, 7 aa, synthetic construct
RGDATDG

SEQ ID NO: 40551 - protein, 7 aa, synthetic construct
RGDLSLH

SEQ ID NO: 40552 - protein, 7 aa, synthetic construct
RGDNALR

SEQ ID NO: 40553 - protein, 7 aa, synthetic construct
RGDNDAV

SEQ ID NO: 40554 - protein, 7 aa, synthetic construct
RGDNGND

SEQ ID NO: 40555 - protein, 7 aa, synthetic construct
RGDNIIG

SEQ ID NO: 40556 - protein, 7 aa, synthetic construct
RGDNLAH

SEQ ID NO: 40557 - protein, 7 aa, synthetic construct
RGDNNAE

SEQ ID NO: 40558 - protein, 7 aa, synthetic construct
RGDNNGS

SEQ ID NO: 40559 - protein, 7 aa, synthetic construct
RGDNNLS

SEQ ID NO: 40560 - protein, 7 aa, synthetic construct
RGDNNQA

SEQ ID NO: 40561 - protein, 7 aa, synthetic construct
RGDNQDE

SEQ ID NO: 40562 - protein, 7 aa, synthetic construct
RGDNQQH

SEQ ID NO: 40563 - protein, 7 aa, synthetic construct
RGDNTSD

SEQ ID NO: 40564 - protein, 7 aa, synthetic construct
RGDNTTD

SEQ ID NO: 40565 - protein, 7 aa, synthetic construct
RGDNVVG

SEQ ID NO: 40566 - protein, 7 aa, synthetic construct
RGDQDEA

SEQ ID NO: 40567 - protein, 7 aa, synthetic construct
RGDQDEE

SEQ ID NO: 40568 - protein, 7 aa, synthetic construct
RGDQDEV

SEQ ID NO: 40569 - protein, 7 aa, synthetic construct
RGDQDGD

SEQ ID NO: 40570 - protein, 7 aa, synthetic construct
RGDQFLE

SEQ ID NO: 40571 - protein, 7 aa, synthetic construct
RGDQHIS

SEQ ID NO: 40572 - protein, 7 aa, synthetic construct
RGDQIGT

SEQ ID NO: 40573 - protein, 7 aa, synthetic construct
RGDDDHG

SEQ ID NO: 40574 - protein, 7 aa, synthetic construct
RGDREIE

SEQ ID NO: 40575 - protein, 7 aa, synthetic construct
RGDDEDV

SEQ ID NO: 40576 - protein, 7 aa, synthetic construct
RGDDEEV

SEQ ID NO: 40577 - protein, 7 aa, synthetic construct
RGDDETA

SEQ ID NO: 40578 - protein, 7 aa, synthetic construct
RGDDETK

SEQ ID NO: 40579 - protein, 7 aa, synthetic construct
RGDSADQ

SEQ ID NO: 40580 - protein, 7 aa, synthetic construct
RGDSELE

SEQ ID NO: 40581 - protein, 7 aa, synthetic construct
RGDSFLD

SEQ ID NO: 40582 - protein, 7 aa, synthetic construct
RGDSHLQ

SEQ ID NO: 40583 - protein, 7 aa, synthetic construct
RGDSKAE

SEQ ID NO: 40584 - protein, 7 aa, synthetic construct
RGDSLGD

SEQ ID NO: 40585 - protein, 7 aa, synthetic construct
RGDSNGV

SEQ ID NO: 40586 - protein, 7 aa, synthetic construct
RGDSQLI

SEQ ID NO: 40587 - protein, 7 aa, synthetic construct
RGDDGDG

SEQ ID NO: 40588 - protein, 7 aa, synthetic construct
RGDSQVN

SEQ ID NO: 40589 - protein, 7 aa, synthetic construct
RGDDGDN

SEQ ID NO: 40590 - protein, 7 aa, synthetic construct
RGDSSIH

SEQ ID NO: 40591 - protein, 7 aa, synthetic construct
RGDDGIT

SEQ ID NO: 40592 - protein, 7 aa, synthetic construct
RGDTAAI

SEQ ID NO: 40593 - protein, 7 aa, synthetic construct
RGDTANF

SEQ ID NO: 40594 - protein, 7 aa, synthetic construct
RGDTEID

SEQ ID NO: 40595 - protein, 7 aa, synthetic construct
RGDTESD

SEQ ID NO: 40596 - protein, 7 aa, synthetic construct
RGDTFSQ

SEQ ID NO: 40597 - protein, 7 aa, synthetic construct
RGDTFTR

SEQ ID NO: 40598 - protein, 7 aa, synthetic construct
RGDTGKT

SEQ ID NO: 40599 - protein, 7 aa, synthetic construct
RGDTHFE

SEQ ID NO: 40600 - protein, 7 aa, synthetic construct
RGDTNAV

SEQ ID NO: 40601 - protein, 7 aa, synthetic construct
RGDTNQV

SEQ ID NO: 40602 - protein, 7 aa, synthetic construct
RGDTQSA

SEQ ID NO: 40603 - protein, 7 aa, synthetic construct
RGDDHQG

SEQ ID NO: 40604 - protein, 7 aa, synthetic construct
RGDTTFD

SEQ ID NO: 40605 - protein, 7 aa, synthetic construct
RGDTTNG

SEQ ID NO: 40606 - protein, 7 aa, synthetic construct
RGDVARR

SEQ ID NO: 40607 - protein, 7 aa, synthetic construct
RGDVEEA

SEQ ID NO: 40608 - protein, 7 aa, synthetic construct
RGDVFAV

SEQ ID NO: 40609 - protein, 7 aa, synthetic construct
RGDAEEF

SEQ ID NO: 40610 - protein, 7 aa, synthetic construct
RGDVQDL

SEQ ID NO: 40611 - protein, 7 aa, synthetic construct
RGDVTQA

SEQ ID NO: 40612 - protein, 7 aa, synthetic construct
RGDAEGS

SEQ ID NO: 40613 - protein, 7 aa, synthetic construct
RGDDNAE

SEQ ID NO: 40614 - protein, 7 aa, synthetic construct
RGDDQGG

SEQ ID NO: 40615 - protein, 7 aa, synthetic construct
RGDDSAH

SEQ ID NO: 40616 - protein, 7 aa, synthetic construct
RGDDTFT

SEQ ID NO: 40617 - protein, 7 aa, synthetic construct
RGDDTTV

SEQ ID NO: 40618 - protein, 7 aa, synthetic construct
RGDDTVS

SEQ ID NO: 40619 - protein, 7 aa, synthetic construct
RGDAEVD

SEQ ID NO: 40620 - protein, 7 aa, synthetic construct
RGDEALL

SEQ ID NO: 40621 - protein, 7 aa, synthetic construct
RGDEDDN

SEQ ID NO: 40622 - protein, 7 aa, synthetic construct
RGDAFER

SEQ ID NO: 40623 - protein, 7 aa, synthetic construct
RGDEFDN

SEQ ID NO: 40624 - protein, 7 aa, synthetic construct
RGDEFHH

SEQ ID NO: 40625 - protein, 7 aa, synthetic construct
RGDEHGA

SEQ ID NO: 40626 - protein, 7 aa, synthetic construct
RGDEIDI

SEQ ID NO: 40627 - protein, 7 aa, synthetic construct
RGDEIFN

SEQ ID NO: 40628 - protein, 7 aa, synthetic construct
RGDEIHQ

SEQ ID NO: 40629 - protein, 7 aa, synthetic construct
RGDEIVT

SEQ ID NO: 40630 - protein, 7 aa, synthetic construct
RGDELIL

SEQ ID NO: 40631 - protein, 7 aa, synthetic construct
RGDELVK

SEQ ID NO: 40632 - protein, 7 aa, synthetic construct
RGDERAR

SEQ ID NO: 40633 - protein, 7 aa, synthetic construct
RGDERIH

SEQ ID NO: 40634 - protein, 7 aa, synthetic construct
RGDERQH

SEQ ID NO: 40635 - protein, 7 aa, synthetic construct
RGDESLA

SEQ ID NO: 40636 - protein, 7 aa, synthetic construct
RGDESLI

SEQ ID NO: 40637 - protein, 7 aa, synthetic construct
RGDETIS

SEQ ID NO: 40638 - protein, 7 aa, synthetic construct
RGDFAHF

SEQ ID NO: 40639 - protein, 7 aa, synthetic construct
RGDFATD

SEQ ID NO: 40640 - protein, 7 aa, synthetic construct
RGDFDDD

SEQ ID NO: 40641 - protein, 7 aa, synthetic construct
RGDFDTA

SEQ ID NO: 40642 - protein, 7 aa, synthetic construct
RGDAGSE

SEQ ID NO: 40643 - protein, 7 aa, synthetic construct
RGDFLLK

SEQ ID NO: 40644 - protein, 7 aa, synthetic construct
RGDFLLN

SEQ ID NO: 40645 - protein, 7 aa, synthetic construct
RGDFQLI

SEQ ID NO: 40646 - protein, 7 aa, synthetic construct
RGDFTIL

SEQ ID NO: 40647 - protein, 7 aa, synthetic construct
RGDAIAG

SEQ ID NO: 40648 - protein, 7 aa, synthetic construct
RGDAIDT

SEQ ID NO: 40649 - protein, 7 aa, synthetic construct
RGDAIGA

SEQ ID NO: 40650 - protein, 7 aa, synthetic construct
RGDGEVE

SEQ ID NO: 40651 - protein, 7 aa, synthetic construct
RGDGFIA

SEQ ID NO: 40652 - protein, 7 aa, synthetic construct
RGDGFKG

SEQ ID NO: 40653 - protein, 7 aa, synthetic construct
RGDAIIK

SEQ ID NO: 40654 - protein, 7 aa, synthetic construct
RGDAIRG

SEQ ID NO: 40655 - protein, 7 aa, synthetic construct
RGDGKLN

SEQ ID NO: 40656 - protein, 7 aa, synthetic construct
RGDAISD

SEQ ID NO: 40657 - protein, 7 aa, synthetic construct
RGDGSFH

SEQ ID NO: 40658 - protein, 7 aa, synthetic construct
RGDGTLN

SEQ ID NO: 40659 - protein, 7 aa, synthetic construct
RGDGTVD

SEQ ID NO: 40660 - protein, 7 aa, synthetic construct
RGDGVIA

SEQ ID NO: 40661 - protein, 7 aa, synthetic construct
RGDHAQA

SEQ ID NO: 40662 - protein, 7 aa, synthetic construct
RGDHHSD

SEQ ID NO: 40663 - protein, 7 aa, synthetic construct
RGDHIEH

SEQ ID NO: 40664 - protein, 7 aa, synthetic construct
RGDHIGS

SEQ ID NO: 40665 - protein, 7 aa, synthetic construct
RGDHNGD

SEQ ID NO: 40666 - protein, 7 aa, synthetic construct
RGDHNLQ

SEQ ID NO: 40667 - protein, 7 aa, synthetic construct
RGDHTIT

SEQ ID NO: 40668 - protein, 7 aa, synthetic construct
RGDHVSH

SEQ ID NO: 40669 - protein, 7 aa, synthetic construct
RGDANAA

SEQ ID NO: 40670 - protein, 7 aa, synthetic construct
RGDIADA

SEQ ID NO: 40671 - protein, 7 aa, synthetic construct
RGDIADL

SEQ ID NO: 40672 - protein, 7 aa, synthetic construct
RGDIEAS

SEQ ID NO: 40673 - protein, 7 aa, synthetic construct
RGDANGS

SEQ ID NO: 40674 - protein, 7 aa, synthetic construct
RGDIGEA

SEQ ID NO: 40675 - protein, 7 aa, synthetic construct
RGDIGGL

SEQ ID NO: 40676 - protein, 7 aa, synthetic construct
RGDIGNF

SEQ ID NO: 40677 - protein, 7 aa, synthetic construct
RGDIIDI

SEQ ID NO: 40678 - protein, 7 aa, synthetic construct
RGDIIED

SEQ ID NO: 40679 - protein, 7 aa, synthetic construct
RGDILDQ

SEQ ID NO: 40680 - protein, 7 aa, synthetic construct
RGDILLG

SEQ ID NO: 40681 - protein, 7 aa, synthetic construct
RGDINED

SEQ ID NO: 40682 - protein, 7 aa, synthetic construct
RGDANVG

SEQ ID NO: 40683 - protein, 7 aa, synthetic construct
RGDINTF

SEQ ID NO: 40684 - protein, 7 aa, synthetic construct
RGDIQFA

SEQ ID NO: 40685 - protein, 7 aa, synthetic construct
RGDIQQE

SEQ ID NO: 40686 - protein, 7 aa, synthetic construct
RGDAQGG

SEQ ID NO: 40687 - protein, 7 aa, synthetic construct
RGDITKD

SEQ ID NO: 40688 - protein, 7 aa, synthetic construct
RGDKDHE

SEQ ID NO: 40689 - protein, 7 aa, synthetic construct
RGDKDVQ

SEQ ID NO: 40690 - protein, 7 aa, synthetic construct
RGDKEDL

SEQ ID NO: 40691 - protein, 7 aa, synthetic construct
RGDKEDV

SEQ ID NO: 40692 - protein, 7 aa, synthetic construct
RGDKFSD

SEQ ID NO: 40693 - protein, 7 aa, synthetic construct
RGDKHDA

SEQ ID NO: 40694 - protein, 7 aa, synthetic construct
RGDKQLS

SEQ ID NO: 40695 - protein, 7 aa, synthetic construct
RGDKVIA

SEQ ID NO: 40696 - protein, 7 aa, synthetic construct
RGDLAEA

SEQ ID NO: 40697 - protein, 7 aa, synthetic construct
RGDLAEL

SEQ ID NO: 40698 - protein, 7 aa, synthetic construct
RGDLANI

SEQ ID NO: 40699 - protein, 7 aa, synthetic construct
RGDLEER

SEQ ID NO: 40700 - protein, 7 aa, synthetic construct
RGDLETL

SEQ ID NO: 40701 - protein, 7 aa, synthetic construct
RGDLFLN

SEQ ID NO: 40702 - protein, 7 aa, synthetic construct
RGDLGKL

SEQ ID NO: 40703 - protein, 7 aa, synthetic construct
RGDLHIG

SEQ ID NO: 40704 - protein, 7 aa, synthetic construct
RGDLLDH

SEQ ID NO: 40705 - protein, 7 aa, synthetic construct
RGDLNTL

SEQ ID NO: 40706 - protein, 7 aa, synthetic construct
RGDATHD

SEQ ID NO: 40707 - protein, 7 aa, synthetic construct
RGDNAED

SEQ ID NO: 40708 - protein, 7 aa, synthetic construct
RGDNDIG

SEQ ID NO: 40709 - protein, 7 aa, synthetic construct
RGDNERE

SEQ ID NO: 40710 - protein, 7 aa, synthetic construct
RGDNFHD

SEQ ID NO: 40711 - protein, 7 aa, synthetic construct
RGDNFHR

SEQ ID NO: 40712 - protein, 7 aa, synthetic construct
RGDNGEL

SEQ ID NO: 40713 - protein, 7 aa, synthetic construct
RGDAVEF

SEQ ID NO: 40714 - protein, 7 aa, synthetic construct
RGDNKEN

SEQ ID NO: 40715 - protein, 7 aa, synthetic construct
RGDNNEE

SEQ ID NO: 40716 - protein, 7 aa, synthetic construct
RGDAVIS

SEQ ID NO: 40717 - protein, 7 aa, synthetic construct
RGDNQAN

SEQ ID NO: 40718 - protein, 7 aa, synthetic construct
RGDNQID

SEQ ID NO: 40719 - protein, 7 aa, synthetic construct
RGDNQVG

SEQ ID NO: 40720 - protein, 7 aa, synthetic construct
RGDAVNN

SEQ ID NO: 40721 - protein, 7 aa, synthetic construct
RGDNTIV

SEQ ID NO: 40722 - protein, 7 aa, synthetic construct
RGDNTLH

SEQ ID NO: 40723 - protein, 7 aa, synthetic construct
RGDNTND

SEQ ID NO: 40724 - protein, 7 aa, synthetic construct
RGDDAAQ

SEQ ID NO: 40725 - protein, 7 aa, synthetic construct
RGDQEQN

SEQ ID NO: 40726 - protein, 7 aa, synthetic construct
RGDQFGE

SEQ ID NO: 40727 - protein, 7 aa, synthetic construct
RGDQFIN

SEQ ID NO: 40728 - protein, 7 aa, synthetic construct
RGDQGEA

SEQ ID NO: 40729 - protein, 7 aa, synthetic construct
RGDQIDG

SEQ ID NO: 40730 - protein, 7 aa, synthetic construct
RGDQIIN

SEQ ID NO: 40731 - protein, 7 aa, synthetic construct
RGDDATR

SEQ ID NO: 40732 - protein, 7 aa, synthetic construct
RGDQNVH

SEQ ID NO: 40733 - protein, 7 aa, synthetic construct
RGDDDEH

SEQ ID NO: 40734 - protein, 7 aa, synthetic construct
RGDDDEN

SEQ ID NO: 40735 - protein, 7 aa, synthetic construct
RGDQTES

SEQ ID NO: 40736 - protein, 7 aa, synthetic construct
RGDDEAV

SEQ ID NO: 40737 - protein, 7 aa, synthetic construct
RGDRNGG

SEQ ID NO: 40738 - protein, 7 aa, synthetic construct
RGDSEVI

SEQ ID NO: 40739 - protein, 7 aa, synthetic construct
RGDSFDV

SEQ ID NO: 40740 - protein, 7 aa, synthetic construct
RGDSFGI

SEQ ID NO: 40741 - protein, 7 aa, synthetic construct
RGDSHVE

SEQ ID NO: 40742 - protein, 7 aa, synthetic construct
RGDDGEQ

SEQ ID NO: 40743 - protein, 7 aa, synthetic construct
RGDDGKD

SEQ ID NO: 40744 - protein, 7 aa, synthetic construct
RGDSVVD

SEQ ID NO: 40745 - protein, 7 aa, synthetic construct
RGDTATA

SEQ ID NO: 40746 - protein, 7 aa, synthetic construct
RGDTDAH

SEQ ID NO: 40747 - protein, 7 aa, synthetic construct
RGDTDQR

SEQ ID NO: 40748 - protein, 7 aa, synthetic construct
RGDTFTV

SEQ ID NO: 40749 - protein, 7 aa, synthetic construct
RGDTGAS

SEQ ID NO: 40750 - protein, 7 aa, synthetic construct
RGDTGFQ

SEQ ID NO: 40751 - protein, 7 aa, synthetic construct
RGDTIDR

SEQ ID NO: 40752 - protein, 7 aa, synthetic construct
RGDTILE

SEQ ID NO: 40753 - protein, 7 aa, synthetic construct
RGDTNDK

SEQ ID NO: 40754 - protein, 7 aa, synthetic construct
RGDTNTI

SEQ ID NO: 40755 - protein, 7 aa, synthetic construct
RGDTTKG

SEQ ID NO: 40756 - protein, 7 aa, synthetic construct
RGDTTSH

SEQ ID NO: 40757 - protein, 7 aa, synthetic construct
RGDTVDV

SEQ ID NO: 40758 - protein, 7 aa, synthetic construct
RGDTVGD

SEQ ID NO: 40759 - protein, 7 aa, synthetic construct
RGDTVIN

SEQ ID NO: 40760 - protein, 7 aa, synthetic construct
RGDVAIN

SEQ ID NO: 40761 - protein, 7 aa, synthetic construct
RGDVDTV

SEQ ID NO: 40762 - protein, 7 aa, synthetic construct
RGDVELH

SEQ ID NO: 40763 - protein, 7 aa, synthetic construct
RGDDIGD

SEQ ID NO: 40764 - protein, 7 aa, synthetic construct
RGDVFQA

SEQ ID NO: 40765 - protein, 7 aa, synthetic construct
RGDVGAF

SEQ ID NO: 40766 - protein, 7 aa, synthetic construct
RGDVGHL

SEQ ID NO: 40767 - protein, 7 aa, synthetic construct
RGDDIQN

SEQ ID NO: 40768 - protein, 7 aa, synthetic construct
RGDVQNA

SEQ ID NO: 40769 - protein, 7 aa, synthetic construct
RGDVVEF

SEQ ID NO: 40770 - protein, 7 aa, synthetic construct
RGDDLFG

SEQ ID NO: 40771 - protein, 7 aa, synthetic construct
RGDDQFA

SEQ ID NO: 40772 - protein, 7 aa, synthetic construct
RGDAELV

SEQ ID NO: 40773 - protein, 7 aa, synthetic construct
RGDDTDH

SEQ ID NO: 40774 - protein, 7 aa, synthetic construct
RGDEDEH

SEQ ID NO: 40775 - protein, 7 aa, synthetic construct
RGDEDSF

SEQ ID NO: 40776 - protein, 7 aa, synthetic construct
RGDEEDG

SEQ ID NO: 40777 - protein, 7 aa, synthetic construct
RGDEEVF

SEQ ID NO: 40778 - protein, 7 aa, synthetic construct
RGDEEVV

SEQ ID NO: 40779 - protein, 7 aa, synthetic construct
RGDEFVF

SEQ ID NO: 40780 - protein, 7 aa, synthetic construct
RGDEHVH

SEQ ID NO: 40781 - protein, 7 aa, synthetic construct
RGDAFRG

SEQ ID NO: 40782 - protein, 7 aa, synthetic construct
RGDEKTQ

SEQ ID NO: 40783 - protein, 7 aa, synthetic construct
RGDENDF

SEQ ID NO: 40784 - protein, 7 aa, synthetic construct
RGDENFV

SEQ ID NO: 40785 - protein, 7 aa, synthetic construct
RGDEQEF

SEQ ID NO: 40786 - protein, 7 aa, synthetic construct
RGDEQKF

SEQ ID NO: 40787 - protein, 7 aa, synthetic construct
RGDERAA

SEQ ID NO: 40788 - protein, 7 aa, synthetic construct
RGDERVT

SEQ ID NO: 40789 - protein, 7 aa, synthetic construct
RGDESDN

SEQ ID NO: 40790 - protein, 7 aa, synthetic construct
RGDETRG

SEQ ID NO: 40791 - protein, 7 aa, synthetic construct
RGDEVDA

SEQ ID NO: 40792 - protein, 7 aa, synthetic construct
RGDEVEG

SEQ ID NO: 40793 - protein, 7 aa, synthetic construct
RGDEVEK

SEQ ID NO: 40794 - protein, 7 aa, synthetic construct
RGDFAEH

SEQ ID NO: 40795 - protein, 7 aa, synthetic construct
RGDFGSL

SEQ ID NO: 40796 - protein, 7 aa, synthetic construct
RGDFIAD

SEQ ID NO: 40797 - protein, 7 aa, synthetic construct
RGDFIID

SEQ ID NO: 40798 - protein, 7 aa, synthetic construct
RGDFLLF

SEQ ID NO: 40799 - protein, 7 aa, synthetic construct
RGDGDEV

SEQ ID NO: 40800 - protein, 7 aa, synthetic construct
RGDAIED

SEQ ID NO: 40801 - protein, 7 aa, synthetic construct
RGDAIIE

SEQ ID NO: 40802 - protein, 7 aa, synthetic construct
RGDGIIH

SEQ ID NO: 40803 - protein, 7 aa, synthetic construct
RGDAINQ

SEQ ID NO: 40804 - protein, 7 aa, synthetic construct
RGDGILQ

SEQ ID NO: 40805 - protein, 7 aa, synthetic construct
RGDGKIE

SEQ ID NO: 40806 - protein, 7 aa, synthetic construct
RGDGLFA

SEQ ID NO: 40807 - protein, 7 aa, synthetic construct
RGDGNLK

SEQ ID NO: 40808 - protein, 7 aa, synthetic construct
RGDHEAG

SEQ ID NO: 40809 - protein, 7 aa, synthetic construct
RGDHFLI

SEQ ID NO: 40810 - protein, 7 aa, synthetic construct
RGDHLTD

SEQ ID NO: 40811 - protein, 7 aa, synthetic construct
RGDHNVA

SEQ ID NO: 40812 - protein, 7 aa, synthetic construct
RGDHQVA

SEQ ID NO: 40813 - protein, 7 aa, synthetic construct
RGDHSDA

SEQ ID NO: 40814 - protein, 7 aa, synthetic construct
RGDHSTD

SEQ ID NO: 40815 - protein, 7 aa, synthetic construct
RGDHTIG

SEQ ID NO: 40816 - protein, 7 aa, synthetic construct
RGDALTG

SEQ ID NO: 40817 - protein, 7 aa, synthetic construct
RGDHVGA

SEQ ID NO: 40818 - protein, 7 aa, synthetic construct
RGDHVNE

SEQ ID NO: 40819 - protein, 7 aa, synthetic construct
RGDIAAA

SEQ ID NO: 40820 - protein, 7 aa, synthetic construct
RGDIAKG

SEQ ID NO: 40821 - protein, 7 aa, synthetic construct
RGDIDKA

SEQ ID NO: 40822 - protein, 7 aa, synthetic construct
RGDIEEF

SEQ ID NO: 40823 - protein, 7 aa, synthetic construct
RGDIHAG

SEQ ID NO: 40824 - protein, 7 aa, synthetic construct
RGDIIDE

SEQ ID NO: 40825 - protein, 7 aa, synthetic construct
RGDIIDH

SEQ ID NO: 40826 - protein, 7 aa, synthetic construct
RGDANNG

SEQ ID NO: 40827 - protein, 7 aa, synthetic construct
RGDISEG

SEQ ID NO: 40828 - protein, 7 aa, synthetic construct
RGDAQID

SEQ ID NO: 40829 - protein, 7 aa, synthetic construct
RGDKAAG

SEQ ID NO: 40830 - protein, 7 aa, synthetic construct
RGDKDDH

SEQ ID NO: 40831 - protein, 7 aa, synthetic construct
RGDKEIK

SEQ ID NO: 40832 - protein, 7 aa, synthetic construct
RGDKHRE

SEQ ID NO: 40833 - protein, 7 aa, synthetic construct
RGDKLVD

SEQ ID NO: 40834 - protein, 7 aa, synthetic construct
RGDKQSD

SEQ ID NO: 40835 - protein, 7 aa, synthetic construct
RGDKSEG

SEQ ID NO: 40836 - protein, 7 aa, synthetic construct
RGDLDLD

SEQ ID NO: 40837 - protein, 7 aa, synthetic construct
RGDLEAG

SEQ ID NO: 40838 - protein, 7 aa, synthetic construct
RGDADFI

SEQ ID NO: 40839 - protein, 7 aa, synthetic construct
RGDLQQT

SEQ ID NO: 40840 - protein, 7 aa, synthetic construct
RGDLVDL

SEQ ID NO: 40841 - protein, 7 aa, synthetic construct
RGDLVEE

SEQ ID NO: 40842 - protein, 7 aa, synthetic construct
RGDNDKT

SEQ ID NO: 40843 - protein, 7 aa, synthetic construct
RGDNDNQ

SEQ ID NO: 40844 - protein, 7 aa, synthetic construct
RGDNELQ

SEQ ID NO: 40845 - protein, 7 aa, synthetic construct
RGDNGES

SEQ ID NO: 40846 - protein, 7 aa, synthetic construct
RGDNIEA

SEQ ID NO: 40847 - protein, 7 aa, synthetic construct
RGDNIED

SEQ ID NO: 40848 - protein, 7 aa, synthetic construct
RGDNIIH

SEQ ID NO: 40849 - protein, 7 aa, synthetic construct
RGDNIIT

SEQ ID NO: 40850 - protein, 7 aa, synthetic construct
RGDNKTG

SEQ ID NO: 40851 - protein, 7 aa, synthetic construct
RGDNNHN

SEQ ID NO: 40852 - protein, 7 aa, synthetic construct
RGDNQNH

SEQ ID NO: 40853 - protein, 7 aa, synthetic construct
RGDNRIG

SEQ ID NO: 40854 - protein, 7 aa, synthetic construct
RGDNSND

SEQ ID NO: 40855 - protein, 7 aa, synthetic construct
RGDQADF

SEQ ID NO: 40856 - protein, 7 aa, synthetic construct
RGDQEDG

SEQ ID NO: 40857 - protein, 7 aa, synthetic construct
RGDQFAA

SEQ ID NO: 40858 - protein, 7 aa, synthetic construct
RGDQLDE

SEQ ID NO: 40859 - protein, 7 aa, synthetic construct
RGDQLLL

SEQ ID NO: 40860 - protein, 7 aa, synthetic construct
RGDDATD

SEQ ID NO: 40861 - protein, 7 aa, synthetic construct
RGDADNF

SEQ ID NO: 40862 - protein, 7 aa, synthetic construct
RGDDDQQ

SEQ ID NO: 40863 - protein, 7 aa, synthetic construct
RGDDEAF

SEQ ID NO: 40864 - protein, 7 aa, synthetic construct
RGDDEDK

SEQ ID NO: 40865 - protein, 7 aa, synthetic construct
RGDADQN

SEQ ID NO: 40866 - protein, 7 aa, synthetic construct
RGDDEKI

SEQ ID NO: 40867 - protein, 7 aa, synthetic construct
RGDDFAL

SEQ ID NO: 40868 - protein, 7 aa, synthetic construct
RGDDFDE

SEQ ID NO: 40869 - protein, 7 aa, synthetic construct
RGDSEIH

SEQ ID NO: 40870 - protein, 7 aa, synthetic construct
RGDADSI

SEQ ID NO: 40871 - protein, 7 aa, synthetic construct
RGDDFLG

SEQ ID NO: 40872 - protein, 7 aa, synthetic construct
RGDSLAA

SEQ ID NO: 40873 - protein, 7 aa, synthetic construct
RGDSLLN

SEQ ID NO: 40874 - protein, 7 aa, synthetic construct
RGDTANI

SEQ ID NO: 40875 - protein, 7 aa, synthetic construct
RGDTDAQ

SEQ ID NO: 40876 - protein, 7 aa, synthetic construct
RGDTEGL

SEQ ID NO: 40877 - protein, 7 aa, synthetic construct
RGDTGDA

SEQ ID NO: 40878 - protein, 7 aa, synthetic construct
RGDTGSE

SEQ ID NO: 40879 - protein, 7 aa, synthetic construct
RGDTIEA

SEQ ID NO: 40880 - protein, 7 aa, synthetic construct
RGDTIGD

SEQ ID NO: 40881 - protein, 7 aa, synthetic construct
RGDTKEE

SEQ ID NO: 40882 - protein, 7 aa, synthetic construct
RGDTKRD

SEQ ID NO: 40883 - protein, 7 aa, synthetic construct
RGDTNFH

SEQ ID NO: 40884 - protein, 7 aa, synthetic construct
RGDTQID

SEQ ID NO: 40885 - protein, 7 aa, synthetic construct
RGDTSQT

SEQ ID NO: 40886 - protein, 7 aa, synthetic construct
RGDTTAL

SEQ ID NO: 40887 - protein, 7 aa, synthetic construct
RGDTTQQ

SEQ ID NO: 40888 - protein, 7 aa, synthetic construct
RGDTTRV

SEQ ID NO: 40889 - protein, 7 aa, synthetic construct
RGDTVDN

SEQ ID NO: 40890 - protein, 7 aa, synthetic construct
RGDAEDH

SEQ ID NO: 40891 - protein, 7 aa, synthetic construct
RGDTVSD

SEQ ID NO: 40892 - protein, 7 aa, synthetic construct
RGDDHVS

SEQ ID NO: 40893 - protein, 7 aa, synthetic construct
RGDVDHE

SEQ ID NO: 40894 - protein, 7 aa, synthetic construct
RGDVDIH

SEQ ID NO: 40895 - protein, 7 aa, synthetic construct
RGDVFSD

SEQ ID NO: 40896 - protein, 7 aa, synthetic construct
RGDVHDF

SEQ ID NO: 40897 - protein, 7 aa, synthetic construct
RGDVILD

SEQ ID NO: 40898 - protein, 7 aa, synthetic construct
RGDVLEE

SEQ ID NO: 40899 - protein, 7 aa, synthetic construct
RGDDISN

SEQ ID NO: 40900 - protein, 7 aa, synthetic construct
RGDVNIF

SEQ ID NO: 40901 - protein, 7 aa, synthetic construct
RGDVNNA

SEQ ID NO: 40902 - protein, 7 aa, synthetic construct
RGDVTAD

SEQ ID NO: 40903 - protein, 7 aa, synthetic construct
RGDDNFA

SEQ ID NO: 40904 - protein, 7 aa, synthetic construct
RGDDNII

SEQ ID NO: 40905 - protein, 7 aa, synthetic construct
RGDAEIV

SEQ ID NO: 40906 - protein, 7 aa, synthetic construct
RGDDTDT

SEQ ID NO: 40907 - protein, 7 aa, synthetic construct
RGDEDEL

SEQ ID NO: 40908 - protein, 7 aa, synthetic construct
RGDEDHH

SEQ ID NO: 40909 - protein, 7 aa, synthetic construct
RGDEDKS

SEQ ID NO: 40910 - protein, 7 aa, synthetic construct
RGDEDQV

SEQ ID NO: 40911 - protein, 7 aa, synthetic construct
RGDEEGT

SEQ ID NO: 40912 - protein, 7 aa, synthetic construct
RGDEEQT

SEQ ID NO: 40913 - protein, 7 aa, synthetic construct
RGDEFET

SEQ ID NO: 40914 - protein, 7 aa, synthetic construct
RGDEFHF

SEQ ID NO: 40915 - protein, 7 aa, synthetic construct
RGDEFLR

SEQ ID NO: 40916 - protein, 7 aa, synthetic construct
RGDAFIV

SEQ ID NO: 40917 - protein, 7 aa, synthetic construct
RGDEIAE

SEQ ID NO: 40918 - protein, 7 aa, synthetic construct
RGDEILT

SEQ ID NO: 40919 - protein, 7 aa, synthetic construct
RGDEKFG

SEQ ID NO: 40920 - protein, 7 aa, synthetic construct
RGDEKIQ

SEQ ID NO: 40921 - protein, 7 aa, synthetic construct
RGDELDR

SEQ ID NO: 40922 - protein, 7 aa, synthetic construct
RGDAFSG

SEQ ID NO: 40923 - protein, 7 aa, synthetic construct
RGDELIF

SEQ ID NO: 40924 - protein, 7 aa, synthetic construct
RGDELQE

SEQ ID NO: 40925 - protein, 7 aa, synthetic construct
RGDENFT

SEQ ID NO: 40926 - protein, 7 aa, synthetic construct
RGDENVE

SEQ ID NO: 40927 - protein, 7 aa, synthetic construct
RGDERIF

SEQ ID NO: 40928 - protein, 7 aa, synthetic construct
RGDESED

SEQ ID NO: 40929 - protein, 7 aa, synthetic construct
RGDETLA

SEQ ID NO: 40930 - protein, 7 aa, synthetic construct
RGDEVLL

SEQ ID NO: 40931 - protein, 7 aa, synthetic construct
RGDFFLD

SEQ ID NO: 40932 - protein, 7 aa, synthetic construct
RGDFNLK

SEQ ID NO: 40933 - protein, 7 aa, synthetic construct
RGDFQIV

SEQ ID NO: 40934 - protein, 7 aa, synthetic construct
RGDGDGV

SEQ ID NO: 40935 - protein, 7 aa, synthetic construct
RGDGFDN

SEQ ID NO: 40936 - protein, 7 aa, synthetic construct
RGDGIFQ

SEQ ID NO: 40937 - protein, 7 aa, synthetic construct
RGDGKLD

SEQ ID NO: 40938 - protein, 7 aa, synthetic construct
RGDAAQG

SEQ ID NO: 40939 - protein, 7 aa, synthetic construct
RGDGNVN

SEQ ID NO: 40940 - protein, 7 aa, synthetic construct
RGDAKAG

SEQ ID NO: 40941 - protein, 7 aa, synthetic construct
RGDGQID

SEQ ID NO: 40942 - protein, 7 aa, synthetic construct
RGDGQSE

SEQ ID NO: 40943 - protein, 7 aa, synthetic construct
RGDGSFE

SEQ ID NO: 40944 - protein, 7 aa, synthetic construct
RGDGSLH

SEQ ID NO: 40945 - protein, 7 aa, synthetic construct
RGDGTTH

SEQ ID NO: 40946 - protein, 7 aa, synthetic construct
RGDHADE

SEQ ID NO: 40947 - protein, 7 aa, synthetic construct
RGDHEID

SEQ ID NO: 40948 - protein, 7 aa, synthetic construct
RGDHIES

SEQ ID NO: 40949 - protein, 7 aa, synthetic construct
RGDHIQA

SEQ ID NO: 40950 - protein, 7 aa, synthetic construct
RGDHKIG

SEQ ID NO: 40951 - protein, 7 aa, synthetic construct
RGDALIK

SEQ ID NO: 40952 - protein, 7 aa, synthetic construct
RGDHRGD

SEQ ID NO: 40953 - protein, 7 aa, synthetic construct
RGDHSDH

SEQ ID NO: 40954 - protein, 7 aa, synthetic construct
RGDIEAD

SEQ ID NO: 40955 - protein, 7 aa, synthetic construct
RGDIFEG

SEQ ID NO: 40956 - protein, 7 aa, synthetic construct
RGDIFEH

SEQ ID NO: 40957 - protein, 7 aa, synthetic construct
RGDIGAL

SEQ ID NO: 40958 - protein, 7 aa, synthetic construct
RGDILDN

SEQ ID NO: 40959 - protein, 7 aa, synthetic construct
RGDINFG

SEQ ID NO: 40960 - protein, 7 aa, synthetic construct
RGDITEQ

SEQ ID NO: 40961 - protein, 7 aa, synthetic construct
RGDKAED

SEQ ID NO: 40962 - protein, 7 aa, synthetic construct
RGDKEDG

SEQ ID NO: 40963 - protein, 7 aa, synthetic construct
RGDAQQQ

SEQ ID NO: 40964 - protein, 7 aa, synthetic construct
RGDKHGG

SEQ ID NO: 40965 - protein, 7 aa, synthetic construct
RGDKIHD

SEQ ID NO: 40966 - protein, 7 aa, synthetic construct
RGDKIQN

SEQ ID NO: 40967 - protein, 7 aa, synthetic construct
RGDKRDA

SEQ ID NO: 40968 - protein, 7 aa, synthetic construct
RGDLAEG

SEQ ID NO: 40969 - protein, 7 aa, synthetic construct
RGDLDID

SEQ ID NO: 40970 - protein, 7 aa, synthetic construct
RGDLFKG

SEQ ID NO: 40971 - protein, 7 aa, synthetic construct
RGDLIDF

SEQ ID NO: 40972 - protein, 7 aa, synthetic construct
RGDLKIA

SEQ ID NO: 40973 - protein, 7 aa, synthetic construct
RGDLNTK

SEQ ID NO: 40974 - protein, 7 aa, synthetic construct
RGDLNVN

SEQ ID NO: 40975 - protein, 7 aa, synthetic construct
RGDATDQ

SEQ ID NO: 40976 - protein, 7 aa, synthetic construct
RGDLSQF

SEQ ID NO: 40977 - protein, 7 aa, synthetic construct
RGDNFEH

SEQ ID NO: 40978 - protein, 7 aa, synthetic construct
RGDNFVG

SEQ ID NO: 40979 - protein, 7 aa, synthetic construct
RGDNIDH

SEQ ID NO: 40980 - protein, 7 aa, synthetic construct
RGDNIGQ

SEQ ID NO: 40981 - protein, 7 aa, synthetic construct
RGDNIIR

SEQ ID NO: 40982 - protein, 7 aa, synthetic construct
RGDNKAN

SEQ ID NO: 40983 - protein, 7 aa, synthetic construct
RGDAVGG

SEQ ID NO: 40984 - protein, 7 aa, synthetic construct
RGDNNAK

SEQ ID NO: 40985 - protein, 7 aa, synthetic construct
RGDNQFG

SEQ ID NO: 40986 - protein, 7 aa, synthetic construct
RGDNQIR

SEQ ID NO: 40987 - protein, 7 aa, synthetic construct
RGDQDER

SEQ ID NO: 40988 - protein, 7 aa, synthetic construct
RGDQDIV

SEQ ID NO: 40989 - protein, 7 aa, synthetic construct
RGDDAEF

SEQ ID NO: 40990 - protein, 7 aa, synthetic construct
RGDDAGF

SEQ ID NO: 40991 - protein, 7 aa, synthetic construct
RGDQFVS

SEQ ID NO: 40992 - protein, 7 aa, synthetic construct
RGDQQGG

SEQ ID NO: 40993 - protein, 7 aa, synthetic construct
RGDQQSS

SEQ ID NO: 40994 - protein, 7 aa, synthetic construct
RGDDDGH

SEQ ID NO: 40995 - protein, 7 aa, synthetic construct
RGDQTET

SEQ ID NO: 40996 - protein, 7 aa, synthetic construct
RGDDDIK

SEQ ID NO: 40997 - protein, 7 aa, synthetic construct
RGDQVLE

SEQ ID NO: 40998 - protein, 7 aa, synthetic construct
RGDREHE

SEQ ID NO: 40999 - protein, 7 aa, synthetic construct
RGDDDRI

SEQ ID NO: 41000 - protein, 7 aa, synthetic construct
RGDRIED

SEQ ID NO: 41001 - protein, 7 aa, synthetic construct
RGDADRN

SEQ ID NO: 41002 - protein, 7 aa, synthetic construct
RGDSDFQ

SEQ ID NO: 41003 - protein, 7 aa, synthetic construct
RGDSDLD

SEQ ID NO: 41004 - protein, 7 aa, synthetic construct
RGDSDSQ

SEQ ID NO: 41005 - protein, 7 aa, synthetic construct
RGDSFEN

SEQ ID NO: 41006 - protein, 7 aa, synthetic construct
RGDSFIS

SEQ ID NO: 41007 - protein, 7 aa, synthetic construct
RGDSFVD

SEQ ID NO: 41008 - protein, 7 aa, synthetic construct
RGDDFNA

SEQ ID NO: 41009 - protein, 7 aa, synthetic construct
RGDDFNR

SEQ ID NO: 41010 - protein, 7 aa, synthetic construct
RGDSLKG

SEQ ID NO: 41011 - protein, 7 aa, synthetic construct
RGDSNLK

SEQ ID NO: 41012 - protein, 7 aa, synthetic construct
RGDDGDQ

SEQ ID NO: 41013 - protein, 7 aa, synthetic construct
RGDTDFH

SEQ ID NO: 41014 - protein, 7 aa, synthetic construct
RGDTDLD

SEQ ID NO: 41015 - protein, 7 aa, synthetic construct
RGDTFQQ

SEQ ID NO: 41016 - protein, 7 aa, synthetic construct
RGDTFSH

SEQ ID NO: 41017 - protein, 7 aa, synthetic construct
RGDTGNA

SEQ ID NO: 41018 - protein, 7 aa, synthetic construct
RGDTHDI

SEQ ID NO: 41019 - protein, 7 aa, synthetic construct
RGDTIAQ

SEQ ID NO: 41020 - protein, 7 aa, synthetic construct
RGDDHEH

SEQ ID NO: 41021 - protein, 7 aa, synthetic construct
RGDTISG

SEQ ID NO: 41022 - protein, 7 aa, synthetic construct
RGDTQAN

SEQ ID NO: 41023 - protein, 7 aa, synthetic construct
RGDTQDT

SEQ ID NO: 41024 - protein, 7 aa, synthetic construct
RGDTTES

SEQ ID NO: 41025 - protein, 7 aa, synthetic construct
RGDTVEG

SEQ ID NO: 41026 - protein, 7 aa, synthetic construct
RGDVFAA

SEQ ID NO: 41027 - protein, 7 aa, synthetic construct
RGDVFEA

SEQ ID NO: 41028 - protein, 7 aa, synthetic construct
RGDVFEF

SEQ ID NO: 41029 - protein, 7 aa, synthetic construct
RGDVFEV

SEQ ID NO: 41030 - protein, 7 aa, synthetic construct
RGDVFLS

SEQ ID NO: 41031 - protein, 7 aa, synthetic construct
RGDVGIH

SEQ ID NO: 41032 - protein, 7 aa, synthetic construct
RGDVGTE

SEQ ID NO: 41033 - protein, 7 aa, synthetic construct
RGDVIRA

SEQ ID NO: 41034 - protein, 7 aa, synthetic construct
RGDDKDT

SEQ ID NO: 41035 - protein, 7 aa, synthetic construct
RGDVSLD

SEQ ID NO: 41036 - protein, 7 aa, synthetic construct
RGDDKGH

SEQ ID NO: 41037 - protein, 7 aa, synthetic construct
RGDDLFQ

SEQ ID NO: 41038 - protein, 7 aa, synthetic construct
RGDDLGT

SEQ ID NO: 41039 - protein, 7 aa, synthetic construct
RGDDLQD

SEQ ID NO: 41040 - protein, 7 aa, synthetic construct
RGDDQGD

SEQ ID NO: 41041 - protein, 7 aa, synthetic construct
RGDDRIN

SEQ ID NO: 41042 - protein, 7 aa, synthetic construct
RGDDSLN

SEQ ID NO: 41043 - protein, 7 aa, synthetic construct
RGDDTNN

SEQ ID NO: 41044 - protein, 7 aa, synthetic construct
RGDEAAQ

SEQ ID NO: 41045 - protein, 7 aa, synthetic construct
RGDEADA

SEQ ID NO: 41046 - protein, 7 aa, synthetic construct
RGDEAST

SEQ ID NO: 41047 - protein, 7 aa, synthetic construct
RGDAFDK

SEQ ID NO: 41048 - protein, 7 aa, synthetic construct
RGDEDET

SEQ ID NO: 41049 - protein, 7 aa, synthetic construct
RGDEDKD

SEQ ID NO: 41050 - protein, 7 aa, synthetic construct
RGDEEAV

SEQ ID NO: 41051 - protein, 7 aa, synthetic construct
RGDEEED

SEQ ID NO: 41052 - protein, 7 aa, synthetic construct
RGDEENK

SEQ ID NO: 41053 - protein, 7 aa, synthetic construct
RGDEERG

SEQ ID NO: 41054 - protein, 7 aa, synthetic construct
RGDEFEI

SEQ ID NO: 41055 - protein, 7 aa, synthetic construct
RGDEFFN

SEQ ID NO: 41056 - protein, 7 aa, synthetic construct
RGDEFNT

SEQ ID NO: 41057 - protein, 7 aa, synthetic construct
RGDEFVS

SEQ ID NO: 41058 - protein, 7 aa, synthetic construct
RGDAFLL

SEQ ID NO: 41059 - protein, 7 aa, synthetic construct
RGDEKDS

SEQ ID NO: 41060 - protein, 7 aa, synthetic construct
RGDEKIA

SEQ ID NO: 41061 - protein, 7 aa, synthetic construct
RGDELDE

SEQ ID NO: 41062 - protein, 7 aa, synthetic construct
RGDENNF

SEQ ID NO: 41063 - protein, 7 aa, synthetic construct
RGDEQHD

SEQ ID NO: 41064 - protein, 7 aa, synthetic construct
RGDERDD

SEQ ID NO: 41065 - protein, 7 aa, synthetic construct
RGDESRT

SEQ ID NO: 41066 - protein, 7 aa, synthetic construct
RGDETFH

SEQ ID NO: 41067 - protein, 7 aa, synthetic construct
RGDETTS

SEQ ID NO: 41068 - protein, 7 aa, synthetic construct
RGDEVAG

SEQ ID NO: 41069 - protein, 7 aa, synthetic construct
RGDAGIG

SEQ ID NO: 41070 - protein, 7 aa, synthetic construct
RGDFHLE

SEQ ID NO: 41071 - protein, 7 aa, synthetic construct
RGDFNGD

SEQ ID NO: 41072 - protein, 7 aa, synthetic construct
RGDFNIA

SEQ ID NO: 41073 - protein, 7 aa, synthetic construct
RGDFNIE

SEQ ID NO: 41074 - protein, 7 aa, synthetic construct
RGDFQND

SEQ ID NO: 41075 - protein, 7 aa, synthetic construct
RGDFTGD

SEQ ID NO: 41076 - protein, 7 aa, synthetic construct
RGDGDFE

SEQ ID NO: 41077 - protein, 7 aa, synthetic construct
RGDGDSE

SEQ ID NO: 41078 - protein, 7 aa, synthetic construct
RGDGFEQ

SEQ ID NO: 41079 - protein, 7 aa, synthetic construct
RGDGFIG

SEQ ID NO: 41080 - protein, 7 aa, synthetic construct
RGDGFVD

SEQ ID NO: 41081 - protein, 7 aa, synthetic construct
RGDAIIH

SEQ ID NO: 41082 - protein, 7 aa, synthetic construct
RGDAILF

SEQ ID NO: 41083 - protein, 7 aa, synthetic construct
RGDGNEE

SEQ ID NO: 41084 - protein, 7 aa, synthetic construct
RGDGVVA

SEQ ID NO: 41085 - protein, 7 aa, synthetic construct
RGDHEIF

SEQ ID NO: 41086 - protein, 7 aa, synthetic construct
RGDHELG

SEQ ID NO: 41087 - protein, 7 aa, synthetic construct
RGDHHLE

SEQ ID NO: 41088 - protein, 7 aa, synthetic construct
RGDHHNA

SEQ ID NO: 41089 - protein, 7 aa, synthetic construct
RGDHIIG

SEQ ID NO: 41090 - protein, 7 aa, synthetic construct
RGDHLLV

SEQ ID NO: 41091 - protein, 7 aa, synthetic construct
RGDHQQE

SEQ ID NO: 41092 - protein, 7 aa, synthetic construct
RGDALNE

SEQ ID NO: 41093 - protein, 7 aa, synthetic construct
RGDIEQA

SEQ ID NO: 41094 - protein, 7 aa, synthetic construct
RGDANID

SEQ ID NO: 41095 - protein, 7 aa, synthetic construct
RGDIGFF

SEQ ID NO: 41096 - protein, 7 aa, synthetic construct
RGDIGQD

SEQ ID NO: 41097 - protein, 7 aa, synthetic construct
RGDIGSI

SEQ ID NO: 41098 - protein, 7 aa, synthetic construct
RGDIIID

SEQ ID NO: 41099 - protein, 7 aa, synthetic construct
RGDIIQA

SEQ ID NO: 41100 - protein, 7 aa, synthetic construct
RGDIKAG

SEQ ID NO: 41101 - protein, 7 aa, synthetic construct
RGDILLD

SEQ ID NO: 41102 - protein, 7 aa, synthetic construct
RGDILQH

SEQ ID NO: 41103 - protein, 7 aa, synthetic construct
RGDANTE

SEQ ID NO: 41104 - protein, 7 aa, synthetic construct
RGDILTD

SEQ ID NO: 41105 - protein, 7 aa, synthetic construct
RGDINRG

SEQ ID NO: 41106 - protein, 7 aa, synthetic construct
RGDISTE

SEQ ID NO: 41107 - protein, 7 aa, synthetic construct
RGDIVSA

SEQ ID NO: 41108 - protein, 7 aa, synthetic construct
RGDKDIN

SEQ ID NO: 41109 - protein, 7 aa, synthetic construct
RGDKEDD

SEQ ID NO: 41110 - protein, 7 aa, synthetic construct
RGDKEEG

SEQ ID NO: 41111 - protein, 7 aa, synthetic construct
RGDKEVA

SEQ ID NO: 41112 - protein, 7 aa, synthetic construct
RGDKIGD

SEQ ID NO: 41113 - protein, 7 aa, synthetic construct
RGDADDS

SEQ ID NO: 41114 - protein, 7 aa, synthetic construct
RGDKTEL

SEQ ID NO: 41115 - protein, 7 aa, synthetic construct
RGDLFGE

SEQ ID NO: 41116 - protein, 7 aa, synthetic construct
RGDLNAN

SEQ ID NO: 41117 - protein, 7 aa, synthetic construct
RGDATGG

SEQ ID NO: 41118 - protein, 7 aa, synthetic construct
RGDLTVD

SEQ ID NO: 41119 - protein, 7 aa, synthetic construct
RGDNFET

SEQ ID NO: 41120 - protein, 7 aa, synthetic construct
RGDNFVE

SEQ ID NO: 41121 - protein, 7 aa, synthetic construct
RGDNHLH

SEQ ID NO: 41122 - protein, 7 aa, synthetic construct
RGDNIEF

SEQ ID NO: 41123 - protein, 7 aa, synthetic construct
RGDADIF

SEQ ID NO: 41124 - protein, 7 aa, synthetic construct
RGDNNED

SEQ ID NO: 41125 - protein, 7 aa, synthetic construct
RGDAVLS

SEQ ID NO: 41126 - protein, 7 aa, synthetic construct
RGDAVLV

SEQ ID NO: 41127 - protein, 7 aa, synthetic construct
RGDADIV

SEQ ID NO: 41128 - protein, 7 aa, synthetic construct
RGDDADG

SEQ ID NO: 41129 - protein, 7 aa, synthetic construct
RGDDADV

SEQ ID NO: 41130 - protein, 7 aa, synthetic construct
RGDQEGA

SEQ ID NO: 41131 - protein, 7 aa, synthetic construct
RGDDALT

SEQ ID NO: 41132 - protein, 7 aa, synthetic construct
RGDQIVA

SEQ ID NO: 41133 - protein, 7 aa, synthetic construct
RGDQNLH

SEQ ID NO: 41134 - protein, 7 aa, synthetic construct
RGDQQFE

SEQ ID NO: 41135 - protein, 7 aa, synthetic construct
RGDDDDE

SEQ ID NO: 41136 - protein, 7 aa, synthetic construct
RGDQVAN

SEQ ID NO: 41137 - protein, 7 aa, synthetic construct
RGDQVIH

SEQ ID NO: 41138 - protein, 7 aa, synthetic construct
RGDRDTE

SEQ ID NO: 41139 - protein, 7 aa, synthetic construct
RGDRERG

SEQ ID NO: 41140 - protein, 7 aa, synthetic construct
RGDRILA

SEQ ID NO: 41141 - protein, 7 aa, synthetic construct
RGDRSID

SEQ ID NO: 41142 - protein, 7 aa, synthetic construct
RGDDERG

SEQ ID NO: 41143 - protein, 7 aa, synthetic construct
RGDDFAE

SEQ ID NO: 41144 - protein, 7 aa, synthetic construct
RGDSHVD

SEQ ID NO: 41145 - protein, 7 aa, synthetic construct
RGDSIAH

SEQ ID NO: 41146 - protein, 7 aa, synthetic construct
RGDSIIR

SEQ ID NO: 41147 - protein, 7 aa, synthetic construct
RGDSILH

SEQ ID NO: 41148 - protein, 7 aa, synthetic construct
RGDSLEE

SEQ ID NO: 41149 - protein, 7 aa, synthetic construct
RGDDFSG

SEQ ID NO: 41150 - protein, 7 aa, synthetic construct
RGDSNIR

SEQ ID NO: 41151 - protein, 7 aa, synthetic construct
RGDSNVD

SEQ ID NO: 41152 - protein, 7 aa, synthetic construct
RGDSQGG

SEQ ID NO: 41153 - protein, 7 aa, synthetic construct
RGDSSIA

SEQ ID NO: 41154 - protein, 7 aa, synthetic construct
RGDSTDG

SEQ ID NO: 41155 - protein, 7 aa, synthetic construct
RGDTASA

SEQ ID NO: 41156 - protein, 7 aa, synthetic construct
RGDTDQV

SEQ ID NO: 41157 - protein, 7 aa, synthetic construct
RGDTEEF

SEQ ID NO: 41158 - protein, 7 aa, synthetic construct
RGDTEKG

SEQ ID NO: 41159 - protein, 7 aa, synthetic construct
RGDTFDK

SEQ ID NO: 41160 - protein, 7 aa, synthetic construct
RGDTFRA

SEQ ID NO: 41161 - protein, 7 aa, synthetic construct
RGDTFVA

SEQ ID NO: 41162 - protein, 7 aa, synthetic construct
RGDTGLD

SEQ ID NO: 41163 - protein, 7 aa, synthetic construct
RGDTHKD

SEQ ID NO: 41164 - protein, 7 aa, synthetic construct
RGDTHTA

SEQ ID NO: 41165 - protein, 7 aa, synthetic construct
RGDDHFF

SEQ ID NO: 41166 - protein, 7 aa, synthetic construct
RGDTNGG

SEQ ID NO: 41167 - protein, 7 aa, synthetic construct
RGDTSIE

SEQ ID NO: 41168 - protein, 7 aa, synthetic construct
RGDTTAA

SEQ ID NO: 41169 - protein, 7 aa, synthetic construct
RGDTVNA

SEQ ID NO: 41170 - protein, 7 aa, synthetic construct
RGDVDKG

SEQ ID NO: 41171 - protein, 7 aa, synthetic construct
RGDVEDT

SEQ ID NO: 41172 - protein, 7 aa, synthetic construct
RGDVFDF

SEQ ID NO: 41173 - protein, 7 aa, synthetic construct
RGDVFED

SEQ ID NO: 41174 - protein, 7 aa, synthetic construct
RGDVHES

SEQ ID NO: 41175 - protein, 7 aa, synthetic construct
RGDVIEA

SEQ ID NO: 41176 - protein, 7 aa, synthetic construct
RGDVNEK

SEQ ID NO: 41177 - protein, 7 aa, synthetic construct
RGDDIVQ

SEQ ID NO: 41178 - protein, 7 aa, synthetic construct
RGDVQIE

SEQ ID NO: 41179 - protein, 7 aa, synthetic construct
RGDAEFF

SEQ ID NO: 41180 - protein, 7 aa, synthetic construct
RGDVSAD

SEQ ID NO: 41181 - protein, 7 aa, synthetic construct
RGDDKGS

SEQ ID NO: 41182 - protein, 7 aa, synthetic construct
RGDVTIT

SEQ ID NO: 41183 - protein, 7 aa, synthetic construct
RGDDLDH

SEQ ID NO: 41184 - protein, 7 aa, synthetic construct
RGDAEHD

SEQ ID NO: 41185 - protein, 7 aa, synthetic construct
RGDDNTH

SEQ ID NO: 41186 - protein, 7 aa, synthetic construct
RGDDNVG

SEQ ID NO: 41187 - protein, 7 aa, synthetic construct
RGDDQQR

SEQ ID NO: 41188 - protein, 7 aa, synthetic construct
RGDDQTE

SEQ ID NO: 41189 - protein, 7 aa, synthetic construct
RGDDSLA

SEQ ID NO: 41190 - protein, 7 aa, synthetic construct
RGDDTTG

SEQ ID NO: 41191 - protein, 7 aa, synthetic construct
RGDDVRG

SEQ ID NO: 41192 - protein, 7 aa, synthetic construct
RGDDVVL

SEQ ID NO: 41193 - protein, 7 aa, synthetic construct
RGDEADL

SEQ ID NO: 41194 - protein, 7 aa, synthetic construct
RGDEEAT

SEQ ID NO: 41195 - protein, 7 aa, synthetic construct
RGDEEHA

SEQ ID NO: 41196 - protein, 7 aa, synthetic construct
RGDEEHH

SEQ ID NO: 41197 - protein, 7 aa, synthetic construct
RGDEENQ

SEQ ID NO: 41198 - protein, 7 aa, synthetic construct
RGDEERH

SEQ ID NO: 41199 - protein, 7 aa, synthetic construct
RGDEFEF

SEQ ID NO: 41200 - protein, 7 aa, synthetic construct
RGDEFGF

SEQ ID NO: 41201 - protein, 7 aa, synthetic construct
RGDEFND

SEQ ID NO: 41202 - protein, 7 aa, synthetic construct
RGDEIFE

SEQ ID NO: 41203 - protein, 7 aa, synthetic construct
RGDEIGD

SEQ ID NO: 41204 - protein, 7 aa, synthetic construct
RGDAFQF

SEQ ID NO: 41205 - protein, 7 aa, synthetic construct
RGDEKHH

SEQ ID NO: 41206 - protein, 7 aa, synthetic construct
RGDEKLH

SEQ ID NO: 41207 - protein, 7 aa, synthetic construct
RGDELVS

SEQ ID NO: 41208 - protein, 7 aa, synthetic construct
RGDEQGG

SEQ ID NO: 41209 - protein, 7 aa, synthetic construct
RGDAGEG

SEQ ID NO: 41210 - protein, 7 aa, synthetic construct
RGDETND

SEQ ID NO: 41211 - protein, 7 aa, synthetic construct
RGDETQT

SEQ ID NO: 41212 - protein, 7 aa, synthetic construct
RGDEVIS

SEQ ID NO: 41213 - protein, 7 aa, synthetic construct
RGDEVQG

SEQ ID NO: 41214 - protein, 7 aa, synthetic construct
RGDEVVA

SEQ ID NO: 41215 - protein, 7 aa, synthetic construct
RGDAGTD

SEQ ID NO: 41216 - protein, 7 aa, synthetic construct
RGDFHVG

SEQ ID NO: 41217 - protein, 7 aa, synthetic construct
RGDFILG

SEQ ID NO: 41218 - protein, 7 aa, synthetic construct
RGDFILS

SEQ ID NO: 41219 - protein, 7 aa, synthetic construct
RGDFQLS

SEQ ID NO: 41220 - protein, 7 aa, synthetic construct
RGDFQSA

SEQ ID NO: 41221 - protein, 7 aa, synthetic construct
RGDAHTD

SEQ ID NO: 41222 - protein, 7 aa, synthetic construct
RGDGELG

SEQ ID NO: 41223 - protein, 7 aa, synthetic construct
RGDGEVT

SEQ ID NO: 41224 - protein, 7 aa, synthetic construct
RGDGFAE

SEQ ID NO: 41225 - protein, 7 aa, synthetic construct
RGDGIAN

SEQ ID NO: 41226 - protein, 7 aa, synthetic construct
RGDGRLN

SEQ ID NO: 41227 - protein, 7 aa, synthetic construct
RGDGSAD

SEQ ID NO: 41228 - protein, 7 aa, synthetic construct
RGDHGEE

SEQ ID NO: 41229 - protein, 7 aa, synthetic construct
RGDHIFE

SEQ ID NO: 41230 - protein, 7 aa, synthetic construct
RGDHIIN

SEQ ID NO: 41231 - protein, 7 aa, synthetic construct
RGDHIVR

SEQ ID NO: 41232 - protein, 7 aa, synthetic construct
RGDHLVN

SEQ ID NO: 41233 - protein, 7 aa, synthetic construct
RGDIFDG

SEQ ID NO: 41234 - protein, 7 aa, synthetic construct
RGDIFDQ

SEQ ID NO: 41235 - protein, 7 aa, synthetic construct
RGDIHIE

SEQ ID NO: 41236 - protein, 7 aa, synthetic construct
RGDIIFE

SEQ ID NO: 41237 - protein, 7 aa, synthetic construct
RGDINIA

SEQ ID NO: 41238 - protein, 7 aa, synthetic construct
RGDIQLA

SEQ ID NO: 41239 - protein, 7 aa, synthetic construct
RGDIQLE

SEQ ID NO: 41240 - protein, 7 aa, synthetic construct
RGDIRFD

SEQ ID NO: 41241 - protein, 7 aa, synthetic construct
RGDAQIR

SEQ ID NO: 41242 - protein, 7 aa, synthetic construct
RGDAQLV

SEQ ID NO: 41243 - protein, 7 aa, synthetic construct
RGDKDES

SEQ ID NO: 41244 - protein, 7 aa, synthetic construct
RGDAQQH

SEQ ID NO: 41245 - protein, 7 aa, synthetic construct
RGDKEES

SEQ ID NO: 41246 - protein, 7 aa, synthetic construct
RGDKHLN

SEQ ID NO: 41247 - protein, 7 aa, synthetic construct
RGDKNGQ

SEQ ID NO: 41248 - protein, 7 aa, synthetic construct
RGDKNIE

SEQ ID NO: 41249 - protein, 7 aa, synthetic construct
RGDKVKD

SEQ ID NO: 41250 - protein, 7 aa, synthetic construct
RGDLDAG

SEQ ID NO: 41251 - protein, 7 aa, synthetic construct
RGDLDEI

SEQ ID NO: 41252 - protein, 7 aa, synthetic construct
RGDASED

SEQ ID NO: 41253 - protein, 7 aa, synthetic construct
RGDLFIF

SEQ ID NO: 41254 - protein, 7 aa, synthetic construct
RGDLHLD

SEQ ID NO: 41255 - protein, 7 aa, synthetic construct
RGDLNVD

SEQ ID NO: 41256 - protein, 7 aa, synthetic construct
RGDLQIK

SEQ ID NO: 41257 - protein, 7 aa, synthetic construct
RGDLQRA

SEQ ID NO: 41258 - protein, 7 aa, synthetic construct
RGDLRVL

SEQ ID NO: 41259 - protein, 7 aa, synthetic construct
RGDATFH

SEQ ID NO: 41260 - protein, 7 aa, synthetic construct
RGDADHD

SEQ ID NO: 41261 - protein, 7 aa, synthetic construct
RGDATIL

SEQ ID NO: 41262 - protein, 7 aa, synthetic construct
RGDATQD

SEQ ID NO: 41263 - protein, 7 aa, synthetic construct
RGDNFGQ

SEQ ID NO: 41264 - protein, 7 aa, synthetic construct
RGDAVDT

SEQ ID NO: 41265 - protein, 7 aa, synthetic construct
RGDNIIA

SEQ ID NO: 41266 - protein, 7 aa, synthetic construct
RGDNINE

SEQ ID NO: 41267 - protein, 7 aa, synthetic construct
RGDNIVN

SEQ ID NO: 41268 - protein, 7 aa, synthetic construct
RGDNKVS

SEQ ID NO: 41269 - protein, 7 aa, synthetic construct
RGDAVLH

SEQ ID NO: 41270 - protein, 7 aa, synthetic construct
RGDNSIA

SEQ ID NO: 41271 - protein, 7 aa, synthetic construct
RGDNSVA

SEQ ID NO: 41272 - protein, 7 aa, synthetic construct
RGDNTFD

SEQ ID NO: 41273 - protein, 7 aa, synthetic construct
RGDAVVD

SEQ ID NO: 41274 - protein, 7 aa, synthetic construct
RGDDAIQ

SEQ ID NO: 41275 - protein, 7 aa, synthetic construct
RGDDALL

SEQ ID NO: 41276 - protein, 7 aa, synthetic construct
RGDQIDN

SEQ ID NO: 41277 - protein, 7 aa, synthetic construct
RGDQILD

SEQ ID NO: 41278 - protein, 7 aa, synthetic construct
RGDQNSG

SEQ ID NO: 41279 - protein, 7 aa, synthetic construct
RGDQQND

SEQ ID NO: 41280 - protein, 7 aa, synthetic construct
RGDDDDT

SEQ ID NO: 41281 - protein, 7 aa, synthetic construct
RGDQSIG

SEQ ID NO: 41282 - protein, 7 aa, synthetic construct
RGDQTNA

SEQ ID NO: 41283 - protein, 7 aa, synthetic construct
RGDQTTE

SEQ ID NO: 41284 - protein, 7 aa, synthetic construct
RGDDDSF

SEQ ID NO: 41285 - protein, 7 aa, synthetic construct
RGDRHLD

SEQ ID NO: 41286 - protein, 7 aa, synthetic construct
RGDRIEG

SEQ ID NO: 41287 - protein, 7 aa, synthetic construct
RGDRQDE

SEQ ID NO: 41288 - protein, 7 aa, synthetic construct
RGDADRH

SEQ ID NO: 41289 - protein, 7 aa, synthetic construct
RGDRRHG

SEQ ID NO: 41290 - protein, 7 aa, synthetic construct
RGDRVDN

SEQ ID NO: 41291 - protein, 7 aa, synthetic construct
RGDSAEE

SEQ ID NO: 41292 - protein, 7 aa, synthetic construct
RGDADSA

SEQ ID NO: 41293 - protein, 7 aa, synthetic construct
RGDDFII

SEQ ID NO: 41294 - protein, 7 aa, synthetic construct
RGDSHHG

SEQ ID NO: 41295 - protein, 7 aa, synthetic construct
RGDSHIS

SEQ ID NO: 41296 - protein, 7 aa, synthetic construct
RGDSQIQ

SEQ ID NO: 41297 - protein, 7 aa, synthetic construct
RGDSVLE

SEQ ID NO: 41298 - protein, 7 aa, synthetic construct
RGDTAFA

SEQ ID NO: 41299 - protein, 7 aa, synthetic construct
RGDTARG

SEQ ID NO: 41300 - protein, 7 aa, synthetic construct
RGDTAVE

SEQ ID NO: 41301 - protein, 7 aa, synthetic construct
RGDTDAG

SEQ ID NO: 41302 - protein, 7 aa, synthetic construct
RGDTDEV

SEQ ID NO: 41303 - protein, 7 aa, synthetic construct
RGDTDNE

SEQ ID NO: 41304 - protein, 7 aa, synthetic construct
RGDTFAD

SEQ ID NO: 41305 - protein, 7 aa, synthetic construct
RGDTFHS

SEQ ID NO: 41306 - protein, 7 aa, synthetic construct
RGDTFTL

SEQ ID NO: 41307 - protein, 7 aa, synthetic construct
RGDTFTQ

SEQ ID NO: 41308 - protein, 7 aa, synthetic construct
RGDTFVV

SEQ ID NO: 41309 - protein, 7 aa, synthetic construct
RGDTGDE

SEQ ID NO: 41310 - protein, 7 aa, synthetic construct
RGDTHKG

SEQ ID NO: 41311 - protein, 7 aa, synthetic construct
RGDTIQN

SEQ ID NO: 41312 - protein, 7 aa, synthetic construct
RGDTIVA

SEQ ID NO: 41313 - protein, 7 aa, synthetic construct
RGDTNGS

SEQ ID NO: 41314 - protein, 7 aa, synthetic construct
RGDTNNG

SEQ ID NO: 41315 - protein, 7 aa, synthetic construct
RGDTNTA

SEQ ID NO: 41316 - protein, 7 aa, synthetic construct
RGDTQES

SEQ ID NO: 41317 - protein, 7 aa, synthetic construct
RGDDHQH

SEQ ID NO: 41318 - protein, 7 aa, synthetic construct
RGDTTDF

SEQ ID NO: 41319 - protein, 7 aa, synthetic construct
RGDTTFT

SEQ ID NO: 41320 - protein, 7 aa, synthetic construct
RGDTTQD

SEQ ID NO: 41321 - protein, 7 aa, synthetic construct
RGDTTQH

SEQ ID NO: 41322 - protein, 7 aa, synthetic construct
RGDVAFA

SEQ ID NO: 41323 - protein, 7 aa, synthetic construct
RGDDIER

SEQ ID NO: 41324 - protein, 7 aa, synthetic construct
RGDVIAG

SEQ ID NO: 41325 - protein, 7 aa, synthetic construct
RGDVNNS

SEQ ID NO: 41326 - protein, 7 aa, synthetic construct
RGDDKDS

SEQ ID NO: 41327 - protein, 7 aa, synthetic construct
RGDDKLS

SEQ ID NO: 41328 - protein, 7 aa, synthetic construct
RGDDRHA

SEQ ID NO: 41329 - protein, 7 aa, synthetic construct
RGDDRLF

SEQ ID NO: 41330 - protein, 7 aa, synthetic construct
RGDDRLV

SEQ ID NO: 41331 - protein, 7 aa, synthetic construct
RGDDSVS

SEQ ID NO: 41332 - protein, 7 aa, synthetic construct
RGDDTAE

SEQ ID NO: 41333 - protein, 7 aa, synthetic construct
RGDDTDV

SEQ ID NO: 41334 - protein, 7 aa, synthetic construct
RGDAESS

SEQ ID NO: 41335 - protein, 7 aa, synthetic construct
RGDDVVN

SEQ ID NO: 41336 - protein, 7 aa, synthetic construct
RGDEDTH

SEQ ID NO: 41337 - protein, 7 aa, synthetic construct
RGDEEGG

SEQ ID NO: 41338 - protein, 7 aa, synthetic construct
RGDAFFQ

SEQ ID NO: 41339 - protein, 7 aa, synthetic construct
RGDEFLD

SEQ ID NO: 41340 - protein, 7 aa, synthetic construct
RGDEGTE

SEQ ID NO: 41341 - protein, 7 aa, synthetic construct
RGDEKRV

SEQ ID NO: 41342 - protein, 7 aa, synthetic construct
RGDAFSS

SEQ ID NO: 41343 - protein, 7 aa, synthetic construct
RGDAFVS

SEQ ID NO: 41344 - protein, 7 aa, synthetic construct
RGDEQDR

SEQ ID NO: 41345 - protein, 7 aa, synthetic construct
RGDEQEE

SEQ ID NO: 41346 - protein, 7 aa, synthetic construct
RGDEQFN

SEQ ID NO: 41347 - protein, 7 aa, synthetic construct
RGDEQFQ

SEQ ID NO: 41348 - protein, 7 aa, synthetic construct
RGDEQNV

SEQ ID NO: 41349 - protein, 7 aa, synthetic construct
RGDEQTF

SEQ ID NO: 41350 - protein, 7 aa, synthetic construct
RGDESDE

SEQ ID NO: 41351 - protein, 7 aa, synthetic construct
RGDESLE

SEQ ID NO: 41352 - protein, 7 aa, synthetic construct
RGDETFV

SEQ ID NO: 41353 - protein, 7 aa, synthetic construct
RGDETIF

SEQ ID NO: 41354 - protein, 7 aa, synthetic construct
RGDETTI

SEQ ID NO: 41355 - protein, 7 aa, synthetic construct
RGDAAIN

SEQ ID NO: 41356 - protein, 7 aa, synthetic construct
RGDFDKF

SEQ ID NO: 41357 - protein, 7 aa, synthetic construct
RGDFDLE

SEQ ID NO: 41358 - protein, 7 aa, synthetic construct
RGDFDQS

SEQ ID NO: 41359 - protein, 7 aa, synthetic construct
RGDFIAA

SEQ ID NO: 41360 - protein, 7 aa, synthetic construct
RGDFLLA

SEQ ID NO: 41361 - protein, 7 aa, synthetic construct
RGDFNHE

SEQ ID NO: 41362 - protein, 7 aa, synthetic construct
RGDFNLD

SEQ ID NO: 41363 - protein, 7 aa, synthetic construct
RGDFNLN

SEQ ID NO: 41364 - protein, 7 aa, synthetic construct
RGDFTQV

SEQ ID NO: 41365 - protein, 7 aa, synthetic construct
RGDAIDQ

SEQ ID NO: 41366 - protein, 7 aa, synthetic construct
RGDAIFL

SEQ ID NO: 41367 - protein, 7 aa, synthetic construct
RGDGFLF

SEQ ID NO: 41368 - protein, 7 aa, synthetic construct
RGDGHGD

SEQ ID NO: 41369 - protein, 7 aa, synthetic construct
RGDGIFD

SEQ ID NO: 41370 - protein, 7 aa, synthetic construct
RGDGQEA

SEQ ID NO: 41371 - protein, 7 aa, synthetic construct
RGDGQLK

SEQ ID NO: 41372 - protein, 7 aa, synthetic construct
RGDGRTD

SEQ ID NO: 41373 - protein, 7 aa, synthetic construct
RGDGSLD

SEQ ID NO: 41374 - protein, 7 aa, synthetic construct
RGDGTVG

SEQ ID NO: 41375 - protein, 7 aa, synthetic construct
RGDAKLD

SEQ ID NO: 41376 - protein, 7 aa, synthetic construct
RGDHDDQ

SEQ ID NO: 41377 - protein, 7 aa, synthetic construct
RGDHDND

SEQ ID NO: 41378 - protein, 7 aa, synthetic construct
RGDHGEQ

SEQ ID NO: 41379 - protein, 7 aa, synthetic construct
RGDHHIH

SEQ ID NO: 41380 - protein, 7 aa, synthetic construct
RGDHHIT

SEQ ID NO: 41381 - protein, 7 aa, synthetic construct
RGDHNID

SEQ ID NO: 41382 - protein, 7 aa, synthetic construct
RGDHRAD

SEQ ID NO: 41383 - protein, 7 aa, synthetic construct
RGDIADG

SEQ ID NO: 41384 - protein, 7 aa, synthetic construct
RGDIATD

SEQ ID NO: 41385 - protein, 7 aa, synthetic construct
RGDIEGE

SEQ ID NO: 41386 - protein, 7 aa, synthetic construct
RGDIGET

SEQ ID NO: 41387 - protein, 7 aa, synthetic construct
RGDIIDV

SEQ ID NO: 41388 - protein, 7 aa, synthetic construct
RGDINEQ

SEQ ID NO: 41389 - protein, 7 aa, synthetic construct
RGDIQSD

SEQ ID NO: 41390 - protein, 7 aa, synthetic construct
RGDIQTG

SEQ ID NO: 41391 - protein, 7 aa, synthetic construct
RGDITFD

SEQ ID NO: 41392 - protein, 7 aa, synthetic construct
RGDITKG

SEQ ID NO: 41393 - protein, 7 aa, synthetic construct
RGDIVAE

SEQ ID NO: 41394 - protein, 7 aa, synthetic construct
RGDIVGA

SEQ ID NO: 41395 - protein, 7 aa, synthetic construct
RGDKDDE

SEQ ID NO: 41396 - protein, 7 aa, synthetic construct
RGDKFEH

SEQ ID NO: 41397 - protein, 7 aa, synthetic construct
RGDKLIG

SEQ ID NO: 41398 - protein, 7 aa, synthetic construct
RGDKLQL

SEQ ID NO: 41399 - protein, 7 aa, synthetic construct
RGDKNLA

SEQ ID NO: 41400 - protein, 7 aa, synthetic construct
RGDKTNA

SEQ ID NO: 41401 - protein, 7 aa, synthetic construct
RGDKVEQ

SEQ ID NO: 41402 - protein, 7 aa, synthetic construct
RGDKVRD

SEQ ID NO: 41403 - protein, 7 aa, synthetic construct
RGDLDEH

SEQ ID NO: 41404 - protein, 7 aa, synthetic construct
RGDLDIA

SEQ ID NO: 41405 - protein, 7 aa, synthetic construct
RGDLEDD

SEQ ID NO: 41406 - protein, 7 aa, synthetic construct
RGDLISD

SEQ ID NO: 41407 - protein, 7 aa, synthetic construct
RGDLNTD

SEQ ID NO: 41408 - protein, 7 aa, synthetic construct
RGDATEN

SEQ ID NO: 41409 - protein, 7 aa, synthetic construct
RGDLSNL

SEQ ID NO: 41410 - protein, 7 aa, synthetic construct
RGDLTKG

SEQ ID NO: 41411 - protein, 7 aa, synthetic construct
RGDATIG

SEQ ID NO: 41412 - protein, 7 aa, synthetic construct
RGDNDDG

SEQ ID NO: 41413 - protein, 7 aa, synthetic construct
RGDNDDI

SEQ ID NO: 41414 - protein, 7 aa, synthetic construct
RGDNDQE

SEQ ID NO: 41415 - protein, 7 aa, synthetic construct
RGDNDQH

SEQ ID NO: 41416 - protein, 7 aa, synthetic construct
RGDNELG

SEQ ID NO: 41417 - protein, 7 aa, synthetic construct
RGDNFIG

SEQ ID NO: 41418 - protein, 7 aa, synthetic construct
RGDNFNL

SEQ ID NO: 41419 - protein, 7 aa, synthetic construct
RGDNHVD

SEQ ID NO: 41420 - protein, 7 aa, synthetic construct
RGDAVFN

SEQ ID NO: 41421 - protein, 7 aa, synthetic construct
RGDNNEV

SEQ ID NO: 41422 - protein, 7 aa, synthetic construct
RGDAVIN

SEQ ID NO: 41423 - protein, 7 aa, synthetic construct
RGDNQIN

SEQ ID NO: 41424 - protein, 7 aa, synthetic construct
RGDQDIS

SEQ ID NO: 41425 - protein, 7 aa, synthetic construct
RGDQFGN

SEQ ID NO: 41426 - protein, 7 aa, synthetic construct
RGDQFHN

SEQ ID NO: 41427 - protein, 7 aa, synthetic construct
RGDQGEH

SEQ ID NO: 41428 - protein, 7 aa, synthetic construct
RGDQHFG

SEQ ID NO: 41429 - protein, 7 aa, synthetic construct
RGDQKEE

SEQ ID NO: 41430 - protein, 7 aa, synthetic construct
RGDQLIK

SEQ ID NO: 41431 - protein, 7 aa, synthetic construct
RGDADLS

SEQ ID NO: 41432 - protein, 7 aa, synthetic construct
RGDDDFD

SEQ ID NO: 41433 - protein, 7 aa, synthetic construct
RGDQTDS

SEQ ID NO: 41434 - protein, 7 aa, synthetic construct
RGDQVAA

SEQ ID NO: 41435 - protein, 7 aa, synthetic construct
RGDQVTE

SEQ ID NO: 41436 - protein, 7 aa, synthetic construct
RGDDDQF

SEQ ID NO: 41437 - protein, 7 aa, synthetic construct
RGDRERE

SEQ ID NO: 41438 - protein, 7 aa, synthetic construct
RGDREVE

SEQ ID NO: 41439 - protein, 7 aa, synthetic construct
RGDRFLG

SEQ ID NO: 41440 - protein, 7 aa, synthetic construct
RGDRHSH

SEQ ID NO: 41441 - protein, 7 aa, synthetic construct
RGDDEER

SEQ ID NO: 41442 - protein, 7 aa, synthetic construct
RGDDENV

SEQ ID NO: 41443 - protein, 7 aa, synthetic construct
RGDDESQ

SEQ ID NO: 41444 - protein, 7 aa, synthetic construct
RGDDETE

SEQ ID NO: 41445 - protein, 7 aa, synthetic construct
RGDSDDF

SEQ ID NO: 41446 - protein, 7 aa, synthetic construct
RGDSDFD

SEQ ID NO: 41447 - protein, 7 aa, synthetic construct
RGDDFHH

SEQ ID NO: 41448 - protein, 7 aa, synthetic construct
RGDDFHQ

SEQ ID NO: 41449 - protein, 7 aa, synthetic construct
RGDSIFD

SEQ ID NO: 41450 - protein, 7 aa, synthetic construct
RGDSTIR

SEQ ID NO: 41451 - protein, 7 aa, synthetic construct
RGDTEGE

SEQ ID NO: 41452 - protein, 7 aa, synthetic construct
RGDTELN

SEQ ID NO: 41453 - protein, 7 aa, synthetic construct
RGDTERT

SEQ ID NO: 41454 - protein, 7 aa, synthetic construct
RGDTESA

SEQ ID NO: 41455 - protein, 7 aa, synthetic construct
RGDTEVG

SEQ ID NO: 41456 - protein, 7 aa, synthetic construct
RGDTFAK

SEQ ID NO: 41457 - protein, 7 aa, synthetic construct
RGDTFFK

SEQ ID NO: 41458 - protein, 7 aa, synthetic construct
RGDTFLL

SEQ ID NO: 41459 - protein, 7 aa, synthetic construct
RGDTGGF

SEQ ID NO: 41460 - protein, 7 aa, synthetic construct
RGDTIID

SEQ ID NO: 41461 - protein, 7 aa, synthetic construct
RGDTIVE

SEQ ID NO: 41462 - protein, 7 aa, synthetic construct
RGDDHFL

SEQ ID NO: 41463 - protein, 7 aa, synthetic construct
RGDDHIQ

SEQ ID NO: 41464 - protein, 7 aa, synthetic construct
RGDTSLD

SEQ ID NO: 41465 - protein, 7 aa, synthetic construct
RGDTTDK

SEQ ID NO: 41466 - protein, 7 aa, synthetic construct
RGDTVEH

SEQ ID NO: 41467 - protein, 7 aa, synthetic construct
RGDAEDK

SEQ ID NO: 41468 - protein, 7 aa, synthetic construct
RGDVDEL

SEQ ID NO: 41469 - protein, 7 aa, synthetic construct
RGDVDGT

SEQ ID NO: 41470 - protein, 7 aa, synthetic construct
RGDVDNI

SEQ ID NO: 41471 - protein, 7 aa, synthetic construct
RGDDIHA

SEQ ID NO: 41472 - protein, 7 aa, synthetic construct
RGDVFTH

SEQ ID NO: 41473 - protein, 7 aa, synthetic construct
RGDVLLE

SEQ ID NO: 41474 - protein, 7 aa, synthetic construct
RGDAEES

SEQ ID NO: 41475 - protein, 7 aa, synthetic construct
RGDVQAE

SEQ ID NO: 41476 - protein, 7 aa, synthetic construct
RGDVQQN

SEQ ID NO: 41477 - protein, 7 aa, synthetic construct
RGDVQQS

SEQ ID NO: 41478 - protein, 7 aa, synthetic construct
RGDVVDQ

SEQ ID NO: 41479 - protein, 7 aa, synthetic construct
RGDVVVG

SEQ ID NO: 41480 - protein, 7 aa, synthetic construct
RGDDLFS

SEQ ID NO: 41481 - protein, 7 aa, synthetic construct
RGDDNGQ

SEQ ID NO: 41482 - protein, 7 aa, synthetic construct
RGDDNVL

SEQ ID NO: 41483 - protein, 7 aa, synthetic construct
RGDDQVQ

SEQ ID NO: 41484 - protein, 7 aa, synthetic construct
RGDDRSH

SEQ ID NO: 41485 - protein, 7 aa, synthetic construct
RGDDTAA

SEQ ID NO: 41486 - protein, 7 aa, synthetic construct
RGDDTNA

SEQ ID NO: 41487 - protein, 7 aa, synthetic construct
RGDDTRG

SEQ ID NO: 41488 - protein, 7 aa, synthetic construct
RGDDVSS

SEQ ID NO: 41489 - protein, 7 aa, synthetic construct
RGDEAVI

SEQ ID NO: 41490 - protein, 7 aa, synthetic construct
RGDEDAQ

SEQ ID NO: 41491 - protein, 7 aa, synthetic construct
RGDEDLT

SEQ ID NO: 41492 - protein, 7 aa, synthetic construct
RGDAFFH

SEQ ID NO: 41493 - protein, 7 aa, synthetic construct
RGDEFRK

SEQ ID NO: 41494 - protein, 7 aa, synthetic construct
RGDEHTG

SEQ ID NO: 41495 - protein, 7 aa, synthetic construct
RGDEIEH

SEQ ID NO: 41496 - protein, 7 aa, synthetic construct
RGDEINH

SEQ ID NO: 41497 - protein, 7 aa, synthetic construct
RGDELGD

SEQ ID NO: 41498 - protein, 7 aa, synthetic construct
RGDELND

SEQ ID NO: 41499 - protein, 7 aa, synthetic construct
RGDENGA

SEQ ID NO: 41500 - protein, 7 aa, synthetic construct
RGDAFVL

SEQ ID NO: 41501 - protein, 7 aa, synthetic construct
RGDENTG

SEQ ID NO: 41502 - protein, 7 aa, synthetic construct
RGDEQVV

SEQ ID NO: 41503 - protein, 7 aa, synthetic construct
RGDAGFH

SEQ ID NO: 41504 - protein, 7 aa, synthetic construct
RGDFEQF

SEQ ID NO: 41505 - protein, 7 aa, synthetic construct
RGDFHVH

SEQ ID NO: 41506 - protein, 7 aa, synthetic construct
RGDAHDT

SEQ ID NO: 41507 - protein, 7 aa, synthetic construct
RGDAHIK

SEQ ID NO: 41508 - protein, 7 aa, synthetic construct
RGDFTAL

SEQ ID NO: 41509 - protein, 7 aa, synthetic construct
RGDFVDA

SEQ ID NO: 41510 - protein, 7 aa, synthetic construct
RGDAIES

SEQ ID NO: 41511 - protein, 7 aa, synthetic construct
RGDGEES

SEQ ID NO: 41512 - protein, 7 aa, synthetic construct
RGDGFDT

SEQ ID NO: 41513 - protein, 7 aa, synthetic construct
RGDAIQA

SEQ ID NO: 41514 - protein, 7 aa, synthetic construct
RGDGIVQ

SEQ ID NO: 41515 - protein, 7 aa, synthetic construct
RGDHDDE

SEQ ID NO: 41516 - protein, 7 aa, synthetic construct
RGDHDHQ

SEQ ID NO: 41517 - protein, 7 aa, synthetic construct
RGDHFQE

SEQ ID NO: 41518 - protein, 7 aa, synthetic construct
RGDHHRG

SEQ ID NO: 41519 - protein, 7 aa, synthetic construct
RGDHLVK

SEQ ID NO: 41520 - protein, 7 aa, synthetic construct
RGDHQEN

SEQ ID NO: 41521 - protein, 7 aa, synthetic construct
RGDHVLR

SEQ ID NO: 41522 - protein, 7 aa, synthetic construct
RGDIDVG

SEQ ID NO: 41523 - protein, 7 aa, synthetic construct
RGDIFDK

SEQ ID NO: 41524 - protein, 7 aa, synthetic construct
RGDIGDG

SEQ ID NO: 41525 - protein, 7 aa, synthetic construct
RGDAAVE

SEQ ID NO: 41526 - protein, 7 aa, synthetic construct
RGDANLT

SEQ ID NO: 41527 - protein, 7 aa, synthetic construct
RGDIIAE

SEQ ID NO: 41528 - protein, 7 aa, synthetic construct
RGDIITE

SEQ ID NO: 41529 - protein, 7 aa, synthetic construct
RGDAQLH

SEQ ID NO: 41530 - protein, 7 aa, synthetic construct
RGDKDDA

SEQ ID NO: 41531 - protein, 7 aa, synthetic construct
RGDKHLE

SEQ ID NO: 41532 - protein, 7 aa, synthetic construct
RGDKHTG

SEQ ID NO: 41533 - protein, 7 aa, synthetic construct
RGDKLEA

SEQ ID NO: 41534 - protein, 7 aa, synthetic construct
RGDKNFG

SEQ ID NO: 41535 - protein, 7 aa, synthetic construct
RGDKNVD

SEQ ID NO: 41536 - protein, 7 aa, synthetic construct
RGDKQES

SEQ ID NO: 41537 - protein, 7 aa, synthetic construct
RGDKTEN

SEQ ID NO: 41538 - protein, 7 aa, synthetic construct
RGDKTVN

SEQ ID NO: 41539 - protein, 7 aa, synthetic construct
RGDKVHD

SEQ ID NO: 41540 - protein, 7 aa, synthetic construct
RGDLDEG

SEQ ID NO: 41541 - protein, 7 aa, synthetic construct
RGDLDTE

SEQ ID NO: 41542 - protein, 7 aa, synthetic construct
RGDLERH

SEQ ID NO: 41543 - protein, 7 aa, synthetic construct
RGDLFEE

SEQ ID NO: 41544 - protein, 7 aa, synthetic construct
RGDLFTL

SEQ ID NO: 41545 - protein, 7 aa, synthetic construct
RGDLGHF

SEQ ID NO: 41546 - protein, 7 aa, synthetic construct
RGDLLVD

SEQ ID NO: 41547 - protein, 7 aa, synthetic construct
RGDLNIN

SEQ ID NO: 41548 - protein, 7 aa, synthetic construct
RGDNAET

SEQ ID NO: 41549 - protein, 7 aa, synthetic construct
RGDNEEQ

SEQ ID NO: 41550 - protein, 7 aa, synthetic construct
RGDATVE

SEQ ID NO: 41551 - protein, 7 aa, synthetic construct
RGDNILL

SEQ ID NO: 41552 - protein, 7 aa, synthetic construct
RGDAVFE

SEQ ID NO: 41553 - protein, 7 aa, synthetic construct
RGDNLVD

SEQ ID NO: 41554 - protein, 7 aa, synthetic construct
RGDNQDG

SEQ ID NO: 41555 - protein, 7 aa, synthetic construct
RGDNQHH

SEQ ID NO: 41556 - protein, 7 aa, synthetic construct
RGDQAIS

SEQ ID NO: 41557 - protein, 7 aa, synthetic construct
RGDQDAV

SEQ ID NO: 41558 - protein, 7 aa, synthetic construct
RGDQDIT

SEQ ID NO: 41559 - protein, 7 aa, synthetic construct
RGDQEDA

SEQ ID NO: 41560 - protein, 7 aa, synthetic construct
RGDQQAE

SEQ ID NO: 41561 - protein, 7 aa, synthetic construct
RGDDDHE

SEQ ID NO: 41562 - protein, 7 aa, synthetic construct
RGDQTTD

SEQ ID NO: 41563 - protein, 7 aa, synthetic construct
RGDDDLT

SEQ ID NO: 41564 - protein, 7 aa, synthetic construct
RGDRHAA

SEQ ID NO: 41565 - protein, 7 aa, synthetic construct
RGDDEEL

SEQ ID NO: 41566 - protein, 7 aa, synthetic construct
RGDRNIE

SEQ ID NO: 41567 - protein, 7 aa, synthetic construct
RGDDELL

SEQ ID NO: 41568 - protein, 7 aa, synthetic construct
RGDDFDG

SEQ ID NO: 41569 - protein, 7 aa, synthetic construct
RGDDFDH

SEQ ID NO: 41570 - protein, 7 aa, synthetic construct
RGDSEVE

SEQ ID NO: 41571 - protein, 7 aa, synthetic construct
RGDSFEA

SEQ ID NO: 41572 - protein, 7 aa, synthetic construct
RGDSFGD

SEQ ID NO: 41573 - protein, 7 aa, synthetic construct
RGDSLAT

SEQ ID NO: 41574 - protein, 7 aa, synthetic construct
RGDSVGD

SEQ ID NO: 41575 - protein, 7 aa, synthetic construct
RGDTALE

SEQ ID NO: 41576 - protein, 7 aa, synthetic construct
RGDTESS

SEQ ID NO: 41577 - protein, 7 aa, synthetic construct
RGDTFAA

SEQ ID NO: 41578 - protein, 7 aa, synthetic construct
RGDTFHG

SEQ ID NO: 41579 - protein, 7 aa, synthetic construct
RGDTFTH

SEQ ID NO: 41580 - protein, 7 aa, synthetic construct
RGDTHEG

SEQ ID NO: 41581 - protein, 7 aa, synthetic construct
RGDDHEE

SEQ ID NO: 41582 - protein, 7 aa, synthetic construct
RGDTLEG

SEQ ID NO: 41583 - protein, 7 aa, synthetic construct
RGDTNAS

SEQ ID NO: 41584 - protein, 7 aa, synthetic construct
RGDTNGE

SEQ ID NO: 41585 - protein, 7 aa, synthetic construct
RGDDHIK

SEQ ID NO: 41586 - protein, 7 aa, synthetic construct
RGDTNNA

SEQ ID NO: 41587 - protein, 7 aa, synthetic construct
RGDTQLT

SEQ ID NO: 41588 - protein, 7 aa, synthetic construct
RGDAEAS

SEQ ID NO: 41589 - protein, 7 aa, synthetic construct
RGDTRDE

SEQ ID NO: 41590 - protein, 7 aa, synthetic construct
RGDTTEL

SEQ ID NO: 41591 - protein, 7 aa, synthetic construct
RGDTTIA

SEQ ID NO: 41592 - protein, 7 aa, synthetic construct
RGDTVDL

SEQ ID NO: 41593 - protein, 7 aa, synthetic construct
RGDTVEE

SEQ ID NO: 41594 - protein, 7 aa, synthetic construct
RGDTVFD

SEQ ID NO: 41595 - protein, 7 aa, synthetic construct
RGDDHVF

SEQ ID NO: 41596 - protein, 7 aa, synthetic construct
RGDVANE

SEQ ID NO: 41597 - protein, 7 aa, synthetic construct
RGDVDLS

SEQ ID NO: 41598 - protein, 7 aa, synthetic construct
RGDVDVD

SEQ ID NO: 41599 - protein, 7 aa, synthetic construct
RGDDIFV

SEQ ID NO: 41600 - protein, 7 aa, synthetic construct
RGDVEQV

SEQ ID NO: 41601 - protein, 7 aa, synthetic construct
RGDVFQG

SEQ ID NO: 41602 - protein, 7 aa, synthetic construct
RGDVFTE

SEQ ID NO: 41603 - protein, 7 aa, synthetic construct
RGDVHVA

SEQ ID NO: 41604 - protein, 7 aa, synthetic construct
RGDVIVG

SEQ ID NO: 41605 - protein, 7 aa, synthetic construct
RGDVNVG

SEQ ID NO: 41606 - protein, 7 aa, synthetic construct
RGDVQED

SEQ ID NO: 41607 - protein, 7 aa, synthetic construct
RGDVREG

SEQ ID NO: 41608 - protein, 7 aa, synthetic construct
RGDVTDV

SEQ ID NO: 41609 - protein, 7 aa, synthetic construct
RGDVTEK

SEQ ID NO: 41610 - protein, 7 aa, synthetic construct
RGDDKIT

SEQ ID NO: 41611 - protein, 7 aa, synthetic construct
RGDDKVQ

SEQ ID NO: 41612 - protein, 7 aa, synthetic construct
RGDDLND

SEQ ID NO: 41613 - protein, 7 aa, synthetic construct
RGDDNFH

SEQ ID NO: 41614 - protein, 7 aa, synthetic construct
RGDDNNA

SEQ ID NO: 41615 - protein, 7 aa, synthetic construct
RGDDQIL

SEQ ID NO: 41616 - protein, 7 aa, synthetic construct
RGDDQLF

SEQ ID NO: 41617 - protein, 7 aa, synthetic construct
RGDDVET

SEQ ID NO: 41618 - protein, 7 aa, synthetic construct
RGDDVVD

SEQ ID NO: 41619 - protein, 7 aa, synthetic construct
RGDEDNG

SEQ ID NO: 41620 - protein, 7 aa, synthetic construct
RGDEEIG

SEQ ID NO: 41621 - protein, 7 aa, synthetic construct
RGDEGDF

SEQ ID NO: 41622 - protein, 7 aa, synthetic construct
RGDEIFR

SEQ ID NO: 41623 - protein, 7 aa, synthetic construct
RGDEIIR

SEQ ID NO: 41624 - protein, 7 aa, synthetic construct
RGDEIST

SEQ ID NO: 41625 - protein, 7 aa, synthetic construct
RGDEIVG

SEQ ID NO: 41626 - protein, 7 aa, synthetic construct
RGDAFQL

SEQ ID NO: 41627 - protein, 7 aa, synthetic construct
RGDELAV

SEQ ID NO: 41628 - protein, 7 aa, synthetic construct
RGDELLQ

SEQ ID NO: 41629 - protein, 7 aa, synthetic construct
RGDAFTN

SEQ ID NO: 41630 - protein, 7 aa, synthetic construct
RGDENEG

SEQ ID NO: 41631 - protein, 7 aa, synthetic construct
RGDENGD

SEQ ID NO: 41632 - protein, 7 aa, synthetic construct
RGDEQQS

SEQ ID NO: 41633 - protein, 7 aa, synthetic construct
RGDERTN

SEQ ID NO: 41634 - protein, 7 aa, synthetic construct
RGDAGIA

SEQ ID NO: 41635 - protein, 7 aa, synthetic construct
RGDAGLI

SEQ ID NO: 41636 - protein, 7 aa, synthetic construct
RGDFFRG

SEQ ID NO: 41637 - protein, 7 aa, synthetic construct
RGDFLEA

SEQ ID NO: 41638 - protein, 7 aa, synthetic construct
RGDAHIE

SEQ ID NO: 41639 - protein, 7 aa, synthetic construct
RGDFNFD

SEQ ID NO: 41640 - protein, 7 aa, synthetic construct
RGDAHLK

SEQ ID NO: 41641 - protein, 7 aa, synthetic construct
RGDAIEV

SEQ ID NO: 41642 - protein, 7 aa, synthetic construct
RGDGEFN

SEQ ID NO: 41643 - protein, 7 aa, synthetic construct
RGDGHIT

SEQ ID NO: 41644 - protein, 7 aa, synthetic construct
RGDGNES

SEQ ID NO: 41645 - protein, 7 aa, synthetic construct
RGDGNIA

SEQ ID NO: 41646 - protein, 7 aa, synthetic construct
RGDGTIA

SEQ ID NO: 41647 - protein, 7 aa, synthetic construct
RGDHAAA

SEQ ID NO: 41648 - protein, 7 aa, synthetic construct
RGDHEDS

SEQ ID NO: 41649 - protein, 7 aa, synthetic construct
RGDHEFG

SEQ ID NO: 41650 - protein, 7 aa, synthetic construct
RGDHFAA

SEQ ID NO: 41651 - protein, 7 aa, synthetic construct
RGDHFDF

SEQ ID NO: 41652 - protein, 7 aa, synthetic construct
RGDHFQG

SEQ ID NO: 41653 - protein, 7 aa, synthetic construct
RGDHHAE

SEQ ID NO: 41654 - protein, 7 aa, synthetic construct
RGDHIEQ

SEQ ID NO: 41655 - protein, 7 aa, synthetic construct
RGDHTIQ

SEQ ID NO: 41656 - protein, 7 aa, synthetic construct
RGDHVFH

SEQ ID NO: 41657 - protein, 7 aa, synthetic construct
RGDIEIE

SEQ ID NO: 41658 - protein, 7 aa, synthetic construct
RGDANLK

SEQ ID NO: 41659 - protein, 7 aa, synthetic construct
RGDANSS

SEQ ID NO: 41660 - protein, 7 aa, synthetic construct
RGDINEV

SEQ ID NO: 41661 - protein, 7 aa, synthetic construct
RGDIQDN

SEQ ID NO: 41662 - protein, 7 aa, synthetic construct
RGDISDD

SEQ ID NO: 41663 - protein, 7 aa, synthetic construct
RGDIVAG

SEQ ID NO: 41664 - protein, 7 aa, synthetic construct
RGDIVLE

SEQ ID NO: 41665 - protein, 7 aa, synthetic construct
RGDKAEL

SEQ ID NO: 41666 - protein, 7 aa, synthetic construct
RGDKDFN

SEQ ID NO: 41667 - protein, 7 aa, synthetic construct
RGDKDIA

SEQ ID NO: 41668 - protein, 7 aa, synthetic construct
RGDKDQS

SEQ ID NO: 41669 - protein, 7 aa, synthetic construct
RGDAQSD

SEQ ID NO: 41670 - protein, 7 aa, synthetic construct
RGDKFGD

SEQ ID NO: 41671 - protein, 7 aa, synthetic construct
RGDKFIG

SEQ ID NO: 41672 - protein, 7 aa, synthetic construct
RGDKQLA

SEQ ID NO: 41673 - protein, 7 aa, synthetic construct
RGDKVLE

SEQ ID NO: 41674 - protein, 7 aa, synthetic construct
RGDLFDS

SEQ ID NO: 41675 - protein, 7 aa, synthetic construct
RGDASIA

SEQ ID NO: 41676 - protein, 7 aa, synthetic construct
RGDASLF

SEQ ID NO: 41677 - protein, 7 aa, synthetic construct
RGDLHLA

SEQ ID NO: 41678 - protein, 7 aa, synthetic construct
RGDLLDI

SEQ ID NO: 41679 - protein, 7 aa, synthetic construct
RGDATAS

SEQ ID NO: 41680 - protein, 7 aa, synthetic construct
RGDLRSL

SEQ ID NO: 41681 - protein, 7 aa, synthetic construct
RGDLSDG

SEQ ID NO: 41682 - protein, 7 aa, synthetic construct
RGDLSHL

SEQ ID NO: 41683 - protein, 7 aa, synthetic construct
RGDATKD

SEQ ID NO: 41684 - protein, 7 aa, synthetic construct
RGDNDEQ

SEQ ID NO: 41685 - protein, 7 aa, synthetic construct
RGDNEFD

SEQ ID NO: 41686 - protein, 7 aa, synthetic construct
RGDNFGD

SEQ ID NO: 41687 - protein, 7 aa, synthetic construct
RGDNHEH

SEQ ID NO: 41688 - protein, 7 aa, synthetic construct
RGDNIQA

SEQ ID NO: 41689 - protein, 7 aa, synthetic construct
RGDNRDG

SEQ ID NO: 41690 - protein, 7 aa, synthetic construct
RGDADKD

SEQ ID NO: 41691 - protein, 7 aa, synthetic construct
RGDNVVN

SEQ ID NO: 41692 - protein, 7 aa, synthetic construct
RGDQKLS

SEQ ID NO: 41693 - protein, 7 aa, synthetic construct
RGDQLSD

SEQ ID NO: 41694 - protein, 7 aa, synthetic construct
RGDQNVS

SEQ ID NO: 41695 - protein, 7 aa, synthetic construct
RGDQQDF

SEQ ID NO: 41696 - protein, 7 aa, synthetic construct
RGDQSDT

SEQ ID NO: 41697 - protein, 7 aa, synthetic construct
RGDQSLL

SEQ ID NO: 41698 - protein, 7 aa, synthetic construct
RGDQSSE

SEQ ID NO: 41699 - protein, 7 aa, synthetic construct
RGDDDLQ

SEQ ID NO: 41700 - protein, 7 aa, synthetic construct
RGDRDED

SEQ ID NO: 41701 - protein, 7 aa, synthetic construct
RGDREIS

SEQ ID NO: 41702 - protein, 7 aa, synthetic construct
RGDRFAE

SEQ ID NO: 41703 - protein, 7 aa, synthetic construct
RGDDELG

SEQ ID NO: 41704 - protein, 7 aa, synthetic construct
RGDDELI

SEQ ID NO: 41705 - protein, 7 aa, synthetic construct
RGDDESI

SEQ ID NO: 41706 - protein, 7 aa, synthetic construct
RGDSDVH

SEQ ID NO: 41707 - protein, 7 aa, synthetic construct
RGDSEHH

SEQ ID NO: 41708 - protein, 7 aa, synthetic construct
RGDDFHE

SEQ ID NO: 41709 - protein, 7 aa, synthetic construct
RGDSHLS

SEQ ID NO: 41710 - protein, 7 aa, synthetic construct
RGDSKIG

SEQ ID NO: 41711 - protein, 7 aa, synthetic construct
RGDSNDV

SEQ ID NO: 41712 - protein, 7 aa, synthetic construct
RGDSNEK

SEQ ID NO: 41713 - protein, 7 aa, synthetic construct
RGDSNLS

SEQ ID NO: 41714 - protein, 7 aa, synthetic construct
RGDTEIH

SEQ ID NO: 41715 - protein, 7 aa, synthetic construct
RGDTFDR

SEQ ID NO: 41716 - protein, 7 aa, synthetic construct
RGDTFEV

SEQ ID NO: 41717 - protein, 7 aa, synthetic construct
RGDTFIG

SEQ ID NO: 41718 - protein, 7 aa, synthetic construct
RGDTIDG

SEQ ID NO: 41719 - protein, 7 aa, synthetic construct
RGDDHEN

SEQ ID NO: 41720 - protein, 7 aa, synthetic construct
RGDTITD

SEQ ID NO: 41721 - protein, 7 aa, synthetic construct
RGDDHFD

SEQ ID NO: 41722 - protein, 7 aa, synthetic construct
RGDDHLS

SEQ ID NO: 41723 - protein, 7 aa, synthetic construct
RGDTTIE

SEQ ID NO: 41724 - protein, 7 aa, synthetic construct
RGDDHSN

SEQ ID NO: 41725 - protein, 7 aa, synthetic construct
RGDTTRE

SEQ ID NO: 41726 - protein, 7 aa, synthetic construct
RGDTVLQ

SEQ ID NO: 41727 - protein, 7 aa, synthetic construct
RGDTVTE

SEQ ID NO: 41728 - protein, 7 aa, synthetic construct
RGDVADT

SEQ ID NO: 41729 - protein, 7 aa, synthetic construct
RGDVARD

SEQ ID NO: 41730 - protein, 7 aa, synthetic construct
RGDVDVH

SEQ ID NO: 41731 - protein, 7 aa, synthetic construct
RGDVFDE

SEQ ID NO: 41732 - protein, 7 aa, synthetic construct
RGDVFHD

SEQ ID NO: 41733 - protein, 7 aa, synthetic construct
RGDVGGF

SEQ ID NO: 41734 - protein, 7 aa, synthetic construct
RGDVHLD

SEQ ID NO: 41735 - protein, 7 aa, synthetic construct
RGDVIEQ

SEQ ID NO: 41736 - protein, 7 aa, synthetic construct
RGDDING

SEQ ID NO: 41737 - protein, 7 aa, synthetic construct
RGDDKHT

SEQ ID NO: 41738 - protein, 7 aa, synthetic construct
RGDDKIQ

SEQ ID NO: 41739 - protein, 7 aa, synthetic construct
RGDDQIE

SEQ ID NO: 41740 - protein, 7 aa, synthetic construct
RGDDREA

SEQ ID NO: 41741 - protein, 7 aa, synthetic construct
RGDAETH

SEQ ID NO: 41742 - protein, 7 aa, synthetic construct
RGDEAEQ

SEQ ID NO: 41743 - protein, 7 aa, synthetic construct
RGDEDKF

SEQ ID NO: 41744 - protein, 7 aa, synthetic construct
RGDEEGA

SEQ ID NO: 41745 - protein, 7 aa, synthetic construct
RGDEFHG

SEQ ID NO: 41746 - protein, 7 aa, synthetic construct
RGDEHED

SEQ ID NO: 41747 - protein, 7 aa, synthetic construct
RGDELEF

SEQ ID NO: 41748 - protein, 7 aa, synthetic construct
RGDELEI

SEQ ID NO: 41749 - protein, 7 aa, synthetic construct
RGDELIE

SEQ ID NO: 41750 - protein, 7 aa, synthetic construct
RGDELVE

SEQ ID NO: 41751 - protein, 7 aa, synthetic construct
RGDEQIE

SEQ ID NO: 41752 - protein, 7 aa, synthetic construct
RGDEQQF

SEQ ID NO: 41753 - protein, 7 aa, synthetic construct
RGDEQRR

SEQ ID NO: 41754 - protein, 7 aa, synthetic construct
RGDERVE

SEQ ID NO: 41755 - protein, 7 aa, synthetic construct
RGDETSK

SEQ ID NO: 41756 - protein, 7 aa, synthetic construct
RGDETVG

SEQ ID NO: 41757 - protein, 7 aa, synthetic construct
RGDFDEG

SEQ ID NO: 41758 - protein, 7 aa, synthetic construct
RGDAGNF

SEQ ID NO: 41759 - protein, 7 aa, synthetic construct
RGDFSKG

SEQ ID NO: 41760 - protein, 7 aa, synthetic construct
RGDGDES

SEQ ID NO: 41761 - protein, 7 aa, synthetic construct
RGDGGDQ

SEQ ID NO: 41762 - protein, 7 aa, synthetic construct
RGDGHLH

SEQ ID NO: 41763 - protein, 7 aa, synthetic construct
RGDAILK

SEQ ID NO: 41764 - protein, 7 aa, synthetic construct
RGDGILF

SEQ ID NO: 41765 - protein, 7 aa, synthetic construct
RGDHDNA

SEQ ID NO: 41766 - protein, 7 aa, synthetic construct
RGDHHFH

SEQ ID NO: 41767 - protein, 7 aa, synthetic construct
RGDHHVS

SEQ ID NO: 41768 - protein, 7 aa, synthetic construct
RGDHKDN

SEQ ID NO: 41769 - protein, 7 aa, synthetic construct
RGDHLTN

SEQ ID NO: 41770 - protein, 7 aa, synthetic construct
RGDHNEA

SEQ ID NO: 41771 - protein, 7 aa, synthetic construct
RGDHQAD

SEQ ID NO: 41772 - protein, 7 aa, synthetic construct
RGDALLL

SEQ ID NO: 41773 - protein, 7 aa, synthetic construct
RGDHVNG

SEQ ID NO: 41774 - protein, 7 aa, synthetic construct
RGDALVN

SEQ ID NO: 41775 - protein, 7 aa, synthetic construct
RGDIAID

SEQ ID NO: 41776 - protein, 7 aa, synthetic construct
RGDIDGH

SEQ ID NO: 41777 - protein, 7 aa, synthetic construct
RGDIDQV

SEQ ID NO: 41778 - protein, 7 aa, synthetic construct
RGDIFLD

SEQ ID NO: 41779 - protein, 7 aa, synthetic construct
RGDIGDT

SEQ ID NO: 41780 - protein, 7 aa, synthetic construct
RGDANIQ

SEQ ID NO: 41781 - protein, 7 aa, synthetic construct
RGDIIIG

SEQ ID NO: 41782 - protein, 7 aa, synthetic construct
RGDIILG

SEQ ID NO: 41783 - protein, 7 aa, synthetic construct
RGDIKQA

SEQ ID NO: 41784 - protein, 7 aa, synthetic construct
RGDILAQ

SEQ ID NO: 41785 - protein, 7 aa, synthetic construct
RGDILFE

SEQ ID NO: 41786 - protein, 7 aa, synthetic construct
RGDANVN

SEQ ID NO: 41787 - protein, 7 aa, synthetic construct
RGDANVS

SEQ ID NO: 41788 - protein, 7 aa, synthetic construct
RGDIQVA

SEQ ID NO: 41789 - protein, 7 aa, synthetic construct
RGDITEE

SEQ ID NO: 41790 - protein, 7 aa, synthetic construct
RGDITLH

SEQ ID NO: 41791 - protein, 7 aa, synthetic construct
RGDIVDI

SEQ ID NO: 41792 - protein, 7 aa, synthetic construct
RGDIVGD

SEQ ID NO: 41793 - protein, 7 aa, synthetic construct
RGDADAV

SEQ ID NO: 41794 - protein, 7 aa, synthetic construct
RGDKHVG

SEQ ID NO: 41795 - protein, 7 aa, synthetic construct
RGDKIVQ

SEQ ID NO: 41796 - protein, 7 aa, synthetic construct
RGDADDT

SEQ ID NO: 41797 - protein, 7 aa, synthetic construct
RGDKNED

SEQ ID NO: 41798 - protein, 7 aa, synthetic construct
RGDKQFG

SEQ ID NO: 41799 - protein, 7 aa, synthetic construct
RGDKSIF

SEQ ID NO: 41800 - protein, 7 aa, synthetic construct
RGDKTAD

SEQ ID NO: 41801 - protein, 7 aa, synthetic construct
RGDLDRE

SEQ ID NO: 41802 - protein, 7 aa, synthetic construct
RGDLFDL

SEQ ID NO: 41803 - protein, 7 aa, synthetic construct
RGDLFES

SEQ ID NO: 41804 - protein, 7 aa, synthetic construct
RGDNEEL

SEQ ID NO: 41805 - protein, 7 aa, synthetic construct
RGDNFDV

SEQ ID NO: 41806 - protein, 7 aa, synthetic construct
RGDNFHS

SEQ ID NO: 41807 - protein, 7 aa, synthetic construct
RGDATVT

SEQ ID NO: 41808 - protein, 7 aa, synthetic construct
RGDNILV

SEQ ID NO: 41809 - protein, 7 aa, synthetic construct
RGDNKAG

SEQ ID NO: 41810 - protein, 7 aa, synthetic construct
RGDNLAN

SEQ ID NO: 41811 - protein, 7 aa, synthetic construct
RGDNLIN

SEQ ID NO: 41812 - protein, 7 aa, synthetic construct
RGDNLTN

SEQ ID NO: 41813 - protein, 7 aa, synthetic construct
RGDNNNF

SEQ ID NO: 41814 - protein, 7 aa, synthetic construct
RGDNNQG

SEQ ID NO: 41815 - protein, 7 aa, synthetic construct
RGDNNVH

SEQ ID NO: 41816 - protein, 7 aa, synthetic construct
RGDNNVN

SEQ ID NO: 41817 - protein, 7 aa, synthetic construct
RGDNQFE

SEQ ID NO: 41818 - protein, 7 aa, synthetic construct
RGDAVLA

SEQ ID NO: 41819 - protein, 7 aa, synthetic construct
RGDNQIS

SEQ ID NO: 41820 - protein, 7 aa, synthetic construct
RGDNSIN

SEQ ID NO: 41821 - protein, 7 aa, synthetic construct
RGDQADS

SEQ ID NO: 41822 - protein, 7 aa, synthetic construct
RGDQADV

SEQ ID NO: 41823 - protein, 7 aa, synthetic construct
RGDDAEV

SEQ ID NO: 41824 - protein, 7 aa, synthetic construct
RGDADLD

SEQ ID NO: 41825 - protein, 7 aa, synthetic construct
RGDQHDL

SEQ ID NO: 41826 - protein, 7 aa, synthetic construct
RGDDAND

SEQ ID NO: 41827 - protein, 7 aa, synthetic construct
RGDDANE

SEQ ID NO: 41828 - protein, 7 aa, synthetic construct
RGDQIIA

SEQ ID NO: 41829 - protein, 7 aa, synthetic construct
RGDQIIH

SEQ ID NO: 41830 - protein, 7 aa, synthetic construct
RGDQLSE

SEQ ID NO: 41831 - protein, 7 aa, synthetic construct
RGDQSLA

SEQ ID NO: 41832 - protein, 7 aa, synthetic construct
RGDQVTD

SEQ ID NO: 41833 - protein, 7 aa, synthetic construct
RGDRFAD

SEQ ID NO: 41834 - protein, 7 aa, synthetic construct
RGDDDSH

SEQ ID NO: 41835 - protein, 7 aa, synthetic construct
RGDRFLD

SEQ ID NO: 41836 - protein, 7 aa, synthetic construct
RGDDEAG

SEQ ID NO: 41837 - protein, 7 aa, synthetic construct
RGDDEQH

SEQ ID NO: 41838 - protein, 7 aa, synthetic construct
RGDRVAD

SEQ ID NO: 41839 - protein, 7 aa, synthetic construct
RGDRVID

SEQ ID NO: 41840 - protein, 7 aa, synthetic construct
RGDSDEH

SEQ ID NO: 41841 - protein, 7 aa, synthetic construct
RGDDFFD

SEQ ID NO: 41842 - protein, 7 aa, synthetic construct
RGDSEDH

SEQ ID NO: 41843 - protein, 7 aa, synthetic construct
RGDSELV

SEQ ID NO: 41844 - protein, 7 aa, synthetic construct
RGDADSQ

SEQ ID NO: 41845 - protein, 7 aa, synthetic construct
RGDDFRQ

SEQ ID NO: 41846 - protein, 7 aa, synthetic construct
RGDDFSA

SEQ ID NO: 41847 - protein, 7 aa, synthetic construct
RGDSQID

SEQ ID NO: 41848 - protein, 7 aa, synthetic construct
RGDTAFN

SEQ ID NO: 41849 - protein, 7 aa, synthetic construct
RGDTDES

SEQ ID NO: 41850 - protein, 7 aa, synthetic construct
RGDTDTS

SEQ ID NO: 41851 - protein, 7 aa, synthetic construct
RGDTEHS

SEQ ID NO: 41852 - protein, 7 aa, synthetic construct
RGDTERG

SEQ ID NO: 41853 - protein, 7 aa, synthetic construct
RGDADVN

SEQ ID NO: 41854 - protein, 7 aa, synthetic construct
RGDTIFA

SEQ ID NO: 41855 - protein, 7 aa, synthetic construct
RGDTNDE

SEQ ID NO: 41856 - protein, 7 aa, synthetic construct
RGDTNTG

SEQ ID NO: 41857 - protein, 7 aa, synthetic construct
RGDTQEQ

SEQ ID NO: 41858 - protein, 7 aa, synthetic construct
RGDTQFS

SEQ ID NO: 41859 - protein, 7 aa, synthetic construct
RGDTSIS

SEQ ID NO: 41860 - protein, 7 aa, synthetic construct
RGDTTHA

SEQ ID NO: 41861 - protein, 7 aa, synthetic construct
RGDTTLS

SEQ ID NO: 41862 - protein, 7 aa, synthetic construct
RGDVAEA

SEQ ID NO: 41863 - protein, 7 aa, synthetic construct
RGDVAKG

SEQ ID NO: 41864 - protein, 7 aa, synthetic construct
RGDVDAT

SEQ ID NO: 41865 - protein, 7 aa, synthetic construct
RGDVDLI

SEQ ID NO: 41866 - protein, 7 aa, synthetic construct
RGDVDQH

SEQ ID NO: 41867 - protein, 7 aa, synthetic construct
RGDVDSA

SEQ ID NO: 41868 - protein, 7 aa, synthetic construct
RGDDIFQ

SEQ ID NO: 41869 - protein, 7 aa, synthetic construct
RGDVFDT

SEQ ID NO: 41870 - protein, 7 aa, synthetic construct
RGDVFRA

SEQ ID NO: 41871 - protein, 7 aa, synthetic construct
RGDDIIA

SEQ ID NO: 41872 - protein, 7 aa, synthetic construct
RGDVGDT

SEQ ID NO: 41873 - protein, 7 aa, synthetic construct
RGDDIIQ

SEQ ID NO: 41874 - protein, 7 aa, synthetic construct
RGDVKEE

SEQ ID NO: 41875 - protein, 7 aa, synthetic construct
RGDDKAA

SEQ ID NO: 41876 - protein, 7 aa, synthetic construct
RGDVQEE

SEQ ID NO: 41877 - protein, 7 aa, synthetic construct
RGDDKQN

SEQ ID NO: 41878 - protein, 7 aa, synthetic construct
RGDDKSH

SEQ ID NO: 41879 - protein, 7 aa, synthetic construct
RGDDLIE

SEQ ID NO: 41880 - protein, 7 aa, synthetic construct
RGDDLIS

SEQ ID NO: 41881 - protein, 7 aa, synthetic construct
RGDDQDH

SEQ ID NO: 41882 - protein, 7 aa, synthetic construct
RGDDSNG

SEQ ID NO: 41883 - protein, 7 aa, synthetic construct
RGDDTAV

SEQ ID NO: 41884 - protein, 7 aa, synthetic construct
RGDDTEK

SEQ ID NO: 41885 - protein, 7 aa, synthetic construct
RGDDVLH

SEQ ID NO: 41886 - protein, 7 aa, synthetic construct
RGDEAGF

SEQ ID NO: 41887 - protein, 7 aa, synthetic construct
RGDEDSE

SEQ ID NO: 41888 - protein, 7 aa, synthetic construct
RGDEEDT

SEQ ID NO: 41889 - protein, 7 aa, synthetic construct
RGDAFLG

SEQ ID NO: 41890 - protein, 7 aa, synthetic construct
RGDAFLT

SEQ ID NO: 41891 - protein, 7 aa, synthetic construct
RGDEIIL

SEQ ID NO: 41892 - protein, 7 aa, synthetic construct
RGDEITD

SEQ ID NO: 41893 - protein, 7 aa, synthetic construct
RGDEKSA

SEQ ID NO: 41894 - protein, 7 aa, synthetic construct
RGDEKSH

SEQ ID NO: 41895 - protein, 7 aa, synthetic construct
RGDENEN

SEQ ID NO: 41896 - protein, 7 aa, synthetic construct
RGDENIT

SEQ ID NO: 41897 - protein, 7 aa, synthetic construct
RGDEQTE

SEQ ID NO: 41898 - protein, 7 aa, synthetic construct
RGDESNH

SEQ ID NO: 41899 - protein, 7 aa, synthetic construct
RGDETEG

SEQ ID NO: 41900 - protein, 7 aa, synthetic construct
RGDETGI

SEQ ID NO: 41901 - protein, 7 aa, synthetic construct
RGDETII

SEQ ID NO: 41902 - protein, 7 aa, synthetic construct
RGDEVAL

SEQ ID NO: 41903 - protein, 7 aa, synthetic construct
RGDAGIF

SEQ ID NO: 41904 - protein, 7 aa, synthetic construct
RGDFDQD

SEQ ID NO: 41905 - protein, 7 aa, synthetic construct
RGDFEDF

SEQ ID NO: 41906 - protein, 7 aa, synthetic construct
RGDFNVE

SEQ ID NO: 41907 - protein, 7 aa, synthetic construct
RGDGDAK

SEQ ID NO: 41908 - protein, 7 aa, synthetic construct
RGDGEAK

SEQ ID NO: 41909 - protein, 7 aa, synthetic construct
RGDGEQV

SEQ ID NO: 41910 - protein, 7 aa, synthetic construct
RGDGILS

SEQ ID NO: 41911 - protein, 7 aa, synthetic construct
RGDGITN

SEQ ID NO: 41912 - protein, 7 aa, synthetic construct
RGDGRIS

SEQ ID NO: 41913 - protein, 7 aa, synthetic construct
RGDGVFH

SEQ ID NO: 41914 - protein, 7 aa, synthetic construct
RGDHFAD

SEQ ID NO: 41915 - protein, 7 aa, synthetic construct
RGDHFFE

SEQ ID NO: 41916 - protein, 7 aa, synthetic construct
RGDHFIG

SEQ ID NO: 41917 - protein, 7 aa, synthetic construct
RGDHIHD

SEQ ID NO: 41918 - protein, 7 aa, synthetic construct
RGDHIIQ

SEQ ID NO: 41919 - protein, 7 aa, synthetic construct
RGDHLDE

SEQ ID NO: 41920 - protein, 7 aa, synthetic construct
RGDHQLG

SEQ ID NO: 41921 - protein, 7 aa, synthetic construct
RGDALSE

SEQ ID NO: 41922 - protein, 7 aa, synthetic construct
RGDHVIT

SEQ ID NO: 41923 - protein, 7 aa, synthetic construct
RGDHVLA

SEQ ID NO: 41924 - protein, 7 aa, synthetic construct
RGDIFAK

SEQ ID NO: 41925 - protein, 7 aa, synthetic construct
RGDIFDE

SEQ ID NO: 41926 - protein, 7 aa, synthetic construct
RGDANIG

SEQ ID NO: 41927 - protein, 7 aa, synthetic construct
RGDIGQE

SEQ ID NO: 41928 - protein, 7 aa, synthetic construct
RGDIKDE

SEQ ID NO: 41929 - protein, 7 aa, synthetic construct
RGDAQHG

SEQ ID NO: 41930 - protein, 7 aa, synthetic construct
RGDITSA

SEQ ID NO: 41931 - protein, 7 aa, synthetic construct
RGDITTE

SEQ ID NO: 41932 - protein, 7 aa, synthetic construct
RGDAQIH

SEQ ID NO: 41933 - protein, 7 aa, synthetic construct
RGDIVNE

SEQ ID NO: 41934 - protein, 7 aa, synthetic construct
RGDKADG

SEQ ID NO: 41935 - protein, 7 aa, synthetic construct
RGDKAIF

SEQ ID NO: 41936 - protein, 7 aa, synthetic construct
RGDKFNA

SEQ ID NO: 41937 - protein, 7 aa, synthetic construct
RGDKIIS

SEQ ID NO: 41938 - protein, 7 aa, synthetic construct
RGDKNIG

SEQ ID NO: 41939 - protein, 7 aa, synthetic construct
RGDKTRD

SEQ ID NO: 41940 - protein, 7 aa, synthetic construct
RGDKVVD

SEQ ID NO: 41941 - protein, 7 aa, synthetic construct
RGDLAER

SEQ ID NO: 41942 - protein, 7 aa, synthetic construct
RGDASGE

SEQ ID NO: 41943 - protein, 7 aa, synthetic construct
RGDLESL

SEQ ID NO: 41944 - protein, 7 aa, synthetic construct
RGDLFNE

SEQ ID NO: 41945 - protein, 7 aa, synthetic construct
RGDLNEL

SEQ ID NO: 41946 - protein, 7 aa, synthetic construct
RGDLQIG

SEQ ID NO: 41947 - protein, 7 aa, synthetic construct
RGDNAEG

SEQ ID NO: 41948 - protein, 7 aa, synthetic construct
RGDATLH

SEQ ID NO: 41949 - protein, 7 aa, synthetic construct
RGDNATG

SEQ ID NO: 41950 - protein, 7 aa, synthetic construct
RGDNEVG

SEQ ID NO: 41951 - protein, 7 aa, synthetic construct
RGDNFDI

SEQ ID NO: 41952 - protein, 7 aa, synthetic construct
RGDNFEQ

SEQ ID NO: 41953 - protein, 7 aa, synthetic construct
RGDNHVE

SEQ ID NO: 41954 - protein, 7 aa, synthetic construct
RGDNVAE

SEQ ID NO: 41955 - protein, 7 aa, synthetic construct
RGDDAAN

SEQ ID NO: 41956 - protein, 7 aa, synthetic construct
RGDQDGA

SEQ ID NO: 41957 - protein, 7 aa, synthetic construct
RGDQDVE

SEQ ID NO: 41958 - protein, 7 aa, synthetic construct
RGDQFDA

SEQ ID NO: 41959 - protein, 7 aa, synthetic construct
RGDQQIN

SEQ ID NO: 41960 - protein, 7 aa, synthetic construct
RGDQTLF

SEQ ID NO: 41961 - protein, 7 aa, synthetic construct
RGDDDNQ

SEQ ID NO: 41962 - protein, 7 aa, synthetic construct
RGDDDVG

SEQ ID NO: 41963 - protein, 7 aa, synthetic construct
RGDDESG

SEQ ID NO: 41964 - protein, 7 aa, synthetic construct
RGDDETQ

SEQ ID NO: 41965 - protein, 7 aa, synthetic construct
RGDSIAD

SEQ ID NO: 41966 - protein, 7 aa, synthetic construct
RGDDFNE

SEQ ID NO: 41967 - protein, 7 aa, synthetic construct
RGDSLIN

SEQ ID NO: 41968 - protein, 7 aa, synthetic construct
RGDSTLS

SEQ ID NO: 41969 - protein, 7 aa, synthetic construct
RGDTAGS

SEQ ID NO: 41970 - protein, 7 aa, synthetic construct
RGDTDFQ

SEQ ID NO: 41971 - protein, 7 aa, synthetic construct
RGDTDIA

SEQ ID NO: 41972 - protein, 7 aa, synthetic construct
RGDTDVG

SEQ ID NO: 41973 - protein, 7 aa, synthetic construct
RGDTFEE

SEQ ID NO: 41974 - protein, 7 aa, synthetic construct
RGDTFKD

SEQ ID NO: 41975 - protein, 7 aa, synthetic construct
RGDTGIA

SEQ ID NO: 41976 - protein, 7 aa, synthetic construct
RGDTGIQ

SEQ ID NO: 41977 - protein, 7 aa, synthetic construct
RGDTGVE

SEQ ID NO: 41978 - protein, 7 aa, synthetic construct
RGDTIQQ

SEQ ID NO: 41979 - protein, 7 aa, synthetic construct
RGDTLED

SEQ ID NO: 41980 - protein, 7 aa, synthetic construct
RGDTLQA

SEQ ID NO: 41981 - protein, 7 aa, synthetic construct
RGDTNDV

SEQ ID NO: 41982 - protein, 7 aa, synthetic construct
RGDTNET

SEQ ID NO: 41983 - protein, 7 aa, synthetic construct
RGDTSQA

SEQ ID NO: 41984 - protein, 7 aa, synthetic construct
RGDDHVG

SEQ ID NO: 41985 - protein, 7 aa, synthetic construct
RGDVDKT

SEQ ID NO: 41986 - protein, 7 aa, synthetic construct
RGDVGLF

SEQ ID NO: 41987 - protein, 7 aa, synthetic construct
RGDVGVD

SEQ ID NO: 41988 - protein, 7 aa, synthetic construct
RGDVNDA

SEQ ID NO: 41989 - protein, 7 aa, synthetic construct
RGDVNGH

SEQ ID NO: 41990 - protein, 7 aa, synthetic construct
RGDVTVD

SEQ ID NO: 41991 - protein, 7 aa, synthetic construct
RGDDKTA

SEQ ID NO: 41992 - protein, 7 aa, synthetic construct
RGDDNDK

SEQ ID NO: 41993 - protein, 7 aa, synthetic construct
RGDDNGH

SEQ ID NO: 41994 - protein, 7 aa, synthetic construct
RGDDNHA

SEQ ID NO: 41995 - protein, 7 aa, synthetic construct
RGDDRVS

SEQ ID NO: 41996 - protein, 7 aa, synthetic construct
RGDDSVA

SEQ ID NO: 41997 - protein, 7 aa, synthetic construct
RGDDTRE

SEQ ID NO: 41998 - protein, 7 aa, synthetic construct
RGDDVDN

SEQ ID NO: 41999 - protein, 7 aa, synthetic construct
RGDDVLS

SEQ ID NO: 42000 - protein, 7 aa, synthetic construct
RGDEALT

SEQ ID NO: 42001 - protein, 7 aa, synthetic construct
RGDEDQA

SEQ ID NO: 42002 - protein, 7 aa, synthetic construct
RGDEFHA

SEQ ID NO: 42003 - protein, 7 aa, synthetic construct
RGDEFKG

SEQ ID NO: 42004 - protein, 7 aa, synthetic construct
RGDEHSG

SEQ ID NO: 42005 - protein, 7 aa, synthetic construct
RGDEIVQ

SEQ ID NO: 42006 - protein, 7 aa, synthetic construct
RGDAFTG

SEQ ID NO: 42007 - protein, 7 aa, synthetic construct
RGDEQQD

SEQ ID NO: 42008 - protein, 7 aa, synthetic construct
RGDESEQ

SEQ ID NO: 42009 - protein, 7 aa, synthetic construct
RGDESQH

SEQ ID NO: 42010 - protein, 7 aa, synthetic construct
RGDEVID

SEQ ID NO: 42011 - protein, 7 aa, synthetic construct
RGDFEEG

SEQ ID NO: 42012 - protein, 7 aa, synthetic construct
RGDFFLE

SEQ ID NO: 42013 - protein, 7 aa, synthetic construct
RGDAGVD

SEQ ID NO: 42014 - protein, 7 aa, synthetic construct
RGDFQVN

SEQ ID NO: 42015 - protein, 7 aa, synthetic construct
RGDGAIE

SEQ ID NO: 42016 - protein, 7 aa, synthetic construct
RGDAIGG

SEQ ID NO: 42017 - protein, 7 aa, synthetic construct
RGDGFHH

SEQ ID NO: 42018 - protein, 7 aa, synthetic construct
RGDGFLD

SEQ ID NO: 42019 - protein, 7 aa, synthetic construct
RGDGKVD

SEQ ID NO: 42020 - protein, 7 aa, synthetic construct
RGDGLFH

SEQ ID NO: 42021 - protein, 7 aa, synthetic construct
RGDGLNF

SEQ ID NO: 42022 - protein, 7 aa, synthetic construct
RGDGQDG

SEQ ID NO: 42023 - protein, 7 aa, synthetic construct
RGDGTAA

SEQ ID NO: 42024 - protein, 7 aa, synthetic construct
RGDGTIV

SEQ ID NO: 42025 - protein, 7 aa, synthetic construct
RGDGVAG

SEQ ID NO: 42026 - protein, 7 aa, synthetic construct
RGDGVLQ

SEQ ID NO: 42027 - protein, 7 aa, synthetic construct
RGDHDVD

SEQ ID NO: 42028 - protein, 7 aa, synthetic construct
RGDAKSG

SEQ ID NO: 42029 - protein, 7 aa, synthetic construct
RGDHFHE

SEQ ID NO: 42030 - protein, 7 aa, synthetic construct
RGDHFIL

SEQ ID NO: 42031 - protein, 7 aa, synthetic construct
RGDALAD

SEQ ID NO: 42032 - protein, 7 aa, synthetic construct
RGDHIDD

SEQ ID NO: 42033 - protein, 7 aa, synthetic construct
RGDHLIS

SEQ ID NO: 42034 - protein, 7 aa, synthetic construct
RGDHRLQ

SEQ ID NO: 42035 - protein, 7 aa, synthetic construct
RGDIDDI

SEQ ID NO: 42036 - protein, 7 aa, synthetic construct
RGDIDDN

SEQ ID NO: 42037 - protein, 7 aa, synthetic construct
RGDIDEA

SEQ ID NO: 42038 - protein, 7 aa, synthetic construct
RGDIEGD

SEQ ID NO: 42039 - protein, 7 aa, synthetic construct
RGDIEVN

SEQ ID NO: 42040 - protein, 7 aa, synthetic construct
RGDISDF

SEQ ID NO: 42041 - protein, 7 aa, synthetic construct
RGDIVQA

SEQ ID NO: 42042 - protein, 7 aa, synthetic construct
RGDKAAE

SEQ ID NO: 42043 - protein, 7 aa, synthetic construct
RGDKELA

SEQ ID NO: 42044 - protein, 7 aa, synthetic construct
RGDKERE

SEQ ID NO: 42045 - protein, 7 aa, synthetic construct
RGDKILS

SEQ ID NO: 42046 - protein, 7 aa, synthetic construct
RGDKLQA

SEQ ID NO: 42047 - protein, 7 aa, synthetic construct
RGDKTVD

SEQ ID NO: 42048 - protein, 7 aa, synthetic construct
RGDLAHL

SEQ ID NO: 42049 - protein, 7 aa, synthetic construct
RGDLDDV

SEQ ID NO: 42050 - protein, 7 aa, synthetic construct
RGDASIN

SEQ ID NO: 42051 - protein, 7 aa, synthetic construct
RGDLNED

SEQ ID NO: 42052 - protein, 7 aa, synthetic construct
RGDNFLQ

SEQ ID NO: 42053 - protein, 7 aa, synthetic construct
RGDNHLA

SEQ ID NO: 42054 - protein, 7 aa, synthetic construct
RGDAVEG

SEQ ID NO: 42055 - protein, 7 aa, synthetic construct
RGDNKLD

SEQ ID NO: 42056 - protein, 7 aa, synthetic construct
RGDNNLR

SEQ ID NO: 42057 - protein, 7 aa, synthetic construct
RGDNRLH

SEQ ID NO: 42058 - protein, 7 aa, synthetic construct
RGDAVSG

SEQ ID NO: 42059 - protein, 7 aa, synthetic construct
RGDQADE

SEQ ID NO: 42060 - protein, 7 aa, synthetic construct
RGDQDIQ

SEQ ID NO: 42061 - protein, 7 aa, synthetic construct
RGDQFGT

SEQ ID NO: 42062 - protein, 7 aa, synthetic construct
RGDDANG

SEQ ID NO: 42063 - protein, 7 aa, synthetic construct
RGDDDES

SEQ ID NO: 42064 - protein, 7 aa, synthetic construct
RGDRFLA

SEQ ID NO: 42065 - protein, 7 aa, synthetic construct
RGDDEGA

SEQ ID NO: 42066 - protein, 7 aa, synthetic construct
RGDDETL

SEQ ID NO: 42067 - protein, 7 aa, synthetic construct
RGDDFET

SEQ ID NO: 42068 - protein, 7 aa, synthetic construct
RGDSEGI

SEQ ID NO: 42069 - protein, 7 aa, synthetic construct
RGDDFLD

SEQ ID NO: 42070 - protein, 7 aa, synthetic construct
RGDSLSG

SEQ ID NO: 42071 - protein, 7 aa, synthetic construct
RGDSNFE

SEQ ID NO: 42072 - protein, 7 aa, synthetic construct
RGDSQGE

SEQ ID NO: 42073 - protein, 7 aa, synthetic construct
RGDADTN

SEQ ID NO: 42074 - protein, 7 aa, synthetic construct
RGDSTEF

SEQ ID NO: 42075 - protein, 7 aa, synthetic construct
RGDSVIE

SEQ ID NO: 42076 - protein, 7 aa, synthetic construct
RGDTDDE

SEQ ID NO: 42077 - protein, 7 aa, synthetic construct
RGDTDIN

SEQ ID NO: 42078 - protein, 7 aa, synthetic construct
RGDTDSG

SEQ ID NO: 42079 - protein, 7 aa, synthetic construct
RGDTFII

SEQ ID NO: 42080 - protein, 7 aa, synthetic construct
RGDTGKD

SEQ ID NO: 42081 - protein, 7 aa, synthetic construct
RGDTIAA

SEQ ID NO: 42082 - protein, 7 aa, synthetic construct
RGDDHIA

SEQ ID NO: 42083 - protein, 7 aa, synthetic construct
RGDTQET

SEQ ID NO: 42084 - protein, 7 aa, synthetic construct
RGDTQNA

SEQ ID NO: 42085 - protein, 7 aa, synthetic construct
RGDTVLS

SEQ ID NO: 42086 - protein, 7 aa, synthetic construct
RGDVAEH

SEQ ID NO: 42087 - protein, 7 aa, synthetic construct
RGDVEGA

SEQ ID NO: 42088 - protein, 7 aa, synthetic construct
RGDDIKQ

SEQ ID NO: 42089 - protein, 7 aa, synthetic construct
RGDVIDQ

SEQ ID NO: 42090 - protein, 7 aa, synthetic construct
RGDVILG

SEQ ID NO: 42091 - protein, 7 aa, synthetic construct
RGDVNTD

SEQ ID NO: 42092 - protein, 7 aa, synthetic construct
RGDDKAL

SEQ ID NO: 42093 - protein, 7 aa, synthetic construct
RGDVVAN

SEQ ID NO: 42094 - protein, 7 aa, synthetic construct
RGDVVTE

SEQ ID NO: 42095 - protein, 7 aa, synthetic construct
RGDDLLF

SEQ ID NO: 42096 - protein, 7 aa, synthetic construct
RGDDQAL

SEQ ID NO: 42097 - protein, 7 aa, synthetic construct
RGDDQQK

SEQ ID NO: 42098 - protein, 7 aa, synthetic construct
RGDDSTE

SEQ ID NO: 42099 - protein, 7 aa, synthetic construct
RGDDTAQ

SEQ ID NO: 42100 - protein, 7 aa, synthetic construct
RGDDTEE

SEQ ID NO: 42101 - protein, 7 aa, synthetic construct
RGDDTFS

SEQ ID NO: 42102 - protein, 7 aa, synthetic construct
RGDDTIF

SEQ ID NO: 42103 - protein, 7 aa, synthetic construct
RGDDTVL

SEQ ID NO: 42104 - protein, 7 aa, synthetic construct
RGDDVQA

SEQ ID NO: 42105 - protein, 7 aa, synthetic construct
RGDEDVS

SEQ ID NO: 42106 - protein, 7 aa, synthetic construct
RGDEEDV

SEQ ID NO: 42107 - protein, 7 aa, synthetic construct
RGDEFEA

SEQ ID NO: 42108 - protein, 7 aa, synthetic construct
RGDEFHN

SEQ ID NO: 42109 - protein, 7 aa, synthetic construct
RGDEFSA

SEQ ID NO: 42110 - protein, 7 aa, synthetic construct
RGDEGLE

SEQ ID NO: 42111 - protein, 7 aa, synthetic construct
RGDEIHF

SEQ ID NO: 42112 - protein, 7 aa, synthetic construct
RGDAFTD

SEQ ID NO: 42113 - protein, 7 aa, synthetic construct
RGDAGDF

SEQ ID NO: 42114 - protein, 7 aa, synthetic construct
RGDESQE

SEQ ID NO: 42115 - protein, 7 aa, synthetic construct
RGDETFG

SEQ ID NO: 42116 - protein, 7 aa, synthetic construct
RGDETVS

SEQ ID NO: 42117 - protein, 7 aa, synthetic construct
RGDEVSN

SEQ ID NO: 42118 - protein, 7 aa, synthetic construct
RGDFFAG

SEQ ID NO: 42119 - protein, 7 aa, synthetic construct
RGDFGEQ

SEQ ID NO: 42120 - protein, 7 aa, synthetic construct
RGDFLVD

SEQ ID NO: 42121 - protein, 7 aa, synthetic construct
RGDAHLA

SEQ ID NO: 42122 - protein, 7 aa, synthetic construct
RGDGEEA

SEQ ID NO: 42123 - protein, 7 aa, synthetic construct
RGDGGEA

SEQ ID NO: 42124 - protein, 7 aa, synthetic construct
RGDGHDD

SEQ ID NO: 42125 - protein, 7 aa, synthetic construct
RGDGSVD

SEQ ID NO: 42126 - protein, 7 aa, synthetic construct
RGDGTIN

SEQ ID NO: 42127 - protein, 7 aa, synthetic construct
RGDHAVN

SEQ ID NO: 42128 - protein, 7 aa, synthetic construct
RGDHEIT

SEQ ID NO: 42129 - protein, 7 aa, synthetic construct
RGDHFHD

SEQ ID NO: 42130 - protein, 7 aa, synthetic construct
RGDHHIF

SEQ ID NO: 42131 - protein, 7 aa, synthetic construct
RGDALLG

SEQ ID NO: 42132 - protein, 7 aa, synthetic construct
RGDHSEA

SEQ ID NO: 42133 - protein, 7 aa, synthetic construct
RGDHSIH

SEQ ID NO: 42134 - protein, 7 aa, synthetic construct
RGDHVAS

SEQ ID NO: 42135 - protein, 7 aa, synthetic construct
RGDIAEE

SEQ ID NO: 42136 - protein, 7 aa, synthetic construct
RGDIAVL

SEQ ID NO: 42137 - protein, 7 aa, synthetic construct
RGDIDVE

SEQ ID NO: 42138 - protein, 7 aa, synthetic construct
RGDIEFD

SEQ ID NO: 42139 - protein, 7 aa, synthetic construct
RGDIFLE

SEQ ID NO: 42140 - protein, 7 aa, synthetic construct
RGDAAVD

SEQ ID NO: 42141 - protein, 7 aa, synthetic construct
RGDIGIF

SEQ ID NO: 42142 - protein, 7 aa, synthetic construct
RGDIHID

SEQ ID NO: 42143 - protein, 7 aa, synthetic construct
RGDIHQG

SEQ ID NO: 42144 - protein, 7 aa, synthetic construct
RGDINQA

SEQ ID NO: 42145 - protein, 7 aa, synthetic construct
RGDIQQD

SEQ ID NO: 42146 - protein, 7 aa, synthetic construct
RGDIVKA

SEQ ID NO: 42147 - protein, 7 aa, synthetic construct
RGDKFQG

SEQ ID NO: 42148 - protein, 7 aa, synthetic construct
RGDKHAD

SEQ ID NO: 42149 - protein, 7 aa, synthetic construct
RGDKHDN

SEQ ID NO: 42150 - protein, 7 aa, synthetic construct
RGDKIAQ

SEQ ID NO: 42151 - protein, 7 aa, synthetic construct
RGDKIQD

SEQ ID NO: 42152 - protein, 7 aa, synthetic construct
RGDKLAG

SEQ ID NO: 42153 - protein, 7 aa, synthetic construct
RGDADEI

SEQ ID NO: 42154 - protein, 7 aa, synthetic construct
RGDKSID

SEQ ID NO: 42155 - protein, 7 aa, synthetic construct
RGDLALH

SEQ ID NO: 42156 - protein, 7 aa, synthetic construct
RGDLHTL

SEQ ID NO: 42157 - protein, 7 aa, synthetic construct
RGDLKQG

SEQ ID NO: 42158 - protein, 7 aa, synthetic construct
RGDLKVL

SEQ ID NO: 42159 - protein, 7 aa, synthetic construct
RGDNDDF

SEQ ID NO: 42160 - protein, 7 aa, synthetic construct
RGDNLDQ

SEQ ID NO: 42161 - protein, 7 aa, synthetic construct
RGDNLIR

SEQ ID NO: 42162 - protein, 7 aa, synthetic construct
RGDNNSH

SEQ ID NO: 42163 - protein, 7 aa, synthetic construct
RGDNQEE

SEQ ID NO: 42164 - protein, 7 aa, synthetic construct
RGDNSLN

SEQ ID NO: 42165 - protein, 7 aa, synthetic construct
RGDQDEN

SEQ ID NO: 42166 - protein, 7 aa, synthetic construct
RGDQEFE

SEQ ID NO: 42167 - protein, 7 aa, synthetic construct
RGDQIEQ

SEQ ID NO: 42168 - protein, 7 aa, synthetic construct
RGDQILQ

SEQ ID NO: 42169 - protein, 7 aa, synthetic construct
RGDQIVE

SEQ ID NO: 42170 - protein, 7 aa, synthetic construct
RGDQRLN

SEQ ID NO: 42171 - protein, 7 aa, synthetic construct
RGDQSDE

SEQ ID NO: 42172 - protein, 7 aa, synthetic construct
RGDQSIN

SEQ ID NO: 42173 - protein, 7 aa, synthetic construct
RGDQSQD

SEQ ID NO: 42174 - protein, 7 aa, synthetic construct
RGDRFIA

SEQ ID NO: 42175 - protein, 7 aa, synthetic construct
RGDRHID

SEQ ID NO: 42176 - protein, 7 aa, synthetic construct
RGDDEGD

SEQ ID NO: 42177 - protein, 7 aa, synthetic construct
RGDDERR

SEQ ID NO: 42178 - protein, 7 aa, synthetic construct
RGDSEEE

SEQ ID NO: 42179 - protein, 7 aa, synthetic construct
RGDSLGH

SEQ ID NO: 42180 - protein, 7 aa, synthetic construct
RGDSLLG

SEQ ID NO: 42181 - protein, 7 aa, synthetic construct
RGDSNLD

SEQ ID NO: 42182 - protein, 7 aa, synthetic construct
RGDTEAE

SEQ ID NO: 42183 - protein, 7 aa, synthetic construct
RGDTFAE

SEQ ID NO: 42184 - protein, 7 aa, synthetic construct
RGDTFKH

SEQ ID NO: 42185 - protein, 7 aa, synthetic construct
RGDTLAE

SEQ ID NO: 42186 - protein, 7 aa, synthetic construct
RGDDHID

SEQ ID NO: 42187 - protein, 7 aa, synthetic construct
RGDTNRK

SEQ ID NO: 42188 - protein, 7 aa, synthetic construct
RGDVDNT

SEQ ID NO: 42189 - protein, 7 aa, synthetic construct
RGDAEDR

SEQ ID NO: 42190 - protein, 7 aa, synthetic construct
RGDVFIS

SEQ ID NO: 42191 - protein, 7 aa, synthetic construct
RGDDIII

SEQ ID NO: 42192 - protein, 7 aa, synthetic construct
RGDVKEV

SEQ ID NO: 42193 - protein, 7 aa, synthetic construct
RGDDIVD

SEQ ID NO: 42194 - protein, 7 aa, synthetic construct
RGDDIVI

SEQ ID NO: 42195 - protein, 7 aa, synthetic construct
RGDVTDG

SEQ ID NO: 42196 - protein, 7 aa, synthetic construct
RGDVTEV

SEQ ID NO: 42197 - protein, 7 aa, synthetic construct
RGDDLLD

SEQ ID NO: 42198 - protein, 7 aa, synthetic construct
RGDDLVQ

SEQ ID NO: 42199 - protein, 7 aa, synthetic construct
RGDAEIE

SEQ ID NO: 42200 - protein, 7 aa, synthetic construct
RGDDNLA

SEQ ID NO: 42201 - protein, 7 aa, synthetic construct
RGDAEKG

SEQ ID NO: 42202 - protein, 7 aa, synthetic construct
RGDDQEH

SEQ ID NO: 42203 - protein, 7 aa, synthetic construct
RGDDQIK

SEQ ID NO: 42204 - protein, 7 aa, synthetic construct
RGDDQQE

SEQ ID NO: 42205 - protein, 7 aa, synthetic construct
RGDDQQQ

SEQ ID NO: 42206 - protein, 7 aa, synthetic construct
RGDDRVA

SEQ ID NO: 42207 - protein, 7 aa, synthetic construct
RGDDTEF

SEQ ID NO: 42208 - protein, 7 aa, synthetic construct
RGDDVVA

SEQ ID NO: 42209 - protein, 7 aa, synthetic construct
RGDAFEI

SEQ ID NO: 42210 - protein, 7 aa, synthetic construct
RGDEFED

SEQ ID NO: 42211 - protein, 7 aa, synthetic construct
RGDEFIR

SEQ ID NO: 42212 - protein, 7 aa, synthetic construct
RGDEGAH

SEQ ID NO: 42213 - protein, 7 aa, synthetic construct
RGDAFIH

SEQ ID NO: 42214 - protein, 7 aa, synthetic construct
RGDEIES

SEQ ID NO: 42215 - protein, 7 aa, synthetic construct
RGDEILK

SEQ ID NO: 42216 - protein, 7 aa, synthetic construct
RGDELES

SEQ ID NO: 42217 - protein, 7 aa, synthetic construct
RGDERAD

SEQ ID NO: 42218 - protein, 7 aa, synthetic construct
RGDESDS

SEQ ID NO: 42219 - protein, 7 aa, synthetic construct
RGDEVEF

SEQ ID NO: 42220 - protein, 7 aa, synthetic construct
RGDFHLN

SEQ ID NO: 42221 - protein, 7 aa, synthetic construct
RGDAHED

SEQ ID NO: 42222 - protein, 7 aa, synthetic construct
RGDFNLL

SEQ ID NO: 42223 - protein, 7 aa, synthetic construct
RGDFRLD

SEQ ID NO: 42224 - protein, 7 aa, synthetic construct
RGDGDIR

SEQ ID NO: 42225 - protein, 7 aa, synthetic construct
RGDGHAA

SEQ ID NO: 42226 - protein, 7 aa, synthetic construct
RGDGIVH

SEQ ID NO: 42227 - protein, 7 aa, synthetic construct
RGDGKIH

SEQ ID NO: 42228 - protein, 7 aa, synthetic construct
RGDGLVE

SEQ ID NO: 42229 - protein, 7 aa, synthetic construct
RGDAIVG

SEQ ID NO: 42230 - protein, 7 aa, synthetic construct
RGDGVLE

SEQ ID NO: 42231 - protein, 7 aa, synthetic construct
RGDHHIS

SEQ ID NO: 42232 - protein, 7 aa, synthetic construct
RGDHHLD

SEQ ID NO: 42233 - protein, 7 aa, synthetic construct
RGDHIVH

SEQ ID NO: 42234 - protein, 7 aa, synthetic construct
RGDHIVT

SEQ ID NO: 42235 - protein, 7 aa, synthetic construct
RGDHNAD

SEQ ID NO: 42236 - protein, 7 aa, synthetic construct
RGDALVG

SEQ ID NO: 42237 - protein, 7 aa, synthetic construct
RGDHVLG

SEQ ID NO: 42238 - protein, 7 aa, synthetic construct
RGDHVSN

SEQ ID NO: 42239 - protein, 7 aa, synthetic construct
RGDIDNQ

SEQ ID NO: 42240 - protein, 7 aa, synthetic construct
RGDIELA

SEQ ID NO: 42241 - protein, 7 aa, synthetic construct
RGDIFQD

SEQ ID NO: 42242 - protein, 7 aa, synthetic construct
RGDIGEV

SEQ ID NO: 42243 - protein, 7 aa, synthetic construct
RGDIHAE

SEQ ID NO: 42244 - protein, 7 aa, synthetic construct
RGDANLA

SEQ ID NO: 42245 - protein, 7 aa, synthetic construct
RGDANLN

SEQ ID NO: 42246 - protein, 7 aa, synthetic construct
RGDIIDL

SEQ ID NO: 42247 - protein, 7 aa, synthetic construct
RGDIIEI

SEQ ID NO: 42248 - protein, 7 aa, synthetic construct
RGDINAE

SEQ ID NO: 42249 - protein, 7 aa, synthetic construct
RGDAQEN

SEQ ID NO: 42250 - protein, 7 aa, synthetic construct
RGDITAQ

SEQ ID NO: 42251 - protein, 7 aa, synthetic construct
RGDIVES

SEQ ID NO: 42252 - protein, 7 aa, synthetic construct
RGDIVVA

SEQ ID NO: 42253 - protein, 7 aa, synthetic construct
RGDKAEG

SEQ ID NO: 42254 - protein, 7 aa, synthetic construct
RGDKATG

SEQ ID NO: 42255 - protein, 7 aa, synthetic construct
RGDKEGD

SEQ ID NO: 42256 - protein, 7 aa, synthetic construct
RGDKEQA

SEQ ID NO: 42257 - protein, 7 aa, synthetic construct
RGDKHLG

SEQ ID NO: 42258 - protein, 7 aa, synthetic construct
RGDKHQG

SEQ ID NO: 42259 - protein, 7 aa, synthetic construct
RGDKIRE

SEQ ID NO: 42260 - protein, 7 aa, synthetic construct
RGDKQKD

SEQ ID NO: 42261 - protein, 7 aa, synthetic construct
RGDKVDA

SEQ ID NO: 42262 - protein, 7 aa, synthetic construct
RGDKVIN

SEQ ID NO: 42263 - protein, 7 aa, synthetic construct
RGDLAKL

SEQ ID NO: 42264 - protein, 7 aa, synthetic construct
RGDLEEG

SEQ ID NO: 42265 - protein, 7 aa, synthetic construct
RGDLELL

SEQ ID NO: 42266 - protein, 7 aa, synthetic construct
RGDASIS

SEQ ID NO: 42267 - protein, 7 aa, synthetic construct
RGDASLG

SEQ ID NO: 42268 - protein, 7 aa, synthetic construct
RGDASSE

SEQ ID NO: 42269 - protein, 7 aa, synthetic construct
RGDLNTE

SEQ ID NO: 42270 - protein, 7 aa, synthetic construct
RGDATFE

SEQ ID NO: 42271 - protein, 7 aa, synthetic construct
RGDATLG

SEQ ID NO: 42272 - protein, 7 aa, synthetic construct
RGDNDAS

SEQ ID NO: 42273 - protein, 7 aa, synthetic construct
RGDNFLS

SEQ ID NO: 42274 - protein, 7 aa, synthetic construct
RGDNGGD

SEQ ID NO: 42275 - protein, 7 aa, synthetic construct
RGDNILH

SEQ ID NO: 42276 - protein, 7 aa, synthetic construct
RGDNKIE

SEQ ID NO: 42277 - protein, 7 aa, synthetic construct
RGDNNVG

SEQ ID NO: 42278 - protein, 7 aa, synthetic construct
RGDNQTN

SEQ ID NO: 42279 - protein, 7 aa, synthetic construct
RGDNTEV

SEQ ID NO: 42280 - protein, 7 aa, synthetic construct
RGDDAFF

SEQ ID NO: 42281 - protein, 7 aa, synthetic construct
RGDQEIS

SEQ ID NO: 42282 - protein, 7 aa, synthetic construct
RGDQFNE

SEQ ID NO: 42283 - protein, 7 aa, synthetic construct
RGDQFRG

SEQ ID NO: 42284 - protein, 7 aa, synthetic construct
RGDQHHA

SEQ ID NO: 42285 - protein, 7 aa, synthetic construct
RGDDALA

SEQ ID NO: 42286 - protein, 7 aa, synthetic construct
RGDQHQN

SEQ ID NO: 42287 - protein, 7 aa, synthetic construct
RGDQTGE

SEQ ID NO: 42288 - protein, 7 aa, synthetic construct
RGDREQE

SEQ ID NO: 42289 - protein, 7 aa, synthetic construct
RGDRFDG

SEQ ID NO: 42290 - protein, 7 aa, synthetic construct
RGDADQI

SEQ ID NO: 42291 - protein, 7 aa, synthetic construct
RGDRHVD

SEQ ID NO: 42292 - protein, 7 aa, synthetic construct
RGDDFFG

SEQ ID NO: 42293 - protein, 7 aa, synthetic construct
RGDDFGG

SEQ ID NO: 42294 - protein, 7 aa, synthetic construct
RGDSFIL

SEQ ID NO: 42295 - protein, 7 aa, synthetic construct
RGDSNIT

SEQ ID NO: 42296 - protein, 7 aa, synthetic construct
RGDSNVG

SEQ ID NO: 42297 - protein, 7 aa, synthetic construct
RGDSTEK

SEQ ID NO: 42298 - protein, 7 aa, synthetic construct
RGDTDSD

SEQ ID NO: 42299 - protein, 7 aa, synthetic construct
RGDTEIT

SEQ ID NO: 42300 - protein, 7 aa, synthetic construct
RGDTFAS

SEQ ID NO: 42301 - protein, 7 aa, synthetic construct
RGDTIAV

SEQ ID NO: 42302 - protein, 7 aa, synthetic construct
RGDDHKH

SEQ ID NO: 42303 - protein, 7 aa, synthetic construct
RGDTSID

SEQ ID NO: 42304 - protein, 7 aa, synthetic construct
RGDTSKG

SEQ ID NO: 42305 - protein, 7 aa, synthetic construct
RGDTSRD

SEQ ID NO: 42306 - protein, 7 aa, synthetic construct
RGDTTEH

SEQ ID NO: 42307 - protein, 7 aa, synthetic construct
RGDTTEK

SEQ ID NO: 42308 - protein, 7 aa, synthetic construct
RGDVADG

SEQ ID NO: 42309 - protein, 7 aa, synthetic construct
RGDVAEE

SEQ ID NO: 42310 - protein, 7 aa, synthetic construct
RGDVDED

SEQ ID NO: 42311 - protein, 7 aa, synthetic construct
RGDVDNQ

SEQ ID NO: 42312 - protein, 7 aa, synthetic construct
RGDVDSS

SEQ ID NO: 42313 - protein, 7 aa, synthetic construct
RGDDIET

SEQ ID NO: 42314 - protein, 7 aa, synthetic construct
RGDVFDQ

SEQ ID NO: 42315 - protein, 7 aa, synthetic construct
RGDVGIG

SEQ ID NO: 42316 - protein, 7 aa, synthetic construct
RGDVHSG

SEQ ID NO: 42317 - protein, 7 aa, synthetic construct
RGDVIEE

SEQ ID NO: 42318 - protein, 7 aa, synthetic construct
RGDVIHA

SEQ ID NO: 42319 - protein, 7 aa, synthetic construct
RGDVVQS

SEQ ID NO: 42320 - protein, 7 aa, synthetic construct
RGDDLDN

SEQ ID NO: 42321 - protein, 7 aa, synthetic construct
RGDDNFD

SEQ ID NO: 42322 - protein, 7 aa, synthetic construct
RGDDQDS

SEQ ID NO: 42323 - protein, 7 aa, synthetic construct
RGDDQES

SEQ ID NO: 42324 - protein, 7 aa, synthetic construct
RGDDQVE

SEQ ID NO: 42325 - protein, 7 aa, synthetic construct
RGDDRLG

SEQ ID NO: 42326 - protein, 7 aa, synthetic construct
RGDAEQT

SEQ ID NO: 42327 - protein, 7 aa, synthetic construct
RGDDVRR

SEQ ID NO: 42328 - protein, 7 aa, synthetic construct
RGDEAAV

SEQ ID NO: 42329 - protein, 7 aa, synthetic construct
RGDEAQL

SEQ ID NO: 42330 - protein, 7 aa, synthetic construct
RGDEDDT

SEQ ID NO: 42331 - protein, 7 aa, synthetic construct
RGDEDTT

SEQ ID NO: 42332 - protein, 7 aa, synthetic construct
RGDEGIE

SEQ ID NO: 42333 - protein, 7 aa, synthetic construct
RGDAFLN

SEQ ID NO: 42334 - protein, 7 aa, synthetic construct
RGDEHVS

SEQ ID NO: 42335 - protein, 7 aa, synthetic construct
RGDEIVS

SEQ ID NO: 42336 - protein, 7 aa, synthetic construct
RGDAFSD

SEQ ID NO: 42337 - protein, 7 aa, synthetic construct
RGDELVD

SEQ ID NO: 42338 - protein, 7 aa, synthetic construct
RGDENGT

SEQ ID NO: 42339 - protein, 7 aa, synthetic construct
RGDENIE

SEQ ID NO: 42340 - protein, 7 aa, synthetic construct
RGDENIQ

SEQ ID NO: 42341 - protein, 7 aa, synthetic construct
RGDENVS

SEQ ID NO: 42342 - protein, 7 aa, synthetic construct
RGDEQAS

SEQ ID NO: 42343 - protein, 7 aa, synthetic construct
RGDERGT

SEQ ID NO: 42344 - protein, 7 aa, synthetic construct
RGDERVD

SEQ ID NO: 42345 - protein, 7 aa, synthetic construct
RGDETST

SEQ ID NO: 42346 - protein, 7 aa, synthetic construct
RGDEVIF

SEQ ID NO: 42347 - protein, 7 aa, synthetic construct
RGDEVII

SEQ ID NO: 42348 - protein, 7 aa, synthetic construct
RGDEVLE

SEQ ID NO: 42349 - protein, 7 aa, synthetic construct
RGDFERE

SEQ ID NO: 42350 - protein, 7 aa, synthetic construct
RGDFNLH

SEQ ID NO: 42351 - protein, 7 aa, synthetic construct
RGDGELD

SEQ ID NO: 42352 - protein, 7 aa, synthetic construct
RGDGFND

SEQ ID NO: 42353 - protein, 7 aa, synthetic construct
RGDGNDV

SEQ ID NO: 42354 - protein, 7 aa, synthetic construct
RGDAIVA

SEQ ID NO: 42355 - protein, 7 aa, synthetic construct
RGDAIVE

SEQ ID NO: 42356 - protein, 7 aa, synthetic construct
RGDHHAH

SEQ ID NO: 42357 - protein, 7 aa, synthetic construct
RGDHHLF

SEQ ID NO: 42358 - protein, 7 aa, synthetic construct
RGDHKLH

SEQ ID NO: 42359 - protein, 7 aa, synthetic construct
RGDHLIT

SEQ ID NO: 42360 - protein, 7 aa, synthetic construct
RGDHLND

SEQ ID NO: 42361 - protein, 7 aa, synthetic construct
RGDHRVG

SEQ ID NO: 42362 - protein, 7 aa, synthetic construct
RGDHTAE

SEQ ID NO: 42363 - protein, 7 aa, synthetic construct
RGDIAGD

SEQ ID NO: 42364 - protein, 7 aa, synthetic construct
RGDANAN

SEQ ID NO: 42365 - protein, 7 aa, synthetic construct
RGDIAKE

SEQ ID NO: 42366 - protein, 7 aa, synthetic construct
RGDIDIS

SEQ ID NO: 42367 - protein, 7 aa, synthetic construct
RGDIEVG

SEQ ID NO: 42368 - protein, 7 aa, synthetic construct
RGDIIGA

SEQ ID NO: 42369 - protein, 7 aa, synthetic construct
RGDANNI

SEQ ID NO: 42370 - protein, 7 aa, synthetic construct
RGDAAVN

SEQ ID NO: 42371 - protein, 7 aa, synthetic construct
RGDINIT

SEQ ID NO: 42372 - protein, 7 aa, synthetic construct
RGDIQDQ

SEQ ID NO: 42373 - protein, 7 aa, synthetic construct
RGDIQIG

SEQ ID NO: 42374 - protein, 7 aa, synthetic construct
RGDKEIQ

SEQ ID NO: 42375 - protein, 7 aa, synthetic construct
RGDKIDF

SEQ ID NO: 42376 - protein, 7 aa, synthetic construct
RGDKILE

SEQ ID NO: 42377 - protein, 7 aa, synthetic construct
RGDASAD

SEQ ID NO: 42378 - protein, 7 aa, synthetic construct
RGDASFA

SEQ ID NO: 42379 - protein, 7 aa, synthetic construct
RGDLEKG

SEQ ID NO: 42380 - protein, 7 aa, synthetic construct
RGDLTLD

SEQ ID NO: 42381 - protein, 7 aa, synthetic construct
RGDLTQE

SEQ ID NO: 42382 - protein, 7 aa, synthetic construct
RGDLVDE

SEQ ID NO: 42383 - protein, 7 aa, synthetic construct
RGDNEEI

SEQ ID NO: 42384 - protein, 7 aa, synthetic construct
RGDNHDA

SEQ ID NO: 42385 - protein, 7 aa, synthetic construct
RGDNHDN

SEQ ID NO: 42386 - protein, 7 aa, synthetic construct
RGDAVDD

SEQ ID NO: 42387 - protein, 7 aa, synthetic construct
RGDNIQR

SEQ ID NO: 42388 - protein, 7 aa, synthetic construct
RGDNIVT

SEQ ID NO: 42389 - protein, 7 aa, synthetic construct
RGDNLTD

SEQ ID NO: 42390 - protein, 7 aa, synthetic construct
RGDNNIA

SEQ ID NO: 42391 - protein, 7 aa, synthetic construct
RGDNQEI

SEQ ID NO: 42392 - protein, 7 aa, synthetic construct
RGDNQIT

SEQ ID NO: 42393 - protein, 7 aa, synthetic construct
RGDNSVE

SEQ ID NO: 42394 - protein, 7 aa, synthetic construct
RGDNTIS

SEQ ID NO: 42395 - protein, 7 aa, synthetic construct
RGDNTLD

SEQ ID NO: 42396 - protein, 7 aa, synthetic construct
RGDQEFF

SEQ ID NO: 42397 - protein, 7 aa, synthetic construct
RGDQEIE

SEQ ID NO: 42398 - protein, 7 aa, synthetic construct
RGDQEIG

SEQ ID NO: 42399 - protein, 7 aa, synthetic construct
RGDQELA

SEQ ID NO: 42400 - protein, 7 aa, synthetic construct
RGDQFKG

SEQ ID NO: 42401 - protein, 7 aa, synthetic construct
RGDDAHK

SEQ ID NO: 42402 - protein, 7 aa, synthetic construct
RGDQIDF

SEQ ID NO: 42403 - protein, 7 aa, synthetic construct
RGDQRDF

SEQ ID NO: 42404 - protein, 7 aa, synthetic construct
RGDQSEG

SEQ ID NO: 42405 - protein, 7 aa, synthetic construct
RGDREAA

SEQ ID NO: 42406 - protein, 7 aa, synthetic construct
RGDRFSD

SEQ ID NO: 42407 - protein, 7 aa, synthetic construct
RGDADQS

SEQ ID NO: 42408 - protein, 7 aa, synthetic construct
RGDDETD

SEQ ID NO: 42409 - protein, 7 aa, synthetic construct
RGDDFAV

SEQ ID NO: 42410 - protein, 7 aa, synthetic construct
RGDSDLT

SEQ ID NO: 42411 - protein, 7 aa, synthetic construct
RGDDFEI

SEQ ID NO: 42412 - protein, 7 aa, synthetic construct
RGDDFIR

SEQ ID NO: 42413 - protein, 7 aa, synthetic construct
RGDSGTE

SEQ ID NO: 42414 - protein, 7 aa, synthetic construct
RGDDFNH

SEQ ID NO: 42415 - protein, 7 aa, synthetic construct
RGDSIVF

SEQ ID NO: 42416 - protein, 7 aa, synthetic construct
RGDDFTA

SEQ ID NO: 42417 - protein, 7 aa, synthetic construct
RGDSQAD

SEQ ID NO: 42418 - protein, 7 aa, synthetic construct
RGDDGDT

SEQ ID NO: 42419 - protein, 7 aa, synthetic construct
RGDSSLH

SEQ ID NO: 42420 - protein, 7 aa, synthetic construct
RGDSSRD

SEQ ID NO: 42421 - protein, 7 aa, synthetic construct
RGDSTDH

SEQ ID NO: 42422 - protein, 7 aa, synthetic construct
RGDSTET

SEQ ID NO: 42423 - protein, 7 aa, synthetic construct
RGDDGIA

SEQ ID NO: 42424 - protein, 7 aa, synthetic construct
RGDSVDD

SEQ ID NO: 42425 - protein, 7 aa, synthetic construct
RGDTAET

SEQ ID NO: 42426 - protein, 7 aa, synthetic construct
RGDTEFI

SEQ ID NO: 42427 - protein, 7 aa, synthetic construct
RGDTEQE

SEQ ID NO: 42428 - protein, 7 aa, synthetic construct
RGDTFNQ

SEQ ID NO: 42429 - protein, 7 aa, synthetic construct
RGDTFSS

SEQ ID NO: 42430 - protein, 7 aa, synthetic construct
RGDTHEH

SEQ ID NO: 42431 - protein, 7 aa, synthetic construct
RGDTLGG

SEQ ID NO: 42432 - protein, 7 aa, synthetic construct
RGDTTAE

SEQ ID NO: 42433 - protein, 7 aa, synthetic construct
RGDTTVK

SEQ ID NO: 42434 - protein, 7 aa, synthetic construct
RGDDIAQ

SEQ ID NO: 42435 - protein, 7 aa, synthetic construct
RGDVDAD

SEQ ID NO: 42436 - protein, 7 aa, synthetic construct
RGDVDAS

SEQ ID NO: 42437 - protein, 7 aa, synthetic construct
RGDDILA

SEQ ID NO: 42438 - protein, 7 aa, synthetic construct
RGDVHIA

SEQ ID NO: 42439 - protein, 7 aa, synthetic construct
RGDVIFG

SEQ ID NO: 42440 - protein, 7 aa, synthetic construct
RGDVNFT

SEQ ID NO: 42441 - protein, 7 aa, synthetic construct
RGDDKGA

SEQ ID NO: 42442 - protein, 7 aa, synthetic construct
RGDVVEV

SEQ ID NO: 42443 - protein, 7 aa, synthetic construct
RGDAEHG

SEQ ID NO: 42444 - protein, 7 aa, synthetic construct
RGDDQDT

SEQ ID NO: 42445 - protein, 7 aa, synthetic construct
RGDDSFA

SEQ ID NO: 42446 - protein, 7 aa, synthetic construct
RGDDVFF

SEQ ID NO: 42447 - protein, 7 aa, synthetic construct
RGDAEVN

SEQ ID NO: 42448 - protein, 7 aa, synthetic construct
RGDAEVT

SEQ ID NO: 42449 - protein, 7 aa, synthetic construct
RGDEDFG

SEQ ID NO: 42450 - protein, 7 aa, synthetic construct
RGDEDKR

SEQ ID NO: 42451 - protein, 7 aa, synthetic construct
RGDEDLD

SEQ ID NO: 42452 - protein, 7 aa, synthetic construct
RGDEDLN

SEQ ID NO: 42453 - protein, 7 aa, synthetic construct
RGDAFFN

SEQ ID NO: 42454 - protein, 7 aa, synthetic construct
RGDEFTG

SEQ ID NO: 42455 - protein, 7 aa, synthetic construct
RGDEGTA

SEQ ID NO: 42456 - protein, 7 aa, synthetic construct
RGDEHDQ

SEQ ID NO: 42457 - protein, 7 aa, synthetic construct
RGDEHLT

SEQ ID NO: 42458 - protein, 7 aa, synthetic construct
RGDEIAF

SEQ ID NO: 42459 - protein, 7 aa, synthetic construct
RGDEIFA

SEQ ID NO: 42460 - protein, 7 aa, synthetic construct
RGDEIKS

SEQ ID NO: 42461 - protein, 7 aa, synthetic construct
RGDEIQV

SEQ ID NO: 42462 - protein, 7 aa, synthetic construct
RGDEKVA

SEQ ID NO: 42463 - protein, 7 aa, synthetic construct
RGDELLF

SEQ ID NO: 42464 - protein, 7 aa, synthetic construct
RGDENGH

SEQ ID NO: 42465 - protein, 7 aa, synthetic construct
RGDENHK

SEQ ID NO: 42466 - protein, 7 aa, synthetic construct
RGDENTH

SEQ ID NO: 42467 - protein, 7 aa, synthetic construct
RGDEQIH

SEQ ID NO: 42468 - protein, 7 aa, synthetic construct
RGDAGDG

SEQ ID NO: 42469 - protein, 7 aa, synthetic construct
RGDERIT

SEQ ID NO: 42470 - protein, 7 aa, synthetic construct
RGDEVLA

SEQ ID NO: 42471 - protein, 7 aa, synthetic construct
RGDAHHG

SEQ ID NO: 42472 - protein, 7 aa, synthetic construct
RGDAHIF

SEQ ID NO: 42473 - protein, 7 aa, synthetic construct
RGDFQGD

SEQ ID NO: 42474 - protein, 7 aa, synthetic construct
RGDAHVQ

SEQ ID NO: 42475 - protein, 7 aa, synthetic construct
RGDGADS

SEQ ID NO: 42476 - protein, 7 aa, synthetic construct
RGDAIFE

SEQ ID NO: 42477 - protein, 7 aa, synthetic construct
RGDGEED

SEQ ID NO: 42478 - protein, 7 aa, synthetic construct
RGDGERD

SEQ ID NO: 42479 - protein, 7 aa, synthetic construct
RGDGFQG

SEQ ID NO: 42480 - protein, 7 aa, synthetic construct
RGDGRHD

SEQ ID NO: 42481 - protein, 7 aa, synthetic construct
RGDGTQE

SEQ ID NO: 42482 - protein, 7 aa, synthetic construct
RGDGTTQ

SEQ ID NO: 42483 - protein, 7 aa, synthetic construct
RGDHEGQ

SEQ ID NO: 42484 - protein, 7 aa, synthetic construct
RGDHIFQ

SEQ ID NO: 42485 - protein, 7 aa, synthetic construct
RGDHIFS

SEQ ID NO: 42486 - protein, 7 aa, synthetic construct
RGDHIID

SEQ ID NO: 42487 - protein, 7 aa, synthetic construct
RGDHIQQ

SEQ ID NO: 42488 - protein, 7 aa, synthetic construct
RGDHLVH

SEQ ID NO: 42489 - protein, 7 aa, synthetic construct
RGDHRIE

SEQ ID NO: 42490 - protein, 7 aa, synthetic construct
RGDIDEL

SEQ ID NO: 42491 - protein, 7 aa, synthetic construct
RGDIDVD

SEQ ID NO: 42492 - protein, 7 aa, synthetic construct
RGDIEED

SEQ ID NO: 42493 - protein, 7 aa, synthetic construct
RGDANGF

SEQ ID NO: 42494 - protein, 7 aa, synthetic construct
RGDIGFD

SEQ ID NO: 42495 - protein, 7 aa, synthetic construct
RGDIGRA

SEQ ID NO: 42496 - protein, 7 aa, synthetic construct
RGDINGE

SEQ ID NO: 42497 - protein, 7 aa, synthetic construct
RGDANVA

SEQ ID NO: 42498 - protein, 7 aa, synthetic construct
RGDIQEL

SEQ ID NO: 42499 - protein, 7 aa, synthetic construct
RGDITQG

SEQ ID NO: 42500 - protein, 7 aa, synthetic construct
RGDKDEE

SEQ ID NO: 42501 - protein, 7 aa, synthetic construct
RGDKFIN

SEQ ID NO: 42502 - protein, 7 aa, synthetic construct
RGDKHVE

SEQ ID NO: 42503 - protein, 7 aa, synthetic construct
RGDKTDE

SEQ ID NO: 42504 - protein, 7 aa, synthetic construct
RGDKVDD

SEQ ID NO: 42505 - protein, 7 aa, synthetic construct
RGDLDTD

SEQ ID NO: 42506 - protein, 7 aa, synthetic construct
RGDLEDV

SEQ ID NO: 42507 - protein, 7 aa, synthetic construct
RGDLENI

SEQ ID NO: 42508 - protein, 7 aa, synthetic construct
RGDLFAE

SEQ ID NO: 42509 - protein, 7 aa, synthetic construct
RGDASIG

SEQ ID NO: 42510 - protein, 7 aa, synthetic construct
RGDLHFH

SEQ ID NO: 42511 - protein, 7 aa, synthetic construct
RGDLITD

SEQ ID NO: 42512 - protein, 7 aa, synthetic construct
RGDLLID

SEQ ID NO: 42513 - protein, 7 aa, synthetic construct
RGDLNLA

SEQ ID NO: 42514 - protein, 7 aa, synthetic construct
RGDATAE

SEQ ID NO: 42515 - protein, 7 aa, synthetic construct
RGDATDN

SEQ ID NO: 42516 - protein, 7 aa, synthetic construct
RGDAAAE

SEQ ID NO: 42517 - protein, 7 aa, synthetic construct
RGDNDRH

SEQ ID NO: 42518 - protein, 7 aa, synthetic construct
RGDNHVN

SEQ ID NO: 42519 - protein, 7 aa, synthetic construct
RGDNKVA

SEQ ID NO: 42520 - protein, 7 aa, synthetic construct
RGDNLLL

SEQ ID NO: 42521 - protein, 7 aa, synthetic construct
RGDNNDV

SEQ ID NO: 42522 - protein, 7 aa, synthetic construct
RGDNNFD

SEQ ID NO: 42523 - protein, 7 aa, synthetic construct
RGDAVQN

SEQ ID NO: 42524 - protein, 7 aa, synthetic construct
RGDNTDR

SEQ ID NO: 42525 - protein, 7 aa, synthetic construct
RGDNTIN

SEQ ID NO: 42526 - protein, 7 aa, synthetic construct
RGDQAFD

SEQ ID NO: 42527 - protein, 7 aa, synthetic construct
RGDQDDL

SEQ ID NO: 42528 - protein, 7 aa, synthetic construct
RGDQFIS

SEQ ID NO: 42529 - protein, 7 aa, synthetic construct
RGDADLF

SEQ ID NO: 42530 - protein, 7 aa, synthetic construct
RGDQIGE

SEQ ID NO: 42531 - protein, 7 aa, synthetic construct
RGDDDEQ

SEQ ID NO: 42532 - protein, 7 aa, synthetic construct
RGDRDQG

SEQ ID NO: 42533 - protein, 7 aa, synthetic construct
RGDRFDA

SEQ ID NO: 42534 - protein, 7 aa, synthetic construct
RGDSAFD

SEQ ID NO: 42535 - protein, 7 aa, synthetic construct
RGDSIDA

SEQ ID NO: 42536 - protein, 7 aa, synthetic construct
RGDTFDQ

SEQ ID NO: 42537 - protein, 7 aa, synthetic construct
RGDDHDH

SEQ ID NO: 42538 - protein, 7 aa, synthetic construct
RGDTILA

SEQ ID NO: 42539 - protein, 7 aa, synthetic construct
RGDTILD

SEQ ID NO: 42540 - protein, 7 aa, synthetic construct
RGDTNQD

SEQ ID NO: 42541 - protein, 7 aa, synthetic construct
RGDTNTD

SEQ ID NO: 42542 - protein, 7 aa, synthetic construct
RGDTTEI

SEQ ID NO: 42543 - protein, 7 aa, synthetic construct
RGDVDHG

SEQ ID NO: 42544 - protein, 7 aa, synthetic construct
RGDVELG

SEQ ID NO: 42545 - protein, 7 aa, synthetic construct
RGDVFGD

SEQ ID NO: 42546 - protein, 7 aa, synthetic construct
RGDVFLN

SEQ ID NO: 42547 - protein, 7 aa, synthetic construct
RGDVGIL

SEQ ID NO: 42548 - protein, 7 aa, synthetic construct
RGDVLDQ

SEQ ID NO: 42549 - protein, 7 aa, synthetic construct
RGDVNAH

SEQ ID NO: 42550 - protein, 7 aa, synthetic construct
RGDVNET

SEQ ID NO: 42551 - protein, 7 aa, synthetic construct
RGDDKLK

SEQ ID NO: 42552 - protein, 7 aa, synthetic construct
RGDDKQH

SEQ ID NO: 42553 - protein, 7 aa, synthetic construct
RGDDLIA

SEQ ID NO: 42554 - protein, 7 aa, synthetic construct
RGDDNFV

SEQ ID NO: 42555 - protein, 7 aa, synthetic construct
RGDDQAD

SEQ ID NO: 42556 - protein, 7 aa, synthetic construct
RGDDRVH

SEQ ID NO: 42557 - protein, 7 aa, synthetic construct
RGDDSIF

SEQ ID NO: 42558 - protein, 7 aa, synthetic construct
RGDDTFF

SEQ ID NO: 42559 - protein, 7 aa, synthetic construct
RGDDTVH

SEQ ID NO: 42560 - protein, 7 aa, synthetic construct
RGDEARE

SEQ ID NO: 42561 - protein, 7 aa, synthetic construct
RGDEDHL

SEQ ID NO: 42562 - protein, 7 aa, synthetic construct
RGDEDII

SEQ ID NO: 42563 - protein, 7 aa, synthetic construct
RGDEDQS

SEQ ID NO: 42564 - protein, 7 aa, synthetic construct
RGDEDVG

SEQ ID NO: 42565 - protein, 7 aa, synthetic construct
RGDEEQE

SEQ ID NO: 42566 - protein, 7 aa, synthetic construct
RGDAFGN

SEQ ID NO: 42567 - protein, 7 aa, synthetic construct
RGDEFGL

SEQ ID NO: 42568 - protein, 7 aa, synthetic construct
RGDEFIS

SEQ ID NO: 42569 - protein, 7 aa, synthetic construct
RGDELAG

SEQ ID NO: 42570 - protein, 7 aa, synthetic construct
RGDEQDS

SEQ ID NO: 42571 - protein, 7 aa, synthetic construct
RGDEQQT

SEQ ID NO: 42572 - protein, 7 aa, synthetic construct
RGDESTD

SEQ ID NO: 42573 - protein, 7 aa, synthetic construct
RGDFNEG

SEQ ID NO: 42574 - protein, 7 aa, synthetic construct
RGDGEEQ

SEQ ID NO: 42575 - protein, 7 aa, synthetic construct
RGDGEKG

SEQ ID NO: 42576 - protein, 7 aa, synthetic construct
RGDAILA

SEQ ID NO: 42577 - protein, 7 aa, synthetic construct
RGDGLAA

SEQ ID NO: 42578 - protein, 7 aa, synthetic construct
RGDAKIG

SEQ ID NO: 42579 - protein, 7 aa, synthetic construct
RGDHEDG

SEQ ID NO: 42580 - protein, 7 aa, synthetic construct
RGDHFAH

SEQ ID NO: 42581 - protein, 7 aa, synthetic construct
RGDHFSA

SEQ ID NO: 42582 - protein, 7 aa, synthetic construct
RGDAKVS

SEQ ID NO: 42583 - protein, 7 aa, synthetic construct
RGDHHIQ

SEQ ID NO: 42584 - protein, 7 aa, synthetic construct
RGDHILV

SEQ ID NO: 42585 - protein, 7 aa, synthetic construct
RGDALIQ

SEQ ID NO: 42586 - protein, 7 aa, synthetic construct
RGDHQDI

SEQ ID NO: 42587 - protein, 7 aa, synthetic construct
RGDHQLA

SEQ ID NO: 42588 - protein, 7 aa, synthetic construct
RGDALRG

SEQ ID NO: 42589 - protein, 7 aa, synthetic construct
RGDHTEA

SEQ ID NO: 42590 - protein, 7 aa, synthetic construct
RGDHVAD

SEQ ID NO: 42591 - protein, 7 aa, synthetic construct
RGDIDIE

SEQ ID NO: 42592 - protein, 7 aa, synthetic construct
RGDANIL

SEQ ID NO: 42593 - protein, 7 aa, synthetic construct
RGDANIN

SEQ ID NO: 42594 - protein, 7 aa, synthetic construct
RGDANLG

SEQ ID NO: 42595 - protein, 7 aa, synthetic construct
RGDIHLG

SEQ ID NO: 42596 - protein, 7 aa, synthetic construct
RGDINLG

SEQ ID NO: 42597 - protein, 7 aa, synthetic construct
RGDISAD

SEQ ID NO: 42598 - protein, 7 aa, synthetic construct
RGDITEN

SEQ ID NO: 42599 - protein, 7 aa, synthetic construct
RGDKIED

SEQ ID NO: 42600 - protein, 7 aa, synthetic construct
RGDKSFD

SEQ ID NO: 42601 - protein, 7 aa, synthetic construct
RGDKVNE

SEQ ID NO: 42602 - protein, 7 aa, synthetic construct
RGDLFDE

SEQ ID NO: 42603 - protein, 7 aa, synthetic construct
RGDLNRL

SEQ ID NO: 42604 - protein, 7 aa, synthetic construct
RGDLQFL

SEQ ID NO: 42605 - protein, 7 aa, synthetic construct
RGDLRDE

SEQ ID NO: 42606 - protein, 7 aa, synthetic construct
RGDLTKL

SEQ ID NO: 42607 - protein, 7 aa, synthetic construct
RGDNDEA

SEQ ID NO: 42608 - protein, 7 aa, synthetic construct
RGDNFHA

SEQ ID NO: 42609 - protein, 7 aa, synthetic construct
RGDNIGG

SEQ ID NO: 42610 - protein, 7 aa, synthetic construct
RGDNIID

SEQ ID NO: 42611 - protein, 7 aa, synthetic construct
RGDNKIH

SEQ ID NO: 42612 - protein, 7 aa, synthetic construct
RGDAVGA

SEQ ID NO: 42613 - protein, 7 aa, synthetic construct
RGDNLVA

SEQ ID NO: 42614 - protein, 7 aa, synthetic construct
RGDNNTG

SEQ ID NO: 42615 - protein, 7 aa, synthetic construct
RGDNQVN

SEQ ID NO: 42616 - protein, 7 aa, synthetic construct
RGDADKE

SEQ ID NO: 42617 - protein, 7 aa, synthetic construct
RGDQAVD

SEQ ID NO: 42618 - protein, 7 aa, synthetic construct
RGDQFGD

SEQ ID NO: 42619 - protein, 7 aa, synthetic construct
RGDQFHD

SEQ ID NO: 42620 - protein, 7 aa, synthetic construct
RGDQFSD

SEQ ID NO: 42621 - protein, 7 aa, synthetic construct
RGDQRED

SEQ ID NO: 42622 - protein, 7 aa, synthetic construct
RGDDEAD

SEQ ID NO: 42623 - protein, 7 aa, synthetic construct
RGDDEEI

SEQ ID NO: 42624 - protein, 7 aa, synthetic construct
RGDADRD

SEQ ID NO: 42625 - protein, 7 aa, synthetic construct
RGDSFSD

SEQ ID NO: 42626 - protein, 7 aa, synthetic construct
RGDSHEH

SEQ ID NO: 42627 - protein, 7 aa, synthetic construct
RGDSHIG

SEQ ID NO: 42628 - protein, 7 aa, synthetic construct
RGDSHLN

SEQ ID NO: 42629 - protein, 7 aa, synthetic construct
RGDSLLA

SEQ ID NO: 42630 - protein, 7 aa, synthetic construct
RGDSQVD

SEQ ID NO: 42631 - protein, 7 aa, synthetic construct
RGDSSDD

SEQ ID NO: 42632 - protein, 7 aa, synthetic construct
RGDSVLN

SEQ ID NO: 42633 - protein, 7 aa, synthetic construct
RGDTAES

SEQ ID NO: 42634 - protein, 7 aa, synthetic construct
RGDTEEN

SEQ ID NO: 42635 - protein, 7 aa, synthetic construct
RGDTFFF

SEQ ID NO: 42636 - protein, 7 aa, synthetic construct
RGDTFGG

SEQ ID NO: 42637 - protein, 7 aa, synthetic construct
RGDDGTA

SEQ ID NO: 42638 - protein, 7 aa, synthetic construct
RGDTFVI

SEQ ID NO: 42639 - protein, 7 aa, synthetic construct
RGDDHFG

SEQ ID NO: 42640 - protein, 7 aa, synthetic construct
RGDTTQT

SEQ ID NO: 42641 - protein, 7 aa, synthetic construct
RGDVGDD

SEQ ID NO: 42642 - protein, 7 aa, synthetic construct
RGDDILE

SEQ ID NO: 42643 - protein, 7 aa, synthetic construct
RGDDISA

SEQ ID NO: 42644 - protein, 7 aa, synthetic construct
RGDVVSA

SEQ ID NO: 42645 - protein, 7 aa, synthetic construct
RGDDNQA

SEQ ID NO: 42646 - protein, 7 aa, synthetic construct
RGDAEKQ

SEQ ID NO: 42647 - protein, 7 aa, synthetic construct
RGDDQHN

SEQ ID NO: 42648 - protein, 7 aa, synthetic construct
RGDDTVQ

SEQ ID NO: 42649 - protein, 7 aa, synthetic construct
RGDEDGI

SEQ ID NO: 42650 - protein, 7 aa, synthetic construct
RGDEEQI

SEQ ID NO: 42651 - protein, 7 aa, synthetic construct
RGDAFGQ

SEQ ID NO: 42652 - protein, 7 aa, synthetic construct
RGDEFIT

SEQ ID NO: 42653 - protein, 7 aa, synthetic construct
RGDEGDH

SEQ ID NO: 42654 - protein, 7 aa, synthetic construct
RGDEIQN

SEQ ID NO: 42655 - protein, 7 aa, synthetic construct
RGDEKLG

SEQ ID NO: 42656 - protein, 7 aa, synthetic construct
RGDENVG

SEQ ID NO: 42657 - protein, 7 aa, synthetic construct
RGDEQIG

SEQ ID NO: 42658 - protein, 7 aa, synthetic construct
RGDEQQA

SEQ ID NO: 42659 - protein, 7 aa, synthetic construct
RGDEQVA

SEQ ID NO: 42660 - protein, 7 aa, synthetic construct
RGDERTD

SEQ ID NO: 42661 - protein, 7 aa, synthetic construct
RGDETAT

SEQ ID NO: 42662 - protein, 7 aa, synthetic construct
RGDEVLD

SEQ ID NO: 42663 - protein, 7 aa, synthetic construct
RGDFHEA

SEQ ID NO: 42664 - protein, 7 aa, synthetic construct
RGDGDIA

SEQ ID NO: 42665 - protein, 7 aa, synthetic construct
RGDGELQ

SEQ ID NO: 42666 - protein, 7 aa, synthetic construct
RGDGHVS

SEQ ID NO: 42667 - protein, 7 aa, synthetic construct
RGDGIVS

SEQ ID NO: 42668 - protein, 7 aa, synthetic construct
RGDAIQT

SEQ ID NO: 42669 - protein, 7 aa, synthetic construct
RGDGNGQ

SEQ ID NO: 42670 - protein, 7 aa, synthetic construct
RGDGTDN

SEQ ID NO: 42671 - protein, 7 aa, synthetic construct
RGDGVLA

SEQ ID NO: 42672 - protein, 7 aa, synthetic construct
RGDHFLN

SEQ ID NO: 42673 - protein, 7 aa, synthetic construct
RGDHNSD

SEQ ID NO: 42674 - protein, 7 aa, synthetic construct
RGDHQIG

SEQ ID NO: 42675 - protein, 7 aa, synthetic construct
RGDHQVH

SEQ ID NO: 42676 - protein, 7 aa, synthetic construct
RGDALRH

SEQ ID NO: 42677 - protein, 7 aa, synthetic construct
RGDHVVD

SEQ ID NO: 42678 - protein, 7 aa, synthetic construct
RGDIDQE

SEQ ID NO: 42679 - protein, 7 aa, synthetic construct
RGDIGVF

SEQ ID NO: 42680 - protein, 7 aa, synthetic construct
RGDITND

SEQ ID NO: 42681 - protein, 7 aa, synthetic construct
RGDKDVG

SEQ ID NO: 42682 - protein, 7 aa, synthetic construct
RGDKEIE

SEQ ID NO: 42683 - protein, 7 aa, synthetic construct
RGDKEVN

SEQ ID NO: 42684 - protein, 7 aa, synthetic construct
RGDKFGA

SEQ ID NO: 42685 - protein, 7 aa, synthetic construct
RGDKFVE

SEQ ID NO: 42686 - protein, 7 aa, synthetic construct
RGDKIAG

SEQ ID NO: 42687 - protein, 7 aa, synthetic construct
RGDKIVE

SEQ ID NO: 42688 - protein, 7 aa, synthetic construct
RGDKTDD

SEQ ID NO: 42689 - protein, 7 aa, synthetic construct
RGDKTID

SEQ ID NO: 42690 - protein, 7 aa, synthetic construct
RGDASLE

SEQ ID NO: 42691 - protein, 7 aa, synthetic construct
RGDLIEE

SEQ ID NO: 42692 - protein, 7 aa, synthetic construct
RGDLTIH

SEQ ID NO: 42693 - protein, 7 aa, synthetic construct
RGDADHG

SEQ ID NO: 42694 - protein, 7 aa, synthetic construct
RGDNDEN

SEQ ID NO: 42695 - protein, 7 aa, synthetic construct
RGDATSD

SEQ ID NO: 42696 - protein, 7 aa, synthetic construct
RGDNFIS

SEQ ID NO: 42697 - protein, 7 aa, synthetic construct
RGDNFQT

SEQ ID NO: 42698 - protein, 7 aa, synthetic construct
RGDNGEF

SEQ ID NO: 42699 - protein, 7 aa, synthetic construct
RGDNHQA

SEQ ID NO: 42700 - protein, 7 aa, synthetic construct
RGDNIEE

SEQ ID NO: 42701 - protein, 7 aa, synthetic construct
RGDNLIG

SEQ ID NO: 42702 - protein, 7 aa, synthetic construct
RGDNNND

SEQ ID NO: 42703 - protein, 7 aa, synthetic construct
RGDNQES

SEQ ID NO: 42704 - protein, 7 aa, synthetic construct
RGDQFTF

SEQ ID NO: 42705 - protein, 7 aa, synthetic construct
RGDQNID

SEQ ID NO: 42706 - protein, 7 aa, synthetic construct
RGDREIG

SEQ ID NO: 42707 - protein, 7 aa, synthetic construct
RGDRFID

SEQ ID NO: 42708 - protein, 7 aa, synthetic construct
RGDDDTL

SEQ ID NO: 42709 - protein, 7 aa, synthetic construct
RGDDFDN

SEQ ID NO: 42710 - protein, 7 aa, synthetic construct
RGDSDRT

SEQ ID NO: 42711 - protein, 7 aa, synthetic construct
RGDSEIE

SEQ ID NO: 42712 - protein, 7 aa, synthetic construct
RGDSNID

SEQ ID NO: 42713 - protein, 7 aa, synthetic construct
RGDTAQN

SEQ ID NO: 42714 - protein, 7 aa, synthetic construct
RGDTDDF

SEQ ID NO: 42715 - protein, 7 aa, synthetic construct
RGDTETS

SEQ ID NO: 42716 - protein, 7 aa, synthetic construct
RGDTGES

SEQ ID NO: 42717 - protein, 7 aa, synthetic construct
RGDTIGG

SEQ ID NO: 42718 - protein, 7 aa, synthetic construct
RGDTLEA

SEQ ID NO: 42719 - protein, 7 aa, synthetic construct
RGDTNEN

SEQ ID NO: 42720 - protein, 7 aa, synthetic construct
RGDTVDG

SEQ ID NO: 42721 - protein, 7 aa, synthetic construct
RGDVDQG

SEQ ID NO: 42722 - protein, 7 aa, synthetic construct
RGDDIHH

SEQ ID NO: 42723 - protein, 7 aa, synthetic construct
RGDVHKG

SEQ ID NO: 42724 - protein, 7 aa, synthetic construct
RGDDIQH

SEQ ID NO: 42725 - protein, 7 aa, synthetic construct
RGDVNEA

SEQ ID NO: 42726 - protein, 7 aa, synthetic construct
RGDVQKG

SEQ ID NO: 42727 - protein, 7 aa, synthetic construct
RGDVTED

SEQ ID NO: 42728 - protein, 7 aa, synthetic construct
RGDDKLT

SEQ ID NO: 42729 - protein, 7 aa, synthetic construct
RGDDKSD

SEQ ID NO: 42730 - protein, 7 aa, synthetic construct
RGDDLGG

SEQ ID NO: 42731 - protein, 7 aa, synthetic construct
RGDAENG

SEQ ID NO: 42732 - protein, 7 aa, synthetic construct
RGDDRLN

SEQ ID NO: 42733 - protein, 7 aa, synthetic construct
RGDDVFD

SEQ ID NO: 42734 - protein, 7 aa, synthetic construct
RGDEAAL

SEQ ID NO: 42735 - protein, 7 aa, synthetic construct
RGDEAQV

SEQ ID NO: 42736 - protein, 7 aa, synthetic construct
RGDEDLH

SEQ ID NO: 42737 - protein, 7 aa, synthetic construct
RGDEDNI

SEQ ID NO: 42738 - protein, 7 aa, synthetic construct
RGDEEEG

SEQ ID NO: 42739 - protein, 7 aa, synthetic construct
RGDEELD

SEQ ID NO: 42740 - protein, 7 aa, synthetic construct
RGDEESS

SEQ ID NO: 42741 - protein, 7 aa, synthetic construct
RGDEFIA

SEQ ID NO: 42742 - protein, 7 aa, synthetic construct
RGDENLT

SEQ ID NO: 42743 - protein, 7 aa, synthetic construct
RGDENQH

SEQ ID NO: 42744 - protein, 7 aa, synthetic construct
RGDESAA

SEQ ID NO: 42745 - protein, 7 aa, synthetic construct
RGDESIF

SEQ ID NO: 42746 - protein, 7 aa, synthetic construct
RGDEVLQ

SEQ ID NO: 42747 - protein, 7 aa, synthetic construct
RGDFEDI

SEQ ID NO: 42748 - protein, 7 aa, synthetic construct
RGDFQIA

SEQ ID NO: 42749 - protein, 7 aa, synthetic construct
RGDGEEF

SEQ ID NO: 42750 - protein, 7 aa, synthetic construct
RGDGEFD

SEQ ID NO: 42751 - protein, 7 aa, synthetic construct
RGDGIAS

SEQ ID NO: 42752 - protein, 7 aa, synthetic construct
RGDGIVN

SEQ ID NO: 42753 - protein, 7 aa, synthetic construct
RGDGTIH

SEQ ID NO: 42754 - protein, 7 aa, synthetic construct
RGDGTLD

SEQ ID NO: 42755 - protein, 7 aa, synthetic construct
RGDGTVA

SEQ ID NO: 42756 - protein, 7 aa, synthetic construct
RGDGVGD

SEQ ID NO: 42757 - protein, 7 aa, synthetic construct
RGDGVHD

SEQ ID NO: 42758 - protein, 7 aa, synthetic construct
RGDHAIN

SEQ ID NO: 42759 - protein, 7 aa, synthetic construct
RGDHFDQ

SEQ ID NO: 42760 - protein, 7 aa, synthetic construct
RGDHFVS

SEQ ID NO: 42761 - protein, 7 aa, synthetic construct
RGDHHLQ

SEQ ID NO: 42762 - protein, 7 aa, synthetic construct
RGDHILK

SEQ ID NO: 42763 - protein, 7 aa, synthetic construct
RGDALEH

SEQ ID NO: 42764 - protein, 7 aa, synthetic construct
RGDHNEG

SEQ ID NO: 42765 - protein, 7 aa, synthetic construct
RGDALKD

SEQ ID NO: 42766 - protein, 7 aa, synthetic construct
RGDHQIQ

SEQ ID NO: 42767 - protein, 7 aa, synthetic construct
RGDHQLL

SEQ ID NO: 42768 - protein, 7 aa, synthetic construct
RGDHQVQ

SEQ ID NO: 42769 - protein, 7 aa, synthetic construct
RGDALTA

SEQ ID NO: 42770 - protein, 7 aa, synthetic construct
RGDIERD

SEQ ID NO: 42771 - protein, 7 aa, synthetic construct
RGDIIDQ

SEQ ID NO: 42772 - protein, 7 aa, synthetic construct
RGDINGG

SEQ ID NO: 42773 - protein, 7 aa, synthetic construct
RGDINNE

SEQ ID NO: 42774 - protein, 7 aa, synthetic construct
RGDITGG

SEQ ID NO: 42775 - protein, 7 aa, synthetic construct
RGDIVDE

SEQ ID NO: 42776 - protein, 7 aa, synthetic construct
RGDKDEG

SEQ ID NO: 42777 - protein, 7 aa, synthetic construct
RGDKFRD

SEQ ID NO: 42778 - protein, 7 aa, synthetic construct
RGDKIQA

SEQ ID NO: 42779 - protein, 7 aa, synthetic construct
RGDKQLE

SEQ ID NO: 42780 - protein, 7 aa, synthetic construct
RGDKQRG

SEQ ID NO: 42781 - protein, 7 aa, synthetic construct
RGDKVNG

SEQ ID NO: 42782 - protein, 7 aa, synthetic construct
RGDLDEA

SEQ ID NO: 42783 - protein, 7 aa, synthetic construct
RGDATES

SEQ ID NO: 42784 - protein, 7 aa, synthetic construct
RGDLSVD

SEQ ID NO: 42785 - protein, 7 aa, synthetic construct
RGDLTII

SEQ ID NO: 42786 - protein, 7 aa, synthetic construct
RGDLVDS

SEQ ID NO: 42787 - protein, 7 aa, synthetic construct
RGDNDDK

SEQ ID NO: 42788 - protein, 7 aa, synthetic construct
RGDATTG

SEQ ID NO: 42789 - protein, 7 aa, synthetic construct
RGDNHAE

SEQ ID NO: 42790 - protein, 7 aa, synthetic construct
RGDNHLD

SEQ ID NO: 42791 - protein, 7 aa, synthetic construct
RGDNISD

SEQ ID NO: 42792 - protein, 7 aa, synthetic construct
RGDNLLN

SEQ ID NO: 42793 - protein, 7 aa, synthetic construct
RGDNLLT

SEQ ID NO: 42794 - protein, 7 aa, synthetic construct
RGDNLQA

SEQ ID NO: 42795 - protein, 7 aa, synthetic construct
RGDQEIN

SEQ ID NO: 42796 - protein, 7 aa, synthetic construct
RGDQLIA

SEQ ID NO: 42797 - protein, 7 aa, synthetic construct
RGDQTDN

SEQ ID NO: 42798 - protein, 7 aa, synthetic construct
RGDREDS

SEQ ID NO: 42799 - protein, 7 aa, synthetic construct
RGDDFAA

SEQ ID NO: 42800 - protein, 7 aa, synthetic construct
RGDSFEG

SEQ ID NO: 42801 - protein, 7 aa, synthetic construct
RGDSHIN

SEQ ID NO: 42802 - protein, 7 aa, synthetic construct
RGDDGAE

SEQ ID NO: 42803 - protein, 7 aa, synthetic construct
RGDSQLG

SEQ ID NO: 42804 - protein, 7 aa, synthetic construct
RGDTEDQ

SEQ ID NO: 42805 - protein, 7 aa, synthetic construct
RGDTFHV

SEQ ID NO: 42806 - protein, 7 aa, synthetic construct
RGDTITA

SEQ ID NO: 42807 - protein, 7 aa, synthetic construct
RGDTNVD

SEQ ID NO: 42808 - protein, 7 aa, synthetic construct
RGDTSQD

SEQ ID NO: 42809 - protein, 7 aa, synthetic construct
RGDTTDV

SEQ ID NO: 42810 - protein, 7 aa, synthetic construct
RGDTTEQ

SEQ ID NO: 42811 - protein, 7 aa, synthetic construct
RGDTTGI

SEQ ID NO: 42812 - protein, 7 aa, synthetic construct
RGDTTLH

SEQ ID NO: 42813 - protein, 7 aa, synthetic construct
RGDDIAK

SEQ ID NO: 42814 - protein, 7 aa, synthetic construct
RGDVDGQ

SEQ ID NO: 42815 - protein, 7 aa, synthetic construct
RGDVDRD

SEQ ID NO: 42816 - protein, 7 aa, synthetic construct
RGDDIGA

SEQ ID NO: 42817 - protein, 7 aa, synthetic construct
RGDVGGE

SEQ ID NO: 42818 - protein, 7 aa, synthetic construct
RGDVIEG

SEQ ID NO: 42819 - protein, 7 aa, synthetic construct
RGDVNAG

SEQ ID NO: 42820 - protein, 7 aa, synthetic construct
RGDVNND

SEQ ID NO: 42821 - protein, 7 aa, synthetic construct
RGDVTDN

SEQ ID NO: 42822 - protein, 7 aa, synthetic construct
RGDVTID

SEQ ID NO: 42823 - protein, 7 aa, synthetic construct
RGDDKQE

SEQ ID NO: 42824 - protein, 7 aa, synthetic construct
RGDDLEA

SEQ ID NO: 42825 - protein, 7 aa, synthetic construct
RGDDQHH

SEQ ID NO: 42826 - protein, 7 aa, synthetic construct
RGDDQIS

SEQ ID NO: 42827 - protein, 7 aa, synthetic construct
RGDDRDD

SEQ ID NO: 42828 - protein, 7 aa, synthetic construct
RGDDRDG

SEQ ID NO: 42829 - protein, 7 aa, synthetic construct
RGDDREE

SEQ ID NO: 42830 - protein, 7 aa, synthetic construct
RGDDRLE

SEQ ID NO: 42831 - protein, 7 aa, synthetic construct
RGDAESA

SEQ ID NO: 42832 - protein, 7 aa, synthetic construct
RGDDTEQ

SEQ ID NO: 42833 - protein, 7 aa, synthetic construct
RGDDTHG

SEQ ID NO: 42834 - protein, 7 aa, synthetic construct
RGDDTKA

SEQ ID NO: 42835 - protein, 7 aa, synthetic construct
RGDDTLI

SEQ ID NO: 42836 - protein, 7 aa, synthetic construct
RGDEEFD

SEQ ID NO: 42837 - protein, 7 aa, synthetic construct
RGDEFVN

SEQ ID NO: 42838 - protein, 7 aa, synthetic construct
RGDEILV

SEQ ID NO: 42839 - protein, 7 aa, synthetic construct
RGDELLI

SEQ ID NO: 42840 - protein, 7 aa, synthetic construct
RGDEQFA

SEQ ID NO: 42841 - protein, 7 aa, synthetic construct
RGDEVLT

SEQ ID NO: 42842 - protein, 7 aa, synthetic construct
RGDFLDE

SEQ ID NO: 42843 - protein, 7 aa, synthetic construct
RGDAHTG

SEQ ID NO: 42844 - protein, 7 aa, synthetic construct
RGDFTVD

SEQ ID NO: 42845 - protein, 7 aa, synthetic construct
RGDGDAT

SEQ ID NO: 42846 - protein, 7 aa, synthetic construct
RGDGDHG

SEQ ID NO: 42847 - protein, 7 aa, synthetic construct
RGDAIFQ

SEQ ID NO: 42848 - protein, 7 aa, synthetic construct
RGDGKDE

SEQ ID NO: 42849 - protein, 7 aa, synthetic construct
RGDGQLQ

SEQ ID NO: 42850 - protein, 7 aa, synthetic construct
RGDGTFS

SEQ ID NO: 42851 - protein, 7 aa, synthetic construct
RGDHDIN

SEQ ID NO: 42852 - protein, 7 aa, synthetic construct
RGDHEVD

SEQ ID NO: 42853 - protein, 7 aa, synthetic construct
RGDAKTG

SEQ ID NO: 42854 - protein, 7 aa, synthetic construct
RGDHHIG

SEQ ID NO: 42855 - protein, 7 aa, synthetic construct
RGDHIIT

SEQ ID NO: 42856 - protein, 7 aa, synthetic construct
RGDHIQN

SEQ ID NO: 42857 - protein, 7 aa, synthetic construct
RGDHKLE

SEQ ID NO: 42858 - protein, 7 aa, synthetic construct
RGDHTED

SEQ ID NO: 42859 - protein, 7 aa, synthetic construct
RGDIDID

SEQ ID NO: 42860 - protein, 7 aa, synthetic construct
RGDIEIH

SEQ ID NO: 42861 - protein, 7 aa, synthetic construct
RGDIFQE

SEQ ID NO: 42862 - protein, 7 aa, synthetic construct
RGDIGDH

SEQ ID NO: 42863 - protein, 7 aa, synthetic construct
RGDIKAE

SEQ ID NO: 42864 - protein, 7 aa, synthetic construct
RGDAQDA

SEQ ID NO: 42865 - protein, 7 aa, synthetic construct
RGDITED

SEQ ID NO: 42866 - protein, 7 aa, synthetic construct
RGDIVIE

SEQ ID NO: 42867 - protein, 7 aa, synthetic construct
RGDKVVE

SEQ ID NO: 42868 - protein, 7 aa, synthetic construct
RGDASDF

SEQ ID NO: 42869 - protein, 7 aa, synthetic construct
RGDLEEQ

SEQ ID NO: 42870 - protein, 7 aa, synthetic construct
RGDLFQD

SEQ ID NO: 42871 - protein, 7 aa, synthetic construct
RGDLGEH

SEQ ID NO: 42872 - protein, 7 aa, synthetic construct
RGDASIF

SEQ ID NO: 42873 - protein, 7 aa, synthetic construct
RGDATIH

SEQ ID NO: 42874 - protein, 7 aa, synthetic construct
RGDATRG

SEQ ID NO: 42875 - protein, 7 aa, synthetic construct
RGDNFIN

SEQ ID NO: 42876 - protein, 7 aa, synthetic construct
RGDNIGD

SEQ ID NO: 42877 - protein, 7 aa, synthetic construct
RGDNLVE

SEQ ID NO: 42878 - protein, 7 aa, synthetic construct
RGDNNDD

SEQ ID NO: 42879 - protein, 7 aa, synthetic construct
RGDNNVE

SEQ ID NO: 42880 - protein, 7 aa, synthetic construct
RGDQHRG

SEQ ID NO: 42881 - protein, 7 aa, synthetic construct
RGDQNDA

SEQ ID NO: 42882 - protein, 7 aa, synthetic construct
RGDDDHS

SEQ ID NO: 42883 - protein, 7 aa, synthetic construct
RGDDDLN

SEQ ID NO: 42884 - protein, 7 aa, synthetic construct
RGDDDSQ

SEQ ID NO: 42885 - protein, 7 aa, synthetic construct
RGDDELF

SEQ ID NO: 42886 - protein, 7 aa, synthetic construct
RGDDFIE

SEQ ID NO: 42887 - protein, 7 aa, synthetic construct
RGDTETA

SEQ ID NO: 42888 - protein, 7 aa, synthetic construct
RGDTIQD

SEQ ID NO: 42889 - protein, 7 aa, synthetic construct
RGDTSND

SEQ ID NO: 42890 - protein, 7 aa, synthetic construct
RGDTTSA

SEQ ID NO: 42891 - protein, 7 aa, synthetic construct
RGDTVED

SEQ ID NO: 42892 - protein, 7 aa, synthetic construct
RGDDIGF

SEQ ID NO: 42893 - protein, 7 aa, synthetic construct
RGDDIHG

SEQ ID NO: 42894 - protein, 7 aa, synthetic construct
RGDVGSE

SEQ ID NO: 42895 - protein, 7 aa, synthetic construct
RGDVHID

SEQ ID NO: 42896 - protein, 7 aa, synthetic construct
RGDDILV

SEQ ID NO: 42897 - protein, 7 aa, synthetic construct
RGDVIIA

SEQ ID NO: 42898 - protein, 7 aa, synthetic construct
RGDVLLD

SEQ ID NO: 42899 - protein, 7 aa, synthetic construct
RGDDIVA

SEQ ID NO: 42900 - protein, 7 aa, synthetic construct
RGDDKVN

SEQ ID NO: 42901 - protein, 7 aa, synthetic construct
RGDDLDT

SEQ ID NO: 42902 - protein, 7 aa, synthetic construct
RGDDTDI

SEQ ID NO: 42903 - protein, 7 aa, synthetic construct
RGDDTGL

SEQ ID NO: 42904 - protein, 7 aa, synthetic construct
RGDDVFS

SEQ ID NO: 42905 - protein, 7 aa, synthetic construct
RGDDVIE

SEQ ID NO: 42906 - protein, 7 aa, synthetic construct
RGDEAAA

SEQ ID NO: 42907 - protein, 7 aa, synthetic construct
RGDEAAT

SEQ ID NO: 42908 - protein, 7 aa, synthetic construct
RGDAFDA

SEQ ID NO: 42909 - protein, 7 aa, synthetic construct
RGDEFTS

SEQ ID NO: 42910 - protein, 7 aa, synthetic construct
RGDAFLK

SEQ ID NO: 42911 - protein, 7 aa, synthetic construct
RGDAFNT

SEQ ID NO: 42912 - protein, 7 aa, synthetic construct
RGDEKID

SEQ ID NO: 42913 - protein, 7 aa, synthetic construct
RGDEKVD

SEQ ID NO: 42914 - protein, 7 aa, synthetic construct
RGDEQQV

SEQ ID NO: 42915 - protein, 7 aa, synthetic construct
RGDESAG

SEQ ID NO: 42916 - protein, 7 aa, synthetic construct
RGDETDV

SEQ ID NO: 42917 - protein, 7 aa, synthetic construct
RGDETIH

SEQ ID NO: 42918 - protein, 7 aa, synthetic construct
RGDETKD

SEQ ID NO: 42919 - protein, 7 aa, synthetic construct
RGDETLF

SEQ ID NO: 42920 - protein, 7 aa, synthetic construct
RGDGALA

SEQ ID NO: 42921 - protein, 7 aa, synthetic construct
RGDGDQD

SEQ ID NO: 42922 - protein, 7 aa, synthetic construct
RGDGETN

SEQ ID NO: 42923 - protein, 7 aa, synthetic construct
RGDGKQH

SEQ ID NO: 42924 - protein, 7 aa, synthetic construct
RGDHFVG

SEQ ID NO: 42925 - protein, 7 aa, synthetic construct
RGDHHGD

SEQ ID NO: 42926 - protein, 7 aa, synthetic construct
RGDALLH

SEQ ID NO: 42927 - protein, 7 aa, synthetic construct
RGDHRAG

SEQ ID NO: 42928 - protein, 7 aa, synthetic construct
RGDHVIH

SEQ ID NO: 42929 - protein, 7 aa, synthetic construct
RGDALVH

SEQ ID NO: 42930 - protein, 7 aa, synthetic construct
RGDIDGD

SEQ ID NO: 42931 - protein, 7 aa, synthetic construct
RGDIELL

SEQ ID NO: 42932 - protein, 7 aa, synthetic construct
RGDIFIN

SEQ ID NO: 42933 - protein, 7 aa, synthetic construct
RGDANIS

SEQ ID NO: 42934 - protein, 7 aa, synthetic construct
RGDIIEE

SEQ ID NO: 42935 - protein, 7 aa, synthetic construct
RGDIIEN

SEQ ID NO: 42936 - protein, 7 aa, synthetic construct
RGDINNV

SEQ ID NO: 42937 - protein, 7 aa, synthetic construct
RGDIQTE

SEQ ID NO: 42938 - protein, 7 aa, synthetic construct
RGDKDKD

SEQ ID NO: 42939 - protein, 7 aa, synthetic construct
RGDKDLG

SEQ ID NO: 42940 - protein, 7 aa, synthetic construct
RGDARQA

SEQ ID NO: 42941 - protein, 7 aa, synthetic construct
RGDLEIG

SEQ ID NO: 42942 - protein, 7 aa, synthetic construct
RGDNAAA

SEQ ID NO: 42943 - protein, 7 aa, synthetic construct
RGDNDDV

SEQ ID NO: 42944 - protein, 7 aa, synthetic construct
RGDNFVS

SEQ ID NO: 42945 - protein, 7 aa, synthetic construct
RGDNIDQ

SEQ ID NO: 42946 - protein, 7 aa, synthetic construct
RGDNLLA

SEQ ID NO: 42947 - protein, 7 aa, synthetic construct
RGDNTEI

SEQ ID NO: 42948 - protein, 7 aa, synthetic construct
RGDNVDF

SEQ ID NO: 42949 - protein, 7 aa, synthetic construct
RGDDAFQ

SEQ ID NO: 42950 - protein, 7 aa, synthetic construct
RGDQFLS

SEQ ID NO: 42951 - protein, 7 aa, synthetic construct
RGDDALI

SEQ ID NO: 42952 - protein, 7 aa, synthetic construct
RGDQTIE

SEQ ID NO: 42953 - protein, 7 aa, synthetic construct
RGDDEQN

SEQ ID NO: 42954 - protein, 7 aa, synthetic construct
RGDRVQG

SEQ ID NO: 42955 - protein, 7 aa, synthetic construct
RGDDFDR

SEQ ID NO: 42956 - protein, 7 aa, synthetic construct
RGDDFDS

SEQ ID NO: 42957 - protein, 7 aa, synthetic construct
RGDSDGT

SEQ ID NO: 42958 - protein, 7 aa, synthetic construct
RGDSEQF

SEQ ID NO: 42959 - protein, 7 aa, synthetic construct
RGDSIIG

SEQ ID NO: 42960 - protein, 7 aa, synthetic construct
RGDDFNT

SEQ ID NO: 42961 - protein, 7 aa, synthetic construct
RGDDGAH

SEQ ID NO: 42962 - protein, 7 aa, synthetic construct
RGDSQIA

SEQ ID NO: 42963 - protein, 7 aa, synthetic construct
RGDSSLS

SEQ ID NO: 42964 - protein, 7 aa, synthetic construct
RGDSTRG

SEQ ID NO: 42965 - protein, 7 aa, synthetic construct
RGDTATF

SEQ ID NO: 42966 - protein, 7 aa, synthetic construct
RGDTFDI

SEQ ID NO: 42967 - protein, 7 aa, synthetic construct
RGDTFHL

SEQ ID NO: 42968 - protein, 7 aa, synthetic construct
RGDTFQS

SEQ ID NO: 42969 - protein, 7 aa, synthetic construct
RGDTHEE

SEQ ID NO: 42970 - protein, 7 aa, synthetic construct
RGDTHIG

SEQ ID NO: 42971 - protein, 7 aa, synthetic construct
RGDDHDN

SEQ ID NO: 42972 - protein, 7 aa, synthetic construct
RGDTIEG

SEQ ID NO: 42973 - protein, 7 aa, synthetic construct
RGDTLHD

SEQ ID NO: 42974 - protein, 7 aa, synthetic construct
RGDVGDV

SEQ ID NO: 42975 - protein, 7 aa, synthetic construct
RGDVHQG

SEQ ID NO: 42976 - protein, 7 aa, synthetic construct
RGDVIQA

SEQ ID NO: 42977 - protein, 7 aa, synthetic construct
RGDAEEL

SEQ ID NO: 42978 - protein, 7 aa, synthetic construct
RGDVLGD

SEQ ID NO: 42979 - protein, 7 aa, synthetic construct
RGDVQDA

SEQ ID NO: 42980 - protein, 7 aa, synthetic construct
RGDAEGQ

SEQ ID NO: 42981 - protein, 7 aa, synthetic construct
RGDDNFT

SEQ ID NO: 42982 - protein, 7 aa, synthetic construct
RGDDNIH

SEQ ID NO: 42983 - protein, 7 aa, synthetic construct
RGDDNIN

SEQ ID NO: 42984 - protein, 7 aa, synthetic construct
RGDDNLD

SEQ ID NO: 42985 - protein, 7 aa, synthetic construct
RGDDQFQ

SEQ ID NO: 42986 - protein, 7 aa, synthetic construct
RGDDRIH

SEQ ID NO: 42987 - protein, 7 aa, synthetic construct
RGDDRIL

SEQ ID NO: 42988 - protein, 7 aa, synthetic construct
RGDDTFL

SEQ ID NO: 42989 - protein, 7 aa, synthetic construct
RGDDVLG

SEQ ID NO: 42990 - protein, 7 aa, synthetic construct
RGDEEAE

SEQ ID NO: 42991 - protein, 7 aa, synthetic construct
RGDEFAI

SEQ ID NO: 42992 - protein, 7 aa, synthetic construct
RGDEFAL

SEQ ID NO: 42993 - protein, 7 aa, synthetic construct
RGDEFIF

SEQ ID NO: 42994 - protein, 7 aa, synthetic construct
RGDEFLT

SEQ ID NO: 42995 - protein, 7 aa, synthetic construct
RGDAFIA

SEQ ID NO: 42996 - protein, 7 aa, synthetic construct
RGDAFII

SEQ ID NO: 42997 - protein, 7 aa, synthetic construct
RGDEHIF

SEQ ID NO: 42998 - protein, 7 aa, synthetic construct
RGDEHQG

SEQ ID NO: 42999 - protein, 7 aa, synthetic construct
RGDEIAR

SEQ ID NO: 43000 - protein, 7 aa, synthetic construct
RGDENVN

SEQ ID NO: 43001 - protein, 7 aa, synthetic construct
RGDEQLN

SEQ ID NO: 43002 - protein, 7 aa, synthetic construct
RGDEVRG

SEQ ID NO: 43003 - protein, 7 aa, synthetic construct
RGDFEDG

SEQ ID NO: 43004 - protein, 7 aa, synthetic construct
RGDFFDK

SEQ ID NO: 43005 - protein, 7 aa, synthetic construct
RGDFHIS

SEQ ID NO: 43006 - protein, 7 aa, synthetic construct
RGDFIHD

SEQ ID NO: 43007 - protein, 7 aa, synthetic construct
RGDAHKG

SEQ ID NO: 43008 - protein, 7 aa, synthetic construct
RGDFQEG

SEQ ID NO: 43009 - protein, 7 aa, synthetic construct
RGDGETA

SEQ ID NO: 43010 - protein, 7 aa, synthetic construct
RGDGIAG

SEQ ID NO: 43011 - protein, 7 aa, synthetic construct
RGDGIFI

SEQ ID NO: 43012 - protein, 7 aa, synthetic construct
RGDGISQ

SEQ ID NO: 43013 - protein, 7 aa, synthetic construct
RGDGRVG

SEQ ID NO: 43014 - protein, 7 aa, synthetic construct
RGDAKIH

SEQ ID NO: 43015 - protein, 7 aa, synthetic construct
RGDGVLN

SEQ ID NO: 43016 - protein, 7 aa, synthetic construct
RGDHFIK

SEQ ID NO: 43017 - protein, 7 aa, synthetic construct
RGDHILQ

SEQ ID NO: 43018 - protein, 7 aa, synthetic construct
RGDHIQH

SEQ ID NO: 43019 - protein, 7 aa, synthetic construct
RGDHLTE

SEQ ID NO: 43020 - protein, 7 aa, synthetic construct
RGDHVAN

SEQ ID NO: 43021 - protein, 7 aa, synthetic construct
RGDIGSF

SEQ ID NO: 43022 - protein, 7 aa, synthetic construct
RGDKFDG

SEQ ID NO: 43023 - protein, 7 aa, synthetic construct
RGDKFTE

SEQ ID NO: 43024 - protein, 7 aa, synthetic construct
RGDARLN

SEQ ID NO: 43025 - protein, 7 aa, synthetic construct
RGDKTVE

SEQ ID NO: 43026 - protein, 7 aa, synthetic construct
RGDLFLE

SEQ ID NO: 43027 - protein, 7 aa, synthetic construct
RGDNEEA

SEQ ID NO: 43028 - protein, 7 aa, synthetic construct
RGDNFAE

SEQ ID NO: 43029 - protein, 7 aa, synthetic construct
RGDNGDF

SEQ ID NO: 43030 - protein, 7 aa, synthetic construct
RGDNHIA

SEQ ID NO: 43031 - protein, 7 aa, synthetic construct
RGDNHQG

SEQ ID NO: 43032 - protein, 7 aa, synthetic construct
RGDNLLD

SEQ ID NO: 43033 - protein, 7 aa, synthetic construct
RGDNNQS

SEQ ID NO: 43034 - protein, 7 aa, synthetic construct
RGDNRVE

SEQ ID NO: 43035 - protein, 7 aa, synthetic construct
RGDNSFD

SEQ ID NO: 43036 - protein, 7 aa, synthetic construct
RGDQDDT

SEQ ID NO: 43037 - protein, 7 aa, synthetic construct
RGDQFIQ

SEQ ID NO: 43038 - protein, 7 aa, synthetic construct
RGDQNED

SEQ ID NO: 43039 - protein, 7 aa, synthetic construct
RGDQNIH

SEQ ID NO: 43040 - protein, 7 aa, synthetic construct
RGDQRID

SEQ ID NO: 43041 - protein, 7 aa, synthetic construct
RGDQVNG

SEQ ID NO: 43042 - protein, 7 aa, synthetic construct
RGDQVVG

SEQ ID NO: 43043 - protein, 7 aa, synthetic construct
RGDDEIH

SEQ ID NO: 43044 - protein, 7 aa, synthetic construct
RGDDEIL

SEQ ID NO: 43045 - protein, 7 aa, synthetic construct
RGDDEIS

SEQ ID NO: 43046 - protein, 7 aa, synthetic construct
RGDRTQD

SEQ ID NO: 43047 - protein, 7 aa, synthetic construct
RGDSDIG

SEQ ID NO: 43048 - protein, 7 aa, synthetic construct
RGDSFGT

SEQ ID NO: 43049 - protein, 7 aa, synthetic construct
RGDSIDD

SEQ ID NO: 43050 - protein, 7 aa, synthetic construct
RGDSIQA

SEQ ID NO: 43051 - protein, 7 aa, synthetic construct
RGDDGED

SEQ ID NO: 43052 - protein, 7 aa, synthetic construct
RGDSTIS

SEQ ID NO: 43053 - protein, 7 aa, synthetic construct
RGDTATG

SEQ ID NO: 43054 - protein, 7 aa, synthetic construct
RGDTFQI

SEQ ID NO: 43055 - protein, 7 aa, synthetic construct
RGDTGEH

SEQ ID NO: 43056 - protein, 7 aa, synthetic construct
RGDTIAS

SEQ ID NO: 43057 - protein, 7 aa, synthetic construct
RGDDINH

SEQ ID NO: 43058 - protein, 7 aa, synthetic construct
RGDVLEQ

SEQ ID NO: 43059 - protein, 7 aa, synthetic construct
RGDDKLH

SEQ ID NO: 43060 - protein, 7 aa, synthetic construct
RGDDLAN

SEQ ID NO: 43061 - protein, 7 aa, synthetic construct
RGDDLIR

SEQ ID NO: 43062 - protein, 7 aa, synthetic construct
RGDDLLT

SEQ ID NO: 43063 - protein, 7 aa, synthetic construct
RGDDNLL

SEQ ID NO: 43064 - protein, 7 aa, synthetic construct
RGDDNVH

SEQ ID NO: 43065 - protein, 7 aa, synthetic construct
RGDDRDR

SEQ ID NO: 43066 - protein, 7 aa, synthetic construct
RGDEAES

SEQ ID NO: 43067 - protein, 7 aa, synthetic construct
RGDEEQN

SEQ ID NO: 43068 - protein, 7 aa, synthetic construct
RGDEETH

SEQ ID NO: 43069 - protein, 7 aa, synthetic construct
RGDEILD

SEQ ID NO: 43070 - protein, 7 aa, synthetic construct
RGDEKAH

SEQ ID NO: 43071 - protein, 7 aa, synthetic construct
RGDEKLV

SEQ ID NO: 43072 - protein, 7 aa, synthetic construct
RGDAFVQ

SEQ ID NO: 43073 - protein, 7 aa, synthetic construct
RGDETLV

SEQ ID NO: 43074 - protein, 7 aa, synthetic construct
RGDEVQA

SEQ ID NO: 43075 - protein, 7 aa, synthetic construct
RGDFHVD

SEQ ID NO: 43076 - protein, 7 aa, synthetic construct
RGDAIEG

SEQ ID NO: 43077 - protein, 7 aa, synthetic construct
RGDGEFG

SEQ ID NO: 43078 - protein, 7 aa, synthetic construct
RGDGIDF

SEQ ID NO: 43079 - protein, 7 aa, synthetic construct
RGDGILN

SEQ ID NO: 43080 - protein, 7 aa, synthetic construct
RGDAIQE

SEQ ID NO: 43081 - protein, 7 aa, synthetic construct
RGDGNIN

SEQ ID NO: 43082 - protein, 7 aa, synthetic construct
RGDHAFD

SEQ ID NO: 43083 - protein, 7 aa, synthetic construct
RGDHIGE

SEQ ID NO: 43084 - protein, 7 aa, synthetic construct
RGDHVVE

SEQ ID NO: 43085 - protein, 7 aa, synthetic construct
RGDIAED

SEQ ID NO: 43086 - protein, 7 aa, synthetic construct
RGDIAIG

SEQ ID NO: 43087 - protein, 7 aa, synthetic construct
RGDIDAE

SEQ ID NO: 43088 - protein, 7 aa, synthetic construct
RGDIDGF

SEQ ID NO: 43089 - protein, 7 aa, synthetic construct
RGDIFKD

SEQ ID NO: 43090 - protein, 7 aa, synthetic construct
RGDIGVD

SEQ ID NO: 43091 - protein, 7 aa, synthetic construct
RGDINTD

SEQ ID NO: 43092 - protein, 7 aa, synthetic construct
RGDINVE

SEQ ID NO: 43093 - protein, 7 aa, synthetic construct
RGDAQEG

SEQ ID NO: 43094 - protein, 7 aa, synthetic construct
RGDKITE

SEQ ID NO: 43095 - protein, 7 aa, synthetic construct
RGDKTEE

SEQ ID NO: 43096 - protein, 7 aa, synthetic construct
RGDATAA

SEQ ID NO: 43097 - protein, 7 aa, synthetic construct
RGDLSNF

SEQ ID NO: 43098 - protein, 7 aa, synthetic construct
RGDNEFG

SEQ ID NO: 43099 - protein, 7 aa, synthetic construct
RGDNGDE

SEQ ID NO: 43100 - protein, 7 aa, synthetic construct
RGDNHAD

SEQ ID NO: 43101 - protein, 7 aa, synthetic construct
RGDAVAA

SEQ ID NO: 43102 - protein, 7 aa, synthetic construct
RGDNILS

SEQ ID NO: 43103 - protein, 7 aa, synthetic construct
RGDNISS

SEQ ID NO: 43104 - protein, 7 aa, synthetic construct
RGDNKIG

SEQ ID NO: 43105 - protein, 7 aa, synthetic construct
RGDNSIF

SEQ ID NO: 43106 - protein, 7 aa, synthetic construct
RGDQEEG

SEQ ID NO: 43107 - protein, 7 aa, synthetic construct
RGDQELE

SEQ ID NO: 43108 - protein, 7 aa, synthetic construct
RGDQNIN

SEQ ID NO: 43109 - protein, 7 aa, synthetic construct
RGDRDDE

SEQ ID NO: 43110 - protein, 7 aa, synthetic construct
RGDSAEA

SEQ ID NO: 43111 - protein, 7 aa, synthetic construct
RGDSALA

SEQ ID NO: 43112 - protein, 7 aa, synthetic construct
RGDSDDN

SEQ ID NO: 43113 - protein, 7 aa, synthetic construct
RGDSEID

SEQ ID NO: 43114 - protein, 7 aa, synthetic construct
RGDSFIG

SEQ ID NO: 43115 - protein, 7 aa, synthetic construct
RGDSLIA

SEQ ID NO: 43116 - protein, 7 aa, synthetic construct
RGDSRIE

SEQ ID NO: 43117 - protein, 7 aa, synthetic construct
RGDADTV

SEQ ID NO: 43118 - protein, 7 aa, synthetic construct
RGDTADK

SEQ ID NO: 43119 - protein, 7 aa, synthetic construct
RGDTDRH

SEQ ID NO: 43120 - protein, 7 aa, synthetic construct
RGDTEIA

SEQ ID NO: 43121 - protein, 7 aa, synthetic construct
RGDTFTK

SEQ ID NO: 43122 - protein, 7 aa, synthetic construct
RGDTIDQ

SEQ ID NO: 43123 - protein, 7 aa, synthetic construct
RGDTNTN

SEQ ID NO: 43124 - protein, 7 aa, synthetic construct
RGDVARG

SEQ ID NO: 43125 - protein, 7 aa, synthetic construct
RGDVDTD

SEQ ID NO: 43126 - protein, 7 aa, synthetic construct
RGDDIFN

SEQ ID NO: 43127 - protein, 7 aa, synthetic construct
RGDDIIV

SEQ ID NO: 43128 - protein, 7 aa, synthetic construct
RGDDKIK

SEQ ID NO: 43129 - protein, 7 aa, synthetic construct
RGDDLEG

SEQ ID NO: 43130 - protein, 7 aa, synthetic construct
RGDDQNG

SEQ ID NO: 43131 - protein, 7 aa, synthetic construct
RGDDQSS

SEQ ID NO: 43132 - protein, 7 aa, synthetic construct
RGDDSQA

SEQ ID NO: 43133 - protein, 7 aa, synthetic construct
RGDDTIE

SEQ ID NO: 43134 - protein, 7 aa, synthetic construct
RGDDTVI

SEQ ID NO: 43135 - protein, 7 aa, synthetic construct
RGDDVTD

SEQ ID NO: 43136 - protein, 7 aa, synthetic construct
RGDEATD

SEQ ID NO: 43137 - protein, 7 aa, synthetic construct
RGDEDHG

SEQ ID NO: 43138 - protein, 7 aa, synthetic construct
RGDEDQD

SEQ ID NO: 43139 - protein, 7 aa, synthetic construct
RGDEDST

SEQ ID NO: 43140 - protein, 7 aa, synthetic construct
RGDEEDL

SEQ ID NO: 43141 - protein, 7 aa, synthetic construct
RGDEELH

SEQ ID NO: 43142 - protein, 7 aa, synthetic construct
RGDAFGE

SEQ ID NO: 43143 - protein, 7 aa, synthetic construct
RGDEFSN

SEQ ID NO: 43144 - protein, 7 aa, synthetic construct
RGDEGAD

SEQ ID NO: 43145 - protein, 7 aa, synthetic construct
RGDEHIE

SEQ ID NO: 43146 - protein, 7 aa, synthetic construct
RGDEIAS

SEQ ID NO: 43147 - protein, 7 aa, synthetic construct
RGDEKKS

SEQ ID NO: 43148 - protein, 7 aa, synthetic construct
RGDEKRG

SEQ ID NO: 43149 - protein, 7 aa, synthetic construct
RGDENIN

SEQ ID NO: 43150 - protein, 7 aa, synthetic construct
RGDAFVG

SEQ ID NO: 43151 - protein, 7 aa, synthetic construct
RGDENVT

SEQ ID NO: 43152 - protein, 7 aa, synthetic construct
RGDEQDD

SEQ ID NO: 43153 - protein, 7 aa, synthetic construct
RGDERDR

SEQ ID NO: 43154 - protein, 7 aa, synthetic construct
RGDETES

SEQ ID NO: 43155 - protein, 7 aa, synthetic construct
RGDETIN

SEQ ID NO: 43156 - protein, 7 aa, synthetic construct
RGDEVTD

SEQ ID NO: 43157 - protein, 7 aa, synthetic construct
RGDFDAD

SEQ ID NO: 43158 - protein, 7 aa, synthetic construct
RGDAHDQ

SEQ ID NO: 43159 - protein, 7 aa, synthetic construct
RGDGDIG

SEQ ID NO: 43160 - protein, 7 aa, synthetic construct
RGDGDTA

SEQ ID NO: 43161 - protein, 7 aa, synthetic construct
RGDGQTG

SEQ ID NO: 43162 - protein, 7 aa, synthetic construct
RGDGTAN

SEQ ID NO: 43163 - protein, 7 aa, synthetic construct
RGDGTFD

SEQ ID NO: 43164 - protein, 7 aa, synthetic construct
RGDGTSS

SEQ ID NO: 43165 - protein, 7 aa, synthetic construct
RGDGVAD

SEQ ID NO: 43166 - protein, 7 aa, synthetic construct
RGDHFLE

SEQ ID NO: 43167 - protein, 7 aa, synthetic construct
RGDHFTH

SEQ ID NO: 43168 - protein, 7 aa, synthetic construct
RGDHFVE

SEQ ID NO: 43169 - protein, 7 aa, synthetic construct
RGDHGED

SEQ ID NO: 43170 - protein, 7 aa, synthetic construct
RGDHHIV

SEQ ID NO: 43171 - protein, 7 aa, synthetic construct
RGDHHVH

SEQ ID NO: 43172 - protein, 7 aa, synthetic construct
RGDHIVN

SEQ ID NO: 43173 - protein, 7 aa, synthetic construct
RGDHKAE

SEQ ID NO: 43174 - protein, 7 aa, synthetic construct
RGDHLLN

SEQ ID NO: 43175 - protein, 7 aa, synthetic construct
RGDHRIA

SEQ ID NO: 43176 - protein, 7 aa, synthetic construct
RGDHRLE

SEQ ID NO: 43177 - protein, 7 aa, synthetic construct
RGDHTDH

SEQ ID NO: 43178 - protein, 7 aa, synthetic construct
RGDHVLL

SEQ ID NO: 43179 - protein, 7 aa, synthetic construct
RGDHVRD

SEQ ID NO: 43180 - protein, 7 aa, synthetic construct
RGDANEN

SEQ ID NO: 43181 - protein, 7 aa, synthetic construct
RGDIFLG

SEQ ID NO: 43182 - protein, 7 aa, synthetic construct
RGDIGEL

SEQ ID NO: 43183 - protein, 7 aa, synthetic construct
RGDIKAA

SEQ ID NO: 43184 - protein, 7 aa, synthetic construct
RGDINVG

SEQ ID NO: 43185 - protein, 7 aa, synthetic construct
RGDAQEV

SEQ ID NO: 43186 - protein, 7 aa, synthetic construct
RGDITDD

SEQ ID NO: 43187 - protein, 7 aa, synthetic construct
RGDKHIG

SEQ ID NO: 43188 - protein, 7 aa, synthetic construct
RGDKLIF

SEQ ID NO: 43189 - protein, 7 aa, synthetic construct
RGDKSIG

SEQ ID NO: 43190 - protein, 7 aa, synthetic construct
RGDKVAE

SEQ ID NO: 43191 - protein, 7 aa, synthetic construct
RGDLASL

SEQ ID NO: 43192 - protein, 7 aa, synthetic construct
RGDLQDG

SEQ ID NO: 43193 - protein, 7 aa, synthetic construct
RGDLQHF

SEQ ID NO: 43194 - protein, 7 aa, synthetic construct
RGDNDID

SEQ ID NO: 43195 - protein, 7 aa, synthetic construct
RGDAVAG

SEQ ID NO: 43196 - protein, 7 aa, synthetic construct
RGDNHTN

SEQ ID NO: 43197 - protein, 7 aa, synthetic construct
RGDNIEH

SEQ ID NO: 43198 - protein, 7 aa, synthetic construct
RGDNIIE

SEQ ID NO: 43199 - protein, 7 aa, synthetic construct
RGDNKLS

SEQ ID NO: 43200 - protein, 7 aa, synthetic construct
RGDNNLH

SEQ ID NO: 43201 - protein, 7 aa, synthetic construct
RGDNRVA

SEQ ID NO: 43202 - protein, 7 aa, synthetic construct
RGDNVQA

SEQ ID NO: 43203 - protein, 7 aa, synthetic construct
RGDNVSA

SEQ ID NO: 43204 - protein, 7 aa, synthetic construct
RGDQEGN

SEQ ID NO: 43205 - protein, 7 aa, synthetic construct
RGDQFLF

SEQ ID NO: 43206 - protein, 7 aa, synthetic construct
RGDADLA

SEQ ID NO: 43207 - protein, 7 aa, synthetic construct
RGDQNAA

SEQ ID NO: 43208 - protein, 7 aa, synthetic construct
RGDQQVA

SEQ ID NO: 43209 - protein, 7 aa, synthetic construct
RGDQSVD

SEQ ID NO: 43210 - protein, 7 aa, synthetic construct
RGDRESD

SEQ ID NO: 43211 - protein, 7 aa, synthetic construct
RGDRFVG

SEQ ID NO: 43212 - protein, 7 aa, synthetic construct
RGDSDIL

SEQ ID NO: 43213 - protein, 7 aa, synthetic construct
RGDSEIS

SEQ ID NO: 43214 - protein, 7 aa, synthetic construct
RGDSIIA

SEQ ID NO: 43215 - protein, 7 aa, synthetic construct
RGDSILE

SEQ ID NO: 43216 - protein, 7 aa, synthetic construct
RGDDFSN

SEQ ID NO: 43217 - protein, 7 aa, synthetic construct
RGDSTLH

SEQ ID NO: 43218 - protein, 7 aa, synthetic construct
RGDSTNE

SEQ ID NO: 43219 - protein, 7 aa, synthetic construct
RGDSVID

SEQ ID NO: 43220 - protein, 7 aa, synthetic construct
RGDTDDK

SEQ ID NO: 43221 - protein, 7 aa, synthetic construct
RGDTDER

SEQ ID NO: 43222 - protein, 7 aa, synthetic construct
RGDTDRG

SEQ ID NO: 43223 - protein, 7 aa, synthetic construct
RGDTDSR

SEQ ID NO: 43224 - protein, 7 aa, synthetic construct
RGDTGGE

SEQ ID NO: 43225 - protein, 7 aa, synthetic construct
RGDDHIE

SEQ ID NO: 43226 - protein, 7 aa, synthetic construct
RGDTNEK

SEQ ID NO: 43227 - protein, 7 aa, synthetic construct
RGDTTEF

SEQ ID NO: 43228 - protein, 7 aa, synthetic construct
RGDTTGE

SEQ ID NO: 43229 - protein, 7 aa, synthetic construct
RGDVADA

SEQ ID NO: 43230 - protein, 7 aa, synthetic construct
RGDVDQL

SEQ ID NO: 43231 - protein, 7 aa, synthetic construct
RGDVEEV

SEQ ID NO: 43232 - protein, 7 aa, synthetic construct
RGDDIIF

SEQ ID NO: 43233 - protein, 7 aa, synthetic construct
RGDDIQE

SEQ ID NO: 43234 - protein, 7 aa, synthetic construct
RGDDNIE

SEQ ID NO: 43235 - protein, 7 aa, synthetic construct
RGDDQTG

SEQ ID NO: 43236 - protein, 7 aa, synthetic construct
RGDDSLH

SEQ ID NO: 43237 - protein, 7 aa, synthetic construct
RGDDTEV

SEQ ID NO: 43238 - protein, 7 aa, synthetic construct
RGDEHVA

SEQ ID NO: 43239 - protein, 7 aa, synthetic construct
RGDEKIG

SEQ ID NO: 43240 - protein, 7 aa, synthetic construct
RGDENGG

SEQ ID NO: 43241 - protein, 7 aa, synthetic construct
RGDENLD

SEQ ID NO: 43242 - protein, 7 aa, synthetic construct
RGDENSK

SEQ ID NO: 43243 - protein, 7 aa, synthetic construct
RGDEQGS

SEQ ID NO: 43244 - protein, 7 aa, synthetic construct
RGDERDG

SEQ ID NO: 43245 - protein, 7 aa, synthetic construct
RGDETAQ

SEQ ID NO: 43246 - protein, 7 aa, synthetic construct
RGDETDE

SEQ ID NO: 43247 - protein, 7 aa, synthetic construct
RGDETIE

SEQ ID NO: 43248 - protein, 7 aa, synthetic construct
RGDETLI

SEQ ID NO: 43249 - protein, 7 aa, synthetic construct
RGDEVEA

SEQ ID NO: 43250 - protein, 7 aa, synthetic construct
RGDEVKG

SEQ ID NO: 43251 - protein, 7 aa, synthetic construct
RGDFDGQ

SEQ ID NO: 43252 - protein, 7 aa, synthetic construct
RGDAHFD

SEQ ID NO: 43253 - protein, 7 aa, synthetic construct
RGDAAND

SEQ ID NO: 43254 - protein, 7 aa, synthetic construct
RGDGDLE

SEQ ID NO: 43255 - protein, 7 aa, synthetic construct
RGDGDRG

SEQ ID NO: 43256 - protein, 7 aa, synthetic construct
RGDGESG

SEQ ID NO: 43257 - protein, 7 aa, synthetic construct
RGDAILQ

SEQ ID NO: 43258 - protein, 7 aa, synthetic construct
RGDHELA

SEQ ID NO: 43259 - protein, 7 aa, synthetic construct
RGDHFDE

SEQ ID NO: 43260 - protein, 7 aa, synthetic construct
RGDHHEE

SEQ ID NO: 43261 - protein, 7 aa, synthetic construct
RGDHLIA

SEQ ID NO: 43262 - protein, 7 aa, synthetic construct
RGDHQIF

SEQ ID NO: 43263 - protein, 7 aa, synthetic construct
RGDHRLL

SEQ ID NO: 43264 - protein, 7 aa, synthetic construct
RGDIFDA

SEQ ID NO: 43265 - protein, 7 aa, synthetic construct
RGDIFNN

SEQ ID NO: 43266 - protein, 7 aa, synthetic construct
RGDIFTH

SEQ ID NO: 43267 - protein, 7 aa, synthetic construct
RGDIHTD

SEQ ID NO: 43268 - protein, 7 aa, synthetic construct
RGDKADD

SEQ ID NO: 43269 - protein, 7 aa, synthetic construct
RGDKAIA

SEQ ID NO: 43270 - protein, 7 aa, synthetic construct
RGDKEID

SEQ ID NO: 43271 - protein, 7 aa, synthetic construct
RGDKEQD

SEQ ID NO: 43272 - protein, 7 aa, synthetic construct
RGDKFAG

SEQ ID NO: 43273 - protein, 7 aa, synthetic construct
RGDKFED

SEQ ID NO: 43274 - protein, 7 aa, synthetic construct
RGDKIAE

SEQ ID NO: 43275 - protein, 7 aa, synthetic construct
RGDKIGE

SEQ ID NO: 43276 - protein, 7 aa, synthetic construct
RGDLDIE

SEQ ID NO: 43277 - protein, 7 aa, synthetic construct
RGDLDVD

SEQ ID NO: 43278 - protein, 7 aa, synthetic construct
RGDLFDH

SEQ ID NO: 43279 - protein, 7 aa, synthetic construct
RGDLKDL

SEQ ID NO: 43280 - protein, 7 aa, synthetic construct
RGDNHEQ

SEQ ID NO: 43281 - protein, 7 aa, synthetic construct
RGDNKAD

SEQ ID NO: 43282 - protein, 7 aa, synthetic construct
RGDNNTA

SEQ ID NO: 43283 - protein, 7 aa, synthetic construct
RGDNVQD

SEQ ID NO: 43284 - protein, 7 aa, synthetic construct
RGDQHAA

SEQ ID NO: 43285 - protein, 7 aa, synthetic construct
RGDQHAD

SEQ ID NO: 43286 - protein, 7 aa, synthetic construct
RGDDDIG

SEQ ID NO: 43287 - protein, 7 aa, synthetic construct
RGDDEVG

SEQ ID NO: 43288 - protein, 7 aa, synthetic construct
RGDSFLK

SEQ ID NO: 43289 - protein, 7 aa, synthetic construct
RGDSHLH

SEQ ID NO: 43290 - protein, 7 aa, synthetic construct
RGDDFLN

SEQ ID NO: 43291 - protein, 7 aa, synthetic construct
RGDDFQI

SEQ ID NO: 43292 - protein, 7 aa, synthetic construct
RGDSQEE

SEQ ID NO: 43293 - protein, 7 aa, synthetic construct
RGDTAGD

SEQ ID NO: 43294 - protein, 7 aa, synthetic construct
RGDTFSR

SEQ ID NO: 43295 - protein, 7 aa, synthetic construct
RGDTFVH

SEQ ID NO: 43296 - protein, 7 aa, synthetic construct
RGDTGVD

SEQ ID NO: 43297 - protein, 7 aa, synthetic construct
RGDTNDG

SEQ ID NO: 43298 - protein, 7 aa, synthetic construct
RGDTNDI

SEQ ID NO: 43299 - protein, 7 aa, synthetic construct
RGDTNDT

SEQ ID NO: 43300 - protein, 7 aa, synthetic construct
RGDTTQA

SEQ ID NO: 43301 - protein, 7 aa, synthetic construct
RGDDHVK

SEQ ID NO: 43302 - protein, 7 aa, synthetic construct
RGDVAVE

SEQ ID NO: 43303 - protein, 7 aa, synthetic construct
RGDDIGG

SEQ ID NO: 43304 - protein, 7 aa, synthetic construct
RGDVFAF

SEQ ID NO: 43305 - protein, 7 aa, synthetic construct
RGDVFAN

SEQ ID NO: 43306 - protein, 7 aa, synthetic construct
RGDVFEI

SEQ ID NO: 43307 - protein, 7 aa, synthetic construct
RGDDISK

SEQ ID NO: 43308 - protein, 7 aa, synthetic construct
RGDVVED

SEQ ID NO: 43309 - protein, 7 aa, synthetic construct
RGDDLSH

SEQ ID NO: 43310 - protein, 7 aa, synthetic construct
RGDDNTA

SEQ ID NO: 43311 - protein, 7 aa, synthetic construct
RGDDRSD

SEQ ID NO: 43312 - protein, 7 aa, synthetic construct
RGDAEQG

SEQ ID NO: 43313 - protein, 7 aa, synthetic construct
RGDDTDF

SEQ ID NO: 43314 - protein, 7 aa, synthetic construct
RGDDVQV

SEQ ID NO: 43315 - protein, 7 aa, synthetic construct
RGDAFHA

SEQ ID NO: 43316 - protein, 7 aa, synthetic construct
RGDEHIG

SEQ ID NO: 43317 - protein, 7 aa, synthetic construct
RGDEKQD

SEQ ID NO: 43318 - protein, 7 aa, synthetic construct
RGDAGDL

SEQ ID NO: 43319 - protein, 7 aa, synthetic construct
RGDERLD

SEQ ID NO: 43320 - protein, 7 aa, synthetic construct
RGDETEN

SEQ ID NO: 43321 - protein, 7 aa, synthetic construct
RGDETQG

SEQ ID NO: 43322 - protein, 7 aa, synthetic construct
RGDFDEN

SEQ ID NO: 43323 - protein, 7 aa, synthetic construct
RGDFHLG

SEQ ID NO: 43324 - protein, 7 aa, synthetic construct
RGDFQIE

SEQ ID NO: 43325 - protein, 7 aa, synthetic construct
RGDFTTD

SEQ ID NO: 43326 - protein, 7 aa, synthetic construct
RGDAIDG

SEQ ID NO: 43327 - protein, 7 aa, synthetic construct
RGDGEFQ

SEQ ID NO: 43328 - protein, 7 aa, synthetic construct
RGDGFIS

SEQ ID NO: 43329 - protein, 7 aa, synthetic construct
RGDAIKG

SEQ ID NO: 43330 - protein, 7 aa, synthetic construct
RGDAILD

SEQ ID NO: 43331 - protein, 7 aa, synthetic construct
RGDGHQG

SEQ ID NO: 43332 - protein, 7 aa, synthetic construct
RGDGIEA

SEQ ID NO: 43333 - protein, 7 aa, synthetic construct
RGDAISG

SEQ ID NO: 43334 - protein, 7 aa, synthetic construct
RGDGLSD

SEQ ID NO: 43335 - protein, 7 aa, synthetic construct
RGDHAID

SEQ ID NO: 43336 - protein, 7 aa, synthetic construct
RGDHDEE

SEQ ID NO: 43337 - protein, 7 aa, synthetic construct
RGDHDES

SEQ ID NO: 43338 - protein, 7 aa, synthetic construct
RGDHDEV

SEQ ID NO: 43339 - protein, 7 aa, synthetic construct
RGDHFDV

SEQ ID NO: 43340 - protein, 7 aa, synthetic construct
RGDHFTD

SEQ ID NO: 43341 - protein, 7 aa, synthetic construct
RGDHHFG

SEQ ID NO: 43342 - protein, 7 aa, synthetic construct
RGDHHLH

SEQ ID NO: 43343 - protein, 7 aa, synthetic construct
RGDHIFH

SEQ ID NO: 43344 - protein, 7 aa, synthetic construct
RGDHLIG

SEQ ID NO: 43345 - protein, 7 aa, synthetic construct
RGDHRIQ

SEQ ID NO: 43346 - protein, 7 aa, synthetic construct
RGDIFDN

SEQ ID NO: 43347 - protein, 7 aa, synthetic construct
RGDIGNE

SEQ ID NO: 43348 - protein, 7 aa, synthetic construct
RGDINES

SEQ ID NO: 43349 - protein, 7 aa, synthetic construct
RGDISGD

SEQ ID NO: 43350 - protein, 7 aa, synthetic construct
RGDKIKD

SEQ ID NO: 43351 - protein, 7 aa, synthetic construct
RGDADEH

SEQ ID NO: 43352 - protein, 7 aa, synthetic construct
RGDKREG

SEQ ID NO: 43353 - protein, 7 aa, synthetic construct
RGDKTLA

SEQ ID NO: 43354 - protein, 7 aa, synthetic construct
RGDLGNF

SEQ ID NO: 43355 - protein, 7 aa, synthetic construct
RGDASSD

SEQ ID NO: 43356 - protein, 7 aa, synthetic construct
RGDLTEF

SEQ ID NO: 43357 - protein, 7 aa, synthetic construct
RGDNADL

SEQ ID NO: 43358 - protein, 7 aa, synthetic construct
RGDNELF

SEQ ID NO: 43359 - protein, 7 aa, synthetic construct
RGDNFLN

SEQ ID NO: 43360 - protein, 7 aa, synthetic construct
RGDNHVG

SEQ ID NO: 43361 - protein, 7 aa, synthetic construct
RGDNIFN

SEQ ID NO: 43362 - protein, 7 aa, synthetic construct
RGDAVDV

SEQ ID NO: 43363 - protein, 7 aa, synthetic construct
RGDNLVN

SEQ ID NO: 43364 - protein, 7 aa, synthetic construct
RGDNNIG

SEQ ID NO: 43365 - protein, 7 aa, synthetic construct
RGDNQIF

SEQ ID NO: 43366 - protein, 7 aa, synthetic construct
RGDDAAV

SEQ ID NO: 43367 - protein, 7 aa, synthetic construct
RGDQLTE

SEQ ID NO: 43368 - protein, 7 aa, synthetic construct
RGDQQID

SEQ ID NO: 43369 - protein, 7 aa, synthetic construct
RGDDEFD

SEQ ID NO: 43370 - protein, 7 aa, synthetic construct
RGDRQID

SEQ ID NO: 43371 - protein, 7 aa, synthetic construct
RGDSHDE

SEQ ID NO: 43372 - protein, 7 aa, synthetic construct
RGDADSS

SEQ ID NO: 43373 - protein, 7 aa, synthetic construct
RGDDGDH

SEQ ID NO: 43374 - protein, 7 aa, synthetic construct
RGDSVAA

SEQ ID NO: 43375 - protein, 7 aa, synthetic construct
RGDTDGQ

SEQ ID NO: 43376 - protein, 7 aa, synthetic construct
RGDTDSN

SEQ ID NO: 43377 - protein, 7 aa, synthetic construct
RGDTDTH

SEQ ID NO: 43378 - protein, 7 aa, synthetic construct
RGDTFDE

SEQ ID NO: 43379 - protein, 7 aa, synthetic construct
RGDTFQD

SEQ ID NO: 43380 - protein, 7 aa, synthetic construct
RGDTGEF

SEQ ID NO: 43381 - protein, 7 aa, synthetic construct
RGDTLEI

SEQ ID NO: 43382 - protein, 7 aa, synthetic construct
RGDVAQE

SEQ ID NO: 43383 - protein, 7 aa, synthetic construct
RGDDIFE

SEQ ID NO: 43384 - protein, 7 aa, synthetic construct
RGDVHDA

SEQ ID NO: 43385 - protein, 7 aa, synthetic construct
RGDDIRH

SEQ ID NO: 43386 - protein, 7 aa, synthetic construct
RGDDIVR

SEQ ID NO: 43387 - protein, 7 aa, synthetic construct
RGDDKDN

SEQ ID NO: 43388 - protein, 7 aa, synthetic construct
RGDDQEF

SEQ ID NO: 43389 - protein, 7 aa, synthetic construct
RGDDQEI

SEQ ID NO: 43390 - protein, 7 aa, synthetic construct
RGDDQIA

SEQ ID NO: 43391 - protein, 7 aa, synthetic construct
RGDDSAG

SEQ ID NO: 43392 - protein, 7 aa, synthetic construct
RGDDTHF

SEQ ID NO: 43393 - protein, 7 aa, synthetic construct
RGDDVDA

SEQ ID NO: 43394 - protein, 7 aa, synthetic construct
RGDDVIN

SEQ ID NO: 43395 - protein, 7 aa, synthetic construct
RGDEAGA

SEQ ID NO: 43396 - protein, 7 aa, synthetic construct
RGDEDER

SEQ ID NO: 43397 - protein, 7 aa, synthetic construct
RGDAFGS

SEQ ID NO: 43398 - protein, 7 aa, synthetic construct
RGDEFLN

SEQ ID NO: 43399 - protein, 7 aa, synthetic construct
RGDEFQN

SEQ ID NO: 43400 - protein, 7 aa, synthetic construct
RGDEIET

SEQ ID NO: 43401 - protein, 7 aa, synthetic construct
RGDESVN

SEQ ID NO: 43402 - protein, 7 aa, synthetic construct
RGDEVAS

SEQ ID NO: 43403 - protein, 7 aa, synthetic construct
RGDFNID

SEQ ID NO: 43404 - protein, 7 aa, synthetic construct
RGDGADN

SEQ ID NO: 43405 - protein, 7 aa, synthetic construct
RGDAIAS

SEQ ID NO: 43406 - protein, 7 aa, synthetic construct
RGDGDFA

SEQ ID NO: 43407 - protein, 7 aa, synthetic construct
RGDGEAA

SEQ ID NO: 43408 - protein, 7 aa, synthetic construct
RGDGEEI

SEQ ID NO: 43409 - protein, 7 aa, synthetic construct
RGDGHIQ

SEQ ID NO: 43410 - protein, 7 aa, synthetic construct
RGDGLDV

SEQ ID NO: 43411 - protein, 7 aa, synthetic construct
RGDGSIA

SEQ ID NO: 43412 - protein, 7 aa, synthetic construct
RGDHFLA

SEQ ID NO: 43413 - protein, 7 aa, synthetic construct
RGDHFTS

SEQ ID NO: 43414 - protein, 7 aa, synthetic construct
RGDHISS

SEQ ID NO: 43415 - protein, 7 aa, synthetic construct
RGDHLVQ

SEQ ID NO: 43416 - protein, 7 aa, synthetic construct
RGDHRIN

SEQ ID NO: 43417 - protein, 7 aa, synthetic construct
RGDIDDL

SEQ ID NO: 43418 - protein, 7 aa, synthetic construct
RGDIGQG

SEQ ID NO: 43419 - protein, 7 aa, synthetic construct
RGDIIAA

SEQ ID NO: 43420 - protein, 7 aa, synthetic construct
RGDANVQ

SEQ ID NO: 43421 - protein, 7 aa, synthetic construct
RGDITDF

SEQ ID NO: 43422 - protein, 7 aa, synthetic construct
RGDIVQE

SEQ ID NO: 43423 - protein, 7 aa, synthetic construct
RGDKAID

SEQ ID NO: 43424 - protein, 7 aa, synthetic construct
RGDAQVA

SEQ ID NO: 43425 - protein, 7 aa, synthetic construct
RGDKHLD

SEQ ID NO: 43426 - protein, 7 aa, synthetic construct
RGDLALL

SEQ ID NO: 43427 - protein, 7 aa, synthetic construct
RGDATVQ

SEQ ID NO: 43428 - protein, 7 aa, synthetic construct
RGDNIQH

SEQ ID NO: 43429 - protein, 7 aa, synthetic construct
RGDNIVE

SEQ ID NO: 43430 - protein, 7 aa, synthetic construct
RGDNQLD

SEQ ID NO: 43431 - protein, 7 aa, synthetic construct
RGDAVLQ

SEQ ID NO: 43432 - protein, 7 aa, synthetic construct
RGDNSAD

SEQ ID NO: 43433 - protein, 7 aa, synthetic construct
RGDAVVE

SEQ ID NO: 43434 - protein, 7 aa, synthetic construct
RGDQDSE

SEQ ID NO: 43435 - protein, 7 aa, synthetic construct
RGDQTLL

SEQ ID NO: 43436 - protein, 7 aa, synthetic construct
RGDDDSA

SEQ ID NO: 43437 - protein, 7 aa, synthetic construct
RGDDEAQ

SEQ ID NO: 43438 - protein, 7 aa, synthetic construct
RGDDEGV

SEQ ID NO: 43439 - protein, 7 aa, synthetic construct
RGDDFAQ

SEQ ID NO: 43440 - protein, 7 aa, synthetic construct
RGDSDAT

SEQ ID NO: 43441 - protein, 7 aa, synthetic construct
RGDSFEE

SEQ ID NO: 43442 - protein, 7 aa, synthetic construct
RGDSLQD

SEQ ID NO: 43443 - protein, 7 aa, synthetic construct
RGDSQRA

SEQ ID NO: 43444 - protein, 7 aa, synthetic construct
RGDDGEA

SEQ ID NO: 43445 - protein, 7 aa, synthetic construct
RGDSSIG

SEQ ID NO: 43446 - protein, 7 aa, synthetic construct
RGDSTLN

SEQ ID NO: 43447 - protein, 7 aa, synthetic construct
RGDTADE

SEQ ID NO: 43448 - protein, 7 aa, synthetic construct
RGDTASG

SEQ ID NO: 43449 - protein, 7 aa, synthetic construct
RGDTAVN

SEQ ID NO: 43450 - protein, 7 aa, synthetic construct
RGDTDDR

SEQ ID NO: 43451 - protein, 7 aa, synthetic construct
RGDTDGT

SEQ ID NO: 43452 - protein, 7 aa, synthetic construct
RGDTDKD

SEQ ID NO: 43453 - protein, 7 aa, synthetic construct
RGDTDRD

SEQ ID NO: 43454 - protein, 7 aa, synthetic construct
RGDTFGF

SEQ ID NO: 43455 - protein, 7 aa, synthetic construct
RGDTIDN

SEQ ID NO: 43456 - protein, 7 aa, synthetic construct
RGDTIKQ

SEQ ID NO: 43457 - protein, 7 aa, synthetic construct
RGDTIKT

SEQ ID NO: 43458 - protein, 7 aa, synthetic construct
RGDTNGA

SEQ ID NO: 43459 - protein, 7 aa, synthetic construct
RGDTNSQ

SEQ ID NO: 43460 - protein, 7 aa, synthetic construct
RGDVDKA

SEQ ID NO: 43461 - protein, 7 aa, synthetic construct
RGDVGID

SEQ ID NO: 43462 - protein, 7 aa, synthetic construct
RGDVIDE

SEQ ID NO: 43463 - protein, 7 aa, synthetic construct
RGDVLLG

SEQ ID NO: 43464 - protein, 7 aa, synthetic construct
RGDVVAE

SEQ ID NO: 43465 - protein, 7 aa, synthetic construct
RGDDKVA

SEQ ID NO: 43466 - protein, 7 aa, synthetic construct
RGDDLVD

SEQ ID NO: 43467 - protein, 7 aa, synthetic construct
RGDDNIF

SEQ ID NO: 43468 - protein, 7 aa, synthetic construct
RGDDNIG

SEQ ID NO: 43469 - protein, 7 aa, synthetic construct
RGDDNNQ

SEQ ID NO: 43470 - protein, 7 aa, synthetic construct
RGDDNQG

SEQ ID NO: 43471 - protein, 7 aa, synthetic construct
RGDDTLL

SEQ ID NO: 43472 - protein, 7 aa, synthetic construct
RGDDVLQ

SEQ ID NO: 43473 - protein, 7 aa, synthetic construct
RGDEDFD

SEQ ID NO: 43474 - protein, 7 aa, synthetic construct
RGDEDGS

SEQ ID NO: 43475 - protein, 7 aa, synthetic construct
RGDAFGD

SEQ ID NO: 43476 - protein, 7 aa, synthetic construct
RGDEFLA

SEQ ID NO: 43477 - protein, 7 aa, synthetic construct
RGDEFTA

SEQ ID NO: 43478 - protein, 7 aa, synthetic construct
RGDEGHE

SEQ ID NO: 43479 - protein, 7 aa, synthetic construct
RGDEILS

SEQ ID NO: 43480 - protein, 7 aa, synthetic construct
RGDENID

SEQ ID NO: 43481 - protein, 7 aa, synthetic construct
RGDEQGV

SEQ ID NO: 43482 - protein, 7 aa, synthetic construct
RGDFVLA

SEQ ID NO: 43483 - protein, 7 aa, synthetic construct
RGDGITA

SEQ ID NO: 43484 - protein, 7 aa, synthetic construct
RGDAITA

SEQ ID NO: 43485 - protein, 7 aa, synthetic construct
RGDHEIG

SEQ ID NO: 43486 - protein, 7 aa, synthetic construct
RGDHFSD

SEQ ID NO: 43487 - protein, 7 aa, synthetic construct
RGDHIIE

SEQ ID NO: 43488 - protein, 7 aa, synthetic construct
RGDHLEA

SEQ ID NO: 43489 - protein, 7 aa, synthetic construct
RGDHNIN

SEQ ID NO: 43490 - protein, 7 aa, synthetic construct
RGDHTLA

SEQ ID NO: 43491 - protein, 7 aa, synthetic construct
RGDHVIQ

SEQ ID NO: 43492 - protein, 7 aa, synthetic construct
RGDANDF

SEQ ID NO: 43493 - protein, 7 aa, synthetic construct
RGDIDRD

SEQ ID NO: 43494 - protein, 7 aa, synthetic construct
RGDIFDH

SEQ ID NO: 43495 - protein, 7 aa, synthetic construct
RGDIFED

SEQ ID NO: 43496 - protein, 7 aa, synthetic construct
RGDIHEA

SEQ ID NO: 43497 - protein, 7 aa, synthetic construct
RGDIQEN

SEQ ID NO: 43498 - protein, 7 aa, synthetic construct
RGDKAVG

SEQ ID NO: 43499 - protein, 7 aa, synthetic construct
RGDKVDG

SEQ ID NO: 43500 - protein, 7 aa, synthetic construct
RGDKVLA

SEQ ID NO: 43501 - protein, 7 aa, synthetic construct
RGDADEV

SEQ ID NO: 43502 - protein, 7 aa, synthetic construct
RGDLSTL

SEQ ID NO: 43503 - protein, 7 aa, synthetic construct
RGDAVDF

SEQ ID NO: 43504 - protein, 7 aa, synthetic construct
RGDQEAN

SEQ ID NO: 43505 - protein, 7 aa, synthetic construct
RGDQIFA

SEQ ID NO: 43506 - protein, 7 aa, synthetic construct
RGDRFDE

SEQ ID NO: 43507 - protein, 7 aa, synthetic construct
RGDTGEA

SEQ ID NO: 43508 - protein, 7 aa, synthetic construct
RGDTHAE

SEQ ID NO: 43509 - protein, 7 aa, synthetic construct
RGDTHLN

SEQ ID NO: 43510 - protein, 7 aa, synthetic construct
RGDTHVD

SEQ ID NO: 43511 - protein, 7 aa, synthetic construct
RGDDHDL

SEQ ID NO: 43512 - protein, 7 aa, synthetic construct
RGDTIIT

SEQ ID NO: 43513 - protein, 7 aa, synthetic construct
RGDTQGD

SEQ ID NO: 43514 - protein, 7 aa, synthetic construct
RGDDHLN

SEQ ID NO: 43515 - protein, 7 aa, synthetic construct
RGDTQVD

SEQ ID NO: 43516 - protein, 7 aa, synthetic construct
RGDTQVE

SEQ ID NO: 43517 - protein, 7 aa, synthetic construct
RGDDIFS

SEQ ID NO: 43518 - protein, 7 aa, synthetic construct
RGDVFAT

SEQ ID NO: 43519 - protein, 7 aa, synthetic construct
RGDDILF

SEQ ID NO: 43520 - protein, 7 aa, synthetic construct
RGDVQFG

SEQ ID NO: 43521 - protein, 7 aa, synthetic construct
RGDVTDL

SEQ ID NO: 43522 - protein, 7 aa, synthetic construct
RGDDKLF

SEQ ID NO: 43523 - protein, 7 aa, synthetic construct
RGDDKTE

SEQ ID NO: 43524 - protein, 7 aa, synthetic construct
RGDDKVS

SEQ ID NO: 43525 - protein, 7 aa, synthetic construct
RGDAENQ

SEQ ID NO: 43526 - protein, 7 aa, synthetic construct
RGDDRLD

SEQ ID NO: 43527 - protein, 7 aa, synthetic construct
RGDAERD

SEQ ID NO: 43528 - protein, 7 aa, synthetic construct
RGDDTIN

SEQ ID NO: 43529 - protein, 7 aa, synthetic construct
RGDDVIG

SEQ ID NO: 43530 - protein, 7 aa, synthetic construct
RGDEDNA

SEQ ID NO: 43531 - protein, 7 aa, synthetic construct
RGDAFIN

SEQ ID NO: 43532 - protein, 7 aa, synthetic construct
RGDAFLQ

SEQ ID NO: 43533 - protein, 7 aa, synthetic construct
RGDEHVN

SEQ ID NO: 43534 - protein, 7 aa, synthetic construct
RGDEIIH

SEQ ID NO: 43535 - protein, 7 aa, synthetic construct
RGDEKER

SEQ ID NO: 43536 - protein, 7 aa, synthetic construct
RGDEQEL

SEQ ID NO: 43537 - protein, 7 aa, synthetic construct
RGDERID

SEQ ID NO: 43538 - protein, 7 aa, synthetic construct
RGDESDL

SEQ ID NO: 43539 - protein, 7 aa, synthetic construct
RGDETDT

SEQ ID NO: 43540 - protein, 7 aa, synthetic construct
RGDEVLG

SEQ ID NO: 43541 - protein, 7 aa, synthetic construct
RGDAHEG

SEQ ID NO: 43542 - protein, 7 aa, synthetic construct
RGDFNVA

SEQ ID NO: 43543 - protein, 7 aa, synthetic construct
RGDGTIE

SEQ ID NO: 43544 - protein, 7 aa, synthetic construct
RGDAKIN

SEQ ID NO: 43545 - protein, 7 aa, synthetic construct
RGDHQLT

SEQ ID NO: 43546 - protein, 7 aa, synthetic construct
RGDHTEI

SEQ ID NO: 43547 - protein, 7 aa, synthetic construct
RGDIDFE

SEQ ID NO: 43548 - protein, 7 aa, synthetic construct
RGDIEDQ

SEQ ID NO: 43549 - protein, 7 aa, synthetic construct
RGDIGDI

SEQ ID NO: 43550 - protein, 7 aa, synthetic construct
RGDIQAE

SEQ ID NO: 43551 - protein, 7 aa, synthetic construct
RGDAQLT

SEQ ID NO: 43552 - protein, 7 aa, synthetic construct
RGDKFLD

SEQ ID NO: 43553 - protein, 7 aa, synthetic construct
RGDKVID

SEQ ID NO: 43554 - protein, 7 aa, synthetic construct
RGDLDES

SEQ ID NO: 43555 - protein, 7 aa, synthetic construct
RGDADGA

SEQ ID NO: 43556 - protein, 7 aa, synthetic construct
RGDLQLD

SEQ ID NO: 43557 - protein, 7 aa, synthetic construct
RGDLTIE

SEQ ID NO: 43558 - protein, 7 aa, synthetic construct
RGDNEEF

SEQ ID NO: 43559 - protein, 7 aa, synthetic construct
RGDNFHH

SEQ ID NO: 43560 - protein, 7 aa, synthetic construct
RGDADIG

SEQ ID NO: 43561 - protein, 7 aa, synthetic construct
RGDNNIS

SEQ ID NO: 43562 - protein, 7 aa, synthetic construct
RGDNNTT

SEQ ID NO: 43563 - protein, 7 aa, synthetic construct
RGDNVIT

SEQ ID NO: 43564 - protein, 7 aa, synthetic construct
RGDDAEG

SEQ ID NO: 43565 - protein, 7 aa, synthetic construct
RGDQEAE

SEQ ID NO: 43566 - protein, 7 aa, synthetic construct
RGDQFFA

SEQ ID NO: 43567 - protein, 7 aa, synthetic construct
RGDQLLE

SEQ ID NO: 43568 - protein, 7 aa, synthetic construct
RGDQVIN

SEQ ID NO: 43569 - protein, 7 aa, synthetic construct
RGDDGEV

SEQ ID NO: 43570 - protein, 7 aa, synthetic construct
RGDSSIS

SEQ ID NO: 43571 - protein, 7 aa, synthetic construct
RGDSVQE

SEQ ID NO: 43572 - protein, 7 aa, synthetic construct
RGDTADI

SEQ ID NO: 43573 - protein, 7 aa, synthetic construct
RGDTDIE

SEQ ID NO: 43574 - protein, 7 aa, synthetic construct
RGDTEAA

SEQ ID NO: 43575 - protein, 7 aa, synthetic construct
RGDTEIS

SEQ ID NO: 43576 - protein, 7 aa, synthetic construct
RGDTFDT

SEQ ID NO: 43577 - protein, 7 aa, synthetic construct
RGDTNEQ

SEQ ID NO: 43578 - protein, 7 aa, synthetic construct
RGDTNQG

SEQ ID NO: 43579 - protein, 7 aa, synthetic construct
RGDTSEA

SEQ ID NO: 43580 - protein, 7 aa, synthetic construct
RGDTSTE

SEQ ID NO: 43581 - protein, 7 aa, synthetic construct
RGDTTVN

SEQ ID NO: 43582 - protein, 7 aa, synthetic construct
RGDVDDS

SEQ ID NO: 43583 - protein, 7 aa, synthetic construct
RGDVDEH

SEQ ID NO: 43584 - protein, 7 aa, synthetic construct
RGDVNIE

SEQ ID NO: 43585 - protein, 7 aa, synthetic construct
RGDVVDD

SEQ ID NO: 43586 - protein, 7 aa, synthetic construct
RGDDKLD

SEQ ID NO: 43587 - protein, 7 aa, synthetic construct
RGDAEGG

SEQ ID NO: 43588 - protein, 7 aa, synthetic construct
RGDDQRQ

SEQ ID NO: 43589 - protein, 7 aa, synthetic construct
RGDDRFG

SEQ ID NO: 43590 - protein, 7 aa, synthetic construct
RGDDRLA

SEQ ID NO: 43591 - protein, 7 aa, synthetic construct
RGDDTID

SEQ ID NO: 43592 - protein, 7 aa, synthetic construct
RGDAETS

SEQ ID NO: 43593 - protein, 7 aa, synthetic construct
RGDAFDG

SEQ ID NO: 43594 - protein, 7 aa, synthetic construct
RGDEFFA

SEQ ID NO: 43595 - protein, 7 aa, synthetic construct
RGDEGAK

SEQ ID NO: 43596 - protein, 7 aa, synthetic construct
RGDELIG

SEQ ID NO: 43597 - protein, 7 aa, synthetic construct
RGDENQA

SEQ ID NO: 43598 - protein, 7 aa, synthetic construct
RGDAAID

SEQ ID NO: 43599 - protein, 7 aa, synthetic construct
RGDERVG

SEQ ID NO: 43600 - protein, 7 aa, synthetic construct
RGDESAD

SEQ ID NO: 43601 - protein, 7 aa, synthetic construct
RGDESND

SEQ ID NO: 43602 - protein, 7 aa, synthetic construct
RGDFDIH

SEQ ID NO: 43603 - protein, 7 aa, synthetic construct
RGDGELE

SEQ ID NO: 43604 - protein, 7 aa, synthetic construct
RGDGHTG

SEQ ID NO: 43605 - protein, 7 aa, synthetic construct
RGDGNDG

SEQ ID NO: 43606 - protein, 7 aa, synthetic construct
RGDGVIE

SEQ ID NO: 43607 - protein, 7 aa, synthetic construct
RGDHDQD

SEQ ID NO: 43608 - protein, 7 aa, synthetic construct
RGDHEAE

SEQ ID NO: 43609 - protein, 7 aa, synthetic construct
RGDHEDT

SEQ ID NO: 43610 - protein, 7 aa, synthetic construct
RGDHFLD

SEQ ID NO: 43611 - protein, 7 aa, synthetic construct
RGDHHVA

SEQ ID NO: 43612 - protein, 7 aa, synthetic construct
RGDHLIR

SEQ ID NO: 43613 - protein, 7 aa, synthetic construct
RGDHLRG

SEQ ID NO: 43614 - protein, 7 aa, synthetic construct
RGDHQIN

SEQ ID NO: 43615 - protein, 7 aa, synthetic construct
RGDALNH

SEQ ID NO: 43616 - protein, 7 aa, synthetic construct
RGDHVLQ

SEQ ID NO: 43617 - protein, 7 aa, synthetic construct
RGDIDLH

SEQ ID NO: 43618 - protein, 7 aa, synthetic construct
RGDIEIA

SEQ ID NO: 43619 - protein, 7 aa, synthetic construct
RGDKHIF

SEQ ID NO: 43620 - protein, 7 aa, synthetic construct
RGDKQAD

SEQ ID NO: 43621 - protein, 7 aa, synthetic construct
RGDKVIE

SEQ ID NO: 43622 - protein, 7 aa, synthetic construct
RGDLIED

SEQ ID NO: 43623 - protein, 7 aa, synthetic construct
RGDLILA

SEQ ID NO: 43624 - protein, 7 aa, synthetic construct
RGDLKEG

SEQ ID NO: 43625 - protein, 7 aa, synthetic construct
RGDLNEF

SEQ ID NO: 43626 - protein, 7 aa, synthetic construct
RGDNAIE

SEQ ID NO: 43627 - protein, 7 aa, synthetic construct
RGDNGHD

SEQ ID NO: 43628 - protein, 7 aa, synthetic construct
RGDNKVG

SEQ ID NO: 43629 - protein, 7 aa, synthetic construct
RGDNQVE

SEQ ID NO: 43630 - protein, 7 aa, synthetic construct
RGDNRVD

SEQ ID NO: 43631 - protein, 7 aa, synthetic construct
RGDNVEG

SEQ ID NO: 43632 - protein, 7 aa, synthetic construct
RGDQELL

SEQ ID NO: 43633 - protein, 7 aa, synthetic construct
RGDQNFG

SEQ ID NO: 43634 - protein, 7 aa, synthetic construct
RGDQNIA

SEQ ID NO: 43635 - protein, 7 aa, synthetic construct
RGDDDDF

SEQ ID NO: 43636 - protein, 7 aa, synthetic construct
RGDDDHD

SEQ ID NO: 43637 - protein, 7 aa, synthetic construct
RGDADNQ

SEQ ID NO: 43638 - protein, 7 aa, synthetic construct
RGDDEHD

SEQ ID NO: 43639 - protein, 7 aa, synthetic construct
RGDSFFD

SEQ ID NO: 43640 - protein, 7 aa, synthetic construct
RGDSKIN

SEQ ID NO: 43641 - protein, 7 aa, synthetic construct
RGDSSVD

SEQ ID NO: 43642 - protein, 7 aa, synthetic construct
RGDTAFS

SEQ ID NO: 43643 - protein, 7 aa, synthetic construct
RGDTDDS

SEQ ID NO: 43644 - protein, 7 aa, synthetic construct
RGDDGNS

SEQ ID NO: 43645 - protein, 7 aa, synthetic construct
RGDTEIN

SEQ ID NO: 43646 - protein, 7 aa, synthetic construct
RGDTGQF

SEQ ID NO: 43647 - protein, 7 aa, synthetic construct
RGDAEAG

SEQ ID NO: 43648 - protein, 7 aa, synthetic construct
RGDTSNE

SEQ ID NO: 43649 - protein, 7 aa, synthetic construct
RGDDHVH

SEQ ID NO: 43650 - protein, 7 aa, synthetic construct
RGDVEQA

SEQ ID NO: 43651 - protein, 7 aa, synthetic construct
RGDVFAH

SEQ ID NO: 43652 - protein, 7 aa, synthetic construct
RGDVGET

SEQ ID NO: 43653 - protein, 7 aa, synthetic construct
RGDDIIN

SEQ ID NO: 43654 - protein, 7 aa, synthetic construct
RGDVVKG

SEQ ID NO: 43655 - protein, 7 aa, synthetic construct
RGDDSDQ

SEQ ID NO: 43656 - protein, 7 aa, synthetic construct
RGDDTGS

SEQ ID NO: 43657 - protein, 7 aa, synthetic construct
RGDDVSD

SEQ ID NO: 43658 - protein, 7 aa, synthetic construct
RGDAFAD

SEQ ID NO: 43659 - protein, 7 aa, synthetic construct
RGDAFFA

SEQ ID NO: 43660 - protein, 7 aa, synthetic construct
RGDAFFE

SEQ ID NO: 43661 - protein, 7 aa, synthetic construct
RGDEEFG

SEQ ID NO: 43662 - protein, 7 aa, synthetic construct
RGDEFAA

SEQ ID NO: 43663 - protein, 7 aa, synthetic construct
RGDEIEA

SEQ ID NO: 43664 - protein, 7 aa, synthetic construct
RGDEKLD

SEQ ID NO: 43665 - protein, 7 aa, synthetic construct
RGDELVF

SEQ ID NO: 43666 - protein, 7 aa, synthetic construct
RGDETQA

SEQ ID NO: 43667 - protein, 7 aa, synthetic construct
RGDFFLG

SEQ ID NO: 43668 - protein, 7 aa, synthetic construct
RGDFNVD

SEQ ID NO: 43669 - protein, 7 aa, synthetic construct
RGDAHVD

SEQ ID NO: 43670 - protein, 7 aa, synthetic construct
RGDGELA

SEQ ID NO: 43671 - protein, 7 aa, synthetic construct
RGDGHLG

SEQ ID NO: 43672 - protein, 7 aa, synthetic construct
RGDGKED

SEQ ID NO: 43673 - protein, 7 aa, synthetic construct
RGDGNID

SEQ ID NO: 43674 - protein, 7 aa, synthetic construct
RGDAIVN

SEQ ID NO: 43675 - protein, 7 aa, synthetic construct
RGDGQLN

SEQ ID NO: 43676 - protein, 7 aa, synthetic construct
RGDGSIG

SEQ ID NO: 43677 - protein, 7 aa, synthetic construct
RGDHDDD

SEQ ID NO: 43678 - protein, 7 aa, synthetic construct
RGDHEDD

SEQ ID NO: 43679 - protein, 7 aa, synthetic construct
RGDHFNE

SEQ ID NO: 43680 - protein, 7 aa, synthetic construct
RGDHILN

SEQ ID NO: 43681 - protein, 7 aa, synthetic construct
RGDALFG

SEQ ID NO: 43682 - protein, 7 aa, synthetic construct
RGDHLHE

SEQ ID NO: 43683 - protein, 7 aa, synthetic construct
RGDHQLQ

SEQ ID NO: 43684 - protein, 7 aa, synthetic construct
RGDINAG

SEQ ID NO: 43685 - protein, 7 aa, synthetic construct
RGDINGD

SEQ ID NO: 43686 - protein, 7 aa, synthetic construct
RGDKEIN

SEQ ID NO: 43687 - protein, 7 aa, synthetic construct
RGDKEQG

SEQ ID NO: 43688 - protein, 7 aa, synthetic construct
RGDKVVG

SEQ ID NO: 43689 - protein, 7 aa, synthetic construct
RGDLAVL

SEQ ID NO: 43690 - protein, 7 aa, synthetic construct
RGDLFLA

SEQ ID NO: 43691 - protein, 7 aa, synthetic construct
RGDLHKG

SEQ ID NO: 43692 - protein, 7 aa, synthetic construct
RGDLHLH

SEQ ID NO: 43693 - protein, 7 aa, synthetic construct
RGDLLVG

SEQ ID NO: 43694 - protein, 7 aa, synthetic construct
RGDLSDH

SEQ ID NO: 43695 - protein, 7 aa, synthetic construct
RGDATIE

SEQ ID NO: 43696 - protein, 7 aa, synthetic construct
RGDADID

SEQ ID NO: 43697 - protein, 7 aa, synthetic construct
RGDAVFA

SEQ ID NO: 43698 - protein, 7 aa, synthetic construct
RGDNKLE

SEQ ID NO: 43699 - protein, 7 aa, synthetic construct
RGDQEFI

SEQ ID NO: 43700 - protein, 7 aa, synthetic construct
RGDQIID

SEQ ID NO: 43701 - protein, 7 aa, synthetic construct
RGDQLLQ

SEQ ID NO: 43702 - protein, 7 aa, synthetic construct
RGDDDDI

SEQ ID NO: 43703 - protein, 7 aa, synthetic construct
RGDQTVD

SEQ ID NO: 43704 - protein, 7 aa, synthetic construct
RGDRADA

SEQ ID NO: 43705 - protein, 7 aa, synthetic construct
RGDRFAG

SEQ ID NO: 43706 - protein, 7 aa, synthetic construct
RGDDEVI

SEQ ID NO: 43707 - protein, 7 aa, synthetic construct
RGDSDLE

SEQ ID NO: 43708 - protein, 7 aa, synthetic construct
RGDSQFG

SEQ ID NO: 43709 - protein, 7 aa, synthetic construct
RGDSQVE

SEQ ID NO: 43710 - protein, 7 aa, synthetic construct
RGDTDTG

SEQ ID NO: 43711 - protein, 7 aa, synthetic construct
RGDTDTK

SEQ ID NO: 43712 - protein, 7 aa, synthetic construct
RGDTDVD

SEQ ID NO: 43713 - protein, 7 aa, synthetic construct
RGDTFGE

SEQ ID NO: 43714 - protein, 7 aa, synthetic construct
RGDTFQA

SEQ ID NO: 43715 - protein, 7 aa, synthetic construct
RGDTIGA

SEQ ID NO: 43716 - protein, 7 aa, synthetic construct
RGDTSDT

SEQ ID NO: 43717 - protein, 7 aa, synthetic construct
RGDTSFD

SEQ ID NO: 43718 - protein, 7 aa, synthetic construct
RGDDIFD

SEQ ID NO: 43719 - protein, 7 aa, synthetic construct
RGDVLDD

SEQ ID NO: 43720 - protein, 7 aa, synthetic construct
RGDVNEE

SEQ ID NO: 43721 - protein, 7 aa, synthetic construct
RGDVNID

SEQ ID NO: 43722 - protein, 7 aa, synthetic construct
RGDAENT

SEQ ID NO: 43723 - protein, 7 aa, synthetic construct
RGDDTDL

SEQ ID NO: 43724 - protein, 7 aa, synthetic construct
RGDDTKF

SEQ ID NO: 43725 - protein, 7 aa, synthetic construct
RGDAEVH

SEQ ID NO: 43726 - protein, 7 aa, synthetic construct
RGDDVNE

SEQ ID NO: 43727 - protein, 7 aa, synthetic construct
RGDEADN

SEQ ID NO: 43728 - protein, 7 aa, synthetic construct
RGDEAEI

SEQ ID NO: 43729 - protein, 7 aa, synthetic construct
RGDEAFG

SEQ ID NO: 43730 - protein, 7 aa, synthetic construct
RGDEFDA

SEQ ID NO: 43731 - protein, 7 aa, synthetic construct
RGDEFRG

SEQ ID NO: 43732 - protein, 7 aa, synthetic construct
RGDEIAH

SEQ ID NO: 43733 - protein, 7 aa, synthetic construct
RGDEIIG

SEQ ID NO: 43734 - protein, 7 aa, synthetic construct
RGDEKIN

SEQ ID NO: 43735 - protein, 7 aa, synthetic construct
RGDEQLR

SEQ ID NO: 43736 - protein, 7 aa, synthetic construct
RGDEQTN

SEQ ID NO: 43737 - protein, 7 aa, synthetic construct
RGDETTE

SEQ ID NO: 43738 - protein, 7 aa, synthetic construct
RGDFEQA

SEQ ID NO: 43739 - protein, 7 aa, synthetic construct
RGDFETE

SEQ ID NO: 43740 - protein, 7 aa, synthetic construct
RGDFIVD

SEQ ID NO: 43741 - protein, 7 aa, synthetic construct
RGDFLLD

SEQ ID NO: 43742 - protein, 7 aa, synthetic construct
RGDAHVA

SEQ ID NO: 43743 - protein, 7 aa, synthetic construct
RGDGIDV

SEQ ID NO: 43744 - protein, 7 aa, synthetic construct
RGDGILH

SEQ ID NO: 43745 - protein, 7 aa, synthetic construct
RGDHFIA

SEQ ID NO: 43746 - protein, 7 aa, synthetic construct
RGDHIEG

SEQ ID NO: 43747 - protein, 7 aa, synthetic construct
RGDHLQG

SEQ ID NO: 43748 - protein, 7 aa, synthetic construct
RGDHNAE

SEQ ID NO: 43749 - protein, 7 aa, synthetic construct
RGDHSIG

SEQ ID NO: 43750 - protein, 7 aa, synthetic construct
RGDHTIA

SEQ ID NO: 43751 - protein, 7 aa, synthetic construct
RGDHVDA

SEQ ID NO: 43752 - protein, 7 aa, synthetic construct
RGDHVLN

SEQ ID NO: 43753 - protein, 7 aa, synthetic construct
RGDIAEN

SEQ ID NO: 43754 - protein, 7 aa, synthetic construct
RGDIFES

SEQ ID NO: 43755 - protein, 7 aa, synthetic construct
RGDILAA

SEQ ID NO: 43756 - protein, 7 aa, synthetic construct
RGDKFID

SEQ ID NO: 43757 - protein, 7 aa, synthetic construct
RGDKFVD

SEQ ID NO: 43758 - protein, 7 aa, synthetic construct
RGDKGEA

SEQ ID NO: 43759 - protein, 7 aa, synthetic construct
RGDKQQA

SEQ ID NO: 43760 - protein, 7 aa, synthetic construct
RGDKQQF

SEQ ID NO: 43761 - protein, 7 aa, synthetic construct
RGDKSLD

SEQ ID NO: 43762 - protein, 7 aa, synthetic construct
RGDLNEG

SEQ ID NO: 43763 - protein, 7 aa, synthetic construct
RGDNFFN

SEQ ID NO: 43764 - protein, 7 aa, synthetic construct
RGDNGDG

SEQ ID NO: 43765 - protein, 7 aa, synthetic construct
RGDNQLE

SEQ ID NO: 43766 - protein, 7 aa, synthetic construct
RGDNVIQ

SEQ ID NO: 43767 - protein, 7 aa, synthetic construct
RGDQESA

SEQ ID NO: 43768 - protein, 7 aa, synthetic construct
RGDDAHF

SEQ ID NO: 43769 - protein, 7 aa, synthetic construct
RGDQLDQ

SEQ ID NO: 43770 - protein, 7 aa, synthetic construct
RGDQNIR

SEQ ID NO: 43771 - protein, 7 aa, synthetic construct
RGDQTIG

SEQ ID NO: 43772 - protein, 7 aa, synthetic construct
RGDDDKS

SEQ ID NO: 43773 - protein, 7 aa, synthetic construct
RGDDEVD

SEQ ID NO: 43774 - protein, 7 aa, synthetic construct
RGDSFGE

SEQ ID NO: 43775 - protein, 7 aa, synthetic construct
RGDSRVD

SEQ ID NO: 43776 - protein, 7 aa, synthetic construct
RGDSTDI

SEQ ID NO: 43777 - protein, 7 aa, synthetic construct
RGDSVDF

SEQ ID NO: 43778 - protein, 7 aa, synthetic construct
RGDTEDS

SEQ ID NO: 43779 - protein, 7 aa, synthetic construct
RGDTFAQ

SEQ ID NO: 43780 - protein, 7 aa, synthetic construct
RGDTFEN

SEQ ID NO: 43781 - protein, 7 aa, synthetic construct
RGDTFND

SEQ ID NO: 43782 - protein, 7 aa, synthetic construct
RGDTFTA

SEQ ID NO: 43783 - protein, 7 aa, synthetic construct
RGDTGDQ

SEQ ID NO: 43784 - protein, 7 aa, synthetic construct
RGDTGEQ

SEQ ID NO: 43785 - protein, 7 aa, synthetic construct
RGDTQGG

SEQ ID NO: 43786 - protein, 7 aa, synthetic construct
RGDTSIF

SEQ ID NO: 43787 - protein, 7 aa, synthetic construct
RGDTTHD

SEQ ID NO: 43788 - protein, 7 aa, synthetic construct
RGDTVAG

SEQ ID NO: 43789 - protein, 7 aa, synthetic construct
RGDVDDV

SEQ ID NO: 43790 - protein, 7 aa, synthetic construct
RGDVERG

SEQ ID NO: 43791 - protein, 7 aa, synthetic construct
RGDVGSD

SEQ ID NO: 43792 - protein, 7 aa, synthetic construct
RGDDIQD

SEQ ID NO: 43793 - protein, 7 aa, synthetic construct
RGDVSEE

SEQ ID NO: 43794 - protein, 7 aa, synthetic construct
RGDDKFG

SEQ ID NO: 43795 - protein, 7 aa, synthetic construct
RGDDKLN

SEQ ID NO: 43796 - protein, 7 aa, synthetic construct
RGDDNIA

SEQ ID NO: 43797 - protein, 7 aa, synthetic construct
RGDDNLG

SEQ ID NO: 43798 - protein, 7 aa, synthetic construct
RGDDNQR

SEQ ID NO: 43799 - protein, 7 aa, synthetic construct
RGDDQLN

SEQ ID NO: 43800 - protein, 7 aa, synthetic construct
RGDDTTA

SEQ ID NO: 43801 - protein, 7 aa, synthetic construct
RGDDVLE

SEQ ID NO: 43802 - protein, 7 aa, synthetic construct
RGDAFAG

SEQ ID NO: 43803 - protein, 7 aa, synthetic construct
RGDEAVN

SEQ ID NO: 43804 - protein, 7 aa, synthetic construct
RGDEDES

SEQ ID NO: 43805 - protein, 7 aa, synthetic construct
RGDEDGH

SEQ ID NO: 43806 - protein, 7 aa, synthetic construct
RGDEDIT

SEQ ID NO: 43807 - protein, 7 aa, synthetic construct
RGDAFGI

SEQ ID NO: 43808 - protein, 7 aa, synthetic construct
RGDEILG

SEQ ID NO: 43809 - protein, 7 aa, synthetic construct
RGDENIA

SEQ ID NO: 43810 - protein, 7 aa, synthetic construct
RGDEQVE

SEQ ID NO: 43811 - protein, 7 aa, synthetic construct
RGDETDS

SEQ ID NO: 43812 - protein, 7 aa, synthetic construct
RGDFERG

SEQ ID NO: 43813 - protein, 7 aa, synthetic construct
RGDAHVH

SEQ ID NO: 43814 - protein, 7 aa, synthetic construct
RGDGEEV

SEQ ID NO: 43815 - protein, 7 aa, synthetic construct
RGDGILD

SEQ ID NO: 43816 - protein, 7 aa, synthetic construct
RGDAIQN

SEQ ID NO: 43817 - protein, 7 aa, synthetic construct
RGDGQLS

SEQ ID NO: 43818 - protein, 7 aa, synthetic construct
RGDHFSS

SEQ ID NO: 43819 - protein, 7 aa, synthetic construct
RGDHIGN

SEQ ID NO: 43820 - protein, 7 aa, synthetic construct
RGDHISE

SEQ ID NO: 43821 - protein, 7 aa, synthetic construct
RGDHSIN

SEQ ID NO: 43822 - protein, 7 aa, synthetic construct
RGDHTLS

SEQ ID NO: 43823 - protein, 7 aa, synthetic construct
RGDHVIE

SEQ ID NO: 43824 - protein, 7 aa, synthetic construct
RGDIDQA

SEQ ID NO: 43825 - protein, 7 aa, synthetic construct
RGDIFDS

SEQ ID NO: 43826 - protein, 7 aa, synthetic construct
RGDKLAA

SEQ ID NO: 43827 - protein, 7 aa, synthetic construct
RGDKTEK

SEQ ID NO: 43828 - protein, 7 aa, synthetic construct
RGDLANE

SEQ ID NO: 43829 - protein, 7 aa, synthetic construct
RGDLHEA

SEQ ID NO: 43830 - protein, 7 aa, synthetic construct
RGDLKTG

SEQ ID NO: 43831 - protein, 7 aa, synthetic construct
RGDLQIL

SEQ ID NO: 43832 - protein, 7 aa, synthetic construct
RGDATAN

SEQ ID NO: 43833 - protein, 7 aa, synthetic construct
RGDLTLL

SEQ ID NO: 43834 - protein, 7 aa, synthetic construct
RGDNEIE

SEQ ID NO: 43835 - protein, 7 aa, synthetic construct
RGDNILK

SEQ ID NO: 43836 - protein, 7 aa, synthetic construct
RGDNLLG

SEQ ID NO: 43837 - protein, 7 aa, synthetic construct
RGDNNSG

SEQ ID NO: 43838 - protein, 7 aa, synthetic construct
RGDNNTD

SEQ ID NO: 43839 - protein, 7 aa, synthetic construct
RGDNTLA

SEQ ID NO: 43840 - protein, 7 aa, synthetic construct
RGDQEEF

SEQ ID NO: 43841 - protein, 7 aa, synthetic construct
RGDQESD

SEQ ID NO: 43842 - protein, 7 aa, synthetic construct
RGDQFNA

SEQ ID NO: 43843 - protein, 7 aa, synthetic construct
RGDDERA

SEQ ID NO: 43844 - protein, 7 aa, synthetic construct
RGDDERV

SEQ ID NO: 43845 - protein, 7 aa, synthetic construct
RGDSAFA

SEQ ID NO: 43846 - protein, 7 aa, synthetic construct
RGDADSD

SEQ ID NO: 43847 - protein, 7 aa, synthetic construct
RGDSIAE

SEQ ID NO: 43848 - protein, 7 aa, synthetic construct
RGDSLVG

SEQ ID NO: 43849 - protein, 7 aa, synthetic construct
RGDTDAA

SEQ ID NO: 43850 - protein, 7 aa, synthetic construct
RGDTFET

SEQ ID NO: 43851 - protein, 7 aa, synthetic construct
RGDTIES

SEQ ID NO: 43852 - protein, 7 aa, synthetic construct
RGDTLLG

SEQ ID NO: 43853 - protein, 7 aa, synthetic construct
RGDTQED

SEQ ID NO: 43854 - protein, 7 aa, synthetic construct
RGDTTEN

SEQ ID NO: 43855 - protein, 7 aa, synthetic construct
RGDVFHE

SEQ ID NO: 43856 - protein, 7 aa, synthetic construct
RGDVLAA

SEQ ID NO: 43857 - protein, 7 aa, synthetic construct
RGDVNAF

SEQ ID NO: 43858 - protein, 7 aa, synthetic construct
RGDVNDE

SEQ ID NO: 43859 - protein, 7 aa, synthetic construct
RGDVTDE

SEQ ID NO: 43860 - protein, 7 aa, synthetic construct
RGDVVDA

SEQ ID NO: 43861 - protein, 7 aa, synthetic construct
RGDAEGT

SEQ ID NO: 43862 - protein, 7 aa, synthetic construct
RGDDLVF

SEQ ID NO: 43863 - protein, 7 aa, synthetic construct
RGDDTIK

SEQ ID NO: 43864 - protein, 7 aa, synthetic construct
RGDEEGI

SEQ ID NO: 43865 - protein, 7 aa, synthetic construct
RGDEFDL

SEQ ID NO: 43866 - protein, 7 aa, synthetic construct
RGDEGDV

SEQ ID NO: 43867 - protein, 7 aa, synthetic construct
RGDEHIA

SEQ ID NO: 43868 - protein, 7 aa, synthetic construct
RGDAFLR

SEQ ID NO: 43869 - protein, 7 aa, synthetic construct
RGDELIQ

SEQ ID NO: 43870 - protein, 7 aa, synthetic construct
RGDEQIL

SEQ ID NO: 43871 - protein, 7 aa, synthetic construct
RGDEQLS

SEQ ID NO: 43872 - protein, 7 aa, synthetic construct
RGDESID

SEQ ID NO: 43873 - protein, 7 aa, synthetic construct
RGDETDR

SEQ ID NO: 43874 - protein, 7 aa, synthetic construct
RGDAHVG

SEQ ID NO: 43875 - protein, 7 aa, synthetic construct
RGDAIDN

SEQ ID NO: 43876 - protein, 7 aa, synthetic construct
RGDGFEG

SEQ ID NO: 43877 - protein, 7 aa, synthetic construct
RGDGFLN

SEQ ID NO: 43878 - protein, 7 aa, synthetic construct
RGDAIQG

SEQ ID NO: 43879 - protein, 7 aa, synthetic construct
RGDHAAD

SEQ ID NO: 43880 - protein, 7 aa, synthetic construct
RGDHEEI

SEQ ID NO: 43881 - protein, 7 aa, synthetic construct
RGDHIRD

SEQ ID NO: 43882 - protein, 7 aa, synthetic construct
RGDHKID

SEQ ID NO: 43883 - protein, 7 aa, synthetic construct
RGDHKVD

SEQ ID NO: 43884 - protein, 7 aa, synthetic construct
RGDALIF

SEQ ID NO: 43885 - protein, 7 aa, synthetic construct
RGDITET

SEQ ID NO: 43886 - protein, 7 aa, synthetic construct
RGDIVAS

SEQ ID NO: 43887 - protein, 7 aa, synthetic construct
RGDAQLQ

SEQ ID NO: 43888 - protein, 7 aa, synthetic construct
RGDKEFG

SEQ ID NO: 43889 - protein, 7 aa, synthetic construct
RGDLDLF

SEQ ID NO: 43890 - protein, 7 aa, synthetic construct
RGDLHEE

SEQ ID NO: 43891 - protein, 7 aa, synthetic construct
RGDNEDA

SEQ ID NO: 43892 - protein, 7 aa, synthetic construct
RGDADIH

SEQ ID NO: 43893 - protein, 7 aa, synthetic construct
RGDNQAG

SEQ ID NO: 43894 - protein, 7 aa, synthetic construct
RGDNRIS

SEQ ID NO: 43895 - protein, 7 aa, synthetic construct
RGDQFDG

SEQ ID NO: 43896 - protein, 7 aa, synthetic construct
RGDDAIG

SEQ ID NO: 43897 - protein, 7 aa, synthetic construct
RGDQNSD

SEQ ID NO: 43898 - protein, 7 aa, synthetic construct
RGDSETD

SEQ ID NO: 43899 - protein, 7 aa, synthetic construct
RGDSLDG

SEQ ID NO: 43900 - protein, 7 aa, synthetic construct
RGDDGEF

SEQ ID NO: 43901 - protein, 7 aa, synthetic construct
RGDSTAA

SEQ ID NO: 43902 - protein, 7 aa, synthetic construct
RGDTAVD

SEQ ID NO: 43903 - protein, 7 aa, synthetic construct
RGDTFGH

SEQ ID NO: 43904 - protein, 7 aa, synthetic construct
RGDTILH

SEQ ID NO: 43905 - protein, 7 aa, synthetic construct
RGDTITE

SEQ ID NO: 43906 - protein, 7 aa, synthetic construct
RGDTSDL

SEQ ID NO: 43907 - protein, 7 aa, synthetic construct
RGDVDEG

SEQ ID NO: 43908 - protein, 7 aa, synthetic construct
RGDVDNE

SEQ ID NO: 43909 - protein, 7 aa, synthetic construct
RGDDILQ

SEQ ID NO: 43910 - protein, 7 aa, synthetic construct
RGDVVAD

SEQ ID NO: 43911 - protein, 7 aa, synthetic construct
RGDDKIA

SEQ ID NO: 43912 - protein, 7 aa, synthetic construct
RGDAEGI

SEQ ID NO: 43913 - protein, 7 aa, synthetic construct
RGDDRLS

SEQ ID NO: 43914 - protein, 7 aa, synthetic construct
RGDDTIV

SEQ ID NO: 43915 - protein, 7 aa, synthetic construct
RGDDTLR

SEQ ID NO: 43916 - protein, 7 aa, synthetic construct
RGDEIEG

SEQ ID NO: 43917 - protein, 7 aa, synthetic construct
RGDEIVL

SEQ ID NO: 43918 - protein, 7 aa, synthetic construct
RGDELED

SEQ ID NO: 43919 - protein, 7 aa, synthetic construct
RGDENVA

SEQ ID NO: 43920 - protein, 7 aa, synthetic construct
RGDGFID

SEQ ID NO: 43921 - protein, 7 aa, synthetic construct
RGDGHIN

SEQ ID NO: 43922 - protein, 7 aa, synthetic construct
RGDGHLD

SEQ ID NO: 43923 - protein, 7 aa, synthetic construct
RGDAILS

SEQ ID NO: 43924 - protein, 7 aa, synthetic construct
RGDGIFH

SEQ ID NO: 43925 - protein, 7 aa, synthetic construct
RGDGIIA

SEQ ID NO: 43926 - protein, 7 aa, synthetic construct
RGDAIVD

SEQ ID NO: 43927 - protein, 7 aa, synthetic construct
RGDHFIQ

SEQ ID NO: 43928 - protein, 7 aa, synthetic construct
RGDHIDE

SEQ ID NO: 43929 - protein, 7 aa, synthetic construct
RGDHRIH

SEQ ID NO: 43930 - protein, 7 aa, synthetic construct
RGDHTLE

SEQ ID NO: 43931 - protein, 7 aa, synthetic construct
RGDIGEQ

SEQ ID NO: 43932 - protein, 7 aa, synthetic construct
RGDIGKD

SEQ ID NO: 43933 - protein, 7 aa, synthetic construct
RGDINEE

SEQ ID NO: 43934 - protein, 7 aa, synthetic construct
RGDITES

SEQ ID NO: 43935 - protein, 7 aa, synthetic construct
RGDIVFA

SEQ ID NO: 43936 - protein, 7 aa, synthetic construct
RGDKDFD

SEQ ID NO: 43937 - protein, 7 aa, synthetic construct
RGDAQVD

SEQ ID NO: 43938 - protein, 7 aa, synthetic construct
RGDKILD

SEQ ID NO: 43939 - protein, 7 aa, synthetic construct
RGDARLE

SEQ ID NO: 43940 - protein, 7 aa, synthetic construct
RGDNADT

SEQ ID NO: 43941 - protein, 7 aa, synthetic construct
RGDNGEA

SEQ ID NO: 43942 - protein, 7 aa, synthetic construct
RGDNNFG

SEQ ID NO: 43943 - protein, 7 aa, synthetic construct
RGDQLDA

SEQ ID NO: 43944 - protein, 7 aa, synthetic construct
RGDQLGD

SEQ ID NO: 43945 - protein, 7 aa, synthetic construct
RGDQQSE

SEQ ID NO: 43946 - protein, 7 aa, synthetic construct
RGDADNE

SEQ ID NO: 43947 - protein, 7 aa, synthetic construct
RGDQTEA

SEQ ID NO: 43948 - protein, 7 aa, synthetic construct
RGDADQF

SEQ ID NO: 43949 - protein, 7 aa, synthetic construct
RGDSDDR

SEQ ID NO: 43950 - protein, 7 aa, synthetic construct
RGDSDIN

SEQ ID NO: 43951 - protein, 7 aa, synthetic construct
RGDADSH

SEQ ID NO: 43952 - protein, 7 aa, synthetic construct
RGDSIGG

SEQ ID NO: 43953 - protein, 7 aa, synthetic construct
RGDTFVE

SEQ ID NO: 43954 - protein, 7 aa, synthetic construct
RGDDHGD

SEQ ID NO: 43955 - protein, 7 aa, synthetic construct
RGDDHLA

SEQ ID NO: 43956 - protein, 7 aa, synthetic construct
RGDTSVE

SEQ ID NO: 43957 - protein, 7 aa, synthetic construct
RGDVDHD

SEQ ID NO: 43958 - protein, 7 aa, synthetic construct
RGDVDKD

SEQ ID NO: 43959 - protein, 7 aa, synthetic construct
RGDVDLD

SEQ ID NO: 43960 - protein, 7 aa, synthetic construct
RGDVLEA

SEQ ID NO: 43961 - protein, 7 aa, synthetic construct
RGDDIVV

SEQ ID NO: 43962 - protein, 7 aa, synthetic construct
RGDVSDL

SEQ ID NO: 43963 - protein, 7 aa, synthetic construct
RGDDLAF

SEQ ID NO: 43964 - protein, 7 aa, synthetic construct
RGDDNED

SEQ ID NO: 43965 - protein, 7 aa, synthetic construct
RGDDNVK

SEQ ID NO: 43966 - protein, 7 aa, synthetic construct
RGDDQNH

SEQ ID NO: 43967 - protein, 7 aa, synthetic construct
RGDDQVR

SEQ ID NO: 43968 - protein, 7 aa, synthetic construct
RGDDTEG

SEQ ID NO: 43969 - protein, 7 aa, synthetic construct
RGDEADF

SEQ ID NO: 43970 - protein, 7 aa, synthetic construct
RGDEADI

SEQ ID NO: 43971 - protein, 7 aa, synthetic construct
RGDEAFD

SEQ ID NO: 43972 - protein, 7 aa, synthetic construct
RGDAFDF

SEQ ID NO: 43973 - protein, 7 aa, synthetic construct
RGDAFDS

SEQ ID NO: 43974 - protein, 7 aa, synthetic construct
RGDEDLF

SEQ ID NO: 43975 - protein, 7 aa, synthetic construct
RGDEHTN

SEQ ID NO: 43976 - protein, 7 aa, synthetic construct
RGDEIDE

SEQ ID NO: 43977 - protein, 7 aa, synthetic construct
RGDENNE

SEQ ID NO: 43978 - protein, 7 aa, synthetic construct
RGDEQVH

SEQ ID NO: 43979 - protein, 7 aa, synthetic construct
RGDETIA

SEQ ID NO: 43980 - protein, 7 aa, synthetic construct
RGDETIQ

SEQ ID NO: 43981 - protein, 7 aa, synthetic construct
RGDFEEA

SEQ ID NO: 43982 - protein, 7 aa, synthetic construct
RGDAHGD

SEQ ID NO: 43983 - protein, 7 aa, synthetic construct
RGDFNLE

SEQ ID NO: 43984 - protein, 7 aa, synthetic construct
RGDFNVG

SEQ ID NO: 43985 - protein, 7 aa, synthetic construct
RGDFTDE

SEQ ID NO: 43986 - protein, 7 aa, synthetic construct
RGDGAEG

SEQ ID NO: 43987 - protein, 7 aa, synthetic construct
RGDGAIN

SEQ ID NO: 43988 - protein, 7 aa, synthetic construct
RGDGIAA

SEQ ID NO: 43989 - protein, 7 aa, synthetic construct
RGDGIIE

SEQ ID NO: 43990 - protein, 7 aa, synthetic construct
RGDGIVE

SEQ ID NO: 43991 - protein, 7 aa, synthetic construct
RGDGRLA

SEQ ID NO: 43992 - protein, 7 aa, synthetic construct
RGDHIAN

SEQ ID NO: 43993 - protein, 7 aa, synthetic construct
RGDHLLD

SEQ ID NO: 43994 - protein, 7 aa, synthetic construct
RGDHLLL

SEQ ID NO: 43995 - protein, 7 aa, synthetic construct
RGDHNLA

SEQ ID NO: 43996 - protein, 7 aa, synthetic construct
RGDALLQ

SEQ ID NO: 43997 - protein, 7 aa, synthetic construct
RGDHTIN

SEQ ID NO: 43998 - protein, 7 aa, synthetic construct
RGDHTLG

SEQ ID NO: 43999 - protein, 7 aa, synthetic construct
RGDIQQS

SEQ ID NO: 44000 - protein, 7 aa, synthetic construct
RGDITTG

SEQ ID NO: 44001 - protein, 7 aa, synthetic construct
RGDITVD

SEQ ID NO: 44002 - protein, 7 aa, synthetic construct
RGDIVDS

SEQ ID NO: 44003 - protein, 7 aa, synthetic construct
RGDAQIE

SEQ ID NO: 44004 - protein, 7 aa, synthetic construct
RGDAQVN

SEQ ID NO: 44005 - protein, 7 aa, synthetic construct
RGDLETG

SEQ ID NO: 44006 - protein, 7 aa, synthetic construct
RGDLSDF

SEQ ID NO: 44007 - protein, 7 aa, synthetic construct
RGDLTDF

SEQ ID NO: 44008 - protein, 7 aa, synthetic construct
RGDATIS

SEQ ID NO: 44009 - protein, 7 aa, synthetic construct
RGDNEIN

SEQ ID NO: 44010 - protein, 7 aa, synthetic construct
RGDNFGL

SEQ ID NO: 44011 - protein, 7 aa, synthetic construct
RGDNFIE

SEQ ID NO: 44012 - protein, 7 aa, synthetic construct
RGDNIIK

SEQ ID NO: 44013 - protein, 7 aa, synthetic construct
RGDAVQA

SEQ ID NO: 44014 - protein, 7 aa, synthetic construct
RGDQDQS

SEQ ID NO: 44015 - protein, 7 aa, synthetic construct
RGDDDER

SEQ ID NO: 44016 - protein, 7 aa, synthetic construct
RGDDDIT

SEQ ID NO: 44017 - protein, 7 aa, synthetic construct
RGDDFDK

SEQ ID NO: 44018 - protein, 7 aa, synthetic construct
RGDSEIG

SEQ ID NO: 44019 - protein, 7 aa, synthetic construct
RGDSGDE

SEQ ID NO: 44020 - protein, 7 aa, synthetic construct
RGDTDHE

SEQ ID NO: 44021 - protein, 7 aa, synthetic construct
RGDTFDH

SEQ ID NO: 44022 - protein, 7 aa, synthetic construct
RGDTLSD

SEQ ID NO: 44023 - protein, 7 aa, synthetic construct
RGDAEDA

SEQ ID NO: 44024 - protein, 7 aa, synthetic construct
RGDTTET

SEQ ID NO: 44025 - protein, 7 aa, synthetic construct
RGDDIAS

SEQ ID NO: 44026 - protein, 7 aa, synthetic construct
RGDVDEN

SEQ ID NO: 44027 - protein, 7 aa, synthetic construct
RGDVFEG

SEQ ID NO: 44028 - protein, 7 aa, synthetic construct
RGDDIQQ

SEQ ID NO: 44029 - protein, 7 aa, synthetic construct
RGDDKQS

SEQ ID NO: 44030 - protein, 7 aa, synthetic construct
RGDDNAG

SEQ ID NO: 44031 - protein, 7 aa, synthetic construct
RGDDNDF

SEQ ID NO: 44032 - protein, 7 aa, synthetic construct
RGDEFNE

SEQ ID NO: 44033 - protein, 7 aa, synthetic construct
RGDGDEL

SEQ ID NO: 44034 - protein, 7 aa, synthetic construct
RGDAIIA

SEQ ID NO: 44035 - protein, 7 aa, synthetic construct
RGDGIIT

SEQ ID NO: 44036 - protein, 7 aa, synthetic construct
RGDGLIH

SEQ ID NO: 44037 - protein, 7 aa, synthetic construct
RGDHDIG

SEQ ID NO: 44038 - protein, 7 aa, synthetic construct
RGDALDG

SEQ ID NO: 44039 - protein, 7 aa, synthetic construct
RGDHIFN

SEQ ID NO: 44040 - protein, 7 aa, synthetic construct
RGDHLVA

SEQ ID NO: 44041 - protein, 7 aa, synthetic construct
RGDALLD

SEQ ID NO: 44042 - protein, 7 aa, synthetic construct
RGDHTND

SEQ ID NO: 44043 - protein, 7 aa, synthetic construct
RGDANQG

SEQ ID NO: 44044 - protein, 7 aa, synthetic construct
RGDAQFG

SEQ ID NO: 44045 - protein, 7 aa, synthetic construct
RGDITEF

SEQ ID NO: 44046 - protein, 7 aa, synthetic construct
RGDKEIA

SEQ ID NO: 44047 - protein, 7 aa, synthetic construct
RGDKFAA

SEQ ID NO: 44048 - protein, 7 aa, synthetic construct
RGDKIID

SEQ ID NO: 44049 - protein, 7 aa, synthetic construct
RGDNNEG

SEQ ID NO: 44050 - protein, 7 aa, synthetic construct
RGDNTID

SEQ ID NO: 44051 - protein, 7 aa, synthetic construct
RGDQANE

SEQ ID NO: 44052 - protein, 7 aa, synthetic construct
RGDDADT

SEQ ID NO: 44053 - protein, 7 aa, synthetic construct
RGDQEID

SEQ ID NO: 44054 - protein, 7 aa, synthetic construct
RGDDDDK

SEQ ID NO: 44055 - protein, 7 aa, synthetic construct
RGDRDID

SEQ ID NO: 44056 - protein, 7 aa, synthetic construct
RGDRTKD

SEQ ID NO: 44057 - protein, 7 aa, synthetic construct
RGDDFGD

SEQ ID NO: 44058 - protein, 7 aa, synthetic construct
RGDSLDD

SEQ ID NO: 44059 - protein, 7 aa, synthetic construct
RGDSLDS

SEQ ID NO: 44060 - protein, 7 aa, synthetic construct
RGDDFVG

SEQ ID NO: 44061 - protein, 7 aa, synthetic construct
RGDTEES

SEQ ID NO: 44062 - protein, 7 aa, synthetic construct
RGDTETG

SEQ ID NO: 44063 - protein, 7 aa, synthetic construct
RGDTFAL

SEQ ID NO: 44064 - protein, 7 aa, synthetic construct
RGDTFDG

SEQ ID NO: 44065 - protein, 7 aa, synthetic construct
RGDTFIA

SEQ ID NO: 44066 - protein, 7 aa, synthetic construct
RGDTFNE

SEQ ID NO: 44067 - protein, 7 aa, synthetic construct
RGDTFNN

SEQ ID NO: 44068 - protein, 7 aa, synthetic construct
RGDTIKG

SEQ ID NO: 44069 - protein, 7 aa, synthetic construct
RGDTNQT

SEQ ID NO: 44070 - protein, 7 aa, synthetic construct
RGDTQTD

SEQ ID NO: 44071 - protein, 7 aa, synthetic construct
RGDTSDQ

SEQ ID NO: 44072 - protein, 7 aa, synthetic construct
RGDDIFG

SEQ ID NO: 44073 - protein, 7 aa, synthetic construct
RGDDILR

SEQ ID NO: 44074 - protein, 7 aa, synthetic construct
RGDDLEE

SEQ ID NO: 44075 - protein, 7 aa, synthetic construct
RGDDLVG

SEQ ID NO: 44076 - protein, 7 aa, synthetic construct
RGDDQAH

SEQ ID NO: 44077 - protein, 7 aa, synthetic construct
RGDDQFH

SEQ ID NO: 44078 - protein, 7 aa, synthetic construct
RGDDRDL

SEQ ID NO: 44079 - protein, 7 aa, synthetic construct
RGDDRFA

SEQ ID NO: 44080 - protein, 7 aa, synthetic construct
RGDDRVN

SEQ ID NO: 44081 - protein, 7 aa, synthetic construct
RGDEDDH

SEQ ID NO: 44082 - protein, 7 aa, synthetic construct
RGDEDDL

SEQ ID NO: 44083 - protein, 7 aa, synthetic construct
RGDEEQD

SEQ ID NO: 44084 - protein, 7 aa, synthetic construct
RGDEFFG

SEQ ID NO: 44085 - protein, 7 aa, synthetic construct
RGDAFIG

SEQ ID NO: 44086 - protein, 7 aa, synthetic construct
RGDEKAA

SEQ ID NO: 44087 - protein, 7 aa, synthetic construct
RGDENLF

SEQ ID NO: 44088 - protein, 7 aa, synthetic construct
RGDETDL

SEQ ID NO: 44089 - protein, 7 aa, synthetic construct
RGDFDNE

SEQ ID NO: 44090 - protein, 7 aa, synthetic construct
RGDFHIE

SEQ ID NO: 44091 - protein, 7 aa, synthetic construct
RGDAHLF

SEQ ID NO: 44092 - protein, 7 aa, synthetic construct
RGDAIDE

SEQ ID NO: 44093 - protein, 7 aa, synthetic construct
RGDAILN

SEQ ID NO: 44094 - protein, 7 aa, synthetic construct
RGDAILT

SEQ ID NO: 44095 - protein, 7 aa, synthetic construct
RGDGILA

SEQ ID NO: 44096 - protein, 7 aa, synthetic construct
RGDGVLL

SEQ ID NO: 44097 - protein, 7 aa, synthetic construct
RGDHDID

SEQ ID NO: 44098 - protein, 7 aa, synthetic construct
RGDHFIH

SEQ ID NO: 44099 - protein, 7 aa, synthetic construct
RGDHHAN

SEQ ID NO: 44100 - protein, 7 aa, synthetic construct
RGDIINE

SEQ ID NO: 44101 - protein, 7 aa, synthetic construct
RGDKVAD

SEQ ID NO: 44102 - protein, 7 aa, synthetic construct
RGDLADI

SEQ ID NO: 44103 - protein, 7 aa, synthetic construct
RGDLEQF

SEQ ID NO: 44104 - protein, 7 aa, synthetic construct
RGDLQEA

SEQ ID NO: 44105 - protein, 7 aa, synthetic construct
RGDNFAN

SEQ ID NO: 44106 - protein, 7 aa, synthetic construct
RGDATVG

SEQ ID NO: 44107 - protein, 7 aa, synthetic construct
RGDNNVS

SEQ ID NO: 44108 - protein, 7 aa, synthetic construct
RGDNTIH

SEQ ID NO: 44109 - protein, 7 aa, synthetic construct
RGDQALE

SEQ ID NO: 44110 - protein, 7 aa, synthetic construct
RGDQELD

SEQ ID NO: 44111 - protein, 7 aa, synthetic construct
RGDQVDD

SEQ ID NO: 44112 - protein, 7 aa, synthetic construct
RGDDFIT

SEQ ID NO: 44113 - protein, 7 aa, synthetic construct
RGDSQQG

SEQ ID NO: 44114 - protein, 7 aa, synthetic construct
RGDSTVD

SEQ ID NO: 44115 - protein, 7 aa, synthetic construct
RGDTEED

SEQ ID NO: 44116 - protein, 7 aa, synthetic construct
RGDTFLQ

SEQ ID NO: 44117 - protein, 7 aa, synthetic construct
RGDDHAE

SEQ ID NO: 44118 - protein, 7 aa, synthetic construct
RGDTNIN

SEQ ID NO: 44119 - protein, 7 aa, synthetic construct
RGDTSDE

SEQ ID NO: 44120 - protein, 7 aa, synthetic construct
RGDAEDG

SEQ ID NO: 44121 - protein, 7 aa, synthetic construct
RGDDHVN

SEQ ID NO: 44122 - protein, 7 aa, synthetic construct
RGDDHVQ

SEQ ID NO: 44123 - protein, 7 aa, synthetic construct
RGDDIEE

SEQ ID NO: 44124 - protein, 7 aa, synthetic construct
RGDVGFD

SEQ ID NO: 44125 - protein, 7 aa, synthetic construct
RGDVVAA

SEQ ID NO: 44126 - protein, 7 aa, synthetic construct
RGDDLEI

SEQ ID NO: 44127 - protein, 7 aa, synthetic construct
RGDDQFF

SEQ ID NO: 44128 - protein, 7 aa, synthetic construct
RGDEEAQ

SEQ ID NO: 44129 - protein, 7 aa, synthetic construct
RGDEFDI

SEQ ID NO: 44130 - protein, 7 aa, synthetic construct
RGDEILN

SEQ ID NO: 44131 - protein, 7 aa, synthetic construct
RGDEKSG

SEQ ID NO: 44132 - protein, 7 aa, synthetic construct
RGDAFVD

SEQ ID NO: 44133 - protein, 7 aa, synthetic construct
RGDAGEE

SEQ ID NO: 44134 - protein, 7 aa, synthetic construct
RGDESLD

SEQ ID NO: 44135 - protein, 7 aa, synthetic construct
RGDEVEH

SEQ ID NO: 44136 - protein, 7 aa, synthetic construct
RGDAHLE

SEQ ID NO: 44137 - protein, 7 aa, synthetic construct
RGDGEQS

SEQ ID NO: 44138 - protein, 7 aa, synthetic construct
RGDGNVD

SEQ ID NO: 44139 - protein, 7 aa, synthetic construct
RGDHDDH

SEQ ID NO: 44140 - protein, 7 aa, synthetic construct
RGDHHIE

SEQ ID NO: 44141 - protein, 7 aa, synthetic construct
RGDHIIH

SEQ ID NO: 44142 - protein, 7 aa, synthetic construct
RGDIEVD

SEQ ID NO: 44143 - protein, 7 aa, synthetic construct
RGDIFAA

SEQ ID NO: 44144 - protein, 7 aa, synthetic construct
RGDIKED

SEQ ID NO: 44145 - protein, 7 aa, synthetic construct
RGDITNE

SEQ ID NO: 44146 - protein, 7 aa, synthetic construct
RGDIVEV

SEQ ID NO: 44147 - protein, 7 aa, synthetic construct
RGDKHHE

SEQ ID NO: 44148 - protein, 7 aa, synthetic construct
RGDKQDA

SEQ ID NO: 44149 - protein, 7 aa, synthetic construct
RGDATGD

SEQ ID NO: 44150 - protein, 7 aa, synthetic construct
RGDATIA

SEQ ID NO: 44151 - protein, 7 aa, synthetic construct
RGDNEKD

SEQ ID NO: 44152 - protein, 7 aa, synthetic construct
RGDNHQD

SEQ ID NO: 44153 - protein, 7 aa, synthetic construct
RGDNIAN

SEQ ID NO: 44154 - protein, 7 aa, synthetic construct
RGDNQIA

SEQ ID NO: 44155 - protein, 7 aa, synthetic construct
RGDNQTD

SEQ ID NO: 44156 - protein, 7 aa, synthetic construct
RGDNTTE

SEQ ID NO: 44157 - protein, 7 aa, synthetic construct
RGDQFLD

SEQ ID NO: 44158 - protein, 7 aa, synthetic construct
RGDQQLD

SEQ ID NO: 44159 - protein, 7 aa, synthetic construct
RGDQQQE

SEQ ID NO: 44160 - protein, 7 aa, synthetic construct
RGDDEGQ

SEQ ID NO: 44161 - protein, 7 aa, synthetic construct
RGDRQAG

SEQ ID NO: 44162 - protein, 7 aa, synthetic construct
RGDSTID

SEQ ID NO: 44163 - protein, 7 aa, synthetic construct
RGDTFER

SEQ ID NO: 44164 - protein, 7 aa, synthetic construct
RGDTFNG

SEQ ID NO: 44165 - protein, 7 aa, synthetic construct
RGDTFST

SEQ ID NO: 44166 - protein, 7 aa, synthetic construct
RGDTFVT

SEQ ID NO: 44167 - protein, 7 aa, synthetic construct
RGDTGDS

SEQ ID NO: 44168 - protein, 7 aa, synthetic construct
RGDTQEG

SEQ ID NO: 44169 - protein, 7 aa, synthetic construct
RGDTQLD

SEQ ID NO: 44170 - protein, 7 aa, synthetic construct
RGDTVDE

SEQ ID NO: 44171 - protein, 7 aa, synthetic construct
RGDVFEH

SEQ ID NO: 44172 - protein, 7 aa, synthetic construct
RGDVTEE

SEQ ID NO: 44173 - protein, 7 aa, synthetic construct
RGDDKIG

SEQ ID NO: 44174 - protein, 7 aa, synthetic construct
RGDDQVG

SEQ ID NO: 44175 - protein, 7 aa, synthetic construct
RGDDTVF

SEQ ID NO: 44176 - protein, 7 aa, synthetic construct
RGDEEFE

SEQ ID NO: 44177 - protein, 7 aa, synthetic construct
RGDEFSG

SEQ ID NO: 44178 - protein, 7 aa, synthetic construct
RGDELID

SEQ ID NO: 44179 - protein, 7 aa, synthetic construct
RGDELIR

SEQ ID NO: 44180 - protein, 7 aa, synthetic construct
RGDEQQN

SEQ ID NO: 44181 - protein, 7 aa, synthetic construct
RGDETEV

SEQ ID NO: 44182 - protein, 7 aa, synthetic construct
RGDETVD

SEQ ID NO: 44183 - protein, 7 aa, synthetic construct
RGDFTIN

SEQ ID NO: 44184 - protein, 7 aa, synthetic construct
RGDGTAG

SEQ ID NO: 44185 - protein, 7 aa, synthetic construct
RGDGVQG

SEQ ID NO: 44186 - protein, 7 aa, synthetic construct
RGDHDDT

SEQ ID NO: 44187 - protein, 7 aa, synthetic construct
RGDHDIE

SEQ ID NO: 44188 - protein, 7 aa, synthetic construct
RGDHIIS

SEQ ID NO: 44189 - protein, 7 aa, synthetic construct
RGDHLIN

SEQ ID NO: 44190 - protein, 7 aa, synthetic construct
RGDIATG

SEQ ID NO: 44191 - protein, 7 aa, synthetic construct
RGDLAQF

SEQ ID NO: 44192 - protein, 7 aa, synthetic construct
RGDLGTF

SEQ ID NO: 44193 - protein, 7 aa, synthetic construct
RGDNHIS

SEQ ID NO: 44194 - protein, 7 aa, synthetic construct
RGDNISA

SEQ ID NO: 44195 - protein, 7 aa, synthetic construct
RGDQEFG

SEQ ID NO: 44196 - protein, 7 aa, synthetic construct
RGDQHIQ

SEQ ID NO: 44197 - protein, 7 aa, synthetic construct
RGDQKLG

SEQ ID NO: 44198 - protein, 7 aa, synthetic construct
RGDQQIG

SEQ ID NO: 44199 - protein, 7 aa, synthetic construct
RGDRFIN

SEQ ID NO: 44200 - protein, 7 aa, synthetic construct
RGDDEQE

SEQ ID NO: 44201 - protein, 7 aa, synthetic construct
RGDTADS

SEQ ID NO: 44202 - protein, 7 aa, synthetic construct
RGDTFEK

SEQ ID NO: 44203 - protein, 7 aa, synthetic construct
RGDTFSA

SEQ ID NO: 44204 - protein, 7 aa, synthetic construct
RGDTVQE

SEQ ID NO: 44205 - protein, 7 aa, synthetic construct
RGDDIAD

SEQ ID NO: 44206 - protein, 7 aa, synthetic construct
RGDDIDQ

SEQ ID NO: 44207 - protein, 7 aa, synthetic construct
RGDVFEE

SEQ ID NO: 44208 - protein, 7 aa, synthetic construct
RGDVFID

SEQ ID NO: 44209 - protein, 7 aa, synthetic construct
RGDDKAG

SEQ ID NO: 44210 - protein, 7 aa, synthetic construct
RGDDKVD

SEQ ID NO: 44211 - protein, 7 aa, synthetic construct
RGDDQLG

SEQ ID NO: 44212 - protein, 7 aa, synthetic construct
RGDDSID

SEQ ID NO: 44213 - protein, 7 aa, synthetic construct
RGDDSVD

SEQ ID NO: 44214 - protein, 7 aa, synthetic construct
RGDDTIS

SEQ ID NO: 44215 - protein, 7 aa, synthetic construct
RGDEADH

SEQ ID NO: 44216 - protein, 7 aa, synthetic construct
RGDAFES

SEQ ID NO: 44217 - protein, 7 aa, synthetic construct
RGDEFVA

SEQ ID NO: 44218 - protein, 7 aa, synthetic construct
RGDEGDD

SEQ ID NO: 44219 - protein, 7 aa, synthetic construct
RGDAFLS

SEQ ID NO: 44220 - protein, 7 aa, synthetic construct
RGDAFQE

SEQ ID NO: 44221 - protein, 7 aa, synthetic construct
RGDGHVD

SEQ ID NO: 44222 - protein, 7 aa, synthetic construct
RGDGNIS

SEQ ID NO: 44223 - protein, 7 aa, synthetic construct
RGDHILE

SEQ ID NO: 44224 - protein, 7 aa, synthetic construct
RGDIGDD

SEQ ID NO: 44225 - protein, 7 aa, synthetic construct
RGDIGDE

SEQ ID NO: 44226 - protein, 7 aa, synthetic construct
RGDKEAG

SEQ ID NO: 44227 - protein, 7 aa, synthetic construct
RGDKELD

SEQ ID NO: 44228 - protein, 7 aa, synthetic construct
RGDKFDN

SEQ ID NO: 44229 - protein, 7 aa, synthetic construct
RGDKTSE

SEQ ID NO: 44230 - protein, 7 aa, synthetic construct
RGDQELG

SEQ ID NO: 44231 - protein, 7 aa, synthetic construct
RGDDDAG

SEQ ID NO: 44232 - protein, 7 aa, synthetic construct
RGDDDRD

SEQ ID NO: 44233 - protein, 7 aa, synthetic construct
RGDSAIN

SEQ ID NO: 44234 - protein, 7 aa, synthetic construct
RGDSLES

SEQ ID NO: 44235 - protein, 7 aa, synthetic construct
RGDSNGG

SEQ ID NO: 44236 - protein, 7 aa, synthetic construct
RGDTDFG

SEQ ID NO: 44237 - protein, 7 aa, synthetic construct
RGDTFSD

SEQ ID NO: 44238 - protein, 7 aa, synthetic construct
RGDTFSG

SEQ ID NO: 44239 - protein, 7 aa, synthetic construct
RGDTLDT

SEQ ID NO: 44240 - protein, 7 aa, synthetic construct
RGDTTIS

SEQ ID NO: 44241 - protein, 7 aa, synthetic construct
RGDVFLE

SEQ ID NO: 44242 - protein, 7 aa, synthetic construct
RGDDIIG

SEQ ID NO: 44243 - protein, 7 aa, synthetic construct
RGDDKIN

SEQ ID NO: 44244 - protein, 7 aa, synthetic construct
RGDAEGV

SEQ ID NO: 44245 - protein, 7 aa, synthetic construct
RGDERNE

SEQ ID NO: 44246 - protein, 7 aa, synthetic construct
RGDAGEQ

SEQ ID NO: 44247 - protein, 7 aa, synthetic construct
RGDGEVD

SEQ ID NO: 44248 - protein, 7 aa, synthetic construct
RGDGHAG

SEQ ID NO: 44249 - protein, 7 aa, synthetic construct
RGDGIIS

SEQ ID NO: 44250 - protein, 7 aa, synthetic construct
RGDGILG

SEQ ID NO: 44251 - protein, 7 aa, synthetic construct
RGDGRLS

SEQ ID NO: 44252 - protein, 7 aa, synthetic construct
RGDGRVD

SEQ ID NO: 44253 - protein, 7 aa, synthetic construct
RGDHEAD

SEQ ID NO: 44254 - protein, 7 aa, synthetic construct
RGDHVIA

SEQ ID NO: 44255 - protein, 7 aa, synthetic construct
RGDKFEG

SEQ ID NO: 44256 - protein, 7 aa, synthetic construct
RGDKTIE

SEQ ID NO: 44257 - protein, 7 aa, synthetic construct
RGDAVLG

SEQ ID NO: 44258 - protein, 7 aa, synthetic construct
RGDNTAD

SEQ ID NO: 44259 - protein, 7 aa, synthetic construct
RGDQDIE

SEQ ID NO: 44260 - protein, 7 aa, synthetic construct
RGDQHVD

SEQ ID NO: 44261 - protein, 7 aa, synthetic construct
RGDSHAD

SEQ ID NO: 44262 - protein, 7 aa, synthetic construct
RGDTDGS

SEQ ID NO: 44263 - protein, 7 aa, synthetic construct
RGDTFHN

SEQ ID NO: 44264 - protein, 7 aa, synthetic construct
RGDTFLA

SEQ ID NO: 44265 - protein, 7 aa, synthetic construct
RGDTFNT

SEQ ID NO: 44266 - protein, 7 aa, synthetic construct
RGDTSDI

SEQ ID NO: 44267 - protein, 7 aa, synthetic construct
RGDVFDR

SEQ ID NO: 44268 - protein, 7 aa, synthetic construct
RGDEEAL

SEQ ID NO: 44269 - protein, 7 aa, synthetic construct
RGDEEVA

SEQ ID NO: 44270 - protein, 7 aa, synthetic construct
RGDEGAE

SEQ ID NO: 44271 - protein, 7 aa, synthetic construct
RGDEGEH

SEQ ID NO: 44272 - protein, 7 aa, synthetic construct
RGDEIVA

SEQ ID NO: 44273 - protein, 7 aa, synthetic construct
RGDGAQG

SEQ ID NO: 44274 - protein, 7 aa, synthetic construct
RGDAIIG

SEQ ID NO: 44275 - protein, 7 aa, synthetic construct
RGDHFIE

SEQ ID NO: 44276 - protein, 7 aa, synthetic construct
RGDHHLG

SEQ ID NO: 44277 - protein, 7 aa, synthetic construct
RGDHIAE

SEQ ID NO: 44278 - protein, 7 aa, synthetic construct
RGDALIA

SEQ ID NO: 44279 - protein, 7 aa, synthetic construct
RGDHVID

SEQ ID NO: 44280 - protein, 7 aa, synthetic construct
RGDIGHF

SEQ ID NO: 44281 - protein, 7 aa, synthetic construct
RGDIGIL

SEQ ID NO: 44282 - protein, 7 aa, synthetic construct
RGDINHD

SEQ ID NO: 44283 - protein, 7 aa, synthetic construct
RGDIQVD

SEQ ID NO: 44284 - protein, 7 aa, synthetic construct
RGDKEHE

SEQ ID NO: 44285 - protein, 7 aa, synthetic construct
RGDKIIE

SEQ ID NO: 44286 - protein, 7 aa, synthetic construct
RGDKTIN

SEQ ID NO: 44287 - protein, 7 aa, synthetic construct
RGDLARL

SEQ ID NO: 44288 - protein, 7 aa, synthetic construct
RGDLQQH

SEQ ID NO: 44289 - protein, 7 aa, synthetic construct
RGDATLA

SEQ ID NO: 44290 - protein, 7 aa, synthetic construct
RGDNFSD

SEQ ID NO: 44291 - protein, 7 aa, synthetic construct
RGDNNLG

SEQ ID NO: 44292 - protein, 7 aa, synthetic construct
RGDQFLG

SEQ ID NO: 44293 - protein, 7 aa, synthetic construct
RGDRELD

SEQ ID NO: 44294 - protein, 7 aa, synthetic construct
RGDDFIG

SEQ ID NO: 44295 - protein, 7 aa, synthetic construct
RGDTFAV

SEQ ID NO: 44296 - protein, 7 aa, synthetic construct
RGDTFDN

SEQ ID NO: 44297 - protein, 7 aa, synthetic construct
RGDTFIE

SEQ ID NO: 44298 - protein, 7 aa, synthetic construct
RGDTFIV

SEQ ID NO: 44299 - protein, 7 aa, synthetic construct
RGDTFRG

SEQ ID NO: 44300 - protein, 7 aa, synthetic construct
RGDDHIF

SEQ ID NO: 44301 - protein, 7 aa, synthetic construct
RGDDHQA

SEQ ID NO: 44302 - protein, 7 aa, synthetic construct
RGDTSIA

SEQ ID NO: 44303 - protein, 7 aa, synthetic construct
RGDVHEG

SEQ ID NO: 44304 - protein, 7 aa, synthetic construct
RGDDILN

SEQ ID NO: 44305 - protein, 7 aa, synthetic construct
RGDVSDE

SEQ ID NO: 44306 - protein, 7 aa, synthetic construct
RGDDKIS

SEQ ID NO: 44307 - protein, 7 aa, synthetic construct
RGDDSAT

SEQ ID NO: 44308 - protein, 7 aa, synthetic construct
RGDDSIA

SEQ ID NO: 44309 - protein, 7 aa, synthetic construct
RGDDTLF

SEQ ID NO: 44310 - protein, 7 aa, synthetic construct
RGDEFNH

SEQ ID NO: 44311 - protein, 7 aa, synthetic construct
RGDEFVG

SEQ ID NO: 44312 - protein, 7 aa, synthetic construct
RGDEGDA

SEQ ID NO: 44313 - protein, 7 aa, synthetic construct
RGDEHLA

SEQ ID NO: 44314 - protein, 7 aa, synthetic construct
RGDGDDF

SEQ ID NO: 44315 - protein, 7 aa, synthetic construct
RGDGDVD

SEQ ID NO: 44316 - protein, 7 aa, synthetic construct
RGDHHIN

SEQ ID NO: 44317 - protein, 7 aa, synthetic construct
RGDALDL

SEQ ID NO: 44318 - protein, 7 aa, synthetic construct
RGDHRLA

SEQ ID NO: 44319 - protein, 7 aa, synthetic construct
RGDHSIE

SEQ ID NO: 44320 - protein, 7 aa, synthetic construct
RGDIDKD

SEQ ID NO: 44321 - protein, 7 aa, synthetic construct
RGDITAG

SEQ ID NO: 44322 - protein, 7 aa, synthetic construct
RGDKLVG

SEQ ID NO: 44323 - protein, 7 aa, synthetic construct
RGDARLA

SEQ ID NO: 44324 - protein, 7 aa, synthetic construct
RGDLADH

SEQ ID NO: 44325 - protein, 7 aa, synthetic construct
RGDATDH

SEQ ID NO: 44326 - protein, 7 aa, synthetic construct
RGDNHLG

SEQ ID NO: 44327 - protein, 7 aa, synthetic construct
RGDQHIA

SEQ ID NO: 44328 - protein, 7 aa, synthetic construct
RGDDANQ

SEQ ID NO: 44329 - protein, 7 aa, synthetic construct
RGDQLLN

SEQ ID NO: 44330 - protein, 7 aa, synthetic construct
RGDSQLE

SEQ ID NO: 44331 - protein, 7 aa, synthetic construct
RGDTDLN

SEQ ID NO: 44332 - protein, 7 aa, synthetic construct
RGDTTTE

SEQ ID NO: 44333 - protein, 7 aa, synthetic construct
RGDDHVD

SEQ ID NO: 44334 - protein, 7 aa, synthetic construct
RGDVFDN

SEQ ID NO: 44335 - protein, 7 aa, synthetic construct
RGDDLLG

SEQ ID NO: 44336 - protein, 7 aa, synthetic construct
RGDDQHG

SEQ ID NO: 44337 - protein, 7 aa, synthetic construct
RGDAELA

SEQ ID NO: 44338 - protein, 7 aa, synthetic construct
RGDDQVD

SEQ ID NO: 44339 - protein, 7 aa, synthetic construct
RGDDTNT

SEQ ID NO: 44340 - protein, 7 aa, synthetic construct
RGDAFEG

SEQ ID NO: 44341 - protein, 7 aa, synthetic construct
RGDEFII

SEQ ID NO: 44342 - protein, 7 aa, synthetic construct
RGDEFLQ

SEQ ID NO: 44343 - protein, 7 aa, synthetic construct
RGDAFLE

SEQ ID NO: 44344 - protein, 7 aa, synthetic construct
RGDENLG

SEQ ID NO: 44345 - protein, 7 aa, synthetic construct
RGDETDG

SEQ ID NO: 44346 - protein, 7 aa, synthetic construct
RGDFHID

SEQ ID NO: 44347 - protein, 7 aa, synthetic construct
RGDAHLN

SEQ ID NO: 44348 - protein, 7 aa, synthetic construct
RGDHASD

SEQ ID NO: 44349 - protein, 7 aa, synthetic construct
RGDHEIQ

SEQ ID NO: 44350 - protein, 7 aa, synthetic construct
RGDHILT

SEQ ID NO: 44351 - protein, 7 aa, synthetic construct
RGDHLIQ

SEQ ID NO: 44352 - protein, 7 aa, synthetic construct
RGDALIG

SEQ ID NO: 44353 - protein, 7 aa, synthetic construct
RGDHTDE

SEQ ID NO: 44354 - protein, 7 aa, synthetic construct
RGDINAA

SEQ ID NO: 44355 - protein, 7 aa, synthetic construct
RGDINVA

SEQ ID NO: 44356 - protein, 7 aa, synthetic construct
RGDAQIK

SEQ ID NO: 44357 - protein, 7 aa, synthetic construct
RGDIVTD

SEQ ID NO: 44358 - protein, 7 aa, synthetic construct
RGDKQIA

SEQ ID NO: 44359 - protein, 7 aa, synthetic construct
RGDNGSA

SEQ ID NO: 44360 - protein, 7 aa, synthetic construct
RGDQIVD

SEQ ID NO: 44361 - protein, 7 aa, synthetic construct
RGDDEKA

SEQ ID NO: 44362 - protein, 7 aa, synthetic construct
RGDSFLA

SEQ ID NO: 44363 - protein, 7 aa, synthetic construct
RGDSFVA

SEQ ID NO: 44364 - protein, 7 aa, synthetic construct
RGDDGAF

SEQ ID NO: 44365 - protein, 7 aa, synthetic construct
RGDTDSA

SEQ ID NO: 44366 - protein, 7 aa, synthetic construct
RGDTERA

SEQ ID NO: 44367 - protein, 7 aa, synthetic construct
RGDTFQL

SEQ ID NO: 44368 - protein, 7 aa, synthetic construct
RGDTIDE

SEQ ID NO: 44369 - protein, 7 aa, synthetic construct
RGDTNED

SEQ ID NO: 44370 - protein, 7 aa, synthetic construct
RGDDTLA

SEQ ID NO: 44371 - protein, 7 aa, synthetic construct
RGDDVEG

SEQ ID NO: 44372 - protein, 7 aa, synthetic construct
RGDFGEF

SEQ ID NO: 44373 - protein, 7 aa, synthetic construct
RGDAHLD

SEQ ID NO: 44374 - protein, 7 aa, synthetic construct
RGDGDED

SEQ ID NO: 44375 - protein, 7 aa, synthetic construct
RGDAIFN

SEQ ID NO: 44376 - protein, 7 aa, synthetic construct
RGDGIDA

SEQ ID NO: 44377 - protein, 7 aa, synthetic construct
RGDAIVS

SEQ ID NO: 44378 - protein, 7 aa, synthetic construct
RGDGVID

SEQ ID NO: 44379 - protein, 7 aa, synthetic construct
RGDHFDH

SEQ ID NO: 44380 - protein, 7 aa, synthetic construct
RGDHFIV

SEQ ID NO: 44381 - protein, 7 aa, synthetic construct
RGDHFLH

SEQ ID NO: 44382 - protein, 7 aa, synthetic construct
RGDHTAD

SEQ ID NO: 44383 - protein, 7 aa, synthetic construct
RGDIFAN

SEQ ID NO: 44384 - protein, 7 aa, synthetic construct
RGDIQGD

SEQ ID NO: 44385 - protein, 7 aa, synthetic construct
RGDAQIG

SEQ ID NO: 44386 - protein, 7 aa, synthetic construct
RGDNLIA

SEQ ID NO: 44387 - protein, 7 aa, synthetic construct
RGDNNVD

SEQ ID NO: 44388 - protein, 7 aa, synthetic construct
RGDNQVA

SEQ ID NO: 44389 - protein, 7 aa, synthetic construct
RGDQFVD

SEQ ID NO: 44390 - protein, 7 aa, synthetic construct
RGDDEFG

SEQ ID NO: 44391 - protein, 7 aa, synthetic construct
RGDDEIG

SEQ ID NO: 44392 - protein, 7 aa, synthetic construct
RGDDGAL

SEQ ID NO: 44393 - protein, 7 aa, synthetic construct
RGDTFEI

SEQ ID NO: 44394 - protein, 7 aa, synthetic construct
RGDTIQH

SEQ ID NO: 44395 - protein, 7 aa, synthetic construct
RGDTNND

SEQ ID NO: 44396 - protein, 7 aa, synthetic construct
RGDVAGD

SEQ ID NO: 44397 - protein, 7 aa, synthetic construct
RGDVIED

SEQ ID NO: 44398 - protein, 7 aa, synthetic construct
RGDVQDE

SEQ ID NO: 44399 - protein, 7 aa, synthetic construct
RGDDKLG

SEQ ID NO: 44400 - protein, 7 aa, synthetic construct
RGDDQLR

SEQ ID NO: 44401 - protein, 7 aa, synthetic construct
RGDAFAH

SEQ ID NO: 44402 - protein, 7 aa, synthetic construct
RGDEHIS

SEQ ID NO: 44403 - protein, 7 aa, synthetic construct
RGDEHQA

SEQ ID NO: 44404 - protein, 7 aa, synthetic construct
RGDEQIN

SEQ ID NO: 44405 - protein, 7 aa, synthetic construct
RGDEVAA

SEQ ID NO: 44406 - protein, 7 aa, synthetic construct
RGDFNIN

SEQ ID NO: 44407 - protein, 7 aa, synthetic construct
RGDAHLG

SEQ ID NO: 44408 - protein, 7 aa, synthetic construct
RGDGHLE

SEQ ID NO: 44409 - protein, 7 aa, synthetic construct
RGDGLVD

SEQ ID NO: 44410 - protein, 7 aa, synthetic construct
RGDHFIT

SEQ ID NO: 44411 - protein, 7 aa, synthetic construct
RGDHIAS

SEQ ID NO: 44412 - protein, 7 aa, synthetic construct
RGDHTID

SEQ ID NO: 44413 - protein, 7 aa, synthetic construct
RGDKIAD

SEQ ID NO: 44414 - protein, 7 aa, synthetic construct
RGDKIIA

SEQ ID NO: 44415 - protein, 7 aa, synthetic construct
RGDKSVD

SEQ ID NO: 44416 - protein, 7 aa, synthetic construct
RGDLHVG

SEQ ID NO: 44417 - protein, 7 aa, synthetic construct
RGDLQGD

SEQ ID NO: 44418 - protein, 7 aa, synthetic construct
RGDNDEH

SEQ ID NO: 44419 - protein, 7 aa, synthetic construct
RGDNGEI

SEQ ID NO: 44420 - protein, 7 aa, synthetic construct
RGDNIIN

SEQ ID NO: 44421 - protein, 7 aa, synthetic construct
RGDNILG

SEQ ID NO: 44422 - protein, 7 aa, synthetic construct
RGDNNLF

SEQ ID NO: 44423 - protein, 7 aa, synthetic construct
RGDQFTD

SEQ ID NO: 44424 - protein, 7 aa, synthetic construct
RGDDATV

SEQ ID NO: 44425 - protein, 7 aa, synthetic construct
RGDQNIE

SEQ ID NO: 44426 - protein, 7 aa, synthetic construct
RGDDDEG

SEQ ID NO: 44427 - protein, 7 aa, synthetic construct
RGDSSLN

SEQ ID NO: 44428 - protein, 7 aa, synthetic construct
RGDTDHA

SEQ ID NO: 44429 - protein, 7 aa, synthetic construct
RGDTDNI

SEQ ID NO: 44430 - protein, 7 aa, synthetic construct
RGDDNLS

SEQ ID NO: 44431 - protein, 7 aa, synthetic construct
RGDDQLT

SEQ ID NO: 44432 - protein, 7 aa, synthetic construct
RGDDRIE

SEQ ID NO: 44433 - protein, 7 aa, synthetic construct
RGDEEIT

SEQ ID NO: 44434 - protein, 7 aa, synthetic construct
RGDELLG

SEQ ID NO: 44435 - protein, 7 aa, synthetic construct
RGDETLL

SEQ ID NO: 44436 - protein, 7 aa, synthetic construct
RGDGDLD

SEQ ID NO: 44437 - protein, 7 aa, synthetic construct
RGDGDVE

SEQ ID NO: 44438 - protein, 7 aa, synthetic construct
RGDGLIE

SEQ ID NO: 44439 - protein, 7 aa, synthetic construct
RGDGQLD

SEQ ID NO: 44440 - protein, 7 aa, synthetic construct
RGDGVVD

SEQ ID NO: 44441 - protein, 7 aa, synthetic construct
RGDHLLT

SEQ ID NO: 44442 - protein, 7 aa, synthetic construct
RGDHSVD

SEQ ID NO: 44443 - protein, 7 aa, synthetic construct
RGDIFSD

SEQ ID NO: 44444 - protein, 7 aa, synthetic construct
RGDINDV

SEQ ID NO: 44445 - protein, 7 aa, synthetic construct
RGDKHVA

SEQ ID NO: 44446 - protein, 7 aa, synthetic construct
RGDASLD

SEQ ID NO: 44447 - protein, 7 aa, synthetic construct
RGDQAIE

SEQ ID NO: 44448 - protein, 7 aa, synthetic construct
RGDTEVT

SEQ ID NO: 44449 - protein, 7 aa, synthetic construct
RGDTGED

SEQ ID NO: 44450 - protein, 7 aa, synthetic construct
RGDDHIN

SEQ ID NO: 44451 - protein, 7 aa, synthetic construct
RGDVFDS

SEQ ID NO: 44452 - protein, 7 aa, synthetic construct
RGDDQLS

SEQ ID NO: 44453 - protein, 7 aa, synthetic construct
RGDDRLL

SEQ ID NO: 44454 - protein, 7 aa, synthetic construct
RGDEHIN

SEQ ID NO: 44455 - protein, 7 aa, synthetic construct
RGDEHLN

SEQ ID NO: 44456 - protein, 7 aa, synthetic construct
RGDEIQA

SEQ ID NO: 44457 - protein, 7 aa, synthetic construct
RGDEIQG

SEQ ID NO: 44458 - protein, 7 aa, synthetic construct
RGDAFQS

SEQ ID NO: 44459 - protein, 7 aa, synthetic construct
RGDFQLD

SEQ ID NO: 44460 - protein, 7 aa, synthetic construct
RGDGDEE

SEQ ID NO: 44461 - protein, 7 aa, synthetic construct
RGDGEFF

SEQ ID NO: 44462 - protein, 7 aa, synthetic construct
RGDGIVG

SEQ ID NO: 44463 - protein, 7 aa, synthetic construct
RGDGLVG

SEQ ID NO: 44464 - protein, 7 aa, synthetic construct
RGDHADD

SEQ ID NO: 44465 - protein, 7 aa, synthetic construct
RGDHFIN

SEQ ID NO: 44466 - protein, 7 aa, synthetic construct
RGDHHLN

SEQ ID NO: 44467 - protein, 7 aa, synthetic construct
RGDHLVD

SEQ ID NO: 44468 - protein, 7 aa, synthetic construct
RGDHQID

SEQ ID NO: 44469 - protein, 7 aa, synthetic construct
RGDIDLF

SEQ ID NO: 44470 - protein, 7 aa, synthetic construct
RGDIEDE

SEQ ID NO: 44471 - protein, 7 aa, synthetic construct
RGDKDLA

SEQ ID NO: 44472 - protein, 7 aa, synthetic construct
RGDKLAE

SEQ ID NO: 44473 - protein, 7 aa, synthetic construct
RGDLFHD

SEQ ID NO: 44474 - protein, 7 aa, synthetic construct
RGDAADT

SEQ ID NO: 44475 - protein, 7 aa, synthetic construct
RGDNDEV

SEQ ID NO: 44476 - protein, 7 aa, synthetic construct
RGDNVIE

SEQ ID NO: 44477 - protein, 7 aa, synthetic construct
RGDQQLL

SEQ ID NO: 44478 - protein, 7 aa, synthetic construct
RGDDDFG

SEQ ID NO: 44479 - protein, 7 aa, synthetic construct
RGDDFDD

SEQ ID NO: 44480 - protein, 7 aa, synthetic construct
RGDTIQA

SEQ ID NO: 44481 - protein, 7 aa, synthetic construct
RGDTTDT

SEQ ID NO: 44482 - protein, 7 aa, synthetic construct
RGDTVAD

SEQ ID NO: 44483 - protein, 7 aa, synthetic construct
RGDTVIE

SEQ ID NO: 44484 - protein, 7 aa, synthetic construct
RGDVAEG

SEQ ID NO: 44485 - protein, 7 aa, synthetic construct
RGDDILG

SEQ ID NO: 44486 - protein, 7 aa, synthetic construct
RGDDKLE

SEQ ID NO: 44487 - protein, 7 aa, synthetic construct
RGDDLID

SEQ ID NO: 44488 - protein, 7 aa, synthetic construct
RGDDNEA

SEQ ID NO: 44489 - protein, 7 aa, synthetic construct
RGDDTLT

SEQ ID NO: 44490 - protein, 7 aa, synthetic construct
RGDDTLV

SEQ ID NO: 44491 - protein, 7 aa, synthetic construct
RGDDVFA

SEQ ID NO: 44492 - protein, 7 aa, synthetic construct
RGDEFLS

SEQ ID NO: 44493 - protein, 7 aa, synthetic construct
RGDEGDQ

SEQ ID NO: 44494 - protein, 7 aa, synthetic construct
RGDAGAE

SEQ ID NO: 44495 - protein, 7 aa, synthetic construct
RGDEQKD

SEQ ID NO: 44496 - protein, 7 aa, synthetic construct
RGDERIA

SEQ ID NO: 44497 - protein, 7 aa, synthetic construct
RGDGHLA

SEQ ID NO: 44498 - protein, 7 aa, synthetic construct
RGDAKID

SEQ ID NO: 44499 - protein, 7 aa, synthetic construct
RGDHLLF

SEQ ID NO: 44500 - protein, 7 aa, synthetic construct
RGDHNVD

SEQ ID NO: 44501 - protein, 7 aa, synthetic construct
RGDALLA

SEQ ID NO: 44502 - protein, 7 aa, synthetic construct
RGDALVD

SEQ ID NO: 44503 - protein, 7 aa, synthetic construct
RGDIDKG

SEQ ID NO: 44504 - protein, 7 aa, synthetic construct
RGDILEQ

SEQ ID NO: 44505 - protein, 7 aa, synthetic construct
RGDANVD

SEQ ID NO: 44506 - protein, 7 aa, synthetic construct
RGDASEE

SEQ ID NO: 44507 - protein, 7 aa, synthetic construct
RGDNEIG

SEQ ID NO: 44508 - protein, 7 aa, synthetic construct
RGDNIVG

SEQ ID NO: 44509 - protein, 7 aa, synthetic construct
RGDSDLN

SEQ ID NO: 44510 - protein, 7 aa, synthetic construct
RGDDFLQ

SEQ ID NO: 44511 - protein, 7 aa, synthetic construct
RGDSSID

SEQ ID NO: 44512 - protein, 7 aa, synthetic construct
RGDTFIS

SEQ ID NO: 44513 - protein, 7 aa, synthetic construct
RGDTGGD

SEQ ID NO: 44514 - protein, 7 aa, synthetic construct
RGDTGTD

SEQ ID NO: 44515 - protein, 7 aa, synthetic construct
RGDTHTD

SEQ ID NO: 44516 - protein, 7 aa, synthetic construct
RGDTTIQ

SEQ ID NO: 44517 - protein, 7 aa, synthetic construct
RGDVADV

SEQ ID NO: 44518 - protein, 7 aa, synthetic construct
RGDVDEF

SEQ ID NO: 44519 - protein, 7 aa, synthetic construct
RGDDNFF

SEQ ID NO: 44520 - protein, 7 aa, synthetic construct
RGDDSLG

SEQ ID NO: 44521 - protein, 7 aa, synthetic construct
RGDAFAF

SEQ ID NO: 44522 - protein, 7 aa, synthetic construct
RGDAFVA

SEQ ID NO: 44523 - protein, 7 aa, synthetic construct
RGDENIG

SEQ ID NO: 44524 - protein, 7 aa, synthetic construct
RGDAHLQ

SEQ ID NO: 44525 - protein, 7 aa, synthetic construct
RGDGIQG

SEQ ID NO: 44526 - protein, 7 aa, synthetic construct
RGDHFLT

SEQ ID NO: 44527 - protein, 7 aa, synthetic construct
RGDHIED

SEQ ID NO: 44528 - protein, 7 aa, synthetic construct
RGDHKDD

SEQ ID NO: 44529 - protein, 7 aa, synthetic construct
RGDHNLH

SEQ ID NO: 44530 - protein, 7 aa, synthetic construct
RGDHSLD

SEQ ID NO: 44531 - protein, 7 aa, synthetic construct
RGDIGDA

SEQ ID NO: 44532 - protein, 7 aa, synthetic construct
RGDATFA

SEQ ID NO: 44533 - protein, 7 aa, synthetic construct
RGDNEGD

SEQ ID NO: 44534 - protein, 7 aa, synthetic construct
RGDNLID

SEQ ID NO: 44535 - protein, 7 aa, synthetic construct
RGDNQIG

SEQ ID NO: 44536 - protein, 7 aa, synthetic construct
RGDNVIA

SEQ ID NO: 44537 - protein, 7 aa, synthetic construct
RGDQNIG

SEQ ID NO: 44538 - protein, 7 aa, synthetic construct
RGDQQIA

SEQ ID NO: 44539 - protein, 7 aa, synthetic construct
RGDDEGE

SEQ ID NO: 44540 - protein, 7 aa, synthetic construct
RGDSNDE

SEQ ID NO: 44541 - protein, 7 aa, synthetic construct
RGDTTAN

SEQ ID NO: 44542 - protein, 7 aa, synthetic construct
RGDVDDQ

SEQ ID NO: 44543 - protein, 7 aa, synthetic construct
RGDDIIT

SEQ ID NO: 44544 - protein, 7 aa, synthetic construct
RGDDILH

SEQ ID NO: 44545 - protein, 7 aa, synthetic construct
RGDAAAG

SEQ ID NO: 44546 - protein, 7 aa, synthetic construct
RGDDSAA

SEQ ID NO: 44547 - protein, 7 aa, synthetic construct
RGDEFIG

SEQ ID NO: 44548 - protein, 7 aa, synthetic construct
RGDETAF

SEQ ID NO: 44549 - protein, 7 aa, synthetic construct
RGDEVDT

SEQ ID NO: 44550 - protein, 7 aa, synthetic construct
RGDHFDA

SEQ ID NO: 44551 - protein, 7 aa, synthetic construct
RGDALLE

SEQ ID NO: 44552 - protein, 7 aa, synthetic construct
RGDHRVS

SEQ ID NO: 44553 - protein, 7 aa, synthetic construct
RGDIDDD

SEQ ID NO: 44554 - protein, 7 aa, synthetic construct
RGDIDQD

SEQ ID NO: 44555 - protein, 7 aa, synthetic construct
RGDIGDF

SEQ ID NO: 44556 - protein, 7 aa, synthetic construct
RGDIVED

SEQ ID NO: 44557 - protein, 7 aa, synthetic construct
RGDAQLA

SEQ ID NO: 44558 - protein, 7 aa, synthetic construct
RGDLDSS

SEQ ID NO: 44559 - protein, 7 aa, synthetic construct
RGDLNAE

SEQ ID NO: 44560 - protein, 7 aa, synthetic construct
RGDNLLE

SEQ ID NO: 44561 - protein, 7 aa, synthetic construct
RGDNTVD

SEQ ID NO: 44562 - protein, 7 aa, synthetic construct
RGDREID

SEQ ID NO: 44563 - protein, 7 aa, synthetic construct
RGDSFIA

SEQ ID NO: 44564 - protein, 7 aa, synthetic construct
RGDTIAE

SEQ ID NO: 44565 - protein, 7 aa, synthetic construct
RGDDIQF

SEQ ID NO: 44566 - protein, 7 aa, synthetic construct
RGDDIQG

SEQ ID NO: 44567 - protein, 7 aa, synthetic construct
RGDDQVL

SEQ ID NO: 44568 - protein, 7 aa, synthetic construct
RGDDTII

SEQ ID NO: 44569 - protein, 7 aa, synthetic construct
RGDDVLA

SEQ ID NO: 44570 - protein, 7 aa, synthetic construct
RGDEAVD

SEQ ID NO: 44571 - protein, 7 aa, synthetic construct
RGDGADI

SEQ ID NO: 44572 - protein, 7 aa, synthetic construct
RGDGAVG

SEQ ID NO: 44573 - protein, 7 aa, synthetic construct
RGDHLQD

SEQ ID NO: 44574 - protein, 7 aa, synthetic construct
RGDHQLE

SEQ ID NO: 44575 - protein, 7 aa, synthetic construct
RGDANDI

SEQ ID NO: 44576 - protein, 7 aa, synthetic construct
RGDIGED

SEQ ID NO: 44577 - protein, 7 aa, synthetic construct
RGDIQAD

SEQ ID NO: 44578 - protein, 7 aa, synthetic construct
RGDLIKG

SEQ ID NO: 44579 - protein, 7 aa, synthetic construct
RGDATIN

SEQ ID NO: 44580 - protein, 7 aa, synthetic construct
RGDNDAD

SEQ ID NO: 44581 - protein, 7 aa, synthetic construct
RGDNQED

SEQ ID NO: 44582 - protein, 7 aa, synthetic construct
RGDNQIQ

SEQ ID NO: 44583 - protein, 7 aa, synthetic construct
RGDQDLD

SEQ ID NO: 44584 - protein, 7 aa, synthetic construct
RGDQFIF

SEQ ID NO: 44585 - protein, 7 aa, synthetic construct
RGDQILA

SEQ ID NO: 44586 - protein, 7 aa, synthetic construct
RGDDELS

SEQ ID NO: 44587 - protein, 7 aa, synthetic construct
RGDRTED

SEQ ID NO: 44588 - protein, 7 aa, synthetic construct
RGDDFAS

SEQ ID NO: 44589 - protein, 7 aa, synthetic construct
RGDTFEH

SEQ ID NO: 44590 - protein, 7 aa, synthetic construct
RGDDHVE

SEQ ID NO: 44591 - protein, 7 aa, synthetic construct
RGDDQTN

SEQ ID NO: 44592 - protein, 7 aa, synthetic construct
RGDEFAD

SEQ ID NO: 44593 - protein, 7 aa, synthetic construct
RGDGIAD

SEQ ID NO: 44594 - protein, 7 aa, synthetic construct
RGDHIVE

SEQ ID NO: 44595 - protein, 7 aa, synthetic construct
RGDHLLQ

SEQ ID NO: 44596 - protein, 7 aa, synthetic construct
RGDHQIS

SEQ ID NO: 44597 - protein, 7 aa, synthetic construct
RGDHSID

SEQ ID NO: 44598 - protein, 7 aa, synthetic construct
RGDHVLH

SEQ ID NO: 44599 - protein, 7 aa, synthetic construct
RGDIADI

SEQ ID NO: 44600 - protein, 7 aa, synthetic construct
RGDIDEE

SEQ ID NO: 44601 - protein, 7 aa, synthetic construct
RGDIDEG

SEQ ID NO: 44602 - protein, 7 aa, synthetic construct
RGDIVKG

SEQ ID NO: 44603 - protein, 7 aa, synthetic construct
RGDNDLA

SEQ ID NO: 44604 - protein, 7 aa, synthetic construct
RGDAVLD

SEQ ID NO: 44605 - protein, 7 aa, synthetic construct
RGDQEIL

SEQ ID NO: 44606 - protein, 7 aa, synthetic construct
RGDQFQG

SEQ ID NO: 44607 - protein, 7 aa, synthetic construct
RGDTAGF

SEQ ID NO: 44608 - protein, 7 aa, synthetic construct
RGDVHRG

SEQ ID NO: 44609 - protein, 7 aa, synthetic construct
RGDDKGQ

SEQ ID NO: 44610 - protein, 7 aa, synthetic construct
RGDDQLE

SEQ ID NO: 44611 - protein, 7 aa, synthetic construct
RGDDTLQ

SEQ ID NO: 44612 - protein, 7 aa, synthetic construct
RGDEGDE

SEQ ID NO: 44613 - protein, 7 aa, synthetic construct
RGDETTF

SEQ ID NO: 44614 - protein, 7 aa, synthetic construct
RGDGEIA

SEQ ID NO: 44615 - protein, 7 aa, synthetic construct
RGDHFVD

SEQ ID NO: 44616 - protein, 7 aa, synthetic construct
RGDALDH

SEQ ID NO: 44617 - protein, 7 aa, synthetic construct
RGDHILD

SEQ ID NO: 44618 - protein, 7 aa, synthetic construct
RGDHILS

SEQ ID NO: 44619 - protein, 7 aa, synthetic construct
RGDIAEG

SEQ ID NO: 44620 - protein, 7 aa, synthetic construct
RGDNILE

SEQ ID NO: 44621 - protein, 7 aa, synthetic construct
RGDNTVN

SEQ ID NO: 44622 - protein, 7 aa, synthetic construct
RGDNVIN

SEQ ID NO: 44623 - protein, 7 aa, synthetic construct
RGDQAIQ

SEQ ID NO: 44624 - protein, 7 aa, synthetic construct
RGDRDDQ

SEQ ID NO: 44625 - protein, 7 aa, synthetic construct
RGDDEQA

SEQ ID NO: 44626 - protein, 7 aa, synthetic construct
RGDSFID

SEQ ID NO: 44627 - protein, 7 aa, synthetic construct
RGDSQLQ

SEQ ID NO: 44628 - protein, 7 aa, synthetic construct
RGDTFEL

SEQ ID NO: 44629 - protein, 7 aa, synthetic construct
RGDTGDT

SEQ ID NO: 44630 - protein, 7 aa, synthetic construct
RGDDLAI

SEQ ID NO: 44631 - protein, 7 aa, synthetic construct
RGDDQID

SEQ ID NO: 44632 - protein, 7 aa, synthetic construct
RGDDTVD

SEQ ID NO: 44633 - protein, 7 aa, synthetic construct
RGDDVDH

SEQ ID NO: 44634 - protein, 7 aa, synthetic construct
RGDEDIG

SEQ ID NO: 44635 - protein, 7 aa, synthetic construct
RGDEDLG

SEQ ID NO: 44636 - protein, 7 aa, synthetic construct
RGDEQVN

SEQ ID NO: 44637 - protein, 7 aa, synthetic construct
RGDETVT

SEQ ID NO: 44638 - protein, 7 aa, synthetic construct
RGDHAIE

SEQ ID NO: 44639 - protein, 7 aa, synthetic construct
RGDHAVD

SEQ ID NO: 44640 - protein, 7 aa, synthetic construct
RGDHTVD

SEQ ID NO: 44641 - protein, 7 aa, synthetic construct
RGDLFIL

SEQ ID NO: 44642 - protein, 7 aa, synthetic construct
RGDNFEN

SEQ ID NO: 44643 - protein, 7 aa, synthetic construct
RGDNHIE

SEQ ID NO: 44644 - protein, 7 aa, synthetic construct
RGDNVAD

SEQ ID NO: 44645 - protein, 7 aa, synthetic construct
RGDSADD

SEQ ID NO: 44646 - protein, 7 aa, synthetic construct
RGDTAQD

SEQ ID NO: 44647 - protein, 7 aa, synthetic construct
RGDVDDD

SEQ ID NO: 44648 - protein, 7 aa, synthetic construct
RGDVGDF

SEQ ID NO: 44649 - protein, 7 aa, synthetic construct
RGDDQIQ

SEQ ID NO: 44650 - protein, 7 aa, synthetic construct
RGDDQLL

SEQ ID NO: 44651 - protein, 7 aa, synthetic construct
RGDDTLE

SEQ ID NO: 44652 - protein, 7 aa, synthetic construct
RGDELLD

SEQ ID NO: 44653 - protein, 7 aa, synthetic construct
RGDEVDE

SEQ ID NO: 44654 - protein, 7 aa, synthetic construct
RGDAHID

SEQ ID NO: 44655 - protein, 7 aa, synthetic construct
RGDAITD

SEQ ID NO: 44656 - protein, 7 aa, synthetic construct
RGDAKEG

SEQ ID NO: 44657 - protein, 7 aa, synthetic construct
RGDHVIN

SEQ ID NO: 44658 - protein, 7 aa, synthetic construct
RGDIESE

SEQ ID NO: 44659 - protein, 7 aa, synthetic construct
RGDIGSD

SEQ ID NO: 44660 - protein, 7 aa, synthetic construct
RGDINDD

SEQ ID NO: 44661 - protein, 7 aa, synthetic construct
RGDLNID

SEQ ID NO: 44662 - protein, 7 aa, synthetic construct
RGDNILD

SEQ ID NO: 44663 - protein, 7 aa, synthetic construct
RGDSIGH

SEQ ID NO: 44664 - protein, 7 aa, synthetic construct
RGDSILA

SEQ ID NO: 44665 - protein, 7 aa, synthetic construct
RGDTADL

SEQ ID NO: 44666 - protein, 7 aa, synthetic construct
RGDTDAI

SEQ ID NO: 44667 - protein, 7 aa, synthetic construct
RGDTEIE

SEQ ID NO: 44668 - protein, 7 aa, synthetic construct
RGDTFGT

SEQ ID NO: 44669 - protein, 7 aa, synthetic construct
RGDTFVG

SEQ ID NO: 44670 - protein, 7 aa, synthetic construct
RGDVQEA

SEQ ID NO: 44671 - protein, 7 aa, synthetic construct
RGDDQFG

SEQ ID NO: 44672 - protein, 7 aa, synthetic construct
RGDDVAD

SEQ ID NO: 44673 - protein, 7 aa, synthetic construct
RGDEILH

SEQ ID NO: 44674 - protein, 7 aa, synthetic construct
RGDHFVH

SEQ ID NO: 44675 - protein, 7 aa, synthetic construct
RGDHILA

SEQ ID NO: 44676 - protein, 7 aa, synthetic construct
RGDHIVD

SEQ ID NO: 44677 - protein, 7 aa, synthetic construct
RGDHQEA

SEQ ID NO: 44678 - protein, 7 aa, synthetic construct
RGDHQIE

SEQ ID NO: 44679 - protein, 7 aa, synthetic construct
RGDLAGF

SEQ ID NO: 44680 - protein, 7 aa, synthetic construct
RGDASIE

SEQ ID NO: 44681 - protein, 7 aa, synthetic construct
RGDATIV

SEQ ID NO: 44682 - protein, 7 aa, synthetic construct
RGDNTIE

SEQ ID NO: 44683 - protein, 7 aa, synthetic construct
RGDSADL

SEQ ID NO: 44684 - protein, 7 aa, synthetic construct
RGDSIVD

SEQ ID NO: 44685 - protein, 7 aa, synthetic construct
RGDSNGD

SEQ ID NO: 44686 - protein, 7 aa, synthetic construct
RGDTAEG

SEQ ID NO: 44687 - protein, 7 aa, synthetic construct
RGDTGAF

SEQ ID NO: 44688 - protein, 7 aa, synthetic construct
RGDVGIF

SEQ ID NO: 44689 - protein, 7 aa, synthetic construct
RGDEIAL

SEQ ID NO: 44690 - protein, 7 aa, synthetic construct
RGDETVE

SEQ ID NO: 44691 - protein, 7 aa, synthetic construct
RGDFTID

SEQ ID NO: 44692 - protein, 7 aa, synthetic construct
RGDGEIE

SEQ ID NO: 44693 - protein, 7 aa, synthetic construct
RGDGEQA

SEQ ID NO: 44694 - protein, 7 aa, synthetic construct
RGDAITG

SEQ ID NO: 44695 - protein, 7 aa, synthetic construct
RGDGSID

SEQ ID NO: 44696 - protein, 7 aa, synthetic construct
RGDHHIA

SEQ ID NO: 44697 - protein, 7 aa, synthetic construct
RGDIADD

SEQ ID NO: 44698 - protein, 7 aa, synthetic construct
RGDKIAA

SEQ ID NO: 44699 - protein, 7 aa, synthetic construct
RGDLAQL

SEQ ID NO: 44700 - protein, 7 aa, synthetic construct
RGDAADV

SEQ ID NO: 44701 - protein, 7 aa, synthetic construct
RGDNVLA

SEQ ID NO: 44702 - protein, 7 aa, synthetic construct
RGDSQLD

SEQ ID NO: 44703 - protein, 7 aa, synthetic construct
RGDTFEG

SEQ ID NO: 44704 - protein, 7 aa, synthetic construct
RGDTFKG

SEQ ID NO: 44705 - protein, 7 aa, synthetic construct
RGDDIAI

SEQ ID NO: 44706 - protein, 7 aa, synthetic construct
RGDVFEQ

SEQ ID NO: 44707 - protein, 7 aa, synthetic construct
RGDEEAN

SEQ ID NO: 44708 - protein, 7 aa, synthetic construct
RGDHNIE

SEQ ID NO: 44709 - protein, 7 aa, synthetic construct
RGDALVE

SEQ ID NO: 44710 - protein, 7 aa, synthetic construct
RGDANGG

SEQ ID NO: 44711 - protein, 7 aa, synthetic construct
RGDKTLS

SEQ ID NO: 44712 - protein, 7 aa, synthetic construct
RGDLKNL

SEQ ID NO: 44713 - protein, 7 aa, synthetic construct
RGDATFD

SEQ ID NO: 44714 - protein, 7 aa, synthetic construct
RGDQFLA

SEQ ID NO: 44715 - protein, 7 aa, synthetic construct
RGDQHLD

SEQ ID NO: 44716 - protein, 7 aa, synthetic construct
RGDQLLG

SEQ ID NO: 44717 - protein, 7 aa, synthetic construct
RGDTDAV

SEQ ID NO: 44718 - protein, 7 aa, synthetic construct
RGDTFKA

SEQ ID NO: 44719 - protein, 7 aa, synthetic construct
RGDTIAD

SEQ ID NO: 44720 - protein, 7 aa, synthetic construct
RGDTSEG

SEQ ID NO: 44721 - protein, 7 aa, synthetic construct
RGDVTEG

SEQ ID NO: 44722 - protein, 7 aa, synthetic construct
RGDAFEE

SEQ ID NO: 44723 - protein, 7 aa, synthetic construct
RGDEIIA

SEQ ID NO: 44724 - protein, 7 aa, synthetic construct
RGDETLG

SEQ ID NO: 44725 - protein, 7 aa, synthetic construct
RGDATVN

SEQ ID NO: 44726 - protein, 7 aa, synthetic construct
RGDQFDF

SEQ ID NO: 44727 - protein, 7 aa, synthetic construct
RGDQFIG

SEQ ID NO: 44728 - protein, 7 aa, synthetic construct
RGDQHLG

SEQ ID NO: 44729 - protein, 7 aa, synthetic construct
RGDDDAN

SEQ ID NO: 44730 - protein, 7 aa, synthetic construct
RGDSNIE

SEQ ID NO: 44731 - protein, 7 aa, synthetic construct
RGDSTIN

SEQ ID NO: 44732 - protein, 7 aa, synthetic construct
RGDTDAD

SEQ ID NO: 44733 - protein, 7 aa, synthetic construct
RGDVDGD

SEQ ID NO: 44734 - protein, 7 aa, synthetic construct
RGDELAE

SEQ ID NO: 44735 - protein, 7 aa, synthetic construct
RGDIDGS

SEQ ID NO: 44736 - protein, 7 aa, synthetic construct
RGDLIDA

SEQ ID NO: 44737 - protein, 7 aa, synthetic construct
RGDNFDH

SEQ ID NO: 44738 - protein, 7 aa, synthetic construct
RGDNFEG

SEQ ID NO: 44739 - protein, 7 aa, synthetic construct
RGDNFNN

SEQ ID NO: 44740 - protein, 7 aa, synthetic construct
RGDNNID

SEQ ID NO: 44741 - protein, 7 aa, synthetic construct
RGDTEQD

SEQ ID NO: 44742 - protein, 7 aa, synthetic construct
RGDDQEE

SEQ ID NO: 44743 - protein, 7 aa, synthetic construct
RGDEDGA

SEQ ID NO: 44744 - protein, 7 aa, synthetic construct
RGDEKLA

SEQ ID NO: 44745 - protein, 7 aa, synthetic construct
RGDIDKE

SEQ ID NO: 44746 - protein, 7 aa, synthetic construct
RGDIILD

SEQ ID NO: 44747 - protein, 7 aa, synthetic construct
RGDKHAG

SEQ ID NO: 44748 - protein, 7 aa, synthetic construct
RGDLATL

SEQ ID NO: 44749 - protein, 7 aa, synthetic construct
RGDNGEV

SEQ ID NO: 44750 - protein, 7 aa, synthetic construct
RGDTFLG

SEQ ID NO: 44751 - protein, 7 aa, synthetic construct
RGDTGDF

SEQ ID NO: 44752 - protein, 7 aa, synthetic construct
RGDTGDV

SEQ ID NO: 44753 - protein, 7 aa, synthetic construct
RGDDHLH

SEQ ID NO: 44754 - protein, 7 aa, synthetic construct
RGDTVQD

SEQ ID NO: 44755 - protein, 7 aa, synthetic construct
RGDAITE

SEQ ID NO: 44756 - protein, 7 aa, synthetic construct
RGDALQD

SEQ ID NO: 44757 - protein, 7 aa, synthetic construct
RGDASID

SEQ ID NO: 44758 - protein, 7 aa, synthetic construct
RGDTGGA

SEQ ID NO: 44759 - protein, 7 aa, synthetic construct
RGDDKLQ

SEQ ID NO: 44760 - protein, 7 aa, synthetic construct
RGDDQDN

SEQ ID NO: 44761 - protein, 7 aa, synthetic construct
RGDEQES

SEQ ID NO: 44762 - protein, 7 aa, synthetic construct
RGDEQTA

SEQ ID NO: 44763 - protein, 7 aa, synthetic construct
RGDAIFA

SEQ ID NO: 44764 - protein, 7 aa, synthetic construct
RGDIVAA

SEQ ID NO: 44765 - protein, 7 aa, synthetic construct
RGDADDH

SEQ ID NO: 44766 - protein, 7 aa, synthetic construct
RGDLSDL

SEQ ID NO: 44767 - protein, 7 aa, synthetic construct
RGDNKVD

SEQ ID NO: 44768 - protein, 7 aa, synthetic construct
RGDDALF

SEQ ID NO: 44769 - protein, 7 aa, synthetic construct
RGDSQIG

SEQ ID NO: 44770 - protein, 7 aa, synthetic construct
RGDTLDA

SEQ ID NO: 44771 - protein, 7 aa, synthetic construct
RGDTTIN

SEQ ID NO: 44772 - protein, 7 aa, synthetic construct
RGDGKID

SEQ ID NO: 44773 - protein, 7 aa, synthetic construct
RGDHTVE

SEQ ID NO: 44774 - protein, 7 aa, synthetic construct
RGDNKIA

SEQ ID NO: 44775 - protein, 7 aa, synthetic construct
RGDTTDD

SEQ ID NO: 44776 - protein, 7 aa, synthetic construct
RGDTTEE

SEQ ID NO: 44777 - protein, 7 aa, synthetic construct
RGDEHVD

SEQ ID NO: 44778 - protein, 7 aa, synthetic construct
RGDAHQG

SEQ ID NO: 44779 - protein, 7 aa, synthetic construct
RGDGVLH

SEQ ID NO: 44780 - protein, 7 aa, synthetic construct
RGDHILG

SEQ ID NO: 44781 - protein, 7 aa, synthetic construct
RGDHLIE

SEQ ID NO: 44782 - protein, 7 aa, synthetic construct
RGDIGEE

SEQ ID NO: 44783 - protein, 7 aa, synthetic construct
RGDKELG

SEQ ID NO: 44784 - protein, 7 aa, synthetic construct
RGDKEVD

SEQ ID NO: 44785 - protein, 7 aa, synthetic construct
RGDNDDA

SEQ ID NO: 44786 - protein, 7 aa, synthetic construct
RGDQDDA

SEQ ID NO: 44787 - protein, 7 aa, synthetic construct
RGDTETD

SEQ ID NO: 44788 - protein, 7 aa, synthetic construct
RGDDHLD

SEQ ID NO: 44789 - protein, 7 aa, synthetic construct
RGDEFLG

SEQ ID NO: 44790 - protein, 7 aa, synthetic construct
RGDKLLA

SEQ ID NO: 44791 - protein, 7 aa, synthetic construct
RGDNHID

SEQ ID NO: 44792 - protein, 7 aa, synthetic construct
RGDNVAA

SEQ ID NO: 44793 - protein, 7 aa, synthetic construct
RGDETID

SEQ ID NO: 44794 - protein, 7 aa, synthetic construct
RGDHEVG

SEQ ID NO: 44795 - protein, 7 aa, synthetic construct
RGDHLLE

SEQ ID NO: 44796 - protein, 7 aa, synthetic construct
RGDITEA

SEQ ID NO: 44797 - protein, 7 aa, synthetic construct
RGDKQVA

SEQ ID NO: 44798 - protein, 7 aa, synthetic construct
RGDVGED

SEQ ID NO: 44799 - protein, 7 aa, synthetic construct
RGDDTLG

SEQ ID NO: 44800 - protein, 7 aa, synthetic construct
RGDEEFA

SEQ ID NO: 44801 - protein, 7 aa, synthetic construct
RGDELEG

SEQ ID NO: 44802 - protein, 7 aa, synthetic construct
RGDATID

SEQ ID NO: 44803 - protein, 7 aa, synthetic construct
RGDTFQG

SEQ ID NO: 44804 - protein, 7 aa, synthetic construct
RGDAEIG

SEQ ID NO: 44805 - protein, 7 aa, synthetic construct
RGDEFVD

SEQ ID NO: 44806 - protein, 7 aa, synthetic construct
RGDAFKG

SEQ ID NO: 44807 - protein, 7 aa, synthetic construct
RGDANNE

SEQ ID NO: 44808 - protein, 7 aa, synthetic construct
RGDKEAE

SEQ ID NO: 44809 - protein, 7 aa, synthetic construct
RGDQTID

SEQ ID NO: 44810 - protein, 7 aa, synthetic construct
RGDTTEA

SEQ ID NO: 44811 - protein, 7 aa, synthetic construct
RGDDIID

SEQ ID NO: 44812 - protein, 7 aa, synthetic construct
RGDDRID

SEQ ID NO: 44813 - protein, 7 aa, synthetic construct
RGDELIA

SEQ ID NO: 44814 - protein, 7 aa, synthetic construct
RGDERLA

SEQ ID NO: 44815 - protein, 7 aa, synthetic construct
RGDDNAK

SEQ ID NO: 44816 - protein, 7 aa, synthetic construct
RGDDRIG

SEQ ID NO: 44817 - protein, 7 aa, synthetic construct
RGDIQDA

SEQ ID NO: 44818 - protein, 7 aa, synthetic construct
RGDNFAG

SEQ ID NO: 44819 - protein, 7 aa, synthetic construct
RGDNRLD

SEQ ID NO: 44820 - protein, 7 aa, synthetic construct
RGDSDTD

SEQ ID NO: 44821 - protein, 7 aa, synthetic construct
RGDSHLD

SEQ ID NO: 44822 - protein, 7 aa, synthetic construct
RGDTFDA

SEQ ID NO: 44823 - protein, 7 aa, synthetic construct
RGDDELE

SEQ ID NO: 44824 - protein, 7 aa, synthetic construct
RGDADTH

SEQ ID NO: 44825 - protein, 7 aa, synthetic construct
RGDDILD

SEQ ID NO: 44826 - protein, 7 aa, synthetic construct
RGDIQDE

SEQ ID NO: 44827 - protein, 7 aa, synthetic construct
RGDNAID

SEQ ID NO: 44828 - protein, 7 aa, synthetic construct
RGDDLLQ

SEQ ID NO: 44829 - protein, 7 aa, synthetic construct
RGDGEDD

SEQ ID NO: 44830 - protein, 7 aa, synthetic construct
RGDALID

SEQ ID NO: 44831 - protein, 7 aa, synthetic construct
RGDNALA

SEQ ID NO: 44832 - protein, 7 aa, synthetic construct
RGDNILA

SEQ ID NO: 44833 - protein, 7 aa, synthetic construct
RGDELLA

SEQ ID NO: 44834 - protein, 7 aa, synthetic construct
RGDGIVD

SEQ ID NO: 44835 - protein, 7 aa, synthetic construct
RGDVDDA

SEQ ID NO: 44836 - protein, 7 aa, synthetic construct
RGDHALD

SEQ ID NO: 44837 - protein, 7 aa, synthetic construct
RGDHLLG

SEQ ID NO: 44838 - protein, 7 aa, synthetic construct
RGDTTDN

SEQ ID NO: 44839 - protein, 7 aa, synthetic construct
RGDDVLD

SEQ ID NO: 44840 - protein, 7 aa, synthetic construct
RGDEQVS

SEQ ID NO: 44841 - protein, 7 aa, synthetic construct
RGDHFVA

SEQ ID NO: 44842 - protein, 7 aa, synthetic construct
RGDHHVD

SEQ ID NO: 44843 - protein, 7 aa, synthetic construct
RGDHRID

SEQ ID NO: 44844 - protein, 7 aa, synthetic construct
RGDEFID

SEQ ID NO: 44845 - protein, 7 aa, synthetic construct
RGDQLDD

SEQ ID NO: 44846 - protein, 7 aa, synthetic construct
RGDTFAT

SEQ ID NO: 44847 - protein, 7 aa, synthetic construct
RGDTDGD

SEQ ID NO: 44848 - protein, 7 aa, synthetic construct
RGDAILH

SEQ ID NO: 44849 - protein, 7 aa, synthetic construct
RGDHHID

SEQ ID NO: 44850 - protein, 7 aa, synthetic construct
RGDDIEA

SEQ ID NO: 44851 - protein, 7 aa, synthetic construct
RGDALDA

SEQ ID NO: 44852 - protein, 7 aa, synthetic construct
RGDIVAD

SEQ ID NO: 44853 - protein, 7 aa, synthetic construct
RGDNQIE

SEQ ID NO: 44854 - protein, 7 aa, synthetic construct
RGDTFGA

SEQ ID NO: 44855 - protein, 7 aa, synthetic construct
RGDYNSL

SEQ ID NO: 44856 - protein, 7 aa, synthetic construct
RGDYNNL

SEQ ID NO: 44857 - protein, 7 aa, synthetic construct
RGDYNST

SEQ ID NO: 44858 - protein, 7 aa, synthetic construct
RGDYNNT

SEQ ID NO: 44859 - protein, 10 aa, synthetic construct
ENRRGDYNSL

SEQ ID NO: 44860 - protein, 10 aa, synthetic construct
ENRRGDYNNL

SEQ ID NO: 44861 - protein, 10 aa, synthetic construct
ENRRGDYNST

SEQ ID NO: 44862 - protein, 10 aa, synthetic construct
ENRRGDYNNT

SEQ ID NO: 44863 - protein, 10 aa, synthetic construct
ENRRGDFNSL

SEQ ID NO: 44864 - protein, 10 aa, synthetic construct
ENRRGDFNNL

SEQ ID NO: 44865 - protein, 10 aa, synthetic construct
ENRRGDFNST

SEQ ID NO: 44866 - protein, 10 aa, synthetic construct
ENRRGDFQNT

SEQ ID NO: 44867 - protein, 10 aa, synthetic construct
ENRRGDEQNT

SEQ ID NO: 44868 - protein, 10 aa, synthetic construct
ENRRGDQQNT

SEQ ID NO: 44869 - protein, 10 aa, synthetic construct
SNRRGDYNSL

SEQ ID NO: 44870 - protein, 10 aa, synthetic construct
SNRRGDYNNL

SEQ ID NO: 44871 - protein, 10 aa, synthetic construct
SNRRGDYNST

SEQ ID NO: 44872 - protein, 10 aa, synthetic construct
SNRRGDYNNT

SEQ ID NO: 44873 - protein, 10 aa, synthetic construct
SNRRGDFNSL

SEQ ID NO: 44874 - protein, 10 aa, synthetic construct
SNRRGDFNNL

SEQ ID NO: 44875 - protein, 10 aa, synthetic construct
SNRRGDFNST

SEQ ID NO: 44876 - protein, 10 aa, synthetic construct
SNRRGDFQNT

SEQ ID NO: 44877 - protein, 10 aa, synthetic construct
SNRRGDEQNT

SEQ ID NO: 44878 - protein, 10 aa, synthetic construct
SNRRGDQQNT

SEQ ID NO: 44879 - protein, 10 aa, synthetic construct
ENRRGDFNGL

SEQ ID NO: 44880 - protein, 10 aa, synthetic construct
ENRRGDFNNT

SEQ ID NO: 44881 - protein, 10 aa, synthetic construct
SAQRGDFNNT

SEQ ID NO: 44882 - protein, 10 aa, synthetic construct
SAQRGDLLLS

SEQ ID NO: 44883 - protein, 10 aa, synthetic construct
SNRRGDFNNT

SEQ ID NO: 44884 - skipped

SEQ ID NO: 44885 - protein, 736 aa, synthetic construct
MAADGYLPDWLEDNLSEGIREWWDLKPGAPKPKANQQKQDDGRGLVLPGYKYLGPFNGLDKGEPVNAADAAALEHDKAYDQQLKAGDNPYLRYNHADAEFQERLQEDTSFGGNLGRAVFQAKKRVLEPLGLVEEGAKTAPGKKRPVEQSPQEPDSSSGIGKKGQQPAKKRLNFGQTGDSESVPDPQPLGEPPAAPSGVGSNTMAAGGGAPMADNNEGADGVGNASGNWHCDSTWLGDRVITTSTRTWALPTYNNHLYKQISSQSGASTNDNTYFGYSTPWGYFDFNRFHCHFSPRDWQRLINNNWGFRPKKLNFKLFNIQVKEVTTNDGTTTIANNLTSTVQVFTDSEYQLPYVLGSAHQGCLPPFPADVFMIPQYGYLTLNNGSQAVGRSSFYCLEYFPSQMLRTGNNFQFSYTFEDVPFHSSYAHSQSLDRLMNPLIDQYLYYLSRTQTTSGTAGNRELQFSQAGPSSMANQAKNWLPGPCYRQQRVSKTANQNNNSNFAWTGATKYHLNGRDSLVNPGPAMATHKDDEDKFFPMSGVLIFGKQGAGNSNVDLDNVMITNEEEIKTTNPVATEEYGTVATNLQSSNTAPATGTVNSQGALPGMVWQDRDVYLQGPIWAKIPHTDGHFHPSPLMGGFGLKHPPPQILIKNTPVPANPPTTFSPAKFASFITQYSTGQVSVEIEWELQKENSKRWNPEIQYTSNYNKSTNVDFAVDTNGVYSEPRPIGTRYLTRNL

SEQ ID NO: 44886 - protein, 743 aa, synthetic construct
MAADGYLPDWLEDNLSEGIREWWDLKPGAPKPKANQQKQDDGRGLVLPGYKYLGPFNGLDKGEPVNAADAAALEHDKAYDQQLKAGDNPYLRYNHADAEFQERLQEDTSFGGNLGRAVFQAKKRVLEPLGLVEEGAKTAPGKKRPVEQSPQEPDSSSGIGKKGQQPAKKRLNFGQTGDSESVPDPQPLGEPPAAPSGVGSNTMAAGGGAPMADNNEGADGVGNASGNWHCDSTWLGDRVITTSTRTWALPTYNNHLYKQISSQSGASTNDNTYFGYSTPWGYFDFNRFHCHFSPRDWQRLINNNWGFRPKKLNFKLFNIQVKEVTTNDGTTTIANNLTSTVQVFTDSEYQLPYVLGSAHQGCLPPFPADVFMIPQYGYLTLNNGSQAVGRSSFYCLEYFPSQMLRTGNNFQFSYTFEDVPFHSSYAHSQSLDRLMNPLIDQYLYYLSRTQTTSGTAGNRELQFSQAGPSSMANQAKNWLPGPCYRQQRVSKTANQNNNSNFAWTGATKYHLNGRDSLVNPGPAMATHKDDEDKFFPMSGVLIFGKQGAGNSNVDLDNVMITNEEEIKTTNPVATEEYGTVATNLQSSNRGDLLLSTAPATGTVNSQGALPGMVWQDRDVYLQGPIWAKIPHTDGHFHPSPLMGGFGLKHPPPQILIKNTPVPANPPTTFSPAKFASFITQYSTGQVSVEIEWELQKENSKRWNPEIQYTSNYNKSTNVDFAVDTNGVYSEPRPIGTRYLTRNL

SEQ ID NO: 44887 - protein, 736 aa, Adeno-associated virus
MAADGYLPDWLEDNLSEGIREWWDLKPGAPKPKANQQKQDDGRGLVLPGYKYLGPFNGLDKGEPVNAADAAALEHDKAYDQQLKAGDNPYLRYNHADAEFQERLQEDTSFGGNLGRAVFQAKKRVLEPLGLVEEGAKTAPGKKRPVEQSPQEPDSSSGIGKKGQQPAKKRLNFGQTGDSESVPDPQPLGEPPAAPSGVGSNTMAAGGGAPMADNNEGADGVGNASGNWHCDSTWLGDRVITTSTRTWALPTYNNHLYKQISSQSGASTNDNTYFGYSTPWGYFDFNRFHCHFSPRDWQRLINNNWGFRPKRLNFKLFNIQVKEVTTNDGTTTIANNLTSTVQVFTDSEYQLPYVLGSAHQGCLPPFPADVFMIPQYGYLTLNNGSQAVGRSSFYCLEYFPSQMLRTGNNFQFSYTFEDVPFHSSYAHSQSLDRLMNPLIDQYLYYLSRTQTTSGTAGNRTLQFSQAGPSSMANQAKNWLPGPCYRQQRVSKTTNQNNNSNFAWTGATKYHLNGRDSLVNPGPAMATHKDDEDKFFPMSGVLIFGKQGAGNSNVDLDNVMITNEEEIKTTNPVATEQYGTVATNLQSANTAPATGTVNSQGALPGMVWQDRDVYLQGPIWAKIPHTDGHFHPSPLMGGFGLKHPPPQILIKNTPVPANPPTTFSPAKFASFITQYSTGQVSVEIEWELQKENSKRWNPEIQYTSNYNKSTNVDFAVDTNGVYSEPRPIGTRYLTRNL

SEQ ID NO: 44888 - protein, 743 aa, synthetic construct
MAADGYLPDWLEDNLSEGIREWWDLKPGAPKPKANQQKQDDGRGLVLPGYKYLGPFNGLDKGEPVNAADAAALEHDKAYDQQLKAGDNPYLRYNHADAEFQERLQEDTSFGGNLGRAVFQAKKRVLEPLGLVEEGAKTAPGKKRPVEQSPQEPDSSSGIGKKGQQPAKKRLNFGQTGDSESVPDPQPLGEPPAAPSGVGSNTMAAGGGAPMADNNEGADGVGNASGNWHCDSTWLGDRVITTSTRTWALPTYNNHLYKQISSQSGASTNDNTYFGYSTPWGYFDFNRFHCHFSPRDWQRLINNNWGFRPKRLNFKLFNIQVKEVTTNDGTTTIANNLTSTVQVFTDSEYQLPYVLGSAHQGCLPPFPADVFMIPQYGYLTLNNGSQAVGRSSFYCLEYFPSQMLRTGNNFQFSYTFEDVPFHSSYAHSQSLDRLMNPLIDQYLYYLSRTQTTSGTAGNRTLQFSQAGPSSMANQAKNWLPGPCYRQQRVSKTTNQNNNSNFAWTGATKYHLNGRDSLVNPGPAMATHKDDEDKFFPMSGVLIFGKQGAGNSNVDLDNVMITNEEEIKTTNPVATEQYGTVATNLQSANRGDLLLSTAPATGTVNSQGALPGMVWQDRDVYLQGPIWAKIPHTDGHFHPSPLMGGFGLKHPPPQILIKNTPVPANPPTTFSPAKFASFITQYSTGQVSVEIEWELQKENSKRWNPEIQYTSNYNKSTNVDFAVDTNGVYSEPRPIGTRYLTRNL

SEQ ID NO: 44889 - protein, 736 aa, Adeno-associated virus
MAADGYLPDWLEDNLSEGIREWWDLKPGAPKPKANQQKQDDGRGLVLPGYKYLGPFNGLDKGEPVNAADAAALEHDKAYDQQLKAGDNPYLRYNHADAEFQERLQEDTSFGGNLGRAVFQAKKRVLEPLGLVEEGAKTAPGKKRPVEQSPQEPDSSSGIGKKGQQPAKKRLNFGQTGDSESVPDPQPLGEPPAAPSGVGSNTMAAGGGAPMADNNEGADGVGNASGNWHCDSTWLGDRVITTSTRTWALPTYNNHLYKQISSQSGASTNDNTYFGYSTPWGYFDFNRFHCHFSPRDWQRLINNNWGFRPKRLNFKLFNIQVKEVTTNDGTTTIANNLTSTVQVFTDSEYQLPYVLGSAHQGCLPPFPADVFMIPQYGYLTLNNGSQAVGRSSFYCLEYFPSQMLRTGNNFQFSYTFEDVPFHSSYAHSQSLDRLMNPLIDQYLYYLSRTQTTSGTAGNRTLQFSQAGPSSMANQAKNWLPGPCYRQQRVSKTANQNNNSNFAWTGATKYHLNGRDSLVNPGPAMATHKDDEDKFFPMSGVLIFGKQGAGNSNVDLDNVMITSEEEIKTTNPVATEEYGTVATNLQSANTAPATGTVNSQGALPGMVWQNRDVYLQGPIWAKIPHTDGHFHPSPLMGGFGLKHPPPQILIKNTPVPANPPTTFSPAKFASFITQYSTGQVSVEIEWELQKENSKRWNPEIQYTSNYNKSTNVDFAVDTNGVYSEPRPIGTRYLTRNL

SEQ ID NO: 44890 - protein, 743 aa, synthetic construct
MAADGYLPDWLEDNLSEGIREWWDLKPGAPKPKANQQKQDDGRGLVLPGYKYLGPFNGLDKGEPVNAADAAALEHDKAYDQQLKAGDNPYLRYNHADAEFQERLQEDTSFGGNLGRAVFQAKKRVLEPLGLVEEGAKTAPGKKRPVEQSPQEPDSSSGIGKKGQQPAKKRLNFGQTGDSESVPDPQPLGEPPAAPSGVGSNTMAAGGGAPMADNNEGADGVGNASGNWHCDSTWLGDRVITTSTRTWALPTYNNHLYKQISSQSGASTNDNTYFGYSTPWGYFDFNRFHCHFSPRDWQRLINNNWGFRPKRLNFKLFNIQVKEVTTNDGTTTIANNLTSTVQVFTDSEYQLPYVLGSAHQGCLPPFPADVFMIPQYGYLTLNNGSQAVGRSSFYCLEYFPSQMLRTGNNFQFSYTFEDVPFHSSYAHSQSLDRLMNPLIDQYLYYLSRTQTTSGTAGNRTLQFSQAGPSSMANQAKNWLPGPCYRQQRVSKTANQNNNSNFAWTGATKYHLNGRDSLVNPGPAMATHKDDEDKFFPMSGVLIFGKQGAGNSNVDLDNVMITSEEEIKTTNPVATEEYGTVATNLQSANRGDLLLSTAPATGTVNSQGALPGMVWQNRDVYLQGPIWAKIPHTDGHFHPSPLMGGFGLKHPPPQILIKNTPVPANPPTTFSPAKFASFITQYSTGQVSVEIEWELQKENSKRWNPEIQYTSNYNKSTNVDFAVDTNGVYSEPRPIGTRYLTRNL

SEQ ID NO: 44891 - protein, 743 aa, synthetic construct
MAADGYLPDWLEDNLSEGIREWWDLKPGAPKPKANQQKQDDGRGLVLPGYKYLGPFNGLDKGEPVNAADAAALEHDKAYDQQLKAGDNPYLRYNHADAEFQERLQEDTSFGGNLGRAVFQAKKRVLEPLGLVEEGAKTAPGKKRPVEQSPQEPDSSSGIGKKGQQPAKKRLNFGQTGDSESVPDPQPLGEPPAAPSGVGSNTMASGGGAPMADNNEGADGVGNASGNWHCDSTWLGDRVITTSTRTWALPTYNNHLYKQISSQSGASTNDNTYFGYSTPWGYFDFNRFHCHFSPRDWQRLINNNWGFRPKRLNFKLFNIQVKEVTTNDGTTTIANNLTSTVQVFTDSEYQLPYVLGSAHQGCLPPFPADVFMIPQYGYLTLNNGSQAVGRSSFYCLEYFPSQMLRTGNNFEFSYTFEDVPFHSSYAHSQSLDRLMNPLIDQYLYYLSRTQTTSGTAGNRELQFSQAGPSSMANQAKNWLPGPCYRQQRVSKTTNQNNNSNFAWTGATKYHLNGRDSLVNPGPAMATHKDDEDKFFPMSGVLIFGKQGAGNSNVDLDNVMITSEEEIKTTNPVATEEYGTVATNLQSSNRGDLLLSTAPATGTVNSQGALPGMVWQDRDVYLQGPIWAKIPHTDGHFHPSPLMGGFGLKHPPPQILIKNTPVPANPPTTFSPAKFASFITQYSTGQVSVEIEWELQKENSKRWNPEIQYTSNYNKSTNVDFAVDTNGVYSEPRPIGTRYLTRNL

SEQ ID NO: 44892 - protein, 743 aa, synthetic construct
MAADGYLPDWLEDNLSEGIREWWDLKPGAPKPKANQQKQDDGRGLVLPGYKYLGPFNGLDKGEPVNAADAAALEHDKAYDQQLKAGDNPYLRYNHADAEFQERLQEDTSFGGNLGRAVFQAKKRVLEPLGLVEEGAKTAPGKKRPVEQSPQEPDSSSGIGKKGQQPARKRLNFGQTGDSESVPDPQPLGEPPAAPSGVGSNTMAAGGGAPMADNNEGADGVGNASGNWHCDSTWLGDRVITTSTRTWALPTYNNHLYKQISSQSGASTNDNTYFGYSTPWGYFDFNRFHCHFSPRDWQRLINNNWGFRPKKLNFKLFNIQVKEVTTNDGTTTIANNLTSTVQVFTDSEYQLPYVLGSAHQGCLPPFPADVFMIPQYGYLTLNNGSQAVGRSSFYCLEYFPSQMLRTGNNFQFSYTFEDVPFHSSYAHSQSLDRLMNPLIDQYLYYLSRTQTTSGTAGNRTLQFSQAGPSSMANQAKNWLPGPCYRQQRVSKTTNQNNNSNFAWTGATKYHLNGRDSLVNPGPAMATHKDDEDKFFPMSGVLIFGKQGAGNSNVDLDNVMITNEEEIKTTNPVATEEYGTVATNLQSANRGDLLLSTAPATGTVNSQGALPGMVWQDRDVYLQGPIWAKIPHTDGHFHPSPLMGGFGLKHPPPQILIKNTPVPANPPTTFSPAKFASFITQYSTGQVSVEIEWELQKENSKRWNPEIQYTSNYNKSTNVDFAVDTNGVYSEPRPIGTRYLTRNL

SEQ ID NO: 44893 - protein, 736 aa, Adeno-associated virus
MAADGYLPDWLEDNLSEGIREWWDLKPGAPKPKANQQKQDDGRGLVLPGYKYLGPFNGLDKGEPVNAADAAALEHDKAYDQQLKAGDNPYLRYNHADAEFQERLQEDTSFGGNLGRAVFQAKKRVLEPLGLVEEGAKTAPGKKRPVEQSPQEPDSSSGIGKKGQQPARKRLNFGQTGDSESVPDPQPLGEPPAAPSGVGSNTMASGGGAPMADNNEGADGVGNASGNWHCDSTWLGDRVITTSTRTWALPTYNNHLYKQISSQSGASTNDNTYFGYSTPWGYFDFNRFHCHFSPRDWQRLINNNWGFRPKRLNFKLFNIQVKEVTTNDGTTTIANNLTSTVQVFTDSEYQLPYVLGSAHQGCLPPFPADVFMIPQYGYLTLNNGSQAVGRSSFYCLEYFPSQMLRTGNNFQFSYTFEDVPFHSSYAHSQSLDRLMNPLIDQYLYYLSRTQTTSGTAGNRELQFSQAGPSSMANQAKNWLPGPCYRQQRVSKTANQNNNSNFAWTGATKYHLNGRDSLVNPGPAMATHKDDEDKFFPMSGVLIFGKQGAGNSNVDLDNVMITNEEEIKTTNPVATEQYGTVATNLQSANTAPATGTVNSQGALPGMVWQNRDVYLQGPIWAKIPHTDGHFHPSPLMGGFGLKHPPPQILIKNTPVPANPPTTFSPAKFASFITQYSTGQVSVEIEWELQKENSKRWNPEIQYTSNYNKSTNVDFAVDTNGVYSEPRPIGTRYLTRNL

SEQ ID NO: 44894 - protein, 743 aa, synthetic construct
MAADGYLPDWLEDNLSEGIREWWDLKPGAPKPKANQQKQDDGRGLVLPGYKYLGPFNGLDKGEPVNAADAAALEHDKAYDQQLKAGDNPYLRYNHADAEFQERLQEDTSFGGNLGRAVFQAKKRVLEPLGLVEEGAKTAPGKKRPVEQSPQEPDSSSGIGKKGQQPARKRLNFGQTGDSESVPDPQPLGEPPAAPSGVGSNTMASGGGAPMADNNEGADGVGNASGNWHCDSTWLGDRVITTSTRTWALPTYNNHLYKQISSQSGASTNDNTYFGYSTPWGYFDFNRFHCHFSPRDWQRLINNNWGFRPKRLNFKLFNIQVKEVTTNDGTTTIANNLTSTVQVFTDSEYQLPYVLGSAHQGCLPPFPADVFMIPQYGYLTLNNGSQAVGRSSFYCLEYFPSQMLRTGNNFQFSYTFEDVPFHSSYAHSQSLDRLMNPLIDQYLYYLSRTQTTSGTAGNRELQFSQAGPSSMANQAKNWLPGPCYRQQRVSKTANQNNNSNFAWTGATKYHLNGRDSLVNPGPAMATHKDDEDKFFPMSGVLIFGKQGAGNSNVDLDNVMITNEEEIKTTNPVATEQYGTVATNLQSANRGDLLLSTAPATGTVNSQGALPGMVWQNRDVYLQGPIWAKIPHTDGHFHPSPLMGGFGLKHPPPQILIKNTPVPANPPTTFSPAKFASFITQYSTGQVSVEIEWELQKENSKRWNPEIQYTSNYNKSTNVDFAVDTNGVYSEPRPIGTRYLTRNL

SEQ ID NO: 44895 - protein, 736 aa, Adeno-associated virus; identical to SEQ ID NO: 142

SEQ ID NO: 44896 - protein, 736 aa, synthetic construct
MAADGYLPDWLEDNLSEGIREWWDLKPGAPKPKANQQKQDDGRGLVLPGYKYLGPFNGLDKGEPVNAADAAALEHDKAYDQQLKAGDNPYLRYNHADAEFQERLQEDTSFGGNLGRAVFQAKKRVLEPLGLVEEGAKTAPGKKRPVEQSPQEPDSSSGIGKKGQQPARKRLNFGQTGDSESVPDPQPLGEPPAAPSGVGSNTMAAGGGAPMADNNEGADGVGNASGNWHCDSTWLGDRVITTSTRTWALPTYNNHLYKQISSQSGATTNDNTYFGYSTPWGYFDFNRFHCHFSPRDWQRLINNNWGFRPKKLNFKLFNIQVKEVTTNDGTTTIANNLTSTVQVFTDSEYQLPYVLGSAHQGCLPPFPADVFMIPQYGYLTLNNGSQAVGRSSFYCLEYFPSQMLRTGNNFQFSYTFEDVPFHSSYAHSQSLDRLMNPLIDQYLYYLSRTQTTSGTAGNRTLQFSQAGPSSMANQAKNWLPGPCYRQQRVSKTTNQNNNSNFAWTGATKYHLNGRDSLVNPGPAMATHKDDEDKFFPMSGVLIFGKQGAGNSNVDLDNVMITNEEEIKTTNPVATEEYGTVATNLQSANTAPATGTVNSQGALPGMVWQDRDVYLQGPIWAKIPHTDGHFHPSPLMGGFGLKHPPPQILIKNTPVPANPPTTFSPAKFASFITQYSTGQVSVEIEWELQKENSKRWNPEIQYTSNYNKSTNVDFAVDTNGVYSEPRPIGTRYLTRNL

SEQ ID NO: 44897 - protein, 743 aa, synthetic construct
MAADGYLPDWLEDNLSEGIREWWDLKPGAPKPKANQQKQDDGRGLVLPGYKYLGPFNGLDKGEPVNAADAAALEHDKAYDQQLKAGDNPYLRYNHADAEFQERLQEDTSFGGNLGRAVFQAKKRVLEPLGLVEEGAKTAPGKKRPVEQSPQEPDSSSGIGKKGQQPARKRLNFGQTGDSESVPDPQPLGEPPAAPSGVGSNTMAAGGGAPMADNNEGADGVGNASGNWHCDSTWLGDRVITTSTRTWALPTYNNHLYKQISSQSGGSTNDNTYFGYSTPWGYFDFNRFHCHFSPRDWQRLINNNWGFRPKKLNFKLFNIQVKEVTTNDGTTTIANNLTSTVQVFTDSEYQLPYVLGSAHQGCLPPFPADVFMIPQYGYLTLNNGSQAVGRSSFYCLEYFPSQMLRTGNNFQFSYTFEDVPFHSSYAHSQSLDRLMNPLIDQYLYYLSRTQTTSGTAGNRTLQFSQAGPSSMANQAKNWLPGPCYRQQRVSKTTNQNNNSNFAWTGATKYHLNGRDSLVNPGPAMATHKDDEDKFFPMSGVLIFGKQGAGNSNVDLDNVMITNEEEIKTTNPVATEEYGTVATNLQSANRGDLLLSTAPATGTVNSQGALPGMVWQDRDVYLQGPIWAKIPHTDGHFHPSPLMGGFGLKHPPPQILIKNTPVPANPPTTFSPAKFASFITQYSTGQVSVEIEWELQKENSKRWNPEIQYTSNYNKSTNVDFAVDTNGVYSEPRPIGTRYLTRNL

SEQ ID NO: 44898 - protein, 743 aa, synthetic construct
MAADGYLPDWLEDNLSEGIREWWDLKPGAPKPKANQQKQDDGRGLVLPGYKYLGPFNGLDKGEPVNAADAAALEHDKAYDQQLKAGDNPYLRYNHADAEFQERLQEDTSFGGNLGRAVFQAKKRVLEPLGLVEEGAKTAPGKKRPVEQSPQEPDSSSGIGKKGQQPARKRLNFGQTGDSESVPDPQPLGEPPAAPSGVGSNTMAAGGGAPMADNNEGADGVGNASGNWHCDSTWLGDRVITTSTRTWALPTYNNHLYKQISSQSGATTNDNTYFGYSTPWGYFDFNRFHCHFSPRDWQRLINNNWGFRPKKLNFKLFNIQVKEVTTNDGTTTIANNLTSTVQVFTDSEYQLPYVLGSAHQGCLPPFPADVFMIPQYGYLTLNNGSQAVGRSSFYCLEYFPSQMLRTGNNFQFSYTFEDVPFHSSYAHSQSLDRLMNPLIDQYLYYLSRTQTTSGTAGNRTLQFSQAGPSSMANQAKNWLPGPCYRQQRVSKTTNQNNNSNFAWTGATKYHLNGRDSLVNPGPAMATHKDDEDKFFPMSGVLIFGKQGAGNSNVDLDNVMITNEEEIKTTNPVATEEYGTVATNLQSANRGDLLLSTAPATGTVNSQGALPGMVWQDRDVYLQGPIWAKIPHTDGHFHPSPLMGGFGLKHPPPQILIKNTPVPANPPTTFSPAKFASFITQYSTGQVSVEIEWELQKENSKRWNPEIQYTSNYNKSTNVDFAVDTNGVYSEPRPIGTRYLTRNL

SEQ ID NO: 44899 - skipped

SEQ ID NO: 44900 - protein, 743 aa, synthetic construct
MAADGYLPDWLEDNLSEGIREWWALKPGAPQPKANQQHQDNARGLVLPGYKYLGPGNGLDKGEPVNAADAAALEHDKAYDQQLKAGDNPYLKYNHADAEFQERLKEDTSFGGNLGRAVFQAKKRLLEPLGLVEEAAKTAPGKKRPVEQSPQEPDSSAGIGKSGAQPAKKRLNFGQTGDTESVPDPQPIGEPPAAPSGVGSLTMASGGGAPVADNNEGADGVGSSSGNWHCDSQWLGDRVITTSTRTWALPTYNNHLYKQISNSTSGASTNDNAYFGYSTPWGYFDFNRFHCHFSPRDWQRLINNNWGFRPKRLNFKLFNIQVKEVTDNNGVKTIANNLTSTVQVFTDSDYQLPYVLGSAHEGCLPPFPADVFMIPQYGYLTLNDGSQAVGRSSFYCLEYFPSQMLRTGNNFQFSYEFENVPFHSSYAHSQSLDRLMNPLIDQYLYYLSKTINGSGQNQQTLKFSVAGPSNMAVQGRNYIPGPSYRQQRVSTTVTQNNNSEFAWPGASSWALNGRNSLMNPGPAMASHKEGEDRFFPLSGSLIFGKQGTGRDNVDADKVMITNEEEIKTTNPVATESYGQVATNHQSAQRGDRGQIAQAQTGWVQNQGILPGMVWQDRDVYLQGPIWAKIPHTDGNFHPSPLMGGFGMKHPPPQILIKNTPVPADPPTAFNKDKLNSFITQYSTGQVSVEIEWELQKENSKRWNPEIQYTSNYYKSNNVEFAVNTEGVYSEPRPIGTRYLTRNL

SEQ ID NO: 44901 - protein, 743 aa, synthetic construct
MAADGYLPDWLEDNLSEGIREWWALKPGAPQPKANQQHQDNARGLVLPGYKYLGPGNGLDKGEPVNAADAAALEHDKAYDQQLKAGDNPYLKYNHADAEFQERLKEDTSFGGNLGRAVFQAKKRLLEPLGLVEEAAKTAPGKKRPVEQSPQEPDSSAGIGKSGAQPAKKRLNFGQTGDTESVPDPQPIGEPPAAPSGVGSLTMASGGGAPVADNNEGADGVGSSSGNWHCDSQWLGDRVITTSTRTWALPTYNNHLYKQISNSTSGASTNDNAYFGYSTPWGYFDFNRFHCHFSPRDWQRLINNNWGFRPKRLNFKLFNIQVKEVTDNNGVKTIANNLTSTVQVFTDSDYQLPYVLGSAHEGCLPPFPADVFMIPQYGYLTLNDGSQAVGRSSFYCLEYFPSQMLRTGNNFQFSYEFENVPFHSSYAHSQSLDRLMNPLIDQYLYYLSKTINGSGQNQQTLKFSVAGPSNMAVQGRNYIPGPSYRQQRVSTTVTQNNNSEFAWPGASSWALNGRNSLMNPGPAMASHKEGEDRFFPLSGSLIFGKQGTGRDNVDADKVMITNEEEIKTTNPVATESYGQVATNHQSAQRGDRSVVAQAQTGWVQNQGILPGMVWQDRDVYLQGPIWAKIPHTDGNFHPSPLMGGFGMKHPPPQILIKNTPVPADPPTAFNKDKLNSFITQYSTGQVSVEIEWELQKENSKRWNPEIQYTSNYYKSNNVEFAVNTEGVYSEPRPIGTRYLTRNL

SEQ ID NO: 44902 - protein, 743 aa, synthetic construct
MAADGYLPDWLEDNLSEGIREWWALKPGAPQPKANQQHQDNARGLVLPGYKYLGPGNGLDKGEPVNAADAAALEHDKAYDQQLKAGDNPYLKYNHADAEFQERLKEDTSFGGNLGRAVFQAKKRLLEPLGLVEEAAKTAPGKKRPVEQSPQEPDSSAGIGKSGAQPAKKRLNFGQTGDTESVPDPQPIGEPPAAPSGVGSLTMASGGGAPVADNNEGADGVGSSSGNWHCDSQWLGDRVITTSTRTWALPTYNNHLYKQISNSTSGASTNDNAYFGYSTPWGYFDFNRFHCHFSPRDWQRLINNNWGFRPKRLNFKLFNIQVKEVTDNNGVKTIANNLTSTVQVFTDSDYQLPYVLGSAHEGCLPPFPADVFMIPQYGYLTLNDGSQAVGRSSFYCLEYFPSQMLRTGNNFQFSYEFENVPFHSSYAHSQSLDRLMNPLIDQYLYYLSKTINGSGQNQQTLKFSVAGPSNMAVQGRNYIPGPSYRQQRVSTTVTQNNNSEFAWPGASSWALNGRNSLMNPGPAMASHKEGEDRFFPLSGSLIFGKQGTGRDNVDADKVMITNEEEIKTTNPVATESYGQVATNHQSAQRGDRGNQAQAQTGWVQNQGILPGMVWQDRDVYLQGPIWAKIPHTDGNFHPSPLMGGFGMKHPPPQILIKNTPVPADPPTAFNKDKLNSFITQYSTGQVSVEIEWELQKENSKRWNPEIQYTSNYYKSNNVEFAVNTEGVYSEPRPIGTRYLTRNL

SEQ ID NO: 44903 - protein, 743 aa, synthetic construct
MAADGYLPDWLEDNLSEGIREWWALKPGAPQPKANQQHQDNARGLVLPGYKYLGPGNGLDKGEPVNAADAAALEHDKAYDQQLKAGDNPYLKYNHADAEFQERLKEDTSFGGNLGRAVFQAKKRLLEPLGLVEEAAKTAPGKKRPVEQSPQEPDSSAGIGKSGAQPAKKRLNFGQTGDTESVPDPQPIGEPPAAPSGVGSLTMASGGGAPVADNNEGADGVGSSSGNWHCDSQWLGDRVITTSTRTWALPTYNNHLYKQISNSTSGASTNDNAYFGYSTPWGYFDFNRFHCHFSPRDWQRLINNNWGFRPKRLNFKLFNIQVKEVTDNNGVKTIANNLTSTVQVFTDSDYQLPYVLGSAHEGCLPPFPADVFMIPQYGYLTLNDGSQAVGRSSFYCLEYFPSQMLRTGNNFQFSYEFENVPFHSSYAHSQSLDRLMNPLIDQYLYYLSKTINGSGQNQQTLKFSVAGPSNMAVQGRNYIPGPSYRQQRVSTTVTQNNNSEFAWPGASSWALNGRNSLMNPGPAMASHKEGEDRFFPLSGSLIFGKQGTGRDNVDADKVMITNEEEIKTTNPVATESYGQVATNHQSAQRGDRNVVAQAQTGWVQNQGILPGMVWQDRDVYLQGPIWAKIPHTDGNFHPSPLMGGFGMKHPPPQILIKNTPVPADPPTAFNKDKLNSFITQYSTGQVSVEIEWELQKENSKRWNPEIQYTSNYYKSNNVEFAVNTEGVYSEPRPIGTRYLTRNL

SEQ ID NO: 44904 - protein, 743 aa, synthetic construct
MAADGYLPDWLEDNLSEGIREWWALKPGAPQPKANQQHQDNARGLVLPGYKYLGPGNGLDKGEPVNAADAAALEHDKAYDQQLKAGDNPYLKYNHADAEFQERLKEDTSFGGNLGRAVFQAKKRLLEPLGLVEEAAKTAPGKKRPVEQSPQEPDSSAGIGKSGAQPAKKRLNFGQTGDTESVPDPQPIGEPPAAPSGVGSLTMASGGGAPVADNNEGADGVGSSSGNWHCDSQWLGDRVITTSTRTWALPTYNNHLYKQISNSTSGASTNDNAYFGYSTPWGYFDFNRFHCHFSPRDWQRLINNNWGFRPKRLNFKLFNIQVKEVTDNNGVKTIANNLTSTVQVFTDSDYQLPYVLGSAHEGCLPPFPADVFMIPQYGYLTLNDGSQAVGRSSFYCLEYFPSQMLRTGNNFQFSYEFENVPFHSSYAHSQSLDRLMNPLIDQYLYYLSKTINGSGQNQQTLKFSVAGPSNMAVQGRNYIPGPSYRQQRVSTTVTQNNNSEFAWPGASSWALNGRNSLMNPGPAMASHKEGEDRFFPLSGSLIFGKQGTGRDNVDADKVMITNEEEIKTTNPVATESYGQVATNHQSAQRGDHVNLAQAQTGWVQNQGILPGMVWQDRDVYLQGPIWAKIPHTDGNFHPSPLMGGFGMKHPPPQILIKNTPVPADPPTAFNKDKLNSFITQYSTGQVSVEIEWELQKENSKRWNPEIQYTSNYYKSNNVEFAVNTEGVYSEPRPIGTRYLTRNL

SEQ ID NO: 44905 - protein, 743 aa, synthetic construct
MAADGYLPDWLEDNLSEGIREWWALKPGAPQPKANQQHQDNARGLVLPGYKYLGPGNGLDKGEPVNAADAAALEHDKAYDQQLKAGDNPYLKYNHADAEFQERLKEDTSFGGNLGRAVFQAKKRLLEPLGLVEEAAKTAPGKKRPVEQSPQEPDSSAGIGKSGAQPAKKRLNFGQTGDTESVPDPQPIGEPPAAPSGVGSLTMASGGGAPVADNNEGADGVGSSSGNWHCDSQWLGDRVITTSTRTWALPTYNNHLYKQISNSTSGASTNDNAYFGYSTPWGYFDFNRFHCHFSPRDWQRLINNNWGFRPKRLNFKLFNIQVKEVTDNNGVKTIANNLTSTVQVFTDSDYQLPYVLGSAHEGCLPPFPADVFMIPQYGYLTLNDGSQAVGRSSFYCLEYFPSQMLRTGNNFQFSYEFENVPFHSSYAHSQSLDRLMNPLIDQYLYYLSKTINGSGQNQQTLKFSVAGPSNMAVQGRNYIPGPSYRQQRVSTTVTQNNNSEFAWPGASSWALNGRNSLMNPGPAMASHKEGEDRFFPLSGSLIFGKQGTGRDNVDADKVMITNEEEIKTTNPVATESYGQVATNHQSAQRGDVRSIAQAQTGWVQNQGILPGMVWQDRDVYLQGPIWAKIPHTDGNFHPSPLMGGFGMKHPPPQILIKNTPVPADPPTAFNKDKLNSFITQYSTGQVSVEIEWELQKENSKRWNPEIQYTSNYYKSNNVEFAVNTEGVYSEPRPIGTRYLTRNL

SEQ ID NO: 44906 - protein, 743 aa, synthetic construct
MAADGYLPDWLEDNLSEGIREWWALKPGAPQPKANQQHQDNARGLVLPGYKYLGPGNGLDKGEPVNAADAAALEHDKAYDQQLKAGDNPYLKYNHADAEFQERLKEDTSFGGNLGRAVFQAKKRLLEPLGLVEEAAKTAPGKKRPVEQSPQEPDSSAGIGKSGAQPAKKRLNFGQTGDTESVPDPQPIGEPPAAPSGVGSLTMASGGGAPVADNNEGADGVGSSSGNWHCDSQWLGDRVITTSTRTWALPTYNNHLYKQISNSTSGASTNDNAYFGYSTPWGYFDFNRFHCHFSPRDWQRLINNNWGFRPKRLNFKLFNIQVKEVTDNNGVKTIANNLTSTVQVFTDSDYQLPYVLGSAHEGCLPPFPADVFMIPQYGYLTLNDGSQAVGRSSFYCLEYFPSQMLRTGNNFQFSYEFENVPFHSSYAHSQSLDRLMNPLIDQYLYYLSKTINGSGQNQQTLKFSVAGPSNMAVQGRNYIPGPSYRQQRVSTTVTQNNNSEFAWPGASSWALNGRNSLMNPGPAMASHKEGEDRFFPLSGSLIFGKQGTGRDNVDADKVMITNEEEIKTTNPVATESYGQVATNHQSAQRGDRGVVAQAQTGWVQNQGILPGMVWQDRDVYLQGPIWAKIPHTDGNFHPSPLMGGFGMKHPPPQILIKNTPVPADPPTAFNKDKLNSFITQYSTGQVSVEIEWELQKENSKRWNPEIQYTSNYYKSNNVEFAVNTEGVYSEPRPIGTRYLTRNL

SEQ ID NO: 44907 - protein, 743 aa, synthetic construct
MAADGYLPDWLEDNLSEGIREWWALKPGAPQPKANQQHQDNARGLVLPGYKYLGPGNGLDKGEPVNAADAAALEHDKAYDQQLKAGDNPYLKYNHADAEFQERLKEDTSFGGNLGRAVFQAKKRLLEPLGLVEEAAKTAPGKKRPVEQSPQEPDSSAGIGKSGAQPAKKRLNFGQTGDTESVPDPQPIGEPPAAPSGVGSLTMASGGGAPVADNNEGADGVGSSSGNWHCDSQWLGDRVITTSTRTWALPTYNNHLYKQISNSTSGASTNDNAYFGYSTPWGYFDFNRFHCHFSPRDWQRLINNNWGFRPKRLNFKLFNIQVKEVTDNNGVKTIANNLTSTVQVFTDSDYQLPYVLGSAHEGCLPPFPADVFMIPQYGYLTLNDGSQAVGRSSFYCLEYFPSQMLRTGNNFQFSYEFENVPFHSSYAHSQSLDRLMNPLIDQYLYYLSKTINGSGQNQQTLKFSVAGPSNMAVQGRNYIPGPSYRQQRVSTTVTQNNNSEFAWPGASSWALNGRNSLMNPGPAMASHKEGEDRFFPLSGSLIFGKQGTGRDNVDADKVMITNEEEIKTTNPVATESYGQVATNHQSAQRGDRGSVAQAQTGWVQNQGILPGMVWQDRDVYLQGPIWAKIPHTDGNFHPSPLMGGFGMKHPPPQILIKNTPVPADPPTAFNKDKLNSFITQYSTGQVSVEIEWELQKENSKRWNPEIQYTSNYYKSNNVEFAVNTEGVYSEPRPIGTRYLTRNL

SEQ ID NO: 44908 - protein, 743 aa, synthetic construct
MAADGYLPDWLEDNLSEGIREWWALKPGAPQPKANQQHQDNARGLVLPGYKYLGPGNGLDKGEPVNAADAAALEHDKAYDQQLKAGDNPYLKYNHADAEFQERLKEDTSFGGNLGRAVFQAKKRLLEPLGLVEEAAKTAPGKKRPVEQSPQEPDSSAGIGKSGAQPAKKRLNFGQTGDTESVPDPQPIGEPPAAPSGVGSLTMASGGGAPVADNNEGADGVGSSSGNWHCDSQWLGDRVITTSTRTWALPTYNNHLYKQISNSTSGASTNDNAYFGYSTPWGYFDFNRFHCHFSPRDWQRLINNNWGFRPKRLNFKLFNIQVKEVTDNNGVKTIANNLTSTVQVFTDSDYQLPYVLGSAHEGCLPPFPADVFMIPQYGYLTLNDGSQAVGRSSFYCLEYFPSQMLRTGNNFQFSYEFENVPFHSSYAHSQSLDRLMNPLIDQYLYYLSKTINGSGQNQQTLKFSVAGPSNMAVQGRNYIPGPSYRQQRVSTTVTQNNNSEFAWPGASSWALNGRNSLMNPGPAMASHKEGEDRFFPLSGSLIFGKQGTGRDNVDADKVMITNEEEIKTTNPVATESYGQVATNHQSAQRGDKSSIAQAQTGWVQNQGILPGMVWQDRDVYLQGPIWAKIPHTDGNFHPSPLMGGFGMKHPPPQILIKNTPVPADPPTAFNKDKLNSFITQYSTGQVSVEIEWELQKENSKRWNPEIQYTSNYYKSNNVEFAVNTEGVYSEPRPIGTRYLTRNL

SEQ ID NO: 44909 - protein, 743 aa, synthetic construct
MAADGYLPDWLEDNLSEGIREWWALKPGAPQPKANQQHQDNARGLVLPGYKYLGPGNGLDKGEPVNAADAAALEHDKAYDQQLKAGDNPYLKYNHADAEFQERLKEDTSFGGNLGRAVFQAKKRLLEPLGLVEEAAKTAPGKKRPVEQSPQEPDSSAGIGKSGAQPAKKRLNFGQTGDTESVPDPQPIGEPPAAPSGVGSLTMASGGGAPVADNNEGADGVGSSSGNWHCDSQWLGDRVITTSTRTWALPTYNNHLYKQISNSTSGASTNDNAYFGYSTPWGYFDFNRFHCHFSPRDWQRLINNNWGFRPKRLNFKLFNIQVKEVTDNNGVKTIANNLTSTVQVFTDSDYQLPYVLGSAHEGCLPPFPADVFMIPQYGYLTLNDGSQAVGRSSFYCLEYFPSQMLRTGNNFQFSYEFENVPFHSSYAHSQSLDRLMNPLIDQYLYYLSKTINGSGQNQQTLKFSVAGPSNMAVQGRNYIPGPSYRQQRVSTTVTQNNNSEFAWPGASSWALNGRNSLMNPGPAMASHKEGEDRFFPLSGSLIFGKQGTGRDNVDADKVMITNEEEIKTTNPVATESYGQVATNHQSAQRGDRGVSAQAQTGWVQNQGILPGMVWQDRDVYLQGPIWAKIPHTDGNFHPSPLMGGFGMKHPPPQILIKNTPVPADPPTAFNKDKLNSFITQYSTGQVSVEIEWELQKENSKRWNPEIQYTSNYYKSNNVEFAVNTEGVYSEPRPIGTRYLTRNL

SEQ ID NO: 44910 - protein, 10 aa, synthetic construct
SNSRGDYNSL

SEQ ID NO: 44911 - protein, 10 aa, synthetic construct
SAQRGDRGQI

SEQ ID NO: 44912 - protein, 10 aa, synthetic construct
SAQRGDRQGI

SEQ ID NO: 44913 - protein, 10 aa, synthetic construct
SAQRGDRSVV

SEQ ID NO: 44914-44915 - skipped (2 entries)

SEQ ID NO: 44916 - protein, 736 aa, synthetic construct
MAADGYLPDWLEDNLSEGIREWWDLKPGAPKPKANQQKQDDGRGLVLPGYKYLGPFNGLDKGEPVNAADAAALEHDKAYDQQLKAGDNPYLRYNHADAEFQERLQEDTSFGGNLGRAVFQAKKRVLEPLGLVEEGAKTAPGKKRPVEQSPQEPDSSSGIGKKGQQPAKKRLNFGQTGDSESVPDPQPLGEPPAAPSGVGSNTMASGGGAPMADNNEGADGVGNASGNWHCDSTWLGDRVITTSTRTWALPTYNNHLYKQISSQSGASTNDNTYFGYSTPWGYFDFNRFHCHFSPRDWQRLINNNWGFRPKRLNFKLFNIQVKEVTTNDGTTTIANNLTSTVQVFTDSEYQLPYVLGSAHQGCLPPFPADVFMIPQYGYLTLNNGSQAVGRSSFYCLEYFPSQMLRTGNNFEFSYTFEDVPFHSSYAHSQSLDRLMNPLIDQYLYYLSRTQTTSGTAGNRELQFSQAGPSSMANQAKNWLPGPCYRQQRVSKTTNQNNNSNFAWTGATKYHLNGRDSLVNPGPAMATHKDDEDKFFPMSGVLIFGKQGAGNSNVDLDNVMITSEEEIKTTNPVATEEYGTVATNLQSSNTAPATGTVNSQGALPGMVWQDRDVYLQGPIWAKIPHTDGHFHPSPLMGGFGLKHPPPQILIKNTPVPANPPTTFSPAKFASFITQYSTGQVSVEIEWELQKENSKRWNPEIQYTSNYNKSTNVDFAVDTNGVYSEPRPIGTRYLTRNL

SEQ ID NO: 44917 - protein, 736 aa, synthetic construct
MAADGYLPDWLEDNLSEGIREWWDLKPGAPKPKANQQKQDDGRGLVLPGYKYLGPFNGLDKGEPVNAADAAALEHDKAYDQQLKAGDNPYLRYNHADAEFQERLQEDTSFGGNLGRAVFQAKKRVLEPLGLVEEGAKTAPGKKRPVEQSPQEPDSSSGIGKKGQQPARKRLNFGQTGDSESVPDPQPLGEPPAAPSGVGSNTMAAGGGAPMADNNEGADGVGNASGNWHCDSTWLGDRVITTSTRTWALPTYNNHLYKQISSQSGASTNDNTYFGYSTPWGYFDFNRFHCHFSPRDWQRLINNNWGFRPKKLNFKLFNIQVKEVTTNDGTTTIANNLTSTVQVFTDSEYQLPYVLGSAHQGCLPPFPADVFMIPQYGYLTLNNGSQAVGRSSFYCLEYFPSQMLRTGNNFQFSYTFEDVPFHSSYAHSQSLDRLMNPLIDQYLYYLSRTQTTSGTAGNRTLQFSQAGPSSMANQAKNWLPGPCYRQQRVSKTTNQNNNSNFAWTGATKYHLNGRDSLVNPGPAMATHKDDEDKFFPMSGVLIFGKQGAGNSNVDLDNVMITNEEEIKTTNPVATEEYGTVATNLQSANTAPATGTVNSQGALPGMVWQDRDVYLQGPIWAKIPHTDGHFHPSPLMGGFGLKHPPPQILIKNTPVPANPPTTFSPAKFASFITQYSTGQVSVEIEWELQKENSKRWNPEIQYTSNYNKSTNVDFAVDTNGVYSEPRPIGTRYLTRNL

SEQ ID NO: 44918 - protein, 10 aa, synthetic construct
SAQRGDRGVV

SEQ ID NO: 44919 - protein, 10 aa, synthetic construct
SAQRGDHVNL

SEQ ID NO: 44920 - skipped

SEQ ID NO: 44921 - protein, 12 aa, synthetic construct
  VARIANT 1: note = Any amino acid
  VARIANT 2: note = Any amino acid
  VARIANT 3: note = Any amino acid
  VARIANT 4: note = Any amino acid
  VARIANT 7: note = Any amino acid
  VARIANT 8: note = Any amino acid
  VARIANT 12: note = Any amino acid
XXXXGGXXNDNX

SEQ ID NO: 44922 - protein, 12 aa, synthetic construct
  VARIANT 1: note = Any amino acid
  VARIANT 2: note = Any amino acid
  VARIANT 4: note = Any amino acid
  VARIANT 7: note = Any amino acid
  VARIANT 8: note = Any amino acid
  VARIANT 12: note = Any amino acid
XXTXGGXXNDNX

SEQ ID NO: 44923 - protein, 12 aa, synthetic construct
  VARIANT 1: note = Any amino acid
  VARIANT 2: note = Any amino acid
  VARIANT 4: note = Any amino acid
  VARIANT 7: note = Any amino acid
  VARIANT 8: note = Any amino acid
  VARIANT 12: note = Any amino acid
XXQXGGXXNDNX

SEQ ID NO: 44924 - protein, 12 aa, synthetic construct
  VARIANT 1: note = Any amino acid
  VARIANT 2: note = Any amino acid
  VARIANT 4: note = Any amino acid
  VARIANT 7: note = Any amino acid
  VARIANT 12: note = Any amino acid
XXTXGGXTNDNX

SEQ ID NO: 44925 - protein, 12 aa, synthetic construct
  VARIANT 2: note = Any amino acid
  VARIANT 4: note = Any amino acid
  VARIANT 7: note = Any amino acid
  VARIANT 8: note = Any amino acid
  VARIANT 12: note = Any amino acid
NXTXGGXXNDNX

SEQ ID NO: 44926 - protein, 12 aa, synthetic construct
  VARIANT 2: note = Any amino acid
  VARIANT 4: note = Any amino acid
  VARIANT 7: note = Any amino acid
  VARIANT 8: note = Any amino acid
  VARIANT 12: note = Any amino acid
SXTXGGXXNDNX

SEQ ID NO: 44927 - protein, 12 aa, synthetic construct
  VARIANT 7: note = Any amino acid
  VARIANT 8: note = Any amino acid
NSTSGGXXNDNH

SEQ ID NO: 44928 - protein, 12 aa, synthetic construct
  VARIANT 7: note = Any amino acid
  VARIANT 8: note = Any amino acid
NSTTGGXXNDNH

SEQ ID NO: 44929 - protein, 12 aa, synthetic construct
  VARIANT 7: note = Any amino acid
  VARIANT 8: note = Any amino acid
SGQTGGXXNDNH

SEQ ID NO: 44930 - protein, 12 aa, synthetic construct
  VARIANT 7: note = Any amino acid
  VARIANT 8: note = Any amino acid
SGTAGGXXNDNT

SEQ ID NO: 44931 - protein, 12 aa, synthetic construct
  VARIANT 7: note = Any amino acid
  VARIANT 8: note = Any amino acid
SGTSGGXXNDNA

SEQ ID NO: 44932 - protein, 12 aa, synthetic construct
  VARIANT 7: note = Any amino acid
  VARIANT 8: note = Any amino acid
SGTTGGXXNDNT

SEQ ID NO: 44933 - protein, 12 aa, synthetic construct
  VARIANT 7: note = Any amino acid
  VARIANT 8: note = Any amino acid
SSTAGGXXNDNA

SEQ ID NO: 44934 - skipped

SEQ ID NO: 44935 - protein, 12 aa, synthetic construct
NGAAAAASNDNA

SEQ ID NO: 44936 - protein, 12 aa, synthetic construct
NGAAAAASNDNH

SEQ ID NO: 44937 - protein, 12 aa, synthetic construct
NGAAAAASNDNT

SEQ ID NO: 44938 - protein, 12 aa, synthetic construct
NGAAAAATNDNA

SEQ ID NO: 44939 - protein, 12 aa, synthetic construct
NGAAAAATNDNH

SEQ ID NO: 44940 - protein, 12 aa, synthetic construct
NGAAAAATNDNT

SEQ ID NO: 44941 - protein, 12 aa, synthetic construct
NGAAAASSNDNA

SEQ ID NO: 44942 - protein, 12 aa, synthetic construct
NGAAAASSNDNH

SEQ ID NO: 44943 - protein, 12 aa, synthetic construct
NGAAAASSNDNT

SEQ ID NO: 44944 - protein, 12 aa, synthetic construct
NGAAAASTNDNA

SEQ ID NO: 44945 - protein, 12 aa, synthetic construct
NGAAAASTNDNH

SEQ ID NO: 44946 - protein, 12 aa, synthetic construct
NGAAAASTNDNT

SEQ ID NO: 44947 - protein, 12 aa, synthetic construct
NGAAAGASNDNA

SEQ ID NO: 44948 - protein, 12 aa, synthetic construct
NGAAAGASNDNH

SEQ ID NO: 44949 - protein, 12 aa, synthetic construct
NGAAAGASNDNT

SEQ ID NO: 44950 - protein, 12 aa, synthetic construct
NGAAAGATNDNA

SEQ ID NO: 44951 - protein, 12 aa, synthetic construct
NGAAAGATNDNH

SEQ ID NO: 44952 - protein, 12 aa, synthetic construct
NGAAAGATNDNT

SEQ ID NO: 44953 - protein, 12 aa, synthetic construct
NGAAAGSSNDNA

SEQ ID NO: 44954 - protein, 12 aa, synthetic construct
NGAAAGSSNDNH

SEQ ID NO: 44955 - protein, 12 aa, synthetic construct
NGAAAGSSNDNT

SEQ ID NO: 44956 - protein, 12 aa, synthetic construct
NGAAAGSTNDNA

SEQ ID NO: 44957 - protein, 12 aa, synthetic construct
NGAAAGSTNDNH

SEQ ID NO: 44958 - protein, 12 aa, synthetic construct
NGAAAGSTNDNT

SEQ ID NO: 44959 - protein, 12 aa, synthetic construct
NGAAGAASNDNA

SEQ ID NO: 44960 - protein, 12 aa, synthetic construct
NGAAGAASNDNH

SEQ ID NO: 44961 - protein, 12 aa, synthetic construct
NGAAGAASNDNT

SEQ ID NO: 44962 - protein, 12 aa, synthetic construct
NGAAGAATNDNA

SEQ ID NO: 44963 - protein, 12 aa, synthetic construct
NGAAGAATNDNH

SEQ ID NO: 44964 - protein, 12 aa, synthetic construct
NGAAGAATNDNT

SEQ ID NO: 44965 - protein, 12 aa, synthetic construct
NGAAGASSNDNA

SEQ ID NO: 44966 - protein, 12 aa, synthetic construct
NGAAGASSNDNH

SEQ ID NO: 44967 - protein, 12 aa, synthetic construct
NGAAGASSNDNT

SEQ ID NO: 44968 - protein, 12 aa, synthetic construct
NGAAGASTNDNA

SEQ ID NO: 44969 - protein, 12 aa, synthetic construct
NGAAGASTNDNH

SEQ ID NO: 44970 - protein, 12 aa, synthetic construct
NGAAGASTNDNT

SEQ ID NO: 44971 - protein, 12 aa, synthetic construct
NGAAGGASNDNA

SEQ ID NO: 44972 - protein, 12 aa, synthetic construct
NGAAGGASNDNH

SEQ ID NO: 44973 - protein, 12 aa, synthetic construct
NGAAGGASNDNT

SEQ ID NO: 44974 - protein, 12 aa, synthetic construct
NGAAGGATNDNA

SEQ ID NO: 44975 - protein, 12 aa, synthetic construct
NGAAGGATNDNH

SEQ ID NO: 44976 - protein, 12 aa, synthetic construct
NGAAGGATNDNT

SEQ ID NO: 44977 - protein, 12 aa, synthetic construct
NGAAGGSSNDNA

SEQ ID NO: 44978 - protein, 12 aa, synthetic construct
NGAAGGSSNDNH

SEQ ID NO: 44979 - protein, 12 aa, synthetic construct
NGAAGGSSNDNT

SEQ ID NO: 44980 - protein, 12 aa, synthetic construct
NGAAGGSTNDNA

SEQ ID NO: 44981 - protein, 12 aa, synthetic construct
NGAAGGSTNDNH

SEQ ID NO: 44982 - protein, 12 aa, synthetic construct
NGAAGGSTNDNT

SEQ ID NO: 44983 - protein, 12 aa, synthetic construct
NGASAAASNDNA

SEQ ID NO: 44984 - protein, 12 aa, synthetic construct
NGASAAASNDNH

SEQ ID NO: 44985 - protein, 12 aa, synthetic construct
NGASAAASNDNT

SEQ ID NO: 44986 - protein, 12 aa, synthetic construct
NGASAAATNDNA

SEQ ID NO: 44987 - protein, 12 aa, synthetic construct
NGASAAATNDNH

SEQ ID NO: 44988 - protein, 12 aa, synthetic construct
NGASAAATNDNT

SEQ ID NO: 44989 - protein, 12 aa, synthetic construct
NGASAASSNDNA

SEQ ID NO: 44990 - protein, 12 aa, synthetic construct
NGASAASSNDNH

SEQ ID NO: 44991 - protein, 12 aa, synthetic construct
NGASAASSNDNT

SEQ ID NO: 44992 - protein, 12 aa, synthetic construct
NGASAASTNDNA

SEQ ID NO: 44993 - protein, 12 aa, synthetic construct
NGASAASTNDNH

SEQ ID NO: 44994 - protein, 12 aa, synthetic construct
NGASAASTNDNT

SEQ ID NO: 44995 - protein, 12 aa, synthetic construct
NGASAGASNDNA

SEQ ID NO: 44996 - protein, 12 aa, synthetic construct
NGASAGASNDNH

SEQ ID NO: 44997 - protein, 12 aa, synthetic construct
NGASAGASNDNT

SEQ ID NO: 44998 - protein, 12 aa, synthetic construct
NGASAGATNDNA

SEQ ID NO: 44999 - protein, 12 aa, synthetic construct
NGASAGATNDNH

SEQ ID NO: 45000 - protein, 12 aa, synthetic construct
NGASAGATNDNT

SEQ ID NO: 45001 - protein, 12 aa, synthetic construct
NGASAGSSNDNA

SEQ ID NO: 45002 - protein, 12 aa, synthetic construct
NGASAGSSNDNH

SEQ ID NO: 45003 - protein, 12 aa, synthetic construct
NGASAGSSNDNT

SEQ ID NO: 45004 - protein, 12 aa, synthetic construct
NGASAGSTNDNA

SEQ ID NO: 45005 - protein, 12 aa, synthetic construct
NGASAGSTNDNH

SEQ ID NO: 45006 - protein, 12 aa, synthetic construct
NGASAGSTNDNT

SEQ ID NO: 45007 - protein, 12 aa, synthetic construct
NGASGAASNDNA

SEQ ID NO: 45008 - protein, 12 aa, synthetic construct
NGASGAASNDNH

SEQ ID NO: 45009 - protein, 12 aa, synthetic construct
NGASGAASNDNT

SEQ ID NO: 45010 - protein, 12 aa, synthetic construct
NGASGAATNDNA

SEQ ID NO: 45011 - protein, 12 aa, synthetic construct
NGASGAATNDNH

SEQ ID NO: 45012 - protein, 12 aa, synthetic construct
NGASGAATNDNT

SEQ ID NO: 45013 - protein, 12 aa, synthetic construct
NGASGASSNDNA

SEQ ID NO: 45014 - protein, 12 aa, synthetic construct
NGASGASSNDNH

SEQ ID NO: 45015 - protein, 12 aa, synthetic construct
NGASGASSNDNT

SEQ ID NO: 45016 - protein, 12 aa, synthetic construct
NGASGASTNDNA

SEQ ID NO: 45017 - protein, 12 aa, synthetic construct
NGASGASTNDNH

SEQ ID NO: 45018 - protein, 12 aa, synthetic construct
NGASGASTNDNT

SEQ ID NO: 45019 - protein, 12 aa, synthetic construct
NGASGGASNDNA

SEQ ID NO: 45020 - protein, 12 aa, synthetic construct
NGASGGASNDNH

SEQ ID NO: 45021 - protein, 12 aa, synthetic construct
NGASGGASNDNT

SEQ ID NO: 45022 - protein, 12 aa, synthetic construct
NGASGGATNDNA

SEQ ID NO: 45023 - protein, 12 aa, synthetic construct
NGASGGATNDNH

SEQ ID NO: 45024 - protein, 12 aa, synthetic construct
NGASGGATNDNT

SEQ ID NO: 45025 - protein, 12 aa, synthetic construct
NGASGGSSNDNA

SEQ ID NO: 45026 - protein, 12 aa, synthetic construct
NGASGGSSNDNH

SEQ ID NO: 45027 - protein, 12 aa, synthetic construct
NGASGGSSNDNT

SEQ ID NO: 45028 - protein, 12 aa, synthetic construct
NGASGGSTNDNA

SEQ ID NO: 45029 - protein, 12 aa, synthetic construct
NGASGGSTNDNH

SEQ ID NO: 45030 - protein, 12 aa, synthetic construct
NGASGGSTNDNT

SEQ ID NO: 45031 - protein, 12 aa, synthetic construct
NGATAAASNDNA

SEQ ID NO: 45032 - protein, 12 aa, synthetic construct
NGATAAASNDNH

SEQ ID NO: 45033 - protein, 12 aa, synthetic construct
NGATAAASNDNT

SEQ ID NO: 45034 - protein, 12 aa, synthetic construct
NGATAAATNDNA

SEQ ID NO: 45035 - protein, 12 aa, synthetic construct
NGATAAATNDNH

SEQ ID NO: 45036 - protein, 12 aa, synthetic construct
NGATAAATNDNT

SEQ ID NO: 45037 - protein, 12 aa, synthetic construct
NGATAASSNDNA

SEQ ID NO: 45038 - protein, 12 aa, synthetic construct
NGATAASSNDNH

SEQ ID NO: 45039 - protein, 12 aa, synthetic construct
NGATAASSNDNT

SEQ ID NO: 45040 - protein, 12 aa, synthetic construct
NGATAASTNDNA

SEQ ID NO: 45041 - protein, 12 aa, synthetic construct
NGATAASTNDNH

SEQ ID NO: 45042 - protein, 12 aa, synthetic construct
NGATAASTNDNT

SEQ ID NO: 45043 - protein, 12 aa, synthetic construct
NGATAGASNDNA

SEQ ID NO: 45044 - protein, 12 aa, synthetic construct
NGATAGASNDNH

SEQ ID NO: 45045 - protein, 12 aa, synthetic construct
NGATAGASNDNT

SEQ ID NO: 45046 - protein, 12 aa, synthetic construct
NGATAGATNDNA

SEQ ID NO: 45047 - protein, 12 aa, synthetic construct
NGATAGATNDNH

SEQ ID NO: 45048 - protein, 12 aa, synthetic construct
NGATAGATNDNT

SEQ ID NO: 45049 - protein, 12 aa, synthetic construct
NGATAGSSNDNA

SEQ ID NO: 45050 - protein, 12 aa, synthetic construct
NGATAGSSNDNH

SEQ ID NO: 45051 - protein, 12 aa, synthetic construct
NGATAGSSNDNT

SEQ ID NO: 45052 - protein, 12 aa, synthetic construct
NGATAGSTNDNA

SEQ ID NO: 45053 - protein, 12 aa, synthetic construct
NGATAGSTNDNH

SEQ ID NO: 45054 - protein, 12 aa, synthetic construct
NGATAGSTNDNT

SEQ ID NO: 45055 - protein, 12 aa, synthetic construct
NGATGAASNDNA

SEQ ID NO: 45056 - protein, 12 aa, synthetic construct
NGATGAASNDNH

SEQ ID NO: 45057 - protein, 12 aa, synthetic construct
NGATGAASNDNT

SEQ ID NO: 45058 - protein, 12 aa, synthetic construct
NGATGAATNDNA

SEQ ID NO: 45059 - protein, 12 aa, synthetic construct
NGATGAATNDNH

SEQ ID NO: 45060 - protein, 12 aa, synthetic construct
NGATGAATNDNT

SEQ ID NO: 45061 - protein, 12 aa, synthetic construct
NGATGASSNDNA

SEQ ID NO: 45062 - protein, 12 aa, synthetic construct
NGATGASSNDNH

SEQ ID NO: 45063 - protein, 12 aa, synthetic construct
NGATGASSNDNT

SEQ ID NO: 45064 - protein, 12 aa, synthetic construct
NGATGASTNDNA

SEQ ID NO: 45065 - protein, 12 aa, synthetic construct
NGATGASTNDNH

SEQ ID NO: 45066 - protein, 12 aa, synthetic construct
NGATGASTNDNT

SEQ ID NO: 45067 - protein, 12 aa, synthetic construct
NGATGGASNDNA

SEQ ID NO: 45068 - protein, 12 aa, synthetic construct
NGATGGASNDNH

SEQ ID NO: 45069 - protein, 12 aa, synthetic construct
NGATGGASNDNT

SEQ ID NO: 45070 - protein, 12 aa, synthetic construct
NGATGGATNDNA

SEQ ID NO: 45071 - protein, 12 aa, synthetic construct
NGATGGATNDNH

SEQ ID NO: 45072 - protein, 12 aa, synthetic construct
NGATGGATNDNT

SEQ ID NO: 45073 - protein, 12 aa, synthetic construct
NGATGGSSNDNA

SEQ ID NO: 45074 - protein, 12 aa, synthetic construct
NGATGGSSNDNH

SEQ ID NO: 45075 - protein, 12 aa, synthetic construct
NGATGGSSNDNT

SEQ ID NO: 45076 - protein, 12 aa, synthetic construct
NGATGGSTNDNA

SEQ ID NO: 45077 - protein, 12 aa, synthetic construct
NGATGGSTNDNH

SEQ ID NO: 45078 - protein, 12 aa, synthetic construct
NGATGGSTNDNT

SEQ ID NO: 45079 - protein, 12 aa, synthetic construct
NGEAAAASNDNA

SEQ ID NO: 45080 - protein, 12 aa, synthetic construct
NGEAAAASNDNH

SEQ ID NO: 45081 - protein, 12 aa, synthetic construct
NGEAAAASNDNT

SEQ ID NO: 45082 - protein, 12 aa, synthetic construct
NGEAAAATNDNA

SEQ ID NO: 45083 - protein, 12 aa, synthetic construct
NGEAAAATNDNH

SEQ ID NO: 45084 - protein, 12 aa, synthetic construct
NGEAAAATNDNT

SEQ ID NO: 45085 - protein, 12 aa, synthetic construct
NGEAAASSNDNA

SEQ ID NO: 45086 - protein, 12 aa, synthetic construct
NGEAAASSNDNH

SEQ ID NO: 45087 - protein, 12 aa, synthetic construct
NGEAAASSNDNT

SEQ ID NO: 45088 - protein, 12 aa, synthetic construct
NGEAAASTNDNA

SEQ ID NO: 45089 - protein, 12 aa, synthetic construct
NGEAAASTNDNH

SEQ ID NO: 45090 - protein, 12 aa, synthetic construct
NGEAAASTNDNT

SEQ ID NO: 45091 - protein, 12 aa, synthetic construct
NGEAAGASNDNA

SEQ ID NO: 45092 - protein, 12 aa, synthetic construct
NGEAAGASNDNH

SEQ ID NO: 45093 - protein, 12 aa, synthetic construct
NGEAAGASNDNT

SEQ ID NO: 45094 - protein, 12 aa, synthetic construct
NGEAAGATNDNA

SEQ ID NO: 45095 - protein, 12 aa, synthetic construct
NGEAAGATNDNH

SEQ ID NO: 45096 - protein, 12 aa, synthetic construct
NGEAAGATNDNT

SEQ ID NO: 45097 - protein, 12 aa, synthetic construct
NGEAAGSSNDNA

SEQ ID NO: 45098 - protein, 12 aa, synthetic construct
NGEAAGSSNDNH

SEQ ID NO: 45099 - protein, 12 aa, synthetic construct
NGEAAGSSNDNT

SEQ ID NO: 45100 - protein, 12 aa, synthetic construct
NGEAAGSTNDNA

SEQ ID NO: 45101 - protein, 12 aa, synthetic construct
NGEAAGSTNDNH

SEQ ID NO: 45102 - protein, 12 aa, synthetic construct
NGEAAGSTNDNT

SEQ ID NO: 45103 - protein, 12 aa, synthetic construct
NGEAGAASNDNA

SEQ ID NO: 45104 - protein, 12 aa, synthetic construct
NGEAGAASNDNH

SEQ ID NO: 45105 - protein, 12 aa, synthetic construct
NGEAGAASNDNT

SEQ ID NO: 45106 - protein, 12 aa, synthetic construct
NGEAGAATNDNA

SEQ ID NO: 45107 - protein, 12 aa, synthetic construct
NGEAGAATNDNH

SEQ ID NO: 45108 - protein, 12 aa, synthetic construct
NGEAGAATNDNT

SEQ ID NO: 45109 - protein, 12 aa, synthetic construct
NGEAGASSNDNA

SEQ ID NO: 45110 - protein, 12 aa, synthetic construct
NGEAGASSNDNH

SEQ ID NO: 45111 - protein, 12 aa, synthetic construct
NGEAGASSNDNT

SEQ ID NO: 45112 - protein, 12 aa, synthetic construct
NGEAGASTNDNA

SEQ ID NO: 45113 - protein, 12 aa, synthetic construct
NGEAGASTNDNH

SEQ ID NO: 45114 - protein, 12 aa, synthetic construct
NGEAGASTNDNT

SEQ ID NO: 45115 - protein, 12 aa, synthetic construct
NGEAGGASNDNA

SEQ ID NO: 45116 - protein, 12 aa, synthetic construct
NGEAGGASNDNH

SEQ ID NO: 45117 - protein, 12 aa, synthetic construct
NGEAGGASNDNT

SEQ ID NO: 45118 - protein, 12 aa, synthetic construct
NGEAGGATNDNA

SEQ ID NO: 45119 - protein, 12 aa, synthetic construct
NGEAGGATNDNH

SEQ ID NO: 45120 - protein, 12 aa, synthetic construct
NGEAGGATNDNT

SEQ ID NO: 45121 - protein, 12 aa, synthetic construct
NGEAGGSSNDNA

SEQ ID NO: 45122 - protein, 12 aa, synthetic construct
NGEAGGSSNDNH

SEQ ID NO: 45123 - protein, 12 aa, synthetic construct
NGEAGGSSNDNT

SEQ ID NO: 45124 - protein, 12 aa, synthetic construct
NGEAGGSTNDNA

SEQ ID NO: 45125 - protein, 12 aa, synthetic construct
NGEAGGSTNDNH

SEQ ID NO: 45126 - protein, 12 aa, synthetic construct
NGEAGGSTNDNT

SEQ ID NO: 45127 - protein, 12 aa, synthetic construct
NGESAAASNDNA

SEQ ID NO: 45128 - protein, 12 aa, synthetic construct
NGESAAASNDNH

SEQ ID NO: 45129 - protein, 12 aa, synthetic construct
NGESAAASNDNT

SEQ ID NO: 45130 - protein, 12 aa, synthetic construct
NGESAAATNDNA

SEQ ID NO: 45131 - protein, 12 aa, synthetic construct
NGESAAATNDNH

SEQ ID NO: 45132 - protein, 12 aa, synthetic construct
NGESAAATNDNT

SEQ ID NO: 45133 - protein, 12 aa, synthetic construct
NGESAASSNDNA

SEQ ID NO: 45134 - protein, 12 aa, synthetic construct
NGESAASSNDNH

SEQ ID NO: 45135 - protein, 12 aa, synthetic construct
NGESAASSNDNT

SEQ ID NO: 45136 - protein, 12 aa, synthetic construct
NGESAASTNDNA

SEQ ID NO: 45137 - protein, 12 aa, synthetic construct
NGESAASTNDNH

SEQ ID NO: 45138 - protein, 12 aa, synthetic construct
NGESAASTNDNT

SEQ ID NO: 45139 - protein, 12 aa, synthetic construct
NGESAGASNDNA

SEQ ID NO: 45140 - protein, 12 aa, synthetic construct
NGESAGASNDNH

SEQ ID NO: 45141 - protein, 12 aa, synthetic construct
NGESAGASNDNT

SEQ ID NO: 45142 - protein, 12 aa, synthetic construct
NGESAGATNDNA

SEQ ID NO: 45143 - protein, 12 aa, synthetic construct
NGESAGATNDNH

SEQ ID NO: 45144 - protein, 12 aa, synthetic construct
NGESAGATNDNT

SEQ ID NO: 45145 - protein, 12 aa, synthetic construct
NGESAGSSNDNA

SEQ ID NO: 45146 - protein, 12 aa, synthetic construct
NGESAGSSNDNH

SEQ ID NO: 45147 - protein, 12 aa, synthetic construct
NGESAGSSNDNT

SEQ ID NO: 45148 - protein, 12 aa, synthetic construct
NGESAGSTNDNA

SEQ ID NO: 45149 - protein, 12 aa, synthetic construct
NGESAGSTNDNH

SEQ ID NO: 45150 - protein, 12 aa, synthetic construct
NGESAGSTNDNT

SEQ ID NO: 45151 - protein, 12 aa, synthetic construct
NGESGAASNDNA

SEQ ID NO: 45152 - protein, 12 aa, synthetic construct
NGESGAASNDNH

SEQ ID NO: 45153 - protein, 12 aa, synthetic construct
NGESGAASNDNT

SEQ ID NO: 45154 - protein, 12 aa, synthetic construct
NGESGAATNDNA

SEQ ID NO: 45155 - protein, 12 aa, synthetic construct
NGESGAATNDNH

SEQ ID NO: 45156 - protein, 12 aa, synthetic construct
NGESGAATNDNT

SEQ ID NO: 45157 - protein, 12 aa, synthetic construct
NGESGASSNDNA

SEQ ID NO: 45158 - protein, 12 aa, synthetic construct
NGESGASSNDNH

SEQ ID NO: 45159 - protein, 12 aa, synthetic construct
NGESGASSNDNT

SEQ ID NO: 45160 - protein, 12 aa, synthetic construct
NGESGASTNDNA

SEQ ID NO: 45161 - protein, 12 aa, synthetic construct
NGESGASTNDNH

SEQ ID NO: 45162 - protein, 12 aa, synthetic construct
NGESGASTNDNT

SEQ ID NO: 45163 - protein, 12 aa, synthetic construct
NGESGGASNDNA

SEQ ID NO: 45164 - protein, 12 aa, synthetic construct
NGESGGASNDNH

SEQ ID NO: 45165 - protein, 12 aa, synthetic construct
NGESGGASNDNT

SEQ ID NO: 45166 - protein, 12 aa, synthetic construct
NGESGGATNDNA

SEQ ID NO: 45167 - protein, 12 aa, synthetic construct
NGESGGATNDNH

SEQ ID NO: 45168 - protein, 12 aa, synthetic construct
NGESGGATNDNT

SEQ ID NO: 45169 - protein, 12 aa, synthetic construct
NGESGGSSNDNA

SEQ ID NO: 45170 - protein, 12 aa, synthetic construct
NGESGGSSNDNH

SEQ ID NO: 45171 - protein, 12 aa, synthetic construct
NGESGGSSNDNT

SEQ ID NO: 45172 - protein, 12 aa, synthetic construct
NGESGGSTNDNA

SEQ ID NO: 45173 - protein, 12 aa, synthetic construct
NGESGGSTNDNH

SEQ ID NO: 45174 - protein, 12 aa, synthetic construct
NGESGGSTNDNT

SEQ ID NO: 45175 - protein, 12 aa, synthetic construct
NGETAAASNDNA

SEQ ID NO: 45176 - protein, 12 aa, synthetic construct
NGETAAASNDNH

SEQ ID NO: 45177 - protein, 12 aa, synthetic construct
NGETAAASNDNT

SEQ ID NO: 45178 - protein, 12 aa, synthetic construct
NGETAAATNDNA

SEQ ID NO: 45179 - protein, 12 aa, synthetic construct
NGETAAATNDNH

SEQ ID NO: 45180 - protein, 12 aa, synthetic construct
NGETAAATNDNT

SEQ ID NO: 45181 - protein, 12 aa, synthetic construct
NGETAASSNDNA

SEQ ID NO: 45182 - protein, 12 aa, synthetic construct
NGETAASSNDNH

SEQ ID NO: 45183 - protein, 12 aa, synthetic construct
NGETAASSNDNT

SEQ ID NO: 45184 - protein, 12 aa, synthetic construct
NGETAASTNDNA

SEQ ID NO: 45185 - protein, 12 aa, synthetic construct
NGETAASTNDNH

SEQ ID NO: 45186 - protein, 12 aa, synthetic construct
NGETAASTNDNT

SEQ ID NO: 45187 - protein, 12 aa, synthetic construct
NGETAGASNDNA

SEQ ID NO: 45188 - protein, 12 aa, synthetic construct
NGETAGASNDNH

SEQ ID NO: 45189 - protein, 12 aa, synthetic construct
NGETAGASNDNT

SEQ ID NO: 45190 - protein, 12 aa, synthetic construct
NGETAGATNDNA

SEQ ID NO: 45191 - protein, 12 aa, synthetic construct
NGETAGATNDNH

SEQ ID NO: 45192 - protein, 12 aa, synthetic construct
NGETAGATNDNT

SEQ ID NO: 45193 - protein, 12 aa, synthetic construct
NGETAGSSNDNA

SEQ ID NO: 45194 - protein, 12 aa, synthetic construct
NGETAGSSNDNH

SEQ ID NO: 45195 - protein, 12 aa, synthetic construct
NGETAGSSNDNT

SEQ ID NO: 45196 - protein, 12 aa, synthetic construct
NGETAGSTNDNA

SEQ ID NO: 45197 - protein, 12 aa, synthetic construct
NGETAGSTNDNH

SEQ ID NO: 45198 - protein, 12 aa, synthetic construct
NGETAGSTNDNT

SEQ ID NO: 45199 - protein, 12 aa, synthetic construct
NGETGAASNDNA

SEQ ID NO: 45200 - protein, 12 aa, synthetic construct
NGETGAASNDNH

SEQ ID NO: 45201 - protein, 12 aa, synthetic construct
NGETGAASNDNT

SEQ ID NO: 45202 - protein, 12 aa, synthetic construct
NGETGAATNDNA

SEQ ID NO: 45203 - protein, 12 aa, synthetic construct
NGETGAATNDNH

SEQ ID NO: 45204 - protein, 12 aa, synthetic construct
NGETGAATNDNT

SEQ ID NO: 45205 - protein, 12 aa, synthetic construct
NGETGASSNDNA

SEQ ID NO: 45206 - protein, 12 aa, synthetic construct
NGETGASSNDNH

SEQ ID NO: 45207 - protein, 12 aa, synthetic construct
NGETGASSNDNT

SEQ ID NO: 45208 - protein, 12 aa, synthetic construct
NGETGASTNDNA

SEQ ID NO: 45209 - protein, 12 aa, synthetic construct
NGETGASTNDNH

SEQ ID NO: 45210 - protein, 12 aa, synthetic construct
NGETGASTNDNT

SEQ ID NO: 45211 - protein, 12 aa, synthetic construct
NGETGGASNDNA

SEQ ID NO: 45212 - protein, 12 aa, synthetic construct
NGETGGASNDNH

SEQ ID NO: 45213 - protein, 12 aa, synthetic construct
NGETGGASNDNT

SEQ ID NO: 45214 - protein, 12 aa, synthetic construct
NGETGGATNDNA

SEQ ID NO: 45215 - protein, 12 aa, synthetic construct
NGETGGATNDNH

SEQ ID NO: 45216 - protein, 12 aa, synthetic construct
NGETGGATNDNT

SEQ ID NO: 45217 - protein, 12 aa, synthetic construct
NGETGGSSNDNA

SEQ ID NO: 45218 - protein, 12 aa, synthetic construct
NGETGGSSNDNH

SEQ ID NO: 45219 - protein, 12 aa, synthetic construct
NGETGGSSNDNT

SEQ ID NO: 45220 - protein, 12 aa, synthetic construct
NGETGGSTNDNA

SEQ ID NO: 45221 - protein, 12 aa, synthetic construct
NGETGGSTNDNH

SEQ ID NO: 45222 - protein, 12 aa, synthetic construct
NGETGGSTNDNT

SEQ ID NO: 45223 - protein, 12 aa, synthetic construct
NGQAAAASNDNA

SEQ ID NO: 45224 - protein, 12 aa, synthetic construct
NGQAAAASNDNH

SEQ ID NO: 45225 - protein, 12 aa, synthetic construct
NGQAAAASNDNT

SEQ ID NO: 45226 - protein, 12 aa, synthetic construct
NGQAAAATNDNA

SEQ ID NO: 45227 - protein, 12 aa, synthetic construct
NGQAAAATNDNH

SEQ ID NO: 45228 - protein, 12 aa, synthetic construct
NGQAAAATNDNT

SEQ ID NO: 45229 - protein, 12 aa, synthetic construct
NGQAAASSNDNA

SEQ ID NO: 45230 - protein, 12 aa, synthetic construct
NGQAAASSNDNH

SEQ ID NO: 45231 - protein, 12 aa, synthetic construct
NGQAAASSNDNT

SEQ ID NO: 45232 - protein, 12 aa, synthetic construct
NGQAAASTNDNA

SEQ ID NO: 45233 - protein, 12 aa, synthetic construct
NGQAAASTNDNH

SEQ ID NO: 45234 - protein, 12 aa, synthetic construct
NGQAAASTNDNT

SEQ ID NO: 45235 - protein, 12 aa, synthetic construct
NGQAAGASNDNA

SEQ ID NO: 45236 - protein, 12 aa, synthetic construct
NGQAAGASNDNH

SEQ ID NO: 45237 - protein, 12 aa, synthetic construct
NGQAAGASNDNT

SEQ ID NO: 45238 - protein, 12 aa, synthetic construct
NGQAAGATNDNA

SEQ ID NO: 45239 - protein, 12 aa, synthetic construct
NGQAAGATNDNH

SEQ ID NO: 45240 - protein, 12 aa, synthetic construct
NGQAAGATNDNT

SEQ ID NO: 45241 - protein, 12 aa, synthetic construct
NGQAAGSSNDNA

SEQ ID NO: 45242 - protein, 12 aa, synthetic construct
NGQAAGSSNDNH

SEQ ID NO: 45243 - protein, 12 aa, synthetic construct
NGQAAGSSNDNT

SEQ ID NO: 45244 - protein, 12 aa, synthetic construct
NGQAAGSTNDNA

SEQ ID NO: 45245 - protein, 12 aa, synthetic construct
NGQAAGSTNDNH

SEQ ID NO: 45246 - protein, 12 aa, synthetic construct
NGQAAGSTNDNT

SEQ ID NO: 45247 - protein, 12 aa, synthetic construct
NGQAGAASNDNA

SEQ ID NO: 45248 - protein, 12 aa, synthetic construct
NGQAGAASNDNH

SEQ ID NO: 45249 - protein, 12 aa, synthetic construct
NGQAGAASNDNT

SEQ ID NO: 45250 - protein, 12 aa, synthetic construct
NGQAGAATNDNA

SEQ ID NO: 45251 - protein, 12 aa, synthetic construct
NGQAGAATNDNH

SEQ ID NO: 45252 - protein, 12 aa, synthetic construct
NGQAGAATNDNT

SEQ ID NO: 45253 - protein, 12 aa, synthetic construct
NGQAGASSNDNA

SEQ ID NO: 45254 - protein, 12 aa, synthetic construct
NGQAGASSNDNH

SEQ ID NO: 45255 - protein, 12 aa, synthetic construct
NGQAGASSNDNT

SEQ ID NO: 45256 - protein, 12 aa, synthetic construct
NGQAGASTNDNA

SEQ ID NO: 45257 - protein, 12 aa, synthetic construct
NGQAGASTNDNH

SEQ ID NO: 45258 - protein, 12 aa, synthetic construct
NGQAGASTNDNT

SEQ ID NO: 45259 - protein, 12 aa, synthetic construct
NGQAGGASNDNA

SEQ ID NO: 45260 - protein, 12 aa, synthetic construct
NGQAGGASNDNH

SEQ ID NO: 45261 - protein, 12 aa, synthetic construct
NGQAGGASNDNT

SEQ ID NO: 45262 - protein, 12 aa, synthetic construct
NGQAGGATNDNA

SEQ ID NO: 45263 - protein, 12 aa, synthetic construct
NGQAGGATNDNH

SEQ ID NO: 45264 - protein, 12 aa, synthetic construct
NGQAGGATNDNT

SEQ ID NO: 45265 - protein, 12 aa, synthetic construct
NGQAGGSSNDNA

SEQ ID NO: 45266 - protein, 12 aa, synthetic construct
NGQAGGSSNDNH

SEQ ID NO: 45267 - protein, 12 aa, synthetic construct
NGQAGGSSNDNT

SEQ ID NO: 45268 - protein, 12 aa, synthetic construct
NGQAGGSTNDNA

SEQ ID NO: 45269 - protein, 12 aa, synthetic construct
NGQAGGSTNDNH

SEQ ID NO: 45270 - protein, 12 aa, synthetic construct
NGQAGGSTNDNT

SEQ ID NO: 45271 - protein, 12 aa, synthetic construct
NGQSAAASNDNA

SEQ ID NO: 45272 - protein, 12 aa, synthetic construct
NGQSAAASNDNH

SEQ ID NO: 45273 - protein, 12 aa, synthetic construct
NGQSAAASNDNT

SEQ ID NO: 45274 - protein, 12 aa, synthetic construct
NGQSAAATNDNA

SEQ ID NO: 45275 - protein, 12 aa, synthetic construct
NGQSAAATNDNH

SEQ ID NO: 45276 - protein, 12 aa, synthetic construct
NGQSAAATNDNT

SEQ ID NO: 45277 - protein, 12 aa, synthetic construct
NGQSAASSNDNA

SEQ ID NO: 45278 - protein, 12 aa, synthetic construct
NGQSAASSNDNH

SEQ ID NO: 45279 - protein, 12 aa, synthetic construct
NGQSAASSNDNT

SEQ ID NO: 45280 - protein, 12 aa, synthetic construct
NGQSAASTNDNA

SEQ ID NO: 45281 - protein, 12 aa, synthetic construct
NGQSAASTNDNH

SEQ ID NO: 45282 - protein, 12 aa, synthetic construct
NGQSAASTNDNT

SEQ ID NO: 45283 - protein, 12 aa, synthetic construct
NGQSAGASNDNA

SEQ ID NO: 45284 - protein, 12 aa, synthetic construct
NGQSAGASNDNH

SEQ ID NO: 45285 - protein, 12 aa, synthetic construct
NGQSAGASNDNT

SEQ ID NO: 45286 - protein, 12 aa, synthetic construct
NGQSAGATNDNA

SEQ ID NO: 45287 - protein, 12 aa, synthetic construct
NGQSAGATNDNH

SEQ ID NO: 45288 - protein, 12 aa, synthetic construct
NGQSAGATNDNT

SEQ ID NO: 45289 - protein, 12 aa, synthetic construct
NGQSAGSSNDNA

SEQ ID NO: 45290 - protein, 12 aa, synthetic construct
NGQSAGSSNDNH

SEQ ID NO: 45291 - protein, 12 aa, synthetic construct
NGQSAGSSNDNT

SEQ ID NO: 45292 - protein, 12 aa, synthetic construct
NGQSAGSTNDNA

SEQ ID NO: 45293 - protein, 12 aa, synthetic construct
NGQSAGSTNDNH

SEQ ID NO: 45294 - protein, 12 aa, synthetic construct
NGQSAGSTNDNT

SEQ ID NO: 45295 - protein, 12 aa, synthetic construct
NGQSGAASNDNA

SEQ ID NO: 45296 - protein, 12 aa, synthetic construct
NGQSGAASNDNH

SEQ ID NO: 45297 - protein, 12 aa, synthetic construct
NGQSGAASNDNT

SEQ ID NO: 45298 - protein, 12 aa, synthetic construct
NGQSGAATNDNA

SEQ ID NO: 45299 - protein, 12 aa, synthetic construct
NGQSGAATNDNH

SEQ ID NO: 45300 - protein, 12 aa, synthetic construct
NGQSGAATNDNT

SEQ ID NO: 45301 - protein, 12 aa, synthetic construct
NGQSGASSNDNA

SEQ ID NO: 45302 - protein, 12 aa, synthetic construct
NGQSGASSNDNH

SEQ ID NO: 45303 - protein, 12 aa, synthetic construct
NGQSGASSNDNT

SEQ ID NO: 45304 - protein, 12 aa, synthetic construct
NGQSGASTNDNA

SEQ ID NO: 45305 - protein, 12 aa, synthetic construct
NGQSGASTNDNH

SEQ ID NO: 45306 - protein, 12 aa, synthetic construct
NGQSGASTNDNT

SEQ ID NO: 45307 - protein, 12 aa, synthetic construct
NGQSGGASNDNA

SEQ ID NO: 45308 - protein, 12 aa, synthetic construct
NGQSGGASNDNH

SEQ ID NO: 45309 - protein, 12 aa, synthetic construct
NGQSGGASNDNT

SEQ ID NO: 45310 - protein, 12 aa, synthetic construct
NGQSGGATNDNA

SEQ ID NO: 45311 - protein, 12 aa, synthetic construct
NGQSGGATNDNH

SEQ ID NO: 45312 - protein, 12 aa, synthetic construct
NGQSGGATNDNT

SEQ ID NO: 45313 - protein, 12 aa, synthetic construct
NGQSGGSSNDNA

SEQ ID NO: 45314 - protein, 12 aa, synthetic construct
NGQSGGSSNDNH

SEQ ID NO: 45315 - protein, 12 aa, synthetic construct
NGQSGGSSNDNT

SEQ ID NO: 45316 - protein, 12 aa, synthetic construct
NGQSGGSTNDNA

SEQ ID NO: 45317 - protein, 12 aa, synthetic construct
NGQSGGSTNDNH

SEQ ID NO: 45318 - protein, 12 aa, synthetic construct
NGQSGGSTNDNT

SEQ ID NO: 45319 - protein, 12 aa, synthetic construct
NGQTAAASNDNA

SEQ ID NO: 45320 - protein, 12 aa, synthetic construct
NGQTAAASNDNH

SEQ ID NO: 45321 - protein, 12 aa, synthetic construct
NGQTAAASNDNT

SEQ ID NO: 45322 - protein, 12 aa, synthetic construct
NGQTAAATNDNA

SEQ ID NO: 45323 - protein, 12 aa, synthetic construct
NGQTAAATNDNH

SEQ ID NO: 45324 - protein, 12 aa, synthetic construct
NGQTAAATNDNT

SEQ ID NO: 45325 - protein, 12 aa, synthetic construct
NGQTAASSNDNA

SEQ ID NO: 45326 - protein, 12 aa, synthetic construct
NGQTAASSNDNH

SEQ ID NO: 45327 - protein, 12 aa, synthetic construct
NGQTAASSNDNT

SEQ ID NO: 45328 - protein, 12 aa, synthetic construct
NGQTAASTNDNA

SEQ ID NO: 45329 - protein, 12 aa, synthetic construct
NGQTAASTNDNH

SEQ ID NO: 45330 - protein, 12 aa, synthetic construct
NGQTAASTNDNT

SEQ ID NO: 45331 - protein, 12 aa, synthetic construct
NGQTAGASNDNA

SEQ ID NO: 45332 - protein, 12 aa, synthetic construct
NGQTAGASNDNH

SEQ ID NO: 45333 - protein, 12 aa, synthetic construct
NGQTAGASNDNT

SEQ ID NO: 45334 - protein, 12 aa, synthetic construct
NGQTAGATNDNA

SEQ ID NO: 45335 - protein, 12 aa, synthetic construct
NGQTAGATNDNH

SEQ ID NO: 45336 - protein, 12 aa, synthetic construct
NGQTAGATNDNT

SEQ ID NO: 45337 - protein, 12 aa, synthetic construct
NGQTAGSSNDNA

SEQ ID NO: 45338 - protein, 12 aa, synthetic construct
NGQTAGSSNDNH

SEQ ID NO: 45339 - protein, 12 aa, synthetic construct
NGQTAGSSNDNT

SEQ ID NO: 45340 - protein, 12 aa, synthetic construct
NGQTAGSTNDNA

SEQ ID NO: 45341 - protein, 12 aa, synthetic construct
NGQTAGSTNDNH

SEQ ID NO: 45342 - protein, 12 aa, synthetic construct
NGQTAGSTNDNT

SEQ ID NO: 45343 - protein, 12 aa, synthetic construct
NGQTGAASNDNA

SEQ ID NO: 45344 - protein, 12 aa, synthetic construct
NGQTGAASNDNH

SEQ ID NO: 45345 - protein, 12 aa, synthetic construct
NGQTGAASNDNT

SEQ ID NO: 45346 - protein, 12 aa, synthetic construct
NGQTGAATNDNA

SEQ ID NO: 45347 - protein, 12 aa, synthetic construct
NGQTGAATNDNH

SEQ ID NO: 45348 - protein, 12 aa, synthetic construct
NGQTGAATNDNT

SEQ ID NO: 45349 - protein, 12 aa, synthetic construct
NGQTGASSNDNA

SEQ ID NO: 45350 - protein, 12 aa, synthetic construct
NGQTGASSNDNH

SEQ ID NO: 45351 - protein, 12 aa, synthetic construct
NGQTGASSNDNT

SEQ ID NO: 45352 - protein, 12 aa, synthetic construct
NGQTGASTNDNA

SEQ ID NO: 45353 - protein, 12 aa, synthetic construct
NGQTGASTNDNH

SEQ ID NO: 45354 - protein, 12 aa, synthetic construct
NGQTGASTNDNT

SEQ ID NO: 45355 - protein, 12 aa, synthetic construct
NGQTGGASNDNA

SEQ ID NO: 45356 - protein, 12 aa, synthetic construct
NGQTGGASNDNH

SEQ ID NO: 45357 - protein, 12 aa, synthetic construct
NGQTGGASNDNT

SEQ ID NO: 45358 - protein, 12 aa, synthetic construct
NGQTGGATNDNA

SEQ ID NO: 45359 - protein, 12 aa, synthetic construct
NGQTGGATNDNH

SEQ ID NO: 45360 - protein, 12 aa, synthetic construct
NGQTGGATNDNT

SEQ ID NO: 45361 - protein, 12 aa, synthetic construct
NGQTGGSSNDNA

SEQ ID NO: 45362 - protein, 12 aa, synthetic construct
NGQTGGSSNDNH

SEQ ID NO: 45363 - protein, 12 aa, synthetic construct
NGQTGGSSNDNT

SEQ ID NO: 45364 - protein, 12 aa, synthetic construct
NGQTGGSTNDNA

SEQ ID NO: 45365 - protein, 12 aa, synthetic construct
NGQTGGSTNDNH

SEQ ID NO: 45366 - protein, 12 aa, synthetic construct
NGQTGGSTNDNT

SEQ ID NO: 45367 - protein, 12 aa, synthetic construct
NGTAAAASNDNA

SEQ ID NO: 45368 - protein, 12 aa, synthetic construct
NGTAAAASNDNH

SEQ ID NO: 45369 - protein, 12 aa, synthetic construct
NGTAAAASNDNT

SEQ ID NO: 45370 - protein, 12 aa, synthetic construct
NGTAAAATNDNA

SEQ ID NO: 45371 - protein, 12 aa, synthetic construct
NGTAAAATNDNH

SEQ ID NO: 45372 - protein, 12 aa, synthetic construct
NGTAAAATNDNT

SEQ ID NO: 45373 - protein, 12 aa, synthetic construct
NGTAAASSNDNA

SEQ ID NO: 45374 - protein, 12 aa, synthetic construct
NGTAAASSNDNH

SEQ ID NO: 45375 - protein, 12 aa, synthetic construct
NGTAAASSNDNT

SEQ ID NO: 45376 - protein, 12 aa, synthetic construct
NGTAAASTNDNA

SEQ ID NO: 45377 - protein, 12 aa, synthetic construct
NGTAAASTNDNH

SEQ ID NO: 45378 - protein, 12 aa, synthetic construct
NGTAAASTNDNT

SEQ ID NO: 45379 - protein, 12 aa, synthetic construct
NGTAAGASNDNA

SEQ ID NO: 45380 - protein, 12 aa, synthetic construct
NGTAAGASNDNH

SEQ ID NO: 45381 - protein, 12 aa, synthetic construct
NGTAAGASNDNT

SEQ ID NO: 45382 - protein, 12 aa, synthetic construct
NGTAAGATNDNA

SEQ ID NO: 45383 - protein, 12 aa, synthetic construct
NGTAAGATNDNH

SEQ ID NO: 45384 - protein, 12 aa, synthetic construct
NGTAAGATNDNT

SEQ ID NO: 45385 - protein, 12 aa, synthetic construct
NGTAAGSSNDNA

SEQ ID NO: 45386 - protein, 12 aa, synthetic construct
NGTAAGSSNDNH

SEQ ID NO: 45387 - protein, 12 aa, synthetic construct
NGTAAGSSNDNT

SEQ ID NO: 45388 - protein, 12 aa, synthetic construct
NGTAAGSTNDNA

SEQ ID NO: 45389 - protein, 12 aa, synthetic construct
NGTAAGSTNDNH

SEQ ID NO: 45390 - protein, 12 aa, synthetic construct
NGTAAGSTNDNT

SEQ ID NO: 45391 - protein, 12 aa, synthetic construct
NGTAGAASNDNA

SEQ ID NO: 45392 - protein, 12 aa, synthetic construct
NGTAGAASNDNH

SEQ ID NO: 45393 - protein, 12 aa, synthetic construct
NGTAGAASNDNT

SEQ ID NO: 45394 - protein, 12 aa, synthetic construct
NGTAGAATNDNA

SEQ ID NO: 45395 - protein, 12 aa, synthetic construct
NGTAGAATNDNH

SEQ ID NO: 45396 - protein, 12 aa, synthetic construct
NGTAGAATNDNT

SEQ ID NO: 45397 - protein, 12 aa, synthetic construct
NGTAGASSNDNA

SEQ ID NO: 45398 - protein, 12 aa, synthetic construct
NGTAGASSNDNH

SEQ ID NO: 45399 - protein, 12 aa, synthetic construct
NGTAGASSNDNT

SEQ ID NO: 45400 - protein, 12 aa, synthetic construct
NGTAGASTNDNA

SEQ ID NO: 45401 - protein, 12 aa, synthetic construct
NGTAGASTNDNH

SEQ ID NO: 45402 - protein, 12 aa, synthetic construct
NGTAGASTNDNT

SEQ ID NO: 45403 - protein, 12 aa, synthetic construct
NGTAGGASNDNA

SEQ ID NO: 45404 - protein, 12 aa, synthetic construct
NGTAGGASNDNH

SEQ ID NO: 45405 - protein, 12 aa, synthetic construct
NGTAGGASNDNT

SEQ ID NO: 45406 - protein, 12 aa, synthetic construct
NGTAGGATNDNA

SEQ ID NO: 45407 - protein, 12 aa, synthetic construct
NGTAGGATNDNH

SEQ ID NO: 45408 - protein, 12 aa, synthetic construct
NGTAGGATNDNT

SEQ ID NO: 45409 - protein, 12 aa, synthetic construct
NGTAGGSSNDNA

SEQ ID NO: 45410 - protein, 12 aa, synthetic construct
NGTAGGSSNDNH

SEQ ID NO: 45411 - protein, 12 aa, synthetic construct
NGTAGGSSNDNT

SEQ ID NO: 45412 - protein, 12 aa, synthetic construct
NGTAGGSTNDNA

SEQ ID NO: 45413 - protein, 12 aa, synthetic construct
NGTAGGSTNDNH

SEQ ID NO: 45414 - protein, 12 aa, synthetic construct
NGTAGGSTNDNT

SEQ ID NO: 45415 - protein, 12 aa, synthetic construct
NGTSAAASNDNA

SEQ ID NO: 45416 - protein, 12 aa, synthetic construct
NGTSAAASNDNH

SEQ ID NO: 45417 - protein, 12 aa, synthetic construct
NGTSAAASNDNT

SEQ ID NO: 45418 - protein, 12 aa, synthetic construct
NGTSAAATNDNA

SEQ ID NO: 45419 - protein, 12 aa, synthetic construct
NGTSAAATNDNH

SEQ ID NO: 45420 - protein, 12 aa, synthetic construct
NGTSAAATNDNT

SEQ ID NO: 45421 - protein, 12 aa, synthetic construct
NGTSAASSNDNA

SEQ ID NO: 45422 - protein, 12 aa, synthetic construct
NGTSAASSNDNH

SEQ ID NO: 45423 - protein, 12 aa, synthetic construct
NGTSAASSNDNT

SEQ ID NO: 45424 - protein, 12 aa, synthetic construct
NGTSAASTNDNA

SEQ ID NO: 45425 - protein, 12 aa, synthetic construct
NGTSAASTNDNH

SEQ ID NO: 45426 - protein, 12 aa, synthetic construct
NGTSAASTNDNT

SEQ ID NO: 45427 - protein, 12 aa, synthetic construct
NGTSAGASNDNA

SEQ ID NO: 45428 - protein, 12 aa, synthetic construct
NGTSAGASNDNH

SEQ ID NO: 45429 - protein, 12 aa, synthetic construct
NGTSAGASNDNT

SEQ ID NO: 45430 - protein, 12 aa, synthetic construct
NGTSAGATNDNA

SEQ ID NO: 45431 - protein, 12 aa, synthetic construct
NGTSAGATNDNH

SEQ ID NO: 45432 - protein, 12 aa, synthetic construct
NGTSAGATNDNT

SEQ ID NO: 45433 - protein, 12 aa, synthetic construct
NGTSAGSSNDNA

SEQ ID NO: 45434 - protein, 12 aa, synthetic construct
NGTSAGSSNDNH

SEQ ID NO: 45435 - protein, 12 aa, synthetic construct
NGTSAGSSNDNT

SEQ ID NO: 45436 - protein, 12 aa, synthetic construct
NGTSAGSTNDNA

SEQ ID NO: 45437 - protein, 12 aa, synthetic construct
NGTSAGSTNDNH

SEQ ID NO: 45438 - protein, 12 aa, synthetic construct
NGTSAGSTNDNT

SEQ ID NO: 45439 - protein, 12 aa, synthetic construct
NGTSGAASNDNA

SEQ ID NO: 45440 - protein, 12 aa, synthetic construct
NGTSGAASNDNH

SEQ ID NO: 45441 - protein, 12 aa, synthetic construct
NGTSGAASNDNT

SEQ ID NO: 45442 - protein, 12 aa, synthetic construct
NGTSGAATNDNA

SEQ ID NO: 45443 - protein, 12 aa, synthetic construct
NGTSGAATNDNH

SEQ ID NO: 45444 - protein, 12 aa, synthetic construct
NGTSGAATNDNT

SEQ ID NO: 45445 - protein, 12 aa, synthetic construct
NGTSGASSNDNA

SEQ ID NO: 45446 - protein, 12 aa, synthetic construct
NGTSGASSNDNH

SEQ ID NO: 45447 - protein, 12 aa, synthetic construct
NGTSGASSNDNT

SEQ ID NO: 45448 - protein, 12 aa, synthetic construct
NGTSGASTNDNA

SEQ ID NO: 45449 - protein, 12 aa, synthetic construct
NGTSGASTNDNH

SEQ ID NO: 45450 - protein, 12 aa, synthetic construct
NGTSGASTNDNT

SEQ ID NO: 45451 - protein, 12 aa, synthetic construct
NGTSGGASNDNA

SEQ ID NO: 45452 - protein, 12 aa, synthetic construct
NGTSGGASNDNH

SEQ ID NO: 45453 - protein, 12 aa, synthetic construct
NGTSGGASNDNT

SEQ ID NO: 45454 - protein, 12 aa, synthetic construct
NGTSGGATNDNA

SEQ ID NO: 45455 - protein, 12 aa, synthetic construct
NGTSGGATNDNH

SEQ ID NO: 45456 - protein, 12 aa, synthetic construct
NGTSGGATNDNT

SEQ ID NO: 45457 - protein, 12 aa, synthetic construct
NGTSGGSSNDNA

SEQ ID NO: 45458 - protein, 12 aa, synthetic construct
NGTSGGSSNDNH

SEQ ID NO: 45459 - protein, 12 aa, synthetic construct
NGTSGGSSNDNT

SEQ ID NO: 45460 - protein, 12 aa, synthetic construct
NGTSGGSTNDNA

SEQ ID NO: 45461 - protein, 12 aa, synthetic construct
NGTSGGSTNDNH

SEQ ID NO: 45462 - protein, 12 aa, synthetic construct
NGTSGGSTNDNT

SEQ ID NO: 45463 - protein, 12 aa, synthetic construct
NGTTAAASNDNA

SEQ ID NO: 45464 - protein, 12 aa, synthetic construct
NGTTAAASNDNH

SEQ ID NO: 45465 - protein, 12 aa, synthetic construct
NGTTAAASNDNT

SEQ ID NO: 45466 - protein, 12 aa, synthetic construct
NGTTAAATNDNA

SEQ ID NO: 45467 - protein, 12 aa, synthetic construct
NGTTAAATNDNH

SEQ ID NO: 45468 - protein, 12 aa, synthetic construct
NGTTAAATNDNT

SEQ ID NO: 45469 - protein, 12 aa, synthetic construct
NGTTAASSNDNA

SEQ ID NO: 45470 - protein, 12 aa, synthetic construct
NGTTAASSNDNH

SEQ ID NO: 45471 - protein, 12 aa, synthetic construct
NGTTAASSNDNT

SEQ ID NO: 45472 - protein, 12 aa, synthetic construct
NGTTAASTNDNA

SEQ ID NO: 45473 - protein, 12 aa, synthetic construct
NGTTAASTNDNH

SEQ ID NO: 45474 - protein, 12 aa, synthetic construct
NGTTAASTNDNT

SEQ ID NO: 45475 - protein, 12 aa, synthetic construct
NGTTAGASNDNA

SEQ ID NO: 45476 - protein, 12 aa, synthetic construct
NGTTAGASNDNH

SEQ ID NO: 45477 - protein, 12 aa, synthetic construct
NGTTAGASNDNT

SEQ ID NO: 45478 - protein, 12 aa, synthetic construct
NGTTAGATNDNA

SEQ ID NO: 45479 - protein, 12 aa, synthetic construct
NGTTAGATNDNH

SEQ ID NO: 45480 - protein, 12 aa, synthetic construct
NGTTAGATNDNT

SEQ ID NO: 45481 - protein, 12 aa, synthetic construct
NGTTAGSSNDNA

SEQ ID NO: 45482 - protein, 12 aa, synthetic construct
NGTTAGSSNDNH

SEQ ID NO: 45483 - protein, 12 aa, synthetic construct
NGTTAGSSNDNT

SEQ ID NO: 45484 - protein, 12 aa, synthetic construct
NGTTAGSTNDNA

SEQ ID NO: 45485 - protein, 12 aa, synthetic construct
NGTTAGSTNDNH

SEQ ID NO: 45486 - protein, 12 aa, synthetic construct
NGTTAGSTNDNT

SEQ ID NO: 45487 - protein, 12 aa, synthetic construct
NGTTGAASNDNA

SEQ ID NO: 45488 - protein, 12 aa, synthetic construct
NGTTGAASNDNH

SEQ ID NO: 45489 - protein, 12 aa, synthetic construct
NGTTGAASNDNT

SEQ ID NO: 45490 - protein, 12 aa, synthetic construct
NGTTGAATNDNA

SEQ ID NO: 45491 - protein, 12 aa, synthetic construct
NGTTGAATNDNH

SEQ ID NO: 45492 - protein, 12 aa, synthetic construct
NGTTGAATNDNT

SEQ ID NO: 45493 - protein, 12 aa, synthetic construct
NGTTGASSNDNA

SEQ ID NO: 45494 - protein, 12 aa, synthetic construct
NGTTGASSNDNH

SEQ ID NO: 45495 - protein, 12 aa, synthetic construct
NGTTGASSNDNT

SEQ ID NO: 45496 - protein, 12 aa, synthetic construct
NGTTGASTNDNA

SEQ ID NO: 45497 - protein, 12 aa, synthetic construct
NGTTGASTNDNH

SEQ ID NO: 45498 - protein, 12 aa, synthetic construct
NGTTGASTNDNT

SEQ ID NO: 45499 - protein, 12 aa, synthetic construct
NGTTGGASNDNA

SEQ ID NO: 45500 - protein, 12 aa, synthetic construct
NGTTGGASNDNH

SEQ ID NO: 45501 - protein, 12 aa, synthetic construct
NGTTGGASNDNT

SEQ ID NO: 45502 - protein, 12 aa, synthetic construct
NGTTGGATNDNA

SEQ ID NO: 45503 - protein, 12 aa, synthetic construct
NGTTGGATNDNH

SEQ ID NO: 45504 - protein, 12 aa, synthetic construct
NGTTGGATNDNT

SEQ ID NO: 45505 - protein, 12 aa, synthetic construct
NGTTGGSSNDNA

SEQ ID NO: 45506 - protein, 12 aa, synthetic construct
NGTTGGSSNDNH

SEQ ID NO: 45507 - protein, 12 aa, synthetic construct
NGTTGGSSNDNT

SEQ ID NO: 45508 - protein, 12 aa, synthetic construct
NGTTGGSTNDNA

SEQ ID NO: 45509 - protein, 12 aa, synthetic construct
NGTTGGSTNDNH

SEQ ID NO: 45510 - protein, 12 aa, synthetic construct
NGTTGGSTNDNT

SEQ ID NO: 45511 - protein, 12 aa, synthetic construct
NSAAAAASNDNA

SEQ ID NO: 45512 - protein, 12 aa, synthetic construct
NSAAAAASNDNH

SEQ ID NO: 45513 - protein, 12 aa, synthetic construct
NSAAAAASNDNT

SEQ ID NO: 45514 - protein, 12 aa, synthetic construct
NSAAAAATNDNA

SEQ ID NO: 45515 - protein, 12 aa, synthetic construct
NSAAAAATNDNH

SEQ ID NO: 45516 - protein, 12 aa, synthetic construct
NSAAAAATNDNT

SEQ ID NO: 45517 - protein, 12 aa, synthetic construct
NSAAAASSNDNA

SEQ ID NO: 45518 - protein, 12 aa, synthetic construct
NSAAAASSNDNH

SEQ ID NO: 45519 - protein, 12 aa, synthetic construct
NSAAAASSNDNT

SEQ ID NO: 45520 - protein, 12 aa, synthetic construct
NSAAAASTNDNA

SEQ ID NO: 45521 - protein, 12 aa, synthetic construct
NSAAAASTNDNH

SEQ ID NO: 45522 - protein, 12 aa, synthetic construct
NSAAAASTNDNT

SEQ ID NO: 45523 - protein, 12 aa, synthetic construct
NSAAAGASNDNA

SEQ ID NO: 45524 - protein, 12 aa, synthetic construct
NSAAAGASNDNH

SEQ ID NO: 45525 - protein, 12 aa, synthetic construct
NSAAAGASNDNT

SEQ ID NO: 45526 - protein, 12 aa, synthetic construct
NSAAAGATNDNA

SEQ ID NO: 45527 - protein, 12 aa, synthetic construct
NSAAAGATNDNH

SEQ ID NO: 45528 - protein, 12 aa, synthetic construct
NSAAAGATNDNT

SEQ ID NO: 45529 - protein, 12 aa, synthetic construct
NSAAAGSSNDNA

SEQ ID NO: 45530 - protein, 12 aa, synthetic construct
NSAAAGSSNDNH

SEQ ID NO: 45531 - protein, 12 aa, synthetic construct
NSAAAGSSNDNT

SEQ ID NO: 45532 - protein, 12 aa, synthetic construct
NSAAAGSTNDNA

SEQ ID NO: 45533 - protein, 12 aa, synthetic construct
NSAAAGSTNDNH

SEQ ID NO: 45534 - protein, 12 aa, synthetic construct
NSAAAGSTNDNT

SEQ ID NO: 45535 - protein, 12 aa, synthetic construct
NSAAGAASNDNA

SEQ ID NO: 45536 - protein, 12 aa, synthetic construct
NSAAGAASNDNH

SEQ ID NO: 45537 - protein, 12 aa, synthetic construct
NSAAGAASNDNT

SEQ ID NO: 45538 - protein, 12 aa, synthetic construct
NSAAGAATNDNA

SEQ ID NO: 45539 - protein, 12 aa, synthetic construct
NSAAGAATNDNH

SEQ ID NO: 45540 - protein, 12 aa, synthetic construct
NSAAGAATNDNT

SEQ ID NO: 45541 - protein, 12 aa, synthetic construct
NSAAGASSNDNA

SEQ ID NO: 45542 - protein, 12 aa, synthetic construct
NSAAGASSNDNH

SEQ ID NO: 45543 - protein, 12 aa, synthetic construct
NSAAGASSNDNT

SEQ ID NO: 45544 - protein, 12 aa, synthetic construct
NSAAGASTNDNA

SEQ ID NO: 45545 - protein, 12 aa, synthetic construct
NSAAGASTNDNH

SEQ ID NO: 45546 - protein, 12 aa, synthetic construct
NSAAGASTNDNT

SEQ ID NO: 45547 - protein, 12 aa, synthetic construct
NSAAGGASNDNA

SEQ ID NO: 45548 - protein, 12 aa, synthetic construct
NSAAGGASNDNH

SEQ ID NO: 45549 - protein, 12 aa, synthetic construct
NSAAGGASNDNT

SEQ ID NO: 45550 - protein, 12 aa, synthetic construct
NSAAGGATNDNA

SEQ ID NO: 45551 - protein, 12 aa, synthetic construct
NSAAGGATNDNH

SEQ ID NO: 45552 - protein, 12 aa, synthetic construct
NSAAGGATNDNT

SEQ ID NO: 45553 - protein, 12 aa, synthetic construct
NSAAGGSSNDNA

SEQ ID NO: 45554 - protein, 12 aa, synthetic construct
NSAAGGSSNDNH

SEQ ID NO: 45555 - protein, 12 aa, synthetic construct
NSAAGGSSNDNT

SEQ ID NO: 45556 - protein, 12 aa, synthetic construct
NSAAGGSTNDNA

SEQ ID NO: 45557 - protein, 12 aa, synthetic construct
NSAAGGSTNDNH

SEQ ID NO: 45558 - protein, 12 aa, synthetic construct
NSAAGGSTNDNT

SEQ ID NO: 45559 - protein, 12 aa, synthetic construct
NSASAAASNDNA

SEQ ID NO: 45560 - protein, 12 aa, synthetic construct
NSASAAASNDNH

SEQ ID NO: 45561 - protein, 12 aa, synthetic construct
NSASAAASNDNT

SEQ ID NO: 45562 - protein, 12 aa, synthetic construct
NSASAAATNDNA

SEQ ID NO: 45563 - protein, 12 aa, synthetic construct
NSASAAATNDNH

SEQ ID NO: 45564 - protein, 12 aa, synthetic construct
NSASAAATNDNT

SEQ ID NO: 45565 - protein, 12 aa, synthetic construct
NSASAASSNDNA

SEQ ID NO: 45566 - protein, 12 aa, synthetic construct
NSASAASSNDNH

SEQ ID NO: 45567 - protein, 12 aa, synthetic construct
NSASAASSNDNT

SEQ ID NO: 45568 - protein, 12 aa, synthetic construct
NSASAASTNDNA

SEQ ID NO: 45569 - protein, 12 aa, synthetic construct
NSASAASTNDNH

SEQ ID NO: 45570 - protein, 12 aa, synthetic construct
NSASAASTNDNT

SEQ ID NO: 45571 - protein, 12 aa, synthetic construct
NSASAGASNDNA

SEQ ID NO: 45572 - protein, 12 aa, synthetic construct
NSASAGASNDNH

SEQ ID NO: 45573 - protein, 12 aa, synthetic construct
NSASAGASNDNT

SEQ ID NO: 45574 - protein, 12 aa, synthetic construct
NSASAGATNDNA

SEQ ID NO: 45575 - protein, 12 aa, synthetic construct
NSASAGATNDNH

SEQ ID NO: 45576 - protein, 12 aa, synthetic construct
NSASAGATNDNT

SEQ ID NO: 45577 - protein, 12 aa, synthetic construct
NSASAGSSNDNA

SEQ ID NO: 45578 - protein, 12 aa, synthetic construct
NSASAGSSNDNH

SEQ ID NO: 45579 - protein, 12 aa, synthetic construct
NSASAGSSNDNT

SEQ ID NO: 45580 - protein, 12 aa, synthetic construct
NSASAGSTNDNA

SEQ ID NO: 45581 - protein, 12 aa, synthetic construct
NSASAGSTNDNH

SEQ ID NO: 45582 - protein, 12 aa, synthetic construct
NSASAGSTNDNT

SEQ ID NO: 45583 - protein, 12 aa, synthetic construct
NSASGAASNDNA

SEQ ID NO: 45584 - protein, 12 aa, synthetic construct
NSASGAASNDNH

SEQ ID NO: 45585 - protein, 12 aa, synthetic construct
NSASGAASNDNT

SEQ ID NO: 45586 - protein, 12 aa, synthetic construct
NSASGAATNDNA

SEQ ID NO: 45587 - protein, 12 aa, synthetic construct
NSASGAATNDNH

SEQ ID NO: 45588 - protein, 12 aa, synthetic construct
NSASGAATNDNT

SEQ ID NO: 45589 - protein, 12 aa, synthetic construct
NSASGASSNDNA

SEQ ID NO: 45590 - protein, 12 aa, synthetic construct
NSASGASSNDNH

SEQ ID NO: 45591 - protein, 12 aa, synthetic construct
NSASGASSNDNT

SEQ ID NO: 45592 - protein, 12 aa, synthetic construct
NSASGASTNDNA

SEQ ID NO: 45593 - protein, 12 aa, synthetic construct
NSASGASTNDNH

SEQ ID NO: 45594 - protein, 12 aa, synthetic construct
NSASGASTNDNT

SEQ ID NO: 45595 - protein, 12 aa, synthetic construct
NSASGGASNDNA

SEQ ID NO: 45596 - protein, 12 aa, synthetic construct
NSASGGASNDNH

SEQ ID NO: 45597 - protein, 12 aa, synthetic construct
NSASGGASNDNT

SEQ ID NO: 45598 - protein, 12 aa, synthetic construct
NSASGGATNDNA

SEQ ID NO: 45599 - protein, 12 aa, synthetic construct
NSASGGATNDNH

SEQ ID NO: 45600 - protein, 12 aa, synthetic construct
NSASGGATNDNT

SEQ ID NO: 45601 - protein, 12 aa, synthetic construct
NSASGGSSNDNA

SEQ ID NO: 45602 - protein, 12 aa, synthetic construct
NSASGGSSNDNH

SEQ ID NO: 45603 - protein, 12 aa, synthetic construct
NSASGGSSNDNT

SEQ ID NO: 45604 - protein, 12 aa, synthetic construct
NSASGGSTNDNA

SEQ ID NO: 45605 - protein, 12 aa, synthetic construct
NSASGGSTNDNH

SEQ ID NO: 45606 - protein, 12 aa, synthetic construct
NSASGGSTNDNT

SEQ ID NO: 45607 - protein, 12 aa, synthetic construct
NSATAAASNDNA

SEQ ID NO: 45608 - protein, 12 aa, synthetic construct
NSATAAASNDNH

SEQ ID NO: 45609 - protein, 12 aa, synthetic construct
NSATAAASNDNT

SEQ ID NO: 45610 - protein, 12 aa, synthetic construct
NSATAAATNDNA

SEQ ID NO: 45611 - protein, 12 aa, synthetic construct
NSATAAATNDNH

SEQ ID NO: 45612 - protein, 12 aa, synthetic construct
NSATAAATNDNT

SEQ ID NO: 45613 - protein, 12 aa, synthetic construct
NSATAASSNDNA

SEQ ID NO: 45614 - protein, 12 aa, synthetic construct
NSATAASSNDNH

SEQ ID NO: 45615 - protein, 12 aa, synthetic construct
NSATAASSNDNT

SEQ ID NO: 45616 - protein, 12 aa, synthetic construct
NSATAASTNDNA

SEQ ID NO: 45617 - protein, 12 aa, synthetic construct
NSATAASTNDNH

SEQ ID NO: 45618 - protein, 12 aa, synthetic construct
NSATAASTNDNT

SEQ ID NO: 45619 - protein, 12 aa, synthetic construct
NSATAGASNDNA

SEQ ID NO: 45620 - protein, 12 aa, synthetic construct
NSATAGASNDNH

SEQ ID NO: 45621 - protein, 12 aa, synthetic construct
NSATAGASNDNT

SEQ ID NO: 45622 - protein, 12 aa, synthetic construct
NSATAGATNDNA

SEQ ID NO: 45623 - protein, 12 aa, synthetic construct
NSATAGATNDNH

SEQ ID NO: 45624 - protein, 12 aa, synthetic construct
NSATAGATNDNT

SEQ ID NO: 45625 - protein, 12 aa, synthetic construct
NSATAGSSNDNA

SEQ ID NO: 45626 - protein, 12 aa, synthetic construct
NSATAGSSNDNH

SEQ ID NO: 45627 - protein, 12 aa, synthetic construct
NSATAGSSNDNT

SEQ ID NO: 45628 - protein, 12 aa, synthetic construct
NSATAGSTNDNA

SEQ ID NO: 45629 - protein, 12 aa, synthetic construct
NSATAGSTNDNH

SEQ ID NO: 45630 - protein, 12 aa, synthetic construct
NSATAGSTNDNT

SEQ ID NO: 45631 - protein, 12 aa, synthetic construct
NSATGAASNDNA

SEQ ID NO: 45632 - protein, 12 aa, synthetic construct
NSATGAASNDNH

SEQ ID NO: 45633 - protein, 12 aa, synthetic construct
NSATGAASNDNT

SEQ ID NO: 45634 - protein, 12 aa, synthetic construct
NSATGAATNDNA

SEQ ID NO: 45635 - protein, 12 aa, synthetic construct
NSATGAATNDNH

SEQ ID NO: 45636 - protein, 12 aa, synthetic construct
NSATGAATNDNT

SEQ ID NO: 45637 - protein, 12 aa, synthetic construct
NSATGASSNDNA

SEQ ID NO: 45638 - protein, 12 aa, synthetic construct
NSATGASSNDNH

SEQ ID NO: 45639 - protein, 12 aa, synthetic construct
NSATGASSNDNT

SEQ ID NO: 45640 - protein, 12 aa, synthetic construct
NSATGASTNDNA

SEQ ID NO: 45641 - protein, 12 aa, synthetic construct
NSATGASTNDNH

SEQ ID NO: 45642 - protein, 12 aa, synthetic construct
NSATGASTNDNT

SEQ ID NO: 45643 - protein, 12 aa, synthetic construct
NSATGGASNDNA

SEQ ID NO: 45644 - protein, 12 aa, synthetic construct
NSATGGASNDNH

SEQ ID NO: 45645 - protein, 12 aa, synthetic construct
NSATGGASNDNT

SEQ ID NO: 45646 - protein, 12 aa, synthetic construct
NSATGGATNDNA

SEQ ID NO: 45647 - protein, 12 aa, synthetic construct
NSATGGATNDNH

SEQ ID NO: 45648 - protein, 12 aa, synthetic construct
NSATGGATNDNT

SEQ ID NO: 45649 - protein, 12 aa, synthetic construct
NSATGGSSNDNA

SEQ ID NO: 45650 - protein, 12 aa, synthetic construct
NSATGGSSNDNH

SEQ ID NO: 45651 - protein, 12 aa, synthetic construct
NSATGGSSNDNT

SEQ ID NO: 45652 - protein, 12 aa, synthetic construct
NSATGGSTNDNA

SEQ ID NO: 45653 - protein, 12 aa, synthetic construct
NSATGGSTNDNH

SEQ ID NO: 45654 - protein, 12 aa, synthetic construct
NSATGGSTNDNT

SEQ ID NO: 45655 - protein, 12 aa, synthetic construct
NSEAAAASNDNA

SEQ ID NO: 45656 - protein, 12 aa, synthetic construct
NSEAAAASNDNH

SEQ ID NO: 45657 - protein, 12 aa, synthetic construct
NSEAAAASNDNT

SEQ ID NO: 45658 - protein, 12 aa, synthetic construct
NSEAAAATNDNA

SEQ ID NO: 45659 - protein, 12 aa, synthetic construct
NSEAAAATNDNH

SEQ ID NO: 45660 - protein, 12 aa, synthetic construct
NSEAAAATNDNT

SEQ ID NO: 45661 - protein, 12 aa, synthetic construct
NSEAAASSNDNA

SEQ ID NO: 45662 - protein, 12 aa, synthetic construct
NSEAAASSNDNH

SEQ ID NO: 45663 - protein, 12 aa, synthetic construct
NSEAAASSNDNT

SEQ ID NO: 45664 - protein, 12 aa, synthetic construct
NSEAAASTNDNA

SEQ ID NO: 45665 - protein, 12 aa, synthetic construct
NSEAAASTNDNH

SEQ ID NO: 45666 - protein, 12 aa, synthetic construct
NSEAAASTNDNT

SEQ ID NO: 45667 - protein, 12 aa, synthetic construct
NSEAAGASNDNA

SEQ ID NO: 45668 - protein, 12 aa, synthetic construct
NSEAAGASNDNH

SEQ ID NO: 45669 - protein, 12 aa, synthetic construct
NSEAAGASNDNT

SEQ ID NO: 45670 - protein, 12 aa, synthetic construct
NSEAAGATNDNA

SEQ ID NO: 45671 - protein, 12 aa, synthetic construct
NSEAAGATNDNH

SEQ ID NO: 45672 - protein, 12 aa, synthetic construct
NSEAAGATNDNT

SEQ ID NO: 45673 - protein, 12 aa, synthetic construct
NSEAAGSSNDNA

SEQ ID NO: 45674 - protein, 12 aa, synthetic construct
NSEAAGSSNDNH

SEQ ID NO: 45675 - protein, 12 aa, synthetic construct
NSEAAGSSNDNT

SEQ ID NO: 45676 - protein, 12 aa, synthetic construct
NSEAAGSTNDNA

SEQ ID NO: 45677 - protein, 12 aa, synthetic construct
NSEAAGSTNDNH

SEQ ID NO: 45678 - protein, 12 aa, synthetic construct
NSEAAGSTNDNT

SEQ ID NO: 45679 - protein, 12 aa, synthetic construct
NSEAGAASNDNA

SEQ ID NO: 45680 - protein, 12 aa, synthetic construct
NSEAGAASNDNH

SEQ ID NO: 45681 - protein, 12 aa, synthetic construct
NSEAGAASNDNT

SEQ ID NO: 45682 - protein, 12 aa, synthetic construct
NSEAGAATNDNA

SEQ ID NO: 45683 - protein, 12 aa, synthetic construct
NSEAGAATNDNH

SEQ ID NO: 45684 - protein, 12 aa, synthetic construct
NSEAGAATNDNT

SEQ ID NO: 45685 - protein, 12 aa, synthetic construct
NSEAGASSNDNA

SEQ ID NO: 45686 - protein, 12 aa, synthetic construct
NSEAGASSNDNH

SEQ ID NO: 45687 - protein, 12 aa, synthetic construct
NSEAGASSNDNT

SEQ ID NO: 45688 - protein, 12 aa, synthetic construct
NSEAGASTNDNA

SEQ ID NO: 45689 - protein, 12 aa, synthetic construct
NSEAGASTNDNH

SEQ ID NO: 45690 - protein, 12 aa, synthetic construct
NSEAGASTNDNT

SEQ ID NO: 45691 - protein, 12 aa, synthetic construct
NSEAGGASNDNA

SEQ ID NO: 45692 - protein, 12 aa, synthetic construct
NSEAGGASNDNH

SEQ ID NO: 45693 - protein, 12 aa, synthetic construct
NSEAGGASNDNT

SEQ ID NO: 45694 - protein, 12 aa, synthetic construct
NSEAGGATNDNA

SEQ ID NO: 45695 - protein, 12 aa, synthetic construct
NSEAGGATNDNH

SEQ ID NO: 45696 - protein, 12 aa, synthetic construct
NSEAGGATNDNT

SEQ ID NO: 45697 - protein, 12 aa, synthetic construct
NSEAGGSSNDNA

SEQ ID NO: 45698 - protein, 12 aa, synthetic construct
NSEAGGSSNDNH

SEQ ID NO: 45699 - protein, 12 aa, synthetic construct
NSEAGGSSNDNT

SEQ ID NO: 45700 - protein, 12 aa, synthetic construct
NSEAGGSTNDNA

SEQ ID NO: 45701 - protein, 12 aa, synthetic construct
NSEAGGSTNDNH

SEQ ID NO: 45702 - protein, 12 aa, synthetic construct
NSEAGGSTNDNT

SEQ ID NO: 45703 - protein, 12 aa, synthetic construct
NSESAAASNDNA

SEQ ID NO: 45704 - protein, 12 aa, synthetic construct
NSESAAASNDNH

SEQ ID NO: 45705 - protein, 12 aa, synthetic construct
NSESAAASNDNT

SEQ ID NO: 45706 - protein, 12 aa, synthetic construct
NSESAAATNDNA

SEQ ID NO: 45707 - protein, 12 aa, synthetic construct
NSESAAATNDNH

SEQ ID NO: 45708 - protein, 12 aa, synthetic construct
NSESAAATNDNT

SEQ ID NO: 45709 - protein, 12 aa, synthetic construct
NSESAASSNDNA

SEQ ID NO: 45710 - protein, 12 aa, synthetic construct
NSESAASSNDNH

SEQ ID NO: 45711 - protein, 12 aa, synthetic construct
NSESAASSNDNT

SEQ ID NO: 45712 - protein, 12 aa, synthetic construct
NSESAASTNDNA

SEQ ID NO: 45713 - protein, 12 aa, synthetic construct
NSESAASTNDNH

SEQ ID NO: 45714 - protein, 12 aa, synthetic construct
NSESAASTNDNT

SEQ ID NO: 45715 - protein, 12 aa, synthetic construct
NSESAGASNDNA

SEQ ID NO: 45716 - protein, 12 aa, synthetic construct
NSESAGASNDNH

SEQ ID NO: 45717 - protein, 12 aa, synthetic construct
NSESAGASNDNT

SEQ ID NO: 45718 - protein, 12 aa, synthetic construct
NSESAGATNDNA

SEQ ID NO: 45719 - protein, 12 aa, synthetic construct
NSESAGATNDNH

SEQ ID NO: 45720 - protein, 12 aa, synthetic construct
NSESAGATNDNT

SEQ ID NO: 45721 - protein, 12 aa, synthetic construct
NSESAGSSNDNA

SEQ ID NO: 45722 - protein, 12 aa, synthetic construct
NSESAGSSNDNH

SEQ ID NO: 45723 - protein, 12 aa, synthetic construct
NSESAGSSNDNT

SEQ ID NO: 45724 - protein, 12 aa, synthetic construct
NSESAGSTNDNA

SEQ ID NO: 45725 - protein, 12 aa, synthetic construct
NSESAGSTNDNH

SEQ ID NO: 45726 - protein, 12 aa, synthetic construct
NSESAGSTNDNT

SEQ ID NO: 45727 - protein, 12 aa, synthetic construct
NSESGAASNDNA

SEQ ID NO: 45728 - protein, 12 aa, synthetic construct
NSESGAASNDNH

SEQ ID NO: 45729 - protein, 12 aa, synthetic construct
NSESGAASNDNT

SEQ ID NO: 45730 - protein, 12 aa, synthetic construct
NSESGAATNDNA

SEQ ID NO: 45731 - protein, 12 aa, synthetic construct
NSESGAATNDNH

SEQ ID NO: 45732 - protein, 12 aa, synthetic construct
NSESGAATNDNT

SEQ ID NO: 45733 - protein, 12 aa, synthetic construct
NSESGASSNDNA

SEQ ID NO: 45734 - protein, 12 aa, synthetic construct
NSESGASSNDNH

SEQ ID NO: 45735 - protein, 12 aa, synthetic construct
NSESGASSNDNT

SEQ ID NO: 45736 - protein, 12 aa, synthetic construct
NSESGASTNDNA

SEQ ID NO: 45737 - protein, 12 aa, synthetic construct
NSESGASTNDNH

SEQ ID NO: 45738 - protein, 12 aa, synthetic construct
NSESGASTNDNT

SEQ ID NO: 45739 - protein, 12 aa, synthetic construct
NSESGGASNDNA

SEQ ID NO: 45740 - protein, 12 aa, synthetic construct
NSESGGASNDNH

SEQ ID NO: 45741 - protein, 12 aa, synthetic construct
NSESGGASNDNT

SEQ ID NO: 45742 - protein, 12 aa, synthetic construct
NSESGGATNDNA

SEQ ID NO: 45743 - protein, 12 aa, synthetic construct
NSESGGATNDNH

SEQ ID NO: 45744 - protein, 12 aa, synthetic construct
NSESGGATNDNT

SEQ ID NO: 45745 - protein, 12 aa, synthetic construct
NSESGGSSNDNA

SEQ ID NO: 45746 - protein, 12 aa, synthetic construct
NSESGGSSNDNH

SEQ ID NO: 45747 - protein, 12 aa, synthetic construct
NSESGGSSNDNT

SEQ ID NO: 45748 - protein, 12 aa, synthetic construct
NSESGGSTNDNA

SEQ ID NO: 45749 - protein, 12 aa, synthetic construct
NSESGGSTNDNH

SEQ ID NO: 45750 - protein, 12 aa, synthetic construct
NSESGGSTNDNT

SEQ ID NO: 45751 - protein, 12 aa, synthetic construct
NSETAAASNDNA

SEQ ID NO: 45752 - protein, 12 aa, synthetic construct
NSETAAASNDNH

SEQ ID NO: 45753 - protein, 12 aa, synthetic construct
NSETAAASNDNT

SEQ ID NO: 45754 - protein, 12 aa, synthetic construct
NSETAAATNDNA

SEQ ID NO: 45755 - protein, 12 aa, synthetic construct
NSETAAATNDNH

SEQ ID NO: 45756 - protein, 12 aa, synthetic construct
NSETAAATNDNT

SEQ ID NO: 45757 - protein, 12 aa, synthetic construct
NSETAASSNDNA

SEQ ID NO: 45758 - protein, 12 aa, synthetic construct
NSETAASSNDNH

SEQ ID NO: 45759 - protein, 12 aa, synthetic construct
NSETAASSNDNT

SEQ ID NO: 45760 - protein, 12 aa, synthetic construct
NSETAASTNDNA

SEQ ID NO: 45761 - protein, 12 aa, synthetic construct
NSETAASTNDNH

SEQ ID NO: 45762 - protein, 12 aa, synthetic construct
NSETAASTNDNT

SEQ ID NO: 45763 - protein, 12 aa, synthetic construct
NSETAGASNDNA

SEQ ID NO: 45764 - protein, 12 aa, synthetic construct
NSETAGASNDNH

SEQ ID NO: 45765 - protein, 12 aa, synthetic construct
NSETAGASNDNT

SEQ ID NO: 45766 - protein, 12 aa, synthetic construct
NSETAGATNDNA

SEQ ID NO: 45767 - protein, 12 aa, synthetic construct
NSETAGATNDNH

SEQ ID NO: 45768 - protein, 12 aa, synthetic construct
NSETAGATNDNT

SEQ ID NO: 45769 - protein, 12 aa, synthetic construct
NSETAGSSNDNA

SEQ ID NO: 45770 - protein, 12 aa, synthetic construct
NSETAGSSNDNH

SEQ ID NO: 45771 - protein, 12 aa, synthetic construct
NSETAGSSNDNT

SEQ ID NO: 45772 - protein, 12 aa, synthetic construct
NSETAGSTNDNA

SEQ ID NO: 45773 - protein, 12 aa, synthetic construct
NSETAGSTNDNH

SEQ ID NO: 45774 - protein, 12 aa, synthetic construct
NSETAGSTNDNT

SEQ ID NO: 45775 - protein, 12 aa, synthetic construct
NSETGAASNDNA

SEQ ID NO: 45776 - protein, 12 aa, synthetic construct
NSETGAASNDNH

SEQ ID NO: 45777 - protein, 12 aa, synthetic construct
NSETGAASNDNT

SEQ ID NO: 45778 - protein, 12 aa, synthetic construct
NSETGAATNDNA

SEQ ID NO: 45779 - protein, 12 aa, synthetic construct
NSETGAATNDNH

SEQ ID NO: 45780 - protein, 12 aa, synthetic construct
NSETGAATNDNT

SEQ ID NO: 45781 - protein, 12 aa, synthetic construct
NSETGASSNDNA

SEQ ID NO: 45782 - protein, 12 aa, synthetic construct
NSETGASSNDNH

SEQ ID NO: 45783 - protein, 12 aa, synthetic construct
NSETGASSNDNT

SEQ ID NO: 45784 - protein, 12 aa, synthetic construct
NSETGASTNDNA

SEQ ID NO: 45785 - protein, 12 aa, synthetic construct
NSETGASTNDNH

SEQ ID NO: 45786 - protein, 12 aa, synthetic construct
NSETGASTNDNT

SEQ ID NO: 45787 - protein, 12 aa, synthetic construct
NSETGGASNDNA

SEQ ID NO: 45788 - protein, 12 aa, synthetic construct
NSETGGASNDNH

SEQ ID NO: 45789 - protein, 12 aa, synthetic construct
NSETGGASNDNT

SEQ ID NO: 45790 - protein, 12 aa, synthetic construct
NSETGGATNDNA

SEQ ID NO: 45791 - protein, 12 aa, synthetic construct
NSETGGATNDNH

SEQ ID NO: 45792 - protein, 12 aa, synthetic construct
NSETGGATNDNT

SEQ ID NO: 45793 - protein, 12 aa, synthetic construct
NSETGGSSNDNA

SEQ ID NO: 45794 - protein, 12 aa, synthetic construct
NSETGGSSNDNH

SEQ ID NO: 45795 - protein, 12 aa, synthetic construct
NSETGGSSNDNT

SEQ ID NO: 45796 - protein, 12 aa, synthetic construct
NSETGGSTNDNA

SEQ ID NO: 45797 - protein, 12 aa, synthetic construct
NSETGGSTNDNH

SEQ ID NO: 45798 - protein, 12 aa, synthetic construct
NSETGGSTNDNT

SEQ ID NO: 45799 - protein, 12 aa, synthetic construct
NSQAAAASNDNA

SEQ ID NO: 45800 - protein, 12 aa, synthetic construct
NSQAAAASNDNH

SEQ ID NO: 45801 - protein, 12 aa, synthetic construct
NSQAAAASNDNT

SEQ ID NO: 45802 - protein, 12 aa, synthetic construct
NSQAAAATNDNA

SEQ ID NO: 45803 - protein, 12 aa, synthetic construct
NSQAAAATNDNH

SEQ ID NO: 45804 - protein, 12 aa, synthetic construct
NSQAAAATNDNT

SEQ ID NO: 45805 - protein, 12 aa, synthetic construct
NSQAAASSNDNA

SEQ ID NO: 45806 - protein, 12 aa, synthetic construct
NSQAAASSNDNH

SEQ ID NO: 45807 - protein, 12 aa, synthetic construct
NSQAAASSNDNT

SEQ ID NO: 45808 - protein, 12 aa, synthetic construct
NSQAAASTNDNA

SEQ ID NO: 45809 - protein, 12 aa, synthetic construct
NSQAAASTNDNH

SEQ ID NO: 45810 - protein, 12 aa, synthetic construct
NSQAAASTNDNT

SEQ ID NO: 45811 - protein, 12 aa, synthetic construct
NSQAAGASNDNA

SEQ ID NO: 45812 - protein, 12 aa, synthetic construct
NSQAAGASNDNH

SEQ ID NO: 45813 - protein, 12 aa, synthetic construct
NSQAAGASNDNT

SEQ ID NO: 45814 - protein, 12 aa, synthetic construct
NSQAAGATNDNA

SEQ ID NO: 45815 - protein, 12 aa, synthetic construct
NSQAAGATNDNH

SEQ ID NO: 45816 - protein, 12 aa, synthetic construct
NSQAAGATNDNT

SEQ ID NO: 45817 - protein, 12 aa, synthetic construct
NSQAAGSSNDNA

SEQ ID NO: 45818 - protein, 12 aa, synthetic construct
NSQAAGSSNDNH

SEQ ID NO: 45819 - protein, 12 aa, synthetic construct
NSQAAGSSNDNT

SEQ ID NO: 45820 - protein, 12 aa, synthetic construct
NSQAAGSTNDNA

SEQ ID NO: 45821 - protein, 12 aa, synthetic construct
NSQAAGSTNDNH

SEQ ID NO: 45822 - protein, 12 aa, synthetic construct
NSQAAGSTNDNT

SEQ ID NO: 45823 - protein, 12 aa, synthetic construct
NSQAGAASNDNA

SEQ ID NO: 45824 - protein, 12 aa, synthetic construct
NSQAGAASNDNH

SEQ ID NO: 45825 - protein, 12 aa, synthetic construct
NSQAGAASNDNT

SEQ ID NO: 45826 - protein, 12 aa, synthetic construct
NSQAGAATNDNA

SEQ ID NO: 45827 - protein, 12 aa, synthetic construct
NSQAGAATNDNH

SEQ ID NO: 45828 - protein, 12 aa, synthetic construct
NSQAGAATNDNT

SEQ ID NO: 45829 - protein, 12 aa, synthetic construct
NSQAGASSNDNA

SEQ ID NO: 45830 - protein, 12 aa, synthetic construct
NSQAGASSNDNH

SEQ ID NO: 45831 - protein, 12 aa, synthetic construct
NSQAGASSNDNT

SEQ ID NO: 45832 - protein, 12 aa, synthetic construct
NSQAGASTNDNA

SEQ ID NO: 45833 - protein, 12 aa, synthetic construct
NSQAGASTNDNH

SEQ ID NO: 45834 - protein, 12 aa, synthetic construct
NSQAGASTNDNT

SEQ ID NO: 45835 - protein, 12 aa, synthetic construct
NSQAGGASNDNA

SEQ ID NO: 45836 - protein, 12 aa, synthetic construct
NSQAGGASNDNH

SEQ ID NO: 45837 - protein, 12 aa, synthetic construct
NSQAGGASNDNT

SEQ ID NO: 45838 - protein, 12 aa, synthetic construct
NSQAGGATNDNA

SEQ ID NO: 45839 - protein, 12 aa, synthetic construct
NSQAGGATNDNH

SEQ ID NO: 45840 - protein, 12 aa, synthetic construct
NSQAGGATNDNT

SEQ ID NO: 45841 - protein, 12 aa, synthetic construct
NSQAGGSSNDNA

SEQ ID NO: 45842 - protein, 12 aa, synthetic construct
NSQAGGSSNDNH

SEQ ID NO: 45843 - protein, 12 aa, synthetic construct
NSQAGGSSNDNT

SEQ ID NO: 45844 - protein, 12 aa, synthetic construct
NSQAGGSTNDNA

SEQ ID NO: 45845 - protein, 12 aa, synthetic construct
NSQAGGSTNDNH

SEQ ID NO: 45846 - protein, 12 aa, synthetic construct
NSQAGGSTNDNT

SEQ ID NO: 45847 - protein, 12 aa, synthetic construct
NSQSAAASNDNA

SEQ ID NO: 45848 - protein, 12 aa, synthetic construct
NSQSAAASNDNH

SEQ ID NO: 45849 - protein, 12 aa, synthetic construct
NSQSAAASNDNT

SEQ ID NO: 45850 - protein, 12 aa, synthetic construct
NSQSAAATNDNA

SEQ ID NO: 45851 - protein, 12 aa, synthetic construct
NSQSAAATNDNH

SEQ ID NO: 45852 - protein, 12 aa, synthetic construct
NSQSAAATNDNT

SEQ ID NO: 45853 - protein, 12 aa, synthetic construct
NSQSAASSNDNA

SEQ ID NO: 45854 - protein, 12 aa, synthetic construct
NSQSAASSNDNH

SEQ ID NO: 45855 - protein, 12 aa, synthetic construct
NSQSAASSNDNT

SEQ ID NO: 45856 - protein, 12 aa, synthetic construct
NSQSAASTNDNA

SEQ ID NO: 45857 - protein, 12 aa, synthetic construct
NSQSAASTNDNH

SEQ ID NO: 45858 - protein, 12 aa, synthetic construct
NSQSAASTNDNT

SEQ ID NO: 45859 - protein, 12 aa, synthetic construct
NSQSAGASNDNA

SEQ ID NO: 45860 - protein, 12 aa, synthetic construct
NSQSAGASNDNH

SEQ ID NO: 45861 - protein, 12 aa, synthetic construct
NSQSAGASNDNT

SEQ ID NO: 45862 - protein, 12 aa, synthetic construct
NSQSAGATNDNA

SEQ ID NO: 45863 - protein, 12 aa, synthetic construct
NSQSAGATNDNH

SEQ ID NO: 45864 - protein, 12 aa, synthetic construct
NSQSAGATNDNT

SEQ ID NO: 45865 - protein, 12 aa, synthetic construct
NSQSAGSSNDNA

SEQ ID NO: 45866 - protein, 12 aa, synthetic construct
NSQSAGSSNDNH

SEQ ID NO: 45867 - protein, 12 aa, synthetic construct
NSQSAGSSNDNT

SEQ ID NO: 45868 - protein, 12 aa, synthetic construct
NSQSAGSTNDNA

SEQ ID NO: 45869 - protein, 12 aa, synthetic construct
NSQSAGSTNDNH

SEQ ID NO: 45870 - protein, 12 aa, synthetic construct
NSQSAGSTNDNT

SEQ ID NO: 45871 - protein, 12 aa, synthetic construct
NSQSGAASNDNA

SEQ ID NO: 45872 - protein, 12 aa, synthetic construct
NSQSGAASNDNH

SEQ ID NO: 45873 - protein, 12 aa, synthetic construct
NSQSGAASNDNT

SEQ ID NO: 45874 - protein, 12 aa, synthetic construct
NSQSGAATNDNA

SEQ ID NO: 45875 - protein, 12 aa, synthetic construct
NSQSGAATNDNH

SEQ ID NO: 45876 - protein, 12 aa, synthetic construct
NSQSGAATNDNT

SEQ ID NO: 45877 - protein, 12 aa, synthetic construct
NSQSGASSNDNA

SEQ ID NO: 45878 - protein, 12 aa, synthetic construct
NSQSGASSNDNH

SEQ ID NO: 45879 - protein, 12 aa, synthetic construct
NSQSGASSNDNT

SEQ ID NO: 45880 - protein, 12 aa, synthetic construct
NSQSGASTNDNA

SEQ ID NO: 45881 - protein, 12 aa, synthetic construct
NSQSGASTNDNH

SEQ ID NO: 45882 - protein, 12 aa, synthetic construct
NSQSGASTNDNT

SEQ ID NO: 45883 - protein, 12 aa, synthetic construct
NSQSGGASNDNA

SEQ ID NO: 45884 - protein, 12 aa, synthetic construct
NSQSGGASNDNH

SEQ ID NO: 45885 - protein, 12 aa, synthetic construct
NSQSGGASNDNT

SEQ ID NO: 45886 - protein, 12 aa, synthetic construct
NSQSGGATNDNA

SEQ ID NO: 45887 - protein, 12 aa, synthetic construct
NSQSGGATNDNH

SEQ ID NO: 45888 - protein, 12 aa, synthetic construct
NSQSGGATNDNT

SEQ ID NO: 45889 - protein, 12 aa, synthetic construct
NSQSGGSSNDNA

SEQ ID NO: 45890 - protein, 12 aa, synthetic construct
NSQSGGSSNDNH

SEQ ID NO: 45891 - protein, 12 aa, synthetic construct
NSQSGGSSNDNT

SEQ ID NO: 45892 - protein, 12 aa, synthetic construct
NSQSGGSTNDNA

SEQ ID NO: 45893 - protein, 12 aa, synthetic construct
NSQSGGSTNDNH

SEQ ID NO: 45894 - protein, 12 aa, synthetic construct
NSQSGGSTNDNT

SEQ ID NO: 45895 - protein, 12 aa, synthetic construct
NSQTAAASNDNA

SEQ ID NO: 45896 - protein, 12 aa, synthetic construct
NSQTAAASNDNH

SEQ ID NO: 45897 - protein, 12 aa, synthetic construct
NSQTAAASNDNT

SEQ ID NO: 45898 - protein, 12 aa, synthetic construct
NSQTAAATNDNA

SEQ ID NO: 45899 - protein, 12 aa, synthetic construct
NSQTAAATNDNH

SEQ ID NO: 45900 - protein, 12 aa, synthetic construct
NSQTAAATNDNT

SEQ ID NO: 45901 - protein, 12 aa, synthetic construct
NSQTAASSNDNA

SEQ ID NO: 45902 - protein, 12 aa, synthetic construct
NSQTAASSNDNH

SEQ ID NO: 45903 - protein, 12 aa, synthetic construct
NSQTAASSNDNT

SEQ ID NO: 45904 - protein, 12 aa, synthetic construct
NSQTAASTNDNA

SEQ ID NO: 45905 - protein, 12 aa, synthetic construct
NSQTAASTNDNH

SEQ ID NO: 45906 - protein, 12 aa, synthetic construct
NSQTAASTNDNT

SEQ ID NO: 45907 - protein, 12 aa, synthetic construct
NSQTAGASNDNA

SEQ ID NO: 45908 - protein, 12 aa, synthetic construct
NSQTAGASNDNH

SEQ ID NO: 45909 - protein, 12 aa, synthetic construct
NSQTAGASNDNT

SEQ ID NO: 45910 - protein, 12 aa, synthetic construct
NSQTAGATNDNA

SEQ ID NO: 45911 - protein, 12 aa, synthetic construct
NSQTAGATNDNH

SEQ ID NO: 45912 - protein, 12 aa, synthetic construct
NSQTAGATNDNT

SEQ ID NO: 45913 - protein, 12 aa, synthetic construct
NSQTAGSSNDNA

SEQ ID NO: 45914 - protein, 12 aa, synthetic construct
NSQTAGSSNDNH

SEQ ID NO: 45915 - protein, 12 aa, synthetic construct
NSQTAGSSNDNT

SEQ ID NO: 45916 - protein, 12 aa, synthetic construct
NSQTAGSTNDNA

SEQ ID NO: 45917 - protein, 12 aa, synthetic construct
NSQTAGSTNDNH

SEQ ID NO: 45918 - protein, 12 aa, synthetic construct
NSQTAGSTNDNT

SEQ ID NO: 45919 - protein, 12 aa, synthetic construct
NSQTGAASNDNA

SEQ ID NO: 45920 - protein, 12 aa, synthetic construct
NSQTGAASNDNH

SEQ ID NO: 45921 - protein, 12 aa, synthetic construct
NSQTGAASNDNT

SEQ ID NO: 45922 - protein, 12 aa, synthetic construct
NSQTGAATNDNA

SEQ ID NO: 45923 - protein, 12 aa, synthetic construct
NSQTGAATNDNH

SEQ ID NO: 45924 - protein, 12 aa, synthetic construct
NSQTGAATNDNT

SEQ ID NO: 45925 - protein, 12 aa, synthetic construct
NSQTGASSNDNA

SEQ ID NO: 45926 - protein, 12 aa, synthetic construct
NSQTGASSNDNH

SEQ ID NO: 45927 - protein, 12 aa, synthetic construct
NSQTGASSNDNT

SEQ ID NO: 45928 - protein, 12 aa, synthetic construct
NSQTGASTNDNA

SEQ ID NO: 45929 - protein, 12 aa, synthetic construct
NSQTGASTNDNH

SEQ ID NO: 45930 - protein, 12 aa, synthetic construct
NSQTGASTNDNT

SEQ ID NO: 45931 - protein, 12 aa, synthetic construct
NSQTGGASNDNA

SEQ ID NO: 45932 - protein, 12 aa, synthetic construct
NSQTGGASNDNH

SEQ ID NO: 45933 - protein, 12 aa, synthetic construct
NSQTGGASNDNT

SEQ ID NO: 45934 - protein, 12 aa, synthetic construct
NSQTGGATNDNA

SEQ ID NO: 45935 - protein, 12 aa, synthetic construct
NSQTGGATNDNH

SEQ ID NO: 45936 - protein, 12 aa, synthetic construct
NSQTGGATNDNT

SEQ ID NO: 45937 - protein, 12 aa, synthetic construct
NSQTGGSSNDNA

SEQ ID NO: 45938 - protein, 12 aa, synthetic construct
NSQTGGSSNDNH

SEQ ID NO: 45939 - protein, 12 aa, synthetic construct
NSQTGGSSNDNT

SEQ ID NO: 45940 - protein, 12 aa, synthetic construct
NSQTGGSTNDNA

SEQ ID NO: 45941 - protein, 12 aa, synthetic construct
NSQTGGSTNDNH

SEQ ID NO: 45942 - protein, 12 aa, synthetic construct
NSQTGGSTNDNT

SEQ ID NO: 45943 - protein, 12 aa, synthetic construct
NSTAAAASNDNA

SEQ ID NO: 45944 - protein, 12 aa, synthetic construct
NSTAAAASNDNH

SEQ ID NO: 45945 - protein, 12 aa, synthetic construct
NSTAAAASNDNT

SEQ ID NO: 45946 - protein, 12 aa, synthetic construct
NSTAAAATNDNA

SEQ ID NO: 45947 - protein, 12 aa, synthetic construct
NSTAAAATNDNH

SEQ ID NO: 45948 - protein, 12 aa, synthetic construct
NSTAAAATNDNT

SEQ ID NO: 45949 - protein, 12 aa, synthetic construct
NSTAAASSNDNA

SEQ ID NO: 45950 - protein, 12 aa, synthetic construct
NSTAAASSNDNH

SEQ ID NO: 45951 - protein, 12 aa, synthetic construct
NSTAAASSNDNT

SEQ ID NO: 45952 - protein, 12 aa, synthetic construct
NSTAAASTNDNA

SEQ ID NO: 45953 - protein, 12 aa, synthetic construct
NSTAAASTNDNH

SEQ ID NO: 45954 - protein, 12 aa, synthetic construct
NSTAAASTNDNT

SEQ ID NO: 45955 - protein, 12 aa, synthetic construct
NSTAAGASNDNA

SEQ ID NO: 45956 - protein, 12 aa, synthetic construct
NSTAAGASNDNH

SEQ ID NO: 45957 - protein, 12 aa, synthetic construct
NSTAAGASNDNT

SEQ ID NO: 45958 - protein, 12 aa, synthetic construct
NSTAAGATNDNA

SEQ ID NO: 45959 - protein, 12 aa, synthetic construct
NSTAAGATNDNH

SEQ ID NO: 45960 - protein, 12 aa, synthetic construct
NSTAAGATNDNT

SEQ ID NO: 45961 - protein, 12 aa, synthetic construct
NSTAAGSSNDNA

SEQ ID NO: 45962 - protein, 12 aa, synthetic construct
NSTAAGSSNDNH

SEQ ID NO: 45963 - protein, 12 aa, synthetic construct
NSTAAGSSNDNT

SEQ ID NO: 45964 - protein, 12 aa, synthetic construct
NSTAAGSTNDNA

SEQ ID NO: 45965 - protein, 12 aa, synthetic construct
NSTAAGSTNDNH

SEQ ID NO: 45966 - protein, 12 aa, synthetic construct
NSTAAGSTNDNT

SEQ ID NO: 45967 - protein, 12 aa, synthetic construct
NSTAGAASNDNA

SEQ ID NO: 45968 - protein, 12 aa, synthetic construct
NSTAGAASNDNH

SEQ ID NO: 45969 - protein, 12 aa, synthetic construct
NSTAGAASNDNT

SEQ ID NO: 45970 - protein, 12 aa, synthetic construct
NSTAGAATNDNA

SEQ ID NO: 45971 - protein, 12 aa, synthetic construct
NSTAGAATNDNH

SEQ ID NO: 45972 - protein, 12 aa, synthetic construct
NSTAGAATNDNT

SEQ ID NO: 45973 - protein, 12 aa, synthetic construct
NSTAGASSNDNA

SEQ ID NO: 45974 - protein, 12 aa, synthetic construct
NSTAGASSNDNH

SEQ ID NO: 45975 - protein, 12 aa, synthetic construct
NSTAGASSNDNT

SEQ ID NO: 45976 - protein, 12 aa, synthetic construct
NSTAGASTNDNA

SEQ ID NO: 45977 - protein, 12 aa, synthetic construct
NSTAGASTNDNH

SEQ ID NO: 45978 - protein, 12 aa, synthetic construct
NSTAGASTNDNT

SEQ ID NO: 45979 - protein, 12 aa, synthetic construct
NSTAGGASNDNA

SEQ ID NO: 45980 - protein, 12 aa, synthetic construct
NSTAGGASNDNH

SEQ ID NO: 45981 - protein, 12 aa, synthetic construct
NSTAGGASNDNT

SEQ ID NO: 45982 - protein, 12 aa, synthetic construct
NSTAGGATNDNA

SEQ ID NO: 45983 - protein, 12 aa, synthetic construct
NSTAGGATNDNH

SEQ ID NO: 45984 - protein, 12 aa, synthetic construct
NSTAGGATNDNT

SEQ ID NO: 45985 - protein, 12 aa, synthetic construct
NSTAGGSSNDNA

SEQ ID NO: 45986 - protein, 12 aa, synthetic construct
NSTAGGSSNDNH

SEQ ID NO: 45987 - protein, 12 aa, synthetic construct
NSTAGGSSNDNT

SEQ ID NO: 45988 - protein, 12 aa, synthetic construct
NSTAGGSTNDNA

SEQ ID NO: 45989 - protein, 12 aa, synthetic construct
NSTAGGSTNDNH

SEQ ID NO: 45990 - protein, 12 aa, synthetic construct
NSTAGGSTNDNT

SEQ ID NO: 45991 - protein, 12 aa, synthetic construct
NSTSAAASNDNA

SEQ ID NO: 45992 - protein, 12 aa, synthetic construct
NSTSAAASNDNH

SEQ ID NO: 45993 - protein, 12 aa, synthetic construct
NSTSAAASNDNT

SEQ ID NO: 45994 - protein, 12 aa, synthetic construct
NSTSAAATNDNA

SEQ ID NO: 45995 - protein, 12 aa, synthetic construct
NSTSAAATNDNH

SEQ ID NO: 45996 - protein, 12 aa, synthetic construct
NSTSAAATNDNT

SEQ ID NO: 45997 - protein, 12 aa, synthetic construct
NSTSAASSNDNA

SEQ ID NO: 45998 - protein, 12 aa, synthetic construct
NSTSAASSNDNH

SEQ ID NO: 45999 - protein, 12 aa, synthetic construct
NSTSAASSNDNT

SEQ ID NO: 46000 - protein, 12 aa, synthetic construct
NSTSAASTNDNA

SEQ ID NO: 46001 - protein, 12 aa, synthetic construct
NSTSAASTNDNH

SEQ ID NO: 46002 - protein, 12 aa, synthetic construct
NSTSAASTNDNT

SEQ ID NO: 46003 - protein, 12 aa, synthetic construct
NSTSAGASNDNA

SEQ ID NO: 46004 - protein, 12 aa, synthetic construct
NSTSAGASNDNH

SEQ ID NO: 46005 - protein, 12 aa, synthetic construct
NSTSAGASNDNT

SEQ ID NO: 46006 - protein, 12 aa, synthetic construct
NSTSAGATNDNA

SEQ ID NO: 46007 - protein, 12 aa, synthetic construct
NSTSAGATNDNH

SEQ ID NO: 46008 - protein, 12 aa, synthetic construct
NSTSAGATNDNT

SEQ ID NO: 46009 - protein, 12 aa, synthetic construct
NSTSAGSSNDNA

SEQ ID NO: 46010 - protein, 12 aa, synthetic construct
NSTSAGSSNDNH

SEQ ID NO: 46011 - protein, 12 aa, synthetic construct
NSTSAGSSNDNT

SEQ ID NO: 46012 - protein, 12 aa, synthetic construct
NSTSAGSTNDNA

SEQ ID NO: 46013 - protein, 12 aa, synthetic construct
NSTSAGSTNDNH

SEQ ID NO: 46014 - protein, 12 aa, synthetic construct
NSTSAGSTNDNT

SEQ ID NO: 46015 - protein, 12 aa, synthetic construct
NSTSGAASNDNA

SEQ ID NO: 46016 - protein, 12 aa, synthetic construct
NSTSGAASNDNH

SEQ ID NO: 46017 - protein, 12 aa, synthetic construct
NSTSGAASNDNT

SEQ ID NO: 46018 - protein, 12 aa, synthetic construct
NSTSGAATNDNA

SEQ ID NO: 46019 - protein, 12 aa, synthetic construct
NSTSGAATNDNH

SEQ ID NO: 46020 - protein, 12 aa, synthetic construct
NSTSGAATNDNT

SEQ ID NO: 46021 - protein, 12 aa, synthetic construct
NSTSGASSNDNH

SEQ ID NO: 46022 - protein, 12 aa, synthetic construct
NSTSGASSNDNT

SEQ ID NO: 46023 - protein, 12 aa, synthetic construct
NSTSGASTNDNH

SEQ ID NO: 46024 - protein, 12 aa, synthetic construct
NSTSGASTNDNT

SEQ ID NO: 46025 - protein, 12 aa, synthetic construct
NSTSGGASNDNA

SEQ ID NO: 46026 - protein, 12 aa, synthetic construct
NSTSGGASNDNH

SEQ ID NO: 46027 - protein, 12 aa, synthetic construct
NSTSGGASNDNT

SEQ ID NO: 46028 - protein, 12 aa, synthetic construct
NSTSGGATNDNA

SEQ ID NO: 46029 - protein, 12 aa, synthetic construct
NSTSGGATNDNH

SEQ ID NO: 46030 - protein, 12 aa, synthetic construct
NSTSGGATNDNT

SEQ ID NO: 46031 - protein, 12 aa, synthetic construct
NSTSGGSSNDNH

SEQ ID NO: 46032 - protein, 12 aa, synthetic construct
NSTSGGSSNDNT

SEQ ID NO: 46033 - protein, 12 aa, synthetic construct
NSTSGGSTNDNA

SEQ ID NO: 46034 - protein, 12 aa, synthetic construct
NSTSGGSTNDNH

SEQ ID NO: 46035 - protein, 12 aa, synthetic construct
NSTSGGSTNDNT

SEQ ID NO: 46036 - protein, 12 aa, synthetic construct
NSTTAAASNDNA

SEQ ID NO: 46037 - protein, 12 aa, synthetic construct
NSTTAAASNDNH

SEQ ID NO: 46038 - protein, 12 aa, synthetic construct
NSTTAAASNDNT

SEQ ID NO: 46039 - protein, 12 aa, synthetic construct
NSTTAAATNDNA

SEQ ID NO: 46040 - protein, 12 aa, synthetic construct
NSTTAAATNDNH

SEQ ID NO: 46041 - protein, 12 aa, synthetic construct
NSTTAAATNDNT

SEQ ID NO: 46042 - protein, 12 aa, synthetic construct
NSTTAASSNDNA

SEQ ID NO: 46043 - protein, 12 aa, synthetic construct
NSTTAASSNDNH

SEQ ID NO: 46044 - protein, 12 aa, synthetic construct
NSTTAASSNDNT

SEQ ID NO: 46045 - protein, 12 aa, synthetic construct
NSTTAASTNDNA

SEQ ID NO: 46046 - protein, 12 aa, synthetic construct
NSTTAASTNDNH

SEQ ID NO: 46047 - protein, 12 aa, synthetic construct
NSTTAASTNDNT

SEQ ID NO: 46048 - protein, 12 aa, synthetic construct
NSTTAGASNDNA

SEQ ID NO: 46049 - protein, 12 aa, synthetic construct
NSTTAGASNDNH

SEQ ID NO: 46050 - protein, 12 aa, synthetic construct
NSTTAGASNDNT

SEQ ID NO: 46051 - protein, 12 aa, synthetic construct
NSTTAGATNDNA

SEQ ID NO: 46052 - protein, 12 aa, synthetic construct
NSTTAGATNDNH

SEQ ID NO: 46053 - protein, 12 aa, synthetic construct
NSTTAGATNDNT

SEQ ID NO: 46054 - protein, 12 aa, synthetic construct
NSTTAGSSNDNA

SEQ ID NO: 46055 - protein, 12 aa, synthetic construct
NSTTAGSSNDNH

SEQ ID NO: 46056 - protein, 12 aa, synthetic construct
NSTTAGSSNDNT

SEQ ID NO: 46057 - protein, 12 aa, synthetic construct
NSTTAGSTNDNA

SEQ ID NO: 46058 - protein, 12 aa, synthetic construct
NSTTAGSTNDNH

SEQ ID NO: 46059 - protein, 12 aa, synthetic construct
NSTTAGSTNDNT

SEQ ID NO: 46060 - protein, 12 aa, synthetic construct
NSTTGAASNDNA

SEQ ID NO: 46061 - protein, 12 aa, synthetic construct
NSTTGAASNDNH

SEQ ID NO: 46062 - protein, 12 aa, synthetic construct
NSTTGAASNDNT

SEQ ID NO: 46063 - protein, 12 aa, synthetic construct
NSTTGAATNDNA

SEQ ID NO: 46064 - protein, 12 aa, synthetic construct
NSTTGAATNDNH

SEQ ID NO: 46065 - protein, 12 aa, synthetic construct
NSTTGAATNDNT

SEQ ID NO: 46066 - protein, 12 aa, synthetic construct
NSTTGASSNDNA

SEQ ID NO: 46067 - protein, 12 aa, synthetic construct
NSTTGASSNDNH

SEQ ID NO: 46068 - protein, 12 aa, synthetic construct
NSTTGASSNDNT

SEQ ID NO: 46069 - protein, 12 aa, synthetic construct
NSTTGASTNDNA

SEQ ID NO: 46070 - protein, 12 aa, synthetic construct
NSTTGASTNDNH

SEQ ID NO: 46071 - protein, 12 aa, synthetic construct
NSTTGASTNDNT

SEQ ID NO: 46072 - protein, 12 aa, synthetic construct
NSTTGGASNDNA

SEQ ID NO: 46073 - protein, 12 aa, synthetic construct
NSTTGGASNDNH

SEQ ID NO: 46074 - protein, 12 aa, synthetic construct
NSTTGGASNDNT

SEQ ID NO: 46075 - protein, 12 aa, synthetic construct
NSTTGGATNDNA

SEQ ID NO: 46076 - protein, 12 aa, synthetic construct
NSTTGGATNDNH

SEQ ID NO: 46077 - protein, 12 aa, synthetic construct
NSTTGGATNDNT

SEQ ID NO: 46078 - protein, 12 aa, synthetic construct
NSTTGGSSNDNA

SEQ ID NO: 46079 - protein, 12 aa, synthetic construct
NSTTGGSSNDNH

SEQ ID NO: 46080 - protein, 12 aa, synthetic construct
NSTTGGSSNDNT

SEQ ID NO: 46081 - protein, 12 aa, synthetic construct
NSTTGGSTNDNA

SEQ ID NO: 46082 - protein, 12 aa, synthetic construct
NSTTGGSTNDNH

SEQ ID NO: 46083 - protein, 12 aa, synthetic construct
NSTTGGSTNDNT

SEQ ID NO: 46084 - protein, 12 aa, synthetic construct
SGAAAAASNDNA

SEQ ID NO: 46085 - protein, 12 aa, synthetic construct
SGAAAAASNDNH

SEQ ID NO: 46086 - protein, 12 aa, synthetic construct
SGAAAAASNDNT

SEQ ID NO: 46087 - protein, 12 aa, synthetic construct
SGAAAAATNDNA

SEQ ID NO: 46088 - protein, 12 aa, synthetic construct
SGAAAAATNDNH

SEQ ID NO: 46089 - protein, 12 aa, synthetic construct
SGAAAAATNDNT

SEQ ID NO: 46090 - protein, 12 aa, synthetic construct
SGAAAASSNDNA

SEQ ID NO: 46091 - protein, 12 aa, synthetic construct
SGAAAASSNDNH

SEQ ID NO: 46092 - protein, 12 aa, synthetic construct
SGAAAASSNDNT

SEQ ID NO: 46093 - protein, 12 aa, synthetic construct
SGAAAASTNDNA

SEQ ID NO: 46094 - protein, 12 aa, synthetic construct
SGAAAASTNDNH

SEQ ID NO: 46095 - protein, 12 aa, synthetic construct
SGAAAASTNDNT

SEQ ID NO: 46096 - protein, 12 aa, synthetic construct
SGAAAGASNDNA

SEQ ID NO: 46097 - protein, 12 aa, synthetic construct
SGAAAGASNDNH

SEQ ID NO: 46098 - protein, 12 aa, synthetic construct
SGAAAGASNDNT

SEQ ID NO: 46099 - protein, 12 aa, synthetic construct
SGAAAGATNDNA

SEQ ID NO: 46100 - protein, 12 aa, synthetic construct
SGAAAGATNDNH

SEQ ID NO: 46101 - protein, 12 aa, synthetic construct
SGAAAGATNDNT

SEQ ID NO: 46102 - protein, 12 aa, synthetic construct
SGAAAGSSNDNA

SEQ ID NO: 46103 - protein, 12 aa, synthetic construct
SGAAAGSSNDNH

SEQ ID NO: 46104 - protein, 12 aa, synthetic construct
SGAAAGSSNDNT

SEQ ID NO: 46105 - protein, 12 aa, synthetic construct
SGAAAGSTNDNA

SEQ ID NO: 46106 - protein, 12 aa, synthetic construct
SGAAAGSTNDNH

SEQ ID NO: 46107 - protein, 12 aa, synthetic construct
SGAAAGSTNDNT

SEQ ID NO: 46108 - protein, 12 aa, synthetic construct
SGAAGAASNDNA

SEQ ID NO: 46109 - protein, 12 aa, synthetic construct
SGAAGAASNDNH

SEQ ID NO: 46110 - protein, 12 aa, synthetic construct
SGAAGAASNDNT

SEQ ID NO: 46111 - protein, 12 aa, synthetic construct
SGAAGAATNDNA

SEQ ID NO: 46112 - protein, 12 aa, synthetic construct
SGAAGAATNDNH

SEQ ID NO: 46113 - protein, 12 aa, synthetic construct
SGAAGAATNDNT

SEQ ID NO: 46114 - protein, 12 aa, synthetic construct
SGAAGASSNDNA

SEQ ID NO: 46115 - protein, 12 aa, synthetic construct
SGAAGASSNDNH

SEQ ID NO: 46116 - protein, 12 aa, synthetic construct
SGAAGASSNDNT

SEQ ID NO: 46117 - protein, 12 aa, synthetic construct
SGAAGASTNDNA

SEQ ID NO: 46118 - protein, 12 aa, synthetic construct
SGAAGASTNDNH

SEQ ID NO: 46119 - protein, 12 aa, synthetic construct
SGAAGASTNDNT

SEQ ID NO: 46120 - protein, 12 aa, synthetic construct
SGAAGGASNDNA

SEQ ID NO: 46121 - protein, 12 aa, synthetic construct
SGAAGGASNDNH

SEQ ID NO: 46122 - protein, 12 aa, synthetic construct
SGAAGGASNDNT

SEQ ID NO: 46123 - protein, 12 aa, synthetic construct
SGAAGGATNDNA

SEQ ID NO: 46124 - protein, 12 aa, synthetic construct
SGAAGGATNDNH

SEQ ID NO: 46125 - protein, 12 aa, synthetic construct
SGAAGGATNDNT

SEQ ID NO: 46126 - protein, 12 aa, synthetic construct
SGAAGGSSNDNA

SEQ ID NO: 46127 - protein, 12 aa, synthetic construct
SGAAGGSSNDNH

SEQ ID NO: 46128 - protein, 12 aa, synthetic construct
SGAAGGSSNDNT

SEQ ID NO: 46129 - protein, 12 aa, synthetic construct
SGAAGGSTNDNA

SEQ ID NO: 46130 - protein, 12 aa, synthetic construct
SGAAGGSTNDNH

SEQ ID NO: 46131 - protein, 12 aa, synthetic construct
SGAAGGSTNDNT

SEQ ID NO: 46132 - protein, 12 aa, synthetic construct
SGASAAASNDNA

SEQ ID NO: 46133 - protein, 12 aa, synthetic construct
SGASAAASNDNH

SEQ ID NO: 46134 - protein, 12 aa, synthetic construct
SGASAAASNDNT

SEQ ID NO: 46135 - protein, 12 aa, synthetic construct
SGASAAATNDNA

SEQ ID NO: 46136 - protein, 12 aa, synthetic construct
SGASAAATNDNH

SEQ ID NO: 46137 - protein, 12 aa, synthetic construct
SGASAAATNDNT

SEQ ID NO: 46138 - protein, 12 aa, synthetic construct
SGASAASSNDNA

SEQ ID NO: 46139 - protein, 12 aa, synthetic construct
SGASAASSNDNH

SEQ ID NO: 46140 - protein, 12 aa, synthetic construct
SGASAASSNDNT

SEQ ID NO: 46141 - protein, 12 aa, synthetic construct
SGASAASTNDNA

SEQ ID NO: 46142 - protein, 12 aa, synthetic construct
SGASAASTNDNH

SEQ ID NO: 46143 - protein, 12 aa, synthetic construct
SGASAASTNDNT

SEQ ID NO: 46144 - protein, 12 aa, synthetic construct
SGASAGASNDNA

SEQ ID NO: 46145 - protein, 12 aa, synthetic construct
SGASAGASNDNH

SEQ ID NO: 46146 - protein, 12 aa, synthetic construct
SGASAGASNDNT

SEQ ID NO: 46147 - protein, 12 aa, synthetic construct
SGASAGATNDNA

SEQ ID NO: 46148 - protein, 12 aa, synthetic construct
SGASAGATNDNH

SEQ ID NO: 46149 - protein, 12 aa, synthetic construct
SGASAGATNDNT

SEQ ID NO: 46150 - protein, 12 aa, synthetic construct
SGASAGSSNDNA

SEQ ID NO: 46151 - protein, 12 aa, synthetic construct
SGASAGSSNDNH

SEQ ID NO: 46152 - protein, 12 aa, synthetic construct
SGASAGSSNDNT

SEQ ID NO: 46153 - protein, 12 aa, synthetic construct
SGASAGSTNDNA

SEQ ID NO: 46154 - protein, 12 aa, synthetic construct
SGASAGSTNDNH

SEQ ID NO: 46155 - protein, 12 aa, synthetic construct
SGASAGSTNDNT

SEQ ID NO: 46156 - protein, 12 aa, synthetic construct
SGASGAASNDNA

SEQ ID NO: 46157 - protein, 12 aa, synthetic construct
SGASGAASNDNH

SEQ ID NO: 46158 - protein, 12 aa, synthetic construct
SGASGAASNDNT

SEQ ID NO: 46159 - protein, 12 aa, synthetic construct
SGASGAATNDNA

SEQ ID NO: 46160 - protein, 12 aa, synthetic construct
SGASGAATNDNH

SEQ ID NO: 46161 - protein, 12 aa, synthetic construct
SGASGAATNDNT

SEQ ID NO: 46162 - protein, 12 aa, synthetic construct
SGASGASSNDNA

SEQ ID NO: 46163 - protein, 12 aa, synthetic construct
SGASGASSNDNH

SEQ ID NO: 46164 - protein, 12 aa, synthetic construct
SGASGASSNDNT

SEQ ID NO: 46165 - protein, 12 aa, synthetic construct
SGASGASTNDNA

SEQ ID NO: 46166 - protein, 12 aa, synthetic construct
SGASGASTNDNH

SEQ ID NO: 46167 - protein, 12 aa, synthetic construct
SGASGASTNDNT

SEQ ID NO: 46168 - protein, 12 aa, synthetic construct
SGASGGASNDNA

SEQ ID NO: 46169 - protein, 12 aa, synthetic construct
SGASGGASNDNH

SEQ ID NO: 46170 - protein, 12 aa, synthetic construct
SGASGGASNDNT

SEQ ID NO: 46171 - protein, 12 aa, synthetic construct
SGASGGATNDNA

SEQ ID NO: 46172 - protein, 12 aa, synthetic construct
SGASGGATNDNH

SEQ ID NO: 46173 - protein, 12 aa, synthetic construct
SGASGGATNDNT

SEQ ID NO: 46174 - protein, 12 aa, synthetic construct
SGASGGSSNDNA

SEQ ID NO: 46175 - protein, 12 aa, synthetic construct
SGASGGSSNDNH

SEQ ID NO: 46176 - protein, 12 aa, synthetic construct
SGASGGSSNDNT

SEQ ID NO: 46177 - protein, 12 aa, synthetic construct
SGASGGSTNDNA

SEQ ID NO: 46178 - protein, 12 aa, synthetic construct
SGASGGSTNDNH

SEQ ID NO: 46179 - protein, 12 aa, synthetic construct
SGASGGSTNDNT

SEQ ID NO: 46180 - protein, 12 aa, synthetic construct
SGATAAASNDNA

SEQ ID NO: 46181 - protein, 12 aa, synthetic construct
SGATAAASNDNH

SEQ ID NO: 46182 - protein, 12 aa, synthetic construct
SGATAAASNDNT

SEQ ID NO: 46183 - protein, 12 aa, synthetic construct
SGATAAATNDNA

SEQ ID NO: 46184 - protein, 12 aa, synthetic construct
SGATAAATNDNH

SEQ ID NO: 46185 - protein, 12 aa, synthetic construct
SGATAAATNDNT

SEQ ID NO: 46186 - protein, 12 aa, synthetic construct
SGATAASSNDNA

SEQ ID NO: 46187 - protein, 12 aa, synthetic construct
SGATAASSNDNH

SEQ ID NO: 46188 - protein, 12 aa, synthetic construct
SGATAASSNDNT

SEQ ID NO: 46189 - protein, 12 aa, synthetic construct
SGATAASTNDNA

SEQ ID NO: 46190 - protein, 12 aa, synthetic construct
SGATAASTNDNH

SEQ ID NO: 46191 - protein, 12 aa, synthetic construct
SGATAASTNDNT

SEQ ID NO: 46192 - protein, 12 aa, synthetic construct
SGATAGASNDNA

SEQ ID NO: 46193 - protein, 12 aa, synthetic construct
SGATAGASNDNH

SEQ ID NO: 46194 - protein, 12 aa, synthetic construct
SGATAGASNDNT

SEQ ID NO: 46195 - protein, 12 aa, synthetic construct
SGATAGATNDNA

SEQ ID NO: 46196 - protein, 12 aa, synthetic construct
SGATAGATNDNH

SEQ ID NO: 46197 - protein, 12 aa, synthetic construct
SGATAGATNDNT

SEQ ID NO: 46198 - protein, 12 aa, synthetic construct
SGATAGSSNDNA

SEQ ID NO: 46199 - protein, 12 aa, synthetic construct
SGATAGSSNDNH

SEQ ID NO: 46200 - protein, 12 aa, synthetic construct
SGATAGSSNDNT

SEQ ID NO: 46201 - protein, 12 aa, synthetic construct
SGATAGSTNDNA

SEQ ID NO: 46202 - protein, 12 aa, synthetic construct
SGATAGSTNDNH

SEQ ID NO: 46203 - protein, 12 aa, synthetic construct
SGATAGSTNDNT

SEQ ID NO: 46204 - protein, 12 aa, synthetic construct
SGATGAASNDNA

SEQ ID NO: 46205 - protein, 12 aa, synthetic construct
SGATGAASNDNH

SEQ ID NO: 46206 - protein, 12 aa, synthetic construct
SGATGAASNDNT

SEQ ID NO: 46207 - protein, 12 aa, synthetic construct
SGATGAATNDNA

SEQ ID NO: 46208 - protein, 12 aa, synthetic construct
SGATGAATNDNH

SEQ ID NO: 46209 - protein, 12 aa, synthetic construct
SGATGAATNDNT

SEQ ID NO: 46210 - protein, 12 aa, synthetic construct
SGATGASSNDNA

SEQ ID NO: 46211 - protein, 12 aa, synthetic construct
SGATGASSNDNH

SEQ ID NO: 46212 - protein, 12 aa, synthetic construct
SGATGASSNDNT

SEQ ID NO: 46213 - protein, 12 aa, synthetic construct
SGATGASTNDNA

SEQ ID NO: 46214 - protein, 12 aa, synthetic construct
SGATGASTNDNH

SEQ ID NO: 46215 - protein, 12 aa, synthetic construct
SGATGASTNDNT

SEQ ID NO: 46216 - protein, 12 aa, synthetic construct
SGATGGASNDNA

SEQ ID NO: 46217 - protein, 12 aa, synthetic construct
SGATGGASNDNH

SEQ ID NO: 46218 - protein, 12 aa, synthetic construct
SGATGGASNDNT

SEQ ID NO: 46219 - protein, 12 aa, synthetic construct
SGATGGATNDNA

SEQ ID NO: 46220 - protein, 12 aa, synthetic construct
SGATGGATNDNH

SEQ ID NO: 46221 - protein, 12 aa, synthetic construct
SGATGGATNDNT

SEQ ID NO: 46222 - protein, 12 aa, synthetic construct
SGATGGSSNDNA

SEQ ID NO: 46223 - protein, 12 aa, synthetic construct
SGATGGSSNDNH

SEQ ID NO: 46224 - protein, 12 aa, synthetic construct
SGATGGSSNDNT

SEQ ID NO: 46225 - protein, 12 aa, synthetic construct
SGATGGSTNDNA

SEQ ID NO: 46226 - protein, 12 aa, synthetic construct
SGATGGSTNDNH

SEQ ID NO: 46227 - protein, 12 aa, synthetic construct
SGATGGSTNDNT

SEQ ID NO: 46228 - protein, 12 aa, synthetic construct
SGEAAAASNDNA

SEQ ID NO: 46229 - protein, 12 aa, synthetic construct
SGEAAAASNDNH

SEQ ID NO: 46230 - protein, 12 aa, synthetic construct
SGEAAAASNDNT

SEQ ID NO: 46231 - protein, 12 aa, synthetic construct
SGEAAAATNDNA

SEQ ID NO: 46232 - protein, 12 aa, synthetic construct
SGEAAAATNDNH

SEQ ID NO: 46233 - protein, 12 aa, synthetic construct
SGEAAAATNDNT

SEQ ID NO: 46234 - protein, 12 aa, synthetic construct
SGEAAASSNDNA

SEQ ID NO: 46235 - protein, 12 aa, synthetic construct
SGEAAASSNDNH

SEQ ID NO: 46236 - protein, 12 aa, synthetic construct
SGEAAASSNDNT

SEQ ID NO: 46237 - protein, 12 aa, synthetic construct
SGEAAASTNDNA

SEQ ID NO: 46238 - protein, 12 aa, synthetic construct
SGEAAASTNDNH

SEQ ID NO: 46239 - protein, 12 aa, synthetic construct
SGEAAASTNDNT

SEQ ID NO: 46240 - protein, 12 aa, synthetic construct
SGEAAGASNDNA

SEQ ID NO: 46241 - protein, 12 aa, synthetic construct
SGEAAGASNDNH

SEQ ID NO: 46242 - protein, 12 aa, synthetic construct
SGEAAGASNDNT

SEQ ID NO: 46243 - protein, 12 aa, synthetic construct
SGEAAGATNDNA

SEQ ID NO: 46244 - protein, 12 aa, synthetic construct
SGEAAGATNDNH

SEQ ID NO: 46245 - protein, 12 aa, synthetic construct
SGEAAGATNDNT

SEQ ID NO: 46246 - protein, 12 aa, synthetic construct
SGEAAGSSNDNA

SEQ ID NO: 46247 - protein, 12 aa, synthetic construct
SGEAAGSSNDNH

SEQ ID NO: 46248 - protein, 12 aa, synthetic construct
SGEAAGSSNDNT

SEQ ID NO: 46249 - protein, 12 aa, synthetic construct
SGEAAGSTNDNA

SEQ ID NO: 46250 - protein, 12 aa, synthetic construct
SGEAAGSTNDNH

SEQ ID NO: 46251 - protein, 12 aa, synthetic construct
SGEAAGSTNDNT

SEQ ID NO: 46252 - protein, 12 aa, synthetic construct
SGEAGAASNDNA

SEQ ID NO: 46253 - protein, 12 aa, synthetic construct
SGEAGAASNDNH

SEQ ID NO: 46254 - protein, 12 aa, synthetic construct
SGEAGAASNDNT

SEQ ID NO: 46255 - protein, 12 aa, synthetic construct
SGEAGAATNDNA

SEQ ID NO: 46256 - protein, 12 aa, synthetic construct
SGEAGAATNDNH

SEQ ID NO: 46257 - protein, 12 aa, synthetic construct
SGEAGAATNDNT

SEQ ID NO: 46258 - protein, 12 aa, synthetic construct
SGEAGASSNDNA

SEQ ID NO: 46259 - protein, 12 aa, synthetic construct
SGEAGASSNDNH

SEQ ID NO: 46260 - protein, 12 aa, synthetic construct
SGEAGASSNDNT

SEQ ID NO: 46261 - protein, 12 aa, synthetic construct
SGEAGASTNDNA

SEQ ID NO: 46262 - protein, 12 aa, synthetic construct
SGEAGASTNDNH

SEQ ID NO: 46263 - protein, 12 aa, synthetic construct
SGEAGASTNDNT

SEQ ID NO: 46264 - protein, 12 aa, synthetic construct
SGEAGGASNDNA

SEQ ID NO: 46265 - protein, 12 aa, synthetic construct
SGEAGGASNDNH

SEQ ID NO: 46266 - protein, 12 aa, synthetic construct
SGEAGGASNDNT

SEQ ID NO: 46267 - protein, 12 aa, synthetic construct
SGEAGGATNDNA

SEQ ID NO: 46268 - protein, 12 aa, synthetic construct
SGEAGGATNDNH

SEQ ID NO: 46269 - protein, 12 aa, synthetic construct
SGEAGGATNDNT

SEQ ID NO: 46270 - protein, 12 aa, synthetic construct
SGEAGGSSNDNA

SEQ ID NO: 46271 - protein, 12 aa, synthetic construct
SGEAGGSSNDNH

SEQ ID NO: 46272 - protein, 12 aa, synthetic construct
SGEAGGSSNDNT

SEQ ID NO: 46273 - protein, 12 aa, synthetic construct
SGEAGGSTNDNA

SEQ ID NO: 46274 - protein, 12 aa, synthetic construct
SGEAGGSTNDNH

SEQ ID NO: 46275 - protein, 12 aa, synthetic construct
SGEAGGSTNDNT

SEQ ID NO: 46276 - protein, 12 aa, synthetic construct
SGESAAASNDNA

SEQ ID NO: 46277 - protein, 12 aa, synthetic construct
SGESAAASNDNH

SEQ ID NO: 46278 - protein, 12 aa, synthetic construct
SGESAAASNDNT

SEQ ID NO: 46279 - protein, 12 aa, synthetic construct
SGESAAATNDNA

SEQ ID NO: 46280 - protein, 12 aa, synthetic construct
SGESAAATNDNH

SEQ ID NO: 46281 - protein, 12 aa, synthetic construct
SGESAAATNDNT

SEQ ID NO: 46282 - protein, 12 aa, synthetic construct
SGESAASSNDNA

SEQ ID NO: 46283 - protein, 12 aa, synthetic construct
SGESAASSNDNH

SEQ ID NO: 46284 - protein, 12 aa, synthetic construct
SGESAASSNDNT

SEQ ID NO: 46285 - protein, 12 aa, synthetic construct
SGESAASTNDNA

SEQ ID NO: 46286 - protein, 12 aa, synthetic construct
SGESAASTNDNH

SEQ ID NO: 46287 - protein, 12 aa, synthetic construct
SGESAASTNDNT

SEQ ID NO: 46288 - protein, 12 aa, synthetic construct
SGESAGASNDNA

SEQ ID NO: 46289 - protein, 12 aa, synthetic construct
SGESAGASNDNH

SEQ ID NO: 46290 - protein, 12 aa, synthetic construct
SGESAGASNDNT

SEQ ID NO: 46291 - protein, 12 aa, synthetic construct
SGESAGATNDNA

SEQ ID NO: 46292 - protein, 12 aa, synthetic construct
SGESAGATNDNH

SEQ ID NO: 46293 - protein, 12 aa, synthetic construct
SGESAGATNDNT

SEQ ID NO: 46294 - protein, 12 aa, synthetic construct
SGESAGSSNDNA

SEQ ID NO: 46295 - protein, 12 aa, synthetic construct
SGESAGSSNDNH

SEQ ID NO: 46296 - protein, 12 aa, synthetic construct
SGESAGSSNDNT

SEQ ID NO: 46297 - protein, 12 aa, synthetic construct
SGESAGSTNDNA

SEQ ID NO: 46298 - protein, 12 aa, synthetic construct
SGESAGSTNDNH

SEQ ID NO: 46299 - protein, 12 aa, synthetic construct
SGESAGSTNDNT

SEQ ID NO: 46300 - protein, 12 aa, synthetic construct
SGESGAASNDNA

SEQ ID NO: 46301 - protein, 12 aa, synthetic construct
SGESGAASNDNH

SEQ ID NO: 46302 - protein, 12 aa, synthetic construct
SGESGAASNDNT

SEQ ID NO: 46303 - protein, 12 aa, synthetic construct
SGESGAATNDNA

SEQ ID NO: 46304 - protein, 12 aa, synthetic construct
SGESGAATNDNH

SEQ ID NO: 46305 - protein, 12 aa, synthetic construct
SGESGAATNDNT

SEQ ID NO: 46306 - protein, 12 aa, synthetic construct
SGESGASSNDNA

SEQ ID NO: 46307 - protein, 12 aa, synthetic construct
SGESGASSNDNH

SEQ ID NO: 46308 - protein, 12 aa, synthetic construct
SGESGASSNDNT

SEQ ID NO: 46309 - protein, 12 aa, synthetic construct
SGESGASTNDNA

SEQ ID NO: 46310 - protein, 12 aa, synthetic construct
SGESGASTNDNH

SEQ ID NO: 46311 - protein, 12 aa, synthetic construct
SGESGASTNDNT

SEQ ID NO: 46312 - protein, 12 aa, synthetic construct
SGESGGASNDNA

SEQ ID NO: 46313 - protein, 12 aa, synthetic construct
SGESGGASNDNH

SEQ ID NO: 46314 - protein, 12 aa, synthetic construct
SGESGGASNDNT

SEQ ID NO: 46315 - protein, 12 aa, synthetic construct
SGESGGATNDNA

SEQ ID NO: 46316 - protein, 12 aa, synthetic construct
SGESGGATNDNH

SEQ ID NO: 46317 - protein, 12 aa, synthetic construct
SGESGGATNDNT

SEQ ID NO: 46318 - protein, 12 aa, synthetic construct
SGESGGSSNDNA

SEQ ID NO: 46319 - protein, 12 aa, synthetic construct
SGESGGSSNDNH

SEQ ID NO: 46320 - protein, 12 aa, synthetic construct
SGESGGSSNDNT

SEQ ID NO: 46321 - protein, 12 aa, synthetic construct
SGESGGSTNDNA

SEQ ID NO: 46322 - protein, 12 aa, synthetic construct
SGESGGSTNDNH

SEQ ID NO: 46323 - protein, 12 aa, synthetic construct
SGESGGSTNDNT

SEQ ID NO: 46324 - protein, 12 aa, synthetic construct
SGETAAASNDNA

SEQ ID NO: 46325 - protein, 12 aa, synthetic construct
SGETAAASNDNH

SEQ ID NO: 46326 - protein, 12 aa, synthetic construct
SGETAAASNDNT

SEQ ID NO: 46327 - protein, 12 aa, synthetic construct
SGETAAATNDNA

SEQ ID NO: 46328 - protein, 12 aa, synthetic construct
SGETAAATNDNH

SEQ ID NO: 46329 - protein, 12 aa, synthetic construct
SGETAAATNDNT

SEQ ID NO: 46330 - protein, 12 aa, synthetic construct
SGETAASSNDNA

SEQ ID NO: 46331 - protein, 12 aa, synthetic construct
SGETAASSNDNH

SEQ ID NO: 46332 - protein, 12 aa, synthetic construct
SGETAASSNDNT

SEQ ID NO: 46333 - protein, 12 aa, synthetic construct
SGETAASTNDNA

SEQ ID NO: 46334 - protein, 12 aa, synthetic construct
SGETAASTNDNH

SEQ ID NO: 46335 - protein, 12 aa, synthetic construct
SGETAASTNDNT

SEQ ID NO: 46336 - protein, 12 aa, synthetic construct
SGETAGASNDNA

SEQ ID NO: 46337 - protein, 12 aa, synthetic construct
SGETAGASNDNH

SEQ ID NO: 46338 - protein, 12 aa, synthetic construct
SGETAGASNDNT

SEQ ID NO: 46339 - protein, 12 aa, synthetic construct
SGETAGATNDNA

SEQ ID NO: 46340 - protein, 12 aa, synthetic construct
SGETAGATNDNH

SEQ ID NO: 46341 - protein, 12 aa, synthetic construct
SGETAGATNDNT

SEQ ID NO: 46342 - protein, 12 aa, synthetic construct
SGETAGSSNDNA

SEQ ID NO: 46343 - protein, 12 aa, synthetic construct
SGETAGSSNDNH

SEQ ID NO: 46344 - protein, 12 aa, synthetic construct
SGETAGSSNDNT

SEQ ID NO: 46345 - protein, 12 aa, synthetic construct
SGETAGSTNDNA

SEQ ID NO: 46346 - protein, 12 aa, synthetic construct
SGETAGSTNDNH

SEQ ID NO: 46347 - protein, 12 aa, synthetic construct
SGETAGSTNDNT

SEQ ID NO: 46348 - protein, 12 aa, synthetic construct
SGETGAASNDNA

SEQ ID NO: 46349 - protein, 12 aa, synthetic construct
SGETGAASNDNH

SEQ ID NO: 46350 - protein, 12 aa, synthetic construct
SGETGAASNDNT

SEQ ID NO: 46351 - protein, 12 aa, synthetic construct
SGETGAATNDNA

SEQ ID NO: 46352 - protein, 12 aa, synthetic construct
SGETGAATNDNH

SEQ ID NO: 46353 - protein, 12 aa, synthetic construct
SGETGAATNDNT

SEQ ID NO: 46354 - protein, 12 aa, synthetic construct
SGETGASSNDNA

SEQ ID NO: 46355 - protein, 12 aa, synthetic construct
SGETGASSNDNH

SEQ ID NO: 46356 - protein, 12 aa, synthetic construct
SGETGASSNDNT

SEQ ID NO: 46357 - protein, 12 aa, synthetic construct
SGETGASTNDNA

SEQ ID NO: 46358 - protein, 12 aa, synthetic construct
SGETGASTNDNH

SEQ ID NO: 46359 - protein, 12 aa, synthetic construct
SGETGASTNDNT

SEQ ID NO: 46360 - protein, 12 aa, synthetic construct
SGETGGASNDNA

SEQ ID NO: 46361 - protein, 12 aa, synthetic construct
SGETGGASNDNH

SEQ ID NO: 46362 - protein, 12 aa, synthetic construct
SGETGGASNDNT

SEQ ID NO: 46363 - protein, 12 aa, synthetic construct
SGETGGATNDNA

SEQ ID NO: 46364 - protein, 12 aa, synthetic construct
SGETGGATNDNH

SEQ ID NO: 46365 - protein, 12 aa, synthetic construct
SGETGGATNDNT

SEQ ID NO: 46366 - protein, 12 aa, synthetic construct
SGETGGSSNDNA

SEQ ID NO: 46367 - protein, 12 aa, synthetic construct
SGETGGSSNDNH

SEQ ID NO: 46368 - protein, 12 aa, synthetic construct
SGETGGSSNDNT

SEQ ID NO: 46369 - protein, 12 aa, synthetic construct
SGETGGSTNDNA

SEQ ID NO: 46370 - protein, 12 aa, synthetic construct
SGETGGSTNDNH

SEQ ID NO: 46371 - protein, 12 aa, synthetic construct
SGETGGSTNDNT

SEQ ID NO: 46372 - protein, 12 aa, synthetic construct
SGQAAAASNDNA

SEQ ID NO: 46373 - protein, 12 aa, synthetic construct
SGQAAAASNDNH

SEQ ID NO: 46374 - protein, 12 aa, synthetic construct
SGQAAAASNDNT

SEQ ID NO: 46375 - protein, 12 aa, synthetic construct
SGQAAAATNDNA

SEQ ID NO: 46376 - protein, 12 aa, synthetic construct
SGQAAAATNDNH

SEQ ID NO: 46377 - protein, 12 aa, synthetic construct
SGQAAAATNDNT

SEQ ID NO: 46378 - protein, 12 aa, synthetic construct
SGQAAASSNDNA

SEQ ID NO: 46379 - protein, 12 aa, synthetic construct
SGQAAASSNDNH

SEQ ID NO: 46380 - protein, 12 aa, synthetic construct
SGQAAASSNDNT

SEQ ID NO: 46381 - protein, 12 aa, synthetic construct
SGQAAASTNDNA

SEQ ID NO: 46382 - protein, 12 aa, synthetic construct
SGQAAASTNDNH

SEQ ID NO: 46383 - protein, 12 aa, synthetic construct
SGQAAASTNDNT

SEQ ID NO: 46384 - protein, 12 aa, synthetic construct
SGQAAGASNDNA

SEQ ID NO: 46385 - protein, 12 aa, synthetic construct
SGQAAGASNDNH

SEQ ID NO: 46386 - protein, 12 aa, synthetic construct
SGQAAGASNDNT

SEQ ID NO: 46387 - protein, 12 aa, synthetic construct
SGQAAGATNDNA

SEQ ID NO: 46388 - protein, 12 aa, synthetic construct
SGQAAGATNDNH

SEQ ID NO: 46389 - protein, 12 aa, synthetic construct
SGQAAGATNDNT

SEQ ID NO: 46390 - protein, 12 aa, synthetic construct
SGQAAGSSNDNA

SEQ ID NO: 46391 - protein, 12 aa, synthetic construct
SGQAAGSSNDNH

SEQ ID NO: 46392 - protein, 12 aa, synthetic construct
SGQAAGSSNDNT

SEQ ID NO: 46393 - protein, 12 aa, synthetic construct
SGQAAGSTNDNA

SEQ ID NO: 46394 - protein, 12 aa, synthetic construct
SGQAAGSTNDNH

SEQ ID NO: 46395 - protein, 12 aa, synthetic construct
SGQAAGSTNDNT

SEQ ID NO: 46396 - protein, 12 aa, synthetic construct
SGQAGAASNDNA

SEQ ID NO: 46397 - protein, 12 aa, synthetic construct
SGQAGAASNDNH

SEQ ID NO: 46398 - protein, 12 aa, synthetic construct
SGQAGAASNDNT

SEQ ID NO: 46399 - protein, 12 aa, synthetic construct
SGQAGAATNDNA

SEQ ID NO: 46400 - protein, 12 aa, synthetic construct
SGQAGAATNDNH

SEQ ID NO: 46401 - protein, 12 aa, synthetic construct
SGQAGAATNDNT

SEQ ID NO: 46402 - protein, 12 aa, synthetic construct
SGQAGASSNDNA

SEQ ID NO: 46403 - protein, 12 aa, synthetic construct
SGQAGASSNDNH

SEQ ID NO: 46404 - protein, 12 aa, synthetic construct
SGQAGASSNDNT

SEQ ID NO: 46405 - protein, 12 aa, synthetic construct
SGQAGASTNDNA

SEQ ID NO: 46406 - protein, 12 aa, synthetic construct
SGQAGASTNDNH

SEQ ID NO: 46407 - protein, 12 aa, synthetic construct
SGQAGASTNDNT

SEQ ID NO: 46408 - protein, 12 aa, synthetic construct
SGQAGGASNDNA

SEQ ID NO: 46409 - protein, 12 aa, synthetic construct
SGQAGGASNDNH

SEQ ID NO: 46410 - protein, 12 aa, synthetic construct
SGQAGGASNDNT

SEQ ID NO: 46411 - protein, 12 aa, synthetic construct
SGQAGGATNDNA

SEQ ID NO: 46412 - protein, 12 aa, synthetic construct
SGQAGGATNDNH

SEQ ID NO: 46413 - protein, 12 aa, synthetic construct
SGQAGGATNDNT

SEQ ID NO: 46414 - protein, 12 aa, synthetic construct
SGQAGGSSNDNA

SEQ ID NO: 46415 - protein, 12 aa, synthetic construct
SGQAGGSSNDNH

SEQ ID NO: 46416 - protein, 12 aa, synthetic construct
SGQAGGSSNDNT

SEQ ID NO: 46417 - protein, 12 aa, synthetic construct
SGQAGGSTNDNA

SEQ ID NO: 46418 - protein, 12 aa, synthetic construct
SGQAGGSTNDNH

SEQ ID NO: 46419 - protein, 12 aa, synthetic construct
SGQAGGSTNDNT

SEQ ID NO: 46420 - protein, 12 aa, synthetic construct
SGQSAAASNDNA

SEQ ID NO: 46421 - protein, 12 aa, synthetic construct
SGQSAAASNDNH

SEQ ID NO: 46422 - protein, 12 aa, synthetic construct
SGQSAAASNDNT

SEQ ID NO: 46423 - protein, 12 aa, synthetic construct
SGQSAAATNDNA

SEQ ID NO: 46424 - protein, 12 aa, synthetic construct
SGQSAAATNDNH

SEQ ID NO: 46425 - protein, 12 aa, synthetic construct
SGQSAAATNDNT

SEQ ID NO: 46426 - protein, 12 aa, synthetic construct
SGQSAASSNDNA

SEQ ID NO: 46427 - protein, 12 aa, synthetic construct
SGQSAASSNDNH

SEQ ID NO: 46428 - protein, 12 aa, synthetic construct
SGQSAASSNDNT

SEQ ID NO: 46429 - protein, 12 aa, synthetic construct
SGQSAASTNDNA

SEQ ID NO: 46430 - protein, 12 aa, synthetic construct
SGQSAASTNDNH

SEQ ID NO: 46431 - protein, 12 aa, synthetic construct
SGQSAASTNDNT

SEQ ID NO: 46432 - protein, 12 aa, synthetic construct
SGQSAGASNDNA

SEQ ID NO: 46433 - protein, 12 aa, synthetic construct
SGQSAGASNDNH

SEQ ID NO: 46434 - protein, 12 aa, synthetic construct
SGQSAGASNDNT

SEQ ID NO: 46435 - protein, 12 aa, synthetic construct
SGQSAGATNDNA

SEQ ID NO: 46436 - protein, 12 aa, synthetic construct
SGQSAGATNDNH

SEQ ID NO: 46437 - protein, 12 aa, synthetic construct
SGQSAGATNDNT

SEQ ID NO: 46438 - protein, 12 aa, synthetic construct
SGQSAGSSNDNA

SEQ ID NO: 46439 - protein, 12 aa, synthetic construct
SGQSAGSSNDNH

SEQ ID NO: 46440 - protein, 12 aa, synthetic construct
SGQSAGSSNDNT

SEQ ID NO: 46441 - protein, 12 aa, synthetic construct
SGQSAGSTNDNA

SEQ ID NO: 46442 - protein, 12 aa, synthetic construct
SGQSAGSTNDNH

SEQ ID NO: 46443 - protein, 12 aa, synthetic construct
SGQSAGSTNDNT

SEQ ID NO: 46444 - protein, 12 aa, synthetic construct
SGQSGAASNDNA

SEQ ID NO: 46445 - protein, 12 aa, synthetic construct
SGQSGAASNDNH

SEQ ID NO: 46446 - protein, 12 aa, synthetic construct
SGQSGAASNDNT

SEQ ID NO: 46447 - protein, 12 aa, synthetic construct
SGQSGAATNDNA

SEQ ID NO: 46448 - protein, 12 aa, synthetic construct
SGQSGAATNDNH

SEQ ID NO: 46449 - protein, 12 aa, synthetic construct
SGQSGAATNDNT

SEQ ID NO: 46450 - protein, 12 aa, synthetic construct
SGQSGASSNDNA

SEQ ID NO: 46451 - protein, 12 aa, synthetic construct
SGQSGASSNDNH

SEQ ID NO: 46452 - protein, 12 aa, synthetic construct
SGQSGASSNDNT

SEQ ID NO: 46453 - protein, 12 aa, synthetic construct
SGQSGASTNDNA

SEQ ID NO: 46454 - protein, 12 aa, synthetic construct
SGQSGASTNDNH

SEQ ID NO: 46455 - protein, 12 aa, synthetic construct
SGQSGASTNDNT

SEQ ID NO: 46456 - protein, 12 aa, synthetic construct
SGQSGGASNDNA

SEQ ID NO: 46457 - protein, 12 aa, synthetic construct
SGQSGGASNDNH

SEQ ID NO: 46458 - protein, 12 aa, synthetic construct
SGQSGGASNDNT

SEQ ID NO: 46459 - protein, 12 aa, synthetic construct
SGQSGGATNDNA

SEQ ID NO: 46460 - protein, 12 aa, synthetic construct
SGQSGGATNDNH

SEQ ID NO: 46461 - protein, 12 aa, synthetic construct
SGQSGGATNDNT

SEQ ID NO: 46462 - protein, 12 aa, synthetic construct
SGQSGGSSNDNA

SEQ ID NO: 46463 - protein, 12 aa, synthetic construct
SGQSGGSSNDNH

SEQ ID NO: 46464 - protein, 12 aa, synthetic construct
SGQSGGSSNDNT

SEQ ID NO: 46465 - protein, 12 aa, synthetic construct
SGQSGGSTNDNA

SEQ ID NO: 46466 - protein, 12 aa, synthetic construct
SGQSGGSTNDNH

SEQ ID NO: 46467 - protein, 12 aa, synthetic construct
SGQSGGSTNDNT

SEQ ID NO: 46468 - protein, 12 aa, synthetic construct
SGQTAAASNDNA

SEQ ID NO: 46469 - protein, 12 aa, synthetic construct
SGQTAAASNDNH

SEQ ID NO: 46470 - protein, 12 aa, synthetic construct
SGQTAAASNDNT

SEQ ID NO: 46471 - protein, 12 aa, synthetic construct
SGQTAAATNDNA

SEQ ID NO: 46472 - protein, 12 aa, synthetic construct
SGQTAAATNDNH

SEQ ID NO: 46473 - protein, 12 aa, synthetic construct
SGQTAAATNDNT

SEQ ID NO: 46474 - protein, 12 aa, synthetic construct
SGQTAASSNDNA

SEQ ID NO: 46475 - protein, 12 aa, synthetic construct
SGQTAASSNDNH

SEQ ID NO: 46476 - protein, 12 aa, synthetic construct
SGQTAASSNDNT

SEQ ID NO: 46477 - protein, 12 aa, synthetic construct
SGQTAASTNDNA

SEQ ID NO: 46478 - protein, 12 aa, synthetic construct
SGQTAASTNDNH

SEQ ID NO: 46479 - protein, 12 aa, synthetic construct
SGQTAASTNDNT

SEQ ID NO: 46480 - protein, 12 aa, synthetic construct
SGQTAGASNDNA

SEQ ID NO: 46481 - protein, 12 aa, synthetic construct
SGQTAGASNDNH

SEQ ID NO: 46482 - protein, 12 aa, synthetic construct
SGQTAGASNDNT

SEQ ID NO: 46483 - protein, 12 aa, synthetic construct
SGQTAGATNDNA

SEQ ID NO: 46484 - protein, 12 aa, synthetic construct
SGQTAGATNDNH

SEQ ID NO: 46485 - protein, 12 aa, synthetic construct
SGQTAGATNDNT

SEQ ID NO: 46486 - protein, 12 aa, synthetic construct
SGQTAGSSNDNA

SEQ ID NO: 46487 - protein, 12 aa, synthetic construct
SGQTAGSSNDNH

SEQ ID NO: 46488 - protein, 12 aa, synthetic construct
SGQTAGSSNDNT

SEQ ID NO: 46489 - protein, 12 aa, synthetic construct
SGQTAGSTNDNA

SEQ ID NO: 46490 - protein, 12 aa, synthetic construct
SGQTAGSTNDNH

SEQ ID NO: 46491 - protein, 12 aa, synthetic construct
SGQTAGSTNDNT

SEQ ID NO: 46492 - protein, 12 aa, synthetic construct
SGQTGAASNDNA

SEQ ID NO: 46493 - protein, 12 aa, synthetic construct
SGQTGAASNDNH

SEQ ID NO: 46494 - protein, 12 aa, synthetic construct
SGQTGAASNDNT

SEQ ID NO: 46495 - protein, 12 aa, synthetic construct
SGQTGAATNDNA

SEQ ID NO: 46496 - protein, 12 aa, synthetic construct
SGQTGAATNDNH

SEQ ID NO: 46497 - protein, 12 aa, synthetic construct
SGQTGAATNDNT

SEQ ID NO: 46498 - protein, 12 aa, synthetic construct
SGQTGASSNDNA

SEQ ID NO: 46499 - protein, 12 aa, synthetic construct
SGQTGASSNDNH

SEQ ID NO: 46500 - protein, 12 aa, synthetic construct
SGQTGASSNDNT

SEQ ID NO: 46501 - protein, 12 aa, synthetic construct
SGQTGASTNDNA

SEQ ID NO: 46502 - protein, 12 aa, synthetic construct
SGQTGASTNDNH

SEQ ID NO: 46503 - protein, 12 aa, synthetic construct
SGQTGASTNDNT

SEQ ID NO: 46504 - protein, 12 aa, synthetic construct
SGQTGGASNDNA

SEQ ID NO: 46505 - protein, 12 aa, synthetic construct
SGQTGGASNDNH

SEQ ID NO: 46506 - protein, 12 aa, synthetic construct
SGQTGGASNDNT

SEQ ID NO: 46507 - protein, 12 aa, synthetic construct
SGQTGGATNDNA

SEQ ID NO: 46508 - protein, 12 aa, synthetic construct
SGQTGGATNDNH

SEQ ID NO: 46509 - protein, 12 aa, synthetic construct
SGQTGGATNDNT

SEQ ID NO: 46510 - protein, 12 aa, synthetic construct
SGQTGGSSNDNA

SEQ ID NO: 46511 - protein, 12 aa, synthetic construct
SGQTGGSSNDNH

SEQ ID NO: 46512 - protein, 12 aa, synthetic construct
SGQTGGSSNDNT

SEQ ID NO: 46513 - protein, 12 aa, synthetic construct
SGQTGGSTNDNA

SEQ ID NO: 46514 - protein, 12 aa, synthetic construct
SGQTGGSTNDNH

SEQ ID NO: 46515 - protein, 12 aa, synthetic construct
SGQTGGSTNDNT

SEQ ID NO: 46516 - protein, 12 aa, synthetic construct
SGTAAAASNDNA

SEQ ID NO: 46517 - protein, 12 aa, synthetic construct
SGTAAAASNDNH

SEQ ID NO: 46518 - protein, 12 aa, synthetic construct
SGTAAAASNDNT

SEQ ID NO: 46519 - protein, 12 aa, synthetic construct
SGTAAAATNDNA

SEQ ID NO: 46520 - protein, 12 aa, synthetic construct
SGTAAAATNDNH

SEQ ID NO: 46521 - protein, 12 aa, synthetic construct
SGTAAAATNDNT

SEQ ID NO: 46522 - protein, 12 aa, synthetic construct
SGTAAASSNDNA

SEQ ID NO: 46523 - protein, 12 aa, synthetic construct
SGTAAASSNDNH

SEQ ID NO: 46524 - protein, 12 aa, synthetic construct
SGTAAASSNDNT

SEQ ID NO: 46525 - protein, 12 aa, synthetic construct
SGTAAASTNDNA

SEQ ID NO: 46526 - protein, 12 aa, synthetic construct
SGTAAASTNDNH

SEQ ID NO: 46527 - protein, 12 aa, synthetic construct
SGTAAASTNDNT

SEQ ID NO: 46528 - protein, 12 aa, synthetic construct
SGTAAGASNDNA

SEQ ID NO: 46529 - protein, 12 aa, synthetic construct
SGTAAGASNDNH

SEQ ID NO: 46530 - protein, 12 aa, synthetic construct
SGTAAGASNDNT

SEQ ID NO: 46531 - protein, 12 aa, synthetic construct
SGTAAGATNDNA

SEQ ID NO: 46532 - protein, 12 aa, synthetic construct
SGTAAGATNDNH

SEQ ID NO: 46533 - protein, 12 aa, synthetic construct
SGTAAGATNDNT

SEQ ID NO: 46534 - protein, 12 aa, synthetic construct
SGTAAGSSNDNA

SEQ ID NO: 46535 - protein, 12 aa, synthetic construct
SGTAAGSSNDNH

SEQ ID NO: 46536 - protein, 12 aa, synthetic construct
SGTAAGSSNDNT

SEQ ID NO: 46537 - protein, 12 aa, synthetic construct
SGTAAGSTNDNA

SEQ ID NO: 46538 - protein, 12 aa, synthetic construct
SGTAAGSTNDNH

SEQ ID NO: 46539 - protein, 12 aa, synthetic construct
SGTAAGSTNDNT

SEQ ID NO: 46540 - protein, 12 aa, synthetic construct
SGTAGAASNDNA

SEQ ID NO: 46541 - protein, 12 aa, synthetic construct
SGTAGAASNDNH

SEQ ID NO: 46542 - protein, 12 aa, synthetic construct
SGTAGAASNDNT

SEQ ID NO: 46543 - protein, 12 aa, synthetic construct
SGTAGAATNDNA

SEQ ID NO: 46544 - protein, 12 aa, synthetic construct
SGTAGAATNDNH

SEQ ID NO: 46545 - protein, 12 aa, synthetic construct
SGTAGAATNDNT

SEQ ID NO: 46546 - protein, 12 aa, synthetic construct
SGTAGASSNDNA

SEQ ID NO: 46547 - protein, 12 aa, synthetic construct
SGTAGASSNDNH

SEQ ID NO: 46548 - protein, 12 aa, synthetic construct
SGTAGASSNDNT

SEQ ID NO: 46549 - protein, 12 aa, synthetic construct
SGTAGASTNDNA

SEQ ID NO: 46550 - protein, 12 aa, synthetic construct
SGTAGASTNDNH

SEQ ID NO: 46551 - protein, 12 aa, synthetic construct
SGTAGASTNDNT

SEQ ID NO: 46552 - protein, 12 aa, synthetic construct
SGTAGGASNDNA

SEQ ID NO: 46553 - protein, 12 aa, synthetic construct
SGTAGGASNDNH

SEQ ID NO: 46554 - protein, 12 aa, synthetic construct
SGTAGGASNDNT

SEQ ID NO: 46555 - protein, 12 aa, synthetic construct
SGTAGGATNDNA

SEQ ID NO: 46556 - protein, 12 aa, synthetic construct
SGTAGGATNDNH

SEQ ID NO: 46557 - protein, 12 aa, synthetic construct
SGTAGGATNDNT

SEQ ID NO: 46558 - protein, 12 aa, synthetic construct
SGTAGGSSNDNA

SEQ ID NO: 46559 - protein, 12 aa, synthetic construct
SGTAGGSSNDNH

SEQ ID NO: 46560 - protein, 12 aa, synthetic construct
SGTAGGSSNDNT

SEQ ID NO: 46561 - protein, 12 aa, synthetic construct
SGTAGGSTNDNA

SEQ ID NO: 46562 - protein, 12 aa, synthetic construct
SGTAGGSTNDNH

SEQ ID NO: 46563 - protein, 12 aa, synthetic construct
SGTAGGSTNDNT

SEQ ID NO: 46564 - protein, 12 aa, synthetic construct
SGTSAAASNDNA

SEQ ID NO: 46565 - protein, 12 aa, synthetic construct
SGTSAAASNDNH

SEQ ID NO: 46566 - protein, 12 aa, synthetic construct
SGTSAAASNDNT

SEQ ID NO: 46567 - protein, 12 aa, synthetic construct
SGTSAAATNDNA

SEQ ID NO: 46568 - protein, 12 aa, synthetic construct
SGTSAAATNDNH

SEQ ID NO: 46569 - protein, 12 aa, synthetic construct
SGTSAAATNDNT

SEQ ID NO: 46570 - protein, 12 aa, synthetic construct
SGTSAASSNDNA

SEQ ID NO: 46571 - protein, 12 aa, synthetic construct
SGTSAASSNDNH

SEQ ID NO: 46572 - protein, 12 aa, synthetic construct
SGTSAASSNDNT

SEQ ID NO: 46573 - protein, 12 aa, synthetic construct
SGTSAASTNDNA

SEQ ID NO: 46574 - protein, 12 aa, synthetic construct
SGTSAASTNDNH

SEQ ID NO: 46575 - protein, 12 aa, synthetic construct
SGTSAASTNDNT

SEQ ID NO: 46576 - protein, 12 aa, synthetic construct
SGTSAGASNDNA

SEQ ID NO: 46577 - protein, 12 aa, synthetic construct
SGTSAGASNDNH

SEQ ID NO: 46578 - protein, 12 aa, synthetic construct
SGTSAGASNDNT

SEQ ID NO: 46579 - protein, 12 aa, synthetic construct
SGTSAGATNDNA

SEQ ID NO: 46580 - protein, 12 aa, synthetic construct
SGTSAGATNDNH

SEQ ID NO: 46581 - protein, 12 aa, synthetic construct
SGTSAGATNDNT

SEQ ID NO: 46582 - protein, 12 aa, synthetic construct
SGTSAGSSNDNA

SEQ ID NO: 46583 - protein, 12 aa, synthetic construct
SGTSAGSSNDNH

SEQ ID NO: 46584 - protein, 12 aa, synthetic construct
SGTSAGSSNDNT

SEQ ID NO: 46585 - protein, 12 aa, synthetic construct
SGTSAGSTNDNA

SEQ ID NO: 46586 - protein, 12 aa, synthetic construct
SGTSAGSTNDNH

SEQ ID NO: 46587 - protein, 12 aa, synthetic construct
SGTSAGSTNDNT

SEQ ID NO: 46588 - protein, 12 aa, synthetic construct
SGTSGAASNDNA

SEQ ID NO: 46589 - protein, 12 aa, synthetic construct
SGTSGAASNDNH

SEQ ID NO: 46590 - protein, 12 aa, synthetic construct
SGTSGAASNDNT

SEQ ID NO: 46591 - protein, 12 aa, synthetic construct
SGTSGAATNDNA

SEQ ID NO: 46592 - protein, 12 aa, synthetic construct
SGTSGAATNDNH

SEQ ID NO: 46593 - protein, 12 aa, synthetic construct
SGTSGAATNDNT

SEQ ID NO: 46594 - protein, 12 aa, synthetic construct
SGTSGASSNDNA

SEQ ID NO: 46595 - protein, 12 aa, synthetic construct
SGTSGASSNDNH

SEQ ID NO: 46596 - protein, 12 aa, synthetic construct
SGTSGASSNDNT

SEQ ID NO: 46597 - protein, 12 aa, synthetic construct
SGTSGASTNDNA

SEQ ID NO: 46598 - protein, 12 aa, synthetic construct
SGTSGASTNDNH

SEQ ID NO: 46599 - protein, 12 aa, synthetic construct
SGTSGASTNDNT

SEQ ID NO: 46600 - protein, 12 aa, synthetic construct
SGTSGGASNDNA

SEQ ID NO: 46601 - protein, 12 aa, synthetic construct
SGTSGGASNDNH

SEQ ID NO: 46602 - protein, 12 aa, synthetic construct
SGTSGGASNDNT

SEQ ID NO: 46603 - protein, 12 aa, synthetic construct
SGTSGGATNDNA

SEQ ID NO: 46604 - protein, 12 aa, synthetic construct
SGTSGGATNDNH

SEQ ID NO: 46605 - protein, 12 aa, synthetic construct
SGTSGGATNDNT

SEQ ID NO: 46606 - protein, 12 aa, synthetic construct
SGTSGGSSNDNA

SEQ ID NO: 46607 - protein, 12 aa, synthetic construct
SGTSGGSSNDNH

SEQ ID NO: 46608 - protein, 12 aa, synthetic construct
SGTSGGSSNDNT

SEQ ID NO: 46609 - protein, 12 aa, synthetic construct
SGTSGGSTNDNA

SEQ ID NO: 46610 - protein, 12 aa, synthetic construct
SGTSGGSTNDNH

SEQ ID NO: 46611 - protein, 12 aa, synthetic construct
SGTSGGSTNDNT

SEQ ID NO: 46612 - protein, 12 aa, synthetic construct
SGTTAAASNDNA

SEQ ID NO: 46613 - protein, 12 aa, synthetic construct
SGTTAAASNDNH

SEQ ID NO: 46614 - protein, 12 aa, synthetic construct
SGTTAAASNDNT

SEQ ID NO: 46615 - protein, 12 aa, synthetic construct
SGTTAAATNDNA

SEQ ID NO: 46616 - protein, 12 aa, synthetic construct
SGTTAAATNDNH

SEQ ID NO: 46617 - protein, 12 aa, synthetic construct
SGTTAAATNDNT

SEQ ID NO: 46618 - protein, 12 aa, synthetic construct
SGTTAASSNDNA

SEQ ID NO: 46619 - protein, 12 aa, synthetic construct
SGTTAASSNDNH

SEQ ID NO: 46620 - protein, 12 aa, synthetic construct
SGTTAASSNDNT

SEQ ID NO: 46621 - protein, 12 aa, synthetic construct
SGTTAASTNDNA

SEQ ID NO: 46622 - protein, 12 aa, synthetic construct
SGTTAASTNDNH

SEQ ID NO: 46623 - protein, 12 aa, synthetic construct
SGTTAASTNDNT

SEQ ID NO: 46624 - protein, 12 aa, synthetic construct
SGTTAGASNDNA

SEQ ID NO: 46625 - protein, 12 aa, synthetic construct
SGTTAGASNDNH

SEQ ID NO: 46626 - protein, 12 aa, synthetic construct
SGTTAGASNDNT

SEQ ID NO: 46627 - protein, 12 aa, synthetic construct
SGTTAGATNDNA

SEQ ID NO: 46628 - protein, 12 aa, synthetic construct
SGTTAGATNDNH

SEQ ID NO: 46629 - protein, 12 aa, synthetic construct
SGTTAGATNDNT

SEQ ID NO: 46630 - protein, 12 aa, synthetic construct
SGTTAGSSNDNA

SEQ ID NO: 46631 - protein, 12 aa, synthetic construct
SGTTAGSSNDNH

SEQ ID NO: 46632 - protein, 12 aa, synthetic construct
SGTTAGSSNDNT

SEQ ID NO: 46633 - protein, 12 aa, synthetic construct
SGTTAGSTNDNA

SEQ ID NO: 46634 - protein, 12 aa, synthetic construct
SGTTAGSTNDNH

SEQ ID NO: 46635 - protein, 12 aa, synthetic construct
SGTTAGSTNDNT

SEQ ID NO: 46636 - protein, 12 aa, synthetic construct
SGTTGAASNDNA

SEQ ID NO: 46637 - protein, 12 aa, synthetic construct
SGTTGAASNDNH

SEQ ID NO: 46638 - protein, 12 aa, synthetic construct
SGTTGAASNDNT

SEQ ID NO: 46639 - protein, 12 aa, synthetic construct
SGTTGAATNDNA

SEQ ID NO: 46640 - protein, 12 aa, synthetic construct
SGTTGAATNDNH

SEQ ID NO: 46641 - protein, 12 aa, synthetic construct
SGTTGAATNDNT

SEQ ID NO: 46642 - protein, 12 aa, synthetic construct
SGTTGASSNDNA

SEQ ID NO: 46643 - protein, 12 aa, synthetic construct
SGTTGASSNDNH

SEQ ID NO: 46644 - protein, 12 aa, synthetic construct
SGTTGASSNDNT

SEQ ID NO: 46645 - protein, 12 aa, synthetic construct
SGTTGASTNDNA

SEQ ID NO: 46646 - protein, 12 aa, synthetic construct
SGTTGASTNDNH

SEQ ID NO: 46647 - protein, 12 aa, synthetic construct
SGTTGASTNDNT

SEQ ID NO: 46648 - protein, 12 aa, synthetic construct
SGTTGGASNDNA

SEQ ID NO: 46649 - protein, 12 aa, synthetic construct
SGTTGGASNDNH

SEQ ID NO: 46650 - protein, 12 aa, synthetic construct
SGTTGGASNDNT

SEQ ID NO: 46651 - protein, 12 aa, synthetic construct
SGTTGGATNDNA

SEQ ID NO: 46652 - protein, 12 aa, synthetic construct
SGTTGGATNDNH

SEQ ID NO: 46653 - protein, 12 aa, synthetic construct
SGTTGGATNDNT

SEQ ID NO: 46654 - protein, 12 aa, synthetic construct
SGTTGGSSNDNA

SEQ ID NO: 46655 - protein, 12 aa, synthetic construct
SGTTGGSSNDNH

SEQ ID NO: 46656 - protein, 12 aa, synthetic construct
SGTTGGSSNDNT

SEQ ID NO: 46657 - protein, 12 aa, synthetic construct
SGTTGGSTNDNA

SEQ ID NO: 46658 - protein, 12 aa, synthetic construct
SGTTGGSTNDNH

SEQ ID NO: 46659 - protein, 12 aa, synthetic construct
SGTTGGSTNDNT

SEQ ID NO: 46660 - protein, 12 aa, synthetic construct
SSAAAAASNDNA

SEQ ID NO: 46661 - protein, 12 aa, synthetic construct
SSAAAAASNDNH

SEQ ID NO: 46662 - protein, 12 aa, synthetic construct
SSAAAAASNDNT

SEQ ID NO: 46663 - protein, 12 aa, synthetic construct
SSAAAAATNDNA

SEQ ID NO: 46664 - protein, 12 aa, synthetic construct
SSAAAAATNDNH

SEQ ID NO: 46665 - protein, 12 aa, synthetic construct
SSAAAAATNDNT

SEQ ID NO: 46666 - protein, 12 aa, synthetic construct
SSAAAASSNDNA

SEQ ID NO: 46667 - protein, 12 aa, synthetic construct
SSAAAASSNDNH

SEQ ID NO: 46668 - protein, 12 aa, synthetic construct
SSAAAASSNDNT

SEQ ID NO: 46669 - protein, 12 aa, synthetic construct
SSAAAASTNDNA

SEQ ID NO: 46670 - protein, 12 aa, synthetic construct
SSAAAASTNDNH

SEQ ID NO: 46671 - protein, 12 aa, synthetic construct
SSAAAASTNDNT

SEQ ID NO: 46672 - protein, 12 aa, synthetic construct
SSAAAGASNDNA

SEQ ID NO: 46673 - protein, 12 aa, synthetic construct
SSAAAGASNDNH

SEQ ID NO: 46674 - protein, 12 aa, synthetic construct
SSAAAGASNDNT

SEQ ID NO: 46675 - protein, 12 aa, synthetic construct
SSAAAGATNDNA

SEQ ID NO: 46676 - protein, 12 aa, synthetic construct
SSAAAGATNDNH

SEQ ID NO: 46677 - protein, 12 aa, synthetic construct
SSAAAGATNDNT

SEQ ID NO: 46678 - protein, 12 aa, synthetic construct
SSAAAGSSNDNA

SEQ ID NO: 46679 - protein, 12 aa, synthetic construct
SSAAAGSSNDNH

SEQ ID NO: 46680 - protein, 12 aa, synthetic construct
SSAAAGSSNDNT

SEQ ID NO: 46681 - protein, 12 aa, synthetic construct
SSAAAGSTNDNA

SEQ ID NO: 46682 - protein, 12 aa, synthetic construct
SSAAAGSTNDNH

SEQ ID NO: 46683 - protein, 12 aa, synthetic construct
SSAAAGSTNDNT

SEQ ID NO: 46684 - protein, 12 aa, synthetic construct
SSAAGAASNDNA

SEQ ID NO: 46685 - protein, 12 aa, synthetic construct
SSAAGAASNDNH

SEQ ID NO: 46686 - protein, 12 aa, synthetic construct
SSAAGAASNDNT

SEQ ID NO: 46687 - protein, 12 aa, synthetic construct
SSAAGAATNDNA

SEQ ID NO: 46688 - protein, 12 aa, synthetic construct
SSAAGAATNDNH

SEQ ID NO: 46689 - protein, 12 aa, synthetic construct
SSAAGAATNDNT

SEQ ID NO: 46690 - protein, 12 aa, synthetic construct
SSAAGASSNDNA

SEQ ID NO: 46691 - protein, 12 aa, synthetic construct
SSAAGASSNDNH

SEQ ID NO: 46692 - protein, 12 aa, synthetic construct
SSAAGASSNDNT

SEQ ID NO: 46693 - protein, 12 aa, synthetic construct
SSAAGASTNDNA

SEQ ID NO: 46694 - protein, 12 aa, synthetic construct
SSAAGASTNDNH

SEQ ID NO: 46695 - protein, 12 aa, synthetic construct
SSAAGASTNDNT

SEQ ID NO: 46696 - protein, 12 aa, synthetic construct
SSAAGGASNDNA

SEQ ID NO: 46697 - protein, 12 aa, synthetic construct
SSAAGGASNDNH

SEQ ID NO: 46698 - protein, 12 aa, synthetic construct
SSAAGGASNDNT

SEQ ID NO: 46699 - protein, 12 aa, synthetic construct
SSAAGGATNDNA

SEQ ID NO: 46700 - protein, 12 aa, synthetic construct
SSAAGGATNDNH

SEQ ID NO: 46701 - protein, 12 aa, synthetic construct
SSAAGGATNDNT

SEQ ID NO: 46702 - protein, 12 aa, synthetic construct
SSAAGGSSNDNA

SEQ ID NO: 46703 - protein, 12 aa, synthetic construct
SSAAGGSSNDNH

SEQ ID NO: 46704 - protein, 12 aa, synthetic construct
SSAAGGSSNDNT

SEQ ID NO: 46705 - protein, 12 aa, synthetic construct
SSAAGGSTNDNA

SEQ ID NO: 46706 - protein, 12 aa, synthetic construct
SSAAGGSTNDNH

SEQ ID NO: 46707 - protein, 12 aa, synthetic construct
SSAAGGSTNDNT

SEQ ID NO: 46708 - protein, 12 aa, synthetic construct
SSASAAASNDNA

SEQ ID NO: 46709 - protein, 12 aa, synthetic construct
SSASAAASNDNH

SEQ ID NO: 46710 - protein, 12 aa, synthetic construct
SSASAAASNDNT

SEQ ID NO: 46711 - protein, 12 aa, synthetic construct
SSASAAATNDNA

SEQ ID NO: 46712 - protein, 12 aa, synthetic construct
SSASAAATNDNH

SEQ ID NO: 46713 - protein, 12 aa, synthetic construct
SSASAAATNDNT

SEQ ID NO: 46714 - protein, 12 aa, synthetic construct
SSASAASSNDNA

SEQ ID NO: 46715 - protein, 12 aa, synthetic construct
SSASAASSNDNH

SEQ ID NO: 46716 - protein, 12 aa, synthetic construct
SSASAASSNDNT

SEQ ID NO: 46717 - protein, 12 aa, synthetic construct
SSASAASTNDNA

SEQ ID NO: 46718 - protein, 12 aa, synthetic construct
SSASAASTNDNH

SEQ ID NO: 46719 - protein, 12 aa, synthetic construct
SSASAASTNDNT

SEQ ID NO: 46720 - protein, 12 aa, synthetic construct
SSASAGASNDNA

SEQ ID NO: 46721 - protein, 12 aa, synthetic construct
SSASAGASNDNH

SEQ ID NO: 46722 - protein, 12 aa, synthetic construct
SSASAGASNDNT

SEQ ID NO: 46723 - protein, 12 aa, synthetic construct
SSASAGATNDNA

SEQ ID NO: 46724 - protein, 12 aa, synthetic construct
SSASAGATNDNH

SEQ ID NO: 46725 - protein, 12 aa, synthetic construct
SSASAGATNDNT

SEQ ID NO: 46726 - protein, 12 aa, synthetic construct
SSASAGSSNDNA

SEQ ID NO: 46727 - protein, 12 aa, synthetic construct
SSASAGSSNDNH

SEQ ID NO: 46728 - protein, 12 aa, synthetic construct
SSASAGSSNDNT

SEQ ID NO: 46729 - protein, 12 aa, synthetic construct
SSASAGSTNDNA

SEQ ID NO: 46730 - protein, 12 aa, synthetic construct
SSASAGSTNDNH

SEQ ID NO: 46731 - protein, 12 aa, synthetic construct
SSASAGSTNDNT

SEQ ID NO: 46732 - protein, 12 aa, synthetic construct
SSASGAASNDNA

SEQ ID NO: 46733 - protein, 12 aa, synthetic construct
SSASGAASNDNH

SEQ ID NO: 46734 - protein, 12 aa, synthetic construct
SSASGAASNDNT

SEQ ID NO: 46735 - protein, 12 aa, synthetic construct
SSASGAATNDNA

SEQ ID NO: 46736 - protein, 12 aa, synthetic construct
SSASGAATNDNH

SEQ ID NO: 46737 - protein, 12 aa, synthetic construct
SSASGAATNDNT

SEQ ID NO: 46738 - protein, 12 aa, synthetic construct
SSASGASSNDNA

SEQ ID NO: 46739 - protein, 12 aa, synthetic construct
SSASGASSNDNH

SEQ ID NO: 46740 - protein, 12 aa, synthetic construct
SSASGASSNDNT

SEQ ID NO: 46741 - protein, 12 aa, synthetic construct
SSASGASTNDNA

SEQ ID NO: 46742 - protein, 12 aa, synthetic construct
SSASGASTNDNH

SEQ ID NO: 46743 - protein, 12 aa, synthetic construct
SSASGASTNDNT

SEQ ID NO: 46744 - protein, 12 aa, synthetic construct
SSASGGASNDNA

SEQ ID NO: 46745 - protein, 12 aa, synthetic construct
SSASGGASNDNH

SEQ ID NO: 46746 - protein, 12 aa, synthetic construct
SSASGGASNDNT

SEQ ID NO: 46747 - protein, 12 aa, synthetic construct
SSASGGATNDNA

SEQ ID NO: 46748 - protein, 12 aa, synthetic construct
SSASGGATNDNH

SEQ ID NO: 46749 - protein, 12 aa, synthetic construct
SSASGGATNDNT

SEQ ID NO: 46750 - protein, 12 aa, synthetic construct
SSASGGSSNDNA

SEQ ID NO: 46751 - protein, 12 aa, synthetic construct
SSASGGSSNDNH

SEQ ID NO: 46752 - protein, 12 aa, synthetic construct
SSASGGSSNDNT

SEQ ID NO: 46753 - protein, 12 aa, synthetic construct
SSASGGSTNDNA

SEQ ID NO: 46754 - protein, 12 aa, synthetic construct
SSASGGSTNDNH

SEQ ID NO: 46755 - protein, 12 aa, synthetic construct
SSASGGSTNDNT

SEQ ID NO: 46756 - protein, 12 aa, synthetic construct
SSATAAASNDNA

SEQ ID NO: 46757 - protein, 12 aa, synthetic construct
SSATAAASNDNH

SEQ ID NO: 46758 - protein, 12 aa, synthetic construct
SSATAAASNDNT

SEQ ID NO: 46759 - protein, 12 aa, synthetic construct
SSATAAATNDNA

SEQ ID NO: 46760 - protein, 12 aa, synthetic construct
SSATAAATNDNH

SEQ ID NO: 46761 - protein, 12 aa, synthetic construct
SSATAAATNDNT

SEQ ID NO: 46762 - protein, 12 aa, synthetic construct
SSATAASSNDNA

SEQ ID NO: 46763 - protein, 12 aa, synthetic construct
SSATAASSNDNH

SEQ ID NO: 46764 - protein, 12 aa, synthetic construct
SSATAASSNDNT

SEQ ID NO: 46765 - protein, 12 aa, synthetic construct
SSATAASTNDNA

SEQ ID NO: 46766 - protein, 12 aa, synthetic construct
SSATAASTNDNH

SEQ ID NO: 46767 - protein, 12 aa, synthetic construct
SSATAASTNDNT

SEQ ID NO: 46768 - protein, 12 aa, synthetic construct
SSATAGASNDNA

SEQ ID NO: 46769 - protein, 12 aa, synthetic construct
SSATAGASNDNH

SEQ ID NO: 46770 - protein, 12 aa, synthetic construct
SSATAGASNDNT

SEQ ID NO: 46771 - protein, 12 aa, synthetic construct
SSATAGATNDNA

SEQ ID NO: 46772 - protein, 12 aa, synthetic construct
SSATAGATNDNH

SEQ ID NO: 46773 - protein, 12 aa, synthetic construct
SSATAGATNDNT

SEQ ID NO: 46774 - protein, 12 aa, synthetic construct
SSATAGSSNDNA

SEQ ID NO: 46775 - protein, 12 aa, synthetic construct
SSATAGSSNDNH

SEQ ID NO: 46776 - protein, 12 aa, synthetic construct
SSATAGSSNDNT

SEQ ID NO: 46777 - protein, 12 aa, synthetic construct
SSATAGSTNDNA

SEQ ID NO: 46778 - protein, 12 aa, synthetic construct
SSATAGSTNDNH

SEQ ID NO: 46779 - protein, 12 aa, synthetic construct
SSATAGSTNDNT

SEQ ID NO: 46780 - protein, 12 aa, synthetic construct
SSATGAASNDNA

SEQ ID NO: 46781 - protein, 12 aa, synthetic construct
SSATGAASNDNH

SEQ ID NO: 46782 - protein, 12 aa, synthetic construct
SSATGAASNDNT

SEQ ID NO: 46783 - protein, 12 aa, synthetic construct
SSATGAATNDNA

SEQ ID NO: 46784 - protein, 12 aa, synthetic construct
SSATGAATNDNH

SEQ ID NO: 46785 - protein, 12 aa, synthetic construct
SSATGAATNDNT

SEQ ID NO: 46786 - protein, 12 aa, synthetic construct
SSATGASSNDNA

SEQ ID NO: 46787 - protein, 12 aa, synthetic construct
SSATGASSNDNH

SEQ ID NO: 46788 - protein, 12 aa, synthetic construct
SSATGASSNDNT

SEQ ID NO: 46789 - protein, 12 aa, synthetic construct
SSATGASTNDNA

SEQ ID NO: 46790 - protein, 12 aa, synthetic construct
SSATGASTNDNH

SEQ ID NO: 46791 - protein, 12 aa, synthetic construct
SSATGASTNDNT

SEQ ID NO: 46792 - protein, 12 aa, synthetic construct
SSATGGASNDNA

SEQ ID NO: 46793 - protein, 12 aa, synthetic construct
SSATGGASNDNH

SEQ ID NO: 46794 - protein, 12 aa, synthetic construct
SSATGGASNDNT

SEQ ID NO: 46795 - protein, 12 aa, synthetic construct
SSATGGATNDNA

SEQ ID NO: 46796 - protein, 12 aa, synthetic construct
SSATGGATNDNH

SEQ ID NO: 46797 - protein, 12 aa, synthetic construct
SSATGGATNDNT

SEQ ID NO: 46798 - protein, 12 aa, synthetic construct
SSATGGSSNDNA

SEQ ID NO: 46799 - protein, 12 aa, synthetic construct
SSATGGSSNDNH

SEQ ID NO: 46800 - protein, 12 aa, synthetic construct
SSATGGSSNDNT

SEQ ID NO: 46801 - protein, 12 aa, synthetic construct
SSATGGSTNDNA

SEQ ID NO: 46802 - protein, 12 aa, synthetic construct
SSATGGSTNDNH

SEQ ID NO: 46803 - protein, 12 aa, synthetic construct
SSATGGSTNDNT

SEQ ID NO: 46804 - protein, 12 aa, synthetic construct
SSEAAAASNDNA

SEQ ID NO: 46805 - protein, 12 aa, synthetic construct
SSEAAAASNDNH

SEQ ID NO: 46806 - protein, 12 aa, synthetic construct
SSEAAAASNDNT

SEQ ID NO: 46807 - protein, 12 aa, synthetic construct
SSEAAAATNDNA

SEQ ID NO: 46808 - protein, 12 aa, synthetic construct
SSEAAAATNDNH

SEQ ID NO: 46809 - protein, 12 aa, synthetic construct
SSEAAAATNDNT

SEQ ID NO: 46810 - protein, 12 aa, synthetic construct
SSEAAASSNDNA

SEQ ID NO: 46811 - protein, 12 aa, synthetic construct
SSEAAASSNDNH

SEQ ID NO: 46812 - protein, 12 aa, synthetic construct
SSEAAASSNDNT

SEQ ID NO: 46813 - protein, 12 aa, synthetic construct
SSEAAASTNDNA

SEQ ID NO: 46814 - protein, 12 aa, synthetic construct
SSEAAASTNDNH

SEQ ID NO: 46815 - protein, 12 aa, synthetic construct
SSEAAASTNDNT

SEQ ID NO: 46816 - protein, 12 aa, synthetic construct
SSEAAGASNDNA

SEQ ID NO: 46817 - protein, 12 aa, synthetic construct
SSEAAGASNDNH

SEQ ID NO: 46818 - protein, 12 aa, synthetic construct
SSEAAGASNDNT

SEQ ID NO: 46819 - protein, 12 aa, synthetic construct
SSEAAGATNDNA

SEQ ID NO: 46820 - protein, 12 aa, synthetic construct
SSEAAGATNDNH

SEQ ID NO: 46821 - protein, 12 aa, synthetic construct
SSEAAGATNDNT

SEQ ID NO: 46822 - protein, 12 aa, synthetic construct
SSEAAGSSNDNA

SEQ ID NO: 46823 - protein, 12 aa, synthetic construct
SSEAAGSSNDNH

SEQ ID NO: 46824 - protein, 12 aa, synthetic construct
SSEAAGSSNDNT

SEQ ID NO: 46825 - protein, 12 aa, synthetic construct
SSEAAGSTNDNA

SEQ ID NO: 46826 - protein, 12 aa, synthetic construct
SSEAAGSTNDNH

SEQ ID NO: 46827 - protein, 12 aa, synthetic construct
SSEAAGSTNDNT

SEQ ID NO: 46828 - protein, 12 aa, synthetic construct
SSEAGAASNDNA

SEQ ID NO: 46829 - protein, 12 aa, synthetic construct
SSEAGAASNDNH

SEQ ID NO: 46830 - protein, 12 aa, synthetic construct
SSEAGAASNDNT

SEQ ID NO: 46831 - protein, 12 aa, synthetic construct
SSEAGAATNDNA

SEQ ID NO: 46832 - protein, 12 aa, synthetic construct
SSEAGAATNDNH

SEQ ID NO: 46833 - protein, 12 aa, synthetic construct
SSEAGAATNDNT

SEQ ID NO: 46834 - protein, 12 aa, synthetic construct
SSEAGASSNDNA

SEQ ID NO: 46835 - protein, 12 aa, synthetic construct
SSEAGASSNDNH

SEQ ID NO: 46836 - protein, 12 aa, synthetic construct
SSEAGASSNDNT

SEQ ID NO: 46837 - protein, 12 aa, synthetic construct
SSEAGASTNDNA

SEQ ID NO: 46838 - protein, 12 aa, synthetic construct
SSEAGASTNDNH

SEQ ID NO: 46839 - protein, 12 aa, synthetic construct
SSEAGASTNDNT

SEQ ID NO: 46840 - protein, 12 aa, synthetic construct
SSEAGGASNDNA

SEQ ID NO: 46841 - protein, 12 aa, synthetic construct
SSEAGGASNDNH

SEQ ID NO: 46842 - protein, 12 aa, synthetic construct
SSEAGGASNDNT

SEQ ID NO: 46843 - protein, 12 aa, synthetic construct
SSEAGGATNDNA

SEQ ID NO: 46844 - protein, 12 aa, synthetic construct
SSEAGGATNDNH

SEQ ID NO: 46845 - protein, 12 aa, synthetic construct
SSEAGGATNDNT

SEQ ID NO: 46846 - protein, 12 aa, synthetic construct
SSEAGGSSNDNA

SEQ ID NO: 46847 - protein, 12 aa, synthetic construct
SSEAGGSSNDNH

SEQ ID NO: 46848 - protein, 12 aa, synthetic construct
SSEAGGSSNDNT

SEQ ID NO: 46849 - protein, 12 aa, synthetic construct
SSEAGGSTNDNA

SEQ ID NO: 46850 - protein, 12 aa, synthetic construct
SSEAGGSTNDNH

SEQ ID NO: 46851 - protein, 12 aa, synthetic construct
SSEAGGSTNDNT

SEQ ID NO: 46852 - protein, 12 aa, synthetic construct
SSESAAASNDNA

SEQ ID NO: 46853 - protein, 12 aa, synthetic construct
SSESAAASNDNH

SEQ ID NO: 46854 - protein, 12 aa, synthetic construct
SSESAAASNDNT

SEQ ID NO: 46855 - protein, 12 aa, synthetic construct
SSESAAATNDNA

SEQ ID NO: 46856 - protein, 12 aa, synthetic construct
SSESAAATNDNH

SEQ ID NO: 46857 - protein, 12 aa, synthetic construct
SSESAAATNDNT

SEQ ID NO: 46858 - protein, 12 aa, synthetic construct
SSESAASSNDNA

SEQ ID NO: 46859 - protein, 12 aa, synthetic construct
SSESAASSNDNH

SEQ ID NO: 46860 - protein, 12 aa, synthetic construct
SSESAASSNDNT

SEQ ID NO: 46861 - protein, 12 aa, synthetic construct
SSESAASTNDNA

SEQ ID NO: 46862 - protein, 12 aa, synthetic construct
SSESAASTNDNH

SEQ ID NO: 46863 - protein, 12 aa, synthetic construct
SSESAASTNDNT

SEQ ID NO: 46864 - protein, 12 aa, synthetic construct
SSESAGASNDNA

SEQ ID NO: 46865 - protein, 12 aa, synthetic construct
SSESAGASNDNH

SEQ ID NO: 46866 - protein, 12 aa, synthetic construct
SSESAGASNDNT

SEQ ID NO: 46867 - protein, 12 aa, synthetic construct
SSESAGATNDNA

SEQ ID NO: 46868 - protein, 12 aa, synthetic construct
SSESAGATNDNH

SEQ ID NO: 46869 - protein, 12 aa, synthetic construct
SSESAGATNDNT

SEQ ID NO: 46870 - protein, 12 aa, synthetic construct
SSESAGSSNDNA

SEQ ID NO: 46871 - protein, 12 aa, synthetic construct
SSESAGSSNDNH

SEQ ID NO: 46872 - protein, 12 aa, synthetic construct
SSESAGSSNDNT

SEQ ID NO: 46873 - protein, 12 aa, synthetic construct
SSESAGSTNDNA

SEQ ID NO: 46874 - protein, 12 aa, synthetic construct
SSESAGSTNDNH

SEQ ID NO: 46875 - protein, 12 aa, synthetic construct
SSESAGSTNDNT

SEQ ID NO: 46876 - protein, 12 aa, synthetic construct
SSESGAASNDNA

SEQ ID NO: 46877 - protein, 12 aa, synthetic construct
SSESGAASNDNH

SEQ ID NO: 46878 - protein, 12 aa, synthetic construct
SSESGAASNDNT

SEQ ID NO: 46879 - protein, 12 aa, synthetic construct
SSESGAATNDNA

SEQ ID NO: 46880 - protein, 12 aa, synthetic construct
SSESGAATNDNH

SEQ ID NO: 46881 - protein, 12 aa, synthetic construct
SSESGAATNDNT

SEQ ID NO: 46882 - protein, 12 aa, synthetic construct
SSESGASSNDNA

SEQ ID NO: 46883 - protein, 12 aa, synthetic construct
SSESGASSNDNH

SEQ ID NO: 46884 - protein, 12 aa, synthetic construct
SSESGASSNDNT

SEQ ID NO: 46885 - protein, 12 aa, synthetic construct
SSESGASTNDNA

SEQ ID NO: 46886 - protein, 12 aa, synthetic construct
SSESGASTNDNH

SEQ ID NO: 46887 - protein, 12 aa, synthetic construct
SSESGASTNDNT

SEQ ID NO: 46888 - protein, 12 aa, synthetic construct
SSESGGASNDNA

SEQ ID NO: 46889 - protein, 12 aa, synthetic construct
SSESGGASNDNH

SEQ ID NO: 46890 - protein, 12 aa, synthetic construct
SSESGGASNDNT

SEQ ID NO: 46891 - protein, 12 aa, synthetic construct
SSESGGATNDNA

SEQ ID NO: 46892 - protein, 12 aa, synthetic construct
SSESGGATNDNH

SEQ ID NO: 46893 - protein, 12 aa, synthetic construct
SSESGGATNDNT

SEQ ID NO: 46894 - protein, 12 aa, synthetic construct
SSESGGSSNDNA

SEQ ID NO: 46895 - protein, 12 aa, synthetic construct
SSESGGSSNDNH

SEQ ID NO: 46896 - protein, 12 aa, synthetic construct
SSESGGSSNDNT

SEQ ID NO: 46897 - protein, 12 aa, synthetic construct
SSESGGSTNDNA

SEQ ID NO: 46898 - protein, 12 aa, synthetic construct
SSESGGSTNDNH

SEQ ID NO: 46899 - protein, 12 aa, synthetic construct
SSESGGSTNDNT

SEQ ID NO: 46900 - protein, 12 aa, synthetic construct
SSETAAASNDNA

SEQ ID NO: 46901 - protein, 12 aa, synthetic construct
SSETAAASNDNH

SEQ ID NO: 46902 - protein, 12 aa, synthetic construct
SSETAAASNDNT

SEQ ID NO: 46903 - protein, 12 aa, synthetic construct
SSETAAATNDNA

SEQ ID NO: 46904 - protein, 12 aa, synthetic construct
SSETAAATNDNH

SEQ ID NO: 46905 - protein, 12 aa, synthetic construct
SSETAAATNDNT

SEQ ID NO: 46906 - protein, 12 aa, synthetic construct
SSETAASSNDNA

SEQ ID NO: 46907 - protein, 12 aa, synthetic construct
SSETAASSNDNH

SEQ ID NO: 46908 - protein, 12 aa, synthetic construct
SSETAASSNDNT

SEQ ID NO: 46909 - protein, 12 aa, synthetic construct
SSETAASTNDNA

SEQ ID NO: 46910 - protein, 12 aa, synthetic construct
SSETAASTNDNH

SEQ ID NO: 46911 - protein, 12 aa, synthetic construct
SSETAASTNDNT

SEQ ID NO: 46912 - protein, 12 aa, synthetic construct
SSETAGASNDNA

SEQ ID NO: 46913 - protein, 12 aa, synthetic construct
SSETAGASNDNH

SEQ ID NO: 46914 - protein, 12 aa, synthetic construct
SSETAGASNDNT

SEQ ID NO: 46915 - protein, 12 aa, synthetic construct
SSETAGATNDNA

SEQ ID NO: 46916 - protein, 12 aa, synthetic construct
SSETAGATNDNH

SEQ ID NO: 46917 - protein, 12 aa, synthetic construct
SSETAGATNDNT

SEQ ID NO: 46918 - protein, 12 aa, synthetic construct
SSETAGSSNDNA

SEQ ID NO: 46919 - protein, 12 aa, synthetic construct
SSETAGSSNDNH

SEQ ID NO: 46920 - protein, 12 aa, synthetic construct
SSETAGSSNDNT

SEQ ID NO: 46921 - protein, 12 aa, synthetic construct
SSETAGSTNDNA

SEQ ID NO: 46922 - protein, 12 aa, synthetic construct
SSETAGSTNDNH

SEQ ID NO: 46923 - protein, 12 aa, synthetic construct
SSETAGSTNDNT

SEQ ID NO: 46924 - protein, 12 aa, synthetic construct
SSETGAASNDNA

SEQ ID NO: 46925 - protein, 12 aa, synthetic construct
SSETGAASNDNH

SEQ ID NO: 46926 - protein, 12 aa, synthetic construct
SSETGAASNDNT

SEQ ID NO: 46927 - protein, 12 aa, synthetic construct
SSETGAATNDNA

SEQ ID NO: 46928 - protein, 12 aa, synthetic construct
SSETGAATNDNH

SEQ ID NO: 46929 - protein, 12 aa, synthetic construct
SSETGAATNDNT

SEQ ID NO: 46930 - protein, 12 aa, synthetic construct
SSETGASSNDNA

SEQ ID NO: 46931 - protein, 12 aa, synthetic construct
SSETGASSNDNH

SEQ ID NO: 46932 - protein, 12 aa, synthetic construct
SSETGASSNDNT

SEQ ID NO: 46933 - protein, 12 aa, synthetic construct
SSETGASTNDNA

SEQ ID NO: 46934 - protein, 12 aa, synthetic construct
SSETGASTNDNH

SEQ ID NO: 46935 - protein, 12 aa, synthetic construct
SSETGASTNDNT

SEQ ID NO: 46936 - protein, 12 aa, synthetic construct
SSETGGASNDNA

SEQ ID NO: 46937 - protein, 12 aa, synthetic construct
SSETGGASNDNH

SEQ ID NO: 46938 - protein, 12 aa, synthetic construct
SSETGGASNDNT

SEQ ID NO: 46939 - protein, 12 aa, synthetic construct
SSETGGATNDNA

SEQ ID NO: 46940 - protein, 12 aa, synthetic construct
SSETGGATNDNH

SEQ ID NO: 46941 - protein, 12 aa, synthetic construct
SSETGGATNDNT

SEQ ID NO: 46942 - protein, 12 aa, synthetic construct
SSETGGSSNDNA

SEQ ID NO: 46943 - protein, 12 aa, synthetic construct
SSETGGSSNDNH

SEQ ID NO: 46944 - protein, 12 aa, synthetic construct
SSETGGSSNDNT

SEQ ID NO: 46945 - protein, 12 aa, synthetic construct
SSETGGSTNDNA

SEQ ID NO: 46946 - protein, 12 aa, synthetic construct
SSETGGSTNDNH

SEQ ID NO: 46947 - protein, 12 aa, synthetic construct
SSETGGSTNDNT

SEQ ID NO: 46948 - protein, 12 aa, synthetic construct
SSQAAAASNDNA

SEQ ID NO: 46949 - protein, 12 aa, synthetic construct
SSQAAAASNDNH

SEQ ID NO: 46950 - protein, 12 aa, synthetic construct
SSQAAAASNDNT

SEQ ID NO: 46951 - protein, 12 aa, synthetic construct
SSQAAAATNDNA

SEQ ID NO: 46952 - protein, 12 aa, synthetic construct
SSQAAAATNDNH

SEQ ID NO: 46953 - protein, 12 aa, synthetic construct
SSQAAAATNDNT

SEQ ID NO: 46954 - protein, 12 aa, synthetic construct
SSQAAASSNDNA

SEQ ID NO: 46955 - protein, 12 aa, synthetic construct
SSQAAASSNDNH

SEQ ID NO: 46956 - protein, 12 aa, synthetic construct
SSQAAASSNDNT

SEQ ID NO: 46957 - protein, 12 aa, synthetic construct
SSQAAASTNDNA

SEQ ID NO: 46958 - protein, 12 aa, synthetic construct
SSQAAASTNDNH

SEQ ID NO: 46959 - protein, 12 aa, synthetic construct
SSQAAASTNDNT

SEQ ID NO: 46960 - protein, 12 aa, synthetic construct
SSQAAGASNDNA

SEQ ID NO: 46961 - protein, 12 aa, synthetic construct
SSQAAGASNDNH

SEQ ID NO: 46962 - protein, 12 aa, synthetic construct
SSQAAGASNDNT

SEQ ID NO: 46963 - protein, 12 aa, synthetic construct
SSQAAGATNDNA

SEQ ID NO: 46964 - protein, 12 aa, synthetic construct
SSQAAGATNDNH

SEQ ID NO: 46965 - protein, 12 aa, synthetic construct
SSQAAGATNDNT

SEQ ID NO: 46966 - protein, 12 aa, synthetic construct
SSQAAGSSNDNA

SEQ ID NO: 46967 - protein, 12 aa, synthetic construct
SSQAAGSSNDNH

SEQ ID NO: 46968 - protein, 12 aa, synthetic construct
SSQAAGSSNDNT

SEQ ID NO: 46969 - protein, 12 aa, synthetic construct
SSQAAGSTNDNA

SEQ ID NO: 46970 - protein, 12 aa, synthetic construct
SSQAAGSTNDNH

SEQ ID NO: 46971 - protein, 12 aa, synthetic construct
SSQAAGSTNDNT

SEQ ID NO: 46972 - protein, 12 aa, synthetic construct
SSQAGAASNDNA

SEQ ID NO: 46973 - protein, 12 aa, synthetic construct
SSQAGAASNDNH

SEQ ID NO: 46974 - protein, 12 aa, synthetic construct
SSQAGAASNDNT

SEQ ID NO: 46975 - protein, 12 aa, synthetic construct
SSQAGAATNDNA

SEQ ID NO: 46976 - protein, 12 aa, synthetic construct
SSQAGAATNDNH

SEQ ID NO: 46977 - protein, 12 aa, synthetic construct
SSQAGAATNDNT

SEQ ID NO: 46978 - protein, 12 aa, synthetic construct
SSQAGASSNDNA

SEQ ID NO: 46979 - protein, 12 aa, synthetic construct
SSQAGASSNDNH

SEQ ID NO: 46980 - protein, 12 aa, synthetic construct
SSQAGASSNDNT

SEQ ID NO: 46981 - protein, 12 aa, synthetic construct
SSQAGASTNDNA

SEQ ID NO: 46982 - protein, 12 aa, synthetic construct
SSQAGASTNDNH

SEQ ID NO: 46983 - protein, 12 aa, synthetic construct
SSQAGASTNDNT

SEQ ID NO: 46984 - protein, 12 aa, synthetic construct
SSQAGGASNDNA

SEQ ID NO: 46985 - protein, 12 aa, synthetic construct
SSQAGGASNDNH

SEQ ID NO: 46986 - protein, 12 aa, synthetic construct
SSQAGGASNDNT

SEQ ID NO: 46987 - protein, 12 aa, synthetic construct
SSQAGGATNDNA

SEQ ID NO: 46988 - protein, 12 aa, synthetic construct
SSQAGGATNDNH

SEQ ID NO: 46989 - protein, 12 aa, synthetic construct
SSQAGGATNDNT

SEQ ID NO: 46990 - protein, 12 aa, synthetic construct
SSQAGGSSNDNA

SEQ ID NO: 46991 - protein, 12 aa, synthetic construct
SSQAGGSSNDNH

SEQ ID NO: 46992 - protein, 12 aa, synthetic construct
SSQAGGSSNDNT

SEQ ID NO: 46993 - protein, 12 aa, synthetic construct
SSQAGGSTNDNA

SEQ ID NO: 46994 - protein, 12 aa, synthetic construct
SSQAGGSTNDNH

SEQ ID NO: 46995 - protein, 12 aa, synthetic construct
SSQAGGSTNDNT

SEQ ID NO: 46996 - protein, 12 aa, synthetic construct
SSQSAAASNDNA

SEQ ID NO: 46997 - protein, 12 aa, synthetic construct
SSQSAAASNDNH

SEQ ID NO: 46998 - protein, 12 aa, synthetic construct
SSQSAAASNDNT

SEQ ID NO: 46999 - protein, 12 aa, synthetic construct
SSQSAAATNDNA

SEQ ID NO: 47000 - protein, 12 aa, synthetic construct
SSQSAAATNDNH

SEQ ID NO: 47001 - protein, 12 aa, synthetic construct
SSQSAAATNDNT

SEQ ID NO: 47002 - protein, 12 aa, synthetic construct
SSQSAASSNDNA

SEQ ID NO: 47003 - protein, 12 aa, synthetic construct
SSQSAASSNDNH

SEQ ID NO: 47004 - protein, 12 aa, synthetic construct
SSQSAASSNDNT

SEQ ID NO: 47005 - protein, 12 aa, synthetic construct
SSQSAASTNDNA

SEQ ID NO: 47006 - protein, 12 aa, synthetic construct
SSQSAASTNDNH

SEQ ID NO: 47007 - protein, 12 aa, synthetic construct
SSQSAASTNDNT

SEQ ID NO: 47008 - protein, 12 aa, synthetic construct
SSQSAGASNDNA

SEQ ID NO: 47009 - protein, 12 aa, synthetic construct
SSQSAGASNDNH

SEQ ID NO: 47010 - protein, 12 aa, synthetic construct
SSQSAGASNDNT

SEQ ID NO: 47011 - protein, 12 aa, synthetic construct
SSQSAGATNDNA

SEQ ID NO: 47012 - protein, 12 aa, synthetic construct
SSQSAGATNDNH

SEQ ID NO: 47013 - protein, 12 aa, synthetic construct
SSQSAGATNDNT

SEQ ID NO: 47014 - protein, 12 aa, synthetic construct
SSQSAGSSNDNA

SEQ ID NO: 47015 - protein, 12 aa, synthetic construct
SSQSAGSSNDNH

SEQ ID NO: 47016 - protein, 12 aa, synthetic construct
SSQSAGSSNDNT

SEQ ID NO: 47017 - protein, 12 aa, synthetic construct
SSQSAGSTNDNA

SEQ ID NO: 47018 - protein, 12 aa, synthetic construct
SSQSAGSTNDNH

SEQ ID NO: 47019 - protein, 12 aa, synthetic construct
SSQSAGSTNDNT

SEQ ID NO: 47020 - protein, 12 aa, synthetic construct
SSQSGAASNDNA

SEQ ID NO: 47021 - protein, 12 aa, synthetic construct
SSQSGAASNDNH

SEQ ID NO: 47022 - protein, 12 aa, synthetic construct
SSQSGAASNDNT

SEQ ID NO: 47023 - protein, 12 aa, synthetic construct
SSQSGAATNDNA

SEQ ID NO: 47024 - protein, 12 aa, synthetic construct
SSQSGAATNDNH

SEQ ID NO: 47025 - protein, 12 aa, synthetic construct
SSQSGAATNDNT

SEQ ID NO: 47026 - protein, 12 aa, synthetic construct
SSQSGASSNDNA

SEQ ID NO: 47027 - protein, 12 aa, synthetic construct
SSQSGASSNDNH

SEQ ID NO: 47028 - protein, 12 aa, synthetic construct
SSQSGASSNDNT

SEQ ID NO: 47029 - protein, 12 aa, synthetic construct
SSQSGASTNDNA

SEQ ID NO: 47030 - protein, 12 aa, synthetic construct
SSQSGASTNDNH

SEQ ID NO: 47031 - protein, 12 aa, synthetic construct
SSQSGASTNDNT

SEQ ID NO: 47032 - protein, 12 aa, synthetic construct
SSQSGGASNDNA

SEQ ID NO: 47033 - protein, 12 aa, synthetic construct
SSQSGGASNDNH

SEQ ID NO: 47034 - protein, 12 aa, synthetic construct
SSQSGGASNDNT

SEQ ID NO: 47035 - protein, 12 aa, synthetic construct
SSQSGGATNDNA

SEQ ID NO: 47036 - protein, 12 aa, synthetic construct
SSQSGGATNDNH

SEQ ID NO: 47037 - protein, 12 aa, synthetic construct
SSQSGGATNDNT

SEQ ID NO: 47038 - protein, 12 aa, synthetic construct
SSQSGGSSNDNA

SEQ ID NO: 47039 - protein, 12 aa, synthetic construct
SSQSGGSSNDNH

SEQ ID NO: 47040 - protein, 12 aa, synthetic construct
SSQSGGSSNDNT

SEQ ID NO: 47041 - protein, 12 aa, synthetic construct
SSQSGGSTNDNA

SEQ ID NO: 47042 - protein, 12 aa, synthetic construct
SSQSGGSTNDNH

SEQ ID NO: 47043 - protein, 12 aa, synthetic construct
SSQSGGSTNDNT

SEQ ID NO: 47044 - protein, 12 aa, synthetic construct
SSQTAAASNDNA

SEQ ID NO: 47045 - protein, 12 aa, synthetic construct
SSQTAAASNDNH

SEQ ID NO: 47046 - protein, 12 aa, synthetic construct
SSQTAAASNDNT

SEQ ID NO: 47047 - protein, 12 aa, synthetic construct
SSQTAAATNDNA

SEQ ID NO: 47048 - protein, 12 aa, synthetic construct
SSQTAAATNDNH

SEQ ID NO: 47049 - protein, 12 aa, synthetic construct
SSQTAAATNDNT

SEQ ID NO: 47050 - protein, 12 aa, synthetic construct
SSQTAASSNDNA

SEQ ID NO: 47051 - protein, 12 aa, synthetic construct
SSQTAASSNDNH

SEQ ID NO: 47052 - protein, 12 aa, synthetic construct
SSQTAASSNDNT

SEQ ID NO: 47053 - protein, 12 aa, synthetic construct
SSQTAASTNDNA

SEQ ID NO: 47054 - protein, 12 aa, synthetic construct
SSQTAASTNDNH

SEQ ID NO: 47055 - protein, 12 aa, synthetic construct
SSQTAASTNDNT

SEQ ID NO: 47056 - protein, 12 aa, synthetic construct
SSQTAGASNDNA

SEQ ID NO: 47057 - protein, 12 aa, synthetic construct
SSQTAGASNDNH

SEQ ID NO: 47058 - protein, 12 aa, synthetic construct
SSQTAGASNDNT

SEQ ID NO: 47059 - protein, 12 aa, synthetic construct
SSQTAGATNDNA

SEQ ID NO: 47060 - protein, 12 aa, synthetic construct
SSQTAGATNDNH

SEQ ID NO: 47061 - protein, 12 aa, synthetic construct
SSQTAGATNDNT

SEQ ID NO: 47062 - protein, 12 aa, synthetic construct
SSQTAGSSNDNA

SEQ ID NO: 47063 - protein, 12 aa, synthetic construct
SSQTAGSSNDNH

SEQ ID NO: 47064 - protein, 12 aa, synthetic construct
SSQTAGSSNDNT

SEQ ID NO: 47065 - protein, 12 aa, synthetic construct
SSQTAGSTNDNA

SEQ ID NO: 47066 - protein, 12 aa, synthetic construct
SSQTAGSTNDNH

SEQ ID NO: 47067 - protein, 12 aa, synthetic construct
SSQTAGSTNDNT

SEQ ID NO: 47068 - protein, 12 aa, synthetic construct
SSQTGAASNDNA

SEQ ID NO: 47069 - protein, 12 aa, synthetic construct
SSQTGAASNDNH

SEQ ID NO: 47070 - protein, 12 aa, synthetic construct
SSQTGAASNDNT

SEQ ID NO: 47071 - protein, 12 aa, synthetic construct
SSQTGAATNDNA

SEQ ID NO: 47072 - protein, 12 aa, synthetic construct
SSQTGAATNDNH

SEQ ID NO: 47073 - protein, 12 aa, synthetic construct
SSQTGAATNDNT

SEQ ID NO: 47074 - protein, 12 aa, synthetic construct
SSQTGASSNDNA

SEQ ID NO: 47075 - protein, 12 aa, synthetic construct
SSQTGASSNDNH

SEQ ID NO: 47076 - protein, 12 aa, synthetic construct
SSQTGASSNDNT

SEQ ID NO: 47077 - protein, 12 aa, synthetic construct
SSQTGASTNDNA

SEQ ID NO: 47078 - protein, 12 aa, synthetic construct
SSQTGASTNDNH

SEQ ID NO: 47079 - protein, 12 aa, synthetic construct
SSQTGASTNDNT

SEQ ID NO: 47080 - protein, 12 aa, synthetic construct
SSQTGGASNDNA

SEQ ID NO: 47081 - protein, 12 aa, synthetic construct
SSQTGGASNDNH

SEQ ID NO: 47082 - protein, 12 aa, synthetic construct
SSQTGGASNDNT

SEQ ID NO: 47083 - protein, 12 aa, synthetic construct
SSQTGGATNDNA

SEQ ID NO: 47084 - protein, 12 aa, synthetic construct
SSQTGGATNDNH

SEQ ID NO: 47085 - protein, 12 aa, synthetic construct
SSQTGGATNDNT

SEQ ID NO: 47086 - protein, 12 aa, synthetic construct
SSQTGGSSNDNA

SEQ ID NO: 47087 - protein, 12 aa, synthetic construct
SSQTGGSSNDNH

SEQ ID NO: 47088 - protein, 12 aa, synthetic construct
SSQTGGSSNDNT

SEQ ID NO: 47089 - protein, 12 aa, synthetic construct
SSQTGGSTNDNA

SEQ ID NO: 47090 - protein, 12 aa, synthetic construct
SSQTGGSTNDNH

SEQ ID NO: 47091 - protein, 12 aa, synthetic construct
SSQTGGSTNDNT

SEQ ID NO: 47092 - protein, 12 aa, synthetic construct
SSTAAAASNDNA

SEQ ID NO: 47093 - protein, 12 aa, synthetic construct
SSTAAAASNDNH

SEQ ID NO: 47094 - protein, 12 aa, synthetic construct
SSTAAAASNDNT

SEQ ID NO: 47095 - protein, 12 aa, synthetic construct
SSTAAAATNDNA

SEQ ID NO: 47096 - protein, 12 aa, synthetic construct
SSTAAAATNDNH

SEQ ID NO: 47097 - protein, 12 aa, synthetic construct
SSTAAAATNDNT

SEQ ID NO: 47098 - protein, 12 aa, synthetic construct
SSTAAASSNDNA

SEQ ID NO: 47099 - protein, 12 aa, synthetic construct
SSTAAASSNDNH

SEQ ID NO: 47100 - protein, 12 aa, synthetic construct
SSTAAASSNDNT

SEQ ID NO: 47101 - protein, 12 aa, synthetic construct
SSTAAASTNDNA

SEQ ID NO: 47102 - protein, 12 aa, synthetic construct
SSTAAASTNDNH

SEQ ID NO: 47103 - protein, 12 aa, synthetic construct
SSTAAASTNDNT

SEQ ID NO: 47104 - protein, 12 aa, synthetic construct
SSTAAGASNDNA

SEQ ID NO: 47105 - protein, 12 aa, synthetic construct
SSTAAGASNDNH

SEQ ID NO: 47106 - protein, 12 aa, synthetic construct
SSTAAGASNDNT

SEQ ID NO: 47107 - protein, 12 aa, synthetic construct
SSTAAGATNDNA

SEQ ID NO: 47108 - protein, 12 aa, synthetic construct
SSTAAGATNDNH

SEQ ID NO: 47109 - protein, 12 aa, synthetic construct
SSTAAGATNDNT

SEQ ID NO: 47110 - protein, 12 aa, synthetic construct
SSTAAGSSNDNA

SEQ ID NO: 47111 - protein, 12 aa, synthetic construct
SSTAAGSSNDNH

SEQ ID NO: 47112 - protein, 12 aa, synthetic construct
SSTAAGSSNDNT

SEQ ID NO: 47113 - protein, 12 aa, synthetic construct
SSTAAGSTNDNA

SEQ ID NO: 47114 - protein, 12 aa, synthetic construct
SSTAAGSTNDNH

SEQ ID NO: 47115 - protein, 12 aa, synthetic construct
SSTAAGSTNDNT

SEQ ID NO: 47116 - protein, 12 aa, synthetic construct
SSTAGAASNDNA

SEQ ID NO: 47117 - protein, 12 aa, synthetic construct
SSTAGAASNDNH

SEQ ID NO: 47118 - protein, 12 aa, synthetic construct
SSTAGAASNDNT

SEQ ID NO: 47119 - protein, 12 aa, synthetic construct
SSTAGAATNDNA

SEQ ID NO: 47120 - protein, 12 aa, synthetic construct
SSTAGAATNDNH

SEQ ID NO: 47121 - protein, 12 aa, synthetic construct
SSTAGAATNDNT

SEQ ID NO: 47122 - protein, 12 aa, synthetic construct
SSTAGASSNDNA

SEQ ID NO: 47123 - protein, 12 aa, synthetic construct
SSTAGASSNDNH

SEQ ID NO: 47124 - protein, 12 aa, synthetic construct
SSTAGASSNDNT

SEQ ID NO: 47125 - protein, 12 aa, synthetic construct
SSTAGASTNDNA

SEQ ID NO: 47126 - protein, 12 aa, synthetic construct
SSTAGASTNDNH

SEQ ID NO: 47127 - protein, 12 aa, synthetic construct
SSTAGASTNDNT

SEQ ID NO: 47128 - protein, 12 aa, synthetic construct
SSTAGGASNDNA

SEQ ID NO: 47129 - protein, 12 aa, synthetic construct
SSTAGGASNDNH

SEQ ID NO: 47130 - protein, 12 aa, synthetic construct
SSTAGGASNDNT

SEQ ID NO: 47131 - protein, 12 aa, synthetic construct
SSTAGGATNDNA

SEQ ID NO: 47132 - protein, 12 aa, synthetic construct
SSTAGGATNDNH

SEQ ID NO: 47133 - protein, 12 aa, synthetic construct
SSTAGGATNDNT

SEQ ID NO: 47134 - protein, 12 aa, synthetic construct
SSTAGGSSNDNA

SEQ ID NO: 47135 - protein, 12 aa, synthetic construct
SSTAGGSSNDNH

SEQ ID NO: 47136 - protein, 12 aa, synthetic construct
SSTAGGSSNDNT

SEQ ID NO: 47137 - protein, 12 aa, synthetic construct
SSTAGGSTNDNA

SEQ ID NO: 47138 - protein, 12 aa, synthetic construct
SSTAGGSTNDNH

SEQ ID NO: 47139 - protein, 12 aa, synthetic construct
SSTAGGSTNDNT

SEQ ID NO: 47140 - protein, 12 aa, synthetic construct
SSTSAAASNDNA

SEQ ID NO: 47141 - protein, 12 aa, synthetic construct
SSTSAAASNDNH

SEQ ID NO: 47142 - protein, 12 aa, synthetic construct
SSTSAAASNDNT

SEQ ID NO: 47143 - protein, 12 aa, synthetic construct
SSTSAAATNDNA

SEQ ID NO: 47144 - protein, 12 aa, synthetic construct
SSTSAAATNDNH

SEQ ID NO: 47145 - protein, 12 aa, synthetic construct
SSTSAAATNDNT

SEQ ID NO: 47146 - protein, 12 aa, synthetic construct
SSTSAASSNDNA

SEQ ID NO: 47147 - protein, 12 aa, synthetic construct
SSTSAASSNDNH

SEQ ID NO: 47148 - protein, 12 aa, synthetic construct
SSTSAASSNDNT

SEQ ID NO: 47149 - protein, 12 aa, synthetic construct
SSTSAASTNDNA

SEQ ID NO: 47150 - protein, 12 aa, synthetic construct
SSTSAASTNDNH

SEQ ID NO: 47151 - protein, 12 aa, synthetic construct
SSTSAASTNDNT

SEQ ID NO: 47152 - protein, 12 aa, synthetic construct
SSTSAGASNDNA

SEQ ID NO: 47153 - protein, 12 aa, synthetic construct
SSTSAGASNDNH

SEQ ID NO: 47154 - protein, 12 aa, synthetic construct
SSTSAGASNDNT

SEQ ID NO: 47155 - protein, 12 aa, synthetic construct
SSTSAGATNDNA

SEQ ID NO: 47156 - protein, 12 aa, synthetic construct
SSTSAGATNDNH

SEQ ID NO: 47157 - protein, 12 aa, synthetic construct
SSTSAGATNDNT

SEQ ID NO: 47158 - protein, 12 aa, synthetic construct
SSTSAGSSNDNA

SEQ ID NO: 47159 - protein, 12 aa, synthetic construct
SSTSAGSSNDNH

SEQ ID NO: 47160 - protein, 12 aa, synthetic construct
SSTSAGSSNDNT

SEQ ID NO: 47161 - protein, 12 aa, synthetic construct
SSTSAGSTNDNA

SEQ ID NO: 47162 - protein, 12 aa, synthetic construct
SSTSAGSTNDNH

SEQ ID NO: 47163 - protein, 12 aa, synthetic construct
SSTSAGSTNDNT

SEQ ID NO: 47164 - protein, 12 aa, synthetic construct
SSTSGAASNDNA

SEQ ID NO: 47165 - protein, 12 aa, synthetic construct
SSTSGAASNDNH

SEQ ID NO: 47166 - protein, 12 aa, synthetic construct
SSTSGAASNDNT

SEQ ID NO: 47167 - protein, 12 aa, synthetic construct
SSTSGAATNDNA

SEQ ID NO: 47168 - protein, 12 aa, synthetic construct
SSTSGAATNDNH

SEQ ID NO: 47169 - protein, 12 aa, synthetic construct
SSTSGAATNDNT

SEQ ID NO: 47170 - protein, 12 aa, synthetic construct
SSTSGASSNDNA

SEQ ID NO: 47171 - protein, 12 aa, synthetic construct
SSTSGASSNDNH

SEQ ID NO: 47172 - protein, 12 aa, synthetic construct
SSTSGASSNDNT

SEQ ID NO: 47173 - protein, 12 aa, synthetic construct
SSTSGASTNDNA

SEQ ID NO: 47174 - protein, 12 aa, synthetic construct
SSTSGASTNDNH

SEQ ID NO: 47175 - protein, 12 aa, synthetic construct
SSTSGASTNDNT

SEQ ID NO: 47176 - protein, 12 aa, synthetic construct
SSTSGGASNDNA

SEQ ID NO: 47177 - protein, 12 aa, synthetic construct
SSTSGGASNDNH

SEQ ID NO: 47178 - protein, 12 aa, synthetic construct
SSTSGGASNDNT

SEQ ID NO: 47179 - protein, 12 aa, synthetic construct
SSTSGGATNDNA

SEQ ID NO: 47180 - protein, 12 aa, synthetic construct
SSTSGGATNDNH

SEQ ID NO: 47181 - protein, 12 aa, synthetic construct
SSTSGGATNDNT

SEQ ID NO: 47182 - protein, 12 aa, synthetic construct
SSTSGGSSNDNA

SEQ ID NO: 47183 - protein, 12 aa, synthetic construct
SSTSGGSSNDNH

SEQ ID NO: 47184 - protein, 12 aa, synthetic construct
SSTSGGSSNDNT

SEQ ID NO: 47185 - protein, 12 aa, synthetic construct
SSTSGGSTNDNA

SEQ ID NO: 47186 - protein, 12 aa, synthetic construct
SSTSGGSTNDNH

SEQ ID NO: 47187 - protein, 12 aa, synthetic construct
SSTSGGSTNDNT

SEQ ID NO: 47188 - protein, 12 aa, synthetic construct
SSTTAAASNDNA

SEQ ID NO: 47189 - protein, 12 aa, synthetic construct
SSTTAAASNDNH

SEQ ID NO: 47190 - protein, 12 aa, synthetic construct
SSTTAAASNDNT

SEQ ID NO: 47191 - protein, 12 aa, synthetic construct
SSTTAAATNDNA

SEQ ID NO: 47192 - protein, 12 aa, synthetic construct
SSTTAAATNDNH

SEQ ID NO: 47193 - protein, 12 aa, synthetic construct
SSTTAAATNDNT

SEQ ID NO: 47194 - protein, 12 aa, synthetic construct
SSTTAASSNDNA

SEQ ID NO: 47195 - protein, 12 aa, synthetic construct
SSTTAASSNDNH

SEQ ID NO: 47196 - protein, 12 aa, synthetic construct
SSTTAASSNDNT

SEQ ID NO: 47197 - protein, 12 aa, synthetic construct
SSTTAASTNDNA

SEQ ID NO: 47198 - protein, 12 aa, synthetic construct
SSTTAASTNDNH

SEQ ID NO: 47199 - protein, 12 aa, synthetic construct
SSTTAASTNDNT

SEQ ID NO: 47200 - protein, 12 aa, synthetic construct
SSTTAGASNDNA

SEQ ID NO: 47201 - protein, 12 aa, synthetic construct
SSTTAGASNDNH

SEQ ID NO: 47202 - protein, 12 aa, synthetic construct
SSTTAGASNDNT

SEQ ID NO: 47203 - protein, 12 aa, synthetic construct
SSTTAGATNDNA

SEQ ID NO: 47204 - protein, 12 aa, synthetic construct
SSTTAGATNDNH

SEQ ID NO: 47205 - protein, 12 aa, synthetic construct
SSTTAGATNDNT

SEQ ID NO: 47206 - protein, 12 aa, synthetic construct
SSTTAGSSNDNA

SEQ ID NO: 47207 - protein, 12 aa, synthetic construct
SSTTAGSSNDNH

SEQ ID NO: 47208 - protein, 12 aa, synthetic construct
SSTTAGSSNDNT

SEQ ID NO: 47209 - protein, 12 aa, synthetic construct
SSTTAGSTNDNA

SEQ ID NO: 47210 - protein, 12 aa, synthetic construct
SSTTAGSTNDNH

SEQ ID NO: 47211 - protein, 12 aa, synthetic construct
SSTTAGSTNDNT

SEQ ID NO: 47212 - protein, 12 aa, synthetic construct
SSTTGAASNDNA

SEQ ID NO: 47213 - protein, 12 aa, synthetic construct
SSTTGAASNDNH

SEQ ID NO: 47214 - protein, 12 aa, synthetic construct
SSTTGAASNDNT

SEQ ID NO: 47215 - protein, 12 aa, synthetic construct
SSTTGAATNDNA

SEQ ID NO: 47216 - protein, 12 aa, synthetic construct
SSTTGAATNDNH

SEQ ID NO: 47217 - protein, 12 aa, synthetic construct
SSTTGAATNDNT

SEQ ID NO: 47218 - protein, 12 aa, synthetic construct
SSTTGASSNDNA

SEQ ID NO: 47219 - protein, 12 aa, synthetic construct
SSTTGASSNDNH

SEQ ID NO: 47220 - protein, 12 aa, synthetic construct
SSTTGASSNDNT

SEQ ID NO: 47221 - protein, 12 aa, synthetic construct
SSTTGASTNDNA

SEQ ID NO: 47222 - protein, 12 aa, synthetic construct
SSTTGASTNDNH

SEQ ID NO: 47223 - protein, 12 aa, synthetic construct
SSTTGASTNDNT

SEQ ID NO: 47224 - protein, 12 aa, synthetic construct
SSTTGGASNDNA

SEQ ID NO: 47225 - protein, 12 aa, synthetic construct
SSTTGGASNDNH

SEQ ID NO: 47226 - protein, 12 aa, synthetic construct
SSTTGGASNDNT

SEQ ID NO: 47227 - protein, 12 aa, synthetic construct
SSTTGGATNDNA

SEQ ID NO: 47228 - protein, 12 aa, synthetic construct
SSTTGGATNDNH

SEQ ID NO: 47229 - protein, 12 aa, synthetic construct
SSTTGGATNDNT

SEQ ID NO: 47230 - protein, 12 aa, synthetic construct
SSTTGGSSNDNA

SEQ ID NO: 47231 - protein, 12 aa, synthetic construct
SSTTGGSSNDNH

SEQ ID NO: 47232 - protein, 12 aa, synthetic construct
SSTTGGSSNDNT

SEQ ID NO: 47233 - protein, 12 aa, synthetic construct
SSTTGGSTNDNA

SEQ ID NO: 47234 - protein, 12 aa, synthetic construct
SSTTGGSTNDNH

SEQ ID NO: 47235 - protein, 12 aa, synthetic construct
SSTTGGSTNDNT

SEQ ID NO: 47236 - protein, 12 aa, synthetic construct
TGAAAAASNDNA

SEQ ID NO: 47237 - protein, 12 aa, synthetic construct
TGAAAAASNDNH

SEQ ID NO: 47238 - protein, 12 aa, synthetic construct
TGAAAAASNDNT

SEQ ID NO: 47239 - protein, 12 aa, synthetic construct
TGAAAAATNDNA

SEQ ID NO: 47240 - protein, 12 aa, synthetic construct
TGAAAAATNDNH

SEQ ID NO: 47241 - protein, 12 aa, synthetic construct
TGAAAAATNDNT

SEQ ID NO: 47242 - protein, 12 aa, synthetic construct
TGAAAASSNDNA

SEQ ID NO: 47243 - protein, 12 aa, synthetic construct
TGAAAASSNDNH

SEQ ID NO: 47244 - protein, 12 aa, synthetic construct
TGAAAASSNDNT

SEQ ID NO: 47245 - protein, 12 aa, synthetic construct
TGAAAASTNDNA

SEQ ID NO: 47246 - protein, 12 aa, synthetic construct
TGAAAASTNDNH

SEQ ID NO: 47247 - protein, 12 aa, synthetic construct
TGAAAASTNDNT

SEQ ID NO: 47248 - protein, 12 aa, synthetic construct
TGAAAGASNDNA

SEQ ID NO: 47249 - protein, 12 aa, synthetic construct
TGAAAGASNDNH

SEQ ID NO: 47250 - protein, 12 aa, synthetic construct
TGAAAGASNDNT

SEQ ID NO: 47251 - protein, 12 aa, synthetic construct
TGAAAGATNDNA

SEQ ID NO: 47252 - protein, 12 aa, synthetic construct
TGAAAGATNDNH

SEQ ID NO: 47253 - protein, 12 aa, synthetic construct
TGAAAGATNDNT

SEQ ID NO: 47254 - protein, 12 aa, synthetic construct
TGAAAGSSNDNA

SEQ ID NO: 47255 - protein, 12 aa, synthetic construct
TGAAAGSSNDNH

SEQ ID NO: 47256 - protein, 12 aa, synthetic construct
TGAAAGSSNDNT

SEQ ID NO: 47257 - protein, 12 aa, synthetic construct
TGAAAGSTNDNA

SEQ ID NO: 47258 - protein, 12 aa, synthetic construct
TGAAAGSTNDNH

SEQ ID NO: 47259 - protein, 12 aa, synthetic construct
TGAAAGSTNDNT

SEQ ID NO: 47260 - protein, 12 aa, synthetic construct
TGAAGAASNDNA

SEQ ID NO: 47261 - protein, 12 aa, synthetic construct
TGAAGAASNDNH

SEQ ID NO: 47262 - protein, 12 aa, synthetic construct
TGAAGAASNDNT

SEQ ID NO: 47263 - protein, 12 aa, synthetic construct
TGAAGAATNDNA

SEQ ID NO: 47264 - protein, 12 aa, synthetic construct
TGAAGAATNDNH

SEQ ID NO: 47265 - protein, 12 aa, synthetic construct
TGAAGAATNDNT

SEQ ID NO: 47266 - protein, 12 aa, synthetic construct
TGAAGASSNDNA

SEQ ID NO: 47267 - protein, 12 aa, synthetic construct
TGAAGASSNDNH

SEQ ID NO: 47268 - protein, 12 aa, synthetic construct
TGAAGASSNDNT

SEQ ID NO: 47269 - protein, 12 aa, synthetic construct
TGAAGASTNDNA

SEQ ID NO: 47270 - protein, 12 aa, synthetic construct
TGAAGASTNDNH

SEQ ID NO: 47271 - protein, 12 aa, synthetic construct
TGAAGASTNDNT

SEQ ID NO: 47272 - protein, 12 aa, synthetic construct
TGAAGGASNDNA

SEQ ID NO: 47273 - protein, 12 aa, synthetic construct
TGAAGGASNDNH

SEQ ID NO: 47274 - protein, 12 aa, synthetic construct
TGAAGGASNDNT

SEQ ID NO: 47275 - protein, 12 aa, synthetic construct
TGAAGGATNDNA

SEQ ID NO: 47276 - protein, 12 aa, synthetic construct
TGAAGGATNDNH

SEQ ID NO: 47277 - protein, 12 aa, synthetic construct
TGAAGGATNDNT

SEQ ID NO: 47278 - protein, 12 aa, synthetic construct
TGAAGGSSNDNA

SEQ ID NO: 47279 - protein, 12 aa, synthetic construct
TGAAGGSSNDNH

SEQ ID NO: 47280 - protein, 12 aa, synthetic construct
TGAAGGSSNDNT

SEQ ID NO: 47281 - protein, 12 aa, synthetic construct
TGAAGGSTNDNA

SEQ ID NO: 47282 - protein, 12 aa, synthetic construct
TGAAGGSTNDNH

SEQ ID NO: 47283 - protein, 12 aa, synthetic construct
TGAAGGSTNDNT

SEQ ID NO: 47284 - protein, 12 aa, synthetic construct
TGASAAASNDNA

SEQ ID NO: 47285 - protein, 12 aa, synthetic construct
TGASAAASNDNH

SEQ ID NO: 47286 - protein, 12 aa, synthetic construct
TGASAAASNDNT

SEQ ID NO: 47287 - protein, 12 aa, synthetic construct
TGASAAATNDNA

SEQ ID NO: 47288 - protein, 12 aa, synthetic construct
TGASAAATNDNH

SEQ ID NO: 47289 - protein, 12 aa, synthetic construct
TGASAAATNDNT

SEQ ID NO: 47290 - protein, 12 aa, synthetic construct
TGASAASSNDNA

SEQ ID NO: 47291 - protein, 12 aa, synthetic construct
TGASAASSNDNH

SEQ ID NO: 47292 - protein, 12 aa, synthetic construct
TGASAASSNDNT

SEQ ID NO: 47293 - protein, 12 aa, synthetic construct
TGASAASTNDNA

SEQ ID NO: 47294 - protein, 12 aa, synthetic construct
TGASAASTNDNH

SEQ ID NO: 47295 - protein, 12 aa, synthetic construct
TGASAASTNDNT

SEQ ID NO: 47296 - protein, 12 aa, synthetic construct
TGASAGASNDNA

SEQ ID NO: 47297 - protein, 12 aa, synthetic construct
TGASAGASNDNH

SEQ ID NO: 47298 - protein, 12 aa, synthetic construct
TGASAGASNDNT

SEQ ID NO: 47299 - protein, 12 aa, synthetic construct
TGASAGATNDNA

SEQ ID NO: 47300 - protein, 12 aa, synthetic construct
TGASAGATNDNH

SEQ ID NO: 47301 - protein, 12 aa, synthetic construct
TGASAGATNDNT

SEQ ID NO: 47302 - protein, 12 aa, synthetic construct
TGASAGSSNDNA

SEQ ID NO: 47303 - protein, 12 aa, synthetic construct
TGASAGSSNDNH

SEQ ID NO: 47304 - protein, 12 aa, synthetic construct
TGASAGSSNDNT

SEQ ID NO: 47305 - protein, 12 aa, synthetic construct
TGASAGSTNDNA

SEQ ID NO: 47306 - protein, 12 aa, synthetic construct
TGASAGSTNDNH

SEQ ID NO: 47307 - protein, 12 aa, synthetic construct
TGASAGSTNDNT

SEQ ID NO: 47308 - protein, 12 aa, synthetic construct
TGASGAASNDNA

SEQ ID NO: 47309 - protein, 12 aa, synthetic construct
TGASGAASNDNH

SEQ ID NO: 47310 - protein, 12 aa, synthetic construct
TGASGAASNDNT

SEQ ID NO: 47311 - protein, 12 aa, synthetic construct
TGASGAATNDNA

SEQ ID NO: 47312 - protein, 12 aa, synthetic construct
TGASGAATNDNH

SEQ ID NO: 47313 - protein, 12 aa, synthetic construct
TGASGAATNDNT

SEQ ID NO: 47314 - protein, 12 aa, synthetic construct
TGASGASSNDNA

SEQ ID NO: 47315 - protein, 12 aa, synthetic construct
TGASGASSNDNH

SEQ ID NO: 47316 - protein, 12 aa, synthetic construct
TGASGASSNDNT

SEQ ID NO: 47317 - protein, 12 aa, synthetic construct
TGASGASTNDNA

SEQ ID NO: 47318 - protein, 12 aa, synthetic construct
TGASGASTNDNH

SEQ ID NO: 47319 - protein, 12 aa, synthetic construct
TGASGASTNDNT

SEQ ID NO: 47320 - protein, 12 aa, synthetic construct
TGASGGASNDNA

SEQ ID NO: 47321 - protein, 12 aa, synthetic construct
TGASGGASNDNH

SEQ ID NO: 47322 - protein, 12 aa, synthetic construct
TGASGGASNDNT

SEQ ID NO: 47323 - protein, 12 aa, synthetic construct
TGASGGATNDNA

SEQ ID NO: 47324 - protein, 12 aa, synthetic construct
TGASGGATNDNH

SEQ ID NO: 47325 - protein, 12 aa, synthetic construct
TGASGGATNDNT

SEQ ID NO: 47326 - protein, 12 aa, synthetic construct
TGASGGSSNDNA

SEQ ID NO: 47327 - protein, 12 aa, synthetic construct
TGASGGSSNDNH

SEQ ID NO: 47328 - protein, 12 aa, synthetic construct
TGASGGSSNDNT

SEQ ID NO: 47329 - protein, 12 aa, synthetic construct
TGASGGSTNDNA

SEQ ID NO: 47330 - protein, 12 aa, synthetic construct
TGASGGSTNDNH

SEQ ID NO: 47331 - protein, 12 aa, synthetic construct
TGASGGSTNDNT

SEQ ID NO: 47332 - protein, 12 aa, synthetic construct
TGATAAASNDNA

SEQ ID NO: 47333 - protein, 12 aa, synthetic construct
TGATAAASNDNH

SEQ ID NO: 47334 - protein, 12 aa, synthetic construct
TGATAAASNDNT

SEQ ID NO: 47335 - protein, 12 aa, synthetic construct
TGATAAATNDNA

SEQ ID NO: 47336 - protein, 12 aa, synthetic construct
TGATAAATNDNH

SEQ ID NO: 47337 - protein, 12 aa, synthetic construct
TGATAAATNDNT

SEQ ID NO: 47338 - protein, 12 aa, synthetic construct
TGATAASSNDNA

SEQ ID NO: 47339 - protein, 12 aa, synthetic construct
TGATAASSNDNH

SEQ ID NO: 47340 - protein, 12 aa, synthetic construct
TGATAASSNDNT

SEQ ID NO: 47341 - protein, 12 aa, synthetic construct
TGATAASTNDNA

SEQ ID NO: 47342 - protein, 12 aa, synthetic construct
TGATAASTNDNH

SEQ ID NO: 47343 - protein, 12 aa, synthetic construct
TGATAASTNDNT

SEQ ID NO: 47344 - protein, 12 aa, synthetic construct
TGATAGASNDNA

SEQ ID NO: 47345 - protein, 12 aa, synthetic construct
TGATAGASNDNH

SEQ ID NO: 47346 - protein, 12 aa, synthetic construct
TGATAGASNDNT

SEQ ID NO: 47347 - protein, 12 aa, synthetic construct
TGATAGATNDNA

SEQ ID NO: 47348 - protein, 12 aa, synthetic construct
TGATAGATNDNH

SEQ ID NO: 47349 - protein, 12 aa, synthetic construct
TGATAGATNDNT

SEQ ID NO: 47350 - protein, 12 aa, synthetic construct
TGATAGSSNDNA

SEQ ID NO: 47351 - protein, 12 aa, synthetic construct
TGATAGSSNDNH

SEQ ID NO: 47352 - protein, 12 aa, synthetic construct
TGATAGSSNDNT

SEQ ID NO: 47353 - protein, 12 aa, synthetic construct
TGATAGSTNDNA

SEQ ID NO: 47354 - protein, 12 aa, synthetic construct
TGATAGSTNDNH

SEQ ID NO: 47355 - protein, 12 aa, synthetic construct
TGATAGSTNDNT

SEQ ID NO: 47356 - protein, 12 aa, synthetic construct
TGATGAASNDNA

SEQ ID NO: 47357 - protein, 12 aa, synthetic construct
TGATGAASNDNH

SEQ ID NO: 47358 - protein, 12 aa, synthetic construct
TGATGAASNDNT

SEQ ID NO: 47359 - protein, 12 aa, synthetic construct
TGATGAATNDNA

SEQ ID NO: 47360 - protein, 12 aa, synthetic construct
TGATGAATNDNH

SEQ ID NO: 47361 - protein, 12 aa, synthetic construct
TGATGAATNDNT

SEQ ID NO: 47362 - protein, 12 aa, synthetic construct
TGATGASSNDNA

SEQ ID NO: 47363 - protein, 12 aa, synthetic construct
TGATGASSNDNH

SEQ ID NO: 47364 - protein, 12 aa, synthetic construct
TGATGASSNDNT

SEQ ID NO: 47365 - protein, 12 aa, synthetic construct
TGATGASTNDNA

SEQ ID NO: 47366 - protein, 12 aa, synthetic construct
TGATGASTNDNH

SEQ ID NO: 47367 - protein, 12 aa, synthetic construct
TGATGASTNDNT

SEQ ID NO: 47368 - protein, 12 aa, synthetic construct
TGATGGASNDNA

SEQ ID NO: 47369 - protein, 12 aa, synthetic construct
TGATGGASNDNH

SEQ ID NO: 47370 - protein, 12 aa, synthetic construct
TGATGGASNDNT

SEQ ID NO: 47371 - protein, 12 aa, synthetic construct
TGATGGATNDNA

SEQ ID NO: 47372 - protein, 12 aa, synthetic construct
TGATGGATNDNH

SEQ ID NO: 47373 - protein, 12 aa, synthetic construct
TGATGGATNDNT

SEQ ID NO: 47374 - protein, 12 aa, synthetic construct
TGATGGSSNDNA

SEQ ID NO: 47375 - protein, 12 aa, synthetic construct
TGATGGSSNDNH

SEQ ID NO: 47376 - protein, 12 aa, synthetic construct
TGATGGSSNDNT

SEQ ID NO: 47377 - protein, 12 aa, synthetic construct
TGATGGSTNDNA

SEQ ID NO: 47378 - protein, 12 aa, synthetic construct
TGATGGSTNDNH

SEQ ID NO: 47379 - protein, 12 aa, synthetic construct
TGATGGSTNDNT

SEQ ID NO: 47380 - protein, 12 aa, synthetic construct
TGEAAAASNDNA

SEQ ID NO: 47381 - protein, 12 aa, synthetic construct
TGEAAAASNDNH

SEQ ID NO: 47382 - protein, 12 aa, synthetic construct
TGEAAAASNDNT

SEQ ID NO: 47383 - protein, 12 aa, synthetic construct
TGEAAAATNDNA

SEQ ID NO: 47384 - protein, 12 aa, synthetic construct
TGEAAAATNDNH

SEQ ID NO: 47385 - protein, 12 aa, synthetic construct
TGEAAAATNDNT

SEQ ID NO: 47386 - protein, 12 aa, synthetic construct
TGEAAASSNDNA

SEQ ID NO: 47387 - protein, 12 aa, synthetic construct
TGEAAASSNDNH

SEQ ID NO: 47388 - protein, 12 aa, synthetic construct
TGEAAASSNDNT

SEQ ID NO: 47389 - protein, 12 aa, synthetic construct
TGEAAASTNDNA

SEQ ID NO: 47390 - protein, 12 aa, synthetic construct
TGEAAASTNDNH

SEQ ID NO: 47391 - protein, 12 aa, synthetic construct
TGEAAASTNDNT

SEQ ID NO: 47392 - protein, 12 aa, synthetic construct
TGEAAGASNDNA

SEQ ID NO: 47393 - protein, 12 aa, synthetic construct
TGEAAGASNDNH

SEQ ID NO: 47394 - protein, 12 aa, synthetic construct
TGEAAGASNDNT

SEQ ID NO: 47395 - protein, 12 aa, synthetic construct
TGEAAGATNDNA

SEQ ID NO: 47396 - protein, 12 aa, synthetic construct
TGEAAGATNDNH

SEQ ID NO: 47397 - protein, 12 aa, synthetic construct
TGEAAGATNDNT

SEQ ID NO: 47398 - protein, 12 aa, synthetic construct
TGEAAGSSNDNA

SEQ ID NO: 47399 - protein, 12 aa, synthetic construct
TGEAAGSSNDNH

SEQ ID NO: 47400 - protein, 12 aa, synthetic construct
TGEAAGSSNDNT

SEQ ID NO: 47401 - protein, 12 aa, synthetic construct
TGEAAGSTNDNA

SEQ ID NO: 47402 - protein, 12 aa, synthetic construct
TGEAAGSTNDNH

SEQ ID NO: 47403 - protein, 12 aa, synthetic construct
TGEAAGSTNDNT

SEQ ID NO: 47404 - protein, 12 aa, synthetic construct
TGEAGAASNDNA

SEQ ID NO: 47405 - protein, 12 aa, synthetic construct
TGEAGAASNDNH

SEQ ID NO: 47406 - protein, 12 aa, synthetic construct
TGEAGAASNDNT

SEQ ID NO: 47407 - protein, 12 aa, synthetic construct
TGEAGAATNDNA

SEQ ID NO: 47408 - protein, 12 aa, synthetic construct
TGEAGAATNDNH

SEQ ID NO: 47409 - protein, 12 aa, synthetic construct
TGEAGAATNDNT

SEQ ID NO: 47410 - protein, 12 aa, synthetic construct
TGEAGASSNDNA

SEQ ID NO: 47411 - protein, 12 aa, synthetic construct
TGEAGASSNDNH

SEQ ID NO: 47412 - protein, 12 aa, synthetic construct
TGEAGASSNDNT

SEQ ID NO: 47413 - protein, 12 aa, synthetic construct
TGEAGASTNDNA

SEQ ID NO: 47414 - protein, 12 aa, synthetic construct
TGEAGASTNDNH

SEQ ID NO: 47415 - protein, 12 aa, synthetic construct
TGEAGASTNDNT

SEQ ID NO: 47416 - protein, 12 aa, synthetic construct
TGEAGGASNDNA

SEQ ID NO: 47417 - protein, 12 aa, synthetic construct
TGEAGGASNDNH

SEQ ID NO: 47418 - protein, 12 aa, synthetic construct
TGEAGGASNDNT

SEQ ID NO: 47419 - protein, 12 aa, synthetic construct
TGEAGGATNDNA

SEQ ID NO: 47420 - protein, 12 aa, synthetic construct
TGEAGGATNDNH

SEQ ID NO: 47421 - protein, 12 aa, synthetic construct
TGEAGGATNDNT

SEQ ID NO: 47422 - protein, 12 aa, synthetic construct
TGEAGGSSNDNA

SEQ ID NO: 47423 - protein, 12 aa, synthetic construct
TGEAGGSSNDNH

SEQ ID NO: 47424 - protein, 12 aa, synthetic construct
TGEAGGSSNDNT

SEQ ID NO: 47425 - protein, 12 aa, synthetic construct
TGEAGGSTNDNA

SEQ ID NO: 47426 - protein, 12 aa, synthetic construct
TGEAGGSTNDNH

SEQ ID NO: 47427 - protein, 12 aa, synthetic construct
TGEAGGSTNDNT

SEQ ID NO: 47428 - protein, 12 aa, synthetic construct
TGESAAASNDNA

SEQ ID NO: 47429 - protein, 12 aa, synthetic construct
TGESAAASNDNH

SEQ ID NO: 47430 - protein, 12 aa, synthetic construct
TGESAAASNDNT

SEQ ID NO: 47431 - protein, 12 aa, synthetic construct
TGESAAATNDNA

SEQ ID NO: 47432 - protein, 12 aa, synthetic construct
TGESAAATNDNH

SEQ ID NO: 47433 - protein, 12 aa, synthetic construct
TGESAAATNDNT

SEQ ID NO: 47434 - protein, 12 aa, synthetic construct
TGESAASSNDNA

SEQ ID NO: 47435 - protein, 12 aa, synthetic construct
TGESAASSNDNH

SEQ ID NO: 47436 - protein, 12 aa, synthetic construct
TGESAASSNDNT

SEQ ID NO: 47437 - protein, 12 aa, synthetic construct
TGESAASTNDNA

SEQ ID NO: 47438 - protein, 12 aa, synthetic construct
TGESAASTNDNH

SEQ ID NO: 47439 - protein, 12 aa, synthetic construct
TGESAASTNDNT

SEQ ID NO: 47440 - protein, 12 aa, synthetic construct
TGESAGASNDNA

SEQ ID NO: 47441 - protein, 12 aa, synthetic construct
TGESAGASNDNH

SEQ ID NO: 47442 - protein, 12 aa, synthetic construct
TGESAGASNDNT

SEQ ID NO: 47443 - protein, 12 aa, synthetic construct
TGESAGATNDNA

SEQ ID NO: 47444 - protein, 12 aa, synthetic construct
TGESAGATNDNH

SEQ ID NO: 47445 - protein, 12 aa, synthetic construct
TGESAGATNDNT

SEQ ID NO: 47446 - protein, 12 aa, synthetic construct
TGESAGSSNDNA

SEQ ID NO: 47447 - protein, 12 aa, synthetic construct
TGESAGSSNDNH

SEQ ID NO: 47448 - protein, 12 aa, synthetic construct
TGESAGSSNDNT

SEQ ID NO: 47449 - protein, 12 aa, synthetic construct
TGESAGSTNDNA

SEQ ID NO: 47450 - protein, 12 aa, synthetic construct
TGESAGSTNDNH

SEQ ID NO: 47451 - protein, 12 aa, synthetic construct
TGESAGSTNDNT

SEQ ID NO: 47452 - protein, 12 aa, synthetic construct
TGESGAASNDNA

SEQ ID NO: 47453 - protein, 12 aa, synthetic construct
TGESGAASNDNH

SEQ ID NO: 47454 - protein, 12 aa, synthetic construct
TGESGAASNDNT

SEQ ID NO: 47455 - protein, 12 aa, synthetic construct
TGESGAATNDNA

SEQ ID NO: 47456 - protein, 12 aa, synthetic construct
TGESGAATNDNH

SEQ ID NO: 47457 - protein, 12 aa, synthetic construct
TGESGAATNDNT

SEQ ID NO: 47458 - protein, 12 aa, synthetic construct
TGESGASSNDNA

SEQ ID NO: 47459 - protein, 12 aa, synthetic construct
TGESGASSNDNH

SEQ ID NO: 47460 - protein, 12 aa, synthetic construct
TGESGASSNDNT

SEQ ID NO: 47461 - protein, 12 aa, synthetic construct
TGESGASTNDNA

SEQ ID NO: 47462 - protein, 12 aa, synthetic construct
TGESGASTNDNH

SEQ ID NO: 47463 - protein, 12 aa, synthetic construct
TGESGASTNDNT

SEQ ID NO: 47464 - protein, 12 aa, synthetic construct
TGESGGASNDNA

SEQ ID NO: 47465 - protein, 12 aa, synthetic construct
TGESGGASNDNH

SEQ ID NO: 47466 - protein, 12 aa, synthetic construct
TGESGGASNDNT

SEQ ID NO: 47467 - protein, 12 aa, synthetic construct
TGESGGATNDNA

SEQ ID NO: 47468 - protein, 12 aa, synthetic construct
TGESGGATNDNH

SEQ ID NO: 47469 - protein, 12 aa, synthetic construct
TGESGGATNDNT

SEQ ID NO: 47470 - protein, 12 aa, synthetic construct
TGESGGSSNDNA

SEQ ID NO: 47471 - protein, 12 aa, synthetic construct
TGESGGSSNDNH

SEQ ID NO: 47472 - protein, 12 aa, synthetic construct
TGESGGSSNDNT

SEQ ID NO: 47473 - protein, 12 aa, synthetic construct
TGESGGSTNDNA

SEQ ID NO: 47474 - protein, 12 aa, synthetic construct
TGESGGSTNDNH

SEQ ID NO: 47475 - protein, 12 aa, synthetic construct
TGESGGSTNDNT

SEQ ID NO: 47476 - protein, 12 aa, synthetic construct
TGETAAASNDNA

SEQ ID NO: 47477 - protein, 12 aa, synthetic construct
TGETAAASNDNH

SEQ ID NO: 47478 - protein, 12 aa, synthetic construct
TGETAAASNDNT

SEQ ID NO: 47479 - protein, 12 aa, synthetic construct
TGETAAATNDNA

SEQ ID NO: 47480 - protein, 12 aa, synthetic construct
TGETAAATNDNH

SEQ ID NO: 47481 - protein, 12 aa, synthetic construct
TGETAAATNDNT

SEQ ID NO: 47482 - protein, 12 aa, synthetic construct
TGETAASSNDNA

SEQ ID NO: 47483 - protein, 12 aa, synthetic construct
TGETAASSNDNH

SEQ ID NO: 47484 - protein, 12 aa, synthetic construct
TGETAASSNDNT

SEQ ID NO: 47485 - protein, 12 aa, synthetic construct
TGETAASTNDNA

SEQ ID NO: 47486 - protein, 12 aa, synthetic construct
TGETAASTNDNH

SEQ ID NO: 47487 - protein, 12 aa, synthetic construct
TGETAASTNDNT

SEQ ID NO: 47488 - protein, 12 aa, synthetic construct
TGETAGASNDNA

SEQ ID NO: 47489 - protein, 12 aa, synthetic construct
TGETAGASNDNH

SEQ ID NO: 47490 - protein, 12 aa, synthetic construct
TGETAGASNDNT

SEQ ID NO: 47491 - protein, 12 aa, synthetic construct
TGETAGATNDNA

SEQ ID NO: 47492 - protein, 12 aa, synthetic construct
TGETAGATNDNH

SEQ ID NO: 47493 - protein, 12 aa, synthetic construct
TGETAGATNDNT

SEQ ID NO: 47494 - protein, 12 aa, synthetic construct
TGETAGSSNDNA

SEQ ID NO: 47495 - protein, 12 aa, synthetic construct
TGETAGSSNDNH

SEQ ID NO: 47496 - protein, 12 aa, synthetic construct
TGETAGSSNDNT

SEQ ID NO: 47497 - protein, 12 aa, synthetic construct
TGETAGSTNDNA

SEQ ID NO: 47498 - protein, 12 aa, synthetic construct
TGETAGSTNDNH

SEQ ID NO: 47499 - protein, 12 aa, synthetic construct
TGETAGSTNDNT

SEQ ID NO: 47500 - protein, 12 aa, synthetic construct
TGETGAASNDNA

SEQ ID NO: 47501 - protein, 12 aa, synthetic construct
TGETGAASNDNH

SEQ ID NO: 47502 - protein, 12 aa, synthetic construct
TGETGAASNDNT

SEQ ID NO: 47503 - protein, 12 aa, synthetic construct
TGETGAATNDNA

SEQ ID NO: 47504 - protein, 12 aa, synthetic construct
TGETGAATNDNH

SEQ ID NO: 47505 - protein, 12 aa, synthetic construct
TGETGAATNDNT

SEQ ID NO: 47506 - protein, 12 aa, synthetic construct
TGETGASSNDNA

SEQ ID NO: 47507 - protein, 12 aa, synthetic construct
TGETGASSNDNH

SEQ ID NO: 47508 - protein, 12 aa, synthetic construct
TGETGASSNDNT

SEQ ID NO: 47509 - protein, 12 aa, synthetic construct
TGETGASTNDNA

SEQ ID NO: 47510 - protein, 12 aa, synthetic construct
TGETGASTNDNH

SEQ ID NO: 47511 - protein, 12 aa, synthetic construct
TGETGASTNDNT

SEQ ID NO: 47512 - protein, 12 aa, synthetic construct
TGETGGASNDNA

SEQ ID NO: 47513 - protein, 12 aa, synthetic construct
TGETGGASNDNH

SEQ ID NO: 47514 - protein, 12 aa, synthetic construct
TGETGGASNDNT

SEQ ID NO: 47515 - protein, 12 aa, synthetic construct
TGETGGATNDNA

SEQ ID NO: 47516 - protein, 12 aa, synthetic construct
TGETGGATNDNH

SEQ ID NO: 47517 - protein, 12 aa, synthetic construct
TGETGGATNDNT

SEQ ID NO: 47518 - protein, 12 aa, synthetic construct
TGETGGSSNDNA

SEQ ID NO: 47519 - protein, 12 aa, synthetic construct
TGETGGSSNDNH

SEQ ID NO: 47520 - protein, 12 aa, synthetic construct
TGETGGSSNDNT

SEQ ID NO: 47521 - protein, 12 aa, synthetic construct
TGETGGSTNDNA

SEQ ID NO: 47522 - protein, 12 aa, synthetic construct
TGETGGSTNDNH

SEQ ID NO: 47523 - protein, 12 aa, synthetic construct
TGETGGSTNDNT

SEQ ID NO: 47524 - protein, 12 aa, synthetic construct
TGQAAAASNDNA

SEQ ID NO: 47525 - protein, 12 aa, synthetic construct
TGQAAAASNDNH

SEQ ID NO: 47526 - protein, 12 aa, synthetic construct
TGQAAAASNDNT

SEQ ID NO: 47527 - protein, 12 aa, synthetic construct
TGQAAAATNDNA

SEQ ID NO: 47528 - protein, 12 aa, synthetic construct
TGQAAAATNDNH

SEQ ID NO: 47529 - protein, 12 aa, synthetic construct
TGQAAAATNDNT

SEQ ID NO: 47530 - protein, 12 aa, synthetic construct
TGQAAASSNDNA

SEQ ID NO: 47531 - protein, 12 aa, synthetic construct
TGQAAASSNDNH

SEQ ID NO: 47532 - protein, 12 aa, synthetic construct
TGQAAASSNDNT

SEQ ID NO: 47533 - protein, 12 aa, synthetic construct
TGQAAASTNDNA

SEQ ID NO: 47534 - protein, 12 aa, synthetic construct
TGQAAASTNDNH

SEQ ID NO: 47535 - protein, 12 aa, synthetic construct
TGQAAASTNDNT

SEQ ID NO: 47536 - protein, 12 aa, synthetic construct
TGQAAGASNDNA

SEQ ID NO: 47537 - protein, 12 aa, synthetic construct
TGQAAGASNDNH

SEQ ID NO: 47538 - protein, 12 aa, synthetic construct
TGQAAGASNDNT

SEQ ID NO: 47539 - protein, 12 aa, synthetic construct
TGQAAGATNDNA

SEQ ID NO: 47540 - protein, 12 aa, synthetic construct
TGQAAGATNDNH

SEQ ID NO: 47541 - protein, 12 aa, synthetic construct
TGQAAGATNDNT

SEQ ID NO: 47542 - protein, 12 aa, synthetic construct
TGQAAGSSNDNA

SEQ ID NO: 47543 - protein, 12 aa, synthetic construct
TGQAAGSSNDNH

SEQ ID NO: 47544 - protein, 12 aa, synthetic construct
TGQAAGSSNDNT

SEQ ID NO: 47545 - protein, 12 aa, synthetic construct
TGQAAGSTNDNA

SEQ ID NO: 47546 - protein, 12 aa, synthetic construct
TGQAAGSTNDNH

SEQ ID NO: 47547 - protein, 12 aa, synthetic construct
TGQAAGSTNDNT

SEQ ID NO: 47548 - protein, 12 aa, synthetic construct
TGQAGAASNDNA

SEQ ID NO: 47549 - protein, 12 aa, synthetic construct
TGQAGAASNDNH

SEQ ID NO: 47550 - protein, 12 aa, synthetic construct
TGQAGAASNDNT

SEQ ID NO: 47551 - protein, 12 aa, synthetic construct
TGQAGAATNDNA

SEQ ID NO: 47552 - protein, 12 aa, synthetic construct
TGQAGAATNDNH

SEQ ID NO: 47553 - protein, 12 aa, synthetic construct
TGQAGAATNDNT

SEQ ID NO: 47554 - protein, 12 aa, synthetic construct
TGQAGASSNDNA

SEQ ID NO: 47555 - protein, 12 aa, synthetic construct
TGQAGASSNDNH

SEQ ID NO: 47556 - protein, 12 aa, synthetic construct
TGQAGASSNDNT

SEQ ID NO: 47557 - protein, 12 aa, synthetic construct
TGQAGASTNDNA

SEQ ID NO: 47558 - protein, 12 aa, synthetic construct
TGQAGASTNDNH

SEQ ID NO: 47559 - protein, 12 aa, synthetic construct
TGQAGASTNDNT

SEQ ID NO: 47560 - protein, 12 aa, synthetic construct
TGQAGGASNDNA

SEQ ID NO: 47561 - protein, 12 aa, synthetic construct
TGQAGGASNDNH

SEQ ID NO: 47562 - protein, 12 aa, synthetic construct
TGQAGGASNDNT

SEQ ID NO: 47563 - protein, 12 aa, synthetic construct
TGQAGGATNDNA

SEQ ID NO: 47564 - protein, 12 aa, synthetic construct
TGQAGGATNDNH

SEQ ID NO: 47565 - protein, 12 aa, synthetic construct
TGQAGGATNDNT

SEQ ID NO: 47566 - protein, 12 aa, synthetic construct
TGQAGGSSNDNA

SEQ ID NO: 47567 - protein, 12 aa, synthetic construct
TGQAGGSSNDNH

SEQ ID NO: 47568 - protein, 12 aa, synthetic construct
TGQAGGSSNDNT

SEQ ID NO: 47569 - protein, 12 aa, synthetic construct
TGQAGGSTNDNA

SEQ ID NO: 47570 - protein, 12 aa, synthetic construct
TGQAGGSTNDNH

SEQ ID NO: 47571 - protein, 12 aa, synthetic construct
TGQAGGSTNDNT

SEQ ID NO: 47572 - protein, 12 aa, synthetic construct
TGQSAAASNDNA

SEQ ID NO: 47573 - protein, 12 aa, synthetic construct
TGQSAAASNDNH

SEQ ID NO: 47574 - protein, 12 aa, synthetic construct
TGQSAAASNDNT

SEQ ID NO: 47575 - protein, 12 aa, synthetic construct
TGQSAAATNDNA

SEQ ID NO: 47576 - protein, 12 aa, synthetic construct
TGQSAAATNDNH

SEQ ID NO: 47577 - protein, 12 aa, synthetic construct
TGQSAAATNDNT

SEQ ID NO: 47578 - protein, 12 aa, synthetic construct
TGQSAASSNDNA

SEQ ID NO: 47579 - protein, 12 aa, synthetic construct
TGQSAASSNDNH

SEQ ID NO: 47580 - protein, 12 aa, synthetic construct
TGQSAASSNDNT

SEQ ID NO: 47581 - protein, 12 aa, synthetic construct
TGQSAASTNDNA

SEQ ID NO: 47582 - protein, 12 aa, synthetic construct
TGQSAASTNDNH

SEQ ID NO: 47583 - protein, 12 aa, synthetic construct
TGQSAASTNDNT

SEQ ID NO: 47584 - protein, 12 aa, synthetic construct
TGQSAGASNDNA

SEQ ID NO: 47585 - protein, 12 aa, synthetic construct
TGQSAGASNDNH

SEQ ID NO: 47586 - protein, 12 aa, synthetic construct
TGQSAGASNDNT

SEQ ID NO: 47587 - protein, 12 aa, synthetic construct
TGQSAGATNDNA

SEQ ID NO: 47588 - protein, 12 aa, synthetic construct
TGQSAGATNDNH

SEQ ID NO: 47589 - protein, 12 aa, synthetic construct
TGQSAGATNDNT

SEQ ID NO: 47590 - protein, 12 aa, synthetic construct
TGQSAGSSNDNA

SEQ ID NO: 47591 - protein, 12 aa, synthetic construct
TGQSAGSSNDNH

SEQ ID NO: 47592 - protein, 12 aa, synthetic construct
TGQSAGSSNDNT

SEQ ID NO: 47593 - protein, 12 aa, synthetic construct
TGQSAGSTNDNA

SEQ ID NO: 47594 - protein, 12 aa, synthetic construct
TGQSAGSTNDNH

SEQ ID NO: 47595 - protein, 12 aa, synthetic construct
TGQSAGSTNDNT

SEQ ID NO: 47596 - protein, 12 aa, synthetic construct
TGQSGAASNDNA

SEQ ID NO: 47597 - protein, 12 aa, synthetic construct
TGQSGAASNDNH

SEQ ID NO: 47598 - protein, 12 aa, synthetic construct
TGQSGAASNDNT

SEQ ID NO: 47599 - protein, 12 aa, synthetic construct
TGQSGAATNDNA

SEQ ID NO: 47600 - protein, 12 aa, synthetic construct
TGQSGAATNDNH

SEQ ID NO: 47601 - protein, 12 aa, synthetic construct
TGQSGAATNDNT

SEQ ID NO: 47602 - protein, 12 aa, synthetic construct
TGQSGASSNDNA

SEQ ID NO: 47603 - protein, 12 aa, synthetic construct
TGQSGASSNDNH

SEQ ID NO: 47604 - protein, 12 aa, synthetic construct
TGQSGASSNDNT

SEQ ID NO: 47605 - protein, 12 aa, synthetic construct
TGQSGASTNDNA

SEQ ID NO: 47606 - protein, 12 aa, synthetic construct
TGQSGASTNDNH

SEQ ID NO: 47607 - protein, 12 aa, synthetic construct
TGQSGASTNDNT

SEQ ID NO: 47608 - protein, 12 aa, synthetic construct
TGQSGGASNDNA

SEQ ID NO: 47609 - protein, 12 aa, synthetic construct
TGQSGGASNDNH

SEQ ID NO: 47610 - protein, 12 aa, synthetic construct
TGQSGGASNDNT

SEQ ID NO: 47611 - protein, 12 aa, synthetic construct
TGQSGGATNDNA

SEQ ID NO: 47612 - protein, 12 aa, synthetic construct
TGQSGGATNDNH

SEQ ID NO: 47613 - protein, 12 aa, synthetic construct
TGQSGGATNDNT

SEQ ID NO: 47614 - protein, 12 aa, synthetic construct
TGQSGGSSNDNA

SEQ ID NO: 47615 - protein, 12 aa, synthetic construct
TGQSGGSSNDNH

SEQ ID NO: 47616 - protein, 12 aa, synthetic construct
TGQSGGSSNDNT

SEQ ID NO: 47617 - protein, 12 aa, synthetic construct
TGQSGGSTNDNA

SEQ ID NO: 47618 - protein, 12 aa, synthetic construct
TGQSGGSTNDNH

SEQ ID NO: 47619 - protein, 12 aa, synthetic construct
TGQSGGSTNDNT

SEQ ID NO: 47620 - protein, 12 aa, synthetic construct
TGQTAAASNDNA

SEQ ID NO: 47621 - protein, 12 aa, synthetic construct
TGQTAAASNDNH

SEQ ID NO: 47622 - protein, 12 aa, synthetic construct
TGQTAAASNDNT

SEQ ID NO: 47623 - protein, 12 aa, synthetic construct
TGQTAAATNDNA

SEQ ID NO: 47624 - protein, 12 aa, synthetic construct
TGQTAAATNDNH

SEQ ID NO: 47625 - protein, 12 aa, synthetic construct
TGQTAAATNDNT

SEQ ID NO: 47626 - protein, 12 aa, synthetic construct
TGQTAASSNDNA

SEQ ID NO: 47627 - protein, 12 aa, synthetic construct
TGQTAASSNDNH

SEQ ID NO: 47628 - protein, 12 aa, synthetic construct
TGQTAASSNDNT

SEQ ID NO: 47629 - protein, 12 aa, synthetic construct
TGQTAASTNDNA

SEQ ID NO: 47630 - protein, 12 aa, synthetic construct
TGQTAASTNDNH

SEQ ID NO: 47631 - protein, 12 aa, synthetic construct
TGQTAASTNDNT

SEQ ID NO: 47632 - protein, 12 aa, synthetic construct
TGQTAGASNDNA

SEQ ID NO: 47633 - protein, 12 aa, synthetic construct
TGQTAGASNDNH

SEQ ID NO: 47634 - protein, 12 aa, synthetic construct
TGQTAGASNDNT

SEQ ID NO: 47635 - protein, 12 aa, synthetic construct
TGQTAGATNDNA

SEQ ID NO: 47636 - protein, 12 aa, synthetic construct
TGQTAGATNDNH

SEQ ID NO: 47637 - protein, 12 aa, synthetic construct
TGQTAGATNDNT

SEQ ID NO: 47638 - protein, 12 aa, synthetic construct
TGQTAGSSNDNA

SEQ ID NO: 47639 - protein, 12 aa, synthetic construct
TGQTAGSSNDNH

SEQ ID NO: 47640 - protein, 12 aa, synthetic construct
TGQTAGSSNDNT

SEQ ID NO: 47641 - protein, 12 aa, synthetic construct
TGQTAGSTNDNA

SEQ ID NO: 47642 - protein, 12 aa, synthetic construct
TGQTAGSTNDNH

SEQ ID NO: 47643 - protein, 12 aa, synthetic construct
TGQTAGSTNDNT

SEQ ID NO: 47644 - protein, 12 aa, synthetic construct
TGQTGAASNDNA

SEQ ID NO: 47645 - protein, 12 aa, synthetic construct
TGQTGAASNDNH

SEQ ID NO: 47646 - protein, 12 aa, synthetic construct
TGQTGAASNDNT

SEQ ID NO: 47647 - protein, 12 aa, synthetic construct
TGQTGAATNDNA

SEQ ID NO: 47648 - protein, 12 aa, synthetic construct
TGQTGAATNDNH

SEQ ID NO: 47649 - protein, 12 aa, synthetic construct
TGQTGAATNDNT

SEQ ID NO: 47650 - protein, 12 aa, synthetic construct
TGQTGASSNDNA

SEQ ID NO: 47651 - protein, 12 aa, synthetic construct
TGQTGASSNDNH

SEQ ID NO: 47652 - protein, 12 aa, synthetic construct
TGQTGASSNDNT

SEQ ID NO: 47653 - protein, 12 aa, synthetic construct
TGQTGASTNDNA

SEQ ID NO: 47654 - protein, 12 aa, synthetic construct
TGQTGASTNDNH

SEQ ID NO: 47655 - protein, 12 aa, synthetic construct
TGQTGASTNDNT

SEQ ID NO: 47656 - protein, 12 aa, synthetic construct
TGQTGGASNDNA

SEQ ID NO: 47657 - protein, 12 aa, synthetic construct
TGQTGGASNDNH

SEQ ID NO: 47658 - protein, 12 aa, synthetic construct
TGQTGGASNDNT

SEQ ID NO: 47659 - protein, 12 aa, synthetic construct
TGQTGGATNDNA

SEQ ID NO: 47660 - protein, 12 aa, synthetic construct
TGQTGGATNDNH

SEQ ID NO: 47661 - protein, 12 aa, synthetic construct
TGQTGGATNDNT

SEQ ID NO: 47662 - protein, 12 aa, synthetic construct
TGQTGGSSNDNA

SEQ ID NO: 47663 - protein, 12 aa, synthetic construct
TGQTGGSSNDNH

SEQ ID NO: 47664 - protein, 12 aa, synthetic construct
TGQTGGSSNDNT

SEQ ID NO: 47665 - protein, 12 aa, synthetic construct
TGQTGGSTNDNA

SEQ ID NO: 47666 - protein, 12 aa, synthetic construct
TGQTGGSTNDNH

SEQ ID NO: 47667 - protein, 12 aa, synthetic construct
TGQTGGSTNDNT

SEQ ID NO: 47668 - protein, 12 aa, synthetic construct
TGTAAAASNDNA

SEQ ID NO: 47669 - protein, 12 aa, synthetic construct
TGTAAAASNDNH

SEQ ID NO: 47670 - protein, 12 aa, synthetic construct
TGTAAAASNDNT

SEQ ID NO: 47671 - protein, 12 aa, synthetic construct
TGTAAAATNDNA

SEQ ID NO: 47672 - protein, 12 aa, synthetic construct
TGTAAAATNDNH

SEQ ID NO: 47673 - protein, 12 aa, synthetic construct
TGTAAAATNDNT

SEQ ID NO: 47674 - protein, 12 aa, synthetic construct
TGTAAASSNDNA

SEQ ID NO: 47675 - protein, 12 aa, synthetic construct
TGTAAASSNDNH

SEQ ID NO: 47676 - protein, 12 aa, synthetic construct
TGTAAASSNDNT

SEQ ID NO: 47677 - protein, 12 aa, synthetic construct
TGTAAASTNDNA

SEQ ID NO: 47678 - protein, 12 aa, synthetic construct
TGTAAASTNDNH

SEQ ID NO: 47679 - protein, 12 aa, synthetic construct
TGTAAASTNDNT

SEQ ID NO: 47680 - protein, 12 aa, synthetic construct
TGTAAGASNDNA

SEQ ID NO: 47681 - protein, 12 aa, synthetic construct
TGTAAGASNDNH

SEQ ID NO: 47682 - protein, 12 aa, synthetic construct
TGTAAGASNDNT

SEQ ID NO: 47683 - protein, 12 aa, synthetic construct
TGTAAGATNDNA

SEQ ID NO: 47684 - protein, 12 aa, synthetic construct
TGTAAGATNDNH

SEQ ID NO: 47685 - protein, 12 aa, synthetic construct
TGTAAGATNDNT

SEQ ID NO: 47686 - protein, 12 aa, synthetic construct
TGTAAGSSNDNA

SEQ ID NO: 47687 - protein, 12 aa, synthetic construct
TGTAAGSSNDNH

SEQ ID NO: 47688 - protein, 12 aa, synthetic construct
TGTAAGSSNDNT

SEQ ID NO: 47689 - protein, 12 aa, synthetic construct
TGTAAGSTNDNA

SEQ ID NO: 47690 - protein, 12 aa, synthetic construct
TGTAAGSTNDNH

SEQ ID NO: 47691 - protein, 12 aa, synthetic construct
TGTAAGSTNDNT

SEQ ID NO: 47692 - protein, 12 aa, synthetic construct
TGTAGAASNDNA

SEQ ID NO: 47693 - protein, 12 aa, synthetic construct
TGTAGAASNDNH

SEQ ID NO: 47694 - protein, 12 aa, synthetic construct
TGTAGAASNDNT

SEQ ID NO: 47695 - protein, 12 aa, synthetic construct
TGTAGAATNDNA

SEQ ID NO: 47696 - protein, 12 aa, synthetic construct
TGTAGAATNDNH

SEQ ID NO: 47697 - protein, 12 aa, synthetic construct
TGTAGAATNDNT

SEQ ID NO: 47698 - protein, 12 aa, synthetic construct
TGTAGASSNDNA

SEQ ID NO: 47699 - protein, 12 aa, synthetic construct
TGTAGASSNDNH

SEQ ID NO: 47700 - protein, 12 aa, synthetic construct
TGTAGASSNDNT

SEQ ID NO: 47701 - protein, 12 aa, synthetic construct
TGTAGASTNDNA

SEQ ID NO: 47702 - protein, 12 aa, synthetic construct
TGTAGASTNDNH

SEQ ID NO: 47703 - protein, 12 aa, synthetic construct
TGTAGASTNDNT

SEQ ID NO: 47704 - protein, 12 aa, synthetic construct
TGTAGGASNDNA

SEQ ID NO: 47705 - protein, 12 aa, synthetic construct
TGTAGGASNDNH

SEQ ID NO: 47706 - protein, 12 aa, synthetic construct
TGTAGGASNDNT

SEQ ID NO: 47707 - protein, 12 aa, synthetic construct
TGTAGGATNDNA

SEQ ID NO: 47708 - protein, 12 aa, synthetic construct
TGTAGGATNDNH

SEQ ID NO: 47709 - protein, 12 aa, synthetic construct
TGTAGGATNDNT

SEQ ID NO: 47710 - protein, 12 aa, synthetic construct
TGTAGGSSNDNA

SEQ ID NO: 47711 - protein, 12 aa, synthetic construct
TGTAGGSSNDNH

SEQ ID NO: 47712 - protein, 12 aa, synthetic construct
TGTAGGSSNDNT

SEQ ID NO: 47713 - protein, 12 aa, synthetic construct
TGTAGGSTNDNA

SEQ ID NO: 47714 - protein, 12 aa, synthetic construct
TGTAGGSTNDNH

SEQ ID NO: 47715 - protein, 12 aa, synthetic construct
TGTAGGSTNDNT

SEQ ID NO: 47716 - protein, 12 aa, synthetic construct
TGTSAAASNDNA

SEQ ID NO: 47717 - protein, 12 aa, synthetic construct
TGTSAAASNDNH

SEQ ID NO: 47718 - protein, 12 aa, synthetic construct
TGTSAAASNDNT

SEQ ID NO: 47719 - protein, 12 aa, synthetic construct
TGTSAAATNDNA

SEQ ID NO: 47720 - protein, 12 aa, synthetic construct
TGTSAAATNDNH

SEQ ID NO: 47721 - protein, 12 aa, synthetic construct
TGTSAAATNDNT

SEQ ID NO: 47722 - protein, 12 aa, synthetic construct
TGTSAASSNDNA

SEQ ID NO: 47723 - protein, 12 aa, synthetic construct
TGTSAASSNDNH

SEQ ID NO: 47724 - protein, 12 aa, synthetic construct
TGTSAASSNDNT

SEQ ID NO: 47725 - protein, 12 aa, synthetic construct
TGTSAASTNDNA

SEQ ID NO: 47726 - protein, 12 aa, synthetic construct
TGTSAASTNDNH

SEQ ID NO: 47727 - protein, 12 aa, synthetic construct
TGTSAASTNDNT

SEQ ID NO: 47728 - protein, 12 aa, synthetic construct
TGTSAGASNDNA

SEQ ID NO: 47729 - protein, 12 aa, synthetic construct
TGTSAGASNDNH

SEQ ID NO: 47730 - protein, 12 aa, synthetic construct
TGTSAGASNDNT

SEQ ID NO: 47731 - protein, 12 aa, synthetic construct
TGTSAGATNDNA

SEQ ID NO: 47732 - protein, 12 aa, synthetic construct
TGTSAGATNDNH

SEQ ID NO: 47733 - protein, 12 aa, synthetic construct
TGTSAGATNDNT

SEQ ID NO: 47734 - protein, 12 aa, synthetic construct
TGTSAGSSNDNA

SEQ ID NO: 47735 - protein, 12 aa, synthetic construct
TGTSAGSSNDNH

SEQ ID NO: 47736 - protein, 12 aa, synthetic construct
TGTSAGSSNDNT

SEQ ID NO: 47737 - protein, 12 aa, synthetic construct
TGTSAGSTNDNA

SEQ ID NO: 47738 - protein, 12 aa, synthetic construct
TGTSAGSTNDNH

SEQ ID NO: 47739 - protein, 12 aa, synthetic construct
TGTSAGSTNDNT

SEQ ID NO: 47740 - protein, 12 aa, synthetic construct
TGTSGAASNDNA

SEQ ID NO: 47741 - protein, 12 aa, synthetic construct
TGTSGAASNDNH

SEQ ID NO: 47742 - protein, 12 aa, synthetic construct
TGTSGAASNDNT

SEQ ID NO: 47743 - protein, 12 aa, synthetic construct
TGTSGAATNDNA

SEQ ID NO: 47744 - protein, 12 aa, synthetic construct
TGTSGAATNDNH

SEQ ID NO: 47745 - protein, 12 aa, synthetic construct
TGTSGAATNDNT

SEQ ID NO: 47746 - protein, 12 aa, synthetic construct
TGTSGASSNDNA

SEQ ID NO: 47747 - protein, 12 aa, synthetic construct
TGTSGASSNDNH

SEQ ID NO: 47748 - protein, 12 aa, synthetic construct
TGTSGASSNDNT

SEQ ID NO: 47749 - protein, 12 aa, synthetic construct
TGTSGASTNDNA

SEQ ID NO: 47750 - protein, 12 aa, synthetic construct
TGTSGASTNDNH

SEQ ID NO: 47751 - protein, 12 aa, synthetic construct
TGTSGASTNDNT

SEQ ID NO: 47752 - protein, 12 aa, synthetic construct
TGTSGGASNDNA

SEQ ID NO: 47753 - protein, 12 aa, synthetic construct
TGTSGGASNDNH

SEQ ID NO: 47754 - protein, 12 aa, synthetic construct
TGTSGGASNDNT

SEQ ID NO: 47755 - protein, 12 aa, synthetic construct
TGTSGGATNDNA

SEQ ID NO: 47756 - protein, 12 aa, synthetic construct
TGTSGGATNDNH

SEQ ID NO: 47757 - protein, 12 aa, synthetic construct
TGTSGGATNDNT

SEQ ID NO: 47758 - protein, 12 aa, synthetic construct
TGTSGGSSNDNA

SEQ ID NO: 47759 - protein, 12 aa, synthetic construct
TGTSGGSSNDNH

SEQ ID NO: 47760 - protein, 12 aa, synthetic construct
TGTSGGSSNDNT

SEQ ID NO: 47761 - protein, 12 aa, synthetic construct
TGTSGGSTNDNA

SEQ ID NO: 47762 - protein, 12 aa, synthetic construct
TGTSGGSTNDNH

SEQ ID NO: 47763 - protein, 12 aa, synthetic construct
TGTSGGSTNDNT

SEQ ID NO: 47764 - protein, 12 aa, synthetic construct
TGTTAAASNDNA

SEQ ID NO: 47765 - protein, 12 aa, synthetic construct
TGTTAAASNDNH

SEQ ID NO: 47766 - protein, 12 aa, synthetic construct
TGTTAAASNDNT

SEQ ID NO: 47767 - protein, 12 aa, synthetic construct
TGTTAAATNDNA

SEQ ID NO: 47768 - protein, 12 aa, synthetic construct
TGTTAAATNDNH

SEQ ID NO: 47769 - protein, 12 aa, synthetic construct
TGTTAAATNDNT

SEQ ID NO: 47770 - protein, 12 aa, synthetic construct
TGTTAASSNDNA

SEQ ID NO: 47771 - protein, 12 aa, synthetic construct
TGTTAASSNDNH

SEQ ID NO: 47772 - protein, 12 aa, synthetic construct
TGTTAASSNDNT

SEQ ID NO: 47773 - protein, 12 aa, synthetic construct
TGTTAASTNDNA

SEQ ID NO: 47774 - protein, 12 aa, synthetic construct
TGTTAASTNDNH

SEQ ID NO: 47775 - protein, 12 aa, synthetic construct
TGTTAASTNDNT

SEQ ID NO: 47776 - protein, 12 aa, synthetic construct
TGTTAGASNDNA

SEQ ID NO: 47777 - protein, 12 aa, synthetic construct
TGTTAGASNDNH

SEQ ID NO: 47778 - protein, 12 aa, synthetic construct
TGTTAGASNDNT

SEQ ID NO: 47779 - protein, 12 aa, synthetic construct
TGTTAGATNDNA

SEQ ID NO: 47780 - protein, 12 aa, synthetic construct
TGTTAGATNDNH

SEQ ID NO: 47781 - protein, 12 aa, synthetic construct
TGTTAGATNDNT

SEQ ID NO: 47782 - protein, 12 aa, synthetic construct
TGTTAGSSNDNA

SEQ ID NO: 47783 - protein, 12 aa, synthetic construct
TGTTAGSSNDNH

SEQ ID NO: 47784 - protein, 12 aa, synthetic construct
TGTTAGSSNDNT

SEQ ID NO: 47785 - protein, 12 aa, synthetic construct
TGTTAGSTNDNA

SEQ ID NO: 47786 - protein, 12 aa, synthetic construct
TGTTAGSTNDNH

SEQ ID NO: 47787 - protein, 12 aa, synthetic construct
TGTTAGSTNDNT

SEQ ID NO: 47788 - protein, 12 aa, synthetic construct
TGTTGAASNDNA

SEQ ID NO: 47789 - protein, 12 aa, synthetic construct
TGTTGAASNDNH

SEQ ID NO: 47790 - protein, 12 aa, synthetic construct
TGTTGAASNDNT

SEQ ID NO: 47791 - protein, 12 aa, synthetic construct
TGTTGAATNDNA

SEQ ID NO: 47792 - protein, 12 aa, synthetic construct
TGTTGAATNDNH

SEQ ID NO: 47793 - protein, 12 aa, synthetic construct
TGTTGAATNDNT

SEQ ID NO: 47794 - protein, 12 aa, synthetic construct
TGTTGASSNDNA

SEQ ID NO: 47795 - protein, 12 aa, synthetic construct
TGTTGASSNDNH

SEQ ID NO: 47796 - protein, 12 aa, synthetic construct
TGTTGASSNDNT

SEQ ID NO: 47797 - protein, 12 aa, synthetic construct
TGTTGASTNDNA

SEQ ID NO: 47798 - protein, 12 aa, synthetic construct
TGTTGASTNDNH

SEQ ID NO: 47799 - protein, 12 aa, synthetic construct
TGTTGASTNDNT

SEQ ID NO: 47800 - protein, 12 aa, synthetic construct
TGTTGGASNDNA

SEQ ID NO: 47801 - protein, 12 aa, synthetic construct
TGTTGGASNDNH

SEQ ID NO: 47802 - protein, 12 aa, synthetic construct
TGTTGGASNDNT

SEQ ID NO: 47803 - protein, 12 aa, synthetic construct
TGTTGGATNDNA

SEQ ID NO: 47804 - protein, 12 aa, synthetic construct
TGTTGGATNDNH

SEQ ID NO: 47805 - protein, 12 aa, synthetic construct
TGTTGGATNDNT

SEQ ID NO: 47806 - protein, 12 aa, synthetic construct
TGTTGGSSNDNA

SEQ ID NO: 47807 - protein, 12 aa, synthetic construct
TGTTGGSSNDNH

SEQ ID NO: 47808 - protein, 12 aa, synthetic construct
TGTTGGSSNDNT

SEQ ID NO: 47809 - protein, 12 aa, synthetic construct
TGTTGGSTNDNA

SEQ ID NO: 47810 - protein, 12 aa, synthetic construct
TGTTGGSTNDNH

SEQ ID NO: 47811 - protein, 12 aa, synthetic construct
TGTTGGSTNDNT

SEQ ID NO: 47812 - protein, 12 aa, synthetic construct
TSAAAAASNDNA

SEQ ID NO: 47813 - protein, 12 aa, synthetic construct
TSAAAAASNDNH

SEQ ID NO: 47814 - protein, 12 aa, synthetic construct
TSAAAAASNDNT

SEQ ID NO: 47815 - protein, 12 aa, synthetic construct
TSAAAAATNDNA

SEQ ID NO: 47816 - protein, 12 aa, synthetic construct
TSAAAAATNDNH

SEQ ID NO: 47817 - protein, 12 aa, synthetic construct
TSAAAAATNDNT

SEQ ID NO: 47818 - protein, 12 aa, synthetic construct
TSAAAASSNDNA

SEQ ID NO: 47819 - protein, 12 aa, synthetic construct
TSAAAASSNDNH

SEQ ID NO: 47820 - protein, 12 aa, synthetic construct
TSAAAASSNDNT

SEQ ID NO: 47821 - protein, 12 aa, synthetic construct
TSAAAASTNDNA

SEQ ID NO: 47822 - protein, 12 aa, synthetic construct
TSAAAASTNDNH

SEQ ID NO: 47823 - protein, 12 aa, synthetic construct
TSAAAASTNDNT

SEQ ID NO: 47824 - protein, 12 aa, synthetic construct
TSAAAGASNDNA

SEQ ID NO: 47825 - protein, 12 aa, synthetic construct
TSAAAGASNDNH

SEQ ID NO: 47826 - protein, 12 aa, synthetic construct
TSAAAGASNDNT

SEQ ID NO: 47827 - protein, 12 aa, synthetic construct
TSAAAGATNDNA

SEQ ID NO: 47828 - protein, 12 aa, synthetic construct
TSAAAGATNDNH

SEQ ID NO: 47829 - protein, 12 aa, synthetic construct
TSAAAGATNDNT

SEQ ID NO: 47830 - protein, 12 aa, synthetic construct
TSAAAGSSNDNA

SEQ ID NO: 47831 - protein, 12 aa, synthetic construct
TSAAAGSSNDNH

SEQ ID NO: 47832 - protein, 12 aa, synthetic construct
TSAAAGSSNDNT

SEQ ID NO: 47833 - protein, 12 aa, synthetic construct
TSAAAGSTNDNA

SEQ ID NO: 47834 - protein, 12 aa, synthetic construct
TSAAAGSTNDNH

SEQ ID NO: 47835 - protein, 12 aa, synthetic construct
TSAAAGSTNDNT

SEQ ID NO: 47836 - protein, 12 aa, synthetic construct
TSAAGAASNDNA

SEQ ID NO: 47837 - protein, 12 aa, synthetic construct
TSAAGAASNDNH

SEQ ID NO: 47838 - protein, 12 aa, synthetic construct
TSAAGAASNDNT

SEQ ID NO: 47839 - protein, 12 aa, synthetic construct
TSAAGAATNDNA

SEQ ID NO: 47840 - protein, 12 aa, synthetic construct
TSAAGAATNDNH

SEQ ID NO: 47841 - protein, 12 aa, synthetic construct
TSAAGAATNDNT

SEQ ID NO: 47842 - protein, 12 aa, synthetic construct
TSAAGASSNDNA

SEQ ID NO: 47843 - protein, 12 aa, synthetic construct
TSAAGASSNDNH

SEQ ID NO: 47844 - protein, 12 aa, synthetic construct
TSAAGASSNDNT

SEQ ID NO: 47845 - protein, 12 aa, synthetic construct
TSAAGASTNDNA

SEQ ID NO: 47846 - protein, 12 aa, synthetic construct
TSAAGASTNDNH

SEQ ID NO: 47847 - protein, 12 aa, synthetic construct
TSAAGASTNDNT

SEQ ID NO: 47848 - protein, 12 aa, synthetic construct
TSAAGGASNDNA

SEQ ID NO: 47849 - protein, 12 aa, synthetic construct
TSAAGGASNDNH

SEQ ID NO: 47850 - protein, 12 aa, synthetic construct
TSAAGGASNDNT

SEQ ID NO: 47851 - protein, 12 aa, synthetic construct
TSAAGGATNDNA

SEQ ID NO: 47852 - protein, 12 aa, synthetic construct
TSAAGGATNDNH

SEQ ID NO: 47853 - protein, 12 aa, synthetic construct
TSAAGGATNDNT

SEQ ID NO: 47854 - protein, 12 aa, synthetic construct
TSAAGGSSNDNA

SEQ ID NO: 47855 - protein, 12 aa, synthetic construct
TSAAGGSSNDNH

SEQ ID NO: 47856 - protein, 12 aa, synthetic construct
TSAAGGSSNDNT

SEQ ID NO: 47857 - protein, 12 aa, synthetic construct
TSAAGGSTNDNA

SEQ ID NO: 47858 - protein, 12 aa, synthetic construct
TSAAGGSTNDNH

SEQ ID NO: 47859 - protein, 12 aa, synthetic construct
TSAAGGSTNDNT

SEQ ID NO: 47860 - protein, 12 aa, synthetic construct
TSASAAASNDNA

SEQ ID NO: 47861 - protein, 12 aa, synthetic construct
TSASAAASNDNH

SEQ ID NO: 47862 - protein, 12 aa, synthetic construct
TSASAAASNDNT

SEQ ID NO: 47863 - protein, 12 aa, synthetic construct
TSASAAATNDNA

SEQ ID NO: 47864 - protein, 12 aa, synthetic construct
TSASAAATNDNH

SEQ ID NO: 47865 - protein, 12 aa, synthetic construct
TSASAAATNDNT

SEQ ID NO: 47866 - protein, 12 aa, synthetic construct
TSASAASSNDNA

SEQ ID NO: 47867 - protein, 12 aa, synthetic construct
TSASAASSNDNH

SEQ ID NO: 47868 - protein, 12 aa, synthetic construct
TSASAASSNDNT

SEQ ID NO: 47869 - protein, 12 aa, synthetic construct
TSASAASTNDNA

SEQ ID NO: 47870 - protein, 12 aa, synthetic construct
TSASAASTNDNH

SEQ ID NO: 47871 - protein, 12 aa, synthetic construct
TSASAASTNDNT

SEQ ID NO: 47872 - protein, 12 aa, synthetic construct
TSASAGASNDNA

SEQ ID NO: 47873 - protein, 12 aa, synthetic construct
TSASAGASNDNH

SEQ ID NO: 47874 - protein, 12 aa, synthetic construct
TSASAGASNDNT

SEQ ID NO: 47875 - protein, 12 aa, synthetic construct
TSASAGATNDNA

SEQ ID NO: 47876 - protein, 12 aa, synthetic construct
TSASAGATNDNH

SEQ ID NO: 47877 - protein, 12 aa, synthetic construct
TSASAGATNDNT

SEQ ID NO: 47878 - protein, 12 aa, synthetic construct
TSASAGSSNDNA

SEQ ID NO: 47879 - protein, 12 aa, synthetic construct
TSASAGSSNDNH

SEQ ID NO: 47880 - protein, 12 aa, synthetic construct
TSASAGSSNDNT

SEQ ID NO: 47881 - protein, 12 aa, synthetic construct
TSASAGSTNDNA

SEQ ID NO: 47882 - protein, 12 aa, synthetic construct
TSASAGSTNDNH

SEQ ID NO: 47883 - protein, 12 aa, synthetic construct
TSASAGSTNDNT

SEQ ID NO: 47884 - protein, 12 aa, synthetic construct
TSASGAASNDNA

SEQ ID NO: 47885 - protein, 12 aa, synthetic construct
TSASGAASNDNH

SEQ ID NO: 47886 - protein, 12 aa, synthetic construct
TSASGAASNDNT

SEQ ID NO: 47887 - protein, 12 aa, synthetic construct
TSASGAATNDNA

SEQ ID NO: 47888 - protein, 12 aa, synthetic construct
TSASGAATNDNH

SEQ ID NO: 47889 - protein, 12 aa, synthetic construct
TSASGAATNDNT

SEQ ID NO: 47890 - protein, 12 aa, synthetic construct
TSASGASSNDNA

SEQ ID NO: 47891 - protein, 12 aa, synthetic construct
TSASGASSNDNH

SEQ ID NO: 47892 - protein, 12 aa, synthetic construct
TSASGASSNDNT

SEQ ID NO: 47893 - protein, 12 aa, synthetic construct
TSASGASTNDNA

SEQ ID NO: 47894 - protein, 12 aa, synthetic construct
TSASGASTNDNH

SEQ ID NO: 47895 - protein, 12 aa, synthetic construct
TSASGASTNDNT

SEQ ID NO: 47896 - protein, 12 aa, synthetic construct
TSASGGASNDNA

SEQ ID NO: 47897 - protein, 12 aa, synthetic construct
TSASGGASNDNH

SEQ ID NO: 47898 - protein, 12 aa, synthetic construct
TSASGGASNDNT

SEQ ID NO: 47899 - protein, 12 aa, synthetic construct
TSASGGATNDNA

SEQ ID NO: 47900 - protein, 12 aa, synthetic construct
TSASGGATNDNH

SEQ ID NO: 47901 - protein, 12 aa, synthetic construct
TSASGGATNDNT

SEQ ID NO: 47902 - protein, 12 aa, synthetic construct
TSASGGSSNDNA

SEQ ID NO: 47903 - protein, 12 aa, synthetic construct
TSASGGSSNDNH

SEQ ID NO: 47904 - protein, 12 aa, synthetic construct
TSASGGSSNDNT

SEQ ID NO: 47905 - protein, 12 aa, synthetic construct
TSASGGSTNDNA

SEQ ID NO: 47906 - protein, 12 aa, synthetic construct
TSASGGSTNDNH

SEQ ID NO: 47907 - protein, 12 aa, synthetic construct
TSASGGSTNDNT

SEQ ID NO: 47908 - protein, 12 aa, synthetic construct
TSATAAASNDNA

SEQ ID NO: 47909 - protein, 12 aa, synthetic construct
TSATAAASNDNH

SEQ ID NO: 47910 - protein, 12 aa, synthetic construct
TSATAAASNDNT

SEQ ID NO: 47911 - protein, 12 aa, synthetic construct
TSATAAATNDNA

SEQ ID NO: 47912 - protein, 12 aa, synthetic construct
TSATAAATNDNH

SEQ ID NO: 47913 - protein, 12 aa, synthetic construct
TSATAAATNDNT

SEQ ID NO: 47914 - protein, 12 aa, synthetic construct
TSATAASSNDNA

SEQ ID NO: 47915 - protein, 12 aa, synthetic construct
TSATAASSNDNH

SEQ ID NO: 47916 - protein, 12 aa, synthetic construct
TSATAASSNDNT

SEQ ID NO: 47917 - protein, 12 aa, synthetic construct
TSATAASTNDNA

SEQ ID NO: 47918 - protein, 12 aa, synthetic construct
TSATAASTNDNH

SEQ ID NO: 47919 - protein, 12 aa, synthetic construct
TSATAASTNDNT

SEQ ID NO: 47920 - protein, 12 aa, synthetic construct
TSATAGASNDNA

SEQ ID NO: 47921 - protein, 12 aa, synthetic construct
TSATAGASNDNH

SEQ ID NO: 47922 - protein, 12 aa, synthetic construct
TSATAGASNDNT

SEQ ID NO: 47923 - protein, 12 aa, synthetic construct
TSATAGATNDNA

SEQ ID NO: 47924 - protein, 12 aa, synthetic construct
TSATAGATNDNH

SEQ ID NO: 47925 - protein, 12 aa, synthetic construct
TSATAGATNDNT

SEQ ID NO: 47926 - protein, 12 aa, synthetic construct
TSATAGSSNDNA

SEQ ID NO: 47927 - protein, 12 aa, synthetic construct
TSATAGSSNDNH

SEQ ID NO: 47928 - protein, 12 aa, synthetic construct
TSATAGSSNDNT

SEQ ID NO: 47929 - protein, 12 aa, synthetic construct
TSATAGSTNDNA

SEQ ID NO: 47930 - protein, 12 aa, synthetic construct
TSATAGSTNDNH

SEQ ID NO: 47931 - protein, 12 aa, synthetic construct
TSATAGSTNDNT

SEQ ID NO: 47932 - protein, 12 aa, synthetic construct
TSATGAASNDNA

SEQ ID NO: 47933 - protein, 12 aa, synthetic construct
TSATGAASNDNH

SEQ ID NO: 47934 - protein, 12 aa, synthetic construct
TSATGAASNDNT

SEQ ID NO: 47935 - protein, 12 aa, synthetic construct
TSATGAATNDNA

SEQ ID NO: 47936 - protein, 12 aa, synthetic construct
TSATGAATNDNH

SEQ ID NO: 47937 - protein, 12 aa, synthetic construct
TSATGAATNDNT

SEQ ID NO: 47938 - protein, 12 aa, synthetic construct
TSATGASSNDNA

SEQ ID NO: 47939 - protein, 12 aa, synthetic construct
TSATGASSNDNH

SEQ ID NO: 47940 - protein, 12 aa, synthetic construct
TSATGASSNDNT

SEQ ID NO: 47941 - protein, 12 aa, synthetic construct
TSATGASTNDNA

SEQ ID NO: 47942 - protein, 12 aa, synthetic construct
TSATGASTNDNH

SEQ ID NO: 47943 - protein, 12 aa, synthetic construct
TSATGASTNDNT

SEQ ID NO: 47944 - protein, 12 aa, synthetic construct
TSATGGASNDNA

SEQ ID NO: 47945 - protein, 12 aa, synthetic construct
TSATGGASNDNH

SEQ ID NO: 47946 - protein, 12 aa, synthetic construct
TSATGGASNDNT

SEQ ID NO: 47947 - protein, 12 aa, synthetic construct
TSATGGATNDNA

SEQ ID NO: 47948 - protein, 12 aa, synthetic construct
TSATGGATNDNH

SEQ ID NO: 47949 - protein, 12 aa, synthetic construct
TSATGGATNDNT

SEQ ID NO: 47950 - protein, 12 aa, synthetic construct
TSATGGSSNDNA

SEQ ID NO: 47951 - protein, 12 aa, synthetic construct
TSATGGSSNDNH

SEQ ID NO: 47952 - protein, 12 aa, synthetic construct
TSATGGSSNDNT

SEQ ID NO: 47953 - protein, 12 aa, synthetic construct
TSATGGSTNDNA

SEQ ID NO: 47954 - protein, 12 aa, synthetic construct
TSATGGSTNDNH

SEQ ID NO: 47955 - protein, 12 aa, synthetic construct
TSATGGSTNDNT

SEQ ID NO: 47956 - protein, 12 aa, synthetic construct
TSEAAAASNDNA

SEQ ID NO: 47957 - protein, 12 aa, synthetic construct
TSEAAAASNDNH

SEQ ID NO: 47958 - protein, 12 aa, synthetic construct
TSEAAAASNDNT

SEQ ID NO: 47959 - protein, 12 aa, synthetic construct
TSEAAAATNDNA

SEQ ID NO: 47960 - protein, 12 aa, synthetic construct
TSEAAAATNDNH

SEQ ID NO: 47961 - protein, 12 aa, synthetic construct
TSEAAAATNDNT

SEQ ID NO: 47962 - protein, 12 aa, synthetic construct
TSEAAASSNDNA

SEQ ID NO: 47963 - protein, 12 aa, synthetic construct
TSEAAASSNDNH

SEQ ID NO: 47964 - protein, 12 aa, synthetic construct
TSEAAASSNDNT

SEQ ID NO: 47965 - protein, 12 aa, synthetic construct
TSEAAASTNDNA

SEQ ID NO: 47966 - protein, 12 aa, synthetic construct
TSEAAASTNDNH

SEQ ID NO: 47967 - protein, 12 aa, synthetic construct
TSEAAASTNDNT

SEQ ID NO: 47968 - protein, 12 aa, synthetic construct
TSEAAGASNDNA

SEQ ID NO: 47969 - protein, 12 aa, synthetic construct
TSEAAGASNDNH

SEQ ID NO: 47970 - protein, 12 aa, synthetic construct
TSEAAGASNDNT

SEQ ID NO: 47971 - protein, 12 aa, synthetic construct
TSEAAGATNDNA

SEQ ID NO: 47972 - protein, 12 aa, synthetic construct
TSEAAGATNDNH

SEQ ID NO: 47973 - protein, 12 aa, synthetic construct
TSEAAGATNDNT

SEQ ID NO: 47974 - protein, 12 aa, synthetic construct
TSEAAGSSNDNA

SEQ ID NO: 47975 - protein, 12 aa, synthetic construct
TSEAAGSSNDNH

SEQ ID NO: 47976 - protein, 12 aa, synthetic construct
TSEAAGSSNDNT

SEQ ID NO: 47977 - protein, 12 aa, synthetic construct
TSEAAGSTNDNA

SEQ ID NO: 47978 - protein, 12 aa, synthetic construct
TSEAAGSTNDNH

SEQ ID NO: 47979 - protein, 12 aa, synthetic construct
TSEAAGSTNDNT

SEQ ID NO: 47980 - protein, 12 aa, synthetic construct
TSEAGAASNDNA

SEQ ID NO: 47981 - protein, 12 aa, synthetic construct
TSEAGAASNDNH

SEQ ID NO: 47982 - protein, 12 aa, synthetic construct
TSEAGAASNDNT

SEQ ID NO: 47983 - protein, 12 aa, synthetic construct
TSEAGAATNDNA

SEQ ID NO: 47984 - protein, 12 aa, synthetic construct
TSEAGAATNDNH

SEQ ID NO: 47985 - protein, 12 aa, synthetic construct
TSEAGAATNDNT

SEQ ID NO: 47986 - protein, 12 aa, synthetic construct
TSEAGASSNDNA

SEQ ID NO: 47987 - protein, 12 aa, synthetic construct
TSEAGASSNDNH

SEQ ID NO: 47988 - protein, 12 aa, synthetic construct
TSEAGASSNDNT

SEQ ID NO: 47989 - protein, 12 aa, synthetic construct
TSEAGASTNDNA

SEQ ID NO: 47990 - protein, 12 aa, synthetic construct
TSEAGASTNDNH

SEQ ID NO: 47991 - protein, 12 aa, synthetic construct
TSEAGASTNDNT

SEQ ID NO: 47992 - protein, 12 aa, synthetic construct
TSEAGGASNDNA

SEQ ID NO: 47993 - protein, 12 aa, synthetic construct
TSEAGGASNDNH

SEQ ID NO: 47994 - protein, 12 aa, synthetic construct
TSEAGGASNDNT

SEQ ID NO: 47995 - protein, 12 aa, synthetic construct
TSEAGGATNDNA

SEQ ID NO: 47996 - protein, 12 aa, synthetic construct
TSEAGGATNDNH

SEQ ID NO: 47997 - protein, 12 aa, synthetic construct
TSEAGGATNDNT

SEQ ID NO: 47998 - protein, 12 aa, synthetic construct
TSEAGGSSNDNA

SEQ ID NO: 47999 - protein, 12 aa, synthetic construct
TSEAGGSSNDNH

SEQ ID NO: 48000 - protein, 12 aa, synthetic construct
TSEAGGSSNDNT

SEQ ID NO: 48001 - protein, 12 aa, synthetic construct
TSEAGGSTNDNA

SEQ ID NO: 48002 - protein, 12 aa, synthetic construct
TSEAGGSTNDNH

SEQ ID NO: 48003 - protein, 12 aa, synthetic construct
TSEAGGSTNDNT

SEQ ID NO: 48004 - protein, 12 aa, synthetic construct
TSESAAASNDNA

SEQ ID NO: 48005 - protein, 12 aa, synthetic construct
TSESAAASNDNH

SEQ ID NO: 48006 - protein, 12 aa, synthetic construct
TSESAAASNDNT

SEQ ID NO: 48007 - protein, 12 aa, synthetic construct
TSESAAATNDNA

SEQ ID NO: 48008 - protein, 12 aa, synthetic construct
TSESAAATNDNH

SEQ ID NO: 48009 - protein, 12 aa, synthetic construct
TSESAAATNDNT

SEQ ID NO: 48010 - protein, 12 aa, synthetic construct
TSESAASSNDNA

SEQ ID NO: 48011 - protein, 12 aa, synthetic construct
TSESAASSNDNH

SEQ ID NO: 48012 - protein, 12 aa, synthetic construct
TSESAASSNDNT

SEQ ID NO: 48013 - protein, 12 aa, synthetic construct
TSESAASTNDNA

SEQ ID NO: 48014 - protein, 12 aa, synthetic construct
TSESAASTNDNH

SEQ ID NO: 48015 - protein, 12 aa, synthetic construct
TSESAASTNDNT

SEQ ID NO: 48016 - protein, 12 aa, synthetic construct
TSESAGASNDNA

SEQ ID NO: 48017 - protein, 12 aa, synthetic construct
TSESAGASNDNH

SEQ ID NO: 48018 - protein, 12 aa, synthetic construct
TSESAGASNDNT

SEQ ID NO: 48019 - protein, 12 aa, synthetic construct
TSESAGATNDNA

SEQ ID NO: 48020 - protein, 12 aa, synthetic construct
TSESAGATNDNH

SEQ ID NO: 48021 - protein, 12 aa, synthetic construct
TSESAGATNDNT

SEQ ID NO: 48022 - protein, 12 aa, synthetic construct
TSESAGSSNDNA

SEQ ID NO: 48023 - protein, 12 aa, synthetic construct
TSESAGSSNDNH

SEQ ID NO: 48024 - protein, 12 aa, synthetic construct
TSESAGSSNDNT

SEQ ID NO: 48025 - protein, 12 aa, synthetic construct
TSESAGSTNDNA

SEQ ID NO: 48026 - protein, 12 aa, synthetic construct
TSESAGSTNDNH

SEQ ID NO: 48027 - protein, 12 aa, synthetic construct
TSESAGSTNDNT

SEQ ID NO: 48028 - protein, 12 aa, synthetic construct
TSESGAASNDNA

SEQ ID NO: 48029 - protein, 12 aa, synthetic construct
TSESGAASNDNH

SEQ ID NO: 48030 - protein, 12 aa, synthetic construct
TSESGAASNDNT

SEQ ID NO: 48031 - protein, 12 aa, synthetic construct
TSESGAATNDNA

SEQ ID NO: 48032 - protein, 12 aa, synthetic construct
TSESGAATNDNH

SEQ ID NO: 48033 - protein, 12 aa, synthetic construct
TSESGAATNDNT

SEQ ID NO: 48034 - protein, 12 aa, synthetic construct
TSESGASSNDNA

SEQ ID NO: 48035 - protein, 12 aa, synthetic construct
TSESGASSNDNH

SEQ ID NO: 48036 - protein, 12 aa, synthetic construct
TSESGASSNDNT

SEQ ID NO: 48037 - protein, 12 aa, synthetic construct
TSESGASTNDNA

SEQ ID NO: 48038 - protein, 12 aa, synthetic construct
TSESGASTNDNH

SEQ ID NO: 48039 - protein, 12 aa, synthetic construct
TSESGASTNDNT

SEQ ID NO: 48040 - protein, 12 aa, synthetic construct
TSESGGASNDNA

SEQ ID NO: 48041 - protein, 12 aa, synthetic construct
TSESGGASNDNH

SEQ ID NO: 48042 - protein, 12 aa, synthetic construct
TSESGGASNDNT

SEQ ID NO: 48043 - protein, 12 aa, synthetic construct
TSESGGATNDNA

SEQ ID NO: 48044 - protein, 12 aa, synthetic construct
TSESGGATNDNH

SEQ ID NO: 48045 - protein, 12 aa, synthetic construct
TSESGGATNDNT

SEQ ID NO: 48046 - protein, 12 aa, synthetic construct
TSESGGSSNDNA

SEQ ID NO: 48047 - protein, 12 aa, synthetic construct
TSESGGSSNDNH

SEQ ID NO: 48048 - protein, 12 aa, synthetic construct
TSESGGSSNDNT

SEQ ID NO: 48049 - protein, 12 aa, synthetic construct
TSESGGSTNDNA

SEQ ID NO: 48050 - protein, 12 aa, synthetic construct
TSESGGSTNDNH

SEQ ID NO: 48051 - protein, 12 aa, synthetic construct
TSESGGSTNDNT

SEQ ID NO: 48052 - protein, 12 aa, synthetic construct
TSETAAASNDNA

SEQ ID NO: 48053 - protein, 12 aa, synthetic construct
TSETAAASNDNH

SEQ ID NO: 48054 - protein, 12 aa, synthetic construct
TSETAAASNDNT

SEQ ID NO: 48055 - protein, 12 aa, synthetic construct
TSETAAATNDNA

SEQ ID NO: 48056 - protein, 12 aa, synthetic construct
TSETAAATNDNH

SEQ ID NO: 48057 - protein, 12 aa, synthetic construct
TSETAAATNDNT

SEQ ID NO: 48058 - protein, 12 aa, synthetic construct
TSETAASSNDNA

SEQ ID NO: 48059 - protein, 12 aa, synthetic construct
TSETAASSNDNH

SEQ ID NO: 48060 - protein, 12 aa, synthetic construct
TSETAASSNDNT

SEQ ID NO: 48061 - protein, 12 aa, synthetic construct
TSETAASTNDNA

SEQ ID NO: 48062 - protein, 12 aa, synthetic construct
TSETAASTNDNH

SEQ ID NO: 48063 - protein, 12 aa, synthetic construct
TSETAASTNDNT

SEQ ID NO: 48064 - protein, 12 aa, synthetic construct
TSETAGASNDNA

SEQ ID NO: 48065 - protein, 12 aa, synthetic construct
TSETAGASNDNH

SEQ ID NO: 48066 - protein, 12 aa, synthetic construct
TSETAGASNDNT

SEQ ID NO: 48067 - protein, 12 aa, synthetic construct
TSETAGATNDNA

SEQ ID NO: 48068 - protein, 12 aa, synthetic construct
TSETAGATNDNH

SEQ ID NO: 48069 - protein, 12 aa, synthetic construct
TSETAGATNDNT

SEQ ID NO: 48070 - protein, 12 aa, synthetic construct
TSETAGSSNDNA

SEQ ID NO: 48071 - protein, 12 aa, synthetic construct
TSETAGSSNDNH

SEQ ID NO: 48072 - protein, 12 aa, synthetic construct
TSETAGSSNDNT

SEQ ID NO: 48073 - protein, 12 aa, synthetic construct
TSETAGSTNDNA

SEQ ID NO: 48074 - protein, 12 aa, synthetic construct
TSETAGSTNDNH

SEQ ID NO: 48075 - protein, 12 aa, synthetic construct
TSETAGSTNDNT

SEQ ID NO: 48076 - protein, 12 aa, synthetic construct
TSETGAASNDNA

SEQ ID NO: 48077 - protein, 12 aa, synthetic construct
TSETGAASNDNH

SEQ ID NO: 48078 - protein, 12 aa, synthetic construct
TSETGAASNDNT

SEQ ID NO: 48079 - protein, 12 aa, synthetic construct
TSETGAATNDNA

SEQ ID NO: 48080 - protein, 12 aa, synthetic construct
TSETGAATNDNH

SEQ ID NO: 48081 - protein, 12 aa, synthetic construct
TSETGAATNDNT

SEQ ID NO: 48082 - protein, 12 aa, synthetic construct
TSETGASSNDNA

SEQ ID NO: 48083 - protein, 12 aa, synthetic construct
TSETGASSNDNH

SEQ ID NO: 48084 - protein, 12 aa, synthetic construct
TSETGASSNDNT

SEQ ID NO: 48085 - protein, 12 aa, synthetic construct
TSETGASTNDNA

SEQ ID NO: 48086 - protein, 12 aa, synthetic construct
TSETGASTNDNH

SEQ ID NO: 48087 - protein, 12 aa, synthetic construct
TSETGASTNDNT

SEQ ID NO: 48088 - protein, 12 aa, synthetic construct
TSETGGASNDNA

SEQ ID NO: 48089 - protein, 12 aa, synthetic construct
TSETGGASNDNH

SEQ ID NO: 48090 - protein, 12 aa, synthetic construct
TSETGGASNDNT

SEQ ID NO: 48091 - protein, 12 aa, synthetic construct
TSETGGATNDNA

SEQ ID NO: 48092 - protein, 12 aa, synthetic construct
TSETGGATNDNH

SEQ ID NO: 48093 - protein, 12 aa, synthetic construct
TSETGGATNDNT

SEQ ID NO: 48094 - protein, 12 aa, synthetic construct
TSETGGSSNDNA

SEQ ID NO: 48095 - protein, 12 aa, synthetic construct
TSETGGSSNDNH

SEQ ID NO: 48096 - protein, 12 aa, synthetic construct
TSETGGSSNDNT

SEQ ID NO: 48097 - protein, 12 aa, synthetic construct
TSETGGSTNDNA

SEQ ID NO: 48098 - protein, 12 aa, synthetic construct
TSETGGSTNDNH

SEQ ID NO: 48099 - protein, 12 aa, synthetic construct
TSETGGSTNDNT

SEQ ID NO: 48100 - protein, 12 aa, synthetic construct
TSQAAAASNDNA

SEQ ID NO: 48101 - protein, 12 aa, synthetic construct
TSQAAAASNDNH

SEQ ID NO: 48102 - protein, 12 aa, synthetic construct
TSQAAAASNDNT

SEQ ID NO: 48103 - protein, 12 aa, synthetic construct
TSQAAAATNDNA

SEQ ID NO: 48104 - protein, 12 aa, synthetic construct
TSQAAAATNDNH

SEQ ID NO: 48105 - protein, 12 aa, synthetic construct
TSQAAAATNDNT

SEQ ID NO: 48106 - protein, 12 aa, synthetic construct
TSQAAASSNDNA

SEQ ID NO: 48107 - protein, 12 aa, synthetic construct
TSQAAASSNDNH

SEQ ID NO: 48108 - protein, 12 aa, synthetic construct
TSQAAASSNDNT

SEQ ID NO: 48109 - protein, 12 aa, synthetic construct
TSQAAASTNDNA

SEQ ID NO: 48110 - protein, 12 aa, synthetic construct
TSQAAASTNDNH

SEQ ID NO: 48111 - protein, 12 aa, synthetic construct
TSQAAASTNDNT

SEQ ID NO: 48112 - protein, 12 aa, synthetic construct
TSQAAGASNDNA

SEQ ID NO: 48113 - protein, 12 aa, synthetic construct
TSQAAGASNDNH

SEQ ID NO: 48114 - protein, 12 aa, synthetic construct
TSQAAGASNDNT

SEQ ID NO: 48115 - protein, 12 aa, synthetic construct
TSQAAGATNDNA

SEQ ID NO: 48116 - protein, 12 aa, synthetic construct
TSQAAGATNDNH

SEQ ID NO: 48117 - protein, 12 aa, synthetic construct
TSQAAGATNDNT

SEQ ID NO: 48118 - protein, 12 aa, synthetic construct
TSQAAGSSNDNA

SEQ ID NO: 48119 - protein, 12 aa, synthetic construct
TSQAAGSSNDNH

SEQ ID NO: 48120 - protein, 12 aa, synthetic construct
TSQAAGSSNDNT

SEQ ID NO: 48121 - protein, 12 aa, synthetic construct
TSQAAGSTNDNA

SEQ ID NO: 48122 - protein, 12 aa, synthetic construct
TSQAAGSTNDNH

SEQ ID NO: 48123 - protein, 12 aa, synthetic construct
TSQAAGSTNDNT

SEQ ID NO: 48124 - protein, 12 aa, synthetic construct
TSQAGAASNDNA

SEQ ID NO: 48125 - protein, 12 aa, synthetic construct
TSQAGAASNDNH

SEQ ID NO: 48126 - protein, 12 aa, synthetic construct
TSQAGAASNDNT

SEQ ID NO: 48127 - protein, 12 aa, synthetic construct
TSQAGAATNDNA

SEQ ID NO: 48128 - protein, 12 aa, synthetic construct
TSQAGAATNDNH

SEQ ID NO: 48129 - protein, 12 aa, synthetic construct
TSQAGAATNDNT

SEQ ID NO: 48130 - protein, 12 aa, synthetic construct
TSQAGASSNDNA

SEQ ID NO: 48131 - protein, 12 aa, synthetic construct
TSQAGASSNDNH

SEQ ID NO: 48132 - protein, 12 aa, synthetic construct
TSQAGASSNDNT

SEQ ID NO: 48133 - protein, 12 aa, synthetic construct
TSQAGASTNDNA

SEQ ID NO: 48134 - protein, 12 aa, synthetic construct
TSQAGASTNDNH

SEQ ID NO: 48135 - protein, 12 aa, synthetic construct
TSQAGASTNDNT

SEQ ID NO: 48136 - protein, 12 aa, synthetic construct
TSQAGGASNDNA

SEQ ID NO: 48137 - protein, 12 aa, synthetic construct
TSQAGGASNDNH

SEQ ID NO: 48138 - protein, 12 aa, synthetic construct
TSQAGGASNDNT

SEQ ID NO: 48139 - protein, 12 aa, synthetic construct
TSQAGGATNDNA

SEQ ID NO: 48140 - protein, 12 aa, synthetic construct
TSQAGGATNDNH

SEQ ID NO: 48141 - protein, 12 aa, synthetic construct
TSQAGGATNDNT

SEQ ID NO: 48142 - protein, 12 aa, synthetic construct
TSQAGGSSNDNA

SEQ ID NO: 48143 - protein, 12 aa, synthetic construct
TSQAGGSSNDNH

SEQ ID NO: 48144 - protein, 12 aa, synthetic construct
TSQAGGSSNDNT

SEQ ID NO: 48145 - protein, 12 aa, synthetic construct
TSQAGGSTNDNA

SEQ ID NO: 48146 - protein, 12 aa, synthetic construct
TSQAGGSTNDNH

SEQ ID NO: 48147 - protein, 12 aa, synthetic construct
TSQAGGSTNDNT

SEQ ID NO: 48148 - protein, 12 aa, synthetic construct
TSQSAAASNDNA

SEQ ID NO: 48149 - protein, 12 aa, synthetic construct
TSQSAAASNDNH

SEQ ID NO: 48150 - protein, 12 aa, synthetic construct
TSQSAAASNDNT

SEQ ID NO: 48151 - protein, 12 aa, synthetic construct
TSQSAAATNDNA

SEQ ID NO: 48152 - protein, 12 aa, synthetic construct
TSQSAAATNDNH

SEQ ID NO: 48153 - protein, 12 aa, synthetic construct
TSQSAAATNDNT

SEQ ID NO: 48154 - protein, 12 aa, synthetic construct
TSQSAASSNDNA

SEQ ID NO: 48155 - protein, 12 aa, synthetic construct
TSQSAASSNDNH

SEQ ID NO: 48156 - protein, 12 aa, synthetic construct
TSQSAASSNDNT

SEQ ID NO: 48157 - protein, 12 aa, synthetic construct
TSQSAASTNDNA

SEQ ID NO: 48158 - protein, 12 aa, synthetic construct
TSQSAASTNDNH

SEQ ID NO: 48159 - protein, 12 aa, synthetic construct
TSQSAASTNDNT

SEQ ID NO: 48160 - protein, 12 aa, synthetic construct
TSQSAGASNDNA

SEQ ID NO: 48161 - protein, 12 aa, synthetic construct
TSQSAGASNDNH

SEQ ID NO: 48162 - protein, 12 aa, synthetic construct
TSQSAGASNDNT

SEQ ID NO: 48163 - protein, 12 aa, synthetic construct
TSQSAGATNDNA

SEQ ID NO: 48164 - protein, 12 aa, synthetic construct
TSQSAGATNDNH

SEQ ID NO: 48165 - protein, 12 aa, synthetic construct
TSQSAGATNDNT

SEQ ID NO: 48166 - protein, 12 aa, synthetic construct
TSQSAGSSNDNA

SEQ ID NO: 48167 - protein, 12 aa, synthetic construct
TSQSAGSSNDNH

SEQ ID NO: 48168 - protein, 12 aa, synthetic construct
TSQSAGSSNDNT

SEQ ID NO: 48169 - protein, 12 aa, synthetic construct
TSQSAGSTNDNA

SEQ ID NO: 48170 - protein, 12 aa, synthetic construct
TSQSAGSTNDNH

SEQ ID NO: 48171 - protein, 12 aa, synthetic construct
TSQSAGSTNDNT

SEQ ID NO: 48172 - protein, 12 aa, synthetic construct
TSQSGAASNDNA

SEQ ID NO: 48173 - protein, 12 aa, synthetic construct
TSQSGAASNDNH

SEQ ID NO: 48174 - protein, 12 aa, synthetic construct
TSQSGAASNDNT

SEQ ID NO: 48175 - protein, 12 aa, synthetic construct
TSQSGAATNDNA

SEQ ID NO: 48176 - protein, 12 aa, synthetic construct
TSQSGAATNDNH

SEQ ID NO: 48177 - protein, 12 aa, synthetic construct
TSQSGAATNDNT

SEQ ID NO: 48178 - protein, 12 aa, synthetic construct
TSQSGASSNDNA

SEQ ID NO: 48179 - protein, 12 aa, synthetic construct
TSQSGASSNDNH

SEQ ID NO: 48180 - protein, 12 aa, synthetic construct
TSQSGASSNDNT

SEQ ID NO: 48181 - protein, 12 aa, synthetic construct
TSQSGASTNDNA

SEQ ID NO: 48182 - protein, 12 aa, synthetic construct
TSQSGASTNDNH

SEQ ID NO: 48183 - protein, 12 aa, synthetic construct
TSQSGASTNDNT

SEQ ID NO: 48184 - protein, 12 aa, synthetic construct
TSQSGGASNDNA

SEQ ID NO: 48185 - protein, 12 aa, synthetic construct
TSQSGGASNDNH

SEQ ID NO: 48186 - protein, 12 aa, synthetic construct
TSQSGGASNDNT

SEQ ID NO: 48187 - protein, 12 aa, synthetic construct
TSQSGGATNDNA

SEQ ID NO: 48188 - protein, 12 aa, synthetic construct
TSQSGGATNDNH

SEQ ID NO: 48189 - protein, 12 aa, synthetic construct
TSQSGGATNDNT

SEQ ID NO: 48190 - protein, 12 aa, synthetic construct
TSQSGGSSNDNA

SEQ ID NO: 48191 - protein, 12 aa, synthetic construct
TSQSGGSSNDNH

SEQ ID NO: 48192 - protein, 12 aa, synthetic construct
TSQSGGSSNDNT

SEQ ID NO: 48193 - protein, 12 aa, synthetic construct
TSQSGGSTNDNA

SEQ ID NO: 48194 - protein, 12 aa, synthetic construct
TSQSGGSTNDNH

SEQ ID NO: 48195 - protein, 12 aa, synthetic construct
TSQSGGSTNDNT

SEQ ID NO: 48196 - protein, 12 aa, synthetic construct
TSQTAAASNDNA

SEQ ID NO: 48197 - protein, 12 aa, synthetic construct
TSQTAAASNDNH

SEQ ID NO: 48198 - protein, 12 aa, synthetic construct
TSQTAAASNDNT

SEQ ID NO: 48199 - protein, 12 aa, synthetic construct
TSQTAAATNDNA

SEQ ID NO: 48200 - protein, 12 aa, synthetic construct
TSQTAAATNDNH

SEQ ID NO: 48201 - protein, 12 aa, synthetic construct
TSQTAAATNDNT

SEQ ID NO: 48202 - protein, 12 aa, synthetic construct
TSQTAASSNDNA

SEQ ID NO: 48203 - protein, 12 aa, synthetic construct
TSQTAASSNDNH

SEQ ID NO: 48204 - protein, 12 aa, synthetic construct
TSQTAASSNDNT

SEQ ID NO: 48205 - protein, 12 aa, synthetic construct
TSQTAASTNDNA

SEQ ID NO: 48206 - protein, 12 aa, synthetic construct
TSQTAASTNDNH

SEQ ID NO: 48207 - protein, 12 aa, synthetic construct
TSQTAASTNDNT

SEQ ID NO: 48208 - protein, 12 aa, synthetic construct
TSQTAGASNDNA

SEQ ID NO: 48209 - protein, 12 aa, synthetic construct
TSQTAGASNDNH

SEQ ID NO: 48210 - protein, 12 aa, synthetic construct
TSQTAGASNDNT

SEQ ID NO: 48211 - protein, 12 aa, synthetic construct
TSQTAGATNDNA

SEQ ID NO: 48212 - protein, 12 aa, synthetic construct
TSQTAGATNDNH

SEQ ID NO: 48213 - protein, 12 aa, synthetic construct
TSQTAGATNDNT

SEQ ID NO: 48214 - protein, 12 aa, synthetic construct
TSQTAGSSNDNA

SEQ ID NO: 48215 - protein, 12 aa, synthetic construct
TSQTAGSSNDNH

SEQ ID NO: 48216 - protein, 12 aa, synthetic construct
TSQTAGSSNDNT

SEQ ID NO: 48217 - protein, 12 aa, synthetic construct
TSQTAGSTNDNA

SEQ ID NO: 48218 - protein, 12 aa, synthetic construct
TSQTAGSTNDNH

SEQ ID NO: 48219 - protein, 12 aa, synthetic construct
TSQTAGSTNDNT

SEQ ID NO: 48220 - protein, 12 aa, synthetic construct
TSQTGAASNDNA

SEQ ID NO: 48221 - protein, 12 aa, synthetic construct
TSQTGAASNDNH

SEQ ID NO: 48222 - protein, 12 aa, synthetic construct
TSQTGAASNDNT

SEQ ID NO: 48223 - protein, 12 aa, synthetic construct
TSQTGAATNDNA

SEQ ID NO: 48224 - protein, 12 aa, synthetic construct
TSQTGAATNDNH

SEQ ID NO: 48225 - protein, 12 aa, synthetic construct
TSQTGAATNDNT

SEQ ID NO: 48226 - protein, 12 aa, synthetic construct
TSQTGASSNDNA

SEQ ID NO: 48227 - protein, 12 aa, synthetic construct
TSQTGASSNDNH

SEQ ID NO: 48228 - protein, 12 aa, synthetic construct
TSQTGASSNDNT

SEQ ID NO: 48229 - protein, 12 aa, synthetic construct
TSQTGASTNDNA

SEQ ID NO: 48230 - protein, 12 aa, synthetic construct
TSQTGASTNDNH

SEQ ID NO: 48231 - protein, 12 aa, synthetic construct
TSQTGASTNDNT

SEQ ID NO: 48232 - protein, 12 aa, synthetic construct
TSQTGGASNDNA

SEQ ID NO: 48233 - protein, 12 aa, synthetic construct
TSQTGGASNDNH

SEQ ID NO: 48234 - protein, 12 aa, synthetic construct
TSQTGGASNDNT

SEQ ID NO: 48235 - protein, 12 aa, synthetic construct
TSQTGGATNDNA

SEQ ID NO: 48236 - protein, 12 aa, synthetic construct
TSQTGGATNDNH

SEQ ID NO: 48237 - protein, 12 aa, synthetic construct
TSQTGGATNDNT

SEQ ID NO: 48238 - protein, 12 aa, synthetic construct
TSQTGGSSNDNA

SEQ ID NO: 48239 - protein, 12 aa, synthetic construct
TSQTGGSSNDNH

SEQ ID NO: 48240 - protein, 12 aa, synthetic construct
TSQTGGSSNDNT

SEQ ID NO: 48241 - protein, 12 aa, synthetic construct
TSQTGGSTNDNA

SEQ ID NO: 48242 - protein, 12 aa, synthetic construct
TSQTGGSTNDNH

SEQ ID NO: 48243 - protein, 12 aa, synthetic construct
TSQTGGSTNDNT

SEQ ID NO: 48244 - protein, 12 aa, synthetic construct
TSTAAAASNDNA

SEQ ID NO: 48245 - protein, 12 aa, synthetic construct
TSTAAAASNDNH

SEQ ID NO: 48246 - protein, 12 aa, synthetic construct
TSTAAAASNDNT

SEQ ID NO: 48247 - protein, 12 aa, synthetic construct
TSTAAAATNDNA

SEQ ID NO: 48248 - protein, 12 aa, synthetic construct
TSTAAAATNDNH

SEQ ID NO: 48249 - protein, 12 aa, synthetic construct
TSTAAAATNDNT

SEQ ID NO: 48250 - protein, 12 aa, synthetic construct
TSTAAASSNDNA

SEQ ID NO: 48251 - protein, 12 aa, synthetic construct
TSTAAASSNDNH

SEQ ID NO: 48252 - protein, 12 aa, synthetic construct
TSTAAASSNDNT

SEQ ID NO: 48253 - protein, 12 aa, synthetic construct
TSTAAASTNDNA

SEQ ID NO: 48254 - protein, 12 aa, synthetic construct
TSTAAASTNDNH

SEQ ID NO: 48255 - protein, 12 aa, synthetic construct
TSTAAASTNDNT

SEQ ID NO: 48256 - protein, 12 aa, synthetic construct
TSTAAGASNDNA

SEQ ID NO: 48257 - protein, 12 aa, synthetic construct
TSTAAGASNDNH

SEQ ID NO: 48258 - protein, 12 aa, synthetic construct
TSTAAGASNDNT

SEQ ID NO: 48259 - protein, 12 aa, synthetic construct
TSTAAGATNDNA

SEQ ID NO: 48260 - protein, 12 aa, synthetic construct
TSTAAGATNDNH

SEQ ID NO: 48261 - protein, 12 aa, synthetic construct
TSTAAGATNDNT

SEQ ID NO: 48262 - protein, 12 aa, synthetic construct
TSTAAGSSNDNA

SEQ ID NO: 48263 - protein, 12 aa, synthetic construct
TSTAAGSSNDNH

SEQ ID NO: 48264 - protein, 12 aa, synthetic construct
TSTAAGSSNDNT

SEQ ID NO: 48265 - protein, 12 aa, synthetic construct
TSTAAGSTNDNA

SEQ ID NO: 48266 - protein, 12 aa, synthetic construct
TSTAAGSTNDNH

SEQ ID NO: 48267 - protein, 12 aa, synthetic construct
TSTAAGSTNDNT

SEQ ID NO: 48268 - protein, 12 aa, synthetic construct
TSTAGAASNDNA

SEQ ID NO: 48269 - protein, 12 aa, synthetic construct
TSTAGAASNDNH

SEQ ID NO: 48270 - protein, 12 aa, synthetic construct
TSTAGAASNDNT

SEQ ID NO: 48271 - protein, 12 aa, synthetic construct
TSTAGAATNDNA

SEQ ID NO: 48272 - protein, 12 aa, synthetic construct
TSTAGAATNDNH

SEQ ID NO: 48273 - protein, 12 aa, synthetic construct
TSTAGAATNDNT

SEQ ID NO: 48274 - protein, 12 aa, synthetic construct
TSTAGASSNDNA

SEQ ID NO: 48275 - protein, 12 aa, synthetic construct
TSTAGASSNDNH

SEQ ID NO: 48276 - protein, 12 aa, synthetic construct
TSTAGASSNDNT

SEQ ID NO: 48277 - protein, 12 aa, synthetic construct
TSTAGASTNDNA

SEQ ID NO: 48278 - protein, 12 aa, synthetic construct
TSTAGASTNDNH

SEQ ID NO: 48279 - protein, 12 aa, synthetic construct
TSTAGASTNDNT

SEQ ID NO: 48280 - protein, 12 aa, synthetic construct
TSTAGGASNDNA

SEQ ID NO: 48281 - protein, 12 aa, synthetic construct
TSTAGGASNDNH

SEQ ID NO: 48282 - protein, 12 aa, synthetic construct
TSTAGGASNDNT

SEQ ID NO: 48283 - protein, 12 aa, synthetic construct
TSTAGGATNDNA

SEQ ID NO: 48284 - protein, 12 aa, synthetic construct
TSTAGGATNDNH

SEQ ID NO: 48285 - protein, 12 aa, synthetic construct
TSTAGGATNDNT

SEQ ID NO: 48286 - protein, 12 aa, synthetic construct
TSTAGGSSNDNA

SEQ ID NO: 48287 - protein, 12 aa, synthetic construct
TSTAGGSSNDNH

SEQ ID NO: 48288 - protein, 12 aa, synthetic construct
TSTAGGSSNDNT

SEQ ID NO: 48289 - protein, 12 aa, synthetic construct
TSTAGGSTNDNA

SEQ ID NO: 48290 - protein, 12 aa, synthetic construct
TSTAGGSTNDNH

SEQ ID NO: 48291 - protein, 12 aa, synthetic construct
TSTAGGSTNDNT

SEQ ID NO: 48292 - protein, 12 aa, synthetic construct
TSTSAAASNDNA

SEQ ID NO: 48293 - protein, 12 aa, synthetic construct
TSTSAAASNDNH

SEQ ID NO: 48294 - protein, 12 aa, synthetic construct
TSTSAAASNDNT

SEQ ID NO: 48295 - protein, 12 aa, synthetic construct
TSTSAAATNDNA

SEQ ID NO: 48296 - protein, 12 aa, synthetic construct
TSTSAAATNDNH

SEQ ID NO: 48297 - protein, 12 aa, synthetic construct
TSTSAAATNDNT

SEQ ID NO: 48298 - protein, 12 aa, synthetic construct
TSTSAASSNDNA

SEQ ID NO: 48299 - protein, 12 aa, synthetic construct
TSTSAASSNDNH

SEQ ID NO: 48300 - protein, 12 aa, synthetic construct
TSTSAASSNDNT

SEQ ID NO: 48301 - protein, 12 aa, synthetic construct
TSTSAASTNDNA

SEQ ID NO: 48302 - protein, 12 aa, synthetic construct
TSTSAASTNDNH

SEQ ID NO: 48303 - protein, 12 aa, synthetic construct
TSTSAASTNDNT

SEQ ID NO: 48304 - protein, 12 aa, synthetic construct
TSTSAGASNDNA

SEQ ID NO: 48305 - protein, 12 aa, synthetic construct
TSTSAGASNDNH

SEQ ID NO: 48306 - protein, 12 aa, synthetic construct
TSTSAGASNDNT

SEQ ID NO: 48307 - protein, 12 aa, synthetic construct
TSTSAGATNDNA

SEQ ID NO: 48308 - protein, 12 aa, synthetic construct
TSTSAGATNDNH

SEQ ID NO: 48309 - protein, 12 aa, synthetic construct
TSTSAGATNDNT

SEQ ID NO: 48310 - protein, 12 aa, synthetic construct
TSTSAGSSNDNA

SEQ ID NO: 48311 - protein, 12 aa, synthetic construct
TSTSAGSSNDNH

SEQ ID NO: 48312 - protein, 12 aa, synthetic construct
TSTSAGSSNDNT

SEQ ID NO: 48313 - protein, 12 aa, synthetic construct
TSTSAGSTNDNA

SEQ ID NO: 48314 - protein, 12 aa, synthetic construct
TSTSAGSTNDNH

SEQ ID NO: 48315 - protein, 12 aa, synthetic construct
TSTSAGSTNDNT

SEQ ID NO: 48316 - protein, 12 aa, synthetic construct
TSTSGAASNDNA

SEQ ID NO: 48317 - protein, 12 aa, synthetic construct
TSTSGAASNDNH

SEQ ID NO: 48318 - protein, 12 aa, synthetic construct
TSTSGAASNDNT

SEQ ID NO: 48319 - protein, 12 aa, synthetic construct
TSTSGAATNDNA

SEQ ID NO: 48320 - protein, 12 aa, synthetic construct
TSTSGAATNDNH

SEQ ID NO: 48321 - protein, 12 aa, synthetic construct
TSTSGAATNDNT

SEQ ID NO: 48322 - protein, 12 aa, synthetic construct
TSTSGASSNDNA

SEQ ID NO: 48323 - protein, 12 aa, synthetic construct
TSTSGASSNDNH

SEQ ID NO: 48324 - protein, 12 aa, synthetic construct
TSTSGASSNDNT

SEQ ID NO: 48325 - protein, 12 aa, synthetic construct
TSTSGASTNDNA

SEQ ID NO: 48326 - protein, 12 aa, synthetic construct
TSTSGASTNDNH

SEQ ID NO: 48327 - protein, 12 aa, synthetic construct
TSTSGASTNDNT

SEQ ID NO: 48328 - protein, 12 aa, synthetic construct
TSTSGGASNDNA

SEQ ID NO: 48329 - protein, 12 aa, synthetic construct
TSTSGGASNDNH

SEQ ID NO: 48330 - protein, 12 aa, synthetic construct
TSTSGGASNDNT

SEQ ID NO: 48331 - protein, 12 aa, synthetic construct
TSTSGGATNDNA

SEQ ID NO: 48332 - protein, 12 aa, synthetic construct
TSTSGGATNDNH

SEQ ID NO: 48333 - protein, 12 aa, synthetic construct
TSTSGGATNDNT

SEQ ID NO: 48334 - protein, 12 aa, synthetic construct
TSTSGGSSNDNA

SEQ ID NO: 48335 - protein, 12 aa, synthetic construct
TSTSGGSSNDNH

SEQ ID NO: 48336 - protein, 12 aa, synthetic construct
TSTSGGSSNDNT

SEQ ID NO: 48337 - protein, 12 aa, synthetic construct
TSTSGGSTNDNA

SEQ ID NO: 48338 - protein, 12 aa, synthetic construct
TSTSGGSTNDNH

SEQ ID NO: 48339 - protein, 12 aa, synthetic construct
TSTSGGSTNDNT

SEQ ID NO: 48340 - protein, 12 aa, synthetic construct
TSTTAAASNDNA

SEQ ID NO: 48341 - protein, 12 aa, synthetic construct
TSTTAAASNDNH

SEQ ID NO: 48342 - protein, 12 aa, synthetic construct
TSTTAAASNDNT

SEQ ID NO: 48343 - protein, 12 aa, synthetic construct
TSTTAAATNDNA

SEQ ID NO: 48344 - protein, 12 aa, synthetic construct
TSTTAAATNDNH

SEQ ID NO: 48345 - protein, 12 aa, synthetic construct
TSTTAAATNDNT

SEQ ID NO: 48346 - protein, 12 aa, synthetic construct
TSTTAASSNDNA

SEQ ID NO: 48347 - protein, 12 aa, synthetic construct
TSTTAASSNDNH

SEQ ID NO: 48348 - protein, 12 aa, synthetic construct
TSTTAASSNDNT

SEQ ID NO: 48349 - protein, 12 aa, synthetic construct
TSTTAASTNDNA

SEQ ID NO: 48350 - protein, 12 aa, synthetic construct
TSTTAASTNDNH

SEQ ID NO: 48351 - protein, 12 aa, synthetic construct
TSTTAASTNDNT

SEQ ID NO: 48352 - protein, 12 aa, synthetic construct
TSTTAGASNDNA

SEQ ID NO: 48353 - protein, 12 aa, synthetic construct
TSTTAGASNDNH

SEQ ID NO: 48354 - protein, 12 aa, synthetic construct
TSTTAGASNDNT

SEQ ID NO: 48355 - protein, 12 aa, synthetic construct
TSTTAGATNDNA

SEQ ID NO: 48356 - protein, 12 aa, synthetic construct
TSTTAGATNDNH

SEQ ID NO: 48357 - protein, 12 aa, synthetic construct
TSTTAGATNDNT

SEQ ID NO: 48358 - protein, 12 aa, synthetic construct
TSTTAGSSNDNA

SEQ ID NO: 48359 - protein, 12 aa, synthetic construct
TSTTAGSSNDNH

SEQ ID NO: 48360 - protein, 12 aa, synthetic construct
TSTTAGSSNDNT

SEQ ID NO: 48361 - protein, 12 aa, synthetic construct
TSTTAGSTNDNA

SEQ ID NO: 48362 - protein, 12 aa, synthetic construct
TSTTAGSTNDNH

SEQ ID NO: 48363 - protein, 12 aa, synthetic construct
TSTTAGSTNDNT

SEQ ID NO: 48364 - protein, 12 aa, synthetic construct
TSTTGAASNDNA

SEQ ID NO: 48365 - protein, 12 aa, synthetic construct
TSTTGAASNDNH

SEQ ID NO: 48366 - protein, 12 aa, synthetic construct
TSTTGAASNDNT

SEQ ID NO: 48367 - protein, 12 aa, synthetic construct
TSTTGAATNDNA

SEQ ID NO: 48368 - protein, 12 aa, synthetic construct
TSTTGAATNDNH

SEQ ID NO: 48369 - protein, 12 aa, synthetic construct
TSTTGAATNDNT

SEQ ID NO: 48370 - protein, 12 aa, synthetic construct
TSTTGASSNDNA

SEQ ID NO: 48371 - protein, 12 aa, synthetic construct
TSTTGASSNDNH

SEQ ID NO: 48372 - protein, 12 aa, synthetic construct
TSTTGASSNDNT

SEQ ID NO: 48373 - protein, 12 aa, synthetic construct
TSTTGASTNDNA

SEQ ID NO: 48374 - protein, 12 aa, synthetic construct
TSTTGASTNDNH

SEQ ID NO: 48375 - protein, 12 aa, synthetic construct
TSTTGASTNDNT

SEQ ID NO: 48376 - protein, 12 aa, synthetic construct
TSTTGGASNDNA

SEQ ID NO: 48377 - protein, 12 aa, synthetic construct
TSTTGGASNDNH

SEQ ID NO: 48378 - protein, 12 aa, synthetic construct
TSTTGGASNDNT

SEQ ID NO: 48379 - protein, 12 aa, synthetic construct
TSTTGGATNDNA

SEQ ID NO: 48380 - protein, 12 aa, synthetic construct
TSTTGGATNDNH

SEQ ID NO: 48381 - protein, 12 aa, synthetic construct
TSTTGGATNDNT

SEQ ID NO: 48382 - protein, 12 aa, synthetic construct
TSTTGGSSNDNA

SEQ ID NO: 48383 - protein, 12 aa, synthetic construct
TSTTGGSSNDNH

SEQ ID NO: 48384 - protein, 12 aa, synthetic construct
TSTTGGSSNDNT

SEQ ID NO: 48385 - protein, 12 aa, synthetic construct
TSTTGGSTNDNA

SEQ ID NO: 48386 - protein, 12 aa, synthetic construct
TSTTGGSTNDNH

SEQ ID NO: 48387 - protein, 12 aa, synthetic construct
TSTTGGSTNDNT

SEQ ID NO: 48388 - protein, 12 aa, synthetic construct
NSTSGGSSNDNA

SEQ ID NO: 48389 - protein, 12 aa, synthetic construct
NSTSGASSNDNA

SEQ ID NO: 48390 - protein, 12 aa, synthetic construct
NSTSGASTNDNA

SEQ ID NO: 48391 - protein, 10 aa, synthetic construct
SAQRGDRGQI

SEQ ID NO: 48392 - protein, 10 aa, synthetic construct
SAQRGDLIGR

SEQ ID NO: 48393 - protein, 10 aa, synthetic construct
SAQRGDQSTL

SEQ ID NO: 48394 - protein, 10 aa, synthetic construct
SAQRGDRGVV

SEQ ID NO: 48395 - protein, 10 aa, synthetic construct
SAQRGDRSQT

SEQ ID NO: 48396 - protein, 10 aa, synthetic construct
SAQRGDLTVT

SEQ ID NO: 48397 - protein, 10 aa, synthetic construct
SAQRGDYVGL

SEQ ID NO: 48398 - protein, 10 aa, synthetic construct
SAQRGDYSSV

SEQ ID NO: 48399 - protein, 10 aa, synthetic construct
SAQRGDHGVL

SEQ ID NO: 48400 - protein, 10 aa, synthetic construct
SSARGDRDYL

SEQ ID NO: 48401 - protein, 10 aa, synthetic construct
SNSRGDYNSL

SEQ ID NO: 48402 - protein, 10 aa, synthetic construct
STVRGDYTSV

SEQ ID NO: 48403 - protein, 10 aa, synthetic construct
QERRGDYTSM

SEQ ID NO: 48404 - protein, 10 aa, synthetic construct
SKKRGDRSVV

SEQ ID NO: 48405 - protein, 10 aa, synthetic construct
EKKRGDRSQT

SEQ ID NO: 48406 - protein, 10 aa, synthetic construct
QKNRGDRGQI

SEQ ID NO: 48407 - protein, 10 aa, synthetic construct
APSRGDRSVV

SEQ ID NO: 48408 - protein, 10 aa, synthetic construct
EPNRGDRSVV

SEQ ID NO: 48409 - protein, 10 aa, synthetic construct
EPNRGDRGVV

SEQ ID NO: 48410 - protein, 10 aa, synthetic construct
EPNRGDRSQT

SEQ ID NO: 48411 - protein, 10 aa, synthetic construct
EPQRGDHGVL

SEQ ID NO: 48412 - protein, 10 aa, synthetic construct
EPQRGDYVGL

SEQ ID NO: 48413 - protein, 10 aa, synthetic construct
EPQRGDQSTL

SEQ ID NO: 48414 - protein, 10 aa, synthetic construct
EPQRGDLLLS

SEQ ID NO: 48415 - protein, 10 aa, synthetic construct
EPDRGDHGVL

SEQ ID NO: 48416 - protein, 10 aa, synthetic construct
EPDRGDYVGL

SEQ ID NO: 48417 - protein, 10 aa, synthetic construct
EPDRGDQSTL

SEQ ID NO: 48418 - protein, 10 aa, synthetic construct
APSRGDLTVT

SEQ ID NO: 48419 - protein, 10 aa, synthetic construct
EPDRGDLLLS

SEQ ID NO: 48420 - protein, 10 aa, synthetic construct
EPERGDHGVL

SEQ ID NO: 48421 - protein, 10 aa, synthetic construct
EPERGDYVGL

SEQ ID NO: 48422 - protein, 10 aa, synthetic construct
EPERGDQSTL

SEQ ID NO: 48423 - protein, 10 aa, synthetic construct
EPERGDLLLS

SEQ ID NO: 48424 - protein, 10 aa, synthetic construct
ELGRGDHVNL

SEQ ID NO: 48425 - protein, 10 aa, synthetic construct
ELGRGDRDYL

SEQ ID NO: 48426 - protein, 10 aa, synthetic construct
ELGRGDYSSV

SEQ ID NO: 48427 - protein, 10 aa, synthetic construct
ELGRGDLTVT

SEQ ID NO: 48428 - protein, 10 aa, synthetic construct
ELGRGDLIGR

SEQ ID NO: 48429 - protein, 10 aa, synthetic construct
APSRGDLIGR

SEQ ID NO: 48430 - protein, 10 aa, synthetic construct
ELARGDHVNL

SEQ ID NO: 48431 - protein, 10 aa, synthetic construct
ELARGDRDYL

SEQ ID NO: 48432 - protein, 10 aa, synthetic construct
ELARGDYSSV

SEQ ID NO: 48433 - protein, 10 aa, synthetic construct
ELARGDLTVT

SEQ ID NO: 48434 - protein, 10 aa, synthetic construct
ELARGDLIGR

SEQ ID NO: 48435 - protein, 10 aa, synthetic construct
ELVRGDHGVL

SEQ ID NO: 48436 - protein, 10 aa, synthetic construct
ELVRGDHVNL

SEQ ID NO: 48437 - protein, 10 aa, synthetic construct
ELVRGDYVGL

SEQ ID NO: 48438 - protein, 10 aa, synthetic construct
ELVRGDYSSV

SEQ ID NO: 48439 - protein, 10 aa, synthetic construct
ELVRGDQSTL

SEQ ID NO: 48440 - protein, 10 aa, synthetic construct
APSRGDRSQT

SEQ ID NO: 48441 - protein, 10 aa, synthetic construct
ELVRGDLLLS

SEQ ID NO: 48442 - protein, 10 aa, synthetic construct
ELPRGDHVNL

SEQ ID NO: 48443 - protein, 10 aa, synthetic construct
ELPRGDRDYL

SEQ ID NO: 48444 - protein, 10 aa, synthetic construct
ELPRGDYSSV

SEQ ID NO: 48445 - protein, 10 aa, synthetic construct
ELPRGDLTVT

SEQ ID NO: 48446 - protein, 10 aa, synthetic construct
ELPRGDLIGR

SEQ ID NO: 48447 - protein, 10 aa, synthetic construct
ELLRGDHGVL

SEQ ID NO: 48448 - protein, 10 aa, synthetic construct
ELLRGDHVNL

SEQ ID NO: 48449 - protein, 10 aa, synthetic construct
ELLRGDYVGL

SEQ ID NO: 48450 - protein, 10 aa, synthetic construct
ELLRGDYSSV

SEQ ID NO: 48451 - protein, 10 aa, synthetic construct
APSRGDLLLS

SEQ ID NO: 48452 - protein, 10 aa, synthetic construct
ELLRGDQSTL

SEQ ID NO: 48453 - protein, 10 aa, synthetic construct
ELLRGDLLLS

SEQ ID NO: 48454 - protein, 10 aa, synthetic construct
ELIRGDRGQI

SEQ ID NO: 48455 - protein, 10 aa, synthetic construct
ELIRGDRQGI

SEQ ID NO: 48456 - protein, 10 aa, synthetic construct
ELIRGDRSVV

SEQ ID NO: 48457 - protein, 10 aa, synthetic construct
ELIRGDRGVV

SEQ ID NO: 48458 - protein, 10 aa, synthetic construct
ELIRGDYVGL

SEQ ID NO: 48459 - protein, 10 aa, synthetic construct
ELIRGDQSTL

SEQ ID NO: 48460 - protein, 10 aa, synthetic construct
ELIRGDRSQT

SEQ ID NO: 48461 - protein, 10 aa, synthetic construct
ELIRGDLLLS

SEQ ID NO: 48462 - protein, 10 aa, synthetic construct
APTRGDRGVV

SEQ ID NO: 48463 - protein, 10 aa, synthetic construct
ELMRGDRGQI

SEQ ID NO: 48464 - protein, 10 aa, synthetic construct
ELMRGDRQGI

SEQ ID NO: 48465 - protein, 10 aa, synthetic construct
ELMRGDRSVV

SEQ ID NO: 48466 - protein, 10 aa, synthetic construct
ELMRGDRGVV

SEQ ID NO: 48467 - protein, 10 aa, synthetic construct
ELMRGDYVGL

SEQ ID NO: 48468 - protein, 10 aa, synthetic construct
ELMRGDQSTL

SEQ ID NO: 48469 - protein, 10 aa, synthetic construct
ELMRGDRSQT

SEQ ID NO: 48470 - protein, 10 aa, synthetic construct
ELMRGDLLLS

SEQ ID NO: 48471 - protein, 10 aa, synthetic construct
ELWRGDHGVL

SEQ ID NO: 48472 - protein, 10 aa, synthetic construct
ELWRGDHVNL

SEQ ID NO: 48473 - protein, 10 aa, synthetic construct
APQRGDRGVV

SEQ ID NO: 48474 - protein, 10 aa, synthetic construct
ELWRGDYVGL

SEQ ID NO: 48475 - protein, 10 aa, synthetic construct
ELWRGDYSSV

SEQ ID NO: 48476 - protein, 10 aa, synthetic construct
ELWRGDQSTL

SEQ ID NO: 48477 - protein, 10 aa, synthetic construct
ELWRGDLLLS

SEQ ID NO: 48478 - protein, 10 aa, synthetic construct
ELFRGDRGQI

SEQ ID NO: 48479 - protein, 10 aa, synthetic construct
ELFRGDRQGI

SEQ ID NO: 48480 - protein, 10 aa, synthetic construct
ELFRGDRSVV

SEQ ID NO: 48481 - protein, 10 aa, synthetic construct
ELFRGDRGVV

SEQ ID NO: 48482 - protein, 10 aa, synthetic construct
ELFRGDYVGL

SEQ ID NO: 48483 - protein, 10 aa, synthetic construct
ELFRGDQSTL

SEQ ID NO: 48484 - protein, 10 aa, synthetic construct
APDRGDRGVV

SEQ ID NO: 48485 - protein, 10 aa, synthetic construct
ELFRGDRSQT

SEQ ID NO: 48486 - protein, 10 aa, synthetic construct
ELFRGDLLLS

SEQ ID NO: 48487 - protein, 10 aa, synthetic construct
ELKRGDRGQI

SEQ ID NO: 48488 - protein, 10 aa, synthetic construct
ELKRGDRQGI

SEQ ID NO: 48489 - protein, 10 aa, synthetic construct
ELKRGDRSVV

SEQ ID NO: 48490 - protein, 10 aa, synthetic construct
ELKRGDRGVV

SEQ ID NO: 48491 - protein, 10 aa, synthetic construct
ELKRGDYVGL

SEQ ID NO: 48492 - protein, 10 aa, synthetic construct
ELKRGDQSTL

SEQ ID NO: 48493 - protein, 10 aa, synthetic construct
ELKRGDRSQT

SEQ ID NO: 48494 - protein, 10 aa, synthetic construct
ELKRGDLLLS

SEQ ID NO: 48495 - protein, 10 aa, synthetic construct
APERGDRGVV

SEQ ID NO: 48496 - protein, 10 aa, synthetic construct
ELRRGDHVNL

SEQ ID NO: 48497 - protein, 10 aa, synthetic construct
ELRRGDRDYL

SEQ ID NO: 48498 - protein, 10 aa, synthetic construct
ELRRGDYSSV

SEQ ID NO: 48499 - protein, 10 aa, synthetic construct
ELRRGDLTVT

SEQ ID NO: 48500 - protein, 10 aa, synthetic construct
ELRRGDLIGR

SEQ ID NO: 48501 - protein, 10 aa, synthetic construct
ELHRGDHGVL

SEQ ID NO: 48502 - protein, 10 aa, synthetic construct
ELHRGDHVNL

SEQ ID NO: 48503 - protein, 10 aa, synthetic construct
ELHRGDYVGL

SEQ ID NO: 48504 - protein, 10 aa, synthetic construct
ELHRGDYSSV

SEQ ID NO: 48505 - protein, 10 aa, synthetic construct
ELHRGDQSTL

SEQ ID NO: 48506 - protein, 10 aa, synthetic construct
ALGRGDRGVV

SEQ ID NO: 48507 - protein, 10 aa, synthetic construct
ELHRGDLLLS

SEQ ID NO: 48508 - protein, 10 aa, synthetic construct
ELSRGDHGVL

SEQ ID NO: 48509 - protein, 10 aa, synthetic construct
ELSRGDHVNL

SEQ ID NO: 48510 - protein, 10 aa, synthetic construct
ELSRGDYVGL

SEQ ID NO: 48511 - protein, 10 aa, synthetic construct
ELSRGDYSSV

SEQ ID NO: 48512 - protein, 10 aa, synthetic construct
ELSRGDQSTL

SEQ ID NO: 48513 - protein, 10 aa, synthetic construct
ELSRGDLLLS

SEQ ID NO: 48514 - protein, 10 aa, synthetic construct
ELTRGDHGVL

SEQ ID NO: 48515 - protein, 10 aa, synthetic construct
ELTRGDHVNL

SEQ ID NO: 48516 - protein, 10 aa, synthetic construct
ELTRGDYVGL

SEQ ID NO: 48517 - protein, 10 aa, synthetic construct
QKNRGDRQGI

SEQ ID NO: 48518 - protein, 10 aa, synthetic construct
ALARGDRGVV

SEQ ID NO: 48519 - protein, 10 aa, synthetic construct
ELTRGDYSSV

SEQ ID NO: 48520 - protein, 10 aa, synthetic construct
ELTRGDQSTL

SEQ ID NO: 48521 - protein, 10 aa, synthetic construct
ELTRGDLLLS

SEQ ID NO: 48522 - protein, 10 aa, synthetic construct
ELYRGDRGQI

SEQ ID NO: 48523 - protein, 10 aa, synthetic construct
ELYRGDRQGI

SEQ ID NO: 48524 - protein, 10 aa, synthetic construct
ELYRGDRSVV

SEQ ID NO: 48525 - protein, 10 aa, synthetic construct
ELYRGDRGVV

SEQ ID NO: 48526 - protein, 10 aa, synthetic construct
ELYRGDYVGL

SEQ ID NO: 48527 - protein, 10 aa, synthetic construct
ELYRGDQSTL

SEQ ID NO: 48528 - protein, 10 aa, synthetic construct
ELYRGDRSQT

SEQ ID NO: 48529 - protein, 10 aa, synthetic construct
ALVRGDRGVV

SEQ ID NO: 48530 - protein, 10 aa, synthetic construct
ELYRGDLLLS

SEQ ID NO: 48531 - protein, 10 aa, synthetic construct
ELNRGDRGQI

SEQ ID NO: 48532 - protein, 10 aa, synthetic construct
ELNRGDRQGI

SEQ ID NO: 48533 - protein, 10 aa, synthetic construct
ELNRGDRSVV

SEQ ID NO: 48534 - protein, 10 aa, synthetic construct
ELNRGDRGVV

SEQ ID NO: 48535 - protein, 10 aa, synthetic construct
ELNRGDYVGL

SEQ ID NO: 48536 - protein, 10 aa, synthetic construct
ELNRGDQSTL

SEQ ID NO: 48537 - protein, 10 aa, synthetic construct
ELNRGDRSQT

SEQ ID NO: 48538 - protein, 10 aa, synthetic construct
ELNRGDLLLS

SEQ ID NO: 48539 - protein, 10 aa, synthetic construct
ELQRGDHGVL

SEQ ID NO: 48540 - protein, 10 aa, synthetic construct
ALPRGDRGVV

SEQ ID NO: 48541 - protein, 10 aa, synthetic construct
ELQRGDHVNL

SEQ ID NO: 48542 - protein, 10 aa, synthetic construct
ELQRGDYVGL

SEQ ID NO: 48543 - protein, 10 aa, synthetic construct
ELQRGDYSSV

SEQ ID NO: 48544 - protein, 10 aa, synthetic construct
ELQRGDQSTL

SEQ ID NO: 48545 - protein, 10 aa, synthetic construct
ELQRGDLLLS

SEQ ID NO: 48546 - protein, 10 aa, synthetic construct
ELDRGDHGVL

SEQ ID NO: 48547 - protein, 10 aa, synthetic construct
ELDRGDHVNL

SEQ ID NO: 48548 - protein, 10 aa, synthetic construct
ELDRGDYVGL

SEQ ID NO: 48549 - protein, 10 aa, synthetic construct
ELDRGDYSSV

SEQ ID NO: 48550 - protein, 10 aa, synthetic construct
ELDRGDQSTL

SEQ ID NO: 48551 - protein, 10 aa, synthetic construct
ALLRGDRGVV

SEQ ID NO: 48552 - protein, 10 aa, synthetic construct
ELDRGDLLLS

SEQ ID NO: 48553 - protein, 10 aa, synthetic construct
ELERGDHGVL

SEQ ID NO: 48554 - protein, 10 aa, synthetic construct
ELERGDHVNL

SEQ ID NO: 48555 - protein, 10 aa, synthetic construct
ELERGDYVGL

SEQ ID NO: 48556 - protein, 10 aa, synthetic construct
ELERGDYSSV

SEQ ID NO: 48557 - protein, 10 aa, synthetic construct
ELERGDQSTL

SEQ ID NO: 48558 - protein, 10 aa, synthetic construct
ELERGDLLLS

SEQ ID NO: 48559 - protein, 10 aa, synthetic construct
EIGRGDRGQI

SEQ ID NO: 48560 - protein, 10 aa, synthetic construct
EIGRGDRQGI

SEQ ID NO: 48561 - protein, 10 aa, synthetic construct
EIGRGDRSVV

SEQ ID NO: 48562 - protein, 10 aa, synthetic construct
ALRRGDRGVV

SEQ ID NO: 48563 - protein, 10 aa, synthetic construct
EIGRGDRGVV

SEQ ID NO: 48564 - protein, 10 aa, synthetic construct
EIGRGDRSQT

SEQ ID NO: 48565 - protein, 10 aa, synthetic construct
EIARGDRGQI

SEQ ID NO: 48566 - protein, 10 aa, synthetic construct
EIARGDRQGI

SEQ ID NO: 48567 - protein, 10 aa, synthetic construct
EIARGDRSVV

SEQ ID NO: 48568 - protein, 10 aa, synthetic construct
EIARGDRGVV

SEQ ID NO: 48569 - protein, 10 aa, synthetic construct
EIARGDRSQT

SEQ ID NO: 48570 - protein, 10 aa, synthetic construct
EIPRGDRGQI

SEQ ID NO: 48571 - protein, 10 aa, synthetic construct
EIPRGDRQGI

SEQ ID NO: 48572 - protein, 10 aa, synthetic construct
EIPRGDRSVV

SEQ ID NO: 48573 - protein, 10 aa, synthetic construct
ALSRGDRGVV

SEQ ID NO: 48574 - protein, 10 aa, synthetic construct
EIPRGDRGVV

SEQ ID NO: 48575 - protein, 10 aa, synthetic construct
EIPRGDRSQT

SEQ ID NO: 48576 - protein, 10 aa, synthetic construct
EIRRGDRGQI

SEQ ID NO: 48577 - protein, 10 aa, synthetic construct
EIRRGDRQGI

SEQ ID NO: 48578 - protein, 10 aa, synthetic construct
EIRRGDRSVV

SEQ ID NO: 48579 - protein, 10 aa, synthetic construct
EIRRGDRGVV

SEQ ID NO: 48580 - protein, 10 aa, synthetic construct
EIRRGDRSQT

SEQ ID NO: 48581 - protein, 10 aa, synthetic construct
EMGRGDHGVL

SEQ ID NO: 48582 - protein, 10 aa, synthetic construct
EMGRGDRGQI

SEQ ID NO: 48583 - protein, 10 aa, synthetic construct
EMGRGDRQGI

SEQ ID NO: 48584 - protein, 10 aa, synthetic construct
AWGRGDRGVV

SEQ ID NO: 48585 - protein, 10 aa, synthetic construct
EMGRGDRSVV

SEQ ID NO: 48586 - protein, 10 aa, synthetic construct
EMGRGDLTVT

SEQ ID NO: 48587 - protein, 10 aa, synthetic construct
EMGRGDLIGR

SEQ ID NO: 48588 - protein, 10 aa, synthetic construct
EMGRGDRSQT

SEQ ID NO: 48589 - protein, 10 aa, synthetic construct
EMGRGDLLLS

SEQ ID NO: 48590 - protein, 10 aa, synthetic construct
EMARGDHGVL

SEQ ID NO: 48591 - protein, 10 aa, synthetic construct
EMARGDRGQI

SEQ ID NO: 48592 - protein, 10 aa, synthetic construct
EMARGDRQGI

SEQ ID NO: 48593 - protein, 10 aa, synthetic construct
EMARGDRSVV

SEQ ID NO: 48594 - protein, 10 aa, synthetic construct
EMARGDLTVT

SEQ ID NO: 48595 - protein, 10 aa, synthetic construct
AWARGDRGVV

SEQ ID NO: 48596 - protein, 10 aa, synthetic construct
EMARGDLIGR

SEQ ID NO: 48597 - protein, 10 aa, synthetic construct
EMARGDRSQT

SEQ ID NO: 48598 - protein, 10 aa, synthetic construct
EMARGDLLLS

SEQ ID NO: 48599 - protein, 10 aa, synthetic construct
EMVRGDHGVL

SEQ ID NO: 48600 - protein, 10 aa, synthetic construct
EMVRGDRGQI

SEQ ID NO: 48601 - protein, 10 aa, synthetic construct
EMVRGDRQGI

SEQ ID NO: 48602 - protein, 10 aa, synthetic construct
EMVRGDRSVV

SEQ ID NO: 48603 - protein, 10 aa, synthetic construct
EMVRGDLIGR

SEQ ID NO: 48604 - protein, 10 aa, synthetic construct
EMVRGDRSQT

SEQ ID NO: 48605 - protein, 10 aa, synthetic construct
EMPRGDHGVL

SEQ ID NO: 48606 - protein, 10 aa, synthetic construct
AWVRGDRGVV

SEQ ID NO: 48607 - protein, 10 aa, synthetic construct
EMPRGDRGQI

SEQ ID NO: 48608 - protein, 10 aa, synthetic construct
EMPRGDRQGI

SEQ ID NO: 48609 - protein, 10 aa, synthetic construct
EMPRGDRSVV

SEQ ID NO: 48610 - protein, 10 aa, synthetic construct
EMPRGDLTVT

SEQ ID NO: 48611 - protein, 10 aa, synthetic construct
EMPRGDLIGR

SEQ ID NO: 48612 - protein, 10 aa, synthetic construct
EMPRGDRSQT

SEQ ID NO: 48613 - protein, 10 aa, synthetic construct
EMPRGDLLLS

SEQ ID NO: 48614 - protein, 10 aa, synthetic construct
EMLRGDHGVL

SEQ ID NO: 48615 - protein, 10 aa, synthetic construct
EMLRGDRGQI

SEQ ID NO: 48616 - protein, 10 aa, synthetic construct
EMLRGDRQGI

SEQ ID NO: 48617 - protein, 10 aa, synthetic construct
AWPRGDRGVV

SEQ ID NO: 48618 - protein, 10 aa, synthetic construct
EMLRGDRSVV

SEQ ID NO: 48619 - protein, 10 aa, synthetic construct
EMLRGDLIGR

SEQ ID NO: 48620 - protein, 10 aa, synthetic construct
EMLRGDRSQT

SEQ ID NO: 48621 - protein, 10 aa, synthetic construct
EMMRGDRSVV

SEQ ID NO: 48622 - protein, 10 aa, synthetic construct
EMMRGDRSQT

SEQ ID NO: 48623 - protein, 10 aa, synthetic construct
EMWRGDRGQI

SEQ ID NO: 48624 - protein, 10 aa, synthetic construct
EMWRGDRQGI

SEQ ID NO: 48625 - protein, 10 aa, synthetic construct
EMWRGDRSVV

SEQ ID NO: 48626 - protein, 10 aa, synthetic construct
EMWRGDRGVV

SEQ ID NO: 48627 - protein, 10 aa, synthetic construct
EMWRGDYVGL

SEQ ID NO: 48628 - protein, 10 aa, synthetic construct
QKNRGDRGVV

SEQ ID NO: 48629 - protein, 10 aa, synthetic construct
AWLRGDRGVV

SEQ ID NO: 48630 - protein, 10 aa, synthetic construct
EMWRGDQSTL

SEQ ID NO: 48631 - protein, 10 aa, synthetic construct
EMWRGDRSQT

SEQ ID NO: 48632 - protein, 10 aa, synthetic construct
EMWRGDLLLS

SEQ ID NO: 48633 - protein, 10 aa, synthetic construct
EMRRGDHGVL

SEQ ID NO: 48634 - protein, 10 aa, synthetic construct
EMRRGDRGQI

SEQ ID NO: 48635 - protein, 10 aa, synthetic construct
EMRRGDRQGI

SEQ ID NO: 48636 - protein, 10 aa, synthetic construct
EMRRGDRSVV

SEQ ID NO: 48637 - protein, 10 aa, synthetic construct
EMRRGDLTVT

SEQ ID NO: 48638 - protein, 10 aa, synthetic construct
EMRRGDLIGR

SEQ ID NO: 48639 - protein, 10 aa, synthetic construct
EMRRGDRSQT

SEQ ID NO: 48640 - protein, 10 aa, synthetic construct
AWRRGDRGVV

SEQ ID NO: 48641 - protein, 10 aa, synthetic construct
EMRRGDLLLS

SEQ ID NO: 48642 - protein, 10 aa, synthetic construct
EMHRGDRGVV

SEQ ID NO: 48643 - protein, 10 aa, synthetic construct
EMHRGDLTVT

SEQ ID NO: 48644 - protein, 10 aa, synthetic construct
EMHRGDLLLS

SEQ ID NO: 48645 - protein, 10 aa, synthetic construct
EMSRGDHGVL

SEQ ID NO: 48646 - protein, 10 aa, synthetic construct
EMSRGDRGQI

SEQ ID NO: 48647 - protein, 10 aa, synthetic construct
EMSRGDRQGI

SEQ ID NO: 48648 - protein, 10 aa, synthetic construct
EMSRGDRSVV

SEQ ID NO: 48649 - protein, 10 aa, synthetic construct
EMSRGDLIGR

SEQ ID NO: 48650 - protein, 10 aa, synthetic construct
EMSRGDRSQT

SEQ ID NO: 48651 - protein, 10 aa, synthetic construct
AWSRGDRGVV

SEQ ID NO: 48652 - protein, 10 aa, synthetic construct
EMTRGDRGVV

SEQ ID NO: 48653 - protein, 10 aa, synthetic construct
EMTRGDLTVT

SEQ ID NO: 48654 - protein, 10 aa, synthetic construct
EMTRGDLLLS

SEQ ID NO: 48655 - protein, 10 aa, synthetic construct
EMQRGDRGVV

SEQ ID NO: 48656 - protein, 10 aa, synthetic construct
EMQRGDLTVT

SEQ ID NO: 48657 - protein, 10 aa, synthetic construct
EMQRGDLLLS

SEQ ID NO: 48658 - protein, 10 aa, synthetic construct
EMDRGDRGVV

SEQ ID NO: 48659 - protein, 10 aa, synthetic construct
EMDRGDLTVT

SEQ ID NO: 48660 - protein, 10 aa, synthetic construct
EMDRGDLLLS

SEQ ID NO: 48661 - protein, 10 aa, synthetic construct
EMERGDRGVV

SEQ ID NO: 48662 - protein, 10 aa, synthetic construct
ARGRGDHGVL

SEQ ID NO: 48663 - protein, 10 aa, synthetic construct
EMERGDLTVT

SEQ ID NO: 48664 - protein, 10 aa, synthetic construct
EMERGDLLLS

SEQ ID NO: 48665 - protein, 10 aa, synthetic construct
EWGRGDRDYL

SEQ ID NO: 48666 - protein, 10 aa, synthetic construct
EWGRGDYVGL

SEQ ID NO: 48667 - protein, 10 aa, synthetic construct
EWGRGDQSTL

SEQ ID NO: 48668 - protein, 10 aa, synthetic construct
EWARGDRDYL

SEQ ID NO: 48669 - protein, 10 aa, synthetic construct
EWARGDYVGL

SEQ ID NO: 48670 - protein, 10 aa, synthetic construct
EWARGDQSTL

SEQ ID NO: 48671 - protein, 10 aa, synthetic construct
EWVRGDRDYL

SEQ ID NO: 48672 - protein, 10 aa, synthetic construct
EWVRGDYVGL

SEQ ID NO: 48673 - protein, 10 aa, synthetic construct
ARGRGDRGQI

SEQ ID NO: 48674 - protein, 10 aa, synthetic construct
EWVRGDYSSV

SEQ ID NO: 48675 - protein, 10 aa, synthetic construct
EWVRGDYTSV

SEQ ID NO: 48676 - protein, 10 aa, synthetic construct
EWVRGDQSTL

SEQ ID NO: 48677 - protein, 10 aa, synthetic construct
EWPRGDRDYL

SEQ ID NO: 48678 - protein, 10 aa, synthetic construct
EWPRGDYVGL

SEQ ID NO: 48679 - protein, 10 aa, synthetic construct
EWPRGDQSTL

SEQ ID NO: 48680 - protein, 10 aa, synthetic construct
EWLRGDRDYL

SEQ ID NO: 48681 - protein, 10 aa, synthetic construct
EWLRGDYVGL

SEQ ID NO: 48682 - protein, 10 aa, synthetic construct
EWLRGDYSSV

SEQ ID NO: 48683 - protein, 10 aa, synthetic construct
EWLRGDYTSV

SEQ ID NO: 48684 - protein, 10 aa, synthetic construct
ARGRGDRQGI

SEQ ID NO: 48685 - protein, 10 aa, synthetic construct
EWLRGDQSTL

SEQ ID NO: 48686 - protein, 10 aa, synthetic construct
EWIRGDRGVV

SEQ ID NO: 48687 - protein, 10 aa, synthetic construct
EWIRGDLTVT

SEQ ID NO: 48688 - protein, 10 aa, synthetic construct
EWIRGDLLLS

SEQ ID NO: 48689 - protein, 10 aa, synthetic construct
EWMRGDRGQI

SEQ ID NO: 48690 - protein, 10 aa, synthetic construct
EWMRGDRQGI

SEQ ID NO: 48691 - protein, 10 aa, synthetic construct
EWMRGDRSVV

SEQ ID NO: 48692 - protein, 10 aa, synthetic construct
EWMRGDRGVV

SEQ ID NO: 48693 - protein, 10 aa, synthetic construct
EWMRGDYVGL

SEQ ID NO: 48694 - protein, 10 aa, synthetic construct
EWMRGDQSTL

SEQ ID NO: 48695 - protein, 10 aa, synthetic construct
ARGRGDRSVV

SEQ ID NO: 48696 - protein, 10 aa, synthetic construct
EWMRGDRSQT

SEQ ID NO: 48697 - protein, 10 aa, synthetic construct
EWMRGDLLLS

SEQ ID NO: 48698 - protein, 10 aa, synthetic construct
EWWRGDHGVL

SEQ ID NO: 48699 - protein, 10 aa, synthetic construct
EWWRGDHVNL

SEQ ID NO: 48700 - protein, 10 aa, synthetic construct
EWWRGDYVGL

SEQ ID NO: 48701 - protein, 10 aa, synthetic construct
EWWRGDYSSV

SEQ ID NO: 48702 - protein, 10 aa, synthetic construct
EWWRGDQSTL

SEQ ID NO: 48703 - protein, 10 aa, synthetic construct
EWWRGDLLLS

SEQ ID NO: 48704 - protein, 10 aa, synthetic construct
EWFRGDRGVV

SEQ ID NO: 48705 - protein, 10 aa, synthetic construct
EWFRGDLTVT

SEQ ID NO: 48706 - protein, 10 aa, synthetic construct
ARGRGDLTVT

SEQ ID NO: 48707 - protein, 10 aa, synthetic construct
EWFRGDLLLS

SEQ ID NO: 48708 - protein, 10 aa, synthetic construct
EWKRGDRGVV

SEQ ID NO: 48709 - protein, 10 aa, synthetic construct
EWKRGDLTVT

SEQ ID NO: 48710 - protein, 10 aa, synthetic construct
EWKRGDLLLS

SEQ ID NO: 48711 - protein, 10 aa, synthetic construct
EWRRGDRDYL

SEQ ID NO: 48712 - protein, 10 aa, synthetic construct
EWRRGDYVGL

SEQ ID NO: 48713 - protein, 10 aa, synthetic construct
EWRRGDQSTL

SEQ ID NO: 48714 - protein, 10 aa, synthetic construct
EWHRGDHGVL

SEQ ID NO: 48715 - protein, 10 aa, synthetic construct
EWHRGDRGQI

SEQ ID NO: 48716 - protein, 10 aa, synthetic construct
EWHRGDRQGI

SEQ ID NO: 48717 - protein, 10 aa, synthetic construct
ARGRGDLIGR

SEQ ID NO: 48718 - protein, 10 aa, synthetic construct
EWHRGDRSVV

SEQ ID NO: 48719 - protein, 10 aa, synthetic construct
EWHRGDLTVT

SEQ ID NO: 48720 - protein, 10 aa, synthetic construct
EWHRGDLIGR

SEQ ID NO: 48721 - protein, 10 aa, synthetic construct
EWHRGDRSQT

SEQ ID NO: 48722 - protein, 10 aa, synthetic construct
EWHRGDLLLS

SEQ ID NO: 48723 - protein, 10 aa, synthetic construct
EWSRGDRDYL

SEQ ID NO: 48724 - protein, 10 aa, synthetic construct
EWSRGDYVGL

SEQ ID NO: 48725 - protein, 10 aa, synthetic construct
EWSRGDYSSV

SEQ ID NO: 48726 - protein, 10 aa, synthetic construct
EWSRGDYTSV

SEQ ID NO: 48727 - protein, 10 aa, synthetic construct
EWSRGDQSTL

SEQ ID NO: 48728 - protein, 10 aa, synthetic construct
ARGRGDRSQT

SEQ ID NO: 48729 - protein, 10 aa, synthetic construct
EWTRGDHGVL

SEQ ID NO: 48730 - protein, 10 aa, synthetic construct
EWTRGDRGQI

SEQ ID NO: 48731 - protein, 10 aa, synthetic construct
EWTRGDRQGI

SEQ ID NO: 48732 - protein, 10 aa, synthetic construct
EWTRGDRSVV

SEQ ID NO: 48733 - protein, 10 aa, synthetic construct
EWTRGDLTVT

SEQ ID NO: 48734 - protein, 10 aa, synthetic construct
EWTRGDLIGR

SEQ ID NO: 48735 - protein, 10 aa, synthetic construct
EWTRGDRSQT

SEQ ID NO: 48736 - protein, 10 aa, synthetic construct
EWTRGDLLLS

SEQ ID NO: 48737 - protein, 10 aa, synthetic construct
EWYRGDRGVV

SEQ ID NO: 48738 - protein, 10 aa, synthetic construct
EWYRGDLTVT

SEQ ID NO: 48739 - protein, 10 aa, synthetic construct
QKNRGDYVGL

SEQ ID NO: 48740 - protein, 10 aa, synthetic construct
ARGRGDLLLS

SEQ ID NO: 48741 - protein, 10 aa, synthetic construct
EWYRGDLLLS

SEQ ID NO: 48742 - protein, 10 aa, synthetic construct
EWNRGDRGVV

SEQ ID NO: 48743 - protein, 10 aa, synthetic construct
EWNRGDLTVT

SEQ ID NO: 48744 - protein, 10 aa, synthetic construct
EWNRGDLLLS

SEQ ID NO: 48745 - protein, 10 aa, synthetic construct
EWQRGDHGVL

SEQ ID NO: 48746 - protein, 10 aa, synthetic construct
EWQRGDRGQI

SEQ ID NO: 48747 - protein, 10 aa, synthetic construct
EWQRGDRQGI

SEQ ID NO: 48748 - protein, 10 aa, synthetic construct
EWQRGDRSVV

SEQ ID NO: 48749 - protein, 10 aa, synthetic construct
EWQRGDLTVT

SEQ ID NO: 48750 - protein, 10 aa, synthetic construct
EWQRGDLIGR

SEQ ID NO: 48751 - protein, 10 aa, synthetic construct
ARARGDHGVL

SEQ ID NO: 48752 - protein, 10 aa, synthetic construct
EWQRGDRSQT

SEQ ID NO: 48753 - protein, 10 aa, synthetic construct
EWQRGDLLLS

SEQ ID NO: 48754 - protein, 10 aa, synthetic construct
EWDRGDHGVL

SEQ ID NO: 48755 - protein, 10 aa, synthetic construct
EWDRGDRGQI

SEQ ID NO: 48756 - protein, 10 aa, synthetic construct
EWDRGDRQGI

SEQ ID NO: 48757 - protein, 10 aa, synthetic construct
EWDRGDRSVV

SEQ ID NO: 48758 - protein, 10 aa, synthetic construct
EWDRGDLTVT

SEQ ID NO: 48759 - protein, 10 aa, synthetic construct
EWDRGDLIGR

SEQ ID NO: 48760 - protein, 10 aa, synthetic construct
EWDRGDRSQT

SEQ ID NO: 48761 - protein, 10 aa, synthetic construct
EWDRGDLLLS

SEQ ID NO: 48762 - protein, 10 aa, synthetic construct
ARARGDRGQI

SEQ ID NO: 48763 - protein, 10 aa, synthetic construct
EWERGDHGVL

SEQ ID NO: 48764 - protein, 10 aa, synthetic construct
EWERGDRGQI

SEQ ID NO: 48765 - protein, 10 aa, synthetic construct
EWERGDRQGI

SEQ ID NO: 48766 - protein, 10 aa, synthetic construct
EWERGDRSVV

SEQ ID NO: 48767 - protein, 10 aa, synthetic construct
EWERGDLTVT

SEQ ID NO: 48768 - protein, 10 aa, synthetic construct
EWERGDLIGR

SEQ ID NO: 48769 - protein, 10 aa, synthetic construct
EWERGDRSQT

SEQ ID NO: 48770 - protein, 10 aa, synthetic construct
EWERGDLLLS

SEQ ID NO: 48771 - protein, 10 aa, synthetic construct
EFGRGDRGQI

SEQ ID NO: 48772 - protein, 10 aa, synthetic construct
EFGRGDRQGI

SEQ ID NO: 48773 - protein, 10 aa, synthetic construct
ARARGDRQGI

SEQ ID NO: 48774 - protein, 10 aa, synthetic construct
EFGRGDRSVV

SEQ ID NO: 48775 - protein, 10 aa, synthetic construct
EFGRGDRGVV

SEQ ID NO: 48776 - protein, 10 aa, synthetic construct
EFGRGDRSQT

SEQ ID NO: 48777 - protein, 10 aa, synthetic construct
EFARGDRGQI

SEQ ID NO: 48778 - protein, 10 aa, synthetic construct
EFARGDRQGI

SEQ ID NO: 48779 - protein, 10 aa, synthetic construct
EFARGDRSVV

SEQ ID NO: 48780 - protein, 10 aa, synthetic construct
EFARGDRGVV

SEQ ID NO: 48781 - protein, 10 aa, synthetic construct
EFARGDRSQT

SEQ ID NO: 48782 - protein, 10 aa, synthetic construct
EFPRGDRGQI

SEQ ID NO: 48783 - protein, 10 aa, synthetic construct
EFPRGDRQGI

SEQ ID NO: 48784 - protein, 10 aa, synthetic construct
ARARGDRSVV

SEQ ID NO: 48785 - protein, 10 aa, synthetic construct
EFPRGDRSVV

SEQ ID NO: 48786 - protein, 10 aa, synthetic construct
EFPRGDRGVV

SEQ ID NO: 48787 - protein, 10 aa, synthetic construct
EFPRGDRSQT

SEQ ID NO: 48788 - protein, 10 aa, synthetic construct
EFRRGDRGQI

SEQ ID NO: 48789 - protein, 10 aa, synthetic construct
EFRRGDRQGI

SEQ ID NO: 48790 - protein, 10 aa, synthetic construct
EFRRGDRSVV

SEQ ID NO: 48791 - protein, 10 aa, synthetic construct
EFRRGDRGVV

SEQ ID NO: 48792 - protein, 10 aa, synthetic construct
EFRRGDRSQT

SEQ ID NO: 48793 - protein, 10 aa, synthetic construct
EKGRGDRGQI

SEQ ID NO: 48794 - protein, 10 aa, synthetic construct
EKGRGDRQGI

SEQ ID NO: 48795 - protein, 10 aa, synthetic construct
ARARGDLTVT

SEQ ID NO: 48796 - protein, 10 aa, synthetic construct
EKGRGDRSVV

SEQ ID NO: 48797 - protein, 10 aa, synthetic construct
EKGRGDRGVV

SEQ ID NO: 48798 - protein, 10 aa, synthetic construct
EKGRGDRSQT

SEQ ID NO: 48799 - protein, 10 aa, synthetic construct
EKARGDRGQI

SEQ ID NO: 48800 - protein, 10 aa, synthetic construct
EKARGDRQGI

SEQ ID NO: 48801 - protein, 10 aa, synthetic construct
EKARGDRSVV

SEQ ID NO: 48802 - protein, 10 aa, synthetic construct
EKARGDRGVV

SEQ ID NO: 48803 - protein, 10 aa, synthetic construct
EKARGDRSQT

SEQ ID NO: 48804 - protein, 10 aa, synthetic construct
EKPRGDRGQI

SEQ ID NO: 48805 - protein, 10 aa, synthetic construct
EKPRGDRQGI

SEQ ID NO: 48806 - protein, 10 aa, synthetic construct
ARARGDLIGR

SEQ ID NO: 48807 - protein, 10 aa, synthetic construct
EKPRGDRSVV

SEQ ID NO: 48808 - protein, 10 aa, synthetic construct
EKPRGDRGVV

SEQ ID NO: 48809 - protein, 10 aa, synthetic construct
EKPRGDRSQT

SEQ ID NO: 48810 - protein, 10 aa, synthetic construct
EKRRGDRGQI

SEQ ID NO: 48811 - protein, 10 aa, synthetic construct
EKRRGDRQGI

SEQ ID NO: 48812 - protein, 10 aa, synthetic construct
EKRRGDRSVV

SEQ ID NO: 48813 - protein, 10 aa, synthetic construct
EKRRGDRGVV

SEQ ID NO: 48814 - protein, 10 aa, synthetic construct
EKRRGDRSQT

SEQ ID NO: 48815 - protein, 10 aa, synthetic construct
ERGRGDHVNL

SEQ ID NO: 48816 - protein, 10 aa, synthetic construct
ERGRGDRDYL

SEQ ID NO: 48817 - protein, 10 aa, synthetic construct
ARARGDRSQT

SEQ ID NO: 48818 - protein, 10 aa, synthetic construct
ERGRGDYSSV

SEQ ID NO: 48819 - protein, 10 aa, synthetic construct
ERGRGDLTVT

SEQ ID NO: 48820 - protein, 10 aa, synthetic construct
ERGRGDLIGR

SEQ ID NO: 48821 - protein, 10 aa, synthetic construct
ERARGDHVNL

SEQ ID NO: 48822 - protein, 10 aa, synthetic construct
ERARGDRDYL

SEQ ID NO: 48823 - protein, 10 aa, synthetic construct
ERARGDYSSV

SEQ ID NO: 48824 - protein, 10 aa, synthetic construct
ERARGDLTVT

SEQ ID NO: 48825 - protein, 10 aa, synthetic construct
ERARGDLIGR

SEQ ID NO: 48826 - protein, 10 aa, synthetic construct
ERVRGDHGVL

SEQ ID NO: 48827 - protein, 10 aa, synthetic construct
ERVRGDYVGL

SEQ ID NO: 48828 - protein, 10 aa, synthetic construct
ARARGDLLLS

SEQ ID NO: 48829 - protein, 10 aa, synthetic construct
ERVRGDQSTL

SEQ ID NO: 48830 - protein, 10 aa, synthetic construct
ERVRGDLLLS

SEQ ID NO: 48831 - protein, 10 aa, synthetic construct
ERPRGDHVNL

SEQ ID NO: 48832 - protein, 10 aa, synthetic construct
ERPRGDRDYL

SEQ ID NO: 48833 - protein, 10 aa, synthetic construct
ERPRGDYSSV

SEQ ID NO: 48834 - protein, 10 aa, synthetic construct
ERPRGDLTVT

SEQ ID NO: 48835 - protein, 10 aa, synthetic construct
ERPRGDLIGR

SEQ ID NO: 48836 - protein, 10 aa, synthetic construct
ERLRGDHGVL

SEQ ID NO: 48837 - protein, 10 aa, synthetic construct
ERLRGDYVGL

SEQ ID NO: 48838 - protein, 10 aa, synthetic construct
ERLRGDQSTL

SEQ ID NO: 48839 - protein, 10 aa, synthetic construct
ARVRGDHGVL

SEQ ID NO: 48840 - protein, 10 aa, synthetic construct
ERLRGDLLLS

SEQ ID NO: 48841 - protein, 10 aa, synthetic construct
ERIRGDRGQI

SEQ ID NO: 48842 - protein, 10 aa, synthetic construct
ERIRGDRQGI

SEQ ID NO: 48843 - protein, 10 aa, synthetic construct
ERIRGDRSVV

SEQ ID NO: 48844 - protein, 10 aa, synthetic construct
ERIRGDRGVV

SEQ ID NO: 48845 - protein, 10 aa, synthetic construct
ERIRGDRSQT

SEQ ID NO: 48846 - protein, 10 aa, synthetic construct
ERMRGDRGQI

SEQ ID NO: 48847 - protein, 10 aa, synthetic construct
ERMRGDRQGI

SEQ ID NO: 48848 - protein, 10 aa, synthetic construct
ERMRGDRSVV

SEQ ID NO: 48849 - protein, 10 aa, synthetic construct
ERMRGDRGVV

SEQ ID NO: 48850 - protein, 10 aa, synthetic construct
QKNRGDLIGR

SEQ ID NO: 48851 - protein, 10 aa, synthetic construct
ARVRGDRGQI

SEQ ID NO: 48852 - protein, 10 aa, synthetic construct
ERMRGDRSQT

SEQ ID NO: 48853 - protein, 10 aa, synthetic construct
ERWRGDHGVL

SEQ ID NO: 48854 - protein, 10 aa, synthetic construct
ERWRGDYVGL

SEQ ID NO: 48855 - protein, 10 aa, synthetic construct
ERWRGDQSTL

SEQ ID NO: 48856 - protein, 10 aa, synthetic construct
ERWRGDLLLS

SEQ ID NO: 48857 - protein, 10 aa, synthetic construct
ERFRGDRGQI

SEQ ID NO: 48858 - protein, 10 aa, synthetic construct
ERFRGDRQGI

SEQ ID NO: 48859 - protein, 10 aa, synthetic construct
ERFRGDRSVV

SEQ ID NO: 48860 - protein, 10 aa, synthetic construct
ERFRGDRGVV

SEQ ID NO: 48861 - protein, 10 aa, synthetic construct
ERFRGDRSQT

SEQ ID NO: 48862 - protein, 10 aa, synthetic construct
ARVRGDRQGI

SEQ ID NO: 48863 - protein, 10 aa, synthetic construct
ERKRGDRGQI

SEQ ID NO: 48864 - protein, 10 aa, synthetic construct
ERKRGDRQGI

SEQ ID NO: 48865 - protein, 10 aa, synthetic construct
ERKRGDRSVV

SEQ ID NO: 48866 - protein, 10 aa, synthetic construct
ERKRGDRGVV

SEQ ID NO: 48867 - protein, 10 aa, synthetic construct
ERKRGDRSQT

SEQ ID NO: 48868 - protein, 10 aa, synthetic construct
ERRRGDHVNL

SEQ ID NO: 48869 - protein, 10 aa, synthetic construct
ERRRGDRDYL

SEQ ID NO: 48870 - protein, 10 aa, synthetic construct
ERRRGDYSSV

SEQ ID NO: 48871 - protein, 10 aa, synthetic construct
ERRRGDLTVT

SEQ ID NO: 48872 - protein, 10 aa, synthetic construct
ERRRGDLIGR

SEQ ID NO: 48873 - protein, 10 aa, synthetic construct
ARVRGDRSVV

SEQ ID NO: 48874 - protein, 10 aa, synthetic construct
ERHRGDHGVL

SEQ ID NO: 48875 - protein, 10 aa, synthetic construct
ERHRGDYVGL

SEQ ID NO: 48876 - protein, 10 aa, synthetic construct
ERHRGDQSTL

SEQ ID NO: 48877 - protein, 10 aa, synthetic construct
ERHRGDLLLS

SEQ ID NO: 48878 - protein, 10 aa, synthetic construct
ERSRGDHGVL

SEQ ID NO: 48879 - protein, 10 aa, synthetic construct
ERSRGDYVGL

SEQ ID NO: 48880 - protein, 10 aa, synthetic construct
ERSRGDQSTL

SEQ ID NO: 48881 - protein, 10 aa, synthetic construct
ERSRGDLLLS

SEQ ID NO: 48882 - protein, 10 aa, synthetic construct
ERTRGDHGVL

SEQ ID NO: 48883 - protein, 10 aa, synthetic construct
ERTRGDYVGL

SEQ ID NO: 48884 - protein, 10 aa, synthetic construct
ARVRGDLTVT

SEQ ID NO: 48885 - protein, 10 aa, synthetic construct
ERTRGDQSTL

SEQ ID NO: 48886 - protein, 10 aa, synthetic construct
ERTRGDLLLS

SEQ ID NO: 48887 - protein, 10 aa, synthetic construct
ERYRGDRGQI

SEQ ID NO: 48888 - protein, 10 aa, synthetic construct
ERYRGDRQGI

SEQ ID NO: 48889 - protein, 10 aa, synthetic construct
ERYRGDRSVV

SEQ ID NO: 48890 - protein, 10 aa, synthetic construct
ERYRGDRGVV

SEQ ID NO: 48891 - protein, 10 aa, synthetic construct
ERYRGDRSQT

SEQ ID NO: 48892 - protein, 10 aa, synthetic construct
ERNRGDRGQI

SEQ ID NO: 48893 - protein, 10 aa, synthetic construct
ERNRGDRQGI

SEQ ID NO: 48894 - protein, 10 aa, synthetic construct
ERNRGDRSVV

SEQ ID NO: 48895 - protein, 10 aa, synthetic construct
ARVRGDLIGR

SEQ ID NO: 48896 - protein, 10 aa, synthetic construct
ERNRGDRGVV

SEQ ID NO: 48897 - protein, 10 aa, synthetic construct
ERNRGDRSQT

SEQ ID NO: 48898 - protein, 10 aa, synthetic construct
ERQRGDHGVL

SEQ ID NO: 48899 - protein, 10 aa, synthetic construct
ERQRGDYVGL

SEQ ID NO: 48900 - protein, 10 aa, synthetic construct
ERQRGDQSTL

SEQ ID NO: 48901 - protein, 10 aa, synthetic construct
ERQRGDLLLS

SEQ ID NO: 48902 - protein, 10 aa, synthetic construct
ERDRGDHGVL

SEQ ID NO: 48903 - protein, 10 aa, synthetic construct
ERDRGDYVGL

SEQ ID NO: 48904 - protein, 10 aa, synthetic construct
ERDRGDQSTL

SEQ ID NO: 48905 - protein, 10 aa, synthetic construct
ERDRGDLLLS

SEQ ID NO: 48906 - protein, 10 aa, synthetic construct
ARVRGDRSQT

SEQ ID NO: 48907 - protein, 10 aa, synthetic construct
ERERGDHGVL

SEQ ID NO: 48908 - protein, 10 aa, synthetic construct
ERERGDYVGL

SEQ ID NO: 48909 - protein, 10 aa, synthetic construct
ERERGDQSTL

SEQ ID NO: 48910 - protein, 10 aa, synthetic construct
ERERGDLLLS

SEQ ID NO: 48911 - protein, 10 aa, synthetic construct
EHGRGDHGVL

SEQ ID NO: 48912 - protein, 10 aa, synthetic construct
EHGRGDYVGL

SEQ ID NO: 48913 - protein, 10 aa, synthetic construct
EHGRGDQSTL

SEQ ID NO: 48914 - protein, 10 aa, synthetic construct
EHGRGDLLLS

SEQ ID NO: 48915 - protein, 10 aa, synthetic construct
EHARGDHGVL

SEQ ID NO: 48916 - protein, 10 aa, synthetic construct
EHARGDYVGL

SEQ ID NO: 48917 - protein, 10 aa, synthetic construct
ARVRGDLLLS

SEQ ID NO: 48918 - protein, 10 aa, synthetic construct
EHARGDQSTL

SEQ ID NO: 48919 - protein, 10 aa, synthetic construct
EHARGDLLLS

SEQ ID NO: 48920 - protein, 10 aa, synthetic construct
EHVRGDRGQI

SEQ ID NO: 48921 - protein, 10 aa, synthetic construct
EHVRGDRQGI

SEQ ID NO: 48922 - protein, 10 aa, synthetic construct
EHVRGDRSVV

SEQ ID NO: 48923 - protein, 10 aa, synthetic construct
EHVRGDRGVV

SEQ ID NO: 48924 - protein, 10 aa, synthetic construct
EHVRGDRSQT

SEQ ID NO: 48925 - protein, 10 aa, synthetic construct
EHPRGDHGVL

SEQ ID NO: 48926 - protein, 10 aa, synthetic construct
EHPRGDYVGL

SEQ ID NO: 48927 - protein, 10 aa, synthetic construct
EHPRGDQSTL

SEQ ID NO: 48928 - protein, 10 aa, synthetic construct
ARPRGDHGVL

SEQ ID NO: 48929 - protein, 10 aa, synthetic construct
EHPRGDLLLS

SEQ ID NO: 48930 - protein, 10 aa, synthetic construct
EHLRGDRGQI

SEQ ID NO: 48931 - protein, 10 aa, synthetic construct
EHLRGDRQGI

SEQ ID NO: 48932 - protein, 10 aa, synthetic construct
EHLRGDRSVV

SEQ ID NO: 48933 - protein, 10 aa, synthetic construct
EHLRGDRGVV

SEQ ID NO: 48934 - protein, 10 aa, synthetic construct
EHLRGDRSQT

SEQ ID NO: 48935 - protein, 10 aa, synthetic construct
EHWRGDRGQI

SEQ ID NO: 48936 - protein, 10 aa, synthetic construct
EHWRGDRQGI

SEQ ID NO: 48937 - protein, 10 aa, synthetic construct
EHWRGDRSVV

SEQ ID NO: 48938 - protein, 10 aa, synthetic construct
EHWRGDRGVV

SEQ ID NO: 48939 - protein, 10 aa, synthetic construct
ARPRGDRGQI

SEQ ID NO: 48940 - protein, 10 aa, synthetic construct
EHWRGDRSQT

SEQ ID NO: 48941 - protein, 10 aa, synthetic construct
EHRRGDHGVL

SEQ ID NO: 48942 - protein, 10 aa, synthetic construct
EHRRGDYVGL

SEQ ID NO: 48943 - protein, 10 aa, synthetic construct
EHRRGDQSTL

SEQ ID NO: 48944 - protein, 10 aa, synthetic construct
EHRRGDLLLS

SEQ ID NO: 48945 - protein, 10 aa, synthetic construct
EHHRGDRGQI

SEQ ID NO: 48946 - protein, 10 aa, synthetic construct
EHHRGDRQGI

SEQ ID NO: 48947 - protein, 10 aa, synthetic construct
EHHRGDRSVV

SEQ ID NO: 48948 - protein, 10 aa, synthetic construct
EHHRGDRGVV

SEQ ID NO: 48949 - protein, 10 aa, synthetic construct
EHHRGDRSQT

SEQ ID NO: 48950 - protein, 10 aa, synthetic construct
ARPRGDRQGI

SEQ ID NO: 48951 - protein, 10 aa, synthetic construct
EHSRGDRGQI

SEQ ID NO: 48952 - protein, 10 aa, synthetic construct
EHSRGDRQGI

SEQ ID NO: 48953 - protein, 10 aa, synthetic construct
EHSRGDRSVV

SEQ ID NO: 48954 - protein, 10 aa, synthetic construct
EHSRGDRGVV

SEQ ID NO: 48955 - protein, 10 aa, synthetic construct
EHSRGDRSQT

SEQ ID NO: 48956 - protein, 10 aa, synthetic construct
EHTRGDRGQI

SEQ ID NO: 48957 - protein, 10 aa, synthetic construct
EHTRGDRQGI

SEQ ID NO: 48958 - protein, 10 aa, synthetic construct
EHTRGDRSVV

SEQ ID NO: 48959 - protein, 10 aa, synthetic construct
EHTRGDRGVV

SEQ ID NO: 48960 - protein, 10 aa, synthetic construct
EHTRGDRSQT

SEQ ID NO: 48961 - protein, 10 aa, synthetic construct
QKNRGDQSTL

SEQ ID NO: 48962 - protein, 10 aa, synthetic construct
ARPRGDRSVV

SEQ ID NO: 48963 - protein, 10 aa, synthetic construct
EHQRGDRGQI

SEQ ID NO: 48964 - protein, 10 aa, synthetic construct
EHQRGDRQGI

SEQ ID NO: 48965 - protein, 10 aa, synthetic construct
EHQRGDRSVV

SEQ ID NO: 48966 - protein, 10 aa, synthetic construct
EHQRGDRGVV

SEQ ID NO: 48967 - protein, 10 aa, synthetic construct
EHQRGDRSQT

SEQ ID NO: 48968 - protein, 10 aa, synthetic construct
EHDRGDRGQI

SEQ ID NO: 48969 - protein, 10 aa, synthetic construct
EHDRGDRQGI

SEQ ID NO: 48970 - protein, 10 aa, synthetic construct
EHDRGDRSVV

SEQ ID NO: 48971 - protein, 10 aa, synthetic construct
EHDRGDRGVV

SEQ ID NO: 48972 - protein, 10 aa, synthetic construct
EHDRGDRSQT

SEQ ID NO: 48973 - protein, 10 aa, synthetic construct
ARPRGDLTVT

SEQ ID NO: 48974 - protein, 10 aa, synthetic construct
EHERGDRGQI

SEQ ID NO: 48975 - protein, 10 aa, synthetic construct
EHERGDRQGI

SEQ ID NO: 48976 - protein, 10 aa, synthetic construct
EHERGDRSVV

SEQ ID NO: 48977 - protein, 10 aa, synthetic construct
EHERGDRGVV

SEQ ID NO: 48978 - protein, 10 aa, synthetic construct
EHERGDRSQT

SEQ ID NO: 48979 - protein, 10 aa, synthetic construct
ESGRGDHVNL

SEQ ID NO: 48980 - protein, 10 aa, synthetic construct
ESGRGDRDYL

SEQ ID NO: 48981 - protein, 10 aa, synthetic construct
ESGRGDYSSV

SEQ ID NO: 48982 - protein, 10 aa, synthetic construct
ESGRGDLTVT

SEQ ID NO: 48983 - protein, 10 aa, synthetic construct
ESGRGDLIGR

SEQ ID NO: 48984 - protein, 10 aa, synthetic construct
ARPRGDLIGR

SEQ ID NO: 48985 - protein, 10 aa, synthetic construct
ESARGDHVNL

SEQ ID NO: 48986 - protein, 10 aa, synthetic construct
ESARGDRDYL

SEQ ID NO: 48987 - protein, 10 aa, synthetic construct
ESARGDYSSV

SEQ ID NO: 48988 - protein, 10 aa, synthetic construct
ESARGDLTVT

SEQ ID NO: 48989 - protein, 10 aa, synthetic construct
ESARGDLIGR

SEQ ID NO: 48990 - protein, 10 aa, synthetic construct
ESVRGDHGVL

SEQ ID NO: 48991 - protein, 10 aa, synthetic construct
ESVRGDHVNL

SEQ ID NO: 48992 - protein, 10 aa, synthetic construct
ESVRGDYVGL

SEQ ID NO: 48993 - protein, 10 aa, synthetic construct
ESVRGDYSSV

SEQ ID NO: 48994 - protein, 10 aa, synthetic construct
ESVRGDQSTL

SEQ ID NO: 48995 - protein, 10 aa, synthetic construct
ARPRGDRSQT

SEQ ID NO: 48996 - protein, 10 aa, synthetic construct
ESVRGDLLLS

SEQ ID NO: 48997 - protein, 10 aa, synthetic construct
ESLRGDHGVL

SEQ ID NO: 48998 - protein, 10 aa, synthetic construct
ESLRGDHVNL

SEQ ID NO: 48999 - protein, 10 aa, synthetic construct
ESLRGDYVGL

SEQ ID NO: 49000 - protein, 10 aa, synthetic construct
ESLRGDYSSV

SEQ ID NO: 49001 - protein, 10 aa, synthetic construct
ESLRGDQSTL

SEQ ID NO: 49002 - protein, 10 aa, synthetic construct
ESLRGDLLLS

SEQ ID NO: 49003 - protein, 10 aa, synthetic construct
ESIRGDRGQI

SEQ ID NO: 49004 - protein, 10 aa, synthetic construct
ESIRGDRQGI

SEQ ID NO: 49005 - protein, 10 aa, synthetic construct
ESIRGDRSVV

SEQ ID NO: 49006 - protein, 10 aa, synthetic construct
ARPRGDLLLS

SEQ ID NO: 49007 - protein, 10 aa, synthetic construct
ESIRGDRGVV

SEQ ID NO: 49008 - protein, 10 aa, synthetic construct
ESIRGDYVGL

SEQ ID NO: 49009 - protein, 10 aa, synthetic construct
ESIRGDQSTL

SEQ ID NO: 49010 - protein, 10 aa, synthetic construct
ESIRGDRSQT

SEQ ID NO: 49011 - protein, 10 aa, synthetic construct
ESIRGDLLLS

SEQ ID NO: 49012 - protein, 10 aa, synthetic construct
ESMRGDRGQI

SEQ ID NO: 49013 - protein, 10 aa, synthetic construct
ESMRGDRQGI

SEQ ID NO: 49014 - protein, 10 aa, synthetic construct
ESMRGDRSVV

SEQ ID NO: 49015 - protein, 10 aa, synthetic construct
ESMRGDRGVV

SEQ ID NO: 49016 - protein, 10 aa, synthetic construct
ESMRGDYVGL

SEQ ID NO: 49017 - protein, 10 aa, synthetic construct
ARLRGDHGVL

SEQ ID NO: 49018 - protein, 10 aa, synthetic construct
ESMRGDQSTL

SEQ ID NO: 49019 - protein, 10 aa, synthetic construct
ESMRGDRSQT

SEQ ID NO: 49020 - protein, 10 aa, synthetic construct
ESMRGDLLLS

SEQ ID NO: 49021 - protein, 10 aa, synthetic construct
ESWRGDHGVL

SEQ ID NO: 49022 - protein, 10 aa, synthetic construct
ESWRGDHVNL

SEQ ID NO: 49023 - protein, 10 aa, synthetic construct
ESWRGDYVGL

SEQ ID NO: 49024 - protein, 10 aa, synthetic construct
ESWRGDYSSV

SEQ ID NO: 49025 - protein, 10 aa, synthetic construct
ESWRGDQSTL

SEQ ID NO: 49026 - protein, 10 aa, synthetic construct
ESWRGDLLLS

SEQ ID NO: 49027 - protein, 10 aa, synthetic construct
ESFRGDRGQI

SEQ ID NO: 49028 - protein, 10 aa, synthetic construct
ARLRGDRGQI

SEQ ID NO: 49029 - protein, 10 aa, synthetic construct
ESFRGDRQGI

SEQ ID NO: 49030 - protein, 10 aa, synthetic construct
ESFRGDRSVV

SEQ ID NO: 49031 - protein, 10 aa, synthetic construct
ESFRGDRGVV

SEQ ID NO: 49032 - protein, 10 aa, synthetic construct
ESFRGDYVGL

SEQ ID NO: 49033 - protein, 10 aa, synthetic construct
ESFRGDQSTL

SEQ ID NO: 49034 - protein, 10 aa, synthetic construct
ESFRGDRSQT

SEQ ID NO: 49035 - protein, 10 aa, synthetic construct
ESFRGDLLLS

SEQ ID NO: 49036 - protein, 10 aa, synthetic construct
ESKRGDRGQI

SEQ ID NO: 49037 - protein, 10 aa, synthetic construct
ESKRGDRQGI

SEQ ID NO: 49038 - protein, 10 aa, synthetic construct
ESKRGDRSVV

SEQ ID NO: 49039 - protein, 10 aa, synthetic construct
ARLRGDRQGI

SEQ ID NO: 49040 - protein, 10 aa, synthetic construct
ESKRGDRGVV

SEQ ID NO: 49041 - protein, 10 aa, synthetic construct
ESKRGDYVGL

SEQ ID NO: 49042 - protein, 10 aa, synthetic construct
ESKRGDQSTL

SEQ ID NO: 49043 - protein, 10 aa, synthetic construct
ESKRGDRSQT

SEQ ID NO: 49044 - protein, 10 aa, synthetic construct
ESKRGDLLLS

SEQ ID NO: 49045 - protein, 10 aa, synthetic construct
ESRRGDHVNL

SEQ ID NO: 49046 - protein, 10 aa, synthetic construct
ESRRGDRDYL

SEQ ID NO: 49047 - protein, 10 aa, synthetic construct
ESRRGDYSSV

SEQ ID NO: 49048 - protein, 10 aa, synthetic construct
ESRRGDLTVT

SEQ ID NO: 49049 - protein, 10 aa, synthetic construct
ESRRGDLIGR

SEQ ID NO: 49050 - protein, 10 aa, synthetic construct
ARLRGDRSVV

SEQ ID NO: 49051 - protein, 10 aa, synthetic construct
ESHRGDHGVL

SEQ ID NO: 49052 - protein, 10 aa, synthetic construct
ESHRGDHVNL

SEQ ID NO: 49053 - protein, 10 aa, synthetic construct
ESHRGDYVGL

SEQ ID NO: 49054 - protein, 10 aa, synthetic construct
ESHRGDYSSV

SEQ ID NO: 49055 - protein, 10 aa, synthetic construct
ESHRGDQSTL

SEQ ID NO: 49056 - protein, 10 aa, synthetic construct
ESHRGDLLLS

SEQ ID NO: 49057 - protein, 10 aa, synthetic construct
ESSRGDHGVL

SEQ ID NO: 49058 - protein, 10 aa, synthetic construct
ESSRGDHVNL

SEQ ID NO: 49059 - protein, 10 aa, synthetic construct
ESSRGDYVGL

SEQ ID NO: 49060 - protein, 10 aa, synthetic construct
ESSRGDYSSV

SEQ ID NO: 49061 - protein, 10 aa, synthetic construct
ARLRGDLTVT

SEQ ID NO: 49062 - protein, 10 aa, synthetic construct
ESSRGDQSTL

SEQ ID NO: 49063 - protein, 10 aa, synthetic construct
ESSRGDLLLS

SEQ ID NO: 49064 - protein, 10 aa, synthetic construct
ESTRGDHGVL

SEQ ID NO: 49065 - protein, 10 aa, synthetic construct
ESTRGDHVNL

SEQ ID NO: 49066 - protein, 10 aa, synthetic construct
ESTRGDYVGL

SEQ ID NO: 49067 - protein, 10 aa, synthetic construct
ESTRGDYSSV

SEQ ID NO: 49068 - protein, 10 aa, synthetic construct
ESTRGDQSTL

SEQ ID NO: 49069 - protein, 10 aa, synthetic construct
ESTRGDLLLS

SEQ ID NO: 49070 - protein, 10 aa, synthetic construct
ESYRGDRGQI

SEQ ID NO: 49071 - protein, 10 aa, synthetic construct
ESYRGDRQGI

SEQ ID NO: 49072 - protein, 10 aa, synthetic construct
QKNRGDLLLS

SEQ ID NO: 49073 - protein, 10 aa, synthetic construct
ARLRGDLIGR

SEQ ID NO: 49074 - protein, 10 aa, synthetic construct
ESYRGDRSVV

SEQ ID NO: 49075 - protein, 10 aa, synthetic construct
ESYRGDRGVV

SEQ ID NO: 49076 - protein, 10 aa, synthetic construct
ESYRGDYVGL

SEQ ID NO: 49077 - protein, 10 aa, synthetic construct
ESYRGDQSTL

SEQ ID NO: 49078 - protein, 10 aa, synthetic construct
ESYRGDRSQT

SEQ ID NO: 49079 - protein, 10 aa, synthetic construct
ESYRGDLLLS

SEQ ID NO: 49080 - protein, 10 aa, synthetic construct
ESNRGDRGQI

SEQ ID NO: 49081 - protein, 10 aa, synthetic construct
ESNRGDRQGI

SEQ ID NO: 49082 - protein, 10 aa, synthetic construct
ESNRGDRSVV

SEQ ID NO: 49083 - protein, 10 aa, synthetic construct
ESNRGDRGVV

SEQ ID NO: 49084 - protein, 10 aa, synthetic construct
ARLRGDRSQT

SEQ ID NO: 49085 - protein, 10 aa, synthetic construct
ESNRGDYVGL

SEQ ID NO: 49086 - protein, 10 aa, synthetic construct
ESNRGDQSTL

SEQ ID NO: 49087 - protein, 10 aa, synthetic construct
ESNRGDRSQT

SEQ ID NO: 49088 - protein, 10 aa, synthetic construct
ESNRGDLLLS

SEQ ID NO: 49089 - protein, 10 aa, synthetic construct
ESQRGDHGVL

SEQ ID NO: 49090 - protein, 10 aa, synthetic construct
ESQRGDHVNL

SEQ ID NO: 49091 - protein, 10 aa, synthetic construct
ESQRGDYVGL

SEQ ID NO: 49092 - protein, 10 aa, synthetic construct
ESQRGDYSSV

SEQ ID NO: 49093 - protein, 10 aa, synthetic construct
ESQRGDQSTL

SEQ ID NO: 49094 - protein, 10 aa, synthetic construct
ESQRGDLLLS

SEQ ID NO: 49095 - protein, 10 aa, synthetic construct
ARLRGDLLLS

SEQ ID NO: 49096 - protein, 10 aa, synthetic construct
ESDRGDHGVL

SEQ ID NO: 49097 - protein, 10 aa, synthetic construct
ESDRGDHVNL

SEQ ID NO: 49098 - protein, 10 aa, synthetic construct
ESDRGDYVGL

SEQ ID NO: 49099 - protein, 10 aa, synthetic construct
ESDRGDYSSV

SEQ ID NO: 49100 - protein, 10 aa, synthetic construct
ESDRGDQSTL

SEQ ID NO: 49101 - protein, 10 aa, synthetic construct
ESDRGDLLLS

SEQ ID NO: 49102 - protein, 10 aa, synthetic construct
ESERGDHGVL

SEQ ID NO: 49103 - protein, 10 aa, synthetic construct
ESERGDHVNL

SEQ ID NO: 49104 - protein, 10 aa, synthetic construct
ESERGDYVGL

SEQ ID NO: 49105 - protein, 10 aa, synthetic construct
ESERGDYSSV

SEQ ID NO: 49106 - protein, 10 aa, synthetic construct
ARWRGDRGQI

SEQ ID NO: 49107 - protein, 10 aa, synthetic construct
ESERGDQSTL

SEQ ID NO: 49108 - protein, 10 aa, synthetic construct
ESERGDLLLS

SEQ ID NO: 49109 - protein, 10 aa, synthetic construct
ETGRGDHGVL

SEQ ID NO: 49110 - protein, 10 aa, synthetic construct
ETGRGDYVGL

SEQ ID NO: 49111 - protein, 10 aa, synthetic construct
ETGRGDQSTL

SEQ ID NO: 49112 - protein, 10 aa, synthetic construct
ETGRGDLLLS

SEQ ID NO: 49113 - protein, 10 aa, synthetic construct
ETARGDHGVL

SEQ ID NO: 49114 - protein, 10 aa, synthetic construct
ETARGDYVGL

SEQ ID NO: 49115 - protein, 10 aa, synthetic construct
ETARGDQSTL

SEQ ID NO: 49116 - protein, 10 aa, synthetic construct
ETARGDLLLS

SEQ ID NO: 49117 - protein, 10 aa, synthetic construct
ARWRGDRQGI

SEQ ID NO: 49118 - protein, 10 aa, synthetic construct
ETVRGDRGQI

SEQ ID NO: 49119 - protein, 10 aa, synthetic construct
ETVRGDRQGI

SEQ ID NO: 49120 - protein, 10 aa, synthetic construct
ETVRGDRSVV

SEQ ID NO: 49121 - protein, 10 aa, synthetic construct
ETVRGDRGVV

SEQ ID NO: 49122 - protein, 10 aa, synthetic construct
ETVRGDRSQT

SEQ ID NO: 49123 - protein, 10 aa, synthetic construct
ETPRGDHGVL

SEQ ID NO: 49124 - protein, 10 aa, synthetic construct
ETPRGDYVGL

SEQ ID NO: 49125 - protein, 10 aa, synthetic construct
ETPRGDQSTL

SEQ ID NO: 49126 - protein, 10 aa, synthetic construct
ETPRGDLLLS

SEQ ID NO: 49127 - protein, 10 aa, synthetic construct
ETLRGDRGQI

SEQ ID NO: 49128 - protein, 10 aa, synthetic construct
ARWRGDRSVV

SEQ ID NO: 49129 - protein, 10 aa, synthetic construct
ETLRGDRQGI

SEQ ID NO: 49130 - protein, 10 aa, synthetic construct
ETLRGDRSVV

SEQ ID NO: 49131 - protein, 10 aa, synthetic construct
ETLRGDRGVV

SEQ ID NO: 49132 - protein, 10 aa, synthetic construct
ETLRGDRSQT

SEQ ID NO: 49133 - protein, 10 aa, synthetic construct
ETWRGDRGQI

SEQ ID NO: 49134 - protein, 10 aa, synthetic construct
ETWRGDRQGI

SEQ ID NO: 49135 - protein, 10 aa, synthetic construct
ETWRGDRSVV

SEQ ID NO: 49136 - protein, 10 aa, synthetic construct
ETWRGDRGVV

SEQ ID NO: 49137 - protein, 10 aa, synthetic construct
ETWRGDRSQT

SEQ ID NO: 49138 - protein, 10 aa, synthetic construct
ETRRGDHGVL

SEQ ID NO: 49139 - protein, 10 aa, synthetic construct
ARWRGDRGVV

SEQ ID NO: 49140 - protein, 10 aa, synthetic construct
ETRRGDYVGL

SEQ ID NO: 49141 - protein, 10 aa, synthetic construct
ETRRGDQSTL

SEQ ID NO: 49142 - protein, 10 aa, synthetic construct
ETRRGDLLLS

SEQ ID NO: 49143 - protein, 10 aa, synthetic construct
ETHRGDRGQI

SEQ ID NO: 49144 - protein, 10 aa, synthetic construct
ETHRGDRQGI

SEQ ID NO: 49145 - protein, 10 aa, synthetic construct
ETHRGDRSVV

SEQ ID NO: 49146 - protein, 10 aa, synthetic construct
ETHRGDRGVV

SEQ ID NO: 49147 - protein, 10 aa, synthetic construct
ETHRGDRSQT

SEQ ID NO: 49148 - protein, 10 aa, synthetic construct
ETSRGDRGQI

SEQ ID NO: 49149 - protein, 10 aa, synthetic construct
ETSRGDRQGI

SEQ ID NO: 49150 - protein, 10 aa, synthetic construct
ARWRGDRSQT

SEQ ID NO: 49151 - protein, 10 aa, synthetic construct
ETSRGDRSVV

SEQ ID NO: 49152 - protein, 10 aa, synthetic construct
ETSRGDRGVV

SEQ ID NO: 49153 - protein, 10 aa, synthetic construct
ETSRGDRSQT

SEQ ID NO: 49154 - protein, 10 aa, synthetic construct
ETTRGDRGQI

SEQ ID NO: 49155 - protein, 10 aa, synthetic construct
ETTRGDRQGI

SEQ ID NO: 49156 - protein, 10 aa, synthetic construct
ETTRGDRSVV

SEQ ID NO: 49157 - protein, 10 aa, synthetic construct
ETTRGDRGVV

SEQ ID NO: 49158 - protein, 10 aa, synthetic construct
ETTRGDRSQT

SEQ ID NO: 49159 - protein, 10 aa, synthetic construct
ETQRGDRGQI

SEQ ID NO: 49160 - protein, 10 aa, synthetic construct
ETQRGDRQGI

SEQ ID NO: 49161 - protein, 10 aa, synthetic construct
ARRRGDHGVL

SEQ ID NO: 49162 - protein, 10 aa, synthetic construct
ETQRGDRSVV

SEQ ID NO: 49163 - protein, 10 aa, synthetic construct
ETQRGDRGVV

SEQ ID NO: 49164 - protein, 10 aa, synthetic construct
ETQRGDRSQT

SEQ ID NO: 49165 - protein, 10 aa, synthetic construct
ETDRGDRGQI

SEQ ID NO: 49166 - protein, 10 aa, synthetic construct
ETDRGDRQGI

SEQ ID NO: 49167 - protein, 10 aa, synthetic construct
ETDRGDRSVV

SEQ ID NO: 49168 - protein, 10 aa, synthetic construct
ETDRGDRGVV

SEQ ID NO: 49169 - protein, 10 aa, synthetic construct
ETDRGDRSQT

SEQ ID NO: 49170 - protein, 10 aa, synthetic construct
ETERGDRGQI

SEQ ID NO: 49171 - protein, 10 aa, synthetic construct
ETERGDRQGI

SEQ ID NO: 49172 - protein, 10 aa, synthetic construct
ARRRGDRGQI

SEQ ID NO: 49173 - protein, 10 aa, synthetic construct
ETERGDRSVV

SEQ ID NO: 49174 - protein, 10 aa, synthetic construct
ETERGDRGVV

SEQ ID NO: 49175 - protein, 10 aa, synthetic construct
ETERGDRSQT

SEQ ID NO: 49176 - protein, 10 aa, synthetic construct
EYGRGDRGQI

SEQ ID NO: 49177 - protein, 10 aa, synthetic construct
EYGRGDRQGI

SEQ ID NO: 49178 - protein, 10 aa, synthetic construct
EYGRGDRSVV

SEQ ID NO: 49179 - protein, 10 aa, synthetic construct
EYGRGDRGVV

SEQ ID NO: 49180 - protein, 10 aa, synthetic construct
EYGRGDRSQT

SEQ ID NO: 49181 - protein, 10 aa, synthetic construct
EYARGDRGQI

SEQ ID NO: 49182 - protein, 10 aa, synthetic construct
EYARGDRQGI

SEQ ID NO: 49183 - protein, 10 aa, synthetic construct
SKKRGDHVNL

SEQ ID NO: 49184 - protein, 10 aa, synthetic construct
ARRRGDRQGI

SEQ ID NO: 49185 - protein, 10 aa, synthetic construct
EYARGDRSVV

SEQ ID NO: 49186 - protein, 10 aa, synthetic construct
EYARGDRGVV

SEQ ID NO: 49187 - protein, 10 aa, synthetic construct
EYARGDRSQT

SEQ ID NO: 49188 - protein, 10 aa, synthetic construct
EYPRGDRGQI

SEQ ID NO: 49189 - protein, 10 aa, synthetic construct
EYPRGDRQGI

SEQ ID NO: 49190 - protein, 10 aa, synthetic construct
EYPRGDRSVV

SEQ ID NO: 49191 - protein, 10 aa, synthetic construct
EYPRGDRGVV

SEQ ID NO: 49192 - protein, 10 aa, synthetic construct
EYPRGDRSQT

SEQ ID NO: 49193 - protein, 10 aa, synthetic construct
EYRRGDRGQI

SEQ ID NO: 49194 - protein, 10 aa, synthetic construct
EYRRGDRQGI

SEQ ID NO: 49195 - protein, 10 aa, synthetic construct
ARRRGDRSVV

SEQ ID NO: 49196 - protein, 10 aa, synthetic construct
EYRRGDRSVV

SEQ ID NO: 49197 - protein, 10 aa, synthetic construct
EYRRGDRGVV

SEQ ID NO: 49198 - protein, 10 aa, synthetic construct
EYRRGDRSQT

SEQ ID NO: 49199 - protein, 10 aa, synthetic construct
ENGRGDRGQI

SEQ ID NO: 49200 - protein, 10 aa, synthetic construct
ENGRGDRQGI

SEQ ID NO: 49201 - protein, 10 aa, synthetic construct
ENGRGDRSVV

SEQ ID NO: 49202 - protein, 10 aa, synthetic construct
ENGRGDRGVV

SEQ ID NO: 49203 - protein, 10 aa, synthetic construct
ENGRGDRSQT

SEQ ID NO: 49204 - protein, 10 aa, synthetic construct
ENARGDRGQI

SEQ ID NO: 49205 - protein, 10 aa, synthetic construct
ENARGDRQGI

SEQ ID NO: 49206 - protein, 10 aa, synthetic construct
ARRRGDLTVT

SEQ ID NO: 49207 - protein, 10 aa, synthetic construct
ENARGDRSVV

SEQ ID NO: 49208 - protein, 10 aa, synthetic construct
ENARGDRGVV

SEQ ID NO: 49209 - protein, 10 aa, synthetic construct
ENARGDRSQT

SEQ ID NO: 49210 - protein, 10 aa, synthetic construct
ENPRGDRGQI

SEQ ID NO: 49211 - protein, 10 aa, synthetic construct
ENPRGDRQGI

SEQ ID NO: 49212 - protein, 10 aa, synthetic construct
ENPRGDRSVV

SEQ ID NO: 49213 - protein, 10 aa, synthetic construct
ENPRGDRGVV

SEQ ID NO: 49214 - protein, 10 aa, synthetic construct
ENPRGDRSQT

SEQ ID NO: 49215 - protein, 10 aa, synthetic construct
ENRRGDRGQI

SEQ ID NO: 49216 - protein, 10 aa, synthetic construct
ENRRGDRQGI

SEQ ID NO: 49217 - protein, 10 aa, synthetic construct
ARRRGDLIGR

SEQ ID NO: 49218 - protein, 10 aa, synthetic construct
ENRRGDRSVV

SEQ ID NO: 49219 - protein, 10 aa, synthetic construct
ENRRGDRGVV

SEQ ID NO: 49220 - protein, 10 aa, synthetic construct
ENRRGDRSQT

SEQ ID NO: 49221 - protein, 10 aa, synthetic construct
EQGRGDHGVL

SEQ ID NO: 49222 - protein, 10 aa, synthetic construct
EQGRGDYVGL

SEQ ID NO: 49223 - protein, 10 aa, synthetic construct
EQGRGDQSTL

SEQ ID NO: 49224 - protein, 10 aa, synthetic construct
EQGRGDLLLS

SEQ ID NO: 49225 - protein, 10 aa, synthetic construct
EQARGDHGVL

SEQ ID NO: 49226 - protein, 10 aa, synthetic construct
EQARGDYVGL

SEQ ID NO: 49227 - protein, 10 aa, synthetic construct
EQARGDQSTL

SEQ ID NO: 49228 - protein, 10 aa, synthetic construct
ARRRGDRSQT

SEQ ID NO: 49229 - protein, 10 aa, synthetic construct
EQARGDLLLS

SEQ ID NO: 49230 - protein, 10 aa, synthetic construct
EQVRGDRGQI

SEQ ID NO: 49231 - protein, 10 aa, synthetic construct
EQVRGDRQGI

SEQ ID NO: 49232 - protein, 10 aa, synthetic construct
EQVRGDRSVV

SEQ ID NO: 49233 - protein, 10 aa, synthetic construct
EQVRGDRGVV

SEQ ID NO: 49234 - protein, 10 aa, synthetic construct
EQVRGDRSQT

SEQ ID NO: 49235 - protein, 10 aa, synthetic construct
EQPRGDHGVL

SEQ ID NO: 49236 - protein, 10 aa, synthetic construct
EQPRGDYVGL

SEQ ID NO: 49237 - protein, 10 aa, synthetic construct
EQPRGDQSTL

SEQ ID NO: 49238 - protein, 10 aa, synthetic construct
EQPRGDLLLS

SEQ ID NO: 49239 - protein, 10 aa, synthetic construct
ARRRGDLLLS

SEQ ID NO: 49240 - protein, 10 aa, synthetic construct
EQLRGDRGQI

SEQ ID NO: 49241 - protein, 10 aa, synthetic construct
EQLRGDRQGI

SEQ ID NO: 49242 - protein, 10 aa, synthetic construct
EQLRGDRSVV

SEQ ID NO: 49243 - protein, 10 aa, synthetic construct
EQLRGDRGVV

SEQ ID NO: 49244 - protein, 10 aa, synthetic construct
EQLRGDRSQT

SEQ ID NO: 49245 - protein, 10 aa, synthetic construct
EQWRGDRGQI

SEQ ID NO: 49246 - protein, 10 aa, synthetic construct
EQWRGDRQGI

SEQ ID NO: 49247 - protein, 10 aa, synthetic construct
EQWRGDRSVV

SEQ ID NO: 49248 - protein, 10 aa, synthetic construct
EQWRGDRGVV

SEQ ID NO: 49249 - protein, 10 aa, synthetic construct
EQWRGDRSQT

SEQ ID NO: 49250 - protein, 10 aa, synthetic construct
ARHRGDRGVV

SEQ ID NO: 49251 - protein, 10 aa, synthetic construct
EQRRGDHGVL

SEQ ID NO: 49252 - protein, 10 aa, synthetic construct
EQRRGDYVGL

SEQ ID NO: 49253 - protein, 10 aa, synthetic construct
EQRRGDQSTL

SEQ ID NO: 49254 - protein, 10 aa, synthetic construct
EQRRGDLLLS

SEQ ID NO: 49255 - protein, 10 aa, synthetic construct
EQHRGDRGQI

SEQ ID NO: 49256 - protein, 10 aa, synthetic construct
EQHRGDRQGI

SEQ ID NO: 49257 - protein, 10 aa, synthetic construct
EQHRGDRSVV

SEQ ID NO: 49258 - protein, 10 aa, synthetic construct
EQHRGDRGVV

SEQ ID NO: 49259 - protein, 10 aa, synthetic construct
EQHRGDRSQT

SEQ ID NO: 49260 - protein, 10 aa, synthetic construct
EQSRGDRGQI

SEQ ID NO: 49261 - protein, 10 aa, synthetic construct
ARSRGDHGVL

SEQ ID NO: 49262 - protein, 10 aa, synthetic construct
EQSRGDRQGI

SEQ ID NO: 49263 - protein, 10 aa, synthetic construct
EQSRGDRSVV

SEQ ID NO: 49264 - protein, 10 aa, synthetic construct
EQSRGDRGVV

SEQ ID NO: 49265 - protein, 10 aa, synthetic construct
EQSRGDRSQT

SEQ ID NO: 49266 - protein, 10 aa, synthetic construct
EQTRGDRGQI

SEQ ID NO: 49267 - protein, 10 aa, synthetic construct
EQTRGDRQGI

SEQ ID NO: 49268 - protein, 10 aa, synthetic construct
EQTRGDRSVV

SEQ ID NO: 49269 - protein, 10 aa, synthetic construct
EQTRGDRGVV

SEQ ID NO: 49270 - protein, 10 aa, synthetic construct
EQTRGDRSQT

SEQ ID NO: 49271 - protein, 10 aa, synthetic construct
EQQRGDRGQI

SEQ ID NO: 49272 - protein, 10 aa, synthetic construct
ARSRGDRGQI

SEQ ID NO: 49273 - protein, 10 aa, synthetic construct
EQQRGDRQGI

SEQ ID NO: 49274 - protein, 10 aa, synthetic construct
EQQRGDRSVV

SEQ ID NO: 49275 - protein, 10 aa, synthetic construct
EQQRGDRGVV

SEQ ID NO: 49276 - protein, 10 aa, synthetic construct
EQQRGDRSQT

SEQ ID NO: 49277 - protein, 10 aa, synthetic construct
EQDRGDRGQI

SEQ ID NO: 49278 - protein, 10 aa, synthetic construct
EQDRGDRQGI

SEQ ID NO: 49279 - protein, 10 aa, synthetic construct
EQDRGDRSVV

SEQ ID NO: 49280 - protein, 10 aa, synthetic construct
EQDRGDRGVV

SEQ ID NO: 49281 - protein, 10 aa, synthetic construct
EQDRGDRSQT

SEQ ID NO: 49282 - protein, 10 aa, synthetic construct
EQERGDRGQI

SEQ ID NO: 49283 - protein, 10 aa, synthetic construct
ARSRGDRQGI

SEQ ID NO: 49284 - protein, 10 aa, synthetic construct
EQERGDRQGI

SEQ ID NO: 49285 - protein, 10 aa, synthetic construct
EQERGDRSVV

SEQ ID NO: 49286 - protein, 10 aa, synthetic construct
EQERGDRGVV

SEQ ID NO: 49287 - protein, 10 aa, synthetic construct
EQERGDRSQT

SEQ ID NO: 49288 - protein, 10 aa, synthetic construct
EDGRGDHGVL

SEQ ID NO: 49289 - protein, 10 aa, synthetic construct
EDGRGDYVGL

SEQ ID NO: 49290 - protein, 10 aa, synthetic construct
EDGRGDQSTL

SEQ ID NO: 49291 - protein, 10 aa, synthetic construct
EDGRGDLLLS

SEQ ID NO: 49292 - protein, 10 aa, synthetic construct
EDARGDHGVL

SEQ ID NO: 49293 - protein, 10 aa, synthetic construct
EDARGDYVGL

SEQ ID NO: 49294 - protein, 10 aa, synthetic construct
SKKRGDRDYL

SEQ ID NO: 49295 - protein, 10 aa, synthetic construct
ARSRGDRSVV

SEQ ID NO: 49296 - protein, 10 aa, synthetic construct
EDARGDQSTL

SEQ ID NO: 49297 - protein, 10 aa, synthetic construct
EDARGDLLLS

SEQ ID NO: 49298 - protein, 10 aa, synthetic construct
EDVRGDRGQI

SEQ ID NO: 49299 - protein, 10 aa, synthetic construct
EDVRGDRQGI

SEQ ID NO: 49300 - protein, 10 aa, synthetic construct
EDVRGDRSVV

SEQ ID NO: 49301 - protein, 10 aa, synthetic construct
EDVRGDRGVV

SEQ ID NO: 49302 - protein, 10 aa, synthetic construct
EDVRGDRSQT

SEQ ID NO: 49303 - protein, 10 aa, synthetic construct
EDPRGDHGVL

SEQ ID NO: 49304 - protein, 10 aa, synthetic construct
EDPRGDYVGL

SEQ ID NO: 49305 - protein, 10 aa, synthetic construct
EDPRGDQSTL

SEQ ID NO: 49306 - protein, 10 aa, synthetic construct
ARSRGDLTVT

SEQ ID NO: 49307 - protein, 10 aa, synthetic construct
EDPRGDLLLS

SEQ ID NO: 49308 - protein, 10 aa, synthetic construct
EDLRGDRGQI

SEQ ID NO: 49309 - protein, 10 aa, synthetic construct
EDLRGDRQGI

SEQ ID NO: 49310 - protein, 10 aa, synthetic construct
EDLRGDRSVV

SEQ ID NO: 49311 - protein, 10 aa, synthetic construct
EDLRGDRGVV

SEQ ID NO: 49312 - protein, 10 aa, synthetic construct
EDLRGDRSQT

SEQ ID NO: 49313 - protein, 10 aa, synthetic construct
EDWRGDRGQI

SEQ ID NO: 49314 - protein, 10 aa, synthetic construct
EDWRGDRQGI

SEQ ID NO: 49315 - protein, 10 aa, synthetic construct
EDWRGDRSVV

SEQ ID NO: 49316 - protein, 10 aa, synthetic construct
EDWRGDRGVV

SEQ ID NO: 49317 - protein, 10 aa, synthetic construct
ARSRGDLIGR

SEQ ID NO: 49318 - protein, 10 aa, synthetic construct
EDWRGDRSQT

SEQ ID NO: 49319 - protein, 10 aa, synthetic construct
EDRRGDHGVL

SEQ ID NO: 49320 - protein, 10 aa, synthetic construct
EDRRGDYVGL

SEQ ID NO: 49321 - protein, 10 aa, synthetic construct
EDRRGDQSTL

SEQ ID NO: 49322 - protein, 10 aa, synthetic construct
EDRRGDLLLS

SEQ ID NO: 49323 - protein, 10 aa, synthetic construct
EDHRGDRGQI

SEQ ID NO: 49324 - protein, 10 aa, synthetic construct
EDHRGDRQGI

SEQ ID NO: 49325 - protein, 10 aa, synthetic construct
EDHRGDRSVV

SEQ ID NO: 49326 - protein, 10 aa, synthetic construct
EDHRGDRGVV

SEQ ID NO: 49327 - protein, 10 aa, synthetic construct
EDHRGDRSQT

SEQ ID NO: 49328 - protein, 10 aa, synthetic construct
ARSRGDRSQT

SEQ ID NO: 49329 - protein, 10 aa, synthetic construct
EDSRGDRGQI

SEQ ID NO: 49330 - protein, 10 aa, synthetic construct
EDSRGDRQGI

SEQ ID NO: 49331 - protein, 10 aa, synthetic construct
EDSRGDRSVV

SEQ ID NO: 49332 - protein, 10 aa, synthetic construct
EDSRGDRGVV

SEQ ID NO: 49333 - protein, 10 aa, synthetic construct
EDSRGDRSQT

SEQ ID NO: 49334 - protein, 10 aa, synthetic construct
EDTRGDRGQI

SEQ ID NO: 49335 - protein, 10 aa, synthetic construct
EDTRGDRQGI

SEQ ID NO: 49336 - protein, 10 aa, synthetic construct
EDTRGDRSVV

SEQ ID NO: 49337 - protein, 10 aa, synthetic construct
EDTRGDRGVV

SEQ ID NO: 49338 - protein, 10 aa, synthetic construct
EDTRGDRSQT

SEQ ID NO: 49339 - protein, 10 aa, synthetic construct
ARSRGDLLLS

SEQ ID NO: 49340 - protein, 10 aa, synthetic construct
EDQRGDRGQI

SEQ ID NO: 49341 - protein, 10 aa, synthetic construct
EDQRGDRQGI

SEQ ID NO: 49342 - protein, 10 aa, synthetic construct
EDQRGDRSVV

SEQ ID NO: 49343 - protein, 10 aa, synthetic construct
EDQRGDRGVV

SEQ ID NO: 49344 - protein, 10 aa, synthetic construct
EDQRGDRSQT

SEQ ID NO: 49345 - protein, 10 aa, synthetic construct
EDDRGDRGQI

SEQ ID NO: 49346 - protein, 10 aa, synthetic construct
EDDRGDRQGI

SEQ ID NO: 49347 - protein, 10 aa, synthetic construct
EDDRGDRSVV

SEQ ID NO: 49348 - protein, 10 aa, synthetic construct
EDDRGDRGVV

SEQ ID NO: 49349 - protein, 10 aa, synthetic construct
EDDRGDRSQT

SEQ ID NO: 49350 - protein, 10 aa, synthetic construct
ARTRGDRGVV

SEQ ID NO: 49351 - protein, 10 aa, synthetic construct
EDERGDRGQI

SEQ ID NO: 49352 - protein, 10 aa, synthetic construct
EDERGDRQGI

SEQ ID NO: 49353 - protein, 10 aa, synthetic construct
EDERGDRSVV

SEQ ID NO: 49354 - protein, 10 aa, synthetic construct
EDERGDRGVV

SEQ ID NO: 49355 - protein, 10 aa, synthetic construct
EDERGDRSQT

SEQ ID NO: 49356 - protein, 10 aa, synthetic construct
EEGRGDHGVL

SEQ ID NO: 49357 - protein, 10 aa, synthetic construct
EEGRGDYVGL

SEQ ID NO: 49358 - protein, 10 aa, synthetic construct
EEGRGDQSTL

SEQ ID NO: 49359 - protein, 10 aa, synthetic construct
EEGRGDLLLS

SEQ ID NO: 49360 - protein, 10 aa, synthetic construct
EEARGDHGVL

SEQ ID NO: 49361 - protein, 10 aa, synthetic construct
ARQRGDRGVV

SEQ ID NO: 49362 - protein, 10 aa, synthetic construct
EEARGDYVGL

SEQ ID NO: 49363 - protein, 10 aa, synthetic construct
EEARGDQSTL

SEQ ID NO: 49364 - protein, 10 aa, synthetic construct
EEARGDLLLS

SEQ ID NO: 49365 - protein, 10 aa, synthetic construct
EEVRGDRGQI

SEQ ID NO: 49366 - protein, 10 aa, synthetic construct
EEVRGDRQGI

SEQ ID NO: 49367 - protein, 10 aa, synthetic construct
EEVRGDRSVV

SEQ ID NO: 49368 - protein, 10 aa, synthetic construct
EEVRGDRGVV

SEQ ID NO: 49369 - protein, 10 aa, synthetic construct
EEVRGDRSQT

SEQ ID NO: 49370 - protein, 10 aa, synthetic construct
EEPRGDHGVL

SEQ ID NO: 49371 - protein, 10 aa, synthetic construct
EEPRGDYVGL

SEQ ID NO: 49372 - protein, 10 aa, synthetic construct
ARDRGDRGVV

SEQ ID NO: 49373 - protein, 10 aa, synthetic construct
EEPRGDQSTL

SEQ ID NO: 49374 - protein, 10 aa, synthetic construct
EEPRGDLLLS

SEQ ID NO: 49375 - protein, 10 aa, synthetic construct
EELRGDRGQI

SEQ ID NO: 49376 - protein, 10 aa, synthetic construct
EELRGDRQGI

SEQ ID NO: 49377 - protein, 10 aa, synthetic construct
EELRGDRSVV

SEQ ID NO: 49378 - protein, 10 aa, synthetic construct
EELRGDRGVV

SEQ ID NO: 49379 - protein, 10 aa, synthetic construct
EELRGDRSQT

SEQ ID NO: 49380 - protein, 10 aa, synthetic construct
EEWRGDRGQI

SEQ ID NO: 49381 - protein, 10 aa, synthetic construct
EEWRGDRQGI

SEQ ID NO: 49382 - protein, 10 aa, synthetic construct
EEWRGDRSVV

SEQ ID NO: 49383 - protein, 10 aa, synthetic construct
ARERGDRGVV

SEQ ID NO: 49384 - protein, 10 aa, synthetic construct
EEWRGDRGVV

SEQ ID NO: 49385 - protein, 10 aa, synthetic construct
EEWRGDRSQT

SEQ ID NO: 49386 - protein, 10 aa, synthetic construct
EERRGDHGVL

SEQ ID NO: 49387 - protein, 10 aa, synthetic construct
EERRGDYVGL

SEQ ID NO: 49388 - protein, 10 aa, synthetic construct
EERRGDQSTL

SEQ ID NO: 49389 - protein, 10 aa, synthetic construct
EERRGDLLLS

SEQ ID NO: 49390 - protein, 10 aa, synthetic construct
EEHRGDRGQI

SEQ ID NO: 49391 - protein, 10 aa, synthetic construct
EEHRGDRQGI

SEQ ID NO: 49392 - protein, 10 aa, synthetic construct
EEHRGDRSVV

SEQ ID NO: 49393 - protein, 10 aa, synthetic construct
EEHRGDRGVV

SEQ ID NO: 49394 - protein, 10 aa, synthetic construct
AHGRGDRGVV

SEQ ID NO: 49395 - protein, 10 aa, synthetic construct
EEHRGDRSQT

SEQ ID NO: 49396 - protein, 10 aa, synthetic construct
EESRGDRGQI

SEQ ID NO: 49397 - protein, 10 aa, synthetic construct
EESRGDRQGI

SEQ ID NO: 49398 - protein, 10 aa, synthetic construct
EESRGDRSVV

SEQ ID NO: 49399 - protein, 10 aa, synthetic construct
EESRGDRGVV

SEQ ID NO: 49400 - protein, 10 aa, synthetic construct
EESRGDRSQT

SEQ ID NO: 49401 - protein, 10 aa, synthetic construct
EETRGDRGQI

SEQ ID NO: 49402 - protein, 10 aa, synthetic construct
EETRGDRQGI

SEQ ID NO: 49403 - protein, 10 aa, synthetic construct
EETRGDRSVV

SEQ ID NO: 49404 - protein, 10 aa, synthetic construct
EETRGDRGVV

SEQ ID NO: 49405 - protein, 10 aa, synthetic construct
SKKRGDYSSV

SEQ ID NO: 49406 - protein, 10 aa, synthetic construct
AHARGDRGVV

SEQ ID NO: 49407 - protein, 10 aa, synthetic construct
EETRGDRSQT

SEQ ID NO: 49408 - protein, 10 aa, synthetic construct
EEQRGDRGQI

SEQ ID NO: 49409 - protein, 10 aa, synthetic construct
EEQRGDRQGI

SEQ ID NO: 49410 - protein, 10 aa, synthetic construct
EEQRGDRSVV

SEQ ID NO: 49411 - protein, 10 aa, synthetic construct
EEQRGDRGVV

SEQ ID NO: 49412 - protein, 10 aa, synthetic construct
EEQRGDRSQT

SEQ ID NO: 49413 - protein, 10 aa, synthetic construct
EEDRGDRGQI

SEQ ID NO: 49414 - protein, 10 aa, synthetic construct
EEDRGDRQGI

SEQ ID NO: 49415 - protein, 10 aa, synthetic construct
EEDRGDRSVV

SEQ ID NO: 49416 - protein, 10 aa, synthetic construct
EEDRGDRGVV

SEQ ID NO: 49417 - protein, 10 aa, synthetic construct
AHVRGDRGVV

SEQ ID NO: 49418 - protein, 10 aa, synthetic construct
EEDRGDRSQT

SEQ ID NO: 49419 - protein, 10 aa, synthetic construct
EEERGDRGQI

SEQ ID NO: 49420 - protein, 10 aa, synthetic construct
EEERGDRQGI

SEQ ID NO: 49421 - protein, 10 aa, synthetic construct
EEERGDRSVV

SEQ ID NO: 49422 - protein, 10 aa, synthetic construct
EEERGDRGVV

SEQ ID NO: 49423 - protein, 10 aa, synthetic construct
EEERGDRSQT

SEQ ID NO: 49424 - protein, 10 aa, synthetic construct
NGGRGDHGVL

SEQ ID NO: 49425 - protein, 10 aa, synthetic construct
NGGRGDYVGL

SEQ ID NO: 49426 - protein, 10 aa, synthetic construct
NGGRGDQSTL

SEQ ID NO: 49427 - protein, 10 aa, synthetic construct
NGGRGDLLLS

SEQ ID NO: 49428 - protein, 10 aa, synthetic construct
AHPRGDRGVV

SEQ ID NO: 49429 - protein, 10 aa, synthetic construct
NGARGDHGVL

SEQ ID NO: 49430 - protein, 10 aa, synthetic construct
NGARGDYVGL

SEQ ID NO: 49431 - protein, 10 aa, synthetic construct
NGARGDQSTL

SEQ ID NO: 49432 - protein, 10 aa, synthetic construct
NGARGDLLLS

SEQ ID NO: 49433 - protein, 10 aa, synthetic construct
NGVRGDRGQI

SEQ ID NO: 49434 - protein, 10 aa, synthetic construct
NGVRGDRQGI

SEQ ID NO: 49435 - protein, 10 aa, synthetic construct
NGVRGDRSVV

SEQ ID NO: 49436 - protein, 10 aa, synthetic construct
NGVRGDRGVV

SEQ ID NO: 49437 - protein, 10 aa, synthetic construct
NGVRGDRSQT

SEQ ID NO: 49438 - protein, 10 aa, synthetic construct
NGPRGDHGVL

SEQ ID NO: 49439 - protein, 10 aa, synthetic construct
AHLRGDRGVV

SEQ ID NO: 49440 - protein, 10 aa, synthetic construct
NGPRGDYVGL

SEQ ID NO: 49441 - protein, 10 aa, synthetic construct
NGPRGDQSTL

SEQ ID NO: 49442 - protein, 10 aa, synthetic construct
NGPRGDLLLS

SEQ ID NO: 49443 - protein, 10 aa, synthetic construct
NGLRGDRGQI

SEQ ID NO: 49444 - protein, 10 aa, synthetic construct
NGLRGDRQGI

SEQ ID NO: 49445 - protein, 10 aa, synthetic construct
NGLRGDRSVV

SEQ ID NO: 49446 - protein, 10 aa, synthetic construct
NGLRGDRGVV

SEQ ID NO: 49447 - protein, 10 aa, synthetic construct
NGLRGDRSQT

SEQ ID NO: 49448 - protein, 10 aa, synthetic construct
NGWRGDRGQI

SEQ ID NO: 49449 - protein, 10 aa, synthetic construct
NGWRGDRQGI

SEQ ID NO: 49450 - protein, 10 aa, synthetic construct
AHRRGDRGVV

SEQ ID NO: 49451 - protein, 10 aa, synthetic construct
NGWRGDRSVV

SEQ ID NO: 49452 - protein, 10 aa, synthetic construct
NGWRGDRGVV

SEQ ID NO: 49453 - protein, 10 aa, synthetic construct
NGWRGDRSQT

SEQ ID NO: 49454 - protein, 10 aa, synthetic construct
NGRRGDHGVL

SEQ ID NO: 49455 - protein, 10 aa, synthetic construct
NGRRGDYVGL

SEQ ID NO: 49456 - protein, 10 aa, synthetic construct
NGRRGDQSTL

SEQ ID NO: 49457 - protein, 10 aa, synthetic construct
NGRRGDLLLS

SEQ ID NO: 49458 - protein, 10 aa, synthetic construct
NGHRGDRGQI

SEQ ID NO: 49459 - protein, 10 aa, synthetic construct
NGHRGDRQGI

SEQ ID NO: 49460 - protein, 10 aa, synthetic construct
NGHRGDRSVV

SEQ ID NO: 49461 - protein, 10 aa, synthetic construct
AHSRGDRGVV

SEQ ID NO: 49462 - protein, 10 aa, synthetic construct
NGHRGDRGVV

SEQ ID NO: 49463 - protein, 10 aa, synthetic construct
NGHRGDRSQT

SEQ ID NO: 49464 - protein, 10 aa, synthetic construct
NGSRGDRGQI

SEQ ID NO: 49465 - protein, 10 aa, synthetic construct
NGSRGDRQGI

SEQ ID NO: 49466 - protein, 10 aa, synthetic construct
NGSRGDRSVV

SEQ ID NO: 49467 - protein, 10 aa, synthetic construct
NGSRGDRGVV

SEQ ID NO: 49468 - protein, 10 aa, synthetic construct
NGSRGDRSQT

SEQ ID NO: 49469 - protein, 10 aa, synthetic construct
NGTRGDRGQI

SEQ ID NO: 49470 - protein, 10 aa, synthetic construct
NGTRGDRQGI

SEQ ID NO: 49471 - protein, 10 aa, synthetic construct
NGTRGDRSVV

SEQ ID NO: 49472 - protein, 10 aa, synthetic construct
ASGRGDRGVV

SEQ ID NO: 49473 - protein, 10 aa, synthetic construct
NGTRGDRGVV

SEQ ID NO: 49474 - protein, 10 aa, synthetic construct
NGTRGDRSQT

SEQ ID NO: 49475 - protein, 10 aa, synthetic construct
NGQRGDRGQI

SEQ ID NO: 49476 - protein, 10 aa, synthetic construct
NGQRGDRQGI

SEQ ID NO: 49477 - protein, 10 aa, synthetic construct
NGQRGDRSVV

SEQ ID NO: 49478 - protein, 10 aa, synthetic construct
NGQRGDRGVV

SEQ ID NO: 49479 - protein, 10 aa, synthetic construct
NGQRGDRSQT

SEQ ID NO: 49480 - protein, 10 aa, synthetic construct
NGDRGDRGQI

SEQ ID NO: 49481 - protein, 10 aa, synthetic construct
NGDRGDRQGI

SEQ ID NO: 49482 - protein, 10 aa, synthetic construct
NGDRGDRSVV

SEQ ID NO: 49483 - protein, 10 aa, synthetic construct
ASARGDRGVV

SEQ ID NO: 49484 - protein, 10 aa, synthetic construct
NGDRGDRGVV

SEQ ID NO: 49485 - protein, 10 aa, synthetic construct
NGDRGDRSQT

SEQ ID NO: 49486 - protein, 10 aa, synthetic construct
NGERGDRGQI

SEQ ID NO: 49487 - protein, 10 aa, synthetic construct
NGERGDRQGI

SEQ ID NO: 49488 - protein, 10 aa, synthetic construct
NGERGDRSVV

SEQ ID NO: 49489 - protein, 10 aa, synthetic construct
NGERGDRGVV

SEQ ID NO: 49490 - protein, 10 aa, synthetic construct
NGERGDRSQT

SEQ ID NO: 49491 - protein, 10 aa, synthetic construct
NAGRGDHGVL

SEQ ID NO: 49492 - protein, 10 aa, synthetic construct
NAGRGDYVGL

SEQ ID NO: 49493 - protein, 10 aa, synthetic construct
NAGRGDQSTL

SEQ ID NO: 49494 - protein, 10 aa, synthetic construct
ASVRGDRGVV

SEQ ID NO: 49495 - protein, 10 aa, synthetic construct
NAGRGDLLLS

SEQ ID NO: 49496 - protein, 10 aa, synthetic construct
NAARGDHGVL

SEQ ID NO: 49497 - protein, 10 aa, synthetic construct
NAARGDYVGL

SEQ ID NO: 49498 - protein, 10 aa, synthetic construct
NAARGDQSTL

SEQ ID NO: 49499 - protein, 10 aa, synthetic construct
NAARGDLLLS

SEQ ID NO: 49500 - protein, 10 aa, synthetic construct
NAVRGDRGQI

SEQ ID NO: 49501 - protein, 10 aa, synthetic construct
NAVRGDRQGI

SEQ ID NO: 49502 - protein, 10 aa, synthetic construct
NAVRGDRSVV

SEQ ID NO: 49503 - protein, 10 aa, synthetic construct
NAVRGDRGVV

SEQ ID NO: 49504 - protein, 10 aa, synthetic construct
NAVRGDRSQT

SEQ ID NO: 49505 - protein, 10 aa, synthetic construct
ASPRGDRGVV

SEQ ID NO: 49506 - protein, 10 aa, synthetic construct
NAPRGDHGVL

SEQ ID NO: 49507 - protein, 10 aa, synthetic construct
NAPRGDYVGL

SEQ ID NO: 49508 - protein, 10 aa, synthetic construct
NAPRGDQSTL

SEQ ID NO: 49509 - protein, 10 aa, synthetic construct
NAPRGDLLLS

SEQ ID NO: 49510 - protein, 10 aa, synthetic construct
NALRGDRGQI

SEQ ID NO: 49511 - protein, 10 aa, synthetic construct
NALRGDRQGI

SEQ ID NO: 49512 - protein, 10 aa, synthetic construct
NALRGDRSVV

SEQ ID NO: 49513 - protein, 10 aa, synthetic construct
NALRGDRGVV

SEQ ID NO: 49514 - protein, 10 aa, synthetic construct
NALRGDRSQT

SEQ ID NO: 49515 - protein, 10 aa, synthetic construct
NAWRGDRGQI

SEQ ID NO: 49516 - protein, 10 aa, synthetic construct
EKNRGDRSVV

SEQ ID NO: 49517 - protein, 10 aa, synthetic construct
SKKRGDLTVT

SEQ ID NO: 49518 - protein, 10 aa, synthetic construct
ASLRGDRGVV

SEQ ID NO: 49519 - protein, 10 aa, synthetic construct
NAWRGDRQGI

SEQ ID NO: 49520 - protein, 10 aa, synthetic construct
NAWRGDRSVV

SEQ ID NO: 49521 - protein, 10 aa, synthetic construct
NAWRGDRGVV

SEQ ID NO: 49522 - protein, 10 aa, synthetic construct
NAWRGDRSQT

SEQ ID NO: 49523 - protein, 10 aa, synthetic construct
NARRGDHGVL

SEQ ID NO: 49524 - protein, 10 aa, synthetic construct
NARRGDYVGL

SEQ ID NO: 49525 - protein, 10 aa, synthetic construct
NARRGDQSTL

SEQ ID NO: 49526 - protein, 10 aa, synthetic construct
NARRGDLLLS

SEQ ID NO: 49527 - protein, 10 aa, synthetic construct
NAHRGDRGQI

SEQ ID NO: 49528 - protein, 10 aa, synthetic construct
NAHRGDRQGI

SEQ ID NO: 49529 - protein, 10 aa, synthetic construct
ASRRGDRGVV

SEQ ID NO: 49530 - protein, 10 aa, synthetic construct
NAHRGDRSVV

SEQ ID NO: 49531 - protein, 10 aa, synthetic construct
NAHRGDRGVV

SEQ ID NO: 49532 - protein, 10 aa, synthetic construct
NAHRGDRSQT

SEQ ID NO: 49533 - protein, 10 aa, synthetic construct
NASRGDRGQI

SEQ ID NO: 49534 - protein, 10 aa, synthetic construct
NASRGDRQGI

SEQ ID NO: 49535 - protein, 10 aa, synthetic construct
NASRGDRSVV

SEQ ID NO: 49536 - protein, 10 aa, synthetic construct
NASRGDRGVV

SEQ ID NO: 49537 - protein, 10 aa, synthetic construct
NASRGDRSQT

SEQ ID NO: 49538 - protein, 10 aa, synthetic construct
NATRGDRGQI

SEQ ID NO: 49539 - protein, 10 aa, synthetic construct
NATRGDRQGI

SEQ ID NO: 49540 - protein, 10 aa, synthetic construct
ASSRGDRGVV

SEQ ID NO: 49541 - protein, 10 aa, synthetic construct
NATRGDRSVV

SEQ ID NO: 49542 - protein, 10 aa, synthetic construct
NATRGDRGVV

SEQ ID NO: 49543 - protein, 10 aa, synthetic construct
NATRGDRSQT

SEQ ID NO: 49544 - protein, 10 aa, synthetic construct
NAQRGDRGQI

SEQ ID NO: 49545 - protein, 10 aa, synthetic construct
NAQRGDRQGI

SEQ ID NO: 49546 - protein, 10 aa, synthetic construct
NAQRGDRSVV

SEQ ID NO: 49547 - protein, 10 aa, synthetic construct
NAQRGDRGVV

SEQ ID NO: 49548 - protein, 10 aa, synthetic construct
NAQRGDRSQT

SEQ ID NO: 49549 - protein, 10 aa, synthetic construct
NADRGDRGQI

SEQ ID NO: 49550 - protein, 10 aa, synthetic construct
NADRGDRQGI

SEQ ID NO: 49551 - protein, 10 aa, synthetic construct
ATGRGDRGVV

SEQ ID NO: 49552 - protein, 10 aa, synthetic construct
NADRGDRSVV

SEQ ID NO: 49553 - protein, 10 aa, synthetic construct
NADRGDRGVV

SEQ ID NO: 49554 - protein, 10 aa, synthetic construct
NADRGDRSQT

SEQ ID NO: 49555 - protein, 10 aa, synthetic construct
NAERGDRGQI

SEQ ID NO: 49556 - protein, 10 aa, synthetic construct
NAERGDRQGI

SEQ ID NO: 49557 - protein, 10 aa, synthetic construct
NAERGDRSVV

SEQ ID NO: 49558 - protein, 10 aa, synthetic construct
NAERGDRGVV

SEQ ID NO: 49559 - protein, 10 aa, synthetic construct
NAERGDRSQT

SEQ ID NO: 49560 - protein, 10 aa, synthetic construct
NVGRGDHGVL

SEQ ID NO: 49561 - protein, 10 aa, synthetic construct
NVGRGDHVNL

SEQ ID NO: 49562 - protein, 10 aa, synthetic construct
ATARGDRGVV

SEQ ID NO: 49563 - protein, 10 aa, synthetic construct
NVGRGDYVGL

SEQ ID NO: 49564 - protein, 10 aa, synthetic construct
NVGRGDYSSV

SEQ ID NO: 49565 - protein, 10 aa, synthetic construct
NVGRGDQSTL

SEQ ID NO: 49566 - protein, 10 aa, synthetic construct
NVGRGDLLLS

SEQ ID NO: 49567 - protein, 10 aa, synthetic construct
NVARGDHGVL

SEQ ID NO: 49568 - protein, 10 aa, synthetic construct
NVARGDHVNL

SEQ ID NO: 49569 - protein, 10 aa, synthetic construct
NVARGDYVGL

SEQ ID NO: 49570 - protein, 10 aa, synthetic construct
NVARGDYSSV

SEQ ID NO: 49571 - protein, 10 aa, synthetic construct
NVARGDQSTL

SEQ ID NO: 49572 - protein, 10 aa, synthetic construct
NVARGDLLLS

SEQ ID NO: 49573 - protein, 10 aa, synthetic construct
ATVRGDRGVV

SEQ ID NO: 49574 - protein, 10 aa, synthetic construct
NVVRGDRGQI

SEQ ID NO: 49575 - protein, 10 aa, synthetic construct
NVVRGDRQGI

SEQ ID NO: 49576 - protein, 10 aa, synthetic construct
NVVRGDRSVV

SEQ ID NO: 49577 - protein, 10 aa, synthetic construct
NVVRGDRGVV

SEQ ID NO: 49578 - protein, 10 aa, synthetic construct
NVVRGDYVGL

SEQ ID NO: 49579 - protein, 10 aa, synthetic construct
NVVRGDQSTL

SEQ ID NO: 49580 - protein, 10 aa, synthetic construct
NVVRGDRSQT

SEQ ID NO: 49581 - protein, 10 aa, synthetic construct
NVVRGDLLLS

SEQ ID NO: 49582 - protein, 10 aa, synthetic construct
NVPRGDHGVL

SEQ ID NO: 49583 - protein, 10 aa, synthetic construct
NVPRGDHVNL

SEQ ID NO: 49584 - protein, 10 aa, synthetic construct
ATPRGDRGVV

SEQ ID NO: 49585 - protein, 10 aa, synthetic construct
NVPRGDYVGL

SEQ ID NO: 49586 - protein, 10 aa, synthetic construct
NVPRGDYSSV

SEQ ID NO: 49587 - protein, 10 aa, synthetic construct
NVPRGDQSTL

SEQ ID NO: 49588 - protein, 10 aa, synthetic construct
NVPRGDLLLS

SEQ ID NO: 49589 - protein, 10 aa, synthetic construct
NVLRGDRGQI

SEQ ID NO: 49590 - protein, 10 aa, synthetic construct
NVLRGDRQGI

SEQ ID NO: 49591 - protein, 10 aa, synthetic construct
NVLRGDRSVV

SEQ ID NO: 49592 - protein, 10 aa, synthetic construct
NVLRGDRGVV

SEQ ID NO: 49593 - protein, 10 aa, synthetic construct
NVLRGDYVGL

SEQ ID NO: 49594 - protein, 10 aa, synthetic construct
NVLRGDQSTL

SEQ ID NO: 49595 - protein, 10 aa, synthetic construct
ATLRGDRGVV

SEQ ID NO: 49596 - protein, 10 aa, synthetic construct
NVLRGDRSQT

SEQ ID NO: 49597 - protein, 10 aa, synthetic construct
NVLRGDLLLS

SEQ ID NO: 49598 - protein, 10 aa, synthetic construct
NVIRGDRSVV

SEQ ID NO: 49599 - protein, 10 aa, synthetic construct
NVIRGDRSQT

SEQ ID NO: 49600 - protein, 10 aa, synthetic construct
NVMRGDRSVV

SEQ ID NO: 49601 - protein, 10 aa, synthetic construct
NVMRGDRSQT

SEQ ID NO: 49602 - protein, 10 aa, synthetic construct
NVWRGDRGQI

SEQ ID NO: 49603 - protein, 10 aa, synthetic construct
NVWRGDRQGI

SEQ ID NO: 49604 - protein, 10 aa, synthetic construct
NVWRGDRSVV

SEQ ID NO: 49605 - protein, 10 aa, synthetic construct
NVWRGDRGVV

SEQ ID NO: 49606 - protein, 10 aa, synthetic construct
ATRRGDRGVV

SEQ ID NO: 49607 - protein, 10 aa, synthetic construct
NVWRGDYVGL

SEQ ID NO: 49608 - protein, 10 aa, synthetic construct
NVWRGDQSTL

SEQ ID NO: 49609 - protein, 10 aa, synthetic construct
NVWRGDRSQT

SEQ ID NO: 49610 - protein, 10 aa, synthetic construct
NVWRGDLLLS

SEQ ID NO: 49611 - protein, 10 aa, synthetic construct
NVFRGDRSVV

SEQ ID NO: 49612 - protein, 10 aa, synthetic construct
NVFRGDRSQT

SEQ ID NO: 49613 - protein, 10 aa, synthetic construct
NVKRGDRSVV

SEQ ID NO: 49614 - protein, 10 aa, synthetic construct
NVKRGDRSQT

SEQ ID NO: 49615 - protein, 10 aa, synthetic construct
NVRRGDHGVL

SEQ ID NO: 49616 - protein, 10 aa, synthetic construct
NVRRGDHVNL

SEQ ID NO: 49617 - protein, 10 aa, synthetic construct
ATSRGDRGVV

SEQ ID NO: 49618 - protein, 10 aa, synthetic construct
NVRRGDYVGL

SEQ ID NO: 49619 - protein, 10 aa, synthetic construct
NVRRGDYSSV

SEQ ID NO: 49620 - protein, 10 aa, synthetic construct
NVRRGDQSTL

SEQ ID NO: 49621 - protein, 10 aa, synthetic construct
NVRRGDLLLS

SEQ ID NO: 49622 - protein, 10 aa, synthetic construct
NVHRGDRGQI

SEQ ID NO: 49623 - protein, 10 aa, synthetic construct
NVHRGDRQGI

SEQ ID NO: 49624 - protein, 10 aa, synthetic construct
NVHRGDRSVV

SEQ ID NO: 49625 - protein, 10 aa, synthetic construct
NVHRGDRGVV

SEQ ID NO: 49626 - protein, 10 aa, synthetic construct
NVHRGDYVGL

SEQ ID NO: 49627 - protein, 10 aa, synthetic construct
NVHRGDQSTL

SEQ ID NO: 49628 - protein, 10 aa, synthetic construct
SKNRGDHVNL

SEQ ID NO: 49629 - protein, 10 aa, synthetic construct
AQGRGDRGVV

SEQ ID NO: 49630 - protein, 10 aa, synthetic construct
NVHRGDRSQT

SEQ ID NO: 49631 - protein, 10 aa, synthetic construct
NVHRGDLLLS

SEQ ID NO: 49632 - protein, 10 aa, synthetic construct
NVSRGDRGQI

SEQ ID NO: 49633 - protein, 10 aa, synthetic construct
NVSRGDRQGI

SEQ ID NO: 49634 - protein, 10 aa, synthetic construct
NVSRGDRSVV

SEQ ID NO: 49635 - protein, 10 aa, synthetic construct
NVSRGDRGVV

SEQ ID NO: 49636 - protein, 10 aa, synthetic construct
NVSRGDYVGL

SEQ ID NO: 49637 - protein, 10 aa, synthetic construct
NVSRGDQSTL

SEQ ID NO: 49638 - protein, 10 aa, synthetic construct
NVSRGDRSQT

SEQ ID NO: 49639 - protein, 10 aa, synthetic construct
NVSRGDLLLS

SEQ ID NO: 49640 - protein, 10 aa, synthetic construct
AQARGDRGVV

SEQ ID NO: 49641 - protein, 10 aa, synthetic construct
NVTRGDRGQI

SEQ ID NO: 49642 - protein, 10 aa, synthetic construct
NVTRGDRQGI

SEQ ID NO: 49643 - protein, 10 aa, synthetic construct
NVTRGDRSVV

SEQ ID NO: 49644 - protein, 10 aa, synthetic construct
NVTRGDRGVV

SEQ ID NO: 49645 - protein, 10 aa, synthetic construct
NVTRGDYVGL

SEQ ID NO: 49646 - protein, 10 aa, synthetic construct
NVTRGDQSTL

SEQ ID NO: 49647 - protein, 10 aa, synthetic construct
NVTRGDRSQT

SEQ ID NO: 49648 - protein, 10 aa, synthetic construct
NVTRGDLLLS

SEQ ID NO: 49649 - protein, 10 aa, synthetic construct
NVYRGDRSVV

SEQ ID NO: 49650 - protein, 10 aa, synthetic construct
NVYRGDRSQT

SEQ ID NO: 49651 - protein, 10 aa, synthetic construct
AQVRGDRGVV

SEQ ID NO: 49652 - protein, 10 aa, synthetic construct
NVNRGDRSVV

SEQ ID NO: 49653 - protein, 10 aa, synthetic construct
NVNRGDRSQT

SEQ ID NO: 49654 - protein, 10 aa, synthetic construct
NVQRGDRGQI

SEQ ID NO: 49655 - protein, 10 aa, synthetic construct
NVQRGDRQGI

SEQ ID NO: 49656 - protein, 10 aa, synthetic construct
NVQRGDRSVV

SEQ ID NO: 49657 - protein, 10 aa, synthetic construct
NVQRGDRGVV

SEQ ID NO: 49658 - protein, 10 aa, synthetic construct
NVQRGDYVGL

SEQ ID NO: 49659 - protein, 10 aa, synthetic construct
NVQRGDQSTL

SEQ ID NO: 49660 - protein, 10 aa, synthetic construct
NVQRGDRSQT

SEQ ID NO: 49661 - protein, 10 aa, synthetic construct
NVQRGDLLLS

SEQ ID NO: 49662 - protein, 10 aa, synthetic construct
AQPRGDRGVV

SEQ ID NO: 49663 - protein, 10 aa, synthetic construct
NVDRGDRGQI

SEQ ID NO: 49664 - protein, 10 aa, synthetic construct
NVDRGDRQGI

SEQ ID NO: 49665 - protein, 10 aa, synthetic construct
NVDRGDRSVV

SEQ ID NO: 49666 - protein, 10 aa, synthetic construct
NVDRGDRGVV

SEQ ID NO: 49667 - protein, 10 aa, synthetic construct
NVDRGDYVGL

SEQ ID NO: 49668 - protein, 10 aa, synthetic construct
NVDRGDQSTL

SEQ ID NO: 49669 - protein, 10 aa, synthetic construct
NVDRGDRSQT

SEQ ID NO: 49670 - protein, 10 aa, synthetic construct
NVDRGDLLLS

SEQ ID NO: 49671 - protein, 10 aa, synthetic construct
NVERGDRGQI

SEQ ID NO: 49672 - protein, 10 aa, synthetic construct
NVERGDRQGI

SEQ ID NO: 49673 - protein, 10 aa, synthetic construct
AQLRGDRGVV

SEQ ID NO: 49674 - protein, 10 aa, synthetic construct
NVERGDRSVV

SEQ ID NO: 49675 - protein, 10 aa, synthetic construct
NVERGDRGVV

SEQ ID NO: 49676 - protein, 10 aa, synthetic construct
NVERGDYVGL

SEQ ID NO: 49677 - protein, 10 aa, synthetic construct
NVERGDQSTL

SEQ ID NO: 49678 - protein, 10 aa, synthetic construct
NVERGDRSQT

SEQ ID NO: 49679 - protein, 10 aa, synthetic construct
NVERGDLLLS

SEQ ID NO: 49680 - protein, 10 aa, synthetic construct
NPGRGDHGVL

SEQ ID NO: 49681 - protein, 10 aa, synthetic construct
NPGRGDYVGL

SEQ ID NO: 49682 - protein, 10 aa, synthetic construct
NPGRGDQSTL

SEQ ID NO: 49683 - protein, 10 aa, synthetic construct
NPGRGDLLLS

SEQ ID NO: 49684 - protein, 10 aa, synthetic construct
AQRRGDRGVV

SEQ ID NO: 49685 - protein, 10 aa, synthetic construct
NPARGDHGVL

SEQ ID NO: 49686 - protein, 10 aa, synthetic construct
NPARGDYVGL

SEQ ID NO: 49687 - protein, 10 aa, synthetic construct
NPARGDQSTL

SEQ ID NO: 49688 - protein, 10 aa, synthetic construct
NPARGDLLLS

SEQ ID NO: 49689 - protein, 10 aa, synthetic construct
NPVRGDRGQI

SEQ ID NO: 49690 - protein, 10 aa, synthetic construct
NPVRGDRQGI

SEQ ID NO: 49691 - protein, 10 aa, synthetic construct
NPVRGDRSVV

SEQ ID NO: 49692 - protein, 10 aa, synthetic construct
NPVRGDRGVV

SEQ ID NO: 49693 - protein, 10 aa, synthetic construct
NPVRGDRSQT

SEQ ID NO: 49694 - protein, 10 aa, synthetic construct
NPPRGDHGVL

SEQ ID NO: 49695 - protein, 10 aa, synthetic construct
AQSRGDRGVV

SEQ ID NO: 49696 - protein, 10 aa, synthetic construct
NPPRGDYVGL

SEQ ID NO: 49697 - protein, 10 aa, synthetic construct
NPPRGDQSTL

SEQ ID NO: 49698 - protein, 10 aa, synthetic construct
NPPRGDLLLS

SEQ ID NO: 49699 - protein, 10 aa, synthetic construct
NPLRGDRGQI

SEQ ID NO: 49700 - protein, 10 aa, synthetic construct
NPLRGDRQGI

SEQ ID NO: 49701 - protein, 10 aa, synthetic construct
NPLRGDRSVV

SEQ ID NO: 49702 - protein, 10 aa, synthetic construct
NPLRGDRGVV

SEQ ID NO: 49703 - protein, 10 aa, synthetic construct
NPLRGDRSQT

SEQ ID NO: 49704 - protein, 10 aa, synthetic construct
NPWRGDRGQI

SEQ ID NO: 49705 - protein, 10 aa, synthetic construct
NPWRGDRQGI

SEQ ID NO: 49706 - protein, 10 aa, synthetic construct
ADGRGDRGVV

SEQ ID NO: 49707 - protein, 10 aa, synthetic construct
NPWRGDRSVV

SEQ ID NO: 49708 - protein, 10 aa, synthetic construct
NPWRGDRGVV

SEQ ID NO: 49709 - protein, 10 aa, synthetic construct
NPWRGDRSQT

SEQ ID NO: 49710 - protein, 10 aa, synthetic construct
NPRRGDHGVL

SEQ ID NO: 49711 - protein, 10 aa, synthetic construct
NPRRGDYVGL

SEQ ID NO: 49712 - protein, 10 aa, synthetic construct
NPRRGDQSTL

SEQ ID NO: 49713 - protein, 10 aa, synthetic construct
NPRRGDLLLS

SEQ ID NO: 49714 - protein, 10 aa, synthetic construct
NPHRGDRGQI

SEQ ID NO: 49715 - protein, 10 aa, synthetic construct
NPHRGDRQGI

SEQ ID NO: 49716 - protein, 10 aa, synthetic construct
NPHRGDRSVV

SEQ ID NO: 49717 - protein, 10 aa, synthetic construct
ADARGDRGVV

SEQ ID NO: 49718 - protein, 10 aa, synthetic construct
NPHRGDRGVV

SEQ ID NO: 49719 - protein, 10 aa, synthetic construct
NPHRGDRSQT

SEQ ID NO: 49720 - protein, 10 aa, synthetic construct
NPSRGDRGQI

SEQ ID NO: 49721 - protein, 10 aa, synthetic construct
NPSRGDRQGI

SEQ ID NO: 49722 - protein, 10 aa, synthetic construct
NPSRGDRSVV

SEQ ID NO: 49723 - protein, 10 aa, synthetic construct
NPSRGDRGVV

SEQ ID NO: 49724 - protein, 10 aa, synthetic construct
NPSRGDRSQT

SEQ ID NO: 49725 - protein, 10 aa, synthetic construct
NPTRGDRGQI

SEQ ID NO: 49726 - protein, 10 aa, synthetic construct
NPTRGDRQGI

SEQ ID NO: 49727 - protein, 10 aa, synthetic construct
NPTRGDRSVV

SEQ ID NO: 49728 - protein, 10 aa, synthetic construct
ADVRGDRGVV

SEQ ID NO: 49729 - protein, 10 aa, synthetic construct
NPTRGDRGVV

SEQ ID NO: 49730 - protein, 10 aa, synthetic construct
NPTRGDRSQT

SEQ ID NO: 49731 - protein, 10 aa, synthetic construct
NPQRGDRGQI

SEQ ID NO: 49732 - protein, 10 aa, synthetic construct
NPQRGDRQGI

SEQ ID NO: 49733 - protein, 10 aa, synthetic construct
NPQRGDRSVV

SEQ ID NO: 49734 - protein, 10 aa, synthetic construct
NPQRGDRGVV

SEQ ID NO: 49735 - protein, 10 aa, synthetic construct
NPQRGDRSQT

SEQ ID NO: 49736 - protein, 10 aa, synthetic construct
NPDRGDRGQI

SEQ ID NO: 49737 - protein, 10 aa, synthetic construct
NPDRGDRQGI

SEQ ID NO: 49738 - protein, 10 aa, synthetic construct
NPDRGDRSVV

SEQ ID NO: 49739 - protein, 10 aa, synthetic construct
SKNRGDRDYL

SEQ ID NO: 49740 - protein, 10 aa, synthetic construct
ADPRGDRGVV

SEQ ID NO: 49741 - protein, 10 aa, synthetic construct
NPDRGDRGVV

SEQ ID NO: 49742 - protein, 10 aa, synthetic construct
NPDRGDRSQT

SEQ ID NO: 49743 - protein, 10 aa, synthetic construct
NPERGDRGQI

SEQ ID NO: 49744 - protein, 10 aa, synthetic construct
NPERGDRQGI

SEQ ID NO: 49745 - protein, 10 aa, synthetic construct
NPERGDRSVV

SEQ ID NO: 49746 - protein, 10 aa, synthetic construct
NPERGDRGVV

SEQ ID NO: 49747 - protein, 10 aa, synthetic construct
NPERGDRSQT

SEQ ID NO: 49748 - protein, 10 aa, synthetic construct
NLGRGDHGVL

SEQ ID NO: 49749 - protein, 10 aa, synthetic construct
NLGRGDHVNL

SEQ ID NO: 49750 - protein, 10 aa, synthetic construct
NLGRGDYVGL

SEQ ID NO: 49751 - protein, 10 aa, synthetic construct
ADLRGDRGVV

SEQ ID NO: 49752 - protein, 10 aa, synthetic construct
NLGRGDYSSV

SEQ ID NO: 49753 - protein, 10 aa, synthetic construct
NLGRGDQSTL

SEQ ID NO: 49754 - protein, 10 aa, synthetic construct
NLGRGDLLLS

SEQ ID NO: 49755 - protein, 10 aa, synthetic construct
NLARGDHGVL

SEQ ID NO: 49756 - protein, 10 aa, synthetic construct
NLARGDHVNL

SEQ ID NO: 49757 - protein, 10 aa, synthetic construct
NLARGDYVGL

SEQ ID NO: 49758 - protein, 10 aa, synthetic construct
NLARGDYSSV

SEQ ID NO: 49759 - protein, 10 aa, synthetic construct
NLARGDQSTL

SEQ ID NO: 49760 - protein, 10 aa, synthetic construct
NLARGDLLLS

SEQ ID NO: 49761 - protein, 10 aa, synthetic construct
NLVRGDRGQI

SEQ ID NO: 49762 - protein, 10 aa, synthetic construct
ADRRGDRGVV

SEQ ID NO: 49763 - protein, 10 aa, synthetic construct
NLVRGDRQGI

SEQ ID NO: 49764 - protein, 10 aa, synthetic construct
NLVRGDRSVV

SEQ ID NO: 49765 - protein, 10 aa, synthetic construct
NLVRGDRGVV

SEQ ID NO: 49766 - protein, 10 aa, synthetic construct
NLVRGDYVGL

SEQ ID NO: 49767 - protein, 10 aa, synthetic construct
NLVRGDQSTL

SEQ ID NO: 49768 - protein, 10 aa, synthetic construct
NLVRGDRSQT

SEQ ID NO: 49769 - protein, 10 aa, synthetic construct
NLVRGDLLLS

SEQ ID NO: 49770 - protein, 10 aa, synthetic construct
NLPRGDHGVL

SEQ ID NO: 49771 - protein, 10 aa, synthetic construct
NLPRGDHVNL

SEQ ID NO: 49772 - protein, 10 aa, synthetic construct
NLPRGDYVGL

SEQ ID NO: 49773 - protein, 10 aa, synthetic construct
ADSRGDRGVV

SEQ ID NO: 49774 - protein, 10 aa, synthetic construct
NLPRGDYSSV

SEQ ID NO: 49775 - protein, 10 aa, synthetic construct
NLPRGDQSTL

SEQ ID NO: 49776 - protein, 10 aa, synthetic construct
NLPRGDLLLS

SEQ ID NO: 49777 - protein, 10 aa, synthetic construct
NLLRGDRGQI

SEQ ID NO: 49778 - protein, 10 aa, synthetic construct
NLLRGDRQGI

SEQ ID NO: 49779 - protein, 10 aa, synthetic construct
NLLRGDRSVV

SEQ ID NO: 49780 - protein, 10 aa, synthetic construct
NLLRGDRGVV

SEQ ID NO: 49781 - protein, 10 aa, synthetic construct
NLLRGDYVGL

SEQ ID NO: 49782 - protein, 10 aa, synthetic construct
NLLRGDQSTL

SEQ ID NO: 49783 - protein, 10 aa, synthetic construct
NLLRGDRSQT

SEQ ID NO: 49784 - protein, 10 aa, synthetic construct
AEGRGDRGVV

SEQ ID NO: 49785 - protein, 10 aa, synthetic construct
NLLRGDLLLS

SEQ ID NO: 49786 - protein, 10 aa, synthetic construct
NLIRGDRSVV

SEQ ID NO: 49787 - protein, 10 aa, synthetic construct
NLIRGDRSQT

SEQ ID NO: 49788 - protein, 10 aa, synthetic construct
NLMRGDRSVV

SEQ ID NO: 49789 - protein, 10 aa, synthetic construct
NLMRGDRSQT

SEQ ID NO: 49790 - protein, 10 aa, synthetic construct
NLWRGDRGQI

SEQ ID NO: 49791 - protein, 10 aa, synthetic construct
NLWRGDRQGI

SEQ ID NO: 49792 - protein, 10 aa, synthetic construct
NLWRGDRSVV

SEQ ID NO: 49793 - protein, 10 aa, synthetic construct
NLWRGDRGVV

SEQ ID NO: 49794 - protein, 10 aa, synthetic construct
NLWRGDYVGL

SEQ ID NO: 49795 - protein, 10 aa, synthetic construct
AEARGDRGVV

SEQ ID NO: 49796 - protein, 10 aa, synthetic construct
NLWRGDQSTL

SEQ ID NO: 49797 - protein, 10 aa, synthetic construct
NLWRGDRSQT

SEQ ID NO: 49798 - protein, 10 aa, synthetic construct
NLWRGDLLLS

SEQ ID NO: 49799 - protein, 10 aa, synthetic construct
NLFRGDRSVV

SEQ ID NO: 49800 - protein, 10 aa, synthetic construct
NLFRGDRSQT

SEQ ID NO: 49801 - protein, 10 aa, synthetic construct
NLKRGDRSVV

SEQ ID NO: 49802 - protein, 10 aa, synthetic construct
NLKRGDRSQT

SEQ ID NO: 49803 - protein, 10 aa, synthetic construct
NLRRGDHGVL

SEQ ID NO: 49804 - protein, 10 aa, synthetic construct
NLRRGDHVNL

SEQ ID NO: 49805 - protein, 10 aa, synthetic construct
NLRRGDYVGL

SEQ ID NO: 49806 - protein, 10 aa, synthetic construct
AEVRGDRGVV

SEQ ID NO: 49807 - protein, 10 aa, synthetic construct
NLRRGDYSSV

SEQ ID NO: 49808 - protein, 10 aa, synthetic construct
NLRRGDQSTL

SEQ ID NO: 49809 - protein, 10 aa, synthetic construct
NLRRGDLLLS

SEQ ID NO: 49810 - protein, 10 aa, synthetic construct
NLHRGDRGQI

SEQ ID NO: 49811 - protein, 10 aa, synthetic construct
NLHRGDRQGI

SEQ ID NO: 49812 - protein, 10 aa, synthetic construct
NLHRGDRSVV

SEQ ID NO: 49813 - protein, 10 aa, synthetic construct
NLHRGDRGVV

SEQ ID NO: 49814 - protein, 10 aa, synthetic construct
NLHRGDYVGL

SEQ ID NO: 49815 - protein, 10 aa, synthetic construct
NLHRGDQSTL

SEQ ID NO: 49816 - protein, 10 aa, synthetic construct
NLHRGDRSQT

SEQ ID NO: 49817 - protein, 10 aa, synthetic construct
AEPRGDRGVV

SEQ ID NO: 49818 - protein, 10 aa, synthetic construct
NLHRGDLLLS

SEQ ID NO: 49819 - protein, 10 aa, synthetic construct
NLSRGDRGQI

SEQ ID NO: 49820 - protein, 10 aa, synthetic construct
NLSRGDRQGI

SEQ ID NO: 49821 - protein, 10 aa, synthetic construct
NLSRGDRSVV

SEQ ID NO: 49822 - protein, 10 aa, synthetic construct
NLSRGDRGVV

SEQ ID NO: 49823 - protein, 10 aa, synthetic construct
NLSRGDYVGL

SEQ ID NO: 49824 - protein, 10 aa, synthetic construct
NLSRGDQSTL

SEQ ID NO: 49825 - protein, 10 aa, synthetic construct
NLSRGDRSQT

SEQ ID NO: 49826 - protein, 10 aa, synthetic construct
NLSRGDLLLS

SEQ ID NO: 49827 - protein, 10 aa, synthetic construct
NLTRGDRGQI

SEQ ID NO: 49828 - protein, 10 aa, synthetic construct
AELRGDRGVV

SEQ ID NO: 49829 - protein, 10 aa, synthetic construct
NLTRGDRQGI

SEQ ID NO: 49830 - protein, 10 aa, synthetic construct
NLTRGDRSVV

SEQ ID NO: 49831 - protein, 10 aa, synthetic construct
NLTRGDRGVV

SEQ ID NO: 49832 - protein, 10 aa, synthetic construct
NLTRGDYVGL

SEQ ID NO: 49833 - protein, 10 aa, synthetic construct
NLTRGDQSTL

SEQ ID NO: 49834 - protein, 10 aa, synthetic construct
NLTRGDRSQT

SEQ ID NO: 49835 - protein, 10 aa, synthetic construct
NLTRGDLLLS

SEQ ID NO: 49836 - protein, 10 aa, synthetic construct
NLYRGDRSVV

SEQ ID NO: 49837 - protein, 10 aa, synthetic construct
NLYRGDRSQT

SEQ ID NO: 49838 - protein, 10 aa, synthetic construct
NLNRGDRSVV

SEQ ID NO: 49839 - protein, 10 aa, synthetic construct
AERRGDRGVV

SEQ ID NO: 49840 - protein, 10 aa, synthetic construct
NLNRGDRSQT

SEQ ID NO: 49841 - protein, 10 aa, synthetic construct
NLQRGDRGQI

SEQ ID NO: 49842 - protein, 10 aa, synthetic construct
NLQRGDRQGI

SEQ ID NO: 49843 - protein, 10 aa, synthetic construct
NLQRGDRSVV

SEQ ID NO: 49844 - protein, 10 aa, synthetic construct
NLQRGDRGVV

SEQ ID NO: 49845 - protein, 10 aa, synthetic construct
NLQRGDYVGL

SEQ ID NO: 49846 - protein, 10 aa, synthetic construct
NLQRGDQSTL

SEQ ID NO: 49847 - protein, 10 aa, synthetic construct
NLQRGDRSQT

SEQ ID NO: 49848 - protein, 10 aa, synthetic construct
NLQRGDLLLS

SEQ ID NO: 49849 - protein, 10 aa, synthetic construct
NLDRGDRGQI

SEQ ID NO: 49850 - protein, 10 aa, synthetic construct
SKNRGDYSSV

SEQ ID NO: 49851 - protein, 10 aa, synthetic construct
AESRGDRGVV

SEQ ID NO: 49852 - protein, 10 aa, synthetic construct
NLDRGDRQGI

SEQ ID NO: 49853 - protein, 10 aa, synthetic construct
NLDRGDRSVV

SEQ ID NO: 49854 - protein, 10 aa, synthetic construct
NLDRGDRGVV

SEQ ID NO: 49855 - protein, 10 aa, synthetic construct
NLDRGDYVGL

SEQ ID NO: 49856 - protein, 10 aa, synthetic construct
NLDRGDQSTL

SEQ ID NO: 49857 - protein, 10 aa, synthetic construct
NLDRGDRSQT

SEQ ID NO: 49858 - protein, 10 aa, synthetic construct
NLDRGDLLLS

SEQ ID NO: 49859 - protein, 10 aa, synthetic construct
NLERGDRGQI

SEQ ID NO: 49860 - protein, 10 aa, synthetic construct
NLERGDRQGI

SEQ ID NO: 49861 - protein, 10 aa, synthetic construct
NLERGDRSVV

SEQ ID NO: 49862 - protein, 10 aa, synthetic construct
EGGRGDRGQI

SEQ ID NO: 49863 - protein, 10 aa, synthetic construct
NLERGDRGVV

SEQ ID NO: 49864 - protein, 10 aa, synthetic construct
NLERGDYVGL

SEQ ID NO: 49865 - protein, 10 aa, synthetic construct
NLERGDQSTL

SEQ ID NO: 49866 - protein, 10 aa, synthetic construct
NLERGDRSQT

SEQ ID NO: 49867 - protein, 10 aa, synthetic construct
NLERGDLLLS

SEQ ID NO: 49868 - protein, 10 aa, synthetic construct
NMGRGDRGVV

SEQ ID NO: 49869 - protein, 10 aa, synthetic construct
NMGRGDLTVT

SEQ ID NO: 49870 - protein, 10 aa, synthetic construct
NMGRGDLLLS

SEQ ID NO: 49871 - protein, 10 aa, synthetic construct
NMARGDRGVV

SEQ ID NO: 49872 - protein, 10 aa, synthetic construct
NMARGDLTVT

SEQ ID NO: 49873 - protein, 10 aa, synthetic construct
EGGRGDRQGI

SEQ ID NO: 49874 - protein, 10 aa, synthetic construct
NMARGDLLLS

SEQ ID NO: 49875 - protein, 10 aa, synthetic construct
NMVRGDHGVL

SEQ ID NO: 49876 - protein, 10 aa, synthetic construct
NMVRGDRSVV

SEQ ID NO: 49877 - protein, 10 aa, synthetic construct
NMVRGDRGVV

SEQ ID NO: 49878 - protein, 10 aa, synthetic construct
NMVRGDLTVT

SEQ ID NO: 49879 - protein, 10 aa, synthetic construct
NMVRGDLIGR

SEQ ID NO: 49880 - protein, 10 aa, synthetic construct
NMVRGDLLLS

SEQ ID NO: 49881 - protein, 10 aa, synthetic construct
NMPRGDRGVV

SEQ ID NO: 49882 - protein, 10 aa, synthetic construct
NMPRGDLTVT

SEQ ID NO: 49883 - protein, 10 aa, synthetic construct
NMPRGDLLLS

SEQ ID NO: 49884 - protein, 10 aa, synthetic construct
EGGRGDRSVV

SEQ ID NO: 49885 - protein, 10 aa, synthetic construct
NMLRGDHGVL

SEQ ID NO: 49886 - protein, 10 aa, synthetic construct
NMLRGDRSVV

SEQ ID NO: 49887 - protein, 10 aa, synthetic construct
NMLRGDRGVV

SEQ ID NO: 49888 - protein, 10 aa, synthetic construct
NMLRGDLTVT

SEQ ID NO: 49889 - protein, 10 aa, synthetic construct
NMLRGDLIGR

SEQ ID NO: 49890 - protein, 10 aa, synthetic construct
NMLRGDLLLS

SEQ ID NO: 49891 - protein, 10 aa, synthetic construct
NMWRGDRSVV

SEQ ID NO: 49892 - protein, 10 aa, synthetic construct
NMWRGDRSQT

SEQ ID NO: 49893 - protein, 10 aa, synthetic construct
NMRRGDRGVV

SEQ ID NO: 49894 - protein, 10 aa, synthetic construct
NMRRGDLTVT

SEQ ID NO: 49895 - protein, 10 aa, synthetic construct
EGGRGDRGVV

SEQ ID NO: 49896 - protein, 10 aa, synthetic construct
NMRRGDLLLS

SEQ ID NO: 49897 - protein, 10 aa, synthetic construct
NMSRGDHGVL

SEQ ID NO: 49898 - protein, 10 aa, synthetic construct
NMSRGDRSVV

SEQ ID NO: 49899 - protein, 10 aa, synthetic construct
NMSRGDRGVV

SEQ ID NO: 49900 - protein, 10 aa, synthetic construct
NMSRGDLTVT

SEQ ID NO: 49901 - protein, 10 aa, synthetic construct
NMSRGDLIGR

SEQ ID NO: 49902 - protein, 10 aa, synthetic construct
NMSRGDLLLS

SEQ ID NO: 49903 - protein, 10 aa, synthetic construct
NWGRGDHGVL

SEQ ID NO: 49904 - protein, 10 aa, synthetic construct
NWGRGDRGQI

SEQ ID NO: 49905 - protein, 10 aa, synthetic construct
NWGRGDRQGI

SEQ ID NO: 49906 - protein, 10 aa, synthetic construct
EGGRGDRSQT

SEQ ID NO: 49907 - protein, 10 aa, synthetic construct
NWGRGDRSVV

SEQ ID NO: 49908 - protein, 10 aa, synthetic construct
NWGRGDLTVT

SEQ ID NO: 49909 - protein, 10 aa, synthetic construct
NWGRGDLIGR

SEQ ID NO: 49910 - protein, 10 aa, synthetic construct
NWGRGDRSQT

SEQ ID NO: 49911 - protein, 10 aa, synthetic construct
NWGRGDLLLS

SEQ ID NO: 49912 - protein, 10 aa, synthetic construct
NWARGDHGVL

SEQ ID NO: 49913 - protein, 10 aa, synthetic construct
NWARGDRGQI

SEQ ID NO: 49914 - protein, 10 aa, synthetic construct
NWARGDRQGI

SEQ ID NO: 49915 - protein, 10 aa, synthetic construct
NWARGDRSVV

SEQ ID NO: 49916 - protein, 10 aa, synthetic construct
NWARGDLTVT

SEQ ID NO: 49917 - protein, 10 aa, synthetic construct
EGARGDRGQI

SEQ ID NO: 49918 - protein, 10 aa, synthetic construct
NWARGDLIGR

SEQ ID NO: 49919 - protein, 10 aa, synthetic construct
NWARGDRSQT

SEQ ID NO: 49920 - protein, 10 aa, synthetic construct
NWARGDLLLS

SEQ ID NO: 49921 - protein, 10 aa, synthetic construct
NWVRGDHGVL

SEQ ID NO: 49922 - protein, 10 aa, synthetic construct
NWVRGDRGQI

SEQ ID NO: 49923 - protein, 10 aa, synthetic construct
NWVRGDRQGI

SEQ ID NO: 49924 - protein, 10 aa, synthetic construct
NWVRGDRSVV

SEQ ID NO: 49925 - protein, 10 aa, synthetic construct
NWVRGDLIGR

SEQ ID NO: 49926 - protein, 10 aa, synthetic construct
NWVRGDRSQT

SEQ ID NO: 49927 - protein, 10 aa, synthetic construct
NWPRGDHGVL

SEQ ID NO: 49928 - protein, 10 aa, synthetic construct
EGARGDRQGI

SEQ ID NO: 49929 - protein, 10 aa, synthetic construct
NWPRGDRGQI

SEQ ID NO: 49930 - protein, 10 aa, synthetic construct
NWPRGDRQGI

SEQ ID NO: 49931 - protein, 10 aa, synthetic construct
NWPRGDRSVV

SEQ ID NO: 49932 - protein, 10 aa, synthetic construct
NWPRGDLTVT

SEQ ID NO: 49933 - protein, 10 aa, synthetic construct
NWPRGDLIGR

SEQ ID NO: 49934 - protein, 10 aa, synthetic construct
NWPRGDRSQT

SEQ ID NO: 49935 - protein, 10 aa, synthetic construct
NWPRGDLLLS

SEQ ID NO: 49936 - protein, 10 aa, synthetic construct
NWLRGDHGVL

SEQ ID NO: 49937 - protein, 10 aa, synthetic construct
NWLRGDRGQI

SEQ ID NO: 49938 - protein, 10 aa, synthetic construct
NWLRGDRQGI

SEQ ID NO: 49939 - protein, 10 aa, synthetic construct
EGARGDRSVV

SEQ ID NO: 49940 - protein, 10 aa, synthetic construct
NWLRGDRSVV

SEQ ID NO: 49941 - protein, 10 aa, synthetic construct
NWLRGDLIGR

SEQ ID NO: 49942 - protein, 10 aa, synthetic construct
NWLRGDRSQT

SEQ ID NO: 49943 - protein, 10 aa, synthetic construct
NWMRGDRSVV

SEQ ID NO: 49944 - protein, 10 aa, synthetic construct
NWMRGDRSQT

SEQ ID NO: 49945 - protein, 10 aa, synthetic construct
NWWRGDRGQI

SEQ ID NO: 49946 - protein, 10 aa, synthetic construct
NWWRGDRQGI

SEQ ID NO: 49947 - protein, 10 aa, synthetic construct
NWWRGDRSVV

SEQ ID NO: 49948 - protein, 10 aa, synthetic construct
NWWRGDRGVV

SEQ ID NO: 49949 - protein, 10 aa, synthetic construct
NWWRGDYVGL

SEQ ID NO: 49950 - protein, 10 aa, synthetic construct
EGARGDRGVV

SEQ ID NO: 49951 - protein, 10 aa, synthetic construct
NWWRGDQSTL

SEQ ID NO: 49952 - protein, 10 aa, synthetic construct
NWWRGDRSQT

SEQ ID NO: 49953 - protein, 10 aa, synthetic construct
NWWRGDLLLS

SEQ ID NO: 49954 - protein, 10 aa, synthetic construct
NWRRGDHGVL

SEQ ID NO: 49955 - protein, 10 aa, synthetic construct
NWRRGDRGQI

SEQ ID NO: 49956 - protein, 10 aa, synthetic construct
NWRRGDRQGI

SEQ ID NO: 49957 - protein, 10 aa, synthetic construct
NWRRGDRSVV

SEQ ID NO: 49958 - protein, 10 aa, synthetic construct
NWRRGDLTVT

SEQ ID NO: 49959 - protein, 10 aa, synthetic construct
NWRRGDLIGR

SEQ ID NO: 49960 - protein, 10 aa, synthetic construct
NWRRGDRSQT

SEQ ID NO: 49961 - protein, 10 aa, synthetic construct
SKNRGDLTVT

SEQ ID NO: 49962 - protein, 10 aa, synthetic construct
EGARGDRSQT

SEQ ID NO: 49963 - protein, 10 aa, synthetic construct
NWRRGDLLLS

SEQ ID NO: 49964 - protein, 10 aa, synthetic construct
NWHRGDRGVV

SEQ ID NO: 49965 - protein, 10 aa, synthetic construct
NWHRGDLTVT

SEQ ID NO: 49966 - protein, 10 aa, synthetic construct
NWHRGDLLLS

SEQ ID NO: 49967 - protein, 10 aa, synthetic construct
NWSRGDHGVL

SEQ ID NO: 49968 - protein, 10 aa, synthetic construct
NWSRGDRGQI

SEQ ID NO: 49969 - protein, 10 aa, synthetic construct
NWSRGDRQGI

SEQ ID NO: 49970 - protein, 10 aa, synthetic construct
NWSRGDRSVV

SEQ ID NO: 49971 - protein, 10 aa, synthetic construct
NWSRGDLIGR

SEQ ID NO: 49972 - protein, 10 aa, synthetic construct
NWSRGDRSQT

SEQ ID NO: 49973 - protein, 10 aa, synthetic construct
EGPRGDRGQI

SEQ ID NO: 49974 - protein, 10 aa, synthetic construct
NWTRGDRGVV

SEQ ID NO: 49975 - protein, 10 aa, synthetic construct
NWTRGDLTVT

SEQ ID NO: 49976 - protein, 10 aa, synthetic construct
NWTRGDLLLS

SEQ ID NO: 49977 - protein, 10 aa, synthetic construct
NWQRGDRGVV

SEQ ID NO: 49978 - protein, 10 aa, synthetic construct
NWQRGDLTVT

SEQ ID NO: 49979 - protein, 10 aa, synthetic construct
NWQRGDLLLS

SEQ ID NO: 49980 - protein, 10 aa, synthetic construct
NWDRGDRGVV

SEQ ID NO: 49981 - protein, 10 aa, synthetic construct
NWDRGDLTVT

SEQ ID NO: 49982 - protein, 10 aa, synthetic construct
NWDRGDLLLS

SEQ ID NO: 49983 - protein, 10 aa, synthetic construct
NWERGDRGVV

SEQ ID NO: 49984 - protein, 10 aa, synthetic construct
EGPRGDRQGI

SEQ ID NO: 49985 - protein, 10 aa, synthetic construct
NWERGDLTVT

SEQ ID NO: 49986 - protein, 10 aa, synthetic construct
NWERGDLLLS

SEQ ID NO: 49987 - protein, 10 aa, synthetic construct
NRGRGDHGVL

SEQ ID NO: 49988 - protein, 10 aa, synthetic construct
NRGRGDYVGL

SEQ ID NO: 49989 - protein, 10 aa, synthetic construct
NRGRGDQSTL

SEQ ID NO: 49990 - protein, 10 aa, synthetic construct
NRGRGDLLLS

SEQ ID NO: 49991 - protein, 10 aa, synthetic construct
NRARGDHGVL

SEQ ID NO: 49992 - protein, 10 aa, synthetic construct
NRARGDYVGL

SEQ ID NO: 49993 - protein, 10 aa, synthetic construct
NRARGDQSTL

SEQ ID NO: 49994 - protein, 10 aa, synthetic construct
NRARGDLLLS

SEQ ID NO: 49995 - protein, 10 aa, synthetic construct
EGPRGDRSVV

SEQ ID NO: 49996 - protein, 10 aa, synthetic construct
NRVRGDRGQI

SEQ ID NO: 49997 - protein, 10 aa, synthetic construct
NRVRGDRQGI

SEQ ID NO: 49998 - protein, 10 aa, synthetic construct
NRVRGDRSVV

SEQ ID NO: 49999 - protein, 10 aa, synthetic construct
NRVRGDRGVV

SEQ ID NO: 50000 - protein, 10 aa, synthetic construct
NRVRGDRSQT

SEQ ID NO: 50001 - protein, 10 aa, synthetic construct
NRPRGDHGVL

SEQ ID NO: 50002 - protein, 10 aa, synthetic construct
NRPRGDYVGL

SEQ ID NO: 50003 - protein, 10 aa, synthetic construct
NRPRGDQSTL

SEQ ID NO: 50004 - protein, 10 aa, synthetic construct
NRPRGDLLLS

SEQ ID NO: 50005 - protein, 10 aa, synthetic construct
NRLRGDRGQI

SEQ ID NO: 50006 - protein, 10 aa, synthetic construct
EGPRGDRGVV

SEQ ID NO: 50007 - protein, 10 aa, synthetic construct
NRLRGDRQGI

SEQ ID NO: 50008 - protein, 10 aa, synthetic construct
NRLRGDRSVV

SEQ ID NO: 50009 - protein, 10 aa, synthetic construct
NRLRGDRGVV

SEQ ID NO: 50010 - protein, 10 aa, synthetic construct
NRLRGDRSQT

SEQ ID NO: 50011 - protein, 10 aa, synthetic construct
NRWRGDRGQI

SEQ ID NO: 50012 - protein, 10 aa, synthetic construct
NRWRGDRQGI

SEQ ID NO: 50013 - protein, 10 aa, synthetic construct
NRWRGDRSVV

SEQ ID NO: 50014 - protein, 10 aa, synthetic construct
NRWRGDRGVV

SEQ ID NO: 50015 - protein, 10 aa, synthetic construct
NRWRGDRSQT

SEQ ID NO: 50016 - protein, 10 aa, synthetic construct
NRRRGDHGVL

SEQ ID NO: 50017 - protein, 10 aa, synthetic construct
EGPRGDRSQT

SEQ ID NO: 50018 - protein, 10 aa, synthetic construct
NRRRGDYVGL

SEQ ID NO: 50019 - protein, 10 aa, synthetic construct
NRRRGDQSTL

SEQ ID NO: 50020 - protein, 10 aa, synthetic construct
NRRRGDLLLS

SEQ ID NO: 50021 - protein, 10 aa, synthetic construct
NRHRGDRGQI

SEQ ID NO: 50022 - protein, 10 aa, synthetic construct
NRHRGDRQGI

SEQ ID NO: 50023 - protein, 10 aa, synthetic construct
NRHRGDRSVV

SEQ ID NO: 50024 - protein, 10 aa, synthetic construct
NRHRGDRGVV

SEQ ID NO: 50025 - protein, 10 aa, synthetic construct
NRHRGDRSQT

SEQ ID NO: 50026 - protein, 10 aa, synthetic construct
NRSRGDRGQI

SEQ ID NO: 50027 - protein, 10 aa, synthetic construct
NRSRGDRQGI

SEQ ID NO: 50028 - protein, 10 aa, synthetic construct
EGRRGDRGQI

SEQ ID NO: 50029 - protein, 10 aa, synthetic construct
NRSRGDRSVV

SEQ ID NO: 50030 - protein, 10 aa, synthetic construct
NRSRGDRGVV

SEQ ID NO: 50031 - protein, 10 aa, synthetic construct
NRSRGDRSQT

SEQ ID NO: 50032 - protein, 10 aa, synthetic construct
NRTRGDRGQI

SEQ ID NO: 50033 - protein, 10 aa, synthetic construct
NRTRGDRQGI

SEQ ID NO: 50034 - protein, 10 aa, synthetic construct
NRTRGDRSVV

SEQ ID NO: 50035 - protein, 10 aa, synthetic construct
NRTRGDRGVV

SEQ ID NO: 50036 - protein, 10 aa, synthetic construct
NRTRGDRSQT

SEQ ID NO: 50037 - protein, 10 aa, synthetic construct
NRQRGDRGQI

SEQ ID NO: 50038 - protein, 10 aa, synthetic construct
NRQRGDRQGI

SEQ ID NO: 50039 - protein, 10 aa, synthetic construct
EGRRGDRQGI

SEQ ID NO: 50040 - protein, 10 aa, synthetic construct
NRQRGDRSVV

SEQ ID NO: 50041 - protein, 10 aa, synthetic construct
NRQRGDRGVV

SEQ ID NO: 50042 - protein, 10 aa, synthetic construct
NRQRGDRSQT

SEQ ID NO: 50043 - protein, 10 aa, synthetic construct
NRDRGDRGQI

SEQ ID NO: 50044 - protein, 10 aa, synthetic construct
NRDRGDRQGI

SEQ ID NO: 50045 - protein, 10 aa, synthetic construct
NRDRGDRSVV

SEQ ID NO: 50046 - protein, 10 aa, synthetic construct
NRDRGDRGVV

SEQ ID NO: 50047 - protein, 10 aa, synthetic construct
NRDRGDRSQT

SEQ ID NO: 50048 - protein, 10 aa, synthetic construct
NRERGDRGQI

SEQ ID NO: 50049 - protein, 10 aa, synthetic construct
NRERGDRQGI

SEQ ID NO: 50050 - protein, 10 aa, synthetic construct
EGRRGDRSVV

SEQ ID NO: 50051 - protein, 10 aa, synthetic construct
NRERGDRSVV

SEQ ID NO: 50052 - protein, 10 aa, synthetic construct
NRERGDRGVV

SEQ ID NO: 50053 - protein, 10 aa, synthetic construct
NRERGDRSQT

SEQ ID NO: 50054 - protein, 10 aa, synthetic construct
NHGRGDRGQI

SEQ ID NO: 50055 - protein, 10 aa, synthetic construct
NHGRGDRQGI

SEQ ID NO: 50056 - protein, 10 aa, synthetic construct
NHGRGDRSVV

SEQ ID NO: 50057 - protein, 10 aa, synthetic construct
NHGRGDRGVV

SEQ ID NO: 50058 - protein, 10 aa, synthetic construct
NHGRGDRSQT

SEQ ID NO: 50059 - protein, 10 aa, synthetic construct
NHARGDRGQI

SEQ ID NO: 50060 - protein, 10 aa, synthetic construct
NHARGDRQGI

SEQ ID NO: 50061 - protein, 10 aa, synthetic construct
EGRRGDRGVV

SEQ ID NO: 50062 - protein, 10 aa, synthetic construct
NHARGDRSVV

SEQ ID NO: 50063 - protein, 10 aa, synthetic construct
NHARGDRGVV

SEQ ID NO: 50064 - protein, 10 aa, synthetic construct
NHARGDRSQT

SEQ ID NO: 50065 - protein, 10 aa, synthetic construct
NHPRGDRGQI

SEQ ID NO: 50066 - protein, 10 aa, synthetic construct
NHPRGDRQGI

SEQ ID NO: 50067 - protein, 10 aa, synthetic construct
NHPRGDRSVV

SEQ ID NO: 50068 - protein, 10 aa, synthetic construct
NHPRGDRGVV

SEQ ID NO: 50069 - protein, 10 aa, synthetic construct
NHPRGDRSQT

SEQ ID NO: 50070 - protein, 10 aa, synthetic construct
NHRRGDRGQI

SEQ ID NO: 50071 - protein, 10 aa, synthetic construct
NHRRGDRQGI

SEQ ID NO: 50072 - protein, 10 aa, synthetic construct
TKKRGDHVNL

SEQ ID NO: 50073 - protein, 10 aa, synthetic construct
EGRRGDRSQT

SEQ ID NO: 50074 - protein, 10 aa, synthetic construct
NHRRGDRSVV

SEQ ID NO: 50075 - protein, 10 aa, synthetic construct
NHRRGDRGVV

SEQ ID NO: 50076 - protein, 10 aa, synthetic construct
NHRRGDRSQT

SEQ ID NO: 50077 - protein, 10 aa, synthetic construct
NSGRGDHGVL

SEQ ID NO: 50078 - protein, 10 aa, synthetic construct
NSGRGDHVNL

SEQ ID NO: 50079 - protein, 10 aa, synthetic construct
NSGRGDYVGL

SEQ ID NO: 50080 - protein, 10 aa, synthetic construct
NSGRGDYSSV

SEQ ID NO: 50081 - protein, 10 aa, synthetic construct
NSGRGDQSTL

SEQ ID NO: 50082 - protein, 10 aa, synthetic construct
NSGRGDLLLS

SEQ ID NO: 50083 - protein, 10 aa, synthetic construct
NSARGDHGVL

SEQ ID NO: 50084 - protein, 10 aa, synthetic construct
EAGRGDRGQI

SEQ ID NO: 50085 - protein, 10 aa, synthetic construct
NSARGDHVNL

SEQ ID NO: 50086 - protein, 10 aa, synthetic construct
NSARGDYVGL

SEQ ID NO: 50087 - protein, 10 aa, synthetic construct
NSARGDYSSV

SEQ ID NO: 50088 - protein, 10 aa, synthetic construct
NSARGDQSTL

SEQ ID NO: 50089 - protein, 10 aa, synthetic construct
NSARGDLLLS

SEQ ID NO: 50090 - protein, 10 aa, synthetic construct
NSVRGDRGQI

SEQ ID NO: 50091 - protein, 10 aa, synthetic construct
NSVRGDRQGI

SEQ ID NO: 50092 - protein, 10 aa, synthetic construct
NSVRGDRSVV

SEQ ID NO: 50093 - protein, 10 aa, synthetic construct
NSVRGDRGVV

SEQ ID NO: 50094 - protein, 10 aa, synthetic construct
NSVRGDYVGL

SEQ ID NO: 50095 - protein, 10 aa, synthetic construct
EAGRGDRQGI

SEQ ID NO: 50096 - protein, 10 aa, synthetic construct
NSVRGDQSTL

SEQ ID NO: 50097 - protein, 10 aa, synthetic construct
NSVRGDRSQT

SEQ ID NO: 50098 - protein, 10 aa, synthetic construct
NSVRGDLLLS

SEQ ID NO: 50099 - protein, 10 aa, synthetic construct
NSLRGDRGQI

SEQ ID NO: 50100 - protein, 10 aa, synthetic construct
NSLRGDRQGI

SEQ ID NO: 50101 - protein, 10 aa, synthetic construct
NSLRGDRSVV

SEQ ID NO: 50102 - protein, 10 aa, synthetic construct
NSLRGDRGVV

SEQ ID NO: 50103 - protein, 10 aa, synthetic construct
NSLRGDYVGL

SEQ ID NO: 50104 - protein, 10 aa, synthetic construct
NSLRGDQSTL

SEQ ID NO: 50105 - protein, 10 aa, synthetic construct
NSLRGDRSQT

SEQ ID NO: 50106 - protein, 10 aa, synthetic construct
EAGRGDRSVV

SEQ ID NO: 50107 - protein, 10 aa, synthetic construct
NSLRGDLLLS

SEQ ID NO: 50108 - protein, 10 aa, synthetic construct
NSIRGDRSVV

SEQ ID NO: 50109 - protein, 10 aa, synthetic construct
NSIRGDRSQT

SEQ ID NO: 50110 - protein, 10 aa, synthetic construct
NSMRGDRSVV

SEQ ID NO: 50111 - protein, 10 aa, synthetic construct
NSMRGDRSQT

SEQ ID NO: 50112 - protein, 10 aa, synthetic construct
NSWRGDRGQI

SEQ ID NO: 50113 - protein, 10 aa, synthetic construct
NSWRGDRQGI

SEQ ID NO: 50114 - protein, 10 aa, synthetic construct
NSWRGDRSVV

SEQ ID NO: 50115 - protein, 10 aa, synthetic construct
NSWRGDRGVV

SEQ ID NO: 50116 - protein, 10 aa, synthetic construct
NSWRGDYVGL

SEQ ID NO: 50117 - protein, 10 aa, synthetic construct
EAGRGDRGVV

SEQ ID NO: 50118 - protein, 10 aa, synthetic construct
NSWRGDQSTL

SEQ ID NO: 50119 - protein, 10 aa, synthetic construct
NSWRGDRSQT

SEQ ID NO: 50120 - protein, 10 aa, synthetic construct
NSWRGDLLLS

SEQ ID NO: 50121 - protein, 10 aa, synthetic construct
NSFRGDRSVV

SEQ ID NO: 50122 - protein, 10 aa, synthetic construct
NSFRGDRSQT

SEQ ID NO: 50123 - protein, 10 aa, synthetic construct
NSKRGDRSVV

SEQ ID NO: 50124 - protein, 10 aa, synthetic construct
NSKRGDRSQT

SEQ ID NO: 50125 - protein, 10 aa, synthetic construct
NSRRGDHGVL

SEQ ID NO: 50126 - protein, 10 aa, synthetic construct
NSRRGDHVNL

SEQ ID NO: 50127 - protein, 10 aa, synthetic construct
NSRRGDYVGL

SEQ ID NO: 50128 - protein, 10 aa, synthetic construct
EAGRGDRSQT

SEQ ID NO: 50129 - protein, 10 aa, synthetic construct
NSRRGDYSSV

SEQ ID NO: 50130 - protein, 10 aa, synthetic construct
NSRRGDQSTL

SEQ ID NO: 50131 - protein, 10 aa, synthetic construct
NSRRGDLLLS

SEQ ID NO: 50132 - protein, 10 aa, synthetic construct
NSHRGDRGQI

SEQ ID NO: 50133 - protein, 10 aa, synthetic construct
NSHRGDRQGI

SEQ ID NO: 50134 - protein, 10 aa, synthetic construct
NSHRGDRSVV

SEQ ID NO: 50135 - protein, 10 aa, synthetic construct
NSHRGDRGVV

SEQ ID NO: 50136 - protein, 10 aa, synthetic construct
NSHRGDYVGL

SEQ ID NO: 50137 - protein, 10 aa, synthetic construct
NSHRGDQSTL

SEQ ID NO: 50138 - protein, 10 aa, synthetic construct
NSHRGDRSQT

SEQ ID NO: 50139 - protein, 10 aa, synthetic construct
EAARGDRGQI

SEQ ID NO: 50140 - protein, 10 aa, synthetic construct
NSHRGDLLLS

SEQ ID NO: 50141 - protein, 10 aa, synthetic construct
NSSRGDRGQI

SEQ ID NO: 50142 - protein, 10 aa, synthetic construct
NSSRGDRQGI

SEQ ID NO: 50143 - protein, 10 aa, synthetic construct
NSSRGDRSVV

SEQ ID NO: 50144 - protein, 10 aa, synthetic construct
NSSRGDRGVV

SEQ ID NO: 50145 - protein, 10 aa, synthetic construct
NSSRGDYVGL

SEQ ID NO: 50146 - protein, 10 aa, synthetic construct
NSSRGDQSTL

SEQ ID NO: 50147 - protein, 10 aa, synthetic construct
NSSRGDRSQT

SEQ ID NO: 50148 - protein, 10 aa, synthetic construct
NSSRGDLLLS

SEQ ID NO: 50149 - protein, 10 aa, synthetic construct
NSTRGDRGQI

SEQ ID NO: 50150 - protein, 10 aa, synthetic construct
EAARGDRQGI

SEQ ID NO: 50151 - protein, 10 aa, synthetic construct
NSTRGDRQGI

SEQ ID NO: 50152 - protein, 10 aa, synthetic construct
NSTRGDRSVV

SEQ ID NO: 50153 - protein, 10 aa, synthetic construct
NSTRGDRGVV

SEQ ID NO: 50154 - protein, 10 aa, synthetic construct
NSTRGDYVGL

SEQ ID NO: 50155 - protein, 10 aa, synthetic construct
NSTRGDQSTL

SEQ ID NO: 50156 - protein, 10 aa, synthetic construct
NSTRGDRSQT

SEQ ID NO: 50157 - protein, 10 aa, synthetic construct
NSTRGDLLLS

SEQ ID NO: 50158 - protein, 10 aa, synthetic construct
NSYRGDRSVV

SEQ ID NO: 50159 - protein, 10 aa, synthetic construct
NSYRGDRSQT

SEQ ID NO: 50160 - protein, 10 aa, synthetic construct
NSNRGDRSVV

SEQ ID NO: 50161 - protein, 10 aa, synthetic construct
EAARGDRSVV

SEQ ID NO: 50162 - protein, 10 aa, synthetic construct
NSNRGDRSQT

SEQ ID NO: 50163 - protein, 10 aa, synthetic construct
NSQRGDRGQI

SEQ ID NO: 50164 - protein, 10 aa, synthetic construct
NSQRGDRQGI

SEQ ID NO: 50165 - protein, 10 aa, synthetic construct
NSQRGDRSVV

SEQ ID NO: 50166 - protein, 10 aa, synthetic construct
NSQRGDRGVV

SEQ ID NO: 50167 - protein, 10 aa, synthetic construct
NSQRGDYVGL

SEQ ID NO: 50168 - protein, 10 aa, synthetic construct
NSQRGDQSTL

SEQ ID NO: 50169 - protein, 10 aa, synthetic construct
NSQRGDRSQT

SEQ ID NO: 50170 - protein, 10 aa, synthetic construct
NSQRGDLLLS

SEQ ID NO: 50171 - protein, 10 aa, synthetic construct
NSDRGDRGQI

SEQ ID NO: 50172 - protein, 10 aa, synthetic construct
EAARGDRGVV

SEQ ID NO: 50173 - protein, 10 aa, synthetic construct
NSDRGDRQGI

SEQ ID NO: 50174 - protein, 10 aa, synthetic construct
NSDRGDRSVV

SEQ ID NO: 50175 - protein, 10 aa, synthetic construct
NSDRGDRGVV

SEQ ID NO: 50176 - protein, 10 aa, synthetic construct
NSDRGDYVGL

SEQ ID NO: 50177 - protein, 10 aa, synthetic construct
NSDRGDQSTL

SEQ ID NO: 50178 - protein, 10 aa, synthetic construct
NSDRGDRSQT

SEQ ID NO: 50179 - protein, 10 aa, synthetic construct
NSDRGDLLLS

SEQ ID NO: 50180 - protein, 10 aa, synthetic construct
NSERGDRGQI

SEQ ID NO: 50181 - protein, 10 aa, synthetic construct
NSERGDRQGI

SEQ ID NO: 50182 - protein, 10 aa, synthetic construct
NSERGDRSVV

SEQ ID NO: 50183 - protein, 10 aa, synthetic construct
TKKRGDRDYL

SEQ ID NO: 50184 - protein, 10 aa, synthetic construct
EAARGDRSQT

SEQ ID NO: 50185 - protein, 10 aa, synthetic construct
NSERGDRGVV

SEQ ID NO: 50186 - protein, 10 aa, synthetic construct
NSERGDYVGL

SEQ ID NO: 50187 - protein, 10 aa, synthetic construct
NSERGDQSTL

SEQ ID NO: 50188 - protein, 10 aa, synthetic construct
NSERGDRSQT

SEQ ID NO: 50189 - protein, 10 aa, synthetic construct
NSERGDLLLS

SEQ ID NO: 50190 - protein, 10 aa, synthetic construct
NTGRGDRGQI

SEQ ID NO: 50191 - protein, 10 aa, synthetic construct
NTGRGDRQGI

SEQ ID NO: 50192 - protein, 10 aa, synthetic construct
NTGRGDRSVV

SEQ ID NO: 50193 - protein, 10 aa, synthetic construct
NTGRGDRGVV

SEQ ID NO: 50194 - protein, 10 aa, synthetic construct
NTGRGDRSQT

SEQ ID NO: 50195 - protein, 10 aa, synthetic construct
EAPRGDRGQI

SEQ ID NO: 50196 - protein, 10 aa, synthetic construct
NTARGDRGQI

SEQ ID NO: 50197 - protein, 10 aa, synthetic construct
NTARGDRQGI

SEQ ID NO: 50198 - protein, 10 aa, synthetic construct
NTARGDRSVV

SEQ ID NO: 50199 - protein, 10 aa, synthetic construct
NTARGDRGVV

SEQ ID NO: 50200 - protein, 10 aa, synthetic construct
NTARGDRSQT

SEQ ID NO: 50201 - protein, 10 aa, synthetic construct
NTPRGDRGQI

SEQ ID NO: 50202 - protein, 10 aa, synthetic construct
NTPRGDRQGI

SEQ ID NO: 50203 - protein, 10 aa, synthetic construct
NTPRGDRSVV

SEQ ID NO: 50204 - protein, 10 aa, synthetic construct
NTPRGDRGVV

SEQ ID NO: 50205 - protein, 10 aa, synthetic construct
NTPRGDRSQT

SEQ ID NO: 50206 - protein, 10 aa, synthetic construct
EAPRGDRQGI

SEQ ID NO: 50207 - protein, 10 aa, synthetic construct
NTRRGDRGQI

SEQ ID NO: 50208 - protein, 10 aa, synthetic construct
NTRRGDRQGI

SEQ ID NO: 50209 - protein, 10 aa, synthetic construct
NTRRGDRSVV

SEQ ID NO: 50210 - protein, 10 aa, synthetic construct
NTRRGDRGVV

SEQ ID NO: 50211 - protein, 10 aa, synthetic construct
NTRRGDRSQT

SEQ ID NO: 50212 - protein, 10 aa, synthetic construct
NQGRGDRGQI

SEQ ID NO: 50213 - protein, 10 aa, synthetic construct
NQGRGDRQGI

SEQ ID NO: 50214 - protein, 10 aa, synthetic construct
NQGRGDRSVV

SEQ ID NO: 50215 - protein, 10 aa, synthetic construct
NQGRGDRGVV

SEQ ID NO: 50216 - protein, 10 aa, synthetic construct
NQGRGDRSQT

SEQ ID NO: 50217 - protein, 10 aa, synthetic construct
EAPRGDRSVV

SEQ ID NO: 50218 - protein, 10 aa, synthetic construct
NQARGDRGQI

SEQ ID NO: 50219 - protein, 10 aa, synthetic construct
NQARGDRQGI

SEQ ID NO: 50220 - protein, 10 aa, synthetic construct
NQARGDRSVV

SEQ ID NO: 50221 - protein, 10 aa, synthetic construct
NQARGDRGVV

SEQ ID NO: 50222 - protein, 10 aa, synthetic construct
NQARGDRSQT

SEQ ID NO: 50223 - protein, 10 aa, synthetic construct
NQPRGDRGQI

SEQ ID NO: 50224 - protein, 10 aa, synthetic construct
NQPRGDRQGI

SEQ ID NO: 50225 - protein, 10 aa, synthetic construct
NQPRGDRSVV

SEQ ID NO: 50226 - protein, 10 aa, synthetic construct
NQPRGDRGVV

SEQ ID NO: 50227 - protein, 10 aa, synthetic construct
NQPRGDRSQT

SEQ ID NO: 50228 - protein, 10 aa, synthetic construct
EAPRGDRGVV

SEQ ID NO: 50229 - protein, 10 aa, synthetic construct
NQRRGDRGQI

SEQ ID NO: 50230 - protein, 10 aa, synthetic construct
NQRRGDRQGI

SEQ ID NO: 50231 - protein, 10 aa, synthetic construct
NQRRGDRSVV

SEQ ID NO: 50232 - protein, 10 aa, synthetic construct
NQRRGDRGVV

SEQ ID NO: 50233 - protein, 10 aa, synthetic construct
NQRRGDRSQT

SEQ ID NO: 50234 - protein, 10 aa, synthetic construct
NDGRGDRGQI

SEQ ID NO: 50235 - protein, 10 aa, synthetic construct
NDGRGDRQGI

SEQ ID NO: 50236 - protein, 10 aa, synthetic construct
NDGRGDRSVV

SEQ ID NO: 50237 - protein, 10 aa, synthetic construct
NDGRGDRGVV

SEQ ID NO: 50238 - protein, 10 aa, synthetic construct
NDGRGDRSQT

SEQ ID NO: 50239 - protein, 10 aa, synthetic construct
EAPRGDRSQT

SEQ ID NO: 50240 - protein, 10 aa, synthetic construct
NDARGDRGQI

SEQ ID NO: 50241 - protein, 10 aa, synthetic construct
NDARGDRQGI

SEQ ID NO: 50242 - protein, 10 aa, synthetic construct
NDARGDRSVV

SEQ ID NO: 50243 - protein, 10 aa, synthetic construct
NDARGDRGVV

SEQ ID NO: 50244 - protein, 10 aa, synthetic construct
NDARGDRSQT

SEQ ID NO: 50245 - protein, 10 aa, synthetic construct
NDPRGDRGQI

SEQ ID NO: 50246 - protein, 10 aa, synthetic construct
NDPRGDRQGI

SEQ ID NO: 50247 - protein, 10 aa, synthetic construct
NDPRGDRSVV

SEQ ID NO: 50248 - protein, 10 aa, synthetic construct
NDPRGDRGVV

SEQ ID NO: 50249 - protein, 10 aa, synthetic construct
NDPRGDRSQT

SEQ ID NO: 50250 - protein, 10 aa, synthetic construct
EARRGDRGQI

SEQ ID NO: 50251 - protein, 10 aa, synthetic construct
NDRRGDRGQI

SEQ ID NO: 50252 - protein, 10 aa, synthetic construct
NDRRGDRQGI

SEQ ID NO: 50253 - protein, 10 aa, synthetic construct
NDRRGDRSVV

SEQ ID NO: 50254 - protein, 10 aa, synthetic construct
NDRRGDRGVV

SEQ ID NO: 50255 - protein, 10 aa, synthetic construct
NDRRGDRSQT

SEQ ID NO: 50256 - protein, 10 aa, synthetic construct
NEGRGDRGQI

SEQ ID NO: 50257 - protein, 10 aa, synthetic construct
NEGRGDRQGI

SEQ ID NO: 50258 - protein, 10 aa, synthetic construct
NEGRGDRSVV

SEQ ID NO: 50259 - protein, 10 aa, synthetic construct
NEGRGDRGVV

SEQ ID NO: 50260 - protein, 10 aa, synthetic construct
NEGRGDRSQT

SEQ ID NO: 50261 - protein, 10 aa, synthetic construct
EARRGDRQGI

SEQ ID NO: 50262 - protein, 10 aa, synthetic construct
NEARGDRGQI

SEQ ID NO: 50263 - protein, 10 aa, synthetic construct
NEARGDRQGI

SEQ ID NO: 50264 - protein, 10 aa, synthetic construct
NEARGDRSVV

SEQ ID NO: 50265 - protein, 10 aa, synthetic construct
NEARGDRGVV

SEQ ID NO: 50266 - protein, 10 aa, synthetic construct
NEARGDRSQT

SEQ ID NO: 50267 - protein, 10 aa, synthetic construct
NEPRGDRGQI

SEQ ID NO: 50268 - protein, 10 aa, synthetic construct
NEPRGDRQGI

SEQ ID NO: 50269 - protein, 10 aa, synthetic construct
NEPRGDRSVV

SEQ ID NO: 50270 - protein, 10 aa, synthetic construct
NEPRGDRGVV

SEQ ID NO: 50271 - protein, 10 aa, synthetic construct
NEPRGDRSQT

SEQ ID NO: 50272 - protein, 10 aa, synthetic construct
EARRGDRSVV

SEQ ID NO: 50273 - protein, 10 aa, synthetic construct
NERRGDRGQI

SEQ ID NO: 50274 - protein, 10 aa, synthetic construct
NERRGDRQGI

SEQ ID NO: 50275 - protein, 10 aa, synthetic construct
NERRGDRSVV

SEQ ID NO: 50276 - protein, 10 aa, synthetic construct
NERRGDRGVV

SEQ ID NO: 50277 - protein, 10 aa, synthetic construct
NERRGDRSQT

SEQ ID NO: 50278 - protein, 10 aa, synthetic construct
DGGRGDHVNL

SEQ ID NO: 50279 - protein, 10 aa, synthetic construct
DGGRGDRDYL

SEQ ID NO: 50280 - protein, 10 aa, synthetic construct
DGGRGDYSSV

SEQ ID NO: 50281 - protein, 10 aa, synthetic construct
DGGRGDLTVT

SEQ ID NO: 50282 - protein, 10 aa, synthetic construct
DGGRGDLIGR

SEQ ID NO: 50283 - protein, 10 aa, synthetic construct
EARRGDRGVV

SEQ ID NO: 50284 - protein, 10 aa, synthetic construct
DGARGDHVNL

SEQ ID NO: 50285 - protein, 10 aa, synthetic construct
DGARGDRDYL

SEQ ID NO: 50286 - protein, 10 aa, synthetic construct
DGARGDYSSV

SEQ ID NO: 50287 - protein, 10 aa, synthetic construct
DGARGDLTVT

SEQ ID NO: 50288 - protein, 10 aa, synthetic construct
DGARGDLIGR

SEQ ID NO: 50289 - protein, 10 aa, synthetic construct
DGVRGDHGVL

SEQ ID NO: 50290 - protein, 10 aa, synthetic construct
DGVRGDYVGL

SEQ ID NO: 50291 - protein, 10 aa, synthetic construct
DGVRGDQSTL

SEQ ID NO: 50292 - protein, 10 aa, synthetic construct
DGVRGDLLLS

SEQ ID NO: 50293 - protein, 10 aa, synthetic construct
DGPRGDHVNL

SEQ ID NO: 50294 - protein, 10 aa, synthetic construct
TKKRGDYSSV

SEQ ID NO: 50295 - protein, 10 aa, synthetic construct
EARRGDRSQT

SEQ ID NO: 50296 - protein, 10 aa, synthetic construct
DGPRGDRDYL

SEQ ID NO: 50297 - protein, 10 aa, synthetic construct
DGPRGDYSSV

SEQ ID NO: 50298 - protein, 10 aa, synthetic construct
DGPRGDLTVT

SEQ ID NO: 50299 - protein, 10 aa, synthetic construct
DGPRGDLIGR

SEQ ID NO: 50300 - protein, 10 aa, synthetic construct
DGLRGDHGVL

SEQ ID NO: 50301 - protein, 10 aa, synthetic construct
DGLRGDYVGL

SEQ ID NO: 50302 - protein, 10 aa, synthetic construct
DGLRGDQSTL

SEQ ID NO: 50303 - protein, 10 aa, synthetic construct
DGLRGDLLLS

SEQ ID NO: 50304 - protein, 10 aa, synthetic construct
DGIRGDRGQI

SEQ ID NO: 50305 - protein, 10 aa, synthetic construct
DGIRGDRQGI

SEQ ID NO: 50306 - protein, 10 aa, synthetic construct
EVGRGDRGQI

SEQ ID NO: 50307 - protein, 10 aa, synthetic construct
DGIRGDRSVV

SEQ ID NO: 50308 - protein, 10 aa, synthetic construct
DGIRGDRGVV

SEQ ID NO: 50309 - protein, 10 aa, synthetic construct
DGIRGDRSQT

SEQ ID NO: 50310 - protein, 10 aa, synthetic construct
DGMRGDRGQI

SEQ ID NO: 50311 - protein, 10 aa, synthetic construct
DGMRGDRQGI

SEQ ID NO: 50312 - protein, 10 aa, synthetic construct
DGMRGDRSVV

SEQ ID NO: 50313 - protein, 10 aa, synthetic construct
DGMRGDRGVV

SEQ ID NO: 50314 - protein, 10 aa, synthetic construct
DGMRGDRSQT

SEQ ID NO: 50315 - protein, 10 aa, synthetic construct
DGWRGDHGVL

SEQ ID NO: 50316 - protein, 10 aa, synthetic construct
DGWRGDYVGL

SEQ ID NO: 50317 - protein, 10 aa, synthetic construct
EVGRGDRQGI

SEQ ID NO: 50318 - protein, 10 aa, synthetic construct
DGWRGDQSTL

SEQ ID NO: 50319 - protein, 10 aa, synthetic construct
DGWRGDLLLS

SEQ ID NO: 50320 - protein, 10 aa, synthetic construct
DGFRGDRGQI

SEQ ID NO: 50321 - protein, 10 aa, synthetic construct
DGFRGDRQGI

SEQ ID NO: 50322 - protein, 10 aa, synthetic construct
DGFRGDRSVV

SEQ ID NO: 50323 - protein, 10 aa, synthetic construct
DGFRGDRGVV

SEQ ID NO: 50324 - protein, 10 aa, synthetic construct
DGFRGDRSQT

SEQ ID NO: 50325 - protein, 10 aa, synthetic construct
DGKRGDRGQI

SEQ ID NO: 50326 - protein, 10 aa, synthetic construct
DGKRGDRQGI

SEQ ID NO: 50327 - protein, 10 aa, synthetic construct
DGKRGDRSVV

SEQ ID NO: 50328 - protein, 10 aa, synthetic construct
EVGRGDRSVV

SEQ ID NO: 50329 - protein, 10 aa, synthetic construct
DGKRGDRGVV

SEQ ID NO: 50330 - protein, 10 aa, synthetic construct
DGKRGDRSQT

SEQ ID NO: 50331 - protein, 10 aa, synthetic construct
DGRRGDHVNL

SEQ ID NO: 50332 - protein, 10 aa, synthetic construct
DGRRGDRDYL

SEQ ID NO: 50333 - protein, 10 aa, synthetic construct
DGRRGDYSSV

SEQ ID NO: 50334 - protein, 10 aa, synthetic construct
DGRRGDLTVT

SEQ ID NO: 50335 - protein, 10 aa, synthetic construct
DGRRGDLIGR

SEQ ID NO: 50336 - protein, 10 aa, synthetic construct
DGHRGDHGVL

SEQ ID NO: 50337 - protein, 10 aa, synthetic construct
DGHRGDYVGL

SEQ ID NO: 50338 - protein, 10 aa, synthetic construct
DGHRGDQSTL

SEQ ID NO: 50339 - protein, 10 aa, synthetic construct
EVGRGDRGVV

SEQ ID NO: 50340 - protein, 10 aa, synthetic construct
DGHRGDLLLS

SEQ ID NO: 50341 - protein, 10 aa, synthetic construct
DGSRGDHGVL

SEQ ID NO: 50342 - protein, 10 aa, synthetic construct
DGSRGDYVGL

SEQ ID NO: 50343 - protein, 10 aa, synthetic construct
DGSRGDQSTL

SEQ ID NO: 50344 - protein, 10 aa, synthetic construct
DGSRGDLLLS

SEQ ID NO: 50345 - protein, 10 aa, synthetic construct
DGTRGDHGVL

SEQ ID NO: 50346 - protein, 10 aa, synthetic construct
DGTRGDYVGL

SEQ ID NO: 50347 - protein, 10 aa, synthetic construct
DGTRGDQSTL

SEQ ID NO: 50348 - protein, 10 aa, synthetic construct
DGTRGDLLLS

SEQ ID NO: 50349 - protein, 10 aa, synthetic construct
DGYRGDRGQI

SEQ ID NO: 50350 - protein, 10 aa, synthetic construct
EVGRGDRSQT

SEQ ID NO: 50351 - protein, 10 aa, synthetic construct
DGYRGDRQGI

SEQ ID NO: 50352 - protein, 10 aa, synthetic construct
DGYRGDRSVV

SEQ ID NO: 50353 - protein, 10 aa, synthetic construct
DGYRGDRGVV

SEQ ID NO: 50354 - protein, 10 aa, synthetic construct
DGYRGDRSQT

SEQ ID NO: 50355 - protein, 10 aa, synthetic construct
DGNRGDRGQI

SEQ ID NO: 50356 - protein, 10 aa, synthetic construct
DGNRGDRQGI

SEQ ID NO: 50357 - protein, 10 aa, synthetic construct
DGNRGDRSVV

SEQ ID NO: 50358 - protein, 10 aa, synthetic construct
DGNRGDRGVV

SEQ ID NO: 50359 - protein, 10 aa, synthetic construct
DGNRGDRSQT

SEQ ID NO: 50360 - protein, 10 aa, synthetic construct
DGQRGDHGVL

SEQ ID NO: 50361 - protein, 10 aa, synthetic construct
EVARGDRGQI

SEQ ID NO: 50362 - protein, 10 aa, synthetic construct
DGQRGDYVGL

SEQ ID NO: 50363 - protein, 10 aa, synthetic construct
DGQRGDQSTL

SEQ ID NO: 50364 - protein, 10 aa, synthetic construct
DGQRGDLLLS

SEQ ID NO: 50365 - protein, 10 aa, synthetic construct
DGDRGDHGVL

SEQ ID NO: 50366 - protein, 10 aa, synthetic construct
DGDRGDYVGL

SEQ ID NO: 50367 - protein, 10 aa, synthetic construct
DGDRGDQSTL

SEQ ID NO: 50368 - protein, 10 aa, synthetic construct
DGDRGDLLLS

SEQ ID NO: 50369 - protein, 10 aa, synthetic construct
DGERGDHGVL

SEQ ID NO: 50370 - protein, 10 aa, synthetic construct
DGERGDYVGL

SEQ ID NO: 50371 - protein, 10 aa, synthetic construct
DGERGDQSTL

SEQ ID NO: 50372 - protein, 10 aa, synthetic construct
EVARGDRQGI

SEQ ID NO: 50373 - protein, 10 aa, synthetic construct
DGERGDLLLS

SEQ ID NO: 50374 - protein, 10 aa, synthetic construct
DAGRGDHVNL

SEQ ID NO: 50375 - protein, 10 aa, synthetic construct
DAGRGDRDYL

SEQ ID NO: 50376 - protein, 10 aa, synthetic construct
DAGRGDYSSV

SEQ ID NO: 50377 - protein, 10 aa, synthetic construct
DAGRGDLTVT

SEQ ID NO: 50378 - protein, 10 aa, synthetic construct
DAGRGDLIGR

SEQ ID NO: 50379 - protein, 10 aa, synthetic construct
DAARGDHVNL

SEQ ID NO: 50380 - protein, 10 aa, synthetic construct
DAARGDRDYL

SEQ ID NO: 50381 - protein, 10 aa, synthetic construct
DAARGDYSSV

SEQ ID NO: 50382 - protein, 10 aa, synthetic construct
DAARGDLTVT

SEQ ID NO: 50383 - protein, 10 aa, synthetic construct
EVARGDRSVV

SEQ ID NO: 50384 - protein, 10 aa, synthetic construct
DAARGDLIGR

SEQ ID NO: 50385 - protein, 10 aa, synthetic construct
DAVRGDHGVL

SEQ ID NO: 50386 - protein, 10 aa, synthetic construct
DAVRGDYVGL

SEQ ID NO: 50387 - protein, 10 aa, synthetic construct
DAVRGDQSTL

SEQ ID NO: 50388 - protein, 10 aa, synthetic construct
DAVRGDLLLS

SEQ ID NO: 50389 - protein, 10 aa, synthetic construct
DAPRGDHVNL

SEQ ID NO: 50390 - protein, 10 aa, synthetic construct
DAPRGDRDYL

SEQ ID NO: 50391 - protein, 10 aa, synthetic construct
DAPRGDYSSV

SEQ ID NO: 50392 - protein, 10 aa, synthetic construct
DAPRGDLTVT

SEQ ID NO: 50393 - protein, 10 aa, synthetic construct
DAPRGDLIGR

SEQ ID NO: 50394 - protein, 10 aa, synthetic construct
EVARGDRGVV

SEQ ID NO: 50395 - protein, 10 aa, synthetic construct
DALRGDHGVL

SEQ ID NO: 50396 - protein, 10 aa, synthetic construct
DALRGDYVGL

SEQ ID NO: 50397 - protein, 10 aa, synthetic construct
DALRGDQSTL

SEQ ID NO: 50398 - protein, 10 aa, synthetic construct
DALRGDLLLS

SEQ ID NO: 50399 - protein, 10 aa, synthetic construct
DAIRGDRGQI

SEQ ID NO: 50400 - protein, 10 aa, synthetic construct
DAIRGDRQGI

SEQ ID NO: 50401 - protein, 10 aa, synthetic construct
DAIRGDRSVV

SEQ ID NO: 50402 - protein, 10 aa, synthetic construct
DAIRGDRGVV

SEQ ID NO: 50403 - protein, 10 aa, synthetic construct
DAIRGDRSQT

SEQ ID NO: 50404 - protein, 10 aa, synthetic construct
DAMRGDRGQI

SEQ ID NO: 50405 - protein, 10 aa, synthetic construct
TKKRGDLTVT

SEQ ID NO: 50406 - protein, 10 aa, synthetic construct
EVARGDRSQT

SEQ ID NO: 50407 - protein, 10 aa, synthetic construct
DAMRGDRQGI

SEQ ID NO: 50408 - protein, 10 aa, synthetic construct
DAMRGDRSVV

SEQ ID NO: 50409 - protein, 10 aa, synthetic construct
DAMRGDRGVV

SEQ ID NO: 50410 - protein, 10 aa, synthetic construct
DAMRGDRSQT

SEQ ID NO: 50411 - protein, 10 aa, synthetic construct
DAWRGDHGVL

SEQ ID NO: 50412 - protein, 10 aa, synthetic construct
DAWRGDYVGL

SEQ ID NO: 50413 - protein, 10 aa, synthetic construct
DAWRGDQSTL

SEQ ID NO: 50414 - protein, 10 aa, synthetic construct
DAWRGDLLLS

SEQ ID NO: 50415 - protein, 10 aa, synthetic construct
DAFRGDRGQI

SEQ ID NO: 50416 - protein, 10 aa, synthetic construct
DAFRGDRQGI

SEQ ID NO: 50417 - protein, 10 aa, synthetic construct
EVPRGDRGQI

SEQ ID NO: 50418 - protein, 10 aa, synthetic construct
DAFRGDRSVV

SEQ ID NO: 50419 - protein, 10 aa, synthetic construct
DAFRGDRGVV

SEQ ID NO: 50420 - protein, 10 aa, synthetic construct
DAFRGDRSQT

SEQ ID NO: 50421 - protein, 10 aa, synthetic construct
DAKRGDRGQI

SEQ ID NO: 50422 - protein, 10 aa, synthetic construct
DAKRGDRQGI

SEQ ID NO: 50423 - protein, 10 aa, synthetic construct
DAKRGDRSVV

SEQ ID NO: 50424 - protein, 10 aa, synthetic construct
DAKRGDRGVV

SEQ ID NO: 50425 - protein, 10 aa, synthetic construct
DAKRGDRSQT

SEQ ID NO: 50426 - protein, 10 aa, synthetic construct
DARRGDHVNL

SEQ ID NO: 50427 - protein, 10 aa, synthetic construct
DARRGDRDYL

SEQ ID NO: 50428 - protein, 10 aa, synthetic construct
EVPRGDRQGI

SEQ ID NO: 50429 - protein, 10 aa, synthetic construct
DARRGDYSSV

SEQ ID NO: 50430 - protein, 10 aa, synthetic construct
DARRGDLTVT

SEQ ID NO: 50431 - protein, 10 aa, synthetic construct
DARRGDLIGR

SEQ ID NO: 50432 - protein, 10 aa, synthetic construct
DAHRGDHGVL

SEQ ID NO: 50433 - protein, 10 aa, synthetic construct
DAHRGDYVGL

SEQ ID NO: 50434 - protein, 10 aa, synthetic construct
DAHRGDQSTL

SEQ ID NO: 50435 - protein, 10 aa, synthetic construct
DAHRGDLLLS

SEQ ID NO: 50436 - protein, 10 aa, synthetic construct
DASRGDHGVL

SEQ ID NO: 50437 - protein, 10 aa, synthetic construct
DASRGDYVGL

SEQ ID NO: 50438 - protein, 10 aa, synthetic construct
DASRGDQSTL

SEQ ID NO: 50439 - protein, 10 aa, synthetic construct
EVPRGDRSVV

SEQ ID NO: 50440 - protein, 10 aa, synthetic construct
DASRGDLLLS

SEQ ID NO: 50441 - protein, 10 aa, synthetic construct
DATRGDHGVL

SEQ ID NO: 50442 - protein, 10 aa, synthetic construct
DATRGDYVGL

SEQ ID NO: 50443 - protein, 10 aa, synthetic construct
DATRGDQSTL

SEQ ID NO: 50444 - protein, 10 aa, synthetic construct
DATRGDLLLS

SEQ ID NO: 50445 - protein, 10 aa, synthetic construct
DAYRGDRGQI

SEQ ID NO: 50446 - protein, 10 aa, synthetic construct
DAYRGDRQGI

SEQ ID NO: 50447 - protein, 10 aa, synthetic construct
DAYRGDRSVV

SEQ ID NO: 50448 - protein, 10 aa, synthetic construct
DAYRGDRGVV

SEQ ID NO: 50449 - protein, 10 aa, synthetic construct
DAYRGDRSQT

SEQ ID NO: 50450 - protein, 10 aa, synthetic construct
EVPRGDRGVV

SEQ ID NO: 50451 - protein, 10 aa, synthetic construct
DANRGDRGQI

SEQ ID NO: 50452 - protein, 10 aa, synthetic construct
DANRGDRQGI

SEQ ID NO: 50453 - protein, 10 aa, synthetic construct
DANRGDRSVV

SEQ ID NO: 50454 - protein, 10 aa, synthetic construct
DANRGDRGVV

SEQ ID NO: 50455 - protein, 10 aa, synthetic construct
DANRGDRSQT

SEQ ID NO: 50456 - protein, 10 aa, synthetic construct
DAQRGDHGVL

SEQ ID NO: 50457 - protein, 10 aa, synthetic construct
DAQRGDYVGL

SEQ ID NO: 50458 - protein, 10 aa, synthetic construct
DAQRGDQSTL

SEQ ID NO: 50459 - protein, 10 aa, synthetic construct
DAQRGDLLLS

SEQ ID NO: 50460 - protein, 10 aa, synthetic construct
DADRGDHGVL

SEQ ID NO: 50461 - protein, 10 aa, synthetic construct
EVPRGDRSQT

SEQ ID NO: 50462 - protein, 10 aa, synthetic construct
DADRGDYVGL

SEQ ID NO: 50463 - protein, 10 aa, synthetic construct
DADRGDQSTL

SEQ ID NO: 50464 - protein, 10 aa, synthetic construct
DADRGDLLLS

SEQ ID NO: 50465 - protein, 10 aa, synthetic construct
DAERGDHGVL

SEQ ID NO: 50466 - protein, 10 aa, synthetic construct
DAERGDYVGL

SEQ ID NO: 50467 - protein, 10 aa, synthetic construct
DAERGDQSTL

SEQ ID NO: 50468 - protein, 10 aa, synthetic construct
DAERGDLLLS

SEQ ID NO: 50469 - protein, 10 aa, synthetic construct
DVGRGDHVNL

SEQ ID NO: 50470 - protein, 10 aa, synthetic construct
DVGRGDRDYL

SEQ ID NO: 50471 - protein, 10 aa, synthetic construct
DVGRGDYSSV

SEQ ID NO: 50472 - protein, 10 aa, synthetic construct
EVRRGDRGQI

SEQ ID NO: 50473 - protein, 10 aa, synthetic construct
DVGRGDLTVT

SEQ ID NO: 50474 - protein, 10 aa, synthetic construct
DVGRGDLIGR

SEQ ID NO: 50475 - protein, 10 aa, synthetic construct
DVARGDHVNL

SEQ ID NO: 50476 - protein, 10 aa, synthetic construct
DVARGDRDYL

SEQ ID NO: 50477 - protein, 10 aa, synthetic construct
DVARGDYSSV

SEQ ID NO: 50478 - protein, 10 aa, synthetic construct
DVARGDLTVT

SEQ ID NO: 50479 - protein, 10 aa, synthetic construct
DVARGDLIGR

SEQ ID NO: 50480 - protein, 10 aa, synthetic construct
DVVRGDHGVL

SEQ ID NO: 50481 - protein, 10 aa, synthetic construct
DVVRGDHVNL

SEQ ID NO: 50482 - protein, 10 aa, synthetic construct
DVVRGDYVGL

SEQ ID NO: 50483 - protein, 10 aa, synthetic construct
EVRRGDRQGI

SEQ ID NO: 50484 - protein, 10 aa, synthetic construct
DVVRGDYSSV

SEQ ID NO: 50485 - protein, 10 aa, synthetic construct
DVVRGDQSTL

SEQ ID NO: 50486 - protein, 10 aa, synthetic construct
DVVRGDLLLS

SEQ ID NO: 50487 - protein, 10 aa, synthetic construct
DVPRGDHVNL

SEQ ID NO: 50488 - protein, 10 aa, synthetic construct
DVPRGDRDYL

SEQ ID NO: 50489 - protein, 10 aa, synthetic construct
DVPRGDYSSV

SEQ ID NO: 50490 - protein, 10 aa, synthetic construct
DVPRGDLTVT

SEQ ID NO: 50491 - protein, 10 aa, synthetic construct
DVPRGDLIGR

SEQ ID NO: 50492 - protein, 10 aa, synthetic construct
DVLRGDHGVL

SEQ ID NO: 50493 - protein, 10 aa, synthetic construct
DVLRGDHVNL

SEQ ID NO: 50494 - protein, 10 aa, synthetic construct
EVRRGDRSVV

SEQ ID NO: 50495 - protein, 10 aa, synthetic construct
DVLRGDYVGL

SEQ ID NO: 50496 - protein, 10 aa, synthetic construct
DVLRGDYSSV

SEQ ID NO: 50497 - protein, 10 aa, synthetic construct
DVLRGDQSTL

SEQ ID NO: 50498 - protein, 10 aa, synthetic construct
DVLRGDLLLS

SEQ ID NO: 50499 - protein, 10 aa, synthetic construct
DVIRGDRGQI

SEQ ID NO: 50500 - protein, 10 aa, synthetic construct
DVIRGDRQGI

SEQ ID NO: 50501 - protein, 10 aa, synthetic construct
DVIRGDRSVV

SEQ ID NO: 50502 - protein, 10 aa, synthetic construct
DVIRGDRGVV

SEQ ID NO: 50503 - protein, 10 aa, synthetic construct
DVIRGDYVGL

SEQ ID NO: 50504 - protein, 10 aa, synthetic construct
DVIRGDQSTL

SEQ ID NO: 50505 - protein, 10 aa, synthetic construct
EVRRGDRGVV

SEQ ID NO: 50506 - protein, 10 aa, synthetic construct
DVIRGDRSQT

SEQ ID NO: 50507 - protein, 10 aa, synthetic construct
DVIRGDLLLS

SEQ ID NO: 50508 - protein, 10 aa, synthetic construct
DVMRGDRGQI

SEQ ID NO: 50509 - protein, 10 aa, synthetic construct
DVMRGDRQGI

SEQ ID NO: 50510 - protein, 10 aa, synthetic construct
DVMRGDRSVV

SEQ ID NO: 50511 - protein, 10 aa, synthetic construct
DVMRGDRGVV

SEQ ID NO: 50512 - protein, 10 aa, synthetic construct
DVMRGDYVGL

SEQ ID NO: 50513 - protein, 10 aa, synthetic construct
DVMRGDQSTL

SEQ ID NO: 50514 - protein, 10 aa, synthetic construct
DVMRGDRSQT

SEQ ID NO: 50515 - protein, 10 aa, synthetic construct
DVMRGDLLLS

SEQ ID NO: 50516 - protein, 10 aa, synthetic construct
TKNRGDHVNL

SEQ ID NO: 50517 - protein, 10 aa, synthetic construct
EVRRGDRSQT

SEQ ID NO: 50518 - protein, 10 aa, synthetic construct
DVWRGDHGVL

SEQ ID NO: 50519 - protein, 10 aa, synthetic construct
DVWRGDHVNL

SEQ ID NO: 50520 - protein, 10 aa, synthetic construct
DVWRGDYVGL

SEQ ID NO: 50521 - protein, 10 aa, synthetic construct
DVWRGDYSSV

SEQ ID NO: 50522 - protein, 10 aa, synthetic construct
DVWRGDQSTL

SEQ ID NO: 50523 - protein, 10 aa, synthetic construct
DVWRGDLLLS

SEQ ID NO: 50524 - protein, 10 aa, synthetic construct
DVFRGDRGQI

SEQ ID NO: 50525 - protein, 10 aa, synthetic construct
DVFRGDRQGI

SEQ ID NO: 50526 - protein, 10 aa, synthetic construct
DVFRGDRSVV

SEQ ID NO: 50527 - protein, 10 aa, synthetic construct
DVFRGDRGVV

SEQ ID NO: 50528 - protein, 10 aa, synthetic construct
EPGRGDRGQI

SEQ ID NO: 50529 - protein, 10 aa, synthetic construct
DVFRGDYVGL

SEQ ID NO: 50530 - protein, 10 aa, synthetic construct
DVFRGDQSTL

SEQ ID NO: 50531 - protein, 10 aa, synthetic construct
DVFRGDRSQT

SEQ ID NO: 50532 - protein, 10 aa, synthetic construct
DVFRGDLLLS

SEQ ID NO: 50533 - protein, 10 aa, synthetic construct
DVKRGDRGQI

SEQ ID NO: 50534 - protein, 10 aa, synthetic construct
DVKRGDRQGI

SEQ ID NO: 50535 - protein, 10 aa, synthetic construct
DVKRGDRSVV

SEQ ID NO: 50536 - protein, 10 aa, synthetic construct
DVKRGDRGVV

SEQ ID NO: 50537 - protein, 10 aa, synthetic construct
DVKRGDYVGL

SEQ ID NO: 50538 - protein, 10 aa, synthetic construct
DVKRGDQSTL

SEQ ID NO: 50539 - protein, 10 aa, synthetic construct
EPGRGDRQGI

SEQ ID NO: 50540 - protein, 10 aa, synthetic construct
DVKRGDRSQT

SEQ ID NO: 50541 - protein, 10 aa, synthetic construct
DVKRGDLLLS

SEQ ID NO: 50542 - protein, 10 aa, synthetic construct
DVRRGDHVNL

SEQ ID NO: 50543 - protein, 10 aa, synthetic construct
DVRRGDRDYL

SEQ ID NO: 50544 - protein, 10 aa, synthetic construct
DVRRGDYSSV

SEQ ID NO: 50545 - protein, 10 aa, synthetic construct
DVRRGDLTVT

SEQ ID NO: 50546 - protein, 10 aa, synthetic construct
DVRRGDLIGR

SEQ ID NO: 50547 - protein, 10 aa, synthetic construct
DVHRGDHGVL

SEQ ID NO: 50548 - protein, 10 aa, synthetic construct
DVHRGDHVNL

SEQ ID NO: 50549 - protein, 10 aa, synthetic construct
DVHRGDYVGL

SEQ ID NO: 50550 - protein, 10 aa, synthetic construct
EPGRGDRSVV

SEQ ID NO: 50551 - protein, 10 aa, synthetic construct
DVHRGDYSSV

SEQ ID NO: 50552 - protein, 10 aa, synthetic construct
DVHRGDQSTL

SEQ ID NO: 50553 - protein, 10 aa, synthetic construct
DVHRGDLLLS

SEQ ID NO: 50554 - protein, 10 aa, synthetic construct
DVSRGDHGVL

SEQ ID NO: 50555 - protein, 10 aa, synthetic construct
DVSRGDHVNL

SEQ ID NO: 50556 - protein, 10 aa, synthetic construct
DVSRGDYVGL

SEQ ID NO: 50557 - protein, 10 aa, synthetic construct
DVSRGDYSSV

SEQ ID NO: 50558 - protein, 10 aa, synthetic construct
DVSRGDQSTL

SEQ ID NO: 50559 - protein, 10 aa, synthetic construct
DVSRGDLLLS

SEQ ID NO: 50560 - protein, 10 aa, synthetic construct
DVTRGDHGVL

SEQ ID NO: 50561 - protein, 10 aa, synthetic construct
EPGRGDRGVV

SEQ ID NO: 50562 - protein, 10 aa, synthetic construct
DVTRGDHVNL

SEQ ID NO: 50563 - protein, 10 aa, synthetic construct
DVTRGDYVGL

SEQ ID NO: 50564 - protein, 10 aa, synthetic construct
DVTRGDYSSV

SEQ ID NO: 50565 - protein, 10 aa, synthetic construct
DVTRGDQSTL

SEQ ID NO: 50566 - protein, 10 aa, synthetic construct
DVTRGDLLLS

SEQ ID NO: 50567 - protein, 10 aa, synthetic construct
DVYRGDRGQI

SEQ ID NO: 50568 - protein, 10 aa, synthetic construct
DVYRGDRQGI

SEQ ID NO: 50569 - protein, 10 aa, synthetic construct
DVYRGDRSVV

SEQ ID NO: 50570 - protein, 10 aa, synthetic construct
DVYRGDRGVV

SEQ ID NO: 50571 - protein, 10 aa, synthetic construct
DVYRGDYVGL

SEQ ID NO: 50572 - protein, 10 aa, synthetic construct
EPGRGDRSQT

SEQ ID NO: 50573 - protein, 10 aa, synthetic construct
DVYRGDQSTL

SEQ ID NO: 50574 - protein, 10 aa, synthetic construct
DVYRGDRSQT

SEQ ID NO: 50575 - protein, 10 aa, synthetic construct
DVYRGDLLLS

SEQ ID NO: 50576 - protein, 10 aa, synthetic construct
DVNRGDRGQI

SEQ ID NO: 50577 - protein, 10 aa, synthetic construct
DVNRGDRQGI

SEQ ID NO: 50578 - protein, 10 aa, synthetic construct
DVNRGDRSVV

SEQ ID NO: 50579 - protein, 10 aa, synthetic construct
DVNRGDRGVV

SEQ ID NO: 50580 - protein, 10 aa, synthetic construct
DVNRGDYVGL

SEQ ID NO: 50581 - protein, 10 aa, synthetic construct
DVNRGDQSTL

SEQ ID NO: 50582 - protein, 10 aa, synthetic construct
DVNRGDRSQT

SEQ ID NO: 50583 - protein, 10 aa, synthetic construct
EPARGDRGQI

SEQ ID NO: 50584 - protein, 10 aa, synthetic construct
DVNRGDLLLS

SEQ ID NO: 50585 - protein, 10 aa, synthetic construct
DVQRGDHGVL

SEQ ID NO: 50586 - protein, 10 aa, synthetic construct
DVQRGDHVNL

SEQ ID NO: 50587 - protein, 10 aa, synthetic construct
DVQRGDYVGL

SEQ ID NO: 50588 - protein, 10 aa, synthetic construct
DVQRGDYSSV

SEQ ID NO: 50589 - protein, 10 aa, synthetic construct
DVQRGDQSTL

SEQ ID NO: 50590 - protein, 10 aa, synthetic construct
DVQRGDLLLS

SEQ ID NO: 50591 - protein, 10 aa, synthetic construct
DVDRGDHGVL

SEQ ID NO: 50592 - protein, 10 aa, synthetic construct
DVDRGDHVNL

SEQ ID NO: 50593 - protein, 10 aa, synthetic construct
DVDRGDYVGL

SEQ ID NO: 50594 - protein, 10 aa, synthetic construct
EPARGDRQGI

SEQ ID NO: 50595 - protein, 10 aa, synthetic construct
DVDRGDYSSV

SEQ ID NO: 50596 - protein, 10 aa, synthetic construct
DVDRGDQSTL

SEQ ID NO: 50597 - protein, 10 aa, synthetic construct
DVDRGDLLLS

SEQ ID NO: 50598 - protein, 10 aa, synthetic construct
DVERGDHGVL

SEQ ID NO: 50599 - protein, 10 aa, synthetic construct
DVERGDHVNL

SEQ ID NO: 50600 - protein, 10 aa, synthetic construct
DVERGDYVGL

SEQ ID NO: 50601 - protein, 10 aa, synthetic construct
DVERGDYSSV

SEQ ID NO: 50602 - protein, 10 aa, synthetic construct
DVERGDQSTL

SEQ ID NO: 50603 - protein, 10 aa, synthetic construct
DVERGDLLLS

SEQ ID NO: 50604 - protein, 10 aa, synthetic construct
DPGRGDHVNL

SEQ ID NO: 50605 - protein, 10 aa, synthetic construct
EPARGDRSVV

SEQ ID NO: 50606 - protein, 10 aa, synthetic construct
DPGRGDRDYL

SEQ ID NO: 50607 - protein, 10 aa, synthetic construct
DPGRGDYSSV

SEQ ID NO: 50608 - protein, 10 aa, synthetic construct
DPGRGDLTVT

SEQ ID NO: 50609 - protein, 10 aa, synthetic construct
DPGRGDLIGR

SEQ ID NO: 50610 - protein, 10 aa, synthetic construct
DPARGDHVNL

SEQ ID NO: 50611 - protein, 10 aa, synthetic construct
DPARGDRDYL

SEQ ID NO: 50612 - protein, 10 aa, synthetic construct
DPARGDYSSV

SEQ ID NO: 50613 - protein, 10 aa, synthetic construct
DPARGDLTVT

SEQ ID NO: 50614 - protein, 10 aa, synthetic construct
DPARGDLIGR

SEQ ID NO: 50615 - protein, 10 aa, synthetic construct
DPVRGDHGVL

SEQ ID NO: 50616 - protein, 10 aa, synthetic construct
EPARGDRGVV

SEQ ID NO: 50617 - protein, 10 aa, synthetic construct
DPVRGDYVGL

SEQ ID NO: 50618 - protein, 10 aa, synthetic construct
DPVRGDQSTL

SEQ ID NO: 50619 - protein, 10 aa, synthetic construct
DPVRGDLLLS

SEQ ID NO: 50620 - protein, 10 aa, synthetic construct
DPPRGDHVNL

SEQ ID NO: 50621 - protein, 10 aa, synthetic construct
DPPRGDRDYL

SEQ ID NO: 50622 - protein, 10 aa, synthetic construct
DPPRGDYSSV

SEQ ID NO: 50623 - protein, 10 aa, synthetic construct
DPPRGDLTVT

SEQ ID NO: 50624 - protein, 10 aa, synthetic construct
DPPRGDLIGR

SEQ ID NO: 50625 - protein, 10 aa, synthetic construct
DPLRGDHGVL

SEQ ID NO: 50626 - protein, 10 aa, synthetic construct
DPLRGDYVGL

SEQ ID NO: 50627 - protein, 10 aa, synthetic construct
EKNRGDRSQT

SEQ ID NO: 50628 - protein, 10 aa, synthetic construct
TKNRGDRDYL

SEQ ID NO: 50629 - protein, 10 aa, synthetic construct
EPARGDRSQT

SEQ ID NO: 50630 - protein, 10 aa, synthetic construct
DPLRGDQSTL

SEQ ID NO: 50631 - protein, 10 aa, synthetic construct
DPLRGDLLLS

SEQ ID NO: 50632 - protein, 10 aa, synthetic construct
DPIRGDRGQI

SEQ ID NO: 50633 - protein, 10 aa, synthetic construct
DPIRGDRQGI

SEQ ID NO: 50634 - protein, 10 aa, synthetic construct
DPIRGDRSVV

SEQ ID NO: 50635 - protein, 10 aa, synthetic construct
DPIRGDRGVV

SEQ ID NO: 50636 - protein, 10 aa, synthetic construct
DPIRGDRSQT

SEQ ID NO: 50637 - protein, 10 aa, synthetic construct
DPMRGDRGQI

SEQ ID NO: 50638 - protein, 10 aa, synthetic construct
DPMRGDRQGI

SEQ ID NO: 50639 - protein, 10 aa, synthetic construct
DPMRGDRSVV

SEQ ID NO: 50640 - protein, 10 aa, synthetic construct
EPPRGDRGQI

SEQ ID NO: 50641 - protein, 10 aa, synthetic construct
DPMRGDRGVV

SEQ ID NO: 50642 - protein, 10 aa, synthetic construct
DPMRGDRSQT

SEQ ID NO: 50643 - protein, 10 aa, synthetic construct
DPWRGDHGVL

SEQ ID NO: 50644 - protein, 10 aa, synthetic construct
DPWRGDYVGL

SEQ ID NO: 50645 - protein, 10 aa, synthetic construct
DPWRGDQSTL

SEQ ID NO: 50646 - protein, 10 aa, synthetic construct
DPWRGDLLLS

SEQ ID NO: 50647 - protein, 10 aa, synthetic construct
DPFRGDRGQI

SEQ ID NO: 50648 - protein, 10 aa, synthetic construct
DPFRGDRQGI

SEQ ID NO: 50649 - protein, 10 aa, synthetic construct
DPFRGDRSVV

SEQ ID NO: 50650 - protein, 10 aa, synthetic construct
DPFRGDRGVV

SEQ ID NO: 50651 - protein, 10 aa, synthetic construct
EPPRGDRQGI

SEQ ID NO: 50652 - protein, 10 aa, synthetic construct
DPFRGDRSQT

SEQ ID NO: 50653 - protein, 10 aa, synthetic construct
DPKRGDRGQI

SEQ ID NO: 50654 - protein, 10 aa, synthetic construct
DPKRGDRQGI

SEQ ID NO: 50655 - protein, 10 aa, synthetic construct
DPKRGDRSVV

SEQ ID NO: 50656 - protein, 10 aa, synthetic construct
DPKRGDRGVV

SEQ ID NO: 50657 - protein, 10 aa, synthetic construct
DPKRGDRSQT

SEQ ID NO: 50658 - protein, 10 aa, synthetic construct
DPRRGDHVNL

SEQ ID NO: 50659 - protein, 10 aa, synthetic construct
DPRRGDRDYL

SEQ ID NO: 50660 - protein, 10 aa, synthetic construct
DPRRGDYSSV

SEQ ID NO: 50661 - protein, 10 aa, synthetic construct
DPRRGDLTVT

SEQ ID NO: 50662 - protein, 10 aa, synthetic construct
EPPRGDRSVV

SEQ ID NO: 50663 - protein, 10 aa, synthetic construct
DPRRGDLIGR

SEQ ID NO: 50664 - protein, 10 aa, synthetic construct
DPHRGDHGVL

SEQ ID NO: 50665 - protein, 10 aa, synthetic construct
DPHRGDYVGL

SEQ ID NO: 50666 - protein, 10 aa, synthetic construct
DPHRGDQSTL

SEQ ID NO: 50667 - protein, 10 aa, synthetic construct
DPHRGDLLLS

SEQ ID NO: 50668 - protein, 10 aa, synthetic construct
DPSRGDHGVL

SEQ ID NO: 50669 - protein, 10 aa, synthetic construct
DPSRGDYVGL

SEQ ID NO: 50670 - protein, 10 aa, synthetic construct
DPSRGDQSTL

SEQ ID NO: 50671 - protein, 10 aa, synthetic construct
DPSRGDLLLS

SEQ ID NO: 50672 - protein, 10 aa, synthetic construct
DPTRGDHGVL

SEQ ID NO: 50673 - protein, 10 aa, synthetic construct
EPPRGDRGVV

SEQ ID NO: 50674 - protein, 10 aa, synthetic construct
DPTRGDYVGL

SEQ ID NO: 50675 - protein, 10 aa, synthetic construct
DPTRGDQSTL

SEQ ID NO: 50676 - protein, 10 aa, synthetic construct
DPTRGDLLLS

SEQ ID NO: 50677 - protein, 10 aa, synthetic construct
DPYRGDRGQI

SEQ ID NO: 50678 - protein, 10 aa, synthetic construct
DPYRGDRQGI

SEQ ID NO: 50679 - protein, 10 aa, synthetic construct
DPYRGDRSVV

SEQ ID NO: 50680 - protein, 10 aa, synthetic construct
DPYRGDRGVV

SEQ ID NO: 50681 - protein, 10 aa, synthetic construct
DPYRGDRSQT

SEQ ID NO: 50682 - protein, 10 aa, synthetic construct
DPNRGDRGQI

SEQ ID NO: 50683 - protein, 10 aa, synthetic construct
DPNRGDRQGI

SEQ ID NO: 50684 - protein, 10 aa, synthetic construct
EPPRGDRSQT

SEQ ID NO: 50685 - protein, 10 aa, synthetic construct
DPNRGDRSVV

SEQ ID NO: 50686 - protein, 10 aa, synthetic construct
DPNRGDRGVV

SEQ ID NO: 50687 - protein, 10 aa, synthetic construct
DPNRGDRSQT

SEQ ID NO: 50688 - protein, 10 aa, synthetic construct
DPQRGDHGVL

SEQ ID NO: 50689 - protein, 10 aa, synthetic construct
DPQRGDYVGL

SEQ ID NO: 50690 - protein, 10 aa, synthetic construct
DPQRGDQSTL

SEQ ID NO: 50691 - protein, 10 aa, synthetic construct
DPQRGDLLLS

SEQ ID NO: 50692 - protein, 10 aa, synthetic construct
DPDRGDHGVL

SEQ ID NO: 50693 - protein, 10 aa, synthetic construct
DPDRGDYVGL

SEQ ID NO: 50694 - protein, 10 aa, synthetic construct
DPDRGDQSTL

SEQ ID NO: 50695 - protein, 10 aa, synthetic construct
EPRRGDRGQI

SEQ ID NO: 50696 - protein, 10 aa, synthetic construct
DPDRGDLLLS

SEQ ID NO: 50697 - protein, 10 aa, synthetic construct
DPERGDHGVL

SEQ ID NO: 50698 - protein, 10 aa, synthetic construct
DPERGDYVGL

SEQ ID NO: 50699 - protein, 10 aa, synthetic construct
DPERGDQSTL

SEQ ID NO: 50700 - protein, 10 aa, synthetic construct
DPERGDLLLS

SEQ ID NO: 50701 - protein, 10 aa, synthetic construct
DLGRGDHVNL

SEQ ID NO: 50702 - protein, 10 aa, synthetic construct
DLGRGDRDYL

SEQ ID NO: 50703 - protein, 10 aa, synthetic construct
DLGRGDYSSV

SEQ ID NO: 50704 - protein, 10 aa, synthetic construct
DLGRGDLTVT

SEQ ID NO: 50705 - protein, 10 aa, synthetic construct
DLGRGDLIGR

SEQ ID NO: 50706 - protein, 10 aa, synthetic construct
EPRRGDRQGI

SEQ ID NO: 50707 - protein, 10 aa, synthetic construct
DLARGDHVNL

SEQ ID NO: 50708 - protein, 10 aa, synthetic construct
DLARGDRDYL

SEQ ID NO: 50709 - protein, 10 aa, synthetic construct
DLARGDYSSV

SEQ ID NO: 50710 - protein, 10 aa, synthetic construct
DLARGDLTVT

SEQ ID NO: 50711 - protein, 10 aa, synthetic construct
DLARGDLIGR

SEQ ID NO: 50712 - protein, 10 aa, synthetic construct
DLVRGDHGVL

SEQ ID NO: 50713 - protein, 10 aa, synthetic construct
DLVRGDHVNL

SEQ ID NO: 50714 - protein, 10 aa, synthetic construct
DLVRGDYVGL

SEQ ID NO: 50715 - protein, 10 aa, synthetic construct
DLVRGDYSSV

SEQ ID NO: 50716 - protein, 10 aa, synthetic construct
DLVRGDQSTL

SEQ ID NO: 50717 - protein, 10 aa, synthetic construct
EPRRGDRSVV

SEQ ID NO: 50718 - protein, 10 aa, synthetic construct
DLVRGDLLLS

SEQ ID NO: 50719 - protein, 10 aa, synthetic construct
DLPRGDHVNL

SEQ ID NO: 50720 - protein, 10 aa, synthetic construct
DLPRGDRDYL

SEQ ID NO: 50721 - protein, 10 aa, synthetic construct
DLPRGDYSSV

SEQ ID NO: 50722 - protein, 10 aa, synthetic construct
DLPRGDLTVT

SEQ ID NO: 50723 - protein, 10 aa, synthetic construct
DLPRGDLIGR

SEQ ID NO: 50724 - protein, 10 aa, synthetic construct
DLLRGDHGVL

SEQ ID NO: 50725 - protein, 10 aa, synthetic construct
DLLRGDHVNL

SEQ ID NO: 50726 - protein, 10 aa, synthetic construct
DLLRGDYVGL

SEQ ID NO: 50727 - protein, 10 aa, synthetic construct
DLLRGDYSSV

SEQ ID NO: 50728 - protein, 10 aa, synthetic construct
EPRRGDRGVV

SEQ ID NO: 50729 - protein, 10 aa, synthetic construct
DLLRGDQSTL

SEQ ID NO: 50730 - protein, 10 aa, synthetic construct
DLLRGDLLLS

SEQ ID NO: 50731 - protein, 10 aa, synthetic construct
DLIRGDRGQI

SEQ ID NO: 50732 - protein, 10 aa, synthetic construct
DLIRGDRQGI

SEQ ID NO: 50733 - protein, 10 aa, synthetic construct
DLIRGDRSVV

SEQ ID NO: 50734 - protein, 10 aa, synthetic construct
DLIRGDRGVV

SEQ ID NO: 50735 - protein, 10 aa, synthetic construct
DLIRGDYVGL

SEQ ID NO: 50736 - protein, 10 aa, synthetic construct
DLIRGDQSTL

SEQ ID NO: 50737 - protein, 10 aa, synthetic construct
DLIRGDRSQT

SEQ ID NO: 50738 - protein, 10 aa, synthetic construct
DLIRGDLLLS

SEQ ID NO: 50739 - protein, 10 aa, synthetic construct
TKNRGDYSSV

SEQ ID NO: 50740 - protein, 10 aa, synthetic construct
EPRRGDRSQT

SEQ ID NO: 50741 - protein, 10 aa, synthetic construct
DLMRGDRGQI

SEQ ID NO: 50742 - protein, 10 aa, synthetic construct
DLMRGDRQGI

SEQ ID NO: 50743 - protein, 10 aa, synthetic construct
DLMRGDRSVV

SEQ ID NO: 50744 - protein, 10 aa, synthetic construct
DLMRGDRGVV

SEQ ID NO: 50745 - protein, 10 aa, synthetic construct
DLMRGDYVGL

SEQ ID NO: 50746 - protein, 10 aa, synthetic construct
DLMRGDQSTL

SEQ ID NO: 50747 - protein, 10 aa, synthetic construct
DLMRGDRSQT

SEQ ID NO: 50748 - protein, 10 aa, synthetic construct
DLMRGDLLLS

SEQ ID NO: 50749 - protein, 10 aa, synthetic construct
DLWRGDHGVL

SEQ ID NO: 50750 - protein, 10 aa, synthetic construct
DLWRGDHVNL

SEQ ID NO: 50751 - protein, 10 aa, synthetic construct
ELGRGDRGQI

SEQ ID NO: 50752 - protein, 10 aa, synthetic construct
DLWRGDYVGL

SEQ ID NO: 50753 - protein, 10 aa, synthetic construct
DLWRGDYSSV

SEQ ID NO: 50754 - protein, 10 aa, synthetic construct
DLWRGDQSTL

SEQ ID NO: 50755 - protein, 10 aa, synthetic construct
DLWRGDLLLS

SEQ ID NO: 50756 - protein, 10 aa, synthetic construct
DLFRGDRGQI

SEQ ID NO: 50757 - protein, 10 aa, synthetic construct
DLFRGDRQGI

SEQ ID NO: 50758 - protein, 10 aa, synthetic construct
DLFRGDRSVV

SEQ ID NO: 50759 - protein, 10 aa, synthetic construct
DLFRGDRGVV

SEQ ID NO: 50760 - protein, 10 aa, synthetic construct
DLFRGDYVGL

SEQ ID NO: 50761 - protein, 10 aa, synthetic construct
DLFRGDQSTL

SEQ ID NO: 50762 - protein, 10 aa, synthetic construct
ELGRGDRQGI

SEQ ID NO: 50763 - protein, 10 aa, synthetic construct
DLFRGDRSQT

SEQ ID NO: 50764 - protein, 10 aa, synthetic construct
DLFRGDLLLS

SEQ ID NO: 50765 - protein, 10 aa, synthetic construct
DLKRGDRGQI

SEQ ID NO: 50766 - protein, 10 aa, synthetic construct
DLKRGDRQGI

SEQ ID NO: 50767 - protein, 10 aa, synthetic construct
DLKRGDRSVV

SEQ ID NO: 50768 - protein, 10 aa, synthetic construct
DLKRGDRGVV

SEQ ID NO: 50769 - protein, 10 aa, synthetic construct
DLKRGDYVGL

SEQ ID NO: 50770 - protein, 10 aa, synthetic construct
DLKRGDQSTL

SEQ ID NO: 50771 - protein, 10 aa, synthetic construct
DLKRGDRSQT

SEQ ID NO: 50772 - protein, 10 aa, synthetic construct
DLKRGDLLLS

SEQ ID NO: 50773 - protein, 10 aa, synthetic construct
ELGRGDRSVV

SEQ ID NO: 50774 - protein, 10 aa, synthetic construct
DLRRGDHVNL

SEQ ID NO: 50775 - protein, 10 aa, synthetic construct
DLRRGDRDYL

SEQ ID NO: 50776 - protein, 10 aa, synthetic construct
DLRRGDYSSV

SEQ ID NO: 50777 - protein, 10 aa, synthetic construct
DLRRGDLTVT

SEQ ID NO: 50778 - protein, 10 aa, synthetic construct
DLRRGDLIGR

SEQ ID NO: 50779 - protein, 10 aa, synthetic construct
DLHRGDHGVL

SEQ ID NO: 50780 - protein, 10 aa, synthetic construct
DLHRGDHVNL

SEQ ID NO: 50781 - protein, 10 aa, synthetic construct
DLHRGDYVGL

SEQ ID NO: 50782 - protein, 10 aa, synthetic construct
DLHRGDYSSV

SEQ ID NO: 50783 - protein, 10 aa, synthetic construct
DLHRGDQSTL

SEQ ID NO: 50784 - protein, 10 aa, synthetic construct
ELGRGDRGVV

SEQ ID NO: 50785 - protein, 10 aa, synthetic construct
DLHRGDLLLS

SEQ ID NO: 50786 - protein, 10 aa, synthetic construct
DLSRGDHGVL

SEQ ID NO: 50787 - protein, 10 aa, synthetic construct
DLSRGDHVNL

SEQ ID NO: 50788 - protein, 10 aa, synthetic construct
DLSRGDYVGL

SEQ ID NO: 50789 - protein, 10 aa, synthetic construct
DLSRGDYSSV

SEQ ID NO: 50790 - protein, 10 aa, synthetic construct
DLSRGDQSTL

SEQ ID NO: 50791 - protein, 10 aa, synthetic construct
DLSRGDLLLS

SEQ ID NO: 50792 - protein, 10 aa, synthetic construct
DLTRGDHGVL

SEQ ID NO: 50793 - protein, 10 aa, synthetic construct
DLTRGDHVNL

SEQ ID NO: 50794 - protein, 10 aa, synthetic construct
DLTRGDYVGL

SEQ ID NO: 50795 - protein, 10 aa, synthetic construct
ELGRGDRSQT

SEQ ID NO: 50796 - protein, 10 aa, synthetic construct
DLTRGDYSSV

SEQ ID NO: 50797 - protein, 10 aa, synthetic construct
DLTRGDQSTL

SEQ ID NO: 50798 - protein, 10 aa, synthetic construct
DLTRGDLLLS

SEQ ID NO: 50799 - protein, 10 aa, synthetic construct
DLYRGDRGQI

SEQ ID NO: 50800 - protein, 10 aa, synthetic construct
DLYRGDRQGI

SEQ ID NO: 50801 - protein, 10 aa, synthetic construct
DLYRGDRSVV

SEQ ID NO: 50802 - protein, 10 aa, synthetic construct
DLYRGDRGVV

SEQ ID NO: 50803 - protein, 10 aa, synthetic construct
DLYRGDYVGL

SEQ ID NO: 50804 - protein, 10 aa, synthetic construct
DLYRGDQSTL

SEQ ID NO: 50805 - protein, 10 aa, synthetic construct
DLYRGDRSQT

SEQ ID NO: 50806 - protein, 10 aa, synthetic construct
ELARGDRGQI

SEQ ID NO: 50807 - protein, 10 aa, synthetic construct
DLYRGDLLLS

SEQ ID NO: 50808 - protein, 10 aa, synthetic construct
DLNRGDRGQI

SEQ ID NO: 50809 - protein, 10 aa, synthetic construct
DLNRGDRQGI

SEQ ID NO: 50810 - protein, 10 aa, synthetic construct
DLNRGDRSVV

SEQ ID NO: 50811 - protein, 10 aa, synthetic construct
DLNRGDRGVV

SEQ ID NO: 50812 - protein, 10 aa, synthetic construct
DLNRGDYVGL

SEQ ID NO: 50813 - protein, 10 aa, synthetic construct
DLNRGDQSTL

SEQ ID NO: 50814 - protein, 10 aa, synthetic construct
DLNRGDRSQT

SEQ ID NO: 50815 - protein, 10 aa, synthetic construct
DLNRGDLLLS

SEQ ID NO: 50816 - protein, 10 aa, synthetic construct
DLQRGDHGVL

SEQ ID NO: 50817 - protein, 10 aa, synthetic construct
ELARGDRQGI

SEQ ID NO: 50818 - protein, 10 aa, synthetic construct
DLQRGDHVNL

SEQ ID NO: 50819 - protein, 10 aa, synthetic construct
DLQRGDYVGL

SEQ ID NO: 50820 - protein, 10 aa, synthetic construct
DLQRGDYSSV

SEQ ID NO: 50821 - protein, 10 aa, synthetic construct
DLQRGDQSTL

SEQ ID NO: 50822 - protein, 10 aa, synthetic construct
DLQRGDLLLS

SEQ ID NO: 50823 - protein, 10 aa, synthetic construct
DLDRGDHGVL

SEQ ID NO: 50824 - protein, 10 aa, synthetic construct
DLDRGDHVNL

SEQ ID NO: 50825 - protein, 10 aa, synthetic construct
DLDRGDYVGL

SEQ ID NO: 50826 - protein, 10 aa, synthetic construct
DLDRGDYSSV

SEQ ID NO: 50827 - protein, 10 aa, synthetic construct
DLDRGDQSTL

SEQ ID NO: 50828 - protein, 10 aa, synthetic construct
ELARGDRSVV

SEQ ID NO: 50829 - protein, 10 aa, synthetic construct
DLDRGDLLLS

SEQ ID NO: 50830 - protein, 10 aa, synthetic construct
DLERGDHGVL

SEQ ID NO: 50831 - protein, 10 aa, synthetic construct
DLERGDHVNL

SEQ ID NO: 50832 - protein, 10 aa, synthetic construct
DLERGDYVGL

SEQ ID NO: 50833 - protein, 10 aa, synthetic construct
DLERGDYSSV

SEQ ID NO: 50834 - protein, 10 aa, synthetic construct
DLERGDQSTL

SEQ ID NO: 50835 - protein, 10 aa, synthetic construct
DLERGDLLLS

SEQ ID NO: 50836 - protein, 10 aa, synthetic construct
DIGRGDRGQI

SEQ ID NO: 50837 - protein, 10 aa, synthetic construct
DIGRGDRQGI

SEQ ID NO: 50838 - protein, 10 aa, synthetic construct
DIGRGDRSVV

SEQ ID NO: 50839 - protein, 10 aa, synthetic construct
ELARGDRGVV

SEQ ID NO: 50840 - protein, 10 aa, synthetic construct
DIGRGDRGVV

SEQ ID NO: 50841 - protein, 10 aa, synthetic construct
DIGRGDRSQT

SEQ ID NO: 50842 - protein, 10 aa, synthetic construct
DIARGDRGQI

SEQ ID NO: 50843 - protein, 10 aa, synthetic construct
DIARGDRQGI

SEQ ID NO: 50844 - protein, 10 aa, synthetic construct
DIARGDRSVV

SEQ ID NO: 50845 - protein, 10 aa, synthetic construct
DIARGDRGVV

SEQ ID NO: 50846 - protein, 10 aa, synthetic construct
DIARGDRSQT

SEQ ID NO: 50847 - protein, 10 aa, synthetic construct
DIPRGDRGQI

SEQ ID NO: 50848 - protein, 10 aa, synthetic construct
DIPRGDRQGI

SEQ ID NO: 50849 - protein, 10 aa, synthetic construct
DIPRGDRSVV

SEQ ID NO: 50850 - protein, 10 aa, synthetic construct
TKNRGDLTVT

SEQ ID NO: 50851 - protein, 10 aa, synthetic construct
ELARGDRSQT

SEQ ID NO: 50852 - protein, 10 aa, synthetic construct
DIPRGDRGVV

SEQ ID NO: 50853 - protein, 10 aa, synthetic construct
DIPRGDRSQT

SEQ ID NO: 50854 - protein, 10 aa, synthetic construct
DIRRGDRGQI

SEQ ID NO: 50855 - protein, 10 aa, synthetic construct
DIRRGDRQGI

SEQ ID NO: 50856 - protein, 10 aa, synthetic construct
DIRRGDRSVV

SEQ ID NO: 50857 - protein, 10 aa, synthetic construct
DIRRGDRGVV

SEQ ID NO: 50858 - protein, 10 aa, synthetic construct
DIRRGDRSQT

SEQ ID NO: 50859 - protein, 10 aa, synthetic construct
DMGRGDHGVL

SEQ ID NO: 50860 - protein, 10 aa, synthetic construct
DMGRGDRGQI

SEQ ID NO: 50861 - protein, 10 aa, synthetic construct
DMGRGDRQGI

SEQ ID NO: 50862 - protein, 10 aa, synthetic construct
ELPRGDRGQI

SEQ ID NO: 50863 - protein, 10 aa, synthetic construct
DMGRGDRSVV

SEQ ID NO: 50864 - protein, 10 aa, synthetic construct
DMGRGDLTVT

SEQ ID NO: 50865 - protein, 10 aa, synthetic construct
DMGRGDLIGR

SEQ ID NO: 50866 - protein, 10 aa, synthetic construct
DMGRGDRSQT

SEQ ID NO: 50867 - protein, 10 aa, synthetic construct
DMGRGDLLLS

SEQ ID NO: 50868 - protein, 10 aa, synthetic construct
DMARGDHGVL

SEQ ID NO: 50869 - protein, 10 aa, synthetic construct
DMARGDRGQI

SEQ ID NO: 50870 - protein, 10 aa, synthetic construct
DMARGDRQGI

SEQ ID NO: 50871 - protein, 10 aa, synthetic construct
DMARGDRSVV

SEQ ID NO: 50872 - protein, 10 aa, synthetic construct
DMARGDLTVT

SEQ ID NO: 50873 - protein, 10 aa, synthetic construct
ELPRGDRQGI

SEQ ID NO: 50874 - protein, 10 aa, synthetic construct
DMARGDLIGR

SEQ ID NO: 50875 - protein, 10 aa, synthetic construct
DMARGDRSQT

SEQ ID NO: 50876 - protein, 10 aa, synthetic construct
DMARGDLLLS

SEQ ID NO: 50877 - protein, 10 aa, synthetic construct
DMVRGDHGVL

SEQ ID NO: 50878 - protein, 10 aa, synthetic construct
DMVRGDRGQI

SEQ ID NO: 50879 - protein, 10 aa, synthetic construct
DMVRGDRQGI

SEQ ID NO: 50880 - protein, 10 aa, synthetic construct
DMVRGDRSVV

SEQ ID NO: 50881 - protein, 10 aa, synthetic construct
DMVRGDLIGR

SEQ ID NO: 50882 - protein, 10 aa, synthetic construct
DMVRGDRSQT

SEQ ID NO: 50883 - protein, 10 aa, synthetic construct
DMPRGDHGVL

SEQ ID NO: 50884 - protein, 10 aa, synthetic construct
ELPRGDRSVV

SEQ ID NO: 50885 - protein, 10 aa, synthetic construct
DMPRGDRGQI

SEQ ID NO: 50886 - protein, 10 aa, synthetic construct
DMPRGDRQGI

SEQ ID NO: 50887 - protein, 10 aa, synthetic construct
DMPRGDRSVV

SEQ ID NO: 50888 - protein, 10 aa, synthetic construct
DMPRGDLTVT

SEQ ID NO: 50889 - protein, 10 aa, synthetic construct
DMPRGDLIGR

SEQ ID NO: 50890 - protein, 10 aa, synthetic construct
DMPRGDRSQT

SEQ ID NO: 50891 - protein, 10 aa, synthetic construct
DMPRGDLLLS

SEQ ID NO: 50892 - protein, 10 aa, synthetic construct
DMLRGDHGVL

SEQ ID NO: 50893 - protein, 10 aa, synthetic construct
DMLRGDRGQI

SEQ ID NO: 50894 - protein, 10 aa, synthetic construct
DMLRGDRQGI

SEQ ID NO: 50895 - protein, 10 aa, synthetic construct
ELPRGDRGVV

SEQ ID NO: 50896 - protein, 10 aa, synthetic construct
DMLRGDRSVV

SEQ ID NO: 50897 - protein, 10 aa, synthetic construct
DMLRGDLIGR

SEQ ID NO: 50898 - protein, 10 aa, synthetic construct
DMLRGDRSQT

SEQ ID NO: 50899 - protein, 10 aa, synthetic construct
DMMRGDRSVV

SEQ ID NO: 50900 - protein, 10 aa, synthetic construct
DMMRGDRSQT

SEQ ID NO: 50901 - protein, 10 aa, synthetic construct
DMWRGDRGQI

SEQ ID NO: 50902 - protein, 10 aa, synthetic construct
DMWRGDRQGI

SEQ ID NO: 50903 - protein, 10 aa, synthetic construct
DMWRGDRSVV

SEQ ID NO: 50904 - protein, 10 aa, synthetic construct
DMWRGDRGVV

SEQ ID NO: 50905 - protein, 10 aa, synthetic construct
DMWRGDYVGL

SEQ ID NO: 50906 - protein, 10 aa, synthetic construct
ELPRGDRSQT

SEQ ID NO: 50907 - protein, 10 aa, synthetic construct
DMWRGDQSTL

SEQ ID NO: 50908 - protein, 10 aa, synthetic construct
DMWRGDRSQT

SEQ ID NO: 50909 - protein, 10 aa, synthetic construct
DMWRGDLLLS

SEQ ID NO: 50910 - protein, 10 aa, synthetic construct
DMRRGDHGVL

SEQ ID NO: 50911 - protein, 10 aa, synthetic construct
DMRRGDRGQI

SEQ ID NO: 50912 - protein, 10 aa, synthetic construct
DMRRGDRQGI

SEQ ID NO: 50913 - protein, 10 aa, synthetic construct
DMRRGDRSVV

SEQ ID NO: 50914 - protein, 10 aa, synthetic construct
DMRRGDLTVT

SEQ ID NO: 50915 - protein, 10 aa, synthetic construct
DMRRGDLIGR

SEQ ID NO: 50916 - protein, 10 aa, synthetic construct
DMRRGDRSQT

SEQ ID NO: 50917 - protein, 10 aa, synthetic construct
ELRRGDRGQI

SEQ ID NO: 50918 - protein, 10 aa, synthetic construct
DMRRGDLLLS

SEQ ID NO: 50919 - protein, 10 aa, synthetic construct
DMHRGDRGVV

SEQ ID NO: 50920 - protein, 10 aa, synthetic construct
DMHRGDLTVT

SEQ ID NO: 50921 - protein, 10 aa, synthetic construct
DMHRGDLLLS

SEQ ID NO: 50922 - protein, 10 aa, synthetic construct
DMSRGDHGVL

SEQ ID NO: 50923 - protein, 10 aa, synthetic construct
DMSRGDRGQI

SEQ ID NO: 50924 - protein, 10 aa, synthetic construct
DMSRGDRQGI

SEQ ID NO: 50925 - protein, 10 aa, synthetic construct
DMSRGDRSVV

SEQ ID NO: 50926 - protein, 10 aa, synthetic construct
DMSRGDLIGR

SEQ ID NO: 50927 - protein, 10 aa, synthetic construct
DMSRGDRSQT

SEQ ID NO: 50928 - protein, 10 aa, synthetic construct
ELRRGDRQGI

SEQ ID NO: 50929 - protein, 10 aa, synthetic construct
DMTRGDRGVV

SEQ ID NO: 50930 - protein, 10 aa, synthetic construct
DMTRGDLTVT

SEQ ID NO: 50931 - protein, 10 aa, synthetic construct
DMTRGDLLLS

SEQ ID NO: 50932 - protein, 10 aa, synthetic construct
DMQRGDRGVV

SEQ ID NO: 50933 - protein, 10 aa, synthetic construct
DMQRGDLTVT

SEQ ID NO: 50934 - protein, 10 aa, synthetic construct
DMQRGDLLLS

SEQ ID NO: 50935 - protein, 10 aa, synthetic construct
DMDRGDRGVV

SEQ ID NO: 50936 - protein, 10 aa, synthetic construct
DMDRGDLTVT

SEQ ID NO: 50937 - protein, 10 aa, synthetic construct
DMDRGDLLLS

SEQ ID NO: 50938 - protein, 10 aa, synthetic construct
DMERGDRGVV

SEQ ID NO: 50939 - protein, 10 aa, synthetic construct
ELRRGDRSVV

SEQ ID NO: 50940 - protein, 10 aa, synthetic construct
DMERGDLTVT

SEQ ID NO: 50941 - protein, 10 aa, synthetic construct
DMERGDLLLS

SEQ ID NO: 50942 - protein, 10 aa, synthetic construct
DWGRGDRDYL

SEQ ID NO: 50943 - protein, 10 aa, synthetic construct
DWGRGDYVGL

SEQ ID NO: 50944 - protein, 10 aa, synthetic construct
DWGRGDQSTL

SEQ ID NO: 50945 - protein, 10 aa, synthetic construct
DWARGDRDYL

SEQ ID NO: 50946 - protein, 10 aa, synthetic construct
DWARGDYVGL

SEQ ID NO: 50947 - protein, 10 aa, synthetic construct
DWARGDQSTL

SEQ ID NO: 50948 - protein, 10 aa, synthetic construct
DWVRGDRDYL

SEQ ID NO: 50949 - protein, 10 aa, synthetic construct
DWVRGDYVGL

SEQ ID NO: 50950 - protein, 10 aa, synthetic construct
ELRRGDRGVV

SEQ ID NO: 50951 - protein, 10 aa, synthetic construct
DWVRGDYSSV

SEQ ID NO: 50952 - protein, 10 aa, synthetic construct
DWVRGDYTSV

SEQ ID NO: 50953 - protein, 10 aa, synthetic construct
DWVRGDQSTL

SEQ ID NO: 50954 - protein, 10 aa, synthetic construct
DWPRGDRDYL

SEQ ID NO: 50955 - protein, 10 aa, synthetic construct
DWPRGDYVGL

SEQ ID NO: 50956 - protein, 10 aa, synthetic construct
DWPRGDQSTL

SEQ ID NO: 50957 - protein, 10 aa, synthetic construct
DWLRGDRDYL

SEQ ID NO: 50958 - protein, 10 aa, synthetic construct
DWLRGDYVGL

SEQ ID NO: 50959 - protein, 10 aa, synthetic construct
DWLRGDYSSV

SEQ ID NO: 50960 - protein, 10 aa, synthetic construct
DWLRGDYTSV

SEQ ID NO: 50961 - protein, 10 aa, synthetic construct
EKKRGDHVNL

SEQ ID NO: 50962 - protein, 10 aa, synthetic construct
ELRRGDRSQT

SEQ ID NO: 50963 - protein, 10 aa, synthetic construct
DWLRGDQSTL

SEQ ID NO: 50964 - protein, 10 aa, synthetic construct
DWIRGDRGVV

SEQ ID NO: 50965 - protein, 10 aa, synthetic construct
DWIRGDLTVT

SEQ ID NO: 50966 - protein, 10 aa, synthetic construct
DWIRGDLLLS

SEQ ID NO: 50967 - protein, 10 aa, synthetic construct
DWMRGDRGQI

SEQ ID NO: 50968 - protein, 10 aa, synthetic construct
DWMRGDRQGI

SEQ ID NO: 50969 - protein, 10 aa, synthetic construct
DWMRGDRSVV

SEQ ID NO: 50970 - protein, 10 aa, synthetic construct
DWMRGDRGVV

SEQ ID NO: 50971 - protein, 10 aa, synthetic construct
DWMRGDYVGL

SEQ ID NO: 50972 - protein, 10 aa, synthetic construct
DWMRGDQSTL

SEQ ID NO: 50973 - protein, 10 aa, synthetic construct
EWGRGDRGVV

SEQ ID NO: 50974 - protein, 10 aa, synthetic construct
DWMRGDRSQT

SEQ ID NO: 50975 - protein, 10 aa, synthetic construct
DWMRGDLLLS

SEQ ID NO: 50976 - protein, 10 aa, synthetic construct
DWWRGDHGVL

SEQ ID NO: 50977 - protein, 10 aa, synthetic construct
DWWRGDHVNL

SEQ ID NO: 50978 - protein, 10 aa, synthetic construct
DWWRGDYVGL

SEQ ID NO: 50979 - protein, 10 aa, synthetic construct
DWWRGDYSSV

SEQ ID NO: 50980 - protein, 10 aa, synthetic construct
DWWRGDQSTL

SEQ ID NO: 50981 - protein, 10 aa, synthetic construct
DWWRGDLLLS

SEQ ID NO: 50982 - protein, 10 aa, synthetic construct
DWFRGDRGVV

SEQ ID NO: 50983 - protein, 10 aa, synthetic construct
DWFRGDLTVT

SEQ ID NO: 50984 - protein, 10 aa, synthetic construct
EWARGDRGVV

SEQ ID NO: 50985 - protein, 10 aa, synthetic construct
DWFRGDLLLS

SEQ ID NO: 50986 - protein, 10 aa, synthetic construct
DWKRGDRGVV

SEQ ID NO: 50987 - protein, 10 aa, synthetic construct
DWKRGDLTVT

SEQ ID NO: 50988 - protein, 10 aa, synthetic construct
DWKRGDLLLS

SEQ ID NO: 50989 - protein, 10 aa, synthetic construct
DWRRGDRDYL

SEQ ID NO: 50990 - protein, 10 aa, synthetic construct
DWRRGDYVGL

SEQ ID NO: 50991 - protein, 10 aa, synthetic construct
DWRRGDQSTL

SEQ ID NO: 50992 - protein, 10 aa, synthetic construct
DWHRGDHGVL

SEQ ID NO: 50993 - protein, 10 aa, synthetic construct
DWHRGDRGQI

SEQ ID NO: 50994 - protein, 10 aa, synthetic construct
DWHRGDRQGI

SEQ ID NO: 50995 - protein, 10 aa, synthetic construct
EWVRGDRGVV

SEQ ID NO: 50996 - protein, 10 aa, synthetic construct
DWHRGDRSVV

SEQ ID NO: 50997 - protein, 10 aa, synthetic construct
DWHRGDLTVT

SEQ ID NO: 50998 - protein, 10 aa, synthetic construct
DWHRGDLIGR

SEQ ID NO: 50999 - protein, 10 aa, synthetic construct
DWHRGDRSQT

SEQ ID NO: 51000 - protein, 10 aa, synthetic construct
DWHRGDLLLS

SEQ ID NO: 51001 - protein, 10 aa, synthetic construct
DWSRGDRDYL

SEQ ID NO: 51002 - protein, 10 aa, synthetic construct
DWSRGDYVGL

SEQ ID NO: 51003 - protein, 10 aa, synthetic construct
DWSRGDYSSV

SEQ ID NO: 51004 - protein, 10 aa, synthetic construct
DWSRGDYTSV

SEQ ID NO: 51005 - protein, 10 aa, synthetic construct
DWSRGDQSTL

SEQ ID NO: 51006 - protein, 10 aa, synthetic construct
EWPRGDRGVV

SEQ ID NO: 51007 - protein, 10 aa, synthetic construct
DWTRGDHGVL

SEQ ID NO: 51008 - protein, 10 aa, synthetic construct
DWTRGDRGQI

SEQ ID NO: 51009 - protein, 10 aa, synthetic construct
DWTRGDRQGI

SEQ ID NO: 51010 - protein, 10 aa, synthetic construct
DWTRGDRSVV

SEQ ID NO: 51011 - protein, 10 aa, synthetic construct
DWTRGDLTVT

SEQ ID NO: 51012 - protein, 10 aa, synthetic construct
DWTRGDLIGR

SEQ ID NO: 51013 - protein, 10 aa, synthetic construct
DWTRGDRSQT

SEQ ID NO: 51014 - protein, 10 aa, synthetic construct
DWTRGDLLLS

SEQ ID NO: 51015 - protein, 10 aa, synthetic construct
DWYRGDRGVV

SEQ ID NO: 51016 - protein, 10 aa, synthetic construct
DWYRGDLTVT

SEQ ID NO: 51017 - protein, 10 aa, synthetic construct
EWLRGDRGVV

SEQ ID NO: 51018 - protein, 10 aa, synthetic construct
DWYRGDLLLS

SEQ ID NO: 51019 - protein, 10 aa, synthetic construct
DWNRGDRGVV

SEQ ID NO: 51020 - protein, 10 aa, synthetic construct
DWNRGDLTVT

SEQ ID NO: 51021 - protein, 10 aa, synthetic construct
DWNRGDLLLS

SEQ ID NO: 51022 - protein, 10 aa, synthetic construct
DWQRGDHGVL

SEQ ID NO: 51023 - protein, 10 aa, synthetic construct
DWQRGDRGQI

SEQ ID NO: 51024 - protein, 10 aa, synthetic construct
DWQRGDRQGI

SEQ ID NO: 51025 - protein, 10 aa, synthetic construct
DWQRGDRSVV

SEQ ID NO: 51026 - protein, 10 aa, synthetic construct
DWQRGDLTVT

SEQ ID NO: 51027 - protein, 10 aa, synthetic construct
DWQRGDLIGR

SEQ ID NO: 51028 - protein, 10 aa, synthetic construct
EWRRGDRGVV

SEQ ID NO: 51029 - protein, 10 aa, synthetic construct
DWQRGDRSQT

SEQ ID NO: 51030 - protein, 10 aa, synthetic construct
DWQRGDLLLS

SEQ ID NO: 51031 - protein, 10 aa, synthetic construct
DWDRGDHGVL

SEQ ID NO: 51032 - protein, 10 aa, synthetic construct
DWDRGDRGQI

SEQ ID NO: 51033 - protein, 10 aa, synthetic construct
DWDRGDRQGI

SEQ ID NO: 51034 - protein, 10 aa, synthetic construct
DWDRGDRSVV

SEQ ID NO: 51035 - protein, 10 aa, synthetic construct
DWDRGDLTVT

SEQ ID NO: 51036 - protein, 10 aa, synthetic construct
DWDRGDLIGR

SEQ ID NO: 51037 - protein, 10 aa, synthetic construct
DWDRGDRSQT

SEQ ID NO: 51038 - protein, 10 aa, synthetic construct
DWDRGDLLLS

SEQ ID NO: 51039 - protein, 10 aa, synthetic construct
EWSRGDRGVV

SEQ ID NO: 51040 - protein, 10 aa, synthetic construct
DWERGDHGVL

SEQ ID NO: 51041 - protein, 10 aa, synthetic construct
DWERGDRGQI

SEQ ID NO: 51042 - protein, 10 aa, synthetic construct
DWERGDRQGI

SEQ ID NO: 51043 - protein, 10 aa, synthetic construct
DWERGDRSVV

SEQ ID NO: 51044 - protein, 10 aa, synthetic construct
DWERGDLTVT

SEQ ID NO: 51045 - protein, 10 aa, synthetic construct
DWERGDLIGR

SEQ ID NO: 51046 - protein, 10 aa, synthetic construct
DWERGDRSQT

SEQ ID NO: 51047 - protein, 10 aa, synthetic construct
DWERGDLLLS

SEQ ID NO: 51048 - protein, 10 aa, synthetic construct
DFGRGDRGQI

SEQ ID NO: 51049 - protein, 10 aa, synthetic construct
DFGRGDRQGI

SEQ ID NO: 51050 - protein, 10 aa, synthetic construct
ERGRGDRGQI

SEQ ID NO: 51051 - protein, 10 aa, synthetic construct
DFGRGDRSVV

SEQ ID NO: 51052 - protein, 10 aa, synthetic construct
DFGRGDRGVV

SEQ ID NO: 51053 - protein, 10 aa, synthetic construct
DFGRGDRSQT

SEQ ID NO: 51054 - protein, 10 aa, synthetic construct
DFARGDRGQI

SEQ ID NO: 51055 - protein, 10 aa, synthetic construct
DFARGDRQGI

SEQ ID NO: 51056 - protein, 10 aa, synthetic construct
DFARGDRSVV

SEQ ID NO: 51057 - protein, 10 aa, synthetic construct
DFARGDRGVV

SEQ ID NO: 51058 - protein, 10 aa, synthetic construct
DFARGDRSQT

SEQ ID NO: 51059 - protein, 10 aa, synthetic construct
DFPRGDRGQI

SEQ ID NO: 51060 - protein, 10 aa, synthetic construct
DFPRGDRQGI

SEQ ID NO: 51061 - protein, 10 aa, synthetic construct
ERGRGDRQGI

SEQ ID NO: 51062 - protein, 10 aa, synthetic construct
DFPRGDRSVV

SEQ ID NO: 51063 - protein, 10 aa, synthetic construct
DFPRGDRGVV

SEQ ID NO: 51064 - protein, 10 aa, synthetic construct
DFPRGDRSQT

SEQ ID NO: 51065 - protein, 10 aa, synthetic construct
DFRRGDRGQI

SEQ ID NO: 51066 - protein, 10 aa, synthetic construct
DFRRGDRQGI

SEQ ID NO: 51067 - protein, 10 aa, synthetic construct
DFRRGDRSVV

SEQ ID NO: 51068 - protein, 10 aa, synthetic construct
DFRRGDRGVV

SEQ ID NO: 51069 - protein, 10 aa, synthetic construct
DFRRGDRSQT

SEQ ID NO: 51070 - protein, 10 aa, synthetic construct
DKGRGDRGQI

SEQ ID NO: 51071 - protein, 10 aa, synthetic construct
DKGRGDRQGI

SEQ ID NO: 51072 - protein, 10 aa, synthetic construct
EKKRGDRDYL

SEQ ID NO: 51073 - protein, 10 aa, synthetic construct
ERGRGDRSVV

SEQ ID NO: 51074 - protein, 10 aa, synthetic construct
DKGRGDRSVV

SEQ ID NO: 51075 - protein, 10 aa, synthetic construct
DKGRGDRGVV

SEQ ID NO: 51076 - protein, 10 aa, synthetic construct
DKGRGDRSQT

SEQ ID NO: 51077 - protein, 10 aa, synthetic construct
DKARGDRGQI

SEQ ID NO: 51078 - protein, 10 aa, synthetic construct
DKARGDRQGI

SEQ ID NO: 51079 - protein, 10 aa, synthetic construct
DKARGDRSVV

SEQ ID NO: 51080 - protein, 10 aa, synthetic construct
DKARGDRGVV

SEQ ID NO: 51081 - protein, 10 aa, synthetic construct
DKARGDRSQT

SEQ ID NO: 51082 - protein, 10 aa, synthetic construct
DKPRGDRGQI

SEQ ID NO: 51083 - protein, 10 aa, synthetic construct
DKPRGDRQGI

SEQ ID NO: 51084 - protein, 10 aa, synthetic construct
ERGRGDRGVV

SEQ ID NO: 51085 - protein, 10 aa, synthetic construct
DKPRGDRSVV

SEQ ID NO: 51086 - protein, 10 aa, synthetic construct
DKPRGDRGVV

SEQ ID NO: 51087 - protein, 10 aa, synthetic construct
DKPRGDRSQT

SEQ ID NO: 51088 - protein, 10 aa, synthetic construct
DKRRGDRGQI

SEQ ID NO: 51089 - protein, 10 aa, synthetic construct
DKRRGDRQGI

SEQ ID NO: 51090 - protein, 10 aa, synthetic construct
DKRRGDRSVV

SEQ ID NO: 51091 - protein, 10 aa, synthetic construct
DKRRGDRGVV

SEQ ID NO: 51092 - protein, 10 aa, synthetic construct
DKRRGDRSQT

SEQ ID NO: 51093 - protein, 10 aa, synthetic construct
DRGRGDHVNL

SEQ ID NO: 51094 - protein, 10 aa, synthetic construct
DRGRGDRDYL

SEQ ID NO: 51095 - protein, 10 aa, synthetic construct
ERGRGDRSQT

SEQ ID NO: 51096 - protein, 10 aa, synthetic construct
DRGRGDYSSV

SEQ ID NO: 51097 - protein, 10 aa, synthetic construct
DRGRGDLTVT

SEQ ID NO: 51098 - protein, 10 aa, synthetic construct
DRGRGDLIGR

SEQ ID NO: 51099 - protein, 10 aa, synthetic construct
DRARGDHVNL

SEQ ID NO: 51100 - protein, 10 aa, synthetic construct
DRARGDRDYL

SEQ ID NO: 51101 - protein, 10 aa, synthetic construct
DRARGDYSSV

SEQ ID NO: 51102 - protein, 10 aa, synthetic construct
DRARGDLTVT

SEQ ID NO: 51103 - protein, 10 aa, synthetic construct
DRARGDLIGR

SEQ ID NO: 51104 - protein, 10 aa, synthetic construct
DRVRGDHGVL

SEQ ID NO: 51105 - protein, 10 aa, synthetic construct
DRVRGDYVGL

SEQ ID NO: 51106 - protein, 10 aa, synthetic construct
ERARGDRGQI

SEQ ID NO: 51107 - protein, 10 aa, synthetic construct
DRVRGDQSTL

SEQ ID NO: 51108 - protein, 10 aa, synthetic construct
DRVRGDLLLS

SEQ ID NO: 51109 - protein, 10 aa, synthetic construct
DRPRGDHVNL

SEQ ID NO: 51110 - protein, 10 aa, synthetic construct
DRPRGDRDYL

SEQ ID NO: 51111 - protein, 10 aa, synthetic construct
DRPRGDYSSV

SEQ ID NO: 51112 - protein, 10 aa, synthetic construct
DRPRGDLTVT

SEQ ID NO: 51113 - protein, 10 aa, synthetic construct
DRPRGDLIGR

SEQ ID NO: 51114 - protein, 10 aa, synthetic construct
DRLRGDHGVL

SEQ ID NO: 51115 - protein, 10 aa, synthetic construct
DRLRGDYVGL

SEQ ID NO: 51116 - protein, 10 aa, synthetic construct
DRLRGDQSTL

SEQ ID NO: 51117 - protein, 10 aa, synthetic construct
ERARGDRQGI

SEQ ID NO: 51118 - protein, 10 aa, synthetic construct
DRLRGDLLLS

SEQ ID NO: 51119 - protein, 10 aa, synthetic construct
DRIRGDRGQI

SEQ ID NO: 51120 - protein, 10 aa, synthetic construct
DRIRGDRQGI

SEQ ID NO: 51121 - protein, 10 aa, synthetic construct
DRIRGDRSVV

SEQ ID NO: 51122 - protein, 10 aa, synthetic construct
DRIRGDRGVV

SEQ ID NO: 51123 - protein, 10 aa, synthetic construct
DRIRGDRSQT

SEQ ID NO: 51124 - protein, 10 aa, synthetic construct
DRMRGDRGQI

SEQ ID NO: 51125 - protein, 10 aa, synthetic construct
DRMRGDRQGI

SEQ ID NO: 51126 - protein, 10 aa, synthetic construct
DRMRGDRSVV

SEQ ID NO: 51127 - protein, 10 aa, synthetic construct
DRMRGDRGVV

SEQ ID NO: 51128 - protein, 10 aa, synthetic construct
ERARGDRSVV

SEQ ID NO: 51129 - protein, 10 aa, synthetic construct
DRMRGDRSQT

SEQ ID NO: 51130 - protein, 10 aa, synthetic construct
DRWRGDHGVL

SEQ ID NO: 51131 - protein, 10 aa, synthetic construct
DRWRGDYVGL

SEQ ID NO: 51132 - protein, 10 aa, synthetic construct
DRWRGDQSTL

SEQ ID NO: 51133 - protein, 10 aa, synthetic construct
DRWRGDLLLS

SEQ ID NO: 51134 - protein, 10 aa, synthetic construct
DRFRGDRGQI

SEQ ID NO: 51135 - protein, 10 aa, synthetic construct
DRFRGDRQGI

SEQ ID NO: 51136 - protein, 10 aa, synthetic construct
DRFRGDRSVV

SEQ ID NO: 51137 - protein, 10 aa, synthetic construct
DRFRGDRGVV

SEQ ID NO: 51138 - protein, 10 aa, synthetic construct
DRFRGDRSQT

SEQ ID NO: 51139 - protein, 10 aa, synthetic construct
ERARGDRGVV

SEQ ID NO: 51140 - protein, 10 aa, synthetic construct
DRKRGDRGQI

SEQ ID NO: 51141 - protein, 10 aa, synthetic construct
DRKRGDRQGI

SEQ ID NO: 51142 - protein, 10 aa, synthetic construct
DRKRGDRSVV

SEQ ID NO: 51143 - protein, 10 aa, synthetic construct
DRKRGDRGVV

SEQ ID NO: 51144 - protein, 10 aa, synthetic construct
DRKRGDRSQT

SEQ ID NO: 51145 - protein, 10 aa, synthetic construct
DRRRGDHVNL

SEQ ID NO: 51146 - protein, 10 aa, synthetic construct
DRRRGDRDYL

SEQ ID NO: 51147 - protein, 10 aa, synthetic construct
DRRRGDYSSV

SEQ ID NO: 51148 - protein, 10 aa, synthetic construct
DRRRGDLTVT

SEQ ID NO: 51149 - protein, 10 aa, synthetic construct
DRRRGDLIGR

SEQ ID NO: 51150 - protein, 10 aa, synthetic construct
ERARGDRSQT

SEQ ID NO: 51151 - protein, 10 aa, synthetic construct
DRHRGDHGVL

SEQ ID NO: 51152 - protein, 10 aa, synthetic construct
DRHRGDYVGL

SEQ ID NO: 51153 - protein, 10 aa, synthetic construct
DRHRGDQSTL

SEQ ID NO: 51154 - protein, 10 aa, synthetic construct
DRHRGDLLLS

SEQ ID NO: 51155 - protein, 10 aa, synthetic construct
DRSRGDHGVL

SEQ ID NO: 51156 - protein, 10 aa, synthetic construct
DRSRGDYVGL

SEQ ID NO: 51157 - protein, 10 aa, synthetic construct
DRSRGDQSTL

SEQ ID NO: 51158 - protein, 10 aa, synthetic construct
DRSRGDLLLS

SEQ ID NO: 51159 - protein, 10 aa, synthetic construct
DRTRGDHGVL

SEQ ID NO: 51160 - protein, 10 aa, synthetic construct
DRTRGDYVGL

SEQ ID NO: 51161 - protein, 10 aa, synthetic construct
ERPRGDRGQI

SEQ ID NO: 51162 - protein, 10 aa, synthetic construct
DRTRGDQSTL

SEQ ID NO: 51163 - protein, 10 aa, synthetic construct
DRTRGDLLLS

SEQ ID NO: 51164 - protein, 10 aa, synthetic construct
DRYRGDRGQI

SEQ ID NO: 51165 - protein, 10 aa, synthetic construct
DRYRGDRQGI

SEQ ID NO: 51166 - protein, 10 aa, synthetic construct
DRYRGDRSVV

SEQ ID NO: 51167 - protein, 10 aa, synthetic construct
DRYRGDRGVV

SEQ ID NO: 51168 - protein, 10 aa, synthetic construct
DRYRGDRSQT

SEQ ID NO: 51169 - protein, 10 aa, synthetic construct
DRNRGDRGQI

SEQ ID NO: 51170 - protein, 10 aa, synthetic construct
DRNRGDRQGI

SEQ ID NO: 51171 - protein, 10 aa, synthetic construct
DRNRGDRSVV

SEQ ID NO: 51172 - protein, 10 aa, synthetic construct
ERPRGDRQGI

SEQ ID NO: 51173 - protein, 10 aa, synthetic construct
DRNRGDRGVV

SEQ ID NO: 51174 - protein, 10 aa, synthetic construct
DRNRGDRSQT

SEQ ID NO: 51175 - protein, 10 aa, synthetic construct
DRQRGDHGVL

SEQ ID NO: 51176 - protein, 10 aa, synthetic construct
DRQRGDYVGL

SEQ ID NO: 51177 - protein, 10 aa, synthetic construct
DRQRGDQSTL

SEQ ID NO: 51178 - protein, 10 aa, synthetic construct
DRQRGDLLLS

SEQ ID NO: 51179 - protein, 10 aa, synthetic construct
DRDRGDHGVL

SEQ ID NO: 51180 - protein, 10 aa, synthetic construct
DRDRGDYVGL

SEQ ID NO: 51181 - protein, 10 aa, synthetic construct
DRDRGDQSTL

SEQ ID NO: 51182 - protein, 10 aa, synthetic construct
DRDRGDLLLS

SEQ ID NO: 51183 - protein, 10 aa, synthetic construct
EKKRGDYSSV

SEQ ID NO: 51184 - protein, 10 aa, synthetic construct
ERPRGDRSVV

SEQ ID NO: 51185 - protein, 10 aa, synthetic construct
DRERGDHGVL

SEQ ID NO: 51186 - protein, 10 aa, synthetic construct
DRERGDYVGL

SEQ ID NO: 51187 - protein, 10 aa, synthetic construct
DRERGDQSTL

SEQ ID NO: 51188 - protein, 10 aa, synthetic construct
DRERGDLLLS

SEQ ID NO: 51189 - protein, 10 aa, synthetic construct
DHGRGDHGVL

SEQ ID NO: 51190 - protein, 10 aa, synthetic construct
DHGRGDYVGL

SEQ ID NO: 51191 - protein, 10 aa, synthetic construct
DHGRGDQSTL

SEQ ID NO: 51192 - protein, 10 aa, synthetic construct
DHGRGDLLLS

SEQ ID NO: 51193 - protein, 10 aa, synthetic construct
DHARGDHGVL

SEQ ID NO: 51194 - protein, 10 aa, synthetic construct
DHARGDYVGL

SEQ ID NO: 51195 - protein, 10 aa, synthetic construct
ERPRGDRGVV

SEQ ID NO: 51196 - protein, 10 aa, synthetic construct
DHARGDQSTL

SEQ ID NO: 51197 - protein, 10 aa, synthetic construct
DHARGDLLLS

SEQ ID NO: 51198 - protein, 10 aa, synthetic construct
DHVRGDRGQI

SEQ ID NO: 51199 - protein, 10 aa, synthetic construct
DHVRGDRQGI

SEQ ID NO: 51200 - protein, 10 aa, synthetic construct
DHVRGDRSVV

SEQ ID NO: 51201 - protein, 10 aa, synthetic construct
DHVRGDRGVV

SEQ ID NO: 51202 - protein, 10 aa, synthetic construct
DHVRGDRSQT

SEQ ID NO: 51203 - protein, 10 aa, synthetic construct
DHPRGDHGVL

SEQ ID NO: 51204 - protein, 10 aa, synthetic construct
DHPRGDYVGL

SEQ ID NO: 51205 - protein, 10 aa, synthetic construct
DHPRGDQSTL

SEQ ID NO: 51206 - protein, 10 aa, synthetic construct
ERPRGDRSQT

SEQ ID NO: 51207 - protein, 10 aa, synthetic construct
DHPRGDLLLS

SEQ ID NO: 51208 - protein, 10 aa, synthetic construct
DHLRGDRGQI

SEQ ID NO: 51209 - protein, 10 aa, synthetic construct
DHLRGDRQGI

SEQ ID NO: 51210 - protein, 10 aa, synthetic construct
DHLRGDRSVV

SEQ ID NO: 51211 - protein, 10 aa, synthetic construct
DHLRGDRGVV

SEQ ID NO: 51212 - protein, 10 aa, synthetic construct
DHLRGDRSQT

SEQ ID NO: 51213 - protein, 10 aa, synthetic construct
DHWRGDRGQI

SEQ ID NO: 51214 - protein, 10 aa, synthetic construct
DHWRGDRQGI

SEQ ID NO: 51215 - protein, 10 aa, synthetic construct
DHWRGDRSVV

SEQ ID NO: 51216 - protein, 10 aa, synthetic construct
DHWRGDRGVV

SEQ ID NO: 51217 - protein, 10 aa, synthetic construct
ERRRGDRGQI

SEQ ID NO: 51218 - protein, 10 aa, synthetic construct
DHWRGDRSQT

SEQ ID NO: 51219 - protein, 10 aa, synthetic construct
DHRRGDHGVL

SEQ ID NO: 51220 - protein, 10 aa, synthetic construct
DHRRGDYVGL

SEQ ID NO: 51221 - protein, 10 aa, synthetic construct
DHRRGDQSTL

SEQ ID NO: 51222 - protein, 10 aa, synthetic construct
DHRRGDLLLS

SEQ ID NO: 51223 - protein, 10 aa, synthetic construct
DHHRGDRGQI

SEQ ID NO: 51224 - protein, 10 aa, synthetic construct
DHHRGDRQGI

SEQ ID NO: 51225 - protein, 10 aa, synthetic construct
DHHRGDRSVV

SEQ ID NO: 51226 - protein, 10 aa, synthetic construct
DHHRGDRGVV

SEQ ID NO: 51227 - protein, 10 aa, synthetic construct
DHHRGDRSQT

SEQ ID NO: 51228 - protein, 10 aa, synthetic construct
ERRRGDRQGI

SEQ ID NO: 51229 - protein, 10 aa, synthetic construct
DHSRGDRGQI

SEQ ID NO: 51230 - protein, 10 aa, synthetic construct
DHSRGDRQGI

SEQ ID NO: 51231 - protein, 10 aa, synthetic construct
DHSRGDRSVV

SEQ ID NO: 51232 - protein, 10 aa, synthetic construct
DHSRGDRGVV

SEQ ID NO: 51233 - protein, 10 aa, synthetic construct
DHSRGDRSQT

SEQ ID NO: 51234 - protein, 10 aa, synthetic construct
DHTRGDRGQI

SEQ ID NO: 51235 - protein, 10 aa, synthetic construct
DHTRGDRQGI

SEQ ID NO: 51236 - protein, 10 aa, synthetic construct
DHTRGDRSVV

SEQ ID NO: 51237 - protein, 10 aa, synthetic construct
DHTRGDRGVV

SEQ ID NO: 51238 - protein, 10 aa, synthetic construct
DHTRGDRSQT

SEQ ID NO: 51239 - protein, 10 aa, synthetic construct
ERRRGDRSVV

SEQ ID NO: 51240 - protein, 10 aa, synthetic construct
DHQRGDRGQI

SEQ ID NO: 51241 - protein, 10 aa, synthetic construct
DHQRGDRQGI

SEQ ID NO: 51242 - protein, 10 aa, synthetic construct
DHQRGDRSVV

SEQ ID NO: 51243 - protein, 10 aa, synthetic construct
DHQRGDRGVV

SEQ ID NO: 51244 - protein, 10 aa, synthetic construct
DHQRGDRSQT

SEQ ID NO: 51245 - protein, 10 aa, synthetic construct
DHDRGDRGQI

SEQ ID NO: 51246 - protein, 10 aa, synthetic construct
DHDRGDRQGI

SEQ ID NO: 51247 - protein, 10 aa, synthetic construct
DHDRGDRSVV

SEQ ID NO: 51248 - protein, 10 aa, synthetic construct
DHDRGDRGVV

SEQ ID NO: 51249 - protein, 10 aa, synthetic construct
DHDRGDRSQT

SEQ ID NO: 51250 - protein, 10 aa, synthetic construct
ERRRGDRGVV

SEQ ID NO: 51251 - protein, 10 aa, synthetic construct
DHERGDRGQI

SEQ ID NO: 51252 - protein, 10 aa, synthetic construct
DHERGDRQGI

SEQ ID NO: 51253 - protein, 10 aa, synthetic construct
DHERGDRSVV

SEQ ID NO: 51254 - protein, 10 aa, synthetic construct
DHERGDRGVV

SEQ ID NO: 51255 - protein, 10 aa, synthetic construct
DHERGDRSQT

SEQ ID NO: 51256 - protein, 10 aa, synthetic construct
DSGRGDHVNL

SEQ ID NO: 51257 - protein, 10 aa, synthetic construct
DSGRGDRDYL

SEQ ID NO: 51258 - protein, 10 aa, synthetic construct
DSGRGDYSSV

SEQ ID NO: 51259 - protein, 10 aa, synthetic construct
DSGRGDLTVT

SEQ ID NO: 51260 - protein, 10 aa, synthetic construct
DSGRGDLIGR

SEQ ID NO: 51261 - protein, 10 aa, synthetic construct
ERRRGDRSQT

SEQ ID NO: 51262 - protein, 10 aa, synthetic construct
DSARGDHVNL

SEQ ID NO: 51263 - protein, 10 aa, synthetic construct
DSARGDRDYL

SEQ ID NO: 51264 - protein, 10 aa, synthetic construct
DSARGDYSSV

SEQ ID NO: 51265 - protein, 10 aa, synthetic construct
DSARGDLTVT

SEQ ID NO: 51266 - protein, 10 aa, synthetic construct
DSARGDLIGR

SEQ ID NO: 51267 - protein, 10 aa, synthetic construct
DSVRGDHGVL

SEQ ID NO: 51268 - protein, 10 aa, synthetic construct
DSVRGDHVNL

SEQ ID NO: 51269 - protein, 10 aa, synthetic construct
DSVRGDYVGL

SEQ ID NO: 51270 - protein, 10 aa, synthetic construct
DSVRGDYSSV

SEQ ID NO: 51271 - protein, 10 aa, synthetic construct
DSVRGDQSTL

SEQ ID NO: 51272 - protein, 10 aa, synthetic construct
ESGRGDRGQI

SEQ ID NO: 51273 - protein, 10 aa, synthetic construct
DSVRGDLLLS

SEQ ID NO: 51274 - protein, 10 aa, synthetic construct
DSLRGDHGVL

SEQ ID NO: 51275 - protein, 10 aa, synthetic construct
DSLRGDHVNL

SEQ ID NO: 51276 - protein, 10 aa, synthetic construct
DSLRGDYVGL

SEQ ID NO: 51277 - protein, 10 aa, synthetic construct
DSLRGDYSSV

SEQ ID NO: 51278 - protein, 10 aa, synthetic construct
DSLRGDQSTL

SEQ ID NO: 51279 - protein, 10 aa, synthetic construct
DSLRGDLLLS

SEQ ID NO: 51280 - protein, 10 aa, synthetic construct
DSIRGDRGQI

SEQ ID NO: 51281 - protein, 10 aa, synthetic construct
DSIRGDRQGI

SEQ ID NO: 51282 - protein, 10 aa, synthetic construct
DSIRGDRSVV

SEQ ID NO: 51283 - protein, 10 aa, synthetic construct
ESGRGDRQGI

SEQ ID NO: 51284 - protein, 10 aa, synthetic construct
DSIRGDRGVV

SEQ ID NO: 51285 - protein, 10 aa, synthetic construct
DSIRGDYVGL

SEQ ID NO: 51286 - protein, 10 aa, synthetic construct
DSIRGDQSTL

SEQ ID NO: 51287 - protein, 10 aa, synthetic construct
DSIRGDRSQT

SEQ ID NO: 51288 - protein, 10 aa, synthetic construct
DSIRGDLLLS

SEQ ID NO: 51289 - protein, 10 aa, synthetic construct
DSMRGDRGQI

SEQ ID NO: 51290 - protein, 10 aa, synthetic construct
DSMRGDRQGI

SEQ ID NO: 51291 - protein, 10 aa, synthetic construct
DSMRGDRSVV

SEQ ID NO: 51292 - protein, 10 aa, synthetic construct
DSMRGDRGVV

SEQ ID NO: 51293 - protein, 10 aa, synthetic construct
DSMRGDYVGL

SEQ ID NO: 51294 - protein, 10 aa, synthetic construct
EKKRGDLTVT

SEQ ID NO: 51295 - protein, 10 aa, synthetic construct
ESGRGDRSVV

SEQ ID NO: 51296 - protein, 10 aa, synthetic construct
DSMRGDQSTL

SEQ ID NO: 51297 - protein, 10 aa, synthetic construct
DSMRGDRSQT

SEQ ID NO: 51298 - protein, 10 aa, synthetic construct
DSMRGDLLLS

SEQ ID NO: 51299 - protein, 10 aa, synthetic construct
DSWRGDHGVL

SEQ ID NO: 51300 - protein, 10 aa, synthetic construct
DSWRGDHVNL

SEQ ID NO: 51301 - protein, 10 aa, synthetic construct
DSWRGDYVGL

SEQ ID NO: 51302 - protein, 10 aa, synthetic construct
DSWRGDYSSV

SEQ ID NO: 51303 - protein, 10 aa, synthetic construct
DSWRGDQSTL

SEQ ID NO: 51304 - protein, 10 aa, synthetic construct
DSWRGDLLLS

SEQ ID NO: 51305 - protein, 10 aa, synthetic construct
DSFRGDRGQI

SEQ ID NO: 51306 - protein, 10 aa, synthetic construct
ESGRGDRGVV

SEQ ID NO: 51307 - protein, 10 aa, synthetic construct
DSFRGDRQGI

SEQ ID NO: 51308 - protein, 10 aa, synthetic construct
DSFRGDRSVV

SEQ ID NO: 51309 - protein, 10 aa, synthetic construct
DSFRGDRGVV

SEQ ID NO: 51310 - protein, 10 aa, synthetic construct
DSFRGDYVGL

SEQ ID NO: 51311 - protein, 10 aa, synthetic construct
DSFRGDQSTL

SEQ ID NO: 51312 - protein, 10 aa, synthetic construct
DSFRGDRSQT

SEQ ID NO: 51313 - protein, 10 aa, synthetic construct
DSFRGDLLLS

SEQ ID NO: 51314 - protein, 10 aa, synthetic construct
DSKRGDRGQI

SEQ ID NO: 51315 - protein, 10 aa, synthetic construct
DSKRGDRQGI

SEQ ID NO: 51316 - protein, 10 aa, synthetic construct
DSKRGDRSVV

SEQ ID NO: 51317 - protein, 10 aa, synthetic construct
ESGRGDRSQT

SEQ ID NO: 51318 - protein, 10 aa, synthetic construct
DSKRGDRGVV

SEQ ID NO: 51319 - protein, 10 aa, synthetic construct
DSKRGDYVGL

SEQ ID NO: 51320 - protein, 10 aa, synthetic construct
DSKRGDQSTL

SEQ ID NO: 51321 - protein, 10 aa, synthetic construct
DSKRGDRSQT

SEQ ID NO: 51322 - protein, 10 aa, synthetic construct
DSKRGDLLLS

SEQ ID NO: 51323 - protein, 10 aa, synthetic construct
DSRRGDHVNL

SEQ ID NO: 51324 - protein, 10 aa, synthetic construct
DSRRGDRDYL

SEQ ID NO: 51325 - protein, 10 aa, synthetic construct
DSRRGDYSSV

SEQ ID NO: 51326 - protein, 10 aa, synthetic construct
DSRRGDLTVT

SEQ ID NO: 51327 - protein, 10 aa, synthetic construct
DSRRGDLIGR

SEQ ID NO: 51328 - protein, 10 aa, synthetic construct
ESARGDRGQI

SEQ ID NO: 51329 - protein, 10 aa, synthetic construct
DSHRGDHGVL

SEQ ID NO: 51330 - protein, 10 aa, synthetic construct
DSHRGDHVNL

SEQ ID NO: 51331 - protein, 10 aa, synthetic construct
DSHRGDYVGL

SEQ ID NO: 51332 - protein, 10 aa, synthetic construct
DSHRGDYSSV

SEQ ID NO: 51333 - protein, 10 aa, synthetic construct
DSHRGDQSTL

SEQ ID NO: 51334 - protein, 10 aa, synthetic construct
DSHRGDLLLS

SEQ ID NO: 51335 - protein, 10 aa, synthetic construct
DSSRGDHGVL

SEQ ID NO: 51336 - protein, 10 aa, synthetic construct
DSSRGDHVNL

SEQ ID NO: 51337 - protein, 10 aa, synthetic construct
DSSRGDYVGL

SEQ ID NO: 51338 - protein, 10 aa, synthetic construct
DSSRGDYSSV

SEQ ID NO: 51339 - protein, 10 aa, synthetic construct
ESARGDRQGI

SEQ ID NO: 51340 - protein, 10 aa, synthetic construct
DSSRGDQSTL

SEQ ID NO: 51341 - protein, 10 aa, synthetic construct
DSSRGDLLLS

SEQ ID NO: 51342 - protein, 10 aa, synthetic construct
DSTRGDHGVL

SEQ ID NO: 51343 - protein, 10 aa, synthetic construct
DSTRGDHVNL

SEQ ID NO: 51344 - protein, 10 aa, synthetic construct
DSTRGDYVGL

SEQ ID NO: 51345 - protein, 10 aa, synthetic construct
DSTRGDYSSV

SEQ ID NO: 51346 - protein, 10 aa, synthetic construct
DSTRGDQSTL

SEQ ID NO: 51347 - protein, 10 aa, synthetic construct
DSTRGDLLLS

SEQ ID NO: 51348 - protein, 10 aa, synthetic construct
DSYRGDRGQI

SEQ ID NO: 51349 - protein, 10 aa, synthetic construct
DSYRGDRQGI

SEQ ID NO: 51350 - protein, 10 aa, synthetic construct
ESARGDRSVV

SEQ ID NO: 51351 - protein, 10 aa, synthetic construct
DSYRGDRSVV

SEQ ID NO: 51352 - protein, 10 aa, synthetic construct
DSYRGDRGVV

SEQ ID NO: 51353 - protein, 10 aa, synthetic construct
DSYRGDYVGL

SEQ ID NO: 51354 - protein, 10 aa, synthetic construct
DSYRGDQSTL

SEQ ID NO: 51355 - protein, 10 aa, synthetic construct
DSYRGDRSQT

SEQ ID NO: 51356 - protein, 10 aa, synthetic construct
DSYRGDLLLS

SEQ ID NO: 51357 - protein, 10 aa, synthetic construct
DSNRGDRGQI

SEQ ID NO: 51358 - protein, 10 aa, synthetic construct
DSNRGDRQGI

SEQ ID NO: 51359 - protein, 10 aa, synthetic construct
DSNRGDRSVV

SEQ ID NO: 51360 - protein, 10 aa, synthetic construct
DSNRGDRGVV

SEQ ID NO: 51361 - protein, 10 aa, synthetic construct
ESARGDRGVV

SEQ ID NO: 51362 - protein, 10 aa, synthetic construct
DSNRGDYVGL

SEQ ID NO: 51363 - protein, 10 aa, synthetic construct
DSNRGDQSTL

SEQ ID NO: 51364 - protein, 10 aa, synthetic construct
DSNRGDRSQT

SEQ ID NO: 51365 - protein, 10 aa, synthetic construct
DSNRGDLLLS

SEQ ID NO: 51366 - protein, 10 aa, synthetic construct
DSQRGDHGVL

SEQ ID NO: 51367 - protein, 10 aa, synthetic construct
DSQRGDHVNL

SEQ ID NO: 51368 - protein, 10 aa, synthetic construct
DSQRGDYVGL

SEQ ID NO: 51369 - protein, 10 aa, synthetic construct
DSQRGDYSSV

SEQ ID NO: 51370 - protein, 10 aa, synthetic construct
DSQRGDQSTL

SEQ ID NO: 51371 - protein, 10 aa, synthetic construct
DSQRGDLLLS

SEQ ID NO: 51372 - protein, 10 aa, synthetic construct
ESARGDRSQT

SEQ ID NO: 51373 - protein, 10 aa, synthetic construct
DSDRGDHGVL

SEQ ID NO: 51374 - protein, 10 aa, synthetic construct
DSDRGDHVNL

SEQ ID NO: 51375 - protein, 10 aa, synthetic construct
DSDRGDYVGL

SEQ ID NO: 51376 - protein, 10 aa, synthetic construct
DSDRGDYSSV

SEQ ID NO: 51377 - protein, 10 aa, synthetic construct
DSDRGDQSTL

SEQ ID NO: 51378 - protein, 10 aa, synthetic construct
DSDRGDLLLS

SEQ ID NO: 51379 - protein, 10 aa, synthetic construct
DSERGDHGVL

SEQ ID NO: 51380 - protein, 10 aa, synthetic construct
DSERGDHVNL

SEQ ID NO: 51381 - protein, 10 aa, synthetic construct
DSERGDYVGL

SEQ ID NO: 51382 - protein, 10 aa, synthetic construct
DSERGDYSSV

SEQ ID NO: 51383 - protein, 10 aa, synthetic construct
ESRRGDRGQI

SEQ ID NO: 51384 - protein, 10 aa, synthetic construct
DSERGDQSTL

SEQ ID NO: 51385 - protein, 10 aa, synthetic construct
DSERGDLLLS

SEQ ID NO: 51386 - protein, 10 aa, synthetic construct
DTGRGDHGVL

SEQ ID NO: 51387 - protein, 10 aa, synthetic construct
DTGRGDYVGL

SEQ ID NO: 51388 - protein, 10 aa, synthetic construct
DTGRGDQSTL

SEQ ID NO: 51389 - protein, 10 aa, synthetic construct
DTGRGDLLLS

SEQ ID NO: 51390 - protein, 10 aa, synthetic construct
DTARGDHGVL

SEQ ID NO: 51391 - protein, 10 aa, synthetic construct
DTARGDYVGL

SEQ ID NO: 51392 - protein, 10 aa, synthetic construct
DTARGDQSTL

SEQ ID NO: 51393 - protein, 10 aa, synthetic construct
DTARGDLLLS

SEQ ID NO: 51394 - protein, 10 aa, synthetic construct
ESRRGDRQGI

SEQ ID NO: 51395 - protein, 10 aa, synthetic construct
DTVRGDRGQI

SEQ ID NO: 51396 - protein, 10 aa, synthetic construct
DTVRGDRQGI

SEQ ID NO: 51397 - protein, 10 aa, synthetic construct
DTVRGDRSVV

SEQ ID NO: 51398 - protein, 10 aa, synthetic construct
DTVRGDRGVV

SEQ ID NO: 51399 - protein, 10 aa, synthetic construct
DTVRGDRSQT

SEQ ID NO: 51400 - protein, 10 aa, synthetic construct
DTPRGDHGVL

SEQ ID NO: 51401 - protein, 10 aa, synthetic construct
DTPRGDYVGL

SEQ ID NO: 51402 - protein, 10 aa, synthetic construct
DTPRGDQSTL

SEQ ID NO: 51403 - protein, 10 aa, synthetic construct
DTPRGDLLLS

SEQ ID NO: 51404 - protein, 10 aa, synthetic construct
DTLRGDRGQI

SEQ ID NO: 51405 - protein, 10 aa, synthetic construct
EKNRGDHVNL

SEQ ID NO: 51406 - protein, 10 aa, synthetic construct
ESRRGDRSVV

SEQ ID NO: 51407 - protein, 10 aa, synthetic construct
DTLRGDRQGI

SEQ ID NO: 51408 - protein, 10 aa, synthetic construct
DTLRGDRSVV

SEQ ID NO: 51409 - protein, 10 aa, synthetic construct
DTLRGDRGVV

SEQ ID NO: 51410 - protein, 10 aa, synthetic construct
DTLRGDRSQT

SEQ ID NO: 51411 - protein, 10 aa, synthetic construct
DTWRGDRGQI

SEQ ID NO: 51412 - protein, 10 aa, synthetic construct
DTWRGDRQGI

SEQ ID NO: 51413 - protein, 10 aa, synthetic construct
DTWRGDRSVV

SEQ ID NO: 51414 - protein, 10 aa, synthetic construct
DTWRGDRGVV

SEQ ID NO: 51415 - protein, 10 aa, synthetic construct
DTWRGDRSQT

SEQ ID NO: 51416 - protein, 10 aa, synthetic construct
DTRRGDHGVL

SEQ ID NO: 51417 - protein, 10 aa, synthetic construct
ESRRGDRGVV

SEQ ID NO: 51418 - protein, 10 aa, synthetic construct
DTRRGDYVGL

SEQ ID NO: 51419 - protein, 10 aa, synthetic construct
DTRRGDQSTL

SEQ ID NO: 51420 - protein, 10 aa, synthetic construct
DTRRGDLLLS

SEQ ID NO: 51421 - protein, 10 aa, synthetic construct
DTHRGDRGQI

SEQ ID NO: 51422 - protein, 10 aa, synthetic construct
DTHRGDRQGI

SEQ ID NO: 51423 - protein, 10 aa, synthetic construct
DTHRGDRSVV

SEQ ID NO: 51424 - protein, 10 aa, synthetic construct
DTHRGDRGVV

SEQ ID NO: 51425 - protein, 10 aa, synthetic construct
DTHRGDRSQT

SEQ ID NO: 51426 - protein, 10 aa, synthetic construct
DTSRGDRGQI

SEQ ID NO: 51427 - protein, 10 aa, synthetic construct
DTSRGDRQGI

SEQ ID NO: 51428 - protein, 10 aa, synthetic construct
ESRRGDRSQT

SEQ ID NO: 51429 - protein, 10 aa, synthetic construct
DTSRGDRSVV

SEQ ID NO: 51430 - protein, 10 aa, synthetic construct
DTSRGDRGVV

SEQ ID NO: 51431 - protein, 10 aa, synthetic construct
DTSRGDRSQT

SEQ ID NO: 51432 - protein, 10 aa, synthetic construct
DTTRGDRGQI

SEQ ID NO: 51433 - protein, 10 aa, synthetic construct
DTTRGDRQGI

SEQ ID NO: 51434 - protein, 10 aa, synthetic construct
DTTRGDRSVV

SEQ ID NO: 51435 - protein, 10 aa, synthetic construct
DTTRGDRGVV

SEQ ID NO: 51436 - protein, 10 aa, synthetic construct
DTTRGDRSQT

SEQ ID NO: 51437 - protein, 10 aa, synthetic construct
DTQRGDRGQI

SEQ ID NO: 51438 - protein, 10 aa, synthetic construct
DTQRGDRQGI

SEQ ID NO: 51439 - protein, 10 aa, synthetic construct
DGGRGDRGQI

SEQ ID NO: 51440 - protein, 10 aa, synthetic construct
DTQRGDRSVV

SEQ ID NO: 51441 - protein, 10 aa, synthetic construct
DTQRGDRGVV

SEQ ID NO: 51442 - protein, 10 aa, synthetic construct
DTQRGDRSQT

SEQ ID NO: 51443 - protein, 10 aa, synthetic construct
DTDRGDRGQI

SEQ ID NO: 51444 - protein, 10 aa, synthetic construct
DTDRGDRQGI

SEQ ID NO: 51445 - protein, 10 aa, synthetic construct
DTDRGDRSVV

SEQ ID NO: 51446 - protein, 10 aa, synthetic construct
DTDRGDRGVV

SEQ ID NO: 51447 - protein, 10 aa, synthetic construct
DTDRGDRSQT

SEQ ID NO: 51448 - protein, 10 aa, synthetic construct
DTERGDRGQI

SEQ ID NO: 51449 - protein, 10 aa, synthetic construct
DTERGDRQGI

SEQ ID NO: 51450 - protein, 10 aa, synthetic construct
DGGRGDRQGI

SEQ ID NO: 51451 - protein, 10 aa, synthetic construct
DTERGDRSVV

SEQ ID NO: 51452 - protein, 10 aa, synthetic construct
DTERGDRGVV

SEQ ID NO: 51453 - protein, 10 aa, synthetic construct
DTERGDRSQT

SEQ ID NO: 51454 - protein, 10 aa, synthetic construct
DYGRGDRGQI

SEQ ID NO: 51455 - protein, 10 aa, synthetic construct
DYGRGDRQGI

SEQ ID NO: 51456 - protein, 10 aa, synthetic construct
DYGRGDRSVV

SEQ ID NO: 51457 - protein, 10 aa, synthetic construct
DYGRGDRGVV

SEQ ID NO: 51458 - protein, 10 aa, synthetic construct
DYGRGDRSQT

SEQ ID NO: 51459 - protein, 10 aa, synthetic construct
DYARGDRGQI

SEQ ID NO: 51460 - protein, 10 aa, synthetic construct
DYARGDRQGI

SEQ ID NO: 51461 - protein, 10 aa, synthetic construct
DGGRGDRSVV

SEQ ID NO: 51462 - protein, 10 aa, synthetic construct
DYARGDRSVV

SEQ ID NO: 51463 - protein, 10 aa, synthetic construct
DYARGDRGVV

SEQ ID NO: 51464 - protein, 10 aa, synthetic construct
DYARGDRSQT

SEQ ID NO: 51465 - protein, 10 aa, synthetic construct
DYPRGDRGQI

SEQ ID NO: 51466 - protein, 10 aa, synthetic construct
DYPRGDRQGI

SEQ ID NO: 51467 - protein, 10 aa, synthetic construct
DYPRGDRSVV

SEQ ID NO: 51468 - protein, 10 aa, synthetic construct
DYPRGDRGVV

SEQ ID NO: 51469 - protein, 10 aa, synthetic construct
DYPRGDRSQT

SEQ ID NO: 51470 - protein, 10 aa, synthetic construct
DYRRGDRGQI

SEQ ID NO: 51471 - protein, 10 aa, synthetic construct
DYRRGDRQGI

SEQ ID NO: 51472 - protein, 10 aa, synthetic construct
DGGRGDRGVV

SEQ ID NO: 51473 - protein, 10 aa, synthetic construct
DYRRGDRSVV

SEQ ID NO: 51474 - protein, 10 aa, synthetic construct
DYRRGDRGVV

SEQ ID NO: 51475 - protein, 10 aa, synthetic construct
DYRRGDRSQT

SEQ ID NO: 51476 - protein, 10 aa, synthetic construct
DNGRGDRGQI

SEQ ID NO: 51477 - protein, 10 aa, synthetic construct
DNGRGDRQGI

SEQ ID NO: 51478 - protein, 10 aa, synthetic construct
DNGRGDRSVV

SEQ ID NO: 51479 - protein, 10 aa, synthetic construct
DNGRGDRGVV

SEQ ID NO: 51480 - protein, 10 aa, synthetic construct
DNGRGDRSQT

SEQ ID NO: 51481 - protein, 10 aa, synthetic construct
DNARGDRGQI

SEQ ID NO: 51482 - protein, 10 aa, synthetic construct
DNARGDRQGI

SEQ ID NO: 51483 - protein, 10 aa, synthetic construct
DGGRGDRSQT

SEQ ID NO: 51484 - protein, 10 aa, synthetic construct
DNARGDRSVV

SEQ ID NO: 51485 - protein, 10 aa, synthetic construct
DNARGDRGVV

SEQ ID NO: 51486 - protein, 10 aa, synthetic construct
DNARGDRSQT

SEQ ID NO: 51487 - protein, 10 aa, synthetic construct
DNPRGDRGQI

SEQ ID NO: 51488 - protein, 10 aa, synthetic construct
DNPRGDRQGI

SEQ ID NO: 51489 - protein, 10 aa, synthetic construct
DNPRGDRSVV

SEQ ID NO: 51490 - protein, 10 aa, synthetic construct
DNPRGDRGVV

SEQ ID NO: 51491 - protein, 10 aa, synthetic construct
DNPRGDRSQT

SEQ ID NO: 51492 - protein, 10 aa, synthetic construct
DNRRGDRGQI

SEQ ID NO: 51493 - protein, 10 aa, synthetic construct
DNRRGDRQGI

SEQ ID NO: 51494 - protein, 10 aa, synthetic construct
DGARGDRGQI

SEQ ID NO: 51495 - protein, 10 aa, synthetic construct
DNRRGDRSVV

SEQ ID NO: 51496 - protein, 10 aa, synthetic construct
DNRRGDRGVV

SEQ ID NO: 51497 - protein, 10 aa, synthetic construct
DNRRGDRSQT

SEQ ID NO: 51498 - protein, 10 aa, synthetic construct
DQGRGDHGVL

SEQ ID NO: 51499 - protein, 10 aa, synthetic construct
DQGRGDYVGL

SEQ ID NO: 51500 - protein, 10 aa, synthetic construct
DQGRGDQSTL

SEQ ID NO: 51501 - protein, 10 aa, synthetic construct
DQGRGDLLLS

SEQ ID NO: 51502 - protein, 10 aa, synthetic construct
DQARGDHGVL

SEQ ID NO: 51503 - protein, 10 aa, synthetic construct
DQARGDYVGL

SEQ ID NO: 51504 - protein, 10 aa, synthetic construct
DQARGDQSTL

SEQ ID NO: 51505 - protein, 10 aa, synthetic construct
DGARGDRQGI

SEQ ID NO: 51506 - protein, 10 aa, synthetic construct
DQARGDLLLS

SEQ ID NO: 51507 - protein, 10 aa, synthetic construct
DQVRGDRGQI

SEQ ID NO: 51508 - protein, 10 aa, synthetic construct
DQVRGDRQGI

SEQ ID NO: 51509 - protein, 10 aa, synthetic construct
DQVRGDRSVV

SEQ ID NO: 51510 - protein, 10 aa, synthetic construct
DQVRGDRGVV

SEQ ID NO: 51511 - protein, 10 aa, synthetic construct
DQVRGDRSQT

SEQ ID NO: 51512 - protein, 10 aa, synthetic construct
DQPRGDHGVL

SEQ ID NO: 51513 - protein, 10 aa, synthetic construct
DQPRGDYVGL

SEQ ID NO: 51514 - protein, 10 aa, synthetic construct
DQPRGDQSTL

SEQ ID NO: 51515 - protein, 10 aa, synthetic construct
DQPRGDLLLS

SEQ ID NO: 51516 - protein, 10 aa, synthetic construct
EKNRGDRDYL

SEQ ID NO: 51517 - protein, 10 aa, synthetic construct
DGARGDRSVV

SEQ ID NO: 51518 - protein, 10 aa, synthetic construct
DQLRGDRGQI

SEQ ID NO: 51519 - protein, 10 aa, synthetic construct
DQLRGDRQGI

SEQ ID NO: 51520 - protein, 10 aa, synthetic construct
DQLRGDRSVV

SEQ ID NO: 51521 - protein, 10 aa, synthetic construct
DQLRGDRGVV

SEQ ID NO: 51522 - protein, 10 aa, synthetic construct
DQLRGDRSQT

SEQ ID NO: 51523 - protein, 10 aa, synthetic construct
DQWRGDRGQI

SEQ ID NO: 51524 - protein, 10 aa, synthetic construct
DQWRGDRQGI

SEQ ID NO: 51525 - protein, 10 aa, synthetic construct
DQWRGDRSVV

SEQ ID NO: 51526 - protein, 10 aa, synthetic construct
DQWRGDRGVV

SEQ ID NO: 51527 - protein, 10 aa, synthetic construct
DQWRGDRSQT

SEQ ID NO: 51528 - protein, 10 aa, synthetic construct
DGARGDRGVV

SEQ ID NO: 51529 - protein, 10 aa, synthetic construct
DQRRGDHGVL

SEQ ID NO: 51530 - protein, 10 aa, synthetic construct
DQRRGDYVGL

SEQ ID NO: 51531 - protein, 10 aa, synthetic construct
DQRRGDQSTL

SEQ ID NO: 51532 - protein, 10 aa, synthetic construct
DQRRGDLLLS

SEQ ID NO: 51533 - protein, 10 aa, synthetic construct
DQHRGDRGQI

SEQ ID NO: 51534 - protein, 10 aa, synthetic construct
DQHRGDRQGI

SEQ ID NO: 51535 - protein, 10 aa, synthetic construct
DQHRGDRSVV

SEQ ID NO: 51536 - protein, 10 aa, synthetic construct
DQHRGDRGVV

SEQ ID NO: 51537 - protein, 10 aa, synthetic construct
DQHRGDRSQT

SEQ ID NO: 51538 - protein, 10 aa, synthetic construct
DQSRGDRGQI

SEQ ID NO: 51539 - protein, 10 aa, synthetic construct
DGARGDRSQT

SEQ ID NO: 51540 - protein, 10 aa, synthetic construct
DQSRGDRQGI

SEQ ID NO: 51541 - protein, 10 aa, synthetic construct
DQSRGDRSVV

SEQ ID NO: 51542 - protein, 10 aa, synthetic construct
DQSRGDRGVV

SEQ ID NO: 51543 - protein, 10 aa, synthetic construct
DQSRGDRSQT

SEQ ID NO: 51544 - protein, 10 aa, synthetic construct
DQTRGDRGQI

SEQ ID NO: 51545 - protein, 10 aa, synthetic construct
DQTRGDRQGI

SEQ ID NO: 51546 - protein, 10 aa, synthetic construct
DQTRGDRSVV

SEQ ID NO: 51547 - protein, 10 aa, synthetic construct
DQTRGDRGVV

SEQ ID NO: 51548 - protein, 10 aa, synthetic construct
DQTRGDRSQT

SEQ ID NO: 51549 - protein, 10 aa, synthetic construct
DQQRGDRGQI

SEQ ID NO: 51550 - protein, 10 aa, synthetic construct
DGPRGDRGQI

SEQ ID NO: 51551 - protein, 10 aa, synthetic construct
DQQRGDRQGI

SEQ ID NO: 51552 - protein, 10 aa, synthetic construct
DQQRGDRSVV

SEQ ID NO: 51553 - protein, 10 aa, synthetic construct
DQQRGDRGVV

SEQ ID NO: 51554 - protein, 10 aa, synthetic construct
DQQRGDRSQT

SEQ ID NO: 51555 - protein, 10 aa, synthetic construct
DQDRGDRGQI

SEQ ID NO: 51556 - protein, 10 aa, synthetic construct
DQDRGDRQGI

SEQ ID NO: 51557 - protein, 10 aa, synthetic construct
DQDRGDRSVV

SEQ ID NO: 51558 - protein, 10 aa, synthetic construct
DQDRGDRGVV

SEQ ID NO: 51559 - protein, 10 aa, synthetic construct
DQDRGDRSQT

SEQ ID NO: 51560 - protein, 10 aa, synthetic construct
DQERGDRGQI

SEQ ID NO: 51561 - protein, 10 aa, synthetic construct
DGPRGDRQGI

SEQ ID NO: 51562 - protein, 10 aa, synthetic construct
DQERGDRQGI

SEQ ID NO: 51563 - protein, 10 aa, synthetic construct
DQERGDRSVV

SEQ ID NO: 51564 - protein, 10 aa, synthetic construct
DQERGDRGVV

SEQ ID NO: 51565 - protein, 10 aa, synthetic construct
DQERGDRSQT

SEQ ID NO: 51566 - protein, 10 aa, synthetic construct
DDGRGDHGVL

SEQ ID NO: 51567 - protein, 10 aa, synthetic construct
DDGRGDYVGL

SEQ ID NO: 51568 - protein, 10 aa, synthetic construct
DDGRGDQSTL

SEQ ID NO: 51569 - protein, 10 aa, synthetic construct
DDGRGDLLLS

SEQ ID NO: 51570 - protein, 10 aa, synthetic construct
DDARGDHGVL

SEQ ID NO: 51571 - protein, 10 aa, synthetic construct
DDARGDYVGL

SEQ ID NO: 51572 - protein, 10 aa, synthetic construct
DGPRGDRSVV

SEQ ID NO: 51573 - protein, 10 aa, synthetic construct
DDARGDQSTL

SEQ ID NO: 51574 - protein, 10 aa, synthetic construct
DDARGDLLLS

SEQ ID NO: 51575 - protein, 10 aa, synthetic construct
DDVRGDRGQI

SEQ ID NO: 51576 - protein, 10 aa, synthetic construct
DDVRGDRQGI

SEQ ID NO: 51577 - protein, 10 aa, synthetic construct
DDVRGDRSVV

SEQ ID NO: 51578 - protein, 10 aa, synthetic construct
DDVRGDRGVV

SEQ ID NO: 51579 - protein, 10 aa, synthetic construct
DDVRGDRSQT

SEQ ID NO: 51580 - protein, 10 aa, synthetic construct
DDPRGDHGVL

SEQ ID NO: 51581 - protein, 10 aa, synthetic construct
DDPRGDYVGL

SEQ ID NO: 51582 - protein, 10 aa, synthetic construct
DDPRGDQSTL

SEQ ID NO: 51583 - protein, 10 aa, synthetic construct
DGPRGDRGVV

SEQ ID NO: 51584 - protein, 10 aa, synthetic construct
DDPRGDLLLS

SEQ ID NO: 51585 - protein, 10 aa, synthetic construct
DDLRGDRGQI

SEQ ID NO: 51586 - protein, 10 aa, synthetic construct
DDLRGDRQGI

SEQ ID NO: 51587 - protein, 10 aa, synthetic construct
DDLRGDRSVV

SEQ ID NO: 51588 - protein, 10 aa, synthetic construct
DDLRGDRGVV

SEQ ID NO: 51589 - protein, 10 aa, synthetic construct
DDLRGDRSQT

SEQ ID NO: 51590 - protein, 10 aa, synthetic construct
DDWRGDRGQI

SEQ ID NO: 51591 - protein, 10 aa, synthetic construct
DDWRGDRQGI

SEQ ID NO: 51592 - protein, 10 aa, synthetic construct
DDWRGDRSVV

SEQ ID NO: 51593 - protein, 10 aa, synthetic construct
DDWRGDRGVV

SEQ ID NO: 51594 - protein, 10 aa, synthetic construct
DGPRGDRSQT

SEQ ID NO: 51595 - protein, 10 aa, synthetic construct
DDWRGDRSQT

SEQ ID NO: 51596 - protein, 10 aa, synthetic construct
DDRRGDHGVL

SEQ ID NO: 51597 - protein, 10 aa, synthetic construct
DDRRGDYVGL

SEQ ID NO: 51598 - protein, 10 aa, synthetic construct
DDRRGDQSTL

SEQ ID NO: 51599 - protein, 10 aa, synthetic construct
DDRRGDLLLS

SEQ ID NO: 51600 - protein, 10 aa, synthetic construct
DDHRGDRGQI

SEQ ID NO: 51601 - protein, 10 aa, synthetic construct
DDHRGDRQGI

SEQ ID NO: 51602 - protein, 10 aa, synthetic construct
DDHRGDRSVV

SEQ ID NO: 51603 - protein, 10 aa, synthetic construct
DDHRGDRGVV

SEQ ID NO: 51604 - protein, 10 aa, synthetic construct
DDHRGDRSQT

SEQ ID NO: 51605 - protein, 10 aa, synthetic construct
DGRRGDRGQI

SEQ ID NO: 51606 - protein, 10 aa, synthetic construct
DDSRGDRGQI

SEQ ID NO: 51607 - protein, 10 aa, synthetic construct
DDSRGDRQGI

SEQ ID NO: 51608 - protein, 10 aa, synthetic construct
DDSRGDRSVV

SEQ ID NO: 51609 - protein, 10 aa, synthetic construct
DDSRGDRGVV

SEQ ID NO: 51610 - protein, 10 aa, synthetic construct
DDSRGDRSQT

SEQ ID NO: 51611 - protein, 10 aa, synthetic construct
DDTRGDRGQI

SEQ ID NO: 51612 - protein, 10 aa, synthetic construct
DDTRGDRQGI

SEQ ID NO: 51613 - protein, 10 aa, synthetic construct
DDTRGDRSVV

SEQ ID NO: 51614 - protein, 10 aa, synthetic construct
DDTRGDRGVV

SEQ ID NO: 51615 - protein, 10 aa, synthetic construct
DDTRGDRSQT

SEQ ID NO: 51616 - protein, 10 aa, synthetic construct
DGRRGDRQGI

SEQ ID NO: 51617 - protein, 10 aa, synthetic construct
DDQRGDRGQI

SEQ ID NO: 51618 - protein, 10 aa, synthetic construct
DDQRGDRQGI

SEQ ID NO: 51619 - protein, 10 aa, synthetic construct
DDQRGDRSVV

SEQ ID NO: 51620 - protein, 10 aa, synthetic construct
DDQRGDRGVV

SEQ ID NO: 51621 - protein, 10 aa, synthetic construct
DDQRGDRSQT

SEQ ID NO: 51622 - protein, 10 aa, synthetic construct
DDDRGDRGQI

SEQ ID NO: 51623 - protein, 10 aa, synthetic construct
DDDRGDRQGI

SEQ ID NO: 51624 - protein, 10 aa, synthetic construct
DDDRGDRSVV

SEQ ID NO: 51625 - protein, 10 aa, synthetic construct
DDDRGDRGVV

SEQ ID NO: 51626 - protein, 10 aa, synthetic construct
DDDRGDRSQT

SEQ ID NO: 51627 - protein, 10 aa, synthetic construct
EKNRGDYSSV

SEQ ID NO: 51628 - protein, 10 aa, synthetic construct
DGRRGDRSVV

SEQ ID NO: 51629 - protein, 10 aa, synthetic construct
DDERGDRGQI

SEQ ID NO: 51630 - protein, 10 aa, synthetic construct
DDERGDRQGI

SEQ ID NO: 51631 - protein, 10 aa, synthetic construct
DDERGDRSVV

SEQ ID NO: 51632 - protein, 10 aa, synthetic construct
DDERGDRGVV

SEQ ID NO: 51633 - protein, 10 aa, synthetic construct
DDERGDRSQT

SEQ ID NO: 51634 - protein, 10 aa, synthetic construct
DEGRGDHGVL

SEQ ID NO: 51635 - protein, 10 aa, synthetic construct
DEGRGDYVGL

SEQ ID NO: 51636 - protein, 10 aa, synthetic construct
DEGRGDQSTL

SEQ ID NO: 51637 - protein, 10 aa, synthetic construct
DEGRGDLLLS

SEQ ID NO: 51638 - protein, 10 aa, synthetic construct
DEARGDHGVL

SEQ ID NO: 51639 - protein, 10 aa, synthetic construct
DGRRGDRGVV

SEQ ID NO: 51640 - protein, 10 aa, synthetic construct
DEARGDYVGL

SEQ ID NO: 51641 - protein, 10 aa, synthetic construct
DEARGDQSTL

SEQ ID NO: 51642 - protein, 10 aa, synthetic construct
DEARGDLLLS

SEQ ID NO: 51643 - protein, 10 aa, synthetic construct
DEVRGDRGQI

SEQ ID NO: 51644 - protein, 10 aa, synthetic construct
DEVRGDRQGI

SEQ ID NO: 51645 - protein, 10 aa, synthetic construct
DEVRGDRSVV

SEQ ID NO: 51646 - protein, 10 aa, synthetic construct
DEVRGDRGVV

SEQ ID NO: 51647 - protein, 10 aa, synthetic construct
DEVRGDRSQT

SEQ ID NO: 51648 - protein, 10 aa, synthetic construct
DEPRGDHGVL

SEQ ID NO: 51649 - protein, 10 aa, synthetic construct
DEPRGDYVGL

SEQ ID NO: 51650 - protein, 10 aa, synthetic construct
DGRRGDRSQT

SEQ ID NO: 51651 - protein, 10 aa, synthetic construct
DEPRGDQSTL

SEQ ID NO: 51652 - protein, 10 aa, synthetic construct
DEPRGDLLLS

SEQ ID NO: 51653 - protein, 10 aa, synthetic construct
DELRGDRGQI

SEQ ID NO: 51654 - protein, 10 aa, synthetic construct
DELRGDRQGI

SEQ ID NO: 51655 - protein, 10 aa, synthetic construct
DELRGDRSVV

SEQ ID NO: 51656 - protein, 10 aa, synthetic construct
DELRGDRGVV

SEQ ID NO: 51657 - protein, 10 aa, synthetic construct
DELRGDRSQT

SEQ ID NO: 51658 - protein, 10 aa, synthetic construct
DEWRGDRGQI

SEQ ID NO: 51659 - protein, 10 aa, synthetic construct
DEWRGDRQGI

SEQ ID NO: 51660 - protein, 10 aa, synthetic construct
DEWRGDRSVV

SEQ ID NO: 51661 - protein, 10 aa, synthetic construct
DAGRGDRGQI

SEQ ID NO: 51662 - protein, 10 aa, synthetic construct
DEWRGDRGVV

SEQ ID NO: 51663 - protein, 10 aa, synthetic construct
DEWRGDRSQT

SEQ ID NO: 51664 - protein, 10 aa, synthetic construct
DERRGDHGVL

SEQ ID NO: 51665 - protein, 10 aa, synthetic construct
DERRGDYVGL

SEQ ID NO: 51666 - protein, 10 aa, synthetic construct
DERRGDQSTL

SEQ ID NO: 51667 - protein, 10 aa, synthetic construct
DERRGDLLLS

SEQ ID NO: 51668 - protein, 10 aa, synthetic construct
DEHRGDRGQI

SEQ ID NO: 51669 - protein, 10 aa, synthetic construct
DEHRGDRQGI

SEQ ID NO: 51670 - protein, 10 aa, synthetic construct
DEHRGDRSVV

SEQ ID NO: 51671 - protein, 10 aa, synthetic construct
DEHRGDRGVV

SEQ ID NO: 51672 - protein, 10 aa, synthetic construct
DAGRGDRQGI

SEQ ID NO: 51673 - protein, 10 aa, synthetic construct
DEHRGDRSQT

SEQ ID NO: 51674 - protein, 10 aa, synthetic construct
DESRGDRGQI

SEQ ID NO: 51675 - protein, 10 aa, synthetic construct
DESRGDRQGI

SEQ ID NO: 51676 - protein, 10 aa, synthetic construct
DESRGDRSVV

SEQ ID NO: 51677 - protein, 10 aa, synthetic construct
DESRGDRGVV

SEQ ID NO: 51678 - protein, 10 aa, synthetic construct
DESRGDRSQT

SEQ ID NO: 51679 - protein, 10 aa, synthetic construct
DETRGDRGQI

SEQ ID NO: 51680 - protein, 10 aa, synthetic construct
DETRGDRQGI

SEQ ID NO: 51681 - protein, 10 aa, synthetic construct
DETRGDRSVV

SEQ ID NO: 51682 - protein, 10 aa, synthetic construct
DETRGDRGVV

SEQ ID NO: 51683 - protein, 10 aa, synthetic construct
DAGRGDRSVV

SEQ ID NO: 51684 - protein, 10 aa, synthetic construct
DETRGDRSQT

SEQ ID NO: 51685 - protein, 10 aa, synthetic construct
DEQRGDRGQI

SEQ ID NO: 51686 - protein, 10 aa, synthetic construct
DEQRGDRQGI

SEQ ID NO: 51687 - protein, 10 aa, synthetic construct
DEQRGDRSVV

SEQ ID NO: 51688 - protein, 10 aa, synthetic construct
DEQRGDRGVV

SEQ ID NO: 51689 - protein, 10 aa, synthetic construct
DEQRGDRSQT

SEQ ID NO: 51690 - protein, 10 aa, synthetic construct
DEDRGDRGQI

SEQ ID NO: 51691 - protein, 10 aa, synthetic construct
DEDRGDRQGI

SEQ ID NO: 51692 - protein, 10 aa, synthetic construct
DEDRGDRSVV

SEQ ID NO: 51693 - protein, 10 aa, synthetic construct
DEDRGDRGVV

SEQ ID NO: 51694 - protein, 10 aa, synthetic construct
DAGRGDRGVV

SEQ ID NO: 51695 - protein, 10 aa, synthetic construct
DEDRGDRSQT

SEQ ID NO: 51696 - protein, 10 aa, synthetic construct
DEERGDRGQI

SEQ ID NO: 51697 - protein, 10 aa, synthetic construct
DEERGDRQGI

SEQ ID NO: 51698 - protein, 10 aa, synthetic construct
DEERGDRSVV

SEQ ID NO: 51699 - protein, 10 aa, synthetic construct
DEERGDRGVV

SEQ ID NO: 51700 - protein, 10 aa, synthetic construct
DEERGDRSQT

SEQ ID NO: 51701 - protein, 10 aa, synthetic construct
QGGRGDHVNL

SEQ ID NO: 51702 - protein, 10 aa, synthetic construct
QGGRGDRDYL

SEQ ID NO: 51703 - protein, 10 aa, synthetic construct
QGGRGDYSSV

SEQ ID NO: 51704 - protein, 10 aa, synthetic construct
QGGRGDLTVT

SEQ ID NO: 51705 - protein, 10 aa, synthetic construct
DAGRGDRSQT

SEQ ID NO: 51706 - protein, 10 aa, synthetic construct
QGGRGDLIGR

SEQ ID NO: 51707 - protein, 10 aa, synthetic construct
QGARGDHVNL

SEQ ID NO: 51708 - protein, 10 aa, synthetic construct
QGARGDRDYL

SEQ ID NO: 51709 - protein, 10 aa, synthetic construct
QGARGDYSSV

SEQ ID NO: 51710 - protein, 10 aa, synthetic construct
QGARGDLTVT

SEQ ID NO: 51711 - protein, 10 aa, synthetic construct
QGARGDLIGR

SEQ ID NO: 51712 - protein, 10 aa, synthetic construct
QGVRGDHGVL

SEQ ID NO: 51713 - protein, 10 aa, synthetic construct
QGVRGDYVGL

SEQ ID NO: 51714 - protein, 10 aa, synthetic construct
QGVRGDQSTL

SEQ ID NO: 51715 - protein, 10 aa, synthetic construct
QGVRGDLLLS

SEQ ID NO: 51716 - protein, 10 aa, synthetic construct
DAARGDRGQI

SEQ ID NO: 51717 - protein, 10 aa, synthetic construct
QGPRGDHVNL

SEQ ID NO: 51718 - protein, 10 aa, synthetic construct
QGPRGDRDYL

SEQ ID NO: 51719 - protein, 10 aa, synthetic construct
QGPRGDYSSV

SEQ ID NO: 51720 - protein, 10 aa, synthetic construct
QGPRGDLTVT

SEQ ID NO: 51721 - protein, 10 aa, synthetic construct
QGPRGDLIGR

SEQ ID NO: 51722 - protein, 10 aa, synthetic construct
QGLRGDHGVL

SEQ ID NO: 51723 - protein, 10 aa, synthetic construct
QGLRGDYVGL

SEQ ID NO: 51724 - protein, 10 aa, synthetic construct
QGLRGDQSTL

SEQ ID NO: 51725 - protein, 10 aa, synthetic construct
QGLRGDLLLS

SEQ ID NO: 51726 - protein, 10 aa, synthetic construct
QGIRGDRGQI

SEQ ID NO: 51727 - protein, 10 aa, synthetic construct
DAARGDRQGI

SEQ ID NO: 51728 - protein, 10 aa, synthetic construct
QGIRGDRQGI

SEQ ID NO: 51729 - protein, 10 aa, synthetic construct
QGIRGDRSVV

SEQ ID NO: 51730 - protein, 10 aa, synthetic construct
QGIRGDRGVV

SEQ ID NO: 51731 - protein, 10 aa, synthetic construct
QGIRGDRSQT

SEQ ID NO: 51732 - protein, 10 aa, synthetic construct
QGMRGDRGQI

SEQ ID NO: 51733 - protein, 10 aa, synthetic construct
QGMRGDRQGI

SEQ ID NO: 51734 - protein, 10 aa, synthetic construct
QGMRGDRSVV

SEQ ID NO: 51735 - protein, 10 aa, synthetic construct
QGMRGDRGVV

SEQ ID NO: 51736 - protein, 10 aa, synthetic construct
QGMRGDRSQT

SEQ ID NO: 51737 - protein, 10 aa, synthetic construct
QGWRGDHGVL

SEQ ID NO: 51738 - protein, 10 aa, synthetic construct
DKKRGDRSVV

SEQ ID NO: 51739 - protein, 10 aa, synthetic construct
EKNRGDLTVT

SEQ ID NO: 51740 - protein, 10 aa, synthetic construct
DAARGDRSVV

SEQ ID NO: 51741 - protein, 10 aa, synthetic construct
QGWRGDYVGL

SEQ ID NO: 51742 - protein, 10 aa, synthetic construct
QGWRGDQSTL

SEQ ID NO: 51743 - protein, 10 aa, synthetic construct
QGWRGDLLLS

SEQ ID NO: 51744 - protein, 10 aa, synthetic construct
QGFRGDRGQI

SEQ ID NO: 51745 - protein, 10 aa, synthetic construct
QGFRGDRQGI

SEQ ID NO: 51746 - protein, 10 aa, synthetic construct
QGFRGDRSVV

SEQ ID NO: 51747 - protein, 10 aa, synthetic construct
QGFRGDRGVV

SEQ ID NO: 51748 - protein, 10 aa, synthetic construct
QGFRGDRSQT

SEQ ID NO: 51749 - protein, 10 aa, synthetic construct
QGKRGDRGQI

SEQ ID NO: 51750 - protein, 10 aa, synthetic construct
QGKRGDRQGI

SEQ ID NO: 51751 - protein, 10 aa, synthetic construct
DAARGDRGVV

SEQ ID NO: 51752 - protein, 10 aa, synthetic construct
QGKRGDRSVV

SEQ ID NO: 51753 - protein, 10 aa, synthetic construct
QGKRGDRGVV

SEQ ID NO: 51754 - protein, 10 aa, synthetic construct
QGKRGDRSQT

SEQ ID NO: 51755 - protein, 10 aa, synthetic construct
QGRRGDHVNL

SEQ ID NO: 51756 - protein, 10 aa, synthetic construct
QGRRGDRDYL

SEQ ID NO: 51757 - protein, 10 aa, synthetic construct
QGRRGDYSSV

SEQ ID NO: 51758 - protein, 10 aa, synthetic construct
QGRRGDLTVT

SEQ ID NO: 51759 - protein, 10 aa, synthetic construct
QGRRGDLIGR

SEQ ID NO: 51760 - protein, 10 aa, synthetic construct
QGHRGDHGVL

SEQ ID NO: 51761 - protein, 10 aa, synthetic construct
QGHRGDYVGL

SEQ ID NO: 51762 - protein, 10 aa, synthetic construct
DAARGDRSQT

SEQ ID NO: 51763 - protein, 10 aa, synthetic construct
QGHRGDQSTL

SEQ ID NO: 51764 - protein, 10 aa, synthetic construct
QGHRGDLLLS

SEQ ID NO: 51765 - protein, 10 aa, synthetic construct
QGSRGDHGVL

SEQ ID NO: 51766 - protein, 10 aa, synthetic construct
QGSRGDYVGL

SEQ ID NO: 51767 - protein, 10 aa, synthetic construct
QGSRGDQSTL

SEQ ID NO: 51768 - protein, 10 aa, synthetic construct
QGSRGDLLLS

SEQ ID NO: 51769 - protein, 10 aa, synthetic construct
QGTRGDHGVL

SEQ ID NO: 51770 - protein, 10 aa, synthetic construct
QGTRGDYVGL

SEQ ID NO: 51771 - protein, 10 aa, synthetic construct
QGTRGDQSTL

SEQ ID NO: 51772 - protein, 10 aa, synthetic construct
QGTRGDLLLS

SEQ ID NO: 51773 - protein, 10 aa, synthetic construct
DAPRGDRGQI

SEQ ID NO: 51774 - protein, 10 aa, synthetic construct
QGYRGDRGQI

SEQ ID NO: 51775 - protein, 10 aa, synthetic construct
QGYRGDRQGI

SEQ ID NO: 51776 - protein, 10 aa, synthetic construct
QGYRGDRSVV

SEQ ID NO: 51777 - protein, 10 aa, synthetic construct
QGYRGDRGVV

SEQ ID NO: 51778 - protein, 10 aa, synthetic construct
QGYRGDRSQT

SEQ ID NO: 51779 - protein, 10 aa, synthetic construct
QGNRGDRGQI

SEQ ID NO: 51780 - protein, 10 aa, synthetic construct
QGNRGDRQGI

SEQ ID NO: 51781 - protein, 10 aa, synthetic construct
QGNRGDRSVV

SEQ ID NO: 51782 - protein, 10 aa, synthetic construct
QGNRGDRGVV

SEQ ID NO: 51783 - protein, 10 aa, synthetic construct
QGNRGDRSQT

SEQ ID NO: 51784 - protein, 10 aa, synthetic construct
DAPRGDRQGI

SEQ ID NO: 51785 - protein, 10 aa, synthetic construct
QGQRGDHGVL

SEQ ID NO: 51786 - protein, 10 aa, synthetic construct
QGQRGDYVGL

SEQ ID NO: 51787 - protein, 10 aa, synthetic construct
QGQRGDQSTL

SEQ ID NO: 51788 - protein, 10 aa, synthetic construct
QGQRGDLLLS

SEQ ID NO: 51789 - protein, 10 aa, synthetic construct
QGDRGDHGVL

SEQ ID NO: 51790 - protein, 10 aa, synthetic construct
QGDRGDYVGL

SEQ ID NO: 51791 - protein, 10 aa, synthetic construct
QGDRGDQSTL

SEQ ID NO: 51792 - protein, 10 aa, synthetic construct
QGDRGDLLLS

SEQ ID NO: 51793 - protein, 10 aa, synthetic construct
QGERGDHGVL

SEQ ID NO: 51794 - protein, 10 aa, synthetic construct
QGERGDYVGL

SEQ ID NO: 51795 - protein, 10 aa, synthetic construct
DAPRGDRSVV

SEQ ID NO: 51796 - protein, 10 aa, synthetic construct
QGERGDQSTL

SEQ ID NO: 51797 - protein, 10 aa, synthetic construct
QGERGDLLLS

SEQ ID NO: 51798 - protein, 10 aa, synthetic construct
QAGRGDHVNL

SEQ ID NO: 51799 - protein, 10 aa, synthetic construct
QAGRGDRDYL

SEQ ID NO: 51800 - protein, 10 aa, synthetic construct
QAGRGDYSSV

SEQ ID NO: 51801 - protein, 10 aa, synthetic construct
QAGRGDLTVT

SEQ ID NO: 51802 - protein, 10 aa, synthetic construct
QAGRGDLIGR

SEQ ID NO: 51803 - protein, 10 aa, synthetic construct
QAARGDHVNL

SEQ ID NO: 51804 - protein, 10 aa, synthetic construct
QAARGDRDYL

SEQ ID NO: 51805 - protein, 10 aa, synthetic construct
QAARGDYSSV

SEQ ID NO: 51806 - protein, 10 aa, synthetic construct
DAPRGDRGVV

SEQ ID NO: 51807 - protein, 10 aa, synthetic construct
QAARGDLTVT

SEQ ID NO: 51808 - protein, 10 aa, synthetic construct
QAARGDLIGR

SEQ ID NO: 51809 - protein, 10 aa, synthetic construct
QAVRGDHGVL

SEQ ID NO: 51810 - protein, 10 aa, synthetic construct
QAVRGDYVGL

SEQ ID NO: 51811 - protein, 10 aa, synthetic construct
QAVRGDQSTL

SEQ ID NO: 51812 - protein, 10 aa, synthetic construct
QAVRGDLLLS

SEQ ID NO: 51813 - protein, 10 aa, synthetic construct
QAPRGDHVNL

SEQ ID NO: 51814 - protein, 10 aa, synthetic construct
QAPRGDRDYL

SEQ ID NO: 51815 - protein, 10 aa, synthetic construct
QAPRGDYSSV

SEQ ID NO: 51816 - protein, 10 aa, synthetic construct
QAPRGDLTVT

SEQ ID NO: 51817 - protein, 10 aa, synthetic construct
DAPRGDRSQT

SEQ ID NO: 51818 - protein, 10 aa, synthetic construct
QAPRGDLIGR

SEQ ID NO: 51819 - protein, 10 aa, synthetic construct
QALRGDHGVL

SEQ ID NO: 51820 - protein, 10 aa, synthetic construct
QALRGDYVGL

SEQ ID NO: 51821 - protein, 10 aa, synthetic construct
QALRGDQSTL

SEQ ID NO: 51822 - protein, 10 aa, synthetic construct
QALRGDLLLS

SEQ ID NO: 51823 - protein, 10 aa, synthetic construct
QAIRGDRGQI

SEQ ID NO: 51824 - protein, 10 aa, synthetic construct
QAIRGDRQGI

SEQ ID NO: 51825 - protein, 10 aa, synthetic construct
QAIRGDRSVV

SEQ ID NO: 51826 - protein, 10 aa, synthetic construct
QAIRGDRGVV

SEQ ID NO: 51827 - protein, 10 aa, synthetic construct
QAIRGDRSQT

SEQ ID NO: 51828 - protein, 10 aa, synthetic construct
DARRGDRGQI

SEQ ID NO: 51829 - protein, 10 aa, synthetic construct
QAMRGDRGQI

SEQ ID NO: 51830 - protein, 10 aa, synthetic construct
QAMRGDRQGI

SEQ ID NO: 51831 - protein, 10 aa, synthetic construct
QAMRGDRSVV

SEQ ID NO: 51832 - protein, 10 aa, synthetic construct
QAMRGDRGVV

SEQ ID NO: 51833 - protein, 10 aa, synthetic construct
QAMRGDRSQT

SEQ ID NO: 51834 - protein, 10 aa, synthetic construct
QAWRGDHGVL

SEQ ID NO: 51835 - protein, 10 aa, synthetic construct
QAWRGDYVGL

SEQ ID NO: 51836 - protein, 10 aa, synthetic construct
QAWRGDQSTL

SEQ ID NO: 51837 - protein, 10 aa, synthetic construct
QAWRGDLLLS

SEQ ID NO: 51838 - protein, 10 aa, synthetic construct
QAFRGDRGQI

SEQ ID NO: 51839 - protein, 10 aa, synthetic construct
DARRGDRQGI

SEQ ID NO: 51840 - protein, 10 aa, synthetic construct
QAFRGDRQGI

SEQ ID NO: 51841 - protein, 10 aa, synthetic construct
QAFRGDRSVV

SEQ ID NO: 51842 - protein, 10 aa, synthetic construct
QAFRGDRGVV

SEQ ID NO: 51843 - protein, 10 aa, synthetic construct
QAFRGDRSQT

SEQ ID NO: 51844 - protein, 10 aa, synthetic construct
QAKRGDRGQI

SEQ ID NO: 51845 - protein, 10 aa, synthetic construct
QAKRGDRQGI

SEQ ID NO: 51846 - protein, 10 aa, synthetic construct
QAKRGDRSVV

SEQ ID NO: 51847 - protein, 10 aa, synthetic construct
QAKRGDRGVV

SEQ ID NO: 51848 - protein, 10 aa, synthetic construct
QAKRGDRSQT

SEQ ID NO: 51849 - protein, 10 aa, synthetic construct
QARRGDHVNL

SEQ ID NO: 51850 - protein, 10 aa, synthetic construct
NKKRGDHGVL

SEQ ID NO: 51851 - protein, 10 aa, synthetic construct
DARRGDRSVV

SEQ ID NO: 51852 - protein, 10 aa, synthetic construct
QARRGDRDYL

SEQ ID NO: 51853 - protein, 10 aa, synthetic construct
QARRGDYSSV

SEQ ID NO: 51854 - protein, 10 aa, synthetic construct
QARRGDLTVT

SEQ ID NO: 51855 - protein, 10 aa, synthetic construct
QARRGDLIGR

SEQ ID NO: 51856 - protein, 10 aa, synthetic construct
QAHRGDHGVL

SEQ ID NO: 51857 - protein, 10 aa, synthetic construct
QAHRGDYVGL

SEQ ID NO: 51858 - protein, 10 aa, synthetic construct
QAHRGDQSTL

SEQ ID NO: 51859 - protein, 10 aa, synthetic construct
QAHRGDLLLS

SEQ ID NO: 51860 - protein, 10 aa, synthetic construct
QASRGDHGVL

SEQ ID NO: 51861 - protein, 10 aa, synthetic construct
QASRGDYVGL

SEQ ID NO: 51862 - protein, 10 aa, synthetic construct
DARRGDRGVV

SEQ ID NO: 51863 - protein, 10 aa, synthetic construct
QASRGDQSTL

SEQ ID NO: 51864 - protein, 10 aa, synthetic construct
QASRGDLLLS

SEQ ID NO: 51865 - protein, 10 aa, synthetic construct
QATRGDHGVL

SEQ ID NO: 51866 - protein, 10 aa, synthetic construct
QATRGDYVGL

SEQ ID NO: 51867 - protein, 10 aa, synthetic construct
QATRGDQSTL

SEQ ID NO: 51868 - protein, 10 aa, synthetic construct
QATRGDLLLS

SEQ ID NO: 51869 - protein, 10 aa, synthetic construct
QAYRGDRGQI

SEQ ID NO: 51870 - protein, 10 aa, synthetic construct
QAYRGDRQGI

SEQ ID NO: 51871 - protein, 10 aa, synthetic construct
QAYRGDRSVV

SEQ ID NO: 51872 - protein, 10 aa, synthetic construct
QAYRGDRGVV

SEQ ID NO: 51873 - protein, 10 aa, synthetic construct
DARRGDRSQT

SEQ ID NO: 51874 - protein, 10 aa, synthetic construct
QAYRGDRSQT

SEQ ID NO: 51875 - protein, 10 aa, synthetic construct
QANRGDRGQI

SEQ ID NO: 51876 - protein, 10 aa, synthetic construct
QANRGDRQGI

SEQ ID NO: 51877 - protein, 10 aa, synthetic construct
QANRGDRSVV

SEQ ID NO: 51878 - protein, 10 aa, synthetic construct
QANRGDRGVV

SEQ ID NO: 51879 - protein, 10 aa, synthetic construct
QANRGDRSQT

SEQ ID NO: 51880 - protein, 10 aa, synthetic construct
QAQRGDHGVL

SEQ ID NO: 51881 - protein, 10 aa, synthetic construct
QAQRGDYVGL

SEQ ID NO: 51882 - protein, 10 aa, synthetic construct
QAQRGDQSTL

SEQ ID NO: 51883 - protein, 10 aa, synthetic construct
QAQRGDLLLS

SEQ ID NO: 51884 - protein, 10 aa, synthetic construct
DVGRGDRGQI

SEQ ID NO: 51885 - protein, 10 aa, synthetic construct
QADRGDHGVL

SEQ ID NO: 51886 - protein, 10 aa, synthetic construct
QADRGDYVGL

SEQ ID NO: 51887 - protein, 10 aa, synthetic construct
QADRGDQSTL

SEQ ID NO: 51888 - protein, 10 aa, synthetic construct
QADRGDLLLS

SEQ ID NO: 51889 - protein, 10 aa, synthetic construct
QAERGDHGVL

SEQ ID NO: 51890 - protein, 10 aa, synthetic construct
QAERGDYVGL

SEQ ID NO: 51891 - protein, 10 aa, synthetic construct
QAERGDQSTL

SEQ ID NO: 51892 - protein, 10 aa, synthetic construct
QAERGDLLLS

SEQ ID NO: 51893 - protein, 10 aa, synthetic construct
QVGRGDHVNL

SEQ ID NO: 51894 - protein, 10 aa, synthetic construct
QVGRGDRDYL

SEQ ID NO: 51895 - protein, 10 aa, synthetic construct
DVGRGDRQGI

SEQ ID NO: 51896 - protein, 10 aa, synthetic construct
QVGRGDYSSV

SEQ ID NO: 51897 - protein, 10 aa, synthetic construct
QVGRGDLTVT

SEQ ID NO: 51898 - protein, 10 aa, synthetic construct
QVGRGDLIGR

SEQ ID NO: 51899 - protein, 10 aa, synthetic construct
QVARGDHVNL

SEQ ID NO: 51900 - protein, 10 aa, synthetic construct
QVARGDRDYL

SEQ ID NO: 51901 - protein, 10 aa, synthetic construct
QVARGDYSSV

SEQ ID NO: 51902 - protein, 10 aa, synthetic construct
QVARGDLTVT

SEQ ID NO: 51903 - protein, 10 aa, synthetic construct
QVARGDLIGR

SEQ ID NO: 51904 - protein, 10 aa, synthetic construct
QVVRGDHGVL

SEQ ID NO: 51905 - protein, 10 aa, synthetic construct
QVVRGDHVNL

SEQ ID NO: 51906 - protein, 10 aa, synthetic construct
DVGRGDRSVV

SEQ ID NO: 51907 - protein, 10 aa, synthetic construct
QVVRGDYVGL

SEQ ID NO: 51908 - protein, 10 aa, synthetic construct
QVVRGDYSSV

SEQ ID NO: 51909 - protein, 10 aa, synthetic construct
QVVRGDQSTL

SEQ ID NO: 51910 - protein, 10 aa, synthetic construct
QVVRGDLLLS

SEQ ID NO: 51911 - protein, 10 aa, synthetic construct
QVPRGDHVNL

SEQ ID NO: 51912 - protein, 10 aa, synthetic construct
QVPRGDRDYL

SEQ ID NO: 51913 - protein, 10 aa, synthetic construct
QVPRGDYSSV

SEQ ID NO: 51914 - protein, 10 aa, synthetic construct
QVPRGDLTVT

SEQ ID NO: 51915 - protein, 10 aa, synthetic construct
QVPRGDLIGR

SEQ ID NO: 51916 - protein, 10 aa, synthetic construct
QVLRGDHGVL

SEQ ID NO: 51917 - protein, 10 aa, synthetic construct
DVGRGDRGVV

SEQ ID NO: 51918 - protein, 10 aa, synthetic construct
QVLRGDHVNL

SEQ ID NO: 51919 - protein, 10 aa, synthetic construct
QVLRGDYVGL

SEQ ID NO: 51920 - protein, 10 aa, synthetic construct
QVLRGDYSSV

SEQ ID NO: 51921 - protein, 10 aa, synthetic construct
QVLRGDQSTL

SEQ ID NO: 51922 - protein, 10 aa, synthetic construct
QVLRGDLLLS

SEQ ID NO: 51923 - protein, 10 aa, synthetic construct
QVIRGDRGQI

SEQ ID NO: 51924 - protein, 10 aa, synthetic construct
QVIRGDRQGI

SEQ ID NO: 51925 - protein, 10 aa, synthetic construct
QVIRGDRSVV

SEQ ID NO: 51926 - protein, 10 aa, synthetic construct
QVIRGDRGVV

SEQ ID NO: 51927 - protein, 10 aa, synthetic construct
QVIRGDYVGL

SEQ ID NO: 51928 - protein, 10 aa, synthetic construct
DVGRGDRSQT

SEQ ID NO: 51929 - protein, 10 aa, synthetic construct
QVIRGDQSTL

SEQ ID NO: 51930 - protein, 10 aa, synthetic construct
QVIRGDRSQT

SEQ ID NO: 51931 - protein, 10 aa, synthetic construct
QVIRGDLLLS

SEQ ID NO: 51932 - protein, 10 aa, synthetic construct
QVMRGDRGQI

SEQ ID NO: 51933 - protein, 10 aa, synthetic construct
QVMRGDRQGI

SEQ ID NO: 51934 - protein, 10 aa, synthetic construct
QVMRGDRSVV

SEQ ID NO: 51935 - protein, 10 aa, synthetic construct
QVMRGDRGVV

SEQ ID NO: 51936 - protein, 10 aa, synthetic construct
QVMRGDYVGL

SEQ ID NO: 51937 - protein, 10 aa, synthetic construct
QVMRGDQSTL

SEQ ID NO: 51938 - protein, 10 aa, synthetic construct
QVMRGDRSQT

SEQ ID NO: 51939 - protein, 10 aa, synthetic construct
DVARGDRGQI

SEQ ID NO: 51940 - protein, 10 aa, synthetic construct
QVMRGDLLLS

SEQ ID NO: 51941 - protein, 10 aa, synthetic construct
QVWRGDHGVL

SEQ ID NO: 51942 - protein, 10 aa, synthetic construct
QVWRGDHVNL

SEQ ID NO: 51943 - protein, 10 aa, synthetic construct
QVWRGDYVGL

SEQ ID NO: 51944 - protein, 10 aa, synthetic construct
QVWRGDYSSV

SEQ ID NO: 51945 - protein, 10 aa, synthetic construct
QVWRGDQSTL

SEQ ID NO: 51946 - protein, 10 aa, synthetic construct
QVWRGDLLLS

SEQ ID NO: 51947 - protein, 10 aa, synthetic construct
QVFRGDRGQI

SEQ ID NO: 51948 - protein, 10 aa, synthetic construct
QVFRGDRQGI

SEQ ID NO: 51949 - protein, 10 aa, synthetic construct
QVFRGDRSVV

SEQ ID NO: 51950 - protein, 10 aa, synthetic construct
DVARGDRQGI

SEQ ID NO: 51951 - protein, 10 aa, synthetic construct
QVFRGDRGVV

SEQ ID NO: 51952 - protein, 10 aa, synthetic construct
QVFRGDYVGL

SEQ ID NO: 51953 - protein, 10 aa, synthetic construct
QVFRGDQSTL

SEQ ID NO: 51954 - protein, 10 aa, synthetic construct
QVFRGDRSQT

SEQ ID NO: 51955 - protein, 10 aa, synthetic construct
QVFRGDLLLS

SEQ ID NO: 51956 - protein, 10 aa, synthetic construct
QVKRGDRGQI

SEQ ID NO: 51957 - protein, 10 aa, synthetic construct
QVKRGDRQGI

SEQ ID NO: 51958 - protein, 10 aa, synthetic construct
QVKRGDRSVV

SEQ ID NO: 51959 - protein, 10 aa, synthetic construct
QVKRGDRGVV

SEQ ID NO: 51960 - protein, 10 aa, synthetic construct
QVKRGDYVGL

SEQ ID NO: 51961 - protein, 10 aa, synthetic construct
NKKRGDRGQI

SEQ ID NO: 51962 - protein, 10 aa, synthetic construct
DVARGDRSVV

SEQ ID NO: 51963 - protein, 10 aa, synthetic construct
QVKRGDQSTL

SEQ ID NO: 51964 - protein, 10 aa, synthetic construct
QVKRGDRSQT

SEQ ID NO: 51965 - protein, 10 aa, synthetic construct
QVKRGDLLLS

SEQ ID NO: 51966 - protein, 10 aa, synthetic construct
QVRRGDHVNL

SEQ ID NO: 51967 - protein, 10 aa, synthetic construct
QVRRGDRDYL

SEQ ID NO: 51968 - protein, 10 aa, synthetic construct
QVRRGDYSSV

SEQ ID NO: 51969 - protein, 10 aa, synthetic construct
QVRRGDLTVT

SEQ ID NO: 51970 - protein, 10 aa, synthetic construct
QVRRGDLIGR

SEQ ID NO: 51971 - protein, 10 aa, synthetic construct
QVHRGDHGVL

SEQ ID NO: 51972 - protein, 10 aa, synthetic construct
QVHRGDHVNL

SEQ ID NO: 51973 - protein, 10 aa, synthetic construct
DVARGDRGVV

SEQ ID NO: 51974 - protein, 10 aa, synthetic construct
QVHRGDYVGL

SEQ ID NO: 51975 - protein, 10 aa, synthetic construct
QVHRGDYSSV

SEQ ID NO: 51976 - protein, 10 aa, synthetic construct
QVHRGDQSTL

SEQ ID NO: 51977 - protein, 10 aa, synthetic construct
QVHRGDLLLS

SEQ ID NO: 51978 - protein, 10 aa, synthetic construct
QVSRGDHGVL

SEQ ID NO: 51979 - protein, 10 aa, synthetic construct
QVSRGDHVNL

SEQ ID NO: 51980 - protein, 10 aa, synthetic construct
QVSRGDYVGL

SEQ ID NO: 51981 - protein, 10 aa, synthetic construct
QVSRGDYSSV

SEQ ID NO: 51982 - protein, 10 aa, synthetic construct
QVSRGDQSTL

SEQ ID NO: 51983 - protein, 10 aa, synthetic construct
QVSRGDLLLS

SEQ ID NO: 51984 - protein, 10 aa, synthetic construct
DVARGDRSQT

SEQ ID NO: 51985 - protein, 10 aa, synthetic construct
QVTRGDHGVL

SEQ ID NO: 51986 - protein, 10 aa, synthetic construct
QVTRGDHVNL

SEQ ID NO: 51987 - protein, 10 aa, synthetic construct
QVTRGDYVGL

SEQ ID NO: 51988 - protein, 10 aa, synthetic construct
QVTRGDYSSV

SEQ ID NO: 51989 - protein, 10 aa, synthetic construct
QVTRGDQSTL

SEQ ID NO: 51990 - protein, 10 aa, synthetic construct
QVTRGDLLLS

SEQ ID NO: 51991 - protein, 10 aa, synthetic construct
QVYRGDRGQI

SEQ ID NO: 51992 - protein, 10 aa, synthetic construct
QVYRGDRQGI

SEQ ID NO: 51993 - protein, 10 aa, synthetic construct
QVYRGDRSVV

SEQ ID NO: 51994 - protein, 10 aa, synthetic construct
QVYRGDRGVV

SEQ ID NO: 51995 - protein, 10 aa, synthetic construct
DVPRGDRGQI

SEQ ID NO: 51996 - protein, 10 aa, synthetic construct
QVYRGDYVGL

SEQ ID NO: 51997 - protein, 10 aa, synthetic construct
QVYRGDQSTL

SEQ ID NO: 51998 - protein, 10 aa, synthetic construct
QVYRGDRSQT

SEQ ID NO: 51999 - protein, 10 aa, synthetic construct
QVYRGDLLLS

SEQ ID NO: 52000 - protein, 10 aa, synthetic construct
QVNRGDRGQI

SEQ ID NO: 52001 - protein, 10 aa, synthetic construct
QVNRGDRQGI

SEQ ID NO: 52002 - protein, 10 aa, synthetic construct
QVNRGDRSVV

SEQ ID NO: 52003 - protein, 10 aa, synthetic construct
QVNRGDRGVV

SEQ ID NO: 52004 - protein, 10 aa, synthetic construct
QVNRGDYVGL

SEQ ID NO: 52005 - protein, 10 aa, synthetic construct
QVNRGDQSTL

SEQ ID NO: 52006 - protein, 10 aa, synthetic construct
DVPRGDRQGI

SEQ ID NO: 52007 - protein, 10 aa, synthetic construct
QVNRGDRSQT

SEQ ID NO: 52008 - protein, 10 aa, synthetic construct
QVNRGDLLLS

SEQ ID NO: 52009 - protein, 10 aa, synthetic construct
QVQRGDHGVL

SEQ ID NO: 52010 - protein, 10 aa, synthetic construct
QVQRGDHVNL

SEQ ID NO: 52011 - protein, 10 aa, synthetic construct
QVQRGDYVGL

SEQ ID NO: 52012 - protein, 10 aa, synthetic construct
QVQRGDYSSV

SEQ ID NO: 52013 - protein, 10 aa, synthetic construct
QVQRGDQSTL

SEQ ID NO: 52014 - protein, 10 aa, synthetic construct
QVQRGDLLLS

SEQ ID NO: 52015 - protein, 10 aa, synthetic construct
QVDRGDHGVL

SEQ ID NO: 52016 - protein, 10 aa, synthetic construct
QVDRGDHVNL

SEQ ID NO: 52017 - protein, 10 aa, synthetic construct
DVPRGDRSVV

SEQ ID NO: 52018 - protein, 10 aa, synthetic construct
QVDRGDYVGL

SEQ ID NO: 52019 - protein, 10 aa, synthetic construct
QVDRGDYSSV

SEQ ID NO: 52020 - protein, 10 aa, synthetic construct
QVDRGDQSTL

SEQ ID NO: 52021 - protein, 10 aa, synthetic construct
QVDRGDLLLS

SEQ ID NO: 52022 - protein, 10 aa, synthetic construct
QVERGDHGVL

SEQ ID NO: 52023 - protein, 10 aa, synthetic construct
QVERGDHVNL

SEQ ID NO: 52024 - protein, 10 aa, synthetic construct
QVERGDYVGL

SEQ ID NO: 52025 - protein, 10 aa, synthetic construct
QVERGDYSSV

SEQ ID NO: 52026 - protein, 10 aa, synthetic construct
QVERGDQSTL

SEQ ID NO: 52027 - protein, 10 aa, synthetic construct
QVERGDLLLS

SEQ ID NO: 52028 - protein, 10 aa, synthetic construct
DVPRGDRGVV

SEQ ID NO: 52029 - protein, 10 aa, synthetic construct
QPGRGDHVNL

SEQ ID NO: 52030 - protein, 10 aa, synthetic construct
QPGRGDRDYL

SEQ ID NO: 52031 - protein, 10 aa, synthetic construct
QPGRGDYSSV

SEQ ID NO: 52032 - protein, 10 aa, synthetic construct
QPGRGDLTVT

SEQ ID NO: 52033 - protein, 10 aa, synthetic construct
QPGRGDLIGR

SEQ ID NO: 52034 - protein, 10 aa, synthetic construct
QPARGDHVNL

SEQ ID NO: 52035 - protein, 10 aa, synthetic construct
QPARGDRDYL

SEQ ID NO: 52036 - protein, 10 aa, synthetic construct
QPARGDYSSV

SEQ ID NO: 52037 - protein, 10 aa, synthetic construct
QPARGDLTVT

SEQ ID NO: 52038 - protein, 10 aa, synthetic construct
QPARGDLIGR

SEQ ID NO: 52039 - protein, 10 aa, synthetic construct
DVPRGDRSQT

SEQ ID NO: 52040 - protein, 10 aa, synthetic construct
QPVRGDHGVL

SEQ ID NO: 52041 - protein, 10 aa, synthetic construct
QPVRGDYVGL

SEQ ID NO: 52042 - protein, 10 aa, synthetic construct
QPVRGDQSTL

SEQ ID NO: 52043 - protein, 10 aa, synthetic construct
QPVRGDLLLS

SEQ ID NO: 52044 - protein, 10 aa, synthetic construct
QPPRGDHVNL

SEQ ID NO: 52045 - protein, 10 aa, synthetic construct
QPPRGDRDYL

SEQ ID NO: 52046 - protein, 10 aa, synthetic construct
QPPRGDYSSV

SEQ ID NO: 52047 - protein, 10 aa, synthetic construct
QPPRGDLTVT

SEQ ID NO: 52048 - protein, 10 aa, synthetic construct
QPPRGDLIGR

SEQ ID NO: 52049 - protein, 10 aa, synthetic construct
QPLRGDHGVL

SEQ ID NO: 52050 - protein, 10 aa, synthetic construct
DVRRGDRGQI

SEQ ID NO: 52051 - protein, 10 aa, synthetic construct
QPLRGDYVGL

SEQ ID NO: 52052 - protein, 10 aa, synthetic construct
QPLRGDQSTL

SEQ ID NO: 52053 - protein, 10 aa, synthetic construct
QPLRGDLLLS

SEQ ID NO: 52054 - protein, 10 aa, synthetic construct
QPIRGDRGQI

SEQ ID NO: 52055 - protein, 10 aa, synthetic construct
QPIRGDRQGI

SEQ ID NO: 52056 - protein, 10 aa, synthetic construct
QPIRGDRSVV

SEQ ID NO: 52057 - protein, 10 aa, synthetic construct
QPIRGDRGVV

SEQ ID NO: 52058 - protein, 10 aa, synthetic construct
QPIRGDRSQT

SEQ ID NO: 52059 - protein, 10 aa, synthetic construct
QPMRGDRGQI

SEQ ID NO: 52060 - protein, 10 aa, synthetic construct
QPMRGDRQGI

SEQ ID NO: 52061 - protein, 10 aa, synthetic construct
DVRRGDRQGI

SEQ ID NO: 52062 - protein, 10 aa, synthetic construct
QPMRGDRSVV

SEQ ID NO: 52063 - protein, 10 aa, synthetic construct
QPMRGDRGVV

SEQ ID NO: 52064 - protein, 10 aa, synthetic construct
QPMRGDRSQT

SEQ ID NO: 52065 - protein, 10 aa, synthetic construct
QPWRGDHGVL

SEQ ID NO: 52066 - protein, 10 aa, synthetic construct
QPWRGDYVGL

SEQ ID NO: 52067 - protein, 10 aa, synthetic construct
QPWRGDQSTL

SEQ ID NO: 52068 - protein, 10 aa, synthetic construct
QPWRGDLLLS

SEQ ID NO: 52069 - protein, 10 aa, synthetic construct
QPFRGDRGQI

SEQ ID NO: 52070 - protein, 10 aa, synthetic construct
QPFRGDRQGI

SEQ ID NO: 52071 - protein, 10 aa, synthetic construct
QPFRGDRSVV

SEQ ID NO: 52072 - protein, 10 aa, synthetic construct
NKKRGDRQGI

SEQ ID NO: 52073 - protein, 10 aa, synthetic construct
DVRRGDRSVV

SEQ ID NO: 52074 - protein, 10 aa, synthetic construct
QPFRGDRGVV

SEQ ID NO: 52075 - protein, 10 aa, synthetic construct
QPFRGDRSQT

SEQ ID NO: 52076 - protein, 10 aa, synthetic construct
QPKRGDRGQI

SEQ ID NO: 52077 - protein, 10 aa, synthetic construct
QPKRGDRQGI

SEQ ID NO: 52078 - protein, 10 aa, synthetic construct
QPKRGDRSVV

SEQ ID NO: 52079 - protein, 10 aa, synthetic construct
QPKRGDRGVV

SEQ ID NO: 52080 - protein, 10 aa, synthetic construct
QPKRGDRSQT

SEQ ID NO: 52081 - protein, 10 aa, synthetic construct
QPRRGDHVNL

SEQ ID NO: 52082 - protein, 10 aa, synthetic construct
QPRRGDRDYL

SEQ ID NO: 52083 - protein, 10 aa, synthetic construct
QPRRGDYSSV

SEQ ID NO: 52084 - protein, 10 aa, synthetic construct
DVRRGDRGVV

SEQ ID NO: 52085 - protein, 10 aa, synthetic construct
QPRRGDLTVT

SEQ ID NO: 52086 - protein, 10 aa, synthetic construct
QPRRGDLIGR

SEQ ID NO: 52087 - protein, 10 aa, synthetic construct
QPHRGDHGVL

SEQ ID NO: 52088 - protein, 10 aa, synthetic construct
QPHRGDYVGL

SEQ ID NO: 52089 - protein, 10 aa, synthetic construct
QPHRGDQSTL

SEQ ID NO: 52090 - protein, 10 aa, synthetic construct
QPHRGDLLLS

SEQ ID NO: 52091 - protein, 10 aa, synthetic construct
QPSRGDHGVL

SEQ ID NO: 52092 - protein, 10 aa, synthetic construct
QPSRGDYVGL

SEQ ID NO: 52093 - protein, 10 aa, synthetic construct
QPSRGDQSTL

SEQ ID NO: 52094 - protein, 10 aa, synthetic construct
QPSRGDLLLS

SEQ ID NO: 52095 - protein, 10 aa, synthetic construct
DVRRGDRSQT

SEQ ID NO: 52096 - protein, 10 aa, synthetic construct
QPTRGDHGVL

SEQ ID NO: 52097 - protein, 10 aa, synthetic construct
QPTRGDYVGL

SEQ ID NO: 52098 - protein, 10 aa, synthetic construct
QPTRGDQSTL

SEQ ID NO: 52099 - protein, 10 aa, synthetic construct
QPTRGDLLLS

SEQ ID NO: 52100 - protein, 10 aa, synthetic construct
QPYRGDRGQI

SEQ ID NO: 52101 - protein, 10 aa, synthetic construct
QPYRGDRQGI

SEQ ID NO: 52102 - protein, 10 aa, synthetic construct
QPYRGDRSVV

SEQ ID NO: 52103 - protein, 10 aa, synthetic construct
QPYRGDRGVV

SEQ ID NO: 52104 - protein, 10 aa, synthetic construct
QPYRGDRSQT

SEQ ID NO: 52105 - protein, 10 aa, synthetic construct
QPNRGDRGQI

SEQ ID NO: 52106 - protein, 10 aa, synthetic construct
DPGRGDRGQI

SEQ ID NO: 52107 - protein, 10 aa, synthetic construct
QPNRGDRQGI

SEQ ID NO: 52108 - protein, 10 aa, synthetic construct
QPNRGDRSVV

SEQ ID NO: 52109 - protein, 10 aa, synthetic construct
QPNRGDRGVV

SEQ ID NO: 52110 - protein, 10 aa, synthetic construct
QPNRGDRSQT

SEQ ID NO: 52111 - protein, 10 aa, synthetic construct
QPQRGDHGVL

SEQ ID NO: 52112 - protein, 10 aa, synthetic construct
QPQRGDYVGL

SEQ ID NO: 52113 - protein, 10 aa, synthetic construct
QPQRGDQSTL

SEQ ID NO: 52114 - protein, 10 aa, synthetic construct
QPQRGDLLLS

SEQ ID NO: 52115 - protein, 10 aa, synthetic construct
QPDRGDHGVL

SEQ ID NO: 52116 - protein, 10 aa, synthetic construct
QPDRGDYVGL

SEQ ID NO: 52117 - protein, 10 aa, synthetic construct
DPGRGDRQGI

SEQ ID NO: 52118 - protein, 10 aa, synthetic construct
QPDRGDQSTL

SEQ ID NO: 52119 - protein, 10 aa, synthetic construct
QPDRGDLLLS

SEQ ID NO: 52120 - protein, 10 aa, synthetic construct
QPERGDHGVL

SEQ ID NO: 52121 - protein, 10 aa, synthetic construct
QPERGDYVGL

SEQ ID NO: 52122 - protein, 10 aa, synthetic construct
QPERGDQSTL

SEQ ID NO: 52123 - protein, 10 aa, synthetic construct
QPERGDLLLS

SEQ ID NO: 52124 - protein, 10 aa, synthetic construct
QLGRGDHVNL

SEQ ID NO: 52125 - protein, 10 aa, synthetic construct
QLGRGDRDYL

SEQ ID NO: 52126 - protein, 10 aa, synthetic construct
QLGRGDYSSV

SEQ ID NO: 52127 - protein, 10 aa, synthetic construct
QLGRGDLTVT

SEQ ID NO: 52128 - protein, 10 aa, synthetic construct
DPGRGDRSVV

SEQ ID NO: 52129 - protein, 10 aa, synthetic construct
QLGRGDLIGR

SEQ ID NO: 52130 - protein, 10 aa, synthetic construct
QLARGDHVNL

SEQ ID NO: 52131 - protein, 10 aa, synthetic construct
QLARGDRDYL

SEQ ID NO: 52132 - protein, 10 aa, synthetic construct
QLARGDYSSV

SEQ ID NO: 52133 - protein, 10 aa, synthetic construct
QLARGDLTVT

SEQ ID NO: 52134 - protein, 10 aa, synthetic construct
QLARGDLIGR

SEQ ID NO: 52135 - protein, 10 aa, synthetic construct
QLVRGDHGVL

SEQ ID NO: 52136 - protein, 10 aa, synthetic construct
QLVRGDHVNL

SEQ ID NO: 52137 - protein, 10 aa, synthetic construct
QLVRGDYVGL

SEQ ID NO: 52138 - protein, 10 aa, synthetic construct
QLVRGDYSSV

SEQ ID NO: 52139 - protein, 10 aa, synthetic construct
DPGRGDRGVV

SEQ ID NO: 52140 - protein, 10 aa, synthetic construct
QLVRGDQSTL

SEQ ID NO: 52141 - protein, 10 aa, synthetic construct
QLVRGDLLLS

SEQ ID NO: 52142 - protein, 10 aa, synthetic construct
QLPRGDHVNL

SEQ ID NO: 52143 - protein, 10 aa, synthetic construct
QLPRGDRDYL

SEQ ID NO: 52144 - protein, 10 aa, synthetic construct
QLPRGDYSSV

SEQ ID NO: 52145 - protein, 10 aa, synthetic construct
QLPRGDLTVT

SEQ ID NO: 52146 - protein, 10 aa, synthetic construct
QLPRGDLIGR

SEQ ID NO: 52147 - protein, 10 aa, synthetic construct
QLLRGDHGVL

SEQ ID NO: 52148 - protein, 10 aa, synthetic construct
QLLRGDHVNL

SEQ ID NO: 52149 - protein, 10 aa, synthetic construct
QLLRGDYVGL

SEQ ID NO: 52150 - protein, 10 aa, synthetic construct
DPGRGDRSQT

SEQ ID NO: 52151 - protein, 10 aa, synthetic construct
QLLRGDYSSV

SEQ ID NO: 52152 - protein, 10 aa, synthetic construct
QLLRGDQSTL

SEQ ID NO: 52153 - protein, 10 aa, synthetic construct
QLLRGDLLLS

SEQ ID NO: 52154 - protein, 10 aa, synthetic construct
QLIRGDRGQI

SEQ ID NO: 52155 - protein, 10 aa, synthetic construct
QLIRGDRQGI

SEQ ID NO: 52156 - protein, 10 aa, synthetic construct
QLIRGDRSVV

SEQ ID NO: 52157 - protein, 10 aa, synthetic construct
QLIRGDRGVV

SEQ ID NO: 52158 - protein, 10 aa, synthetic construct
QLIRGDYVGL

SEQ ID NO: 52159 - protein, 10 aa, synthetic construct
QLIRGDQSTL

SEQ ID NO: 52160 - protein, 10 aa, synthetic construct
QLIRGDRSQT

SEQ ID NO: 52161 - protein, 10 aa, synthetic construct
DPARGDRGQI

SEQ ID NO: 52162 - protein, 10 aa, synthetic construct
QLIRGDLLLS

SEQ ID NO: 52163 - protein, 10 aa, synthetic construct
QLMRGDRGQI

SEQ ID NO: 52164 - protein, 10 aa, synthetic construct
QLMRGDRQGI

SEQ ID NO: 52165 - protein, 10 aa, synthetic construct
QLMRGDRSVV

SEQ ID NO: 52166 - protein, 10 aa, synthetic construct
QLMRGDRGVV

SEQ ID NO: 52167 - protein, 10 aa, synthetic construct
QLMRGDYVGL

SEQ ID NO: 52168 - protein, 10 aa, synthetic construct
QLMRGDQSTL

SEQ ID NO: 52169 - protein, 10 aa, synthetic construct
QLMRGDRSQT

SEQ ID NO: 52170 - protein, 10 aa, synthetic construct
QLMRGDLLLS

SEQ ID NO: 52171 - protein, 10 aa, synthetic construct
QLWRGDHGVL

SEQ ID NO: 52172 - protein, 10 aa, synthetic construct
DPARGDRQGI

SEQ ID NO: 52173 - protein, 10 aa, synthetic construct
QLWRGDHVNL

SEQ ID NO: 52174 - protein, 10 aa, synthetic construct
QLWRGDYVGL

SEQ ID NO: 52175 - protein, 10 aa, synthetic construct
QLWRGDYSSV

SEQ ID NO: 52176 - protein, 10 aa, synthetic construct
QLWRGDQSTL

SEQ ID NO: 52177 - protein, 10 aa, synthetic construct
QLWRGDLLLS

SEQ ID NO: 52178 - protein, 10 aa, synthetic construct
QLFRGDRGQI

SEQ ID NO: 52179 - protein, 10 aa, synthetic construct
QLFRGDRQGI

SEQ ID NO: 52180 - protein, 10 aa, synthetic construct
QLFRGDRSVV

SEQ ID NO: 52181 - protein, 10 aa, synthetic construct
QLFRGDRGVV

SEQ ID NO: 52182 - protein, 10 aa, synthetic construct
QLFRGDYVGL

SEQ ID NO: 52183 - protein, 10 aa, synthetic construct
NKKRGDYVGL

SEQ ID NO: 52184 - protein, 10 aa, synthetic construct
DPARGDRSVV

SEQ ID NO: 52185 - protein, 10 aa, synthetic construct
QLFRGDQSTL

SEQ ID NO: 52186 - protein, 10 aa, synthetic construct
QLFRGDRSQT

SEQ ID NO: 52187 - protein, 10 aa, synthetic construct
QLFRGDLLLS

SEQ ID NO: 52188 - protein, 10 aa, synthetic construct
QLKRGDRGQI

SEQ ID NO: 52189 - protein, 10 aa, synthetic construct
QLKRGDRQGI

SEQ ID NO: 52190 - protein, 10 aa, synthetic construct
QLKRGDRSVV

SEQ ID NO: 52191 - protein, 10 aa, synthetic construct
QLKRGDRGVV

SEQ ID NO: 52192 - protein, 10 aa, synthetic construct
QLKRGDYVGL

SEQ ID NO: 52193 - protein, 10 aa, synthetic construct
QLKRGDQSTL

SEQ ID NO: 52194 - protein, 10 aa, synthetic construct
QLKRGDRSQT

SEQ ID NO: 52195 - protein, 10 aa, synthetic construct
DPARGDRGVV

SEQ ID NO: 52196 - protein, 10 aa, synthetic construct
QLKRGDLLLS

SEQ ID NO: 52197 - protein, 10 aa, synthetic construct
QLRRGDHVNL

SEQ ID NO: 52198 - protein, 10 aa, synthetic construct
QLRRGDRDYL

SEQ ID NO: 52199 - protein, 10 aa, synthetic construct
QLRRGDYSSV

SEQ ID NO: 52200 - protein, 10 aa, synthetic construct
QLRRGDLTVT

SEQ ID NO: 52201 - protein, 10 aa, synthetic construct
QLRRGDLIGR

SEQ ID NO: 52202 - protein, 10 aa, synthetic construct
QLHRGDHGVL

SEQ ID NO: 52203 - protein, 10 aa, synthetic construct
QLHRGDHVNL

SEQ ID NO: 52204 - protein, 10 aa, synthetic construct
QLHRGDYVGL

SEQ ID NO: 52205 - protein, 10 aa, synthetic construct
QLHRGDYSSV

SEQ ID NO: 52206 - protein, 10 aa, synthetic construct
DPARGDRSQT

SEQ ID NO: 52207 - protein, 10 aa, synthetic construct
QLHRGDQSTL

SEQ ID NO: 52208 - protein, 10 aa, synthetic construct
QLHRGDLLLS

SEQ ID NO: 52209 - protein, 10 aa, synthetic construct
QLSRGDHGVL

SEQ ID NO: 52210 - protein, 10 aa, synthetic construct
QLSRGDHVNL

SEQ ID NO: 52211 - protein, 10 aa, synthetic construct
QLSRGDYVGL

SEQ ID NO: 52212 - protein, 10 aa, synthetic construct
QLSRGDYSSV

SEQ ID NO: 52213 - protein, 10 aa, synthetic construct
QLSRGDQSTL

SEQ ID NO: 52214 - protein, 10 aa, synthetic construct
QLSRGDLLLS

SEQ ID NO: 52215 - protein, 10 aa, synthetic construct
QLTRGDHGVL

SEQ ID NO: 52216 - protein, 10 aa, synthetic construct
QLTRGDHVNL

SEQ ID NO: 52217 - protein, 10 aa, synthetic construct
DPPRGDRGQI

SEQ ID NO: 52218 - protein, 10 aa, synthetic construct
QLTRGDYVGL

SEQ ID NO: 52219 - protein, 10 aa, synthetic construct
QLTRGDYSSV

SEQ ID NO: 52220 - protein, 10 aa, synthetic construct
QLTRGDQSTL

SEQ ID NO: 52221 - protein, 10 aa, synthetic construct
QLTRGDLLLS

SEQ ID NO: 52222 - protein, 10 aa, synthetic construct
QLYRGDRGQI

SEQ ID NO: 52223 - protein, 10 aa, synthetic construct
QLYRGDRQGI

SEQ ID NO: 52224 - protein, 10 aa, synthetic construct
QLYRGDRSVV

SEQ ID NO: 52225 - protein, 10 aa, synthetic construct
QLYRGDRGVV

SEQ ID NO: 52226 - protein, 10 aa, synthetic construct
QLYRGDYVGL

SEQ ID NO: 52227 - protein, 10 aa, synthetic construct
QLYRGDQSTL

SEQ ID NO: 52228 - protein, 10 aa, synthetic construct
DPPRGDRQGI

SEQ ID NO: 52229 - protein, 10 aa, synthetic construct
QLYRGDRSQT

SEQ ID NO: 52230 - protein, 10 aa, synthetic construct
QLYRGDLLLS

SEQ ID NO: 52231 - protein, 10 aa, synthetic construct
QLNRGDRGQI

SEQ ID NO: 52232 - protein, 10 aa, synthetic construct
QLNRGDRQGI

SEQ ID NO: 52233 - protein, 10 aa, synthetic construct
QLNRGDRSVV

SEQ ID NO: 52234 - protein, 10 aa, synthetic construct
QLNRGDRGVV

SEQ ID NO: 52235 - protein, 10 aa, synthetic construct
QLNRGDYVGL

SEQ ID NO: 52236 - protein, 10 aa, synthetic construct
QLNRGDQSTL

SEQ ID NO: 52237 - protein, 10 aa, synthetic construct
QLNRGDRSQT

SEQ ID NO: 52238 - protein, 10 aa, synthetic construct
QLNRGDLLLS

SEQ ID NO: 52239 - protein, 10 aa, synthetic construct
DPPRGDRSVV

SEQ ID NO: 52240 - protein, 10 aa, synthetic construct
QLQRGDHGVL

SEQ ID NO: 52241 - protein, 10 aa, synthetic construct
QLQRGDHVNL

SEQ ID NO: 52242 - protein, 10 aa, synthetic construct
QLQRGDYVGL

SEQ ID NO: 52243 - protein, 10 aa, synthetic construct
QLQRGDYSSV

SEQ ID NO: 52244 - protein, 10 aa, synthetic construct
QLQRGDQSTL

SEQ ID NO: 52245 - protein, 10 aa, synthetic construct
QLQRGDLLLS

SEQ ID NO: 52246 - protein, 10 aa, synthetic construct
QLDRGDHGVL

SEQ ID NO: 52247 - protein, 10 aa, synthetic construct
QLDRGDHVNL

SEQ ID NO: 52248 - protein, 10 aa, synthetic construct
QLDRGDYVGL

SEQ ID NO: 52249 - protein, 10 aa, synthetic construct
QLDRGDYSSV

SEQ ID NO: 52250 - protein, 10 aa, synthetic construct
DPPRGDRGVV

SEQ ID NO: 52251 - protein, 10 aa, synthetic construct
QLDRGDQSTL

SEQ ID NO: 52252 - protein, 10 aa, synthetic construct
QLDRGDLLLS

SEQ ID NO: 52253 - protein, 10 aa, synthetic construct
QLERGDHGVL

SEQ ID NO: 52254 - protein, 10 aa, synthetic construct
QLERGDHVNL

SEQ ID NO: 52255 - protein, 10 aa, synthetic construct
QLERGDYVGL

SEQ ID NO: 52256 - protein, 10 aa, synthetic construct
QLERGDYSSV

SEQ ID NO: 52257 - protein, 10 aa, synthetic construct
QLERGDQSTL

SEQ ID NO: 52258 - protein, 10 aa, synthetic construct
QLERGDLLLS

SEQ ID NO: 52259 - protein, 10 aa, synthetic construct
QIGRGDRGQI

SEQ ID NO: 52260 - protein, 10 aa, synthetic construct
QIGRGDRQGI

SEQ ID NO: 52261 - protein, 10 aa, synthetic construct
DPPRGDRSQT

SEQ ID NO: 52262 - protein, 10 aa, synthetic construct
QIGRGDRSVV

SEQ ID NO: 52263 - protein, 10 aa, synthetic construct
QIGRGDRGVV

SEQ ID NO: 52264 - protein, 10 aa, synthetic construct
QIGRGDRSQT

SEQ ID NO: 52265 - protein, 10 aa, synthetic construct
QIARGDRGQI

SEQ ID NO: 52266 - protein, 10 aa, synthetic construct
QIARGDRQGI

SEQ ID NO: 52267 - protein, 10 aa, synthetic construct
QIARGDRSVV

SEQ ID NO: 52268 - protein, 10 aa, synthetic construct
QIARGDRGVV

SEQ ID NO: 52269 - protein, 10 aa, synthetic construct
QIARGDRSQT

SEQ ID NO: 52270 - protein, 10 aa, synthetic construct
QIPRGDRGQI

SEQ ID NO: 52271 - protein, 10 aa, synthetic construct
QIPRGDRQGI

SEQ ID NO: 52272 - protein, 10 aa, synthetic construct
DPRRGDRGQI

SEQ ID NO: 52273 - protein, 10 aa, synthetic construct
QIPRGDRSVV

SEQ ID NO: 52274 - protein, 10 aa, synthetic construct
QIPRGDRGVV

SEQ ID NO: 52275 - protein, 10 aa, synthetic construct
QIPRGDRSQT

SEQ ID NO: 52276 - protein, 10 aa, synthetic construct
QIRRGDRGQI

SEQ ID NO: 52277 - protein, 10 aa, synthetic construct
QIRRGDRQGI

SEQ ID NO: 52278 - protein, 10 aa, synthetic construct
QIRRGDRSVV

SEQ ID NO: 52279 - protein, 10 aa, synthetic construct
QIRRGDRGVV

SEQ ID NO: 52280 - protein, 10 aa, synthetic construct
QIRRGDRSQT

SEQ ID NO: 52281 - protein, 10 aa, synthetic construct
QMGRGDHGVL

SEQ ID NO: 52282 - protein, 10 aa, synthetic construct
QMGRGDRGQI

SEQ ID NO: 52283 - protein, 10 aa, synthetic construct
DPRRGDRQGI

SEQ ID NO: 52284 - protein, 10 aa, synthetic construct
QMGRGDRQGI

SEQ ID NO: 52285 - protein, 10 aa, synthetic construct
QMGRGDRSVV

SEQ ID NO: 52286 - protein, 10 aa, synthetic construct
QMGRGDLTVT

SEQ ID NO: 52287 - protein, 10 aa, synthetic construct
QMGRGDLIGR

SEQ ID NO: 52288 - protein, 10 aa, synthetic construct
QMGRGDRSQT

SEQ ID NO: 52289 - protein, 10 aa, synthetic construct
QMGRGDLLLS

SEQ ID NO: 52290 - protein, 10 aa, synthetic construct
QMARGDHGVL

SEQ ID NO: 52291 - protein, 10 aa, synthetic construct
QMARGDRGQI

SEQ ID NO: 52292 - protein, 10 aa, synthetic construct
QMARGDRQGI

SEQ ID NO: 52293 - protein, 10 aa, synthetic construct
QMARGDRSVV

SEQ ID NO: 52294 - protein, 10 aa, synthetic construct
NKKRGDLIGR

SEQ ID NO: 52295 - protein, 10 aa, synthetic construct
DPRRGDRSVV

SEQ ID NO: 52296 - protein, 10 aa, synthetic construct
QMARGDLTVT

SEQ ID NO: 52297 - protein, 10 aa, synthetic construct
QMARGDLIGR

SEQ ID NO: 52298 - protein, 10 aa, synthetic construct
QMARGDRSQT

SEQ ID NO: 52299 - protein, 10 aa, synthetic construct
QMARGDLLLS

SEQ ID NO: 52300 - protein, 10 aa, synthetic construct
QMVRGDHGVL

SEQ ID NO: 52301 - protein, 10 aa, synthetic construct
QMVRGDRGQI

SEQ ID NO: 52302 - protein, 10 aa, synthetic construct
QMVRGDRQGI

SEQ ID NO: 52303 - protein, 10 aa, synthetic construct
QMVRGDRSVV

SEQ ID NO: 52304 - protein, 10 aa, synthetic construct
QMVRGDLIGR

SEQ ID NO: 52305 - protein, 10 aa, synthetic construct
QMVRGDRSQT

SEQ ID NO: 52306 - protein, 10 aa, synthetic construct
DPRRGDRGVV

SEQ ID NO: 52307 - protein, 10 aa, synthetic construct
QMPRGDHGVL

SEQ ID NO: 52308 - protein, 10 aa, synthetic construct
QMPRGDRGQI

SEQ ID NO: 52309 - protein, 10 aa, synthetic construct
QMPRGDRQGI

SEQ ID NO: 52310 - protein, 10 aa, synthetic construct
QMPRGDRSVV

SEQ ID NO: 52311 - protein, 10 aa, synthetic construct
QMPRGDLTVT

SEQ ID NO: 52312 - protein, 10 aa, synthetic construct
QMPRGDLIGR

SEQ ID NO: 52313 - protein, 10 aa, synthetic construct
QMPRGDRSQT

SEQ ID NO: 52314 - protein, 10 aa, synthetic construct
QMPRGDLLLS

SEQ ID NO: 52315 - protein, 10 aa, synthetic construct
QMLRGDHGVL

SEQ ID NO: 52316 - protein, 10 aa, synthetic construct
QMLRGDRGQI

SEQ ID NO: 52317 - protein, 10 aa, synthetic construct
DPRRGDRSQT

SEQ ID NO: 52318 - protein, 10 aa, synthetic construct
QMLRGDRQGI

SEQ ID NO: 52319 - protein, 10 aa, synthetic construct
QMLRGDRSVV

SEQ ID NO: 52320 - protein, 10 aa, synthetic construct
QMLRGDLIGR

SEQ ID NO: 52321 - protein, 10 aa, synthetic construct
QMLRGDRSQT

SEQ ID NO: 52322 - protein, 10 aa, synthetic construct
QMMRGDRSVV

SEQ ID NO: 52323 - protein, 10 aa, synthetic construct
QMMRGDRSQT

SEQ ID NO: 52324 - protein, 10 aa, synthetic construct
QMWRGDRGQI

SEQ ID NO: 52325 - protein, 10 aa, synthetic construct
QMWRGDRQGI

SEQ ID NO: 52326 - protein, 10 aa, synthetic construct
QMWRGDRSVV

SEQ ID NO: 52327 - protein, 10 aa, synthetic construct
QMWRGDRGVV

SEQ ID NO: 52328 - protein, 10 aa, synthetic construct
DLGRGDRGQI

SEQ ID NO: 52329 - protein, 10 aa, synthetic construct
QMWRGDYVGL

SEQ ID NO: 52330 - protein, 10 aa, synthetic construct
QMWRGDQSTL

SEQ ID NO: 52331 - protein, 10 aa, synthetic construct
QMWRGDRSQT

SEQ ID NO: 52332 - protein, 10 aa, synthetic construct
QMWRGDLLLS

SEQ ID NO: 52333 - protein, 10 aa, synthetic construct
QMRRGDHGVL

SEQ ID NO: 52334 - protein, 10 aa, synthetic construct
QMRRGDRGQI

SEQ ID NO: 52335 - protein, 10 aa, synthetic construct
QMRRGDRQGI

SEQ ID NO: 52336 - protein, 10 aa, synthetic construct
QMRRGDRSVV

SEQ ID NO: 52337 - protein, 10 aa, synthetic construct
QMRRGDLTVT

SEQ ID NO: 52338 - protein, 10 aa, synthetic construct
QMRRGDLIGR

SEQ ID NO: 52339 - protein, 10 aa, synthetic construct
DLGRGDRQGI

SEQ ID NO: 52340 - protein, 10 aa, synthetic construct
QMRRGDRSQT

SEQ ID NO: 52341 - protein, 10 aa, synthetic construct
QMRRGDLLLS

SEQ ID NO: 52342 - protein, 10 aa, synthetic construct
QMHRGDRGVV

SEQ ID NO: 52343 - protein, 10 aa, synthetic construct
QMHRGDLTVT

SEQ ID NO: 52344 - protein, 10 aa, synthetic construct
QMHRGDLLLS

SEQ ID NO: 52345 - protein, 10 aa, synthetic construct
QMSRGDHGVL

SEQ ID NO: 52346 - protein, 10 aa, synthetic construct
QMSRGDRGQI

SEQ ID NO: 52347 - protein, 10 aa, synthetic construct
QMSRGDRQGI

SEQ ID NO: 52348 - protein, 10 aa, synthetic construct
QMSRGDRSVV

SEQ ID NO: 52349 - protein, 10 aa, synthetic construct
QMSRGDLIGR

SEQ ID NO: 52350 - protein, 10 aa, synthetic construct
DLGRGDRSVV

SEQ ID NO: 52351 - protein, 10 aa, synthetic construct
QMSRGDRSQT

SEQ ID NO: 52352 - protein, 10 aa, synthetic construct
QMTRGDRGVV

SEQ ID NO: 52353 - protein, 10 aa, synthetic construct
QMTRGDLTVT

SEQ ID NO: 52354 - protein, 10 aa, synthetic construct
QMTRGDLLLS

SEQ ID NO: 52355 - protein, 10 aa, synthetic construct
QMQRGDRGVV

SEQ ID NO: 52356 - protein, 10 aa, synthetic construct
QMQRGDLTVT

SEQ ID NO: 52357 - protein, 10 aa, synthetic construct
QMQRGDLLLS

SEQ ID NO: 52358 - protein, 10 aa, synthetic construct
QMDRGDRGVV

SEQ ID NO: 52359 - protein, 10 aa, synthetic construct
QMDRGDLTVT

SEQ ID NO: 52360 - protein, 10 aa, synthetic construct
QMDRGDLLLS

SEQ ID NO: 52361 - protein, 10 aa, synthetic construct
DLGRGDRGVV

SEQ ID NO: 52362 - protein, 10 aa, synthetic construct
QMERGDRGVV

SEQ ID NO: 52363 - protein, 10 aa, synthetic construct
QMERGDLTVT

SEQ ID NO: 52364 - protein, 10 aa, synthetic construct
QMERGDLLLS

SEQ ID NO: 52365 - protein, 10 aa, synthetic construct
QWGRGDRDYL

SEQ ID NO: 52366 - protein, 10 aa, synthetic construct
QWGRGDYVGL

SEQ ID NO: 52367 - protein, 10 aa, synthetic construct
QWGRGDQSTL

SEQ ID NO: 52368 - protein, 10 aa, synthetic construct
QWARGDRDYL

SEQ ID NO: 52369 - protein, 10 aa, synthetic construct
QWARGDYVGL

SEQ ID NO: 52370 - protein, 10 aa, synthetic construct
QWARGDQSTL

SEQ ID NO: 52371 - protein, 10 aa, synthetic construct
QWVRGDRDYL

SEQ ID NO: 52372 - protein, 10 aa, synthetic construct
DLGRGDRSQT

SEQ ID NO: 52373 - protein, 10 aa, synthetic construct
QWVRGDYVGL

SEQ ID NO: 52374 - protein, 10 aa, synthetic construct
QWVRGDYSSV

SEQ ID NO: 52375 - protein, 10 aa, synthetic construct
QWVRGDYTSV

SEQ ID NO: 52376 - protein, 10 aa, synthetic construct
QWVRGDQSTL

SEQ ID NO: 52377 - protein, 10 aa, synthetic construct
QWPRGDRDYL

SEQ ID NO: 52378 - protein, 10 aa, synthetic construct
QWPRGDYVGL

SEQ ID NO: 52379 - protein, 10 aa, synthetic construct
QWPRGDQSTL

SEQ ID NO: 52380 - protein, 10 aa, synthetic construct
QWLRGDRDYL

SEQ ID NO: 52381 - protein, 10 aa, synthetic construct
QWLRGDYVGL

SEQ ID NO: 52382 - protein, 10 aa, synthetic construct
QWLRGDYSSV

SEQ ID NO: 52383 - protein, 10 aa, synthetic construct
DLARGDRGQI

SEQ ID NO: 52384 - protein, 10 aa, synthetic construct
QWLRGDYTSV

SEQ ID NO: 52385 - protein, 10 aa, synthetic construct
QWLRGDQSTL

SEQ ID NO: 52386 - protein, 10 aa, synthetic construct
QWIRGDRGVV

SEQ ID NO: 52387 - protein, 10 aa, synthetic construct
QWIRGDLTVT

SEQ ID NO: 52388 - protein, 10 aa, synthetic construct
QWIRGDLLLS

SEQ ID NO: 52389 - protein, 10 aa, synthetic construct
QWMRGDRGQI

SEQ ID NO: 52390 - protein, 10 aa, synthetic construct
QWMRGDRQGI

SEQ ID NO: 52391 - protein, 10 aa, synthetic construct
QWMRGDRSVV

SEQ ID NO: 52392 - protein, 10 aa, synthetic construct
QWMRGDRGVV

SEQ ID NO: 52393 - protein, 10 aa, synthetic construct
QWMRGDYVGL

SEQ ID NO: 52394 - protein, 10 aa, synthetic construct
DLARGDRQGI

SEQ ID NO: 52395 - protein, 10 aa, synthetic construct
QWMRGDQSTL

SEQ ID NO: 52396 - protein, 10 aa, synthetic construct
QWMRGDRSQT

SEQ ID NO: 52397 - protein, 10 aa, synthetic construct
QWMRGDLLLS

SEQ ID NO: 52398 - protein, 10 aa, synthetic construct
QWWRGDHGVL

SEQ ID NO: 52399 - protein, 10 aa, synthetic construct
QWWRGDHVNL

SEQ ID NO: 52400 - protein, 10 aa, synthetic construct
QWWRGDYVGL

SEQ ID NO: 52401 - protein, 10 aa, synthetic construct
QWWRGDYSSV

SEQ ID NO: 52402 - protein, 10 aa, synthetic construct
QWWRGDQSTL

SEQ ID NO: 52403 - protein, 10 aa, synthetic construct
QWWRGDLLLS

SEQ ID NO: 52404 - protein, 10 aa, synthetic construct
QWFRGDRGVV

SEQ ID NO: 52405 - protein, 10 aa, synthetic construct
NKKRGDQSTL

SEQ ID NO: 52406 - protein, 10 aa, synthetic construct
DLARGDRSVV

SEQ ID NO: 52407 - protein, 10 aa, synthetic construct
QWFRGDLTVT

SEQ ID NO: 52408 - protein, 10 aa, synthetic construct
QWFRGDLLLS

SEQ ID NO: 52409 - protein, 10 aa, synthetic construct
QWKRGDRGVV

SEQ ID NO: 52410 - protein, 10 aa, synthetic construct
QWKRGDLTVT

SEQ ID NO: 52411 - protein, 10 aa, synthetic construct
QWKRGDLLLS

SEQ ID NO: 52412 - protein, 10 aa, synthetic construct
QWRRGDRDYL

SEQ ID NO: 52413 - protein, 10 aa, synthetic construct
QWRRGDYVGL

SEQ ID NO: 52414 - protein, 10 aa, synthetic construct
QWRRGDQSTL

SEQ ID NO: 52415 - protein, 10 aa, synthetic construct
QWHRGDHGVL

SEQ ID NO: 52416 - protein, 10 aa, synthetic construct
QWHRGDRGQI

SEQ ID NO: 52417 - protein, 10 aa, synthetic construct
DLARGDRGVV

SEQ ID NO: 52418 - protein, 10 aa, synthetic construct
QWHRGDRQGI

SEQ ID NO: 52419 - protein, 10 aa, synthetic construct
QWHRGDRSVV

SEQ ID NO: 52420 - protein, 10 aa, synthetic construct
QWHRGDLTVT

SEQ ID NO: 52421 - protein, 10 aa, synthetic construct
QWHRGDLIGR

SEQ ID NO: 52422 - protein, 10 aa, synthetic construct
QWHRGDRSQT

SEQ ID NO: 52423 - protein, 10 aa, synthetic construct
QWHRGDLLLS

SEQ ID NO: 52424 - protein, 10 aa, synthetic construct
QWSRGDRDYL

SEQ ID NO: 52425 - protein, 10 aa, synthetic construct
QWSRGDYVGL

SEQ ID NO: 52426 - protein, 10 aa, synthetic construct
QWSRGDYSSV

SEQ ID NO: 52427 - protein, 10 aa, synthetic construct
QWSRGDYTSV

SEQ ID NO: 52428 - protein, 10 aa, synthetic construct
DLARGDRSQT

SEQ ID NO: 52429 - protein, 10 aa, synthetic construct
QWSRGDQSTL

SEQ ID NO: 52430 - protein, 10 aa, synthetic construct
QWTRGDHGVL

SEQ ID NO: 52431 - protein, 10 aa, synthetic construct
QWTRGDRGQI

SEQ ID NO: 52432 - protein, 10 aa, synthetic construct
QWTRGDRQGI

SEQ ID NO: 52433 - protein, 10 aa, synthetic construct
QWTRGDRSVV

SEQ ID NO: 52434 - protein, 10 aa, synthetic construct
QWTRGDLTVT

SEQ ID NO: 52435 - protein, 10 aa, synthetic construct
QWTRGDLIGR

SEQ ID NO: 52436 - protein, 10 aa, synthetic construct
QWTRGDRSQT

SEQ ID NO: 52437 - protein, 10 aa, synthetic construct
QWTRGDLLLS

SEQ ID NO: 52438 - protein, 10 aa, synthetic construct
QWYRGDRGVV

SEQ ID NO: 52439 - protein, 10 aa, synthetic construct
DLPRGDRGQI

SEQ ID NO: 52440 - protein, 10 aa, synthetic construct
QWYRGDLTVT

SEQ ID NO: 52441 - protein, 10 aa, synthetic construct
QWYRGDLLLS

SEQ ID NO: 52442 - protein, 10 aa, synthetic construct
QWNRGDRGVV

SEQ ID NO: 52443 - protein, 10 aa, synthetic construct
QWNRGDLTVT

SEQ ID NO: 52444 - protein, 10 aa, synthetic construct
QWNRGDLLLS

SEQ ID NO: 52445 - protein, 10 aa, synthetic construct
QWQRGDHGVL

SEQ ID NO: 52446 - protein, 10 aa, synthetic construct
QWQRGDRGQI

SEQ ID NO: 52447 - protein, 10 aa, synthetic construct
QWQRGDRQGI

SEQ ID NO: 52448 - protein, 10 aa, synthetic construct
QWQRGDRSVV

SEQ ID NO: 52449 - protein, 10 aa, synthetic construct
QWQRGDLTVT

SEQ ID NO: 52450 - protein, 10 aa, synthetic construct
DLPRGDRQGI

SEQ ID NO: 52451 - protein, 10 aa, synthetic construct
QWQRGDLIGR

SEQ ID NO: 52452 - protein, 10 aa, synthetic construct
QWQRGDRSQT

SEQ ID NO: 52453 - protein, 10 aa, synthetic construct
QWQRGDLLLS

SEQ ID NO: 52454 - protein, 10 aa, synthetic construct
QWDRGDHGVL

SEQ ID NO: 52455 - protein, 10 aa, synthetic construct
QWDRGDRGQI

SEQ ID NO: 52456 - protein, 10 aa, synthetic construct
QWDRGDRQGI

SEQ ID NO: 52457 - protein, 10 aa, synthetic construct
QWDRGDRSVV

SEQ ID NO: 52458 - protein, 10 aa, synthetic construct
QWDRGDLTVT

SEQ ID NO: 52459 - protein, 10 aa, synthetic construct
QWDRGDLIGR

SEQ ID NO: 52460 - protein, 10 aa, synthetic construct
QWDRGDRSQT

SEQ ID NO: 52461 - protein, 10 aa, synthetic construct
DLPRGDRSVV

SEQ ID NO: 52462 - protein, 10 aa, synthetic construct
QWDRGDLLLS

SEQ ID NO: 52463 - protein, 10 aa, synthetic construct
QWERGDHGVL

SEQ ID NO: 52464 - protein, 10 aa, synthetic construct
QWERGDRGQI

SEQ ID NO: 52465 - protein, 10 aa, synthetic construct
QWERGDRQGI

SEQ ID NO: 52466 - protein, 10 aa, synthetic construct
QWERGDRSVV

SEQ ID NO: 52467 - protein, 10 aa, synthetic construct
QWERGDLTVT

SEQ ID NO: 52468 - protein, 10 aa, synthetic construct
QWERGDLIGR

SEQ ID NO: 52469 - protein, 10 aa, synthetic construct
QWERGDRSQT

SEQ ID NO: 52470 - protein, 10 aa, synthetic construct
QWERGDLLLS

SEQ ID NO: 52471 - protein, 10 aa, synthetic construct
QFGRGDRGQI

SEQ ID NO: 52472 - protein, 10 aa, synthetic construct
DLPRGDRGVV

SEQ ID NO: 52473 - protein, 10 aa, synthetic construct
QFGRGDRQGI

SEQ ID NO: 52474 - protein, 10 aa, synthetic construct
QFGRGDRSVV

SEQ ID NO: 52475 - protein, 10 aa, synthetic construct
QFGRGDRGVV

SEQ ID NO: 52476 - protein, 10 aa, synthetic construct
QFGRGDRSQT

SEQ ID NO: 52477 - protein, 10 aa, synthetic construct
QFARGDRGQI

SEQ ID NO: 52478 - protein, 10 aa, synthetic construct
QFARGDRQGI

SEQ ID NO: 52479 - protein, 10 aa, synthetic construct
QFARGDRSVV

SEQ ID NO: 52480 - protein, 10 aa, synthetic construct
QFARGDRGVV

SEQ ID NO: 52481 - protein, 10 aa, synthetic construct
QFARGDRSQT

SEQ ID NO: 52482 - protein, 10 aa, synthetic construct
QFPRGDRGQI

SEQ ID NO: 52483 - protein, 10 aa, synthetic construct
DLPRGDRSQT

SEQ ID NO: 52484 - protein, 10 aa, synthetic construct
QFPRGDRQGI

SEQ ID NO: 52485 - protein, 10 aa, synthetic construct
QFPRGDRSVV

SEQ ID NO: 52486 - protein, 10 aa, synthetic construct
QFPRGDRGVV

SEQ ID NO: 52487 - protein, 10 aa, synthetic construct
QFPRGDRSQT

SEQ ID NO: 52488 - protein, 10 aa, synthetic construct
QFRRGDRGQI

SEQ ID NO: 52489 - protein, 10 aa, synthetic construct
QFRRGDRQGI

SEQ ID NO: 52490 - protein, 10 aa, synthetic construct
QFRRGDRSVV

SEQ ID NO: 52491 - protein, 10 aa, synthetic construct
QFRRGDRGVV

SEQ ID NO: 52492 - protein, 10 aa, synthetic construct
QFRRGDRSQT

SEQ ID NO: 52493 - protein, 10 aa, synthetic construct
QKGRGDRGQI

SEQ ID NO: 52494 - protein, 10 aa, synthetic construct
DLRRGDRGQI

SEQ ID NO: 52495 - protein, 10 aa, synthetic construct
QKGRGDRQGI

SEQ ID NO: 52496 - protein, 10 aa, synthetic construct
QKGRGDRSVV

SEQ ID NO: 52497 - protein, 10 aa, synthetic construct
QKGRGDRGVV

SEQ ID NO: 52498 - protein, 10 aa, synthetic construct
QKGRGDRSQT

SEQ ID NO: 52499 - protein, 10 aa, synthetic construct
QKARGDRGQI

SEQ ID NO: 52500 - protein, 10 aa, synthetic construct
QKARGDRQGI

SEQ ID NO: 52501 - protein, 10 aa, synthetic construct
QKARGDRSVV

SEQ ID NO: 52502 - protein, 10 aa, synthetic construct
QKARGDRGVV

SEQ ID NO: 52503 - protein, 10 aa, synthetic construct
QKARGDRSQT

SEQ ID NO: 52504 - protein, 10 aa, synthetic construct
QKPRGDRGQI

SEQ ID NO: 52505 - protein, 10 aa, synthetic construct
DLRRGDRQGI

SEQ ID NO: 52506 - protein, 10 aa, synthetic construct
QKPRGDRQGI

SEQ ID NO: 52507 - protein, 10 aa, synthetic construct
QKPRGDRSVV

SEQ ID NO: 52508 - protein, 10 aa, synthetic construct
QKPRGDRGVV

SEQ ID NO: 52509 - protein, 10 aa, synthetic construct
QKPRGDRSQT

SEQ ID NO: 52510 - protein, 10 aa, synthetic construct
QKRRGDRGQI

SEQ ID NO: 52511 - protein, 10 aa, synthetic construct
QKRRGDRQGI

SEQ ID NO: 52512 - protein, 10 aa, synthetic construct
QKRRGDRSVV

SEQ ID NO: 52513 - protein, 10 aa, synthetic construct
QKRRGDRGVV

SEQ ID NO: 52514 - protein, 10 aa, synthetic construct
QKRRGDRSQT

SEQ ID NO: 52515 - protein, 10 aa, synthetic construct
QRGRGDHVNL

SEQ ID NO: 52516 - protein, 10 aa, synthetic construct
NKKRGDLLLS

SEQ ID NO: 52517 - protein, 10 aa, synthetic construct
DLRRGDRSVV

SEQ ID NO: 52518 - protein, 10 aa, synthetic construct
QRGRGDRDYL

SEQ ID NO: 52519 - protein, 10 aa, synthetic construct
QRGRGDYSSV

SEQ ID NO: 52520 - protein, 10 aa, synthetic construct
QRGRGDLTVT

SEQ ID NO: 52521 - protein, 10 aa, synthetic construct
QRGRGDLIGR

SEQ ID NO: 52522 - protein, 10 aa, synthetic construct
QRARGDHVNL

SEQ ID NO: 52523 - protein, 10 aa, synthetic construct
QRARGDRDYL

SEQ ID NO: 52524 - protein, 10 aa, synthetic construct
QRARGDYSSV

SEQ ID NO: 52525 - protein, 10 aa, synthetic construct
QRARGDLTVT

SEQ ID NO: 52526 - protein, 10 aa, synthetic construct
QRARGDLIGR

SEQ ID NO: 52527 - protein, 10 aa, synthetic construct
QRVRGDHGVL

SEQ ID NO: 52528 - protein, 10 aa, synthetic construct
DLRRGDRGVV

SEQ ID NO: 52529 - protein, 10 aa, synthetic construct
QRVRGDYVGL

SEQ ID NO: 52530 - protein, 10 aa, synthetic construct
QRVRGDQSTL

SEQ ID NO: 52531 - protein, 10 aa, synthetic construct
QRVRGDLLLS

SEQ ID NO: 52532 - protein, 10 aa, synthetic construct
QRPRGDHVNL

SEQ ID NO: 52533 - protein, 10 aa, synthetic construct
QRPRGDRDYL

SEQ ID NO: 52534 - protein, 10 aa, synthetic construct
QRPRGDYSSV

SEQ ID NO: 52535 - protein, 10 aa, synthetic construct
QRPRGDLTVT

SEQ ID NO: 52536 - protein, 10 aa, synthetic construct
QRPRGDLIGR

SEQ ID NO: 52537 - protein, 10 aa, synthetic construct
QRLRGDHGVL

SEQ ID NO: 52538 - protein, 10 aa, synthetic construct
QRLRGDYVGL

SEQ ID NO: 52539 - protein, 10 aa, synthetic construct
DLRRGDRSQT

SEQ ID NO: 52540 - protein, 10 aa, synthetic construct
QRLRGDQSTL

SEQ ID NO: 52541 - protein, 10 aa, synthetic construct
QRLRGDLLLS

SEQ ID NO: 52542 - protein, 10 aa, synthetic construct
QRIRGDRGQI

SEQ ID NO: 52543 - protein, 10 aa, synthetic construct
QRIRGDRQGI

SEQ ID NO: 52544 - protein, 10 aa, synthetic construct
QRIRGDRSVV

SEQ ID NO: 52545 - protein, 10 aa, synthetic construct
QRIRGDRGVV

SEQ ID NO: 52546 - protein, 10 aa, synthetic construct
QRIRGDRSQT

SEQ ID NO: 52547 - protein, 10 aa, synthetic construct
QRMRGDRGQI

SEQ ID NO: 52548 - protein, 10 aa, synthetic construct
QRMRGDRQGI

SEQ ID NO: 52549 - protein, 10 aa, synthetic construct
QRMRGDRSVV

SEQ ID NO: 52550 - protein, 10 aa, synthetic construct
DWGRGDRGVV

SEQ ID NO: 52551 - protein, 10 aa, synthetic construct
QRMRGDRGVV

SEQ ID NO: 52552 - protein, 10 aa, synthetic construct
QRMRGDRSQT

SEQ ID NO: 52553 - protein, 10 aa, synthetic construct
QRWRGDHGVL

SEQ ID NO: 52554 - protein, 10 aa, synthetic construct
QRWRGDYVGL

SEQ ID NO: 52555 - protein, 10 aa, synthetic construct
QRWRGDQSTL

SEQ ID NO: 52556 - protein, 10 aa, synthetic construct
QRWRGDLLLS

SEQ ID NO: 52557 - protein, 10 aa, synthetic construct
QRFRGDRGQI

SEQ ID NO: 52558 - protein, 10 aa, synthetic construct
QRFRGDRQGI

SEQ ID NO: 52559 - protein, 10 aa, synthetic construct
QRFRGDRSVV

SEQ ID NO: 52560 - protein, 10 aa, synthetic construct
QRFRGDRGVV

SEQ ID NO: 52561 - protein, 10 aa, synthetic construct
DWARGDRGVV

SEQ ID NO: 52562 - protein, 10 aa, synthetic construct
QRFRGDRSQT

SEQ ID NO: 52563 - protein, 10 aa, synthetic construct
QRKRGDRGQI

SEQ ID NO: 52564 - protein, 10 aa, synthetic construct
QRKRGDRQGI

SEQ ID NO: 52565 - protein, 10 aa, synthetic construct
QRKRGDRSVV

SEQ ID NO: 52566 - protein, 10 aa, synthetic construct
QRKRGDRGVV

SEQ ID NO: 52567 - protein, 10 aa, synthetic construct
QRKRGDRSQT

SEQ ID NO: 52568 - protein, 10 aa, synthetic construct
QRRRGDHVNL

SEQ ID NO: 52569 - protein, 10 aa, synthetic construct
QRRRGDRDYL

SEQ ID NO: 52570 - protein, 10 aa, synthetic construct
QRRRGDYSSV

SEQ ID NO: 52571 - protein, 10 aa, synthetic construct
QRRRGDLTVT

SEQ ID NO: 52572 - protein, 10 aa, synthetic construct
DWVRGDRGVV

SEQ ID NO: 52573 - protein, 10 aa, synthetic construct
QRRRGDLIGR

SEQ ID NO: 52574 - protein, 10 aa, synthetic construct
QRHRGDHGVL

SEQ ID NO: 52575 - protein, 10 aa, synthetic construct
QRHRGDYVGL

SEQ ID NO: 52576 - protein, 10 aa, synthetic construct
QRHRGDQSTL

SEQ ID NO: 52577 - protein, 10 aa, synthetic construct
QRHRGDLLLS

SEQ ID NO: 52578 - protein, 10 aa, synthetic construct
QRSRGDHGVL

SEQ ID NO: 52579 - protein, 10 aa, synthetic construct
QRSRGDYVGL

SEQ ID NO: 52580 - protein, 10 aa, synthetic construct
QRSRGDQSTL

SEQ ID NO: 52581 - protein, 10 aa, synthetic construct
QRSRGDLLLS

SEQ ID NO: 52582 - protein, 10 aa, synthetic construct
QRTRGDHGVL

SEQ ID NO: 52583 - protein, 10 aa, synthetic construct
DWPRGDRGVV

SEQ ID NO: 52584 - protein, 10 aa, synthetic construct
QRTRGDYVGL

SEQ ID NO: 52585 - protein, 10 aa, synthetic construct
QRTRGDQSTL

SEQ ID NO: 52586 - protein, 10 aa, synthetic construct
QRTRGDLLLS

SEQ ID NO: 52587 - protein, 10 aa, synthetic construct
QRYRGDRGQI

SEQ ID NO: 52588 - protein, 10 aa, synthetic construct
QRYRGDRQGI

SEQ ID NO: 52589 - protein, 10 aa, synthetic construct
QRYRGDRSVV

SEQ ID NO: 52590 - protein, 10 aa, synthetic construct
QRYRGDRGVV

SEQ ID NO: 52591 - protein, 10 aa, synthetic construct
QRYRGDRSQT

SEQ ID NO: 52592 - protein, 10 aa, synthetic construct
QRNRGDRGQI

SEQ ID NO: 52593 - protein, 10 aa, synthetic construct
QRNRGDRQGI

SEQ ID NO: 52594 - protein, 10 aa, synthetic construct
DWLRGDRGVV

SEQ ID NO: 52595 - protein, 10 aa, synthetic construct
QRNRGDRSVV

SEQ ID NO: 52596 - protein, 10 aa, synthetic construct
QRNRGDRGVV

SEQ ID NO: 52597 - protein, 10 aa, synthetic construct
QRNRGDRSQT

SEQ ID NO: 52598 - protein, 10 aa, synthetic construct
QRQRGDHGVL

SEQ ID NO: 52599 - protein, 10 aa, synthetic construct
QRQRGDYVGL

SEQ ID NO: 52600 - protein, 10 aa, synthetic construct
QRQRGDQSTL

SEQ ID NO: 52601 - protein, 10 aa, synthetic construct
QRQRGDLLLS

SEQ ID NO: 52602 - protein, 10 aa, synthetic construct
QRDRGDHGVL

SEQ ID NO: 52603 - protein, 10 aa, synthetic construct
QRDRGDYVGL

SEQ ID NO: 52604 - protein, 10 aa, synthetic construct
QRDRGDQSTL

SEQ ID NO: 52605 - protein, 10 aa, synthetic construct
DWRRGDRGVV

SEQ ID NO: 52606 - protein, 10 aa, synthetic construct
QRDRGDLLLS

SEQ ID NO: 52607 - protein, 10 aa, synthetic construct
QRERGDHGVL

SEQ ID NO: 52608 - protein, 10 aa, synthetic construct
QRERGDYVGL

SEQ ID NO: 52609 - protein, 10 aa, synthetic construct
QRERGDQSTL

SEQ ID NO: 52610 - protein, 10 aa, synthetic construct
QRERGDLLLS

SEQ ID NO: 52611 - protein, 10 aa, synthetic construct
QHGRGDHGVL

SEQ ID NO: 52612 - protein, 10 aa, synthetic construct
QHGRGDYVGL

SEQ ID NO: 52613 - protein, 10 aa, synthetic construct
QHGRGDQSTL

SEQ ID NO: 52614 - protein, 10 aa, synthetic construct
QHGRGDLLLS

SEQ ID NO: 52615 - protein, 10 aa, synthetic construct
QHARGDHGVL

SEQ ID NO: 52616 - protein, 10 aa, synthetic construct
DWSRGDRGVV

SEQ ID NO: 52617 - protein, 10 aa, synthetic construct
QHARGDYVGL

SEQ ID NO: 52618 - protein, 10 aa, synthetic construct
QHARGDQSTL

SEQ ID NO: 52619 - protein, 10 aa, synthetic construct
QHARGDLLLS

SEQ ID NO: 52620 - protein, 10 aa, synthetic construct
QHVRGDRGQI

SEQ ID NO: 52621 - protein, 10 aa, synthetic construct
QHVRGDRQGI

SEQ ID NO: 52622 - protein, 10 aa, synthetic construct
QHVRGDRSVV

SEQ ID NO: 52623 - protein, 10 aa, synthetic construct
QHVRGDRGVV

SEQ ID NO: 52624 - protein, 10 aa, synthetic construct
QHVRGDRSQT

SEQ ID NO: 52625 - protein, 10 aa, synthetic construct
QHPRGDHGVL

SEQ ID NO: 52626 - protein, 10 aa, synthetic construct
QHPRGDYVGL

SEQ ID NO: 52627 - protein, 10 aa, synthetic construct
NKNRGDHGVL

SEQ ID NO: 52628 - protein, 10 aa, synthetic construct
DRGRGDRGQI

SEQ ID NO: 52629 - protein, 10 aa, synthetic construct
QHPRGDQSTL

SEQ ID NO: 52630 - protein, 10 aa, synthetic construct
QHPRGDLLLS

SEQ ID NO: 52631 - protein, 10 aa, synthetic construct
QHLRGDRGQI

SEQ ID NO: 52632 - protein, 10 aa, synthetic construct
QHLRGDRQGI

SEQ ID NO: 52633 - protein, 10 aa, synthetic construct
QHLRGDRSVV

SEQ ID NO: 52634 - protein, 10 aa, synthetic construct
QHLRGDRGVV

SEQ ID NO: 52635 - protein, 10 aa, synthetic construct
QHLRGDRSQT

SEQ ID NO: 52636 - protein, 10 aa, synthetic construct
QHWRGDRGQI

SEQ ID NO: 52637 - protein, 10 aa, synthetic construct
QHWRGDRQGI

SEQ ID NO: 52638 - protein, 10 aa, synthetic construct
QHWRGDRSVV

SEQ ID NO: 52639 - protein, 10 aa, synthetic construct
DRGRGDRQGI

SEQ ID NO: 52640 - protein, 10 aa, synthetic construct
QHWRGDRGVV

SEQ ID NO: 52641 - protein, 10 aa, synthetic construct
QHWRGDRSQT

SEQ ID NO: 52642 - protein, 10 aa, synthetic construct
QHRRGDHGVL

SEQ ID NO: 52643 - protein, 10 aa, synthetic construct
QHRRGDYVGL

SEQ ID NO: 52644 - protein, 10 aa, synthetic construct
QHRRGDQSTL

SEQ ID NO: 52645 - protein, 10 aa, synthetic construct
QHRRGDLLLS

SEQ ID NO: 52646 - protein, 10 aa, synthetic construct
QHHRGDRGQI

SEQ ID NO: 52647 - protein, 10 aa, synthetic construct
QHHRGDRQGI

SEQ ID NO: 52648 - protein, 10 aa, synthetic construct
QHHRGDRSVV

SEQ ID NO: 52649 - protein, 10 aa, synthetic construct
QHHRGDRGVV

SEQ ID NO: 52650 - protein, 10 aa, synthetic construct
DRGRGDRSVV

SEQ ID NO: 52651 - protein, 10 aa, synthetic construct
QHHRGDRSQT

SEQ ID NO: 52652 - protein, 10 aa, synthetic construct
QHSRGDRGQI

SEQ ID NO: 52653 - protein, 10 aa, synthetic construct
QHSRGDRQGI

SEQ ID NO: 52654 - protein, 10 aa, synthetic construct
QHSRGDRSVV

SEQ ID NO: 52655 - protein, 10 aa, synthetic construct
QHSRGDRGVV

SEQ ID NO: 52656 - protein, 10 aa, synthetic construct
QHSRGDRSQT

SEQ ID NO: 52657 - protein, 10 aa, synthetic construct
QHTRGDRGQI

SEQ ID NO: 52658 - protein, 10 aa, synthetic construct
QHTRGDRQGI

SEQ ID NO: 52659 - protein, 10 aa, synthetic construct
QHTRGDRSVV

SEQ ID NO: 52660 - protein, 10 aa, synthetic construct
QHTRGDRGVV

SEQ ID NO: 52661 - protein, 10 aa, synthetic construct
DRGRGDRGVV

SEQ ID NO: 52662 - protein, 10 aa, synthetic construct
QHTRGDRSQT

SEQ ID NO: 52663 - protein, 10 aa, synthetic construct
QHQRGDRGQI

SEQ ID NO: 52664 - protein, 10 aa, synthetic construct
QHQRGDRQGI

SEQ ID NO: 52665 - protein, 10 aa, synthetic construct
QHQRGDRSVV

SEQ ID NO: 52666 - protein, 10 aa, synthetic construct
QHQRGDRGVV

SEQ ID NO: 52667 - protein, 10 aa, synthetic construct
QHQRGDRSQT

SEQ ID NO: 52668 - protein, 10 aa, synthetic construct
QHDRGDRGQI

SEQ ID NO: 52669 - protein, 10 aa, synthetic construct
QHDRGDRQGI

SEQ ID NO: 52670 - protein, 10 aa, synthetic construct
QHDRGDRSVV

SEQ ID NO: 52671 - protein, 10 aa, synthetic construct
QHDRGDRGVV

SEQ ID NO: 52672 - protein, 10 aa, synthetic construct
DRGRGDRSQT

SEQ ID NO: 52673 - protein, 10 aa, synthetic construct
QHDRGDRSQT

SEQ ID NO: 52674 - protein, 10 aa, synthetic construct
QHERGDRGQI

SEQ ID NO: 52675 - protein, 10 aa, synthetic construct
QHERGDRQGI

SEQ ID NO: 52676 - protein, 10 aa, synthetic construct
QHERGDRSVV

SEQ ID NO: 52677 - protein, 10 aa, synthetic construct
QHERGDRGVV

SEQ ID NO: 52678 - protein, 10 aa, synthetic construct
QHERGDRSQT

SEQ ID NO: 52679 - protein, 10 aa, synthetic construct
QSGRGDHVNL

SEQ ID NO: 52680 - protein, 10 aa, synthetic construct
QSGRGDRDYL

SEQ ID NO: 52681 - protein, 10 aa, synthetic construct
QSGRGDYSSV

SEQ ID NO: 52682 - protein, 10 aa, synthetic construct
QSGRGDLTVT

SEQ ID NO: 52683 - protein, 10 aa, synthetic construct
DRARGDRGQI

SEQ ID NO: 52684 - protein, 10 aa, synthetic construct
QSGRGDLIGR

SEQ ID NO: 52685 - protein, 10 aa, synthetic construct
QSARGDHVNL

SEQ ID NO: 52686 - protein, 10 aa, synthetic construct
QSARGDRDYL

SEQ ID NO: 52687 - protein, 10 aa, synthetic construct
QSARGDYSSV

SEQ ID NO: 52688 - protein, 10 aa, synthetic construct
QSARGDLTVT

SEQ ID NO: 52689 - protein, 10 aa, synthetic construct
QSARGDLIGR

SEQ ID NO: 52690 - protein, 10 aa, synthetic construct
QSVRGDHGVL

SEQ ID NO: 52691 - protein, 10 aa, synthetic construct
QSVRGDHVNL

SEQ ID NO: 52692 - protein, 10 aa, synthetic construct
QSVRGDYVGL

SEQ ID NO: 52693 - protein, 10 aa, synthetic construct
QSVRGDYSSV

SEQ ID NO: 52694 - protein, 10 aa, synthetic construct
DRARGDRQGI

SEQ ID NO: 52695 - protein, 10 aa, synthetic construct
QSVRGDQSTL

SEQ ID NO: 52696 - protein, 10 aa, synthetic construct
QSVRGDLLLS

SEQ ID NO: 52697 - protein, 10 aa, synthetic construct
QSLRGDHGVL

SEQ ID NO: 52698 - protein, 10 aa, synthetic construct
QSLRGDHVNL

SEQ ID NO: 52699 - protein, 10 aa, synthetic construct
QSLRGDYVGL

SEQ ID NO: 52700 - protein, 10 aa, synthetic construct
QSLRGDYSSV

SEQ ID NO: 52701 - protein, 10 aa, synthetic construct
QSLRGDQSTL

SEQ ID NO: 52702 - protein, 10 aa, synthetic construct
QSLRGDLLLS

SEQ ID NO: 52703 - protein, 10 aa, synthetic construct
QSIRGDRGQI

SEQ ID NO: 52704 - protein, 10 aa, synthetic construct
QSIRGDRQGI

SEQ ID NO: 52705 - protein, 10 aa, synthetic construct
DRARGDRSVV

SEQ ID NO: 52706 - protein, 10 aa, synthetic construct
QSIRGDRSVV

SEQ ID NO: 52707 - protein, 10 aa, synthetic construct
QSIRGDRGVV

SEQ ID NO: 52708 - protein, 10 aa, synthetic construct
QSIRGDYVGL

SEQ ID NO: 52709 - protein, 10 aa, synthetic construct
QSIRGDQSTL

SEQ ID NO: 52710 - protein, 10 aa, synthetic construct
QSIRGDRSQT

SEQ ID NO: 52711 - protein, 10 aa, synthetic construct
QSIRGDLLLS

SEQ ID NO: 52712 - protein, 10 aa, synthetic construct
QSMRGDRGQI

SEQ ID NO: 52713 - protein, 10 aa, synthetic construct
QSMRGDRQGI

SEQ ID NO: 52714 - protein, 10 aa, synthetic construct
QSMRGDRSVV

SEQ ID NO: 52715 - protein, 10 aa, synthetic construct
QSMRGDRGVV

SEQ ID NO: 52716 - protein, 10 aa, synthetic construct
DRARGDRGVV

SEQ ID NO: 52717 - protein, 10 aa, synthetic construct
QSMRGDYVGL

SEQ ID NO: 52718 - protein, 10 aa, synthetic construct
QSMRGDQSTL

SEQ ID NO: 52719 - protein, 10 aa, synthetic construct
QSMRGDRSQT

SEQ ID NO: 52720 - protein, 10 aa, synthetic construct
QSMRGDLLLS

SEQ ID NO: 52721 - protein, 10 aa, synthetic construct
QSWRGDHGVL

SEQ ID NO: 52722 - protein, 10 aa, synthetic construct
QSWRGDHVNL

SEQ ID NO: 52723 - protein, 10 aa, synthetic construct
QSWRGDYVGL

SEQ ID NO: 52724 - protein, 10 aa, synthetic construct
QSWRGDYSSV

SEQ ID NO: 52725 - protein, 10 aa, synthetic construct
QSWRGDQSTL

SEQ ID NO: 52726 - protein, 10 aa, synthetic construct
QSWRGDLLLS

SEQ ID NO: 52727 - protein, 10 aa, synthetic construct
DRARGDRSQT

SEQ ID NO: 52728 - protein, 10 aa, synthetic construct
QSFRGDRGQI

SEQ ID NO: 52729 - protein, 10 aa, synthetic construct
QSFRGDRQGI

SEQ ID NO: 52730 - protein, 10 aa, synthetic construct
QSFRGDRSVV

SEQ ID NO: 52731 - protein, 10 aa, synthetic construct
QSFRGDRGVV

SEQ ID NO: 52732 - protein, 10 aa, synthetic construct
QSFRGDYVGL

SEQ ID NO: 52733 - protein, 10 aa, synthetic construct
QSFRGDQSTL

SEQ ID NO: 52734 - protein, 10 aa, synthetic construct
QSFRGDRSQT

SEQ ID NO: 52735 - protein, 10 aa, synthetic construct
QSFRGDLLLS

SEQ ID NO: 52736 - protein, 10 aa, synthetic construct
QSKRGDRGQI

SEQ ID NO: 52737 - protein, 10 aa, synthetic construct
QSKRGDRQGI

SEQ ID NO: 52738 - protein, 10 aa, synthetic construct
NKNRGDRGQI

SEQ ID NO: 52739 - protein, 10 aa, synthetic construct
DRPRGDRGQI

SEQ ID NO: 52740 - protein, 10 aa, synthetic construct
QSKRGDRSVV

SEQ ID NO: 52741 - protein, 10 aa, synthetic construct
QSKRGDRGVV

SEQ ID NO: 52742 - protein, 10 aa, synthetic construct
QSKRGDYVGL

SEQ ID NO: 52743 - protein, 10 aa, synthetic construct
QSKRGDQSTL

SEQ ID NO: 52744 - protein, 10 aa, synthetic construct
QSKRGDRSQT

SEQ ID NO: 52745 - protein, 10 aa, synthetic construct
QSKRGDLLLS

SEQ ID NO: 52746 - protein, 10 aa, synthetic construct
QSRRGDHVNL

SEQ ID NO: 52747 - protein, 10 aa, synthetic construct
QSRRGDRDYL

SEQ ID NO: 52748 - protein, 10 aa, synthetic construct
QSRRGDYSSV

SEQ ID NO: 52749 - protein, 10 aa, synthetic construct
QSRRGDLTVT

SEQ ID NO: 52750 - protein, 10 aa, synthetic construct
DRPRGDRQGI

SEQ ID NO: 52751 - protein, 10 aa, synthetic construct
QSRRGDLIGR

SEQ ID NO: 52752 - protein, 10 aa, synthetic construct
QSHRGDHGVL

SEQ ID NO: 52753 - protein, 10 aa, synthetic construct
QSHRGDHVNL

SEQ ID NO: 52754 - protein, 10 aa, synthetic construct
QSHRGDYVGL

SEQ ID NO: 52755 - protein, 10 aa, synthetic construct
QSHRGDYSSV

SEQ ID NO: 52756 - protein, 10 aa, synthetic construct
QSHRGDQSTL

SEQ ID NO: 52757 - protein, 10 aa, synthetic construct
QSHRGDLLLS

SEQ ID NO: 52758 - protein, 10 aa, synthetic construct
QSSRGDHGVL

SEQ ID NO: 52759 - protein, 10 aa, synthetic construct
QSSRGDHVNL

SEQ ID NO: 52760 - protein, 10 aa, synthetic construct
QSSRGDYVGL

SEQ ID NO: 52761 - protein, 10 aa, synthetic construct
DRPRGDRSVV

SEQ ID NO: 52762 - protein, 10 aa, synthetic construct
QSSRGDYSSV

SEQ ID NO: 52763 - protein, 10 aa, synthetic construct
QSSRGDQSTL

SEQ ID NO: 52764 - protein, 10 aa, synthetic construct
QSSRGDLLLS

SEQ ID NO: 52765 - protein, 10 aa, synthetic construct
QSTRGDHGVL

SEQ ID NO: 52766 - protein, 10 aa, synthetic construct
QSTRGDHVNL

SEQ ID NO: 52767 - protein, 10 aa, synthetic construct
QSTRGDYVGL

SEQ ID NO: 52768 - protein, 10 aa, synthetic construct
QSTRGDYSSV

SEQ ID NO: 52769 - protein, 10 aa, synthetic construct
QSTRGDQSTL

SEQ ID NO: 52770 - protein, 10 aa, synthetic construct
QSTRGDLLLS

SEQ ID NO: 52771 - protein, 10 aa, synthetic construct
QSYRGDRGQI

SEQ ID NO: 52772 - protein, 10 aa, synthetic construct
DRPRGDRGVV

SEQ ID NO: 52773 - protein, 10 aa, synthetic construct
QSYRGDRQGI

SEQ ID NO: 52774 - protein, 10 aa, synthetic construct
QSYRGDRSVV

SEQ ID NO: 52775 - protein, 10 aa, synthetic construct
QSYRGDRGVV

SEQ ID NO: 52776 - protein, 10 aa, synthetic construct
QSYRGDYVGL

SEQ ID NO: 52777 - protein, 10 aa, synthetic construct
QSYRGDQSTL

SEQ ID NO: 52778 - protein, 10 aa, synthetic construct
QSYRGDRSQT

SEQ ID NO: 52779 - protein, 10 aa, synthetic construct
QSYRGDLLLS

SEQ ID NO: 52780 - protein, 10 aa, synthetic construct
QSNRGDRGQI

SEQ ID NO: 52781 - protein, 10 aa, synthetic construct
QSNRGDRQGI

SEQ ID NO: 52782 - protein, 10 aa, synthetic construct
QSNRGDRSVV

SEQ ID NO: 52783 - protein, 10 aa, synthetic construct
DRPRGDRSQT

SEQ ID NO: 52784 - protein, 10 aa, synthetic construct
QSNRGDRGVV

SEQ ID NO: 52785 - protein, 10 aa, synthetic construct
QSNRGDYVGL

SEQ ID NO: 52786 - protein, 10 aa, synthetic construct
QSNRGDQSTL

SEQ ID NO: 52787 - protein, 10 aa, synthetic construct
QSNRGDRSQT

SEQ ID NO: 52788 - protein, 10 aa, synthetic construct
QSNRGDLLLS

SEQ ID NO: 52789 - protein, 10 aa, synthetic construct
QSQRGDHGVL

SEQ ID NO: 52790 - protein, 10 aa, synthetic construct
QSQRGDHVNL

SEQ ID NO: 52791 - protein, 10 aa, synthetic construct
QSQRGDYVGL

SEQ ID NO: 52792 - protein, 10 aa, synthetic construct
QSQRGDYSSV

SEQ ID NO: 52793 - protein, 10 aa, synthetic construct
QSQRGDQSTL

SEQ ID NO: 52794 - protein, 10 aa, synthetic construct
DRRRGDRGQI

SEQ ID NO: 52795 - protein, 10 aa, synthetic construct
QSQRGDLLLS

SEQ ID NO: 52796 - protein, 10 aa, synthetic construct
QSDRGDHGVL

SEQ ID NO: 52797 - protein, 10 aa, synthetic construct
QSDRGDHVNL

SEQ ID NO: 52798 - protein, 10 aa, synthetic construct
QSDRGDYVGL

SEQ ID NO: 52799 - protein, 10 aa, synthetic construct
QSDRGDYSSV

SEQ ID NO: 52800 - protein, 10 aa, synthetic construct
QSDRGDQSTL

SEQ ID NO: 52801 - protein, 10 aa, synthetic construct
QSDRGDLLLS

SEQ ID NO: 52802 - protein, 10 aa, synthetic construct
QSERGDHGVL

SEQ ID NO: 52803 - protein, 10 aa, synthetic construct
QSERGDHVNL

SEQ ID NO: 52804 - protein, 10 aa, synthetic construct
QSERGDYVGL

SEQ ID NO: 52805 - protein, 10 aa, synthetic construct
DRRRGDRQGI

SEQ ID NO: 52806 - protein, 10 aa, synthetic construct
QSERGDYSSV

SEQ ID NO: 52807 - protein, 10 aa, synthetic construct
QSERGDQSTL

SEQ ID NO: 52808 - protein, 10 aa, synthetic construct
QSERGDLLLS

SEQ ID NO: 52809 - protein, 10 aa, synthetic construct
QTGRGDHGVL

SEQ ID NO: 52810 - protein, 10 aa, synthetic construct
QTGRGDYVGL

SEQ ID NO: 52811 - protein, 10 aa, synthetic construct
QTGRGDQSTL

SEQ ID NO: 52812 - protein, 10 aa, synthetic construct
QTGRGDLLLS

SEQ ID NO: 52813 - protein, 10 aa, synthetic construct
QTARGDHGVL

SEQ ID NO: 52814 - protein, 10 aa, synthetic construct
QTARGDYVGL

SEQ ID NO: 52815 - protein, 10 aa, synthetic construct
QTARGDQSTL

SEQ ID NO: 52816 - protein, 10 aa, synthetic construct
DRRRGDRSVV

SEQ ID NO: 52817 - protein, 10 aa, synthetic construct
QTARGDLLLS

SEQ ID NO: 52818 - protein, 10 aa, synthetic construct
QTVRGDRGQI

SEQ ID NO: 52819 - protein, 10 aa, synthetic construct
QTVRGDRQGI

SEQ ID NO: 52820 - protein, 10 aa, synthetic construct
QTVRGDRSVV

SEQ ID NO: 52821 - protein, 10 aa, synthetic construct
QTVRGDRGVV

SEQ ID NO: 52822 - protein, 10 aa, synthetic construct
QTVRGDRSQT

SEQ ID NO: 52823 - protein, 10 aa, synthetic construct
QTPRGDHGVL

SEQ ID NO: 52824 - protein, 10 aa, synthetic construct
QTPRGDYVGL

SEQ ID NO: 52825 - protein, 10 aa, synthetic construct
QTPRGDQSTL

SEQ ID NO: 52826 - protein, 10 aa, synthetic construct
QTPRGDLLLS

SEQ ID NO: 52827 - protein, 10 aa, synthetic construct
DRRRGDRGVV

SEQ ID NO: 52828 - protein, 10 aa, synthetic construct
QTLRGDRGQI

SEQ ID NO: 52829 - protein, 10 aa, synthetic construct
QTLRGDRQGI

SEQ ID NO: 52830 - protein, 10 aa, synthetic construct
QTLRGDRSVV

SEQ ID NO: 52831 - protein, 10 aa, synthetic construct
QTLRGDRGVV

SEQ ID NO: 52832 - protein, 10 aa, synthetic construct
QTLRGDRSQT

SEQ ID NO: 52833 - protein, 10 aa, synthetic construct
QTWRGDRGQI

SEQ ID NO: 52834 - protein, 10 aa, synthetic construct
QTWRGDRQGI

SEQ ID NO: 52835 - protein, 10 aa, synthetic construct
QTWRGDRSVV

SEQ ID NO: 52836 - protein, 10 aa, synthetic construct
QTWRGDRGVV

SEQ ID NO: 52837 - protein, 10 aa, synthetic construct
QTWRGDRSQT

SEQ ID NO: 52838 - protein, 10 aa, synthetic construct
DRRRGDRSQT

SEQ ID NO: 52839 - protein, 10 aa, synthetic construct
QTRRGDHGVL

SEQ ID NO: 52840 - protein, 10 aa, synthetic construct
QTRRGDYVGL

SEQ ID NO: 52841 - protein, 10 aa, synthetic construct
QTRRGDQSTL

SEQ ID NO: 52842 - protein, 10 aa, synthetic construct
QTRRGDLLLS

SEQ ID NO: 52843 - protein, 10 aa, synthetic construct
QTHRGDRGQI

SEQ ID NO: 52844 - protein, 10 aa, synthetic construct
QTHRGDRQGI

SEQ ID NO: 52845 - protein, 10 aa, synthetic construct
QTHRGDRSVV

SEQ ID NO: 52846 - protein, 10 aa, synthetic construct
QTHRGDRGVV

SEQ ID NO: 52847 - protein, 10 aa, synthetic construct
QTHRGDRSQT

SEQ ID NO: 52848 - protein, 10 aa, synthetic construct
QTSRGDRGQI

SEQ ID NO: 52849 - protein, 10 aa, synthetic construct
DKKRGDRSQT

SEQ ID NO: 52850 - protein, 10 aa, synthetic construct
NKNRGDRQGI

SEQ ID NO: 52851 - protein, 10 aa, synthetic construct
DSGRGDRGQI

SEQ ID NO: 52852 - protein, 10 aa, synthetic construct
QTSRGDRQGI

SEQ ID NO: 52853 - protein, 10 aa, synthetic construct
QTSRGDRSVV

SEQ ID NO: 52854 - protein, 10 aa, synthetic construct
QTSRGDRGVV

SEQ ID NO: 52855 - protein, 10 aa, synthetic construct
QTSRGDRSQT

SEQ ID NO: 52856 - protein, 10 aa, synthetic construct
QTTRGDRGQI

SEQ ID NO: 52857 - protein, 10 aa, synthetic construct
QTTRGDRQGI

SEQ ID NO: 52858 - protein, 10 aa, synthetic construct
QTTRGDRSVV

SEQ ID NO: 52859 - protein, 10 aa, synthetic construct
QTTRGDRGVV

SEQ ID NO: 52860 - protein, 10 aa, synthetic construct
QTTRGDRSQT

SEQ ID NO: 52861 - protein, 10 aa, synthetic construct
QTQRGDRGQI

SEQ ID NO: 52862 - protein, 10 aa, synthetic construct
DSGRGDRQGI

SEQ ID NO: 52863 - protein, 10 aa, synthetic construct
QTQRGDRQGI

SEQ ID NO: 52864 - protein, 10 aa, synthetic construct
QTQRGDRSVV

SEQ ID NO: 52865 - protein, 10 aa, synthetic construct
QTQRGDRGVV

SEQ ID NO: 52866 - protein, 10 aa, synthetic construct
QTQRGDRSQT

SEQ ID NO: 52867 - protein, 10 aa, synthetic construct
QTDRGDRGQI

SEQ ID NO: 52868 - protein, 10 aa, synthetic construct
QTDRGDRQGI

SEQ ID NO: 52869 - protein, 10 aa, synthetic construct
QTDRGDRSVV

SEQ ID NO: 52870 - protein, 10 aa, synthetic construct
QTDRGDRGVV

SEQ ID NO: 52871 - protein, 10 aa, synthetic construct
QTDRGDRSQT

SEQ ID NO: 52872 - protein, 10 aa, synthetic construct
QTERGDRGQI

SEQ ID NO: 52873 - protein, 10 aa, synthetic construct
DSGRGDRSVV

SEQ ID NO: 52874 - protein, 10 aa, synthetic construct
QTERGDRQGI

SEQ ID NO: 52875 - protein, 10 aa, synthetic construct
QTERGDRSVV

SEQ ID NO: 52876 - protein, 10 aa, synthetic construct
QTERGDRGVV

SEQ ID NO: 52877 - protein, 10 aa, synthetic construct
QTERGDRSQT

SEQ ID NO: 52878 - protein, 10 aa, synthetic construct
QYGRGDRGQI

SEQ ID NO: 52879 - protein, 10 aa, synthetic construct
QYGRGDRQGI

SEQ ID NO: 52880 - protein, 10 aa, synthetic construct
QYGRGDRSVV

SEQ ID NO: 52881 - protein, 10 aa, synthetic construct
QYGRGDRGVV

SEQ ID NO: 52882 - protein, 10 aa, synthetic construct
QYGRGDRSQT

SEQ ID NO: 52883 - protein, 10 aa, synthetic construct
QYARGDRGQI

SEQ ID NO: 52884 - protein, 10 aa, synthetic construct
DSGRGDRGVV

SEQ ID NO: 52885 - protein, 10 aa, synthetic construct
QYARGDRQGI

SEQ ID NO: 52886 - protein, 10 aa, synthetic construct
QYARGDRSVV

SEQ ID NO: 52887 - protein, 10 aa, synthetic construct
QYARGDRGVV

SEQ ID NO: 52888 - protein, 10 aa, synthetic construct
QYARGDRSQT

SEQ ID NO: 52889 - protein, 10 aa, synthetic construct
QYPRGDRGQI

SEQ ID NO: 52890 - protein, 10 aa, synthetic construct
QYPRGDRQGI

SEQ ID NO: 52891 - protein, 10 aa, synthetic construct
QYPRGDRSVV

SEQ ID NO: 52892 - protein, 10 aa, synthetic construct
QYPRGDRGVV

SEQ ID NO: 52893 - protein, 10 aa, synthetic construct
QYPRGDRSQT

SEQ ID NO: 52894 - protein, 10 aa, synthetic construct
QYRRGDRGQI

SEQ ID NO: 52895 - protein, 10 aa, synthetic construct
DSGRGDRSQT

SEQ ID NO: 52896 - protein, 10 aa, synthetic construct
QYRRGDRQGI

SEQ ID NO: 52897 - protein, 10 aa, synthetic construct
QYRRGDRSVV

SEQ ID NO: 52898 - protein, 10 aa, synthetic construct
QYRRGDRGVV

SEQ ID NO: 52899 - protein, 10 aa, synthetic construct
QYRRGDRSQT

SEQ ID NO: 52900 - protein, 10 aa, synthetic construct
QNGRGDRGQI

SEQ ID NO: 52901 - protein, 10 aa, synthetic construct
QNGRGDRQGI

SEQ ID NO: 52902 - protein, 10 aa, synthetic construct
QNGRGDRSVV

SEQ ID NO: 52903 - protein, 10 aa, synthetic construct
QNGRGDRGVV

SEQ ID NO: 52904 - protein, 10 aa, synthetic construct
QNGRGDRSQT

SEQ ID NO: 52905 - protein, 10 aa, synthetic construct
QNARGDRGQI

SEQ ID NO: 52906 - protein, 10 aa, synthetic construct
DSARGDRGQI

SEQ ID NO: 52907 - protein, 10 aa, synthetic construct
QNARGDRQGI

SEQ ID NO: 52908 - protein, 10 aa, synthetic construct
QNARGDRSVV

SEQ ID NO: 52909 - protein, 10 aa, synthetic construct
QNARGDRGVV

SEQ ID NO: 52910 - protein, 10 aa, synthetic construct
QNARGDRSQT

SEQ ID NO: 52911 - protein, 10 aa, synthetic construct
QNPRGDRGQI

SEQ ID NO: 52912 - protein, 10 aa, synthetic construct
QNPRGDRQGI

SEQ ID NO: 52913 - protein, 10 aa, synthetic construct
QNPRGDRSVV

SEQ ID NO: 52914 - protein, 10 aa, synthetic construct
QNPRGDRGVV

SEQ ID NO: 52915 - protein, 10 aa, synthetic construct
QNPRGDRSQT

SEQ ID NO: 52916 - protein, 10 aa, synthetic construct
QNRRGDRGQI

SEQ ID NO: 52917 - protein, 10 aa, synthetic construct
DSARGDRQGI

SEQ ID NO: 52918 - protein, 10 aa, synthetic construct
QNRRGDRQGI

SEQ ID NO: 52919 - protein, 10 aa, synthetic construct
QNRRGDRSVV

SEQ ID NO: 52920 - protein, 10 aa, synthetic construct
QNRRGDRGVV

SEQ ID NO: 52921 - protein, 10 aa, synthetic construct
QNRRGDRSQT

SEQ ID NO: 52922 - protein, 10 aa, synthetic construct
QQGRGDHGVL

SEQ ID NO: 52923 - protein, 10 aa, synthetic construct
QQGRGDYVGL

SEQ ID NO: 52924 - protein, 10 aa, synthetic construct
QQGRGDQSTL

SEQ ID NO: 52925 - protein, 10 aa, synthetic construct
QQGRGDLLLS

SEQ ID NO: 52926 - protein, 10 aa, synthetic construct
QQARGDHGVL

SEQ ID NO: 52927 - protein, 10 aa, synthetic construct
QQARGDYVGL

SEQ ID NO: 52928 - protein, 10 aa, synthetic construct
DSARGDRSVV

SEQ ID NO: 52929 - protein, 10 aa, synthetic construct
QQARGDQSTL

SEQ ID NO: 52930 - protein, 10 aa, synthetic construct
QQARGDLLLS

SEQ ID NO: 52931 - protein, 10 aa, synthetic construct
QQVRGDRGQI

SEQ ID NO: 52932 - protein, 10 aa, synthetic construct
QQVRGDRQGI

SEQ ID NO: 52933 - protein, 10 aa, synthetic construct
QQVRGDRSVV

SEQ ID NO: 52934 - protein, 10 aa, synthetic construct
QQVRGDRGVV

SEQ ID NO: 52935 - protein, 10 aa, synthetic construct
QQVRGDRSQT

SEQ ID NO: 52936 - protein, 10 aa, synthetic construct
QQPRGDHGVL

SEQ ID NO: 52937 - protein, 10 aa, synthetic construct
QQPRGDYVGL

SEQ ID NO: 52938 - protein, 10 aa, synthetic construct
QQPRGDQSTL

SEQ ID NO: 52939 - protein, 10 aa, synthetic construct
DSARGDRGVV

SEQ ID NO: 52940 - protein, 10 aa, synthetic construct
QQPRGDLLLS

SEQ ID NO: 52941 - protein, 10 aa, synthetic construct
QQLRGDRGQI

SEQ ID NO: 52942 - protein, 10 aa, synthetic construct
QQLRGDRQGI

SEQ ID NO: 52943 - protein, 10 aa, synthetic construct
QQLRGDRSVV

SEQ ID NO: 52944 - protein, 10 aa, synthetic construct
QQLRGDRGVV

SEQ ID NO: 52945 - protein, 10 aa, synthetic construct
QQLRGDRSQT

SEQ ID NO: 52946 - protein, 10 aa, synthetic construct
QQWRGDRGQI

SEQ ID NO: 52947 - protein, 10 aa, synthetic construct
QQWRGDRQGI

SEQ ID NO: 52948 - protein, 10 aa, synthetic construct
QQWRGDRSVV

SEQ ID NO: 52949 - protein, 10 aa, synthetic construct
QQWRGDRGVV

SEQ ID NO: 52950 - protein, 10 aa, synthetic construct
DSARGDRSQT

SEQ ID NO: 52951 - protein, 10 aa, synthetic construct
QQWRGDRSQT

SEQ ID NO: 52952 - protein, 10 aa, synthetic construct
QQRRGDHGVL

SEQ ID NO: 52953 - protein, 10 aa, synthetic construct
QQRRGDYVGL

SEQ ID NO: 52954 - protein, 10 aa, synthetic construct
QQRRGDQSTL

SEQ ID NO: 52955 - protein, 10 aa, synthetic construct
QQRRGDLLLS

SEQ ID NO: 52956 - protein, 10 aa, synthetic construct
QQHRGDRGQI

SEQ ID NO: 52957 - protein, 10 aa, synthetic construct
QQHRGDRQGI

SEQ ID NO: 52958 - protein, 10 aa, synthetic construct
QQHRGDRSVV

SEQ ID NO: 52959 - protein, 10 aa, synthetic construct
QQHRGDRGVV

SEQ ID NO: 52960 - protein, 10 aa, synthetic construct
QQHRGDRSQT

SEQ ID NO: 52961 - protein, 10 aa, synthetic construct
NKNRGDYVGL

SEQ ID NO: 52962 - protein, 10 aa, synthetic construct
DSRRGDRGQI

SEQ ID NO: 52963 - protein, 10 aa, synthetic construct
QQSRGDRGQI

SEQ ID NO: 52964 - protein, 10 aa, synthetic construct
QQSRGDRQGI

SEQ ID NO: 52965 - protein, 10 aa, synthetic construct
QQSRGDRSVV

SEQ ID NO: 52966 - protein, 10 aa, synthetic construct
QQSRGDRGVV

SEQ ID NO: 52967 - protein, 10 aa, synthetic construct
QQSRGDRSQT

SEQ ID NO: 52968 - protein, 10 aa, synthetic construct
QQTRGDRGQI

SEQ ID NO: 52969 - protein, 10 aa, synthetic construct
QQTRGDRQGI

SEQ ID NO: 52970 - protein, 10 aa, synthetic construct
QQTRGDRSVV

SEQ ID NO: 52971 - protein, 10 aa, synthetic construct
QQTRGDRGVV

SEQ ID NO: 52972 - protein, 10 aa, synthetic construct
QQTRGDRSQT

SEQ ID NO: 52973 - protein, 10 aa, synthetic construct
DSRRGDRQGI

SEQ ID NO: 52974 - protein, 10 aa, synthetic construct
QQQRGDRGQI

SEQ ID NO: 52975 - protein, 10 aa, synthetic construct
QQQRGDRQGI

SEQ ID NO: 52976 - protein, 10 aa, synthetic construct
QQQRGDRSVV

SEQ ID NO: 52977 - protein, 10 aa, synthetic construct
QQQRGDRGVV

SEQ ID NO: 52978 - protein, 10 aa, synthetic construct
QQQRGDRSQT

SEQ ID NO: 52979 - protein, 10 aa, synthetic construct
QQDRGDRGQI

SEQ ID NO: 52980 - protein, 10 aa, synthetic construct
QQDRGDRQGI

SEQ ID NO: 52981 - protein, 10 aa, synthetic construct
QQDRGDRSVV

SEQ ID NO: 52982 - protein, 10 aa, synthetic construct
QQDRGDRGVV

SEQ ID NO: 52983 - protein, 10 aa, synthetic construct
QQDRGDRSQT

SEQ ID NO: 52984 - protein, 10 aa, synthetic construct
DSRRGDRSVV

SEQ ID NO: 52985 - protein, 10 aa, synthetic construct
QQERGDRGQI

SEQ ID NO: 52986 - protein, 10 aa, synthetic construct
QQERGDRQGI

SEQ ID NO: 52987 - protein, 10 aa, synthetic construct
QQERGDRSVV

SEQ ID NO: 52988 - protein, 10 aa, synthetic construct
QQERGDRGVV

SEQ ID NO: 52989 - protein, 10 aa, synthetic construct
QQERGDRSQT

SEQ ID NO: 52990 - protein, 10 aa, synthetic construct
QDGRGDHGVL

SEQ ID NO: 52991 - protein, 10 aa, synthetic construct
QDGRGDYVGL

SEQ ID NO: 52992 - protein, 10 aa, synthetic construct
QDGRGDQSTL

SEQ ID NO: 52993 - protein, 10 aa, synthetic construct
QDGRGDLLLS

SEQ ID NO: 52994 - protein, 10 aa, synthetic construct
QDARGDHGVL

SEQ ID NO: 52995 - protein, 10 aa, synthetic construct
DSRRGDRGVV

SEQ ID NO: 52996 - protein, 10 aa, synthetic construct
QDARGDYVGL

SEQ ID NO: 52997 - protein, 10 aa, synthetic construct
QDARGDQSTL

SEQ ID NO: 52998 - protein, 10 aa, synthetic construct
QDARGDLLLS

SEQ ID NO: 52999 - protein, 10 aa, synthetic construct
QDVRGDRGQI

SEQ ID NO: 53000 - protein, 10 aa, synthetic construct
QDVRGDRQGI

SEQ ID NO: 53001 - protein, 10 aa, synthetic construct
QDVRGDRSVV

SEQ ID NO: 53002 - protein, 10 aa, synthetic construct
QDVRGDRGVV

SEQ ID NO: 53003 - protein, 10 aa, synthetic construct
QDVRGDRSQT

SEQ ID NO: 53004 - protein, 10 aa, synthetic construct
QDPRGDHGVL

SEQ ID NO: 53005 - protein, 10 aa, synthetic construct
QDPRGDYVGL

SEQ ID NO: 53006 - protein, 10 aa, synthetic construct
DSRRGDRSQT

SEQ ID NO: 53007 - protein, 10 aa, synthetic construct
QDPRGDQSTL

SEQ ID NO: 53008 - protein, 10 aa, synthetic construct
QDPRGDLLLS

SEQ ID NO: 53009 - protein, 10 aa, synthetic construct
QDLRGDRGQI

SEQ ID NO: 53010 - protein, 10 aa, synthetic construct
QDLRGDRQGI

SEQ ID NO: 53011 - protein, 10 aa, synthetic construct
QDLRGDRSVV

SEQ ID NO: 53012 - protein, 10 aa, synthetic construct
QDLRGDRGVV

SEQ ID NO: 53013 - protein, 10 aa, synthetic construct
QDLRGDRSQT

SEQ ID NO: 53014 - protein, 10 aa, synthetic construct
QDWRGDRGQI

SEQ ID NO: 53015 - protein, 10 aa, synthetic construct
QDWRGDRQGI

SEQ ID NO: 53016 - protein, 10 aa, synthetic construct
QDWRGDRSVV

SEQ ID NO: 53017 - protein, 10 aa, synthetic construct
QGGRGDRGQI

SEQ ID NO: 53018 - protein, 10 aa, synthetic construct
QDWRGDRGVV

SEQ ID NO: 53019 - protein, 10 aa, synthetic construct
QDWRGDRSQT

SEQ ID NO: 53020 - protein, 10 aa, synthetic construct
QDRRGDHGVL

SEQ ID NO: 53021 - protein, 10 aa, synthetic construct
QDRRGDYVGL

SEQ ID NO: 53022 - protein, 10 aa, synthetic construct
QDRRGDQSTL

SEQ ID NO: 53023 - protein, 10 aa, synthetic construct
QDRRGDLLLS

SEQ ID NO: 53024 - protein, 10 aa, synthetic construct
QDHRGDRGQI

SEQ ID NO: 53025 - protein, 10 aa, synthetic construct
QDHRGDRQGI

SEQ ID NO: 53026 - protein, 10 aa, synthetic construct
QDHRGDRSVV

SEQ ID NO: 53027 - protein, 10 aa, synthetic construct
QDHRGDRGVV

SEQ ID NO: 53028 - protein, 10 aa, synthetic construct
QGGRGDRQGI

SEQ ID NO: 53029 - protein, 10 aa, synthetic construct
QDHRGDRSQT

SEQ ID NO: 53030 - protein, 10 aa, synthetic construct
QDSRGDRGQI

SEQ ID NO: 53031 - protein, 10 aa, synthetic construct
QDSRGDRQGI

SEQ ID NO: 53032 - protein, 10 aa, synthetic construct
QDSRGDRSVV

SEQ ID NO: 53033 - protein, 10 aa, synthetic construct
QDSRGDRGVV

SEQ ID NO: 53034 - protein, 10 aa, synthetic construct
QDSRGDRSQT

SEQ ID NO: 53035 - protein, 10 aa, synthetic construct
QDTRGDRGQI

SEQ ID NO: 53036 - protein, 10 aa, synthetic construct
QDTRGDRQGI

SEQ ID NO: 53037 - protein, 10 aa, synthetic construct
QDTRGDRSVV

SEQ ID NO: 53038 - protein, 10 aa, synthetic construct
QDTRGDRGVV

SEQ ID NO: 53039 - protein, 10 aa, synthetic construct
QGGRGDRSVV

SEQ ID NO: 53040 - protein, 10 aa, synthetic construct
QDTRGDRSQT

SEQ ID NO: 53041 - protein, 10 aa, synthetic construct
QDQRGDRGQI

SEQ ID NO: 53042 - protein, 10 aa, synthetic construct
QDQRGDRQGI

SEQ ID NO: 53043 - protein, 10 aa, synthetic construct
QDQRGDRSVV

SEQ ID NO: 53044 - protein, 10 aa, synthetic construct
QDQRGDRGVV

SEQ ID NO: 53045 - protein, 10 aa, synthetic construct
QDQRGDRSQT

SEQ ID NO: 53046 - protein, 10 aa, synthetic construct
QDDRGDRGQI

SEQ ID NO: 53047 - protein, 10 aa, synthetic construct
QDDRGDRQGI

SEQ ID NO: 53048 - protein, 10 aa, synthetic construct
QDDRGDRSVV

SEQ ID NO: 53049 - protein, 10 aa, synthetic construct
QDDRGDRGVV

SEQ ID NO: 53050 - protein, 10 aa, synthetic construct
QGGRGDRGVV

SEQ ID NO: 53051 - protein, 10 aa, synthetic construct
QDDRGDRSQT

SEQ ID NO: 53052 - protein, 10 aa, synthetic construct
QDERGDRGQI

SEQ ID NO: 53053 - protein, 10 aa, synthetic construct
QDERGDRQGI

SEQ ID NO: 53054 - protein, 10 aa, synthetic construct
QDERGDRSVV

SEQ ID NO: 53055 - protein, 10 aa, synthetic construct
QDERGDRGVV

SEQ ID NO: 53056 - protein, 10 aa, synthetic construct
QDERGDRSQT

SEQ ID NO: 53057 - protein, 10 aa, synthetic construct
QEGRGDHGVL

SEQ ID NO: 53058 - protein, 10 aa, synthetic construct
QEGRGDYVGL

SEQ ID NO: 53059 - protein, 10 aa, synthetic construct
QEGRGDQSTL

SEQ ID NO: 53060 - protein, 10 aa, synthetic construct
QEGRGDLLLS

SEQ ID NO: 53061 - protein, 10 aa, synthetic construct
QGGRGDRSQT

SEQ ID NO: 53062 - protein, 10 aa, synthetic construct
QEARGDHGVL

SEQ ID NO: 53063 - protein, 10 aa, synthetic construct
QEARGDYVGL

SEQ ID NO: 53064 - protein, 10 aa, synthetic construct
QEARGDQSTL

SEQ ID NO: 53065 - protein, 10 aa, synthetic construct
QEARGDLLLS

SEQ ID NO: 53066 - protein, 10 aa, synthetic construct
QEVRGDRGQI

SEQ ID NO: 53067 - protein, 10 aa, synthetic construct
QEVRGDRQGI

SEQ ID NO: 53068 - protein, 10 aa, synthetic construct
QEVRGDRSVV

SEQ ID NO: 53069 - protein, 10 aa, synthetic construct
QEVRGDRGVV

SEQ ID NO: 53070 - protein, 10 aa, synthetic construct
QEVRGDRSQT

SEQ ID NO: 53071 - protein, 10 aa, synthetic construct
QEPRGDHGVL

SEQ ID NO: 53072 - protein, 10 aa, synthetic construct
NKNRGDLIGR

SEQ ID NO: 53073 - protein, 10 aa, synthetic construct
QGARGDRGQI

SEQ ID NO: 53074 - protein, 10 aa, synthetic construct
QEPRGDYVGL

SEQ ID NO: 53075 - protein, 10 aa, synthetic construct
QEPRGDQSTL

SEQ ID NO: 53076 - protein, 10 aa, synthetic construct
QEPRGDLLLS

SEQ ID NO: 53077 - protein, 10 aa, synthetic construct
QELRGDRGQI

SEQ ID NO: 53078 - protein, 10 aa, synthetic construct
QELRGDRQGI

SEQ ID NO: 53079 - protein, 10 aa, synthetic construct
QELRGDRSVV

SEQ ID NO: 53080 - protein, 10 aa, synthetic construct
QELRGDRGVV

SEQ ID NO: 53081 - protein, 10 aa, synthetic construct
QELRGDRSQT

SEQ ID NO: 53082 - protein, 10 aa, synthetic construct
QEWRGDRGQI

SEQ ID NO: 53083 - protein, 10 aa, synthetic construct
QEWRGDRQGI

SEQ ID NO: 53084 - protein, 10 aa, synthetic construct
QGARGDRQGI

SEQ ID NO: 53085 - protein, 10 aa, synthetic construct
QEWRGDRSVV

SEQ ID NO: 53086 - protein, 10 aa, synthetic construct
QEWRGDRGVV

SEQ ID NO: 53087 - protein, 10 aa, synthetic construct
QEWRGDRSQT

SEQ ID NO: 53088 - protein, 10 aa, synthetic construct
QERRGDHGVL

SEQ ID NO: 53089 - protein, 10 aa, synthetic construct
QERRGDYVGL

SEQ ID NO: 53090 - protein, 10 aa, synthetic construct
QERRGDQSTL

SEQ ID NO: 53091 - protein, 10 aa, synthetic construct
QERRGDLLLS

SEQ ID NO: 53092 - protein, 10 aa, synthetic construct
QEHRGDRGQI

SEQ ID NO: 53093 - protein, 10 aa, synthetic construct
QEHRGDRQGI

SEQ ID NO: 53094 - protein, 10 aa, synthetic construct
QEHRGDRSVV

SEQ ID NO: 53095 - protein, 10 aa, synthetic construct
QGARGDRSVV

SEQ ID NO: 53096 - protein, 10 aa, synthetic construct
QEHRGDRGVV

SEQ ID NO: 53097 - protein, 10 aa, synthetic construct
QEHRGDRSQT

SEQ ID NO: 53098 - protein, 10 aa, synthetic construct
QESRGDRGQI

SEQ ID NO: 53099 - protein, 10 aa, synthetic construct
QESRGDRQGI

SEQ ID NO: 53100 - protein, 10 aa, synthetic construct
QESRGDRSVV

SEQ ID NO: 53101 - protein, 10 aa, synthetic construct
QESRGDRGVV

SEQ ID NO: 53102 - protein, 10 aa, synthetic construct
QESRGDRSQT

SEQ ID NO: 53103 - protein, 10 aa, synthetic construct
QETRGDRGQI

SEQ ID NO: 53104 - protein, 10 aa, synthetic construct
QETRGDRQGI

SEQ ID NO: 53105 - protein, 10 aa, synthetic construct
QETRGDRSVV

SEQ ID NO: 53106 - protein, 10 aa, synthetic construct
QGARGDRGVV

SEQ ID NO: 53107 - protein, 10 aa, synthetic construct
QETRGDRGVV

SEQ ID NO: 53108 - protein, 10 aa, synthetic construct
QETRGDRSQT

SEQ ID NO: 53109 - protein, 10 aa, synthetic construct
QEQRGDRGQI

SEQ ID NO: 53110 - protein, 10 aa, synthetic construct
QEQRGDRQGI

SEQ ID NO: 53111 - protein, 10 aa, synthetic construct
QEQRGDRSVV

SEQ ID NO: 53112 - protein, 10 aa, synthetic construct
QEQRGDRGVV

SEQ ID NO: 53113 - protein, 10 aa, synthetic construct
QEQRGDRSQT

SEQ ID NO: 53114 - protein, 10 aa, synthetic construct
QEDRGDRGQI

SEQ ID NO: 53115 - protein, 10 aa, synthetic construct
QEDRGDRQGI

SEQ ID NO: 53116 - protein, 10 aa, synthetic construct
QEDRGDRSVV

SEQ ID NO: 53117 - protein, 10 aa, synthetic construct
QGARGDRSQT

SEQ ID NO: 53118 - protein, 10 aa, synthetic construct
QEDRGDRGVV

SEQ ID NO: 53119 - protein, 10 aa, synthetic construct
QEDRGDRSQT

SEQ ID NO: 53120 - protein, 10 aa, synthetic construct
QEERGDRGQI

SEQ ID NO: 53121 - protein, 10 aa, synthetic construct
QEERGDRQGI

SEQ ID NO: 53122 - protein, 10 aa, synthetic construct
QEERGDRSVV

SEQ ID NO: 53123 - protein, 10 aa, synthetic construct
QEERGDRGVV

SEQ ID NO: 53124 - protein, 10 aa, synthetic construct
QEERGDRSQT

SEQ ID NO: 53125 - protein, 10 aa, synthetic construct
SGGRGDYTSV

SEQ ID NO: 53126 - protein, 10 aa, synthetic construct
SGGRGDYTSM

SEQ ID NO: 53127 - protein, 10 aa, synthetic construct
SGARGDYTSV

SEQ ID NO: 53128 - protein, 10 aa, synthetic construct
QGPRGDRGQI

SEQ ID NO: 53129 - protein, 10 aa, synthetic construct
SGARGDYTSM

SEQ ID NO: 53130 - protein, 10 aa, synthetic construct
SGVRGDHVNL

SEQ ID NO: 53131 - protein, 10 aa, synthetic construct
SGVRGDRDYL

SEQ ID NO: 53132 - protein, 10 aa, synthetic construct
SGVRGDYSSV

SEQ ID NO: 53133 - protein, 10 aa, synthetic construct
SGVRGDLTVT

SEQ ID NO: 53134 - protein, 10 aa, synthetic construct
SGVRGDLIGR

SEQ ID NO: 53135 - protein, 10 aa, synthetic construct
SGPRGDYTSV

SEQ ID NO: 53136 - protein, 10 aa, synthetic construct
SGPRGDYTSM

SEQ ID NO: 53137 - protein, 10 aa, synthetic construct
SGLRGDHVNL

SEQ ID NO: 53138 - protein, 10 aa, synthetic construct
SGLRGDRDYL

SEQ ID NO: 53139 - protein, 10 aa, synthetic construct
QGPRGDRQGI

SEQ ID NO: 53140 - protein, 10 aa, synthetic construct
SGLRGDYSSV

SEQ ID NO: 53141 - protein, 10 aa, synthetic construct
SGLRGDLTVT

SEQ ID NO: 53142 - protein, 10 aa, synthetic construct
SGLRGDLIGR

SEQ ID NO: 53143 - protein, 10 aa, synthetic construct
SGIRGDHGVL

SEQ ID NO: 53144 - protein, 10 aa, synthetic construct
SGIRGDHVNL

SEQ ID NO: 53145 - protein, 10 aa, synthetic construct
SGIRGDYVGL

SEQ ID NO: 53146 - protein, 10 aa, synthetic construct
SGIRGDYSSV

SEQ ID NO: 53147 - protein, 10 aa, synthetic construct
SGIRGDQSTL

SEQ ID NO: 53148 - protein, 10 aa, synthetic construct
SGIRGDLLLS

SEQ ID NO: 53149 - protein, 10 aa, synthetic construct
SGMRGDHGVL

SEQ ID NO: 53150 - protein, 10 aa, synthetic construct
QGPRGDRSVV

SEQ ID NO: 53151 - protein, 10 aa, synthetic construct
SGMRGDHVNL

SEQ ID NO: 53152 - protein, 10 aa, synthetic construct
SGMRGDYVGL

SEQ ID NO: 53153 - protein, 10 aa, synthetic construct
SGMRGDYSSV

SEQ ID NO: 53154 - protein, 10 aa, synthetic construct
SGMRGDQSTL

SEQ ID NO: 53155 - protein, 10 aa, synthetic construct
SGMRGDLLLS

SEQ ID NO: 53156 - protein, 10 aa, synthetic construct
SGWRGDHVNL

SEQ ID NO: 53157 - protein, 10 aa, synthetic construct
SGWRGDRDYL

SEQ ID NO: 53158 - protein, 10 aa, synthetic construct
SGWRGDYSSV

SEQ ID NO: 53159 - protein, 10 aa, synthetic construct
SGWRGDLTVT

SEQ ID NO: 53160 - protein, 10 aa, synthetic construct
SGWRGDLIGR

SEQ ID NO: 53161 - protein, 10 aa, synthetic construct
QGPRGDRGVV

SEQ ID NO: 53162 - protein, 10 aa, synthetic construct
SGFRGDHGVL

SEQ ID NO: 53163 - protein, 10 aa, synthetic construct
SGFRGDHVNL

SEQ ID NO: 53164 - protein, 10 aa, synthetic construct
SGFRGDYVGL

SEQ ID NO: 53165 - protein, 10 aa, synthetic construct
SGFRGDYSSV

SEQ ID NO: 53166 - protein, 10 aa, synthetic construct
SGFRGDQSTL

SEQ ID NO: 53167 - protein, 10 aa, synthetic construct
SGFRGDLLLS

SEQ ID NO: 53168 - protein, 10 aa, synthetic construct
SGKRGDHGVL

SEQ ID NO: 53169 - protein, 10 aa, synthetic construct
SGKRGDHVNL

SEQ ID NO: 53170 - protein, 10 aa, synthetic construct
SGKRGDYVGL

SEQ ID NO: 53171 - protein, 10 aa, synthetic construct
SGKRGDYSSV

SEQ ID NO: 53172 - protein, 10 aa, synthetic construct
QGPRGDRSQT

SEQ ID NO: 53173 - protein, 10 aa, synthetic construct
SGKRGDQSTL

SEQ ID NO: 53174 - protein, 10 aa, synthetic construct
SGKRGDLLLS

SEQ ID NO: 53175 - protein, 10 aa, synthetic construct
SGRRGDYTSV

SEQ ID NO: 53176 - protein, 10 aa, synthetic construct
SGRRGDYTSM

SEQ ID NO: 53177 - protein, 10 aa, synthetic construct
SGHRGDHVNL

SEQ ID NO: 53178 - protein, 10 aa, synthetic construct
SGHRGDRDYL

SEQ ID NO: 53179 - protein, 10 aa, synthetic construct
SGHRGDYSSV

SEQ ID NO: 53180 - protein, 10 aa, synthetic construct
SGHRGDLTVT

SEQ ID NO: 53181 - protein, 10 aa, synthetic construct
SGHRGDLIGR

SEQ ID NO: 53182 - protein, 10 aa, synthetic construct
SGSRGDHVNL

SEQ ID NO: 53183 - protein, 10 aa, synthetic construct
NKNRGDQSTL

SEQ ID NO: 53184 - protein, 10 aa, synthetic construct
QGRRGDRGQI

SEQ ID NO: 53185 - protein, 10 aa, synthetic construct
SGSRGDRDYL

SEQ ID NO: 53186 - protein, 10 aa, synthetic construct
SGSRGDYSSV

SEQ ID NO: 53187 - protein, 10 aa, synthetic construct
SGSRGDLTVT

SEQ ID NO: 53188 - protein, 10 aa, synthetic construct
SGSRGDLIGR

SEQ ID NO: 53189 - protein, 10 aa, synthetic construct
SGTRGDHVNL

SEQ ID NO: 53190 - protein, 10 aa, synthetic construct
SGTRGDRDYL

SEQ ID NO: 53191 - protein, 10 aa, synthetic construct
SGTRGDYSSV

SEQ ID NO: 53192 - protein, 10 aa, synthetic construct
SGTRGDLTVT

SEQ ID NO: 53193 - protein, 10 aa, synthetic construct
SGTRGDLIGR

SEQ ID NO: 53194 - protein, 10 aa, synthetic construct
SGYRGDHGVL

SEQ ID NO: 53195 - protein, 10 aa, synthetic construct
QGRRGDRQGI

SEQ ID NO: 53196 - protein, 10 aa, synthetic construct
SGYRGDHVNL

SEQ ID NO: 53197 - protein, 10 aa, synthetic construct
SGYRGDYVGL

SEQ ID NO: 53198 - protein, 10 aa, synthetic construct
SGYRGDYSSV

SEQ ID NO: 53199 - protein, 10 aa, synthetic construct
SGYRGDQSTL

SEQ ID NO: 53200 - protein, 10 aa, synthetic construct
SGYRGDLLLS

SEQ ID NO: 53201 - protein, 10 aa, synthetic construct
SGNRGDHGVL

SEQ ID NO: 53202 - protein, 10 aa, synthetic construct
SGNRGDHVNL

SEQ ID NO: 53203 - protein, 10 aa, synthetic construct
SGNRGDYVGL

SEQ ID NO: 53204 - protein, 10 aa, synthetic construct
SGNRGDYSSV

SEQ ID NO: 53205 - protein, 10 aa, synthetic construct
SGNRGDQSTL

SEQ ID NO: 53206 - protein, 10 aa, synthetic construct
QGRRGDRSVV

SEQ ID NO: 53207 - protein, 10 aa, synthetic construct
SGNRGDLLLS

SEQ ID NO: 53208 - protein, 10 aa, synthetic construct
SGQRGDHVNL

SEQ ID NO: 53209 - protein, 10 aa, synthetic construct
SGQRGDRDYL

SEQ ID NO: 53210 - protein, 10 aa, synthetic construct
SGQRGDYSSV

SEQ ID NO: 53211 - protein, 10 aa, synthetic construct
SGQRGDLTVT

SEQ ID NO: 53212 - protein, 10 aa, synthetic construct
SGQRGDLIGR

SEQ ID NO: 53213 - protein, 10 aa, synthetic construct
SGDRGDHVNL

SEQ ID NO: 53214 - protein, 10 aa, synthetic construct
SGDRGDRDYL

SEQ ID NO: 53215 - protein, 10 aa, synthetic construct
SGDRGDYSSV

SEQ ID NO: 53216 - protein, 10 aa, synthetic construct
SGDRGDLTVT

SEQ ID NO: 53217 - protein, 10 aa, synthetic construct
QGRRGDRGVV

SEQ ID NO: 53218 - protein, 10 aa, synthetic construct
SGDRGDLIGR

SEQ ID NO: 53219 - protein, 10 aa, synthetic construct
SGERGDHVNL

SEQ ID NO: 53220 - protein, 10 aa, synthetic construct
SGERGDRDYL

SEQ ID NO: 53221 - protein, 10 aa, synthetic construct
SGERGDYSSV

SEQ ID NO: 53222 - protein, 10 aa, synthetic construct
SGERGDLTVT

SEQ ID NO: 53223 - protein, 10 aa, synthetic construct
SGERGDLIGR

SEQ ID NO: 53224 - protein, 10 aa, synthetic construct
SAGRGDYTSV

SEQ ID NO: 53225 - protein, 10 aa, synthetic construct
SAGRGDYTSM

SEQ ID NO: 53226 - protein, 10 aa, synthetic construct
SAARGDYTSV

SEQ ID NO: 53227 - protein, 10 aa, synthetic construct
SAARGDYTSM

SEQ ID NO: 53228 - protein, 10 aa, synthetic construct
QGRRGDRSQT

SEQ ID NO: 53229 - protein, 10 aa, synthetic construct
SAVRGDHVNL

SEQ ID NO: 53230 - protein, 10 aa, synthetic construct
SAVRGDRDYL

SEQ ID NO: 53231 - protein, 10 aa, synthetic construct
SAVRGDYSSV

SEQ ID NO: 53232 - protein, 10 aa, synthetic construct
SAVRGDLTVT

SEQ ID NO: 53233 - protein, 10 aa, synthetic construct
SAVRGDLIGR

SEQ ID NO: 53234 - protein, 10 aa, synthetic construct
SAPRGDYTSV

SEQ ID NO: 53235 - protein, 10 aa, synthetic construct
SAPRGDYTSM

SEQ ID NO: 53236 - protein, 10 aa, synthetic construct
SALRGDHVNL

SEQ ID NO: 53237 - protein, 10 aa, synthetic construct
SALRGDRDYL

SEQ ID NO: 53238 - protein, 10 aa, synthetic construct
SALRGDYSSV

SEQ ID NO: 53239 - protein, 10 aa, synthetic construct
QAGRGDRGQI

SEQ ID NO: 53240 - protein, 10 aa, synthetic construct
SALRGDLTVT

SEQ ID NO: 53241 - protein, 10 aa, synthetic construct
SALRGDLIGR

SEQ ID NO: 53242 - protein, 10 aa, synthetic construct
SAIRGDHGVL

SEQ ID NO: 53243 - protein, 10 aa, synthetic construct
SAIRGDHVNL

SEQ ID NO: 53244 - protein, 10 aa, synthetic construct
SAIRGDYVGL

SEQ ID NO: 53245 - protein, 10 aa, synthetic construct
SAIRGDYSSV

SEQ ID NO: 53246 - protein, 10 aa, synthetic construct
SAIRGDQSTL

SEQ ID NO: 53247 - protein, 10 aa, synthetic construct
SAIRGDLLLS

SEQ ID NO: 53248 - protein, 10 aa, synthetic construct
SAMRGDHGVL

SEQ ID NO: 53249 - protein, 10 aa, synthetic construct
SAMRGDHVNL

SEQ ID NO: 53250 - protein, 10 aa, synthetic construct
QAGRGDRQGI

SEQ ID NO: 53251 - protein, 10 aa, synthetic construct
SAMRGDYVGL

SEQ ID NO: 53252 - protein, 10 aa, synthetic construct
SAMRGDYSSV

SEQ ID NO: 53253 - protein, 10 aa, synthetic construct
SAMRGDQSTL

SEQ ID NO: 53254 - protein, 10 aa, synthetic construct
SAMRGDLLLS

SEQ ID NO: 53255 - protein, 10 aa, synthetic construct
SAWRGDHVNL

SEQ ID NO: 53256 - protein, 10 aa, synthetic construct
SAWRGDRDYL

SEQ ID NO: 53257 - protein, 10 aa, synthetic construct
SAWRGDYSSV

SEQ ID NO: 53258 - protein, 10 aa, synthetic construct
SAWRGDLTVT

SEQ ID NO: 53259 - protein, 10 aa, synthetic construct
SAWRGDLIGR

SEQ ID NO: 53260 - protein, 10 aa, synthetic construct
SAFRGDHGVL

SEQ ID NO: 53261 - protein, 10 aa, synthetic construct
QAGRGDRSVV

SEQ ID NO: 53262 - protein, 10 aa, synthetic construct
SAFRGDHVNL

SEQ ID NO: 53263 - protein, 10 aa, synthetic construct
SAFRGDYVGL

SEQ ID NO: 53264 - protein, 10 aa, synthetic construct
SAFRGDYSSV

SEQ ID NO: 53265 - protein, 10 aa, synthetic construct
SAFRGDQSTL

SEQ ID NO: 53266 - protein, 10 aa, synthetic construct
SAFRGDLLLS

SEQ ID NO: 53267 - protein, 10 aa, synthetic construct
SAKRGDHGVL

SEQ ID NO: 53268 - protein, 10 aa, synthetic construct
SAKRGDHVNL

SEQ ID NO: 53269 - protein, 10 aa, synthetic construct
SAKRGDYVGL

SEQ ID NO: 53270 - protein, 10 aa, synthetic construct
SAKRGDYSSV

SEQ ID NO: 53271 - protein, 10 aa, synthetic construct
SAKRGDQSTL

SEQ ID NO: 53272 - protein, 10 aa, synthetic construct
QAGRGDRGVV

SEQ ID NO: 53273 - protein, 10 aa, synthetic construct
SAKRGDLLLS

SEQ ID NO: 53274 - protein, 10 aa, synthetic construct
SARRGDYTSV

SEQ ID NO: 53275 - protein, 10 aa, synthetic construct
SARRGDYTSM

SEQ ID NO: 53276 - protein, 10 aa, synthetic construct
SAHRGDHVNL

SEQ ID NO: 53277 - protein, 10 aa, synthetic construct
SAHRGDRDYL

SEQ ID NO: 53278 - protein, 10 aa, synthetic construct
SAHRGDYSSV

SEQ ID NO: 53279 - protein, 10 aa, synthetic construct
SAHRGDLTVT

SEQ ID NO: 53280 - protein, 10 aa, synthetic construct
SAHRGDLIGR

SEQ ID NO: 53281 - protein, 10 aa, synthetic construct
SASRGDHVNL

SEQ ID NO: 53282 - protein, 10 aa, synthetic construct
SASRGDRDYL

SEQ ID NO: 53283 - protein, 10 aa, synthetic construct
QAGRGDRSQT

SEQ ID NO: 53284 - protein, 10 aa, synthetic construct
SASRGDYSSV

SEQ ID NO: 53285 - protein, 10 aa, synthetic construct
SASRGDLTVT

SEQ ID NO: 53286 - protein, 10 aa, synthetic construct
SASRGDLIGR

SEQ ID NO: 53287 - protein, 10 aa, synthetic construct
SATRGDHVNL

SEQ ID NO: 53288 - protein, 10 aa, synthetic construct
SATRGDRDYL

SEQ ID NO: 53289 - protein, 10 aa, synthetic construct
SATRGDYSSV

SEQ ID NO: 53290 - protein, 10 aa, synthetic construct
SATRGDLTVT

SEQ ID NO: 53291 - protein, 10 aa, synthetic construct
SATRGDLIGR

SEQ ID NO: 53292 - protein, 10 aa, synthetic construct
SAYRGDHGVL

SEQ ID NO: 53293 - protein, 10 aa, synthetic construct
SAYRGDHVNL

SEQ ID NO: 53294 - protein, 10 aa, synthetic construct
NKNRGDLLLS

SEQ ID NO: 53295 - protein, 10 aa, synthetic construct
QAARGDRGQI

SEQ ID NO: 53296 - protein, 10 aa, synthetic construct
SAYRGDYVGL

SEQ ID NO: 53297 - protein, 10 aa, synthetic construct
SAYRGDYSSV

SEQ ID NO: 53298 - protein, 10 aa, synthetic construct
SAYRGDQSTL

SEQ ID NO: 53299 - protein, 10 aa, synthetic construct
SAYRGDLLLS

SEQ ID NO: 53300 - protein, 10 aa, synthetic construct
SANRGDHGVL

SEQ ID NO: 53301 - protein, 10 aa, synthetic construct
SANRGDHVNL

SEQ ID NO: 53302 - protein, 10 aa, synthetic construct
SANRGDYVGL

SEQ ID NO: 53303 - protein, 10 aa, synthetic construct
SANRGDYSSV

SEQ ID NO: 53304 - protein, 10 aa, synthetic construct
SANRGDQSTL

SEQ ID NO: 53305 - protein, 10 aa, synthetic construct
SANRGDLLLS

SEQ ID NO: 53306 - protein, 10 aa, synthetic construct
QAARGDRQGI

SEQ ID NO: 53307 - protein, 10 aa, synthetic construct
SAQRGDRDYL

SEQ ID NO: 53308 - protein, 10 aa, synthetic construct
SADRGDHVNL

SEQ ID NO: 53309 - protein, 10 aa, synthetic construct
SADRGDRDYL

SEQ ID NO: 53310 - protein, 10 aa, synthetic construct
SADRGDYSSV

SEQ ID NO: 53311 - protein, 10 aa, synthetic construct
SADRGDLTVT

SEQ ID NO: 53312 - protein, 10 aa, synthetic construct
SADRGDLIGR

SEQ ID NO: 53313 - protein, 10 aa, synthetic construct
SAERGDHVNL

SEQ ID NO: 53314 - protein, 10 aa, synthetic construct
SAERGDRDYL

SEQ ID NO: 53315 - protein, 10 aa, synthetic construct
SAERGDYSSV

SEQ ID NO: 53316 - protein, 10 aa, synthetic construct
SAERGDLTVT

SEQ ID NO: 53317 - protein, 10 aa, synthetic construct
QAARGDRSVV

SEQ ID NO: 53318 - protein, 10 aa, synthetic construct
SAERGDLIGR

SEQ ID NO: 53319 - protein, 10 aa, synthetic construct
SVGRGDYNSL

SEQ ID NO: 53320 - protein, 10 aa, synthetic construct
SVGRGDYTSV

SEQ ID NO: 53321 - protein, 10 aa, synthetic construct
SVGRGDYTSM

SEQ ID NO: 53322 - protein, 10 aa, synthetic construct
SVGRGDFQNT

SEQ ID NO: 53323 - protein, 10 aa, synthetic construct
SVARGDYNSL

SEQ ID NO: 53324 - protein, 10 aa, synthetic construct
SVARGDYTSV

SEQ ID NO: 53325 - protein, 10 aa, synthetic construct
SVARGDYTSM

SEQ ID NO: 53326 - protein, 10 aa, synthetic construct
SVARGDFQNT

SEQ ID NO: 53327 - protein, 10 aa, synthetic construct
SVVRGDRDYL

SEQ ID NO: 53328 - protein, 10 aa, synthetic construct
QAARGDRGVV

SEQ ID NO: 53329 - protein, 10 aa, synthetic construct
SVVRGDYTSV

SEQ ID NO: 53330 - protein, 10 aa, synthetic construct
SVVRGDLTVT

SEQ ID NO: 53331 - protein, 10 aa, synthetic construct
SVVRGDLIGR

SEQ ID NO: 53332 - protein, 10 aa, synthetic construct
SVPRGDYNSL

SEQ ID NO: 53333 - protein, 10 aa, synthetic construct
SVPRGDYTSV

SEQ ID NO: 53334 - protein, 10 aa, synthetic construct
SVPRGDYTSM

SEQ ID NO: 53335 - protein, 10 aa, synthetic construct
SVPRGDFQNT

SEQ ID NO: 53336 - protein, 10 aa, synthetic construct
SVLRGDRDYL

SEQ ID NO: 53337 - protein, 10 aa, synthetic construct
SVLRGDYTSV

SEQ ID NO: 53338 - protein, 10 aa, synthetic construct
SVLRGDLTVT

SEQ ID NO: 53339 - protein, 10 aa, synthetic construct
QAARGDRSQT

SEQ ID NO: 53340 - protein, 10 aa, synthetic construct
SVLRGDLIGR

SEQ ID NO: 53341 - protein, 10 aa, synthetic construct
SVIRGDHGVL

SEQ ID NO: 53342 - protein, 10 aa, synthetic construct
SVIRGDHVNL

SEQ ID NO: 53343 - protein, 10 aa, synthetic construct
SVIRGDRDYL

SEQ ID NO: 53344 - protein, 10 aa, synthetic construct
SVIRGDYSSV

SEQ ID NO: 53345 - protein, 10 aa, synthetic construct
SVIRGDLTVT

SEQ ID NO: 53346 - protein, 10 aa, synthetic construct
SVMRGDHGVL

SEQ ID NO: 53347 - protein, 10 aa, synthetic construct
SVMRGDHVNL

SEQ ID NO: 53348 - protein, 10 aa, synthetic construct
SVMRGDRDYL

SEQ ID NO: 53349 - protein, 10 aa, synthetic construct
SVMRGDYSSV

SEQ ID NO: 53350 - protein, 10 aa, synthetic construct
QAPRGDRGQI

SEQ ID NO: 53351 - protein, 10 aa, synthetic construct
SVMRGDLTVT

SEQ ID NO: 53352 - protein, 10 aa, synthetic construct
SVWRGDRDYL

SEQ ID NO: 53353 - protein, 10 aa, synthetic construct
SVWRGDYTSV

SEQ ID NO: 53354 - protein, 10 aa, synthetic construct
SVWRGDLTVT

SEQ ID NO: 53355 - protein, 10 aa, synthetic construct
SVWRGDLIGR

SEQ ID NO: 53356 - protein, 10 aa, synthetic construct
SVFRGDHGVL

SEQ ID NO: 53357 - protein, 10 aa, synthetic construct
SVFRGDHVNL

SEQ ID NO: 53358 - protein, 10 aa, synthetic construct
SVFRGDRDYL

SEQ ID NO: 53359 - protein, 10 aa, synthetic construct
SVFRGDYSSV

SEQ ID NO: 53360 - protein, 10 aa, synthetic construct
SVFRGDLTVT

SEQ ID NO: 53361 - protein, 10 aa, synthetic construct
QAPRGDRQGI

SEQ ID NO: 53362 - protein, 10 aa, synthetic construct
SVKRGDHGVL

SEQ ID NO: 53363 - protein, 10 aa, synthetic construct
SVKRGDHVNL

SEQ ID NO: 53364 - protein, 10 aa, synthetic construct
SVKRGDRDYL

SEQ ID NO: 53365 - protein, 10 aa, synthetic construct
SVKRGDYSSV

SEQ ID NO: 53366 - protein, 10 aa, synthetic construct
SVKRGDLTVT

SEQ ID NO: 53367 - protein, 10 aa, synthetic construct
SVRRGDYNSL

SEQ ID NO: 53368 - protein, 10 aa, synthetic construct
SVRRGDYTSV

SEQ ID NO: 53369 - protein, 10 aa, synthetic construct
SVRRGDYTSM

SEQ ID NO: 53370 - protein, 10 aa, synthetic construct
SVRRGDFQNT

SEQ ID NO: 53371 - protein, 10 aa, synthetic construct
SVHRGDRDYL

SEQ ID NO: 53372 - protein, 10 aa, synthetic construct
QAPRGDRSVV

SEQ ID NO: 53373 - protein, 10 aa, synthetic construct
SVHRGDYTSV

SEQ ID NO: 53374 - protein, 10 aa, synthetic construct
SVHRGDLTVT

SEQ ID NO: 53375 - protein, 10 aa, synthetic construct
SVHRGDLIGR

SEQ ID NO: 53376 - protein, 10 aa, synthetic construct
SVSRGDRDYL

SEQ ID NO: 53377 - protein, 10 aa, synthetic construct
SVSRGDYTSV

SEQ ID NO: 53378 - protein, 10 aa, synthetic construct
SVSRGDLTVT

SEQ ID NO: 53379 - protein, 10 aa, synthetic construct
SVSRGDLIGR

SEQ ID NO: 53380 - protein, 10 aa, synthetic construct
SVTRGDRDYL

SEQ ID NO: 53381 - protein, 10 aa, synthetic construct
SVTRGDYTSV

SEQ ID NO: 53382 - protein, 10 aa, synthetic construct
SVTRGDLTVT

SEQ ID NO: 53383 - protein, 10 aa, synthetic construct
QAPRGDRGVV

SEQ ID NO: 53384 - protein, 10 aa, synthetic construct
SVTRGDLIGR

SEQ ID NO: 53385 - protein, 10 aa, synthetic construct
SVYRGDHGVL

SEQ ID NO: 53386 - protein, 10 aa, synthetic construct
SVYRGDHVNL

SEQ ID NO: 53387 - protein, 10 aa, synthetic construct
SVYRGDRDYL

SEQ ID NO: 53388 - protein, 10 aa, synthetic construct
SVYRGDYSSV

SEQ ID NO: 53389 - protein, 10 aa, synthetic construct
SVYRGDLTVT

SEQ ID NO: 53390 - protein, 10 aa, synthetic construct
SVNRGDHGVL

SEQ ID NO: 53391 - protein, 10 aa, synthetic construct
SVNRGDHVNL

SEQ ID NO: 53392 - protein, 10 aa, synthetic construct
SVNRGDRDYL

SEQ ID NO: 53393 - protein, 10 aa, synthetic construct
SVNRGDYSSV

SEQ ID NO: 53394 - protein, 10 aa, synthetic construct
QAPRGDRSQT

SEQ ID NO: 53395 - protein, 10 aa, synthetic construct
SVNRGDLTVT

SEQ ID NO: 53396 - protein, 10 aa, synthetic construct
SVQRGDRDYL

SEQ ID NO: 53397 - protein, 10 aa, synthetic construct
SVQRGDYTSV

SEQ ID NO: 53398 - protein, 10 aa, synthetic construct
SVQRGDLTVT

SEQ ID NO: 53399 - protein, 10 aa, synthetic construct
SVQRGDLIGR

SEQ ID NO: 53400 - protein, 10 aa, synthetic construct
SVDRGDRDYL

SEQ ID NO: 53401 - protein, 10 aa, synthetic construct
SVDRGDYTSV

SEQ ID NO: 53402 - protein, 10 aa, synthetic construct
SVDRGDLTVT

SEQ ID NO: 53403 - protein, 10 aa, synthetic construct
SVDRGDLIGR

SEQ ID NO: 53404 - protein, 10 aa, synthetic construct
SVERGDRDYL

SEQ ID NO: 53405 - protein, 10 aa, synthetic construct
DKKRGDHVNL

SEQ ID NO: 53406 - protein, 10 aa, synthetic construct
QARRGDRGQI

SEQ ID NO: 53407 - protein, 10 aa, synthetic construct
SVERGDYTSV

SEQ ID NO: 53408 - protein, 10 aa, synthetic construct
SVERGDLTVT

SEQ ID NO: 53409 - protein, 10 aa, synthetic construct
SVERGDLIGR

SEQ ID NO: 53410 - protein, 10 aa, synthetic construct
SPGRGDYTSV

SEQ ID NO: 53411 - protein, 10 aa, synthetic construct
SPGRGDYTSM

SEQ ID NO: 53412 - protein, 10 aa, synthetic construct
SPARGDYTSV

SEQ ID NO: 53413 - protein, 10 aa, synthetic construct
SPARGDYTSM

SEQ ID NO: 53414 - protein, 10 aa, synthetic construct
SPVRGDHVNL

SEQ ID NO: 53415 - protein, 10 aa, synthetic construct
SPVRGDRDYL

SEQ ID NO: 53416 - protein, 10 aa, synthetic construct
SPVRGDYSSV

SEQ ID NO: 53417 - protein, 10 aa, synthetic construct
QARRGDRQGI

SEQ ID NO: 53418 - protein, 10 aa, synthetic construct
SPVRGDLTVT

SEQ ID NO: 53419 - protein, 10 aa, synthetic construct
SPVRGDLIGR

SEQ ID NO: 53420 - protein, 10 aa, synthetic construct
SPPRGDYTSV

SEQ ID NO: 53421 - protein, 10 aa, synthetic construct
SPPRGDYTSM

SEQ ID NO: 53422 - protein, 10 aa, synthetic construct
SPLRGDHVNL

SEQ ID NO: 53423 - protein, 10 aa, synthetic construct
SPLRGDRDYL

SEQ ID NO: 53424 - protein, 10 aa, synthetic construct
SPLRGDYSSV

SEQ ID NO: 53425 - protein, 10 aa, synthetic construct
SPLRGDLTVT

SEQ ID NO: 53426 - protein, 10 aa, synthetic construct
SPLRGDLIGR

SEQ ID NO: 53427 - protein, 10 aa, synthetic construct
SPIRGDHGVL

SEQ ID NO: 53428 - protein, 10 aa, synthetic construct
QARRGDRSVV

SEQ ID NO: 53429 - protein, 10 aa, synthetic construct
SPIRGDHVNL

SEQ ID NO: 53430 - protein, 10 aa, synthetic construct
SPIRGDYVGL

SEQ ID NO: 53431 - protein, 10 aa, synthetic construct
SPIRGDYSSV

SEQ ID NO: 53432 - protein, 10 aa, synthetic construct
SPIRGDQSTL

SEQ ID NO: 53433 - protein, 10 aa, synthetic construct
SPIRGDLLLS

SEQ ID NO: 53434 - protein, 10 aa, synthetic construct
SPMRGDHGVL

SEQ ID NO: 53435 - protein, 10 aa, synthetic construct
SPMRGDHVNL

SEQ ID NO: 53436 - protein, 10 aa, synthetic construct
SPMRGDYVGL

SEQ ID NO: 53437 - protein, 10 aa, synthetic construct
SPMRGDYSSV

SEQ ID NO: 53438 - protein, 10 aa, synthetic construct
SPMRGDQSTL

SEQ ID NO: 53439 - protein, 10 aa, synthetic construct
QARRGDRGVV

SEQ ID NO: 53440 - protein, 10 aa, synthetic construct
SPMRGDLLLS

SEQ ID NO: 53441 - protein, 10 aa, synthetic construct
SPWRGDHVNL

SEQ ID NO: 53442 - protein, 10 aa, synthetic construct
SPWRGDRDYL

SEQ ID NO: 53443 - protein, 10 aa, synthetic construct
SPWRGDYSSV

SEQ ID NO: 53444 - protein, 10 aa, synthetic construct
SPWRGDLTVT

SEQ ID NO: 53445 - protein, 10 aa, synthetic construct
SPWRGDLIGR

SEQ ID NO: 53446 - protein, 10 aa, synthetic construct
SPFRGDHGVL

SEQ ID NO: 53447 - protein, 10 aa, synthetic construct
SPFRGDHVNL

SEQ ID NO: 53448 - protein, 10 aa, synthetic construct
SPFRGDYVGL

SEQ ID NO: 53449 - protein, 10 aa, synthetic construct
SPFRGDYSSV

SEQ ID NO: 53450 - protein, 10 aa, synthetic construct
QARRGDRSQT

SEQ ID NO: 53451 - protein, 10 aa, synthetic construct
SPFRGDQSTL

SEQ ID NO: 53452 - protein, 10 aa, synthetic construct
SPFRGDLLLS

SEQ ID NO: 53453 - protein, 10 aa, synthetic construct
SPKRGDHGVL

SEQ ID NO: 53454 - protein, 10 aa, synthetic construct
SPKRGDHVNL

SEQ ID NO: 53455 - protein, 10 aa, synthetic construct
SPKRGDYVGL

SEQ ID NO: 53456 - protein, 10 aa, synthetic construct
SPKRGDYSSV

SEQ ID NO: 53457 - protein, 10 aa, synthetic construct
SPKRGDQSTL

SEQ ID NO: 53458 - protein, 10 aa, synthetic construct
SPKRGDLLLS

SEQ ID NO: 53459 - protein, 10 aa, synthetic construct
SPRRGDYTSV

SEQ ID NO: 53460 - protein, 10 aa, synthetic construct
SPRRGDYTSM

SEQ ID NO: 53461 - protein, 10 aa, synthetic construct
QVGRGDRGQI

SEQ ID NO: 53462 - protein, 10 aa, synthetic construct
SPHRGDHVNL

SEQ ID NO: 53463 - protein, 10 aa, synthetic construct
SPHRGDRDYL

SEQ ID NO: 53464 - protein, 10 aa, synthetic construct
SPHRGDYSSV

SEQ ID NO: 53465 - protein, 10 aa, synthetic construct
SPHRGDLTVT

SEQ ID NO: 53466 - protein, 10 aa, synthetic construct
SPHRGDLIGR

SEQ ID NO: 53467 - protein, 10 aa, synthetic construct
SPSRGDHVNL

SEQ ID NO: 53468 - protein, 10 aa, synthetic construct
SPSRGDRDYL

SEQ ID NO: 53469 - protein, 10 aa, synthetic construct
SPSRGDYSSV

SEQ ID NO: 53470 - protein, 10 aa, synthetic construct
SPSRGDLTVT

SEQ ID NO: 53471 - protein, 10 aa, synthetic construct
SPSRGDLIGR

SEQ ID NO: 53472 - protein, 10 aa, synthetic construct
QVGRGDRQGI

SEQ ID NO: 53473 - protein, 10 aa, synthetic construct
SPTRGDHVNL

SEQ ID NO: 53474 - protein, 10 aa, synthetic construct
SPTRGDRDYL

SEQ ID NO: 53475 - protein, 10 aa, synthetic construct
SPTRGDYSSV

SEQ ID NO: 53476 - protein, 10 aa, synthetic construct
SPTRGDLTVT

SEQ ID NO: 53477 - protein, 10 aa, synthetic construct
SPTRGDLIGR

SEQ ID NO: 53478 - protein, 10 aa, synthetic construct
SPYRGDHGVL

SEQ ID NO: 53479 - protein, 10 aa, synthetic construct
SPYRGDHVNL

SEQ ID NO: 53480 - protein, 10 aa, synthetic construct
SPYRGDYVGL

SEQ ID NO: 53481 - protein, 10 aa, synthetic construct
SPYRGDYSSV

SEQ ID NO: 53482 - protein, 10 aa, synthetic construct
SPYRGDQSTL

SEQ ID NO: 53483 - protein, 10 aa, synthetic construct
QVGRGDRSVV

SEQ ID NO: 53484 - protein, 10 aa, synthetic construct
SPYRGDLLLS

SEQ ID NO: 53485 - protein, 10 aa, synthetic construct
SPNRGDHGVL

SEQ ID NO: 53486 - protein, 10 aa, synthetic construct
SPNRGDHVNL

SEQ ID NO: 53487 - protein, 10 aa, synthetic construct
SPNRGDYVGL

SEQ ID NO: 53488 - protein, 10 aa, synthetic construct
SPNRGDYSSV

SEQ ID NO: 53489 - protein, 10 aa, synthetic construct
SPNRGDQSTL

SEQ ID NO: 53490 - protein, 10 aa, synthetic construct
SPNRGDLLLS

SEQ ID NO: 53491 - protein, 10 aa, synthetic construct
SPQRGDHVNL

SEQ ID NO: 53492 - protein, 10 aa, synthetic construct
SPQRGDRDYL

SEQ ID NO: 53493 - protein, 10 aa, synthetic construct
SPQRGDYSSV

SEQ ID NO: 53494 - protein, 10 aa, synthetic construct
QVGRGDRGVV

SEQ ID NO: 53495 - protein, 10 aa, synthetic construct
SPQRGDLTVT

SEQ ID NO: 53496 - protein, 10 aa, synthetic construct
SPQRGDLIGR

SEQ ID NO: 53497 - protein, 10 aa, synthetic construct
SPDRGDHVNL

SEQ ID NO: 53498 - protein, 10 aa, synthetic construct
SPDRGDRDYL

SEQ ID NO: 53499 - protein, 10 aa, synthetic construct
SPDRGDYSSV

SEQ ID NO: 53500 - protein, 10 aa, synthetic construct
SPDRGDLTVT

SEQ ID NO: 53501 - protein, 10 aa, synthetic construct
SPDRGDLIGR

SEQ ID NO: 53502 - protein, 10 aa, synthetic construct
SPERGDHVNL

SEQ ID NO: 53503 - protein, 10 aa, synthetic construct
SPERGDRDYL

SEQ ID NO: 53504 - protein, 10 aa, synthetic construct
SPERGDYSSV

SEQ ID NO: 53505 - protein, 10 aa, synthetic construct
QVGRGDRSQT

SEQ ID NO: 53506 - protein, 10 aa, synthetic construct
SPERGDLTVT

SEQ ID NO: 53507 - protein, 10 aa, synthetic construct
SPERGDLIGR

SEQ ID NO: 53508 - protein, 10 aa, synthetic construct
SLGRGDYNSL

SEQ ID NO: 53509 - protein, 10 aa, synthetic construct
SLGRGDYTSV

SEQ ID NO: 53510 - protein, 10 aa, synthetic construct
SLGRGDYTSM

SEQ ID NO: 53511 - protein, 10 aa, synthetic construct
SLGRGDFQNT

SEQ ID NO: 53512 - protein, 10 aa, synthetic construct
SLARGDYNSL

SEQ ID NO: 53513 - protein, 10 aa, synthetic construct
SLARGDYTSV

SEQ ID NO: 53514 - protein, 10 aa, synthetic construct
SLARGDYTSM

SEQ ID NO: 53515 - protein, 10 aa, synthetic construct
SLARGDFQNT

SEQ ID NO: 53516 - protein, 10 aa, synthetic construct
DKKRGDRDYL

SEQ ID NO: 53517 - protein, 10 aa, synthetic construct
QVARGDRGQI

SEQ ID NO: 53518 - protein, 10 aa, synthetic construct
SLVRGDRDYL

SEQ ID NO: 53519 - protein, 10 aa, synthetic construct
SLVRGDYTSV

SEQ ID NO: 53520 - protein, 10 aa, synthetic construct
SLVRGDLTVT

SEQ ID NO: 53521 - protein, 10 aa, synthetic construct
SLVRGDLIGR

SEQ ID NO: 53522 - protein, 10 aa, synthetic construct
SLPRGDYNSL

SEQ ID NO: 53523 - protein, 10 aa, synthetic construct
SLPRGDYTSV

SEQ ID NO: 53524 - protein, 10 aa, synthetic construct
SLPRGDYTSM

SEQ ID NO: 53525 - protein, 10 aa, synthetic construct
SLPRGDFQNT

SEQ ID NO: 53526 - protein, 10 aa, synthetic construct
SLLRGDRDYL

SEQ ID NO: 53527 - protein, 10 aa, synthetic construct
SLLRGDYTSV

SEQ ID NO: 53528 - protein, 10 aa, synthetic construct
QVARGDRQGI

SEQ ID NO: 53529 - protein, 10 aa, synthetic construct
SLLRGDLTVT

SEQ ID NO: 53530 - protein, 10 aa, synthetic construct
SLLRGDLIGR

SEQ ID NO: 53531 - protein, 10 aa, synthetic construct
SLIRGDHGVL

SEQ ID NO: 53532 - protein, 10 aa, synthetic construct
SLIRGDHVNL

SEQ ID NO: 53533 - protein, 10 aa, synthetic construct
SLIRGDRDYL

SEQ ID NO: 53534 - protein, 10 aa, synthetic construct
SLIRGDYSSV

SEQ ID NO: 53535 - protein, 10 aa, synthetic construct
SLIRGDLTVT

SEQ ID NO: 53536 - protein, 10 aa, synthetic construct
SLMRGDHGVL

SEQ ID NO: 53537 - protein, 10 aa, synthetic construct
SLMRGDHVNL

SEQ ID NO: 53538 - protein, 10 aa, synthetic construct
SLMRGDRDYL

SEQ ID NO: 53539 - protein, 10 aa, synthetic construct
QVARGDRSVV

SEQ ID NO: 53540 - protein, 10 aa, synthetic construct
SLMRGDYSSV

SEQ ID NO: 53541 - protein, 10 aa, synthetic construct
SLMRGDLTVT

SEQ ID NO: 53542 - protein, 10 aa, synthetic construct
SLWRGDRDYL

SEQ ID NO: 53543 - protein, 10 aa, synthetic construct
SLWRGDYTSV

SEQ ID NO: 53544 - protein, 10 aa, synthetic construct
SLWRGDLTVT

SEQ ID NO: 53545 - protein, 10 aa, synthetic construct
SLWRGDLIGR

SEQ ID NO: 53546 - protein, 10 aa, synthetic construct
SLFRGDHGVL

SEQ ID NO: 53547 - protein, 10 aa, synthetic construct
SLFRGDHVNL

SEQ ID NO: 53548 - protein, 10 aa, synthetic construct
SLFRGDRDYL

SEQ ID NO: 53549 - protein, 10 aa, synthetic construct
SLFRGDYSSV

SEQ ID NO: 53550 - protein, 10 aa, synthetic construct
QVARGDRGVV

SEQ ID NO: 53551 - protein, 10 aa, synthetic construct
SLFRGDLTVT

SEQ ID NO: 53552 - protein, 10 aa, synthetic construct
SLKRGDHGVL

SEQ ID NO: 53553 - protein, 10 aa, synthetic construct
SLKRGDHVNL

SEQ ID NO: 53554 - protein, 10 aa, synthetic construct
SLKRGDRDYL

SEQ ID NO: 53555 - protein, 10 aa, synthetic construct
SLKRGDYSSV

SEQ ID NO: 53556 - protein, 10 aa, synthetic construct
SLKRGDLTVT

SEQ ID NO: 53557 - protein, 10 aa, synthetic construct
SLRRGDYNSL

SEQ ID NO: 53558 - protein, 10 aa, synthetic construct
SLRRGDYTSV

SEQ ID NO: 53559 - protein, 10 aa, synthetic construct
SLRRGDYTSM

SEQ ID NO: 53560 - protein, 10 aa, synthetic construct
SLRRGDFQNT

SEQ ID NO: 53561 - protein, 10 aa, synthetic construct
QVARGDRSQT

SEQ ID NO: 53562 - protein, 10 aa, synthetic construct
SLHRGDRDYL

SEQ ID NO: 53563 - protein, 10 aa, synthetic construct
SLHRGDYTSV

SEQ ID NO: 53564 - protein, 10 aa, synthetic construct
SLHRGDLTVT

SEQ ID NO: 53565 - protein, 10 aa, synthetic construct
SLHRGDLIGR

SEQ ID NO: 53566 - protein, 10 aa, synthetic construct
SLSRGDRDYL

SEQ ID NO: 53567 - protein, 10 aa, synthetic construct
SLSRGDYTSV

SEQ ID NO: 53568 - protein, 10 aa, synthetic construct
SLSRGDLTVT

SEQ ID NO: 53569 - protein, 10 aa, synthetic construct
SLSRGDLIGR

SEQ ID NO: 53570 - protein, 10 aa, synthetic construct
SLTRGDRDYL

SEQ ID NO: 53571 - protein, 10 aa, synthetic construct
SLTRGDYTSV

SEQ ID NO: 53572 - protein, 10 aa, synthetic construct
QVPRGDRGQI

SEQ ID NO: 53573 - protein, 10 aa, synthetic construct
SLTRGDLTVT

SEQ ID NO: 53574 - protein, 10 aa, synthetic construct
SLTRGDLIGR

SEQ ID NO: 53575 - protein, 10 aa, synthetic construct
SLYRGDHGVL

SEQ ID NO: 53576 - protein, 10 aa, synthetic construct
SLYRGDHVNL

SEQ ID NO: 53577 - protein, 10 aa, synthetic construct
SLYRGDRDYL

SEQ ID NO: 53578 - protein, 10 aa, synthetic construct
SLYRGDYSSV

SEQ ID NO: 53579 - protein, 10 aa, synthetic construct
SLYRGDLTVT

SEQ ID NO: 53580 - protein, 10 aa, synthetic construct
SLNRGDHGVL

SEQ ID NO: 53581 - protein, 10 aa, synthetic construct
SLNRGDHVNL

SEQ ID NO: 53582 - protein, 10 aa, synthetic construct
SLNRGDRDYL

SEQ ID NO: 53583 - protein, 10 aa, synthetic construct
QVPRGDRQGI

SEQ ID NO: 53584 - protein, 10 aa, synthetic construct
SLNRGDYSSV

SEQ ID NO: 53585 - protein, 10 aa, synthetic construct
SLNRGDLTVT

SEQ ID NO: 53586 - protein, 10 aa, synthetic construct
SLQRGDRDYL

SEQ ID NO: 53587 - protein, 10 aa, synthetic construct
SLQRGDYTSV

SEQ ID NO: 53588 - protein, 10 aa, synthetic construct
SLQRGDLTVT

SEQ ID NO: 53589 - protein, 10 aa, synthetic construct
SLQRGDLIGR

SEQ ID NO: 53590 - protein, 10 aa, synthetic construct
SLDRGDRDYL

SEQ ID NO: 53591 - protein, 10 aa, synthetic construct
SLDRGDYTSV

SEQ ID NO: 53592 - protein, 10 aa, synthetic construct
SLDRGDLTVT

SEQ ID NO: 53593 - protein, 10 aa, synthetic construct
SLDRGDLIGR

SEQ ID NO: 53594 - protein, 10 aa, synthetic construct
QVPRGDRSVV

SEQ ID NO: 53595 - protein, 10 aa, synthetic construct
SLERGDRDYL

SEQ ID NO: 53596 - protein, 10 aa, synthetic construct
SLERGDYTSV

SEQ ID NO: 53597 - protein, 10 aa, synthetic construct
SLERGDLTVT

SEQ ID NO: 53598 - protein, 10 aa, synthetic construct
SLERGDLIGR

SEQ ID NO: 53599 - protein, 10 aa, synthetic construct
SIGRGDHGVL

SEQ ID NO: 53600 - protein, 10 aa, synthetic construct
SIGRGDHVNL

SEQ ID NO: 53601 - protein, 10 aa, synthetic construct
SIGRGDYVGL

SEQ ID NO: 53602 - protein, 10 aa, synthetic construct
SIGRGDYSSV

SEQ ID NO: 53603 - protein, 10 aa, synthetic construct
SIGRGDQSTL

SEQ ID NO: 53604 - protein, 10 aa, synthetic construct
SIGRGDLLLS

SEQ ID NO: 53605 - protein, 10 aa, synthetic construct
QVPRGDRGVV

SEQ ID NO: 53606 - protein, 10 aa, synthetic construct
SIARGDHGVL

SEQ ID NO: 53607 - protein, 10 aa, synthetic construct
SIARGDHVNL

SEQ ID NO: 53608 - protein, 10 aa, synthetic construct
SIARGDYVGL

SEQ ID NO: 53609 - protein, 10 aa, synthetic construct
SIARGDYSSV

SEQ ID NO: 53610 - protein, 10 aa, synthetic construct
SIARGDQSTL

SEQ ID NO: 53611 - protein, 10 aa, synthetic construct
SIARGDLLLS

SEQ ID NO: 53612 - protein, 10 aa, synthetic construct
SIVRGDRGQI

SEQ ID NO: 53613 - protein, 10 aa, synthetic construct
SIVRGDRQGI

SEQ ID NO: 53614 - protein, 10 aa, synthetic construct
SIVRGDRSVV

SEQ ID NO: 53615 - protein, 10 aa, synthetic construct
SIVRGDRGVV

SEQ ID NO: 53616 - protein, 10 aa, synthetic construct
QVPRGDRSQT

SEQ ID NO: 53617 - protein, 10 aa, synthetic construct
SIVRGDYVGL

SEQ ID NO: 53618 - protein, 10 aa, synthetic construct
SIVRGDQSTL

SEQ ID NO: 53619 - protein, 10 aa, synthetic construct
SIVRGDRSQT

SEQ ID NO: 53620 - protein, 10 aa, synthetic construct
SIVRGDLLLS

SEQ ID NO: 53621 - protein, 10 aa, synthetic construct
SIPRGDHGVL

SEQ ID NO: 53622 - protein, 10 aa, synthetic construct
SIPRGDHVNL

SEQ ID NO: 53623 - protein, 10 aa, synthetic construct
SIPRGDYVGL

SEQ ID NO: 53624 - protein, 10 aa, synthetic construct
SIPRGDYSSV

SEQ ID NO: 53625 - protein, 10 aa, synthetic construct
SIPRGDQSTL

SEQ ID NO: 53626 - protein, 10 aa, synthetic construct
SIPRGDLLLS

SEQ ID NO: 53627 - protein, 10 aa, synthetic construct
DKKRGDYSSV

SEQ ID NO: 53628 - protein, 10 aa, synthetic construct
QVRRGDRGQI

SEQ ID NO: 53629 - protein, 10 aa, synthetic construct
SILRGDRGQI

SEQ ID NO: 53630 - protein, 10 aa, synthetic construct
SILRGDRQGI

SEQ ID NO: 53631 - protein, 10 aa, synthetic construct
SILRGDRSVV

SEQ ID NO: 53632 - protein, 10 aa, synthetic construct
SILRGDRGVV

SEQ ID NO: 53633 - protein, 10 aa, synthetic construct
SILRGDYVGL

SEQ ID NO: 53634 - protein, 10 aa, synthetic construct
SILRGDQSTL

SEQ ID NO: 53635 - protein, 10 aa, synthetic construct
SILRGDRSQT

SEQ ID NO: 53636 - protein, 10 aa, synthetic construct
SILRGDLLLS

SEQ ID NO: 53637 - protein, 10 aa, synthetic construct
SIIRGDRSVV

SEQ ID NO: 53638 - protein, 10 aa, synthetic construct
SIIRGDRSQT

SEQ ID NO: 53639 - protein, 10 aa, synthetic construct
QVRRGDRQGI

SEQ ID NO: 53640 - protein, 10 aa, synthetic construct
SIMRGDRSVV

SEQ ID NO: 53641 - protein, 10 aa, synthetic construct
SIMRGDRSQT

SEQ ID NO: 53642 - protein, 10 aa, synthetic construct
SIWRGDRGQI

SEQ ID NO: 53643 - protein, 10 aa, synthetic construct
SIWRGDRQGI

SEQ ID NO: 53644 - protein, 10 aa, synthetic construct
SIWRGDRSVV

SEQ ID NO: 53645 - protein, 10 aa, synthetic construct
SIWRGDRGVV

SEQ ID NO: 53646 - protein, 10 aa, synthetic construct
SIWRGDYVGL

SEQ ID NO: 53647 - protein, 10 aa, synthetic construct
SIWRGDQSTL

SEQ ID NO: 53648 - protein, 10 aa, synthetic construct
SIWRGDRSQT

SEQ ID NO: 53649 - protein, 10 aa, synthetic construct
SIWRGDLLLS

SEQ ID NO: 53650 - protein, 10 aa, synthetic construct
QVRRGDRSVV

SEQ ID NO: 53651 - protein, 10 aa, synthetic construct
SIFRGDRSVV

SEQ ID NO: 53652 - protein, 10 aa, synthetic construct
SIFRGDRSQT

SEQ ID NO: 53653 - protein, 10 aa, synthetic construct
SIKRGDRSVV

SEQ ID NO: 53654 - protein, 10 aa, synthetic construct
SIKRGDRSQT

SEQ ID NO: 53655 - protein, 10 aa, synthetic construct
SIRRGDHGVL

SEQ ID NO: 53656 - protein, 10 aa, synthetic construct
SIRRGDHVNL

SEQ ID NO: 53657 - protein, 10 aa, synthetic construct
SIRRGDYVGL

SEQ ID NO: 53658 - protein, 10 aa, synthetic construct
SIRRGDYSSV

SEQ ID NO: 53659 - protein, 10 aa, synthetic construct
SIRRGDQSTL

SEQ ID NO: 53660 - protein, 10 aa, synthetic construct
SIRRGDLLLS

SEQ ID NO: 53661 - protein, 10 aa, synthetic construct
QVRRGDRGVV

SEQ ID NO: 53662 - protein, 10 aa, synthetic construct
SIHRGDRGQI

SEQ ID NO: 53663 - protein, 10 aa, synthetic construct
SIHRGDRQGI

SEQ ID NO: 53664 - protein, 10 aa, synthetic construct
SIHRGDRSVV

SEQ ID NO: 53665 - protein, 10 aa, synthetic construct
SIHRGDRGVV

SEQ ID NO: 53666 - protein, 10 aa, synthetic construct
SIHRGDYVGL

SEQ ID NO: 53667 - protein, 10 aa, synthetic construct
SIHRGDQSTL

SEQ ID NO: 53668 - protein, 10 aa, synthetic construct
SIHRGDRSQT

SEQ ID NO: 53669 - protein, 10 aa, synthetic construct
SIHRGDLLLS

SEQ ID NO: 53670 - protein, 10 aa, synthetic construct
SISRGDRGQI

SEQ ID NO: 53671 - protein, 10 aa, synthetic construct
SISRGDRQGI

SEQ ID NO: 53672 - protein, 10 aa, synthetic construct
QVRRGDRSQT

SEQ ID NO: 53673 - protein, 10 aa, synthetic construct
SISRGDRSVV

SEQ ID NO: 53674 - protein, 10 aa, synthetic construct
SISRGDRGVV

SEQ ID NO: 53675 - protein, 10 aa, synthetic construct
SISRGDYVGL

SEQ ID NO: 53676 - protein, 10 aa, synthetic construct
SISRGDQSTL

SEQ ID NO: 53677 - protein, 10 aa, synthetic construct
SISRGDRSQT

SEQ ID NO: 53678 - protein, 10 aa, synthetic construct
SISRGDLLLS

SEQ ID NO: 53679 - protein, 10 aa, synthetic construct
SITRGDRGQI

SEQ ID NO: 53680 - protein, 10 aa, synthetic construct
SITRGDRQGI

SEQ ID NO: 53681 - protein, 10 aa, synthetic construct
SITRGDRSVV

SEQ ID NO: 53682 - protein, 10 aa, synthetic construct
SITRGDRGVV

SEQ ID NO: 53683 - protein, 10 aa, synthetic construct
QPGRGDRGQI

SEQ ID NO: 53684 - protein, 10 aa, synthetic construct
SITRGDYVGL

SEQ ID NO: 53685 - protein, 10 aa, synthetic construct
SITRGDQSTL

SEQ ID NO: 53686 - protein, 10 aa, synthetic construct
SITRGDRSQT

SEQ ID NO: 53687 - protein, 10 aa, synthetic construct
SITRGDLLLS

SEQ ID NO: 53688 - protein, 10 aa, synthetic construct
SIYRGDRSVV

SEQ ID NO: 53689 - protein, 10 aa, synthetic construct
SIYRGDRSQT

SEQ ID NO: 53690 - protein, 10 aa, synthetic construct
SINRGDRSVV

SEQ ID NO: 53691 - protein, 10 aa, synthetic construct
SINRGDRSQT

SEQ ID NO: 53692 - protein, 10 aa, synthetic construct
SIQRGDRGQI

SEQ ID NO: 53693 - protein, 10 aa, synthetic construct
SIQRGDRQGI

SEQ ID NO: 53694 - protein, 10 aa, synthetic construct
QPGRGDRQGI

SEQ ID NO: 53695 - protein, 10 aa, synthetic construct
SIQRGDRSVV

SEQ ID NO: 53696 - protein, 10 aa, synthetic construct
SIQRGDRGVV

SEQ ID NO: 53697 - protein, 10 aa, synthetic construct
SIQRGDYVGL

SEQ ID NO: 53698 - protein, 10 aa, synthetic construct
SIQRGDQSTL

SEQ ID NO: 53699 - protein, 10 aa, synthetic construct
SIQRGDRSQT

SEQ ID NO: 53700 - protein, 10 aa, synthetic construct
SIQRGDLLLS

SEQ ID NO: 53701 - protein, 10 aa, synthetic construct
SIDRGDRGQI

SEQ ID NO: 53702 - protein, 10 aa, synthetic construct
SIDRGDRQGI

SEQ ID NO: 53703 - protein, 10 aa, synthetic construct
SIDRGDRSVV

SEQ ID NO: 53704 - protein, 10 aa, synthetic construct
SIDRGDRGVV

SEQ ID NO: 53705 - protein, 10 aa, synthetic construct
QPGRGDRSVV

SEQ ID NO: 53706 - protein, 10 aa, synthetic construct
SIDRGDYVGL

SEQ ID NO: 53707 - protein, 10 aa, synthetic construct
SIDRGDQSTL

SEQ ID NO: 53708 - protein, 10 aa, synthetic construct
SIDRGDRSQT

SEQ ID NO: 53709 - protein, 10 aa, synthetic construct
SIDRGDLLLS

SEQ ID NO: 53710 - protein, 10 aa, synthetic construct
SIERGDRGQI

SEQ ID NO: 53711 - protein, 10 aa, synthetic construct
SIERGDRQGI

SEQ ID NO: 53712 - protein, 10 aa, synthetic construct
SIERGDRSVV

SEQ ID NO: 53713 - protein, 10 aa, synthetic construct
SIERGDRGVV

SEQ ID NO: 53714 - protein, 10 aa, synthetic construct
SIERGDYVGL

SEQ ID NO: 53715 - protein, 10 aa, synthetic construct
SIERGDQSTL

SEQ ID NO: 53716 - protein, 10 aa, synthetic construct
QPGRGDRGVV

SEQ ID NO: 53717 - protein, 10 aa, synthetic construct
SIERGDRSQT

SEQ ID NO: 53718 - protein, 10 aa, synthetic construct
SIERGDLLLS

SEQ ID NO: 53719 - protein, 10 aa, synthetic construct
SMGRGDRDYL

SEQ ID NO: 53720 - protein, 10 aa, synthetic construct
SMGRGDYVGL

SEQ ID NO: 53721 - protein, 10 aa, synthetic construct
SMGRGDYSSV

SEQ ID NO: 53722 - protein, 10 aa, synthetic construct
SMGRGDYTSV

SEQ ID NO: 53723 - protein, 10 aa, synthetic construct
SMGRGDQSTL

SEQ ID NO: 53724 - protein, 10 aa, synthetic construct
SMARGDRDYL

SEQ ID NO: 53725 - protein, 10 aa, synthetic construct
SMARGDYVGL

SEQ ID NO: 53726 - protein, 10 aa, synthetic construct
SMARGDYSSV

SEQ ID NO: 53727 - protein, 10 aa, synthetic construct
QPGRGDRSQT

SEQ ID NO: 53728 - protein, 10 aa, synthetic construct
SMARGDYTSV

SEQ ID NO: 53729 - protein, 10 aa, synthetic construct
SMARGDQSTL

SEQ ID NO: 53730 - protein, 10 aa, synthetic construct
SMVRGDRDYL

SEQ ID NO: 53731 - protein, 10 aa, synthetic construct
SMVRGDYVGL

SEQ ID NO: 53732 - protein, 10 aa, synthetic construct
SMVRGDYSSV

SEQ ID NO: 53733 - protein, 10 aa, synthetic construct
SMVRGDYTSV

SEQ ID NO: 53734 - protein, 10 aa, synthetic construct
SMVRGDQSTL

SEQ ID NO: 53735 - protein, 10 aa, synthetic construct
SMPRGDRDYL

SEQ ID NO: 53736 - protein, 10 aa, synthetic construct
SMPRGDYVGL

SEQ ID NO: 53737 - protein, 10 aa, synthetic construct
SMPRGDYSSV

SEQ ID NO: 53738 - protein, 10 aa, synthetic construct
DKKRGDLTVT

SEQ ID NO: 53739 - protein, 10 aa, synthetic construct
QPARGDRGQI

SEQ ID NO: 53740 - protein, 10 aa, synthetic construct
SMPRGDYTSV

SEQ ID NO: 53741 - protein, 10 aa, synthetic construct
SMPRGDQSTL

SEQ ID NO: 53742 - protein, 10 aa, synthetic construct
SMLRGDRDYL

SEQ ID NO: 53743 - protein, 10 aa, synthetic construct
SMLRGDYVGL

SEQ ID NO: 53744 - protein, 10 aa, synthetic construct
SMLRGDYSSV

SEQ ID NO: 53745 - protein, 10 aa, synthetic construct
SMLRGDYTSV

SEQ ID NO: 53746 - protein, 10 aa, synthetic construct
SMLRGDQSTL

SEQ ID NO: 53747 - protein, 10 aa, synthetic construct
SMIRGDHGVL

SEQ ID NO: 53748 - protein, 10 aa, synthetic construct
SMIRGDRSVV

SEQ ID NO: 53749 - protein, 10 aa, synthetic construct
SMIRGDRGVV

SEQ ID NO: 53750 - protein, 10 aa, synthetic construct
QPARGDRQGI

SEQ ID NO: 53751 - protein, 10 aa, synthetic construct
SMIRGDLTVT

SEQ ID NO: 53752 - protein, 10 aa, synthetic construct
SMIRGDLIGR

SEQ ID NO: 53753 - protein, 10 aa, synthetic construct
SMIRGDLLLS

SEQ ID NO: 53754 - protein, 10 aa, synthetic construct
SMMRGDHGVL

SEQ ID NO: 53755 - protein, 10 aa, synthetic construct
SMMRGDRGQI

SEQ ID NO: 53756 - protein, 10 aa, synthetic construct
SMMRGDRQGI

SEQ ID NO: 53757 - protein, 10 aa, synthetic construct
SMMRGDRGVV

SEQ ID NO: 53758 - protein, 10 aa, synthetic construct
SMMRGDYVGL

SEQ ID NO: 53759 - protein, 10 aa, synthetic construct
SMMRGDLIGR

SEQ ID NO: 53760 - protein, 10 aa, synthetic construct
SMMRGDQSTL

SEQ ID NO: 53761 - protein, 10 aa, synthetic construct
QPARGDRSVV

SEQ ID NO: 53762 - protein, 10 aa, synthetic construct
SMMRGDLLLS

SEQ ID NO: 53763 - protein, 10 aa, synthetic construct
SMWRGDHGVL

SEQ ID NO: 53764 - protein, 10 aa, synthetic construct
SMWRGDHVNL

SEQ ID NO: 53765 - protein, 10 aa, synthetic construct
SMWRGDRDYL

SEQ ID NO: 53766 - protein, 10 aa, synthetic construct
SMWRGDYSSV

SEQ ID NO: 53767 - protein, 10 aa, synthetic construct
SMWRGDLTVT

SEQ ID NO: 53768 - protein, 10 aa, synthetic construct
SMFRGDHGVL

SEQ ID NO: 53769 - protein, 10 aa, synthetic construct
SMFRGDRSVV

SEQ ID NO: 53770 - protein, 10 aa, synthetic construct
SMFRGDRGVV

SEQ ID NO: 53771 - protein, 10 aa, synthetic construct
SMFRGDLTVT

SEQ ID NO: 53772 - protein, 10 aa, synthetic construct
QPARGDRGVV

SEQ ID NO: 53773 - protein, 10 aa, synthetic construct
SMFRGDLIGR

SEQ ID NO: 53774 - protein, 10 aa, synthetic construct
SMFRGDLLLS

SEQ ID NO: 53775 - protein, 10 aa, synthetic construct
SMKRGDHGVL

SEQ ID NO: 53776 - protein, 10 aa, synthetic construct
SMKRGDRSVV

SEQ ID NO: 53777 - protein, 10 aa, synthetic construct
SMKRGDRGVV

SEQ ID NO: 53778 - protein, 10 aa, synthetic construct
SMKRGDLTVT

SEQ ID NO: 53779 - protein, 10 aa, synthetic construct
SMKRGDLIGR

SEQ ID NO: 53780 - protein, 10 aa, synthetic construct
SMKRGDLLLS

SEQ ID NO: 53781 - protein, 10 aa, synthetic construct
SMRRGDRDYL

SEQ ID NO: 53782 - protein, 10 aa, synthetic construct
SMRRGDYVGL

SEQ ID NO: 53783 - protein, 10 aa, synthetic construct
QPARGDRSQT

SEQ ID NO: 53784 - protein, 10 aa, synthetic construct
SMRRGDYSSV

SEQ ID NO: 53785 - protein, 10 aa, synthetic construct
SMRRGDYTSV

SEQ ID NO: 53786 - protein, 10 aa, synthetic construct
SMRRGDQSTL

SEQ ID NO: 53787 - protein, 10 aa, synthetic construct
SMHRGDHGVL

SEQ ID NO: 53788 - protein, 10 aa, synthetic construct
SMHRGDRGQI

SEQ ID NO: 53789 - protein, 10 aa, synthetic construct
SMHRGDRQGI

SEQ ID NO: 53790 - protein, 10 aa, synthetic construct
SMHRGDRSVV

SEQ ID NO: 53791 - protein, 10 aa, synthetic construct
SMHRGDLIGR

SEQ ID NO: 53792 - protein, 10 aa, synthetic construct
SMHRGDRSQT

SEQ ID NO: 53793 - protein, 10 aa, synthetic construct
SMSRGDRDYL

SEQ ID NO: 53794 - protein, 10 aa, synthetic construct
QPPRGDRGQI

SEQ ID NO: 53795 - protein, 10 aa, synthetic construct
SMSRGDYVGL

SEQ ID NO: 53796 - protein, 10 aa, synthetic construct
SMSRGDYSSV

SEQ ID NO: 53797 - protein, 10 aa, synthetic construct
SMSRGDYTSV

SEQ ID NO: 53798 - protein, 10 aa, synthetic construct
SMSRGDQSTL

SEQ ID NO: 53799 - protein, 10 aa, synthetic construct
SMTRGDHGVL

SEQ ID NO: 53800 - protein, 10 aa, synthetic construct
SMTRGDRGQI

SEQ ID NO: 53801 - protein, 10 aa, synthetic construct
SMTRGDRQGI

SEQ ID NO: 53802 - protein, 10 aa, synthetic construct
SMTRGDRSVV

SEQ ID NO: 53803 - protein, 10 aa, synthetic construct
SMTRGDLIGR

SEQ ID NO: 53804 - protein, 10 aa, synthetic construct
SMTRGDRSQT

SEQ ID NO: 53805 - protein, 10 aa, synthetic construct
QPPRGDRQGI

SEQ ID NO: 53806 - protein, 10 aa, synthetic construct
SMYRGDHGVL

SEQ ID NO: 53807 - protein, 10 aa, synthetic construct
SMYRGDRSVV

SEQ ID NO: 53808 - protein, 10 aa, synthetic construct
SMYRGDRGVV

SEQ ID NO: 53809 - protein, 10 aa, synthetic construct
SMYRGDLTVT

SEQ ID NO: 53810 - protein, 10 aa, synthetic construct
SMYRGDLIGR

SEQ ID NO: 53811 - protein, 10 aa, synthetic construct
SMYRGDLLLS

SEQ ID NO: 53812 - protein, 10 aa, synthetic construct
SMNRGDHGVL

SEQ ID NO: 53813 - protein, 10 aa, synthetic construct
SMNRGDRSVV

SEQ ID NO: 53814 - protein, 10 aa, synthetic construct
SMNRGDRGVV

SEQ ID NO: 53815 - protein, 10 aa, synthetic construct
SMNRGDLTVT

SEQ ID NO: 53816 - protein, 10 aa, synthetic construct
QPPRGDRSVV

SEQ ID NO: 53817 - protein, 10 aa, synthetic construct
SMNRGDLIGR

SEQ ID NO: 53818 - protein, 10 aa, synthetic construct
SMNRGDLLLS

SEQ ID NO: 53819 - protein, 10 aa, synthetic construct
SMQRGDHGVL

SEQ ID NO: 53820 - protein, 10 aa, synthetic construct
SMQRGDRGQI

SEQ ID NO: 53821 - protein, 10 aa, synthetic construct
SMQRGDRQGI

SEQ ID NO: 53822 - protein, 10 aa, synthetic construct
SMQRGDRSVV

SEQ ID NO: 53823 - protein, 10 aa, synthetic construct
SMQRGDLIGR

SEQ ID NO: 53824 - protein, 10 aa, synthetic construct
SMQRGDRSQT

SEQ ID NO: 53825 - protein, 10 aa, synthetic construct
SMDRGDHGVL

SEQ ID NO: 53826 - protein, 10 aa, synthetic construct
SMDRGDRGQI

SEQ ID NO: 53827 - protein, 10 aa, synthetic construct
QPPRGDRGVV

SEQ ID NO: 53828 - protein, 10 aa, synthetic construct
SMDRGDRQGI

SEQ ID NO: 53829 - protein, 10 aa, synthetic construct
SMDRGDRSVV

SEQ ID NO: 53830 - protein, 10 aa, synthetic construct
SMDRGDLIGR

SEQ ID NO: 53831 - protein, 10 aa, synthetic construct
SMDRGDRSQT

SEQ ID NO: 53832 - protein, 10 aa, synthetic construct
SMERGDHGVL

SEQ ID NO: 53833 - protein, 10 aa, synthetic construct
SMERGDRGQI

SEQ ID NO: 53834 - protein, 10 aa, synthetic construct
SMERGDRQGI

SEQ ID NO: 53835 - protein, 10 aa, synthetic construct
SMERGDRSVV

SEQ ID NO: 53836 - protein, 10 aa, synthetic construct
SMERGDLIGR

SEQ ID NO: 53837 - protein, 10 aa, synthetic construct
SMERGDRSQT

SEQ ID NO: 53838 - protein, 10 aa, synthetic construct
QPPRGDRSQT

SEQ ID NO: 53839 - protein, 10 aa, synthetic construct
SWGRGDHVNL

SEQ ID NO: 53840 - protein, 10 aa, synthetic construct
SWGRGDYNSL

SEQ ID NO: 53841 - protein, 10 aa, synthetic construct
SWGRGDYSSV

SEQ ID NO: 53842 - protein, 10 aa, synthetic construct
SWGRGDYTSV

SEQ ID NO: 53843 - protein, 10 aa, synthetic construct
SWGRGDYTSM

SEQ ID NO: 53844 - protein, 10 aa, synthetic construct
SWARGDHVNL

SEQ ID NO: 53845 - protein, 10 aa, synthetic construct
SWARGDYNSL

SEQ ID NO: 53846 - protein, 10 aa, synthetic construct
SWARGDYSSV

SEQ ID NO: 53847 - protein, 10 aa, synthetic construct
SWARGDYTSV

SEQ ID NO: 53848 - protein, 10 aa, synthetic construct
SWARGDYTSM

SEQ ID NO: 53849 - protein, 10 aa, synthetic construct
DKNRGDHVNL

SEQ ID NO: 53850 - protein, 10 aa, synthetic construct
QPRRGDRGQI

SEQ ID NO: 53851 - protein, 10 aa, synthetic construct
SWVRGDHVNL

SEQ ID NO: 53852 - protein, 10 aa, synthetic construct
SWVRGDYNSL

SEQ ID NO: 53853 - protein, 10 aa, synthetic construct
SWVRGDYTSM

SEQ ID NO: 53854 - protein, 10 aa, synthetic construct
SWPRGDHVNL

SEQ ID NO: 53855 - protein, 10 aa, synthetic construct
SWPRGDYNSL

SEQ ID NO: 53856 - protein, 10 aa, synthetic construct
SWPRGDYSSV

SEQ ID NO: 53857 - protein, 10 aa, synthetic construct
SWPRGDYTSV

SEQ ID NO: 53858 - protein, 10 aa, synthetic construct
SWPRGDYTSM

SEQ ID NO: 53859 - protein, 10 aa, synthetic construct
SWLRGDHVNL

SEQ ID NO: 53860 - protein, 10 aa, synthetic construct
SWLRGDYNSL

SEQ ID NO: 53861 - protein, 10 aa, synthetic construct
QPRRGDRQGI

SEQ ID NO: 53862 - protein, 10 aa, synthetic construct
SWLRGDYTSM

SEQ ID NO: 53863 - protein, 10 aa, synthetic construct
SWIRGDHGVL

SEQ ID NO: 53864 - protein, 10 aa, synthetic construct
SWIRGDRGQI

SEQ ID NO: 53865 - protein, 10 aa, synthetic construct
SWIRGDRQGI

SEQ ID NO: 53866 - protein, 10 aa, synthetic construct
SWIRGDRSVV

SEQ ID NO: 53867 - protein, 10 aa, synthetic construct
SWIRGDLIGR

SEQ ID NO: 53868 - protein, 10 aa, synthetic construct
SWIRGDRSQT

SEQ ID NO: 53869 - protein, 10 aa, synthetic construct
SWMRGDHGVL

SEQ ID NO: 53870 - protein, 10 aa, synthetic construct
SWMRGDHVNL

SEQ ID NO: 53871 - protein, 10 aa, synthetic construct
SWMRGDRDYL

SEQ ID NO: 53872 - protein, 10 aa, synthetic construct
QPRRGDRSVV

SEQ ID NO: 53873 - protein, 10 aa, synthetic construct
SWMRGDYSSV

SEQ ID NO: 53874 - protein, 10 aa, synthetic construct
SWMRGDLTVT

SEQ ID NO: 53875 - protein, 10 aa, synthetic construct
SWWRGDRDYL

SEQ ID NO: 53876 - protein, 10 aa, synthetic construct
SWWRGDYTSV

SEQ ID NO: 53877 - protein, 10 aa, synthetic construct
SWWRGDLTVT

SEQ ID NO: 53878 - protein, 10 aa, synthetic construct
SWWRGDLIGR

SEQ ID NO: 53879 - protein, 10 aa, synthetic construct
SWFRGDHGVL

SEQ ID NO: 53880 - protein, 10 aa, synthetic construct
SWFRGDRGQI

SEQ ID NO: 53881 - protein, 10 aa, synthetic construct
SWFRGDRQGI

SEQ ID NO: 53882 - protein, 10 aa, synthetic construct
SWFRGDRSVV

SEQ ID NO: 53883 - protein, 10 aa, synthetic construct
QPRRGDRGVV

SEQ ID NO: 53884 - protein, 10 aa, synthetic construct
SWFRGDLIGR

SEQ ID NO: 53885 - protein, 10 aa, synthetic construct
SWFRGDRSQT

SEQ ID NO: 53886 - protein, 10 aa, synthetic construct
SWKRGDHGVL

SEQ ID NO: 53887 - protein, 10 aa, synthetic construct
SWKRGDRGQI

SEQ ID NO: 53888 - protein, 10 aa, synthetic construct
SWKRGDRQGI

SEQ ID NO: 53889 - protein, 10 aa, synthetic construct
SWKRGDRSVV

SEQ ID NO: 53890 - protein, 10 aa, synthetic construct
SWKRGDLIGR

SEQ ID NO: 53891 - protein, 10 aa, synthetic construct
SWKRGDRSQT

SEQ ID NO: 53892 - protein, 10 aa, synthetic construct
SWRRGDHVNL

SEQ ID NO: 53893 - protein, 10 aa, synthetic construct
SWRRGDYNSL

SEQ ID NO: 53894 - protein, 10 aa, synthetic construct
QPRRGDRSQT

SEQ ID NO: 53895 - protein, 10 aa, synthetic construct
SWRRGDYSSV

SEQ ID NO: 53896 - protein, 10 aa, synthetic construct
SWRRGDYTSV

SEQ ID NO: 53897 - protein, 10 aa, synthetic construct
SWRRGDYTSM

SEQ ID NO: 53898 - protein, 10 aa, synthetic construct
SWHRGDRDYL

SEQ ID NO: 53899 - protein, 10 aa, synthetic construct
SWHRGDYVGL

SEQ ID NO: 53900 - protein, 10 aa, synthetic construct
SWHRGDYSSV

SEQ ID NO: 53901 - protein, 10 aa, synthetic construct
SWHRGDYTSV

SEQ ID NO: 53902 - protein, 10 aa, synthetic construct
SWHRGDQSTL

SEQ ID NO: 53903 - protein, 10 aa, synthetic construct
SWSRGDHVNL

SEQ ID NO: 53904 - protein, 10 aa, synthetic construct
SWSRGDYNSL

SEQ ID NO: 53905 - protein, 10 aa, synthetic construct
QLGRGDRGQI

SEQ ID NO: 53906 - protein, 10 aa, synthetic construct
SWSRGDYTSM

SEQ ID NO: 53907 - protein, 10 aa, synthetic construct
SWTRGDRDYL

SEQ ID NO: 53908 - protein, 10 aa, synthetic construct
SWTRGDYVGL

SEQ ID NO: 53909 - protein, 10 aa, synthetic construct
SWTRGDYSSV

SEQ ID NO: 53910 - protein, 10 aa, synthetic construct
SWTRGDYTSV

SEQ ID NO: 53911 - protein, 10 aa, synthetic construct
SWTRGDQSTL

SEQ ID NO: 53912 - protein, 10 aa, synthetic construct
SWYRGDHGVL

SEQ ID NO: 53913 - protein, 10 aa, synthetic construct
SWYRGDRGQI

SEQ ID NO: 53914 - protein, 10 aa, synthetic construct
SWYRGDRQGI

SEQ ID NO: 53915 - protein, 10 aa, synthetic construct
SWYRGDRSVV

SEQ ID NO: 53916 - protein, 10 aa, synthetic construct
QLGRGDRQGI

SEQ ID NO: 53917 - protein, 10 aa, synthetic construct
SWYRGDLIGR

SEQ ID NO: 53918 - protein, 10 aa, synthetic construct
SWYRGDRSQT

SEQ ID NO: 53919 - protein, 10 aa, synthetic construct
SWNRGDHGVL

SEQ ID NO: 53920 - protein, 10 aa, synthetic construct
SWNRGDRGQI

SEQ ID NO: 53921 - protein, 10 aa, synthetic construct
SWNRGDRQGI

SEQ ID NO: 53922 - protein, 10 aa, synthetic construct
SWNRGDRSVV

SEQ ID NO: 53923 - protein, 10 aa, synthetic construct
SWNRGDLIGR

SEQ ID NO: 53924 - protein, 10 aa, synthetic construct
SWNRGDRSQT

SEQ ID NO: 53925 - protein, 10 aa, synthetic construct
SWQRGDRDYL

SEQ ID NO: 53926 - protein, 10 aa, synthetic construct
SWQRGDYVGL

SEQ ID NO: 53927 - protein, 10 aa, synthetic construct
QLGRGDRSVV

SEQ ID NO: 53928 - protein, 10 aa, synthetic construct
SWQRGDYSSV

SEQ ID NO: 53929 - protein, 10 aa, synthetic construct
SWQRGDYTSV

SEQ ID NO: 53930 - protein, 10 aa, synthetic construct
SWQRGDQSTL

SEQ ID NO: 53931 - protein, 10 aa, synthetic construct
SWDRGDRDYL

SEQ ID NO: 53932 - protein, 10 aa, synthetic construct
SWDRGDYVGL

SEQ ID NO: 53933 - protein, 10 aa, synthetic construct
SWDRGDYSSV

SEQ ID NO: 53934 - protein, 10 aa, synthetic construct
SWDRGDYTSV

SEQ ID NO: 53935 - protein, 10 aa, synthetic construct
SWDRGDQSTL

SEQ ID NO: 53936 - protein, 10 aa, synthetic construct
SWERGDRDYL

SEQ ID NO: 53937 - protein, 10 aa, synthetic construct
SWERGDYVGL

SEQ ID NO: 53938 - protein, 10 aa, synthetic construct
QLGRGDRGVV

SEQ ID NO: 53939 - protein, 10 aa, synthetic construct
SWERGDYSSV

SEQ ID NO: 53940 - protein, 10 aa, synthetic construct
SWERGDYTSV

SEQ ID NO: 53941 - protein, 10 aa, synthetic construct
SWERGDQSTL

SEQ ID NO: 53942 - protein, 10 aa, synthetic construct
SFGRGDHGVL

SEQ ID NO: 53943 - protein, 10 aa, synthetic construct
SFGRGDHVNL

SEQ ID NO: 53944 - protein, 10 aa, synthetic construct
SFGRGDYVGL

SEQ ID NO: 53945 - protein, 10 aa, synthetic construct
SFGRGDYSSV

SEQ ID NO: 53946 - protein, 10 aa, synthetic construct
SFGRGDQSTL

SEQ ID NO: 53947 - protein, 10 aa, synthetic construct
SFGRGDLLLS

SEQ ID NO: 53948 - protein, 10 aa, synthetic construct
SFARGDHGVL

SEQ ID NO: 53949 - protein, 10 aa, synthetic construct
QLGRGDRSQT

SEQ ID NO: 53950 - protein, 10 aa, synthetic construct
SFARGDHVNL

SEQ ID NO: 53951 - protein, 10 aa, synthetic construct
SFARGDYVGL

SEQ ID NO: 53952 - protein, 10 aa, synthetic construct
SFARGDYSSV

SEQ ID NO: 53953 - protein, 10 aa, synthetic construct
SFARGDQSTL

SEQ ID NO: 53954 - protein, 10 aa, synthetic construct
SFARGDLLLS

SEQ ID NO: 53955 - protein, 10 aa, synthetic construct
SFVRGDRGQI

SEQ ID NO: 53956 - protein, 10 aa, synthetic construct
SFVRGDRQGI

SEQ ID NO: 53957 - protein, 10 aa, synthetic construct
SFVRGDRSVV

SEQ ID NO: 53958 - protein, 10 aa, synthetic construct
SFVRGDRGVV

SEQ ID NO: 53959 - protein, 10 aa, synthetic construct
SFVRGDYVGL

SEQ ID NO: 53960 - protein, 10 aa, synthetic construct
DKNRGDRSVV

SEQ ID NO: 53961 - protein, 10 aa, synthetic construct
DKNRGDRDYL

SEQ ID NO: 53962 - protein, 10 aa, synthetic construct
QLARGDRGQI

SEQ ID NO: 53963 - protein, 10 aa, synthetic construct
SFVRGDQSTL

SEQ ID NO: 53964 - protein, 10 aa, synthetic construct
SFVRGDRSQT

SEQ ID NO: 53965 - protein, 10 aa, synthetic construct
SFVRGDLLLS

SEQ ID NO: 53966 - protein, 10 aa, synthetic construct
SFPRGDHGVL

SEQ ID NO: 53967 - protein, 10 aa, synthetic construct
SFPRGDHVNL

SEQ ID NO: 53968 - protein, 10 aa, synthetic construct
SFPRGDYVGL

SEQ ID NO: 53969 - protein, 10 aa, synthetic construct
SFPRGDYSSV

SEQ ID NO: 53970 - protein, 10 aa, synthetic construct
SFPRGDQSTL

SEQ ID NO: 53971 - protein, 10 aa, synthetic construct
SFPRGDLLLS

SEQ ID NO: 53972 - protein, 10 aa, synthetic construct
SFLRGDRGQI

SEQ ID NO: 53973 - protein, 10 aa, synthetic construct
QLARGDRQGI

SEQ ID NO: 53974 - protein, 10 aa, synthetic construct
SFLRGDRQGI

SEQ ID NO: 53975 - protein, 10 aa, synthetic construct
SFLRGDRSVV

SEQ ID NO: 53976 - protein, 10 aa, synthetic construct
SFLRGDRGVV

SEQ ID NO: 53977 - protein, 10 aa, synthetic construct
SFLRGDYVGL

SEQ ID NO: 53978 - protein, 10 aa, synthetic construct
SFLRGDQSTL

SEQ ID NO: 53979 - protein, 10 aa, synthetic construct
SFLRGDRSQT

SEQ ID NO: 53980 - protein, 10 aa, synthetic construct
SFLRGDLLLS

SEQ ID NO: 53981 - protein, 10 aa, synthetic construct
SFIRGDRSVV

SEQ ID NO: 53982 - protein, 10 aa, synthetic construct
SFIRGDRSQT

SEQ ID NO: 53983 - protein, 10 aa, synthetic construct
SFMRGDRSVV

SEQ ID NO: 53984 - protein, 10 aa, synthetic construct
QLARGDRSVV

SEQ ID NO: 53985 - protein, 10 aa, synthetic construct
SFMRGDRSQT

SEQ ID NO: 53986 - protein, 10 aa, synthetic construct
SFWRGDRGQI

SEQ ID NO: 53987 - protein, 10 aa, synthetic construct
SFWRGDRQGI

SEQ ID NO: 53988 - protein, 10 aa, synthetic construct
SFWRGDRSVV

SEQ ID NO: 53989 - protein, 10 aa, synthetic construct
SFWRGDRGVV

SEQ ID NO: 53990 - protein, 10 aa, synthetic construct
SFWRGDYVGL

SEQ ID NO: 53991 - protein, 10 aa, synthetic construct
SFWRGDQSTL

SEQ ID NO: 53992 - protein, 10 aa, synthetic construct
SFWRGDRSQT

SEQ ID NO: 53993 - protein, 10 aa, synthetic construct
SFWRGDLLLS

SEQ ID NO: 53994 - protein, 10 aa, synthetic construct
SFKRGDRSVV

SEQ ID NO: 53995 - protein, 10 aa, synthetic construct
QLARGDRGVV

SEQ ID NO: 53996 - protein, 10 aa, synthetic construct
SFKRGDRSQT

SEQ ID NO: 53997 - protein, 10 aa, synthetic construct
SFRRGDHGVL

SEQ ID NO: 53998 - protein, 10 aa, synthetic construct
SFRRGDHVNL

SEQ ID NO: 53999 - protein, 10 aa, synthetic construct
SFRRGDYVGL

SEQ ID NO: 54000 - protein, 10 aa, synthetic construct
SFRRGDYSSV

SEQ ID NO: 54001 - protein, 10 aa, synthetic construct
SFRRGDQSTL

SEQ ID NO: 54002 - protein, 10 aa, synthetic construct
SFRRGDLLLS

SEQ ID NO: 54003 - protein, 10 aa, synthetic construct
SFHRGDRGQI

SEQ ID NO: 54004 - protein, 10 aa, synthetic construct
SFHRGDRQGI

SEQ ID NO: 54005 - protein, 10 aa, synthetic construct
SFHRGDRSVV

SEQ ID NO: 54006 - protein, 10 aa, synthetic construct
QLARGDRSQT

SEQ ID NO: 54007 - protein, 10 aa, synthetic construct
SFHRGDRGVV

SEQ ID NO: 54008 - protein, 10 aa, synthetic construct
SFHRGDYVGL

SEQ ID NO: 54009 - protein, 10 aa, synthetic construct
SFHRGDQSTL

SEQ ID NO: 54010 - protein, 10 aa, synthetic construct
SFHRGDRSQT

SEQ ID NO: 54011 - protein, 10 aa, synthetic construct
SFHRGDLLLS

SEQ ID NO: 54012 - protein, 10 aa, synthetic construct
SFSRGDRGQI

SEQ ID NO: 54013 - protein, 10 aa, synthetic construct
SFSRGDRQGI

SEQ ID NO: 54014 - protein, 10 aa, synthetic construct
SFSRGDRSVV

SEQ ID NO: 54015 - protein, 10 aa, synthetic construct
SFSRGDRGVV

SEQ ID NO: 54016 - protein, 10 aa, synthetic construct
SFSRGDYVGL

SEQ ID NO: 54017 - protein, 10 aa, synthetic construct
QLPRGDRGQI

SEQ ID NO: 54018 - protein, 10 aa, synthetic construct
SFSRGDQSTL

SEQ ID NO: 54019 - protein, 10 aa, synthetic construct
SFSRGDRSQT

SEQ ID NO: 54020 - protein, 10 aa, synthetic construct
SFSRGDLLLS

SEQ ID NO: 54021 - protein, 10 aa, synthetic construct
SFTRGDRGQI

SEQ ID NO: 54022 - protein, 10 aa, synthetic construct
SFTRGDRQGI

SEQ ID NO: 54023 - protein, 10 aa, synthetic construct
SFTRGDRSVV

SEQ ID NO: 54024 - protein, 10 aa, synthetic construct
SFTRGDRGVV

SEQ ID NO: 54025 - protein, 10 aa, synthetic construct
SFTRGDYVGL

SEQ ID NO: 54026 - protein, 10 aa, synthetic construct
SFTRGDQSTL

SEQ ID NO: 54027 - protein, 10 aa, synthetic construct
SFTRGDRSQT

SEQ ID NO: 54028 - protein, 10 aa, synthetic construct
QLPRGDRQGI

SEQ ID NO: 54029 - protein, 10 aa, synthetic construct
SFTRGDLLLS

SEQ ID NO: 54030 - protein, 10 aa, synthetic construct
SFYRGDRSVV

SEQ ID NO: 54031 - protein, 10 aa, synthetic construct
SFYRGDRSQT

SEQ ID NO: 54032 - protein, 10 aa, synthetic construct
SFNRGDRSVV

SEQ ID NO: 54033 - protein, 10 aa, synthetic construct
SFNRGDRSQT

SEQ ID NO: 54034 - protein, 10 aa, synthetic construct
SFQRGDRGQI

SEQ ID NO: 54035 - protein, 10 aa, synthetic construct
SFQRGDRQGI

SEQ ID NO: 54036 - protein, 10 aa, synthetic construct
SFQRGDRSVV

SEQ ID NO: 54037 - protein, 10 aa, synthetic construct
SFQRGDRGVV

SEQ ID NO: 54038 - protein, 10 aa, synthetic construct
SFQRGDYVGL

SEQ ID NO: 54039 - protein, 10 aa, synthetic construct
QLPRGDRSVV

SEQ ID NO: 54040 - protein, 10 aa, synthetic construct
SFQRGDQSTL

SEQ ID NO: 54041 - protein, 10 aa, synthetic construct
SFQRGDRSQT

SEQ ID NO: 54042 - protein, 10 aa, synthetic construct
SFQRGDLLLS

SEQ ID NO: 54043 - protein, 10 aa, synthetic construct
SFDRGDRGQI

SEQ ID NO: 54044 - protein, 10 aa, synthetic construct
SFDRGDRQGI

SEQ ID NO: 54045 - protein, 10 aa, synthetic construct
SFDRGDRSVV

SEQ ID NO: 54046 - protein, 10 aa, synthetic construct
SFDRGDRGVV

SEQ ID NO: 54047 - protein, 10 aa, synthetic construct
SFDRGDYVGL

SEQ ID NO: 54048 - protein, 10 aa, synthetic construct
SFDRGDQSTL

SEQ ID NO: 54049 - protein, 10 aa, synthetic construct
SFDRGDRSQT

SEQ ID NO: 54050 - protein, 10 aa, synthetic construct
QLPRGDRGVV

SEQ ID NO: 54051 - protein, 10 aa, synthetic construct
SFDRGDLLLS

SEQ ID NO: 54052 - protein, 10 aa, synthetic construct
SFERGDRGQI

SEQ ID NO: 54053 - protein, 10 aa, synthetic construct
SFERGDRQGI

SEQ ID NO: 54054 - protein, 10 aa, synthetic construct
SFERGDRSVV

SEQ ID NO: 54055 - protein, 10 aa, synthetic construct
SFERGDRGVV

SEQ ID NO: 54056 - protein, 10 aa, synthetic construct
SFERGDYVGL

SEQ ID NO: 54057 - protein, 10 aa, synthetic construct
SFERGDQSTL

SEQ ID NO: 54058 - protein, 10 aa, synthetic construct
SFERGDRSQT

SEQ ID NO: 54059 - protein, 10 aa, synthetic construct
SFERGDLLLS

SEQ ID NO: 54060 - protein, 10 aa, synthetic construct
SKGRGDHGVL

SEQ ID NO: 54061 - protein, 10 aa, synthetic construct
QLPRGDRSQT

SEQ ID NO: 54062 - protein, 10 aa, synthetic construct
SKGRGDHVNL

SEQ ID NO: 54063 - protein, 10 aa, synthetic construct
SKGRGDYVGL

SEQ ID NO: 54064 - protein, 10 aa, synthetic construct
SKGRGDYSSV

SEQ ID NO: 54065 - protein, 10 aa, synthetic construct
SKGRGDQSTL

SEQ ID NO: 54066 - protein, 10 aa, synthetic construct
SKGRGDLLLS

SEQ ID NO: 54067 - protein, 10 aa, synthetic construct
SKARGDHGVL

SEQ ID NO: 54068 - protein, 10 aa, synthetic construct
SKARGDHVNL

SEQ ID NO: 54069 - protein, 10 aa, synthetic construct
SKARGDYVGL

SEQ ID NO: 54070 - protein, 10 aa, synthetic construct
SKARGDYSSV

SEQ ID NO: 54071 - protein, 10 aa, synthetic construct
SKARGDQSTL

SEQ ID NO: 54072 - protein, 10 aa, synthetic construct
DKNRGDYSSV

SEQ ID NO: 54073 - protein, 10 aa, synthetic construct
QLRRGDRGQI

SEQ ID NO: 54074 - protein, 10 aa, synthetic construct
SKARGDLLLS

SEQ ID NO: 54075 - protein, 10 aa, synthetic construct
SKVRGDRGQI

SEQ ID NO: 54076 - protein, 10 aa, synthetic construct
SKVRGDRQGI

SEQ ID NO: 54077 - protein, 10 aa, synthetic construct
SKVRGDRSVV

SEQ ID NO: 54078 - protein, 10 aa, synthetic construct
SKVRGDRGVV

SEQ ID NO: 54079 - protein, 10 aa, synthetic construct
SKVRGDYVGL

SEQ ID NO: 54080 - protein, 10 aa, synthetic construct
SKVRGDQSTL

SEQ ID NO: 54081 - protein, 10 aa, synthetic construct
SKVRGDRSQT

SEQ ID NO: 54082 - protein, 10 aa, synthetic construct
SKVRGDLLLS

SEQ ID NO: 54083 - protein, 10 aa, synthetic construct
SKPRGDHGVL

SEQ ID NO: 54084 - protein, 10 aa, synthetic construct
QLRRGDRQGI

SEQ ID NO: 54085 - protein, 10 aa, synthetic construct
SKPRGDHVNL

SEQ ID NO: 54086 - protein, 10 aa, synthetic construct
SKPRGDYVGL

SEQ ID NO: 54087 - protein, 10 aa, synthetic construct
SKPRGDYSSV

SEQ ID NO: 54088 - protein, 10 aa, synthetic construct
SKPRGDQSTL

SEQ ID NO: 54089 - protein, 10 aa, synthetic construct
SKPRGDLLLS

SEQ ID NO: 54090 - protein, 10 aa, synthetic construct
SKLRGDRGQI

SEQ ID NO: 54091 - protein, 10 aa, synthetic construct
SKLRGDRQGI

SEQ ID NO: 54092 - protein, 10 aa, synthetic construct
SKLRGDRSVV

SEQ ID NO: 54093 - protein, 10 aa, synthetic construct
SKLRGDRGVV

SEQ ID NO: 54094 - protein, 10 aa, synthetic construct
SKLRGDYVGL

SEQ ID NO: 54095 - protein, 10 aa, synthetic construct
QLRRGDRSVV

SEQ ID NO: 54096 - protein, 10 aa, synthetic construct
SKLRGDQSTL

SEQ ID NO: 54097 - protein, 10 aa, synthetic construct
SKLRGDRSQT

SEQ ID NO: 54098 - protein, 10 aa, synthetic construct
SKLRGDLLLS

SEQ ID NO: 54099 - protein, 10 aa, synthetic construct
SKIRGDRSVV

SEQ ID NO: 54100 - protein, 10 aa, synthetic construct
SKIRGDRSQT

SEQ ID NO: 54101 - protein, 10 aa, synthetic construct
SKMRGDRSVV

SEQ ID NO: 54102 - protein, 10 aa, synthetic construct
SKMRGDRSQT

SEQ ID NO: 54103 - protein, 10 aa, synthetic construct
SKWRGDRGQI

SEQ ID NO: 54104 - protein, 10 aa, synthetic construct
SKWRGDRQGI

SEQ ID NO: 54105 - protein, 10 aa, synthetic construct
SKWRGDRSVV

SEQ ID NO: 54106 - protein, 10 aa, synthetic construct
QLRRGDRGVV

SEQ ID NO: 54107 - protein, 10 aa, synthetic construct
SKWRGDRGVV

SEQ ID NO: 54108 - protein, 10 aa, synthetic construct
SKWRGDYVGL

SEQ ID NO: 54109 - protein, 10 aa, synthetic construct
SKWRGDQSTL

SEQ ID NO: 54110 - protein, 10 aa, synthetic construct
SKWRGDRSQT

SEQ ID NO: 54111 - protein, 10 aa, synthetic construct
SKWRGDLLLS

SEQ ID NO: 54112 - protein, 10 aa, synthetic construct
SKFRGDRSVV

SEQ ID NO: 54113 - protein, 10 aa, synthetic construct
SKFRGDRSQT

SEQ ID NO: 54114 - protein, 10 aa, synthetic construct
SKRRGDHGVL

SEQ ID NO: 54115 - protein, 10 aa, synthetic construct
SKRRGDHVNL

SEQ ID NO: 54116 - protein, 10 aa, synthetic construct
SKRRGDYVGL

SEQ ID NO: 54117 - protein, 10 aa, synthetic construct
QLRRGDRSQT

SEQ ID NO: 54118 - protein, 10 aa, synthetic construct
SKRRGDYSSV

SEQ ID NO: 54119 - protein, 10 aa, synthetic construct
SKRRGDQSTL

SEQ ID NO: 54120 - protein, 10 aa, synthetic construct
SKRRGDLLLS

SEQ ID NO: 54121 - protein, 10 aa, synthetic construct
SKHRGDRGQI

SEQ ID NO: 54122 - protein, 10 aa, synthetic construct
SKHRGDRQGI

SEQ ID NO: 54123 - protein, 10 aa, synthetic construct
SKHRGDRSVV

SEQ ID NO: 54124 - protein, 10 aa, synthetic construct
SKHRGDRGVV

SEQ ID NO: 54125 - protein, 10 aa, synthetic construct
SKHRGDYVGL

SEQ ID NO: 54126 - protein, 10 aa, synthetic construct
SKHRGDQSTL

SEQ ID NO: 54127 - protein, 10 aa, synthetic construct
SKHRGDRSQT

SEQ ID NO: 54128 - protein, 10 aa, synthetic construct
QWGRGDRGVV

SEQ ID NO: 54129 - protein, 10 aa, synthetic construct
SKHRGDLLLS

SEQ ID NO: 54130 - protein, 10 aa, synthetic construct
SKSRGDRGQI

SEQ ID NO: 54131 - protein, 10 aa, synthetic construct
SKSRGDRQGI

SEQ ID NO: 54132 - protein, 10 aa, synthetic construct
SKSRGDRSVV

SEQ ID NO: 54133 - protein, 10 aa, synthetic construct
SKSRGDRGVV

SEQ ID NO: 54134 - protein, 10 aa, synthetic construct
SKSRGDYVGL

SEQ ID NO: 54135 - protein, 10 aa, synthetic construct
SKSRGDQSTL

SEQ ID NO: 54136 - protein, 10 aa, synthetic construct
SKSRGDRSQT

SEQ ID NO: 54137 - protein, 10 aa, synthetic construct
SKSRGDLLLS

SEQ ID NO: 54138 - protein, 10 aa, synthetic construct
SKTRGDRGQI

SEQ ID NO: 54139 - protein, 10 aa, synthetic construct
QWARGDRGVV

SEQ ID NO: 54140 - protein, 10 aa, synthetic construct
SKTRGDRQGI

SEQ ID NO: 54141 - protein, 10 aa, synthetic construct
SKTRGDRSVV

SEQ ID NO: 54142 - protein, 10 aa, synthetic construct
SKTRGDRGVV

SEQ ID NO: 54143 - protein, 10 aa, synthetic construct
SKTRGDYVGL

SEQ ID NO: 54144 - protein, 10 aa, synthetic construct
SKTRGDQSTL

SEQ ID NO: 54145 - protein, 10 aa, synthetic construct
SKTRGDRSQT

SEQ ID NO: 54146 - protein, 10 aa, synthetic construct
SKTRGDLLLS

SEQ ID NO: 54147 - protein, 10 aa, synthetic construct
SKYRGDRSVV

SEQ ID NO: 54148 - protein, 10 aa, synthetic construct
SKYRGDRSQT

SEQ ID NO: 54149 - protein, 10 aa, synthetic construct
SKQRGDRGQI

SEQ ID NO: 54150 - protein, 10 aa, synthetic construct
QWVRGDRGVV

SEQ ID NO: 54151 - protein, 10 aa, synthetic construct
SKQRGDRQGI

SEQ ID NO: 54152 - protein, 10 aa, synthetic construct
SKQRGDRSVV

SEQ ID NO: 54153 - protein, 10 aa, synthetic construct
SKQRGDRGVV

SEQ ID NO: 54154 - protein, 10 aa, synthetic construct
SKQRGDYVGL

SEQ ID NO: 54155 - protein, 10 aa, synthetic construct
SKQRGDQSTL

SEQ ID NO: 54156 - protein, 10 aa, synthetic construct
SKQRGDRSQT

SEQ ID NO: 54157 - protein, 10 aa, synthetic construct
SKQRGDLLLS

SEQ ID NO: 54158 - protein, 10 aa, synthetic construct
SKDRGDRGQI

SEQ ID NO: 54159 - protein, 10 aa, synthetic construct
SKDRGDRQGI

SEQ ID NO: 54160 - protein, 10 aa, synthetic construct
SKDRGDRSVV

SEQ ID NO: 54161 - protein, 10 aa, synthetic construct
QWPRGDRGVV

SEQ ID NO: 54162 - protein, 10 aa, synthetic construct
SKDRGDRGVV

SEQ ID NO: 54163 - protein, 10 aa, synthetic construct
SKDRGDYVGL

SEQ ID NO: 54164 - protein, 10 aa, synthetic construct
SKDRGDQSTL

SEQ ID NO: 54165 - protein, 10 aa, synthetic construct
SKDRGDRSQT

SEQ ID NO: 54166 - protein, 10 aa, synthetic construct
SKDRGDLLLS

SEQ ID NO: 54167 - protein, 10 aa, synthetic construct
SKERGDRGQI

SEQ ID NO: 54168 - protein, 10 aa, synthetic construct
SKERGDRQGI

SEQ ID NO: 54169 - protein, 10 aa, synthetic construct
SKERGDRSVV

SEQ ID NO: 54170 - protein, 10 aa, synthetic construct
SKERGDRGVV

SEQ ID NO: 54171 - protein, 10 aa, synthetic construct
SKERGDYVGL

SEQ ID NO: 54172 - protein, 10 aa, synthetic construct
QWLRGDRGVV

SEQ ID NO: 54173 - protein, 10 aa, synthetic construct
SKERGDQSTL

SEQ ID NO: 54174 - protein, 10 aa, synthetic construct
SKERGDRSQT

SEQ ID NO: 54175 - protein, 10 aa, synthetic construct
SKERGDLLLS

SEQ ID NO: 54176 - protein, 10 aa, synthetic construct
SRGRGDYTSV

SEQ ID NO: 54177 - protein, 10 aa, synthetic construct
SRGRGDYTSM

SEQ ID NO: 54178 - protein, 10 aa, synthetic construct
SRARGDYTSV

SEQ ID NO: 54179 - protein, 10 aa, synthetic construct
SRARGDYTSM

SEQ ID NO: 54180 - protein, 10 aa, synthetic construct
SRVRGDHVNL

SEQ ID NO: 54181 - protein, 10 aa, synthetic construct
SRVRGDRDYL

SEQ ID NO: 54182 - protein, 10 aa, synthetic construct
SRVRGDYSSV

SEQ ID NO: 54183 - protein, 10 aa, synthetic construct
DKNRGDLTVT

SEQ ID NO: 54184 - protein, 10 aa, synthetic construct
QWRRGDRGVV

SEQ ID NO: 54185 - protein, 10 aa, synthetic construct
SRVRGDLTVT

SEQ ID NO: 54186 - protein, 10 aa, synthetic construct
SRVRGDLIGR

SEQ ID NO: 54187 - protein, 10 aa, synthetic construct
SRPRGDYTSV

SEQ ID NO: 54188 - protein, 10 aa, synthetic construct
SRPRGDYTSM

SEQ ID NO: 54189 - protein, 10 aa, synthetic construct
SRLRGDHVNL

SEQ ID NO: 54190 - protein, 10 aa, synthetic construct
SRLRGDRDYL

SEQ ID NO: 54191 - protein, 10 aa, synthetic construct
SRLRGDYSSV

SEQ ID NO: 54192 - protein, 10 aa, synthetic construct
SRLRGDLTVT

SEQ ID NO: 54193 - protein, 10 aa, synthetic construct
SRLRGDLIGR

SEQ ID NO: 54194 - protein, 10 aa, synthetic construct
SRIRGDHGVL

SEQ ID NO: 54195 - protein, 10 aa, synthetic construct
QWSRGDRGVV

SEQ ID NO: 54196 - protein, 10 aa, synthetic construct
SRIRGDHVNL

SEQ ID NO: 54197 - protein, 10 aa, synthetic construct
SRIRGDYVGL

SEQ ID NO: 54198 - protein, 10 aa, synthetic construct
SRIRGDYSSV

SEQ ID NO: 54199 - protein, 10 aa, synthetic construct
SRIRGDQSTL

SEQ ID NO: 54200 - protein, 10 aa, synthetic construct
SRIRGDLLLS

SEQ ID NO: 54201 - protein, 10 aa, synthetic construct
SRMRGDHGVL

SEQ ID NO: 54202 - protein, 10 aa, synthetic construct
SRMRGDHVNL

SEQ ID NO: 54203 - protein, 10 aa, synthetic construct
SRMRGDYVGL

SEQ ID NO: 54204 - protein, 10 aa, synthetic construct
SRMRGDYSSV

SEQ ID NO: 54205 - protein, 10 aa, synthetic construct
SRMRGDQSTL

SEQ ID NO: 54206 - protein, 10 aa, synthetic construct
QRGRGDRGQI

SEQ ID NO: 54207 - protein, 10 aa, synthetic construct
SRMRGDLLLS

SEQ ID NO: 54208 - protein, 10 aa, synthetic construct
SRWRGDHVNL

SEQ ID NO: 54209 - protein, 10 aa, synthetic construct
SRWRGDRDYL

SEQ ID NO: 54210 - protein, 10 aa, synthetic construct
SRWRGDYSSV

SEQ ID NO: 54211 - protein, 10 aa, synthetic construct
SRWRGDLTVT

SEQ ID NO: 54212 - protein, 10 aa, synthetic construct
SRWRGDLIGR

SEQ ID NO: 54213 - protein, 10 aa, synthetic construct
SRFRGDHGVL

SEQ ID NO: 54214 - protein, 10 aa, synthetic construct
SRFRGDHVNL

SEQ ID NO: 54215 - protein, 10 aa, synthetic construct
SRFRGDYVGL

SEQ ID NO: 54216 - protein, 10 aa, synthetic construct
SRFRGDYSSV

SEQ ID NO: 54217 - protein, 10 aa, synthetic construct
QRGRGDRQGI

SEQ ID NO: 54218 - protein, 10 aa, synthetic construct
SRFRGDQSTL

SEQ ID NO: 54219 - protein, 10 aa, synthetic construct
SRFRGDLLLS

SEQ ID NO: 54220 - protein, 10 aa, synthetic construct
SRKRGDHGVL

SEQ ID NO: 54221 - protein, 10 aa, synthetic construct
SRKRGDHVNL

SEQ ID NO: 54222 - protein, 10 aa, synthetic construct
SRKRGDYVGL

SEQ ID NO: 54223 - protein, 10 aa, synthetic construct
SRKRGDYSSV

SEQ ID NO: 54224 - protein, 10 aa, synthetic construct
SRKRGDQSTL

SEQ ID NO: 54225 - protein, 10 aa, synthetic construct
SRKRGDLLLS

SEQ ID NO: 54226 - protein, 10 aa, synthetic construct
SRRRGDYTSV

SEQ ID NO: 54227 - protein, 10 aa, synthetic construct
SRRRGDYTSM

SEQ ID NO: 54228 - protein, 10 aa, synthetic construct
QRGRGDRSVV

SEQ ID NO: 54229 - protein, 10 aa, synthetic construct
SRHRGDHVNL

SEQ ID NO: 54230 - protein, 10 aa, synthetic construct
SRHRGDRDYL

SEQ ID NO: 54231 - protein, 10 aa, synthetic construct
SRHRGDYSSV

SEQ ID NO: 54232 - protein, 10 aa, synthetic construct
SRHRGDLTVT

SEQ ID NO: 54233 - protein, 10 aa, synthetic construct
SRHRGDLIGR

SEQ ID NO: 54234 - protein, 10 aa, synthetic construct
SRSRGDHVNL

SEQ ID NO: 54235 - protein, 10 aa, synthetic construct
SRSRGDRDYL

SEQ ID NO: 54236 - protein, 10 aa, synthetic construct
SRSRGDYSSV

SEQ ID NO: 54237 - protein, 10 aa, synthetic construct
SRSRGDLTVT

SEQ ID NO: 54238 - protein, 10 aa, synthetic construct
SRSRGDLIGR

SEQ ID NO: 54239 - protein, 10 aa, synthetic construct
QRGRGDRGVV

SEQ ID NO: 54240 - protein, 10 aa, synthetic construct
SRTRGDHVNL

SEQ ID NO: 54241 - protein, 10 aa, synthetic construct
SRTRGDRDYL

SEQ ID NO: 54242 - protein, 10 aa, synthetic construct
SRTRGDYSSV

SEQ ID NO: 54243 - protein, 10 aa, synthetic construct
SRTRGDLTVT

SEQ ID NO: 54244 - protein, 10 aa, synthetic construct
SRTRGDLIGR

SEQ ID NO: 54245 - protein, 10 aa, synthetic construct
SRYRGDHGVL

SEQ ID NO: 54246 - protein, 10 aa, synthetic construct
SRYRGDHVNL

SEQ ID NO: 54247 - protein, 10 aa, synthetic construct
SRYRGDYVGL

SEQ ID NO: 54248 - protein, 10 aa, synthetic construct
SRYRGDYSSV

SEQ ID NO: 54249 - protein, 10 aa, synthetic construct
SRYRGDQSTL

SEQ ID NO: 54250 - protein, 10 aa, synthetic construct
QRGRGDRSQT

SEQ ID NO: 54251 - protein, 10 aa, synthetic construct
SRYRGDLLLS

SEQ ID NO: 54252 - protein, 10 aa, synthetic construct
SRNRGDHGVL

SEQ ID NO: 54253 - protein, 10 aa, synthetic construct
SRNRGDHVNL

SEQ ID NO: 54254 - protein, 10 aa, synthetic construct
SRNRGDYVGL

SEQ ID NO: 54255 - protein, 10 aa, synthetic construct
SRNRGDYSSV

SEQ ID NO: 54256 - protein, 10 aa, synthetic construct
SRNRGDQSTL

SEQ ID NO: 54257 - protein, 10 aa, synthetic construct
SRNRGDLLLS

SEQ ID NO: 54258 - protein, 10 aa, synthetic construct
SRQRGDHVNL

SEQ ID NO: 54259 - protein, 10 aa, synthetic construct
SRQRGDRDYL

SEQ ID NO: 54260 - protein, 10 aa, synthetic construct
SRQRGDYSSV

SEQ ID NO: 54261 - protein, 10 aa, synthetic construct
QRARGDRGQI

SEQ ID NO: 54262 - protein, 10 aa, synthetic construct
SRQRGDLTVT

SEQ ID NO: 54263 - protein, 10 aa, synthetic construct
SRQRGDLIGR

SEQ ID NO: 54264 - protein, 10 aa, synthetic construct
SRDRGDHVNL

SEQ ID NO: 54265 - protein, 10 aa, synthetic construct
SRDRGDRDYL

SEQ ID NO: 54266 - protein, 10 aa, synthetic construct
SRDRGDYSSV

SEQ ID NO: 54267 - protein, 10 aa, synthetic construct
SRDRGDLTVT

SEQ ID NO: 54268 - protein, 10 aa, synthetic construct
SRDRGDLIGR

SEQ ID NO: 54269 - protein, 10 aa, synthetic construct
SRERGDHVNL

SEQ ID NO: 54270 - protein, 10 aa, synthetic construct
SRERGDRDYL

SEQ ID NO: 54271 - protein, 10 aa, synthetic construct
SRERGDYSSV

SEQ ID NO: 54272 - protein, 10 aa, synthetic construct
QRARGDRQGI

SEQ ID NO: 54273 - protein, 10 aa, synthetic construct
SRERGDLTVT

SEQ ID NO: 54274 - protein, 10 aa, synthetic construct
SRERGDLIGR

SEQ ID NO: 54275 - protein, 10 aa, synthetic construct
SHGRGDHVNL

SEQ ID NO: 54276 - protein, 10 aa, synthetic construct
SHGRGDRDYL

SEQ ID NO: 54277 - protein, 10 aa, synthetic construct
SHGRGDYSSV

SEQ ID NO: 54278 - protein, 10 aa, synthetic construct
SHGRGDLTVT

SEQ ID NO: 54279 - protein, 10 aa, synthetic construct
SHGRGDLIGR

SEQ ID NO: 54280 - protein, 10 aa, synthetic construct
SHARGDHVNL

SEQ ID NO: 54281 - protein, 10 aa, synthetic construct
SHARGDRDYL

SEQ ID NO: 54282 - protein, 10 aa, synthetic construct
SHARGDYSSV

SEQ ID NO: 54283 - protein, 10 aa, synthetic construct
QRARGDRSVV

SEQ ID NO: 54284 - protein, 10 aa, synthetic construct
SHARGDLTVT

SEQ ID NO: 54285 - protein, 10 aa, synthetic construct
SHARGDLIGR

SEQ ID NO: 54286 - protein, 10 aa, synthetic construct
SHVRGDHGVL

SEQ ID NO: 54287 - protein, 10 aa, synthetic construct
SHVRGDHVNL

SEQ ID NO: 54288 - protein, 10 aa, synthetic construct
SHVRGDYVGL

SEQ ID NO: 54289 - protein, 10 aa, synthetic construct
SHVRGDYSSV

SEQ ID NO: 54290 - protein, 10 aa, synthetic construct
SHVRGDQSTL

SEQ ID NO: 54291 - protein, 10 aa, synthetic construct
SHVRGDLLLS

SEQ ID NO: 54292 - protein, 10 aa, synthetic construct
SHPRGDHVNL

SEQ ID NO: 54293 - protein, 10 aa, synthetic construct
SHPRGDRDYL

SEQ ID NO: 54294 - protein, 10 aa, synthetic construct
QKKRGDHVNL

SEQ ID NO: 54295 - protein, 10 aa, synthetic construct
QRARGDRGVV

SEQ ID NO: 54296 - protein, 10 aa, synthetic construct
SHPRGDYSSV

SEQ ID NO: 54297 - protein, 10 aa, synthetic construct
SHPRGDLTVT

SEQ ID NO: 54298 - protein, 10 aa, synthetic construct
SHPRGDLIGR

SEQ ID NO: 54299 - protein, 10 aa, synthetic construct
SHLRGDHGVL

SEQ ID NO: 54300 - protein, 10 aa, synthetic construct
SHLRGDHVNL

SEQ ID NO: 54301 - protein, 10 aa, synthetic construct
SHLRGDYVGL

SEQ ID NO: 54302 - protein, 10 aa, synthetic construct
SHLRGDYSSV

SEQ ID NO: 54303 - protein, 10 aa, synthetic construct
SHLRGDQSTL

SEQ ID NO: 54304 - protein, 10 aa, synthetic construct
SHLRGDLLLS

SEQ ID NO: 54305 - protein, 10 aa, synthetic construct
SHIRGDRGQI

SEQ ID NO: 54306 - protein, 10 aa, synthetic construct
QRARGDRSQT

SEQ ID NO: 54307 - protein, 10 aa, synthetic construct
SHIRGDRQGI

SEQ ID NO: 54308 - protein, 10 aa, synthetic construct
SHIRGDRSVV

SEQ ID NO: 54309 - protein, 10 aa, synthetic construct
SHIRGDRGVV

SEQ ID NO: 54310 - protein, 10 aa, synthetic construct
SHIRGDYVGL

SEQ ID NO: 54311 - protein, 10 aa, synthetic construct
SHIRGDQSTL

SEQ ID NO: 54312 - protein, 10 aa, synthetic construct
SHIRGDRSQT

SEQ ID NO: 54313 - protein, 10 aa, synthetic construct
SHIRGDLLLS

SEQ ID NO: 54314 - protein, 10 aa, synthetic construct
SHMRGDRGQI

SEQ ID NO: 54315 - protein, 10 aa, synthetic construct
SHMRGDRQGI

SEQ ID NO: 54316 - protein, 10 aa, synthetic construct
SHMRGDRSVV

SEQ ID NO: 54317 - protein, 10 aa, synthetic construct
QRPRGDRGQI

SEQ ID NO: 54318 - protein, 10 aa, synthetic construct
SHMRGDRGVV

SEQ ID NO: 54319 - protein, 10 aa, synthetic construct
SHMRGDYVGL

SEQ ID NO: 54320 - protein, 10 aa, synthetic construct
SHMRGDQSTL

SEQ ID NO: 54321 - protein, 10 aa, synthetic construct
SHMRGDRSQT

SEQ ID NO: 54322 - protein, 10 aa, synthetic construct
SHMRGDLLLS

SEQ ID NO: 54323 - protein, 10 aa, synthetic construct
SHWRGDHGVL

SEQ ID NO: 54324 - protein, 10 aa, synthetic construct
SHWRGDHVNL

SEQ ID NO: 54325 - protein, 10 aa, synthetic construct
SHWRGDYVGL

SEQ ID NO: 54326 - protein, 10 aa, synthetic construct
SHWRGDYSSV

SEQ ID NO: 54327 - protein, 10 aa, synthetic construct
SHWRGDQSTL

SEQ ID NO: 54328 - protein, 10 aa, synthetic construct
QRPRGDRQGI

SEQ ID NO: 54329 - protein, 10 aa, synthetic construct
SHWRGDLLLS

SEQ ID NO: 54330 - protein, 10 aa, synthetic construct
SHFRGDRGQI

SEQ ID NO: 54331 - protein, 10 aa, synthetic construct
SHFRGDRQGI

SEQ ID NO: 54332 - protein, 10 aa, synthetic construct
SHFRGDRSVV

SEQ ID NO: 54333 - protein, 10 aa, synthetic construct
SHFRGDRGVV

SEQ ID NO: 54334 - protein, 10 aa, synthetic construct
SHFRGDYVGL

SEQ ID NO: 54335 - protein, 10 aa, synthetic construct
SHFRGDQSTL

SEQ ID NO: 54336 - protein, 10 aa, synthetic construct
SHFRGDRSQT

SEQ ID NO: 54337 - protein, 10 aa, synthetic construct
SHFRGDLLLS

SEQ ID NO: 54338 - protein, 10 aa, synthetic construct
SHKRGDRGQI

SEQ ID NO: 54339 - protein, 10 aa, synthetic construct
QRPRGDRSVV

SEQ ID NO: 54340 - protein, 10 aa, synthetic construct
SHKRGDRQGI

SEQ ID NO: 54341 - protein, 10 aa, synthetic construct
SHKRGDRSVV

SEQ ID NO: 54342 - protein, 10 aa, synthetic construct
SHKRGDRGVV

SEQ ID NO: 54343 - protein, 10 aa, synthetic construct
SHKRGDYVGL

SEQ ID NO: 54344 - protein, 10 aa, synthetic construct
SHKRGDQSTL

SEQ ID NO: 54345 - protein, 10 aa, synthetic construct
SHKRGDRSQT

SEQ ID NO: 54346 - protein, 10 aa, synthetic construct
SHKRGDLLLS

SEQ ID NO: 54347 - protein, 10 aa, synthetic construct
SHRRGDHVNL

SEQ ID NO: 54348 - protein, 10 aa, synthetic construct
SHRRGDRDYL

SEQ ID NO: 54349 - protein, 10 aa, synthetic construct
SHRRGDYSSV

SEQ ID NO: 54350 - protein, 10 aa, synthetic construct
QRPRGDRGVV

SEQ ID NO: 54351 - protein, 10 aa, synthetic construct
SHRRGDLTVT

SEQ ID NO: 54352 - protein, 10 aa, synthetic construct
SHRRGDLIGR

SEQ ID NO: 54353 - protein, 10 aa, synthetic construct
SHHRGDHGVL

SEQ ID NO: 54354 - protein, 10 aa, synthetic construct
SHHRGDHVNL

SEQ ID NO: 54355 - protein, 10 aa, synthetic construct
SHHRGDYVGL

SEQ ID NO: 54356 - protein, 10 aa, synthetic construct
SHHRGDYSSV

SEQ ID NO: 54357 - protein, 10 aa, synthetic construct
SHHRGDQSTL

SEQ ID NO: 54358 - protein, 10 aa, synthetic construct
SHHRGDLLLS

SEQ ID NO: 54359 - protein, 10 aa, synthetic construct
SHSRGDHGVL

SEQ ID NO: 54360 - protein, 10 aa, synthetic construct
SHSRGDHVNL

SEQ ID NO: 54361 - protein, 10 aa, synthetic construct
QRPRGDRSQT

SEQ ID NO: 54362 - protein, 10 aa, synthetic construct
SHSRGDYVGL

SEQ ID NO: 54363 - protein, 10 aa, synthetic construct
SHSRGDYSSV

SEQ ID NO: 54364 - protein, 10 aa, synthetic construct
SHSRGDQSTL

SEQ ID NO: 54365 - protein, 10 aa, synthetic construct
SHSRGDLLLS

SEQ ID NO: 54366 - protein, 10 aa, synthetic construct
SHTRGDHGVL

SEQ ID NO: 54367 - protein, 10 aa, synthetic construct
SHTRGDHVNL

SEQ ID NO: 54368 - protein, 10 aa, synthetic construct
SHTRGDYVGL

SEQ ID NO: 54369 - protein, 10 aa, synthetic construct
SHTRGDYSSV

SEQ ID NO: 54370 - protein, 10 aa, synthetic construct
SHTRGDQSTL

SEQ ID NO: 54371 - protein, 10 aa, synthetic construct
SHTRGDLLLS

SEQ ID NO: 54372 - protein, 10 aa, synthetic construct
QRRRGDRGQI

SEQ ID NO: 54373 - protein, 10 aa, synthetic construct
SHYRGDRGQI

SEQ ID NO: 54374 - protein, 10 aa, synthetic construct
SHYRGDRQGI

SEQ ID NO: 54375 - protein, 10 aa, synthetic construct
SHYRGDRSVV

SEQ ID NO: 54376 - protein, 10 aa, synthetic construct
SHYRGDRGVV

SEQ ID NO: 54377 - protein, 10 aa, synthetic construct
SHYRGDYVGL

SEQ ID NO: 54378 - protein, 10 aa, synthetic construct
SHYRGDQSTL

SEQ ID NO: 54379 - protein, 10 aa, synthetic construct
SHYRGDRSQT

SEQ ID NO: 54380 - protein, 10 aa, synthetic construct
SHYRGDLLLS

SEQ ID NO: 54381 - protein, 10 aa, synthetic construct
SHNRGDRGQI

SEQ ID NO: 54382 - protein, 10 aa, synthetic construct
SHNRGDRQGI

SEQ ID NO: 54383 - protein, 10 aa, synthetic construct
QRRRGDRQGI

SEQ ID NO: 54384 - protein, 10 aa, synthetic construct
SHNRGDRSVV

SEQ ID NO: 54385 - protein, 10 aa, synthetic construct
SHNRGDRGVV

SEQ ID NO: 54386 - protein, 10 aa, synthetic construct
SHNRGDYVGL

SEQ ID NO: 54387 - protein, 10 aa, synthetic construct
SHNRGDQSTL

SEQ ID NO: 54388 - protein, 10 aa, synthetic construct
SHNRGDRSQT

SEQ ID NO: 54389 - protein, 10 aa, synthetic construct
SHNRGDLLLS

SEQ ID NO: 54390 - protein, 10 aa, synthetic construct
SHQRGDHGVL

SEQ ID NO: 54391 - protein, 10 aa, synthetic construct
SHQRGDHVNL

SEQ ID NO: 54392 - protein, 10 aa, synthetic construct
SHQRGDYVGL

SEQ ID NO: 54393 - protein, 10 aa, synthetic construct
SHQRGDYSSV

SEQ ID NO: 54394 - protein, 10 aa, synthetic construct
QRRRGDRSVV

SEQ ID NO: 54395 - protein, 10 aa, synthetic construct
SHQRGDQSTL

SEQ ID NO: 54396 - protein, 10 aa, synthetic construct
SHQRGDLLLS

SEQ ID NO: 54397 - protein, 10 aa, synthetic construct
SHDRGDHGVL

SEQ ID NO: 54398 - protein, 10 aa, synthetic construct
SHDRGDHVNL

SEQ ID NO: 54399 - protein, 10 aa, synthetic construct
SHDRGDYVGL

SEQ ID NO: 54400 - protein, 10 aa, synthetic construct
SHDRGDYSSV

SEQ ID NO: 54401 - protein, 10 aa, synthetic construct
SHDRGDQSTL

SEQ ID NO: 54402 - protein, 10 aa, synthetic construct
SHDRGDLLLS

SEQ ID NO: 54403 - protein, 10 aa, synthetic construct
SHERGDHGVL

SEQ ID NO: 54404 - protein, 10 aa, synthetic construct
SHERGDHVNL

SEQ ID NO: 54405 - protein, 10 aa, synthetic construct
QKKRGDRDYL

SEQ ID NO: 54406 - protein, 10 aa, synthetic construct
QRRRGDRGVV

SEQ ID NO: 54407 - protein, 10 aa, synthetic construct
SHERGDYVGL

SEQ ID NO: 54408 - protein, 10 aa, synthetic construct
SHERGDYSSV

SEQ ID NO: 54409 - protein, 10 aa, synthetic construct
SHERGDQSTL

SEQ ID NO: 54410 - protein, 10 aa, synthetic construct
SHERGDLLLS

SEQ ID NO: 54411 - protein, 10 aa, synthetic construct
SSGRGDYNSL

SEQ ID NO: 54412 - protein, 10 aa, synthetic construct
SSGRGDYTSV

SEQ ID NO: 54413 - protein, 10 aa, synthetic construct
SSGRGDYTSM

SEQ ID NO: 54414 - protein, 10 aa, synthetic construct
SSGRGDFQNT

SEQ ID NO: 54415 - protein, 10 aa, synthetic construct
SSARGDYNSL

SEQ ID NO: 54416 - protein, 10 aa, synthetic construct
SSARGDYTSV

SEQ ID NO: 54417 - protein, 10 aa, synthetic construct
QRRRGDRSQT

SEQ ID NO: 54418 - protein, 10 aa, synthetic construct
SSARGDYTSM

SEQ ID NO: 54419 - protein, 10 aa, synthetic construct
SSARGDFQNT

SEQ ID NO: 54420 - protein, 10 aa, synthetic construct
SSVRGDRDYL

SEQ ID NO: 54421 - protein, 10 aa, synthetic construct
SSVRGDYTSV

SEQ ID NO: 54422 - protein, 10 aa, synthetic construct
SSVRGDLTVT

SEQ ID NO: 54423 - protein, 10 aa, synthetic construct
SSVRGDLIGR

SEQ ID NO: 54424 - protein, 10 aa, synthetic construct
SSLRGDRDYL

SEQ ID NO: 54425 - protein, 10 aa, synthetic construct
SSLRGDYTSV

SEQ ID NO: 54426 - protein, 10 aa, synthetic construct
SSLRGDLTVT

SEQ ID NO: 54427 - protein, 10 aa, synthetic construct
SSLRGDLIGR

SEQ ID NO: 54428 - protein, 10 aa, synthetic construct
QSGRGDRGQI

SEQ ID NO: 54429 - protein, 10 aa, synthetic construct
SSIRGDHGVL

SEQ ID NO: 54430 - protein, 10 aa, synthetic construct
SSIRGDHVNL

SEQ ID NO: 54431 - protein, 10 aa, synthetic construct
SSIRGDRDYL

SEQ ID NO: 54432 - protein, 10 aa, synthetic construct
SSIRGDYSSV

SEQ ID NO: 54433 - protein, 10 aa, synthetic construct
SSIRGDLTVT

SEQ ID NO: 54434 - protein, 10 aa, synthetic construct
SSMRGDHGVL

SEQ ID NO: 54435 - protein, 10 aa, synthetic construct
SSMRGDHVNL

SEQ ID NO: 54436 - protein, 10 aa, synthetic construct
SSMRGDRDYL

SEQ ID NO: 54437 - protein, 10 aa, synthetic construct
SSMRGDYSSV

SEQ ID NO: 54438 - protein, 10 aa, synthetic construct
SSMRGDLTVT

SEQ ID NO: 54439 - protein, 10 aa, synthetic construct
QSGRGDRQGI

SEQ ID NO: 54440 - protein, 10 aa, synthetic construct
SSWRGDRDYL

SEQ ID NO: 54441 - protein, 10 aa, synthetic construct
SSWRGDYTSV

SEQ ID NO: 54442 - protein, 10 aa, synthetic construct
SSWRGDLTVT

SEQ ID NO: 54443 - protein, 10 aa, synthetic construct
SSWRGDLIGR

SEQ ID NO: 54444 - protein, 10 aa, synthetic construct
SSFRGDHGVL

SEQ ID NO: 54445 - protein, 10 aa, synthetic construct
SSFRGDHVNL

SEQ ID NO: 54446 - protein, 10 aa, synthetic construct
SSFRGDRDYL

SEQ ID NO: 54447 - protein, 10 aa, synthetic construct
SSFRGDYSSV

SEQ ID NO: 54448 - protein, 10 aa, synthetic construct
SSFRGDLTVT

SEQ ID NO: 54449 - protein, 10 aa, synthetic construct
SSKRGDHGVL

SEQ ID NO: 54450 - protein, 10 aa, synthetic construct
QSGRGDRSVV

SEQ ID NO: 54451 - protein, 10 aa, synthetic construct
SSKRGDHVNL

SEQ ID NO: 54452 - protein, 10 aa, synthetic construct
SSKRGDRDYL

SEQ ID NO: 54453 - protein, 10 aa, synthetic construct
SSKRGDYSSV

SEQ ID NO: 54454 - protein, 10 aa, synthetic construct
SSKRGDLTVT

SEQ ID NO: 54455 - protein, 10 aa, synthetic construct
SSRRGDYNSL

SEQ ID NO: 54456 - protein, 10 aa, synthetic construct
SSRRGDYTSV

SEQ ID NO: 54457 - protein, 10 aa, synthetic construct
SSRRGDYTSM

SEQ ID NO: 54458 - protein, 10 aa, synthetic construct
SSRRGDFQNT

SEQ ID NO: 54459 - protein, 10 aa, synthetic construct
SSHRGDRDYL

SEQ ID NO: 54460 - protein, 10 aa, synthetic construct
SSHRGDYTSV

SEQ ID NO: 54461 - protein, 10 aa, synthetic construct
QSGRGDRGVV

SEQ ID NO: 54462 - protein, 10 aa, synthetic construct
SSHRGDLTVT

SEQ ID NO: 54463 - protein, 10 aa, synthetic construct
SSHRGDLIGR

SEQ ID NO: 54464 - protein, 10 aa, synthetic construct
SSSRGDRDYL

SEQ ID NO: 54465 - protein, 10 aa, synthetic construct
SSSRGDYTSV

SEQ ID NO: 54466 - protein, 10 aa, synthetic construct
SSSRGDLTVT

SEQ ID NO: 54467 - protein, 10 aa, synthetic construct
SSSRGDLIGR

SEQ ID NO: 54468 - protein, 10 aa, synthetic construct
SSTRGDRDYL

SEQ ID NO: 54469 - protein, 10 aa, synthetic construct
SSTRGDYTSV

SEQ ID NO: 54470 - protein, 10 aa, synthetic construct
SSTRGDLTVT

SEQ ID NO: 54471 - protein, 10 aa, synthetic construct
SSTRGDLIGR

SEQ ID NO: 54472 - protein, 10 aa, synthetic construct
QSGRGDRSQT

SEQ ID NO: 54473 - protein, 10 aa, synthetic construct
SSYRGDHGVL

SEQ ID NO: 54474 - protein, 10 aa, synthetic construct
SSYRGDHVNL

SEQ ID NO: 54475 - protein, 10 aa, synthetic construct
SSYRGDRDYL

SEQ ID NO: 54476 - protein, 10 aa, synthetic construct
SSYRGDYSSV

SEQ ID NO: 54477 - protein, 10 aa, synthetic construct
SSYRGDLTVT

SEQ ID NO: 54478 - protein, 10 aa, synthetic construct
SSNRGDHGVL

SEQ ID NO: 54479 - protein, 10 aa, synthetic construct
SSNRGDHVNL

SEQ ID NO: 54480 - protein, 10 aa, synthetic construct
SSNRGDRDYL

SEQ ID NO: 54481 - protein, 10 aa, synthetic construct
SSNRGDYSSV

SEQ ID NO: 54482 - protein, 10 aa, synthetic construct
SSNRGDLTVT

SEQ ID NO: 54483 - protein, 10 aa, synthetic construct
QSARGDRGQI

SEQ ID NO: 54484 - protein, 10 aa, synthetic construct
SSQRGDRDYL

SEQ ID NO: 54485 - protein, 10 aa, synthetic construct
SSQRGDYTSV

SEQ ID NO: 54486 - protein, 10 aa, synthetic construct
SSQRGDLTVT

SEQ ID NO: 54487 - protein, 10 aa, synthetic construct
SSQRGDLIGR

SEQ ID NO: 54488 - protein, 10 aa, synthetic construct
SSDRGDRDYL

SEQ ID NO: 54489 - protein, 10 aa, synthetic construct
SSDRGDYTSV

SEQ ID NO: 54490 - protein, 10 aa, synthetic construct
SSDRGDLTVT

SEQ ID NO: 54491 - protein, 10 aa, synthetic construct
SSDRGDLIGR

SEQ ID NO: 54492 - protein, 10 aa, synthetic construct
SSERGDRDYL

SEQ ID NO: 54493 - protein, 10 aa, synthetic construct
SSERGDYTSV

SEQ ID NO: 54494 - protein, 10 aa, synthetic construct
QSARGDRQGI

SEQ ID NO: 54495 - protein, 10 aa, synthetic construct
SSERGDLTVT

SEQ ID NO: 54496 - protein, 10 aa, synthetic construct
SSERGDLIGR

SEQ ID NO: 54497 - protein, 10 aa, synthetic construct
STGRGDHVNL

SEQ ID NO: 54498 - protein, 10 aa, synthetic construct
STGRGDRDYL

SEQ ID NO: 54499 - protein, 10 aa, synthetic construct
STGRGDYSSV

SEQ ID NO: 54500 - protein, 10 aa, synthetic construct
STGRGDLTVT

SEQ ID NO: 54501 - protein, 10 aa, synthetic construct
STGRGDLIGR

SEQ ID NO: 54502 - protein, 10 aa, synthetic construct
STARGDHVNL

SEQ ID NO: 54503 - protein, 10 aa, synthetic construct
STARGDRDYL

SEQ ID NO: 54504 - protein, 10 aa, synthetic construct
STARGDYSSV

SEQ ID NO: 54505 - protein, 10 aa, synthetic construct
QSARGDRSVV

SEQ ID NO: 54506 - protein, 10 aa, synthetic construct
STARGDLTVT

SEQ ID NO: 54507 - protein, 10 aa, synthetic construct
STARGDLIGR

SEQ ID NO: 54508 - protein, 10 aa, synthetic construct
STVRGDHGVL

SEQ ID NO: 54509 - protein, 10 aa, synthetic construct
STVRGDHVNL

SEQ ID NO: 54510 - protein, 10 aa, synthetic construct
STVRGDYVGL

SEQ ID NO: 54511 - protein, 10 aa, synthetic construct
STVRGDYSSV

SEQ ID NO: 54512 - protein, 10 aa, synthetic construct
STVRGDQSTL

SEQ ID NO: 54513 - protein, 10 aa, synthetic construct
STVRGDLLLS

SEQ ID NO: 54514 - protein, 10 aa, synthetic construct
STPRGDHVNL

SEQ ID NO: 54515 - protein, 10 aa, synthetic construct
STPRGDRDYL

SEQ ID NO: 54516 - protein, 10 aa, synthetic construct
QKKRGDYSSV

SEQ ID NO: 54517 - protein, 10 aa, synthetic construct
QSARGDRGVV

SEQ ID NO: 54518 - protein, 10 aa, synthetic construct
STPRGDYSSV

SEQ ID NO: 54519 - protein, 10 aa, synthetic construct
STPRGDLTVT

SEQ ID NO: 54520 - protein, 10 aa, synthetic construct
STPRGDLIGR

SEQ ID NO: 54521 - protein, 10 aa, synthetic construct
STLRGDHGVL

SEQ ID NO: 54522 - protein, 10 aa, synthetic construct
STLRGDHVNL

SEQ ID NO: 54523 - protein, 10 aa, synthetic construct
STLRGDYVGL

SEQ ID NO: 54524 - protein, 10 aa, synthetic construct
STLRGDYSSV

SEQ ID NO: 54525 - protein, 10 aa, synthetic construct
STLRGDQSTL

SEQ ID NO: 54526 - protein, 10 aa, synthetic construct
STLRGDLLLS

SEQ ID NO: 54527 - protein, 10 aa, synthetic construct
STIRGDRGQI

SEQ ID NO: 54528 - protein, 10 aa, synthetic construct
QSARGDRSQT

SEQ ID NO: 54529 - protein, 10 aa, synthetic construct
STIRGDRQGI

SEQ ID NO: 54530 - protein, 10 aa, synthetic construct
STIRGDRSVV

SEQ ID NO: 54531 - protein, 10 aa, synthetic construct
STIRGDRGVV

SEQ ID NO: 54532 - protein, 10 aa, synthetic construct
STIRGDYVGL

SEQ ID NO: 54533 - protein, 10 aa, synthetic construct
STIRGDQSTL

SEQ ID NO: 54534 - protein, 10 aa, synthetic construct
STIRGDRSQT

SEQ ID NO: 54535 - protein, 10 aa, synthetic construct
STIRGDLLLS

SEQ ID NO: 54536 - protein, 10 aa, synthetic construct
STMRGDRGQI

SEQ ID NO: 54537 - protein, 10 aa, synthetic construct
STMRGDRQGI

SEQ ID NO: 54538 - protein, 10 aa, synthetic construct
STMRGDRSVV

SEQ ID NO: 54539 - protein, 10 aa, synthetic construct
QSRRGDRGQI

SEQ ID NO: 54540 - protein, 10 aa, synthetic construct
STMRGDRGVV

SEQ ID NO: 54541 - protein, 10 aa, synthetic construct
STMRGDYVGL

SEQ ID NO: 54542 - protein, 10 aa, synthetic construct
STMRGDQSTL

SEQ ID NO: 54543 - protein, 10 aa, synthetic construct
STMRGDRSQT

SEQ ID NO: 54544 - protein, 10 aa, synthetic construct
STMRGDLLLS

SEQ ID NO: 54545 - protein, 10 aa, synthetic construct
STWRGDHGVL

SEQ ID NO: 54546 - protein, 10 aa, synthetic construct
STWRGDHVNL

SEQ ID NO: 54547 - protein, 10 aa, synthetic construct
STWRGDYVGL

SEQ ID NO: 54548 - protein, 10 aa, synthetic construct
STWRGDYSSV

SEQ ID NO: 54549 - protein, 10 aa, synthetic construct
STWRGDQSTL

SEQ ID NO: 54550 - protein, 10 aa, synthetic construct
QSRRGDRQGI

SEQ ID NO: 54551 - protein, 10 aa, synthetic construct
STWRGDLLLS

SEQ ID NO: 54552 - protein, 10 aa, synthetic construct
STFRGDRGQI

SEQ ID NO: 54553 - protein, 10 aa, synthetic construct
STFRGDRQGI

SEQ ID NO: 54554 - protein, 10 aa, synthetic construct
STFRGDRSVV

SEQ ID NO: 54555 - protein, 10 aa, synthetic construct
STFRGDRGVV

SEQ ID NO: 54556 - protein, 10 aa, synthetic construct
STFRGDYVGL

SEQ ID NO: 54557 - protein, 10 aa, synthetic construct
STFRGDQSTL

SEQ ID NO: 54558 - protein, 10 aa, synthetic construct
STFRGDRSQT

SEQ ID NO: 54559 - protein, 10 aa, synthetic construct
STFRGDLLLS

SEQ ID NO: 54560 - protein, 10 aa, synthetic construct
STKRGDRGQI

SEQ ID NO: 54561 - protein, 10 aa, synthetic construct
QSRRGDRSVV

SEQ ID NO: 54562 - protein, 10 aa, synthetic construct
STKRGDRQGI

SEQ ID NO: 54563 - protein, 10 aa, synthetic construct
STKRGDRSVV

SEQ ID NO: 54564 - protein, 10 aa, synthetic construct
STKRGDRGVV

SEQ ID NO: 54565 - protein, 10 aa, synthetic construct
STKRGDYVGL

SEQ ID NO: 54566 - protein, 10 aa, synthetic construct
STKRGDQSTL

SEQ ID NO: 54567 - protein, 10 aa, synthetic construct
STKRGDRSQT

SEQ ID NO: 54568 - protein, 10 aa, synthetic construct
STKRGDLLLS

SEQ ID NO: 54569 - protein, 10 aa, synthetic construct
STRRGDHVNL

SEQ ID NO: 54570 - protein, 10 aa, synthetic construct
STRRGDRDYL

SEQ ID NO: 54571 - protein, 10 aa, synthetic construct
STRRGDYSSV

SEQ ID NO: 54572 - protein, 10 aa, synthetic construct
QSRRGDRGVV

SEQ ID NO: 54573 - protein, 10 aa, synthetic construct
STRRGDLTVT

SEQ ID NO: 54574 - protein, 10 aa, synthetic construct
STRRGDLIGR

SEQ ID NO: 54575 - protein, 10 aa, synthetic construct
STHRGDHGVL

SEQ ID NO: 54576 - protein, 10 aa, synthetic construct
STHRGDHVNL

SEQ ID NO: 54577 - protein, 10 aa, synthetic construct
STHRGDYVGL

SEQ ID NO: 54578 - protein, 10 aa, synthetic construct
STHRGDYSSV

SEQ ID NO: 54579 - protein, 10 aa, synthetic construct
STHRGDQSTL

SEQ ID NO: 54580 - protein, 10 aa, synthetic construct
STHRGDLLLS

SEQ ID NO: 54581 - protein, 10 aa, synthetic construct
STSRGDHGVL

SEQ ID NO: 54582 - protein, 10 aa, synthetic construct
STSRGDHVNL

SEQ ID NO: 54583 - protein, 10 aa, synthetic construct
QSRRGDRSQT

SEQ ID NO: 54584 - protein, 10 aa, synthetic construct
STSRGDYVGL

SEQ ID NO: 54585 - protein, 10 aa, synthetic construct
STSRGDYSSV

SEQ ID NO: 54586 - protein, 10 aa, synthetic construct
STSRGDQSTL

SEQ ID NO: 54587 - protein, 10 aa, synthetic construct
STSRGDLLLS

SEQ ID NO: 54588 - protein, 10 aa, synthetic construct
STTRGDHGVL

SEQ ID NO: 54589 - protein, 10 aa, synthetic construct
STTRGDHVNL

SEQ ID NO: 54590 - protein, 10 aa, synthetic construct
STTRGDYVGL

SEQ ID NO: 54591 - protein, 10 aa, synthetic construct
STTRGDYSSV

SEQ ID NO: 54592 - protein, 10 aa, synthetic construct
STTRGDQSTL

SEQ ID NO: 54593 - protein, 10 aa, synthetic construct
STTRGDLLLS

SEQ ID NO: 54594 - protein, 10 aa, synthetic construct
SGGRGDHGVL

SEQ ID NO: 54595 - protein, 10 aa, synthetic construct
STYRGDRGQI

SEQ ID NO: 54596 - protein, 10 aa, synthetic construct
STYRGDRQGI

SEQ ID NO: 54597 - protein, 10 aa, synthetic construct
STYRGDRSVV

SEQ ID NO: 54598 - protein, 10 aa, synthetic construct
STYRGDRGVV

SEQ ID NO: 54599 - protein, 10 aa, synthetic construct
STYRGDYVGL

SEQ ID NO: 54600 - protein, 10 aa, synthetic construct
STYRGDQSTL

SEQ ID NO: 54601 - protein, 10 aa, synthetic construct
STYRGDRSQT

SEQ ID NO: 54602 - protein, 10 aa, synthetic construct
STYRGDLLLS

SEQ ID NO: 54603 - protein, 10 aa, synthetic construct
STNRGDRGQI

SEQ ID NO: 54604 - protein, 10 aa, synthetic construct
STNRGDRQGI

SEQ ID NO: 54605 - protein, 10 aa, synthetic construct
SGGRGDYVGL

SEQ ID NO: 54606 - protein, 10 aa, synthetic construct
STNRGDRSVV

SEQ ID NO: 54607 - protein, 10 aa, synthetic construct
STNRGDRGVV

SEQ ID NO: 54608 - protein, 10 aa, synthetic construct
STNRGDYVGL

SEQ ID NO: 54609 - protein, 10 aa, synthetic construct
STNRGDQSTL

SEQ ID NO: 54610 - protein, 10 aa, synthetic construct
STNRGDRSQT

SEQ ID NO: 54611 - protein, 10 aa, synthetic construct
STNRGDLLLS

SEQ ID NO: 54612 - protein, 10 aa, synthetic construct
STQRGDHGVL

SEQ ID NO: 54613 - protein, 10 aa, synthetic construct
STQRGDHVNL

SEQ ID NO: 54614 - protein, 10 aa, synthetic construct
STQRGDYVGL

SEQ ID NO: 54615 - protein, 10 aa, synthetic construct
STQRGDYSSV

SEQ ID NO: 54616 - protein, 10 aa, synthetic construct
SGGRGDQSTL

SEQ ID NO: 54617 - protein, 10 aa, synthetic construct
STQRGDQSTL

SEQ ID NO: 54618 - protein, 10 aa, synthetic construct
STQRGDLLLS

SEQ ID NO: 54619 - protein, 10 aa, synthetic construct
STDRGDHGVL

SEQ ID NO: 54620 - protein, 10 aa, synthetic construct
STDRGDHVNL

SEQ ID NO: 54621 - protein, 10 aa, synthetic construct
STDRGDYVGL

SEQ ID NO: 54622 - protein, 10 aa, synthetic construct
STDRGDYSSV

SEQ ID NO: 54623 - protein, 10 aa, synthetic construct
STDRGDQSTL

SEQ ID NO: 54624 - protein, 10 aa, synthetic construct
STDRGDLLLS

SEQ ID NO: 54625 - protein, 10 aa, synthetic construct
STERGDHGVL

SEQ ID NO: 54626 - protein, 10 aa, synthetic construct
STERGDHVNL

SEQ ID NO: 54627 - protein, 10 aa, synthetic construct
QKKRGDLTVT

SEQ ID NO: 54628 - protein, 10 aa, synthetic construct
SGGRGDLLLS

SEQ ID NO: 54629 - protein, 10 aa, synthetic construct
STERGDYVGL

SEQ ID NO: 54630 - protein, 10 aa, synthetic construct
STERGDYSSV

SEQ ID NO: 54631 - protein, 10 aa, synthetic construct
STERGDQSTL

SEQ ID NO: 54632 - protein, 10 aa, synthetic construct
STERGDLLLS

SEQ ID NO: 54633 - protein, 10 aa, synthetic construct
SYGRGDHGVL

SEQ ID NO: 54634 - protein, 10 aa, synthetic construct
SYGRGDHVNL

SEQ ID NO: 54635 - protein, 10 aa, synthetic construct
SYGRGDYVGL

SEQ ID NO: 54636 - protein, 10 aa, synthetic construct
SYGRGDYSSV

SEQ ID NO: 54637 - protein, 10 aa, synthetic construct
SYGRGDQSTL

SEQ ID NO: 54638 - protein, 10 aa, synthetic construct
SYGRGDLLLS

SEQ ID NO: 54639 - protein, 10 aa, synthetic construct
SGARGDHGVL

SEQ ID NO: 54640 - protein, 10 aa, synthetic construct
SYARGDHGVL

SEQ ID NO: 54641 - protein, 10 aa, synthetic construct
SYARGDHVNL

SEQ ID NO: 54642 - protein, 10 aa, synthetic construct
SYARGDYVGL

SEQ ID NO: 54643 - protein, 10 aa, synthetic construct
SYARGDYSSV

SEQ ID NO: 54644 - protein, 10 aa, synthetic construct
SYARGDQSTL

SEQ ID NO: 54645 - protein, 10 aa, synthetic construct
SYARGDLLLS

SEQ ID NO: 54646 - protein, 10 aa, synthetic construct
SYVRGDRGQI

SEQ ID NO: 54647 - protein, 10 aa, synthetic construct
SYVRGDRQGI

SEQ ID NO: 54648 - protein, 10 aa, synthetic construct
SYVRGDRSVV

SEQ ID NO: 54649 - protein, 10 aa, synthetic construct
SYVRGDRGVV

SEQ ID NO: 54650 - protein, 10 aa, synthetic construct
SGARGDYVGL

SEQ ID NO: 54651 - protein, 10 aa, synthetic construct
SYVRGDYVGL

SEQ ID NO: 54652 - protein, 10 aa, synthetic construct
SYVRGDQSTL

SEQ ID NO: 54653 - protein, 10 aa, synthetic construct
SYVRGDRSQT

SEQ ID NO: 54654 - protein, 10 aa, synthetic construct
SYVRGDLLLS

SEQ ID NO: 54655 - protein, 10 aa, synthetic construct
SYPRGDHGVL

SEQ ID NO: 54656 - protein, 10 aa, synthetic construct
SYPRGDHVNL

SEQ ID NO: 54657 - protein, 10 aa, synthetic construct
SYPRGDYVGL

SEQ ID NO: 54658 - protein, 10 aa, synthetic construct
SYPRGDYSSV

SEQ ID NO: 54659 - protein, 10 aa, synthetic construct
SYPRGDQSTL

SEQ ID NO: 54660 - protein, 10 aa, synthetic construct
SYPRGDLLLS

SEQ ID NO: 54661 - protein, 10 aa, synthetic construct
SGARGDQSTL

SEQ ID NO: 54662 - protein, 10 aa, synthetic construct
SYLRGDRGQI

SEQ ID NO: 54663 - protein, 10 aa, synthetic construct
SYLRGDRQGI

SEQ ID NO: 54664 - protein, 10 aa, synthetic construct
SYLRGDRSVV

SEQ ID NO: 54665 - protein, 10 aa, synthetic construct
SYLRGDRGVV

SEQ ID NO: 54666 - protein, 10 aa, synthetic construct
SYLRGDYVGL

SEQ ID NO: 54667 - protein, 10 aa, synthetic construct
SYLRGDQSTL

SEQ ID NO: 54668 - protein, 10 aa, synthetic construct
SYLRGDRSQT

SEQ ID NO: 54669 - protein, 10 aa, synthetic construct
SYLRGDLLLS

SEQ ID NO: 54670 - protein, 10 aa, synthetic construct
SYIRGDRSVV

SEQ ID NO: 54671 - protein, 10 aa, synthetic construct
SYIRGDRSQT

SEQ ID NO: 54672 - protein, 10 aa, synthetic construct
SGARGDLLLS

SEQ ID NO: 54673 - protein, 10 aa, synthetic construct
SYMRGDRSVV

SEQ ID NO: 54674 - protein, 10 aa, synthetic construct
SYMRGDRSQT

SEQ ID NO: 54675 - protein, 10 aa, synthetic construct
SYWRGDRGQI

SEQ ID NO: 54676 - protein, 10 aa, synthetic construct
SYWRGDRQGI

SEQ ID NO: 54677 - protein, 10 aa, synthetic construct
SYWRGDRSVV

SEQ ID NO: 54678 - protein, 10 aa, synthetic construct
SYWRGDRGVV

SEQ ID NO: 54679 - protein, 10 aa, synthetic construct
SYWRGDYVGL

SEQ ID NO: 54680 - protein, 10 aa, synthetic construct
SYWRGDQSTL

SEQ ID NO: 54681 - protein, 10 aa, synthetic construct
SYWRGDRSQT

SEQ ID NO: 54682 - protein, 10 aa, synthetic construct
SYWRGDLLLS

SEQ ID NO: 54683 - protein, 10 aa, synthetic construct
SGVRGDRGQI

SEQ ID NO: 54684 - protein, 10 aa, synthetic construct
SYFRGDRSVV

SEQ ID NO: 54685 - protein, 10 aa, synthetic construct
SYFRGDRSQT

SEQ ID NO: 54686 - protein, 10 aa, synthetic construct
SYKRGDRSVV

SEQ ID NO: 54687 - protein, 10 aa, synthetic construct
SYKRGDRSQT

SEQ ID NO: 54688 - protein, 10 aa, synthetic construct
SYRRGDHGVL

SEQ ID NO: 54689 - protein, 10 aa, synthetic construct
SYRRGDHVNL

SEQ ID NO: 54690 - protein, 10 aa, synthetic construct
SYRRGDYVGL

SEQ ID NO: 54691 - protein, 10 aa, synthetic construct
SYRRGDYSSV

SEQ ID NO: 54692 - protein, 10 aa, synthetic construct
SYRRGDQSTL

SEQ ID NO: 54693 - protein, 10 aa, synthetic construct
SYRRGDLLLS

SEQ ID NO: 54694 - protein, 10 aa, synthetic construct
SGVRGDRQGI

SEQ ID NO: 54695 - protein, 10 aa, synthetic construct
SYHRGDRGQI

SEQ ID NO: 54696 - protein, 10 aa, synthetic construct
SYHRGDRQGI

SEQ ID NO: 54697 - protein, 10 aa, synthetic construct
SYHRGDRSVV

SEQ ID NO: 54698 - protein, 10 aa, synthetic construct
SYHRGDRGVV

SEQ ID NO: 54699 - protein, 10 aa, synthetic construct
SYHRGDYVGL

SEQ ID NO: 54700 - protein, 10 aa, synthetic construct
SYHRGDQSTL

SEQ ID NO: 54701 - protein, 10 aa, synthetic construct
SYHRGDRSQT

SEQ ID NO: 54702 - protein, 10 aa, synthetic construct
SYHRGDLLLS

SEQ ID NO: 54703 - protein, 10 aa, synthetic construct
SYSRGDRGQI

SEQ ID NO: 54704 - protein, 10 aa, synthetic construct
SYSRGDRQGI

SEQ ID NO: 54705 - protein, 10 aa, synthetic construct
SGVRGDRSVV

SEQ ID NO: 54706 - protein, 10 aa, synthetic construct
SYSRGDRSVV

SEQ ID NO: 54707 - protein, 10 aa, synthetic construct
SYSRGDRGVV

SEQ ID NO: 54708 - protein, 10 aa, synthetic construct
SYSRGDYVGL

SEQ ID NO: 54709 - protein, 10 aa, synthetic construct
SYSRGDQSTL

SEQ ID NO: 54710 - protein, 10 aa, synthetic construct
SYSRGDRSQT

SEQ ID NO: 54711 - protein, 10 aa, synthetic construct
SYSRGDLLLS

SEQ ID NO: 54712 - protein, 10 aa, synthetic construct
SYTRGDRGQI

SEQ ID NO: 54713 - protein, 10 aa, synthetic construct
SYTRGDRQGI

SEQ ID NO: 54714 - protein, 10 aa, synthetic construct
SYTRGDRSVV

SEQ ID NO: 54715 - protein, 10 aa, synthetic construct
SYTRGDRGVV

SEQ ID NO: 54716 - protein, 10 aa, synthetic construct
SGVRGDRGVV

SEQ ID NO: 54717 - protein, 10 aa, synthetic construct
SYTRGDYVGL

SEQ ID NO: 54718 - protein, 10 aa, synthetic construct
SYTRGDQSTL

SEQ ID NO: 54719 - protein, 10 aa, synthetic construct
SYTRGDRSQT

SEQ ID NO: 54720 - protein, 10 aa, synthetic construct
SYTRGDLLLS

SEQ ID NO: 54721 - protein, 10 aa, synthetic construct
SYYRGDRSVV

SEQ ID NO: 54722 - protein, 10 aa, synthetic construct
SYYRGDRSQT

SEQ ID NO: 54723 - protein, 10 aa, synthetic construct
SYNRGDRSVV

SEQ ID NO: 54724 - protein, 10 aa, synthetic construct
SYNRGDRSQT

SEQ ID NO: 54725 - protein, 10 aa, synthetic construct
SYQRGDRGQI

SEQ ID NO: 54726 - protein, 10 aa, synthetic construct
SYQRGDRQGI

SEQ ID NO: 54727 - protein, 10 aa, synthetic construct
SGVRGDRSQT

SEQ ID NO: 54728 - protein, 10 aa, synthetic construct
SYQRGDRSVV

SEQ ID NO: 54729 - protein, 10 aa, synthetic construct
SYQRGDRGVV

SEQ ID NO: 54730 - protein, 10 aa, synthetic construct
SYQRGDYVGL

SEQ ID NO: 54731 - protein, 10 aa, synthetic construct
SYQRGDQSTL

SEQ ID NO: 54732 - protein, 10 aa, synthetic construct
SYQRGDRSQT

SEQ ID NO: 54733 - protein, 10 aa, synthetic construct
SYQRGDLLLS

SEQ ID NO: 54734 - protein, 10 aa, synthetic construct
SYDRGDRGQI

SEQ ID NO: 54735 - protein, 10 aa, synthetic construct
SYDRGDRQGI

SEQ ID NO: 54736 - protein, 10 aa, synthetic construct
SYDRGDRSVV

SEQ ID NO: 54737 - protein, 10 aa, synthetic construct
SYDRGDRGVV

SEQ ID NO: 54738 - protein, 10 aa, synthetic construct
QKNRGDHVNL

SEQ ID NO: 54739 - protein, 10 aa, synthetic construct
SGPRGDHGVL

SEQ ID NO: 54740 - protein, 10 aa, synthetic construct
SYDRGDYVGL

SEQ ID NO: 54741 - protein, 10 aa, synthetic construct
SYDRGDQSTL

SEQ ID NO: 54742 - protein, 10 aa, synthetic construct
SYDRGDRSQT

SEQ ID NO: 54743 - protein, 10 aa, synthetic construct
SYDRGDLLLS

SEQ ID NO: 54744 - protein, 10 aa, synthetic construct
SYERGDRGQI

SEQ ID NO: 54745 - protein, 10 aa, synthetic construct
SYERGDRQGI

SEQ ID NO: 54746 - protein, 10 aa, synthetic construct
SYERGDRSVV

SEQ ID NO: 54747 - protein, 10 aa, synthetic construct
SYERGDRGVV

SEQ ID NO: 54748 - protein, 10 aa, synthetic construct
SYERGDYVGL

SEQ ID NO: 54749 - protein, 10 aa, synthetic construct
SYERGDQSTL

SEQ ID NO: 54750 - protein, 10 aa, synthetic construct
SGPRGDYVGL

SEQ ID NO: 54751 - protein, 10 aa, synthetic construct
SYERGDRSQT

SEQ ID NO: 54752 - protein, 10 aa, synthetic construct
SYERGDLLLS

SEQ ID NO: 54753 - protein, 10 aa, synthetic construct
SNGRGDHGVL

SEQ ID NO: 54754 - protein, 10 aa, synthetic construct
SNGRGDHVNL

SEQ ID NO: 54755 - protein, 10 aa, synthetic construct
SNGRGDYVGL

SEQ ID NO: 54756 - protein, 10 aa, synthetic construct
SNGRGDYSSV

SEQ ID NO: 54757 - protein, 10 aa, synthetic construct
SNGRGDQSTL

SEQ ID NO: 54758 - protein, 10 aa, synthetic construct
SNGRGDLLLS

SEQ ID NO: 54759 - protein, 10 aa, synthetic construct
SNARGDHGVL

SEQ ID NO: 54760 - protein, 10 aa, synthetic construct
SNARGDHVNL

SEQ ID NO: 54761 - protein, 10 aa, synthetic construct
SGPRGDQSTL

SEQ ID NO: 54762 - protein, 10 aa, synthetic construct
SNARGDYVGL

SEQ ID NO: 54763 - protein, 10 aa, synthetic construct
SNARGDYSSV

SEQ ID NO: 54764 - protein, 10 aa, synthetic construct
SNARGDQSTL

SEQ ID NO: 54765 - protein, 10 aa, synthetic construct
SNARGDLLLS

SEQ ID NO: 54766 - protein, 10 aa, synthetic construct
SNVRGDRGQI

SEQ ID NO: 54767 - protein, 10 aa, synthetic construct
SNVRGDRQGI

SEQ ID NO: 54768 - protein, 10 aa, synthetic construct
SNVRGDRSVV

SEQ ID NO: 54769 - protein, 10 aa, synthetic construct
SNVRGDRGVV

SEQ ID NO: 54770 - protein, 10 aa, synthetic construct
SNVRGDYVGL

SEQ ID NO: 54771 - protein, 10 aa, synthetic construct
SNVRGDQSTL

SEQ ID NO: 54772 - protein, 10 aa, synthetic construct
SGPRGDLLLS

SEQ ID NO: 54773 - protein, 10 aa, synthetic construct
SNVRGDRSQT

SEQ ID NO: 54774 - protein, 10 aa, synthetic construct
SNVRGDLLLS

SEQ ID NO: 54775 - protein, 10 aa, synthetic construct
SNPRGDHGVL

SEQ ID NO: 54776 - protein, 10 aa, synthetic construct
SNPRGDHVNL

SEQ ID NO: 54777 - protein, 10 aa, synthetic construct
SNPRGDYVGL

SEQ ID NO: 54778 - protein, 10 aa, synthetic construct
SNPRGDYSSV

SEQ ID NO: 54779 - protein, 10 aa, synthetic construct
SNPRGDQSTL

SEQ ID NO: 54780 - protein, 10 aa, synthetic construct
SNPRGDLLLS

SEQ ID NO: 54781 - protein, 10 aa, synthetic construct
SNLRGDRGQI

SEQ ID NO: 54782 - protein, 10 aa, synthetic construct
SNLRGDRQGI

SEQ ID NO: 54783 - protein, 10 aa, synthetic construct
SGLRGDRGQI

SEQ ID NO: 54784 - protein, 10 aa, synthetic construct
SNLRGDRSVV

SEQ ID NO: 54785 - protein, 10 aa, synthetic construct
SNLRGDRGVV

SEQ ID NO: 54786 - protein, 10 aa, synthetic construct
SNLRGDYVGL

SEQ ID NO: 54787 - protein, 10 aa, synthetic construct
SNLRGDQSTL

SEQ ID NO: 54788 - protein, 10 aa, synthetic construct
SNLRGDRSQT

SEQ ID NO: 54789 - protein, 10 aa, synthetic construct
SNLRGDLLLS

SEQ ID NO: 54790 - protein, 10 aa, synthetic construct
SNIRGDRSVV

SEQ ID NO: 54791 - protein, 10 aa, synthetic construct
SNIRGDRSQT

SEQ ID NO: 54792 - protein, 10 aa, synthetic construct
SNMRGDRSVV

SEQ ID NO: 54793 - protein, 10 aa, synthetic construct
SNMRGDRSQT

SEQ ID NO: 54794 - protein, 10 aa, synthetic construct
SGLRGDRQGI

SEQ ID NO: 54795 - protein, 10 aa, synthetic construct
SNWRGDRGQI

SEQ ID NO: 54796 - protein, 10 aa, synthetic construct
SNWRGDRQGI

SEQ ID NO: 54797 - protein, 10 aa, synthetic construct
SNWRGDRSVV

SEQ ID NO: 54798 - protein, 10 aa, synthetic construct
SNWRGDRGVV

SEQ ID NO: 54799 - protein, 10 aa, synthetic construct
SNWRGDYVGL

SEQ ID NO: 54800 - protein, 10 aa, synthetic construct
SNWRGDQSTL

SEQ ID NO: 54801 - protein, 10 aa, synthetic construct
SNWRGDRSQT

SEQ ID NO: 54802 - protein, 10 aa, synthetic construct
SNWRGDLLLS

SEQ ID NO: 54803 - protein, 10 aa, synthetic construct
SNFRGDRSVV

SEQ ID NO: 54804 - protein, 10 aa, synthetic construct
SNFRGDRSQT

SEQ ID NO: 54805 - protein, 10 aa, synthetic construct
SGLRGDRSVV

SEQ ID NO: 54806 - protein, 10 aa, synthetic construct
SNKRGDRSVV

SEQ ID NO: 54807 - protein, 10 aa, synthetic construct
SNKRGDRSQT

SEQ ID NO: 54808 - protein, 10 aa, synthetic construct
SNRRGDHGVL

SEQ ID NO: 54809 - protein, 10 aa, synthetic construct
SNRRGDHVNL

SEQ ID NO: 54810 - protein, 10 aa, synthetic construct
SNRRGDYVGL

SEQ ID NO: 54811 - protein, 10 aa, synthetic construct
SNRRGDYSSV

SEQ ID NO: 54812 - protein, 10 aa, synthetic construct
SNRRGDQSTL

SEQ ID NO: 54813 - protein, 10 aa, synthetic construct
SNRRGDLLLS

SEQ ID NO: 54814 - protein, 10 aa, synthetic construct
SNHRGDRGQI

SEQ ID NO: 54815 - protein, 10 aa, synthetic construct
SNHRGDRQGI

SEQ ID NO: 54816 - protein, 10 aa, synthetic construct
SGLRGDRGVV

SEQ ID NO: 54817 - protein, 10 aa, synthetic construct
SNHRGDRSVV

SEQ ID NO: 54818 - protein, 10 aa, synthetic construct
SNHRGDRGVV

SEQ ID NO: 54819 - protein, 10 aa, synthetic construct
SNHRGDYVGL

SEQ ID NO: 54820 - protein, 10 aa, synthetic construct
SNHRGDQSTL

SEQ ID NO: 54821 - protein, 10 aa, synthetic construct
SNHRGDRSQT

SEQ ID NO: 54822 - protein, 10 aa, synthetic construct
SNHRGDLLLS

SEQ ID NO: 54823 - protein, 10 aa, synthetic construct
SNSRGDRGQI

SEQ ID NO: 54824 - protein, 10 aa, synthetic construct
SNSRGDRQGI

SEQ ID NO: 54825 - protein, 10 aa, synthetic construct
SNSRGDRSVV

SEQ ID NO: 54826 - protein, 10 aa, synthetic construct
SNSRGDRGVV

SEQ ID NO: 54827 - protein, 10 aa, synthetic construct
SGLRGDRSQT

SEQ ID NO: 54828 - protein, 10 aa, synthetic construct
SNSRGDYVGL

SEQ ID NO: 54829 - protein, 10 aa, synthetic construct
SNSRGDQSTL

SEQ ID NO: 54830 - protein, 10 aa, synthetic construct
SNSRGDRSQT

SEQ ID NO: 54831 - protein, 10 aa, synthetic construct
SNSRGDLLLS

SEQ ID NO: 54832 - protein, 10 aa, synthetic construct
SNTRGDRGQI

SEQ ID NO: 54833 - protein, 10 aa, synthetic construct
SNTRGDRQGI

SEQ ID NO: 54834 - protein, 10 aa, synthetic construct
SNTRGDRSVV

SEQ ID NO: 54835 - protein, 10 aa, synthetic construct
SNTRGDRGVV

SEQ ID NO: 54836 - protein, 10 aa, synthetic construct
SNTRGDYVGL

SEQ ID NO: 54837 - protein, 10 aa, synthetic construct
SNTRGDQSTL

SEQ ID NO: 54838 - protein, 10 aa, synthetic construct
SGWRGDRGQI

SEQ ID NO: 54839 - protein, 10 aa, synthetic construct
SNTRGDRSQT

SEQ ID NO: 54840 - protein, 10 aa, synthetic construct
SNTRGDLLLS

SEQ ID NO: 54841 - protein, 10 aa, synthetic construct
SNYRGDRSVV

SEQ ID NO: 54842 - protein, 10 aa, synthetic construct
SNYRGDRSQT

SEQ ID NO: 54843 - protein, 10 aa, synthetic construct
SNNRGDRSVV

SEQ ID NO: 54844 - protein, 10 aa, synthetic construct
SNNRGDRSQT

SEQ ID NO: 54845 - protein, 10 aa, synthetic construct
SNQRGDRGQI

SEQ ID NO: 54846 - protein, 10 aa, synthetic construct
SNQRGDRQGI

SEQ ID NO: 54847 - protein, 10 aa, synthetic construct
SNQRGDRSVV

SEQ ID NO: 54848 - protein, 10 aa, synthetic construct
SNQRGDRGVV

SEQ ID NO: 54849 - protein, 10 aa, synthetic construct
QKNRGDRDYL

SEQ ID NO: 54850 - protein, 10 aa, synthetic construct
SGWRGDRQGI

SEQ ID NO: 54851 - protein, 10 aa, synthetic construct
SNQRGDYVGL

SEQ ID NO: 54852 - protein, 10 aa, synthetic construct
SNQRGDQSTL

SEQ ID NO: 54853 - protein, 10 aa, synthetic construct
SNQRGDRSQT

SEQ ID NO: 54854 - protein, 10 aa, synthetic construct
SNQRGDLLLS

SEQ ID NO: 54855 - protein, 10 aa, synthetic construct
SNDRGDRGQI

SEQ ID NO: 54856 - protein, 10 aa, synthetic construct
SNDRGDRQGI

SEQ ID NO: 54857 - protein, 10 aa, synthetic construct
SNDRGDRSVV

SEQ ID NO: 54858 - protein, 10 aa, synthetic construct
SNDRGDRGVV

SEQ ID NO: 54859 - protein, 10 aa, synthetic construct
SNDRGDYVGL

SEQ ID NO: 54860 - protein, 10 aa, synthetic construct
SNDRGDQSTL

SEQ ID NO: 54861 - protein, 10 aa, synthetic construct
SGWRGDRSVV

SEQ ID NO: 54862 - protein, 10 aa, synthetic construct
SNDRGDRSQT

SEQ ID NO: 54863 - protein, 10 aa, synthetic construct
SNDRGDLLLS

SEQ ID NO: 54864 - protein, 10 aa, synthetic construct
SNERGDRGQI

SEQ ID NO: 54865 - protein, 10 aa, synthetic construct
SNERGDRQGI

SEQ ID NO: 54866 - protein, 10 aa, synthetic construct
SNERGDRSVV

SEQ ID NO: 54867 - protein, 10 aa, synthetic construct
SNERGDRGVV

SEQ ID NO: 54868 - protein, 10 aa, synthetic construct
SNERGDYVGL

SEQ ID NO: 54869 - protein, 10 aa, synthetic construct
SNERGDQSTL

SEQ ID NO: 54870 - protein, 10 aa, synthetic construct
SNERGDRSQT

SEQ ID NO: 54871 - protein, 10 aa, synthetic construct
SNERGDLLLS

SEQ ID NO: 54872 - protein, 10 aa, synthetic construct
SGWRGDRGVV

SEQ ID NO: 54873 - protein, 10 aa, synthetic construct
SQGRGDHVNL

SEQ ID NO: 54874 - protein, 10 aa, synthetic construct
SQGRGDRDYL

SEQ ID NO: 54875 - protein, 10 aa, synthetic construct
SQGRGDYSSV

SEQ ID NO: 54876 - protein, 10 aa, synthetic construct
SQGRGDLTVT

SEQ ID NO: 54877 - protein, 10 aa, synthetic construct
SQGRGDLIGR

SEQ ID NO: 54878 - protein, 10 aa, synthetic construct
SQARGDHVNL

SEQ ID NO: 54879 - protein, 10 aa, synthetic construct
SQARGDRDYL

SEQ ID NO: 54880 - protein, 10 aa, synthetic construct
SQARGDYSSV

SEQ ID NO: 54881 - protein, 10 aa, synthetic construct
SQARGDLTVT

SEQ ID NO: 54882 - protein, 10 aa, synthetic construct
SQARGDLIGR

SEQ ID NO: 54883 - protein, 10 aa, synthetic construct
SGWRGDRSQT

SEQ ID NO: 54884 - protein, 10 aa, synthetic construct
SQVRGDHGVL

SEQ ID NO: 54885 - protein, 10 aa, synthetic construct
SQVRGDHVNL

SEQ ID NO: 54886 - protein, 10 aa, synthetic construct
SQVRGDYVGL

SEQ ID NO: 54887 - protein, 10 aa, synthetic construct
SQVRGDYSSV

SEQ ID NO: 54888 - protein, 10 aa, synthetic construct
SQVRGDQSTL

SEQ ID NO: 54889 - protein, 10 aa, synthetic construct
SQVRGDLLLS

SEQ ID NO: 54890 - protein, 10 aa, synthetic construct
SQPRGDHVNL

SEQ ID NO: 54891 - protein, 10 aa, synthetic construct
SQPRGDRDYL

SEQ ID NO: 54892 - protein, 10 aa, synthetic construct
SQPRGDYSSV

SEQ ID NO: 54893 - protein, 10 aa, synthetic construct
SQPRGDLTVT

SEQ ID NO: 54894 - protein, 10 aa, synthetic construct
SGRRGDHGVL

SEQ ID NO: 54895 - protein, 10 aa, synthetic construct
SQPRGDLIGR

SEQ ID NO: 54896 - protein, 10 aa, synthetic construct
SQLRGDHGVL

SEQ ID NO: 54897 - protein, 10 aa, synthetic construct
SQLRGDHVNL

SEQ ID NO: 54898 - protein, 10 aa, synthetic construct
SQLRGDYVGL

SEQ ID NO: 54899 - protein, 10 aa, synthetic construct
SQLRGDYSSV

SEQ ID NO: 54900 - protein, 10 aa, synthetic construct
SQLRGDQSTL

SEQ ID NO: 54901 - protein, 10 aa, synthetic construct
SQLRGDLLLS

SEQ ID NO: 54902 - protein, 10 aa, synthetic construct
SQIRGDRGQI

SEQ ID NO: 54903 - protein, 10 aa, synthetic construct
SQIRGDRQGI

SEQ ID NO: 54904 - protein, 10 aa, synthetic construct
SQIRGDRSVV

SEQ ID NO: 54905 - protein, 10 aa, synthetic construct
SGRRGDYVGL

SEQ ID NO: 54906 - protein, 10 aa, synthetic construct
SQIRGDRGVV

SEQ ID NO: 54907 - protein, 10 aa, synthetic construct
SQIRGDYVGL

SEQ ID NO: 54908 - protein, 10 aa, synthetic construct
SQIRGDQSTL

SEQ ID NO: 54909 - protein, 10 aa, synthetic construct
SQIRGDRSQT

SEQ ID NO: 54910 - protein, 10 aa, synthetic construct
SQIRGDLLLS

SEQ ID NO: 54911 - protein, 10 aa, synthetic construct
SQMRGDRGQI

SEQ ID NO: 54912 - protein, 10 aa, synthetic construct
SQMRGDRQGI

SEQ ID NO: 54913 - protein, 10 aa, synthetic construct
SQMRGDRSVV

SEQ ID NO: 54914 - protein, 10 aa, synthetic construct
SQMRGDRGVV

SEQ ID NO: 54915 - protein, 10 aa, synthetic construct
SQMRGDYVGL

SEQ ID NO: 54916 - protein, 10 aa, synthetic construct
SGRRGDQSTL

SEQ ID NO: 54917 - protein, 10 aa, synthetic construct
SQMRGDQSTL

SEQ ID NO: 54918 - protein, 10 aa, synthetic construct
SQMRGDRSQT

SEQ ID NO: 54919 - protein, 10 aa, synthetic construct
SQMRGDLLLS

SEQ ID NO: 54920 - protein, 10 aa, synthetic construct
SQWRGDHGVL

SEQ ID NO: 54921 - protein, 10 aa, synthetic construct
SQWRGDHVNL

SEQ ID NO: 54922 - protein, 10 aa, synthetic construct
SQWRGDYVGL

SEQ ID NO: 54923 - protein, 10 aa, synthetic construct
SQWRGDYSSV

SEQ ID NO: 54924 - protein, 10 aa, synthetic construct
SQWRGDQSTL

SEQ ID NO: 54925 - protein, 10 aa, synthetic construct
SQWRGDLLLS

SEQ ID NO: 54926 - protein, 10 aa, synthetic construct
SQFRGDRGQI

SEQ ID NO: 54927 - protein, 10 aa, synthetic construct
SGRRGDLLLS

SEQ ID NO: 54928 - protein, 10 aa, synthetic construct
SQFRGDRQGI

SEQ ID NO: 54929 - protein, 10 aa, synthetic construct
SQFRGDRSVV

SEQ ID NO: 54930 - protein, 10 aa, synthetic construct
SQFRGDRGVV

SEQ ID NO: 54931 - protein, 10 aa, synthetic construct
SQFRGDYVGL

SEQ ID NO: 54932 - protein, 10 aa, synthetic construct
SQFRGDQSTL

SEQ ID NO: 54933 - protein, 10 aa, synthetic construct
SQFRGDRSQT

SEQ ID NO: 54934 - protein, 10 aa, synthetic construct
SQFRGDLLLS

SEQ ID NO: 54935 - protein, 10 aa, synthetic construct
SQKRGDRGQI

SEQ ID NO: 54936 - protein, 10 aa, synthetic construct
SQKRGDRQGI

SEQ ID NO: 54937 - protein, 10 aa, synthetic construct
SQKRGDRSVV

SEQ ID NO: 54938 - protein, 10 aa, synthetic construct
SGHRGDRGQI

SEQ ID NO: 54939 - protein, 10 aa, synthetic construct
SQKRGDRGVV

SEQ ID NO: 54940 - protein, 10 aa, synthetic construct
SQKRGDYVGL

SEQ ID NO: 54941 - protein, 10 aa, synthetic construct
SQKRGDQSTL

SEQ ID NO: 54942 - protein, 10 aa, synthetic construct
SQKRGDRSQT

SEQ ID NO: 54943 - protein, 10 aa, synthetic construct
SQKRGDLLLS

SEQ ID NO: 54944 - protein, 10 aa, synthetic construct
SQRRGDHVNL

SEQ ID NO: 54945 - protein, 10 aa, synthetic construct
SQRRGDRDYL

SEQ ID NO: 54946 - protein, 10 aa, synthetic construct
SQRRGDYSSV

SEQ ID NO: 54947 - protein, 10 aa, synthetic construct
SQRRGDLTVT

SEQ ID NO: 54948 - protein, 10 aa, synthetic construct
SQRRGDLIGR

SEQ ID NO: 54949 - protein, 10 aa, synthetic construct
SGHRGDRQGI

SEQ ID NO: 54950 - protein, 10 aa, synthetic construct
SQHRGDHGVL

SEQ ID NO: 54951 - protein, 10 aa, synthetic construct
SQHRGDHVNL

SEQ ID NO: 54952 - protein, 10 aa, synthetic construct
SQHRGDYVGL

SEQ ID NO: 54953 - protein, 10 aa, synthetic construct
SQHRGDYSSV

SEQ ID NO: 54954 - protein, 10 aa, synthetic construct
SQHRGDQSTL

SEQ ID NO: 54955 - protein, 10 aa, synthetic construct
SQHRGDLLLS

SEQ ID NO: 54956 - protein, 10 aa, synthetic construct
SQSRGDHGVL

SEQ ID NO: 54957 - protein, 10 aa, synthetic construct
SQSRGDHVNL

SEQ ID NO: 54958 - protein, 10 aa, synthetic construct
SQSRGDYVGL

SEQ ID NO: 54959 - protein, 10 aa, synthetic construct
SQSRGDYSSV

SEQ ID NO: 54960 - protein, 10 aa, synthetic construct
QKNRGDYSSV

SEQ ID NO: 54961 - protein, 10 aa, synthetic construct
SGHRGDRSVV

SEQ ID NO: 54962 - protein, 10 aa, synthetic construct
SQSRGDQSTL

SEQ ID NO: 54963 - protein, 10 aa, synthetic construct
SQSRGDLLLS

SEQ ID NO: 54964 - protein, 10 aa, synthetic construct
SQTRGDHGVL

SEQ ID NO: 54965 - protein, 10 aa, synthetic construct
SQTRGDHVNL

SEQ ID NO: 54966 - protein, 10 aa, synthetic construct
SQTRGDYVGL

SEQ ID NO: 54967 - protein, 10 aa, synthetic construct
SQTRGDYSSV

SEQ ID NO: 54968 - protein, 10 aa, synthetic construct
SQTRGDQSTL

SEQ ID NO: 54969 - protein, 10 aa, synthetic construct
SQTRGDLLLS

SEQ ID NO: 54970 - protein, 10 aa, synthetic construct
SQYRGDRGQI

SEQ ID NO: 54971 - protein, 10 aa, synthetic construct
SQYRGDRQGI

SEQ ID NO: 54972 - protein, 10 aa, synthetic construct
SGHRGDRGVV

SEQ ID NO: 54973 - protein, 10 aa, synthetic construct
SQYRGDRSVV

SEQ ID NO: 54974 - protein, 10 aa, synthetic construct
SQYRGDRGVV

SEQ ID NO: 54975 - protein, 10 aa, synthetic construct
SQYRGDYVGL

SEQ ID NO: 54976 - protein, 10 aa, synthetic construct
SQYRGDQSTL

SEQ ID NO: 54977 - protein, 10 aa, synthetic construct
SQYRGDRSQT

SEQ ID NO: 54978 - protein, 10 aa, synthetic construct
SQYRGDLLLS

SEQ ID NO: 54979 - protein, 10 aa, synthetic construct
SQNRGDRGQI

SEQ ID NO: 54980 - protein, 10 aa, synthetic construct
SQNRGDRQGI

SEQ ID NO: 54981 - protein, 10 aa, synthetic construct
SQNRGDRSVV

SEQ ID NO: 54982 - protein, 10 aa, synthetic construct
SQNRGDRGVV

SEQ ID NO: 54983 - protein, 10 aa, synthetic construct
SGHRGDRSQT

SEQ ID NO: 54984 - protein, 10 aa, synthetic construct
SQNRGDYVGL

SEQ ID NO: 54985 - protein, 10 aa, synthetic construct
SQNRGDQSTL

SEQ ID NO: 54986 - protein, 10 aa, synthetic construct
SQNRGDRSQT

SEQ ID NO: 54987 - protein, 10 aa, synthetic construct
SQNRGDLLLS

SEQ ID NO: 54988 - protein, 10 aa, synthetic construct
SQQRGDHGVL

SEQ ID NO: 54989 - protein, 10 aa, synthetic construct
SQQRGDHVNL

SEQ ID NO: 54990 - protein, 10 aa, synthetic construct
SQQRGDYVGL

SEQ ID NO: 54991 - protein, 10 aa, synthetic construct
SQQRGDYSSV

SEQ ID NO: 54992 - protein, 10 aa, synthetic construct
SQQRGDQSTL

SEQ ID NO: 54993 - protein, 10 aa, synthetic construct
SQQRGDLLLS

SEQ ID NO: 54994 - protein, 10 aa, synthetic construct
SGSRGDRGQI

SEQ ID NO: 54995 - protein, 10 aa, synthetic construct
SQDRGDHGVL

SEQ ID NO: 54996 - protein, 10 aa, synthetic construct
SQDRGDHVNL

SEQ ID NO: 54997 - protein, 10 aa, synthetic construct
SQDRGDYVGL

SEQ ID NO: 54998 - protein, 10 aa, synthetic construct
SQDRGDYSSV

SEQ ID NO: 54999 - protein, 10 aa, synthetic construct
SQDRGDQSTL

SEQ ID NO: 55000 - protein, 10 aa, synthetic construct
SQDRGDLLLS

SEQ ID NO: 55001 - protein, 10 aa, synthetic construct
SQERGDHGVL

SEQ ID NO: 55002 - protein, 10 aa, synthetic construct
SQERGDHVNL

SEQ ID NO: 55003 - protein, 10 aa, synthetic construct
SQERGDYVGL

SEQ ID NO: 55004 - protein, 10 aa, synthetic construct
SQERGDYSSV

SEQ ID NO: 55005 - protein, 10 aa, synthetic construct
SGSRGDRQGI

SEQ ID NO: 55006 - protein, 10 aa, synthetic construct
SQERGDQSTL

SEQ ID NO: 55007 - protein, 10 aa, synthetic construct
SQERGDLLLS

SEQ ID NO: 55008 - protein, 10 aa, synthetic construct
SDGRGDHVNL

SEQ ID NO: 55009 - protein, 10 aa, synthetic construct
SDGRGDRDYL

SEQ ID NO: 55010 - protein, 10 aa, synthetic construct
SDGRGDYSSV

SEQ ID NO: 55011 - protein, 10 aa, synthetic construct
SDGRGDLTVT

SEQ ID NO: 55012 - protein, 10 aa, synthetic construct
SDGRGDLIGR

SEQ ID NO: 55013 - protein, 10 aa, synthetic construct
SDARGDHVNL

SEQ ID NO: 55014 - protein, 10 aa, synthetic construct
SDARGDRDYL

SEQ ID NO: 55015 - protein, 10 aa, synthetic construct
SDARGDYSSV

SEQ ID NO: 55016 - protein, 10 aa, synthetic construct
SGSRGDRSVV

SEQ ID NO: 55017 - protein, 10 aa, synthetic construct
SDARGDLTVT

SEQ ID NO: 55018 - protein, 10 aa, synthetic construct
SDARGDLIGR

SEQ ID NO: 55019 - protein, 10 aa, synthetic construct
SDVRGDHGVL

SEQ ID NO: 55020 - protein, 10 aa, synthetic construct
SDVRGDHVNL

SEQ ID NO: 55021 - protein, 10 aa, synthetic construct
SDVRGDYVGL

SEQ ID NO: 55022 - protein, 10 aa, synthetic construct
SDVRGDYSSV

SEQ ID NO: 55023 - protein, 10 aa, synthetic construct
SDVRGDQSTL

SEQ ID NO: 55024 - protein, 10 aa, synthetic construct
SDVRGDLLLS

SEQ ID NO: 55025 - protein, 10 aa, synthetic construct
SDPRGDHVNL

SEQ ID NO: 55026 - protein, 10 aa, synthetic construct
SDPRGDRDYL

SEQ ID NO: 55027 - protein, 10 aa, synthetic construct
SGSRGDRGVV

SEQ ID NO: 55028 - protein, 10 aa, synthetic construct
SDPRGDYSSV

SEQ ID NO: 55029 - protein, 10 aa, synthetic construct
SDPRGDLTVT

SEQ ID NO: 55030 - protein, 10 aa, synthetic construct
SDPRGDLIGR

SEQ ID NO: 55031 - protein, 10 aa, synthetic construct
SDLRGDHGVL

SEQ ID NO: 55032 - protein, 10 aa, synthetic construct
SDLRGDHVNL

SEQ ID NO: 55033 - protein, 10 aa, synthetic construct
SDLRGDYVGL

SEQ ID NO: 55034 - protein, 10 aa, synthetic construct
SDLRGDYSSV

SEQ ID NO: 55035 - protein, 10 aa, synthetic construct
SDLRGDQSTL

SEQ ID NO: 55036 - protein, 10 aa, synthetic construct
SDLRGDLLLS

SEQ ID NO: 55037 - protein, 10 aa, synthetic construct
SDIRGDRGQI

SEQ ID NO: 55038 - protein, 10 aa, synthetic construct
SGSRGDRSQT

SEQ ID NO: 55039 - protein, 10 aa, synthetic construct
SDIRGDRQGI

SEQ ID NO: 55040 - protein, 10 aa, synthetic construct
SDIRGDRSVV

SEQ ID NO: 55041 - protein, 10 aa, synthetic construct
SDIRGDRGVV

SEQ ID NO: 55042 - protein, 10 aa, synthetic construct
SDIRGDYVGL

SEQ ID NO: 55043 - protein, 10 aa, synthetic construct
SDIRGDQSTL

SEQ ID NO: 55044 - protein, 10 aa, synthetic construct
SDIRGDRSQT

SEQ ID NO: 55045 - protein, 10 aa, synthetic construct
SDIRGDLLLS

SEQ ID NO: 55046 - protein, 10 aa, synthetic construct
SDMRGDRGQI

SEQ ID NO: 55047 - protein, 10 aa, synthetic construct
SDMRGDRQGI

SEQ ID NO: 55048 - protein, 10 aa, synthetic construct
SDMRGDRSVV

SEQ ID NO: 55049 - protein, 10 aa, synthetic construct
SGTRGDRGQI

SEQ ID NO: 55050 - protein, 10 aa, synthetic construct
SDMRGDRGVV

SEQ ID NO: 55051 - protein, 10 aa, synthetic construct
SDMRGDYVGL

SEQ ID NO: 55052 - protein, 10 aa, synthetic construct
SDMRGDQSTL

SEQ ID NO: 55053 - protein, 10 aa, synthetic construct
SDMRGDRSQT

SEQ ID NO: 55054 - protein, 10 aa, synthetic construct
SDMRGDLLLS

SEQ ID NO: 55055 - protein, 10 aa, synthetic construct
SDWRGDHGVL

SEQ ID NO: 55056 - protein, 10 aa, synthetic construct
SDWRGDHVNL

SEQ ID NO: 55057 - protein, 10 aa, synthetic construct
SDWRGDYVGL

SEQ ID NO: 55058 - protein, 10 aa, synthetic construct
SDWRGDYSSV

SEQ ID NO: 55059 - protein, 10 aa, synthetic construct
SDWRGDQSTL

SEQ ID NO: 55060 - protein, 10 aa, synthetic construct
SGTRGDRQGI

SEQ ID NO: 55061 - protein, 10 aa, synthetic construct
SDWRGDLLLS

SEQ ID NO: 55062 - protein, 10 aa, synthetic construct
SDFRGDRGQI

SEQ ID NO: 55063 - protein, 10 aa, synthetic construct
SDFRGDRQGI

SEQ ID NO: 55064 - protein, 10 aa, synthetic construct
SDFRGDRSVV

SEQ ID NO: 55065 - protein, 10 aa, synthetic construct
SDFRGDRGVV

SEQ ID NO: 55066 - protein, 10 aa, synthetic construct
SDFRGDYVGL

SEQ ID NO: 55067 - protein, 10 aa, synthetic construct
SDFRGDQSTL

SEQ ID NO: 55068 - protein, 10 aa, synthetic construct
SDFRGDRSQT

SEQ ID NO: 55069 - protein, 10 aa, synthetic construct
SDFRGDLLLS

SEQ ID NO: 55070 - protein, 10 aa, synthetic construct
SDKRGDRGQI

SEQ ID NO: 55071 - protein, 10 aa, synthetic construct
DKNRGDRSQT

SEQ ID NO: 55072 - protein, 10 aa, synthetic construct
QKNRGDLTVT

SEQ ID NO: 55073 - protein, 10 aa, synthetic construct
SGTRGDRSVV

SEQ ID NO: 55074 - protein, 10 aa, synthetic construct
SDKRGDRQGI

SEQ ID NO: 55075 - protein, 10 aa, synthetic construct
SDKRGDRSVV

SEQ ID NO: 55076 - protein, 10 aa, synthetic construct
SDKRGDRGVV

SEQ ID NO: 55077 - protein, 10 aa, synthetic construct
SDKRGDYVGL

SEQ ID NO: 55078 - protein, 10 aa, synthetic construct
SDKRGDQSTL

SEQ ID NO: 55079 - protein, 10 aa, synthetic construct
SDKRGDRSQT

SEQ ID NO: 55080 - protein, 10 aa, synthetic construct
SDKRGDLLLS

SEQ ID NO: 55081 - protein, 10 aa, synthetic construct
SDRRGDHVNL

SEQ ID NO: 55082 - protein, 10 aa, synthetic construct
SDRRGDRDYL

SEQ ID NO: 55083 - protein, 10 aa, synthetic construct
SDRRGDYSSV

SEQ ID NO: 55084 - protein, 10 aa, synthetic construct
SGTRGDRGVV

SEQ ID NO: 55085 - protein, 10 aa, synthetic construct
SDRRGDLTVT

SEQ ID NO: 55086 - protein, 10 aa, synthetic construct
SDRRGDLIGR

SEQ ID NO: 55087 - protein, 10 aa, synthetic construct
SDHRGDHGVL

SEQ ID NO: 55088 - protein, 10 aa, synthetic construct
SDHRGDHVNL

SEQ ID NO: 55089 - protein, 10 aa, synthetic construct
SDHRGDYVGL

SEQ ID NO: 55090 - protein, 10 aa, synthetic construct
SDHRGDYSSV

SEQ ID NO: 55091 - protein, 10 aa, synthetic construct
SDHRGDQSTL

SEQ ID NO: 55092 - protein, 10 aa, synthetic construct
SDHRGDLLLS

SEQ ID NO: 55093 - protein, 10 aa, synthetic construct
SDSRGDHGVL

SEQ ID NO: 55094 - protein, 10 aa, synthetic construct
SDSRGDHVNL

SEQ ID NO: 55095 - protein, 10 aa, synthetic construct
SGTRGDRSQT

SEQ ID NO: 55096 - protein, 10 aa, synthetic construct
SDSRGDYVGL

SEQ ID NO: 55097 - protein, 10 aa, synthetic construct
SDSRGDYSSV

SEQ ID NO: 55098 - protein, 10 aa, synthetic construct
SDSRGDQSTL

SEQ ID NO: 55099 - protein, 10 aa, synthetic construct
SDSRGDLLLS

SEQ ID NO: 55100 - protein, 10 aa, synthetic construct
SDTRGDHGVL

SEQ ID NO: 55101 - protein, 10 aa, synthetic construct
SDTRGDHVNL

SEQ ID NO: 55102 - protein, 10 aa, synthetic construct
SDTRGDYVGL

SEQ ID NO: 55103 - protein, 10 aa, synthetic construct
SDTRGDYSSV

SEQ ID NO: 55104 - protein, 10 aa, synthetic construct
SDTRGDQSTL

SEQ ID NO: 55105 - protein, 10 aa, synthetic construct
SDTRGDLLLS

SEQ ID NO: 55106 - protein, 10 aa, synthetic construct
SGQRGDRGQI

SEQ ID NO: 55107 - protein, 10 aa, synthetic construct
SDYRGDRGQI

SEQ ID NO: 55108 - protein, 10 aa, synthetic construct
SDYRGDRQGI

SEQ ID NO: 55109 - protein, 10 aa, synthetic construct
SDYRGDRSVV

SEQ ID NO: 55110 - protein, 10 aa, synthetic construct
SDYRGDRGVV

SEQ ID NO: 55111 - protein, 10 aa, synthetic construct
SDYRGDYVGL

SEQ ID NO: 55112 - protein, 10 aa, synthetic construct
SDYRGDQSTL

SEQ ID NO: 55113 - protein, 10 aa, synthetic construct
SDYRGDRSQT

SEQ ID NO: 55114 - protein, 10 aa, synthetic construct
SDYRGDLLLS

SEQ ID NO: 55115 - protein, 10 aa, synthetic construct
SDNRGDRGQI

SEQ ID NO: 55116 - protein, 10 aa, synthetic construct
SDNRGDRQGI

SEQ ID NO: 55117 - protein, 10 aa, synthetic construct
SGQRGDRQGI

SEQ ID NO: 55118 - protein, 10 aa, synthetic construct
SDNRGDRSVV

SEQ ID NO: 55119 - protein, 10 aa, synthetic construct
SDNRGDRGVV

SEQ ID NO: 55120 - protein, 10 aa, synthetic construct
SDNRGDYVGL

SEQ ID NO: 55121 - protein, 10 aa, synthetic construct
SDNRGDQSTL

SEQ ID NO: 55122 - protein, 10 aa, synthetic construct
SDNRGDRSQT

SEQ ID NO: 55123 - protein, 10 aa, synthetic construct
SDNRGDLLLS

SEQ ID NO: 55124 - protein, 10 aa, synthetic construct
SDQRGDHGVL

SEQ ID NO: 55125 - protein, 10 aa, synthetic construct
SDQRGDHVNL

SEQ ID NO: 55126 - protein, 10 aa, synthetic construct
SDQRGDYVGL

SEQ ID NO: 55127 - protein, 10 aa, synthetic construct
SDQRGDYSSV

SEQ ID NO: 55128 - protein, 10 aa, synthetic construct
SGQRGDRSVV

SEQ ID NO: 55129 - protein, 10 aa, synthetic construct
SDQRGDQSTL

SEQ ID NO: 55130 - protein, 10 aa, synthetic construct
SDQRGDLLLS

SEQ ID NO: 55131 - protein, 10 aa, synthetic construct
SDDRGDHGVL

SEQ ID NO: 55132 - protein, 10 aa, synthetic construct
SDDRGDHVNL

SEQ ID NO: 55133 - protein, 10 aa, synthetic construct
SDDRGDYVGL

SEQ ID NO: 55134 - protein, 10 aa, synthetic construct
SDDRGDYSSV

SEQ ID NO: 55135 - protein, 10 aa, synthetic construct
SDDRGDQSTL

SEQ ID NO: 55136 - protein, 10 aa, synthetic construct
SDDRGDLLLS

SEQ ID NO: 55137 - protein, 10 aa, synthetic construct
SDERGDHGVL

SEQ ID NO: 55138 - protein, 10 aa, synthetic construct
SDERGDHVNL

SEQ ID NO: 55139 - protein, 10 aa, synthetic construct
SGQRGDRGVV

SEQ ID NO: 55140 - protein, 10 aa, synthetic construct
SDERGDYVGL

SEQ ID NO: 55141 - protein, 10 aa, synthetic construct
SDERGDYSSV

SEQ ID NO: 55142 - protein, 10 aa, synthetic construct
SDERGDQSTL

SEQ ID NO: 55143 - protein, 10 aa, synthetic construct
SDERGDLLLS

SEQ ID NO: 55144 - protein, 10 aa, synthetic construct
SEGRGDHVNL

SEQ ID NO: 55145 - protein, 10 aa, synthetic construct
SEGRGDRDYL

SEQ ID NO: 55146 - protein, 10 aa, synthetic construct
SEGRGDYSSV

SEQ ID NO: 55147 - protein, 10 aa, synthetic construct
SEGRGDLTVT

SEQ ID NO: 55148 - protein, 10 aa, synthetic construct
SEGRGDLIGR

SEQ ID NO: 55149 - protein, 10 aa, synthetic construct
SEARGDHVNL

SEQ ID NO: 55150 - protein, 10 aa, synthetic construct
SGQRGDRSQT

SEQ ID NO: 55151 - protein, 10 aa, synthetic construct
SEARGDRDYL

SEQ ID NO: 55152 - protein, 10 aa, synthetic construct
SEARGDYSSV

SEQ ID NO: 55153 - protein, 10 aa, synthetic construct
SEARGDLTVT

SEQ ID NO: 55154 - protein, 10 aa, synthetic construct
SEARGDLIGR

SEQ ID NO: 55155 - protein, 10 aa, synthetic construct
SEVRGDHGVL

SEQ ID NO: 55156 - protein, 10 aa, synthetic construct
SEVRGDHVNL

SEQ ID NO: 55157 - protein, 10 aa, synthetic construct
SEVRGDYVGL

SEQ ID NO: 55158 - protein, 10 aa, synthetic construct
SEVRGDYSSV

SEQ ID NO: 55159 - protein, 10 aa, synthetic construct
SEVRGDQSTL

SEQ ID NO: 55160 - protein, 10 aa, synthetic construct
SEVRGDLLLS

SEQ ID NO: 55161 - protein, 10 aa, synthetic construct
SGDRGDRGQI

SEQ ID NO: 55162 - protein, 10 aa, synthetic construct
SEPRGDHVNL

SEQ ID NO: 55163 - protein, 10 aa, synthetic construct
SEPRGDRDYL

SEQ ID NO: 55164 - protein, 10 aa, synthetic construct
SEPRGDYSSV

SEQ ID NO: 55165 - protein, 10 aa, synthetic construct
SEPRGDLTVT

SEQ ID NO: 55166 - protein, 10 aa, synthetic construct
SEPRGDLIGR

SEQ ID NO: 55167 - protein, 10 aa, synthetic construct
SELRGDHGVL

SEQ ID NO: 55168 - protein, 10 aa, synthetic construct
SELRGDHVNL

SEQ ID NO: 55169 - protein, 10 aa, synthetic construct
SELRGDYVGL

SEQ ID NO: 55170 - protein, 10 aa, synthetic construct
SELRGDYSSV

SEQ ID NO: 55171 - protein, 10 aa, synthetic construct
SELRGDQSTL

SEQ ID NO: 55172 - protein, 10 aa, synthetic construct
SGDRGDRQGI

SEQ ID NO: 55173 - protein, 10 aa, synthetic construct
SELRGDLLLS

SEQ ID NO: 55174 - protein, 10 aa, synthetic construct
SEIRGDRGQI

SEQ ID NO: 55175 - protein, 10 aa, synthetic construct
SEIRGDRQGI

SEQ ID NO: 55176 - protein, 10 aa, synthetic construct
SEIRGDRSVV

SEQ ID NO: 55177 - protein, 10 aa, synthetic construct
SEIRGDRGVV

SEQ ID NO: 55178 - protein, 10 aa, synthetic construct
SEIRGDYVGL

SEQ ID NO: 55179 - protein, 10 aa, synthetic construct
SEIRGDQSTL

SEQ ID NO: 55180 - protein, 10 aa, synthetic construct
SEIRGDRSQT

SEQ ID NO: 55181 - protein, 10 aa, synthetic construct
SEIRGDLLLS

SEQ ID NO: 55182 - protein, 10 aa, synthetic construct
SEMRGDRGQI

SEQ ID NO: 55183 - protein, 10 aa, synthetic construct
SKKRGDYTSV

SEQ ID NO: 55184 - protein, 10 aa, synthetic construct
SGDRGDRSVV

SEQ ID NO: 55185 - protein, 10 aa, synthetic construct
SEMRGDRQGI

SEQ ID NO: 55186 - protein, 10 aa, synthetic construct
SEMRGDRSVV

SEQ ID NO: 55187 - protein, 10 aa, synthetic construct
SEMRGDRGVV

SEQ ID NO: 55188 - protein, 10 aa, synthetic construct
SEMRGDYVGL

SEQ ID NO: 55189 - protein, 10 aa, synthetic construct
SEMRGDQSTL

SEQ ID NO: 55190 - protein, 10 aa, synthetic construct
SEMRGDRSQT

SEQ ID NO: 55191 - protein, 10 aa, synthetic construct
SEMRGDLLLS

SEQ ID NO: 55192 - protein, 10 aa, synthetic construct
SEWRGDHGVL

SEQ ID NO: 55193 - protein, 10 aa, synthetic construct
SEWRGDHVNL

SEQ ID NO: 55194 - protein, 10 aa, synthetic construct
SEWRGDYVGL

SEQ ID NO: 55195 - protein, 10 aa, synthetic construct
SGDRGDRGVV

SEQ ID NO: 55196 - protein, 10 aa, synthetic construct
SEWRGDYSSV

SEQ ID NO: 55197 - protein, 10 aa, synthetic construct
SEWRGDQSTL

SEQ ID NO: 55198 - protein, 10 aa, synthetic construct
SEWRGDLLLS

SEQ ID NO: 55199 - protein, 10 aa, synthetic construct
SEFRGDRGQI

SEQ ID NO: 55200 - protein, 10 aa, synthetic construct
SEFRGDRQGI

SEQ ID NO: 55201 - protein, 10 aa, synthetic construct
SEFRGDRSVV

SEQ ID NO: 55202 - protein, 10 aa, synthetic construct
SEFRGDRGVV

SEQ ID NO: 55203 - protein, 10 aa, synthetic construct
SEFRGDYVGL

SEQ ID NO: 55204 - protein, 10 aa, synthetic construct
SEFRGDQSTL

SEQ ID NO: 55205 - protein, 10 aa, synthetic construct
SEFRGDRSQT

SEQ ID NO: 55206 - protein, 10 aa, synthetic construct
SGDRGDRSQT

SEQ ID NO: 55207 - protein, 10 aa, synthetic construct
SEFRGDLLLS

SEQ ID NO: 55208 - protein, 10 aa, synthetic construct
SEKRGDRGQI

SEQ ID NO: 55209 - protein, 10 aa, synthetic construct
SEKRGDRQGI

SEQ ID NO: 55210 - protein, 10 aa, synthetic construct
SEKRGDRSVV

SEQ ID NO: 55211 - protein, 10 aa, synthetic construct
SEKRGDRGVV

SEQ ID NO: 55212 - protein, 10 aa, synthetic construct
SEKRGDYVGL

SEQ ID NO: 55213 - protein, 10 aa, synthetic construct
SEKRGDQSTL

SEQ ID NO: 55214 - protein, 10 aa, synthetic construct
SEKRGDRSQT

SEQ ID NO: 55215 - protein, 10 aa, synthetic construct
SEKRGDLLLS

SEQ ID NO: 55216 - protein, 10 aa, synthetic construct
SERRGDHVNL

SEQ ID NO: 55217 - protein, 10 aa, synthetic construct
SGERGDRGQI

SEQ ID NO: 55218 - protein, 10 aa, synthetic construct
SERRGDRDYL

SEQ ID NO: 55219 - protein, 10 aa, synthetic construct
SERRGDYSSV

SEQ ID NO: 55220 - protein, 10 aa, synthetic construct
SERRGDLTVT

SEQ ID NO: 55221 - protein, 10 aa, synthetic construct
SERRGDLIGR

SEQ ID NO: 55222 - protein, 10 aa, synthetic construct
SEHRGDHGVL

SEQ ID NO: 55223 - protein, 10 aa, synthetic construct
SEHRGDHVNL

SEQ ID NO: 55224 - protein, 10 aa, synthetic construct
SEHRGDYVGL

SEQ ID NO: 55225 - protein, 10 aa, synthetic construct
SEHRGDYSSV

SEQ ID NO: 55226 - protein, 10 aa, synthetic construct
SEHRGDQSTL

SEQ ID NO: 55227 - protein, 10 aa, synthetic construct
SEHRGDLLLS

SEQ ID NO: 55228 - protein, 10 aa, synthetic construct
SGERGDRQGI

SEQ ID NO: 55229 - protein, 10 aa, synthetic construct
SESRGDHGVL

SEQ ID NO: 55230 - protein, 10 aa, synthetic construct
SESRGDHVNL

SEQ ID NO: 55231 - protein, 10 aa, synthetic construct
SESRGDYVGL

SEQ ID NO: 55232 - protein, 10 aa, synthetic construct
SESRGDYSSV

SEQ ID NO: 55233 - protein, 10 aa, synthetic construct
SESRGDQSTL

SEQ ID NO: 55234 - protein, 10 aa, synthetic construct
SESRGDLLLS

SEQ ID NO: 55235 - protein, 10 aa, synthetic construct
SETRGDHGVL

SEQ ID NO: 55236 - protein, 10 aa, synthetic construct
SETRGDHVNL

SEQ ID NO: 55237 - protein, 10 aa, synthetic construct
SETRGDYVGL

SEQ ID NO: 55238 - protein, 10 aa, synthetic construct
SETRGDYSSV

SEQ ID NO: 55239 - protein, 10 aa, synthetic construct
SGERGDRSVV

SEQ ID NO: 55240 - protein, 10 aa, synthetic construct
SETRGDQSTL

SEQ ID NO: 55241 - protein, 10 aa, synthetic construct
SETRGDLLLS

SEQ ID NO: 55242 - protein, 10 aa, synthetic construct
SEYRGDRGQI

SEQ ID NO: 55243 - protein, 10 aa, synthetic construct
SEYRGDRQGI

SEQ ID NO: 55244 - protein, 10 aa, synthetic construct
SEYRGDRSVV

SEQ ID NO: 55245 - protein, 10 aa, synthetic construct
SEYRGDRGVV

SEQ ID NO: 55246 - protein, 10 aa, synthetic construct
SEYRGDYVGL

SEQ ID NO: 55247 - protein, 10 aa, synthetic construct
SEYRGDQSTL

SEQ ID NO: 55248 - protein, 10 aa, synthetic construct
SEYRGDRSQT

SEQ ID NO: 55249 - protein, 10 aa, synthetic construct
SEYRGDLLLS

SEQ ID NO: 55250 - protein, 10 aa, synthetic construct
SGERGDRGVV

SEQ ID NO: 55251 - protein, 10 aa, synthetic construct
SENRGDRGQI

SEQ ID NO: 55252 - protein, 10 aa, synthetic construct
SENRGDRQGI

SEQ ID NO: 55253 - protein, 10 aa, synthetic construct
SENRGDRSVV

SEQ ID NO: 55254 - protein, 10 aa, synthetic construct
SENRGDRGVV

SEQ ID NO: 55255 - protein, 10 aa, synthetic construct
SENRGDYVGL

SEQ ID NO: 55256 - protein, 10 aa, synthetic construct
SENRGDQSTL

SEQ ID NO: 55257 - protein, 10 aa, synthetic construct
SENRGDRSQT

SEQ ID NO: 55258 - protein, 10 aa, synthetic construct
SENRGDLLLS

SEQ ID NO: 55259 - protein, 10 aa, synthetic construct
SEQRGDHGVL

SEQ ID NO: 55260 - protein, 10 aa, synthetic construct
SEQRGDHVNL

SEQ ID NO: 55261 - protein, 10 aa, synthetic construct
SGERGDRSQT

SEQ ID NO: 55262 - protein, 10 aa, synthetic construct
SEQRGDYVGL

SEQ ID NO: 55263 - protein, 10 aa, synthetic construct
SEQRGDYSSV

SEQ ID NO: 55264 - protein, 10 aa, synthetic construct
SEQRGDQSTL

SEQ ID NO: 55265 - protein, 10 aa, synthetic construct
SEQRGDLLLS

SEQ ID NO: 55266 - protein, 10 aa, synthetic construct
SEDRGDHGVL

SEQ ID NO: 55267 - protein, 10 aa, synthetic construct
SEDRGDHVNL

SEQ ID NO: 55268 - protein, 10 aa, synthetic construct
SEDRGDYVGL

SEQ ID NO: 55269 - protein, 10 aa, synthetic construct
SEDRGDYSSV

SEQ ID NO: 55270 - protein, 10 aa, synthetic construct
SEDRGDQSTL

SEQ ID NO: 55271 - protein, 10 aa, synthetic construct
SEDRGDLLLS

SEQ ID NO: 55272 - protein, 10 aa, synthetic construct
SAGRGDHGVL

SEQ ID NO: 55273 - protein, 10 aa, synthetic construct
SEERGDHGVL

SEQ ID NO: 55274 - protein, 10 aa, synthetic construct
SEERGDHVNL

SEQ ID NO: 55275 - protein, 10 aa, synthetic construct
SEERGDYVGL

SEQ ID NO: 55276 - protein, 10 aa, synthetic construct
SEERGDYSSV

SEQ ID NO: 55277 - protein, 10 aa, synthetic construct
SEERGDQSTL

SEQ ID NO: 55278 - protein, 10 aa, synthetic construct
SEERGDLLLS

SEQ ID NO: 55279 - protein, 10 aa, synthetic construct
TGGRGDYTSV

SEQ ID NO: 55280 - protein, 10 aa, synthetic construct
TGGRGDYTSM

SEQ ID NO: 55281 - protein, 10 aa, synthetic construct
TGARGDYTSV

SEQ ID NO: 55282 - protein, 10 aa, synthetic construct
TGARGDYTSM

SEQ ID NO: 55283 - protein, 10 aa, synthetic construct
SAGRGDYVGL

SEQ ID NO: 55284 - protein, 10 aa, synthetic construct
TGVRGDHVNL

SEQ ID NO: 55285 - protein, 10 aa, synthetic construct
TGVRGDRDYL

SEQ ID NO: 55286 - protein, 10 aa, synthetic construct
TGVRGDYSSV

SEQ ID NO: 55287 - protein, 10 aa, synthetic construct
TGVRGDLTVT

SEQ ID NO: 55288 - protein, 10 aa, synthetic construct
TGVRGDLIGR

SEQ ID NO: 55289 - protein, 10 aa, synthetic construct
TGPRGDYTSV

SEQ ID NO: 55290 - protein, 10 aa, synthetic construct
TGPRGDYTSM

SEQ ID NO: 55291 - protein, 10 aa, synthetic construct
TGLRGDHVNL

SEQ ID NO: 55292 - protein, 10 aa, synthetic construct
TGLRGDRDYL

SEQ ID NO: 55293 - protein, 10 aa, synthetic construct
TGLRGDYSSV

SEQ ID NO: 55294 - protein, 10 aa, synthetic construct
SKNRGDYTSV

SEQ ID NO: 55295 - protein, 10 aa, synthetic construct
SAGRGDQSTL

SEQ ID NO: 55296 - protein, 10 aa, synthetic construct
TGLRGDLTVT

SEQ ID NO: 55297 - protein, 10 aa, synthetic construct
TGLRGDLIGR

SEQ ID NO: 55298 - protein, 10 aa, synthetic construct
TGIRGDHGVL

SEQ ID NO: 55299 - protein, 10 aa, synthetic construct
TGIRGDHVNL

SEQ ID NO: 55300 - protein, 10 aa, synthetic construct
TGIRGDYVGL

SEQ ID NO: 55301 - protein, 10 aa, synthetic construct
TGIRGDYSSV

SEQ ID NO: 55302 - protein, 10 aa, synthetic construct
TGIRGDQSTL

SEQ ID NO: 55303 - protein, 10 aa, synthetic construct
TGIRGDLLLS

SEQ ID NO: 55304 - protein, 10 aa, synthetic construct
TGMRGDHGVL

SEQ ID NO: 55305 - protein, 10 aa, synthetic construct
TGMRGDHVNL

SEQ ID NO: 55306 - protein, 10 aa, synthetic construct
SAGRGDLLLS

SEQ ID NO: 55307 - protein, 10 aa, synthetic construct
TGMRGDYVGL

SEQ ID NO: 55308 - protein, 10 aa, synthetic construct
TGMRGDYSSV

SEQ ID NO: 55309 - protein, 10 aa, synthetic construct
TGMRGDQSTL

SEQ ID NO: 55310 - protein, 10 aa, synthetic construct
TGMRGDLLLS

SEQ ID NO: 55311 - protein, 10 aa, synthetic construct
TGWRGDHVNL

SEQ ID NO: 55312 - protein, 10 aa, synthetic construct
TGWRGDRDYL

SEQ ID NO: 55313 - protein, 10 aa, synthetic construct
TGWRGDYSSV

SEQ ID NO: 55314 - protein, 10 aa, synthetic construct
TGWRGDLTVT

SEQ ID NO: 55315 - protein, 10 aa, synthetic construct
TGWRGDLIGR

SEQ ID NO: 55316 - protein, 10 aa, synthetic construct
TGFRGDHGVL

SEQ ID NO: 55317 - protein, 10 aa, synthetic construct
SAARGDHGVL

SEQ ID NO: 55318 - protein, 10 aa, synthetic construct
TGFRGDHVNL

SEQ ID NO: 55319 - protein, 10 aa, synthetic construct
TGFRGDYVGL

SEQ ID NO: 55320 - protein, 10 aa, synthetic construct
TGFRGDYSSV

SEQ ID NO: 55321 - protein, 10 aa, synthetic construct
TGFRGDQSTL

SEQ ID NO: 55322 - protein, 10 aa, synthetic construct
TGFRGDLLLS

SEQ ID NO: 55323 - protein, 10 aa, synthetic construct
TGKRGDHGVL

SEQ ID NO: 55324 - protein, 10 aa, synthetic construct
TGKRGDHVNL

SEQ ID NO: 55325 - protein, 10 aa, synthetic construct
TGKRGDYVGL

SEQ ID NO: 55326 - protein, 10 aa, synthetic construct
TGKRGDYSSV

SEQ ID NO: 55327 - protein, 10 aa, synthetic construct
TGKRGDQSTL

SEQ ID NO: 55328 - protein, 10 aa, synthetic construct
SAARGDYVGL

SEQ ID NO: 55329 - protein, 10 aa, synthetic construct
TGKRGDLLLS

SEQ ID NO: 55330 - protein, 10 aa, synthetic construct
TGRRGDYTSV

SEQ ID NO: 55331 - protein, 10 aa, synthetic construct
TGRRGDYTSM

SEQ ID NO: 55332 - protein, 10 aa, synthetic construct
TGHRGDHVNL

SEQ ID NO: 55333 - protein, 10 aa, synthetic construct
TGHRGDRDYL

SEQ ID NO: 55334 - protein, 10 aa, synthetic construct
TGHRGDYSSV

SEQ ID NO: 55335 - protein, 10 aa, synthetic construct
TGHRGDLTVT

SEQ ID NO: 55336 - protein, 10 aa, synthetic construct
TGHRGDLIGR

SEQ ID NO: 55337 - protein, 10 aa, synthetic construct
TGSRGDHVNL

SEQ ID NO: 55338 - protein, 10 aa, synthetic construct
TGSRGDRDYL

SEQ ID NO: 55339 - protein, 10 aa, synthetic construct
SAARGDQSTL

SEQ ID NO: 55340 - protein, 10 aa, synthetic construct
TGSRGDYSSV

SEQ ID NO: 55341 - protein, 10 aa, synthetic construct
TGSRGDLTVT

SEQ ID NO: 55342 - protein, 10 aa, synthetic construct
TGSRGDLIGR

SEQ ID NO: 55343 - protein, 10 aa, synthetic construct
TGTRGDHVNL

SEQ ID NO: 55344 - protein, 10 aa, synthetic construct
TGTRGDRDYL

SEQ ID NO: 55345 - protein, 10 aa, synthetic construct
TGTRGDYSSV

SEQ ID NO: 55346 - protein, 10 aa, synthetic construct
TGTRGDLTVT

SEQ ID NO: 55347 - protein, 10 aa, synthetic construct
TGTRGDLIGR

SEQ ID NO: 55348 - protein, 10 aa, synthetic construct
TGYRGDHGVL

SEQ ID NO: 55349 - protein, 10 aa, synthetic construct
TGYRGDHVNL

SEQ ID NO: 55350 - protein, 10 aa, synthetic construct
SAARGDLLLS

SEQ ID NO: 55351 - protein, 10 aa, synthetic construct
TGYRGDYVGL

SEQ ID NO: 55352 - protein, 10 aa, synthetic construct
TGYRGDYSSV

SEQ ID NO: 55353 - protein, 10 aa, synthetic construct
TGYRGDQSTL

SEQ ID NO: 55354 - protein, 10 aa, synthetic construct
TGYRGDLLLS

SEQ ID NO: 55355 - protein, 10 aa, synthetic construct
TGNRGDHGVL

SEQ ID NO: 55356 - protein, 10 aa, synthetic construct
TGNRGDHVNL

SEQ ID NO: 55357 - protein, 10 aa, synthetic construct
TGNRGDYVGL

SEQ ID NO: 55358 - protein, 10 aa, synthetic construct
TGNRGDYSSV

SEQ ID NO: 55359 - protein, 10 aa, synthetic construct
TGNRGDQSTL

SEQ ID NO: 55360 - protein, 10 aa, synthetic construct
TGNRGDLLLS

SEQ ID NO: 55361 - protein, 10 aa, synthetic construct
SAVRGDRGQI

SEQ ID NO: 55362 - protein, 10 aa, synthetic construct
TGQRGDHVNL

SEQ ID NO: 55363 - protein, 10 aa, synthetic construct
TGQRGDRDYL

SEQ ID NO: 55364 - protein, 10 aa, synthetic construct
TGQRGDYSSV

SEQ ID NO: 55365 - protein, 10 aa, synthetic construct
TGQRGDLTVT

SEQ ID NO: 55366 - protein, 10 aa, synthetic construct
TGQRGDLIGR

SEQ ID NO: 55367 - protein, 10 aa, synthetic construct
TGDRGDHVNL

SEQ ID NO: 55368 - protein, 10 aa, synthetic construct
TGDRGDRDYL

SEQ ID NO: 55369 - protein, 10 aa, synthetic construct
TGDRGDYSSV

SEQ ID NO: 55370 - protein, 10 aa, synthetic construct
TGDRGDLTVT

SEQ ID NO: 55371 - protein, 10 aa, synthetic construct
TGDRGDLIGR

SEQ ID NO: 55372 - protein, 10 aa, synthetic construct
SAVRGDRQGI

SEQ ID NO: 55373 - protein, 10 aa, synthetic construct
TGERGDHVNL

SEQ ID NO: 55374 - protein, 10 aa, synthetic construct
TGERGDRDYL

SEQ ID NO: 55375 - protein, 10 aa, synthetic construct
TGERGDYSSV

SEQ ID NO: 55376 - protein, 10 aa, synthetic construct
TGERGDLTVT

SEQ ID NO: 55377 - protein, 10 aa, synthetic construct
TGERGDLIGR

SEQ ID NO: 55378 - protein, 10 aa, synthetic construct
TAGRGDYTSV

SEQ ID NO: 55379 - protein, 10 aa, synthetic construct
TAGRGDYTSM

SEQ ID NO: 55380 - protein, 10 aa, synthetic construct
TAARGDYTSV

SEQ ID NO: 55381 - protein, 10 aa, synthetic construct
TAARGDYTSM

SEQ ID NO: 55382 - protein, 10 aa, synthetic construct
TAVRGDHVNL

SEQ ID NO: 55383 - protein, 10 aa, synthetic construct
SAVRGDRSVV

SEQ ID NO: 55384 - protein, 10 aa, synthetic construct
TAVRGDRDYL

SEQ ID NO: 55385 - protein, 10 aa, synthetic construct
TAVRGDYSSV

SEQ ID NO: 55386 - protein, 10 aa, synthetic construct
TAVRGDLTVT

SEQ ID NO: 55387 - protein, 10 aa, synthetic construct
TAVRGDLIGR

SEQ ID NO: 55388 - protein, 10 aa, synthetic construct
TAPRGDYTSV

SEQ ID NO: 55389 - protein, 10 aa, synthetic construct
TAPRGDYTSM

SEQ ID NO: 55390 - protein, 10 aa, synthetic construct
TALRGDHVNL

SEQ ID NO: 55391 - protein, 10 aa, synthetic construct
TALRGDRDYL

SEQ ID NO: 55392 - protein, 10 aa, synthetic construct
TALRGDYSSV

SEQ ID NO: 55393 - protein, 10 aa, synthetic construct
TALRGDLTVT

SEQ ID NO: 55394 - protein, 10 aa, synthetic construct
SAVRGDRGVV

SEQ ID NO: 55395 - protein, 10 aa, synthetic construct
TALRGDLIGR

SEQ ID NO: 55396 - protein, 10 aa, synthetic construct
TAIRGDHGVL

SEQ ID NO: 55397 - protein, 10 aa, synthetic construct
TAIRGDHVNL

SEQ ID NO: 55398 - protein, 10 aa, synthetic construct
TAIRGDYVGL

SEQ ID NO: 55399 - protein, 10 aa, synthetic construct
TAIRGDYSSV

SEQ ID NO: 55400 - protein, 10 aa, synthetic construct
TAIRGDQSTL

SEQ ID NO: 55401 - protein, 10 aa, synthetic construct
TAIRGDLLLS

SEQ ID NO: 55402 - protein, 10 aa, synthetic construct
TAMRGDHGVL

SEQ ID NO: 55403 - protein, 10 aa, synthetic construct
TAMRGDHVNL

SEQ ID NO: 55404 - protein, 10 aa, synthetic construct
TAMRGDYVGL

SEQ ID NO: 55405 - protein, 10 aa, synthetic construct
TKKRGDYTSV

SEQ ID NO: 55406 - protein, 10 aa, synthetic construct
SAVRGDRSQT

SEQ ID NO: 55407 - protein, 10 aa, synthetic construct
TAMRGDYSSV

SEQ ID NO: 55408 - protein, 10 aa, synthetic construct
TAMRGDQSTL

SEQ ID NO: 55409 - protein, 10 aa, synthetic construct
TAMRGDLLLS

SEQ ID NO: 55410 - protein, 10 aa, synthetic construct
TAWRGDHVNL

SEQ ID NO: 55411 - protein, 10 aa, synthetic construct
TAWRGDRDYL

SEQ ID NO: 55412 - protein, 10 aa, synthetic construct
TAWRGDYSSV

SEQ ID NO: 55413 - protein, 10 aa, synthetic construct
TAWRGDLTVT

SEQ ID NO: 55414 - protein, 10 aa, synthetic construct
TAWRGDLIGR

SEQ ID NO: 55415 - protein, 10 aa, synthetic construct
TAFRGDHGVL

SEQ ID NO: 55416 - protein, 10 aa, synthetic construct
TAFRGDHVNL

SEQ ID NO: 55417 - protein, 10 aa, synthetic construct
SAPRGDHGVL

SEQ ID NO: 55418 - protein, 10 aa, synthetic construct
TAFRGDYVGL

SEQ ID NO: 55419 - protein, 10 aa, synthetic construct
TAFRGDYSSV

SEQ ID NO: 55420 - protein, 10 aa, synthetic construct
TAFRGDQSTL

SEQ ID NO: 55421 - protein, 10 aa, synthetic construct
TAFRGDLLLS

SEQ ID NO: 55422 - protein, 10 aa, synthetic construct
TAKRGDHGVL

SEQ ID NO: 55423 - protein, 10 aa, synthetic construct
TAKRGDHVNL

SEQ ID NO: 55424 - protein, 10 aa, synthetic construct
TAKRGDYVGL

SEQ ID NO: 55425 - protein, 10 aa, synthetic construct
TAKRGDYSSV

SEQ ID NO: 55426 - protein, 10 aa, synthetic construct
TAKRGDQSTL

SEQ ID NO: 55427 - protein, 10 aa, synthetic construct
TAKRGDLLLS

SEQ ID NO: 55428 - protein, 10 aa, synthetic construct
SAPRGDYVGL

SEQ ID NO: 55429 - protein, 10 aa, synthetic construct
TARRGDYTSV

SEQ ID NO: 55430 - protein, 10 aa, synthetic construct
TARRGDYTSM

SEQ ID NO: 55431 - protein, 10 aa, synthetic construct
TAHRGDHVNL

SEQ ID NO: 55432 - protein, 10 aa, synthetic construct
TAHRGDRDYL

SEQ ID NO: 55433 - protein, 10 aa, synthetic construct
TAHRGDYSSV

SEQ ID NO: 55434 - protein, 10 aa, synthetic construct
TAHRGDLTVT

SEQ ID NO: 55435 - protein, 10 aa, synthetic construct
TAHRGDLIGR

SEQ ID NO: 55436 - protein, 10 aa, synthetic construct
TASRGDHVNL

SEQ ID NO: 55437 - protein, 10 aa, synthetic construct
TASRGDRDYL

SEQ ID NO: 55438 - protein, 10 aa, synthetic construct
TASRGDYSSV

SEQ ID NO: 55439 - protein, 10 aa, synthetic construct
SAPRGDQSTL

SEQ ID NO: 55440 - protein, 10 aa, synthetic construct
TASRGDLTVT

SEQ ID NO: 55441 - protein, 10 aa, synthetic construct
TASRGDLIGR

SEQ ID NO: 55442 - protein, 10 aa, synthetic construct
TATRGDHVNL

SEQ ID NO: 55443 - protein, 10 aa, synthetic construct
TATRGDRDYL

SEQ ID NO: 55444 - protein, 10 aa, synthetic construct
TATRGDYSSV

SEQ ID NO: 55445 - protein, 10 aa, synthetic construct
TATRGDLTVT

SEQ ID NO: 55446 - protein, 10 aa, synthetic construct
TATRGDLIGR

SEQ ID NO: 55447 - protein, 10 aa, synthetic construct
TAYRGDHGVL

SEQ ID NO: 55448 - protein, 10 aa, synthetic construct
TAYRGDHVNL

SEQ ID NO: 55449 - protein, 10 aa, synthetic construct
TAYRGDYVGL

SEQ ID NO: 55450 - protein, 10 aa, synthetic construct
SAPRGDLLLS

SEQ ID NO: 55451 - protein, 10 aa, synthetic construct
TAYRGDYSSV

SEQ ID NO: 55452 - protein, 10 aa, synthetic construct
TAYRGDQSTL

SEQ ID NO: 55453 - protein, 10 aa, synthetic construct
TAYRGDLLLS

SEQ ID NO: 55454 - protein, 10 aa, synthetic construct
TANRGDHGVL

SEQ ID NO: 55455 - protein, 10 aa, synthetic construct
TANRGDHVNL

SEQ ID NO: 55456 - protein, 10 aa, synthetic construct
TANRGDYVGL

SEQ ID NO: 55457 - protein, 10 aa, synthetic construct
TANRGDYSSV

SEQ ID NO: 55458 - protein, 10 aa, synthetic construct
TANRGDQSTL

SEQ ID NO: 55459 - protein, 10 aa, synthetic construct
TANRGDLLLS

SEQ ID NO: 55460 - protein, 10 aa, synthetic construct
TAQRGDHVNL

SEQ ID NO: 55461 - protein, 10 aa, synthetic construct
SALRGDRGQI

SEQ ID NO: 55462 - protein, 10 aa, synthetic construct
TAQRGDRDYL

SEQ ID NO: 55463 - protein, 10 aa, synthetic construct
TAQRGDYSSV

SEQ ID NO: 55464 - protein, 10 aa, synthetic construct
TAQRGDLTVT

SEQ ID NO: 55465 - protein, 10 aa, synthetic construct
TAQRGDLIGR

SEQ ID NO: 55466 - protein, 10 aa, synthetic construct
TADRGDHVNL

SEQ ID NO: 55467 - protein, 10 aa, synthetic construct
TADRGDRDYL

SEQ ID NO: 55468 - protein, 10 aa, synthetic construct
TADRGDYSSV

SEQ ID NO: 55469 - protein, 10 aa, synthetic construct
TADRGDLTVT

SEQ ID NO: 55470 - protein, 10 aa, synthetic construct
TADRGDLIGR

SEQ ID NO: 55471 - protein, 10 aa, synthetic construct
TAERGDHVNL

SEQ ID NO: 55472 - protein, 10 aa, synthetic construct
SALRGDRQGI

SEQ ID NO: 55473 - protein, 10 aa, synthetic construct
TAERGDRDYL

SEQ ID NO: 55474 - protein, 10 aa, synthetic construct
TAERGDYSSV

SEQ ID NO: 55475 - protein, 10 aa, synthetic construct
TAERGDLTVT

SEQ ID NO: 55476 - protein, 10 aa, synthetic construct
TAERGDLIGR

SEQ ID NO: 55477 - protein, 10 aa, synthetic construct
TVGRGDYNSL

SEQ ID NO: 55478 - protein, 10 aa, synthetic construct
TVGRGDYTSV

SEQ ID NO: 55479 - protein, 10 aa, synthetic construct
TVGRGDYTSM

SEQ ID NO: 55480 - protein, 10 aa, synthetic construct
TVGRGDFQNT

SEQ ID NO: 55481 - protein, 10 aa, synthetic construct
TVARGDYNSL

SEQ ID NO: 55482 - protein, 10 aa, synthetic construct
TVARGDYTSV

SEQ ID NO: 55483 - protein, 10 aa, synthetic construct
SALRGDRSVV

SEQ ID NO: 55484 - protein, 10 aa, synthetic construct
TVARGDYTSM

SEQ ID NO: 55485 - protein, 10 aa, synthetic construct
TVARGDFQNT

SEQ ID NO: 55486 - protein, 10 aa, synthetic construct
TVVRGDRDYL

SEQ ID NO: 55487 - protein, 10 aa, synthetic construct
TVVRGDYTSV

SEQ ID NO: 55488 - protein, 10 aa, synthetic construct
TVVRGDLTVT

SEQ ID NO: 55489 - protein, 10 aa, synthetic construct
TVVRGDLIGR

SEQ ID NO: 55490 - protein, 10 aa, synthetic construct
TVPRGDYNSL

SEQ ID NO: 55491 - protein, 10 aa, synthetic construct
TVPRGDYTSV

SEQ ID NO: 55492 - protein, 10 aa, synthetic construct
TVPRGDYTSM

SEQ ID NO: 55493 - protein, 10 aa, synthetic construct
TVPRGDFQNT

SEQ ID NO: 55494 - protein, 10 aa, synthetic construct
SALRGDRGVV

SEQ ID NO: 55495 - protein, 10 aa, synthetic construct
TVLRGDRDYL

SEQ ID NO: 55496 - protein, 10 aa, synthetic construct
TVLRGDYTSV

SEQ ID NO: 55497 - protein, 10 aa, synthetic construct
TVLRGDLTVT

SEQ ID NO: 55498 - protein, 10 aa, synthetic construct
TVLRGDLIGR

SEQ ID NO: 55499 - protein, 10 aa, synthetic construct
TVIRGDHGVL

SEQ ID NO: 55500 - protein, 10 aa, synthetic construct
TVIRGDHVNL

SEQ ID NO: 55501 - protein, 10 aa, synthetic construct
TVIRGDRDYL

SEQ ID NO: 55502 - protein, 10 aa, synthetic construct
TVIRGDYSSV

SEQ ID NO: 55503 - protein, 10 aa, synthetic construct
TVIRGDLTVT

SEQ ID NO: 55504 - protein, 10 aa, synthetic construct
TVMRGDHGVL

SEQ ID NO: 55505 - protein, 10 aa, synthetic construct
SALRGDRSQT

SEQ ID NO: 55506 - protein, 10 aa, synthetic construct
TVMRGDHVNL

SEQ ID NO: 55507 - protein, 10 aa, synthetic construct
TVMRGDRDYL

SEQ ID NO: 55508 - protein, 10 aa, synthetic construct
TVMRGDYSSV

SEQ ID NO: 55509 - protein, 10 aa, synthetic construct
TVMRGDLTVT

SEQ ID NO: 55510 - protein, 10 aa, synthetic construct
TVWRGDRDYL

SEQ ID NO: 55511 - protein, 10 aa, synthetic construct
TVWRGDYTSV

SEQ ID NO: 55512 - protein, 10 aa, synthetic construct
TVWRGDLTVT

SEQ ID NO: 55513 - protein, 10 aa, synthetic construct
TVWRGDLIGR

SEQ ID NO: 55514 - protein, 10 aa, synthetic construct
TVFRGDHGVL

SEQ ID NO: 55515 - protein, 10 aa, synthetic construct
TVFRGDHVNL

SEQ ID NO: 55516 - protein, 10 aa, synthetic construct
TKNRGDYTSV

SEQ ID NO: 55517 - protein, 10 aa, synthetic construct
SAWRGDRGQI

SEQ ID NO: 55518 - protein, 10 aa, synthetic construct
TVFRGDRDYL

SEQ ID NO: 55519 - protein, 10 aa, synthetic construct
TVFRGDYSSV

SEQ ID NO: 55520 - protein, 10 aa, synthetic construct
TVFRGDLTVT

SEQ ID NO: 55521 - protein, 10 aa, synthetic construct
TVKRGDHGVL

SEQ ID NO: 55522 - protein, 10 aa, synthetic construct
TVKRGDHVNL

SEQ ID NO: 55523 - protein, 10 aa, synthetic construct
TVKRGDRDYL

SEQ ID NO: 55524 - protein, 10 aa, synthetic construct
TVKRGDYSSV

SEQ ID NO: 55525 - protein, 10 aa, synthetic construct
TVKRGDLTVT

SEQ ID NO: 55526 - protein, 10 aa, synthetic construct
TVRRGDYNSL

SEQ ID NO: 55527 - protein, 10 aa, synthetic construct
TVRRGDYTSV

SEQ ID NO: 55528 - protein, 10 aa, synthetic construct
SAWRGDRQGI

SEQ ID NO: 55529 - protein, 10 aa, synthetic construct
TVRRGDYTSM

SEQ ID NO: 55530 - protein, 10 aa, synthetic construct
TVRRGDFQNT

SEQ ID NO: 55531 - protein, 10 aa, synthetic construct
TVHRGDRDYL

SEQ ID NO: 55532 - protein, 10 aa, synthetic construct
TVHRGDYTSV

SEQ ID NO: 55533 - protein, 10 aa, synthetic construct
TVHRGDLTVT

SEQ ID NO: 55534 - protein, 10 aa, synthetic construct
TVHRGDLIGR

SEQ ID NO: 55535 - protein, 10 aa, synthetic construct
TVSRGDRDYL

SEQ ID NO: 55536 - protein, 10 aa, synthetic construct
TVSRGDYTSV

SEQ ID NO: 55537 - protein, 10 aa, synthetic construct
TVSRGDLTVT

SEQ ID NO: 55538 - protein, 10 aa, synthetic construct
TVSRGDLIGR

SEQ ID NO: 55539 - protein, 10 aa, synthetic construct
SAWRGDRSVV

SEQ ID NO: 55540 - protein, 10 aa, synthetic construct
TVTRGDRDYL

SEQ ID NO: 55541 - protein, 10 aa, synthetic construct
TVTRGDYTSV

SEQ ID NO: 55542 - protein, 10 aa, synthetic construct
TVTRGDLTVT

SEQ ID NO: 55543 - protein, 10 aa, synthetic construct
TVTRGDLIGR

SEQ ID NO: 55544 - protein, 10 aa, synthetic construct
TVYRGDHGVL

SEQ ID NO: 55545 - protein, 10 aa, synthetic construct
TVYRGDHVNL

SEQ ID NO: 55546 - protein, 10 aa, synthetic construct
TVYRGDRDYL

SEQ ID NO: 55547 - protein, 10 aa, synthetic construct
TVYRGDYSSV

SEQ ID NO: 55548 - protein, 10 aa, synthetic construct
TVYRGDLTVT

SEQ ID NO: 55549 - protein, 10 aa, synthetic construct
TVNRGDHGVL

SEQ ID NO: 55550 - protein, 10 aa, synthetic construct
SAWRGDRGVV

SEQ ID NO: 55551 - protein, 10 aa, synthetic construct
TVNRGDHVNL

SEQ ID NO: 55552 - protein, 10 aa, synthetic construct
TVNRGDRDYL

SEQ ID NO: 55553 - protein, 10 aa, synthetic construct
TVNRGDYSSV

SEQ ID NO: 55554 - protein, 10 aa, synthetic construct
TVNRGDLTVT

SEQ ID NO: 55555 - protein, 10 aa, synthetic construct
TVQRGDRDYL

SEQ ID NO: 55556 - protein, 10 aa, synthetic construct
TVQRGDYTSV

SEQ ID NO: 55557 - protein, 10 aa, synthetic construct
TVQRGDLTVT

SEQ ID NO: 55558 - protein, 10 aa, synthetic construct
TVQRGDLIGR

SEQ ID NO: 55559 - protein, 10 aa, synthetic construct
TVDRGDRDYL

SEQ ID NO: 55560 - protein, 10 aa, synthetic construct
TVDRGDYTSV

SEQ ID NO: 55561 - protein, 10 aa, synthetic construct
SAWRGDRSQT

SEQ ID NO: 55562 - protein, 10 aa, synthetic construct
TVDRGDLTVT

SEQ ID NO: 55563 - protein, 10 aa, synthetic construct
TVDRGDLIGR

SEQ ID NO: 55564 - protein, 10 aa, synthetic construct
TVERGDRDYL

SEQ ID NO: 55565 - protein, 10 aa, synthetic construct
TVERGDYTSV

SEQ ID NO: 55566 - protein, 10 aa, synthetic construct
TVERGDLTVT

SEQ ID NO: 55567 - protein, 10 aa, synthetic construct
TVERGDLIGR

SEQ ID NO: 55568 - protein, 10 aa, synthetic construct
TPGRGDYTSV

SEQ ID NO: 55569 - protein, 10 aa, synthetic construct
TPGRGDYTSM

SEQ ID NO: 55570 - protein, 10 aa, synthetic construct
TPARGDYTSV

SEQ ID NO: 55571 - protein, 10 aa, synthetic construct
TPARGDYTSM

SEQ ID NO: 55572 - protein, 10 aa, synthetic construct
SARRGDHGVL

SEQ ID NO: 55573 - protein, 10 aa, synthetic construct
TPVRGDHVNL

SEQ ID NO: 55574 - protein, 10 aa, synthetic construct
TPVRGDRDYL

SEQ ID NO: 55575 - protein, 10 aa, synthetic construct
TPVRGDYSSV

SEQ ID NO: 55576 - protein, 10 aa, synthetic construct
TPVRGDLTVT

SEQ ID NO: 55577 - protein, 10 aa, synthetic construct
TPVRGDLIGR

SEQ ID NO: 55578 - protein, 10 aa, synthetic construct
TPPRGDYTSV

SEQ ID NO: 55579 - protein, 10 aa, synthetic construct
TPPRGDYTSM

SEQ ID NO: 55580 - protein, 10 aa, synthetic construct
TPLRGDHVNL

SEQ ID NO: 55581 - protein, 10 aa, synthetic construct
TPLRGDRDYL

SEQ ID NO: 55582 - protein, 10 aa, synthetic construct
TPLRGDYSSV

SEQ ID NO: 55583 - protein, 10 aa, synthetic construct
SARRGDYVGL

SEQ ID NO: 55584 - protein, 10 aa, synthetic construct
TPLRGDLTVT

SEQ ID NO: 55585 - protein, 10 aa, synthetic construct
TPLRGDLIGR

SEQ ID NO: 55586 - protein, 10 aa, synthetic construct
TPIRGDHGVL

SEQ ID NO: 55587 - protein, 10 aa, synthetic construct
TPIRGDHVNL

SEQ ID NO: 55588 - protein, 10 aa, synthetic construct
TPIRGDYVGL

SEQ ID NO: 55589 - protein, 10 aa, synthetic construct
TPIRGDYSSV

SEQ ID NO: 55590 - protein, 10 aa, synthetic construct
TPIRGDQSTL

SEQ ID NO: 55591 - protein, 10 aa, synthetic construct
TPIRGDLLLS

SEQ ID NO: 55592 - protein, 10 aa, synthetic construct
TPMRGDHGVL

SEQ ID NO: 55593 - protein, 10 aa, synthetic construct
TPMRGDHVNL

SEQ ID NO: 55594 - protein, 10 aa, synthetic construct
SARRGDQSTL

SEQ ID NO: 55595 - protein, 10 aa, synthetic construct
TPMRGDYVGL

SEQ ID NO: 55596 - protein, 10 aa, synthetic construct
TPMRGDYSSV

SEQ ID NO: 55597 - protein, 10 aa, synthetic construct
TPMRGDQSTL

SEQ ID NO: 55598 - protein, 10 aa, synthetic construct
TPMRGDLLLS

SEQ ID NO: 55599 - protein, 10 aa, synthetic construct
TPWRGDHVNL

SEQ ID NO: 55600 - protein, 10 aa, synthetic construct
TPWRGDRDYL

SEQ ID NO: 55601 - protein, 10 aa, synthetic construct
TPWRGDYSSV

SEQ ID NO: 55602 - protein, 10 aa, synthetic construct
TPWRGDLTVT

SEQ ID NO: 55603 - protein, 10 aa, synthetic construct
TPWRGDLIGR

SEQ ID NO: 55604 - protein, 10 aa, synthetic construct
TPFRGDHGVL

SEQ ID NO: 55605 - protein, 10 aa, synthetic construct
SARRGDLLLS

SEQ ID NO: 55606 - protein, 10 aa, synthetic construct
TPFRGDHVNL

SEQ ID NO: 55607 - protein, 10 aa, synthetic construct
TPFRGDYVGL

SEQ ID NO: 55608 - protein, 10 aa, synthetic construct
TPFRGDYSSV

SEQ ID NO: 55609 - protein, 10 aa, synthetic construct
TPFRGDQSTL

SEQ ID NO: 55610 - protein, 10 aa, synthetic construct
TPFRGDLLLS

SEQ ID NO: 55611 - protein, 10 aa, synthetic construct
TPKRGDHGVL

SEQ ID NO: 55612 - protein, 10 aa, synthetic construct
TPKRGDHVNL

SEQ ID NO: 55613 - protein, 10 aa, synthetic construct
TPKRGDYVGL

SEQ ID NO: 55614 - protein, 10 aa, synthetic construct
TPKRGDYSSV

SEQ ID NO: 55615 - protein, 10 aa, synthetic construct
TPKRGDQSTL

SEQ ID NO: 55616 - protein, 10 aa, synthetic construct
SAHRGDRGQI

SEQ ID NO: 55617 - protein, 10 aa, synthetic construct
TPKRGDLLLS

SEQ ID NO: 55618 - protein, 10 aa, synthetic construct
TPRRGDYTSV

SEQ ID NO: 55619 - protein, 10 aa, synthetic construct
TPRRGDYTSM

SEQ ID NO: 55620 - protein, 10 aa, synthetic construct
TPHRGDHVNL

SEQ ID NO: 55621 - protein, 10 aa, synthetic construct
TPHRGDRDYL

SEQ ID NO: 55622 - protein, 10 aa, synthetic construct
TPHRGDYSSV

SEQ ID NO: 55623 - protein, 10 aa, synthetic construct
TPHRGDLTVT

SEQ ID NO: 55624 - protein, 10 aa, synthetic construct
TPHRGDLIGR

SEQ ID NO: 55625 - protein, 10 aa, synthetic construct
TPSRGDHVNL

SEQ ID NO: 55626 - protein, 10 aa, synthetic construct
TPSRGDRDYL

SEQ ID NO: 55627 - protein, 10 aa, synthetic construct
EKKRGDYTSV

SEQ ID NO: 55628 - protein, 10 aa, synthetic construct
SAHRGDRQGI

SEQ ID NO: 55629 - protein, 10 aa, synthetic construct
TPSRGDYSSV

SEQ ID NO: 55630 - protein, 10 aa, synthetic construct
TPSRGDLTVT

SEQ ID NO: 55631 - protein, 10 aa, synthetic construct
TPSRGDLIGR

SEQ ID NO: 55632 - protein, 10 aa, synthetic construct
TPTRGDHVNL

SEQ ID NO: 55633 - protein, 10 aa, synthetic construct
TPTRGDRDYL

SEQ ID NO: 55634 - protein, 10 aa, synthetic construct
TPTRGDYSSV

SEQ ID NO: 55635 - protein, 10 aa, synthetic construct
TPTRGDLTVT

SEQ ID NO: 55636 - protein, 10 aa, synthetic construct
TPTRGDLIGR

SEQ ID NO: 55637 - protein, 10 aa, synthetic construct
TPYRGDHGVL

SEQ ID NO: 55638 - protein, 10 aa, synthetic construct
TPYRGDHVNL

SEQ ID NO: 55639 - protein, 10 aa, synthetic construct
SAHRGDRSVV

SEQ ID NO: 55640 - protein, 10 aa, synthetic construct
TPYRGDYVGL

SEQ ID NO: 55641 - protein, 10 aa, synthetic construct
TPYRGDYSSV

SEQ ID NO: 55642 - protein, 10 aa, synthetic construct
TPYRGDQSTL

SEQ ID NO: 55643 - protein, 10 aa, synthetic construct
TPYRGDLLLS

SEQ ID NO: 55644 - protein, 10 aa, synthetic construct
TPNRGDHGVL

SEQ ID NO: 55645 - protein, 10 aa, synthetic construct
TPNRGDHVNL

SEQ ID NO: 55646 - protein, 10 aa, synthetic construct
TPNRGDYVGL

SEQ ID NO: 55647 - protein, 10 aa, synthetic construct
TPNRGDYSSV

SEQ ID NO: 55648 - protein, 10 aa, synthetic construct
TPNRGDQSTL

SEQ ID NO: 55649 - protein, 10 aa, synthetic construct
TPNRGDLLLS

SEQ ID NO: 55650 - protein, 10 aa, synthetic construct
SAHRGDRGVV

SEQ ID NO: 55651 - protein, 10 aa, synthetic construct
TPQRGDHVNL

SEQ ID NO: 55652 - protein, 10 aa, synthetic construct
TPQRGDRDYL

SEQ ID NO: 55653 - protein, 10 aa, synthetic construct
TPQRGDYSSV

SEQ ID NO: 55654 - protein, 10 aa, synthetic construct
TPQRGDLTVT

SEQ ID NO: 55655 - protein, 10 aa, synthetic construct
TPQRGDLIGR

SEQ ID NO: 55656 - protein, 10 aa, synthetic construct
TPDRGDHVNL

SEQ ID NO: 55657 - protein, 10 aa, synthetic construct
TPDRGDRDYL

SEQ ID NO: 55658 - protein, 10 aa, synthetic construct
TPDRGDYSSV

SEQ ID NO: 55659 - protein, 10 aa, synthetic construct
TPDRGDLTVT

SEQ ID NO: 55660 - protein, 10 aa, synthetic construct
TPDRGDLIGR

SEQ ID NO: 55661 - protein, 10 aa, synthetic construct
SAHRGDRSQT

SEQ ID NO: 55662 - protein, 10 aa, synthetic construct
TPERGDHVNL

SEQ ID NO: 55663 - protein, 10 aa, synthetic construct
TPERGDRDYL

SEQ ID NO: 55664 - protein, 10 aa, synthetic construct
TPERGDYSSV

SEQ ID NO: 55665 - protein, 10 aa, synthetic construct
TPERGDLTVT

SEQ ID NO: 55666 - protein, 10 aa, synthetic construct
TPERGDLIGR

SEQ ID NO: 55667 - protein, 10 aa, synthetic construct
TLGRGDYNSL

SEQ ID NO: 55668 - protein, 10 aa, synthetic construct
TLGRGDYTSV

SEQ ID NO: 55669 - protein, 10 aa, synthetic construct
TLGRGDYTSM

SEQ ID NO: 55670 - protein, 10 aa, synthetic construct
TLGRGDFQNT

SEQ ID NO: 55671 - protein, 10 aa, synthetic construct
TLARGDYNSL

SEQ ID NO: 55672 - protein, 10 aa, synthetic construct
SASRGDRGQI

SEQ ID NO: 55673 - protein, 10 aa, synthetic construct
TLARGDYTSV

SEQ ID NO: 55674 - protein, 10 aa, synthetic construct
TLARGDYTSM

SEQ ID NO: 55675 - protein, 10 aa, synthetic construct
TLARGDFQNT

SEQ ID NO: 55676 - protein, 10 aa, synthetic construct
TLVRGDRDYL

SEQ ID NO: 55677 - protein, 10 aa, synthetic construct
TLVRGDYTSV

SEQ ID NO: 55678 - protein, 10 aa, synthetic construct
TLVRGDLTVT

SEQ ID NO: 55679 - protein, 10 aa, synthetic construct
TLVRGDLIGR

SEQ ID NO: 55680 - protein, 10 aa, synthetic construct
TLPRGDYNSL

SEQ ID NO: 55681 - protein, 10 aa, synthetic construct
TLPRGDYTSV

SEQ ID NO: 55682 - protein, 10 aa, synthetic construct
TLPRGDYTSM

SEQ ID NO: 55683 - protein, 10 aa, synthetic construct
SASRGDRQGI

SEQ ID NO: 55684 - protein, 10 aa, synthetic construct
TLPRGDFQNT

SEQ ID NO: 55685 - protein, 10 aa, synthetic construct
TLLRGDRDYL

SEQ ID NO: 55686 - protein, 10 aa, synthetic construct
TLLRGDYTSV

SEQ ID NO: 55687 - protein, 10 aa, synthetic construct
TLLRGDLTVT

SEQ ID NO: 55688 - protein, 10 aa, synthetic construct
TLLRGDLIGR

SEQ ID NO: 55689 - protein, 10 aa, synthetic construct
TLIRGDHGVL

SEQ ID NO: 55690 - protein, 10 aa, synthetic construct
TLIRGDHVNL

SEQ ID NO: 55691 - protein, 10 aa, synthetic construct
TLIRGDRDYL

SEQ ID NO: 55692 - protein, 10 aa, synthetic construct
TLIRGDYSSV

SEQ ID NO: 55693 - protein, 10 aa, synthetic construct
TLIRGDLTVT

SEQ ID NO: 55694 - protein, 10 aa, synthetic construct
SASRGDRSVV

SEQ ID NO: 55695 - protein, 10 aa, synthetic construct
TLMRGDHGVL

SEQ ID NO: 55696 - protein, 10 aa, synthetic construct
TLMRGDHVNL

SEQ ID NO: 55697 - protein, 10 aa, synthetic construct
TLMRGDRDYL

SEQ ID NO: 55698 - protein, 10 aa, synthetic construct
TLMRGDYSSV

SEQ ID NO: 55699 - protein, 10 aa, synthetic construct
TLMRGDLTVT

SEQ ID NO: 55700 - protein, 10 aa, synthetic construct
TLWRGDRDYL

SEQ ID NO: 55701 - protein, 10 aa, synthetic construct
TLWRGDYTSV

SEQ ID NO: 55702 - protein, 10 aa, synthetic construct
TLWRGDLTVT

SEQ ID NO: 55703 - protein, 10 aa, synthetic construct
TLWRGDLIGR

SEQ ID NO: 55704 - protein, 10 aa, synthetic construct
TLFRGDHGVL

SEQ ID NO: 55705 - protein, 10 aa, synthetic construct
SASRGDRGVV

SEQ ID NO: 55706 - protein, 10 aa, synthetic construct
TLFRGDHVNL

SEQ ID NO: 55707 - protein, 10 aa, synthetic construct
TLFRGDRDYL

SEQ ID NO: 55708 - protein, 10 aa, synthetic construct
TLFRGDYSSV

SEQ ID NO: 55709 - protein, 10 aa, synthetic construct
TLFRGDLTVT

SEQ ID NO: 55710 - protein, 10 aa, synthetic construct
TLKRGDHGVL

SEQ ID NO: 55711 - protein, 10 aa, synthetic construct
TLKRGDHVNL

SEQ ID NO: 55712 - protein, 10 aa, synthetic construct
TLKRGDRDYL

SEQ ID NO: 55713 - protein, 10 aa, synthetic construct
TLKRGDYSSV

SEQ ID NO: 55714 - protein, 10 aa, synthetic construct
TLKRGDLTVT

SEQ ID NO: 55715 - protein, 10 aa, synthetic construct
TLRRGDYNSL

SEQ ID NO: 55716 - protein, 10 aa, synthetic construct
SASRGDRSQT

SEQ ID NO: 55717 - protein, 10 aa, synthetic construct
TLRRGDYTSV

SEQ ID NO: 55718 - protein, 10 aa, synthetic construct
TLRRGDYTSM

SEQ ID NO: 55719 - protein, 10 aa, synthetic construct
TLRRGDFQNT

SEQ ID NO: 55720 - protein, 10 aa, synthetic construct
TLHRGDRDYL

SEQ ID NO: 55721 - protein, 10 aa, synthetic construct
TLHRGDYTSV

SEQ ID NO: 55722 - protein, 10 aa, synthetic construct
TLHRGDLTVT

SEQ ID NO: 55723 - protein, 10 aa, synthetic construct
TLHRGDLIGR

SEQ ID NO: 55724 - protein, 10 aa, synthetic construct
TLSRGDRDYL

SEQ ID NO: 55725 - protein, 10 aa, synthetic construct
TLSRGDYTSV

SEQ ID NO: 55726 - protein, 10 aa, synthetic construct
TLSRGDLTVT

SEQ ID NO: 55727 - protein, 10 aa, synthetic construct
SATRGDRGQI

SEQ ID NO: 55728 - protein, 10 aa, synthetic construct
TLSRGDLIGR

SEQ ID NO: 55729 - protein, 10 aa, synthetic construct
TLTRGDRDYL

SEQ ID NO: 55730 - protein, 10 aa, synthetic construct
TLTRGDYTSV

SEQ ID NO: 55731 - protein, 10 aa, synthetic construct
TLTRGDLTVT

SEQ ID NO: 55732 - protein, 10 aa, synthetic construct
TLTRGDLIGR

SEQ ID NO: 55733 - protein, 10 aa, synthetic construct
TLYRGDHGVL

SEQ ID NO: 55734 - protein, 10 aa, synthetic construct
TLYRGDHVNL

SEQ ID NO: 55735 - protein, 10 aa, synthetic construct
TLYRGDRDYL

SEQ ID NO: 55736 - protein, 10 aa, synthetic construct
TLYRGDYSSV

SEQ ID NO: 55737 - protein, 10 aa, synthetic construct
TLYRGDLTVT

SEQ ID NO: 55738 - protein, 10 aa, synthetic construct
EKNRGDYTSV

SEQ ID NO: 55739 - protein, 10 aa, synthetic construct
SATRGDRQGI

SEQ ID NO: 55740 - protein, 10 aa, synthetic construct
TLNRGDHGVL

SEQ ID NO: 55741 - protein, 10 aa, synthetic construct
TLNRGDHVNL

SEQ ID NO: 55742 - protein, 10 aa, synthetic construct
TLNRGDRDYL

SEQ ID NO: 55743 - protein, 10 aa, synthetic construct
TLNRGDYSSV

SEQ ID NO: 55744 - protein, 10 aa, synthetic construct
TLNRGDLTVT

SEQ ID NO: 55745 - protein, 10 aa, synthetic construct
TLQRGDRDYL

SEQ ID NO: 55746 - protein, 10 aa, synthetic construct
TLQRGDYTSV

SEQ ID NO: 55747 - protein, 10 aa, synthetic construct
TLQRGDLTVT

SEQ ID NO: 55748 - protein, 10 aa, synthetic construct
TLQRGDLIGR

SEQ ID NO: 55749 - protein, 10 aa, synthetic construct
TLDRGDRDYL

SEQ ID NO: 55750 - protein, 10 aa, synthetic construct
SATRGDRSVV

SEQ ID NO: 55751 - protein, 10 aa, synthetic construct
TLDRGDYTSV

SEQ ID NO: 55752 - protein, 10 aa, synthetic construct
TLDRGDLTVT

SEQ ID NO: 55753 - protein, 10 aa, synthetic construct
TLDRGDLIGR

SEQ ID NO: 55754 - protein, 10 aa, synthetic construct
TLERGDRDYL

SEQ ID NO: 55755 - protein, 10 aa, synthetic construct
TLERGDYTSV

SEQ ID NO: 55756 - protein, 10 aa, synthetic construct
TLERGDLTVT

SEQ ID NO: 55757 - protein, 10 aa, synthetic construct
TLERGDLIGR

SEQ ID NO: 55758 - protein, 10 aa, synthetic construct
TIGRGDHGVL

SEQ ID NO: 55759 - protein, 10 aa, synthetic construct
TIGRGDHVNL

SEQ ID NO: 55760 - protein, 10 aa, synthetic construct
TIGRGDYVGL

SEQ ID NO: 55761 - protein, 10 aa, synthetic construct
SATRGDRGVV

SEQ ID NO: 55762 - protein, 10 aa, synthetic construct
TIGRGDYSSV

SEQ ID NO: 55763 - protein, 10 aa, synthetic construct
TIGRGDQSTL

SEQ ID NO: 55764 - protein, 10 aa, synthetic construct
TIGRGDLLLS

SEQ ID NO: 55765 - protein, 10 aa, synthetic construct
TIARGDHGVL

SEQ ID NO: 55766 - protein, 10 aa, synthetic construct
TIARGDHVNL

SEQ ID NO: 55767 - protein, 10 aa, synthetic construct
TIARGDYVGL

SEQ ID NO: 55768 - protein, 10 aa, synthetic construct
TIARGDYSSV

SEQ ID NO: 55769 - protein, 10 aa, synthetic construct
TIARGDQSTL

SEQ ID NO: 55770 - protein, 10 aa, synthetic construct
TIARGDLLLS

SEQ ID NO: 55771 - protein, 10 aa, synthetic construct
TIVRGDRGQI

SEQ ID NO: 55772 - protein, 10 aa, synthetic construct
SATRGDRSQT

SEQ ID NO: 55773 - protein, 10 aa, synthetic construct
TIVRGDRQGI

SEQ ID NO: 55774 - protein, 10 aa, synthetic construct
TIVRGDRSVV

SEQ ID NO: 55775 - protein, 10 aa, synthetic construct
TIVRGDRGVV

SEQ ID NO: 55776 - protein, 10 aa, synthetic construct
TIVRGDYVGL

SEQ ID NO: 55777 - protein, 10 aa, synthetic construct
TIVRGDQSTL

SEQ ID NO: 55778 - protein, 10 aa, synthetic construct
TIVRGDRSQT

SEQ ID NO: 55779 - protein, 10 aa, synthetic construct
TIVRGDLLLS

SEQ ID NO: 55780 - protein, 10 aa, synthetic construct
TIPRGDHGVL

SEQ ID NO: 55781 - protein, 10 aa, synthetic construct
TIPRGDHVNL

SEQ ID NO: 55782 - protein, 10 aa, synthetic construct
TIPRGDYVGL

SEQ ID NO: 55783 - protein, 10 aa, synthetic construct
SADRGDRGQI

SEQ ID NO: 55784 - protein, 10 aa, synthetic construct
TIPRGDYSSV

SEQ ID NO: 55785 - protein, 10 aa, synthetic construct
TIPRGDQSTL

SEQ ID NO: 55786 - protein, 10 aa, synthetic construct
TIPRGDLLLS

SEQ ID NO: 55787 - protein, 10 aa, synthetic construct
TILRGDRGQI

SEQ ID NO: 55788 - protein, 10 aa, synthetic construct
TILRGDRQGI

SEQ ID NO: 55789 - protein, 10 aa, synthetic construct
TILRGDRSVV

SEQ ID NO: 55790 - protein, 10 aa, synthetic construct
TILRGDRGVV

SEQ ID NO: 55791 - protein, 10 aa, synthetic construct
TILRGDYVGL

SEQ ID NO: 55792 - protein, 10 aa, synthetic construct
TILRGDQSTL

SEQ ID NO: 55793 - protein, 10 aa, synthetic construct
TILRGDRSQT

SEQ ID NO: 55794 - protein, 10 aa, synthetic construct
SADRGDRQGI

SEQ ID NO: 55795 - protein, 10 aa, synthetic construct
TILRGDLLLS

SEQ ID NO: 55796 - protein, 10 aa, synthetic construct
TIIRGDRSVV

SEQ ID NO: 55797 - protein, 10 aa, synthetic construct
TIIRGDRSQT

SEQ ID NO: 55798 - protein, 10 aa, synthetic construct
TIMRGDRSVV

SEQ ID NO: 55799 - protein, 10 aa, synthetic construct
TIMRGDRSQT

SEQ ID NO: 55800 - protein, 10 aa, synthetic construct
TIWRGDRGQI

SEQ ID NO: 55801 - protein, 10 aa, synthetic construct
TIWRGDRQGI

SEQ ID NO: 55802 - protein, 10 aa, synthetic construct
TIWRGDRSVV

SEQ ID NO: 55803 - protein, 10 aa, synthetic construct
TIWRGDRGVV

SEQ ID NO: 55804 - protein, 10 aa, synthetic construct
TIWRGDYVGL

SEQ ID NO: 55805 - protein, 10 aa, synthetic construct
SADRGDRSVV

SEQ ID NO: 55806 - protein, 10 aa, synthetic construct
TIWRGDQSTL

SEQ ID NO: 55807 - protein, 10 aa, synthetic construct
TIWRGDRSQT

SEQ ID NO: 55808 - protein, 10 aa, synthetic construct
TIWRGDLLLS

SEQ ID NO: 55809 - protein, 10 aa, synthetic construct
TIFRGDRSVV

SEQ ID NO: 55810 - protein, 10 aa, synthetic construct
TIFRGDRSQT

SEQ ID NO: 55811 - protein, 10 aa, synthetic construct
TIKRGDRSVV

SEQ ID NO: 55812 - protein, 10 aa, synthetic construct
TIKRGDRSQT

SEQ ID NO: 55813 - protein, 10 aa, synthetic construct
TIRRGDHGVL

SEQ ID NO: 55814 - protein, 10 aa, synthetic construct
TIRRGDHVNL

SEQ ID NO: 55815 - protein, 10 aa, synthetic construct
TIRRGDYVGL

SEQ ID NO: 55816 - protein, 10 aa, synthetic construct
SADRGDRGVV

SEQ ID NO: 55817 - protein, 10 aa, synthetic construct
TIRRGDYSSV

SEQ ID NO: 55818 - protein, 10 aa, synthetic construct
TIRRGDQSTL

SEQ ID NO: 55819 - protein, 10 aa, synthetic construct
TIRRGDLLLS

SEQ ID NO: 55820 - protein, 10 aa, synthetic construct
TIHRGDRGQI

SEQ ID NO: 55821 - protein, 10 aa, synthetic construct
TIHRGDRQGI

SEQ ID NO: 55822 - protein, 10 aa, synthetic construct
TIHRGDRSVV

SEQ ID NO: 55823 - protein, 10 aa, synthetic construct
TIHRGDRGVV

SEQ ID NO: 55824 - protein, 10 aa, synthetic construct
TIHRGDYVGL

SEQ ID NO: 55825 - protein, 10 aa, synthetic construct
TIHRGDQSTL

SEQ ID NO: 55826 - protein, 10 aa, synthetic construct
TIHRGDRSQT

SEQ ID NO: 55827 - protein, 10 aa, synthetic construct
SADRGDRSQT

SEQ ID NO: 55828 - protein, 10 aa, synthetic construct
TIHRGDLLLS

SEQ ID NO: 55829 - protein, 10 aa, synthetic construct
TISRGDRGQI

SEQ ID NO: 55830 - protein, 10 aa, synthetic construct
TISRGDRQGI

SEQ ID NO: 55831 - protein, 10 aa, synthetic construct
TISRGDRSVV

SEQ ID NO: 55832 - protein, 10 aa, synthetic construct
TISRGDRGVV

SEQ ID NO: 55833 - protein, 10 aa, synthetic construct
TISRGDYVGL

SEQ ID NO: 55834 - protein, 10 aa, synthetic construct
TISRGDQSTL

SEQ ID NO: 55835 - protein, 10 aa, synthetic construct
TISRGDRSQT

SEQ ID NO: 55836 - protein, 10 aa, synthetic construct
TISRGDLLLS

SEQ ID NO: 55837 - protein, 10 aa, synthetic construct
TITRGDRGQI

SEQ ID NO: 55838 - protein, 10 aa, synthetic construct
SAERGDRGQI

SEQ ID NO: 55839 - protein, 10 aa, synthetic construct
TITRGDRQGI

SEQ ID NO: 55840 - protein, 10 aa, synthetic construct
TITRGDRSVV

SEQ ID NO: 55841 - protein, 10 aa, synthetic construct
TITRGDRGVV

SEQ ID NO: 55842 - protein, 10 aa, synthetic construct
TITRGDYVGL

SEQ ID NO: 55843 - protein, 10 aa, synthetic construct
TITRGDQSTL

SEQ ID NO: 55844 - protein, 10 aa, synthetic construct
TITRGDRSQT

SEQ ID NO: 55845 - protein, 10 aa, synthetic construct
TITRGDLLLS

SEQ ID NO: 55846 - protein, 10 aa, synthetic construct
TIYRGDRSVV

SEQ ID NO: 55847 - protein, 10 aa, synthetic construct
TIYRGDRSQT

SEQ ID NO: 55848 - protein, 10 aa, synthetic construct
TINRGDRSVV

SEQ ID NO: 55849 - protein, 10 aa, synthetic construct
NKKRGDHVNL

SEQ ID NO: 55850 - protein, 10 aa, synthetic construct
SAERGDRQGI

SEQ ID NO: 55851 - protein, 10 aa, synthetic construct
TINRGDRSQT

SEQ ID NO: 55852 - protein, 10 aa, synthetic construct
TIQRGDRGQI

SEQ ID NO: 55853 - protein, 10 aa, synthetic construct
TIQRGDRQGI

SEQ ID NO: 55854 - protein, 10 aa, synthetic construct
TIQRGDRSVV

SEQ ID NO: 55855 - protein, 10 aa, synthetic construct
TIQRGDRGVV

SEQ ID NO: 55856 - protein, 10 aa, synthetic construct
TIQRGDYVGL

SEQ ID NO: 55857 - protein, 10 aa, synthetic construct
TIQRGDQSTL

SEQ ID NO: 55858 - protein, 10 aa, synthetic construct
TIQRGDRSQT

SEQ ID NO: 55859 - protein, 10 aa, synthetic construct
TIQRGDLLLS

SEQ ID NO: 55860 - protein, 10 aa, synthetic construct
TIDRGDRGQI

SEQ ID NO: 55861 - protein, 10 aa, synthetic construct
SAERGDRSVV

SEQ ID NO: 55862 - protein, 10 aa, synthetic construct
TIDRGDRQGI

SEQ ID NO: 55863 - protein, 10 aa, synthetic construct
TIDRGDRSVV

SEQ ID NO: 55864 - protein, 10 aa, synthetic construct
TIDRGDRGVV

SEQ ID NO: 55865 - protein, 10 aa, synthetic construct
TIDRGDYVGL

SEQ ID NO: 55866 - protein, 10 aa, synthetic construct
TIDRGDQSTL

SEQ ID NO: 55867 - protein, 10 aa, synthetic construct
TIDRGDRSQT

SEQ ID NO: 55868 - protein, 10 aa, synthetic construct
TIDRGDLLLS

SEQ ID NO: 55869 - protein, 10 aa, synthetic construct
TIERGDRGQI

SEQ ID NO: 55870 - protein, 10 aa, synthetic construct
TIERGDRQGI

SEQ ID NO: 55871 - protein, 10 aa, synthetic construct
TIERGDRSVV

SEQ ID NO: 55872 - protein, 10 aa, synthetic construct
SAERGDRGVV

SEQ ID NO: 55873 - protein, 10 aa, synthetic construct
TIERGDRGVV

SEQ ID NO: 55874 - protein, 10 aa, synthetic construct
TIERGDYVGL

SEQ ID NO: 55875 - protein, 10 aa, synthetic construct
TIERGDQSTL

SEQ ID NO: 55876 - protein, 10 aa, synthetic construct
TIERGDRSQT

SEQ ID NO: 55877 - protein, 10 aa, synthetic construct
TIERGDLLLS

SEQ ID NO: 55878 - protein, 10 aa, synthetic construct
TMGRGDRDYL

SEQ ID NO: 55879 - protein, 10 aa, synthetic construct
TMGRGDYVGL

SEQ ID NO: 55880 - protein, 10 aa, synthetic construct
TMGRGDYSSV

SEQ ID NO: 55881 - protein, 10 aa, synthetic construct
TMGRGDYTSV

SEQ ID NO: 55882 - protein, 10 aa, synthetic construct
TMGRGDQSTL

SEQ ID NO: 55883 - protein, 10 aa, synthetic construct
SAERGDRSQT

SEQ ID NO: 55884 - protein, 10 aa, synthetic construct
TMARGDRDYL

SEQ ID NO: 55885 - protein, 10 aa, synthetic construct
TMARGDYVGL

SEQ ID NO: 55886 - protein, 10 aa, synthetic construct
TMARGDYSSV

SEQ ID NO: 55887 - protein, 10 aa, synthetic construct
TMARGDYTSV

SEQ ID NO: 55888 - protein, 10 aa, synthetic construct
TMARGDQSTL

SEQ ID NO: 55889 - protein, 10 aa, synthetic construct
TMVRGDRDYL

SEQ ID NO: 55890 - protein, 10 aa, synthetic construct
TMVRGDYVGL

SEQ ID NO: 55891 - protein, 10 aa, synthetic construct
TMVRGDYSSV

SEQ ID NO: 55892 - protein, 10 aa, synthetic construct
TMVRGDYTSV

SEQ ID NO: 55893 - protein, 10 aa, synthetic construct
TMVRGDQSTL

SEQ ID NO: 55894 - protein, 10 aa, synthetic construct
SVGRGDHGVL

SEQ ID NO: 55895 - protein, 10 aa, synthetic construct
TMPRGDRDYL

SEQ ID NO: 55896 - protein, 10 aa, synthetic construct
TMPRGDYVGL

SEQ ID NO: 55897 - protein, 10 aa, synthetic construct
TMPRGDYSSV

SEQ ID NO: 55898 - protein, 10 aa, synthetic construct
TMPRGDYTSV

SEQ ID NO: 55899 - protein, 10 aa, synthetic construct
TMPRGDQSTL

SEQ ID NO: 55900 - protein, 10 aa, synthetic construct
TMLRGDRDYL

SEQ ID NO: 55901 - protein, 10 aa, synthetic construct
TMLRGDYVGL

SEQ ID NO: 55902 - protein, 10 aa, synthetic construct
TMLRGDYSSV

SEQ ID NO: 55903 - protein, 10 aa, synthetic construct
TMLRGDYTSV

SEQ ID NO: 55904 - protein, 10 aa, synthetic construct
TMLRGDQSTL

SEQ ID NO: 55905 - protein, 10 aa, synthetic construct
SVGRGDYVGL

SEQ ID NO: 55906 - protein, 10 aa, synthetic construct
TMIRGDHGVL

SEQ ID NO: 55907 - protein, 10 aa, synthetic construct
TMIRGDRSVV

SEQ ID NO: 55908 - protein, 10 aa, synthetic construct
TMIRGDRGVV

SEQ ID NO: 55909 - protein, 10 aa, synthetic construct
TMIRGDLTVT

SEQ ID NO: 55910 - protein, 10 aa, synthetic construct
TMIRGDLIGR

SEQ ID NO: 55911 - protein, 10 aa, synthetic construct
TMIRGDLLLS

SEQ ID NO: 55912 - protein, 10 aa, synthetic construct
TMMRGDHGVL

SEQ ID NO: 55913 - protein, 10 aa, synthetic construct
TMMRGDRGQI

SEQ ID NO: 55914 - protein, 10 aa, synthetic construct
TMMRGDRQGI

SEQ ID NO: 55915 - protein, 10 aa, synthetic construct
TMMRGDRGVV

SEQ ID NO: 55916 - protein, 10 aa, synthetic construct
SVGRGDQSTL

SEQ ID NO: 55917 - protein, 10 aa, synthetic construct
TMMRGDYVGL

SEQ ID NO: 55918 - protein, 10 aa, synthetic construct
TMMRGDLIGR

SEQ ID NO: 55919 - protein, 10 aa, synthetic construct
TMMRGDQSTL

SEQ ID NO: 55920 - protein, 10 aa, synthetic construct
TMMRGDLLLS

SEQ ID NO: 55921 - protein, 10 aa, synthetic construct
TMWRGDHGVL

SEQ ID NO: 55922 - protein, 10 aa, synthetic construct
TMWRGDHVNL

SEQ ID NO: 55923 - protein, 10 aa, synthetic construct
TMWRGDRDYL

SEQ ID NO: 55924 - protein, 10 aa, synthetic construct
TMWRGDYSSV

SEQ ID NO: 55925 - protein, 10 aa, synthetic construct
TMWRGDLTVT

SEQ ID NO: 55926 - protein, 10 aa, synthetic construct
TMFRGDHGVL

SEQ ID NO: 55927 - protein, 10 aa, synthetic construct
SVGRGDLLLS

SEQ ID NO: 55928 - protein, 10 aa, synthetic construct
TMFRGDRSVV

SEQ ID NO: 55929 - protein, 10 aa, synthetic construct
TMFRGDRGVV

SEQ ID NO: 55930 - protein, 10 aa, synthetic construct
TMFRGDLTVT

SEQ ID NO: 55931 - protein, 10 aa, synthetic construct
TMFRGDLIGR

SEQ ID NO: 55932 - protein, 10 aa, synthetic construct
TMFRGDLLLS

SEQ ID NO: 55933 - protein, 10 aa, synthetic construct
TMKRGDHGVL

SEQ ID NO: 55934 - protein, 10 aa, synthetic construct
TMKRGDRSVV

SEQ ID NO: 55935 - protein, 10 aa, synthetic construct
TMKRGDRGVV

SEQ ID NO: 55936 - protein, 10 aa, synthetic construct
TMKRGDLTVT

SEQ ID NO: 55937 - protein, 10 aa, synthetic construct
TMKRGDLIGR

SEQ ID NO: 55938 - protein, 10 aa, synthetic construct
SVARGDHGVL

SEQ ID NO: 55939 - protein, 10 aa, synthetic construct
TMKRGDLLLS

SEQ ID NO: 55940 - protein, 10 aa, synthetic construct
TMRRGDRDYL

SEQ ID NO: 55941 - protein, 10 aa, synthetic construct
TMRRGDYVGL

SEQ ID NO: 55942 - protein, 10 aa, synthetic construct
TMRRGDYSSV

SEQ ID NO: 55943 - protein, 10 aa, synthetic construct
TMRRGDYTSV

SEQ ID NO: 55944 - protein, 10 aa, synthetic construct
TMRRGDQSTL

SEQ ID NO: 55945 - protein, 10 aa, synthetic construct
TMHRGDHGVL

SEQ ID NO: 55946 - protein, 10 aa, synthetic construct
TMHRGDRGQI

SEQ ID NO: 55947 - protein, 10 aa, synthetic construct
TMHRGDRQGI

SEQ ID NO: 55948 - protein, 10 aa, synthetic construct
TMHRGDRSVV

SEQ ID NO: 55949 - protein, 10 aa, synthetic construct
SVARGDYVGL

SEQ ID NO: 55950 - protein, 10 aa, synthetic construct
TMHRGDLIGR

SEQ ID NO: 55951 - protein, 10 aa, synthetic construct
TMHRGDRSQT

SEQ ID NO: 55952 - protein, 10 aa, synthetic construct
TMSRGDRDYL

SEQ ID NO: 55953 - protein, 10 aa, synthetic construct
TMSRGDYVGL

SEQ ID NO: 55954 - protein, 10 aa, synthetic construct
TMSRGDYSSV

SEQ ID NO: 55955 - protein, 10 aa, synthetic construct
TMSRGDYTSV

SEQ ID NO: 55956 - protein, 10 aa, synthetic construct
TMSRGDQSTL

SEQ ID NO: 55957 - protein, 10 aa, synthetic construct
TMTRGDHGVL

SEQ ID NO: 55958 - protein, 10 aa, synthetic construct
TMTRGDRGQI

SEQ ID NO: 55959 - protein, 10 aa, synthetic construct
TMTRGDRQGI

SEQ ID NO: 55960 - protein, 10 aa, synthetic construct
NKKRGDRDYL

SEQ ID NO: 55961 - protein, 10 aa, synthetic construct
SVARGDQSTL

SEQ ID NO: 55962 - protein, 10 aa, synthetic construct
TMTRGDRSVV

SEQ ID NO: 55963 - protein, 10 aa, synthetic construct
TMTRGDLIGR

SEQ ID NO: 55964 - protein, 10 aa, synthetic construct
TMTRGDRSQT

SEQ ID NO: 55965 - protein, 10 aa, synthetic construct
TMYRGDHGVL

SEQ ID NO: 55966 - protein, 10 aa, synthetic construct
TMYRGDRSVV

SEQ ID NO: 55967 - protein, 10 aa, synthetic construct
TMYRGDRGVV

SEQ ID NO: 55968 - protein, 10 aa, synthetic construct
TMYRGDLTVT

SEQ ID NO: 55969 - protein, 10 aa, synthetic construct
TMYRGDLIGR

SEQ ID NO: 55970 - protein, 10 aa, synthetic construct
TMYRGDLLLS

SEQ ID NO: 55971 - protein, 10 aa, synthetic construct
TMNRGDHGVL

SEQ ID NO: 55972 - protein, 10 aa, synthetic construct
SVARGDLLLS

SEQ ID NO: 55973 - protein, 10 aa, synthetic construct
TMNRGDRSVV

SEQ ID NO: 55974 - protein, 10 aa, synthetic construct
TMNRGDRGVV

SEQ ID NO: 55975 - protein, 10 aa, synthetic construct
TMNRGDLTVT

SEQ ID NO: 55976 - protein, 10 aa, synthetic construct
TMNRGDLIGR

SEQ ID NO: 55977 - protein, 10 aa, synthetic construct
TMNRGDLLLS

SEQ ID NO: 55978 - protein, 10 aa, synthetic construct
TMQRGDHGVL

SEQ ID NO: 55979 - protein, 10 aa, synthetic construct
TMQRGDRGQI

SEQ ID NO: 55980 - protein, 10 aa, synthetic construct
TMQRGDRQGI

SEQ ID NO: 55981 - protein, 10 aa, synthetic construct
TMQRGDRSVV

SEQ ID NO: 55982 - protein, 10 aa, synthetic construct
TMQRGDLIGR

SEQ ID NO: 55983 - protein, 10 aa, synthetic construct
SVVRGDRGQI

SEQ ID NO: 55984 - protein, 10 aa, synthetic construct
TMQRGDRSQT

SEQ ID NO: 55985 - protein, 10 aa, synthetic construct
TMDRGDHGVL

SEQ ID NO: 55986 - protein, 10 aa, synthetic construct
TMDRGDRGQI

SEQ ID NO: 55987 - protein, 10 aa, synthetic construct
TMDRGDRQGI

SEQ ID NO: 55988 - protein, 10 aa, synthetic construct
TMDRGDRSVV

SEQ ID NO: 55989 - protein, 10 aa, synthetic construct
TMDRGDLIGR

SEQ ID NO: 55990 - protein, 10 aa, synthetic construct
TMDRGDRSQT

SEQ ID NO: 55991 - protein, 10 aa, synthetic construct
TMERGDHGVL

SEQ ID NO: 55992 - protein, 10 aa, synthetic construct
TMERGDRGQI

SEQ ID NO: 55993 - protein, 10 aa, synthetic construct
TMERGDRQGI

SEQ ID NO: 55994 - protein, 10 aa, synthetic construct
SVVRGDRQGI

SEQ ID NO: 55995 - protein, 10 aa, synthetic construct
TMERGDRSVV

SEQ ID NO: 55996 - protein, 10 aa, synthetic construct
TMERGDLIGR

SEQ ID NO: 55997 - protein, 10 aa, synthetic construct
TMERGDRSQT

SEQ ID NO: 55998 - protein, 10 aa, synthetic construct
TWGRGDHVNL

SEQ ID NO: 55999 - protein, 10 aa, synthetic construct
TWGRGDYNSL

SEQ ID NO: 56000 - protein, 10 aa, synthetic construct
TWGRGDYSSV

SEQ ID NO: 56001 - protein, 10 aa, synthetic construct
TWGRGDYTSV

SEQ ID NO: 56002 - protein, 10 aa, synthetic construct
TWGRGDYTSM

SEQ ID NO: 56003 - protein, 10 aa, synthetic construct
TWARGDHVNL

SEQ ID NO: 56004 - protein, 10 aa, synthetic construct
TWARGDYNSL

SEQ ID NO: 56005 - protein, 10 aa, synthetic construct
SVVRGDRSVV

SEQ ID NO: 56006 - protein, 10 aa, synthetic construct
TWARGDYSSV

SEQ ID NO: 56007 - protein, 10 aa, synthetic construct
TWARGDYTSV

SEQ ID NO: 56008 - protein, 10 aa, synthetic construct
TWARGDYTSM

SEQ ID NO: 56009 - protein, 10 aa, synthetic construct
TWVRGDHVNL

SEQ ID NO: 56010 - protein, 10 aa, synthetic construct
TWVRGDYNSL

SEQ ID NO: 56011 - protein, 10 aa, synthetic construct
TWVRGDYTSM

SEQ ID NO: 56012 - protein, 10 aa, synthetic construct
TWPRGDHVNL

SEQ ID NO: 56013 - protein, 10 aa, synthetic construct
TWPRGDYNSL

SEQ ID NO: 56014 - protein, 10 aa, synthetic construct
TWPRGDYSSV

SEQ ID NO: 56015 - protein, 10 aa, synthetic construct
TWPRGDYTSV

SEQ ID NO: 56016 - protein, 10 aa, synthetic construct
SVVRGDRGVV

SEQ ID NO: 56017 - protein, 10 aa, synthetic construct
TWPRGDYTSM

SEQ ID NO: 56018 - protein, 10 aa, synthetic construct
TWLRGDHVNL

SEQ ID NO: 56019 - protein, 10 aa, synthetic construct
TWLRGDYNSL

SEQ ID NO: 56020 - protein, 10 aa, synthetic construct
TWLRGDYTSM

SEQ ID NO: 56021 - protein, 10 aa, synthetic construct
TWIRGDHGVL

SEQ ID NO: 56022 - protein, 10 aa, synthetic construct
TWIRGDRGQI

SEQ ID NO: 56023 - protein, 10 aa, synthetic construct
TWIRGDRQGI

SEQ ID NO: 56024 - protein, 10 aa, synthetic construct
TWIRGDRSVV

SEQ ID NO: 56025 - protein, 10 aa, synthetic construct
TWIRGDLIGR

SEQ ID NO: 56026 - protein, 10 aa, synthetic construct
TWIRGDRSQT

SEQ ID NO: 56027 - protein, 10 aa, synthetic construct
SVVRGDRSQT

SEQ ID NO: 56028 - protein, 10 aa, synthetic construct
TWMRGDHGVL

SEQ ID NO: 56029 - protein, 10 aa, synthetic construct
TWMRGDHVNL

SEQ ID NO: 56030 - protein, 10 aa, synthetic construct
TWMRGDRDYL

SEQ ID NO: 56031 - protein, 10 aa, synthetic construct
TWMRGDYSSV

SEQ ID NO: 56032 - protein, 10 aa, synthetic construct
TWMRGDLTVT

SEQ ID NO: 56033 - protein, 10 aa, synthetic construct
TWWRGDRDYL

SEQ ID NO: 56034 - protein, 10 aa, synthetic construct
TWWRGDYTSV

SEQ ID NO: 56035 - protein, 10 aa, synthetic construct
TWWRGDLTVT

SEQ ID NO: 56036 - protein, 10 aa, synthetic construct
TWWRGDLIGR

SEQ ID NO: 56037 - protein, 10 aa, synthetic construct
TWFRGDHGVL

SEQ ID NO: 56038 - protein, 10 aa, synthetic construct
SVPRGDHGVL

SEQ ID NO: 56039 - protein, 10 aa, synthetic construct
TWFRGDRGQI

SEQ ID NO: 56040 - protein, 10 aa, synthetic construct
TWFRGDRQGI

SEQ ID NO: 56041 - protein, 10 aa, synthetic construct
TWFRGDRSVV

SEQ ID NO: 56042 - protein, 10 aa, synthetic construct
TWFRGDLIGR

SEQ ID NO: 56043 - protein, 10 aa, synthetic construct
TWFRGDRSQT

SEQ ID NO: 56044 - protein, 10 aa, synthetic construct
TWKRGDHGVL

SEQ ID NO: 56045 - protein, 10 aa, synthetic construct
TWKRGDRGQI

SEQ ID NO: 56046 - protein, 10 aa, synthetic construct
TWKRGDRQGI

SEQ ID NO: 56047 - protein, 10 aa, synthetic construct
TWKRGDRSVV

SEQ ID NO: 56048 - protein, 10 aa, synthetic construct
TWKRGDLIGR

SEQ ID NO: 56049 - protein, 10 aa, synthetic construct
SVPRGDYVGL

SEQ ID NO: 56050 - protein, 10 aa, synthetic construct
TWKRGDRSQT

SEQ ID NO: 56051 - protein, 10 aa, synthetic construct
TWRRGDHVNL

SEQ ID NO: 56052 - protein, 10 aa, synthetic construct
TWRRGDYNSL

SEQ ID NO: 56053 - protein, 10 aa, synthetic construct
TWRRGDYSSV

SEQ ID NO: 56054 - protein, 10 aa, synthetic construct
TWRRGDYTSV

SEQ ID NO: 56055 - protein, 10 aa, synthetic construct
TWRRGDYTSM

SEQ ID NO: 56056 - protein, 10 aa, synthetic construct
TWHRGDRDYL

SEQ ID NO: 56057 - protein, 10 aa, synthetic construct
TWHRGDYVGL

SEQ ID NO: 56058 - protein, 10 aa, synthetic construct
TWHRGDYSSV

SEQ ID NO: 56059 - protein, 10 aa, synthetic construct
TWHRGDYTSV

SEQ ID NO: 56060 - protein, 10 aa, synthetic construct
SVPRGDQSTL

SEQ ID NO: 56061 - protein, 10 aa, synthetic construct
TWHRGDQSTL

SEQ ID NO: 56062 - protein, 10 aa, synthetic construct
TWSRGDHVNL

SEQ ID NO: 56063 - protein, 10 aa, synthetic construct
TWSRGDYNSL

SEQ ID NO: 56064 - protein, 10 aa, synthetic construct
TWSRGDYTSM

SEQ ID NO: 56065 - protein, 10 aa, synthetic construct
TWTRGDRDYL

SEQ ID NO: 56066 - protein, 10 aa, synthetic construct
TWTRGDYVGL

SEQ ID NO: 56067 - protein, 10 aa, synthetic construct
TWTRGDYSSV

SEQ ID NO: 56068 - protein, 10 aa, synthetic construct
TWTRGDYTSV

SEQ ID NO: 56069 - protein, 10 aa, synthetic construct
TWTRGDQSTL

SEQ ID NO: 56070 - protein, 10 aa, synthetic construct
TWYRGDHGVL

SEQ ID NO: 56071 - protein, 10 aa, synthetic construct
NKKRGDYSSV

SEQ ID NO: 56072 - protein, 10 aa, synthetic construct
SVPRGDLLLS

SEQ ID NO: 56073 - protein, 10 aa, synthetic construct
TWYRGDRGQI

SEQ ID NO: 56074 - protein, 10 aa, synthetic construct
TWYRGDRQGI

SEQ ID NO: 56075 - protein, 10 aa, synthetic construct
TWYRGDRSVV

SEQ ID NO: 56076 - protein, 10 aa, synthetic construct
TWYRGDLIGR

SEQ ID NO: 56077 - protein, 10 aa, synthetic construct
TWYRGDRSQT

SEQ ID NO: 56078 - protein, 10 aa, synthetic construct
TWNRGDHGVL

SEQ ID NO: 56079 - protein, 10 aa, synthetic construct
TWNRGDRGQI

SEQ ID NO: 56080 - protein, 10 aa, synthetic construct
TWNRGDRQGI

SEQ ID NO: 56081 - protein, 10 aa, synthetic construct
TWNRGDRSVV

SEQ ID NO: 56082 - protein, 10 aa, synthetic construct
TWNRGDLIGR

SEQ ID NO: 56083 - protein, 10 aa, synthetic construct
SVLRGDRGQI

SEQ ID NO: 56084 - protein, 10 aa, synthetic construct
TWNRGDRSQT

SEQ ID NO: 56085 - protein, 10 aa, synthetic construct
TWQRGDRDYL

SEQ ID NO: 56086 - protein, 10 aa, synthetic construct
TWQRGDYVGL

SEQ ID NO: 56087 - protein, 10 aa, synthetic construct
TWQRGDYSSV

SEQ ID NO: 56088 - protein, 10 aa, synthetic construct
TWQRGDYTSV

SEQ ID NO: 56089 - protein, 10 aa, synthetic construct
TWQRGDQSTL

SEQ ID NO: 56090 - protein, 10 aa, synthetic construct
TWDRGDRDYL

SEQ ID NO: 56091 - protein, 10 aa, synthetic construct
TWDRGDYVGL

SEQ ID NO: 56092 - protein, 10 aa, synthetic construct
TWDRGDYSSV

SEQ ID NO: 56093 - protein, 10 aa, synthetic construct
TWDRGDYTSV

SEQ ID NO: 56094 - protein, 10 aa, synthetic construct
SVLRGDRQGI

SEQ ID NO: 56095 - protein, 10 aa, synthetic construct
TWDRGDQSTL

SEQ ID NO: 56096 - protein, 10 aa, synthetic construct
TWERGDRDYL

SEQ ID NO: 56097 - protein, 10 aa, synthetic construct
TWERGDYVGL

SEQ ID NO: 56098 - protein, 10 aa, synthetic construct
TWERGDYSSV

SEQ ID NO: 56099 - protein, 10 aa, synthetic construct
TWERGDYTSV

SEQ ID NO: 56100 - protein, 10 aa, synthetic construct
TWERGDQSTL

SEQ ID NO: 56101 - protein, 10 aa, synthetic construct
TFGRGDHGVL

SEQ ID NO: 56102 - protein, 10 aa, synthetic construct
TFGRGDHVNL

SEQ ID NO: 56103 - protein, 10 aa, synthetic construct
TFGRGDYVGL

SEQ ID NO: 56104 - protein, 10 aa, synthetic construct
TFGRGDYSSV

SEQ ID NO: 56105 - protein, 10 aa, synthetic construct
SVLRGDRSVV

SEQ ID NO: 56106 - protein, 10 aa, synthetic construct
TFGRGDQSTL

SEQ ID NO: 56107 - protein, 10 aa, synthetic construct
TFGRGDLLLS

SEQ ID NO: 56108 - protein, 10 aa, synthetic construct
TFARGDHGVL

SEQ ID NO: 56109 - protein, 10 aa, synthetic construct
TFARGDHVNL

SEQ ID NO: 56110 - protein, 10 aa, synthetic construct
TFARGDYVGL

SEQ ID NO: 56111 - protein, 10 aa, synthetic construct
TFARGDYSSV

SEQ ID NO: 56112 - protein, 10 aa, synthetic construct
TFARGDQSTL

SEQ ID NO: 56113 - protein, 10 aa, synthetic construct
TFARGDLLLS

SEQ ID NO: 56114 - protein, 10 aa, synthetic construct
TFVRGDRGQI

SEQ ID NO: 56115 - protein, 10 aa, synthetic construct
TFVRGDRQGI

SEQ ID NO: 56116 - protein, 10 aa, synthetic construct
SVLRGDRGVV

SEQ ID NO: 56117 - protein, 10 aa, synthetic construct
TFVRGDRSVV

SEQ ID NO: 56118 - protein, 10 aa, synthetic construct
TFVRGDRGVV

SEQ ID NO: 56119 - protein, 10 aa, synthetic construct
TFVRGDYVGL

SEQ ID NO: 56120 - protein, 10 aa, synthetic construct
TFVRGDQSTL

SEQ ID NO: 56121 - protein, 10 aa, synthetic construct
TFVRGDRSQT

SEQ ID NO: 56122 - protein, 10 aa, synthetic construct
TFVRGDLLLS

SEQ ID NO: 56123 - protein, 10 aa, synthetic construct
TFPRGDHGVL

SEQ ID NO: 56124 - protein, 10 aa, synthetic construct
TFPRGDHVNL

SEQ ID NO: 56125 - protein, 10 aa, synthetic construct
TFPRGDYVGL

SEQ ID NO: 56126 - protein, 10 aa, synthetic construct
TFPRGDYSSV

SEQ ID NO: 56127 - protein, 10 aa, synthetic construct
SVLRGDRSQT

SEQ ID NO: 56128 - protein, 10 aa, synthetic construct
TFPRGDQSTL

SEQ ID NO: 56129 - protein, 10 aa, synthetic construct
TFPRGDLLLS

SEQ ID NO: 56130 - protein, 10 aa, synthetic construct
TFLRGDRGQI

SEQ ID NO: 56131 - protein, 10 aa, synthetic construct
TFLRGDRQGI

SEQ ID NO: 56132 - protein, 10 aa, synthetic construct
TFLRGDRSVV

SEQ ID NO: 56133 - protein, 10 aa, synthetic construct
TFLRGDRGVV

SEQ ID NO: 56134 - protein, 10 aa, synthetic construct
TFLRGDYVGL

SEQ ID NO: 56135 - protein, 10 aa, synthetic construct
TFLRGDQSTL

SEQ ID NO: 56136 - protein, 10 aa, synthetic construct
TFLRGDRSQT

SEQ ID NO: 56137 - protein, 10 aa, synthetic construct
TFLRGDLLLS

SEQ ID NO: 56138 - protein, 10 aa, synthetic construct
SVWRGDRGQI

SEQ ID NO: 56139 - protein, 10 aa, synthetic construct
TFIRGDRSVV

SEQ ID NO: 56140 - protein, 10 aa, synthetic construct
TFIRGDRSQT

SEQ ID NO: 56141 - protein, 10 aa, synthetic construct
TFMRGDRSVV

SEQ ID NO: 56142 - protein, 10 aa, synthetic construct
TFMRGDRSQT

SEQ ID NO: 56143 - protein, 10 aa, synthetic construct
TFWRGDRGQI

SEQ ID NO: 56144 - protein, 10 aa, synthetic construct
TFWRGDRQGI

SEQ ID NO: 56145 - protein, 10 aa, synthetic construct
TFWRGDRSVV

SEQ ID NO: 56146 - protein, 10 aa, synthetic construct
TFWRGDRGVV

SEQ ID NO: 56147 - protein, 10 aa, synthetic construct
TFWRGDYVGL

SEQ ID NO: 56148 - protein, 10 aa, synthetic construct
TFWRGDQSTL

SEQ ID NO: 56149 - protein, 10 aa, synthetic construct
SVWRGDRQGI

SEQ ID NO: 56150 - protein, 10 aa, synthetic construct
TFWRGDRSQT

SEQ ID NO: 56151 - protein, 10 aa, synthetic construct
TFWRGDLLLS

SEQ ID NO: 56152 - protein, 10 aa, synthetic construct
TFKRGDRSVV

SEQ ID NO: 56153 - protein, 10 aa, synthetic construct
TFKRGDRSQT

SEQ ID NO: 56154 - protein, 10 aa, synthetic construct
TFRRGDHGVL

SEQ ID NO: 56155 - protein, 10 aa, synthetic construct
TFRRGDHVNL

SEQ ID NO: 56156 - protein, 10 aa, synthetic construct
TFRRGDYVGL

SEQ ID NO: 56157 - protein, 10 aa, synthetic construct
TFRRGDYSSV

SEQ ID NO: 56158 - protein, 10 aa, synthetic construct
TFRRGDQSTL

SEQ ID NO: 56159 - protein, 10 aa, synthetic construct
TFRRGDLLLS

SEQ ID NO: 56160 - protein, 10 aa, synthetic construct
SVWRGDRSVV

SEQ ID NO: 56161 - protein, 10 aa, synthetic construct
TFHRGDRGQI

SEQ ID NO: 56162 - protein, 10 aa, synthetic construct
TFHRGDRQGI

SEQ ID NO: 56163 - protein, 10 aa, synthetic construct
TFHRGDRSVV

SEQ ID NO: 56164 - protein, 10 aa, synthetic construct
TFHRGDRGVV

SEQ ID NO: 56165 - protein, 10 aa, synthetic construct
TFHRGDYVGL

SEQ ID NO: 56166 - protein, 10 aa, synthetic construct
TFHRGDQSTL

SEQ ID NO: 56167 - protein, 10 aa, synthetic construct
TFHRGDRSQT

SEQ ID NO: 56168 - protein, 10 aa, synthetic construct
TFHRGDLLLS

SEQ ID NO: 56169 - protein, 10 aa, synthetic construct
TFSRGDRGQI

SEQ ID NO: 56170 - protein, 10 aa, synthetic construct
TFSRGDRQGI

SEQ ID NO: 56171 - protein, 10 aa, synthetic construct
SVWRGDRGVV

SEQ ID NO: 56172 - protein, 10 aa, synthetic construct
TFSRGDRSVV

SEQ ID NO: 56173 - protein, 10 aa, synthetic construct
TFSRGDRGVV

SEQ ID NO: 56174 - protein, 10 aa, synthetic construct
TFSRGDYVGL

SEQ ID NO: 56175 - protein, 10 aa, synthetic construct
TFSRGDQSTL

SEQ ID NO: 56176 - protein, 10 aa, synthetic construct
TFSRGDRSQT

SEQ ID NO: 56177 - protein, 10 aa, synthetic construct
TFSRGDLLLS

SEQ ID NO: 56178 - protein, 10 aa, synthetic construct
TFTRGDRGQI

SEQ ID NO: 56179 - protein, 10 aa, synthetic construct
TFTRGDRQGI

SEQ ID NO: 56180 - protein, 10 aa, synthetic construct
TFTRGDRSVV

SEQ ID NO: 56181 - protein, 10 aa, synthetic construct
TFTRGDRGVV

SEQ ID NO: 56182 - protein, 10 aa, synthetic construct
QKKRGDRSVV

SEQ ID NO: 56183 - protein, 10 aa, synthetic construct
NKKRGDLTVT

SEQ ID NO: 56184 - protein, 10 aa, synthetic construct
SVWRGDRSQT

SEQ ID NO: 56185 - protein, 10 aa, synthetic construct
TFTRGDYVGL

SEQ ID NO: 56186 - protein, 10 aa, synthetic construct
TFTRGDQSTL

SEQ ID NO: 56187 - protein, 10 aa, synthetic construct
TFTRGDRSQT

SEQ ID NO: 56188 - protein, 10 aa, synthetic construct
TFTRGDLLLS

SEQ ID NO: 56189 - protein, 10 aa, synthetic construct
TFYRGDRSVV

SEQ ID NO: 56190 - protein, 10 aa, synthetic construct
TFYRGDRSQT

SEQ ID NO: 56191 - protein, 10 aa, synthetic construct
TFNRGDRSVV

SEQ ID NO: 56192 - protein, 10 aa, synthetic construct
TFNRGDRSQT

SEQ ID NO: 56193 - protein, 10 aa, synthetic construct
TFQRGDRGQI

SEQ ID NO: 56194 - protein, 10 aa, synthetic construct
TFQRGDRQGI

SEQ ID NO: 56195 - protein, 10 aa, synthetic construct
SVRRGDHGVL

SEQ ID NO: 56196 - protein, 10 aa, synthetic construct
TFQRGDRSVV

SEQ ID NO: 56197 - protein, 10 aa, synthetic construct
TFQRGDRGVV

SEQ ID NO: 56198 - protein, 10 aa, synthetic construct
TFQRGDYVGL

SEQ ID NO: 56199 - protein, 10 aa, synthetic construct
TFQRGDQSTL

SEQ ID NO: 56200 - protein, 10 aa, synthetic construct
TFQRGDRSQT

SEQ ID NO: 56201 - protein, 10 aa, synthetic construct
TFQRGDLLLS

SEQ ID NO: 56202 - protein, 10 aa, synthetic construct
TFDRGDRGQI

SEQ ID NO: 56203 - protein, 10 aa, synthetic construct
TFDRGDRQGI

SEQ ID NO: 56204 - protein, 10 aa, synthetic construct
TFDRGDRSVV

SEQ ID NO: 56205 - protein, 10 aa, synthetic construct
TFDRGDRGVV

SEQ ID NO: 56206 - protein, 10 aa, synthetic construct
SVRRGDYVGL

SEQ ID NO: 56207 - protein, 10 aa, synthetic construct
TFDRGDYVGL

SEQ ID NO: 56208 - protein, 10 aa, synthetic construct
TFDRGDQSTL

SEQ ID NO: 56209 - protein, 10 aa, synthetic construct
TFDRGDRSQT

SEQ ID NO: 56210 - protein, 10 aa, synthetic construct
TFDRGDLLLS

SEQ ID NO: 56211 - protein, 10 aa, synthetic construct
TFERGDRGQI

SEQ ID NO: 56212 - protein, 10 aa, synthetic construct
TFERGDRQGI

SEQ ID NO: 56213 - protein, 10 aa, synthetic construct
TFERGDRSVV

SEQ ID NO: 56214 - protein, 10 aa, synthetic construct
TFERGDRGVV

SEQ ID NO: 56215 - protein, 10 aa, synthetic construct
TFERGDYVGL

SEQ ID NO: 56216 - protein, 10 aa, synthetic construct
TFERGDQSTL

SEQ ID NO: 56217 - protein, 10 aa, synthetic construct
SVRRGDQSTL

SEQ ID NO: 56218 - protein, 10 aa, synthetic construct
TFERGDRSQT

SEQ ID NO: 56219 - protein, 10 aa, synthetic construct
TFERGDLLLS

SEQ ID NO: 56220 - protein, 10 aa, synthetic construct
TKGRGDHGVL

SEQ ID NO: 56221 - protein, 10 aa, synthetic construct
TKGRGDHVNL

SEQ ID NO: 56222 - protein, 10 aa, synthetic construct
TKGRGDYVGL

SEQ ID NO: 56223 - protein, 10 aa, synthetic construct
TKGRGDYSSV

SEQ ID NO: 56224 - protein, 10 aa, synthetic construct
TKGRGDQSTL

SEQ ID NO: 56225 - protein, 10 aa, synthetic construct
TKGRGDLLLS

SEQ ID NO: 56226 - protein, 10 aa, synthetic construct
TKARGDHGVL

SEQ ID NO: 56227 - protein, 10 aa, synthetic construct
TKARGDHVNL

SEQ ID NO: 56228 - protein, 10 aa, synthetic construct
SVRRGDLLLS

SEQ ID NO: 56229 - protein, 10 aa, synthetic construct
TKARGDYVGL

SEQ ID NO: 56230 - protein, 10 aa, synthetic construct
TKARGDYSSV

SEQ ID NO: 56231 - protein, 10 aa, synthetic construct
TKARGDQSTL

SEQ ID NO: 56232 - protein, 10 aa, synthetic construct
TKARGDLLLS

SEQ ID NO: 56233 - protein, 10 aa, synthetic construct
TKVRGDRGQI

SEQ ID NO: 56234 - protein, 10 aa, synthetic construct
TKVRGDRQGI

SEQ ID NO: 56235 - protein, 10 aa, synthetic construct
TKVRGDRSVV

SEQ ID NO: 56236 - protein, 10 aa, synthetic construct
TKVRGDRGVV

SEQ ID NO: 56237 - protein, 10 aa, synthetic construct
TKVRGDYVGL

SEQ ID NO: 56238 - protein, 10 aa, synthetic construct
TKVRGDQSTL

SEQ ID NO: 56239 - protein, 10 aa, synthetic construct
SVHRGDRGQI

SEQ ID NO: 56240 - protein, 10 aa, synthetic construct
TKVRGDRSQT

SEQ ID NO: 56241 - protein, 10 aa, synthetic construct
TKVRGDLLLS

SEQ ID NO: 56242 - protein, 10 aa, synthetic construct
TKPRGDHGVL

SEQ ID NO: 56243 - protein, 10 aa, synthetic construct
TKPRGDHVNL

SEQ ID NO: 56244 - protein, 10 aa, synthetic construct
TKPRGDYVGL

SEQ ID NO: 56245 - protein, 10 aa, synthetic construct
TKPRGDYSSV

SEQ ID NO: 56246 - protein, 10 aa, synthetic construct
TKPRGDQSTL

SEQ ID NO: 56247 - protein, 10 aa, synthetic construct
TKPRGDLLLS

SEQ ID NO: 56248 - protein, 10 aa, synthetic construct
TKLRGDRGQI

SEQ ID NO: 56249 - protein, 10 aa, synthetic construct
TKLRGDRQGI

SEQ ID NO: 56250 - protein, 10 aa, synthetic construct
SVHRGDRQGI

SEQ ID NO: 56251 - protein, 10 aa, synthetic construct
TKLRGDRSVV

SEQ ID NO: 56252 - protein, 10 aa, synthetic construct
TKLRGDRGVV

SEQ ID NO: 56253 - protein, 10 aa, synthetic construct
TKLRGDYVGL

SEQ ID NO: 56254 - protein, 10 aa, synthetic construct
TKLRGDQSTL

SEQ ID NO: 56255 - protein, 10 aa, synthetic construct
TKLRGDRSQT

SEQ ID NO: 56256 - protein, 10 aa, synthetic construct
TKLRGDLLLS

SEQ ID NO: 56257 - protein, 10 aa, synthetic construct
TKIRGDRSVV

SEQ ID NO: 56258 - protein, 10 aa, synthetic construct
TKIRGDRSQT

SEQ ID NO: 56259 - protein, 10 aa, synthetic construct
TKMRGDRSVV

SEQ ID NO: 56260 - protein, 10 aa, synthetic construct
TKMRGDRSQT

SEQ ID NO: 56261 - protein, 10 aa, synthetic construct
SVHRGDRSVV

SEQ ID NO: 56262 - protein, 10 aa, synthetic construct
TKWRGDRGQI

SEQ ID NO: 56263 - protein, 10 aa, synthetic construct
TKWRGDRQGI

SEQ ID NO: 56264 - protein, 10 aa, synthetic construct
TKWRGDRSVV

SEQ ID NO: 56265 - protein, 10 aa, synthetic construct
TKWRGDRGVV

SEQ ID NO: 56266 - protein, 10 aa, synthetic construct
TKWRGDYVGL

SEQ ID NO: 56267 - protein, 10 aa, synthetic construct
TKWRGDQSTL

SEQ ID NO: 56268 - protein, 10 aa, synthetic construct
TKWRGDRSQT

SEQ ID NO: 56269 - protein, 10 aa, synthetic construct
TKWRGDLLLS

SEQ ID NO: 56270 - protein, 10 aa, synthetic construct
TKFRGDRSVV

SEQ ID NO: 56271 - protein, 10 aa, synthetic construct
TKFRGDRSQT

SEQ ID NO: 56272 - protein, 10 aa, synthetic construct
SVHRGDRGVV

SEQ ID NO: 56273 - protein, 10 aa, synthetic construct
TKRRGDHGVL

SEQ ID NO: 56274 - protein, 10 aa, synthetic construct
TKRRGDHVNL

SEQ ID NO: 56275 - protein, 10 aa, synthetic construct
TKRRGDYVGL

SEQ ID NO: 56276 - protein, 10 aa, synthetic construct
TKRRGDYSSV

SEQ ID NO: 56277 - protein, 10 aa, synthetic construct
TKRRGDQSTL

SEQ ID NO: 56278 - protein, 10 aa, synthetic construct
TKRRGDLLLS

SEQ ID NO: 56279 - protein, 10 aa, synthetic construct
TKHRGDRGQI

SEQ ID NO: 56280 - protein, 10 aa, synthetic construct
TKHRGDRQGI

SEQ ID NO: 56281 - protein, 10 aa, synthetic construct
TKHRGDRSVV

SEQ ID NO: 56282 - protein, 10 aa, synthetic construct
TKHRGDRGVV

SEQ ID NO: 56283 - protein, 10 aa, synthetic construct
SVHRGDRSQT

SEQ ID NO: 56284 - protein, 10 aa, synthetic construct
TKHRGDYVGL

SEQ ID NO: 56285 - protein, 10 aa, synthetic construct
TKHRGDQSTL

SEQ ID NO: 56286 - protein, 10 aa, synthetic construct
TKHRGDRSQT

SEQ ID NO: 56287 - protein, 10 aa, synthetic construct
TKHRGDLLLS

SEQ ID NO: 56288 - protein, 10 aa, synthetic construct
TKSRGDRGQI

SEQ ID NO: 56289 - protein, 10 aa, synthetic construct
TKSRGDRQGI

SEQ ID NO: 56290 - protein, 10 aa, synthetic construct
TKSRGDRSVV

SEQ ID NO: 56291 - protein, 10 aa, synthetic construct
TKSRGDRGVV

SEQ ID NO: 56292 - protein, 10 aa, synthetic construct
TKSRGDYVGL

SEQ ID NO: 56293 - protein, 10 aa, synthetic construct
TKSRGDQSTL

SEQ ID NO: 56294 - protein, 10 aa, synthetic construct
NKNRGDHVNL

SEQ ID NO: 56295 - protein, 10 aa, synthetic construct
SVSRGDRGQI

SEQ ID NO: 56296 - protein, 10 aa, synthetic construct
TKSRGDRSQT

SEQ ID NO: 56297 - protein, 10 aa, synthetic construct
TKSRGDLLLS

SEQ ID NO: 56298 - protein, 10 aa, synthetic construct
TKTRGDRGQI

SEQ ID NO: 56299 - protein, 10 aa, synthetic construct
TKTRGDRQGI

SEQ ID NO: 56300 - protein, 10 aa, synthetic construct
TKTRGDRSVV

SEQ ID NO: 56301 - protein, 10 aa, synthetic construct
TKTRGDRGVV

SEQ ID NO: 56302 - protein, 10 aa, synthetic construct
TKTRGDYVGL

SEQ ID NO: 56303 - protein, 10 aa, synthetic construct
TKTRGDQSTL

SEQ ID NO: 56304 - protein, 10 aa, synthetic construct
TKTRGDRSQT

SEQ ID NO: 56305 - protein, 10 aa, synthetic construct
TKTRGDLLLS

SEQ ID NO: 56306 - protein, 10 aa, synthetic construct
SVSRGDRQGI

SEQ ID NO: 56307 - protein, 10 aa, synthetic construct
TKYRGDRSVV

SEQ ID NO: 56308 - protein, 10 aa, synthetic construct
TKYRGDRSQT

SEQ ID NO: 56309 - protein, 10 aa, synthetic construct
TKQRGDRGQI

SEQ ID NO: 56310 - protein, 10 aa, synthetic construct
TKQRGDRQGI

SEQ ID NO: 56311 - protein, 10 aa, synthetic construct
TKQRGDRSVV

SEQ ID NO: 56312 - protein, 10 aa, synthetic construct
TKQRGDRGVV

SEQ ID NO: 56313 - protein, 10 aa, synthetic construct
TKQRGDYVGL

SEQ ID NO: 56314 - protein, 10 aa, synthetic construct
TKQRGDQSTL

SEQ ID NO: 56315 - protein, 10 aa, synthetic construct
TKQRGDRSQT

SEQ ID NO: 56316 - protein, 10 aa, synthetic construct
TKQRGDLLLS

SEQ ID NO: 56317 - protein, 10 aa, synthetic construct
SVSRGDRSVV

SEQ ID NO: 56318 - protein, 10 aa, synthetic construct
TKDRGDRGQI

SEQ ID NO: 56319 - protein, 10 aa, synthetic construct
TKDRGDRQGI

SEQ ID NO: 56320 - protein, 10 aa, synthetic construct
TKDRGDRSVV

SEQ ID NO: 56321 - protein, 10 aa, synthetic construct
TKDRGDRGVV

SEQ ID NO: 56322 - protein, 10 aa, synthetic construct
TKDRGDYVGL

SEQ ID NO: 56323 - protein, 10 aa, synthetic construct
TKDRGDQSTL

SEQ ID NO: 56324 - protein, 10 aa, synthetic construct
TKDRGDRSQT

SEQ ID NO: 56325 - protein, 10 aa, synthetic construct
TKDRGDLLLS

SEQ ID NO: 56326 - protein, 10 aa, synthetic construct
TKERGDRGQI

SEQ ID NO: 56327 - protein, 10 aa, synthetic construct
TKERGDRQGI

SEQ ID NO: 56328 - protein, 10 aa, synthetic construct
SVSRGDRGVV

SEQ ID NO: 56329 - protein, 10 aa, synthetic construct
TKERGDRSVV

SEQ ID NO: 56330 - protein, 10 aa, synthetic construct
TKERGDRGVV

SEQ ID NO: 56331 - protein, 10 aa, synthetic construct
TKERGDYVGL

SEQ ID NO: 56332 - protein, 10 aa, synthetic construct
TKERGDQSTL

SEQ ID NO: 56333 - protein, 10 aa, synthetic construct
TKERGDRSQT

SEQ ID NO: 56334 - protein, 10 aa, synthetic construct
TKERGDLLLS

SEQ ID NO: 56335 - protein, 10 aa, synthetic construct
TRGRGDYTSV

SEQ ID NO: 56336 - protein, 10 aa, synthetic construct
TRGRGDYTSM

SEQ ID NO: 56337 - protein, 10 aa, synthetic construct
TRARGDYTSV

SEQ ID NO: 56338 - protein, 10 aa, synthetic construct
TRARGDYTSM

SEQ ID NO: 56339 - protein, 10 aa, synthetic construct
SVSRGDRSQT

SEQ ID NO: 56340 - protein, 10 aa, synthetic construct
TRVRGDHVNL

SEQ ID NO: 56341 - protein, 10 aa, synthetic construct
TRVRGDRDYL

SEQ ID NO: 56342 - protein, 10 aa, synthetic construct
TRVRGDYSSV

SEQ ID NO: 56343 - protein, 10 aa, synthetic construct
TRVRGDLTVT

SEQ ID NO: 56344 - protein, 10 aa, synthetic construct
TRVRGDLIGR

SEQ ID NO: 56345 - protein, 10 aa, synthetic construct
TRPRGDYTSV

SEQ ID NO: 56346 - protein, 10 aa, synthetic construct
TRPRGDYTSM

SEQ ID NO: 56347 - protein, 10 aa, synthetic construct
TRLRGDHVNL

SEQ ID NO: 56348 - protein, 10 aa, synthetic construct
TRLRGDRDYL

SEQ ID NO: 56349 - protein, 10 aa, synthetic construct
TRLRGDYSSV

SEQ ID NO: 56350 - protein, 10 aa, synthetic construct
SVTRGDRGQI

SEQ ID NO: 56351 - protein, 10 aa, synthetic construct
TRLRGDLTVT

SEQ ID NO: 56352 - protein, 10 aa, synthetic construct
TRLRGDLIGR

SEQ ID NO: 56353 - protein, 10 aa, synthetic construct
TRIRGDHGVL

SEQ ID NO: 56354 - protein, 10 aa, synthetic construct
TRIRGDHVNL

SEQ ID NO: 56355 - protein, 10 aa, synthetic construct
TRIRGDYVGL

SEQ ID NO: 56356 - protein, 10 aa, synthetic construct
TRIRGDYSSV

SEQ ID NO: 56357 - protein, 10 aa, synthetic construct
TRIRGDQSTL

SEQ ID NO: 56358 - protein, 10 aa, synthetic construct
TRIRGDLLLS

SEQ ID NO: 56359 - protein, 10 aa, synthetic construct
TRMRGDHGVL

SEQ ID NO: 56360 - protein, 10 aa, synthetic construct
TRMRGDHVNL

SEQ ID NO: 56361 - protein, 10 aa, synthetic construct
SVTRGDRQGI

SEQ ID NO: 56362 - protein, 10 aa, synthetic construct
TRMRGDYVGL

SEQ ID NO: 56363 - protein, 10 aa, synthetic construct
TRMRGDYSSV

SEQ ID NO: 56364 - protein, 10 aa, synthetic construct
TRMRGDQSTL

SEQ ID NO: 56365 - protein, 10 aa, synthetic construct
TRMRGDLLLS

SEQ ID NO: 56366 - protein, 10 aa, synthetic construct
TRWRGDHVNL

SEQ ID NO: 56367 - protein, 10 aa, synthetic construct
TRWRGDRDYL

SEQ ID NO: 56368 - protein, 10 aa, synthetic construct
TRWRGDYSSV

SEQ ID NO: 56369 - protein, 10 aa, synthetic construct
TRWRGDLTVT

SEQ ID NO: 56370 - protein, 10 aa, synthetic construct
TRWRGDLIGR

SEQ ID NO: 56371 - protein, 10 aa, synthetic construct
TRFRGDHGVL

SEQ ID NO: 56372 - protein, 10 aa, synthetic construct
SVTRGDRSVV

SEQ ID NO: 56373 - protein, 10 aa, synthetic construct
TRFRGDHVNL

SEQ ID NO: 56374 - protein, 10 aa, synthetic construct
TRFRGDYVGL

SEQ ID NO: 56375 - protein, 10 aa, synthetic construct
TRFRGDYSSV

SEQ ID NO: 56376 - protein, 10 aa, synthetic construct
TRFRGDQSTL

SEQ ID NO: 56377 - protein, 10 aa, synthetic construct
TRFRGDLLLS

SEQ ID NO: 56378 - protein, 10 aa, synthetic construct
TRKRGDHGVL

SEQ ID NO: 56379 - protein, 10 aa, synthetic construct
TRKRGDHVNL

SEQ ID NO: 56380 - protein, 10 aa, synthetic construct
TRKRGDYVGL

SEQ ID NO: 56381 - protein, 10 aa, synthetic construct
TRKRGDYSSV

SEQ ID NO: 56382 - protein, 10 aa, synthetic construct
TRKRGDQSTL

SEQ ID NO: 56383 - protein, 10 aa, synthetic construct
SVTRGDRGVV

SEQ ID NO: 56384 - protein, 10 aa, synthetic construct
TRKRGDLLLS

SEQ ID NO: 56385 - protein, 10 aa, synthetic construct
TRRRGDYTSV

SEQ ID NO: 56386 - protein, 10 aa, synthetic construct
TRRRGDYTSM

SEQ ID NO: 56387 - protein, 10 aa, synthetic construct
TRHRGDHVNL

SEQ ID NO: 56388 - protein, 10 aa, synthetic construct
TRHRGDRDYL

SEQ ID NO: 56389 - protein, 10 aa, synthetic construct
TRHRGDYSSV

SEQ ID NO: 56390 - protein, 10 aa, synthetic construct
TRHRGDLTVT

SEQ ID NO: 56391 - protein, 10 aa, synthetic construct
TRHRGDLIGR

SEQ ID NO: 56392 - protein, 10 aa, synthetic construct
TRSRGDHVNL

SEQ ID NO: 56393 - protein, 10 aa, synthetic construct
TRSRGDRDYL

SEQ ID NO: 56394 - protein, 10 aa, synthetic construct
SVTRGDRSQT

SEQ ID NO: 56395 - protein, 10 aa, synthetic construct
TRSRGDYSSV

SEQ ID NO: 56396 - protein, 10 aa, synthetic construct
TRSRGDLTVT

SEQ ID NO: 56397 - protein, 10 aa, synthetic construct
TRSRGDLIGR

SEQ ID NO: 56398 - protein, 10 aa, synthetic construct
TRTRGDHVNL

SEQ ID NO: 56399 - protein, 10 aa, synthetic construct
TRTRGDRDYL

SEQ ID NO: 56400 - protein, 10 aa, synthetic construct
TRTRGDYSSV

SEQ ID NO: 56401 - protein, 10 aa, synthetic construct
TRTRGDLTVT

SEQ ID NO: 56402 - protein, 10 aa, synthetic construct
TRTRGDLIGR

SEQ ID NO: 56403 - protein, 10 aa, synthetic construct
TRYRGDHGVL

SEQ ID NO: 56404 - protein, 10 aa, synthetic construct
TRYRGDHVNL

SEQ ID NO: 56405 - protein, 10 aa, synthetic construct
NKNRGDRDYL

SEQ ID NO: 56406 - protein, 10 aa, synthetic construct
SVQRGDRGQI

SEQ ID NO: 56407 - protein, 10 aa, synthetic construct
TRYRGDYVGL

SEQ ID NO: 56408 - protein, 10 aa, synthetic construct
TRYRGDYSSV

SEQ ID NO: 56409 - protein, 10 aa, synthetic construct
TRYRGDQSTL

SEQ ID NO: 56410 - protein, 10 aa, synthetic construct
TRYRGDLLLS

SEQ ID NO: 56411 - protein, 10 aa, synthetic construct
TRNRGDHGVL

SEQ ID NO: 56412 - protein, 10 aa, synthetic construct
TRNRGDHVNL

SEQ ID NO: 56413 - protein, 10 aa, synthetic construct
TRNRGDYVGL

SEQ ID NO: 56414 - protein, 10 aa, synthetic construct
TRNRGDYSSV

SEQ ID NO: 56415 - protein, 10 aa, synthetic construct
TRNRGDQSTL

SEQ ID NO: 56416 - protein, 10 aa, synthetic construct
TRNRGDLLLS

SEQ ID NO: 56417 - protein, 10 aa, synthetic construct
SVQRGDRQGI

SEQ ID NO: 56418 - protein, 10 aa, synthetic construct
TRQRGDHVNL

SEQ ID NO: 56419 - protein, 10 aa, synthetic construct
TRQRGDRDYL

SEQ ID NO: 56420 - protein, 10 aa, synthetic construct
TRQRGDYSSV

SEQ ID NO: 56421 - protein, 10 aa, synthetic construct
TRQRGDLTVT

SEQ ID NO: 56422 - protein, 10 aa, synthetic construct
TRQRGDLIGR

SEQ ID NO: 56423 - protein, 10 aa, synthetic construct
TRDRGDHVNL

SEQ ID NO: 56424 - protein, 10 aa, synthetic construct
TRDRGDRDYL

SEQ ID NO: 56425 - protein, 10 aa, synthetic construct
TRDRGDYSSV

SEQ ID NO: 56426 - protein, 10 aa, synthetic construct
TRDRGDLTVT

SEQ ID NO: 56427 - protein, 10 aa, synthetic construct
TRDRGDLIGR

SEQ ID NO: 56428 - protein, 10 aa, synthetic construct
SVQRGDRSVV

SEQ ID NO: 56429 - protein, 10 aa, synthetic construct
TRERGDHVNL

SEQ ID NO: 56430 - protein, 10 aa, synthetic construct
TRERGDRDYL

SEQ ID NO: 56431 - protein, 10 aa, synthetic construct
TRERGDYSSV

SEQ ID NO: 56432 - protein, 10 aa, synthetic construct
TRERGDLTVT

SEQ ID NO: 56433 - protein, 10 aa, synthetic construct
TRERGDLIGR

SEQ ID NO: 56434 - protein, 10 aa, synthetic construct
THGRGDHVNL

SEQ ID NO: 56435 - protein, 10 aa, synthetic construct
THGRGDRDYL

SEQ ID NO: 56436 - protein, 10 aa, synthetic construct
THGRGDYSSV

SEQ ID NO: 56437 - protein, 10 aa, synthetic construct
THGRGDLTVT

SEQ ID NO: 56438 - protein, 10 aa, synthetic construct
THGRGDLIGR

SEQ ID NO: 56439 - protein, 10 aa, synthetic construct
SVQRGDRGVV

SEQ ID NO: 56440 - protein, 10 aa, synthetic construct
THARGDHVNL

SEQ ID NO: 56441 - protein, 10 aa, synthetic construct
THARGDRDYL

SEQ ID NO: 56442 - protein, 10 aa, synthetic construct
THARGDYSSV

SEQ ID NO: 56443 - protein, 10 aa, synthetic construct
THARGDLTVT

SEQ ID NO: 56444 - protein, 10 aa, synthetic construct
THARGDLIGR

SEQ ID NO: 56445 - protein, 10 aa, synthetic construct
THVRGDHGVL

SEQ ID NO: 56446 - protein, 10 aa, synthetic construct
THVRGDHVNL

SEQ ID NO: 56447 - protein, 10 aa, synthetic construct
THVRGDYVGL

SEQ ID NO: 56448 - protein, 10 aa, synthetic construct
THVRGDYSSV

SEQ ID NO: 56449 - protein, 10 aa, synthetic construct
THVRGDQSTL

SEQ ID NO: 56450 - protein, 10 aa, synthetic construct
SVQRGDRSQT

SEQ ID NO: 56451 - protein, 10 aa, synthetic construct
THVRGDLLLS

SEQ ID NO: 56452 - protein, 10 aa, synthetic construct
THPRGDHVNL

SEQ ID NO: 56453 - protein, 10 aa, synthetic construct
THPRGDRDYL

SEQ ID NO: 56454 - protein, 10 aa, synthetic construct
THPRGDYSSV

SEQ ID NO: 56455 - protein, 10 aa, synthetic construct
THPRGDLTVT

SEQ ID NO: 56456 - protein, 10 aa, synthetic construct
THPRGDLIGR

SEQ ID NO: 56457 - protein, 10 aa, synthetic construct
THLRGDHGVL

SEQ ID NO: 56458 - protein, 10 aa, synthetic construct
THLRGDHVNL

SEQ ID NO: 56459 - protein, 10 aa, synthetic construct
THLRGDYVGL

SEQ ID NO: 56460 - protein, 10 aa, synthetic construct
THLRGDYSSV

SEQ ID NO: 56461 - protein, 10 aa, synthetic construct
SVDRGDRGQI

SEQ ID NO: 56462 - protein, 10 aa, synthetic construct
THLRGDQSTL

SEQ ID NO: 56463 - protein, 10 aa, synthetic construct
THLRGDLLLS

SEQ ID NO: 56464 - protein, 10 aa, synthetic construct
THIRGDRGQI

SEQ ID NO: 56465 - protein, 10 aa, synthetic construct
THIRGDRQGI

SEQ ID NO: 56466 - protein, 10 aa, synthetic construct
THIRGDRSVV

SEQ ID NO: 56467 - protein, 10 aa, synthetic construct
THIRGDRGVV

SEQ ID NO: 56468 - protein, 10 aa, synthetic construct
THIRGDYVGL

SEQ ID NO: 56469 - protein, 10 aa, synthetic construct
THIRGDQSTL

SEQ ID NO: 56470 - protein, 10 aa, synthetic construct
THIRGDRSQT

SEQ ID NO: 56471 - protein, 10 aa, synthetic construct
THIRGDLLLS

SEQ ID NO: 56472 - protein, 10 aa, synthetic construct
SVDRGDRQGI

SEQ ID NO: 56473 - protein, 10 aa, synthetic construct
THMRGDRGQI

SEQ ID NO: 56474 - protein, 10 aa, synthetic construct
THMRGDRQGI

SEQ ID NO: 56475 - protein, 10 aa, synthetic construct
THMRGDRSVV

SEQ ID NO: 56476 - protein, 10 aa, synthetic construct
THMRGDRGVV

SEQ ID NO: 56477 - protein, 10 aa, synthetic construct
THMRGDYVGL

SEQ ID NO: 56478 - protein, 10 aa, synthetic construct
THMRGDQSTL

SEQ ID NO: 56479 - protein, 10 aa, synthetic construct
THMRGDRSQT

SEQ ID NO: 56480 - protein, 10 aa, synthetic construct
THMRGDLLLS

SEQ ID NO: 56481 - protein, 10 aa, synthetic construct
THWRGDHGVL

SEQ ID NO: 56482 - protein, 10 aa, synthetic construct
THWRGDHVNL

SEQ ID NO: 56483 - protein, 10 aa, synthetic construct
SVDRGDRSVV

SEQ ID NO: 56484 - protein, 10 aa, synthetic construct
THWRGDYVGL

SEQ ID NO: 56485 - protein, 10 aa, synthetic construct
THWRGDYSSV

SEQ ID NO: 56486 - protein, 10 aa, synthetic construct
THWRGDQSTL

SEQ ID NO: 56487 - protein, 10 aa, synthetic construct
THWRGDLLLS

SEQ ID NO: 56488 - protein, 10 aa, synthetic construct
THFRGDRGQI

SEQ ID NO: 56489 - protein, 10 aa, synthetic construct
THFRGDRQGI

SEQ ID NO: 56490 - protein, 10 aa, synthetic construct
THFRGDRSVV

SEQ ID NO: 56491 - protein, 10 aa, synthetic construct
THFRGDRGVV

SEQ ID NO: 56492 - protein, 10 aa, synthetic construct
THFRGDYVGL

SEQ ID NO: 56493 - protein, 10 aa, synthetic construct
THFRGDQSTL

SEQ ID NO: 56494 - protein, 10 aa, synthetic construct
SVDRGDRGVV

SEQ ID NO: 56495 - protein, 10 aa, synthetic construct
THFRGDRSQT

SEQ ID NO: 56496 - protein, 10 aa, synthetic construct
THFRGDLLLS

SEQ ID NO: 56497 - protein, 10 aa, synthetic construct
THKRGDRGQI

SEQ ID NO: 56498 - protein, 10 aa, synthetic construct
THKRGDRQGI

SEQ ID NO: 56499 - protein, 10 aa, synthetic construct
THKRGDRSVV

SEQ ID NO: 56500 - protein, 10 aa, synthetic construct
THKRGDRGVV

SEQ ID NO: 56501 - protein, 10 aa, synthetic construct
THKRGDYVGL

SEQ ID NO: 56502 - protein, 10 aa, synthetic construct
THKRGDQSTL

SEQ ID NO: 56503 - protein, 10 aa, synthetic construct
THKRGDRSQT

SEQ ID NO: 56504 - protein, 10 aa, synthetic construct
THKRGDLLLS

SEQ ID NO: 56505 - protein, 10 aa, synthetic construct
SVDRGDRSQT

SEQ ID NO: 56506 - protein, 10 aa, synthetic construct
THRRGDHVNL

SEQ ID NO: 56507 - protein, 10 aa, synthetic construct
THRRGDRDYL

SEQ ID NO: 56508 - protein, 10 aa, synthetic construct
THRRGDYSSV

SEQ ID NO: 56509 - protein, 10 aa, synthetic construct
THRRGDLTVT

SEQ ID NO: 56510 - protein, 10 aa, synthetic construct
THRRGDLIGR

SEQ ID NO: 56511 - protein, 10 aa, synthetic construct
THHRGDHGVL

SEQ ID NO: 56512 - protein, 10 aa, synthetic construct
THHRGDHVNL

SEQ ID NO: 56513 - protein, 10 aa, synthetic construct
THHRGDYVGL

SEQ ID NO: 56514 - protein, 10 aa, synthetic construct
THHRGDYSSV

SEQ ID NO: 56515 - protein, 10 aa, synthetic construct
THHRGDQSTL

SEQ ID NO: 56516 - protein, 10 aa, synthetic construct
NKNRGDYSSV

SEQ ID NO: 56517 - protein, 10 aa, synthetic construct
SVERGDRGQI

SEQ ID NO: 56518 - protein, 10 aa, synthetic construct
THHRGDLLLS

SEQ ID NO: 56519 - protein, 10 aa, synthetic construct
THSRGDHGVL

SEQ ID NO: 56520 - protein, 10 aa, synthetic construct
THSRGDHVNL

SEQ ID NO: 56521 - protein, 10 aa, synthetic construct
THSRGDYVGL

SEQ ID NO: 56522 - protein, 10 aa, synthetic construct
THSRGDYSSV

SEQ ID NO: 56523 - protein, 10 aa, synthetic construct
THSRGDQSTL

SEQ ID NO: 56524 - protein, 10 aa, synthetic construct
THSRGDLLLS

SEQ ID NO: 56525 - protein, 10 aa, synthetic construct
THTRGDHGVL

SEQ ID NO: 56526 - protein, 10 aa, synthetic construct
THTRGDHVNL

SEQ ID NO: 56527 - protein, 10 aa, synthetic construct
THTRGDYVGL

SEQ ID NO: 56528 - protein, 10 aa, synthetic construct
SVERGDRQGI

SEQ ID NO: 56529 - protein, 10 aa, synthetic construct
THTRGDYSSV

SEQ ID NO: 56530 - protein, 10 aa, synthetic construct
THTRGDQSTL

SEQ ID NO: 56531 - protein, 10 aa, synthetic construct
THTRGDLLLS

SEQ ID NO: 56532 - protein, 10 aa, synthetic construct
THYRGDRGQI

SEQ ID NO: 56533 - protein, 10 aa, synthetic construct
THYRGDRQGI

SEQ ID NO: 56534 - protein, 10 aa, synthetic construct
THYRGDRSVV

SEQ ID NO: 56535 - protein, 10 aa, synthetic construct
THYRGDRGVV

SEQ ID NO: 56536 - protein, 10 aa, synthetic construct
THYRGDYVGL

SEQ ID NO: 56537 - protein, 10 aa, synthetic construct
THYRGDQSTL

SEQ ID NO: 56538 - protein, 10 aa, synthetic construct
THYRGDRSQT

SEQ ID NO: 56539 - protein, 10 aa, synthetic construct
SVERGDRSVV

SEQ ID NO: 56540 - protein, 10 aa, synthetic construct
THYRGDLLLS

SEQ ID NO: 56541 - protein, 10 aa, synthetic construct
THNRGDRGQI

SEQ ID NO: 56542 - protein, 10 aa, synthetic construct
THNRGDRQGI

SEQ ID NO: 56543 - protein, 10 aa, synthetic construct
THNRGDRSVV

SEQ ID NO: 56544 - protein, 10 aa, synthetic construct
THNRGDRGVV

SEQ ID NO: 56545 - protein, 10 aa, synthetic construct
THNRGDYVGL

SEQ ID NO: 56546 - protein, 10 aa, synthetic construct
THNRGDQSTL

SEQ ID NO: 56547 - protein, 10 aa, synthetic construct
THNRGDRSQT

SEQ ID NO: 56548 - protein, 10 aa, synthetic construct
THNRGDLLLS

SEQ ID NO: 56549 - protein, 10 aa, synthetic construct
THQRGDHGVL

SEQ ID NO: 56550 - protein, 10 aa, synthetic construct
SVERGDRGVV

SEQ ID NO: 56551 - protein, 10 aa, synthetic construct
THQRGDHVNL

SEQ ID NO: 56552 - protein, 10 aa, synthetic construct
THQRGDYVGL

SEQ ID NO: 56553 - protein, 10 aa, synthetic construct
THQRGDYSSV

SEQ ID NO: 56554 - protein, 10 aa, synthetic construct
THQRGDQSTL

SEQ ID NO: 56555 - protein, 10 aa, synthetic construct
THQRGDLLLS

SEQ ID NO: 56556 - protein, 10 aa, synthetic construct
THDRGDHGVL

SEQ ID NO: 56557 - protein, 10 aa, synthetic construct
THDRGDHVNL

SEQ ID NO: 56558 - protein, 10 aa, synthetic construct
THDRGDYVGL

SEQ ID NO: 56559 - protein, 10 aa, synthetic construct
THDRGDYSSV

SEQ ID NO: 56560 - protein, 10 aa, synthetic construct
THDRGDQSTL

SEQ ID NO: 56561 - protein, 10 aa, synthetic construct
SVERGDRSQT

SEQ ID NO: 56562 - protein, 10 aa, synthetic construct
THDRGDLLLS

SEQ ID NO: 56563 - protein, 10 aa, synthetic construct
THERGDHGVL

SEQ ID NO: 56564 - protein, 10 aa, synthetic construct
THERGDHVNL

SEQ ID NO: 56565 - protein, 10 aa, synthetic construct
THERGDYVGL

SEQ ID NO: 56566 - protein, 10 aa, synthetic construct
THERGDYSSV

SEQ ID NO: 56567 - protein, 10 aa, synthetic construct
THERGDQSTL

SEQ ID NO: 56568 - protein, 10 aa, synthetic construct
THERGDLLLS

SEQ ID NO: 56569 - protein, 10 aa, synthetic construct
TSGRGDYNSL

SEQ ID NO: 56570 - protein, 10 aa, synthetic construct
TSGRGDYTSV

SEQ ID NO: 56571 - protein, 10 aa, synthetic construct
TSGRGDYTSM

SEQ ID NO: 56572 - protein, 10 aa, synthetic construct
SPGRGDHGVL

SEQ ID NO: 56573 - protein, 10 aa, synthetic construct
TSGRGDFQNT

SEQ ID NO: 56574 - protein, 10 aa, synthetic construct
TSARGDYNSL

SEQ ID NO: 56575 - protein, 10 aa, synthetic construct
TSARGDYTSV

SEQ ID NO: 56576 - protein, 10 aa, synthetic construct
TSARGDYTSM

SEQ ID NO: 56577 - protein, 10 aa, synthetic construct
TSARGDFQNT

SEQ ID NO: 56578 - protein, 10 aa, synthetic construct
TSVRGDRDYL

SEQ ID NO: 56579 - protein, 10 aa, synthetic construct
TSVRGDYTSV

SEQ ID NO: 56580 - protein, 10 aa, synthetic construct
TSVRGDLTVT

SEQ ID NO: 56581 - protein, 10 aa, synthetic construct
TSVRGDLIGR

SEQ ID NO: 56582 - protein, 10 aa, synthetic construct
TSLRGDRDYL

SEQ ID NO: 56583 - protein, 10 aa, synthetic construct
SPGRGDYVGL

SEQ ID NO: 56584 - protein, 10 aa, synthetic construct
TSLRGDYTSV

SEQ ID NO: 56585 - protein, 10 aa, synthetic construct
TSLRGDLTVT

SEQ ID NO: 56586 - protein, 10 aa, synthetic construct
TSLRGDLIGR

SEQ ID NO: 56587 - protein, 10 aa, synthetic construct
TSIRGDHGVL

SEQ ID NO: 56588 - protein, 10 aa, synthetic construct
TSIRGDHVNL

SEQ ID NO: 56589 - protein, 10 aa, synthetic construct
TSIRGDRDYL

SEQ ID NO: 56590 - protein, 10 aa, synthetic construct
TSIRGDYSSV

SEQ ID NO: 56591 - protein, 10 aa, synthetic construct
TSIRGDLTVT

SEQ ID NO: 56592 - protein, 10 aa, synthetic construct
TSMRGDHGVL

SEQ ID NO: 56593 - protein, 10 aa, synthetic construct
TSMRGDHVNL

SEQ ID NO: 56594 - protein, 10 aa, synthetic construct
SPGRGDQSTL

SEQ ID NO: 56595 - protein, 10 aa, synthetic construct
TSMRGDRDYL

SEQ ID NO: 56596 - protein, 10 aa, synthetic construct
TSMRGDYSSV

SEQ ID NO: 56597 - protein, 10 aa, synthetic construct
TSMRGDLTVT

SEQ ID NO: 56598 - protein, 10 aa, synthetic construct
TSWRGDRDYL

SEQ ID NO: 56599 - protein, 10 aa, synthetic construct
TSWRGDYTSV

SEQ ID NO: 56600 - protein, 10 aa, synthetic construct
TSWRGDLTVT

SEQ ID NO: 56601 - protein, 10 aa, synthetic construct
TSWRGDLIGR

SEQ ID NO: 56602 - protein, 10 aa, synthetic construct
TSFRGDHGVL

SEQ ID NO: 56603 - protein, 10 aa, synthetic construct
TSFRGDHVNL

SEQ ID NO: 56604 - protein, 10 aa, synthetic construct
TSFRGDRDYL

SEQ ID NO: 56605 - protein, 10 aa, synthetic construct
SPGRGDLLLS

SEQ ID NO: 56606 - protein, 10 aa, synthetic construct
TSFRGDYSSV

SEQ ID NO: 56607 - protein, 10 aa, synthetic construct
TSFRGDLTVT

SEQ ID NO: 56608 - protein, 10 aa, synthetic construct
TSKRGDHGVL

SEQ ID NO: 56609 - protein, 10 aa, synthetic construct
TSKRGDHVNL

SEQ ID NO: 56610 - protein, 10 aa, synthetic construct
TSKRGDRDYL

SEQ ID NO: 56611 - protein, 10 aa, synthetic construct
TSKRGDYSSV

SEQ ID NO: 56612 - protein, 10 aa, synthetic construct
TSKRGDLTVT

SEQ ID NO: 56613 - protein, 10 aa, synthetic construct
TSRRGDYNSL

SEQ ID NO: 56614 - protein, 10 aa, synthetic construct
TSRRGDYTSV

SEQ ID NO: 56615 - protein, 10 aa, synthetic construct
TSRRGDYTSM

SEQ ID NO: 56616 - protein, 10 aa, synthetic construct
SPARGDHGVL

SEQ ID NO: 56617 - protein, 10 aa, synthetic construct
TSRRGDFQNT

SEQ ID NO: 56618 - protein, 10 aa, synthetic construct
TSHRGDRDYL

SEQ ID NO: 56619 - protein, 10 aa, synthetic construct
TSHRGDYTSV

SEQ ID NO: 56620 - protein, 10 aa, synthetic construct
TSHRGDLTVT

SEQ ID NO: 56621 - protein, 10 aa, synthetic construct
TSHRGDLIGR

SEQ ID NO: 56622 - protein, 10 aa, synthetic construct
TSSRGDRDYL

SEQ ID NO: 56623 - protein, 10 aa, synthetic construct
TSSRGDYTSV

SEQ ID NO: 56624 - protein, 10 aa, synthetic construct
TSSRGDLTVT

SEQ ID NO: 56625 - protein, 10 aa, synthetic construct
TSSRGDLIGR

SEQ ID NO: 56626 - protein, 10 aa, synthetic construct
TSTRGDRDYL

SEQ ID NO: 56627 - protein, 10 aa, synthetic construct
NKNRGDLTVT

SEQ ID NO: 56628 - protein, 10 aa, synthetic construct
SPARGDYVGL

SEQ ID NO: 56629 - protein, 10 aa, synthetic construct
TSTRGDYTSV

SEQ ID NO: 56630 - protein, 10 aa, synthetic construct
TSTRGDLTVT

SEQ ID NO: 56631 - protein, 10 aa, synthetic construct
TSTRGDLIGR

SEQ ID NO: 56632 - protein, 10 aa, synthetic construct
TSYRGDHGVL

SEQ ID NO: 56633 - protein, 10 aa, synthetic construct
TSYRGDHVNL

SEQ ID NO: 56634 - protein, 10 aa, synthetic construct
TSYRGDRDYL

SEQ ID NO: 56635 - protein, 10 aa, synthetic construct
TSYRGDYSSV

SEQ ID NO: 56636 - protein, 10 aa, synthetic construct
TSYRGDLTVT

SEQ ID NO: 56637 - protein, 10 aa, synthetic construct
TSNRGDHGVL

SEQ ID NO: 56638 - protein, 10 aa, synthetic construct
TSNRGDHVNL

SEQ ID NO: 56639 - protein, 10 aa, synthetic construct
SPARGDQSTL

SEQ ID NO: 56640 - protein, 10 aa, synthetic construct
TSNRGDRDYL

SEQ ID NO: 56641 - protein, 10 aa, synthetic construct
TSNRGDYSSV

SEQ ID NO: 56642 - protein, 10 aa, synthetic construct
TSNRGDLTVT

SEQ ID NO: 56643 - protein, 10 aa, synthetic construct
TSQRGDRDYL

SEQ ID NO: 56644 - protein, 10 aa, synthetic construct
TSQRGDYTSV

SEQ ID NO: 56645 - protein, 10 aa, synthetic construct
TSQRGDLTVT

SEQ ID NO: 56646 - protein, 10 aa, synthetic construct
TSQRGDLIGR

SEQ ID NO: 56647 - protein, 10 aa, synthetic construct
TSDRGDRDYL

SEQ ID NO: 56648 - protein, 10 aa, synthetic construct
TSDRGDYTSV

SEQ ID NO: 56649 - protein, 10 aa, synthetic construct
TSDRGDLTVT

SEQ ID NO: 56650 - protein, 10 aa, synthetic construct
SPARGDLLLS

SEQ ID NO: 56651 - protein, 10 aa, synthetic construct
TSDRGDLIGR

SEQ ID NO: 56652 - protein, 10 aa, synthetic construct
TSERGDRDYL

SEQ ID NO: 56653 - protein, 10 aa, synthetic construct
TSERGDYTSV

SEQ ID NO: 56654 - protein, 10 aa, synthetic construct
TSERGDLTVT

SEQ ID NO: 56655 - protein, 10 aa, synthetic construct
TSERGDLIGR

SEQ ID NO: 56656 - protein, 10 aa, synthetic construct
TTGRGDHVNL

SEQ ID NO: 56657 - protein, 10 aa, synthetic construct
TTGRGDRDYL

SEQ ID NO: 56658 - protein, 10 aa, synthetic construct
TTGRGDYSSV

SEQ ID NO: 56659 - protein, 10 aa, synthetic construct
TTGRGDLTVT

SEQ ID NO: 56660 - protein, 10 aa, synthetic construct
TTGRGDLIGR

SEQ ID NO: 56661 - protein, 10 aa, synthetic construct
SPVRGDRGQI

SEQ ID NO: 56662 - protein, 10 aa, synthetic construct
TTARGDHVNL

SEQ ID NO: 56663 - protein, 10 aa, synthetic construct
TTARGDRDYL

SEQ ID NO: 56664 - protein, 10 aa, synthetic construct
TTARGDYSSV

SEQ ID NO: 56665 - protein, 10 aa, synthetic construct
TTARGDLTVT

SEQ ID NO: 56666 - protein, 10 aa, synthetic construct
TTARGDLIGR

SEQ ID NO: 56667 - protein, 10 aa, synthetic construct
TTVRGDHGVL

SEQ ID NO: 56668 - protein, 10 aa, synthetic construct
TTVRGDHVNL

SEQ ID NO: 56669 - protein, 10 aa, synthetic construct
TTVRGDYVGL

SEQ ID NO: 56670 - protein, 10 aa, synthetic construct
TTVRGDYSSV

SEQ ID NO: 56671 - protein, 10 aa, synthetic construct
TTVRGDQSTL

SEQ ID NO: 56672 - protein, 10 aa, synthetic construct
SPVRGDRQGI

SEQ ID NO: 56673 - protein, 10 aa, synthetic construct
TTVRGDLLLS

SEQ ID NO: 56674 - protein, 10 aa, synthetic construct
TTPRGDHVNL

SEQ ID NO: 56675 - protein, 10 aa, synthetic construct
TTPRGDRDYL

SEQ ID NO: 56676 - protein, 10 aa, synthetic construct
TTPRGDYSSV

SEQ ID NO: 56677 - protein, 10 aa, synthetic construct
TTPRGDLTVT

SEQ ID NO: 56678 - protein, 10 aa, synthetic construct
TTPRGDLIGR

SEQ ID NO: 56679 - protein, 10 aa, synthetic construct
TTLRGDHGVL

SEQ ID NO: 56680 - protein, 10 aa, synthetic construct
TTLRGDHVNL

SEQ ID NO: 56681 - protein, 10 aa, synthetic construct
TTLRGDYVGL

SEQ ID NO: 56682 - protein, 10 aa, synthetic construct
TTLRGDYSSV

SEQ ID NO: 56683 - protein, 10 aa, synthetic construct
SPVRGDRSVV

SEQ ID NO: 56684 - protein, 10 aa, synthetic construct
TTLRGDQSTL

SEQ ID NO: 56685 - protein, 10 aa, synthetic construct
TTLRGDLLLS

SEQ ID NO: 56686 - protein, 10 aa, synthetic construct
TTIRGDRGQI

SEQ ID NO: 56687 - protein, 10 aa, synthetic construct
TTIRGDRQGI

SEQ ID NO: 56688 - protein, 10 aa, synthetic construct
TTIRGDRSVV

SEQ ID NO: 56689 - protein, 10 aa, synthetic construct
TTIRGDRGVV

SEQ ID NO: 56690 - protein, 10 aa, synthetic construct
TTIRGDYVGL

SEQ ID NO: 56691 - protein, 10 aa, synthetic construct
TTIRGDQSTL

SEQ ID NO: 56692 - protein, 10 aa, synthetic construct
TTIRGDRSQT

SEQ ID NO: 56693 - protein, 10 aa, synthetic construct
TTIRGDLLLS

SEQ ID NO: 56694 - protein, 10 aa, synthetic construct
SPVRGDRGVV

SEQ ID NO: 56695 - protein, 10 aa, synthetic construct
TTMRGDRGQI

SEQ ID NO: 56696 - protein, 10 aa, synthetic construct
TTMRGDRQGI

SEQ ID NO: 56697 - protein, 10 aa, synthetic construct
TTMRGDRSVV

SEQ ID NO: 56698 - protein, 10 aa, synthetic construct
TTMRGDRGVV

SEQ ID NO: 56699 - protein, 10 aa, synthetic construct
TTMRGDYVGL

SEQ ID NO: 56700 - protein, 10 aa, synthetic construct
TTMRGDQSTL

SEQ ID NO: 56701 - protein, 10 aa, synthetic construct
TTMRGDRSQT

SEQ ID NO: 56702 - protein, 10 aa, synthetic construct
TTMRGDLLLS

SEQ ID NO: 56703 - protein, 10 aa, synthetic construct
TTWRGDHGVL

SEQ ID NO: 56704 - protein, 10 aa, synthetic construct
TTWRGDHVNL

SEQ ID NO: 56705 - protein, 10 aa, synthetic construct
SPVRGDRSQT

SEQ ID NO: 56706 - protein, 10 aa, synthetic construct
TTWRGDYVGL

SEQ ID NO: 56707 - protein, 10 aa, synthetic construct
TTWRGDYSSV

SEQ ID NO: 56708 - protein, 10 aa, synthetic construct
TTWRGDQSTL

SEQ ID NO: 56709 - protein, 10 aa, synthetic construct
TTWRGDLLLS

SEQ ID NO: 56710 - protein, 10 aa, synthetic construct
TTFRGDRGQI

SEQ ID NO: 56711 - protein, 10 aa, synthetic construct
TTFRGDRQGI

SEQ ID NO: 56712 - protein, 10 aa, synthetic construct
TTFRGDRSVV

SEQ ID NO: 56713 - protein, 10 aa, synthetic construct
TTFRGDRGVV

SEQ ID NO: 56714 - protein, 10 aa, synthetic construct
TTFRGDYVGL

SEQ ID NO: 56715 - protein, 10 aa, synthetic construct
TTFRGDQSTL

SEQ ID NO: 56716 - protein, 10 aa, synthetic construct
SPPRGDHGVL

SEQ ID NO: 56717 - protein, 10 aa, synthetic construct
TTFRGDRSQT

SEQ ID NO: 56718 - protein, 10 aa, synthetic construct
TTFRGDLLLS

SEQ ID NO: 56719 - protein, 10 aa, synthetic construct
TTKRGDRGQI

SEQ ID NO: 56720 - protein, 10 aa, synthetic construct
TTKRGDRQGI

SEQ ID NO: 56721 - protein, 10 aa, synthetic construct
TTKRGDRSVV

SEQ ID NO: 56722 - protein, 10 aa, synthetic construct
TTKRGDRGVV

SEQ ID NO: 56723 - protein, 10 aa, synthetic construct
TTKRGDYVGL

SEQ ID NO: 56724 - protein, 10 aa, synthetic construct
TTKRGDQSTL

SEQ ID NO: 56725 - protein, 10 aa, synthetic construct
TTKRGDRSQT

SEQ ID NO: 56726 - protein, 10 aa, synthetic construct
TTKRGDLLLS

SEQ ID NO: 56727 - protein, 10 aa, synthetic construct
SPPRGDYVGL

SEQ ID NO: 56728 - protein, 10 aa, synthetic construct
TTRRGDHVNL

SEQ ID NO: 56729 - protein, 10 aa, synthetic construct
TTRRGDRDYL

SEQ ID NO: 56730 - protein, 10 aa, synthetic construct
TTRRGDYSSV

SEQ ID NO: 56731 - protein, 10 aa, synthetic construct
TTRRGDLTVT

SEQ ID NO: 56732 - protein, 10 aa, synthetic construct
TTRRGDLIGR

SEQ ID NO: 56733 - protein, 10 aa, synthetic construct
TTHRGDHGVL

SEQ ID NO: 56734 - protein, 10 aa, synthetic construct
TTHRGDHVNL

SEQ ID NO: 56735 - protein, 10 aa, synthetic construct
TTHRGDYVGL

SEQ ID NO: 56736 - protein, 10 aa, synthetic construct
TTHRGDYSSV

SEQ ID NO: 56737 - protein, 10 aa, synthetic construct
TTHRGDQSTL

SEQ ID NO: 56738 - protein, 10 aa, synthetic construct
DKKRGDYTSV

SEQ ID NO: 56739 - protein, 10 aa, synthetic construct
SPPRGDQSTL

SEQ ID NO: 56740 - protein, 10 aa, synthetic construct
TTHRGDLLLS

SEQ ID NO: 56741 - protein, 10 aa, synthetic construct
TTSRGDHGVL

SEQ ID NO: 56742 - protein, 10 aa, synthetic construct
TTSRGDHVNL

SEQ ID NO: 56743 - protein, 10 aa, synthetic construct
TTSRGDYVGL

SEQ ID NO: 56744 - protein, 10 aa, synthetic construct
TTSRGDYSSV

SEQ ID NO: 56745 - protein, 10 aa, synthetic construct
TTSRGDQSTL

SEQ ID NO: 56746 - protein, 10 aa, synthetic construct
TTSRGDLLLS

SEQ ID NO: 56747 - protein, 10 aa, synthetic construct
TTTRGDHGVL

SEQ ID NO: 56748 - protein, 10 aa, synthetic construct
TTTRGDHVNL

SEQ ID NO: 56749 - protein, 10 aa, synthetic construct
TTTRGDYVGL

SEQ ID NO: 56750 - protein, 10 aa, synthetic construct
SPPRGDLLLS

SEQ ID NO: 56751 - protein, 10 aa, synthetic construct
TTTRGDYSSV

SEQ ID NO: 56752 - protein, 10 aa, synthetic construct
TTTRGDQSTL

SEQ ID NO: 56753 - protein, 10 aa, synthetic construct
TTTRGDLLLS

SEQ ID NO: 56754 - protein, 10 aa, synthetic construct
TTYRGDRGQI

SEQ ID NO: 56755 - protein, 10 aa, synthetic construct
TTYRGDRQGI

SEQ ID NO: 56756 - protein, 10 aa, synthetic construct
TTYRGDRSVV

SEQ ID NO: 56757 - protein, 10 aa, synthetic construct
TTYRGDRGVV

SEQ ID NO: 56758 - protein, 10 aa, synthetic construct
TTYRGDYVGL

SEQ ID NO: 56759 - protein, 10 aa, synthetic construct
TTYRGDQSTL

SEQ ID NO: 56760 - protein, 10 aa, synthetic construct
TTYRGDRSQT

SEQ ID NO: 56761 - protein, 10 aa, synthetic construct
SPLRGDRGQI

SEQ ID NO: 56762 - protein, 10 aa, synthetic construct
TTYRGDLLLS

SEQ ID NO: 56763 - protein, 10 aa, synthetic construct
TTNRGDRGQI

SEQ ID NO: 56764 - protein, 10 aa, synthetic construct
TTNRGDRQGI

SEQ ID NO: 56765 - protein, 10 aa, synthetic construct
TTNRGDRSVV

SEQ ID NO: 56766 - protein, 10 aa, synthetic construct
TTNRGDRGVV

SEQ ID NO: 56767 - protein, 10 aa, synthetic construct
TTNRGDYVGL

SEQ ID NO: 56768 - protein, 10 aa, synthetic construct
TTNRGDQSTL

SEQ ID NO: 56769 - protein, 10 aa, synthetic construct
TTNRGDRSQT

SEQ ID NO: 56770 - protein, 10 aa, synthetic construct
TTNRGDLLLS

SEQ ID NO: 56771 - protein, 10 aa, synthetic construct
TTQRGDHGVL

SEQ ID NO: 56772 - protein, 10 aa, synthetic construct
SPLRGDRQGI

SEQ ID NO: 56773 - protein, 10 aa, synthetic construct
TTQRGDHVNL

SEQ ID NO: 56774 - protein, 10 aa, synthetic construct
TTQRGDYVGL

SEQ ID NO: 56775 - protein, 10 aa, synthetic construct
TTQRGDYSSV

SEQ ID NO: 56776 - protein, 10 aa, synthetic construct
TTQRGDQSTL

SEQ ID NO: 56777 - protein, 10 aa, synthetic construct
TTQRGDLLLS

SEQ ID NO: 56778 - protein, 10 aa, synthetic construct
TTDRGDHGVL

SEQ ID NO: 56779 - protein, 10 aa, synthetic construct
TTDRGDHVNL

SEQ ID NO: 56780 - protein, 10 aa, synthetic construct
TTDRGDYVGL

SEQ ID NO: 56781 - protein, 10 aa, synthetic construct
TTDRGDYSSV

SEQ ID NO: 56782 - protein, 10 aa, synthetic construct
TTDRGDQSTL

SEQ ID NO: 56783 - protein, 10 aa, synthetic construct
SPLRGDRSVV

SEQ ID NO: 56784 - protein, 10 aa, synthetic construct
TTDRGDLLLS

SEQ ID NO: 56785 - protein, 10 aa, synthetic construct
TTERGDHGVL

SEQ ID NO: 56786 - protein, 10 aa, synthetic construct
TTERGDHVNL

SEQ ID NO: 56787 - protein, 10 aa, synthetic construct
TTERGDYVGL

SEQ ID NO: 56788 - protein, 10 aa, synthetic construct
TTERGDYSSV

SEQ ID NO: 56789 - protein, 10 aa, synthetic construct
TTERGDQSTL

SEQ ID NO: 56790 - protein, 10 aa, synthetic construct
TTERGDLLLS

SEQ ID NO: 56791 - protein, 10 aa, synthetic construct
TYGRGDHGVL

SEQ ID NO: 56792 - protein, 10 aa, synthetic construct
TYGRGDHVNL

SEQ ID NO: 56793 - protein, 10 aa, synthetic construct
TYGRGDYVGL

SEQ ID NO: 56794 - protein, 10 aa, synthetic construct
SPLRGDRGVV

SEQ ID NO: 56795 - protein, 10 aa, synthetic construct
TYGRGDYSSV

SEQ ID NO: 56796 - protein, 10 aa, synthetic construct
TYGRGDQSTL

SEQ ID NO: 56797 - protein, 10 aa, synthetic construct
TYGRGDLLLS

SEQ ID NO: 56798 - protein, 10 aa, synthetic construct
TYARGDHGVL

SEQ ID NO: 56799 - protein, 10 aa, synthetic construct
TYARGDHVNL

SEQ ID NO: 56800 - protein, 10 aa, synthetic construct
TYARGDYVGL

SEQ ID NO: 56801 - protein, 10 aa, synthetic construct
TYARGDYSSV

SEQ ID NO: 56802 - protein, 10 aa, synthetic construct
TYARGDQSTL

SEQ ID NO: 56803 - protein, 10 aa, synthetic construct
TYARGDLLLS

SEQ ID NO: 56804 - protein, 10 aa, synthetic construct
TYVRGDRGQI

SEQ ID NO: 56805 - protein, 10 aa, synthetic construct
SPLRGDRSQT

SEQ ID NO: 56806 - protein, 10 aa, synthetic construct
TYVRGDRQGI

SEQ ID NO: 56807 - protein, 10 aa, synthetic construct
TYVRGDRSVV

SEQ ID NO: 56808 - protein, 10 aa, synthetic construct
TYVRGDRGVV

SEQ ID NO: 56809 - protein, 10 aa, synthetic construct
TYVRGDYVGL

SEQ ID NO: 56810 - protein, 10 aa, synthetic construct
TYVRGDQSTL

SEQ ID NO: 56811 - protein, 10 aa, synthetic construct
TYVRGDRSQT

SEQ ID NO: 56812 - protein, 10 aa, synthetic construct
TYVRGDLLLS

SEQ ID NO: 56813 - protein, 10 aa, synthetic construct
TYPRGDHGVL

SEQ ID NO: 56814 - protein, 10 aa, synthetic construct
TYPRGDHVNL

SEQ ID NO: 56815 - protein, 10 aa, synthetic construct
TYPRGDYVGL

SEQ ID NO: 56816 - protein, 10 aa, synthetic construct
SPWRGDRGQI

SEQ ID NO: 56817 - protein, 10 aa, synthetic construct
TYPRGDYSSV

SEQ ID NO: 56818 - protein, 10 aa, synthetic construct
TYPRGDQSTL

SEQ ID NO: 56819 - protein, 10 aa, synthetic construct
TYPRGDLLLS

SEQ ID NO: 56820 - protein, 10 aa, synthetic construct
TYLRGDRGQI

SEQ ID NO: 56821 - protein, 10 aa, synthetic construct
TYLRGDRQGI

SEQ ID NO: 56822 - protein, 10 aa, synthetic construct
TYLRGDRSVV

SEQ ID NO: 56823 - protein, 10 aa, synthetic construct
TYLRGDRGVV

SEQ ID NO: 56824 - protein, 10 aa, synthetic construct
TYLRGDYVGL

SEQ ID NO: 56825 - protein, 10 aa, synthetic construct
TYLRGDQSTL

SEQ ID NO: 56826 - protein, 10 aa, synthetic construct
TYLRGDRSQT

SEQ ID NO: 56827 - protein, 10 aa, synthetic construct
SPWRGDRQGI

SEQ ID NO: 56828 - protein, 10 aa, synthetic construct
TYLRGDLLLS

SEQ ID NO: 56829 - protein, 10 aa, synthetic construct
TYIRGDRSVV

SEQ ID NO: 56830 - protein, 10 aa, synthetic construct
TYIRGDRSQT

SEQ ID NO: 56831 - protein, 10 aa, synthetic construct
TYMRGDRSVV

SEQ ID NO: 56832 - protein, 10 aa, synthetic construct
TYMRGDRSQT

SEQ ID NO: 56833 - protein, 10 aa, synthetic construct
TYWRGDRGQI

SEQ ID NO: 56834 - protein, 10 aa, synthetic construct
TYWRGDRQGI

SEQ ID NO: 56835 - protein, 10 aa, synthetic construct
TYWRGDRSVV

SEQ ID NO: 56836 - protein, 10 aa, synthetic construct
TYWRGDRGVV

SEQ ID NO: 56837 - protein, 10 aa, synthetic construct
TYWRGDYVGL

SEQ ID NO: 56838 - protein, 10 aa, synthetic construct
SPWRGDRSVV

SEQ ID NO: 56839 - protein, 10 aa, synthetic construct
TYWRGDQSTL

SEQ ID NO: 56840 - protein, 10 aa, synthetic construct
TYWRGDRSQT

SEQ ID NO: 56841 - protein, 10 aa, synthetic construct
TYWRGDLLLS

SEQ ID NO: 56842 - protein, 10 aa, synthetic construct
TYFRGDRSVV

SEQ ID NO: 56843 - protein, 10 aa, synthetic construct
TYFRGDRSQT

SEQ ID NO: 56844 - protein, 10 aa, synthetic construct
TYKRGDRSVV

SEQ ID NO: 56845 - protein, 10 aa, synthetic construct
TYKRGDRSQT

SEQ ID NO: 56846 - protein, 10 aa, synthetic construct
TYRRGDHGVL

SEQ ID NO: 56847 - protein, 10 aa, synthetic construct
TYRRGDHVNL

SEQ ID NO: 56848 - protein, 10 aa, synthetic construct
TYRRGDYVGL

SEQ ID NO: 56849 - protein, 10 aa, synthetic construct
DKNRGDYTSV

SEQ ID NO: 56850 - protein, 10 aa, synthetic construct
SPWRGDRGVV

SEQ ID NO: 56851 - protein, 10 aa, synthetic construct
TYRRGDYSSV

SEQ ID NO: 56852 - protein, 10 aa, synthetic construct
TYRRGDQSTL

SEQ ID NO: 56853 - protein, 10 aa, synthetic construct
TYRRGDLLLS

SEQ ID NO: 56854 - protein, 10 aa, synthetic construct
TYHRGDRGQI

SEQ ID NO: 56855 - protein, 10 aa, synthetic construct
TYHRGDRQGI

SEQ ID NO: 56856 - protein, 10 aa, synthetic construct
TYHRGDRSVV

SEQ ID NO: 56857 - protein, 10 aa, synthetic construct
TYHRGDRGVV

SEQ ID NO: 56858 - protein, 10 aa, synthetic construct
TYHRGDYVGL

SEQ ID NO: 56859 - protein, 10 aa, synthetic construct
TYHRGDQSTL

SEQ ID NO: 56860 - protein, 10 aa, synthetic construct
TYHRGDRSQT

SEQ ID NO: 56861 - protein, 10 aa, synthetic construct
SPWRGDRSQT

SEQ ID NO: 56862 - protein, 10 aa, synthetic construct
TYHRGDLLLS

SEQ ID NO: 56863 - protein, 10 aa, synthetic construct
TYSRGDRGQI

SEQ ID NO: 56864 - protein, 10 aa, synthetic construct
TYSRGDRQGI

SEQ ID NO: 56865 - protein, 10 aa, synthetic construct
TYSRGDRSVV

SEQ ID NO: 56866 - protein, 10 aa, synthetic construct
TYSRGDRGVV

SEQ ID NO: 56867 - protein, 10 aa, synthetic construct
TYSRGDYVGL

SEQ ID NO: 56868 - protein, 10 aa, synthetic construct
TYSRGDQSTL

SEQ ID NO: 56869 - protein, 10 aa, synthetic construct
TYSRGDRSQT

SEQ ID NO: 56870 - protein, 10 aa, synthetic construct
TYSRGDLLLS

SEQ ID NO: 56871 - protein, 10 aa, synthetic construct
TYTRGDRGQI

SEQ ID NO: 56872 - protein, 10 aa, synthetic construct
SPRRGDHGVL

SEQ ID NO: 56873 - protein, 10 aa, synthetic construct
TYTRGDRQGI

SEQ ID NO: 56874 - protein, 10 aa, synthetic construct
TYTRGDRSVV

SEQ ID NO: 56875 - protein, 10 aa, synthetic construct
TYTRGDRGVV

SEQ ID NO: 56876 - protein, 10 aa, synthetic construct
TYTRGDYVGL

SEQ ID NO: 56877 - protein, 10 aa, synthetic construct
TYTRGDQSTL

SEQ ID NO: 56878 - protein, 10 aa, synthetic construct
TYTRGDRSQT

SEQ ID NO: 56879 - protein, 10 aa, synthetic construct
TYTRGDLLLS

SEQ ID NO: 56880 - protein, 10 aa, synthetic construct
TYYRGDRSVV

SEQ ID NO: 56881 - protein, 10 aa, synthetic construct
TYYRGDRSQT

SEQ ID NO: 56882 - protein, 10 aa, synthetic construct
TYNRGDRSVV

SEQ ID NO: 56883 - protein, 10 aa, synthetic construct
SPRRGDYVGL

SEQ ID NO: 56884 - protein, 10 aa, synthetic construct
TYNRGDRSQT

SEQ ID NO: 56885 - protein, 10 aa, synthetic construct
TYQRGDRGQI

SEQ ID NO: 56886 - protein, 10 aa, synthetic construct
TYQRGDRQGI

SEQ ID NO: 56887 - protein, 10 aa, synthetic construct
TYQRGDRSVV

SEQ ID NO: 56888 - protein, 10 aa, synthetic construct
TYQRGDRGVV

SEQ ID NO: 56889 - protein, 10 aa, synthetic construct
TYQRGDYVGL

SEQ ID NO: 56890 - protein, 10 aa, synthetic construct
TYQRGDQSTL

SEQ ID NO: 56891 - protein, 10 aa, synthetic construct
TYQRGDRSQT

SEQ ID NO: 56892 - protein, 10 aa, synthetic construct
TYQRGDLLLS

SEQ ID NO: 56893 - protein, 10 aa, synthetic construct
TYDRGDRGQI

SEQ ID NO: 56894 - protein, 10 aa, synthetic construct
SPRRGDQSTL

SEQ ID NO: 56895 - protein, 10 aa, synthetic construct
TYDRGDRQGI

SEQ ID NO: 56896 - protein, 10 aa, synthetic construct
TYDRGDRSVV

SEQ ID NO: 56897 - protein, 10 aa, synthetic construct
TYDRGDRGVV

SEQ ID NO: 56898 - protein, 10 aa, synthetic construct
TYDRGDYVGL

SEQ ID NO: 56899 - protein, 10 aa, synthetic construct
TYDRGDQSTL

SEQ ID NO: 56900 - protein, 10 aa, synthetic construct
TYDRGDRSQT

SEQ ID NO: 56901 - protein, 10 aa, synthetic construct
TYDRGDLLLS

SEQ ID NO: 56902 - protein, 10 aa, synthetic construct
TYERGDRGQI

SEQ ID NO: 56903 - protein, 10 aa, synthetic construct
TYERGDRQGI

SEQ ID NO: 56904 - protein, 10 aa, synthetic construct
TYERGDRSVV

SEQ ID NO: 56905 - protein, 10 aa, synthetic construct
SPRRGDLLLS

SEQ ID NO: 56906 - protein, 10 aa, synthetic construct
TYERGDRGVV

SEQ ID NO: 56907 - protein, 10 aa, synthetic construct
TYERGDYVGL

SEQ ID NO: 56908 - protein, 10 aa, synthetic construct
TYERGDQSTL

SEQ ID NO: 56909 - protein, 10 aa, synthetic construct
TYERGDRSQT

SEQ ID NO: 56910 - protein, 10 aa, synthetic construct
TYERGDLLLS

SEQ ID NO: 56911 - protein, 10 aa, synthetic construct
TNGRGDHGVL

SEQ ID NO: 56912 - protein, 10 aa, synthetic construct
TNGRGDHVNL

SEQ ID NO: 56913 - protein, 10 aa, synthetic construct
TNGRGDYVGL

SEQ ID NO: 56914 - protein, 10 aa, synthetic construct
TNGRGDYSSV

SEQ ID NO: 56915 - protein, 10 aa, synthetic construct
TNGRGDQSTL

SEQ ID NO: 56916 - protein, 10 aa, synthetic construct
SPHRGDRGQI

SEQ ID NO: 56917 - protein, 10 aa, synthetic construct
TNGRGDLLLS

SEQ ID NO: 56918 - protein, 10 aa, synthetic construct
TNARGDHGVL

SEQ ID NO: 56919 - protein, 10 aa, synthetic construct
TNARGDHVNL

SEQ ID NO: 56920 - protein, 10 aa, synthetic construct
TNARGDYVGL

SEQ ID NO: 56921 - protein, 10 aa, synthetic construct
TNARGDYSSV

SEQ ID NO: 56922 - protein, 10 aa, synthetic construct
TNARGDQSTL

SEQ ID NO: 56923 - protein, 10 aa, synthetic construct
TNARGDLLLS

SEQ ID NO: 56924 - protein, 10 aa, synthetic construct
TNVRGDRGQI

SEQ ID NO: 56925 - protein, 10 aa, synthetic construct
TNVRGDRQGI

SEQ ID NO: 56926 - protein, 10 aa, synthetic construct
TNVRGDRSVV

SEQ ID NO: 56927 - protein, 10 aa, synthetic construct
SPHRGDRQGI

SEQ ID NO: 56928 - protein, 10 aa, synthetic construct
TNVRGDRGVV

SEQ ID NO: 56929 - protein, 10 aa, synthetic construct
TNVRGDYVGL

SEQ ID NO: 56930 - protein, 10 aa, synthetic construct
TNVRGDQSTL

SEQ ID NO: 56931 - protein, 10 aa, synthetic construct
TNVRGDRSQT

SEQ ID NO: 56932 - protein, 10 aa, synthetic construct
TNVRGDLLLS

SEQ ID NO: 56933 - protein, 10 aa, synthetic construct
TNPRGDHGVL

SEQ ID NO: 56934 - protein, 10 aa, synthetic construct
TNPRGDHVNL

SEQ ID NO: 56935 - protein, 10 aa, synthetic construct
TNPRGDYVGL

SEQ ID NO: 56936 - protein, 10 aa, synthetic construct
TNPRGDYSSV

SEQ ID NO: 56937 - protein, 10 aa, synthetic construct
TNPRGDQSTL

SEQ ID NO: 56938 - protein, 10 aa, synthetic construct
SPHRGDRSVV

SEQ ID NO: 56939 - protein, 10 aa, synthetic construct
TNPRGDLLLS

SEQ ID NO: 56940 - protein, 10 aa, synthetic construct
TNLRGDRGQI

SEQ ID NO: 56941 - protein, 10 aa, synthetic construct
TNLRGDRQGI

SEQ ID NO: 56942 - protein, 10 aa, synthetic construct
TNLRGDRSVV

SEQ ID NO: 56943 - protein, 10 aa, synthetic construct
TNLRGDRGVV

SEQ ID NO: 56944 - protein, 10 aa, synthetic construct
TNLRGDYVGL

SEQ ID NO: 56945 - protein, 10 aa, synthetic construct
TNLRGDQSTL

SEQ ID NO: 56946 - protein, 10 aa, synthetic construct
TNLRGDRSQT

SEQ ID NO: 56947 - protein, 10 aa, synthetic construct
TNLRGDLLLS

SEQ ID NO: 56948 - protein, 10 aa, synthetic construct
TNIRGDRSVV

SEQ ID NO: 56949 - protein, 10 aa, synthetic construct
SPHRGDRGVV

SEQ ID NO: 56950 - protein, 10 aa, synthetic construct
TNIRGDRSQT

SEQ ID NO: 56951 - protein, 10 aa, synthetic construct
TNMRGDRSVV

SEQ ID NO: 56952 - protein, 10 aa, synthetic construct
TNMRGDRSQT

SEQ ID NO: 56953 - protein, 10 aa, synthetic construct
TNWRGDRGQI

SEQ ID NO: 56954 - protein, 10 aa, synthetic construct
TNWRGDRQGI

SEQ ID NO: 56955 - protein, 10 aa, synthetic construct
TNWRGDRSVV

SEQ ID NO: 56956 - protein, 10 aa, synthetic construct
TNWRGDRGVV

SEQ ID NO: 56957 - protein, 10 aa, synthetic construct
TNWRGDYVGL

SEQ ID NO: 56958 - protein, 10 aa, synthetic construct
TNWRGDQSTL

SEQ ID NO: 56959 - protein, 10 aa, synthetic construct
TNWRGDRSQT

SEQ ID NO: 56960 - protein, 10 aa, synthetic construct
QKKRGDYTSV

SEQ ID NO: 56961 - protein, 10 aa, synthetic construct
SPHRGDRSQT

SEQ ID NO: 56962 - protein, 10 aa, synthetic construct
TNWRGDLLLS

SEQ ID NO: 56963 - protein, 10 aa, synthetic construct
TNFRGDRSVV

SEQ ID NO: 56964 - protein, 10 aa, synthetic construct
TNFRGDRSQT

SEQ ID NO: 56965 - protein, 10 aa, synthetic construct
TNKRGDRSVV

SEQ ID NO: 56966 - protein, 10 aa, synthetic construct
TNKRGDRSQT

SEQ ID NO: 56967 - protein, 10 aa, synthetic construct
TNRRGDHGVL

SEQ ID NO: 56968 - protein, 10 aa, synthetic construct
TNRRGDHVNL

SEQ ID NO: 56969 - protein, 10 aa, synthetic construct
TNRRGDYVGL

SEQ ID NO: 56970 - protein, 10 aa, synthetic construct
TNRRGDYSSV

SEQ ID NO: 56971 - protein, 10 aa, synthetic construct
TNRRGDQSTL

SEQ ID NO: 56972 - protein, 10 aa, synthetic construct
SPSRGDRGQI

SEQ ID NO: 56973 - protein, 10 aa, synthetic construct
TNRRGDLLLS

SEQ ID NO: 56974 - protein, 10 aa, synthetic construct
TNHRGDRGQI

SEQ ID NO: 56975 - protein, 10 aa, synthetic construct
TNHRGDRQGI

SEQ ID NO: 56976 - protein, 10 aa, synthetic construct
TNHRGDRSVV

SEQ ID NO: 56977 - protein, 10 aa, synthetic construct
TNHRGDRGVV

SEQ ID NO: 56978 - protein, 10 aa, synthetic construct
TNHRGDYVGL

SEQ ID NO: 56979 - protein, 10 aa, synthetic construct
TNHRGDQSTL

SEQ ID NO: 56980 - protein, 10 aa, synthetic construct
TNHRGDRSQT

SEQ ID NO: 56981 - protein, 10 aa, synthetic construct
TNHRGDLLLS

SEQ ID NO: 56982 - protein, 10 aa, synthetic construct
TNSRGDRGQI

SEQ ID NO: 56983 - protein, 10 aa, synthetic construct
SPSRGDRQGI

SEQ ID NO: 56984 - protein, 10 aa, synthetic construct
TNSRGDRQGI

SEQ ID NO: 56985 - protein, 10 aa, synthetic construct
TNSRGDRSVV

SEQ ID NO: 56986 - protein, 10 aa, synthetic construct
TNSRGDRGVV

SEQ ID NO: 56987 - protein, 10 aa, synthetic construct
TNSRGDYVGL

SEQ ID NO: 56988 - protein, 10 aa, synthetic construct
TNSRGDQSTL

SEQ ID NO: 56989 - protein, 10 aa, synthetic construct
TNSRGDRSQT

SEQ ID NO: 56990 - protein, 10 aa, synthetic construct
TNSRGDLLLS

SEQ ID NO: 56991 - protein, 10 aa, synthetic construct
TNTRGDRGQI

SEQ ID NO: 56992 - protein, 10 aa, synthetic construct
TNTRGDRQGI

SEQ ID NO: 56993 - protein, 10 aa, synthetic construct
TNTRGDRSVV

SEQ ID NO: 56994 - protein, 10 aa, synthetic construct
SPSRGDRSVV

SEQ ID NO: 56995 - protein, 10 aa, synthetic construct
TNTRGDRGVV

SEQ ID NO: 56996 - protein, 10 aa, synthetic construct
TNTRGDYVGL

SEQ ID NO: 56997 - protein, 10 aa, synthetic construct
TNTRGDQSTL

SEQ ID NO: 56998 - protein, 10 aa, synthetic construct
TNTRGDRSQT

SEQ ID NO: 56999 - protein, 10 aa, synthetic construct
TNTRGDLLLS

SEQ ID NO: 57000 - protein, 10 aa, synthetic construct
TNYRGDRSVV

SEQ ID NO: 57001 - protein, 10 aa, synthetic construct
TNYRGDRSQT

SEQ ID NO: 57002 - protein, 10 aa, synthetic construct
TNNRGDRSVV

SEQ ID NO: 57003 - protein, 10 aa, synthetic construct
TNNRGDRSQT

SEQ ID NO: 57004 - protein, 10 aa, synthetic construct
TNQRGDRGQI

SEQ ID NO: 57005 - protein, 10 aa, synthetic construct
SPSRGDRGVV

SEQ ID NO: 57006 - protein, 10 aa, synthetic construct
TNQRGDRQGI

SEQ ID NO: 57007 - protein, 10 aa, synthetic construct
TNQRGDRSVV

SEQ ID NO: 57008 - protein, 10 aa, synthetic construct
TNQRGDRGVV

SEQ ID NO: 57009 - protein, 10 aa, synthetic construct
TNQRGDYVGL

SEQ ID NO: 57010 - protein, 10 aa, synthetic construct
TNQRGDQSTL

SEQ ID NO: 57011 - protein, 10 aa, synthetic construct
TNQRGDRSQT

SEQ ID NO: 57012 - protein, 10 aa, synthetic construct
TNQRGDLLLS

SEQ ID NO: 57013 - protein, 10 aa, synthetic construct
TNDRGDRGQI

SEQ ID NO: 57014 - protein, 10 aa, synthetic construct
TNDRGDRQGI

SEQ ID NO: 57015 - protein, 10 aa, synthetic construct
TNDRGDRSVV

SEQ ID NO: 57016 - protein, 10 aa, synthetic construct
SPSRGDRSQT

SEQ ID NO: 57017 - protein, 10 aa, synthetic construct
TNDRGDRGVV

SEQ ID NO: 57018 - protein, 10 aa, synthetic construct
TNDRGDYVGL

SEQ ID NO: 57019 - protein, 10 aa, synthetic construct
TNDRGDQSTL

SEQ ID NO: 57020 - protein, 10 aa, synthetic construct
TNDRGDRSQT

SEQ ID NO: 57021 - protein, 10 aa, synthetic construct
TNDRGDLLLS

SEQ ID NO: 57022 - protein, 10 aa, synthetic construct
TNERGDRGQI

SEQ ID NO: 57023 - protein, 10 aa, synthetic construct
TNERGDRQGI

SEQ ID NO: 57024 - protein, 10 aa, synthetic construct
TNERGDRSVV

SEQ ID NO: 57025 - protein, 10 aa, synthetic construct
TNERGDRGVV

SEQ ID NO: 57026 - protein, 10 aa, synthetic construct
TNERGDYVGL

SEQ ID NO: 57027 - protein, 10 aa, synthetic construct
SPTRGDRGQI

SEQ ID NO: 57028 - protein, 10 aa, synthetic construct
TNERGDQSTL

SEQ ID NO: 57029 - protein, 10 aa, synthetic construct
TNERGDRSQT

SEQ ID NO: 57030 - protein, 10 aa, synthetic construct
TNERGDLLLS

SEQ ID NO: 57031 - protein, 10 aa, synthetic construct
TQGRGDHVNL

SEQ ID NO: 57032 - protein, 10 aa, synthetic construct
TQGRGDRDYL

SEQ ID NO: 57033 - protein, 10 aa, synthetic construct
TQGRGDYSSV

SEQ ID NO: 57034 - protein, 10 aa, synthetic construct
TQGRGDLTVT

SEQ ID NO: 57035 - protein, 10 aa, synthetic construct
TQGRGDLIGR

SEQ ID NO: 57036 - protein, 10 aa, synthetic construct
TQARGDHVNL

SEQ ID NO: 57037 - protein, 10 aa, synthetic construct
TQARGDRDYL

SEQ ID NO: 57038 - protein, 10 aa, synthetic construct
SPTRGDRQGI

SEQ ID NO: 57039 - protein, 10 aa, synthetic construct
TQARGDYSSV

SEQ ID NO: 57040 - protein, 10 aa, synthetic construct
TQARGDLTVT

SEQ ID NO: 57041 - protein, 10 aa, synthetic construct
TQARGDLIGR

SEQ ID NO: 57042 - protein, 10 aa, synthetic construct
TQVRGDHGVL

SEQ ID NO: 57043 - protein, 10 aa, synthetic construct
TQVRGDHVNL

SEQ ID NO: 57044 - protein, 10 aa, synthetic construct
TQVRGDYVGL

SEQ ID NO: 57045 - protein, 10 aa, synthetic construct
TQVRGDYSSV

SEQ ID NO: 57046 - protein, 10 aa, synthetic construct
TQVRGDQSTL

SEQ ID NO: 57047 - protein, 10 aa, synthetic construct
TQVRGDLLLS

SEQ ID NO: 57048 - protein, 10 aa, synthetic construct
TQPRGDHVNL

SEQ ID NO: 57049 - protein, 10 aa, synthetic construct
SPTRGDRSVV

SEQ ID NO: 57050 - protein, 10 aa, synthetic construct
TQPRGDRDYL

SEQ ID NO: 57051 - protein, 10 aa, synthetic construct
TQPRGDYSSV

SEQ ID NO: 57052 - protein, 10 aa, synthetic construct
TQPRGDLTVT

SEQ ID NO: 57053 - protein, 10 aa, synthetic construct
TQPRGDLIGR

SEQ ID NO: 57054 - protein, 10 aa, synthetic construct
TQLRGDHGVL

SEQ ID NO: 57055 - protein, 10 aa, synthetic construct
TQLRGDHVNL

SEQ ID NO: 57056 - protein, 10 aa, synthetic construct
TQLRGDYVGL

SEQ ID NO: 57057 - protein, 10 aa, synthetic construct
TQLRGDYSSV

SEQ ID NO: 57058 - protein, 10 aa, synthetic construct
TQLRGDQSTL

SEQ ID NO: 57059 - protein, 10 aa, synthetic construct
TQLRGDLLLS

SEQ ID NO: 57060 - protein, 10 aa, synthetic construct
SPTRGDRGVV

SEQ ID NO: 57061 - protein, 10 aa, synthetic construct
TQIRGDRGQI

SEQ ID NO: 57062 - protein, 10 aa, synthetic construct
TQIRGDRQGI

SEQ ID NO: 57063 - protein, 10 aa, synthetic construct
TQIRGDRSVV

SEQ ID NO: 57064 - protein, 10 aa, synthetic construct
TQIRGDRGVV

SEQ ID NO: 57065 - protein, 10 aa, synthetic construct
TQIRGDYVGL

SEQ ID NO: 57066 - protein, 10 aa, synthetic construct
TQIRGDQSTL

SEQ ID NO: 57067 - protein, 10 aa, synthetic construct
TQIRGDRSQT

SEQ ID NO: 57068 - protein, 10 aa, synthetic construct
TQIRGDLLLS

SEQ ID NO: 57069 - protein, 10 aa, synthetic construct
TQMRGDRGQI

SEQ ID NO: 57070 - protein, 10 aa, synthetic construct
TQMRGDRQGI

SEQ ID NO: 57071 - protein, 10 aa, synthetic construct
QKNRGDYTSV

SEQ ID NO: 57072 - protein, 10 aa, synthetic construct
SPTRGDRSQT

SEQ ID NO: 57073 - protein, 10 aa, synthetic construct
TQMRGDRSVV

SEQ ID NO: 57074 - protein, 10 aa, synthetic construct
TQMRGDRGVV

SEQ ID NO: 57075 - protein, 10 aa, synthetic construct
TQMRGDYVGL

SEQ ID NO: 57076 - protein, 10 aa, synthetic construct
TQMRGDQSTL

SEQ ID NO: 57077 - protein, 10 aa, synthetic construct
TQMRGDRSQT

SEQ ID NO: 57078 - protein, 10 aa, synthetic construct
TQMRGDLLLS

SEQ ID NO: 57079 - protein, 10 aa, synthetic construct
TQWRGDHGVL

SEQ ID NO: 57080 - protein, 10 aa, synthetic construct
TQWRGDHVNL

SEQ ID NO: 57081 - protein, 10 aa, synthetic construct
TQWRGDYVGL

SEQ ID NO: 57082 - protein, 10 aa, synthetic construct
TQWRGDYSSV

SEQ ID NO: 57083 - protein, 10 aa, synthetic construct
SPQRGDRGQI

SEQ ID NO: 57084 - protein, 10 aa, synthetic construct
TQWRGDQSTL

SEQ ID NO: 57085 - protein, 10 aa, synthetic construct
TQWRGDLLLS

SEQ ID NO: 57086 - protein, 10 aa, synthetic construct
TQFRGDRGQI

SEQ ID NO: 57087 - protein, 10 aa, synthetic construct
TQFRGDRQGI

SEQ ID NO: 57088 - protein, 10 aa, synthetic construct
TQFRGDRSVV

SEQ ID NO: 57089 - protein, 10 aa, synthetic construct
TQFRGDRGVV

SEQ ID NO: 57090 - protein, 10 aa, synthetic construct
TQFRGDYVGL

SEQ ID NO: 57091 - protein, 10 aa, synthetic construct
TQFRGDQSTL

SEQ ID NO: 57092 - protein, 10 aa, synthetic construct
TQFRGDRSQT

SEQ ID NO: 57093 - protein, 10 aa, synthetic construct
TQFRGDLLLS

SEQ ID NO: 57094 - protein, 10 aa, synthetic construct
SPQRGDRQGI

SEQ ID NO: 57095 - protein, 10 aa, synthetic construct
TQKRGDRGQI

SEQ ID NO: 57096 - protein, 10 aa, synthetic construct
TQKRGDRQGI

SEQ ID NO: 57097 - protein, 10 aa, synthetic construct
TQKRGDRSVV

SEQ ID NO: 57098 - protein, 10 aa, synthetic construct
TQKRGDRGVV

SEQ ID NO: 57099 - protein, 10 aa, synthetic construct
TQKRGDYVGL

SEQ ID NO: 57100 - protein, 10 aa, synthetic construct
TQKRGDQSTL

SEQ ID NO: 57101 - protein, 10 aa, synthetic construct
TQKRGDRSQT

SEQ ID NO: 57102 - protein, 10 aa, synthetic construct
TQKRGDLLLS

SEQ ID NO: 57103 - protein, 10 aa, synthetic construct
TQRRGDHVNL

SEQ ID NO: 57104 - protein, 10 aa, synthetic construct
TQRRGDRDYL

SEQ ID NO: 57105 - protein, 10 aa, synthetic construct
SPQRGDRSVV

SEQ ID NO: 57106 - protein, 10 aa, synthetic construct
TQRRGDYSSV

SEQ ID NO: 57107 - protein, 10 aa, synthetic construct
TQRRGDLTVT

SEQ ID NO: 57108 - protein, 10 aa, synthetic construct
TQRRGDLIGR

SEQ ID NO: 57109 - protein, 10 aa, synthetic construct
TQHRGDHGVL

SEQ ID NO: 57110 - protein, 10 aa, synthetic construct
TQHRGDHVNL

SEQ ID NO: 57111 - protein, 10 aa, synthetic construct
TQHRGDYVGL

SEQ ID NO: 57112 - protein, 10 aa, synthetic construct
TQHRGDYSSV

SEQ ID NO: 57113 - protein, 10 aa, synthetic construct
TQHRGDQSTL

SEQ ID NO: 57114 - protein, 10 aa, synthetic construct
TQHRGDLLLS

SEQ ID NO: 57115 - protein, 10 aa, synthetic construct
TQSRGDHGVL

SEQ ID NO: 57116 - protein, 10 aa, synthetic construct
SPQRGDRGVV

SEQ ID NO: 57117 - protein, 10 aa, synthetic construct
TQSRGDHVNL

SEQ ID NO: 57118 - protein, 10 aa, synthetic construct
TQSRGDYVGL

SEQ ID NO: 57119 - protein, 10 aa, synthetic construct
TQSRGDYSSV

SEQ ID NO: 57120 - protein, 10 aa, synthetic construct
TQSRGDQSTL

SEQ ID NO: 57121 - protein, 10 aa, synthetic construct
TQSRGDLLLS

SEQ ID NO: 57122 - protein, 10 aa, synthetic construct
TQTRGDHGVL

SEQ ID NO: 57123 - protein, 10 aa, synthetic construct
TQTRGDHVNL

SEQ ID NO: 57124 - protein, 10 aa, synthetic construct
TQTRGDYVGL

SEQ ID NO: 57125 - protein, 10 aa, synthetic construct
TQTRGDYSSV

SEQ ID NO: 57126 - protein, 10 aa, synthetic construct
TQTRGDQSTL

SEQ ID NO: 57127 - protein, 10 aa, synthetic construct
SPQRGDRSQT

SEQ ID NO: 57128 - protein, 10 aa, synthetic construct
TQTRGDLLLS

SEQ ID NO: 57129 - protein, 10 aa, synthetic construct
TQYRGDRGQI

SEQ ID NO: 57130 - protein, 10 aa, synthetic construct
TQYRGDRQGI

SEQ ID NO: 57131 - protein, 10 aa, synthetic construct
TQYRGDRSVV

SEQ ID NO: 57132 - protein, 10 aa, synthetic construct
TQYRGDRGVV

SEQ ID NO: 57133 - protein, 10 aa, synthetic construct
TQYRGDYVGL

SEQ ID NO: 57134 - protein, 10 aa, synthetic construct
TQYRGDQSTL

SEQ ID NO: 57135 - protein, 10 aa, synthetic construct
TQYRGDRSQT

SEQ ID NO: 57136 - protein, 10 aa, synthetic construct
TQYRGDLLLS

SEQ ID NO: 57137 - protein, 10 aa, synthetic construct
TQNRGDRGQI

SEQ ID NO: 57138 - protein, 10 aa, synthetic construct
SPDRGDRGQI

SEQ ID NO: 57139 - protein, 10 aa, synthetic construct
TQNRGDRQGI

SEQ ID NO: 57140 - protein, 10 aa, synthetic construct
TQNRGDRSVV

SEQ ID NO: 57141 - protein, 10 aa, synthetic construct
TQNRGDRGVV

SEQ ID NO: 57142 - protein, 10 aa, synthetic construct
TQNRGDYVGL

SEQ ID NO: 57143 - protein, 10 aa, synthetic construct
TQNRGDQSTL

SEQ ID NO: 57144 - protein, 10 aa, synthetic construct
TQNRGDRSQT

SEQ ID NO: 57145 - protein, 10 aa, synthetic construct
TQNRGDLLLS

SEQ ID NO: 57146 - protein, 10 aa, synthetic construct
TQQRGDHGVL

SEQ ID NO: 57147 - protein, 10 aa, synthetic construct
TQQRGDHVNL

SEQ ID NO: 57148 - protein, 10 aa, synthetic construct
TQQRGDYVGL

SEQ ID NO: 57149 - protein, 10 aa, synthetic construct
SPDRGDRQGI

SEQ ID NO: 57150 - protein, 10 aa, synthetic construct
TQQRGDYSSV

SEQ ID NO: 57151 - protein, 10 aa, synthetic construct
TQQRGDQSTL

SEQ ID NO: 57152 - protein, 10 aa, synthetic construct
TQQRGDLLLS

SEQ ID NO: 57153 - protein, 10 aa, synthetic construct
TQDRGDHGVL

SEQ ID NO: 57154 - protein, 10 aa, synthetic construct
TQDRGDHVNL

SEQ ID NO: 57155 - protein, 10 aa, synthetic construct
TQDRGDYVGL

SEQ ID NO: 57156 - protein, 10 aa, synthetic construct
TQDRGDYSSV

SEQ ID NO: 57157 - protein, 10 aa, synthetic construct
TQDRGDQSTL

SEQ ID NO: 57158 - protein, 10 aa, synthetic construct
TQDRGDLLLS

SEQ ID NO: 57159 - protein, 10 aa, synthetic construct
TQERGDHGVL

SEQ ID NO: 57160 - protein, 10 aa, synthetic construct
SPDRGDRSVV

SEQ ID NO: 57161 - protein, 10 aa, synthetic construct
TQERGDHVNL

SEQ ID NO: 57162 - protein, 10 aa, synthetic construct
TQERGDYVGL

SEQ ID NO: 57163 - protein, 10 aa, synthetic construct
TQERGDYSSV

SEQ ID NO: 57164 - protein, 10 aa, synthetic construct
TQERGDQSTL

SEQ ID NO: 57165 - protein, 10 aa, synthetic construct
TQERGDLLLS

SEQ ID NO: 57166 - protein, 10 aa, synthetic construct
TDGRGDHVNL

SEQ ID NO: 57167 - protein, 10 aa, synthetic construct
TDGRGDRDYL

SEQ ID NO: 57168 - protein, 10 aa, synthetic construct
TDGRGDYSSV

SEQ ID NO: 57169 - protein, 10 aa, synthetic construct
TDGRGDLTVT

SEQ ID NO: 57170 - protein, 10 aa, synthetic construct
TDGRGDLIGR

SEQ ID NO: 57171 - protein, 10 aa, synthetic construct
SPDRGDRGVV

SEQ ID NO: 57172 - protein, 10 aa, synthetic construct
TDARGDHVNL

SEQ ID NO: 57173 - protein, 10 aa, synthetic construct
TDARGDRDYL

SEQ ID NO: 57174 - protein, 10 aa, synthetic construct
TDARGDYSSV

SEQ ID NO: 57175 - protein, 10 aa, synthetic construct
TDARGDLTVT

SEQ ID NO: 57176 - protein, 10 aa, synthetic construct
TDARGDLIGR

SEQ ID NO: 57177 - protein, 10 aa, synthetic construct
TDVRGDHGVL

SEQ ID NO: 57178 - protein, 10 aa, synthetic construct
TDVRGDHVNL

SEQ ID NO: 57179 - protein, 10 aa, synthetic construct
TDVRGDYVGL

SEQ ID NO: 57180 - protein, 10 aa, synthetic construct
TDVRGDYSSV

SEQ ID NO: 57181 - protein, 10 aa, synthetic construct
TDVRGDQSTL

SEQ ID NO: 57182 - protein, 10 aa, synthetic construct
SKKRGDYNSL

SEQ ID NO: 57183 - protein, 10 aa, synthetic construct
SPDRGDRSQT

SEQ ID NO: 57184 - protein, 10 aa, synthetic construct
TDVRGDLLLS

SEQ ID NO: 57185 - protein, 10 aa, synthetic construct
TDPRGDHVNL

SEQ ID NO: 57186 - protein, 10 aa, synthetic construct
TDPRGDRDYL

SEQ ID NO: 57187 - protein, 10 aa, synthetic construct
TDPRGDYSSV

SEQ ID NO: 57188 - protein, 10 aa, synthetic construct
TDPRGDLTVT

SEQ ID NO: 57189 - protein, 10 aa, synthetic construct
TDPRGDLIGR

SEQ ID NO: 57190 - protein, 10 aa, synthetic construct
TDLRGDHGVL

SEQ ID NO: 57191 - protein, 10 aa, synthetic construct
TDLRGDHVNL

SEQ ID NO: 57192 - protein, 10 aa, synthetic construct
TDLRGDYVGL

SEQ ID NO: 57193 - protein, 10 aa, synthetic construct
TDLRGDYSSV

SEQ ID NO: 57194 - protein, 10 aa, synthetic construct
SPERGDRGQI

SEQ ID NO: 57195 - protein, 10 aa, synthetic construct
TDLRGDQSTL

SEQ ID NO: 57196 - protein, 10 aa, synthetic construct
TDLRGDLLLS

SEQ ID NO: 57197 - protein, 10 aa, synthetic construct
TDIRGDRGQI

SEQ ID NO: 57198 - protein, 10 aa, synthetic construct
TDIRGDRQGI

SEQ ID NO: 57199 - protein, 10 aa, synthetic construct
TDIRGDRSVV

SEQ ID NO: 57200 - protein, 10 aa, synthetic construct
TDIRGDRGVV

SEQ ID NO: 57201 - protein, 10 aa, synthetic construct
TDIRGDYVGL

SEQ ID NO: 57202 - protein, 10 aa, synthetic construct
TDIRGDQSTL

SEQ ID NO: 57203 - protein, 10 aa, synthetic construct
TDIRGDRSQT

SEQ ID NO: 57204 - protein, 10 aa, synthetic construct
TDIRGDLLLS

SEQ ID NO: 57205 - protein, 10 aa, synthetic construct
SPERGDRQGI

SEQ ID NO: 57206 - protein, 10 aa, synthetic construct
TDMRGDRGQI

SEQ ID NO: 57207 - protein, 10 aa, synthetic construct
TDMRGDRQGI

SEQ ID NO: 57208 - protein, 10 aa, synthetic construct
TDMRGDRSVV

SEQ ID NO: 57209 - protein, 10 aa, synthetic construct
TDMRGDRGVV

SEQ ID NO: 57210 - protein, 10 aa, synthetic construct
TDMRGDYVGL

SEQ ID NO: 57211 - protein, 10 aa, synthetic construct
TDMRGDQSTL

SEQ ID NO: 57212 - protein, 10 aa, synthetic construct
TDMRGDRSQT

SEQ ID NO: 57213 - protein, 10 aa, synthetic construct
TDMRGDLLLS

SEQ ID NO: 57214 - protein, 10 aa, synthetic construct
TDWRGDHGVL

SEQ ID NO: 57215 - protein, 10 aa, synthetic construct
TDWRGDHVNL

SEQ ID NO: 57216 - protein, 10 aa, synthetic construct
SPERGDRSVV

SEQ ID NO: 57217 - protein, 10 aa, synthetic construct
TDWRGDYVGL

SEQ ID NO: 57218 - protein, 10 aa, synthetic construct
TDWRGDYSSV

SEQ ID NO: 57219 - protein, 10 aa, synthetic construct
TDWRGDQSTL

SEQ ID NO: 57220 - protein, 10 aa, synthetic construct
TDWRGDLLLS

SEQ ID NO: 57221 - protein, 10 aa, synthetic construct
TDFRGDRGQI

SEQ ID NO: 57222 - protein, 10 aa, synthetic construct
TDFRGDRQGI

SEQ ID NO: 57223 - protein, 10 aa, synthetic construct
TDFRGDRSVV

SEQ ID NO: 57224 - protein, 10 aa, synthetic construct
TDFRGDRGVV

SEQ ID NO: 57225 - protein, 10 aa, synthetic construct
TDFRGDYVGL

SEQ ID NO: 57226 - protein, 10 aa, synthetic construct
TDFRGDQSTL

SEQ ID NO: 57227 - protein, 10 aa, synthetic construct
SPERGDRGVV

SEQ ID NO: 57228 - protein, 10 aa, synthetic construct
TDFRGDRSQT

SEQ ID NO: 57229 - protein, 10 aa, synthetic construct
TDFRGDLLLS

SEQ ID NO: 57230 - protein, 10 aa, synthetic construct
TDKRGDRGQI

SEQ ID NO: 57231 - protein, 10 aa, synthetic construct
TDKRGDRQGI

SEQ ID NO: 57232 - protein, 10 aa, synthetic construct
TDKRGDRSVV

SEQ ID NO: 57233 - protein, 10 aa, synthetic construct
TDKRGDRGVV

SEQ ID NO: 57234 - protein, 10 aa, synthetic construct
TDKRGDYVGL

SEQ ID NO: 57235 - protein, 10 aa, synthetic construct
TDKRGDQSTL

SEQ ID NO: 57236 - protein, 10 aa, synthetic construct
TDKRGDRSQT

SEQ ID NO: 57237 - protein, 10 aa, synthetic construct
TDKRGDLLLS

SEQ ID NO: 57238 - protein, 10 aa, synthetic construct
SPERGDRSQT

SEQ ID NO: 57239 - protein, 10 aa, synthetic construct
TDRRGDHVNL

SEQ ID NO: 57240 - protein, 10 aa, synthetic construct
TDRRGDRDYL

SEQ ID NO: 57241 - protein, 10 aa, synthetic construct
TDRRGDYSSV

SEQ ID NO: 57242 - protein, 10 aa, synthetic construct
TDRRGDLTVT

SEQ ID NO: 57243 - protein, 10 aa, synthetic construct
TDRRGDLIGR

SEQ ID NO: 57244 - protein, 10 aa, synthetic construct
TDHRGDHGVL

SEQ ID NO: 57245 - protein, 10 aa, synthetic construct
TDHRGDHVNL

SEQ ID NO: 57246 - protein, 10 aa, synthetic construct
TDHRGDYVGL

SEQ ID NO: 57247 - protein, 10 aa, synthetic construct
TDHRGDYSSV

SEQ ID NO: 57248 - protein, 10 aa, synthetic construct
TDHRGDQSTL

SEQ ID NO: 57249 - protein, 10 aa, synthetic construct
SLGRGDHGVL

SEQ ID NO: 57250 - protein, 10 aa, synthetic construct
TDHRGDLLLS

SEQ ID NO: 57251 - protein, 10 aa, synthetic construct
TDSRGDHGVL

SEQ ID NO: 57252 - protein, 10 aa, synthetic construct
TDSRGDHVNL

SEQ ID NO: 57253 - protein, 10 aa, synthetic construct
TDSRGDYVGL

SEQ ID NO: 57254 - protein, 10 aa, synthetic construct
TDSRGDYSSV

SEQ ID NO: 57255 - protein, 10 aa, synthetic construct
TDSRGDQSTL

SEQ ID NO: 57256 - protein, 10 aa, synthetic construct
TDSRGDLLLS

SEQ ID NO: 57257 - protein, 10 aa, synthetic construct
TDTRGDHGVL

SEQ ID NO: 57258 - protein, 10 aa, synthetic construct
TDTRGDHVNL

SEQ ID NO: 57259 - protein, 10 aa, synthetic construct
TDTRGDYVGL

SEQ ID NO: 57260 - protein, 10 aa, synthetic construct
SLGRGDYVGL

SEQ ID NO: 57261 - protein, 10 aa, synthetic construct
TDTRGDYSSV

SEQ ID NO: 57262 - protein, 10 aa, synthetic construct
TDTRGDQSTL

SEQ ID NO: 57263 - protein, 10 aa, synthetic construct
TDTRGDLLLS

SEQ ID NO: 57264 - protein, 10 aa, synthetic construct
TDYRGDRGQI

SEQ ID NO: 57265 - protein, 10 aa, synthetic construct
TDYRGDRQGI

SEQ ID NO: 57266 - protein, 10 aa, synthetic construct
TDYRGDRSVV

SEQ ID NO: 57267 - protein, 10 aa, synthetic construct
TDYRGDRGVV

SEQ ID NO: 57268 - protein, 10 aa, synthetic construct
TDYRGDYVGL

SEQ ID NO: 57269 - protein, 10 aa, synthetic construct
TDYRGDQSTL

SEQ ID NO: 57270 - protein, 10 aa, synthetic construct
TDYRGDRSQT

SEQ ID NO: 57271 - protein, 10 aa, synthetic construct
SLGRGDQSTL

SEQ ID NO: 57272 - protein, 10 aa, synthetic construct
TDYRGDLLLS

SEQ ID NO: 57273 - protein, 10 aa, synthetic construct
TDNRGDRGQI

SEQ ID NO: 57274 - protein, 10 aa, synthetic construct
TDNRGDRQGI

SEQ ID NO: 57275 - protein, 10 aa, synthetic construct
TDNRGDRSVV

SEQ ID NO: 57276 - protein, 10 aa, synthetic construct
TDNRGDRGVV

SEQ ID NO: 57277 - protein, 10 aa, synthetic construct
TDNRGDYVGL

SEQ ID NO: 57278 - protein, 10 aa, synthetic construct
TDNRGDQSTL

SEQ ID NO: 57279 - protein, 10 aa, synthetic construct
TDNRGDRSQT

SEQ ID NO: 57280 - protein, 10 aa, synthetic construct
TDNRGDLLLS

SEQ ID NO: 57281 - protein, 10 aa, synthetic construct
TDQRGDHGVL

SEQ ID NO: 57282 - protein, 10 aa, synthetic construct
SLGRGDLLLS

SEQ ID NO: 57283 - protein, 10 aa, synthetic construct
TDQRGDHVNL

SEQ ID NO: 57284 - protein, 10 aa, synthetic construct
TDQRGDYVGL

SEQ ID NO: 57285 - protein, 10 aa, synthetic construct
TDQRGDYSSV

SEQ ID NO: 57286 - protein, 10 aa, synthetic construct
TDQRGDQSTL

SEQ ID NO: 57287 - protein, 10 aa, synthetic construct
TDQRGDLLLS

SEQ ID NO: 57288 - protein, 10 aa, synthetic construct
TDDRGDHGVL

SEQ ID NO: 57289 - protein, 10 aa, synthetic construct
TDDRGDHVNL

SEQ ID NO: 57290 - protein, 10 aa, synthetic construct
TDDRGDYVGL

SEQ ID NO: 57291 - protein, 10 aa, synthetic construct
TDDRGDYSSV

SEQ ID NO: 57292 - protein, 10 aa, synthetic construct
TDDRGDQSTL

SEQ ID NO: 57293 - protein, 10 aa, synthetic construct
QKKRGDRSQT

SEQ ID NO: 57294 - protein, 10 aa, synthetic construct
SKKRGDYTSM

SEQ ID NO: 57295 - protein, 10 aa, synthetic construct
SLARGDHGVL

SEQ ID NO: 57296 - protein, 10 aa, synthetic construct
TDDRGDLLLS

SEQ ID NO: 57297 - protein, 10 aa, synthetic construct
TDERGDHGVL

SEQ ID NO: 57298 - protein, 10 aa, synthetic construct
TDERGDHVNL

SEQ ID NO: 57299 - protein, 10 aa, synthetic construct
TDERGDYVGL

SEQ ID NO: 57300 - protein, 10 aa, synthetic construct
TDERGDYSSV

SEQ ID NO: 57301 - protein, 10 aa, synthetic construct
TDERGDQSTL

SEQ ID NO: 57302 - protein, 10 aa, synthetic construct
TDERGDLLLS

SEQ ID NO: 57303 - protein, 10 aa, synthetic construct
TEGRGDHVNL

SEQ ID NO: 57304 - protein, 10 aa, synthetic construct
TEGRGDRDYL

SEQ ID NO: 57305 - protein, 10 aa, synthetic construct
TEGRGDYSSV

SEQ ID NO: 57306 - protein, 10 aa, synthetic construct
SLARGDYVGL

SEQ ID NO: 57307 - protein, 10 aa, synthetic construct
TEGRGDLTVT

SEQ ID NO: 57308 - protein, 10 aa, synthetic construct
TEGRGDLIGR

SEQ ID NO: 57309 - protein, 10 aa, synthetic construct
TEARGDHVNL

SEQ ID NO: 57310 - protein, 10 aa, synthetic construct
TEARGDRDYL

SEQ ID NO: 57311 - protein, 10 aa, synthetic construct
TEARGDYSSV

SEQ ID NO: 57312 - protein, 10 aa, synthetic construct
TEARGDLTVT

SEQ ID NO: 57313 - protein, 10 aa, synthetic construct
TEARGDLIGR

SEQ ID NO: 57314 - protein, 10 aa, synthetic construct
TEVRGDHGVL

SEQ ID NO: 57315 - protein, 10 aa, synthetic construct
TEVRGDHVNL

SEQ ID NO: 57316 - protein, 10 aa, synthetic construct
TEVRGDYVGL

SEQ ID NO: 57317 - protein, 10 aa, synthetic construct
SLARGDQSTL

SEQ ID NO: 57318 - protein, 10 aa, synthetic construct
TEVRGDYSSV

SEQ ID NO: 57319 - protein, 10 aa, synthetic construct
TEVRGDQSTL

SEQ ID NO: 57320 - protein, 10 aa, synthetic construct
TEVRGDLLLS

SEQ ID NO: 57321 - protein, 10 aa, synthetic construct
TEPRGDHVNL

SEQ ID NO: 57322 - protein, 10 aa, synthetic construct
TEPRGDRDYL

SEQ ID NO: 57323 - protein, 10 aa, synthetic construct
TEPRGDYSSV

SEQ ID NO: 57324 - protein, 10 aa, synthetic construct
TEPRGDLTVT

SEQ ID NO: 57325 - protein, 10 aa, synthetic construct
TEPRGDLIGR

SEQ ID NO: 57326 - protein, 10 aa, synthetic construct
TELRGDHGVL

SEQ ID NO: 57327 - protein, 10 aa, synthetic construct
TELRGDHVNL

SEQ ID NO: 57328 - protein, 10 aa, synthetic construct
SLARGDLLLS

SEQ ID NO: 57329 - protein, 10 aa, synthetic construct
TELRGDYVGL

SEQ ID NO: 57330 - protein, 10 aa, synthetic construct
TELRGDYSSV

SEQ ID NO: 57331 - protein, 10 aa, synthetic construct
TELRGDQSTL

SEQ ID NO: 57332 - protein, 10 aa, synthetic construct
TELRGDLLLS

SEQ ID NO: 57333 - protein, 10 aa, synthetic construct
TEIRGDRGQI

SEQ ID NO: 57334 - protein, 10 aa, synthetic construct
TEIRGDRQGI

SEQ ID NO: 57335 - protein, 10 aa, synthetic construct
TEIRGDRSVV

SEQ ID NO: 57336 - protein, 10 aa, synthetic construct
TEIRGDRGVV

SEQ ID NO: 57337 - protein, 10 aa, synthetic construct
TEIRGDYVGL

SEQ ID NO: 57338 - protein, 10 aa, synthetic construct
TEIRGDQSTL

SEQ ID NO: 57339 - protein, 10 aa, synthetic construct
SLVRGDRGQI

SEQ ID NO: 57340 - protein, 10 aa, synthetic construct
TEIRGDRSQT

SEQ ID NO: 57341 - protein, 10 aa, synthetic construct
TEIRGDLLLS

SEQ ID NO: 57342 - protein, 10 aa, synthetic construct
TEMRGDRGQI

SEQ ID NO: 57343 - protein, 10 aa, synthetic construct
TEMRGDRQGI

SEQ ID NO: 57344 - protein, 10 aa, synthetic construct
TEMRGDRSVV

SEQ ID NO: 57345 - protein, 10 aa, synthetic construct
TEMRGDRGVV

SEQ ID NO: 57346 - protein, 10 aa, synthetic construct
TEMRGDYVGL

SEQ ID NO: 57347 - protein, 10 aa, synthetic construct
TEMRGDQSTL

SEQ ID NO: 57348 - protein, 10 aa, synthetic construct
TEMRGDRSQT

SEQ ID NO: 57349 - protein, 10 aa, synthetic construct
TEMRGDLLLS

SEQ ID NO: 57350 - protein, 10 aa, synthetic construct
SLVRGDRQGI

SEQ ID NO: 57351 - protein, 10 aa, synthetic construct
TEWRGDHGVL

SEQ ID NO: 57352 - protein, 10 aa, synthetic construct
TEWRGDHVNL

SEQ ID NO: 57353 - protein, 10 aa, synthetic construct
TEWRGDYVGL

SEQ ID NO: 57354 - protein, 10 aa, synthetic construct
TEWRGDYSSV

SEQ ID NO: 57355 - protein, 10 aa, synthetic construct
TEWRGDQSTL

SEQ ID NO: 57356 - protein, 10 aa, synthetic construct
TEWRGDLLLS

SEQ ID NO: 57357 - protein, 10 aa, synthetic construct
TEFRGDRGQI

SEQ ID NO: 57358 - protein, 10 aa, synthetic construct
TEFRGDRQGI

SEQ ID NO: 57359 - protein, 10 aa, synthetic construct
TEFRGDRSVV

SEQ ID NO: 57360 - protein, 10 aa, synthetic construct
TEFRGDRGVV

SEQ ID NO: 57361 - protein, 10 aa, synthetic construct
SLVRGDRSVV

SEQ ID NO: 57362 - protein, 10 aa, synthetic construct
TEFRGDYVGL

SEQ ID NO: 57363 - protein, 10 aa, synthetic construct
TEFRGDQSTL

SEQ ID NO: 57364 - protein, 10 aa, synthetic construct
TEFRGDRSQT

SEQ ID NO: 57365 - protein, 10 aa, synthetic construct
TEFRGDLLLS

SEQ ID NO: 57366 - protein, 10 aa, synthetic construct
TEKRGDRGQI

SEQ ID NO: 57367 - protein, 10 aa, synthetic construct
TEKRGDRQGI

SEQ ID NO: 57368 - protein, 10 aa, synthetic construct
TEKRGDRSVV

SEQ ID NO: 57369 - protein, 10 aa, synthetic construct
TEKRGDRGVV

SEQ ID NO: 57370 - protein, 10 aa, synthetic construct
TEKRGDYVGL

SEQ ID NO: 57371 - protein, 10 aa, synthetic construct
TEKRGDQSTL

SEQ ID NO: 57372 - protein, 10 aa, synthetic construct
SLVRGDRGVV

SEQ ID NO: 57373 - protein, 10 aa, synthetic construct
TEKRGDRSQT

SEQ ID NO: 57374 - protein, 10 aa, synthetic construct
TEKRGDLLLS

SEQ ID NO: 57375 - protein, 10 aa, synthetic construct
TERRGDHVNL

SEQ ID NO: 57376 - protein, 10 aa, synthetic construct
TERRGDRDYL

SEQ ID NO: 57377 - protein, 10 aa, synthetic construct
TERRGDYSSV

SEQ ID NO: 57378 - protein, 10 aa, synthetic construct
TERRGDLTVT

SEQ ID NO: 57379 - protein, 10 aa, synthetic construct
TERRGDLIGR

SEQ ID NO: 57380 - protein, 10 aa, synthetic construct
TEHRGDHGVL

SEQ ID NO: 57381 - protein, 10 aa, synthetic construct
TEHRGDHVNL

SEQ ID NO: 57382 - protein, 10 aa, synthetic construct
TEHRGDYVGL

SEQ ID NO: 57383 - protein, 10 aa, synthetic construct
SLVRGDRSQT

SEQ ID NO: 57384 - protein, 10 aa, synthetic construct
TEHRGDYSSV

SEQ ID NO: 57385 - protein, 10 aa, synthetic construct
TEHRGDQSTL

SEQ ID NO: 57386 - protein, 10 aa, synthetic construct
TEHRGDLLLS

SEQ ID NO: 57387 - protein, 10 aa, synthetic construct
TESRGDHGVL

SEQ ID NO: 57388 - protein, 10 aa, synthetic construct
TESRGDHVNL

SEQ ID NO: 57389 - protein, 10 aa, synthetic construct
TESRGDYVGL

SEQ ID NO: 57390 - protein, 10 aa, synthetic construct
TESRGDYSSV

SEQ ID NO: 57391 - protein, 10 aa, synthetic construct
TESRGDQSTL

SEQ ID NO: 57392 - protein, 10 aa, synthetic construct
TESRGDLLLS

SEQ ID NO: 57393 - protein, 10 aa, synthetic construct
TETRGDHGVL

SEQ ID NO: 57394 - protein, 10 aa, synthetic construct
SLPRGDHGVL

SEQ ID NO: 57395 - protein, 10 aa, synthetic construct
TETRGDHVNL

SEQ ID NO: 57396 - protein, 10 aa, synthetic construct
TETRGDYVGL

SEQ ID NO: 57397 - protein, 10 aa, synthetic construct
TETRGDYSSV

SEQ ID NO: 57398 - protein, 10 aa, synthetic construct
TETRGDQSTL

SEQ ID NO: 57399 - protein, 10 aa, synthetic construct
TETRGDLLLS

SEQ ID NO: 57400 - protein, 10 aa, synthetic construct
TEYRGDRGQI

SEQ ID NO: 57401 - protein, 10 aa, synthetic construct
TEYRGDRQGI

SEQ ID NO: 57402 - protein, 10 aa, synthetic construct
TEYRGDRSVV

SEQ ID NO: 57403 - protein, 10 aa, synthetic construct
TEYRGDRGVV

SEQ ID NO: 57404 - protein, 10 aa, synthetic construct
TEYRGDYVGL

SEQ ID NO: 57405 - protein, 10 aa, synthetic construct
SKKRGDFQNT

SEQ ID NO: 57406 - protein, 10 aa, synthetic construct
SLPRGDYVGL

SEQ ID NO: 57407 - protein, 10 aa, synthetic construct
TEYRGDQSTL

SEQ ID NO: 57408 - protein, 10 aa, synthetic construct
TEYRGDRSQT

SEQ ID NO: 57409 - protein, 10 aa, synthetic construct
TEYRGDLLLS

SEQ ID NO: 57410 - protein, 10 aa, synthetic construct
TENRGDRGQI

SEQ ID NO: 57411 - protein, 10 aa, synthetic construct
TENRGDRQGI

SEQ ID NO: 57412 - protein, 10 aa, synthetic construct
TENRGDRSVV

SEQ ID NO: 57413 - protein, 10 aa, synthetic construct
TENRGDRGVV

SEQ ID NO: 57414 - protein, 10 aa, synthetic construct
TENRGDYVGL

SEQ ID NO: 57415 - protein, 10 aa, synthetic construct
TENRGDQSTL

SEQ ID NO: 57416 - protein, 10 aa, synthetic construct
TENRGDRSQT

SEQ ID NO: 57417 - protein, 10 aa, synthetic construct
SLPRGDQSTL

SEQ ID NO: 57418 - protein, 10 aa, synthetic construct
TENRGDLLLS

SEQ ID NO: 57419 - protein, 10 aa, synthetic construct
TEQRGDHGVL

SEQ ID NO: 57420 - protein, 10 aa, synthetic construct
TEQRGDHVNL

SEQ ID NO: 57421 - protein, 10 aa, synthetic construct
TEQRGDYVGL

SEQ ID NO: 57422 - protein, 10 aa, synthetic construct
TEQRGDYSSV

SEQ ID NO: 57423 - protein, 10 aa, synthetic construct
TEQRGDQSTL

SEQ ID NO: 57424 - protein, 10 aa, synthetic construct
TEQRGDLLLS

SEQ ID NO: 57425 - protein, 10 aa, synthetic construct
TEDRGDHGVL

SEQ ID NO: 57426 - protein, 10 aa, synthetic construct
TEDRGDHVNL

SEQ ID NO: 57427 - protein, 10 aa, synthetic construct
TEDRGDYVGL

SEQ ID NO: 57428 - protein, 10 aa, synthetic construct
SLPRGDLLLS

SEQ ID NO: 57429 - protein, 10 aa, synthetic construct
TEDRGDYSSV

SEQ ID NO: 57430 - protein, 10 aa, synthetic construct
TEDRGDQSTL

SEQ ID NO: 57431 - protein, 10 aa, synthetic construct
TEDRGDLLLS

SEQ ID NO: 57432 - protein, 10 aa, synthetic construct
TEERGDHGVL

SEQ ID NO: 57433 - protein, 10 aa, synthetic construct
TEERGDHVNL

SEQ ID NO: 57434 - protein, 10 aa, synthetic construct
TEERGDYVGL

SEQ ID NO: 57435 - protein, 10 aa, synthetic construct
TEERGDYSSV

SEQ ID NO: 57436 - protein, 10 aa, synthetic construct
TEERGDQSTL

SEQ ID NO: 57437 - protein, 10 aa, synthetic construct
TEERGDLLLS

SEQ ID NO: 57438 - protein, 10 aa, synthetic construct
AGGRGDYNSL

SEQ ID NO: 57439 - protein, 10 aa, synthetic construct
SLLRGDRGQI

SEQ ID NO: 57440 - protein, 10 aa, synthetic construct
AGGRGDFQNT

SEQ ID NO: 57441 - protein, 10 aa, synthetic construct
AGARGDYNSL

SEQ ID NO: 57442 - protein, 10 aa, synthetic construct
AGARGDFQNT

SEQ ID NO: 57443 - protein, 10 aa, synthetic construct
AGVRGDYNSL

SEQ ID NO: 57444 - protein, 10 aa, synthetic construct
AGVRGDFQNT

SEQ ID NO: 57445 - protein, 10 aa, synthetic construct
AGPRGDYNSL

SEQ ID NO: 57446 - protein, 10 aa, synthetic construct
AGPRGDFQNT

SEQ ID NO: 57447 - protein, 10 aa, synthetic construct
AGLRGDYNSL

SEQ ID NO: 57448 - protein, 10 aa, synthetic construct
AGLRGDFQNT

SEQ ID NO: 57449 - protein, 10 aa, synthetic construct
AGIRGDRDYL

SEQ ID NO: 57450 - protein, 10 aa, synthetic construct
SLLRGDRQGI

SEQ ID NO: 57451 - protein, 10 aa, synthetic construct
AGIRGDYVGL

SEQ ID NO: 57452 - protein, 10 aa, synthetic construct
AGIRGDQSTL

SEQ ID NO: 57453 - protein, 10 aa, synthetic construct
AGMRGDHVNL

SEQ ID NO: 57454 - protein, 10 aa, synthetic construct
AGMRGDRDYL

SEQ ID NO: 57455 - protein, 10 aa, synthetic construct
AGMRGDYSSV

SEQ ID NO: 57456 - protein, 10 aa, synthetic construct
AGMRGDLTVT

SEQ ID NO: 57457 - protein, 10 aa, synthetic construct
AGMRGDLIGR

SEQ ID NO: 57458 - protein, 10 aa, synthetic construct
AGWRGDYTSV

SEQ ID NO: 57459 - protein, 10 aa, synthetic construct
AGWRGDYTSM

SEQ ID NO: 57460 - protein, 10 aa, synthetic construct
AGFRGDRDYL

SEQ ID NO: 57461 - protein, 10 aa, synthetic construct
SLLRGDRSVV

SEQ ID NO: 57462 - protein, 10 aa, synthetic construct
AGFRGDYVGL

SEQ ID NO: 57463 - protein, 10 aa, synthetic construct
AGFRGDQSTL

SEQ ID NO: 57464 - protein, 10 aa, synthetic construct
AGKRGDRDYL

SEQ ID NO: 57465 - protein, 10 aa, synthetic construct
AGKRGDYVGL

SEQ ID NO: 57466 - protein, 10 aa, synthetic construct
AGKRGDQSTL

SEQ ID NO: 57467 - protein, 10 aa, synthetic construct
AGRRGDYNSL

SEQ ID NO: 57468 - protein, 10 aa, synthetic construct
AGRRGDFQNT

SEQ ID NO: 57469 - protein, 10 aa, synthetic construct
AGHRGDHVNL

SEQ ID NO: 57470 - protein, 10 aa, synthetic construct
AGHRGDYSSV

SEQ ID NO: 57471 - protein, 10 aa, synthetic construct
AGHRGDYTSV

SEQ ID NO: 57472 - protein, 10 aa, synthetic construct
SLLRGDRGVV

SEQ ID NO: 57473 - protein, 10 aa, synthetic construct
AGHRGDYTSM

SEQ ID NO: 57474 - protein, 10 aa, synthetic construct
AGSRGDYNSL

SEQ ID NO: 57475 - protein, 10 aa, synthetic construct
AGSRGDFQNT

SEQ ID NO: 57476 - protein, 10 aa, synthetic construct
AGTRGDHVNL

SEQ ID NO: 57477 - protein, 10 aa, synthetic construct
AGTRGDYSSV

SEQ ID NO: 57478 - protein, 10 aa, synthetic construct
AGTRGDYTSV

SEQ ID NO: 57479 - protein, 10 aa, synthetic construct
AGTRGDYTSM

SEQ ID NO: 57480 - protein, 10 aa, synthetic construct
AGYRGDRDYL

SEQ ID NO: 57481 - protein, 10 aa, synthetic construct
AGYRGDYVGL

SEQ ID NO: 57482 - protein, 10 aa, synthetic construct
AGYRGDQSTL

SEQ ID NO: 57483 - protein, 10 aa, synthetic construct
SLLRGDRSQT

SEQ ID NO: 57484 - protein, 10 aa, synthetic construct
AGNRGDRDYL

SEQ ID NO: 57485 - protein, 10 aa, synthetic construct
AGNRGDYVGL

SEQ ID NO: 57486 - protein, 10 aa, synthetic construct
AGNRGDQSTL

SEQ ID NO: 57487 - protein, 10 aa, synthetic construct
AGQRGDHVNL

SEQ ID NO: 57488 - protein, 10 aa, synthetic construct
AGQRGDYSSV

SEQ ID NO: 57489 - protein, 10 aa, synthetic construct
AGQRGDYTSV

SEQ ID NO: 57490 - protein, 10 aa, synthetic construct
AGQRGDYTSM

SEQ ID NO: 57491 - protein, 10 aa, synthetic construct
AGDRGDHVNL

SEQ ID NO: 57492 - protein, 10 aa, synthetic construct
AGDRGDYSSV

SEQ ID NO: 57493 - protein, 10 aa, synthetic construct
AGDRGDYTSV

SEQ ID NO: 57494 - protein, 10 aa, synthetic construct
SLWRGDRGQI

SEQ ID NO: 57495 - protein, 10 aa, synthetic construct
AGDRGDYTSM

SEQ ID NO: 57496 - protein, 10 aa, synthetic construct
AGERGDHVNL

SEQ ID NO: 57497 - protein, 10 aa, synthetic construct
AGERGDYSSV

SEQ ID NO: 57498 - protein, 10 aa, synthetic construct
AGERGDYTSV

SEQ ID NO: 57499 - protein, 10 aa, synthetic construct
AGERGDYTSM

SEQ ID NO: 57500 - protein, 10 aa, synthetic construct
AAGRGDYNSL

SEQ ID NO: 57501 - protein, 10 aa, synthetic construct
AAGRGDFQNT

SEQ ID NO: 57502 - protein, 10 aa, synthetic construct
AAARGDYNSL

SEQ ID NO: 57503 - protein, 10 aa, synthetic construct
AAARGDFQNT

SEQ ID NO: 57504 - protein, 10 aa, synthetic construct
AAVRGDYNSL

SEQ ID NO: 57505 - protein, 10 aa, synthetic construct
SLWRGDRQGI

SEQ ID NO: 57506 - protein, 10 aa, synthetic construct
AAVRGDFQNT

SEQ ID NO: 57507 - protein, 10 aa, synthetic construct
AAPRGDYNSL

SEQ ID NO: 57508 - protein, 10 aa, synthetic construct
AAPRGDFQNT

SEQ ID NO: 57509 - protein, 10 aa, synthetic construct
AALRGDYNSL

SEQ ID NO: 57510 - protein, 10 aa, synthetic construct
AALRGDFQNT

SEQ ID NO: 57511 - protein, 10 aa, synthetic construct
AAIRGDRDYL

SEQ ID NO: 57512 - protein, 10 aa, synthetic construct
AAIRGDYVGL

SEQ ID NO: 57513 - protein, 10 aa, synthetic construct
AAIRGDQSTL

SEQ ID NO: 57514 - protein, 10 aa, synthetic construct
AAMRGDHVNL

SEQ ID NO: 57515 - protein, 10 aa, synthetic construct
AAMRGDRDYL

SEQ ID NO: 57516 - protein, 10 aa, synthetic construct
SKNRGDYNSL

SEQ ID NO: 57517 - protein, 10 aa, synthetic construct
SLWRGDRSVV

SEQ ID NO: 57518 - protein, 10 aa, synthetic construct
AAMRGDYSSV

SEQ ID NO: 57519 - protein, 10 aa, synthetic construct
AAMRGDLTVT

SEQ ID NO: 57520 - protein, 10 aa, synthetic construct
AAMRGDLIGR

SEQ ID NO: 57521 - protein, 10 aa, synthetic construct
AAWRGDYTSV

SEQ ID NO: 57522 - protein, 10 aa, synthetic construct
AAWRGDYTSM

SEQ ID NO: 57523 - protein, 10 aa, synthetic construct
AAFRGDRDYL

SEQ ID NO: 57524 - protein, 10 aa, synthetic construct
AAFRGDYVGL

SEQ ID NO: 57525 - protein, 10 aa, synthetic construct
AAFRGDQSTL

SEQ ID NO: 57526 - protein, 10 aa, synthetic construct
AAKRGDRDYL

SEQ ID NO: 57527 - protein, 10 aa, synthetic construct
AAKRGDYVGL

SEQ ID NO: 57528 - protein, 10 aa, synthetic construct
SLWRGDRGVV

SEQ ID NO: 57529 - protein, 10 aa, synthetic construct
AAKRGDQSTL

SEQ ID NO: 57530 - protein, 10 aa, synthetic construct
AARRGDYNSL

SEQ ID NO: 57531 - protein, 10 aa, synthetic construct
AARRGDFQNT

SEQ ID NO: 57532 - protein, 10 aa, synthetic construct
AAHRGDHVNL

SEQ ID NO: 57533 - protein, 10 aa, synthetic construct
AAHRGDYSSV

SEQ ID NO: 57534 - protein, 10 aa, synthetic construct
AAHRGDYTSV

SEQ ID NO: 57535 - protein, 10 aa, synthetic construct
AAHRGDYTSM

SEQ ID NO: 57536 - protein, 10 aa, synthetic construct
AASRGDYNSL

SEQ ID NO: 57537 - protein, 10 aa, synthetic construct
AASRGDFQNT

SEQ ID NO: 57538 - protein, 10 aa, synthetic construct
AATRGDHVNL

SEQ ID NO: 57539 - protein, 10 aa, synthetic construct
SLWRGDRSQT

SEQ ID NO: 57540 - protein, 10 aa, synthetic construct
AATRGDYSSV

SEQ ID NO: 57541 - protein, 10 aa, synthetic construct
AATRGDYTSV

SEQ ID NO: 57542 - protein, 10 aa, synthetic construct
AATRGDYTSM

SEQ ID NO: 57543 - protein, 10 aa, synthetic construct
AAYRGDRDYL

SEQ ID NO: 57544 - protein, 10 aa, synthetic construct
AAYRGDYVGL

SEQ ID NO: 57545 - protein, 10 aa, synthetic construct
AAYRGDQSTL

SEQ ID NO: 57546 - protein, 10 aa, synthetic construct
AANRGDRDYL

SEQ ID NO: 57547 - protein, 10 aa, synthetic construct
AANRGDYVGL

SEQ ID NO: 57548 - protein, 10 aa, synthetic construct
AANRGDQSTL

SEQ ID NO: 57549 - protein, 10 aa, synthetic construct
AAQRGDHVNL

SEQ ID NO: 57550 - protein, 10 aa, synthetic construct
SLRRGDHGVL

SEQ ID NO: 57551 - protein, 10 aa, synthetic construct
AAQRGDYSSV

SEQ ID NO: 57552 - protein, 10 aa, synthetic construct
AAQRGDYTSV

SEQ ID NO: 57553 - protein, 10 aa, synthetic construct
AAQRGDYTSM

SEQ ID NO: 57554 - protein, 10 aa, synthetic construct
AADRGDHVNL

SEQ ID NO: 57555 - protein, 10 aa, synthetic construct
AADRGDYSSV

SEQ ID NO: 57556 - protein, 10 aa, synthetic construct
AADRGDYTSV

SEQ ID NO: 57557 - protein, 10 aa, synthetic construct
AADRGDYTSM

SEQ ID NO: 57558 - protein, 10 aa, synthetic construct
AAERGDHVNL

SEQ ID NO: 57559 - protein, 10 aa, synthetic construct
AAERGDYSSV

SEQ ID NO: 57560 - protein, 10 aa, synthetic construct
AAERGDYTSV

SEQ ID NO: 57561 - protein, 10 aa, synthetic construct
SLRRGDYVGL

SEQ ID NO: 57562 - protein, 10 aa, synthetic construct
AAERGDYTSM

SEQ ID NO: 57563 - protein, 10 aa, synthetic construct
AVGRGDHVNL

SEQ ID NO: 57564 - protein, 10 aa, synthetic construct
AVGRGDYSSV

SEQ ID NO: 57565 - protein, 10 aa, synthetic construct
AVGRGDYTSV

SEQ ID NO: 57566 - protein, 10 aa, synthetic construct
AVGRGDYTSM

SEQ ID NO: 57567 - protein, 10 aa, synthetic construct
AVARGDHVNL

SEQ ID NO: 57568 - protein, 10 aa, synthetic construct
AVARGDYSSV

SEQ ID NO: 57569 - protein, 10 aa, synthetic construct
AVARGDYTSV

SEQ ID NO: 57570 - protein, 10 aa, synthetic construct
AVARGDYTSM

SEQ ID NO: 57571 - protein, 10 aa, synthetic construct
AVVRGDHVNL

SEQ ID NO: 57572 - protein, 10 aa, synthetic construct
SLRRGDQSTL

SEQ ID NO: 57573 - protein, 10 aa, synthetic construct
AVVRGDYNSL

SEQ ID NO: 57574 - protein, 10 aa, synthetic construct
AVVRGDYSSV

SEQ ID NO: 57575 - protein, 10 aa, synthetic construct
AVVRGDYTSV

SEQ ID NO: 57576 - protein, 10 aa, synthetic construct
AVVRGDYTSM

SEQ ID NO: 57577 - protein, 10 aa, synthetic construct
AVPRGDHVNL

SEQ ID NO: 57578 - protein, 10 aa, synthetic construct
AVPRGDYSSV

SEQ ID NO: 57579 - protein, 10 aa, synthetic construct
AVPRGDYTSV

SEQ ID NO: 57580 - protein, 10 aa, synthetic construct
AVPRGDYTSM

SEQ ID NO: 57581 - protein, 10 aa, synthetic construct
AVLRGDHVNL

SEQ ID NO: 57582 - protein, 10 aa, synthetic construct
AVLRGDYNSL

SEQ ID NO: 57583 - protein, 10 aa, synthetic construct
SLRRGDLLLS

SEQ ID NO: 57584 - protein, 10 aa, synthetic construct
AVLRGDYSSV

SEQ ID NO: 57585 - protein, 10 aa, synthetic construct
AVLRGDYTSV

SEQ ID NO: 57586 - protein, 10 aa, synthetic construct
AVLRGDYTSM

SEQ ID NO: 57587 - protein, 10 aa, synthetic construct
AVIRGDHGVL

SEQ ID NO: 57588 - protein, 10 aa, synthetic construct
AVIRGDRGQI

SEQ ID NO: 57589 - protein, 10 aa, synthetic construct
AVIRGDRQGI

SEQ ID NO: 57590 - protein, 10 aa, synthetic construct
AVIRGDRSVV

SEQ ID NO: 57591 - protein, 10 aa, synthetic construct
AVIRGDLTVT

SEQ ID NO: 57592 - protein, 10 aa, synthetic construct
AVIRGDLIGR

SEQ ID NO: 57593 - protein, 10 aa, synthetic construct
AVIRGDRSQT

SEQ ID NO: 57594 - protein, 10 aa, synthetic construct
SLHRGDRGQI

SEQ ID NO: 57595 - protein, 10 aa, synthetic construct
AVIRGDLLLS

SEQ ID NO: 57596 - protein, 10 aa, synthetic construct
AVMRGDHGVL

SEQ ID NO: 57597 - protein, 10 aa, synthetic construct
AVMRGDHVNL

SEQ ID NO: 57598 - protein, 10 aa, synthetic construct
AVMRGDYVGL

SEQ ID NO: 57599 - protein, 10 aa, synthetic construct
AVMRGDYSSV

SEQ ID NO: 57600 - protein, 10 aa, synthetic construct
AVMRGDQSTL

SEQ ID NO: 57601 - protein, 10 aa, synthetic construct
AVMRGDLLLS

SEQ ID NO: 57602 - protein, 10 aa, synthetic construct
AVWRGDHVNL

SEQ ID NO: 57603 - protein, 10 aa, synthetic construct
AVWRGDRDYL

SEQ ID NO: 57604 - protein, 10 aa, synthetic construct
AVWRGDYSSV

SEQ ID NO: 57605 - protein, 10 aa, synthetic construct
SLHRGDRQGI

SEQ ID NO: 57606 - protein, 10 aa, synthetic construct
AVWRGDLTVT

SEQ ID NO: 57607 - protein, 10 aa, synthetic construct
AVWRGDLIGR

SEQ ID NO: 57608 - protein, 10 aa, synthetic construct
AVFRGDHGVL

SEQ ID NO: 57609 - protein, 10 aa, synthetic construct
AVFRGDRGQI

SEQ ID NO: 57610 - protein, 10 aa, synthetic construct
AVFRGDRQGI

SEQ ID NO: 57611 - protein, 10 aa, synthetic construct
AVFRGDRSVV

SEQ ID NO: 57612 - protein, 10 aa, synthetic construct
AVFRGDLTVT

SEQ ID NO: 57613 - protein, 10 aa, synthetic construct
AVFRGDLIGR

SEQ ID NO: 57614 - protein, 10 aa, synthetic construct
AVFRGDRSQT

SEQ ID NO: 57615 - protein, 10 aa, synthetic construct
AVFRGDLLLS

SEQ ID NO: 57616 - protein, 10 aa, synthetic construct
SLHRGDRSVV

SEQ ID NO: 57617 - protein, 10 aa, synthetic construct
AVKRGDHGVL

SEQ ID NO: 57618 - protein, 10 aa, synthetic construct
AVKRGDRGQI

SEQ ID NO: 57619 - protein, 10 aa, synthetic construct
AVKRGDRQGI

SEQ ID NO: 57620 - protein, 10 aa, synthetic construct
AVKRGDRSVV

SEQ ID NO: 57621 - protein, 10 aa, synthetic construct
AVKRGDLTVT

SEQ ID NO: 57622 - protein, 10 aa, synthetic construct
AVKRGDLIGR

SEQ ID NO: 57623 - protein, 10 aa, synthetic construct
AVKRGDRSQT

SEQ ID NO: 57624 - protein, 10 aa, synthetic construct
AVKRGDLLLS

SEQ ID NO: 57625 - protein, 10 aa, synthetic construct
AVRRGDHVNL

SEQ ID NO: 57626 - protein, 10 aa, synthetic construct
AVRRGDYSSV

SEQ ID NO: 57627 - protein, 10 aa, synthetic construct
SKNRGDYTSM

SEQ ID NO: 57628 - protein, 10 aa, synthetic construct
SLHRGDRGVV

SEQ ID NO: 57629 - protein, 10 aa, synthetic construct
AVRRGDYTSV

SEQ ID NO: 57630 - protein, 10 aa, synthetic construct
AVRRGDYTSM

SEQ ID NO: 57631 - protein, 10 aa, synthetic construct
AVHRGDRDYL

SEQ ID NO: 57632 - protein, 10 aa, synthetic construct
AVHRGDYVGL

SEQ ID NO: 57633 - protein, 10 aa, synthetic construct
AVHRGDQSTL

SEQ ID NO: 57634 - protein, 10 aa, synthetic construct
AVSRGDHVNL

SEQ ID NO: 57635 - protein, 10 aa, synthetic construct
AVSRGDYNSL

SEQ ID NO: 57636 - protein, 10 aa, synthetic construct
AVSRGDYSSV

SEQ ID NO: 57637 - protein, 10 aa, synthetic construct
AVSRGDYTSV

SEQ ID NO: 57638 - protein, 10 aa, synthetic construct
AVSRGDYTSM

SEQ ID NO: 57639 - protein, 10 aa, synthetic construct
SLHRGDRSQT

SEQ ID NO: 57640 - protein, 10 aa, synthetic construct
AVTRGDRDYL

SEQ ID NO: 57641 - protein, 10 aa, synthetic construct
AVTRGDYVGL

SEQ ID NO: 57642 - protein, 10 aa, synthetic construct
AVTRGDQSTL

SEQ ID NO: 57643 - protein, 10 aa, synthetic construct
AVYRGDHGVL

SEQ ID NO: 57644 - protein, 10 aa, synthetic construct
AVYRGDRGQI

SEQ ID NO: 57645 - protein, 10 aa, synthetic construct
AVYRGDRQGI

SEQ ID NO: 57646 - protein, 10 aa, synthetic construct
AVYRGDRSVV

SEQ ID NO: 57647 - protein, 10 aa, synthetic construct
AVYRGDLTVT

SEQ ID NO: 57648 - protein, 10 aa, synthetic construct
AVYRGDLIGR

SEQ ID NO: 57649 - protein, 10 aa, synthetic construct
AVYRGDRSQT

SEQ ID NO: 57650 - protein, 10 aa, synthetic construct
SLSRGDRGQI

SEQ ID NO: 57651 - protein, 10 aa, synthetic construct
AVYRGDLLLS

SEQ ID NO: 57652 - protein, 10 aa, synthetic construct
AVNRGDHGVL

SEQ ID NO: 57653 - protein, 10 aa, synthetic construct
AVNRGDRGQI

SEQ ID NO: 57654 - protein, 10 aa, synthetic construct
AVNRGDRQGI

SEQ ID NO: 57655 - protein, 10 aa, synthetic construct
AVNRGDRSVV

SEQ ID NO: 57656 - protein, 10 aa, synthetic construct
AVNRGDLTVT

SEQ ID NO: 57657 - protein, 10 aa, synthetic construct
AVNRGDLIGR

SEQ ID NO: 57658 - protein, 10 aa, synthetic construct
AVNRGDRSQT

SEQ ID NO: 57659 - protein, 10 aa, synthetic construct
AVNRGDLLLS

SEQ ID NO: 57660 - protein, 10 aa, synthetic construct
AVQRGDRDYL

SEQ ID NO: 57661 - protein, 10 aa, synthetic construct
SLSRGDRQGI

SEQ ID NO: 57662 - protein, 10 aa, synthetic construct
AVQRGDYVGL

SEQ ID NO: 57663 - protein, 10 aa, synthetic construct
AVQRGDQSTL

SEQ ID NO: 57664 - protein, 10 aa, synthetic construct
AVDRGDRDYL

SEQ ID NO: 57665 - protein, 10 aa, synthetic construct
AVDRGDYVGL

SEQ ID NO: 57666 - protein, 10 aa, synthetic construct
AVDRGDQSTL

SEQ ID NO: 57667 - protein, 10 aa, synthetic construct
AVERGDRDYL

SEQ ID NO: 57668 - protein, 10 aa, synthetic construct
AVERGDYVGL

SEQ ID NO: 57669 - protein, 10 aa, synthetic construct
AVERGDQSTL

SEQ ID NO: 57670 - protein, 10 aa, synthetic construct
APGRGDYNSL

SEQ ID NO: 57671 - protein, 10 aa, synthetic construct
APGRGDFQNT

SEQ ID NO: 57672 - protein, 10 aa, synthetic construct
SLSRGDRSVV

SEQ ID NO: 57673 - protein, 10 aa, synthetic construct
APARGDYNSL

SEQ ID NO: 57674 - protein, 10 aa, synthetic construct
APARGDFQNT

SEQ ID NO: 57675 - protein, 10 aa, synthetic construct
APVRGDYNSL

SEQ ID NO: 57676 - protein, 10 aa, synthetic construct
APVRGDFQNT

SEQ ID NO: 57677 - protein, 10 aa, synthetic construct
APLRGDYNSL

SEQ ID NO: 57678 - protein, 10 aa, synthetic construct
APLRGDFQNT

SEQ ID NO: 57679 - protein, 10 aa, synthetic construct
APIRGDRDYL

SEQ ID NO: 57680 - protein, 10 aa, synthetic construct
APIRGDYVGL

SEQ ID NO: 57681 - protein, 10 aa, synthetic construct
APIRGDQSTL

SEQ ID NO: 57682 - protein, 10 aa, synthetic construct
APMRGDHVNL

SEQ ID NO: 57683 - protein, 10 aa, synthetic construct
SLSRGDRGVV

SEQ ID NO: 57684 - protein, 10 aa, synthetic construct
APMRGDRDYL

SEQ ID NO: 57685 - protein, 10 aa, synthetic construct
APMRGDYSSV

SEQ ID NO: 57686 - protein, 10 aa, synthetic construct
APMRGDLTVT

SEQ ID NO: 57687 - protein, 10 aa, synthetic construct
APMRGDLIGR

SEQ ID NO: 57688 - protein, 10 aa, synthetic construct
APWRGDYTSV

SEQ ID NO: 57689 - protein, 10 aa, synthetic construct
APWRGDYTSM

SEQ ID NO: 57690 - protein, 10 aa, synthetic construct
APFRGDRDYL

SEQ ID NO: 57691 - protein, 10 aa, synthetic construct
APFRGDYVGL

SEQ ID NO: 57692 - protein, 10 aa, synthetic construct
APFRGDQSTL

SEQ ID NO: 57693 - protein, 10 aa, synthetic construct
APKRGDRDYL

SEQ ID NO: 57694 - protein, 10 aa, synthetic construct
SLSRGDRSQT

SEQ ID NO: 57695 - protein, 10 aa, synthetic construct
APKRGDYVGL

SEQ ID NO: 57696 - protein, 10 aa, synthetic construct
APKRGDQSTL

SEQ ID NO: 57697 - protein, 10 aa, synthetic construct
APRRGDYNSL

SEQ ID NO: 57698 - protein, 10 aa, synthetic construct
APRRGDFQNT

SEQ ID NO: 57699 - protein, 10 aa, synthetic construct
APHRGDHVNL

SEQ ID NO: 57700 - protein, 10 aa, synthetic construct
APHRGDYSSV

SEQ ID NO: 57701 - protein, 10 aa, synthetic construct
APHRGDYTSV

SEQ ID NO: 57702 - protein, 10 aa, synthetic construct
APHRGDYTSM

SEQ ID NO: 57703 - protein, 10 aa, synthetic construct
APSRGDYNSL

SEQ ID NO: 57704 - protein, 10 aa, synthetic construct
APSRGDFQNT

SEQ ID NO: 57705 - protein, 10 aa, synthetic construct
SLTRGDRGQI

SEQ ID NO: 57706 - protein, 10 aa, synthetic construct
APTRGDHVNL

SEQ ID NO: 57707 - protein, 10 aa, synthetic construct
APTRGDYSSV

SEQ ID NO: 57708 - protein, 10 aa, synthetic construct
APTRGDYTSV

SEQ ID NO: 57709 - protein, 10 aa, synthetic construct
APTRGDYTSM

SEQ ID NO: 57710 - protein, 10 aa, synthetic construct
APYRGDRDYL

SEQ ID NO: 57711 - protein, 10 aa, synthetic construct
APYRGDYVGL

SEQ ID NO: 57712 - protein, 10 aa, synthetic construct
APYRGDQSTL

SEQ ID NO: 57713 - protein, 10 aa, synthetic construct
APNRGDRDYL

SEQ ID NO: 57714 - protein, 10 aa, synthetic construct
APNRGDYVGL

SEQ ID NO: 57715 - protein, 10 aa, synthetic construct
APNRGDQSTL

SEQ ID NO: 57716 - protein, 10 aa, synthetic construct
SLTRGDRQGI

SEQ ID NO: 57717 - protein, 10 aa, synthetic construct
APQRGDHVNL

SEQ ID NO: 57718 - protein, 10 aa, synthetic construct
APQRGDYSSV

SEQ ID NO: 57719 - protein, 10 aa, synthetic construct
APQRGDYTSV

SEQ ID NO: 57720 - protein, 10 aa, synthetic construct
APQRGDYTSM

SEQ ID NO: 57721 - protein, 10 aa, synthetic construct
APDRGDHVNL

SEQ ID NO: 57722 - protein, 10 aa, synthetic construct
APDRGDYSSV

SEQ ID NO: 57723 - protein, 10 aa, synthetic construct
APDRGDYTSV

SEQ ID NO: 57724 - protein, 10 aa, synthetic construct
APDRGDYTSM

SEQ ID NO: 57725 - protein, 10 aa, synthetic construct
APERGDHVNL

SEQ ID NO: 57726 - protein, 10 aa, synthetic construct
APERGDYSSV

SEQ ID NO: 57727 - protein, 10 aa, synthetic construct
SLTRGDRSVV

SEQ ID NO: 57728 - protein, 10 aa, synthetic construct
APERGDYTSV

SEQ ID NO: 57729 - protein, 10 aa, synthetic construct
APERGDYTSM

SEQ ID NO: 57730 - protein, 10 aa, synthetic construct
ALGRGDHVNL

SEQ ID NO: 57731 - protein, 10 aa, synthetic construct
ALGRGDYSSV

SEQ ID NO: 57732 - protein, 10 aa, synthetic construct
ALGRGDYTSV

SEQ ID NO: 57733 - protein, 10 aa, synthetic construct
ALGRGDYTSM

SEQ ID NO: 57734 - protein, 10 aa, synthetic construct
ALARGDHVNL

SEQ ID NO: 57735 - protein, 10 aa, synthetic construct
ALARGDYSSV

SEQ ID NO: 57736 - protein, 10 aa, synthetic construct
ALARGDYTSV

SEQ ID NO: 57737 - protein, 10 aa, synthetic construct
ALARGDYTSM

SEQ ID NO: 57738 - protein, 10 aa, synthetic construct
SKNRGDFQNT

SEQ ID NO: 57739 - protein, 10 aa, synthetic construct
SLTRGDRGVV

SEQ ID NO: 57740 - protein, 10 aa, synthetic construct
ALVRGDHVNL

SEQ ID NO: 57741 - protein, 10 aa, synthetic construct
ALVRGDYNSL

SEQ ID NO: 57742 - protein, 10 aa, synthetic construct
ALVRGDYSSV

SEQ ID NO: 57743 - protein, 10 aa, synthetic construct
ALVRGDYTSV

SEQ ID NO: 57744 - protein, 10 aa, synthetic construct
ALVRGDYTSM

SEQ ID NO: 57745 - protein, 10 aa, synthetic construct
ALPRGDHVNL

SEQ ID NO: 57746 - protein, 10 aa, synthetic construct
ALPRGDYSSV

SEQ ID NO: 57747 - protein, 10 aa, synthetic construct
ALPRGDYTSV

SEQ ID NO: 57748 - protein, 10 aa, synthetic construct
ALPRGDYTSM

SEQ ID NO: 57749 - protein, 10 aa, synthetic construct
ALLRGDHVNL

SEQ ID NO: 57750 - protein, 10 aa, synthetic construct
SLTRGDRSQT

SEQ ID NO: 57751 - protein, 10 aa, synthetic construct
ALLRGDYNSL

SEQ ID NO: 57752 - protein, 10 aa, synthetic construct
ALLRGDYSSV

SEQ ID NO: 57753 - protein, 10 aa, synthetic construct
ALLRGDYTSV

SEQ ID NO: 57754 - protein, 10 aa, synthetic construct
ALLRGDYTSM

SEQ ID NO: 57755 - protein, 10 aa, synthetic construct
ALIRGDHGVL

SEQ ID NO: 57756 - protein, 10 aa, synthetic construct
ALIRGDRGQI

SEQ ID NO: 57757 - protein, 10 aa, synthetic construct
ALIRGDRQGI

SEQ ID NO: 57758 - protein, 10 aa, synthetic construct
ALIRGDRSVV

SEQ ID NO: 57759 - protein, 10 aa, synthetic construct
ALIRGDLTVT

SEQ ID NO: 57760 - protein, 10 aa, synthetic construct
ALIRGDLIGR

SEQ ID NO: 57761 - protein, 10 aa, synthetic construct
SLQRGDRGQI

SEQ ID NO: 57762 - protein, 10 aa, synthetic construct
ALIRGDRSQT

SEQ ID NO: 57763 - protein, 10 aa, synthetic construct
ALIRGDLLLS

SEQ ID NO: 57764 - protein, 10 aa, synthetic construct
ALMRGDHGVL

SEQ ID NO: 57765 - protein, 10 aa, synthetic construct
ALMRGDHVNL

SEQ ID NO: 57766 - protein, 10 aa, synthetic construct
ALMRGDYVGL

SEQ ID NO: 57767 - protein, 10 aa, synthetic construct
ALMRGDYSSV

SEQ ID NO: 57768 - protein, 10 aa, synthetic construct
ALMRGDQSTL

SEQ ID NO: 57769 - protein, 10 aa, synthetic construct
ALMRGDLLLS

SEQ ID NO: 57770 - protein, 10 aa, synthetic construct
ALWRGDHVNL

SEQ ID NO: 57771 - protein, 10 aa, synthetic construct
ALWRGDRDYL

SEQ ID NO: 57772 - protein, 10 aa, synthetic construct
SLQRGDRQGI

SEQ ID NO: 57773 - protein, 10 aa, synthetic construct
ALWRGDYSSV

SEQ ID NO: 57774 - protein, 10 aa, synthetic construct
ALWRGDLTVT

SEQ ID NO: 57775 - protein, 10 aa, synthetic construct
ALWRGDLIGR

SEQ ID NO: 57776 - protein, 10 aa, synthetic construct
ALFRGDHGVL

SEQ ID NO: 57777 - protein, 10 aa, synthetic construct
ALFRGDRGQI

SEQ ID NO: 57778 - protein, 10 aa, synthetic construct
ALFRGDRQGI

SEQ ID NO: 57779 - protein, 10 aa, synthetic construct
ALFRGDRSVV

SEQ ID NO: 57780 - protein, 10 aa, synthetic construct
ALFRGDLTVT

SEQ ID NO: 57781 - protein, 10 aa, synthetic construct
ALFRGDLIGR

SEQ ID NO: 57782 - protein, 10 aa, synthetic construct
ALFRGDRSQT

SEQ ID NO: 57783 - protein, 10 aa, synthetic construct
SLQRGDRSVV

SEQ ID NO: 57784 - protein, 10 aa, synthetic construct
ALFRGDLLLS

SEQ ID NO: 57785 - protein, 10 aa, synthetic construct
ALKRGDHGVL

SEQ ID NO: 57786 - protein, 10 aa, synthetic construct
ALKRGDRGQI

SEQ ID NO: 57787 - protein, 10 aa, synthetic construct
ALKRGDRQGI

SEQ ID NO: 57788 - protein, 10 aa, synthetic construct
ALKRGDRSVV

SEQ ID NO: 57789 - protein, 10 aa, synthetic construct
ALKRGDLTVT

SEQ ID NO: 57790 - protein, 10 aa, synthetic construct
ALKRGDLIGR

SEQ ID NO: 57791 - protein, 10 aa, synthetic construct
ALKRGDRSQT

SEQ ID NO: 57792 - protein, 10 aa, synthetic construct
ALKRGDLLLS

SEQ ID NO: 57793 - protein, 10 aa, synthetic construct
ALRRGDHVNL

SEQ ID NO: 57794 - protein, 10 aa, synthetic construct
SLQRGDRGVV

SEQ ID NO: 57795 - protein, 10 aa, synthetic construct
ALRRGDYSSV

SEQ ID NO: 57796 - protein, 10 aa, synthetic construct
ALRRGDYTSV

SEQ ID NO: 57797 - protein, 10 aa, synthetic construct
ALRRGDYTSM

SEQ ID NO: 57798 - protein, 10 aa, synthetic construct
ALHRGDRDYL

SEQ ID NO: 57799 - protein, 10 aa, synthetic construct
ALHRGDYVGL

SEQ ID NO: 57800 - protein, 10 aa, synthetic construct
ALHRGDQSTL

SEQ ID NO: 57801 - protein, 10 aa, synthetic construct
ALSRGDHVNL

SEQ ID NO: 57802 - protein, 10 aa, synthetic construct
ALSRGDYNSL

SEQ ID NO: 57803 - protein, 10 aa, synthetic construct
ALSRGDYSSV

SEQ ID NO: 57804 - protein, 10 aa, synthetic construct
ALSRGDYTSV

SEQ ID NO: 57805 - protein, 10 aa, synthetic construct
SLQRGDRSQT

SEQ ID NO: 57806 - protein, 10 aa, synthetic construct
ALSRGDYTSM

SEQ ID NO: 57807 - protein, 10 aa, synthetic construct
ALTRGDRDYL

SEQ ID NO: 57808 - protein, 10 aa, synthetic construct
ALTRGDYVGL

SEQ ID NO: 57809 - protein, 10 aa, synthetic construct
ALTRGDQSTL

SEQ ID NO: 57810 - protein, 10 aa, synthetic construct
ALYRGDHGVL

SEQ ID NO: 57811 - protein, 10 aa, synthetic construct
ALYRGDRGQI

SEQ ID NO: 57812 - protein, 10 aa, synthetic construct
ALYRGDRQGI

SEQ ID NO: 57813 - protein, 10 aa, synthetic construct
ALYRGDRSVV

SEQ ID NO: 57814 - protein, 10 aa, synthetic construct
ALYRGDLTVT

SEQ ID NO: 57815 - protein, 10 aa, synthetic construct
ALYRGDLIGR

SEQ ID NO: 57816 - protein, 10 aa, synthetic construct
SLDRGDRGQI

SEQ ID NO: 57817 - protein, 10 aa, synthetic construct
ALYRGDRSQT

SEQ ID NO: 57818 - protein, 10 aa, synthetic construct
ALYRGDLLLS

SEQ ID NO: 57819 - protein, 10 aa, synthetic construct
ALNRGDHGVL

SEQ ID NO: 57820 - protein, 10 aa, synthetic construct
ALNRGDRGQI

SEQ ID NO: 57821 - protein, 10 aa, synthetic construct
ALNRGDRQGI

SEQ ID NO: 57822 - protein, 10 aa, synthetic construct
ALNRGDRSVV

SEQ ID NO: 57823 - protein, 10 aa, synthetic construct
ALNRGDLTVT

SEQ ID NO: 57824 - protein, 10 aa, synthetic construct
ALNRGDLIGR

SEQ ID NO: 57825 - protein, 10 aa, synthetic construct
ALNRGDRSQT

SEQ ID NO: 57826 - protein, 10 aa, synthetic construct
ALNRGDLLLS

SEQ ID NO: 57827 - protein, 10 aa, synthetic construct
SLDRGDRQGI

SEQ ID NO: 57828 - protein, 10 aa, synthetic construct
ALQRGDRDYL

SEQ ID NO: 57829 - protein, 10 aa, synthetic construct
ALQRGDYVGL

SEQ ID NO: 57830 - protein, 10 aa, synthetic construct
ALQRGDQSTL

SEQ ID NO: 57831 - protein, 10 aa, synthetic construct
ALDRGDRDYL

SEQ ID NO: 57832 - protein, 10 aa, synthetic construct
ALDRGDYVGL

SEQ ID NO: 57833 - protein, 10 aa, synthetic construct
ALDRGDQSTL

SEQ ID NO: 57834 - protein, 10 aa, synthetic construct
ALERGDRDYL

SEQ ID NO: 57835 - protein, 10 aa, synthetic construct
ALERGDYVGL

SEQ ID NO: 57836 - protein, 10 aa, synthetic construct
ALERGDQSTL

SEQ ID NO: 57837 - protein, 10 aa, synthetic construct
AIGRGDRDYL

SEQ ID NO: 57838 - protein, 10 aa, synthetic construct
SLDRGDRSVV

SEQ ID NO: 57839 - protein, 10 aa, synthetic construct
AIGRGDYVGL

SEQ ID NO: 57840 - protein, 10 aa, synthetic construct
AIGRGDQSTL

SEQ ID NO: 57841 - protein, 10 aa, synthetic construct
AIARGDRDYL

SEQ ID NO: 57842 - protein, 10 aa, synthetic construct
AIARGDYVGL

SEQ ID NO: 57843 - protein, 10 aa, synthetic construct
AIARGDQSTL

SEQ ID NO: 57844 - protein, 10 aa, synthetic construct
AIVRGDRDYL

SEQ ID NO: 57845 - protein, 10 aa, synthetic construct
AIVRGDYVGL

SEQ ID NO: 57846 - protein, 10 aa, synthetic construct
AIVRGDYSSV

SEQ ID NO: 57847 - protein, 10 aa, synthetic construct
AIVRGDYTSV

SEQ ID NO: 57848 - protein, 10 aa, synthetic construct
AIVRGDQSTL

SEQ ID NO: 57849 - protein, 10 aa, synthetic construct
TKKRGDYNSL

SEQ ID NO: 57850 - protein, 10 aa, synthetic construct
SLDRGDRGVV

SEQ ID NO: 57851 - protein, 10 aa, synthetic construct
AIPRGDRDYL

SEQ ID NO: 57852 - protein, 10 aa, synthetic construct
AIPRGDYVGL

SEQ ID NO: 57853 - protein, 10 aa, synthetic construct
AIPRGDQSTL

SEQ ID NO: 57854 - protein, 10 aa, synthetic construct
AILRGDRDYL

SEQ ID NO: 57855 - protein, 10 aa, synthetic construct
AILRGDYVGL

SEQ ID NO: 57856 - protein, 10 aa, synthetic construct
AILRGDYSSV

SEQ ID NO: 57857 - protein, 10 aa, synthetic construct
AILRGDYTSV

SEQ ID NO: 57858 - protein, 10 aa, synthetic construct
AILRGDQSTL

SEQ ID NO: 57859 - protein, 10 aa, synthetic construct
AIIRGDRGVV

SEQ ID NO: 57860 - protein, 10 aa, synthetic construct
AIIRGDLTVT

SEQ ID NO: 57861 - protein, 10 aa, synthetic construct
SLDRGDRSQT

SEQ ID NO: 57862 - protein, 10 aa, synthetic construct
AIIRGDLLLS

SEQ ID NO: 57863 - protein, 10 aa, synthetic construct
AIMRGDRGQI

SEQ ID NO: 57864 - protein, 10 aa, synthetic construct
AIMRGDRQGI

SEQ ID NO: 57865 - protein, 10 aa, synthetic construct
AIMRGDRSVV

SEQ ID NO: 57866 - protein, 10 aa, synthetic construct
AIMRGDRGVV

SEQ ID NO: 57867 - protein, 10 aa, synthetic construct
AIMRGDYVGL

SEQ ID NO: 57868 - protein, 10 aa, synthetic construct
AIMRGDQSTL

SEQ ID NO: 57869 - protein, 10 aa, synthetic construct
AIMRGDRSQT

SEQ ID NO: 57870 - protein, 10 aa, synthetic construct
AIMRGDLLLS

SEQ ID NO: 57871 - protein, 10 aa, synthetic construct
AIWRGDHGVL

SEQ ID NO: 57872 - protein, 10 aa, synthetic construct
SLERGDRGQI

SEQ ID NO: 57873 - protein, 10 aa, synthetic construct
AIWRGDHVNL

SEQ ID NO: 57874 - protein, 10 aa, synthetic construct
AIWRGDYVGL

SEQ ID NO: 57875 - protein, 10 aa, synthetic construct
AIWRGDYSSV

SEQ ID NO: 57876 - protein, 10 aa, synthetic construct
AIWRGDQSTL

SEQ ID NO: 57877 - protein, 10 aa, synthetic construct
AIWRGDLLLS

SEQ ID NO: 57878 - protein, 10 aa, synthetic construct
AIFRGDRGVV

SEQ ID NO: 57879 - protein, 10 aa, synthetic construct
AIFRGDLTVT

SEQ ID NO: 57880 - protein, 10 aa, synthetic construct
AIFRGDLLLS

SEQ ID NO: 57881 - protein, 10 aa, synthetic construct
AIKRGDRGVV

SEQ ID NO: 57882 - protein, 10 aa, synthetic construct
AIKRGDLTVT

SEQ ID NO: 57883 - protein, 10 aa, synthetic construct
SLERGDRQGI

SEQ ID NO: 57884 - protein, 10 aa, synthetic construct
AIKRGDLLLS

SEQ ID NO: 57885 - protein, 10 aa, synthetic construct
AIRRGDRDYL

SEQ ID NO: 57886 - protein, 10 aa, synthetic construct
AIRRGDYVGL

SEQ ID NO: 57887 - protein, 10 aa, synthetic construct
AIRRGDQSTL

SEQ ID NO: 57888 - protein, 10 aa, synthetic construct
AIHRGDHGVL

SEQ ID NO: 57889 - protein, 10 aa, synthetic construct
AIHRGDRGQI

SEQ ID NO: 57890 - protein, 10 aa, synthetic construct
AIHRGDRQGI

SEQ ID NO: 57891 - protein, 10 aa, synthetic construct
AIHRGDRSVV

SEQ ID NO: 57892 - protein, 10 aa, synthetic construct
AIHRGDLTVT

SEQ ID NO: 57893 - protein, 10 aa, synthetic construct
AIHRGDLIGR

SEQ ID NO: 57894 - protein, 10 aa, synthetic construct
SLERGDRSVV

SEQ ID NO: 57895 - protein, 10 aa, synthetic construct
AIHRGDRSQT

SEQ ID NO: 57896 - protein, 10 aa, synthetic construct
AIHRGDLLLS

SEQ ID NO: 57897 - protein, 10 aa, synthetic construct
AISRGDRDYL

SEQ ID NO: 57898 - protein, 10 aa, synthetic construct
AISRGDYVGL

SEQ ID NO: 57899 - protein, 10 aa, synthetic construct
AISRGDYSSV

SEQ ID NO: 57900 - protein, 10 aa, synthetic construct
AISRGDYTSV

SEQ ID NO: 57901 - protein, 10 aa, synthetic construct
AISRGDQSTL

SEQ ID NO: 57902 - protein, 10 aa, synthetic construct
AITRGDHGVL

SEQ ID NO: 57903 - protein, 10 aa, synthetic construct
AITRGDRGQI

SEQ ID NO: 57904 - protein, 10 aa, synthetic construct
AITRGDRQGI

SEQ ID NO: 57905 - protein, 10 aa, synthetic construct
SLERGDRGVV

SEQ ID NO: 57906 - protein, 10 aa, synthetic construct
AITRGDRSVV

SEQ ID NO: 57907 - protein, 10 aa, synthetic construct
AITRGDLTVT

SEQ ID NO: 57908 - protein, 10 aa, synthetic construct
AITRGDLIGR

SEQ ID NO: 57909 - protein, 10 aa, synthetic construct
AITRGDRSQT

SEQ ID NO: 57910 - protein, 10 aa, synthetic construct
AITRGDLLLS

SEQ ID NO: 57911 - protein, 10 aa, synthetic construct
AIYRGDRGVV

SEQ ID NO: 57912 - protein, 10 aa, synthetic construct
AIYRGDLTVT

SEQ ID NO: 57913 - protein, 10 aa, synthetic construct
AIYRGDLLLS

SEQ ID NO: 57914 - protein, 10 aa, synthetic construct
AINRGDRGVV

SEQ ID NO: 57915 - protein, 10 aa, synthetic construct
AINRGDLTVT

SEQ ID NO: 57916 - protein, 10 aa, synthetic construct
SLERGDRSQT

SEQ ID NO: 57917 - protein, 10 aa, synthetic construct
AINRGDLLLS

SEQ ID NO: 57918 - protein, 10 aa, synthetic construct
AIQRGDHGVL

SEQ ID NO: 57919 - protein, 10 aa, synthetic construct
AIQRGDRGQI

SEQ ID NO: 57920 - protein, 10 aa, synthetic construct
AIQRGDRQGI

SEQ ID NO: 57921 - protein, 10 aa, synthetic construct
AIQRGDRSVV

SEQ ID NO: 57922 - protein, 10 aa, synthetic construct
AIQRGDLTVT

SEQ ID NO: 57923 - protein, 10 aa, synthetic construct
AIQRGDLIGR

SEQ ID NO: 57924 - protein, 10 aa, synthetic construct
AIQRGDRSQT

SEQ ID NO: 57925 - protein, 10 aa, synthetic construct
AIQRGDLLLS

SEQ ID NO: 57926 - protein, 10 aa, synthetic construct
AIDRGDHGVL

SEQ ID NO: 57927 - protein, 10 aa, synthetic construct
SMGRGDRGVV

SEQ ID NO: 57928 - protein, 10 aa, synthetic construct
AIDRGDRGQI

SEQ ID NO: 57929 - protein, 10 aa, synthetic construct
AIDRGDRQGI

SEQ ID NO: 57930 - protein, 10 aa, synthetic construct
AIDRGDRSVV

SEQ ID NO: 57931 - protein, 10 aa, synthetic construct
AIDRGDLTVT

SEQ ID NO: 57932 - protein, 10 aa, synthetic construct
AIDRGDLIGR

SEQ ID NO: 57933 - protein, 10 aa, synthetic construct
AIDRGDRSQT

SEQ ID NO: 57934 - protein, 10 aa, synthetic construct
AIDRGDLLLS

SEQ ID NO: 57935 - protein, 10 aa, synthetic construct
AIERGDHGVL

SEQ ID NO: 57936 - protein, 10 aa, synthetic construct
AIERGDRGQI

SEQ ID NO: 57937 - protein, 10 aa, synthetic construct
AIERGDRQGI

SEQ ID NO: 57938 - protein, 10 aa, synthetic construct
SMARGDRGVV

SEQ ID NO: 57939 - protein, 10 aa, synthetic construct
AIERGDRSVV

SEQ ID NO: 57940 - protein, 10 aa, synthetic construct
AIERGDLTVT

SEQ ID NO: 57941 - protein, 10 aa, synthetic construct
AIERGDLIGR

SEQ ID NO: 57942 - protein, 10 aa, synthetic construct
AIERGDRSQT

SEQ ID NO: 57943 - protein, 10 aa, synthetic construct
AIERGDLLLS

SEQ ID NO: 57944 - protein, 10 aa, synthetic construct
AMGRGDRDYL

SEQ ID NO: 57945 - protein, 10 aa, synthetic construct
AMGRGDYVGL

SEQ ID NO: 57946 - protein, 10 aa, synthetic construct
AMGRGDQSTL

SEQ ID NO: 57947 - protein, 10 aa, synthetic construct
AMARGDRDYL

SEQ ID NO: 57948 - protein, 10 aa, synthetic construct
AMARGDYVGL

SEQ ID NO: 57949 - protein, 10 aa, synthetic construct
SMVRGDRGVV

SEQ ID NO: 57950 - protein, 10 aa, synthetic construct
AMARGDQSTL

SEQ ID NO: 57951 - protein, 10 aa, synthetic construct
AMVRGDRDYL

SEQ ID NO: 57952 - protein, 10 aa, synthetic construct
AMVRGDYVGL

SEQ ID NO: 57953 - protein, 10 aa, synthetic construct
AMVRGDYSSV

SEQ ID NO: 57954 - protein, 10 aa, synthetic construct
AMVRGDYTSV

SEQ ID NO: 57955 - protein, 10 aa, synthetic construct
AMVRGDQSTL

SEQ ID NO: 57956 - protein, 10 aa, synthetic construct
AMPRGDRDYL

SEQ ID NO: 57957 - protein, 10 aa, synthetic construct
AMPRGDYVGL

SEQ ID NO: 57958 - protein, 10 aa, synthetic construct
AMPRGDQSTL

SEQ ID NO: 57959 - protein, 10 aa, synthetic construct
AMLRGDRDYL

SEQ ID NO: 57960 - protein, 10 aa, synthetic construct
TKKRGDYTSM

SEQ ID NO: 57961 - protein, 10 aa, synthetic construct
SMVRGDLTVT

SEQ ID NO: 57962 - protein, 10 aa, synthetic construct
AMLRGDYVGL

SEQ ID NO: 57963 - protein, 10 aa, synthetic construct
AMLRGDYSSV

SEQ ID NO: 57964 - protein, 10 aa, synthetic construct
AMLRGDYTSV

SEQ ID NO: 57965 - protein, 10 aa, synthetic construct
AMLRGDQSTL

SEQ ID NO: 57966 - protein, 10 aa, synthetic construct
AMIRGDRGVV

SEQ ID NO: 57967 - protein, 10 aa, synthetic construct
AMIRGDLTVT

SEQ ID NO: 57968 - protein, 10 aa, synthetic construct
AMIRGDLLLS

SEQ ID NO: 57969 - protein, 10 aa, synthetic construct
AMMRGDRGQI

SEQ ID NO: 57970 - protein, 10 aa, synthetic construct
AMMRGDRQGI

SEQ ID NO: 57971 - protein, 10 aa, synthetic construct
AMMRGDRSVV

SEQ ID NO: 57972 - protein, 10 aa, synthetic construct
SMVRGDLLLS

SEQ ID NO: 57973 - protein, 10 aa, synthetic construct
AMMRGDRGVV

SEQ ID NO: 57974 - protein, 10 aa, synthetic construct
AMMRGDYVGL

SEQ ID NO: 57975 - protein, 10 aa, synthetic construct
AMMRGDQSTL

SEQ ID NO: 57976 - protein, 10 aa, synthetic construct
AMMRGDRSQT

SEQ ID NO: 57977 - protein, 10 aa, synthetic construct
AMMRGDLLLS

SEQ ID NO: 57978 - protein, 10 aa, synthetic construct
AMWRGDHGVL

SEQ ID NO: 57979 - protein, 10 aa, synthetic construct
AMWRGDHVNL

SEQ ID NO: 57980 - protein, 10 aa, synthetic construct
AMWRGDYVGL

SEQ ID NO: 57981 - protein, 10 aa, synthetic construct
AMWRGDYSSV

SEQ ID NO: 57982 - protein, 10 aa, synthetic construct
AMWRGDQSTL

SEQ ID NO: 57983 - protein, 10 aa, synthetic construct
SMPRGDRGVV

SEQ ID NO: 57984 - protein, 10 aa, synthetic construct
AMWRGDLLLS

SEQ ID NO: 57985 - protein, 10 aa, synthetic construct
AMFRGDRGVV

SEQ ID NO: 57986 - protein, 10 aa, synthetic construct
AMFRGDLTVT

SEQ ID NO: 57987 - protein, 10 aa, synthetic construct
AMFRGDLLLS

SEQ ID NO: 57988 - protein, 10 aa, synthetic construct
AMKRGDRGVV

SEQ ID NO: 57989 - protein, 10 aa, synthetic construct
AMKRGDLTVT

SEQ ID NO: 57990 - protein, 10 aa, synthetic construct
AMKRGDLLLS

SEQ ID NO: 57991 - protein, 10 aa, synthetic construct
AMRRGDRDYL

SEQ ID NO: 57992 - protein, 10 aa, synthetic construct
AMRRGDYVGL

SEQ ID NO: 57993 - protein, 10 aa, synthetic construct
AMRRGDQSTL

SEQ ID NO: 57994 - protein, 10 aa, synthetic construct
SMLRGDRGVV

SEQ ID NO: 57995 - protein, 10 aa, synthetic construct
AMHRGDHGVL

SEQ ID NO: 57996 - protein, 10 aa, synthetic construct
AMHRGDRGQI

SEQ ID NO: 57997 - protein, 10 aa, synthetic construct
AMHRGDRQGI

SEQ ID NO: 57998 - protein, 10 aa, synthetic construct
AMHRGDRSVV

SEQ ID NO: 57999 - protein, 10 aa, synthetic construct
AMHRGDLTVT

SEQ ID NO: 58000 - protein, 10 aa, synthetic construct
AMHRGDLIGR

SEQ ID NO: 58001 - protein, 10 aa, synthetic construct
AMHRGDRSQT

SEQ ID NO: 58002 - protein, 10 aa, synthetic construct
AMHRGDLLLS

SEQ ID NO: 58003 - protein, 10 aa, synthetic construct
AMSRGDRDYL

SEQ ID NO: 58004 - protein, 10 aa, synthetic construct
AMSRGDYVGL

SEQ ID NO: 58005 - protein, 10 aa, synthetic construct
SMLRGDLTVT

SEQ ID NO: 58006 - protein, 10 aa, synthetic construct
AMSRGDYSSV

SEQ ID NO: 58007 - protein, 10 aa, synthetic construct
AMSRGDYTSV

SEQ ID NO: 58008 - protein, 10 aa, synthetic construct
AMSRGDQSTL

SEQ ID NO: 58009 - protein, 10 aa, synthetic construct
AMTRGDHGVL

SEQ ID NO: 58010 - protein, 10 aa, synthetic construct
AMTRGDRGQI

SEQ ID NO: 58011 - protein, 10 aa, synthetic construct
AMTRGDRQGI

SEQ ID NO: 58012 - protein, 10 aa, synthetic construct
AMTRGDRSVV

SEQ ID NO: 58013 - protein, 10 aa, synthetic construct
AMTRGDLTVT

SEQ ID NO: 58014 - protein, 10 aa, synthetic construct
AMTRGDLIGR

SEQ ID NO: 58015 - protein, 10 aa, synthetic construct
AMTRGDRSQT

SEQ ID NO: 58016 - protein, 10 aa, synthetic construct
SMLRGDLLLS

SEQ ID NO: 58017 - protein, 10 aa, synthetic construct
AMTRGDLLLS

SEQ ID NO: 58018 - protein, 10 aa, synthetic construct
AMYRGDRGVV

SEQ ID NO: 58019 - protein, 10 aa, synthetic construct
AMYRGDLTVT

SEQ ID NO: 58020 - protein, 10 aa, synthetic construct
AMYRGDLLLS

SEQ ID NO: 58021 - protein, 10 aa, synthetic construct
AMNRGDRGVV

SEQ ID NO: 58022 - protein, 10 aa, synthetic construct
AMNRGDLTVT

SEQ ID NO: 58023 - protein, 10 aa, synthetic construct
AMNRGDLLLS

SEQ ID NO: 58024 - protein, 10 aa, synthetic construct
AMQRGDHGVL

SEQ ID NO: 58025 - protein, 10 aa, synthetic construct
AMQRGDRGQI

SEQ ID NO: 58026 - protein, 10 aa, synthetic construct
AMQRGDRQGI

SEQ ID NO: 58027 - protein, 10 aa, synthetic construct
SMRRGDRGVV

SEQ ID NO: 58028 - protein, 10 aa, synthetic construct
AMQRGDRSVV

SEQ ID NO: 58029 - protein, 10 aa, synthetic construct
AMQRGDLTVT

SEQ ID NO: 58030 - protein, 10 aa, synthetic construct
AMQRGDLIGR

SEQ ID NO: 58031 - protein, 10 aa, synthetic construct
AMQRGDRSQT

SEQ ID NO: 58032 - protein, 10 aa, synthetic construct
AMQRGDLLLS

SEQ ID NO: 58033 - protein, 10 aa, synthetic construct
AMDRGDHGVL

SEQ ID NO: 58034 - protein, 10 aa, synthetic construct
AMDRGDRGQI

SEQ ID NO: 58035 - protein, 10 aa, synthetic construct
AMDRGDRQGI

SEQ ID NO: 58036 - protein, 10 aa, synthetic construct
AMDRGDRSVV

SEQ ID NO: 58037 - protein, 10 aa, synthetic construct
AMDRGDLTVT

SEQ ID NO: 58038 - protein, 10 aa, synthetic construct
SMSRGDRGVV

SEQ ID NO: 58039 - protein, 10 aa, synthetic construct
AMDRGDLIGR

SEQ ID NO: 58040 - protein, 10 aa, synthetic construct
AMDRGDRSQT

SEQ ID NO: 58041 - protein, 10 aa, synthetic construct
AMDRGDLLLS

SEQ ID NO: 58042 - protein, 10 aa, synthetic construct
AMERGDHGVL

SEQ ID NO: 58043 - protein, 10 aa, synthetic construct
AMERGDRGQI

SEQ ID NO: 58044 - protein, 10 aa, synthetic construct
AMERGDRQGI

SEQ ID NO: 58045 - protein, 10 aa, synthetic construct
AMERGDRSVV

SEQ ID NO: 58046 - protein, 10 aa, synthetic construct
AMERGDLTVT

SEQ ID NO: 58047 - protein, 10 aa, synthetic construct
AMERGDLIGR

SEQ ID NO: 58048 - protein, 10 aa, synthetic construct
AMERGDRSQT

SEQ ID NO: 58049 - protein, 10 aa, synthetic construct
SMSRGDLTVT

SEQ ID NO: 58050 - protein, 10 aa, synthetic construct
AMERGDLLLS

SEQ ID NO: 58051 - protein, 10 aa, synthetic construct
AWGRGDHVNL

SEQ ID NO: 58052 - protein, 10 aa, synthetic construct
AWGRGDYSSV

SEQ ID NO: 58053 - protein, 10 aa, synthetic construct
AWGRGDYTSV

SEQ ID NO: 58054 - protein, 10 aa, synthetic construct
AWGRGDYTSM

SEQ ID NO: 58055 - protein, 10 aa, synthetic construct
AWARGDHVNL

SEQ ID NO: 58056 - protein, 10 aa, synthetic construct
AWARGDYSSV

SEQ ID NO: 58057 - protein, 10 aa, synthetic construct
AWARGDYTSV

SEQ ID NO: 58058 - protein, 10 aa, synthetic construct
AWARGDYTSM

SEQ ID NO: 58059 - protein, 10 aa, synthetic construct
AWVRGDHVNL

SEQ ID NO: 58060 - protein, 10 aa, synthetic construct
SMSRGDLLLS

SEQ ID NO: 58061 - protein, 10 aa, synthetic construct
AWVRGDYNSL

SEQ ID NO: 58062 - protein, 10 aa, synthetic construct
AWVRGDYSSV

SEQ ID NO: 58063 - protein, 10 aa, synthetic construct
AWVRGDYTSV

SEQ ID NO: 58064 - protein, 10 aa, synthetic construct
AWVRGDYTSM

SEQ ID NO: 58065 - protein, 10 aa, synthetic construct
AWPRGDHVNL

SEQ ID NO: 58066 - protein, 10 aa, synthetic construct
AWPRGDYSSV

SEQ ID NO: 58067 - protein, 10 aa, synthetic construct
AWPRGDYTSV

SEQ ID NO: 58068 - protein, 10 aa, synthetic construct
AWPRGDYTSM

SEQ ID NO: 58069 - protein, 10 aa, synthetic construct
AWLRGDHVNL

SEQ ID NO: 58070 - protein, 10 aa, synthetic construct
AWLRGDYNSL

SEQ ID NO: 58071 - protein, 10 aa, synthetic construct
TKKRGDFQNT

SEQ ID NO: 58072 - protein, 10 aa, synthetic construct
SWGRGDHGVL

SEQ ID NO: 58073 - protein, 10 aa, synthetic construct
AWLRGDYSSV

SEQ ID NO: 58074 - protein, 10 aa, synthetic construct
AWLRGDYTSV

SEQ ID NO: 58075 - protein, 10 aa, synthetic construct
AWLRGDYTSM

SEQ ID NO: 58076 - protein, 10 aa, synthetic construct
AWIRGDHGVL

SEQ ID NO: 58077 - protein, 10 aa, synthetic construct
AWIRGDRGQI

SEQ ID NO: 58078 - protein, 10 aa, synthetic construct
AWIRGDRQGI

SEQ ID NO: 58079 - protein, 10 aa, synthetic construct
AWIRGDRSVV

SEQ ID NO: 58080 - protein, 10 aa, synthetic construct
AWIRGDLTVT

SEQ ID NO: 58081 - protein, 10 aa, synthetic construct
AWIRGDLIGR

SEQ ID NO: 58082 - protein, 10 aa, synthetic construct
AWIRGDRSQT

SEQ ID NO: 58083 - protein, 10 aa, synthetic construct
SWGRGDRGQI

SEQ ID NO: 58084 - protein, 10 aa, synthetic construct
AWIRGDLLLS

SEQ ID NO: 58085 - protein, 10 aa, synthetic construct
AWMRGDHGVL

SEQ ID NO: 58086 - protein, 10 aa, synthetic construct
AWMRGDHVNL

SEQ ID NO: 58087 - protein, 10 aa, synthetic construct
AWMRGDYVGL

SEQ ID NO: 58088 - protein, 10 aa, synthetic construct
AWMRGDYSSV

SEQ ID NO: 58089 - protein, 10 aa, synthetic construct
AWMRGDQSTL

SEQ ID NO: 58090 - protein, 10 aa, synthetic construct
AWMRGDLLLS

SEQ ID NO: 58091 - protein, 10 aa, synthetic construct
AWWRGDHVNL

SEQ ID NO: 58092 - protein, 10 aa, synthetic construct
AWWRGDRDYL

SEQ ID NO: 58093 - protein, 10 aa, synthetic construct
AWWRGDYSSV

SEQ ID NO: 58094 - protein, 10 aa, synthetic construct
SWGRGDRQGI

SEQ ID NO: 58095 - protein, 10 aa, synthetic construct
AWWRGDLTVT

SEQ ID NO: 58096 - protein, 10 aa, synthetic construct
AWWRGDLIGR

SEQ ID NO: 58097 - protein, 10 aa, synthetic construct
AWFRGDHGVL

SEQ ID NO: 58098 - protein, 10 aa, synthetic construct
AWFRGDRGQI

SEQ ID NO: 58099 - protein, 10 aa, synthetic construct
AWFRGDRQGI

SEQ ID NO: 58100 - protein, 10 aa, synthetic construct
AWFRGDRSVV

SEQ ID NO: 58101 - protein, 10 aa, synthetic construct
AWFRGDLTVT

SEQ ID NO: 58102 - protein, 10 aa, synthetic construct
AWFRGDLIGR

SEQ ID NO: 58103 - protein, 10 aa, synthetic construct
AWFRGDRSQT

SEQ ID NO: 58104 - protein, 10 aa, synthetic construct
AWFRGDLLLS

SEQ ID NO: 58105 - protein, 10 aa, synthetic construct
SWGRGDRSVV

SEQ ID NO: 58106 - protein, 10 aa, synthetic construct
AWKRGDHGVL

SEQ ID NO: 58107 - protein, 10 aa, synthetic construct
AWKRGDRGQI

SEQ ID NO: 58108 - protein, 10 aa, synthetic construct
AWKRGDRQGI

SEQ ID NO: 58109 - protein, 10 aa, synthetic construct
AWKRGDRSVV

SEQ ID NO: 58110 - protein, 10 aa, synthetic construct
AWKRGDLTVT

SEQ ID NO: 58111 - protein, 10 aa, synthetic construct
AWKRGDLIGR

SEQ ID NO: 58112 - protein, 10 aa, synthetic construct
AWKRGDRSQT

SEQ ID NO: 58113 - protein, 10 aa, synthetic construct
AWKRGDLLLS

SEQ ID NO: 58114 - protein, 10 aa, synthetic construct
AWRRGDHVNL

SEQ ID NO: 58115 - protein, 10 aa, synthetic construct
AWRRGDYSSV

SEQ ID NO: 58116 - protein, 10 aa, synthetic construct
SWGRGDLTVT

SEQ ID NO: 58117 - protein, 10 aa, synthetic construct
AWRRGDYTSV

SEQ ID NO: 58118 - protein, 10 aa, synthetic construct
AWRRGDYTSM

SEQ ID NO: 58119 - protein, 10 aa, synthetic construct
AWHRGDRDYL

SEQ ID NO: 58120 - protein, 10 aa, synthetic construct
AWHRGDYVGL

SEQ ID NO: 58121 - protein, 10 aa, synthetic construct
AWHRGDQSTL

SEQ ID NO: 58122 - protein, 10 aa, synthetic construct
AWSRGDHVNL

SEQ ID NO: 58123 - protein, 10 aa, synthetic construct
AWSRGDYNSL

SEQ ID NO: 58124 - protein, 10 aa, synthetic construct
AWSRGDYSSV

SEQ ID NO: 58125 - protein, 10 aa, synthetic construct
AWSRGDYTSV

SEQ ID NO: 58126 - protein, 10 aa, synthetic construct
AWSRGDYTSM

SEQ ID NO: 58127 - protein, 10 aa, synthetic construct
SWGRGDLIGR

SEQ ID NO: 58128 - protein, 10 aa, synthetic construct
AWTRGDRDYL

SEQ ID NO: 58129 - protein, 10 aa, synthetic construct
AWTRGDYVGL

SEQ ID NO: 58130 - protein, 10 aa, synthetic construct
AWTRGDQSTL

SEQ ID NO: 58131 - protein, 10 aa, synthetic construct
AWYRGDHGVL

SEQ ID NO: 58132 - protein, 10 aa, synthetic construct
AWYRGDRGQI

SEQ ID NO: 58133 - protein, 10 aa, synthetic construct
AWYRGDRQGI

SEQ ID NO: 58134 - protein, 10 aa, synthetic construct
AWYRGDRSVV

SEQ ID NO: 58135 - protein, 10 aa, synthetic construct
AWYRGDLTVT

SEQ ID NO: 58136 - protein, 10 aa, synthetic construct
AWYRGDLIGR

SEQ ID NO: 58137 - protein, 10 aa, synthetic construct
AWYRGDRSQT

SEQ ID NO: 58138 - protein, 10 aa, synthetic construct
SWGRGDRSQT

SEQ ID NO: 58139 - protein, 10 aa, synthetic construct
AWYRGDLLLS

SEQ ID NO: 58140 - protein, 10 aa, synthetic construct
AWNRGDHGVL

SEQ ID NO: 58141 - protein, 10 aa, synthetic construct
AWNRGDRGQI

SEQ ID NO: 58142 - protein, 10 aa, synthetic construct
AWNRGDRQGI

SEQ ID NO: 58143 - protein, 10 aa, synthetic construct
AWNRGDRSVV

SEQ ID NO: 58144 - protein, 10 aa, synthetic construct
AWNRGDLTVT

SEQ ID NO: 58145 - protein, 10 aa, synthetic construct
AWNRGDLIGR

SEQ ID NO: 58146 - protein, 10 aa, synthetic construct
AWNRGDRSQT

SEQ ID NO: 58147 - protein, 10 aa, synthetic construct
AWNRGDLLLS

SEQ ID NO: 58148 - protein, 10 aa, synthetic construct
AWQRGDRDYL

SEQ ID NO: 58149 - protein, 10 aa, synthetic construct
SWGRGDLLLS

SEQ ID NO: 58150 - protein, 10 aa, synthetic construct
AWQRGDYVGL

SEQ ID NO: 58151 - protein, 10 aa, synthetic construct
AWQRGDQSTL

SEQ ID NO: 58152 - protein, 10 aa, synthetic construct
AWDRGDRDYL

SEQ ID NO: 58153 - protein, 10 aa, synthetic construct
AWDRGDYVGL

SEQ ID NO: 58154 - protein, 10 aa, synthetic construct
AWDRGDQSTL

SEQ ID NO: 58155 - protein, 10 aa, synthetic construct
AWERGDRDYL

SEQ ID NO: 58156 - protein, 10 aa, synthetic construct
AWERGDYVGL

SEQ ID NO: 58157 - protein, 10 aa, synthetic construct
AWERGDQSTL

SEQ ID NO: 58158 - protein, 10 aa, synthetic construct
AFGRGDRDYL

SEQ ID NO: 58159 - protein, 10 aa, synthetic construct
AFGRGDYVGL

SEQ ID NO: 58160 - protein, 10 aa, synthetic construct
SWARGDHGVL

SEQ ID NO: 58161 - protein, 10 aa, synthetic construct
AFGRGDQSTL

SEQ ID NO: 58162 - protein, 10 aa, synthetic construct
AFARGDRDYL

SEQ ID NO: 58163 - protein, 10 aa, synthetic construct
AFARGDYVGL

SEQ ID NO: 58164 - protein, 10 aa, synthetic construct
AFARGDQSTL

SEQ ID NO: 58165 - protein, 10 aa, synthetic construct
AFVRGDRDYL

SEQ ID NO: 58166 - protein, 10 aa, synthetic construct
AFVRGDYVGL

SEQ ID NO: 58167 - protein, 10 aa, synthetic construct
AFVRGDYSSV

SEQ ID NO: 58168 - protein, 10 aa, synthetic construct
AFVRGDYTSV

SEQ ID NO: 58169 - protein, 10 aa, synthetic construct
AFVRGDQSTL

SEQ ID NO: 58170 - protein, 10 aa, synthetic construct
AFPRGDRDYL

SEQ ID NO: 58171 - protein, 10 aa, synthetic construct
SWARGDRGQI

SEQ ID NO: 58172 - protein, 10 aa, synthetic construct
AFPRGDYVGL

SEQ ID NO: 58173 - protein, 10 aa, synthetic construct
AFPRGDQSTL

SEQ ID NO: 58174 - protein, 10 aa, synthetic construct
AFLRGDRDYL

SEQ ID NO: 58175 - protein, 10 aa, synthetic construct
AFLRGDYVGL

SEQ ID NO: 58176 - protein, 10 aa, synthetic construct
AFLRGDYSSV

SEQ ID NO: 58177 - protein, 10 aa, synthetic construct
AFLRGDYTSV

SEQ ID NO: 58178 - protein, 10 aa, synthetic construct
AFLRGDQSTL

SEQ ID NO: 58179 - protein, 10 aa, synthetic construct
AFIRGDRGVV

SEQ ID NO: 58180 - protein, 10 aa, synthetic construct
AFIRGDLTVT

SEQ ID NO: 58181 - protein, 10 aa, synthetic construct
AFIRGDLLLS

SEQ ID NO: 58182 - protein, 10 aa, synthetic construct
TKNRGDYNSL

SEQ ID NO: 58183 - protein, 10 aa, synthetic construct
SWARGDRQGI

SEQ ID NO: 58184 - protein, 10 aa, synthetic construct
AFMRGDRGQI

SEQ ID NO: 58185 - protein, 10 aa, synthetic construct
AFMRGDRQGI

SEQ ID NO: 58186 - protein, 10 aa, synthetic construct
AFMRGDRSVV

SEQ ID NO: 58187 - protein, 10 aa, synthetic construct
AFMRGDRGVV

SEQ ID NO: 58188 - protein, 10 aa, synthetic construct
AFMRGDYVGL

SEQ ID NO: 58189 - protein, 10 aa, synthetic construct
AFMRGDQSTL

SEQ ID NO: 58190 - protein, 10 aa, synthetic construct
AFMRGDRSQT

SEQ ID NO: 58191 - protein, 10 aa, synthetic construct
AFMRGDLLLS

SEQ ID NO: 58192 - protein, 10 aa, synthetic construct
AFWRGDHGVL

SEQ ID NO: 58193 - protein, 10 aa, synthetic construct
AFWRGDHVNL

SEQ ID NO: 58194 - protein, 10 aa, synthetic construct
SWARGDRSVV

SEQ ID NO: 58195 - protein, 10 aa, synthetic construct
AFWRGDYVGL

SEQ ID NO: 58196 - protein, 10 aa, synthetic construct
AFWRGDYSSV

SEQ ID NO: 58197 - protein, 10 aa, synthetic construct
AFWRGDQSTL

SEQ ID NO: 58198 - protein, 10 aa, synthetic construct
AFWRGDLLLS

SEQ ID NO: 58199 - protein, 10 aa, synthetic construct
AFFRGDRGVV

SEQ ID NO: 58200 - protein, 10 aa, synthetic construct
AFFRGDLTVT

SEQ ID NO: 58201 - protein, 10 aa, synthetic construct
AFFRGDLLLS

SEQ ID NO: 58202 - protein, 10 aa, synthetic construct
AFKRGDRGVV

SEQ ID NO: 58203 - protein, 10 aa, synthetic construct
AFKRGDLTVT

SEQ ID NO: 58204 - protein, 10 aa, synthetic construct
AFKRGDLLLS

SEQ ID NO: 58205 - protein, 10 aa, synthetic construct
SWARGDLTVT

SEQ ID NO: 58206 - protein, 10 aa, synthetic construct
AFRRGDRDYL

SEQ ID NO: 58207 - protein, 10 aa, synthetic construct
AFRRGDYVGL

SEQ ID NO: 58208 - protein, 10 aa, synthetic construct
AFRRGDQSTL

SEQ ID NO: 58209 - protein, 10 aa, synthetic construct
AFHRGDHGVL

SEQ ID NO: 58210 - protein, 10 aa, synthetic construct
AFHRGDRGQI

SEQ ID NO: 58211 - protein, 10 aa, synthetic construct
AFHRGDRQGI

SEQ ID NO: 58212 - protein, 10 aa, synthetic construct
AFHRGDRSVV

SEQ ID NO: 58213 - protein, 10 aa, synthetic construct
AFHRGDLTVT

SEQ ID NO: 58214 - protein, 10 aa, synthetic construct
AFHRGDLIGR

SEQ ID NO: 58215 - protein, 10 aa, synthetic construct
AFHRGDRSQT

SEQ ID NO: 58216 - protein, 10 aa, synthetic construct
SWARGDLIGR

SEQ ID NO: 58217 - protein, 10 aa, synthetic construct
AFHRGDLLLS

SEQ ID NO: 58218 - protein, 10 aa, synthetic construct
AFSRGDRDYL

SEQ ID NO: 58219 - protein, 10 aa, synthetic construct
AFSRGDYVGL

SEQ ID NO: 58220 - protein, 10 aa, synthetic construct
AFSRGDYSSV

SEQ ID NO: 58221 - protein, 10 aa, synthetic construct
AFSRGDYTSV

SEQ ID NO: 58222 - protein, 10 aa, synthetic construct
AFSRGDQSTL

SEQ ID NO: 58223 - protein, 10 aa, synthetic construct
AFTRGDHGVL

SEQ ID NO: 58224 - protein, 10 aa, synthetic construct
AFTRGDRGQI

SEQ ID NO: 58225 - protein, 10 aa, synthetic construct
AFTRGDRQGI

SEQ ID NO: 58226 - protein, 10 aa, synthetic construct
AFTRGDRSVV

SEQ ID NO: 58227 - protein, 10 aa, synthetic construct
SWARGDRSQT

SEQ ID NO: 58228 - protein, 10 aa, synthetic construct
AFTRGDLTVT

SEQ ID NO: 58229 - protein, 10 aa, synthetic construct
AFTRGDLIGR

SEQ ID NO: 58230 - protein, 10 aa, synthetic construct
AFTRGDRSQT

SEQ ID NO: 58231 - protein, 10 aa, synthetic construct
AFTRGDLLLS

SEQ ID NO: 58232 - protein, 10 aa, synthetic construct
AFYRGDRGVV

SEQ ID NO: 58233 - protein, 10 aa, synthetic construct
AFYRGDLTVT

SEQ ID NO: 58234 - protein, 10 aa, synthetic construct
AFYRGDLLLS

SEQ ID NO: 58235 - protein, 10 aa, synthetic construct
AFNRGDRGVV

SEQ ID NO: 58236 - protein, 10 aa, synthetic construct
AFNRGDLTVT

SEQ ID NO: 58237 - protein, 10 aa, synthetic construct
AFNRGDLLLS

SEQ ID NO: 58238 - protein, 10 aa, synthetic construct
SWARGDLLLS

SEQ ID NO: 58239 - protein, 10 aa, synthetic construct
AFQRGDHGVL

SEQ ID NO: 58240 - protein, 10 aa, synthetic construct
AFQRGDRGQI

SEQ ID NO: 58241 - protein, 10 aa, synthetic construct
AFQRGDRQGI

SEQ ID NO: 58242 - protein, 10 aa, synthetic construct
AFQRGDRSVV

SEQ ID NO: 58243 - protein, 10 aa, synthetic construct
AFQRGDLTVT

SEQ ID NO: 58244 - protein, 10 aa, synthetic construct
AFQRGDLIGR

SEQ ID NO: 58245 - protein, 10 aa, synthetic construct
AFQRGDRSQT

SEQ ID NO: 58246 - protein, 10 aa, synthetic construct
AFQRGDLLLS

SEQ ID NO: 58247 - protein, 10 aa, synthetic construct
AFDRGDHGVL

SEQ ID NO: 58248 - protein, 10 aa, synthetic construct
AFDRGDRGQI

SEQ ID NO: 58249 - protein, 10 aa, synthetic construct
SWVRGDHGVL

SEQ ID NO: 58250 - protein, 10 aa, synthetic construct
AFDRGDRQGI

SEQ ID NO: 58251 - protein, 10 aa, synthetic construct
AFDRGDRSVV

SEQ ID NO: 58252 - protein, 10 aa, synthetic construct
AFDRGDLTVT

SEQ ID NO: 58253 - protein, 10 aa, synthetic construct
AFDRGDLIGR

SEQ ID NO: 58254 - protein, 10 aa, synthetic construct
AFDRGDRSQT

SEQ ID NO: 58255 - protein, 10 aa, synthetic construct
AFDRGDLLLS

SEQ ID NO: 58256 - protein, 10 aa, synthetic construct
AFERGDHGVL

SEQ ID NO: 58257 - protein, 10 aa, synthetic construct
AFERGDRGQI

SEQ ID NO: 58258 - protein, 10 aa, synthetic construct
AFERGDRQGI

SEQ ID NO: 58259 - protein, 10 aa, synthetic construct
AFERGDRSVV

SEQ ID NO: 58260 - protein, 10 aa, synthetic construct
SWVRGDRGQI

SEQ ID NO: 58261 - protein, 10 aa, synthetic construct
AFERGDLTVT

SEQ ID NO: 58262 - protein, 10 aa, synthetic construct
AFERGDLIGR

SEQ ID NO: 58263 - protein, 10 aa, synthetic construct
AFERGDRSQT

SEQ ID NO: 58264 - protein, 10 aa, synthetic construct
AFERGDLLLS

SEQ ID NO: 58265 - protein, 10 aa, synthetic construct
AKGRGDRDYL

SEQ ID NO: 58266 - protein, 10 aa, synthetic construct
AKGRGDYVGL

SEQ ID NO: 58267 - protein, 10 aa, synthetic construct
AKGRGDQSTL

SEQ ID NO: 58268 - protein, 10 aa, synthetic construct
AKARGDRDYL

SEQ ID NO: 58269 - protein, 10 aa, synthetic construct
AKARGDYVGL

SEQ ID NO: 58270 - protein, 10 aa, synthetic construct
AKARGDQSTL

SEQ ID NO: 58271 - protein, 10 aa, synthetic construct
SWVRGDRQGI

SEQ ID NO: 58272 - protein, 10 aa, synthetic construct
AKVRGDRDYL

SEQ ID NO: 58273 - protein, 10 aa, synthetic construct
AKVRGDYVGL

SEQ ID NO: 58274 - protein, 10 aa, synthetic construct
AKVRGDYSSV

SEQ ID NO: 58275 - protein, 10 aa, synthetic construct
AKVRGDYTSV

SEQ ID NO: 58276 - protein, 10 aa, synthetic construct
AKVRGDQSTL

SEQ ID NO: 58277 - protein, 10 aa, synthetic construct
AKPRGDRDYL

SEQ ID NO: 58278 - protein, 10 aa, synthetic construct
AKPRGDYVGL

SEQ ID NO: 58279 - protein, 10 aa, synthetic construct
AKPRGDQSTL

SEQ ID NO: 58280 - protein, 10 aa, synthetic construct
AKLRGDRDYL

SEQ ID NO: 58281 - protein, 10 aa, synthetic construct
AKLRGDYVGL

SEQ ID NO: 58282 - protein, 10 aa, synthetic construct
SWVRGDRSVV

SEQ ID NO: 58283 - protein, 10 aa, synthetic construct
AKLRGDYSSV

SEQ ID NO: 58284 - protein, 10 aa, synthetic construct
AKLRGDYTSV

SEQ ID NO: 58285 - protein, 10 aa, synthetic construct
AKLRGDQSTL

SEQ ID NO: 58286 - protein, 10 aa, synthetic construct
AKIRGDRGVV

SEQ ID NO: 58287 - protein, 10 aa, synthetic construct
AKIRGDLTVT

SEQ ID NO: 58288 - protein, 10 aa, synthetic construct
AKIRGDLLLS

SEQ ID NO: 58289 - protein, 10 aa, synthetic construct
AKMRGDRGQI

SEQ ID NO: 58290 - protein, 10 aa, synthetic construct
AKMRGDRQGI

SEQ ID NO: 58291 - protein, 10 aa, synthetic construct
AKMRGDRSVV

SEQ ID NO: 58292 - protein, 10 aa, synthetic construct
AKMRGDRGVV

SEQ ID NO: 58293 - protein, 10 aa, synthetic construct
TKNRGDYTSM

SEQ ID NO: 58294 - protein, 10 aa, synthetic construct
SWVRGDLTVT

SEQ ID NO: 58295 - protein, 10 aa, synthetic construct
AKMRGDYVGL

SEQ ID NO: 58296 - protein, 10 aa, synthetic construct
AKMRGDQSTL

SEQ ID NO: 58297 - protein, 10 aa, synthetic construct
AKMRGDRSQT

SEQ ID NO: 58298 - protein, 10 aa, synthetic construct
AKMRGDLLLS

SEQ ID NO: 58299 - protein, 10 aa, synthetic construct
AKWRGDHGVL

SEQ ID NO: 58300 - protein, 10 aa, synthetic construct
AKWRGDHVNL

SEQ ID NO: 58301 - protein, 10 aa, synthetic construct
AKWRGDYVGL

SEQ ID NO: 58302 - protein, 10 aa, synthetic construct
AKWRGDYSSV

SEQ ID NO: 58303 - protein, 10 aa, synthetic construct
AKWRGDQSTL

SEQ ID NO: 58304 - protein, 10 aa, synthetic construct
AKWRGDLLLS

SEQ ID NO: 58305 - protein, 10 aa, synthetic construct
SWVRGDLIGR

SEQ ID NO: 58306 - protein, 10 aa, synthetic construct
AKFRGDRGVV

SEQ ID NO: 58307 - protein, 10 aa, synthetic construct
AKFRGDLTVT

SEQ ID NO: 58308 - protein, 10 aa, synthetic construct
AKFRGDLLLS

SEQ ID NO: 58309 - protein, 10 aa, synthetic construct
AKKRGDRGVV

SEQ ID NO: 58310 - protein, 10 aa, synthetic construct
AKKRGDLTVT

SEQ ID NO: 58311 - protein, 10 aa, synthetic construct
AKKRGDLLLS

SEQ ID NO: 58312 - protein, 10 aa, synthetic construct
AKRRGDRDYL

SEQ ID NO: 58313 - protein, 10 aa, synthetic construct
AKRRGDYVGL

SEQ ID NO: 58314 - protein, 10 aa, synthetic construct
AKRRGDQSTL

SEQ ID NO: 58315 - protein, 10 aa, synthetic construct
AKHRGDHGVL

SEQ ID NO: 58316 - protein, 10 aa, synthetic construct
SWVRGDRSQT

SEQ ID NO: 58317 - protein, 10 aa, synthetic construct
AKHRGDRGQI

SEQ ID NO: 58318 - protein, 10 aa, synthetic construct
AKHRGDRQGI

SEQ ID NO: 58319 - protein, 10 aa, synthetic construct
AKHRGDRSVV

SEQ ID NO: 58320 - protein, 10 aa, synthetic construct
AKHRGDLTVT

SEQ ID NO: 58321 - protein, 10 aa, synthetic construct
AKHRGDLIGR

SEQ ID NO: 58322 - protein, 10 aa, synthetic construct
AKHRGDRSQT

SEQ ID NO: 58323 - protein, 10 aa, synthetic construct
AKHRGDLLLS

SEQ ID NO: 58324 - protein, 10 aa, synthetic construct
AKSRGDRDYL

SEQ ID NO: 58325 - protein, 10 aa, synthetic construct
AKSRGDYVGL

SEQ ID NO: 58326 - protein, 10 aa, synthetic construct
AKSRGDYSSV

SEQ ID NO: 58327 - protein, 10 aa, synthetic construct
SWVRGDLLLS

SEQ ID NO: 58328 - protein, 10 aa, synthetic construct
AKSRGDYTSV

SEQ ID NO: 58329 - protein, 10 aa, synthetic construct
AKSRGDQSTL

SEQ ID NO: 58330 - protein, 10 aa, synthetic construct
AKTRGDHGVL

SEQ ID NO: 58331 - protein, 10 aa, synthetic construct
AKTRGDRGQI

SEQ ID NO: 58332 - protein, 10 aa, synthetic construct
AKTRGDRQGI

SEQ ID NO: 58333 - protein, 10 aa, synthetic construct
AKTRGDRSVV

SEQ ID NO: 58334 - protein, 10 aa, synthetic construct
AKTRGDLTVT

SEQ ID NO: 58335 - protein, 10 aa, synthetic construct
AKTRGDLIGR

SEQ ID NO: 58336 - protein, 10 aa, synthetic construct
AKTRGDRSQT

SEQ ID NO: 58337 - protein, 10 aa, synthetic construct
AKTRGDLLLS

SEQ ID NO: 58338 - protein, 10 aa, synthetic construct
SWPRGDHGVL

SEQ ID NO: 58339 - protein, 10 aa, synthetic construct
AKYRGDRGVV

SEQ ID NO: 58340 - protein, 10 aa, synthetic construct
AKYRGDLTVT

SEQ ID NO: 58341 - protein, 10 aa, synthetic construct
AKYRGDLLLS

SEQ ID NO: 58342 - protein, 10 aa, synthetic construct
AKNRGDRGVV

SEQ ID NO: 58343 - protein, 10 aa, synthetic construct
AKNRGDLTVT

SEQ ID NO: 58344 - protein, 10 aa, synthetic construct
AKNRGDLLLS

SEQ ID NO: 58345 - protein, 10 aa, synthetic construct
AKQRGDHGVL

SEQ ID NO: 58346 - protein, 10 aa, synthetic construct
AKQRGDRGQI

SEQ ID NO: 58347 - protein, 10 aa, synthetic construct
AKQRGDRQGI

SEQ ID NO: 58348 - protein, 10 aa, synthetic construct
AKQRGDRSVV

SEQ ID NO: 58349 - protein, 10 aa, synthetic construct
SWPRGDRGQI

SEQ ID NO: 58350 - protein, 10 aa, synthetic construct
AKQRGDLTVT

SEQ ID NO: 58351 - protein, 10 aa, synthetic construct
AKQRGDLIGR

SEQ ID NO: 58352 - protein, 10 aa, synthetic construct
AKQRGDRSQT

SEQ ID NO: 58353 - protein, 10 aa, synthetic construct
AKQRGDLLLS

SEQ ID NO: 58354 - protein, 10 aa, synthetic construct
AKDRGDHGVL

SEQ ID NO: 58355 - protein, 10 aa, synthetic construct
AKDRGDRGQI

SEQ ID NO: 58356 - protein, 10 aa, synthetic construct
AKDRGDRQGI

SEQ ID NO: 58357 - protein, 10 aa, synthetic construct
AKDRGDRSVV

SEQ ID NO: 58358 - protein, 10 aa, synthetic construct
AKDRGDLTVT

SEQ ID NO: 58359 - protein, 10 aa, synthetic construct
AKDRGDLIGR

SEQ ID NO: 58360 - protein, 10 aa, synthetic construct
SWPRGDRQGI

SEQ ID NO: 58361 - protein, 10 aa, synthetic construct
AKDRGDRSQT

SEQ ID NO: 58362 - protein, 10 aa, synthetic construct
AKDRGDLLLS

SEQ ID NO: 58363 - protein, 10 aa, synthetic construct
AKERGDHGVL

SEQ ID NO: 58364 - protein, 10 aa, synthetic construct
AKERGDRGQI

SEQ ID NO: 58365 - protein, 10 aa, synthetic construct
AKERGDRQGI

SEQ ID NO: 58366 - protein, 10 aa, synthetic construct
AKERGDRSVV

SEQ ID NO: 58367 - protein, 10 aa, synthetic construct
AKERGDLTVT

SEQ ID NO: 58368 - protein, 10 aa, synthetic construct
AKERGDLIGR

SEQ ID NO: 58369 - protein, 10 aa, synthetic construct
AKERGDRSQT

SEQ ID NO: 58370 - protein, 10 aa, synthetic construct
AKERGDLLLS

SEQ ID NO: 58371 - protein, 10 aa, synthetic construct
SWPRGDRSVV

SEQ ID NO: 58372 - protein, 10 aa, synthetic construct
ARGRGDYNSL

SEQ ID NO: 58373 - protein, 10 aa, synthetic construct
ARGRGDFQNT

SEQ ID NO: 58374 - protein, 10 aa, synthetic construct
ARARGDYNSL

SEQ ID NO: 58375 - protein, 10 aa, synthetic construct
ARARGDFQNT

SEQ ID NO: 58376 - protein, 10 aa, synthetic construct
ARVRGDYNSL

SEQ ID NO: 58377 - protein, 10 aa, synthetic construct
ARVRGDFQNT

SEQ ID NO: 58378 - protein, 10 aa, synthetic construct
ARPRGDYNSL

SEQ ID NO: 58379 - protein, 10 aa, synthetic construct
ARPRGDFQNT

SEQ ID NO: 58380 - protein, 10 aa, synthetic construct
ARLRGDYNSL

SEQ ID NO: 58381 - protein, 10 aa, synthetic construct
ARLRGDFQNT

SEQ ID NO: 58382 - protein, 10 aa, synthetic construct
SWPRGDLTVT

SEQ ID NO: 58383 - protein, 10 aa, synthetic construct
ARIRGDRDYL

SEQ ID NO: 58384 - protein, 10 aa, synthetic construct
ARIRGDYVGL

SEQ ID NO: 58385 - protein, 10 aa, synthetic construct
ARIRGDQSTL

SEQ ID NO: 58386 - protein, 10 aa, synthetic construct
ARMRGDHVNL

SEQ ID NO: 58387 - protein, 10 aa, synthetic construct
ARMRGDRDYL

SEQ ID NO: 58388 - protein, 10 aa, synthetic construct
ARMRGDYSSV

SEQ ID NO: 58389 - protein, 10 aa, synthetic construct
ARMRGDLTVT

SEQ ID NO: 58390 - protein, 10 aa, synthetic construct
ARMRGDLIGR

SEQ ID NO: 58391 - protein, 10 aa, synthetic construct
ARWRGDYTSV

SEQ ID NO: 58392 - protein, 10 aa, synthetic construct
ARWRGDYTSM

SEQ ID NO: 58393 - protein, 10 aa, synthetic construct
SWPRGDLIGR

SEQ ID NO: 58394 - protein, 10 aa, synthetic construct
ARFRGDRDYL

SEQ ID NO: 58395 - protein, 10 aa, synthetic construct
ARFRGDYVGL

SEQ ID NO: 58396 - protein, 10 aa, synthetic construct
ARFRGDQSTL

SEQ ID NO: 58397 - protein, 10 aa, synthetic construct
ARKRGDRDYL

SEQ ID NO: 58398 - protein, 10 aa, synthetic construct
ARKRGDYVGL

SEQ ID NO: 58399 - protein, 10 aa, synthetic construct
ARKRGDQSTL

SEQ ID NO: 58400 - protein, 10 aa, synthetic construct
ARRRGDYNSL

SEQ ID NO: 58401 - protein, 10 aa, synthetic construct
ARRRGDFQNT

SEQ ID NO: 58402 - protein, 10 aa, synthetic construct
ARHRGDHVNL

SEQ ID NO: 58403 - protein, 10 aa, synthetic construct
ARHRGDYSSV

SEQ ID NO: 58404 - protein, 10 aa, synthetic construct
QKNRGDRSVV

SEQ ID NO: 58405 - protein, 10 aa, synthetic construct
TKNRGDFQNT

SEQ ID NO: 58406 - protein, 10 aa, synthetic construct
SWPRGDRSQT

SEQ ID NO: 58407 - protein, 10 aa, synthetic construct
ARHRGDYTSV

SEQ ID NO: 58408 - protein, 10 aa, synthetic construct
ARHRGDYTSM

SEQ ID NO: 58409 - protein, 10 aa, synthetic construct
ARSRGDYNSL

SEQ ID NO: 58410 - protein, 10 aa, synthetic construct
ARSRGDFQNT

SEQ ID NO: 58411 - protein, 10 aa, synthetic construct
ARTRGDHVNL

SEQ ID NO: 58412 - protein, 10 aa, synthetic construct
ARTRGDYSSV

SEQ ID NO: 58413 - protein, 10 aa, synthetic construct
ARTRGDYTSV

SEQ ID NO: 58414 - protein, 10 aa, synthetic construct
ARTRGDYTSM

SEQ ID NO: 58415 - protein, 10 aa, synthetic construct
ARYRGDRDYL

SEQ ID NO: 58416 - protein, 10 aa, synthetic construct
ARYRGDYVGL

SEQ ID NO: 58417 - protein, 10 aa, synthetic construct
SWPRGDLLLS

SEQ ID NO: 58418 - protein, 10 aa, synthetic construct
ARYRGDQSTL

SEQ ID NO: 58419 - protein, 10 aa, synthetic construct
ARNRGDRDYL

SEQ ID NO: 58420 - protein, 10 aa, synthetic construct
ARNRGDYVGL

SEQ ID NO: 58421 - protein, 10 aa, synthetic construct
ARNRGDQSTL

SEQ ID NO: 58422 - protein, 10 aa, synthetic construct
ARQRGDHVNL

SEQ ID NO: 58423 - protein, 10 aa, synthetic construct
ARQRGDYSSV

SEQ ID NO: 58424 - protein, 10 aa, synthetic construct
ARQRGDYTSV

SEQ ID NO: 58425 - protein, 10 aa, synthetic construct
ARQRGDYTSM

SEQ ID NO: 58426 - protein, 10 aa, synthetic construct
ARDRGDHVNL

SEQ ID NO: 58427 - protein, 10 aa, synthetic construct
ARDRGDYSSV

SEQ ID NO: 58428 - protein, 10 aa, synthetic construct
SWLRGDHGVL

SEQ ID NO: 58429 - protein, 10 aa, synthetic construct
ARDRGDYTSV

SEQ ID NO: 58430 - protein, 10 aa, synthetic construct
ARDRGDYTSM

SEQ ID NO: 58431 - protein, 10 aa, synthetic construct
ARERGDHVNL

SEQ ID NO: 58432 - protein, 10 aa, synthetic construct
ARERGDYSSV

SEQ ID NO: 58433 - protein, 10 aa, synthetic construct
ARERGDYTSV

SEQ ID NO: 58434 - protein, 10 aa, synthetic construct
ARERGDYTSM

SEQ ID NO: 58435 - protein, 10 aa, synthetic construct
AHGRGDHVNL

SEQ ID NO: 58436 - protein, 10 aa, synthetic construct
AHGRGDYSSV

SEQ ID NO: 58437 - protein, 10 aa, synthetic construct
AHGRGDYTSV

SEQ ID NO: 58438 - protein, 10 aa, synthetic construct
AHGRGDYTSM

SEQ ID NO: 58439 - protein, 10 aa, synthetic construct
SWLRGDRGQI

SEQ ID NO: 58440 - protein, 10 aa, synthetic construct
AHARGDHVNL

SEQ ID NO: 58441 - protein, 10 aa, synthetic construct
AHARGDYSSV

SEQ ID NO: 58442 - protein, 10 aa, synthetic construct
AHARGDYTSV

SEQ ID NO: 58443 - protein, 10 aa, synthetic construct
AHARGDYTSM

SEQ ID NO: 58444 - protein, 10 aa, synthetic construct
AHVRGDHVNL

SEQ ID NO: 58445 - protein, 10 aa, synthetic construct
AHVRGDYNSL

SEQ ID NO: 58446 - protein, 10 aa, synthetic construct
AHVRGDYSSV

SEQ ID NO: 58447 - protein, 10 aa, synthetic construct
AHVRGDYTSV

SEQ ID NO: 58448 - protein, 10 aa, synthetic construct
AHVRGDYTSM

SEQ ID NO: 58449 - protein, 10 aa, synthetic construct
AHPRGDHVNL

SEQ ID NO: 58450 - protein, 10 aa, synthetic construct
SWLRGDRQGI

SEQ ID NO: 58451 - protein, 10 aa, synthetic construct
AHPRGDYSSV

SEQ ID NO: 58452 - protein, 10 aa, synthetic construct
AHPRGDYTSV

SEQ ID NO: 58453 - protein, 10 aa, synthetic construct
AHPRGDYTSM

SEQ ID NO: 58454 - protein, 10 aa, synthetic construct
AHLRGDHVNL

SEQ ID NO: 58455 - protein, 10 aa, synthetic construct
AHLRGDYNSL

SEQ ID NO: 58456 - protein, 10 aa, synthetic construct
AHLRGDYSSV

SEQ ID NO: 58457 - protein, 10 aa, synthetic construct
AHLRGDYTSV

SEQ ID NO: 58458 - protein, 10 aa, synthetic construct
AHLRGDYTSM

SEQ ID NO: 58459 - protein, 10 aa, synthetic construct
AHIRGDHGVL

SEQ ID NO: 58460 - protein, 10 aa, synthetic construct
AHIRGDRGQI

SEQ ID NO: 58461 - protein, 10 aa, synthetic construct
SWLRGDRSVV

SEQ ID NO: 58462 - protein, 10 aa, synthetic construct
AHIRGDRQGI

SEQ ID NO: 58463 - protein, 10 aa, synthetic construct
AHIRGDRSVV

SEQ ID NO: 58464 - protein, 10 aa, synthetic construct
AHIRGDLTVT

SEQ ID NO: 58465 - protein, 10 aa, synthetic construct
AHIRGDLIGR

SEQ ID NO: 58466 - protein, 10 aa, synthetic construct
AHIRGDRSQT

SEQ ID NO: 58467 - protein, 10 aa, synthetic construct
AHIRGDLLLS

SEQ ID NO: 58468 - protein, 10 aa, synthetic construct
AHMRGDHGVL

SEQ ID NO: 58469 - protein, 10 aa, synthetic construct
AHMRGDHVNL

SEQ ID NO: 58470 - protein, 10 aa, synthetic construct
AHMRGDYVGL

SEQ ID NO: 58471 - protein, 10 aa, synthetic construct
AHMRGDYSSV

SEQ ID NO: 58472 - protein, 10 aa, synthetic construct
SWLRGDLTVT

SEQ ID NO: 58473 - protein, 10 aa, synthetic construct
AHMRGDQSTL

SEQ ID NO: 58474 - protein, 10 aa, synthetic construct
AHMRGDLLLS

SEQ ID NO: 58475 - protein, 10 aa, synthetic construct
AHWRGDHVNL

SEQ ID NO: 58476 - protein, 10 aa, synthetic construct
AHWRGDRDYL

SEQ ID NO: 58477 - protein, 10 aa, synthetic construct
AHWRGDYSSV

SEQ ID NO: 58478 - protein, 10 aa, synthetic construct
AHWRGDLTVT

SEQ ID NO: 58479 - protein, 10 aa, synthetic construct
AHWRGDLIGR

SEQ ID NO: 58480 - protein, 10 aa, synthetic construct
AHFRGDHGVL

SEQ ID NO: 58481 - protein, 10 aa, synthetic construct
AHFRGDRGQI

SEQ ID NO: 58482 - protein, 10 aa, synthetic construct
AHFRGDRQGI

SEQ ID NO: 58483 - protein, 10 aa, synthetic construct
SWLRGDLIGR

SEQ ID NO: 58484 - protein, 10 aa, synthetic construct
AHFRGDRSVV

SEQ ID NO: 58485 - protein, 10 aa, synthetic construct
AHFRGDLTVT

SEQ ID NO: 58486 - protein, 10 aa, synthetic construct
AHFRGDLIGR

SEQ ID NO: 58487 - protein, 10 aa, synthetic construct
AHFRGDRSQT

SEQ ID NO: 58488 - protein, 10 aa, synthetic construct
AHFRGDLLLS

SEQ ID NO: 58489 - protein, 10 aa, synthetic construct
AHKRGDHGVL

SEQ ID NO: 58490 - protein, 10 aa, synthetic construct
AHKRGDRGQI

SEQ ID NO: 58491 - protein, 10 aa, synthetic construct
AHKRGDRQGI

SEQ ID NO: 58492 - protein, 10 aa, synthetic construct
AHKRGDRSVV

SEQ ID NO: 58493 - protein, 10 aa, synthetic construct
AHKRGDLTVT

SEQ ID NO: 58494 - protein, 10 aa, synthetic construct
SWLRGDRSQT

SEQ ID NO: 58495 - protein, 10 aa, synthetic construct
AHKRGDLIGR

SEQ ID NO: 58496 - protein, 10 aa, synthetic construct
AHKRGDRSQT

SEQ ID NO: 58497 - protein, 10 aa, synthetic construct
AHKRGDLLLS

SEQ ID NO: 58498 - protein, 10 aa, synthetic construct
AHRRGDHVNL

SEQ ID NO: 58499 - protein, 10 aa, synthetic construct
AHRRGDYSSV

SEQ ID NO: 58500 - protein, 10 aa, synthetic construct
AHRRGDYTSV

SEQ ID NO: 58501 - protein, 10 aa, synthetic construct
AHRRGDYTSM

SEQ ID NO: 58502 - protein, 10 aa, synthetic construct
AHHRGDRDYL

SEQ ID NO: 58503 - protein, 10 aa, synthetic construct
AHHRGDYVGL

SEQ ID NO: 58504 - protein, 10 aa, synthetic construct
AHHRGDQSTL

SEQ ID NO: 58505 - protein, 10 aa, synthetic construct
SWLRGDLLLS

SEQ ID NO: 58506 - protein, 10 aa, synthetic construct
AHSRGDHVNL

SEQ ID NO: 58507 - protein, 10 aa, synthetic construct
AHSRGDYNSL

SEQ ID NO: 58508 - protein, 10 aa, synthetic construct
AHSRGDYSSV

SEQ ID NO: 58509 - protein, 10 aa, synthetic construct
AHSRGDYTSV

SEQ ID NO: 58510 - protein, 10 aa, synthetic construct
AHSRGDYTSM

SEQ ID NO: 58511 - protein, 10 aa, synthetic construct
AHTRGDRDYL

SEQ ID NO: 58512 - protein, 10 aa, synthetic construct
AHTRGDYVGL

SEQ ID NO: 58513 - protein, 10 aa, synthetic construct
AHTRGDQSTL

SEQ ID NO: 58514 - protein, 10 aa, synthetic construct
AHYRGDHGVL

SEQ ID NO: 58515 - protein, 10 aa, synthetic construct
AHYRGDRGQI

SEQ ID NO: 58516 - protein, 10 aa, synthetic construct
EKKRGDYNSL

SEQ ID NO: 58517 - protein, 10 aa, synthetic construct
SWWRGDRGQI

SEQ ID NO: 58518 - protein, 10 aa, synthetic construct
AHYRGDRQGI

SEQ ID NO: 58519 - protein, 10 aa, synthetic construct
AHYRGDRSVV

SEQ ID NO: 58520 - protein, 10 aa, synthetic construct
AHYRGDLTVT

SEQ ID NO: 58521 - protein, 10 aa, synthetic construct
AHYRGDLIGR

SEQ ID NO: 58522 - protein, 10 aa, synthetic construct
AHYRGDRSQT

SEQ ID NO: 58523 - protein, 10 aa, synthetic construct
AHYRGDLLLS

SEQ ID NO: 58524 - protein, 10 aa, synthetic construct
AHNRGDHGVL

SEQ ID NO: 58525 - protein, 10 aa, synthetic construct
AHNRGDRGQI

SEQ ID NO: 58526 - protein, 10 aa, synthetic construct
AHNRGDRQGI

SEQ ID NO: 58527 - protein, 10 aa, synthetic construct
AHNRGDRSVV

SEQ ID NO: 58528 - protein, 10 aa, synthetic construct
SWWRGDRQGI

SEQ ID NO: 58529 - protein, 10 aa, synthetic construct
AHNRGDLTVT

SEQ ID NO: 58530 - protein, 10 aa, synthetic construct
AHNRGDLIGR

SEQ ID NO: 58531 - protein, 10 aa, synthetic construct
AHNRGDRSQT

SEQ ID NO: 58532 - protein, 10 aa, synthetic construct
AHNRGDLLLS

SEQ ID NO: 58533 - protein, 10 aa, synthetic construct
AHQRGDRDYL

SEQ ID NO: 58534 - protein, 10 aa, synthetic construct
AHQRGDYVGL

SEQ ID NO: 58535 - protein, 10 aa, synthetic construct
AHQRGDQSTL

SEQ ID NO: 58536 - protein, 10 aa, synthetic construct
AHDRGDRDYL

SEQ ID NO: 58537 - protein, 10 aa, synthetic construct
AHDRGDYVGL

SEQ ID NO: 58538 - protein, 10 aa, synthetic construct
AHDRGDQSTL

SEQ ID NO: 58539 - protein, 10 aa, synthetic construct
SWWRGDRSVV

SEQ ID NO: 58540 - protein, 10 aa, synthetic construct
AHERGDRDYL

SEQ ID NO: 58541 - protein, 10 aa, synthetic construct
AHERGDYVGL

SEQ ID NO: 58542 - protein, 10 aa, synthetic construct
AHERGDQSTL

SEQ ID NO: 58543 - protein, 10 aa, synthetic construct
ASGRGDHVNL

SEQ ID NO: 58544 - protein, 10 aa, synthetic construct
ASGRGDYSSV

SEQ ID NO: 58545 - protein, 10 aa, synthetic construct
ASGRGDYTSV

SEQ ID NO: 58546 - protein, 10 aa, synthetic construct
ASGRGDYTSM

SEQ ID NO: 58547 - protein, 10 aa, synthetic construct
ASARGDHVNL

SEQ ID NO: 58548 - protein, 10 aa, synthetic construct
ASARGDYSSV

SEQ ID NO: 58549 - protein, 10 aa, synthetic construct
ASARGDYTSV

SEQ ID NO: 58550 - protein, 10 aa, synthetic construct
SWWRGDRGVV

SEQ ID NO: 58551 - protein, 10 aa, synthetic construct
ASARGDYTSM

SEQ ID NO: 58552 - protein, 10 aa, synthetic construct
ASVRGDHVNL

SEQ ID NO: 58553 - protein, 10 aa, synthetic construct
ASVRGDYNSL

SEQ ID NO: 58554 - protein, 10 aa, synthetic construct
ASVRGDYSSV

SEQ ID NO: 58555 - protein, 10 aa, synthetic construct
ASVRGDYTSV

SEQ ID NO: 58556 - protein, 10 aa, synthetic construct
ASVRGDYTSM

SEQ ID NO: 58557 - protein, 10 aa, synthetic construct
ASPRGDHVNL

SEQ ID NO: 58558 - protein, 10 aa, synthetic construct
ASPRGDYSSV

SEQ ID NO: 58559 - protein, 10 aa, synthetic construct
ASPRGDYTSV

SEQ ID NO: 58560 - protein, 10 aa, synthetic construct
ASPRGDYTSM

SEQ ID NO: 58561 - protein, 10 aa, synthetic construct
SWWRGDRSQT

SEQ ID NO: 58562 - protein, 10 aa, synthetic construct
ASLRGDHVNL

SEQ ID NO: 58563 - protein, 10 aa, synthetic construct
ASLRGDYNSL

SEQ ID NO: 58564 - protein, 10 aa, synthetic construct
ASLRGDYSSV

SEQ ID NO: 58565 - protein, 10 aa, synthetic construct
ASLRGDYTSV

SEQ ID NO: 58566 - protein, 10 aa, synthetic construct
ASLRGDYTSM

SEQ ID NO: 58567 - protein, 10 aa, synthetic construct
ASIRGDHGVL

SEQ ID NO: 58568 - protein, 10 aa, synthetic construct
ASIRGDRGQI

SEQ ID NO: 58569 - protein, 10 aa, synthetic construct
ASIRGDRQGI

SEQ ID NO: 58570 - protein, 10 aa, synthetic construct
ASIRGDRSVV

SEQ ID NO: 58571 - protein, 10 aa, synthetic construct
ASIRGDLTVT

SEQ ID NO: 58572 - protein, 10 aa, synthetic construct
SWRRGDHGVL

SEQ ID NO: 58573 - protein, 10 aa, synthetic construct
ASIRGDLIGR

SEQ ID NO: 58574 - protein, 10 aa, synthetic construct
ASIRGDRSQT

SEQ ID NO: 58575 - protein, 10 aa, synthetic construct
ASIRGDLLLS

SEQ ID NO: 58576 - protein, 10 aa, synthetic construct
ASMRGDHGVL

SEQ ID NO: 58577 - protein, 10 aa, synthetic construct
ASMRGDHVNL

SEQ ID NO: 58578 - protein, 10 aa, synthetic construct
ASMRGDYVGL

SEQ ID NO: 58579 - protein, 10 aa, synthetic construct
ASMRGDYSSV

SEQ ID NO: 58580 - protein, 10 aa, synthetic construct
ASMRGDQSTL

SEQ ID NO: 58581 - protein, 10 aa, synthetic construct
ASMRGDLLLS

SEQ ID NO: 58582 - protein, 10 aa, synthetic construct
ASWRGDHVNL

SEQ ID NO: 58583 - protein, 10 aa, synthetic construct
SWRRGDRGQI

SEQ ID NO: 58584 - protein, 10 aa, synthetic construct
ASWRGDRDYL

SEQ ID NO: 58585 - protein, 10 aa, synthetic construct
ASWRGDYSSV

SEQ ID NO: 58586 - protein, 10 aa, synthetic construct
ASWRGDLTVT

SEQ ID NO: 58587 - protein, 10 aa, synthetic construct
ASWRGDLIGR

SEQ ID NO: 58588 - protein, 10 aa, synthetic construct
ASFRGDHGVL

SEQ ID NO: 58589 - protein, 10 aa, synthetic construct
ASFRGDRGQI

SEQ ID NO: 58590 - protein, 10 aa, synthetic construct
ASFRGDRQGI

SEQ ID NO: 58591 - protein, 10 aa, synthetic construct
ASFRGDRSVV

SEQ ID NO: 58592 - protein, 10 aa, synthetic construct
ASFRGDLTVT

SEQ ID NO: 58593 - protein, 10 aa, synthetic construct
ASFRGDLIGR

SEQ ID NO: 58594 - protein, 10 aa, synthetic construct
SWRRGDRQGI

SEQ ID NO: 58595 - protein, 10 aa, synthetic construct
ASFRGDRSQT

SEQ ID NO: 58596 - protein, 10 aa, synthetic construct
ASFRGDLLLS

SEQ ID NO: 58597 - protein, 10 aa, synthetic construct
ASKRGDHGVL

SEQ ID NO: 58598 - protein, 10 aa, synthetic construct
ASKRGDRGQI

SEQ ID NO: 58599 - protein, 10 aa, synthetic construct
ASKRGDRQGI

SEQ ID NO: 58600 - protein, 10 aa, synthetic construct
ASKRGDRSVV

SEQ ID NO: 58601 - protein, 10 aa, synthetic construct
ASKRGDLTVT

SEQ ID NO: 58602 - protein, 10 aa, synthetic construct
ASKRGDLIGR

SEQ ID NO: 58603 - protein, 10 aa, synthetic construct
ASKRGDRSQT

SEQ ID NO: 58604 - protein, 10 aa, synthetic construct
ASKRGDLLLS

SEQ ID NO: 58605 - protein, 10 aa, synthetic construct
SWRRGDRSVV

SEQ ID NO: 58606 - protein, 10 aa, synthetic construct
ASRRGDHVNL

SEQ ID NO: 58607 - protein, 10 aa, synthetic construct
ASRRGDYSSV

SEQ ID NO: 58608 - protein, 10 aa, synthetic construct
ASRRGDYTSV

SEQ ID NO: 58609 - protein, 10 aa, synthetic construct
ASRRGDYTSM

SEQ ID NO: 58610 - protein, 10 aa, synthetic construct
ASHRGDRDYL

SEQ ID NO: 58611 - protein, 10 aa, synthetic construct
ASHRGDYVGL

SEQ ID NO: 58612 - protein, 10 aa, synthetic construct
ASHRGDQSTL

SEQ ID NO: 58613 - protein, 10 aa, synthetic construct
ASSRGDHVNL

SEQ ID NO: 58614 - protein, 10 aa, synthetic construct
ASSRGDYNSL

SEQ ID NO: 58615 - protein, 10 aa, synthetic construct
ASSRGDYSSV

SEQ ID NO: 58616 - protein, 10 aa, synthetic construct
SWRRGDLTVT

SEQ ID NO: 58617 - protein, 10 aa, synthetic construct
ASSRGDYTSV

SEQ ID NO: 58618 - protein, 10 aa, synthetic construct
ASSRGDYTSM

SEQ ID NO: 58619 - protein, 10 aa, synthetic construct
ASTRGDRDYL

SEQ ID NO: 58620 - protein, 10 aa, synthetic construct
ASTRGDYVGL

SEQ ID NO: 58621 - protein, 10 aa, synthetic construct
ASTRGDQSTL

SEQ ID NO: 58622 - protein, 10 aa, synthetic construct
ASYRGDHGVL

SEQ ID NO: 58623 - protein, 10 aa, synthetic construct
ASYRGDRGQI

SEQ ID NO: 58624 - protein, 10 aa, synthetic construct
ASYRGDRQGI

SEQ ID NO: 58625 - protein, 10 aa, synthetic construct
ASYRGDRSVV

SEQ ID NO: 58626 - protein, 10 aa, synthetic construct
ASYRGDLTVT

SEQ ID NO: 58627 - protein, 10 aa, synthetic construct
EKKRGDYTSM

SEQ ID NO: 58628 - protein, 10 aa, synthetic construct
SWRRGDLIGR

SEQ ID NO: 58629 - protein, 10 aa, synthetic construct
ASYRGDLIGR

SEQ ID NO: 58630 - protein, 10 aa, synthetic construct
ASYRGDRSQT

SEQ ID NO: 58631 - protein, 10 aa, synthetic construct
ASYRGDLLLS

SEQ ID NO: 58632 - protein, 10 aa, synthetic construct
ASNRGDHGVL

SEQ ID NO: 58633 - protein, 10 aa, synthetic construct
ASNRGDRGQI

SEQ ID NO: 58634 - protein, 10 aa, synthetic construct
ASNRGDRQGI

SEQ ID NO: 58635 - protein, 10 aa, synthetic construct
ASNRGDRSVV

SEQ ID NO: 58636 - protein, 10 aa, synthetic construct
ASNRGDLTVT

SEQ ID NO: 58637 - protein, 10 aa, synthetic construct
ASNRGDLIGR

SEQ ID NO: 58638 - protein, 10 aa, synthetic construct
ASNRGDRSQT

SEQ ID NO: 58639 - protein, 10 aa, synthetic construct
SWRRGDRSQT

SEQ ID NO: 58640 - protein, 10 aa, synthetic construct
ASNRGDLLLS

SEQ ID NO: 58641 - protein, 10 aa, synthetic construct
ASQRGDRDYL

SEQ ID NO: 58642 - protein, 10 aa, synthetic construct
ASQRGDYVGL

SEQ ID NO: 58643 - protein, 10 aa, synthetic construct
ASQRGDQSTL

SEQ ID NO: 58644 - protein, 10 aa, synthetic construct
ASDRGDRDYL

SEQ ID NO: 58645 - protein, 10 aa, synthetic construct
ASDRGDYVGL

SEQ ID NO: 58646 - protein, 10 aa, synthetic construct
ASDRGDQSTL

SEQ ID NO: 58647 - protein, 10 aa, synthetic construct
ASERGDRDYL

SEQ ID NO: 58648 - protein, 10 aa, synthetic construct
ASERGDYVGL

SEQ ID NO: 58649 - protein, 10 aa, synthetic construct
ASERGDQSTL

SEQ ID NO: 58650 - protein, 10 aa, synthetic construct
SWRRGDLLLS

SEQ ID NO: 58651 - protein, 10 aa, synthetic construct
ATGRGDHVNL

SEQ ID NO: 58652 - protein, 10 aa, synthetic construct
ATGRGDYSSV

SEQ ID NO: 58653 - protein, 10 aa, synthetic construct
ATGRGDYTSV

SEQ ID NO: 58654 - protein, 10 aa, synthetic construct
ATGRGDYTSM

SEQ ID NO: 58655 - protein, 10 aa, synthetic construct
ATARGDHVNL

SEQ ID NO: 58656 - protein, 10 aa, synthetic construct
ATARGDYSSV

SEQ ID NO: 58657 - protein, 10 aa, synthetic construct
ATARGDYTSV

SEQ ID NO: 58658 - protein, 10 aa, synthetic construct
ATARGDYTSM

SEQ ID NO: 58659 - protein, 10 aa, synthetic construct
ATVRGDHVNL

SEQ ID NO: 58660 - protein, 10 aa, synthetic construct
ATVRGDYNSL

SEQ ID NO: 58661 - protein, 10 aa, synthetic construct
SWHRGDRGVV

SEQ ID NO: 58662 - protein, 10 aa, synthetic construct
ATVRGDYSSV

SEQ ID NO: 58663 - protein, 10 aa, synthetic construct
ATVRGDYTSV

SEQ ID NO: 58664 - protein, 10 aa, synthetic construct
ATVRGDYTSM

SEQ ID NO: 58665 - protein, 10 aa, synthetic construct
ATPRGDHVNL

SEQ ID NO: 58666 - protein, 10 aa, synthetic construct
ATPRGDYSSV

SEQ ID NO: 58667 - protein, 10 aa, synthetic construct
ATPRGDYTSV

SEQ ID NO: 58668 - protein, 10 aa, synthetic construct
ATPRGDYTSM

SEQ ID NO: 58669 - protein, 10 aa, synthetic construct
ATLRGDHVNL

SEQ ID NO: 58670 - protein, 10 aa, synthetic construct
ATLRGDYNSL

SEQ ID NO: 58671 - protein, 10 aa, synthetic construct
ATLRGDYSSV

SEQ ID NO: 58672 - protein, 10 aa, synthetic construct
SWSRGDHGVL

SEQ ID NO: 58673 - protein, 10 aa, synthetic construct
ATLRGDYTSV

SEQ ID NO: 58674 - protein, 10 aa, synthetic construct
ATLRGDYTSM

SEQ ID NO: 58675 - protein, 10 aa, synthetic construct
ATIRGDHGVL

SEQ ID NO: 58676 - protein, 10 aa, synthetic construct
ATIRGDRGQI

SEQ ID NO: 58677 - protein, 10 aa, synthetic construct
ATIRGDRQGI

SEQ ID NO: 58678 - protein, 10 aa, synthetic construct
ATIRGDRSVV

SEQ ID NO: 58679 - protein, 10 aa, synthetic construct
ATIRGDLTVT

SEQ ID NO: 58680 - protein, 10 aa, synthetic construct
ATIRGDLIGR

SEQ ID NO: 58681 - protein, 10 aa, synthetic construct
ATIRGDRSQT

SEQ ID NO: 58682 - protein, 10 aa, synthetic construct
ATIRGDLLLS

SEQ ID NO: 58683 - protein, 10 aa, synthetic construct
SWSRGDRGQI

SEQ ID NO: 58684 - protein, 10 aa, synthetic construct
ATMRGDHGVL

SEQ ID NO: 58685 - protein, 10 aa, synthetic construct
ATMRGDHVNL

SEQ ID NO: 58686 - protein, 10 aa, synthetic construct
ATMRGDYVGL

SEQ ID NO: 58687 - protein, 10 aa, synthetic construct
ATMRGDYSSV

SEQ ID NO: 58688 - protein, 10 aa, synthetic construct
ATMRGDQSTL

SEQ ID NO: 58689 - protein, 10 aa, synthetic construct
ATMRGDLLLS

SEQ ID NO: 58690 - protein, 10 aa, synthetic construct
ATWRGDHVNL

SEQ ID NO: 58691 - protein, 10 aa, synthetic construct
ATWRGDRDYL

SEQ ID NO: 58692 - protein, 10 aa, synthetic construct
ATWRGDYSSV

SEQ ID NO: 58693 - protein, 10 aa, synthetic construct
ATWRGDLTVT

SEQ ID NO: 58694 - protein, 10 aa, synthetic construct
SWSRGDRQGI

SEQ ID NO: 58695 - protein, 10 aa, synthetic construct
ATWRGDLIGR

SEQ ID NO: 58696 - protein, 10 aa, synthetic construct
ATFRGDHGVL

SEQ ID NO: 58697 - protein, 10 aa, synthetic construct
ATFRGDRGQI

SEQ ID NO: 58698 - protein, 10 aa, synthetic construct
ATFRGDRQGI

SEQ ID NO: 58699 - protein, 10 aa, synthetic construct
ATFRGDRSVV

SEQ ID NO: 58700 - protein, 10 aa, synthetic construct
ATFRGDLTVT

SEQ ID NO: 58701 - protein, 10 aa, synthetic construct
ATFRGDLIGR

SEQ ID NO: 58702 - protein, 10 aa, synthetic construct
ATFRGDRSQT

SEQ ID NO: 58703 - protein, 10 aa, synthetic construct
ATFRGDLLLS

SEQ ID NO: 58704 - protein, 10 aa, synthetic construct
ATKRGDHGVL

SEQ ID NO: 58705 - protein, 10 aa, synthetic construct
SWSRGDRSVV

SEQ ID NO: 58706 - protein, 10 aa, synthetic construct
ATKRGDRGQI

SEQ ID NO: 58707 - protein, 10 aa, synthetic construct
ATKRGDRQGI

SEQ ID NO: 58708 - protein, 10 aa, synthetic construct
ATKRGDRSVV

SEQ ID NO: 58709 - protein, 10 aa, synthetic construct
ATKRGDLTVT

SEQ ID NO: 58710 - protein, 10 aa, synthetic construct
ATKRGDLIGR

SEQ ID NO: 58711 - protein, 10 aa, synthetic construct
ATKRGDRSQT

SEQ ID NO: 58712 - protein, 10 aa, synthetic construct
ATKRGDLLLS

SEQ ID NO: 58713 - protein, 10 aa, synthetic construct
ATRRGDHVNL

SEQ ID NO: 58714 - protein, 10 aa, synthetic construct
ATRRGDYSSV

SEQ ID NO: 58715 - protein, 10 aa, synthetic construct
ATRRGDYTSV

SEQ ID NO: 58716 - protein, 10 aa, synthetic construct
SWSRGDLTVT

SEQ ID NO: 58717 - protein, 10 aa, synthetic construct
ATRRGDYTSM

SEQ ID NO: 58718 - protein, 10 aa, synthetic construct
ATHRGDRDYL

SEQ ID NO: 58719 - protein, 10 aa, synthetic construct
ATHRGDYVGL

SEQ ID NO: 58720 - protein, 10 aa, synthetic construct
ATHRGDQSTL

SEQ ID NO: 58721 - protein, 10 aa, synthetic construct
ATSRGDHVNL

SEQ ID NO: 58722 - protein, 10 aa, synthetic construct
ATSRGDYNSL

SEQ ID NO: 58723 - protein, 10 aa, synthetic construct
ATSRGDYSSV

SEQ ID NO: 58724 - protein, 10 aa, synthetic construct
ATSRGDYTSV

SEQ ID NO: 58725 - protein, 10 aa, synthetic construct
ATSRGDYTSM

SEQ ID NO: 58726 - protein, 10 aa, synthetic construct
ATTRGDRDYL

SEQ ID NO: 58727 - protein, 10 aa, synthetic construct
SWSRGDLIGR

SEQ ID NO: 58728 - protein, 10 aa, synthetic construct
ATTRGDYVGL

SEQ ID NO: 58729 - protein, 10 aa, synthetic construct
ATTRGDQSTL

SEQ ID NO: 58730 - protein, 10 aa, synthetic construct
ATYRGDHGVL

SEQ ID NO: 58731 - protein, 10 aa, synthetic construct
ATYRGDRGQI

SEQ ID NO: 58732 - protein, 10 aa, synthetic construct
ATYRGDRQGI

SEQ ID NO: 58733 - protein, 10 aa, synthetic construct
ATYRGDRSVV

SEQ ID NO: 58734 - protein, 10 aa, synthetic construct
ATYRGDLTVT

SEQ ID NO: 58735 - protein, 10 aa, synthetic construct
ATYRGDLIGR

SEQ ID NO: 58736 - protein, 10 aa, synthetic construct
ATYRGDRSQT

SEQ ID NO: 58737 - protein, 10 aa, synthetic construct
ATYRGDLLLS

SEQ ID NO: 58738 - protein, 10 aa, synthetic construct
EKKRGDFQNT

SEQ ID NO: 58739 - protein, 10 aa, synthetic construct
SWSRGDRSQT

SEQ ID NO: 58740 - protein, 10 aa, synthetic construct
ATNRGDHGVL

SEQ ID NO: 58741 - protein, 10 aa, synthetic construct
ATNRGDRGQI

SEQ ID NO: 58742 - protein, 10 aa, synthetic construct
ATNRGDRQGI

SEQ ID NO: 58743 - protein, 10 aa, synthetic construct
ATNRGDRSVV

SEQ ID NO: 58744 - protein, 10 aa, synthetic construct
ATNRGDLTVT

SEQ ID NO: 58745 - protein, 10 aa, synthetic construct
ATNRGDLIGR

SEQ ID NO: 58746 - protein, 10 aa, synthetic construct
ATNRGDRSQT

SEQ ID NO: 58747 - protein, 10 aa, synthetic construct
ATNRGDLLLS

SEQ ID NO: 58748 - protein, 10 aa, synthetic construct
ATQRGDRDYL

SEQ ID NO: 58749 - protein, 10 aa, synthetic construct
ATQRGDYVGL

SEQ ID NO: 58750 - protein, 10 aa, synthetic construct
SWSRGDLLLS

SEQ ID NO: 58751 - protein, 10 aa, synthetic construct
ATQRGDQSTL

SEQ ID NO: 58752 - protein, 10 aa, synthetic construct
ATDRGDRDYL

SEQ ID NO: 58753 - protein, 10 aa, synthetic construct
ATDRGDYVGL

SEQ ID NO: 58754 - protein, 10 aa, synthetic construct
ATDRGDQSTL

SEQ ID NO: 58755 - protein, 10 aa, synthetic construct
ATERGDRDYL

SEQ ID NO: 58756 - protein, 10 aa, synthetic construct
ATERGDYVGL

SEQ ID NO: 58757 - protein, 10 aa, synthetic construct
ATERGDQSTL

SEQ ID NO: 58758 - protein, 10 aa, synthetic construct
AYGRGDRDYL

SEQ ID NO: 58759 - protein, 10 aa, synthetic construct
AYGRGDYVGL

SEQ ID NO: 58760 - protein, 10 aa, synthetic construct
AYGRGDQSTL

SEQ ID NO: 58761 - protein, 10 aa, synthetic construct
SWTRGDRGVV

SEQ ID NO: 58762 - protein, 10 aa, synthetic construct
AYARGDRDYL

SEQ ID NO: 58763 - protein, 10 aa, synthetic construct
AYARGDYVGL

SEQ ID NO: 58764 - protein, 10 aa, synthetic construct
AYARGDQSTL

SEQ ID NO: 58765 - protein, 10 aa, synthetic construct
AYVRGDRDYL

SEQ ID NO: 58766 - protein, 10 aa, synthetic construct
AYVRGDYVGL

SEQ ID NO: 58767 - protein, 10 aa, synthetic construct
AYVRGDYSSV

SEQ ID NO: 58768 - protein, 10 aa, synthetic construct
AYVRGDYTSV

SEQ ID NO: 58769 - protein, 10 aa, synthetic construct
AYVRGDQSTL

SEQ ID NO: 58770 - protein, 10 aa, synthetic construct
AYPRGDRDYL

SEQ ID NO: 58771 - protein, 10 aa, synthetic construct
AYPRGDYVGL

SEQ ID NO: 58772 - protein, 10 aa, synthetic construct
SWQRGDRGVV

SEQ ID NO: 58773 - protein, 10 aa, synthetic construct
AYPRGDQSTL

SEQ ID NO: 58774 - protein, 10 aa, synthetic construct
AYLRGDRDYL

SEQ ID NO: 58775 - protein, 10 aa, synthetic construct
AYLRGDYVGL

SEQ ID NO: 58776 - protein, 10 aa, synthetic construct
AYLRGDYSSV

SEQ ID NO: 58777 - protein, 10 aa, synthetic construct
AYLRGDYTSV

SEQ ID NO: 58778 - protein, 10 aa, synthetic construct
AYLRGDQSTL

SEQ ID NO: 58779 - protein, 10 aa, synthetic construct
AYIRGDRGVV

SEQ ID NO: 58780 - protein, 10 aa, synthetic construct
AYIRGDLTVT

SEQ ID NO: 58781 - protein, 10 aa, synthetic construct
AYIRGDLLLS

SEQ ID NO: 58782 - protein, 10 aa, synthetic construct
AYMRGDRGQI

SEQ ID NO: 58783 - protein, 10 aa, synthetic construct
SWDRGDRGVV

SEQ ID NO: 58784 - protein, 10 aa, synthetic construct
AYMRGDRQGI

SEQ ID NO: 58785 - protein, 10 aa, synthetic construct
AYMRGDRSVV

SEQ ID NO: 58786 - protein, 10 aa, synthetic construct
AYMRGDRGVV

SEQ ID NO: 58787 - protein, 10 aa, synthetic construct
AYMRGDYVGL

SEQ ID NO: 58788 - protein, 10 aa, synthetic construct
AYMRGDQSTL

SEQ ID NO: 58789 - protein, 10 aa, synthetic construct
AYMRGDRSQT

SEQ ID NO: 58790 - protein, 10 aa, synthetic construct
AYMRGDLLLS

SEQ ID NO: 58791 - protein, 10 aa, synthetic construct
AYWRGDHGVL

SEQ ID NO: 58792 - protein, 10 aa, synthetic construct
AYWRGDHVNL

SEQ ID NO: 58793 - protein, 10 aa, synthetic construct
AYWRGDYVGL

SEQ ID NO: 58794 - protein, 10 aa, synthetic construct
SWERGDRGVV

SEQ ID NO: 58795 - protein, 10 aa, synthetic construct
AYWRGDYSSV

SEQ ID NO: 58796 - protein, 10 aa, synthetic construct
AYWRGDQSTL

SEQ ID NO: 58797 - protein, 10 aa, synthetic construct
AYWRGDLLLS

SEQ ID NO: 58798 - protein, 10 aa, synthetic construct
AYFRGDRGVV

SEQ ID NO: 58799 - protein, 10 aa, synthetic construct
AYFRGDLTVT

SEQ ID NO: 58800 - protein, 10 aa, synthetic construct
AYFRGDLLLS

SEQ ID NO: 58801 - protein, 10 aa, synthetic construct
AYKRGDRGVV

SEQ ID NO: 58802 - protein, 10 aa, synthetic construct
AYKRGDLTVT

SEQ ID NO: 58803 - protein, 10 aa, synthetic construct
AYKRGDLLLS

SEQ ID NO: 58804 - protein, 10 aa, synthetic construct
AYRRGDRDYL

SEQ ID NO: 58805 - protein, 10 aa, synthetic construct
SRGRGDHGVL

SEQ ID NO: 58806 - protein, 10 aa, synthetic construct
AYRRGDYVGL

SEQ ID NO: 58807 - protein, 10 aa, synthetic construct
AYRRGDQSTL

SEQ ID NO: 58808 - protein, 10 aa, synthetic construct
AYHRGDHGVL

SEQ ID NO: 58809 - protein, 10 aa, synthetic construct
AYHRGDRGQI

SEQ ID NO: 58810 - protein, 10 aa, synthetic construct
AYHRGDRQGI

SEQ ID NO: 58811 - protein, 10 aa, synthetic construct
AYHRGDRSVV

SEQ ID NO: 58812 - protein, 10 aa, synthetic construct
AYHRGDLTVT

SEQ ID NO: 58813 - protein, 10 aa, synthetic construct
AYHRGDLIGR

SEQ ID NO: 58814 - protein, 10 aa, synthetic construct
AYHRGDRSQT

SEQ ID NO: 58815 - protein, 10 aa, synthetic construct
AYHRGDLLLS

SEQ ID NO: 58816 - protein, 10 aa, synthetic construct
SRGRGDYVGL

SEQ ID NO: 58817 - protein, 10 aa, synthetic construct
AYSRGDRDYL

SEQ ID NO: 58818 - protein, 10 aa, synthetic construct
AYSRGDYVGL

SEQ ID NO: 58819 - protein, 10 aa, synthetic construct
AYSRGDYSSV

SEQ ID NO: 58820 - protein, 10 aa, synthetic construct
AYSRGDYTSV

SEQ ID NO: 58821 - protein, 10 aa, synthetic construct
AYSRGDQSTL

SEQ ID NO: 58822 - protein, 10 aa, synthetic construct
AYTRGDHGVL

SEQ ID NO: 58823 - protein, 10 aa, synthetic construct
AYTRGDRGQI

SEQ ID NO: 58824 - protein, 10 aa, synthetic construct
AYTRGDRQGI

SEQ ID NO: 58825 - protein, 10 aa, synthetic construct
AYTRGDRSVV

SEQ ID NO: 58826 - protein, 10 aa, synthetic construct
AYTRGDLTVT

SEQ ID NO: 58827 - protein, 10 aa, synthetic construct
SRGRGDQSTL

SEQ ID NO: 58828 - protein, 10 aa, synthetic construct
AYTRGDLIGR

SEQ ID NO: 58829 - protein, 10 aa, synthetic construct
AYTRGDRSQT

SEQ ID NO: 58830 - protein, 10 aa, synthetic construct
AYTRGDLLLS

SEQ ID NO: 58831 - protein, 10 aa, synthetic construct
AYYRGDRGVV

SEQ ID NO: 58832 - protein, 10 aa, synthetic construct
AYYRGDLTVT

SEQ ID NO: 58833 - protein, 10 aa, synthetic construct
AYYRGDLLLS

SEQ ID NO: 58834 - protein, 10 aa, synthetic construct
AYNRGDRGVV

SEQ ID NO: 58835 - protein, 10 aa, synthetic construct
AYNRGDLTVT

SEQ ID NO: 58836 - protein, 10 aa, synthetic construct
AYNRGDLLLS

SEQ ID NO: 58837 - protein, 10 aa, synthetic construct
AYQRGDHGVL

SEQ ID NO: 58838 - protein, 10 aa, synthetic construct
SRGRGDLLLS

SEQ ID NO: 58839 - protein, 10 aa, synthetic construct
AYQRGDRGQI

SEQ ID NO: 58840 - protein, 10 aa, synthetic construct
AYQRGDRQGI

SEQ ID NO: 58841 - protein, 10 aa, synthetic construct
AYQRGDRSVV

SEQ ID NO: 58842 - protein, 10 aa, synthetic construct
AYQRGDLTVT

SEQ ID NO: 58843 - protein, 10 aa, synthetic construct
AYQRGDLIGR

SEQ ID NO: 58844 - protein, 10 aa, synthetic construct
AYQRGDRSQT

SEQ ID NO: 58845 - protein, 10 aa, synthetic construct
AYQRGDLLLS

SEQ ID NO: 58846 - protein, 10 aa, synthetic construct
AYDRGDHGVL

SEQ ID NO: 58847 - protein, 10 aa, synthetic construct
AYDRGDRGQI

SEQ ID NO: 58848 - protein, 10 aa, synthetic construct
AYDRGDRQGI

SEQ ID NO: 58849 - protein, 10 aa, synthetic construct
EKNRGDYNSL

SEQ ID NO: 58850 - protein, 10 aa, synthetic construct
SRARGDHGVL

SEQ ID NO: 58851 - protein, 10 aa, synthetic construct
AYDRGDRSVV

SEQ ID NO: 58852 - protein, 10 aa, synthetic construct
AYDRGDLTVT

SEQ ID NO: 58853 - protein, 10 aa, synthetic construct
AYDRGDLIGR

SEQ ID NO: 58854 - protein, 10 aa, synthetic construct
AYDRGDRSQT

SEQ ID NO: 58855 - protein, 10 aa, synthetic construct
AYDRGDLLLS

SEQ ID NO: 58856 - protein, 10 aa, synthetic construct
AYERGDHGVL

SEQ ID NO: 58857 - protein, 10 aa, synthetic construct
AYERGDRGQI

SEQ ID NO: 58858 - protein, 10 aa, synthetic construct
AYERGDRQGI

SEQ ID NO: 58859 - protein, 10 aa, synthetic construct
AYERGDRSVV

SEQ ID NO: 58860 - protein, 10 aa, synthetic construct
AYERGDLTVT

SEQ ID NO: 58861 - protein, 10 aa, synthetic construct
SRARGDYVGL

SEQ ID NO: 58862 - protein, 10 aa, synthetic construct
AYERGDLIGR

SEQ ID NO: 58863 - protein, 10 aa, synthetic construct
AYERGDRSQT

SEQ ID NO: 58864 - protein, 10 aa, synthetic construct
AYERGDLLLS

SEQ ID NO: 58865 - protein, 10 aa, synthetic construct
ANGRGDRDYL

SEQ ID NO: 58866 - protein, 10 aa, synthetic construct
ANGRGDYVGL

SEQ ID NO: 58867 - protein, 10 aa, synthetic construct
ANGRGDQSTL

SEQ ID NO: 58868 - protein, 10 aa, synthetic construct
ANARGDRDYL

SEQ ID NO: 58869 - protein, 10 aa, synthetic construct
ANARGDYVGL

SEQ ID NO: 58870 - protein, 10 aa, synthetic construct
ANARGDQSTL

SEQ ID NO: 58871 - protein, 10 aa, synthetic construct
ANVRGDRDYL

SEQ ID NO: 58872 - protein, 10 aa, synthetic construct
SRARGDQSTL

SEQ ID NO: 58873 - protein, 10 aa, synthetic construct
ANVRGDYVGL

SEQ ID NO: 58874 - protein, 10 aa, synthetic construct
ANVRGDYSSV

SEQ ID NO: 58875 - protein, 10 aa, synthetic construct
ANVRGDYTSV

SEQ ID NO: 58876 - protein, 10 aa, synthetic construct
ANVRGDQSTL

SEQ ID NO: 58877 - protein, 10 aa, synthetic construct
ANPRGDRDYL

SEQ ID NO: 58878 - protein, 10 aa, synthetic construct
ANPRGDYVGL

SEQ ID NO: 58879 - protein, 10 aa, synthetic construct
ANPRGDQSTL

SEQ ID NO: 58880 - protein, 10 aa, synthetic construct
ANLRGDRDYL

SEQ ID NO: 58881 - protein, 10 aa, synthetic construct
ANLRGDYVGL

SEQ ID NO: 58882 - protein, 10 aa, synthetic construct
ANLRGDYSSV

SEQ ID NO: 58883 - protein, 10 aa, synthetic construct
SRARGDLLLS

SEQ ID NO: 58884 - protein, 10 aa, synthetic construct
ANLRGDYTSV

SEQ ID NO: 58885 - protein, 10 aa, synthetic construct
ANLRGDQSTL

SEQ ID NO: 58886 - protein, 10 aa, synthetic construct
ANIRGDRGVV

SEQ ID NO: 58887 - protein, 10 aa, synthetic construct
ANIRGDLTVT

SEQ ID NO: 58888 - protein, 10 aa, synthetic construct
ANIRGDLLLS

SEQ ID NO: 58889 - protein, 10 aa, synthetic construct
ANMRGDRGQI

SEQ ID NO: 58890 - protein, 10 aa, synthetic construct
ANMRGDRQGI

SEQ ID NO: 58891 - protein, 10 aa, synthetic construct
ANMRGDRSVV

SEQ ID NO: 58892 - protein, 10 aa, synthetic construct
ANMRGDRGVV

SEQ ID NO: 58893 - protein, 10 aa, synthetic construct
ANMRGDYVGL

SEQ ID NO: 58894 - protein, 10 aa, synthetic construct
SRVRGDRGQI

SEQ ID NO: 58895 - protein, 10 aa, synthetic construct
ANMRGDQSTL

SEQ ID NO: 58896 - protein, 10 aa, synthetic construct
ANMRGDRSQT

SEQ ID NO: 58897 - protein, 10 aa, synthetic construct
ANMRGDLLLS

SEQ ID NO: 58898 - protein, 10 aa, synthetic construct
ANWRGDHGVL

SEQ ID NO: 58899 - protein, 10 aa, synthetic construct
ANWRGDHVNL

SEQ ID NO: 58900 - protein, 10 aa, synthetic construct
ANWRGDYVGL

SEQ ID NO: 58901 - protein, 10 aa, synthetic construct
ANWRGDYSSV

SEQ ID NO: 58902 - protein, 10 aa, synthetic construct
ANWRGDQSTL

SEQ ID NO: 58903 - protein, 10 aa, synthetic construct
ANWRGDLLLS

SEQ ID NO: 58904 - protein, 10 aa, synthetic construct
ANFRGDRGVV

SEQ ID NO: 58905 - protein, 10 aa, synthetic construct
SRVRGDRQGI

SEQ ID NO: 58906 - protein, 10 aa, synthetic construct
ANFRGDLTVT

SEQ ID NO: 58907 - protein, 10 aa, synthetic construct
ANFRGDLLLS

SEQ ID NO: 58908 - protein, 10 aa, synthetic construct
ANKRGDRGVV

SEQ ID NO: 58909 - protein, 10 aa, synthetic construct
ANKRGDLTVT

SEQ ID NO: 58910 - protein, 10 aa, synthetic construct
ANKRGDLLLS

SEQ ID NO: 58911 - protein, 10 aa, synthetic construct
ANRRGDRDYL

SEQ ID NO: 58912 - protein, 10 aa, synthetic construct
ANRRGDYVGL

SEQ ID NO: 58913 - protein, 10 aa, synthetic construct
ANRRGDQSTL

SEQ ID NO: 58914 - protein, 10 aa, synthetic construct
ANHRGDHGVL

SEQ ID NO: 58915 - protein, 10 aa, synthetic construct
ANHRGDRGQI

SEQ ID NO: 58916 - protein, 10 aa, synthetic construct
SRVRGDRSVV

SEQ ID NO: 58917 - protein, 10 aa, synthetic construct
ANHRGDRQGI

SEQ ID NO: 58918 - protein, 10 aa, synthetic construct
ANHRGDRSVV

SEQ ID NO: 58919 - protein, 10 aa, synthetic construct
ANHRGDLTVT

SEQ ID NO: 58920 - protein, 10 aa, synthetic construct
ANHRGDLIGR

SEQ ID NO: 58921 - protein, 10 aa, synthetic construct
ANHRGDRSQT

SEQ ID NO: 58922 - protein, 10 aa, synthetic construct
ANHRGDLLLS

SEQ ID NO: 58923 - protein, 10 aa, synthetic construct
ANSRGDRDYL

SEQ ID NO: 58924 - protein, 10 aa, synthetic construct
ANSRGDYVGL

SEQ ID NO: 58925 - protein, 10 aa, synthetic construct
ANSRGDYSSV

SEQ ID NO: 58926 - protein, 10 aa, synthetic construct
ANSRGDYTSV

SEQ ID NO: 58927 - protein, 10 aa, synthetic construct
SRVRGDRGVV

SEQ ID NO: 58928 - protein, 10 aa, synthetic construct
ANSRGDQSTL

SEQ ID NO: 58929 - protein, 10 aa, synthetic construct
ANTRGDHGVL

SEQ ID NO: 58930 - protein, 10 aa, synthetic construct
ANTRGDRGQI

SEQ ID NO: 58931 - protein, 10 aa, synthetic construct
ANTRGDRQGI

SEQ ID NO: 58932 - protein, 10 aa, synthetic construct
ANTRGDRSVV

SEQ ID NO: 58933 - protein, 10 aa, synthetic construct
ANTRGDLTVT

SEQ ID NO: 58934 - protein, 10 aa, synthetic construct
ANTRGDLIGR

SEQ ID NO: 58935 - protein, 10 aa, synthetic construct
ANTRGDRSQT

SEQ ID NO: 58936 - protein, 10 aa, synthetic construct
ANTRGDLLLS

SEQ ID NO: 58937 - protein, 10 aa, synthetic construct
ANYRGDRGVV

SEQ ID NO: 58938 - protein, 10 aa, synthetic construct
SRVRGDRSQT

SEQ ID NO: 58939 - protein, 10 aa, synthetic construct
ANYRGDLTVT

SEQ ID NO: 58940 - protein, 10 aa, synthetic construct
ANYRGDLLLS

SEQ ID NO: 58941 - protein, 10 aa, synthetic construct
ANNRGDRGVV

SEQ ID NO: 58942 - protein, 10 aa, synthetic construct
ANNRGDLTVT

SEQ ID NO: 58943 - protein, 10 aa, synthetic construct
ANNRGDLLLS

SEQ ID NO: 58944 - protein, 10 aa, synthetic construct
ANQRGDHGVL

SEQ ID NO: 58945 - protein, 10 aa, synthetic construct
ANQRGDRGQI

SEQ ID NO: 58946 - protein, 10 aa, synthetic construct
ANQRGDRQGI

SEQ ID NO: 58947 - protein, 10 aa, synthetic construct
ANQRGDRSVV

SEQ ID NO: 58948 - protein, 10 aa, synthetic construct
ANQRGDLTVT

SEQ ID NO: 58949 - protein, 10 aa, synthetic construct
SRPRGDHGVL

SEQ ID NO: 58950 - protein, 10 aa, synthetic construct
ANQRGDLIGR

SEQ ID NO: 58951 - protein, 10 aa, synthetic construct
ANQRGDRSQT

SEQ ID NO: 58952 - protein, 10 aa, synthetic construct
ANQRGDLLLS

SEQ ID NO: 58953 - protein, 10 aa, synthetic construct
ANDRGDHGVL

SEQ ID NO: 58954 - protein, 10 aa, synthetic construct
ANDRGDRGQI

SEQ ID NO: 58955 - protein, 10 aa, synthetic construct
ANDRGDRQGI

SEQ ID NO: 58956 - protein, 10 aa, synthetic construct
ANDRGDRSVV

SEQ ID NO: 58957 - protein, 10 aa, synthetic construct
ANDRGDLTVT

SEQ ID NO: 58958 - protein, 10 aa, synthetic construct
ANDRGDLIGR

SEQ ID NO: 58959 - protein, 10 aa, synthetic construct
ANDRGDRSQT

SEQ ID NO: 58960 - protein, 10 aa, synthetic construct
EKNRGDYTSM

SEQ ID NO: 58961 - protein, 10 aa, synthetic construct
SRPRGDYVGL

SEQ ID NO: 58962 - protein, 10 aa, synthetic construct
ANDRGDLLLS

SEQ ID NO: 58963 - protein, 10 aa, synthetic construct
ANERGDHGVL

SEQ ID NO: 58964 - protein, 10 aa, synthetic construct
ANERGDRGQI

SEQ ID NO: 58965 - protein, 10 aa, synthetic construct
ANERGDRQGI

SEQ ID NO: 58966 - protein, 10 aa, synthetic construct
ANERGDRSVV

SEQ ID NO: 58967 - protein, 10 aa, synthetic construct
ANERGDLTVT

SEQ ID NO: 58968 - protein, 10 aa, synthetic construct
ANERGDLIGR

SEQ ID NO: 58969 - protein, 10 aa, synthetic construct
ANERGDRSQT

SEQ ID NO: 58970 - protein, 10 aa, synthetic construct
ANERGDLLLS

SEQ ID NO: 58971 - protein, 10 aa, synthetic construct
AQGRGDHVNL

SEQ ID NO: 58972 - protein, 10 aa, synthetic construct
SRPRGDQSTL

SEQ ID NO: 58973 - protein, 10 aa, synthetic construct
AQGRGDYSSV

SEQ ID NO: 58974 - protein, 10 aa, synthetic construct
AQGRGDYTSV

SEQ ID NO: 58975 - protein, 10 aa, synthetic construct
AQGRGDYTSM

SEQ ID NO: 58976 - protein, 10 aa, synthetic construct
AQARGDHVNL

SEQ ID NO: 58977 - protein, 10 aa, synthetic construct
AQARGDYSSV

SEQ ID NO: 58978 - protein, 10 aa, synthetic construct
AQARGDYTSV

SEQ ID NO: 58979 - protein, 10 aa, synthetic construct
AQARGDYTSM

SEQ ID NO: 58980 - protein, 10 aa, synthetic construct
AQVRGDHVNL

SEQ ID NO: 58981 - protein, 10 aa, synthetic construct
AQVRGDYNSL

SEQ ID NO: 58982 - protein, 10 aa, synthetic construct
AQVRGDYSSV

SEQ ID NO: 58983 - protein, 10 aa, synthetic construct
SRPRGDLLLS

SEQ ID NO: 58984 - protein, 10 aa, synthetic construct
AQVRGDYTSV

SEQ ID NO: 58985 - protein, 10 aa, synthetic construct
AQVRGDYTSM

SEQ ID NO: 58986 - protein, 10 aa, synthetic construct
AQPRGDHVNL

SEQ ID NO: 58987 - protein, 10 aa, synthetic construct
AQPRGDYSSV

SEQ ID NO: 58988 - protein, 10 aa, synthetic construct
AQPRGDYTSV

SEQ ID NO: 58989 - protein, 10 aa, synthetic construct
AQPRGDYTSM

SEQ ID NO: 58990 - protein, 10 aa, synthetic construct
AQLRGDHVNL

SEQ ID NO: 58991 - protein, 10 aa, synthetic construct
AQLRGDYNSL

SEQ ID NO: 58992 - protein, 10 aa, synthetic construct
AQLRGDYSSV

SEQ ID NO: 58993 - protein, 10 aa, synthetic construct
AQLRGDYTSV

SEQ ID NO: 58994 - protein, 10 aa, synthetic construct
SRLRGDRGQI

SEQ ID NO: 58995 - protein, 10 aa, synthetic construct
AQLRGDYTSM

SEQ ID NO: 58996 - protein, 10 aa, synthetic construct
AQIRGDHGVL

SEQ ID NO: 58997 - protein, 10 aa, synthetic construct
AQIRGDRGQI

SEQ ID NO: 58998 - protein, 10 aa, synthetic construct
AQIRGDRQGI

SEQ ID NO: 58999 - protein, 10 aa, synthetic construct
AQIRGDRSVV

SEQ ID NO: 59000 - protein, 10 aa, synthetic construct
AQIRGDLTVT

SEQ ID NO: 59001 - protein, 10 aa, synthetic construct
AQIRGDLIGR

SEQ ID NO: 59002 - protein, 10 aa, synthetic construct
AQIRGDRSQT

SEQ ID NO: 59003 - protein, 10 aa, synthetic construct
AQIRGDLLLS

SEQ ID NO: 59004 - protein, 10 aa, synthetic construct
AQMRGDHGVL

SEQ ID NO: 59005 - protein, 10 aa, synthetic construct
SRLRGDRQGI

SEQ ID NO: 59006 - protein, 10 aa, synthetic construct
AQMRGDHVNL

SEQ ID NO: 59007 - protein, 10 aa, synthetic construct
AQMRGDYVGL

SEQ ID NO: 59008 - protein, 10 aa, synthetic construct
AQMRGDYSSV

SEQ ID NO: 59009 - protein, 10 aa, synthetic construct
AQMRGDQSTL

SEQ ID NO: 59010 - protein, 10 aa, synthetic construct
AQMRGDLLLS

SEQ ID NO: 59011 - protein, 10 aa, synthetic construct
AQWRGDHVNL

SEQ ID NO: 59012 - protein, 10 aa, synthetic construct
AQWRGDRDYL

SEQ ID NO: 59013 - protein, 10 aa, synthetic construct
AQWRGDYSSV

SEQ ID NO: 59014 - protein, 10 aa, synthetic construct
AQWRGDLTVT

SEQ ID NO: 59015 - protein, 10 aa, synthetic construct
AQWRGDLIGR

SEQ ID NO: 59016 - protein, 10 aa, synthetic construct
SRLRGDRSVV

SEQ ID NO: 59017 - protein, 10 aa, synthetic construct
AQFRGDHGVL

SEQ ID NO: 59018 - protein, 10 aa, synthetic construct
AQFRGDRGQI

SEQ ID NO: 59019 - protein, 10 aa, synthetic construct
AQFRGDRQGI

SEQ ID NO: 59020 - protein, 10 aa, synthetic construct
AQFRGDRSVV

SEQ ID NO: 59021 - protein, 10 aa, synthetic construct
AQFRGDLTVT

SEQ ID NO: 59022 - protein, 10 aa, synthetic construct
AQFRGDLIGR

SEQ ID NO: 59023 - protein, 10 aa, synthetic construct
AQFRGDRSQT

SEQ ID NO: 59024 - protein, 10 aa, synthetic construct
AQFRGDLLLS

SEQ ID NO: 59025 - protein, 10 aa, synthetic construct
AQKRGDHGVL

SEQ ID NO: 59026 - protein, 10 aa, synthetic construct
AQKRGDRGQI

SEQ ID NO: 59027 - protein, 10 aa, synthetic construct
SRLRGDRGVV

SEQ ID NO: 59028 - protein, 10 aa, synthetic construct
AQKRGDRQGI

SEQ ID NO: 59029 - protein, 10 aa, synthetic construct
AQKRGDRSVV

SEQ ID NO: 59030 - protein, 10 aa, synthetic construct
AQKRGDLTVT

SEQ ID NO: 59031 - protein, 10 aa, synthetic construct
AQKRGDLIGR

SEQ ID NO: 59032 - protein, 10 aa, synthetic construct
AQKRGDRSQT

SEQ ID NO: 59033 - protein, 10 aa, synthetic construct
AQKRGDLLLS

SEQ ID NO: 59034 - protein, 10 aa, synthetic construct
AQRRGDHVNL

SEQ ID NO: 59035 - protein, 10 aa, synthetic construct
AQRRGDYSSV

SEQ ID NO: 59036 - protein, 10 aa, synthetic construct
AQRRGDYTSV

SEQ ID NO: 59037 - protein, 10 aa, synthetic construct
AQRRGDYTSM

SEQ ID NO: 59038 - protein, 10 aa, synthetic construct
SRLRGDRSQT

SEQ ID NO: 59039 - protein, 10 aa, synthetic construct
AQHRGDRDYL

SEQ ID NO: 59040 - protein, 10 aa, synthetic construct
AQHRGDYVGL

SEQ ID NO: 59041 - protein, 10 aa, synthetic construct
AQHRGDQSTL

SEQ ID NO: 59042 - protein, 10 aa, synthetic construct
AQSRGDHVNL

SEQ ID NO: 59043 - protein, 10 aa, synthetic construct
AQSRGDYNSL

SEQ ID NO: 59044 - protein, 10 aa, synthetic construct
AQSRGDYSSV

SEQ ID NO: 59045 - protein, 10 aa, synthetic construct
AQSRGDYTSV

SEQ ID NO: 59046 - protein, 10 aa, synthetic construct
AQSRGDYTSM

SEQ ID NO: 59047 - protein, 10 aa, synthetic construct
AQTRGDRDYL

SEQ ID NO: 59048 - protein, 10 aa, synthetic construct
AQTRGDYVGL

SEQ ID NO: 59049 - protein, 10 aa, synthetic construct
SRWRGDRGQI

SEQ ID NO: 59050 - protein, 10 aa, synthetic construct
AQTRGDQSTL

SEQ ID NO: 59051 - protein, 10 aa, synthetic construct
AQYRGDHGVL

SEQ ID NO: 59052 - protein, 10 aa, synthetic construct
AQYRGDRGQI

SEQ ID NO: 59053 - protein, 10 aa, synthetic construct
AQYRGDRQGI

SEQ ID NO: 59054 - protein, 10 aa, synthetic construct
AQYRGDRSVV

SEQ ID NO: 59055 - protein, 10 aa, synthetic construct
AQYRGDLTVT

SEQ ID NO: 59056 - protein, 10 aa, synthetic construct
AQYRGDLIGR

SEQ ID NO: 59057 - protein, 10 aa, synthetic construct
AQYRGDRSQT

SEQ ID NO: 59058 - protein, 10 aa, synthetic construct
AQYRGDLLLS

SEQ ID NO: 59059 - protein, 10 aa, synthetic construct
AQNRGDHGVL

SEQ ID NO: 59060 - protein, 10 aa, synthetic construct
SRWRGDRQGI

SEQ ID NO: 59061 - protein, 10 aa, synthetic construct
AQNRGDRGQI

SEQ ID NO: 59062 - protein, 10 aa, synthetic construct
AQNRGDRQGI

SEQ ID NO: 59063 - protein, 10 aa, synthetic construct
AQNRGDRSVV

SEQ ID NO: 59064 - protein, 10 aa, synthetic construct
AQNRGDLTVT

SEQ ID NO: 59065 - protein, 10 aa, synthetic construct
AQNRGDLIGR

SEQ ID NO: 59066 - protein, 10 aa, synthetic construct
AQNRGDRSQT

SEQ ID NO: 59067 - protein, 10 aa, synthetic construct
AQNRGDLLLS

SEQ ID NO: 59068 - protein, 10 aa, synthetic construct
AQQRGDRDYL

SEQ ID NO: 59069 - protein, 10 aa, synthetic construct
AQQRGDYVGL

SEQ ID NO: 59070 - protein, 10 aa, synthetic construct
AQQRGDQSTL

SEQ ID NO: 59071 - protein, 10 aa, synthetic construct
EKNRGDFQNT

SEQ ID NO: 59072 - protein, 10 aa, synthetic construct
SRWRGDRSVV

SEQ ID NO: 59073 - protein, 10 aa, synthetic construct
AQDRGDRDYL

SEQ ID NO: 59074 - protein, 10 aa, synthetic construct
AQDRGDYVGL

SEQ ID NO: 59075 - protein, 10 aa, synthetic construct
AQDRGDQSTL

SEQ ID NO: 59076 - protein, 10 aa, synthetic construct
AQERGDRDYL

SEQ ID NO: 59077 - protein, 10 aa, synthetic construct
AQERGDYVGL

SEQ ID NO: 59078 - protein, 10 aa, synthetic construct
AQERGDQSTL

SEQ ID NO: 59079 - protein, 10 aa, synthetic construct
ADGRGDHVNL

SEQ ID NO: 59080 - protein, 10 aa, synthetic construct
ADGRGDYSSV

SEQ ID NO: 59081 - protein, 10 aa, synthetic construct
ADGRGDYTSV

SEQ ID NO: 59082 - protein, 10 aa, synthetic construct
ADGRGDYTSM

SEQ ID NO: 59083 - protein, 10 aa, synthetic construct
SRWRGDRGVV

SEQ ID NO: 59084 - protein, 10 aa, synthetic construct
ADARGDHVNL

SEQ ID NO: 59085 - protein, 10 aa, synthetic construct
ADARGDYSSV

SEQ ID NO: 59086 - protein, 10 aa, synthetic construct
ADARGDYTSV

SEQ ID NO: 59087 - protein, 10 aa, synthetic construct
ADARGDYTSM

SEQ ID NO: 59088 - protein, 10 aa, synthetic construct
ADVRGDHVNL

SEQ ID NO: 59089 - protein, 10 aa, synthetic construct
ADVRGDYNSL

SEQ ID NO: 59090 - protein, 10 aa, synthetic construct
ADVRGDYSSV

SEQ ID NO: 59091 - protein, 10 aa, synthetic construct
ADVRGDYTSV

SEQ ID NO: 59092 - protein, 10 aa, synthetic construct
ADVRGDYTSM

SEQ ID NO: 59093 - protein, 10 aa, synthetic construct
ADPRGDHVNL

SEQ ID NO: 59094 - protein, 10 aa, synthetic construct
SRWRGDRSQT

SEQ ID NO: 59095 - protein, 10 aa, synthetic construct
ADPRGDYSSV

SEQ ID NO: 59096 - protein, 10 aa, synthetic construct
ADPRGDYTSV

SEQ ID NO: 59097 - protein, 10 aa, synthetic construct
ADPRGDYTSM

SEQ ID NO: 59098 - protein, 10 aa, synthetic construct
ADLRGDHVNL

SEQ ID NO: 59099 - protein, 10 aa, synthetic construct
ADLRGDYNSL

SEQ ID NO: 59100 - protein, 10 aa, synthetic construct
ADLRGDYSSV

SEQ ID NO: 59101 - protein, 10 aa, synthetic construct
ADLRGDYTSV

SEQ ID NO: 59102 - protein, 10 aa, synthetic construct
ADLRGDYTSM

SEQ ID NO: 59103 - protein, 10 aa, synthetic construct
ADIRGDHGVL

SEQ ID NO: 59104 - protein, 10 aa, synthetic construct
ADIRGDRGQI

SEQ ID NO: 59105 - protein, 10 aa, synthetic construct
SRRRGDHGVL

SEQ ID NO: 59106 - protein, 10 aa, synthetic construct
ADIRGDRQGI

SEQ ID NO: 59107 - protein, 10 aa, synthetic construct
ADIRGDRSVV

SEQ ID NO: 59108 - protein, 10 aa, synthetic construct
ADIRGDLTVT

SEQ ID NO: 59109 - protein, 10 aa, synthetic construct
ADIRGDLIGR

SEQ ID NO: 59110 - protein, 10 aa, synthetic construct
ADIRGDRSQT

SEQ ID NO: 59111 - protein, 10 aa, synthetic construct
ADIRGDLLLS

SEQ ID NO: 59112 - protein, 10 aa, synthetic construct
ADMRGDHGVL

SEQ ID NO: 59113 - protein, 10 aa, synthetic construct
ADMRGDHVNL

SEQ ID NO: 59114 - protein, 10 aa, synthetic construct
ADMRGDYVGL

SEQ ID NO: 59115 - protein, 10 aa, synthetic construct
ADMRGDYSSV

SEQ ID NO: 59116 - protein, 10 aa, synthetic construct
SRRRGDYVGL

SEQ ID NO: 59117 - protein, 10 aa, synthetic construct
ADMRGDQSTL

SEQ ID NO: 59118 - protein, 10 aa, synthetic construct
ADMRGDLLLS

SEQ ID NO: 59119 - protein, 10 aa, synthetic construct
ADWRGDHVNL

SEQ ID NO: 59120 - protein, 10 aa, synthetic construct
ADWRGDRDYL

SEQ ID NO: 59121 - protein, 10 aa, synthetic construct
ADWRGDYSSV

SEQ ID NO: 59122 - protein, 10 aa, synthetic construct
ADWRGDLTVT

SEQ ID NO: 59123 - protein, 10 aa, synthetic construct
ADWRGDLIGR

SEQ ID NO: 59124 - protein, 10 aa, synthetic construct
ADFRGDHGVL

SEQ ID NO: 59125 - protein, 10 aa, synthetic construct
ADFRGDRGQI

SEQ ID NO: 59126 - protein, 10 aa, synthetic construct
ADFRGDRQGI

SEQ ID NO: 59127 - protein, 10 aa, synthetic construct
SRRRGDQSTL

SEQ ID NO: 59128 - protein, 10 aa, synthetic construct
ADFRGDRSVV

SEQ ID NO: 59129 - protein, 10 aa, synthetic construct
ADFRGDLTVT

SEQ ID NO: 59130 - protein, 10 aa, synthetic construct
ADFRGDLIGR

SEQ ID NO: 59131 - protein, 10 aa, synthetic construct
ADFRGDRSQT

SEQ ID NO: 59132 - protein, 10 aa, synthetic construct
ADFRGDLLLS

SEQ ID NO: 59133 - protein, 10 aa, synthetic construct
ADKRGDHGVL

SEQ ID NO: 59134 - protein, 10 aa, synthetic construct
ADKRGDRGQI

SEQ ID NO: 59135 - protein, 10 aa, synthetic construct
ADKRGDRQGI

SEQ ID NO: 59136 - protein, 10 aa, synthetic construct
ADKRGDRSVV

SEQ ID NO: 59137 - protein, 10 aa, synthetic construct
ADKRGDLTVT

SEQ ID NO: 59138 - protein, 10 aa, synthetic construct
SRRRGDLLLS

SEQ ID NO: 59139 - protein, 10 aa, synthetic construct
ADKRGDLIGR

SEQ ID NO: 59140 - protein, 10 aa, synthetic construct
ADKRGDRSQT

SEQ ID NO: 59141 - protein, 10 aa, synthetic construct
ADKRGDLLLS

SEQ ID NO: 59142 - protein, 10 aa, synthetic construct
ADRRGDHVNL

SEQ ID NO: 59143 - protein, 10 aa, synthetic construct
ADRRGDYSSV

SEQ ID NO: 59144 - protein, 10 aa, synthetic construct
ADRRGDYTSV

SEQ ID NO: 59145 - protein, 10 aa, synthetic construct
ADRRGDYTSM

SEQ ID NO: 59146 - protein, 10 aa, synthetic construct
ADHRGDRDYL

SEQ ID NO: 59147 - protein, 10 aa, synthetic construct
ADHRGDYVGL

SEQ ID NO: 59148 - protein, 10 aa, synthetic construct
ADHRGDQSTL

SEQ ID NO: 59149 - protein, 10 aa, synthetic construct
SRHRGDRGQI

SEQ ID NO: 59150 - protein, 10 aa, synthetic construct
ADSRGDHVNL

SEQ ID NO: 59151 - protein, 10 aa, synthetic construct
ADSRGDYNSL

SEQ ID NO: 59152 - protein, 10 aa, synthetic construct
ADSRGDYSSV

SEQ ID NO: 59153 - protein, 10 aa, synthetic construct
ADSRGDYTSV

SEQ ID NO: 59154 - protein, 10 aa, synthetic construct
ADSRGDYTSM

SEQ ID NO: 59155 - protein, 10 aa, synthetic construct
ADTRGDRDYL

SEQ ID NO: 59156 - protein, 10 aa, synthetic construct
ADTRGDYVGL

SEQ ID NO: 59157 - protein, 10 aa, synthetic construct
ADTRGDQSTL

SEQ ID NO: 59158 - protein, 10 aa, synthetic construct
ADYRGDHGVL

SEQ ID NO: 59159 - protein, 10 aa, synthetic construct
ADYRGDRGQI

SEQ ID NO: 59160 - protein, 10 aa, synthetic construct
SRHRGDRQGI

SEQ ID NO: 59161 - protein, 10 aa, synthetic construct
ADYRGDRQGI

SEQ ID NO: 59162 - protein, 10 aa, synthetic construct
ADYRGDRSVV

SEQ ID NO: 59163 - protein, 10 aa, synthetic construct
ADYRGDLTVT

SEQ ID NO: 59164 - protein, 10 aa, synthetic construct
ADYRGDLIGR

SEQ ID NO: 59165 - protein, 10 aa, synthetic construct
ADYRGDRSQT

SEQ ID NO: 59166 - protein, 10 aa, synthetic construct
ADYRGDLLLS

SEQ ID NO: 59167 - protein, 10 aa, synthetic construct
ADNRGDHGVL

SEQ ID NO: 59168 - protein, 10 aa, synthetic construct
ADNRGDRGQI

SEQ ID NO: 59169 - protein, 10 aa, synthetic construct
ADNRGDRQGI

SEQ ID NO: 59170 - protein, 10 aa, synthetic construct
ADNRGDRSVV

SEQ ID NO: 59171 - protein, 10 aa, synthetic construct
SRHRGDRSVV

SEQ ID NO: 59172 - protein, 10 aa, synthetic construct
ADNRGDLTVT

SEQ ID NO: 59173 - protein, 10 aa, synthetic construct
ADNRGDLIGR

SEQ ID NO: 59174 - protein, 10 aa, synthetic construct
ADNRGDRSQT

SEQ ID NO: 59175 - protein, 10 aa, synthetic construct
ADNRGDLLLS

SEQ ID NO: 59176 - protein, 10 aa, synthetic construct
ADQRGDRDYL

SEQ ID NO: 59177 - protein, 10 aa, synthetic construct
ADQRGDYVGL

SEQ ID NO: 59178 - protein, 10 aa, synthetic construct
ADQRGDQSTL

SEQ ID NO: 59179 - protein, 10 aa, synthetic construct
ADDRGDRDYL

SEQ ID NO: 59180 - protein, 10 aa, synthetic construct
ADDRGDYVGL

SEQ ID NO: 59181 - protein, 10 aa, synthetic construct
ADDRGDQSTL

SEQ ID NO: 59182 - protein, 10 aa, synthetic construct
NKKRGDYTSV

SEQ ID NO: 59183 - protein, 10 aa, synthetic construct
SRHRGDRGVV

SEQ ID NO: 59184 - protein, 10 aa, synthetic construct
ADERGDRDYL

SEQ ID NO: 59185 - protein, 10 aa, synthetic construct
ADERGDYVGL

SEQ ID NO: 59186 - protein, 10 aa, synthetic construct
ADERGDQSTL

SEQ ID NO: 59187 - protein, 10 aa, synthetic construct
AEGRGDHVNL

SEQ ID NO: 59188 - protein, 10 aa, synthetic construct
AEGRGDYSSV

SEQ ID NO: 59189 - protein, 10 aa, synthetic construct
AEGRGDYTSV

SEQ ID NO: 59190 - protein, 10 aa, synthetic construct
AEGRGDYTSM

SEQ ID NO: 59191 - protein, 10 aa, synthetic construct
AEARGDHVNL

SEQ ID NO: 59192 - protein, 10 aa, synthetic construct
AEARGDYSSV

SEQ ID NO: 59193 - protein, 10 aa, synthetic construct
AEARGDYTSV

SEQ ID NO: 59194 - protein, 10 aa, synthetic construct
SRHRGDRSQT

SEQ ID NO: 59195 - protein, 10 aa, synthetic construct
AEARGDYTSM

SEQ ID NO: 59196 - protein, 10 aa, synthetic construct
AEVRGDHVNL

SEQ ID NO: 59197 - protein, 10 aa, synthetic construct
AEVRGDYNSL

SEQ ID NO: 59198 - protein, 10 aa, synthetic construct
AEVRGDYSSV

SEQ ID NO: 59199 - protein, 10 aa, synthetic construct
AEVRGDYTSV

SEQ ID NO: 59200 - protein, 10 aa, synthetic construct
AEVRGDYTSM

SEQ ID NO: 59201 - protein, 10 aa, synthetic construct
AEPRGDHVNL

SEQ ID NO: 59202 - protein, 10 aa, synthetic construct
AEPRGDYSSV

SEQ ID NO: 59203 - protein, 10 aa, synthetic construct
AEPRGDYTSV

SEQ ID NO: 59204 - protein, 10 aa, synthetic construct
AEPRGDYTSM

SEQ ID NO: 59205 - protein, 10 aa, synthetic construct
SRSRGDRGQI

SEQ ID NO: 59206 - protein, 10 aa, synthetic construct
AELRGDHVNL

SEQ ID NO: 59207 - protein, 10 aa, synthetic construct
AELRGDYNSL

SEQ ID NO: 59208 - protein, 10 aa, synthetic construct
AELRGDYSSV

SEQ ID NO: 59209 - protein, 10 aa, synthetic construct
AELRGDYTSV

SEQ ID NO: 59210 - protein, 10 aa, synthetic construct
AELRGDYTSM

SEQ ID NO: 59211 - protein, 10 aa, synthetic construct
AEIRGDHGVL

SEQ ID NO: 59212 - protein, 10 aa, synthetic construct
AEIRGDRGQI

SEQ ID NO: 59213 - protein, 10 aa, synthetic construct
AEIRGDRQGI

SEQ ID NO: 59214 - protein, 10 aa, synthetic construct
AEIRGDRSVV

SEQ ID NO: 59215 - protein, 10 aa, synthetic construct
AEIRGDLTVT

SEQ ID NO: 59216 - protein, 10 aa, synthetic construct
SRSRGDRQGI

SEQ ID NO: 59217 - protein, 10 aa, synthetic construct
AEIRGDLIGR

SEQ ID NO: 59218 - protein, 10 aa, synthetic construct
AEIRGDRSQT

SEQ ID NO: 59219 - protein, 10 aa, synthetic construct
AEIRGDLLLS

SEQ ID NO: 59220 - protein, 10 aa, synthetic construct
AEMRGDHGVL

SEQ ID NO: 59221 - protein, 10 aa, synthetic construct
AEMRGDHVNL

SEQ ID NO: 59222 - protein, 10 aa, synthetic construct
AEMRGDYVGL

SEQ ID NO: 59223 - protein, 10 aa, synthetic construct
AEMRGDYSSV

SEQ ID NO: 59224 - protein, 10 aa, synthetic construct
AEMRGDQSTL

SEQ ID NO: 59225 - protein, 10 aa, synthetic construct
AEMRGDLLLS

SEQ ID NO: 59226 - protein, 10 aa, synthetic construct
AEWRGDHVNL

SEQ ID NO: 59227 - protein, 10 aa, synthetic construct
SRSRGDRSVV

SEQ ID NO: 59228 - protein, 10 aa, synthetic construct
AEWRGDRDYL

SEQ ID NO: 59229 - protein, 10 aa, synthetic construct
AEWRGDYSSV

SEQ ID NO: 59230 - protein, 10 aa, synthetic construct
AEWRGDLTVT

SEQ ID NO: 59231 - protein, 10 aa, synthetic construct
AEWRGDLIGR

SEQ ID NO: 59232 - protein, 10 aa, synthetic construct
AEFRGDHGVL

SEQ ID NO: 59233 - protein, 10 aa, synthetic construct
AEFRGDRGQI

SEQ ID NO: 59234 - protein, 10 aa, synthetic construct
AEFRGDRQGI

SEQ ID NO: 59235 - protein, 10 aa, synthetic construct
AEFRGDRSVV

SEQ ID NO: 59236 - protein, 10 aa, synthetic construct
AEFRGDLTVT

SEQ ID NO: 59237 - protein, 10 aa, synthetic construct
AEFRGDLIGR

SEQ ID NO: 59238 - protein, 10 aa, synthetic construct
SRSRGDRGVV

SEQ ID NO: 59239 - protein, 10 aa, synthetic construct
AEFRGDRSQT

SEQ ID NO: 59240 - protein, 10 aa, synthetic construct
AEFRGDLLLS

SEQ ID NO: 59241 - protein, 10 aa, synthetic construct
AEKRGDHGVL

SEQ ID NO: 59242 - protein, 10 aa, synthetic construct
AEKRGDRGQI

SEQ ID NO: 59243 - protein, 10 aa, synthetic construct
AEKRGDRQGI

SEQ ID NO: 59244 - protein, 10 aa, synthetic construct
AEKRGDRSVV

SEQ ID NO: 59245 - protein, 10 aa, synthetic construct
AEKRGDLTVT

SEQ ID NO: 59246 - protein, 10 aa, synthetic construct
AEKRGDLIGR

SEQ ID NO: 59247 - protein, 10 aa, synthetic construct
AEKRGDRSQT

SEQ ID NO: 59248 - protein, 10 aa, synthetic construct
AEKRGDLLLS

SEQ ID NO: 59249 - protein, 10 aa, synthetic construct
SRSRGDRSQT

SEQ ID NO: 59250 - protein, 10 aa, synthetic construct
AERRGDHVNL

SEQ ID NO: 59251 - protein, 10 aa, synthetic construct
AERRGDYSSV

SEQ ID NO: 59252 - protein, 10 aa, synthetic construct
AERRGDYTSV

SEQ ID NO: 59253 - protein, 10 aa, synthetic construct
AERRGDYTSM

SEQ ID NO: 59254 - protein, 10 aa, synthetic construct
AEHRGDRDYL

SEQ ID NO: 59255 - protein, 10 aa, synthetic construct
AEHRGDYVGL

SEQ ID NO: 59256 - protein, 10 aa, synthetic construct
AEHRGDQSTL

SEQ ID NO: 59257 - protein, 10 aa, synthetic construct
AESRGDHVNL

SEQ ID NO: 59258 - protein, 10 aa, synthetic construct
AESRGDYNSL

SEQ ID NO: 59259 - protein, 10 aa, synthetic construct
AESRGDYSSV

SEQ ID NO: 59260 - protein, 10 aa, synthetic construct
SRTRGDRGQI

SEQ ID NO: 59261 - protein, 10 aa, synthetic construct
AESRGDYTSV

SEQ ID NO: 59262 - protein, 10 aa, synthetic construct
AESRGDYTSM

SEQ ID NO: 59263 - protein, 10 aa, synthetic construct
AETRGDRDYL

SEQ ID NO: 59264 - protein, 10 aa, synthetic construct
AETRGDYVGL

SEQ ID NO: 59265 - protein, 10 aa, synthetic construct
AETRGDQSTL

SEQ ID NO: 59266 - protein, 10 aa, synthetic construct
AEYRGDHGVL

SEQ ID NO: 59267 - protein, 10 aa, synthetic construct
AEYRGDRGQI

SEQ ID NO: 59268 - protein, 10 aa, synthetic construct
AEYRGDRQGI

SEQ ID NO: 59269 - protein, 10 aa, synthetic construct
AEYRGDRSVV

SEQ ID NO: 59270 - protein, 10 aa, synthetic construct
AEYRGDLTVT

SEQ ID NO: 59271 - protein, 10 aa, synthetic construct
SRTRGDRQGI

SEQ ID NO: 59272 - protein, 10 aa, synthetic construct
AEYRGDLIGR

SEQ ID NO: 59273 - protein, 10 aa, synthetic construct
AEYRGDRSQT

SEQ ID NO: 59274 - protein, 10 aa, synthetic construct
AEYRGDLLLS

SEQ ID NO: 59275 - protein, 10 aa, synthetic construct
AENRGDHGVL

SEQ ID NO: 59276 - protein, 10 aa, synthetic construct
AENRGDRGQI

SEQ ID NO: 59277 - protein, 10 aa, synthetic construct
AENRGDRQGI

SEQ ID NO: 59278 - protein, 10 aa, synthetic construct
AENRGDRSVV

SEQ ID NO: 59279 - protein, 10 aa, synthetic construct
AENRGDLTVT

SEQ ID NO: 59280 - protein, 10 aa, synthetic construct
AENRGDLIGR

SEQ ID NO: 59281 - protein, 10 aa, synthetic construct
AENRGDRSQT

SEQ ID NO: 59282 - protein, 10 aa, synthetic construct
SRTRGDRSVV

SEQ ID NO: 59283 - protein, 10 aa, synthetic construct
AENRGDLLLS

SEQ ID NO: 59284 - protein, 10 aa, synthetic construct
AEQRGDRDYL

SEQ ID NO: 59285 - protein, 10 aa, synthetic construct
AEQRGDYVGL

SEQ ID NO: 59286 - protein, 10 aa, synthetic construct
AEQRGDQSTL

SEQ ID NO: 59287 - protein, 10 aa, synthetic construct
AEDRGDRDYL

SEQ ID NO: 59288 - protein, 10 aa, synthetic construct
AEDRGDYVGL

SEQ ID NO: 59289 - protein, 10 aa, synthetic construct
AEDRGDQSTL

SEQ ID NO: 59290 - protein, 10 aa, synthetic construct
AEERGDRDYL

SEQ ID NO: 59291 - protein, 10 aa, synthetic construct
AEERGDYVGL

SEQ ID NO: 59292 - protein, 10 aa, synthetic construct
AEERGDQSTL

SEQ ID NO: 59293 - protein, 10 aa, synthetic construct
NKNRGDYTSV

SEQ ID NO: 59294 - protein, 10 aa, synthetic construct
SRTRGDRGVV

SEQ ID NO: 59295 - protein, 10 aa, synthetic construct
EGGRGDYTSV

SEQ ID NO: 59296 - protein, 10 aa, synthetic construct
EGGRGDYTSM

SEQ ID NO: 59297 - protein, 10 aa, synthetic construct
EGARGDYTSV

SEQ ID NO: 59298 - protein, 10 aa, synthetic construct
EGARGDYTSM

SEQ ID NO: 59299 - protein, 10 aa, synthetic construct
EGVRGDHVNL

SEQ ID NO: 59300 - protein, 10 aa, synthetic construct
EGVRGDRDYL

SEQ ID NO: 59301 - protein, 10 aa, synthetic construct
EGVRGDYSSV

SEQ ID NO: 59302 - protein, 10 aa, synthetic construct
EGVRGDLTVT

SEQ ID NO: 59303 - protein, 10 aa, synthetic construct
EGVRGDLIGR

SEQ ID NO: 59304 - protein, 10 aa, synthetic construct
EGPRGDYTSV

SEQ ID NO: 59305 - protein, 10 aa, synthetic construct
SRTRGDRSQT

SEQ ID NO: 59306 - protein, 10 aa, synthetic construct
EGPRGDYTSM

SEQ ID NO: 59307 - protein, 10 aa, synthetic construct
EGLRGDHVNL

SEQ ID NO: 59308 - protein, 10 aa, synthetic construct
EGLRGDRDYL

SEQ ID NO: 59309 - protein, 10 aa, synthetic construct
EGLRGDYSSV

SEQ ID NO: 59310 - protein, 10 aa, synthetic construct
EGLRGDLTVT

SEQ ID NO: 59311 - protein, 10 aa, synthetic construct
EGLRGDLIGR

SEQ ID NO: 59312 - protein, 10 aa, synthetic construct
EGIRGDHGVL

SEQ ID NO: 59313 - protein, 10 aa, synthetic construct
EGIRGDHVNL

SEQ ID NO: 59314 - protein, 10 aa, synthetic construct
EGIRGDYVGL

SEQ ID NO: 59315 - protein, 10 aa, synthetic construct
EGIRGDYSSV

SEQ ID NO: 59316 - protein, 10 aa, synthetic construct
SRQRGDRGQI

SEQ ID NO: 59317 - protein, 10 aa, synthetic construct
EGIRGDQSTL

SEQ ID NO: 59318 - protein, 10 aa, synthetic construct
EGIRGDLLLS

SEQ ID NO: 59319 - protein, 10 aa, synthetic construct
EGMRGDHGVL

SEQ ID NO: 59320 - protein, 10 aa, synthetic construct
EGMRGDHVNL

SEQ ID NO: 59321 - protein, 10 aa, synthetic construct
EGMRGDYVGL

SEQ ID NO: 59322 - protein, 10 aa, synthetic construct
EGMRGDYSSV

SEQ ID NO: 59323 - protein, 10 aa, synthetic construct
EGMRGDQSTL

SEQ ID NO: 59324 - protein, 10 aa, synthetic construct
EGMRGDLLLS

SEQ ID NO: 59325 - protein, 10 aa, synthetic construct
EGWRGDHVNL

SEQ ID NO: 59326 - protein, 10 aa, synthetic construct
EGWRGDRDYL

SEQ ID NO: 59327 - protein, 10 aa, synthetic construct
SRQRGDRQGI

SEQ ID NO: 59328 - protein, 10 aa, synthetic construct
EGWRGDYSSV

SEQ ID NO: 59329 - protein, 10 aa, synthetic construct
EGWRGDLTVT

SEQ ID NO: 59330 - protein, 10 aa, synthetic construct
EGWRGDLIGR

SEQ ID NO: 59331 - protein, 10 aa, synthetic construct
EGFRGDHGVL

SEQ ID NO: 59332 - protein, 10 aa, synthetic construct
EGFRGDHVNL

SEQ ID NO: 59333 - protein, 10 aa, synthetic construct
EGFRGDYVGL

SEQ ID NO: 59334 - protein, 10 aa, synthetic construct
EGFRGDYSSV

SEQ ID NO: 59335 - protein, 10 aa, synthetic construct
EGFRGDQSTL

SEQ ID NO: 59336 - protein, 10 aa, synthetic construct
EGFRGDLLLS

SEQ ID NO: 59337 - protein, 10 aa, synthetic construct
EGKRGDHGVL

SEQ ID NO: 59338 - protein, 10 aa, synthetic construct
SRQRGDRSVV

SEQ ID NO: 59339 - protein, 10 aa, synthetic construct
EGKRGDHVNL

SEQ ID NO: 59340 - protein, 10 aa, synthetic construct
EGKRGDYVGL

SEQ ID NO: 59341 - protein, 10 aa, synthetic construct
EGKRGDYSSV

SEQ ID NO: 59342 - protein, 10 aa, synthetic construct
EGKRGDQSTL

SEQ ID NO: 59343 - protein, 10 aa, synthetic construct
EGKRGDLLLS

SEQ ID NO: 59344 - protein, 10 aa, synthetic construct
EGRRGDYTSV

SEQ ID NO: 59345 - protein, 10 aa, synthetic construct
EGRRGDYTSM

SEQ ID NO: 59346 - protein, 10 aa, synthetic construct
EGHRGDHVNL

SEQ ID NO: 59347 - protein, 10 aa, synthetic construct
EGHRGDRDYL

SEQ ID NO: 59348 - protein, 10 aa, synthetic construct
EGHRGDYSSV

SEQ ID NO: 59349 - protein, 10 aa, synthetic construct
SRQRGDRGVV

SEQ ID NO: 59350 - protein, 10 aa, synthetic construct
EGHRGDLTVT

SEQ ID NO: 59351 - protein, 10 aa, synthetic construct
EGHRGDLIGR

SEQ ID NO: 59352 - protein, 10 aa, synthetic construct
EGSRGDHVNL

SEQ ID NO: 59353 - protein, 10 aa, synthetic construct
EGSRGDRDYL

SEQ ID NO: 59354 - protein, 10 aa, synthetic construct
EGSRGDYSSV

SEQ ID NO: 59355 - protein, 10 aa, synthetic construct
EGSRGDLTVT

SEQ ID NO: 59356 - protein, 10 aa, synthetic construct
EGSRGDLIGR

SEQ ID NO: 59357 - protein, 10 aa, synthetic construct
EGTRGDHVNL

SEQ ID NO: 59358 - protein, 10 aa, synthetic construct
EGTRGDRDYL

SEQ ID NO: 59359 - protein, 10 aa, synthetic construct
EGTRGDYSSV

SEQ ID NO: 59360 - protein, 10 aa, synthetic construct
SRQRGDRSQT

SEQ ID NO: 59361 - protein, 10 aa, synthetic construct
EGTRGDLTVT

SEQ ID NO: 59362 - protein, 10 aa, synthetic construct
EGTRGDLIGR

SEQ ID NO: 59363 - protein, 10 aa, synthetic construct
EGYRGDHGVL

SEQ ID NO: 59364 - protein, 10 aa, synthetic construct
EGYRGDHVNL

SEQ ID NO: 59365 - protein, 10 aa, synthetic construct
EGYRGDYVGL

SEQ ID NO: 59366 - protein, 10 aa, synthetic construct
EGYRGDYSSV

SEQ ID NO: 59367 - protein, 10 aa, synthetic construct
EGYRGDQSTL

SEQ ID NO: 59368 - protein, 10 aa, synthetic construct
EGYRGDLLLS

SEQ ID NO: 59369 - protein, 10 aa, synthetic construct
EGNRGDHGVL

SEQ ID NO: 59370 - protein, 10 aa, synthetic construct
EGNRGDHVNL

SEQ ID NO: 59371 - protein, 10 aa, synthetic construct
SRDRGDRGQI

SEQ ID NO: 59372 - protein, 10 aa, synthetic construct
EGNRGDYVGL

SEQ ID NO: 59373 - protein, 10 aa, synthetic construct
EGNRGDYSSV

SEQ ID NO: 59374 - protein, 10 aa, synthetic construct
EGNRGDQSTL

SEQ ID NO: 59375 - protein, 10 aa, synthetic construct
EGNRGDLLLS

SEQ ID NO: 59376 - protein, 10 aa, synthetic construct
EGQRGDHVNL

SEQ ID NO: 59377 - protein, 10 aa, synthetic construct
EGQRGDRDYL

SEQ ID NO: 59378 - protein, 10 aa, synthetic construct
EGQRGDYSSV

SEQ ID NO: 59379 - protein, 10 aa, synthetic construct
EGQRGDLTVT

SEQ ID NO: 59380 - protein, 10 aa, synthetic construct
EGQRGDLIGR

SEQ ID NO: 59381 - protein, 10 aa, synthetic construct
EGDRGDHVNL

SEQ ID NO: 59382 - protein, 10 aa, synthetic construct
SRDRGDRQGI

SEQ ID NO: 59383 - protein, 10 aa, synthetic construct
EGDRGDRDYL

SEQ ID NO: 59384 - protein, 10 aa, synthetic construct
EGDRGDYSSV

SEQ ID NO: 59385 - protein, 10 aa, synthetic construct
EGDRGDLTVT

SEQ ID NO: 59386 - protein, 10 aa, synthetic construct
EGDRGDLIGR

SEQ ID NO: 59387 - protein, 10 aa, synthetic construct
EGERGDHVNL

SEQ ID NO: 59388 - protein, 10 aa, synthetic construct
EGERGDRDYL

SEQ ID NO: 59389 - protein, 10 aa, synthetic construct
EGERGDYSSV

SEQ ID NO: 59390 - protein, 10 aa, synthetic construct
EGERGDLTVT

SEQ ID NO: 59391 - protein, 10 aa, synthetic construct
EGERGDLIGR

SEQ ID NO: 59392 - protein, 10 aa, synthetic construct
EAGRGDYTSV

SEQ ID NO: 59393 - protein, 10 aa, synthetic construct
SRDRGDRSVV

SEQ ID NO: 59394 - protein, 10 aa, synthetic construct
EAGRGDYTSM

SEQ ID NO: 59395 - protein, 10 aa, synthetic construct
EAARGDYTSV

SEQ ID NO: 59396 - protein, 10 aa, synthetic construct
EAARGDYTSM

SEQ ID NO: 59397 - protein, 10 aa, synthetic construct
EAVRGDHVNL

SEQ ID NO: 59398 - protein, 10 aa, synthetic construct
EAVRGDRDYL

SEQ ID NO: 59399 - protein, 10 aa, synthetic construct
EAVRGDYSSV

SEQ ID NO: 59400 - protein, 10 aa, synthetic construct
EAVRGDLTVT

SEQ ID NO: 59401 - protein, 10 aa, synthetic construct
EAVRGDLIGR

SEQ ID NO: 59402 - protein, 10 aa, synthetic construct
EAPRGDYTSV

SEQ ID NO: 59403 - protein, 10 aa, synthetic construct
EAPRGDYTSM

SEQ ID NO: 59404 - protein, 10 aa, synthetic construct
DKKRGDYNSL

SEQ ID NO: 59405 - protein, 10 aa, synthetic construct
SRDRGDRGVV

SEQ ID NO: 59406 - protein, 10 aa, synthetic construct
EALRGDHVNL

SEQ ID NO: 59407 - protein, 10 aa, synthetic construct
EALRGDRDYL

SEQ ID NO: 59408 - protein, 10 aa, synthetic construct
EALRGDYSSV

SEQ ID NO: 59409 - protein, 10 aa, synthetic construct
EALRGDLTVT

SEQ ID NO: 59410 - protein, 10 aa, synthetic construct
EALRGDLIGR

SEQ ID NO: 59411 - protein, 10 aa, synthetic construct
EAIRGDHGVL

SEQ ID NO: 59412 - protein, 10 aa, synthetic construct
EAIRGDHVNL

SEQ ID NO: 59413 - protein, 10 aa, synthetic construct
EAIRGDYVGL

SEQ ID NO: 59414 - protein, 10 aa, synthetic construct
EAIRGDYSSV

SEQ ID NO: 59415 - protein, 10 aa, synthetic construct
EAIRGDQSTL

SEQ ID NO: 59416 - protein, 10 aa, synthetic construct
SRDRGDRSQT

SEQ ID NO: 59417 - protein, 10 aa, synthetic construct
EAIRGDLLLS

SEQ ID NO: 59418 - protein, 10 aa, synthetic construct
EAMRGDHGVL

SEQ ID NO: 59419 - protein, 10 aa, synthetic construct
EAMRGDHVNL

SEQ ID NO: 59420 - protein, 10 aa, synthetic construct
EAMRGDYVGL

SEQ ID NO: 59421 - protein, 10 aa, synthetic construct
EAMRGDYSSV

SEQ ID NO: 59422 - protein, 10 aa, synthetic construct
EAMRGDQSTL

SEQ ID NO: 59423 - protein, 10 aa, synthetic construct
EAMRGDLLLS

SEQ ID NO: 59424 - protein, 10 aa, synthetic construct
EAWRGDHVNL

SEQ ID NO: 59425 - protein, 10 aa, synthetic construct
EAWRGDRDYL

SEQ ID NO: 59426 - protein, 10 aa, synthetic construct
EAWRGDYSSV

SEQ ID NO: 59427 - protein, 10 aa, synthetic construct
SRERGDRGQI

SEQ ID NO: 59428 - protein, 10 aa, synthetic construct
EAWRGDLTVT

SEQ ID NO: 59429 - protein, 10 aa, synthetic construct
EAWRGDLIGR

SEQ ID NO: 59430 - protein, 10 aa, synthetic construct
EAFRGDHGVL

SEQ ID NO: 59431 - protein, 10 aa, synthetic construct
EAFRGDHVNL

SEQ ID NO: 59432 - protein, 10 aa, synthetic construct
EAFRGDYVGL

SEQ ID NO: 59433 - protein, 10 aa, synthetic construct
EAFRGDYSSV

SEQ ID NO: 59434 - protein, 10 aa, synthetic construct
EAFRGDQSTL

SEQ ID NO: 59435 - protein, 10 aa, synthetic construct
EAFRGDLLLS

SEQ ID NO: 59436 - protein, 10 aa, synthetic construct
EAKRGDHGVL

SEQ ID NO: 59437 - protein, 10 aa, synthetic construct
EAKRGDHVNL

SEQ ID NO: 59438 - protein, 10 aa, synthetic construct
SRERGDRQGI

SEQ ID NO: 59439 - protein, 10 aa, synthetic construct
EAKRGDYVGL

SEQ ID NO: 59440 - protein, 10 aa, synthetic construct
EAKRGDYSSV

SEQ ID NO: 59441 - protein, 10 aa, synthetic construct
EAKRGDQSTL

SEQ ID NO: 59442 - protein, 10 aa, synthetic construct
EAKRGDLLLS

SEQ ID NO: 59443 - protein, 10 aa, synthetic construct
EARRGDYTSV

SEQ ID NO: 59444 - protein, 10 aa, synthetic construct
EARRGDYTSM

SEQ ID NO: 59445 - protein, 10 aa, synthetic construct
EAHRGDHVNL

SEQ ID NO: 59446 - protein, 10 aa, synthetic construct
EAHRGDRDYL

SEQ ID NO: 59447 - protein, 10 aa, synthetic construct
EAHRGDYSSV

SEQ ID NO: 59448 - protein, 10 aa, synthetic construct
EAHRGDLTVT

SEQ ID NO: 59449 - protein, 10 aa, synthetic construct
SRERGDRSVV

SEQ ID NO: 59450 - protein, 10 aa, synthetic construct
EAHRGDLIGR

SEQ ID NO: 59451 - protein, 10 aa, synthetic construct
EASRGDHVNL

SEQ ID NO: 59452 - protein, 10 aa, synthetic construct
EASRGDRDYL

SEQ ID NO: 59453 - protein, 10 aa, synthetic construct
EASRGDYSSV

SEQ ID NO: 59454 - protein, 10 aa, synthetic construct
EASRGDLTVT

SEQ ID NO: 59455 - protein, 10 aa, synthetic construct
EASRGDLIGR

SEQ ID NO: 59456 - protein, 10 aa, synthetic construct
EATRGDHVNL

SEQ ID NO: 59457 - protein, 10 aa, synthetic construct
EATRGDRDYL

SEQ ID NO: 59458 - protein, 10 aa, synthetic construct
EATRGDYSSV

SEQ ID NO: 59459 - protein, 10 aa, synthetic construct
EATRGDLTVT

SEQ ID NO: 59460 - protein, 10 aa, synthetic construct
SRERGDRGVV

SEQ ID NO: 59461 - protein, 10 aa, synthetic construct
EATRGDLIGR

SEQ ID NO: 59462 - protein, 10 aa, synthetic construct
EAYRGDHGVL

SEQ ID NO: 59463 - protein, 10 aa, synthetic construct
EAYRGDHVNL

SEQ ID NO: 59464 - protein, 10 aa, synthetic construct
EAYRGDYVGL

SEQ ID NO: 59465 - protein, 10 aa, synthetic construct
EAYRGDYSSV

SEQ ID NO: 59466 - protein, 10 aa, synthetic construct
EAYRGDQSTL

SEQ ID NO: 59467 - protein, 10 aa, synthetic construct
EAYRGDLLLS

SEQ ID NO: 59468 - protein, 10 aa, synthetic construct
EANRGDHGVL

SEQ ID NO: 59469 - protein, 10 aa, synthetic construct
EANRGDHVNL

SEQ ID NO: 59470 - protein, 10 aa, synthetic construct
EANRGDYVGL

SEQ ID NO: 59471 - protein, 10 aa, synthetic construct
SRERGDRSQT

SEQ ID NO: 59472 - protein, 10 aa, synthetic construct
EANRGDYSSV

SEQ ID NO: 59473 - protein, 10 aa, synthetic construct
EANRGDQSTL

SEQ ID NO: 59474 - protein, 10 aa, synthetic construct
EANRGDLLLS

SEQ ID NO: 59475 - protein, 10 aa, synthetic construct
EAQRGDHVNL

SEQ ID NO: 59476 - protein, 10 aa, synthetic construct
EAQRGDRDYL

SEQ ID NO: 59477 - protein, 10 aa, synthetic construct
EAQRGDYSSV

SEQ ID NO: 59478 - protein, 10 aa, synthetic construct
EAQRGDLTVT

SEQ ID NO: 59479 - protein, 10 aa, synthetic construct
EAQRGDLIGR

SEQ ID NO: 59480 - protein, 10 aa, synthetic construct
EADRGDHVNL

SEQ ID NO: 59481 - protein, 10 aa, synthetic construct
EADRGDRDYL

SEQ ID NO: 59482 - protein, 10 aa, synthetic construct
SHGRGDRGQI

SEQ ID NO: 59483 - protein, 10 aa, synthetic construct
EADRGDYSSV

SEQ ID NO: 59484 - protein, 10 aa, synthetic construct
EADRGDLTVT

SEQ ID NO: 59485 - protein, 10 aa, synthetic construct
EADRGDLIGR

SEQ ID NO: 59486 - protein, 10 aa, synthetic construct
EAERGDHVNL

SEQ ID NO: 59487 - protein, 10 aa, synthetic construct
EAERGDRDYL

SEQ ID NO: 59488 - protein, 10 aa, synthetic construct
EAERGDYSSV

SEQ ID NO: 59489 - protein, 10 aa, synthetic construct
EAERGDLTVT

SEQ ID NO: 59490 - protein, 10 aa, synthetic construct
EAERGDLIGR

SEQ ID NO: 59491 - protein, 10 aa, synthetic construct
EVGRGDYNSL

SEQ ID NO: 59492 - protein, 10 aa, synthetic construct
EVGRGDYTSV

SEQ ID NO: 59493 - protein, 10 aa, synthetic construct
SHGRGDRQGI

SEQ ID NO: 59494 - protein, 10 aa, synthetic construct
EVGRGDYTSM

SEQ ID NO: 59495 - protein, 10 aa, synthetic construct
EVGRGDFQNT

SEQ ID NO: 59496 - protein, 10 aa, synthetic construct
EVARGDYNSL

SEQ ID NO: 59497 - protein, 10 aa, synthetic construct
EVARGDYTSV

SEQ ID NO: 59498 - protein, 10 aa, synthetic construct
EVARGDYTSM

SEQ ID NO: 59499 - protein, 10 aa, synthetic construct
EVARGDFQNT

SEQ ID NO: 59500 - protein, 10 aa, synthetic construct
EVVRGDRDYL

SEQ ID NO: 59501 - protein, 10 aa, synthetic construct
EVVRGDYTSV

SEQ ID NO: 59502 - protein, 10 aa, synthetic construct
EVVRGDLTVT

SEQ ID NO: 59503 - protein, 10 aa, synthetic construct
EVVRGDLIGR

SEQ ID NO: 59504 - protein, 10 aa, synthetic construct
SHGRGDRSVV

SEQ ID NO: 59505 - protein, 10 aa, synthetic construct
EVPRGDYNSL

SEQ ID NO: 59506 - protein, 10 aa, synthetic construct
EVPRGDYTSV

SEQ ID NO: 59507 - protein, 10 aa, synthetic construct
EVPRGDYTSM

SEQ ID NO: 59508 - protein, 10 aa, synthetic construct
EVPRGDFQNT

SEQ ID NO: 59509 - protein, 10 aa, synthetic construct
EVLRGDRDYL

SEQ ID NO: 59510 - protein, 10 aa, synthetic construct
EVLRGDYTSV

SEQ ID NO: 59511 - protein, 10 aa, synthetic construct
EVLRGDLTVT

SEQ ID NO: 59512 - protein, 10 aa, synthetic construct
EVLRGDLIGR

SEQ ID NO: 59513 - protein, 10 aa, synthetic construct
EVIRGDHGVL

SEQ ID NO: 59514 - protein, 10 aa, synthetic construct
EVIRGDHVNL

SEQ ID NO: 59515 - protein, 10 aa, synthetic construct
SKKRGDRSQT

SEQ ID NO: 59516 - protein, 10 aa, synthetic construct
QKNRGDRSQT

SEQ ID NO: 59517 - protein, 10 aa, synthetic construct
DKKRGDYTSM

SEQ ID NO: 59518 - protein, 10 aa, synthetic construct
SHGRGDRGVV

SEQ ID NO: 59519 - protein, 10 aa, synthetic construct
EVIRGDRDYL

SEQ ID NO: 59520 - protein, 10 aa, synthetic construct
EVIRGDYSSV

SEQ ID NO: 59521 - protein, 10 aa, synthetic construct
EVIRGDLTVT

SEQ ID NO: 59522 - protein, 10 aa, synthetic construct
EVMRGDHGVL

SEQ ID NO: 59523 - protein, 10 aa, synthetic construct
EVMRGDHVNL

SEQ ID NO: 59524 - protein, 10 aa, synthetic construct
EVMRGDRDYL

SEQ ID NO: 59525 - protein, 10 aa, synthetic construct
EVMRGDYSSV

SEQ ID NO: 59526 - protein, 10 aa, synthetic construct
EVMRGDLTVT

SEQ ID NO: 59527 - protein, 10 aa, synthetic construct
EVWRGDRDYL

SEQ ID NO: 59528 - protein, 10 aa, synthetic construct
EVWRGDYTSV

SEQ ID NO: 59529 - protein, 10 aa, synthetic construct
SHGRGDRSQT

SEQ ID NO: 59530 - protein, 10 aa, synthetic construct
EVWRGDLTVT

SEQ ID NO: 59531 - protein, 10 aa, synthetic construct
EVWRGDLIGR

SEQ ID NO: 59532 - protein, 10 aa, synthetic construct
EVFRGDHGVL

SEQ ID NO: 59533 - protein, 10 aa, synthetic construct
EVFRGDHVNL

SEQ ID NO: 59534 - protein, 10 aa, synthetic construct
EVFRGDRDYL

SEQ ID NO: 59535 - protein, 10 aa, synthetic construct
EVFRGDYSSV

SEQ ID NO: 59536 - protein, 10 aa, synthetic construct
EVFRGDLTVT

SEQ ID NO: 59537 - protein, 10 aa, synthetic construct
EVKRGDHGVL

SEQ ID NO: 59538 - protein, 10 aa, synthetic construct
EVKRGDHVNL

SEQ ID NO: 59539 - protein, 10 aa, synthetic construct
EVKRGDRDYL

SEQ ID NO: 59540 - protein, 10 aa, synthetic construct
SHARGDRGQI

SEQ ID NO: 59541 - protein, 10 aa, synthetic construct
EVKRGDYSSV

SEQ ID NO: 59542 - protein, 10 aa, synthetic construct
EVKRGDLTVT

SEQ ID NO: 59543 - protein, 10 aa, synthetic construct
EVRRGDYNSL

SEQ ID NO: 59544 - protein, 10 aa, synthetic construct
EVRRGDYTSV

SEQ ID NO: 59545 - protein, 10 aa, synthetic construct
EVRRGDYTSM

SEQ ID NO: 59546 - protein, 10 aa, synthetic construct
EVRRGDFQNT

SEQ ID NO: 59547 - protein, 10 aa, synthetic construct
EVHRGDRDYL

SEQ ID NO: 59548 - protein, 10 aa, synthetic construct
EVHRGDYTSV

SEQ ID NO: 59549 - protein, 10 aa, synthetic construct
EVHRGDLTVT

SEQ ID NO: 59550 - protein, 10 aa, synthetic construct
EVHRGDLIGR

SEQ ID NO: 59551 - protein, 10 aa, synthetic construct
SHARGDRQGI

SEQ ID NO: 59552 - protein, 10 aa, synthetic construct
EVSRGDRDYL

SEQ ID NO: 59553 - protein, 10 aa, synthetic construct
EVSRGDYTSV

SEQ ID NO: 59554 - protein, 10 aa, synthetic construct
EVSRGDLTVT

SEQ ID NO: 59555 - protein, 10 aa, synthetic construct
EVSRGDLIGR

SEQ ID NO: 59556 - protein, 10 aa, synthetic construct
EVTRGDRDYL

SEQ ID NO: 59557 - protein, 10 aa, synthetic construct
EVTRGDYTSV

SEQ ID NO: 59558 - protein, 10 aa, synthetic construct
EVTRGDLTVT

SEQ ID NO: 59559 - protein, 10 aa, synthetic construct
EVTRGDLIGR

SEQ ID NO: 59560 - protein, 10 aa, synthetic construct
EVYRGDHGVL

SEQ ID NO: 59561 - protein, 10 aa, synthetic construct
EVYRGDHVNL

SEQ ID NO: 59562 - protein, 10 aa, synthetic construct
SHARGDRSVV

SEQ ID NO: 59563 - protein, 10 aa, synthetic construct
EVYRGDRDYL

SEQ ID NO: 59564 - protein, 10 aa, synthetic construct
EVYRGDYSSV

SEQ ID NO: 59565 - protein, 10 aa, synthetic construct
EVYRGDLTVT

SEQ ID NO: 59566 - protein, 10 aa, synthetic construct
EVNRGDHGVL

SEQ ID NO: 59567 - protein, 10 aa, synthetic construct
EVNRGDHVNL

SEQ ID NO: 59568 - protein, 10 aa, synthetic construct
EVNRGDRDYL

SEQ ID NO: 59569 - protein, 10 aa, synthetic construct
EVNRGDYSSV

SEQ ID NO: 59570 - protein, 10 aa, synthetic construct
EVNRGDLTVT

SEQ ID NO: 59571 - protein, 10 aa, synthetic construct
EVQRGDRDYL

SEQ ID NO: 59572 - protein, 10 aa, synthetic construct
EVQRGDYTSV

SEQ ID NO: 59573 - protein, 10 aa, synthetic construct
SHARGDRGVV

SEQ ID NO: 59574 - protein, 10 aa, synthetic construct
EVQRGDLTVT

SEQ ID NO: 59575 - protein, 10 aa, synthetic construct
EVQRGDLIGR

SEQ ID NO: 59576 - protein, 10 aa, synthetic construct
EVDRGDRDYL

SEQ ID NO: 59577 - protein, 10 aa, synthetic construct
EVDRGDYTSV

SEQ ID NO: 59578 - protein, 10 aa, synthetic construct
EVDRGDLTVT

SEQ ID NO: 59579 - protein, 10 aa, synthetic construct
EVDRGDLIGR

SEQ ID NO: 59580 - protein, 10 aa, synthetic construct
EVERGDRDYL

SEQ ID NO: 59581 - protein, 10 aa, synthetic construct
EVERGDYTSV

SEQ ID NO: 59582 - protein, 10 aa, synthetic construct
EVERGDLTVT

SEQ ID NO: 59583 - protein, 10 aa, synthetic construct
EVERGDLIGR

SEQ ID NO: 59584 - protein, 10 aa, synthetic construct
SHARGDRSQT

SEQ ID NO: 59585 - protein, 10 aa, synthetic construct
EPGRGDYTSV

SEQ ID NO: 59586 - protein, 10 aa, synthetic construct
EPGRGDYTSM

SEQ ID NO: 59587 - protein, 10 aa, synthetic construct
EPARGDYTSV

SEQ ID NO: 59588 - protein, 10 aa, synthetic construct
EPARGDYTSM

SEQ ID NO: 59589 - protein, 10 aa, synthetic construct
EPVRGDHVNL

SEQ ID NO: 59590 - protein, 10 aa, synthetic construct
EPVRGDRDYL

SEQ ID NO: 59591 - protein, 10 aa, synthetic construct
EPVRGDYSSV

SEQ ID NO: 59592 - protein, 10 aa, synthetic construct
EPVRGDLTVT

SEQ ID NO: 59593 - protein, 10 aa, synthetic construct
EPVRGDLIGR

SEQ ID NO: 59594 - protein, 10 aa, synthetic construct
EPPRGDYTSV

SEQ ID NO: 59595 - protein, 10 aa, synthetic construct
SHPRGDRGQI

SEQ ID NO: 59596 - protein, 10 aa, synthetic construct
EPPRGDYTSM

SEQ ID NO: 59597 - protein, 10 aa, synthetic construct
EPLRGDHVNL

SEQ ID NO: 59598 - protein, 10 aa, synthetic construct
EPLRGDRDYL

SEQ ID NO: 59599 - protein, 10 aa, synthetic construct
EPLRGDYSSV

SEQ ID NO: 59600 - protein, 10 aa, synthetic construct
EPLRGDLTVT

SEQ ID NO: 59601 - protein, 10 aa, synthetic construct
EPLRGDLIGR

SEQ ID NO: 59602 - protein, 10 aa, synthetic construct
EPIRGDHGVL

SEQ ID NO: 59603 - protein, 10 aa, synthetic construct
EPIRGDHVNL

SEQ ID NO: 59604 - protein, 10 aa, synthetic construct
EPIRGDYVGL

SEQ ID NO: 59605 - protein, 10 aa, synthetic construct
EPIRGDYSSV

SEQ ID NO: 59606 - protein, 10 aa, synthetic construct
SHPRGDRQGI

SEQ ID NO: 59607 - protein, 10 aa, synthetic construct
EPIRGDQSTL

SEQ ID NO: 59608 - protein, 10 aa, synthetic construct
EPIRGDLLLS

SEQ ID NO: 59609 - protein, 10 aa, synthetic construct
EPMRGDHGVL

SEQ ID NO: 59610 - protein, 10 aa, synthetic construct
EPMRGDHVNL

SEQ ID NO: 59611 - protein, 10 aa, synthetic construct
EPMRGDYVGL

SEQ ID NO: 59612 - protein, 10 aa, synthetic construct
EPMRGDYSSV

SEQ ID NO: 59613 - protein, 10 aa, synthetic construct
EPMRGDQSTL

SEQ ID NO: 59614 - protein, 10 aa, synthetic construct
EPMRGDLLLS

SEQ ID NO: 59615 - protein, 10 aa, synthetic construct
EPWRGDHVNL

SEQ ID NO: 59616 - protein, 10 aa, synthetic construct
EPWRGDRDYL

SEQ ID NO: 59617 - protein, 10 aa, synthetic construct
SHPRGDRSVV

SEQ ID NO: 59618 - protein, 10 aa, synthetic construct
EPWRGDYSSV

SEQ ID NO: 59619 - protein, 10 aa, synthetic construct
EPWRGDLTVT

SEQ ID NO: 59620 - protein, 10 aa, synthetic construct
EPWRGDLIGR

SEQ ID NO: 59621 - protein, 10 aa, synthetic construct
EPFRGDHGVL

SEQ ID NO: 59622 - protein, 10 aa, synthetic construct
EPFRGDHVNL

SEQ ID NO: 59623 - protein, 10 aa, synthetic construct
EPFRGDYVGL

SEQ ID NO: 59624 - protein, 10 aa, synthetic construct
EPFRGDYSSV

SEQ ID NO: 59625 - protein, 10 aa, synthetic construct
EPFRGDQSTL

SEQ ID NO: 59626 - protein, 10 aa, synthetic construct
EPFRGDLLLS

SEQ ID NO: 59627 - protein, 10 aa, synthetic construct
EPKRGDHGVL

SEQ ID NO: 59628 - protein, 10 aa, synthetic construct
DKKRGDFQNT

SEQ ID NO: 59629 - protein, 10 aa, synthetic construct
SHPRGDRGVV

SEQ ID NO: 59630 - protein, 10 aa, synthetic construct
EPKRGDHVNL

SEQ ID NO: 59631 - protein, 10 aa, synthetic construct
EPKRGDYVGL

SEQ ID NO: 59632 - protein, 10 aa, synthetic construct
EPKRGDYSSV

SEQ ID NO: 59633 - protein, 10 aa, synthetic construct
EPKRGDQSTL

SEQ ID NO: 59634 - protein, 10 aa, synthetic construct
EPKRGDLLLS

SEQ ID NO: 59635 - protein, 10 aa, synthetic construct
EPRRGDYTSV

SEQ ID NO: 59636 - protein, 10 aa, synthetic construct
EPRRGDYTSM

SEQ ID NO: 59637 - protein, 10 aa, synthetic construct
EPHRGDHVNL

SEQ ID NO: 59638 - protein, 10 aa, synthetic construct
EPHRGDRDYL

SEQ ID NO: 59639 - protein, 10 aa, synthetic construct
EPHRGDYSSV

SEQ ID NO: 59640 - protein, 10 aa, synthetic construct
SHPRGDRSQT

SEQ ID NO: 59641 - protein, 10 aa, synthetic construct
EPHRGDLTVT

SEQ ID NO: 59642 - protein, 10 aa, synthetic construct
EPHRGDLIGR

SEQ ID NO: 59643 - protein, 10 aa, synthetic construct
EPSRGDHVNL

SEQ ID NO: 59644 - protein, 10 aa, synthetic construct
EPSRGDRDYL

SEQ ID NO: 59645 - protein, 10 aa, synthetic construct
EPSRGDYSSV

SEQ ID NO: 59646 - protein, 10 aa, synthetic construct
EPSRGDLTVT

SEQ ID NO: 59647 - protein, 10 aa, synthetic construct
EPSRGDLIGR

SEQ ID NO: 59648 - protein, 10 aa, synthetic construct
EPTRGDHVNL

SEQ ID NO: 59649 - protein, 10 aa, synthetic construct
EPTRGDRDYL

SEQ ID NO: 59650 - protein, 10 aa, synthetic construct
EPTRGDYSSV

SEQ ID NO: 59651 - protein, 10 aa, synthetic construct
SHRRGDRGQI

SEQ ID NO: 59652 - protein, 10 aa, synthetic construct
EPTRGDLTVT

SEQ ID NO: 59653 - protein, 10 aa, synthetic construct
EPTRGDLIGR

SEQ ID NO: 59654 - protein, 10 aa, synthetic construct
EPYRGDHGVL

SEQ ID NO: 59655 - protein, 10 aa, synthetic construct
EPYRGDHVNL

SEQ ID NO: 59656 - protein, 10 aa, synthetic construct
EPYRGDYVGL

SEQ ID NO: 59657 - protein, 10 aa, synthetic construct
EPYRGDYSSV

SEQ ID NO: 59658 - protein, 10 aa, synthetic construct
EPYRGDQSTL

SEQ ID NO: 59659 - protein, 10 aa, synthetic construct
EPYRGDLLLS

SEQ ID NO: 59660 - protein, 10 aa, synthetic construct
EPNRGDHGVL

SEQ ID NO: 59661 - protein, 10 aa, synthetic construct
EPNRGDHVNL

SEQ ID NO: 59662 - protein, 10 aa, synthetic construct
SHRRGDRQGI

SEQ ID NO: 59663 - protein, 10 aa, synthetic construct
EPNRGDYVGL

SEQ ID NO: 59664 - protein, 10 aa, synthetic construct
EPNRGDYSSV

SEQ ID NO: 59665 - protein, 10 aa, synthetic construct
EPNRGDQSTL

SEQ ID NO: 59666 - protein, 10 aa, synthetic construct
EPNRGDLLLS

SEQ ID NO: 59667 - protein, 10 aa, synthetic construct
EPQRGDHVNL

SEQ ID NO: 59668 - protein, 10 aa, synthetic construct
EPQRGDRDYL

SEQ ID NO: 59669 - protein, 10 aa, synthetic construct
EPQRGDYSSV

SEQ ID NO: 59670 - protein, 10 aa, synthetic construct
EPQRGDLTVT

SEQ ID NO: 59671 - protein, 10 aa, synthetic construct
EPQRGDLIGR

SEQ ID NO: 59672 - protein, 10 aa, synthetic construct
EPDRGDHVNL

SEQ ID NO: 59673 - protein, 10 aa, synthetic construct
SHRRGDRSVV

SEQ ID NO: 59674 - protein, 10 aa, synthetic construct
EPDRGDRDYL

SEQ ID NO: 59675 - protein, 10 aa, synthetic construct
EPDRGDYSSV

SEQ ID NO: 59676 - protein, 10 aa, synthetic construct
EPDRGDLTVT

SEQ ID NO: 59677 - protein, 10 aa, synthetic construct
EPDRGDLIGR

SEQ ID NO: 59678 - protein, 10 aa, synthetic construct
EPERGDHVNL

SEQ ID NO: 59679 - protein, 10 aa, synthetic construct
EPERGDRDYL

SEQ ID NO: 59680 - protein, 10 aa, synthetic construct
EPERGDYSSV

SEQ ID NO: 59681 - protein, 10 aa, synthetic construct
EPERGDLTVT

SEQ ID NO: 59682 - protein, 10 aa, synthetic construct
EPERGDLIGR

SEQ ID NO: 59683 - protein, 10 aa, synthetic construct
ELGRGDYNSL

SEQ ID NO: 59684 - protein, 10 aa, synthetic construct
SHRRGDRGVV

SEQ ID NO: 59685 - protein, 10 aa, synthetic construct
ELGRGDYTSV

SEQ ID NO: 59686 - protein, 10 aa, synthetic construct
ELGRGDYTSM

SEQ ID NO: 59687 - protein, 10 aa, synthetic construct
ELGRGDFQNT

SEQ ID NO: 59688 - protein, 10 aa, synthetic construct
ELARGDYNSL

SEQ ID NO: 59689 - protein, 10 aa, synthetic construct
ELARGDYTSV

SEQ ID NO: 59690 - protein, 10 aa, synthetic construct
ELARGDYTSM

SEQ ID NO: 59691 - protein, 10 aa, synthetic construct
ELARGDFQNT

SEQ ID NO: 59692 - protein, 10 aa, synthetic construct
ELVRGDRDYL

SEQ ID NO: 59693 - protein, 10 aa, synthetic construct
ELVRGDYTSV

SEQ ID NO: 59694 - protein, 10 aa, synthetic construct
ELVRGDLTVT

SEQ ID NO: 59695 - protein, 10 aa, synthetic construct
SHRRGDRSQT

SEQ ID NO: 59696 - protein, 10 aa, synthetic construct
ELVRGDLIGR

SEQ ID NO: 59697 - protein, 10 aa, synthetic construct
ELPRGDYNSL

SEQ ID NO: 59698 - protein, 10 aa, synthetic construct
ELPRGDYTSV

SEQ ID NO: 59699 - protein, 10 aa, synthetic construct
ELPRGDYTSM

SEQ ID NO: 59700 - protein, 10 aa, synthetic construct
ELPRGDFQNT

SEQ ID NO: 59701 - protein, 10 aa, synthetic construct
ELLRGDRDYL

SEQ ID NO: 59702 - protein, 10 aa, synthetic construct
ELLRGDYTSV

SEQ ID NO: 59703 - protein, 10 aa, synthetic construct
ELLRGDLTVT

SEQ ID NO: 59704 - protein, 10 aa, synthetic construct
ELLRGDLIGR

SEQ ID NO: 59705 - protein, 10 aa, synthetic construct
ELIRGDHGVL

SEQ ID NO: 59706 - protein, 10 aa, synthetic construct
SSGRGDHGVL

SEQ ID NO: 59707 - protein, 10 aa, synthetic construct
ELIRGDHVNL

SEQ ID NO: 59708 - protein, 10 aa, synthetic construct
ELIRGDRDYL

SEQ ID NO: 59709 - protein, 10 aa, synthetic construct
ELIRGDYSSV

SEQ ID NO: 59710 - protein, 10 aa, synthetic construct
ELIRGDLTVT

SEQ ID NO: 59711 - protein, 10 aa, synthetic construct
ELMRGDHGVL

SEQ ID NO: 59712 - protein, 10 aa, synthetic construct
ELMRGDHVNL

SEQ ID NO: 59713 - protein, 10 aa, synthetic construct
ELMRGDRDYL

SEQ ID NO: 59714 - protein, 10 aa, synthetic construct
ELMRGDYSSV

SEQ ID NO: 59715 - protein, 10 aa, synthetic construct
ELMRGDLTVT

SEQ ID NO: 59716 - protein, 10 aa, synthetic construct
ELWRGDRDYL

SEQ ID NO: 59717 - protein, 10 aa, synthetic construct
SSGRGDYVGL

SEQ ID NO: 59718 - protein, 10 aa, synthetic construct
ELWRGDYTSV

SEQ ID NO: 59719 - protein, 10 aa, synthetic construct
ELWRGDLTVT

SEQ ID NO: 59720 - protein, 10 aa, synthetic construct
ELWRGDLIGR

SEQ ID NO: 59721 - protein, 10 aa, synthetic construct
ELFRGDHGVL

SEQ ID NO: 59722 - protein, 10 aa, synthetic construct
ELFRGDHVNL

SEQ ID NO: 59723 - protein, 10 aa, synthetic construct
ELFRGDRDYL

SEQ ID NO: 59724 - protein, 10 aa, synthetic construct
ELFRGDYSSV

SEQ ID NO: 59725 - protein, 10 aa, synthetic construct
ELFRGDLTVT

SEQ ID NO: 59726 - protein, 10 aa, synthetic construct
ELKRGDHGVL

SEQ ID NO: 59727 - protein, 10 aa, synthetic construct
ELKRGDHVNL

SEQ ID NO: 59728 - protein, 10 aa, synthetic construct
SSGRGDQSTL

SEQ ID NO: 59729 - protein, 10 aa, synthetic construct
ELKRGDRDYL

SEQ ID NO: 59730 - protein, 10 aa, synthetic construct
ELKRGDYSSV

SEQ ID NO: 59731 - protein, 10 aa, synthetic construct
ELKRGDLTVT

SEQ ID NO: 59732 - protein, 10 aa, synthetic construct
ELRRGDYNSL

SEQ ID NO: 59733 - protein, 10 aa, synthetic construct
ELRRGDYTSV

SEQ ID NO: 59734 - protein, 10 aa, synthetic construct
ELRRGDYTSM

SEQ ID NO: 59735 - protein, 10 aa, synthetic construct
ELRRGDFQNT

SEQ ID NO: 59736 - protein, 10 aa, synthetic construct
ELHRGDRDYL

SEQ ID NO: 59737 - protein, 10 aa, synthetic construct
ELHRGDYTSV

SEQ ID NO: 59738 - protein, 10 aa, synthetic construct
ELHRGDLTVT

SEQ ID NO: 59739 - protein, 10 aa, synthetic construct
DKNRGDYNSL

SEQ ID NO: 59740 - protein, 10 aa, synthetic construct
SSGRGDLLLS

SEQ ID NO: 59741 - protein, 10 aa, synthetic construct
ELHRGDLIGR

SEQ ID NO: 59742 - protein, 10 aa, synthetic construct
ELSRGDRDYL

SEQ ID NO: 59743 - protein, 10 aa, synthetic construct
ELSRGDYTSV

SEQ ID NO: 59744 - protein, 10 aa, synthetic construct
ELSRGDLTVT

SEQ ID NO: 59745 - protein, 10 aa, synthetic construct
ELSRGDLIGR

SEQ ID NO: 59746 - protein, 10 aa, synthetic construct
ELTRGDRDYL

SEQ ID NO: 59747 - protein, 10 aa, synthetic construct
ELTRGDYTSV

SEQ ID NO: 59748 - protein, 10 aa, synthetic construct
ELTRGDLTVT

SEQ ID NO: 59749 - protein, 10 aa, synthetic construct
ELTRGDLIGR

SEQ ID NO: 59750 - protein, 10 aa, synthetic construct
ELYRGDHGVL

SEQ ID NO: 59751 - protein, 10 aa, synthetic construct
SSARGDHGVL

SEQ ID NO: 59752 - protein, 10 aa, synthetic construct
ELYRGDHVNL

SEQ ID NO: 59753 - protein, 10 aa, synthetic construct
ELYRGDRDYL

SEQ ID NO: 59754 - protein, 10 aa, synthetic construct
ELYRGDYSSV

SEQ ID NO: 59755 - protein, 10 aa, synthetic construct
ELYRGDLTVT

SEQ ID NO: 59756 - protein, 10 aa, synthetic construct
ELNRGDHGVL

SEQ ID NO: 59757 - protein, 10 aa, synthetic construct
ELNRGDHVNL

SEQ ID NO: 59758 - protein, 10 aa, synthetic construct
ELNRGDRDYL

SEQ ID NO: 59759 - protein, 10 aa, synthetic construct
ELNRGDYSSV

SEQ ID NO: 59760 - protein, 10 aa, synthetic construct
ELNRGDLTVT

SEQ ID NO: 59761 - protein, 10 aa, synthetic construct
ELQRGDRDYL

SEQ ID NO: 59762 - protein, 10 aa, synthetic construct
SSARGDYVGL

SEQ ID NO: 59763 - protein, 10 aa, synthetic construct
ELQRGDYTSV

SEQ ID NO: 59764 - protein, 10 aa, synthetic construct
ELQRGDLTVT

SEQ ID NO: 59765 - protein, 10 aa, synthetic construct
ELQRGDLIGR

SEQ ID NO: 59766 - protein, 10 aa, synthetic construct
ELDRGDRDYL

SEQ ID NO: 59767 - protein, 10 aa, synthetic construct
ELDRGDYTSV

SEQ ID NO: 59768 - protein, 10 aa, synthetic construct
ELDRGDLTVT

SEQ ID NO: 59769 - protein, 10 aa, synthetic construct
ELDRGDLIGR

SEQ ID NO: 59770 - protein, 10 aa, synthetic construct
ELERGDRDYL

SEQ ID NO: 59771 - protein, 10 aa, synthetic construct
ELERGDYTSV

SEQ ID NO: 59772 - protein, 10 aa, synthetic construct
ELERGDLTVT

SEQ ID NO: 59773 - protein, 10 aa, synthetic construct
SSARGDQSTL

SEQ ID NO: 59774 - protein, 10 aa, synthetic construct
ELERGDLIGR

SEQ ID NO: 59775 - protein, 10 aa, synthetic construct
EIGRGDHGVL

SEQ ID NO: 59776 - protein, 10 aa, synthetic construct
EIGRGDHVNL

SEQ ID NO: 59777 - protein, 10 aa, synthetic construct
EIGRGDYVGL

SEQ ID NO: 59778 - protein, 10 aa, synthetic construct
EIGRGDYSSV

SEQ ID NO: 59779 - protein, 10 aa, synthetic construct
EIGRGDQSTL

SEQ ID NO: 59780 - protein, 10 aa, synthetic construct
EIGRGDLLLS

SEQ ID NO: 59781 - protein, 10 aa, synthetic construct
EIARGDHGVL

SEQ ID NO: 59782 - protein, 10 aa, synthetic construct
EIARGDHVNL

SEQ ID NO: 59783 - protein, 10 aa, synthetic construct
EIARGDYVGL

SEQ ID NO: 59784 - protein, 10 aa, synthetic construct
SSARGDLLLS

SEQ ID NO: 59785 - protein, 10 aa, synthetic construct
EIARGDYSSV

SEQ ID NO: 59786 - protein, 10 aa, synthetic construct
EIARGDQSTL

SEQ ID NO: 59787 - protein, 10 aa, synthetic construct
EIARGDLLLS

SEQ ID NO: 59788 - protein, 10 aa, synthetic construct
EIVRGDRGQI

SEQ ID NO: 59789 - protein, 10 aa, synthetic construct
EIVRGDRQGI

SEQ ID NO: 59790 - protein, 10 aa, synthetic construct
EIVRGDRSVV

SEQ ID NO: 59791 - protein, 10 aa, synthetic construct
EIVRGDRGVV

SEQ ID NO: 59792 - protein, 10 aa, synthetic construct
EIVRGDYVGL

SEQ ID NO: 59793 - protein, 10 aa, synthetic construct
EIVRGDQSTL

SEQ ID NO: 59794 - protein, 10 aa, synthetic construct
EIVRGDRSQT

SEQ ID NO: 59795 - protein, 10 aa, synthetic construct
SSVRGDRGQI

SEQ ID NO: 59796 - protein, 10 aa, synthetic construct
EIVRGDLLLS

SEQ ID NO: 59797 - protein, 10 aa, synthetic construct
EIPRGDHGVL

SEQ ID NO: 59798 - protein, 10 aa, synthetic construct
EIPRGDHVNL

SEQ ID NO: 59799 - protein, 10 aa, synthetic construct
EIPRGDYVGL

SEQ ID NO: 59800 - protein, 10 aa, synthetic construct
EIPRGDYSSV

SEQ ID NO: 59801 - protein, 10 aa, synthetic construct
EIPRGDQSTL

SEQ ID NO: 59802 - protein, 10 aa, synthetic construct
EIPRGDLLLS

SEQ ID NO: 59803 - protein, 10 aa, synthetic construct
EILRGDRGQI

SEQ ID NO: 59804 - protein, 10 aa, synthetic construct
EILRGDRQGI

SEQ ID NO: 59805 - protein, 10 aa, synthetic construct
EILRGDRSVV

SEQ ID NO: 59806 - protein, 10 aa, synthetic construct
SSVRGDRQGI

SEQ ID NO: 59807 - protein, 10 aa, synthetic construct
EILRGDRGVV

SEQ ID NO: 59808 - protein, 10 aa, synthetic construct
EILRGDYVGL

SEQ ID NO: 59809 - protein, 10 aa, synthetic construct
EILRGDQSTL

SEQ ID NO: 59810 - protein, 10 aa, synthetic construct
EILRGDRSQT

SEQ ID NO: 59811 - protein, 10 aa, synthetic construct
EILRGDLLLS

SEQ ID NO: 59812 - protein, 10 aa, synthetic construct
EIIRGDRSVV

SEQ ID NO: 59813 - protein, 10 aa, synthetic construct
EIIRGDRSQT

SEQ ID NO: 59814 - protein, 10 aa, synthetic construct
EIMRGDRSVV

SEQ ID NO: 59815 - protein, 10 aa, synthetic construct
EIMRGDRSQT

SEQ ID NO: 59816 - protein, 10 aa, synthetic construct
EIWRGDRGQI

SEQ ID NO: 59817 - protein, 10 aa, synthetic construct
SSVRGDRSVV

SEQ ID NO: 59818 - protein, 10 aa, synthetic construct
EIWRGDRQGI

SEQ ID NO: 59819 - protein, 10 aa, synthetic construct
EIWRGDRSVV

SEQ ID NO: 59820 - protein, 10 aa, synthetic construct
EIWRGDRGVV

SEQ ID NO: 59821 - protein, 10 aa, synthetic construct
EIWRGDYVGL

SEQ ID NO: 59822 - protein, 10 aa, synthetic construct
EIWRGDQSTL

SEQ ID NO: 59823 - protein, 10 aa, synthetic construct
EIWRGDRSQT

SEQ ID NO: 59824 - protein, 10 aa, synthetic construct
EIWRGDLLLS

SEQ ID NO: 59825 - protein, 10 aa, synthetic construct
EIFRGDRSVV

SEQ ID NO: 59826 - protein, 10 aa, synthetic construct
EIFRGDRSQT

SEQ ID NO: 59827 - protein, 10 aa, synthetic construct
EIKRGDRSVV

SEQ ID NO: 59828 - protein, 10 aa, synthetic construct
SSVRGDRGVV

SEQ ID NO: 59829 - protein, 10 aa, synthetic construct
EIKRGDRSQT

SEQ ID NO: 59830 - protein, 10 aa, synthetic construct
EIRRGDHGVL

SEQ ID NO: 59831 - protein, 10 aa, synthetic construct
EIRRGDHVNL

SEQ ID NO: 59832 - protein, 10 aa, synthetic construct
EIRRGDYVGL

SEQ ID NO: 59833 - protein, 10 aa, synthetic construct
EIRRGDYSSV

SEQ ID NO: 59834 - protein, 10 aa, synthetic construct
EIRRGDQSTL

SEQ ID NO: 59835 - protein, 10 aa, synthetic construct
EIRRGDLLLS

SEQ ID NO: 59836 - protein, 10 aa, synthetic construct
EIHRGDRGQI

SEQ ID NO: 59837 - protein, 10 aa, synthetic construct
EIHRGDRQGI

SEQ ID NO: 59838 - protein, 10 aa, synthetic construct
EIHRGDRSVV

SEQ ID NO: 59839 - protein, 10 aa, synthetic construct
SSVRGDRSQT

SEQ ID NO: 59840 - protein, 10 aa, synthetic construct
EIHRGDRGVV

SEQ ID NO: 59841 - protein, 10 aa, synthetic construct
EIHRGDYVGL

SEQ ID NO: 59842 - protein, 10 aa, synthetic construct
EIHRGDQSTL

SEQ ID NO: 59843 - protein, 10 aa, synthetic construct
EIHRGDRSQT

SEQ ID NO: 59844 - protein, 10 aa, synthetic construct
EIHRGDLLLS

SEQ ID NO: 59845 - protein, 10 aa, synthetic construct
EISRGDRGQI

SEQ ID NO: 59846 - protein, 10 aa, synthetic construct
EISRGDRQGI

SEQ ID NO: 59847 - protein, 10 aa, synthetic construct
EISRGDRSVV

SEQ ID NO: 59848 - protein, 10 aa, synthetic construct
EISRGDRGVV

SEQ ID NO: 59849 - protein, 10 aa, synthetic construct
EISRGDYVGL

SEQ ID NO: 59850 - protein, 10 aa, synthetic construct
DKNRGDYTSM

SEQ ID NO: 59851 - protein, 10 aa, synthetic construct
SSLRGDRGQI

SEQ ID NO: 59852 - protein, 10 aa, synthetic construct
EISRGDQSTL

SEQ ID NO: 59853 - protein, 10 aa, synthetic construct
EISRGDRSQT

SEQ ID NO: 59854 - protein, 10 aa, synthetic construct
EISRGDLLLS

SEQ ID NO: 59855 - protein, 10 aa, synthetic construct
EITRGDRGQI

SEQ ID NO: 59856 - protein, 10 aa, synthetic construct
EITRGDRQGI

SEQ ID NO: 59857 - protein, 10 aa, synthetic construct
EITRGDRSVV

SEQ ID NO: 59858 - protein, 10 aa, synthetic construct
EITRGDRGVV

SEQ ID NO: 59859 - protein, 10 aa, synthetic construct
EITRGDYVGL

SEQ ID NO: 59860 - protein, 10 aa, synthetic construct
EITRGDQSTL

SEQ ID NO: 59861 - protein, 10 aa, synthetic construct
EITRGDRSQT

SEQ ID NO: 59862 - protein, 10 aa, synthetic construct
SSLRGDRQGI

SEQ ID NO: 59863 - protein, 10 aa, synthetic construct
EITRGDLLLS

SEQ ID NO: 59864 - protein, 10 aa, synthetic construct
EIYRGDRSVV

SEQ ID NO: 59865 - protein, 10 aa, synthetic construct
EIYRGDRSQT

SEQ ID NO: 59866 - protein, 10 aa, synthetic construct
EINRGDRSVV

SEQ ID NO: 59867 - protein, 10 aa, synthetic construct
EINRGDRSQT

SEQ ID NO: 59868 - protein, 10 aa, synthetic construct
EIQRGDRGQI

SEQ ID NO: 59869 - protein, 10 aa, synthetic construct
EIQRGDRQGI

SEQ ID NO: 59870 - protein, 10 aa, synthetic construct
EIQRGDRSVV

SEQ ID NO: 59871 - protein, 10 aa, synthetic construct
EIQRGDRGVV

SEQ ID NO: 59872 - protein, 10 aa, synthetic construct
EIQRGDYVGL

SEQ ID NO: 59873 - protein, 10 aa, synthetic construct
SSLRGDRSVV

SEQ ID NO: 59874 - protein, 10 aa, synthetic construct
EIQRGDQSTL

SEQ ID NO: 59875 - protein, 10 aa, synthetic construct
EIQRGDRSQT

SEQ ID NO: 59876 - protein, 10 aa, synthetic construct
EIQRGDLLLS

SEQ ID NO: 59877 - protein, 10 aa, synthetic construct
EIDRGDRGQI

SEQ ID NO: 59878 - protein, 10 aa, synthetic construct
EIDRGDRQGI

SEQ ID NO: 59879 - protein, 10 aa, synthetic construct
EIDRGDRSVV

SEQ ID NO: 59880 - protein, 10 aa, synthetic construct
EIDRGDRGVV

SEQ ID NO: 59881 - protein, 10 aa, synthetic construct
EIDRGDYVGL

SEQ ID NO: 59882 - protein, 10 aa, synthetic construct
EIDRGDQSTL

SEQ ID NO: 59883 - protein, 10 aa, synthetic construct
EIDRGDRSQT

SEQ ID NO: 59884 - protein, 10 aa, synthetic construct
SSLRGDRGVV

SEQ ID NO: 59885 - protein, 10 aa, synthetic construct
EIDRGDLLLS

SEQ ID NO: 59886 - protein, 10 aa, synthetic construct
EIERGDRGQI

SEQ ID NO: 59887 - protein, 10 aa, synthetic construct
EIERGDRQGI

SEQ ID NO: 59888 - protein, 10 aa, synthetic construct
EIERGDRSVV

SEQ ID NO: 59889 - protein, 10 aa, synthetic construct
EIERGDRGVV

SEQ ID NO: 59890 - protein, 10 aa, synthetic construct
EIERGDYVGL

SEQ ID NO: 59891 - protein, 10 aa, synthetic construct
EIERGDQSTL

SEQ ID NO: 59892 - protein, 10 aa, synthetic construct
EIERGDRSQT

SEQ ID NO: 59893 - protein, 10 aa, synthetic construct
EIERGDLLLS

SEQ ID NO: 59894 - protein, 10 aa, synthetic construct
EMGRGDRDYL

SEQ ID NO: 59895 - protein, 10 aa, synthetic construct
SSLRGDRSQT

SEQ ID NO: 59896 - protein, 10 aa, synthetic construct
EMGRGDYVGL

SEQ ID NO: 59897 - protein, 10 aa, synthetic construct
EMGRGDYSSV

SEQ ID NO: 59898 - protein, 10 aa, synthetic construct
EMGRGDYTSV

SEQ ID NO: 59899 - protein, 10 aa, synthetic construct
EMGRGDQSTL

SEQ ID NO: 59900 - protein, 10 aa, synthetic construct
EMARGDRDYL

SEQ ID NO: 59901 - protein, 10 aa, synthetic construct
EMARGDYVGL

SEQ ID NO: 59902 - protein, 10 aa, synthetic construct
EMARGDYSSV

SEQ ID NO: 59903 - protein, 10 aa, synthetic construct
EMARGDYTSV

SEQ ID NO: 59904 - protein, 10 aa, synthetic construct
EMARGDQSTL

SEQ ID NO: 59905 - protein, 10 aa, synthetic construct
EMVRGDRDYL

SEQ ID NO: 59906 - protein, 10 aa, synthetic construct
SSWRGDRGQI

SEQ ID NO: 59907 - protein, 10 aa, synthetic construct
EMVRGDYVGL

SEQ ID NO: 59908 - protein, 10 aa, synthetic construct
EMVRGDYSSV

SEQ ID NO: 59909 - protein, 10 aa, synthetic construct
EMVRGDYTSV

SEQ ID NO: 59910 - protein, 10 aa, synthetic construct
EMVRGDQSTL

SEQ ID NO: 59911 - protein, 10 aa, synthetic construct
EMPRGDRDYL

SEQ ID NO: 59912 - protein, 10 aa, synthetic construct
EMPRGDYVGL

SEQ ID NO: 59913 - protein, 10 aa, synthetic construct
EMPRGDYSSV

SEQ ID NO: 59914 - protein, 10 aa, synthetic construct
EMPRGDYTSV

SEQ ID NO: 59915 - protein, 10 aa, synthetic construct
EMPRGDQSTL

SEQ ID NO: 59916 - protein, 10 aa, synthetic construct
EMLRGDRDYL

SEQ ID NO: 59917 - protein, 10 aa, synthetic construct
SSWRGDRQGI

SEQ ID NO: 59918 - protein, 10 aa, synthetic construct
EMLRGDYVGL

SEQ ID NO: 59919 - protein, 10 aa, synthetic construct
EMLRGDYSSV

SEQ ID NO: 59920 - protein, 10 aa, synthetic construct
EMLRGDYTSV

SEQ ID NO: 59921 - protein, 10 aa, synthetic construct
EMLRGDQSTL

SEQ ID NO: 59922 - protein, 10 aa, synthetic construct
EMIRGDHGVL

SEQ ID NO: 59923 - protein, 10 aa, synthetic construct
EMIRGDRSVV

SEQ ID NO: 59924 - protein, 10 aa, synthetic construct
EMIRGDRGVV

SEQ ID NO: 59925 - protein, 10 aa, synthetic construct
EMIRGDLTVT

SEQ ID NO: 59926 - protein, 10 aa, synthetic construct
EMIRGDLIGR

SEQ ID NO: 59927 - protein, 10 aa, synthetic construct
EMIRGDLLLS

SEQ ID NO: 59928 - protein, 10 aa, synthetic construct
SSWRGDRSVV

SEQ ID NO: 59929 - protein, 10 aa, synthetic construct
EMMRGDHGVL

SEQ ID NO: 59930 - protein, 10 aa, synthetic construct
EMMRGDRGQI

SEQ ID NO: 59931 - protein, 10 aa, synthetic construct
EMMRGDRQGI

SEQ ID NO: 59932 - protein, 10 aa, synthetic construct
EMMRGDRGVV

SEQ ID NO: 59933 - protein, 10 aa, synthetic construct
EMMRGDYVGL

SEQ ID NO: 59934 - protein, 10 aa, synthetic construct
EMMRGDLIGR

SEQ ID NO: 59935 - protein, 10 aa, synthetic construct
EMMRGDQSTL

SEQ ID NO: 59936 - protein, 10 aa, synthetic construct
EMMRGDLLLS

SEQ ID NO: 59937 - protein, 10 aa, synthetic construct
EMWRGDHGVL

SEQ ID NO: 59938 - protein, 10 aa, synthetic construct
EMWRGDHVNL

SEQ ID NO: 59939 - protein, 10 aa, synthetic construct
SSWRGDRGVV

SEQ ID NO: 59940 - protein, 10 aa, synthetic construct
EMWRGDRDYL

SEQ ID NO: 59941 - protein, 10 aa, synthetic construct
EMWRGDYSSV

SEQ ID NO: 59942 - protein, 10 aa, synthetic construct
EMWRGDLTVT

SEQ ID NO: 59943 - protein, 10 aa, synthetic construct
EMFRGDHGVL

SEQ ID NO: 59944 - protein, 10 aa, synthetic construct
EMFRGDRSVV

SEQ ID NO: 59945 - protein, 10 aa, synthetic construct
EMFRGDRGVV

SEQ ID NO: 59946 - protein, 10 aa, synthetic construct
EMFRGDLTVT

SEQ ID NO: 59947 - protein, 10 aa, synthetic construct
EMFRGDLIGR

SEQ ID NO: 59948 - protein, 10 aa, synthetic construct
EMFRGDLLLS

SEQ ID NO: 59949 - protein, 10 aa, synthetic construct
EMKRGDHGVL

SEQ ID NO: 59950 - protein, 10 aa, synthetic construct
SSWRGDRSQT

SEQ ID NO: 59951 - protein, 10 aa, synthetic construct
EMKRGDRSVV

SEQ ID NO: 59952 - protein, 10 aa, synthetic construct
EMKRGDRGVV

SEQ ID NO: 59953 - protein, 10 aa, synthetic construct
EMKRGDLTVT

SEQ ID NO: 59954 - protein, 10 aa, synthetic construct
EMKRGDLIGR

SEQ ID NO: 59955 - protein, 10 aa, synthetic construct
EMKRGDLLLS

SEQ ID NO: 59956 - protein, 10 aa, synthetic construct
EMRRGDRDYL

SEQ ID NO: 59957 - protein, 10 aa, synthetic construct
EMRRGDYVGL

SEQ ID NO: 59958 - protein, 10 aa, synthetic construct
EMRRGDYSSV

SEQ ID NO: 59959 - protein, 10 aa, synthetic construct
EMRRGDYTSV

SEQ ID NO: 59960 - protein, 10 aa, synthetic construct
EMRRGDQSTL

SEQ ID NO: 59961 - protein, 10 aa, synthetic construct
DKNRGDFQNT

SEQ ID NO: 59962 - protein, 10 aa, synthetic construct
SSRRGDHGVL

SEQ ID NO: 59963 - protein, 10 aa, synthetic construct
EMHRGDHGVL

SEQ ID NO: 59964 - protein, 10 aa, synthetic construct
EMHRGDRGQI

SEQ ID NO: 59965 - protein, 10 aa, synthetic construct
EMHRGDRQGI

SEQ ID NO: 59966 - protein, 10 aa, synthetic construct
EMHRGDRSVV

SEQ ID NO: 59967 - protein, 10 aa, synthetic construct
EMHRGDLIGR

SEQ ID NO: 59968 - protein, 10 aa, synthetic construct
EMHRGDRSQT

SEQ ID NO: 59969 - protein, 10 aa, synthetic construct
EMSRGDRDYL

SEQ ID NO: 59970 - protein, 10 aa, synthetic construct
EMSRGDYVGL

SEQ ID NO: 59971 - protein, 10 aa, synthetic construct
EMSRGDYSSV

SEQ ID NO: 59972 - protein, 10 aa, synthetic construct
EMSRGDYTSV

SEQ ID NO: 59973 - protein, 10 aa, synthetic construct
SSRRGDYVGL

SEQ ID NO: 59974 - protein, 10 aa, synthetic construct
EMSRGDQSTL

SEQ ID NO: 59975 - protein, 10 aa, synthetic construct
EMTRGDHGVL

SEQ ID NO: 59976 - protein, 10 aa, synthetic construct
EMTRGDRGQI

SEQ ID NO: 59977 - protein, 10 aa, synthetic construct
EMTRGDRQGI

SEQ ID NO: 59978 - protein, 10 aa, synthetic construct
EMTRGDRSVV

SEQ ID NO: 59979 - protein, 10 aa, synthetic construct
EMTRGDLIGR

SEQ ID NO: 59980 - protein, 10 aa, synthetic construct
EMTRGDRSQT

SEQ ID NO: 59981 - protein, 10 aa, synthetic construct
EMYRGDHGVL

SEQ ID NO: 59982 - protein, 10 aa, synthetic construct
EMYRGDRSVV

SEQ ID NO: 59983 - protein, 10 aa, synthetic construct
EMYRGDRGVV

SEQ ID NO: 59984 - protein, 10 aa, synthetic construct
SSRRGDQSTL

SEQ ID NO: 59985 - protein, 10 aa, synthetic construct
EMYRGDLTVT

SEQ ID NO: 59986 - protein, 10 aa, synthetic construct
EMYRGDLIGR

SEQ ID NO: 59987 - protein, 10 aa, synthetic construct
EMYRGDLLLS

SEQ ID NO: 59988 - protein, 10 aa, synthetic construct
EMNRGDHGVL

SEQ ID NO: 59989 - protein, 10 aa, synthetic construct
EMNRGDRSVV

SEQ ID NO: 59990 - protein, 10 aa, synthetic construct
EMNRGDRGVV

SEQ ID NO: 59991 - protein, 10 aa, synthetic construct
EMNRGDLTVT

SEQ ID NO: 59992 - protein, 10 aa, synthetic construct
EMNRGDLIGR

SEQ ID NO: 59993 - protein, 10 aa, synthetic construct
EMNRGDLLLS

SEQ ID NO: 59994 - protein, 10 aa, synthetic construct
EMQRGDHGVL

SEQ ID NO: 59995 - protein, 10 aa, synthetic construct
SSRRGDLLLS

SEQ ID NO: 59996 - protein, 10 aa, synthetic construct
EMQRGDRGQI

SEQ ID NO: 59997 - protein, 10 aa, synthetic construct
EMQRGDRQGI

SEQ ID NO: 59998 - protein, 10 aa, synthetic construct
EMQRGDRSVV

SEQ ID NO: 59999 - protein, 10 aa, synthetic construct
EMQRGDLIGR

SEQ ID NO: 60000 - protein, 10 aa, synthetic construct
EMQRGDRSQT

SEQ ID NO: 60001 - protein, 10 aa, synthetic construct
EMDRGDHGVL

SEQ ID NO: 60002 - protein, 10 aa, synthetic construct
EMDRGDRGQI

SEQ ID NO: 60003 - protein, 10 aa, synthetic construct
EMDRGDRQGI

SEQ ID NO: 60004 - protein, 10 aa, synthetic construct
EMDRGDRSVV

SEQ ID NO: 60005 - protein, 10 aa, synthetic construct
EMDRGDLIGR

SEQ ID NO: 60006 - protein, 10 aa, synthetic construct
SSHRGDRGQI

SEQ ID NO: 60007 - protein, 10 aa, synthetic construct
EMDRGDRSQT

SEQ ID NO: 60008 - protein, 10 aa, synthetic construct
EMERGDHGVL

SEQ ID NO: 60009 - protein, 10 aa, synthetic construct
EMERGDRGQI

SEQ ID NO: 60010 - protein, 10 aa, synthetic construct
EMERGDRQGI

SEQ ID NO: 60011 - protein, 10 aa, synthetic construct
EMERGDRSVV

SEQ ID NO: 60012 - protein, 10 aa, synthetic construct
EMERGDLIGR

SEQ ID NO: 60013 - protein, 10 aa, synthetic construct
EMERGDRSQT

SEQ ID NO: 60014 - protein, 10 aa, synthetic construct
EWGRGDHVNL

SEQ ID NO: 60015 - protein, 10 aa, synthetic construct
EWGRGDYNSL

SEQ ID NO: 60016 - protein, 10 aa, synthetic construct
EWGRGDYSSV

SEQ ID NO: 60017 - protein, 10 aa, synthetic construct
SSHRGDRQGI

SEQ ID NO: 60018 - protein, 10 aa, synthetic construct
EWGRGDYTSV

SEQ ID NO: 60019 - protein, 10 aa, synthetic construct
EWGRGDYTSM

SEQ ID NO: 60020 - protein, 10 aa, synthetic construct
EWARGDHVNL

SEQ ID NO: 60021 - protein, 10 aa, synthetic construct
EWARGDYNSL

SEQ ID NO: 60022 - protein, 10 aa, synthetic construct
EWARGDYSSV

SEQ ID NO: 60023 - protein, 10 aa, synthetic construct
EWARGDYTSV

SEQ ID NO: 60024 - protein, 10 aa, synthetic construct
EWARGDYTSM

SEQ ID NO: 60025 - protein, 10 aa, synthetic construct
EWVRGDHVNL

SEQ ID NO: 60026 - protein, 10 aa, synthetic construct
EWVRGDYNSL

SEQ ID NO: 60027 - protein, 10 aa, synthetic construct
EWVRGDYTSM

SEQ ID NO: 60028 - protein, 10 aa, synthetic construct
SSHRGDRSVV

SEQ ID NO: 60029 - protein, 10 aa, synthetic construct
EWPRGDHVNL

SEQ ID NO: 60030 - protein, 10 aa, synthetic construct
EWPRGDYNSL

SEQ ID NO: 60031 - protein, 10 aa, synthetic construct
EWPRGDYSSV

SEQ ID NO: 60032 - protein, 10 aa, synthetic construct
EWPRGDYTSV

SEQ ID NO: 60033 - protein, 10 aa, synthetic construct
EWPRGDYTSM

SEQ ID NO: 60034 - protein, 10 aa, synthetic construct
EWLRGDHVNL

SEQ ID NO: 60035 - protein, 10 aa, synthetic construct
EWLRGDYNSL

SEQ ID NO: 60036 - protein, 10 aa, synthetic construct
EWLRGDYTSM

SEQ ID NO: 60037 - protein, 10 aa, synthetic construct
EWIRGDHGVL

SEQ ID NO: 60038 - protein, 10 aa, synthetic construct
EWIRGDRGQI

SEQ ID NO: 60039 - protein, 10 aa, synthetic construct
SSHRGDRGVV

SEQ ID NO: 60040 - protein, 10 aa, synthetic construct
EWIRGDRQGI

SEQ ID NO: 60041 - protein, 10 aa, synthetic construct
EWIRGDRSVV

SEQ ID NO: 60042 - protein, 10 aa, synthetic construct
EWIRGDLIGR

SEQ ID NO: 60043 - protein, 10 aa, synthetic construct
EWIRGDRSQT

SEQ ID NO: 60044 - protein, 10 aa, synthetic construct
EWMRGDHGVL

SEQ ID NO: 60045 - protein, 10 aa, synthetic construct
EWMRGDHVNL

SEQ ID NO: 60046 - protein, 10 aa, synthetic construct
EWMRGDRDYL

SEQ ID NO: 60047 - protein, 10 aa, synthetic construct
EWMRGDYSSV

SEQ ID NO: 60048 - protein, 10 aa, synthetic construct
EWMRGDLTVT

SEQ ID NO: 60049 - protein, 10 aa, synthetic construct
EWWRGDRDYL

SEQ ID NO: 60050 - protein, 10 aa, synthetic construct
SSHRGDRSQT

SEQ ID NO: 60051 - protein, 10 aa, synthetic construct
EWWRGDYTSV

SEQ ID NO: 60052 - protein, 10 aa, synthetic construct
EWWRGDLTVT

SEQ ID NO: 60053 - protein, 10 aa, synthetic construct
EWWRGDLIGR

SEQ ID NO: 60054 - protein, 10 aa, synthetic construct
EWFRGDHGVL

SEQ ID NO: 60055 - protein, 10 aa, synthetic construct
EWFRGDRGQI

SEQ ID NO: 60056 - protein, 10 aa, synthetic construct
EWFRGDRQGI

SEQ ID NO: 60057 - protein, 10 aa, synthetic construct
EWFRGDRSVV

SEQ ID NO: 60058 - protein, 10 aa, synthetic construct
EWFRGDLIGR

SEQ ID NO: 60059 - protein, 10 aa, synthetic construct
EWFRGDRSQT

SEQ ID NO: 60060 - protein, 10 aa, synthetic construct
EWKRGDHGVL

SEQ ID NO: 60061 - protein, 10 aa, synthetic construct
SSSRGDRGQI

SEQ ID NO: 60062 - protein, 10 aa, synthetic construct
EWKRGDRGQI

SEQ ID NO: 60063 - protein, 10 aa, synthetic construct
EWKRGDRQGI

SEQ ID NO: 60064 - protein, 10 aa, synthetic construct
EWKRGDRSVV

SEQ ID NO: 60065 - protein, 10 aa, synthetic construct
EWKRGDLIGR

SEQ ID NO: 60066 - protein, 10 aa, synthetic construct
EWKRGDRSQT

SEQ ID NO: 60067 - protein, 10 aa, synthetic construct
EWRRGDHVNL

SEQ ID NO: 60068 - protein, 10 aa, synthetic construct
EWRRGDYNSL

SEQ ID NO: 60069 - protein, 10 aa, synthetic construct
EWRRGDYSSV

SEQ ID NO: 60070 - protein, 10 aa, synthetic construct
EWRRGDYTSV

SEQ ID NO: 60071 - protein, 10 aa, synthetic construct
EWRRGDYTSM

SEQ ID NO: 60072 - protein, 10 aa, synthetic construct
QKKRGDYNSL

SEQ ID NO: 60073 - protein, 10 aa, synthetic construct
SSSRGDRQGI

SEQ ID NO: 60074 - protein, 10 aa, synthetic construct
EWHRGDRDYL

SEQ ID NO: 60075 - protein, 10 aa, synthetic construct
EWHRGDYVGL

SEQ ID NO: 60076 - protein, 10 aa, synthetic construct
EWHRGDYSSV

SEQ ID NO: 60077 - protein, 10 aa, synthetic construct
EWHRGDYTSV

SEQ ID NO: 60078 - protein, 10 aa, synthetic construct
EWHRGDQSTL

SEQ ID NO: 60079 - protein, 10 aa, synthetic construct
EWSRGDHVNL

SEQ ID NO: 60080 - protein, 10 aa, synthetic construct
EWSRGDYNSL

SEQ ID NO: 60081 - protein, 10 aa, synthetic construct
EWSRGDYTSM

SEQ ID NO: 60082 - protein, 10 aa, synthetic construct
EWTRGDRDYL

SEQ ID NO: 60083 - protein, 10 aa, synthetic construct
EWTRGDYVGL

SEQ ID NO: 60084 - protein, 10 aa, synthetic construct
SSSRGDRSVV

SEQ ID NO: 60085 - protein, 10 aa, synthetic construct
EWTRGDYSSV

SEQ ID NO: 60086 - protein, 10 aa, synthetic construct
EWTRGDYTSV

SEQ ID NO: 60087 - protein, 10 aa, synthetic construct
EWTRGDQSTL

SEQ ID NO: 60088 - protein, 10 aa, synthetic construct
EWYRGDHGVL

SEQ ID NO: 60089 - protein, 10 aa, synthetic construct
EWYRGDRGQI

SEQ ID NO: 60090 - protein, 10 aa, synthetic construct
EWYRGDRQGI

SEQ ID NO: 60091 - protein, 10 aa, synthetic construct
EWYRGDRSVV

SEQ ID NO: 60092 - protein, 10 aa, synthetic construct
EWYRGDLIGR

SEQ ID NO: 60093 - protein, 10 aa, synthetic construct
EWYRGDRSQT

SEQ ID NO: 60094 - protein, 10 aa, synthetic construct
EWNRGDHGVL

SEQ ID NO: 60095 - protein, 10 aa, synthetic construct
SSSRGDRGVV

SEQ ID NO: 60096 - protein, 10 aa, synthetic construct
EWNRGDRGQI

SEQ ID NO: 60097 - protein, 10 aa, synthetic construct
EWNRGDRQGI

SEQ ID NO: 60098 - protein, 10 aa, synthetic construct
EWNRGDRSVV

SEQ ID NO: 60099 - protein, 10 aa, synthetic construct
EWNRGDLIGR

SEQ ID NO: 60100 - protein, 10 aa, synthetic construct
EWNRGDRSQT

SEQ ID NO: 60101 - protein, 10 aa, synthetic construct
EWQRGDRDYL

SEQ ID NO: 60102 - protein, 10 aa, synthetic construct
EWQRGDYVGL

SEQ ID NO: 60103 - protein, 10 aa, synthetic construct
EWQRGDYSSV

SEQ ID NO: 60104 - protein, 10 aa, synthetic construct
EWQRGDYTSV

SEQ ID NO: 60105 - protein, 10 aa, synthetic construct
EWQRGDQSTL

SEQ ID NO: 60106 - protein, 10 aa, synthetic construct
SSSRGDRSQT

SEQ ID NO: 60107 - protein, 10 aa, synthetic construct
EWDRGDRDYL

SEQ ID NO: 60108 - protein, 10 aa, synthetic construct
EWDRGDYVGL

SEQ ID NO: 60109 - protein, 10 aa, synthetic construct
EWDRGDYSSV

SEQ ID NO: 60110 - protein, 10 aa, synthetic construct
EWDRGDYTSV

SEQ ID NO: 60111 - protein, 10 aa, synthetic construct
EWDRGDQSTL

SEQ ID NO: 60112 - protein, 10 aa, synthetic construct
EWERGDRDYL

SEQ ID NO: 60113 - protein, 10 aa, synthetic construct
EWERGDYVGL

SEQ ID NO: 60114 - protein, 10 aa, synthetic construct
EWERGDYSSV

SEQ ID NO: 60115 - protein, 10 aa, synthetic construct
EWERGDYTSV

SEQ ID NO: 60116 - protein, 10 aa, synthetic construct
EWERGDQSTL

SEQ ID NO: 60117 - protein, 10 aa, synthetic construct
SSTRGDRGQI

SEQ ID NO: 60118 - protein, 10 aa, synthetic construct
EFGRGDHGVL

SEQ ID NO: 60119 - protein, 10 aa, synthetic construct
EFGRGDHVNL

SEQ ID NO: 60120 - protein, 10 aa, synthetic construct
EFGRGDYVGL

SEQ ID NO: 60121 - protein, 10 aa, synthetic construct
EFGRGDYSSV

SEQ ID NO: 60122 - protein, 10 aa, synthetic construct
EFGRGDQSTL

SEQ ID NO: 60123 - protein, 10 aa, synthetic construct
EFGRGDLLLS

SEQ ID NO: 60124 - protein, 10 aa, synthetic construct
EFARGDHGVL

SEQ ID NO: 60125 - protein, 10 aa, synthetic construct
EFARGDHVNL

SEQ ID NO: 60126 - protein, 10 aa, synthetic construct
EFARGDYVGL

SEQ ID NO: 60127 - protein, 10 aa, synthetic construct
EFARGDYSSV

SEQ ID NO: 60128 - protein, 10 aa, synthetic construct
SSTRGDRQGI

SEQ ID NO: 60129 - protein, 10 aa, synthetic construct
EFARGDQSTL

SEQ ID NO: 60130 - protein, 10 aa, synthetic construct
EFARGDLLLS

SEQ ID NO: 60131 - protein, 10 aa, synthetic construct
EFVRGDRGQI

SEQ ID NO: 60132 - protein, 10 aa, synthetic construct
EFVRGDRQGI

SEQ ID NO: 60133 - protein, 10 aa, synthetic construct
EFVRGDRSVV

SEQ ID NO: 60134 - protein, 10 aa, synthetic construct
EFVRGDRGVV

SEQ ID NO: 60135 - protein, 10 aa, synthetic construct
EFVRGDYVGL

SEQ ID NO: 60136 - protein, 10 aa, synthetic construct
EFVRGDQSTL

SEQ ID NO: 60137 - protein, 10 aa, synthetic construct
EFVRGDRSQT

SEQ ID NO: 60138 - protein, 10 aa, synthetic construct
EFVRGDLLLS

SEQ ID NO: 60139 - protein, 10 aa, synthetic construct
SSTRGDRSVV

SEQ ID NO: 60140 - protein, 10 aa, synthetic construct
EFPRGDHGVL

SEQ ID NO: 60141 - protein, 10 aa, synthetic construct
EFPRGDHVNL

SEQ ID NO: 60142 - protein, 10 aa, synthetic construct
EFPRGDYVGL

SEQ ID NO: 60143 - protein, 10 aa, synthetic construct
EFPRGDYSSV

SEQ ID NO: 60144 - protein, 10 aa, synthetic construct
EFPRGDQSTL

SEQ ID NO: 60145 - protein, 10 aa, synthetic construct
EFPRGDLLLS

SEQ ID NO: 60146 - protein, 10 aa, synthetic construct
EFLRGDRGQI

SEQ ID NO: 60147 - protein, 10 aa, synthetic construct
EFLRGDRQGI

SEQ ID NO: 60148 - protein, 10 aa, synthetic construct
EFLRGDRSVV

SEQ ID NO: 60149 - protein, 10 aa, synthetic construct
EFLRGDRGVV

SEQ ID NO: 60150 - protein, 10 aa, synthetic construct
SSTRGDRGVV

SEQ ID NO: 60151 - protein, 10 aa, synthetic construct
EFLRGDYVGL

SEQ ID NO: 60152 - protein, 10 aa, synthetic construct
EFLRGDQSTL

SEQ ID NO: 60153 - protein, 10 aa, synthetic construct
EFLRGDRSQT

SEQ ID NO: 60154 - protein, 10 aa, synthetic construct
EFLRGDLLLS

SEQ ID NO: 60155 - protein, 10 aa, synthetic construct
EFIRGDRSVV

SEQ ID NO: 60156 - protein, 10 aa, synthetic construct
EFIRGDRSQT

SEQ ID NO: 60157 - protein, 10 aa, synthetic construct
EFMRGDRSVV

SEQ ID NO: 60158 - protein, 10 aa, synthetic construct
EFMRGDRSQT

SEQ ID NO: 60159 - protein, 10 aa, synthetic construct
EFWRGDRGQI

SEQ ID NO: 60160 - protein, 10 aa, synthetic construct
EFWRGDRQGI

SEQ ID NO: 60161 - protein, 10 aa, synthetic construct
SSTRGDRSQT

SEQ ID NO: 60162 - protein, 10 aa, synthetic construct
EFWRGDRSVV

SEQ ID NO: 60163 - protein, 10 aa, synthetic construct
EFWRGDRGVV

SEQ ID NO: 60164 - protein, 10 aa, synthetic construct
EFWRGDYVGL

SEQ ID NO: 60165 - protein, 10 aa, synthetic construct
EFWRGDQSTL

SEQ ID NO: 60166 - protein, 10 aa, synthetic construct
EFWRGDRSQT

SEQ ID NO: 60167 - protein, 10 aa, synthetic construct
EFWRGDLLLS

SEQ ID NO: 60168 - protein, 10 aa, synthetic construct
EFKRGDRSVV

SEQ ID NO: 60169 - protein, 10 aa, synthetic construct
EFKRGDRSQT

SEQ ID NO: 60170 - protein, 10 aa, synthetic construct
EFRRGDHGVL

SEQ ID NO: 60171 - protein, 10 aa, synthetic construct
EFRRGDHVNL

SEQ ID NO: 60172 - protein, 10 aa, synthetic construct
SSQRGDRGQI

SEQ ID NO: 60173 - protein, 10 aa, synthetic construct
EFRRGDYVGL

SEQ ID NO: 60174 - protein, 10 aa, synthetic construct
EFRRGDYSSV

SEQ ID NO: 60175 - protein, 10 aa, synthetic construct
EFRRGDQSTL

SEQ ID NO: 60176 - protein, 10 aa, synthetic construct
EFRRGDLLLS

SEQ ID NO: 60177 - protein, 10 aa, synthetic construct
EFHRGDRGQI

SEQ ID NO: 60178 - protein, 10 aa, synthetic construct
EFHRGDRQGI

SEQ ID NO: 60179 - protein, 10 aa, synthetic construct
EFHRGDRSVV

SEQ ID NO: 60180 - protein, 10 aa, synthetic construct
EFHRGDRGVV

SEQ ID NO: 60181 - protein, 10 aa, synthetic construct
EFHRGDYVGL

SEQ ID NO: 60182 - protein, 10 aa, synthetic construct
EFHRGDQSTL

SEQ ID NO: 60183 - protein, 10 aa, synthetic construct
QKKRGDYTSM

SEQ ID NO: 60184 - protein, 10 aa, synthetic construct
SSQRGDRQGI

SEQ ID NO: 60185 - protein, 10 aa, synthetic construct
EFHRGDRSQT

SEQ ID NO: 60186 - protein, 10 aa, synthetic construct
EFHRGDLLLS

SEQ ID NO: 60187 - protein, 10 aa, synthetic construct
EFSRGDRGQI

SEQ ID NO: 60188 - protein, 10 aa, synthetic construct
EFSRGDRQGI

SEQ ID NO: 60189 - protein, 10 aa, synthetic construct
EFSRGDRSVV

SEQ ID NO: 60190 - protein, 10 aa, synthetic construct
EFSRGDRGVV

SEQ ID NO: 60191 - protein, 10 aa, synthetic construct
EFSRGDYVGL

SEQ ID NO: 60192 - protein, 10 aa, synthetic construct
EFSRGDQSTL

SEQ ID NO: 60193 - protein, 10 aa, synthetic construct
EFSRGDRSQT

SEQ ID NO: 60194 - protein, 10 aa, synthetic construct
EFSRGDLLLS

SEQ ID NO: 60195 - protein, 10 aa, synthetic construct
SSQRGDRSVV

SEQ ID NO: 60196 - protein, 10 aa, synthetic construct
EFTRGDRGQI

SEQ ID NO: 60197 - protein, 10 aa, synthetic construct
EFTRGDRQGI

SEQ ID NO: 60198 - protein, 10 aa, synthetic construct
EFTRGDRSVV

SEQ ID NO: 60199 - protein, 10 aa, synthetic construct
EFTRGDRGVV

SEQ ID NO: 60200 - protein, 10 aa, synthetic construct
EFTRGDYVGL

SEQ ID NO: 60201 - protein, 10 aa, synthetic construct
EFTRGDQSTL

SEQ ID NO: 60202 - protein, 10 aa, synthetic construct
EFTRGDRSQT

SEQ ID NO: 60203 - protein, 10 aa, synthetic construct
EFTRGDLLLS

SEQ ID NO: 60204 - protein, 10 aa, synthetic construct
EFYRGDRSVV

SEQ ID NO: 60205 - protein, 10 aa, synthetic construct
EFYRGDRSQT

SEQ ID NO: 60206 - protein, 10 aa, synthetic construct
SSQRGDRGVV

SEQ ID NO: 60207 - protein, 10 aa, synthetic construct
EFNRGDRSVV

SEQ ID NO: 60208 - protein, 10 aa, synthetic construct
EFNRGDRSQT

SEQ ID NO: 60209 - protein, 10 aa, synthetic construct
EFQRGDRGQI

SEQ ID NO: 60210 - protein, 10 aa, synthetic construct
EFQRGDRQGI

SEQ ID NO: 60211 - protein, 10 aa, synthetic construct
EFQRGDRSVV

SEQ ID NO: 60212 - protein, 10 aa, synthetic construct
EFQRGDRGVV

SEQ ID NO: 60213 - protein, 10 aa, synthetic construct
EFQRGDYVGL

SEQ ID NO: 60214 - protein, 10 aa, synthetic construct
EFQRGDQSTL

SEQ ID NO: 60215 - protein, 10 aa, synthetic construct
EFQRGDRSQT

SEQ ID NO: 60216 - protein, 10 aa, synthetic construct
EFQRGDLLLS

SEQ ID NO: 60217 - protein, 10 aa, synthetic construct
SSQRGDRSQT

SEQ ID NO: 60218 - protein, 10 aa, synthetic construct
EFDRGDRGQI

SEQ ID NO: 60219 - protein, 10 aa, synthetic construct
EFDRGDRQGI

SEQ ID NO: 60220 - protein, 10 aa, synthetic construct
EFDRGDRSVV

SEQ ID NO: 60221 - protein, 10 aa, synthetic construct
EFDRGDRGVV

SEQ ID NO: 60222 - protein, 10 aa, synthetic construct
EFDRGDYVGL

SEQ ID NO: 60223 - protein, 10 aa, synthetic construct
EFDRGDQSTL

SEQ ID NO: 60224 - protein, 10 aa, synthetic construct
EFDRGDRSQT

SEQ ID NO: 60225 - protein, 10 aa, synthetic construct
EFDRGDLLLS

SEQ ID NO: 60226 - protein, 10 aa, synthetic construct
EFERGDRGQI

SEQ ID NO: 60227 - protein, 10 aa, synthetic construct
EFERGDRQGI

SEQ ID NO: 60228 - protein, 10 aa, synthetic construct
SSDRGDRGQI

SEQ ID NO: 60229 - protein, 10 aa, synthetic construct
EFERGDRSVV

SEQ ID NO: 60230 - protein, 10 aa, synthetic construct
EFERGDRGVV

SEQ ID NO: 60231 - protein, 10 aa, synthetic construct
EFERGDYVGL

SEQ ID NO: 60232 - protein, 10 aa, synthetic construct
EFERGDQSTL

SEQ ID NO: 60233 - protein, 10 aa, synthetic construct
EFERGDRSQT

SEQ ID NO: 60234 - protein, 10 aa, synthetic construct
EFERGDLLLS

SEQ ID NO: 60235 - protein, 10 aa, synthetic construct
EKGRGDHGVL

SEQ ID NO: 60236 - protein, 10 aa, synthetic construct
EKGRGDHVNL

SEQ ID NO: 60237 - protein, 10 aa, synthetic construct
EKGRGDYVGL

SEQ ID NO: 60238 - protein, 10 aa, synthetic construct
EKGRGDYSSV

SEQ ID NO: 60239 - protein, 10 aa, synthetic construct
SSDRGDRQGI

SEQ ID NO: 60240 - protein, 10 aa, synthetic construct
EKGRGDQSTL

SEQ ID NO: 60241 - protein, 10 aa, synthetic construct
EKGRGDLLLS

SEQ ID NO: 60242 - protein, 10 aa, synthetic construct
EKARGDHGVL

SEQ ID NO: 60243 - protein, 10 aa, synthetic construct
EKARGDHVNL

SEQ ID NO: 60244 - protein, 10 aa, synthetic construct
EKARGDYVGL

SEQ ID NO: 60245 - protein, 10 aa, synthetic construct
EKARGDYSSV

SEQ ID NO: 60246 - protein, 10 aa, synthetic construct
EKARGDQSTL

SEQ ID NO: 60247 - protein, 10 aa, synthetic construct
EKARGDLLLS

SEQ ID NO: 60248 - protein, 10 aa, synthetic construct
EKVRGDRGQI

SEQ ID NO: 60249 - protein, 10 aa, synthetic construct
EKVRGDRQGI

SEQ ID NO: 60250 - protein, 10 aa, synthetic construct
SSDRGDRSVV

SEQ ID NO: 60251 - protein, 10 aa, synthetic construct
EKVRGDRSVV

SEQ ID NO: 60252 - protein, 10 aa, synthetic construct
EKVRGDRGVV

SEQ ID NO: 60253 - protein, 10 aa, synthetic construct
EKVRGDYVGL

SEQ ID NO: 60254 - protein, 10 aa, synthetic construct
EKVRGDQSTL

SEQ ID NO: 60255 - protein, 10 aa, synthetic construct
EKVRGDRSQT

SEQ ID NO: 60256 - protein, 10 aa, synthetic construct
EKVRGDLLLS

SEQ ID NO: 60257 - protein, 10 aa, synthetic construct
EKPRGDHGVL

SEQ ID NO: 60258 - protein, 10 aa, synthetic construct
EKPRGDHVNL

SEQ ID NO: 60259 - protein, 10 aa, synthetic construct
EKPRGDYVGL

SEQ ID NO: 60260 - protein, 10 aa, synthetic construct
EKPRGDYSSV

SEQ ID NO: 60261 - protein, 10 aa, synthetic construct
SSDRGDRGVV

SEQ ID NO: 60262 - protein, 10 aa, synthetic construct
EKPRGDQSTL

SEQ ID NO: 60263 - protein, 10 aa, synthetic construct
EKPRGDLLLS

SEQ ID NO: 60264 - protein, 10 aa, synthetic construct
EKLRGDRGQI

SEQ ID NO: 60265 - protein, 10 aa, synthetic construct
EKLRGDRQGI

SEQ ID NO: 60266 - protein, 10 aa, synthetic construct
EKLRGDRSVV

SEQ ID NO: 60267 - protein, 10 aa, synthetic construct
EKLRGDRGVV

SEQ ID NO: 60268 - protein, 10 aa, synthetic construct
EKLRGDYVGL

SEQ ID NO: 60269 - protein, 10 aa, synthetic construct
EKLRGDQSTL

SEQ ID NO: 60270 - protein, 10 aa, synthetic construct
EKLRGDRSQT

SEQ ID NO: 60271 - protein, 10 aa, synthetic construct
EKLRGDLLLS

SEQ ID NO: 60272 - protein, 10 aa, synthetic construct
SSDRGDRSQT

SEQ ID NO: 60273 - protein, 10 aa, synthetic construct
EKIRGDRSVV

SEQ ID NO: 60274 - protein, 10 aa, synthetic construct
EKIRGDRSQT

SEQ ID NO: 60275 - protein, 10 aa, synthetic construct
EKMRGDRSVV

SEQ ID NO: 60276 - protein, 10 aa, synthetic construct
EKMRGDRSQT

SEQ ID NO: 60277 - protein, 10 aa, synthetic construct
EKWRGDRGQI

SEQ ID NO: 60278 - protein, 10 aa, synthetic construct
EKWRGDRQGI

SEQ ID NO: 60279 - protein, 10 aa, synthetic construct
EKWRGDRSVV

SEQ ID NO: 60280 - protein, 10 aa, synthetic construct
EKWRGDRGVV

SEQ ID NO: 60281 - protein, 10 aa, synthetic construct
EKWRGDYVGL

SEQ ID NO: 60282 - protein, 10 aa, synthetic construct
EKWRGDQSTL

SEQ ID NO: 60283 - protein, 10 aa, synthetic construct
SSERGDRGQI

SEQ ID NO: 60284 - protein, 10 aa, synthetic construct
EKWRGDRSQT

SEQ ID NO: 60285 - protein, 10 aa, synthetic construct
EKWRGDLLLS

SEQ ID NO: 60286 - protein, 10 aa, synthetic construct
EKFRGDRSVV

SEQ ID NO: 60287 - protein, 10 aa, synthetic construct
EKFRGDRSQT

SEQ ID NO: 60288 - protein, 10 aa, synthetic construct
EKRRGDHGVL

SEQ ID NO: 60289 - protein, 10 aa, synthetic construct
EKRRGDHVNL

SEQ ID NO: 60290 - protein, 10 aa, synthetic construct
EKRRGDYVGL

SEQ ID NO: 60291 - protein, 10 aa, synthetic construct
EKRRGDYSSV

SEQ ID NO: 60292 - protein, 10 aa, synthetic construct
EKRRGDQSTL

SEQ ID NO: 60293 - protein, 10 aa, synthetic construct
EKRRGDLLLS

SEQ ID NO: 60294 - protein, 10 aa, synthetic construct
QKKRGDFQNT

SEQ ID NO: 60295 - protein, 10 aa, synthetic construct
SSERGDRQGI

SEQ ID NO: 60296 - protein, 10 aa, synthetic construct
EKHRGDRGQI

SEQ ID NO: 60297 - protein, 10 aa, synthetic construct
EKHRGDRQGI

SEQ ID NO: 60298 - protein, 10 aa, synthetic construct
EKHRGDRSVV

SEQ ID NO: 60299 - protein, 10 aa, synthetic construct
EKHRGDRGVV

SEQ ID NO: 60300 - protein, 10 aa, synthetic construct
EKHRGDYVGL

SEQ ID NO: 60301 - protein, 10 aa, synthetic construct
EKHRGDQSTL

SEQ ID NO: 60302 - protein, 10 aa, synthetic construct
EKHRGDRSQT

SEQ ID NO: 60303 - protein, 10 aa, synthetic construct
EKHRGDLLLS

SEQ ID NO: 60304 - protein, 10 aa, synthetic construct
EKSRGDRGQI

SEQ ID NO: 60305 - protein, 10 aa, synthetic construct
EKSRGDRQGI

SEQ ID NO: 60306 - protein, 10 aa, synthetic construct
SSERGDRSVV

SEQ ID NO: 60307 - protein, 10 aa, synthetic construct
EKSRGDRSVV

SEQ ID NO: 60308 - protein, 10 aa, synthetic construct
EKSRGDRGVV

SEQ ID NO: 60309 - protein, 10 aa, synthetic construct
EKSRGDYVGL

SEQ ID NO: 60310 - protein, 10 aa, synthetic construct
EKSRGDQSTL

SEQ ID NO: 60311 - protein, 10 aa, synthetic construct
EKSRGDRSQT

SEQ ID NO: 60312 - protein, 10 aa, synthetic construct
EKSRGDLLLS

SEQ ID NO: 60313 - protein, 10 aa, synthetic construct
EKTRGDRGQI

SEQ ID NO: 60314 - protein, 10 aa, synthetic construct
EKTRGDRQGI

SEQ ID NO: 60315 - protein, 10 aa, synthetic construct
EKTRGDRSVV

SEQ ID NO: 60316 - protein, 10 aa, synthetic construct
EKTRGDRGVV

SEQ ID NO: 60317 - protein, 10 aa, synthetic construct
SSERGDRGVV

SEQ ID NO: 60318 - protein, 10 aa, synthetic construct
EKTRGDYVGL

SEQ ID NO: 60319 - protein, 10 aa, synthetic construct
EKTRGDQSTL

SEQ ID NO: 60320 - protein, 10 aa, synthetic construct
EKTRGDRSQT

SEQ ID NO: 60321 - protein, 10 aa, synthetic construct
EKTRGDLLLS

SEQ ID NO: 60322 - protein, 10 aa, synthetic construct
EKYRGDRSVV

SEQ ID NO: 60323 - protein, 10 aa, synthetic construct
EKYRGDRSQT

SEQ ID NO: 60324 - protein, 10 aa, synthetic construct
EKQRGDRGQI

SEQ ID NO: 60325 - protein, 10 aa, synthetic construct
EKQRGDRQGI

SEQ ID NO: 60326 - protein, 10 aa, synthetic construct
EKQRGDRSVV

SEQ ID NO: 60327 - protein, 10 aa, synthetic construct
EKQRGDRGVV

SEQ ID NO: 60328 - protein, 10 aa, synthetic construct
SSERGDRSQT

SEQ ID NO: 60329 - protein, 10 aa, synthetic construct
EKQRGDYVGL

SEQ ID NO: 60330 - protein, 10 aa, synthetic construct
EKQRGDQSTL

SEQ ID NO: 60331 - protein, 10 aa, synthetic construct
EKQRGDRSQT

SEQ ID NO: 60332 - protein, 10 aa, synthetic construct
EKQRGDLLLS

SEQ ID NO: 60333 - protein, 10 aa, synthetic construct
EKDRGDRGQI

SEQ ID NO: 60334 - protein, 10 aa, synthetic construct
EKDRGDRQGI

SEQ ID NO: 60335 - protein, 10 aa, synthetic construct
EKDRGDRSVV

SEQ ID NO: 60336 - protein, 10 aa, synthetic construct
EKDRGDRGVV

SEQ ID NO: 60337 - protein, 10 aa, synthetic construct
EKDRGDYVGL

SEQ ID NO: 60338 - protein, 10 aa, synthetic construct
EKDRGDQSTL

SEQ ID NO: 60339 - protein, 10 aa, synthetic construct
STGRGDRGQI

SEQ ID NO: 60340 - protein, 10 aa, synthetic construct
EKDRGDRSQT

SEQ ID NO: 60341 - protein, 10 aa, synthetic construct
EKDRGDLLLS

SEQ ID NO: 60342 - protein, 10 aa, synthetic construct
EKERGDRGQI

SEQ ID NO: 60343 - protein, 10 aa, synthetic construct
EKERGDRQGI

SEQ ID NO: 60344 - protein, 10 aa, synthetic construct
EKERGDRSVV

SEQ ID NO: 60345 - protein, 10 aa, synthetic construct
EKERGDRGVV

SEQ ID NO: 60346 - protein, 10 aa, synthetic construct
EKERGDYVGL

SEQ ID NO: 60347 - protein, 10 aa, synthetic construct
EKERGDQSTL

SEQ ID NO: 60348 - protein, 10 aa, synthetic construct
EKERGDRSQT

SEQ ID NO: 60349 - protein, 10 aa, synthetic construct
EKERGDLLLS

SEQ ID NO: 60350 - protein, 10 aa, synthetic construct
STGRGDRQGI

SEQ ID NO: 60351 - protein, 10 aa, synthetic construct
ERGRGDYTSV

SEQ ID NO: 60352 - protein, 10 aa, synthetic construct
ERGRGDYTSM

SEQ ID NO: 60353 - protein, 10 aa, synthetic construct
ERARGDYTSV

SEQ ID NO: 60354 - protein, 10 aa, synthetic construct
ERARGDYTSM

SEQ ID NO: 60355 - protein, 10 aa, synthetic construct
ERVRGDHVNL

SEQ ID NO: 60356 - protein, 10 aa, synthetic construct
ERVRGDRDYL

SEQ ID NO: 60357 - protein, 10 aa, synthetic construct
ERVRGDYSSV

SEQ ID NO: 60358 - protein, 10 aa, synthetic construct
ERVRGDLTVT

SEQ ID NO: 60359 - protein, 10 aa, synthetic construct
ERVRGDLIGR

SEQ ID NO: 60360 - protein, 10 aa, synthetic construct
ERPRGDYTSV

SEQ ID NO: 60361 - protein, 10 aa, synthetic construct
STGRGDRSVV

SEQ ID NO: 60362 - protein, 10 aa, synthetic construct
ERPRGDYTSM

SEQ ID NO: 60363 - protein, 10 aa, synthetic construct
ERLRGDHVNL

SEQ ID NO: 60364 - protein, 10 aa, synthetic construct
ERLRGDRDYL

SEQ ID NO: 60365 - protein, 10 aa, synthetic construct
ERLRGDYSSV

SEQ ID NO: 60366 - protein, 10 aa, synthetic construct
ERLRGDLTVT

SEQ ID NO: 60367 - protein, 10 aa, synthetic construct
ERLRGDLIGR

SEQ ID NO: 60368 - protein, 10 aa, synthetic construct
ERIRGDHGVL

SEQ ID NO: 60369 - protein, 10 aa, synthetic construct
ERIRGDHVNL

SEQ ID NO: 60370 - protein, 10 aa, synthetic construct
ERIRGDYVGL

SEQ ID NO: 60371 - protein, 10 aa, synthetic construct
ERIRGDYSSV

SEQ ID NO: 60372 - protein, 10 aa, synthetic construct
STGRGDRGVV

SEQ ID NO: 60373 - protein, 10 aa, synthetic construct
ERIRGDQSTL

SEQ ID NO: 60374 - protein, 10 aa, synthetic construct
ERIRGDLLLS

SEQ ID NO: 60375 - protein, 10 aa, synthetic construct
ERMRGDHGVL

SEQ ID NO: 60376 - protein, 10 aa, synthetic construct
ERMRGDHVNL

SEQ ID NO: 60377 - protein, 10 aa, synthetic construct
ERMRGDYVGL

SEQ ID NO: 60378 - protein, 10 aa, synthetic construct
ERMRGDYSSV

SEQ ID NO: 60379 - protein, 10 aa, synthetic construct
ERMRGDQSTL

SEQ ID NO: 60380 - protein, 10 aa, synthetic construct
ERMRGDLLLS

SEQ ID NO: 60381 - protein, 10 aa, synthetic construct
ERWRGDHVNL

SEQ ID NO: 60382 - protein, 10 aa, synthetic construct
ERWRGDRDYL

SEQ ID NO: 60383 - protein, 10 aa, synthetic construct
STGRGDRSQT

SEQ ID NO: 60384 - protein, 10 aa, synthetic construct
ERWRGDYSSV

SEQ ID NO: 60385 - protein, 10 aa, synthetic construct
ERWRGDLTVT

SEQ ID NO: 60386 - protein, 10 aa, synthetic construct
ERWRGDLIGR

SEQ ID NO: 60387 - protein, 10 aa, synthetic construct
ERFRGDHGVL

SEQ ID NO: 60388 - protein, 10 aa, synthetic construct
ERFRGDHVNL

SEQ ID NO: 60389 - protein, 10 aa, synthetic construct
ERFRGDYVGL

SEQ ID NO: 60390 - protein, 10 aa, synthetic construct
ERFRGDYSSV

SEQ ID NO: 60391 - protein, 10 aa, synthetic construct
ERFRGDQSTL

SEQ ID NO: 60392 - protein, 10 aa, synthetic construct
ERFRGDLLLS

SEQ ID NO: 60393 - protein, 10 aa, synthetic construct
ERKRGDHGVL

SEQ ID NO: 60394 - protein, 10 aa, synthetic construct
STARGDRGQI

SEQ ID NO: 60395 - protein, 10 aa, synthetic construct
ERKRGDHVNL

SEQ ID NO: 60396 - protein, 10 aa, synthetic construct
ERKRGDYVGL

SEQ ID NO: 60397 - protein, 10 aa, synthetic construct
ERKRGDYSSV

SEQ ID NO: 60398 - protein, 10 aa, synthetic construct
ERKRGDQSTL

SEQ ID NO: 60399 - protein, 10 aa, synthetic construct
ERKRGDLLLS

SEQ ID NO: 60400 - protein, 10 aa, synthetic construct
ERRRGDYTSV

SEQ ID NO: 60401 - protein, 10 aa, synthetic construct
ERRRGDYTSM

SEQ ID NO: 60402 - protein, 10 aa, synthetic construct
ERHRGDHVNL

SEQ ID NO: 60403 - protein, 10 aa, synthetic construct
ERHRGDRDYL

SEQ ID NO: 60404 - protein, 10 aa, synthetic construct
ERHRGDYSSV

SEQ ID NO: 60405 - protein, 10 aa, synthetic construct
QKNRGDYNSL

SEQ ID NO: 60406 - protein, 10 aa, synthetic construct
STARGDRQGI

SEQ ID NO: 60407 - protein, 10 aa, synthetic construct
ERHRGDLTVT

SEQ ID NO: 60408 - protein, 10 aa, synthetic construct
ERHRGDLIGR

SEQ ID NO: 60409 - protein, 10 aa, synthetic construct
ERSRGDHVNL

SEQ ID NO: 60410 - protein, 10 aa, synthetic construct
ERSRGDRDYL

SEQ ID NO: 60411 - protein, 10 aa, synthetic construct
ERSRGDYSSV

SEQ ID NO: 60412 - protein, 10 aa, synthetic construct
ERSRGDLTVT

SEQ ID NO: 60413 - protein, 10 aa, synthetic construct
ERSRGDLIGR

SEQ ID NO: 60414 - protein, 10 aa, synthetic construct
ERTRGDHVNL

SEQ ID NO: 60415 - protein, 10 aa, synthetic construct
ERTRGDRDYL

SEQ ID NO: 60416 - protein, 10 aa, synthetic construct
ERTRGDYSSV

SEQ ID NO: 60417 - protein, 10 aa, synthetic construct
STARGDRSVV

SEQ ID NO: 60418 - protein, 10 aa, synthetic construct
ERTRGDLTVT

SEQ ID NO: 60419 - protein, 10 aa, synthetic construct
ERTRGDLIGR

SEQ ID NO: 60420 - protein, 10 aa, synthetic construct
ERYRGDHGVL

SEQ ID NO: 60421 - protein, 10 aa, synthetic construct
ERYRGDHVNL

SEQ ID NO: 60422 - protein, 10 aa, synthetic construct
ERYRGDYVGL

SEQ ID NO: 60423 - protein, 10 aa, synthetic construct
ERYRGDYSSV

SEQ ID NO: 60424 - protein, 10 aa, synthetic construct
ERYRGDQSTL

SEQ ID NO: 60425 - protein, 10 aa, synthetic construct
ERYRGDLLLS

SEQ ID NO: 60426 - protein, 10 aa, synthetic construct
ERNRGDHGVL

SEQ ID NO: 60427 - protein, 10 aa, synthetic construct
ERNRGDHVNL

SEQ ID NO: 60428 - protein, 10 aa, synthetic construct
STARGDRGVV

SEQ ID NO: 60429 - protein, 10 aa, synthetic construct
ERNRGDYVGL

SEQ ID NO: 60430 - protein, 10 aa, synthetic construct
ERNRGDYSSV

SEQ ID NO: 60431 - protein, 10 aa, synthetic construct
ERNRGDQSTL

SEQ ID NO: 60432 - protein, 10 aa, synthetic construct
ERNRGDLLLS

SEQ ID NO: 60433 - protein, 10 aa, synthetic construct
ERQRGDHVNL

SEQ ID NO: 60434 - protein, 10 aa, synthetic construct
ERQRGDRDYL

SEQ ID NO: 60435 - protein, 10 aa, synthetic construct
ERQRGDYSSV

SEQ ID NO: 60436 - protein, 10 aa, synthetic construct
ERQRGDLTVT

SEQ ID NO: 60437 - protein, 10 aa, synthetic construct
ERQRGDLIGR

SEQ ID NO: 60438 - protein, 10 aa, synthetic construct
ERDRGDHVNL

SEQ ID NO: 60439 - protein, 10 aa, synthetic construct
STARGDRSQT

SEQ ID NO: 60440 - protein, 10 aa, synthetic construct
ERDRGDRDYL

SEQ ID NO: 60441 - protein, 10 aa, synthetic construct
ERDRGDYSSV

SEQ ID NO: 60442 - protein, 10 aa, synthetic construct
ERDRGDLTVT

SEQ ID NO: 60443 - protein, 10 aa, synthetic construct
ERDRGDLIGR

SEQ ID NO: 60444 - protein, 10 aa, synthetic construct
ERERGDHVNL

SEQ ID NO: 60445 - protein, 10 aa, synthetic construct
ERERGDRDYL

SEQ ID NO: 60446 - protein, 10 aa, synthetic construct
ERERGDYSSV

SEQ ID NO: 60447 - protein, 10 aa, synthetic construct
ERERGDLTVT

SEQ ID NO: 60448 - protein, 10 aa, synthetic construct
ERERGDLIGR

SEQ ID NO: 60449 - protein, 10 aa, synthetic construct
EHGRGDHVNL

SEQ ID NO: 60450 - protein, 10 aa, synthetic construct
STPRGDRGQI

SEQ ID NO: 60451 - protein, 10 aa, synthetic construct
EHGRGDRDYL

SEQ ID NO: 60452 - protein, 10 aa, synthetic construct
EHGRGDYSSV

SEQ ID NO: 60453 - protein, 10 aa, synthetic construct
EHGRGDLTVT

SEQ ID NO: 60454 - protein, 10 aa, synthetic construct
EHGRGDLIGR

SEQ ID NO: 60455 - protein, 10 aa, synthetic construct
EHARGDHVNL

SEQ ID NO: 60456 - protein, 10 aa, synthetic construct
EHARGDRDYL

SEQ ID NO: 60457 - protein, 10 aa, synthetic construct
EHARGDYSSV

SEQ ID NO: 60458 - protein, 10 aa, synthetic construct
EHARGDLTVT

SEQ ID NO: 60459 - protein, 10 aa, synthetic construct
EHARGDLIGR

SEQ ID NO: 60460 - protein, 10 aa, synthetic construct
EHVRGDHGVL

SEQ ID NO: 60461 - protein, 10 aa, synthetic construct
STPRGDRQGI

SEQ ID NO: 60462 - protein, 10 aa, synthetic construct
EHVRGDHVNL

SEQ ID NO: 60463 - protein, 10 aa, synthetic construct
EHVRGDYVGL

SEQ ID NO: 60464 - protein, 10 aa, synthetic construct
EHVRGDYSSV

SEQ ID NO: 60465 - protein, 10 aa, synthetic construct
EHVRGDQSTL

SEQ ID NO: 60466 - protein, 10 aa, synthetic construct
EHVRGDLLLS

SEQ ID NO: 60467 - protein, 10 aa, synthetic construct
EHPRGDHVNL

SEQ ID NO: 60468 - protein, 10 aa, synthetic construct
EHPRGDRDYL

SEQ ID NO: 60469 - protein, 10 aa, synthetic construct
EHPRGDYSSV

SEQ ID NO: 60470 - protein, 10 aa, synthetic construct
EHPRGDLTVT

SEQ ID NO: 60471 - protein, 10 aa, synthetic construct
EHPRGDLIGR

SEQ ID NO: 60472 - protein, 10 aa, synthetic construct
STPRGDRSVV

SEQ ID NO: 60473 - protein, 10 aa, synthetic construct
EHLRGDHGVL

SEQ ID NO: 60474 - protein, 10 aa, synthetic construct
EHLRGDHVNL

SEQ ID NO: 60475 - protein, 10 aa, synthetic construct
EHLRGDYVGL

SEQ ID NO: 60476 - protein, 10 aa, synthetic construct
EHLRGDYSSV

SEQ ID NO: 60477 - protein, 10 aa, synthetic construct
EHLRGDQSTL

SEQ ID NO: 60478 - protein, 10 aa, synthetic construct
EHLRGDLLLS

SEQ ID NO: 60479 - protein, 10 aa, synthetic construct
EHIRGDRGQI

SEQ ID NO: 60480 - protein, 10 aa, synthetic construct
EHIRGDRQGI

SEQ ID NO: 60481 - protein, 10 aa, synthetic construct
EHIRGDRSVV

SEQ ID NO: 60482 - protein, 10 aa, synthetic construct
EHIRGDRGVV

SEQ ID NO: 60483 - protein, 10 aa, synthetic construct
STPRGDRGVV

SEQ ID NO: 60484 - protein, 10 aa, synthetic construct
EHIRGDYVGL

SEQ ID NO: 60485 - protein, 10 aa, synthetic construct
EHIRGDQSTL

SEQ ID NO: 60486 - protein, 10 aa, synthetic construct
EHIRGDRSQT

SEQ ID NO: 60487 - protein, 10 aa, synthetic construct
EHIRGDLLLS

SEQ ID NO: 60488 - protein, 10 aa, synthetic construct
EHMRGDRGQI

SEQ ID NO: 60489 - protein, 10 aa, synthetic construct
EHMRGDRQGI

SEQ ID NO: 60490 - protein, 10 aa, synthetic construct
EHMRGDRSVV

SEQ ID NO: 60491 - protein, 10 aa, synthetic construct
EHMRGDRGVV

SEQ ID NO: 60492 - protein, 10 aa, synthetic construct
EHMRGDYVGL

SEQ ID NO: 60493 - protein, 10 aa, synthetic construct
EHMRGDQSTL

SEQ ID NO: 60494 - protein, 10 aa, synthetic construct
STPRGDRSQT

SEQ ID NO: 60495 - protein, 10 aa, synthetic construct
EHMRGDRSQT

SEQ ID NO: 60496 - protein, 10 aa, synthetic construct
EHMRGDLLLS

SEQ ID NO: 60497 - protein, 10 aa, synthetic construct
EHWRGDHGVL

SEQ ID NO: 60498 - protein, 10 aa, synthetic construct
EHWRGDHVNL

SEQ ID NO: 60499 - protein, 10 aa, synthetic construct
EHWRGDYVGL

SEQ ID NO: 60500 - protein, 10 aa, synthetic construct
EHWRGDYSSV

SEQ ID NO: 60501 - protein, 10 aa, synthetic construct
EHWRGDQSTL

SEQ ID NO: 60502 - protein, 10 aa, synthetic construct
EHWRGDLLLS

SEQ ID NO: 60503 - protein, 10 aa, synthetic construct
EHFRGDRGQI

SEQ ID NO: 60504 - protein, 10 aa, synthetic construct
EHFRGDRQGI

SEQ ID NO: 60505 - protein, 10 aa, synthetic construct
STRRGDRGQI

SEQ ID NO: 60506 - protein, 10 aa, synthetic construct
EHFRGDRSVV

SEQ ID NO: 60507 - protein, 10 aa, synthetic construct
EHFRGDRGVV

SEQ ID NO: 60508 - protein, 10 aa, synthetic construct
EHFRGDYVGL

SEQ ID NO: 60509 - protein, 10 aa, synthetic construct
EHFRGDQSTL

SEQ ID NO: 60510 - protein, 10 aa, synthetic construct
EHFRGDRSQT

SEQ ID NO: 60511 - protein, 10 aa, synthetic construct
EHFRGDLLLS

SEQ ID NO: 60512 - protein, 10 aa, synthetic construct
EHKRGDRGQI

SEQ ID NO: 60513 - protein, 10 aa, synthetic construct
EHKRGDRQGI

SEQ ID NO: 60514 - protein, 10 aa, synthetic construct
EHKRGDRSVV

SEQ ID NO: 60515 - protein, 10 aa, synthetic construct
EHKRGDRGVV

SEQ ID NO: 60516 - protein, 10 aa, synthetic construct
QKNRGDYTSM

SEQ ID NO: 60517 - protein, 10 aa, synthetic construct
STRRGDRQGI

SEQ ID NO: 60518 - protein, 10 aa, synthetic construct
EHKRGDYVGL

SEQ ID NO: 60519 - protein, 10 aa, synthetic construct
EHKRGDQSTL

SEQ ID NO: 60520 - protein, 10 aa, synthetic construct
EHKRGDRSQT

SEQ ID NO: 60521 - protein, 10 aa, synthetic construct
EHKRGDLLLS

SEQ ID NO: 60522 - protein, 10 aa, synthetic construct
EHRRGDHVNL

SEQ ID NO: 60523 - protein, 10 aa, synthetic construct
EHRRGDRDYL

SEQ ID NO: 60524 - protein, 10 aa, synthetic construct
EHRRGDYSSV

SEQ ID NO: 60525 - protein, 10 aa, synthetic construct
EHRRGDLTVT

SEQ ID NO: 60526 - protein, 10 aa, synthetic construct
EHRRGDLIGR

SEQ ID NO: 60527 - protein, 10 aa, synthetic construct
EHHRGDHGVL

SEQ ID NO: 60528 - protein, 10 aa, synthetic construct
STRRGDRSVV

SEQ ID NO: 60529 - protein, 10 aa, synthetic construct
EHHRGDHVNL

SEQ ID NO: 60530 - protein, 10 aa, synthetic construct
EHHRGDYVGL

SEQ ID NO: 60531 - protein, 10 aa, synthetic construct
EHHRGDYSSV

SEQ ID NO: 60532 - protein, 10 aa, synthetic construct
EHHRGDQSTL

SEQ ID NO: 60533 - protein, 10 aa, synthetic construct
EHHRGDLLLS

SEQ ID NO: 60534 - protein, 10 aa, synthetic construct
EHSRGDHGVL

SEQ ID NO: 60535 - protein, 10 aa, synthetic construct
EHSRGDHVNL

SEQ ID NO: 60536 - protein, 10 aa, synthetic construct
EHSRGDYVGL

SEQ ID NO: 60537 - protein, 10 aa, synthetic construct
EHSRGDYSSV

SEQ ID NO: 60538 - protein, 10 aa, synthetic construct
EHSRGDQSTL

SEQ ID NO: 60539 - protein, 10 aa, synthetic construct
STRRGDRGVV

SEQ ID NO: 60540 - protein, 10 aa, synthetic construct
EHSRGDLLLS

SEQ ID NO: 60541 - protein, 10 aa, synthetic construct
EHTRGDHGVL

SEQ ID NO: 60542 - protein, 10 aa, synthetic construct
EHTRGDHVNL

SEQ ID NO: 60543 - protein, 10 aa, synthetic construct
EHTRGDYVGL

SEQ ID NO: 60544 - protein, 10 aa, synthetic construct
EHTRGDYSSV

SEQ ID NO: 60545 - protein, 10 aa, synthetic construct
EHTRGDQSTL

SEQ ID NO: 60546 - protein, 10 aa, synthetic construct
EHTRGDLLLS

SEQ ID NO: 60547 - protein, 10 aa, synthetic construct
EHYRGDRGQI

SEQ ID NO: 60548 - protein, 10 aa, synthetic construct
EHYRGDRQGI

SEQ ID NO: 60549 - protein, 10 aa, synthetic construct
EHYRGDRSVV

SEQ ID NO: 60550 - protein, 10 aa, synthetic construct
STRRGDRSQT

SEQ ID NO: 60551 - protein, 10 aa, synthetic construct
EHYRGDRGVV

SEQ ID NO: 60552 - protein, 10 aa, synthetic construct
EHYRGDYVGL

SEQ ID NO: 60553 - protein, 10 aa, synthetic construct
EHYRGDQSTL

SEQ ID NO: 60554 - protein, 10 aa, synthetic construct
EHYRGDRSQT

SEQ ID NO: 60555 - protein, 10 aa, synthetic construct
EHYRGDLLLS

SEQ ID NO: 60556 - protein, 10 aa, synthetic construct
EHNRGDRGQI

SEQ ID NO: 60557 - protein, 10 aa, synthetic construct
EHNRGDRQGI

SEQ ID NO: 60558 - protein, 10 aa, synthetic construct
EHNRGDRSVV

SEQ ID NO: 60559 - protein, 10 aa, synthetic construct
EHNRGDRGVV

SEQ ID NO: 60560 - protein, 10 aa, synthetic construct
EHNRGDYVGL

SEQ ID NO: 60561 - protein, 10 aa, synthetic construct
SQGRGDRGQI

SEQ ID NO: 60562 - protein, 10 aa, synthetic construct
EHNRGDQSTL

SEQ ID NO: 60563 - protein, 10 aa, synthetic construct
EHNRGDRSQT

SEQ ID NO: 60564 - protein, 10 aa, synthetic construct
EHNRGDLLLS

SEQ ID NO: 60565 - protein, 10 aa, synthetic construct
EHQRGDHGVL

SEQ ID NO: 60566 - protein, 10 aa, synthetic construct
EHQRGDHVNL

SEQ ID NO: 60567 - protein, 10 aa, synthetic construct
EHQRGDYVGL

SEQ ID NO: 60568 - protein, 10 aa, synthetic construct
EHQRGDYSSV

SEQ ID NO: 60569 - protein, 10 aa, synthetic construct
EHQRGDQSTL

SEQ ID NO: 60570 - protein, 10 aa, synthetic construct
EHQRGDLLLS

SEQ ID NO: 60571 - protein, 10 aa, synthetic construct
EHDRGDHGVL

SEQ ID NO: 60572 - protein, 10 aa, synthetic construct
SQGRGDRQGI

SEQ ID NO: 60573 - protein, 10 aa, synthetic construct
EHDRGDHVNL

SEQ ID NO: 60574 - protein, 10 aa, synthetic construct
EHDRGDYVGL

SEQ ID NO: 60575 - protein, 10 aa, synthetic construct
EHDRGDYSSV

SEQ ID NO: 60576 - protein, 10 aa, synthetic construct
EHDRGDQSTL

SEQ ID NO: 60577 - protein, 10 aa, synthetic construct
EHDRGDLLLS

SEQ ID NO: 60578 - protein, 10 aa, synthetic construct
EHERGDHGVL

SEQ ID NO: 60579 - protein, 10 aa, synthetic construct
EHERGDHVNL

SEQ ID NO: 60580 - protein, 10 aa, synthetic construct
EHERGDYVGL

SEQ ID NO: 60581 - protein, 10 aa, synthetic construct
EHERGDYSSV

SEQ ID NO: 60582 - protein, 10 aa, synthetic construct
EHERGDQSTL

SEQ ID NO: 60583 - protein, 10 aa, synthetic construct
SQGRGDRSVV

SEQ ID NO: 60584 - protein, 10 aa, synthetic construct
EHERGDLLLS

SEQ ID NO: 60585 - protein, 10 aa, synthetic construct
ESGRGDYNSL

SEQ ID NO: 60586 - protein, 10 aa, synthetic construct
ESGRGDYTSV

SEQ ID NO: 60587 - protein, 10 aa, synthetic construct
ESGRGDYTSM

SEQ ID NO: 60588 - protein, 10 aa, synthetic construct
ESGRGDFQNT

SEQ ID NO: 60589 - protein, 10 aa, synthetic construct
ESARGDYNSL

SEQ ID NO: 60590 - protein, 10 aa, synthetic construct
ESARGDYTSV

SEQ ID NO: 60591 - protein, 10 aa, synthetic construct
ESARGDYTSM

SEQ ID NO: 60592 - protein, 10 aa, synthetic construct
ESARGDFQNT

SEQ ID NO: 60593 - protein, 10 aa, synthetic construct
ESVRGDRDYL

SEQ ID NO: 60594 - protein, 10 aa, synthetic construct
SQGRGDRGVV

SEQ ID NO: 60595 - protein, 10 aa, synthetic construct
ESVRGDYTSV

SEQ ID NO: 60596 - protein, 10 aa, synthetic construct
ESVRGDLTVT

SEQ ID NO: 60597 - protein, 10 aa, synthetic construct
ESVRGDLIGR

SEQ ID NO: 60598 - protein, 10 aa, synthetic construct
ESLRGDRDYL

SEQ ID NO: 60599 - protein, 10 aa, synthetic construct
ESLRGDYTSV

SEQ ID NO: 60600 - protein, 10 aa, synthetic construct
ESLRGDLTVT

SEQ ID NO: 60601 - protein, 10 aa, synthetic construct
ESLRGDLIGR

SEQ ID NO: 60602 - protein, 10 aa, synthetic construct
ESIRGDHGVL

SEQ ID NO: 60603 - protein, 10 aa, synthetic construct
ESIRGDHVNL

SEQ ID NO: 60604 - protein, 10 aa, synthetic construct
ESIRGDRDYL

SEQ ID NO: 60605 - protein, 10 aa, synthetic construct
SQGRGDRSQT

SEQ ID NO: 60606 - protein, 10 aa, synthetic construct
ESIRGDYSSV

SEQ ID NO: 60607 - protein, 10 aa, synthetic construct
ESIRGDLTVT

SEQ ID NO: 60608 - protein, 10 aa, synthetic construct
ESMRGDHGVL

SEQ ID NO: 60609 - protein, 10 aa, synthetic construct
ESMRGDHVNL

SEQ ID NO: 60610 - protein, 10 aa, synthetic construct
ESMRGDRDYL

SEQ ID NO: 60611 - protein, 10 aa, synthetic construct
ESMRGDYSSV

SEQ ID NO: 60612 - protein, 10 aa, synthetic construct
ESMRGDLTVT

SEQ ID NO: 60613 - protein, 10 aa, synthetic construct
ESWRGDRDYL

SEQ ID NO: 60614 - protein, 10 aa, synthetic construct
ESWRGDYTSV

SEQ ID NO: 60615 - protein, 10 aa, synthetic construct
ESWRGDLTVT

SEQ ID NO: 60616 - protein, 10 aa, synthetic construct
SQARGDRGQI

SEQ ID NO: 60617 - protein, 10 aa, synthetic construct
ESWRGDLIGR

SEQ ID NO: 60618 - protein, 10 aa, synthetic construct
ESFRGDHGVL

SEQ ID NO: 60619 - protein, 10 aa, synthetic construct
ESFRGDHVNL

SEQ ID NO: 60620 - protein, 10 aa, synthetic construct
ESFRGDRDYL

SEQ ID NO: 60621 - protein, 10 aa, synthetic construct
ESFRGDYSSV

SEQ ID NO: 60622 - protein, 10 aa, synthetic construct
ESFRGDLTVT

SEQ ID NO: 60623 - protein, 10 aa, synthetic construct
ESKRGDHGVL

SEQ ID NO: 60624 - protein, 10 aa, synthetic construct
ESKRGDHVNL

SEQ ID NO: 60625 - protein, 10 aa, synthetic construct
ESKRGDRDYL

SEQ ID NO: 60626 - protein, 10 aa, synthetic construct
ESKRGDYSSV

SEQ ID NO: 60627 - protein, 10 aa, synthetic construct
SKKRGDHGVL

SEQ ID NO: 60628 - protein, 10 aa, synthetic construct
QKNRGDFQNT

SEQ ID NO: 60629 - protein, 10 aa, synthetic construct
SQARGDRQGI

SEQ ID NO: 60630 - protein, 10 aa, synthetic construct
ESKRGDLTVT

SEQ ID NO: 60631 - protein, 10 aa, synthetic construct
ESRRGDYNSL

SEQ ID NO: 60632 - protein, 10 aa, synthetic construct
ESRRGDYTSV

SEQ ID NO: 60633 - protein, 10 aa, synthetic construct
ESRRGDYTSM

SEQ ID NO: 60634 - protein, 10 aa, synthetic construct
ESRRGDFQNT

SEQ ID NO: 60635 - protein, 10 aa, synthetic construct
ESHRGDRDYL

SEQ ID NO: 60636 - protein, 10 aa, synthetic construct
ESHRGDYTSV

SEQ ID NO: 60637 - protein, 10 aa, synthetic construct
ESHRGDLTVT

SEQ ID NO: 60638 - protein, 10 aa, synthetic construct
ESHRGDLIGR

SEQ ID NO: 60639 - protein, 10 aa, synthetic construct
ESSRGDRDYL

SEQ ID NO: 60640 - protein, 10 aa, synthetic construct
SQARGDRSVV

SEQ ID NO: 60641 - protein, 10 aa, synthetic construct
ESSRGDYTSV

SEQ ID NO: 60642 - protein, 10 aa, synthetic construct
ESSRGDLTVT

SEQ ID NO: 60643 - protein, 10 aa, synthetic construct
ESSRGDLIGR

SEQ ID NO: 60644 - protein, 10 aa, synthetic construct
ESTRGDRDYL

SEQ ID NO: 60645 - protein, 10 aa, synthetic construct
ESTRGDYTSV

SEQ ID NO: 60646 - protein, 10 aa, synthetic construct
ESTRGDLTVT

SEQ ID NO: 60647 - protein, 10 aa, synthetic construct
ESTRGDLIGR

SEQ ID NO: 60648 - protein, 10 aa, synthetic construct
ESYRGDHGVL

SEQ ID NO: 60649 - protein, 10 aa, synthetic construct
ESYRGDHVNL

SEQ ID NO: 60650 - protein, 10 aa, synthetic construct
ESYRGDRDYL

SEQ ID NO: 60651 - protein, 10 aa, synthetic construct
SQARGDRGVV

SEQ ID NO: 60652 - protein, 10 aa, synthetic construct
ESYRGDYSSV

SEQ ID NO: 60653 - protein, 10 aa, synthetic construct
ESYRGDLTVT

SEQ ID NO: 60654 - protein, 10 aa, synthetic construct
ESNRGDHGVL

SEQ ID NO: 60655 - protein, 10 aa, synthetic construct
ESNRGDHVNL

SEQ ID NO: 60656 - protein, 10 aa, synthetic construct
ESNRGDRDYL

SEQ ID NO: 60657 - protein, 10 aa, synthetic construct
ESNRGDYSSV

SEQ ID NO: 60658 - protein, 10 aa, synthetic construct
ESNRGDLTVT

SEQ ID NO: 60659 - protein, 10 aa, synthetic construct
ESQRGDRDYL

SEQ ID NO: 60660 - protein, 10 aa, synthetic construct
ESQRGDYTSV

SEQ ID NO: 60661 - protein, 10 aa, synthetic construct
ESQRGDLTVT

SEQ ID NO: 60662 - protein, 10 aa, synthetic construct
SQARGDRSQT

SEQ ID NO: 60663 - protein, 10 aa, synthetic construct
ESQRGDLIGR

SEQ ID NO: 60664 - protein, 10 aa, synthetic construct
ESDRGDRDYL

SEQ ID NO: 60665 - protein, 10 aa, synthetic construct
ESDRGDYTSV

SEQ ID NO: 60666 - protein, 10 aa, synthetic construct
ESDRGDLTVT

SEQ ID NO: 60667 - protein, 10 aa, synthetic construct
ESDRGDLIGR

SEQ ID NO: 60668 - protein, 10 aa, synthetic construct
ESERGDRDYL

SEQ ID NO: 60669 - protein, 10 aa, synthetic construct
ESERGDYTSV

SEQ ID NO: 60670 - protein, 10 aa, synthetic construct
ESERGDLTVT

SEQ ID NO: 60671 - protein, 10 aa, synthetic construct
ESERGDLIGR

SEQ ID NO: 60672 - protein, 10 aa, synthetic construct
ETGRGDHVNL

SEQ ID NO: 60673 - protein, 10 aa, synthetic construct
SQPRGDRGQI

SEQ ID NO: 60674 - protein, 10 aa, synthetic construct
ETGRGDRDYL

SEQ ID NO: 60675 - protein, 10 aa, synthetic construct
ETGRGDYSSV

SEQ ID NO: 60676 - protein, 10 aa, synthetic construct
ETGRGDLTVT

SEQ ID NO: 60677 - protein, 10 aa, synthetic construct
ETGRGDLIGR

SEQ ID NO: 60678 - protein, 10 aa, synthetic construct
ETARGDHVNL

SEQ ID NO: 60679 - protein, 10 aa, synthetic construct
ETARGDRDYL

SEQ ID NO: 60680 - protein, 10 aa, synthetic construct
ETARGDYSSV

SEQ ID NO: 60681 - protein, 10 aa, synthetic construct
ETARGDLTVT

SEQ ID NO: 60682 - protein, 10 aa, synthetic construct
ETARGDLIGR

SEQ ID NO: 60683 - protein, 10 aa, synthetic construct
ETVRGDHGVL

SEQ ID NO: 60684 - protein, 10 aa, synthetic construct
SQPRGDRQGI

SEQ ID NO: 60685 - protein, 10 aa, synthetic construct
ETVRGDHVNL

SEQ ID NO: 60686 - protein, 10 aa, synthetic construct
ETVRGDYVGL

SEQ ID NO: 60687 - protein, 10 aa, synthetic construct
ETVRGDYSSV

SEQ ID NO: 60688 - protein, 10 aa, synthetic construct
ETVRGDQSTL

SEQ ID NO: 60689 - protein, 10 aa, synthetic construct
ETVRGDLLLS

SEQ ID NO: 60690 - protein, 10 aa, synthetic construct
ETPRGDHVNL

SEQ ID NO: 60691 - protein, 10 aa, synthetic construct
ETPRGDRDYL

SEQ ID NO: 60692 - protein, 10 aa, synthetic construct
ETPRGDYSSV

SEQ ID NO: 60693 - protein, 10 aa, synthetic construct
ETPRGDLTVT

SEQ ID NO: 60694 - protein, 10 aa, synthetic construct
ETPRGDLIGR

SEQ ID NO: 60695 - protein, 10 aa, synthetic construct
SQPRGDRSVV

SEQ ID NO: 60696 - protein, 10 aa, synthetic construct
ETLRGDHGVL

SEQ ID NO: 60697 - protein, 10 aa, synthetic construct
ETLRGDHVNL

SEQ ID NO: 60698 - protein, 10 aa, synthetic construct
ETLRGDYVGL

SEQ ID NO: 60699 - protein, 10 aa, synthetic construct
ETLRGDYSSV

SEQ ID NO: 60700 - protein, 10 aa, synthetic construct
ETLRGDQSTL

SEQ ID NO: 60701 - protein, 10 aa, synthetic construct
ETLRGDLLLS

SEQ ID NO: 60702 - protein, 10 aa, synthetic construct
ETIRGDRGQI

SEQ ID NO: 60703 - protein, 10 aa, synthetic construct
ETIRGDRQGI

SEQ ID NO: 60704 - protein, 10 aa, synthetic construct
ETIRGDRSVV

SEQ ID NO: 60705 - protein, 10 aa, synthetic construct
ETIRGDRGVV

SEQ ID NO: 60706 - protein, 10 aa, synthetic construct
SQPRGDRGVV

SEQ ID NO: 60707 - protein, 10 aa, synthetic construct
ETIRGDYVGL

SEQ ID NO: 60708 - protein, 10 aa, synthetic construct
ETIRGDQSTL

SEQ ID NO: 60709 - protein, 10 aa, synthetic construct
ETIRGDRSQT

SEQ ID NO: 60710 - protein, 10 aa, synthetic construct
ETIRGDLLLS

SEQ ID NO: 60711 - protein, 10 aa, synthetic construct
ETMRGDRGQI

SEQ ID NO: 60712 - protein, 10 aa, synthetic construct
ETMRGDRQGI

SEQ ID NO: 60713 - protein, 10 aa, synthetic construct
ETMRGDRSVV

SEQ ID NO: 60714 - protein, 10 aa, synthetic construct
ETMRGDRGVV

SEQ ID NO: 60715 - protein, 10 aa, synthetic construct
ETMRGDYVGL

SEQ ID NO: 60716 - protein, 10 aa, synthetic construct
ETMRGDQSTL

SEQ ID NO: 60717 - protein, 10 aa, synthetic construct
SQPRGDRSQT

SEQ ID NO: 60718 - protein, 10 aa, synthetic construct
ETMRGDRSQT

SEQ ID NO: 60719 - protein, 10 aa, synthetic construct
ETMRGDLLLS

SEQ ID NO: 60720 - protein, 10 aa, synthetic construct
ETWRGDHGVL

SEQ ID NO: 60721 - protein, 10 aa, synthetic construct
ETWRGDHVNL

SEQ ID NO: 60722 - protein, 10 aa, synthetic construct
ETWRGDYVGL

SEQ ID NO: 60723 - protein, 10 aa, synthetic construct
ETWRGDYSSV

SEQ ID NO: 60724 - protein, 10 aa, synthetic construct
ETWRGDQSTL

SEQ ID NO: 60725 - protein, 10 aa, synthetic construct
ETWRGDLLLS

SEQ ID NO: 60726 - protein, 10 aa, synthetic construct
ETFRGDRGQI

SEQ ID NO: 60727 - protein, 10 aa, synthetic construct
ETFRGDRQGI

SEQ ID NO: 60728 - protein, 10 aa, synthetic construct
SQRRGDRGQI

SEQ ID NO: 60729 - protein, 10 aa, synthetic construct
ETFRGDRSVV

SEQ ID NO: 60730 - protein, 10 aa, synthetic construct
ETFRGDRGVV

SEQ ID NO: 60731 - protein, 10 aa, synthetic construct
ETFRGDYVGL

SEQ ID NO: 60732 - protein, 10 aa, synthetic construct
ETFRGDQSTL

SEQ ID NO: 60733 - protein, 10 aa, synthetic construct
ETFRGDRSQT

SEQ ID NO: 60734 - protein, 10 aa, synthetic construct
ETFRGDLLLS

SEQ ID NO: 60735 - protein, 10 aa, synthetic construct
ETKRGDRGQI

SEQ ID NO: 60736 - protein, 10 aa, synthetic construct
ETKRGDRQGI

SEQ ID NO: 60737 - protein, 10 aa, synthetic construct
ETKRGDRSVV

SEQ ID NO: 60738 - protein, 10 aa, synthetic construct
ETKRGDRGVV

SEQ ID NO: 60739 - protein, 10 aa, synthetic construct
SKKRGDFNNT

SEQ ID NO: 60740 - protein, 10 aa, synthetic construct
SQRRGDRQGI

SEQ ID NO: 60741 - protein, 10 aa, synthetic construct
ETKRGDYVGL

SEQ ID NO: 60742 - protein, 10 aa, synthetic construct
ETKRGDQSTL

SEQ ID NO: 60743 - protein, 10 aa, synthetic construct
ETKRGDRSQT

SEQ ID NO: 60744 - protein, 10 aa, synthetic construct
ETKRGDLLLS

SEQ ID NO: 60745 - protein, 10 aa, synthetic construct
ETRRGDHVNL

SEQ ID NO: 60746 - protein, 10 aa, synthetic construct
ETRRGDRDYL

SEQ ID NO: 60747 - protein, 10 aa, synthetic construct
ETRRGDYSSV

SEQ ID NO: 60748 - protein, 10 aa, synthetic construct
ETRRGDLTVT

SEQ ID NO: 60749 - protein, 10 aa, synthetic construct
ETRRGDLIGR

SEQ ID NO: 60750 - protein, 10 aa, synthetic construct
ETHRGDHGVL

SEQ ID NO: 60751 - protein, 10 aa, synthetic construct
SQRRGDRSVV

SEQ ID NO: 60752 - protein, 10 aa, synthetic construct
ETHRGDHVNL

SEQ ID NO: 60753 - protein, 10 aa, synthetic construct
ETHRGDYVGL

SEQ ID NO: 60754 - protein, 10 aa, synthetic construct
ETHRGDYSSV

SEQ ID NO: 60755 - protein, 10 aa, synthetic construct
ETHRGDQSTL

SEQ ID NO: 60756 - protein, 10 aa, synthetic construct
ETHRGDLLLS

SEQ ID NO: 60757 - protein, 10 aa, synthetic construct
ETSRGDHGVL

SEQ ID NO: 60758 - protein, 10 aa, synthetic construct
ETSRGDHVNL

SEQ ID NO: 60759 - protein, 10 aa, synthetic construct
ETSRGDYVGL

SEQ ID NO: 60760 - protein, 10 aa, synthetic construct
ETSRGDYSSV

SEQ ID NO: 60761 - protein, 10 aa, synthetic construct
ETSRGDQSTL

SEQ ID NO: 60762 - protein, 10 aa, synthetic construct
SQRRGDRGVV

SEQ ID NO: 60763 - protein, 10 aa, synthetic construct
ETSRGDLLLS

SEQ ID NO: 60764 - protein, 10 aa, synthetic construct
ETTRGDHGVL

SEQ ID NO: 60765 - protein, 10 aa, synthetic construct
ETTRGDHVNL

SEQ ID NO: 60766 - protein, 10 aa, synthetic construct
ETTRGDYVGL

SEQ ID NO: 60767 - protein, 10 aa, synthetic construct
ETTRGDYSSV

SEQ ID NO: 60768 - protein, 10 aa, synthetic construct
ETTRGDQSTL

SEQ ID NO: 60769 - protein, 10 aa, synthetic construct
ETTRGDLLLS

SEQ ID NO: 60770 - protein, 10 aa, synthetic construct
ETYRGDRGQI

SEQ ID NO: 60771 - protein, 10 aa, synthetic construct
ETYRGDRQGI

SEQ ID NO: 60772 - protein, 10 aa, synthetic construct
ETYRGDRSVV

SEQ ID NO: 60773 - protein, 10 aa, synthetic construct
SQRRGDRSQT

SEQ ID NO: 60774 - protein, 10 aa, synthetic construct
ETYRGDRGVV

SEQ ID NO: 60775 - protein, 10 aa, synthetic construct
ETYRGDYVGL

SEQ ID NO: 60776 - protein, 10 aa, synthetic construct
ETYRGDQSTL

SEQ ID NO: 60777 - protein, 10 aa, synthetic construct
ETYRGDRSQT

SEQ ID NO: 60778 - protein, 10 aa, synthetic construct
ETYRGDLLLS

SEQ ID NO: 60779 - protein, 10 aa, synthetic construct
ETNRGDRGQI

SEQ ID NO: 60780 - protein, 10 aa, synthetic construct
ETNRGDRQGI

SEQ ID NO: 60781 - protein, 10 aa, synthetic construct
ETNRGDRSVV

SEQ ID NO: 60782 - protein, 10 aa, synthetic construct
ETNRGDRGVV

SEQ ID NO: 60783 - protein, 10 aa, synthetic construct
ETNRGDYVGL

SEQ ID NO: 60784 - protein, 10 aa, synthetic construct
SDGRGDRGQI

SEQ ID NO: 60785 - protein, 10 aa, synthetic construct
ETNRGDQSTL

SEQ ID NO: 60786 - protein, 10 aa, synthetic construct
ETNRGDRSQT

SEQ ID NO: 60787 - protein, 10 aa, synthetic construct
ETNRGDLLLS

SEQ ID NO: 60788 - protein, 10 aa, synthetic construct
ETQRGDHGVL

SEQ ID NO: 60789 - protein, 10 aa, synthetic construct
ETQRGDHVNL

SEQ ID NO: 60790 - protein, 10 aa, synthetic construct
ETQRGDYVGL

SEQ ID NO: 60791 - protein, 10 aa, synthetic construct
ETQRGDYSSV

SEQ ID NO: 60792 - protein, 10 aa, synthetic construct
ETQRGDQSTL

SEQ ID NO: 60793 - protein, 10 aa, synthetic construct
ETQRGDLLLS

SEQ ID NO: 60794 - protein, 10 aa, synthetic construct
ETDRGDHGVL

SEQ ID NO: 60795 - protein, 10 aa, synthetic construct
SDGRGDRQGI

SEQ ID NO: 60796 - protein, 10 aa, synthetic construct
ETDRGDHVNL

SEQ ID NO: 60797 - protein, 10 aa, synthetic construct
ETDRGDYVGL

SEQ ID NO: 60798 - protein, 10 aa, synthetic construct
ETDRGDYSSV

SEQ ID NO: 60799 - protein, 10 aa, synthetic construct
ETDRGDQSTL

SEQ ID NO: 60800 - protein, 10 aa, synthetic construct
ETDRGDLLLS

SEQ ID NO: 60801 - protein, 10 aa, synthetic construct
ETERGDHGVL

SEQ ID NO: 60802 - protein, 10 aa, synthetic construct
ETERGDHVNL

SEQ ID NO: 60803 - protein, 10 aa, synthetic construct
ETERGDYVGL

SEQ ID NO: 60804 - protein, 10 aa, synthetic construct
ETERGDYSSV

SEQ ID NO: 60805 - protein, 10 aa, synthetic construct
ETERGDQSTL

SEQ ID NO: 60806 - protein, 10 aa, synthetic construct
SDGRGDRSVV

SEQ ID NO: 60807 - protein, 10 aa, synthetic construct
ETERGDLLLS

SEQ ID NO: 60808 - protein, 10 aa, synthetic construct
EYGRGDHGVL

SEQ ID NO: 60809 - protein, 10 aa, synthetic construct
EYGRGDHVNL

SEQ ID NO: 60810 - protein, 10 aa, synthetic construct
EYGRGDYVGL

SEQ ID NO: 60811 - protein, 10 aa, synthetic construct
EYGRGDYSSV

SEQ ID NO: 60812 - protein, 10 aa, synthetic construct
EYGRGDQSTL

SEQ ID NO: 60813 - protein, 10 aa, synthetic construct
EYGRGDLLLS

SEQ ID NO: 60814 - protein, 10 aa, synthetic construct
EYARGDHGVL

SEQ ID NO: 60815 - protein, 10 aa, synthetic construct
EYARGDHVNL

SEQ ID NO: 60816 - protein, 10 aa, synthetic construct
EYARGDYVGL

SEQ ID NO: 60817 - protein, 10 aa, synthetic construct
SDGRGDRGVV

SEQ ID NO: 60818 - protein, 10 aa, synthetic construct
EYARGDYSSV

SEQ ID NO: 60819 - protein, 10 aa, synthetic construct
EYARGDQSTL

SEQ ID NO: 60820 - protein, 10 aa, synthetic construct
EYARGDLLLS

SEQ ID NO: 60821 - protein, 10 aa, synthetic construct
EYVRGDRGQI

SEQ ID NO: 60822 - protein, 10 aa, synthetic construct
EYVRGDRQGI

SEQ ID NO: 60823 - protein, 10 aa, synthetic construct
EYVRGDRSVV

SEQ ID NO: 60824 - protein, 10 aa, synthetic construct
EYVRGDRGVV

SEQ ID NO: 60825 - protein, 10 aa, synthetic construct
EYVRGDYVGL

SEQ ID NO: 60826 - protein, 10 aa, synthetic construct
EYVRGDQSTL

SEQ ID NO: 60827 - protein, 10 aa, synthetic construct
EYVRGDRSQT

SEQ ID NO: 60828 - protein, 10 aa, synthetic construct
SDGRGDRSQT

SEQ ID NO: 60829 - protein, 10 aa, synthetic construct
EYVRGDLLLS

SEQ ID NO: 60830 - protein, 10 aa, synthetic construct
EYPRGDHGVL

SEQ ID NO: 60831 - protein, 10 aa, synthetic construct
EYPRGDHVNL

SEQ ID NO: 60832 - protein, 10 aa, synthetic construct
EYPRGDYVGL

SEQ ID NO: 60833 - protein, 10 aa, synthetic construct
EYPRGDYSSV

SEQ ID NO: 60834 - protein, 10 aa, synthetic construct
EYPRGDQSTL

SEQ ID NO: 60835 - protein, 10 aa, synthetic construct
EYPRGDLLLS

SEQ ID NO: 60836 - protein, 10 aa, synthetic construct
EYLRGDRGQI

SEQ ID NO: 60837 - protein, 10 aa, synthetic construct
EYLRGDRQGI

SEQ ID NO: 60838 - protein, 10 aa, synthetic construct
EYLRGDRSVV

SEQ ID NO: 60839 - protein, 10 aa, synthetic construct
SDARGDRGQI

SEQ ID NO: 60840 - protein, 10 aa, synthetic construct
EYLRGDRGVV

SEQ ID NO: 60841 - protein, 10 aa, synthetic construct
EYLRGDYVGL

SEQ ID NO: 60842 - protein, 10 aa, synthetic construct
EYLRGDQSTL

SEQ ID NO: 60843 - protein, 10 aa, synthetic construct
EYLRGDRSQT

SEQ ID NO: 60844 - protein, 10 aa, synthetic construct
EYLRGDLLLS

SEQ ID NO: 60845 - protein, 10 aa, synthetic construct
EYIRGDRSVV

SEQ ID NO: 60846 - protein, 10 aa, synthetic construct
EYIRGDRSQT

SEQ ID NO: 60847 - protein, 10 aa, synthetic construct
EYMRGDRSVV

SEQ ID NO: 60848 - protein, 10 aa, synthetic construct
EYMRGDRSQT

SEQ ID NO: 60849 - protein, 10 aa, synthetic construct
EYWRGDRGQI

SEQ ID NO: 60850 - protein, 10 aa, synthetic construct
SKKRGDFNNL

SEQ ID NO: 60851 - protein, 10 aa, synthetic construct
SDARGDRQGI

SEQ ID NO: 60852 - protein, 10 aa, synthetic construct
EYWRGDRQGI

SEQ ID NO: 60853 - protein, 10 aa, synthetic construct
EYWRGDRSVV

SEQ ID NO: 60854 - protein, 10 aa, synthetic construct
EYWRGDRGVV

SEQ ID NO: 60855 - protein, 10 aa, synthetic construct
EYWRGDYVGL

SEQ ID NO: 60856 - protein, 10 aa, synthetic construct
EYWRGDQSTL

SEQ ID NO: 60857 - protein, 10 aa, synthetic construct
EYWRGDRSQT

SEQ ID NO: 60858 - protein, 10 aa, synthetic construct
EYWRGDLLLS

SEQ ID NO: 60859 - protein, 10 aa, synthetic construct
EYFRGDRSVV

SEQ ID NO: 60860 - protein, 10 aa, synthetic construct
EYFRGDRSQT

SEQ ID NO: 60861 - protein, 10 aa, synthetic construct
EYKRGDRSVV

SEQ ID NO: 60862 - protein, 10 aa, synthetic construct
SDARGDRSVV

SEQ ID NO: 60863 - protein, 10 aa, synthetic construct
EYKRGDRSQT

SEQ ID NO: 60864 - protein, 10 aa, synthetic construct
EYRRGDHGVL

SEQ ID NO: 60865 - protein, 10 aa, synthetic construct
EYRRGDHVNL

SEQ ID NO: 60866 - protein, 10 aa, synthetic construct
EYRRGDYVGL

SEQ ID NO: 60867 - protein, 10 aa, synthetic construct
EYRRGDYSSV

SEQ ID NO: 60868 - protein, 10 aa, synthetic construct
EYRRGDQSTL

SEQ ID NO: 60869 - protein, 10 aa, synthetic construct
EYRRGDLLLS

SEQ ID NO: 60870 - protein, 10 aa, synthetic construct
EYHRGDRGQI

SEQ ID NO: 60871 - protein, 10 aa, synthetic construct
EYHRGDRQGI

SEQ ID NO: 60872 - protein, 10 aa, synthetic construct
EYHRGDRSVV

SEQ ID NO: 60873 - protein, 10 aa, synthetic construct
SDARGDRGVV

SEQ ID NO: 60874 - protein, 10 aa, synthetic construct
EYHRGDRGVV

SEQ ID NO: 60875 - protein, 10 aa, synthetic construct
EYHRGDYVGL

SEQ ID NO: 60876 - protein, 10 aa, synthetic construct
EYHRGDQSTL

SEQ ID NO: 60877 - protein, 10 aa, synthetic construct
EYHRGDRSQT

SEQ ID NO: 60878 - protein, 10 aa, synthetic construct
EYHRGDLLLS

SEQ ID NO: 60879 - protein, 10 aa, synthetic construct
EYSRGDRGQI

SEQ ID NO: 60880 - protein, 10 aa, synthetic construct
EYSRGDRQGI

SEQ ID NO: 60881 - protein, 10 aa, synthetic construct
EYSRGDRSVV

SEQ ID NO: 60882 - protein, 10 aa, synthetic construct
EYSRGDRGVV

SEQ ID NO: 60883 - protein, 10 aa, synthetic construct
EYSRGDYVGL

SEQ ID NO: 60884 - protein, 10 aa, synthetic construct
SDARGDRSQT

SEQ ID NO: 60885 - protein, 10 aa, synthetic construct
EYSRGDQSTL

SEQ ID NO: 60886 - protein, 10 aa, synthetic construct
EYSRGDRSQT

SEQ ID NO: 60887 - protein, 10 aa, synthetic construct
EYSRGDLLLS

SEQ ID NO: 60888 - protein, 10 aa, synthetic construct
EYTRGDRGQI

SEQ ID NO: 60889 - protein, 10 aa, synthetic construct
EYTRGDRQGI

SEQ ID NO: 60890 - protein, 10 aa, synthetic construct
EYTRGDRSVV

SEQ ID NO: 60891 - protein, 10 aa, synthetic construct
EYTRGDRGVV

SEQ ID NO: 60892 - protein, 10 aa, synthetic construct
EYTRGDYVGL

SEQ ID NO: 60893 - protein, 10 aa, synthetic construct
EYTRGDQSTL

SEQ ID NO: 60894 - protein, 10 aa, synthetic construct
EYTRGDRSQT

SEQ ID NO: 60895 - protein, 10 aa, synthetic construct
SDPRGDRGQI

SEQ ID NO: 60896 - protein, 10 aa, synthetic construct
EYTRGDLLLS

SEQ ID NO: 60897 - protein, 10 aa, synthetic construct
EYYRGDRSVV

SEQ ID NO: 60898 - protein, 10 aa, synthetic construct
EYYRGDRSQT

SEQ ID NO: 60899 - protein, 10 aa, synthetic construct
EYNRGDRSVV

SEQ ID NO: 60900 - protein, 10 aa, synthetic construct
EYNRGDRSQT

SEQ ID NO: 60901 - protein, 10 aa, synthetic construct
EYQRGDRGQI

SEQ ID NO: 60902 - protein, 10 aa, synthetic construct
EYQRGDRQGI

SEQ ID NO: 60903 - protein, 10 aa, synthetic construct
EYQRGDRSVV

SEQ ID NO: 60904 - protein, 10 aa, synthetic construct
EYQRGDRGVV

SEQ ID NO: 60905 - protein, 10 aa, synthetic construct
EYQRGDYVGL

SEQ ID NO: 60906 - protein, 10 aa, synthetic construct
SDPRGDRQGI

SEQ ID NO: 60907 - protein, 10 aa, synthetic construct
EYQRGDQSTL

SEQ ID NO: 60908 - protein, 10 aa, synthetic construct
EYQRGDRSQT

SEQ ID NO: 60909 - protein, 10 aa, synthetic construct
EYQRGDLLLS

SEQ ID NO: 60910 - protein, 10 aa, synthetic construct
EYDRGDRGQI

SEQ ID NO: 60911 - protein, 10 aa, synthetic construct
EYDRGDRQGI

SEQ ID NO: 60912 - protein, 10 aa, synthetic construct
EYDRGDRSVV

SEQ ID NO: 60913 - protein, 10 aa, synthetic construct
EYDRGDRGVV

SEQ ID NO: 60914 - protein, 10 aa, synthetic construct
EYDRGDYVGL

SEQ ID NO: 60915 - protein, 10 aa, synthetic construct
EYDRGDQSTL

SEQ ID NO: 60916 - protein, 10 aa, synthetic construct
EYDRGDRSQT

SEQ ID NO: 60917 - protein, 10 aa, synthetic construct
SDPRGDRSVV

SEQ ID NO: 60918 - protein, 10 aa, synthetic construct
EYDRGDLLLS

SEQ ID NO: 60919 - protein, 10 aa, synthetic construct
EYERGDRGQI

SEQ ID NO: 60920 - protein, 10 aa, synthetic construct
EYERGDRQGI

SEQ ID NO: 60921 - protein, 10 aa, synthetic construct
EYERGDRSVV

SEQ ID NO: 60922 - protein, 10 aa, synthetic construct
EYERGDRGVV

SEQ ID NO: 60923 - protein, 10 aa, synthetic construct
EYERGDYVGL

SEQ ID NO: 60924 - protein, 10 aa, synthetic construct
EYERGDQSTL

SEQ ID NO: 60925 - protein, 10 aa, synthetic construct
EYERGDRSQT

SEQ ID NO: 60926 - protein, 10 aa, synthetic construct
EYERGDLLLS

SEQ ID NO: 60927 - protein, 10 aa, synthetic construct
ENGRGDHGVL

SEQ ID NO: 60928 - protein, 10 aa, synthetic construct
SDPRGDRGVV

SEQ ID NO: 60929 - protein, 10 aa, synthetic construct
ENGRGDHVNL

SEQ ID NO: 60930 - protein, 10 aa, synthetic construct
ENGRGDYVGL

SEQ ID NO: 60931 - protein, 10 aa, synthetic construct
ENGRGDYSSV

SEQ ID NO: 60932 - protein, 10 aa, synthetic construct
ENGRGDQSTL

SEQ ID NO: 60933 - protein, 10 aa, synthetic construct
ENGRGDLLLS

SEQ ID NO: 60934 - protein, 10 aa, synthetic construct
ENARGDHGVL

SEQ ID NO: 60935 - protein, 10 aa, synthetic construct
ENARGDHVNL

SEQ ID NO: 60936 - protein, 10 aa, synthetic construct
ENARGDYVGL

SEQ ID NO: 60937 - protein, 10 aa, synthetic construct
ENARGDYSSV

SEQ ID NO: 60938 - protein, 10 aa, synthetic construct
ENARGDQSTL

SEQ ID NO: 60939 - protein, 10 aa, synthetic construct
SDPRGDRSQT

SEQ ID NO: 60940 - protein, 10 aa, synthetic construct
ENARGDLLLS

SEQ ID NO: 60941 - protein, 10 aa, synthetic construct
ENVRGDRGQI

SEQ ID NO: 60942 - protein, 10 aa, synthetic construct
ENVRGDRQGI

SEQ ID NO: 60943 - protein, 10 aa, synthetic construct
ENVRGDRSVV

SEQ ID NO: 60944 - protein, 10 aa, synthetic construct
ENVRGDRGVV

SEQ ID NO: 60945 - protein, 10 aa, synthetic construct
ENVRGDYVGL

SEQ ID NO: 60946 - protein, 10 aa, synthetic construct
ENVRGDQSTL

SEQ ID NO: 60947 - protein, 10 aa, synthetic construct
ENVRGDRSQT

SEQ ID NO: 60948 - protein, 10 aa, synthetic construct
ENVRGDLLLS

SEQ ID NO: 60949 - protein, 10 aa, synthetic construct
ENPRGDHGVL

SEQ ID NO: 60950 - protein, 10 aa, synthetic construct
SDRRGDRGQI

SEQ ID NO: 60951 - protein, 10 aa, synthetic construct
ENPRGDHVNL

SEQ ID NO: 60952 - protein, 10 aa, synthetic construct
ENPRGDYVGL

SEQ ID NO: 60953 - protein, 10 aa, synthetic construct
ENPRGDYSSV

SEQ ID NO: 60954 - protein, 10 aa, synthetic construct
ENPRGDQSTL

SEQ ID NO: 60955 - protein, 10 aa, synthetic construct
ENPRGDLLLS

SEQ ID NO: 60956 - protein, 10 aa, synthetic construct
ENLRGDRGQI

SEQ ID NO: 60957 - protein, 10 aa, synthetic construct
ENLRGDRQGI

SEQ ID NO: 60958 - protein, 10 aa, synthetic construct
ENLRGDRSVV

SEQ ID NO: 60959 - protein, 10 aa, synthetic construct
ENLRGDRGVV

SEQ ID NO: 60960 - protein, 10 aa, synthetic construct
ENLRGDYVGL

SEQ ID NO: 60961 - protein, 10 aa, synthetic construct
SKNRGDFNNT

SEQ ID NO: 60962 - protein, 10 aa, synthetic construct
SDRRGDRQGI

SEQ ID NO: 60963 - protein, 10 aa, synthetic construct
ENLRGDQSTL

SEQ ID NO: 60964 - protein, 10 aa, synthetic construct
ENLRGDRSQT

SEQ ID NO: 60965 - protein, 10 aa, synthetic construct
ENLRGDLLLS

SEQ ID NO: 60966 - protein, 10 aa, synthetic construct
ENIRGDRSVV

SEQ ID NO: 60967 - protein, 10 aa, synthetic construct
ENIRGDRSQT

SEQ ID NO: 60968 - protein, 10 aa, synthetic construct
ENMRGDRSVV

SEQ ID NO: 60969 - protein, 10 aa, synthetic construct
ENMRGDRSQT

SEQ ID NO: 60970 - protein, 10 aa, synthetic construct
ENWRGDRGQI

SEQ ID NO: 60971 - protein, 10 aa, synthetic construct
ENWRGDRQGI

SEQ ID NO: 60972 - protein, 10 aa, synthetic construct
ENWRGDRSVV

SEQ ID NO: 60973 - protein, 10 aa, synthetic construct
SDRRGDRSVV

SEQ ID NO: 60974 - protein, 10 aa, synthetic construct
ENWRGDRGVV

SEQ ID NO: 60975 - protein, 10 aa, synthetic construct
ENWRGDYVGL

SEQ ID NO: 60976 - protein, 10 aa, synthetic construct
ENWRGDQSTL

SEQ ID NO: 60977 - protein, 10 aa, synthetic construct
ENWRGDRSQT

SEQ ID NO: 60978 - protein, 10 aa, synthetic construct
ENWRGDLLLS

SEQ ID NO: 60979 - protein, 10 aa, synthetic construct
ENFRGDRSVV

SEQ ID NO: 60980 - protein, 10 aa, synthetic construct
ENFRGDRSQT

SEQ ID NO: 60981 - protein, 10 aa, synthetic construct
ENKRGDRSVV

SEQ ID NO: 60982 - protein, 10 aa, synthetic construct
ENKRGDRSQT

SEQ ID NO: 60983 - protein, 10 aa, synthetic construct
ENRRGDHGVL

SEQ ID NO: 60984 - protein, 10 aa, synthetic construct
SDRRGDRGVV

SEQ ID NO: 60985 - protein, 10 aa, synthetic construct
ENRRGDHVNL

SEQ ID NO: 60986 - protein, 10 aa, synthetic construct
ENRRGDYVGL

SEQ ID NO: 60987 - protein, 10 aa, synthetic construct
ENRRGDYSSV

SEQ ID NO: 60988 - protein, 10 aa, synthetic construct
ENRRGDQSTL

SEQ ID NO: 60989 - protein, 10 aa, synthetic construct
ENRRGDLLLS

SEQ ID NO: 60990 - protein, 10 aa, synthetic construct
ENHRGDRGQI

SEQ ID NO: 60991 - protein, 10 aa, synthetic construct
ENHRGDRQGI

SEQ ID NO: 60992 - protein, 10 aa, synthetic construct
ENHRGDRSVV

SEQ ID NO: 60993 - protein, 10 aa, synthetic construct
ENHRGDRGVV

SEQ ID NO: 60994 - protein, 10 aa, synthetic construct
ENHRGDYVGL

SEQ ID NO: 60995 - protein, 10 aa, synthetic construct
SDRRGDRSQT

SEQ ID NO: 60996 - protein, 10 aa, synthetic construct
ENHRGDQSTL

SEQ ID NO: 60997 - protein, 10 aa, synthetic construct
ENHRGDRSQT

SEQ ID NO: 60998 - protein, 10 aa, synthetic construct
ENHRGDLLLS

SEQ ID NO: 60999 - protein, 10 aa, synthetic construct
ENSRGDRGQI

SEQ ID NO: 61000 - protein, 10 aa, synthetic construct
ENSRGDRQGI

SEQ ID NO: 61001 - protein, 10 aa, synthetic construct
ENSRGDRSVV

SEQ ID NO: 61002 - protein, 10 aa, synthetic construct
ENSRGDRGVV

SEQ ID NO: 61003 - protein, 10 aa, synthetic construct
ENSRGDYVGL

SEQ ID NO: 61004 - protein, 10 aa, synthetic construct
ENSRGDQSTL

SEQ ID NO: 61005 - protein, 10 aa, synthetic construct
ENSRGDRSQT

SEQ ID NO: 61006 - protein, 10 aa, synthetic construct
SEGRGDRGQI

SEQ ID NO: 61007 - protein, 10 aa, synthetic construct
ENSRGDLLLS

SEQ ID NO: 61008 - protein, 10 aa, synthetic construct
ENTRGDRGQI

SEQ ID NO: 61009 - protein, 10 aa, synthetic construct
ENTRGDRQGI

SEQ ID NO: 61010 - protein, 10 aa, synthetic construct
ENTRGDRSVV

SEQ ID NO: 61011 - protein, 10 aa, synthetic construct
ENTRGDRGVV

SEQ ID NO: 61012 - protein, 10 aa, synthetic construct
ENTRGDYVGL

SEQ ID NO: 61013 - protein, 10 aa, synthetic construct
ENTRGDQSTL

SEQ ID NO: 61014 - protein, 10 aa, synthetic construct
ENTRGDRSQT

SEQ ID NO: 61015 - protein, 10 aa, synthetic construct
ENTRGDLLLS

SEQ ID NO: 61016 - protein, 10 aa, synthetic construct
ENYRGDRSVV

SEQ ID NO: 61017 - protein, 10 aa, synthetic construct
SEGRGDRQGI

SEQ ID NO: 61018 - protein, 10 aa, synthetic construct
ENYRGDRSQT

SEQ ID NO: 61019 - protein, 10 aa, synthetic construct
ENNRGDRSVV

SEQ ID NO: 61020 - protein, 10 aa, synthetic construct
ENNRGDRSQT

SEQ ID NO: 61021 - protein, 10 aa, synthetic construct
ENQRGDRGQI

SEQ ID NO: 61022 - protein, 10 aa, synthetic construct
ENQRGDRQGI

SEQ ID NO: 61023 - protein, 10 aa, synthetic construct
ENQRGDRSVV

SEQ ID NO: 61024 - protein, 10 aa, synthetic construct
ENQRGDRGVV

SEQ ID NO: 61025 - protein, 10 aa, synthetic construct
ENQRGDYVGL

SEQ ID NO: 61026 - protein, 10 aa, synthetic construct
ENQRGDQSTL

SEQ ID NO: 61027 - protein, 10 aa, synthetic construct
ENQRGDRSQT

SEQ ID NO: 61028 - protein, 10 aa, synthetic construct
SEGRGDRSVV

SEQ ID NO: 61029 - protein, 10 aa, synthetic construct
ENQRGDLLLS

SEQ ID NO: 61030 - protein, 10 aa, synthetic construct
ENDRGDRGQI

SEQ ID NO: 61031 - protein, 10 aa, synthetic construct
ENDRGDRQGI

SEQ ID NO: 61032 - protein, 10 aa, synthetic construct
ENDRGDRSVV

SEQ ID NO: 61033 - protein, 10 aa, synthetic construct
ENDRGDRGVV

SEQ ID NO: 61034 - protein, 10 aa, synthetic construct
ENDRGDYVGL

SEQ ID NO: 61035 - protein, 10 aa, synthetic construct
ENDRGDQSTL

SEQ ID NO: 61036 - protein, 10 aa, synthetic construct
ENDRGDRSQT

SEQ ID NO: 61037 - protein, 10 aa, synthetic construct
ENDRGDLLLS

SEQ ID NO: 61038 - protein, 10 aa, synthetic construct
ENERGDRGQI

SEQ ID NO: 61039 - protein, 10 aa, synthetic construct
SEGRGDRGVV

SEQ ID NO: 61040 - protein, 10 aa, synthetic construct
ENERGDRQGI

SEQ ID NO: 61041 - protein, 10 aa, synthetic construct
ENERGDRSVV

SEQ ID NO: 61042 - protein, 10 aa, synthetic construct
ENERGDRGVV

SEQ ID NO: 61043 - protein, 10 aa, synthetic construct
ENERGDYVGL

SEQ ID NO: 61044 - protein, 10 aa, synthetic construct
ENERGDQSTL

SEQ ID NO: 61045 - protein, 10 aa, synthetic construct
ENERGDRSQT

SEQ ID NO: 61046 - protein, 10 aa, synthetic construct
ENERGDLLLS

SEQ ID NO: 61047 - protein, 10 aa, synthetic construct
EQGRGDHVNL

SEQ ID NO: 61048 - protein, 10 aa, synthetic construct
EQGRGDRDYL

SEQ ID NO: 61049 - protein, 10 aa, synthetic construct
EQGRGDYSSV

SEQ ID NO: 61050 - protein, 10 aa, synthetic construct
SEGRGDRSQT

SEQ ID NO: 61051 - protein, 10 aa, synthetic construct
EQGRGDLTVT

SEQ ID NO: 61052 - protein, 10 aa, synthetic construct
EQGRGDLIGR

SEQ ID NO: 61053 - protein, 10 aa, synthetic construct
EQARGDHVNL

SEQ ID NO: 61054 - protein, 10 aa, synthetic construct
EQARGDRDYL

SEQ ID NO: 61055 - protein, 10 aa, synthetic construct
EQARGDYSSV

SEQ ID NO: 61056 - protein, 10 aa, synthetic construct
EQARGDLTVT

SEQ ID NO: 61057 - protein, 10 aa, synthetic construct
EQARGDLIGR

SEQ ID NO: 61058 - protein, 10 aa, synthetic construct
EQVRGDHGVL

SEQ ID NO: 61059 - protein, 10 aa, synthetic construct
EQVRGDHVNL

SEQ ID NO: 61060 - protein, 10 aa, synthetic construct
EQVRGDYVGL

SEQ ID NO: 61061 - protein, 10 aa, synthetic construct
SEARGDRGQI

SEQ ID NO: 61062 - protein, 10 aa, synthetic construct
EQVRGDYSSV

SEQ ID NO: 61063 - protein, 10 aa, synthetic construct
EQVRGDQSTL

SEQ ID NO: 61064 - protein, 10 aa, synthetic construct
EQVRGDLLLS

SEQ ID NO: 61065 - protein, 10 aa, synthetic construct
EQPRGDHVNL

SEQ ID NO: 61066 - protein, 10 aa, synthetic construct
EQPRGDRDYL

SEQ ID NO: 61067 - protein, 10 aa, synthetic construct
EQPRGDYSSV

SEQ ID NO: 61068 - protein, 10 aa, synthetic construct
EQPRGDLTVT

SEQ ID NO: 61069 - protein, 10 aa, synthetic construct
EQPRGDLIGR

SEQ ID NO: 61070 - protein, 10 aa, synthetic construct
EQLRGDHGVL

SEQ ID NO: 61071 - protein, 10 aa, synthetic construct
EQLRGDHVNL

SEQ ID NO: 61072 - protein, 10 aa, synthetic construct
SKNRGDFNNL

SEQ ID NO: 61073 - protein, 10 aa, synthetic construct
SEARGDRQGI

SEQ ID NO: 61074 - protein, 10 aa, synthetic construct
EQLRGDYVGL

SEQ ID NO: 61075 - protein, 10 aa, synthetic construct
EQLRGDYSSV

SEQ ID NO: 61076 - protein, 10 aa, synthetic construct
EQLRGDQSTL

SEQ ID NO: 61077 - protein, 10 aa, synthetic construct
EQLRGDLLLS

SEQ ID NO: 61078 - protein, 10 aa, synthetic construct
EQIRGDRGQI

SEQ ID NO: 61079 - protein, 10 aa, synthetic construct
EQIRGDRQGI

SEQ ID NO: 61080 - protein, 10 aa, synthetic construct
EQIRGDRSVV

SEQ ID NO: 61081 - protein, 10 aa, synthetic construct
EQIRGDRGVV

SEQ ID NO: 61082 - protein, 10 aa, synthetic construct
EQIRGDYVGL

SEQ ID NO: 61083 - protein, 10 aa, synthetic construct
EQIRGDQSTL

SEQ ID NO: 61084 - protein, 10 aa, synthetic construct
SEARGDRSVV

SEQ ID NO: 61085 - protein, 10 aa, synthetic construct
EQIRGDRSQT

SEQ ID NO: 61086 - protein, 10 aa, synthetic construct
EQIRGDLLLS

SEQ ID NO: 61087 - protein, 10 aa, synthetic construct
EQMRGDRGQI

SEQ ID NO: 61088 - protein, 10 aa, synthetic construct
EQMRGDRQGI

SEQ ID NO: 61089 - protein, 10 aa, synthetic construct
EQMRGDRSVV

SEQ ID NO: 61090 - protein, 10 aa, synthetic construct
EQMRGDRGVV

SEQ ID NO: 61091 - protein, 10 aa, synthetic construct
EQMRGDYVGL

SEQ ID NO: 61092 - protein, 10 aa, synthetic construct
EQMRGDQSTL

SEQ ID NO: 61093 - protein, 10 aa, synthetic construct
EQMRGDRSQT

SEQ ID NO: 61094 - protein, 10 aa, synthetic construct
EQMRGDLLLS

SEQ ID NO: 61095 - protein, 10 aa, synthetic construct
SEARGDRGVV

SEQ ID NO: 61096 - protein, 10 aa, synthetic construct
EQWRGDHGVL

SEQ ID NO: 61097 - protein, 10 aa, synthetic construct
EQWRGDHVNL

SEQ ID NO: 61098 - protein, 10 aa, synthetic construct
EQWRGDYVGL

SEQ ID NO: 61099 - protein, 10 aa, synthetic construct
EQWRGDYSSV

SEQ ID NO: 61100 - protein, 10 aa, synthetic construct
EQWRGDQSTL

SEQ ID NO: 61101 - protein, 10 aa, synthetic construct
EQWRGDLLLS

SEQ ID NO: 61102 - protein, 10 aa, synthetic construct
EQFRGDRGQI

SEQ ID NO: 61103 - protein, 10 aa, synthetic construct
EQFRGDRQGI

SEQ ID NO: 61104 - protein, 10 aa, synthetic construct
EQFRGDRSVV

SEQ ID NO: 61105 - protein, 10 aa, synthetic construct
EQFRGDRGVV

SEQ ID NO: 61106 - protein, 10 aa, synthetic construct
SEARGDRSQT

SEQ ID NO: 61107 - protein, 10 aa, synthetic construct
EQFRGDYVGL

SEQ ID NO: 61108 - protein, 10 aa, synthetic construct
EQFRGDQSTL

SEQ ID NO: 61109 - protein, 10 aa, synthetic construct
EQFRGDRSQT

SEQ ID NO: 61110 - protein, 10 aa, synthetic construct
EQFRGDLLLS

SEQ ID NO: 61111 - protein, 10 aa, synthetic construct
EQKRGDRGQI

SEQ ID NO: 61112 - protein, 10 aa, synthetic construct
EQKRGDRQGI

SEQ ID NO: 61113 - protein, 10 aa, synthetic construct
EQKRGDRSVV

SEQ ID NO: 61114 - protein, 10 aa, synthetic construct
EQKRGDRGVV

SEQ ID NO: 61115 - protein, 10 aa, synthetic construct
EQKRGDYVGL

SEQ ID NO: 61116 - protein, 10 aa, synthetic construct
EQKRGDQSTL

SEQ ID NO: 61117 - protein, 10 aa, synthetic construct
SEPRGDRGQI

SEQ ID NO: 61118 - protein, 10 aa, synthetic construct
EQKRGDRSQT

SEQ ID NO: 61119 - protein, 10 aa, synthetic construct
EQKRGDLLLS

SEQ ID NO: 61120 - protein, 10 aa, synthetic construct
EQRRGDHVNL

SEQ ID NO: 61121 - protein, 10 aa, synthetic construct
EQRRGDRDYL

SEQ ID NO: 61122 - protein, 10 aa, synthetic construct
EQRRGDYSSV

SEQ ID NO: 61123 - protein, 10 aa, synthetic construct
EQRRGDLTVT

SEQ ID NO: 61124 - protein, 10 aa, synthetic construct
EQRRGDLIGR

SEQ ID NO: 61125 - protein, 10 aa, synthetic construct
EQHRGDHGVL

SEQ ID NO: 61126 - protein, 10 aa, synthetic construct
EQHRGDHVNL

SEQ ID NO: 61127 - protein, 10 aa, synthetic construct
EQHRGDYVGL

SEQ ID NO: 61128 - protein, 10 aa, synthetic construct
SEPRGDRQGI

SEQ ID NO: 61129 - protein, 10 aa, synthetic construct
EQHRGDYSSV

SEQ ID NO: 61130 - protein, 10 aa, synthetic construct
EQHRGDQSTL

SEQ ID NO: 61131 - protein, 10 aa, synthetic construct
EQHRGDLLLS

SEQ ID NO: 61132 - protein, 10 aa, synthetic construct
EQSRGDHGVL

SEQ ID NO: 61133 - protein, 10 aa, synthetic construct
EQSRGDHVNL

SEQ ID NO: 61134 - protein, 10 aa, synthetic construct
EQSRGDYVGL

SEQ ID NO: 61135 - protein, 10 aa, synthetic construct
EQSRGDYSSV

SEQ ID NO: 61136 - protein, 10 aa, synthetic construct
EQSRGDQSTL

SEQ ID NO: 61137 - protein, 10 aa, synthetic construct
EQSRGDLLLS

SEQ ID NO: 61138 - protein, 10 aa, synthetic construct
EQTRGDHGVL

SEQ ID NO: 61139 - protein, 10 aa, synthetic construct
SEPRGDRSVV

SEQ ID NO: 61140 - protein, 10 aa, synthetic construct
EQTRGDHVNL

SEQ ID NO: 61141 - protein, 10 aa, synthetic construct
EQTRGDYVGL

SEQ ID NO: 61142 - protein, 10 aa, synthetic construct
EQTRGDYSSV

SEQ ID NO: 61143 - protein, 10 aa, synthetic construct
EQTRGDQSTL

SEQ ID NO: 61144 - protein, 10 aa, synthetic construct
EQTRGDLLLS

SEQ ID NO: 61145 - protein, 10 aa, synthetic construct
EQYRGDRGQI

SEQ ID NO: 61146 - protein, 10 aa, synthetic construct
EQYRGDRQGI

SEQ ID NO: 61147 - protein, 10 aa, synthetic construct
EQYRGDRSVV

SEQ ID NO: 61148 - protein, 10 aa, synthetic construct
EQYRGDRGVV

SEQ ID NO: 61149 - protein, 10 aa, synthetic construct
EQYRGDYVGL

SEQ ID NO: 61150 - protein, 10 aa, synthetic construct
SEPRGDRGVV

SEQ ID NO: 61151 - protein, 10 aa, synthetic construct
EQYRGDQSTL

SEQ ID NO: 61152 - protein, 10 aa, synthetic construct
EQYRGDRSQT

SEQ ID NO: 61153 - protein, 10 aa, synthetic construct
EQYRGDLLLS

SEQ ID NO: 61154 - protein, 10 aa, synthetic construct
EQNRGDRGQI

SEQ ID NO: 61155 - protein, 10 aa, synthetic construct
EQNRGDRQGI

SEQ ID NO: 61156 - protein, 10 aa, synthetic construct
EQNRGDRSVV

SEQ ID NO: 61157 - protein, 10 aa, synthetic construct
EQNRGDRGVV

SEQ ID NO: 61158 - protein, 10 aa, synthetic construct
EQNRGDYVGL

SEQ ID NO: 61159 - protein, 10 aa, synthetic construct
EQNRGDQSTL

SEQ ID NO: 61160 - protein, 10 aa, synthetic construct
EQNRGDRSQT

SEQ ID NO: 61161 - protein, 10 aa, synthetic construct
SEPRGDRSQT

SEQ ID NO: 61162 - protein, 10 aa, synthetic construct
EQNRGDLLLS

SEQ ID NO: 61163 - protein, 10 aa, synthetic construct
EQQRGDHGVL

SEQ ID NO: 61164 - protein, 10 aa, synthetic construct
EQQRGDHVNL

SEQ ID NO: 61165 - protein, 10 aa, synthetic construct
EQQRGDYVGL

SEQ ID NO: 61166 - protein, 10 aa, synthetic construct
EQQRGDYSSV

SEQ ID NO: 61167 - protein, 10 aa, synthetic construct
EQQRGDQSTL

SEQ ID NO: 61168 - protein, 10 aa, synthetic construct
EQQRGDLLLS

SEQ ID NO: 61169 - protein, 10 aa, synthetic construct
EQDRGDHGVL

SEQ ID NO: 61170 - protein, 10 aa, synthetic construct
EQDRGDHVNL

SEQ ID NO: 61171 - protein, 10 aa, synthetic construct
EQDRGDYVGL

SEQ ID NO: 61172 - protein, 10 aa, synthetic construct
SERRGDRGQI

SEQ ID NO: 61173 - protein, 10 aa, synthetic construct
EQDRGDYSSV

SEQ ID NO: 61174 - protein, 10 aa, synthetic construct
EQDRGDQSTL

SEQ ID NO: 61175 - protein, 10 aa, synthetic construct
EQDRGDLLLS

SEQ ID NO: 61176 - protein, 10 aa, synthetic construct
EQERGDHGVL

SEQ ID NO: 61177 - protein, 10 aa, synthetic construct
EQERGDHVNL

SEQ ID NO: 61178 - protein, 10 aa, synthetic construct
EQERGDYVGL

SEQ ID NO: 61179 - protein, 10 aa, synthetic construct
EQERGDYSSV

SEQ ID NO: 61180 - protein, 10 aa, synthetic construct
EQERGDQSTL

SEQ ID NO: 61181 - protein, 10 aa, synthetic construct
EQERGDLLLS

SEQ ID NO: 61182 - protein, 10 aa, synthetic construct
EDGRGDHVNL

SEQ ID NO: 61183 - protein, 10 aa, synthetic construct
TKKRGDFNNT

SEQ ID NO: 61184 - protein, 10 aa, synthetic construct
SERRGDRQGI

SEQ ID NO: 61185 - protein, 10 aa, synthetic construct
EDGRGDRDYL

SEQ ID NO: 61186 - protein, 10 aa, synthetic construct
EDGRGDYSSV

SEQ ID NO: 61187 - protein, 10 aa, synthetic construct
EDGRGDLTVT

SEQ ID NO: 61188 - protein, 10 aa, synthetic construct
EDGRGDLIGR

SEQ ID NO: 61189 - protein, 10 aa, synthetic construct
EDARGDHVNL

SEQ ID NO: 61190 - protein, 10 aa, synthetic construct
EDARGDRDYL

SEQ ID NO: 61191 - protein, 10 aa, synthetic construct
EDARGDYSSV

SEQ ID NO: 61192 - protein, 10 aa, synthetic construct
EDARGDLTVT

SEQ ID NO: 61193 - protein, 10 aa, synthetic construct
EDARGDLIGR

SEQ ID NO: 61194 - protein, 10 aa, synthetic construct
EDVRGDHGVL

SEQ ID NO: 61195 - protein, 10 aa, synthetic construct
SERRGDRSVV

SEQ ID NO: 61196 - protein, 10 aa, synthetic construct
EDVRGDHVNL

SEQ ID NO: 61197 - protein, 10 aa, synthetic construct
EDVRGDYVGL

SEQ ID NO: 61198 - protein, 10 aa, synthetic construct
EDVRGDYSSV

SEQ ID NO: 61199 - protein, 10 aa, synthetic construct
EDVRGDQSTL

SEQ ID NO: 61200 - protein, 10 aa, synthetic construct
EDVRGDLLLS

SEQ ID NO: 61201 - protein, 10 aa, synthetic construct
EDPRGDHVNL

SEQ ID NO: 61202 - protein, 10 aa, synthetic construct
EDPRGDRDYL

SEQ ID NO: 61203 - protein, 10 aa, synthetic construct
EDPRGDYSSV

SEQ ID NO: 61204 - protein, 10 aa, synthetic construct
EDPRGDLTVT

SEQ ID NO: 61205 - protein, 10 aa, synthetic construct
EDPRGDLIGR

SEQ ID NO: 61206 - protein, 10 aa, synthetic construct
SERRGDRGVV

SEQ ID NO: 61207 - protein, 10 aa, synthetic construct
EDLRGDHGVL

SEQ ID NO: 61208 - protein, 10 aa, synthetic construct
EDLRGDHVNL

SEQ ID NO: 61209 - protein, 10 aa, synthetic construct
EDLRGDYVGL

SEQ ID NO: 61210 - protein, 10 aa, synthetic construct
EDLRGDYSSV

SEQ ID NO: 61211 - protein, 10 aa, synthetic construct
EDLRGDQSTL

SEQ ID NO: 61212 - protein, 10 aa, synthetic construct
EDLRGDLLLS

SEQ ID NO: 61213 - protein, 10 aa, synthetic construct
EDIRGDRGQI

SEQ ID NO: 61214 - protein, 10 aa, synthetic construct
EDIRGDRQGI

SEQ ID NO: 61215 - protein, 10 aa, synthetic construct
EDIRGDRSVV

SEQ ID NO: 61216 - protein, 10 aa, synthetic construct
EDIRGDRGVV

SEQ ID NO: 61217 - protein, 10 aa, synthetic construct
SERRGDRSQT

SEQ ID NO: 61218 - protein, 10 aa, synthetic construct
EDIRGDYVGL

SEQ ID NO: 61219 - protein, 10 aa, synthetic construct
EDIRGDQSTL

SEQ ID NO: 61220 - protein, 10 aa, synthetic construct
EDIRGDRSQT

SEQ ID NO: 61221 - protein, 10 aa, synthetic construct
EDIRGDLLLS

SEQ ID NO: 61222 - protein, 10 aa, synthetic construct
EDMRGDRGQI

SEQ ID NO: 61223 - protein, 10 aa, synthetic construct
EDMRGDRQGI

SEQ ID NO: 61224 - protein, 10 aa, synthetic construct
EDMRGDRSVV

SEQ ID NO: 61225 - protein, 10 aa, synthetic construct
EDMRGDRGVV

SEQ ID NO: 61226 - protein, 10 aa, synthetic construct
EDMRGDYVGL

SEQ ID NO: 61227 - protein, 10 aa, synthetic construct
EDMRGDQSTL

SEQ ID NO: 61228 - protein, 10 aa, synthetic construct
TGGRGDHGVL

SEQ ID NO: 61229 - protein, 10 aa, synthetic construct
EDMRGDRSQT

SEQ ID NO: 61230 - protein, 10 aa, synthetic construct
EDMRGDLLLS

SEQ ID NO: 61231 - protein, 10 aa, synthetic construct
EDWRGDHGVL

SEQ ID NO: 61232 - protein, 10 aa, synthetic construct
EDWRGDHVNL

SEQ ID NO: 61233 - protein, 10 aa, synthetic construct
EDWRGDYVGL

SEQ ID NO: 61234 - protein, 10 aa, synthetic construct
EDWRGDYSSV

SEQ ID NO: 61235 - protein, 10 aa, synthetic construct
EDWRGDQSTL

SEQ ID NO: 61236 - protein, 10 aa, synthetic construct
EDWRGDLLLS

SEQ ID NO: 61237 - protein, 10 aa, synthetic construct
EDFRGDRGQI

SEQ ID NO: 61238 - protein, 10 aa, synthetic construct
EDFRGDRQGI

SEQ ID NO: 61239 - protein, 10 aa, synthetic construct
TGGRGDYVGL

SEQ ID NO: 61240 - protein, 10 aa, synthetic construct
EDFRGDRSVV

SEQ ID NO: 61241 - protein, 10 aa, synthetic construct
EDFRGDRGVV

SEQ ID NO: 61242 - protein, 10 aa, synthetic construct
EDFRGDYVGL

SEQ ID NO: 61243 - protein, 10 aa, synthetic construct
EDFRGDQSTL

SEQ ID NO: 61244 - protein, 10 aa, synthetic construct
EDFRGDRSQT

SEQ ID NO: 61245 - protein, 10 aa, synthetic construct
EDFRGDLLLS

SEQ ID NO: 61246 - protein, 10 aa, synthetic construct
EDKRGDRGQI

SEQ ID NO: 61247 - protein, 10 aa, synthetic construct
EDKRGDRQGI

SEQ ID NO: 61248 - protein, 10 aa, synthetic construct
EDKRGDRSVV

SEQ ID NO: 61249 - protein, 10 aa, synthetic construct
EDKRGDRGVV

SEQ ID NO: 61250 - protein, 10 aa, synthetic construct
TGGRGDQSTL

SEQ ID NO: 61251 - protein, 10 aa, synthetic construct
EDKRGDYVGL

SEQ ID NO: 61252 - protein, 10 aa, synthetic construct
EDKRGDQSTL

SEQ ID NO: 61253 - protein, 10 aa, synthetic construct
EDKRGDRSQT

SEQ ID NO: 61254 - protein, 10 aa, synthetic construct
EDKRGDLLLS

SEQ ID NO: 61255 - protein, 10 aa, synthetic construct
EDRRGDHVNL

SEQ ID NO: 61256 - protein, 10 aa, synthetic construct
EDRRGDRDYL

SEQ ID NO: 61257 - protein, 10 aa, synthetic construct
EDRRGDYSSV

SEQ ID NO: 61258 - protein, 10 aa, synthetic construct
EDRRGDLTVT

SEQ ID NO: 61259 - protein, 10 aa, synthetic construct
EDRRGDLIGR

SEQ ID NO: 61260 - protein, 10 aa, synthetic construct
EDHRGDHGVL

SEQ ID NO: 61261 - protein, 10 aa, synthetic construct
TGGRGDLLLS

SEQ ID NO: 61262 - protein, 10 aa, synthetic construct
EDHRGDHVNL

SEQ ID NO: 61263 - protein, 10 aa, synthetic construct
EDHRGDYVGL

SEQ ID NO: 61264 - protein, 10 aa, synthetic construct
EDHRGDYSSV

SEQ ID NO: 61265 - protein, 10 aa, synthetic construct
EDHRGDQSTL

SEQ ID NO: 61266 - protein, 10 aa, synthetic construct
EDHRGDLLLS

SEQ ID NO: 61267 - protein, 10 aa, synthetic construct
EDSRGDHGVL

SEQ ID NO: 61268 - protein, 10 aa, synthetic construct
EDSRGDHVNL

SEQ ID NO: 61269 - protein, 10 aa, synthetic construct
EDSRGDYVGL

SEQ ID NO: 61270 - protein, 10 aa, synthetic construct
EDSRGDYSSV

SEQ ID NO: 61271 - protein, 10 aa, synthetic construct
EDSRGDQSTL

SEQ ID NO: 61272 - protein, 10 aa, synthetic construct
TGARGDHGVL

SEQ ID NO: 61273 - protein, 10 aa, synthetic construct
EDSRGDLLLS

SEQ ID NO: 61274 - protein, 10 aa, synthetic construct
EDTRGDHGVL

SEQ ID NO: 61275 - protein, 10 aa, synthetic construct
EDTRGDHVNL

SEQ ID NO: 61276 - protein, 10 aa, synthetic construct
EDTRGDYVGL

SEQ ID NO: 61277 - protein, 10 aa, synthetic construct
EDTRGDYSSV

SEQ ID NO: 61278 - protein, 10 aa, synthetic construct
EDTRGDQSTL

SEQ ID NO: 61279 - protein, 10 aa, synthetic construct
EDTRGDLLLS

SEQ ID NO: 61280 - protein, 10 aa, synthetic construct
EDYRGDRGQI

SEQ ID NO: 61281 - protein, 10 aa, synthetic construct
EDYRGDRQGI

SEQ ID NO: 61282 - protein, 10 aa, synthetic construct
EDYRGDRSVV

SEQ ID NO: 61283 - protein, 10 aa, synthetic construct
TGARGDYVGL

SEQ ID NO: 61284 - protein, 10 aa, synthetic construct
EDYRGDRGVV

SEQ ID NO: 61285 - protein, 10 aa, synthetic construct
EDYRGDYVGL

SEQ ID NO: 61286 - protein, 10 aa, synthetic construct
EDYRGDQSTL

SEQ ID NO: 61287 - protein, 10 aa, synthetic construct
EDYRGDRSQT

SEQ ID NO: 61288 - protein, 10 aa, synthetic construct
EDYRGDLLLS

SEQ ID NO: 61289 - protein, 10 aa, synthetic construct
EDNRGDRGQI

SEQ ID NO: 61290 - protein, 10 aa, synthetic construct
EDNRGDRQGI

SEQ ID NO: 61291 - protein, 10 aa, synthetic construct
EDNRGDRSVV

SEQ ID NO: 61292 - protein, 10 aa, synthetic construct
EDNRGDRGVV

SEQ ID NO: 61293 - protein, 10 aa, synthetic construct
EDNRGDYVGL

SEQ ID NO: 61294 - protein, 10 aa, synthetic construct
TKKRGDFNNL

SEQ ID NO: 61295 - protein, 10 aa, synthetic construct
TGARGDQSTL

SEQ ID NO: 61296 - protein, 10 aa, synthetic construct
EDNRGDQSTL

SEQ ID NO: 61297 - protein, 10 aa, synthetic construct
EDNRGDRSQT

SEQ ID NO: 61298 - protein, 10 aa, synthetic construct
EDNRGDLLLS

SEQ ID NO: 61299 - protein, 10 aa, synthetic construct
EDQRGDHGVL

SEQ ID NO: 61300 - protein, 10 aa, synthetic construct
EDQRGDHVNL

SEQ ID NO: 61301 - protein, 10 aa, synthetic construct
EDQRGDYVGL

SEQ ID NO: 61302 - protein, 10 aa, synthetic construct
EDQRGDYSSV

SEQ ID NO: 61303 - protein, 10 aa, synthetic construct
EDQRGDQSTL

SEQ ID NO: 61304 - protein, 10 aa, synthetic construct
EDQRGDLLLS

SEQ ID NO: 61305 - protein, 10 aa, synthetic construct
EDDRGDHGVL

SEQ ID NO: 61306 - protein, 10 aa, synthetic construct
TGARGDLLLS

SEQ ID NO: 61307 - protein, 10 aa, synthetic construct
EDDRGDHVNL

SEQ ID NO: 61308 - protein, 10 aa, synthetic construct
EDDRGDYVGL

SEQ ID NO: 61309 - protein, 10 aa, synthetic construct
EDDRGDYSSV

SEQ ID NO: 61310 - protein, 10 aa, synthetic construct
EDDRGDQSTL

SEQ ID NO: 61311 - protein, 10 aa, synthetic construct
EDDRGDLLLS

SEQ ID NO: 61312 - protein, 10 aa, synthetic construct
EDERGDHGVL

SEQ ID NO: 61313 - protein, 10 aa, synthetic construct
EDERGDHVNL

SEQ ID NO: 61314 - protein, 10 aa, synthetic construct
EDERGDYVGL

SEQ ID NO: 61315 - protein, 10 aa, synthetic construct
EDERGDYSSV

SEQ ID NO: 61316 - protein, 10 aa, synthetic construct
EDERGDQSTL

SEQ ID NO: 61317 - protein, 10 aa, synthetic construct
TGVRGDRGQI

SEQ ID NO: 61318 - protein, 10 aa, synthetic construct
EDERGDLLLS

SEQ ID NO: 61319 - protein, 10 aa, synthetic construct
EEGRGDHVNL

SEQ ID NO: 61320 - protein, 10 aa, synthetic construct
EEGRGDRDYL

SEQ ID NO: 61321 - protein, 10 aa, synthetic construct
EEGRGDYSSV

SEQ ID NO: 61322 - protein, 10 aa, synthetic construct
EEGRGDLTVT

SEQ ID NO: 61323 - protein, 10 aa, synthetic construct
EEGRGDLIGR

SEQ ID NO: 61324 - protein, 10 aa, synthetic construct
EEARGDHVNL

SEQ ID NO: 61325 - protein, 10 aa, synthetic construct
EEARGDRDYL

SEQ ID NO: 61326 - protein, 10 aa, synthetic construct
EEARGDYSSV

SEQ ID NO: 61327 - protein, 10 aa, synthetic construct
EEARGDLTVT

SEQ ID NO: 61328 - protein, 10 aa, synthetic construct
TGVRGDRQGI

SEQ ID NO: 61329 - protein, 10 aa, synthetic construct
EEARGDLIGR

SEQ ID NO: 61330 - protein, 10 aa, synthetic construct
EEVRGDHGVL

SEQ ID NO: 61331 - protein, 10 aa, synthetic construct
EEVRGDHVNL

SEQ ID NO: 61332 - protein, 10 aa, synthetic construct
EEVRGDYVGL

SEQ ID NO: 61333 - protein, 10 aa, synthetic construct
EEVRGDYSSV

SEQ ID NO: 61334 - protein, 10 aa, synthetic construct
EEVRGDQSTL

SEQ ID NO: 61335 - protein, 10 aa, synthetic construct
EEVRGDLLLS

SEQ ID NO: 61336 - protein, 10 aa, synthetic construct
EEPRGDHVNL

SEQ ID NO: 61337 - protein, 10 aa, synthetic construct
EEPRGDRDYL

SEQ ID NO: 61338 - protein, 10 aa, synthetic construct
EEPRGDYSSV

SEQ ID NO: 61339 - protein, 10 aa, synthetic construct
TGVRGDRSVV

SEQ ID NO: 61340 - protein, 10 aa, synthetic construct
EEPRGDLTVT

SEQ ID NO: 61341 - protein, 10 aa, synthetic construct
EEPRGDLIGR

SEQ ID NO: 61342 - protein, 10 aa, synthetic construct
EELRGDHGVL

SEQ ID NO: 61343 - protein, 10 aa, synthetic construct
EELRGDHVNL

SEQ ID NO: 61344 - protein, 10 aa, synthetic construct
EELRGDYVGL

SEQ ID NO: 61345 - protein, 10 aa, synthetic construct
EELRGDYSSV

SEQ ID NO: 61346 - protein, 10 aa, synthetic construct
EELRGDQSTL

SEQ ID NO: 61347 - protein, 10 aa, synthetic construct
EELRGDLLLS

SEQ ID NO: 61348 - protein, 10 aa, synthetic construct
EEIRGDRGQI

SEQ ID NO: 61349 - protein, 10 aa, synthetic construct
EEIRGDRQGI

SEQ ID NO: 61350 - protein, 10 aa, synthetic construct
TGVRGDRGVV

SEQ ID NO: 61351 - protein, 10 aa, synthetic construct
EEIRGDRSVV

SEQ ID NO: 61352 - protein, 10 aa, synthetic construct
EEIRGDRGVV

SEQ ID NO: 61353 - protein, 10 aa, synthetic construct
EEIRGDYVGL

SEQ ID NO: 61354 - protein, 10 aa, synthetic construct
EEIRGDQSTL

SEQ ID NO: 61355 - protein, 10 aa, synthetic construct
EEIRGDRSQT

SEQ ID NO: 61356 - protein, 10 aa, synthetic construct
EEIRGDLLLS

SEQ ID NO: 61357 - protein, 10 aa, synthetic construct
EEMRGDRGQI

SEQ ID NO: 61358 - protein, 10 aa, synthetic construct
EEMRGDRQGI

SEQ ID NO: 61359 - protein, 10 aa, synthetic construct
EEMRGDRSVV

SEQ ID NO: 61360 - protein, 10 aa, synthetic construct
EEMRGDRGVV

SEQ ID NO: 61361 - protein, 10 aa, synthetic construct
TGVRGDRSQT

SEQ ID NO: 61362 - protein, 10 aa, synthetic construct
EEMRGDYVGL

SEQ ID NO: 61363 - protein, 10 aa, synthetic construct
EEMRGDQSTL

SEQ ID NO: 61364 - protein, 10 aa, synthetic construct
EEMRGDRSQT

SEQ ID NO: 61365 - protein, 10 aa, synthetic construct
EEMRGDLLLS

SEQ ID NO: 61366 - protein, 10 aa, synthetic construct
EEWRGDHGVL

SEQ ID NO: 61367 - protein, 10 aa, synthetic construct
EEWRGDHVNL

SEQ ID NO: 61368 - protein, 10 aa, synthetic construct
EEWRGDYVGL

SEQ ID NO: 61369 - protein, 10 aa, synthetic construct
EEWRGDYSSV

SEQ ID NO: 61370 - protein, 10 aa, synthetic construct
EEWRGDQSTL

SEQ ID NO: 61371 - protein, 10 aa, synthetic construct
EEWRGDLLLS

SEQ ID NO: 61372 - protein, 10 aa, synthetic construct
TGPRGDHGVL

SEQ ID NO: 61373 - protein, 10 aa, synthetic construct
EEFRGDRGQI

SEQ ID NO: 61374 - protein, 10 aa, synthetic construct
EEFRGDRQGI

SEQ ID NO: 61375 - protein, 10 aa, synthetic construct
EEFRGDRSVV

SEQ ID NO: 61376 - protein, 10 aa, synthetic construct
EEFRGDRGVV

SEQ ID NO: 61377 - protein, 10 aa, synthetic construct
EEFRGDYVGL

SEQ ID NO: 61378 - protein, 10 aa, synthetic construct
EEFRGDQSTL

SEQ ID NO: 61379 - protein, 10 aa, synthetic construct
EEFRGDRSQT

SEQ ID NO: 61380 - protein, 10 aa, synthetic construct
EEFRGDLLLS

SEQ ID NO: 61381 - protein, 10 aa, synthetic construct
EEKRGDRGQI

SEQ ID NO: 61382 - protein, 10 aa, synthetic construct
EEKRGDRQGI

SEQ ID NO: 61383 - protein, 10 aa, synthetic construct
TGPRGDYVGL

SEQ ID NO: 61384 - protein, 10 aa, synthetic construct
EEKRGDRSVV

SEQ ID NO: 61385 - protein, 10 aa, synthetic construct
EEKRGDRGVV

SEQ ID NO: 61386 - protein, 10 aa, synthetic construct
EEKRGDYVGL

SEQ ID NO: 61387 - protein, 10 aa, synthetic construct
EEKRGDQSTL

SEQ ID NO: 61388 - protein, 10 aa, synthetic construct
EEKRGDRSQT

SEQ ID NO: 61389 - protein, 10 aa, synthetic construct
EEKRGDLLLS

SEQ ID NO: 61390 - protein, 10 aa, synthetic construct
EERRGDHVNL

SEQ ID NO: 61391 - protein, 10 aa, synthetic construct
EERRGDRDYL

SEQ ID NO: 61392 - protein, 10 aa, synthetic construct
EERRGDYSSV

SEQ ID NO: 61393 - protein, 10 aa, synthetic construct
EERRGDLTVT

SEQ ID NO: 61394 - protein, 10 aa, synthetic construct
TGPRGDQSTL

SEQ ID NO: 61395 - protein, 10 aa, synthetic construct
EERRGDLIGR

SEQ ID NO: 61396 - protein, 10 aa, synthetic construct
EEHRGDHGVL

SEQ ID NO: 61397 - protein, 10 aa, synthetic construct
EEHRGDHVNL

SEQ ID NO: 61398 - protein, 10 aa, synthetic construct
EEHRGDYVGL

SEQ ID NO: 61399 - protein, 10 aa, synthetic construct
EEHRGDYSSV

SEQ ID NO: 61400 - protein, 10 aa, synthetic construct
EEHRGDQSTL

SEQ ID NO: 61401 - protein, 10 aa, synthetic construct
EEHRGDLLLS

SEQ ID NO: 61402 - protein, 10 aa, synthetic construct
EESRGDHGVL

SEQ ID NO: 61403 - protein, 10 aa, synthetic construct
EESRGDHVNL

SEQ ID NO: 61404 - protein, 10 aa, synthetic construct
EESRGDYVGL

SEQ ID NO: 61405 - protein, 10 aa, synthetic construct
TKNRGDFNNT

SEQ ID NO: 61406 - protein, 10 aa, synthetic construct
TGPRGDLLLS

SEQ ID NO: 61407 - protein, 10 aa, synthetic construct
EESRGDYSSV

SEQ ID NO: 61408 - protein, 10 aa, synthetic construct
EESRGDQSTL

SEQ ID NO: 61409 - protein, 10 aa, synthetic construct
EESRGDLLLS

SEQ ID NO: 61410 - protein, 10 aa, synthetic construct
EETRGDHGVL

SEQ ID NO: 61411 - protein, 10 aa, synthetic construct
EETRGDHVNL

SEQ ID NO: 61412 - protein, 10 aa, synthetic construct
EETRGDYVGL

SEQ ID NO: 61413 - protein, 10 aa, synthetic construct
EETRGDYSSV

SEQ ID NO: 61414 - protein, 10 aa, synthetic construct
EETRGDQSTL

SEQ ID NO: 61415 - protein, 10 aa, synthetic construct
EETRGDLLLS

SEQ ID NO: 61416 - protein, 10 aa, synthetic construct
EEYRGDRGQI

SEQ ID NO: 61417 - protein, 10 aa, synthetic construct
TGLRGDRGQI

SEQ ID NO: 61418 - protein, 10 aa, synthetic construct
EEYRGDRQGI

SEQ ID NO: 61419 - protein, 10 aa, synthetic construct
EEYRGDRSVV

SEQ ID NO: 61420 - protein, 10 aa, synthetic construct
EEYRGDRGVV

SEQ ID NO: 61421 - protein, 10 aa, synthetic construct
EEYRGDYVGL

SEQ ID NO: 61422 - protein, 10 aa, synthetic construct
EEYRGDQSTL

SEQ ID NO: 61423 - protein, 10 aa, synthetic construct
EEYRGDRSQT

SEQ ID NO: 61424 - protein, 10 aa, synthetic construct
EEYRGDLLLS

SEQ ID NO: 61425 - protein, 10 aa, synthetic construct
EENRGDRGQI

SEQ ID NO: 61426 - protein, 10 aa, synthetic construct
EENRGDRQGI

SEQ ID NO: 61427 - protein, 10 aa, synthetic construct
EENRGDRSVV

SEQ ID NO: 61428 - protein, 10 aa, synthetic construct
TGLRGDRQGI

SEQ ID NO: 61429 - protein, 10 aa, synthetic construct
EENRGDRGVV

SEQ ID NO: 61430 - protein, 10 aa, synthetic construct
EENRGDYVGL

SEQ ID NO: 61431 - protein, 10 aa, synthetic construct
EENRGDQSTL

SEQ ID NO: 61432 - protein, 10 aa, synthetic construct
EENRGDRSQT

SEQ ID NO: 61433 - protein, 10 aa, synthetic construct
EENRGDLLLS

SEQ ID NO: 61434 - protein, 10 aa, synthetic construct
EEQRGDHGVL

SEQ ID NO: 61435 - protein, 10 aa, synthetic construct
EEQRGDHVNL

SEQ ID NO: 61436 - protein, 10 aa, synthetic construct
EEQRGDYVGL

SEQ ID NO: 61437 - protein, 10 aa, synthetic construct
EEQRGDYSSV

SEQ ID NO: 61438 - protein, 10 aa, synthetic construct
EEQRGDQSTL

SEQ ID NO: 61439 - protein, 10 aa, synthetic construct
TGLRGDRSVV

SEQ ID NO: 61440 - protein, 10 aa, synthetic construct
EEQRGDLLLS

SEQ ID NO: 61441 - protein, 10 aa, synthetic construct
EEDRGDHGVL

SEQ ID NO: 61442 - protein, 10 aa, synthetic construct
EEDRGDHVNL

SEQ ID NO: 61443 - protein, 10 aa, synthetic construct
EEDRGDYVGL

SEQ ID NO: 61444 - protein, 10 aa, synthetic construct
EEDRGDYSSV

SEQ ID NO: 61445 - protein, 10 aa, synthetic construct
EEDRGDQSTL

SEQ ID NO: 61446 - protein, 10 aa, synthetic construct
EEDRGDLLLS

SEQ ID NO: 61447 - protein, 10 aa, synthetic construct
EEERGDHGVL

SEQ ID NO: 61448 - protein, 10 aa, synthetic construct
EEERGDHVNL

SEQ ID NO: 61449 - protein, 10 aa, synthetic construct
EEERGDYVGL

SEQ ID NO: 61450 - protein, 10 aa, synthetic construct
TGLRGDRGVV

SEQ ID NO: 61451 - protein, 10 aa, synthetic construct
EEERGDYSSV

SEQ ID NO: 61452 - protein, 10 aa, synthetic construct
EEERGDQSTL

SEQ ID NO: 61453 - protein, 10 aa, synthetic construct
EEERGDLLLS

SEQ ID NO: 61454 - protein, 10 aa, synthetic construct
NGGRGDHVNL

SEQ ID NO: 61455 - protein, 10 aa, synthetic construct
NGGRGDRDYL

SEQ ID NO: 61456 - protein, 10 aa, synthetic construct
NGGRGDYSSV

SEQ ID NO: 61457 - protein, 10 aa, synthetic construct
NGGRGDLTVT

SEQ ID NO: 61458 - protein, 10 aa, synthetic construct
NGGRGDLIGR

SEQ ID NO: 61459 - protein, 10 aa, synthetic construct
NGARGDHVNL

SEQ ID NO: 61460 - protein, 10 aa, synthetic construct
NGARGDRDYL

SEQ ID NO: 61461 - protein, 10 aa, synthetic construct
TGLRGDRSQT

SEQ ID NO: 61462 - protein, 10 aa, synthetic construct
NGARGDYSSV

SEQ ID NO: 61463 - protein, 10 aa, synthetic construct
NGARGDLTVT

SEQ ID NO: 61464 - protein, 10 aa, synthetic construct
NGARGDLIGR

SEQ ID NO: 61465 - protein, 10 aa, synthetic construct
NGVRGDHGVL

SEQ ID NO: 61466 - protein, 10 aa, synthetic construct
NGVRGDHVNL

SEQ ID NO: 61467 - protein, 10 aa, synthetic construct
NGVRGDYVGL

SEQ ID NO: 61468 - protein, 10 aa, synthetic construct
NGVRGDYSSV

SEQ ID NO: 61469 - protein, 10 aa, synthetic construct
NGVRGDQSTL

SEQ ID NO: 61470 - protein, 10 aa, synthetic construct
NGVRGDLLLS

SEQ ID NO: 61471 - protein, 10 aa, synthetic construct
NGPRGDHVNL

SEQ ID NO: 61472 - protein, 10 aa, synthetic construct
TGWRGDRGQI

SEQ ID NO: 61473 - protein, 10 aa, synthetic construct
NGPRGDRDYL

SEQ ID NO: 61474 - protein, 10 aa, synthetic construct
NGPRGDYSSV

SEQ ID NO: 61475 - protein, 10 aa, synthetic construct
NGPRGDLTVT

SEQ ID NO: 61476 - protein, 10 aa, synthetic construct
NGPRGDLIGR

SEQ ID NO: 61477 - protein, 10 aa, synthetic construct
NGLRGDHGVL

SEQ ID NO: 61478 - protein, 10 aa, synthetic construct
NGLRGDHVNL

SEQ ID NO: 61479 - protein, 10 aa, synthetic construct
NGLRGDYVGL

SEQ ID NO: 61480 - protein, 10 aa, synthetic construct
NGLRGDYSSV

SEQ ID NO: 61481 - protein, 10 aa, synthetic construct
NGLRGDQSTL

SEQ ID NO: 61482 - protein, 10 aa, synthetic construct
NGLRGDLLLS

SEQ ID NO: 61483 - protein, 10 aa, synthetic construct
TGWRGDRQGI

SEQ ID NO: 61484 - protein, 10 aa, synthetic construct
NGIRGDRGQI

SEQ ID NO: 61485 - protein, 10 aa, synthetic construct
NGIRGDRQGI

SEQ ID NO: 61486 - protein, 10 aa, synthetic construct
NGIRGDRSVV

SEQ ID NO: 61487 - protein, 10 aa, synthetic construct
NGIRGDRGVV

SEQ ID NO: 61488 - protein, 10 aa, synthetic construct
NGIRGDYVGL

SEQ ID NO: 61489 - protein, 10 aa, synthetic construct
NGIRGDQSTL

SEQ ID NO: 61490 - protein, 10 aa, synthetic construct
NGIRGDRSQT

SEQ ID NO: 61491 - protein, 10 aa, synthetic construct
NGIRGDLLLS

SEQ ID NO: 61492 - protein, 10 aa, synthetic construct
NGMRGDRGQI

SEQ ID NO: 61493 - protein, 10 aa, synthetic construct
NGMRGDRQGI

SEQ ID NO: 61494 - protein, 10 aa, synthetic construct
TGWRGDRSVV

SEQ ID NO: 61495 - protein, 10 aa, synthetic construct
NGMRGDRSVV

SEQ ID NO: 61496 - protein, 10 aa, synthetic construct
NGMRGDRGVV

SEQ ID NO: 61497 - protein, 10 aa, synthetic construct
NGMRGDYVGL

SEQ ID NO: 61498 - protein, 10 aa, synthetic construct
NGMRGDQSTL

SEQ ID NO: 61499 - protein, 10 aa, synthetic construct
NGMRGDRSQT

SEQ ID NO: 61500 - protein, 10 aa, synthetic construct
NGMRGDLLLS

SEQ ID NO: 61501 - protein, 10 aa, synthetic construct
NGWRGDHGVL

SEQ ID NO: 61502 - protein, 10 aa, synthetic construct
NGWRGDHVNL

SEQ ID NO: 61503 - protein, 10 aa, synthetic construct
NGWRGDYVGL

SEQ ID NO: 61504 - protein, 10 aa, synthetic construct
NGWRGDYSSV

SEQ ID NO: 61505 - protein, 10 aa, synthetic construct
TGWRGDRGVV

SEQ ID NO: 61506 - protein, 10 aa, synthetic construct
NGWRGDQSTL

SEQ ID NO: 61507 - protein, 10 aa, synthetic construct
NGWRGDLLLS

SEQ ID NO: 61508 - protein, 10 aa, synthetic construct
NGFRGDRGQI

SEQ ID NO: 61509 - protein, 10 aa, synthetic construct
NGFRGDRQGI

SEQ ID NO: 61510 - protein, 10 aa, synthetic construct
NGFRGDRSVV

SEQ ID NO: 61511 - protein, 10 aa, synthetic construct
NGFRGDRGVV

SEQ ID NO: 61512 - protein, 10 aa, synthetic construct
NGFRGDYVGL

SEQ ID NO: 61513 - protein, 10 aa, synthetic construct
NGFRGDQSTL

SEQ ID NO: 61514 - protein, 10 aa, synthetic construct
NGFRGDRSQT

SEQ ID NO: 61515 - protein, 10 aa, synthetic construct
NGFRGDLLLS

SEQ ID NO: 61516 - protein, 10 aa, synthetic construct
TKNRGDFNNL

SEQ ID NO: 61517 - protein, 10 aa, synthetic construct
TGWRGDRSQT

SEQ ID NO: 61518 - protein, 10 aa, synthetic construct
NGKRGDRGQI

SEQ ID NO: 61519 - protein, 10 aa, synthetic construct
NGKRGDRQGI

SEQ ID NO: 61520 - protein, 10 aa, synthetic construct
NGKRGDRSVV

SEQ ID NO: 61521 - protein, 10 aa, synthetic construct
NGKRGDRGVV

SEQ ID NO: 61522 - protein, 10 aa, synthetic construct
NGKRGDYVGL

SEQ ID NO: 61523 - protein, 10 aa, synthetic construct
NGKRGDQSTL

SEQ ID NO: 61524 - protein, 10 aa, synthetic construct
NGKRGDRSQT

SEQ ID NO: 61525 - protein, 10 aa, synthetic construct
NGKRGDLLLS

SEQ ID NO: 61526 - protein, 10 aa, synthetic construct
NGRRGDHVNL

SEQ ID NO: 61527 - protein, 10 aa, synthetic construct
NGRRGDRDYL

SEQ ID NO: 61528 - protein, 10 aa, synthetic construct
TGRRGDHGVL

SEQ ID NO: 61529 - protein, 10 aa, synthetic construct
NGRRGDYSSV

SEQ ID NO: 61530 - protein, 10 aa, synthetic construct
NGRRGDLTVT

SEQ ID NO: 61531 - protein, 10 aa, synthetic construct
NGRRGDLIGR

SEQ ID NO: 61532 - protein, 10 aa, synthetic construct
NGHRGDHGVL

SEQ ID NO: 61533 - protein, 10 aa, synthetic construct
NGHRGDHVNL

SEQ ID NO: 61534 - protein, 10 aa, synthetic construct
NGHRGDYVGL

SEQ ID NO: 61535 - protein, 10 aa, synthetic construct
NGHRGDYSSV

SEQ ID NO: 61536 - protein, 10 aa, synthetic construct
NGHRGDQSTL

SEQ ID NO: 61537 - protein, 10 aa, synthetic construct
NGHRGDLLLS

SEQ ID NO: 61538 - protein, 10 aa, synthetic construct
NGSRGDHGVL

SEQ ID NO: 61539 - protein, 10 aa, synthetic construct
TGRRGDYVGL

SEQ ID NO: 61540 - protein, 10 aa, synthetic construct
NGSRGDHVNL

SEQ ID NO: 61541 - protein, 10 aa, synthetic construct
NGSRGDYVGL

SEQ ID NO: 61542 - protein, 10 aa, synthetic construct
NGSRGDYSSV

SEQ ID NO: 61543 - protein, 10 aa, synthetic construct
NGSRGDQSTL

SEQ ID NO: 61544 - protein, 10 aa, synthetic construct
NGSRGDLLLS

SEQ ID NO: 61545 - protein, 10 aa, synthetic construct
NGTRGDHGVL

SEQ ID NO: 61546 - protein, 10 aa, synthetic construct
NGTRGDHVNL

SEQ ID NO: 61547 - protein, 10 aa, synthetic construct
NGTRGDYVGL

SEQ ID NO: 61548 - protein, 10 aa, synthetic construct
NGTRGDYSSV

SEQ ID NO: 61549 - protein, 10 aa, synthetic construct
NGTRGDQSTL

SEQ ID NO: 61550 - protein, 10 aa, synthetic construct
TGRRGDQSTL

SEQ ID NO: 61551 - protein, 10 aa, synthetic construct
NGTRGDLLLS

SEQ ID NO: 61552 - protein, 10 aa, synthetic construct
NGYRGDRGQI

SEQ ID NO: 61553 - protein, 10 aa, synthetic construct
NGYRGDRQGI

SEQ ID NO: 61554 - protein, 10 aa, synthetic construct
NGYRGDRSVV

SEQ ID NO: 61555 - protein, 10 aa, synthetic construct
NGYRGDRGVV

SEQ ID NO: 61556 - protein, 10 aa, synthetic construct
NGYRGDYVGL

SEQ ID NO: 61557 - protein, 10 aa, synthetic construct
NGYRGDQSTL

SEQ ID NO: 61558 - protein, 10 aa, synthetic construct
NGYRGDRSQT

SEQ ID NO: 61559 - protein, 10 aa, synthetic construct
NGYRGDLLLS

SEQ ID NO: 61560 - protein, 10 aa, synthetic construct
NGNRGDRGQI

SEQ ID NO: 61561 - protein, 10 aa, synthetic construct
TGRRGDLLLS

SEQ ID NO: 61562 - protein, 10 aa, synthetic construct
NGNRGDRQGI

SEQ ID NO: 61563 - protein, 10 aa, synthetic construct
NGNRGDRSVV

SEQ ID NO: 61564 - protein, 10 aa, synthetic construct
NGNRGDRGVV

SEQ ID NO: 61565 - protein, 10 aa, synthetic construct
NGNRGDYVGL

SEQ ID NO: 61566 - protein, 10 aa, synthetic construct
NGNRGDQSTL

SEQ ID NO: 61567 - protein, 10 aa, synthetic construct
NGNRGDRSQT

SEQ ID NO: 61568 - protein, 10 aa, synthetic construct
NGNRGDLLLS

SEQ ID NO: 61569 - protein, 10 aa, synthetic construct
NGQRGDHGVL

SEQ ID NO: 61570 - protein, 10 aa, synthetic construct
NGQRGDHVNL

SEQ ID NO: 61571 - protein, 10 aa, synthetic construct
NGQRGDYVGL

SEQ ID NO: 61572 - protein, 10 aa, synthetic construct
TGHRGDRGQI

SEQ ID NO: 61573 - protein, 10 aa, synthetic construct
NGQRGDYSSV

SEQ ID NO: 61574 - protein, 10 aa, synthetic construct
NGQRGDQSTL

SEQ ID NO: 61575 - protein, 10 aa, synthetic construct
NGQRGDLLLS

SEQ ID NO: 61576 - protein, 10 aa, synthetic construct
NGDRGDHGVL

SEQ ID NO: 61577 - protein, 10 aa, synthetic construct
NGDRGDHVNL

SEQ ID NO: 61578 - protein, 10 aa, synthetic construct
NGDRGDYVGL

SEQ ID NO: 61579 - protein, 10 aa, synthetic construct
NGDRGDYSSV

SEQ ID NO: 61580 - protein, 10 aa, synthetic construct
NGDRGDQSTL

SEQ ID NO: 61581 - protein, 10 aa, synthetic construct
NGDRGDLLLS

SEQ ID NO: 61582 - protein, 10 aa, synthetic construct
NGERGDHGVL

SEQ ID NO: 61583 - protein, 10 aa, synthetic construct
TGHRGDRQGI

SEQ ID NO: 61584 - protein, 10 aa, synthetic construct
NGERGDHVNL

SEQ ID NO: 61585 - protein, 10 aa, synthetic construct
NGERGDYVGL

SEQ ID NO: 61586 - protein, 10 aa, synthetic construct
NGERGDYSSV

SEQ ID NO: 61587 - protein, 10 aa, synthetic construct
NGERGDQSTL

SEQ ID NO: 61588 - protein, 10 aa, synthetic construct
NGERGDLLLS

SEQ ID NO: 61589 - protein, 10 aa, synthetic construct
NAGRGDHVNL

SEQ ID NO: 61590 - protein, 10 aa, synthetic construct
NAGRGDRDYL

SEQ ID NO: 61591 - protein, 10 aa, synthetic construct
NAGRGDYSSV

SEQ ID NO: 61592 - protein, 10 aa, synthetic construct
NAGRGDLTVT

SEQ ID NO: 61593 - protein, 10 aa, synthetic construct
NAGRGDLIGR

SEQ ID NO: 61594 - protein, 10 aa, synthetic construct
TGHRGDRSVV

SEQ ID NO: 61595 - protein, 10 aa, synthetic construct
NAARGDHVNL

SEQ ID NO: 61596 - protein, 10 aa, synthetic construct
NAARGDRDYL

SEQ ID NO: 61597 - protein, 10 aa, synthetic construct
NAARGDYSSV

SEQ ID NO: 61598 - protein, 10 aa, synthetic construct
NAARGDLTVT

SEQ ID NO: 61599 - protein, 10 aa, synthetic construct
NAARGDLIGR

SEQ ID NO: 61600 - protein, 10 aa, synthetic construct
NAVRGDHGVL

SEQ ID NO: 61601 - protein, 10 aa, synthetic construct
NAVRGDHVNL

SEQ ID NO: 61602 - protein, 10 aa, synthetic construct
NAVRGDYVGL

SEQ ID NO: 61603 - protein, 10 aa, synthetic construct
NAVRGDYSSV

SEQ ID NO: 61604 - protein, 10 aa, synthetic construct
NAVRGDQSTL

SEQ ID NO: 61605 - protein, 10 aa, synthetic construct
TGHRGDRGVV

SEQ ID NO: 61606 - protein, 10 aa, synthetic construct
NAVRGDLLLS

SEQ ID NO: 61607 - protein, 10 aa, synthetic construct
NAPRGDHVNL

SEQ ID NO: 61608 - protein, 10 aa, synthetic construct
NAPRGDRDYL

SEQ ID NO: 61609 - protein, 10 aa, synthetic construct
NAPRGDYSSV

SEQ ID NO: 61610 - protein, 10 aa, synthetic construct
NAPRGDLTVT

SEQ ID NO: 61611 - protein, 10 aa, synthetic construct
NAPRGDLIGR

SEQ ID NO: 61612 - protein, 10 aa, synthetic construct
NALRGDHGVL

SEQ ID NO: 61613 - protein, 10 aa, synthetic construct
NALRGDHVNL

SEQ ID NO: 61614 - protein, 10 aa, synthetic construct
NALRGDYVGL

SEQ ID NO: 61615 - protein, 10 aa, synthetic construct
NALRGDYSSV

SEQ ID NO: 61616 - protein, 10 aa, synthetic construct
TGHRGDRSQT

SEQ ID NO: 61617 - protein, 10 aa, synthetic construct
NALRGDQSTL

SEQ ID NO: 61618 - protein, 10 aa, synthetic construct
NALRGDLLLS

SEQ ID NO: 61619 - protein, 10 aa, synthetic construct
NAIRGDRGQI

SEQ ID NO: 61620 - protein, 10 aa, synthetic construct
NAIRGDRQGI

SEQ ID NO: 61621 - protein, 10 aa, synthetic construct
NAIRGDRSVV

SEQ ID NO: 61622 - protein, 10 aa, synthetic construct
NAIRGDRGVV

SEQ ID NO: 61623 - protein, 10 aa, synthetic construct
NAIRGDYVGL

SEQ ID NO: 61624 - protein, 10 aa, synthetic construct
NAIRGDQSTL

SEQ ID NO: 61625 - protein, 10 aa, synthetic construct
NAIRGDRSQT

SEQ ID NO: 61626 - protein, 10 aa, synthetic construct
NAIRGDLLLS

SEQ ID NO: 61627 - protein, 10 aa, synthetic construct
EKKRGDFNNT

SEQ ID NO: 61628 - protein, 10 aa, synthetic construct
TGSRGDRGQI

SEQ ID NO: 61629 - protein, 10 aa, synthetic construct
NAMRGDRGQI

SEQ ID NO: 61630 - protein, 10 aa, synthetic construct
NAMRGDRQGI

SEQ ID NO: 61631 - protein, 10 aa, synthetic construct
NAMRGDRSVV

SEQ ID NO: 61632 - protein, 10 aa, synthetic construct
NAMRGDRGVV

SEQ ID NO: 61633 - protein, 10 aa, synthetic construct
NAMRGDYVGL

SEQ ID NO: 61634 - protein, 10 aa, synthetic construct
NAMRGDQSTL

SEQ ID NO: 61635 - protein, 10 aa, synthetic construct
NAMRGDRSQT

SEQ ID NO: 61636 - protein, 10 aa, synthetic construct
NAMRGDLLLS

SEQ ID NO: 61637 - protein, 10 aa, synthetic construct
NAWRGDHGVL

SEQ ID NO: 61638 - protein, 10 aa, synthetic construct
NAWRGDHVNL

SEQ ID NO: 61639 - protein, 10 aa, synthetic construct
TGSRGDRQGI

SEQ ID NO: 61640 - protein, 10 aa, synthetic construct
NAWRGDYVGL

SEQ ID NO: 61641 - protein, 10 aa, synthetic construct
NAWRGDYSSV

SEQ ID NO: 61642 - protein, 10 aa, synthetic construct
NAWRGDQSTL

SEQ ID NO: 61643 - protein, 10 aa, synthetic construct
NAWRGDLLLS

SEQ ID NO: 61644 - protein, 10 aa, synthetic construct
NAFRGDRGQI

SEQ ID NO: 61645 - protein, 10 aa, synthetic construct
NAFRGDRQGI

SEQ ID NO: 61646 - protein, 10 aa, synthetic construct
NAFRGDRSVV

SEQ ID NO: 61647 - protein, 10 aa, synthetic construct
NAFRGDRGVV

SEQ ID NO: 61648 - protein, 10 aa, synthetic construct
NAFRGDYVGL

SEQ ID NO: 61649 - protein, 10 aa, synthetic construct
NAFRGDQSTL

SEQ ID NO: 61650 - protein, 10 aa, synthetic construct
TGSRGDRSVV

SEQ ID NO: 61651 - protein, 10 aa, synthetic construct
NAFRGDRSQT

SEQ ID NO: 61652 - protein, 10 aa, synthetic construct
NAFRGDLLLS

SEQ ID NO: 61653 - protein, 10 aa, synthetic construct
NAKRGDRGQI

SEQ ID NO: 61654 - protein, 10 aa, synthetic construct
NAKRGDRQGI

SEQ ID NO: 61655 - protein, 10 aa, synthetic construct
NAKRGDRSVV

SEQ ID NO: 61656 - protein, 10 aa, synthetic construct
NAKRGDRGVV

SEQ ID NO: 61657 - protein, 10 aa, synthetic construct
NAKRGDYVGL

SEQ ID NO: 61658 - protein, 10 aa, synthetic construct
NAKRGDQSTL

SEQ ID NO: 61659 - protein, 10 aa, synthetic construct
NAKRGDRSQT

SEQ ID NO: 61660 - protein, 10 aa, synthetic construct
NAKRGDLLLS

SEQ ID NO: 61661 - protein, 10 aa, synthetic construct
TGSRGDRGVV

SEQ ID NO: 61662 - protein, 10 aa, synthetic construct
NARRGDHVNL

SEQ ID NO: 61663 - protein, 10 aa, synthetic construct
NARRGDRDYL

SEQ ID NO: 61664 - protein, 10 aa, synthetic construct
NARRGDYSSV

SEQ ID NO: 61665 - protein, 10 aa, synthetic construct
NARRGDLTVT

SEQ ID NO: 61666 - protein, 10 aa, synthetic construct
NARRGDLIGR

SEQ ID NO: 61667 - protein, 10 aa, synthetic construct
NAHRGDHGVL

SEQ ID NO: 61668 - protein, 10 aa, synthetic construct
NAHRGDHVNL

SEQ ID NO: 61669 - protein, 10 aa, synthetic construct
NAHRGDYVGL

SEQ ID NO: 61670 - protein, 10 aa, synthetic construct
NAHRGDYSSV

SEQ ID NO: 61671 - protein, 10 aa, synthetic construct
NAHRGDQSTL

SEQ ID NO: 61672 - protein, 10 aa, synthetic construct
TGSRGDRSQT

SEQ ID NO: 61673 - protein, 10 aa, synthetic construct
NAHRGDLLLS

SEQ ID NO: 61674 - protein, 10 aa, synthetic construct
NASRGDHGVL

SEQ ID NO: 61675 - protein, 10 aa, synthetic construct
NASRGDHVNL

SEQ ID NO: 61676 - protein, 10 aa, synthetic construct
NASRGDYVGL

SEQ ID NO: 61677 - protein, 10 aa, synthetic construct
NASRGDYSSV

SEQ ID NO: 61678 - protein, 10 aa, synthetic construct
NASRGDQSTL

SEQ ID NO: 61679 - protein, 10 aa, synthetic construct
NASRGDLLLS

SEQ ID NO: 61680 - protein, 10 aa, synthetic construct
NATRGDHGVL

SEQ ID NO: 61681 - protein, 10 aa, synthetic construct
NATRGDHVNL

SEQ ID NO: 61682 - protein, 10 aa, synthetic construct
NATRGDYVGL

SEQ ID NO: 61683 - protein, 10 aa, synthetic construct
TGTRGDRGQI

SEQ ID NO: 61684 - protein, 10 aa, synthetic construct
NATRGDYSSV

SEQ ID NO: 61685 - protein, 10 aa, synthetic construct
NATRGDQSTL

SEQ ID NO: 61686 - protein, 10 aa, synthetic construct
NATRGDLLLS

SEQ ID NO: 61687 - protein, 10 aa, synthetic construct
NAYRGDRGQI

SEQ ID NO: 61688 - protein, 10 aa, synthetic construct
NAYRGDRQGI

SEQ ID NO: 61689 - protein, 10 aa, synthetic construct
NAYRGDRSVV

SEQ ID NO: 61690 - protein, 10 aa, synthetic construct
NAYRGDRGVV

SEQ ID NO: 61691 - protein, 10 aa, synthetic construct
NAYRGDYVGL

SEQ ID NO: 61692 - protein, 10 aa, synthetic construct
NAYRGDQSTL

SEQ ID NO: 61693 - protein, 10 aa, synthetic construct
NAYRGDRSQT

SEQ ID NO: 61694 - protein, 10 aa, synthetic construct
TGTRGDRQGI

SEQ ID NO: 61695 - protein, 10 aa, synthetic construct
NAYRGDLLLS

SEQ ID NO: 61696 - protein, 10 aa, synthetic construct
NANRGDRGQI

SEQ ID NO: 61697 - protein, 10 aa, synthetic construct
NANRGDRQGI

SEQ ID NO: 61698 - protein, 10 aa, synthetic construct
NANRGDRSVV

SEQ ID NO: 61699 - protein, 10 aa, synthetic construct
NANRGDRGVV

SEQ ID NO: 61700 - protein, 10 aa, synthetic construct
NANRGDYVGL

SEQ ID NO: 61701 - protein, 10 aa, synthetic construct
NANRGDQSTL

SEQ ID NO: 61702 - protein, 10 aa, synthetic construct
NANRGDRSQT

SEQ ID NO: 61703 - protein, 10 aa, synthetic construct
NANRGDLLLS

SEQ ID NO: 61704 - protein, 10 aa, synthetic construct
NAQRGDHGVL

SEQ ID NO: 61705 - protein, 10 aa, synthetic construct
TGTRGDRSVV

SEQ ID NO: 61706 - protein, 10 aa, synthetic construct
NAQRGDHVNL

SEQ ID NO: 61707 - protein, 10 aa, synthetic construct
NAQRGDYVGL

SEQ ID NO: 61708 - protein, 10 aa, synthetic construct
NAQRGDYSSV

SEQ ID NO: 61709 - protein, 10 aa, synthetic construct
NAQRGDQSTL

SEQ ID NO: 61710 - protein, 10 aa, synthetic construct
NAQRGDLLLS

SEQ ID NO: 61711 - protein, 10 aa, synthetic construct
NADRGDHGVL

SEQ ID NO: 61712 - protein, 10 aa, synthetic construct
NADRGDHVNL

SEQ ID NO: 61713 - protein, 10 aa, synthetic construct
NADRGDYVGL

SEQ ID NO: 61714 - protein, 10 aa, synthetic construct
NADRGDYSSV

SEQ ID NO: 61715 - protein, 10 aa, synthetic construct
NADRGDQSTL

SEQ ID NO: 61716 - protein, 10 aa, synthetic construct
TGTRGDRGVV

SEQ ID NO: 61717 - protein, 10 aa, synthetic construct
NADRGDLLLS

SEQ ID NO: 61718 - protein, 10 aa, synthetic construct
NAERGDHGVL

SEQ ID NO: 61719 - protein, 10 aa, synthetic construct
NAERGDHVNL

SEQ ID NO: 61720 - protein, 10 aa, synthetic construct
NAERGDYVGL

SEQ ID NO: 61721 - protein, 10 aa, synthetic construct
NAERGDYSSV

SEQ ID NO: 61722 - protein, 10 aa, synthetic construct
NAERGDQSTL

SEQ ID NO: 61723 - protein, 10 aa, synthetic construct
NAERGDLLLS

SEQ ID NO: 61724 - protein, 10 aa, synthetic construct
NVGRGDRDYL

SEQ ID NO: 61725 - protein, 10 aa, synthetic construct
NVGRGDYTSV

SEQ ID NO: 61726 - protein, 10 aa, synthetic construct
NVGRGDLTVT

SEQ ID NO: 61727 - protein, 10 aa, synthetic construct
TGTRGDRSQT

SEQ ID NO: 61728 - protein, 10 aa, synthetic construct
NVGRGDLIGR

SEQ ID NO: 61729 - protein, 10 aa, synthetic construct
NVARGDRDYL

SEQ ID NO: 61730 - protein, 10 aa, synthetic construct
NVARGDYTSV

SEQ ID NO: 61731 - protein, 10 aa, synthetic construct
NVARGDLTVT

SEQ ID NO: 61732 - protein, 10 aa, synthetic construct
NVARGDLIGR

SEQ ID NO: 61733 - protein, 10 aa, synthetic construct
NVVRGDHGVL

SEQ ID NO: 61734 - protein, 10 aa, synthetic construct
NVVRGDHVNL

SEQ ID NO: 61735 - protein, 10 aa, synthetic construct
NVVRGDRDYL

SEQ ID NO: 61736 - protein, 10 aa, synthetic construct
NVVRGDYSSV

SEQ ID NO: 61737 - protein, 10 aa, synthetic construct
NVVRGDLTVT

SEQ ID NO: 61738 - protein, 10 aa, synthetic construct
SKKRGDRGQI

SEQ ID NO: 61739 - protein, 10 aa, synthetic construct
EKKRGDFNNL

SEQ ID NO: 61740 - protein, 10 aa, synthetic construct
TGQRGDRGQI

SEQ ID NO: 61741 - protein, 10 aa, synthetic construct
NVPRGDRDYL

SEQ ID NO: 61742 - protein, 10 aa, synthetic construct
NVPRGDYTSV

SEQ ID NO: 61743 - protein, 10 aa, synthetic construct
NVPRGDLTVT

SEQ ID NO: 61744 - protein, 10 aa, synthetic construct
NVPRGDLIGR

SEQ ID NO: 61745 - protein, 10 aa, synthetic construct
NVLRGDHGVL

SEQ ID NO: 61746 - protein, 10 aa, synthetic construct
NVLRGDHVNL

SEQ ID NO: 61747 - protein, 10 aa, synthetic construct
NVLRGDRDYL

SEQ ID NO: 61748 - protein, 10 aa, synthetic construct
NVLRGDYSSV

SEQ ID NO: 61749 - protein, 10 aa, synthetic construct
NVLRGDLTVT

SEQ ID NO: 61750 - protein, 10 aa, synthetic construct
NVIRGDHGVL

SEQ ID NO: 61751 - protein, 10 aa, synthetic construct
TGQRGDRQGI

SEQ ID NO: 61752 - protein, 10 aa, synthetic construct
NVIRGDRGQI

SEQ ID NO: 61753 - protein, 10 aa, synthetic construct
NVIRGDRQGI

SEQ ID NO: 61754 - protein, 10 aa, synthetic construct
NVIRGDRGVV

SEQ ID NO: 61755 - protein, 10 aa, synthetic construct
NVIRGDYVGL

SEQ ID NO: 61756 - protein, 10 aa, synthetic construct
NVIRGDLIGR

SEQ ID NO: 61757 - protein, 10 aa, synthetic construct
NVIRGDQSTL

SEQ ID NO: 61758 - protein, 10 aa, synthetic construct
NVIRGDLLLS

SEQ ID NO: 61759 - protein, 10 aa, synthetic construct
NVMRGDHGVL

SEQ ID NO: 61760 - protein, 10 aa, synthetic construct
NVMRGDRGQI

SEQ ID NO: 61761 - protein, 10 aa, synthetic construct
NVMRGDRQGI

SEQ ID NO: 61762 - protein, 10 aa, synthetic construct
TGQRGDRSVV

SEQ ID NO: 61763 - protein, 10 aa, synthetic construct
NVMRGDRGVV

SEQ ID NO: 61764 - protein, 10 aa, synthetic construct
NVMRGDYVGL

SEQ ID NO: 61765 - protein, 10 aa, synthetic construct
NVMRGDLIGR

SEQ ID NO: 61766 - protein, 10 aa, synthetic construct
NVMRGDQSTL

SEQ ID NO: 61767 - protein, 10 aa, synthetic construct
NVMRGDLLLS

SEQ ID NO: 61768 - protein, 10 aa, synthetic construct
NVWRGDHGVL

SEQ ID NO: 61769 - protein, 10 aa, synthetic construct
NVWRGDHVNL

SEQ ID NO: 61770 - protein, 10 aa, synthetic construct
NVWRGDRDYL

SEQ ID NO: 61771 - protein, 10 aa, synthetic construct
NVWRGDYSSV

SEQ ID NO: 61772 - protein, 10 aa, synthetic construct
NVWRGDLTVT

SEQ ID NO: 61773 - protein, 10 aa, synthetic construct
TGQRGDRGVV

SEQ ID NO: 61774 - protein, 10 aa, synthetic construct
NVFRGDHGVL

SEQ ID NO: 61775 - protein, 10 aa, synthetic construct
NVFRGDRGQI

SEQ ID NO: 61776 - protein, 10 aa, synthetic construct
NVFRGDRQGI

SEQ ID NO: 61777 - protein, 10 aa, synthetic construct
NVFRGDRGVV

SEQ ID NO: 61778 - protein, 10 aa, synthetic construct
NVFRGDYVGL

SEQ ID NO: 61779 - protein, 10 aa, synthetic construct
NVFRGDLIGR

SEQ ID NO: 61780 - protein, 10 aa, synthetic construct
NVFRGDQSTL

SEQ ID NO: 61781 - protein, 10 aa, synthetic construct
NVFRGDLLLS

SEQ ID NO: 61782 - protein, 10 aa, synthetic construct
NVKRGDHGVL

SEQ ID NO: 61783 - protein, 10 aa, synthetic construct
NVKRGDRGQI

SEQ ID NO: 61784 - protein, 10 aa, synthetic construct
TGQRGDRSQT

SEQ ID NO: 61785 - protein, 10 aa, synthetic construct
NVKRGDRQGI

SEQ ID NO: 61786 - protein, 10 aa, synthetic construct
NVKRGDRGVV

SEQ ID NO: 61787 - protein, 10 aa, synthetic construct
NVKRGDYVGL

SEQ ID NO: 61788 - protein, 10 aa, synthetic construct
NVKRGDLIGR

SEQ ID NO: 61789 - protein, 10 aa, synthetic construct
NVKRGDQSTL

SEQ ID NO: 61790 - protein, 10 aa, synthetic construct
NVKRGDLLLS

SEQ ID NO: 61791 - protein, 10 aa, synthetic construct
NVRRGDRDYL

SEQ ID NO: 61792 - protein, 10 aa, synthetic construct
NVRRGDYTSV

SEQ ID NO: 61793 - protein, 10 aa, synthetic construct
NVRRGDLTVT

SEQ ID NO: 61794 - protein, 10 aa, synthetic construct
NVRRGDLIGR

SEQ ID NO: 61795 - protein, 10 aa, synthetic construct
TGDRGDRGQI

SEQ ID NO: 61796 - protein, 10 aa, synthetic construct
NVHRGDHGVL

SEQ ID NO: 61797 - protein, 10 aa, synthetic construct
NVHRGDHVNL

SEQ ID NO: 61798 - protein, 10 aa, synthetic construct
NVHRGDRDYL

SEQ ID NO: 61799 - protein, 10 aa, synthetic construct
NVHRGDYSSV

SEQ ID NO: 61800 - protein, 10 aa, synthetic construct
NVHRGDLTVT

SEQ ID NO: 61801 - protein, 10 aa, synthetic construct
NVSRGDHGVL

SEQ ID NO: 61802 - protein, 10 aa, synthetic construct
NVSRGDHVNL

SEQ ID NO: 61803 - protein, 10 aa, synthetic construct
NVSRGDRDYL

SEQ ID NO: 61804 - protein, 10 aa, synthetic construct
NVSRGDYSSV

SEQ ID NO: 61805 - protein, 10 aa, synthetic construct
NVSRGDLTVT

SEQ ID NO: 61806 - protein, 10 aa, synthetic construct
TGDRGDRQGI

SEQ ID NO: 61807 - protein, 10 aa, synthetic construct
NVTRGDHGVL

SEQ ID NO: 61808 - protein, 10 aa, synthetic construct
NVTRGDHVNL

SEQ ID NO: 61809 - protein, 10 aa, synthetic construct
NVTRGDRDYL

SEQ ID NO: 61810 - protein, 10 aa, synthetic construct
NVTRGDYSSV

SEQ ID NO: 61811 - protein, 10 aa, synthetic construct
NVTRGDLTVT

SEQ ID NO: 61812 - protein, 10 aa, synthetic construct
NVYRGDHGVL

SEQ ID NO: 61813 - protein, 10 aa, synthetic construct
NVYRGDRGQI

SEQ ID NO: 61814 - protein, 10 aa, synthetic construct
NVYRGDRQGI

SEQ ID NO: 61815 - protein, 10 aa, synthetic construct
NVYRGDRGVV

SEQ ID NO: 61816 - protein, 10 aa, synthetic construct
NVYRGDYVGL

SEQ ID NO: 61817 - protein, 10 aa, synthetic construct
TGDRGDRSVV

SEQ ID NO: 61818 - protein, 10 aa, synthetic construct
NVYRGDLIGR

SEQ ID NO: 61819 - protein, 10 aa, synthetic construct
NVYRGDQSTL

SEQ ID NO: 61820 - protein, 10 aa, synthetic construct
NVYRGDLLLS

SEQ ID NO: 61821 - protein, 10 aa, synthetic construct
NVNRGDHGVL

SEQ ID NO: 61822 - protein, 10 aa, synthetic construct
NVNRGDRGQI

SEQ ID NO: 61823 - protein, 10 aa, synthetic construct
NVNRGDRQGI

SEQ ID NO: 61824 - protein, 10 aa, synthetic construct
NVNRGDRGVV

SEQ ID NO: 61825 - protein, 10 aa, synthetic construct
NVNRGDYVGL

SEQ ID NO: 61826 - protein, 10 aa, synthetic construct
NVNRGDLIGR

SEQ ID NO: 61827 - protein, 10 aa, synthetic construct
NVNRGDQSTL

SEQ ID NO: 61828 - protein, 10 aa, synthetic construct
TGDRGDRGVV

SEQ ID NO: 61829 - protein, 10 aa, synthetic construct
NVNRGDLLLS

SEQ ID NO: 61830 - protein, 10 aa, synthetic construct
NVQRGDHGVL

SEQ ID NO: 61831 - protein, 10 aa, synthetic construct
NVQRGDHVNL

SEQ ID NO: 61832 - protein, 10 aa, synthetic construct
NVQRGDRDYL

SEQ ID NO: 61833 - protein, 10 aa, synthetic construct
NVQRGDYSSV

SEQ ID NO: 61834 - protein, 10 aa, synthetic construct
NVQRGDLTVT

SEQ ID NO: 61835 - protein, 10 aa, synthetic construct
NVDRGDHGVL

SEQ ID NO: 61836 - protein, 10 aa, synthetic construct
NVDRGDHVNL

SEQ ID NO: 61837 - protein, 10 aa, synthetic construct
NVDRGDRDYL

SEQ ID NO: 61838 - protein, 10 aa, synthetic construct
NVDRGDYSSV

SEQ ID NO: 61839 - protein, 10 aa, synthetic construct
TGDRGDRSQT

SEQ ID NO: 61840 - protein, 10 aa, synthetic construct
NVDRGDLTVT

SEQ ID NO: 61841 - protein, 10 aa, synthetic construct
NVERGDHGVL

SEQ ID NO: 61842 - protein, 10 aa, synthetic construct
NVERGDHVNL

SEQ ID NO: 61843 - protein, 10 aa, synthetic construct
NVERGDRDYL

SEQ ID NO: 61844 - protein, 10 aa, synthetic construct
NVERGDYSSV

SEQ ID NO: 61845 - protein, 10 aa, synthetic construct
NVERGDLTVT

SEQ ID NO: 61846 - protein, 10 aa, synthetic construct
NPGRGDHVNL

SEQ ID NO: 61847 - protein, 10 aa, synthetic construct
NPGRGDRDYL

SEQ ID NO: 61848 - protein, 10 aa, synthetic construct
NPGRGDYSSV

SEQ ID NO: 61849 - protein, 10 aa, synthetic construct
NPGRGDLTVT

SEQ ID NO: 61850 - protein, 10 aa, synthetic construct
EKNRGDFNNT

SEQ ID NO: 61851 - protein, 10 aa, synthetic construct
TGERGDRGQI

SEQ ID NO: 61852 - protein, 10 aa, synthetic construct
NPGRGDLIGR

SEQ ID NO: 61853 - protein, 10 aa, synthetic construct
NPARGDHVNL

SEQ ID NO: 61854 - protein, 10 aa, synthetic construct
NPARGDRDYL

SEQ ID NO: 61855 - protein, 10 aa, synthetic construct
NPARGDYSSV

SEQ ID NO: 61856 - protein, 10 aa, synthetic construct
NPARGDLTVT

SEQ ID NO: 61857 - protein, 10 aa, synthetic construct
NPARGDLIGR

SEQ ID NO: 61858 - protein, 10 aa, synthetic construct
NPVRGDHGVL

SEQ ID NO: 61859 - protein, 10 aa, synthetic construct
NPVRGDHVNL

SEQ ID NO: 61860 - protein, 10 aa, synthetic construct
NPVRGDYVGL

SEQ ID NO: 61861 - protein, 10 aa, synthetic construct
NPVRGDYSSV

SEQ ID NO: 61862 - protein, 10 aa, synthetic construct
TGERGDRQGI

SEQ ID NO: 61863 - protein, 10 aa, synthetic construct
NPVRGDQSTL

SEQ ID NO: 61864 - protein, 10 aa, synthetic construct
NPVRGDLLLS

SEQ ID NO: 61865 - protein, 10 aa, synthetic construct
NPPRGDHVNL

SEQ ID NO: 61866 - protein, 10 aa, synthetic construct
NPPRGDRDYL

SEQ ID NO: 61867 - protein, 10 aa, synthetic construct
NPPRGDYSSV

SEQ ID NO: 61868 - protein, 10 aa, synthetic construct
NPPRGDLTVT

SEQ ID NO: 61869 - protein, 10 aa, synthetic construct
NPPRGDLIGR

SEQ ID NO: 61870 - protein, 10 aa, synthetic construct
NPLRGDHGVL

SEQ ID NO: 61871 - protein, 10 aa, synthetic construct
NPLRGDHVNL

SEQ ID NO: 61872 - protein, 10 aa, synthetic construct
NPLRGDYVGL

SEQ ID NO: 61873 - protein, 10 aa, synthetic construct
TGERGDRSVV

SEQ ID NO: 61874 - protein, 10 aa, synthetic construct
NPLRGDYSSV

SEQ ID NO: 61875 - protein, 10 aa, synthetic construct
NPLRGDQSTL

SEQ ID NO: 61876 - protein, 10 aa, synthetic construct
NPLRGDLLLS

SEQ ID NO: 61877 - protein, 10 aa, synthetic construct
NPIRGDRGQI

SEQ ID NO: 61878 - protein, 10 aa, synthetic construct
NPIRGDRQGI

SEQ ID NO: 61879 - protein, 10 aa, synthetic construct
NPIRGDRSVV

SEQ ID NO: 61880 - protein, 10 aa, synthetic construct
NPIRGDRGVV

SEQ ID NO: 61881 - protein, 10 aa, synthetic construct
NPIRGDYVGL

SEQ ID NO: 61882 - protein, 10 aa, synthetic construct
NPIRGDQSTL

SEQ ID NO: 61883 - protein, 10 aa, synthetic construct
NPIRGDRSQT

SEQ ID NO: 61884 - protein, 10 aa, synthetic construct
TGERGDRGVV

SEQ ID NO: 61885 - protein, 10 aa, synthetic construct
NPIRGDLLLS

SEQ ID NO: 61886 - protein, 10 aa, synthetic construct
NPMRGDRGQI

SEQ ID NO: 61887 - protein, 10 aa, synthetic construct
NPMRGDRQGI

SEQ ID NO: 61888 - protein, 10 aa, synthetic construct
NPMRGDRSVV

SEQ ID NO: 61889 - protein, 10 aa, synthetic construct
NPMRGDRGVV

SEQ ID NO: 61890 - protein, 10 aa, synthetic construct
NPMRGDYVGL

SEQ ID NO: 61891 - protein, 10 aa, synthetic construct
NPMRGDQSTL

SEQ ID NO: 61892 - protein, 10 aa, synthetic construct
NPMRGDRSQT

SEQ ID NO: 61893 - protein, 10 aa, synthetic construct
NPMRGDLLLS

SEQ ID NO: 61894 - protein, 10 aa, synthetic construct
NPWRGDHGVL

SEQ ID NO: 61895 - protein, 10 aa, synthetic construct
TGERGDRSQT

SEQ ID NO: 61896 - protein, 10 aa, synthetic construct
NPWRGDHVNL

SEQ ID NO: 61897 - protein, 10 aa, synthetic construct
NPWRGDYVGL

SEQ ID NO: 61898 - protein, 10 aa, synthetic construct
NPWRGDYSSV

SEQ ID NO: 61899 - protein, 10 aa, synthetic construct
NPWRGDQSTL

SEQ ID NO: 61900 - protein, 10 aa, synthetic construct
NPWRGDLLLS

SEQ ID NO: 61901 - protein, 10 aa, synthetic construct
NPFRGDRGQI

SEQ ID NO: 61902 - protein, 10 aa, synthetic construct
NPFRGDRQGI

SEQ ID NO: 61903 - protein, 10 aa, synthetic construct
NPFRGDRSVV

SEQ ID NO: 61904 - protein, 10 aa, synthetic construct
NPFRGDRGVV

SEQ ID NO: 61905 - protein, 10 aa, synthetic construct
NPFRGDYVGL

SEQ ID NO: 61906 - protein, 10 aa, synthetic construct
TAGRGDHGVL

SEQ ID NO: 61907 - protein, 10 aa, synthetic construct
NPFRGDQSTL

SEQ ID NO: 61908 - protein, 10 aa, synthetic construct
NPFRGDRSQT

SEQ ID NO: 61909 - protein, 10 aa, synthetic construct
NPFRGDLLLS

SEQ ID NO: 61910 - protein, 10 aa, synthetic construct
NPKRGDRGQI

SEQ ID NO: 61911 - protein, 10 aa, synthetic construct
NPKRGDRQGI

SEQ ID NO: 61912 - protein, 10 aa, synthetic construct
NPKRGDRSVV

SEQ ID NO: 61913 - protein, 10 aa, synthetic construct
NPKRGDRGVV

SEQ ID NO: 61914 - protein, 10 aa, synthetic construct
NPKRGDYVGL

SEQ ID NO: 61915 - protein, 10 aa, synthetic construct
NPKRGDQSTL

SEQ ID NO: 61916 - protein, 10 aa, synthetic construct
NPKRGDRSQT

SEQ ID NO: 61917 - protein, 10 aa, synthetic construct
TAGRGDYVGL

SEQ ID NO: 61918 - protein, 10 aa, synthetic construct
NPKRGDLLLS

SEQ ID NO: 61919 - protein, 10 aa, synthetic construct
NPRRGDHVNL

SEQ ID NO: 61920 - protein, 10 aa, synthetic construct
NPRRGDRDYL

SEQ ID NO: 61921 - protein, 10 aa, synthetic construct
NPRRGDYSSV

SEQ ID NO: 61922 - protein, 10 aa, synthetic construct
NPRRGDLTVT

SEQ ID NO: 61923 - protein, 10 aa, synthetic construct
NPRRGDLIGR

SEQ ID NO: 61924 - protein, 10 aa, synthetic construct
NPHRGDHGVL

SEQ ID NO: 61925 - protein, 10 aa, synthetic construct
NPHRGDHVNL

SEQ ID NO: 61926 - protein, 10 aa, synthetic construct
NPHRGDYVGL

SEQ ID NO: 61927 - protein, 10 aa, synthetic construct
NPHRGDYSSV

SEQ ID NO: 61928 - protein, 10 aa, synthetic construct
TAGRGDQSTL

SEQ ID NO: 61929 - protein, 10 aa, synthetic construct
NPHRGDQSTL

SEQ ID NO: 61930 - protein, 10 aa, synthetic construct
NPHRGDLLLS

SEQ ID NO: 61931 - protein, 10 aa, synthetic construct
NPSRGDHGVL

SEQ ID NO: 61932 - protein, 10 aa, synthetic construct
NPSRGDHVNL

SEQ ID NO: 61933 - protein, 10 aa, synthetic construct
NPSRGDYVGL

SEQ ID NO: 61934 - protein, 10 aa, synthetic construct
NPSRGDYSSV

SEQ ID NO: 61935 - protein, 10 aa, synthetic construct
NPSRGDQSTL

SEQ ID NO: 61936 - protein, 10 aa, synthetic construct
NPSRGDLLLS

SEQ ID NO: 61937 - protein, 10 aa, synthetic construct
NPTRGDHGVL

SEQ ID NO: 61938 - protein, 10 aa, synthetic construct
NPTRGDHVNL

SEQ ID NO: 61939 - protein, 10 aa, synthetic construct
TAGRGDLLLS

SEQ ID NO: 61940 - protein, 10 aa, synthetic construct
NPTRGDYVGL

SEQ ID NO: 61941 - protein, 10 aa, synthetic construct
NPTRGDYSSV

SEQ ID NO: 61942 - protein, 10 aa, synthetic construct
NPTRGDQSTL

SEQ ID NO: 61943 - protein, 10 aa, synthetic construct
NPTRGDLLLS

SEQ ID NO: 61944 - protein, 10 aa, synthetic construct
NPYRGDRGQI

SEQ ID NO: 61945 - protein, 10 aa, synthetic construct
NPYRGDRQGI

SEQ ID NO: 61946 - protein, 10 aa, synthetic construct
NPYRGDRSVV

SEQ ID NO: 61947 - protein, 10 aa, synthetic construct
NPYRGDRGVV

SEQ ID NO: 61948 - protein, 10 aa, synthetic construct
NPYRGDYVGL

SEQ ID NO: 61949 - protein, 10 aa, synthetic construct
NPYRGDQSTL

SEQ ID NO: 61950 - protein, 10 aa, synthetic construct
TAARGDHGVL

SEQ ID NO: 61951 - protein, 10 aa, synthetic construct
NPYRGDRSQT

SEQ ID NO: 61952 - protein, 10 aa, synthetic construct
NPYRGDLLLS

SEQ ID NO: 61953 - protein, 10 aa, synthetic construct
NPNRGDRGQI

SEQ ID NO: 61954 - protein, 10 aa, synthetic construct
NPNRGDRQGI

SEQ ID NO: 61955 - protein, 10 aa, synthetic construct
NPNRGDRSVV

SEQ ID NO: 61956 - protein, 10 aa, synthetic construct
NPNRGDRGVV

SEQ ID NO: 61957 - protein, 10 aa, synthetic construct
NPNRGDYVGL

SEQ ID NO: 61958 - protein, 10 aa, synthetic construct
NPNRGDQSTL

SEQ ID NO: 61959 - protein, 10 aa, synthetic construct
NPNRGDRSQT

SEQ ID NO: 61960 - protein, 10 aa, synthetic construct
NPNRGDLLLS

SEQ ID NO: 61961 - protein, 10 aa, synthetic construct
EKNRGDFNNL

SEQ ID NO: 61962 - protein, 10 aa, synthetic construct
TAARGDYVGL

SEQ ID NO: 61963 - protein, 10 aa, synthetic construct
NPQRGDHGVL

SEQ ID NO: 61964 - protein, 10 aa, synthetic construct
NPQRGDHVNL

SEQ ID NO: 61965 - protein, 10 aa, synthetic construct
NPQRGDYVGL

SEQ ID NO: 61966 - protein, 10 aa, synthetic construct
NPQRGDYSSV

SEQ ID NO: 61967 - protein, 10 aa, synthetic construct
NPQRGDQSTL

SEQ ID NO: 61968 - protein, 10 aa, synthetic construct
NPQRGDLLLS

SEQ ID NO: 61969 - protein, 10 aa, synthetic construct
NPDRGDHGVL

SEQ ID NO: 61970 - protein, 10 aa, synthetic construct
NPDRGDHVNL

SEQ ID NO: 61971 - protein, 10 aa, synthetic construct
NPDRGDYVGL

SEQ ID NO: 61972 - protein, 10 aa, synthetic construct
NPDRGDYSSV

SEQ ID NO: 61973 - protein, 10 aa, synthetic construct
TAARGDQSTL

SEQ ID NO: 61974 - protein, 10 aa, synthetic construct
NPDRGDQSTL

SEQ ID NO: 61975 - protein, 10 aa, synthetic construct
NPDRGDLLLS

SEQ ID NO: 61976 - protein, 10 aa, synthetic construct
NPERGDHGVL

SEQ ID NO: 61977 - protein, 10 aa, synthetic construct
NPERGDHVNL

SEQ ID NO: 61978 - protein, 10 aa, synthetic construct
NPERGDYVGL

SEQ ID NO: 61979 - protein, 10 aa, synthetic construct
NPERGDYSSV

SEQ ID NO: 61980 - protein, 10 aa, synthetic construct
NPERGDQSTL

SEQ ID NO: 61981 - protein, 10 aa, synthetic construct
NPERGDLLLS

SEQ ID NO: 61982 - protein, 10 aa, synthetic construct
NLGRGDRDYL

SEQ ID NO: 61983 - protein, 10 aa, synthetic construct
NLGRGDYTSV

SEQ ID NO: 61984 - protein, 10 aa, synthetic construct
TAARGDLLLS

SEQ ID NO: 61985 - protein, 10 aa, synthetic construct
NLGRGDLTVT

SEQ ID NO: 61986 - protein, 10 aa, synthetic construct
NLGRGDLIGR

SEQ ID NO: 61987 - protein, 10 aa, synthetic construct
NLARGDRDYL

SEQ ID NO: 61988 - protein, 10 aa, synthetic construct
NLARGDYTSV

SEQ ID NO: 61989 - protein, 10 aa, synthetic construct
NLARGDLTVT

SEQ ID NO: 61990 - protein, 10 aa, synthetic construct
NLARGDLIGR

SEQ ID NO: 61991 - protein, 10 aa, synthetic construct
NLVRGDHGVL

SEQ ID NO: 61992 - protein, 10 aa, synthetic construct
NLVRGDHVNL

SEQ ID NO: 61993 - protein, 10 aa, synthetic construct
NLVRGDRDYL

SEQ ID NO: 61994 - protein, 10 aa, synthetic construct
NLVRGDYSSV

SEQ ID NO: 61995 - protein, 10 aa, synthetic construct
TAVRGDRGQI

SEQ ID NO: 61996 - protein, 10 aa, synthetic construct
NLVRGDLTVT

SEQ ID NO: 61997 - protein, 10 aa, synthetic construct
NLPRGDRDYL

SEQ ID NO: 61998 - protein, 10 aa, synthetic construct
NLPRGDYTSV

SEQ ID NO: 61999 - protein, 10 aa, synthetic construct
NLPRGDLTVT

SEQ ID NO: 62000 - protein, 10 aa, synthetic construct
NLPRGDLIGR

SEQ ID NO: 62001 - protein, 10 aa, synthetic construct
NLLRGDHGVL

SEQ ID NO: 62002 - protein, 10 aa, synthetic construct
NLLRGDHVNL

SEQ ID NO: 62003 - protein, 10 aa, synthetic construct
NLLRGDRDYL

SEQ ID NO: 62004 - protein, 10 aa, synthetic construct
NLLRGDYSSV

SEQ ID NO: 62005 - protein, 10 aa, synthetic construct
NLLRGDLTVT

SEQ ID NO: 62006 - protein, 10 aa, synthetic construct
TAVRGDRQGI

SEQ ID NO: 62007 - protein, 10 aa, synthetic construct
NLIRGDHGVL

SEQ ID NO: 62008 - protein, 10 aa, synthetic construct
NLIRGDRGQI

SEQ ID NO: 62009 - protein, 10 aa, synthetic construct
NLIRGDRQGI

SEQ ID NO: 62010 - protein, 10 aa, synthetic construct
NLIRGDRGVV

SEQ ID NO: 62011 - protein, 10 aa, synthetic construct
NLIRGDYVGL

SEQ ID NO: 62012 - protein, 10 aa, synthetic construct
NLIRGDLIGR

SEQ ID NO: 62013 - protein, 10 aa, synthetic construct
NLIRGDQSTL

SEQ ID NO: 62014 - protein, 10 aa, synthetic construct
NLIRGDLLLS

SEQ ID NO: 62015 - protein, 10 aa, synthetic construct
NLMRGDHGVL

SEQ ID NO: 62016 - protein, 10 aa, synthetic construct
NLMRGDRGQI

SEQ ID NO: 62017 - protein, 10 aa, synthetic construct
TAVRGDRSVV

SEQ ID NO: 62018 - protein, 10 aa, synthetic construct
NLMRGDRQGI

SEQ ID NO: 62019 - protein, 10 aa, synthetic construct
NLMRGDRGVV

SEQ ID NO: 62020 - protein, 10 aa, synthetic construct
NLMRGDYVGL

SEQ ID NO: 62021 - protein, 10 aa, synthetic construct
NLMRGDLIGR

SEQ ID NO: 62022 - protein, 10 aa, synthetic construct
NLMRGDQSTL

SEQ ID NO: 62023 - protein, 10 aa, synthetic construct
NLMRGDLLLS

SEQ ID NO: 62024 - protein, 10 aa, synthetic construct
NLWRGDHGVL

SEQ ID NO: 62025 - protein, 10 aa, synthetic construct
NLWRGDHVNL

SEQ ID NO: 62026 - protein, 10 aa, synthetic construct
NLWRGDRDYL

SEQ ID NO: 62027 - protein, 10 aa, synthetic construct
NLWRGDYSSV

SEQ ID NO: 62028 - protein, 10 aa, synthetic construct
TAVRGDRGVV

SEQ ID NO: 62029 - protein, 10 aa, synthetic construct
NLWRGDLTVT

SEQ ID NO: 62030 - protein, 10 aa, synthetic construct
NLFRGDHGVL

SEQ ID NO: 62031 - protein, 10 aa, synthetic construct
NLFRGDRGQI

SEQ ID NO: 62032 - protein, 10 aa, synthetic construct
NLFRGDRQGI

SEQ ID NO: 62033 - protein, 10 aa, synthetic construct
NLFRGDRGVV

SEQ ID NO: 62034 - protein, 10 aa, synthetic construct
NLFRGDYVGL

SEQ ID NO: 62035 - protein, 10 aa, synthetic construct
NLFRGDLIGR

SEQ ID NO: 62036 - protein, 10 aa, synthetic construct
NLFRGDQSTL

SEQ ID NO: 62037 - protein, 10 aa, synthetic construct
NLFRGDLLLS

SEQ ID NO: 62038 - protein, 10 aa, synthetic construct
NLKRGDHGVL

SEQ ID NO: 62039 - protein, 10 aa, synthetic construct
TAVRGDRSQT

SEQ ID NO: 62040 - protein, 10 aa, synthetic construct
NLKRGDRGQI

SEQ ID NO: 62041 - protein, 10 aa, synthetic construct
NLKRGDRQGI

SEQ ID NO: 62042 - protein, 10 aa, synthetic construct
NLKRGDRGVV

SEQ ID NO: 62043 - protein, 10 aa, synthetic construct
NLKRGDYVGL

SEQ ID NO: 62044 - protein, 10 aa, synthetic construct
NLKRGDLIGR

SEQ ID NO: 62045 - protein, 10 aa, synthetic construct
NLKRGDQSTL

SEQ ID NO: 62046 - protein, 10 aa, synthetic construct
NLKRGDLLLS

SEQ ID NO: 62047 - protein, 10 aa, synthetic construct
NLRRGDRDYL

SEQ ID NO: 62048 - protein, 10 aa, synthetic construct
NLRRGDYTSV

SEQ ID NO: 62049 - protein, 10 aa, synthetic construct
NLRRGDLTVT

SEQ ID NO: 62050 - protein, 10 aa, synthetic construct
TAPRGDHGVL

SEQ ID NO: 62051 - protein, 10 aa, synthetic construct
NLRRGDLIGR

SEQ ID NO: 62052 - protein, 10 aa, synthetic construct
NLHRGDHGVL

SEQ ID NO: 62053 - protein, 10 aa, synthetic construct
NLHRGDHVNL

SEQ ID NO: 62054 - protein, 10 aa, synthetic construct
NLHRGDRDYL

SEQ ID NO: 62055 - protein, 10 aa, synthetic construct
NLHRGDYSSV

SEQ ID NO: 62056 - protein, 10 aa, synthetic construct
NLHRGDLTVT

SEQ ID NO: 62057 - protein, 10 aa, synthetic construct
NLSRGDHGVL

SEQ ID NO: 62058 - protein, 10 aa, synthetic construct
NLSRGDHVNL

SEQ ID NO: 62059 - protein, 10 aa, synthetic construct
NLSRGDRDYL

SEQ ID NO: 62060 - protein, 10 aa, synthetic construct
NLSRGDYSSV

SEQ ID NO: 62061 - protein, 10 aa, synthetic construct
TAPRGDYVGL

SEQ ID NO: 62062 - protein, 10 aa, synthetic construct
NLSRGDLTVT

SEQ ID NO: 62063 - protein, 10 aa, synthetic construct
NLTRGDHGVL

SEQ ID NO: 62064 - protein, 10 aa, synthetic construct
NLTRGDHVNL

SEQ ID NO: 62065 - protein, 10 aa, synthetic construct
NLTRGDRDYL

SEQ ID NO: 62066 - protein, 10 aa, synthetic construct
NLTRGDYSSV

SEQ ID NO: 62067 - protein, 10 aa, synthetic construct
NLTRGDLTVT

SEQ ID NO: 62068 - protein, 10 aa, synthetic construct
NLYRGDHGVL

SEQ ID NO: 62069 - protein, 10 aa, synthetic construct
NLYRGDRGQI

SEQ ID NO: 62070 - protein, 10 aa, synthetic construct
NLYRGDRQGI

SEQ ID NO: 62071 - protein, 10 aa, synthetic construct
NLYRGDRGVV

SEQ ID NO: 62072 - protein, 10 aa, synthetic construct
NKKRGDYNSL

SEQ ID NO: 62073 - protein, 10 aa, synthetic construct
TAPRGDQSTL

SEQ ID NO: 62074 - protein, 10 aa, synthetic construct
NLYRGDYVGL

SEQ ID NO: 62075 - protein, 10 aa, synthetic construct
NLYRGDLIGR

SEQ ID NO: 62076 - protein, 10 aa, synthetic construct
NLYRGDQSTL

SEQ ID NO: 62077 - protein, 10 aa, synthetic construct
NLYRGDLLLS

SEQ ID NO: 62078 - protein, 10 aa, synthetic construct
NLNRGDHGVL

SEQ ID NO: 62079 - protein, 10 aa, synthetic construct
NLNRGDRGQI

SEQ ID NO: 62080 - protein, 10 aa, synthetic construct
NLNRGDRQGI

SEQ ID NO: 62081 - protein, 10 aa, synthetic construct
NLNRGDRGVV

SEQ ID NO: 62082 - protein, 10 aa, synthetic construct
NLNRGDYVGL

SEQ ID NO: 62083 - protein, 10 aa, synthetic construct
NLNRGDLIGR

SEQ ID NO: 62084 - protein, 10 aa, synthetic construct
TAPRGDLLLS

SEQ ID NO: 62085 - protein, 10 aa, synthetic construct
NLNRGDQSTL

SEQ ID NO: 62086 - protein, 10 aa, synthetic construct
NLNRGDLLLS

SEQ ID NO: 62087 - protein, 10 aa, synthetic construct
NLQRGDHGVL

SEQ ID NO: 62088 - protein, 10 aa, synthetic construct
NLQRGDHVNL

SEQ ID NO: 62089 - protein, 10 aa, synthetic construct
NLQRGDRDYL

SEQ ID NO: 62090 - protein, 10 aa, synthetic construct
NLQRGDYSSV

SEQ ID NO: 62091 - protein, 10 aa, synthetic construct
NLQRGDLTVT

SEQ ID NO: 62092 - protein, 10 aa, synthetic construct
NLDRGDHGVL

SEQ ID NO: 62093 - protein, 10 aa, synthetic construct
NLDRGDHVNL

SEQ ID NO: 62094 - protein, 10 aa, synthetic construct
NLDRGDRDYL

SEQ ID NO: 62095 - protein, 10 aa, synthetic construct
TALRGDRGQI

SEQ ID NO: 62096 - protein, 10 aa, synthetic construct
NLDRGDYSSV

SEQ ID NO: 62097 - protein, 10 aa, synthetic construct
NLDRGDLTVT

SEQ ID NO: 62098 - protein, 10 aa, synthetic construct
NLERGDHGVL

SEQ ID NO: 62099 - protein, 10 aa, synthetic construct
NLERGDHVNL

SEQ ID NO: 62100 - protein, 10 aa, synthetic construct
NLERGDRDYL

SEQ ID NO: 62101 - protein, 10 aa, synthetic construct
NLERGDYSSV

SEQ ID NO: 62102 - protein, 10 aa, synthetic construct
NLERGDLTVT

SEQ ID NO: 62103 - protein, 10 aa, synthetic construct
NIGRGDRGQI

SEQ ID NO: 62104 - protein, 10 aa, synthetic construct
NIGRGDRQGI

SEQ ID NO: 62105 - protein, 10 aa, synthetic construct
NIGRGDRSVV

SEQ ID NO: 62106 - protein, 10 aa, synthetic construct
TALRGDRQGI

SEQ ID NO: 62107 - protein, 10 aa, synthetic construct
NIGRGDRGVV

SEQ ID NO: 62108 - protein, 10 aa, synthetic construct
NIGRGDYVGL

SEQ ID NO: 62109 - protein, 10 aa, synthetic construct
NIGRGDQSTL

SEQ ID NO: 62110 - protein, 10 aa, synthetic construct
NIGRGDRSQT

SEQ ID NO: 62111 - protein, 10 aa, synthetic construct
NIGRGDLLLS

SEQ ID NO: 62112 - protein, 10 aa, synthetic construct
NIARGDRGQI

SEQ ID NO: 62113 - protein, 10 aa, synthetic construct
NIARGDRQGI

SEQ ID NO: 62114 - protein, 10 aa, synthetic construct
NIARGDRSVV

SEQ ID NO: 62115 - protein, 10 aa, synthetic construct
NIARGDRGVV

SEQ ID NO: 62116 - protein, 10 aa, synthetic construct
NIARGDYVGL

SEQ ID NO: 62117 - protein, 10 aa, synthetic construct
TALRGDRSVV

SEQ ID NO: 62118 - protein, 10 aa, synthetic construct
NIARGDQSTL

SEQ ID NO: 62119 - protein, 10 aa, synthetic construct
NIARGDRSQT

SEQ ID NO: 62120 - protein, 10 aa, synthetic construct
NIARGDLLLS

SEQ ID NO: 62121 - protein, 10 aa, synthetic construct
NIVRGDRSVV

SEQ ID NO: 62122 - protein, 10 aa, synthetic construct
NIVRGDRSQT

SEQ ID NO: 62123 - protein, 10 aa, synthetic construct
NIPRGDRGQI

SEQ ID NO: 62124 - protein, 10 aa, synthetic construct
NIPRGDRQGI

SEQ ID NO: 62125 - protein, 10 aa, synthetic construct
NIPRGDRSVV

SEQ ID NO: 62126 - protein, 10 aa, synthetic construct
NIPRGDRGVV

SEQ ID NO: 62127 - protein, 10 aa, synthetic construct
NIPRGDYVGL

SEQ ID NO: 62128 - protein, 10 aa, synthetic construct
TALRGDRGVV

SEQ ID NO: 62129 - protein, 10 aa, synthetic construct
NIPRGDQSTL

SEQ ID NO: 62130 - protein, 10 aa, synthetic construct
NIPRGDRSQT

SEQ ID NO: 62131 - protein, 10 aa, synthetic construct
NIPRGDLLLS

SEQ ID NO: 62132 - protein, 10 aa, synthetic construct
NILRGDRSVV

SEQ ID NO: 62133 - protein, 10 aa, synthetic construct
NILRGDRSQT

SEQ ID NO: 62134 - protein, 10 aa, synthetic construct
NIWRGDRSVV

SEQ ID NO: 62135 - protein, 10 aa, synthetic construct
NIWRGDRSQT

SEQ ID NO: 62136 - protein, 10 aa, synthetic construct
NIRRGDRGQI

SEQ ID NO: 62137 - protein, 10 aa, synthetic construct
NIRRGDRQGI

SEQ ID NO: 62138 - protein, 10 aa, synthetic construct
NIRRGDRSVV

SEQ ID NO: 62139 - protein, 10 aa, synthetic construct
TALRGDRSQT

SEQ ID NO: 62140 - protein, 10 aa, synthetic construct
NIRRGDRGVV

SEQ ID NO: 62141 - protein, 10 aa, synthetic construct
NIRRGDYVGL

SEQ ID NO: 62142 - protein, 10 aa, synthetic construct
NIRRGDQSTL

SEQ ID NO: 62143 - protein, 10 aa, synthetic construct
NIRRGDRSQT

SEQ ID NO: 62144 - protein, 10 aa, synthetic construct
NIRRGDLLLS

SEQ ID NO: 62145 - protein, 10 aa, synthetic construct
NIHRGDRSVV

SEQ ID NO: 62146 - protein, 10 aa, synthetic construct
NIHRGDRSQT

SEQ ID NO: 62147 - protein, 10 aa, synthetic construct
NISRGDRSVV

SEQ ID NO: 62148 - protein, 10 aa, synthetic construct
NISRGDRSQT

SEQ ID NO: 62149 - protein, 10 aa, synthetic construct
NITRGDRSVV

SEQ ID NO: 62150 - protein, 10 aa, synthetic construct
TAWRGDRGQI

SEQ ID NO: 62151 - protein, 10 aa, synthetic construct
NITRGDRSQT

SEQ ID NO: 62152 - protein, 10 aa, synthetic construct
NIQRGDRSVV

SEQ ID NO: 62153 - protein, 10 aa, synthetic construct
NIQRGDRSQT

SEQ ID NO: 62154 - protein, 10 aa, synthetic construct
NIDRGDRSVV

SEQ ID NO: 62155 - protein, 10 aa, synthetic construct
NIDRGDRSQT

SEQ ID NO: 62156 - protein, 10 aa, synthetic construct
NIERGDRSVV

SEQ ID NO: 62157 - protein, 10 aa, synthetic construct
NIERGDRSQT

SEQ ID NO: 62158 - protein, 10 aa, synthetic construct
NMGRGDHGVL

SEQ ID NO: 62159 - protein, 10 aa, synthetic construct
NMGRGDRGQI

SEQ ID NO: 62160 - protein, 10 aa, synthetic construct
NMGRGDRQGI

SEQ ID NO: 62161 - protein, 10 aa, synthetic construct
TAWRGDRQGI

SEQ ID NO: 62162 - protein, 10 aa, synthetic construct
NMGRGDRSVV

SEQ ID NO: 62163 - protein, 10 aa, synthetic construct
NMGRGDLIGR

SEQ ID NO: 62164 - protein, 10 aa, synthetic construct
NMGRGDRSQT

SEQ ID NO: 62165 - protein, 10 aa, synthetic construct
NMARGDHGVL

SEQ ID NO: 62166 - protein, 10 aa, synthetic construct
NMARGDRGQI

SEQ ID NO: 62167 - protein, 10 aa, synthetic construct
NMARGDRQGI

SEQ ID NO: 62168 - protein, 10 aa, synthetic construct
NMARGDRSVV

SEQ ID NO: 62169 - protein, 10 aa, synthetic construct
NMARGDLIGR

SEQ ID NO: 62170 - protein, 10 aa, synthetic construct
NMARGDRSQT

SEQ ID NO: 62171 - protein, 10 aa, synthetic construct
NMVRGDRGQI

SEQ ID NO: 62172 - protein, 10 aa, synthetic construct
TAWRGDRSVV

SEQ ID NO: 62173 - protein, 10 aa, synthetic construct
NMVRGDRQGI

SEQ ID NO: 62174 - protein, 10 aa, synthetic construct
NMVRGDRSQT

SEQ ID NO: 62175 - protein, 10 aa, synthetic construct
NMPRGDHGVL

SEQ ID NO: 62176 - protein, 10 aa, synthetic construct
NMPRGDRGQI

SEQ ID NO: 62177 - protein, 10 aa, synthetic construct
NMPRGDRQGI

SEQ ID NO: 62178 - protein, 10 aa, synthetic construct
NMPRGDRSVV

SEQ ID NO: 62179 - protein, 10 aa, synthetic construct
NMPRGDLIGR

SEQ ID NO: 62180 - protein, 10 aa, synthetic construct
NMPRGDRSQT

SEQ ID NO: 62181 - protein, 10 aa, synthetic construct
NMLRGDRGQI

SEQ ID NO: 62182 - protein, 10 aa, synthetic construct
NMLRGDRQGI

SEQ ID NO: 62183 - protein, 10 aa, synthetic construct
NKKRGDYTSM

SEQ ID NO: 62184 - protein, 10 aa, synthetic construct
TAWRGDRGVV

SEQ ID NO: 62185 - protein, 10 aa, synthetic construct
NMLRGDRSQT

SEQ ID NO: 62186 - protein, 10 aa, synthetic construct
NMIRGDRGVV

SEQ ID NO: 62187 - protein, 10 aa, synthetic construct
NMMRGDRSVV

SEQ ID NO: 62188 - protein, 10 aa, synthetic construct
NMMRGDRGVV

SEQ ID NO: 62189 - protein, 10 aa, synthetic construct
NMMRGDRSQT

SEQ ID NO: 62190 - protein, 10 aa, synthetic construct
NMWRGDHGVL

SEQ ID NO: 62191 - protein, 10 aa, synthetic construct
NMWRGDRGQI

SEQ ID NO: 62192 - protein, 10 aa, synthetic construct
NMWRGDRQGI

SEQ ID NO: 62193 - protein, 10 aa, synthetic construct
NMWRGDRGVV

SEQ ID NO: 62194 - protein, 10 aa, synthetic construct
NMWRGDYVGL

SEQ ID NO: 62195 - protein, 10 aa, synthetic construct
TAWRGDRSQT

SEQ ID NO: 62196 - protein, 10 aa, synthetic construct
NMWRGDLIGR

SEQ ID NO: 62197 - protein, 10 aa, synthetic construct
NMWRGDQSTL

SEQ ID NO: 62198 - protein, 10 aa, synthetic construct
NMWRGDLLLS

SEQ ID NO: 62199 - protein, 10 aa, synthetic construct
NMFRGDRGVV

SEQ ID NO: 62200 - protein, 10 aa, synthetic construct
NMKRGDRGVV

SEQ ID NO: 62201 - protein, 10 aa, synthetic construct
NMRRGDHGVL

SEQ ID NO: 62202 - protein, 10 aa, synthetic construct
NMRRGDRGQI

SEQ ID NO: 62203 - protein, 10 aa, synthetic construct
NMRRGDRQGI

SEQ ID NO: 62204 - protein, 10 aa, synthetic construct
NMRRGDRSVV

SEQ ID NO: 62205 - protein, 10 aa, synthetic construct
NMRRGDLIGR

SEQ ID NO: 62206 - protein, 10 aa, synthetic construct
TARRGDHGVL

SEQ ID NO: 62207 - protein, 10 aa, synthetic construct
NMRRGDRSQT

SEQ ID NO: 62208 - protein, 10 aa, synthetic construct
NMHRGDHGVL

SEQ ID NO: 62209 - protein, 10 aa, synthetic construct
NMHRGDRSVV

SEQ ID NO: 62210 - protein, 10 aa, synthetic construct
NMHRGDRGVV

SEQ ID NO: 62211 - protein, 10 aa, synthetic construct
NMHRGDLTVT

SEQ ID NO: 62212 - protein, 10 aa, synthetic construct
NMHRGDLIGR

SEQ ID NO: 62213 - protein, 10 aa, synthetic construct
NMHRGDLLLS

SEQ ID NO: 62214 - protein, 10 aa, synthetic construct
NMSRGDRGQI

SEQ ID NO: 62215 - protein, 10 aa, synthetic construct
NMSRGDRQGI

SEQ ID NO: 62216 - protein, 10 aa, synthetic construct
NMSRGDRSQT

SEQ ID NO: 62217 - protein, 10 aa, synthetic construct
TARRGDYVGL

SEQ ID NO: 62218 - protein, 10 aa, synthetic construct
NMTRGDHGVL

SEQ ID NO: 62219 - protein, 10 aa, synthetic construct
NMTRGDRSVV

SEQ ID NO: 62220 - protein, 10 aa, synthetic construct
NMTRGDRGVV

SEQ ID NO: 62221 - protein, 10 aa, synthetic construct
NMTRGDLTVT

SEQ ID NO: 62222 - protein, 10 aa, synthetic construct
NMTRGDLIGR

SEQ ID NO: 62223 - protein, 10 aa, synthetic construct
NMTRGDLLLS

SEQ ID NO: 62224 - protein, 10 aa, synthetic construct
NMYRGDRGVV

SEQ ID NO: 62225 - protein, 10 aa, synthetic construct
NMNRGDRGVV

SEQ ID NO: 62226 - protein, 10 aa, synthetic construct
NMQRGDHGVL

SEQ ID NO: 62227 - protein, 10 aa, synthetic construct
NMQRGDRSVV

SEQ ID NO: 62228 - protein, 10 aa, synthetic construct
TARRGDQSTL

SEQ ID NO: 62229 - protein, 10 aa, synthetic construct
NMQRGDRGVV

SEQ ID NO: 62230 - protein, 10 aa, synthetic construct
NMQRGDLTVT

SEQ ID NO: 62231 - protein, 10 aa, synthetic construct
NMQRGDLIGR

SEQ ID NO: 62232 - protein, 10 aa, synthetic construct
NMQRGDLLLS

SEQ ID NO: 62233 - protein, 10 aa, synthetic construct
NMDRGDHGVL

SEQ ID NO: 62234 - protein, 10 aa, synthetic construct
NMDRGDRSVV

SEQ ID NO: 62235 - protein, 10 aa, synthetic construct
NMDRGDRGVV

SEQ ID NO: 62236 - protein, 10 aa, synthetic construct
NMDRGDLTVT

SEQ ID NO: 62237 - protein, 10 aa, synthetic construct
NMDRGDLIGR

SEQ ID NO: 62238 - protein, 10 aa, synthetic construct
NMDRGDLLLS

SEQ ID NO: 62239 - protein, 10 aa, synthetic construct
TARRGDLLLS

SEQ ID NO: 62240 - protein, 10 aa, synthetic construct
NMERGDHGVL

SEQ ID NO: 62241 - protein, 10 aa, synthetic construct
NMERGDRSVV

SEQ ID NO: 62242 - protein, 10 aa, synthetic construct
NMERGDRGVV

SEQ ID NO: 62243 - protein, 10 aa, synthetic construct
NMERGDLTVT

SEQ ID NO: 62244 - protein, 10 aa, synthetic construct
NMERGDLIGR

SEQ ID NO: 62245 - protein, 10 aa, synthetic construct
NMERGDLLLS

SEQ ID NO: 62246 - protein, 10 aa, synthetic construct
NWGRGDRDYL

SEQ ID NO: 62247 - protein, 10 aa, synthetic construct
NWGRGDYVGL

SEQ ID NO: 62248 - protein, 10 aa, synthetic construct
NWGRGDYSSV

SEQ ID NO: 62249 - protein, 10 aa, synthetic construct
NWGRGDYTSV

SEQ ID NO: 62250 - protein, 10 aa, synthetic construct
TAHRGDRGQI

SEQ ID NO: 62251 - protein, 10 aa, synthetic construct
NWGRGDQSTL

SEQ ID NO: 62252 - protein, 10 aa, synthetic construct
NWARGDRDYL

SEQ ID NO: 62253 - protein, 10 aa, synthetic construct
NWARGDYVGL

SEQ ID NO: 62254 - protein, 10 aa, synthetic construct
NWARGDYSSV

SEQ ID NO: 62255 - protein, 10 aa, synthetic construct
NWARGDYTSV

SEQ ID NO: 62256 - protein, 10 aa, synthetic construct
NWARGDQSTL

SEQ ID NO: 62257 - protein, 10 aa, synthetic construct
NWVRGDRDYL

SEQ ID NO: 62258 - protein, 10 aa, synthetic construct
NWVRGDYVGL

SEQ ID NO: 62259 - protein, 10 aa, synthetic construct
NWVRGDYSSV

SEQ ID NO: 62260 - protein, 10 aa, synthetic construct
NWVRGDYTSV

SEQ ID NO: 62261 - protein, 10 aa, synthetic construct
TAHRGDRQGI

SEQ ID NO: 62262 - protein, 10 aa, synthetic construct
NWVRGDQSTL

SEQ ID NO: 62263 - protein, 10 aa, synthetic construct
NWPRGDRDYL

SEQ ID NO: 62264 - protein, 10 aa, synthetic construct
NWPRGDYVGL

SEQ ID NO: 62265 - protein, 10 aa, synthetic construct
NWPRGDYSSV

SEQ ID NO: 62266 - protein, 10 aa, synthetic construct
NWPRGDYTSV

SEQ ID NO: 62267 - protein, 10 aa, synthetic construct
NWPRGDQSTL

SEQ ID NO: 62268 - protein, 10 aa, synthetic construct
NWLRGDRDYL

SEQ ID NO: 62269 - protein, 10 aa, synthetic construct
NWLRGDYVGL

SEQ ID NO: 62270 - protein, 10 aa, synthetic construct
NWLRGDYSSV

SEQ ID NO: 62271 - protein, 10 aa, synthetic construct
NWLRGDYTSV

SEQ ID NO: 62272 - protein, 10 aa, synthetic construct
TAHRGDRSVV

SEQ ID NO: 62273 - protein, 10 aa, synthetic construct
NWLRGDQSTL

SEQ ID NO: 62274 - protein, 10 aa, synthetic construct
NWIRGDHGVL

SEQ ID NO: 62275 - protein, 10 aa, synthetic construct
NWIRGDRSVV

SEQ ID NO: 62276 - protein, 10 aa, synthetic construct
NWIRGDRGVV

SEQ ID NO: 62277 - protein, 10 aa, synthetic construct
NWIRGDLTVT

SEQ ID NO: 62278 - protein, 10 aa, synthetic construct
NWIRGDLIGR

SEQ ID NO: 62279 - protein, 10 aa, synthetic construct
NWIRGDLLLS

SEQ ID NO: 62280 - protein, 10 aa, synthetic construct
NWMRGDHGVL

SEQ ID NO: 62281 - protein, 10 aa, synthetic construct
NWMRGDRGQI

SEQ ID NO: 62282 - protein, 10 aa, synthetic construct
NWMRGDRQGI

SEQ ID NO: 62283 - protein, 10 aa, synthetic construct
TAHRGDRGVV

SEQ ID NO: 62284 - protein, 10 aa, synthetic construct
NWMRGDRGVV

SEQ ID NO: 62285 - protein, 10 aa, synthetic construct
NWMRGDYVGL

SEQ ID NO: 62286 - protein, 10 aa, synthetic construct
NWMRGDLIGR

SEQ ID NO: 62287 - protein, 10 aa, synthetic construct
NWMRGDQSTL

SEQ ID NO: 62288 - protein, 10 aa, synthetic construct
NWMRGDLLLS

SEQ ID NO: 62289 - protein, 10 aa, synthetic construct
NWWRGDHGVL

SEQ ID NO: 62290 - protein, 10 aa, synthetic construct
NWWRGDHVNL

SEQ ID NO: 62291 - protein, 10 aa, synthetic construct
NWWRGDRDYL

SEQ ID NO: 62292 - protein, 10 aa, synthetic construct
NWWRGDYSSV

SEQ ID NO: 62293 - protein, 10 aa, synthetic construct
NWWRGDLTVT

SEQ ID NO: 62294 - protein, 10 aa, synthetic construct
NKKRGDFQNT

SEQ ID NO: 62295 - protein, 10 aa, synthetic construct
TAHRGDRSQT

SEQ ID NO: 62296 - protein, 10 aa, synthetic construct
NWFRGDHGVL

SEQ ID NO: 62297 - protein, 10 aa, synthetic construct
NWFRGDRSVV

SEQ ID NO: 62298 - protein, 10 aa, synthetic construct
NWFRGDRGVV

SEQ ID NO: 62299 - protein, 10 aa, synthetic construct
NWFRGDLTVT

SEQ ID NO: 62300 - protein, 10 aa, synthetic construct
NWFRGDLIGR

SEQ ID NO: 62301 - protein, 10 aa, synthetic construct
NWFRGDLLLS

SEQ ID NO: 62302 - protein, 10 aa, synthetic construct
NWKRGDHGVL

SEQ ID NO: 62303 - protein, 10 aa, synthetic construct
NWKRGDRSVV

SEQ ID NO: 62304 - protein, 10 aa, synthetic construct
NWKRGDRGVV

SEQ ID NO: 62305 - protein, 10 aa, synthetic construct
NWKRGDLTVT

SEQ ID NO: 62306 - protein, 10 aa, synthetic construct
TASRGDRGQI

SEQ ID NO: 62307 - protein, 10 aa, synthetic construct
NWKRGDLIGR

SEQ ID NO: 62308 - protein, 10 aa, synthetic construct
NWKRGDLLLS

SEQ ID NO: 62309 - protein, 10 aa, synthetic construct
NWRRGDRDYL

SEQ ID NO: 62310 - protein, 10 aa, synthetic construct
NWRRGDYVGL

SEQ ID NO: 62311 - protein, 10 aa, synthetic construct
NWRRGDYSSV

SEQ ID NO: 62312 - protein, 10 aa, synthetic construct
NWRRGDYTSV

SEQ ID NO: 62313 - protein, 10 aa, synthetic construct
NWRRGDQSTL

SEQ ID NO: 62314 - protein, 10 aa, synthetic construct
NWHRGDHGVL

SEQ ID NO: 62315 - protein, 10 aa, synthetic construct
NWHRGDRGQI

SEQ ID NO: 62316 - protein, 10 aa, synthetic construct
NWHRGDRQGI

SEQ ID NO: 62317 - protein, 10 aa, synthetic construct
TASRGDRQGI

SEQ ID NO: 62318 - protein, 10 aa, synthetic construct
NWHRGDRSVV

SEQ ID NO: 62319 - protein, 10 aa, synthetic construct
NWHRGDLIGR

SEQ ID NO: 62320 - protein, 10 aa, synthetic construct
NWHRGDRSQT

SEQ ID NO: 62321 - protein, 10 aa, synthetic construct
NWSRGDRDYL

SEQ ID NO: 62322 - protein, 10 aa, synthetic construct
NWSRGDYVGL

SEQ ID NO: 62323 - protein, 10 aa, synthetic construct
NWSRGDYSSV

SEQ ID NO: 62324 - protein, 10 aa, synthetic construct
NWSRGDYTSV

SEQ ID NO: 62325 - protein, 10 aa, synthetic construct
NWSRGDQSTL

SEQ ID NO: 62326 - protein, 10 aa, synthetic construct
NWTRGDHGVL

SEQ ID NO: 62327 - protein, 10 aa, synthetic construct
NWTRGDRGQI

SEQ ID NO: 62328 - protein, 10 aa, synthetic construct
TASRGDRSVV

SEQ ID NO: 62329 - protein, 10 aa, synthetic construct
NWTRGDRQGI

SEQ ID NO: 62330 - protein, 10 aa, synthetic construct
NWTRGDRSVV

SEQ ID NO: 62331 - protein, 10 aa, synthetic construct
NWTRGDLIGR

SEQ ID NO: 62332 - protein, 10 aa, synthetic construct
NWTRGDRSQT

SEQ ID NO: 62333 - protein, 10 aa, synthetic construct
NWYRGDHGVL

SEQ ID NO: 62334 - protein, 10 aa, synthetic construct
NWYRGDRSVV

SEQ ID NO: 62335 - protein, 10 aa, synthetic construct
NWYRGDRGVV

SEQ ID NO: 62336 - protein, 10 aa, synthetic construct
NWYRGDLTVT

SEQ ID NO: 62337 - protein, 10 aa, synthetic construct
NWYRGDLIGR

SEQ ID NO: 62338 - protein, 10 aa, synthetic construct
NWYRGDLLLS

SEQ ID NO: 62339 - protein, 10 aa, synthetic construct
TASRGDRGVV

SEQ ID NO: 62340 - protein, 10 aa, synthetic construct
NWNRGDHGVL

SEQ ID NO: 62341 - protein, 10 aa, synthetic construct
NWNRGDRSVV

SEQ ID NO: 62342 - protein, 10 aa, synthetic construct
NWNRGDRGVV

SEQ ID NO: 62343 - protein, 10 aa, synthetic construct
NWNRGDLTVT

SEQ ID NO: 62344 - protein, 10 aa, synthetic construct
NWNRGDLIGR

SEQ ID NO: 62345 - protein, 10 aa, synthetic construct
NWNRGDLLLS

SEQ ID NO: 62346 - protein, 10 aa, synthetic construct
NWQRGDHGVL

SEQ ID NO: 62347 - protein, 10 aa, synthetic construct
NWQRGDRGQI

SEQ ID NO: 62348 - protein, 10 aa, synthetic construct
NWQRGDRQGI

SEQ ID NO: 62349 - protein, 10 aa, synthetic construct
NWQRGDRSVV

SEQ ID NO: 62350 - protein, 10 aa, synthetic construct
TASRGDRSQT

SEQ ID NO: 62351 - protein, 10 aa, synthetic construct
NWQRGDLIGR

SEQ ID NO: 62352 - protein, 10 aa, synthetic construct
NWQRGDRSQT

SEQ ID NO: 62353 - protein, 10 aa, synthetic construct
NWDRGDHGVL

SEQ ID NO: 62354 - protein, 10 aa, synthetic construct
NWDRGDRGQI

SEQ ID NO: 62355 - protein, 10 aa, synthetic construct
NWDRGDRQGI

SEQ ID NO: 62356 - protein, 10 aa, synthetic construct
NWDRGDRSVV

SEQ ID NO: 62357 - protein, 10 aa, synthetic construct
NWDRGDLIGR

SEQ ID NO: 62358 - protein, 10 aa, synthetic construct
NWDRGDRSQT

SEQ ID NO: 62359 - protein, 10 aa, synthetic construct
NWERGDHGVL

SEQ ID NO: 62360 - protein, 10 aa, synthetic construct
NWERGDRGQI

SEQ ID NO: 62361 - protein, 10 aa, synthetic construct
TATRGDRGQI

SEQ ID NO: 62362 - protein, 10 aa, synthetic construct
NWERGDRQGI

SEQ ID NO: 62363 - protein, 10 aa, synthetic construct
NWERGDRSVV

SEQ ID NO: 62364 - protein, 10 aa, synthetic construct
NWERGDLIGR

SEQ ID NO: 62365 - protein, 10 aa, synthetic construct
NWERGDRSQT

SEQ ID NO: 62366 - protein, 10 aa, synthetic construct
NFGRGDRGQI

SEQ ID NO: 62367 - protein, 10 aa, synthetic construct
NFGRGDRQGI

SEQ ID NO: 62368 - protein, 10 aa, synthetic construct
NFGRGDRSVV

SEQ ID NO: 62369 - protein, 10 aa, synthetic construct
NFGRGDRGVV

SEQ ID NO: 62370 - protein, 10 aa, synthetic construct
NFGRGDYVGL

SEQ ID NO: 62371 - protein, 10 aa, synthetic construct
NFGRGDQSTL

SEQ ID NO: 62372 - protein, 10 aa, synthetic construct
TATRGDRQGI

SEQ ID NO: 62373 - protein, 10 aa, synthetic construct
NFGRGDRSQT

SEQ ID NO: 62374 - protein, 10 aa, synthetic construct
NFGRGDLLLS

SEQ ID NO: 62375 - protein, 10 aa, synthetic construct
NFARGDRGQI

SEQ ID NO: 62376 - protein, 10 aa, synthetic construct
NFARGDRQGI

SEQ ID NO: 62377 - protein, 10 aa, synthetic construct
NFARGDRSVV

SEQ ID NO: 62378 - protein, 10 aa, synthetic construct
NFARGDRGVV

SEQ ID NO: 62379 - protein, 10 aa, synthetic construct
NFARGDYVGL

SEQ ID NO: 62380 - protein, 10 aa, synthetic construct
NFARGDQSTL

SEQ ID NO: 62381 - protein, 10 aa, synthetic construct
NFARGDRSQT

SEQ ID NO: 62382 - protein, 10 aa, synthetic construct
NFARGDLLLS

SEQ ID NO: 62383 - protein, 10 aa, synthetic construct
TATRGDRSVV

SEQ ID NO: 62384 - protein, 10 aa, synthetic construct
NFVRGDRSVV

SEQ ID NO: 62385 - protein, 10 aa, synthetic construct
NFVRGDRSQT

SEQ ID NO: 62386 - protein, 10 aa, synthetic construct
NFPRGDRGQI

SEQ ID NO: 62387 - protein, 10 aa, synthetic construct
NFPRGDRQGI

SEQ ID NO: 62388 - protein, 10 aa, synthetic construct
NFPRGDRSVV

SEQ ID NO: 62389 - protein, 10 aa, synthetic construct
NFPRGDRGVV

SEQ ID NO: 62390 - protein, 10 aa, synthetic construct
NFPRGDYVGL

SEQ ID NO: 62391 - protein, 10 aa, synthetic construct
NFPRGDQSTL

SEQ ID NO: 62392 - protein, 10 aa, synthetic construct
NFPRGDRSQT

SEQ ID NO: 62393 - protein, 10 aa, synthetic construct
NFPRGDLLLS

SEQ ID NO: 62394 - protein, 10 aa, synthetic construct
TATRGDRGVV

SEQ ID NO: 62395 - protein, 10 aa, synthetic construct
NFLRGDRSVV

SEQ ID NO: 62396 - protein, 10 aa, synthetic construct
NFLRGDRSQT

SEQ ID NO: 62397 - protein, 10 aa, synthetic construct
NFWRGDRSVV

SEQ ID NO: 62398 - protein, 10 aa, synthetic construct
NFWRGDRSQT

SEQ ID NO: 62399 - protein, 10 aa, synthetic construct
NFRRGDRGQI

SEQ ID NO: 62400 - protein, 10 aa, synthetic construct
NFRRGDRQGI

SEQ ID NO: 62401 - protein, 10 aa, synthetic construct
NFRRGDRSVV

SEQ ID NO: 62402 - protein, 10 aa, synthetic construct
NFRRGDRGVV

SEQ ID NO: 62403 - protein, 10 aa, synthetic construct
NFRRGDYVGL

SEQ ID NO: 62404 - protein, 10 aa, synthetic construct
NFRRGDQSTL

SEQ ID NO: 62405 - protein, 10 aa, synthetic construct
NKNRGDYNSL

SEQ ID NO: 62406 - protein, 10 aa, synthetic construct
TATRGDRSQT

SEQ ID NO: 62407 - protein, 10 aa, synthetic construct
NFRRGDRSQT

SEQ ID NO: 62408 - protein, 10 aa, synthetic construct
NFRRGDLLLS

SEQ ID NO: 62409 - protein, 10 aa, synthetic construct
NFHRGDRSVV

SEQ ID NO: 62410 - protein, 10 aa, synthetic construct
NFHRGDRSQT

SEQ ID NO: 62411 - protein, 10 aa, synthetic construct
NFSRGDRSVV

SEQ ID NO: 62412 - protein, 10 aa, synthetic construct
NFSRGDRSQT

SEQ ID NO: 62413 - protein, 10 aa, synthetic construct
NFTRGDRSVV

SEQ ID NO: 62414 - protein, 10 aa, synthetic construct
NFTRGDRSQT

SEQ ID NO: 62415 - protein, 10 aa, synthetic construct
NFQRGDRSVV

SEQ ID NO: 62416 - protein, 10 aa, synthetic construct
NFQRGDRSQT

SEQ ID NO: 62417 - protein, 10 aa, synthetic construct
TAQRGDRGQI

SEQ ID NO: 62418 - protein, 10 aa, synthetic construct
NFDRGDRSVV

SEQ ID NO: 62419 - protein, 10 aa, synthetic construct
NFDRGDRSQT

SEQ ID NO: 62420 - protein, 10 aa, synthetic construct
NFERGDRSVV

SEQ ID NO: 62421 - protein, 10 aa, synthetic construct
NFERGDRSQT

SEQ ID NO: 62422 - protein, 10 aa, synthetic construct
NKGRGDRGQI

SEQ ID NO: 62423 - protein, 10 aa, synthetic construct
NKGRGDRQGI

SEQ ID NO: 62424 - protein, 10 aa, synthetic construct
NKGRGDRSVV

SEQ ID NO: 62425 - protein, 10 aa, synthetic construct
NKGRGDRGVV

SEQ ID NO: 62426 - protein, 10 aa, synthetic construct
NKGRGDYVGL

SEQ ID NO: 62427 - protein, 10 aa, synthetic construct
NKGRGDQSTL

SEQ ID NO: 62428 - protein, 10 aa, synthetic construct
TAQRGDRQGI

SEQ ID NO: 62429 - protein, 10 aa, synthetic construct
NKGRGDRSQT

SEQ ID NO: 62430 - protein, 10 aa, synthetic construct
NKGRGDLLLS

SEQ ID NO: 62431 - protein, 10 aa, synthetic construct
NKARGDRGQI

SEQ ID NO: 62432 - protein, 10 aa, synthetic construct
NKARGDRQGI

SEQ ID NO: 62433 - protein, 10 aa, synthetic construct
NKARGDRSVV

SEQ ID NO: 62434 - protein, 10 aa, synthetic construct
NKARGDRGVV

SEQ ID NO: 62435 - protein, 10 aa, synthetic construct
NKARGDYVGL

SEQ ID NO: 62436 - protein, 10 aa, synthetic construct
NKARGDQSTL

SEQ ID NO: 62437 - protein, 10 aa, synthetic construct
NKARGDRSQT

SEQ ID NO: 62438 - protein, 10 aa, synthetic construct
NKARGDLLLS

SEQ ID NO: 62439 - protein, 10 aa, synthetic construct
TAQRGDRSVV

SEQ ID NO: 62440 - protein, 10 aa, synthetic construct
NKVRGDRSVV

SEQ ID NO: 62441 - protein, 10 aa, synthetic construct
NKVRGDRSQT

SEQ ID NO: 62442 - protein, 10 aa, synthetic construct
NKPRGDRGQI

SEQ ID NO: 62443 - protein, 10 aa, synthetic construct
NKPRGDRQGI

SEQ ID NO: 62444 - protein, 10 aa, synthetic construct
NKPRGDRSVV

SEQ ID NO: 62445 - protein, 10 aa, synthetic construct
NKPRGDRGVV

SEQ ID NO: 62446 - protein, 10 aa, synthetic construct
NKPRGDYVGL

SEQ ID NO: 62447 - protein, 10 aa, synthetic construct
NKPRGDQSTL

SEQ ID NO: 62448 - protein, 10 aa, synthetic construct
NKPRGDRSQT

SEQ ID NO: 62449 - protein, 10 aa, synthetic construct
NKPRGDLLLS

SEQ ID NO: 62450 - protein, 10 aa, synthetic construct
TAQRGDRGVV

SEQ ID NO: 62451 - protein, 10 aa, synthetic construct
NKLRGDRSVV

SEQ ID NO: 62452 - protein, 10 aa, synthetic construct
NKLRGDRSQT

SEQ ID NO: 62453 - protein, 10 aa, synthetic construct
NKWRGDRSVV

SEQ ID NO: 62454 - protein, 10 aa, synthetic construct
NKWRGDRSQT

SEQ ID NO: 62455 - protein, 10 aa, synthetic construct
NKRRGDRGQI

SEQ ID NO: 62456 - protein, 10 aa, synthetic construct
NKRRGDRQGI

SEQ ID NO: 62457 - protein, 10 aa, synthetic construct
NKRRGDRSVV

SEQ ID NO: 62458 - protein, 10 aa, synthetic construct
NKRRGDRGVV

SEQ ID NO: 62459 - protein, 10 aa, synthetic construct
NKRRGDYVGL

SEQ ID NO: 62460 - protein, 10 aa, synthetic construct
NKRRGDQSTL

SEQ ID NO: 62461 - protein, 10 aa, synthetic construct
TAQRGDRSQT

SEQ ID NO: 62462 - protein, 10 aa, synthetic construct
NKRRGDRSQT

SEQ ID NO: 62463 - protein, 10 aa, synthetic construct
NKRRGDLLLS

SEQ ID NO: 62464 - protein, 10 aa, synthetic construct
NKHRGDRSVV

SEQ ID NO: 62465 - protein, 10 aa, synthetic construct
NKHRGDRSQT

SEQ ID NO: 62466 - protein, 10 aa, synthetic construct
NKSRGDRSVV

SEQ ID NO: 62467 - protein, 10 aa, synthetic construct
NKSRGDRSQT

SEQ ID NO: 62468 - protein, 10 aa, synthetic construct
NKTRGDRSVV

SEQ ID NO: 62469 - protein, 10 aa, synthetic construct
NKTRGDRSQT

SEQ ID NO: 62470 - protein, 10 aa, synthetic construct
NKQRGDRSVV

SEQ ID NO: 62471 - protein, 10 aa, synthetic construct
NKQRGDRSQT

SEQ ID NO: 62472 - protein, 10 aa, synthetic construct
TADRGDRGQI

SEQ ID NO: 62473 - protein, 10 aa, synthetic construct
NKDRGDRSVV

SEQ ID NO: 62474 - protein, 10 aa, synthetic construct
NKDRGDRSQT

SEQ ID NO: 62475 - protein, 10 aa, synthetic construct
NKERGDRSVV

SEQ ID NO: 62476 - protein, 10 aa, synthetic construct
NKERGDRSQT

SEQ ID NO: 62477 - protein, 10 aa, synthetic construct
NRGRGDHVNL

SEQ ID NO: 62478 - protein, 10 aa, synthetic construct
NRGRGDRDYL

SEQ ID NO: 62479 - protein, 10 aa, synthetic construct
NRGRGDYSSV

SEQ ID NO: 62480 - protein, 10 aa, synthetic construct
NRGRGDLTVT

SEQ ID NO: 62481 - protein, 10 aa, synthetic construct
NRGRGDLIGR

SEQ ID NO: 62482 - protein, 10 aa, synthetic construct
NRARGDHVNL

SEQ ID NO: 62483 - protein, 10 aa, synthetic construct
TADRGDRQGI

SEQ ID NO: 62484 - protein, 10 aa, synthetic construct
NRARGDRDYL

SEQ ID NO: 62485 - protein, 10 aa, synthetic construct
NRARGDYSSV

SEQ ID NO: 62486 - protein, 10 aa, synthetic construct
NRARGDLTVT

SEQ ID NO: 62487 - protein, 10 aa, synthetic construct
NRARGDLIGR

SEQ ID NO: 62488 - protein, 10 aa, synthetic construct
NRVRGDHGVL

SEQ ID NO: 62489 - protein, 10 aa, synthetic construct
NRVRGDHVNL

SEQ ID NO: 62490 - protein, 10 aa, synthetic construct
NRVRGDYVGL

SEQ ID NO: 62491 - protein, 10 aa, synthetic construct
NRVRGDYSSV

SEQ ID NO: 62492 - protein, 10 aa, synthetic construct
NRVRGDQSTL

SEQ ID NO: 62493 - protein, 10 aa, synthetic construct
NRVRGDLLLS

SEQ ID NO: 62494 - protein, 10 aa, synthetic construct
TADRGDRSVV

SEQ ID NO: 62495 - protein, 10 aa, synthetic construct
NRPRGDHVNL

SEQ ID NO: 62496 - protein, 10 aa, synthetic construct
NRPRGDRDYL

SEQ ID NO: 62497 - protein, 10 aa, synthetic construct
NRPRGDYSSV

SEQ ID NO: 62498 - protein, 10 aa, synthetic construct
NRPRGDLTVT

SEQ ID NO: 62499 - protein, 10 aa, synthetic construct
NRPRGDLIGR

SEQ ID NO: 62500 - protein, 10 aa, synthetic construct
NRLRGDHGVL

SEQ ID NO: 62501 - protein, 10 aa, synthetic construct
NRLRGDHVNL

SEQ ID NO: 62502 - protein, 10 aa, synthetic construct
NRLRGDYVGL

SEQ ID NO: 62503 - protein, 10 aa, synthetic construct
NRLRGDYSSV

SEQ ID NO: 62504 - protein, 10 aa, synthetic construct
NRLRGDQSTL

SEQ ID NO: 62505 - protein, 10 aa, synthetic construct
TADRGDRGVV

SEQ ID NO: 62506 - protein, 10 aa, synthetic construct
NRLRGDLLLS

SEQ ID NO: 62507 - protein, 10 aa, synthetic construct
NRIRGDRGQI

SEQ ID NO: 62508 - protein, 10 aa, synthetic construct
NRIRGDRQGI

SEQ ID NO: 62509 - protein, 10 aa, synthetic construct
NRIRGDRSVV

SEQ ID NO: 62510 - protein, 10 aa, synthetic construct
NRIRGDRGVV

SEQ ID NO: 62511 - protein, 10 aa, synthetic construct
NRIRGDYVGL

SEQ ID NO: 62512 - protein, 10 aa, synthetic construct
NRIRGDQSTL

SEQ ID NO: 62513 - protein, 10 aa, synthetic construct
NRIRGDRSQT

SEQ ID NO: 62514 - protein, 10 aa, synthetic construct
NRIRGDLLLS

SEQ ID NO: 62515 - protein, 10 aa, synthetic construct
NRMRGDRGQI

SEQ ID NO: 62516 - protein, 10 aa, synthetic construct
NKNRGDYTSM

SEQ ID NO: 62517 - protein, 10 aa, synthetic construct
TADRGDRSQT

SEQ ID NO: 62518 - protein, 10 aa, synthetic construct
NRMRGDRQGI

SEQ ID NO: 62519 - protein, 10 aa, synthetic construct
NRMRGDRSVV

SEQ ID NO: 62520 - protein, 10 aa, synthetic construct
NRMRGDRGVV

SEQ ID NO: 62521 - protein, 10 aa, synthetic construct
NRMRGDYVGL

SEQ ID NO: 62522 - protein, 10 aa, synthetic construct
NRMRGDQSTL

SEQ ID NO: 62523 - protein, 10 aa, synthetic construct
NRMRGDRSQT

SEQ ID NO: 62524 - protein, 10 aa, synthetic construct
NRMRGDLLLS

SEQ ID NO: 62525 - protein, 10 aa, synthetic construct
NRWRGDHGVL

SEQ ID NO: 62526 - protein, 10 aa, synthetic construct
NRWRGDHVNL

SEQ ID NO: 62527 - protein, 10 aa, synthetic construct
NRWRGDYVGL

SEQ ID NO: 62528 - protein, 10 aa, synthetic construct
TAERGDRGQI

SEQ ID NO: 62529 - protein, 10 aa, synthetic construct
NRWRGDYSSV

SEQ ID NO: 62530 - protein, 10 aa, synthetic construct
NRWRGDQSTL

SEQ ID NO: 62531 - protein, 10 aa, synthetic construct
NRWRGDLLLS

SEQ ID NO: 62532 - protein, 10 aa, synthetic construct
NRFRGDRGQI

SEQ ID NO: 62533 - protein, 10 aa, synthetic construct
NRFRGDRQGI

SEQ ID NO: 62534 - protein, 10 aa, synthetic construct
NRFRGDRSVV

SEQ ID NO: 62535 - protein, 10 aa, synthetic construct
NRFRGDRGVV

SEQ ID NO: 62536 - protein, 10 aa, synthetic construct
NRFRGDYVGL

SEQ ID NO: 62537 - protein, 10 aa, synthetic construct
NRFRGDQSTL

SEQ ID NO: 62538 - protein, 10 aa, synthetic construct
NRFRGDRSQT

SEQ ID NO: 62539 - protein, 10 aa, synthetic construct
TAERGDRQGI

SEQ ID NO: 62540 - protein, 10 aa, synthetic construct
NRFRGDLLLS

SEQ ID NO: 62541 - protein, 10 aa, synthetic construct
NRKRGDRGQI

SEQ ID NO: 62542 - protein, 10 aa, synthetic construct
NRKRGDRQGI

SEQ ID NO: 62543 - protein, 10 aa, synthetic construct
NRKRGDRSVV

SEQ ID NO: 62544 - protein, 10 aa, synthetic construct
NRKRGDRGVV

SEQ ID NO: 62545 - protein, 10 aa, synthetic construct
NRKRGDYVGL

SEQ ID NO: 62546 - protein, 10 aa, synthetic construct
NRKRGDQSTL

SEQ ID NO: 62547 - protein, 10 aa, synthetic construct
NRKRGDRSQT

SEQ ID NO: 62548 - protein, 10 aa, synthetic construct
NRKRGDLLLS

SEQ ID NO: 62549 - protein, 10 aa, synthetic construct
NRRRGDHVNL

SEQ ID NO: 62550 - protein, 10 aa, synthetic construct
TAERGDRSVV

SEQ ID NO: 62551 - protein, 10 aa, synthetic construct
NRRRGDRDYL

SEQ ID NO: 62552 - protein, 10 aa, synthetic construct
NRRRGDYSSV

SEQ ID NO: 62553 - protein, 10 aa, synthetic construct
NRRRGDLTVT

SEQ ID NO: 62554 - protein, 10 aa, synthetic construct
NRRRGDLIGR

SEQ ID NO: 62555 - protein, 10 aa, synthetic construct
NRHRGDHGVL

SEQ ID NO: 62556 - protein, 10 aa, synthetic construct
NRHRGDHVNL

SEQ ID NO: 62557 - protein, 10 aa, synthetic construct
NRHRGDYVGL

SEQ ID NO: 62558 - protein, 10 aa, synthetic construct
NRHRGDYSSV

SEQ ID NO: 62559 - protein, 10 aa, synthetic construct
NRHRGDQSTL

SEQ ID NO: 62560 - protein, 10 aa, synthetic construct
NRHRGDLLLS

SEQ ID NO: 62561 - protein, 10 aa, synthetic construct
TAERGDRGVV

SEQ ID NO: 62562 - protein, 10 aa, synthetic construct
NRSRGDHGVL

SEQ ID NO: 62563 - protein, 10 aa, synthetic construct
NRSRGDHVNL

SEQ ID NO: 62564 - protein, 10 aa, synthetic construct
NRSRGDYVGL

SEQ ID NO: 62565 - protein, 10 aa, synthetic construct
NRSRGDYSSV

SEQ ID NO: 62566 - protein, 10 aa, synthetic construct
NRSRGDQSTL

SEQ ID NO: 62567 - protein, 10 aa, synthetic construct
NRSRGDLLLS

SEQ ID NO: 62568 - protein, 10 aa, synthetic construct
NRTRGDHGVL

SEQ ID NO: 62569 - protein, 10 aa, synthetic construct
NRTRGDHVNL

SEQ ID NO: 62570 - protein, 10 aa, synthetic construct
NRTRGDYVGL

SEQ ID NO: 62571 - protein, 10 aa, synthetic construct
NRTRGDYSSV

SEQ ID NO: 62572 - protein, 10 aa, synthetic construct
TAERGDRSQT

SEQ ID NO: 62573 - protein, 10 aa, synthetic construct
NRTRGDQSTL

SEQ ID NO: 62574 - protein, 10 aa, synthetic construct
NRTRGDLLLS

SEQ ID NO: 62575 - protein, 10 aa, synthetic construct
NRYRGDRGQI

SEQ ID NO: 62576 - protein, 10 aa, synthetic construct
NRYRGDRQGI

SEQ ID NO: 62577 - protein, 10 aa, synthetic construct
NRYRGDRSVV

SEQ ID NO: 62578 - protein, 10 aa, synthetic construct
NRYRGDRGVV

SEQ ID NO: 62579 - protein, 10 aa, synthetic construct
NRYRGDYVGL

SEQ ID NO: 62580 - protein, 10 aa, synthetic construct
NRYRGDQSTL

SEQ ID NO: 62581 - protein, 10 aa, synthetic construct
NRYRGDRSQT

SEQ ID NO: 62582 - protein, 10 aa, synthetic construct
NRYRGDLLLS

SEQ ID NO: 62583 - protein, 10 aa, synthetic construct
TVGRGDHGVL

SEQ ID NO: 62584 - protein, 10 aa, synthetic construct
NRNRGDRGQI

SEQ ID NO: 62585 - protein, 10 aa, synthetic construct
NRNRGDRQGI

SEQ ID NO: 62586 - protein, 10 aa, synthetic construct
NRNRGDRSVV

SEQ ID NO: 62587 - protein, 10 aa, synthetic construct
NRNRGDRGVV

SEQ ID NO: 62588 - protein, 10 aa, synthetic construct
NRNRGDYVGL

SEQ ID NO: 62589 - protein, 10 aa, synthetic construct
NRNRGDQSTL

SEQ ID NO: 62590 - protein, 10 aa, synthetic construct
NRNRGDRSQT

SEQ ID NO: 62591 - protein, 10 aa, synthetic construct
NRNRGDLLLS

SEQ ID NO: 62592 - protein, 10 aa, synthetic construct
NRQRGDHGVL

SEQ ID NO: 62593 - protein, 10 aa, synthetic construct
NRQRGDHVNL

SEQ ID NO: 62594 - protein, 10 aa, synthetic construct
TVGRGDYVGL

SEQ ID NO: 62595 - protein, 10 aa, synthetic construct
NRQRGDYVGL

SEQ ID NO: 62596 - protein, 10 aa, synthetic construct
NRQRGDYSSV

SEQ ID NO: 62597 - protein, 10 aa, synthetic construct
NRQRGDQSTL

SEQ ID NO: 62598 - protein, 10 aa, synthetic construct
NRQRGDLLLS

SEQ ID NO: 62599 - protein, 10 aa, synthetic construct
NRDRGDHGVL

SEQ ID NO: 62600 - protein, 10 aa, synthetic construct
NRDRGDHVNL

SEQ ID NO: 62601 - protein, 10 aa, synthetic construct
NRDRGDYVGL

SEQ ID NO: 62602 - protein, 10 aa, synthetic construct
NRDRGDYSSV

SEQ ID NO: 62603 - protein, 10 aa, synthetic construct
NRDRGDQSTL

SEQ ID NO: 62604 - protein, 10 aa, synthetic construct
NRDRGDLLLS

SEQ ID NO: 62605 - protein, 10 aa, synthetic construct
TVGRGDQSTL

SEQ ID NO: 62606 - protein, 10 aa, synthetic construct
NRERGDHGVL

SEQ ID NO: 62607 - protein, 10 aa, synthetic construct
NRERGDHVNL

SEQ ID NO: 62608 - protein, 10 aa, synthetic construct
NRERGDYVGL

SEQ ID NO: 62609 - protein, 10 aa, synthetic construct
NRERGDYSSV

SEQ ID NO: 62610 - protein, 10 aa, synthetic construct
NRERGDQSTL

SEQ ID NO: 62611 - protein, 10 aa, synthetic construct
NRERGDLLLS

SEQ ID NO: 62612 - protein, 10 aa, synthetic construct
NHGRGDHGVL

SEQ ID NO: 62613 - protein, 10 aa, synthetic construct
NHGRGDHVNL

SEQ ID NO: 62614 - protein, 10 aa, synthetic construct
NHGRGDYVGL

SEQ ID NO: 62615 - protein, 10 aa, synthetic construct
NHGRGDYSSV

SEQ ID NO: 62616 - protein, 10 aa, synthetic construct
TVGRGDLLLS

SEQ ID NO: 62617 - protein, 10 aa, synthetic construct
NHGRGDQSTL

SEQ ID NO: 62618 - protein, 10 aa, synthetic construct
NHGRGDLLLS

SEQ ID NO: 62619 - protein, 10 aa, synthetic construct
NHARGDHGVL

SEQ ID NO: 62620 - protein, 10 aa, synthetic construct
NHARGDHVNL

SEQ ID NO: 62621 - protein, 10 aa, synthetic construct
NHARGDYVGL

SEQ ID NO: 62622 - protein, 10 aa, synthetic construct
NHARGDYSSV

SEQ ID NO: 62623 - protein, 10 aa, synthetic construct
NHARGDQSTL

SEQ ID NO: 62624 - protein, 10 aa, synthetic construct
NHARGDLLLS

SEQ ID NO: 62625 - protein, 10 aa, synthetic construct
NHVRGDRGQI

SEQ ID NO: 62626 - protein, 10 aa, synthetic construct
NHVRGDRQGI

SEQ ID NO: 62627 - protein, 10 aa, synthetic construct
NKNRGDFQNT

SEQ ID NO: 62628 - protein, 10 aa, synthetic construct
TVARGDHGVL

SEQ ID NO: 62629 - protein, 10 aa, synthetic construct
NHVRGDRSVV

SEQ ID NO: 62630 - protein, 10 aa, synthetic construct
NHVRGDRGVV

SEQ ID NO: 62631 - protein, 10 aa, synthetic construct
NHVRGDYVGL

SEQ ID NO: 62632 - protein, 10 aa, synthetic construct
NHVRGDQSTL

SEQ ID NO: 62633 - protein, 10 aa, synthetic construct
NHVRGDRSQT

SEQ ID NO: 62634 - protein, 10 aa, synthetic construct
NHVRGDLLLS

SEQ ID NO: 62635 - protein, 10 aa, synthetic construct
NHPRGDHGVL

SEQ ID NO: 62636 - protein, 10 aa, synthetic construct
NHPRGDHVNL

SEQ ID NO: 62637 - protein, 10 aa, synthetic construct
NHPRGDYVGL

SEQ ID NO: 62638 - protein, 10 aa, synthetic construct
NHPRGDYSSV

SEQ ID NO: 62639 - protein, 10 aa, synthetic construct
TVARGDYVGL

SEQ ID NO: 62640 - protein, 10 aa, synthetic construct
NHPRGDQSTL

SEQ ID NO: 62641 - protein, 10 aa, synthetic construct
NHPRGDLLLS

SEQ ID NO: 62642 - protein, 10 aa, synthetic construct
NHLRGDRGQI

SEQ ID NO: 62643 - protein, 10 aa, synthetic construct
NHLRGDRQGI

SEQ ID NO: 62644 - protein, 10 aa, synthetic construct
NHLRGDRSVV

SEQ ID NO: 62645 - protein, 10 aa, synthetic construct
NHLRGDRGVV

SEQ ID NO: 62646 - protein, 10 aa, synthetic construct
NHLRGDYVGL

SEQ ID NO: 62647 - protein, 10 aa, synthetic construct
NHLRGDQSTL

SEQ ID NO: 62648 - protein, 10 aa, synthetic construct
NHLRGDRSQT

SEQ ID NO: 62649 - protein, 10 aa, synthetic construct
NHLRGDLLLS

SEQ ID NO: 62650 - protein, 10 aa, synthetic construct
TVARGDQSTL

SEQ ID NO: 62651 - protein, 10 aa, synthetic construct
NHIRGDRSVV

SEQ ID NO: 62652 - protein, 10 aa, synthetic construct
NHIRGDRSQT

SEQ ID NO: 62653 - protein, 10 aa, synthetic construct
NHMRGDRSVV

SEQ ID NO: 62654 - protein, 10 aa, synthetic construct
NHMRGDRSQT

SEQ ID NO: 62655 - protein, 10 aa, synthetic construct
NHWRGDRGQI

SEQ ID NO: 62656 - protein, 10 aa, synthetic construct
NHWRGDRQGI

SEQ ID NO: 62657 - protein, 10 aa, synthetic construct
NHWRGDRSVV

SEQ ID NO: 62658 - protein, 10 aa, synthetic construct
NHWRGDRGVV

SEQ ID NO: 62659 - protein, 10 aa, synthetic construct
NHWRGDYVGL

SEQ ID NO: 62660 - protein, 10 aa, synthetic construct
NHWRGDQSTL

SEQ ID NO: 62661 - protein, 10 aa, synthetic construct
TVARGDLLLS

SEQ ID NO: 62662 - protein, 10 aa, synthetic construct
NHWRGDRSQT

SEQ ID NO: 62663 - protein, 10 aa, synthetic construct
NHWRGDLLLS

SEQ ID NO: 62664 - protein, 10 aa, synthetic construct
NHFRGDRSVV

SEQ ID NO: 62665 - protein, 10 aa, synthetic construct
NHFRGDRSQT

SEQ ID NO: 62666 - protein, 10 aa, synthetic construct
NHKRGDRSVV

SEQ ID NO: 62667 - protein, 10 aa, synthetic construct
NHKRGDRSQT

SEQ ID NO: 62668 - protein, 10 aa, synthetic construct
NHRRGDHGVL

SEQ ID NO: 62669 - protein, 10 aa, synthetic construct
NHRRGDHVNL

SEQ ID NO: 62670 - protein, 10 aa, synthetic construct
NHRRGDYVGL

SEQ ID NO: 62671 - protein, 10 aa, synthetic construct
NHRRGDYSSV

SEQ ID NO: 62672 - protein, 10 aa, synthetic construct
TVVRGDRGQI

SEQ ID NO: 62673 - protein, 10 aa, synthetic construct
NHRRGDQSTL

SEQ ID NO: 62674 - protein, 10 aa, synthetic construct
NHRRGDLLLS

SEQ ID NO: 62675 - protein, 10 aa, synthetic construct
NHHRGDRGQI

SEQ ID NO: 62676 - protein, 10 aa, synthetic construct
NHHRGDRQGI

SEQ ID NO: 62677 - protein, 10 aa, synthetic construct
NHHRGDRSVV

SEQ ID NO: 62678 - protein, 10 aa, synthetic construct
NHHRGDRGVV

SEQ ID NO: 62679 - protein, 10 aa, synthetic construct
NHHRGDYVGL

SEQ ID NO: 62680 - protein, 10 aa, synthetic construct
NHHRGDQSTL

SEQ ID NO: 62681 - protein, 10 aa, synthetic construct
NHHRGDRSQT

SEQ ID NO: 62682 - protein, 10 aa, synthetic construct
NHHRGDLLLS

SEQ ID NO: 62683 - protein, 10 aa, synthetic construct
TVVRGDRQGI

SEQ ID NO: 62684 - protein, 10 aa, synthetic construct
NHSRGDRGQI

SEQ ID NO: 62685 - protein, 10 aa, synthetic construct
NHSRGDRQGI

SEQ ID NO: 62686 - protein, 10 aa, synthetic construct
NHSRGDRSVV

SEQ ID NO: 62687 - protein, 10 aa, synthetic construct
NHSRGDRGVV

SEQ ID NO: 62688 - protein, 10 aa, synthetic construct
NHSRGDYVGL

SEQ ID NO: 62689 - protein, 10 aa, synthetic construct
NHSRGDQSTL

SEQ ID NO: 62690 - protein, 10 aa, synthetic construct
NHSRGDRSQT

SEQ ID NO: 62691 - protein, 10 aa, synthetic construct
NHSRGDLLLS

SEQ ID NO: 62692 - protein, 10 aa, synthetic construct
NHTRGDRGQI

SEQ ID NO: 62693 - protein, 10 aa, synthetic construct
NHTRGDRQGI

SEQ ID NO: 62694 - protein, 10 aa, synthetic construct
TVVRGDRSVV

SEQ ID NO: 62695 - protein, 10 aa, synthetic construct
NHTRGDRSVV

SEQ ID NO: 62696 - protein, 10 aa, synthetic construct
NHTRGDRGVV

SEQ ID NO: 62697 - protein, 10 aa, synthetic construct
NHTRGDYVGL

SEQ ID NO: 62698 - protein, 10 aa, synthetic construct
NHTRGDQSTL

SEQ ID NO: 62699 - protein, 10 aa, synthetic construct
NHTRGDRSQT

SEQ ID NO: 62700 - protein, 10 aa, synthetic construct
NHTRGDLLLS

SEQ ID NO: 62701 - protein, 10 aa, synthetic construct
NHYRGDRSVV

SEQ ID NO: 62702 - protein, 10 aa, synthetic construct
NHYRGDRSQT

SEQ ID NO: 62703 - protein, 10 aa, synthetic construct
NHNRGDRSVV

SEQ ID NO: 62704 - protein, 10 aa, synthetic construct
NHNRGDRSQT

SEQ ID NO: 62705 - protein, 10 aa, synthetic construct
TVVRGDRGVV

SEQ ID NO: 62706 - protein, 10 aa, synthetic construct
NHQRGDRGQI

SEQ ID NO: 62707 - protein, 10 aa, synthetic construct
NHQRGDRQGI

SEQ ID NO: 62708 - protein, 10 aa, synthetic construct
NHQRGDRSVV

SEQ ID NO: 62709 - protein, 10 aa, synthetic construct
NHQRGDRGVV

SEQ ID NO: 62710 - protein, 10 aa, synthetic construct
NHQRGDYVGL

SEQ ID NO: 62711 - protein, 10 aa, synthetic construct
NHQRGDQSTL

SEQ ID NO: 62712 - protein, 10 aa, synthetic construct
NHQRGDRSQT

SEQ ID NO: 62713 - protein, 10 aa, synthetic construct
NHQRGDLLLS

SEQ ID NO: 62714 - protein, 10 aa, synthetic construct
NHDRGDRGQI

SEQ ID NO: 62715 - protein, 10 aa, synthetic construct
NHDRGDRQGI

SEQ ID NO: 62716 - protein, 10 aa, synthetic construct
TVVRGDRSQT

SEQ ID NO: 62717 - protein, 10 aa, synthetic construct
NHDRGDRSVV

SEQ ID NO: 62718 - protein, 10 aa, synthetic construct
NHDRGDRGVV

SEQ ID NO: 62719 - protein, 10 aa, synthetic construct
NHDRGDYVGL

SEQ ID NO: 62720 - protein, 10 aa, synthetic construct
NHDRGDQSTL

SEQ ID NO: 62721 - protein, 10 aa, synthetic construct
NHDRGDRSQT

SEQ ID NO: 62722 - protein, 10 aa, synthetic construct
NHDRGDLLLS

SEQ ID NO: 62723 - protein, 10 aa, synthetic construct
NHERGDRGQI

SEQ ID NO: 62724 - protein, 10 aa, synthetic construct
NHERGDRQGI

SEQ ID NO: 62725 - protein, 10 aa, synthetic construct
NHERGDRSVV

SEQ ID NO: 62726 - protein, 10 aa, synthetic construct
NHERGDRGVV

SEQ ID NO: 62727 - protein, 10 aa, synthetic construct
TVPRGDHGVL

SEQ ID NO: 62728 - protein, 10 aa, synthetic construct
NHERGDYVGL

SEQ ID NO: 62729 - protein, 10 aa, synthetic construct
NHERGDQSTL

SEQ ID NO: 62730 - protein, 10 aa, synthetic construct
NHERGDRSQT

SEQ ID NO: 62731 - protein, 10 aa, synthetic construct
NHERGDLLLS

SEQ ID NO: 62732 - protein, 10 aa, synthetic construct
NSGRGDRDYL

SEQ ID NO: 62733 - protein, 10 aa, synthetic construct
NSGRGDYTSV

SEQ ID NO: 62734 - protein, 10 aa, synthetic construct
NSGRGDLTVT

SEQ ID NO: 62735 - protein, 10 aa, synthetic construct
NSGRGDLIGR

SEQ ID NO: 62736 - protein, 10 aa, synthetic construct
NSARGDRDYL

SEQ ID NO: 62737 - protein, 10 aa, synthetic construct
NSARGDYTSV

SEQ ID NO: 62738 - protein, 10 aa, synthetic construct
DKKRGDFNNT

SEQ ID NO: 62739 - protein, 10 aa, synthetic construct
TVPRGDYVGL

SEQ ID NO: 62740 - protein, 10 aa, synthetic construct
NSARGDLTVT

SEQ ID NO: 62741 - protein, 10 aa, synthetic construct
NSARGDLIGR

SEQ ID NO: 62742 - protein, 10 aa, synthetic construct
NSVRGDHGVL

SEQ ID NO: 62743 - protein, 10 aa, synthetic construct
NSVRGDHVNL

SEQ ID NO: 62744 - protein, 10 aa, synthetic construct
NSVRGDRDYL

SEQ ID NO: 62745 - protein, 10 aa, synthetic construct
NSVRGDYSSV

SEQ ID NO: 62746 - protein, 10 aa, synthetic construct
NSVRGDLTVT

SEQ ID NO: 62747 - protein, 10 aa, synthetic construct
NSLRGDHGVL

SEQ ID NO: 62748 - protein, 10 aa, synthetic construct
NSLRGDHVNL

SEQ ID NO: 62749 - protein, 10 aa, synthetic construct
NSLRGDRDYL

SEQ ID NO: 62750 - protein, 10 aa, synthetic construct
TVPRGDQSTL

SEQ ID NO: 62751 - protein, 10 aa, synthetic construct
NSLRGDYSSV

SEQ ID NO: 62752 - protein, 10 aa, synthetic construct
NSLRGDLTVT

SEQ ID NO: 62753 - protein, 10 aa, synthetic construct
NSIRGDHGVL

SEQ ID NO: 62754 - protein, 10 aa, synthetic construct
NSIRGDRGQI

SEQ ID NO: 62755 - protein, 10 aa, synthetic construct
NSIRGDRQGI

SEQ ID NO: 62756 - protein, 10 aa, synthetic construct
NSIRGDRGVV

SEQ ID NO: 62757 - protein, 10 aa, synthetic construct
NSIRGDYVGL

SEQ ID NO: 62758 - protein, 10 aa, synthetic construct
NSIRGDLIGR

SEQ ID NO: 62759 - protein, 10 aa, synthetic construct
NSIRGDQSTL

SEQ ID NO: 62760 - protein, 10 aa, synthetic construct
NSIRGDLLLS

SEQ ID NO: 62761 - protein, 10 aa, synthetic construct
TVPRGDLLLS

SEQ ID NO: 62762 - protein, 10 aa, synthetic construct
NSMRGDHGVL

SEQ ID NO: 62763 - protein, 10 aa, synthetic construct
NSMRGDRGQI

SEQ ID NO: 62764 - protein, 10 aa, synthetic construct
NSMRGDRQGI

SEQ ID NO: 62765 - protein, 10 aa, synthetic construct
NSMRGDRGVV

SEQ ID NO: 62766 - protein, 10 aa, synthetic construct
NSMRGDYVGL

SEQ ID NO: 62767 - protein, 10 aa, synthetic construct
NSMRGDLIGR

SEQ ID NO: 62768 - protein, 10 aa, synthetic construct
NSMRGDQSTL

SEQ ID NO: 62769 - protein, 10 aa, synthetic construct
NSMRGDLLLS

SEQ ID NO: 62770 - protein, 10 aa, synthetic construct
NSWRGDHGVL

SEQ ID NO: 62771 - protein, 10 aa, synthetic construct
NSWRGDHVNL

SEQ ID NO: 62772 - protein, 10 aa, synthetic construct
TVLRGDRGQI

SEQ ID NO: 62773 - protein, 10 aa, synthetic construct
NSWRGDRDYL

SEQ ID NO: 62774 - protein, 10 aa, synthetic construct
NSWRGDYSSV

SEQ ID NO: 62775 - protein, 10 aa, synthetic construct
NSWRGDLTVT

SEQ ID NO: 62776 - protein, 10 aa, synthetic construct
NSFRGDHGVL

SEQ ID NO: 62777 - protein, 10 aa, synthetic construct
NSFRGDRGQI

SEQ ID NO: 62778 - protein, 10 aa, synthetic construct
NSFRGDRQGI

SEQ ID NO: 62779 - protein, 10 aa, synthetic construct
NSFRGDRGVV

SEQ ID NO: 62780 - protein, 10 aa, synthetic construct
NSFRGDYVGL

SEQ ID NO: 62781 - protein, 10 aa, synthetic construct
NSFRGDLIGR

SEQ ID NO: 62782 - protein, 10 aa, synthetic construct
NSFRGDQSTL

SEQ ID NO: 62783 - protein, 10 aa, synthetic construct
TVLRGDRQGI

SEQ ID NO: 62784 - protein, 10 aa, synthetic construct
NSFRGDLLLS

SEQ ID NO: 62785 - protein, 10 aa, synthetic construct
NSKRGDHGVL

SEQ ID NO: 62786 - protein, 10 aa, synthetic construct
NSKRGDRGQI

SEQ ID NO: 62787 - protein, 10 aa, synthetic construct
NSKRGDRQGI

SEQ ID NO: 62788 - protein, 10 aa, synthetic construct
NSKRGDRGVV

SEQ ID NO: 62789 - protein, 10 aa, synthetic construct
NSKRGDYVGL

SEQ ID NO: 62790 - protein, 10 aa, synthetic construct
NSKRGDLIGR

SEQ ID NO: 62791 - protein, 10 aa, synthetic construct
NSKRGDQSTL

SEQ ID NO: 62792 - protein, 10 aa, synthetic construct
NSKRGDLLLS

SEQ ID NO: 62793 - protein, 10 aa, synthetic construct
NSRRGDRDYL

SEQ ID NO: 62794 - protein, 10 aa, synthetic construct
TVLRGDRSVV

SEQ ID NO: 62795 - protein, 10 aa, synthetic construct
NSRRGDYTSV

SEQ ID NO: 62796 - protein, 10 aa, synthetic construct
NSRRGDLTVT

SEQ ID NO: 62797 - protein, 10 aa, synthetic construct
NSRRGDLIGR

SEQ ID NO: 62798 - protein, 10 aa, synthetic construct
NSHRGDHGVL

SEQ ID NO: 62799 - protein, 10 aa, synthetic construct
NSHRGDHVNL

SEQ ID NO: 62800 - protein, 10 aa, synthetic construct
NSHRGDRDYL

SEQ ID NO: 62801 - protein, 10 aa, synthetic construct
NSHRGDYSSV

SEQ ID NO: 62802 - protein, 10 aa, synthetic construct
NSHRGDLTVT

SEQ ID NO: 62803 - protein, 10 aa, synthetic construct
NSSRGDHGVL

SEQ ID NO: 62804 - protein, 10 aa, synthetic construct
NSSRGDHVNL

SEQ ID NO: 62805 - protein, 10 aa, synthetic construct
TVLRGDRGVV

SEQ ID NO: 62806 - protein, 10 aa, synthetic construct
NSSRGDRDYL

SEQ ID NO: 62807 - protein, 10 aa, synthetic construct
NSSRGDYSSV

SEQ ID NO: 62808 - protein, 10 aa, synthetic construct
NSSRGDLTVT

SEQ ID NO: 62809 - protein, 10 aa, synthetic construct
NSTRGDHGVL

SEQ ID NO: 62810 - protein, 10 aa, synthetic construct
NSTRGDHVNL

SEQ ID NO: 62811 - protein, 10 aa, synthetic construct
NSTRGDRDYL

SEQ ID NO: 62812 - protein, 10 aa, synthetic construct
NSTRGDYSSV

SEQ ID NO: 62813 - protein, 10 aa, synthetic construct
NSTRGDLTVT

SEQ ID NO: 62814 - protein, 10 aa, synthetic construct
NSYRGDHGVL

SEQ ID NO: 62815 - protein, 10 aa, synthetic construct
NSYRGDRGQI

SEQ ID NO: 62816 - protein, 10 aa, synthetic construct
TVLRGDRSQT

SEQ ID NO: 62817 - protein, 10 aa, synthetic construct
NSYRGDRQGI

SEQ ID NO: 62818 - protein, 10 aa, synthetic construct
NSYRGDRGVV

SEQ ID NO: 62819 - protein, 10 aa, synthetic construct
NSYRGDYVGL

SEQ ID NO: 62820 - protein, 10 aa, synthetic construct
NSYRGDLIGR

SEQ ID NO: 62821 - protein, 10 aa, synthetic construct
NSYRGDQSTL

SEQ ID NO: 62822 - protein, 10 aa, synthetic construct
NSYRGDLLLS

SEQ ID NO: 62823 - protein, 10 aa, synthetic construct
NSNRGDHGVL

SEQ ID NO: 62824 - protein, 10 aa, synthetic construct
NSNRGDRGQI

SEQ ID NO: 62825 - protein, 10 aa, synthetic construct
NSNRGDRQGI

SEQ ID NO: 62826 - protein, 10 aa, synthetic construct
NSNRGDRGVV

SEQ ID NO: 62827 - protein, 10 aa, synthetic construct
TVWRGDRGQI

SEQ ID NO: 62828 - protein, 10 aa, synthetic construct
NSNRGDYVGL

SEQ ID NO: 62829 - protein, 10 aa, synthetic construct
NSNRGDLIGR

SEQ ID NO: 62830 - protein, 10 aa, synthetic construct
NSNRGDQSTL

SEQ ID NO: 62831 - protein, 10 aa, synthetic construct
NSNRGDLLLS

SEQ ID NO: 62832 - protein, 10 aa, synthetic construct
NSQRGDHGVL

SEQ ID NO: 62833 - protein, 10 aa, synthetic construct
NSQRGDHVNL

SEQ ID NO: 62834 - protein, 10 aa, synthetic construct
NSQRGDRDYL

SEQ ID NO: 62835 - protein, 10 aa, synthetic construct
NSQRGDYSSV

SEQ ID NO: 62836 - protein, 10 aa, synthetic construct
NSQRGDLTVT

SEQ ID NO: 62837 - protein, 10 aa, synthetic construct
NSDRGDHGVL

SEQ ID NO: 62838 - protein, 10 aa, synthetic construct
TVWRGDRQGI

SEQ ID NO: 62839 - protein, 10 aa, synthetic construct
NSDRGDHVNL

SEQ ID NO: 62840 - protein, 10 aa, synthetic construct
NSDRGDRDYL

SEQ ID NO: 62841 - protein, 10 aa, synthetic construct
NSDRGDYSSV

SEQ ID NO: 62842 - protein, 10 aa, synthetic construct
NSDRGDLTVT

SEQ ID NO: 62843 - protein, 10 aa, synthetic construct
NSERGDHGVL

SEQ ID NO: 62844 - protein, 10 aa, synthetic construct
NSERGDHVNL

SEQ ID NO: 62845 - protein, 10 aa, synthetic construct
NSERGDRDYL

SEQ ID NO: 62846 - protein, 10 aa, synthetic construct
NSERGDYSSV

SEQ ID NO: 62847 - protein, 10 aa, synthetic construct
NSERGDLTVT

SEQ ID NO: 62848 - protein, 10 aa, synthetic construct
NTGRGDHGVL

SEQ ID NO: 62849 - protein, 10 aa, synthetic construct
SKKRGDRQGI

SEQ ID NO: 62850 - protein, 10 aa, synthetic construct
DKKRGDFNNL

SEQ ID NO: 62851 - protein, 10 aa, synthetic construct
TVWRGDRSVV

SEQ ID NO: 62852 - protein, 10 aa, synthetic construct
NTGRGDHVNL

SEQ ID NO: 62853 - protein, 10 aa, synthetic construct
NTGRGDYVGL

SEQ ID NO: 62854 - protein, 10 aa, synthetic construct
NTGRGDYSSV

SEQ ID NO: 62855 - protein, 10 aa, synthetic construct
NTGRGDQSTL

SEQ ID NO: 62856 - protein, 10 aa, synthetic construct
NTGRGDLLLS

SEQ ID NO: 62857 - protein, 10 aa, synthetic construct
NTARGDHGVL

SEQ ID NO: 62858 - protein, 10 aa, synthetic construct
NTARGDHVNL

SEQ ID NO: 62859 - protein, 10 aa, synthetic construct
NTARGDYVGL

SEQ ID NO: 62860 - protein, 10 aa, synthetic construct
NTARGDYSSV

SEQ ID NO: 62861 - protein, 10 aa, synthetic construct
NTARGDQSTL

SEQ ID NO: 62862 - protein, 10 aa, synthetic construct
TVWRGDRGVV

SEQ ID NO: 62863 - protein, 10 aa, synthetic construct
NTARGDLLLS

SEQ ID NO: 62864 - protein, 10 aa, synthetic construct
NTVRGDRGQI

SEQ ID NO: 62865 - protein, 10 aa, synthetic construct
NTVRGDRQGI

SEQ ID NO: 62866 - protein, 10 aa, synthetic construct
NTVRGDRSVV

SEQ ID NO: 62867 - protein, 10 aa, synthetic construct
NTVRGDRGVV

SEQ ID NO: 62868 - protein, 10 aa, synthetic construct
NTVRGDYVGL

SEQ ID NO: 62869 - protein, 10 aa, synthetic construct
NTVRGDQSTL

SEQ ID NO: 62870 - protein, 10 aa, synthetic construct
NTVRGDRSQT

SEQ ID NO: 62871 - protein, 10 aa, synthetic construct
NTVRGDLLLS

SEQ ID NO: 62872 - protein, 10 aa, synthetic construct
NTPRGDHGVL

SEQ ID NO: 62873 - protein, 10 aa, synthetic construct
TVWRGDRSQT

SEQ ID NO: 62874 - protein, 10 aa, synthetic construct
NTPRGDHVNL

SEQ ID NO: 62875 - protein, 10 aa, synthetic construct
NTPRGDYVGL

SEQ ID NO: 62876 - protein, 10 aa, synthetic construct
NTPRGDYSSV

SEQ ID NO: 62877 - protein, 10 aa, synthetic construct
NTPRGDQSTL

SEQ ID NO: 62878 - protein, 10 aa, synthetic construct
NTPRGDLLLS

SEQ ID NO: 62879 - protein, 10 aa, synthetic construct
NTLRGDRGQI

SEQ ID NO: 62880 - protein, 10 aa, synthetic construct
NTLRGDRQGI

SEQ ID NO: 62881 - protein, 10 aa, synthetic construct
NTLRGDRSVV

SEQ ID NO: 62882 - protein, 10 aa, synthetic construct
NTLRGDRGVV

SEQ ID NO: 62883 - protein, 10 aa, synthetic construct
NTLRGDYVGL

SEQ ID NO: 62884 - protein, 10 aa, synthetic construct
TVRRGDHGVL

SEQ ID NO: 62885 - protein, 10 aa, synthetic construct
NTLRGDQSTL

SEQ ID NO: 62886 - protein, 10 aa, synthetic construct
NTLRGDRSQT

SEQ ID NO: 62887 - protein, 10 aa, synthetic construct
NTLRGDLLLS

SEQ ID NO: 62888 - protein, 10 aa, synthetic construct
NTIRGDRSVV

SEQ ID NO: 62889 - protein, 10 aa, synthetic construct
NTIRGDRSQT

SEQ ID NO: 62890 - protein, 10 aa, synthetic construct
NTMRGDRSVV

SEQ ID NO: 62891 - protein, 10 aa, synthetic construct
NTMRGDRSQT

SEQ ID NO: 62892 - protein, 10 aa, synthetic construct
NTWRGDRGQI

SEQ ID NO: 62893 - protein, 10 aa, synthetic construct
NTWRGDRQGI

SEQ ID NO: 62894 - protein, 10 aa, synthetic construct
NTWRGDRSVV

SEQ ID NO: 62895 - protein, 10 aa, synthetic construct
TVRRGDYVGL

SEQ ID NO: 62896 - protein, 10 aa, synthetic construct
NTWRGDRGVV

SEQ ID NO: 62897 - protein, 10 aa, synthetic construct
NTWRGDYVGL

SEQ ID NO: 62898 - protein, 10 aa, synthetic construct
NTWRGDQSTL

SEQ ID NO: 62899 - protein, 10 aa, synthetic construct
NTWRGDRSQT

SEQ ID NO: 62900 - protein, 10 aa, synthetic construct
NTWRGDLLLS

SEQ ID NO: 62901 - protein, 10 aa, synthetic construct
NTFRGDRSVV

SEQ ID NO: 62902 - protein, 10 aa, synthetic construct
NTFRGDRSQT

SEQ ID NO: 62903 - protein, 10 aa, synthetic construct
NTKRGDRSVV

SEQ ID NO: 62904 - protein, 10 aa, synthetic construct
NTKRGDRSQT

SEQ ID NO: 62905 - protein, 10 aa, synthetic construct
NTRRGDHGVL

SEQ ID NO: 62906 - protein, 10 aa, synthetic construct
TVRRGDQSTL

SEQ ID NO: 62907 - protein, 10 aa, synthetic construct
NTRRGDHVNL

SEQ ID NO: 62908 - protein, 10 aa, synthetic construct
NTRRGDYVGL

SEQ ID NO: 62909 - protein, 10 aa, synthetic construct
NTRRGDYSSV

SEQ ID NO: 62910 - protein, 10 aa, synthetic construct
NTRRGDQSTL

SEQ ID NO: 62911 - protein, 10 aa, synthetic construct
NTRRGDLLLS

SEQ ID NO: 62912 - protein, 10 aa, synthetic construct
NTHRGDRGQI

SEQ ID NO: 62913 - protein, 10 aa, synthetic construct
NTHRGDRQGI

SEQ ID NO: 62914 - protein, 10 aa, synthetic construct
NTHRGDRSVV

SEQ ID NO: 62915 - protein, 10 aa, synthetic construct
NTHRGDRGVV

SEQ ID NO: 62916 - protein, 10 aa, synthetic construct
NTHRGDYVGL

SEQ ID NO: 62917 - protein, 10 aa, synthetic construct
TVRRGDLLLS

SEQ ID NO: 62918 - protein, 10 aa, synthetic construct
NTHRGDQSTL

SEQ ID NO: 62919 - protein, 10 aa, synthetic construct
NTHRGDRSQT

SEQ ID NO: 62920 - protein, 10 aa, synthetic construct
NTHRGDLLLS

SEQ ID NO: 62921 - protein, 10 aa, synthetic construct
NTSRGDRGQI

SEQ ID NO: 62922 - protein, 10 aa, synthetic construct
NTSRGDRQGI

SEQ ID NO: 62923 - protein, 10 aa, synthetic construct
NTSRGDRSVV

SEQ ID NO: 62924 - protein, 10 aa, synthetic construct
NTSRGDRGVV

SEQ ID NO: 62925 - protein, 10 aa, synthetic construct
NTSRGDYVGL

SEQ ID NO: 62926 - protein, 10 aa, synthetic construct
NTSRGDQSTL

SEQ ID NO: 62927 - protein, 10 aa, synthetic construct
NTSRGDRSQT

SEQ ID NO: 62928 - protein, 10 aa, synthetic construct
TVHRGDRGQI

SEQ ID NO: 62929 - protein, 10 aa, synthetic construct
NTSRGDLLLS

SEQ ID NO: 62930 - protein, 10 aa, synthetic construct
NTTRGDRGQI

SEQ ID NO: 62931 - protein, 10 aa, synthetic construct
NTTRGDRQGI

SEQ ID NO: 62932 - protein, 10 aa, synthetic construct
NTTRGDRSVV

SEQ ID NO: 62933 - protein, 10 aa, synthetic construct
NTTRGDRGVV

SEQ ID NO: 62934 - protein, 10 aa, synthetic construct
NTTRGDYVGL

SEQ ID NO: 62935 - protein, 10 aa, synthetic construct
NTTRGDQSTL

SEQ ID NO: 62936 - protein, 10 aa, synthetic construct
NTTRGDRSQT

SEQ ID NO: 62937 - protein, 10 aa, synthetic construct
NTTRGDLLLS

SEQ ID NO: 62938 - protein, 10 aa, synthetic construct
NTYRGDRSVV

SEQ ID NO: 62939 - protein, 10 aa, synthetic construct
TVHRGDRQGI

SEQ ID NO: 62940 - protein, 10 aa, synthetic construct
NTYRGDRSQT

SEQ ID NO: 62941 - protein, 10 aa, synthetic construct
NTNRGDRSVV

SEQ ID NO: 62942 - protein, 10 aa, synthetic construct
NTNRGDRSQT

SEQ ID NO: 62943 - protein, 10 aa, synthetic construct
NTQRGDRGQI

SEQ ID NO: 62944 - protein, 10 aa, synthetic construct
NTQRGDRQGI

SEQ ID NO: 62945 - protein, 10 aa, synthetic construct
NTQRGDRSVV

SEQ ID NO: 62946 - protein, 10 aa, synthetic construct
NTQRGDRGVV

SEQ ID NO: 62947 - protein, 10 aa, synthetic construct
NTQRGDYVGL

SEQ ID NO: 62948 - protein, 10 aa, synthetic construct
NTQRGDQSTL

SEQ ID NO: 62949 - protein, 10 aa, synthetic construct
NTQRGDRSQT

SEQ ID NO: 62950 - protein, 10 aa, synthetic construct
TVHRGDRSVV

SEQ ID NO: 62951 - protein, 10 aa, synthetic construct
NTQRGDLLLS

SEQ ID NO: 62952 - protein, 10 aa, synthetic construct
NTDRGDRGQI

SEQ ID NO: 62953 - protein, 10 aa, synthetic construct
NTDRGDRQGI

SEQ ID NO: 62954 - protein, 10 aa, synthetic construct
NTDRGDRSVV

SEQ ID NO: 62955 - protein, 10 aa, synthetic construct
NTDRGDRGVV

SEQ ID NO: 62956 - protein, 10 aa, synthetic construct
NTDRGDYVGL

SEQ ID NO: 62957 - protein, 10 aa, synthetic construct
NTDRGDQSTL

SEQ ID NO: 62958 - protein, 10 aa, synthetic construct
NTDRGDRSQT

SEQ ID NO: 62959 - protein, 10 aa, synthetic construct
NTDRGDLLLS

SEQ ID NO: 62960 - protein, 10 aa, synthetic construct
NTERGDRGQI

SEQ ID NO: 62961 - protein, 10 aa, synthetic construct
DKNRGDFNNT

SEQ ID NO: 62962 - protein, 10 aa, synthetic construct
TVHRGDRGVV

SEQ ID NO: 62963 - protein, 10 aa, synthetic construct
NTERGDRQGI

SEQ ID NO: 62964 - protein, 10 aa, synthetic construct
NTERGDRSVV

SEQ ID NO: 62965 - protein, 10 aa, synthetic construct
NTERGDRGVV

SEQ ID NO: 62966 - protein, 10 aa, synthetic construct
NTERGDYVGL

SEQ ID NO: 62967 - protein, 10 aa, synthetic construct
NTERGDQSTL

SEQ ID NO: 62968 - protein, 10 aa, synthetic construct
NTERGDRSQT

SEQ ID NO: 62969 - protein, 10 aa, synthetic construct
NTERGDLLLS

SEQ ID NO: 62970 - protein, 10 aa, synthetic construct
NYGRGDRGQI

SEQ ID NO: 62971 - protein, 10 aa, synthetic construct
NYGRGDRQGI

SEQ ID NO: 62972 - protein, 10 aa, synthetic construct
NYGRGDRSVV

SEQ ID NO: 62973 - protein, 10 aa, synthetic construct
TVHRGDRSQT

SEQ ID NO: 62974 - protein, 10 aa, synthetic construct
NYGRGDRGVV

SEQ ID NO: 62975 - protein, 10 aa, synthetic construct
NYGRGDYVGL

SEQ ID NO: 62976 - protein, 10 aa, synthetic construct
NYGRGDQSTL

SEQ ID NO: 62977 - protein, 10 aa, synthetic construct
NYGRGDRSQT

SEQ ID NO: 62978 - protein, 10 aa, synthetic construct
NYGRGDLLLS

SEQ ID NO: 62979 - protein, 10 aa, synthetic construct
NYARGDRGQI

SEQ ID NO: 62980 - protein, 10 aa, synthetic construct
NYARGDRQGI

SEQ ID NO: 62981 - protein, 10 aa, synthetic construct
NYARGDRSVV

SEQ ID NO: 62982 - protein, 10 aa, synthetic construct
NYARGDRGVV

SEQ ID NO: 62983 - protein, 10 aa, synthetic construct
NYARGDYVGL

SEQ ID NO: 62984 - protein, 10 aa, synthetic construct
TVSRGDRGQI

SEQ ID NO: 62985 - protein, 10 aa, synthetic construct
NYARGDQSTL

SEQ ID NO: 62986 - protein, 10 aa, synthetic construct
NYARGDRSQT

SEQ ID NO: 62987 - protein, 10 aa, synthetic construct
NYARGDLLLS

SEQ ID NO: 62988 - protein, 10 aa, synthetic construct
NYVRGDRSVV

SEQ ID NO: 62989 - protein, 10 aa, synthetic construct
NYVRGDRSQT

SEQ ID NO: 62990 - protein, 10 aa, synthetic construct
NYPRGDRGQI

SEQ ID NO: 62991 - protein, 10 aa, synthetic construct
NYPRGDRQGI

SEQ ID NO: 62992 - protein, 10 aa, synthetic construct
NYPRGDRSVV

SEQ ID NO: 62993 - protein, 10 aa, synthetic construct
NYPRGDRGVV

SEQ ID NO: 62994 - protein, 10 aa, synthetic construct
NYPRGDYVGL

SEQ ID NO: 62995 - protein, 10 aa, synthetic construct
TVSRGDRQGI

SEQ ID NO: 62996 - protein, 10 aa, synthetic construct
NYPRGDQSTL

SEQ ID NO: 62997 - protein, 10 aa, synthetic construct
NYPRGDRSQT

SEQ ID NO: 62998 - protein, 10 aa, synthetic construct
NYPRGDLLLS

SEQ ID NO: 62999 - protein, 10 aa, synthetic construct
NYLRGDRSVV

SEQ ID NO: 63000 - protein, 10 aa, synthetic construct
NYLRGDRSQT

SEQ ID NO: 63001 - protein, 10 aa, synthetic construct
NYWRGDRSVV

SEQ ID NO: 63002 - protein, 10 aa, synthetic construct
NYWRGDRSQT

SEQ ID NO: 63003 - protein, 10 aa, synthetic construct
NYRRGDRGQI

SEQ ID NO: 63004 - protein, 10 aa, synthetic construct
NYRRGDRQGI

SEQ ID NO: 63005 - protein, 10 aa, synthetic construct
NYRRGDRSVV

SEQ ID NO: 63006 - protein, 10 aa, synthetic construct
TVSRGDRSVV

SEQ ID NO: 63007 - protein, 10 aa, synthetic construct
NYRRGDRGVV

SEQ ID NO: 63008 - protein, 10 aa, synthetic construct
NYRRGDYVGL

SEQ ID NO: 63009 - protein, 10 aa, synthetic construct
NYRRGDQSTL

SEQ ID NO: 63010 - protein, 10 aa, synthetic construct
NYRRGDRSQT

SEQ ID NO: 63011 - protein, 10 aa, synthetic construct
NYRRGDLLLS

SEQ ID NO: 63012 - protein, 10 aa, synthetic construct
NYHRGDRSVV

SEQ ID NO: 63013 - protein, 10 aa, synthetic construct
NYHRGDRSQT

SEQ ID NO: 63014 - protein, 10 aa, synthetic construct
NYSRGDRSVV

SEQ ID NO: 63015 - protein, 10 aa, synthetic construct
NYSRGDRSQT

SEQ ID NO: 63016 - protein, 10 aa, synthetic construct
NYTRGDRSVV

SEQ ID NO: 63017 - protein, 10 aa, synthetic construct
TVSRGDRGVV

SEQ ID NO: 63018 - protein, 10 aa, synthetic construct
NYTRGDRSQT

SEQ ID NO: 63019 - protein, 10 aa, synthetic construct
NYQRGDRSVV

SEQ ID NO: 63020 - protein, 10 aa, synthetic construct
NYQRGDRSQT

SEQ ID NO: 63021 - protein, 10 aa, synthetic construct
NYDRGDRSVV

SEQ ID NO: 63022 - protein, 10 aa, synthetic construct
NYDRGDRSQT

SEQ ID NO: 63023 - protein, 10 aa, synthetic construct
NYERGDRSVV

SEQ ID NO: 63024 - protein, 10 aa, synthetic construct
NYERGDRSQT

SEQ ID NO: 63025 - protein, 10 aa, synthetic construct
NNGRGDRGQI

SEQ ID NO: 63026 - protein, 10 aa, synthetic construct
NNGRGDRQGI

SEQ ID NO: 63027 - protein, 10 aa, synthetic construct
NNGRGDRSVV

SEQ ID NO: 63028 - protein, 10 aa, synthetic construct
TVSRGDRSQT

SEQ ID NO: 63029 - protein, 10 aa, synthetic construct
NNGRGDRGVV

SEQ ID NO: 63030 - protein, 10 aa, synthetic construct
NNGRGDYVGL

SEQ ID NO: 63031 - protein, 10 aa, synthetic construct
NNGRGDQSTL

SEQ ID NO: 63032 - protein, 10 aa, synthetic construct
NNGRGDRSQT

SEQ ID NO: 63033 - protein, 10 aa, synthetic construct
NNGRGDLLLS

SEQ ID NO: 63034 - protein, 10 aa, synthetic construct
NNARGDRGQI

SEQ ID NO: 63035 - protein, 10 aa, synthetic construct
NNARGDRQGI

SEQ ID NO: 63036 - protein, 10 aa, synthetic construct
NNARGDRSVV

SEQ ID NO: 63037 - protein, 10 aa, synthetic construct
NNARGDRGVV

SEQ ID NO: 63038 - protein, 10 aa, synthetic construct
NNARGDYVGL

SEQ ID NO: 63039 - protein, 10 aa, synthetic construct
TVTRGDRGQI

SEQ ID NO: 63040 - protein, 10 aa, synthetic construct
NNARGDQSTL

SEQ ID NO: 63041 - protein, 10 aa, synthetic construct
NNARGDRSQT

SEQ ID NO: 63042 - protein, 10 aa, synthetic construct
NNARGDLLLS

SEQ ID NO: 63043 - protein, 10 aa, synthetic construct
NNVRGDRSVV

SEQ ID NO: 63044 - protein, 10 aa, synthetic construct
NNVRGDRSQT

SEQ ID NO: 63045 - protein, 10 aa, synthetic construct
NNPRGDRGQI

SEQ ID NO: 63046 - protein, 10 aa, synthetic construct
NNPRGDRQGI

SEQ ID NO: 63047 - protein, 10 aa, synthetic construct
NNPRGDRSVV

SEQ ID NO: 63048 - protein, 10 aa, synthetic construct
NNPRGDRGVV

SEQ ID NO: 63049 - protein, 10 aa, synthetic construct
NNPRGDYVGL

SEQ ID NO: 63050 - protein, 10 aa, synthetic construct
TVTRGDRQGI

SEQ ID NO: 63051 - protein, 10 aa, synthetic construct
NNPRGDQSTL

SEQ ID NO: 63052 - protein, 10 aa, synthetic construct
NNPRGDRSQT

SEQ ID NO: 63053 - protein, 10 aa, synthetic construct
NNPRGDLLLS

SEQ ID NO: 63054 - protein, 10 aa, synthetic construct
NNLRGDRSVV

SEQ ID NO: 63055 - protein, 10 aa, synthetic construct
NNLRGDRSQT

SEQ ID NO: 63056 - protein, 10 aa, synthetic construct
NNWRGDRSVV

SEQ ID NO: 63057 - protein, 10 aa, synthetic construct
NNWRGDRSQT

SEQ ID NO: 63058 - protein, 10 aa, synthetic construct
NNRRGDRGQI

SEQ ID NO: 63059 - protein, 10 aa, synthetic construct
NNRRGDRQGI

SEQ ID NO: 63060 - protein, 10 aa, synthetic construct
NNRRGDRSVV

SEQ ID NO: 63061 - protein, 10 aa, synthetic construct
TVTRGDRSVV

SEQ ID NO: 63062 - protein, 10 aa, synthetic construct
NNRRGDRGVV

SEQ ID NO: 63063 - protein, 10 aa, synthetic construct
NNRRGDYVGL

SEQ ID NO: 63064 - protein, 10 aa, synthetic construct
NNRRGDQSTL

SEQ ID NO: 63065 - protein, 10 aa, synthetic construct
NNRRGDRSQT

SEQ ID NO: 63066 - protein, 10 aa, synthetic construct
NNRRGDLLLS

SEQ ID NO: 63067 - protein, 10 aa, synthetic construct
NNHRGDRSVV

SEQ ID NO: 63068 - protein, 10 aa, synthetic construct
NNHRGDRSQT

SEQ ID NO: 63069 - protein, 10 aa, synthetic construct
NNSRGDRSVV

SEQ ID NO: 63070 - protein, 10 aa, synthetic construct
NNSRGDRSQT

SEQ ID NO: 63071 - protein, 10 aa, synthetic construct
NNTRGDRSVV

SEQ ID NO: 63072 - protein, 10 aa, synthetic construct
DKNRGDFNNL

SEQ ID NO: 63073 - protein, 10 aa, synthetic construct
TVTRGDRGVV

SEQ ID NO: 63074 - protein, 10 aa, synthetic construct
NNTRGDRSQT

SEQ ID NO: 63075 - protein, 10 aa, synthetic construct
NNQRGDRSVV

SEQ ID NO: 63076 - protein, 10 aa, synthetic construct
NNQRGDRSQT

SEQ ID NO: 63077 - protein, 10 aa, synthetic construct
NNDRGDRSVV

SEQ ID NO: 63078 - protein, 10 aa, synthetic construct
NNDRGDRSQT

SEQ ID NO: 63079 - protein, 10 aa, synthetic construct
NNERGDRSVV

SEQ ID NO: 63080 - protein, 10 aa, synthetic construct
NNERGDRSQT

SEQ ID NO: 63081 - protein, 10 aa, synthetic construct
NQGRGDHGVL

SEQ ID NO: 63082 - protein, 10 aa, synthetic construct
NQGRGDHVNL

SEQ ID NO: 63083 - protein, 10 aa, synthetic construct
NQGRGDYVGL

SEQ ID NO: 63084 - protein, 10 aa, synthetic construct
TVTRGDRSQT

SEQ ID NO: 63085 - protein, 10 aa, synthetic construct
NQGRGDYSSV

SEQ ID NO: 63086 - protein, 10 aa, synthetic construct
NQGRGDQSTL

SEQ ID NO: 63087 - protein, 10 aa, synthetic construct
NQGRGDLLLS

SEQ ID NO: 63088 - protein, 10 aa, synthetic construct
NQARGDHGVL

SEQ ID NO: 63089 - protein, 10 aa, synthetic construct
NQARGDHVNL

SEQ ID NO: 63090 - protein, 10 aa, synthetic construct
NQARGDYVGL

SEQ ID NO: 63091 - protein, 10 aa, synthetic construct
NQARGDYSSV

SEQ ID NO: 63092 - protein, 10 aa, synthetic construct
NQARGDQSTL

SEQ ID NO: 63093 - protein, 10 aa, synthetic construct
NQARGDLLLS

SEQ ID NO: 63094 - protein, 10 aa, synthetic construct
NQVRGDRGQI

SEQ ID NO: 63095 - protein, 10 aa, synthetic construct
TVQRGDRGQI

SEQ ID NO: 63096 - protein, 10 aa, synthetic construct
NQVRGDRQGI

SEQ ID NO: 63097 - protein, 10 aa, synthetic construct
NQVRGDRSVV

SEQ ID NO: 63098 - protein, 10 aa, synthetic construct
NQVRGDRGVV

SEQ ID NO: 63099 - protein, 10 aa, synthetic construct
NQVRGDYVGL

SEQ ID NO: 63100 - protein, 10 aa, synthetic construct
NQVRGDQSTL

SEQ ID NO: 63101 - protein, 10 aa, synthetic construct
NQVRGDRSQT

SEQ ID NO: 63102 - protein, 10 aa, synthetic construct
NQVRGDLLLS

SEQ ID NO: 63103 - protein, 10 aa, synthetic construct
NQPRGDHGVL

SEQ ID NO: 63104 - protein, 10 aa, synthetic construct
NQPRGDHVNL

SEQ ID NO: 63105 - protein, 10 aa, synthetic construct
NQPRGDYVGL

SEQ ID NO: 63106 - protein, 10 aa, synthetic construct
TVQRGDRQGI

SEQ ID NO: 63107 - protein, 10 aa, synthetic construct
NQPRGDYSSV

SEQ ID NO: 63108 - protein, 10 aa, synthetic construct
NQPRGDQSTL

SEQ ID NO: 63109 - protein, 10 aa, synthetic construct
NQPRGDLLLS

SEQ ID NO: 63110 - protein, 10 aa, synthetic construct
NQLRGDRGQI

SEQ ID NO: 63111 - protein, 10 aa, synthetic construct
NQLRGDRQGI

SEQ ID NO: 63112 - protein, 10 aa, synthetic construct
NQLRGDRSVV

SEQ ID NO: 63113 - protein, 10 aa, synthetic construct
NQLRGDRGVV

SEQ ID NO: 63114 - protein, 10 aa, synthetic construct
NQLRGDYVGL

SEQ ID NO: 63115 - protein, 10 aa, synthetic construct
NQLRGDQSTL

SEQ ID NO: 63116 - protein, 10 aa, synthetic construct
NQLRGDRSQT

SEQ ID NO: 63117 - protein, 10 aa, synthetic construct
TVQRGDRSVV

SEQ ID NO: 63118 - protein, 10 aa, synthetic construct
NQLRGDLLLS

SEQ ID NO: 63119 - protein, 10 aa, synthetic construct
NQIRGDRSVV

SEQ ID NO: 63120 - protein, 10 aa, synthetic construct
NQIRGDRSQT

SEQ ID NO: 63121 - protein, 10 aa, synthetic construct
NQMRGDRSVV

SEQ ID NO: 63122 - protein, 10 aa, synthetic construct
NQMRGDRSQT

SEQ ID NO: 63123 - protein, 10 aa, synthetic construct
NQWRGDRGQI

SEQ ID NO: 63124 - protein, 10 aa, synthetic construct
NQWRGDRQGI

SEQ ID NO: 63125 - protein, 10 aa, synthetic construct
NQWRGDRSVV

SEQ ID NO: 63126 - protein, 10 aa, synthetic construct
NQWRGDRGVV

SEQ ID NO: 63127 - protein, 10 aa, synthetic construct
NQWRGDYVGL

SEQ ID NO: 63128 - protein, 10 aa, synthetic construct
TVQRGDRGVV

SEQ ID NO: 63129 - protein, 10 aa, synthetic construct
NQWRGDQSTL

SEQ ID NO: 63130 - protein, 10 aa, synthetic construct
NQWRGDRSQT

SEQ ID NO: 63131 - protein, 10 aa, synthetic construct
NQWRGDLLLS

SEQ ID NO: 63132 - protein, 10 aa, synthetic construct
NQFRGDRSVV

SEQ ID NO: 63133 - protein, 10 aa, synthetic construct
NQFRGDRSQT

SEQ ID NO: 63134 - protein, 10 aa, synthetic construct
NQKRGDRSVV

SEQ ID NO: 63135 - protein, 10 aa, synthetic construct
NQKRGDRSQT

SEQ ID NO: 63136 - protein, 10 aa, synthetic construct
NQRRGDHGVL

SEQ ID NO: 63137 - protein, 10 aa, synthetic construct
NQRRGDHVNL

SEQ ID NO: 63138 - protein, 10 aa, synthetic construct
NQRRGDYVGL

SEQ ID NO: 63139 - protein, 10 aa, synthetic construct
TVQRGDRSQT

SEQ ID NO: 63140 - protein, 10 aa, synthetic construct
NQRRGDYSSV

SEQ ID NO: 63141 - protein, 10 aa, synthetic construct
NQRRGDQSTL

SEQ ID NO: 63142 - protein, 10 aa, synthetic construct
NQRRGDLLLS

SEQ ID NO: 63143 - protein, 10 aa, synthetic construct
NQHRGDRGQI

SEQ ID NO: 63144 - protein, 10 aa, synthetic construct
NQHRGDRQGI

SEQ ID NO: 63145 - protein, 10 aa, synthetic construct
NQHRGDRSVV

SEQ ID NO: 63146 - protein, 10 aa, synthetic construct
NQHRGDRGVV

SEQ ID NO: 63147 - protein, 10 aa, synthetic construct
NQHRGDYVGL

SEQ ID NO: 63148 - protein, 10 aa, synthetic construct
NQHRGDQSTL

SEQ ID NO: 63149 - protein, 10 aa, synthetic construct
NQHRGDRSQT

SEQ ID NO: 63150 - protein, 10 aa, synthetic construct
TVDRGDRGQI

SEQ ID NO: 63151 - protein, 10 aa, synthetic construct
NQHRGDLLLS

SEQ ID NO: 63152 - protein, 10 aa, synthetic construct
NQSRGDRGQI

SEQ ID NO: 63153 - protein, 10 aa, synthetic construct
NQSRGDRQGI

SEQ ID NO: 63154 - protein, 10 aa, synthetic construct
NQSRGDRSVV

SEQ ID NO: 63155 - protein, 10 aa, synthetic construct
NQSRGDRGVV

SEQ ID NO: 63156 - protein, 10 aa, synthetic construct
NQSRGDYVGL

SEQ ID NO: 63157 - protein, 10 aa, synthetic construct
NQSRGDQSTL

SEQ ID NO: 63158 - protein, 10 aa, synthetic construct
NQSRGDRSQT

SEQ ID NO: 63159 - protein, 10 aa, synthetic construct
NQSRGDLLLS

SEQ ID NO: 63160 - protein, 10 aa, synthetic construct
NQTRGDRGQI

SEQ ID NO: 63161 - protein, 10 aa, synthetic construct
TVDRGDRQGI

SEQ ID NO: 63162 - protein, 10 aa, synthetic construct
NQTRGDRQGI

SEQ ID NO: 63163 - protein, 10 aa, synthetic construct
NQTRGDRSVV

SEQ ID NO: 63164 - protein, 10 aa, synthetic construct
NQTRGDRGVV

SEQ ID NO: 63165 - protein, 10 aa, synthetic construct
NQTRGDYVGL

SEQ ID NO: 63166 - protein, 10 aa, synthetic construct
NQTRGDQSTL

SEQ ID NO: 63167 - protein, 10 aa, synthetic construct
NQTRGDRSQT

SEQ ID NO: 63168 - protein, 10 aa, synthetic construct
NQTRGDLLLS

SEQ ID NO: 63169 - protein, 10 aa, synthetic construct
NQYRGDRSVV

SEQ ID NO: 63170 - protein, 10 aa, synthetic construct
NQYRGDRSQT

SEQ ID NO: 63171 - protein, 10 aa, synthetic construct
NQNRGDRSVV

SEQ ID NO: 63172 - protein, 10 aa, synthetic construct
TVDRGDRSVV

SEQ ID NO: 63173 - protein, 10 aa, synthetic construct
NQNRGDRSQT

SEQ ID NO: 63174 - protein, 10 aa, synthetic construct
NQQRGDRGQI

SEQ ID NO: 63175 - protein, 10 aa, synthetic construct
NQQRGDRQGI

SEQ ID NO: 63176 - protein, 10 aa, synthetic construct
NQQRGDRSVV

SEQ ID NO: 63177 - protein, 10 aa, synthetic construct
NQQRGDRGVV

SEQ ID NO: 63178 - protein, 10 aa, synthetic construct
NQQRGDYVGL

SEQ ID NO: 63179 - protein, 10 aa, synthetic construct
NQQRGDQSTL

SEQ ID NO: 63180 - protein, 10 aa, synthetic construct
NQQRGDRSQT

SEQ ID NO: 63181 - protein, 10 aa, synthetic construct
NQQRGDLLLS

SEQ ID NO: 63182 - protein, 10 aa, synthetic construct
NQDRGDRGQI

SEQ ID NO: 63183 - protein, 10 aa, synthetic construct
QKKRGDFNNT

SEQ ID NO: 63184 - protein, 10 aa, synthetic construct
TVDRGDRGVV

SEQ ID NO: 63185 - protein, 10 aa, synthetic construct
NQDRGDRQGI

SEQ ID NO: 63186 - protein, 10 aa, synthetic construct
NQDRGDRSVV

SEQ ID NO: 63187 - protein, 10 aa, synthetic construct
NQDRGDRGVV

SEQ ID NO: 63188 - protein, 10 aa, synthetic construct
NQDRGDYVGL

SEQ ID NO: 63189 - protein, 10 aa, synthetic construct
NQDRGDQSTL

SEQ ID NO: 63190 - protein, 10 aa, synthetic construct
NQDRGDRSQT

SEQ ID NO: 63191 - protein, 10 aa, synthetic construct
NQDRGDLLLS

SEQ ID NO: 63192 - protein, 10 aa, synthetic construct
NQERGDRGQI

SEQ ID NO: 63193 - protein, 10 aa, synthetic construct
NQERGDRQGI

SEQ ID NO: 63194 - protein, 10 aa, synthetic construct
NQERGDRSVV

SEQ ID NO: 63195 - protein, 10 aa, synthetic construct
TVDRGDRSQT

SEQ ID NO: 63196 - protein, 10 aa, synthetic construct
NQERGDRGVV

SEQ ID NO: 63197 - protein, 10 aa, synthetic construct
NQERGDYVGL

SEQ ID NO: 63198 - protein, 10 aa, synthetic construct
NQERGDQSTL

SEQ ID NO: 63199 - protein, 10 aa, synthetic construct
NQERGDRSQT

SEQ ID NO: 63200 - protein, 10 aa, synthetic construct
NQERGDLLLS

SEQ ID NO: 63201 - protein, 10 aa, synthetic construct
NDGRGDHGVL

SEQ ID NO: 63202 - protein, 10 aa, synthetic construct
NDGRGDHVNL

SEQ ID NO: 63203 - protein, 10 aa, synthetic construct
NDGRGDYVGL

SEQ ID NO: 63204 - protein, 10 aa, synthetic construct
NDGRGDYSSV

SEQ ID NO: 63205 - protein, 10 aa, synthetic construct
NDGRGDQSTL

SEQ ID NO: 63206 - protein, 10 aa, synthetic construct
TVERGDRGQI

SEQ ID NO: 63207 - protein, 10 aa, synthetic construct
NDGRGDLLLS

SEQ ID NO: 63208 - protein, 10 aa, synthetic construct
NDARGDHGVL

SEQ ID NO: 63209 - protein, 10 aa, synthetic construct
NDARGDHVNL

SEQ ID NO: 63210 - protein, 10 aa, synthetic construct
NDARGDYVGL

SEQ ID NO: 63211 - protein, 10 aa, synthetic construct
NDARGDYSSV

SEQ ID NO: 63212 - protein, 10 aa, synthetic construct
NDARGDQSTL

SEQ ID NO: 63213 - protein, 10 aa, synthetic construct
NDARGDLLLS

SEQ ID NO: 63214 - protein, 10 aa, synthetic construct
NDVRGDRGQI

SEQ ID NO: 63215 - protein, 10 aa, synthetic construct
NDVRGDRQGI

SEQ ID NO: 63216 - protein, 10 aa, synthetic construct
NDVRGDRSVV

SEQ ID NO: 63217 - protein, 10 aa, synthetic construct
TVERGDRQGI

SEQ ID NO: 63218 - protein, 10 aa, synthetic construct
NDVRGDRGVV

SEQ ID NO: 63219 - protein, 10 aa, synthetic construct
NDVRGDYVGL

SEQ ID NO: 63220 - protein, 10 aa, synthetic construct
NDVRGDQSTL

SEQ ID NO: 63221 - protein, 10 aa, synthetic construct
NDVRGDRSQT

SEQ ID NO: 63222 - protein, 10 aa, synthetic construct
NDVRGDLLLS

SEQ ID NO: 63223 - protein, 10 aa, synthetic construct
NDPRGDHGVL

SEQ ID NO: 63224 - protein, 10 aa, synthetic construct
NDPRGDHVNL

SEQ ID NO: 63225 - protein, 10 aa, synthetic construct
NDPRGDYVGL

SEQ ID NO: 63226 - protein, 10 aa, synthetic construct
NDPRGDYSSV

SEQ ID NO: 63227 - protein, 10 aa, synthetic construct
NDPRGDQSTL

SEQ ID NO: 63228 - protein, 10 aa, synthetic construct
TVERGDRSVV

SEQ ID NO: 63229 - protein, 10 aa, synthetic construct
NDPRGDLLLS

SEQ ID NO: 63230 - protein, 10 aa, synthetic construct
NDLRGDRGQI

SEQ ID NO: 63231 - protein, 10 aa, synthetic construct
NDLRGDRQGI

SEQ ID NO: 63232 - protein, 10 aa, synthetic construct
NDLRGDRSVV

SEQ ID NO: 63233 - protein, 10 aa, synthetic construct
NDLRGDRGVV

SEQ ID NO: 63234 - protein, 10 aa, synthetic construct
NDLRGDYVGL

SEQ ID NO: 63235 - protein, 10 aa, synthetic construct
NDLRGDQSTL

SEQ ID NO: 63236 - protein, 10 aa, synthetic construct
NDLRGDRSQT

SEQ ID NO: 63237 - protein, 10 aa, synthetic construct
NDLRGDLLLS

SEQ ID NO: 63238 - protein, 10 aa, synthetic construct
NDIRGDRSVV

SEQ ID NO: 63239 - protein, 10 aa, synthetic construct
TVERGDRGVV

SEQ ID NO: 63240 - protein, 10 aa, synthetic construct
NDIRGDRSQT

SEQ ID NO: 63241 - protein, 10 aa, synthetic construct
NDMRGDRSVV

SEQ ID NO: 63242 - protein, 10 aa, synthetic construct
NDMRGDRSQT

SEQ ID NO: 63243 - protein, 10 aa, synthetic construct
NDWRGDRGQI

SEQ ID NO: 63244 - protein, 10 aa, synthetic construct
NDWRGDRQGI

SEQ ID NO: 63245 - protein, 10 aa, synthetic construct
NDWRGDRSVV

SEQ ID NO: 63246 - protein, 10 aa, synthetic construct
NDWRGDRGVV

SEQ ID NO: 63247 - protein, 10 aa, synthetic construct
NDWRGDYVGL

SEQ ID NO: 63248 - protein, 10 aa, synthetic construct
NDWRGDQSTL

SEQ ID NO: 63249 - protein, 10 aa, synthetic construct
NDWRGDRSQT

SEQ ID NO: 63250 - protein, 10 aa, synthetic construct
TVERGDRSQT

SEQ ID NO: 63251 - protein, 10 aa, synthetic construct
NDWRGDLLLS

SEQ ID NO: 63252 - protein, 10 aa, synthetic construct
NDFRGDRSVV

SEQ ID NO: 63253 - protein, 10 aa, synthetic construct
NDFRGDRSQT

SEQ ID NO: 63254 - protein, 10 aa, synthetic construct
NDKRGDRSVV

SEQ ID NO: 63255 - protein, 10 aa, synthetic construct
NDKRGDRSQT

SEQ ID NO: 63256 - protein, 10 aa, synthetic construct
NDRRGDHGVL

SEQ ID NO: 63257 - protein, 10 aa, synthetic construct
NDRRGDHVNL

SEQ ID NO: 63258 - protein, 10 aa, synthetic construct
NDRRGDYVGL

SEQ ID NO: 63259 - protein, 10 aa, synthetic construct
NDRRGDYSSV

SEQ ID NO: 63260 - protein, 10 aa, synthetic construct
NDRRGDQSTL

SEQ ID NO: 63261 - protein, 10 aa, synthetic construct
TPGRGDHGVL

SEQ ID NO: 63262 - protein, 10 aa, synthetic construct
NDRRGDLLLS

SEQ ID NO: 63263 - protein, 10 aa, synthetic construct
NDHRGDRGQI

SEQ ID NO: 63264 - protein, 10 aa, synthetic construct
NDHRGDRQGI

SEQ ID NO: 63265 - protein, 10 aa, synthetic construct
NDHRGDRSVV

SEQ ID NO: 63266 - protein, 10 aa, synthetic construct
NDHRGDRGVV

SEQ ID NO: 63267 - protein, 10 aa, synthetic construct
NDHRGDYVGL

SEQ ID NO: 63268 - protein, 10 aa, synthetic construct
NDHRGDQSTL

SEQ ID NO: 63269 - protein, 10 aa, synthetic construct
NDHRGDRSQT

SEQ ID NO: 63270 - protein, 10 aa, synthetic construct
NDHRGDLLLS

SEQ ID NO: 63271 - protein, 10 aa, synthetic construct
NDSRGDRGQI

SEQ ID NO: 63272 - protein, 10 aa, synthetic construct
TPGRGDYVGL

SEQ ID NO: 63273 - protein, 10 aa, synthetic construct
NDSRGDRQGI

SEQ ID NO: 63274 - protein, 10 aa, synthetic construct
NDSRGDRSVV

SEQ ID NO: 63275 - protein, 10 aa, synthetic construct
NDSRGDRGVV

SEQ ID NO: 63276 - protein, 10 aa, synthetic construct
NDSRGDYVGL

SEQ ID NO: 63277 - protein, 10 aa, synthetic construct
NDSRGDQSTL

SEQ ID NO: 63278 - protein, 10 aa, synthetic construct
NDSRGDRSQT

SEQ ID NO: 63279 - protein, 10 aa, synthetic construct
NDSRGDLLLS

SEQ ID NO: 63280 - protein, 10 aa, synthetic construct
NDTRGDRGQI

SEQ ID NO: 63281 - protein, 10 aa, synthetic construct
NDTRGDRQGI

SEQ ID NO: 63282 - protein, 10 aa, synthetic construct
NDTRGDRSVV

SEQ ID NO: 63283 - protein, 10 aa, synthetic construct
TPGRGDQSTL

SEQ ID NO: 63284 - protein, 10 aa, synthetic construct
NDTRGDRGVV

SEQ ID NO: 63285 - protein, 10 aa, synthetic construct
NDTRGDYVGL

SEQ ID NO: 63286 - protein, 10 aa, synthetic construct
NDTRGDQSTL

SEQ ID NO: 63287 - protein, 10 aa, synthetic construct
NDTRGDRSQT

SEQ ID NO: 63288 - protein, 10 aa, synthetic construct
NDTRGDLLLS

SEQ ID NO: 63289 - protein, 10 aa, synthetic construct
NDYRGDRSVV

SEQ ID NO: 63290 - protein, 10 aa, synthetic construct
NDYRGDRSQT

SEQ ID NO: 63291 - protein, 10 aa, synthetic construct
NDNRGDRSVV

SEQ ID NO: 63292 - protein, 10 aa, synthetic construct
NDNRGDRSQT

SEQ ID NO: 63293 - protein, 10 aa, synthetic construct
NDQRGDRGQI

SEQ ID NO: 63294 - protein, 10 aa, synthetic construct
QKKRGDFNNL

SEQ ID NO: 63295 - protein, 10 aa, synthetic construct
TPGRGDLLLS

SEQ ID NO: 63296 - protein, 10 aa, synthetic construct
NDQRGDRQGI

SEQ ID NO: 63297 - protein, 10 aa, synthetic construct
NDQRGDRSVV

SEQ ID NO: 63298 - protein, 10 aa, synthetic construct
NDQRGDRGVV

SEQ ID NO: 63299 - protein, 10 aa, synthetic construct
NDQRGDYVGL

SEQ ID NO: 63300 - protein, 10 aa, synthetic construct
NDQRGDQSTL

SEQ ID NO: 63301 - protein, 10 aa, synthetic construct
NDQRGDRSQT

SEQ ID NO: 63302 - protein, 10 aa, synthetic construct
NDQRGDLLLS

SEQ ID NO: 63303 - protein, 10 aa, synthetic construct
NDDRGDRGQI

SEQ ID NO: 63304 - protein, 10 aa, synthetic construct
NDDRGDRQGI

SEQ ID NO: 63305 - protein, 10 aa, synthetic construct
NDDRGDRSVV

SEQ ID NO: 63306 - protein, 10 aa, synthetic construct
TPARGDHGVL

SEQ ID NO: 63307 - protein, 10 aa, synthetic construct
NDDRGDRGVV

SEQ ID NO: 63308 - protein, 10 aa, synthetic construct
NDDRGDYVGL

SEQ ID NO: 63309 - protein, 10 aa, synthetic construct
NDDRGDQSTL

SEQ ID NO: 63310 - protein, 10 aa, synthetic construct
NDDRGDRSQT

SEQ ID NO: 63311 - protein, 10 aa, synthetic construct
NDDRGDLLLS

SEQ ID NO: 63312 - protein, 10 aa, synthetic construct
NDERGDRGQI

SEQ ID NO: 63313 - protein, 10 aa, synthetic construct
NDERGDRQGI

SEQ ID NO: 63314 - protein, 10 aa, synthetic construct
NDERGDRSVV

SEQ ID NO: 63315 - protein, 10 aa, synthetic construct
NDERGDRGVV

SEQ ID NO: 63316 - protein, 10 aa, synthetic construct
NDERGDYVGL

SEQ ID NO: 63317 - protein, 10 aa, synthetic construct
TPARGDYVGL

SEQ ID NO: 63318 - protein, 10 aa, synthetic construct
NDERGDQSTL

SEQ ID NO: 63319 - protein, 10 aa, synthetic construct
NDERGDRSQT

SEQ ID NO: 63320 - protein, 10 aa, synthetic construct
NDERGDLLLS

SEQ ID NO: 63321 - protein, 10 aa, synthetic construct
NEGRGDHGVL

SEQ ID NO: 63322 - protein, 10 aa, synthetic construct
NEGRGDHVNL

SEQ ID NO: 63323 - protein, 10 aa, synthetic construct
NEGRGDYVGL

SEQ ID NO: 63324 - protein, 10 aa, synthetic construct
NEGRGDYSSV

SEQ ID NO: 63325 - protein, 10 aa, synthetic construct
NEGRGDQSTL

SEQ ID NO: 63326 - protein, 10 aa, synthetic construct
NEGRGDLLLS

SEQ ID NO: 63327 - protein, 10 aa, synthetic construct
NEARGDHGVL

SEQ ID NO: 63328 - protein, 10 aa, synthetic construct
TPARGDQSTL

SEQ ID NO: 63329 - protein, 10 aa, synthetic construct
NEARGDHVNL

SEQ ID NO: 63330 - protein, 10 aa, synthetic construct
NEARGDYVGL

SEQ ID NO: 63331 - protein, 10 aa, synthetic construct
NEARGDYSSV

SEQ ID NO: 63332 - protein, 10 aa, synthetic construct
NEARGDQSTL

SEQ ID NO: 63333 - protein, 10 aa, synthetic construct
NEARGDLLLS

SEQ ID NO: 63334 - protein, 10 aa, synthetic construct
NEVRGDRGQI

SEQ ID NO: 63335 - protein, 10 aa, synthetic construct
NEVRGDRQGI

SEQ ID NO: 63336 - protein, 10 aa, synthetic construct
NEVRGDRSVV

SEQ ID NO: 63337 - protein, 10 aa, synthetic construct
NEVRGDRGVV

SEQ ID NO: 63338 - protein, 10 aa, synthetic construct
NEVRGDYVGL

SEQ ID NO: 63339 - protein, 10 aa, synthetic construct
TPARGDLLLS

SEQ ID NO: 63340 - protein, 10 aa, synthetic construct
NEVRGDQSTL

SEQ ID NO: 63341 - protein, 10 aa, synthetic construct
NEVRGDRSQT

SEQ ID NO: 63342 - protein, 10 aa, synthetic construct
NEVRGDLLLS

SEQ ID NO: 63343 - protein, 10 aa, synthetic construct
NEPRGDHGVL

SEQ ID NO: 63344 - protein, 10 aa, synthetic construct
NEPRGDHVNL

SEQ ID NO: 63345 - protein, 10 aa, synthetic construct
NEPRGDYVGL

SEQ ID NO: 63346 - protein, 10 aa, synthetic construct
NEPRGDYSSV

SEQ ID NO: 63347 - protein, 10 aa, synthetic construct
NEPRGDQSTL

SEQ ID NO: 63348 - protein, 10 aa, synthetic construct
NEPRGDLLLS

SEQ ID NO: 63349 - protein, 10 aa, synthetic construct
NELRGDRGQI

SEQ ID NO: 63350 - protein, 10 aa, synthetic construct
TPVRGDRGQI

SEQ ID NO: 63351 - protein, 10 aa, synthetic construct
NELRGDRQGI

SEQ ID NO: 63352 - protein, 10 aa, synthetic construct
NELRGDRSVV

SEQ ID NO: 63353 - protein, 10 aa, synthetic construct
NELRGDRGVV

SEQ ID NO: 63354 - protein, 10 aa, synthetic construct
NELRGDYVGL

SEQ ID NO: 63355 - protein, 10 aa, synthetic construct
NELRGDQSTL

SEQ ID NO: 63356 - protein, 10 aa, synthetic construct
NELRGDRSQT

SEQ ID NO: 63357 - protein, 10 aa, synthetic construct
NELRGDLLLS

SEQ ID NO: 63358 - protein, 10 aa, synthetic construct
NEIRGDRSVV

SEQ ID NO: 63359 - protein, 10 aa, synthetic construct
NEIRGDRSQT

SEQ ID NO: 63360 - protein, 10 aa, synthetic construct
NEMRGDRSVV

SEQ ID NO: 63361 - protein, 10 aa, synthetic construct
TPVRGDRQGI

SEQ ID NO: 63362 - protein, 10 aa, synthetic construct
NEMRGDRSQT

SEQ ID NO: 63363 - protein, 10 aa, synthetic construct
NEWRGDRGQI

SEQ ID NO: 63364 - protein, 10 aa, synthetic construct
NEWRGDRQGI

SEQ ID NO: 63365 - protein, 10 aa, synthetic construct
NEWRGDRSVV

SEQ ID NO: 63366 - protein, 10 aa, synthetic construct
NEWRGDRGVV

SEQ ID NO: 63367 - protein, 10 aa, synthetic construct
NEWRGDYVGL

SEQ ID NO: 63368 - protein, 10 aa, synthetic construct
NEWRGDQSTL

SEQ ID NO: 63369 - protein, 10 aa, synthetic construct
NEWRGDRSQT

SEQ ID NO: 63370 - protein, 10 aa, synthetic construct
NEWRGDLLLS

SEQ ID NO: 63371 - protein, 10 aa, synthetic construct
NEFRGDRSVV

SEQ ID NO: 63372 - protein, 10 aa, synthetic construct
TPVRGDRSVV

SEQ ID NO: 63373 - protein, 10 aa, synthetic construct
NEFRGDRSQT

SEQ ID NO: 63374 - protein, 10 aa, synthetic construct
NEKRGDRSVV

SEQ ID NO: 63375 - protein, 10 aa, synthetic construct
NEKRGDRSQT

SEQ ID NO: 63376 - protein, 10 aa, synthetic construct
NERRGDHGVL

SEQ ID NO: 63377 - protein, 10 aa, synthetic construct
NERRGDHVNL

SEQ ID NO: 63378 - protein, 10 aa, synthetic construct
NERRGDYVGL

SEQ ID NO: 63379 - protein, 10 aa, synthetic construct
NERRGDYSSV

SEQ ID NO: 63380 - protein, 10 aa, synthetic construct
NERRGDQSTL

SEQ ID NO: 63381 - protein, 10 aa, synthetic construct
NERRGDLLLS

SEQ ID NO: 63382 - protein, 10 aa, synthetic construct
NEHRGDRGQI

SEQ ID NO: 63383 - protein, 10 aa, synthetic construct
TPVRGDRGVV

SEQ ID NO: 63384 - protein, 10 aa, synthetic construct
NEHRGDRQGI

SEQ ID NO: 63385 - protein, 10 aa, synthetic construct
NEHRGDRSVV

SEQ ID NO: 63386 - protein, 10 aa, synthetic construct
NEHRGDRGVV

SEQ ID NO: 63387 - protein, 10 aa, synthetic construct
NEHRGDYVGL

SEQ ID NO: 63388 - protein, 10 aa, synthetic construct
NEHRGDQSTL

SEQ ID NO: 63389 - protein, 10 aa, synthetic construct
NEHRGDRSQT

SEQ ID NO: 63390 - protein, 10 aa, synthetic construct
NEHRGDLLLS

SEQ ID NO: 63391 - protein, 10 aa, synthetic construct
NESRGDRGQI

SEQ ID NO: 63392 - protein, 10 aa, synthetic construct
NESRGDRQGI

SEQ ID NO: 63393 - protein, 10 aa, synthetic construct
NESRGDRSVV

SEQ ID NO: 63394 - protein, 10 aa, synthetic construct
TPVRGDRSQT

SEQ ID NO: 63395 - protein, 10 aa, synthetic construct
NESRGDRGVV

SEQ ID NO: 63396 - protein, 10 aa, synthetic construct
NESRGDYVGL

SEQ ID NO: 63397 - protein, 10 aa, synthetic construct
NESRGDQSTL

SEQ ID NO: 63398 - protein, 10 aa, synthetic construct
NESRGDRSQT

SEQ ID NO: 63399 - protein, 10 aa, synthetic construct
NESRGDLLLS

SEQ ID NO: 63400 - protein, 10 aa, synthetic construct
NETRGDRGQI

SEQ ID NO: 63401 - protein, 10 aa, synthetic construct
NETRGDRQGI

SEQ ID NO: 63402 - protein, 10 aa, synthetic construct
NETRGDRSVV

SEQ ID NO: 63403 - protein, 10 aa, synthetic construct
NETRGDRGVV

SEQ ID NO: 63404 - protein, 10 aa, synthetic construct
NETRGDYVGL

SEQ ID NO: 63405 - protein, 10 aa, synthetic construct
QKNRGDFNNT

SEQ ID NO: 63406 - protein, 10 aa, synthetic construct
TPPRGDHGVL

SEQ ID NO: 63407 - protein, 10 aa, synthetic construct
NETRGDQSTL

SEQ ID NO: 63408 - protein, 10 aa, synthetic construct
NETRGDRSQT

SEQ ID NO: 63409 - protein, 10 aa, synthetic construct
NETRGDLLLS

SEQ ID NO: 63410 - protein, 10 aa, synthetic construct
NEYRGDRSVV

SEQ ID NO: 63411 - protein, 10 aa, synthetic construct
NEYRGDRSQT

SEQ ID NO: 63412 - protein, 10 aa, synthetic construct
NENRGDRSVV

SEQ ID NO: 63413 - protein, 10 aa, synthetic construct
NENRGDRSQT

SEQ ID NO: 63414 - protein, 10 aa, synthetic construct
NEQRGDRGQI

SEQ ID NO: 63415 - protein, 10 aa, synthetic construct
NEQRGDRQGI

SEQ ID NO: 63416 - protein, 10 aa, synthetic construct
NEQRGDRSVV

SEQ ID NO: 63417 - protein, 10 aa, synthetic construct
TPPRGDYVGL

SEQ ID NO: 63418 - protein, 10 aa, synthetic construct
NEQRGDRGVV

SEQ ID NO: 63419 - protein, 10 aa, synthetic construct
NEQRGDYVGL

SEQ ID NO: 63420 - protein, 10 aa, synthetic construct
NEQRGDQSTL

SEQ ID NO: 63421 - protein, 10 aa, synthetic construct
NEQRGDRSQT

SEQ ID NO: 63422 - protein, 10 aa, synthetic construct
NEQRGDLLLS

SEQ ID NO: 63423 - protein, 10 aa, synthetic construct
NEDRGDRGQI

SEQ ID NO: 63424 - protein, 10 aa, synthetic construct
NEDRGDRQGI

SEQ ID NO: 63425 - protein, 10 aa, synthetic construct
NEDRGDRSVV

SEQ ID NO: 63426 - protein, 10 aa, synthetic construct
NEDRGDRGVV

SEQ ID NO: 63427 - protein, 10 aa, synthetic construct
NEDRGDYVGL

SEQ ID NO: 63428 - protein, 10 aa, synthetic construct
TPPRGDQSTL

SEQ ID NO: 63429 - protein, 10 aa, synthetic construct
NEDRGDQSTL

SEQ ID NO: 63430 - protein, 10 aa, synthetic construct
NEDRGDRSQT

SEQ ID NO: 63431 - protein, 10 aa, synthetic construct
NEDRGDLLLS

SEQ ID NO: 63432 - protein, 10 aa, synthetic construct
NEERGDRGQI

SEQ ID NO: 63433 - protein, 10 aa, synthetic construct
NEERGDRQGI

SEQ ID NO: 63434 - protein, 10 aa, synthetic construct
NEERGDRSVV

SEQ ID NO: 63435 - protein, 10 aa, synthetic construct
NEERGDRGVV

SEQ ID NO: 63436 - protein, 10 aa, synthetic construct
NEERGDYVGL

SEQ ID NO: 63437 - protein, 10 aa, synthetic construct
NEERGDQSTL

SEQ ID NO: 63438 - protein, 10 aa, synthetic construct
NEERGDRSQT

SEQ ID NO: 63439 - protein, 10 aa, synthetic construct
TPPRGDLLLS

SEQ ID NO: 63440 - protein, 10 aa, synthetic construct
NEERGDLLLS

SEQ ID NO: 63441 - protein, 10 aa, synthetic construct
DGGRGDYTSV

SEQ ID NO: 63442 - protein, 10 aa, synthetic construct
DGGRGDYTSM

SEQ ID NO: 63443 - protein, 10 aa, synthetic construct
DGARGDYTSV

SEQ ID NO: 63444 - protein, 10 aa, synthetic construct
DGARGDYTSM

SEQ ID NO: 63445 - protein, 10 aa, synthetic construct
DGVRGDHVNL

SEQ ID NO: 63446 - protein, 10 aa, synthetic construct
DGVRGDRDYL

SEQ ID NO: 63447 - protein, 10 aa, synthetic construct
DGVRGDYSSV

SEQ ID NO: 63448 - protein, 10 aa, synthetic construct
DGVRGDLTVT

SEQ ID NO: 63449 - protein, 10 aa, synthetic construct
DGVRGDLIGR

SEQ ID NO: 63450 - protein, 10 aa, synthetic construct
TPLRGDRGQI

SEQ ID NO: 63451 - protein, 10 aa, synthetic construct
DGPRGDYTSV

SEQ ID NO: 63452 - protein, 10 aa, synthetic construct
DGPRGDYTSM

SEQ ID NO: 63453 - protein, 10 aa, synthetic construct
DGLRGDHVNL

SEQ ID NO: 63454 - protein, 10 aa, synthetic construct
DGLRGDRDYL

SEQ ID NO: 63455 - protein, 10 aa, synthetic construct
DGLRGDYSSV

SEQ ID NO: 63456 - protein, 10 aa, synthetic construct
DGLRGDLTVT

SEQ ID NO: 63457 - protein, 10 aa, synthetic construct
DGLRGDLIGR

SEQ ID NO: 63458 - protein, 10 aa, synthetic construct
DGIRGDHGVL

SEQ ID NO: 63459 - protein, 10 aa, synthetic construct
DGIRGDHVNL

SEQ ID NO: 63460 - protein, 10 aa, synthetic construct
DGIRGDYVGL

SEQ ID NO: 63461 - protein, 10 aa, synthetic construct
TPLRGDRQGI

SEQ ID NO: 63462 - protein, 10 aa, synthetic construct
DGIRGDYSSV

SEQ ID NO: 63463 - protein, 10 aa, synthetic construct
DGIRGDQSTL

SEQ ID NO: 63464 - protein, 10 aa, synthetic construct
DGIRGDLLLS

SEQ ID NO: 63465 - protein, 10 aa, synthetic construct
DGMRGDHGVL

SEQ ID NO: 63466 - protein, 10 aa, synthetic construct
DGMRGDHVNL

SEQ ID NO: 63467 - protein, 10 aa, synthetic construct
DGMRGDYVGL

SEQ ID NO: 63468 - protein, 10 aa, synthetic construct
DGMRGDYSSV

SEQ ID NO: 63469 - protein, 10 aa, synthetic construct
DGMRGDQSTL

SEQ ID NO: 63470 - protein, 10 aa, synthetic construct
DGMRGDLLLS

SEQ ID NO: 63471 - protein, 10 aa, synthetic construct
DGWRGDHVNL

SEQ ID NO: 63472 - protein, 10 aa, synthetic construct
TPLRGDRSVV

SEQ ID NO: 63473 - protein, 10 aa, synthetic construct
DGWRGDRDYL

SEQ ID NO: 63474 - protein, 10 aa, synthetic construct
DGWRGDYSSV

SEQ ID NO: 63475 - protein, 10 aa, synthetic construct
DGWRGDLTVT

SEQ ID NO: 63476 - protein, 10 aa, synthetic construct
DGWRGDLIGR

SEQ ID NO: 63477 - protein, 10 aa, synthetic construct
DGFRGDHGVL

SEQ ID NO: 63478 - protein, 10 aa, synthetic construct
DGFRGDHVNL

SEQ ID NO: 63479 - protein, 10 aa, synthetic construct
DGFRGDYVGL

SEQ ID NO: 63480 - protein, 10 aa, synthetic construct
DGFRGDYSSV

SEQ ID NO: 63481 - protein, 10 aa, synthetic construct
DGFRGDQSTL

SEQ ID NO: 63482 - protein, 10 aa, synthetic construct
DGFRGDLLLS

SEQ ID NO: 63483 - protein, 10 aa, synthetic construct
TPLRGDRGVV

SEQ ID NO: 63484 - protein, 10 aa, synthetic construct
DGKRGDHGVL

SEQ ID NO: 63485 - protein, 10 aa, synthetic construct
DGKRGDHVNL

SEQ ID NO: 63486 - protein, 10 aa, synthetic construct
DGKRGDYVGL

SEQ ID NO: 63487 - protein, 10 aa, synthetic construct
DGKRGDYSSV

SEQ ID NO: 63488 - protein, 10 aa, synthetic construct
DGKRGDQSTL

SEQ ID NO: 63489 - protein, 10 aa, synthetic construct
DGKRGDLLLS

SEQ ID NO: 63490 - protein, 10 aa, synthetic construct
DGRRGDYTSV

SEQ ID NO: 63491 - protein, 10 aa, synthetic construct
DGRRGDYTSM

SEQ ID NO: 63492 - protein, 10 aa, synthetic construct
DGHRGDHVNL

SEQ ID NO: 63493 - protein, 10 aa, synthetic construct
DGHRGDRDYL

SEQ ID NO: 63494 - protein, 10 aa, synthetic construct
TPLRGDRSQT

SEQ ID NO: 63495 - protein, 10 aa, synthetic construct
DGHRGDYSSV

SEQ ID NO: 63496 - protein, 10 aa, synthetic construct
DGHRGDLTVT

SEQ ID NO: 63497 - protein, 10 aa, synthetic construct
DGHRGDLIGR

SEQ ID NO: 63498 - protein, 10 aa, synthetic construct
DGSRGDHVNL

SEQ ID NO: 63499 - protein, 10 aa, synthetic construct
DGSRGDRDYL

SEQ ID NO: 63500 - protein, 10 aa, synthetic construct
DGSRGDYSSV

SEQ ID NO: 63501 - protein, 10 aa, synthetic construct
DGSRGDLTVT

SEQ ID NO: 63502 - protein, 10 aa, synthetic construct
DGSRGDLIGR

SEQ ID NO: 63503 - protein, 10 aa, synthetic construct
DGTRGDHVNL

SEQ ID NO: 63504 - protein, 10 aa, synthetic construct
DGTRGDRDYL

SEQ ID NO: 63505 - protein, 10 aa, synthetic construct
TPWRGDRGQI

SEQ ID NO: 63506 - protein, 10 aa, synthetic construct
DGTRGDYSSV

SEQ ID NO: 63507 - protein, 10 aa, synthetic construct
DGTRGDLTVT

SEQ ID NO: 63508 - protein, 10 aa, synthetic construct
DGTRGDLIGR

SEQ ID NO: 63509 - protein, 10 aa, synthetic construct
DGYRGDHGVL

SEQ ID NO: 63510 - protein, 10 aa, synthetic construct
DGYRGDHVNL

SEQ ID NO: 63511 - protein, 10 aa, synthetic construct
DGYRGDYVGL

SEQ ID NO: 63512 - protein, 10 aa, synthetic construct
DGYRGDYSSV

SEQ ID NO: 63513 - protein, 10 aa, synthetic construct
DGYRGDQSTL

SEQ ID NO: 63514 - protein, 10 aa, synthetic construct
DGYRGDLLLS

SEQ ID NO: 63515 - protein, 10 aa, synthetic construct
DGNRGDHGVL

SEQ ID NO: 63516 - protein, 10 aa, synthetic construct
QKNRGDFNNL

SEQ ID NO: 63517 - protein, 10 aa, synthetic construct
TPWRGDRQGI

SEQ ID NO: 63518 - protein, 10 aa, synthetic construct
DGNRGDHVNL

SEQ ID NO: 63519 - protein, 10 aa, synthetic construct
DGNRGDYVGL

SEQ ID NO: 63520 - protein, 10 aa, synthetic construct
DGNRGDYSSV

SEQ ID NO: 63521 - protein, 10 aa, synthetic construct
DGNRGDQSTL

SEQ ID NO: 63522 - protein, 10 aa, synthetic construct
DGNRGDLLLS

SEQ ID NO: 63523 - protein, 10 aa, synthetic construct
DGQRGDHVNL

SEQ ID NO: 63524 - protein, 10 aa, synthetic construct
DGQRGDRDYL

SEQ ID NO: 63525 - protein, 10 aa, synthetic construct
DGQRGDYSSV

SEQ ID NO: 63526 - protein, 10 aa, synthetic construct
DGQRGDLTVT

SEQ ID NO: 63527 - protein, 10 aa, synthetic construct
DGQRGDLIGR

SEQ ID NO: 63528 - protein, 10 aa, synthetic construct
TPWRGDRSVV

SEQ ID NO: 63529 - protein, 10 aa, synthetic construct
DGDRGDHVNL

SEQ ID NO: 63530 - protein, 10 aa, synthetic construct
DGDRGDRDYL

SEQ ID NO: 63531 - protein, 10 aa, synthetic construct
DGDRGDYSSV

SEQ ID NO: 63532 - protein, 10 aa, synthetic construct
DGDRGDLTVT

SEQ ID NO: 63533 - protein, 10 aa, synthetic construct
DGDRGDLIGR

SEQ ID NO: 63534 - protein, 10 aa, synthetic construct
DGERGDHVNL

SEQ ID NO: 63535 - protein, 10 aa, synthetic construct
DGERGDRDYL

SEQ ID NO: 63536 - protein, 10 aa, synthetic construct
DGERGDYSSV

SEQ ID NO: 63537 - protein, 10 aa, synthetic construct
DGERGDLTVT

SEQ ID NO: 63538 - protein, 10 aa, synthetic construct
DGERGDLIGR

SEQ ID NO: 63539 - protein, 10 aa, synthetic construct
TPWRGDRGVV

SEQ ID NO: 63540 - protein, 10 aa, synthetic construct
DAGRGDYTSV

SEQ ID NO: 63541 - protein, 10 aa, synthetic construct
DAGRGDYTSM

SEQ ID NO: 63542 - protein, 10 aa, synthetic construct
DAARGDYTSV

SEQ ID NO: 63543 - protein, 10 aa, synthetic construct
DAARGDYTSM

SEQ ID NO: 63544 - protein, 10 aa, synthetic construct
DAVRGDHVNL

SEQ ID NO: 63545 - protein, 10 aa, synthetic construct
DAVRGDRDYL

SEQ ID NO: 63546 - protein, 10 aa, synthetic construct
DAVRGDYSSV

SEQ ID NO: 63547 - protein, 10 aa, synthetic construct
DAVRGDLTVT

SEQ ID NO: 63548 - protein, 10 aa, synthetic construct
DAVRGDLIGR

SEQ ID NO: 63549 - protein, 10 aa, synthetic construct
DAPRGDYTSV

SEQ ID NO: 63550 - protein, 10 aa, synthetic construct
TPWRGDRSQT

SEQ ID NO: 63551 - protein, 10 aa, synthetic construct
DAPRGDYTSM

SEQ ID NO: 63552 - protein, 10 aa, synthetic construct
DALRGDHVNL

SEQ ID NO: 63553 - protein, 10 aa, synthetic construct
DALRGDRDYL

SEQ ID NO: 63554 - protein, 10 aa, synthetic construct
DALRGDYSSV

SEQ ID NO: 63555 - protein, 10 aa, synthetic construct
DALRGDLTVT

SEQ ID NO: 63556 - protein, 10 aa, synthetic construct
DALRGDLIGR

SEQ ID NO: 63557 - protein, 10 aa, synthetic construct
DAIRGDHGVL

SEQ ID NO: 63558 - protein, 10 aa, synthetic construct
DAIRGDHVNL

SEQ ID NO: 63559 - protein, 10 aa, synthetic construct
DAIRGDYVGL

SEQ ID NO: 63560 - protein, 10 aa, synthetic construct
DAIRGDYSSV

SEQ ID NO: 63561 - protein, 10 aa, synthetic construct
TPRRGDHGVL

SEQ ID NO: 63562 - protein, 10 aa, synthetic construct
DAIRGDQSTL

SEQ ID NO: 63563 - protein, 10 aa, synthetic construct
DAIRGDLLLS

SEQ ID NO: 63564 - protein, 10 aa, synthetic construct
DAMRGDHGVL

SEQ ID NO: 63565 - protein, 10 aa, synthetic construct
DAMRGDHVNL

SEQ ID NO: 63566 - protein, 10 aa, synthetic construct
DAMRGDYVGL

SEQ ID NO: 63567 - protein, 10 aa, synthetic construct
DAMRGDYSSV

SEQ ID NO: 63568 - protein, 10 aa, synthetic construct
DAMRGDQSTL

SEQ ID NO: 63569 - protein, 10 aa, synthetic construct
DAMRGDLLLS

SEQ ID NO: 63570 - protein, 10 aa, synthetic construct
DAWRGDHVNL

SEQ ID NO: 63571 - protein, 10 aa, synthetic construct
DAWRGDRDYL

SEQ ID NO: 63572 - protein, 10 aa, synthetic construct
TPRRGDYVGL

SEQ ID NO: 63573 - protein, 10 aa, synthetic construct
DAWRGDYSSV

SEQ ID NO: 63574 - protein, 10 aa, synthetic construct
DAWRGDLTVT

SEQ ID NO: 63575 - protein, 10 aa, synthetic construct
DAWRGDLIGR

SEQ ID NO: 63576 - protein, 10 aa, synthetic construct
DAFRGDHGVL

SEQ ID NO: 63577 - protein, 10 aa, synthetic construct
DAFRGDHVNL

SEQ ID NO: 63578 - protein, 10 aa, synthetic construct
DAFRGDYVGL

SEQ ID NO: 63579 - protein, 10 aa, synthetic construct
DAFRGDYSSV

SEQ ID NO: 63580 - protein, 10 aa, synthetic construct
DAFRGDQSTL

SEQ ID NO: 63581 - protein, 10 aa, synthetic construct
DAFRGDLLLS

SEQ ID NO: 63582 - protein, 10 aa, synthetic construct
DAKRGDHGVL

SEQ ID NO: 63583 - protein, 10 aa, synthetic construct
TPRRGDQSTL

SEQ ID NO: 63584 - protein, 10 aa, synthetic construct
DAKRGDHVNL

SEQ ID NO: 63585 - protein, 10 aa, synthetic construct
DAKRGDYVGL

SEQ ID NO: 63586 - protein, 10 aa, synthetic construct
DAKRGDYSSV

SEQ ID NO: 63587 - protein, 10 aa, synthetic construct
DAKRGDQSTL

SEQ ID NO: 63588 - protein, 10 aa, synthetic construct
DAKRGDLLLS

SEQ ID NO: 63589 - protein, 10 aa, synthetic construct
DARRGDYTSV

SEQ ID NO: 63590 - protein, 10 aa, synthetic construct
DARRGDYTSM

SEQ ID NO: 63591 - protein, 10 aa, synthetic construct
DAHRGDHVNL

SEQ ID NO: 63592 - protein, 10 aa, synthetic construct
DAHRGDRDYL

SEQ ID NO: 63593 - protein, 10 aa, synthetic construct
DAHRGDYSSV

SEQ ID NO: 63594 - protein, 10 aa, synthetic construct
TPRRGDLLLS

SEQ ID NO: 63595 - protein, 10 aa, synthetic construct
DAHRGDLTVT

SEQ ID NO: 63596 - protein, 10 aa, synthetic construct
DAHRGDLIGR

SEQ ID NO: 63597 - protein, 10 aa, synthetic construct
DASRGDHVNL

SEQ ID NO: 63598 - protein, 10 aa, synthetic construct
DASRGDRDYL

SEQ ID NO: 63599 - protein, 10 aa, synthetic construct
DASRGDYSSV

SEQ ID NO: 63600 - protein, 10 aa, synthetic construct
DASRGDLTVT

SEQ ID NO: 63601 - protein, 10 aa, synthetic construct
DASRGDLIGR

SEQ ID NO: 63602 - protein, 10 aa, synthetic construct
DATRGDHVNL

SEQ ID NO: 63603 - protein, 10 aa, synthetic construct
DATRGDRDYL

SEQ ID NO: 63604 - protein, 10 aa, synthetic construct
DATRGDYSSV

SEQ ID NO: 63605 - protein, 10 aa, synthetic construct
TPHRGDRGQI

SEQ ID NO: 63606 - protein, 10 aa, synthetic construct
DATRGDLTVT

SEQ ID NO: 63607 - protein, 10 aa, synthetic construct
DATRGDLIGR

SEQ ID NO: 63608 - protein, 10 aa, synthetic construct
DAYRGDHGVL

SEQ ID NO: 63609 - protein, 10 aa, synthetic construct
DAYRGDHVNL

SEQ ID NO: 63610 - protein, 10 aa, synthetic construct
DAYRGDYVGL

SEQ ID NO: 63611 - protein, 10 aa, synthetic construct
DAYRGDYSSV

SEQ ID NO: 63612 - protein, 10 aa, synthetic construct
DAYRGDQSTL

SEQ ID NO: 63613 - protein, 10 aa, synthetic construct
DAYRGDLLLS

SEQ ID NO: 63614 - protein, 10 aa, synthetic construct
DANRGDHGVL

SEQ ID NO: 63615 - protein, 10 aa, synthetic construct
DANRGDHVNL

SEQ ID NO: 63616 - protein, 10 aa, synthetic construct
TPHRGDRQGI

SEQ ID NO: 63617 - protein, 10 aa, synthetic construct
DANRGDYVGL

SEQ ID NO: 63618 - protein, 10 aa, synthetic construct
DANRGDYSSV

SEQ ID NO: 63619 - protein, 10 aa, synthetic construct
DANRGDQSTL

SEQ ID NO: 63620 - protein, 10 aa, synthetic construct
DANRGDLLLS

SEQ ID NO: 63621 - protein, 10 aa, synthetic construct
DAQRGDHVNL

SEQ ID NO: 63622 - protein, 10 aa, synthetic construct
DAQRGDRDYL

SEQ ID NO: 63623 - protein, 10 aa, synthetic construct
DAQRGDYSSV

SEQ ID NO: 63624 - protein, 10 aa, synthetic construct
DAQRGDLTVT

SEQ ID NO: 63625 - protein, 10 aa, synthetic construct
DAQRGDLIGR

SEQ ID NO: 63626 - protein, 10 aa, synthetic construct
DADRGDHVNL

SEQ ID NO: 63627 - protein, 10 aa, synthetic construct
NKKRGDFNNT

SEQ ID NO: 63628 - protein, 10 aa, synthetic construct
TPHRGDRSVV

SEQ ID NO: 63629 - protein, 10 aa, synthetic construct
DADRGDRDYL

SEQ ID NO: 63630 - protein, 10 aa, synthetic construct
DADRGDYSSV

SEQ ID NO: 63631 - protein, 10 aa, synthetic construct
DADRGDLTVT

SEQ ID NO: 63632 - protein, 10 aa, synthetic construct
DADRGDLIGR

SEQ ID NO: 63633 - protein, 10 aa, synthetic construct
DAERGDHVNL

SEQ ID NO: 63634 - protein, 10 aa, synthetic construct
DAERGDRDYL

SEQ ID NO: 63635 - protein, 10 aa, synthetic construct
DAERGDYSSV

SEQ ID NO: 63636 - protein, 10 aa, synthetic construct
DAERGDLTVT

SEQ ID NO: 63637 - protein, 10 aa, synthetic construct
DAERGDLIGR

SEQ ID NO: 63638 - protein, 10 aa, synthetic construct
DVGRGDYNSL

SEQ ID NO: 63639 - protein, 10 aa, synthetic construct
TPHRGDRGVV

SEQ ID NO: 63640 - protein, 10 aa, synthetic construct
DVGRGDYTSV

SEQ ID NO: 63641 - protein, 10 aa, synthetic construct
DVGRGDYTSM

SEQ ID NO: 63642 - protein, 10 aa, synthetic construct
DVGRGDFQNT

SEQ ID NO: 63643 - protein, 10 aa, synthetic construct
DVARGDYNSL

SEQ ID NO: 63644 - protein, 10 aa, synthetic construct
DVARGDYTSV

SEQ ID NO: 63645 - protein, 10 aa, synthetic construct
DVARGDYTSM

SEQ ID NO: 63646 - protein, 10 aa, synthetic construct
DVARGDFQNT

SEQ ID NO: 63647 - protein, 10 aa, synthetic construct
DVVRGDRDYL

SEQ ID NO: 63648 - protein, 10 aa, synthetic construct
DVVRGDYTSV

SEQ ID NO: 63649 - protein, 10 aa, synthetic construct
DVVRGDLTVT

SEQ ID NO: 63650 - protein, 10 aa, synthetic construct
TPHRGDRSQT

SEQ ID NO: 63651 - protein, 10 aa, synthetic construct
DVVRGDLIGR

SEQ ID NO: 63652 - protein, 10 aa, synthetic construct
DVPRGDYNSL

SEQ ID NO: 63653 - protein, 10 aa, synthetic construct
DVPRGDYTSV

SEQ ID NO: 63654 - protein, 10 aa, synthetic construct
DVPRGDYTSM

SEQ ID NO: 63655 - protein, 10 aa, synthetic construct
DVPRGDFQNT

SEQ ID NO: 63656 - protein, 10 aa, synthetic construct
DVLRGDRDYL

SEQ ID NO: 63657 - protein, 10 aa, synthetic construct
DVLRGDYTSV

SEQ ID NO: 63658 - protein, 10 aa, synthetic construct
DVLRGDLTVT

SEQ ID NO: 63659 - protein, 10 aa, synthetic construct
DVLRGDLIGR

SEQ ID NO: 63660 - protein, 10 aa, synthetic construct
DVIRGDHGVL

SEQ ID NO: 63661 - protein, 10 aa, synthetic construct
TPSRGDRGQI

SEQ ID NO: 63662 - protein, 10 aa, synthetic construct
DVIRGDHVNL

SEQ ID NO: 63663 - protein, 10 aa, synthetic construct
DVIRGDRDYL

SEQ ID NO: 63664 - protein, 10 aa, synthetic construct
DVIRGDYSSV

SEQ ID NO: 63665 - protein, 10 aa, synthetic construct
DVIRGDLTVT

SEQ ID NO: 63666 - protein, 10 aa, synthetic construct
DVMRGDHGVL

SEQ ID NO: 63667 - protein, 10 aa, synthetic construct
DVMRGDHVNL

SEQ ID NO: 63668 - protein, 10 aa, synthetic construct
DVMRGDRDYL

SEQ ID NO: 63669 - protein, 10 aa, synthetic construct
DVMRGDYSSV

SEQ ID NO: 63670 - protein, 10 aa, synthetic construct
DVMRGDLTVT

SEQ ID NO: 63671 - protein, 10 aa, synthetic construct
DVWRGDRDYL

SEQ ID NO: 63672 - protein, 10 aa, synthetic construct
TPSRGDRQGI

SEQ ID NO: 63673 - protein, 10 aa, synthetic construct
DVWRGDYTSV

SEQ ID NO: 63674 - protein, 10 aa, synthetic construct
DVWRGDLTVT

SEQ ID NO: 63675 - protein, 10 aa, synthetic construct
DVWRGDLIGR

SEQ ID NO: 63676 - protein, 10 aa, synthetic construct
DVFRGDHGVL

SEQ ID NO: 63677 - protein, 10 aa, synthetic construct
DVFRGDHVNL

SEQ ID NO: 63678 - protein, 10 aa, synthetic construct
DVFRGDRDYL

SEQ ID NO: 63679 - protein, 10 aa, synthetic construct
DVFRGDYSSV

SEQ ID NO: 63680 - protein, 10 aa, synthetic construct
DVFRGDLTVT

SEQ ID NO: 63681 - protein, 10 aa, synthetic construct
DVKRGDHGVL

SEQ ID NO: 63682 - protein, 10 aa, synthetic construct
DVKRGDHVNL

SEQ ID NO: 63683 - protein, 10 aa, synthetic construct
TPSRGDRSVV

SEQ ID NO: 63684 - protein, 10 aa, synthetic construct
DVKRGDRDYL

SEQ ID NO: 63685 - protein, 10 aa, synthetic construct
DVKRGDYSSV

SEQ ID NO: 63686 - protein, 10 aa, synthetic construct
DVKRGDLTVT

SEQ ID NO: 63687 - protein, 10 aa, synthetic construct
DVRRGDYNSL

SEQ ID NO: 63688 - protein, 10 aa, synthetic construct
DVRRGDYTSV

SEQ ID NO: 63689 - protein, 10 aa, synthetic construct
DVRRGDYTSM

SEQ ID NO: 63690 - protein, 10 aa, synthetic construct
DVRRGDFQNT

SEQ ID NO: 63691 - protein, 10 aa, synthetic construct
DVHRGDRDYL

SEQ ID NO: 63692 - protein, 10 aa, synthetic construct
DVHRGDYTSV

SEQ ID NO: 63693 - protein, 10 aa, synthetic construct
DVHRGDLTVT

SEQ ID NO: 63694 - protein, 10 aa, synthetic construct
TPSRGDRGVV

SEQ ID NO: 63695 - protein, 10 aa, synthetic construct
DVHRGDLIGR

SEQ ID NO: 63696 - protein, 10 aa, synthetic construct
DVSRGDRDYL

SEQ ID NO: 63697 - protein, 10 aa, synthetic construct
DVSRGDYTSV

SEQ ID NO: 63698 - protein, 10 aa, synthetic construct
DVSRGDLTVT

SEQ ID NO: 63699 - protein, 10 aa, synthetic construct
DVSRGDLIGR

SEQ ID NO: 63700 - protein, 10 aa, synthetic construct
DVTRGDRDYL

SEQ ID NO: 63701 - protein, 10 aa, synthetic construct
DVTRGDYTSV

SEQ ID NO: 63702 - protein, 10 aa, synthetic construct
DVTRGDLTVT

SEQ ID NO: 63703 - protein, 10 aa, synthetic construct
DVTRGDLIGR

SEQ ID NO: 63704 - protein, 10 aa, synthetic construct
DVYRGDHGVL

SEQ ID NO: 63705 - protein, 10 aa, synthetic construct
TPSRGDRSQT

SEQ ID NO: 63706 - protein, 10 aa, synthetic construct
DVYRGDHVNL

SEQ ID NO: 63707 - protein, 10 aa, synthetic construct
DVYRGDRDYL

SEQ ID NO: 63708 - protein, 10 aa, synthetic construct
DVYRGDYSSV

SEQ ID NO: 63709 - protein, 10 aa, synthetic construct
DVYRGDLTVT

SEQ ID NO: 63710 - protein, 10 aa, synthetic construct
DVNRGDHGVL

SEQ ID NO: 63711 - protein, 10 aa, synthetic construct
DVNRGDHVNL

SEQ ID NO: 63712 - protein, 10 aa, synthetic construct
DVNRGDRDYL

SEQ ID NO: 63713 - protein, 10 aa, synthetic construct
DVNRGDYSSV

SEQ ID NO: 63714 - protein, 10 aa, synthetic construct
DVNRGDLTVT

SEQ ID NO: 63715 - protein, 10 aa, synthetic construct
DVQRGDRDYL

SEQ ID NO: 63716 - protein, 10 aa, synthetic construct
TPTRGDRGQI

SEQ ID NO: 63717 - protein, 10 aa, synthetic construct
DVQRGDYTSV

SEQ ID NO: 63718 - protein, 10 aa, synthetic construct
DVQRGDLTVT

SEQ ID NO: 63719 - protein, 10 aa, synthetic construct
DVQRGDLIGR

SEQ ID NO: 63720 - protein, 10 aa, synthetic construct
DVDRGDRDYL

SEQ ID NO: 63721 - protein, 10 aa, synthetic construct
DVDRGDYTSV

SEQ ID NO: 63722 - protein, 10 aa, synthetic construct
DVDRGDLTVT

SEQ ID NO: 63723 - protein, 10 aa, synthetic construct
DVDRGDLIGR

SEQ ID NO: 63724 - protein, 10 aa, synthetic construct
DVERGDRDYL

SEQ ID NO: 63725 - protein, 10 aa, synthetic construct
DVERGDYTSV

SEQ ID NO: 63726 - protein, 10 aa, synthetic construct
DVERGDLTVT

SEQ ID NO: 63727 - protein, 10 aa, synthetic construct
TPTRGDRQGI

SEQ ID NO: 63728 - protein, 10 aa, synthetic construct
DVERGDLIGR

SEQ ID NO: 63729 - protein, 10 aa, synthetic construct
DPGRGDYTSV

SEQ ID NO: 63730 - protein, 10 aa, synthetic construct
DPGRGDYTSM

SEQ ID NO: 63731 - protein, 10 aa, synthetic construct
DPARGDYTSV

SEQ ID NO: 63732 - protein, 10 aa, synthetic construct
DPARGDYTSM

SEQ ID NO: 63733 - protein, 10 aa, synthetic construct
DPVRGDHVNL

SEQ ID NO: 63734 - protein, 10 aa, synthetic construct
DPVRGDRDYL

SEQ ID NO: 63735 - protein, 10 aa, synthetic construct
DPVRGDYSSV

SEQ ID NO: 63736 - protein, 10 aa, synthetic construct
DPVRGDLTVT

SEQ ID NO: 63737 - protein, 10 aa, synthetic construct
DPVRGDLIGR

SEQ ID NO: 63738 - protein, 10 aa, synthetic construct
NKKRGDFNNL

SEQ ID NO: 63739 - protein, 10 aa, synthetic construct
TPTRGDRSVV

SEQ ID NO: 63740 - protein, 10 aa, synthetic construct
DPPRGDYTSV

SEQ ID NO: 63741 - protein, 10 aa, synthetic construct
DPPRGDYTSM

SEQ ID NO: 63742 - protein, 10 aa, synthetic construct
DPLRGDHVNL

SEQ ID NO: 63743 - protein, 10 aa, synthetic construct
DPLRGDRDYL

SEQ ID NO: 63744 - protein, 10 aa, synthetic construct
DPLRGDYSSV

SEQ ID NO: 63745 - protein, 10 aa, synthetic construct
DPLRGDLTVT

SEQ ID NO: 63746 - protein, 10 aa, synthetic construct
DPLRGDLIGR

SEQ ID NO: 63747 - protein, 10 aa, synthetic construct
DPIRGDHGVL

SEQ ID NO: 63748 - protein, 10 aa, synthetic construct
DPIRGDHVNL

SEQ ID NO: 63749 - protein, 10 aa, synthetic construct
DPIRGDYVGL

SEQ ID NO: 63750 - protein, 10 aa, synthetic construct
TPTRGDRGVV

SEQ ID NO: 63751 - protein, 10 aa, synthetic construct
DPIRGDYSSV

SEQ ID NO: 63752 - protein, 10 aa, synthetic construct
DPIRGDQSTL

SEQ ID NO: 63753 - protein, 10 aa, synthetic construct
DPIRGDLLLS

SEQ ID NO: 63754 - protein, 10 aa, synthetic construct
DPMRGDHGVL

SEQ ID NO: 63755 - protein, 10 aa, synthetic construct
DPMRGDHVNL

SEQ ID NO: 63756 - protein, 10 aa, synthetic construct
DPMRGDYVGL

SEQ ID NO: 63757 - protein, 10 aa, synthetic construct
DPMRGDYSSV

SEQ ID NO: 63758 - protein, 10 aa, synthetic construct
DPMRGDQSTL

SEQ ID NO: 63759 - protein, 10 aa, synthetic construct
DPMRGDLLLS

SEQ ID NO: 63760 - protein, 10 aa, synthetic construct
DPWRGDHVNL

SEQ ID NO: 63761 - protein, 10 aa, synthetic construct
TPTRGDRSQT

SEQ ID NO: 63762 - protein, 10 aa, synthetic construct
DPWRGDRDYL

SEQ ID NO: 63763 - protein, 10 aa, synthetic construct
DPWRGDYSSV

SEQ ID NO: 63764 - protein, 10 aa, synthetic construct
DPWRGDLTVT

SEQ ID NO: 63765 - protein, 10 aa, synthetic construct
DPWRGDLIGR

SEQ ID NO: 63766 - protein, 10 aa, synthetic construct
DPFRGDHGVL

SEQ ID NO: 63767 - protein, 10 aa, synthetic construct
DPFRGDHVNL

SEQ ID NO: 63768 - protein, 10 aa, synthetic construct
DPFRGDYVGL

SEQ ID NO: 63769 - protein, 10 aa, synthetic construct
DPFRGDYSSV

SEQ ID NO: 63770 - protein, 10 aa, synthetic construct
DPFRGDQSTL

SEQ ID NO: 63771 - protein, 10 aa, synthetic construct
DPFRGDLLLS

SEQ ID NO: 63772 - protein, 10 aa, synthetic construct
TPQRGDRGQI

SEQ ID NO: 63773 - protein, 10 aa, synthetic construct
DPKRGDHGVL

SEQ ID NO: 63774 - protein, 10 aa, synthetic construct
DPKRGDHVNL

SEQ ID NO: 63775 - protein, 10 aa, synthetic construct
DPKRGDYVGL

SEQ ID NO: 63776 - protein, 10 aa, synthetic construct
DPKRGDYSSV

SEQ ID NO: 63777 - protein, 10 aa, synthetic construct
DPKRGDQSTL

SEQ ID NO: 63778 - protein, 10 aa, synthetic construct
DPKRGDLLLS

SEQ ID NO: 63779 - protein, 10 aa, synthetic construct
DPRRGDYTSV

SEQ ID NO: 63780 - protein, 10 aa, synthetic construct
DPRRGDYTSM

SEQ ID NO: 63781 - protein, 10 aa, synthetic construct
DPHRGDHVNL

SEQ ID NO: 63782 - protein, 10 aa, synthetic construct
DPHRGDRDYL

SEQ ID NO: 63783 - protein, 10 aa, synthetic construct
TPQRGDRQGI

SEQ ID NO: 63784 - protein, 10 aa, synthetic construct
DPHRGDYSSV

SEQ ID NO: 63785 - protein, 10 aa, synthetic construct
DPHRGDLTVT

SEQ ID NO: 63786 - protein, 10 aa, synthetic construct
DPHRGDLIGR

SEQ ID NO: 63787 - protein, 10 aa, synthetic construct
DPSRGDHVNL

SEQ ID NO: 63788 - protein, 10 aa, synthetic construct
DPSRGDRDYL

SEQ ID NO: 63789 - protein, 10 aa, synthetic construct
DPSRGDYSSV

SEQ ID NO: 63790 - protein, 10 aa, synthetic construct
DPSRGDLTVT

SEQ ID NO: 63791 - protein, 10 aa, synthetic construct
DPSRGDLIGR

SEQ ID NO: 63792 - protein, 10 aa, synthetic construct
DPTRGDHVNL

SEQ ID NO: 63793 - protein, 10 aa, synthetic construct
DPTRGDRDYL

SEQ ID NO: 63794 - protein, 10 aa, synthetic construct
TPQRGDRSVV

SEQ ID NO: 63795 - protein, 10 aa, synthetic construct
DPTRGDYSSV

SEQ ID NO: 63796 - protein, 10 aa, synthetic construct
DPTRGDLTVT

SEQ ID NO: 63797 - protein, 10 aa, synthetic construct
DPTRGDLIGR

SEQ ID NO: 63798 - protein, 10 aa, synthetic construct
DPYRGDHGVL

SEQ ID NO: 63799 - protein, 10 aa, synthetic construct
DPYRGDHVNL

SEQ ID NO: 63800 - protein, 10 aa, synthetic construct
DPYRGDYVGL

SEQ ID NO: 63801 - protein, 10 aa, synthetic construct
DPYRGDYSSV

SEQ ID NO: 63802 - protein, 10 aa, synthetic construct
DPYRGDQSTL

SEQ ID NO: 63803 - protein, 10 aa, synthetic construct
DPYRGDLLLS

SEQ ID NO: 63804 - protein, 10 aa, synthetic construct
DPNRGDHGVL

SEQ ID NO: 63805 - protein, 10 aa, synthetic construct
TPQRGDRGVV

SEQ ID NO: 63806 - protein, 10 aa, synthetic construct
DPNRGDHVNL

SEQ ID NO: 63807 - protein, 10 aa, synthetic construct
DPNRGDYVGL

SEQ ID NO: 63808 - protein, 10 aa, synthetic construct
DPNRGDYSSV

SEQ ID NO: 63809 - protein, 10 aa, synthetic construct
DPNRGDQSTL

SEQ ID NO: 63810 - protein, 10 aa, synthetic construct
DPNRGDLLLS

SEQ ID NO: 63811 - protein, 10 aa, synthetic construct
DPQRGDHVNL

SEQ ID NO: 63812 - protein, 10 aa, synthetic construct
DPQRGDRDYL

SEQ ID NO: 63813 - protein, 10 aa, synthetic construct
DPQRGDYSSV

SEQ ID NO: 63814 - protein, 10 aa, synthetic construct
DPQRGDLTVT

SEQ ID NO: 63815 - protein, 10 aa, synthetic construct
DPQRGDLIGR

SEQ ID NO: 63816 - protein, 10 aa, synthetic construct
TPQRGDRSQT

SEQ ID NO: 63817 - protein, 10 aa, synthetic construct
DPDRGDHVNL

SEQ ID NO: 63818 - protein, 10 aa, synthetic construct
DPDRGDRDYL

SEQ ID NO: 63819 - protein, 10 aa, synthetic construct
DPDRGDYSSV

SEQ ID NO: 63820 - protein, 10 aa, synthetic construct
DPDRGDLTVT

SEQ ID NO: 63821 - protein, 10 aa, synthetic construct
DPDRGDLIGR

SEQ ID NO: 63822 - protein, 10 aa, synthetic construct
DPERGDHVNL

SEQ ID NO: 63823 - protein, 10 aa, synthetic construct
DPERGDRDYL

SEQ ID NO: 63824 - protein, 10 aa, synthetic construct
DPERGDYSSV

SEQ ID NO: 63825 - protein, 10 aa, synthetic construct
DPERGDLTVT

SEQ ID NO: 63826 - protein, 10 aa, synthetic construct
DPERGDLIGR

SEQ ID NO: 63827 - protein, 10 aa, synthetic construct
TPDRGDRGQI

SEQ ID NO: 63828 - protein, 10 aa, synthetic construct
DLGRGDYNSL

SEQ ID NO: 63829 - protein, 10 aa, synthetic construct
DLGRGDYTSV

SEQ ID NO: 63830 - protein, 10 aa, synthetic construct
DLGRGDYTSM

SEQ ID NO: 63831 - protein, 10 aa, synthetic construct
DLGRGDFQNT

SEQ ID NO: 63832 - protein, 10 aa, synthetic construct
DLARGDYNSL

SEQ ID NO: 63833 - protein, 10 aa, synthetic construct
DLARGDYTSV

SEQ ID NO: 63834 - protein, 10 aa, synthetic construct
DLARGDYTSM

SEQ ID NO: 63835 - protein, 10 aa, synthetic construct
DLARGDFQNT

SEQ ID NO: 63836 - protein, 10 aa, synthetic construct
DLVRGDRDYL

SEQ ID NO: 63837 - protein, 10 aa, synthetic construct
DLVRGDYTSV

SEQ ID NO: 63838 - protein, 10 aa, synthetic construct
TPDRGDRQGI

SEQ ID NO: 63839 - protein, 10 aa, synthetic construct
DLVRGDLTVT

SEQ ID NO: 63840 - protein, 10 aa, synthetic construct
DLVRGDLIGR

SEQ ID NO: 63841 - protein, 10 aa, synthetic construct
DLPRGDYNSL

SEQ ID NO: 63842 - protein, 10 aa, synthetic construct
DLPRGDYTSV

SEQ ID NO: 63843 - protein, 10 aa, synthetic construct
DLPRGDYTSM

SEQ ID NO: 63844 - protein, 10 aa, synthetic construct
DLPRGDFQNT

SEQ ID NO: 63845 - protein, 10 aa, synthetic construct
DLLRGDRDYL

SEQ ID NO: 63846 - protein, 10 aa, synthetic construct
DLLRGDYTSV

SEQ ID NO: 63847 - protein, 10 aa, synthetic construct
DLLRGDLTVT

SEQ ID NO: 63848 - protein, 10 aa, synthetic construct
DLLRGDLIGR

SEQ ID NO: 63849 - protein, 10 aa, synthetic construct
NKNRGDFNNT

SEQ ID NO: 63850 - protein, 10 aa, synthetic construct
TPDRGDRSVV

SEQ ID NO: 63851 - protein, 10 aa, synthetic construct
DLIRGDHGVL

SEQ ID NO: 63852 - protein, 10 aa, synthetic construct
DLIRGDHVNL

SEQ ID NO: 63853 - protein, 10 aa, synthetic construct
DLIRGDRDYL

SEQ ID NO: 63854 - protein, 10 aa, synthetic construct
DLIRGDYSSV

SEQ ID NO: 63855 - protein, 10 aa, synthetic construct
DLIRGDLTVT

SEQ ID NO: 63856 - protein, 10 aa, synthetic construct
DLMRGDHGVL

SEQ ID NO: 63857 - protein, 10 aa, synthetic construct
DLMRGDHVNL

SEQ ID NO: 63858 - protein, 10 aa, synthetic construct
DLMRGDRDYL

SEQ ID NO: 63859 - protein, 10 aa, synthetic construct
DLMRGDYSSV

SEQ ID NO: 63860 - protein, 10 aa, synthetic construct
DLMRGDLTVT

SEQ ID NO: 63861 - protein, 10 aa, synthetic construct
TPDRGDRGVV

SEQ ID NO: 63862 - protein, 10 aa, synthetic construct
DLWRGDRDYL

SEQ ID NO: 63863 - protein, 10 aa, synthetic construct
DLWRGDYTSV

SEQ ID NO: 63864 - protein, 10 aa, synthetic construct
DLWRGDLTVT

SEQ ID NO: 63865 - protein, 10 aa, synthetic construct
DLWRGDLIGR

SEQ ID NO: 63866 - protein, 10 aa, synthetic construct
DLFRGDHGVL

SEQ ID NO: 63867 - protein, 10 aa, synthetic construct
DLFRGDHVNL

SEQ ID NO: 63868 - protein, 10 aa, synthetic construct
DLFRGDRDYL

SEQ ID NO: 63869 - protein, 10 aa, synthetic construct
DLFRGDYSSV

SEQ ID NO: 63870 - protein, 10 aa, synthetic construct
DLFRGDLTVT

SEQ ID NO: 63871 - protein, 10 aa, synthetic construct
DLKRGDHGVL

SEQ ID NO: 63872 - protein, 10 aa, synthetic construct
TPDRGDRSQT

SEQ ID NO: 63873 - protein, 10 aa, synthetic construct
DLKRGDHVNL

SEQ ID NO: 63874 - protein, 10 aa, synthetic construct
DLKRGDRDYL

SEQ ID NO: 63875 - protein, 10 aa, synthetic construct
DLKRGDYSSV

SEQ ID NO: 63876 - protein, 10 aa, synthetic construct
DLKRGDLTVT

SEQ ID NO: 63877 - protein, 10 aa, synthetic construct
DLRRGDYNSL

SEQ ID NO: 63878 - protein, 10 aa, synthetic construct
DLRRGDYTSV

SEQ ID NO: 63879 - protein, 10 aa, synthetic construct
DLRRGDYTSM

SEQ ID NO: 63880 - protein, 10 aa, synthetic construct
DLRRGDFQNT

SEQ ID NO: 63881 - protein, 10 aa, synthetic construct
DLHRGDRDYL

SEQ ID NO: 63882 - protein, 10 aa, synthetic construct
DLHRGDYTSV

SEQ ID NO: 63883 - protein, 10 aa, synthetic construct
TPERGDRGQI

SEQ ID NO: 63884 - protein, 10 aa, synthetic construct
DLHRGDLTVT

SEQ ID NO: 63885 - protein, 10 aa, synthetic construct
DLHRGDLIGR

SEQ ID NO: 63886 - protein, 10 aa, synthetic construct
DLSRGDRDYL

SEQ ID NO: 63887 - protein, 10 aa, synthetic construct
DLSRGDYTSV

SEQ ID NO: 63888 - protein, 10 aa, synthetic construct
DLSRGDLTVT

SEQ ID NO: 63889 - protein, 10 aa, synthetic construct
DLSRGDLIGR

SEQ ID NO: 63890 - protein, 10 aa, synthetic construct
DLTRGDRDYL

SEQ ID NO: 63891 - protein, 10 aa, synthetic construct
DLTRGDYTSV

SEQ ID NO: 63892 - protein, 10 aa, synthetic construct
DLTRGDLTVT

SEQ ID NO: 63893 - protein, 10 aa, synthetic construct
DLTRGDLIGR

SEQ ID NO: 63894 - protein, 10 aa, synthetic construct
TPERGDRQGI

SEQ ID NO: 63895 - protein, 10 aa, synthetic construct
DLYRGDHGVL

SEQ ID NO: 63896 - protein, 10 aa, synthetic construct
DLYRGDHVNL

SEQ ID NO: 63897 - protein, 10 aa, synthetic construct
DLYRGDRDYL

SEQ ID NO: 63898 - protein, 10 aa, synthetic construct
DLYRGDYSSV

SEQ ID NO: 63899 - protein, 10 aa, synthetic construct
DLYRGDLTVT

SEQ ID NO: 63900 - protein, 10 aa, synthetic construct
DLNRGDHGVL

SEQ ID NO: 63901 - protein, 10 aa, synthetic construct
DLNRGDHVNL

SEQ ID NO: 63902 - protein, 10 aa, synthetic construct
DLNRGDRDYL

SEQ ID NO: 63903 - protein, 10 aa, synthetic construct
DLNRGDYSSV

SEQ ID NO: 63904 - protein, 10 aa, synthetic construct
DLNRGDLTVT

SEQ ID NO: 63905 - protein, 10 aa, synthetic construct
TPERGDRSVV

SEQ ID NO: 63906 - protein, 10 aa, synthetic construct
DLQRGDRDYL

SEQ ID NO: 63907 - protein, 10 aa, synthetic construct
DLQRGDYTSV

SEQ ID NO: 63908 - protein, 10 aa, synthetic construct
DLQRGDLTVT

SEQ ID NO: 63909 - protein, 10 aa, synthetic construct
DLQRGDLIGR

SEQ ID NO: 63910 - protein, 10 aa, synthetic construct
DLDRGDRDYL

SEQ ID NO: 63911 - protein, 10 aa, synthetic construct
DLDRGDYTSV

SEQ ID NO: 63912 - protein, 10 aa, synthetic construct
DLDRGDLTVT

SEQ ID NO: 63913 - protein, 10 aa, synthetic construct
DLDRGDLIGR

SEQ ID NO: 63914 - protein, 10 aa, synthetic construct
DLERGDRDYL

SEQ ID NO: 63915 - protein, 10 aa, synthetic construct
DLERGDYTSV

SEQ ID NO: 63916 - protein, 10 aa, synthetic construct
TPERGDRGVV

SEQ ID NO: 63917 - protein, 10 aa, synthetic construct
DLERGDLTVT

SEQ ID NO: 63918 - protein, 10 aa, synthetic construct
DLERGDLIGR

SEQ ID NO: 63919 - protein, 10 aa, synthetic construct
DIGRGDHGVL

SEQ ID NO: 63920 - protein, 10 aa, synthetic construct
DIGRGDHVNL

SEQ ID NO: 63921 - protein, 10 aa, synthetic construct
DIGRGDYVGL

SEQ ID NO: 63922 - protein, 10 aa, synthetic construct
DIGRGDYSSV

SEQ ID NO: 63923 - protein, 10 aa, synthetic construct
DIGRGDQSTL

SEQ ID NO: 63924 - protein, 10 aa, synthetic construct
DIGRGDLLLS

SEQ ID NO: 63925 - protein, 10 aa, synthetic construct
DIARGDHGVL

SEQ ID NO: 63926 - protein, 10 aa, synthetic construct
DIARGDHVNL

SEQ ID NO: 63927 - protein, 10 aa, synthetic construct
TPERGDRSQT

SEQ ID NO: 63928 - protein, 10 aa, synthetic construct
DIARGDYVGL

SEQ ID NO: 63929 - protein, 10 aa, synthetic construct
DIARGDYSSV

SEQ ID NO: 63930 - protein, 10 aa, synthetic construct
DIARGDQSTL

SEQ ID NO: 63931 - protein, 10 aa, synthetic construct
DIARGDLLLS

SEQ ID NO: 63932 - protein, 10 aa, synthetic construct
DIVRGDRGQI

SEQ ID NO: 63933 - protein, 10 aa, synthetic construct
DIVRGDRQGI

SEQ ID NO: 63934 - protein, 10 aa, synthetic construct
DIVRGDRSVV

SEQ ID NO: 63935 - protein, 10 aa, synthetic construct
DIVRGDRGVV

SEQ ID NO: 63936 - protein, 10 aa, synthetic construct
DIVRGDYVGL

SEQ ID NO: 63937 - protein, 10 aa, synthetic construct
DIVRGDQSTL

SEQ ID NO: 63938 - protein, 10 aa, synthetic construct
TLGRGDHGVL

SEQ ID NO: 63939 - protein, 10 aa, synthetic construct
DIVRGDRSQT

SEQ ID NO: 63940 - protein, 10 aa, synthetic construct
DIVRGDLLLS

SEQ ID NO: 63941 - protein, 10 aa, synthetic construct
DIPRGDHGVL

SEQ ID NO: 63942 - protein, 10 aa, synthetic construct
DIPRGDHVNL

SEQ ID NO: 63943 - protein, 10 aa, synthetic construct
DIPRGDYVGL

SEQ ID NO: 63944 - protein, 10 aa, synthetic construct
DIPRGDYSSV

SEQ ID NO: 63945 - protein, 10 aa, synthetic construct
DIPRGDQSTL

SEQ ID NO: 63946 - protein, 10 aa, synthetic construct
DIPRGDLLLS

SEQ ID NO: 63947 - protein, 10 aa, synthetic construct
DILRGDRGQI

SEQ ID NO: 63948 - protein, 10 aa, synthetic construct
DILRGDRQGI

SEQ ID NO: 63949 - protein, 10 aa, synthetic construct
TLGRGDYVGL

SEQ ID NO: 63950 - protein, 10 aa, synthetic construct
DILRGDRSVV

SEQ ID NO: 63951 - protein, 10 aa, synthetic construct
DILRGDRGVV

SEQ ID NO: 63952 - protein, 10 aa, synthetic construct
DILRGDYVGL

SEQ ID NO: 63953 - protein, 10 aa, synthetic construct
DILRGDQSTL

SEQ ID NO: 63954 - protein, 10 aa, synthetic construct
DILRGDRSQT

SEQ ID NO: 63955 - protein, 10 aa, synthetic construct
DILRGDLLLS

SEQ ID NO: 63956 - protein, 10 aa, synthetic construct
DIIRGDRSVV

SEQ ID NO: 63957 - protein, 10 aa, synthetic construct
DIIRGDRSQT

SEQ ID NO: 63958 - protein, 10 aa, synthetic construct
DIMRGDRSVV

SEQ ID NO: 63959 - protein, 10 aa, synthetic construct
DIMRGDRSQT

SEQ ID NO: 63960 - protein, 10 aa, synthetic construct
SKKRGDRGVV

SEQ ID NO: 63961 - protein, 10 aa, synthetic construct
NKNRGDFNNL

SEQ ID NO: 63962 - protein, 10 aa, synthetic construct
TLGRGDQSTL

SEQ ID NO: 63963 - protein, 10 aa, synthetic construct
DIWRGDRGQI

SEQ ID NO: 63964 - protein, 10 aa, synthetic construct
DIWRGDRQGI

SEQ ID NO: 63965 - protein, 10 aa, synthetic construct
DIWRGDRSVV

SEQ ID NO: 63966 - protein, 10 aa, synthetic construct
DIWRGDRGVV

SEQ ID NO: 63967 - protein, 10 aa, synthetic construct
DIWRGDYVGL

SEQ ID NO: 63968 - protein, 10 aa, synthetic construct
DIWRGDQSTL

SEQ ID NO: 63969 - protein, 10 aa, synthetic construct
DIWRGDRSQT

SEQ ID NO: 63970 - protein, 10 aa, synthetic construct
DIWRGDLLLS

SEQ ID NO: 63971 - protein, 10 aa, synthetic construct
DIFRGDRSVV

SEQ ID NO: 63972 - protein, 10 aa, synthetic construct
DIFRGDRSQT

SEQ ID NO: 63973 - protein, 10 aa, synthetic construct
TLGRGDLLLS

SEQ ID NO: 63974 - protein, 10 aa, synthetic construct
DIKRGDRSVV

SEQ ID NO: 63975 - protein, 10 aa, synthetic construct
DIKRGDRSQT

SEQ ID NO: 63976 - protein, 10 aa, synthetic construct
DIRRGDHGVL

SEQ ID NO: 63977 - protein, 10 aa, synthetic construct
DIRRGDHVNL

SEQ ID NO: 63978 - protein, 10 aa, synthetic construct
DIRRGDYVGL

SEQ ID NO: 63979 - protein, 10 aa, synthetic construct
DIRRGDYSSV

SEQ ID NO: 63980 - protein, 10 aa, synthetic construct
DIRRGDQSTL

SEQ ID NO: 63981 - protein, 10 aa, synthetic construct
DIRRGDLLLS

SEQ ID NO: 63982 - protein, 10 aa, synthetic construct
DIHRGDRGQI

SEQ ID NO: 63983 - protein, 10 aa, synthetic construct
DIHRGDRQGI

SEQ ID NO: 63984 - protein, 10 aa, synthetic construct
TLARGDHGVL

SEQ ID NO: 63985 - protein, 10 aa, synthetic construct
DIHRGDRSVV

SEQ ID NO: 63986 - protein, 10 aa, synthetic construct
DIHRGDRGVV

SEQ ID NO: 63987 - protein, 10 aa, synthetic construct
DIHRGDYVGL

SEQ ID NO: 63988 - protein, 10 aa, synthetic construct
DIHRGDQSTL

SEQ ID NO: 63989 - protein, 10 aa, synthetic construct
DIHRGDRSQT

SEQ ID NO: 63990 - protein, 10 aa, synthetic construct
DIHRGDLLLS

SEQ ID NO: 63991 - protein, 10 aa, synthetic construct
DISRGDRGQI

SEQ ID NO: 63992 - protein, 10 aa, synthetic construct
DISRGDRQGI

SEQ ID NO: 63993 - protein, 10 aa, synthetic construct
DISRGDRSVV

SEQ ID NO: 63994 - protein, 10 aa, synthetic construct
DISRGDRGVV

SEQ ID NO: 63995 - protein, 10 aa, synthetic construct
TLARGDYVGL

SEQ ID NO: 63996 - protein, 10 aa, synthetic construct
DISRGDYVGL

SEQ ID NO: 63997 - protein, 10 aa, synthetic construct
DISRGDQSTL

SEQ ID NO: 63998 - protein, 10 aa, synthetic construct
DISRGDRSQT

SEQ ID NO: 63999 - protein, 10 aa, synthetic construct
DISRGDLLLS

SEQ ID NO: 64000 - protein, 10 aa, synthetic construct
DITRGDRGQI

SEQ ID NO: 64001 - protein, 10 aa, synthetic construct
DITRGDRQGI

SEQ ID NO: 64002 - protein, 10 aa, synthetic construct
DITRGDRSVV

SEQ ID NO: 64003 - protein, 10 aa, synthetic construct
DITRGDRGVV

SEQ ID NO: 64004 - protein, 10 aa, synthetic construct
DITRGDYVGL

SEQ ID NO: 64005 - protein, 10 aa, synthetic construct
DITRGDQSTL

SEQ ID NO: 64006 - protein, 10 aa, synthetic construct
TLARGDQSTL

SEQ ID NO: 64007 - protein, 10 aa, synthetic construct
DITRGDRSQT

SEQ ID NO: 64008 - protein, 10 aa, synthetic construct
DITRGDLLLS

SEQ ID NO: 64009 - protein, 10 aa, synthetic construct
DIYRGDRSVV

SEQ ID NO: 64010 - protein, 10 aa, synthetic construct
DIYRGDRSQT

SEQ ID NO: 64011 - protein, 10 aa, synthetic construct
DINRGDRSVV

SEQ ID NO: 64012 - protein, 10 aa, synthetic construct
DINRGDRSQT

SEQ ID NO: 64013 - protein, 10 aa, synthetic construct
DIQRGDRGQI

SEQ ID NO: 64014 - protein, 10 aa, synthetic construct
DIQRGDRQGI

SEQ ID NO: 64015 - protein, 10 aa, synthetic construct
DIQRGDRSVV

SEQ ID NO: 64016 - protein, 10 aa, synthetic construct
DIQRGDRGVV

SEQ ID NO: 64017 - protein, 10 aa, synthetic construct
TLARGDLLLS

SEQ ID NO: 64018 - protein, 10 aa, synthetic construct
DIQRGDYVGL

SEQ ID NO: 64019 - protein, 10 aa, synthetic construct
DIQRGDQSTL

SEQ ID NO: 64020 - protein, 10 aa, synthetic construct
DIQRGDRSQT

SEQ ID NO: 64021 - protein, 10 aa, synthetic construct
DIQRGDLLLS

SEQ ID NO: 64022 - protein, 10 aa, synthetic construct
DIDRGDRGQI

SEQ ID NO: 64023 - protein, 10 aa, synthetic construct
DIDRGDRQGI

SEQ ID NO: 64024 - protein, 10 aa, synthetic construct
DIDRGDRSVV

SEQ ID NO: 64025 - protein, 10 aa, synthetic construct
DIDRGDRGVV

SEQ ID NO: 64026 - protein, 10 aa, synthetic construct
DIDRGDYVGL

SEQ ID NO: 64027 - protein, 10 aa, synthetic construct
DIDRGDQSTL

SEQ ID NO: 64028 - protein, 10 aa, synthetic construct
TLVRGDRGQI

SEQ ID NO: 64029 - protein, 10 aa, synthetic construct
DIDRGDRSQT

SEQ ID NO: 64030 - protein, 10 aa, synthetic construct
DIDRGDLLLS

SEQ ID NO: 64031 - protein, 10 aa, synthetic construct
DIERGDRGQI

SEQ ID NO: 64032 - protein, 10 aa, synthetic construct
DIERGDRQGI

SEQ ID NO: 64033 - protein, 10 aa, synthetic construct
DIERGDRSVV

SEQ ID NO: 64034 - protein, 10 aa, synthetic construct
DIERGDRGVV

SEQ ID NO: 64035 - protein, 10 aa, synthetic construct
DIERGDYVGL

SEQ ID NO: 64036 - protein, 10 aa, synthetic construct
DIERGDQSTL

SEQ ID NO: 64037 - protein, 10 aa, synthetic construct
DIERGDRSQT

SEQ ID NO: 64038 - protein, 10 aa, synthetic construct
DIERGDLLLS

SEQ ID NO: 64039 - protein, 10 aa, synthetic construct
TLVRGDRQGI

SEQ ID NO: 64040 - protein, 10 aa, synthetic construct
DMGRGDRDYL

SEQ ID NO: 64041 - protein, 10 aa, synthetic construct
DMGRGDYVGL

SEQ ID NO: 64042 - protein, 10 aa, synthetic construct
DMGRGDYSSV

SEQ ID NO: 64043 - protein, 10 aa, synthetic construct
DMGRGDYTSV

SEQ ID NO: 64044 - protein, 10 aa, synthetic construct
DMGRGDQSTL

SEQ ID NO: 64045 - protein, 10 aa, synthetic construct
DMARGDRDYL

SEQ ID NO: 64046 - protein, 10 aa, synthetic construct
DMARGDYVGL

SEQ ID NO: 64047 - protein, 10 aa, synthetic construct
DMARGDYSSV

SEQ ID NO: 64048 - protein, 10 aa, synthetic construct
DMARGDYTSV

SEQ ID NO: 64049 - protein, 10 aa, synthetic construct
DMARGDQSTL

SEQ ID NO: 64050 - protein, 10 aa, synthetic construct
TLVRGDRSVV

SEQ ID NO: 64051 - protein, 10 aa, synthetic construct
DMVRGDRDYL

SEQ ID NO: 64052 - protein, 10 aa, synthetic construct
DMVRGDYVGL

SEQ ID NO: 64053 - protein, 10 aa, synthetic construct
DMVRGDYSSV

SEQ ID NO: 64054 - protein, 10 aa, synthetic construct
DMVRGDYTSV

SEQ ID NO: 64055 - protein, 10 aa, synthetic construct
DMVRGDQSTL

SEQ ID NO: 64056 - protein, 10 aa, synthetic construct
DMPRGDRDYL

SEQ ID NO: 64057 - protein, 10 aa, synthetic construct
DMPRGDYVGL

SEQ ID NO: 64058 - protein, 10 aa, synthetic construct
DMPRGDYSSV

SEQ ID NO: 64059 - protein, 10 aa, synthetic construct
DMPRGDYTSV

SEQ ID NO: 64060 - protein, 10 aa, synthetic construct
DMPRGDQSTL

SEQ ID NO: 64061 - protein, 10 aa, synthetic construct
TLVRGDRGVV

SEQ ID NO: 64062 - protein, 10 aa, synthetic construct
DMLRGDRDYL

SEQ ID NO: 64063 - protein, 10 aa, synthetic construct
DMLRGDYVGL

SEQ ID NO: 64064 - protein, 10 aa, synthetic construct
DMLRGDYSSV

SEQ ID NO: 64065 - protein, 10 aa, synthetic construct
DMLRGDYTSV

SEQ ID NO: 64066 - protein, 10 aa, synthetic construct
DMLRGDQSTL

SEQ ID NO: 64067 - protein, 10 aa, synthetic construct
DMIRGDHGVL

SEQ ID NO: 64068 - protein, 10 aa, synthetic construct
DMIRGDRSVV

SEQ ID NO: 64069 - protein, 10 aa, synthetic construct
DMIRGDRGVV

SEQ ID NO: 64070 - protein, 10 aa, synthetic construct
DMIRGDLTVT

SEQ ID NO: 64071 - protein, 10 aa, synthetic construct
DMIRGDLIGR

SEQ ID NO: 64072 - protein, 10 aa, synthetic construct
APPRGDRGVV

SEQ ID NO: 64073 - protein, 10 aa, synthetic construct
TLVRGDRSQT

SEQ ID NO: 64074 - protein, 10 aa, synthetic construct
DMIRGDLLLS

SEQ ID NO: 64075 - protein, 10 aa, synthetic construct
DMMRGDHGVL

SEQ ID NO: 64076 - protein, 10 aa, synthetic construct
DMMRGDRGQI

SEQ ID NO: 64077 - protein, 10 aa, synthetic construct
DMMRGDRQGI

SEQ ID NO: 64078 - protein, 10 aa, synthetic construct
DMMRGDRGVV

SEQ ID NO: 64079 - protein, 10 aa, synthetic construct
DMMRGDYVGL

SEQ ID NO: 64080 - protein, 10 aa, synthetic construct
DMMRGDLIGR

SEQ ID NO: 64081 - protein, 10 aa, synthetic construct
DMMRGDQSTL

SEQ ID NO: 64082 - protein, 10 aa, synthetic construct
DMMRGDLLLS

SEQ ID NO: 64083 - protein, 10 aa, synthetic construct
DMWRGDHGVL

SEQ ID NO: 64084 - protein, 10 aa, synthetic construct
TLPRGDHGVL

SEQ ID NO: 64085 - protein, 10 aa, synthetic construct
DMWRGDHVNL

SEQ ID NO: 64086 - protein, 10 aa, synthetic construct
DMWRGDRDYL

SEQ ID NO: 64087 - protein, 10 aa, synthetic construct
DMWRGDYSSV

SEQ ID NO: 64088 - protein, 10 aa, synthetic construct
DMWRGDLTVT

SEQ ID NO: 64089 - protein, 10 aa, synthetic construct
DMFRGDHGVL

SEQ ID NO: 64090 - protein, 10 aa, synthetic construct
DMFRGDRSVV

SEQ ID NO: 64091 - protein, 10 aa, synthetic construct
DMFRGDRGVV

SEQ ID NO: 64092 - protein, 10 aa, synthetic construct
DMFRGDLTVT

SEQ ID NO: 64093 - protein, 10 aa, synthetic construct
DMFRGDLIGR

SEQ ID NO: 64094 - protein, 10 aa, synthetic construct
DMFRGDLLLS

SEQ ID NO: 64095 - protein, 10 aa, synthetic construct
TLPRGDYVGL

SEQ ID NO: 64096 - protein, 10 aa, synthetic construct
DMKRGDHGVL

SEQ ID NO: 64097 - protein, 10 aa, synthetic construct
DMKRGDRSVV

SEQ ID NO: 64098 - protein, 10 aa, synthetic construct
DMKRGDRGVV

SEQ ID NO: 64099 - protein, 10 aa, synthetic construct
DMKRGDLTVT

SEQ ID NO: 64100 - protein, 10 aa, synthetic construct
DMKRGDLIGR

SEQ ID NO: 64101 - protein, 10 aa, synthetic construct
DMKRGDLLLS

SEQ ID NO: 64102 - protein, 10 aa, synthetic construct
DMRRGDRDYL

SEQ ID NO: 64103 - protein, 10 aa, synthetic construct
DMRRGDYVGL

SEQ ID NO: 64104 - protein, 10 aa, synthetic construct
DMRRGDYSSV

SEQ ID NO: 64105 - protein, 10 aa, synthetic construct
DMRRGDYTSV

SEQ ID NO: 64106 - protein, 10 aa, synthetic construct
TLPRGDQSTL

SEQ ID NO: 64107 - protein, 10 aa, synthetic construct
DMRRGDQSTL

SEQ ID NO: 64108 - protein, 10 aa, synthetic construct
DMHRGDHGVL

SEQ ID NO: 64109 - protein, 10 aa, synthetic construct
DMHRGDRGQI

SEQ ID NO: 64110 - protein, 10 aa, synthetic construct
DMHRGDRQGI

SEQ ID NO: 64111 - protein, 10 aa, synthetic construct
DMHRGDRSVV

SEQ ID NO: 64112 - protein, 10 aa, synthetic construct
DMHRGDLIGR

SEQ ID NO: 64113 - protein, 10 aa, synthetic construct
DMHRGDRSQT

SEQ ID NO: 64114 - protein, 10 aa, synthetic construct
DMSRGDRDYL

SEQ ID NO: 64115 - protein, 10 aa, synthetic construct
DMSRGDYVGL

SEQ ID NO: 64116 - protein, 10 aa, synthetic construct
DMSRGDYSSV

SEQ ID NO: 64117 - protein, 10 aa, synthetic construct
TLPRGDLLLS

SEQ ID NO: 64118 - protein, 10 aa, synthetic construct
DMSRGDYTSV

SEQ ID NO: 64119 - protein, 10 aa, synthetic construct
DMSRGDQSTL

SEQ ID NO: 64120 - protein, 10 aa, synthetic construct
DMTRGDHGVL

SEQ ID NO: 64121 - protein, 10 aa, synthetic construct
DMTRGDRGQI

SEQ ID NO: 64122 - protein, 10 aa, synthetic construct
DMTRGDRQGI

SEQ ID NO: 64123 - protein, 10 aa, synthetic construct
DMTRGDRSVV

SEQ ID NO: 64124 - protein, 10 aa, synthetic construct
DMTRGDLIGR

SEQ ID NO: 64125 - protein, 10 aa, synthetic construct
DMTRGDRSQT

SEQ ID NO: 64126 - protein, 10 aa, synthetic construct
DMYRGDHGVL

SEQ ID NO: 64127 - protein, 10 aa, synthetic construct
DMYRGDRSVV

SEQ ID NO: 64128 - protein, 10 aa, synthetic construct
TLLRGDRGQI

SEQ ID NO: 64129 - protein, 10 aa, synthetic construct
DMYRGDRGVV

SEQ ID NO: 64130 - protein, 10 aa, synthetic construct
DMYRGDLTVT

SEQ ID NO: 64131 - protein, 10 aa, synthetic construct
DMYRGDLIGR

SEQ ID NO: 64132 - protein, 10 aa, synthetic construct
DMYRGDLLLS

SEQ ID NO: 64133 - protein, 10 aa, synthetic construct
DMNRGDHGVL

SEQ ID NO: 64134 - protein, 10 aa, synthetic construct
DMNRGDRSVV

SEQ ID NO: 64135 - protein, 10 aa, synthetic construct
DMNRGDRGVV

SEQ ID NO: 64136 - protein, 10 aa, synthetic construct
DMNRGDLTVT

SEQ ID NO: 64137 - protein, 10 aa, synthetic construct
DMNRGDLIGR

SEQ ID NO: 64138 - protein, 10 aa, synthetic construct
DMNRGDLLLS

SEQ ID NO: 64139 - protein, 10 aa, synthetic construct
TLLRGDRQGI

SEQ ID NO: 64140 - protein, 10 aa, synthetic construct
DMQRGDHGVL

SEQ ID NO: 64141 - protein, 10 aa, synthetic construct
DMQRGDRGQI

SEQ ID NO: 64142 - protein, 10 aa, synthetic construct
DMQRGDRQGI

SEQ ID NO: 64143 - protein, 10 aa, synthetic construct
DMQRGDRSVV

SEQ ID NO: 64144 - protein, 10 aa, synthetic construct
DMQRGDLIGR

SEQ ID NO: 64145 - protein, 10 aa, synthetic construct
DMQRGDRSQT

SEQ ID NO: 64146 - protein, 10 aa, synthetic construct
DMDRGDHGVL

SEQ ID NO: 64147 - protein, 10 aa, synthetic construct
DMDRGDRGQI

SEQ ID NO: 64148 - protein, 10 aa, synthetic construct
DMDRGDRQGI

SEQ ID NO: 64149 - protein, 10 aa, synthetic construct
DMDRGDRSVV

SEQ ID NO: 64150 - protein, 10 aa, synthetic construct
TLLRGDRSVV

SEQ ID NO: 64151 - protein, 10 aa, synthetic construct
DMDRGDLIGR

SEQ ID NO: 64152 - protein, 10 aa, synthetic construct
DMDRGDRSQT

SEQ ID NO: 64153 - protein, 10 aa, synthetic construct
DMERGDHGVL

SEQ ID NO: 64154 - protein, 10 aa, synthetic construct
DMERGDRGQI

SEQ ID NO: 64155 - protein, 10 aa, synthetic construct
DMERGDRQGI

SEQ ID NO: 64156 - protein, 10 aa, synthetic construct
DMERGDRSVV

SEQ ID NO: 64157 - protein, 10 aa, synthetic construct
DMERGDLIGR

SEQ ID NO: 64158 - protein, 10 aa, synthetic construct
DMERGDRSQT

SEQ ID NO: 64159 - protein, 10 aa, synthetic construct
DWGRGDHVNL

SEQ ID NO: 64160 - protein, 10 aa, synthetic construct
DWGRGDYNSL

SEQ ID NO: 64161 - protein, 10 aa, synthetic construct
TLLRGDRGVV

SEQ ID NO: 64162 - protein, 10 aa, synthetic construct
DWGRGDYSSV

SEQ ID NO: 64163 - protein, 10 aa, synthetic construct
DWGRGDYTSV

SEQ ID NO: 64164 - protein, 10 aa, synthetic construct
DWGRGDYTSM

SEQ ID NO: 64165 - protein, 10 aa, synthetic construct
DWARGDHVNL

SEQ ID NO: 64166 - protein, 10 aa, synthetic construct
DWARGDYNSL

SEQ ID NO: 64167 - protein, 10 aa, synthetic construct
DWARGDYSSV

SEQ ID NO: 64168 - protein, 10 aa, synthetic construct
DWARGDYTSV

SEQ ID NO: 64169 - protein, 10 aa, synthetic construct
DWARGDYTSM

SEQ ID NO: 64170 - protein, 10 aa, synthetic construct
DWVRGDHVNL

SEQ ID NO: 64171 - protein, 10 aa, synthetic construct
DWVRGDYNSL

SEQ ID NO: 64172 - protein, 10 aa, synthetic construct
TLLRGDRSQT

SEQ ID NO: 64173 - protein, 10 aa, synthetic construct
DWVRGDYTSM

SEQ ID NO: 64174 - protein, 10 aa, synthetic construct
DWPRGDHVNL

SEQ ID NO: 64175 - protein, 10 aa, synthetic construct
DWPRGDYNSL

SEQ ID NO: 64176 - protein, 10 aa, synthetic construct
DWPRGDYSSV

SEQ ID NO: 64177 - protein, 10 aa, synthetic construct
DWPRGDYTSV

SEQ ID NO: 64178 - protein, 10 aa, synthetic construct
DWPRGDYTSM

SEQ ID NO: 64179 - protein, 10 aa, synthetic construct
DWLRGDHVNL

SEQ ID NO: 64180 - protein, 10 aa, synthetic construct
DWLRGDYNSL

SEQ ID NO: 64181 - protein, 10 aa, synthetic construct
DWLRGDYTSM

SEQ ID NO: 64182 - protein, 10 aa, synthetic construct
DWIRGDHGVL

SEQ ID NO: 64183 - protein, 10 aa, synthetic construct
APPRGDHGVL

SEQ ID NO: 64184 - protein, 10 aa, synthetic construct
TLWRGDRGQI

SEQ ID NO: 64185 - protein, 10 aa, synthetic construct
DWIRGDRGQI

SEQ ID NO: 64186 - protein, 10 aa, synthetic construct
DWIRGDRQGI

SEQ ID NO: 64187 - protein, 10 aa, synthetic construct
DWIRGDRSVV

SEQ ID NO: 64188 - protein, 10 aa, synthetic construct
DWIRGDLIGR

SEQ ID NO: 64189 - protein, 10 aa, synthetic construct
DWIRGDRSQT

SEQ ID NO: 64190 - protein, 10 aa, synthetic construct
DWMRGDHGVL

SEQ ID NO: 64191 - protein, 10 aa, synthetic construct
DWMRGDHVNL

SEQ ID NO: 64192 - protein, 10 aa, synthetic construct
DWMRGDRDYL

SEQ ID NO: 64193 - protein, 10 aa, synthetic construct
DWMRGDYSSV

SEQ ID NO: 64194 - protein, 10 aa, synthetic construct
DWMRGDLTVT

SEQ ID NO: 64195 - protein, 10 aa, synthetic construct
TLWRGDRQGI

SEQ ID NO: 64196 - protein, 10 aa, synthetic construct
DWWRGDRDYL

SEQ ID NO: 64197 - protein, 10 aa, synthetic construct
DWWRGDYTSV

SEQ ID NO: 64198 - protein, 10 aa, synthetic construct
DWWRGDLTVT

SEQ ID NO: 64199 - protein, 10 aa, synthetic construct
DWWRGDLIGR

SEQ ID NO: 64200 - protein, 10 aa, synthetic construct
DWFRGDHGVL

SEQ ID NO: 64201 - protein, 10 aa, synthetic construct
DWFRGDRGQI

SEQ ID NO: 64202 - protein, 10 aa, synthetic construct
DWFRGDRQGI

SEQ ID NO: 64203 - protein, 10 aa, synthetic construct
DWFRGDRSVV

SEQ ID NO: 64204 - protein, 10 aa, synthetic construct
DWFRGDLIGR

SEQ ID NO: 64205 - protein, 10 aa, synthetic construct
DWFRGDRSQT

SEQ ID NO: 64206 - protein, 10 aa, synthetic construct
TLWRGDRSVV

SEQ ID NO: 64207 - protein, 10 aa, synthetic construct
DWKRGDHGVL

SEQ ID NO: 64208 - protein, 10 aa, synthetic construct
DWKRGDRGQI

SEQ ID NO: 64209 - protein, 10 aa, synthetic construct
DWKRGDRQGI

SEQ ID NO: 64210 - protein, 10 aa, synthetic construct
DWKRGDRSVV

SEQ ID NO: 64211 - protein, 10 aa, synthetic construct
DWKRGDLIGR

SEQ ID NO: 64212 - protein, 10 aa, synthetic construct
DWKRGDRSQT

SEQ ID NO: 64213 - protein, 10 aa, synthetic construct
DWRRGDHVNL

SEQ ID NO: 64214 - protein, 10 aa, synthetic construct
DWRRGDYNSL

SEQ ID NO: 64215 - protein, 10 aa, synthetic construct
DWRRGDYSSV

SEQ ID NO: 64216 - protein, 10 aa, synthetic construct
DWRRGDYTSV

SEQ ID NO: 64217 - protein, 10 aa, synthetic construct
TLWRGDRGVV

SEQ ID NO: 64218 - protein, 10 aa, synthetic construct
DWRRGDYTSM

SEQ ID NO: 64219 - protein, 10 aa, synthetic construct
DWHRGDRDYL

SEQ ID NO: 64220 - protein, 10 aa, synthetic construct
DWHRGDYVGL

SEQ ID NO: 64221 - protein, 10 aa, synthetic construct
DWHRGDYSSV

SEQ ID NO: 64222 - protein, 10 aa, synthetic construct
DWHRGDYTSV

SEQ ID NO: 64223 - protein, 10 aa, synthetic construct
DWHRGDQSTL

SEQ ID NO: 64224 - protein, 10 aa, synthetic construct
DWSRGDHVNL

SEQ ID NO: 64225 - protein, 10 aa, synthetic construct
DWSRGDYNSL

SEQ ID NO: 64226 - protein, 10 aa, synthetic construct
DWSRGDYTSM

SEQ ID NO: 64227 - protein, 10 aa, synthetic construct
DWTRGDRDYL

SEQ ID NO: 64228 - protein, 10 aa, synthetic construct
TLWRGDRSQT

SEQ ID NO: 64229 - protein, 10 aa, synthetic construct
DWTRGDYVGL

SEQ ID NO: 64230 - protein, 10 aa, synthetic construct
DWTRGDYSSV

SEQ ID NO: 64231 - protein, 10 aa, synthetic construct
DWTRGDYTSV

SEQ ID NO: 64232 - protein, 10 aa, synthetic construct
DWTRGDQSTL

SEQ ID NO: 64233 - protein, 10 aa, synthetic construct
DWYRGDHGVL

SEQ ID NO: 64234 - protein, 10 aa, synthetic construct
DWYRGDRGQI

SEQ ID NO: 64235 - protein, 10 aa, synthetic construct
DWYRGDRQGI

SEQ ID NO: 64236 - protein, 10 aa, synthetic construct
DWYRGDRSVV

SEQ ID NO: 64237 - protein, 10 aa, synthetic construct
DWYRGDLIGR

SEQ ID NO: 64238 - protein, 10 aa, synthetic construct
DWYRGDRSQT

SEQ ID NO: 64239 - protein, 10 aa, synthetic construct
TLRRGDHGVL

SEQ ID NO: 64240 - protein, 10 aa, synthetic construct
DWNRGDHGVL

SEQ ID NO: 64241 - protein, 10 aa, synthetic construct
DWNRGDRGQI

SEQ ID NO: 64242 - protein, 10 aa, synthetic construct
DWNRGDRQGI

SEQ ID NO: 64243 - protein, 10 aa, synthetic construct
DWNRGDRSVV

SEQ ID NO: 64244 - protein, 10 aa, synthetic construct
DWNRGDLIGR

SEQ ID NO: 64245 - protein, 10 aa, synthetic construct
DWNRGDRSQT

SEQ ID NO: 64246 - protein, 10 aa, synthetic construct
DWQRGDRDYL

SEQ ID NO: 64247 - protein, 10 aa, synthetic construct
DWQRGDYVGL

SEQ ID NO: 64248 - protein, 10 aa, synthetic construct
DWQRGDYSSV

SEQ ID NO: 64249 - protein, 10 aa, synthetic construct
DWQRGDYTSV

SEQ ID NO: 64250 - protein, 10 aa, synthetic construct
TLRRGDYVGL

SEQ ID NO: 64251 - protein, 10 aa, synthetic construct
DWQRGDQSTL

SEQ ID NO: 64252 - protein, 10 aa, synthetic construct
DWDRGDRDYL

SEQ ID NO: 64253 - protein, 10 aa, synthetic construct
DWDRGDYVGL

SEQ ID NO: 64254 - protein, 10 aa, synthetic construct
DWDRGDYSSV

SEQ ID NO: 64255 - protein, 10 aa, synthetic construct
DWDRGDYTSV

SEQ ID NO: 64256 - protein, 10 aa, synthetic construct
DWDRGDQSTL

SEQ ID NO: 64257 - protein, 10 aa, synthetic construct
DWERGDRDYL

SEQ ID NO: 64258 - protein, 10 aa, synthetic construct
DWERGDYVGL

SEQ ID NO: 64259 - protein, 10 aa, synthetic construct
DWERGDYSSV

SEQ ID NO: 64260 - protein, 10 aa, synthetic construct
DWERGDYTSV

SEQ ID NO: 64261 - protein, 10 aa, synthetic construct
TLRRGDQSTL

SEQ ID NO: 64262 - protein, 10 aa, synthetic construct
DWERGDQSTL

SEQ ID NO: 64263 - protein, 10 aa, synthetic construct
DFGRGDHGVL

SEQ ID NO: 64264 - protein, 10 aa, synthetic construct
DFGRGDHVNL

SEQ ID NO: 64265 - protein, 10 aa, synthetic construct
DFGRGDYVGL

SEQ ID NO: 64266 - protein, 10 aa, synthetic construct
DFGRGDYSSV

SEQ ID NO: 64267 - protein, 10 aa, synthetic construct
DFGRGDQSTL

SEQ ID NO: 64268 - protein, 10 aa, synthetic construct
DFGRGDLLLS

SEQ ID NO: 64269 - protein, 10 aa, synthetic construct
DFARGDHGVL

SEQ ID NO: 64270 - protein, 10 aa, synthetic construct
DFARGDHVNL

SEQ ID NO: 64271 - protein, 10 aa, synthetic construct
DFARGDYVGL

SEQ ID NO: 64272 - protein, 10 aa, synthetic construct
TLRRGDLLLS

SEQ ID NO: 64273 - protein, 10 aa, synthetic construct
DFARGDYSSV

SEQ ID NO: 64274 - protein, 10 aa, synthetic construct
DFARGDQSTL

SEQ ID NO: 64275 - protein, 10 aa, synthetic construct
DFARGDLLLS

SEQ ID NO: 64276 - protein, 10 aa, synthetic construct
DFVRGDRGQI

SEQ ID NO: 64277 - protein, 10 aa, synthetic construct
DFVRGDRQGI

SEQ ID NO: 64278 - protein, 10 aa, synthetic construct
DFVRGDRSVV

SEQ ID NO: 64279 - protein, 10 aa, synthetic construct
DFVRGDRGVV

SEQ ID NO: 64280 - protein, 10 aa, synthetic construct
DFVRGDYVGL

SEQ ID NO: 64281 - protein, 10 aa, synthetic construct
DFVRGDQSTL

SEQ ID NO: 64282 - protein, 10 aa, synthetic construct
DFVRGDRSQT

SEQ ID NO: 64283 - protein, 10 aa, synthetic construct
TLHRGDRGQI

SEQ ID NO: 64284 - protein, 10 aa, synthetic construct
DFVRGDLLLS

SEQ ID NO: 64285 - protein, 10 aa, synthetic construct
DFPRGDHGVL

SEQ ID NO: 64286 - protein, 10 aa, synthetic construct
DFPRGDHVNL

SEQ ID NO: 64287 - protein, 10 aa, synthetic construct
DFPRGDYVGL

SEQ ID NO: 64288 - protein, 10 aa, synthetic construct
DFPRGDYSSV

SEQ ID NO: 64289 - protein, 10 aa, synthetic construct
DFPRGDQSTL

SEQ ID NO: 64290 - protein, 10 aa, synthetic construct
DFPRGDLLLS

SEQ ID NO: 64291 - protein, 10 aa, synthetic construct
DFLRGDRGQI

SEQ ID NO: 64292 - protein, 10 aa, synthetic construct
DFLRGDRQGI

SEQ ID NO: 64293 - protein, 10 aa, synthetic construct
DFLRGDRSVV

SEQ ID NO: 64294 - protein, 10 aa, synthetic construct
APPRGDRGQI

SEQ ID NO: 64295 - protein, 10 aa, synthetic construct
TLHRGDRQGI

SEQ ID NO: 64296 - protein, 10 aa, synthetic construct
DFLRGDRGVV

SEQ ID NO: 64297 - protein, 10 aa, synthetic construct
DFLRGDYVGL

SEQ ID NO: 64298 - protein, 10 aa, synthetic construct
DFLRGDQSTL

SEQ ID NO: 64299 - protein, 10 aa, synthetic construct
DFLRGDRSQT

SEQ ID NO: 64300 - protein, 10 aa, synthetic construct
DFLRGDLLLS

SEQ ID NO: 64301 - protein, 10 aa, synthetic construct
DFIRGDRSVV

SEQ ID NO: 64302 - protein, 10 aa, synthetic construct
DFIRGDRSQT

SEQ ID NO: 64303 - protein, 10 aa, synthetic construct
DFMRGDRSVV

SEQ ID NO: 64304 - protein, 10 aa, synthetic construct
DFMRGDRSQT

SEQ ID NO: 64305 - protein, 10 aa, synthetic construct
DFWRGDRGQI

SEQ ID NO: 64306 - protein, 10 aa, synthetic construct
TLHRGDRSVV

SEQ ID NO: 64307 - protein, 10 aa, synthetic construct
DFWRGDRQGI

SEQ ID NO: 64308 - protein, 10 aa, synthetic construct
DFWRGDRSVV

SEQ ID NO: 64309 - protein, 10 aa, synthetic construct
DFWRGDRGVV

SEQ ID NO: 64310 - protein, 10 aa, synthetic construct
DFWRGDYVGL

SEQ ID NO: 64311 - protein, 10 aa, synthetic construct
DFWRGDQSTL

SEQ ID NO: 64312 - protein, 10 aa, synthetic construct
DFWRGDRSQT

SEQ ID NO: 64313 - protein, 10 aa, synthetic construct
DFWRGDLLLS

SEQ ID NO: 64314 - protein, 10 aa, synthetic construct
DFKRGDRSVV

SEQ ID NO: 64315 - protein, 10 aa, synthetic construct
DFKRGDRSQT

SEQ ID NO: 64316 - protein, 10 aa, synthetic construct
DFRRGDHGVL

SEQ ID NO: 64317 - protein, 10 aa, synthetic construct
TLHRGDRGVV

SEQ ID NO: 64318 - protein, 10 aa, synthetic construct
DFRRGDHVNL

SEQ ID NO: 64319 - protein, 10 aa, synthetic construct
DFRRGDYVGL

SEQ ID NO: 64320 - protein, 10 aa, synthetic construct
DFRRGDYSSV

SEQ ID NO: 64321 - protein, 10 aa, synthetic construct
DFRRGDQSTL

SEQ ID NO: 64322 - protein, 10 aa, synthetic construct
DFRRGDLLLS

SEQ ID NO: 64323 - protein, 10 aa, synthetic construct
DFHRGDRGQI

SEQ ID NO: 64324 - protein, 10 aa, synthetic construct
DFHRGDRQGI

SEQ ID NO: 64325 - protein, 10 aa, synthetic construct
DFHRGDRSVV

SEQ ID NO: 64326 - protein, 10 aa, synthetic construct
DFHRGDRGVV

SEQ ID NO: 64327 - protein, 10 aa, synthetic construct
DFHRGDYVGL

SEQ ID NO: 64328 - protein, 10 aa, synthetic construct
TLHRGDRSQT

SEQ ID NO: 64329 - protein, 10 aa, synthetic construct
DFHRGDQSTL

SEQ ID NO: 64330 - protein, 10 aa, synthetic construct
DFHRGDRSQT

SEQ ID NO: 64331 - protein, 10 aa, synthetic construct
DFHRGDLLLS

SEQ ID NO: 64332 - protein, 10 aa, synthetic construct
DFSRGDRGQI

SEQ ID NO: 64333 - protein, 10 aa, synthetic construct
DFSRGDRQGI

SEQ ID NO: 64334 - protein, 10 aa, synthetic construct
DFSRGDRSVV

SEQ ID NO: 64335 - protein, 10 aa, synthetic construct
DFSRGDRGVV

SEQ ID NO: 64336 - protein, 10 aa, synthetic construct
DFSRGDYVGL

SEQ ID NO: 64337 - protein, 10 aa, synthetic construct
DFSRGDQSTL

SEQ ID NO: 64338 - protein, 10 aa, synthetic construct
DFSRGDRSQT

SEQ ID NO: 64339 - protein, 10 aa, synthetic construct
TLSRGDRGQI

SEQ ID NO: 64340 - protein, 10 aa, synthetic construct
DFSRGDLLLS

SEQ ID NO: 64341 - protein, 10 aa, synthetic construct
DFTRGDRGQI

SEQ ID NO: 64342 - protein, 10 aa, synthetic construct
DFTRGDRQGI

SEQ ID NO: 64343 - protein, 10 aa, synthetic construct
DFTRGDRSVV

SEQ ID NO: 64344 - protein, 10 aa, synthetic construct
DFTRGDRGVV

SEQ ID NO: 64345 - protein, 10 aa, synthetic construct
DFTRGDYVGL

SEQ ID NO: 64346 - protein, 10 aa, synthetic construct
DFTRGDQSTL

SEQ ID NO: 64347 - protein, 10 aa, synthetic construct
DFTRGDRSQT

SEQ ID NO: 64348 - protein, 10 aa, synthetic construct
DFTRGDLLLS

SEQ ID NO: 64349 - protein, 10 aa, synthetic construct
DFYRGDRSVV

SEQ ID NO: 64350 - protein, 10 aa, synthetic construct
TLSRGDRQGI

SEQ ID NO: 64351 - protein, 10 aa, synthetic construct
DFYRGDRSQT

SEQ ID NO: 64352 - protein, 10 aa, synthetic construct
DFNRGDRSVV

SEQ ID NO: 64353 - protein, 10 aa, synthetic construct
DFNRGDRSQT

SEQ ID NO: 64354 - protein, 10 aa, synthetic construct
DFQRGDRGQI

SEQ ID NO: 64355 - protein, 10 aa, synthetic construct
DFQRGDRQGI

SEQ ID NO: 64356 - protein, 10 aa, synthetic construct
DFQRGDRSVV

SEQ ID NO: 64357 - protein, 10 aa, synthetic construct
DFQRGDRGVV

SEQ ID NO: 64358 - protein, 10 aa, synthetic construct
DFQRGDYVGL

SEQ ID NO: 64359 - protein, 10 aa, synthetic construct
DFQRGDQSTL

SEQ ID NO: 64360 - protein, 10 aa, synthetic construct
DFQRGDRSQT

SEQ ID NO: 64361 - protein, 10 aa, synthetic construct
TLSRGDRSVV

SEQ ID NO: 64362 - protein, 10 aa, synthetic construct
DFQRGDLLLS

SEQ ID NO: 64363 - protein, 10 aa, synthetic construct
DFDRGDRGQI

SEQ ID NO: 64364 - protein, 10 aa, synthetic construct
DFDRGDRQGI

SEQ ID NO: 64365 - protein, 10 aa, synthetic construct
DFDRGDRSVV

SEQ ID NO: 64366 - protein, 10 aa, synthetic construct
DFDRGDRGVV

SEQ ID NO: 64367 - protein, 10 aa, synthetic construct
DFDRGDYVGL

SEQ ID NO: 64368 - protein, 10 aa, synthetic construct
DFDRGDQSTL

SEQ ID NO: 64369 - protein, 10 aa, synthetic construct
DFDRGDRSQT

SEQ ID NO: 64370 - protein, 10 aa, synthetic construct
DFDRGDLLLS

SEQ ID NO: 64371 - protein, 10 aa, synthetic construct
DFERGDRGQI

SEQ ID NO: 64372 - protein, 10 aa, synthetic construct
TLSRGDRGVV

SEQ ID NO: 64373 - protein, 10 aa, synthetic construct
DFERGDRQGI

SEQ ID NO: 64374 - protein, 10 aa, synthetic construct
DFERGDRSVV

SEQ ID NO: 64375 - protein, 10 aa, synthetic construct
DFERGDRGVV

SEQ ID NO: 64376 - protein, 10 aa, synthetic construct
DFERGDYVGL

SEQ ID NO: 64377 - protein, 10 aa, synthetic construct
DFERGDQSTL

SEQ ID NO: 64378 - protein, 10 aa, synthetic construct
DFERGDRSQT

SEQ ID NO: 64379 - protein, 10 aa, synthetic construct
DFERGDLLLS

SEQ ID NO: 64380 - protein, 10 aa, synthetic construct
DKGRGDHGVL

SEQ ID NO: 64381 - protein, 10 aa, synthetic construct
DKGRGDHVNL

SEQ ID NO: 64382 - protein, 10 aa, synthetic construct
DKGRGDYVGL

SEQ ID NO: 64383 - protein, 10 aa, synthetic construct
TLSRGDRSQT

SEQ ID NO: 64384 - protein, 10 aa, synthetic construct
DKGRGDYSSV

SEQ ID NO: 64385 - protein, 10 aa, synthetic construct
DKGRGDQSTL

SEQ ID NO: 64386 - protein, 10 aa, synthetic construct
DKGRGDLLLS

SEQ ID NO: 64387 - protein, 10 aa, synthetic construct
DKARGDHGVL

SEQ ID NO: 64388 - protein, 10 aa, synthetic construct
DKARGDHVNL

SEQ ID NO: 64389 - protein, 10 aa, synthetic construct
DKARGDYVGL

SEQ ID NO: 64390 - protein, 10 aa, synthetic construct
DKARGDYSSV

SEQ ID NO: 64391 - protein, 10 aa, synthetic construct
DKARGDQSTL

SEQ ID NO: 64392 - protein, 10 aa, synthetic construct
DKARGDLLLS

SEQ ID NO: 64393 - protein, 10 aa, synthetic construct
DKVRGDRGQI

SEQ ID NO: 64394 - protein, 10 aa, synthetic construct
TLTRGDRGQI

SEQ ID NO: 64395 - protein, 10 aa, synthetic construct
DKVRGDRQGI

SEQ ID NO: 64396 - protein, 10 aa, synthetic construct
DKVRGDRSVV

SEQ ID NO: 64397 - protein, 10 aa, synthetic construct
DKVRGDRGVV

SEQ ID NO: 64398 - protein, 10 aa, synthetic construct
DKVRGDYVGL

SEQ ID NO: 64399 - protein, 10 aa, synthetic construct
DKVRGDQSTL

SEQ ID NO: 64400 - protein, 10 aa, synthetic construct
DKVRGDRSQT

SEQ ID NO: 64401 - protein, 10 aa, synthetic construct
DKVRGDLLLS

SEQ ID NO: 64402 - protein, 10 aa, synthetic construct
DKPRGDHGVL

SEQ ID NO: 64403 - protein, 10 aa, synthetic construct
DKPRGDHVNL

SEQ ID NO: 64404 - protein, 10 aa, synthetic construct
DKPRGDYVGL

SEQ ID NO: 64405 - protein, 10 aa, synthetic construct
APPRGDRQGI

SEQ ID NO: 64406 - protein, 10 aa, synthetic construct
TLTRGDRQGI

SEQ ID NO: 64407 - protein, 10 aa, synthetic construct
DKPRGDYSSV

SEQ ID NO: 64408 - protein, 10 aa, synthetic construct
DKPRGDQSTL

SEQ ID NO: 64409 - protein, 10 aa, synthetic construct
DKPRGDLLLS

SEQ ID NO: 64410 - protein, 10 aa, synthetic construct
DKLRGDRGQI

SEQ ID NO: 64411 - protein, 10 aa, synthetic construct
DKLRGDRQGI

SEQ ID NO: 64412 - protein, 10 aa, synthetic construct
DKLRGDRSVV

SEQ ID NO: 64413 - protein, 10 aa, synthetic construct
DKLRGDRGVV

SEQ ID NO: 64414 - protein, 10 aa, synthetic construct
DKLRGDYVGL

SEQ ID NO: 64415 - protein, 10 aa, synthetic construct
DKLRGDQSTL

SEQ ID NO: 64416 - protein, 10 aa, synthetic construct
DKLRGDRSQT

SEQ ID NO: 64417 - protein, 10 aa, synthetic construct
TLTRGDRSVV

SEQ ID NO: 64418 - protein, 10 aa, synthetic construct
DKLRGDLLLS

SEQ ID NO: 64419 - protein, 10 aa, synthetic construct
DKIRGDRSVV

SEQ ID NO: 64420 - protein, 10 aa, synthetic construct
DKIRGDRSQT

SEQ ID NO: 64421 - protein, 10 aa, synthetic construct
DKMRGDRSVV

SEQ ID NO: 64422 - protein, 10 aa, synthetic construct
DKMRGDRSQT

SEQ ID NO: 64423 - protein, 10 aa, synthetic construct
DKWRGDRGQI

SEQ ID NO: 64424 - protein, 10 aa, synthetic construct
DKWRGDRQGI

SEQ ID NO: 64425 - protein, 10 aa, synthetic construct
DKWRGDRSVV

SEQ ID NO: 64426 - protein, 10 aa, synthetic construct
DKWRGDRGVV

SEQ ID NO: 64427 - protein, 10 aa, synthetic construct
DKWRGDYVGL

SEQ ID NO: 64428 - protein, 10 aa, synthetic construct
TLTRGDRGVV

SEQ ID NO: 64429 - protein, 10 aa, synthetic construct
DKWRGDQSTL

SEQ ID NO: 64430 - protein, 10 aa, synthetic construct
DKWRGDRSQT

SEQ ID NO: 64431 - protein, 10 aa, synthetic construct
DKWRGDLLLS

SEQ ID NO: 64432 - protein, 10 aa, synthetic construct
DKFRGDRSVV

SEQ ID NO: 64433 - protein, 10 aa, synthetic construct
DKFRGDRSQT

SEQ ID NO: 64434 - protein, 10 aa, synthetic construct
DKRRGDHGVL

SEQ ID NO: 64435 - protein, 10 aa, synthetic construct
DKRRGDHVNL

SEQ ID NO: 64436 - protein, 10 aa, synthetic construct
DKRRGDYVGL

SEQ ID NO: 64437 - protein, 10 aa, synthetic construct
DKRRGDYSSV

SEQ ID NO: 64438 - protein, 10 aa, synthetic construct
DKRRGDQSTL

SEQ ID NO: 64439 - protein, 10 aa, synthetic construct
TLTRGDRSQT

SEQ ID NO: 64440 - protein, 10 aa, synthetic construct
DKRRGDLLLS

SEQ ID NO: 64441 - protein, 10 aa, synthetic construct
DKHRGDRGQI

SEQ ID NO: 64442 - protein, 10 aa, synthetic construct
DKHRGDRQGI

SEQ ID NO: 64443 - protein, 10 aa, synthetic construct
DKHRGDRSVV

SEQ ID NO: 64444 - protein, 10 aa, synthetic construct
DKHRGDRGVV

SEQ ID NO: 64445 - protein, 10 aa, synthetic construct
DKHRGDYVGL

SEQ ID NO: 64446 - protein, 10 aa, synthetic construct
DKHRGDQSTL

SEQ ID NO: 64447 - protein, 10 aa, synthetic construct
DKHRGDRSQT

SEQ ID NO: 64448 - protein, 10 aa, synthetic construct
DKHRGDLLLS

SEQ ID NO: 64449 - protein, 10 aa, synthetic construct
DKSRGDRGQI

SEQ ID NO: 64450 - protein, 10 aa, synthetic construct
TLQRGDRGQI

SEQ ID NO: 64451 - protein, 10 aa, synthetic construct
DKSRGDRQGI

SEQ ID NO: 64452 - protein, 10 aa, synthetic construct
DKSRGDRSVV

SEQ ID NO: 64453 - protein, 10 aa, synthetic construct
DKSRGDRGVV

SEQ ID NO: 64454 - protein, 10 aa, synthetic construct
DKSRGDYVGL

SEQ ID NO: 64455 - protein, 10 aa, synthetic construct
DKSRGDQSTL

SEQ ID NO: 64456 - protein, 10 aa, synthetic construct
DKSRGDRSQT

SEQ ID NO: 64457 - protein, 10 aa, synthetic construct
DKSRGDLLLS

SEQ ID NO: 64458 - protein, 10 aa, synthetic construct
DKTRGDRGQI

SEQ ID NO: 64459 - protein, 10 aa, synthetic construct
DKTRGDRQGI

SEQ ID NO: 64460 - protein, 10 aa, synthetic construct
DKTRGDRSVV

SEQ ID NO: 64461 - protein, 10 aa, synthetic construct
TLQRGDRQGI

SEQ ID NO: 64462 - protein, 10 aa, synthetic construct
DKTRGDRGVV

SEQ ID NO: 64463 - protein, 10 aa, synthetic construct
DKTRGDYVGL

SEQ ID NO: 64464 - protein, 10 aa, synthetic construct
DKTRGDQSTL

SEQ ID NO: 64465 - protein, 10 aa, synthetic construct
DKTRGDRSQT

SEQ ID NO: 64466 - protein, 10 aa, synthetic construct
DKTRGDLLLS

SEQ ID NO: 64467 - protein, 10 aa, synthetic construct
DKYRGDRSVV

SEQ ID NO: 64468 - protein, 10 aa, synthetic construct
DKYRGDRSQT

SEQ ID NO: 64469 - protein, 10 aa, synthetic construct
DKQRGDRGQI

SEQ ID NO: 64470 - protein, 10 aa, synthetic construct
DKQRGDRQGI

SEQ ID NO: 64471 - protein, 10 aa, synthetic construct
DKQRGDRSVV

SEQ ID NO: 64472 - protein, 10 aa, synthetic construct
TLQRGDRSVV

SEQ ID NO: 64473 - protein, 10 aa, synthetic construct
DKQRGDRGVV

SEQ ID NO: 64474 - protein, 10 aa, synthetic construct
DKQRGDYVGL

SEQ ID NO: 64475 - protein, 10 aa, synthetic construct
DKQRGDQSTL

SEQ ID NO: 64476 - protein, 10 aa, synthetic construct
DKQRGDRSQT

SEQ ID NO: 64477 - protein, 10 aa, synthetic construct
DKQRGDLLLS

SEQ ID NO: 64478 - protein, 10 aa, synthetic construct
DKDRGDRGQI

SEQ ID NO: 64479 - protein, 10 aa, synthetic construct
DKDRGDRQGI

SEQ ID NO: 64480 - protein, 10 aa, synthetic construct
DKDRGDRSVV

SEQ ID NO: 64481 - protein, 10 aa, synthetic construct
DKDRGDRGVV

SEQ ID NO: 64482 - protein, 10 aa, synthetic construct
DKDRGDYVGL

SEQ ID NO: 64483 - protein, 10 aa, synthetic construct
TLQRGDRGVV

SEQ ID NO: 64484 - protein, 10 aa, synthetic construct
DKDRGDQSTL

SEQ ID NO: 64485 - protein, 10 aa, synthetic construct
DKDRGDRSQT

SEQ ID NO: 64486 - protein, 10 aa, synthetic construct
DKDRGDLLLS

SEQ ID NO: 64487 - protein, 10 aa, synthetic construct
DKERGDRGQI

SEQ ID NO: 64488 - protein, 10 aa, synthetic construct
DKERGDRQGI

SEQ ID NO: 64489 - protein, 10 aa, synthetic construct
DKERGDRSVV

SEQ ID NO: 64490 - protein, 10 aa, synthetic construct
DKERGDRGVV

SEQ ID NO: 64491 - protein, 10 aa, synthetic construct
DKERGDYVGL

SEQ ID NO: 64492 - protein, 10 aa, synthetic construct
DKERGDQSTL

SEQ ID NO: 64493 - protein, 10 aa, synthetic construct
DKERGDRSQT

SEQ ID NO: 64494 - protein, 10 aa, synthetic construct
TLQRGDRSQT

SEQ ID NO: 64495 - protein, 10 aa, synthetic construct
DKERGDLLLS

SEQ ID NO: 64496 - protein, 10 aa, synthetic construct
DRGRGDYTSV

SEQ ID NO: 64497 - protein, 10 aa, synthetic construct
DRGRGDYTSM

SEQ ID NO: 64498 - protein, 10 aa, synthetic construct
DRARGDYTSV

SEQ ID NO: 64499 - protein, 10 aa, synthetic construct
DRARGDYTSM

SEQ ID NO: 64500 - protein, 10 aa, synthetic construct
DRVRGDHVNL

SEQ ID NO: 64501 - protein, 10 aa, synthetic construct
DRVRGDRDYL

SEQ ID NO: 64502 - protein, 10 aa, synthetic construct
DRVRGDYSSV

SEQ ID NO: 64503 - protein, 10 aa, synthetic construct
DRVRGDLTVT

SEQ ID NO: 64504 - protein, 10 aa, synthetic construct
DRVRGDLIGR

SEQ ID NO: 64505 - protein, 10 aa, synthetic construct
TLDRGDRGQI

SEQ ID NO: 64506 - protein, 10 aa, synthetic construct
DRPRGDYTSV

SEQ ID NO: 64507 - protein, 10 aa, synthetic construct
DRPRGDYTSM

SEQ ID NO: 64508 - protein, 10 aa, synthetic construct
DRLRGDHVNL

SEQ ID NO: 64509 - protein, 10 aa, synthetic construct
DRLRGDRDYL

SEQ ID NO: 64510 - protein, 10 aa, synthetic construct
DRLRGDYSSV

SEQ ID NO: 64511 - protein, 10 aa, synthetic construct
DRLRGDLTVT

SEQ ID NO: 64512 - protein, 10 aa, synthetic construct
DRLRGDLIGR

SEQ ID NO: 64513 - protein, 10 aa, synthetic construct
DRIRGDHGVL

SEQ ID NO: 64514 - protein, 10 aa, synthetic construct
DRIRGDHVNL

SEQ ID NO: 64515 - protein, 10 aa, synthetic construct
DRIRGDYVGL

SEQ ID NO: 64516 - protein, 10 aa, synthetic construct
APPRGDRSVV

SEQ ID NO: 64517 - protein, 10 aa, synthetic construct
TLDRGDRQGI

SEQ ID NO: 64518 - protein, 10 aa, synthetic construct
DRIRGDYSSV

SEQ ID NO: 64519 - protein, 10 aa, synthetic construct
DRIRGDQSTL

SEQ ID NO: 64520 - protein, 10 aa, synthetic construct
DRIRGDLLLS

SEQ ID NO: 64521 - protein, 10 aa, synthetic construct
DRMRGDHGVL

SEQ ID NO: 64522 - protein, 10 aa, synthetic construct
DRMRGDHVNL

SEQ ID NO: 64523 - protein, 10 aa, synthetic construct
DRMRGDYVGL

SEQ ID NO: 64524 - protein, 10 aa, synthetic construct
DRMRGDYSSV

SEQ ID NO: 64525 - protein, 10 aa, synthetic construct
DRMRGDQSTL

SEQ ID NO: 64526 - protein, 10 aa, synthetic construct
DRMRGDLLLS

SEQ ID NO: 64527 - protein, 10 aa, synthetic construct
DRWRGDHVNL

SEQ ID NO: 64528 - protein, 10 aa, synthetic construct
TLDRGDRSVV

SEQ ID NO: 64529 - protein, 10 aa, synthetic construct
DRWRGDRDYL

SEQ ID NO: 64530 - protein, 10 aa, synthetic construct
DRWRGDYSSV

SEQ ID NO: 64531 - protein, 10 aa, synthetic construct
DRWRGDLTVT

SEQ ID NO: 64532 - protein, 10 aa, synthetic construct
DRWRGDLIGR

SEQ ID NO: 64533 - protein, 10 aa, synthetic construct
DRFRGDHGVL

SEQ ID NO: 64534 - protein, 10 aa, synthetic construct
DRFRGDHVNL

SEQ ID NO: 64535 - protein, 10 aa, synthetic construct
DRFRGDYVGL

SEQ ID NO: 64536 - protein, 10 aa, synthetic construct
DRFRGDYSSV

SEQ ID NO: 64537 - protein, 10 aa, synthetic construct
DRFRGDQSTL

SEQ ID NO: 64538 - protein, 10 aa, synthetic construct
DRFRGDLLLS

SEQ ID NO: 64539 - protein, 10 aa, synthetic construct
TLDRGDRGVV

SEQ ID NO: 64540 - protein, 10 aa, synthetic construct
DRKRGDHGVL

SEQ ID NO: 64541 - protein, 10 aa, synthetic construct
DRKRGDHVNL

SEQ ID NO: 64542 - protein, 10 aa, synthetic construct
DRKRGDYVGL

SEQ ID NO: 64543 - protein, 10 aa, synthetic construct
DRKRGDYSSV

SEQ ID NO: 64544 - protein, 10 aa, synthetic construct
DRKRGDQSTL

SEQ ID NO: 64545 - protein, 10 aa, synthetic construct
DRKRGDLLLS

SEQ ID NO: 64546 - protein, 10 aa, synthetic construct
DRRRGDYTSV

SEQ ID NO: 64547 - protein, 10 aa, synthetic construct
DRRRGDYTSM

SEQ ID NO: 64548 - protein, 10 aa, synthetic construct
DRHRGDHVNL

SEQ ID NO: 64549 - protein, 10 aa, synthetic construct
DRHRGDRDYL

SEQ ID NO: 64550 - protein, 10 aa, synthetic construct
TLDRGDRSQT

SEQ ID NO: 64551 - protein, 10 aa, synthetic construct
DRHRGDYSSV

SEQ ID NO: 64552 - protein, 10 aa, synthetic construct
DRHRGDLTVT

SEQ ID NO: 64553 - protein, 10 aa, synthetic construct
DRHRGDLIGR

SEQ ID NO: 64554 - protein, 10 aa, synthetic construct
DRSRGDHVNL

SEQ ID NO: 64555 - protein, 10 aa, synthetic construct
DRSRGDRDYL

SEQ ID NO: 64556 - protein, 10 aa, synthetic construct
DRSRGDYSSV

SEQ ID NO: 64557 - protein, 10 aa, synthetic construct
DRSRGDLTVT

SEQ ID NO: 64558 - protein, 10 aa, synthetic construct
DRSRGDLIGR

SEQ ID NO: 64559 - protein, 10 aa, synthetic construct
DRTRGDHVNL

SEQ ID NO: 64560 - protein, 10 aa, synthetic construct
DRTRGDRDYL

SEQ ID NO: 64561 - protein, 10 aa, synthetic construct
TLERGDRGQI

SEQ ID NO: 64562 - protein, 10 aa, synthetic construct
DRTRGDYSSV

SEQ ID NO: 64563 - protein, 10 aa, synthetic construct
DRTRGDLTVT

SEQ ID NO: 64564 - protein, 10 aa, synthetic construct
DRTRGDLIGR

SEQ ID NO: 64565 - protein, 10 aa, synthetic construct
DRYRGDHGVL

SEQ ID NO: 64566 - protein, 10 aa, synthetic construct
DRYRGDHVNL

SEQ ID NO: 64567 - protein, 10 aa, synthetic construct
DRYRGDYVGL

SEQ ID NO: 64568 - protein, 10 aa, synthetic construct
DRYRGDYSSV

SEQ ID NO: 64569 - protein, 10 aa, synthetic construct
DRYRGDQSTL

SEQ ID NO: 64570 - protein, 10 aa, synthetic construct
DRYRGDLLLS

SEQ ID NO: 64571 - protein, 10 aa, synthetic construct
DRNRGDHGVL

SEQ ID NO: 64572 - protein, 10 aa, synthetic construct
TLERGDRQGI

SEQ ID NO: 64573 - protein, 10 aa, synthetic construct
DRNRGDHVNL

SEQ ID NO: 64574 - protein, 10 aa, synthetic construct
DRNRGDYVGL

SEQ ID NO: 64575 - protein, 10 aa, synthetic construct
DRNRGDYSSV

SEQ ID NO: 64576 - protein, 10 aa, synthetic construct
DRNRGDQSTL

SEQ ID NO: 64577 - protein, 10 aa, synthetic construct
DRNRGDLLLS

SEQ ID NO: 64578 - protein, 10 aa, synthetic construct
DRQRGDHVNL

SEQ ID NO: 64579 - protein, 10 aa, synthetic construct
DRQRGDRDYL

SEQ ID NO: 64580 - protein, 10 aa, synthetic construct
DRQRGDYSSV

SEQ ID NO: 64581 - protein, 10 aa, synthetic construct
DRQRGDLTVT

SEQ ID NO: 64582 - protein, 10 aa, synthetic construct
DRQRGDLIGR

SEQ ID NO: 64583 - protein, 10 aa, synthetic construct
TLERGDRSVV

SEQ ID NO: 64584 - protein, 10 aa, synthetic construct
DRDRGDHVNL

SEQ ID NO: 64585 - protein, 10 aa, synthetic construct
DRDRGDRDYL

SEQ ID NO: 64586 - protein, 10 aa, synthetic construct
DRDRGDYSSV

SEQ ID NO: 64587 - protein, 10 aa, synthetic construct
DRDRGDLTVT

SEQ ID NO: 64588 - protein, 10 aa, synthetic construct
DRDRGDLIGR

SEQ ID NO: 64589 - protein, 10 aa, synthetic construct
DRERGDHVNL

SEQ ID NO: 64590 - protein, 10 aa, synthetic construct
DRERGDRDYL

SEQ ID NO: 64591 - protein, 10 aa, synthetic construct
DRERGDYSSV

SEQ ID NO: 64592 - protein, 10 aa, synthetic construct
DRERGDLTVT

SEQ ID NO: 64593 - protein, 10 aa, synthetic construct
DRERGDLIGR

SEQ ID NO: 64594 - protein, 10 aa, synthetic construct
TLERGDRGVV

SEQ ID NO: 64595 - protein, 10 aa, synthetic construct
DHGRGDHVNL

SEQ ID NO: 64596 - protein, 10 aa, synthetic construct
DHGRGDRDYL

SEQ ID NO: 64597 - protein, 10 aa, synthetic construct
DHGRGDYSSV

SEQ ID NO: 64598 - protein, 10 aa, synthetic construct
DHGRGDLTVT

SEQ ID NO: 64599 - protein, 10 aa, synthetic construct
DHGRGDLIGR

SEQ ID NO: 64600 - protein, 10 aa, synthetic construct
DHARGDHVNL

SEQ ID NO: 64601 - protein, 10 aa, synthetic construct
DHARGDRDYL

SEQ ID NO: 64602 - protein, 10 aa, synthetic construct
DHARGDYSSV

SEQ ID NO: 64603 - protein, 10 aa, synthetic construct
DHARGDLTVT

SEQ ID NO: 64604 - protein, 10 aa, synthetic construct
DHARGDLIGR

SEQ ID NO: 64605 - protein, 10 aa, synthetic construct
TLERGDRSQT

SEQ ID NO: 64606 - protein, 10 aa, synthetic construct
DHVRGDHGVL

SEQ ID NO: 64607 - protein, 10 aa, synthetic construct
DHVRGDHVNL

SEQ ID NO: 64608 - protein, 10 aa, synthetic construct
DHVRGDYVGL

SEQ ID NO: 64609 - protein, 10 aa, synthetic construct
DHVRGDYSSV

SEQ ID NO: 64610 - protein, 10 aa, synthetic construct
DHVRGDQSTL

SEQ ID NO: 64611 - protein, 10 aa, synthetic construct
DHVRGDLLLS

SEQ ID NO: 64612 - protein, 10 aa, synthetic construct
DHPRGDHVNL

SEQ ID NO: 64613 - protein, 10 aa, synthetic construct
DHPRGDRDYL

SEQ ID NO: 64614 - protein, 10 aa, synthetic construct
DHPRGDYSSV

SEQ ID NO: 64615 - protein, 10 aa, synthetic construct
DHPRGDLTVT

SEQ ID NO: 64616 - protein, 10 aa, synthetic construct
TMGRGDRGVV

SEQ ID NO: 64617 - protein, 10 aa, synthetic construct
DHPRGDLIGR

SEQ ID NO: 64618 - protein, 10 aa, synthetic construct
DHLRGDHGVL

SEQ ID NO: 64619 - protein, 10 aa, synthetic construct
DHLRGDHVNL

SEQ ID NO: 64620 - protein, 10 aa, synthetic construct
DHLRGDYVGL

SEQ ID NO: 64621 - protein, 10 aa, synthetic construct
DHLRGDYSSV

SEQ ID NO: 64622 - protein, 10 aa, synthetic construct
DHLRGDQSTL

SEQ ID NO: 64623 - protein, 10 aa, synthetic construct
DHLRGDLLLS

SEQ ID NO: 64624 - protein, 10 aa, synthetic construct
DHIRGDRGQI

SEQ ID NO: 64625 - protein, 10 aa, synthetic construct
DHIRGDRQGI

SEQ ID NO: 64626 - protein, 10 aa, synthetic construct
DHIRGDRSVV

SEQ ID NO: 64627 - protein, 10 aa, synthetic construct
APPRGDLTVT

SEQ ID NO: 64628 - protein, 10 aa, synthetic construct
TMARGDRGVV

SEQ ID NO: 64629 - protein, 10 aa, synthetic construct
DHIRGDRGVV

SEQ ID NO: 64630 - protein, 10 aa, synthetic construct
DHIRGDYVGL

SEQ ID NO: 64631 - protein, 10 aa, synthetic construct
DHIRGDQSTL

SEQ ID NO: 64632 - protein, 10 aa, synthetic construct
DHIRGDRSQT

SEQ ID NO: 64633 - protein, 10 aa, synthetic construct
DHIRGDLLLS

SEQ ID NO: 64634 - protein, 10 aa, synthetic construct
DHMRGDRGQI

SEQ ID NO: 64635 - protein, 10 aa, synthetic construct
DHMRGDRQGI

SEQ ID NO: 64636 - protein, 10 aa, synthetic construct
DHMRGDRSVV

SEQ ID NO: 64637 - protein, 10 aa, synthetic construct
DHMRGDRGVV

SEQ ID NO: 64638 - protein, 10 aa, synthetic construct
DHMRGDYVGL

SEQ ID NO: 64639 - protein, 10 aa, synthetic construct
TMVRGDRGVV

SEQ ID NO: 64640 - protein, 10 aa, synthetic construct
DHMRGDQSTL

SEQ ID NO: 64641 - protein, 10 aa, synthetic construct
DHMRGDRSQT

SEQ ID NO: 64642 - protein, 10 aa, synthetic construct
DHMRGDLLLS

SEQ ID NO: 64643 - protein, 10 aa, synthetic construct
DHWRGDHGVL

SEQ ID NO: 64644 - protein, 10 aa, synthetic construct
DHWRGDHVNL

SEQ ID NO: 64645 - protein, 10 aa, synthetic construct
DHWRGDYVGL

SEQ ID NO: 64646 - protein, 10 aa, synthetic construct
DHWRGDYSSV

SEQ ID NO: 64647 - protein, 10 aa, synthetic construct
DHWRGDQSTL

SEQ ID NO: 64648 - protein, 10 aa, synthetic construct
DHWRGDLLLS

SEQ ID NO: 64649 - protein, 10 aa, synthetic construct
DHFRGDRGQI

SEQ ID NO: 64650 - protein, 10 aa, synthetic construct
TMVRGDLTVT

SEQ ID NO: 64651 - protein, 10 aa, synthetic construct
DHFRGDRQGI

SEQ ID NO: 64652 - protein, 10 aa, synthetic construct
DHFRGDRSVV

SEQ ID NO: 64653 - protein, 10 aa, synthetic construct
DHFRGDRGVV

SEQ ID NO: 64654 - protein, 10 aa, synthetic construct
DHFRGDYVGL

SEQ ID NO: 64655 - protein, 10 aa, synthetic construct
DHFRGDQSTL

SEQ ID NO: 64656 - protein, 10 aa, synthetic construct
DHFRGDRSQT

SEQ ID NO: 64657 - protein, 10 aa, synthetic construct
DHFRGDLLLS

SEQ ID NO: 64658 - protein, 10 aa, synthetic construct
DHKRGDRGQI

SEQ ID NO: 64659 - protein, 10 aa, synthetic construct
DHKRGDRQGI

SEQ ID NO: 64660 - protein, 10 aa, synthetic construct
DHKRGDRSVV

SEQ ID NO: 64661 - protein, 10 aa, synthetic construct
TMVRGDLLLS

SEQ ID NO: 64662 - protein, 10 aa, synthetic construct
DHKRGDRGVV

SEQ ID NO: 64663 - protein, 10 aa, synthetic construct
DHKRGDYVGL

SEQ ID NO: 64664 - protein, 10 aa, synthetic construct
DHKRGDQSTL

SEQ ID NO: 64665 - protein, 10 aa, synthetic construct
DHKRGDRSQT

SEQ ID NO: 64666 - protein, 10 aa, synthetic construct
DHKRGDLLLS

SEQ ID NO: 64667 - protein, 10 aa, synthetic construct
DHRRGDHVNL

SEQ ID NO: 64668 - protein, 10 aa, synthetic construct
DHRRGDRDYL

SEQ ID NO: 64669 - protein, 10 aa, synthetic construct
DHRRGDYSSV

SEQ ID NO: 64670 - protein, 10 aa, synthetic construct
DHRRGDLTVT

SEQ ID NO: 64671 - protein, 10 aa, synthetic construct
DHRRGDLIGR

SEQ ID NO: 64672 - protein, 10 aa, synthetic construct
TMPRGDRGVV

SEQ ID NO: 64673 - protein, 10 aa, synthetic construct
DHHRGDHGVL

SEQ ID NO: 64674 - protein, 10 aa, synthetic construct
DHHRGDHVNL

SEQ ID NO: 64675 - protein, 10 aa, synthetic construct
DHHRGDYVGL

SEQ ID NO: 64676 - protein, 10 aa, synthetic construct
DHHRGDYSSV

SEQ ID NO: 64677 - protein, 10 aa, synthetic construct
DHHRGDQSTL

SEQ ID NO: 64678 - protein, 10 aa, synthetic construct
DHHRGDLLLS

SEQ ID NO: 64679 - protein, 10 aa, synthetic construct
DHSRGDHGVL

SEQ ID NO: 64680 - protein, 10 aa, synthetic construct
DHSRGDHVNL

SEQ ID NO: 64681 - protein, 10 aa, synthetic construct
DHSRGDYVGL

SEQ ID NO: 64682 - protein, 10 aa, synthetic construct
DHSRGDYSSV

SEQ ID NO: 64683 - protein, 10 aa, synthetic construct
TMLRGDRGVV

SEQ ID NO: 64684 - protein, 10 aa, synthetic construct
DHSRGDQSTL

SEQ ID NO: 64685 - protein, 10 aa, synthetic construct
DHSRGDLLLS

SEQ ID NO: 64686 - protein, 10 aa, synthetic construct
DHTRGDHGVL

SEQ ID NO: 64687 - protein, 10 aa, synthetic construct
DHTRGDHVNL

SEQ ID NO: 64688 - protein, 10 aa, synthetic construct
DHTRGDYVGL

SEQ ID NO: 64689 - protein, 10 aa, synthetic construct
DHTRGDYSSV

SEQ ID NO: 64690 - protein, 10 aa, synthetic construct
DHTRGDQSTL

SEQ ID NO: 64691 - protein, 10 aa, synthetic construct
DHTRGDLLLS

SEQ ID NO: 64692 - protein, 10 aa, synthetic construct
DHYRGDRGQI

SEQ ID NO: 64693 - protein, 10 aa, synthetic construct
DHYRGDRQGI

SEQ ID NO: 64694 - protein, 10 aa, synthetic construct
TMLRGDLTVT

SEQ ID NO: 64695 - protein, 10 aa, synthetic construct
DHYRGDRSVV

SEQ ID NO: 64696 - protein, 10 aa, synthetic construct
DHYRGDRGVV

SEQ ID NO: 64697 - protein, 10 aa, synthetic construct
DHYRGDYVGL

SEQ ID NO: 64698 - protein, 10 aa, synthetic construct
DHYRGDQSTL

SEQ ID NO: 64699 - protein, 10 aa, synthetic construct
DHYRGDRSQT

SEQ ID NO: 64700 - protein, 10 aa, synthetic construct
DHYRGDLLLS

SEQ ID NO: 64701 - protein, 10 aa, synthetic construct
DHNRGDRGQI

SEQ ID NO: 64702 - protein, 10 aa, synthetic construct
DHNRGDRQGI

SEQ ID NO: 64703 - protein, 10 aa, synthetic construct
DHNRGDRSVV

SEQ ID NO: 64704 - protein, 10 aa, synthetic construct
DHNRGDRGVV

SEQ ID NO: 64705 - protein, 10 aa, synthetic construct
TMLRGDLLLS

SEQ ID NO: 64706 - protein, 10 aa, synthetic construct
DHNRGDYVGL

SEQ ID NO: 64707 - protein, 10 aa, synthetic construct
DHNRGDQSTL

SEQ ID NO: 64708 - protein, 10 aa, synthetic construct
DHNRGDRSQT

SEQ ID NO: 64709 - protein, 10 aa, synthetic construct
DHNRGDLLLS

SEQ ID NO: 64710 - protein, 10 aa, synthetic construct
DHQRGDHGVL

SEQ ID NO: 64711 - protein, 10 aa, synthetic construct
DHQRGDHVNL

SEQ ID NO: 64712 - protein, 10 aa, synthetic construct
DHQRGDYVGL

SEQ ID NO: 64713 - protein, 10 aa, synthetic construct
DHQRGDYSSV

SEQ ID NO: 64714 - protein, 10 aa, synthetic construct
DHQRGDQSTL

SEQ ID NO: 64715 - protein, 10 aa, synthetic construct
DHQRGDLLLS

SEQ ID NO: 64716 - protein, 10 aa, synthetic construct
TMRRGDRGVV

SEQ ID NO: 64717 - protein, 10 aa, synthetic construct
DHDRGDHGVL

SEQ ID NO: 64718 - protein, 10 aa, synthetic construct
DHDRGDHVNL

SEQ ID NO: 64719 - protein, 10 aa, synthetic construct
DHDRGDYVGL

SEQ ID NO: 64720 - protein, 10 aa, synthetic construct
DHDRGDYSSV

SEQ ID NO: 64721 - protein, 10 aa, synthetic construct
DHDRGDQSTL

SEQ ID NO: 64722 - protein, 10 aa, synthetic construct
DHDRGDLLLS

SEQ ID NO: 64723 - protein, 10 aa, synthetic construct
DHERGDHGVL

SEQ ID NO: 64724 - protein, 10 aa, synthetic construct
DHERGDHVNL

SEQ ID NO: 64725 - protein, 10 aa, synthetic construct
DHERGDYVGL

SEQ ID NO: 64726 - protein, 10 aa, synthetic construct
DHERGDYSSV

SEQ ID NO: 64727 - protein, 10 aa, synthetic construct
TMSRGDRGVV

SEQ ID NO: 64728 - protein, 10 aa, synthetic construct
DHERGDQSTL

SEQ ID NO: 64729 - protein, 10 aa, synthetic construct
DHERGDLLLS

SEQ ID NO: 64730 - protein, 10 aa, synthetic construct
DSGRGDYNSL

SEQ ID NO: 64731 - protein, 10 aa, synthetic construct
DSGRGDYTSV

SEQ ID NO: 64732 - protein, 10 aa, synthetic construct
DSGRGDYTSM

SEQ ID NO: 64733 - protein, 10 aa, synthetic construct
DSGRGDFQNT

SEQ ID NO: 64734 - protein, 10 aa, synthetic construct
DSARGDYNSL

SEQ ID NO: 64735 - protein, 10 aa, synthetic construct
DSARGDYTSV

SEQ ID NO: 64736 - protein, 10 aa, synthetic construct
DSARGDYTSM

SEQ ID NO: 64737 - protein, 10 aa, synthetic construct
DSARGDFQNT

SEQ ID NO: 64738 - protein, 10 aa, synthetic construct
APPRGDLIGR

SEQ ID NO: 64739 - protein, 10 aa, synthetic construct
TMSRGDLTVT

SEQ ID NO: 64740 - protein, 10 aa, synthetic construct
DSVRGDRDYL

SEQ ID NO: 64741 - protein, 10 aa, synthetic construct
DSVRGDYTSV

SEQ ID NO: 64742 - protein, 10 aa, synthetic construct
DSVRGDLTVT

SEQ ID NO: 64743 - protein, 10 aa, synthetic construct
DSVRGDLIGR

SEQ ID NO: 64744 - protein, 10 aa, synthetic construct
DSLRGDRDYL

SEQ ID NO: 64745 - protein, 10 aa, synthetic construct
DSLRGDYTSV

SEQ ID NO: 64746 - protein, 10 aa, synthetic construct
DSLRGDLTVT

SEQ ID NO: 64747 - protein, 10 aa, synthetic construct
DSLRGDLIGR

SEQ ID NO: 64748 - protein, 10 aa, synthetic construct
DSIRGDHGVL

SEQ ID NO: 64749 - protein, 10 aa, synthetic construct
DSIRGDHVNL

SEQ ID NO: 64750 - protein, 10 aa, synthetic construct
TMSRGDLLLS

SEQ ID NO: 64751 - protein, 10 aa, synthetic construct
DSIRGDRDYL

SEQ ID NO: 64752 - protein, 10 aa, synthetic construct
DSIRGDYSSV

SEQ ID NO: 64753 - protein, 10 aa, synthetic construct
DSIRGDLTVT

SEQ ID NO: 64754 - protein, 10 aa, synthetic construct
DSMRGDHGVL

SEQ ID NO: 64755 - protein, 10 aa, synthetic construct
DSMRGDHVNL

SEQ ID NO: 64756 - protein, 10 aa, synthetic construct
DSMRGDRDYL

SEQ ID NO: 64757 - protein, 10 aa, synthetic construct
DSMRGDYSSV

SEQ ID NO: 64758 - protein, 10 aa, synthetic construct
DSMRGDLTVT

SEQ ID NO: 64759 - protein, 10 aa, synthetic construct
DSWRGDRDYL

SEQ ID NO: 64760 - protein, 10 aa, synthetic construct
DSWRGDYTSV

SEQ ID NO: 64761 - protein, 10 aa, synthetic construct
TWGRGDHGVL

SEQ ID NO: 64762 - protein, 10 aa, synthetic construct
DSWRGDLTVT

SEQ ID NO: 64763 - protein, 10 aa, synthetic construct
DSWRGDLIGR

SEQ ID NO: 64764 - protein, 10 aa, synthetic construct
DSFRGDHGVL

SEQ ID NO: 64765 - protein, 10 aa, synthetic construct
DSFRGDHVNL

SEQ ID NO: 64766 - protein, 10 aa, synthetic construct
DSFRGDRDYL

SEQ ID NO: 64767 - protein, 10 aa, synthetic construct
DSFRGDYSSV

SEQ ID NO: 64768 - protein, 10 aa, synthetic construct
DSFRGDLTVT

SEQ ID NO: 64769 - protein, 10 aa, synthetic construct
DSKRGDHGVL

SEQ ID NO: 64770 - protein, 10 aa, synthetic construct
DSKRGDHVNL

SEQ ID NO: 64771 - protein, 10 aa, synthetic construct
DSKRGDRDYL

SEQ ID NO: 64772 - protein, 10 aa, synthetic construct
TWGRGDRGQI

SEQ ID NO: 64773 - protein, 10 aa, synthetic construct
DSKRGDYSSV

SEQ ID NO: 64774 - protein, 10 aa, synthetic construct
DSKRGDLTVT

SEQ ID NO: 64775 - protein, 10 aa, synthetic construct
DSRRGDYNSL

SEQ ID NO: 64776 - protein, 10 aa, synthetic construct
DSRRGDYTSV

SEQ ID NO: 64777 - protein, 10 aa, synthetic construct
DSRRGDYTSM

SEQ ID NO: 64778 - protein, 10 aa, synthetic construct
DSRRGDFQNT

SEQ ID NO: 64779 - protein, 10 aa, synthetic construct
DSHRGDRDYL

SEQ ID NO: 64780 - protein, 10 aa, synthetic construct
DSHRGDYTSV

SEQ ID NO: 64781 - protein, 10 aa, synthetic construct
DSHRGDLTVT

SEQ ID NO: 64782 - protein, 10 aa, synthetic construct
DSHRGDLIGR

SEQ ID NO: 64783 - protein, 10 aa, synthetic construct
TWGRGDRQGI

SEQ ID NO: 64784 - protein, 10 aa, synthetic construct
DSSRGDRDYL

SEQ ID NO: 64785 - protein, 10 aa, synthetic construct
DSSRGDYTSV

SEQ ID NO: 64786 - protein, 10 aa, synthetic construct
DSSRGDLTVT

SEQ ID NO: 64787 - protein, 10 aa, synthetic construct
DSSRGDLIGR

SEQ ID NO: 64788 - protein, 10 aa, synthetic construct
DSTRGDRDYL

SEQ ID NO: 64789 - protein, 10 aa, synthetic construct
DSTRGDYTSV

SEQ ID NO: 64790 - protein, 10 aa, synthetic construct
DSTRGDLTVT

SEQ ID NO: 64791 - protein, 10 aa, synthetic construct
DSTRGDLIGR

SEQ ID NO: 64792 - protein, 10 aa, synthetic construct
DSYRGDHGVL

SEQ ID NO: 64793 - protein, 10 aa, synthetic construct
DSYRGDHVNL

SEQ ID NO: 64794 - protein, 10 aa, synthetic construct
TWGRGDRSVV

SEQ ID NO: 64795 - protein, 10 aa, synthetic construct
DSYRGDRDYL

SEQ ID NO: 64796 - protein, 10 aa, synthetic construct
DSYRGDYSSV

SEQ ID NO: 64797 - protein, 10 aa, synthetic construct
DSYRGDLTVT

SEQ ID NO: 64798 - protein, 10 aa, synthetic construct
DSNRGDHGVL

SEQ ID NO: 64799 - protein, 10 aa, synthetic construct
DSNRGDHVNL

SEQ ID NO: 64800 - protein, 10 aa, synthetic construct
DSNRGDRDYL

SEQ ID NO: 64801 - protein, 10 aa, synthetic construct
DSNRGDYSSV

SEQ ID NO: 64802 - protein, 10 aa, synthetic construct
DSNRGDLTVT

SEQ ID NO: 64803 - protein, 10 aa, synthetic construct
DSQRGDRDYL

SEQ ID NO: 64804 - protein, 10 aa, synthetic construct
DSQRGDYTSV

SEQ ID NO: 64805 - protein, 10 aa, synthetic construct
TWGRGDLTVT

SEQ ID NO: 64806 - protein, 10 aa, synthetic construct
DSQRGDLTVT

SEQ ID NO: 64807 - protein, 10 aa, synthetic construct
DSQRGDLIGR

SEQ ID NO: 64808 - protein, 10 aa, synthetic construct
DSDRGDRDYL

SEQ ID NO: 64809 - protein, 10 aa, synthetic construct
DSDRGDYTSV

SEQ ID NO: 64810 - protein, 10 aa, synthetic construct
DSDRGDLTVT

SEQ ID NO: 64811 - protein, 10 aa, synthetic construct
DSDRGDLIGR

SEQ ID NO: 64812 - protein, 10 aa, synthetic construct
DSERGDRDYL

SEQ ID NO: 64813 - protein, 10 aa, synthetic construct
DSERGDYTSV

SEQ ID NO: 64814 - protein, 10 aa, synthetic construct
DSERGDLTVT

SEQ ID NO: 64815 - protein, 10 aa, synthetic construct
DSERGDLIGR

SEQ ID NO: 64816 - protein, 10 aa, synthetic construct
TWGRGDLIGR

SEQ ID NO: 64817 - protein, 10 aa, synthetic construct
DTGRGDHVNL

SEQ ID NO: 64818 - protein, 10 aa, synthetic construct
DTGRGDRDYL

SEQ ID NO: 64819 - protein, 10 aa, synthetic construct
DTGRGDYSSV

SEQ ID NO: 64820 - protein, 10 aa, synthetic construct
DTGRGDLTVT

SEQ ID NO: 64821 - protein, 10 aa, synthetic construct
DTGRGDLIGR

SEQ ID NO: 64822 - protein, 10 aa, synthetic construct
DTARGDHVNL

SEQ ID NO: 64823 - protein, 10 aa, synthetic construct
DTARGDRDYL

SEQ ID NO: 64824 - protein, 10 aa, synthetic construct
DTARGDYSSV

SEQ ID NO: 64825 - protein, 10 aa, synthetic construct
DTARGDLTVT

SEQ ID NO: 64826 - protein, 10 aa, synthetic construct
DTARGDLIGR

SEQ ID NO: 64827 - protein, 10 aa, synthetic construct
TWGRGDRSQT

SEQ ID NO: 64828 - protein, 10 aa, synthetic construct
DTVRGDHGVL

SEQ ID NO: 64829 - protein, 10 aa, synthetic construct
DTVRGDHVNL

SEQ ID NO: 64830 - protein, 10 aa, synthetic construct
DTVRGDYVGL

SEQ ID NO: 64831 - protein, 10 aa, synthetic construct
DTVRGDYSSV

SEQ ID NO: 64832 - protein, 10 aa, synthetic construct
DTVRGDQSTL

SEQ ID NO: 64833 - protein, 10 aa, synthetic construct
DTVRGDLLLS

SEQ ID NO: 64834 - protein, 10 aa, synthetic construct
DTPRGDHVNL

SEQ ID NO: 64835 - protein, 10 aa, synthetic construct
DTPRGDRDYL

SEQ ID NO: 64836 - protein, 10 aa, synthetic construct
DTPRGDYSSV

SEQ ID NO: 64837 - protein, 10 aa, synthetic construct
DTPRGDLTVT

SEQ ID NO: 64838 - protein, 10 aa, synthetic construct
TWGRGDLLLS

SEQ ID NO: 64839 - protein, 10 aa, synthetic construct
DTPRGDLIGR

SEQ ID NO: 64840 - protein, 10 aa, synthetic construct
DTLRGDHGVL

SEQ ID NO: 64841 - protein, 10 aa, synthetic construct
DTLRGDHVNL

SEQ ID NO: 64842 - protein, 10 aa, synthetic construct
DTLRGDYVGL

SEQ ID NO: 64843 - protein, 10 aa, synthetic construct
DTLRGDYSSV

SEQ ID NO: 64844 - protein, 10 aa, synthetic construct
DTLRGDQSTL

SEQ ID NO: 64845 - protein, 10 aa, synthetic construct
DTLRGDLLLS

SEQ ID NO: 64846 - protein, 10 aa, synthetic construct
DTIRGDRGQI

SEQ ID NO: 64847 - protein, 10 aa, synthetic construct
DTIRGDRQGI

SEQ ID NO: 64848 - protein, 10 aa, synthetic construct
DTIRGDRSVV

SEQ ID NO: 64849 - protein, 10 aa, synthetic construct
APPRGDRSQT

SEQ ID NO: 64850 - protein, 10 aa, synthetic construct
TWARGDHGVL

SEQ ID NO: 64851 - protein, 10 aa, synthetic construct
DTIRGDRGVV

SEQ ID NO: 64852 - protein, 10 aa, synthetic construct
DTIRGDYVGL

SEQ ID NO: 64853 - protein, 10 aa, synthetic construct
DTIRGDQSTL

SEQ ID NO: 64854 - protein, 10 aa, synthetic construct
DTIRGDRSQT

SEQ ID NO: 64855 - protein, 10 aa, synthetic construct
DTIRGDLLLS

SEQ ID NO: 64856 - protein, 10 aa, synthetic construct
DTMRGDRGQI

SEQ ID NO: 64857 - protein, 10 aa, synthetic construct
DTMRGDRQGI

SEQ ID NO: 64858 - protein, 10 aa, synthetic construct
DTMRGDRSVV

SEQ ID NO: 64859 - protein, 10 aa, synthetic construct
DTMRGDRGVV

SEQ ID NO: 64860 - protein, 10 aa, synthetic construct
DTMRGDYVGL

SEQ ID NO: 64861 - protein, 10 aa, synthetic construct
TWARGDRGQI

SEQ ID NO: 64862 - protein, 10 aa, synthetic construct
DTMRGDQSTL

SEQ ID NO: 64863 - protein, 10 aa, synthetic construct
DTMRGDRSQT

SEQ ID NO: 64864 - protein, 10 aa, synthetic construct
DTMRGDLLLS

SEQ ID NO: 64865 - protein, 10 aa, synthetic construct
DTWRGDHGVL

SEQ ID NO: 64866 - protein, 10 aa, synthetic construct
DTWRGDHVNL

SEQ ID NO: 64867 - protein, 10 aa, synthetic construct
DTWRGDYVGL

SEQ ID NO: 64868 - protein, 10 aa, synthetic construct
DTWRGDYSSV

SEQ ID NO: 64869 - protein, 10 aa, synthetic construct
DTWRGDQSTL

SEQ ID NO: 64870 - protein, 10 aa, synthetic construct
DTWRGDLLLS

SEQ ID NO: 64871 - protein, 10 aa, synthetic construct
DTFRGDRGQI

SEQ ID NO: 64872 - protein, 10 aa, synthetic construct
TWARGDRQGI

SEQ ID NO: 64873 - protein, 10 aa, synthetic construct
DTFRGDRQGI

SEQ ID NO: 64874 - protein, 10 aa, synthetic construct
DTFRGDRSVV

SEQ ID NO: 64875 - protein, 10 aa, synthetic construct
DTFRGDRGVV

SEQ ID NO: 64876 - protein, 10 aa, synthetic construct
DTFRGDYVGL

SEQ ID NO: 64877 - protein, 10 aa, synthetic construct
DTFRGDQSTL

SEQ ID NO: 64878 - protein, 10 aa, synthetic construct
DTFRGDRSQT

SEQ ID NO: 64879 - protein, 10 aa, synthetic construct
DTFRGDLLLS

SEQ ID NO: 64880 - protein, 10 aa, synthetic construct
DTKRGDRGQI

SEQ ID NO: 64881 - protein, 10 aa, synthetic construct
DTKRGDRQGI

SEQ ID NO: 64882 - protein, 10 aa, synthetic construct
DTKRGDRSVV

SEQ ID NO: 64883 - protein, 10 aa, synthetic construct
TWARGDRSVV

SEQ ID NO: 64884 - protein, 10 aa, synthetic construct
DTKRGDRGVV

SEQ ID NO: 64885 - protein, 10 aa, synthetic construct
DTKRGDYVGL

SEQ ID NO: 64886 - protein, 10 aa, synthetic construct
DTKRGDQSTL

SEQ ID NO: 64887 - protein, 10 aa, synthetic construct
DTKRGDRSQT

SEQ ID NO: 64888 - protein, 10 aa, synthetic construct
DTKRGDLLLS

SEQ ID NO: 64889 - protein, 10 aa, synthetic construct
DTRRGDHVNL

SEQ ID NO: 64890 - protein, 10 aa, synthetic construct
DTRRGDRDYL

SEQ ID NO: 64891 - protein, 10 aa, synthetic construct
DTRRGDYSSV

SEQ ID NO: 64892 - protein, 10 aa, synthetic construct
DTRRGDLTVT

SEQ ID NO: 64893 - protein, 10 aa, synthetic construct
DTRRGDLIGR

SEQ ID NO: 64894 - protein, 10 aa, synthetic construct
TWARGDLTVT

SEQ ID NO: 64895 - protein, 10 aa, synthetic construct
DTHRGDHGVL

SEQ ID NO: 64896 - protein, 10 aa, synthetic construct
DTHRGDHVNL

SEQ ID NO: 64897 - protein, 10 aa, synthetic construct
DTHRGDYVGL

SEQ ID NO: 64898 - protein, 10 aa, synthetic construct
DTHRGDYSSV

SEQ ID NO: 64899 - protein, 10 aa, synthetic construct
DTHRGDQSTL

SEQ ID NO: 64900 - protein, 10 aa, synthetic construct
DTHRGDLLLS

SEQ ID NO: 64901 - protein, 10 aa, synthetic construct
DTSRGDHGVL

SEQ ID NO: 64902 - protein, 10 aa, synthetic construct
DTSRGDHVNL

SEQ ID NO: 64903 - protein, 10 aa, synthetic construct
DTSRGDYVGL

SEQ ID NO: 64904 - protein, 10 aa, synthetic construct
DTSRGDYSSV

SEQ ID NO: 64905 - protein, 10 aa, synthetic construct
TWARGDLIGR

SEQ ID NO: 64906 - protein, 10 aa, synthetic construct
DTSRGDQSTL

SEQ ID NO: 64907 - protein, 10 aa, synthetic construct
DTSRGDLLLS

SEQ ID NO: 64908 - protein, 10 aa, synthetic construct
DTTRGDHGVL

SEQ ID NO: 64909 - protein, 10 aa, synthetic construct
DTTRGDHVNL

SEQ ID NO: 64910 - protein, 10 aa, synthetic construct
DTTRGDYVGL

SEQ ID NO: 64911 - protein, 10 aa, synthetic construct
DTTRGDYSSV

SEQ ID NO: 64912 - protein, 10 aa, synthetic construct
DTTRGDQSTL

SEQ ID NO: 64913 - protein, 10 aa, synthetic construct
DTTRGDLLLS

SEQ ID NO: 64914 - protein, 10 aa, synthetic construct
DTYRGDRGQI

SEQ ID NO: 64915 - protein, 10 aa, synthetic construct
DTYRGDRQGI

SEQ ID NO: 64916 - protein, 10 aa, synthetic construct
TWARGDRSQT

SEQ ID NO: 64917 - protein, 10 aa, synthetic construct
DTYRGDRSVV

SEQ ID NO: 64918 - protein, 10 aa, synthetic construct
DTYRGDRGVV

SEQ ID NO: 64919 - protein, 10 aa, synthetic construct
DTYRGDYVGL

SEQ ID NO: 64920 - protein, 10 aa, synthetic construct
DTYRGDQSTL

SEQ ID NO: 64921 - protein, 10 aa, synthetic construct
DTYRGDRSQT

SEQ ID NO: 64922 - protein, 10 aa, synthetic construct
DTYRGDLLLS

SEQ ID NO: 64923 - protein, 10 aa, synthetic construct
DTNRGDRGQI

SEQ ID NO: 64924 - protein, 10 aa, synthetic construct
DTNRGDRQGI

SEQ ID NO: 64925 - protein, 10 aa, synthetic construct
DTNRGDRSVV

SEQ ID NO: 64926 - protein, 10 aa, synthetic construct
DTNRGDRGVV

SEQ ID NO: 64927 - protein, 10 aa, synthetic construct
TWARGDLLLS

SEQ ID NO: 64928 - protein, 10 aa, synthetic construct
DTNRGDYVGL

SEQ ID NO: 64929 - protein, 10 aa, synthetic construct
DTNRGDQSTL

SEQ ID NO: 64930 - protein, 10 aa, synthetic construct
DTNRGDRSQT

SEQ ID NO: 64931 - protein, 10 aa, synthetic construct
DTNRGDLLLS

SEQ ID NO: 64932 - protein, 10 aa, synthetic construct
DTQRGDHGVL

SEQ ID NO: 64933 - protein, 10 aa, synthetic construct
DTQRGDHVNL

SEQ ID NO: 64934 - protein, 10 aa, synthetic construct
DTQRGDYVGL

SEQ ID NO: 64935 - protein, 10 aa, synthetic construct
DTQRGDYSSV

SEQ ID NO: 64936 - protein, 10 aa, synthetic construct
DTQRGDQSTL

SEQ ID NO: 64937 - protein, 10 aa, synthetic construct
DTQRGDLLLS

SEQ ID NO: 64938 - protein, 10 aa, synthetic construct
TWVRGDHGVL

SEQ ID NO: 64939 - protein, 10 aa, synthetic construct
DTDRGDHGVL

SEQ ID NO: 64940 - protein, 10 aa, synthetic construct
DTDRGDHVNL

SEQ ID NO: 64941 - protein, 10 aa, synthetic construct
DTDRGDYVGL

SEQ ID NO: 64942 - protein, 10 aa, synthetic construct
DTDRGDYSSV

SEQ ID NO: 64943 - protein, 10 aa, synthetic construct
DTDRGDQSTL

SEQ ID NO: 64944 - protein, 10 aa, synthetic construct
DTDRGDLLLS

SEQ ID NO: 64945 - protein, 10 aa, synthetic construct
DTERGDHGVL

SEQ ID NO: 64946 - protein, 10 aa, synthetic construct
DTERGDHVNL

SEQ ID NO: 64947 - protein, 10 aa, synthetic construct
DTERGDYVGL

SEQ ID NO: 64948 - protein, 10 aa, synthetic construct
DTERGDYSSV

SEQ ID NO: 64949 - protein, 10 aa, synthetic construct
TWVRGDRGQI

SEQ ID NO: 64950 - protein, 10 aa, synthetic construct
DTERGDQSTL

SEQ ID NO: 64951 - protein, 10 aa, synthetic construct
DTERGDLLLS

SEQ ID NO: 64952 - protein, 10 aa, synthetic construct
DYGRGDHGVL

SEQ ID NO: 64953 - protein, 10 aa, synthetic construct
DYGRGDHVNL

SEQ ID NO: 64954 - protein, 10 aa, synthetic construct
DYGRGDYVGL

SEQ ID NO: 64955 - protein, 10 aa, synthetic construct
DYGRGDYSSV

SEQ ID NO: 64956 - protein, 10 aa, synthetic construct
DYGRGDQSTL

SEQ ID NO: 64957 - protein, 10 aa, synthetic construct
DYGRGDLLLS

SEQ ID NO: 64958 - protein, 10 aa, synthetic construct
DYARGDHGVL

SEQ ID NO: 64959 - protein, 10 aa, synthetic construct
DYARGDHVNL

SEQ ID NO: 64960 - protein, 10 aa, synthetic construct
APPRGDLLLS

SEQ ID NO: 64961 - protein, 10 aa, synthetic construct
TWVRGDRQGI

SEQ ID NO: 64962 - protein, 10 aa, synthetic construct
DYARGDYVGL

SEQ ID NO: 64963 - protein, 10 aa, synthetic construct
DYARGDYSSV

SEQ ID NO: 64964 - protein, 10 aa, synthetic construct
DYARGDQSTL

SEQ ID NO: 64965 - protein, 10 aa, synthetic construct
DYARGDLLLS

SEQ ID NO: 64966 - protein, 10 aa, synthetic construct
DYVRGDRGQI

SEQ ID NO: 64967 - protein, 10 aa, synthetic construct
DYVRGDRQGI

SEQ ID NO: 64968 - protein, 10 aa, synthetic construct
DYVRGDRSVV

SEQ ID NO: 64969 - protein, 10 aa, synthetic construct
DYVRGDRGVV

SEQ ID NO: 64970 - protein, 10 aa, synthetic construct
DYVRGDYVGL

SEQ ID NO: 64971 - protein, 10 aa, synthetic construct
DYVRGDQSTL

SEQ ID NO: 64972 - protein, 10 aa, synthetic construct
TWVRGDRSVV

SEQ ID NO: 64973 - protein, 10 aa, synthetic construct
DYVRGDRSQT

SEQ ID NO: 64974 - protein, 10 aa, synthetic construct
DYVRGDLLLS

SEQ ID NO: 64975 - protein, 10 aa, synthetic construct
DYPRGDHGVL

SEQ ID NO: 64976 - protein, 10 aa, synthetic construct
DYPRGDHVNL

SEQ ID NO: 64977 - protein, 10 aa, synthetic construct
DYPRGDYVGL

SEQ ID NO: 64978 - protein, 10 aa, synthetic construct
DYPRGDYSSV

SEQ ID NO: 64979 - protein, 10 aa, synthetic construct
DYPRGDQSTL

SEQ ID NO: 64980 - protein, 10 aa, synthetic construct
DYPRGDLLLS

SEQ ID NO: 64981 - protein, 10 aa, synthetic construct
DYLRGDRGQI

SEQ ID NO: 64982 - protein, 10 aa, synthetic construct
DYLRGDRQGI

SEQ ID NO: 64983 - protein, 10 aa, synthetic construct
TWVRGDLTVT

SEQ ID NO: 64984 - protein, 10 aa, synthetic construct
DYLRGDRSVV

SEQ ID NO: 64985 - protein, 10 aa, synthetic construct
DYLRGDRGVV

SEQ ID NO: 64986 - protein, 10 aa, synthetic construct
DYLRGDYVGL

SEQ ID NO: 64987 - protein, 10 aa, synthetic construct
DYLRGDQSTL

SEQ ID NO: 64988 - protein, 10 aa, synthetic construct
DYLRGDRSQT

SEQ ID NO: 64989 - protein, 10 aa, synthetic construct
DYLRGDLLLS

SEQ ID NO: 64990 - protein, 10 aa, synthetic construct
DYIRGDRSVV

SEQ ID NO: 64991 - protein, 10 aa, synthetic construct
DYIRGDRSQT

SEQ ID NO: 64992 - protein, 10 aa, synthetic construct
DYMRGDRSVV

SEQ ID NO: 64993 - protein, 10 aa, synthetic construct
DYMRGDRSQT

SEQ ID NO: 64994 - protein, 10 aa, synthetic construct
TWVRGDLIGR

SEQ ID NO: 64995 - protein, 10 aa, synthetic construct
DYWRGDRGQI

SEQ ID NO: 64996 - protein, 10 aa, synthetic construct
DYWRGDRQGI

SEQ ID NO: 64997 - protein, 10 aa, synthetic construct
DYWRGDRSVV

SEQ ID NO: 64998 - protein, 10 aa, synthetic construct
DYWRGDRGVV

SEQ ID NO: 64999 - protein, 10 aa, synthetic construct
DYWRGDYVGL

SEQ ID NO: 65000 - protein, 10 aa, synthetic construct
DYWRGDQSTL

SEQ ID NO: 65001 - protein, 10 aa, synthetic construct
DYWRGDRSQT

SEQ ID NO: 65002 - protein, 10 aa, synthetic construct
DYWRGDLLLS

SEQ ID NO: 65003 - protein, 10 aa, synthetic construct
DYFRGDRSVV

SEQ ID NO: 65004 - protein, 10 aa, synthetic construct
DYFRGDRSQT

SEQ ID NO: 65005 - protein, 10 aa, synthetic construct
TWVRGDRSQT

SEQ ID NO: 65006 - protein, 10 aa, synthetic construct
DYKRGDRSVV

SEQ ID NO: 65007 - protein, 10 aa, synthetic construct
DYKRGDRSQT

SEQ ID NO: 65008 - protein, 10 aa, synthetic construct
DYRRGDHGVL

SEQ ID NO: 65009 - protein, 10 aa, synthetic construct
DYRRGDHVNL

SEQ ID NO: 65010 - protein, 10 aa, synthetic construct
DYRRGDYVGL

SEQ ID NO: 65011 - protein, 10 aa, synthetic construct
DYRRGDYSSV

SEQ ID NO: 65012 - protein, 10 aa, synthetic construct
DYRRGDQSTL

SEQ ID NO: 65013 - protein, 10 aa, synthetic construct
DYRRGDLLLS

SEQ ID NO: 65014 - protein, 10 aa, synthetic construct
DYHRGDRGQI

SEQ ID NO: 65015 - protein, 10 aa, synthetic construct
DYHRGDRQGI

SEQ ID NO: 65016 - protein, 10 aa, synthetic construct
TWVRGDLLLS

SEQ ID NO: 65017 - protein, 10 aa, synthetic construct
DYHRGDRSVV

SEQ ID NO: 65018 - protein, 10 aa, synthetic construct
DYHRGDRGVV

SEQ ID NO: 65019 - protein, 10 aa, synthetic construct
DYHRGDYVGL

SEQ ID NO: 65020 - protein, 10 aa, synthetic construct
DYHRGDQSTL

SEQ ID NO: 65021 - protein, 10 aa, synthetic construct
DYHRGDRSQT

SEQ ID NO: 65022 - protein, 10 aa, synthetic construct
DYHRGDLLLS

SEQ ID NO: 65023 - protein, 10 aa, synthetic construct
DYSRGDRGQI

SEQ ID NO: 65024 - protein, 10 aa, synthetic construct
DYSRGDRQGI

SEQ ID NO: 65025 - protein, 10 aa, synthetic construct
DYSRGDRSVV

SEQ ID NO: 65026 - protein, 10 aa, synthetic construct
DYSRGDRGVV

SEQ ID NO: 65027 - protein, 10 aa, synthetic construct
TWPRGDHGVL

SEQ ID NO: 65028 - protein, 10 aa, synthetic construct
DYSRGDYVGL

SEQ ID NO: 65029 - protein, 10 aa, synthetic construct
DYSRGDQSTL

SEQ ID NO: 65030 - protein, 10 aa, synthetic construct
DYSRGDRSQT

SEQ ID NO: 65031 - protein, 10 aa, synthetic construct
DYSRGDLLLS

SEQ ID NO: 65032 - protein, 10 aa, synthetic construct
DYTRGDRGQI

SEQ ID NO: 65033 - protein, 10 aa, synthetic construct
DYTRGDRQGI

SEQ ID NO: 65034 - protein, 10 aa, synthetic construct
DYTRGDRSVV

SEQ ID NO: 65035 - protein, 10 aa, synthetic construct
DYTRGDRGVV

SEQ ID NO: 65036 - protein, 10 aa, synthetic construct
DYTRGDYVGL

SEQ ID NO: 65037 - protein, 10 aa, synthetic construct
DYTRGDQSTL

SEQ ID NO: 65038 - protein, 10 aa, synthetic construct
TWPRGDRGQI

SEQ ID NO: 65039 - protein, 10 aa, synthetic construct
DYTRGDRSQT

SEQ ID NO: 65040 - protein, 10 aa, synthetic construct
DYTRGDLLLS

SEQ ID NO: 65041 - protein, 10 aa, synthetic construct
DYYRGDRSVV

SEQ ID NO: 65042 - protein, 10 aa, synthetic construct
DYYRGDRSQT

SEQ ID NO: 65043 - protein, 10 aa, synthetic construct
DYNRGDRSVV

SEQ ID NO: 65044 - protein, 10 aa, synthetic construct
DYNRGDRSQT

SEQ ID NO: 65045 - protein, 10 aa, synthetic construct
DYQRGDRGQI

SEQ ID NO: 65046 - protein, 10 aa, synthetic construct
DYQRGDRQGI

SEQ ID NO: 65047 - protein, 10 aa, synthetic construct
DYQRGDRSVV

SEQ ID NO: 65048 - protein, 10 aa, synthetic construct
DYQRGDRGVV

SEQ ID NO: 65049 - protein, 10 aa, synthetic construct
TWPRGDRQGI

SEQ ID NO: 65050 - protein, 10 aa, synthetic construct
DYQRGDYVGL

SEQ ID NO: 65051 - protein, 10 aa, synthetic construct
DYQRGDQSTL

SEQ ID NO: 65052 - protein, 10 aa, synthetic construct
DYQRGDRSQT

SEQ ID NO: 65053 - protein, 10 aa, synthetic construct
DYQRGDLLLS

SEQ ID NO: 65054 - protein, 10 aa, synthetic construct
DYDRGDRGQI

SEQ ID NO: 65055 - protein, 10 aa, synthetic construct
DYDRGDRQGI

SEQ ID NO: 65056 - protein, 10 aa, synthetic construct
DYDRGDRSVV

SEQ ID NO: 65057 - protein, 10 aa, synthetic construct
DYDRGDRGVV

SEQ ID NO: 65058 - protein, 10 aa, synthetic construct
DYDRGDYVGL

SEQ ID NO: 65059 - protein, 10 aa, synthetic construct
DYDRGDQSTL

SEQ ID NO: 65060 - protein, 10 aa, synthetic construct
TWPRGDRSVV

SEQ ID NO: 65061 - protein, 10 aa, synthetic construct
DYDRGDRSQT

SEQ ID NO: 65062 - protein, 10 aa, synthetic construct
DYDRGDLLLS

SEQ ID NO: 65063 - protein, 10 aa, synthetic construct
DYERGDRGQI

SEQ ID NO: 65064 - protein, 10 aa, synthetic construct
DYERGDRQGI

SEQ ID NO: 65065 - protein, 10 aa, synthetic construct
DYERGDRSVV

SEQ ID NO: 65066 - protein, 10 aa, synthetic construct
DYERGDRGVV

SEQ ID NO: 65067 - protein, 10 aa, synthetic construct
DYERGDYVGL

SEQ ID NO: 65068 - protein, 10 aa, synthetic construct
DYERGDQSTL

SEQ ID NO: 65069 - protein, 10 aa, synthetic construct
DYERGDRSQT

SEQ ID NO: 65070 - protein, 10 aa, synthetic construct
DYERGDLLLS

SEQ ID NO: 65071 - protein, 10 aa, synthetic construct
SKKRGDYVGL

SEQ ID NO: 65072 - protein, 10 aa, synthetic construct
APPRGDRDYL

SEQ ID NO: 65073 - protein, 10 aa, synthetic construct
TWPRGDLTVT

SEQ ID NO: 65074 - protein, 10 aa, synthetic construct
DNGRGDHGVL

SEQ ID NO: 65075 - protein, 10 aa, synthetic construct
DNGRGDHVNL

SEQ ID NO: 65076 - protein, 10 aa, synthetic construct
DNGRGDYVGL

SEQ ID NO: 65077 - protein, 10 aa, synthetic construct
DNGRGDYSSV

SEQ ID NO: 65078 - protein, 10 aa, synthetic construct
DNGRGDQSTL

SEQ ID NO: 65079 - protein, 10 aa, synthetic construct
DNGRGDLLLS

SEQ ID NO: 65080 - protein, 10 aa, synthetic construct
DNARGDHGVL

SEQ ID NO: 65081 - protein, 10 aa, synthetic construct
DNARGDHVNL

SEQ ID NO: 65082 - protein, 10 aa, synthetic construct
DNARGDYVGL

SEQ ID NO: 65083 - protein, 10 aa, synthetic construct
DNARGDYSSV

SEQ ID NO: 65084 - protein, 10 aa, synthetic construct
TWPRGDLIGR

SEQ ID NO: 65085 - protein, 10 aa, synthetic construct
DNARGDQSTL

SEQ ID NO: 65086 - protein, 10 aa, synthetic construct
DNARGDLLLS

SEQ ID NO: 65087 - protein, 10 aa, synthetic construct
DNVRGDRGQI

SEQ ID NO: 65088 - protein, 10 aa, synthetic construct
DNVRGDRQGI

SEQ ID NO: 65089 - protein, 10 aa, synthetic construct
DNVRGDRSVV

SEQ ID NO: 65090 - protein, 10 aa, synthetic construct
DNVRGDRGVV

SEQ ID NO: 65091 - protein, 10 aa, synthetic construct
DNVRGDYVGL

SEQ ID NO: 65092 - protein, 10 aa, synthetic construct
DNVRGDQSTL

SEQ ID NO: 65093 - protein, 10 aa, synthetic construct
DNVRGDRSQT

SEQ ID NO: 65094 - protein, 10 aa, synthetic construct
DNVRGDLLLS

SEQ ID NO: 65095 - protein, 10 aa, synthetic construct
TWPRGDRSQT

SEQ ID NO: 65096 - protein, 10 aa, synthetic construct
DNPRGDHGVL

SEQ ID NO: 65097 - protein, 10 aa, synthetic construct
DNPRGDHVNL

SEQ ID NO: 65098 - protein, 10 aa, synthetic construct
DNPRGDYVGL

SEQ ID NO: 65099 - protein, 10 aa, synthetic construct
DNPRGDYSSV

SEQ ID NO: 65100 - protein, 10 aa, synthetic construct
DNPRGDQSTL

SEQ ID NO: 65101 - protein, 10 aa, synthetic construct
DNPRGDLLLS

SEQ ID NO: 65102 - protein, 10 aa, synthetic construct
DNLRGDRGQI

SEQ ID NO: 65103 - protein, 10 aa, synthetic construct
DNLRGDRQGI

SEQ ID NO: 65104 - protein, 10 aa, synthetic construct
DNLRGDRSVV

SEQ ID NO: 65105 - protein, 10 aa, synthetic construct
DNLRGDRGVV

SEQ ID NO: 65106 - protein, 10 aa, synthetic construct
TWPRGDLLLS

SEQ ID NO: 65107 - protein, 10 aa, synthetic construct
DNLRGDYVGL

SEQ ID NO: 65108 - protein, 10 aa, synthetic construct
DNLRGDQSTL

SEQ ID NO: 65109 - protein, 10 aa, synthetic construct
DNLRGDRSQT

SEQ ID NO: 65110 - protein, 10 aa, synthetic construct
DNLRGDLLLS

SEQ ID NO: 65111 - protein, 10 aa, synthetic construct
DNIRGDRSVV

SEQ ID NO: 65112 - protein, 10 aa, synthetic construct
DNIRGDRSQT

SEQ ID NO: 65113 - protein, 10 aa, synthetic construct
DNMRGDRSVV

SEQ ID NO: 65114 - protein, 10 aa, synthetic construct
DNMRGDRSQT

SEQ ID NO: 65115 - protein, 10 aa, synthetic construct
DNWRGDRGQI

SEQ ID NO: 65116 - protein, 10 aa, synthetic construct
DNWRGDRQGI

SEQ ID NO: 65117 - protein, 10 aa, synthetic construct
TWLRGDHGVL

SEQ ID NO: 65118 - protein, 10 aa, synthetic construct
DNWRGDRSVV

SEQ ID NO: 65119 - protein, 10 aa, synthetic construct
DNWRGDRGVV

SEQ ID NO: 65120 - protein, 10 aa, synthetic construct
DNWRGDYVGL

SEQ ID NO: 65121 - protein, 10 aa, synthetic construct
DNWRGDQSTL

SEQ ID NO: 65122 - protein, 10 aa, synthetic construct
DNWRGDRSQT

SEQ ID NO: 65123 - protein, 10 aa, synthetic construct
DNWRGDLLLS

SEQ ID NO: 65124 - protein, 10 aa, synthetic construct
DNFRGDRSVV

SEQ ID NO: 65125 - protein, 10 aa, synthetic construct
DNFRGDRSQT

SEQ ID NO: 65126 - protein, 10 aa, synthetic construct
DNKRGDRSVV

SEQ ID NO: 65127 - protein, 10 aa, synthetic construct
DNKRGDRSQT

SEQ ID NO: 65128 - protein, 10 aa, synthetic construct
TWLRGDRGQI

SEQ ID NO: 65129 - protein, 10 aa, synthetic construct
DNRRGDHGVL

SEQ ID NO: 65130 - protein, 10 aa, synthetic construct
DNRRGDHVNL

SEQ ID NO: 65131 - protein, 10 aa, synthetic construct
DNRRGDYVGL

SEQ ID NO: 65132 - protein, 10 aa, synthetic construct
DNRRGDYSSV

SEQ ID NO: 65133 - protein, 10 aa, synthetic construct
DNRRGDQSTL

SEQ ID NO: 65134 - protein, 10 aa, synthetic construct
DNRRGDLLLS

SEQ ID NO: 65135 - protein, 10 aa, synthetic construct
DNHRGDRGQI

SEQ ID NO: 65136 - protein, 10 aa, synthetic construct
DNHRGDRQGI

SEQ ID NO: 65137 - protein, 10 aa, synthetic construct
DNHRGDRSVV

SEQ ID NO: 65138 - protein, 10 aa, synthetic construct
DNHRGDRGVV

SEQ ID NO: 65139 - protein, 10 aa, synthetic construct
TWLRGDRQGI

SEQ ID NO: 65140 - protein, 10 aa, synthetic construct
DNHRGDYVGL

SEQ ID NO: 65141 - protein, 10 aa, synthetic construct
DNHRGDQSTL

SEQ ID NO: 65142 - protein, 10 aa, synthetic construct
DNHRGDRSQT

SEQ ID NO: 65143 - protein, 10 aa, synthetic construct
DNHRGDLLLS

SEQ ID NO: 65144 - protein, 10 aa, synthetic construct
DNSRGDRGQI

SEQ ID NO: 65145 - protein, 10 aa, synthetic construct
DNSRGDRQGI

SEQ ID NO: 65146 - protein, 10 aa, synthetic construct
DNSRGDRSVV

SEQ ID NO: 65147 - protein, 10 aa, synthetic construct
DNSRGDRGVV

SEQ ID NO: 65148 - protein, 10 aa, synthetic construct
DNSRGDYVGL

SEQ ID NO: 65149 - protein, 10 aa, synthetic construct
DNSRGDQSTL

SEQ ID NO: 65150 - protein, 10 aa, synthetic construct
TWLRGDRSVV

SEQ ID NO: 65151 - protein, 10 aa, synthetic construct
DNSRGDRSQT

SEQ ID NO: 65152 - protein, 10 aa, synthetic construct
DNSRGDLLLS

SEQ ID NO: 65153 - protein, 10 aa, synthetic construct
DNTRGDRGQI

SEQ ID NO: 65154 - protein, 10 aa, synthetic construct
DNTRGDRQGI

SEQ ID NO: 65155 - protein, 10 aa, synthetic construct
DNTRGDRSVV

SEQ ID NO: 65156 - protein, 10 aa, synthetic construct
DNTRGDRGVV

SEQ ID NO: 65157 - protein, 10 aa, synthetic construct
DNTRGDYVGL

SEQ ID NO: 65158 - protein, 10 aa, synthetic construct
DNTRGDQSTL

SEQ ID NO: 65159 - protein, 10 aa, synthetic construct
DNTRGDRSQT

SEQ ID NO: 65160 - protein, 10 aa, synthetic construct
DNTRGDLLLS

SEQ ID NO: 65161 - protein, 10 aa, synthetic construct
TWLRGDLTVT

SEQ ID NO: 65162 - protein, 10 aa, synthetic construct
DNYRGDRSVV

SEQ ID NO: 65163 - protein, 10 aa, synthetic construct
DNYRGDRSQT

SEQ ID NO: 65164 - protein, 10 aa, synthetic construct
DNNRGDRSVV

SEQ ID NO: 65165 - protein, 10 aa, synthetic construct
DNNRGDRSQT

SEQ ID NO: 65166 - protein, 10 aa, synthetic construct
DNQRGDRGQI

SEQ ID NO: 65167 - protein, 10 aa, synthetic construct
DNQRGDRQGI

SEQ ID NO: 65168 - protein, 10 aa, synthetic construct
DNQRGDRSVV

SEQ ID NO: 65169 - protein, 10 aa, synthetic construct
DNQRGDRGVV

SEQ ID NO: 65170 - protein, 10 aa, synthetic construct
DNQRGDYVGL

SEQ ID NO: 65171 - protein, 10 aa, synthetic construct
DNQRGDQSTL

SEQ ID NO: 65172 - protein, 10 aa, synthetic construct
TWLRGDLIGR

SEQ ID NO: 65173 - protein, 10 aa, synthetic construct
DNQRGDRSQT

SEQ ID NO: 65174 - protein, 10 aa, synthetic construct
DNQRGDLLLS

SEQ ID NO: 65175 - protein, 10 aa, synthetic construct
DNDRGDRGQI

SEQ ID NO: 65176 - protein, 10 aa, synthetic construct
DNDRGDRQGI

SEQ ID NO: 65177 - protein, 10 aa, synthetic construct
DNDRGDRSVV

SEQ ID NO: 65178 - protein, 10 aa, synthetic construct
DNDRGDRGVV

SEQ ID NO: 65179 - protein, 10 aa, synthetic construct
DNDRGDYVGL

SEQ ID NO: 65180 - protein, 10 aa, synthetic construct
DNDRGDQSTL

SEQ ID NO: 65181 - protein, 10 aa, synthetic construct
DNDRGDRSQT

SEQ ID NO: 65182 - protein, 10 aa, synthetic construct
DNDRGDLLLS

SEQ ID NO: 65183 - protein, 10 aa, synthetic construct
APPRGDYVGL

SEQ ID NO: 65184 - protein, 10 aa, synthetic construct
TWLRGDRSQT

SEQ ID NO: 65185 - protein, 10 aa, synthetic construct
DNERGDRGQI

SEQ ID NO: 65186 - protein, 10 aa, synthetic construct
DNERGDRQGI

SEQ ID NO: 65187 - protein, 10 aa, synthetic construct
DNERGDRSVV

SEQ ID NO: 65188 - protein, 10 aa, synthetic construct
DNERGDRGVV

SEQ ID NO: 65189 - protein, 10 aa, synthetic construct
DNERGDYVGL

SEQ ID NO: 65190 - protein, 10 aa, synthetic construct
DNERGDQSTL

SEQ ID NO: 65191 - protein, 10 aa, synthetic construct
DNERGDRSQT

SEQ ID NO: 65192 - protein, 10 aa, synthetic construct
DNERGDLLLS

SEQ ID NO: 65193 - protein, 10 aa, synthetic construct
DQGRGDHVNL

SEQ ID NO: 65194 - protein, 10 aa, synthetic construct
DQGRGDRDYL

SEQ ID NO: 65195 - protein, 10 aa, synthetic construct
TWLRGDLLLS

SEQ ID NO: 65196 - protein, 10 aa, synthetic construct
DQGRGDYSSV

SEQ ID NO: 65197 - protein, 10 aa, synthetic construct
DQGRGDLTVT

SEQ ID NO: 65198 - protein, 10 aa, synthetic construct
DQGRGDLIGR

SEQ ID NO: 65199 - protein, 10 aa, synthetic construct
DQARGDHVNL

SEQ ID NO: 65200 - protein, 10 aa, synthetic construct
DQARGDRDYL

SEQ ID NO: 65201 - protein, 10 aa, synthetic construct
DQARGDYSSV

SEQ ID NO: 65202 - protein, 10 aa, synthetic construct
DQARGDLTVT

SEQ ID NO: 65203 - protein, 10 aa, synthetic construct
DQARGDLIGR

SEQ ID NO: 65204 - protein, 10 aa, synthetic construct
DQVRGDHGVL

SEQ ID NO: 65205 - protein, 10 aa, synthetic construct
DQVRGDHVNL

SEQ ID NO: 65206 - protein, 10 aa, synthetic construct
TWWRGDRGQI

SEQ ID NO: 65207 - protein, 10 aa, synthetic construct
DQVRGDYVGL

SEQ ID NO: 65208 - protein, 10 aa, synthetic construct
DQVRGDYSSV

SEQ ID NO: 65209 - protein, 10 aa, synthetic construct
DQVRGDQSTL

SEQ ID NO: 65210 - protein, 10 aa, synthetic construct
DQVRGDLLLS

SEQ ID NO: 65211 - protein, 10 aa, synthetic construct
DQPRGDHVNL

SEQ ID NO: 65212 - protein, 10 aa, synthetic construct
DQPRGDRDYL

SEQ ID NO: 65213 - protein, 10 aa, synthetic construct
DQPRGDYSSV

SEQ ID NO: 65214 - protein, 10 aa, synthetic construct
DQPRGDLTVT

SEQ ID NO: 65215 - protein, 10 aa, synthetic construct
DQPRGDLIGR

SEQ ID NO: 65216 - protein, 10 aa, synthetic construct
DQLRGDHGVL

SEQ ID NO: 65217 - protein, 10 aa, synthetic construct
TWWRGDRQGI

SEQ ID NO: 65218 - protein, 10 aa, synthetic construct
DQLRGDHVNL

SEQ ID NO: 65219 - protein, 10 aa, synthetic construct
DQLRGDYVGL

SEQ ID NO: 65220 - protein, 10 aa, synthetic construct
DQLRGDYSSV

SEQ ID NO: 65221 - protein, 10 aa, synthetic construct
DQLRGDQSTL

SEQ ID NO: 65222 - protein, 10 aa, synthetic construct
DQLRGDLLLS

SEQ ID NO: 65223 - protein, 10 aa, synthetic construct
DQIRGDRGQI

SEQ ID NO: 65224 - protein, 10 aa, synthetic construct
DQIRGDRQGI

SEQ ID NO: 65225 - protein, 10 aa, synthetic construct
DQIRGDRSVV

SEQ ID NO: 65226 - protein, 10 aa, synthetic construct
DQIRGDRGVV

SEQ ID NO: 65227 - protein, 10 aa, synthetic construct
DQIRGDYVGL

SEQ ID NO: 65228 - protein, 10 aa, synthetic construct
TWWRGDRSVV

SEQ ID NO: 65229 - protein, 10 aa, synthetic construct
DQIRGDQSTL

SEQ ID NO: 65230 - protein, 10 aa, synthetic construct
DQIRGDRSQT

SEQ ID NO: 65231 - protein, 10 aa, synthetic construct
DQIRGDLLLS

SEQ ID NO: 65232 - protein, 10 aa, synthetic construct
DQMRGDRGQI

SEQ ID NO: 65233 - protein, 10 aa, synthetic construct
DQMRGDRQGI

SEQ ID NO: 65234 - protein, 10 aa, synthetic construct
DQMRGDRSVV

SEQ ID NO: 65235 - protein, 10 aa, synthetic construct
DQMRGDRGVV

SEQ ID NO: 65236 - protein, 10 aa, synthetic construct
DQMRGDYVGL

SEQ ID NO: 65237 - protein, 10 aa, synthetic construct
DQMRGDQSTL

SEQ ID NO: 65238 - protein, 10 aa, synthetic construct
DQMRGDRSQT

SEQ ID NO: 65239 - protein, 10 aa, synthetic construct
TWWRGDRGVV

SEQ ID NO: 65240 - protein, 10 aa, synthetic construct
DQMRGDLLLS

SEQ ID NO: 65241 - protein, 10 aa, synthetic construct
DQWRGDHGVL

SEQ ID NO: 65242 - protein, 10 aa, synthetic construct
DQWRGDHVNL

SEQ ID NO: 65243 - protein, 10 aa, synthetic construct
DQWRGDYVGL

SEQ ID NO: 65244 - protein, 10 aa, synthetic construct
DQWRGDYSSV

SEQ ID NO: 65245 - protein, 10 aa, synthetic construct
DQWRGDQSTL

SEQ ID NO: 65246 - protein, 10 aa, synthetic construct
DQWRGDLLLS

SEQ ID NO: 65247 - protein, 10 aa, synthetic construct
DQFRGDRGQI

SEQ ID NO: 65248 - protein, 10 aa, synthetic construct
DQFRGDRQGI

SEQ ID NO: 65249 - protein, 10 aa, synthetic construct
DQFRGDRSVV

SEQ ID NO: 65250 - protein, 10 aa, synthetic construct
TWWRGDRSQT

SEQ ID NO: 65251 - protein, 10 aa, synthetic construct
DQFRGDRGVV

SEQ ID NO: 65252 - protein, 10 aa, synthetic construct
DQFRGDYVGL

SEQ ID NO: 65253 - protein, 10 aa, synthetic construct
DQFRGDQSTL

SEQ ID NO: 65254 - protein, 10 aa, synthetic construct
DQFRGDRSQT

SEQ ID NO: 65255 - protein, 10 aa, synthetic construct
DQFRGDLLLS

SEQ ID NO: 65256 - protein, 10 aa, synthetic construct
DQKRGDRGQI

SEQ ID NO: 65257 - protein, 10 aa, synthetic construct
DQKRGDRQGI

SEQ ID NO: 65258 - protein, 10 aa, synthetic construct
DQKRGDRSVV

SEQ ID NO: 65259 - protein, 10 aa, synthetic construct
DQKRGDRGVV

SEQ ID NO: 65260 - protein, 10 aa, synthetic construct
DQKRGDYVGL

SEQ ID NO: 65261 - protein, 10 aa, synthetic construct
TWRRGDHGVL

SEQ ID NO: 65262 - protein, 10 aa, synthetic construct
DQKRGDQSTL

SEQ ID NO: 65263 - protein, 10 aa, synthetic construct
DQKRGDRSQT

SEQ ID NO: 65264 - protein, 10 aa, synthetic construct
DQKRGDLLLS

SEQ ID NO: 65265 - protein, 10 aa, synthetic construct
DQRRGDHVNL

SEQ ID NO: 65266 - protein, 10 aa, synthetic construct
DQRRGDRDYL

SEQ ID NO: 65267 - protein, 10 aa, synthetic construct
DQRRGDYSSV

SEQ ID NO: 65268 - protein, 10 aa, synthetic construct
DQRRGDLTVT

SEQ ID NO: 65269 - protein, 10 aa, synthetic construct
DQRRGDLIGR

SEQ ID NO: 65270 - protein, 10 aa, synthetic construct
DQHRGDHGVL

SEQ ID NO: 65271 - protein, 10 aa, synthetic construct
DQHRGDHVNL

SEQ ID NO: 65272 - protein, 10 aa, synthetic construct
TWRRGDRGQI

SEQ ID NO: 65273 - protein, 10 aa, synthetic construct
DQHRGDYVGL

SEQ ID NO: 65274 - protein, 10 aa, synthetic construct
DQHRGDYSSV

SEQ ID NO: 65275 - protein, 10 aa, synthetic construct
DQHRGDQSTL

SEQ ID NO: 65276 - protein, 10 aa, synthetic construct
DQHRGDLLLS

SEQ ID NO: 65277 - protein, 10 aa, synthetic construct
DQSRGDHGVL

SEQ ID NO: 65278 - protein, 10 aa, synthetic construct
DQSRGDHVNL

SEQ ID NO: 65279 - protein, 10 aa, synthetic construct
DQSRGDYVGL

SEQ ID NO: 65280 - protein, 10 aa, synthetic construct
DQSRGDYSSV

SEQ ID NO: 65281 - protein, 10 aa, synthetic construct
DQSRGDQSTL

SEQ ID NO: 65282 - protein, 10 aa, synthetic construct
DQSRGDLLLS

SEQ ID NO: 65283 - protein, 10 aa, synthetic construct
TWRRGDRQGI

SEQ ID NO: 65284 - protein, 10 aa, synthetic construct
DQTRGDHGVL

SEQ ID NO: 65285 - protein, 10 aa, synthetic construct
DQTRGDHVNL

SEQ ID NO: 65286 - protein, 10 aa, synthetic construct
DQTRGDYVGL

SEQ ID NO: 65287 - protein, 10 aa, synthetic construct
DQTRGDYSSV

SEQ ID NO: 65288 - protein, 10 aa, synthetic construct
DQTRGDQSTL

SEQ ID NO: 65289 - protein, 10 aa, synthetic construct
DQTRGDLLLS

SEQ ID NO: 65290 - protein, 10 aa, synthetic construct
DQYRGDRGQI

SEQ ID NO: 65291 - protein, 10 aa, synthetic construct
DQYRGDRQGI

SEQ ID NO: 65292 - protein, 10 aa, synthetic construct
DQYRGDRSVV

SEQ ID NO: 65293 - protein, 10 aa, synthetic construct
DQYRGDRGVV

SEQ ID NO: 65294 - protein, 10 aa, synthetic construct
APPRGDQSTL

SEQ ID NO: 65295 - protein, 10 aa, synthetic construct
TWRRGDRSVV

SEQ ID NO: 65296 - protein, 10 aa, synthetic construct
DQYRGDYVGL

SEQ ID NO: 65297 - protein, 10 aa, synthetic construct
DQYRGDQSTL

SEQ ID NO: 65298 - protein, 10 aa, synthetic construct
DQYRGDRSQT

SEQ ID NO: 65299 - protein, 10 aa, synthetic construct
DQYRGDLLLS

SEQ ID NO: 65300 - protein, 10 aa, synthetic construct
DQNRGDRGQI

SEQ ID NO: 65301 - protein, 10 aa, synthetic construct
DQNRGDRQGI

SEQ ID NO: 65302 - protein, 10 aa, synthetic construct
DQNRGDRSVV

SEQ ID NO: 65303 - protein, 10 aa, synthetic construct
DQNRGDRGVV

SEQ ID NO: 65304 - protein, 10 aa, synthetic construct
DQNRGDYVGL

SEQ ID NO: 65305 - protein, 10 aa, synthetic construct
DQNRGDQSTL

SEQ ID NO: 65306 - protein, 10 aa, synthetic construct
TWRRGDLTVT

SEQ ID NO: 65307 - protein, 10 aa, synthetic construct
DQNRGDRSQT

SEQ ID NO: 65308 - protein, 10 aa, synthetic construct
DQNRGDLLLS

SEQ ID NO: 65309 - protein, 10 aa, synthetic construct
DQQRGDHGVL

SEQ ID NO: 65310 - protein, 10 aa, synthetic construct
DQQRGDHVNL

SEQ ID NO: 65311 - protein, 10 aa, synthetic construct
DQQRGDYVGL

SEQ ID NO: 65312 - protein, 10 aa, synthetic construct
DQQRGDYSSV

SEQ ID NO: 65313 - protein, 10 aa, synthetic construct
DQQRGDQSTL

SEQ ID NO: 65314 - protein, 10 aa, synthetic construct
DQQRGDLLLS

SEQ ID NO: 65315 - protein, 10 aa, synthetic construct
DQDRGDHGVL

SEQ ID NO: 65316 - protein, 10 aa, synthetic construct
DQDRGDHVNL

SEQ ID NO: 65317 - protein, 10 aa, synthetic construct
TWRRGDLIGR

SEQ ID NO: 65318 - protein, 10 aa, synthetic construct
DQDRGDYVGL

SEQ ID NO: 65319 - protein, 10 aa, synthetic construct
DQDRGDYSSV

SEQ ID NO: 65320 - protein, 10 aa, synthetic construct
DQDRGDQSTL

SEQ ID NO: 65321 - protein, 10 aa, synthetic construct
DQDRGDLLLS

SEQ ID NO: 65322 - protein, 10 aa, synthetic construct
DQERGDHGVL

SEQ ID NO: 65323 - protein, 10 aa, synthetic construct
DQERGDHVNL

SEQ ID NO: 65324 - protein, 10 aa, synthetic construct
DQERGDYVGL

SEQ ID NO: 65325 - protein, 10 aa, synthetic construct
DQERGDYSSV

SEQ ID NO: 65326 - protein, 10 aa, synthetic construct
DQERGDQSTL

SEQ ID NO: 65327 - protein, 10 aa, synthetic construct
DQERGDLLLS

SEQ ID NO: 65328 - protein, 10 aa, synthetic construct
TWRRGDRSQT

SEQ ID NO: 65329 - protein, 10 aa, synthetic construct
DDGRGDHVNL

SEQ ID NO: 65330 - protein, 10 aa, synthetic construct
DDGRGDRDYL

SEQ ID NO: 65331 - protein, 10 aa, synthetic construct
DDGRGDYSSV

SEQ ID NO: 65332 - protein, 10 aa, synthetic construct
DDGRGDLTVT

SEQ ID NO: 65333 - protein, 10 aa, synthetic construct
DDGRGDLIGR

SEQ ID NO: 65334 - protein, 10 aa, synthetic construct
DDARGDHVNL

SEQ ID NO: 65335 - protein, 10 aa, synthetic construct
DDARGDRDYL

SEQ ID NO: 65336 - protein, 10 aa, synthetic construct
DDARGDYSSV

SEQ ID NO: 65337 - protein, 10 aa, synthetic construct
DDARGDLTVT

SEQ ID NO: 65338 - protein, 10 aa, synthetic construct
DDARGDLIGR

SEQ ID NO: 65339 - protein, 10 aa, synthetic construct
TWRRGDLLLS

SEQ ID NO: 65340 - protein, 10 aa, synthetic construct
DDVRGDHGVL

SEQ ID NO: 65341 - protein, 10 aa, synthetic construct
DDVRGDHVNL

SEQ ID NO: 65342 - protein, 10 aa, synthetic construct
DDVRGDYVGL

SEQ ID NO: 65343 - protein, 10 aa, synthetic construct
DDVRGDYSSV

SEQ ID NO: 65344 - protein, 10 aa, synthetic construct
DDVRGDQSTL

SEQ ID NO: 65345 - protein, 10 aa, synthetic construct
DDVRGDLLLS

SEQ ID NO: 65346 - protein, 10 aa, synthetic construct
DDPRGDHVNL

SEQ ID NO: 65347 - protein, 10 aa, synthetic construct
DDPRGDRDYL

SEQ ID NO: 65348 - protein, 10 aa, synthetic construct
DDPRGDYSSV

SEQ ID NO: 65349 - protein, 10 aa, synthetic construct
DDPRGDLTVT

SEQ ID NO: 65350 - protein, 10 aa, synthetic construct
TWHRGDRGVV

SEQ ID NO: 65351 - protein, 10 aa, synthetic construct
DDPRGDLIGR

SEQ ID NO: 65352 - protein, 10 aa, synthetic construct
DDLRGDHGVL

SEQ ID NO: 65353 - protein, 10 aa, synthetic construct
DDLRGDHVNL

SEQ ID NO: 65354 - protein, 10 aa, synthetic construct
DDLRGDYVGL

SEQ ID NO: 65355 - protein, 10 aa, synthetic construct
DDLRGDYSSV

SEQ ID NO: 65356 - protein, 10 aa, synthetic construct
DDLRGDQSTL

SEQ ID NO: 65357 - protein, 10 aa, synthetic construct
DDLRGDLLLS

SEQ ID NO: 65358 - protein, 10 aa, synthetic construct
DDIRGDRGQI

SEQ ID NO: 65359 - protein, 10 aa, synthetic construct
DDIRGDRQGI

SEQ ID NO: 65360 - protein, 10 aa, synthetic construct
DDIRGDRSVV

SEQ ID NO: 65361 - protein, 10 aa, synthetic construct
TWSRGDHGVL

SEQ ID NO: 65362 - protein, 10 aa, synthetic construct
DDIRGDRGVV

SEQ ID NO: 65363 - protein, 10 aa, synthetic construct
DDIRGDYVGL

SEQ ID NO: 65364 - protein, 10 aa, synthetic construct
DDIRGDQSTL

SEQ ID NO: 65365 - protein, 10 aa, synthetic construct
DDIRGDRSQT

SEQ ID NO: 65366 - protein, 10 aa, synthetic construct
DDIRGDLLLS

SEQ ID NO: 65367 - protein, 10 aa, synthetic construct
DDMRGDRGQI

SEQ ID NO: 65368 - protein, 10 aa, synthetic construct
DDMRGDRQGI

SEQ ID NO: 65369 - protein, 10 aa, synthetic construct
DDMRGDRSVV

SEQ ID NO: 65370 - protein, 10 aa, synthetic construct
DDMRGDRGVV

SEQ ID NO: 65371 - protein, 10 aa, synthetic construct
DDMRGDYVGL

SEQ ID NO: 65372 - protein, 10 aa, synthetic construct
TWSRGDRGQI

SEQ ID NO: 65373 - protein, 10 aa, synthetic construct
DDMRGDQSTL

SEQ ID NO: 65374 - protein, 10 aa, synthetic construct
DDMRGDRSQT

SEQ ID NO: 65375 - protein, 10 aa, synthetic construct
DDMRGDLLLS

SEQ ID NO: 65376 - protein, 10 aa, synthetic construct
DDWRGDHGVL

SEQ ID NO: 65377 - protein, 10 aa, synthetic construct
DDWRGDHVNL

SEQ ID NO: 65378 - protein, 10 aa, synthetic construct
DDWRGDYVGL

SEQ ID NO: 65379 - protein, 10 aa, synthetic construct
DDWRGDYSSV

SEQ ID NO: 65380 - protein, 10 aa, synthetic construct
DDWRGDQSTL

SEQ ID NO: 65381 - protein, 10 aa, synthetic construct
DDWRGDLLLS

SEQ ID NO: 65382 - protein, 10 aa, synthetic construct
DDFRGDRGQI

SEQ ID NO: 65383 - protein, 10 aa, synthetic construct
TWSRGDRQGI

SEQ ID NO: 65384 - protein, 10 aa, synthetic construct
DDFRGDRQGI

SEQ ID NO: 65385 - protein, 10 aa, synthetic construct
DDFRGDRSVV

SEQ ID NO: 65386 - protein, 10 aa, synthetic construct
DDFRGDRGVV

SEQ ID NO: 65387 - protein, 10 aa, synthetic construct
DDFRGDYVGL

SEQ ID NO: 65388 - protein, 10 aa, synthetic construct
DDFRGDQSTL

SEQ ID NO: 65389 - protein, 10 aa, synthetic construct
DDFRGDRSQT

SEQ ID NO: 65390 - protein, 10 aa, synthetic construct
DDFRGDLLLS

SEQ ID NO: 65391 - protein, 10 aa, synthetic construct
DDKRGDRGQI

SEQ ID NO: 65392 - protein, 10 aa, synthetic construct
DDKRGDRQGI

SEQ ID NO: 65393 - protein, 10 aa, synthetic construct
DDKRGDRSVV

SEQ ID NO: 65394 - protein, 10 aa, synthetic construct
TWSRGDRSVV

SEQ ID NO: 65395 - protein, 10 aa, synthetic construct
DDKRGDRGVV

SEQ ID NO: 65396 - protein, 10 aa, synthetic construct
DDKRGDYVGL

SEQ ID NO: 65397 - protein, 10 aa, synthetic construct
DDKRGDQSTL

SEQ ID NO: 65398 - protein, 10 aa, synthetic construct
DDKRGDRSQT

SEQ ID NO: 65399 - protein, 10 aa, synthetic construct
DDKRGDLLLS

SEQ ID NO: 65400 - protein, 10 aa, synthetic construct
DDRRGDHVNL

SEQ ID NO: 65401 - protein, 10 aa, synthetic construct
DDRRGDRDYL

SEQ ID NO: 65402 - protein, 10 aa, synthetic construct
DDRRGDYSSV

SEQ ID NO: 65403 - protein, 10 aa, synthetic construct
DDRRGDLTVT

SEQ ID NO: 65404 - protein, 10 aa, synthetic construct
DDRRGDLIGR

SEQ ID NO: 65405 - protein, 10 aa, synthetic construct
APPRGDHVNL

SEQ ID NO: 65406 - protein, 10 aa, synthetic construct
TWSRGDLTVT

SEQ ID NO: 65407 - protein, 10 aa, synthetic construct
DDHRGDHGVL

SEQ ID NO: 65408 - protein, 10 aa, synthetic construct
DDHRGDHVNL

SEQ ID NO: 65409 - protein, 10 aa, synthetic construct
DDHRGDYVGL

SEQ ID NO: 65410 - protein, 10 aa, synthetic construct
DDHRGDYSSV

SEQ ID NO: 65411 - protein, 10 aa, synthetic construct
DDHRGDQSTL

SEQ ID NO: 65412 - protein, 10 aa, synthetic construct
DDHRGDLLLS

SEQ ID NO: 65413 - protein, 10 aa, synthetic construct
DDSRGDHGVL

SEQ ID NO: 65414 - protein, 10 aa, synthetic construct
DDSRGDHVNL

SEQ ID NO: 65415 - protein, 10 aa, synthetic construct
DDSRGDYVGL

SEQ ID NO: 65416 - protein, 10 aa, synthetic construct
DDSRGDYSSV

SEQ ID NO: 65417 - protein, 10 aa, synthetic construct
TWSRGDLIGR

SEQ ID NO: 65418 - protein, 10 aa, synthetic construct
DDSRGDQSTL

SEQ ID NO: 65419 - protein, 10 aa, synthetic construct
DDSRGDLLLS

SEQ ID NO: 65420 - protein, 10 aa, synthetic construct
DDTRGDHGVL

SEQ ID NO: 65421 - protein, 10 aa, synthetic construct
DDTRGDHVNL

SEQ ID NO: 65422 - protein, 10 aa, synthetic construct
DDTRGDYVGL

SEQ ID NO: 65423 - protein, 10 aa, synthetic construct
DDTRGDYSSV

SEQ ID NO: 65424 - protein, 10 aa, synthetic construct
DDTRGDQSTL

SEQ ID NO: 65425 - protein, 10 aa, synthetic construct
DDTRGDLLLS

SEQ ID NO: 65426 - protein, 10 aa, synthetic construct
DDYRGDRGQI

SEQ ID NO: 65427 - protein, 10 aa, synthetic construct
DDYRGDRQGI

SEQ ID NO: 65428 - protein, 10 aa, synthetic construct
TWSRGDRSQT

SEQ ID NO: 65429 - protein, 10 aa, synthetic construct
DDYRGDRSVV

SEQ ID NO: 65430 - protein, 10 aa, synthetic construct
DDYRGDRGVV

SEQ ID NO: 65431 - protein, 10 aa, synthetic construct
DDYRGDYVGL

SEQ ID NO: 65432 - protein, 10 aa, synthetic construct
DDYRGDQSTL

SEQ ID NO: 65433 - protein, 10 aa, synthetic construct
DDYRGDRSQT

SEQ ID NO: 65434 - protein, 10 aa, synthetic construct
DDYRGDLLLS

SEQ ID NO: 65435 - protein, 10 aa, synthetic construct
DDNRGDRGQI

SEQ ID NO: 65436 - protein, 10 aa, synthetic construct
DDNRGDRQGI

SEQ ID NO: 65437 - protein, 10 aa, synthetic construct
DDNRGDRSVV

SEQ ID NO: 65438 - protein, 10 aa, synthetic construct
DDNRGDRGVV

SEQ ID NO: 65439 - protein, 10 aa, synthetic construct
TWSRGDLLLS

SEQ ID NO: 65440 - protein, 10 aa, synthetic construct
DDNRGDYVGL

SEQ ID NO: 65441 - protein, 10 aa, synthetic construct
DDNRGDQSTL

SEQ ID NO: 65442 - protein, 10 aa, synthetic construct
DDNRGDRSQT

SEQ ID NO: 65443 - protein, 10 aa, synthetic construct
DDNRGDLLLS

SEQ ID NO: 65444 - protein, 10 aa, synthetic construct
DDQRGDHGVL

SEQ ID NO: 65445 - protein, 10 aa, synthetic construct
DDQRGDHVNL

SEQ ID NO: 65446 - protein, 10 aa, synthetic construct
DDQRGDYVGL

SEQ ID NO: 65447 - protein, 10 aa, synthetic construct
DDQRGDYSSV

SEQ ID NO: 65448 - protein, 10 aa, synthetic construct
DDQRGDQSTL

SEQ ID NO: 65449 - protein, 10 aa, synthetic construct
DDQRGDLLLS

SEQ ID NO: 65450 - protein, 10 aa, synthetic construct
TWTRGDRGVV

SEQ ID NO: 65451 - protein, 10 aa, synthetic construct
DDDRGDHGVL

SEQ ID NO: 65452 - protein, 10 aa, synthetic construct
DDDRGDHVNL

SEQ ID NO: 65453 - protein, 10 aa, synthetic construct
DDDRGDYVGL

SEQ ID NO: 65454 - protein, 10 aa, synthetic construct
DDDRGDYSSV

SEQ ID NO: 65455 - protein, 10 aa, synthetic construct
DDDRGDQSTL

SEQ ID NO: 65456 - protein, 10 aa, synthetic construct
DDDRGDLLLS

SEQ ID NO: 65457 - protein, 10 aa, synthetic construct
DDERGDHGVL

SEQ ID NO: 65458 - protein, 10 aa, synthetic construct
DDERGDHVNL

SEQ ID NO: 65459 - protein, 10 aa, synthetic construct
DDERGDYVGL

SEQ ID NO: 65460 - protein, 10 aa, synthetic construct
DDERGDYSSV

SEQ ID NO: 65461 - protein, 10 aa, synthetic construct
TWQRGDRGVV

SEQ ID NO: 65462 - protein, 10 aa, synthetic construct
DDERGDQSTL

SEQ ID NO: 65463 - protein, 10 aa, synthetic construct
DDERGDLLLS

SEQ ID NO: 65464 - protein, 10 aa, synthetic construct
DEGRGDHVNL

SEQ ID NO: 65465 - protein, 10 aa, synthetic construct
DEGRGDRDYL

SEQ ID NO: 65466 - protein, 10 aa, synthetic construct
DEGRGDYSSV

SEQ ID NO: 65467 - protein, 10 aa, synthetic construct
DEGRGDLTVT

SEQ ID NO: 65468 - protein, 10 aa, synthetic construct
DEGRGDLIGR

SEQ ID NO: 65469 - protein, 10 aa, synthetic construct
DEARGDHVNL

SEQ ID NO: 65470 - protein, 10 aa, synthetic construct
DEARGDRDYL

SEQ ID NO: 65471 - protein, 10 aa, synthetic construct
DEARGDYSSV

SEQ ID NO: 65472 - protein, 10 aa, synthetic construct
TWDRGDRGVV

SEQ ID NO: 65473 - protein, 10 aa, synthetic construct
DEARGDLTVT

SEQ ID NO: 65474 - protein, 10 aa, synthetic construct
DEARGDLIGR

SEQ ID NO: 65475 - protein, 10 aa, synthetic construct
DEVRGDHGVL

SEQ ID NO: 65476 - protein, 10 aa, synthetic construct
DEVRGDHVNL

SEQ ID NO: 65477 - protein, 10 aa, synthetic construct
DEVRGDYVGL

SEQ ID NO: 65478 - protein, 10 aa, synthetic construct
DEVRGDYSSV

SEQ ID NO: 65479 - protein, 10 aa, synthetic construct
DEVRGDQSTL

SEQ ID NO: 65480 - protein, 10 aa, synthetic construct
DEVRGDLLLS

SEQ ID NO: 65481 - protein, 10 aa, synthetic construct
DEPRGDHVNL

SEQ ID NO: 65482 - protein, 10 aa, synthetic construct
DEPRGDRDYL

SEQ ID NO: 65483 - protein, 10 aa, synthetic construct
TWERGDRGVV

SEQ ID NO: 65484 - protein, 10 aa, synthetic construct
DEPRGDYSSV

SEQ ID NO: 65485 - protein, 10 aa, synthetic construct
DEPRGDLTVT

SEQ ID NO: 65486 - protein, 10 aa, synthetic construct
DEPRGDLIGR

SEQ ID NO: 65487 - protein, 10 aa, synthetic construct
DELRGDHGVL

SEQ ID NO: 65488 - protein, 10 aa, synthetic construct
DELRGDHVNL

SEQ ID NO: 65489 - protein, 10 aa, synthetic construct
DELRGDYVGL

SEQ ID NO: 65490 - protein, 10 aa, synthetic construct
DELRGDYSSV

SEQ ID NO: 65491 - protein, 10 aa, synthetic construct
DELRGDQSTL

SEQ ID NO: 65492 - protein, 10 aa, synthetic construct
DELRGDLLLS

SEQ ID NO: 65493 - protein, 10 aa, synthetic construct
DEIRGDRGQI

SEQ ID NO: 65494 - protein, 10 aa, synthetic construct
TRGRGDHGVL

SEQ ID NO: 65495 - protein, 10 aa, synthetic construct
DEIRGDRQGI

SEQ ID NO: 65496 - protein, 10 aa, synthetic construct
DEIRGDRSVV

SEQ ID NO: 65497 - protein, 10 aa, synthetic construct
DEIRGDRGVV

SEQ ID NO: 65498 - protein, 10 aa, synthetic construct
DEIRGDYVGL

SEQ ID NO: 65499 - protein, 10 aa, synthetic construct
DEIRGDQSTL

SEQ ID NO: 65500 - protein, 10 aa, synthetic construct
DEIRGDRSQT

SEQ ID NO: 65501 - protein, 10 aa, synthetic construct
DEIRGDLLLS

SEQ ID NO: 65502 - protein, 10 aa, synthetic construct
DEMRGDRGQI

SEQ ID NO: 65503 - protein, 10 aa, synthetic construct
DEMRGDRQGI

SEQ ID NO: 65504 - protein, 10 aa, synthetic construct
DEMRGDRSVV

SEQ ID NO: 65505 - protein, 10 aa, synthetic construct
TRGRGDYVGL

SEQ ID NO: 65506 - protein, 10 aa, synthetic construct
DEMRGDRGVV

SEQ ID NO: 65507 - protein, 10 aa, synthetic construct
DEMRGDYVGL

SEQ ID NO: 65508 - protein, 10 aa, synthetic construct
DEMRGDQSTL

SEQ ID NO: 65509 - protein, 10 aa, synthetic construct
DEMRGDRSQT

SEQ ID NO: 65510 - protein, 10 aa, synthetic construct
DEMRGDLLLS

SEQ ID NO: 65511 - protein, 10 aa, synthetic construct
DEWRGDHGVL

SEQ ID NO: 65512 - protein, 10 aa, synthetic construct
DEWRGDHVNL

SEQ ID NO: 65513 - protein, 10 aa, synthetic construct
DEWRGDYVGL

SEQ ID NO: 65514 - protein, 10 aa, synthetic construct
DEWRGDYSSV

SEQ ID NO: 65515 - protein, 10 aa, synthetic construct
DEWRGDQSTL

SEQ ID NO: 65516 - protein, 10 aa, synthetic construct
APPRGDYSSV

SEQ ID NO: 65517 - protein, 10 aa, synthetic construct
TRGRGDQSTL

SEQ ID NO: 65518 - protein, 10 aa, synthetic construct
DEWRGDLLLS

SEQ ID NO: 65519 - protein, 10 aa, synthetic construct
DEFRGDRGQI

SEQ ID NO: 65520 - protein, 10 aa, synthetic construct
DEFRGDRQGI

SEQ ID NO: 65521 - protein, 10 aa, synthetic construct
DEFRGDRSVV

SEQ ID NO: 65522 - protein, 10 aa, synthetic construct
DEFRGDRGVV

SEQ ID NO: 65523 - protein, 10 aa, synthetic construct
DEFRGDYVGL

SEQ ID NO: 65524 - protein, 10 aa, synthetic construct
DEFRGDQSTL

SEQ ID NO: 65525 - protein, 10 aa, synthetic construct
DEFRGDRSQT

SEQ ID NO: 65526 - protein, 10 aa, synthetic construct
DEFRGDLLLS

SEQ ID NO: 65527 - protein, 10 aa, synthetic construct
DEKRGDRGQI

SEQ ID NO: 65528 - protein, 10 aa, synthetic construct
TRGRGDLLLS

SEQ ID NO: 65529 - protein, 10 aa, synthetic construct
DEKRGDRQGI

SEQ ID NO: 65530 - protein, 10 aa, synthetic construct
DEKRGDRSVV

SEQ ID NO: 65531 - protein, 10 aa, synthetic construct
DEKRGDRGVV

SEQ ID NO: 65532 - protein, 10 aa, synthetic construct
DEKRGDYVGL

SEQ ID NO: 65533 - protein, 10 aa, synthetic construct
DEKRGDQSTL

SEQ ID NO: 65534 - protein, 10 aa, synthetic construct
DEKRGDRSQT

SEQ ID NO: 65535 - protein, 10 aa, synthetic construct
DEKRGDLLLS

SEQ ID NO: 65536 - protein, 10 aa, synthetic construct
DERRGDHVNL

SEQ ID NO: 65537 - protein, 10 aa, synthetic construct
DERRGDRDYL

SEQ ID NO: 65538 - protein, 10 aa, synthetic construct
DERRGDYSSV

SEQ ID NO: 65539 - protein, 10 aa, synthetic construct
TRARGDHGVL

SEQ ID NO: 65540 - protein, 10 aa, synthetic construct
DERRGDLTVT

SEQ ID NO: 65541 - protein, 10 aa, synthetic construct
DERRGDLIGR

SEQ ID NO: 65542 - protein, 10 aa, synthetic construct
DEHRGDHGVL

SEQ ID NO: 65543 - protein, 10 aa, synthetic construct
DEHRGDHVNL

SEQ ID NO: 65544 - protein, 10 aa, synthetic construct
DEHRGDYVGL

SEQ ID NO: 65545 - protein, 10 aa, synthetic construct
DEHRGDYSSV

SEQ ID NO: 65546 - protein, 10 aa, synthetic construct
DEHRGDQSTL

SEQ ID NO: 65547 - protein, 10 aa, synthetic construct
DEHRGDLLLS

SEQ ID NO: 65548 - protein, 10 aa, synthetic construct
DESRGDHGVL

SEQ ID NO: 65549 - protein, 10 aa, synthetic construct
DESRGDHVNL

SEQ ID NO: 65550 - protein, 10 aa, synthetic construct
TRARGDYVGL

SEQ ID NO: 65551 - protein, 10 aa, synthetic construct
DESRGDYVGL

SEQ ID NO: 65552 - protein, 10 aa, synthetic construct
DESRGDYSSV

SEQ ID NO: 65553 - protein, 10 aa, synthetic construct
DESRGDQSTL

SEQ ID NO: 65554 - protein, 10 aa, synthetic construct
DESRGDLLLS

SEQ ID NO: 65555 - protein, 10 aa, synthetic construct
DETRGDHGVL

SEQ ID NO: 65556 - protein, 10 aa, synthetic construct
DETRGDHVNL

SEQ ID NO: 65557 - protein, 10 aa, synthetic construct
DETRGDYVGL

SEQ ID NO: 65558 - protein, 10 aa, synthetic construct
DETRGDYSSV

SEQ ID NO: 65559 - protein, 10 aa, synthetic construct
DETRGDQSTL

SEQ ID NO: 65560 - protein, 10 aa, synthetic construct
DETRGDLLLS

SEQ ID NO: 65561 - protein, 10 aa, synthetic construct
TRARGDQSTL

SEQ ID NO: 65562 - protein, 10 aa, synthetic construct
DEYRGDRGQI

SEQ ID NO: 65563 - protein, 10 aa, synthetic construct
DEYRGDRQGI

SEQ ID NO: 65564 - protein, 10 aa, synthetic construct
DEYRGDRSVV

SEQ ID NO: 65565 - protein, 10 aa, synthetic construct
DEYRGDRGVV

SEQ ID NO: 65566 - protein, 10 aa, synthetic construct
DEYRGDYVGL

SEQ ID NO: 65567 - protein, 10 aa, synthetic construct
DEYRGDQSTL

SEQ ID NO: 65568 - protein, 10 aa, synthetic construct
DEYRGDRSQT

SEQ ID NO: 65569 - protein, 10 aa, synthetic construct
DEYRGDLLLS

SEQ ID NO: 65570 - protein, 10 aa, synthetic construct
DENRGDRGQI

SEQ ID NO: 65571 - protein, 10 aa, synthetic construct
DENRGDRQGI

SEQ ID NO: 65572 - protein, 10 aa, synthetic construct
TRARGDLLLS

SEQ ID NO: 65573 - protein, 10 aa, synthetic construct
DENRGDRSVV

SEQ ID NO: 65574 - protein, 10 aa, synthetic construct
DENRGDRGVV

SEQ ID NO: 65575 - protein, 10 aa, synthetic construct
DENRGDYVGL

SEQ ID NO: 65576 - protein, 10 aa, synthetic construct
DENRGDQSTL

SEQ ID NO: 65577 - protein, 10 aa, synthetic construct
DENRGDRSQT

SEQ ID NO: 65578 - protein, 10 aa, synthetic construct
DENRGDLLLS

SEQ ID NO: 65579 - protein, 10 aa, synthetic construct
DEQRGDHGVL

SEQ ID NO: 65580 - protein, 10 aa, synthetic construct
DEQRGDHVNL

SEQ ID NO: 65581 - protein, 10 aa, synthetic construct
DEQRGDYVGL

SEQ ID NO: 65582 - protein, 10 aa, synthetic construct
DEQRGDYSSV

SEQ ID NO: 65583 - protein, 10 aa, synthetic construct
TRVRGDRGQI

SEQ ID NO: 65584 - protein, 10 aa, synthetic construct
DEQRGDQSTL

SEQ ID NO: 65585 - protein, 10 aa, synthetic construct
DEQRGDLLLS

SEQ ID NO: 65586 - protein, 10 aa, synthetic construct
DEDRGDHGVL

SEQ ID NO: 65587 - protein, 10 aa, synthetic construct
DEDRGDHVNL

SEQ ID NO: 65588 - protein, 10 aa, synthetic construct
DEDRGDYVGL

SEQ ID NO: 65589 - protein, 10 aa, synthetic construct
DEDRGDYSSV

SEQ ID NO: 65590 - protein, 10 aa, synthetic construct
DEDRGDQSTL

SEQ ID NO: 65591 - protein, 10 aa, synthetic construct
DEDRGDLLLS

SEQ ID NO: 65592 - protein, 10 aa, synthetic construct
DEERGDHGVL

SEQ ID NO: 65593 - protein, 10 aa, synthetic construct
DEERGDHVNL

SEQ ID NO: 65594 - protein, 10 aa, synthetic construct
TRVRGDRQGI

SEQ ID NO: 65595 - protein, 10 aa, synthetic construct
DEERGDYVGL

SEQ ID NO: 65596 - protein, 10 aa, synthetic construct
DEERGDYSSV

SEQ ID NO: 65597 - protein, 10 aa, synthetic construct
DEERGDQSTL

SEQ ID NO: 65598 - protein, 10 aa, synthetic construct
DEERGDLLLS

SEQ ID NO: 65599 - protein, 10 aa, synthetic construct
QGGRGDYTSV

SEQ ID NO: 65600 - protein, 10 aa, synthetic construct
QGGRGDYTSM

SEQ ID NO: 65601 - protein, 10 aa, synthetic construct
QGARGDYTSV

SEQ ID NO: 65602 - protein, 10 aa, synthetic construct
QGARGDYTSM

SEQ ID NO: 65603 - protein, 10 aa, synthetic construct
QGVRGDHVNL

SEQ ID NO: 65604 - protein, 10 aa, synthetic construct
QGVRGDRDYL

SEQ ID NO: 65605 - protein, 10 aa, synthetic construct
TRVRGDRSVV

SEQ ID NO: 65606 - protein, 10 aa, synthetic construct
QGVRGDYSSV

SEQ ID NO: 65607 - protein, 10 aa, synthetic construct
QGVRGDLTVT

SEQ ID NO: 65608 - protein, 10 aa, synthetic construct
QGVRGDLIGR

SEQ ID NO: 65609 - protein, 10 aa, synthetic construct
QGPRGDYTSV

SEQ ID NO: 65610 - protein, 10 aa, synthetic construct
QGPRGDYTSM

SEQ ID NO: 65611 - protein, 10 aa, synthetic construct
QGLRGDHVNL

SEQ ID NO: 65612 - protein, 10 aa, synthetic construct
QGLRGDRDYL

SEQ ID NO: 65613 - protein, 10 aa, synthetic construct
QGLRGDYSSV

SEQ ID NO: 65614 - protein, 10 aa, synthetic construct
QGLRGDLTVT

SEQ ID NO: 65615 - protein, 10 aa, synthetic construct
QGLRGDLIGR

SEQ ID NO: 65616 - protein, 10 aa, synthetic construct
TRVRGDRGVV

SEQ ID NO: 65617 - protein, 10 aa, synthetic construct
QGIRGDHGVL

SEQ ID NO: 65618 - protein, 10 aa, synthetic construct
QGIRGDHVNL

SEQ ID NO: 65619 - protein, 10 aa, synthetic construct
QGIRGDYVGL

SEQ ID NO: 65620 - protein, 10 aa, synthetic construct
QGIRGDYSSV

SEQ ID NO: 65621 - protein, 10 aa, synthetic construct
QGIRGDQSTL

SEQ ID NO: 65622 - protein, 10 aa, synthetic construct
QGIRGDLLLS

SEQ ID NO: 65623 - protein, 10 aa, synthetic construct
QGMRGDHGVL

SEQ ID NO: 65624 - protein, 10 aa, synthetic construct
QGMRGDHVNL

SEQ ID NO: 65625 - protein, 10 aa, synthetic construct
QGMRGDYVGL

SEQ ID NO: 65626 - protein, 10 aa, synthetic construct
QGMRGDYSSV

SEQ ID NO: 65627 - protein, 10 aa, synthetic construct
APPRGDYTSV

SEQ ID NO: 65628 - protein, 10 aa, synthetic construct
TRVRGDRSQT

SEQ ID NO: 65629 - protein, 10 aa, synthetic construct
QGMRGDQSTL

SEQ ID NO: 65630 - protein, 10 aa, synthetic construct
QGMRGDLLLS

SEQ ID NO: 65631 - protein, 10 aa, synthetic construct
QGWRGDHVNL

SEQ ID NO: 65632 - protein, 10 aa, synthetic construct
QGWRGDRDYL

SEQ ID NO: 65633 - protein, 10 aa, synthetic construct
QGWRGDYSSV

SEQ ID NO: 65634 - protein, 10 aa, synthetic construct
QGWRGDLTVT

SEQ ID NO: 65635 - protein, 10 aa, synthetic construct
QGWRGDLIGR

SEQ ID NO: 65636 - protein, 10 aa, synthetic construct
QGFRGDHGVL

SEQ ID NO: 65637 - protein, 10 aa, synthetic construct
QGFRGDHVNL

SEQ ID NO: 65638 - protein, 10 aa, synthetic construct
QGFRGDYVGL

SEQ ID NO: 65639 - protein, 10 aa, synthetic construct
TRPRGDHGVL

SEQ ID NO: 65640 - protein, 10 aa, synthetic construct
QGFRGDYSSV

SEQ ID NO: 65641 - protein, 10 aa, synthetic construct
QGFRGDQSTL

SEQ ID NO: 65642 - protein, 10 aa, synthetic construct
QGFRGDLLLS

SEQ ID NO: 65643 - protein, 10 aa, synthetic construct
QGKRGDHGVL

SEQ ID NO: 65644 - protein, 10 aa, synthetic construct
QGKRGDHVNL

SEQ ID NO: 65645 - protein, 10 aa, synthetic construct
QGKRGDYVGL

SEQ ID NO: 65646 - protein, 10 aa, synthetic construct
QGKRGDYSSV

SEQ ID NO: 65647 - protein, 10 aa, synthetic construct
QGKRGDQSTL

SEQ ID NO: 65648 - protein, 10 aa, synthetic construct
QGKRGDLLLS

SEQ ID NO: 65649 - protein, 10 aa, synthetic construct
QGRRGDYTSV

SEQ ID NO: 65650 - protein, 10 aa, synthetic construct
TRPRGDYVGL

SEQ ID NO: 65651 - protein, 10 aa, synthetic construct
QGRRGDYTSM

SEQ ID NO: 65652 - protein, 10 aa, synthetic construct
QGHRGDHVNL

SEQ ID NO: 65653 - protein, 10 aa, synthetic construct
QGHRGDRDYL

SEQ ID NO: 65654 - protein, 10 aa, synthetic construct
QGHRGDYSSV

SEQ ID NO: 65655 - protein, 10 aa, synthetic construct
QGHRGDLTVT

SEQ ID NO: 65656 - protein, 10 aa, synthetic construct
QGHRGDLIGR

SEQ ID NO: 65657 - protein, 10 aa, synthetic construct
QGSRGDHVNL

SEQ ID NO: 65658 - protein, 10 aa, synthetic construct
QGSRGDRDYL

SEQ ID NO: 65659 - protein, 10 aa, synthetic construct
QGSRGDYSSV

SEQ ID NO: 65660 - protein, 10 aa, synthetic construct
QGSRGDLTVT

SEQ ID NO: 65661 - protein, 10 aa, synthetic construct
TRPRGDQSTL

SEQ ID NO: 65662 - protein, 10 aa, synthetic construct
QGSRGDLIGR

SEQ ID NO: 65663 - protein, 10 aa, synthetic construct
QGTRGDHVNL

SEQ ID NO: 65664 - protein, 10 aa, synthetic construct
QGTRGDRDYL

SEQ ID NO: 65665 - protein, 10 aa, synthetic construct
QGTRGDYSSV

SEQ ID NO: 65666 - protein, 10 aa, synthetic construct
QGTRGDLTVT

SEQ ID NO: 65667 - protein, 10 aa, synthetic construct
QGTRGDLIGR

SEQ ID NO: 65668 - protein, 10 aa, synthetic construct
QGYRGDHGVL

SEQ ID NO: 65669 - protein, 10 aa, synthetic construct
QGYRGDHVNL

SEQ ID NO: 65670 - protein, 10 aa, synthetic construct
QGYRGDYVGL

SEQ ID NO: 65671 - protein, 10 aa, synthetic construct
QGYRGDYSSV

SEQ ID NO: 65672 - protein, 10 aa, synthetic construct
TRPRGDLLLS

SEQ ID NO: 65673 - protein, 10 aa, synthetic construct
QGYRGDQSTL

SEQ ID NO: 65674 - protein, 10 aa, synthetic construct
QGYRGDLLLS

SEQ ID NO: 65675 - protein, 10 aa, synthetic construct
QGNRGDHGVL

SEQ ID NO: 65676 - protein, 10 aa, synthetic construct
QGNRGDHVNL

SEQ ID NO: 65677 - protein, 10 aa, synthetic construct
QGNRGDYVGL

SEQ ID NO: 65678 - protein, 10 aa, synthetic construct
QGNRGDYSSV

SEQ ID NO: 65679 - protein, 10 aa, synthetic construct
QGNRGDQSTL

SEQ ID NO: 65680 - protein, 10 aa, synthetic construct
QGNRGDLLLS

SEQ ID NO: 65681 - protein, 10 aa, synthetic construct
QGQRGDHVNL

SEQ ID NO: 65682 - protein, 10 aa, synthetic construct
QGQRGDRDYL

SEQ ID NO: 65683 - protein, 10 aa, synthetic construct
TRLRGDRGQI

SEQ ID NO: 65684 - protein, 10 aa, synthetic construct
QGQRGDYSSV

SEQ ID NO: 65685 - protein, 10 aa, synthetic construct
QGQRGDLTVT

SEQ ID NO: 65686 - protein, 10 aa, synthetic construct
QGQRGDLIGR

SEQ ID NO: 65687 - protein, 10 aa, synthetic construct
QGDRGDHVNL

SEQ ID NO: 65688 - protein, 10 aa, synthetic construct
QGDRGDRDYL

SEQ ID NO: 65689 - protein, 10 aa, synthetic construct
QGDRGDYSSV

SEQ ID NO: 65690 - protein, 10 aa, synthetic construct
QGDRGDLTVT

SEQ ID NO: 65691 - protein, 10 aa, synthetic construct
QGDRGDLIGR

SEQ ID NO: 65692 - protein, 10 aa, synthetic construct
QGERGDHVNL

SEQ ID NO: 65693 - protein, 10 aa, synthetic construct
QGERGDRDYL

SEQ ID NO: 65694 - protein, 10 aa, synthetic construct
TRLRGDRQGI

SEQ ID NO: 65695 - protein, 10 aa, synthetic construct
QGERGDYSSV

SEQ ID NO: 65696 - protein, 10 aa, synthetic construct
QGERGDLTVT

SEQ ID NO: 65697 - protein, 10 aa, synthetic construct
QGERGDLIGR

SEQ ID NO: 65698 - protein, 10 aa, synthetic construct
QAGRGDYTSV

SEQ ID NO: 65699 - protein, 10 aa, synthetic construct
QAGRGDYTSM

SEQ ID NO: 65700 - protein, 10 aa, synthetic construct
QAARGDYTSV

SEQ ID NO: 65701 - protein, 10 aa, synthetic construct
QAARGDYTSM

SEQ ID NO: 65702 - protein, 10 aa, synthetic construct
QAVRGDHVNL

SEQ ID NO: 65703 - protein, 10 aa, synthetic construct
QAVRGDRDYL

SEQ ID NO: 65704 - protein, 10 aa, synthetic construct
QAVRGDYSSV

SEQ ID NO: 65705 - protein, 10 aa, synthetic construct
TRLRGDRSVV

SEQ ID NO: 65706 - protein, 10 aa, synthetic construct
QAVRGDLTVT

SEQ ID NO: 65707 - protein, 10 aa, synthetic construct
QAVRGDLIGR

SEQ ID NO: 65708 - protein, 10 aa, synthetic construct
QAPRGDYTSV

SEQ ID NO: 65709 - protein, 10 aa, synthetic construct
QAPRGDYTSM

SEQ ID NO: 65710 - protein, 10 aa, synthetic construct
QALRGDHVNL

SEQ ID NO: 65711 - protein, 10 aa, synthetic construct
QALRGDRDYL

SEQ ID NO: 65712 - protein, 10 aa, synthetic construct
QALRGDYSSV

SEQ ID NO: 65713 - protein, 10 aa, synthetic construct
QALRGDLTVT

SEQ ID NO: 65714 - protein, 10 aa, synthetic construct
QALRGDLIGR

SEQ ID NO: 65715 - protein, 10 aa, synthetic construct
QAIRGDHGVL

SEQ ID NO: 65716 - protein, 10 aa, synthetic construct
TRLRGDRGVV

SEQ ID NO: 65717 - protein, 10 aa, synthetic construct
QAIRGDHVNL

SEQ ID NO: 65718 - protein, 10 aa, synthetic construct
QAIRGDYVGL

SEQ ID NO: 65719 - protein, 10 aa, synthetic construct
QAIRGDYSSV

SEQ ID NO: 65720 - protein, 10 aa, synthetic construct
QAIRGDQSTL

SEQ ID NO: 65721 - protein, 10 aa, synthetic construct
QAIRGDLLLS

SEQ ID NO: 65722 - protein, 10 aa, synthetic construct
QAMRGDHGVL

SEQ ID NO: 65723 - protein, 10 aa, synthetic construct
QAMRGDHVNL

SEQ ID NO: 65724 - protein, 10 aa, synthetic construct
QAMRGDYVGL

SEQ ID NO: 65725 - protein, 10 aa, synthetic construct
QAMRGDYSSV

SEQ ID NO: 65726 - protein, 10 aa, synthetic construct
QAMRGDQSTL

SEQ ID NO: 65727 - protein, 10 aa, synthetic construct
TRLRGDRSQT

SEQ ID NO: 65728 - protein, 10 aa, synthetic construct
QAMRGDLLLS

SEQ ID NO: 65729 - protein, 10 aa, synthetic construct
QAWRGDHVNL

SEQ ID NO: 65730 - protein, 10 aa, synthetic construct
QAWRGDRDYL

SEQ ID NO: 65731 - protein, 10 aa, synthetic construct
QAWRGDYSSV

SEQ ID NO: 65732 - protein, 10 aa, synthetic construct
QAWRGDLTVT

SEQ ID NO: 65733 - protein, 10 aa, synthetic construct
QAWRGDLIGR

SEQ ID NO: 65734 - protein, 10 aa, synthetic construct
QAFRGDHGVL

SEQ ID NO: 65735 - protein, 10 aa, synthetic construct
QAFRGDHVNL

SEQ ID NO: 65736 - protein, 10 aa, synthetic construct
QAFRGDYVGL

SEQ ID NO: 65737 - protein, 10 aa, synthetic construct
QAFRGDYSSV

SEQ ID NO: 65738 - protein, 10 aa, synthetic construct
APPRGDYTSM

SEQ ID NO: 65739 - protein, 10 aa, synthetic construct
TRWRGDRGQI

SEQ ID NO: 65740 - protein, 10 aa, synthetic construct
QAFRGDQSTL

SEQ ID NO: 65741 - protein, 10 aa, synthetic construct
QAFRGDLLLS

SEQ ID NO: 65742 - protein, 10 aa, synthetic construct
QAKRGDHGVL

SEQ ID NO: 65743 - protein, 10 aa, synthetic construct
QAKRGDHVNL

SEQ ID NO: 65744 - protein, 10 aa, synthetic construct
QAKRGDYVGL

SEQ ID NO: 65745 - protein, 10 aa, synthetic construct
QAKRGDYSSV

SEQ ID NO: 65746 - protein, 10 aa, synthetic construct
QAKRGDQSTL

SEQ ID NO: 65747 - protein, 10 aa, synthetic construct
QAKRGDLLLS

SEQ ID NO: 65748 - protein, 10 aa, synthetic construct
QARRGDYTSV

SEQ ID NO: 65749 - protein, 10 aa, synthetic construct
QARRGDYTSM

SEQ ID NO: 65750 - protein, 10 aa, synthetic construct
TRWRGDRQGI

SEQ ID NO: 65751 - protein, 10 aa, synthetic construct
QAHRGDHVNL

SEQ ID NO: 65752 - protein, 10 aa, synthetic construct
QAHRGDRDYL

SEQ ID NO: 65753 - protein, 10 aa, synthetic construct
QAHRGDYSSV

SEQ ID NO: 65754 - protein, 10 aa, synthetic construct
QAHRGDLTVT

SEQ ID NO: 65755 - protein, 10 aa, synthetic construct
QAHRGDLIGR

SEQ ID NO: 65756 - protein, 10 aa, synthetic construct
QASRGDHVNL

SEQ ID NO: 65757 - protein, 10 aa, synthetic construct
QASRGDRDYL

SEQ ID NO: 65758 - protein, 10 aa, synthetic construct
QASRGDYSSV

SEQ ID NO: 65759 - protein, 10 aa, synthetic construct
QASRGDLTVT

SEQ ID NO: 65760 - protein, 10 aa, synthetic construct
QASRGDLIGR

SEQ ID NO: 65761 - protein, 10 aa, synthetic construct
TRWRGDRSVV

SEQ ID NO: 65762 - protein, 10 aa, synthetic construct
QATRGDHVNL

SEQ ID NO: 65763 - protein, 10 aa, synthetic construct
QATRGDRDYL

SEQ ID NO: 65764 - protein, 10 aa, synthetic construct
QATRGDYSSV

SEQ ID NO: 65765 - protein, 10 aa, synthetic construct
QATRGDLTVT

SEQ ID NO: 65766 - protein, 10 aa, synthetic construct
QATRGDLIGR

SEQ ID NO: 65767 - protein, 10 aa, synthetic construct
QAYRGDHGVL

SEQ ID NO: 65768 - protein, 10 aa, synthetic construct
QAYRGDHVNL

SEQ ID NO: 65769 - protein, 10 aa, synthetic construct
QAYRGDYVGL

SEQ ID NO: 65770 - protein, 10 aa, synthetic construct
QAYRGDYSSV

SEQ ID NO: 65771 - protein, 10 aa, synthetic construct
QAYRGDQSTL

SEQ ID NO: 65772 - protein, 10 aa, synthetic construct
TRWRGDRGVV

SEQ ID NO: 65773 - protein, 10 aa, synthetic construct
QAYRGDLLLS

SEQ ID NO: 65774 - protein, 10 aa, synthetic construct
QANRGDHGVL

SEQ ID NO: 65775 - protein, 10 aa, synthetic construct
QANRGDHVNL

SEQ ID NO: 65776 - protein, 10 aa, synthetic construct
QANRGDYVGL

SEQ ID NO: 65777 - protein, 10 aa, synthetic construct
QANRGDYSSV

SEQ ID NO: 65778 - protein, 10 aa, synthetic construct
QANRGDQSTL

SEQ ID NO: 65779 - protein, 10 aa, synthetic construct
QANRGDLLLS

SEQ ID NO: 65780 - protein, 10 aa, synthetic construct
QAQRGDHVNL

SEQ ID NO: 65781 - protein, 10 aa, synthetic construct
QAQRGDRDYL

SEQ ID NO: 65782 - protein, 10 aa, synthetic construct
QAQRGDYSSV

SEQ ID NO: 65783 - protein, 10 aa, synthetic construct
TRWRGDRSQT

SEQ ID NO: 65784 - protein, 10 aa, synthetic construct
QAQRGDLTVT

SEQ ID NO: 65785 - protein, 10 aa, synthetic construct
QAQRGDLIGR

SEQ ID NO: 65786 - protein, 10 aa, synthetic construct
QADRGDHVNL

SEQ ID NO: 65787 - protein, 10 aa, synthetic construct
QADRGDRDYL

SEQ ID NO: 65788 - protein, 10 aa, synthetic construct
QADRGDYSSV

SEQ ID NO: 65789 - protein, 10 aa, synthetic construct
QADRGDLTVT

SEQ ID NO: 65790 - protein, 10 aa, synthetic construct
QADRGDLIGR

SEQ ID NO: 65791 - protein, 10 aa, synthetic construct
QAERGDHVNL

SEQ ID NO: 65792 - protein, 10 aa, synthetic construct
QAERGDRDYL

SEQ ID NO: 65793 - protein, 10 aa, synthetic construct
QAERGDYSSV

SEQ ID NO: 65794 - protein, 10 aa, synthetic construct
TRRRGDHGVL

SEQ ID NO: 65795 - protein, 10 aa, synthetic construct
QAERGDLTVT

SEQ ID NO: 65796 - protein, 10 aa, synthetic construct
QAERGDLIGR

SEQ ID NO: 65797 - protein, 10 aa, synthetic construct
QVGRGDYNSL

SEQ ID NO: 65798 - protein, 10 aa, synthetic construct
QVGRGDYTSV

SEQ ID NO: 65799 - protein, 10 aa, synthetic construct
QVGRGDYTSM

SEQ ID NO: 65800 - protein, 10 aa, synthetic construct
QVGRGDFQNT

SEQ ID NO: 65801 - protein, 10 aa, synthetic construct
QVARGDYNSL

SEQ ID NO: 65802 - protein, 10 aa, synthetic construct
QVARGDYTSV

SEQ ID NO: 65803 - protein, 10 aa, synthetic construct
QVARGDYTSM

SEQ ID NO: 65804 - protein, 10 aa, synthetic construct
QVARGDFQNT

SEQ ID NO: 65805 - protein, 10 aa, synthetic construct
TRRRGDYVGL

SEQ ID NO: 65806 - protein, 10 aa, synthetic construct
QVVRGDRDYL

SEQ ID NO: 65807 - protein, 10 aa, synthetic construct
QVVRGDYTSV

SEQ ID NO: 65808 - protein, 10 aa, synthetic construct
QVVRGDLTVT

SEQ ID NO: 65809 - protein, 10 aa, synthetic construct
QVVRGDLIGR

SEQ ID NO: 65810 - protein, 10 aa, synthetic construct
QVPRGDYNSL

SEQ ID NO: 65811 - protein, 10 aa, synthetic construct
QVPRGDYTSV

SEQ ID NO: 65812 - protein, 10 aa, synthetic construct
QVPRGDYTSM

SEQ ID NO: 65813 - protein, 10 aa, synthetic construct
QVPRGDFQNT

SEQ ID NO: 65814 - protein, 10 aa, synthetic construct
QVLRGDRDYL

SEQ ID NO: 65815 - protein, 10 aa, synthetic construct
QVLRGDYTSV

SEQ ID NO: 65816 - protein, 10 aa, synthetic construct
TRRRGDQSTL

SEQ ID NO: 65817 - protein, 10 aa, synthetic construct
QVLRGDLTVT

SEQ ID NO: 65818 - protein, 10 aa, synthetic construct
QVLRGDLIGR

SEQ ID NO: 65819 - protein, 10 aa, synthetic construct
QVIRGDHGVL

SEQ ID NO: 65820 - protein, 10 aa, synthetic construct
QVIRGDHVNL

SEQ ID NO: 65821 - protein, 10 aa, synthetic construct
QVIRGDRDYL

SEQ ID NO: 65822 - protein, 10 aa, synthetic construct
QVIRGDYSSV

SEQ ID NO: 65823 - protein, 10 aa, synthetic construct
QVIRGDLTVT

SEQ ID NO: 65824 - protein, 10 aa, synthetic construct
QVMRGDHGVL

SEQ ID NO: 65825 - protein, 10 aa, synthetic construct
QVMRGDHVNL

SEQ ID NO: 65826 - protein, 10 aa, synthetic construct
QVMRGDRDYL

SEQ ID NO: 65827 - protein, 10 aa, synthetic construct
TRRRGDLLLS

SEQ ID NO: 65828 - protein, 10 aa, synthetic construct
QVMRGDYSSV

SEQ ID NO: 65829 - protein, 10 aa, synthetic construct
QVMRGDLTVT

SEQ ID NO: 65830 - protein, 10 aa, synthetic construct
QVWRGDRDYL

SEQ ID NO: 65831 - protein, 10 aa, synthetic construct
QVWRGDYTSV

SEQ ID NO: 65832 - protein, 10 aa, synthetic construct
QVWRGDLTVT

SEQ ID NO: 65833 - protein, 10 aa, synthetic construct
QVWRGDLIGR

SEQ ID NO: 65834 - protein, 10 aa, synthetic construct
QVFRGDHGVL

SEQ ID NO: 65835 - protein, 10 aa, synthetic construct
QVFRGDHVNL

SEQ ID NO: 65836 - protein, 10 aa, synthetic construct
QVFRGDRDYL

SEQ ID NO: 65837 - protein, 10 aa, synthetic construct
QVFRGDYSSV

SEQ ID NO: 65838 - protein, 10 aa, synthetic construct
TRHRGDRGQI

SEQ ID NO: 65839 - protein, 10 aa, synthetic construct
QVFRGDLTVT

SEQ ID NO: 65840 - protein, 10 aa, synthetic construct
QVKRGDHGVL

SEQ ID NO: 65841 - protein, 10 aa, synthetic construct
QVKRGDHVNL

SEQ ID NO: 65842 - protein, 10 aa, synthetic construct
QVKRGDRDYL

SEQ ID NO: 65843 - protein, 10 aa, synthetic construct
QVKRGDYSSV

SEQ ID NO: 65844 - protein, 10 aa, synthetic construct
QVKRGDLTVT

SEQ ID NO: 65845 - protein, 10 aa, synthetic construct
QVRRGDYNSL

SEQ ID NO: 65846 - protein, 10 aa, synthetic construct
QVRRGDYTSV

SEQ ID NO: 65847 - protein, 10 aa, synthetic construct
QVRRGDYTSM

SEQ ID NO: 65848 - protein, 10 aa, synthetic construct
QVRRGDFQNT

SEQ ID NO: 65849 - protein, 10 aa, synthetic construct
APPRGDYNSL

SEQ ID NO: 65850 - protein, 10 aa, synthetic construct
TRHRGDRQGI

SEQ ID NO: 65851 - protein, 10 aa, synthetic construct
QVHRGDRDYL

SEQ ID NO: 65852 - protein, 10 aa, synthetic construct
QVHRGDYTSV

SEQ ID NO: 65853 - protein, 10 aa, synthetic construct
QVHRGDLTVT

SEQ ID NO: 65854 - protein, 10 aa, synthetic construct
QVHRGDLIGR

SEQ ID NO: 65855 - protein, 10 aa, synthetic construct
QVSRGDRDYL

SEQ ID NO: 65856 - protein, 10 aa, synthetic construct
QVSRGDYTSV

SEQ ID NO: 65857 - protein, 10 aa, synthetic construct
QVSRGDLTVT

SEQ ID NO: 65858 - protein, 10 aa, synthetic construct
QVSRGDLIGR

SEQ ID NO: 65859 - protein, 10 aa, synthetic construct
QVTRGDRDYL

SEQ ID NO: 65860 - protein, 10 aa, synthetic construct
QVTRGDYTSV

SEQ ID NO: 65861 - protein, 10 aa, synthetic construct
TRHRGDRSVV

SEQ ID NO: 65862 - protein, 10 aa, synthetic construct
QVTRGDLTVT

SEQ ID NO: 65863 - protein, 10 aa, synthetic construct
QVTRGDLIGR

SEQ ID NO: 65864 - protein, 10 aa, synthetic construct
QVYRGDHGVL

SEQ ID NO: 65865 - protein, 10 aa, synthetic construct
QVYRGDHVNL

SEQ ID NO: 65866 - protein, 10 aa, synthetic construct
QVYRGDRDYL

SEQ ID NO: 65867 - protein, 10 aa, synthetic construct
QVYRGDYSSV

SEQ ID NO: 65868 - protein, 10 aa, synthetic construct
QVYRGDLTVT

SEQ ID NO: 65869 - protein, 10 aa, synthetic construct
QVNRGDHGVL

SEQ ID NO: 65870 - protein, 10 aa, synthetic construct
QVNRGDHVNL

SEQ ID NO: 65871 - protein, 10 aa, synthetic construct
QVNRGDRDYL

SEQ ID NO: 65872 - protein, 10 aa, synthetic construct
TRHRGDRGVV

SEQ ID NO: 65873 - protein, 10 aa, synthetic construct
QVNRGDYSSV

SEQ ID NO: 65874 - protein, 10 aa, synthetic construct
QVNRGDLTVT

SEQ ID NO: 65875 - protein, 10 aa, synthetic construct
QVQRGDRDYL

SEQ ID NO: 65876 - protein, 10 aa, synthetic construct
QVQRGDYTSV

SEQ ID NO: 65877 - protein, 10 aa, synthetic construct
QVQRGDLTVT

SEQ ID NO: 65878 - protein, 10 aa, synthetic construct
QVQRGDLIGR

SEQ ID NO: 65879 - protein, 10 aa, synthetic construct
QVDRGDRDYL

SEQ ID NO: 65880 - protein, 10 aa, synthetic construct
QVDRGDYTSV

SEQ ID NO: 65881 - protein, 10 aa, synthetic construct
QVDRGDLTVT

SEQ ID NO: 65882 - protein, 10 aa, synthetic construct
QVDRGDLIGR

SEQ ID NO: 65883 - protein, 10 aa, synthetic construct
TRHRGDRSQT

SEQ ID NO: 65884 - protein, 10 aa, synthetic construct
QVERGDRDYL

SEQ ID NO: 65885 - protein, 10 aa, synthetic construct
QVERGDYTSV

SEQ ID NO: 65886 - protein, 10 aa, synthetic construct
QVERGDLTVT

SEQ ID NO: 65887 - protein, 10 aa, synthetic construct
QVERGDLIGR

SEQ ID NO: 65888 - protein, 10 aa, synthetic construct
QPGRGDYTSV

SEQ ID NO: 65889 - protein, 10 aa, synthetic construct
QPGRGDYTSM

SEQ ID NO: 65890 - protein, 10 aa, synthetic construct
QPARGDYTSV

SEQ ID NO: 65891 - protein, 10 aa, synthetic construct
QPARGDYTSM

SEQ ID NO: 65892 - protein, 10 aa, synthetic construct
QPVRGDHVNL

SEQ ID NO: 65893 - protein, 10 aa, synthetic construct
QPVRGDRDYL

SEQ ID NO: 65894 - protein, 10 aa, synthetic construct
TRSRGDRGQI

SEQ ID NO: 65895 - protein, 10 aa, synthetic construct
QPVRGDYSSV

SEQ ID NO: 65896 - protein, 10 aa, synthetic construct
QPVRGDLTVT

SEQ ID NO: 65897 - protein, 10 aa, synthetic construct
QPVRGDLIGR

SEQ ID NO: 65898 - protein, 10 aa, synthetic construct
QPPRGDYTSV

SEQ ID NO: 65899 - protein, 10 aa, synthetic construct
QPPRGDYTSM

SEQ ID NO: 65900 - protein, 10 aa, synthetic construct
QPLRGDHVNL

SEQ ID NO: 65901 - protein, 10 aa, synthetic construct
QPLRGDRDYL

SEQ ID NO: 65902 - protein, 10 aa, synthetic construct
QPLRGDYSSV

SEQ ID NO: 65903 - protein, 10 aa, synthetic construct
QPLRGDLTVT

SEQ ID NO: 65904 - protein, 10 aa, synthetic construct
QPLRGDLIGR

SEQ ID NO: 65905 - protein, 10 aa, synthetic construct
TRSRGDRQGI

SEQ ID NO: 65906 - protein, 10 aa, synthetic construct
QPIRGDHGVL

SEQ ID NO: 65907 - protein, 10 aa, synthetic construct
QPIRGDHVNL

SEQ ID NO: 65908 - protein, 10 aa, synthetic construct
QPIRGDYVGL

SEQ ID NO: 65909 - protein, 10 aa, synthetic construct
QPIRGDYSSV

SEQ ID NO: 65910 - protein, 10 aa, synthetic construct
QPIRGDQSTL

SEQ ID NO: 65911 - protein, 10 aa, synthetic construct
QPIRGDLLLS

SEQ ID NO: 65912 - protein, 10 aa, synthetic construct
QPMRGDHGVL

SEQ ID NO: 65913 - protein, 10 aa, synthetic construct
QPMRGDHVNL

SEQ ID NO: 65914 - protein, 10 aa, synthetic construct
QPMRGDYVGL

SEQ ID NO: 65915 - protein, 10 aa, synthetic construct
QPMRGDYSSV

SEQ ID NO: 65916 - protein, 10 aa, synthetic construct
TRSRGDRSVV

SEQ ID NO: 65917 - protein, 10 aa, synthetic construct
QPMRGDQSTL

SEQ ID NO: 65918 - protein, 10 aa, synthetic construct
QPMRGDLLLS

SEQ ID NO: 65919 - protein, 10 aa, synthetic construct
QPWRGDHVNL

SEQ ID NO: 65920 - protein, 10 aa, synthetic construct
QPWRGDRDYL

SEQ ID NO: 65921 - protein, 10 aa, synthetic construct
QPWRGDYSSV

SEQ ID NO: 65922 - protein, 10 aa, synthetic construct
QPWRGDLTVT

SEQ ID NO: 65923 - protein, 10 aa, synthetic construct
QPWRGDLIGR

SEQ ID NO: 65924 - protein, 10 aa, synthetic construct
QPFRGDHGVL

SEQ ID NO: 65925 - protein, 10 aa, synthetic construct
QPFRGDHVNL

SEQ ID NO: 65926 - protein, 10 aa, synthetic construct
QPFRGDYVGL

SEQ ID NO: 65927 - protein, 10 aa, synthetic construct
TRSRGDRGVV

SEQ ID NO: 65928 - protein, 10 aa, synthetic construct
QPFRGDYSSV

SEQ ID NO: 65929 - protein, 10 aa, synthetic construct
QPFRGDQSTL

SEQ ID NO: 65930 - protein, 10 aa, synthetic construct
QPFRGDLLLS

SEQ ID NO: 65931 - protein, 10 aa, synthetic construct
QPKRGDHGVL

SEQ ID NO: 65932 - protein, 10 aa, synthetic construct
QPKRGDHVNL

SEQ ID NO: 65933 - protein, 10 aa, synthetic construct
QPKRGDYVGL

SEQ ID NO: 65934 - protein, 10 aa, synthetic construct
QPKRGDYSSV

SEQ ID NO: 65935 - protein, 10 aa, synthetic construct
QPKRGDQSTL

SEQ ID NO: 65936 - protein, 10 aa, synthetic construct
QPKRGDLLLS

SEQ ID NO: 65937 - protein, 10 aa, synthetic construct
QPRRGDYTSV

SEQ ID NO: 65938 - protein, 10 aa, synthetic construct
TRSRGDRSQT

SEQ ID NO: 65939 - protein, 10 aa, synthetic construct
QPRRGDYTSM

SEQ ID NO: 65940 - protein, 10 aa, synthetic construct
QPHRGDHVNL

SEQ ID NO: 65941 - protein, 10 aa, synthetic construct
QPHRGDRDYL

SEQ ID NO: 65942 - protein, 10 aa, synthetic construct
QPHRGDYSSV

SEQ ID NO: 65943 - protein, 10 aa, synthetic construct
QPHRGDLTVT

SEQ ID NO: 65944 - protein, 10 aa, synthetic construct
QPHRGDLIGR

SEQ ID NO: 65945 - protein, 10 aa, synthetic construct
QPSRGDHVNL

SEQ ID NO: 65946 - protein, 10 aa, synthetic construct
QPSRGDRDYL

SEQ ID NO: 65947 - protein, 10 aa, synthetic construct
QPSRGDYSSV

SEQ ID NO: 65948 - protein, 10 aa, synthetic construct
QPSRGDLTVT

SEQ ID NO: 65949 - protein, 10 aa, synthetic construct
TRTRGDRGQI

SEQ ID NO: 65950 - protein, 10 aa, synthetic construct
QPSRGDLIGR

SEQ ID NO: 65951 - protein, 10 aa, synthetic construct
QPTRGDHVNL

SEQ ID NO: 65952 - protein, 10 aa, synthetic construct
QPTRGDRDYL

SEQ ID NO: 65953 - protein, 10 aa, synthetic construct
QPTRGDYSSV

SEQ ID NO: 65954 - protein, 10 aa, synthetic construct
QPTRGDLTVT

SEQ ID NO: 65955 - protein, 10 aa, synthetic construct
QPTRGDLIGR

SEQ ID NO: 65956 - protein, 10 aa, synthetic construct
QPYRGDHGVL

SEQ ID NO: 65957 - protein, 10 aa, synthetic construct
QPYRGDHVNL

SEQ ID NO: 65958 - protein, 10 aa, synthetic construct
QPYRGDYVGL

SEQ ID NO: 65959 - protein, 10 aa, synthetic construct
QPYRGDYSSV

SEQ ID NO: 65960 - protein, 10 aa, synthetic construct
APPRGDFQNT

SEQ ID NO: 65961 - protein, 10 aa, synthetic construct
TRTRGDRQGI

SEQ ID NO: 65962 - protein, 10 aa, synthetic construct
QPYRGDQSTL

SEQ ID NO: 65963 - protein, 10 aa, synthetic construct
QPYRGDLLLS

SEQ ID NO: 65964 - protein, 10 aa, synthetic construct
QPNRGDHGVL

SEQ ID NO: 65965 - protein, 10 aa, synthetic construct
QPNRGDHVNL

SEQ ID NO: 65966 - protein, 10 aa, synthetic construct
QPNRGDYVGL

SEQ ID NO: 65967 - protein, 10 aa, synthetic construct
QPNRGDYSSV

SEQ ID NO: 65968 - protein, 10 aa, synthetic construct
QPNRGDQSTL

SEQ ID NO: 65969 - protein, 10 aa, synthetic construct
QPNRGDLLLS

SEQ ID NO: 65970 - protein, 10 aa, synthetic construct
QPQRGDHVNL

SEQ ID NO: 65971 - protein, 10 aa, synthetic construct
QPQRGDRDYL

SEQ ID NO: 65972 - protein, 10 aa, synthetic construct
TRTRGDRSVV

SEQ ID NO: 65973 - protein, 10 aa, synthetic construct
QPQRGDYSSV

SEQ ID NO: 65974 - protein, 10 aa, synthetic construct
QPQRGDLTVT

SEQ ID NO: 65975 - protein, 10 aa, synthetic construct
QPQRGDLIGR

SEQ ID NO: 65976 - protein, 10 aa, synthetic construct
QPDRGDHVNL

SEQ ID NO: 65977 - protein, 10 aa, synthetic construct
QPDRGDRDYL

SEQ ID NO: 65978 - protein, 10 aa, synthetic construct
QPDRGDYSSV

SEQ ID NO: 65979 - protein, 10 aa, synthetic construct
QPDRGDLTVT

SEQ ID NO: 65980 - protein, 10 aa, synthetic construct
QPDRGDLIGR

SEQ ID NO: 65981 - protein, 10 aa, synthetic construct
QPERGDHVNL

SEQ ID NO: 65982 - protein, 10 aa, synthetic construct
QPERGDRDYL

SEQ ID NO: 65983 - protein, 10 aa, synthetic construct
TRTRGDRGVV

SEQ ID NO: 65984 - protein, 10 aa, synthetic construct
QPERGDYSSV

SEQ ID NO: 65985 - protein, 10 aa, synthetic construct
QPERGDLTVT

SEQ ID NO: 65986 - protein, 10 aa, synthetic construct
QPERGDLIGR

SEQ ID NO: 65987 - protein, 10 aa, synthetic construct
QLGRGDYNSL

SEQ ID NO: 65988 - protein, 10 aa, synthetic construct
QLGRGDYTSV

SEQ ID NO: 65989 - protein, 10 aa, synthetic construct
QLGRGDYTSM

SEQ ID NO: 65990 - protein, 10 aa, synthetic construct
QLGRGDFQNT

SEQ ID NO: 65991 - protein, 10 aa, synthetic construct
QLARGDYNSL

SEQ ID NO: 65992 - protein, 10 aa, synthetic construct
QLARGDYTSV

SEQ ID NO: 65993 - protein, 10 aa, synthetic construct
QLARGDYTSM

SEQ ID NO: 65994 - protein, 10 aa, synthetic construct
TRTRGDRSQT

SEQ ID NO: 65995 - protein, 10 aa, synthetic construct
QLARGDFQNT

SEQ ID NO: 65996 - protein, 10 aa, synthetic construct
QLVRGDRDYL

SEQ ID NO: 65997 - protein, 10 aa, synthetic construct
QLVRGDYTSV

SEQ ID NO: 65998 - protein, 10 aa, synthetic construct
QLVRGDLTVT

SEQ ID NO: 65999 - protein, 10 aa, synthetic construct
QLVRGDLIGR

SEQ ID NO: 66000 - protein, 10 aa, synthetic construct
QLPRGDYNSL

SEQ ID NO: 66001 - protein, 10 aa, synthetic construct
QLPRGDYTSV

SEQ ID NO: 66002 - protein, 10 aa, synthetic construct
QLPRGDYTSM

SEQ ID NO: 66003 - protein, 10 aa, synthetic construct
QLPRGDFQNT

SEQ ID NO: 66004 - protein, 10 aa, synthetic construct
QLLRGDRDYL

SEQ ID NO: 66005 - protein, 10 aa, synthetic construct
TRQRGDRGQI

SEQ ID NO: 66006 - protein, 10 aa, synthetic construct
QLLRGDYTSV

SEQ ID NO: 66007 - protein, 10 aa, synthetic construct
QLLRGDLTVT

SEQ ID NO: 66008 - protein, 10 aa, synthetic construct
QLLRGDLIGR

SEQ ID NO: 66009 - protein, 10 aa, synthetic construct
QLIRGDHGVL

SEQ ID NO: 66010 - protein, 10 aa, synthetic construct
QLIRGDHVNL

SEQ ID NO: 66011 - protein, 10 aa, synthetic construct
QLIRGDRDYL

SEQ ID NO: 66012 - protein, 10 aa, synthetic construct
QLIRGDYSSV

SEQ ID NO: 66013 - protein, 10 aa, synthetic construct
QLIRGDLTVT

SEQ ID NO: 66014 - protein, 10 aa, synthetic construct
QLMRGDHGVL

SEQ ID NO: 66015 - protein, 10 aa, synthetic construct
QLMRGDHVNL

SEQ ID NO: 66016 - protein, 10 aa, synthetic construct
TRQRGDRQGI

SEQ ID NO: 66017 - protein, 10 aa, synthetic construct
QLMRGDRDYL

SEQ ID NO: 66018 - protein, 10 aa, synthetic construct
QLMRGDYSSV

SEQ ID NO: 66019 - protein, 10 aa, synthetic construct
QLMRGDLTVT

SEQ ID NO: 66020 - protein, 10 aa, synthetic construct
QLWRGDRDYL

SEQ ID NO: 66021 - protein, 10 aa, synthetic construct
QLWRGDYTSV

SEQ ID NO: 66022 - protein, 10 aa, synthetic construct
QLWRGDLTVT

SEQ ID NO: 66023 - protein, 10 aa, synthetic construct
QLWRGDLIGR

SEQ ID NO: 66024 - protein, 10 aa, synthetic construct
QLFRGDHGVL

SEQ ID NO: 66025 - protein, 10 aa, synthetic construct
QLFRGDHVNL

SEQ ID NO: 66026 - protein, 10 aa, synthetic construct
QLFRGDRDYL

SEQ ID NO: 66027 - protein, 10 aa, synthetic construct
TRQRGDRSVV

SEQ ID NO: 66028 - protein, 10 aa, synthetic construct
QLFRGDYSSV

SEQ ID NO: 66029 - protein, 10 aa, synthetic construct
QLFRGDLTVT

SEQ ID NO: 66030 - protein, 10 aa, synthetic construct
QLKRGDHGVL

SEQ ID NO: 66031 - protein, 10 aa, synthetic construct
QLKRGDHVNL

SEQ ID NO: 66032 - protein, 10 aa, synthetic construct
QLKRGDRDYL

SEQ ID NO: 66033 - protein, 10 aa, synthetic construct
QLKRGDYSSV

SEQ ID NO: 66034 - protein, 10 aa, synthetic construct
QLKRGDLTVT

SEQ ID NO: 66035 - protein, 10 aa, synthetic construct
QLRRGDYNSL

SEQ ID NO: 66036 - protein, 10 aa, synthetic construct
QLRRGDYTSV

SEQ ID NO: 66037 - protein, 10 aa, synthetic construct
QLRRGDYTSM

SEQ ID NO: 66038 - protein, 10 aa, synthetic construct
TRQRGDRGVV

SEQ ID NO: 66039 - protein, 10 aa, synthetic construct
QLRRGDFQNT

SEQ ID NO: 66040 - protein, 10 aa, synthetic construct
QLHRGDRDYL

SEQ ID NO: 66041 - protein, 10 aa, synthetic construct
QLHRGDYTSV

SEQ ID NO: 66042 - protein, 10 aa, synthetic construct
QLHRGDLTVT

SEQ ID NO: 66043 - protein, 10 aa, synthetic construct
QLHRGDLIGR

SEQ ID NO: 66044 - protein, 10 aa, synthetic construct
QLSRGDRDYL

SEQ ID NO: 66045 - protein, 10 aa, synthetic construct
QLSRGDYTSV

SEQ ID NO: 66046 - protein, 10 aa, synthetic construct
QLSRGDLTVT

SEQ ID NO: 66047 - protein, 10 aa, synthetic construct
QLSRGDLIGR

SEQ ID NO: 66048 - protein, 10 aa, synthetic construct
QLTRGDRDYL

SEQ ID NO: 66049 - protein, 10 aa, synthetic construct
TRQRGDRSQT

SEQ ID NO: 66050 - protein, 10 aa, synthetic construct
QLTRGDYTSV

SEQ ID NO: 66051 - protein, 10 aa, synthetic construct
QLTRGDLTVT

SEQ ID NO: 66052 - protein, 10 aa, synthetic construct
QLTRGDLIGR

SEQ ID NO: 66053 - protein, 10 aa, synthetic construct
QLYRGDHGVL

SEQ ID NO: 66054 - protein, 10 aa, synthetic construct
QLYRGDHVNL

SEQ ID NO: 66055 - protein, 10 aa, synthetic construct
QLYRGDRDYL

SEQ ID NO: 66056 - protein, 10 aa, synthetic construct
QLYRGDYSSV

SEQ ID NO: 66057 - protein, 10 aa, synthetic construct
QLYRGDLTVT

SEQ ID NO: 66058 - protein, 10 aa, synthetic construct
QLNRGDHGVL

SEQ ID NO: 66059 - protein, 10 aa, synthetic construct
QLNRGDHVNL

SEQ ID NO: 66060 - protein, 10 aa, synthetic construct
TRDRGDRGQI

SEQ ID NO: 66061 - protein, 10 aa, synthetic construct
QLNRGDRDYL

SEQ ID NO: 66062 - protein, 10 aa, synthetic construct
QLNRGDYSSV

SEQ ID NO: 66063 - protein, 10 aa, synthetic construct
QLNRGDLTVT

SEQ ID NO: 66064 - protein, 10 aa, synthetic construct
QLQRGDRDYL

SEQ ID NO: 66065 - protein, 10 aa, synthetic construct
QLQRGDYTSV

SEQ ID NO: 66066 - protein, 10 aa, synthetic construct
QLQRGDLTVT

SEQ ID NO: 66067 - protein, 10 aa, synthetic construct
QLQRGDLIGR

SEQ ID NO: 66068 - protein, 10 aa, synthetic construct
QLDRGDRDYL

SEQ ID NO: 66069 - protein, 10 aa, synthetic construct
QLDRGDYTSV

SEQ ID NO: 66070 - protein, 10 aa, synthetic construct
QLDRGDLTVT

SEQ ID NO: 66071 - protein, 10 aa, synthetic construct
APPRGDFNNT

SEQ ID NO: 66072 - protein, 10 aa, synthetic construct
TRDRGDRQGI

SEQ ID NO: 66073 - protein, 10 aa, synthetic construct
QLDRGDLIGR

SEQ ID NO: 66074 - protein, 10 aa, synthetic construct
QLERGDRDYL

SEQ ID NO: 66075 - protein, 10 aa, synthetic construct
QLERGDYTSV

SEQ ID NO: 66076 - protein, 10 aa, synthetic construct
QLERGDLTVT

SEQ ID NO: 66077 - protein, 10 aa, synthetic construct
QLERGDLIGR

SEQ ID NO: 66078 - protein, 10 aa, synthetic construct
QIGRGDHGVL

SEQ ID NO: 66079 - protein, 10 aa, synthetic construct
QIGRGDHVNL

SEQ ID NO: 66080 - protein, 10 aa, synthetic construct
QIGRGDYVGL

SEQ ID NO: 66081 - protein, 10 aa, synthetic construct
QIGRGDYSSV

SEQ ID NO: 66082 - protein, 10 aa, synthetic construct
QIGRGDQSTL

SEQ ID NO: 66083 - protein, 10 aa, synthetic construct
TRDRGDRSVV

SEQ ID NO: 66084 - protein, 10 aa, synthetic construct
QIGRGDLLLS

SEQ ID NO: 66085 - protein, 10 aa, synthetic construct
QIARGDHGVL

SEQ ID NO: 66086 - protein, 10 aa, synthetic construct
QIARGDHVNL

SEQ ID NO: 66087 - protein, 10 aa, synthetic construct
QIARGDYVGL

SEQ ID NO: 66088 - protein, 10 aa, synthetic construct
QIARGDYSSV

SEQ ID NO: 66089 - protein, 10 aa, synthetic construct
QIARGDQSTL

SEQ ID NO: 66090 - protein, 10 aa, synthetic construct
QIARGDLLLS

SEQ ID NO: 66091 - protein, 10 aa, synthetic construct
QIVRGDRGQI

SEQ ID NO: 66092 - protein, 10 aa, synthetic construct
QIVRGDRQGI

SEQ ID NO: 66093 - protein, 10 aa, synthetic construct
QIVRGDRSVV

SEQ ID NO: 66094 - protein, 10 aa, synthetic construct
TRDRGDRGVV

SEQ ID NO: 66095 - protein, 10 aa, synthetic construct
QIVRGDRGVV

SEQ ID NO: 66096 - protein, 10 aa, synthetic construct
QIVRGDYVGL

SEQ ID NO: 66097 - protein, 10 aa, synthetic construct
QIVRGDQSTL

SEQ ID NO: 66098 - protein, 10 aa, synthetic construct
QIVRGDRSQT

SEQ ID NO: 66099 - protein, 10 aa, synthetic construct
QIVRGDLLLS

SEQ ID NO: 66100 - protein, 10 aa, synthetic construct
QIPRGDHGVL

SEQ ID NO: 66101 - protein, 10 aa, synthetic construct
QIPRGDHVNL

SEQ ID NO: 66102 - protein, 10 aa, synthetic construct
QIPRGDYVGL

SEQ ID NO: 66103 - protein, 10 aa, synthetic construct
QIPRGDYSSV

SEQ ID NO: 66104 - protein, 10 aa, synthetic construct
QIPRGDQSTL

SEQ ID NO: 66105 - protein, 10 aa, synthetic construct
TRDRGDRSQT

SEQ ID NO: 66106 - protein, 10 aa, synthetic construct
QIPRGDLLLS

SEQ ID NO: 66107 - protein, 10 aa, synthetic construct
QILRGDRGQI

SEQ ID NO: 66108 - protein, 10 aa, synthetic construct
QILRGDRQGI

SEQ ID NO: 66109 - protein, 10 aa, synthetic construct
QILRGDRSVV

SEQ ID NO: 66110 - protein, 10 aa, synthetic construct
QILRGDRGVV

SEQ ID NO: 66111 - protein, 10 aa, synthetic construct
QILRGDYVGL

SEQ ID NO: 66112 - protein, 10 aa, synthetic construct
QILRGDQSTL

SEQ ID NO: 66113 - protein, 10 aa, synthetic construct
QILRGDRSQT

SEQ ID NO: 66114 - protein, 10 aa, synthetic construct
QILRGDLLLS

SEQ ID NO: 66115 - protein, 10 aa, synthetic construct
QIIRGDRSVV

SEQ ID NO: 66116 - protein, 10 aa, synthetic construct
TRERGDRGQI

SEQ ID NO: 66117 - protein, 10 aa, synthetic construct
QIIRGDRSQT

SEQ ID NO: 66118 - protein, 10 aa, synthetic construct
QIMRGDRSVV

SEQ ID NO: 66119 - protein, 10 aa, synthetic construct
QIMRGDRSQT

SEQ ID NO: 66120 - protein, 10 aa, synthetic construct
QIWRGDRGQI

SEQ ID NO: 66121 - protein, 10 aa, synthetic construct
QIWRGDRQGI

SEQ ID NO: 66122 - protein, 10 aa, synthetic construct
QIWRGDRSVV

SEQ ID NO: 66123 - protein, 10 aa, synthetic construct
QIWRGDRGVV

SEQ ID NO: 66124 - protein, 10 aa, synthetic construct
QIWRGDYVGL

SEQ ID NO: 66125 - protein, 10 aa, synthetic construct
QIWRGDQSTL

SEQ ID NO: 66126 - protein, 10 aa, synthetic construct
QIWRGDRSQT

SEQ ID NO: 66127 - protein, 10 aa, synthetic construct
TRERGDRQGI

SEQ ID NO: 66128 - protein, 10 aa, synthetic construct
QIWRGDLLLS

SEQ ID NO: 66129 - protein, 10 aa, synthetic construct
QIFRGDRSVV

SEQ ID NO: 66130 - protein, 10 aa, synthetic construct
QIFRGDRSQT

SEQ ID NO: 66131 - protein, 10 aa, synthetic construct
QIKRGDRSVV

SEQ ID NO: 66132 - protein, 10 aa, synthetic construct
QIKRGDRSQT

SEQ ID NO: 66133 - protein, 10 aa, synthetic construct
QIRRGDHGVL

SEQ ID NO: 66134 - protein, 10 aa, synthetic construct
QIRRGDHVNL

SEQ ID NO: 66135 - protein, 10 aa, synthetic construct
QIRRGDYVGL

SEQ ID NO: 66136 - protein, 10 aa, synthetic construct
QIRRGDYSSV

SEQ ID NO: 66137 - protein, 10 aa, synthetic construct
QIRRGDQSTL

SEQ ID NO: 66138 - protein, 10 aa, synthetic construct
TRERGDRSVV

SEQ ID NO: 66139 - protein, 10 aa, synthetic construct
QIRRGDLLLS

SEQ ID NO: 66140 - protein, 10 aa, synthetic construct
QIHRGDRGQI

SEQ ID NO: 66141 - protein, 10 aa, synthetic construct
QIHRGDRQGI

SEQ ID NO: 66142 - protein, 10 aa, synthetic construct
QIHRGDRSVV

SEQ ID NO: 66143 - protein, 10 aa, synthetic construct
QIHRGDRGVV

SEQ ID NO: 66144 - protein, 10 aa, synthetic construct
QIHRGDYVGL

SEQ ID NO: 66145 - protein, 10 aa, synthetic construct
QIHRGDQSTL

SEQ ID NO: 66146 - protein, 10 aa, synthetic construct
QIHRGDRSQT

SEQ ID NO: 66147 - protein, 10 aa, synthetic construct
QIHRGDLLLS

SEQ ID NO: 66148 - protein, 10 aa, synthetic construct
QISRGDRGQI

SEQ ID NO: 66149 - protein, 10 aa, synthetic construct
TRERGDRGVV

SEQ ID NO: 66150 - protein, 10 aa, synthetic construct
QISRGDRQGI

SEQ ID NO: 66151 - protein, 10 aa, synthetic construct
QISRGDRSVV

SEQ ID NO: 66152 - protein, 10 aa, synthetic construct
QISRGDRGVV

SEQ ID NO: 66153 - protein, 10 aa, synthetic construct
QISRGDYVGL

SEQ ID NO: 66154 - protein, 10 aa, synthetic construct
QISRGDQSTL

SEQ ID NO: 66155 - protein, 10 aa, synthetic construct
QISRGDRSQT

SEQ ID NO: 66156 - protein, 10 aa, synthetic construct
QISRGDLLLS

SEQ ID NO: 66157 - protein, 10 aa, synthetic construct
QITRGDRGQI

SEQ ID NO: 66158 - protein, 10 aa, synthetic construct
QITRGDRQGI

SEQ ID NO: 66159 - protein, 10 aa, synthetic construct
QITRGDRSVV

SEQ ID NO: 66160 - protein, 10 aa, synthetic construct
TRERGDRSQT

SEQ ID NO: 66161 - protein, 10 aa, synthetic construct
QITRGDRGVV

SEQ ID NO: 66162 - protein, 10 aa, synthetic construct
QITRGDYVGL

SEQ ID NO: 66163 - protein, 10 aa, synthetic construct
QITRGDQSTL

SEQ ID NO: 66164 - protein, 10 aa, synthetic construct
QITRGDRSQT

SEQ ID NO: 66165 - protein, 10 aa, synthetic construct
QITRGDLLLS

SEQ ID NO: 66166 - protein, 10 aa, synthetic construct
QIYRGDRSVV

SEQ ID NO: 66167 - protein, 10 aa, synthetic construct
QIYRGDRSQT

SEQ ID NO: 66168 - protein, 10 aa, synthetic construct
QINRGDRSVV

SEQ ID NO: 66169 - protein, 10 aa, synthetic construct
QINRGDRSQT

SEQ ID NO: 66170 - protein, 10 aa, synthetic construct
QIQRGDRGQI

SEQ ID NO: 66171 - protein, 10 aa, synthetic construct
THGRGDRGQI

SEQ ID NO: 66172 - protein, 10 aa, synthetic construct
QIQRGDRQGI

SEQ ID NO: 66173 - protein, 10 aa, synthetic construct
QIQRGDRSVV

SEQ ID NO: 66174 - protein, 10 aa, synthetic construct
QIQRGDRGVV

SEQ ID NO: 66175 - protein, 10 aa, synthetic construct
QIQRGDYVGL

SEQ ID NO: 66176 - protein, 10 aa, synthetic construct
QIQRGDQSTL

SEQ ID NO: 66177 - protein, 10 aa, synthetic construct
QIQRGDRSQT

SEQ ID NO: 66178 - protein, 10 aa, synthetic construct
QIQRGDLLLS

SEQ ID NO: 66179 - protein, 10 aa, synthetic construct
QIDRGDRGQI

SEQ ID NO: 66180 - protein, 10 aa, synthetic construct
QIDRGDRQGI

SEQ ID NO: 66181 - protein, 10 aa, synthetic construct
QIDRGDRSVV

SEQ ID NO: 66182 - protein, 10 aa, synthetic construct
SKKRGDLIGR

SEQ ID NO: 66183 - protein, 10 aa, synthetic construct
APPRGDFNNL

SEQ ID NO: 66184 - protein, 10 aa, synthetic construct
THGRGDRQGI

SEQ ID NO: 66185 - protein, 10 aa, synthetic construct
QIDRGDRGVV

SEQ ID NO: 66186 - protein, 10 aa, synthetic construct
QIDRGDYVGL

SEQ ID NO: 66187 - protein, 10 aa, synthetic construct
QIDRGDQSTL

SEQ ID NO: 66188 - protein, 10 aa, synthetic construct
QIDRGDRSQT

SEQ ID NO: 66189 - protein, 10 aa, synthetic construct
QIDRGDLLLS

SEQ ID NO: 66190 - protein, 10 aa, synthetic construct
QIERGDRGQI

SEQ ID NO: 66191 - protein, 10 aa, synthetic construct
QIERGDRQGI

SEQ ID NO: 66192 - protein, 10 aa, synthetic construct
QIERGDRSVV

SEQ ID NO: 66193 - protein, 10 aa, synthetic construct
QIERGDRGVV

SEQ ID NO: 66194 - protein, 10 aa, synthetic construct
QIERGDYVGL

SEQ ID NO: 66195 - protein, 10 aa, synthetic construct
THGRGDRSVV

SEQ ID NO: 66196 - protein, 10 aa, synthetic construct
QIERGDQSTL

SEQ ID NO: 66197 - protein, 10 aa, synthetic construct
QIERGDRSQT

SEQ ID NO: 66198 - protein, 10 aa, synthetic construct
QIERGDLLLS

SEQ ID NO: 66199 - protein, 10 aa, synthetic construct
QMGRGDRDYL

SEQ ID NO: 66200 - protein, 10 aa, synthetic construct
QMGRGDYVGL

SEQ ID NO: 66201 - protein, 10 aa, synthetic construct
QMGRGDYSSV

SEQ ID NO: 66202 - protein, 10 aa, synthetic construct
QMGRGDYTSV

SEQ ID NO: 66203 - protein, 10 aa, synthetic construct
QMGRGDQSTL

SEQ ID NO: 66204 - protein, 10 aa, synthetic construct
QMARGDRDYL

SEQ ID NO: 66205 - protein, 10 aa, synthetic construct
QMARGDYVGL

SEQ ID NO: 66206 - protein, 10 aa, synthetic construct
THGRGDRGVV

SEQ ID NO: 66207 - protein, 10 aa, synthetic construct
QMARGDYSSV

SEQ ID NO: 66208 - protein, 10 aa, synthetic construct
QMARGDYTSV

SEQ ID NO: 66209 - protein, 10 aa, synthetic construct
QMARGDQSTL

SEQ ID NO: 66210 - protein, 10 aa, synthetic construct
QMVRGDRDYL

SEQ ID NO: 66211 - protein, 10 aa, synthetic construct
QMVRGDYVGL

SEQ ID NO: 66212 - protein, 10 aa, synthetic construct
QMVRGDYSSV

SEQ ID NO: 66213 - protein, 10 aa, synthetic construct
QMVRGDYTSV

SEQ ID NO: 66214 - protein, 10 aa, synthetic construct
QMVRGDQSTL

SEQ ID NO: 66215 - protein, 10 aa, synthetic construct
QMPRGDRDYL

SEQ ID NO: 66216 - protein, 10 aa, synthetic construct
QMPRGDYVGL

SEQ ID NO: 66217 - protein, 10 aa, synthetic construct
THGRGDRSQT

SEQ ID NO: 66218 - protein, 10 aa, synthetic construct
QMPRGDYSSV

SEQ ID NO: 66219 - protein, 10 aa, synthetic construct
QMPRGDYTSV

SEQ ID NO: 66220 - protein, 10 aa, synthetic construct
QMPRGDQSTL

SEQ ID NO: 66221 - protein, 10 aa, synthetic construct
QMLRGDRDYL

SEQ ID NO: 66222 - protein, 10 aa, synthetic construct
QMLRGDYVGL

SEQ ID NO: 66223 - protein, 10 aa, synthetic construct
QMLRGDYSSV

SEQ ID NO: 66224 - protein, 10 aa, synthetic construct
QMLRGDYTSV

SEQ ID NO: 66225 - protein, 10 aa, synthetic construct
QMLRGDQSTL

SEQ ID NO: 66226 - protein, 10 aa, synthetic construct
QMIRGDHGVL

SEQ ID NO: 66227 - protein, 10 aa, synthetic construct
QMIRGDRSVV

SEQ ID NO: 66228 - protein, 10 aa, synthetic construct
THARGDRGQI

SEQ ID NO: 66229 - protein, 10 aa, synthetic construct
QMIRGDRGVV

SEQ ID NO: 66230 - protein, 10 aa, synthetic construct
QMIRGDLTVT

SEQ ID NO: 66231 - protein, 10 aa, synthetic construct
QMIRGDLIGR

SEQ ID NO: 66232 - protein, 10 aa, synthetic construct
QMIRGDLLLS

SEQ ID NO: 66233 - protein, 10 aa, synthetic construct
QMMRGDHGVL

SEQ ID NO: 66234 - protein, 10 aa, synthetic construct
QMMRGDRGQI

SEQ ID NO: 66235 - protein, 10 aa, synthetic construct
QMMRGDRQGI

SEQ ID NO: 66236 - protein, 10 aa, synthetic construct
QMMRGDRGVV

SEQ ID NO: 66237 - protein, 10 aa, synthetic construct
QMMRGDYVGL

SEQ ID NO: 66238 - protein, 10 aa, synthetic construct
QMMRGDLIGR

SEQ ID NO: 66239 - protein, 10 aa, synthetic construct
THARGDRQGI

SEQ ID NO: 66240 - protein, 10 aa, synthetic construct
QMMRGDQSTL

SEQ ID NO: 66241 - protein, 10 aa, synthetic construct
QMMRGDLLLS

SEQ ID NO: 66242 - protein, 10 aa, synthetic construct
QMWRGDHGVL

SEQ ID NO: 66243 - protein, 10 aa, synthetic construct
QMWRGDHVNL

SEQ ID NO: 66244 - protein, 10 aa, synthetic construct
QMWRGDRDYL

SEQ ID NO: 66245 - protein, 10 aa, synthetic construct
QMWRGDYSSV

SEQ ID NO: 66246 - protein, 10 aa, synthetic construct
QMWRGDLTVT

SEQ ID NO: 66247 - protein, 10 aa, synthetic construct
QMFRGDHGVL

SEQ ID NO: 66248 - protein, 10 aa, synthetic construct
QMFRGDRSVV

SEQ ID NO: 66249 - protein, 10 aa, synthetic construct
QMFRGDRGVV

SEQ ID NO: 66250 - protein, 10 aa, synthetic construct
THARGDRSVV

SEQ ID NO: 66251 - protein, 10 aa, synthetic construct
QMFRGDLTVT

SEQ ID NO: 66252 - protein, 10 aa, synthetic construct
QMFRGDLIGR

SEQ ID NO: 66253 - protein, 10 aa, synthetic construct
QMFRGDLLLS

SEQ ID NO: 66254 - protein, 10 aa, synthetic construct
QMKRGDHGVL

SEQ ID NO: 66255 - protein, 10 aa, synthetic construct
QMKRGDRSVV

SEQ ID NO: 66256 - protein, 10 aa, synthetic construct
QMKRGDRGVV

SEQ ID NO: 66257 - protein, 10 aa, synthetic construct
QMKRGDLTVT

SEQ ID NO: 66258 - protein, 10 aa, synthetic construct
QMKRGDLIGR

SEQ ID NO: 66259 - protein, 10 aa, synthetic construct
QMKRGDLLLS

SEQ ID NO: 66260 - protein, 10 aa, synthetic construct
QMRRGDRDYL

SEQ ID NO: 66261 - protein, 10 aa, synthetic construct
THARGDRGVV

SEQ ID NO: 66262 - protein, 10 aa, synthetic construct
QMRRGDYVGL

SEQ ID NO: 66263 - protein, 10 aa, synthetic construct
QMRRGDYSSV

SEQ ID NO: 66264 - protein, 10 aa, synthetic construct
QMRRGDYTSV

SEQ ID NO: 66265 - protein, 10 aa, synthetic construct
QMRRGDQSTL

SEQ ID NO: 66266 - protein, 10 aa, synthetic construct
QMHRGDHGVL

SEQ ID NO: 66267 - protein, 10 aa, synthetic construct
QMHRGDRGQI

SEQ ID NO: 66268 - protein, 10 aa, synthetic construct
QMHRGDRQGI

SEQ ID NO: 66269 - protein, 10 aa, synthetic construct
QMHRGDRSVV

SEQ ID NO: 66270 - protein, 10 aa, synthetic construct
QMHRGDLIGR

SEQ ID NO: 66271 - protein, 10 aa, synthetic construct
QMHRGDRSQT

SEQ ID NO: 66272 - protein, 10 aa, synthetic construct
THARGDRSQT

SEQ ID NO: 66273 - protein, 10 aa, synthetic construct
QMSRGDRDYL

SEQ ID NO: 66274 - protein, 10 aa, synthetic construct
QMSRGDYVGL

SEQ ID NO: 66275 - protein, 10 aa, synthetic construct
QMSRGDYSSV

SEQ ID NO: 66276 - protein, 10 aa, synthetic construct
QMSRGDYTSV

SEQ ID NO: 66277 - protein, 10 aa, synthetic construct
QMSRGDQSTL

SEQ ID NO: 66278 - protein, 10 aa, synthetic construct
QMTRGDHGVL

SEQ ID NO: 66279 - protein, 10 aa, synthetic construct
QMTRGDRGQI

SEQ ID NO: 66280 - protein, 10 aa, synthetic construct
QMTRGDRQGI

SEQ ID NO: 66281 - protein, 10 aa, synthetic construct
QMTRGDRSVV

SEQ ID NO: 66282 - protein, 10 aa, synthetic construct
QMTRGDLIGR

SEQ ID NO: 66283 - protein, 10 aa, synthetic construct
THPRGDRGQI

SEQ ID NO: 66284 - protein, 10 aa, synthetic construct
QMTRGDRSQT

SEQ ID NO: 66285 - protein, 10 aa, synthetic construct
QMYRGDHGVL

SEQ ID NO: 66286 - protein, 10 aa, synthetic construct
QMYRGDRSVV

SEQ ID NO: 66287 - protein, 10 aa, synthetic construct
QMYRGDRGVV

SEQ ID NO: 66288 - protein, 10 aa, synthetic construct
QMYRGDLTVT

SEQ ID NO: 66289 - protein, 10 aa, synthetic construct
QMYRGDLIGR

SEQ ID NO: 66290 - protein, 10 aa, synthetic construct
QMYRGDLLLS

SEQ ID NO: 66291 - protein, 10 aa, synthetic construct
QMNRGDHGVL

SEQ ID NO: 66292 - protein, 10 aa, synthetic construct
QMNRGDRSVV

SEQ ID NO: 66293 - protein, 10 aa, synthetic construct
QMNRGDRGVV

SEQ ID NO: 66294 - protein, 10 aa, synthetic construct
SSPRGDRGQI

SEQ ID NO: 66295 - protein, 10 aa, synthetic construct
THPRGDRQGI

SEQ ID NO: 66296 - protein, 10 aa, synthetic construct
QMNRGDLTVT

SEQ ID NO: 66297 - protein, 10 aa, synthetic construct
QMNRGDLIGR

SEQ ID NO: 66298 - protein, 10 aa, synthetic construct
QMNRGDLLLS

SEQ ID NO: 66299 - protein, 10 aa, synthetic construct
QMQRGDHGVL

SEQ ID NO: 66300 - protein, 10 aa, synthetic construct
QMQRGDRGQI

SEQ ID NO: 66301 - protein, 10 aa, synthetic construct
QMQRGDRQGI

SEQ ID NO: 66302 - protein, 10 aa, synthetic construct
QMQRGDRSVV

SEQ ID NO: 66303 - protein, 10 aa, synthetic construct
QMQRGDLIGR

SEQ ID NO: 66304 - protein, 10 aa, synthetic construct
QMQRGDRSQT

SEQ ID NO: 66305 - protein, 10 aa, synthetic construct
QMDRGDHGVL

SEQ ID NO: 66306 - protein, 10 aa, synthetic construct
THPRGDRSVV

SEQ ID NO: 66307 - protein, 10 aa, synthetic construct
QMDRGDRGQI

SEQ ID NO: 66308 - protein, 10 aa, synthetic construct
QMDRGDRQGI

SEQ ID NO: 66309 - protein, 10 aa, synthetic construct
QMDRGDRSVV

SEQ ID NO: 66310 - protein, 10 aa, synthetic construct
QMDRGDLIGR

SEQ ID NO: 66311 - protein, 10 aa, synthetic construct
QMDRGDRSQT

SEQ ID NO: 66312 - protein, 10 aa, synthetic construct
QMERGDHGVL

SEQ ID NO: 66313 - protein, 10 aa, synthetic construct
QMERGDRGQI

SEQ ID NO: 66314 - protein, 10 aa, synthetic construct
QMERGDRQGI

SEQ ID NO: 66315 - protein, 10 aa, synthetic construct
QMERGDRSVV

SEQ ID NO: 66316 - protein, 10 aa, synthetic construct
QMERGDLIGR

SEQ ID NO: 66317 - protein, 10 aa, synthetic construct
THPRGDRGVV

SEQ ID NO: 66318 - protein, 10 aa, synthetic construct
QMERGDRSQT

SEQ ID NO: 66319 - protein, 10 aa, synthetic construct
QWGRGDHVNL

SEQ ID NO: 66320 - protein, 10 aa, synthetic construct
QWGRGDYNSL

SEQ ID NO: 66321 - protein, 10 aa, synthetic construct
QWGRGDYSSV

SEQ ID NO: 66322 - protein, 10 aa, synthetic construct
QWGRGDYTSV

SEQ ID NO: 66323 - protein, 10 aa, synthetic construct
QWGRGDYTSM

SEQ ID NO: 66324 - protein, 10 aa, synthetic construct
QWARGDHVNL

SEQ ID NO: 66325 - protein, 10 aa, synthetic construct
QWARGDYNSL

SEQ ID NO: 66326 - protein, 10 aa, synthetic construct
QWARGDYSSV

SEQ ID NO: 66327 - protein, 10 aa, synthetic construct
QWARGDYTSV

SEQ ID NO: 66328 - protein, 10 aa, synthetic construct
THPRGDRSQT

SEQ ID NO: 66329 - protein, 10 aa, synthetic construct
QWARGDYTSM

SEQ ID NO: 66330 - protein, 10 aa, synthetic construct
QWVRGDHVNL

SEQ ID NO: 66331 - protein, 10 aa, synthetic construct
QWVRGDYNSL

SEQ ID NO: 66332 - protein, 10 aa, synthetic construct
QWVRGDYTSM

SEQ ID NO: 66333 - protein, 10 aa, synthetic construct
QWPRGDHVNL

SEQ ID NO: 66334 - protein, 10 aa, synthetic construct
QWPRGDYNSL

SEQ ID NO: 66335 - protein, 10 aa, synthetic construct
QWPRGDYSSV

SEQ ID NO: 66336 - protein, 10 aa, synthetic construct
QWPRGDYTSV

SEQ ID NO: 66337 - protein, 10 aa, synthetic construct
QWPRGDYTSM

SEQ ID NO: 66338 - protein, 10 aa, synthetic construct
QWLRGDHVNL

SEQ ID NO: 66339 - protein, 10 aa, synthetic construct
THRRGDRGQI

SEQ ID NO: 66340 - protein, 10 aa, synthetic construct
QWLRGDYNSL

SEQ ID NO: 66341 - protein, 10 aa, synthetic construct
QWLRGDYTSM

SEQ ID NO: 66342 - protein, 10 aa, synthetic construct
QWIRGDHGVL

SEQ ID NO: 66343 - protein, 10 aa, synthetic construct
QWIRGDRGQI

SEQ ID NO: 66344 - protein, 10 aa, synthetic construct
QWIRGDRQGI

SEQ ID NO: 66345 - protein, 10 aa, synthetic construct
QWIRGDRSVV

SEQ ID NO: 66346 - protein, 10 aa, synthetic construct
QWIRGDLIGR

SEQ ID NO: 66347 - protein, 10 aa, synthetic construct
QWIRGDRSQT

SEQ ID NO: 66348 - protein, 10 aa, synthetic construct
QWMRGDHGVL

SEQ ID NO: 66349 - protein, 10 aa, synthetic construct
QWMRGDHVNL

SEQ ID NO: 66350 - protein, 10 aa, synthetic construct
THRRGDRQGI

SEQ ID NO: 66351 - protein, 10 aa, synthetic construct
QWMRGDRDYL

SEQ ID NO: 66352 - protein, 10 aa, synthetic construct
QWMRGDYSSV

SEQ ID NO: 66353 - protein, 10 aa, synthetic construct
QWMRGDLTVT

SEQ ID NO: 66354 - protein, 10 aa, synthetic construct
QWWRGDRDYL

SEQ ID NO: 66355 - protein, 10 aa, synthetic construct
QWWRGDYTSV

SEQ ID NO: 66356 - protein, 10 aa, synthetic construct
QWWRGDLTVT

SEQ ID NO: 66357 - protein, 10 aa, synthetic construct
QWWRGDLIGR

SEQ ID NO: 66358 - protein, 10 aa, synthetic construct
QWFRGDHGVL

SEQ ID NO: 66359 - protein, 10 aa, synthetic construct
QWFRGDRGQI

SEQ ID NO: 66360 - protein, 10 aa, synthetic construct
QWFRGDRQGI

SEQ ID NO: 66361 - protein, 10 aa, synthetic construct
THRRGDRSVV

SEQ ID NO: 66362 - protein, 10 aa, synthetic construct
QWFRGDRSVV

SEQ ID NO: 66363 - protein, 10 aa, synthetic construct
QWFRGDLIGR

SEQ ID NO: 66364 - protein, 10 aa, synthetic construct
QWFRGDRSQT

SEQ ID NO: 66365 - protein, 10 aa, synthetic construct
QWKRGDHGVL

SEQ ID NO: 66366 - protein, 10 aa, synthetic construct
QWKRGDRGQI

SEQ ID NO: 66367 - protein, 10 aa, synthetic construct
QWKRGDRQGI

SEQ ID NO: 66368 - protein, 10 aa, synthetic construct
QWKRGDRSVV

SEQ ID NO: 66369 - protein, 10 aa, synthetic construct
QWKRGDLIGR

SEQ ID NO: 66370 - protein, 10 aa, synthetic construct
QWKRGDRSQT

SEQ ID NO: 66371 - protein, 10 aa, synthetic construct
QWRRGDHVNL

SEQ ID NO: 66372 - protein, 10 aa, synthetic construct
THRRGDRGVV

SEQ ID NO: 66373 - protein, 10 aa, synthetic construct
QWRRGDYNSL

SEQ ID NO: 66374 - protein, 10 aa, synthetic construct
QWRRGDYSSV

SEQ ID NO: 66375 - protein, 10 aa, synthetic construct
QWRRGDYTSV

SEQ ID NO: 66376 - protein, 10 aa, synthetic construct
QWRRGDYTSM

SEQ ID NO: 66377 - protein, 10 aa, synthetic construct
QWHRGDRDYL

SEQ ID NO: 66378 - protein, 10 aa, synthetic construct
QWHRGDYVGL

SEQ ID NO: 66379 - protein, 10 aa, synthetic construct
QWHRGDYSSV

SEQ ID NO: 66380 - protein, 10 aa, synthetic construct
QWHRGDYTSV

SEQ ID NO: 66381 - protein, 10 aa, synthetic construct
QWHRGDQSTL

SEQ ID NO: 66382 - protein, 10 aa, synthetic construct
QWSRGDHVNL

SEQ ID NO: 66383 - protein, 10 aa, synthetic construct
THRRGDRSQT

SEQ ID NO: 66384 - protein, 10 aa, synthetic construct
QWSRGDYNSL

SEQ ID NO: 66385 - protein, 10 aa, synthetic construct
QWSRGDYTSM

SEQ ID NO: 66386 - protein, 10 aa, synthetic construct
QWTRGDRDYL

SEQ ID NO: 66387 - protein, 10 aa, synthetic construct
QWTRGDYVGL

SEQ ID NO: 66388 - protein, 10 aa, synthetic construct
QWTRGDYSSV

SEQ ID NO: 66389 - protein, 10 aa, synthetic construct
QWTRGDYTSV

SEQ ID NO: 66390 - protein, 10 aa, synthetic construct
QWTRGDQSTL

SEQ ID NO: 66391 - protein, 10 aa, synthetic construct
QWYRGDHGVL

SEQ ID NO: 66392 - protein, 10 aa, synthetic construct
QWYRGDRGQI

SEQ ID NO: 66393 - protein, 10 aa, synthetic construct
QWYRGDRQGI

SEQ ID NO: 66394 - protein, 10 aa, synthetic construct
TSGRGDHGVL

SEQ ID NO: 66395 - protein, 10 aa, synthetic construct
QWYRGDRSVV

SEQ ID NO: 66396 - protein, 10 aa, synthetic construct
QWYRGDLIGR

SEQ ID NO: 66397 - protein, 10 aa, synthetic construct
QWYRGDRSQT

SEQ ID NO: 66398 - protein, 10 aa, synthetic construct
QWNRGDHGVL

SEQ ID NO: 66399 - protein, 10 aa, synthetic construct
QWNRGDRGQI

SEQ ID NO: 66400 - protein, 10 aa, synthetic construct
QWNRGDRQGI

SEQ ID NO: 66401 - protein, 10 aa, synthetic construct
QWNRGDRSVV

SEQ ID NO: 66402 - protein, 10 aa, synthetic construct
QWNRGDLIGR

SEQ ID NO: 66403 - protein, 10 aa, synthetic construct
QWNRGDRSQT

SEQ ID NO: 66404 - protein, 10 aa, synthetic construct
QWQRGDRDYL

SEQ ID NO: 66405 - protein, 10 aa, synthetic construct
SSPRGDRQGI

SEQ ID NO: 66406 - protein, 10 aa, synthetic construct
TSGRGDYVGL

SEQ ID NO: 66407 - protein, 10 aa, synthetic construct
QWQRGDYVGL

SEQ ID NO: 66408 - protein, 10 aa, synthetic construct
QWQRGDYSSV

SEQ ID NO: 66409 - protein, 10 aa, synthetic construct
QWQRGDYTSV

SEQ ID NO: 66410 - protein, 10 aa, synthetic construct
QWQRGDQSTL

SEQ ID NO: 66411 - protein, 10 aa, synthetic construct
QWDRGDRDYL

SEQ ID NO: 66412 - protein, 10 aa, synthetic construct
QWDRGDYVGL

SEQ ID NO: 66413 - protein, 10 aa, synthetic construct
QWDRGDYSSV

SEQ ID NO: 66414 - protein, 10 aa, synthetic construct
QWDRGDYTSV

SEQ ID NO: 66415 - protein, 10 aa, synthetic construct
QWDRGDQSTL

SEQ ID NO: 66416 - protein, 10 aa, synthetic construct
QWERGDRDYL

SEQ ID NO: 66417 - protein, 10 aa, synthetic construct
TSGRGDQSTL

SEQ ID NO: 66418 - protein, 10 aa, synthetic construct
QWERGDYVGL

SEQ ID NO: 66419 - protein, 10 aa, synthetic construct
QWERGDYSSV

SEQ ID NO: 66420 - protein, 10 aa, synthetic construct
QWERGDYTSV

SEQ ID NO: 66421 - protein, 10 aa, synthetic construct
QWERGDQSTL

SEQ ID NO: 66422 - protein, 10 aa, synthetic construct
QFGRGDHGVL

SEQ ID NO: 66423 - protein, 10 aa, synthetic construct
QFGRGDHVNL

SEQ ID NO: 66424 - protein, 10 aa, synthetic construct
QFGRGDYVGL

SEQ ID NO: 66425 - protein, 10 aa, synthetic construct
QFGRGDYSSV

SEQ ID NO: 66426 - protein, 10 aa, synthetic construct
QFGRGDQSTL

SEQ ID NO: 66427 - protein, 10 aa, synthetic construct
QFGRGDLLLS

SEQ ID NO: 66428 - protein, 10 aa, synthetic construct
TSGRGDLLLS

SEQ ID NO: 66429 - protein, 10 aa, synthetic construct
QFARGDHGVL

SEQ ID NO: 66430 - protein, 10 aa, synthetic construct
QFARGDHVNL

SEQ ID NO: 66431 - protein, 10 aa, synthetic construct
QFARGDYVGL

SEQ ID NO: 66432 - protein, 10 aa, synthetic construct
QFARGDYSSV

SEQ ID NO: 66433 - protein, 10 aa, synthetic construct
QFARGDQSTL

SEQ ID NO: 66434 - protein, 10 aa, synthetic construct
QFARGDLLLS

SEQ ID NO: 66435 - protein, 10 aa, synthetic construct
QFVRGDRGQI

SEQ ID NO: 66436 - protein, 10 aa, synthetic construct
QFVRGDRQGI

SEQ ID NO: 66437 - protein, 10 aa, synthetic construct
QFVRGDRSVV

SEQ ID NO: 66438 - protein, 10 aa, synthetic construct
QFVRGDRGVV

SEQ ID NO: 66439 - protein, 10 aa, synthetic construct
TSARGDHGVL

SEQ ID NO: 66440 - protein, 10 aa, synthetic construct
QFVRGDYVGL

SEQ ID NO: 66441 - protein, 10 aa, synthetic construct
QFVRGDQSTL

SEQ ID NO: 66442 - protein, 10 aa, synthetic construct
QFVRGDRSQT

SEQ ID NO: 66443 - protein, 10 aa, synthetic construct
QFVRGDLLLS

SEQ ID NO: 66444 - protein, 10 aa, synthetic construct
QFPRGDHGVL

SEQ ID NO: 66445 - protein, 10 aa, synthetic construct
QFPRGDHVNL

SEQ ID NO: 66446 - protein, 10 aa, synthetic construct
QFPRGDYVGL

SEQ ID NO: 66447 - protein, 10 aa, synthetic construct
QFPRGDYSSV

SEQ ID NO: 66448 - protein, 10 aa, synthetic construct
QFPRGDQSTL

SEQ ID NO: 66449 - protein, 10 aa, synthetic construct
QFPRGDLLLS

SEQ ID NO: 66450 - protein, 10 aa, synthetic construct
TSARGDYVGL

SEQ ID NO: 66451 - protein, 10 aa, synthetic construct
QFLRGDRGQI

SEQ ID NO: 66452 - protein, 10 aa, synthetic construct
QFLRGDRQGI

SEQ ID NO: 66453 - protein, 10 aa, synthetic construct
QFLRGDRSVV

SEQ ID NO: 66454 - protein, 10 aa, synthetic construct
QFLRGDRGVV

SEQ ID NO: 66455 - protein, 10 aa, synthetic construct
QFLRGDYVGL

SEQ ID NO: 66456 - protein, 10 aa, synthetic construct
QFLRGDQSTL

SEQ ID NO: 66457 - protein, 10 aa, synthetic construct
QFLRGDRSQT

SEQ ID NO: 66458 - protein, 10 aa, synthetic construct
QFLRGDLLLS

SEQ ID NO: 66459 - protein, 10 aa, synthetic construct
QFIRGDRSVV

SEQ ID NO: 66460 - protein, 10 aa, synthetic construct
QFIRGDRSQT

SEQ ID NO: 66461 - protein, 10 aa, synthetic construct
TSARGDQSTL

SEQ ID NO: 66462 - protein, 10 aa, synthetic construct
QFMRGDRSVV

SEQ ID NO: 66463 - protein, 10 aa, synthetic construct
QFMRGDRSQT

SEQ ID NO: 66464 - protein, 10 aa, synthetic construct
QFWRGDRGQI

SEQ ID NO: 66465 - protein, 10 aa, synthetic construct
QFWRGDRQGI

SEQ ID NO: 66466 - protein, 10 aa, synthetic construct
QFWRGDRSVV

SEQ ID NO: 66467 - protein, 10 aa, synthetic construct
QFWRGDRGVV

SEQ ID NO: 66468 - protein, 10 aa, synthetic construct
QFWRGDYVGL

SEQ ID NO: 66469 - protein, 10 aa, synthetic construct
QFWRGDQSTL

SEQ ID NO: 66470 - protein, 10 aa, synthetic construct
QFWRGDRSQT

SEQ ID NO: 66471 - protein, 10 aa, synthetic construct
QFWRGDLLLS

SEQ ID NO: 66472 - protein, 10 aa, synthetic construct
TSARGDLLLS

SEQ ID NO: 66473 - protein, 10 aa, synthetic construct
QFKRGDRSVV

SEQ ID NO: 66474 - protein, 10 aa, synthetic construct
QFKRGDRSQT

SEQ ID NO: 66475 - protein, 10 aa, synthetic construct
QFRRGDHGVL

SEQ ID NO: 66476 - protein, 10 aa, synthetic construct
QFRRGDHVNL

SEQ ID NO: 66477 - protein, 10 aa, synthetic construct
QFRRGDYVGL

SEQ ID NO: 66478 - protein, 10 aa, synthetic construct
QFRRGDYSSV

SEQ ID NO: 66479 - protein, 10 aa, synthetic construct
QFRRGDQSTL

SEQ ID NO: 66480 - protein, 10 aa, synthetic construct
QFRRGDLLLS

SEQ ID NO: 66481 - protein, 10 aa, synthetic construct
QFHRGDRGQI

SEQ ID NO: 66482 - protein, 10 aa, synthetic construct
QFHRGDRQGI

SEQ ID NO: 66483 - protein, 10 aa, synthetic construct
TSVRGDRGQI

SEQ ID NO: 66484 - protein, 10 aa, synthetic construct
QFHRGDRSVV

SEQ ID NO: 66485 - protein, 10 aa, synthetic construct
QFHRGDRGVV

SEQ ID NO: 66486 - protein, 10 aa, synthetic construct
QFHRGDYVGL

SEQ ID NO: 66487 - protein, 10 aa, synthetic construct
QFHRGDQSTL

SEQ ID NO: 66488 - protein, 10 aa, synthetic construct
QFHRGDRSQT

SEQ ID NO: 66489 - protein, 10 aa, synthetic construct
QFHRGDLLLS

SEQ ID NO: 66490 - protein, 10 aa, synthetic construct
QFSRGDRGQI

SEQ ID NO: 66491 - protein, 10 aa, synthetic construct
QFSRGDRQGI

SEQ ID NO: 66492 - protein, 10 aa, synthetic construct
QFSRGDRSVV

SEQ ID NO: 66493 - protein, 10 aa, synthetic construct
QFSRGDRGVV

SEQ ID NO: 66494 - protein, 10 aa, synthetic construct
TSVRGDRQGI

SEQ ID NO: 66495 - protein, 10 aa, synthetic construct
QFSRGDYVGL

SEQ ID NO: 66496 - protein, 10 aa, synthetic construct
QFSRGDQSTL

SEQ ID NO: 66497 - protein, 10 aa, synthetic construct
QFSRGDRSQT

SEQ ID NO: 66498 - protein, 10 aa, synthetic construct
QFSRGDLLLS

SEQ ID NO: 66499 - protein, 10 aa, synthetic construct
QFTRGDRGQI

SEQ ID NO: 66500 - protein, 10 aa, synthetic construct
QFTRGDRQGI

SEQ ID NO: 66501 - protein, 10 aa, synthetic construct
QFTRGDRSVV

SEQ ID NO: 66502 - protein, 10 aa, synthetic construct
QFTRGDRGVV

SEQ ID NO: 66503 - protein, 10 aa, synthetic construct
QFTRGDYVGL

SEQ ID NO: 66504 - protein, 10 aa, synthetic construct
QFTRGDQSTL

SEQ ID NO: 66505 - protein, 10 aa, synthetic construct
TSVRGDRSVV

SEQ ID NO: 66506 - protein, 10 aa, synthetic construct
QFTRGDRSQT

SEQ ID NO: 66507 - protein, 10 aa, synthetic construct
QFTRGDLLLS

SEQ ID NO: 66508 - protein, 10 aa, synthetic construct
QFYRGDRSVV

SEQ ID NO: 66509 - protein, 10 aa, synthetic construct
QFYRGDRSQT

SEQ ID NO: 66510 - protein, 10 aa, synthetic construct
QFNRGDRSVV

SEQ ID NO: 66511 - protein, 10 aa, synthetic construct
QFNRGDRSQT

SEQ ID NO: 66512 - protein, 10 aa, synthetic construct
QFQRGDRGQI

SEQ ID NO: 66513 - protein, 10 aa, synthetic construct
QFQRGDRQGI

SEQ ID NO: 66514 - protein, 10 aa, synthetic construct
QFQRGDRSVV

SEQ ID NO: 66515 - protein, 10 aa, synthetic construct
QFQRGDRGVV

SEQ ID NO: 66516 - protein, 10 aa, synthetic construct
SSPRGDRSVV

SEQ ID NO: 66517 - protein, 10 aa, synthetic construct
TSVRGDRGVV

SEQ ID NO: 66518 - protein, 10 aa, synthetic construct
QFQRGDYVGL

SEQ ID NO: 66519 - protein, 10 aa, synthetic construct
QFQRGDQSTL

SEQ ID NO: 66520 - protein, 10 aa, synthetic construct
QFQRGDRSQT

SEQ ID NO: 66521 - protein, 10 aa, synthetic construct
QFQRGDLLLS

SEQ ID NO: 66522 - protein, 10 aa, synthetic construct
QFDRGDRGQI

SEQ ID NO: 66523 - protein, 10 aa, synthetic construct
QFDRGDRQGI

SEQ ID NO: 66524 - protein, 10 aa, synthetic construct
QFDRGDRSVV

SEQ ID NO: 66525 - protein, 10 aa, synthetic construct
QFDRGDRGVV

SEQ ID NO: 66526 - protein, 10 aa, synthetic construct
QFDRGDYVGL

SEQ ID NO: 66527 - protein, 10 aa, synthetic construct
QFDRGDQSTL

SEQ ID NO: 66528 - protein, 10 aa, synthetic construct
TSVRGDRSQT

SEQ ID NO: 66529 - protein, 10 aa, synthetic construct
QFDRGDRSQT

SEQ ID NO: 66530 - protein, 10 aa, synthetic construct
QFDRGDLLLS

SEQ ID NO: 66531 - protein, 10 aa, synthetic construct
QFERGDRGQI

SEQ ID NO: 66532 - protein, 10 aa, synthetic construct
QFERGDRQGI

SEQ ID NO: 66533 - protein, 10 aa, synthetic construct
QFERGDRSVV

SEQ ID NO: 66534 - protein, 10 aa, synthetic construct
QFERGDRGVV

SEQ ID NO: 66535 - protein, 10 aa, synthetic construct
QFERGDYVGL

SEQ ID NO: 66536 - protein, 10 aa, synthetic construct
QFERGDQSTL

SEQ ID NO: 66537 - protein, 10 aa, synthetic construct
QFERGDRSQT

SEQ ID NO: 66538 - protein, 10 aa, synthetic construct
QFERGDLLLS

SEQ ID NO: 66539 - protein, 10 aa, synthetic construct
TSLRGDRGQI

SEQ ID NO: 66540 - protein, 10 aa, synthetic construct
QKGRGDHGVL

SEQ ID NO: 66541 - protein, 10 aa, synthetic construct
QKGRGDHVNL

SEQ ID NO: 66542 - protein, 10 aa, synthetic construct
QKGRGDYVGL

SEQ ID NO: 66543 - protein, 10 aa, synthetic construct
QKGRGDYSSV

SEQ ID NO: 66544 - protein, 10 aa, synthetic construct
QKGRGDQSTL

SEQ ID NO: 66545 - protein, 10 aa, synthetic construct
QKGRGDLLLS

SEQ ID NO: 66546 - protein, 10 aa, synthetic construct
QKARGDHGVL

SEQ ID NO: 66547 - protein, 10 aa, synthetic construct
QKARGDHVNL

SEQ ID NO: 66548 - protein, 10 aa, synthetic construct
QKARGDYVGL

SEQ ID NO: 66549 - protein, 10 aa, synthetic construct
QKARGDYSSV

SEQ ID NO: 66550 - protein, 10 aa, synthetic construct
TSLRGDRQGI

SEQ ID NO: 66551 - protein, 10 aa, synthetic construct
QKARGDQSTL

SEQ ID NO: 66552 - protein, 10 aa, synthetic construct
QKARGDLLLS

SEQ ID NO: 66553 - protein, 10 aa, synthetic construct
QKVRGDRGQI

SEQ ID NO: 66554 - protein, 10 aa, synthetic construct
QKVRGDRQGI

SEQ ID NO: 66555 - protein, 10 aa, synthetic construct
QKVRGDRSVV

SEQ ID NO: 66556 - protein, 10 aa, synthetic construct
QKVRGDRGVV

SEQ ID NO: 66557 - protein, 10 aa, synthetic construct
QKVRGDYVGL

SEQ ID NO: 66558 - protein, 10 aa, synthetic construct
QKVRGDQSTL

SEQ ID NO: 66559 - protein, 10 aa, synthetic construct
QKVRGDRSQT

SEQ ID NO: 66560 - protein, 10 aa, synthetic construct
QKVRGDLLLS

SEQ ID NO: 66561 - protein, 10 aa, synthetic construct
TSLRGDRSVV

SEQ ID NO: 66562 - protein, 10 aa, synthetic construct
QKPRGDHGVL

SEQ ID NO: 66563 - protein, 10 aa, synthetic construct
QKPRGDHVNL

SEQ ID NO: 66564 - protein, 10 aa, synthetic construct
QKPRGDYVGL

SEQ ID NO: 66565 - protein, 10 aa, synthetic construct
QKPRGDYSSV

SEQ ID NO: 66566 - protein, 10 aa, synthetic construct
QKPRGDQSTL

SEQ ID NO: 66567 - protein, 10 aa, synthetic construct
QKPRGDLLLS

SEQ ID NO: 66568 - protein, 10 aa, synthetic construct
QKLRGDRGQI

SEQ ID NO: 66569 - protein, 10 aa, synthetic construct
QKLRGDRQGI

SEQ ID NO: 66570 - protein, 10 aa, synthetic construct
QKLRGDRSVV

SEQ ID NO: 66571 - protein, 10 aa, synthetic construct
QKLRGDRGVV

SEQ ID NO: 66572 - protein, 10 aa, synthetic construct
TSLRGDRGVV

SEQ ID NO: 66573 - protein, 10 aa, synthetic construct
QKLRGDYVGL

SEQ ID NO: 66574 - protein, 10 aa, synthetic construct
QKLRGDQSTL

SEQ ID NO: 66575 - protein, 10 aa, synthetic construct
QKLRGDRSQT

SEQ ID NO: 66576 - protein, 10 aa, synthetic construct
QKLRGDLLLS

SEQ ID NO: 66577 - protein, 10 aa, synthetic construct
QKIRGDRSVV

SEQ ID NO: 66578 - protein, 10 aa, synthetic construct
QKIRGDRSQT

SEQ ID NO: 66579 - protein, 10 aa, synthetic construct
QKMRGDRSVV

SEQ ID NO: 66580 - protein, 10 aa, synthetic construct
QKMRGDRSQT

SEQ ID NO: 66581 - protein, 10 aa, synthetic construct
QKWRGDRGQI

SEQ ID NO: 66582 - protein, 10 aa, synthetic construct
QKWRGDRQGI

SEQ ID NO: 66583 - protein, 10 aa, synthetic construct
TSLRGDRSQT

SEQ ID NO: 66584 - protein, 10 aa, synthetic construct
QKWRGDRSVV

SEQ ID NO: 66585 - protein, 10 aa, synthetic construct
QKWRGDRGVV

SEQ ID NO: 66586 - protein, 10 aa, synthetic construct
QKWRGDYVGL

SEQ ID NO: 66587 - protein, 10 aa, synthetic construct
QKWRGDQSTL

SEQ ID NO: 66588 - protein, 10 aa, synthetic construct
QKWRGDRSQT

SEQ ID NO: 66589 - protein, 10 aa, synthetic construct
QKWRGDLLLS

SEQ ID NO: 66590 - protein, 10 aa, synthetic construct
QKFRGDRSVV

SEQ ID NO: 66591 - protein, 10 aa, synthetic construct
QKFRGDRSQT

SEQ ID NO: 66592 - protein, 10 aa, synthetic construct
QKRRGDHGVL

SEQ ID NO: 66593 - protein, 10 aa, synthetic construct
QKRRGDHVNL

SEQ ID NO: 66594 - protein, 10 aa, synthetic construct
TSWRGDRGQI

SEQ ID NO: 66595 - protein, 10 aa, synthetic construct
QKRRGDYVGL

SEQ ID NO: 66596 - protein, 10 aa, synthetic construct
QKRRGDYSSV

SEQ ID NO: 66597 - protein, 10 aa, synthetic construct
QKRRGDQSTL

SEQ ID NO: 66598 - protein, 10 aa, synthetic construct
QKRRGDLLLS

SEQ ID NO: 66599 - protein, 10 aa, synthetic construct
QKHRGDRGQI

SEQ ID NO: 66600 - protein, 10 aa, synthetic construct
QKHRGDRQGI

SEQ ID NO: 66601 - protein, 10 aa, synthetic construct
QKHRGDRSVV

SEQ ID NO: 66602 - protein, 10 aa, synthetic construct
QKHRGDRGVV

SEQ ID NO: 66603 - protein, 10 aa, synthetic construct
QKHRGDYVGL

SEQ ID NO: 66604 - protein, 10 aa, synthetic construct
QKHRGDQSTL

SEQ ID NO: 66605 - protein, 10 aa, synthetic construct
TSWRGDRQGI

SEQ ID NO: 66606 - protein, 10 aa, synthetic construct
QKHRGDRSQT

SEQ ID NO: 66607 - protein, 10 aa, synthetic construct
QKHRGDLLLS

SEQ ID NO: 66608 - protein, 10 aa, synthetic construct
QKSRGDRGQI

SEQ ID NO: 66609 - protein, 10 aa, synthetic construct
QKSRGDRQGI

SEQ ID NO: 66610 - protein, 10 aa, synthetic construct
QKSRGDRSVV

SEQ ID NO: 66611 - protein, 10 aa, synthetic construct
QKSRGDRGVV

SEQ ID NO: 66612 - protein, 10 aa, synthetic construct
QKSRGDYVGL

SEQ ID NO: 66613 - protein, 10 aa, synthetic construct
QKSRGDQSTL

SEQ ID NO: 66614 - protein, 10 aa, synthetic construct
QKSRGDRSQT

SEQ ID NO: 66615 - protein, 10 aa, synthetic construct
QKSRGDLLLS

SEQ ID NO: 66616 - protein, 10 aa, synthetic construct
TSWRGDRSVV

SEQ ID NO: 66617 - protein, 10 aa, synthetic construct
QKTRGDRGQI

SEQ ID NO: 66618 - protein, 10 aa, synthetic construct
QKTRGDRQGI

SEQ ID NO: 66619 - protein, 10 aa, synthetic construct
QKTRGDRSVV

SEQ ID NO: 66620 - protein, 10 aa, synthetic construct
QKTRGDRGVV

SEQ ID NO: 66621 - protein, 10 aa, synthetic construct
QKTRGDYVGL

SEQ ID NO: 66622 - protein, 10 aa, synthetic construct
QKTRGDQSTL

SEQ ID NO: 66623 - protein, 10 aa, synthetic construct
QKTRGDRSQT

SEQ ID NO: 66624 - protein, 10 aa, synthetic construct
QKTRGDLLLS

SEQ ID NO: 66625 - protein, 10 aa, synthetic construct
QKYRGDRSVV

SEQ ID NO: 66626 - protein, 10 aa, synthetic construct
QKYRGDRSQT

SEQ ID NO: 66627 - protein, 10 aa, synthetic construct
SSPRGDRGVV

SEQ ID NO: 66628 - protein, 10 aa, synthetic construct
TSWRGDRGVV

SEQ ID NO: 66629 - protein, 10 aa, synthetic construct
QKQRGDRGQI

SEQ ID NO: 66630 - protein, 10 aa, synthetic construct
QKQRGDRQGI

SEQ ID NO: 66631 - protein, 10 aa, synthetic construct
QKQRGDRSVV

SEQ ID NO: 66632 - protein, 10 aa, synthetic construct
QKQRGDRGVV

SEQ ID NO: 66633 - protein, 10 aa, synthetic construct
QKQRGDYVGL

SEQ ID NO: 66634 - protein, 10 aa, synthetic construct
QKQRGDQSTL

SEQ ID NO: 66635 - protein, 10 aa, synthetic construct
QKQRGDRSQT

SEQ ID NO: 66636 - protein, 10 aa, synthetic construct
QKQRGDLLLS

SEQ ID NO: 66637 - protein, 10 aa, synthetic construct
QKDRGDRGQI

SEQ ID NO: 66638 - protein, 10 aa, synthetic construct
QKDRGDRQGI

SEQ ID NO: 66639 - protein, 10 aa, synthetic construct
TSWRGDRSQT

SEQ ID NO: 66640 - protein, 10 aa, synthetic construct
QKDRGDRSVV

SEQ ID NO: 66641 - protein, 10 aa, synthetic construct
QKDRGDRGVV

SEQ ID NO: 66642 - protein, 10 aa, synthetic construct
QKDRGDYVGL

SEQ ID NO: 66643 - protein, 10 aa, synthetic construct
QKDRGDQSTL

SEQ ID NO: 66644 - protein, 10 aa, synthetic construct
QKDRGDRSQT

SEQ ID NO: 66645 - protein, 10 aa, synthetic construct
QKDRGDLLLS

SEQ ID NO: 66646 - protein, 10 aa, synthetic construct
QKERGDRGQI

SEQ ID NO: 66647 - protein, 10 aa, synthetic construct
QKERGDRQGI

SEQ ID NO: 66648 - protein, 10 aa, synthetic construct
QKERGDRSVV

SEQ ID NO: 66649 - protein, 10 aa, synthetic construct
QKERGDRGVV

SEQ ID NO: 66650 - protein, 10 aa, synthetic construct
TSRRGDHGVL

SEQ ID NO: 66651 - protein, 10 aa, synthetic construct
QKERGDYVGL

SEQ ID NO: 66652 - protein, 10 aa, synthetic construct
QKERGDQSTL

SEQ ID NO: 66653 - protein, 10 aa, synthetic construct
QKERGDRSQT

SEQ ID NO: 66654 - protein, 10 aa, synthetic construct
QKERGDLLLS

SEQ ID NO: 66655 - protein, 10 aa, synthetic construct
QRGRGDYTSV

SEQ ID NO: 66656 - protein, 10 aa, synthetic construct
QRGRGDYTSM

SEQ ID NO: 66657 - protein, 10 aa, synthetic construct
QRARGDYTSV

SEQ ID NO: 66658 - protein, 10 aa, synthetic construct
QRARGDYTSM

SEQ ID NO: 66659 - protein, 10 aa, synthetic construct
QRVRGDHVNL

SEQ ID NO: 66660 - protein, 10 aa, synthetic construct
QRVRGDRDYL

SEQ ID NO: 66661 - protein, 10 aa, synthetic construct
TSRRGDYVGL

SEQ ID NO: 66662 - protein, 10 aa, synthetic construct
QRVRGDYSSV

SEQ ID NO: 66663 - protein, 10 aa, synthetic construct
QRVRGDLTVT

SEQ ID NO: 66664 - protein, 10 aa, synthetic construct
QRVRGDLIGR

SEQ ID NO: 66665 - protein, 10 aa, synthetic construct
QRPRGDYTSV

SEQ ID NO: 66666 - protein, 10 aa, synthetic construct
QRPRGDYTSM

SEQ ID NO: 66667 - protein, 10 aa, synthetic construct
QRLRGDHVNL

SEQ ID NO: 66668 - protein, 10 aa, synthetic construct
QRLRGDRDYL

SEQ ID NO: 66669 - protein, 10 aa, synthetic construct
QRLRGDYSSV

SEQ ID NO: 66670 - protein, 10 aa, synthetic construct
QRLRGDLTVT

SEQ ID NO: 66671 - protein, 10 aa, synthetic construct
QRLRGDLIGR

SEQ ID NO: 66672 - protein, 10 aa, synthetic construct
TSRRGDQSTL

SEQ ID NO: 66673 - protein, 10 aa, synthetic construct
QRIRGDHGVL

SEQ ID NO: 66674 - protein, 10 aa, synthetic construct
QRIRGDHVNL

SEQ ID NO: 66675 - protein, 10 aa, synthetic construct
QRIRGDYVGL

SEQ ID NO: 66676 - protein, 10 aa, synthetic construct
QRIRGDYSSV

SEQ ID NO: 66677 - protein, 10 aa, synthetic construct
QRIRGDQSTL

SEQ ID NO: 66678 - protein, 10 aa, synthetic construct
QRIRGDLLLS

SEQ ID NO: 66679 - protein, 10 aa, synthetic construct
QRMRGDHGVL

SEQ ID NO: 66680 - protein, 10 aa, synthetic construct
QRMRGDHVNL

SEQ ID NO: 66681 - protein, 10 aa, synthetic construct
QRMRGDYVGL

SEQ ID NO: 66682 - protein, 10 aa, synthetic construct
QRMRGDYSSV

SEQ ID NO: 66683 - protein, 10 aa, synthetic construct
TSRRGDLLLS

SEQ ID NO: 66684 - protein, 10 aa, synthetic construct
QRMRGDQSTL

SEQ ID NO: 66685 - protein, 10 aa, synthetic construct
QRMRGDLLLS

SEQ ID NO: 66686 - protein, 10 aa, synthetic construct
QRWRGDHVNL

SEQ ID NO: 66687 - protein, 10 aa, synthetic construct
QRWRGDRDYL

SEQ ID NO: 66688 - protein, 10 aa, synthetic construct
QRWRGDYSSV

SEQ ID NO: 66689 - protein, 10 aa, synthetic construct
QRWRGDLTVT

SEQ ID NO: 66690 - protein, 10 aa, synthetic construct
QRWRGDLIGR

SEQ ID NO: 66691 - protein, 10 aa, synthetic construct
QRFRGDHGVL

SEQ ID NO: 66692 - protein, 10 aa, synthetic construct
QRFRGDHVNL

SEQ ID NO: 66693 - protein, 10 aa, synthetic construct
QRFRGDYVGL

SEQ ID NO: 66694 - protein, 10 aa, synthetic construct
TSHRGDRGQI

SEQ ID NO: 66695 - protein, 10 aa, synthetic construct
QRFRGDYSSV

SEQ ID NO: 66696 - protein, 10 aa, synthetic construct
QRFRGDQSTL

SEQ ID NO: 66697 - protein, 10 aa, synthetic construct
QRFRGDLLLS

SEQ ID NO: 66698 - protein, 10 aa, synthetic construct
QRKRGDHGVL

SEQ ID NO: 66699 - protein, 10 aa, synthetic construct
QRKRGDHVNL

SEQ ID NO: 66700 - protein, 10 aa, synthetic construct
QRKRGDYVGL

SEQ ID NO: 66701 - protein, 10 aa, synthetic construct
QRKRGDYSSV

SEQ ID NO: 66702 - protein, 10 aa, synthetic construct
QRKRGDQSTL

SEQ ID NO: 66703 - protein, 10 aa, synthetic construct
QRKRGDLLLS

SEQ ID NO: 66704 - protein, 10 aa, synthetic construct
QRRRGDYTSV

SEQ ID NO: 66705 - protein, 10 aa, synthetic construct
TSHRGDRQGI

SEQ ID NO: 66706 - protein, 10 aa, synthetic construct
QRRRGDYTSM

SEQ ID NO: 66707 - protein, 10 aa, synthetic construct
QRHRGDHVNL

SEQ ID NO: 66708 - protein, 10 aa, synthetic construct
QRHRGDRDYL

SEQ ID NO: 66709 - protein, 10 aa, synthetic construct
QRHRGDYSSV

SEQ ID NO: 66710 - protein, 10 aa, synthetic construct
QRHRGDLTVT

SEQ ID NO: 66711 - protein, 10 aa, synthetic construct
QRHRGDLIGR

SEQ ID NO: 66712 - protein, 10 aa, synthetic construct
QRSRGDHVNL

SEQ ID NO: 66713 - protein, 10 aa, synthetic construct
QRSRGDRDYL

SEQ ID NO: 66714 - protein, 10 aa, synthetic construct
QRSRGDYSSV

SEQ ID NO: 66715 - protein, 10 aa, synthetic construct
QRSRGDLTVT

SEQ ID NO: 66716 - protein, 10 aa, synthetic construct
TSHRGDRSVV

SEQ ID NO: 66717 - protein, 10 aa, synthetic construct
QRSRGDLIGR

SEQ ID NO: 66718 - protein, 10 aa, synthetic construct
QRTRGDHVNL

SEQ ID NO: 66719 - protein, 10 aa, synthetic construct
QRTRGDRDYL

SEQ ID NO: 66720 - protein, 10 aa, synthetic construct
QRTRGDYSSV

SEQ ID NO: 66721 - protein, 10 aa, synthetic construct
QRTRGDLTVT

SEQ ID NO: 66722 - protein, 10 aa, synthetic construct
QRTRGDLIGR

SEQ ID NO: 66723 - protein, 10 aa, synthetic construct
QRYRGDHGVL

SEQ ID NO: 66724 - protein, 10 aa, synthetic construct
QRYRGDHVNL

SEQ ID NO: 66725 - protein, 10 aa, synthetic construct
QRYRGDYVGL

SEQ ID NO: 66726 - protein, 10 aa, synthetic construct
QRYRGDYSSV

SEQ ID NO: 66727 - protein, 10 aa, synthetic construct
TSHRGDRGVV

SEQ ID NO: 66728 - protein, 10 aa, synthetic construct
QRYRGDQSTL

SEQ ID NO: 66729 - protein, 10 aa, synthetic construct
QRYRGDLLLS

SEQ ID NO: 66730 - protein, 10 aa, synthetic construct
QRNRGDHGVL

SEQ ID NO: 66731 - protein, 10 aa, synthetic construct
QRNRGDHVNL

SEQ ID NO: 66732 - protein, 10 aa, synthetic construct
QRNRGDYVGL

SEQ ID NO: 66733 - protein, 10 aa, synthetic construct
QRNRGDYSSV

SEQ ID NO: 66734 - protein, 10 aa, synthetic construct
QRNRGDQSTL

SEQ ID NO: 66735 - protein, 10 aa, synthetic construct
QRNRGDLLLS

SEQ ID NO: 66736 - protein, 10 aa, synthetic construct
QRQRGDHVNL

SEQ ID NO: 66737 - protein, 10 aa, synthetic construct
QRQRGDRDYL

SEQ ID NO: 66738 - protein, 10 aa, synthetic construct
SSPRGDRSQT

SEQ ID NO: 66739 - protein, 10 aa, synthetic construct
TSHRGDRSQT

SEQ ID NO: 66740 - protein, 10 aa, synthetic construct
QRQRGDYSSV

SEQ ID NO: 66741 - protein, 10 aa, synthetic construct
QRQRGDLTVT

SEQ ID NO: 66742 - protein, 10 aa, synthetic construct
QRQRGDLIGR

SEQ ID NO: 66743 - protein, 10 aa, synthetic construct
QRDRGDHVNL

SEQ ID NO: 66744 - protein, 10 aa, synthetic construct
QRDRGDRDYL

SEQ ID NO: 66745 - protein, 10 aa, synthetic construct
QRDRGDYSSV

SEQ ID NO: 66746 - protein, 10 aa, synthetic construct
QRDRGDLTVT

SEQ ID NO: 66747 - protein, 10 aa, synthetic construct
QRDRGDLIGR

SEQ ID NO: 66748 - protein, 10 aa, synthetic construct
QRERGDHVNL

SEQ ID NO: 66749 - protein, 10 aa, synthetic construct
QRERGDRDYL

SEQ ID NO: 66750 - protein, 10 aa, synthetic construct
TSSRGDRGQI

SEQ ID NO: 66751 - protein, 10 aa, synthetic construct
QRERGDYSSV

SEQ ID NO: 66752 - protein, 10 aa, synthetic construct
QRERGDLTVT

SEQ ID NO: 66753 - protein, 10 aa, synthetic construct
QRERGDLIGR

SEQ ID NO: 66754 - protein, 10 aa, synthetic construct
QHGRGDHVNL

SEQ ID NO: 66755 - protein, 10 aa, synthetic construct
QHGRGDRDYL

SEQ ID NO: 66756 - protein, 10 aa, synthetic construct
QHGRGDYSSV

SEQ ID NO: 66757 - protein, 10 aa, synthetic construct
QHGRGDLTVT

SEQ ID NO: 66758 - protein, 10 aa, synthetic construct
QHGRGDLIGR

SEQ ID NO: 66759 - protein, 10 aa, synthetic construct
QHARGDHVNL

SEQ ID NO: 66760 - protein, 10 aa, synthetic construct
QHARGDRDYL

SEQ ID NO: 66761 - protein, 10 aa, synthetic construct
TSSRGDRQGI

SEQ ID NO: 66762 - protein, 10 aa, synthetic construct
QHARGDYSSV

SEQ ID NO: 66763 - protein, 10 aa, synthetic construct
QHARGDLTVT

SEQ ID NO: 66764 - protein, 10 aa, synthetic construct
QHARGDLIGR

SEQ ID NO: 66765 - protein, 10 aa, synthetic construct
QHVRGDHGVL

SEQ ID NO: 66766 - protein, 10 aa, synthetic construct
QHVRGDHVNL

SEQ ID NO: 66767 - protein, 10 aa, synthetic construct
QHVRGDYVGL

SEQ ID NO: 66768 - protein, 10 aa, synthetic construct
QHVRGDYSSV

SEQ ID NO: 66769 - protein, 10 aa, synthetic construct
QHVRGDQSTL

SEQ ID NO: 66770 - protein, 10 aa, synthetic construct
QHVRGDLLLS

SEQ ID NO: 66771 - protein, 10 aa, synthetic construct
QHPRGDHVNL

SEQ ID NO: 66772 - protein, 10 aa, synthetic construct
TSSRGDRSVV

SEQ ID NO: 66773 - protein, 10 aa, synthetic construct
QHPRGDRDYL

SEQ ID NO: 66774 - protein, 10 aa, synthetic construct
QHPRGDYSSV

SEQ ID NO: 66775 - protein, 10 aa, synthetic construct
QHPRGDLTVT

SEQ ID NO: 66776 - protein, 10 aa, synthetic construct
QHPRGDLIGR

SEQ ID NO: 66777 - protein, 10 aa, synthetic construct
QHLRGDHGVL

SEQ ID NO: 66778 - protein, 10 aa, synthetic construct
QHLRGDHVNL

SEQ ID NO: 66779 - protein, 10 aa, synthetic construct
QHLRGDYVGL

SEQ ID NO: 66780 - protein, 10 aa, synthetic construct
QHLRGDYSSV

SEQ ID NO: 66781 - protein, 10 aa, synthetic construct
QHLRGDQSTL

SEQ ID NO: 66782 - protein, 10 aa, synthetic construct
QHLRGDLLLS

SEQ ID NO: 66783 - protein, 10 aa, synthetic construct
TSSRGDRGVV

SEQ ID NO: 66784 - protein, 10 aa, synthetic construct
QHIRGDRGQI

SEQ ID NO: 66785 - protein, 10 aa, synthetic construct
QHIRGDRQGI

SEQ ID NO: 66786 - protein, 10 aa, synthetic construct
QHIRGDRSVV

SEQ ID NO: 66787 - protein, 10 aa, synthetic construct
QHIRGDRGVV

SEQ ID NO: 66788 - protein, 10 aa, synthetic construct
QHIRGDYVGL

SEQ ID NO: 66789 - protein, 10 aa, synthetic construct
QHIRGDQSTL

SEQ ID NO: 66790 - protein, 10 aa, synthetic construct
QHIRGDRSQT

SEQ ID NO: 66791 - protein, 10 aa, synthetic construct
QHIRGDLLLS

SEQ ID NO: 66792 - protein, 10 aa, synthetic construct
QHMRGDRGQI

SEQ ID NO: 66793 - protein, 10 aa, synthetic construct
QHMRGDRQGI

SEQ ID NO: 66794 - protein, 10 aa, synthetic construct
TSSRGDRSQT

SEQ ID NO: 66795 - protein, 10 aa, synthetic construct
QHMRGDRSVV

SEQ ID NO: 66796 - protein, 10 aa, synthetic construct
QHMRGDRGVV

SEQ ID NO: 66797 - protein, 10 aa, synthetic construct
QHMRGDYVGL

SEQ ID NO: 66798 - protein, 10 aa, synthetic construct
QHMRGDQSTL

SEQ ID NO: 66799 - protein, 10 aa, synthetic construct
QHMRGDRSQT

SEQ ID NO: 66800 - protein, 10 aa, synthetic construct
QHMRGDLLLS

SEQ ID NO: 66801 - protein, 10 aa, synthetic construct
QHWRGDHGVL

SEQ ID NO: 66802 - protein, 10 aa, synthetic construct
QHWRGDHVNL

SEQ ID NO: 66803 - protein, 10 aa, synthetic construct
QHWRGDYVGL

SEQ ID NO: 66804 - protein, 10 aa, synthetic construct
QHWRGDYSSV

SEQ ID NO: 66805 - protein, 10 aa, synthetic construct
TSTRGDRGQI

SEQ ID NO: 66806 - protein, 10 aa, synthetic construct
QHWRGDQSTL

SEQ ID NO: 66807 - protein, 10 aa, synthetic construct
QHWRGDLLLS

SEQ ID NO: 66808 - protein, 10 aa, synthetic construct
QHFRGDRGQI

SEQ ID NO: 66809 - protein, 10 aa, synthetic construct
QHFRGDRQGI

SEQ ID NO: 66810 - protein, 10 aa, synthetic construct
QHFRGDRSVV

SEQ ID NO: 66811 - protein, 10 aa, synthetic construct
QHFRGDRGVV

SEQ ID NO: 66812 - protein, 10 aa, synthetic construct
QHFRGDYVGL

SEQ ID NO: 66813 - protein, 10 aa, synthetic construct
QHFRGDQSTL

SEQ ID NO: 66814 - protein, 10 aa, synthetic construct
QHFRGDRSQT

SEQ ID NO: 66815 - protein, 10 aa, synthetic construct
QHFRGDLLLS

SEQ ID NO: 66816 - protein, 10 aa, synthetic construct
TSTRGDRQGI

SEQ ID NO: 66817 - protein, 10 aa, synthetic construct
QHKRGDRGQI

SEQ ID NO: 66818 - protein, 10 aa, synthetic construct
QHKRGDRQGI

SEQ ID NO: 66819 - protein, 10 aa, synthetic construct
QHKRGDRSVV

SEQ ID NO: 66820 - protein, 10 aa, synthetic construct
QHKRGDRGVV

SEQ ID NO: 66821 - protein, 10 aa, synthetic construct
QHKRGDYVGL

SEQ ID NO: 66822 - protein, 10 aa, synthetic construct
QHKRGDQSTL

SEQ ID NO: 66823 - protein, 10 aa, synthetic construct
QHKRGDRSQT

SEQ ID NO: 66824 - protein, 10 aa, synthetic construct
QHKRGDLLLS

SEQ ID NO: 66825 - protein, 10 aa, synthetic construct
QHRRGDHVNL

SEQ ID NO: 66826 - protein, 10 aa, synthetic construct
QHRRGDRDYL

SEQ ID NO: 66827 - protein, 10 aa, synthetic construct
TSTRGDRSVV

SEQ ID NO: 66828 - protein, 10 aa, synthetic construct
QHRRGDYSSV

SEQ ID NO: 66829 - protein, 10 aa, synthetic construct
QHRRGDLTVT

SEQ ID NO: 66830 - protein, 10 aa, synthetic construct
QHRRGDLIGR

SEQ ID NO: 66831 - protein, 10 aa, synthetic construct
QHHRGDHGVL

SEQ ID NO: 66832 - protein, 10 aa, synthetic construct
QHHRGDHVNL

SEQ ID NO: 66833 - protein, 10 aa, synthetic construct
QHHRGDYVGL

SEQ ID NO: 66834 - protein, 10 aa, synthetic construct
QHHRGDYSSV

SEQ ID NO: 66835 - protein, 10 aa, synthetic construct
QHHRGDQSTL

SEQ ID NO: 66836 - protein, 10 aa, synthetic construct
QHHRGDLLLS

SEQ ID NO: 66837 - protein, 10 aa, synthetic construct
QHSRGDHGVL

SEQ ID NO: 66838 - protein, 10 aa, synthetic construct
TSTRGDRGVV

SEQ ID NO: 66839 - protein, 10 aa, synthetic construct
QHSRGDHVNL

SEQ ID NO: 66840 - protein, 10 aa, synthetic construct
QHSRGDYVGL

SEQ ID NO: 66841 - protein, 10 aa, synthetic construct
QHSRGDYSSV

SEQ ID NO: 66842 - protein, 10 aa, synthetic construct
QHSRGDQSTL

SEQ ID NO: 66843 - protein, 10 aa, synthetic construct
QHSRGDLLLS

SEQ ID NO: 66844 - protein, 10 aa, synthetic construct
QHTRGDHGVL

SEQ ID NO: 66845 - protein, 10 aa, synthetic construct
QHTRGDHVNL

SEQ ID NO: 66846 - protein, 10 aa, synthetic construct
QHTRGDYVGL

SEQ ID NO: 66847 - protein, 10 aa, synthetic construct
QHTRGDYSSV

SEQ ID NO: 66848 - protein, 10 aa, synthetic construct
QHTRGDQSTL

SEQ ID NO: 66849 - protein, 10 aa, synthetic construct
TSPRGDRGQI

SEQ ID NO: 66850 - protein, 10 aa, synthetic construct
TSTRGDRSQT

SEQ ID NO: 66851 - protein, 10 aa, synthetic construct
QHTRGDLLLS

SEQ ID NO: 66852 - protein, 10 aa, synthetic construct
QHYRGDRGQI

SEQ ID NO: 66853 - protein, 10 aa, synthetic construct
QHYRGDRQGI

SEQ ID NO: 66854 - protein, 10 aa, synthetic construct
QHYRGDRSVV

SEQ ID NO: 66855 - protein, 10 aa, synthetic construct
QHYRGDRGVV

SEQ ID NO: 66856 - protein, 10 aa, synthetic construct
QHYRGDYVGL

SEQ ID NO: 66857 - protein, 10 aa, synthetic construct
QHYRGDQSTL

SEQ ID NO: 66858 - protein, 10 aa, synthetic construct
QHYRGDRSQT

SEQ ID NO: 66859 - protein, 10 aa, synthetic construct
QHYRGDLLLS

SEQ ID NO: 66860 - protein, 10 aa, synthetic construct
QHNRGDRGQI

SEQ ID NO: 66861 - protein, 10 aa, synthetic construct
TSQRGDRGQI

SEQ ID NO: 66862 - protein, 10 aa, synthetic construct
QHNRGDRQGI

SEQ ID NO: 66863 - protein, 10 aa, synthetic construct
QHNRGDRSVV

SEQ ID NO: 66864 - protein, 10 aa, synthetic construct
QHNRGDRGVV

SEQ ID NO: 66865 - protein, 10 aa, synthetic construct
QHNRGDYVGL

SEQ ID NO: 66866 - protein, 10 aa, synthetic construct
QHNRGDQSTL

SEQ ID NO: 66867 - protein, 10 aa, synthetic construct
QHNRGDRSQT

SEQ ID NO: 66868 - protein, 10 aa, synthetic construct
QHNRGDLLLS

SEQ ID NO: 66869 - protein, 10 aa, synthetic construct
QHQRGDHGVL

SEQ ID NO: 66870 - protein, 10 aa, synthetic construct
QHQRGDHVNL

SEQ ID NO: 66871 - protein, 10 aa, synthetic construct
QHQRGDYVGL

SEQ ID NO: 66872 - protein, 10 aa, synthetic construct
TSQRGDRQGI

SEQ ID NO: 66873 - protein, 10 aa, synthetic construct
QHQRGDYSSV

SEQ ID NO: 66874 - protein, 10 aa, synthetic construct
QHQRGDQSTL

SEQ ID NO: 66875 - protein, 10 aa, synthetic construct
QHQRGDLLLS

SEQ ID NO: 66876 - protein, 10 aa, synthetic construct
QHDRGDHGVL

SEQ ID NO: 66877 - protein, 10 aa, synthetic construct
QHDRGDHVNL

SEQ ID NO: 66878 - protein, 10 aa, synthetic construct
QHDRGDYVGL

SEQ ID NO: 66879 - protein, 10 aa, synthetic construct
QHDRGDYSSV

SEQ ID NO: 66880 - protein, 10 aa, synthetic construct
QHDRGDQSTL

SEQ ID NO: 66881 - protein, 10 aa, synthetic construct
QHDRGDLLLS

SEQ ID NO: 66882 - protein, 10 aa, synthetic construct
QHERGDHGVL

SEQ ID NO: 66883 - protein, 10 aa, synthetic construct
TSQRGDRSVV

SEQ ID NO: 66884 - protein, 10 aa, synthetic construct
QHERGDHVNL

SEQ ID NO: 66885 - protein, 10 aa, synthetic construct
QHERGDYVGL

SEQ ID NO: 66886 - protein, 10 aa, synthetic construct
QHERGDYSSV

SEQ ID NO: 66887 - protein, 10 aa, synthetic construct
QHERGDQSTL

SEQ ID NO: 66888 - protein, 10 aa, synthetic construct
QHERGDLLLS

SEQ ID NO: 66889 - protein, 10 aa, synthetic construct
QSGRGDYNSL

SEQ ID NO: 66890 - protein, 10 aa, synthetic construct
QSGRGDYTSV

SEQ ID NO: 66891 - protein, 10 aa, synthetic construct
QSGRGDYTSM

SEQ ID NO: 66892 - protein, 10 aa, synthetic construct
QSGRGDFQNT

SEQ ID NO: 66893 - protein, 10 aa, synthetic construct
QSARGDYNSL

SEQ ID NO: 66894 - protein, 10 aa, synthetic construct
TSQRGDRGVV

SEQ ID NO: 66895 - protein, 10 aa, synthetic construct
QSARGDYTSV

SEQ ID NO: 66896 - protein, 10 aa, synthetic construct
QSARGDYTSM

SEQ ID NO: 66897 - protein, 10 aa, synthetic construct
QSARGDFQNT

SEQ ID NO: 66898 - protein, 10 aa, synthetic construct
QSVRGDRDYL

SEQ ID NO: 66899 - protein, 10 aa, synthetic construct
QSVRGDYTSV

SEQ ID NO: 66900 - protein, 10 aa, synthetic construct
QSVRGDLTVT

SEQ ID NO: 66901 - protein, 10 aa, synthetic construct
QSVRGDLIGR

SEQ ID NO: 66902 - protein, 10 aa, synthetic construct
QSLRGDRDYL

SEQ ID NO: 66903 - protein, 10 aa, synthetic construct
QSLRGDYTSV

SEQ ID NO: 66904 - protein, 10 aa, synthetic construct
QSLRGDLTVT

SEQ ID NO: 66905 - protein, 10 aa, synthetic construct
TSQRGDRSQT

SEQ ID NO: 66906 - protein, 10 aa, synthetic construct
QSLRGDLIGR

SEQ ID NO: 66907 - protein, 10 aa, synthetic construct
QSIRGDHGVL

SEQ ID NO: 66908 - protein, 10 aa, synthetic construct
QSIRGDHVNL

SEQ ID NO: 66909 - protein, 10 aa, synthetic construct
QSIRGDRDYL

SEQ ID NO: 66910 - protein, 10 aa, synthetic construct
QSIRGDYSSV

SEQ ID NO: 66911 - protein, 10 aa, synthetic construct
QSIRGDLTVT

SEQ ID NO: 66912 - protein, 10 aa, synthetic construct
QSMRGDHGVL

SEQ ID NO: 66913 - protein, 10 aa, synthetic construct
QSMRGDHVNL

SEQ ID NO: 66914 - protein, 10 aa, synthetic construct
QSMRGDRDYL

SEQ ID NO: 66915 - protein, 10 aa, synthetic construct
QSMRGDYSSV

SEQ ID NO: 66916 - protein, 10 aa, synthetic construct
TSDRGDRGQI

SEQ ID NO: 66917 - protein, 10 aa, synthetic construct
QSMRGDLTVT

SEQ ID NO: 66918 - protein, 10 aa, synthetic construct
QSWRGDRDYL

SEQ ID NO: 66919 - protein, 10 aa, synthetic construct
QSWRGDYTSV

SEQ ID NO: 66920 - protein, 10 aa, synthetic construct
QSWRGDLTVT

SEQ ID NO: 66921 - protein, 10 aa, synthetic construct
QSWRGDLIGR

SEQ ID NO: 66922 - protein, 10 aa, synthetic construct
QSFRGDHGVL

SEQ ID NO: 66923 - protein, 10 aa, synthetic construct
QSFRGDHVNL

SEQ ID NO: 66924 - protein, 10 aa, synthetic construct
QSFRGDRDYL

SEQ ID NO: 66925 - protein, 10 aa, synthetic construct
QSFRGDYSSV

SEQ ID NO: 66926 - protein, 10 aa, synthetic construct
QSFRGDLTVT

SEQ ID NO: 66927 - protein, 10 aa, synthetic construct
TSDRGDRQGI

SEQ ID NO: 66928 - protein, 10 aa, synthetic construct
QSKRGDHGVL

SEQ ID NO: 66929 - protein, 10 aa, synthetic construct
QSKRGDHVNL

SEQ ID NO: 66930 - protein, 10 aa, synthetic construct
QSKRGDRDYL

SEQ ID NO: 66931 - protein, 10 aa, synthetic construct
QSKRGDYSSV

SEQ ID NO: 66932 - protein, 10 aa, synthetic construct
QSKRGDLTVT

SEQ ID NO: 66933 - protein, 10 aa, synthetic construct
QSRRGDYNSL

SEQ ID NO: 66934 - protein, 10 aa, synthetic construct
QSRRGDYTSV

SEQ ID NO: 66935 - protein, 10 aa, synthetic construct
QSRRGDYTSM

SEQ ID NO: 66936 - protein, 10 aa, synthetic construct
QSRRGDFQNT

SEQ ID NO: 66937 - protein, 10 aa, synthetic construct
QSHRGDRDYL

SEQ ID NO: 66938 - protein, 10 aa, synthetic construct
TSDRGDRSVV

SEQ ID NO: 66939 - protein, 10 aa, synthetic construct
QSHRGDYTSV

SEQ ID NO: 66940 - protein, 10 aa, synthetic construct
QSHRGDLTVT

SEQ ID NO: 66941 - protein, 10 aa, synthetic construct
QSHRGDLIGR

SEQ ID NO: 66942 - protein, 10 aa, synthetic construct
QSSRGDRDYL

SEQ ID NO: 66943 - protein, 10 aa, synthetic construct
QSSRGDYTSV

SEQ ID NO: 66944 - protein, 10 aa, synthetic construct
QSSRGDLTVT

SEQ ID NO: 66945 - protein, 10 aa, synthetic construct
QSSRGDLIGR

SEQ ID NO: 66946 - protein, 10 aa, synthetic construct
QSTRGDRDYL

SEQ ID NO: 66947 - protein, 10 aa, synthetic construct
QSTRGDYTSV

SEQ ID NO: 66948 - protein, 10 aa, synthetic construct
QSTRGDLTVT

SEQ ID NO: 66949 - protein, 10 aa, synthetic construct
TSDRGDRGVV

SEQ ID NO: 66950 - protein, 10 aa, synthetic construct
QSTRGDLIGR

SEQ ID NO: 66951 - protein, 10 aa, synthetic construct
QSYRGDHGVL

SEQ ID NO: 66952 - protein, 10 aa, synthetic construct
QSYRGDHVNL

SEQ ID NO: 66953 - protein, 10 aa, synthetic construct
QSYRGDRDYL

SEQ ID NO: 66954 - protein, 10 aa, synthetic construct
QSYRGDYSSV

SEQ ID NO: 66955 - protein, 10 aa, synthetic construct
QSYRGDLTVT

SEQ ID NO: 66956 - protein, 10 aa, synthetic construct
QSNRGDHGVL

SEQ ID NO: 66957 - protein, 10 aa, synthetic construct
QSNRGDHVNL

SEQ ID NO: 66958 - protein, 10 aa, synthetic construct
QSNRGDRDYL

SEQ ID NO: 66959 - protein, 10 aa, synthetic construct
QSNRGDYSSV

SEQ ID NO: 66960 - protein, 10 aa, synthetic construct
TSPRGDRQGI

SEQ ID NO: 66961 - protein, 10 aa, synthetic construct
TSDRGDRSQT

SEQ ID NO: 66962 - protein, 10 aa, synthetic construct
QSNRGDLTVT

SEQ ID NO: 66963 - protein, 10 aa, synthetic construct
QSQRGDRDYL

SEQ ID NO: 66964 - protein, 10 aa, synthetic construct
QSQRGDYTSV

SEQ ID NO: 66965 - protein, 10 aa, synthetic construct
QSQRGDLTVT

SEQ ID NO: 66966 - protein, 10 aa, synthetic construct
QSQRGDLIGR

SEQ ID NO: 66967 - protein, 10 aa, synthetic construct
QSDRGDRDYL

SEQ ID NO: 66968 - protein, 10 aa, synthetic construct
QSDRGDYTSV

SEQ ID NO: 66969 - protein, 10 aa, synthetic construct
QSDRGDLTVT

SEQ ID NO: 66970 - protein, 10 aa, synthetic construct
QSDRGDLIGR

SEQ ID NO: 66971 - protein, 10 aa, synthetic construct
QSERGDRDYL

SEQ ID NO: 66972 - protein, 10 aa, synthetic construct
TSERGDRGQI

SEQ ID NO: 66973 - protein, 10 aa, synthetic construct
QSERGDYTSV

SEQ ID NO: 66974 - protein, 10 aa, synthetic construct
QSERGDLTVT

SEQ ID NO: 66975 - protein, 10 aa, synthetic construct
QSERGDLIGR

SEQ ID NO: 66976 - protein, 10 aa, synthetic construct
QTGRGDHVNL

SEQ ID NO: 66977 - protein, 10 aa, synthetic construct
QTGRGDRDYL

SEQ ID NO: 66978 - protein, 10 aa, synthetic construct
QTGRGDYSSV

SEQ ID NO: 66979 - protein, 10 aa, synthetic construct
QTGRGDLTVT

SEQ ID NO: 66980 - protein, 10 aa, synthetic construct
QTGRGDLIGR

SEQ ID NO: 66981 - protein, 10 aa, synthetic construct
QTARGDHVNL

SEQ ID NO: 66982 - protein, 10 aa, synthetic construct
QTARGDRDYL

SEQ ID NO: 66983 - protein, 10 aa, synthetic construct
TSERGDRQGI

SEQ ID NO: 66984 - protein, 10 aa, synthetic construct
QTARGDYSSV

SEQ ID NO: 66985 - protein, 10 aa, synthetic construct
QTARGDLTVT

SEQ ID NO: 66986 - protein, 10 aa, synthetic construct
QTARGDLIGR

SEQ ID NO: 66987 - protein, 10 aa, synthetic construct
QTVRGDHGVL

SEQ ID NO: 66988 - protein, 10 aa, synthetic construct
QTVRGDHVNL

SEQ ID NO: 66989 - protein, 10 aa, synthetic construct
QTVRGDYVGL

SEQ ID NO: 66990 - protein, 10 aa, synthetic construct
QTVRGDYSSV

SEQ ID NO: 66991 - protein, 10 aa, synthetic construct
QTVRGDQSTL

SEQ ID NO: 66992 - protein, 10 aa, synthetic construct
QTVRGDLLLS

SEQ ID NO: 66993 - protein, 10 aa, synthetic construct
QTPRGDHVNL

SEQ ID NO: 66994 - protein, 10 aa, synthetic construct
TSERGDRSVV

SEQ ID NO: 66995 - protein, 10 aa, synthetic construct
QTPRGDRDYL

SEQ ID NO: 66996 - protein, 10 aa, synthetic construct
QTPRGDYSSV

SEQ ID NO: 66997 - protein, 10 aa, synthetic construct
QTPRGDLTVT

SEQ ID NO: 66998 - protein, 10 aa, synthetic construct
QTPRGDLIGR

SEQ ID NO: 66999 - protein, 10 aa, synthetic construct
QTLRGDHGVL

SEQ ID NO: 67000 - protein, 10 aa, synthetic construct
QTLRGDHVNL

SEQ ID NO: 67001 - protein, 10 aa, synthetic construct
QTLRGDYVGL

SEQ ID NO: 67002 - protein, 10 aa, synthetic construct
QTLRGDYSSV

SEQ ID NO: 67003 - protein, 10 aa, synthetic construct
QTLRGDQSTL

SEQ ID NO: 67004 - protein, 10 aa, synthetic construct
QTLRGDLLLS

SEQ ID NO: 67005 - protein, 10 aa, synthetic construct
TSERGDRGVV

SEQ ID NO: 67006 - protein, 10 aa, synthetic construct
QTIRGDRGQI

SEQ ID NO: 67007 - protein, 10 aa, synthetic construct
QTIRGDRQGI

SEQ ID NO: 67008 - protein, 10 aa, synthetic construct
QTIRGDRSVV

SEQ ID NO: 67009 - protein, 10 aa, synthetic construct
QTIRGDRGVV

SEQ ID NO: 67010 - protein, 10 aa, synthetic construct
QTIRGDYVGL

SEQ ID NO: 67011 - protein, 10 aa, synthetic construct
QTIRGDQSTL

SEQ ID NO: 67012 - protein, 10 aa, synthetic construct
QTIRGDRSQT

SEQ ID NO: 67013 - protein, 10 aa, synthetic construct
QTIRGDLLLS

SEQ ID NO: 67014 - protein, 10 aa, synthetic construct
QTMRGDRGQI

SEQ ID NO: 67015 - protein, 10 aa, synthetic construct
QTMRGDRQGI

SEQ ID NO: 67016 - protein, 10 aa, synthetic construct
TSERGDRSQT

SEQ ID NO: 67017 - protein, 10 aa, synthetic construct
QTMRGDRSVV

SEQ ID NO: 67018 - protein, 10 aa, synthetic construct
QTMRGDRGVV

SEQ ID NO: 67019 - protein, 10 aa, synthetic construct
QTMRGDYVGL

SEQ ID NO: 67020 - protein, 10 aa, synthetic construct
QTMRGDQSTL

SEQ ID NO: 67021 - protein, 10 aa, synthetic construct
QTMRGDRSQT

SEQ ID NO: 67022 - protein, 10 aa, synthetic construct
QTMRGDLLLS

SEQ ID NO: 67023 - protein, 10 aa, synthetic construct
QTWRGDHGVL

SEQ ID NO: 67024 - protein, 10 aa, synthetic construct
QTWRGDHVNL

SEQ ID NO: 67025 - protein, 10 aa, synthetic construct
QTWRGDYVGL

SEQ ID NO: 67026 - protein, 10 aa, synthetic construct
QTWRGDYSSV

SEQ ID NO: 67027 - protein, 10 aa, synthetic construct
TTGRGDRGQI

SEQ ID NO: 67028 - protein, 10 aa, synthetic construct
QTWRGDQSTL

SEQ ID NO: 67029 - protein, 10 aa, synthetic construct
QTWRGDLLLS

SEQ ID NO: 67030 - protein, 10 aa, synthetic construct
QTFRGDRGQI

SEQ ID NO: 67031 - protein, 10 aa, synthetic construct
QTFRGDRQGI

SEQ ID NO: 67032 - protein, 10 aa, synthetic construct
QTFRGDRSVV

SEQ ID NO: 67033 - protein, 10 aa, synthetic construct
QTFRGDRGVV

SEQ ID NO: 67034 - protein, 10 aa, synthetic construct
QTFRGDYVGL

SEQ ID NO: 67035 - protein, 10 aa, synthetic construct
QTFRGDQSTL

SEQ ID NO: 67036 - protein, 10 aa, synthetic construct
QTFRGDRSQT

SEQ ID NO: 67037 - protein, 10 aa, synthetic construct
QTFRGDLLLS

SEQ ID NO: 67038 - protein, 10 aa, synthetic construct
TTGRGDRQGI

SEQ ID NO: 67039 - protein, 10 aa, synthetic construct
QTKRGDRGQI

SEQ ID NO: 67040 - protein, 10 aa, synthetic construct
QTKRGDRQGI

SEQ ID NO: 67041 - protein, 10 aa, synthetic construct
QTKRGDRSVV

SEQ ID NO: 67042 - protein, 10 aa, synthetic construct
QTKRGDRGVV

SEQ ID NO: 67043 - protein, 10 aa, synthetic construct
QTKRGDYVGL

SEQ ID NO: 67044 - protein, 10 aa, synthetic construct
QTKRGDQSTL

SEQ ID NO: 67045 - protein, 10 aa, synthetic construct
QTKRGDRSQT

SEQ ID NO: 67046 - protein, 10 aa, synthetic construct
QTKRGDLLLS

SEQ ID NO: 67047 - protein, 10 aa, synthetic construct
QTRRGDHVNL

SEQ ID NO: 67048 - protein, 10 aa, synthetic construct
QTRRGDRDYL

SEQ ID NO: 67049 - protein, 10 aa, synthetic construct
TTGRGDRSVV

SEQ ID NO: 67050 - protein, 10 aa, synthetic construct
QTRRGDYSSV

SEQ ID NO: 67051 - protein, 10 aa, synthetic construct
QTRRGDLTVT

SEQ ID NO: 67052 - protein, 10 aa, synthetic construct
QTRRGDLIGR

SEQ ID NO: 67053 - protein, 10 aa, synthetic construct
QTHRGDHGVL

SEQ ID NO: 67054 - protein, 10 aa, synthetic construct
QTHRGDHVNL

SEQ ID NO: 67055 - protein, 10 aa, synthetic construct
QTHRGDYVGL

SEQ ID NO: 67056 - protein, 10 aa, synthetic construct
QTHRGDYSSV

SEQ ID NO: 67057 - protein, 10 aa, synthetic construct
QTHRGDQSTL

SEQ ID NO: 67058 - protein, 10 aa, synthetic construct
QTHRGDLLLS

SEQ ID NO: 67059 - protein, 10 aa, synthetic construct
QTSRGDHGVL

SEQ ID NO: 67060 - protein, 10 aa, synthetic construct
TTGRGDRGVV

SEQ ID NO: 67061 - protein, 10 aa, synthetic construct
QTSRGDHVNL

SEQ ID NO: 67062 - protein, 10 aa, synthetic construct
QTSRGDYVGL

SEQ ID NO: 67063 - protein, 10 aa, synthetic construct
QTSRGDYSSV

SEQ ID NO: 67064 - protein, 10 aa, synthetic construct
QTSRGDQSTL

SEQ ID NO: 67065 - protein, 10 aa, synthetic construct
QTSRGDLLLS

SEQ ID NO: 67066 - protein, 10 aa, synthetic construct
QTTRGDHGVL

SEQ ID NO: 67067 - protein, 10 aa, synthetic construct
QTTRGDHVNL

SEQ ID NO: 67068 - protein, 10 aa, synthetic construct
QTTRGDYVGL

SEQ ID NO: 67069 - protein, 10 aa, synthetic construct
QTTRGDYSSV

SEQ ID NO: 67070 - protein, 10 aa, synthetic construct
QTTRGDQSTL

SEQ ID NO: 67071 - protein, 10 aa, synthetic construct
TSPRGDRSVV

SEQ ID NO: 67072 - protein, 10 aa, synthetic construct
TTGRGDRSQT

SEQ ID NO: 67073 - protein, 10 aa, synthetic construct
QTTRGDLLLS

SEQ ID NO: 67074 - protein, 10 aa, synthetic construct
QTYRGDRGQI

SEQ ID NO: 67075 - protein, 10 aa, synthetic construct
QTYRGDRQGI

SEQ ID NO: 67076 - protein, 10 aa, synthetic construct
QTYRGDRSVV

SEQ ID NO: 67077 - protein, 10 aa, synthetic construct
QTYRGDRGVV

SEQ ID NO: 67078 - protein, 10 aa, synthetic construct
QTYRGDYVGL

SEQ ID NO: 67079 - protein, 10 aa, synthetic construct
QTYRGDQSTL

SEQ ID NO: 67080 - protein, 10 aa, synthetic construct
QTYRGDRSQT

SEQ ID NO: 67081 - protein, 10 aa, synthetic construct
QTYRGDLLLS

SEQ ID NO: 67082 - protein, 10 aa, synthetic construct
QTNRGDRGQI

SEQ ID NO: 67083 - protein, 10 aa, synthetic construct
TTARGDRGQI

SEQ ID NO: 67084 - protein, 10 aa, synthetic construct
QTNRGDRQGI

SEQ ID NO: 67085 - protein, 10 aa, synthetic construct
QTNRGDRSVV

SEQ ID NO: 67086 - protein, 10 aa, synthetic construct
QTNRGDRGVV

SEQ ID NO: 67087 - protein, 10 aa, synthetic construct
QTNRGDYVGL

SEQ ID NO: 67088 - protein, 10 aa, synthetic construct
QTNRGDQSTL

SEQ ID NO: 67089 - protein, 10 aa, synthetic construct
QTNRGDRSQT

SEQ ID NO: 67090 - protein, 10 aa, synthetic construct
QTNRGDLLLS

SEQ ID NO: 67091 - protein, 10 aa, synthetic construct
QTQRGDHGVL

SEQ ID NO: 67092 - protein, 10 aa, synthetic construct
QTQRGDHVNL

SEQ ID NO: 67093 - protein, 10 aa, synthetic construct
QTQRGDYVGL

SEQ ID NO: 67094 - protein, 10 aa, synthetic construct
TTARGDRQGI

SEQ ID NO: 67095 - protein, 10 aa, synthetic construct
QTQRGDYSSV

SEQ ID NO: 67096 - protein, 10 aa, synthetic construct
QTQRGDQSTL

SEQ ID NO: 67097 - protein, 10 aa, synthetic construct
QTQRGDLLLS

SEQ ID NO: 67098 - protein, 10 aa, synthetic construct
QTDRGDHGVL

SEQ ID NO: 67099 - protein, 10 aa, synthetic construct
QTDRGDHVNL

SEQ ID NO: 67100 - protein, 10 aa, synthetic construct
QTDRGDYVGL

SEQ ID NO: 67101 - protein, 10 aa, synthetic construct
QTDRGDYSSV

SEQ ID NO: 67102 - protein, 10 aa, synthetic construct
QTDRGDQSTL

SEQ ID NO: 67103 - protein, 10 aa, synthetic construct
QTDRGDLLLS

SEQ ID NO: 67104 - protein, 10 aa, synthetic construct
QTERGDHGVL

SEQ ID NO: 67105 - protein, 10 aa, synthetic construct
TTARGDRSVV

SEQ ID NO: 67106 - protein, 10 aa, synthetic construct
QTERGDHVNL

SEQ ID NO: 67107 - protein, 10 aa, synthetic construct
QTERGDYVGL

SEQ ID NO: 67108 - protein, 10 aa, synthetic construct
QTERGDYSSV

SEQ ID NO: 67109 - protein, 10 aa, synthetic construct
QTERGDQSTL

SEQ ID NO: 67110 - protein, 10 aa, synthetic construct
QTERGDLLLS

SEQ ID NO: 67111 - protein, 10 aa, synthetic construct
QYGRGDHGVL

SEQ ID NO: 67112 - protein, 10 aa, synthetic construct
QYGRGDHVNL

SEQ ID NO: 67113 - protein, 10 aa, synthetic construct
QYGRGDYVGL

SEQ ID NO: 67114 - protein, 10 aa, synthetic construct
QYGRGDYSSV

SEQ ID NO: 67115 - protein, 10 aa, synthetic construct
QYGRGDQSTL

SEQ ID NO: 67116 - protein, 10 aa, synthetic construct
TTARGDRGVV

SEQ ID NO: 67117 - protein, 10 aa, synthetic construct
QYGRGDLLLS

SEQ ID NO: 67118 - protein, 10 aa, synthetic construct
QYARGDHGVL

SEQ ID NO: 67119 - protein, 10 aa, synthetic construct
QYARGDHVNL

SEQ ID NO: 67120 - protein, 10 aa, synthetic construct
QYARGDYVGL

SEQ ID NO: 67121 - protein, 10 aa, synthetic construct
QYARGDYSSV

SEQ ID NO: 67122 - protein, 10 aa, synthetic construct
QYARGDQSTL

SEQ ID NO: 67123 - protein, 10 aa, synthetic construct
QYARGDLLLS

SEQ ID NO: 67124 - protein, 10 aa, synthetic construct
QYVRGDRGQI

SEQ ID NO: 67125 - protein, 10 aa, synthetic construct
QYVRGDRQGI

SEQ ID NO: 67126 - protein, 10 aa, synthetic construct
QYVRGDRSVV

SEQ ID NO: 67127 - protein, 10 aa, synthetic construct
TTARGDRSQT

SEQ ID NO: 67128 - protein, 10 aa, synthetic construct
QYVRGDRGVV

SEQ ID NO: 67129 - protein, 10 aa, synthetic construct
QYVRGDYVGL

SEQ ID NO: 67130 - protein, 10 aa, synthetic construct
QYVRGDQSTL

SEQ ID NO: 67131 - protein, 10 aa, synthetic construct
QYVRGDRSQT

SEQ ID NO: 67132 - protein, 10 aa, synthetic construct
QYVRGDLLLS

SEQ ID NO: 67133 - protein, 10 aa, synthetic construct
QYPRGDHGVL

SEQ ID NO: 67134 - protein, 10 aa, synthetic construct
QYPRGDHVNL

SEQ ID NO: 67135 - protein, 10 aa, synthetic construct
QYPRGDYVGL

SEQ ID NO: 67136 - protein, 10 aa, synthetic construct
QYPRGDYSSV

SEQ ID NO: 67137 - protein, 10 aa, synthetic construct
QYPRGDQSTL

SEQ ID NO: 67138 - protein, 10 aa, synthetic construct
TTPRGDRGQI

SEQ ID NO: 67139 - protein, 10 aa, synthetic construct
QYPRGDLLLS

SEQ ID NO: 67140 - protein, 10 aa, synthetic construct
QYLRGDRGQI

SEQ ID NO: 67141 - protein, 10 aa, synthetic construct
QYLRGDRQGI

SEQ ID NO: 67142 - protein, 10 aa, synthetic construct
QYLRGDRSVV

SEQ ID NO: 67143 - protein, 10 aa, synthetic construct
QYLRGDRGVV

SEQ ID NO: 67144 - protein, 10 aa, synthetic construct
QYLRGDYVGL

SEQ ID NO: 67145 - protein, 10 aa, synthetic construct
QYLRGDQSTL

SEQ ID NO: 67146 - protein, 10 aa, synthetic construct
QYLRGDRSQT

SEQ ID NO: 67147 - protein, 10 aa, synthetic construct
QYLRGDLLLS

SEQ ID NO: 67148 - protein, 10 aa, synthetic construct
QYIRGDRSVV

SEQ ID NO: 67149 - protein, 10 aa, synthetic construct
TTPRGDRQGI

SEQ ID NO: 67150 - protein, 10 aa, synthetic construct
QYIRGDRSQT

SEQ ID NO: 67151 - protein, 10 aa, synthetic construct
QYMRGDRSVV

SEQ ID NO: 67152 - protein, 10 aa, synthetic construct
QYMRGDRSQT

SEQ ID NO: 67153 - protein, 10 aa, synthetic construct
QYWRGDRGQI

SEQ ID NO: 67154 - protein, 10 aa, synthetic construct
QYWRGDRQGI

SEQ ID NO: 67155 - protein, 10 aa, synthetic construct
QYWRGDRSVV

SEQ ID NO: 67156 - protein, 10 aa, synthetic construct
QYWRGDRGVV

SEQ ID NO: 67157 - protein, 10 aa, synthetic construct
QYWRGDYVGL

SEQ ID NO: 67158 - protein, 10 aa, synthetic construct
QYWRGDQSTL

SEQ ID NO: 67159 - protein, 10 aa, synthetic construct
QYWRGDRSQT

SEQ ID NO: 67160 - protein, 10 aa, synthetic construct
TTPRGDRSVV

SEQ ID NO: 67161 - protein, 10 aa, synthetic construct
QYWRGDLLLS

SEQ ID NO: 67162 - protein, 10 aa, synthetic construct
QYFRGDRSVV

SEQ ID NO: 67163 - protein, 10 aa, synthetic construct
QYFRGDRSQT

SEQ ID NO: 67164 - protein, 10 aa, synthetic construct
QYKRGDRSVV

SEQ ID NO: 67165 - protein, 10 aa, synthetic construct
QYKRGDRSQT

SEQ ID NO: 67166 - protein, 10 aa, synthetic construct
QYRRGDHGVL

SEQ ID NO: 67167 - protein, 10 aa, synthetic construct
QYRRGDHVNL

SEQ ID NO: 67168 - protein, 10 aa, synthetic construct
QYRRGDYVGL

SEQ ID NO: 67169 - protein, 10 aa, synthetic construct
QYRRGDYSSV

SEQ ID NO: 67170 - protein, 10 aa, synthetic construct
QYRRGDQSTL

SEQ ID NO: 67171 - protein, 10 aa, synthetic construct
TTPRGDRGVV

SEQ ID NO: 67172 - protein, 10 aa, synthetic construct
QYRRGDLLLS

SEQ ID NO: 67173 - protein, 10 aa, synthetic construct
QYHRGDRGQI

SEQ ID NO: 67174 - protein, 10 aa, synthetic construct
QYHRGDRQGI

SEQ ID NO: 67175 - protein, 10 aa, synthetic construct
QYHRGDRSVV

SEQ ID NO: 67176 - protein, 10 aa, synthetic construct
QYHRGDRGVV

SEQ ID NO: 67177 - protein, 10 aa, synthetic construct
QYHRGDYVGL

SEQ ID NO: 67178 - protein, 10 aa, synthetic construct
QYHRGDQSTL

SEQ ID NO: 67179 - protein, 10 aa, synthetic construct
QYHRGDRSQT

SEQ ID NO: 67180 - protein, 10 aa, synthetic construct
QYHRGDLLLS

SEQ ID NO: 67181 - protein, 10 aa, synthetic construct
QYSRGDRGQI

SEQ ID NO: 67182 - protein, 10 aa, synthetic construct
TSPRGDRGVV

SEQ ID NO: 67183 - protein, 10 aa, synthetic construct
TTPRGDRSQT

SEQ ID NO: 67184 - protein, 10 aa, synthetic construct
QYSRGDRQGI

SEQ ID NO: 67185 - protein, 10 aa, synthetic construct
QYSRGDRSVV

SEQ ID NO: 67186 - protein, 10 aa, synthetic construct
QYSRGDRGVV

SEQ ID NO: 67187 - protein, 10 aa, synthetic construct
QYSRGDYVGL

SEQ ID NO: 67188 - protein, 10 aa, synthetic construct
QYSRGDQSTL

SEQ ID NO: 67189 - protein, 10 aa, synthetic construct
QYSRGDRSQT

SEQ ID NO: 67190 - protein, 10 aa, synthetic construct
QYSRGDLLLS

SEQ ID NO: 67191 - protein, 10 aa, synthetic construct
QYTRGDRGQI

SEQ ID NO: 67192 - protein, 10 aa, synthetic construct
QYTRGDRQGI

SEQ ID NO: 67193 - protein, 10 aa, synthetic construct
QYTRGDRSVV

SEQ ID NO: 67194 - protein, 10 aa, synthetic construct
TTRRGDRGQI

SEQ ID NO: 67195 - protein, 10 aa, synthetic construct
QYTRGDRGVV

SEQ ID NO: 67196 - protein, 10 aa, synthetic construct
QYTRGDYVGL

SEQ ID NO: 67197 - protein, 10 aa, synthetic construct
QYTRGDQSTL

SEQ ID NO: 67198 - protein, 10 aa, synthetic construct
QYTRGDRSQT

SEQ ID NO: 67199 - protein, 10 aa, synthetic construct
QYTRGDLLLS

SEQ ID NO: 67200 - protein, 10 aa, synthetic construct
QYYRGDRSVV

SEQ ID NO: 67201 - protein, 10 aa, synthetic construct
QYYRGDRSQT

SEQ ID NO: 67202 - protein, 10 aa, synthetic construct
QYNRGDRSVV

SEQ ID NO: 67203 - protein, 10 aa, synthetic construct
QYNRGDRSQT

SEQ ID NO: 67204 - protein, 10 aa, synthetic construct
QYQRGDRGQI

SEQ ID NO: 67205 - protein, 10 aa, synthetic construct
TTRRGDRQGI

SEQ ID NO: 67206 - protein, 10 aa, synthetic construct
QYQRGDRQGI

SEQ ID NO: 67207 - protein, 10 aa, synthetic construct
QYQRGDRSVV

SEQ ID NO: 67208 - protein, 10 aa, synthetic construct
QYQRGDRGVV

SEQ ID NO: 67209 - protein, 10 aa, synthetic construct
QYQRGDYVGL

SEQ ID NO: 67210 - protein, 10 aa, synthetic construct
QYQRGDQSTL

SEQ ID NO: 67211 - protein, 10 aa, synthetic construct
QYQRGDRSQT

SEQ ID NO: 67212 - protein, 10 aa, synthetic construct
QYQRGDLLLS

SEQ ID NO: 67213 - protein, 10 aa, synthetic construct
QYDRGDRGQI

SEQ ID NO: 67214 - protein, 10 aa, synthetic construct
QYDRGDRQGI

SEQ ID NO: 67215 - protein, 10 aa, synthetic construct
QYDRGDRSVV

SEQ ID NO: 67216 - protein, 10 aa, synthetic construct
TTRRGDRSVV

SEQ ID NO: 67217 - protein, 10 aa, synthetic construct
QYDRGDRGVV

SEQ ID NO: 67218 - protein, 10 aa, synthetic construct
QYDRGDYVGL

SEQ ID NO: 67219 - protein, 10 aa, synthetic construct
QYDRGDQSTL

SEQ ID NO: 67220 - protein, 10 aa, synthetic construct
QYDRGDRSQT

SEQ ID NO: 67221 - protein, 10 aa, synthetic construct
QYDRGDLLLS

SEQ ID NO: 67222 - protein, 10 aa, synthetic construct
QYERGDRGQI

SEQ ID NO: 67223 - protein, 10 aa, synthetic construct
QYERGDRQGI

SEQ ID NO: 67224 - protein, 10 aa, synthetic construct
QYERGDRSVV

SEQ ID NO: 67225 - protein, 10 aa, synthetic construct
QYERGDRGVV

SEQ ID NO: 67226 - protein, 10 aa, synthetic construct
QYERGDYVGL

SEQ ID NO: 67227 - protein, 10 aa, synthetic construct
TTRRGDRGVV

SEQ ID NO: 67228 - protein, 10 aa, synthetic construct
QYERGDQSTL

SEQ ID NO: 67229 - protein, 10 aa, synthetic construct
QYERGDRSQT

SEQ ID NO: 67230 - protein, 10 aa, synthetic construct
QYERGDLLLS

SEQ ID NO: 67231 - protein, 10 aa, synthetic construct
QNGRGDHGVL

SEQ ID NO: 67232 - protein, 10 aa, synthetic construct
QNGRGDHVNL

SEQ ID NO: 67233 - protein, 10 aa, synthetic construct
QNGRGDYVGL

SEQ ID NO: 67234 - protein, 10 aa, synthetic construct
QNGRGDYSSV

SEQ ID NO: 67235 - protein, 10 aa, synthetic construct
QNGRGDQSTL

SEQ ID NO: 67236 - protein, 10 aa, synthetic construct
QNGRGDLLLS

SEQ ID NO: 67237 - protein, 10 aa, synthetic construct
QNARGDHGVL

SEQ ID NO: 67238 - protein, 10 aa, synthetic construct
TTRRGDRSQT

SEQ ID NO: 67239 - protein, 10 aa, synthetic construct
QNARGDHVNL

SEQ ID NO: 67240 - protein, 10 aa, synthetic construct
QNARGDYVGL

SEQ ID NO: 67241 - protein, 10 aa, synthetic construct
QNARGDYSSV

SEQ ID NO: 67242 - protein, 10 aa, synthetic construct
QNARGDQSTL

SEQ ID NO: 67243 - protein, 10 aa, synthetic construct
QNARGDLLLS

SEQ ID NO: 67244 - protein, 10 aa, synthetic construct
QNVRGDRGQI

SEQ ID NO: 67245 - protein, 10 aa, synthetic construct
QNVRGDRQGI

SEQ ID NO: 67246 - protein, 10 aa, synthetic construct
QNVRGDRSVV

SEQ ID NO: 67247 - protein, 10 aa, synthetic construct
QNVRGDRGVV

SEQ ID NO: 67248 - protein, 10 aa, synthetic construct
QNVRGDYVGL

SEQ ID NO: 67249 - protein, 10 aa, synthetic construct
TQGRGDRGQI

SEQ ID NO: 67250 - protein, 10 aa, synthetic construct
QNVRGDQSTL

SEQ ID NO: 67251 - protein, 10 aa, synthetic construct
QNVRGDRSQT

SEQ ID NO: 67252 - protein, 10 aa, synthetic construct
QNVRGDLLLS

SEQ ID NO: 67253 - protein, 10 aa, synthetic construct
QNPRGDHGVL

SEQ ID NO: 67254 - protein, 10 aa, synthetic construct
QNPRGDHVNL

SEQ ID NO: 67255 - protein, 10 aa, synthetic construct
QNPRGDYVGL

SEQ ID NO: 67256 - protein, 10 aa, synthetic construct
QNPRGDYSSV

SEQ ID NO: 67257 - protein, 10 aa, synthetic construct
QNPRGDQSTL

SEQ ID NO: 67258 - protein, 10 aa, synthetic construct
QNPRGDLLLS

SEQ ID NO: 67259 - protein, 10 aa, synthetic construct
QNLRGDRGQI

SEQ ID NO: 67260 - protein, 10 aa, synthetic construct
TQGRGDRQGI

SEQ ID NO: 67261 - protein, 10 aa, synthetic construct
QNLRGDRQGI

SEQ ID NO: 67262 - protein, 10 aa, synthetic construct
QNLRGDRSVV

SEQ ID NO: 67263 - protein, 10 aa, synthetic construct
QNLRGDRGVV

SEQ ID NO: 67264 - protein, 10 aa, synthetic construct
QNLRGDYVGL

SEQ ID NO: 67265 - protein, 10 aa, synthetic construct
QNLRGDQSTL

SEQ ID NO: 67266 - protein, 10 aa, synthetic construct
QNLRGDRSQT

SEQ ID NO: 67267 - protein, 10 aa, synthetic construct
QNLRGDLLLS

SEQ ID NO: 67268 - protein, 10 aa, synthetic construct
QNIRGDRSVV

SEQ ID NO: 67269 - protein, 10 aa, synthetic construct
QNIRGDRSQT

SEQ ID NO: 67270 - protein, 10 aa, synthetic construct
QNMRGDRSVV

SEQ ID NO: 67271 - protein, 10 aa, synthetic construct
TQGRGDRSVV

SEQ ID NO: 67272 - protein, 10 aa, synthetic construct
QNMRGDRSQT

SEQ ID NO: 67273 - protein, 10 aa, synthetic construct
QNWRGDRGQI

SEQ ID NO: 67274 - protein, 10 aa, synthetic construct
QNWRGDRQGI

SEQ ID NO: 67275 - protein, 10 aa, synthetic construct
QNWRGDRSVV

SEQ ID NO: 67276 - protein, 10 aa, synthetic construct
QNWRGDRGVV

SEQ ID NO: 67277 - protein, 10 aa, synthetic construct
QNWRGDYVGL

SEQ ID NO: 67278 - protein, 10 aa, synthetic construct
QNWRGDQSTL

SEQ ID NO: 67279 - protein, 10 aa, synthetic construct
QNWRGDRSQT

SEQ ID NO: 67280 - protein, 10 aa, synthetic construct
QNWRGDLLLS

SEQ ID NO: 67281 - protein, 10 aa, synthetic construct
QNFRGDRSVV

SEQ ID NO: 67282 - protein, 10 aa, synthetic construct
TQGRGDRGVV

SEQ ID NO: 67283 - protein, 10 aa, synthetic construct
QNFRGDRSQT

SEQ ID NO: 67284 - protein, 10 aa, synthetic construct
QNKRGDRSVV

SEQ ID NO: 67285 - protein, 10 aa, synthetic construct
QNKRGDRSQT

SEQ ID NO: 67286 - protein, 10 aa, synthetic construct
QNRRGDHGVL

SEQ ID NO: 67287 - protein, 10 aa, synthetic construct
QNRRGDHVNL

SEQ ID NO: 67288 - protein, 10 aa, synthetic construct
QNRRGDYVGL

SEQ ID NO: 67289 - protein, 10 aa, synthetic construct
QNRRGDYSSV

SEQ ID NO: 67290 - protein, 10 aa, synthetic construct
QNRRGDQSTL

SEQ ID NO: 67291 - protein, 10 aa, synthetic construct
QNRRGDLLLS

SEQ ID NO: 67292 - protein, 10 aa, synthetic construct
QNHRGDRGQI

SEQ ID NO: 67293 - protein, 10 aa, synthetic construct
SKKRGDQSTL

SEQ ID NO: 67294 - protein, 10 aa, synthetic construct
TSPRGDRSQT

SEQ ID NO: 67295 - protein, 10 aa, synthetic construct
TQGRGDRSQT

SEQ ID NO: 67296 - protein, 10 aa, synthetic construct
QNHRGDRQGI

SEQ ID NO: 67297 - protein, 10 aa, synthetic construct
QNHRGDRSVV

SEQ ID NO: 67298 - protein, 10 aa, synthetic construct
QNHRGDRGVV

SEQ ID NO: 67299 - protein, 10 aa, synthetic construct
QNHRGDYVGL

SEQ ID NO: 67300 - protein, 10 aa, synthetic construct
QNHRGDQSTL

SEQ ID NO: 67301 - protein, 10 aa, synthetic construct
QNHRGDRSQT

SEQ ID NO: 67302 - protein, 10 aa, synthetic construct
QNHRGDLLLS

SEQ ID NO: 67303 - protein, 10 aa, synthetic construct
QNSRGDRGQI

SEQ ID NO: 67304 - protein, 10 aa, synthetic construct
QNSRGDRQGI

SEQ ID NO: 67305 - protein, 10 aa, synthetic construct
QNSRGDRSVV

SEQ ID NO: 67306 - protein, 10 aa, synthetic construct
TQARGDRGQI

SEQ ID NO: 67307 - protein, 10 aa, synthetic construct
QNSRGDRGVV

SEQ ID NO: 67308 - protein, 10 aa, synthetic construct
QNSRGDYVGL

SEQ ID NO: 67309 - protein, 10 aa, synthetic construct
QNSRGDQSTL

SEQ ID NO: 67310 - protein, 10 aa, synthetic construct
QNSRGDRSQT

SEQ ID NO: 67311 - protein, 10 aa, synthetic construct
QNSRGDLLLS

SEQ ID NO: 67312 - protein, 10 aa, synthetic construct
QNTRGDRGQI

SEQ ID NO: 67313 - protein, 10 aa, synthetic construct
QNTRGDRQGI

SEQ ID NO: 67314 - protein, 10 aa, synthetic construct
QNTRGDRSVV

SEQ ID NO: 67315 - protein, 10 aa, synthetic construct
QNTRGDRGVV

SEQ ID NO: 67316 - protein, 10 aa, synthetic construct
QNTRGDYVGL

SEQ ID NO: 67317 - protein, 10 aa, synthetic construct
TQARGDRQGI

SEQ ID NO: 67318 - protein, 10 aa, synthetic construct
QNTRGDQSTL

SEQ ID NO: 67319 - protein, 10 aa, synthetic construct
QNTRGDRSQT

SEQ ID NO: 67320 - protein, 10 aa, synthetic construct
QNTRGDLLLS

SEQ ID NO: 67321 - protein, 10 aa, synthetic construct
QNYRGDRSVV

SEQ ID NO: 67322 - protein, 10 aa, synthetic construct
QNYRGDRSQT

SEQ ID NO: 67323 - protein, 10 aa, synthetic construct
QNNRGDRSVV

SEQ ID NO: 67324 - protein, 10 aa, synthetic construct
QNNRGDRSQT

SEQ ID NO: 67325 - protein, 10 aa, synthetic construct
QNQRGDRGQI

SEQ ID NO: 67326 - protein, 10 aa, synthetic construct
QNQRGDRQGI

SEQ ID NO: 67327 - protein, 10 aa, synthetic construct
QNQRGDRSVV

SEQ ID NO: 67328 - protein, 10 aa, synthetic construct
TQARGDRSVV

SEQ ID NO: 67329 - protein, 10 aa, synthetic construct
QNQRGDRGVV

SEQ ID NO: 67330 - protein, 10 aa, synthetic construct
QNQRGDYVGL

SEQ ID NO: 67331 - protein, 10 aa, synthetic construct
QNQRGDQSTL

SEQ ID NO: 67332 - protein, 10 aa, synthetic construct
QNQRGDRSQT

SEQ ID NO: 67333 - protein, 10 aa, synthetic construct
QNQRGDLLLS

SEQ ID NO: 67334 - protein, 10 aa, synthetic construct
QNDRGDRGQI

SEQ ID NO: 67335 - protein, 10 aa, synthetic construct
QNDRGDRQGI

SEQ ID NO: 67336 - protein, 10 aa, synthetic construct
QNDRGDRSVV

SEQ ID NO: 67337 - protein, 10 aa, synthetic construct
QNDRGDRGVV

SEQ ID NO: 67338 - protein, 10 aa, synthetic construct
QNDRGDYVGL

SEQ ID NO: 67339 - protein, 10 aa, synthetic construct
TQARGDRGVV

SEQ ID NO: 67340 - protein, 10 aa, synthetic construct
QNDRGDQSTL

SEQ ID NO: 67341 - protein, 10 aa, synthetic construct
QNDRGDRSQT

SEQ ID NO: 67342 - protein, 10 aa, synthetic construct
QNDRGDLLLS

SEQ ID NO: 67343 - protein, 10 aa, synthetic construct
QNERGDRGQI

SEQ ID NO: 67344 - protein, 10 aa, synthetic construct
QNERGDRQGI

SEQ ID NO: 67345 - protein, 10 aa, synthetic construct
QNERGDRSVV

SEQ ID NO: 67346 - protein, 10 aa, synthetic construct
QNERGDRGVV

SEQ ID NO: 67347 - protein, 10 aa, synthetic construct
QNERGDYVGL

SEQ ID NO: 67348 - protein, 10 aa, synthetic construct
QNERGDQSTL

SEQ ID NO: 67349 - protein, 10 aa, synthetic construct
QNERGDRSQT

SEQ ID NO: 67350 - protein, 10 aa, synthetic construct
TQARGDRSQT

SEQ ID NO: 67351 - protein, 10 aa, synthetic construct
QNERGDLLLS

SEQ ID NO: 67352 - protein, 10 aa, synthetic construct
QQGRGDHVNL

SEQ ID NO: 67353 - protein, 10 aa, synthetic construct
QQGRGDRDYL

SEQ ID NO: 67354 - protein, 10 aa, synthetic construct
QQGRGDYSSV

SEQ ID NO: 67355 - protein, 10 aa, synthetic construct
QQGRGDLTVT

SEQ ID NO: 67356 - protein, 10 aa, synthetic construct
QQGRGDLIGR

SEQ ID NO: 67357 - protein, 10 aa, synthetic construct
QQARGDHVNL

SEQ ID NO: 67358 - protein, 10 aa, synthetic construct
QQARGDRDYL

SEQ ID NO: 67359 - protein, 10 aa, synthetic construct
QQARGDYSSV

SEQ ID NO: 67360 - protein, 10 aa, synthetic construct
QQARGDLTVT

SEQ ID NO: 67361 - protein, 10 aa, synthetic construct
TQPRGDRGQI

SEQ ID NO: 67362 - protein, 10 aa, synthetic construct
QQARGDLIGR

SEQ ID NO: 67363 - protein, 10 aa, synthetic construct
QQVRGDHGVL

SEQ ID NO: 67364 - protein, 10 aa, synthetic construct
QQVRGDHVNL

SEQ ID NO: 67365 - protein, 10 aa, synthetic construct
QQVRGDYVGL

SEQ ID NO: 67366 - protein, 10 aa, synthetic construct
QQVRGDYSSV

SEQ ID NO: 67367 - protein, 10 aa, synthetic construct
QQVRGDQSTL

SEQ ID NO: 67368 - protein, 10 aa, synthetic construct
QQVRGDLLLS

SEQ ID NO: 67369 - protein, 10 aa, synthetic construct
QQPRGDHVNL

SEQ ID NO: 67370 - protein, 10 aa, synthetic construct
QQPRGDRDYL

SEQ ID NO: 67371 - protein, 10 aa, synthetic construct
QQPRGDYSSV

SEQ ID NO: 67372 - protein, 10 aa, synthetic construct
TQPRGDRQGI

SEQ ID NO: 67373 - protein, 10 aa, synthetic construct
QQPRGDLTVT

SEQ ID NO: 67374 - protein, 10 aa, synthetic construct
QQPRGDLIGR

SEQ ID NO: 67375 - protein, 10 aa, synthetic construct
QQLRGDHGVL

SEQ ID NO: 67376 - protein, 10 aa, synthetic construct
QQLRGDHVNL

SEQ ID NO: 67377 - protein, 10 aa, synthetic construct
QQLRGDYVGL

SEQ ID NO: 67378 - protein, 10 aa, synthetic construct
QQLRGDYSSV

SEQ ID NO: 67379 - protein, 10 aa, synthetic construct
QQLRGDQSTL

SEQ ID NO: 67380 - protein, 10 aa, synthetic construct
QQLRGDLLLS

SEQ ID NO: 67381 - protein, 10 aa, synthetic construct
QQIRGDRGQI

SEQ ID NO: 67382 - protein, 10 aa, synthetic construct
QQIRGDRQGI

SEQ ID NO: 67383 - protein, 10 aa, synthetic construct
TQPRGDRSVV

SEQ ID NO: 67384 - protein, 10 aa, synthetic construct
QQIRGDRSVV

SEQ ID NO: 67385 - protein, 10 aa, synthetic construct
QQIRGDRGVV

SEQ ID NO: 67386 - protein, 10 aa, synthetic construct
QQIRGDYVGL

SEQ ID NO: 67387 - protein, 10 aa, synthetic construct
QQIRGDQSTL

SEQ ID NO: 67388 - protein, 10 aa, synthetic construct
QQIRGDRSQT

SEQ ID NO: 67389 - protein, 10 aa, synthetic construct
QQIRGDLLLS

SEQ ID NO: 67390 - protein, 10 aa, synthetic construct
QQMRGDRGQI

SEQ ID NO: 67391 - protein, 10 aa, synthetic construct
QQMRGDRQGI

SEQ ID NO: 67392 - protein, 10 aa, synthetic construct
QQMRGDRSVV

SEQ ID NO: 67393 - protein, 10 aa, synthetic construct
QQMRGDRGVV

SEQ ID NO: 67394 - protein, 10 aa, synthetic construct
TQPRGDRGVV

SEQ ID NO: 67395 - protein, 10 aa, synthetic construct
QQMRGDYVGL

SEQ ID NO: 67396 - protein, 10 aa, synthetic construct
QQMRGDQSTL

SEQ ID NO: 67397 - protein, 10 aa, synthetic construct
QQMRGDRSQT

SEQ ID NO: 67398 - protein, 10 aa, synthetic construct
QQMRGDLLLS

SEQ ID NO: 67399 - protein, 10 aa, synthetic construct
QQWRGDHGVL

SEQ ID NO: 67400 - protein, 10 aa, synthetic construct
QQWRGDHVNL

SEQ ID NO: 67401 - protein, 10 aa, synthetic construct
QQWRGDYVGL

SEQ ID NO: 67402 - protein, 10 aa, synthetic construct
QQWRGDYSSV

SEQ ID NO: 67403 - protein, 10 aa, synthetic construct
QQWRGDQSTL

SEQ ID NO: 67404 - protein, 10 aa, synthetic construct
QQWRGDLLLS

SEQ ID NO: 67405 - protein, 10 aa, synthetic construct
ESPRGDRGQI

SEQ ID NO: 67406 - protein, 10 aa, synthetic construct
TQPRGDRSQT

SEQ ID NO: 67407 - protein, 10 aa, synthetic construct
QQFRGDRGQI

SEQ ID NO: 67408 - protein, 10 aa, synthetic construct
QQFRGDRQGI

SEQ ID NO: 67409 - protein, 10 aa, synthetic construct
QQFRGDRSVV

SEQ ID NO: 67410 - protein, 10 aa, synthetic construct
QQFRGDRGVV

SEQ ID NO: 67411 - protein, 10 aa, synthetic construct
QQFRGDYVGL

SEQ ID NO: 67412 - protein, 10 aa, synthetic construct
QQFRGDQSTL

SEQ ID NO: 67413 - protein, 10 aa, synthetic construct
QQFRGDRSQT

SEQ ID NO: 67414 - protein, 10 aa, synthetic construct
QQFRGDLLLS

SEQ ID NO: 67415 - protein, 10 aa, synthetic construct
QQKRGDRGQI

SEQ ID NO: 67416 - protein, 10 aa, synthetic construct
QQKRGDRQGI

SEQ ID NO: 67417 - protein, 10 aa, synthetic construct
TQRRGDRGQI

SEQ ID NO: 67418 - protein, 10 aa, synthetic construct
QQKRGDRSVV

SEQ ID NO: 67419 - protein, 10 aa, synthetic construct
QQKRGDRGVV

SEQ ID NO: 67420 - protein, 10 aa, synthetic construct
QQKRGDYVGL

SEQ ID NO: 67421 - protein, 10 aa, synthetic construct
QQKRGDQSTL

SEQ ID NO: 67422 - protein, 10 aa, synthetic construct
QQKRGDRSQT

SEQ ID NO: 67423 - protein, 10 aa, synthetic construct
QQKRGDLLLS

SEQ ID NO: 67424 - protein, 10 aa, synthetic construct
QQRRGDHVNL

SEQ ID NO: 67425 - protein, 10 aa, synthetic construct
QQRRGDRDYL

SEQ ID NO: 67426 - protein, 10 aa, synthetic construct
QQRRGDYSSV

SEQ ID NO: 67427 - protein, 10 aa, synthetic construct
QQRRGDLTVT

SEQ ID NO: 67428 - protein, 10 aa, synthetic construct
TQRRGDRQGI

SEQ ID NO: 67429 - protein, 10 aa, synthetic construct
QQRRGDLIGR

SEQ ID NO: 67430 - protein, 10 aa, synthetic construct
QQHRGDHGVL

SEQ ID NO: 67431 - protein, 10 aa, synthetic construct
QQHRGDHVNL

SEQ ID NO: 67432 - protein, 10 aa, synthetic construct
QQHRGDYVGL

SEQ ID NO: 67433 - protein, 10 aa, synthetic construct
QQHRGDYSSV

SEQ ID NO: 67434 - protein, 10 aa, synthetic construct
QQHRGDQSTL

SEQ ID NO: 67435 - protein, 10 aa, synthetic construct
QQHRGDLLLS

SEQ ID NO: 67436 - protein, 10 aa, synthetic construct
QQSRGDHGVL

SEQ ID NO: 67437 - protein, 10 aa, synthetic construct
QQSRGDHVNL

SEQ ID NO: 67438 - protein, 10 aa, synthetic construct
QQSRGDYVGL

SEQ ID NO: 67439 - protein, 10 aa, synthetic construct
TQRRGDRSVV

SEQ ID NO: 67440 - protein, 10 aa, synthetic construct
QQSRGDYSSV

SEQ ID NO: 67441 - protein, 10 aa, synthetic construct
QQSRGDQSTL

SEQ ID NO: 67442 - protein, 10 aa, synthetic construct
QQSRGDLLLS

SEQ ID NO: 67443 - protein, 10 aa, synthetic construct
QQTRGDHGVL

SEQ ID NO: 67444 - protein, 10 aa, synthetic construct
QQTRGDHVNL

SEQ ID NO: 67445 - protein, 10 aa, synthetic construct
QQTRGDYVGL

SEQ ID NO: 67446 - protein, 10 aa, synthetic construct
QQTRGDYSSV

SEQ ID NO: 67447 - protein, 10 aa, synthetic construct
QQTRGDQSTL

SEQ ID NO: 67448 - protein, 10 aa, synthetic construct
QQTRGDLLLS

SEQ ID NO: 67449 - protein, 10 aa, synthetic construct
QQYRGDRGQI

SEQ ID NO: 67450 - protein, 10 aa, synthetic construct
TQRRGDRGVV

SEQ ID NO: 67451 - protein, 10 aa, synthetic construct
QQYRGDRQGI

SEQ ID NO: 67452 - protein, 10 aa, synthetic construct
QQYRGDRSVV

SEQ ID NO: 67453 - protein, 10 aa, synthetic construct
QQYRGDRGVV

SEQ ID NO: 67454 - protein, 10 aa, synthetic construct
QQYRGDYVGL

SEQ ID NO: 67455 - protein, 10 aa, synthetic construct
QQYRGDQSTL

SEQ ID NO: 67456 - protein, 10 aa, synthetic construct
QQYRGDRSQT

SEQ ID NO: 67457 - protein, 10 aa, synthetic construct
QQYRGDLLLS

SEQ ID NO: 67458 - protein, 10 aa, synthetic construct
QQNRGDRGQI

SEQ ID NO: 67459 - protein, 10 aa, synthetic construct
QQNRGDRQGI

SEQ ID NO: 67460 - protein, 10 aa, synthetic construct
QQNRGDRSVV

SEQ ID NO: 67461 - protein, 10 aa, synthetic construct
TQRRGDRSQT

SEQ ID NO: 67462 - protein, 10 aa, synthetic construct
QQNRGDRGVV

SEQ ID NO: 67463 - protein, 10 aa, synthetic construct
QQNRGDYVGL

SEQ ID NO: 67464 - protein, 10 aa, synthetic construct
QQNRGDQSTL

SEQ ID NO: 67465 - protein, 10 aa, synthetic construct
QQNRGDRSQT

SEQ ID NO: 67466 - protein, 10 aa, synthetic construct
QQNRGDLLLS

SEQ ID NO: 67467 - protein, 10 aa, synthetic construct
QQQRGDHGVL

SEQ ID NO: 67468 - protein, 10 aa, synthetic construct
QQQRGDHVNL

SEQ ID NO: 67469 - protein, 10 aa, synthetic construct
QQQRGDYVGL

SEQ ID NO: 67470 - protein, 10 aa, synthetic construct
QQQRGDYSSV

SEQ ID NO: 67471 - protein, 10 aa, synthetic construct
QQQRGDQSTL

SEQ ID NO: 67472 - protein, 10 aa, synthetic construct
TDGRGDRGQI

SEQ ID NO: 67473 - protein, 10 aa, synthetic construct
QQQRGDLLLS

SEQ ID NO: 67474 - protein, 10 aa, synthetic construct
QQDRGDHGVL

SEQ ID NO: 67475 - protein, 10 aa, synthetic construct
QQDRGDHVNL

SEQ ID NO: 67476 - protein, 10 aa, synthetic construct
QQDRGDYVGL

SEQ ID NO: 67477 - protein, 10 aa, synthetic construct
QQDRGDYSSV

SEQ ID NO: 67478 - protein, 10 aa, synthetic construct
QQDRGDQSTL

SEQ ID NO: 67479 - protein, 10 aa, synthetic construct
QQDRGDLLLS

SEQ ID NO: 67480 - protein, 10 aa, synthetic construct
QQERGDHGVL

SEQ ID NO: 67481 - protein, 10 aa, synthetic construct
QQERGDHVNL

SEQ ID NO: 67482 - protein, 10 aa, synthetic construct
QQERGDYVGL

SEQ ID NO: 67483 - protein, 10 aa, synthetic construct
TDGRGDRQGI

SEQ ID NO: 67484 - protein, 10 aa, synthetic construct
QQERGDYSSV

SEQ ID NO: 67485 - protein, 10 aa, synthetic construct
QQERGDQSTL

SEQ ID NO: 67486 - protein, 10 aa, synthetic construct
QQERGDLLLS

SEQ ID NO: 67487 - protein, 10 aa, synthetic construct
QDGRGDHVNL

SEQ ID NO: 67488 - protein, 10 aa, synthetic construct
QDGRGDRDYL

SEQ ID NO: 67489 - protein, 10 aa, synthetic construct
QDGRGDYSSV

SEQ ID NO: 67490 - protein, 10 aa, synthetic construct
QDGRGDLTVT

SEQ ID NO: 67491 - protein, 10 aa, synthetic construct
QDGRGDLIGR

SEQ ID NO: 67492 - protein, 10 aa, synthetic construct
QDARGDHVNL

SEQ ID NO: 67493 - protein, 10 aa, synthetic construct
QDARGDRDYL

SEQ ID NO: 67494 - protein, 10 aa, synthetic construct
TDGRGDRSVV

SEQ ID NO: 67495 - protein, 10 aa, synthetic construct
QDARGDYSSV

SEQ ID NO: 67496 - protein, 10 aa, synthetic construct
QDARGDLTVT

SEQ ID NO: 67497 - protein, 10 aa, synthetic construct
QDARGDLIGR

SEQ ID NO: 67498 - protein, 10 aa, synthetic construct
QDVRGDHGVL

SEQ ID NO: 67499 - protein, 10 aa, synthetic construct
QDVRGDHVNL

SEQ ID NO: 67500 - protein, 10 aa, synthetic construct
QDVRGDYVGL

SEQ ID NO: 67501 - protein, 10 aa, synthetic construct
QDVRGDYSSV

SEQ ID NO: 67502 - protein, 10 aa, synthetic construct
QDVRGDQSTL

SEQ ID NO: 67503 - protein, 10 aa, synthetic construct
QDVRGDLLLS

SEQ ID NO: 67504 - protein, 10 aa, synthetic construct
QDPRGDHVNL

SEQ ID NO: 67505 - protein, 10 aa, synthetic construct
TDGRGDRGVV

SEQ ID NO: 67506 - protein, 10 aa, synthetic construct
QDPRGDRDYL

SEQ ID NO: 67507 - protein, 10 aa, synthetic construct
QDPRGDYSSV

SEQ ID NO: 67508 - protein, 10 aa, synthetic construct
QDPRGDLTVT

SEQ ID NO: 67509 - protein, 10 aa, synthetic construct
QDPRGDLIGR

SEQ ID NO: 67510 - protein, 10 aa, synthetic construct
QDLRGDHGVL

SEQ ID NO: 67511 - protein, 10 aa, synthetic construct
QDLRGDHVNL

SEQ ID NO: 67512 - protein, 10 aa, synthetic construct
QDLRGDYVGL

SEQ ID NO: 67513 - protein, 10 aa, synthetic construct
QDLRGDYSSV

SEQ ID NO: 67514 - protein, 10 aa, synthetic construct
QDLRGDQSTL

SEQ ID NO: 67515 - protein, 10 aa, synthetic construct
QDLRGDLLLS

SEQ ID NO: 67516 - protein, 10 aa, synthetic construct
ESPRGDRQGI

SEQ ID NO: 67517 - protein, 10 aa, synthetic construct
TDGRGDRSQT

SEQ ID NO: 67518 - protein, 10 aa, synthetic construct
QDIRGDRGQI

SEQ ID NO: 67519 - protein, 10 aa, synthetic construct
QDIRGDRQGI

SEQ ID NO: 67520 - protein, 10 aa, synthetic construct
QDIRGDRSVV

SEQ ID NO: 67521 - protein, 10 aa, synthetic construct
QDIRGDRGVV

SEQ ID NO: 67522 - protein, 10 aa, synthetic construct
QDIRGDYVGL

SEQ ID NO: 67523 - protein, 10 aa, synthetic construct
QDIRGDQSTL

SEQ ID NO: 67524 - protein, 10 aa, synthetic construct
QDIRGDRSQT

SEQ ID NO: 67525 - protein, 10 aa, synthetic construct
QDIRGDLLLS

SEQ ID NO: 67526 - protein, 10 aa, synthetic construct
QDMRGDRGQI

SEQ ID NO: 67527 - protein, 10 aa, synthetic construct
QDMRGDRQGI

SEQ ID NO: 67528 - protein, 10 aa, synthetic construct
TDARGDRGQI

SEQ ID NO: 67529 - protein, 10 aa, synthetic construct
QDMRGDRSVV

SEQ ID NO: 67530 - protein, 10 aa, synthetic construct
QDMRGDRGVV

SEQ ID NO: 67531 - protein, 10 aa, synthetic construct
QDMRGDYVGL

SEQ ID NO: 67532 - protein, 10 aa, synthetic construct
QDMRGDQSTL

SEQ ID NO: 67533 - protein, 10 aa, synthetic construct
QDMRGDRSQT

SEQ ID NO: 67534 - protein, 10 aa, synthetic construct
QDMRGDLLLS

SEQ ID NO: 67535 - protein, 10 aa, synthetic construct
QDWRGDHGVL

SEQ ID NO: 67536 - protein, 10 aa, synthetic construct
QDWRGDHVNL

SEQ ID NO: 67537 - protein, 10 aa, synthetic construct
QDWRGDYVGL

SEQ ID NO: 67538 - protein, 10 aa, synthetic construct
QDWRGDYSSV

SEQ ID NO: 67539 - protein, 10 aa, synthetic construct
TDARGDRQGI

SEQ ID NO: 67540 - protein, 10 aa, synthetic construct
QDWRGDQSTL

SEQ ID NO: 67541 - protein, 10 aa, synthetic construct
QDWRGDLLLS

SEQ ID NO: 67542 - protein, 10 aa, synthetic construct
QDFRGDRGQI

SEQ ID NO: 67543 - protein, 10 aa, synthetic construct
QDFRGDRQGI

SEQ ID NO: 67544 - protein, 10 aa, synthetic construct
QDFRGDRSVV

SEQ ID NO: 67545 - protein, 10 aa, synthetic construct
QDFRGDRGVV

SEQ ID NO: 67546 - protein, 10 aa, synthetic construct
QDFRGDYVGL

SEQ ID NO: 67547 - protein, 10 aa, synthetic construct
QDFRGDQSTL

SEQ ID NO: 67548 - protein, 10 aa, synthetic construct
QDFRGDRSQT

SEQ ID NO: 67549 - protein, 10 aa, synthetic construct
QDFRGDLLLS

SEQ ID NO: 67550 - protein, 10 aa, synthetic construct
TDARGDRSVV

SEQ ID NO: 67551 - protein, 10 aa, synthetic construct
QDKRGDRGQI

SEQ ID NO: 67552 - protein, 10 aa, synthetic construct
QDKRGDRQGI

SEQ ID NO: 67553 - protein, 10 aa, synthetic construct
QDKRGDRSVV

SEQ ID NO: 67554 - protein, 10 aa, synthetic construct
QDKRGDRGVV

SEQ ID NO: 67555 - protein, 10 aa, synthetic construct
QDKRGDYVGL

SEQ ID NO: 67556 - protein, 10 aa, synthetic construct
QDKRGDQSTL

SEQ ID NO: 67557 - protein, 10 aa, synthetic construct
QDKRGDRSQT

SEQ ID NO: 67558 - protein, 10 aa, synthetic construct
QDKRGDLLLS

SEQ ID NO: 67559 - protein, 10 aa, synthetic construct
QDRRGDHVNL

SEQ ID NO: 67560 - protein, 10 aa, synthetic construct
QDRRGDRDYL

SEQ ID NO: 67561 - protein, 10 aa, synthetic construct
TDARGDRGVV

SEQ ID NO: 67562 - protein, 10 aa, synthetic construct
QDRRGDYSSV

SEQ ID NO: 67563 - protein, 10 aa, synthetic construct
QDRRGDLTVT

SEQ ID NO: 67564 - protein, 10 aa, synthetic construct
QDRRGDLIGR

SEQ ID NO: 67565 - protein, 10 aa, synthetic construct
QDHRGDHGVL

SEQ ID NO: 67566 - protein, 10 aa, synthetic construct
QDHRGDHVNL

SEQ ID NO: 67567 - protein, 10 aa, synthetic construct
QDHRGDYVGL

SEQ ID NO: 67568 - protein, 10 aa, synthetic construct
QDHRGDYSSV

SEQ ID NO: 67569 - protein, 10 aa, synthetic construct
QDHRGDQSTL

SEQ ID NO: 67570 - protein, 10 aa, synthetic construct
QDHRGDLLLS

SEQ ID NO: 67571 - protein, 10 aa, synthetic construct
QDSRGDHGVL

SEQ ID NO: 67572 - protein, 10 aa, synthetic construct
TDARGDRSQT

SEQ ID NO: 67573 - protein, 10 aa, synthetic construct
QDSRGDHVNL

SEQ ID NO: 67574 - protein, 10 aa, synthetic construct
QDSRGDYVGL

SEQ ID NO: 67575 - protein, 10 aa, synthetic construct
QDSRGDYSSV

SEQ ID NO: 67576 - protein, 10 aa, synthetic construct
QDSRGDQSTL

SEQ ID NO: 67577 - protein, 10 aa, synthetic construct
QDSRGDLLLS

SEQ ID NO: 67578 - protein, 10 aa, synthetic construct
QDTRGDHGVL

SEQ ID NO: 67579 - protein, 10 aa, synthetic construct
QDTRGDHVNL

SEQ ID NO: 67580 - protein, 10 aa, synthetic construct
QDTRGDYVGL

SEQ ID NO: 67581 - protein, 10 aa, synthetic construct
QDTRGDYSSV

SEQ ID NO: 67582 - protein, 10 aa, synthetic construct
QDTRGDQSTL

SEQ ID NO: 67583 - protein, 10 aa, synthetic construct
TDPRGDRGQI

SEQ ID NO: 67584 - protein, 10 aa, synthetic construct
QDTRGDLLLS

SEQ ID NO: 67585 - protein, 10 aa, synthetic construct
QDYRGDRGQI

SEQ ID NO: 67586 - protein, 10 aa, synthetic construct
QDYRGDRQGI

SEQ ID NO: 67587 - protein, 10 aa, synthetic construct
QDYRGDRSVV

SEQ ID NO: 67588 - protein, 10 aa, synthetic construct
QDYRGDRGVV

SEQ ID NO: 67589 - protein, 10 aa, synthetic construct
QDYRGDYVGL

SEQ ID NO: 67590 - protein, 10 aa, synthetic construct
QDYRGDQSTL

SEQ ID NO: 67591 - protein, 10 aa, synthetic construct
QDYRGDRSQT

SEQ ID NO: 67592 - protein, 10 aa, synthetic construct
QDYRGDLLLS

SEQ ID NO: 67593 - protein, 10 aa, synthetic construct
QDNRGDRGQI

SEQ ID NO: 67594 - protein, 10 aa, synthetic construct
TDPRGDRQGI

SEQ ID NO: 67595 - protein, 10 aa, synthetic construct
QDNRGDRQGI

SEQ ID NO: 67596 - protein, 10 aa, synthetic construct
QDNRGDRSVV

SEQ ID NO: 67597 - protein, 10 aa, synthetic construct
QDNRGDRGVV

SEQ ID NO: 67598 - protein, 10 aa, synthetic construct
QDNRGDYVGL

SEQ ID NO: 67599 - protein, 10 aa, synthetic construct
QDNRGDQSTL

SEQ ID NO: 67600 - protein, 10 aa, synthetic construct
QDNRGDRSQT

SEQ ID NO: 67601 - protein, 10 aa, synthetic construct
QDNRGDLLLS

SEQ ID NO: 67602 - protein, 10 aa, synthetic construct
QDQRGDHGVL

SEQ ID NO: 67603 - protein, 10 aa, synthetic construct
QDQRGDHVNL

SEQ ID NO: 67604 - protein, 10 aa, synthetic construct
QDQRGDYVGL

SEQ ID NO: 67605 - protein, 10 aa, synthetic construct
TDPRGDRSVV

SEQ ID NO: 67606 - protein, 10 aa, synthetic construct
QDQRGDYSSV

SEQ ID NO: 67607 - protein, 10 aa, synthetic construct
QDQRGDQSTL

SEQ ID NO: 67608 - protein, 10 aa, synthetic construct
QDQRGDLLLS

SEQ ID NO: 67609 - protein, 10 aa, synthetic construct
QDDRGDHGVL

SEQ ID NO: 67610 - protein, 10 aa, synthetic construct
QDDRGDHVNL

SEQ ID NO: 67611 - protein, 10 aa, synthetic construct
QDDRGDYVGL

SEQ ID NO: 67612 - protein, 10 aa, synthetic construct
QDDRGDYSSV

SEQ ID NO: 67613 - protein, 10 aa, synthetic construct
QDDRGDQSTL

SEQ ID NO: 67614 - protein, 10 aa, synthetic construct
QDDRGDLLLS

SEQ ID NO: 67615 - protein, 10 aa, synthetic construct
QDERGDHGVL

SEQ ID NO: 67616 - protein, 10 aa, synthetic construct
TDPRGDRGVV

SEQ ID NO: 67617 - protein, 10 aa, synthetic construct
QDERGDHVNL

SEQ ID NO: 67618 - protein, 10 aa, synthetic construct
QDERGDYVGL

SEQ ID NO: 67619 - protein, 10 aa, synthetic construct
QDERGDYSSV

SEQ ID NO: 67620 - protein, 10 aa, synthetic construct
QDERGDQSTL

SEQ ID NO: 67621 - protein, 10 aa, synthetic construct
QDERGDLLLS

SEQ ID NO: 67622 - protein, 10 aa, synthetic construct
QEGRGDHVNL

SEQ ID NO: 67623 - protein, 10 aa, synthetic construct
QEGRGDRDYL

SEQ ID NO: 67624 - protein, 10 aa, synthetic construct
QEGRGDYSSV

SEQ ID NO: 67625 - protein, 10 aa, synthetic construct
QEGRGDLTVT

SEQ ID NO: 67626 - protein, 10 aa, synthetic construct
QEGRGDLIGR

SEQ ID NO: 67627 - protein, 10 aa, synthetic construct
ESPRGDRSVV

SEQ ID NO: 67628 - protein, 10 aa, synthetic construct
TDPRGDRSQT

SEQ ID NO: 67629 - protein, 10 aa, synthetic construct
QEARGDHVNL

SEQ ID NO: 67630 - protein, 10 aa, synthetic construct
QEARGDRDYL

SEQ ID NO: 67631 - protein, 10 aa, synthetic construct
QEARGDYSSV

SEQ ID NO: 67632 - protein, 10 aa, synthetic construct
QEARGDLTVT

SEQ ID NO: 67633 - protein, 10 aa, synthetic construct
QEARGDLIGR

SEQ ID NO: 67634 - protein, 10 aa, synthetic construct
QEVRGDHGVL

SEQ ID NO: 67635 - protein, 10 aa, synthetic construct
QEVRGDHVNL

SEQ ID NO: 67636 - protein, 10 aa, synthetic construct
QEVRGDYVGL

SEQ ID NO: 67637 - protein, 10 aa, synthetic construct
QEVRGDYSSV

SEQ ID NO: 67638 - protein, 10 aa, synthetic construct
QEVRGDQSTL

SEQ ID NO: 67639 - protein, 10 aa, synthetic construct
TDRRGDRGQI

SEQ ID NO: 67640 - protein, 10 aa, synthetic construct
QEVRGDLLLS

SEQ ID NO: 67641 - protein, 10 aa, synthetic construct
QEPRGDHVNL

SEQ ID NO: 67642 - protein, 10 aa, synthetic construct
QEPRGDRDYL

SEQ ID NO: 67643 - protein, 10 aa, synthetic construct
QEPRGDYSSV

SEQ ID NO: 67644 - protein, 10 aa, synthetic construct
QEPRGDLTVT

SEQ ID NO: 67645 - protein, 10 aa, synthetic construct
QEPRGDLIGR

SEQ ID NO: 67646 - protein, 10 aa, synthetic construct
QELRGDHGVL

SEQ ID NO: 67647 - protein, 10 aa, synthetic construct
QELRGDHVNL

SEQ ID NO: 67648 - protein, 10 aa, synthetic construct
QELRGDYVGL

SEQ ID NO: 67649 - protein, 10 aa, synthetic construct
QELRGDYSSV

SEQ ID NO: 67650 - protein, 10 aa, synthetic construct
TDRRGDRQGI

SEQ ID NO: 67651 - protein, 10 aa, synthetic construct
QELRGDQSTL

SEQ ID NO: 67652 - protein, 10 aa, synthetic construct
QELRGDLLLS

SEQ ID NO: 67653 - protein, 10 aa, synthetic construct
QEIRGDRGQI

SEQ ID NO: 67654 - protein, 10 aa, synthetic construct
QEIRGDRQGI

SEQ ID NO: 67655 - protein, 10 aa, synthetic construct
QEIRGDRSVV

SEQ ID NO: 67656 - protein, 10 aa, synthetic construct
QEIRGDRGVV

SEQ ID NO: 67657 - protein, 10 aa, synthetic construct
QEIRGDYVGL

SEQ ID NO: 67658 - protein, 10 aa, synthetic construct
QEIRGDQSTL

SEQ ID NO: 67659 - protein, 10 aa, synthetic construct
QEIRGDRSQT

SEQ ID NO: 67660 - protein, 10 aa, synthetic construct
QEIRGDLLLS

SEQ ID NO: 67661 - protein, 10 aa, synthetic construct
TDRRGDRSVV

SEQ ID NO: 67662 - protein, 10 aa, synthetic construct
QEMRGDRGQI

SEQ ID NO: 67663 - protein, 10 aa, synthetic construct
QEMRGDRQGI

SEQ ID NO: 67664 - protein, 10 aa, synthetic construct
QEMRGDRSVV

SEQ ID NO: 67665 - protein, 10 aa, synthetic construct
QEMRGDRGVV

SEQ ID NO: 67666 - protein, 10 aa, synthetic construct
QEMRGDYVGL

SEQ ID NO: 67667 - protein, 10 aa, synthetic construct
QEMRGDQSTL

SEQ ID NO: 67668 - protein, 10 aa, synthetic construct
QEMRGDRSQT

SEQ ID NO: 67669 - protein, 10 aa, synthetic construct
QEMRGDLLLS

SEQ ID NO: 67670 - protein, 10 aa, synthetic construct
QEWRGDHGVL

SEQ ID NO: 67671 - protein, 10 aa, synthetic construct
QEWRGDHVNL

SEQ ID NO: 67672 - protein, 10 aa, synthetic construct
TDRRGDRGVV

SEQ ID NO: 67673 - protein, 10 aa, synthetic construct
QEWRGDYVGL

SEQ ID NO: 67674 - protein, 10 aa, synthetic construct
QEWRGDYSSV

SEQ ID NO: 67675 - protein, 10 aa, synthetic construct
QEWRGDQSTL

SEQ ID NO: 67676 - protein, 10 aa, synthetic construct
QEWRGDLLLS

SEQ ID NO: 67677 - protein, 10 aa, synthetic construct
QEFRGDRGQI

SEQ ID NO: 67678 - protein, 10 aa, synthetic construct
QEFRGDRQGI

SEQ ID NO: 67679 - protein, 10 aa, synthetic construct
QEFRGDRSVV

SEQ ID NO: 67680 - protein, 10 aa, synthetic construct
QEFRGDRGVV

SEQ ID NO: 67681 - protein, 10 aa, synthetic construct
QEFRGDYVGL

SEQ ID NO: 67682 - protein, 10 aa, synthetic construct
QEFRGDQSTL

SEQ ID NO: 67683 - protein, 10 aa, synthetic construct
TDRRGDRSQT

SEQ ID NO: 67684 - protein, 10 aa, synthetic construct
QEFRGDRSQT

SEQ ID NO: 67685 - protein, 10 aa, synthetic construct
QEFRGDLLLS

SEQ ID NO: 67686 - protein, 10 aa, synthetic construct
QEKRGDRGQI

SEQ ID NO: 67687 - protein, 10 aa, synthetic construct
QEKRGDRQGI

SEQ ID NO: 67688 - protein, 10 aa, synthetic construct
QEKRGDRSVV

SEQ ID NO: 67689 - protein, 10 aa, synthetic construct
QEKRGDRGVV

SEQ ID NO: 67690 - protein, 10 aa, synthetic construct
QEKRGDYVGL

SEQ ID NO: 67691 - protein, 10 aa, synthetic construct
QEKRGDQSTL

SEQ ID NO: 67692 - protein, 10 aa, synthetic construct
QEKRGDRSQT

SEQ ID NO: 67693 - protein, 10 aa, synthetic construct
QEKRGDLLLS

SEQ ID NO: 67694 - protein, 10 aa, synthetic construct
TEGRGDRGQI

SEQ ID NO: 67695 - protein, 10 aa, synthetic construct
QERRGDHVNL

SEQ ID NO: 67696 - protein, 10 aa, synthetic construct
QERRGDRDYL

SEQ ID NO: 67697 - protein, 10 aa, synthetic construct
QERRGDYSSV

SEQ ID NO: 67698 - protein, 10 aa, synthetic construct
QERRGDLTVT

SEQ ID NO: 67699 - protein, 10 aa, synthetic construct
QERRGDLIGR

SEQ ID NO: 67700 - protein, 10 aa, synthetic construct
QEHRGDHGVL

SEQ ID NO: 67701 - protein, 10 aa, synthetic construct
QEHRGDHVNL

SEQ ID NO: 67702 - protein, 10 aa, synthetic construct
QEHRGDYVGL

SEQ ID NO: 67703 - protein, 10 aa, synthetic construct
QEHRGDYSSV

SEQ ID NO: 67704 - protein, 10 aa, synthetic construct
QEHRGDQSTL

SEQ ID NO: 67705 - protein, 10 aa, synthetic construct
TEGRGDRQGI

SEQ ID NO: 67706 - protein, 10 aa, synthetic construct
QEHRGDLLLS

SEQ ID NO: 67707 - protein, 10 aa, synthetic construct
QESRGDHGVL

SEQ ID NO: 67708 - protein, 10 aa, synthetic construct
QESRGDHVNL

SEQ ID NO: 67709 - protein, 10 aa, synthetic construct
QESRGDYVGL

SEQ ID NO: 67710 - protein, 10 aa, synthetic construct
QESRGDYSSV

SEQ ID NO: 67711 - protein, 10 aa, synthetic construct
QESRGDQSTL

SEQ ID NO: 67712 - protein, 10 aa, synthetic construct
QESRGDLLLS

SEQ ID NO: 67713 - protein, 10 aa, synthetic construct
QETRGDHGVL

SEQ ID NO: 67714 - protein, 10 aa, synthetic construct
QETRGDHVNL

SEQ ID NO: 67715 - protein, 10 aa, synthetic construct
QETRGDYVGL

SEQ ID NO: 67716 - protein, 10 aa, synthetic construct
TEGRGDRSVV

SEQ ID NO: 67717 - protein, 10 aa, synthetic construct
QETRGDYSSV

SEQ ID NO: 67718 - protein, 10 aa, synthetic construct
QETRGDQSTL

SEQ ID NO: 67719 - protein, 10 aa, synthetic construct
QETRGDLLLS

SEQ ID NO: 67720 - protein, 10 aa, synthetic construct
QEYRGDRGQI

SEQ ID NO: 67721 - protein, 10 aa, synthetic construct
QEYRGDRQGI

SEQ ID NO: 67722 - protein, 10 aa, synthetic construct
QEYRGDRSVV

SEQ ID NO: 67723 - protein, 10 aa, synthetic construct
QEYRGDRGVV

SEQ ID NO: 67724 - protein, 10 aa, synthetic construct
QEYRGDYVGL

SEQ ID NO: 67725 - protein, 10 aa, synthetic construct
QEYRGDQSTL

SEQ ID NO: 67726 - protein, 10 aa, synthetic construct
QEYRGDRSQT

SEQ ID NO: 67727 - protein, 10 aa, synthetic construct
TEGRGDRGVV

SEQ ID NO: 67728 - protein, 10 aa, synthetic construct
QEYRGDLLLS

SEQ ID NO: 67729 - protein, 10 aa, synthetic construct
QENRGDRGQI

SEQ ID NO: 67730 - protein, 10 aa, synthetic construct
QENRGDRQGI

SEQ ID NO: 67731 - protein, 10 aa, synthetic construct
QENRGDRSVV

SEQ ID NO: 67732 - protein, 10 aa, synthetic construct
QENRGDRGVV

SEQ ID NO: 67733 - protein, 10 aa, synthetic construct
QENRGDYVGL

SEQ ID NO: 67734 - protein, 10 aa, synthetic construct
QENRGDQSTL

SEQ ID NO: 67735 - protein, 10 aa, synthetic construct
QENRGDRSQT

SEQ ID NO: 67736 - protein, 10 aa, synthetic construct
QENRGDLLLS

SEQ ID NO: 67737 - protein, 10 aa, synthetic construct
QEQRGDHGVL

SEQ ID NO: 67738 - protein, 10 aa, synthetic construct
ESPRGDRGVV

SEQ ID NO: 67739 - protein, 10 aa, synthetic construct
TEGRGDRSQT

SEQ ID NO: 67740 - protein, 10 aa, synthetic construct
QEQRGDHVNL

SEQ ID NO: 67741 - protein, 10 aa, synthetic construct
QEQRGDYVGL

SEQ ID NO: 67742 - protein, 10 aa, synthetic construct
QEQRGDYSSV

SEQ ID NO: 67743 - protein, 10 aa, synthetic construct
QEQRGDQSTL

SEQ ID NO: 67744 - protein, 10 aa, synthetic construct
QEQRGDLLLS

SEQ ID NO: 67745 - protein, 10 aa, synthetic construct
QEDRGDHGVL

SEQ ID NO: 67746 - protein, 10 aa, synthetic construct
QEDRGDHVNL

SEQ ID NO: 67747 - protein, 10 aa, synthetic construct
QEDRGDYVGL

SEQ ID NO: 67748 - protein, 10 aa, synthetic construct
QEDRGDYSSV

SEQ ID NO: 67749 - protein, 10 aa, synthetic construct
QEDRGDQSTL

SEQ ID NO: 67750 - protein, 10 aa, synthetic construct
TEARGDRGQI

SEQ ID NO: 67751 - protein, 10 aa, synthetic construct
QEDRGDLLLS

SEQ ID NO: 67752 - protein, 10 aa, synthetic construct
QEERGDHGVL

SEQ ID NO: 67753 - protein, 10 aa, synthetic construct
QEERGDHVNL

SEQ ID NO: 67754 - protein, 10 aa, synthetic construct
QEERGDYVGL

SEQ ID NO: 67755 - protein, 10 aa, synthetic construct
QEERGDYSSV

SEQ ID NO: 67756 - protein, 10 aa, synthetic construct
QEERGDQSTL

SEQ ID NO: 67757 - protein, 10 aa, synthetic construct
QEERGDLLLS

SEQ ID NO: 67758 - protein, 10 aa, synthetic construct
SGGRGDYNSL

SEQ ID NO: 67759 - protein, 10 aa, synthetic construct
SGGRGDFNNT

SEQ ID NO: 67760 - protein, 10 aa, synthetic construct
SGGRGDFNNL

SEQ ID NO: 67761 - protein, 10 aa, synthetic construct
TEARGDRQGI

SEQ ID NO: 67762 - protein, 10 aa, synthetic construct
SGGRGDFQNT

SEQ ID NO: 67763 - protein, 10 aa, synthetic construct
SGARGDYNSL

SEQ ID NO: 67764 - protein, 10 aa, synthetic construct
SGARGDFNNT

SEQ ID NO: 67765 - protein, 10 aa, synthetic construct
SGARGDFNNL

SEQ ID NO: 67766 - protein, 10 aa, synthetic construct
SGARGDFQNT

SEQ ID NO: 67767 - protein, 10 aa, synthetic construct
SGVRGDYNSL

SEQ ID NO: 67768 - protein, 10 aa, synthetic construct
SGVRGDYTSV

SEQ ID NO: 67769 - protein, 10 aa, synthetic construct
SGVRGDYTSM

SEQ ID NO: 67770 - protein, 10 aa, synthetic construct
SGVRGDFQNT

SEQ ID NO: 67771 - protein, 10 aa, synthetic construct
SGPRGDYNSL

SEQ ID NO: 67772 - protein, 10 aa, synthetic construct
TEARGDRSVV

SEQ ID NO: 67773 - protein, 10 aa, synthetic construct
SGPRGDFNNT

SEQ ID NO: 67774 - protein, 10 aa, synthetic construct
SGPRGDFNNL

SEQ ID NO: 67775 - protein, 10 aa, synthetic construct
SGPRGDFQNT

SEQ ID NO: 67776 - protein, 10 aa, synthetic construct
SGLRGDYNSL

SEQ ID NO: 67777 - protein, 10 aa, synthetic construct
SGLRGDYTSV

SEQ ID NO: 67778 - protein, 10 aa, synthetic construct
SGLRGDYTSM

SEQ ID NO: 67779 - protein, 10 aa, synthetic construct
SGLRGDFQNT

SEQ ID NO: 67780 - protein, 10 aa, synthetic construct
SGIRGDRDYL

SEQ ID NO: 67781 - protein, 10 aa, synthetic construct
SGIRGDYTSV

SEQ ID NO: 67782 - protein, 10 aa, synthetic construct
SGIRGDLTVT

SEQ ID NO: 67783 - protein, 10 aa, synthetic construct
TEARGDRGVV

SEQ ID NO: 67784 - protein, 10 aa, synthetic construct
SGIRGDLIGR

SEQ ID NO: 67785 - protein, 10 aa, synthetic construct
SGMRGDRDYL

SEQ ID NO: 67786 - protein, 10 aa, synthetic construct
SGMRGDYTSV

SEQ ID NO: 67787 - protein, 10 aa, synthetic construct
SGMRGDLTVT

SEQ ID NO: 67788 - protein, 10 aa, synthetic construct
SGMRGDLIGR

SEQ ID NO: 67789 - protein, 10 aa, synthetic construct
SGWRGDYNSL

SEQ ID NO: 67790 - protein, 10 aa, synthetic construct
SGWRGDYTSV

SEQ ID NO: 67791 - protein, 10 aa, synthetic construct
SGWRGDYTSM

SEQ ID NO: 67792 - protein, 10 aa, synthetic construct
SGWRGDFQNT

SEQ ID NO: 67793 - protein, 10 aa, synthetic construct
SGFRGDRDYL

SEQ ID NO: 67794 - protein, 10 aa, synthetic construct
TEARGDRSQT

SEQ ID NO: 67795 - protein, 10 aa, synthetic construct
SGFRGDYTSV

SEQ ID NO: 67796 - protein, 10 aa, synthetic construct
SGFRGDLTVT

SEQ ID NO: 67797 - protein, 10 aa, synthetic construct
SGFRGDLIGR

SEQ ID NO: 67798 - protein, 10 aa, synthetic construct
SGKRGDRDYL

SEQ ID NO: 67799 - protein, 10 aa, synthetic construct
SGKRGDYTSV

SEQ ID NO: 67800 - protein, 10 aa, synthetic construct
SGKRGDLTVT

SEQ ID NO: 67801 - protein, 10 aa, synthetic construct
SGKRGDLIGR

SEQ ID NO: 67802 - protein, 10 aa, synthetic construct
SGRRGDYNSL

SEQ ID NO: 67803 - protein, 10 aa, synthetic construct
SGRRGDFNNT

SEQ ID NO: 67804 - protein, 10 aa, synthetic construct
SGRRGDFNNL

SEQ ID NO: 67805 - protein, 10 aa, synthetic construct
TEPRGDRGQI

SEQ ID NO: 67806 - protein, 10 aa, synthetic construct
SGRRGDFQNT

SEQ ID NO: 67807 - protein, 10 aa, synthetic construct
SGHRGDYNSL

SEQ ID NO: 67808 - protein, 10 aa, synthetic construct
SGHRGDYTSV

SEQ ID NO: 67809 - protein, 10 aa, synthetic construct
SGHRGDYTSM

SEQ ID NO: 67810 - protein, 10 aa, synthetic construct
SGHRGDFQNT

SEQ ID NO: 67811 - protein, 10 aa, synthetic construct
SGSRGDYNSL

SEQ ID NO: 67812 - protein, 10 aa, synthetic construct
SGSRGDYTSV

SEQ ID NO: 67813 - protein, 10 aa, synthetic construct
SGSRGDYTSM

SEQ ID NO: 67814 - protein, 10 aa, synthetic construct
SGSRGDFQNT

SEQ ID NO: 67815 - protein, 10 aa, synthetic construct
SGTRGDYNSL

SEQ ID NO: 67816 - protein, 10 aa, synthetic construct
TEPRGDRQGI

SEQ ID NO: 67817 - protein, 10 aa, synthetic construct
SGTRGDYTSV

SEQ ID NO: 67818 - protein, 10 aa, synthetic construct
SGTRGDYTSM

SEQ ID NO: 67819 - protein, 10 aa, synthetic construct
SGTRGDFQNT

SEQ ID NO: 67820 - protein, 10 aa, synthetic construct
SGYRGDRDYL

SEQ ID NO: 67821 - protein, 10 aa, synthetic construct
SGYRGDYTSV

SEQ ID NO: 67822 - protein, 10 aa, synthetic construct
SGYRGDLTVT

SEQ ID NO: 67823 - protein, 10 aa, synthetic construct
SGYRGDLIGR

SEQ ID NO: 67824 - protein, 10 aa, synthetic construct
SGNRGDRDYL

SEQ ID NO: 67825 - protein, 10 aa, synthetic construct
SGNRGDYTSV

SEQ ID NO: 67826 - protein, 10 aa, synthetic construct
SGNRGDLTVT

SEQ ID NO: 67827 - protein, 10 aa, synthetic construct
TEPRGDRSVV

SEQ ID NO: 67828 - protein, 10 aa, synthetic construct
SGNRGDLIGR

SEQ ID NO: 67829 - protein, 10 aa, synthetic construct
SGQRGDYNSL

SEQ ID NO: 67830 - protein, 10 aa, synthetic construct
SGQRGDYTSV

SEQ ID NO: 67831 - protein, 10 aa, synthetic construct
SGQRGDYTSM

SEQ ID NO: 67832 - protein, 10 aa, synthetic construct
SGQRGDFQNT

SEQ ID NO: 67833 - protein, 10 aa, synthetic construct
SGDRGDYNSL

SEQ ID NO: 67834 - protein, 10 aa, synthetic construct
SGDRGDYTSV

SEQ ID NO: 67835 - protein, 10 aa, synthetic construct
SGDRGDYTSM

SEQ ID NO: 67836 - protein, 10 aa, synthetic construct
SGDRGDFQNT

SEQ ID NO: 67837 - protein, 10 aa, synthetic construct
SGERGDYNSL

SEQ ID NO: 67838 - protein, 10 aa, synthetic construct
TEPRGDRGVV

SEQ ID NO: 67839 - protein, 10 aa, synthetic construct
SGERGDYTSV

SEQ ID NO: 67840 - protein, 10 aa, synthetic construct
SGERGDYTSM

SEQ ID NO: 67841 - protein, 10 aa, synthetic construct
SGERGDFQNT

SEQ ID NO: 67842 - protein, 10 aa, synthetic construct
SAGRGDYNSL

SEQ ID NO: 67843 - protein, 10 aa, synthetic construct
SAGRGDFNNT

SEQ ID NO: 67844 - protein, 10 aa, synthetic construct
SAGRGDFNNL

SEQ ID NO: 67845 - protein, 10 aa, synthetic construct
SAGRGDFQNT

SEQ ID NO: 67846 - protein, 10 aa, synthetic construct
SAARGDYNSL

SEQ ID NO: 67847 - protein, 10 aa, synthetic construct
SAARGDFNNT

SEQ ID NO: 67848 - protein, 10 aa, synthetic construct
SAARGDFNNL

SEQ ID NO: 67849 - protein, 10 aa, synthetic construct
ESPRGDRSQT

SEQ ID NO: 67850 - protein, 10 aa, synthetic construct
TEPRGDRSQT

SEQ ID NO: 67851 - protein, 10 aa, synthetic construct
SAARGDFQNT

SEQ ID NO: 67852 - protein, 10 aa, synthetic construct
SAVRGDYNSL

SEQ ID NO: 67853 - protein, 10 aa, synthetic construct
SAVRGDYTSV

SEQ ID NO: 67854 - protein, 10 aa, synthetic construct
SAVRGDYTSM

SEQ ID NO: 67855 - protein, 10 aa, synthetic construct
SAVRGDFQNT

SEQ ID NO: 67856 - protein, 10 aa, synthetic construct
SAPRGDYNSL

SEQ ID NO: 67857 - protein, 10 aa, synthetic construct
SAPRGDFNNT

SEQ ID NO: 67858 - protein, 10 aa, synthetic construct
SAPRGDFNNL

SEQ ID NO: 67859 - protein, 10 aa, synthetic construct
SAPRGDFQNT

SEQ ID NO: 67860 - protein, 10 aa, synthetic construct
SALRGDYNSL

SEQ ID NO: 67861 - protein, 10 aa, synthetic construct
TERRGDRGQI

SEQ ID NO: 67862 - protein, 10 aa, synthetic construct
SALRGDYTSV

SEQ ID NO: 67863 - protein, 10 aa, synthetic construct
SALRGDYTSM

SEQ ID NO: 67864 - protein, 10 aa, synthetic construct
SALRGDFQNT

SEQ ID NO: 67865 - protein, 10 aa, synthetic construct
SAIRGDRDYL

SEQ ID NO: 67866 - protein, 10 aa, synthetic construct
SAIRGDYTSV

SEQ ID NO: 67867 - protein, 10 aa, synthetic construct
SAIRGDLTVT

SEQ ID NO: 67868 - protein, 10 aa, synthetic construct
SAIRGDLIGR

SEQ ID NO: 67869 - protein, 10 aa, synthetic construct
SAMRGDRDYL

SEQ ID NO: 67870 - protein, 10 aa, synthetic construct
SAMRGDYTSV

SEQ ID NO: 67871 - protein, 10 aa, synthetic construct
SAMRGDLTVT

SEQ ID NO: 67872 - protein, 10 aa, synthetic construct
TERRGDRQGI

SEQ ID NO: 67873 - protein, 10 aa, synthetic construct
SAMRGDLIGR

SEQ ID NO: 67874 - protein, 10 aa, synthetic construct
SAWRGDYNSL

SEQ ID NO: 67875 - protein, 10 aa, synthetic construct
SAWRGDYTSV

SEQ ID NO: 67876 - protein, 10 aa, synthetic construct
SAWRGDYTSM

SEQ ID NO: 67877 - protein, 10 aa, synthetic construct
SAWRGDFQNT

SEQ ID NO: 67878 - protein, 10 aa, synthetic construct
SAFRGDRDYL

SEQ ID NO: 67879 - protein, 10 aa, synthetic construct
SAFRGDYTSV

SEQ ID NO: 67880 - protein, 10 aa, synthetic construct
SAFRGDLTVT

SEQ ID NO: 67881 - protein, 10 aa, synthetic construct
SAFRGDLIGR

SEQ ID NO: 67882 - protein, 10 aa, synthetic construct
SAKRGDRDYL

SEQ ID NO: 67883 - protein, 10 aa, synthetic construct
TERRGDRSVV

SEQ ID NO: 67884 - protein, 10 aa, synthetic construct
SAKRGDYTSV

SEQ ID NO: 67885 - protein, 10 aa, synthetic construct
SAKRGDLTVT

SEQ ID NO: 67886 - protein, 10 aa, synthetic construct
SAKRGDLIGR

SEQ ID NO: 67887 - protein, 10 aa, synthetic construct
SARRGDYNSL

SEQ ID NO: 67888 - protein, 10 aa, synthetic construct
SARRGDFNNT

SEQ ID NO: 67889 - protein, 10 aa, synthetic construct
SARRGDFNNL

SEQ ID NO: 67890 - protein, 10 aa, synthetic construct
SARRGDFQNT

SEQ ID NO: 67891 - protein, 10 aa, synthetic construct
SAHRGDYNSL

SEQ ID NO: 67892 - protein, 10 aa, synthetic construct
SAHRGDYTSV

SEQ ID NO: 67893 - protein, 10 aa, synthetic construct
SAHRGDYTSM

SEQ ID NO: 67894 - protein, 10 aa, synthetic construct
TERRGDRGVV

SEQ ID NO: 67895 - protein, 10 aa, synthetic construct
SAHRGDFQNT

SEQ ID NO: 67896 - protein, 10 aa, synthetic construct
SASRGDYNSL

SEQ ID NO: 67897 - protein, 10 aa, synthetic construct
SASRGDYTSV

SEQ ID NO: 67898 - protein, 10 aa, synthetic construct
SASRGDYTSM

SEQ ID NO: 67899 - protein, 10 aa, synthetic construct
SASRGDFQNT

SEQ ID NO: 67900 - protein, 10 aa, synthetic construct
SATRGDYNSL

SEQ ID NO: 67901 - protein, 10 aa, synthetic construct
SATRGDYTSV

SEQ ID NO: 67902 - protein, 10 aa, synthetic construct
SATRGDYTSM

SEQ ID NO: 67903 - protein, 10 aa, synthetic construct
SATRGDFQNT

SEQ ID NO: 67904 - protein, 10 aa, synthetic construct
SAYRGDRDYL

SEQ ID NO: 67905 - protein, 10 aa, synthetic construct
TERRGDRSQT

SEQ ID NO: 67906 - protein, 10 aa, synthetic construct
SAYRGDYTSV

SEQ ID NO: 67907 - protein, 10 aa, synthetic construct
SAYRGDLTVT

SEQ ID NO: 67908 - protein, 10 aa, synthetic construct
SAYRGDLIGR

SEQ ID NO: 67909 - protein, 10 aa, synthetic construct
SANRGDRDYL

SEQ ID NO: 67910 - protein, 10 aa, synthetic construct
SANRGDYTSV

SEQ ID NO: 67911 - protein, 10 aa, synthetic construct
SANRGDLTVT

SEQ ID NO: 67912 - protein, 10 aa, synthetic construct
SANRGDLIGR

SEQ ID NO: 67913 - protein, 10 aa, synthetic construct
SAQRGDYNSL

SEQ ID NO: 67914 - protein, 10 aa, synthetic construct
SAQRGDYTSV

SEQ ID NO: 67915 - protein, 10 aa, synthetic construct
SAQRGDYTSM

SEQ ID NO: 67916 - protein, 10 aa, synthetic construct
AGGRGDRDYL

SEQ ID NO: 67917 - protein, 10 aa, synthetic construct
SAQRGDFQNT

SEQ ID NO: 67918 - protein, 10 aa, synthetic construct
SADRGDYNSL

SEQ ID NO: 67919 - protein, 10 aa, synthetic construct
SADRGDYTSV

SEQ ID NO: 67920 - protein, 10 aa, synthetic construct
SADRGDYTSM

SEQ ID NO: 67921 - protein, 10 aa, synthetic construct
SADRGDFQNT

SEQ ID NO: 67922 - protein, 10 aa, synthetic construct
SAERGDYNSL

SEQ ID NO: 67923 - protein, 10 aa, synthetic construct
SAERGDYTSV

SEQ ID NO: 67924 - protein, 10 aa, synthetic construct
SAERGDYTSM

SEQ ID NO: 67925 - protein, 10 aa, synthetic construct
SAERGDFQNT

SEQ ID NO: 67926 - protein, 10 aa, synthetic construct
SVGRGDFNNT

SEQ ID NO: 67927 - protein, 10 aa, synthetic construct
AGGRGDYVGL

SEQ ID NO: 67928 - protein, 10 aa, synthetic construct
SVGRGDFNNL

SEQ ID NO: 67929 - protein, 10 aa, synthetic construct
SVARGDFNNT

SEQ ID NO: 67930 - protein, 10 aa, synthetic construct
SVARGDFNNL

SEQ ID NO: 67931 - protein, 10 aa, synthetic construct
SVVRGDYNSL

SEQ ID NO: 67932 - protein, 10 aa, synthetic construct
SVVRGDYTSM

SEQ ID NO: 67933 - protein, 10 aa, synthetic construct
SVVRGDFQNT

SEQ ID NO: 67934 - protein, 10 aa, synthetic construct
SVPRGDFNNT

SEQ ID NO: 67935 - protein, 10 aa, synthetic construct
SVPRGDFNNL

SEQ ID NO: 67936 - protein, 10 aa, synthetic construct
SVLRGDYNSL

SEQ ID NO: 67937 - protein, 10 aa, synthetic construct
SVLRGDYTSM

SEQ ID NO: 67938 - protein, 10 aa, synthetic construct
AGGRGDQSTL

SEQ ID NO: 67939 - protein, 10 aa, synthetic construct
SVLRGDFQNT

SEQ ID NO: 67940 - protein, 10 aa, synthetic construct
SVIRGDYTSV

SEQ ID NO: 67941 - protein, 10 aa, synthetic construct
SVIRGDLIGR

SEQ ID NO: 67942 - protein, 10 aa, synthetic construct
SVMRGDYTSV

SEQ ID NO: 67943 - protein, 10 aa, synthetic construct
SVMRGDLIGR

SEQ ID NO: 67944 - protein, 10 aa, synthetic construct
SVWRGDYNSL

SEQ ID NO: 67945 - protein, 10 aa, synthetic construct
SVWRGDYTSM

SEQ ID NO: 67946 - protein, 10 aa, synthetic construct
SVWRGDFQNT

SEQ ID NO: 67947 - protein, 10 aa, synthetic construct
SVFRGDYTSV

SEQ ID NO: 67948 - protein, 10 aa, synthetic construct
SVFRGDLIGR

SEQ ID NO: 67949 - protein, 10 aa, synthetic construct
AGARGDRDYL

SEQ ID NO: 67950 - protein, 10 aa, synthetic construct
SVKRGDYTSV

SEQ ID NO: 67951 - protein, 10 aa, synthetic construct
SVKRGDLIGR

SEQ ID NO: 67952 - protein, 10 aa, synthetic construct
SVRRGDFNNT

SEQ ID NO: 67953 - protein, 10 aa, synthetic construct
SVRRGDFNNL

SEQ ID NO: 67954 - protein, 10 aa, synthetic construct
SVHRGDYNSL

SEQ ID NO: 67955 - protein, 10 aa, synthetic construct
SVHRGDYTSM

SEQ ID NO: 67956 - protein, 10 aa, synthetic construct
SVHRGDFQNT

SEQ ID NO: 67957 - protein, 10 aa, synthetic construct
SVSRGDYNSL

SEQ ID NO: 67958 - protein, 10 aa, synthetic construct
SVSRGDYTSM

SEQ ID NO: 67959 - protein, 10 aa, synthetic construct
SVSRGDFQNT

SEQ ID NO: 67960 - protein, 10 aa, synthetic construct
DSPRGDRGQI

SEQ ID NO: 67961 - protein, 10 aa, synthetic construct
AGARGDYVGL

SEQ ID NO: 67962 - protein, 10 aa, synthetic construct
SVTRGDYNSL

SEQ ID NO: 67963 - protein, 10 aa, synthetic construct
SVTRGDYTSM

SEQ ID NO: 67964 - protein, 10 aa, synthetic construct
SVTRGDFQNT

SEQ ID NO: 67965 - protein, 10 aa, synthetic construct
SVYRGDYTSV

SEQ ID NO: 67966 - protein, 10 aa, synthetic construct
SVYRGDLIGR

SEQ ID NO: 67967 - protein, 10 aa, synthetic construct
SVNRGDYTSV

SEQ ID NO: 67968 - protein, 10 aa, synthetic construct
SVNRGDLIGR

SEQ ID NO: 67969 - protein, 10 aa, synthetic construct
SVQRGDYNSL

SEQ ID NO: 67970 - protein, 10 aa, synthetic construct
SVQRGDYTSM

SEQ ID NO: 67971 - protein, 10 aa, synthetic construct
SVQRGDFQNT

SEQ ID NO: 67972 - protein, 10 aa, synthetic construct
AGARGDQSTL

SEQ ID NO: 67973 - protein, 10 aa, synthetic construct
SVDRGDYNSL

SEQ ID NO: 67974 - protein, 10 aa, synthetic construct
SVDRGDYTSM

SEQ ID NO: 67975 - protein, 10 aa, synthetic construct
SVDRGDFQNT

SEQ ID NO: 67976 - protein, 10 aa, synthetic construct
SVERGDYNSL

SEQ ID NO: 67977 - protein, 10 aa, synthetic construct
SVERGDYTSM

SEQ ID NO: 67978 - protein, 10 aa, synthetic construct
SVERGDFQNT

SEQ ID NO: 67979 - protein, 10 aa, synthetic construct
SPGRGDYNSL

SEQ ID NO: 67980 - protein, 10 aa, synthetic construct
SPGRGDFNNT

SEQ ID NO: 67981 - protein, 10 aa, synthetic construct
SPGRGDFNNL

SEQ ID NO: 67982 - protein, 10 aa, synthetic construct
SPGRGDFQNT

SEQ ID NO: 67983 - protein, 10 aa, synthetic construct
AGVRGDRDYL

SEQ ID NO: 67984 - protein, 10 aa, synthetic construct
SPARGDYNSL

SEQ ID NO: 67985 - protein, 10 aa, synthetic construct
SPARGDFNNT

SEQ ID NO: 67986 - protein, 10 aa, synthetic construct
SPARGDFNNL

SEQ ID NO: 67987 - protein, 10 aa, synthetic construct
SPARGDFQNT

SEQ ID NO: 67988 - protein, 10 aa, synthetic construct
SPVRGDYNSL

SEQ ID NO: 67989 - protein, 10 aa, synthetic construct
SPVRGDYTSV

SEQ ID NO: 67990 - protein, 10 aa, synthetic construct
SPVRGDYTSM

SEQ ID NO: 67991 - protein, 10 aa, synthetic construct
SPVRGDFQNT

SEQ ID NO: 67992 - protein, 10 aa, synthetic construct
SPPRGDYNSL

SEQ ID NO: 67993 - protein, 10 aa, synthetic construct
SPPRGDFNNT

SEQ ID NO: 67994 - protein, 10 aa, synthetic construct
AGVRGDYVGL

SEQ ID NO: 67995 - protein, 10 aa, synthetic construct
SPPRGDFNNL

SEQ ID NO: 67996 - protein, 10 aa, synthetic construct
SPPRGDFQNT

SEQ ID NO: 67997 - protein, 10 aa, synthetic construct
SPLRGDYNSL

SEQ ID NO: 67998 - protein, 10 aa, synthetic construct
SPLRGDYTSV

SEQ ID NO: 67999 - protein, 10 aa, synthetic construct
SPLRGDYTSM

SEQ ID NO: 68000 - protein, 10 aa, synthetic construct
SPLRGDFQNT

SEQ ID NO: 68001 - protein, 10 aa, synthetic construct
SPIRGDRDYL

SEQ ID NO: 68002 - protein, 10 aa, synthetic construct
SPIRGDYTSV

SEQ ID NO: 68003 - protein, 10 aa, synthetic construct
SPIRGDLTVT

SEQ ID NO: 68004 - protein, 10 aa, synthetic construct
SPIRGDLIGR

SEQ ID NO: 68005 - protein, 10 aa, synthetic construct
AGVRGDQSTL

SEQ ID NO: 68006 - protein, 10 aa, synthetic construct
SPMRGDRDYL

SEQ ID NO: 68007 - protein, 10 aa, synthetic construct
SPMRGDYTSV

SEQ ID NO: 68008 - protein, 10 aa, synthetic construct
SPMRGDLTVT

SEQ ID NO: 68009 - protein, 10 aa, synthetic construct
SPMRGDLIGR

SEQ ID NO: 68010 - protein, 10 aa, synthetic construct
SPWRGDYNSL

SEQ ID NO: 68011 - protein, 10 aa, synthetic construct
SPWRGDYTSV

SEQ ID NO: 68012 - protein, 10 aa, synthetic construct
SPWRGDYTSM

SEQ ID NO: 68013 - protein, 10 aa, synthetic construct
SPWRGDFQNT

SEQ ID NO: 68014 - protein, 10 aa, synthetic construct
SPFRGDRDYL

SEQ ID NO: 68015 - protein, 10 aa, synthetic construct
SPFRGDYTSV

SEQ ID NO: 68016 - protein, 10 aa, synthetic construct
AGPRGDRDYL

SEQ ID NO: 68017 - protein, 10 aa, synthetic construct
SPFRGDLTVT

SEQ ID NO: 68018 - protein, 10 aa, synthetic construct
SPFRGDLIGR

SEQ ID NO: 68019 - protein, 10 aa, synthetic construct
SPKRGDRDYL

SEQ ID NO: 68020 - protein, 10 aa, synthetic construct
SPKRGDYTSV

SEQ ID NO: 68021 - protein, 10 aa, synthetic construct
SPKRGDLTVT

SEQ ID NO: 68022 - protein, 10 aa, synthetic construct
SPKRGDLIGR

SEQ ID NO: 68023 - protein, 10 aa, synthetic construct
SPRRGDYNSL

SEQ ID NO: 68024 - protein, 10 aa, synthetic construct
SPRRGDFNNT

SEQ ID NO: 68025 - protein, 10 aa, synthetic construct
SPRRGDFNNL

SEQ ID NO: 68026 - protein, 10 aa, synthetic construct
SPRRGDFQNT

SEQ ID NO: 68027 - protein, 10 aa, synthetic construct
AGPRGDYVGL

SEQ ID NO: 68028 - protein, 10 aa, synthetic construct
SPHRGDYNSL

SEQ ID NO: 68029 - protein, 10 aa, synthetic construct
SPHRGDYTSV

SEQ ID NO: 68030 - protein, 10 aa, synthetic construct
SPHRGDYTSM

SEQ ID NO: 68031 - protein, 10 aa, synthetic construct
SPHRGDFQNT

SEQ ID NO: 68032 - protein, 10 aa, synthetic construct
SPSRGDYNSL

SEQ ID NO: 68033 - protein, 10 aa, synthetic construct
SPSRGDYTSV

SEQ ID NO: 68034 - protein, 10 aa, synthetic construct
SPSRGDYTSM

SEQ ID NO: 68035 - protein, 10 aa, synthetic construct
SPSRGDFQNT

SEQ ID NO: 68036 - protein, 10 aa, synthetic construct
SPTRGDYNSL

SEQ ID NO: 68037 - protein, 10 aa, synthetic construct
SPTRGDYTSV

SEQ ID NO: 68038 - protein, 10 aa, synthetic construct
AGPRGDQSTL

SEQ ID NO: 68039 - protein, 10 aa, synthetic construct
SPTRGDYTSM

SEQ ID NO: 68040 - protein, 10 aa, synthetic construct
SPTRGDFQNT

SEQ ID NO: 68041 - protein, 10 aa, synthetic construct
SPYRGDRDYL

SEQ ID NO: 68042 - protein, 10 aa, synthetic construct
SPYRGDYTSV

SEQ ID NO: 68043 - protein, 10 aa, synthetic construct
SPYRGDLTVT

SEQ ID NO: 68044 - protein, 10 aa, synthetic construct
SPYRGDLIGR

SEQ ID NO: 68045 - protein, 10 aa, synthetic construct
SPNRGDRDYL

SEQ ID NO: 68046 - protein, 10 aa, synthetic construct
SPNRGDYTSV

SEQ ID NO: 68047 - protein, 10 aa, synthetic construct
SPNRGDLTVT

SEQ ID NO: 68048 - protein, 10 aa, synthetic construct
SPNRGDLIGR

SEQ ID NO: 68049 - protein, 10 aa, synthetic construct
AGLRGDRDYL

SEQ ID NO: 68050 - protein, 10 aa, synthetic construct
SPQRGDYNSL

SEQ ID NO: 68051 - protein, 10 aa, synthetic construct
SPQRGDYTSV

SEQ ID NO: 68052 - protein, 10 aa, synthetic construct
SPQRGDYTSM

SEQ ID NO: 68053 - protein, 10 aa, synthetic construct
SPQRGDFQNT

SEQ ID NO: 68054 - protein, 10 aa, synthetic construct
SPDRGDYNSL

SEQ ID NO: 68055 - protein, 10 aa, synthetic construct
SPDRGDYTSV

SEQ ID NO: 68056 - protein, 10 aa, synthetic construct
SPDRGDYTSM

SEQ ID NO: 68057 - protein, 10 aa, synthetic construct
SPDRGDFQNT

SEQ ID NO: 68058 - protein, 10 aa, synthetic construct
SPERGDYNSL

SEQ ID NO: 68059 - protein, 10 aa, synthetic construct
SPERGDYTSV

SEQ ID NO: 68060 - protein, 10 aa, synthetic construct
AGLRGDYVGL

SEQ ID NO: 68061 - protein, 10 aa, synthetic construct
SPERGDYTSM

SEQ ID NO: 68062 - protein, 10 aa, synthetic construct
SPERGDFQNT

SEQ ID NO: 68063 - protein, 10 aa, synthetic construct
SLGRGDFNNT

SEQ ID NO: 68064 - protein, 10 aa, synthetic construct
SLGRGDFNNL

SEQ ID NO: 68065 - protein, 10 aa, synthetic construct
SLARGDFNNT

SEQ ID NO: 68066 - protein, 10 aa, synthetic construct
SLARGDFNNL

SEQ ID NO: 68067 - protein, 10 aa, synthetic construct
SLVRGDYNSL

SEQ ID NO: 68068 - protein, 10 aa, synthetic construct
SLVRGDYTSM

SEQ ID NO: 68069 - protein, 10 aa, synthetic construct
SLVRGDFQNT

SEQ ID NO: 68070 - protein, 10 aa, synthetic construct
SLPRGDFNNT

SEQ ID NO: 68071 - protein, 10 aa, synthetic construct
DSPRGDRQGI

SEQ ID NO: 68072 - protein, 10 aa, synthetic construct
AGLRGDQSTL

SEQ ID NO: 68073 - protein, 10 aa, synthetic construct
SLPRGDFNNL

SEQ ID NO: 68074 - protein, 10 aa, synthetic construct
SLLRGDYNSL

SEQ ID NO: 68075 - protein, 10 aa, synthetic construct
SLLRGDYTSM

SEQ ID NO: 68076 - protein, 10 aa, synthetic construct
SLLRGDFQNT

SEQ ID NO: 68077 - protein, 10 aa, synthetic construct
SLIRGDYTSV

SEQ ID NO: 68078 - protein, 10 aa, synthetic construct
SLIRGDLIGR

SEQ ID NO: 68079 - protein, 10 aa, synthetic construct
SLMRGDYTSV

SEQ ID NO: 68080 - protein, 10 aa, synthetic construct
SLMRGDLIGR

SEQ ID NO: 68081 - protein, 10 aa, synthetic construct
SLWRGDYNSL

SEQ ID NO: 68082 - protein, 10 aa, synthetic construct
SLWRGDYTSM

SEQ ID NO: 68083 - protein, 10 aa, synthetic construct
AGIRGDRGVV

SEQ ID NO: 68084 - protein, 10 aa, synthetic construct
SLWRGDFQNT

SEQ ID NO: 68085 - protein, 10 aa, synthetic construct
SLFRGDYTSV

SEQ ID NO: 68086 - protein, 10 aa, synthetic construct
SLFRGDLIGR

SEQ ID NO: 68087 - protein, 10 aa, synthetic construct
SLKRGDYTSV

SEQ ID NO: 68088 - protein, 10 aa, synthetic construct
SLKRGDLIGR

SEQ ID NO: 68089 - protein, 10 aa, synthetic construct
SLRRGDFNNT

SEQ ID NO: 68090 - protein, 10 aa, synthetic construct
SLRRGDFNNL

SEQ ID NO: 68091 - protein, 10 aa, synthetic construct
SLHRGDYNSL

SEQ ID NO: 68092 - protein, 10 aa, synthetic construct
SLHRGDYTSM

SEQ ID NO: 68093 - protein, 10 aa, synthetic construct
SLHRGDFQNT

SEQ ID NO: 68094 - protein, 10 aa, synthetic construct
AGMRGDRGQI

SEQ ID NO: 68095 - protein, 10 aa, synthetic construct
SLSRGDYNSL

SEQ ID NO: 68096 - protein, 10 aa, synthetic construct
SLSRGDYTSM

SEQ ID NO: 68097 - protein, 10 aa, synthetic construct
SLSRGDFQNT

SEQ ID NO: 68098 - protein, 10 aa, synthetic construct
SLTRGDYNSL

SEQ ID NO: 68099 - protein, 10 aa, synthetic construct
SLTRGDYTSM

SEQ ID NO: 68100 - protein, 10 aa, synthetic construct
SLTRGDFQNT

SEQ ID NO: 68101 - protein, 10 aa, synthetic construct
SLYRGDYTSV

SEQ ID NO: 68102 - protein, 10 aa, synthetic construct
SLYRGDLIGR

SEQ ID NO: 68103 - protein, 10 aa, synthetic construct
SLNRGDYTSV

SEQ ID NO: 68104 - protein, 10 aa, synthetic construct
SLNRGDLIGR

SEQ ID NO: 68105 - protein, 10 aa, synthetic construct
AGMRGDRQGI

SEQ ID NO: 68106 - protein, 10 aa, synthetic construct
SLQRGDYNSL

SEQ ID NO: 68107 - protein, 10 aa, synthetic construct
SLQRGDYTSM

SEQ ID NO: 68108 - protein, 10 aa, synthetic construct
SLQRGDFQNT

SEQ ID NO: 68109 - protein, 10 aa, synthetic construct
SLDRGDYNSL

SEQ ID NO: 68110 - protein, 10 aa, synthetic construct
SLDRGDYTSM

SEQ ID NO: 68111 - protein, 10 aa, synthetic construct
SLDRGDFQNT

SEQ ID NO: 68112 - protein, 10 aa, synthetic construct
SLERGDYNSL

SEQ ID NO: 68113 - protein, 10 aa, synthetic construct
SLERGDYTSM

SEQ ID NO: 68114 - protein, 10 aa, synthetic construct
SLERGDFQNT

SEQ ID NO: 68115 - protein, 10 aa, synthetic construct
SIGRGDRDYL

SEQ ID NO: 68116 - protein, 10 aa, synthetic construct
AGMRGDRSVV

SEQ ID NO: 68117 - protein, 10 aa, synthetic construct
SIGRGDYTSV

SEQ ID NO: 68118 - protein, 10 aa, synthetic construct
SIGRGDLTVT

SEQ ID NO: 68119 - protein, 10 aa, synthetic construct
SIGRGDLIGR

SEQ ID NO: 68120 - protein, 10 aa, synthetic construct
SIARGDRDYL

SEQ ID NO: 68121 - protein, 10 aa, synthetic construct
SIARGDYTSV

SEQ ID NO: 68122 - protein, 10 aa, synthetic construct
SIARGDLTVT

SEQ ID NO: 68123 - protein, 10 aa, synthetic construct
SIARGDLIGR

SEQ ID NO: 68124 - protein, 10 aa, synthetic construct
SIVRGDHGVL

SEQ ID NO: 68125 - protein, 10 aa, synthetic construct
SIVRGDHVNL

SEQ ID NO: 68126 - protein, 10 aa, synthetic construct
SIVRGDRDYL

SEQ ID NO: 68127 - protein, 10 aa, synthetic construct
AGMRGDRGVV

SEQ ID NO: 68128 - protein, 10 aa, synthetic construct
SIVRGDYSSV

SEQ ID NO: 68129 - protein, 10 aa, synthetic construct
SIVRGDLTVT

SEQ ID NO: 68130 - protein, 10 aa, synthetic construct
SIPRGDRDYL

SEQ ID NO: 68131 - protein, 10 aa, synthetic construct
SIPRGDYTSV

SEQ ID NO: 68132 - protein, 10 aa, synthetic construct
SIPRGDLTVT

SEQ ID NO: 68133 - protein, 10 aa, synthetic construct
SIPRGDLIGR

SEQ ID NO: 68134 - protein, 10 aa, synthetic construct
SILRGDHGVL

SEQ ID NO: 68135 - protein, 10 aa, synthetic construct
SILRGDHVNL

SEQ ID NO: 68136 - protein, 10 aa, synthetic construct
SILRGDRDYL

SEQ ID NO: 68137 - protein, 10 aa, synthetic construct
SILRGDYSSV

SEQ ID NO: 68138 - protein, 10 aa, synthetic construct
AGMRGDRSQT

SEQ ID NO: 68139 - protein, 10 aa, synthetic construct
SILRGDLTVT

SEQ ID NO: 68140 - protein, 10 aa, synthetic construct
SIIRGDHGVL

SEQ ID NO: 68141 - protein, 10 aa, synthetic construct
SIIRGDRGQI

SEQ ID NO: 68142 - protein, 10 aa, synthetic construct
SIIRGDRQGI

SEQ ID NO: 68143 - protein, 10 aa, synthetic construct
SIIRGDRGVV

SEQ ID NO: 68144 - protein, 10 aa, synthetic construct
SIIRGDYVGL

SEQ ID NO: 68145 - protein, 10 aa, synthetic construct
SIIRGDLIGR

SEQ ID NO: 68146 - protein, 10 aa, synthetic construct
SIIRGDQSTL

SEQ ID NO: 68147 - protein, 10 aa, synthetic construct
SIIRGDLLLS

SEQ ID NO: 68148 - protein, 10 aa, synthetic construct
SIMRGDHGVL

SEQ ID NO: 68149 - protein, 10 aa, synthetic construct
AGWRGDHGVL

SEQ ID NO: 68150 - protein, 10 aa, synthetic construct
SIMRGDRGQI

SEQ ID NO: 68151 - protein, 10 aa, synthetic construct
SIMRGDRQGI

SEQ ID NO: 68152 - protein, 10 aa, synthetic construct
SIMRGDRGVV

SEQ ID NO: 68153 - protein, 10 aa, synthetic construct
SIMRGDYVGL

SEQ ID NO: 68154 - protein, 10 aa, synthetic construct
SIMRGDLIGR

SEQ ID NO: 68155 - protein, 10 aa, synthetic construct
SIMRGDQSTL

SEQ ID NO: 68156 - protein, 10 aa, synthetic construct
SIMRGDLLLS

SEQ ID NO: 68157 - protein, 10 aa, synthetic construct
SIWRGDHGVL

SEQ ID NO: 68158 - protein, 10 aa, synthetic construct
SIWRGDHVNL

SEQ ID NO: 68159 - protein, 10 aa, synthetic construct
SIWRGDRDYL

SEQ ID NO: 68160 - protein, 10 aa, synthetic construct
AGWRGDYVGL

SEQ ID NO: 68161 - protein, 10 aa, synthetic construct
SIWRGDYSSV

SEQ ID NO: 68162 - protein, 10 aa, synthetic construct
SIWRGDLTVT

SEQ ID NO: 68163 - protein, 10 aa, synthetic construct
SIFRGDHGVL

SEQ ID NO: 68164 - protein, 10 aa, synthetic construct
SIFRGDRGQI

SEQ ID NO: 68165 - protein, 10 aa, synthetic construct
SIFRGDRQGI

SEQ ID NO: 68166 - protein, 10 aa, synthetic construct
SIFRGDRGVV

SEQ ID NO: 68167 - protein, 10 aa, synthetic construct
SIFRGDYVGL

SEQ ID NO: 68168 - protein, 10 aa, synthetic construct
SIFRGDLIGR

SEQ ID NO: 68169 - protein, 10 aa, synthetic construct
SIFRGDQSTL

SEQ ID NO: 68170 - protein, 10 aa, synthetic construct
SIFRGDLLLS

SEQ ID NO: 68171 - protein, 10 aa, synthetic construct
AGWRGDQSTL

SEQ ID NO: 68172 - protein, 10 aa, synthetic construct
SIKRGDHGVL

SEQ ID NO: 68173 - protein, 10 aa, synthetic construct
SIKRGDRGQI

SEQ ID NO: 68174 - protein, 10 aa, synthetic construct
SIKRGDRQGI

SEQ ID NO: 68175 - protein, 10 aa, synthetic construct
SIKRGDRGVV

SEQ ID NO: 68176 - protein, 10 aa, synthetic construct
SIKRGDYVGL

SEQ ID NO: 68177 - protein, 10 aa, synthetic construct
SIKRGDLIGR

SEQ ID NO: 68178 - protein, 10 aa, synthetic construct
SIKRGDQSTL

SEQ ID NO: 68179 - protein, 10 aa, synthetic construct
SIKRGDLLLS

SEQ ID NO: 68180 - protein, 10 aa, synthetic construct
SIRRGDRDYL

SEQ ID NO: 68181 - protein, 10 aa, synthetic construct
SIRRGDYTSV

SEQ ID NO: 68182 - protein, 10 aa, synthetic construct
DSPRGDRSVV

SEQ ID NO: 68183 - protein, 10 aa, synthetic construct
AGWRGDLLLS

SEQ ID NO: 68184 - protein, 10 aa, synthetic construct
SIRRGDLTVT

SEQ ID NO: 68185 - protein, 10 aa, synthetic construct
SIRRGDLIGR

SEQ ID NO: 68186 - protein, 10 aa, synthetic construct
SIHRGDHGVL

SEQ ID NO: 68187 - protein, 10 aa, synthetic construct
SIHRGDHVNL

SEQ ID NO: 68188 - protein, 10 aa, synthetic construct
SIHRGDRDYL

SEQ ID NO: 68189 - protein, 10 aa, synthetic construct
SIHRGDYSSV

SEQ ID NO: 68190 - protein, 10 aa, synthetic construct
SIHRGDLTVT

SEQ ID NO: 68191 - protein, 10 aa, synthetic construct
SISRGDHGVL

SEQ ID NO: 68192 - protein, 10 aa, synthetic construct
SISRGDHVNL

SEQ ID NO: 68193 - protein, 10 aa, synthetic construct
SISRGDRDYL

SEQ ID NO: 68194 - protein, 10 aa, synthetic construct
AGFRGDRGVV

SEQ ID NO: 68195 - protein, 10 aa, synthetic construct
SISRGDYSSV

SEQ ID NO: 68196 - protein, 10 aa, synthetic construct
SISRGDLTVT

SEQ ID NO: 68197 - protein, 10 aa, synthetic construct
SITRGDHGVL

SEQ ID NO: 68198 - protein, 10 aa, synthetic construct
SITRGDHVNL

SEQ ID NO: 68199 - protein, 10 aa, synthetic construct
SITRGDRDYL

SEQ ID NO: 68200 - protein, 10 aa, synthetic construct
SITRGDYSSV

SEQ ID NO: 68201 - protein, 10 aa, synthetic construct
SITRGDLTVT

SEQ ID NO: 68202 - protein, 10 aa, synthetic construct
SIYRGDHGVL

SEQ ID NO: 68203 - protein, 10 aa, synthetic construct
SIYRGDRGQI

SEQ ID NO: 68204 - protein, 10 aa, synthetic construct
SIYRGDRQGI

SEQ ID NO: 68205 - protein, 10 aa, synthetic construct
AGKRGDRGVV

SEQ ID NO: 68206 - protein, 10 aa, synthetic construct
SIYRGDRGVV

SEQ ID NO: 68207 - protein, 10 aa, synthetic construct
SIYRGDYVGL

SEQ ID NO: 68208 - protein, 10 aa, synthetic construct
SIYRGDLIGR

SEQ ID NO: 68209 - protein, 10 aa, synthetic construct
SIYRGDQSTL

SEQ ID NO: 68210 - protein, 10 aa, synthetic construct
SIYRGDLLLS

SEQ ID NO: 68211 - protein, 10 aa, synthetic construct
SINRGDHGVL

SEQ ID NO: 68212 - protein, 10 aa, synthetic construct
SINRGDRGQI

SEQ ID NO: 68213 - protein, 10 aa, synthetic construct
SINRGDRQGI

SEQ ID NO: 68214 - protein, 10 aa, synthetic construct
SINRGDRGVV

SEQ ID NO: 68215 - protein, 10 aa, synthetic construct
SINRGDYVGL

SEQ ID NO: 68216 - protein, 10 aa, synthetic construct
AGRRGDRDYL

SEQ ID NO: 68217 - protein, 10 aa, synthetic construct
SINRGDLIGR

SEQ ID NO: 68218 - protein, 10 aa, synthetic construct
SINRGDQSTL

SEQ ID NO: 68219 - protein, 10 aa, synthetic construct
SINRGDLLLS

SEQ ID NO: 68220 - protein, 10 aa, synthetic construct
SIQRGDHGVL

SEQ ID NO: 68221 - protein, 10 aa, synthetic construct
SIQRGDHVNL

SEQ ID NO: 68222 - protein, 10 aa, synthetic construct
SIQRGDRDYL

SEQ ID NO: 68223 - protein, 10 aa, synthetic construct
SIQRGDYSSV

SEQ ID NO: 68224 - protein, 10 aa, synthetic construct
SIQRGDLTVT

SEQ ID NO: 68225 - protein, 10 aa, synthetic construct
SIDRGDHGVL

SEQ ID NO: 68226 - protein, 10 aa, synthetic construct
SIDRGDHVNL

SEQ ID NO: 68227 - protein, 10 aa, synthetic construct
AGRRGDYVGL

SEQ ID NO: 68228 - protein, 10 aa, synthetic construct
SIDRGDRDYL

SEQ ID NO: 68229 - protein, 10 aa, synthetic construct
SIDRGDYSSV

SEQ ID NO: 68230 - protein, 10 aa, synthetic construct
SIDRGDLTVT

SEQ ID NO: 68231 - protein, 10 aa, synthetic construct
SIERGDHGVL

SEQ ID NO: 68232 - protein, 10 aa, synthetic construct
SIERGDHVNL

SEQ ID NO: 68233 - protein, 10 aa, synthetic construct
SIERGDRDYL

SEQ ID NO: 68234 - protein, 10 aa, synthetic construct
SIERGDYSSV

SEQ ID NO: 68235 - protein, 10 aa, synthetic construct
SIERGDLTVT

SEQ ID NO: 68236 - protein, 10 aa, synthetic construct
SMGRGDHVNL

SEQ ID NO: 68237 - protein, 10 aa, synthetic construct
SMGRGDYNSL

SEQ ID NO: 68238 - protein, 10 aa, synthetic construct
AGRRGDQSTL

SEQ ID NO: 68239 - protein, 10 aa, synthetic construct
SMGRGDYTSM

SEQ ID NO: 68240 - protein, 10 aa, synthetic construct
SMARGDHVNL

SEQ ID NO: 68241 - protein, 10 aa, synthetic construct
SMARGDYNSL

SEQ ID NO: 68242 - protein, 10 aa, synthetic construct
SMARGDYTSM

SEQ ID NO: 68243 - protein, 10 aa, synthetic construct
SMVRGDHVNL

SEQ ID NO: 68244 - protein, 10 aa, synthetic construct
SMVRGDYNSL

SEQ ID NO: 68245 - protein, 10 aa, synthetic construct
SMVRGDYTSM

SEQ ID NO: 68246 - protein, 10 aa, synthetic construct
SMPRGDHVNL

SEQ ID NO: 68247 - protein, 10 aa, synthetic construct
SMPRGDYNSL

SEQ ID NO: 68248 - protein, 10 aa, synthetic construct
SMPRGDYTSM

SEQ ID NO: 68249 - protein, 10 aa, synthetic construct
AGHRGDHGVL

SEQ ID NO: 68250 - protein, 10 aa, synthetic construct
SMLRGDHVNL

SEQ ID NO: 68251 - protein, 10 aa, synthetic construct
SMLRGDYNSL

SEQ ID NO: 68252 - protein, 10 aa, synthetic construct
SMLRGDYTSM

SEQ ID NO: 68253 - protein, 10 aa, synthetic construct
SMIRGDRGQI

SEQ ID NO: 68254 - protein, 10 aa, synthetic construct
SMIRGDRQGI

SEQ ID NO: 68255 - protein, 10 aa, synthetic construct
SMIRGDRSQT

SEQ ID NO: 68256 - protein, 10 aa, synthetic construct
SMMRGDHVNL

SEQ ID NO: 68257 - protein, 10 aa, synthetic construct
SMMRGDRDYL

SEQ ID NO: 68258 - protein, 10 aa, synthetic construct
SMMRGDYSSV

SEQ ID NO: 68259 - protein, 10 aa, synthetic construct
SMMRGDLTVT

SEQ ID NO: 68260 - protein, 10 aa, synthetic construct
AGHRGDRGQI

SEQ ID NO: 68261 - protein, 10 aa, synthetic construct
SMWRGDYTSV

SEQ ID NO: 68262 - protein, 10 aa, synthetic construct
SMWRGDLIGR

SEQ ID NO: 68263 - protein, 10 aa, synthetic construct
SMFRGDRGQI

SEQ ID NO: 68264 - protein, 10 aa, synthetic construct
SMFRGDRQGI

SEQ ID NO: 68265 - protein, 10 aa, synthetic construct
SMFRGDRSQT

SEQ ID NO: 68266 - protein, 10 aa, synthetic construct
SMKRGDRGQI

SEQ ID NO: 68267 - protein, 10 aa, synthetic construct
SMKRGDRQGI

SEQ ID NO: 68268 - protein, 10 aa, synthetic construct
SMKRGDRSQT

SEQ ID NO: 68269 - protein, 10 aa, synthetic construct
SMRRGDHVNL

SEQ ID NO: 68270 - protein, 10 aa, synthetic construct
SMRRGDYNSL

SEQ ID NO: 68271 - protein, 10 aa, synthetic construct
AGHRGDRQGI

SEQ ID NO: 68272 - protein, 10 aa, synthetic construct
SMRRGDYTSM

SEQ ID NO: 68273 - protein, 10 aa, synthetic construct
SMHRGDRDYL

SEQ ID NO: 68274 - protein, 10 aa, synthetic construct
SMHRGDYVGL

SEQ ID NO: 68275 - protein, 10 aa, synthetic construct
SMHRGDYSSV

SEQ ID NO: 68276 - protein, 10 aa, synthetic construct
SMHRGDYTSV

SEQ ID NO: 68277 - protein, 10 aa, synthetic construct
SMHRGDQSTL

SEQ ID NO: 68278 - protein, 10 aa, synthetic construct
SMSRGDHVNL

SEQ ID NO: 68279 - protein, 10 aa, synthetic construct
SMSRGDYNSL

SEQ ID NO: 68280 - protein, 10 aa, synthetic construct
SMSRGDYTSM

SEQ ID NO: 68281 - protein, 10 aa, synthetic construct
SMTRGDRDYL

SEQ ID NO: 68282 - protein, 10 aa, synthetic construct
AGHRGDRSVV

SEQ ID NO: 68283 - protein, 10 aa, synthetic construct
SMTRGDYVGL

SEQ ID NO: 68284 - protein, 10 aa, synthetic construct
SMTRGDYSSV

SEQ ID NO: 68285 - protein, 10 aa, synthetic construct
SMTRGDYTSV

SEQ ID NO: 68286 - protein, 10 aa, synthetic construct
SMTRGDQSTL

SEQ ID NO: 68287 - protein, 10 aa, synthetic construct
SMYRGDRGQI

SEQ ID NO: 68288 - protein, 10 aa, synthetic construct
SMYRGDRQGI

SEQ ID NO: 68289 - protein, 10 aa, synthetic construct
SMYRGDRSQT

SEQ ID NO: 68290 - protein, 10 aa, synthetic construct
SMNRGDRGQI

SEQ ID NO: 68291 - protein, 10 aa, synthetic construct
SMNRGDRQGI

SEQ ID NO: 68292 - protein, 10 aa, synthetic construct
SMNRGDRSQT

SEQ ID NO: 68293 - protein, 10 aa, synthetic construct
DSPRGDRGVV

SEQ ID NO: 68294 - protein, 10 aa, synthetic construct
AGHRGDLTVT

SEQ ID NO: 68295 - protein, 10 aa, synthetic construct
SMQRGDRDYL

SEQ ID NO: 68296 - protein, 10 aa, synthetic construct
SMQRGDYVGL

SEQ ID NO: 68297 - protein, 10 aa, synthetic construct
SMQRGDYSSV

SEQ ID NO: 68298 - protein, 10 aa, synthetic construct
SMQRGDYTSV

SEQ ID NO: 68299 - protein, 10 aa, synthetic construct
SMQRGDQSTL

SEQ ID NO: 68300 - protein, 10 aa, synthetic construct
SMDRGDRDYL

SEQ ID NO: 68301 - protein, 10 aa, synthetic construct
SMDRGDYVGL

SEQ ID NO: 68302 - protein, 10 aa, synthetic construct
SMDRGDYSSV

SEQ ID NO: 68303 - protein, 10 aa, synthetic construct
SMDRGDYTSV

SEQ ID NO: 68304 - protein, 10 aa, synthetic construct
SMDRGDQSTL

SEQ ID NO: 68305 - protein, 10 aa, synthetic construct
AGHRGDLIGR

SEQ ID NO: 68306 - protein, 10 aa, synthetic construct
SMERGDRDYL

SEQ ID NO: 68307 - protein, 10 aa, synthetic construct
SMERGDYVGL

SEQ ID NO: 68308 - protein, 10 aa, synthetic construct
SMERGDYSSV

SEQ ID NO: 68309 - protein, 10 aa, synthetic construct
SMERGDYTSV

SEQ ID NO: 68310 - protein, 10 aa, synthetic construct
SMERGDQSTL

SEQ ID NO: 68311 - protein, 10 aa, synthetic construct
SWGRGDFQNT

SEQ ID NO: 68312 - protein, 10 aa, synthetic construct
SWARGDFQNT

SEQ ID NO: 68313 - protein, 10 aa, synthetic construct
SWVRGDFQNT

SEQ ID NO: 68314 - protein, 10 aa, synthetic construct
SWPRGDFQNT

SEQ ID NO: 68315 - protein, 10 aa, synthetic construct
SWLRGDFQNT

SEQ ID NO: 68316 - protein, 10 aa, synthetic construct
AGHRGDRSQT

SEQ ID NO: 68317 - protein, 10 aa, synthetic construct
SWIRGDRDYL

SEQ ID NO: 68318 - protein, 10 aa, synthetic construct
SWIRGDYVGL

SEQ ID NO: 68319 - protein, 10 aa, synthetic construct
SWIRGDYSSV

SEQ ID NO: 68320 - protein, 10 aa, synthetic construct
SWIRGDYTSV

SEQ ID NO: 68321 - protein, 10 aa, synthetic construct
SWIRGDQSTL

SEQ ID NO: 68322 - protein, 10 aa, synthetic construct
SWMRGDYTSV

SEQ ID NO: 68323 - protein, 10 aa, synthetic construct
SWMRGDLIGR

SEQ ID NO: 68324 - protein, 10 aa, synthetic construct
SWWRGDYNSL

SEQ ID NO: 68325 - protein, 10 aa, synthetic construct
SWWRGDYTSM

SEQ ID NO: 68326 - protein, 10 aa, synthetic construct
SWWRGDFQNT

SEQ ID NO: 68327 - protein, 10 aa, synthetic construct
AGHRGDLLLS

SEQ ID NO: 68328 - protein, 10 aa, synthetic construct
SWFRGDRDYL

SEQ ID NO: 68329 - protein, 10 aa, synthetic construct
SWFRGDYVGL

SEQ ID NO: 68330 - protein, 10 aa, synthetic construct
SWFRGDYSSV

SEQ ID NO: 68331 - protein, 10 aa, synthetic construct
SWFRGDYTSV

SEQ ID NO: 68332 - protein, 10 aa, synthetic construct
SWFRGDQSTL

SEQ ID NO: 68333 - protein, 10 aa, synthetic construct
SWKRGDRDYL

SEQ ID NO: 68334 - protein, 10 aa, synthetic construct
SWKRGDYVGL

SEQ ID NO: 68335 - protein, 10 aa, synthetic construct
SWKRGDYSSV

SEQ ID NO: 68336 - protein, 10 aa, synthetic construct
SWKRGDYTSV

SEQ ID NO: 68337 - protein, 10 aa, synthetic construct
SWKRGDQSTL

SEQ ID NO: 68338 - protein, 10 aa, synthetic construct
AGSRGDRDYL

SEQ ID NO: 68339 - protein, 10 aa, synthetic construct
SWRRGDFQNT

SEQ ID NO: 68340 - protein, 10 aa, synthetic construct
SWHRGDHVNL

SEQ ID NO: 68341 - protein, 10 aa, synthetic construct
SWHRGDYNSL

SEQ ID NO: 68342 - protein, 10 aa, synthetic construct
SWHRGDYTSM

SEQ ID NO: 68343 - protein, 10 aa, synthetic construct
SWSRGDFQNT

SEQ ID NO: 68344 - protein, 10 aa, synthetic construct
SWTRGDHVNL

SEQ ID NO: 68345 - protein, 10 aa, synthetic construct
SWTRGDYNSL

SEQ ID NO: 68346 - protein, 10 aa, synthetic construct
SWTRGDYTSM

SEQ ID NO: 68347 - protein, 10 aa, synthetic construct
SWYRGDRDYL

SEQ ID NO: 68348 - protein, 10 aa, synthetic construct
SWYRGDYVGL

SEQ ID NO: 68349 - protein, 10 aa, synthetic construct
AGSRGDYVGL

SEQ ID NO: 68350 - protein, 10 aa, synthetic construct
SWYRGDYSSV

SEQ ID NO: 68351 - protein, 10 aa, synthetic construct
SWYRGDYTSV

SEQ ID NO: 68352 - protein, 10 aa, synthetic construct
SWYRGDQSTL

SEQ ID NO: 68353 - protein, 10 aa, synthetic construct
SWNRGDRDYL

SEQ ID NO: 68354 - protein, 10 aa, synthetic construct
SWNRGDYVGL

SEQ ID NO: 68355 - protein, 10 aa, synthetic construct
SWNRGDYSSV

SEQ ID NO: 68356 - protein, 10 aa, synthetic construct
SWNRGDYTSV

SEQ ID NO: 68357 - protein, 10 aa, synthetic construct
SWNRGDQSTL

SEQ ID NO: 68358 - protein, 10 aa, synthetic construct
SWQRGDHVNL

SEQ ID NO: 68359 - protein, 10 aa, synthetic construct
SWQRGDYNSL

SEQ ID NO: 68360 - protein, 10 aa, synthetic construct
AGSRGDQSTL

SEQ ID NO: 68361 - protein, 10 aa, synthetic construct
SWQRGDYTSM

SEQ ID NO: 68362 - protein, 10 aa, synthetic construct
SWDRGDHVNL

SEQ ID NO: 68363 - protein, 10 aa, synthetic construct
SWDRGDYNSL

SEQ ID NO: 68364 - protein, 10 aa, synthetic construct
SWDRGDYTSM

SEQ ID NO: 68365 - protein, 10 aa, synthetic construct
SWERGDHVNL

SEQ ID NO: 68366 - protein, 10 aa, synthetic construct
SWERGDYNSL

SEQ ID NO: 68367 - protein, 10 aa, synthetic construct
SWERGDYTSM

SEQ ID NO: 68368 - protein, 10 aa, synthetic construct
SFGRGDRDYL

SEQ ID NO: 68369 - protein, 10 aa, synthetic construct
SFGRGDYTSV

SEQ ID NO: 68370 - protein, 10 aa, synthetic construct
SFGRGDLTVT

SEQ ID NO: 68371 - protein, 10 aa, synthetic construct
AGTRGDHGVL

SEQ ID NO: 68372 - protein, 10 aa, synthetic construct
SFGRGDLIGR

SEQ ID NO: 68373 - protein, 10 aa, synthetic construct
SFARGDRDYL

SEQ ID NO: 68374 - protein, 10 aa, synthetic construct
SFARGDYTSV

SEQ ID NO: 68375 - protein, 10 aa, synthetic construct
SFARGDLTVT

SEQ ID NO: 68376 - protein, 10 aa, synthetic construct
SFARGDLIGR

SEQ ID NO: 68377 - protein, 10 aa, synthetic construct
SFVRGDHGVL

SEQ ID NO: 68378 - protein, 10 aa, synthetic construct
SFVRGDHVNL

SEQ ID NO: 68379 - protein, 10 aa, synthetic construct
SFVRGDRDYL

SEQ ID NO: 68380 - protein, 10 aa, synthetic construct
SFVRGDYSSV

SEQ ID NO: 68381 - protein, 10 aa, synthetic construct
SFVRGDLTVT

SEQ ID NO: 68382 - protein, 10 aa, synthetic construct
AGTRGDRGQI

SEQ ID NO: 68383 - protein, 10 aa, synthetic construct
SFPRGDRDYL

SEQ ID NO: 68384 - protein, 10 aa, synthetic construct
SFPRGDYTSV

SEQ ID NO: 68385 - protein, 10 aa, synthetic construct
SFPRGDLTVT

SEQ ID NO: 68386 - protein, 10 aa, synthetic construct
SFPRGDLIGR

SEQ ID NO: 68387 - protein, 10 aa, synthetic construct
SFLRGDHGVL

SEQ ID NO: 68388 - protein, 10 aa, synthetic construct
SFLRGDHVNL

SEQ ID NO: 68389 - protein, 10 aa, synthetic construct
SFLRGDRDYL

SEQ ID NO: 68390 - protein, 10 aa, synthetic construct
SFLRGDYSSV

SEQ ID NO: 68391 - protein, 10 aa, synthetic construct
SFLRGDLTVT

SEQ ID NO: 68392 - protein, 10 aa, synthetic construct
SFIRGDHGVL

SEQ ID NO: 68393 - protein, 10 aa, synthetic construct
AGTRGDRQGI

SEQ ID NO: 68394 - protein, 10 aa, synthetic construct
SFIRGDRGQI

SEQ ID NO: 68395 - protein, 10 aa, synthetic construct
SFIRGDRQGI

SEQ ID NO: 68396 - protein, 10 aa, synthetic construct
SFIRGDRGVV

SEQ ID NO: 68397 - protein, 10 aa, synthetic construct
SFIRGDYVGL

SEQ ID NO: 68398 - protein, 10 aa, synthetic construct
SFIRGDLIGR

SEQ ID NO: 68399 - protein, 10 aa, synthetic construct
SFIRGDQSTL

SEQ ID NO: 68400 - protein, 10 aa, synthetic construct
SFIRGDLLLS

SEQ ID NO: 68401 - protein, 10 aa, synthetic construct
SFMRGDHGVL

SEQ ID NO: 68402 - protein, 10 aa, synthetic construct
SFMRGDRGQI

SEQ ID NO: 68403 - protein, 10 aa, synthetic construct
SFMRGDRQGI

SEQ ID NO: 68404 - protein, 10 aa, synthetic construct
SKKRGDLLLS

SEQ ID NO: 68405 - protein, 10 aa, synthetic construct
DSPRGDRSQT

SEQ ID NO: 68406 - protein, 10 aa, synthetic construct
AGTRGDRSVV

SEQ ID NO: 68407 - protein, 10 aa, synthetic construct
SFMRGDRGVV

SEQ ID NO: 68408 - protein, 10 aa, synthetic construct
SFMRGDYVGL

SEQ ID NO: 68409 - protein, 10 aa, synthetic construct
SFMRGDLIGR

SEQ ID NO: 68410 - protein, 10 aa, synthetic construct
SFMRGDQSTL

SEQ ID NO: 68411 - protein, 10 aa, synthetic construct
SFMRGDLLLS

SEQ ID NO: 68412 - protein, 10 aa, synthetic construct
SFWRGDHGVL

SEQ ID NO: 68413 - protein, 10 aa, synthetic construct
SFWRGDHVNL

SEQ ID NO: 68414 - protein, 10 aa, synthetic construct
SFWRGDRDYL

SEQ ID NO: 68415 - protein, 10 aa, synthetic construct
SFWRGDYSSV

SEQ ID NO: 68416 - protein, 10 aa, synthetic construct
SFWRGDLTVT

SEQ ID NO: 68417 - protein, 10 aa, synthetic construct
AGTRGDLTVT

SEQ ID NO: 68418 - protein, 10 aa, synthetic construct
SFKRGDHGVL

SEQ ID NO: 68419 - protein, 10 aa, synthetic construct
SFKRGDRGQI

SEQ ID NO: 68420 - protein, 10 aa, synthetic construct
SFKRGDRQGI

SEQ ID NO: 68421 - protein, 10 aa, synthetic construct
SFKRGDRGVV

SEQ ID NO: 68422 - protein, 10 aa, synthetic construct
SFKRGDYVGL

SEQ ID NO: 68423 - protein, 10 aa, synthetic construct
SFKRGDLIGR

SEQ ID NO: 68424 - protein, 10 aa, synthetic construct
SFKRGDQSTL

SEQ ID NO: 68425 - protein, 10 aa, synthetic construct
SFKRGDLLLS

SEQ ID NO: 68426 - protein, 10 aa, synthetic construct
SFRRGDRDYL

SEQ ID NO: 68427 - protein, 10 aa, synthetic construct
SFRRGDYTSV

SEQ ID NO: 68428 - protein, 10 aa, synthetic construct
AGTRGDLIGR

SEQ ID NO: 68429 - protein, 10 aa, synthetic construct
SFRRGDLTVT

SEQ ID NO: 68430 - protein, 10 aa, synthetic construct
SFRRGDLIGR

SEQ ID NO: 68431 - protein, 10 aa, synthetic construct
SFHRGDHGVL

SEQ ID NO: 68432 - protein, 10 aa, synthetic construct
SFHRGDHVNL

SEQ ID NO: 68433 - protein, 10 aa, synthetic construct
SFHRGDRDYL

SEQ ID NO: 68434 - protein, 10 aa, synthetic construct
SFHRGDYSSV

SEQ ID NO: 68435 - protein, 10 aa, synthetic construct
SFHRGDLTVT

SEQ ID NO: 68436 - protein, 10 aa, synthetic construct
SFSRGDHGVL

SEQ ID NO: 68437 - protein, 10 aa, synthetic construct
SFSRGDHVNL

SEQ ID NO: 68438 - protein, 10 aa, synthetic construct
SFSRGDRDYL

SEQ ID NO: 68439 - protein, 10 aa, synthetic construct
AGTRGDRSQT

SEQ ID NO: 68440 - protein, 10 aa, synthetic construct
SFSRGDYSSV

SEQ ID NO: 68441 - protein, 10 aa, synthetic construct
SFSRGDLTVT

SEQ ID NO: 68442 - protein, 10 aa, synthetic construct
SFTRGDHGVL

SEQ ID NO: 68443 - protein, 10 aa, synthetic construct
SFTRGDHVNL

SEQ ID NO: 68444 - protein, 10 aa, synthetic construct
SFTRGDRDYL

SEQ ID NO: 68445 - protein, 10 aa, synthetic construct
SFTRGDYSSV

SEQ ID NO: 68446 - protein, 10 aa, synthetic construct
SFTRGDLTVT

SEQ ID NO: 68447 - protein, 10 aa, synthetic construct
SFYRGDHGVL

SEQ ID NO: 68448 - protein, 10 aa, synthetic construct
SFYRGDRGQI

SEQ ID NO: 68449 - protein, 10 aa, synthetic construct
SFYRGDRQGI

SEQ ID NO: 68450 - protein, 10 aa, synthetic construct
AGTRGDLLLS

SEQ ID NO: 68451 - protein, 10 aa, synthetic construct
SFYRGDRGVV

SEQ ID NO: 68452 - protein, 10 aa, synthetic construct
SFYRGDYVGL

SEQ ID NO: 68453 - protein, 10 aa, synthetic construct
SFYRGDLIGR

SEQ ID NO: 68454 - protein, 10 aa, synthetic construct
SFYRGDQSTL

SEQ ID NO: 68455 - protein, 10 aa, synthetic construct
SFYRGDLLLS

SEQ ID NO: 68456 - protein, 10 aa, synthetic construct
SFNRGDHGVL

SEQ ID NO: 68457 - protein, 10 aa, synthetic construct
SFNRGDRGQI

SEQ ID NO: 68458 - protein, 10 aa, synthetic construct
SFNRGDRQGI

SEQ ID NO: 68459 - protein, 10 aa, synthetic construct
SFNRGDRGVV

SEQ ID NO: 68460 - protein, 10 aa, synthetic construct
SFNRGDYVGL

SEQ ID NO: 68461 - protein, 10 aa, synthetic construct
AGYRGDRGVV

SEQ ID NO: 68462 - protein, 10 aa, synthetic construct
SFNRGDLIGR

SEQ ID NO: 68463 - protein, 10 aa, synthetic construct
SFNRGDQSTL

SEQ ID NO: 68464 - protein, 10 aa, synthetic construct
SFNRGDLLLS

SEQ ID NO: 68465 - protein, 10 aa, synthetic construct
SFQRGDHGVL

SEQ ID NO: 68466 - protein, 10 aa, synthetic construct
SFQRGDHVNL

SEQ ID NO: 68467 - protein, 10 aa, synthetic construct
SFQRGDRDYL

SEQ ID NO: 68468 - protein, 10 aa, synthetic construct
SFQRGDYSSV

SEQ ID NO: 68469 - protein, 10 aa, synthetic construct
SFQRGDLTVT

SEQ ID NO: 68470 - protein, 10 aa, synthetic construct
SFDRGDHGVL

SEQ ID NO: 68471 - protein, 10 aa, synthetic construct
SFDRGDHVNL

SEQ ID NO: 68472 - protein, 10 aa, synthetic construct
AGNRGDRGVV

SEQ ID NO: 68473 - protein, 10 aa, synthetic construct
SFDRGDRDYL

SEQ ID NO: 68474 - protein, 10 aa, synthetic construct
SFDRGDYSSV

SEQ ID NO: 68475 - protein, 10 aa, synthetic construct
SFDRGDLTVT

SEQ ID NO: 68476 - protein, 10 aa, synthetic construct
SFERGDHGVL

SEQ ID NO: 68477 - protein, 10 aa, synthetic construct
SFERGDHVNL

SEQ ID NO: 68478 - protein, 10 aa, synthetic construct
SFERGDRDYL

SEQ ID NO: 68479 - protein, 10 aa, synthetic construct
SFERGDYSSV

SEQ ID NO: 68480 - protein, 10 aa, synthetic construct
SFERGDLTVT

SEQ ID NO: 68481 - protein, 10 aa, synthetic construct
SKGRGDRDYL

SEQ ID NO: 68482 - protein, 10 aa, synthetic construct
SKGRGDYTSV

SEQ ID NO: 68483 - protein, 10 aa, synthetic construct
AGQRGDHGVL

SEQ ID NO: 68484 - protein, 10 aa, synthetic construct
SKGRGDLTVT

SEQ ID NO: 68485 - protein, 10 aa, synthetic construct
SKGRGDLIGR

SEQ ID NO: 68486 - protein, 10 aa, synthetic construct
SKARGDRDYL

SEQ ID NO: 68487 - protein, 10 aa, synthetic construct
SKARGDYTSV

SEQ ID NO: 68488 - protein, 10 aa, synthetic construct
SKARGDLTVT

SEQ ID NO: 68489 - protein, 10 aa, synthetic construct
SKARGDLIGR

SEQ ID NO: 68490 - protein, 10 aa, synthetic construct
SKVRGDHGVL

SEQ ID NO: 68491 - protein, 10 aa, synthetic construct
SKVRGDHVNL

SEQ ID NO: 68492 - protein, 10 aa, synthetic construct
SKVRGDRDYL

SEQ ID NO: 68493 - protein, 10 aa, synthetic construct
SKVRGDYSSV

SEQ ID NO: 68494 - protein, 10 aa, synthetic construct
AGQRGDRGQI

SEQ ID NO: 68495 - protein, 10 aa, synthetic construct
SKVRGDLTVT

SEQ ID NO: 68496 - protein, 10 aa, synthetic construct
SKPRGDRDYL

SEQ ID NO: 68497 - protein, 10 aa, synthetic construct
SKPRGDYTSV

SEQ ID NO: 68498 - protein, 10 aa, synthetic construct
SKPRGDLTVT

SEQ ID NO: 68499 - protein, 10 aa, synthetic construct
SKPRGDLIGR

SEQ ID NO: 68500 - protein, 10 aa, synthetic construct
SKLRGDHGVL

SEQ ID NO: 68501 - protein, 10 aa, synthetic construct
SKLRGDHVNL

SEQ ID NO: 68502 - protein, 10 aa, synthetic construct
SKLRGDRDYL

SEQ ID NO: 68503 - protein, 10 aa, synthetic construct
SKLRGDYSSV

SEQ ID NO: 68504 - protein, 10 aa, synthetic construct
SKLRGDLTVT

SEQ ID NO: 68505 - protein, 10 aa, synthetic construct
AGQRGDRQGI

SEQ ID NO: 68506 - protein, 10 aa, synthetic construct
SKIRGDHGVL

SEQ ID NO: 68507 - protein, 10 aa, synthetic construct
SKIRGDRGQI

SEQ ID NO: 68508 - protein, 10 aa, synthetic construct
SKIRGDRQGI

SEQ ID NO: 68509 - protein, 10 aa, synthetic construct
SKIRGDRGVV

SEQ ID NO: 68510 - protein, 10 aa, synthetic construct
SKIRGDYVGL

SEQ ID NO: 68511 - protein, 10 aa, synthetic construct
SKIRGDLIGR

SEQ ID NO: 68512 - protein, 10 aa, synthetic construct
SKIRGDQSTL

SEQ ID NO: 68513 - protein, 10 aa, synthetic construct
SKIRGDLLLS

SEQ ID NO: 68514 - protein, 10 aa, synthetic construct
SKMRGDHGVL

SEQ ID NO: 68515 - protein, 10 aa, synthetic construct
SKMRGDRGQI

SEQ ID NO: 68516 - protein, 10 aa, synthetic construct
QSPRGDRGQI

SEQ ID NO: 68517 - protein, 10 aa, synthetic construct
AGQRGDRSVV

SEQ ID NO: 68518 - protein, 10 aa, synthetic construct
SKMRGDRQGI

SEQ ID NO: 68519 - protein, 10 aa, synthetic construct
SKMRGDRGVV

SEQ ID NO: 68520 - protein, 10 aa, synthetic construct
SKMRGDYVGL

SEQ ID NO: 68521 - protein, 10 aa, synthetic construct
SKMRGDLIGR

SEQ ID NO: 68522 - protein, 10 aa, synthetic construct
SKMRGDQSTL

SEQ ID NO: 68523 - protein, 10 aa, synthetic construct
SKMRGDLLLS

SEQ ID NO: 68524 - protein, 10 aa, synthetic construct
SKWRGDHGVL

SEQ ID NO: 68525 - protein, 10 aa, synthetic construct
SKWRGDHVNL

SEQ ID NO: 68526 - protein, 10 aa, synthetic construct
SKWRGDRDYL

SEQ ID NO: 68527 - protein, 10 aa, synthetic construct
SKWRGDYSSV

SEQ ID NO: 68528 - protein, 10 aa, synthetic construct
AGQRGDLTVT

SEQ ID NO: 68529 - protein, 10 aa, synthetic construct
SKWRGDLTVT

SEQ ID NO: 68530 - protein, 10 aa, synthetic construct
SKFRGDHGVL

SEQ ID NO: 68531 - protein, 10 aa, synthetic construct
SKFRGDRGQI

SEQ ID NO: 68532 - protein, 10 aa, synthetic construct
SKFRGDRQGI

SEQ ID NO: 68533 - protein, 10 aa, synthetic construct
SKFRGDRGVV

SEQ ID NO: 68534 - protein, 10 aa, synthetic construct
SKFRGDYVGL

SEQ ID NO: 68535 - protein, 10 aa, synthetic construct
SKFRGDLIGR

SEQ ID NO: 68536 - protein, 10 aa, synthetic construct
SKFRGDQSTL

SEQ ID NO: 68537 - protein, 10 aa, synthetic construct
SKFRGDLLLS

SEQ ID NO: 68538 - protein, 10 aa, synthetic construct
SKRRGDRDYL

SEQ ID NO: 68539 - protein, 10 aa, synthetic construct
AGQRGDLIGR

SEQ ID NO: 68540 - protein, 10 aa, synthetic construct
SKRRGDYTSV

SEQ ID NO: 68541 - protein, 10 aa, synthetic construct
SKRRGDLTVT

SEQ ID NO: 68542 - protein, 10 aa, synthetic construct
SKRRGDLIGR

SEQ ID NO: 68543 - protein, 10 aa, synthetic construct
SKHRGDHGVL

SEQ ID NO: 68544 - protein, 10 aa, synthetic construct
SKHRGDHVNL

SEQ ID NO: 68545 - protein, 10 aa, synthetic construct
SKHRGDRDYL

SEQ ID NO: 68546 - protein, 10 aa, synthetic construct
SKHRGDYSSV

SEQ ID NO: 68547 - protein, 10 aa, synthetic construct
SKHRGDLTVT

SEQ ID NO: 68548 - protein, 10 aa, synthetic construct
SKSRGDHGVL

SEQ ID NO: 68549 - protein, 10 aa, synthetic construct
SKSRGDHVNL

SEQ ID NO: 68550 - protein, 10 aa, synthetic construct
AGQRGDRSQT

SEQ ID NO: 68551 - protein, 10 aa, synthetic construct
SKSRGDRDYL

SEQ ID NO: 68552 - protein, 10 aa, synthetic construct
SKSRGDYSSV

SEQ ID NO: 68553 - protein, 10 aa, synthetic construct
SKSRGDLTVT

SEQ ID NO: 68554 - protein, 10 aa, synthetic construct
SKTRGDHGVL

SEQ ID NO: 68555 - protein, 10 aa, synthetic construct
SKTRGDHVNL

SEQ ID NO: 68556 - protein, 10 aa, synthetic construct
SKTRGDRDYL

SEQ ID NO: 68557 - protein, 10 aa, synthetic construct
SKTRGDYSSV

SEQ ID NO: 68558 - protein, 10 aa, synthetic construct
SKTRGDLTVT

SEQ ID NO: 68559 - protein, 10 aa, synthetic construct
SKYRGDHGVL

SEQ ID NO: 68560 - protein, 10 aa, synthetic construct
SKYRGDRGQI

SEQ ID NO: 68561 - protein, 10 aa, synthetic construct
AGQRGDLLLS

SEQ ID NO: 68562 - protein, 10 aa, synthetic construct
SKYRGDRQGI

SEQ ID NO: 68563 - protein, 10 aa, synthetic construct
SKYRGDRGVV

SEQ ID NO: 68564 - protein, 10 aa, synthetic construct
SKYRGDYVGL

SEQ ID NO: 68565 - protein, 10 aa, synthetic construct
SKYRGDLIGR

SEQ ID NO: 68566 - protein, 10 aa, synthetic construct
SKYRGDQSTL

SEQ ID NO: 68567 - protein, 10 aa, synthetic construct
SKYRGDLLLS

SEQ ID NO: 68568 - protein, 10 aa, synthetic construct
SKQRGDHGVL

SEQ ID NO: 68569 - protein, 10 aa, synthetic construct
SKQRGDHVNL

SEQ ID NO: 68570 - protein, 10 aa, synthetic construct
SKQRGDRDYL

SEQ ID NO: 68571 - protein, 10 aa, synthetic construct
SKQRGDYSSV

SEQ ID NO: 68572 - protein, 10 aa, synthetic construct
AGDRGDHGVL

SEQ ID NO: 68573 - protein, 10 aa, synthetic construct
SKQRGDLTVT

SEQ ID NO: 68574 - protein, 10 aa, synthetic construct
SKDRGDHGVL

SEQ ID NO: 68575 - protein, 10 aa, synthetic construct
SKDRGDHVNL

SEQ ID NO: 68576 - protein, 10 aa, synthetic construct
SKDRGDRDYL

SEQ ID NO: 68577 - protein, 10 aa, synthetic construct
SKDRGDYSSV

SEQ ID NO: 68578 - protein, 10 aa, synthetic construct
SKDRGDLTVT

SEQ ID NO: 68579 - protein, 10 aa, synthetic construct
SKERGDHGVL

SEQ ID NO: 68580 - protein, 10 aa, synthetic construct
SKERGDHVNL

SEQ ID NO: 68581 - protein, 10 aa, synthetic construct
SKERGDRDYL

SEQ ID NO: 68582 - protein, 10 aa, synthetic construct
SKERGDYSSV

SEQ ID NO: 68583 - protein, 10 aa, synthetic construct
AGDRGDRGQI

SEQ ID NO: 68584 - protein, 10 aa, synthetic construct
SKERGDLTVT

SEQ ID NO: 68585 - protein, 10 aa, synthetic construct
SRGRGDYNSL

SEQ ID NO: 68586 - protein, 10 aa, synthetic construct
SRGRGDFNNT

SEQ ID NO: 68587 - protein, 10 aa, synthetic construct
SRGRGDFNNL

SEQ ID NO: 68588 - protein, 10 aa, synthetic construct
SRGRGDFQNT

SEQ ID NO: 68589 - protein, 10 aa, synthetic construct
SRARGDYNSL

SEQ ID NO: 68590 - protein, 10 aa, synthetic construct
SRARGDFNNT

SEQ ID NO: 68591 - protein, 10 aa, synthetic construct
SRARGDFNNL

SEQ ID NO: 68592 - protein, 10 aa, synthetic construct
SRARGDFQNT

SEQ ID NO: 68593 - protein, 10 aa, synthetic construct
SRVRGDYNSL

SEQ ID NO: 68594 - protein, 10 aa, synthetic construct
AGDRGDRQGI

SEQ ID NO: 68595 - protein, 10 aa, synthetic construct
SRVRGDYTSV

SEQ ID NO: 68596 - protein, 10 aa, synthetic construct
SRVRGDYTSM

SEQ ID NO: 68597 - protein, 10 aa, synthetic construct
SRVRGDFQNT

SEQ ID NO: 68598 - protein, 10 aa, synthetic construct
SRPRGDYNSL

SEQ ID NO: 68599 - protein, 10 aa, synthetic construct
SRPRGDFNNT

SEQ ID NO: 68600 - protein, 10 aa, synthetic construct
SRPRGDFNNL

SEQ ID NO: 68601 - protein, 10 aa, synthetic construct
SRPRGDFQNT

SEQ ID NO: 68602 - protein, 10 aa, synthetic construct
SRLRGDYNSL

SEQ ID NO: 68603 - protein, 10 aa, synthetic construct
SRLRGDYTSV

SEQ ID NO: 68604 - protein, 10 aa, synthetic construct
SRLRGDYTSM

SEQ ID NO: 68605 - protein, 10 aa, synthetic construct
AGDRGDRSVV

SEQ ID NO: 68606 - protein, 10 aa, synthetic construct
SRLRGDFQNT

SEQ ID NO: 68607 - protein, 10 aa, synthetic construct
SRIRGDRDYL

SEQ ID NO: 68608 - protein, 10 aa, synthetic construct
SRIRGDYTSV

SEQ ID NO: 68609 - protein, 10 aa, synthetic construct
SRIRGDLTVT

SEQ ID NO: 68610 - protein, 10 aa, synthetic construct
SRIRGDLIGR

SEQ ID NO: 68611 - protein, 10 aa, synthetic construct
SRMRGDRDYL

SEQ ID NO: 68612 - protein, 10 aa, synthetic construct
SRMRGDYTSV

SEQ ID NO: 68613 - protein, 10 aa, synthetic construct
SRMRGDLTVT

SEQ ID NO: 68614 - protein, 10 aa, synthetic construct
SRMRGDLIGR

SEQ ID NO: 68615 - protein, 10 aa, synthetic construct
SRWRGDYNSL

SEQ ID NO: 68616 - protein, 10 aa, synthetic construct
AGDRGDLTVT

SEQ ID NO: 68617 - protein, 10 aa, synthetic construct
SRWRGDYTSV

SEQ ID NO: 68618 - protein, 10 aa, synthetic construct
SRWRGDYTSM

SEQ ID NO: 68619 - protein, 10 aa, synthetic construct
SRWRGDFQNT

SEQ ID NO: 68620 - protein, 10 aa, synthetic construct
SRFRGDRDYL

SEQ ID NO: 68621 - protein, 10 aa, synthetic construct
SRFRGDYTSV

SEQ ID NO: 68622 - protein, 10 aa, synthetic construct
SRFRGDLTVT

SEQ ID NO: 68623 - protein, 10 aa, synthetic construct
SRFRGDLIGR

SEQ ID NO: 68624 - protein, 10 aa, synthetic construct
SRKRGDRDYL

SEQ ID NO: 68625 - protein, 10 aa, synthetic construct
SRKRGDYTSV

SEQ ID NO: 68626 - protein, 10 aa, synthetic construct
SRKRGDLTVT

SEQ ID NO: 68627 - protein, 10 aa, synthetic construct
QSPRGDRQGI

SEQ ID NO: 68628 - protein, 10 aa, synthetic construct
AGDRGDLIGR

SEQ ID NO: 68629 - protein, 10 aa, synthetic construct
SRKRGDLIGR

SEQ ID NO: 68630 - protein, 10 aa, synthetic construct
SRRRGDYNSL

SEQ ID NO: 68631 - protein, 10 aa, synthetic construct
SRRRGDFNNT

SEQ ID NO: 68632 - protein, 10 aa, synthetic construct
SRRRGDFNNL

SEQ ID NO: 68633 - protein, 10 aa, synthetic construct
SRRRGDFQNT

SEQ ID NO: 68634 - protein, 10 aa, synthetic construct
SRHRGDYNSL

SEQ ID NO: 68635 - protein, 10 aa, synthetic construct
SRHRGDYTSV

SEQ ID NO: 68636 - protein, 10 aa, synthetic construct
SRHRGDYTSM

SEQ ID NO: 68637 - protein, 10 aa, synthetic construct
SRHRGDFQNT

SEQ ID NO: 68638 - protein, 10 aa, synthetic construct
SRSRGDYNSL

SEQ ID NO: 68639 - protein, 10 aa, synthetic construct
AGDRGDRSQT

SEQ ID NO: 68640 - protein, 10 aa, synthetic construct
SRSRGDYTSV

SEQ ID NO: 68641 - protein, 10 aa, synthetic construct
SRSRGDYTSM

SEQ ID NO: 68642 - protein, 10 aa, synthetic construct
SRSRGDFQNT

SEQ ID NO: 68643 - protein, 10 aa, synthetic construct
SRTRGDYNSL

SEQ ID NO: 68644 - protein, 10 aa, synthetic construct
SRTRGDYTSV

SEQ ID NO: 68645 - protein, 10 aa, synthetic construct
SRTRGDYTSM

SEQ ID NO: 68646 - protein, 10 aa, synthetic construct
SRTRGDFQNT

SEQ ID NO: 68647 - protein, 10 aa, synthetic construct
SRYRGDRDYL

SEQ ID NO: 68648 - protein, 10 aa, synthetic construct
SRYRGDYTSV

SEQ ID NO: 68649 - protein, 10 aa, synthetic construct
SRYRGDLTVT

SEQ ID NO: 68650 - protein, 10 aa, synthetic construct
AGDRGDLLLS

SEQ ID NO: 68651 - protein, 10 aa, synthetic construct
SRYRGDLIGR

SEQ ID NO: 68652 - protein, 10 aa, synthetic construct
SRNRGDRDYL

SEQ ID NO: 68653 - protein, 10 aa, synthetic construct
SRNRGDYTSV

SEQ ID NO: 68654 - protein, 10 aa, synthetic construct
SRNRGDLTVT

SEQ ID NO: 68655 - protein, 10 aa, synthetic construct
SRNRGDLIGR

SEQ ID NO: 68656 - protein, 10 aa, synthetic construct
SRQRGDYNSL

SEQ ID NO: 68657 - protein, 10 aa, synthetic construct
SRQRGDYTSV

SEQ ID NO: 68658 - protein, 10 aa, synthetic construct
SRQRGDYTSM

SEQ ID NO: 68659 - protein, 10 aa, synthetic construct
SRQRGDFQNT

SEQ ID NO: 68660 - protein, 10 aa, synthetic construct
SRDRGDYNSL

SEQ ID NO: 68661 - protein, 10 aa, synthetic construct
AGERGDHGVL

SEQ ID NO: 68662 - protein, 10 aa, synthetic construct
SRDRGDYTSV

SEQ ID NO: 68663 - protein, 10 aa, synthetic construct
SRDRGDYTSM

SEQ ID NO: 68664 - protein, 10 aa, synthetic construct
SRDRGDFQNT

SEQ ID NO: 68665 - protein, 10 aa, synthetic construct
SRERGDYNSL

SEQ ID NO: 68666 - protein, 10 aa, synthetic construct
SRERGDYTSV

SEQ ID NO: 68667 - protein, 10 aa, synthetic construct
SRERGDYTSM

SEQ ID NO: 68668 - protein, 10 aa, synthetic construct
SRERGDFQNT

SEQ ID NO: 68669 - protein, 10 aa, synthetic construct
SHGRGDYNSL

SEQ ID NO: 68670 - protein, 10 aa, synthetic construct
SHGRGDYTSV

SEQ ID NO: 68671 - protein, 10 aa, synthetic construct
SHGRGDYTSM

SEQ ID NO: 68672 - protein, 10 aa, synthetic construct
AGERGDRGQI

SEQ ID NO: 68673 - protein, 10 aa, synthetic construct
SHGRGDFQNT

SEQ ID NO: 68674 - protein, 10 aa, synthetic construct
SHARGDYNSL

SEQ ID NO: 68675 - protein, 10 aa, synthetic construct
SHARGDYTSV

SEQ ID NO: 68676 - protein, 10 aa, synthetic construct
SHARGDYTSM

SEQ ID NO: 68677 - protein, 10 aa, synthetic construct
SHARGDFQNT

SEQ ID NO: 68678 - protein, 10 aa, synthetic construct
SHVRGDRDYL

SEQ ID NO: 68679 - protein, 10 aa, synthetic construct
SHVRGDYTSV

SEQ ID NO: 68680 - protein, 10 aa, synthetic construct
SHVRGDLTVT

SEQ ID NO: 68681 - protein, 10 aa, synthetic construct
SHVRGDLIGR

SEQ ID NO: 68682 - protein, 10 aa, synthetic construct
SHPRGDYNSL

SEQ ID NO: 68683 - protein, 10 aa, synthetic construct
AGERGDRQGI

SEQ ID NO: 68684 - protein, 10 aa, synthetic construct
SHPRGDYTSV

SEQ ID NO: 68685 - protein, 10 aa, synthetic construct
SHPRGDYTSM

SEQ ID NO: 68686 - protein, 10 aa, synthetic construct
SHPRGDFQNT

SEQ ID NO: 68687 - protein, 10 aa, synthetic construct
SHLRGDRDYL

SEQ ID NO: 68688 - protein, 10 aa, synthetic construct
SHLRGDYTSV

SEQ ID NO: 68689 - protein, 10 aa, synthetic construct
SHLRGDLTVT

SEQ ID NO: 68690 - protein, 10 aa, synthetic construct
SHLRGDLIGR

SEQ ID NO: 68691 - protein, 10 aa, synthetic construct
SHIRGDHGVL

SEQ ID NO: 68692 - protein, 10 aa, synthetic construct
SHIRGDHVNL

SEQ ID NO: 68693 - protein, 10 aa, synthetic construct
SHIRGDRDYL

SEQ ID NO: 68694 - protein, 10 aa, synthetic construct
AGERGDRSVV

SEQ ID NO: 68695 - protein, 10 aa, synthetic construct
SHIRGDYSSV

SEQ ID NO: 68696 - protein, 10 aa, synthetic construct
SHIRGDLTVT

SEQ ID NO: 68697 - protein, 10 aa, synthetic construct
SHMRGDHGVL

SEQ ID NO: 68698 - protein, 10 aa, synthetic construct
SHMRGDHVNL

SEQ ID NO: 68699 - protein, 10 aa, synthetic construct
SHMRGDRDYL

SEQ ID NO: 68700 - protein, 10 aa, synthetic construct
SHMRGDYSSV

SEQ ID NO: 68701 - protein, 10 aa, synthetic construct
SHMRGDLTVT

SEQ ID NO: 68702 - protein, 10 aa, synthetic construct
SHWRGDRDYL

SEQ ID NO: 68703 - protein, 10 aa, synthetic construct
SHWRGDYTSV

SEQ ID NO: 68704 - protein, 10 aa, synthetic construct
SHWRGDLTVT

SEQ ID NO: 68705 - protein, 10 aa, synthetic construct
AGERGDLTVT

SEQ ID NO: 68706 - protein, 10 aa, synthetic construct
SHWRGDLIGR

SEQ ID NO: 68707 - protein, 10 aa, synthetic construct
SHFRGDHGVL

SEQ ID NO: 68708 - protein, 10 aa, synthetic construct
SHFRGDHVNL

SEQ ID NO: 68709 - protein, 10 aa, synthetic construct
SHFRGDRDYL

SEQ ID NO: 68710 - protein, 10 aa, synthetic construct
SHFRGDYSSV

SEQ ID NO: 68711 - protein, 10 aa, synthetic construct
SHFRGDLTVT

SEQ ID NO: 68712 - protein, 10 aa, synthetic construct
SHKRGDHGVL

SEQ ID NO: 68713 - protein, 10 aa, synthetic construct
SHKRGDHVNL

SEQ ID NO: 68714 - protein, 10 aa, synthetic construct
SHKRGDRDYL

SEQ ID NO: 68715 - protein, 10 aa, synthetic construct
SHKRGDYSSV

SEQ ID NO: 68716 - protein, 10 aa, synthetic construct
AGERGDLIGR

SEQ ID NO: 68717 - protein, 10 aa, synthetic construct
SHKRGDLTVT

SEQ ID NO: 68718 - protein, 10 aa, synthetic construct
SHRRGDYNSL

SEQ ID NO: 68719 - protein, 10 aa, synthetic construct
SHRRGDYTSV

SEQ ID NO: 68720 - protein, 10 aa, synthetic construct
SHRRGDYTSM

SEQ ID NO: 68721 - protein, 10 aa, synthetic construct
SHRRGDFQNT

SEQ ID NO: 68722 - protein, 10 aa, synthetic construct
SHHRGDRDYL

SEQ ID NO: 68723 - protein, 10 aa, synthetic construct
SHHRGDYTSV

SEQ ID NO: 68724 - protein, 10 aa, synthetic construct
SHHRGDLTVT

SEQ ID NO: 68725 - protein, 10 aa, synthetic construct
SHHRGDLIGR

SEQ ID NO: 68726 - protein, 10 aa, synthetic construct
SHSRGDRDYL

SEQ ID NO: 68727 - protein, 10 aa, synthetic construct
AGERGDRSQT

SEQ ID NO: 68728 - protein, 10 aa, synthetic construct
SHSRGDYTSV

SEQ ID NO: 68729 - protein, 10 aa, synthetic construct
SHSRGDLTVT

SEQ ID NO: 68730 - protein, 10 aa, synthetic construct
SHSRGDLIGR

SEQ ID NO: 68731 - protein, 10 aa, synthetic construct
SHTRGDRDYL

SEQ ID NO: 68732 - protein, 10 aa, synthetic construct
SHTRGDYTSV

SEQ ID NO: 68733 - protein, 10 aa, synthetic construct
SHTRGDLTVT

SEQ ID NO: 68734 - protein, 10 aa, synthetic construct
SHTRGDLIGR

SEQ ID NO: 68735 - protein, 10 aa, synthetic construct
SHYRGDHGVL

SEQ ID NO: 68736 - protein, 10 aa, synthetic construct
SHYRGDHVNL

SEQ ID NO: 68737 - protein, 10 aa, synthetic construct
SHYRGDRDYL

SEQ ID NO: 68738 - protein, 10 aa, synthetic construct
QSPRGDRSVV

SEQ ID NO: 68739 - protein, 10 aa, synthetic construct
AGERGDLLLS

SEQ ID NO: 68740 - protein, 10 aa, synthetic construct
SHYRGDYSSV

SEQ ID NO: 68741 - protein, 10 aa, synthetic construct
SHYRGDLTVT

SEQ ID NO: 68742 - protein, 10 aa, synthetic construct
SHNRGDHGVL

SEQ ID NO: 68743 - protein, 10 aa, synthetic construct
SHNRGDHVNL

SEQ ID NO: 68744 - protein, 10 aa, synthetic construct
SHNRGDRDYL

SEQ ID NO: 68745 - protein, 10 aa, synthetic construct
SHNRGDYSSV

SEQ ID NO: 68746 - protein, 10 aa, synthetic construct
SHNRGDLTVT

SEQ ID NO: 68747 - protein, 10 aa, synthetic construct
SHQRGDRDYL

SEQ ID NO: 68748 - protein, 10 aa, synthetic construct
SHQRGDYTSV

SEQ ID NO: 68749 - protein, 10 aa, synthetic construct
SHQRGDLTVT

SEQ ID NO: 68750 - protein, 10 aa, synthetic construct
AAGRGDRDYL

SEQ ID NO: 68751 - protein, 10 aa, synthetic construct
SHQRGDLIGR

SEQ ID NO: 68752 - protein, 10 aa, synthetic construct
SHDRGDRDYL

SEQ ID NO: 68753 - protein, 10 aa, synthetic construct
SHDRGDYTSV

SEQ ID NO: 68754 - protein, 10 aa, synthetic construct
SHDRGDLTVT

SEQ ID NO: 68755 - protein, 10 aa, synthetic construct
SHDRGDLIGR

SEQ ID NO: 68756 - protein, 10 aa, synthetic construct
SHERGDRDYL

SEQ ID NO: 68757 - protein, 10 aa, synthetic construct
SHERGDYTSV

SEQ ID NO: 68758 - protein, 10 aa, synthetic construct
SHERGDLTVT

SEQ ID NO: 68759 - protein, 10 aa, synthetic construct
SHERGDLIGR

SEQ ID NO: 68760 - protein, 10 aa, synthetic construct
SSGRGDFNNT

SEQ ID NO: 68761 - protein, 10 aa, synthetic construct
AAGRGDYVGL

SEQ ID NO: 68762 - protein, 10 aa, synthetic construct
SSGRGDFNNL

SEQ ID NO: 68763 - protein, 10 aa, synthetic construct
SSARGDFNNT

SEQ ID NO: 68764 - protein, 10 aa, synthetic construct
SSARGDFNNL

SEQ ID NO: 68765 - protein, 10 aa, synthetic construct
SSVRGDYNSL

SEQ ID NO: 68766 - protein, 10 aa, synthetic construct
SSVRGDYTSM

SEQ ID NO: 68767 - protein, 10 aa, synthetic construct
SSVRGDFQNT

SEQ ID NO: 68768 - protein, 10 aa, synthetic construct
SSLRGDYNSL

SEQ ID NO: 68769 - protein, 10 aa, synthetic construct
SSLRGDYTSM

SEQ ID NO: 68770 - protein, 10 aa, synthetic construct
SSLRGDFQNT

SEQ ID NO: 68771 - protein, 10 aa, synthetic construct
SSIRGDYTSV

SEQ ID NO: 68772 - protein, 10 aa, synthetic construct
AAGRGDQSTL

SEQ ID NO: 68773 - protein, 10 aa, synthetic construct
SSIRGDLIGR

SEQ ID NO: 68774 - protein, 10 aa, synthetic construct
SSMRGDYTSV

SEQ ID NO: 68775 - protein, 10 aa, synthetic construct
SSMRGDLIGR

SEQ ID NO: 68776 - protein, 10 aa, synthetic construct
SSWRGDYNSL

SEQ ID NO: 68777 - protein, 10 aa, synthetic construct
SSWRGDYTSM

SEQ ID NO: 68778 - protein, 10 aa, synthetic construct
SSWRGDFQNT

SEQ ID NO: 68779 - protein, 10 aa, synthetic construct
SSFRGDYTSV

SEQ ID NO: 68780 - protein, 10 aa, synthetic construct
SSFRGDLIGR

SEQ ID NO: 68781 - protein, 10 aa, synthetic construct
SSKRGDYTSV

SEQ ID NO: 68782 - protein, 10 aa, synthetic construct
SSKRGDLIGR

SEQ ID NO: 68783 - protein, 10 aa, synthetic construct
AAARGDRDYL

SEQ ID NO: 68784 - protein, 10 aa, synthetic construct
SSRRGDFNNT

SEQ ID NO: 68785 - protein, 10 aa, synthetic construct
SSRRGDFNNL

SEQ ID NO: 68786 - protein, 10 aa, synthetic construct
SSHRGDYNSL

SEQ ID NO: 68787 - protein, 10 aa, synthetic construct
SSHRGDYTSM

SEQ ID NO: 68788 - protein, 10 aa, synthetic construct
SSHRGDFQNT

SEQ ID NO: 68789 - protein, 10 aa, synthetic construct
SSSRGDYNSL

SEQ ID NO: 68790 - protein, 10 aa, synthetic construct
SSSRGDYTSM

SEQ ID NO: 68791 - protein, 10 aa, synthetic construct
SSSRGDFQNT

SEQ ID NO: 68792 - protein, 10 aa, synthetic construct
SSTRGDYNSL

SEQ ID NO: 68793 - protein, 10 aa, synthetic construct
SSTRGDYTSM

SEQ ID NO: 68794 - protein, 10 aa, synthetic construct
AAARGDYVGL

SEQ ID NO: 68795 - protein, 10 aa, synthetic construct
SSTRGDFQNT

SEQ ID NO: 68796 - protein, 10 aa, synthetic construct
SSYRGDYTSV

SEQ ID NO: 68797 - protein, 10 aa, synthetic construct
SSYRGDLIGR

SEQ ID NO: 68798 - protein, 10 aa, synthetic construct
SSNRGDYTSV

SEQ ID NO: 68799 - protein, 10 aa, synthetic construct
SSNRGDLIGR

SEQ ID NO: 68800 - protein, 10 aa, synthetic construct
SSQRGDYNSL

SEQ ID NO: 68801 - protein, 10 aa, synthetic construct
SSQRGDYTSM

SEQ ID NO: 68802 - protein, 10 aa, synthetic construct
SSQRGDFQNT

SEQ ID NO: 68803 - protein, 10 aa, synthetic construct
SSDRGDYNSL

SEQ ID NO: 68804 - protein, 10 aa, synthetic construct
SSDRGDYTSM

SEQ ID NO: 68805 - protein, 10 aa, synthetic construct
AAARGDQSTL

SEQ ID NO: 68806 - protein, 10 aa, synthetic construct
SSDRGDFQNT

SEQ ID NO: 68807 - protein, 10 aa, synthetic construct
SSERGDYNSL

SEQ ID NO: 68808 - protein, 10 aa, synthetic construct
SSERGDYTSM

SEQ ID NO: 68809 - protein, 10 aa, synthetic construct
SSERGDFQNT

SEQ ID NO: 68810 - protein, 10 aa, synthetic construct
STGRGDYNSL

SEQ ID NO: 68811 - protein, 10 aa, synthetic construct
STGRGDYTSV

SEQ ID NO: 68812 - protein, 10 aa, synthetic construct
STGRGDYTSM

SEQ ID NO: 68813 - protein, 10 aa, synthetic construct
STGRGDFQNT

SEQ ID NO: 68814 - protein, 10 aa, synthetic construct
STARGDYNSL

SEQ ID NO: 68815 - protein, 10 aa, synthetic construct
STARGDYTSV

SEQ ID NO: 68816 - protein, 10 aa, synthetic construct
AAVRGDRDYL

SEQ ID NO: 68817 - protein, 10 aa, synthetic construct
STARGDYTSM

SEQ ID NO: 68818 - protein, 10 aa, synthetic construct
STARGDFQNT

SEQ ID NO: 68819 - protein, 10 aa, synthetic construct
STVRGDRDYL

SEQ ID NO: 68820 - protein, 10 aa, synthetic construct
STVRGDLTVT

SEQ ID NO: 68821 - protein, 10 aa, synthetic construct
STVRGDLIGR

SEQ ID NO: 68822 - protein, 10 aa, synthetic construct
STPRGDYNSL

SEQ ID NO: 68823 - protein, 10 aa, synthetic construct
STPRGDYTSV

SEQ ID NO: 68824 - protein, 10 aa, synthetic construct
STPRGDYTSM

SEQ ID NO: 68825 - protein, 10 aa, synthetic construct
STPRGDFQNT

SEQ ID NO: 68826 - protein, 10 aa, synthetic construct
STLRGDRDYL

SEQ ID NO: 68827 - protein, 10 aa, synthetic construct
AAVRGDYVGL

SEQ ID NO: 68828 - protein, 10 aa, synthetic construct
STLRGDYTSV

SEQ ID NO: 68829 - protein, 10 aa, synthetic construct
STLRGDLTVT

SEQ ID NO: 68830 - protein, 10 aa, synthetic construct
STLRGDLIGR

SEQ ID NO: 68831 - protein, 10 aa, synthetic construct
STIRGDHGVL

SEQ ID NO: 68832 - protein, 10 aa, synthetic construct
STIRGDHVNL

SEQ ID NO: 68833 - protein, 10 aa, synthetic construct
STIRGDRDYL

SEQ ID NO: 68834 - protein, 10 aa, synthetic construct
STIRGDYSSV

SEQ ID NO: 68835 - protein, 10 aa, synthetic construct
STIRGDLTVT

SEQ ID NO: 68836 - protein, 10 aa, synthetic construct
STMRGDHGVL

SEQ ID NO: 68837 - protein, 10 aa, synthetic construct
STMRGDHVNL

SEQ ID NO: 68838 - protein, 10 aa, synthetic construct
AAVRGDQSTL

SEQ ID NO: 68839 - protein, 10 aa, synthetic construct
STMRGDRDYL

SEQ ID NO: 68840 - protein, 10 aa, synthetic construct
STMRGDYSSV

SEQ ID NO: 68841 - protein, 10 aa, synthetic construct
STMRGDLTVT

SEQ ID NO: 68842 - protein, 10 aa, synthetic construct
STWRGDRDYL

SEQ ID NO: 68843 - protein, 10 aa, synthetic construct
STWRGDYTSV

SEQ ID NO: 68844 - protein, 10 aa, synthetic construct
STWRGDLTVT

SEQ ID NO: 68845 - protein, 10 aa, synthetic construct
STWRGDLIGR

SEQ ID NO: 68846 - protein, 10 aa, synthetic construct
STFRGDHGVL

SEQ ID NO: 68847 - protein, 10 aa, synthetic construct
STFRGDHVNL

SEQ ID NO: 68848 - protein, 10 aa, synthetic construct
STFRGDRDYL

SEQ ID NO: 68849 - protein, 10 aa, synthetic construct
QSPRGDRGVV

SEQ ID NO: 68850 - protein, 10 aa, synthetic construct
AAPRGDRDYL

SEQ ID NO: 68851 - protein, 10 aa, synthetic construct
STFRGDYSSV

SEQ ID NO: 68852 - protein, 10 aa, synthetic construct
STFRGDLTVT

SEQ ID NO: 68853 - protein, 10 aa, synthetic construct
STKRGDHGVL

SEQ ID NO: 68854 - protein, 10 aa, synthetic construct
STKRGDHVNL

SEQ ID NO: 68855 - protein, 10 aa, synthetic construct
STKRGDRDYL

SEQ ID NO: 68856 - protein, 10 aa, synthetic construct
STKRGDYSSV

SEQ ID NO: 68857 - protein, 10 aa, synthetic construct
STKRGDLTVT

SEQ ID NO: 68858 - protein, 10 aa, synthetic construct
STRRGDYNSL

SEQ ID NO: 68859 - protein, 10 aa, synthetic construct
STRRGDYTSV

SEQ ID NO: 68860 - protein, 10 aa, synthetic construct
STRRGDYTSM

SEQ ID NO: 68861 - protein, 10 aa, synthetic construct
AAPRGDYVGL

SEQ ID NO: 68862 - protein, 10 aa, synthetic construct
STRRGDFQNT

SEQ ID NO: 68863 - protein, 10 aa, synthetic construct
STHRGDRDYL

SEQ ID NO: 68864 - protein, 10 aa, synthetic construct
STHRGDYTSV

SEQ ID NO: 68865 - protein, 10 aa, synthetic construct
STHRGDLTVT

SEQ ID NO: 68866 - protein, 10 aa, synthetic construct
STHRGDLIGR

SEQ ID NO: 68867 - protein, 10 aa, synthetic construct
STSRGDRDYL

SEQ ID NO: 68868 - protein, 10 aa, synthetic construct
STSRGDYTSV

SEQ ID NO: 68869 - protein, 10 aa, synthetic construct
STSRGDLTVT

SEQ ID NO: 68870 - protein, 10 aa, synthetic construct
STSRGDLIGR

SEQ ID NO: 68871 - protein, 10 aa, synthetic construct
STTRGDRDYL

SEQ ID NO: 68872 - protein, 10 aa, synthetic construct
AAPRGDQSTL

SEQ ID NO: 68873 - protein, 10 aa, synthetic construct
STTRGDYTSV

SEQ ID NO: 68874 - protein, 10 aa, synthetic construct
STTRGDLTVT

SEQ ID NO: 68875 - protein, 10 aa, synthetic construct
STTRGDLIGR

SEQ ID NO: 68876 - protein, 10 aa, synthetic construct
STYRGDHGVL

SEQ ID NO: 68877 - protein, 10 aa, synthetic construct
STYRGDHVNL

SEQ ID NO: 68878 - protein, 10 aa, synthetic construct
STYRGDRDYL

SEQ ID NO: 68879 - protein, 10 aa, synthetic construct
STYRGDYSSV

SEQ ID NO: 68880 - protein, 10 aa, synthetic construct
STYRGDLTVT

SEQ ID NO: 68881 - protein, 10 aa, synthetic construct
STNRGDHGVL

SEQ ID NO: 68882 - protein, 10 aa, synthetic construct
STNRGDHVNL

SEQ ID NO: 68883 - protein, 10 aa, synthetic construct
AALRGDRDYL

SEQ ID NO: 68884 - protein, 10 aa, synthetic construct
STNRGDRDYL

SEQ ID NO: 68885 - protein, 10 aa, synthetic construct
STNRGDYSSV

SEQ ID NO: 68886 - protein, 10 aa, synthetic construct
STNRGDLTVT

SEQ ID NO: 68887 - protein, 10 aa, synthetic construct
STQRGDRDYL

SEQ ID NO: 68888 - protein, 10 aa, synthetic construct
STQRGDYTSV

SEQ ID NO: 68889 - protein, 10 aa, synthetic construct
STQRGDLTVT

SEQ ID NO: 68890 - protein, 10 aa, synthetic construct
STQRGDLIGR

SEQ ID NO: 68891 - protein, 10 aa, synthetic construct
STDRGDRDYL

SEQ ID NO: 68892 - protein, 10 aa, synthetic construct
STDRGDYTSV

SEQ ID NO: 68893 - protein, 10 aa, synthetic construct
STDRGDLTVT

SEQ ID NO: 68894 - protein, 10 aa, synthetic construct
AALRGDYVGL

SEQ ID NO: 68895 - protein, 10 aa, synthetic construct
STDRGDLIGR

SEQ ID NO: 68896 - protein, 10 aa, synthetic construct
STERGDRDYL

SEQ ID NO: 68897 - protein, 10 aa, synthetic construct
STERGDYTSV

SEQ ID NO: 68898 - protein, 10 aa, synthetic construct
STERGDLTVT

SEQ ID NO: 68899 - protein, 10 aa, synthetic construct
STERGDLIGR

SEQ ID NO: 68900 - protein, 10 aa, synthetic construct
SYGRGDRDYL

SEQ ID NO: 68901 - protein, 10 aa, synthetic construct
SYGRGDYTSV

SEQ ID NO: 68902 - protein, 10 aa, synthetic construct
SYGRGDLTVT

SEQ ID NO: 68903 - protein, 10 aa, synthetic construct
SYGRGDLIGR

SEQ ID NO: 68904 - protein, 10 aa, synthetic construct
SYARGDRDYL

SEQ ID NO: 68905 - protein, 10 aa, synthetic construct
AALRGDQSTL

SEQ ID NO: 68906 - protein, 10 aa, synthetic construct
SYARGDYTSV

SEQ ID NO: 68907 - protein, 10 aa, synthetic construct
SYARGDLTVT

SEQ ID NO: 68908 - protein, 10 aa, synthetic construct
SYARGDLIGR

SEQ ID NO: 68909 - protein, 10 aa, synthetic construct
SYVRGDHGVL

SEQ ID NO: 68910 - protein, 10 aa, synthetic construct
SYVRGDHVNL

SEQ ID NO: 68911 - protein, 10 aa, synthetic construct
SYVRGDRDYL

SEQ ID NO: 68912 - protein, 10 aa, synthetic construct
SYVRGDYSSV

SEQ ID NO: 68913 - protein, 10 aa, synthetic construct
SYVRGDLTVT

SEQ ID NO: 68914 - protein, 10 aa, synthetic construct
SYPRGDRDYL

SEQ ID NO: 68915 - protein, 10 aa, synthetic construct
SYPRGDYTSV

SEQ ID NO: 68916 - protein, 10 aa, synthetic construct
AAIRGDRGVV

SEQ ID NO: 68917 - protein, 10 aa, synthetic construct
SYPRGDLTVT

SEQ ID NO: 68918 - protein, 10 aa, synthetic construct
SYPRGDLIGR

SEQ ID NO: 68919 - protein, 10 aa, synthetic construct
SYLRGDHGVL

SEQ ID NO: 68920 - protein, 10 aa, synthetic construct
SYLRGDHVNL

SEQ ID NO: 68921 - protein, 10 aa, synthetic construct
SYLRGDRDYL

SEQ ID NO: 68922 - protein, 10 aa, synthetic construct
SYLRGDYSSV

SEQ ID NO: 68923 - protein, 10 aa, synthetic construct
SYLRGDLTVT

SEQ ID NO: 68924 - protein, 10 aa, synthetic construct
SYIRGDHGVL

SEQ ID NO: 68925 - protein, 10 aa, synthetic construct
SYIRGDRGQI

SEQ ID NO: 68926 - protein, 10 aa, synthetic construct
SYIRGDRQGI

SEQ ID NO: 68927 - protein, 10 aa, synthetic construct
AAMRGDRGQI

SEQ ID NO: 68928 - protein, 10 aa, synthetic construct
SYIRGDRGVV

SEQ ID NO: 68929 - protein, 10 aa, synthetic construct
SYIRGDYVGL

SEQ ID NO: 68930 - protein, 10 aa, synthetic construct
SYIRGDLIGR

SEQ ID NO: 68931 - protein, 10 aa, synthetic construct
SYIRGDQSTL

SEQ ID NO: 68932 - protein, 10 aa, synthetic construct
SYIRGDLLLS

SEQ ID NO: 68933 - protein, 10 aa, synthetic construct
SYMRGDHGVL

SEQ ID NO: 68934 - protein, 10 aa, synthetic construct
SYMRGDRGQI

SEQ ID NO: 68935 - protein, 10 aa, synthetic construct
SYMRGDRQGI

SEQ ID NO: 68936 - protein, 10 aa, synthetic construct
SYMRGDRGVV

SEQ ID NO: 68937 - protein, 10 aa, synthetic construct
SYMRGDYVGL

SEQ ID NO: 68938 - protein, 10 aa, synthetic construct
AAMRGDRQGI

SEQ ID NO: 68939 - protein, 10 aa, synthetic construct
SYMRGDLIGR

SEQ ID NO: 68940 - protein, 10 aa, synthetic construct
SYMRGDQSTL

SEQ ID NO: 68941 - protein, 10 aa, synthetic construct
SYMRGDLLLS

SEQ ID NO: 68942 - protein, 10 aa, synthetic construct
SYWRGDHGVL

SEQ ID NO: 68943 - protein, 10 aa, synthetic construct
SYWRGDHVNL

SEQ ID NO: 68944 - protein, 10 aa, synthetic construct
SYWRGDRDYL

SEQ ID NO: 68945 - protein, 10 aa, synthetic construct
SYWRGDYSSV

SEQ ID NO: 68946 - protein, 10 aa, synthetic construct
SYWRGDLTVT

SEQ ID NO: 68947 - protein, 10 aa, synthetic construct
SYFRGDHGVL

SEQ ID NO: 68948 - protein, 10 aa, synthetic construct
SYFRGDRGQI

SEQ ID NO: 68949 - protein, 10 aa, synthetic construct
AAMRGDRSVV

SEQ ID NO: 68950 - protein, 10 aa, synthetic construct
SYFRGDRQGI

SEQ ID NO: 68951 - protein, 10 aa, synthetic construct
SYFRGDRGVV

SEQ ID NO: 68952 - protein, 10 aa, synthetic construct
SYFRGDYVGL

SEQ ID NO: 68953 - protein, 10 aa, synthetic construct
SYFRGDLIGR

SEQ ID NO: 68954 - protein, 10 aa, synthetic construct
SYFRGDQSTL

SEQ ID NO: 68955 - protein, 10 aa, synthetic construct
SYFRGDLLLS

SEQ ID NO: 68956 - protein, 10 aa, synthetic construct
SYKRGDHGVL

SEQ ID NO: 68957 - protein, 10 aa, synthetic construct
SYKRGDRGQI

SEQ ID NO: 68958 - protein, 10 aa, synthetic construct
SYKRGDRQGI

SEQ ID NO: 68959 - protein, 10 aa, synthetic construct
SYKRGDRGVV

SEQ ID NO: 68960 - protein, 10 aa, synthetic construct
QSPRGDRSQT

SEQ ID NO: 68961 - protein, 10 aa, synthetic construct
AAMRGDRGVV

SEQ ID NO: 68962 - protein, 10 aa, synthetic construct
SYKRGDYVGL

SEQ ID NO: 68963 - protein, 10 aa, synthetic construct
SYKRGDLIGR

SEQ ID NO: 68964 - protein, 10 aa, synthetic construct
SYKRGDQSTL

SEQ ID NO: 68965 - protein, 10 aa, synthetic construct
SYKRGDLLLS

SEQ ID NO: 68966 - protein, 10 aa, synthetic construct
SYRRGDRDYL

SEQ ID NO: 68967 - protein, 10 aa, synthetic construct
SYRRGDYTSV

SEQ ID NO: 68968 - protein, 10 aa, synthetic construct
SYRRGDLTVT

SEQ ID NO: 68969 - protein, 10 aa, synthetic construct
SYRRGDLIGR

SEQ ID NO: 68970 - protein, 10 aa, synthetic construct
SYHRGDHGVL

SEQ ID NO: 68971 - protein, 10 aa, synthetic construct
SYHRGDHVNL

SEQ ID NO: 68972 - protein, 10 aa, synthetic construct
AAMRGDRSQT

SEQ ID NO: 68973 - protein, 10 aa, synthetic construct
SYHRGDRDYL

SEQ ID NO: 68974 - protein, 10 aa, synthetic construct
SYHRGDYSSV

SEQ ID NO: 68975 - protein, 10 aa, synthetic construct
SYHRGDLTVT

SEQ ID NO: 68976 - protein, 10 aa, synthetic construct
SYSRGDHGVL

SEQ ID NO: 68977 - protein, 10 aa, synthetic construct
SYSRGDHVNL

SEQ ID NO: 68978 - protein, 10 aa, synthetic construct
SYSRGDRDYL

SEQ ID NO: 68979 - protein, 10 aa, synthetic construct
SYSRGDYSSV

SEQ ID NO: 68980 - protein, 10 aa, synthetic construct
SYSRGDLTVT

SEQ ID NO: 68981 - protein, 10 aa, synthetic construct
SYTRGDHGVL

SEQ ID NO: 68982 - protein, 10 aa, synthetic construct
SYTRGDHVNL

SEQ ID NO: 68983 - protein, 10 aa, synthetic construct
AAWRGDHGVL

SEQ ID NO: 68984 - protein, 10 aa, synthetic construct
SYTRGDRDYL

SEQ ID NO: 68985 - protein, 10 aa, synthetic construct
SYTRGDYSSV

SEQ ID NO: 68986 - protein, 10 aa, synthetic construct
SYTRGDLTVT

SEQ ID NO: 68987 - protein, 10 aa, synthetic construct
SYYRGDHGVL

SEQ ID NO: 68988 - protein, 10 aa, synthetic construct
SYYRGDRGQI

SEQ ID NO: 68989 - protein, 10 aa, synthetic construct
SYYRGDRQGI

SEQ ID NO: 68990 - protein, 10 aa, synthetic construct
SYYRGDRGVV

SEQ ID NO: 68991 - protein, 10 aa, synthetic construct
SYYRGDYVGL

SEQ ID NO: 68992 - protein, 10 aa, synthetic construct
SYYRGDLIGR

SEQ ID NO: 68993 - protein, 10 aa, synthetic construct
SYYRGDQSTL

SEQ ID NO: 68994 - protein, 10 aa, synthetic construct
AAWRGDYVGL

SEQ ID NO: 68995 - protein, 10 aa, synthetic construct
SYYRGDLLLS

SEQ ID NO: 68996 - protein, 10 aa, synthetic construct
SYNRGDHGVL

SEQ ID NO: 68997 - protein, 10 aa, synthetic construct
SYNRGDRGQI

SEQ ID NO: 68998 - protein, 10 aa, synthetic construct
SYNRGDRQGI

SEQ ID NO: 68999 - protein, 10 aa, synthetic construct
SYNRGDRGVV

SEQ ID NO: 69000 - protein, 10 aa, synthetic construct
SYNRGDYVGL

SEQ ID NO: 69001 - protein, 10 aa, synthetic construct
SYNRGDLIGR

SEQ ID NO: 69002 - protein, 10 aa, synthetic construct
SYNRGDQSTL

SEQ ID NO: 69003 - protein, 10 aa, synthetic construct
SYNRGDLLLS

SEQ ID NO: 69004 - protein, 10 aa, synthetic construct
SYQRGDHGVL

SEQ ID NO: 69005 - protein, 10 aa, synthetic construct
AAWRGDQSTL

SEQ ID NO: 69006 - protein, 10 aa, synthetic construct
SYQRGDHVNL

SEQ ID NO: 69007 - protein, 10 aa, synthetic construct
SYQRGDRDYL

SEQ ID NO: 69008 - protein, 10 aa, synthetic construct
SYQRGDYSSV

SEQ ID NO: 69009 - protein, 10 aa, synthetic construct
SYQRGDLTVT

SEQ ID NO: 69010 - protein, 10 aa, synthetic construct
SYDRGDHGVL

SEQ ID NO: 69011 - protein, 10 aa, synthetic construct
SYDRGDHVNL

SEQ ID NO: 69012 - protein, 10 aa, synthetic construct
SYDRGDRDYL

SEQ ID NO: 69013 - protein, 10 aa, synthetic construct
SYDRGDYSSV

SEQ ID NO: 69014 - protein, 10 aa, synthetic construct
SYDRGDLTVT

SEQ ID NO: 69015 - protein, 10 aa, synthetic construct
SYERGDHGVL

SEQ ID NO: 69016 - protein, 10 aa, synthetic construct
AAWRGDLLLS

SEQ ID NO: 69017 - protein, 10 aa, synthetic construct
SYERGDHVNL

SEQ ID NO: 69018 - protein, 10 aa, synthetic construct
SYERGDRDYL

SEQ ID NO: 69019 - protein, 10 aa, synthetic construct
SYERGDYSSV

SEQ ID NO: 69020 - protein, 10 aa, synthetic construct
SYERGDLTVT

SEQ ID NO: 69021 - protein, 10 aa, synthetic construct
SNGRGDRDYL

SEQ ID NO: 69022 - protein, 10 aa, synthetic construct
SNGRGDYTSV

SEQ ID NO: 69023 - protein, 10 aa, synthetic construct
SNGRGDLTVT

SEQ ID NO: 69024 - protein, 10 aa, synthetic construct
SNGRGDLIGR

SEQ ID NO: 69025 - protein, 10 aa, synthetic construct
SNARGDRDYL

SEQ ID NO: 69026 - protein, 10 aa, synthetic construct
SNARGDYTSV

SEQ ID NO: 69027 - protein, 10 aa, synthetic construct
AAFRGDRGVV

SEQ ID NO: 69028 - protein, 10 aa, synthetic construct
SNARGDLTVT

SEQ ID NO: 69029 - protein, 10 aa, synthetic construct
SNARGDLIGR

SEQ ID NO: 69030 - protein, 10 aa, synthetic construct
SNVRGDHGVL

SEQ ID NO: 69031 - protein, 10 aa, synthetic construct
SNVRGDHVNL

SEQ ID NO: 69032 - protein, 10 aa, synthetic construct
SNVRGDRDYL

SEQ ID NO: 69033 - protein, 10 aa, synthetic construct
SNVRGDYSSV

SEQ ID NO: 69034 - protein, 10 aa, synthetic construct
SNVRGDLTVT

SEQ ID NO: 69035 - protein, 10 aa, synthetic construct
SNPRGDRDYL

SEQ ID NO: 69036 - protein, 10 aa, synthetic construct
SNPRGDYTSV

SEQ ID NO: 69037 - protein, 10 aa, synthetic construct
SNPRGDLTVT

SEQ ID NO: 69038 - protein, 10 aa, synthetic construct
AAKRGDRGVV

SEQ ID NO: 69039 - protein, 10 aa, synthetic construct
SNPRGDLIGR

SEQ ID NO: 69040 - protein, 10 aa, synthetic construct
SNLRGDHGVL

SEQ ID NO: 69041 - protein, 10 aa, synthetic construct
SNLRGDHVNL

SEQ ID NO: 69042 - protein, 10 aa, synthetic construct
SNLRGDRDYL

SEQ ID NO: 69043 - protein, 10 aa, synthetic construct
SNLRGDYSSV

SEQ ID NO: 69044 - protein, 10 aa, synthetic construct
SNLRGDLTVT

SEQ ID NO: 69045 - protein, 10 aa, synthetic construct
SNIRGDHGVL

SEQ ID NO: 69046 - protein, 10 aa, synthetic construct
SNIRGDRGQI

SEQ ID NO: 69047 - protein, 10 aa, synthetic construct
SNIRGDRQGI

SEQ ID NO: 69048 - protein, 10 aa, synthetic construct
SNIRGDRGVV

SEQ ID NO: 69049 - protein, 10 aa, synthetic construct
AARRGDRDYL

SEQ ID NO: 69050 - protein, 10 aa, synthetic construct
SNIRGDYVGL

SEQ ID NO: 69051 - protein, 10 aa, synthetic construct
SNIRGDLIGR

SEQ ID NO: 69052 - protein, 10 aa, synthetic construct
SNIRGDQSTL

SEQ ID NO: 69053 - protein, 10 aa, synthetic construct
SNIRGDLLLS

SEQ ID NO: 69054 - protein, 10 aa, synthetic construct
SNMRGDHGVL

SEQ ID NO: 69055 - protein, 10 aa, synthetic construct
SNMRGDRGQI

SEQ ID NO: 69056 - protein, 10 aa, synthetic construct
SNMRGDRQGI

SEQ ID NO: 69057 - protein, 10 aa, synthetic construct
SNMRGDRGVV

SEQ ID NO: 69058 - protein, 10 aa, synthetic construct
SNMRGDYVGL

SEQ ID NO: 69059 - protein, 10 aa, synthetic construct
SNMRGDLIGR

SEQ ID NO: 69060 - protein, 10 aa, synthetic construct
AARRGDYVGL

SEQ ID NO: 69061 - protein, 10 aa, synthetic construct
SNMRGDQSTL

SEQ ID NO: 69062 - protein, 10 aa, synthetic construct
SNMRGDLLLS

SEQ ID NO: 69063 - protein, 10 aa, synthetic construct
SNWRGDHGVL

SEQ ID NO: 69064 - protein, 10 aa, synthetic construct
SNWRGDHVNL

SEQ ID NO: 69065 - protein, 10 aa, synthetic construct
SNWRGDRDYL

SEQ ID NO: 69066 - protein, 10 aa, synthetic construct
SNWRGDYSSV

SEQ ID NO: 69067 - protein, 10 aa, synthetic construct
SNWRGDLTVT

SEQ ID NO: 69068 - protein, 10 aa, synthetic construct
SNFRGDHGVL

SEQ ID NO: 69069 - protein, 10 aa, synthetic construct
SNFRGDRGQI

SEQ ID NO: 69070 - protein, 10 aa, synthetic construct
SNFRGDRQGI

SEQ ID NO: 69071 - protein, 10 aa, synthetic construct
SSPRGDHGVL

SEQ ID NO: 69072 - protein, 10 aa, synthetic construct
AARRGDQSTL

SEQ ID NO: 69073 - protein, 10 aa, synthetic construct
SNFRGDRGVV

SEQ ID NO: 69074 - protein, 10 aa, synthetic construct
SNFRGDYVGL

SEQ ID NO: 69075 - protein, 10 aa, synthetic construct
SNFRGDLIGR

SEQ ID NO: 69076 - protein, 10 aa, synthetic construct
SNFRGDQSTL

SEQ ID NO: 69077 - protein, 10 aa, synthetic construct
SNFRGDLLLS

SEQ ID NO: 69078 - protein, 10 aa, synthetic construct
SNKRGDHGVL

SEQ ID NO: 69079 - protein, 10 aa, synthetic construct
SNKRGDRGQI

SEQ ID NO: 69080 - protein, 10 aa, synthetic construct
SNKRGDRQGI

SEQ ID NO: 69081 - protein, 10 aa, synthetic construct
SNKRGDRGVV

SEQ ID NO: 69082 - protein, 10 aa, synthetic construct
SNKRGDYVGL

SEQ ID NO: 69083 - protein, 10 aa, synthetic construct
AAHRGDHGVL

SEQ ID NO: 69084 - protein, 10 aa, synthetic construct
SNKRGDLIGR

SEQ ID NO: 69085 - protein, 10 aa, synthetic construct
SNKRGDQSTL

SEQ ID NO: 69086 - protein, 10 aa, synthetic construct
SNKRGDLLLS

SEQ ID NO: 69087 - protein, 10 aa, synthetic construct
SNRRGDRDYL

SEQ ID NO: 69088 - protein, 10 aa, synthetic construct
SNRRGDYTSV

SEQ ID NO: 69089 - protein, 10 aa, synthetic construct
SNRRGDLTVT

SEQ ID NO: 69090 - protein, 10 aa, synthetic construct
SNRRGDLIGR

SEQ ID NO: 69091 - protein, 10 aa, synthetic construct
SNHRGDHGVL

SEQ ID NO: 69092 - protein, 10 aa, synthetic construct
SNHRGDHVNL

SEQ ID NO: 69093 - protein, 10 aa, synthetic construct
SNHRGDRDYL

SEQ ID NO: 69094 - protein, 10 aa, synthetic construct
AAHRGDRGQI

SEQ ID NO: 69095 - protein, 10 aa, synthetic construct
SNHRGDYSSV

SEQ ID NO: 69096 - protein, 10 aa, synthetic construct
SNHRGDLTVT

SEQ ID NO: 69097 - protein, 10 aa, synthetic construct
SNSRGDHGVL

SEQ ID NO: 69098 - protein, 10 aa, synthetic construct
SNSRGDHVNL

SEQ ID NO: 69099 - protein, 10 aa, synthetic construct
SNSRGDRDYL

SEQ ID NO: 69100 - protein, 10 aa, synthetic construct
SNSRGDYSSV

SEQ ID NO: 69101 - protein, 10 aa, synthetic construct
SNSRGDLTVT

SEQ ID NO: 69102 - protein, 10 aa, synthetic construct
SNTRGDHGVL

SEQ ID NO: 69103 - protein, 10 aa, synthetic construct
SNTRGDHVNL

SEQ ID NO: 69104 - protein, 10 aa, synthetic construct
SNTRGDRDYL

SEQ ID NO: 69105 - protein, 10 aa, synthetic construct
AAHRGDRQGI

SEQ ID NO: 69106 - protein, 10 aa, synthetic construct
SNTRGDYSSV

SEQ ID NO: 69107 - protein, 10 aa, synthetic construct
SNTRGDLTVT

SEQ ID NO: 69108 - protein, 10 aa, synthetic construct
SNYRGDHGVL

SEQ ID NO: 69109 - protein, 10 aa, synthetic construct
SNYRGDRGQI

SEQ ID NO: 69110 - protein, 10 aa, synthetic construct
SNYRGDRQGI

SEQ ID NO: 69111 - protein, 10 aa, synthetic construct
SNYRGDRGVV

SEQ ID NO: 69112 - protein, 10 aa, synthetic construct
SNYRGDYVGL

SEQ ID NO: 69113 - protein, 10 aa, synthetic construct
SNYRGDLIGR

SEQ ID NO: 69114 - protein, 10 aa, synthetic construct
SNYRGDQSTL

SEQ ID NO: 69115 - protein, 10 aa, synthetic construct
SNYRGDLLLS

SEQ ID NO: 69116 - protein, 10 aa, synthetic construct
AAHRGDRSVV

SEQ ID NO: 69117 - protein, 10 aa, synthetic construct
SNNRGDHGVL

SEQ ID NO: 69118 - protein, 10 aa, synthetic construct
SNNRGDRGQI

SEQ ID NO: 69119 - protein, 10 aa, synthetic construct
SNNRGDRQGI

SEQ ID NO: 69120 - protein, 10 aa, synthetic construct
SNNRGDRGVV

SEQ ID NO: 69121 - protein, 10 aa, synthetic construct
SNNRGDYVGL

SEQ ID NO: 69122 - protein, 10 aa, synthetic construct
SNNRGDLIGR

SEQ ID NO: 69123 - protein, 10 aa, synthetic construct
SNNRGDQSTL

SEQ ID NO: 69124 - protein, 10 aa, synthetic construct
SNNRGDLLLS

SEQ ID NO: 69125 - protein, 10 aa, synthetic construct
SNQRGDHGVL

SEQ ID NO: 69126 - protein, 10 aa, synthetic construct
SNQRGDHVNL

SEQ ID NO: 69127 - protein, 10 aa, synthetic construct
AAHRGDLTVT

SEQ ID NO: 69128 - protein, 10 aa, synthetic construct
SNQRGDRDYL

SEQ ID NO: 69129 - protein, 10 aa, synthetic construct
SNQRGDYSSV

SEQ ID NO: 69130 - protein, 10 aa, synthetic construct
SNQRGDLTVT

SEQ ID NO: 69131 - protein, 10 aa, synthetic construct
SNDRGDHGVL

SEQ ID NO: 69132 - protein, 10 aa, synthetic construct
SNDRGDHVNL

SEQ ID NO: 69133 - protein, 10 aa, synthetic construct
SNDRGDRDYL

SEQ ID NO: 69134 - protein, 10 aa, synthetic construct
SNDRGDYSSV

SEQ ID NO: 69135 - protein, 10 aa, synthetic construct
SNDRGDLTVT

SEQ ID NO: 69136 - protein, 10 aa, synthetic construct
SNERGDHGVL

SEQ ID NO: 69137 - protein, 10 aa, synthetic construct
SNERGDHVNL

SEQ ID NO: 69138 - protein, 10 aa, synthetic construct
AAHRGDLIGR

SEQ ID NO: 69139 - protein, 10 aa, synthetic construct
SNERGDRDYL

SEQ ID NO: 69140 - protein, 10 aa, synthetic construct
SNERGDYSSV

SEQ ID NO: 69141 - protein, 10 aa, synthetic construct
SNERGDLTVT

SEQ ID NO: 69142 - protein, 10 aa, synthetic construct
SQGRGDYNSL

SEQ ID NO: 69143 - protein, 10 aa, synthetic construct
SQGRGDYTSV

SEQ ID NO: 69144 - protein, 10 aa, synthetic construct
SQGRGDYTSM

SEQ ID NO: 69145 - protein, 10 aa, synthetic construct
SQGRGDFQNT

SEQ ID NO: 69146 - protein, 10 aa, synthetic construct
SQARGDYNSL

SEQ ID NO: 69147 - protein, 10 aa, synthetic construct
SQARGDYTSV

SEQ ID NO: 69148 - protein, 10 aa, synthetic construct
SQARGDYTSM

SEQ ID NO: 69149 - protein, 10 aa, synthetic construct
AAHRGDRSQT

SEQ ID NO: 69150 - protein, 10 aa, synthetic construct
SQARGDFQNT

SEQ ID NO: 69151 - protein, 10 aa, synthetic construct
SQVRGDRDYL

SEQ ID NO: 69152 - protein, 10 aa, synthetic construct
SQVRGDYTSV

SEQ ID NO: 69153 - protein, 10 aa, synthetic construct
SQVRGDLTVT

SEQ ID NO: 69154 - protein, 10 aa, synthetic construct
SQVRGDLIGR

SEQ ID NO: 69155 - protein, 10 aa, synthetic construct
SQPRGDYNSL

SEQ ID NO: 69156 - protein, 10 aa, synthetic construct
SQPRGDYTSV

SEQ ID NO: 69157 - protein, 10 aa, synthetic construct
SQPRGDYTSM

SEQ ID NO: 69158 - protein, 10 aa, synthetic construct
SQPRGDFQNT

SEQ ID NO: 69159 - protein, 10 aa, synthetic construct
SQLRGDRDYL

SEQ ID NO: 69160 - protein, 10 aa, synthetic construct
AAHRGDLLLS

SEQ ID NO: 69161 - protein, 10 aa, synthetic construct
SQLRGDYTSV

SEQ ID NO: 69162 - protein, 10 aa, synthetic construct
SQLRGDLTVT

SEQ ID NO: 69163 - protein, 10 aa, synthetic construct
SQLRGDLIGR

SEQ ID NO: 69164 - protein, 10 aa, synthetic construct
SQIRGDHGVL

SEQ ID NO: 69165 - protein, 10 aa, synthetic construct
SQIRGDHVNL

SEQ ID NO: 69166 - protein, 10 aa, synthetic construct
SQIRGDRDYL

SEQ ID NO: 69167 - protein, 10 aa, synthetic construct
SQIRGDYSSV

SEQ ID NO: 69168 - protein, 10 aa, synthetic construct
SQIRGDLTVT

SEQ ID NO: 69169 - protein, 10 aa, synthetic construct
SQMRGDHGVL

SEQ ID NO: 69170 - protein, 10 aa, synthetic construct
SQMRGDHVNL

SEQ ID NO: 69171 - protein, 10 aa, synthetic construct
AASRGDRDYL

SEQ ID NO: 69172 - protein, 10 aa, synthetic construct
SQMRGDRDYL

SEQ ID NO: 69173 - protein, 10 aa, synthetic construct
SQMRGDYSSV

SEQ ID NO: 69174 - protein, 10 aa, synthetic construct
SQMRGDLTVT

SEQ ID NO: 69175 - protein, 10 aa, synthetic construct
SQWRGDRDYL

SEQ ID NO: 69176 - protein, 10 aa, synthetic construct
SQWRGDYTSV

SEQ ID NO: 69177 - protein, 10 aa, synthetic construct
SQWRGDLTVT

SEQ ID NO: 69178 - protein, 10 aa, synthetic construct
SQWRGDLIGR

SEQ ID NO: 69179 - protein, 10 aa, synthetic construct
SQFRGDHGVL

SEQ ID NO: 69180 - protein, 10 aa, synthetic construct
SQFRGDHVNL

SEQ ID NO: 69181 - protein, 10 aa, synthetic construct
SQFRGDRDYL

SEQ ID NO: 69182 - protein, 10 aa, synthetic construct
SSPRGDYVGL

SEQ ID NO: 69183 - protein, 10 aa, synthetic construct
AASRGDYVGL

SEQ ID NO: 69184 - protein, 10 aa, synthetic construct
SQFRGDYSSV

SEQ ID NO: 69185 - protein, 10 aa, synthetic construct
SQFRGDLTVT

SEQ ID NO: 69186 - protein, 10 aa, synthetic construct
SQKRGDHGVL

SEQ ID NO: 69187 - protein, 10 aa, synthetic construct
SQKRGDHVNL

SEQ ID NO: 69188 - protein, 10 aa, synthetic construct
SQKRGDRDYL

SEQ ID NO: 69189 - protein, 10 aa, synthetic construct
SQKRGDYSSV

SEQ ID NO: 69190 - protein, 10 aa, synthetic construct
SQKRGDLTVT

SEQ ID NO: 69191 - protein, 10 aa, synthetic construct
SQRRGDYNSL

SEQ ID NO: 69192 - protein, 10 aa, synthetic construct
SQRRGDYTSV

SEQ ID NO: 69193 - protein, 10 aa, synthetic construct
SQRRGDYTSM

SEQ ID NO: 69194 - protein, 10 aa, synthetic construct
AASRGDQSTL

SEQ ID NO: 69195 - protein, 10 aa, synthetic construct
SQRRGDFQNT

SEQ ID NO: 69196 - protein, 10 aa, synthetic construct
SQHRGDRDYL

SEQ ID NO: 69197 - protein, 10 aa, synthetic construct
SQHRGDYTSV

SEQ ID NO: 69198 - protein, 10 aa, synthetic construct
SQHRGDLTVT

SEQ ID NO: 69199 - protein, 10 aa, synthetic construct
SQHRGDLIGR

SEQ ID NO: 69200 - protein, 10 aa, synthetic construct
SQSRGDRDYL

SEQ ID NO: 69201 - protein, 10 aa, synthetic construct
SQSRGDYTSV

SEQ ID NO: 69202 - protein, 10 aa, synthetic construct
SQSRGDLTVT

SEQ ID NO: 69203 - protein, 10 aa, synthetic construct
SQSRGDLIGR

SEQ ID NO: 69204 - protein, 10 aa, synthetic construct
SQTRGDRDYL

SEQ ID NO: 69205 - protein, 10 aa, synthetic construct
AATRGDHGVL

SEQ ID NO: 69206 - protein, 10 aa, synthetic construct
SQTRGDYTSV

SEQ ID NO: 69207 - protein, 10 aa, synthetic construct
SQTRGDLTVT

SEQ ID NO: 69208 - protein, 10 aa, synthetic construct
SQTRGDLIGR

SEQ ID NO: 69209 - protein, 10 aa, synthetic construct
SQYRGDHGVL

SEQ ID NO: 69210 - protein, 10 aa, synthetic construct
SQYRGDHVNL

SEQ ID NO: 69211 - protein, 10 aa, synthetic construct
SQYRGDRDYL

SEQ ID NO: 69212 - protein, 10 aa, synthetic construct
SQYRGDYSSV

SEQ ID NO: 69213 - protein, 10 aa, synthetic construct
SQYRGDLTVT

SEQ ID NO: 69214 - protein, 10 aa, synthetic construct
SQNRGDHGVL

SEQ ID NO: 69215 - protein, 10 aa, synthetic construct
SQNRGDHVNL

SEQ ID NO: 69216 - protein, 10 aa, synthetic construct
AATRGDRGQI

SEQ ID NO: 69217 - protein, 10 aa, synthetic construct
SQNRGDRDYL

SEQ ID NO: 69218 - protein, 10 aa, synthetic construct
SQNRGDYSSV

SEQ ID NO: 69219 - protein, 10 aa, synthetic construct
SQNRGDLTVT

SEQ ID NO: 69220 - protein, 10 aa, synthetic construct
SQQRGDRDYL

SEQ ID NO: 69221 - protein, 10 aa, synthetic construct
SQQRGDYTSV

SEQ ID NO: 69222 - protein, 10 aa, synthetic construct
SQQRGDLTVT

SEQ ID NO: 69223 - protein, 10 aa, synthetic construct
SQQRGDLIGR

SEQ ID NO: 69224 - protein, 10 aa, synthetic construct
SQDRGDRDYL

SEQ ID NO: 69225 - protein, 10 aa, synthetic construct
SQDRGDYTSV

SEQ ID NO: 69226 - protein, 10 aa, synthetic construct
SQDRGDLTVT

SEQ ID NO: 69227 - protein, 10 aa, synthetic construct
AATRGDRQGI

SEQ ID NO: 69228 - protein, 10 aa, synthetic construct
SQDRGDLIGR

SEQ ID NO: 69229 - protein, 10 aa, synthetic construct
SQERGDRDYL

SEQ ID NO: 69230 - protein, 10 aa, synthetic construct
SQERGDYTSV

SEQ ID NO: 69231 - protein, 10 aa, synthetic construct
SQERGDLTVT

SEQ ID NO: 69232 - protein, 10 aa, synthetic construct
SQERGDLIGR

SEQ ID NO: 69233 - protein, 10 aa, synthetic construct
SDGRGDYNSL

SEQ ID NO: 69234 - protein, 10 aa, synthetic construct
SDGRGDYTSV

SEQ ID NO: 69235 - protein, 10 aa, synthetic construct
SDGRGDYTSM

SEQ ID NO: 69236 - protein, 10 aa, synthetic construct
SDGRGDFQNT

SEQ ID NO: 69237 - protein, 10 aa, synthetic construct
SDARGDYNSL

SEQ ID NO: 69238 - protein, 10 aa, synthetic construct
AATRGDRSVV

SEQ ID NO: 69239 - protein, 10 aa, synthetic construct
SDARGDYTSV

SEQ ID NO: 69240 - protein, 10 aa, synthetic construct
SDARGDYTSM

SEQ ID NO: 69241 - protein, 10 aa, synthetic construct
SDARGDFQNT

SEQ ID NO: 69242 - protein, 10 aa, synthetic construct
SDVRGDRDYL

SEQ ID NO: 69243 - protein, 10 aa, synthetic construct
SDVRGDYTSV

SEQ ID NO: 69244 - protein, 10 aa, synthetic construct
SDVRGDLTVT

SEQ ID NO: 69245 - protein, 10 aa, synthetic construct
SDVRGDLIGR

SEQ ID NO: 69246 - protein, 10 aa, synthetic construct
SDPRGDYNSL

SEQ ID NO: 69247 - protein, 10 aa, synthetic construct
SDPRGDYTSV

SEQ ID NO: 69248 - protein, 10 aa, synthetic construct
SDPRGDYTSM

SEQ ID NO: 69249 - protein, 10 aa, synthetic construct
AATRGDLTVT

SEQ ID NO: 69250 - protein, 10 aa, synthetic construct
SDPRGDFQNT

SEQ ID NO: 69251 - protein, 10 aa, synthetic construct
SDLRGDRDYL

SEQ ID NO: 69252 - protein, 10 aa, synthetic construct
SDLRGDYTSV

SEQ ID NO: 69253 - protein, 10 aa, synthetic construct
SDLRGDLTVT

SEQ ID NO: 69254 - protein, 10 aa, synthetic construct
SDLRGDLIGR

SEQ ID NO: 69255 - protein, 10 aa, synthetic construct
SDIRGDHGVL

SEQ ID NO: 69256 - protein, 10 aa, synthetic construct
SDIRGDHVNL

SEQ ID NO: 69257 - protein, 10 aa, synthetic construct
SDIRGDRDYL

SEQ ID NO: 69258 - protein, 10 aa, synthetic construct
SDIRGDYSSV

SEQ ID NO: 69259 - protein, 10 aa, synthetic construct
SDIRGDLTVT

SEQ ID NO: 69260 - protein, 10 aa, synthetic construct
AATRGDLIGR

SEQ ID NO: 69261 - protein, 10 aa, synthetic construct
SDMRGDHGVL

SEQ ID NO: 69262 - protein, 10 aa, synthetic construct
SDMRGDHVNL

SEQ ID NO: 69263 - protein, 10 aa, synthetic construct
SDMRGDRDYL

SEQ ID NO: 69264 - protein, 10 aa, synthetic construct
SDMRGDYSSV

SEQ ID NO: 69265 - protein, 10 aa, synthetic construct
SDMRGDLTVT

SEQ ID NO: 69266 - protein, 10 aa, synthetic construct
SDWRGDRDYL

SEQ ID NO: 69267 - protein, 10 aa, synthetic construct
SDWRGDYTSV

SEQ ID NO: 69268 - protein, 10 aa, synthetic construct
SDWRGDLTVT

SEQ ID NO: 69269 - protein, 10 aa, synthetic construct
SDWRGDLIGR

SEQ ID NO: 69270 - protein, 10 aa, synthetic construct
SDFRGDHGVL

SEQ ID NO: 69271 - protein, 10 aa, synthetic construct
AATRGDRSQT

SEQ ID NO: 69272 - protein, 10 aa, synthetic construct
SDFRGDHVNL

SEQ ID NO: 69273 - protein, 10 aa, synthetic construct
SDFRGDRDYL

SEQ ID NO: 69274 - protein, 10 aa, synthetic construct
SDFRGDYSSV

SEQ ID NO: 69275 - protein, 10 aa, synthetic construct
SDFRGDLTVT

SEQ ID NO: 69276 - protein, 10 aa, synthetic construct
SDKRGDHGVL

SEQ ID NO: 69277 - protein, 10 aa, synthetic construct
SDKRGDHVNL

SEQ ID NO: 69278 - protein, 10 aa, synthetic construct
SDKRGDRDYL

SEQ ID NO: 69279 - protein, 10 aa, synthetic construct
SDKRGDYSSV

SEQ ID NO: 69280 - protein, 10 aa, synthetic construct
SDKRGDLTVT

SEQ ID NO: 69281 - protein, 10 aa, synthetic construct
SDRRGDYNSL

SEQ ID NO: 69282 - protein, 10 aa, synthetic construct
AATRGDLLLS

SEQ ID NO: 69283 - protein, 10 aa, synthetic construct
SDRRGDYTSV

SEQ ID NO: 69284 - protein, 10 aa, synthetic construct
SDRRGDYTSM

SEQ ID NO: 69285 - protein, 10 aa, synthetic construct
SDRRGDFQNT

SEQ ID NO: 69286 - protein, 10 aa, synthetic construct
SDHRGDRDYL

SEQ ID NO: 69287 - protein, 10 aa, synthetic construct
SDHRGDYTSV

SEQ ID NO: 69288 - protein, 10 aa, synthetic construct
SDHRGDLTVT

SEQ ID NO: 69289 - protein, 10 aa, synthetic construct
SDHRGDLIGR

SEQ ID NO: 69290 - protein, 10 aa, synthetic construct
SDSRGDRDYL

SEQ ID NO: 69291 - protein, 10 aa, synthetic construct
SDSRGDYTSV

SEQ ID NO: 69292 - protein, 10 aa, synthetic construct
SDSRGDLTVT

SEQ ID NO: 69293 - protein, 10 aa, synthetic construct
SSPRGDQSTL

SEQ ID NO: 69294 - protein, 10 aa, synthetic construct
AAYRGDRGVV

SEQ ID NO: 69295 - protein, 10 aa, synthetic construct
SDSRGDLIGR

SEQ ID NO: 69296 - protein, 10 aa, synthetic construct
SDTRGDRDYL

SEQ ID NO: 69297 - protein, 10 aa, synthetic construct
SDTRGDYTSV

SEQ ID NO: 69298 - protein, 10 aa, synthetic construct
SDTRGDLTVT

SEQ ID NO: 69299 - protein, 10 aa, synthetic construct
SDTRGDLIGR

SEQ ID NO: 69300 - protein, 10 aa, synthetic construct
SDYRGDHGVL

SEQ ID NO: 69301 - protein, 10 aa, synthetic construct
SDYRGDHVNL

SEQ ID NO: 69302 - protein, 10 aa, synthetic construct
SDYRGDRDYL

SEQ ID NO: 69303 - protein, 10 aa, synthetic construct
SDYRGDYSSV

SEQ ID NO: 69304 - protein, 10 aa, synthetic construct
SDYRGDLTVT

SEQ ID NO: 69305 - protein, 10 aa, synthetic construct
AANRGDRGVV

SEQ ID NO: 69306 - protein, 10 aa, synthetic construct
SDNRGDHGVL

SEQ ID NO: 69307 - protein, 10 aa, synthetic construct
SDNRGDHVNL

SEQ ID NO: 69308 - protein, 10 aa, synthetic construct
SDNRGDRDYL

SEQ ID NO: 69309 - protein, 10 aa, synthetic construct
SDNRGDYSSV

SEQ ID NO: 69310 - protein, 10 aa, synthetic construct
SDNRGDLTVT

SEQ ID NO: 69311 - protein, 10 aa, synthetic construct
SDQRGDRDYL

SEQ ID NO: 69312 - protein, 10 aa, synthetic construct
SDQRGDYTSV

SEQ ID NO: 69313 - protein, 10 aa, synthetic construct
SDQRGDLTVT

SEQ ID NO: 69314 - protein, 10 aa, synthetic construct
SDQRGDLIGR

SEQ ID NO: 69315 - protein, 10 aa, synthetic construct
SDDRGDRDYL

SEQ ID NO: 69316 - protein, 10 aa, synthetic construct
AAQRGDHGVL

SEQ ID NO: 69317 - protein, 10 aa, synthetic construct
SDDRGDYTSV

SEQ ID NO: 69318 - protein, 10 aa, synthetic construct
SDDRGDLTVT

SEQ ID NO: 69319 - protein, 10 aa, synthetic construct
SDDRGDLIGR

SEQ ID NO: 69320 - protein, 10 aa, synthetic construct
SDERGDRDYL

SEQ ID NO: 69321 - protein, 10 aa, synthetic construct
SDERGDYTSV

SEQ ID NO: 69322 - protein, 10 aa, synthetic construct
SDERGDLTVT

SEQ ID NO: 69323 - protein, 10 aa, synthetic construct
SDERGDLIGR

SEQ ID NO: 69324 - protein, 10 aa, synthetic construct
SEGRGDYNSL

SEQ ID NO: 69325 - protein, 10 aa, synthetic construct
SEGRGDYTSV

SEQ ID NO: 69326 - protein, 10 aa, synthetic construct
SEGRGDYTSM

SEQ ID NO: 69327 - protein, 10 aa, synthetic construct
AAQRGDRGQI

SEQ ID NO: 69328 - protein, 10 aa, synthetic construct
SEGRGDFQNT

SEQ ID NO: 69329 - protein, 10 aa, synthetic construct
SEARGDYNSL

SEQ ID NO: 69330 - protein, 10 aa, synthetic construct
SEARGDYTSV

SEQ ID NO: 69331 - protein, 10 aa, synthetic construct
SEARGDYTSM

SEQ ID NO: 69332 - protein, 10 aa, synthetic construct
SEARGDFQNT

SEQ ID NO: 69333 - protein, 10 aa, synthetic construct
SEVRGDRDYL

SEQ ID NO: 69334 - protein, 10 aa, synthetic construct
SEVRGDYTSV

SEQ ID NO: 69335 - protein, 10 aa, synthetic construct
SEVRGDLTVT

SEQ ID NO: 69336 - protein, 10 aa, synthetic construct
SEVRGDLIGR

SEQ ID NO: 69337 - protein, 10 aa, synthetic construct
SEPRGDYNSL

SEQ ID NO: 69338 - protein, 10 aa, synthetic construct
AAQRGDRQGI

SEQ ID NO: 69339 - protein, 10 aa, synthetic construct
SEPRGDYTSV

SEQ ID NO: 69340 - protein, 10 aa, synthetic construct
SEPRGDYTSM

SEQ ID NO: 69341 - protein, 10 aa, synthetic construct
SEPRGDFQNT

SEQ ID NO: 69342 - protein, 10 aa, synthetic construct
SELRGDRDYL

SEQ ID NO: 69343 - protein, 10 aa, synthetic construct
SELRGDYTSV

SEQ ID NO: 69344 - protein, 10 aa, synthetic construct
SELRGDLTVT

SEQ ID NO: 69345 - protein, 10 aa, synthetic construct
SELRGDLIGR

SEQ ID NO: 69346 - protein, 10 aa, synthetic construct
SEIRGDHGVL

SEQ ID NO: 69347 - protein, 10 aa, synthetic construct
SEIRGDHVNL

SEQ ID NO: 69348 - protein, 10 aa, synthetic construct
SEIRGDRDYL

SEQ ID NO: 69349 - protein, 10 aa, synthetic construct
AAQRGDRSVV

SEQ ID NO: 69350 - protein, 10 aa, synthetic construct
SEIRGDYSSV

SEQ ID NO: 69351 - protein, 10 aa, synthetic construct
SEIRGDLTVT

SEQ ID NO: 69352 - protein, 10 aa, synthetic construct
SEMRGDHGVL

SEQ ID NO: 69353 - protein, 10 aa, synthetic construct
SEMRGDHVNL

SEQ ID NO: 69354 - protein, 10 aa, synthetic construct
SEMRGDRDYL

SEQ ID NO: 69355 - protein, 10 aa, synthetic construct
SEMRGDYSSV

SEQ ID NO: 69356 - protein, 10 aa, synthetic construct
SEMRGDLTVT

SEQ ID NO: 69357 - protein, 10 aa, synthetic construct
SEWRGDRDYL

SEQ ID NO: 69358 - protein, 10 aa, synthetic construct
SEWRGDYTSV

SEQ ID NO: 69359 - protein, 10 aa, synthetic construct
SEWRGDLTVT

SEQ ID NO: 69360 - protein, 10 aa, synthetic construct
AAQRGDLTVT

SEQ ID NO: 69361 - protein, 10 aa, synthetic construct
SEWRGDLIGR

SEQ ID NO: 69362 - protein, 10 aa, synthetic construct
SEFRGDHGVL

SEQ ID NO: 69363 - protein, 10 aa, synthetic construct
SEFRGDHVNL

SEQ ID NO: 69364 - protein, 10 aa, synthetic construct
SEFRGDRDYL

SEQ ID NO: 69365 - protein, 10 aa, synthetic construct
SEFRGDYSSV

SEQ ID NO: 69366 - protein, 10 aa, synthetic construct
SEFRGDLTVT

SEQ ID NO: 69367 - protein, 10 aa, synthetic construct
SEKRGDHGVL

SEQ ID NO: 69368 - protein, 10 aa, synthetic construct
SEKRGDHVNL

SEQ ID NO: 69369 - protein, 10 aa, synthetic construct
SEKRGDRDYL

SEQ ID NO: 69370 - protein, 10 aa, synthetic construct
SEKRGDYSSV

SEQ ID NO: 69371 - protein, 10 aa, synthetic construct
AAQRGDLIGR

SEQ ID NO: 69372 - protein, 10 aa, synthetic construct
SEKRGDLTVT

SEQ ID NO: 69373 - protein, 10 aa, synthetic construct
SERRGDYNSL

SEQ ID NO: 69374 - protein, 10 aa, synthetic construct
SERRGDYTSV

SEQ ID NO: 69375 - protein, 10 aa, synthetic construct
SERRGDYTSM

SEQ ID NO: 69376 - protein, 10 aa, synthetic construct
SERRGDFQNT

SEQ ID NO: 69377 - protein, 10 aa, synthetic construct
SEHRGDRDYL

SEQ ID NO: 69378 - protein, 10 aa, synthetic construct
SEHRGDYTSV

SEQ ID NO: 69379 - protein, 10 aa, synthetic construct
SEHRGDLTVT

SEQ ID NO: 69380 - protein, 10 aa, synthetic construct
SEHRGDLIGR

SEQ ID NO: 69381 - protein, 10 aa, synthetic construct
SESRGDRDYL

SEQ ID NO: 69382 - protein, 10 aa, synthetic construct
AAQRGDRSQT

SEQ ID NO: 69383 - protein, 10 aa, synthetic construct
SESRGDYTSV

SEQ ID NO: 69384 - protein, 10 aa, synthetic construct
SESRGDLTVT

SEQ ID NO: 69385 - protein, 10 aa, synthetic construct
SESRGDLIGR

SEQ ID NO: 69386 - protein, 10 aa, synthetic construct
SETRGDRDYL

SEQ ID NO: 69387 - protein, 10 aa, synthetic construct
SETRGDYTSV

SEQ ID NO: 69388 - protein, 10 aa, synthetic construct
SETRGDLTVT

SEQ ID NO: 69389 - protein, 10 aa, synthetic construct
SETRGDLIGR

SEQ ID NO: 69390 - protein, 10 aa, synthetic construct
SEYRGDHGVL

SEQ ID NO: 69391 - protein, 10 aa, synthetic construct
SEYRGDHVNL

SEQ ID NO: 69392 - protein, 10 aa, synthetic construct
SEYRGDRDYL

SEQ ID NO: 69393 - protein, 10 aa, synthetic construct
AAQRGDLLLS

SEQ ID NO: 69394 - protein, 10 aa, synthetic construct
SEYRGDYSSV

SEQ ID NO: 69395 - protein, 10 aa, synthetic construct
SEYRGDLTVT

SEQ ID NO: 69396 - protein, 10 aa, synthetic construct
SENRGDHGVL

SEQ ID NO: 69397 - protein, 10 aa, synthetic construct
SENRGDHVNL

SEQ ID NO: 69398 - protein, 10 aa, synthetic construct
SENRGDRDYL

SEQ ID NO: 69399 - protein, 10 aa, synthetic construct
SENRGDYSSV

SEQ ID NO: 69400 - protein, 10 aa, synthetic construct
SENRGDLTVT

SEQ ID NO: 69401 - protein, 10 aa, synthetic construct
SEQRGDRDYL

SEQ ID NO: 69402 - protein, 10 aa, synthetic construct
SEQRGDYTSV

SEQ ID NO: 69403 - protein, 10 aa, synthetic construct
SEQRGDLTVT

SEQ ID NO: 69404 - protein, 10 aa, synthetic construct
SSPRGDLLLS

SEQ ID NO: 69405 - protein, 10 aa, synthetic construct
AADRGDHGVL

SEQ ID NO: 69406 - protein, 10 aa, synthetic construct
SEQRGDLIGR

SEQ ID NO: 69407 - protein, 10 aa, synthetic construct
SEDRGDRDYL

SEQ ID NO: 69408 - protein, 10 aa, synthetic construct
SEDRGDYTSV

SEQ ID NO: 69409 - protein, 10 aa, synthetic construct
SEDRGDLTVT

SEQ ID NO: 69410 - protein, 10 aa, synthetic construct
SEDRGDLIGR

SEQ ID NO: 69411 - protein, 10 aa, synthetic construct
SEERGDRDYL

SEQ ID NO: 69412 - protein, 10 aa, synthetic construct
SEERGDYTSV

SEQ ID NO: 69413 - protein, 10 aa, synthetic construct
SEERGDLTVT

SEQ ID NO: 69414 - protein, 10 aa, synthetic construct
SEERGDLIGR

SEQ ID NO: 69415 - protein, 10 aa, synthetic construct
TGGRGDYNSL

SEQ ID NO: 69416 - protein, 10 aa, synthetic construct
AADRGDRGQI

SEQ ID NO: 69417 - protein, 10 aa, synthetic construct
TGGRGDFNNT

SEQ ID NO: 69418 - protein, 10 aa, synthetic construct
TGGRGDFNNL

SEQ ID NO: 69419 - protein, 10 aa, synthetic construct
TGGRGDFQNT

SEQ ID NO: 69420 - protein, 10 aa, synthetic construct
TGARGDYNSL

SEQ ID NO: 69421 - protein, 10 aa, synthetic construct
TGARGDFNNT

SEQ ID NO: 69422 - protein, 10 aa, synthetic construct
TGARGDFNNL

SEQ ID NO: 69423 - protein, 10 aa, synthetic construct
TGARGDFQNT

SEQ ID NO: 69424 - protein, 10 aa, synthetic construct
TGVRGDYNSL

SEQ ID NO: 69425 - protein, 10 aa, synthetic construct
TGVRGDYTSV

SEQ ID NO: 69426 - protein, 10 aa, synthetic construct
TGVRGDYTSM

SEQ ID NO: 69427 - protein, 10 aa, synthetic construct
AADRGDRQGI

SEQ ID NO: 69428 - protein, 10 aa, synthetic construct
TGVRGDFQNT

SEQ ID NO: 69429 - protein, 10 aa, synthetic construct
TGPRGDYNSL

SEQ ID NO: 69430 - protein, 10 aa, synthetic construct
TGPRGDFNNT

SEQ ID NO: 69431 - protein, 10 aa, synthetic construct
TGPRGDFNNL

SEQ ID NO: 69432 - protein, 10 aa, synthetic construct
TGPRGDFQNT

SEQ ID NO: 69433 - protein, 10 aa, synthetic construct
TGLRGDYNSL

SEQ ID NO: 69434 - protein, 10 aa, synthetic construct
TGLRGDYTSV

SEQ ID NO: 69435 - protein, 10 aa, synthetic construct
TGLRGDYTSM

SEQ ID NO: 69436 - protein, 10 aa, synthetic construct
TGLRGDFQNT

SEQ ID NO: 69437 - protein, 10 aa, synthetic construct
TGIRGDRDYL

SEQ ID NO: 69438 - protein, 10 aa, synthetic construct
AADRGDRSVV

SEQ ID NO: 69439 - protein, 10 aa, synthetic construct
TGIRGDYTSV

SEQ ID NO: 69440 - protein, 10 aa, synthetic construct
TGIRGDLTVT

SEQ ID NO: 69441 - protein, 10 aa, synthetic construct
TGIRGDLIGR

SEQ ID NO: 69442 - protein, 10 aa, synthetic construct
TGMRGDRDYL

SEQ ID NO: 69443 - protein, 10 aa, synthetic construct
TGMRGDYTSV

SEQ ID NO: 69444 - protein, 10 aa, synthetic construct
TGMRGDLTVT

SEQ ID NO: 69445 - protein, 10 aa, synthetic construct
TGMRGDLIGR

SEQ ID NO: 69446 - protein, 10 aa, synthetic construct
TGWRGDYNSL

SEQ ID NO: 69447 - protein, 10 aa, synthetic construct
TGWRGDYTSV

SEQ ID NO: 69448 - protein, 10 aa, synthetic construct
TGWRGDYTSM

SEQ ID NO: 69449 - protein, 10 aa, synthetic construct
AADRGDLTVT

SEQ ID NO: 69450 - protein, 10 aa, synthetic construct
TGWRGDFQNT

SEQ ID NO: 69451 - protein, 10 aa, synthetic construct
TGFRGDRDYL

SEQ ID NO: 69452 - protein, 10 aa, synthetic construct
TGFRGDYTSV

SEQ ID NO: 69453 - protein, 10 aa, synthetic construct
TGFRGDLTVT

SEQ ID NO: 69454 - protein, 10 aa, synthetic construct
TGFRGDLIGR

SEQ ID NO: 69455 - protein, 10 aa, synthetic construct
TGKRGDRDYL

SEQ ID NO: 69456 - protein, 10 aa, synthetic construct
TGKRGDYTSV

SEQ ID NO: 69457 - protein, 10 aa, synthetic construct
TGKRGDLTVT

SEQ ID NO: 69458 - protein, 10 aa, synthetic construct
TGKRGDLIGR

SEQ ID NO: 69459 - protein, 10 aa, synthetic construct
TGRRGDYNSL

SEQ ID NO: 69460 - protein, 10 aa, synthetic construct
AADRGDLIGR

SEQ ID NO: 69461 - protein, 10 aa, synthetic construct
TGRRGDFNNT

SEQ ID NO: 69462 - protein, 10 aa, synthetic construct
TGRRGDFNNL

SEQ ID NO: 69463 - protein, 10 aa, synthetic construct
TGRRGDFQNT

SEQ ID NO: 69464 - protein, 10 aa, synthetic construct
TGHRGDYNSL

SEQ ID NO: 69465 - protein, 10 aa, synthetic construct
TGHRGDYTSV

SEQ ID NO: 69466 - protein, 10 aa, synthetic construct
TGHRGDYTSM

SEQ ID NO: 69467 - protein, 10 aa, synthetic construct
TGHRGDFQNT

SEQ ID NO: 69468 - protein, 10 aa, synthetic construct
TGSRGDYNSL

SEQ ID NO: 69469 - protein, 10 aa, synthetic construct
TGSRGDYTSV

SEQ ID NO: 69470 - protein, 10 aa, synthetic construct
TGSRGDYTSM

SEQ ID NO: 69471 - protein, 10 aa, synthetic construct
AADRGDRSQT

SEQ ID NO: 69472 - protein, 10 aa, synthetic construct
TGSRGDFQNT

SEQ ID NO: 69473 - protein, 10 aa, synthetic construct
TGTRGDYNSL

SEQ ID NO: 69474 - protein, 10 aa, synthetic construct
TGTRGDYTSV

SEQ ID NO: 69475 - protein, 10 aa, synthetic construct
TGTRGDYTSM

SEQ ID NO: 69476 - protein, 10 aa, synthetic construct
TGTRGDFQNT

SEQ ID NO: 69477 - protein, 10 aa, synthetic construct
TGYRGDRDYL

SEQ ID NO: 69478 - protein, 10 aa, synthetic construct
TGYRGDYTSV

SEQ ID NO: 69479 - protein, 10 aa, synthetic construct
TGYRGDLTVT

SEQ ID NO: 69480 - protein, 10 aa, synthetic construct
TGYRGDLIGR

SEQ ID NO: 69481 - protein, 10 aa, synthetic construct
TGNRGDRDYL

SEQ ID NO: 69482 - protein, 10 aa, synthetic construct
AADRGDLLLS

SEQ ID NO: 69483 - protein, 10 aa, synthetic construct
TGNRGDYTSV

SEQ ID NO: 69484 - protein, 10 aa, synthetic construct
TGNRGDLTVT

SEQ ID NO: 69485 - protein, 10 aa, synthetic construct
TGNRGDLIGR

SEQ ID NO: 69486 - protein, 10 aa, synthetic construct
TGQRGDYNSL

SEQ ID NO: 69487 - protein, 10 aa, synthetic construct
TGQRGDYTSV

SEQ ID NO: 69488 - protein, 10 aa, synthetic construct
TGQRGDYTSM

SEQ ID NO: 69489 - protein, 10 aa, synthetic construct
TGQRGDFQNT

SEQ ID NO: 69490 - protein, 10 aa, synthetic construct
TGDRGDYNSL

SEQ ID NO: 69491 - protein, 10 aa, synthetic construct
TGDRGDYTSV

SEQ ID NO: 69492 - protein, 10 aa, synthetic construct
TGDRGDYTSM

SEQ ID NO: 69493 - protein, 10 aa, synthetic construct
AAERGDHGVL

SEQ ID NO: 69494 - protein, 10 aa, synthetic construct
TGDRGDFQNT

SEQ ID NO: 69495 - protein, 10 aa, synthetic construct
TGERGDYNSL

SEQ ID NO: 69496 - protein, 10 aa, synthetic construct
TGERGDYTSV

SEQ ID NO: 69497 - protein, 10 aa, synthetic construct
TGERGDYTSM

SEQ ID NO: 69498 - protein, 10 aa, synthetic construct
TGERGDFQNT

SEQ ID NO: 69499 - protein, 10 aa, synthetic construct
TAGRGDYNSL

SEQ ID NO: 69500 - protein, 10 aa, synthetic construct
TAGRGDFNNT

SEQ ID NO: 69501 - protein, 10 aa, synthetic construct
TAGRGDFNNL

SEQ ID NO: 69502 - protein, 10 aa, synthetic construct
TAGRGDFQNT

SEQ ID NO: 69503 - protein, 10 aa, synthetic construct
TAARGDYNSL

SEQ ID NO: 69504 - protein, 10 aa, synthetic construct
AAERGDRGQI

SEQ ID NO: 69505 - protein, 10 aa, synthetic construct
TAARGDFNNT

SEQ ID NO: 69506 - protein, 10 aa, synthetic construct
TAARGDFNNL

SEQ ID NO: 69507 - protein, 10 aa, synthetic construct
TAARGDFQNT

SEQ ID NO: 69508 - protein, 10 aa, synthetic construct
TAVRGDYNSL

SEQ ID NO: 69509 - protein, 10 aa, synthetic construct
TAVRGDYTSV

SEQ ID NO: 69510 - protein, 10 aa, synthetic construct
TAVRGDYTSM

SEQ ID NO: 69511 - protein, 10 aa, synthetic construct
TAVRGDFQNT

SEQ ID NO: 69512 - protein, 10 aa, synthetic construct
TAPRGDYNSL

SEQ ID NO: 69513 - protein, 10 aa, synthetic construct
TAPRGDFNNT

SEQ ID NO: 69514 - protein, 10 aa, synthetic construct
TAPRGDFNNL

SEQ ID NO: 69515 - protein, 10 aa, synthetic construct
SKNRGDHGVL

SEQ ID NO: 69516 - protein, 10 aa, synthetic construct
TSPRGDHGVL

SEQ ID NO: 69517 - protein, 10 aa, synthetic construct
AAERGDRQGI

SEQ ID NO: 69518 - protein, 10 aa, synthetic construct
TAPRGDFQNT

SEQ ID NO: 69519 - protein, 10 aa, synthetic construct
TALRGDYNSL

SEQ ID NO: 69520 - protein, 10 aa, synthetic construct
TALRGDYTSV

SEQ ID NO: 69521 - protein, 10 aa, synthetic construct
TALRGDYTSM

SEQ ID NO: 69522 - protein, 10 aa, synthetic construct
TALRGDFQNT

SEQ ID NO: 69523 - protein, 10 aa, synthetic construct
TAIRGDRDYL

SEQ ID NO: 69524 - protein, 10 aa, synthetic construct
TAIRGDYTSV

SEQ ID NO: 69525 - protein, 10 aa, synthetic construct
TAIRGDLTVT

SEQ ID NO: 69526 - protein, 10 aa, synthetic construct
TAIRGDLIGR

SEQ ID NO: 69527 - protein, 10 aa, synthetic construct
TAMRGDRDYL

SEQ ID NO: 69528 - protein, 10 aa, synthetic construct
AAERGDRSVV

SEQ ID NO: 69529 - protein, 10 aa, synthetic construct
TAMRGDYTSV

SEQ ID NO: 69530 - protein, 10 aa, synthetic construct
TAMRGDLTVT

SEQ ID NO: 69531 - protein, 10 aa, synthetic construct
TAMRGDLIGR

SEQ ID NO: 69532 - protein, 10 aa, synthetic construct
TAWRGDYNSL

SEQ ID NO: 69533 - protein, 10 aa, synthetic construct
TAWRGDYTSV

SEQ ID NO: 69534 - protein, 10 aa, synthetic construct
TAWRGDYTSM

SEQ ID NO: 69535 - protein, 10 aa, synthetic construct
TAWRGDFQNT

SEQ ID NO: 69536 - protein, 10 aa, synthetic construct
TAFRGDRDYL

SEQ ID NO: 69537 - protein, 10 aa, synthetic construct
TAFRGDYTSV

SEQ ID NO: 69538 - protein, 10 aa, synthetic construct
TAFRGDLTVT

SEQ ID NO: 69539 - protein, 10 aa, synthetic construct
AAERGDLTVT

SEQ ID NO: 69540 - protein, 10 aa, synthetic construct
TAFRGDLIGR

SEQ ID NO: 69541 - protein, 10 aa, synthetic construct
TAKRGDRDYL

SEQ ID NO: 69542 - protein, 10 aa, synthetic construct
TAKRGDYTSV

SEQ ID NO: 69543 - protein, 10 aa, synthetic construct
TAKRGDLTVT

SEQ ID NO: 69544 - protein, 10 aa, synthetic construct
TAKRGDLIGR

SEQ ID NO: 69545 - protein, 10 aa, synthetic construct
TARRGDYNSL

SEQ ID NO: 69546 - protein, 10 aa, synthetic construct
TARRGDFNNT

SEQ ID NO: 69547 - protein, 10 aa, synthetic construct
TARRGDFNNL

SEQ ID NO: 69548 - protein, 10 aa, synthetic construct
TARRGDFQNT

SEQ ID NO: 69549 - protein, 10 aa, synthetic construct
TAHRGDYNSL

SEQ ID NO: 69550 - protein, 10 aa, synthetic construct
AAERGDLIGR

SEQ ID NO: 69551 - protein, 10 aa, synthetic construct
TAHRGDYTSV

SEQ ID NO: 69552 - protein, 10 aa, synthetic construct
TAHRGDYTSM

SEQ ID NO: 69553 - protein, 10 aa, synthetic construct
TAHRGDFQNT

SEQ ID NO: 69554 - protein, 10 aa, synthetic construct
TASRGDYNSL

SEQ ID NO: 69555 - protein, 10 aa, synthetic construct
TASRGDYTSV

SEQ ID NO: 69556 - protein, 10 aa, synthetic construct
TASRGDYTSM

SEQ ID NO: 69557 - protein, 10 aa, synthetic construct
TASRGDFQNT

SEQ ID NO: 69558 - protein, 10 aa, synthetic construct
TATRGDYNSL

SEQ ID NO: 69559 - protein, 10 aa, synthetic construct
TATRGDYTSV

SEQ ID NO: 69560 - protein, 10 aa, synthetic construct
TATRGDYTSM

SEQ ID NO: 69561 - protein, 10 aa, synthetic construct
AAERGDRSQT

SEQ ID NO: 69562 - protein, 10 aa, synthetic construct
TATRGDFQNT

SEQ ID NO: 69563 - protein, 10 aa, synthetic construct
TAYRGDRDYL

SEQ ID NO: 69564 - protein, 10 aa, synthetic construct
TAYRGDYTSV

SEQ ID NO: 69565 - protein, 10 aa, synthetic construct
TAYRGDLTVT

SEQ ID NO: 69566 - protein, 10 aa, synthetic construct
TAYRGDLIGR

SEQ ID NO: 69567 - protein, 10 aa, synthetic construct
TANRGDRDYL

SEQ ID NO: 69568 - protein, 10 aa, synthetic construct
TANRGDYTSV

SEQ ID NO: 69569 - protein, 10 aa, synthetic construct
TANRGDLTVT

SEQ ID NO: 69570 - protein, 10 aa, synthetic construct
TANRGDLIGR

SEQ ID NO: 69571 - protein, 10 aa, synthetic construct
TAQRGDYNSL

SEQ ID NO: 69572 - protein, 10 aa, synthetic construct
AAERGDLLLS

SEQ ID NO: 69573 - protein, 10 aa, synthetic construct
TAQRGDYTSV

SEQ ID NO: 69574 - protein, 10 aa, synthetic construct
TAQRGDYTSM

SEQ ID NO: 69575 - protein, 10 aa, synthetic construct
TAQRGDFQNT

SEQ ID NO: 69576 - protein, 10 aa, synthetic construct
TADRGDYNSL

SEQ ID NO: 69577 - protein, 10 aa, synthetic construct
TADRGDYTSV

SEQ ID NO: 69578 - protein, 10 aa, synthetic construct
TADRGDYTSM

SEQ ID NO: 69579 - protein, 10 aa, synthetic construct
TADRGDFQNT

SEQ ID NO: 69580 - protein, 10 aa, synthetic construct
TAERGDYNSL

SEQ ID NO: 69581 - protein, 10 aa, synthetic construct
TAERGDYTSV

SEQ ID NO: 69582 - protein, 10 aa, synthetic construct
TAERGDYTSM

SEQ ID NO: 69583 - protein, 10 aa, synthetic construct
AVGRGDHGVL

SEQ ID NO: 69584 - protein, 10 aa, synthetic construct
TAERGDFQNT

SEQ ID NO: 69585 - protein, 10 aa, synthetic construct
TVGRGDFNNT

SEQ ID NO: 69586 - protein, 10 aa, synthetic construct
TVGRGDFNNL

SEQ ID NO: 69587 - protein, 10 aa, synthetic construct
TVARGDFNNT

SEQ ID NO: 69588 - protein, 10 aa, synthetic construct
TVARGDFNNL

SEQ ID NO: 69589 - protein, 10 aa, synthetic construct
TVVRGDYNSL

SEQ ID NO: 69590 - protein, 10 aa, synthetic construct
TVVRGDYTSM

SEQ ID NO: 69591 - protein, 10 aa, synthetic construct
TVVRGDFQNT

SEQ ID NO: 69592 - protein, 10 aa, synthetic construct
TVPRGDFNNT

SEQ ID NO: 69593 - protein, 10 aa, synthetic construct
TVPRGDFNNL

SEQ ID NO: 69594 - protein, 10 aa, synthetic construct
AVGRGDRGQI

SEQ ID NO: 69595 - protein, 10 aa, synthetic construct
TVLRGDYNSL

SEQ ID NO: 69596 - protein, 10 aa, synthetic construct
TVLRGDYTSM

SEQ ID NO: 69597 - protein, 10 aa, synthetic construct
TVLRGDFQNT

SEQ ID NO: 69598 - protein, 10 aa, synthetic construct
TVIRGDYTSV

SEQ ID NO: 69599 - protein, 10 aa, synthetic construct
TVIRGDLIGR

SEQ ID NO: 69600 - protein, 10 aa, synthetic construct
TVMRGDYTSV

SEQ ID NO: 69601 - protein, 10 aa, synthetic construct
TVMRGDLIGR

SEQ ID NO: 69602 - protein, 10 aa, synthetic construct
TVWRGDYNSL

SEQ ID NO: 69603 - protein, 10 aa, synthetic construct
TVWRGDYTSM

SEQ ID NO: 69604 - protein, 10 aa, synthetic construct
TVWRGDFQNT

SEQ ID NO: 69605 - protein, 10 aa, synthetic construct
AVGRGDRQGI

SEQ ID NO: 69606 - protein, 10 aa, synthetic construct
TVFRGDYTSV

SEQ ID NO: 69607 - protein, 10 aa, synthetic construct
TVFRGDLIGR

SEQ ID NO: 69608 - protein, 10 aa, synthetic construct
TVKRGDYTSV

SEQ ID NO: 69609 - protein, 10 aa, synthetic construct
TVKRGDLIGR

SEQ ID NO: 69610 - protein, 10 aa, synthetic construct
TVRRGDFNNT

SEQ ID NO: 69611 - protein, 10 aa, synthetic construct
TVRRGDFNNL

SEQ ID NO: 69612 - protein, 10 aa, synthetic construct
TVHRGDYNSL

SEQ ID NO: 69613 - protein, 10 aa, synthetic construct
TVHRGDYTSM

SEQ ID NO: 69614 - protein, 10 aa, synthetic construct
TVHRGDFQNT

SEQ ID NO: 69615 - protein, 10 aa, synthetic construct
TVSRGDYNSL

SEQ ID NO: 69616 - protein, 10 aa, synthetic construct
AVGRGDRSVV

SEQ ID NO: 69617 - protein, 10 aa, synthetic construct
TVSRGDYTSM

SEQ ID NO: 69618 - protein, 10 aa, synthetic construct
TVSRGDFQNT

SEQ ID NO: 69619 - protein, 10 aa, synthetic construct
TVTRGDYNSL

SEQ ID NO: 69620 - protein, 10 aa, synthetic construct
TVTRGDYTSM

SEQ ID NO: 69621 - protein, 10 aa, synthetic construct
TVTRGDFQNT

SEQ ID NO: 69622 - protein, 10 aa, synthetic construct
TVYRGDYTSV

SEQ ID NO: 69623 - protein, 10 aa, synthetic construct
TVYRGDLIGR

SEQ ID NO: 69624 - protein, 10 aa, synthetic construct
TVNRGDYTSV

SEQ ID NO: 69625 - protein, 10 aa, synthetic construct
TVNRGDLIGR

SEQ ID NO: 69626 - protein, 10 aa, synthetic construct
TVQRGDYNSL

SEQ ID NO: 69627 - protein, 10 aa, synthetic construct
TSPRGDYVGL

SEQ ID NO: 69628 - protein, 10 aa, synthetic construct
AVGRGDLTVT

SEQ ID NO: 69629 - protein, 10 aa, synthetic construct
TVQRGDYTSM

SEQ ID NO: 69630 - protein, 10 aa, synthetic construct
TVQRGDFQNT

SEQ ID NO: 69631 - protein, 10 aa, synthetic construct
TVDRGDYNSL

SEQ ID NO: 69632 - protein, 10 aa, synthetic construct
TVDRGDYTSM

SEQ ID NO: 69633 - protein, 10 aa, synthetic construct
TVDRGDFQNT

SEQ ID NO: 69634 - protein, 10 aa, synthetic construct
TVERGDYNSL

SEQ ID NO: 69635 - protein, 10 aa, synthetic construct
TVERGDYTSM

SEQ ID NO: 69636 - protein, 10 aa, synthetic construct
TVERGDFQNT

SEQ ID NO: 69637 - protein, 10 aa, synthetic construct
TPGRGDYNSL

SEQ ID NO: 69638 - protein, 10 aa, synthetic construct
TPGRGDFNNT

SEQ ID NO: 69639 - protein, 10 aa, synthetic construct
AVGRGDLIGR

SEQ ID NO: 69640 - protein, 10 aa, synthetic construct
TPGRGDFNNL

SEQ ID NO: 69641 - protein, 10 aa, synthetic construct
TPGRGDFQNT

SEQ ID NO: 69642 - protein, 10 aa, synthetic construct
TPARGDYNSL

SEQ ID NO: 69643 - protein, 10 aa, synthetic construct
TPARGDFNNT

SEQ ID NO: 69644 - protein, 10 aa, synthetic construct
TPARGDFNNL

SEQ ID NO: 69645 - protein, 10 aa, synthetic construct
TPARGDFQNT

SEQ ID NO: 69646 - protein, 10 aa, synthetic construct
TPVRGDYNSL

SEQ ID NO: 69647 - protein, 10 aa, synthetic construct
TPVRGDYTSV

SEQ ID NO: 69648 - protein, 10 aa, synthetic construct
TPVRGDYTSM

SEQ ID NO: 69649 - protein, 10 aa, synthetic construct
TPVRGDFQNT

SEQ ID NO: 69650 - protein, 10 aa, synthetic construct
AVGRGDRSQT

SEQ ID NO: 69651 - protein, 10 aa, synthetic construct
TPPRGDYNSL

SEQ ID NO: 69652 - protein, 10 aa, synthetic construct
TPPRGDFNNT

SEQ ID NO: 69653 - protein, 10 aa, synthetic construct
TPPRGDFNNL

SEQ ID NO: 69654 - protein, 10 aa, synthetic construct
TPPRGDFQNT

SEQ ID NO: 69655 - protein, 10 aa, synthetic construct
TPLRGDYNSL

SEQ ID NO: 69656 - protein, 10 aa, synthetic construct
TPLRGDYTSV

SEQ ID NO: 69657 - protein, 10 aa, synthetic construct
TPLRGDYTSM

SEQ ID NO: 69658 - protein, 10 aa, synthetic construct
TPLRGDFQNT

SEQ ID NO: 69659 - protein, 10 aa, synthetic construct
TPIRGDRDYL

SEQ ID NO: 69660 - protein, 10 aa, synthetic construct
TPIRGDYTSV

SEQ ID NO: 69661 - protein, 10 aa, synthetic construct
AVGRGDLLLS

SEQ ID NO: 69662 - protein, 10 aa, synthetic construct
TPIRGDLTVT

SEQ ID NO: 69663 - protein, 10 aa, synthetic construct
TPIRGDLIGR

SEQ ID NO: 69664 - protein, 10 aa, synthetic construct
TPMRGDRDYL

SEQ ID NO: 69665 - protein, 10 aa, synthetic construct
TPMRGDYTSV

SEQ ID NO: 69666 - protein, 10 aa, synthetic construct
TPMRGDLTVT

SEQ ID NO: 69667 - protein, 10 aa, synthetic construct
TPMRGDLIGR

SEQ ID NO: 69668 - protein, 10 aa, synthetic construct
TPWRGDYNSL

SEQ ID NO: 69669 - protein, 10 aa, synthetic construct
TPWRGDYTSV

SEQ ID NO: 69670 - protein, 10 aa, synthetic construct
TPWRGDYTSM

SEQ ID NO: 69671 - protein, 10 aa, synthetic construct
TPWRGDFQNT

SEQ ID NO: 69672 - protein, 10 aa, synthetic construct
AVARGDHGVL

SEQ ID NO: 69673 - protein, 10 aa, synthetic construct
TPFRGDRDYL

SEQ ID NO: 69674 - protein, 10 aa, synthetic construct
TPFRGDYTSV

SEQ ID NO: 69675 - protein, 10 aa, synthetic construct
TPFRGDLTVT

SEQ ID NO: 69676 - protein, 10 aa, synthetic construct
TPFRGDLIGR

SEQ ID NO: 69677 - protein, 10 aa, synthetic construct
TPKRGDRDYL

SEQ ID NO: 69678 - protein, 10 aa, synthetic construct
TPKRGDYTSV

SEQ ID NO: 69679 - protein, 10 aa, synthetic construct
TPKRGDLTVT

SEQ ID NO: 69680 - protein, 10 aa, synthetic construct
TPKRGDLIGR

SEQ ID NO: 69681 - protein, 10 aa, synthetic construct
TPRRGDYNSL

SEQ ID NO: 69682 - protein, 10 aa, synthetic construct
TPRRGDFNNT

SEQ ID NO: 69683 - protein, 10 aa, synthetic construct
AVARGDRGQI

SEQ ID NO: 69684 - protein, 10 aa, synthetic construct
TPRRGDFNNL

SEQ ID NO: 69685 - protein, 10 aa, synthetic construct
TPRRGDFQNT

SEQ ID NO: 69686 - protein, 10 aa, synthetic construct
TPHRGDYNSL

SEQ ID NO: 69687 - protein, 10 aa, synthetic construct
TPHRGDYTSV

SEQ ID NO: 69688 - protein, 10 aa, synthetic construct
TPHRGDYTSM

SEQ ID NO: 69689 - protein, 10 aa, synthetic construct
TPHRGDFQNT

SEQ ID NO: 69690 - protein, 10 aa, synthetic construct
TPSRGDYNSL

SEQ ID NO: 69691 - protein, 10 aa, synthetic construct
TPSRGDYTSV

SEQ ID NO: 69692 - protein, 10 aa, synthetic construct
TPSRGDYTSM

SEQ ID NO: 69693 - protein, 10 aa, synthetic construct
TPSRGDFQNT

SEQ ID NO: 69694 - protein, 10 aa, synthetic construct
AVARGDRQGI

SEQ ID NO: 69695 - protein, 10 aa, synthetic construct
TPTRGDYNSL

SEQ ID NO: 69696 - protein, 10 aa, synthetic construct
TPTRGDYTSV

SEQ ID NO: 69697 - protein, 10 aa, synthetic construct
TPTRGDYTSM

SEQ ID NO: 69698 - protein, 10 aa, synthetic construct
TPTRGDFQNT

SEQ ID NO: 69699 - protein, 10 aa, synthetic construct
TPYRGDRDYL

SEQ ID NO: 69700 - protein, 10 aa, synthetic construct
TPYRGDYTSV

SEQ ID NO: 69701 - protein, 10 aa, synthetic construct
TPYRGDLTVT

SEQ ID NO: 69702 - protein, 10 aa, synthetic construct
TPYRGDLIGR

SEQ ID NO: 69703 - protein, 10 aa, synthetic construct
TPNRGDRDYL

SEQ ID NO: 69704 - protein, 10 aa, synthetic construct
TPNRGDYTSV

SEQ ID NO: 69705 - protein, 10 aa, synthetic construct
AVARGDRSVV

SEQ ID NO: 69706 - protein, 10 aa, synthetic construct
TPNRGDLTVT

SEQ ID NO: 69707 - protein, 10 aa, synthetic construct
TPNRGDLIGR

SEQ ID NO: 69708 - protein, 10 aa, synthetic construct
TPQRGDYNSL

SEQ ID NO: 69709 - protein, 10 aa, synthetic construct
TPQRGDYTSV

SEQ ID NO: 69710 - protein, 10 aa, synthetic construct
TPQRGDYTSM

SEQ ID NO: 69711 - protein, 10 aa, synthetic construct
TPQRGDFQNT

SEQ ID NO: 69712 - protein, 10 aa, synthetic construct
TPDRGDYNSL

SEQ ID NO: 69713 - protein, 10 aa, synthetic construct
TPDRGDYTSV

SEQ ID NO: 69714 - protein, 10 aa, synthetic construct
TPDRGDYTSM

SEQ ID NO: 69715 - protein, 10 aa, synthetic construct
TPDRGDFQNT

SEQ ID NO: 69716 - protein, 10 aa, synthetic construct
AVARGDLTVT

SEQ ID NO: 69717 - protein, 10 aa, synthetic construct
TPERGDYNSL

SEQ ID NO: 69718 - protein, 10 aa, synthetic construct
TPERGDYTSV

SEQ ID NO: 69719 - protein, 10 aa, synthetic construct
TPERGDYTSM

SEQ ID NO: 69720 - protein, 10 aa, synthetic construct
TPERGDFQNT

SEQ ID NO: 69721 - protein, 10 aa, synthetic construct
TLGRGDFNNT

SEQ ID NO: 69722 - protein, 10 aa, synthetic construct
TLGRGDFNNL

SEQ ID NO: 69723 - protein, 10 aa, synthetic construct
TLARGDFNNT

SEQ ID NO: 69724 - protein, 10 aa, synthetic construct
TLARGDFNNL

SEQ ID NO: 69725 - protein, 10 aa, synthetic construct
TLVRGDYNSL

SEQ ID NO: 69726 - protein, 10 aa, synthetic construct
TLVRGDYTSM

SEQ ID NO: 69727 - protein, 10 aa, synthetic construct
AVARGDLIGR

SEQ ID NO: 69728 - protein, 10 aa, synthetic construct
TLVRGDFQNT

SEQ ID NO: 69729 - protein, 10 aa, synthetic construct
TLPRGDFNNT

SEQ ID NO: 69730 - protein, 10 aa, synthetic construct
TLPRGDFNNL

SEQ ID NO: 69731 - protein, 10 aa, synthetic construct
TLLRGDYNSL

SEQ ID NO: 69732 - protein, 10 aa, synthetic construct
TLLRGDYTSM

SEQ ID NO: 69733 - protein, 10 aa, synthetic construct
TLLRGDFQNT

SEQ ID NO: 69734 - protein, 10 aa, synthetic construct
TLIRGDYTSV

SEQ ID NO: 69735 - protein, 10 aa, synthetic construct
TLIRGDLIGR

SEQ ID NO: 69736 - protein, 10 aa, synthetic construct
TLMRGDYTSV

SEQ ID NO: 69737 - protein, 10 aa, synthetic construct
TLMRGDLIGR

SEQ ID NO: 69738 - protein, 10 aa, synthetic construct
TSPRGDQSTL

SEQ ID NO: 69739 - protein, 10 aa, synthetic construct
AVARGDRSQT

SEQ ID NO: 69740 - protein, 10 aa, synthetic construct
TLWRGDYNSL

SEQ ID NO: 69741 - protein, 10 aa, synthetic construct
TLWRGDYTSM

SEQ ID NO: 69742 - protein, 10 aa, synthetic construct
TLWRGDFQNT

SEQ ID NO: 69743 - protein, 10 aa, synthetic construct
TLFRGDYTSV

SEQ ID NO: 69744 - protein, 10 aa, synthetic construct
TLFRGDLIGR

SEQ ID NO: 69745 - protein, 10 aa, synthetic construct
TLKRGDYTSV

SEQ ID NO: 69746 - protein, 10 aa, synthetic construct
TLKRGDLIGR

SEQ ID NO: 69747 - protein, 10 aa, synthetic construct
TLRRGDFNNT

SEQ ID NO: 69748 - protein, 10 aa, synthetic construct
TLRRGDFNNL

SEQ ID NO: 69749 - protein, 10 aa, synthetic construct
TLHRGDYNSL

SEQ ID NO: 69750 - protein, 10 aa, synthetic construct
AVARGDLLLS

SEQ ID NO: 69751 - protein, 10 aa, synthetic construct
TLHRGDYTSM

SEQ ID NO: 69752 - protein, 10 aa, synthetic construct
TLHRGDFQNT

SEQ ID NO: 69753 - protein, 10 aa, synthetic construct
TLSRGDYNSL

SEQ ID NO: 69754 - protein, 10 aa, synthetic construct
TLSRGDYTSM

SEQ ID NO: 69755 - protein, 10 aa, synthetic construct
TLSRGDFQNT

SEQ ID NO: 69756 - protein, 10 aa, synthetic construct
TLTRGDYNSL

SEQ ID NO: 69757 - protein, 10 aa, synthetic construct
TLTRGDYTSM

SEQ ID NO: 69758 - protein, 10 aa, synthetic construct
TLTRGDFQNT

SEQ ID NO: 69759 - protein, 10 aa, synthetic construct
TLYRGDYTSV

SEQ ID NO: 69760 - protein, 10 aa, synthetic construct
TLYRGDLIGR

SEQ ID NO: 69761 - protein, 10 aa, synthetic construct
AVVRGDHGVL

SEQ ID NO: 69762 - protein, 10 aa, synthetic construct
TLNRGDYTSV

SEQ ID NO: 69763 - protein, 10 aa, synthetic construct
TLNRGDLIGR

SEQ ID NO: 69764 - protein, 10 aa, synthetic construct
TLQRGDYNSL

SEQ ID NO: 69765 - protein, 10 aa, synthetic construct
TLQRGDYTSM

SEQ ID NO: 69766 - protein, 10 aa, synthetic construct
TLQRGDFQNT

SEQ ID NO: 69767 - protein, 10 aa, synthetic construct
TLDRGDYNSL

SEQ ID NO: 69768 - protein, 10 aa, synthetic construct
TLDRGDYTSM

SEQ ID NO: 69769 - protein, 10 aa, synthetic construct
TLDRGDFQNT

SEQ ID NO: 69770 - protein, 10 aa, synthetic construct
TLERGDYNSL

SEQ ID NO: 69771 - protein, 10 aa, synthetic construct
TLERGDYTSM

SEQ ID NO: 69772 - protein, 10 aa, synthetic construct
AVVRGDRGQI

SEQ ID NO: 69773 - protein, 10 aa, synthetic construct
TLERGDFQNT

SEQ ID NO: 69774 - protein, 10 aa, synthetic construct
TIGRGDRDYL

SEQ ID NO: 69775 - protein, 10 aa, synthetic construct
TIGRGDYTSV

SEQ ID NO: 69776 - protein, 10 aa, synthetic construct
TIGRGDLTVT

SEQ ID NO: 69777 - protein, 10 aa, synthetic construct
TIGRGDLIGR

SEQ ID NO: 69778 - protein, 10 aa, synthetic construct
TIARGDRDYL

SEQ ID NO: 69779 - protein, 10 aa, synthetic construct
TIARGDYTSV

SEQ ID NO: 69780 - protein, 10 aa, synthetic construct
TIARGDLTVT

SEQ ID NO: 69781 - protein, 10 aa, synthetic construct
TIARGDLIGR

SEQ ID NO: 69782 - protein, 10 aa, synthetic construct
TIVRGDHGVL

SEQ ID NO: 69783 - protein, 10 aa, synthetic construct
AVVRGDRQGI

SEQ ID NO: 69784 - protein, 10 aa, synthetic construct
TIVRGDHVNL

SEQ ID NO: 69785 - protein, 10 aa, synthetic construct
TIVRGDRDYL

SEQ ID NO: 69786 - protein, 10 aa, synthetic construct
TIVRGDYSSV

SEQ ID NO: 69787 - protein, 10 aa, synthetic construct
TIVRGDLTVT

SEQ ID NO: 69788 - protein, 10 aa, synthetic construct
TIPRGDRDYL

SEQ ID NO: 69789 - protein, 10 aa, synthetic construct
TIPRGDYTSV

SEQ ID NO: 69790 - protein, 10 aa, synthetic construct
TIPRGDLTVT

SEQ ID NO: 69791 - protein, 10 aa, synthetic construct
TIPRGDLIGR

SEQ ID NO: 69792 - protein, 10 aa, synthetic construct
TILRGDHGVL

SEQ ID NO: 69793 - protein, 10 aa, synthetic construct
TILRGDHVNL

SEQ ID NO: 69794 - protein, 10 aa, synthetic construct
AVVRGDRSVV

SEQ ID NO: 69795 - protein, 10 aa, synthetic construct
TILRGDRDYL

SEQ ID NO: 69796 - protein, 10 aa, synthetic construct
TILRGDYSSV

SEQ ID NO: 69797 - protein, 10 aa, synthetic construct
TILRGDLTVT

SEQ ID NO: 69798 - protein, 10 aa, synthetic construct
TIIRGDHGVL

SEQ ID NO: 69799 - protein, 10 aa, synthetic construct
TIIRGDRGQI

SEQ ID NO: 69800 - protein, 10 aa, synthetic construct
TIIRGDRQGI

SEQ ID NO: 69801 - protein, 10 aa, synthetic construct
TIIRGDRGVV

SEQ ID NO: 69802 - protein, 10 aa, synthetic construct
TIIRGDYVGL

SEQ ID NO: 69803 - protein, 10 aa, synthetic construct
TIIRGDLIGR

SEQ ID NO: 69804 - protein, 10 aa, synthetic construct
TIIRGDQSTL

SEQ ID NO: 69805 - protein, 10 aa, synthetic construct
AVVRGDLTVT

SEQ ID NO: 69806 - protein, 10 aa, synthetic construct
TIIRGDLLLS

SEQ ID NO: 69807 - protein, 10 aa, synthetic construct
TIMRGDHGVL

SEQ ID NO: 69808 - protein, 10 aa, synthetic construct
TIMRGDRGQI

SEQ ID NO: 69809 - protein, 10 aa, synthetic construct
TIMRGDRQGI

SEQ ID NO: 69810 - protein, 10 aa, synthetic construct
TIMRGDRGVV

SEQ ID NO: 69811 - protein, 10 aa, synthetic construct
TIMRGDYVGL

SEQ ID NO: 69812 - protein, 10 aa, synthetic construct
TIMRGDLIGR

SEQ ID NO: 69813 - protein, 10 aa, synthetic construct
TIMRGDQSTL

SEQ ID NO: 69814 - protein, 10 aa, synthetic construct
TIMRGDLLLS

SEQ ID NO: 69815 - protein, 10 aa, synthetic construct
TIWRGDHGVL

SEQ ID NO: 69816 - protein, 10 aa, synthetic construct
AVVRGDLIGR

SEQ ID NO: 69817 - protein, 10 aa, synthetic construct
TIWRGDHVNL

SEQ ID NO: 69818 - protein, 10 aa, synthetic construct
TIWRGDRDYL

SEQ ID NO: 69819 - protein, 10 aa, synthetic construct
TIWRGDYSSV

SEQ ID NO: 69820 - protein, 10 aa, synthetic construct
TIWRGDLTVT

SEQ ID NO: 69821 - protein, 10 aa, synthetic construct
TIFRGDHGVL

SEQ ID NO: 69822 - protein, 10 aa, synthetic construct
TIFRGDRGQI

SEQ ID NO: 69823 - protein, 10 aa, synthetic construct
TIFRGDRQGI

SEQ ID NO: 69824 - protein, 10 aa, synthetic construct
TIFRGDRGVV

SEQ ID NO: 69825 - protein, 10 aa, synthetic construct
TIFRGDYVGL

SEQ ID NO: 69826 - protein, 10 aa, synthetic construct
TIFRGDLIGR

SEQ ID NO: 69827 - protein, 10 aa, synthetic construct
AVVRGDRSQT

SEQ ID NO: 69828 - protein, 10 aa, synthetic construct
TIFRGDQSTL

SEQ ID NO: 69829 - protein, 10 aa, synthetic construct
TIFRGDLLLS

SEQ ID NO: 69830 - protein, 10 aa, synthetic construct
TIKRGDHGVL

SEQ ID NO: 69831 - protein, 10 aa, synthetic construct
TIKRGDRGQI

SEQ ID NO: 69832 - protein, 10 aa, synthetic construct
TIKRGDRQGI

SEQ ID NO: 69833 - protein, 10 aa, synthetic construct
TIKRGDRGVV

SEQ ID NO: 69834 - protein, 10 aa, synthetic construct
TIKRGDYVGL

SEQ ID NO: 69835 - protein, 10 aa, synthetic construct
TIKRGDLIGR

SEQ ID NO: 69836 - protein, 10 aa, synthetic construct
TIKRGDQSTL

SEQ ID NO: 69837 - protein, 10 aa, synthetic construct
TIKRGDLLLS

SEQ ID NO: 69838 - protein, 10 aa, synthetic construct
AVVRGDLLLS

SEQ ID NO: 69839 - protein, 10 aa, synthetic construct
TIRRGDRDYL

SEQ ID NO: 69840 - protein, 10 aa, synthetic construct
TIRRGDYTSV

SEQ ID NO: 69841 - protein, 10 aa, synthetic construct
TIRRGDLTVT

SEQ ID NO: 69842 - protein, 10 aa, synthetic construct
TIRRGDLIGR

SEQ ID NO: 69843 - protein, 10 aa, synthetic construct
TIHRGDHGVL

SEQ ID NO: 69844 - protein, 10 aa, synthetic construct
TIHRGDHVNL

SEQ ID NO: 69845 - protein, 10 aa, synthetic construct
TIHRGDRDYL

SEQ ID NO: 69846 - protein, 10 aa, synthetic construct
TIHRGDYSSV

SEQ ID NO: 69847 - protein, 10 aa, synthetic construct
TIHRGDLTVT

SEQ ID NO: 69848 - protein, 10 aa, synthetic construct
TISRGDHGVL

SEQ ID NO: 69849 - protein, 10 aa, synthetic construct
TSPRGDLLLS

SEQ ID NO: 69850 - protein, 10 aa, synthetic construct
AVPRGDHGVL

SEQ ID NO: 69851 - protein, 10 aa, synthetic construct
TISRGDHVNL

SEQ ID NO: 69852 - protein, 10 aa, synthetic construct
TISRGDRDYL

SEQ ID NO: 69853 - protein, 10 aa, synthetic construct
TISRGDYSSV

SEQ ID NO: 69854 - protein, 10 aa, synthetic construct
TISRGDLTVT

SEQ ID NO: 69855 - protein, 10 aa, synthetic construct
TITRGDHGVL

SEQ ID NO: 69856 - protein, 10 aa, synthetic construct
TITRGDHVNL

SEQ ID NO: 69857 - protein, 10 aa, synthetic construct
TITRGDRDYL

SEQ ID NO: 69858 - protein, 10 aa, synthetic construct
TITRGDYSSV

SEQ ID NO: 69859 - protein, 10 aa, synthetic construct
TITRGDLTVT

SEQ ID NO: 69860 - protein, 10 aa, synthetic construct
TIYRGDHGVL

SEQ ID NO: 69861 - protein, 10 aa, synthetic construct
AVPRGDRGQI

SEQ ID NO: 69862 - protein, 10 aa, synthetic construct
TIYRGDRGQI

SEQ ID NO: 69863 - protein, 10 aa, synthetic construct
TIYRGDRQGI

SEQ ID NO: 69864 - protein, 10 aa, synthetic construct
TIYRGDRGVV

SEQ ID NO: 69865 - protein, 10 aa, synthetic construct
TIYRGDYVGL

SEQ ID NO: 69866 - protein, 10 aa, synthetic construct
TIYRGDLIGR

SEQ ID NO: 69867 - protein, 10 aa, synthetic construct
TIYRGDQSTL

SEQ ID NO: 69868 - protein, 10 aa, synthetic construct
TIYRGDLLLS

SEQ ID NO: 69869 - protein, 10 aa, synthetic construct
TINRGDHGVL

SEQ ID NO: 69870 - protein, 10 aa, synthetic construct
TINRGDRGQI

SEQ ID NO: 69871 - protein, 10 aa, synthetic construct
TINRGDRQGI

SEQ ID NO: 69872 - protein, 10 aa, synthetic construct
AVPRGDRQGI

SEQ ID NO: 69873 - protein, 10 aa, synthetic construct
TINRGDRGVV

SEQ ID NO: 69874 - protein, 10 aa, synthetic construct
TINRGDYVGL

SEQ ID NO: 69875 - protein, 10 aa, synthetic construct
TINRGDLIGR

SEQ ID NO: 69876 - protein, 10 aa, synthetic construct
TINRGDQSTL

SEQ ID NO: 69877 - protein, 10 aa, synthetic construct
TINRGDLLLS

SEQ ID NO: 69878 - protein, 10 aa, synthetic construct
TIQRGDHGVL

SEQ ID NO: 69879 - protein, 10 aa, synthetic construct
TIQRGDHVNL

SEQ ID NO: 69880 - protein, 10 aa, synthetic construct
TIQRGDRDYL

SEQ ID NO: 69881 - protein, 10 aa, synthetic construct
TIQRGDYSSV

SEQ ID NO: 69882 - protein, 10 aa, synthetic construct
TIQRGDLTVT

SEQ ID NO: 69883 - protein, 10 aa, synthetic construct
AVPRGDRSVV

SEQ ID NO: 69884 - protein, 10 aa, synthetic construct
TIDRGDHGVL

SEQ ID NO: 69885 - protein, 10 aa, synthetic construct
TIDRGDHVNL

SEQ ID NO: 69886 - protein, 10 aa, synthetic construct
TIDRGDRDYL

SEQ ID NO: 69887 - protein, 10 aa, synthetic construct
TIDRGDYSSV

SEQ ID NO: 69888 - protein, 10 aa, synthetic construct
TIDRGDLTVT

SEQ ID NO: 69889 - protein, 10 aa, synthetic construct
TIERGDHGVL

SEQ ID NO: 69890 - protein, 10 aa, synthetic construct
TIERGDHVNL

SEQ ID NO: 69891 - protein, 10 aa, synthetic construct
TIERGDRDYL

SEQ ID NO: 69892 - protein, 10 aa, synthetic construct
TIERGDYSSV

SEQ ID NO: 69893 - protein, 10 aa, synthetic construct
TIERGDLTVT

SEQ ID NO: 69894 - protein, 10 aa, synthetic construct
AVPRGDLTVT

SEQ ID NO: 69895 - protein, 10 aa, synthetic construct
TMGRGDHVNL

SEQ ID NO: 69896 - protein, 10 aa, synthetic construct
TMGRGDYNSL

SEQ ID NO: 69897 - protein, 10 aa, synthetic construct
TMGRGDYTSM

SEQ ID NO: 69898 - protein, 10 aa, synthetic construct
TMARGDHVNL

SEQ ID NO: 69899 - protein, 10 aa, synthetic construct
TMARGDYNSL

SEQ ID NO: 69900 - protein, 10 aa, synthetic construct
TMARGDYTSM

SEQ ID NO: 69901 - protein, 10 aa, synthetic construct
TMVRGDHVNL

SEQ ID NO: 69902 - protein, 10 aa, synthetic construct
TMVRGDYNSL

SEQ ID NO: 69903 - protein, 10 aa, synthetic construct
TMVRGDYTSM

SEQ ID NO: 69904 - protein, 10 aa, synthetic construct
TMPRGDHVNL

SEQ ID NO: 69905 - protein, 10 aa, synthetic construct
AVPRGDLIGR

SEQ ID NO: 69906 - protein, 10 aa, synthetic construct
TMPRGDYNSL

SEQ ID NO: 69907 - protein, 10 aa, synthetic construct
TMPRGDYTSM

SEQ ID NO: 69908 - protein, 10 aa, synthetic construct
TMLRGDHVNL

SEQ ID NO: 69909 - protein, 10 aa, synthetic construct
TMLRGDYNSL

SEQ ID NO: 69910 - protein, 10 aa, synthetic construct
TMLRGDYTSM

SEQ ID NO: 69911 - protein, 10 aa, synthetic construct
TMIRGDRGQI

SEQ ID NO: 69912 - protein, 10 aa, synthetic construct
TMIRGDRQGI

SEQ ID NO: 69913 - protein, 10 aa, synthetic construct
TMIRGDRSQT

SEQ ID NO: 69914 - protein, 10 aa, synthetic construct
TMMRGDHVNL

SEQ ID NO: 69915 - protein, 10 aa, synthetic construct
TMMRGDRDYL

SEQ ID NO: 69916 - protein, 10 aa, synthetic construct
AVPRGDRSQT

SEQ ID NO: 69917 - protein, 10 aa, synthetic construct
TMMRGDYSSV

SEQ ID NO: 69918 - protein, 10 aa, synthetic construct
TMMRGDLTVT

SEQ ID NO: 69919 - protein, 10 aa, synthetic construct
TMWRGDYTSV

SEQ ID NO: 69920 - protein, 10 aa, synthetic construct
TMWRGDLIGR

SEQ ID NO: 69921 - protein, 10 aa, synthetic construct
TMFRGDRGQI

SEQ ID NO: 69922 - protein, 10 aa, synthetic construct
TMFRGDRQGI

SEQ ID NO: 69923 - protein, 10 aa, synthetic construct
TMFRGDRSQT

SEQ ID NO: 69924 - protein, 10 aa, synthetic construct
TMKRGDRGQI

SEQ ID NO: 69925 - protein, 10 aa, synthetic construct
TMKRGDRQGI

SEQ ID NO: 69926 - protein, 10 aa, synthetic construct
TMKRGDRSQT

SEQ ID NO: 69927 - protein, 10 aa, synthetic construct
AVPRGDLLLS

SEQ ID NO: 69928 - protein, 10 aa, synthetic construct
TMRRGDHVNL

SEQ ID NO: 69929 - protein, 10 aa, synthetic construct
TMRRGDYNSL

SEQ ID NO: 69930 - protein, 10 aa, synthetic construct
TMRRGDYTSM

SEQ ID NO: 69931 - protein, 10 aa, synthetic construct
TMHRGDRDYL

SEQ ID NO: 69932 - protein, 10 aa, synthetic construct
TMHRGDYVGL

SEQ ID NO: 69933 - protein, 10 aa, synthetic construct
TMHRGDYSSV

SEQ ID NO: 69934 - protein, 10 aa, synthetic construct
TMHRGDYTSV

SEQ ID NO: 69935 - protein, 10 aa, synthetic construct
TMHRGDQSTL

SEQ ID NO: 69936 - protein, 10 aa, synthetic construct
TMSRGDHVNL

SEQ ID NO: 69937 - protein, 10 aa, synthetic construct
TMSRGDYNSL

SEQ ID NO: 69938 - protein, 10 aa, synthetic construct
AVLRGDHGVL

SEQ ID NO: 69939 - protein, 10 aa, synthetic construct
TMSRGDYTSM

SEQ ID NO: 69940 - protein, 10 aa, synthetic construct
TMTRGDRDYL

SEQ ID NO: 69941 - protein, 10 aa, synthetic construct
TMTRGDYVGL

SEQ ID NO: 69942 - protein, 10 aa, synthetic construct
TMTRGDYSSV

SEQ ID NO: 69943 - protein, 10 aa, synthetic construct
TMTRGDYTSV

SEQ ID NO: 69944 - protein, 10 aa, synthetic construct
TMTRGDQSTL

SEQ ID NO: 69945 - protein, 10 aa, synthetic construct
TMYRGDRGQI

SEQ ID NO: 69946 - protein, 10 aa, synthetic construct
TMYRGDRQGI

SEQ ID NO: 69947 - protein, 10 aa, synthetic construct
TMYRGDRSQT

SEQ ID NO: 69948 - protein, 10 aa, synthetic construct
TMNRGDRGQI

SEQ ID NO: 69949 - protein, 10 aa, synthetic construct
AVLRGDRGQI

SEQ ID NO: 69950 - protein, 10 aa, synthetic construct
TMNRGDRQGI

SEQ ID NO: 69951 - protein, 10 aa, synthetic construct
TMNRGDRSQT

SEQ ID NO: 69952 - protein, 10 aa, synthetic construct
TMQRGDRDYL

SEQ ID NO: 69953 - protein, 10 aa, synthetic construct
TMQRGDYVGL

SEQ ID NO: 69954 - protein, 10 aa, synthetic construct
TMQRGDYSSV

SEQ ID NO: 69955 - protein, 10 aa, synthetic construct
TMQRGDYTSV

SEQ ID NO: 69956 - protein, 10 aa, synthetic construct
TMQRGDQSTL

SEQ ID NO: 69957 - protein, 10 aa, synthetic construct
TMDRGDRDYL

SEQ ID NO: 69958 - protein, 10 aa, synthetic construct
TMDRGDYVGL

SEQ ID NO: 69959 - protein, 10 aa, synthetic construct
TMDRGDYSSV

SEQ ID NO: 69960 - protein, 10 aa, synthetic construct
ESPRGDHGVL

SEQ ID NO: 69961 - protein, 10 aa, synthetic construct
AVLRGDRQGI

SEQ ID NO: 69962 - protein, 10 aa, synthetic construct
TMDRGDYTSV

SEQ ID NO: 69963 - protein, 10 aa, synthetic construct
TMDRGDQSTL

SEQ ID NO: 69964 - protein, 10 aa, synthetic construct
TMERGDRDYL

SEQ ID NO: 69965 - protein, 10 aa, synthetic construct
TMERGDYVGL

SEQ ID NO: 69966 - protein, 10 aa, synthetic construct
TMERGDYSSV

SEQ ID NO: 69967 - protein, 10 aa, synthetic construct
TMERGDYTSV

SEQ ID NO: 69968 - protein, 10 aa, synthetic construct
TMERGDQSTL

SEQ ID NO: 69969 - protein, 10 aa, synthetic construct
TWGRGDFQNT

SEQ ID NO: 69970 - protein, 10 aa, synthetic construct
TWARGDFQNT

SEQ ID NO: 69971 - protein, 10 aa, synthetic construct
TWVRGDFQNT

SEQ ID NO: 69972 - protein, 10 aa, synthetic construct
AVLRGDRSVV

SEQ ID NO: 69973 - protein, 10 aa, synthetic construct
TWPRGDFQNT

SEQ ID NO: 69974 - protein, 10 aa, synthetic construct
TWLRGDFQNT

SEQ ID NO: 69975 - protein, 10 aa, synthetic construct
TWIRGDRDYL

SEQ ID NO: 69976 - protein, 10 aa, synthetic construct
TWIRGDYVGL

SEQ ID NO: 69977 - protein, 10 aa, synthetic construct
TWIRGDYSSV

SEQ ID NO: 69978 - protein, 10 aa, synthetic construct
TWIRGDYTSV

SEQ ID NO: 69979 - protein, 10 aa, synthetic construct
TWIRGDQSTL

SEQ ID NO: 69980 - protein, 10 aa, synthetic construct
TWMRGDYTSV

SEQ ID NO: 69981 - protein, 10 aa, synthetic construct
TWMRGDLIGR

SEQ ID NO: 69982 - protein, 10 aa, synthetic construct
TWWRGDYNSL

SEQ ID NO: 69983 - protein, 10 aa, synthetic construct
AVLRGDLTVT

SEQ ID NO: 69984 - protein, 10 aa, synthetic construct
TWWRGDYTSM

SEQ ID NO: 69985 - protein, 10 aa, synthetic construct
TWWRGDFQNT

SEQ ID NO: 69986 - protein, 10 aa, synthetic construct
TWFRGDRDYL

SEQ ID NO: 69987 - protein, 10 aa, synthetic construct
TWFRGDYVGL

SEQ ID NO: 69988 - protein, 10 aa, synthetic construct
TWFRGDYSSV

SEQ ID NO: 69989 - protein, 10 aa, synthetic construct
TWFRGDYTSV

SEQ ID NO: 69990 - protein, 10 aa, synthetic construct
TWFRGDQSTL

SEQ ID NO: 69991 - protein, 10 aa, synthetic construct
TWKRGDRDYL

SEQ ID NO: 69992 - protein, 10 aa, synthetic construct
TWKRGDYVGL

SEQ ID NO: 69993 - protein, 10 aa, synthetic construct
TWKRGDYSSV

SEQ ID NO: 69994 - protein, 10 aa, synthetic construct
AVLRGDLIGR

SEQ ID NO: 69995 - protein, 10 aa, synthetic construct
TWKRGDYTSV

SEQ ID NO: 69996 - protein, 10 aa, synthetic construct
TWKRGDQSTL

SEQ ID NO: 69997 - protein, 10 aa, synthetic construct
TWRRGDFQNT

SEQ ID NO: 69998 - protein, 10 aa, synthetic construct
TWHRGDHVNL

SEQ ID NO: 69999 - protein, 10 aa, synthetic construct
TWHRGDYNSL

SEQ ID NO: 70000 - protein, 10 aa, synthetic construct
TWHRGDYTSM

SEQ ID NO: 70001 - protein, 10 aa, synthetic construct
TWSRGDFQNT

SEQ ID NO: 70002 - protein, 10 aa, synthetic construct
TWTRGDHVNL

SEQ ID NO: 70003 - protein, 10 aa, synthetic construct
TWTRGDYNSL

SEQ ID NO: 70004 - protein, 10 aa, synthetic construct
TWTRGDYTSM

SEQ ID NO: 70005 - protein, 10 aa, synthetic construct
AVLRGDRSQT

SEQ ID NO: 70006 - protein, 10 aa, synthetic construct
TWYRGDRDYL

SEQ ID NO: 70007 - protein, 10 aa, synthetic construct
TWYRGDYVGL

SEQ ID NO: 70008 - protein, 10 aa, synthetic construct
TWYRGDYSSV

SEQ ID NO: 70009 - protein, 10 aa, synthetic construct
TWYRGDYTSV

SEQ ID NO: 70010 - protein, 10 aa, synthetic construct
TWYRGDQSTL

SEQ ID NO: 70011 - protein, 10 aa, synthetic construct
TWNRGDRDYL

SEQ ID NO: 70012 - protein, 10 aa, synthetic construct
TWNRGDYVGL

SEQ ID NO: 70013 - protein, 10 aa, synthetic construct
TWNRGDYSSV

SEQ ID NO: 70014 - protein, 10 aa, synthetic construct
TWNRGDYTSV

SEQ ID NO: 70015 - protein, 10 aa, synthetic construct
TWNRGDQSTL

SEQ ID NO: 70016 - protein, 10 aa, synthetic construct
AVLRGDLLLS

SEQ ID NO: 70017 - protein, 10 aa, synthetic construct
TWQRGDHVNL

SEQ ID NO: 70018 - protein, 10 aa, synthetic construct
TWQRGDYNSL

SEQ ID NO: 70019 - protein, 10 aa, synthetic construct
TWQRGDYTSM

SEQ ID NO: 70020 - protein, 10 aa, synthetic construct
TWDRGDHVNL

SEQ ID NO: 70021 - protein, 10 aa, synthetic construct
TWDRGDYNSL

SEQ ID NO: 70022 - protein, 10 aa, synthetic construct
TWDRGDYTSM

SEQ ID NO: 70023 - protein, 10 aa, synthetic construct
TWERGDHVNL

SEQ ID NO: 70024 - protein, 10 aa, synthetic construct
TWERGDYNSL

SEQ ID NO: 70025 - protein, 10 aa, synthetic construct
TWERGDYTSM

SEQ ID NO: 70026 - protein, 10 aa, synthetic construct
TFGRGDRDYL

SEQ ID NO: 70027 - protein, 10 aa, synthetic construct
AVWRGDRGQI

SEQ ID NO: 70028 - protein, 10 aa, synthetic construct
TFGRGDYTSV

SEQ ID NO: 70029 - protein, 10 aa, synthetic construct
TFGRGDLTVT

SEQ ID NO: 70030 - protein, 10 aa, synthetic construct
TFGRGDLIGR

SEQ ID NO: 70031 - protein, 10 aa, synthetic construct
TFARGDRDYL

SEQ ID NO: 70032 - protein, 10 aa, synthetic construct
TFARGDYTSV

SEQ ID NO: 70033 - protein, 10 aa, synthetic construct
TFARGDLTVT

SEQ ID NO: 70034 - protein, 10 aa, synthetic construct
TFARGDLIGR

SEQ ID NO: 70035 - protein, 10 aa, synthetic construct
TFVRGDHGVL

SEQ ID NO: 70036 - protein, 10 aa, synthetic construct
TFVRGDHVNL

SEQ ID NO: 70037 - protein, 10 aa, synthetic construct
TFVRGDRDYL

SEQ ID NO: 70038 - protein, 10 aa, synthetic construct
AVWRGDRQGI

SEQ ID NO: 70039 - protein, 10 aa, synthetic construct
TFVRGDYSSV

SEQ ID NO: 70040 - protein, 10 aa, synthetic construct
TFVRGDLTVT

SEQ ID NO: 70041 - protein, 10 aa, synthetic construct
TFPRGDRDYL

SEQ ID NO: 70042 - protein, 10 aa, synthetic construct
TFPRGDYTSV

SEQ ID NO: 70043 - protein, 10 aa, synthetic construct
TFPRGDLTVT

SEQ ID NO: 70044 - protein, 10 aa, synthetic construct
TFPRGDLIGR

SEQ ID NO: 70045 - protein, 10 aa, synthetic construct
TFLRGDHGVL

SEQ ID NO: 70046 - protein, 10 aa, synthetic construct
TFLRGDHVNL

SEQ ID NO: 70047 - protein, 10 aa, synthetic construct
TFLRGDRDYL

SEQ ID NO: 70048 - protein, 10 aa, synthetic construct
TFLRGDYSSV

SEQ ID NO: 70049 - protein, 10 aa, synthetic construct
AVWRGDRSVV

SEQ ID NO: 70050 - protein, 10 aa, synthetic construct
TFLRGDLTVT

SEQ ID NO: 70051 - protein, 10 aa, synthetic construct
TFIRGDHGVL

SEQ ID NO: 70052 - protein, 10 aa, synthetic construct
TFIRGDRGQI

SEQ ID NO: 70053 - protein, 10 aa, synthetic construct
TFIRGDRQGI

SEQ ID NO: 70054 - protein, 10 aa, synthetic construct
TFIRGDRGVV

SEQ ID NO: 70055 - protein, 10 aa, synthetic construct
TFIRGDYVGL

SEQ ID NO: 70056 - protein, 10 aa, synthetic construct
TFIRGDLIGR

SEQ ID NO: 70057 - protein, 10 aa, synthetic construct
TFIRGDQSTL

SEQ ID NO: 70058 - protein, 10 aa, synthetic construct
TFIRGDLLLS

SEQ ID NO: 70059 - protein, 10 aa, synthetic construct
TFMRGDHGVL

SEQ ID NO: 70060 - protein, 10 aa, synthetic construct
AVWRGDRGVV

SEQ ID NO: 70061 - protein, 10 aa, synthetic construct
TFMRGDRGQI

SEQ ID NO: 70062 - protein, 10 aa, synthetic construct
TFMRGDRQGI

SEQ ID NO: 70063 - protein, 10 aa, synthetic construct
TFMRGDRGVV

SEQ ID NO: 70064 - protein, 10 aa, synthetic construct
TFMRGDYVGL

SEQ ID NO: 70065 - protein, 10 aa, synthetic construct
TFMRGDLIGR

SEQ ID NO: 70066 - protein, 10 aa, synthetic construct
TFMRGDQSTL

SEQ ID NO: 70067 - protein, 10 aa, synthetic construct
TFMRGDLLLS

SEQ ID NO: 70068 - protein, 10 aa, synthetic construct
TFWRGDHGVL

SEQ ID NO: 70069 - protein, 10 aa, synthetic construct
TFWRGDHVNL

SEQ ID NO: 70070 - protein, 10 aa, synthetic construct
TFWRGDRDYL

SEQ ID NO: 70071 - protein, 10 aa, synthetic construct
ESPRGDYVGL

SEQ ID NO: 70072 - protein, 10 aa, synthetic construct
AVWRGDRSQT

SEQ ID NO: 70073 - protein, 10 aa, synthetic construct
TFWRGDYSSV

SEQ ID NO: 70074 - protein, 10 aa, synthetic construct
TFWRGDLTVT

SEQ ID NO: 70075 - protein, 10 aa, synthetic construct
TFKRGDHGVL

SEQ ID NO: 70076 - protein, 10 aa, synthetic construct
TFKRGDRGQI

SEQ ID NO: 70077 - protein, 10 aa, synthetic construct
TFKRGDRQGI

SEQ ID NO: 70078 - protein, 10 aa, synthetic construct
TFKRGDRGVV

SEQ ID NO: 70079 - protein, 10 aa, synthetic construct
TFKRGDYVGL

SEQ ID NO: 70080 - protein, 10 aa, synthetic construct
TFKRGDLIGR

SEQ ID NO: 70081 - protein, 10 aa, synthetic construct
TFKRGDQSTL

SEQ ID NO: 70082 - protein, 10 aa, synthetic construct
TFKRGDLLLS

SEQ ID NO: 70083 - protein, 10 aa, synthetic construct
AVRRGDHGVL

SEQ ID NO: 70084 - protein, 10 aa, synthetic construct
TFRRGDRDYL

SEQ ID NO: 70085 - protein, 10 aa, synthetic construct
TFRRGDYTSV

SEQ ID NO: 70086 - protein, 10 aa, synthetic construct
TFRRGDLTVT

SEQ ID NO: 70087 - protein, 10 aa, synthetic construct
TFRRGDLIGR

SEQ ID NO: 70088 - protein, 10 aa, synthetic construct
TFHRGDHGVL

SEQ ID NO: 70089 - protein, 10 aa, synthetic construct
TFHRGDHVNL

SEQ ID NO: 70090 - protein, 10 aa, synthetic construct
TFHRGDRDYL

SEQ ID NO: 70091 - protein, 10 aa, synthetic construct
TFHRGDYSSV

SEQ ID NO: 70092 - protein, 10 aa, synthetic construct
TFHRGDLTVT

SEQ ID NO: 70093 - protein, 10 aa, synthetic construct
TFSRGDHGVL

SEQ ID NO: 70094 - protein, 10 aa, synthetic construct
AVRRGDRGQI

SEQ ID NO: 70095 - protein, 10 aa, synthetic construct
TFSRGDHVNL

SEQ ID NO: 70096 - protein, 10 aa, synthetic construct
TFSRGDRDYL

SEQ ID NO: 70097 - protein, 10 aa, synthetic construct
TFSRGDYSSV

SEQ ID NO: 70098 - protein, 10 aa, synthetic construct
TFSRGDLTVT

SEQ ID NO: 70099 - protein, 10 aa, synthetic construct
TFTRGDHGVL

SEQ ID NO: 70100 - protein, 10 aa, synthetic construct
TFTRGDHVNL

SEQ ID NO: 70101 - protein, 10 aa, synthetic construct
TFTRGDRDYL

SEQ ID NO: 70102 - protein, 10 aa, synthetic construct
TFTRGDYSSV

SEQ ID NO: 70103 - protein, 10 aa, synthetic construct
TFTRGDLTVT

SEQ ID NO: 70104 - protein, 10 aa, synthetic construct
TFYRGDHGVL

SEQ ID NO: 70105 - protein, 10 aa, synthetic construct
AVRRGDRQGI

SEQ ID NO: 70106 - protein, 10 aa, synthetic construct
TFYRGDRGQI

SEQ ID NO: 70107 - protein, 10 aa, synthetic construct
TFYRGDRQGI

SEQ ID NO: 70108 - protein, 10 aa, synthetic construct
TFYRGDRGVV

SEQ ID NO: 70109 - protein, 10 aa, synthetic construct
TFYRGDYVGL

SEQ ID NO: 70110 - protein, 10 aa, synthetic construct
TFYRGDLIGR

SEQ ID NO: 70111 - protein, 10 aa, synthetic construct
TFYRGDQSTL

SEQ ID NO: 70112 - protein, 10 aa, synthetic construct
TFYRGDLLLS

SEQ ID NO: 70113 - protein, 10 aa, synthetic construct
TFNRGDHGVL

SEQ ID NO: 70114 - protein, 10 aa, synthetic construct
TFNRGDRGQI

SEQ ID NO: 70115 - protein, 10 aa, synthetic construct
TFNRGDRQGI

SEQ ID NO: 70116 - protein, 10 aa, synthetic construct
AVRRGDRSVV

SEQ ID NO: 70117 - protein, 10 aa, synthetic construct
TFNRGDRGVV

SEQ ID NO: 70118 - protein, 10 aa, synthetic construct
TFNRGDYVGL

SEQ ID NO: 70119 - protein, 10 aa, synthetic construct
TFNRGDLIGR

SEQ ID NO: 70120 - protein, 10 aa, synthetic construct
TFNRGDQSTL

SEQ ID NO: 70121 - protein, 10 aa, synthetic construct
TFNRGDLLLS

SEQ ID NO: 70122 - protein, 10 aa, synthetic construct
TFQRGDHGVL

SEQ ID NO: 70123 - protein, 10 aa, synthetic construct
TFQRGDHVNL

SEQ ID NO: 70124 - protein, 10 aa, synthetic construct
TFQRGDRDYL

SEQ ID NO: 70125 - protein, 10 aa, synthetic construct
TFQRGDYSSV

SEQ ID NO: 70126 - protein, 10 aa, synthetic construct
TFQRGDLTVT

SEQ ID NO: 70127 - protein, 10 aa, synthetic construct
AVRRGDLTVT

SEQ ID NO: 70128 - protein, 10 aa, synthetic construct
TFDRGDHGVL

SEQ ID NO: 70129 - protein, 10 aa, synthetic construct
TFDRGDHVNL

SEQ ID NO: 70130 - protein, 10 aa, synthetic construct
TFDRGDRDYL

SEQ ID NO: 70131 - protein, 10 aa, synthetic construct
TFDRGDYSSV

SEQ ID NO: 70132 - protein, 10 aa, synthetic construct
TFDRGDLTVT

SEQ ID NO: 70133 - protein, 10 aa, synthetic construct
TFERGDHGVL

SEQ ID NO: 70134 - protein, 10 aa, synthetic construct
TFERGDHVNL

SEQ ID NO: 70135 - protein, 10 aa, synthetic construct
TFERGDRDYL

SEQ ID NO: 70136 - protein, 10 aa, synthetic construct
TFERGDYSSV

SEQ ID NO: 70137 - protein, 10 aa, synthetic construct
TFERGDLTVT

SEQ ID NO: 70138 - protein, 10 aa, synthetic construct
AVRRGDLIGR

SEQ ID NO: 70139 - protein, 10 aa, synthetic construct
TKGRGDRDYL

SEQ ID NO: 70140 - protein, 10 aa, synthetic construct
TKGRGDYTSV

SEQ ID NO: 70141 - protein, 10 aa, synthetic construct
TKGRGDLTVT

SEQ ID NO: 70142 - protein, 10 aa, synthetic construct
TKGRGDLIGR

SEQ ID NO: 70143 - protein, 10 aa, synthetic construct
TKARGDRDYL

SEQ ID NO: 70144 - protein, 10 aa, synthetic construct
TKARGDYTSV

SEQ ID NO: 70145 - protein, 10 aa, synthetic construct
TKARGDLTVT

SEQ ID NO: 70146 - protein, 10 aa, synthetic construct
TKARGDLIGR

SEQ ID NO: 70147 - protein, 10 aa, synthetic construct
TKVRGDHGVL

SEQ ID NO: 70148 - protein, 10 aa, synthetic construct
TKVRGDHVNL

SEQ ID NO: 70149 - protein, 10 aa, synthetic construct
AVRRGDRSQT

SEQ ID NO: 70150 - protein, 10 aa, synthetic construct
TKVRGDRDYL

SEQ ID NO: 70151 - protein, 10 aa, synthetic construct
TKVRGDYSSV

SEQ ID NO: 70152 - protein, 10 aa, synthetic construct
TKVRGDLTVT

SEQ ID NO: 70153 - protein, 10 aa, synthetic construct
TKPRGDRDYL

SEQ ID NO: 70154 - protein, 10 aa, synthetic construct
TKPRGDYTSV

SEQ ID NO: 70155 - protein, 10 aa, synthetic construct
TKPRGDLTVT

SEQ ID NO: 70156 - protein, 10 aa, synthetic construct
TKPRGDLIGR

SEQ ID NO: 70157 - protein, 10 aa, synthetic construct
TKLRGDHGVL

SEQ ID NO: 70158 - protein, 10 aa, synthetic construct
TKLRGDHVNL

SEQ ID NO: 70159 - protein, 10 aa, synthetic construct
TKLRGDRDYL

SEQ ID NO: 70160 - protein, 10 aa, synthetic construct
AVRRGDLLLS

SEQ ID NO: 70161 - protein, 10 aa, synthetic construct
TKLRGDYSSV

SEQ ID NO: 70162 - protein, 10 aa, synthetic construct
TKLRGDLTVT

SEQ ID NO: 70163 - protein, 10 aa, synthetic construct
TKIRGDHGVL

SEQ ID NO: 70164 - protein, 10 aa, synthetic construct
TKIRGDRGQI

SEQ ID NO: 70165 - protein, 10 aa, synthetic construct
TKIRGDRQGI

SEQ ID NO: 70166 - protein, 10 aa, synthetic construct
TKIRGDRGVV

SEQ ID NO: 70167 - protein, 10 aa, synthetic construct
TKIRGDYVGL

SEQ ID NO: 70168 - protein, 10 aa, synthetic construct
TKIRGDLIGR

SEQ ID NO: 70169 - protein, 10 aa, synthetic construct
TKIRGDQSTL

SEQ ID NO: 70170 - protein, 10 aa, synthetic construct
TKIRGDLLLS

SEQ ID NO: 70171 - protein, 10 aa, synthetic construct
AVHRGDRGVV

SEQ ID NO: 70172 - protein, 10 aa, synthetic construct
TKMRGDHGVL

SEQ ID NO: 70173 - protein, 10 aa, synthetic construct
TKMRGDRGQI

SEQ ID NO: 70174 - protein, 10 aa, synthetic construct
TKMRGDRQGI

SEQ ID NO: 70175 - protein, 10 aa, synthetic construct
TKMRGDRGVV

SEQ ID NO: 70176 - protein, 10 aa, synthetic construct
TKMRGDYVGL

SEQ ID NO: 70177 - protein, 10 aa, synthetic construct
TKMRGDLIGR

SEQ ID NO: 70178 - protein, 10 aa, synthetic construct
TKMRGDQSTL

SEQ ID NO: 70179 - protein, 10 aa, synthetic construct
TKMRGDLLLS

SEQ ID NO: 70180 - protein, 10 aa, synthetic construct
TKWRGDHGVL

SEQ ID NO: 70181 - protein, 10 aa, synthetic construct
TKWRGDHVNL

SEQ ID NO: 70182 - protein, 10 aa, synthetic construct
ESPRGDQSTL

SEQ ID NO: 70183 - protein, 10 aa, synthetic construct
AVSRGDHGVL

SEQ ID NO: 70184 - protein, 10 aa, synthetic construct
TKWRGDRDYL

SEQ ID NO: 70185 - protein, 10 aa, synthetic construct
TKWRGDYSSV

SEQ ID NO: 70186 - protein, 10 aa, synthetic construct
TKWRGDLTVT

SEQ ID NO: 70187 - protein, 10 aa, synthetic construct
TKFRGDHGVL

SEQ ID NO: 70188 - protein, 10 aa, synthetic construct
TKFRGDRGQI

SEQ ID NO: 70189 - protein, 10 aa, synthetic construct
TKFRGDRQGI

SEQ ID NO: 70190 - protein, 10 aa, synthetic construct
TKFRGDRGVV

SEQ ID NO: 70191 - protein, 10 aa, synthetic construct
TKFRGDYVGL

SEQ ID NO: 70192 - protein, 10 aa, synthetic construct
TKFRGDLIGR

SEQ ID NO: 70193 - protein, 10 aa, synthetic construct
TKFRGDQSTL

SEQ ID NO: 70194 - protein, 10 aa, synthetic construct
AVSRGDRGQI

SEQ ID NO: 70195 - protein, 10 aa, synthetic construct
TKFRGDLLLS

SEQ ID NO: 70196 - protein, 10 aa, synthetic construct
TKRRGDRDYL

SEQ ID NO: 70197 - protein, 10 aa, synthetic construct
TKRRGDYTSV

SEQ ID NO: 70198 - protein, 10 aa, synthetic construct
TKRRGDLTVT

SEQ ID NO: 70199 - protein, 10 aa, synthetic construct
TKRRGDLIGR

SEQ ID NO: 70200 - protein, 10 aa, synthetic construct
TKHRGDHGVL

SEQ ID NO: 70201 - protein, 10 aa, synthetic construct
TKHRGDHVNL

SEQ ID NO: 70202 - protein, 10 aa, synthetic construct
TKHRGDRDYL

SEQ ID NO: 70203 - protein, 10 aa, synthetic construct
TKHRGDYSSV

SEQ ID NO: 70204 - protein, 10 aa, synthetic construct
TKHRGDLTVT

SEQ ID NO: 70205 - protein, 10 aa, synthetic construct
AVSRGDRQGI

SEQ ID NO: 70206 - protein, 10 aa, synthetic construct
TKSRGDHGVL

SEQ ID NO: 70207 - protein, 10 aa, synthetic construct
TKSRGDHVNL

SEQ ID NO: 70208 - protein, 10 aa, synthetic construct
TKSRGDRDYL

SEQ ID NO: 70209 - protein, 10 aa, synthetic construct
TKSRGDYSSV

SEQ ID NO: 70210 - protein, 10 aa, synthetic construct
TKSRGDLTVT

SEQ ID NO: 70211 - protein, 10 aa, synthetic construct
TKTRGDHGVL

SEQ ID NO: 70212 - protein, 10 aa, synthetic construct
TKTRGDHVNL

SEQ ID NO: 70213 - protein, 10 aa, synthetic construct
TKTRGDRDYL

SEQ ID NO: 70214 - protein, 10 aa, synthetic construct
TKTRGDYSSV

SEQ ID NO: 70215 - protein, 10 aa, synthetic construct
TKTRGDLTVT

SEQ ID NO: 70216 - protein, 10 aa, synthetic construct
AVSRGDRSVV

SEQ ID NO: 70217 - protein, 10 aa, synthetic construct
TKYRGDHGVL

SEQ ID NO: 70218 - protein, 10 aa, synthetic construct
TKYRGDRGQI

SEQ ID NO: 70219 - protein, 10 aa, synthetic construct
TKYRGDRQGI

SEQ ID NO: 70220 - protein, 10 aa, synthetic construct
TKYRGDRGVV

SEQ ID NO: 70221 - protein, 10 aa, synthetic construct
TKYRGDYVGL

SEQ ID NO: 70222 - protein, 10 aa, synthetic construct
TKYRGDLIGR

SEQ ID NO: 70223 - protein, 10 aa, synthetic construct
TKYRGDQSTL

SEQ ID NO: 70224 - protein, 10 aa, synthetic construct
TKYRGDLLLS

SEQ ID NO: 70225 - protein, 10 aa, synthetic construct
TKQRGDHGVL

SEQ ID NO: 70226 - protein, 10 aa, synthetic construct
TKQRGDHVNL

SEQ ID NO: 70227 - protein, 10 aa, synthetic construct
AVSRGDLTVT

SEQ ID NO: 70228 - protein, 10 aa, synthetic construct
TKQRGDRDYL

SEQ ID NO: 70229 - protein, 10 aa, synthetic construct
TKQRGDYSSV

SEQ ID NO: 70230 - protein, 10 aa, synthetic construct
TKQRGDLTVT

SEQ ID NO: 70231 - protein, 10 aa, synthetic construct
TKDRGDHGVL

SEQ ID NO: 70232 - protein, 10 aa, synthetic construct
TKDRGDHVNL

SEQ ID NO: 70233 - protein, 10 aa, synthetic construct
TKDRGDRDYL

SEQ ID NO: 70234 - protein, 10 aa, synthetic construct
TKDRGDYSSV

SEQ ID NO: 70235 - protein, 10 aa, synthetic construct
TKDRGDLTVT

SEQ ID NO: 70236 - protein, 10 aa, synthetic construct
TKERGDHGVL

SEQ ID NO: 70237 - protein, 10 aa, synthetic construct
TKERGDHVNL

SEQ ID NO: 70238 - protein, 10 aa, synthetic construct
AVSRGDLIGR

SEQ ID NO: 70239 - protein, 10 aa, synthetic construct
TKERGDRDYL

SEQ ID NO: 70240 - protein, 10 aa, synthetic construct
TKERGDYSSV

SEQ ID NO: 70241 - protein, 10 aa, synthetic construct
TKERGDLTVT

SEQ ID NO: 70242 - protein, 10 aa, synthetic construct
TRGRGDYNSL

SEQ ID NO: 70243 - protein, 10 aa, synthetic construct
TRGRGDFNNT

SEQ ID NO: 70244 - protein, 10 aa, synthetic construct
TRGRGDFNNL

SEQ ID NO: 70245 - protein, 10 aa, synthetic construct
TRGRGDFQNT

SEQ ID NO: 70246 - protein, 10 aa, synthetic construct
TRARGDYNSL

SEQ ID NO: 70247 - protein, 10 aa, synthetic construct
TRARGDFNNT

SEQ ID NO: 70248 - protein, 10 aa, synthetic construct
TRARGDFNNL

SEQ ID NO: 70249 - protein, 10 aa, synthetic construct
AVSRGDRSQT

SEQ ID NO: 70250 - protein, 10 aa, synthetic construct
TRARGDFQNT

SEQ ID NO: 70251 - protein, 10 aa, synthetic construct
TRVRGDYNSL

SEQ ID NO: 70252 - protein, 10 aa, synthetic construct
TRVRGDYTSV

SEQ ID NO: 70253 - protein, 10 aa, synthetic construct
TRVRGDYTSM

SEQ ID NO: 70254 - protein, 10 aa, synthetic construct
TRVRGDFQNT

SEQ ID NO: 70255 - protein, 10 aa, synthetic construct
TRPRGDYNSL

SEQ ID NO: 70256 - protein, 10 aa, synthetic construct
TRPRGDFNNT

SEQ ID NO: 70257 - protein, 10 aa, synthetic construct
TRPRGDFNNL

SEQ ID NO: 70258 - protein, 10 aa, synthetic construct
TRPRGDFQNT

SEQ ID NO: 70259 - protein, 10 aa, synthetic construct
TRLRGDYNSL

SEQ ID NO: 70260 - protein, 10 aa, synthetic construct
AVSRGDLLLS

SEQ ID NO: 70261 - protein, 10 aa, synthetic construct
TRLRGDYTSV

SEQ ID NO: 70262 - protein, 10 aa, synthetic construct
TRLRGDYTSM

SEQ ID NO: 70263 - protein, 10 aa, synthetic construct
TRLRGDFQNT

SEQ ID NO: 70264 - protein, 10 aa, synthetic construct
TRIRGDRDYL

SEQ ID NO: 70265 - protein, 10 aa, synthetic construct
TRIRGDYTSV

SEQ ID NO: 70266 - protein, 10 aa, synthetic construct
TRIRGDLTVT

SEQ ID NO: 70267 - protein, 10 aa, synthetic construct
TRIRGDLIGR

SEQ ID NO: 70268 - protein, 10 aa, synthetic construct
TRMRGDRDYL

SEQ ID NO: 70269 - protein, 10 aa, synthetic construct
TRMRGDYTSV

SEQ ID NO: 70270 - protein, 10 aa, synthetic construct
TRMRGDLTVT

SEQ ID NO: 70271 - protein, 10 aa, synthetic construct
AVTRGDRGVV

SEQ ID NO: 70272 - protein, 10 aa, synthetic construct
TRMRGDLIGR

SEQ ID NO: 70273 - protein, 10 aa, synthetic construct
TRWRGDYNSL

SEQ ID NO: 70274 - protein, 10 aa, synthetic construct
TRWRGDYTSV

SEQ ID NO: 70275 - protein, 10 aa, synthetic construct
TRWRGDYTSM

SEQ ID NO: 70276 - protein, 10 aa, synthetic construct
TRWRGDFQNT

SEQ ID NO: 70277 - protein, 10 aa, synthetic construct
TRFRGDRDYL

SEQ ID NO: 70278 - protein, 10 aa, synthetic construct
TRFRGDYTSV

SEQ ID NO: 70279 - protein, 10 aa, synthetic construct
TRFRGDLTVT

SEQ ID NO: 70280 - protein, 10 aa, synthetic construct
TRFRGDLIGR

SEQ ID NO: 70281 - protein, 10 aa, synthetic construct
TRKRGDRDYL

SEQ ID NO: 70282 - protein, 10 aa, synthetic construct
AVQRGDRGVV

SEQ ID NO: 70283 - protein, 10 aa, synthetic construct
TRKRGDYTSV

SEQ ID NO: 70284 - protein, 10 aa, synthetic construct
TRKRGDLTVT

SEQ ID NO: 70285 - protein, 10 aa, synthetic construct
TRKRGDLIGR

SEQ ID NO: 70286 - protein, 10 aa, synthetic construct
TRRRGDYNSL

SEQ ID NO: 70287 - protein, 10 aa, synthetic construct
TRRRGDFNNT

SEQ ID NO: 70288 - protein, 10 aa, synthetic construct
TRRRGDFNNL

SEQ ID NO: 70289 - protein, 10 aa, synthetic construct
TRRRGDFQNT

SEQ ID NO: 70290 - protein, 10 aa, synthetic construct
TRHRGDYNSL

SEQ ID NO: 70291 - protein, 10 aa, synthetic construct
TRHRGDYTSV

SEQ ID NO: 70292 - protein, 10 aa, synthetic construct
TRHRGDYTSM

SEQ ID NO: 70293 - protein, 10 aa, synthetic construct
ESPRGDLLLS

SEQ ID NO: 70294 - protein, 10 aa, synthetic construct
AVDRGDRGVV

SEQ ID NO: 70295 - protein, 10 aa, synthetic construct
TRHRGDFQNT

SEQ ID NO: 70296 - protein, 10 aa, synthetic construct
TRSRGDYNSL

SEQ ID NO: 70297 - protein, 10 aa, synthetic construct
TRSRGDYTSV

SEQ ID NO: 70298 - protein, 10 aa, synthetic construct
TRSRGDYTSM

SEQ ID NO: 70299 - protein, 10 aa, synthetic construct
TRSRGDFQNT

SEQ ID NO: 70300 - protein, 10 aa, synthetic construct
TRTRGDYNSL

SEQ ID NO: 70301 - protein, 10 aa, synthetic construct
TRTRGDYTSV

SEQ ID NO: 70302 - protein, 10 aa, synthetic construct
TRTRGDYTSM

SEQ ID NO: 70303 - protein, 10 aa, synthetic construct
TRTRGDFQNT

SEQ ID NO: 70304 - protein, 10 aa, synthetic construct
TRYRGDRDYL

SEQ ID NO: 70305 - protein, 10 aa, synthetic construct
AVERGDRGVV

SEQ ID NO: 70306 - protein, 10 aa, synthetic construct
TRYRGDYTSV

SEQ ID NO: 70307 - protein, 10 aa, synthetic construct
TRYRGDLTVT

SEQ ID NO: 70308 - protein, 10 aa, synthetic construct
TRYRGDLIGR

SEQ ID NO: 70309 - protein, 10 aa, synthetic construct
TRNRGDRDYL

SEQ ID NO: 70310 - protein, 10 aa, synthetic construct
TRNRGDYTSV

SEQ ID NO: 70311 - protein, 10 aa, synthetic construct
TRNRGDLTVT

SEQ ID NO: 70312 - protein, 10 aa, synthetic construct
TRNRGDLIGR

SEQ ID NO: 70313 - protein, 10 aa, synthetic construct
TRQRGDYNSL

SEQ ID NO: 70314 - protein, 10 aa, synthetic construct
TRQRGDYTSV

SEQ ID NO: 70315 - protein, 10 aa, synthetic construct
TRQRGDYTSM

SEQ ID NO: 70316 - protein, 10 aa, synthetic construct
APGRGDRDYL

SEQ ID NO: 70317 - protein, 10 aa, synthetic construct
TRQRGDFQNT

SEQ ID NO: 70318 - protein, 10 aa, synthetic construct
TRDRGDYNSL

SEQ ID NO: 70319 - protein, 10 aa, synthetic construct
TRDRGDYTSV

SEQ ID NO: 70320 - protein, 10 aa, synthetic construct
TRDRGDYTSM

SEQ ID NO: 70321 - protein, 10 aa, synthetic construct
TRDRGDFQNT

SEQ ID NO: 70322 - protein, 10 aa, synthetic construct
TRERGDYNSL

SEQ ID NO: 70323 - protein, 10 aa, synthetic construct
TRERGDYTSV

SEQ ID NO: 70324 - protein, 10 aa, synthetic construct
TRERGDYTSM

SEQ ID NO: 70325 - protein, 10 aa, synthetic construct
TRERGDFQNT

SEQ ID NO: 70326 - protein, 10 aa, synthetic construct
THGRGDYNSL

SEQ ID NO: 70327 - protein, 10 aa, synthetic construct
APGRGDYVGL

SEQ ID NO: 70328 - protein, 10 aa, synthetic construct
THGRGDYTSV

SEQ ID NO: 70329 - protein, 10 aa, synthetic construct
THGRGDYTSM

SEQ ID NO: 70330 - protein, 10 aa, synthetic construct
THGRGDFQNT

SEQ ID NO: 70331 - protein, 10 aa, synthetic construct
THARGDYNSL

SEQ ID NO: 70332 - protein, 10 aa, synthetic construct
THARGDYTSV

SEQ ID NO: 70333 - protein, 10 aa, synthetic construct
THARGDYTSM

SEQ ID NO: 70334 - protein, 10 aa, synthetic construct
THARGDFQNT

SEQ ID NO: 70335 - protein, 10 aa, synthetic construct
THVRGDRDYL

SEQ ID NO: 70336 - protein, 10 aa, synthetic construct
THVRGDYTSV

SEQ ID NO: 70337 - protein, 10 aa, synthetic construct
THVRGDLTVT

SEQ ID NO: 70338 - protein, 10 aa, synthetic construct
APGRGDQSTL

SEQ ID NO: 70339 - protein, 10 aa, synthetic construct
THVRGDLIGR

SEQ ID NO: 70340 - protein, 10 aa, synthetic construct
THPRGDYNSL

SEQ ID NO: 70341 - protein, 10 aa, synthetic construct
THPRGDYTSV

SEQ ID NO: 70342 - protein, 10 aa, synthetic construct
THPRGDYTSM

SEQ ID NO: 70343 - protein, 10 aa, synthetic construct
THPRGDFQNT

SEQ ID NO: 70344 - protein, 10 aa, synthetic construct
THLRGDRDYL

SEQ ID NO: 70345 - protein, 10 aa, synthetic construct
THLRGDYTSV

SEQ ID NO: 70346 - protein, 10 aa, synthetic construct
THLRGDLTVT

SEQ ID NO: 70347 - protein, 10 aa, synthetic construct
THLRGDLIGR

SEQ ID NO: 70348 - protein, 10 aa, synthetic construct
THIRGDHGVL

SEQ ID NO: 70349 - protein, 10 aa, synthetic construct
APARGDRDYL

SEQ ID NO: 70350 - protein, 10 aa, synthetic construct
THIRGDHVNL

SEQ ID NO: 70351 - protein, 10 aa, synthetic construct
THIRGDRDYL

SEQ ID NO: 70352 - protein, 10 aa, synthetic construct
THIRGDYSSV

SEQ ID NO: 70353 - protein, 10 aa, synthetic construct
THIRGDLTVT

SEQ ID NO: 70354 - protein, 10 aa, synthetic construct
THMRGDHGVL

SEQ ID NO: 70355 - protein, 10 aa, synthetic construct
THMRGDHVNL

SEQ ID NO: 70356 - protein, 10 aa, synthetic construct
THMRGDRDYL

SEQ ID NO: 70357 - protein, 10 aa, synthetic construct
THMRGDYSSV

SEQ ID NO: 70358 - protein, 10 aa, synthetic construct
THMRGDLTVT

SEQ ID NO: 70359 - protein, 10 aa, synthetic construct
THWRGDRDYL

SEQ ID NO: 70360 - protein, 10 aa, synthetic construct
APARGDYVGL

SEQ ID NO: 70361 - protein, 10 aa, synthetic construct
THWRGDYTSV

SEQ ID NO: 70362 - protein, 10 aa, synthetic construct
THWRGDLTVT

SEQ ID NO: 70363 - protein, 10 aa, synthetic construct
THWRGDLIGR

SEQ ID NO: 70364 - protein, 10 aa, synthetic construct
THFRGDHGVL

SEQ ID NO: 70365 - protein, 10 aa, synthetic construct
THFRGDHVNL

SEQ ID NO: 70366 - protein, 10 aa, synthetic construct
THFRGDRDYL

SEQ ID NO: 70367 - protein, 10 aa, synthetic construct
THFRGDYSSV

SEQ ID NO: 70368 - protein, 10 aa, synthetic construct
THFRGDLTVT

SEQ ID NO: 70369 - protein, 10 aa, synthetic construct
THKRGDHGVL

SEQ ID NO: 70370 - protein, 10 aa, synthetic construct
THKRGDHVNL

SEQ ID NO: 70371 - protein, 10 aa, synthetic construct
APARGDQSTL

SEQ ID NO: 70372 - protein, 10 aa, synthetic construct
THKRGDRDYL

SEQ ID NO: 70373 - protein, 10 aa, synthetic construct
THKRGDYSSV

SEQ ID NO: 70374 - protein, 10 aa, synthetic construct
THKRGDLTVT

SEQ ID NO: 70375 - protein, 10 aa, synthetic construct
THRRGDYNSL

SEQ ID NO: 70376 - protein, 10 aa, synthetic construct
THRRGDYTSV

SEQ ID NO: 70377 - protein, 10 aa, synthetic construct
THRRGDYTSM

SEQ ID NO: 70378 - protein, 10 aa, synthetic construct
THRRGDFQNT

SEQ ID NO: 70379 - protein, 10 aa, synthetic construct
THHRGDRDYL

SEQ ID NO: 70380 - protein, 10 aa, synthetic construct
THHRGDYTSV

SEQ ID NO: 70381 - protein, 10 aa, synthetic construct
THHRGDLTVT

SEQ ID NO: 70382 - protein, 10 aa, synthetic construct
APVRGDRDYL

SEQ ID NO: 70383 - protein, 10 aa, synthetic construct
THHRGDLIGR

SEQ ID NO: 70384 - protein, 10 aa, synthetic construct
THSRGDRDYL

SEQ ID NO: 70385 - protein, 10 aa, synthetic construct
THSRGDYTSV

SEQ ID NO: 70386 - protein, 10 aa, synthetic construct
THSRGDLTVT

SEQ ID NO: 70387 - protein, 10 aa, synthetic construct
THSRGDLIGR

SEQ ID NO: 70388 - protein, 10 aa, synthetic construct
THTRGDRDYL

SEQ ID NO: 70389 - protein, 10 aa, synthetic construct
THTRGDYTSV

SEQ ID NO: 70390 - protein, 10 aa, synthetic construct
THTRGDLTVT

SEQ ID NO: 70391 - protein, 10 aa, synthetic construct
THTRGDLIGR

SEQ ID NO: 70392 - protein, 10 aa, synthetic construct
THYRGDHGVL

SEQ ID NO: 70393 - protein, 10 aa, synthetic construct
APVRGDYVGL

SEQ ID NO: 70394 - protein, 10 aa, synthetic construct
THYRGDHVNL

SEQ ID NO: 70395 - protein, 10 aa, synthetic construct
THYRGDRDYL

SEQ ID NO: 70396 - protein, 10 aa, synthetic construct
THYRGDYSSV

SEQ ID NO: 70397 - protein, 10 aa, synthetic construct
THYRGDLTVT

SEQ ID NO: 70398 - protein, 10 aa, synthetic construct
THNRGDHGVL

SEQ ID NO: 70399 - protein, 10 aa, synthetic construct
THNRGDHVNL

SEQ ID NO: 70400 - protein, 10 aa, synthetic construct
THNRGDRDYL

SEQ ID NO: 70401 - protein, 10 aa, synthetic construct
THNRGDYSSV

SEQ ID NO: 70402 - protein, 10 aa, synthetic construct
THNRGDLTVT

SEQ ID NO: 70403 - protein, 10 aa, synthetic construct
THQRGDRDYL

SEQ ID NO: 70404 - protein, 10 aa, synthetic construct
NSPRGDRGQI

SEQ ID NO: 70405 - protein, 10 aa, synthetic construct
APVRGDQSTL

SEQ ID NO: 70406 - protein, 10 aa, synthetic construct
THQRGDYTSV

SEQ ID NO: 70407 - protein, 10 aa, synthetic construct
THQRGDLTVT

SEQ ID NO: 70408 - protein, 10 aa, synthetic construct
THQRGDLIGR

SEQ ID NO: 70409 - protein, 10 aa, synthetic construct
THDRGDRDYL

SEQ ID NO: 70410 - protein, 10 aa, synthetic construct
THDRGDYTSV

SEQ ID NO: 70411 - protein, 10 aa, synthetic construct
THDRGDLTVT

SEQ ID NO: 70412 - protein, 10 aa, synthetic construct
THDRGDLIGR

SEQ ID NO: 70413 - protein, 10 aa, synthetic construct
THERGDRDYL

SEQ ID NO: 70414 - protein, 10 aa, synthetic construct
THERGDYTSV

SEQ ID NO: 70415 - protein, 10 aa, synthetic construct
THERGDLTVT

SEQ ID NO: 70416 - protein, 10 aa, synthetic construct
APLRGDRDYL

SEQ ID NO: 70417 - protein, 10 aa, synthetic construct
THERGDLIGR

SEQ ID NO: 70418 - protein, 10 aa, synthetic construct
TSGRGDFNNT

SEQ ID NO: 70419 - protein, 10 aa, synthetic construct
TSGRGDFNNL

SEQ ID NO: 70420 - protein, 10 aa, synthetic construct
TSARGDFNNT

SEQ ID NO: 70421 - protein, 10 aa, synthetic construct
TSARGDFNNL

SEQ ID NO: 70422 - protein, 10 aa, synthetic construct
TSVRGDYNSL

SEQ ID NO: 70423 - protein, 10 aa, synthetic construct
TSVRGDYTSM

SEQ ID NO: 70424 - protein, 10 aa, synthetic construct
TSVRGDFQNT

SEQ ID NO: 70425 - protein, 10 aa, synthetic construct
TSLRGDYNSL

SEQ ID NO: 70426 - protein, 10 aa, synthetic construct
TSLRGDYTSM

SEQ ID NO: 70427 - protein, 10 aa, synthetic construct
APLRGDYVGL

SEQ ID NO: 70428 - protein, 10 aa, synthetic construct
TSLRGDFQNT

SEQ ID NO: 70429 - protein, 10 aa, synthetic construct
TSIRGDYTSV

SEQ ID NO: 70430 - protein, 10 aa, synthetic construct
TSIRGDLIGR

SEQ ID NO: 70431 - protein, 10 aa, synthetic construct
TSMRGDYTSV

SEQ ID NO: 70432 - protein, 10 aa, synthetic construct
TSMRGDLIGR

SEQ ID NO: 70433 - protein, 10 aa, synthetic construct
TSWRGDYNSL

SEQ ID NO: 70434 - protein, 10 aa, synthetic construct
TSWRGDYTSM

SEQ ID NO: 70435 - protein, 10 aa, synthetic construct
TSWRGDFQNT

SEQ ID NO: 70436 - protein, 10 aa, synthetic construct
TSFRGDYTSV

SEQ ID NO: 70437 - protein, 10 aa, synthetic construct
TSFRGDLIGR

SEQ ID NO: 70438 - protein, 10 aa, synthetic construct
APLRGDQSTL

SEQ ID NO: 70439 - protein, 10 aa, synthetic construct
TSKRGDYTSV

SEQ ID NO: 70440 - protein, 10 aa, synthetic construct
TSKRGDLIGR

SEQ ID NO: 70441 - protein, 10 aa, synthetic construct
TSRRGDFNNT

SEQ ID NO: 70442 - protein, 10 aa, synthetic construct
TSRRGDFNNL

SEQ ID NO: 70443 - protein, 10 aa, synthetic construct
TSHRGDYNSL

SEQ ID NO: 70444 - protein, 10 aa, synthetic construct
TSHRGDYTSM

SEQ ID NO: 70445 - protein, 10 aa, synthetic construct
TSHRGDFQNT

SEQ ID NO: 70446 - protein, 10 aa, synthetic construct
TSSRGDYNSL

SEQ ID NO: 70447 - protein, 10 aa, synthetic construct
TSSRGDYTSM

SEQ ID NO: 70448 - protein, 10 aa, synthetic construct
TSSRGDFQNT

SEQ ID NO: 70449 - protein, 10 aa, synthetic construct
APIRGDRGVV

SEQ ID NO: 70450 - protein, 10 aa, synthetic construct
TSTRGDYNSL

SEQ ID NO: 70451 - protein, 10 aa, synthetic construct
TSTRGDYTSM

SEQ ID NO: 70452 - protein, 10 aa, synthetic construct
TSTRGDFQNT

SEQ ID NO: 70453 - protein, 10 aa, synthetic construct
TSYRGDYTSV

SEQ ID NO: 70454 - protein, 10 aa, synthetic construct
TSYRGDLIGR

SEQ ID NO: 70455 - protein, 10 aa, synthetic construct
TSNRGDYTSV

SEQ ID NO: 70456 - protein, 10 aa, synthetic construct
TSNRGDLIGR

SEQ ID NO: 70457 - protein, 10 aa, synthetic construct
TSQRGDYNSL

SEQ ID NO: 70458 - protein, 10 aa, synthetic construct
TSQRGDYTSM

SEQ ID NO: 70459 - protein, 10 aa, synthetic construct
TSQRGDFQNT

SEQ ID NO: 70460 - protein, 10 aa, synthetic construct
APMRGDRGQI

SEQ ID NO: 70461 - protein, 10 aa, synthetic construct
TSDRGDYNSL

SEQ ID NO: 70462 - protein, 10 aa, synthetic construct
TSDRGDYTSM

SEQ ID NO: 70463 - protein, 10 aa, synthetic construct
TSDRGDFQNT

SEQ ID NO: 70464 - protein, 10 aa, synthetic construct
TSERGDYNSL

SEQ ID NO: 70465 - protein, 10 aa, synthetic construct
TSERGDYTSM

SEQ ID NO: 70466 - protein, 10 aa, synthetic construct
TSERGDFQNT

SEQ ID NO: 70467 - protein, 10 aa, synthetic construct
TTGRGDYNSL

SEQ ID NO: 70468 - protein, 10 aa, synthetic construct
TTGRGDYTSV

SEQ ID NO: 70469 - protein, 10 aa, synthetic construct
TTGRGDYTSM

SEQ ID NO: 70470 - protein, 10 aa, synthetic construct
TTGRGDFQNT

SEQ ID NO: 70471 - protein, 10 aa, synthetic construct
APMRGDRQGI

SEQ ID NO: 70472 - protein, 10 aa, synthetic construct
TTARGDYNSL

SEQ ID NO: 70473 - protein, 10 aa, synthetic construct
TTARGDYTSV

SEQ ID NO: 70474 - protein, 10 aa, synthetic construct
TTARGDYTSM

SEQ ID NO: 70475 - protein, 10 aa, synthetic construct
TTARGDFQNT

SEQ ID NO: 70476 - protein, 10 aa, synthetic construct
TTVRGDRDYL

SEQ ID NO: 70477 - protein, 10 aa, synthetic construct
TTVRGDYTSV

SEQ ID NO: 70478 - protein, 10 aa, synthetic construct
TTVRGDLTVT

SEQ ID NO: 70479 - protein, 10 aa, synthetic construct
TTVRGDLIGR

SEQ ID NO: 70480 - protein, 10 aa, synthetic construct
TTPRGDYNSL

SEQ ID NO: 70481 - protein, 10 aa, synthetic construct
TTPRGDYTSV

SEQ ID NO: 70482 - protein, 10 aa, synthetic construct
APMRGDRSVV

SEQ ID NO: 70483 - protein, 10 aa, synthetic construct
TTPRGDYTSM

SEQ ID NO: 70484 - protein, 10 aa, synthetic construct
TTPRGDFQNT

SEQ ID NO: 70485 - protein, 10 aa, synthetic construct
TTLRGDRDYL

SEQ ID NO: 70486 - protein, 10 aa, synthetic construct
TTLRGDYTSV

SEQ ID NO: 70487 - protein, 10 aa, synthetic construct
TTLRGDLTVT

SEQ ID NO: 70488 - protein, 10 aa, synthetic construct
TTLRGDLIGR

SEQ ID NO: 70489 - protein, 10 aa, synthetic construct
TTIRGDHGVL

SEQ ID NO: 70490 - protein, 10 aa, synthetic construct
TTIRGDHVNL

SEQ ID NO: 70491 - protein, 10 aa, synthetic construct
TTIRGDRDYL

SEQ ID NO: 70492 - protein, 10 aa, synthetic construct
TTIRGDYSSV

SEQ ID NO: 70493 - protein, 10 aa, synthetic construct
APMRGDRGVV

SEQ ID NO: 70494 - protein, 10 aa, synthetic construct
TTIRGDLTVT

SEQ ID NO: 70495 - protein, 10 aa, synthetic construct
TTMRGDHGVL

SEQ ID NO: 70496 - protein, 10 aa, synthetic construct
TTMRGDHVNL

SEQ ID NO: 70497 - protein, 10 aa, synthetic construct
TTMRGDRDYL

SEQ ID NO: 70498 - protein, 10 aa, synthetic construct
TTMRGDYSSV

SEQ ID NO: 70499 - protein, 10 aa, synthetic construct
TTMRGDLTVT

SEQ ID NO: 70500 - protein, 10 aa, synthetic construct
TTWRGDRDYL

SEQ ID NO: 70501 - protein, 10 aa, synthetic construct
TTWRGDYTSV

SEQ ID NO: 70502 - protein, 10 aa, synthetic construct
TTWRGDLTVT

SEQ ID NO: 70503 - protein, 10 aa, synthetic construct
TTWRGDLIGR

SEQ ID NO: 70504 - protein, 10 aa, synthetic construct
APMRGDRSQT

SEQ ID NO: 70505 - protein, 10 aa, synthetic construct
TTFRGDHGVL

SEQ ID NO: 70506 - protein, 10 aa, synthetic construct
TTFRGDHVNL

SEQ ID NO: 70507 - protein, 10 aa, synthetic construct
TTFRGDRDYL

SEQ ID NO: 70508 - protein, 10 aa, synthetic construct
TTFRGDYSSV

SEQ ID NO: 70509 - protein, 10 aa, synthetic construct
TTFRGDLTVT

SEQ ID NO: 70510 - protein, 10 aa, synthetic construct
TTKRGDHGVL

SEQ ID NO: 70511 - protein, 10 aa, synthetic construct
TTKRGDHVNL

SEQ ID NO: 70512 - protein, 10 aa, synthetic construct
TTKRGDRDYL

SEQ ID NO: 70513 - protein, 10 aa, synthetic construct
TTKRGDYSSV

SEQ ID NO: 70514 - protein, 10 aa, synthetic construct
TTKRGDLTVT

SEQ ID NO: 70515 - protein, 10 aa, synthetic construct
NSPRGDRQGI

SEQ ID NO: 70516 - protein, 10 aa, synthetic construct
APWRGDHGVL

SEQ ID NO: 70517 - protein, 10 aa, synthetic construct
TTRRGDYNSL

SEQ ID NO: 70518 - protein, 10 aa, synthetic construct
TTRRGDYTSV

SEQ ID NO: 70519 - protein, 10 aa, synthetic construct
TTRRGDYTSM

SEQ ID NO: 70520 - protein, 10 aa, synthetic construct
TTRRGDFQNT

SEQ ID NO: 70521 - protein, 10 aa, synthetic construct
TTHRGDRDYL

SEQ ID NO: 70522 - protein, 10 aa, synthetic construct
TTHRGDYTSV

SEQ ID NO: 70523 - protein, 10 aa, synthetic construct
TTHRGDLTVT

SEQ ID NO: 70524 - protein, 10 aa, synthetic construct
TTHRGDLIGR

SEQ ID NO: 70525 - protein, 10 aa, synthetic construct
TTSRGDRDYL

SEQ ID NO: 70526 - protein, 10 aa, synthetic construct
TTSRGDYTSV

SEQ ID NO: 70527 - protein, 10 aa, synthetic construct
APWRGDYVGL

SEQ ID NO: 70528 - protein, 10 aa, synthetic construct
TTSRGDLTVT

SEQ ID NO: 70529 - protein, 10 aa, synthetic construct
TTSRGDLIGR

SEQ ID NO: 70530 - protein, 10 aa, synthetic construct
TTTRGDRDYL

SEQ ID NO: 70531 - protein, 10 aa, synthetic construct
TTTRGDYTSV

SEQ ID NO: 70532 - protein, 10 aa, synthetic construct
TTTRGDLTVT

SEQ ID NO: 70533 - protein, 10 aa, synthetic construct
TTTRGDLIGR

SEQ ID NO: 70534 - protein, 10 aa, synthetic construct
TTYRGDHGVL

SEQ ID NO: 70535 - protein, 10 aa, synthetic construct
TTYRGDHVNL

SEQ ID NO: 70536 - protein, 10 aa, synthetic construct
TTYRGDRDYL

SEQ ID NO: 70537 - protein, 10 aa, synthetic construct
TTYRGDYSSV

SEQ ID NO: 70538 - protein, 10 aa, synthetic construct
APWRGDQSTL

SEQ ID NO: 70539 - protein, 10 aa, synthetic construct
TTYRGDLTVT

SEQ ID NO: 70540 - protein, 10 aa, synthetic construct
TTNRGDHGVL

SEQ ID NO: 70541 - protein, 10 aa, synthetic construct
TTNRGDHVNL

SEQ ID NO: 70542 - protein, 10 aa, synthetic construct
TTNRGDRDYL

SEQ ID NO: 70543 - protein, 10 aa, synthetic construct
TTNRGDYSSV

SEQ ID NO: 70544 - protein, 10 aa, synthetic construct
TTNRGDLTVT

SEQ ID NO: 70545 - protein, 10 aa, synthetic construct
TTQRGDRDYL

SEQ ID NO: 70546 - protein, 10 aa, synthetic construct
TTQRGDYTSV

SEQ ID NO: 70547 - protein, 10 aa, synthetic construct
TTQRGDLTVT

SEQ ID NO: 70548 - protein, 10 aa, synthetic construct
TTQRGDLIGR

SEQ ID NO: 70549 - protein, 10 aa, synthetic construct
APWRGDLLLS

SEQ ID NO: 70550 - protein, 10 aa, synthetic construct
TTDRGDRDYL

SEQ ID NO: 70551 - protein, 10 aa, synthetic construct
TTDRGDYTSV

SEQ ID NO: 70552 - protein, 10 aa, synthetic construct
TTDRGDLTVT

SEQ ID NO: 70553 - protein, 10 aa, synthetic construct
TTDRGDLIGR

SEQ ID NO: 70554 - protein, 10 aa, synthetic construct
TTERGDRDYL

SEQ ID NO: 70555 - protein, 10 aa, synthetic construct
TTERGDYTSV

SEQ ID NO: 70556 - protein, 10 aa, synthetic construct
TTERGDLTVT

SEQ ID NO: 70557 - protein, 10 aa, synthetic construct
TTERGDLIGR

SEQ ID NO: 70558 - protein, 10 aa, synthetic construct
TYGRGDRDYL

SEQ ID NO: 70559 - protein, 10 aa, synthetic construct
TYGRGDYTSV

SEQ ID NO: 70560 - protein, 10 aa, synthetic construct
APFRGDRGVV

SEQ ID NO: 70561 - protein, 10 aa, synthetic construct
TYGRGDLTVT

SEQ ID NO: 70562 - protein, 10 aa, synthetic construct
TYGRGDLIGR

SEQ ID NO: 70563 - protein, 10 aa, synthetic construct
TYARGDRDYL

SEQ ID NO: 70564 - protein, 10 aa, synthetic construct
TYARGDYTSV

SEQ ID NO: 70565 - protein, 10 aa, synthetic construct
TYARGDLTVT

SEQ ID NO: 70566 - protein, 10 aa, synthetic construct
TYARGDLIGR

SEQ ID NO: 70567 - protein, 10 aa, synthetic construct
TYVRGDHGVL

SEQ ID NO: 70568 - protein, 10 aa, synthetic construct
TYVRGDHVNL

SEQ ID NO: 70569 - protein, 10 aa, synthetic construct
TYVRGDRDYL

SEQ ID NO: 70570 - protein, 10 aa, synthetic construct
TYVRGDYSSV

SEQ ID NO: 70571 - protein, 10 aa, synthetic construct
APKRGDRGVV

SEQ ID NO: 70572 - protein, 10 aa, synthetic construct
TYVRGDLTVT

SEQ ID NO: 70573 - protein, 10 aa, synthetic construct
TYPRGDRDYL

SEQ ID NO: 70574 - protein, 10 aa, synthetic construct
TYPRGDYTSV

SEQ ID NO: 70575 - protein, 10 aa, synthetic construct
TYPRGDLTVT

SEQ ID NO: 70576 - protein, 10 aa, synthetic construct
TYPRGDLIGR

SEQ ID NO: 70577 - protein, 10 aa, synthetic construct
TYLRGDHGVL

SEQ ID NO: 70578 - protein, 10 aa, synthetic construct
TYLRGDHVNL

SEQ ID NO: 70579 - protein, 10 aa, synthetic construct
TYLRGDRDYL

SEQ ID NO: 70580 - protein, 10 aa, synthetic construct
TYLRGDYSSV

SEQ ID NO: 70581 - protein, 10 aa, synthetic construct
TYLRGDLTVT

SEQ ID NO: 70582 - protein, 10 aa, synthetic construct
APRRGDRDYL

SEQ ID NO: 70583 - protein, 10 aa, synthetic construct
TYIRGDHGVL

SEQ ID NO: 70584 - protein, 10 aa, synthetic construct
TYIRGDRGQI

SEQ ID NO: 70585 - protein, 10 aa, synthetic construct
TYIRGDRQGI

SEQ ID NO: 70586 - protein, 10 aa, synthetic construct
TYIRGDRGVV

SEQ ID NO: 70587 - protein, 10 aa, synthetic construct
TYIRGDYVGL

SEQ ID NO: 70588 - protein, 10 aa, synthetic construct
TYIRGDLIGR

SEQ ID NO: 70589 - protein, 10 aa, synthetic construct
TYIRGDQSTL

SEQ ID NO: 70590 - protein, 10 aa, synthetic construct
TYIRGDLLLS

SEQ ID NO: 70591 - protein, 10 aa, synthetic construct
TYMRGDHGVL

SEQ ID NO: 70592 - protein, 10 aa, synthetic construct
TYMRGDRGQI

SEQ ID NO: 70593 - protein, 10 aa, synthetic construct
APRRGDYVGL

SEQ ID NO: 70594 - protein, 10 aa, synthetic construct
TYMRGDRQGI

SEQ ID NO: 70595 - protein, 10 aa, synthetic construct
TYMRGDRGVV

SEQ ID NO: 70596 - protein, 10 aa, synthetic construct
TYMRGDYVGL

SEQ ID NO: 70597 - protein, 10 aa, synthetic construct
TYMRGDLIGR

SEQ ID NO: 70598 - protein, 10 aa, synthetic construct
TYMRGDQSTL

SEQ ID NO: 70599 - protein, 10 aa, synthetic construct
TYMRGDLLLS

SEQ ID NO: 70600 - protein, 10 aa, synthetic construct
TYWRGDHGVL

SEQ ID NO: 70601 - protein, 10 aa, synthetic construct
TYWRGDHVNL

SEQ ID NO: 70602 - protein, 10 aa, synthetic construct
TYWRGDRDYL

SEQ ID NO: 70603 - protein, 10 aa, synthetic construct
TYWRGDYSSV

SEQ ID NO: 70604 - protein, 10 aa, synthetic construct
APRRGDQSTL

SEQ ID NO: 70605 - protein, 10 aa, synthetic construct
TYWRGDLTVT

SEQ ID NO: 70606 - protein, 10 aa, synthetic construct
TYFRGDHGVL

SEQ ID NO: 70607 - protein, 10 aa, synthetic construct
TYFRGDRGQI

SEQ ID NO: 70608 - protein, 10 aa, synthetic construct
TYFRGDRQGI

SEQ ID NO: 70609 - protein, 10 aa, synthetic construct
TYFRGDRGVV

SEQ ID NO: 70610 - protein, 10 aa, synthetic construct
TYFRGDYVGL

SEQ ID NO: 70611 - protein, 10 aa, synthetic construct
TYFRGDLIGR

SEQ ID NO: 70612 - protein, 10 aa, synthetic construct
TYFRGDQSTL

SEQ ID NO: 70613 - protein, 10 aa, synthetic construct
TYFRGDLLLS

SEQ ID NO: 70614 - protein, 10 aa, synthetic construct
TYKRGDHGVL

SEQ ID NO: 70615 - protein, 10 aa, synthetic construct
APHRGDHGVL

SEQ ID NO: 70616 - protein, 10 aa, synthetic construct
TYKRGDRGQI

SEQ ID NO: 70617 - protein, 10 aa, synthetic construct
TYKRGDRQGI

SEQ ID NO: 70618 - protein, 10 aa, synthetic construct
TYKRGDRGVV

SEQ ID NO: 70619 - protein, 10 aa, synthetic construct
TYKRGDYVGL

SEQ ID NO: 70620 - protein, 10 aa, synthetic construct
TYKRGDLIGR

SEQ ID NO: 70621 - protein, 10 aa, synthetic construct
TYKRGDQSTL

SEQ ID NO: 70622 - protein, 10 aa, synthetic construct
TYKRGDLLLS

SEQ ID NO: 70623 - protein, 10 aa, synthetic construct
TYRRGDRDYL

SEQ ID NO: 70624 - protein, 10 aa, synthetic construct
TYRRGDYTSV

SEQ ID NO: 70625 - protein, 10 aa, synthetic construct
TYRRGDLTVT

SEQ ID NO: 70626 - protein, 10 aa, synthetic construct
SKNRGDRSVV

SEQ ID NO: 70627 - protein, 10 aa, synthetic construct
SKNRGDRGQI

SEQ ID NO: 70628 - protein, 10 aa, synthetic construct
NSPRGDRSVV

SEQ ID NO: 70629 - protein, 10 aa, synthetic construct
APHRGDRGQI

SEQ ID NO: 70630 - protein, 10 aa, synthetic construct
TYRRGDLIGR

SEQ ID NO: 70631 - protein, 10 aa, synthetic construct
TYHRGDHGVL

SEQ ID NO: 70632 - protein, 10 aa, synthetic construct
TYHRGDHVNL

SEQ ID NO: 70633 - protein, 10 aa, synthetic construct
TYHRGDRDYL

SEQ ID NO: 70634 - protein, 10 aa, synthetic construct
TYHRGDYSSV

SEQ ID NO: 70635 - protein, 10 aa, synthetic construct
TYHRGDLTVT

SEQ ID NO: 70636 - protein, 10 aa, synthetic construct
TYSRGDHGVL

SEQ ID NO: 70637 - protein, 10 aa, synthetic construct
TYSRGDHVNL

SEQ ID NO: 70638 - protein, 10 aa, synthetic construct
TYSRGDRDYL

SEQ ID NO: 70639 - protein, 10 aa, synthetic construct
TYSRGDYSSV

SEQ ID NO: 70640 - protein, 10 aa, synthetic construct
APHRGDRQGI

SEQ ID NO: 70641 - protein, 10 aa, synthetic construct
TYSRGDLTVT

SEQ ID NO: 70642 - protein, 10 aa, synthetic construct
TYTRGDHGVL

SEQ ID NO: 70643 - protein, 10 aa, synthetic construct
TYTRGDHVNL

SEQ ID NO: 70644 - protein, 10 aa, synthetic construct
TYTRGDRDYL

SEQ ID NO: 70645 - protein, 10 aa, synthetic construct
TYTRGDYSSV

SEQ ID NO: 70646 - protein, 10 aa, synthetic construct
TYTRGDLTVT

SEQ ID NO: 70647 - protein, 10 aa, synthetic construct
TYYRGDHGVL

SEQ ID NO: 70648 - protein, 10 aa, synthetic construct
TYYRGDRGQI

SEQ ID NO: 70649 - protein, 10 aa, synthetic construct
TYYRGDRQGI

SEQ ID NO: 70650 - protein, 10 aa, synthetic construct
TYYRGDRGVV

SEQ ID NO: 70651 - protein, 10 aa, synthetic construct
APHRGDRSVV

SEQ ID NO: 70652 - protein, 10 aa, synthetic construct
TYYRGDYVGL

SEQ ID NO: 70653 - protein, 10 aa, synthetic construct
TYYRGDLIGR

SEQ ID NO: 70654 - protein, 10 aa, synthetic construct
TYYRGDQSTL

SEQ ID NO: 70655 - protein, 10 aa, synthetic construct
TYYRGDLLLS

SEQ ID NO: 70656 - protein, 10 aa, synthetic construct
TYNRGDHGVL

SEQ ID NO: 70657 - protein, 10 aa, synthetic construct
TYNRGDRGQI

SEQ ID NO: 70658 - protein, 10 aa, synthetic construct
TYNRGDRQGI

SEQ ID NO: 70659 - protein, 10 aa, synthetic construct
TYNRGDRGVV

SEQ ID NO: 70660 - protein, 10 aa, synthetic construct
TYNRGDYVGL

SEQ ID NO: 70661 - protein, 10 aa, synthetic construct
TYNRGDLIGR

SEQ ID NO: 70662 - protein, 10 aa, synthetic construct
APHRGDLTVT

SEQ ID NO: 70663 - protein, 10 aa, synthetic construct
TYNRGDQSTL

SEQ ID NO: 70664 - protein, 10 aa, synthetic construct
TYNRGDLLLS

SEQ ID NO: 70665 - protein, 10 aa, synthetic construct
TYQRGDHGVL

SEQ ID NO: 70666 - protein, 10 aa, synthetic construct
TYQRGDHVNL

SEQ ID NO: 70667 - protein, 10 aa, synthetic construct
TYQRGDRDYL

SEQ ID NO: 70668 - protein, 10 aa, synthetic construct
TYQRGDYSSV

SEQ ID NO: 70669 - protein, 10 aa, synthetic construct
TYQRGDLTVT

SEQ ID NO: 70670 - protein, 10 aa, synthetic construct
TYDRGDHGVL

SEQ ID NO: 70671 - protein, 10 aa, synthetic construct
TYDRGDHVNL

SEQ ID NO: 70672 - protein, 10 aa, synthetic construct
TYDRGDRDYL

SEQ ID NO: 70673 - protein, 10 aa, synthetic construct
APHRGDLIGR

SEQ ID NO: 70674 - protein, 10 aa, synthetic construct
TYDRGDYSSV

SEQ ID NO: 70675 - protein, 10 aa, synthetic construct
TYDRGDLTVT

SEQ ID NO: 70676 - protein, 10 aa, synthetic construct
TYERGDHGVL

SEQ ID NO: 70677 - protein, 10 aa, synthetic construct
TYERGDHVNL

SEQ ID NO: 70678 - protein, 10 aa, synthetic construct
TYERGDRDYL

SEQ ID NO: 70679 - protein, 10 aa, synthetic construct
TYERGDYSSV

SEQ ID NO: 70680 - protein, 10 aa, synthetic construct
TYERGDLTVT

SEQ ID NO: 70681 - protein, 10 aa, synthetic construct
TNGRGDRDYL

SEQ ID NO: 70682 - protein, 10 aa, synthetic construct
TNGRGDYTSV

SEQ ID NO: 70683 - protein, 10 aa, synthetic construct
TNGRGDLTVT

SEQ ID NO: 70684 - protein, 10 aa, synthetic construct
APHRGDRSQT

SEQ ID NO: 70685 - protein, 10 aa, synthetic construct
TNGRGDLIGR

SEQ ID NO: 70686 - protein, 10 aa, synthetic construct
TNARGDRDYL

SEQ ID NO: 70687 - protein, 10 aa, synthetic construct
TNARGDYTSV

SEQ ID NO: 70688 - protein, 10 aa, synthetic construct
TNARGDLTVT

SEQ ID NO: 70689 - protein, 10 aa, synthetic construct
TNARGDLIGR

SEQ ID NO: 70690 - protein, 10 aa, synthetic construct
TNVRGDHGVL

SEQ ID NO: 70691 - protein, 10 aa, synthetic construct
TNVRGDHVNL

SEQ ID NO: 70692 - protein, 10 aa, synthetic construct
TNVRGDRDYL

SEQ ID NO: 70693 - protein, 10 aa, synthetic construct
TNVRGDYSSV

SEQ ID NO: 70694 - protein, 10 aa, synthetic construct
TNVRGDLTVT

SEQ ID NO: 70695 - protein, 10 aa, synthetic construct
APHRGDLLLS

SEQ ID NO: 70696 - protein, 10 aa, synthetic construct
TNPRGDRDYL

SEQ ID NO: 70697 - protein, 10 aa, synthetic construct
TNPRGDYTSV

SEQ ID NO: 70698 - protein, 10 aa, synthetic construct
TNPRGDLTVT

SEQ ID NO: 70699 - protein, 10 aa, synthetic construct
TNPRGDLIGR

SEQ ID NO: 70700 - protein, 10 aa, synthetic construct
TNLRGDHGVL

SEQ ID NO: 70701 - protein, 10 aa, synthetic construct
TNLRGDHVNL

SEQ ID NO: 70702 - protein, 10 aa, synthetic construct
TNLRGDRDYL

SEQ ID NO: 70703 - protein, 10 aa, synthetic construct
TNLRGDYSSV

SEQ ID NO: 70704 - protein, 10 aa, synthetic construct
TNLRGDLTVT

SEQ ID NO: 70705 - protein, 10 aa, synthetic construct
TNIRGDHGVL

SEQ ID NO: 70706 - protein, 10 aa, synthetic construct
APSRGDRDYL

SEQ ID NO: 70707 - protein, 10 aa, synthetic construct
TNIRGDRGQI

SEQ ID NO: 70708 - protein, 10 aa, synthetic construct
TNIRGDRQGI

SEQ ID NO: 70709 - protein, 10 aa, synthetic construct
TNIRGDRGVV

SEQ ID NO: 70710 - protein, 10 aa, synthetic construct
TNIRGDYVGL

SEQ ID NO: 70711 - protein, 10 aa, synthetic construct
TNIRGDLIGR

SEQ ID NO: 70712 - protein, 10 aa, synthetic construct
TNIRGDQSTL

SEQ ID NO: 70713 - protein, 10 aa, synthetic construct
TNIRGDLLLS

SEQ ID NO: 70714 - protein, 10 aa, synthetic construct
TNMRGDHGVL

SEQ ID NO: 70715 - protein, 10 aa, synthetic construct
TNMRGDRGQI

SEQ ID NO: 70716 - protein, 10 aa, synthetic construct
TNMRGDRQGI

SEQ ID NO: 70717 - protein, 10 aa, synthetic construct
APSRGDYVGL

SEQ ID NO: 70718 - protein, 10 aa, synthetic construct
TNMRGDRGVV

SEQ ID NO: 70719 - protein, 10 aa, synthetic construct
TNMRGDYVGL

SEQ ID NO: 70720 - protein, 10 aa, synthetic construct
TNMRGDLIGR

SEQ ID NO: 70721 - protein, 10 aa, synthetic construct
TNMRGDQSTL

SEQ ID NO: 70722 - protein, 10 aa, synthetic construct
TNMRGDLLLS

SEQ ID NO: 70723 - protein, 10 aa, synthetic construct
TNWRGDHGVL

SEQ ID NO: 70724 - protein, 10 aa, synthetic construct
TNWRGDHVNL

SEQ ID NO: 70725 - protein, 10 aa, synthetic construct
TNWRGDRDYL

SEQ ID NO: 70726 - protein, 10 aa, synthetic construct
TNWRGDYSSV

SEQ ID NO: 70727 - protein, 10 aa, synthetic construct
TNWRGDLTVT

SEQ ID NO: 70728 - protein, 10 aa, synthetic construct
APSRGDQSTL

SEQ ID NO: 70729 - protein, 10 aa, synthetic construct
TNFRGDHGVL

SEQ ID NO: 70730 - protein, 10 aa, synthetic construct
TNFRGDRGQI

SEQ ID NO: 70731 - protein, 10 aa, synthetic construct
TNFRGDRQGI

SEQ ID NO: 70732 - protein, 10 aa, synthetic construct
TNFRGDRGVV

SEQ ID NO: 70733 - protein, 10 aa, synthetic construct
TNFRGDYVGL

SEQ ID NO: 70734 - protein, 10 aa, synthetic construct
TNFRGDLIGR

SEQ ID NO: 70735 - protein, 10 aa, synthetic construct
TNFRGDQSTL

SEQ ID NO: 70736 - protein, 10 aa, synthetic construct
TNFRGDLLLS

SEQ ID NO: 70737 - protein, 10 aa, synthetic construct
TNKRGDHGVL

SEQ ID NO: 70738 - protein, 10 aa, synthetic construct
TNKRGDRGQI

SEQ ID NO: 70739 - protein, 10 aa, synthetic construct
NSPRGDRGVV

SEQ ID NO: 70740 - protein, 10 aa, synthetic construct
APTRGDHGVL

SEQ ID NO: 70741 - protein, 10 aa, synthetic construct
TNKRGDRQGI

SEQ ID NO: 70742 - protein, 10 aa, synthetic construct
TNKRGDRGVV

SEQ ID NO: 70743 - protein, 10 aa, synthetic construct
TNKRGDYVGL

SEQ ID NO: 70744 - protein, 10 aa, synthetic construct
TNKRGDLIGR

SEQ ID NO: 70745 - protein, 10 aa, synthetic construct
TNKRGDQSTL

SEQ ID NO: 70746 - protein, 10 aa, synthetic construct
TNKRGDLLLS

SEQ ID NO: 70747 - protein, 10 aa, synthetic construct
TNRRGDRDYL

SEQ ID NO: 70748 - protein, 10 aa, synthetic construct
TNRRGDYTSV

SEQ ID NO: 70749 - protein, 10 aa, synthetic construct
TNRRGDLTVT

SEQ ID NO: 70750 - protein, 10 aa, synthetic construct
TNRRGDLIGR

SEQ ID NO: 70751 - protein, 10 aa, synthetic construct
APTRGDRGQI

SEQ ID NO: 70752 - protein, 10 aa, synthetic construct
TNHRGDHGVL

SEQ ID NO: 70753 - protein, 10 aa, synthetic construct
TNHRGDHVNL

SEQ ID NO: 70754 - protein, 10 aa, synthetic construct
TNHRGDRDYL

SEQ ID NO: 70755 - protein, 10 aa, synthetic construct
TNHRGDYSSV

SEQ ID NO: 70756 - protein, 10 aa, synthetic construct
TNHRGDLTVT

SEQ ID NO: 70757 - protein, 10 aa, synthetic construct
TNSRGDHGVL

SEQ ID NO: 70758 - protein, 10 aa, synthetic construct
TNSRGDHVNL

SEQ ID NO: 70759 - protein, 10 aa, synthetic construct
TNSRGDRDYL

SEQ ID NO: 70760 - protein, 10 aa, synthetic construct
TNSRGDYSSV

SEQ ID NO: 70761 - protein, 10 aa, synthetic construct
TNSRGDLTVT

SEQ ID NO: 70762 - protein, 10 aa, synthetic construct
APTRGDRQGI

SEQ ID NO: 70763 - protein, 10 aa, synthetic construct
TNTRGDHGVL

SEQ ID NO: 70764 - protein, 10 aa, synthetic construct
TNTRGDHVNL

SEQ ID NO: 70765 - protein, 10 aa, synthetic construct
TNTRGDRDYL

SEQ ID NO: 70766 - protein, 10 aa, synthetic construct
TNTRGDYSSV

SEQ ID NO: 70767 - protein, 10 aa, synthetic construct
TNTRGDLTVT

SEQ ID NO: 70768 - protein, 10 aa, synthetic construct
TNYRGDHGVL

SEQ ID NO: 70769 - protein, 10 aa, synthetic construct
TNYRGDRGQI

SEQ ID NO: 70770 - protein, 10 aa, synthetic construct
TNYRGDRQGI

SEQ ID NO: 70771 - protein, 10 aa, synthetic construct
TNYRGDRGVV

SEQ ID NO: 70772 - protein, 10 aa, synthetic construct
TNYRGDYVGL

SEQ ID NO: 70773 - protein, 10 aa, synthetic construct
APTRGDRSVV

SEQ ID NO: 70774 - protein, 10 aa, synthetic construct
TNYRGDLIGR

SEQ ID NO: 70775 - protein, 10 aa, synthetic construct
TNYRGDQSTL

SEQ ID NO: 70776 - protein, 10 aa, synthetic construct
TNYRGDLLLS

SEQ ID NO: 70777 - protein, 10 aa, synthetic construct
TNNRGDHGVL

SEQ ID NO: 70778 - protein, 10 aa, synthetic construct
TNNRGDRGQI

SEQ ID NO: 70779 - protein, 10 aa, synthetic construct
TNNRGDRQGI

SEQ ID NO: 70780 - protein, 10 aa, synthetic construct
TNNRGDRGVV

SEQ ID NO: 70781 - protein, 10 aa, synthetic construct
TNNRGDYVGL

SEQ ID NO: 70782 - protein, 10 aa, synthetic construct
TNNRGDLIGR

SEQ ID NO: 70783 - protein, 10 aa, synthetic construct
TNNRGDQSTL

SEQ ID NO: 70784 - protein, 10 aa, synthetic construct
APTRGDLTVT

SEQ ID NO: 70785 - protein, 10 aa, synthetic construct
TNNRGDLLLS

SEQ ID NO: 70786 - protein, 10 aa, synthetic construct
TNQRGDHGVL

SEQ ID NO: 70787 - protein, 10 aa, synthetic construct
TNQRGDHVNL

SEQ ID NO: 70788 - protein, 10 aa, synthetic construct
TNQRGDRDYL

SEQ ID NO: 70789 - protein, 10 aa, synthetic construct
TNQRGDYSSV

SEQ ID NO: 70790 - protein, 10 aa, synthetic construct
TNQRGDLTVT

SEQ ID NO: 70791 - protein, 10 aa, synthetic construct
TNDRGDHGVL

SEQ ID NO: 70792 - protein, 10 aa, synthetic construct
TNDRGDHVNL

SEQ ID NO: 70793 - protein, 10 aa, synthetic construct
TNDRGDRDYL

SEQ ID NO: 70794 - protein, 10 aa, synthetic construct
TNDRGDYSSV

SEQ ID NO: 70795 - protein, 10 aa, synthetic construct
APTRGDLIGR

SEQ ID NO: 70796 - protein, 10 aa, synthetic construct
TNDRGDLTVT

SEQ ID NO: 70797 - protein, 10 aa, synthetic construct
TNERGDHGVL

SEQ ID NO: 70798 - protein, 10 aa, synthetic construct
TNERGDHVNL

SEQ ID NO: 70799 - protein, 10 aa, synthetic construct
TNERGDRDYL

SEQ ID NO: 70800 - protein, 10 aa, synthetic construct
TNERGDYSSV

SEQ ID NO: 70801 - protein, 10 aa, synthetic construct
TNERGDLTVT

SEQ ID NO: 70802 - protein, 10 aa, synthetic construct
TQGRGDYNSL

SEQ ID NO: 70803 - protein, 10 aa, synthetic construct
TQGRGDYTSV

SEQ ID NO: 70804 - protein, 10 aa, synthetic construct
TQGRGDYTSM

SEQ ID NO: 70805 - protein, 10 aa, synthetic construct
TQGRGDFQNT

SEQ ID NO: 70806 - protein, 10 aa, synthetic construct
APTRGDRSQT

SEQ ID NO: 70807 - protein, 10 aa, synthetic construct
TQARGDYNSL

SEQ ID NO: 70808 - protein, 10 aa, synthetic construct
TQARGDYTSV

SEQ ID NO: 70809 - protein, 10 aa, synthetic construct
TQARGDYTSM

SEQ ID NO: 70810 - protein, 10 aa, synthetic construct
TQARGDFQNT

SEQ ID NO: 70811 - protein, 10 aa, synthetic construct
TQVRGDRDYL

SEQ ID NO: 70812 - protein, 10 aa, synthetic construct
TQVRGDYTSV

SEQ ID NO: 70813 - protein, 10 aa, synthetic construct
TQVRGDLTVT

SEQ ID NO: 70814 - protein, 10 aa, synthetic construct
TQVRGDLIGR

SEQ ID NO: 70815 - protein, 10 aa, synthetic construct
TQPRGDYNSL

SEQ ID NO: 70816 - protein, 10 aa, synthetic construct
TQPRGDYTSV

SEQ ID NO: 70817 - protein, 10 aa, synthetic construct
APTRGDLLLS

SEQ ID NO: 70818 - protein, 10 aa, synthetic construct
TQPRGDYTSM

SEQ ID NO: 70819 - protein, 10 aa, synthetic construct
TQPRGDFQNT

SEQ ID NO: 70820 - protein, 10 aa, synthetic construct
TQLRGDRDYL

SEQ ID NO: 70821 - protein, 10 aa, synthetic construct
TQLRGDYTSV

SEQ ID NO: 70822 - protein, 10 aa, synthetic construct
TQLRGDLTVT

SEQ ID NO: 70823 - protein, 10 aa, synthetic construct
TQLRGDLIGR

SEQ ID NO: 70824 - protein, 10 aa, synthetic construct
TQIRGDHGVL

SEQ ID NO: 70825 - protein, 10 aa, synthetic construct
TQIRGDHVNL

SEQ ID NO: 70826 - protein, 10 aa, synthetic construct
TQIRGDRDYL

SEQ ID NO: 70827 - protein, 10 aa, synthetic construct
TQIRGDYSSV

SEQ ID NO: 70828 - protein, 10 aa, synthetic construct
APYRGDRGVV

SEQ ID NO: 70829 - protein, 10 aa, synthetic construct
TQIRGDLTVT

SEQ ID NO: 70830 - protein, 10 aa, synthetic construct
TQMRGDHGVL

SEQ ID NO: 70831 - protein, 10 aa, synthetic construct
TQMRGDHVNL

SEQ ID NO: 70832 - protein, 10 aa, synthetic construct
TQMRGDRDYL

SEQ ID NO: 70833 - protein, 10 aa, synthetic construct
TQMRGDYSSV

SEQ ID NO: 70834 - protein, 10 aa, synthetic construct
TQMRGDLTVT

SEQ ID NO: 70835 - protein, 10 aa, synthetic construct
TQWRGDRDYL

SEQ ID NO: 70836 - protein, 10 aa, synthetic construct
TQWRGDYTSV

SEQ ID NO: 70837 - protein, 10 aa, synthetic construct
TQWRGDLTVT

SEQ ID NO: 70838 - protein, 10 aa, synthetic construct
TQWRGDLIGR

SEQ ID NO: 70839 - protein, 10 aa, synthetic construct
APNRGDRGVV

SEQ ID NO: 70840 - protein, 10 aa, synthetic construct
TQFRGDHGVL

SEQ ID NO: 70841 - protein, 10 aa, synthetic construct
TQFRGDHVNL

SEQ ID NO: 70842 - protein, 10 aa, synthetic construct
TQFRGDRDYL

SEQ ID NO: 70843 - protein, 10 aa, synthetic construct
TQFRGDYSSV

SEQ ID NO: 70844 - protein, 10 aa, synthetic construct
TQFRGDLTVT

SEQ ID NO: 70845 - protein, 10 aa, synthetic construct
TQKRGDHGVL

SEQ ID NO: 70846 - protein, 10 aa, synthetic construct
TQKRGDHVNL

SEQ ID NO: 70847 - protein, 10 aa, synthetic construct
TQKRGDRDYL

SEQ ID NO: 70848 - protein, 10 aa, synthetic construct
TQKRGDYSSV

SEQ ID NO: 70849 - protein, 10 aa, synthetic construct
TQKRGDLTVT

SEQ ID NO: 70850 - protein, 10 aa, synthetic construct
NSPRGDRSQT

SEQ ID NO: 70851 - protein, 10 aa, synthetic construct
APQRGDHGVL

SEQ ID NO: 70852 - protein, 10 aa, synthetic construct
TQRRGDYNSL

SEQ ID NO: 70853 - protein, 10 aa, synthetic construct
TQRRGDYTSV

SEQ ID NO: 70854 - protein, 10 aa, synthetic construct
TQRRGDYTSM

SEQ ID NO: 70855 - protein, 10 aa, synthetic construct
TQRRGDFQNT

SEQ ID NO: 70856 - protein, 10 aa, synthetic construct
TQHRGDRDYL

SEQ ID NO: 70857 - protein, 10 aa, synthetic construct
TQHRGDYTSV

SEQ ID NO: 70858 - protein, 10 aa, synthetic construct
TQHRGDLTVT

SEQ ID NO: 70859 - protein, 10 aa, synthetic construct
TQHRGDLIGR

SEQ ID NO: 70860 - protein, 10 aa, synthetic construct
TQSRGDRDYL

SEQ ID NO: 70861 - protein, 10 aa, synthetic construct
TQSRGDYTSV

SEQ ID NO: 70862 - protein, 10 aa, synthetic construct
APQRGDRGQI

SEQ ID NO: 70863 - protein, 10 aa, synthetic construct
TQSRGDLTVT

SEQ ID NO: 70864 - protein, 10 aa, synthetic construct
TQSRGDLIGR

SEQ ID NO: 70865 - protein, 10 aa, synthetic construct
TQTRGDRDYL

SEQ ID NO: 70866 - protein, 10 aa, synthetic construct
TQTRGDYTSV

SEQ ID NO: 70867 - protein, 10 aa, synthetic construct
TQTRGDLTVT

SEQ ID NO: 70868 - protein, 10 aa, synthetic construct
TQTRGDLIGR

SEQ ID NO: 70869 - protein, 10 aa, synthetic construct
TQYRGDHGVL

SEQ ID NO: 70870 - protein, 10 aa, synthetic construct
TQYRGDHVNL

SEQ ID NO: 70871 - protein, 10 aa, synthetic construct
TQYRGDRDYL

SEQ ID NO: 70872 - protein, 10 aa, synthetic construct
TQYRGDYSSV

SEQ ID NO: 70873 - protein, 10 aa, synthetic construct
APQRGDRQGI

SEQ ID NO: 70874 - protein, 10 aa, synthetic construct
TQYRGDLTVT

SEQ ID NO: 70875 - protein, 10 aa, synthetic construct
TQNRGDHGVL

SEQ ID NO: 70876 - protein, 10 aa, synthetic construct
TQNRGDHVNL

SEQ ID NO: 70877 - protein, 10 aa, synthetic construct
TQNRGDRDYL

SEQ ID NO: 70878 - protein, 10 aa, synthetic construct
TQNRGDYSSV

SEQ ID NO: 70879 - protein, 10 aa, synthetic construct
TQNRGDLTVT

SEQ ID NO: 70880 - protein, 10 aa, synthetic construct
TQQRGDRDYL

SEQ ID NO: 70881 - protein, 10 aa, synthetic construct
TQQRGDYTSV

SEQ ID NO: 70882 - protein, 10 aa, synthetic construct
TQQRGDLTVT

SEQ ID NO: 70883 - protein, 10 aa, synthetic construct
TQQRGDLIGR

SEQ ID NO: 70884 - protein, 10 aa, synthetic construct
APQRGDRSVV

SEQ ID NO: 70885 - protein, 10 aa, synthetic construct
TQDRGDRDYL

SEQ ID NO: 70886 - protein, 10 aa, synthetic construct
TQDRGDYTSV

SEQ ID NO: 70887 - protein, 10 aa, synthetic construct
TQDRGDLTVT

SEQ ID NO: 70888 - protein, 10 aa, synthetic construct
TQDRGDLIGR

SEQ ID NO: 70889 - protein, 10 aa, synthetic construct
TQERGDRDYL

SEQ ID NO: 70890 - protein, 10 aa, synthetic construct
TQERGDYTSV

SEQ ID NO: 70891 - protein, 10 aa, synthetic construct
TQERGDLTVT

SEQ ID NO: 70892 - protein, 10 aa, synthetic construct
TQERGDLIGR

SEQ ID NO: 70893 - protein, 10 aa, synthetic construct
TDGRGDYNSL

SEQ ID NO: 70894 - protein, 10 aa, synthetic construct
TDGRGDYTSV

SEQ ID NO: 70895 - protein, 10 aa, synthetic construct
APQRGDLTVT

SEQ ID NO: 70896 - protein, 10 aa, synthetic construct
TDGRGDYTSM

SEQ ID NO: 70897 - protein, 10 aa, synthetic construct
TDGRGDFQNT

SEQ ID NO: 70898 - protein, 10 aa, synthetic construct
TDARGDYNSL

SEQ ID NO: 70899 - protein, 10 aa, synthetic construct
TDARGDYTSV

SEQ ID NO: 70900 - protein, 10 aa, synthetic construct
TDARGDYTSM

SEQ ID NO: 70901 - protein, 10 aa, synthetic construct
TDARGDFQNT

SEQ ID NO: 70902 - protein, 10 aa, synthetic construct
TDVRGDRDYL

SEQ ID NO: 70903 - protein, 10 aa, synthetic construct
TDVRGDYTSV

SEQ ID NO: 70904 - protein, 10 aa, synthetic construct
TDVRGDLTVT

SEQ ID NO: 70905 - protein, 10 aa, synthetic construct
TDVRGDLIGR

SEQ ID NO: 70906 - protein, 10 aa, synthetic construct
APQRGDLIGR

SEQ ID NO: 70907 - protein, 10 aa, synthetic construct
TDPRGDYNSL

SEQ ID NO: 70908 - protein, 10 aa, synthetic construct
TDPRGDYTSV

SEQ ID NO: 70909 - protein, 10 aa, synthetic construct
TDPRGDYTSM

SEQ ID NO: 70910 - protein, 10 aa, synthetic construct
TDPRGDFQNT

SEQ ID NO: 70911 - protein, 10 aa, synthetic construct
TDLRGDRDYL

SEQ ID NO: 70912 - protein, 10 aa, synthetic construct
TDLRGDYTSV

SEQ ID NO: 70913 - protein, 10 aa, synthetic construct
TDLRGDLTVT

SEQ ID NO: 70914 - protein, 10 aa, synthetic construct
TDLRGDLIGR

SEQ ID NO: 70915 - protein, 10 aa, synthetic construct
TDIRGDHGVL

SEQ ID NO: 70916 - protein, 10 aa, synthetic construct
TDIRGDHVNL

SEQ ID NO: 70917 - protein, 10 aa, synthetic construct
APQRGDRSQT

SEQ ID NO: 70918 - protein, 10 aa, synthetic construct
TDIRGDRDYL

SEQ ID NO: 70919 - protein, 10 aa, synthetic construct
TDIRGDYSSV

SEQ ID NO: 70920 - protein, 10 aa, synthetic construct
TDIRGDLTVT

SEQ ID NO: 70921 - protein, 10 aa, synthetic construct
TDMRGDHGVL

SEQ ID NO: 70922 - protein, 10 aa, synthetic construct
TDMRGDHVNL

SEQ ID NO: 70923 - protein, 10 aa, synthetic construct
TDMRGDRDYL

SEQ ID NO: 70924 - protein, 10 aa, synthetic construct
TDMRGDYSSV

SEQ ID NO: 70925 - protein, 10 aa, synthetic construct
TDMRGDLTVT

SEQ ID NO: 70926 - protein, 10 aa, synthetic construct
TDWRGDRDYL

SEQ ID NO: 70927 - protein, 10 aa, synthetic construct
TDWRGDYTSV

SEQ ID NO: 70928 - protein, 10 aa, synthetic construct
APQRGDLLLS

SEQ ID NO: 70929 - protein, 10 aa, synthetic construct
TDWRGDLTVT

SEQ ID NO: 70930 - protein, 10 aa, synthetic construct
TDWRGDLIGR

SEQ ID NO: 70931 - protein, 10 aa, synthetic construct
TDFRGDHGVL

SEQ ID NO: 70932 - protein, 10 aa, synthetic construct
TDFRGDHVNL

SEQ ID NO: 70933 - protein, 10 aa, synthetic construct
TDFRGDRDYL

SEQ ID NO: 70934 - protein, 10 aa, synthetic construct
TDFRGDYSSV

SEQ ID NO: 70935 - protein, 10 aa, synthetic construct
TDFRGDLTVT

SEQ ID NO: 70936 - protein, 10 aa, synthetic construct
TDKRGDHGVL

SEQ ID NO: 70937 - protein, 10 aa, synthetic construct
TDKRGDHVNL

SEQ ID NO: 70938 - protein, 10 aa, synthetic construct
TDKRGDRDYL

SEQ ID NO: 70939 - protein, 10 aa, synthetic construct
APDRGDHGVL

SEQ ID NO: 70940 - protein, 10 aa, synthetic construct
TDKRGDYSSV

SEQ ID NO: 70941 - protein, 10 aa, synthetic construct
TDKRGDLTVT

SEQ ID NO: 70942 - protein, 10 aa, synthetic construct
TDRRGDYNSL

SEQ ID NO: 70943 - protein, 10 aa, synthetic construct
TDRRGDYTSV

SEQ ID NO: 70944 - protein, 10 aa, synthetic construct
TDRRGDYTSM

SEQ ID NO: 70945 - protein, 10 aa, synthetic construct
TDRRGDFQNT

SEQ ID NO: 70946 - protein, 10 aa, synthetic construct
TDHRGDRDYL

SEQ ID NO: 70947 - protein, 10 aa, synthetic construct
TDHRGDYTSV

SEQ ID NO: 70948 - protein, 10 aa, synthetic construct
TDHRGDLTVT

SEQ ID NO: 70949 - protein, 10 aa, synthetic construct
TDHRGDLIGR

SEQ ID NO: 70950 - protein, 10 aa, synthetic construct
APDRGDRGQI

SEQ ID NO: 70951 - protein, 10 aa, synthetic construct
TDSRGDRDYL

SEQ ID NO: 70952 - protein, 10 aa, synthetic construct
TDSRGDYTSV

SEQ ID NO: 70953 - protein, 10 aa, synthetic construct
TDSRGDLTVT

SEQ ID NO: 70954 - protein, 10 aa, synthetic construct
TDSRGDLIGR

SEQ ID NO: 70955 - protein, 10 aa, synthetic construct
TDTRGDRDYL

SEQ ID NO: 70956 - protein, 10 aa, synthetic construct
TDTRGDYTSV

SEQ ID NO: 70957 - protein, 10 aa, synthetic construct
TDTRGDLTVT

SEQ ID NO: 70958 - protein, 10 aa, synthetic construct
TDTRGDLIGR

SEQ ID NO: 70959 - protein, 10 aa, synthetic construct
TDYRGDHGVL

SEQ ID NO: 70960 - protein, 10 aa, synthetic construct
TDYRGDHVNL

SEQ ID NO: 70961 - protein, 10 aa, synthetic construct
DSPRGDHGVL

SEQ ID NO: 70962 - protein, 10 aa, synthetic construct
APDRGDRQGI

SEQ ID NO: 70963 - protein, 10 aa, synthetic construct
TDYRGDRDYL

SEQ ID NO: 70964 - protein, 10 aa, synthetic construct
TDYRGDYSSV

SEQ ID NO: 70965 - protein, 10 aa, synthetic construct
TDYRGDLTVT

SEQ ID NO: 70966 - protein, 10 aa, synthetic construct
TDNRGDHGVL

SEQ ID NO: 70967 - protein, 10 aa, synthetic construct
TDNRGDHVNL

SEQ ID NO: 70968 - protein, 10 aa, synthetic construct
TDNRGDRDYL

SEQ ID NO: 70969 - protein, 10 aa, synthetic construct
TDNRGDYSSV

SEQ ID NO: 70970 - protein, 10 aa, synthetic construct
TDNRGDLTVT

SEQ ID NO: 70971 - protein, 10 aa, synthetic construct
TDQRGDRDYL

SEQ ID NO: 70972 - protein, 10 aa, synthetic construct
TDQRGDYTSV

SEQ ID NO: 70973 - protein, 10 aa, synthetic construct
APDRGDRSVV

SEQ ID NO: 70974 - protein, 10 aa, synthetic construct
TDQRGDLTVT

SEQ ID NO: 70975 - protein, 10 aa, synthetic construct
TDQRGDLIGR

SEQ ID NO: 70976 - protein, 10 aa, synthetic construct
TDDRGDRDYL

SEQ ID NO: 70977 - protein, 10 aa, synthetic construct
TDDRGDYTSV

SEQ ID NO: 70978 - protein, 10 aa, synthetic construct
TDDRGDLTVT

SEQ ID NO: 70979 - protein, 10 aa, synthetic construct
TDDRGDLIGR

SEQ ID NO: 70980 - protein, 10 aa, synthetic construct
TDERGDRDYL

SEQ ID NO: 70981 - protein, 10 aa, synthetic construct
TDERGDYTSV

SEQ ID NO: 70982 - protein, 10 aa, synthetic construct
TDERGDLTVT

SEQ ID NO: 70983 - protein, 10 aa, synthetic construct
TDERGDLIGR

SEQ ID NO: 70984 - protein, 10 aa, synthetic construct
APDRGDLTVT

SEQ ID NO: 70985 - protein, 10 aa, synthetic construct
TEGRGDYNSL

SEQ ID NO: 70986 - protein, 10 aa, synthetic construct
TEGRGDYTSV

SEQ ID NO: 70987 - protein, 10 aa, synthetic construct
TEGRGDYTSM

SEQ ID NO: 70988 - protein, 10 aa, synthetic construct
TEGRGDFQNT

SEQ ID NO: 70989 - protein, 10 aa, synthetic construct
TEARGDYNSL

SEQ ID NO: 70990 - protein, 10 aa, synthetic construct
TEARGDYTSV

SEQ ID NO: 70991 - protein, 10 aa, synthetic construct
TEARGDYTSM

SEQ ID NO: 70992 - protein, 10 aa, synthetic construct
TEARGDFQNT

SEQ ID NO: 70993 - protein, 10 aa, synthetic construct
TEVRGDRDYL

SEQ ID NO: 70994 - protein, 10 aa, synthetic construct
TEVRGDYTSV

SEQ ID NO: 70995 - protein, 10 aa, synthetic construct
APDRGDLIGR

SEQ ID NO: 70996 - protein, 10 aa, synthetic construct
TEVRGDLTVT

SEQ ID NO: 70997 - protein, 10 aa, synthetic construct
TEVRGDLIGR

SEQ ID NO: 70998 - protein, 10 aa, synthetic construct
TEPRGDYNSL

SEQ ID NO: 70999 - protein, 10 aa, synthetic construct
TEPRGDYTSV

SEQ ID NO: 71000 - protein, 10 aa, synthetic construct
TEPRGDYTSM

SEQ ID NO: 71001 - protein, 10 aa, synthetic construct
TEPRGDFQNT

SEQ ID NO: 71002 - protein, 10 aa, synthetic construct
TELRGDRDYL

SEQ ID NO: 71003 - protein, 10 aa, synthetic construct
TELRGDYTSV

SEQ ID NO: 71004 - protein, 10 aa, synthetic construct
TELRGDLTVT

SEQ ID NO: 71005 - protein, 10 aa, synthetic construct
TELRGDLIGR

SEQ ID NO: 71006 - protein, 10 aa, synthetic construct
APDRGDRSQT

SEQ ID NO: 71007 - protein, 10 aa, synthetic construct
TEIRGDHGVL

SEQ ID NO: 71008 - protein, 10 aa, synthetic construct
TEIRGDHVNL

SEQ ID NO: 71009 - protein, 10 aa, synthetic construct
TEIRGDRDYL

SEQ ID NO: 71010 - protein, 10 aa, synthetic construct
TEIRGDYSSV

SEQ ID NO: 71011 - protein, 10 aa, synthetic construct
TEIRGDLTVT

SEQ ID NO: 71012 - protein, 10 aa, synthetic construct
TEMRGDHGVL

SEQ ID NO: 71013 - protein, 10 aa, synthetic construct
TEMRGDHVNL

SEQ ID NO: 71014 - protein, 10 aa, synthetic construct
TEMRGDRDYL

SEQ ID NO: 71015 - protein, 10 aa, synthetic construct
TEMRGDYSSV

SEQ ID NO: 71016 - protein, 10 aa, synthetic construct
TEMRGDLTVT

SEQ ID NO: 71017 - protein, 10 aa, synthetic construct
APDRGDLLLS

SEQ ID NO: 71018 - protein, 10 aa, synthetic construct
TEWRGDRDYL

SEQ ID NO: 71019 - protein, 10 aa, synthetic construct
TEWRGDYTSV

SEQ ID NO: 71020 - protein, 10 aa, synthetic construct
TEWRGDLTVT

SEQ ID NO: 71021 - protein, 10 aa, synthetic construct
TEWRGDLIGR

SEQ ID NO: 71022 - protein, 10 aa, synthetic construct
TEFRGDHGVL

SEQ ID NO: 71023 - protein, 10 aa, synthetic construct
TEFRGDHVNL

SEQ ID NO: 71024 - protein, 10 aa, synthetic construct
TEFRGDRDYL

SEQ ID NO: 71025 - protein, 10 aa, synthetic construct
TEFRGDYSSV

SEQ ID NO: 71026 - protein, 10 aa, synthetic construct
TEFRGDLTVT

SEQ ID NO: 71027 - protein, 10 aa, synthetic construct
TEKRGDHGVL

SEQ ID NO: 71028 - protein, 10 aa, synthetic construct
APERGDHGVL

SEQ ID NO: 71029 - protein, 10 aa, synthetic construct
TEKRGDHVNL

SEQ ID NO: 71030 - protein, 10 aa, synthetic construct
TEKRGDRDYL

SEQ ID NO: 71031 - protein, 10 aa, synthetic construct
TEKRGDYSSV

SEQ ID NO: 71032 - protein, 10 aa, synthetic construct
TEKRGDLTVT

SEQ ID NO: 71033 - protein, 10 aa, synthetic construct
TERRGDYNSL

SEQ ID NO: 71034 - protein, 10 aa, synthetic construct
TERRGDYTSV

SEQ ID NO: 71035 - protein, 10 aa, synthetic construct
TERRGDYTSM

SEQ ID NO: 71036 - protein, 10 aa, synthetic construct
TERRGDFQNT

SEQ ID NO: 71037 - protein, 10 aa, synthetic construct
TEHRGDRDYL

SEQ ID NO: 71038 - protein, 10 aa, synthetic construct
TEHRGDYTSV

SEQ ID NO: 71039 - protein, 10 aa, synthetic construct
APERGDRGQI

SEQ ID NO: 71040 - protein, 10 aa, synthetic construct
TEHRGDLTVT

SEQ ID NO: 71041 - protein, 10 aa, synthetic construct
TEHRGDLIGR

SEQ ID NO: 71042 - protein, 10 aa, synthetic construct
TESRGDRDYL

SEQ ID NO: 71043 - protein, 10 aa, synthetic construct
TESRGDYTSV

SEQ ID NO: 71044 - protein, 10 aa, synthetic construct
TESRGDLTVT

SEQ ID NO: 71045 - protein, 10 aa, synthetic construct
TESRGDLIGR

SEQ ID NO: 71046 - protein, 10 aa, synthetic construct
TETRGDRDYL

SEQ ID NO: 71047 - protein, 10 aa, synthetic construct
TETRGDYTSV

SEQ ID NO: 71048 - protein, 10 aa, synthetic construct
TETRGDLTVT

SEQ ID NO: 71049 - protein, 10 aa, synthetic construct
TETRGDLIGR

SEQ ID NO: 71050 - protein, 10 aa, synthetic construct
APERGDRQGI

SEQ ID NO: 71051 - protein, 10 aa, synthetic construct
TEYRGDHGVL

SEQ ID NO: 71052 - protein, 10 aa, synthetic construct
TEYRGDHVNL

SEQ ID NO: 71053 - protein, 10 aa, synthetic construct
TEYRGDRDYL

SEQ ID NO: 71054 - protein, 10 aa, synthetic construct
TEYRGDYSSV

SEQ ID NO: 71055 - protein, 10 aa, synthetic construct
TEYRGDLTVT

SEQ ID NO: 71056 - protein, 10 aa, synthetic construct
TENRGDHGVL

SEQ ID NO: 71057 - protein, 10 aa, synthetic construct
TENRGDHVNL

SEQ ID NO: 71058 - protein, 10 aa, synthetic construct
TENRGDRDYL

SEQ ID NO: 71059 - protein, 10 aa, synthetic construct
TENRGDYSSV

SEQ ID NO: 71060 - protein, 10 aa, synthetic construct
TENRGDLTVT

SEQ ID NO: 71061 - protein, 10 aa, synthetic construct
APERGDRSVV

SEQ ID NO: 71062 - protein, 10 aa, synthetic construct
TEQRGDRDYL

SEQ ID NO: 71063 - protein, 10 aa, synthetic construct
TEQRGDYTSV

SEQ ID NO: 71064 - protein, 10 aa, synthetic construct
TEQRGDLTVT

SEQ ID NO: 71065 - protein, 10 aa, synthetic construct
TEQRGDLIGR

SEQ ID NO: 71066 - protein, 10 aa, synthetic construct
TEDRGDRDYL

SEQ ID NO: 71067 - protein, 10 aa, synthetic construct
TEDRGDYTSV

SEQ ID NO: 71068 - protein, 10 aa, synthetic construct
TEDRGDLTVT

SEQ ID NO: 71069 - protein, 10 aa, synthetic construct
TEDRGDLIGR

SEQ ID NO: 71070 - protein, 10 aa, synthetic construct
TEERGDRDYL

SEQ ID NO: 71071 - protein, 10 aa, synthetic construct
TEERGDYTSV

SEQ ID NO: 71072 - protein, 10 aa, synthetic construct
DSPRGDYVGL

SEQ ID NO: 71073 - protein, 10 aa, synthetic construct
APERGDLTVT

SEQ ID NO: 71074 - protein, 10 aa, synthetic construct
TEERGDLTVT

SEQ ID NO: 71075 - protein, 10 aa, synthetic construct
TEERGDLIGR

SEQ ID NO: 71076 - protein, 10 aa, synthetic construct
AGGRGDFNNT

SEQ ID NO: 71077 - protein, 10 aa, synthetic construct
AGGRGDFNNL

SEQ ID NO: 71078 - protein, 10 aa, synthetic construct
AGARGDFNNT

SEQ ID NO: 71079 - protein, 10 aa, synthetic construct
AGARGDFNNL

SEQ ID NO: 71080 - protein, 10 aa, synthetic construct
AGVRGDFNNT

SEQ ID NO: 71081 - protein, 10 aa, synthetic construct
AGVRGDFNNL

SEQ ID NO: 71082 - protein, 10 aa, synthetic construct
AGPRGDFNNT

SEQ ID NO: 71083 - protein, 10 aa, synthetic construct
AGPRGDFNNL

SEQ ID NO: 71084 - protein, 10 aa, synthetic construct
APERGDLIGR

SEQ ID NO: 71085 - protein, 10 aa, synthetic construct
AGLRGDFNNT

SEQ ID NO: 71086 - protein, 10 aa, synthetic construct
AGLRGDFNNL

SEQ ID NO: 71087 - protein, 10 aa, synthetic construct
AGIRGDHVNL

SEQ ID NO: 71088 - protein, 10 aa, synthetic construct
AGIRGDYNSL

SEQ ID NO: 71089 - protein, 10 aa, synthetic construct
AGIRGDYSSV

SEQ ID NO: 71090 - protein, 10 aa, synthetic construct
AGIRGDYTSV

SEQ ID NO: 71091 - protein, 10 aa, synthetic construct
AGIRGDYTSM

SEQ ID NO: 71092 - protein, 10 aa, synthetic construct
AGMRGDYNSL

SEQ ID NO: 71093 - protein, 10 aa, synthetic construct
AGMRGDYTSV

SEQ ID NO: 71094 - protein, 10 aa, synthetic construct
AGMRGDYTSM

SEQ ID NO: 71095 - protein, 10 aa, synthetic construct
APERGDRSQT

SEQ ID NO: 71096 - protein, 10 aa, synthetic construct
AGMRGDFQNT

SEQ ID NO: 71097 - protein, 10 aa, synthetic construct
AGWRGDYNSL

SEQ ID NO: 71098 - protein, 10 aa, synthetic construct
AGWRGDFNNT

SEQ ID NO: 71099 - protein, 10 aa, synthetic construct
AGWRGDFNNL

SEQ ID NO: 71100 - protein, 10 aa, synthetic construct
AGWRGDFQNT

SEQ ID NO: 71101 - protein, 10 aa, synthetic construct
AGFRGDHVNL

SEQ ID NO: 71102 - protein, 10 aa, synthetic construct
AGFRGDYNSL

SEQ ID NO: 71103 - protein, 10 aa, synthetic construct
AGFRGDYSSV

SEQ ID NO: 71104 - protein, 10 aa, synthetic construct
AGFRGDYTSV

SEQ ID NO: 71105 - protein, 10 aa, synthetic construct
AGFRGDYTSM

SEQ ID NO: 71106 - protein, 10 aa, synthetic construct
APERGDLLLS

SEQ ID NO: 71107 - protein, 10 aa, synthetic construct
AGKRGDHVNL

SEQ ID NO: 71108 - protein, 10 aa, synthetic construct
AGKRGDYNSL

SEQ ID NO: 71109 - protein, 10 aa, synthetic construct
AGKRGDYSSV

SEQ ID NO: 71110 - protein, 10 aa, synthetic construct
AGKRGDYTSV

SEQ ID NO: 71111 - protein, 10 aa, synthetic construct
AGKRGDYTSM

SEQ ID NO: 71112 - protein, 10 aa, synthetic construct
AGRRGDFNNT

SEQ ID NO: 71113 - protein, 10 aa, synthetic construct
AGRRGDFNNL

SEQ ID NO: 71114 - protein, 10 aa, synthetic construct
AGHRGDYNSL

SEQ ID NO: 71115 - protein, 10 aa, synthetic construct
AGHRGDFQNT

SEQ ID NO: 71116 - protein, 10 aa, synthetic construct
AGSRGDFNNT

SEQ ID NO: 71117 - protein, 10 aa, synthetic construct
ALGRGDHGVL

SEQ ID NO: 71118 - protein, 10 aa, synthetic construct
AGSRGDFNNL

SEQ ID NO: 71119 - protein, 10 aa, synthetic construct
AGTRGDYNSL

SEQ ID NO: 71120 - protein, 10 aa, synthetic construct
AGTRGDFQNT

SEQ ID NO: 71121 - protein, 10 aa, synthetic construct
AGYRGDHVNL

SEQ ID NO: 71122 - protein, 10 aa, synthetic construct
AGYRGDYNSL

SEQ ID NO: 71123 - protein, 10 aa, synthetic construct
AGYRGDYSSV

SEQ ID NO: 71124 - protein, 10 aa, synthetic construct
AGYRGDYTSV

SEQ ID NO: 71125 - protein, 10 aa, synthetic construct
AGYRGDYTSM

SEQ ID NO: 71126 - protein, 10 aa, synthetic construct
AGNRGDHVNL

SEQ ID NO: 71127 - protein, 10 aa, synthetic construct
AGNRGDYNSL

SEQ ID NO: 71128 - protein, 10 aa, synthetic construct
ALGRGDRGQI

SEQ ID NO: 71129 - protein, 10 aa, synthetic construct
AGNRGDYSSV

SEQ ID NO: 71130 - protein, 10 aa, synthetic construct
AGNRGDYTSV

SEQ ID NO: 71131 - protein, 10 aa, synthetic construct
AGNRGDYTSM

SEQ ID NO: 71132 - protein, 10 aa, synthetic construct
AGQRGDYNSL

SEQ ID NO: 71133 - protein, 10 aa, synthetic construct
AGQRGDFQNT

SEQ ID NO: 71134 - protein, 10 aa, synthetic construct
AGDRGDYNSL

SEQ ID NO: 71135 - protein, 10 aa, synthetic construct
AGDRGDFQNT

SEQ ID NO: 71136 - protein, 10 aa, synthetic construct
AGERGDYNSL

SEQ ID NO: 71137 - protein, 10 aa, synthetic construct
AGERGDFQNT

SEQ ID NO: 71138 - protein, 10 aa, synthetic construct
AAGRGDFNNT

SEQ ID NO: 71139 - protein, 10 aa, synthetic construct
ALGRGDRQGI

SEQ ID NO: 71140 - protein, 10 aa, synthetic construct
AAGRGDFNNL

SEQ ID NO: 71141 - protein, 10 aa, synthetic construct
AAARGDFNNT

SEQ ID NO: 71142 - protein, 10 aa, synthetic construct
AAARGDFNNL

SEQ ID NO: 71143 - protein, 10 aa, synthetic construct
AAVRGDFNNT

SEQ ID NO: 71144 - protein, 10 aa, synthetic construct
AAVRGDFNNL

SEQ ID NO: 71145 - protein, 10 aa, synthetic construct
AAPRGDFNNT

SEQ ID NO: 71146 - protein, 10 aa, synthetic construct
AAPRGDFNNL

SEQ ID NO: 71147 - protein, 10 aa, synthetic construct
AALRGDFNNT

SEQ ID NO: 71148 - protein, 10 aa, synthetic construct
AALRGDFNNL

SEQ ID NO: 71149 - protein, 10 aa, synthetic construct
AAIRGDHVNL

SEQ ID NO: 71150 - protein, 10 aa, synthetic construct
ALGRGDRSVV

SEQ ID NO: 71151 - protein, 10 aa, synthetic construct
AAIRGDYNSL

SEQ ID NO: 71152 - protein, 10 aa, synthetic construct
AAIRGDYSSV

SEQ ID NO: 71153 - protein, 10 aa, synthetic construct
AAIRGDYTSV

SEQ ID NO: 71154 - protein, 10 aa, synthetic construct
AAIRGDYTSM

SEQ ID NO: 71155 - protein, 10 aa, synthetic construct
AAMRGDYNSL

SEQ ID NO: 71156 - protein, 10 aa, synthetic construct
AAMRGDYTSV

SEQ ID NO: 71157 - protein, 10 aa, synthetic construct
AAMRGDYTSM

SEQ ID NO: 71158 - protein, 10 aa, synthetic construct
AAMRGDFQNT

SEQ ID NO: 71159 - protein, 10 aa, synthetic construct
AAWRGDYNSL

SEQ ID NO: 71160 - protein, 10 aa, synthetic construct
AAWRGDFNNT

SEQ ID NO: 71161 - protein, 10 aa, synthetic construct
ALGRGDLTVT

SEQ ID NO: 71162 - protein, 10 aa, synthetic construct
AAWRGDFNNL

SEQ ID NO: 71163 - protein, 10 aa, synthetic construct
AAWRGDFQNT

SEQ ID NO: 71164 - protein, 10 aa, synthetic construct
AAFRGDHVNL

SEQ ID NO: 71165 - protein, 10 aa, synthetic construct
AAFRGDYNSL

SEQ ID NO: 71166 - protein, 10 aa, synthetic construct
AAFRGDYSSV

SEQ ID NO: 71167 - protein, 10 aa, synthetic construct
AAFRGDYTSV

SEQ ID NO: 71168 - protein, 10 aa, synthetic construct
AAFRGDYTSM

SEQ ID NO: 71169 - protein, 10 aa, synthetic construct
AAKRGDHVNL

SEQ ID NO: 71170 - protein, 10 aa, synthetic construct
AAKRGDYNSL

SEQ ID NO: 71171 - protein, 10 aa, synthetic construct
AAKRGDYSSV

SEQ ID NO: 71172 - protein, 10 aa, synthetic construct
ALGRGDLIGR

SEQ ID NO: 71173 - protein, 10 aa, synthetic construct
AAKRGDYTSV

SEQ ID NO: 71174 - protein, 10 aa, synthetic construct
AAKRGDYTSM

SEQ ID NO: 71175 - protein, 10 aa, synthetic construct
AARRGDFNNT

SEQ ID NO: 71176 - protein, 10 aa, synthetic construct
AARRGDFNNL

SEQ ID NO: 71177 - protein, 10 aa, synthetic construct
AAHRGDYNSL

SEQ ID NO: 71178 - protein, 10 aa, synthetic construct
AAHRGDFQNT

SEQ ID NO: 71179 - protein, 10 aa, synthetic construct
AASRGDFNNT

SEQ ID NO: 71180 - protein, 10 aa, synthetic construct
AASRGDFNNL

SEQ ID NO: 71181 - protein, 10 aa, synthetic construct
AATRGDYNSL

SEQ ID NO: 71182 - protein, 10 aa, synthetic construct
AATRGDFQNT

SEQ ID NO: 71183 - protein, 10 aa, synthetic construct
DSPRGDQSTL

SEQ ID NO: 71184 - protein, 10 aa, synthetic construct
ALGRGDRSQT

SEQ ID NO: 71185 - protein, 10 aa, synthetic construct
AAYRGDHVNL

SEQ ID NO: 71186 - protein, 10 aa, synthetic construct
AAYRGDYNSL

SEQ ID NO: 71187 - protein, 10 aa, synthetic construct
AAYRGDYSSV

SEQ ID NO: 71188 - protein, 10 aa, synthetic construct
AAYRGDYTSV

SEQ ID NO: 71189 - protein, 10 aa, synthetic construct
AAYRGDYTSM

SEQ ID NO: 71190 - protein, 10 aa, synthetic construct
AANRGDHVNL

SEQ ID NO: 71191 - protein, 10 aa, synthetic construct
AANRGDYNSL

SEQ ID NO: 71192 - protein, 10 aa, synthetic construct
AANRGDYSSV

SEQ ID NO: 71193 - protein, 10 aa, synthetic construct
AANRGDYTSV

SEQ ID NO: 71194 - protein, 10 aa, synthetic construct
AANRGDYTSM

SEQ ID NO: 71195 - protein, 10 aa, synthetic construct
ALGRGDLLLS

SEQ ID NO: 71196 - protein, 10 aa, synthetic construct
AAQRGDYNSL

SEQ ID NO: 71197 - protein, 10 aa, synthetic construct
AAQRGDFQNT

SEQ ID NO: 71198 - protein, 10 aa, synthetic construct
AADRGDYNSL

SEQ ID NO: 71199 - protein, 10 aa, synthetic construct
AADRGDFQNT

SEQ ID NO: 71200 - protein, 10 aa, synthetic construct
AAERGDYNSL

SEQ ID NO: 71201 - protein, 10 aa, synthetic construct
AAERGDFQNT

SEQ ID NO: 71202 - protein, 10 aa, synthetic construct
AVGRGDYNSL

SEQ ID NO: 71203 - protein, 10 aa, synthetic construct
AVGRGDFQNT

SEQ ID NO: 71204 - protein, 10 aa, synthetic construct
AVARGDYNSL

SEQ ID NO: 71205 - protein, 10 aa, synthetic construct
AVARGDFQNT

SEQ ID NO: 71206 - protein, 10 aa, synthetic construct
ALARGDHGVL

SEQ ID NO: 71207 - protein, 10 aa, synthetic construct
AVVRGDFQNT

SEQ ID NO: 71208 - protein, 10 aa, synthetic construct
AVPRGDYNSL

SEQ ID NO: 71209 - protein, 10 aa, synthetic construct
AVPRGDFQNT

SEQ ID NO: 71210 - protein, 10 aa, synthetic construct
AVLRGDFQNT

SEQ ID NO: 71211 - protein, 10 aa, synthetic construct
AVIRGDRDYL

SEQ ID NO: 71212 - protein, 10 aa, synthetic construct
AVIRGDYVGL

SEQ ID NO: 71213 - protein, 10 aa, synthetic construct
AVIRGDYSSV

SEQ ID NO: 71214 - protein, 10 aa, synthetic construct
AVIRGDYTSV

SEQ ID NO: 71215 - protein, 10 aa, synthetic construct
AVIRGDQSTL

SEQ ID NO: 71216 - protein, 10 aa, synthetic construct
AVMRGDRDYL

SEQ ID NO: 71217 - protein, 10 aa, synthetic construct
ALARGDRGQI

SEQ ID NO: 71218 - protein, 10 aa, synthetic construct
AVMRGDYTSV

SEQ ID NO: 71219 - protein, 10 aa, synthetic construct
AVMRGDLTVT

SEQ ID NO: 71220 - protein, 10 aa, synthetic construct
AVMRGDLIGR

SEQ ID NO: 71221 - protein, 10 aa, synthetic construct
AVWRGDYNSL

SEQ ID NO: 71222 - protein, 10 aa, synthetic construct
AVWRGDYTSV

SEQ ID NO: 71223 - protein, 10 aa, synthetic construct
AVWRGDYTSM

SEQ ID NO: 71224 - protein, 10 aa, synthetic construct
AVWRGDFQNT

SEQ ID NO: 71225 - protein, 10 aa, synthetic construct
AVFRGDRDYL

SEQ ID NO: 71226 - protein, 10 aa, synthetic construct
AVFRGDYVGL

SEQ ID NO: 71227 - protein, 10 aa, synthetic construct
AVFRGDYSSV

SEQ ID NO: 71228 - protein, 10 aa, synthetic construct
ALARGDRQGI

SEQ ID NO: 71229 - protein, 10 aa, synthetic construct
AVFRGDYTSV

SEQ ID NO: 71230 - protein, 10 aa, synthetic construct
AVFRGDQSTL

SEQ ID NO: 71231 - protein, 10 aa, synthetic construct
AVKRGDRDYL

SEQ ID NO: 71232 - protein, 10 aa, synthetic construct
AVKRGDYVGL

SEQ ID NO: 71233 - protein, 10 aa, synthetic construct
AVKRGDYSSV

SEQ ID NO: 71234 - protein, 10 aa, synthetic construct
AVKRGDYTSV

SEQ ID NO: 71235 - protein, 10 aa, synthetic construct
AVKRGDQSTL

SEQ ID NO: 71236 - protein, 10 aa, synthetic construct
AVRRGDYNSL

SEQ ID NO: 71237 - protein, 10 aa, synthetic construct
AVRRGDFQNT

SEQ ID NO: 71238 - protein, 10 aa, synthetic construct
AVHRGDHVNL

SEQ ID NO: 71239 - protein, 10 aa, synthetic construct
ALARGDRSVV

SEQ ID NO: 71240 - protein, 10 aa, synthetic construct
AVHRGDYNSL

SEQ ID NO: 71241 - protein, 10 aa, synthetic construct
AVHRGDYSSV

SEQ ID NO: 71242 - protein, 10 aa, synthetic construct
AVHRGDYTSV

SEQ ID NO: 71243 - protein, 10 aa, synthetic construct
AVHRGDYTSM

SEQ ID NO: 71244 - protein, 10 aa, synthetic construct
AVSRGDFQNT

SEQ ID NO: 71245 - protein, 10 aa, synthetic construct
AVTRGDHVNL

SEQ ID NO: 71246 - protein, 10 aa, synthetic construct
AVTRGDYNSL

SEQ ID NO: 71247 - protein, 10 aa, synthetic construct
AVTRGDYSSV

SEQ ID NO: 71248 - protein, 10 aa, synthetic construct
AVTRGDYTSV

SEQ ID NO: 71249 - protein, 10 aa, synthetic construct
AVTRGDYTSM

SEQ ID NO: 71250 - protein, 10 aa, synthetic construct
ALARGDLTVT

SEQ ID NO: 71251 - protein, 10 aa, synthetic construct
AVYRGDRDYL

SEQ ID NO: 71252 - protein, 10 aa, synthetic construct
AVYRGDYVGL

SEQ ID NO: 71253 - protein, 10 aa, synthetic construct
AVYRGDYSSV

SEQ ID NO: 71254 - protein, 10 aa, synthetic construct
AVYRGDYTSV

SEQ ID NO: 71255 - protein, 10 aa, synthetic construct
AVYRGDQSTL

SEQ ID NO: 71256 - protein, 10 aa, synthetic construct
AVNRGDRDYL

SEQ ID NO: 71257 - protein, 10 aa, synthetic construct
AVNRGDYVGL

SEQ ID NO: 71258 - protein, 10 aa, synthetic construct
AVNRGDYSSV

SEQ ID NO: 71259 - protein, 10 aa, synthetic construct
AVNRGDYTSV

SEQ ID NO: 71260 - protein, 10 aa, synthetic construct
AVNRGDQSTL

SEQ ID NO: 71261 - protein, 10 aa, synthetic construct
ALARGDLIGR

SEQ ID NO: 71262 - protein, 10 aa, synthetic construct
AVQRGDHVNL

SEQ ID NO: 71263 - protein, 10 aa, synthetic construct
AVQRGDYNSL

SEQ ID NO: 71264 - protein, 10 aa, synthetic construct
AVQRGDYSSV

SEQ ID NO: 71265 - protein, 10 aa, synthetic construct
AVQRGDYTSV

SEQ ID NO: 71266 - protein, 10 aa, synthetic construct
AVQRGDYTSM

SEQ ID NO: 71267 - protein, 10 aa, synthetic construct
AVDRGDHVNL

SEQ ID NO: 71268 - protein, 10 aa, synthetic construct
AVDRGDYNSL

SEQ ID NO: 71269 - protein, 10 aa, synthetic construct
AVDRGDYSSV

SEQ ID NO: 71270 - protein, 10 aa, synthetic construct
AVDRGDYTSV

SEQ ID NO: 71271 - protein, 10 aa, synthetic construct
AVDRGDYTSM

SEQ ID NO: 71272 - protein, 10 aa, synthetic construct
ALARGDRSQT

SEQ ID NO: 71273 - protein, 10 aa, synthetic construct
AVERGDHVNL

SEQ ID NO: 71274 - protein, 10 aa, synthetic construct
AVERGDYNSL

SEQ ID NO: 71275 - protein, 10 aa, synthetic construct
AVERGDYSSV

SEQ ID NO: 71276 - protein, 10 aa, synthetic construct
AVERGDYTSV

SEQ ID NO: 71277 - protein, 10 aa, synthetic construct
AVERGDYTSM

SEQ ID NO: 71278 - protein, 10 aa, synthetic construct
APGRGDFNNT

SEQ ID NO: 71279 - protein, 10 aa, synthetic construct
APGRGDFNNL

SEQ ID NO: 71280 - protein, 10 aa, synthetic construct
APARGDFNNT

SEQ ID NO: 71281 - protein, 10 aa, synthetic construct
APARGDFNNL

SEQ ID NO: 71282 - protein, 10 aa, synthetic construct
APVRGDFNNT

SEQ ID NO: 71283 - protein, 10 aa, synthetic construct
ALARGDLLLS

SEQ ID NO: 71284 - protein, 10 aa, synthetic construct
APVRGDFNNL

SEQ ID NO: 71285 - protein, 10 aa, synthetic construct
APLRGDFNNT

SEQ ID NO: 71286 - protein, 10 aa, synthetic construct
APLRGDFNNL

SEQ ID NO: 71287 - protein, 10 aa, synthetic construct
APIRGDHVNL

SEQ ID NO: 71288 - protein, 10 aa, synthetic construct
APIRGDYNSL

SEQ ID NO: 71289 - protein, 10 aa, synthetic construct
APIRGDYSSV

SEQ ID NO: 71290 - protein, 10 aa, synthetic construct
APIRGDYTSV

SEQ ID NO: 71291 - protein, 10 aa, synthetic construct
APIRGDYTSM

SEQ ID NO: 71292 - protein, 10 aa, synthetic construct
APMRGDYNSL

SEQ ID NO: 71293 - protein, 10 aa, synthetic construct
APMRGDYTSV

SEQ ID NO: 71294 - protein, 10 aa, synthetic construct
DSPRGDLLLS

SEQ ID NO: 71295 - protein, 10 aa, synthetic construct
ALVRGDHGVL

SEQ ID NO: 71296 - protein, 10 aa, synthetic construct
APMRGDYTSM

SEQ ID NO: 71297 - protein, 10 aa, synthetic construct
APMRGDFQNT

SEQ ID NO: 71298 - protein, 10 aa, synthetic construct
APWRGDYNSL

SEQ ID NO: 71299 - protein, 10 aa, synthetic construct
APWRGDFNNT

SEQ ID NO: 71300 - protein, 10 aa, synthetic construct
APWRGDFNNL

SEQ ID NO: 71301 - protein, 10 aa, synthetic construct
APWRGDFQNT

SEQ ID NO: 71302 - protein, 10 aa, synthetic construct
APFRGDHVNL

SEQ ID NO: 71303 - protein, 10 aa, synthetic construct
APFRGDYNSL

SEQ ID NO: 71304 - protein, 10 aa, synthetic construct
APFRGDYSSV

SEQ ID NO: 71305 - protein, 10 aa, synthetic construct
APFRGDYTSV

SEQ ID NO: 71306 - protein, 10 aa, synthetic construct
ALVRGDRGQI

SEQ ID NO: 71307 - protein, 10 aa, synthetic construct
APFRGDYTSM

SEQ ID NO: 71308 - protein, 10 aa, synthetic construct
APKRGDHVNL

SEQ ID NO: 71309 - protein, 10 aa, synthetic construct
APKRGDYNSL

SEQ ID NO: 71310 - protein, 10 aa, synthetic construct
APKRGDYSSV

SEQ ID NO: 71311 - protein, 10 aa, synthetic construct
APKRGDYTSV

SEQ ID NO: 71312 - protein, 10 aa, synthetic construct
APKRGDYTSM

SEQ ID NO: 71313 - protein, 10 aa, synthetic construct
APRRGDFNNT

SEQ ID NO: 71314 - protein, 10 aa, synthetic construct
APRRGDFNNL

SEQ ID NO: 71315 - protein, 10 aa, synthetic construct
APHRGDYNSL

SEQ ID NO: 71316 - protein, 10 aa, synthetic construct
APHRGDFQNT

SEQ ID NO: 71317 - protein, 10 aa, synthetic construct
ALVRGDRQGI

SEQ ID NO: 71318 - protein, 10 aa, synthetic construct
APSRGDFNNT

SEQ ID NO: 71319 - protein, 10 aa, synthetic construct
APSRGDFNNL

SEQ ID NO: 71320 - protein, 10 aa, synthetic construct
APTRGDYNSL

SEQ ID NO: 71321 - protein, 10 aa, synthetic construct
APTRGDFQNT

SEQ ID NO: 71322 - protein, 10 aa, synthetic construct
APYRGDHVNL

SEQ ID NO: 71323 - protein, 10 aa, synthetic construct
APYRGDYNSL

SEQ ID NO: 71324 - protein, 10 aa, synthetic construct
APYRGDYSSV

SEQ ID NO: 71325 - protein, 10 aa, synthetic construct
APYRGDYTSV

SEQ ID NO: 71326 - protein, 10 aa, synthetic construct
APYRGDYTSM

SEQ ID NO: 71327 - protein, 10 aa, synthetic construct
APNRGDHVNL

SEQ ID NO: 71328 - protein, 10 aa, synthetic construct
ALVRGDRSVV

SEQ ID NO: 71329 - protein, 10 aa, synthetic construct
APNRGDYNSL

SEQ ID NO: 71330 - protein, 10 aa, synthetic construct
APNRGDYSSV

SEQ ID NO: 71331 - protein, 10 aa, synthetic construct
APNRGDYTSV

SEQ ID NO: 71332 - protein, 10 aa, synthetic construct
APNRGDYTSM

SEQ ID NO: 71333 - protein, 10 aa, synthetic construct
APQRGDYNSL

SEQ ID NO: 71334 - protein, 10 aa, synthetic construct
APQRGDFQNT

SEQ ID NO: 71335 - protein, 10 aa, synthetic construct
APDRGDYNSL

SEQ ID NO: 71336 - protein, 10 aa, synthetic construct
APDRGDFQNT

SEQ ID NO: 71337 - protein, 10 aa, synthetic construct
APERGDYNSL

SEQ ID NO: 71338 - protein, 10 aa, synthetic construct
APERGDFQNT

SEQ ID NO: 71339 - protein, 10 aa, synthetic construct
ALVRGDLTVT

SEQ ID NO: 71340 - protein, 10 aa, synthetic construct
ALGRGDYNSL

SEQ ID NO: 71341 - protein, 10 aa, synthetic construct
ALGRGDFQNT

SEQ ID NO: 71342 - protein, 10 aa, synthetic construct
ALARGDYNSL

SEQ ID NO: 71343 - protein, 10 aa, synthetic construct
ALARGDFQNT

SEQ ID NO: 71344 - protein, 10 aa, synthetic construct
ALVRGDFQNT

SEQ ID NO: 71345 - protein, 10 aa, synthetic construct
ALPRGDYNSL

SEQ ID NO: 71346 - protein, 10 aa, synthetic construct
ALPRGDFQNT

SEQ ID NO: 71347 - protein, 10 aa, synthetic construct
ALLRGDFQNT

SEQ ID NO: 71348 - protein, 10 aa, synthetic construct
ALIRGDRDYL

SEQ ID NO: 71349 - protein, 10 aa, synthetic construct
ALIRGDYVGL

SEQ ID NO: 71350 - protein, 10 aa, synthetic construct
ALVRGDLIGR

SEQ ID NO: 71351 - protein, 10 aa, synthetic construct
ALIRGDYSSV

SEQ ID NO: 71352 - protein, 10 aa, synthetic construct
ALIRGDYTSV

SEQ ID NO: 71353 - protein, 10 aa, synthetic construct
ALIRGDQSTL

SEQ ID NO: 71354 - protein, 10 aa, synthetic construct
ALMRGDRDYL

SEQ ID NO: 71355 - protein, 10 aa, synthetic construct
ALMRGDYTSV

SEQ ID NO: 71356 - protein, 10 aa, synthetic construct
ALMRGDLTVT

SEQ ID NO: 71357 - protein, 10 aa, synthetic construct
ALMRGDLIGR

SEQ ID NO: 71358 - protein, 10 aa, synthetic construct
ALWRGDYNSL

SEQ ID NO: 71359 - protein, 10 aa, synthetic construct
ALWRGDYTSV

SEQ ID NO: 71360 - protein, 10 aa, synthetic construct
ALWRGDYTSM

SEQ ID NO: 71361 - protein, 10 aa, synthetic construct
ALVRGDRSQT

SEQ ID NO: 71362 - protein, 10 aa, synthetic construct
ALWRGDFQNT

SEQ ID NO: 71363 - protein, 10 aa, synthetic construct
ALFRGDRDYL

SEQ ID NO: 71364 - protein, 10 aa, synthetic construct
ALFRGDYVGL

SEQ ID NO: 71365 - protein, 10 aa, synthetic construct
ALFRGDYSSV

SEQ ID NO: 71366 - protein, 10 aa, synthetic construct
ALFRGDYTSV

SEQ ID NO: 71367 - protein, 10 aa, synthetic construct
ALFRGDQSTL

SEQ ID NO: 71368 - protein, 10 aa, synthetic construct
ALKRGDRDYL

SEQ ID NO: 71369 - protein, 10 aa, synthetic construct
ALKRGDYVGL

SEQ ID NO: 71370 - protein, 10 aa, synthetic construct
ALKRGDYSSV

SEQ ID NO: 71371 - protein, 10 aa, synthetic construct
ALKRGDYTSV

SEQ ID NO: 71372 - protein, 10 aa, synthetic construct
ALVRGDLLLS

SEQ ID NO: 71373 - protein, 10 aa, synthetic construct
ALKRGDQSTL

SEQ ID NO: 71374 - protein, 10 aa, synthetic construct
ALRRGDYNSL

SEQ ID NO: 71375 - protein, 10 aa, synthetic construct
ALRRGDFQNT

SEQ ID NO: 71376 - protein, 10 aa, synthetic construct
ALHRGDHVNL

SEQ ID NO: 71377 - protein, 10 aa, synthetic construct
ALHRGDYNSL

SEQ ID NO: 71378 - protein, 10 aa, synthetic construct
ALHRGDYSSV

SEQ ID NO: 71379 - protein, 10 aa, synthetic construct
ALHRGDYTSV

SEQ ID NO: 71380 - protein, 10 aa, synthetic construct
ALHRGDYTSM

SEQ ID NO: 71381 - protein, 10 aa, synthetic construct
ALSRGDFQNT

SEQ ID NO: 71382 - protein, 10 aa, synthetic construct
ALTRGDHVNL

SEQ ID NO: 71383 - protein, 10 aa, synthetic construct
ALPRGDHGVL

SEQ ID NO: 71384 - protein, 10 aa, synthetic construct
ALTRGDYNSL

SEQ ID NO: 71385 - protein, 10 aa, synthetic construct
ALTRGDYSSV

SEQ ID NO: 71386 - protein, 10 aa, synthetic construct
ALTRGDYTSV

SEQ ID NO: 71387 - protein, 10 aa, synthetic construct
ALTRGDYTSM

SEQ ID NO: 71388 - protein, 10 aa, synthetic construct
ALYRGDRDYL

SEQ ID NO: 71389 - protein, 10 aa, synthetic construct
ALYRGDYVGL

SEQ ID NO: 71390 - protein, 10 aa, synthetic construct
ALYRGDYSSV

SEQ ID NO: 71391 - protein, 10 aa, synthetic construct
ALYRGDYTSV

SEQ ID NO: 71392 - protein, 10 aa, synthetic construct
ALYRGDQSTL

SEQ ID NO: 71393 - protein, 10 aa, synthetic construct
ALNRGDRDYL

SEQ ID NO: 71394 - protein, 10 aa, synthetic construct
ALPRGDRGQI

SEQ ID NO: 71395 - protein, 10 aa, synthetic construct
ALNRGDYVGL

SEQ ID NO: 71396 - protein, 10 aa, synthetic construct
ALNRGDYSSV

SEQ ID NO: 71397 - protein, 10 aa, synthetic construct
ALNRGDYTSV

SEQ ID NO: 71398 - protein, 10 aa, synthetic construct
ALNRGDQSTL

SEQ ID NO: 71399 - protein, 10 aa, synthetic construct
ALQRGDHVNL

SEQ ID NO: 71400 - protein, 10 aa, synthetic construct
ALQRGDYNSL

SEQ ID NO: 71401 - protein, 10 aa, synthetic construct
ALQRGDYSSV

SEQ ID NO: 71402 - protein, 10 aa, synthetic construct
ALQRGDYTSV

SEQ ID NO: 71403 - protein, 10 aa, synthetic construct
ALQRGDYTSM

SEQ ID NO: 71404 - protein, 10 aa, synthetic construct
ALDRGDHVNL

SEQ ID NO: 71405 - protein, 10 aa, synthetic construct
QSPRGDHGVL

SEQ ID NO: 71406 - protein, 10 aa, synthetic construct
ALPRGDRQGI

SEQ ID NO: 71407 - protein, 10 aa, synthetic construct
ALDRGDYNSL

SEQ ID NO: 71408 - protein, 10 aa, synthetic construct
ALDRGDYSSV

SEQ ID NO: 71409 - protein, 10 aa, synthetic construct
ALDRGDYTSV

SEQ ID NO: 71410 - protein, 10 aa, synthetic construct
ALDRGDYTSM

SEQ ID NO: 71411 - protein, 10 aa, synthetic construct
ALERGDHVNL

SEQ ID NO: 71412 - protein, 10 aa, synthetic construct
ALERGDYNSL

SEQ ID NO: 71413 - protein, 10 aa, synthetic construct
ALERGDYSSV

SEQ ID NO: 71414 - protein, 10 aa, synthetic construct
ALERGDYTSV

SEQ ID NO: 71415 - protein, 10 aa, synthetic construct
ALERGDYTSM

SEQ ID NO: 71416 - protein, 10 aa, synthetic construct
AIGRGDHVNL

SEQ ID NO: 71417 - protein, 10 aa, synthetic construct
ALPRGDRSVV

SEQ ID NO: 71418 - protein, 10 aa, synthetic construct
AIGRGDYNSL

SEQ ID NO: 71419 - protein, 10 aa, synthetic construct
AIGRGDYSSV

SEQ ID NO: 71420 - protein, 10 aa, synthetic construct
AIGRGDYTSV

SEQ ID NO: 71421 - protein, 10 aa, synthetic construct
AIGRGDYTSM

SEQ ID NO: 71422 - protein, 10 aa, synthetic construct
AIARGDHVNL

SEQ ID NO: 71423 - protein, 10 aa, synthetic construct
AIARGDYNSL

SEQ ID NO: 71424 - protein, 10 aa, synthetic construct
AIARGDYSSV

SEQ ID NO: 71425 - protein, 10 aa, synthetic construct
AIARGDYTSV

SEQ ID NO: 71426 - protein, 10 aa, synthetic construct
AIARGDYTSM

SEQ ID NO: 71427 - protein, 10 aa, synthetic construct
AIVRGDHVNL

SEQ ID NO: 71428 - protein, 10 aa, synthetic construct
ALPRGDLTVT

SEQ ID NO: 71429 - protein, 10 aa, synthetic construct
AIVRGDYNSL

SEQ ID NO: 71430 - protein, 10 aa, synthetic construct
AIVRGDYTSM

SEQ ID NO: 71431 - protein, 10 aa, synthetic construct
AIPRGDHVNL

SEQ ID NO: 71432 - protein, 10 aa, synthetic construct
AIPRGDYNSL

SEQ ID NO: 71433 - protein, 10 aa, synthetic construct
AIPRGDYSSV

SEQ ID NO: 71434 - protein, 10 aa, synthetic construct
AIPRGDYTSV

SEQ ID NO: 71435 - protein, 10 aa, synthetic construct
AIPRGDYTSM

SEQ ID NO: 71436 - protein, 10 aa, synthetic construct
AILRGDHVNL

SEQ ID NO: 71437 - protein, 10 aa, synthetic construct
AILRGDYNSL

SEQ ID NO: 71438 - protein, 10 aa, synthetic construct
AILRGDYTSM

SEQ ID NO: 71439 - protein, 10 aa, synthetic construct
ALPRGDLIGR

SEQ ID NO: 71440 - protein, 10 aa, synthetic construct
AIIRGDHGVL

SEQ ID NO: 71441 - protein, 10 aa, synthetic construct
AIIRGDRGQI

SEQ ID NO: 71442 - protein, 10 aa, synthetic construct
AIIRGDRQGI

SEQ ID NO: 71443 - protein, 10 aa, synthetic construct
AIIRGDRSVV

SEQ ID NO: 71444 - protein, 10 aa, synthetic construct
AIIRGDLIGR

SEQ ID NO: 71445 - protein, 10 aa, synthetic construct
AIIRGDRSQT

SEQ ID NO: 71446 - protein, 10 aa, synthetic construct
AIMRGDHGVL

SEQ ID NO: 71447 - protein, 10 aa, synthetic construct
AIMRGDHVNL

SEQ ID NO: 71448 - protein, 10 aa, synthetic construct
AIMRGDRDYL

SEQ ID NO: 71449 - protein, 10 aa, synthetic construct
AIMRGDYSSV

SEQ ID NO: 71450 - protein, 10 aa, synthetic construct
ALPRGDRSQT

SEQ ID NO: 71451 - protein, 10 aa, synthetic construct
AIMRGDLTVT

SEQ ID NO: 71452 - protein, 10 aa, synthetic construct
AIWRGDRDYL

SEQ ID NO: 71453 - protein, 10 aa, synthetic construct
AIWRGDYTSV

SEQ ID NO: 71454 - protein, 10 aa, synthetic construct
AIWRGDLTVT

SEQ ID NO: 71455 - protein, 10 aa, synthetic construct
AIWRGDLIGR

SEQ ID NO: 71456 - protein, 10 aa, synthetic construct
AIFRGDHGVL

SEQ ID NO: 71457 - protein, 10 aa, synthetic construct
AIFRGDRGQI

SEQ ID NO: 71458 - protein, 10 aa, synthetic construct
AIFRGDRQGI

SEQ ID NO: 71459 - protein, 10 aa, synthetic construct
AIFRGDRSVV

SEQ ID NO: 71460 - protein, 10 aa, synthetic construct
AIFRGDLIGR

SEQ ID NO: 71461 - protein, 10 aa, synthetic construct
ALPRGDLLLS

SEQ ID NO: 71462 - protein, 10 aa, synthetic construct
AIFRGDRSQT

SEQ ID NO: 71463 - protein, 10 aa, synthetic construct
AIKRGDHGVL

SEQ ID NO: 71464 - protein, 10 aa, synthetic construct
AIKRGDRGQI

SEQ ID NO: 71465 - protein, 10 aa, synthetic construct
AIKRGDRQGI

SEQ ID NO: 71466 - protein, 10 aa, synthetic construct
AIKRGDRSVV

SEQ ID NO: 71467 - protein, 10 aa, synthetic construct
AIKRGDLIGR

SEQ ID NO: 71468 - protein, 10 aa, synthetic construct
AIKRGDRSQT

SEQ ID NO: 71469 - protein, 10 aa, synthetic construct
AIRRGDHVNL

SEQ ID NO: 71470 - protein, 10 aa, synthetic construct
AIRRGDYNSL

SEQ ID NO: 71471 - protein, 10 aa, synthetic construct
AIRRGDYSSV

SEQ ID NO: 71472 - protein, 10 aa, synthetic construct
ALLRGDHGVL

SEQ ID NO: 71473 - protein, 10 aa, synthetic construct
AIRRGDYTSV

SEQ ID NO: 71474 - protein, 10 aa, synthetic construct
AIRRGDYTSM

SEQ ID NO: 71475 - protein, 10 aa, synthetic construct
AIHRGDRDYL

SEQ ID NO: 71476 - protein, 10 aa, synthetic construct
AIHRGDYVGL

SEQ ID NO: 71477 - protein, 10 aa, synthetic construct
AIHRGDYSSV

SEQ ID NO: 71478 - protein, 10 aa, synthetic construct
AIHRGDYTSV

SEQ ID NO: 71479 - protein, 10 aa, synthetic construct
AIHRGDQSTL

SEQ ID NO: 71480 - protein, 10 aa, synthetic construct
AISRGDHVNL

SEQ ID NO: 71481 - protein, 10 aa, synthetic construct
AISRGDYNSL

SEQ ID NO: 71482 - protein, 10 aa, synthetic construct
AISRGDYTSM

SEQ ID NO: 71483 - protein, 10 aa, synthetic construct
ALLRGDRGQI

SEQ ID NO: 71484 - protein, 10 aa, synthetic construct
AITRGDRDYL

SEQ ID NO: 71485 - protein, 10 aa, synthetic construct
AITRGDYVGL

SEQ ID NO: 71486 - protein, 10 aa, synthetic construct
AITRGDYSSV

SEQ ID NO: 71487 - protein, 10 aa, synthetic construct
AITRGDYTSV

SEQ ID NO: 71488 - protein, 10 aa, synthetic construct
AITRGDQSTL

SEQ ID NO: 71489 - protein, 10 aa, synthetic construct
AIYRGDHGVL

SEQ ID NO: 71490 - protein, 10 aa, synthetic construct
AIYRGDRGQI

SEQ ID NO: 71491 - protein, 10 aa, synthetic construct
AIYRGDRQGI

SEQ ID NO: 71492 - protein, 10 aa, synthetic construct
AIYRGDRSVV

SEQ ID NO: 71493 - protein, 10 aa, synthetic construct
AIYRGDLIGR

SEQ ID NO: 71494 - protein, 10 aa, synthetic construct
ALLRGDRQGI

SEQ ID NO: 71495 - protein, 10 aa, synthetic construct
AIYRGDRSQT

SEQ ID NO: 71496 - protein, 10 aa, synthetic construct
AINRGDHGVL

SEQ ID NO: 71497 - protein, 10 aa, synthetic construct
AINRGDRGQI

SEQ ID NO: 71498 - protein, 10 aa, synthetic construct
AINRGDRQGI

SEQ ID NO: 71499 - protein, 10 aa, synthetic construct
AINRGDRSVV

SEQ ID NO: 71500 - protein, 10 aa, synthetic construct
AINRGDLIGR

SEQ ID NO: 71501 - protein, 10 aa, synthetic construct
AINRGDRSQT

SEQ ID NO: 71502 - protein, 10 aa, synthetic construct
AIQRGDRDYL

SEQ ID NO: 71503 - protein, 10 aa, synthetic construct
AIQRGDYVGL

SEQ ID NO: 71504 - protein, 10 aa, synthetic construct
AIQRGDYSSV

SEQ ID NO: 71505 - protein, 10 aa, synthetic construct
ALLRGDRSVV

SEQ ID NO: 71506 - protein, 10 aa, synthetic construct
AIQRGDYTSV

SEQ ID NO: 71507 - protein, 10 aa, synthetic construct
AIQRGDQSTL

SEQ ID NO: 71508 - protein, 10 aa, synthetic construct
AIDRGDRDYL

SEQ ID NO: 71509 - protein, 10 aa, synthetic construct
AIDRGDYVGL

SEQ ID NO: 71510 - protein, 10 aa, synthetic construct
AIDRGDYSSV

SEQ ID NO: 71511 - protein, 10 aa, synthetic construct
AIDRGDYTSV

SEQ ID NO: 71512 - protein, 10 aa, synthetic construct
AIDRGDQSTL

SEQ ID NO: 71513 - protein, 10 aa, synthetic construct
AIERGDRDYL

SEQ ID NO: 71514 - protein, 10 aa, synthetic construct
AIERGDYVGL

SEQ ID NO: 71515 - protein, 10 aa, synthetic construct
AIERGDYSSV

SEQ ID NO: 71516 - protein, 10 aa, synthetic construct
QSPRGDYVGL

SEQ ID NO: 71517 - protein, 10 aa, synthetic construct
ALLRGDLTVT

SEQ ID NO: 71518 - protein, 10 aa, synthetic construct
AIERGDYTSV

SEQ ID NO: 71519 - protein, 10 aa, synthetic construct
AIERGDQSTL

SEQ ID NO: 71520 - protein, 10 aa, synthetic construct
AMGRGDHVNL

SEQ ID NO: 71521 - protein, 10 aa, synthetic construct
AMGRGDYNSL

SEQ ID NO: 71522 - protein, 10 aa, synthetic construct
AMGRGDYSSV

SEQ ID NO: 71523 - protein, 10 aa, synthetic construct
AMGRGDYTSV

SEQ ID NO: 71524 - protein, 10 aa, synthetic construct
AMGRGDYTSM

SEQ ID NO: 71525 - protein, 10 aa, synthetic construct
AMARGDHVNL

SEQ ID NO: 71526 - protein, 10 aa, synthetic construct
AMARGDYNSL

SEQ ID NO: 71527 - protein, 10 aa, synthetic construct
AMARGDYSSV

SEQ ID NO: 71528 - protein, 10 aa, synthetic construct
ALLRGDLIGR

SEQ ID NO: 71529 - protein, 10 aa, synthetic construct
AMARGDYTSV

SEQ ID NO: 71530 - protein, 10 aa, synthetic construct
AMARGDYTSM

SEQ ID NO: 71531 - protein, 10 aa, synthetic construct
AMVRGDHVNL

SEQ ID NO: 71532 - protein, 10 aa, synthetic construct
AMVRGDYNSL

SEQ ID NO: 71533 - protein, 10 aa, synthetic construct
AMVRGDYTSM

SEQ ID NO: 71534 - protein, 10 aa, synthetic construct
AMPRGDHVNL

SEQ ID NO: 71535 - protein, 10 aa, synthetic construct
AMPRGDYNSL

SEQ ID NO: 71536 - protein, 10 aa, synthetic construct
AMPRGDYSSV

SEQ ID NO: 71537 - protein, 10 aa, synthetic construct
AMPRGDYTSV

SEQ ID NO: 71538 - protein, 10 aa, synthetic construct
AMPRGDYTSM

SEQ ID NO: 71539 - protein, 10 aa, synthetic construct
ALLRGDRSQT

SEQ ID NO: 71540 - protein, 10 aa, synthetic construct
AMLRGDHVNL

SEQ ID NO: 71541 - protein, 10 aa, synthetic construct
AMLRGDYNSL

SEQ ID NO: 71542 - protein, 10 aa, synthetic construct
AMLRGDYTSM

SEQ ID NO: 71543 - protein, 10 aa, synthetic construct
AMIRGDHGVL

SEQ ID NO: 71544 - protein, 10 aa, synthetic construct
AMIRGDRGQI

SEQ ID NO: 71545 - protein, 10 aa, synthetic construct
AMIRGDRQGI

SEQ ID NO: 71546 - protein, 10 aa, synthetic construct
AMIRGDRSVV

SEQ ID NO: 71547 - protein, 10 aa, synthetic construct
AMIRGDLIGR

SEQ ID NO: 71548 - protein, 10 aa, synthetic construct
AMIRGDRSQT

SEQ ID NO: 71549 - protein, 10 aa, synthetic construct
AMMRGDHGVL

SEQ ID NO: 71550 - protein, 10 aa, synthetic construct
ALLRGDLLLS

SEQ ID NO: 71551 - protein, 10 aa, synthetic construct
AMMRGDHVNL

SEQ ID NO: 71552 - protein, 10 aa, synthetic construct
AMMRGDRDYL

SEQ ID NO: 71553 - protein, 10 aa, synthetic construct
AMMRGDYSSV

SEQ ID NO: 71554 - protein, 10 aa, synthetic construct
AMMRGDLTVT

SEQ ID NO: 71555 - protein, 10 aa, synthetic construct
AMWRGDRDYL

SEQ ID NO: 71556 - protein, 10 aa, synthetic construct
AMWRGDYTSV

SEQ ID NO: 71557 - protein, 10 aa, synthetic construct
AMWRGDLTVT

SEQ ID NO: 71558 - protein, 10 aa, synthetic construct
AMWRGDLIGR

SEQ ID NO: 71559 - protein, 10 aa, synthetic construct
AMFRGDHGVL

SEQ ID NO: 71560 - protein, 10 aa, synthetic construct
AMFRGDRGQI

SEQ ID NO: 71561 - protein, 10 aa, synthetic construct
ALWRGDRGQI

SEQ ID NO: 71562 - protein, 10 aa, synthetic construct
AMFRGDRQGI

SEQ ID NO: 71563 - protein, 10 aa, synthetic construct
AMFRGDRSVV

SEQ ID NO: 71564 - protein, 10 aa, synthetic construct
AMFRGDLIGR

SEQ ID NO: 71565 - protein, 10 aa, synthetic construct
AMFRGDRSQT

SEQ ID NO: 71566 - protein, 10 aa, synthetic construct
AMKRGDHGVL

SEQ ID NO: 71567 - protein, 10 aa, synthetic construct
AMKRGDRGQI

SEQ ID NO: 71568 - protein, 10 aa, synthetic construct
AMKRGDRQGI

SEQ ID NO: 71569 - protein, 10 aa, synthetic construct
AMKRGDRSVV

SEQ ID NO: 71570 - protein, 10 aa, synthetic construct
AMKRGDLIGR

SEQ ID NO: 71571 - protein, 10 aa, synthetic construct
AMKRGDRSQT

SEQ ID NO: 71572 - protein, 10 aa, synthetic construct
ALWRGDRQGI

SEQ ID NO: 71573 - protein, 10 aa, synthetic construct
AMRRGDHVNL

SEQ ID NO: 71574 - protein, 10 aa, synthetic construct
AMRRGDYNSL

SEQ ID NO: 71575 - protein, 10 aa, synthetic construct
AMRRGDYSSV

SEQ ID NO: 71576 - protein, 10 aa, synthetic construct
AMRRGDYTSV

SEQ ID NO: 71577 - protein, 10 aa, synthetic construct
AMRRGDYTSM

SEQ ID NO: 71578 - protein, 10 aa, synthetic construct
AMHRGDRDYL

SEQ ID NO: 71579 - protein, 10 aa, synthetic construct
AMHRGDYVGL

SEQ ID NO: 71580 - protein, 10 aa, synthetic construct
AMHRGDYSSV

SEQ ID NO: 71581 - protein, 10 aa, synthetic construct
AMHRGDYTSV

SEQ ID NO: 71582 - protein, 10 aa, synthetic construct
AMHRGDQSTL

SEQ ID NO: 71583 - protein, 10 aa, synthetic construct
ALWRGDRSVV

SEQ ID NO: 71584 - protein, 10 aa, synthetic construct
AMSRGDHVNL

SEQ ID NO: 71585 - protein, 10 aa, synthetic construct
AMSRGDYNSL

SEQ ID NO: 71586 - protein, 10 aa, synthetic construct
AMSRGDYTSM

SEQ ID NO: 71587 - protein, 10 aa, synthetic construct
AMTRGDRDYL

SEQ ID NO: 71588 - protein, 10 aa, synthetic construct
AMTRGDYVGL

SEQ ID NO: 71589 - protein, 10 aa, synthetic construct
AMTRGDYSSV

SEQ ID NO: 71590 - protein, 10 aa, synthetic construct
AMTRGDYTSV

SEQ ID NO: 71591 - protein, 10 aa, synthetic construct
AMTRGDQSTL

SEQ ID NO: 71592 - protein, 10 aa, synthetic construct
AMYRGDHGVL

SEQ ID NO: 71593 - protein, 10 aa, synthetic construct
AMYRGDRGQI

SEQ ID NO: 71594 - protein, 10 aa, synthetic construct
ALWRGDRGVV

SEQ ID NO: 71595 - protein, 10 aa, synthetic construct
AMYRGDRQGI

SEQ ID NO: 71596 - protein, 10 aa, synthetic construct
AMYRGDRSVV

SEQ ID NO: 71597 - protein, 10 aa, synthetic construct
AMYRGDLIGR

SEQ ID NO: 71598 - protein, 10 aa, synthetic construct
AMYRGDRSQT

SEQ ID NO: 71599 - protein, 10 aa, synthetic construct
AMNRGDHGVL

SEQ ID NO: 71600 - protein, 10 aa, synthetic construct
AMNRGDRGQI

SEQ ID NO: 71601 - protein, 10 aa, synthetic construct
AMNRGDRQGI

SEQ ID NO: 71602 - protein, 10 aa, synthetic construct
AMNRGDRSVV

SEQ ID NO: 71603 - protein, 10 aa, synthetic construct
AMNRGDLIGR

SEQ ID NO: 71604 - protein, 10 aa, synthetic construct
AMNRGDRSQT

SEQ ID NO: 71605 - protein, 10 aa, synthetic construct
ALWRGDRSQT

SEQ ID NO: 71606 - protein, 10 aa, synthetic construct
AMQRGDRDYL

SEQ ID NO: 71607 - protein, 10 aa, synthetic construct
AMQRGDYVGL

SEQ ID NO: 71608 - protein, 10 aa, synthetic construct
AMQRGDYSSV

SEQ ID NO: 71609 - protein, 10 aa, synthetic construct
AMQRGDYTSV

SEQ ID NO: 71610 - protein, 10 aa, synthetic construct
AMQRGDQSTL

SEQ ID NO: 71611 - protein, 10 aa, synthetic construct
AMDRGDRDYL

SEQ ID NO: 71612 - protein, 10 aa, synthetic construct
AMDRGDYVGL

SEQ ID NO: 71613 - protein, 10 aa, synthetic construct
AMDRGDYSSV

SEQ ID NO: 71614 - protein, 10 aa, synthetic construct
AMDRGDYTSV

SEQ ID NO: 71615 - protein, 10 aa, synthetic construct
AMDRGDQSTL

SEQ ID NO: 71616 - protein, 10 aa, synthetic construct
ALRRGDHGVL

SEQ ID NO: 71617 - protein, 10 aa, synthetic construct
AMERGDRDYL

SEQ ID NO: 71618 - protein, 10 aa, synthetic construct
AMERGDYVGL

SEQ ID NO: 71619 - protein, 10 aa, synthetic construct
AMERGDYSSV

SEQ ID NO: 71620 - protein, 10 aa, synthetic construct
AMERGDYTSV

SEQ ID NO: 71621 - protein, 10 aa, synthetic construct
AMERGDQSTL

SEQ ID NO: 71622 - protein, 10 aa, synthetic construct
AWGRGDYNSL

SEQ ID NO: 71623 - protein, 10 aa, synthetic construct
AWGRGDFQNT

SEQ ID NO: 71624 - protein, 10 aa, synthetic construct
AWARGDYNSL

SEQ ID NO: 71625 - protein, 10 aa, synthetic construct
AWARGDFQNT

SEQ ID NO: 71626 - protein, 10 aa, synthetic construct
AWVRGDFQNT

SEQ ID NO: 71627 - protein, 10 aa, synthetic construct
QSPRGDQSTL

SEQ ID NO: 71628 - protein, 10 aa, synthetic construct
ALRRGDRGQI

SEQ ID NO: 71629 - protein, 10 aa, synthetic construct
AWPRGDYNSL

SEQ ID NO: 71630 - protein, 10 aa, synthetic construct
AWPRGDFQNT

SEQ ID NO: 71631 - protein, 10 aa, synthetic construct
AWLRGDFQNT

SEQ ID NO: 71632 - protein, 10 aa, synthetic construct
AWIRGDRDYL

SEQ ID NO: 71633 - protein, 10 aa, synthetic construct
AWIRGDYVGL

SEQ ID NO: 71634 - protein, 10 aa, synthetic construct
AWIRGDYSSV

SEQ ID NO: 71635 - protein, 10 aa, synthetic construct
AWIRGDYTSV

SEQ ID NO: 71636 - protein, 10 aa, synthetic construct
AWIRGDQSTL

SEQ ID NO: 71637 - protein, 10 aa, synthetic construct
AWMRGDRDYL

SEQ ID NO: 71638 - protein, 10 aa, synthetic construct
AWMRGDYTSV

SEQ ID NO: 71639 - protein, 10 aa, synthetic construct
ALRRGDRQGI

SEQ ID NO: 71640 - protein, 10 aa, synthetic construct
AWMRGDLTVT

SEQ ID NO: 71641 - protein, 10 aa, synthetic construct
AWMRGDLIGR

SEQ ID NO: 71642 - protein, 10 aa, synthetic construct
AWWRGDYNSL

SEQ ID NO: 71643 - protein, 10 aa, synthetic construct
AWWRGDYTSV

SEQ ID NO: 71644 - protein, 10 aa, synthetic construct
AWWRGDYTSM

SEQ ID NO: 71645 - protein, 10 aa, synthetic construct
AWWRGDFQNT

SEQ ID NO: 71646 - protein, 10 aa, synthetic construct
AWFRGDRDYL

SEQ ID NO: 71647 - protein, 10 aa, synthetic construct
AWFRGDYVGL

SEQ ID NO: 71648 - protein, 10 aa, synthetic construct
AWFRGDYSSV

SEQ ID NO: 71649 - protein, 10 aa, synthetic construct
AWFRGDYTSV

SEQ ID NO: 71650 - protein, 10 aa, synthetic construct
ALRRGDRSVV

SEQ ID NO: 71651 - protein, 10 aa, synthetic construct
AWFRGDQSTL

SEQ ID NO: 71652 - protein, 10 aa, synthetic construct
AWKRGDRDYL

SEQ ID NO: 71653 - protein, 10 aa, synthetic construct
AWKRGDYVGL

SEQ ID NO: 71654 - protein, 10 aa, synthetic construct
AWKRGDYSSV

SEQ ID NO: 71655 - protein, 10 aa, synthetic construct
AWKRGDYTSV

SEQ ID NO: 71656 - protein, 10 aa, synthetic construct
AWKRGDQSTL

SEQ ID NO: 71657 - protein, 10 aa, synthetic construct
AWRRGDYNSL

SEQ ID NO: 71658 - protein, 10 aa, synthetic construct
AWRRGDFQNT

SEQ ID NO: 71659 - protein, 10 aa, synthetic construct
AWHRGDHVNL

SEQ ID NO: 71660 - protein, 10 aa, synthetic construct
AWHRGDYNSL

SEQ ID NO: 71661 - protein, 10 aa, synthetic construct
ALRRGDLTVT

SEQ ID NO: 71662 - protein, 10 aa, synthetic construct
AWHRGDYSSV

SEQ ID NO: 71663 - protein, 10 aa, synthetic construct
AWHRGDYTSV

SEQ ID NO: 71664 - protein, 10 aa, synthetic construct
AWHRGDYTSM

SEQ ID NO: 71665 - protein, 10 aa, synthetic construct
AWSRGDFQNT

SEQ ID NO: 71666 - protein, 10 aa, synthetic construct
AWTRGDHVNL

SEQ ID NO: 71667 - protein, 10 aa, synthetic construct
AWTRGDYNSL

SEQ ID NO: 71668 - protein, 10 aa, synthetic construct
AWTRGDYSSV

SEQ ID NO: 71669 - protein, 10 aa, synthetic construct
AWTRGDYTSV

SEQ ID NO: 71670 - protein, 10 aa, synthetic construct
AWTRGDYTSM

SEQ ID NO: 71671 - protein, 10 aa, synthetic construct
AWYRGDRDYL

SEQ ID NO: 71672 - protein, 10 aa, synthetic construct
ALRRGDLIGR

SEQ ID NO: 71673 - protein, 10 aa, synthetic construct
AWYRGDYVGL

SEQ ID NO: 71674 - protein, 10 aa, synthetic construct
AWYRGDYSSV

SEQ ID NO: 71675 - protein, 10 aa, synthetic construct
AWYRGDYTSV

SEQ ID NO: 71676 - protein, 10 aa, synthetic construct
AWYRGDQSTL

SEQ ID NO: 71677 - protein, 10 aa, synthetic construct
AWNRGDRDYL

SEQ ID NO: 71678 - protein, 10 aa, synthetic construct
AWNRGDYVGL

SEQ ID NO: 71679 - protein, 10 aa, synthetic construct
AWNRGDYSSV

SEQ ID NO: 71680 - protein, 10 aa, synthetic construct
AWNRGDYTSV

SEQ ID NO: 71681 - protein, 10 aa, synthetic construct
AWNRGDQSTL

SEQ ID NO: 71682 - protein, 10 aa, synthetic construct
AWQRGDHVNL

SEQ ID NO: 71683 - protein, 10 aa, synthetic construct
ALRRGDRSQT

SEQ ID NO: 71684 - protein, 10 aa, synthetic construct
AWQRGDYNSL

SEQ ID NO: 71685 - protein, 10 aa, synthetic construct
AWQRGDYSSV

SEQ ID NO: 71686 - protein, 10 aa, synthetic construct
AWQRGDYTSV

SEQ ID NO: 71687 - protein, 10 aa, synthetic construct
AWQRGDYTSM

SEQ ID NO: 71688 - protein, 10 aa, synthetic construct
AWDRGDHVNL

SEQ ID NO: 71689 - protein, 10 aa, synthetic construct
AWDRGDYNSL

SEQ ID NO: 71690 - protein, 10 aa, synthetic construct
AWDRGDYSSV

SEQ ID NO: 71691 - protein, 10 aa, synthetic construct
AWDRGDYTSV

SEQ ID NO: 71692 - protein, 10 aa, synthetic construct
AWDRGDYTSM

SEQ ID NO: 71693 - protein, 10 aa, synthetic construct
AWERGDHVNL

SEQ ID NO: 71694 - protein, 10 aa, synthetic construct
ALRRGDLLLS

SEQ ID NO: 71695 - protein, 10 aa, synthetic construct
AWERGDYNSL

SEQ ID NO: 71696 - protein, 10 aa, synthetic construct
AWERGDYSSV

SEQ ID NO: 71697 - protein, 10 aa, synthetic construct
AWERGDYTSV

SEQ ID NO: 71698 - protein, 10 aa, synthetic construct
AWERGDYTSM

SEQ ID NO: 71699 - protein, 10 aa, synthetic construct
AFGRGDHVNL

SEQ ID NO: 71700 - protein, 10 aa, synthetic construct
AFGRGDYNSL

SEQ ID NO: 71701 - protein, 10 aa, synthetic construct
AFGRGDYSSV

SEQ ID NO: 71702 - protein, 10 aa, synthetic construct
AFGRGDYTSV

SEQ ID NO: 71703 - protein, 10 aa, synthetic construct
AFGRGDYTSM

SEQ ID NO: 71704 - protein, 10 aa, synthetic construct
AFARGDHVNL

SEQ ID NO: 71705 - protein, 10 aa, synthetic construct
ALHRGDRGVV

SEQ ID NO: 71706 - protein, 10 aa, synthetic construct
AFARGDYNSL

SEQ ID NO: 71707 - protein, 10 aa, synthetic construct
AFARGDYSSV

SEQ ID NO: 71708 - protein, 10 aa, synthetic construct
AFARGDYTSV

SEQ ID NO: 71709 - protein, 10 aa, synthetic construct
AFARGDYTSM

SEQ ID NO: 71710 - protein, 10 aa, synthetic construct
AFVRGDHVNL

SEQ ID NO: 71711 - protein, 10 aa, synthetic construct
AFVRGDYNSL

SEQ ID NO: 71712 - protein, 10 aa, synthetic construct
AFVRGDYTSM

SEQ ID NO: 71713 - protein, 10 aa, synthetic construct
AFPRGDHVNL

SEQ ID NO: 71714 - protein, 10 aa, synthetic construct
AFPRGDYNSL

SEQ ID NO: 71715 - protein, 10 aa, synthetic construct
AFPRGDYSSV

SEQ ID NO: 71716 - protein, 10 aa, synthetic construct
ALSRGDHGVL

SEQ ID NO: 71717 - protein, 10 aa, synthetic construct
AFPRGDYTSV

SEQ ID NO: 71718 - protein, 10 aa, synthetic construct
AFPRGDYTSM

SEQ ID NO: 71719 - protein, 10 aa, synthetic construct
AFLRGDHVNL

SEQ ID NO: 71720 - protein, 10 aa, synthetic construct
AFLRGDYNSL

SEQ ID NO: 71721 - protein, 10 aa, synthetic construct
AFLRGDYTSM

SEQ ID NO: 71722 - protein, 10 aa, synthetic construct
AFIRGDHGVL

SEQ ID NO: 71723 - protein, 10 aa, synthetic construct
AFIRGDRGQI

SEQ ID NO: 71724 - protein, 10 aa, synthetic construct
AFIRGDRQGI

SEQ ID NO: 71725 - protein, 10 aa, synthetic construct
AFIRGDRSVV

SEQ ID NO: 71726 - protein, 10 aa, synthetic construct
AFIRGDLIGR

SEQ ID NO: 71727 - protein, 10 aa, synthetic construct
ALSRGDRGQI

SEQ ID NO: 71728 - protein, 10 aa, synthetic construct
AFIRGDRSQT

SEQ ID NO: 71729 - protein, 10 aa, synthetic construct
AFMRGDHGVL

SEQ ID NO: 71730 - protein, 10 aa, synthetic construct
AFMRGDHVNL

SEQ ID NO: 71731 - protein, 10 aa, synthetic construct
AFMRGDRDYL

SEQ ID NO: 71732 - protein, 10 aa, synthetic construct
AFMRGDYSSV

SEQ ID NO: 71733 - protein, 10 aa, synthetic construct
AFMRGDLTVT

SEQ ID NO: 71734 - protein, 10 aa, synthetic construct
AFWRGDRDYL

SEQ ID NO: 71735 - protein, 10 aa, synthetic construct
AFWRGDYTSV

SEQ ID NO: 71736 - protein, 10 aa, synthetic construct
AFWRGDLTVT

SEQ ID NO: 71737 - protein, 10 aa, synthetic construct
AFWRGDLIGR

SEQ ID NO: 71738 - protein, 10 aa, synthetic construct
SKNRGDRQGI

SEQ ID NO: 71739 - protein, 10 aa, synthetic construct
QSPRGDLLLS

SEQ ID NO: 71740 - protein, 10 aa, synthetic construct
ALSRGDRQGI

SEQ ID NO: 71741 - protein, 10 aa, synthetic construct
AFFRGDHGVL

SEQ ID NO: 71742 - protein, 10 aa, synthetic construct
AFFRGDRGQI

SEQ ID NO: 71743 - protein, 10 aa, synthetic construct
AFFRGDRQGI

SEQ ID NO: 71744 - protein, 10 aa, synthetic construct
AFFRGDRSVV

SEQ ID NO: 71745 - protein, 10 aa, synthetic construct
AFFRGDLIGR

SEQ ID NO: 71746 - protein, 10 aa, synthetic construct
AFFRGDRSQT

SEQ ID NO: 71747 - protein, 10 aa, synthetic construct
AFKRGDHGVL

SEQ ID NO: 71748 - protein, 10 aa, synthetic construct
AFKRGDRGQI

SEQ ID NO: 71749 - protein, 10 aa, synthetic construct
AFKRGDRQGI

SEQ ID NO: 71750 - protein, 10 aa, synthetic construct
AFKRGDRSVV

SEQ ID NO: 71751 - protein, 10 aa, synthetic construct
ALSRGDRSVV

SEQ ID NO: 71752 - protein, 10 aa, synthetic construct
AFKRGDLIGR

SEQ ID NO: 71753 - protein, 10 aa, synthetic construct
AFKRGDRSQT

SEQ ID NO: 71754 - protein, 10 aa, synthetic construct
AFRRGDHVNL

SEQ ID NO: 71755 - protein, 10 aa, synthetic construct
AFRRGDYNSL

SEQ ID NO: 71756 - protein, 10 aa, synthetic construct
AFRRGDYSSV

SEQ ID NO: 71757 - protein, 10 aa, synthetic construct
AFRRGDYTSV

SEQ ID NO: 71758 - protein, 10 aa, synthetic construct
AFRRGDYTSM

SEQ ID NO: 71759 - protein, 10 aa, synthetic construct
AFHRGDRDYL

SEQ ID NO: 71760 - protein, 10 aa, synthetic construct
AFHRGDYVGL

SEQ ID NO: 71761 - protein, 10 aa, synthetic construct
AFHRGDYSSV

SEQ ID NO: 71762 - protein, 10 aa, synthetic construct
ALSRGDLTVT

SEQ ID NO: 71763 - protein, 10 aa, synthetic construct
AFHRGDYTSV

SEQ ID NO: 71764 - protein, 10 aa, synthetic construct
AFHRGDQSTL

SEQ ID NO: 71765 - protein, 10 aa, synthetic construct
AFSRGDHVNL

SEQ ID NO: 71766 - protein, 10 aa, synthetic construct
AFSRGDYNSL

SEQ ID NO: 71767 - protein, 10 aa, synthetic construct
AFSRGDYTSM

SEQ ID NO: 71768 - protein, 10 aa, synthetic construct
AFTRGDRDYL

SEQ ID NO: 71769 - protein, 10 aa, synthetic construct
AFTRGDYVGL

SEQ ID NO: 71770 - protein, 10 aa, synthetic construct
AFTRGDYSSV

SEQ ID NO: 71771 - protein, 10 aa, synthetic construct
AFTRGDYTSV

SEQ ID NO: 71772 - protein, 10 aa, synthetic construct
AFTRGDQSTL

SEQ ID NO: 71773 - protein, 10 aa, synthetic construct
ALSRGDLIGR

SEQ ID NO: 71774 - protein, 10 aa, synthetic construct
AFYRGDHGVL

SEQ ID NO: 71775 - protein, 10 aa, synthetic construct
AFYRGDRGQI

SEQ ID NO: 71776 - protein, 10 aa, synthetic construct
AFYRGDRQGI

SEQ ID NO: 71777 - protein, 10 aa, synthetic construct
AFYRGDRSVV

SEQ ID NO: 71778 - protein, 10 aa, synthetic construct
AFYRGDLIGR

SEQ ID NO: 71779 - protein, 10 aa, synthetic construct
AFYRGDRSQT

SEQ ID NO: 71780 - protein, 10 aa, synthetic construct
AFNRGDHGVL

SEQ ID NO: 71781 - protein, 10 aa, synthetic construct
AFNRGDRGQI

SEQ ID NO: 71782 - protein, 10 aa, synthetic construct
AFNRGDRQGI

SEQ ID NO: 71783 - protein, 10 aa, synthetic construct
AFNRGDRSVV

SEQ ID NO: 71784 - protein, 10 aa, synthetic construct
ALSRGDRSQT

SEQ ID NO: 71785 - protein, 10 aa, synthetic construct
AFNRGDLIGR

SEQ ID NO: 71786 - protein, 10 aa, synthetic construct
AFNRGDRSQT

SEQ ID NO: 71787 - protein, 10 aa, synthetic construct
AFQRGDRDYL

SEQ ID NO: 71788 - protein, 10 aa, synthetic construct
AFQRGDYVGL

SEQ ID NO: 71789 - protein, 10 aa, synthetic construct
AFQRGDYSSV

SEQ ID NO: 71790 - protein, 10 aa, synthetic construct
AFQRGDYTSV

SEQ ID NO: 71791 - protein, 10 aa, synthetic construct
AFQRGDQSTL

SEQ ID NO: 71792 - protein, 10 aa, synthetic construct
AFDRGDRDYL

SEQ ID NO: 71793 - protein, 10 aa, synthetic construct
AFDRGDYVGL

SEQ ID NO: 71794 - protein, 10 aa, synthetic construct
AFDRGDYSSV

SEQ ID NO: 71795 - protein, 10 aa, synthetic construct
ALSRGDLLLS

SEQ ID NO: 71796 - protein, 10 aa, synthetic construct
AFDRGDYTSV

SEQ ID NO: 71797 - protein, 10 aa, synthetic construct
AFDRGDQSTL

SEQ ID NO: 71798 - protein, 10 aa, synthetic construct
AFERGDRDYL

SEQ ID NO: 71799 - protein, 10 aa, synthetic construct
AFERGDYVGL

SEQ ID NO: 71800 - protein, 10 aa, synthetic construct
AFERGDYSSV

SEQ ID NO: 71801 - protein, 10 aa, synthetic construct
AFERGDYTSV

SEQ ID NO: 71802 - protein, 10 aa, synthetic construct
AFERGDQSTL

SEQ ID NO: 71803 - protein, 10 aa, synthetic construct
AKGRGDHVNL

SEQ ID NO: 71804 - protein, 10 aa, synthetic construct
AKGRGDYNSL

SEQ ID NO: 71805 - protein, 10 aa, synthetic construct
AKGRGDYSSV

SEQ ID NO: 71806 - protein, 10 aa, synthetic construct
ALTRGDRGVV

SEQ ID NO: 71807 - protein, 10 aa, synthetic construct
AKGRGDYTSV

SEQ ID NO: 71808 - protein, 10 aa, synthetic construct
AKGRGDYTSM

SEQ ID NO: 71809 - protein, 10 aa, synthetic construct
AKARGDHVNL

SEQ ID NO: 71810 - protein, 10 aa, synthetic construct
AKARGDYNSL

SEQ ID NO: 71811 - protein, 10 aa, synthetic construct
AKARGDYSSV

SEQ ID NO: 71812 - protein, 10 aa, synthetic construct
AKARGDYTSV

SEQ ID NO: 71813 - protein, 10 aa, synthetic construct
AKARGDYTSM

SEQ ID NO: 71814 - protein, 10 aa, synthetic construct
AKVRGDHVNL

SEQ ID NO: 71815 - protein, 10 aa, synthetic construct
AKVRGDYNSL

SEQ ID NO: 71816 - protein, 10 aa, synthetic construct
AKVRGDYTSM

SEQ ID NO: 71817 - protein, 10 aa, synthetic construct
ALQRGDRGVV

SEQ ID NO: 71818 - protein, 10 aa, synthetic construct
AKPRGDHVNL

SEQ ID NO: 71819 - protein, 10 aa, synthetic construct
AKPRGDYNSL

SEQ ID NO: 71820 - protein, 10 aa, synthetic construct
AKPRGDYSSV

SEQ ID NO: 71821 - protein, 10 aa, synthetic construct
AKPRGDYTSV

SEQ ID NO: 71822 - protein, 10 aa, synthetic construct
AKPRGDYTSM

SEQ ID NO: 71823 - protein, 10 aa, synthetic construct
AKLRGDHVNL

SEQ ID NO: 71824 - protein, 10 aa, synthetic construct
AKLRGDYNSL

SEQ ID NO: 71825 - protein, 10 aa, synthetic construct
AKLRGDYTSM

SEQ ID NO: 71826 - protein, 10 aa, synthetic construct
AKIRGDHGVL

SEQ ID NO: 71827 - protein, 10 aa, synthetic construct
AKIRGDRGQI

SEQ ID NO: 71828 - protein, 10 aa, synthetic construct
ALDRGDRGVV

SEQ ID NO: 71829 - protein, 10 aa, synthetic construct
AKIRGDRQGI

SEQ ID NO: 71830 - protein, 10 aa, synthetic construct
AKIRGDRSVV

SEQ ID NO: 71831 - protein, 10 aa, synthetic construct
AKIRGDLIGR

SEQ ID NO: 71832 - protein, 10 aa, synthetic construct
AKIRGDRSQT

SEQ ID NO: 71833 - protein, 10 aa, synthetic construct
AKMRGDHGVL

SEQ ID NO: 71834 - protein, 10 aa, synthetic construct
AKMRGDHVNL

SEQ ID NO: 71835 - protein, 10 aa, synthetic construct
AKMRGDRDYL

SEQ ID NO: 71836 - protein, 10 aa, synthetic construct
AKMRGDYSSV

SEQ ID NO: 71837 - protein, 10 aa, synthetic construct
AKMRGDLTVT

SEQ ID NO: 71838 - protein, 10 aa, synthetic construct
AKWRGDRDYL

SEQ ID NO: 71839 - protein, 10 aa, synthetic construct
ALERGDRGVV

SEQ ID NO: 71840 - protein, 10 aa, synthetic construct
AKWRGDYTSV

SEQ ID NO: 71841 - protein, 10 aa, synthetic construct
AKWRGDLTVT

SEQ ID NO: 71842 - protein, 10 aa, synthetic construct
AKWRGDLIGR

SEQ ID NO: 71843 - protein, 10 aa, synthetic construct
AKFRGDHGVL

SEQ ID NO: 71844 - protein, 10 aa, synthetic construct
AKFRGDRGQI

SEQ ID NO: 71845 - protein, 10 aa, synthetic construct
AKFRGDRQGI

SEQ ID NO: 71846 - protein, 10 aa, synthetic construct
AKFRGDRSVV

SEQ ID NO: 71847 - protein, 10 aa, synthetic construct
AKFRGDLIGR

SEQ ID NO: 71848 - protein, 10 aa, synthetic construct
AKFRGDRSQT

SEQ ID NO: 71849 - protein, 10 aa, synthetic construct
AKKRGDHGVL

SEQ ID NO: 71850 - protein, 10 aa, synthetic construct
SSPRGDHVNL

SEQ ID NO: 71851 - protein, 10 aa, synthetic construct
AIGRGDRGVV

SEQ ID NO: 71852 - protein, 10 aa, synthetic construct
AKKRGDRGQI

SEQ ID NO: 71853 - protein, 10 aa, synthetic construct
AKKRGDRQGI

SEQ ID NO: 71854 - protein, 10 aa, synthetic construct
AKKRGDRSVV

SEQ ID NO: 71855 - protein, 10 aa, synthetic construct
AKKRGDLIGR

SEQ ID NO: 71856 - protein, 10 aa, synthetic construct
AKKRGDRSQT

SEQ ID NO: 71857 - protein, 10 aa, synthetic construct
AKRRGDHVNL

SEQ ID NO: 71858 - protein, 10 aa, synthetic construct
AKRRGDYNSL

SEQ ID NO: 71859 - protein, 10 aa, synthetic construct
AKRRGDYSSV

SEQ ID NO: 71860 - protein, 10 aa, synthetic construct
AKRRGDYTSV

SEQ ID NO: 71861 - protein, 10 aa, synthetic construct
AKRRGDYTSM

SEQ ID NO: 71862 - protein, 10 aa, synthetic construct
AIARGDRGVV

SEQ ID NO: 71863 - protein, 10 aa, synthetic construct
AKHRGDRDYL

SEQ ID NO: 71864 - protein, 10 aa, synthetic construct
AKHRGDYVGL

SEQ ID NO: 71865 - protein, 10 aa, synthetic construct
AKHRGDYSSV

SEQ ID NO: 71866 - protein, 10 aa, synthetic construct
AKHRGDYTSV

SEQ ID NO: 71867 - protein, 10 aa, synthetic construct
AKHRGDQSTL

SEQ ID NO: 71868 - protein, 10 aa, synthetic construct
AKSRGDHVNL

SEQ ID NO: 71869 - protein, 10 aa, synthetic construct
AKSRGDYNSL

SEQ ID NO: 71870 - protein, 10 aa, synthetic construct
AKSRGDYTSM

SEQ ID NO: 71871 - protein, 10 aa, synthetic construct
AKTRGDRDYL

SEQ ID NO: 71872 - protein, 10 aa, synthetic construct
AKTRGDYVGL

SEQ ID NO: 71873 - protein, 10 aa, synthetic construct
AIVRGDRGVV

SEQ ID NO: 71874 - protein, 10 aa, synthetic construct
AKTRGDYSSV

SEQ ID NO: 71875 - protein, 10 aa, synthetic construct
AKTRGDYTSV

SEQ ID NO: 71876 - protein, 10 aa, synthetic construct
AKTRGDQSTL

SEQ ID NO: 71877 - protein, 10 aa, synthetic construct
AKYRGDHGVL

SEQ ID NO: 71878 - protein, 10 aa, synthetic construct
AKYRGDRGQI

SEQ ID NO: 71879 - protein, 10 aa, synthetic construct
AKYRGDRQGI

SEQ ID NO: 71880 - protein, 10 aa, synthetic construct
AKYRGDRSVV

SEQ ID NO: 71881 - protein, 10 aa, synthetic construct
AKYRGDLIGR

SEQ ID NO: 71882 - protein, 10 aa, synthetic construct
AKYRGDRSQT

SEQ ID NO: 71883 - protein, 10 aa, synthetic construct
AKNRGDHGVL

SEQ ID NO: 71884 - protein, 10 aa, synthetic construct
AIPRGDRGVV

SEQ ID NO: 71885 - protein, 10 aa, synthetic construct
AKNRGDRGQI

SEQ ID NO: 71886 - protein, 10 aa, synthetic construct
AKNRGDRQGI

SEQ ID NO: 71887 - protein, 10 aa, synthetic construct
AKNRGDRSVV

SEQ ID NO: 71888 - protein, 10 aa, synthetic construct
AKNRGDLIGR

SEQ ID NO: 71889 - protein, 10 aa, synthetic construct
AKNRGDRSQT

SEQ ID NO: 71890 - protein, 10 aa, synthetic construct
AKQRGDRDYL

SEQ ID NO: 71891 - protein, 10 aa, synthetic construct
AKQRGDYVGL

SEQ ID NO: 71892 - protein, 10 aa, synthetic construct
AKQRGDYSSV

SEQ ID NO: 71893 - protein, 10 aa, synthetic construct
AKQRGDYTSV

SEQ ID NO: 71894 - protein, 10 aa, synthetic construct
AKQRGDQSTL

SEQ ID NO: 71895 - protein, 10 aa, synthetic construct
AILRGDRGVV

SEQ ID NO: 71896 - protein, 10 aa, synthetic construct
AKDRGDRDYL

SEQ ID NO: 71897 - protein, 10 aa, synthetic construct
AKDRGDYVGL

SEQ ID NO: 71898 - protein, 10 aa, synthetic construct
AKDRGDYSSV

SEQ ID NO: 71899 - protein, 10 aa, synthetic construct
AKDRGDYTSV

SEQ ID NO: 71900 - protein, 10 aa, synthetic construct
AKDRGDQSTL

SEQ ID NO: 71901 - protein, 10 aa, synthetic construct
AKERGDRDYL

SEQ ID NO: 71902 - protein, 10 aa, synthetic construct
AKERGDYVGL

SEQ ID NO: 71903 - protein, 10 aa, synthetic construct
AKERGDYSSV

SEQ ID NO: 71904 - protein, 10 aa, synthetic construct
AKERGDYTSV

SEQ ID NO: 71905 - protein, 10 aa, synthetic construct
AKERGDQSTL

SEQ ID NO: 71906 - protein, 10 aa, synthetic construct
AIRRGDRGVV

SEQ ID NO: 71907 - protein, 10 aa, synthetic construct
ARGRGDFNNT

SEQ ID NO: 71908 - protein, 10 aa, synthetic construct
ARGRGDFNNL

SEQ ID NO: 71909 - protein, 10 aa, synthetic construct
ARARGDFNNT

SEQ ID NO: 71910 - protein, 10 aa, synthetic construct
ARARGDFNNL

SEQ ID NO: 71911 - protein, 10 aa, synthetic construct
ARVRGDFNNT

SEQ ID NO: 71912 - protein, 10 aa, synthetic construct
ARVRGDFNNL

SEQ ID NO: 71913 - protein, 10 aa, synthetic construct
ARPRGDFNNT

SEQ ID NO: 71914 - protein, 10 aa, synthetic construct
ARPRGDFNNL

SEQ ID NO: 71915 - protein, 10 aa, synthetic construct
ARLRGDFNNT

SEQ ID NO: 71916 - protein, 10 aa, synthetic construct
ARLRGDFNNL

SEQ ID NO: 71917 - protein, 10 aa, synthetic construct
AISRGDRGVV

SEQ ID NO: 71918 - protein, 10 aa, synthetic construct
ARIRGDHVNL

SEQ ID NO: 71919 - protein, 10 aa, synthetic construct
ARIRGDYNSL

SEQ ID NO: 71920 - protein, 10 aa, synthetic construct
ARIRGDYSSV

SEQ ID NO: 71921 - protein, 10 aa, synthetic construct
ARIRGDYTSV

SEQ ID NO: 71922 - protein, 10 aa, synthetic construct
ARIRGDYTSM

SEQ ID NO: 71923 - protein, 10 aa, synthetic construct
ARMRGDYNSL

SEQ ID NO: 71924 - protein, 10 aa, synthetic construct
ARMRGDYTSV

SEQ ID NO: 71925 - protein, 10 aa, synthetic construct
ARMRGDYTSM

SEQ ID NO: 71926 - protein, 10 aa, synthetic construct
ARMRGDFQNT

SEQ ID NO: 71927 - protein, 10 aa, synthetic construct
ARWRGDYNSL

SEQ ID NO: 71928 - protein, 10 aa, synthetic construct
AMGRGDRGVV

SEQ ID NO: 71929 - protein, 10 aa, synthetic construct
ARWRGDFNNT

SEQ ID NO: 71930 - protein, 10 aa, synthetic construct
ARWRGDFNNL

SEQ ID NO: 71931 - protein, 10 aa, synthetic construct
ARWRGDFQNT

SEQ ID NO: 71932 - protein, 10 aa, synthetic construct
ARFRGDHVNL

SEQ ID NO: 71933 - protein, 10 aa, synthetic construct
ARFRGDYNSL

SEQ ID NO: 71934 - protein, 10 aa, synthetic construct
ARFRGDYSSV

SEQ ID NO: 71935 - protein, 10 aa, synthetic construct
ARFRGDYTSV

SEQ ID NO: 71936 - protein, 10 aa, synthetic construct
ARFRGDYTSM

SEQ ID NO: 71937 - protein, 10 aa, synthetic construct
ARKRGDHVNL

SEQ ID NO: 71938 - protein, 10 aa, synthetic construct
ARKRGDYNSL

SEQ ID NO: 71939 - protein, 10 aa, synthetic construct
AMARGDRGVV

SEQ ID NO: 71940 - protein, 10 aa, synthetic construct
ARKRGDYSSV

SEQ ID NO: 71941 - protein, 10 aa, synthetic construct
ARKRGDYTSV

SEQ ID NO: 71942 - protein, 10 aa, synthetic construct
ARKRGDYTSM

SEQ ID NO: 71943 - protein, 10 aa, synthetic construct
ARRRGDFNNT

SEQ ID NO: 71944 - protein, 10 aa, synthetic construct
ARRRGDFNNL

SEQ ID NO: 71945 - protein, 10 aa, synthetic construct
ARHRGDYNSL

SEQ ID NO: 71946 - protein, 10 aa, synthetic construct
ARHRGDFQNT

SEQ ID NO: 71947 - protein, 10 aa, synthetic construct
ARSRGDFNNT

SEQ ID NO: 71948 - protein, 10 aa, synthetic construct
ARSRGDFNNL

SEQ ID NO: 71949 - protein, 10 aa, synthetic construct
ARTRGDYNSL

SEQ ID NO: 71950 - protein, 10 aa, synthetic construct
AMVRGDRGVV

SEQ ID NO: 71951 - protein, 10 aa, synthetic construct
ARTRGDFQNT

SEQ ID NO: 71952 - protein, 10 aa, synthetic construct
ARYRGDHVNL

SEQ ID NO: 71953 - protein, 10 aa, synthetic construct
ARYRGDYNSL

SEQ ID NO: 71954 - protein, 10 aa, synthetic construct
ARYRGDYSSV

SEQ ID NO: 71955 - protein, 10 aa, synthetic construct
ARYRGDYTSV

SEQ ID NO: 71956 - protein, 10 aa, synthetic construct
ARYRGDYTSM

SEQ ID NO: 71957 - protein, 10 aa, synthetic construct
ARNRGDHVNL

SEQ ID NO: 71958 - protein, 10 aa, synthetic construct
ARNRGDYNSL

SEQ ID NO: 71959 - protein, 10 aa, synthetic construct
ARNRGDYSSV

SEQ ID NO: 71960 - protein, 10 aa, synthetic construct
ARNRGDYTSV

SEQ ID NO: 71961 - protein, 10 aa, synthetic construct
SSPRGDRDYL

SEQ ID NO: 71962 - protein, 10 aa, synthetic construct
AMPRGDRGVV

SEQ ID NO: 71963 - protein, 10 aa, synthetic construct
ARNRGDYTSM

SEQ ID NO: 71964 - protein, 10 aa, synthetic construct
ARQRGDYNSL

SEQ ID NO: 71965 - protein, 10 aa, synthetic construct
ARQRGDFQNT

SEQ ID NO: 71966 - protein, 10 aa, synthetic construct
ARDRGDYNSL

SEQ ID NO: 71967 - protein, 10 aa, synthetic construct
ARDRGDFQNT

SEQ ID NO: 71968 - protein, 10 aa, synthetic construct
ARERGDYNSL

SEQ ID NO: 71969 - protein, 10 aa, synthetic construct
ARERGDFQNT

SEQ ID NO: 71970 - protein, 10 aa, synthetic construct
AHGRGDYNSL

SEQ ID NO: 71971 - protein, 10 aa, synthetic construct
AHGRGDFQNT

SEQ ID NO: 71972 - protein, 10 aa, synthetic construct
AHARGDYNSL

SEQ ID NO: 71973 - protein, 10 aa, synthetic construct
AMLRGDRGVV

SEQ ID NO: 71974 - protein, 10 aa, synthetic construct
AHARGDFQNT

SEQ ID NO: 71975 - protein, 10 aa, synthetic construct
AHVRGDFQNT

SEQ ID NO: 71976 - protein, 10 aa, synthetic construct
AHPRGDYNSL

SEQ ID NO: 71977 - protein, 10 aa, synthetic construct
AHPRGDFQNT

SEQ ID NO: 71978 - protein, 10 aa, synthetic construct
AHLRGDFQNT

SEQ ID NO: 71979 - protein, 10 aa, synthetic construct
AHIRGDRDYL

SEQ ID NO: 71980 - protein, 10 aa, synthetic construct
AHIRGDYVGL

SEQ ID NO: 71981 - protein, 10 aa, synthetic construct
AHIRGDYSSV

SEQ ID NO: 71982 - protein, 10 aa, synthetic construct
AHIRGDYTSV

SEQ ID NO: 71983 - protein, 10 aa, synthetic construct
AHIRGDQSTL

SEQ ID NO: 71984 - protein, 10 aa, synthetic construct
AMRRGDRGVV

SEQ ID NO: 71985 - protein, 10 aa, synthetic construct
AHMRGDRDYL

SEQ ID NO: 71986 - protein, 10 aa, synthetic construct
AHMRGDYTSV

SEQ ID NO: 71987 - protein, 10 aa, synthetic construct
AHMRGDLTVT

SEQ ID NO: 71988 - protein, 10 aa, synthetic construct
AHMRGDLIGR

SEQ ID NO: 71989 - protein, 10 aa, synthetic construct
AHWRGDYNSL

SEQ ID NO: 71990 - protein, 10 aa, synthetic construct
AHWRGDYTSV

SEQ ID NO: 71991 - protein, 10 aa, synthetic construct
AHWRGDYTSM

SEQ ID NO: 71992 - protein, 10 aa, synthetic construct
AHWRGDFQNT

SEQ ID NO: 71993 - protein, 10 aa, synthetic construct
AHFRGDRDYL

SEQ ID NO: 71994 - protein, 10 aa, synthetic construct
AHFRGDYVGL

SEQ ID NO: 71995 - protein, 10 aa, synthetic construct
AMSRGDRGVV

SEQ ID NO: 71996 - protein, 10 aa, synthetic construct
AHFRGDYSSV

SEQ ID NO: 71997 - protein, 10 aa, synthetic construct
AHFRGDYTSV

SEQ ID NO: 71998 - protein, 10 aa, synthetic construct
AHFRGDQSTL

SEQ ID NO: 71999 - protein, 10 aa, synthetic construct
AHKRGDRDYL

SEQ ID NO: 72000 - protein, 10 aa, synthetic construct
AHKRGDYVGL

SEQ ID NO: 72001 - protein, 10 aa, synthetic construct
AHKRGDYSSV

SEQ ID NO: 72002 - protein, 10 aa, synthetic construct
AHKRGDYTSV

SEQ ID NO: 72003 - protein, 10 aa, synthetic construct
AHKRGDQSTL

SEQ ID NO: 72004 - protein, 10 aa, synthetic construct
AHRRGDYNSL

SEQ ID NO: 72005 - protein, 10 aa, synthetic construct
AHRRGDFQNT

SEQ ID NO: 72006 - protein, 10 aa, synthetic construct
AWGRGDHGVL

SEQ ID NO: 72007 - protein, 10 aa, synthetic construct
AHHRGDHVNL

SEQ ID NO: 72008 - protein, 10 aa, synthetic construct
AHHRGDYNSL

SEQ ID NO: 72009 - protein, 10 aa, synthetic construct
AHHRGDYSSV

SEQ ID NO: 72010 - protein, 10 aa, synthetic construct
AHHRGDYTSV

SEQ ID NO: 72011 - protein, 10 aa, synthetic construct
AHHRGDYTSM

SEQ ID NO: 72012 - protein, 10 aa, synthetic construct
AHSRGDFQNT

SEQ ID NO: 72013 - protein, 10 aa, synthetic construct
AHTRGDHVNL

SEQ ID NO: 72014 - protein, 10 aa, synthetic construct
AHTRGDYNSL

SEQ ID NO: 72015 - protein, 10 aa, synthetic construct
AHTRGDYSSV

SEQ ID NO: 72016 - protein, 10 aa, synthetic construct
AHTRGDYTSV

SEQ ID NO: 72017 - protein, 10 aa, synthetic construct
AWGRGDRGQI

SEQ ID NO: 72018 - protein, 10 aa, synthetic construct
AHTRGDYTSM

SEQ ID NO: 72019 - protein, 10 aa, synthetic construct
AHYRGDRDYL

SEQ ID NO: 72020 - protein, 10 aa, synthetic construct
AHYRGDYVGL

SEQ ID NO: 72021 - protein, 10 aa, synthetic construct
AHYRGDYSSV

SEQ ID NO: 72022 - protein, 10 aa, synthetic construct
AHYRGDYTSV

SEQ ID NO: 72023 - protein, 10 aa, synthetic construct
AHYRGDQSTL

SEQ ID NO: 72024 - protein, 10 aa, synthetic construct
AHNRGDRDYL

SEQ ID NO: 72025 - protein, 10 aa, synthetic construct
AHNRGDYVGL

SEQ ID NO: 72026 - protein, 10 aa, synthetic construct
AHNRGDYSSV

SEQ ID NO: 72027 - protein, 10 aa, synthetic construct
AHNRGDYTSV

SEQ ID NO: 72028 - protein, 10 aa, synthetic construct
AWGRGDRQGI

SEQ ID NO: 72029 - protein, 10 aa, synthetic construct
AHNRGDQSTL

SEQ ID NO: 72030 - protein, 10 aa, synthetic construct
AHQRGDHVNL

SEQ ID NO: 72031 - protein, 10 aa, synthetic construct
AHQRGDYNSL

SEQ ID NO: 72032 - protein, 10 aa, synthetic construct
AHQRGDYSSV

SEQ ID NO: 72033 - protein, 10 aa, synthetic construct
AHQRGDYTSV

SEQ ID NO: 72034 - protein, 10 aa, synthetic construct
AHQRGDYTSM

SEQ ID NO: 72035 - protein, 10 aa, synthetic construct
AHDRGDHVNL

SEQ ID NO: 72036 - protein, 10 aa, synthetic construct
AHDRGDYNSL

SEQ ID NO: 72037 - protein, 10 aa, synthetic construct
AHDRGDYSSV

SEQ ID NO: 72038 - protein, 10 aa, synthetic construct
AHDRGDYTSV

SEQ ID NO: 72039 - protein, 10 aa, synthetic construct
AWGRGDRSVV

SEQ ID NO: 72040 - protein, 10 aa, synthetic construct
AHDRGDYTSM

SEQ ID NO: 72041 - protein, 10 aa, synthetic construct
AHERGDHVNL

SEQ ID NO: 72042 - protein, 10 aa, synthetic construct
AHERGDYNSL

SEQ ID NO: 72043 - protein, 10 aa, synthetic construct
AHERGDYSSV

SEQ ID NO: 72044 - protein, 10 aa, synthetic construct
AHERGDYTSV

SEQ ID NO: 72045 - protein, 10 aa, synthetic construct
AHERGDYTSM

SEQ ID NO: 72046 - protein, 10 aa, synthetic construct
ASGRGDYNSL

SEQ ID NO: 72047 - protein, 10 aa, synthetic construct
ASGRGDFQNT

SEQ ID NO: 72048 - protein, 10 aa, synthetic construct
ASARGDYNSL

SEQ ID NO: 72049 - protein, 10 aa, synthetic construct
ASARGDFQNT

SEQ ID NO: 72050 - protein, 10 aa, synthetic construct
AWGRGDLTVT

SEQ ID NO: 72051 - protein, 10 aa, synthetic construct
ASVRGDFQNT

SEQ ID NO: 72052 - protein, 10 aa, synthetic construct
ASPRGDYNSL

SEQ ID NO: 72053 - protein, 10 aa, synthetic construct
ASPRGDFQNT

SEQ ID NO: 72054 - protein, 10 aa, synthetic construct
ASLRGDFQNT

SEQ ID NO: 72055 - protein, 10 aa, synthetic construct
ASIRGDRDYL

SEQ ID NO: 72056 - protein, 10 aa, synthetic construct
ASIRGDYVGL

SEQ ID NO: 72057 - protein, 10 aa, synthetic construct
ASIRGDYSSV

SEQ ID NO: 72058 - protein, 10 aa, synthetic construct
ASIRGDYTSV

SEQ ID NO: 72059 - protein, 10 aa, synthetic construct
ASIRGDQSTL

SEQ ID NO: 72060 - protein, 10 aa, synthetic construct
ASMRGDRDYL

SEQ ID NO: 72061 - protein, 10 aa, synthetic construct
AWGRGDLIGR

SEQ ID NO: 72062 - protein, 10 aa, synthetic construct
ASMRGDYTSV

SEQ ID NO: 72063 - protein, 10 aa, synthetic construct
ASMRGDLTVT

SEQ ID NO: 72064 - protein, 10 aa, synthetic construct
ASMRGDLIGR

SEQ ID NO: 72065 - protein, 10 aa, synthetic construct
ASWRGDYNSL

SEQ ID NO: 72066 - protein, 10 aa, synthetic construct
ASWRGDYTSV

SEQ ID NO: 72067 - protein, 10 aa, synthetic construct
ASWRGDYTSM

SEQ ID NO: 72068 - protein, 10 aa, synthetic construct
ASWRGDFQNT

SEQ ID NO: 72069 - protein, 10 aa, synthetic construct
ASFRGDRDYL

SEQ ID NO: 72070 - protein, 10 aa, synthetic construct
ASFRGDYVGL

SEQ ID NO: 72071 - protein, 10 aa, synthetic construct
ASFRGDYSSV

SEQ ID NO: 72072 - protein, 10 aa, synthetic construct
SSPRGDYSSV

SEQ ID NO: 72073 - protein, 10 aa, synthetic construct
AWGRGDRSQT

SEQ ID NO: 72074 - protein, 10 aa, synthetic construct
ASFRGDYTSV

SEQ ID NO: 72075 - protein, 10 aa, synthetic construct
ASFRGDQSTL

SEQ ID NO: 72076 - protein, 10 aa, synthetic construct
ASKRGDRDYL

SEQ ID NO: 72077 - protein, 10 aa, synthetic construct
ASKRGDYVGL

SEQ ID NO: 72078 - protein, 10 aa, synthetic construct
ASKRGDYSSV

SEQ ID NO: 72079 - protein, 10 aa, synthetic construct
ASKRGDYTSV

SEQ ID NO: 72080 - protein, 10 aa, synthetic construct
ASKRGDQSTL

SEQ ID NO: 72081 - protein, 10 aa, synthetic construct
ASRRGDYNSL

SEQ ID NO: 72082 - protein, 10 aa, synthetic construct
ASRRGDFQNT

SEQ ID NO: 72083 - protein, 10 aa, synthetic construct
ASHRGDHVNL

SEQ ID NO: 72084 - protein, 10 aa, synthetic construct
AWGRGDLLLS

SEQ ID NO: 72085 - protein, 10 aa, synthetic construct
ASHRGDYNSL

SEQ ID NO: 72086 - protein, 10 aa, synthetic construct
ASHRGDYSSV

SEQ ID NO: 72087 - protein, 10 aa, synthetic construct
ASHRGDYTSV

SEQ ID NO: 72088 - protein, 10 aa, synthetic construct
ASHRGDYTSM

SEQ ID NO: 72089 - protein, 10 aa, synthetic construct
ASSRGDFQNT

SEQ ID NO: 72090 - protein, 10 aa, synthetic construct
ASTRGDHVNL

SEQ ID NO: 72091 - protein, 10 aa, synthetic construct
ASTRGDYNSL

SEQ ID NO: 72092 - protein, 10 aa, synthetic construct
ASTRGDYSSV

SEQ ID NO: 72093 - protein, 10 aa, synthetic construct
ASTRGDYTSV

SEQ ID NO: 72094 - protein, 10 aa, synthetic construct
ASTRGDYTSM

SEQ ID NO: 72095 - protein, 10 aa, synthetic construct
AWARGDHGVL

SEQ ID NO: 72096 - protein, 10 aa, synthetic construct
ASYRGDRDYL

SEQ ID NO: 72097 - protein, 10 aa, synthetic construct
ASYRGDYVGL

SEQ ID NO: 72098 - protein, 10 aa, synthetic construct
ASYRGDYSSV

SEQ ID NO: 72099 - protein, 10 aa, synthetic construct
ASYRGDYTSV

SEQ ID NO: 72100 - protein, 10 aa, synthetic construct
ASYRGDQSTL

SEQ ID NO: 72101 - protein, 10 aa, synthetic construct
ASNRGDRDYL

SEQ ID NO: 72102 - protein, 10 aa, synthetic construct
ASNRGDYVGL

SEQ ID NO: 72103 - protein, 10 aa, synthetic construct
ASNRGDYSSV

SEQ ID NO: 72104 - protein, 10 aa, synthetic construct
ASNRGDYTSV

SEQ ID NO: 72105 - protein, 10 aa, synthetic construct
ASNRGDQSTL

SEQ ID NO: 72106 - protein, 10 aa, synthetic construct
AWARGDRGQI

SEQ ID NO: 72107 - protein, 10 aa, synthetic construct
ASQRGDHVNL

SEQ ID NO: 72108 - protein, 10 aa, synthetic construct
ASQRGDYNSL

SEQ ID NO: 72109 - protein, 10 aa, synthetic construct
ASQRGDYSSV

SEQ ID NO: 72110 - protein, 10 aa, synthetic construct
ASQRGDYTSV

SEQ ID NO: 72111 - protein, 10 aa, synthetic construct
ASQRGDYTSM

SEQ ID NO: 72112 - protein, 10 aa, synthetic construct
ASDRGDHVNL

SEQ ID NO: 72113 - protein, 10 aa, synthetic construct
ASDRGDYNSL

SEQ ID NO: 72114 - protein, 10 aa, synthetic construct
ASDRGDYSSV

SEQ ID NO: 72115 - protein, 10 aa, synthetic construct
ASDRGDYTSV

SEQ ID NO: 72116 - protein, 10 aa, synthetic construct
ASDRGDYTSM

SEQ ID NO: 72117 - protein, 10 aa, synthetic construct
AWARGDRQGI

SEQ ID NO: 72118 - protein, 10 aa, synthetic construct
ASERGDHVNL

SEQ ID NO: 72119 - protein, 10 aa, synthetic construct
ASERGDYNSL

SEQ ID NO: 72120 - protein, 10 aa, synthetic construct
ASERGDYSSV

SEQ ID NO: 72121 - protein, 10 aa, synthetic construct
ASERGDYTSV

SEQ ID NO: 72122 - protein, 10 aa, synthetic construct
ASERGDYTSM

SEQ ID NO: 72123 - protein, 10 aa, synthetic construct
ATGRGDYNSL

SEQ ID NO: 72124 - protein, 10 aa, synthetic construct
ATGRGDFQNT

SEQ ID NO: 72125 - protein, 10 aa, synthetic construct
ATARGDYNSL

SEQ ID NO: 72126 - protein, 10 aa, synthetic construct
ATARGDFQNT

SEQ ID NO: 72127 - protein, 10 aa, synthetic construct
ATVRGDFQNT

SEQ ID NO: 72128 - protein, 10 aa, synthetic construct
AWARGDRSVV

SEQ ID NO: 72129 - protein, 10 aa, synthetic construct
ATPRGDYNSL

SEQ ID NO: 72130 - protein, 10 aa, synthetic construct
ATPRGDFQNT

SEQ ID NO: 72131 - protein, 10 aa, synthetic construct
ATLRGDFQNT

SEQ ID NO: 72132 - protein, 10 aa, synthetic construct
ATIRGDRDYL

SEQ ID NO: 72133 - protein, 10 aa, synthetic construct
ATIRGDYVGL

SEQ ID NO: 72134 - protein, 10 aa, synthetic construct
ATIRGDYSSV

SEQ ID NO: 72135 - protein, 10 aa, synthetic construct
ATIRGDYTSV

SEQ ID NO: 72136 - protein, 10 aa, synthetic construct
ATIRGDQSTL

SEQ ID NO: 72137 - protein, 10 aa, synthetic construct
ATMRGDRDYL

SEQ ID NO: 72138 - protein, 10 aa, synthetic construct
ATMRGDYTSV

SEQ ID NO: 72139 - protein, 10 aa, synthetic construct
AWARGDLTVT

SEQ ID NO: 72140 - protein, 10 aa, synthetic construct
ATMRGDLTVT

SEQ ID NO: 72141 - protein, 10 aa, synthetic construct
ATMRGDLIGR

SEQ ID NO: 72142 - protein, 10 aa, synthetic construct
ATWRGDYNSL

SEQ ID NO: 72143 - protein, 10 aa, synthetic construct
ATWRGDYTSV

SEQ ID NO: 72144 - protein, 10 aa, synthetic construct
ATWRGDYTSM

SEQ ID NO: 72145 - protein, 10 aa, synthetic construct
ATWRGDFQNT

SEQ ID NO: 72146 - protein, 10 aa, synthetic construct
ATFRGDRDYL

SEQ ID NO: 72147 - protein, 10 aa, synthetic construct
ATFRGDYVGL

SEQ ID NO: 72148 - protein, 10 aa, synthetic construct
ATFRGDYSSV

SEQ ID NO: 72149 - protein, 10 aa, synthetic construct
ATFRGDYTSV

SEQ ID NO: 72150 - protein, 10 aa, synthetic construct
AWARGDLIGR

SEQ ID NO: 72151 - protein, 10 aa, synthetic construct
ATFRGDQSTL

SEQ ID NO: 72152 - protein, 10 aa, synthetic construct
ATKRGDRDYL

SEQ ID NO: 72153 - protein, 10 aa, synthetic construct
ATKRGDYVGL

SEQ ID NO: 72154 - protein, 10 aa, synthetic construct
ATKRGDYSSV

SEQ ID NO: 72155 - protein, 10 aa, synthetic construct
ATKRGDYTSV

SEQ ID NO: 72156 - protein, 10 aa, synthetic construct
ATKRGDQSTL

SEQ ID NO: 72157 - protein, 10 aa, synthetic construct
ATRRGDYNSL

SEQ ID NO: 72158 - protein, 10 aa, synthetic construct
ATRRGDFQNT

SEQ ID NO: 72159 - protein, 10 aa, synthetic construct
ATHRGDHVNL

SEQ ID NO: 72160 - protein, 10 aa, synthetic construct
ATHRGDYNSL

SEQ ID NO: 72161 - protein, 10 aa, synthetic construct
AWARGDRSQT

SEQ ID NO: 72162 - protein, 10 aa, synthetic construct
ATHRGDYSSV

SEQ ID NO: 72163 - protein, 10 aa, synthetic construct
ATHRGDYTSV

SEQ ID NO: 72164 - protein, 10 aa, synthetic construct
ATHRGDYTSM

SEQ ID NO: 72165 - protein, 10 aa, synthetic construct
ATSRGDFQNT

SEQ ID NO: 72166 - protein, 10 aa, synthetic construct
ATTRGDHVNL

SEQ ID NO: 72167 - protein, 10 aa, synthetic construct
ATTRGDYNSL

SEQ ID NO: 72168 - protein, 10 aa, synthetic construct
ATTRGDYSSV

SEQ ID NO: 72169 - protein, 10 aa, synthetic construct
ATTRGDYTSV

SEQ ID NO: 72170 - protein, 10 aa, synthetic construct
ATTRGDYTSM

SEQ ID NO: 72171 - protein, 10 aa, synthetic construct
ATYRGDRDYL

SEQ ID NO: 72172 - protein, 10 aa, synthetic construct
AWARGDLLLS

SEQ ID NO: 72173 - protein, 10 aa, synthetic construct
ATYRGDYVGL

SEQ ID NO: 72174 - protein, 10 aa, synthetic construct
ATYRGDYSSV

SEQ ID NO: 72175 - protein, 10 aa, synthetic construct
ATYRGDYTSV

SEQ ID NO: 72176 - protein, 10 aa, synthetic construct
ATYRGDQSTL

SEQ ID NO: 72177 - protein, 10 aa, synthetic construct
ATNRGDRDYL

SEQ ID NO: 72178 - protein, 10 aa, synthetic construct
ATNRGDYVGL

SEQ ID NO: 72179 - protein, 10 aa, synthetic construct
ATNRGDYSSV

SEQ ID NO: 72180 - protein, 10 aa, synthetic construct
ATNRGDYTSV

SEQ ID NO: 72181 - protein, 10 aa, synthetic construct
ATNRGDQSTL

SEQ ID NO: 72182 - protein, 10 aa, synthetic construct
ATQRGDHVNL

SEQ ID NO: 72183 - protein, 10 aa, synthetic construct
SSPRGDLTVT

SEQ ID NO: 72184 - protein, 10 aa, synthetic construct
AWVRGDHGVL

SEQ ID NO: 72185 - protein, 10 aa, synthetic construct
ATQRGDYNSL

SEQ ID NO: 72186 - protein, 10 aa, synthetic construct
ATQRGDYSSV

SEQ ID NO: 72187 - protein, 10 aa, synthetic construct
ATQRGDYTSV

SEQ ID NO: 72188 - protein, 10 aa, synthetic construct
ATQRGDYTSM

SEQ ID NO: 72189 - protein, 10 aa, synthetic construct
ATDRGDHVNL

SEQ ID NO: 72190 - protein, 10 aa, synthetic construct
ATDRGDYNSL

SEQ ID NO: 72191 - protein, 10 aa, synthetic construct
ATDRGDYSSV

SEQ ID NO: 72192 - protein, 10 aa, synthetic construct
ATDRGDYTSV

SEQ ID NO: 72193 - protein, 10 aa, synthetic construct
ATDRGDYTSM

SEQ ID NO: 72194 - protein, 10 aa, synthetic construct
ATERGDHVNL

SEQ ID NO: 72195 - protein, 10 aa, synthetic construct
AWVRGDRGQI

SEQ ID NO: 72196 - protein, 10 aa, synthetic construct
ATERGDYNSL

SEQ ID NO: 72197 - protein, 10 aa, synthetic construct
ATERGDYSSV

SEQ ID NO: 72198 - protein, 10 aa, synthetic construct
ATERGDYTSV

SEQ ID NO: 72199 - protein, 10 aa, synthetic construct
ATERGDYTSM

SEQ ID NO: 72200 - protein, 10 aa, synthetic construct
AYGRGDHVNL

SEQ ID NO: 72201 - protein, 10 aa, synthetic construct
AYGRGDYNSL

SEQ ID NO: 72202 - protein, 10 aa, synthetic construct
AYGRGDYSSV

SEQ ID NO: 72203 - protein, 10 aa, synthetic construct
AYGRGDYTSV

SEQ ID NO: 72204 - protein, 10 aa, synthetic construct
AYGRGDYTSM

SEQ ID NO: 72205 - protein, 10 aa, synthetic construct
AYARGDHVNL

SEQ ID NO: 72206 - protein, 10 aa, synthetic construct
AWVRGDRQGI

SEQ ID NO: 72207 - protein, 10 aa, synthetic construct
AYARGDYNSL

SEQ ID NO: 72208 - protein, 10 aa, synthetic construct
AYARGDYSSV

SEQ ID NO: 72209 - protein, 10 aa, synthetic construct
AYARGDYTSV

SEQ ID NO: 72210 - protein, 10 aa, synthetic construct
AYARGDYTSM

SEQ ID NO: 72211 - protein, 10 aa, synthetic construct
AYVRGDHVNL

SEQ ID NO: 72212 - protein, 10 aa, synthetic construct
AYVRGDYNSL

SEQ ID NO: 72213 - protein, 10 aa, synthetic construct
AYVRGDYTSM

SEQ ID NO: 72214 - protein, 10 aa, synthetic construct
AYPRGDHVNL

SEQ ID NO: 72215 - protein, 10 aa, synthetic construct
AYPRGDYNSL

SEQ ID NO: 72216 - protein, 10 aa, synthetic construct
AYPRGDYSSV

SEQ ID NO: 72217 - protein, 10 aa, synthetic construct
AWVRGDRSVV

SEQ ID NO: 72218 - protein, 10 aa, synthetic construct
AYPRGDYTSV

SEQ ID NO: 72219 - protein, 10 aa, synthetic construct
AYPRGDYTSM

SEQ ID NO: 72220 - protein, 10 aa, synthetic construct
AYLRGDHVNL

SEQ ID NO: 72221 - protein, 10 aa, synthetic construct
AYLRGDYNSL

SEQ ID NO: 72222 - protein, 10 aa, synthetic construct
AYLRGDYTSM

SEQ ID NO: 72223 - protein, 10 aa, synthetic construct
AYIRGDHGVL

SEQ ID NO: 72224 - protein, 10 aa, synthetic construct
AYIRGDRGQI

SEQ ID NO: 72225 - protein, 10 aa, synthetic construct
AYIRGDRQGI

SEQ ID NO: 72226 - protein, 10 aa, synthetic construct
AYIRGDRSVV

SEQ ID NO: 72227 - protein, 10 aa, synthetic construct
AYIRGDLIGR

SEQ ID NO: 72228 - protein, 10 aa, synthetic construct
AWVRGDLTVT

SEQ ID NO: 72229 - protein, 10 aa, synthetic construct
AYIRGDRSQT

SEQ ID NO: 72230 - protein, 10 aa, synthetic construct
AYMRGDHGVL

SEQ ID NO: 72231 - protein, 10 aa, synthetic construct
AYMRGDHVNL

SEQ ID NO: 72232 - protein, 10 aa, synthetic construct
AYMRGDRDYL

SEQ ID NO: 72233 - protein, 10 aa, synthetic construct
AYMRGDYSSV

SEQ ID NO: 72234 - protein, 10 aa, synthetic construct
AYMRGDLTVT

SEQ ID NO: 72235 - protein, 10 aa, synthetic construct
AYWRGDRDYL

SEQ ID NO: 72236 - protein, 10 aa, synthetic construct
AYWRGDYTSV

SEQ ID NO: 72237 - protein, 10 aa, synthetic construct
AYWRGDLTVT

SEQ ID NO: 72238 - protein, 10 aa, synthetic construct
AYWRGDLIGR

SEQ ID NO: 72239 - protein, 10 aa, synthetic construct
AWVRGDLIGR

SEQ ID NO: 72240 - protein, 10 aa, synthetic construct
AYFRGDHGVL

SEQ ID NO: 72241 - protein, 10 aa, synthetic construct
AYFRGDRGQI

SEQ ID NO: 72242 - protein, 10 aa, synthetic construct
AYFRGDRQGI

SEQ ID NO: 72243 - protein, 10 aa, synthetic construct
AYFRGDRSVV

SEQ ID NO: 72244 - protein, 10 aa, synthetic construct
AYFRGDLIGR

SEQ ID NO: 72245 - protein, 10 aa, synthetic construct
AYFRGDRSQT

SEQ ID NO: 72246 - protein, 10 aa, synthetic construct
AYKRGDHGVL

SEQ ID NO: 72247 - protein, 10 aa, synthetic construct
AYKRGDRGQI

SEQ ID NO: 72248 - protein, 10 aa, synthetic construct
AYKRGDRQGI

SEQ ID NO: 72249 - protein, 10 aa, synthetic construct
AYKRGDRSVV

SEQ ID NO: 72250 - protein, 10 aa, synthetic construct
AWVRGDRSQT

SEQ ID NO: 72251 - protein, 10 aa, synthetic construct
AYKRGDLIGR

SEQ ID NO: 72252 - protein, 10 aa, synthetic construct
AYKRGDRSQT

SEQ ID NO: 72253 - protein, 10 aa, synthetic construct
AYRRGDHVNL

SEQ ID NO: 72254 - protein, 10 aa, synthetic construct
AYRRGDYNSL

SEQ ID NO: 72255 - protein, 10 aa, synthetic construct
AYRRGDYSSV

SEQ ID NO: 72256 - protein, 10 aa, synthetic construct
AYRRGDYTSV

SEQ ID NO: 72257 - protein, 10 aa, synthetic construct
AYRRGDYTSM

SEQ ID NO: 72258 - protein, 10 aa, synthetic construct
AYHRGDRDYL

SEQ ID NO: 72259 - protein, 10 aa, synthetic construct
AYHRGDYVGL

SEQ ID NO: 72260 - protein, 10 aa, synthetic construct
AYHRGDYSSV

SEQ ID NO: 72261 - protein, 10 aa, synthetic construct
AWVRGDLLLS

SEQ ID NO: 72262 - protein, 10 aa, synthetic construct
AYHRGDYTSV

SEQ ID NO: 72263 - protein, 10 aa, synthetic construct
AYHRGDQSTL

SEQ ID NO: 72264 - protein, 10 aa, synthetic construct
AYSRGDHVNL

SEQ ID NO: 72265 - protein, 10 aa, synthetic construct
AYSRGDYNSL

SEQ ID NO: 72266 - protein, 10 aa, synthetic construct
AYSRGDYTSM

SEQ ID NO: 72267 - protein, 10 aa, synthetic construct
AYTRGDRDYL

SEQ ID NO: 72268 - protein, 10 aa, synthetic construct
AYTRGDYVGL

SEQ ID NO: 72269 - protein, 10 aa, synthetic construct
AYTRGDYSSV

SEQ ID NO: 72270 - protein, 10 aa, synthetic construct
AYTRGDYTSV

SEQ ID NO: 72271 - protein, 10 aa, synthetic construct
AYTRGDQSTL

SEQ ID NO: 72272 - protein, 10 aa, synthetic construct
AWPRGDHGVL

SEQ ID NO: 72273 - protein, 10 aa, synthetic construct
AYYRGDHGVL

SEQ ID NO: 72274 - protein, 10 aa, synthetic construct
AYYRGDRGQI

SEQ ID NO: 72275 - protein, 10 aa, synthetic construct
AYYRGDRQGI

SEQ ID NO: 72276 - protein, 10 aa, synthetic construct
AYYRGDRSVV

SEQ ID NO: 72277 - protein, 10 aa, synthetic construct
AYYRGDLIGR

SEQ ID NO: 72278 - protein, 10 aa, synthetic construct
AYYRGDRSQT

SEQ ID NO: 72279 - protein, 10 aa, synthetic construct
AYNRGDHGVL

SEQ ID NO: 72280 - protein, 10 aa, synthetic construct
AYNRGDRGQI

SEQ ID NO: 72281 - protein, 10 aa, synthetic construct
AYNRGDRQGI

SEQ ID NO: 72282 - protein, 10 aa, synthetic construct
AYNRGDRSVV

SEQ ID NO: 72283 - protein, 10 aa, synthetic construct
AWPRGDRGQI

SEQ ID NO: 72284 - protein, 10 aa, synthetic construct
AYNRGDLIGR

SEQ ID NO: 72285 - protein, 10 aa, synthetic construct
AYNRGDRSQT

SEQ ID NO: 72286 - protein, 10 aa, synthetic construct
AYQRGDRDYL

SEQ ID NO: 72287 - protein, 10 aa, synthetic construct
AYQRGDYVGL

SEQ ID NO: 72288 - protein, 10 aa, synthetic construct
AYQRGDYSSV

SEQ ID NO: 72289 - protein, 10 aa, synthetic construct
AYQRGDYTSV

SEQ ID NO: 72290 - protein, 10 aa, synthetic construct
AYQRGDQSTL

SEQ ID NO: 72291 - protein, 10 aa, synthetic construct
AYDRGDRDYL

SEQ ID NO: 72292 - protein, 10 aa, synthetic construct
AYDRGDYVGL

SEQ ID NO: 72293 - protein, 10 aa, synthetic construct
AYDRGDYSSV

SEQ ID NO: 72294 - protein, 10 aa, synthetic construct
SSPRGDLIGR

SEQ ID NO: 72295 - protein, 10 aa, synthetic construct
AWPRGDRQGI

SEQ ID NO: 72296 - protein, 10 aa, synthetic construct
AYDRGDYTSV

SEQ ID NO: 72297 - protein, 10 aa, synthetic construct
AYDRGDQSTL

SEQ ID NO: 72298 - protein, 10 aa, synthetic construct
AYERGDRDYL

SEQ ID NO: 72299 - protein, 10 aa, synthetic construct
AYERGDYVGL

SEQ ID NO: 72300 - protein, 10 aa, synthetic construct
AYERGDYSSV

SEQ ID NO: 72301 - protein, 10 aa, synthetic construct
AYERGDYTSV

SEQ ID NO: 72302 - protein, 10 aa, synthetic construct
AYERGDQSTL

SEQ ID NO: 72303 - protein, 10 aa, synthetic construct
ANGRGDHVNL

SEQ ID NO: 72304 - protein, 10 aa, synthetic construct
ANGRGDYNSL

SEQ ID NO: 72305 - protein, 10 aa, synthetic construct
ANGRGDYSSV

SEQ ID NO: 72306 - protein, 10 aa, synthetic construct
AWPRGDRSVV

SEQ ID NO: 72307 - protein, 10 aa, synthetic construct
ANGRGDYTSV

SEQ ID NO: 72308 - protein, 10 aa, synthetic construct
ANGRGDYTSM

SEQ ID NO: 72309 - protein, 10 aa, synthetic construct
ANARGDHVNL

SEQ ID NO: 72310 - protein, 10 aa, synthetic construct
ANARGDYNSL

SEQ ID NO: 72311 - protein, 10 aa, synthetic construct
ANARGDYSSV

SEQ ID NO: 72312 - protein, 10 aa, synthetic construct
ANARGDYTSV

SEQ ID NO: 72313 - protein, 10 aa, synthetic construct
ANARGDYTSM

SEQ ID NO: 72314 - protein, 10 aa, synthetic construct
ANVRGDHVNL

SEQ ID NO: 72315 - protein, 10 aa, synthetic construct
ANVRGDYNSL

SEQ ID NO: 72316 - protein, 10 aa, synthetic construct
ANVRGDYTSM

SEQ ID NO: 72317 - protein, 10 aa, synthetic construct
AWPRGDLTVT

SEQ ID NO: 72318 - protein, 10 aa, synthetic construct
ANPRGDHVNL

SEQ ID NO: 72319 - protein, 10 aa, synthetic construct
ANPRGDYNSL

SEQ ID NO: 72320 - protein, 10 aa, synthetic construct
ANPRGDYSSV

SEQ ID NO: 72321 - protein, 10 aa, synthetic construct
ANPRGDYTSV

SEQ ID NO: 72322 - protein, 10 aa, synthetic construct
ANPRGDYTSM

SEQ ID NO: 72323 - protein, 10 aa, synthetic construct
ANLRGDHVNL

SEQ ID NO: 72324 - protein, 10 aa, synthetic construct
ANLRGDYNSL

SEQ ID NO: 72325 - protein, 10 aa, synthetic construct
ANLRGDYTSM

SEQ ID NO: 72326 - protein, 10 aa, synthetic construct
ANIRGDHGVL

SEQ ID NO: 72327 - protein, 10 aa, synthetic construct
ANIRGDRGQI

SEQ ID NO: 72328 - protein, 10 aa, synthetic construct
AWPRGDLIGR

SEQ ID NO: 72329 - protein, 10 aa, synthetic construct
ANIRGDRQGI

SEQ ID NO: 72330 - protein, 10 aa, synthetic construct
ANIRGDRSVV

SEQ ID NO: 72331 - protein, 10 aa, synthetic construct
ANIRGDLIGR

SEQ ID NO: 72332 - protein, 10 aa, synthetic construct
ANIRGDRSQT

SEQ ID NO: 72333 - protein, 10 aa, synthetic construct
ANMRGDHGVL

SEQ ID NO: 72334 - protein, 10 aa, synthetic construct
ANMRGDHVNL

SEQ ID NO: 72335 - protein, 10 aa, synthetic construct
ANMRGDRDYL

SEQ ID NO: 72336 - protein, 10 aa, synthetic construct
ANMRGDYSSV

SEQ ID NO: 72337 - protein, 10 aa, synthetic construct
ANMRGDLTVT

SEQ ID NO: 72338 - protein, 10 aa, synthetic construct
ANWRGDRDYL

SEQ ID NO: 72339 - protein, 10 aa, synthetic construct
AWPRGDRSQT

SEQ ID NO: 72340 - protein, 10 aa, synthetic construct
ANWRGDYTSV

SEQ ID NO: 72341 - protein, 10 aa, synthetic construct
ANWRGDLTVT

SEQ ID NO: 72342 - protein, 10 aa, synthetic construct
ANWRGDLIGR

SEQ ID NO: 72343 - protein, 10 aa, synthetic construct
ANFRGDHGVL

SEQ ID NO: 72344 - protein, 10 aa, synthetic construct
ANFRGDRGQI

SEQ ID NO: 72345 - protein, 10 aa, synthetic construct
ANFRGDRQGI

SEQ ID NO: 72346 - protein, 10 aa, synthetic construct
ANFRGDRSVV

SEQ ID NO: 72347 - protein, 10 aa, synthetic construct
ANFRGDLIGR

SEQ ID NO: 72348 - protein, 10 aa, synthetic construct
ANFRGDRSQT

SEQ ID NO: 72349 - protein, 10 aa, synthetic construct
ANKRGDHGVL

SEQ ID NO: 72350 - protein, 10 aa, synthetic construct
AWPRGDLLLS

SEQ ID NO: 72351 - protein, 10 aa, synthetic construct
ANKRGDRGQI

SEQ ID NO: 72352 - protein, 10 aa, synthetic construct
ANKRGDRQGI

SEQ ID NO: 72353 - protein, 10 aa, synthetic construct
ANKRGDRSVV

SEQ ID NO: 72354 - protein, 10 aa, synthetic construct
ANKRGDLIGR

SEQ ID NO: 72355 - protein, 10 aa, synthetic construct
ANKRGDRSQT

SEQ ID NO: 72356 - protein, 10 aa, synthetic construct
ANRRGDHVNL

SEQ ID NO: 72357 - protein, 10 aa, synthetic construct
ANRRGDYNSL

SEQ ID NO: 72358 - protein, 10 aa, synthetic construct
ANRRGDYSSV

SEQ ID NO: 72359 - protein, 10 aa, synthetic construct
ANRRGDYTSV

SEQ ID NO: 72360 - protein, 10 aa, synthetic construct
ANRRGDYTSM

SEQ ID NO: 72361 - protein, 10 aa, synthetic construct
AWLRGDHGVL

SEQ ID NO: 72362 - protein, 10 aa, synthetic construct
ANHRGDRDYL

SEQ ID NO: 72363 - protein, 10 aa, synthetic construct
ANHRGDYVGL

SEQ ID NO: 72364 - protein, 10 aa, synthetic construct
ANHRGDYSSV

SEQ ID NO: 72365 - protein, 10 aa, synthetic construct
ANHRGDYTSV

SEQ ID NO: 72366 - protein, 10 aa, synthetic construct
ANHRGDQSTL

SEQ ID NO: 72367 - protein, 10 aa, synthetic construct
ANSRGDHVNL

SEQ ID NO: 72368 - protein, 10 aa, synthetic construct
ANSRGDYNSL

SEQ ID NO: 72369 - protein, 10 aa, synthetic construct
ANSRGDYTSM

SEQ ID NO: 72370 - protein, 10 aa, synthetic construct
ANTRGDRDYL

SEQ ID NO: 72371 - protein, 10 aa, synthetic construct
ANTRGDYVGL

SEQ ID NO: 72372 - protein, 10 aa, synthetic construct
AWLRGDRGQI

SEQ ID NO: 72373 - protein, 10 aa, synthetic construct
ANTRGDYSSV

SEQ ID NO: 72374 - protein, 10 aa, synthetic construct
ANTRGDYTSV

SEQ ID NO: 72375 - protein, 10 aa, synthetic construct
ANTRGDQSTL

SEQ ID NO: 72376 - protein, 10 aa, synthetic construct
ANYRGDHGVL

SEQ ID NO: 72377 - protein, 10 aa, synthetic construct
ANYRGDRGQI

SEQ ID NO: 72378 - protein, 10 aa, synthetic construct
ANYRGDRQGI

SEQ ID NO: 72379 - protein, 10 aa, synthetic construct
ANYRGDRSVV

SEQ ID NO: 72380 - protein, 10 aa, synthetic construct
ANYRGDLIGR

SEQ ID NO: 72381 - protein, 10 aa, synthetic construct
ANYRGDRSQT

SEQ ID NO: 72382 - protein, 10 aa, synthetic construct
ANNRGDHGVL

SEQ ID NO: 72383 - protein, 10 aa, synthetic construct
AWLRGDRQGI

SEQ ID NO: 72384 - protein, 10 aa, synthetic construct
ANNRGDRGQI

SEQ ID NO: 72385 - protein, 10 aa, synthetic construct
ANNRGDRQGI

SEQ ID NO: 72386 - protein, 10 aa, synthetic construct
ANNRGDRSVV

SEQ ID NO: 72387 - protein, 10 aa, synthetic construct
ANNRGDLIGR

SEQ ID NO: 72388 - protein, 10 aa, synthetic construct
ANNRGDRSQT

SEQ ID NO: 72389 - protein, 10 aa, synthetic construct
ANQRGDRDYL

SEQ ID NO: 72390 - protein, 10 aa, synthetic construct
ANQRGDYVGL

SEQ ID NO: 72391 - protein, 10 aa, synthetic construct
ANQRGDYSSV

SEQ ID NO: 72392 - protein, 10 aa, synthetic construct
ANQRGDYTSV

SEQ ID NO: 72393 - protein, 10 aa, synthetic construct
ANQRGDQSTL

SEQ ID NO: 72394 - protein, 10 aa, synthetic construct
AWLRGDRSVV

SEQ ID NO: 72395 - protein, 10 aa, synthetic construct
ANDRGDRDYL

SEQ ID NO: 72396 - protein, 10 aa, synthetic construct
ANDRGDYVGL

SEQ ID NO: 72397 - protein, 10 aa, synthetic construct
ANDRGDYSSV

SEQ ID NO: 72398 - protein, 10 aa, synthetic construct
ANDRGDYTSV

SEQ ID NO: 72399 - protein, 10 aa, synthetic construct
ANDRGDQSTL

SEQ ID NO: 72400 - protein, 10 aa, synthetic construct
ANERGDRDYL

SEQ ID NO: 72401 - protein, 10 aa, synthetic construct
ANERGDYVGL

SEQ ID NO: 72402 - protein, 10 aa, synthetic construct
ANERGDYSSV

SEQ ID NO: 72403 - protein, 10 aa, synthetic construct
ANERGDYTSV

SEQ ID NO: 72404 - protein, 10 aa, synthetic construct
ANERGDQSTL

SEQ ID NO: 72405 - protein, 10 aa, synthetic construct
TSPRGDHVNL

SEQ ID NO: 72406 - protein, 10 aa, synthetic construct
AWLRGDLTVT

SEQ ID NO: 72407 - protein, 10 aa, synthetic construct
AQGRGDYNSL

SEQ ID NO: 72408 - protein, 10 aa, synthetic construct
AQGRGDFQNT

SEQ ID NO: 72409 - protein, 10 aa, synthetic construct
AQARGDYNSL

SEQ ID NO: 72410 - protein, 10 aa, synthetic construct
AQARGDFQNT

SEQ ID NO: 72411 - protein, 10 aa, synthetic construct
AQVRGDFQNT

SEQ ID NO: 72412 - protein, 10 aa, synthetic construct
AQPRGDYNSL

SEQ ID NO: 72413 - protein, 10 aa, synthetic construct
AQPRGDFQNT

SEQ ID NO: 72414 - protein, 10 aa, synthetic construct
AQLRGDFQNT

SEQ ID NO: 72415 - protein, 10 aa, synthetic construct
AQIRGDRDYL

SEQ ID NO: 72416 - protein, 10 aa, synthetic construct
AQIRGDYVGL

SEQ ID NO: 72417 - protein, 10 aa, synthetic construct
AWLRGDLIGR

SEQ ID NO: 72418 - protein, 10 aa, synthetic construct
AQIRGDYSSV

SEQ ID NO: 72419 - protein, 10 aa, synthetic construct
AQIRGDYTSV

SEQ ID NO: 72420 - protein, 10 aa, synthetic construct
AQIRGDQSTL

SEQ ID NO: 72421 - protein, 10 aa, synthetic construct
AQMRGDRDYL

SEQ ID NO: 72422 - protein, 10 aa, synthetic construct
AQMRGDYTSV

SEQ ID NO: 72423 - protein, 10 aa, synthetic construct
AQMRGDLTVT

SEQ ID NO: 72424 - protein, 10 aa, synthetic construct
AQMRGDLIGR

SEQ ID NO: 72425 - protein, 10 aa, synthetic construct
AQWRGDYNSL

SEQ ID NO: 72426 - protein, 10 aa, synthetic construct
AQWRGDYTSV

SEQ ID NO: 72427 - protein, 10 aa, synthetic construct
AQWRGDYTSM

SEQ ID NO: 72428 - protein, 10 aa, synthetic construct
AWLRGDRSQT

SEQ ID NO: 72429 - protein, 10 aa, synthetic construct
AQWRGDFQNT

SEQ ID NO: 72430 - protein, 10 aa, synthetic construct
AQFRGDRDYL

SEQ ID NO: 72431 - protein, 10 aa, synthetic construct
AQFRGDYVGL

SEQ ID NO: 72432 - protein, 10 aa, synthetic construct
AQFRGDYSSV

SEQ ID NO: 72433 - protein, 10 aa, synthetic construct
AQFRGDYTSV

SEQ ID NO: 72434 - protein, 10 aa, synthetic construct
AQFRGDQSTL

SEQ ID NO: 72435 - protein, 10 aa, synthetic construct
AQKRGDRDYL

SEQ ID NO: 72436 - protein, 10 aa, synthetic construct
AQKRGDYVGL

SEQ ID NO: 72437 - protein, 10 aa, synthetic construct
AQKRGDYSSV

SEQ ID NO: 72438 - protein, 10 aa, synthetic construct
AQKRGDYTSV

SEQ ID NO: 72439 - protein, 10 aa, synthetic construct
AWLRGDLLLS

SEQ ID NO: 72440 - protein, 10 aa, synthetic construct
AQKRGDQSTL

SEQ ID NO: 72441 - protein, 10 aa, synthetic construct
AQRRGDYNSL

SEQ ID NO: 72442 - protein, 10 aa, synthetic construct
AQRRGDFQNT

SEQ ID NO: 72443 - protein, 10 aa, synthetic construct
AQHRGDHVNL

SEQ ID NO: 72444 - protein, 10 aa, synthetic construct
AQHRGDYNSL

SEQ ID NO: 72445 - protein, 10 aa, synthetic construct
AQHRGDYSSV

SEQ ID NO: 72446 - protein, 10 aa, synthetic construct
AQHRGDYTSV

SEQ ID NO: 72447 - protein, 10 aa, synthetic construct
AQHRGDYTSM

SEQ ID NO: 72448 - protein, 10 aa, synthetic construct
AQSRGDFQNT

SEQ ID NO: 72449 - protein, 10 aa, synthetic construct
AQTRGDHVNL

SEQ ID NO: 72450 - protein, 10 aa, synthetic construct
AWWRGDRGQI

SEQ ID NO: 72451 - protein, 10 aa, synthetic construct
AQTRGDYNSL

SEQ ID NO: 72452 - protein, 10 aa, synthetic construct
AQTRGDYSSV

SEQ ID NO: 72453 - protein, 10 aa, synthetic construct
AQTRGDYTSV

SEQ ID NO: 72454 - protein, 10 aa, synthetic construct
AQTRGDYTSM

SEQ ID NO: 72455 - protein, 10 aa, synthetic construct
AQYRGDRDYL

SEQ ID NO: 72456 - protein, 10 aa, synthetic construct
AQYRGDYVGL

SEQ ID NO: 72457 - protein, 10 aa, synthetic construct
AQYRGDYSSV

SEQ ID NO: 72458 - protein, 10 aa, synthetic construct
AQYRGDYTSV

SEQ ID NO: 72459 - protein, 10 aa, synthetic construct
AQYRGDQSTL

SEQ ID NO: 72460 - protein, 10 aa, synthetic construct
AQNRGDRDYL

SEQ ID NO: 72461 - protein, 10 aa, synthetic construct
AWWRGDRQGI

SEQ ID NO: 72462 - protein, 10 aa, synthetic construct
AQNRGDYVGL

SEQ ID NO: 72463 - protein, 10 aa, synthetic construct
AQNRGDYSSV

SEQ ID NO: 72464 - protein, 10 aa, synthetic construct
AQNRGDYTSV

SEQ ID NO: 72465 - protein, 10 aa, synthetic construct
AQNRGDQSTL

SEQ ID NO: 72466 - protein, 10 aa, synthetic construct
AQQRGDHVNL

SEQ ID NO: 72467 - protein, 10 aa, synthetic construct
AQQRGDYNSL

SEQ ID NO: 72468 - protein, 10 aa, synthetic construct
AQQRGDYSSV

SEQ ID NO: 72469 - protein, 10 aa, synthetic construct
AQQRGDYTSV

SEQ ID NO: 72470 - protein, 10 aa, synthetic construct
AQQRGDYTSM

SEQ ID NO: 72471 - protein, 10 aa, synthetic construct
AQDRGDHVNL

SEQ ID NO: 72472 - protein, 10 aa, synthetic construct
AWWRGDRSVV

SEQ ID NO: 72473 - protein, 10 aa, synthetic construct
AQDRGDYNSL

SEQ ID NO: 72474 - protein, 10 aa, synthetic construct
AQDRGDYSSV

SEQ ID NO: 72475 - protein, 10 aa, synthetic construct
AQDRGDYTSV

SEQ ID NO: 72476 - protein, 10 aa, synthetic construct
AQDRGDYTSM

SEQ ID NO: 72477 - protein, 10 aa, synthetic construct
AQERGDHVNL

SEQ ID NO: 72478 - protein, 10 aa, synthetic construct
AQERGDYNSL

SEQ ID NO: 72479 - protein, 10 aa, synthetic construct
AQERGDYSSV

SEQ ID NO: 72480 - protein, 10 aa, synthetic construct
AQERGDYTSV

SEQ ID NO: 72481 - protein, 10 aa, synthetic construct
AQERGDYTSM

SEQ ID NO: 72482 - protein, 10 aa, synthetic construct
ADGRGDYNSL

SEQ ID NO: 72483 - protein, 10 aa, synthetic construct
AWWRGDRGVV

SEQ ID NO: 72484 - protein, 10 aa, synthetic construct
ADGRGDFQNT

SEQ ID NO: 72485 - protein, 10 aa, synthetic construct
ADARGDYNSL

SEQ ID NO: 72486 - protein, 10 aa, synthetic construct
ADARGDFQNT

SEQ ID NO: 72487 - protein, 10 aa, synthetic construct
ADVRGDFQNT

SEQ ID NO: 72488 - protein, 10 aa, synthetic construct
ADPRGDYNSL

SEQ ID NO: 72489 - protein, 10 aa, synthetic construct
ADPRGDFQNT

SEQ ID NO: 72490 - protein, 10 aa, synthetic construct
ADLRGDFQNT

SEQ ID NO: 72491 - protein, 10 aa, synthetic construct
ADIRGDRDYL

SEQ ID NO: 72492 - protein, 10 aa, synthetic construct
ADIRGDYVGL

SEQ ID NO: 72493 - protein, 10 aa, synthetic construct
ADIRGDYSSV

SEQ ID NO: 72494 - protein, 10 aa, synthetic construct
AWWRGDRSQT

SEQ ID NO: 72495 - protein, 10 aa, synthetic construct
ADIRGDYTSV

SEQ ID NO: 72496 - protein, 10 aa, synthetic construct
ADIRGDQSTL

SEQ ID NO: 72497 - protein, 10 aa, synthetic construct
ADMRGDRDYL

SEQ ID NO: 72498 - protein, 10 aa, synthetic construct
ADMRGDYTSV

SEQ ID NO: 72499 - protein, 10 aa, synthetic construct
ADMRGDLTVT

SEQ ID NO: 72500 - protein, 10 aa, synthetic construct
ADMRGDLIGR

SEQ ID NO: 72501 - protein, 10 aa, synthetic construct
ADWRGDYNSL

SEQ ID NO: 72502 - protein, 10 aa, synthetic construct
ADWRGDYTSV

SEQ ID NO: 72503 - protein, 10 aa, synthetic construct
ADWRGDYTSM

SEQ ID NO: 72504 - protein, 10 aa, synthetic construct
ADWRGDFQNT

SEQ ID NO: 72505 - protein, 10 aa, synthetic construct
AWRRGDHGVL

SEQ ID NO: 72506 - protein, 10 aa, synthetic construct
ADFRGDRDYL

SEQ ID NO: 72507 - protein, 10 aa, synthetic construct
ADFRGDYVGL

SEQ ID NO: 72508 - protein, 10 aa, synthetic construct
ADFRGDYSSV

SEQ ID NO: 72509 - protein, 10 aa, synthetic construct
ADFRGDYTSV

SEQ ID NO: 72510 - protein, 10 aa, synthetic construct
ADFRGDQSTL

SEQ ID NO: 72511 - protein, 10 aa, synthetic construct
ADKRGDRDYL

SEQ ID NO: 72512 - protein, 10 aa, synthetic construct
ADKRGDYVGL

SEQ ID NO: 72513 - protein, 10 aa, synthetic construct
ADKRGDYSSV

SEQ ID NO: 72514 - protein, 10 aa, synthetic construct
ADKRGDYTSV

SEQ ID NO: 72515 - protein, 10 aa, synthetic construct
ADKRGDQSTL

SEQ ID NO: 72516 - protein, 10 aa, synthetic construct
TSPRGDRDYL

SEQ ID NO: 72517 - protein, 10 aa, synthetic construct
AWRRGDRGQI

SEQ ID NO: 72518 - protein, 10 aa, synthetic construct
ADRRGDYNSL

SEQ ID NO: 72519 - protein, 10 aa, synthetic construct
ADRRGDFQNT

SEQ ID NO: 72520 - protein, 10 aa, synthetic construct
ADHRGDHVNL

SEQ ID NO: 72521 - protein, 10 aa, synthetic construct
ADHRGDYNSL

SEQ ID NO: 72522 - protein, 10 aa, synthetic construct
ADHRGDYSSV

SEQ ID NO: 72523 - protein, 10 aa, synthetic construct
ADHRGDYTSV

SEQ ID NO: 72524 - protein, 10 aa, synthetic construct
ADHRGDYTSM

SEQ ID NO: 72525 - protein, 10 aa, synthetic construct
ADSRGDFQNT

SEQ ID NO: 72526 - protein, 10 aa, synthetic construct
ADTRGDHVNL

SEQ ID NO: 72527 - protein, 10 aa, synthetic construct
ADTRGDYNSL

SEQ ID NO: 72528 - protein, 10 aa, synthetic construct
AWRRGDRQGI

SEQ ID NO: 72529 - protein, 10 aa, synthetic construct
ADTRGDYSSV

SEQ ID NO: 72530 - protein, 10 aa, synthetic construct
ADTRGDYTSV

SEQ ID NO: 72531 - protein, 10 aa, synthetic construct
ADTRGDYTSM

SEQ ID NO: 72532 - protein, 10 aa, synthetic construct
ADYRGDRDYL

SEQ ID NO: 72533 - protein, 10 aa, synthetic construct
ADYRGDYVGL

SEQ ID NO: 72534 - protein, 10 aa, synthetic construct
ADYRGDYSSV

SEQ ID NO: 72535 - protein, 10 aa, synthetic construct
ADYRGDYTSV

SEQ ID NO: 72536 - protein, 10 aa, synthetic construct
ADYRGDQSTL

SEQ ID NO: 72537 - protein, 10 aa, synthetic construct
ADNRGDRDYL

SEQ ID NO: 72538 - protein, 10 aa, synthetic construct
ADNRGDYVGL

SEQ ID NO: 72539 - protein, 10 aa, synthetic construct
AWRRGDRSVV

SEQ ID NO: 72540 - protein, 10 aa, synthetic construct
ADNRGDYSSV

SEQ ID NO: 72541 - protein, 10 aa, synthetic construct
ADNRGDYTSV

SEQ ID NO: 72542 - protein, 10 aa, synthetic construct
ADNRGDQSTL

SEQ ID NO: 72543 - protein, 10 aa, synthetic construct
ADQRGDHVNL

SEQ ID NO: 72544 - protein, 10 aa, synthetic construct
ADQRGDYNSL

SEQ ID NO: 72545 - protein, 10 aa, synthetic construct
ADQRGDYSSV

SEQ ID NO: 72546 - protein, 10 aa, synthetic construct
ADQRGDYTSV

SEQ ID NO: 72547 - protein, 10 aa, synthetic construct
ADQRGDYTSM

SEQ ID NO: 72548 - protein, 10 aa, synthetic construct
ADDRGDHVNL

SEQ ID NO: 72549 - protein, 10 aa, synthetic construct
ADDRGDYNSL

SEQ ID NO: 72550 - protein, 10 aa, synthetic construct
AWRRGDLTVT

SEQ ID NO: 72551 - protein, 10 aa, synthetic construct
ADDRGDYSSV

SEQ ID NO: 72552 - protein, 10 aa, synthetic construct
ADDRGDYTSV

SEQ ID NO: 72553 - protein, 10 aa, synthetic construct
ADDRGDYTSM

SEQ ID NO: 72554 - protein, 10 aa, synthetic construct
ADERGDHVNL

SEQ ID NO: 72555 - protein, 10 aa, synthetic construct
ADERGDYNSL

SEQ ID NO: 72556 - protein, 10 aa, synthetic construct
ADERGDYSSV

SEQ ID NO: 72557 - protein, 10 aa, synthetic construct
ADERGDYTSV

SEQ ID NO: 72558 - protein, 10 aa, synthetic construct
ADERGDYTSM

SEQ ID NO: 72559 - protein, 10 aa, synthetic construct
AEGRGDYNSL

SEQ ID NO: 72560 - protein, 10 aa, synthetic construct
AEGRGDFQNT

SEQ ID NO: 72561 - protein, 10 aa, synthetic construct
AWRRGDLIGR

SEQ ID NO: 72562 - protein, 10 aa, synthetic construct
AEARGDYNSL

SEQ ID NO: 72563 - protein, 10 aa, synthetic construct
AEARGDFQNT

SEQ ID NO: 72564 - protein, 10 aa, synthetic construct
AEVRGDFQNT

SEQ ID NO: 72565 - protein, 10 aa, synthetic construct
AEPRGDYNSL

SEQ ID NO: 72566 - protein, 10 aa, synthetic construct
AEPRGDFQNT

SEQ ID NO: 72567 - protein, 10 aa, synthetic construct
AELRGDFQNT

SEQ ID NO: 72568 - protein, 10 aa, synthetic construct
AEIRGDRDYL

SEQ ID NO: 72569 - protein, 10 aa, synthetic construct
AEIRGDYVGL

SEQ ID NO: 72570 - protein, 10 aa, synthetic construct
AEIRGDYSSV

SEQ ID NO: 72571 - protein, 10 aa, synthetic construct
AEIRGDYTSV

SEQ ID NO: 72572 - protein, 10 aa, synthetic construct
AWRRGDRSQT

SEQ ID NO: 72573 - protein, 10 aa, synthetic construct
AEIRGDQSTL

SEQ ID NO: 72574 - protein, 10 aa, synthetic construct
AEMRGDRDYL

SEQ ID NO: 72575 - protein, 10 aa, synthetic construct
AEMRGDYTSV

SEQ ID NO: 72576 - protein, 10 aa, synthetic construct
AEMRGDLTVT

SEQ ID NO: 72577 - protein, 10 aa, synthetic construct
AEMRGDLIGR

SEQ ID NO: 72578 - protein, 10 aa, synthetic construct
AEWRGDYNSL

SEQ ID NO: 72579 - protein, 10 aa, synthetic construct
AEWRGDYTSV

SEQ ID NO: 72580 - protein, 10 aa, synthetic construct
AEWRGDYTSM

SEQ ID NO: 72581 - protein, 10 aa, synthetic construct
AEWRGDFQNT

SEQ ID NO: 72582 - protein, 10 aa, synthetic construct
AEFRGDRDYL

SEQ ID NO: 72583 - protein, 10 aa, synthetic construct
AWRRGDLLLS

SEQ ID NO: 72584 - protein, 10 aa, synthetic construct
AEFRGDYVGL

SEQ ID NO: 72585 - protein, 10 aa, synthetic construct
AEFRGDYSSV

SEQ ID NO: 72586 - protein, 10 aa, synthetic construct
AEFRGDYTSV

SEQ ID NO: 72587 - protein, 10 aa, synthetic construct
AEFRGDQSTL

SEQ ID NO: 72588 - protein, 10 aa, synthetic construct
AEKRGDRDYL

SEQ ID NO: 72589 - protein, 10 aa, synthetic construct
AEKRGDYVGL

SEQ ID NO: 72590 - protein, 10 aa, synthetic construct
AEKRGDYSSV

SEQ ID NO: 72591 - protein, 10 aa, synthetic construct
AEKRGDYTSV

SEQ ID NO: 72592 - protein, 10 aa, synthetic construct
AEKRGDQSTL

SEQ ID NO: 72593 - protein, 10 aa, synthetic construct
AERRGDYNSL

SEQ ID NO: 72594 - protein, 10 aa, synthetic construct
AWHRGDRGVV

SEQ ID NO: 72595 - protein, 10 aa, synthetic construct
AERRGDFQNT

SEQ ID NO: 72596 - protein, 10 aa, synthetic construct
AEHRGDHVNL

SEQ ID NO: 72597 - protein, 10 aa, synthetic construct
AEHRGDYNSL

SEQ ID NO: 72598 - protein, 10 aa, synthetic construct
AEHRGDYSSV

SEQ ID NO: 72599 - protein, 10 aa, synthetic construct
AEHRGDYTSV

SEQ ID NO: 72600 - protein, 10 aa, synthetic construct
AEHRGDYTSM

SEQ ID NO: 72601 - protein, 10 aa, synthetic construct
AESRGDFQNT

SEQ ID NO: 72602 - protein, 10 aa, synthetic construct
AETRGDHVNL

SEQ ID NO: 72603 - protein, 10 aa, synthetic construct
AETRGDYNSL

SEQ ID NO: 72604 - protein, 10 aa, synthetic construct
AETRGDYSSV

SEQ ID NO: 72605 - protein, 10 aa, synthetic construct
AWSRGDHGVL

SEQ ID NO: 72606 - protein, 10 aa, synthetic construct
AETRGDYTSV

SEQ ID NO: 72607 - protein, 10 aa, synthetic construct
AETRGDYTSM

SEQ ID NO: 72608 - protein, 10 aa, synthetic construct
AEYRGDRDYL

SEQ ID NO: 72609 - protein, 10 aa, synthetic construct
AEYRGDYVGL

SEQ ID NO: 72610 - protein, 10 aa, synthetic construct
AEYRGDYSSV

SEQ ID NO: 72611 - protein, 10 aa, synthetic construct
AEYRGDYTSV

SEQ ID NO: 72612 - protein, 10 aa, synthetic construct
AEYRGDQSTL

SEQ ID NO: 72613 - protein, 10 aa, synthetic construct
AENRGDRDYL

SEQ ID NO: 72614 - protein, 10 aa, synthetic construct
AENRGDYVGL

SEQ ID NO: 72615 - protein, 10 aa, synthetic construct
AENRGDYSSV

SEQ ID NO: 72616 - protein, 10 aa, synthetic construct
AWSRGDRGQI

SEQ ID NO: 72617 - protein, 10 aa, synthetic construct
AENRGDYTSV

SEQ ID NO: 72618 - protein, 10 aa, synthetic construct
AENRGDQSTL

SEQ ID NO: 72619 - protein, 10 aa, synthetic construct
AEQRGDHVNL

SEQ ID NO: 72620 - protein, 10 aa, synthetic construct
AEQRGDYNSL

SEQ ID NO: 72621 - protein, 10 aa, synthetic construct
AEQRGDYSSV

SEQ ID NO: 72622 - protein, 10 aa, synthetic construct
AEQRGDYTSV

SEQ ID NO: 72623 - protein, 10 aa, synthetic construct
AEQRGDYTSM

SEQ ID NO: 72624 - protein, 10 aa, synthetic construct
AEDRGDHVNL

SEQ ID NO: 72625 - protein, 10 aa, synthetic construct
AEDRGDYNSL

SEQ ID NO: 72626 - protein, 10 aa, synthetic construct
AEDRGDYSSV

SEQ ID NO: 72627 - protein, 10 aa, synthetic construct
TSPRGDYSSV

SEQ ID NO: 72628 - protein, 10 aa, synthetic construct
AWSRGDRQGI

SEQ ID NO: 72629 - protein, 10 aa, synthetic construct
AEDRGDYTSV

SEQ ID NO: 72630 - protein, 10 aa, synthetic construct
AEDRGDYTSM

SEQ ID NO: 72631 - protein, 10 aa, synthetic construct
AEERGDHVNL

SEQ ID NO: 72632 - protein, 10 aa, synthetic construct
AEERGDYNSL

SEQ ID NO: 72633 - protein, 10 aa, synthetic construct
AEERGDYSSV

SEQ ID NO: 72634 - protein, 10 aa, synthetic construct
AEERGDYTSV

SEQ ID NO: 72635 - protein, 10 aa, synthetic construct
AEERGDYTSM

SEQ ID NO: 72636 - protein, 10 aa, synthetic construct
EGGRGDYNSL

SEQ ID NO: 72637 - protein, 10 aa, synthetic construct
EGGRGDFNNT

SEQ ID NO: 72638 - protein, 10 aa, synthetic construct
EGGRGDFNNL

SEQ ID NO: 72639 - protein, 10 aa, synthetic construct
AWSRGDRSVV

SEQ ID NO: 72640 - protein, 10 aa, synthetic construct
EGGRGDFQNT

SEQ ID NO: 72641 - protein, 10 aa, synthetic construct
EGARGDYNSL

SEQ ID NO: 72642 - protein, 10 aa, synthetic construct
EGARGDFNNT

SEQ ID NO: 72643 - protein, 10 aa, synthetic construct
EGARGDFNNL

SEQ ID NO: 72644 - protein, 10 aa, synthetic construct
EGARGDFQNT

SEQ ID NO: 72645 - protein, 10 aa, synthetic construct
EGVRGDYNSL

SEQ ID NO: 72646 - protein, 10 aa, synthetic construct
EGVRGDYTSV

SEQ ID NO: 72647 - protein, 10 aa, synthetic construct
EGVRGDYTSM

SEQ ID NO: 72648 - protein, 10 aa, synthetic construct
EGVRGDFQNT

SEQ ID NO: 72649 - protein, 10 aa, synthetic construct
EGPRGDYNSL

SEQ ID NO: 72650 - protein, 10 aa, synthetic construct
AWSRGDLTVT

SEQ ID NO: 72651 - protein, 10 aa, synthetic construct
EGPRGDFNNT

SEQ ID NO: 72652 - protein, 10 aa, synthetic construct
EGPRGDFNNL

SEQ ID NO: 72653 - protein, 10 aa, synthetic construct
EGPRGDFQNT

SEQ ID NO: 72654 - protein, 10 aa, synthetic construct
EGLRGDYNSL

SEQ ID NO: 72655 - protein, 10 aa, synthetic construct
EGLRGDYTSV

SEQ ID NO: 72656 - protein, 10 aa, synthetic construct
EGLRGDYTSM

SEQ ID NO: 72657 - protein, 10 aa, synthetic construct
EGLRGDFQNT

SEQ ID NO: 72658 - protein, 10 aa, synthetic construct
EGIRGDRDYL

SEQ ID NO: 72659 - protein, 10 aa, synthetic construct
EGIRGDYTSV

SEQ ID NO: 72660 - protein, 10 aa, synthetic construct
EGIRGDLTVT

SEQ ID NO: 72661 - protein, 10 aa, synthetic construct
AWSRGDLIGR

SEQ ID NO: 72662 - protein, 10 aa, synthetic construct
EGIRGDLIGR

SEQ ID NO: 72663 - protein, 10 aa, synthetic construct
EGMRGDRDYL

SEQ ID NO: 72664 - protein, 10 aa, synthetic construct
EGMRGDYTSV

SEQ ID NO: 72665 - protein, 10 aa, synthetic construct
EGMRGDLTVT

SEQ ID NO: 72666 - protein, 10 aa, synthetic construct
EGMRGDLIGR

SEQ ID NO: 72667 - protein, 10 aa, synthetic construct
EGWRGDYNSL

SEQ ID NO: 72668 - protein, 10 aa, synthetic construct
EGWRGDYTSV

SEQ ID NO: 72669 - protein, 10 aa, synthetic construct
EGWRGDYTSM

SEQ ID NO: 72670 - protein, 10 aa, synthetic construct
EGWRGDFQNT

SEQ ID NO: 72671 - protein, 10 aa, synthetic construct
EGFRGDRDYL

SEQ ID NO: 72672 - protein, 10 aa, synthetic construct
AWSRGDRSQT

SEQ ID NO: 72673 - protein, 10 aa, synthetic construct
EGFRGDYTSV

SEQ ID NO: 72674 - protein, 10 aa, synthetic construct
EGFRGDLTVT

SEQ ID NO: 72675 - protein, 10 aa, synthetic construct
EGFRGDLIGR

SEQ ID NO: 72676 - protein, 10 aa, synthetic construct
EGKRGDRDYL

SEQ ID NO: 72677 - protein, 10 aa, synthetic construct
EGKRGDYTSV

SEQ ID NO: 72678 - protein, 10 aa, synthetic construct
EGKRGDLTVT

SEQ ID NO: 72679 - protein, 10 aa, synthetic construct
EGKRGDLIGR

SEQ ID NO: 72680 - protein, 10 aa, synthetic construct
EGRRGDYNSL

SEQ ID NO: 72681 - protein, 10 aa, synthetic construct
EGRRGDFNNT

SEQ ID NO: 72682 - protein, 10 aa, synthetic construct
EGRRGDFNNL

SEQ ID NO: 72683 - protein, 10 aa, synthetic construct
AWSRGDLLLS

SEQ ID NO: 72684 - protein, 10 aa, synthetic construct
EGRRGDFQNT

SEQ ID NO: 72685 - protein, 10 aa, synthetic construct
EGHRGDYNSL

SEQ ID NO: 72686 - protein, 10 aa, synthetic construct
EGHRGDYTSV

SEQ ID NO: 72687 - protein, 10 aa, synthetic construct
EGHRGDYTSM

SEQ ID NO: 72688 - protein, 10 aa, synthetic construct
EGHRGDFQNT

SEQ ID NO: 72689 - protein, 10 aa, synthetic construct
EGSRGDYNSL

SEQ ID NO: 72690 - protein, 10 aa, synthetic construct
EGSRGDYTSV

SEQ ID NO: 72691 - protein, 10 aa, synthetic construct
EGSRGDYTSM

SEQ ID NO: 72692 - protein, 10 aa, synthetic construct
EGSRGDFQNT

SEQ ID NO: 72693 - protein, 10 aa, synthetic construct
EGTRGDYNSL

SEQ ID NO: 72694 - protein, 10 aa, synthetic construct
AWTRGDRGVV

SEQ ID NO: 72695 - protein, 10 aa, synthetic construct
EGTRGDYTSV

SEQ ID NO: 72696 - protein, 10 aa, synthetic construct
EGTRGDYTSM

SEQ ID NO: 72697 - protein, 10 aa, synthetic construct
EGTRGDFQNT

SEQ ID NO: 72698 - protein, 10 aa, synthetic construct
EGYRGDRDYL

SEQ ID NO: 72699 - protein, 10 aa, synthetic construct
EGYRGDYTSV

SEQ ID NO: 72700 - protein, 10 aa, synthetic construct
EGYRGDLTVT

SEQ ID NO: 72701 - protein, 10 aa, synthetic construct
EGYRGDLIGR

SEQ ID NO: 72702 - protein, 10 aa, synthetic construct
EGNRGDRDYL

SEQ ID NO: 72703 - protein, 10 aa, synthetic construct
EGNRGDYTSV

SEQ ID NO: 72704 - protein, 10 aa, synthetic construct
EGNRGDLTVT

SEQ ID NO: 72705 - protein, 10 aa, synthetic construct
AWQRGDRGVV

SEQ ID NO: 72706 - protein, 10 aa, synthetic construct
EGNRGDLIGR

SEQ ID NO: 72707 - protein, 10 aa, synthetic construct
EGQRGDYNSL

SEQ ID NO: 72708 - protein, 10 aa, synthetic construct
EGQRGDYTSV

SEQ ID NO: 72709 - protein, 10 aa, synthetic construct
EGQRGDYTSM

SEQ ID NO: 72710 - protein, 10 aa, synthetic construct
EGQRGDFQNT

SEQ ID NO: 72711 - protein, 10 aa, synthetic construct
EGDRGDYNSL

SEQ ID NO: 72712 - protein, 10 aa, synthetic construct
EGDRGDYTSV

SEQ ID NO: 72713 - protein, 10 aa, synthetic construct
EGDRGDYTSM

SEQ ID NO: 72714 - protein, 10 aa, synthetic construct
EGDRGDFQNT

SEQ ID NO: 72715 - protein, 10 aa, synthetic construct
EGERGDYNSL

SEQ ID NO: 72716 - protein, 10 aa, synthetic construct
AWDRGDRGVV

SEQ ID NO: 72717 - protein, 10 aa, synthetic construct
EGERGDYTSV

SEQ ID NO: 72718 - protein, 10 aa, synthetic construct
EGERGDYTSM

SEQ ID NO: 72719 - protein, 10 aa, synthetic construct
EGERGDFQNT

SEQ ID NO: 72720 - protein, 10 aa, synthetic construct
EAGRGDYNSL

SEQ ID NO: 72721 - protein, 10 aa, synthetic construct
EAGRGDFNNT

SEQ ID NO: 72722 - protein, 10 aa, synthetic construct
EAGRGDFNNL

SEQ ID NO: 72723 - protein, 10 aa, synthetic construct
EAGRGDFQNT

SEQ ID NO: 72724 - protein, 10 aa, synthetic construct
EAARGDYNSL

SEQ ID NO: 72725 - protein, 10 aa, synthetic construct
EAARGDFNNT

SEQ ID NO: 72726 - protein, 10 aa, synthetic construct
EAARGDFNNL

SEQ ID NO: 72727 - protein, 10 aa, synthetic construct
AWERGDRGVV

SEQ ID NO: 72728 - protein, 10 aa, synthetic construct
EAARGDFQNT

SEQ ID NO: 72729 - protein, 10 aa, synthetic construct
EAVRGDYNSL

SEQ ID NO: 72730 - protein, 10 aa, synthetic construct
EAVRGDYTSV

SEQ ID NO: 72731 - protein, 10 aa, synthetic construct
EAVRGDYTSM

SEQ ID NO: 72732 - protein, 10 aa, synthetic construct
EAVRGDFQNT

SEQ ID NO: 72733 - protein, 10 aa, synthetic construct
EAPRGDYNSL

SEQ ID NO: 72734 - protein, 10 aa, synthetic construct
EAPRGDFNNT

SEQ ID NO: 72735 - protein, 10 aa, synthetic construct
EAPRGDFNNL

SEQ ID NO: 72736 - protein, 10 aa, synthetic construct
EAPRGDFQNT

SEQ ID NO: 72737 - protein, 10 aa, synthetic construct
EALRGDYNSL

SEQ ID NO: 72738 - protein, 10 aa, synthetic construct
TSPRGDLTVT

SEQ ID NO: 72739 - protein, 10 aa, synthetic construct
AFGRGDRGVV

SEQ ID NO: 72740 - protein, 10 aa, synthetic construct
EALRGDYTSV

SEQ ID NO: 72741 - protein, 10 aa, synthetic construct
EALRGDYTSM

SEQ ID NO: 72742 - protein, 10 aa, synthetic construct
EALRGDFQNT

SEQ ID NO: 72743 - protein, 10 aa, synthetic construct
EAIRGDRDYL

SEQ ID NO: 72744 - protein, 10 aa, synthetic construct
EAIRGDYTSV

SEQ ID NO: 72745 - protein, 10 aa, synthetic construct
EAIRGDLTVT

SEQ ID NO: 72746 - protein, 10 aa, synthetic construct
EAIRGDLIGR

SEQ ID NO: 72747 - protein, 10 aa, synthetic construct
EAMRGDRDYL

SEQ ID NO: 72748 - protein, 10 aa, synthetic construct
EAMRGDYTSV

SEQ ID NO: 72749 - protein, 10 aa, synthetic construct
EAMRGDLTVT

SEQ ID NO: 72750 - protein, 10 aa, synthetic construct
AFARGDRGVV

SEQ ID NO: 72751 - protein, 10 aa, synthetic construct
EAMRGDLIGR

SEQ ID NO: 72752 - protein, 10 aa, synthetic construct
EAWRGDYNSL

SEQ ID NO: 72753 - protein, 10 aa, synthetic construct
EAWRGDYTSV

SEQ ID NO: 72754 - protein, 10 aa, synthetic construct
EAWRGDYTSM

SEQ ID NO: 72755 - protein, 10 aa, synthetic construct
EAWRGDFQNT

SEQ ID NO: 72756 - protein, 10 aa, synthetic construct
EAFRGDRDYL

SEQ ID NO: 72757 - protein, 10 aa, synthetic construct
EAFRGDYTSV

SEQ ID NO: 72758 - protein, 10 aa, synthetic construct
EAFRGDLTVT

SEQ ID NO: 72759 - protein, 10 aa, synthetic construct
EAFRGDLIGR

SEQ ID NO: 72760 - protein, 10 aa, synthetic construct
EAKRGDRDYL

SEQ ID NO: 72761 - protein, 10 aa, synthetic construct
AFVRGDRGVV

SEQ ID NO: 72762 - protein, 10 aa, synthetic construct
EAKRGDYTSV

SEQ ID NO: 72763 - protein, 10 aa, synthetic construct
EAKRGDLTVT

SEQ ID NO: 72764 - protein, 10 aa, synthetic construct
EAKRGDLIGR

SEQ ID NO: 72765 - protein, 10 aa, synthetic construct
EARRGDYNSL

SEQ ID NO: 72766 - protein, 10 aa, synthetic construct
EARRGDFNNT

SEQ ID NO: 72767 - protein, 10 aa, synthetic construct
EARRGDFNNL

SEQ ID NO: 72768 - protein, 10 aa, synthetic construct
EARRGDFQNT

SEQ ID NO: 72769 - protein, 10 aa, synthetic construct
EAHRGDYNSL

SEQ ID NO: 72770 - protein, 10 aa, synthetic construct
EAHRGDYTSV

SEQ ID NO: 72771 - protein, 10 aa, synthetic construct
EAHRGDYTSM

SEQ ID NO: 72772 - protein, 10 aa, synthetic construct
AFPRGDRGVV

SEQ ID NO: 72773 - protein, 10 aa, synthetic construct
EAHRGDFQNT

SEQ ID NO: 72774 - protein, 10 aa, synthetic construct
EASRGDYNSL

SEQ ID NO: 72775 - protein, 10 aa, synthetic construct
EASRGDYTSV

SEQ ID NO: 72776 - protein, 10 aa, synthetic construct
EASRGDYTSM

SEQ ID NO: 72777 - protein, 10 aa, synthetic construct
EASRGDFQNT

SEQ ID NO: 72778 - protein, 10 aa, synthetic construct
EATRGDYNSL

SEQ ID NO: 72779 - protein, 10 aa, synthetic construct
EATRGDYTSV

SEQ ID NO: 72780 - protein, 10 aa, synthetic construct
EATRGDYTSM

SEQ ID NO: 72781 - protein, 10 aa, synthetic construct
EATRGDFQNT

SEQ ID NO: 72782 - protein, 10 aa, synthetic construct
EAYRGDRDYL
